United States Patent Application Publication US 2025/0084491 A1 - sequence listing, part 3

SEQ ID NO: 38342 - DNA, 75 bp, synthetic construct
  source 1..75: mol_type = other DNA
atgaatattcgccgtaaaaaccgcttgtggattgcctgtgccgtgttggcggggctggcgctgactatcggtctg

SEQ ID NO: 38343 - DNA, 75 bp, synthetic construct
  source 1..75: mol_type = other DNA
ggacagacgcacgctgtaacctcccagcccgcgctgaccgcaaacagcggacgactttcctttgactgggacggc

SEQ ID NO: 38344 - DNA, 75 bp, synthetic construct
  source 1..75: mol_type = other DNA
gagcggtgatgcggatgcggagagggaagccggtgcacaggtgatgcgtgagactgaacagcagatttaccgtca

SEQ ID NO: 38345 - DNA, 75 bp, synthetic construct
  source 1..75: mol_type = other DNA
atattcatgaacgaagtgttcctgaaatatctgacggctcccaccattaccagcggtggcaatcccccaacgttt

SEQ ID NO: 38346 - DNA, 75 bp, synthetic construct
  source 1..75: mol_type = other DNA
gtgccgcgtgctccgggtggcccgcagcggctggtatacgtggtgtcagcggcggacaaggataagcacgcgtca

SEQ ID NO: 38347 - DNA, 75 bp, synthetic construct
  source 1..75: mol_type = other DNA
cagatggcgctgtggcggcgtaagaggccccggaacgttatcgttcacacggaccgtggaggccagtactgttca

SEQ ID NO: 38348 - DNA, 75 bp, synthetic construct
  source 1..75: mol_type = other DNA
actgcgtagtggtggggacaatcaatatggatattcgcgggatggcggatatccgttacccgcaagcggcttctc

SEQ ID NO: 38349 - DNA, 75 bp, synthetic construct
  source 1..75: mol_type = other DNA
ctccgccaataaagggatgccgattctgttgcttaccgcgcttggcaccattgaacatcgcgtcaaggggctgga

SEQ ID NO: 38350 - DNA, 75 bp, synthetic construct
  source 1..75: mol_type = other DNA
agcatttatcggagctggctagtaagatcagcgatggaattcacaaaacaccactgtatgccgatacctctgaaa

SEQ ID NO: 38351 - DNA, 75 bp, synthetic construct
  source 1..75: mol_type = other DNA
acgaaggatgcgatgggaactatccagcgcgtactggagaaggtgaacgcactgccgcaggataagcgcctgtct

SEQ ID NO: 38352 - DNA, 75 bp, synthetic construct
  source 1..75: mol_type = other DNA
gccagcgcagcaaacgccattgctatgggtgcagagagcgaagctgctgaaaatgcgacggctattggcaataac

SEQ ID NO: 38353 - DNA, 75 bp, synthetic construct
  source 1..75: mol_type = other DNA
gtggaatgtcttgaaagctggttacttcgtgaaaaaggctgccagtggcctcattccgactggcacagcgagaac

SEQ ID NO: 38354 - DNA, 75 bp, synthetic construct
  source 1..75: mol_type = other DNA
atcagtcgccagtgaactactgaaacggagactggcgcaaattaagcagcagaacagccagcagcaaacaaccgg

SEQ ID NO: 38355 - DNA, 75 bp, synthetic construct
  source 1..75: mol_type = other DNA
gcggatcaagacaattccgtttctgtcggcagtagctcattacaacgcaagatcgttaatgtaaaaaatggcgcg

SEQ ID NO: 38356 - DNA, 75 bp, synthetic construct
  source 1..75: mol_type = other DNA
tgtaatatctacgttaacttcgccgttgaaccggggcaaaaactgcatgttctgctgcgcccggaagacttacgt

SEQ ID NO: 38357 - DNA, 75 bp, synthetic construct
  source 1..75: mol_type = other DNA
agcgcgtcgaacaggcgctggcgctggtgaaactggctggttacggtcatcgcaagccgcgtgaactctcggggg

SEQ ID NO: 38358 - DNA, 75 bp, synthetic construct
  source 1..75: mol_type = other DNA
cacagctttatacgatcagtgattcagtcgccaagcgactcggaggaggcgctactgtaggcagcgatggcaccg

SEQ ID NO: 38359 - DNA, 75 bp, synthetic construct
  source 1..75: mol_type = other DNA
tctatggggtatatggcgaaagctaatggactatacagcctggcaatgggtgcaggaagtgctacttcgaacgat

SEQ ID NO: 38360 - DNA, 75 bp, synthetic construct
  source 1..75: mol_type = other DNA
aagtcgacctgacggaggataacgccagcagactggatgagttttcgaaagagtggaaggacgctaacgataaat

SEQ ID NO: 38361 - DNA, 75 bp, synthetic construct
  source 1..75: mol_type = other DNA
gatttaacccttacaaaacaatcagggactggcaatcgttttgttttacagaactcaggtaatgcagaactaccg

SEQ ID NO: 38362 - DNA, 75 bp, synthetic construct
  source 1..75: mol_type = other DNA
cccaggatgcaacaacgacccgtaaagggatcgtacaactgagcagtgccaccaacagcacctctgaaacgctgg

SEQ ID NO: 38363 - DNA, 75 bp, synthetic construct
  source 1..75: mol_type = other DNA
gcaaatcagtgtgcgcgggcaggggataaattaccggatttactcgatgaatatatcagagcaacaactgaataa

SEQ ID NO: 38364 - DNA, 75 bp, synthetic construct
  source 1..75: mol_type = other DNA
cgcccaatggggcagttttctgtagatagtttatacaatcctgatttacatgcattatgtgagcttccggacatt

SEQ ID NO: 38365 - DNA, 75 bp, synthetic construct
  source 1..75: mol_type = other DNA
agttaaaggcagtaaaatctgaaatgattatcgcacgtgaaatgggagaaatctttagctacatgcctggggaaa

SEQ ID NO: 38366 - DNA, 75 bp, synthetic construct
  source 1..75: mol_type = other DNA
gcttaagctacacgtatcagtatgagaaagaccacatcaccatcaccgacagcctggaccgccgtgaagtgctgc

SEQ ID NO: 38367 - DNA, 75 bp, synthetic construct
  source 1..75: mol_type = other DNA
cggggtggtggaagccggcggtatgcgccgtcaggacggtaacattgtactggacggtggcgacagtggtgtggt

SEQ ID NO: 38368 - DNA, 75 bp, synthetic construct
  source 1..75: mol_type = other DNA
ttctggatcaattacgtgcgcaaggtattcaggatgagcaggtgctgaatgcacttgccgccgtgccgcgtgaaa

SEQ ID NO: 38369 - DNA, 75 bp, synthetic construct
  source 1..75: mol_type = other DNA
cgggaaatttttgagcgcggtcacgccgcagtcttgctaccctttgacccagtgcgtgatgaagttgtgctgatt

SEQ ID NO: 38370 - DNA, 75 bp, synthetic construct
  source 1..75: mol_type = other DNA
atgatggacaagcgcagaaccattgcctttaagctaaatccagatgtaaatcaaacagataaaattgtttgtgat

SEQ ID NO: 38371 - DNA, 75 bp, synthetic construct
  source 1..75: mol_type = other DNA
gattggcgataagtttgctcaacgtcttctcgggcataaatcagattcaatggcggcgcggtatagggacagccg

SEQ ID NO: 38372 - DNA, 75 bp, synthetic construct
  source 1..75: mol_type = other DNA
tcagccgttccgtcatttgcatgccattgcatacaattcgcaatactctaatttgtagtaataagcatccgcgaa

SEQ ID NO: 38373 - DNA, 75 bp, synthetic construct
  source 1..75: mol_type = other DNA
tgccgggagtggagcgtcacggataacgcccggtacagtgatttcagctgtacgattgagcaggtggtgaactga

SEQ ID NO: 38374 - DNA, 75 bp, synthetic construct
  source 1..75: mol_type = other DNA
attttacaaaggcgagaaatgcatctggactctcatttgatggagacccgccaacattccatgaactgcgtagcc

SEQ ID NO: 38375 - DNA, 75 bp, synthetic construct
  source 1..75: mol_type = other DNA
ataacgatttaggcctgaatatcatctatttcctgcaacatggtcactggagggtaaatgaacatagtcttcaga

SEQ ID NO: 38376 - DNA, 75 bp, synthetic construct
  source 1..75: mol_type = other DNA
gtcgctgccggaatgatttcgcaccggacagcttgtcaccgttctaggcaacatgacagacctgcgcattcctat

SEQ ID NO: 38377 - DNA, 75 bp, synthetic construct
  source 1..75: mol_type = other DNA
tacctaaagctatggccgtggctgaccgggtatgggtatttgataacagttataacagacggcgattacttttcc

SEQ ID NO: 38378 - DNA, 75 bp, synthetic construct
  source 1..75: mol_type = other DNA
gaaggtgtttgcactggatgtggctgcacggcaccgggtgcagtttgcgatgccggaatctgatgcggttgtgat

SEQ ID NO: 38379 - DNA, 75 bp, synthetic construct
  source 1..75: mol_type = other DNA
ctggggtatggctcggtatttaacagtcgttcagaacctctgtggggatttcgtgaaatcatcaagccgggggct

SEQ ID NO: 38380 - DNA, 75 bp, synthetic construct
  source 1..75: mol_type = other DNA
tcgacggaaaatgcgccatcatcacaggtgcgggtgcaggtattggtaaagaaatcgccattacattcgcgacag

SEQ ID NO: 38381 - DNA, 75 bp, synthetic construct
  source 1..75: mol_type = other DNA
atgcgagaagataaactaaagtatttacttgaaatttatagagaaaatgaaagaaagataaaagagctggaacaa

SEQ ID NO: 38382 - DNA, 75 bp, synthetic construct
  source 1..75: mol_type = other DNA
tcactatctggtgcagcaaattcaccaggtagtgcaggagttgcaccagggggtagtgcaggagattcacccaga

SEQ ID NO: 38383 - DNA, 75 bp, synthetic construct
  source 1..75: mol_type = other DNA
atgcttcttgatgctctgtttcgcagtgagcctctggaaaatccctcggttccggtaaccggagaggccgctgag

SEQ ID NO: 38384 - DNA, 75 bp, synthetic construct
  source 1..75: mol_type = other DNA
tggttcaggcgaatggcggaagagctgaatgcggaagggatcatttctcagcttgatgcgcgtgcactcgagttg

SEQ ID NO: 38385 - DNA, 75 bp, synthetic construct
  source 1..75: mol_type = other DNA
actcaggatggcccggtgctggatgatattactgccggacaatcgggaaccttgtcagatgatgatcgtggcggt

SEQ ID NO: 38386 - DNA, 75 bp, synthetic construct
  source 1..75: mol_type = other DNA
cacgcaatcagcggtacgcaggagagggagttatcgctggccgaattatcctggtgggcggtctgcaatcaggtg

SEQ ID NO: 38387 - DNA, 75 bp, synthetic construct
  source 1..75: mol_type = other DNA
ccgcgcagcggcgcggctggcgtcacggctgggtagcgtctggcacgcggtgtatgttgaaacccctgccctgca

SEQ ID NO: 38388 - DNA, 75 bp, synthetic construct
  source 1..75: mol_type = other DNA
gtcgtctggcaatggtcaccagcatcgttctcttctcggccgggacgctggcctgcggctttgcgccaggctaca

SEQ ID NO: 38389 - DNA, 75 bp, synthetic construct
  source 1..75: mol_type = other DNA
gctgaacctggtgtttggtgtcatggtagtgcgtgcgcgcggtaatgtttcaaaaatttttgctttcctgagtgg

SEQ ID NO: 38390 - DNA, 75 bp, synthetic construct
  source 1..75: mol_type = other DNA
ggcgtgtttgccgtctatgagacgaaacgcgccgtgggtgctgacagtaacgtcatgatccgtgagaaaaccggt

SEQ ID NO: 38391 - DNA, 75 bp, synthetic construct
  source 1..75: mol_type = other DNA
tgtggttgattttgctgccgatacccagatcccgggggataccgatggtgatggtgcaacagatgcaacaccggt

SEQ ID NO: 38392 - DNA, 75 bp, synthetic construct
  source 1..75: mol_type = other DNA
gtaatacatcaggtacaggcgtctgggaagatattgccggacgtaagggaaatatagaaacggtcgcagcaatcc

SEQ ID NO: 38393 - DNA, 75 bp, synthetic construct
  source 1..75: mol_type = other DNA
cgttgaacaggcgcaggaagtgatggctgcggcaccgttgcagtatgttggcgtgttccgcaatcacgatattgc

SEQ ID NO: 38394 - DNA, 75 bp, synthetic construct
  source 1..75: mol_type = other DNA
aaacatagagatggctatagcagatataaaaaaggagtactattcgcatacagttgatattgagaaaaatattca

SEQ ID NO: 38395 - DNA, 75 bp, synthetic construct
  source 1..75: mol_type = other DNA
tgccgtgagtggagtgtcacggataatgcccggtacagtgatttcagttgcacgatagagcaggtggtgaactga

SEQ ID NO: 38396 - DNA, 75 bp, synthetic construct
  source 1..75: mol_type = other DNA
tggcacctattttatggctatggctatgtagtagcacaagatcgcctttttcagatggaaatggcacgtcgcagt

SEQ ID NO: 38397 - DNA, 75 bp, synthetic construct
  source 1..75: mol_type = other DNA
ctggtcagggagggagtcagactggcgcgagtggcagcagcaggacatcgcagacatcagagccacaggaagaaa

SEQ ID NO: 38398 - DNA, 75 bp, synthetic construct
  source 1..75: mol_type = other DNA
tgacccaactgaaactcccggcgatggccgggagcctgatacggcagcgggaaacgcctcagacctacgacgaac

SEQ ID NO: 38399 - DNA, 75 bp, synthetic construct
  source 1..75: mol_type = other DNA
tgagaaaaaatgccggcctgaaataccaggcaacaccggaagggctgcgctatccggcctcaagaggtctgcggg

SEQ ID NO: 38400 - DNA, 75 bp, synthetic construct
  source 1..75: mol_type = other DNA
ctcccgtttgcctgctgatggcaaaattgacaccgtgaaattcgaacagttaaaaccggtgtttgaaaccatgct

SEQ ID NO: 38401 - DNA, 75 bp, synthetic construct
  source 1..75: mol_type = other DNA
atttagttgatgatgcgaatcagtcaaagctggaaagtaaacccgttcatgatatcggtgatatcaggaacaaaa

SEQ ID NO: 38402 - DNA, 75 bp, synthetic construct
  source 1..75: mol_type = other DNA
ccggtgcctggatactggcccgccattttcaacgctgcggcgttaactgggaatgcctgggcagctataacgccg

SEQ ID NO: 38403 - DNA, 75 bp, synthetic construct
  source 1..75: mol_type = other DNA
ccggcggctgaagtaaagatcgatttacagcgccgtttagctagtggggaacgttacgttacaaccgagagttgt

SEQ ID NO: 38404 - DNA, 75 bp, synthetic construct
  source 1..75: mol_type = other DNA
cgtggtctggtaaacataccatttgacgtattgcagggtggcgcaagtctgattaatgcaatcagccaggggctt

SEQ ID NO: 38405 - DNA, 75 bp, synthetic construct
  source 1..75: mol_type = other DNA
tgcgtgaggcggcagtgaaagcaacgtggggagactgggactcatataaaccacaccgtggcgcacgtggttatg

SEQ ID NO: 38406 - DNA, 75 bp, synthetic construct
  source 1..75: mol_type = other DNA
gcctcgttgctgatgcaaaaccggcgagccgccatctgacgggactggctatcagtttaagtacaaccggcaaca

SEQ ID NO: 38407 - DNA, 75 bp, synthetic construct
  source 1..75: mol_type = other DNA
gtctttttttatatatttttggaactaaggttgtaccagcctttgaacaggttttgccatttacagaatggcaag

SEQ ID NO: 38408 - DNA, 75 bp, synthetic construct
  source 1..75: mol_type = other DNA
tttttcagagcctggggaaggcatttatgtatcccatcgctctgttaagtgtatgtggtatgatgttagggctgg

SEQ ID NO: 38409 - DNA, 75 bp, synthetic construct
  source 1..75: mol_type = other DNA
tctcaaaaacgccaaaccagacagcaagttgccggatgacgccatgatctggctaaataatgaaggacttaccag

SEQ ID NO: 38410 - DNA, 75 bp, synthetic construct
  source 1..75: mol_type = other DNA
ctattacgttgggtggtaatacttatacggcgacggtgggcagcaatctcacctggagcgtggacgttccagcgg

SEQ ID NO: 38411 - DNA, 75 bp, synthetic construct
  source 1..75: mol_type = other DNA
catcgtgtttgatccgaaaggcgacgcagacctgatgaaacgcgtctgggcagaggcccaccgggccgggcgcgg

SEQ ID NO: 38412 - DNA, 75 bp, synthetic construct
  source 1..75: mol_type = other DNA
tggcaggctctgatttgtatgtattcaggccggtggcgcataaagtggattttcatatccgcgtgacgccggaca

SEQ ID NO: 38413 - DNA, 75 bp, synthetic construct
  source 1..75: mol_type = other DNA
tggtaatcgatatcgaaagcaatggctcaccacatcataacccatcaaattatgttgatacctttgatataatcc

SEQ ID NO: 38414 - DNA, 75 bp, synthetic construct
  source 1..75: mol_type = other DNA
tggtaccacccgtgtcggtaaaacccggctggcagagctgctggtcacacaggatatccgccggggagaggtcac

SEQ ID NO: 38415 - DNA, 75 bp, synthetic construct
  source 1..75: mol_type = other DNA
ataatgttgccgccctgcgtcagggcacatcaggtgcgaaaattcagaccagtactgaaacaggtaaccagcata

SEQ ID NO: 38416 - DNA, 75 bp, synthetic construct
  source 1..75: mol_type = other DNA
gatgtatcatccacaggctcaattgagccggaaagtggaaacctctctggacgcgtgacggatcaggacggcaac

SEQ ID NO: 38417 - DNA, 75 bp, synthetic construct
  source 1..75: mol_type = other DNA
tacggtttatataccgcagctgttgcggggattgtcattgctctgacgggggggtcacgctttagcgtttccggt

SEQ ID NO: 38418 - DNA, 75 bp, synthetic construct
  source 1..75: mol_type = other DNA
attttttccacaatgcgttagcaccgtttcacaaataccgacaaaatgctttgctggatgccaccatcgctctca

SEQ ID NO: 38419 - DNA, 75 bp, synthetic construct
  source 1..75: mol_type = other DNA
taacaaacatatcatcaacaataagaaatcaccttctaacatcatccaaaaatataaaaacacacccatcaccaa

SEQ ID NO: 38420 - DNA, 75 bp, synthetic construct
  source 1..75: mol_type = other DNA
aatctgggggggatccgtcagtaaatacaactactgatccatcagttaaaaaaccttcttgtccggttgcgccgc

SEQ ID NO: 38421 - DNA, 75 bp, synthetic construct
  source 1..75: mol_type = other DNA
cggacagggcgtttatcgcagaacctgcccggcgtaacgctactgcagtgcataagaccggaggcagcgttcgca

SEQ ID NO: 38422 - DNA, 75 bp, synthetic construct
  source 1..75: mol_type = other DNA
tcccaaatgtggatttcgtcctcttggtggtgatgacgtggcgacagatcgcgatcgtaagctttcacgcgtcaa

SEQ ID NO: 38423 - DNA, 75 bp, synthetic construct
  source 1..75: mol_type = other DNA
ttcactagggggtagtgcaaataattcactatctggtgcagcaaattcaccaggtagtgcaggagttgcactagg

SEQ ID NO: 38424 - DNA, 75 bp, synthetic construct
  source 1..75: mol_type = other DNA
cgcttttgccagcattagcgtctttcataccgcttcatgctcatgcctcgtctacttctgaagatgaaatgattg

SEQ ID NO: 38425 - DNA, 75 bp, synthetic construct
  source 1..75: mol_type = other DNA
atgacgacagtgattattgagccaaaaaaagagccgcaggacgtgccgggcgtggtcattccgccaccgggcgtg

SEQ ID NO: 38426 - DNA, 75 bp, synthetic construct
  source 1..75: mol_type = other DNA
cagcattttcttctgaaatgtatcccagactggcaatggcttaccccaccaataaattaccagacttacgcggtg

SEQ ID NO: 38427 - DNA, 75 bp, synthetic construct
  source 1..75: mol_type = other DNA
atgggcgaccgtggtgtcgccattcgtttccccacaggaggcatcatagtggttccgggattaaaccgtctccgg

SEQ ID NO: 38428 - DNA, 75 bp, synthetic construct
  source 1..75: mol_type = other DNA
atgaaacaggcaaccagaaaaccgacgaccgtaggtgatatcctgctgtacgaatacctggagccgttagagctg

SEQ ID NO: 38429 - DNA, 75 bp, synthetic construct
  source 1..75: mol_type = other DNA
aaccctccaccaaagaaagcacaaccctccggactgacggttttgtgcgcaacattcattcccgaaacccattcg

SEQ ID NO: 38430 - DNA, 75 bp, synthetic construct
  source 1..75: mol_type = other DNA
gtgatggactctgggagaaaatggctccactcatcccggagcataaaactcaacacccgctgggtacgcaccgca

SEQ ID NO: 38431 - DNA, 75 bp, synthetic construct
  source 1..75: mol_type = other DNA
tgtatgatgtgtttcggatcgctggttatcgcctgcctcccaggttatgaaactataggtacgtgggctccggca

SEQ ID NO: 38432 - DNA, 75 bp, synthetic construct
  source 1..75: mol_type = other DNA
cggtgctgcgggatgcattacgagctgtatcaggcccatctgctgggtggtgcgctggattatctggatgcgctg

SEQ ID NO: 38433 - DNA, 75 bp, synthetic construct
  source 1..75: mol_type = other DNA
tggttgcactggtcagttccactctggccctttcagggtgtggtgcgatgagcacagcaatcaagaagcgtaacc

SEQ ID NO: 38434 - DNA, 75 bp, synthetic construct
  source 1..75: mol_type = other DNA
gacgaacttccgggaaaaaatgacggaatgaaagcgtctgctggcgggagtgaggttaaggctgagaaacttccc

SEQ ID NO: 38435 - DNA, 75 bp, synthetic construct
  source 1..75: mol_type = other DNA
tgggcgatggcggtggagcattgccgacgccggacgcaaagcagactgcactggtaaatgagaaacgccgggctg

SEQ ID NO: 38436 - DNA, 75 bp, synthetic construct
  source 1..75: mol_type = other DNA
atgaccactattaccgacaaagagctaattaaagaaattaaagaacatatcagcagtctgggggtgcgggacaat

SEQ ID NO: 38437 - DNA, 75 bp, synthetic construct
  source 1..75: mol_type = other DNA
tcatgctgacccgctggagtttgagaaaaagtacggctcccaggttgagttaatttttcattttcttgatcacgc

SEQ ID NO: 38438 - DNA, 75 bp, synthetic construct
  source 1..75: mol_type = other DNA
agagctgccgcacagatggagcgatcggttggccagtcggtcagcgataccataaatcagtttaagcggctgaag

SEQ ID NO: 38439 - DNA, 75 bp, synthetic construct
  source 1..75: mol_type = other DNA
acctcaatgcgctgggtagtacgctgcaaaccttgtctgactggtggaagcagttctgggatgcggccatgaata

SEQ ID NO: 38440 - DNA, 75 bp, synthetic construct
  source 1..75: mol_type = other DNA
taaccaaaagctgggatggcaaaacccaggtcattaaaccgctgacccttgatgtggcggatggcgaatttatcg

SEQ ID NO: 38441 - DNA, 75 bp, synthetic construct
  source 1..75: mol_type = other DNA
caggcaaaaatcacggtctcggcagtattgaccagaaactggcagaaactattgcagcagaagcgaacagccgtc

SEQ ID NO: 38442 - DNA, 75 bp, synthetic construct
  source 1..75: mol_type = other DNA
atgccccgaatattaatgcgattgctgatgctgtatgtcagataccgaaattacaagaagtattaaaaaggaatg

SEQ ID NO: 38443 - DNA, 75 bp, synthetic construct
  source 1..75: mol_type = other DNA
gcgcctgatggcgcggcagtctcctcttctgccgccacctctgcggcctgtttcccgctgtggactttccggggg

SEQ ID NO: 38444 - DNA, 75 bp, synthetic construct
  source 1..75: mol_type = other DNA
tgaattctggttttctgaaacgaagatttcagatgtctcacaggtggacaaatctgcccgctatcttggtacggc

SEQ ID NO: 38445 - DNA, 75 bp, synthetic construct
  source 1..75: mol_type = other DNA
gctacgccgaacgtgttgttgcaggagaaattgttgctggcgaatttgtccgtctggcctgccagcgttttcttg

SEQ ID NO: 38446 - DNA, 75 bp, synthetic construct
  source 1..75: mol_type = other DNA
ggccaaccagttttattctgtcatggagcgcctcaagatgctcgacacactgcaggccacgcaactgcagtcggc

SEQ ID NO: 38447 - DNA, 75 bp, synthetic construct
  source 1..75: mol_type = other DNA
taaccgcctggacggaacgcgaagcgcgtagccgttgcccgtccggttgtgttgctgtatttgccgcccgtattc

SEQ ID NO: 38448 - DNA, 75 bp, synthetic construct
  source 1..75: mol_type = other DNA
ggtcgcggatattgcgaaaaacacggtaaatatcgtacgcatatactggtgtggatcgatcgtaatggcgaggac

SEQ ID NO: 38449 - DNA, 75 bp, synthetic construct
  source 1..75: mol_type = other DNA
aaaccaggaaaaaacccgtttaaccttcgccggtttgaaatataacgagttaggatcatttgactatggccgtaa

SEQ ID NO: 38450 - DNA, 75 bp, synthetic construct
  source 1..75: mol_type = other DNA
gcggatcagagaactgattgaatggcacgataaacatgccccattatcagatctccccgatgatataaaactaca

SEQ ID NO: 38451 - DNA, 75 bp, synthetic construct
  source 1..75: mol_type = other DNA
accacggtaaatggcggactgttcaccgccaggggcggcacactggcgggcaccaccacgctgaataacggcgcc

SEQ ID NO: 38452 - DNA, 75 bp, synthetic construct
  source 1..75: mol_type = other DNA
gtgtcttaccaacactcccccacaacagaagacccgatgaacatatggtatatcgttggcaccatatgtctgctc

SEQ ID NO: 38453 - DNA, 75 bp, synthetic construct
  source 1..75: mol_type = other DNA
aaggccagaagaataaactatgttctgggggcggtcagcattgccagtttctgcatcacgctgttccagagcctg

SEQ ID NO: 38454 - DNA, 75 bp, synthetic construct
  source 1..75: mol_type = other DNA
ccgaagatccaatggctatatggtatatcgtcggtgccatatgcctgctctttgcgattatcatctggcgctttt

SEQ ID NO: 38455 - DNA, 75 bp, synthetic construct
  source 1..75: mol_type = other DNA
ggaaggcaaagaaaattgatttcacgctcaacctgaaacgggtaagcgaggacatacgggaaaagctggctgaaa

SEQ ID NO: 38456 - DNA, 75 bp, synthetic construct
  source 1..75: mol_type = other DNA
cggatgaacgaaacggaagcggcacgacatcagcgtgaaattgcgcgtattaatgccatgcagtacgcagatcag

SEQ ID NO: 38457 - DNA, 75 bp, synthetic construct
  source 1..75: mol_type = other DNA
ctggcgcgggcgttaaaggtgaatttgagcagcgactgaaaaacgtgattgatgcagtacagaaatcaccggagc

SEQ ID NO: 38458 - DNA, 75 bp, synthetic construct
  source 1..75: mol_type = other DNA
cagtactgctgcaactgtcatcggcacaaaccgtctggggaatttcacggtggaaaacggtaaggctgacggtgt

SEQ ID NO: 38459 - DNA, 75 bp, synthetic construct
  source 1..75: mol_type = other DNA
gttaacgcaggggagatttactttgacaatcagacaacaccggatgccgtactgagccgtgctgttgcaaaaggc

SEQ ID NO: 38460 - DNA, 75 bp, synthetic construct
  source 1..75: mol_type = other DNA
gaaaggaaagctgcaggtgaatgccggcggtaaagcgtctgatgtcacccagaacacgggcggtgcactggttac

SEQ ID NO: 38461 - DNA, 75 bp, synthetic construct
  source 1..75: mol_type = other DNA
ttctttctgccgcagtggcgggattgtttctggcgggtaatgcatcggcgcaagtgaaagcagcatcaacatcaa

SEQ ID NO: 38462 - DNA, 75 bp, synthetic construct
  source 1..75: mol_type = other DNA
gatggacacaatggcagaagcacatatgtgggcggtggacaaaccgctgaacccgtcgctggcccgcgacattat

SEQ ID NO: 38463 - DNA, 75 bp, synthetic construct
  source 1..75: mol_type = other DNA
atgaacaaagaaaatgtgattaccctggacaatccggtcaaacgtggtgagcaggttatcgaacaggtcacgctg

SEQ ID NO: 38464 - DNA, 75 bp, synthetic construct
  source 1..75: mol_type = other DNA
actgcatcagctaacagtcaaaaagcagcaaaaaccagtgaaaccaacgcaaaggtgagcgaaacagcggctgcg

SEQ ID NO: 38465 - DNA, 75 bp, synthetic construct
  source 1..75: mol_type = other DNA
cggcagcgaagaccagcgaaacgaatgccaaagccagtgaaactgcggcgaaaagcagtcaggatgcagcggccc

SEQ ID NO: 38466 - DNA, 75 bp, synthetic construct
  source 1..75: mol_type = other DNA
atgctttcacgctcggatttactgacgctgttgacaatcaactttattgtcgtcaccaaaggggccgagcgtatt

SEQ ID NO: 38467 - DNA, 75 bp, synthetic construct
  source 1..75: mol_type = other DNA
tttgtccaggggaacaggctgcaggccggggcctttaactactccctcaaccgggacagtgatgagagctggtat

SEQ ID NO: 38468 - DNA, 75 bp, synthetic construct
  source 1..75: mol_type = other DNA
tgcgaaaaaatcgccctggacaaatgcatccaccacagtggaatacgaccagcagcgccttgatgaacttcagga

SEQ ID NO: 38469 - DNA, 75 bp, synthetic construct
  source 1..75: mol_type = other DNA
cctggtgaacgccggcaacagtgcgtcggggctggcgaccagcggtaagggtattcaggtggttgaagccattaa

SEQ ID NO: 38470 - DNA, 75 bp, synthetic construct
  source 1..75: mol_type = other DNA
tcatcttaataatgaaaagatgatgacaacagatattaaagctttttttccatcaactacaagagggatgatatt

SEQ ID NO: 38471 - DNA, 75 bp, synthetic construct
  source 1..75: mol_type = other DNA
tcagtatcagccgcgtatctgcacagtcgcttgaagccgcgattgctgacgggatgattgacgtactggaggggc

SEQ ID NO: 38472 - DNA, 75 bp, synthetic construct
  source 1..75: mol_type = other DNA
ttctatcgctgcgactgcggcaaacggtggctatttaacctctgccagcgaactcgattgctgggacaacgtgcc

SEQ ID NO: 38473 - DNA, 75 bp, synthetic construct
  source 1..75: mol_type = other DNA
acggcgtattaatcgcatccagagaaactaaaggggccattcccggtagttacagtgcagttattgatatgccta

SEQ ID NO: 38474 - DNA, 75 bp, synthetic construct
  source 1..75: mol_type = other DNA
tgcaggtgatggtgtcagaaacaaaagtggcttccatcgccgggattcaaaactttggcagttttgtttttgctt

SEQ ID NO: 38475 - DNA, 75 bp, synthetic construct
  source 1..75: mol_type = other DNA
ccggccgagtatcgggaagaactgatcgcggtagcgcggcgtgaatttgactatctgacccaagacgagatcgcg

SEQ ID NO: 38476 - DNA, 75 bp, synthetic construct
  source 1..75: mol_type = other DNA
ttacagtcaccatcagcgatgatcataactttgaccgccagattattattccgcccattatttttaacggtatag

SEQ ID NO: 38477 - DNA, 75 bp, synthetic construct
  source 1..75: mol_type = other DNA
ccgacgcgtcagctgcattcgttatgcagctggtgcatccggaacaagtaccggaccggcgacggctgcgactat

SEQ ID NO: 38478 - DNA, 75 bp, synthetic construct
  source 1..75: mol_type = other DNA
gcggaggcgcggttgcgacctctacgatggcggcggaagaaattaaagagttgtgtcagaatcataatattcctg

SEQ ID NO: 38479 - DNA, 75 bp, synthetic construct
  source 1..75: mol_type = other DNA
gcgatcgagggcgaggccctggacgatgttactgtcatcggtgtagtgacgtttactatctgcgatgtgcgccag

SEQ ID NO: 38480 - DNA, 75 bp, synthetic construct
  source 1..75: mol_type = other DNA
aggacgggcacggcgtggtatttccggctgaactggtggggctgctggacaggctggagggggaaatccgggcaa

SEQ ID NO: 38481 - DNA, 75 bp, synthetic construct
  source 1..75: mol_type = other DNA
gcacatgaaagcgcacatgaagccgcacaaacaaccgcacatcatgaacaagaaggtattaacaagaatataaat

SEQ ID NO: 38482 - DNA, 75 bp, synthetic construct
  source 1..75: mol_type = other DNA
cacatttacttatcctgacgggtctaagaacaggagaactaagagcaggtgagtggcgtgaggtggattttgata

SEQ ID NO: 38483 - DNA, 75 bp, synthetic construct
  source 1..75: mol_type = other DNA
caggggctttggaaatacaggggaatgtattgaggttaaaacaaataaacctttgaacaacgtgatggatacact

SEQ ID NO: 38484 - DNA, 75 bp, synthetic construct
  source 1..75: mol_type = other DNA
tgctttagatcgctatacagggagtcaacttgtcgttattgctacgaagttattgatgatcacgggagtaagaac

SEQ ID NO: 38485 - DNA, 75 bp, synthetic construct
  source 1..75: mol_type = other DNA
ggatcttgccagtgcgatgcaaggacatgaagcagtccactatccattcctcaaagccaacgagctgccggagtt

SEQ ID NO: 38486 - DNA, 75 bp, synthetic construct
  source 1..75: mol_type = other DNA
agcaaataatcgaagaacacattagcggctcagcagcaaccagtgagcgtcctggttttaaccggttgcttgctc

SEQ ID NO: 38487 - DNA, 75 bp, synthetic construct
  source 1..75: mol_type = other DNA
ggccagcatgacgccaccgggggcgataaaaccacctacggcgaagcctatcactatgccgacaacttcctgcaa

SEQ ID NO: 38488 - DNA, 75 bp, synthetic construct
  source 1..75: mol_type = other DNA
gccaaacgtggacggtttcagagcgtatgtcagggcgtttgtgcatcaggccaagccgttttacttcggagacaa

SEQ ID NO: 38489 - DNA, 75 bp, synthetic construct
  source 1..75: mol_type = other DNA
agatgtgcagctaaataatacgtttcaggctgtggcacttgaatggcatggaacgaaggtgagccgatggtcaga

SEQ ID NO: 38490 - DNA, 75 bp, synthetic construct
  source 1..75: mol_type = other DNA
ttgtttctttgacggtcgacggcaaaatcatcgaggggtgggattctgtccgggtaacgcggggtattgagcgtt

SEQ ID NO: 38491 - DNA, 75 bp, synthetic construct
  source 1..75: mol_type = other DNA
gtgatgaagttgcagagaaaattaatgcaatagtggaaaagcgaagggctgaaggggcaaaggaaaaggatgtca

SEQ ID NO: 38492 - DNA, 75 bp, synthetic construct
  source 1..75: mol_type = other DNA
gatttataccaatagcgtgacggctccctatcttattgatatttcagttgatgacagctacagccagaacaacgg

SEQ ID NO: 38493 - DNA, 75 bp, synthetic construct
  source 1..75: mol_type = other DNA
aatttaaatcaatcatactttcgatataaagagactcataggccgggatgtaagattcatgatcctaagagtaaa

SEQ ID NO: 38494 - DNA, 75 bp, synthetic construct
  source 1..75: mol_type = other DNA
agaccatgatcgcgacattaacgcggcacgtaatattaaagctgccgggctggcagtgttagcccacggagagcc

SEQ ID NO: 38495 - DNA, 75 bp, synthetic construct
  source 1..75: mol_type = other DNA
cactcaacgagctgaagaaaaaaacaattcagctgaccagtcaactggctgaagaagagcgcgctcagcgtcagc

SEQ ID NO: 38496 - DNA, 75 bp, synthetic construct
  source 1..75: mol_type = other DNA
atgaaaaccaaagttgctgctatttatggcaagcgggatgtccgtctgcgcgaatttgaactgccagaaattacc

SEQ ID NO: 38497 - DNA, 75 bp, synthetic construct
  source 1..75: mol_type = other DNA
acgcagaaatcaacggcgaatatgagtgggaaaccggtaacgtcatcgtagaaaccttcgaaaaacagggtatcg

SEQ ID NO: 38498 - DNA, 75 bp, synthetic construct
  source 1..75: mol_type = other DNA
gtaatattgccaagagcttaggtgttgatattgctgatctctttacctctgcccacaaaagtaatactgtatata

SEQ ID NO: 38499 - DNA, 75 bp, synthetic construct
  source 1..75: mol_type = other DNA
ctgacggatgtgctggaggccagcggtaaagcaggcgagtccggcacgctggcccgttcgcttgatgcgattgcc

SEQ ID NO: 38500 - DNA, 75 bp, synthetic construct
  source 1..75: mol_type = other DNA
tcgcctctcccggcttctttatactgatgaagatgaagaaacaactacccgtttagggtatcacattaaagactc

SEQ ID NO: 38501 - DNA, 75 bp, synthetic construct
  source 1..75: mol_type = other DNA
aaagccgggcgtggcttgcgcagtgcgggctgacggtggagcaactggccagacaggtggagccggaatacacac

SEQ ID NO: 38502 - DNA, 75 bp, synthetic construct
  source 1..75: mol_type = other DNA
tctcaaaaattttcagtggcaatccttttttaattgaagaagggcaactgggatacatgactcctgccaacaaac

SEQ ID NO: 38503 - DNA, 75 bp, synthetic construct
  source 1..75: mol_type = other DNA
acgatgaatacggcaggctgacggagaagacggaccgcatcccggcgggtgtgatacggacggacgacgagcgga

SEQ ID NO: 38504 - DNA, 75 bp, synthetic construct
  source 1..75: mol_type = other DNA
gcgtataactttcttaagtcactccctgttaccgttagaactcacaacataagcaatgttgaatccatagctaat

SEQ ID NO: 38505 - DNA, 75 bp, synthetic construct
  source 1..75: mol_type = other DNA
gccccgttaacactgccactgttgggcaacttcagaaccactgtctcaccgcattatctcaaggcgcaactgaat

SEQ ID NO: 38506 - DNA, 75 bp, synthetic construct
  source 1..75: mol_type = other DNA
tttttgcgggctaagtttctagagatgtttggaactcctgcaaacaacatacatcgtttcccgaaaggaacgatt

SEQ ID NO: 38507 - DNA, 75 bp, synthetic construct
  source 1..75: mol_type = other DNA
gaccgtcggctggcacaaaaccctgtctaacgtcggcgtgcagggtgttaccggcatcagtgcgtcagtgttttg

SEQ ID NO: 38508 - DNA, 75 bp, synthetic construct
  source 1..75: mol_type = other DNA
gaagcatgggaacgctacagcgttctggtcagtcgtgtggatcctgcaaatcccgaatggccggaaatgccgcaa

SEQ ID NO: 38509 - DNA, 75 bp, synthetic construct
  source 1..75: mol_type = other DNA
gttgtactccacactgaataaggcgccaatgatagattttagcgctgttgatagtggacagacagtagctacgtt

SEQ ID NO: 38510 - DNA, 75 bp, synthetic construct
  source 1..75: mol_type = other DNA
gcggaactggtgaaagaagcggtccagatatatgggggaatccgttctatcatcaatatctttgtgtcccagatg

SEQ ID NO: 38511 - DNA, 75 bp, synthetic construct
  source 1..75: mol_type = other DNA
aaggccgcgttattctgtattgcctgatatattcacacctataaatttagggctatttaaaaactgccaagactg

SEQ ID NO: 38512 - DNA, 75 bp, synthetic construct
  source 1..75: mol_type = other DNA
tatgatttttatccgcagttcagtattccggttcgtacggaactggagttttacgctcgtggaaaagctgattcg

SEQ ID NO: 38513 - DNA, 75 bp, synthetic construct
  source 1..75: mol_type = other DNA
ggaagcgcgtcagcaatctcctgatggctgcgtgatggtattcgccgcccgtattcgtcagggggtgttccatgc

SEQ ID NO: 38514 - DNA, 75 bp, synthetic construct
  source 1..75: mol_type = other DNA
atgaaaattcccgttctccaacctggcttcaacttttttgcccctgctggatactctgctgccgttgctcctaat

SEQ ID NO: 38515 - DNA, 75 bp, synthetic construct
  source 1..75: mol_type = other DNA
ctggcccgctcacggggaaaacgcgccggtgtggcggttgctctgtctcttgctgctgtcatgtcagtcccggca

SEQ ID NO: 38516 - DNA, 75 bp, synthetic construct
  source 1..75: mol_type = other DNA
tgcagaccagcgtttcctgtcgggtgatggagaggaaacatcaaaatataaaggcggtgatggccatgatacggt

SEQ ID NO: 38517 - DNA, 75 bp, synthetic construct
  source 1..75: mol_type = other DNA
agtggcgtctgaaaggattcgatgttcagagtgatagtacagcgcttaaagaaggtcagcgtttgatgaacacta

SEQ ID NO: 38518 - DNA, 75 bp, synthetic construct
  source 1..75: mol_type = other DNA
acgccatatacaaaaccatgaataaaatttactcattaaaatacagtcatgtaaccggtggacttattgtagtat

SEQ ID NO: 38519 - DNA, 75 bp, synthetic construct
  source 1..75: mol_type = other DNA
tacttaccctttccgggaagacggtgaacaacgataccctgaccatccgtgaaggcgatgcactcctgcagggag

SEQ ID NO: 38520 - DNA, 75 bp, synthetic construct
  source 1..75: mol_type = other DNA
agttccctgagcggcccgaaatttttacttggcttctttcccttgataagaagaaaccaccgcacgaagaaacag

SEQ ID NO: 38521 - DNA, 75 bp, synthetic construct
  source 1..75: mol_type = other DNA
tcgcgccttagattcatggatgcgagatgggtatagtgccgcgcaaatttatgacttagcaatatcaaaaggcga

SEQ ID NO: 38522 - DNA, 75 bp, synthetic construct
  source 1..75: mol_type = other DNA
tcccaatcccttgcccggataatccggaaaaatcccttgccatccagtctgaaatcgttcggattctggataaat

SEQ ID NO: 38523 - DNA, 75 bp, synthetic construct
  source 1..75: mol_type = other DNA
atggcttcgtccgtctggagggtgacctgctcagaacagaggttgccggtatgtcactgacgacaggagtgtatg

SEQ ID NO: 38524 - DNA, 75 bp, synthetic construct
  source 1..75: mol_type = other DNA
gtcattgtgctggagaagcaaacacacgatacgagtaatcagcccattagctgcctgcgtgggaaaggcaccacc

SEQ ID NO: 38525 - DNA, 75 bp, synthetic construct
  source 1..75: mol_type = other DNA
atttttctggcttgcatcctgcagtcatttccaggtatagtttttccgctgccgcaaaatcggcagccggaattg

SEQ ID NO: 38526 - DNA, 75 bp, synthetic construct
  source 1..75: mol_type = other DNA
gggtatccgggttgtggatgcacagaatggtgccaccacagaagaaggtgcgtttgccctgagtcgcccgcttca

SEQ ID NO: 38527 - DNA, 75 bp, synthetic construct
  source 1..75: mol_type = other DNA
cgttttagcgttacacactgaacggggaatacttatccgtgagcggattgcctgtgccaatagtttaagagccac

SEQ ID NO: 38528 - DNA, 75 bp, synthetic construct
  source 1..75: mol_type = other DNA
ctggcaatcctaaaacaaaagagcaatatcagctaacaaagaattttgatgttatctggttgtggtcagaagatg

SEQ ID NO: 38529 - DNA, 75 bp, synthetic construct
  source 1..75: mol_type = other DNA
atccacattttgatgaagcctgtcgtgcattcgcactgcgccacaatctggtgcaactggcagaacgtgcgggca

SEQ ID NO: 38530 - DNA, 75 bp, synthetic construct
  source 1..75: mol_type = other DNA
atggtgtggagcagcatgatgaatttttgaacaagactcttgccggagctcaaaagaaaataacgattatttccc

SEQ ID NO: 38531 - DNA, 75 bp, synthetic construct
  source 1..75: mol_type = other DNA
atggtggcgcaattgtcagccaactgacgcaaatgaatattccttaccgcttcagcgaagccagcggcgctattg

SEQ ID NO: 38532 - DNA, 75 bp, synthetic construct
  source 1..75: mol_type = other DNA
aacaagagaaaaagcaaattaagataaatgaaaaaataaacacattgattgggatttttaataaaaccattgcaa

SEQ ID NO: 38533 - DNA, 75 bp, synthetic construct
  source 1..75: mol_type = other DNA
atgactcaagactatgaactggttgtgaaaggagtccgtaattttgagaataaagttacggtaactgtagcctta

SEQ ID NO: 38534 - DNA, 75 bp, synthetic construct
  source 1..75: mol_type = other DNA
cgtgccggatatctcaggtgtcctggcggtatacgccgaacgccgccaggaccgcaacgggccctatgcctgtct

SEQ ID NO: 38535 - DNA, 75 bp, synthetic construct
  source 1..75: mol_type = other DNA
atgagcaaaaagcagagttccaccccacacgatgcgctgttcaaactctttttacgccaaccggacacggctcgt

SEQ ID NO: 38536 - DNA, 75 bp, synthetic construct
  source 1..75: mol_type = other DNA
tcatgggaacgctacagtgttctggtcagccgtgtggatacggcaaatcctgaatggccacaaaagcctgaataa

SEQ ID NO: 38537 - DNA, 75 bp, synthetic construct
  source 1..75: mol_type = other DNA
ttcaggtggttgaggccattaacggtgccaccacggaggaaggggcttttgtccaggggaatatgctgcaggccg

SEQ ID NO: 38538 - DNA, 75 bp, synthetic construct
  source 1..75: mol_type = other DNA
aatatctgacggctcccaccattaccagcggtggcaatcccccaacgttttcactgacacctgatggtcgacttt

SEQ ID NO: 38539 - DNA, 75 bp, synthetic construct
  source 1..75: mol_type = other DNA
aggaattgctgcagcaggcagaaaaccggaaagccagacttcttgcagatgctgaatccgtgattttgccgctgg

SEQ ID NO: 38540 - DNA, 75 bp, synthetic construct
  source 1..75: mol_type = other DNA
atgacgttcgagagcagcagacagccgttccgccaatacaggctgatgtcgcgcaagcaattgaaaatctcaagc

SEQ ID NO: 38541 - DNA, 75 bp, synthetic construct
  source 1..75: mol_type = other DNA
gctgaaggaacagcaaataccactgtggtttatgccggcggcgaccagacggtacacgggcatgcgctggatacc

SEQ ID NO: 38542 - DNA, 75 bp, synthetic construct
  source 1..75: mol_type = other DNA
tggcagtaatacaaatgtgctggctacagatgtgagtaattttggtattgctctttatcagggtgacgggacatc

SEQ ID NO: 38543 - DNA, 75 bp, synthetic construct
  source 1..75: mol_type = other DNA
atgatatttaaccgtaataaaaaacgagatgaacaacataattctgctgttgttttgccatcaactgaaaacgta

SEQ ID NO: 38544 - DNA, 75 bp, synthetic construct
  source 1..75: mol_type = other DNA
cactggcaaattatttgggctgcttgtcccaactggtggcgctggcccagaaccgctaccacgatgcgccaaaag

SEQ ID NO: 38545 - DNA, 75 bp, synthetic construct
  source 1..75: mol_type = other DNA
gggggctattgaggcggatgtgcatcggagtgaatcagaagctgaatattatcattataaaatggaagaaacagg

SEQ ID NO: 38546 - DNA, 75 bp, synthetic construct
  source 1..75: mol_type = other DNA
atgatatttaaccgtaataaaaaacgagatgaacaacagaatttttctgttgttttgccatcagctgaaaatgta

SEQ ID NO: 38547 - DNA, 75 bp, synthetic construct
  source 1..75: mol_type = other DNA
cgcgaatgggccgccggtaatcgcatcagtagtgtgcagcgtactgattccggcactaatgccgacggcggttac

SEQ ID NO: 38548 - DNA, 75 bp, synthetic construct
  source 1..75: mol_type = other DNA
caatacgtcacccagaatgtggggatcgacttcgccacggctcgcgtgtgtccttctcttgtccaactacgggat

SEQ ID NO: 38549 - DNA, 75 bp, synthetic construct
  source 1..75: mol_type = other DNA
gaattattttcagggatacggcacattgctattaatattttgacgaatgataaggtattcaaggcagggttaaga

SEQ ID NO: 38550 - DNA, 75 bp, synthetic construct
  source 1..75: mol_type = other DNA
aatggcacgtcactggacctgcaggccggactggaagcccgtatccgggaaaatatcaccctgggcgttcaggcc

SEQ ID NO: 38551 - DNA, 75 bp, synthetic construct
  source 1..75: mol_type = other DNA
ggatcaccggggcgctgacagggaacgccgacaccgcgacgaaattaaaaacagccataaacattaatggcgtca

SEQ ID NO: 38552 - DNA, 75 bp, synthetic construct
  source 1..75: mol_type = other DNA
gtattcacgatacagggcgggaatctgaatttgtacaggcagatgcacgcagattaatggtccggcagcagctta

SEQ ID NO: 38553 - DNA, 75 bp, synthetic construct
  source 1..75: mol_type = other DNA
gttcatttaaagatgacagtaacagattcttaatatttaatacagaacagtcgggattttatgaaatcaatgatg

SEQ ID NO: 38554 - DNA, 75 bp, synthetic construct
  source 1..75: mol_type = other DNA
acgataatggcaaagcgacagatatcgtccagaacagcggtgccgctctccagacgagcacggctaacggtattg

SEQ ID NO: 38555 - DNA, 75 bp, synthetic construct
  source 1..75: mol_type = other DNA
gtttatgacgatcagccgtttgaccggcaaattgttattccggcggtggcattcagcggcgctaaacatgagaga

SEQ ID NO: 38556 - DNA, 75 bp, synthetic construct
  source 1..75: mol_type = other DNA
cacttgggatgacggtgatggcgaagacctgtatctcaaagaggtaacccactggatgcagctaccagaaccgcc

SEQ ID NO: 38557 - DNA, 75 bp, synthetic construct
  source 1..75: mol_type = other DNA
gaacctggaagccaaacttacaagttgccagttaatacaccttgccaagatgcgccagcccatatctggctgcaa

SEQ ID NO: 38558 - DNA, 75 bp, synthetic construct
  source 1..75: mol_type = other DNA
accgtctggtctgtttcctccggctctacaaaaataatgtccatcatttttaatggacactatcgtatgaaacac

SEQ ID NO: 38559 - DNA, 75 bp, synthetic construct
  source 1..75: mol_type = other DNA
tgcaaacaacacaacaaaatgcgccactgaagcgcacaatgaaaacgcgtcacctgattatgctttccttgggcg

SEQ ID NO: 38560 - DNA, 75 bp, synthetic construct
  source 1..75: mol_type = other DNA
gcgtattggtgtcagtcgtgcggtattgtataaatggaaagatgaaattatcggcaacagtgcttaccagactat

SEQ ID NO: 38561 - DNA, 75 bp, synthetic construct
  source 1..75: mol_type = other DNA
agttcaggacatacgcggcgttctggctgtatttgctgaacgtcgtcaagaccgcaatggtccctatgtcattct

SEQ ID NO: 38562 - DNA, 75 bp, synthetic construct
  source 1..75: mol_type = other DNA
atggtcacgatcttacggcctattatcttaaggtgctgcatccctgcattatctggttcgaggcggatatatctt

SEQ ID NO: 38563 - DNA, 75 bp, synthetic construct
  source 1..75: mol_type = other DNA
atgcataaagatcaatacactgatgactcatccctggatcaggtccgtgtaaaaactatgctcactagcaccatt

SEQ ID NO: 38564 - DNA, 75 bp, synthetic construct
  source 1..75: mol_type = other DNA
ggtatcccacagcaagtatcagcgatttgctggttgtggtgatgaagaaagccaccgcaggcatcagtatcagct

SEQ ID NO: 38565 - DNA, 75 bp, synthetic construct
  source 1..75: mol_type = other DNA
gaggcgcttaataataaaggagaatatatttttatcagaaatagtgtcccgggattgagttcagtatgcataccg

SEQ ID NO: 38566 - DNA, 75 bp, synthetic construct
  source 1..75: mol_type = other DNA
gcggaaggtaaactgatttacacctgtggtcaggcggtcgccatcgacggcggcttaagtatgccgcgcttctga

SEQ ID NO: 38567 - DNA, 75 bp, synthetic construct
  source 1..75: mol_type = other DNA
atgtcggtaaacttttctccctgcgtgttgatcccctgctacaaccacggcgcgatgatgccgggcgtgctggcg

SEQ ID NO: 38568 - DNA, 75 bp, synthetic construct
  source 1..75: mol_type = other DNA
tgataaggtattcaaggcagggttaagacgtaagatgcgaaaagcagccatggacagaaactacctggcgtcagt

SEQ ID NO: 38569 - DNA, 75 bp, synthetic construct
  source 1..75: mol_type = other DNA
atgaatagtatagcaattttagaagcagtgaacacctcttacgtaccattcaacggtcagcaaattatcaccgcc

SEQ ID NO: 38570 - DNA, 75 bp, synthetic construct
  source 1..75: mol_type = other DNA
atttccctttcgcttttccgtcggcgtgctacgtgatggttgccagccacgtggggcatacaccttcgggtgccg

SEQ ID NO: 38571 - DNA, 75 bp, synthetic construct
  source 1..75: mol_type = other DNA
gaacaaaagaaagagccagaaatgacggtcagatattatatcagttctgctgatttaaccgcagagaagttcgcc

SEQ ID NO: 38572 - DNA, 75 bp, synthetic construct
  source 1..75: mol_type = other DNA
cgccccgggtttcctggagagtgttttatctgtgaactcaggctgccagatcatcgtttccgatggaagcataat

SEQ ID NO: 38573 - DNA, 75 bp, synthetic construct
  source 1..75: mol_type = other DNA
tcacctgaacaacagagagaaaacgaagatcgctgatgccctgagacaaacatatcccctgacagaattactgca

SEQ ID NO: 38574 - DNA, 75 bp, synthetic construct
  source 1..75: mol_type = other DNA
gctgcaactggcaaaacacgccaccatcggcaagcggatggatttcgacaccgaagtgatggtgcgcctctactg

SEQ ID NO: 38575 - DNA, 75 bp, synthetic construct
  source 1..75: mol_type = other DNA
cgcggaagccctggaaatcggcctgaccgatgcggccggtcaggtggtatttgaaaccaggctgaagcccacggt

SEQ ID NO: 38576 - DNA, 75 bp, synthetic construct
  source 1..75: mol_type = other DNA
atcagcgtctgaaattgccagagtgcttgaaagtctgtacagaaatagtggagagcaccagtctgcagcatctaa

SEQ ID NO: 38577 - DNA, 75 bp, synthetic construct
  source 1..75: mol_type = other DNA
cgtatatcccaggacatcagtacccgtgatgaaggcgggggcggaaaggtcgtggttatcgggcggcaggggtaa

SEQ ID NO: 38578 - DNA, 75 bp, synthetic construct
  source 1..75: mol_type = other DNA
ttgcccggatgctgaaaaaagacggcaaggactccgatatccggattggcgacctgccgattatccgggattccg

SEQ ID NO: 38579 - DNA, 75 bp, synthetic construct
  source 1..75: mol_type = other DNA
ataacagcaaaaacgccattcgcttccagggcagcaatgctaacgccacgttatataacaccggtgaaatgacgc

SEQ ID NO: 38580 - DNA, 75 bp, synthetic construct
  source 1..75: mol_type = other DNA
ccggtgcgctggctcacctgcaacgtgcgacacagctcgactgtcaggcaggcgtcaaaaaagagattgaacgac

SEQ ID NO: 38581 - DNA, 75 bp, synthetic construct
  source 1..75: mol_type = other DNA
ctgctgaatgttttgccgtactttctgaatatttctttagcgccccagaactttttgctcctcgtttcccttcat

SEQ ID NO: 38582 - DNA, 75 bp, synthetic construct
  source 1..75: mol_type = other DNA
tatgatgagaaatatcctctcaaacgtattcatgttgatgattggctcgatcttggtcatttaaatacgtatttc

SEQ ID NO: 38583 - DNA, 75 bp, synthetic construct
  source 1..75: mol_type = other DNA
cgtacatacaaacgacaaattcagctactcatacggcctggaagaaacgctcgagcatttaccttgcgaaacagg

SEQ ID NO: 38584 - DNA, 75 bp, synthetic construct
  source 1..75: mol_type = other DNA
gaaggtggtgcactgacagaagttgcgtgctgggcccatgcccggcgaaaaatccacgatgtatacatcagcagc

SEQ ID NO: 38585 - DNA, 75 bp, synthetic construct
  source 1..75: mol_type = other DNA
gagtcatgggaacgctacagtgttatggtcagccgtgtggatacggcaaagcccgaatggccacaaaagcctgag

SEQ ID NO: 38586 - DNA, 75 bp, synthetic construct
  source 1..75: mol_type = other DNA
tttaaataaaagagccacttattatgaacccgaattttatgatgcaagaggtgtgttaaaagaaataataaaatg

SEQ ID NO: 38587 - DNA, 75 bp, synthetic construct
  source 1..75: mol_type = other DNA
cgtcaccgccactggcacacatctgccttcacggggatttacaacgatttggccgccgcctcagcctgtatgtga

SEQ ID NO: 38588 - DNA, 75 bp, synthetic construct
  source 1..75: mol_type = other DNA
atgatctgggcattcgtaaaagcatattggaaacagatgcttattgtgttgatgcttgctgctctgttcatcgtc

SEQ ID NO: 38589 - DNA, 75 bp, synthetic construct
  source 1..75: mol_type = other DNA
ctgaagccggtgatctccatgtggctgtccattgccattcgtggtctgctggcaatgggagaaaaccgtaaccgt

SEQ ID NO: 38590 - DNA, 75 bp, synthetic construct
  source 1..75: mol_type = other DNA
tggaagccctgcatgaacgccatgaagaagttcaggcgttgctgggtgacgcgcaaactatcgccgaccaggaac

SEQ ID NO: 38591 - DNA, 75 bp, synthetic construct
  source 1..75: mol_type = other DNA
caatgatacctttaaattaggcacaattgccaaaaacctgaccattgatgccggtgccggtgatgatattgttgt

SEQ ID NO: 38592 - DNA, 75 bp, synthetic construct
  source 1..75: mol_type = other DNA
agaccatgaacagccgccacctgacaggtgatgcggtggatgttgttgcttacattggcagccaggtgtcatgga

SEQ ID NO: 38593 - DNA, 75 bp, synthetic construct
  source 1..75: mol_type = other DNA
gcggacgctgacgtacaggcgtgaggccgccggtgacctggccggggaaatcaccggcgtgacggacggtgccgg

SEQ ID NO: 38594 - DNA, 75 bp, synthetic construct
  source 1..75: mol_type = other DNA
acgaacgcattcagcctggcgtcaccgccactggcacgcatctgccttcacggggatttgcaacgatttggccgc

SEQ ID NO: 38595 - DNA, 75 bp, synthetic construct
  source 1..75: mol_type = other DNA
aagggaaacgccagcaacctctgctgatgacagaataacctttgacgtgtaccggcataaggccagtggcgacat

SEQ ID NO: 38596 - DNA, 75 bp, synthetic construct
  source 1..75: mol_type = other DNA
acactgatgacacaccagtaaaagtgctggcaccgggcaggaagaaggcgaaaacaggatatatctggacgtatg

SEQ ID NO: 38597 - DNA, 75 bp, synthetic construct
  source 1..75: mol_type = other DNA
tcgactgatgctacagtggtgggccgattttctggatgcaaacagagaaagatttatcagtccatttgaatatgc

SEQ ID NO: 38598 - DNA, 75 bp, synthetic construct
  source 1..75: mol_type = other DNA
gaagccggaccgaactttttttccattttttttcgcgatgggaaaaattacctaatgttagcactggtgatggtt

SEQ ID NO: 38599 - DNA, 75 bp, synthetic construct
  source 1..75: mol_type = other DNA
tgagcaggctgaagccctccgtcagaaagaccagcaactgagtctggttgaagagacggaagccttcctgcgctc

SEQ ID NO: 38600 - DNA, 75 bp, synthetic construct
  source 1..75: mol_type = other DNA
gtggaatggaacgttttcttgttccagttgctatcaagttaaactcacaaaaacatgttgcagcggtgagagatg

SEQ ID NO: 38601 - DNA, 75 bp, synthetic construct
  source 1..75: mol_type = other DNA
aatagggcgagacagcgttggtgccgtgacgttaatacccgaagacgaaaccgtaacgcatccgataatggcatg

SEQ ID NO: 38602 - DNA, 75 bp, synthetic construct
  source 1..75: mol_type = other DNA
tatgccagcgatgagcatgcaaataaagtggcctcatttgcagcaagtgcaggtcagagcctggcgaataataat

SEQ ID NO: 38603 - DNA, 75 bp, synthetic construct
  source 1..75: mol_type = other DNA
ctctgacgtggtaatggttgctcgcggcgacctcggtgtggaaattggcgatccggaactggtcggcattcagaa

SEQ ID NO: 38604 - DNA, 75 bp, synthetic construct
  source 1..75: mol_type = other DNA
aatcgtacaggcacggtagtacgaatttcgttatacttaatagcgcacatacagatgaatttgaaattaatatag

SEQ ID NO: 38605 - DNA, 75 bp, synthetic construct
  source 1..75: mol_type = other DNA
tcagtcagacatcactacatcgtactgatgaccgaaatcagaccaatattggtttggggattcgtcatttcactc

SEQ ID NO: 38606 - DNA, 75 bp, synthetic construct
  source 1..75: mol_type = other DNA
ctgaaaggcgttacggcgatcatcaccatgaccgaatcgggtcgtaccgcgctgatgacctcccgtatcagctct

SEQ ID NO: 38607 - DNA, 75 bp, synthetic construct
  source 1..75: mol_type = other DNA
tacagcaagctggtcgacacgctgctttccatcaagattgagaagctgcgctcgtacctgaaaaactccccggcg

SEQ ID NO: 38608 - DNA, 75 bp, synthetic construct
  source 1..75: mol_type = other DNA
acagcgacagcgggctggtgagcggtgcctatacctacagcgcgcgagtggtggatttggcggggaatatcacct

SEQ ID NO: 38609 - DNA, 75 bp, synthetic construct
  source 1..75: mol_type = other DNA
gagattttgctctgtggtgctctgacgctgacttttgcatccgctcttgagtatgtcggatggcctaaatctctt

SEQ ID NO: 38610 - DNA, 75 bp, synthetic construct
  source 1..75: mol_type = other DNA
tatcaccgaaaagttttctatttactacgaaatattgacaagattagctcaagcacaataacaagttatctacag

SEQ ID NO: 38611 - DNA, 75 bp, synthetic construct
  source 1..75: mol_type = other DNA
ataaagatcgctaccagatccgccgcgtgctgaacgaacgtctggggtacgacggcccggaaaccccggaagcta

SEQ ID NO: 38612 - DNA, 75 bp, synthetic construct
  source 1..75: mol_type = other DNA
acgaagcaaaagaaattttctttaactactgcaattactcatatcacgaaataaaagacgaagaggaagaacaaa

SEQ ID NO: 38613 - DNA, 75 bp, synthetic construct
  source 1..75: mol_type = other DNA
acggtaacatgacgctggaaaatccatcgccagagctgctcacggtgttgatccgcgaactgagcgggaggggaa

SEQ ID NO: 38614 - DNA, 75 bp, synthetic construct
  source 1..75: mol_type = other DNA
cgcacagggctgcgccagaacttccgtatcttccagaatgaggacatcgaaagcatcctcgcgacgatcctgaaa

SEQ ID NO: 38615 - DNA, 75 bp, synthetic construct
  source 1..75: mol_type = other DNA
ggcctgaccctgctggccatcgatggtgtgttctggcgcacaccggatacaccagagaacgatgcagccttcccc

SEQ ID NO: 38616 - DNA, 75 bp, synthetic construct
  source 1..75: mol_type = other DNA
tggccgggcgtgagcgtgtggacttaggggtacagaccctgaataaccggacgcacagcctgatttacagtgcag

SEQ ID NO: 38617 - DNA, 75 bp, synthetic construct
  source 1..75: mol_type = other DNA
aaagccggtgtactgaataatcacagtgccactattgaagccgccggatatctggtactgagtgccggacaaatc

SEQ ID NO: 38618 - DNA, 75 bp, synthetic construct
  source 1..75: mol_type = other DNA
ctgtatgaacacctgtccggcgtaccgccacatcggcgggcacggctatggctctatctatcccggccctatcgg

SEQ ID NO: 38619 - DNA, 75 bp, synthetic construct
  source 1..75: mol_type = other DNA
atgtctttgaaaacaagtgatatcaggtttaaagagcgtatccgtattcagattcaggacccgatcatgcgaaag

SEQ ID NO: 38620 - DNA, 75 bp, synthetic construct
  source 1..75: mol_type = other DNA
aattatcggttcgatgaaagaagcgctgcatccggaaatcgacggctgcgaaggtattctcaacgcgatggcgcg

SEQ ID NO: 38621 - DNA, 75 bp, synthetic construct
  source 1..75: mol_type = other DNA
atgaaaatcgtttctcagaacacaactgctctttcttcagccacagcaccagggaataaccagccccaactggtt

SEQ ID NO: 38622 - DNA, 75 bp, synthetic construct
  source 1..75: mol_type = other DNA
acgcgcaagaaatcagaggttgtttactcaggagtatcggtaaccattccaacagcgccgaccaaccttgttagc

SEQ ID NO: 38623 - DNA, 75 bp, synthetic construct
  source 1..75: mol_type = other DNA
gtgcaaagtgggttaattgattataacccggcacaagagatggctggggcggttgcttcctataatcgacagcat

SEQ ID NO: 38624 - DNA, 75 bp, synthetic construct
  source 1..75: mol_type = other DNA
cgaaacatgggtactgttcaatgccatgaacggtaaccgcgctgaaatgagtccggaagctgccggtattgccgc

SEQ ID NO: 38625 - DNA, 75 bp, synthetic construct
  source 1..75: mol_type = other DNA
ctgcgttgctaacaggtggaggggcagccggtgctgccagtgttgcactgacgccgttcgtcggcgtgccggtgg

SEQ ID NO: 38626 - DNA, 75 bp, synthetic construct
  source 1..75: mol_type = other DNA
atgcccgttattgccattatcgccattgttgtcatcgtcatcattctgaacaaaaccggggtgtccgacagcctc

SEQ ID NO: 38627 - DNA, 75 bp, synthetic construct
  source 1..75: mol_type = other DNA
cattcactgcggctggcggcaagatcagtggaaatggcacatcatggcagatcactttaccggcttataaaagcg

SEQ ID NO: 38628 - DNA, 75 bp, synthetic construct
  source 1..75: mol_type = other DNA
cgtagtcactctcgtgcaggttttggggttgagtactggagggattatttcaggcttggtgtaaatacctatttt

SEQ ID NO: 38629 - DNA, 75 bp, synthetic construct
  source 1..75: mol_type = other DNA
tagaaagtattaagcaattcggctggactaatccggtgctgattgacgaaaagggcgaaattattgcgggtcacg

SEQ ID NO: 38630 - DNA, 75 bp, synthetic construct
  source 1..75: mol_type = other DNA
aaggtcagggactggaacgaccggacacatgccgagacgtggcgtgcatcatgggctgaccatgcgaacagggca

SEQ ID NO: 38631 - DNA, 75 bp, synthetic construct
  source 1..75: mol_type = other DNA
ttcctgtttcgcaaccaatcatcattaacgctgctggatatccggtatataacggacagattgccaaattcgtaa

SEQ ID NO: 38632 - DNA, 75 bp, synthetic construct
  source 1..75: mol_type = other DNA
ctggcgcgcatagcaaccacagagatccgaaaggttccaaaacttgcatcatgcgaccaagccagcttcctgggg

SEQ ID NO: 38633 - DNA, 75 bp, synthetic construct
  source 1..75: mol_type = other DNA
cacactgatgacacaccagtaaaagtactggcaccgggcaggaagaaggcgaaaacaggatatatctggacgtat

SEQ ID NO: 38634 - DNA, 75 bp, synthetic construct
  source 1..75: mol_type = other DNA
atgatcaaactgaagacgccaaactctatggagattgccgggcaacctgctgttatcacttacgtgccagaactg

SEQ ID NO: 38635 - DNA, 75 bp, synthetic construct
  source 1..75: mol_type = other DNA
ttcagcactatgtcctgaccgacggcaaactccatgctgacgatacgcctgtcccggtgctgttgccgggcaata

SEQ ID NO: 38636 - DNA, 75 bp, synthetic construct
  source 1..75: mol_type = other DNA
acgatgatgacgaaacatgggtgctgtttaacgtcatgaacggtaaccgcgctgaaatgagcccggaagccgccg

SEQ ID NO: 38637 - DNA, 75 bp, synthetic construct
  source 1..75: mol_type = other DNA
cctcgctggtaatgactttttttggcatccccatactggcgcaatttttggcagcggttgttgccatgctggggg

SEQ ID NO: 38638 - DNA, 75 bp, synthetic construct
  source 1..75: mol_type = other DNA
acaggattatggggctggtcgcagcttaatcagccggacgcgctaatccagcgaatacaactgtctgtcatgccg

SEQ ID NO: 38639 - DNA, 75 bp, synthetic construct
  source 1..75: mol_type = other DNA
ccagactggggatccccggatgtgcacagaatattgccacgccggtatcgcgttttctggcgttattgcccctga

SEQ ID NO: 38640 - DNA, 75 bp, synthetic construct
  source 1..75: mol_type = other DNA
atgaaaaaggtattgattgcagcacttatttccggtgtgtcttttggcgcttttgcacagcagggtggtttccag

SEQ ID NO: 38641 - DNA, 75 bp, synthetic construct
  source 1..75: mol_type = other DNA
ttttctcgatatattcagtcatcgtctgatcacccagtattaccgtatctggcgtaaatattcgtacccggccac

SEQ ID NO: 38642 - DNA, 75 bp, synthetic construct
  source 1..75: mol_type = other DNA
acaactgatgcagtatatcgtgctcggcgtcaccactattgtggtcgatattattgtgatgatcggttacgccac

SEQ ID NO: 38643 - DNA, 75 bp, synthetic construct
  source 1..75: mol_type = other DNA
tcaacggcactatatctaacgaaacagccctactttgtaatgcccgcgatctgcacgcttttttaggtgttaaaa

SEQ ID NO: 38644 - DNA, 75 bp, synthetic construct
  source 1..75: mol_type = other DNA
cgggctgatcggcacctgccgtctgaacggtatcgatccggaagcgtatctgcgccatattctgagcgtactgcc

SEQ ID NO: 38645 - DNA, 75 bp, synthetic construct
  source 1..75: mol_type = other DNA
cgtcatcttcattgagtaatgtaaaaggaagtgttctgttactatttactacccgcgaaccacggttaattatga

SEQ ID NO: 38646 - DNA, 75 bp, synthetic construct
  source 1..75: mol_type = other DNA
agacagtaacggcaatactattgccagtactcaggtagacaacaacggtcagtggagtgtctcgttacccacgca

SEQ ID NO: 38647 - DNA, 75 bp, synthetic construct
  source 1..75: mol_type = other DNA
catactggcagaacttcagacatgggcaggtgaaaatggtctgatctttacgggagcacacgacccacgtaaacc

SEQ ID NO: 38648 - DNA, 75 bp, synthetic construct
  source 1..75: mol_type = other DNA
gtcacatcctgagccagttgccgcatttgcagctaccaacgctggagaagctggggctaatcaacgcattgggtt

SEQ ID NO: 38649 - DNA, 75 bp, synthetic construct
  source 1..75: mol_type = other DNA
ccggaagactggctgcgggcagagatgcagggggagattgtggcgctggtccacagtcatcccggtggtctgccc

SEQ ID NO: 38650 - DNA, 75 bp, synthetic construct
  source 1..75: mol_type = other DNA
cgattttctggatgcgaaccgggagaagggtatcagtccgtttgaatatgcaaagattaacaatccattaaaata

SEQ ID NO: 38651 - DNA, 75 bp, synthetic construct
  source 1..75: mol_type = other DNA
ttgaacaatgaggttcgtgacggtgacgtgatcccgttcgctgagatcgccatgaacaaagaaaaattgcgctat

SEQ ID NO: 38652 - DNA, 75 bp, synthetic construct
  source 1..75: mol_type = other DNA
tcgcggggatgactggtggcgtcacggtcagaatctctatcttgacaatatggaggctactggtttttaccgtgt

SEQ ID NO: 38653 - DNA, 75 bp, synthetic construct
  source 1..75: mol_type = other DNA
ggcaacaccaccgttgatggtcagggctctacaggtaccgaaatcgcgggtaacaacgcggtggtgaatcaggac

SEQ ID NO: 38654 - DNA, 75 bp, synthetic construct
  source 1..75: mol_type = other DNA
ctagcagttatgctgaatttactggtttttattcgttccagtgaactcagataagcccgttggtctgaaattgat

SEQ ID NO: 38655 - DNA, 75 bp, synthetic construct
  source 1..75: mol_type = other DNA
atagaatatctgcgggctcagatagaaaaactgcgccgaatgctgttcggtacccgttcagaaaagctacgccgg

SEQ ID NO: 38656 - DNA, 75 bp, synthetic construct
  source 1..75: mol_type = other DNA
gagatgcggttgaacgtcagatgagtcatcaggagcgcaacggagtacgtgccgcgtatattcataaagcagaac

SEQ ID NO: 38657 - DNA, 75 bp, synthetic construct
  source 1..75: mol_type = other DNA
gctgaaagacagcgtggggggatggcaaaaatcattggaaatcctcggtacattcatcgcgggtgtctggatatc

SEQ ID NO: 38658 - DNA, 75 bp, synthetic construct
  source 1..75: mol_type = other DNA
caatgggttgacctgcttaccgaagaagaaagagataatccacgccgagcaaggcaggtgctaagtcaactaaga

SEQ ID NO: 38659 - DNA, 75 bp, synthetic construct
  source 1..75: mol_type = other DNA
agggttatggggtatgacacaacccaggatgtctgtggtcatggattccgggcgatggcatgtagtgcgttaata

SEQ ID NO: 38660 - DNA, 75 bp, synthetic construct
  source 1..75: mol_type = other DNA
gatcgccgtaaagctatacaactgaccgcagcaggtcatcgcattgtgcatcatctgcgcgccattaatcgggaa

SEQ ID NO: 38661 - DNA, 75 bp, synthetic construct
  source 1..75: mol_type = other DNA
gcgttaattcaggttggatggctggtcgaaactaatggtgtgttgtcgcttcctaactttgagcgccataacggg

SEQ ID NO: 38662 - DNA, 75 bp, synthetic construct
  source 1..75: mol_type = other DNA
gcacctctgaaacgctggccgccacaccaaaagcggtcaaggctgcatacgacctggcagccggcaaggcgcctg

SEQ ID NO: 38663 - DNA, 75 bp, synthetic construct
  source 1..75: mol_type = other DNA
gatcagtgaaaatactgtaaataaagccctgagggttatgggatatgacacaacccaggaagtctgtggccatgg

SEQ ID NO: 38664 - DNA, 75 bp, synthetic construct
  source 1..75: mol_type = other DNA
tgccatgacggaagatgatgtcatgccggaggcattgcgccgttttgaggcaatggtggaagaagcggcacgcaa

SEQ ID NO: 38665 - DNA, 75 bp, synthetic construct
  source 1..75: mol_type = other DNA
tggaaaaaatatcgcgcactattgatgcgtgttgatataaaaaatacagagtggccgaaaaaaccagagagcaat

SEQ ID NO: 38666 - DNA, 75 bp, synthetic construct
  source 1..75: mol_type = other DNA
cttacgcagtgattaccagcttaataacaccgatagcgaagatagccatgaacagtcaggcggaatatcgcgcac

SEQ ID NO: 38667 - DNA, 75 bp, synthetic construct
  source 1..75: mol_type = other DNA
gggttgggggggatacacccattcctttttcggcctgggctattctggttgaatatgcaggattgggtaaaatct

SEQ ID NO: 38668 - DNA, 75 bp, synthetic construct
  source 1..75: mol_type = other DNA
gtgccacacgcgcagacagtaaactggtcattacgggtttcacaaccggcgacgaaccagtttcttaatagctca

SEQ ID NO: 38669 - DNA, 75 bp, synthetic construct
  source 1..75: mol_type = other DNA
gcagtaaaccaaatggtggcaagcattcaagaggttgcgagcaatgcacagcatgctgcagatgcggccggaaga

SEQ ID NO: 38670 - DNA, 75 bp, synthetic construct
  source 1..75: mol_type = other DNA
cttaaagcgaaaacatcaggaattcgtcgtgctgcagggaaccgtcttgagcaggttcagaatgcaatggcggga

SEQ ID NO: 38671 - DNA, 75 bp, synthetic construct
  source 1..75: mol_type = other DNA
ctgataatgaaccgaaaaccgacgcgcagccagagcaaccagaaccggctcagcccggaactgacagcaccatga

SEQ ID NO: 38672 - DNA, 75 bp, synthetic construct
  source 1..75: mol_type = other DNA
tgtcaaaccacagctggttgctgtcgttcgccgtgcgctggagctgacggaggttgatttcggtattacggaagg

SEQ ID NO: 38673 - DNA, 75 bp, synthetic construct
  source 1..75: mol_type = other DNA
atctctctaacgaagaactggcacaaacctttaccgagtggaataacggtgaactgagcagctacctgatcgaca

SEQ ID NO: 38674 - DNA, 75 bp, synthetic construct
  source 1..75: mol_type = other DNA
gccgacgaaacaccggagaaaatgacctggttcgaagaaaaggtcctcaaacccgtcaatgatgcgctggagtaa

SEQ ID NO: 38675 - DNA, 75 bp, synthetic construct
  source 1..75: mol_type = other DNA
atgactgttcaaacaagtaaaaatccgcaggtcgatattgctgaagataatgcattcttcccttcagaatattcg

SEQ ID NO: 38676 - DNA, 75 bp, synthetic construct
  source 1..75: mol_type = other DNA
tgcaacgcctgcataaagcgggatatcgtctggtgatgttgaccggggataacccaaccaccgccaatgcgatcg

SEQ ID NO: 38677 - DNA, 75 bp, synthetic construct
  source 1..75: mol_type = other DNA
tctgagtaccacaatacaattcactcgcgcagaagacaaaataatgagcggtacagtatcagtcaatggtactga

SEQ ID NO: 38678 - DNA, 75 bp, synthetic construct
  source 1..75: mol_type = other DNA
ctgcggtctggtttattaaaccgcgcaatacggtgattggttgcggtgaaccgattccctttccacagggtgaaa

SEQ ID NO: 38679 - DNA, 75 bp, synthetic construct
  source 1..75: mol_type = other DNA
aaaaagaaacgattttttccgaagtagaaacggctaacagcaagcaactggctgtgttgaaagctaatttcccac

SEQ ID NO: 38680 - DNA, 75 bp, synthetic construct
  source 1..75: mol_type = other DNA
ataatgctgcggaaagagcgcttcgtgcagtctgtctcggaaagaaaaactcttatgacctttgtcaaatattga

SEQ ID NO: 38681 - DNA, 75 bp, synthetic construct
  source 1..75: mol_type = other DNA
tattcgcgacaggaagcggagtcgatggacccgcagcagcgcctgtttttgcaggcggtctggcatgcgctggaa

SEQ ID NO: 38682 - DNA, 75 bp, synthetic construct
  source 1..75: mol_type = other DNA
atggaacgaaataaacttgctcgtcagattattgacacttgcctggaaatgactcgcctggggctgaaccagggg

SEQ ID NO: 38683 - DNA, 75 bp, synthetic construct
  source 1..75: mol_type = other DNA
cgatccaactgggtaattccattggcgttttagtcgtatcgctgttattaggccaacaacatttcagcattaaca

SEQ ID NO: 38684 - DNA, 75 bp, synthetic construct
  source 1..75: mol_type = other DNA
agacagagataatcttaagtcggcaatggattattatcttaatacattacgtcgttatggagaactgaaaggcgg

SEQ ID NO: 38685 - DNA, 75 bp, synthetic construct
  source 1..75: mol_type = other DNA
attgaccactgtaaaacgccagcatcgccccgctcttgatctttcacgtcttcctgaacttttgtcgcgtattga

SEQ ID NO: 38686 - DNA, 75 bp, synthetic construct
  source 1..75: mol_type = other DNA
gaacttcagacatgggctggtgaaaatggtctgatctttacgggagcacatgacccacgtaaaccaatcagtgaa

SEQ ID NO: 38687 - DNA, 75 bp, synthetic construct
  source 1..75: mol_type = other DNA
atggcgcgtggcagccttctgacaatggcgctgttgagcatggctgtcagcactctctgccgggcgggggcgcat

SEQ ID NO: 38688 - DNA, 75 bp, synthetic construct
  source 1..75: mol_type = other DNA
ctgatcgaatcaggtttgtggtcccgcgatgctgttgaacgtcagatgagccatcaggaacgtaacggtgtacgc

SEQ ID NO: 38689 - DNA, 75 bp, synthetic construct
  source 1..75: mol_type = other DNA
agaaatacgccgctacgacaggcgcctgaatataatctgtcgcgagtgccggaagagcgaagctatgcagcgtgt

SEQ ID NO: 38690 - DNA, 75 bp, synthetic construct
  source 1..75: mol_type = other DNA
tgtgctggcacgtgccgaagaaaagatcgaagaagatgaacgggaaatagaacatctgcgggctcagatagaaaa

SEQ ID NO: 38691 - DNA, 75 bp, synthetic construct
  source 1..75: mol_type = other DNA
ggtagtgcagttcctgttattgggactggtattggtgctcttgctggcggtgttatcggtggtcttggatcattg

SEQ ID NO: 38692 - DNA, 75 bp, synthetic construct
  source 1..75: mol_type = other DNA
cacaaattccgctgtgtgccacatctgacgggacggcgctttgagcacggggtgacggactgttacacgctgttc

SEQ ID NO: 38693 - DNA, 75 bp, synthetic construct
  source 1..75: mol_type = other DNA
taaaccaatcagtgaaaatactgtaaataaagccctgagggtgatggggtatgacacaacccaggatgtctgtgg

SEQ ID NO: 38694 - DNA, 75 bp, synthetic construct
  source 1..75: mol_type = other DNA
atgcgttatgccgtacagtctggcatcatcagatataatcctgctctggatatggctggcgcattgactacggta

SEQ ID NO: 38695 - DNA, 75 bp, synthetic construct
  source 1..75: mol_type = other DNA
atgattggtttagtcggtaaaaaagtgggtatgacccgtatcttcacagaagacggcgtttctatcccagtaacc

SEQ ID NO: 38696 - DNA, 75 bp, synthetic construct
  source 1..75: mol_type = other DNA
acatgaacatcagtaattcttcccacaacggagccgttaatatgtggggcggaaatggtcgttttatcaatgacg

SEQ ID NO: 38697 - DNA, 75 bp, synthetic construct
  source 1..75: mol_type = other DNA
gatttgcccctatatttccagacatctgttatcacttaacccattacaagcccgctgccgcagatattcccgtgg

SEQ ID NO: 38698 - DNA, 75 bp, synthetic construct
  source 1..75: mol_type = other DNA
cagaacataatctgtcgcgagtgcaggaagagcgaagttatgcagcgcgtgctggcgttttatcaggggaatttt

SEQ ID NO: 38699 - DNA, 75 bp, synthetic construct
  source 1..75: mol_type = other DNA
ctacagtggtgggccgattttctggatgcaaacagagaaagatttatcagtccatttgaatatgcaaagattaat

SEQ ID NO: 38700 - DNA, 75 bp, synthetic construct
  source 1..75: mol_type = other DNA
aatgccatgaacggtaaccgcgcagaaatgagcccggaagccgccggtattaccgcctgtctgatgacgtacagt

SEQ ID NO: 38701 - DNA, 75 bp, synthetic construct
  source 1..75: mol_type = other DNA
ctgcctacccgaaacttgcagccgcttatccgtcaggcgtgatccctgatatgcgtggctggacgattaagggca

SEQ ID NO: 38702 - DNA, 75 bp, synthetic construct
  source 1..75: mol_type = other DNA
cgtttttccaccggatttaaagagttcgaccgcgtactaggcggcggcgtggtgccgggaagtgccattctgatt

SEQ ID NO: 38703 - DNA, 75 bp, synthetic construct
  source 1..75: mol_type = other DNA
ggatgatgctggagcaaaaaaattcggttctgtcctcgccgggacaactgcaaatgtcatcaaaatggggttggc

SEQ ID NO: 38704 - DNA, 75 bp, synthetic construct
  source 1..75: mol_type = other DNA
tgtgacggactgttacaccctgttccgggatgcataccatctggcggggattgagatgccggattttcaccgcga

SEQ ID NO: 38705 - DNA, 75 bp, synthetic construct
  source 1..75: mol_type = other DNA
gcgagcgtggagcactgttgtacgggctgatcggcacctgccggttgaatggtatcgatccggaagcgtatctgc

SEQ ID NO: 38706 - DNA, 75 bp, synthetic construct
  source 1..75: mol_type = other DNA
atgccggggaaattcagattcagttgtcgtagcgaaagaaatctggagggcgttaaaccacagctggttgctgtc

SEQ ID NO: 38707 - DNA, 75 bp, synthetic construct
  source 1..75: mol_type = other DNA
gactggattgttttgtgatggtgactgtcgggaagattatgagaaacgtgaacgatttggacaaataaatactga

SEQ ID NO: 38708 - DNA, 75 bp, synthetic construct
  source 1..75: mol_type = other DNA
tgccaaaacggcaattggtcttggcctgccgtttagtttgttaatgcagtacgtcattctgttcttctattccgc

SEQ ID NO: 38709 - DNA, 75 bp, synthetic construct
  source 1..75: mol_type = other DNA
atgagcgctataaccaaagaacgtatcgaattattcattaaaaatccgcttgataacggacttacccgtggcgaa

SEQ ID NO: 38710 - DNA, 75 bp, synthetic construct
  source 1..75: mol_type = other DNA
gatgtgcatgtggcagcgaccgccatgctgacactatccccccgttatatctggactgaaccacaggaggagcag

SEQ ID NO: 38711 - DNA, 75 bp, synthetic construct
  source 1..75: mol_type = other DNA
acaataaatccgtcacttttgccgaacttgatgtgtttgatttgagtgaggcgttaagcgcacctgacgtcattt

SEQ ID NO: 38712 - DNA, 75 bp, synthetic construct
  source 1..75: mol_type = other DNA
gtggctataaagttggtgatgttctttctctttgcgaatggaagcatggcgtatttacgggtagggaatgggccg

SEQ ID NO: 38713 - DNA, 75 bp, synthetic construct
  source 1..75: mol_type = other DNA
atgaacggtataaaaacggggctggggatcacgccgggtgaacacattatcagtgctgattctgcactcagcaga

SEQ ID NO: 38714 - DNA, 75 bp, synthetic construct
  source 1..75: mol_type = other DNA
ggtgatccacaggcaaagctggaaaacccgacaggatgttgagctggctacgctgaaatgggtggactggtacaa

SEQ ID NO: 38715 - DNA, 75 bp, synthetic construct
  source 1..75: mol_type = other DNA
ctgggtaaaacgctggaagacagggattatgccacgcagccgctgagcaaactgttcccgaaaccggactacgca

SEQ ID NO: 38716 - DNA, 75 bp, synthetic construct
  source 1..75: mol_type = other DNA
gtactgtgcggcggcgatgtactgaagggggatagcttcgataacggcgcatgggttgcaccgaccgtgttcacc

SEQ ID NO: 38717 - DNA, 75 bp, synthetic construct
  source 1..75: mol_type = other DNA
atgacatatgctcacttcgccccagattatctgactgatgccatacgatttaaccctatgcgtgggagtgtccac

SEQ ID NO: 38718 - DNA, 75 bp, synthetic construct
  source 1..75: mol_type = other DNA
gtgcctgcgaagcgattcgctggtggattaaggacggtggcagagactgccgtatccgctcaaataattgctacg

SEQ ID NO: 38719 - DNA, 75 bp, synthetic construct
  source 1..75: mol_type = other DNA
cgggcatcgcctacagcacctctgcaggcagtgctggctactggtttttacagttgctcgataaagtcacgccct

SEQ ID NO: 38720 - DNA, 75 bp, synthetic construct
  source 1..75: mol_type = other DNA
atggtggtttgtttcccggtgacattgtattttattctgggtggcgtagtttcaagatatatcttttatattgaa

SEQ ID NO: 38721 - DNA, 75 bp, synthetic construct
  source 1..75: mol_type = other DNA
gtggcagagactgccgtatccgctcaaataattgctacggtcaggtatcccggcgagatcaggaaagtgcgctgg

SEQ ID NO: 38722 - DNA, 75 bp, synthetic construct
  source 1..75: mol_type = other DNA
aaatcgacaaccattcgttgtattaatcatctggaagaacatcaacagggacggatcgtggtagatggcatcgaa

SEQ ID NO: 38723 - DNA, 75 bp, synthetic construct
  source 1..75: mol_type = other DNA
tttttacagctgctcgataaagtcacgccctcacagtgggcagcaataggtgtgctgggtagcctggtatttggc

SEQ ID NO: 38724 - DNA, 75 bp, synthetic construct
  source 1..75: mol_type = other DNA
gattcgtttggtggtaacccaccattatattcgtgcggtcttagtgcgctgtaatatccaacgatatagtccgtt

SEQ ID NO: 38725 - DNA, 75 bp, synthetic construct
  source 1..75: mol_type = other DNA
aggcagtgctggctactggtttttacagctgctcgataaagtcacgccctcacagtgggcagcaataggtgtgct

SEQ ID NO: 38726 - DNA, 75 bp, synthetic construct
  source 1..75: mol_type = other DNA
cggtggctatgcaatgcgccgccaccgttcacccttcgacatccctcgatgtggcaagggtggagtccggttata

SEQ ID NO: 38727 - DNA, 75 bp, synthetic construct
  source 1..75: mol_type = other DNA
cggcggtgcataactacagcgtcgacagcagcgcgccaaccatcattatcaataccgttgccagcgacaatatcg

SEQ ID NO: 38728 - DNA, 75 bp, synthetic construct
  source 1..75: mol_type = other DNA
ccttcttttttggcatcctgcacaccaataacatcattatcgcttatgtttttggctttctggcgggaatggcaa

SEQ ID NO: 38729 - DNA, 75 bp, synthetic construct
  source 1..75: mol_type = other DNA
tattgctatagcatctgtgttaatcactggcccaagtggtaacgatggtctggaaggcgtcagctacataccata

SEQ ID NO: 38730 - DNA, 75 bp, synthetic construct
  source 1..75: mol_type = other DNA
aagagctggcgatggtcgagcgtaacgaaaaaggtcgccaggtgcgacgctacttcattgaatgcgagaaacgtt

SEQ ID NO: 38731 - DNA, 75 bp, synthetic construct
  source 1..75: mol_type = other DNA
acatgaccagaacagtgcacaggcgctgcttgcaaacagaattaataataaagggtatctgtatcatggcaagtt

SEQ ID NO: 38732 - DNA, 75 bp, synthetic construct
  source 1..75: mol_type = other DNA
atggctgattcgaatctcaatgtgccggtaatcattcaggctacacggctcgacacatcagtccttccacgcaat

SEQ ID NO: 38733 - DNA, 75 bp, synthetic construct
  source 1..75: mol_type = other DNA
atgaaacttgcaccggaaacccgcgagatcctgcgacagtacaaagccctgattaatgcccgccgacgtgatgcc

SEQ ID NO: 38734 - DNA, 75 bp, synthetic construct
  source 1..75: mol_type = other DNA
aagatgaaatgcgtcgcttgggaatttctcctgagtctgttgccgaaatgcatgttaatgatccacaggaattcc

SEQ ID NO: 38735 - DNA, 75 bp, synthetic construct
  source 1..75: mol_type = other DNA
aagaaggtaaccacacaacggcataccgcgatggttccggtatatggaccatctgtcgtggtgccacaatggtgg

SEQ ID NO: 38736 - DNA, 75 bp, synthetic construct
  source 1..75: mol_type = other DNA
ccgtgaaagtcactggcaactcaagcaccgcccatgttgctagctttatcgctgatccatcgactatcgccgcca

SEQ ID NO: 38737 - DNA, 75 bp, synthetic construct
  source 1..75: mol_type = other DNA
atgtcgaagaaaatcaaagtggctctgcatatcctgcgatttctgactcaaaagtgaaggagtgtctaatcccaa

SEQ ID NO: 38738 - DNA, 75 bp, synthetic construct
  source 1..75: mol_type = other DNA
tgtcggctgccgttctggcgctgattgccgcaggtgcttctgcgcctgaaatcctcgaccagtttctggatgaaa

SEQ ID NO: 38739 - DNA, 75 bp, synthetic construct
  source 1..75: mol_type = other DNA
tgaacctcattgatgaaatgttttaccgcgtggagggtaatgatattcgtatcagtatcgatggtggcgagtgga

SEQ ID NO: 38740 - DNA, 75 bp, synthetic construct
  source 1..75: mol_type = other DNA
cgcgcgcggtttgccgggaagaaagtttatgagattgccatctcccaggcgttgaaaaatatcgaccagattttc

SEQ ID NO: 38741 - DNA, 75 bp, synthetic construct
  source 1..75: mol_type = other DNA
aaccagggggaaatcattactctgatcgttggtcaggatttggatttctccagcatctacaaattaaaaatggtg

SEQ ID NO: 38742 - DNA, 75 bp, synthetic construct
  source 1..75: mol_type = other DNA
ttgagcttaatcctgatacccggaaaattaaaattgtcgctccgggggggcttgatgtggttgcccccctggctg

SEQ ID NO: 38743 - DNA, 75 bp, synthetic construct
  source 1..75: mol_type = other DNA
atgacgttgactcctctgaactggcgtttaaactggctgcttctatcgcctttaaagaaggctttaagaaagcga

SEQ ID NO: 38744 - DNA, 75 bp, synthetic construct
  source 1..75: mol_type = other DNA
cccccgttttcaccctgttttacgggcagaaagatatcactcacgatattgctccttttgtcctgagcgtgacgt

SEQ ID NO: 38745 - DNA, 75 bp, synthetic construct
  source 1..75: mol_type = other DNA
gcagtttgccggaactcaccaattttgaggtaagctattctctggttaccaatgaagtttacttgtctgcatcct

SEQ ID NO: 38746 - DNA, 75 bp, synthetic construct
  source 1..75: mol_type = other DNA
ctggataaaaacaaaaggtgatacgggtaagcgcaaaaccttcgttaacacgaccttgggcgaaacgtgggaacc

SEQ ID NO: 38747 - DNA, 75 bp, synthetic construct
  source 1..75: mol_type = other DNA
aggctacccggtagtagacatgggtattcgtctgcacttcggttcttaccatgacgttgactcctctgaactggc

SEQ ID NO: 38748 - DNA, 75 bp, synthetic construct
  source 1..75: mol_type = other DNA
gggatactggttactgcagctgctggacaaagtctctccgtcccagtgggtggcaataggtgtgctggggagtct

SEQ ID NO: 38749 - DNA, 75 bp, synthetic construct
  source 1..75: mol_type = other DNA
gccgcaccggaagctacattaaaaactcgctcccgcaggaagaacgcataaagatggttgccgaccaggtagcca

SEQ ID NO: 38750 - DNA, 75 bp, synthetic construct
  source 1..75: mol_type = other DNA
gtaaacaggcacaggaaatgttgcgacaggcggaacaactggaaaaaacgggcgtaacaaaagatgccattcgtc

SEQ ID NO: 38751 - DNA, 75 bp, synthetic construct
  source 1..75: mol_type = other DNA
ggcgctggcaggcgcagcaaatccggcgcaagtggccgctgattttcatgcgcaaatcgactccatctggggagg

SEQ ID NO: 38752 - DNA, 75 bp, synthetic construct
  source 1..75: mol_type = other DNA
atgacgatgaattcattcgagcgaaggaataagatcatccaattagtgaatgaacagggaaccgtgcttgttcag

SEQ ID NO: 38753 - DNA, 75 bp, synthetic construct
  source 1..75: mol_type = other DNA
aatggcgtaatggcgggggtgtttgcccgctatgtctggcttaatcgactgcattactatgcgatcagttatgtg

SEQ ID NO: 38754 - DNA, 75 bp, synthetic construct
  source 1..75: mol_type = other DNA
ggaaaaaatctgctcggtgtaccgcgaaagcgacatcgtaccgggagagcagaccgccaccagcatactgaaaca

SEQ ID NO: 38755 - DNA, 75 bp, synthetic construct
  source 1..75: mol_type = other DNA
cgtattcgctcaaacaactgttacggtcaggtatcccgtcgcgaccaggaaagtgcgctggcgtgctggggaatt

SEQ ID NO: 38756 - DNA, 75 bp, synthetic construct
  source 1..75: mol_type = other DNA
cgctgattgccgctggtgcgcctgcgcctgacattctcgaccagtttctggatgaaaaggaaggcaaccacacca

SEQ ID NO: 38757 - DNA, 75 bp, synthetic construct
  source 1..75: mol_type = other DNA
ggaaaagacggtggtcagcattgccgttgatccggagtctccggaatccttcatgaaacgacctaaacgtcgccg

SEQ ID NO: 38758 - DNA, 75 bp, synthetic construct
  source 1..75: mol_type = other DNA
gtgagcgcagaactcatgcgactgctgagcaatatcatccgcaccgggatcatctctgaagttgatgaggaatcc

SEQ ID NO: 38759 - DNA, 75 bp, synthetic construct
  source 1..75: mol_type = other DNA
gaatactgcagtaatggctgggtggagatcgacaataacctgtgtgaaaacgccctccgggtaattgcactgggg

SEQ ID NO: 38760 - DNA, 75 bp, synthetic construct
  source 1..75: mol_type = other DNA
atgtttaaagaaaagctcgaagattataccgaggaggaatttcttaattttttaggtggattgagatcatctatg

SEQ ID NO: 38761 - DNA, 75 bp, synthetic construct
  source 1..75: mol_type = other DNA
ggacgaaaaagggtgttgattttatcgcgccctatacgccgaaagagccggttaagccacgttatacatggactt

SEQ ID NO: 38762 - DNA, 75 bp, synthetic construct
  source 1..75: mol_type = other DNA
gctaatctcgcacttgcagaagcggtaagcgcccaacaaaacgtagaaaccactcgccagactgccgaagccgat

SEQ ID NO: 38763 - DNA, 75 bp, synthetic construct
  source 1..75: mol_type = other DNA
atgatattcaggaattacatagcttacacggtcaacgtagagcactagccttaagcttaaatgatttatctgatg

SEQ ID NO: 38764 - DNA, 75 bp, synthetic construct
  source 1..75: mol_type = other DNA
gtttattttggtgttattaccgggttaactgcatgggttgggattgttttttctaaactgatagccagatataaa

SEQ ID NO: 38765 - DNA, 75 bp, synthetic construct
  source 1..75: mol_type = other DNA
gtggcgctaattacgctggtggtgttccagatgctggggggcattaccgatttttaccgctcctggcgtggcgtt

SEQ ID NO: 38766 - DNA, 75 bp, synthetic construct
  source 1..75: mol_type = other DNA
atgcccgcaatggtagccaccagtaagactgagtggggacgggcgttccgcgaccgtctggcggctaatggcaag

SEQ ID NO: 38767 - DNA, 75 bp, synthetic construct
  source 1..75: mol_type = other DNA
tccttgctcaatgaaattggcgtttcaggcggctcactggcggcattgacttcacccttaacctcaacaactccc

SEQ ID NO: 38768 - DNA, 75 bp, synthetic construct
  source 1..75: mol_type = other DNA
tcggggcaggtaccctggtcaaccagggacagatggagaacggcgtctggttctggaaattccagtatccggtca

SEQ ID NO: 38769 - DNA, 75 bp, synthetic construct
  source 1..75: mol_type = other DNA
atgagcgaagcacaccccacatcccctgtctctccggaaacagataacagcggagatatttataaacaaacgctc

SEQ ID NO: 38770 - DNA, 75 bp, synthetic construct
  source 1..75: mol_type = other DNA
ggaccgtgcggcgtgacgtaacgccggggttcgtcgccgccgagctgatcgtctggctcaatgagcacaagatta

SEQ ID NO: 38771 - DNA, 75 bp, synthetic construct
  source 1..75: mol_type = other DNA
ggctttatactggcactgtttattggcttacgcagtcgcaaagaaacgcggcatcacacgctaaaggaaaatatc

SEQ ID NO: 38772 - DNA, 75 bp, synthetic construct
  source 1..75: mol_type = other DNA
tgaaaccacacaatttgaaattcaatccgtgattgcccgttgccgttttcatcaagaaaaaggcggtgtgcgatg

SEQ ID NO: 38773 - DNA, 75 bp, synthetic construct
  source 1..75: mol_type = other DNA
aaaaactggtttctgggcattgggcgttttactgctgatgagcaggagcaatccgacgcggtccgttatgagacg

SEQ ID NO: 38774 - DNA, 75 bp, synthetic construct
  source 1..75: mol_type = other DNA
tttacatctgcaatgagtgcgtggatttgtgcaatgaaattatcaggaaagaagtgacagacaaaaaggaaaaaa

SEQ ID NO: 38775 - DNA, 75 bp, synthetic construct
  source 1..75: mol_type = other DNA
ttaacggcgggaacggcgttaacggtcgagattaacaacgttacttatggcgcgacggtattagccgacggcacg

SEQ ID NO: 38776 - DNA, 75 bp, synthetic construct
  source 1..75: mol_type = other DNA
cagaaagcgggtattgcgtcattctgcccgtataacattggccccggtaagtgtctcccgtcgacgttttataag

SEQ ID NO: 38777 - DNA, 75 bp, synthetic construct
  source 1..75: mol_type = other DNA
agaacaaaatttcgccaatgctcagtttaatcttggtatgctctattacaaaggtgagggtgttaaacaaaactt

SEQ ID NO: 38778 - DNA, 75 bp, synthetic construct
  source 1..75: mol_type = other DNA
ccgtgatggtgcgggtatctggaccatctgccgcggtgccacaatggtggatggtaaacctgttattccgggcat

SEQ ID NO: 38779 - DNA, 75 bp, synthetic construct
  source 1..75: mol_type = other DNA
gggtgttgattatgcatggcgacacgctgtgcaccgatgacgcgggttatcaggcttttcgcgccaaagtccaca

SEQ ID NO: 38780 - DNA, 75 bp, synthetic construct
  source 1..75: mol_type = other DNA
acggcaaggattccacgggcaccgagataaacggtgacaaagccatcgtcaacaacgacggtgacagcacgatcc

SEQ ID NO: 38781 - DNA, 75 bp, synthetic construct
  source 1..75: mol_type = other DNA
aaatgggtgaagtaggtaaaacgctgagcgattctgtgccagagttacttaatagcaccgatttggttaatgacc

SEQ ID NO: 38782 - DNA, 75 bp, synthetic construct
  source 1..75: mol_type = other DNA
atgaatactgttactactatgaatactgctgttaaaactgcttccgtgtctctggttgttgataacaccaaaccg

SEQ ID NO: 38783 - DNA, 75 bp, synthetic construct
  source 1..75: mol_type = other DNA
tctgggtcgctcctcggatggtgaagcgtgtcgctctggtgcataagcaaattaattatttactaagaacgtatt

SEQ ID NO: 38784 - DNA, 75 bp, synthetic construct
  source 1..75: mol_type = other DNA
cgtattcgctcaaataactgttacggtcaggtatcccgtcgtgaccaggagagtgcgctggcgtgctggggaatt

SEQ ID NO: 38785 - DNA, 75 bp, synthetic construct
  source 1..75: mol_type = other DNA
tctgtggtcatggattccgggcgatggcatgtagtgcgttaatagaatcaggtttgtggtcccgcgatgcagttg

SEQ ID NO: 38786 - DNA, 75 bp, synthetic construct
  source 1..75: mol_type = other DNA
gccattcaatgacccgtctgttaggcgctaaaaagggcgctacgaaggttaaagaagcactgacggccttgcgta

SEQ ID NO: 38787 - DNA, 75 bp, synthetic construct
  source 1..75: mol_type = other DNA
tgctgacaatcaggcagtggtgcgaaacatacggaccgggtagcaacgttgtactgcctgcagaagaagcggaag

SEQ ID NO: 38788 - DNA, 75 bp, synthetic construct
  source 1..75: mol_type = other DNA
accggcaaataccgctggcacggtggcactgaagcgtataccggtcgtgaagtgcaggatattcccggtgtgctg

SEQ ID NO: 38789 - DNA, 75 bp, synthetic construct
  source 1..75: mol_type = other DNA
aacggtggcgcatttatggcccccgaaccggatgacgatgatgacggaacatgggtactgttcaatgccatgaac

SEQ ID NO: 38790 - DNA, 75 bp, synthetic construct
  source 1..75: mol_type = other DNA
ctccagcgcgatgcccgtgcccttaaacggggattatgggcagatgaaaatccagtgccaccatgggcctggagg

SEQ ID NO: 38791 - DNA, 75 bp, synthetic construct
  source 1..75: mol_type = other DNA
atgacacctgagcaattagccttatcagaggcaatcgctctggctggtggtcaatcagaattggctcggaagctc

SEQ ID NO: 38792 - DNA, 75 bp, synthetic construct
  source 1..75: mol_type = other DNA
atgaatggttatgtcgctacgacttgccgaaagtctgaaccggctctggcgaccgctcatgattgcgctgctgtg

SEQ ID NO: 38793 - DNA, 75 bp, synthetic construct
  source 1..75: mol_type = other DNA
atgaataaaatcccagcaatagaaagcgaagataagcatgtctttttttcacgtgaacaaatgatacaaataaaa

SEQ ID NO: 38794 - DNA, 75 bp, synthetic construct
  source 1..75: mol_type = other DNA
atggcatgcagtgcgctgatggaatcgggtttatgggcaaaggacgcagtagaacgccagatgagtcatcaggag

SEQ ID NO: 38795 - DNA, 75 bp, synthetic construct
  source 1..75: mol_type = other DNA
gcccagcaactgggatataaaacgaccattctttctcatggtgaagatgtcaaaaaacagaatgaactgatcgat

SEQ ID NO: 38796 - DNA, 75 bp, synthetic construct
  source 1..75: mol_type = other DNA
aaagcgttcgcatacctgctgaaacagtgggaggccctgaacgtgtactgcagtaatggctgggtggaaatcgac

SEQ ID NO: 38797 - DNA, 75 bp, synthetic construct
  source 1..75: mol_type = other DNA
gtgaccctggagccccgggtcttcggctggatggaccgtctgtgtgaagactactgcggtggtatctggagtctg

SEQ ID NO: 38798 - DNA, 75 bp, synthetic construct
  source 1..75: mol_type = other DNA
ggcgaataccgtcgtcattttctaaaagctaatccgctgtgtgtccattgtctcaaggctggcgtctatgcatcg

SEQ ID NO: 38799 - DNA, 75 bp, synthetic construct
  source 1..75: mol_type = other DNA
gcagcgcctttaaggttatcgaaacacaacgtccgaaacgggcctgttgccggtgcgaccatatcgtgcaggctc

SEQ ID NO: 38800 - DNA, 75 bp, synthetic construct
  source 1..75: mol_type = other DNA
ttttgccgtgctgctgaaaatcatgatgaaaaatgtctacatcccctacttcatcctgggctttgttgccgcagc

SEQ ID NO: 38801 - DNA, 75 bp, synthetic construct
  source 1..75: mol_type = other DNA
aatgccatgaacggtaactgcgctgaaatgagtccggaagccgccggcattgccgcctgtctgatgacgtacagt

SEQ ID NO: 38802 - DNA, 75 bp, synthetic construct
  source 1..75: mol_type = other DNA
aggggtcaagtattcccatcgcggctcaaaaatgcgtacagagcatctggttccactctcaactcaggcactgga

SEQ ID NO: 38803 - DNA, 75 bp, synthetic construct
  source 1..75: mol_type = other DNA
cggatggcggagaacgccgatacacgcggcattgaacgcgtgaactatctggcactgctggcactcggcactttc

SEQ ID NO: 38804 - DNA, 75 bp, synthetic construct
  source 1..75: mol_type = other DNA
cgactggcaactaaacttacactgctcatcttcatccgttccagtgaacttcgctttgccaggtggtctgagatc

SEQ ID NO: 38805 - DNA, 75 bp, synthetic construct
  source 1..75: mol_type = other DNA
tgaaccaggatatcgacgaactgcattttgcgccgttgaaaatcgaccagcaactggcaaccgtggcagtgattc

SEQ ID NO: 38806 - DNA, 75 bp, synthetic construct
  source 1..75: mol_type = other DNA
tggagttggtccagagctggtggcgtggagacacaccgctgggcgcagtgattatgtcgatcgttatggctggtt

SEQ ID NO: 38807 - DNA, 75 bp, synthetic construct
  source 1..75: mol_type = other DNA
acatagcgtatttaacaagtattcaacgggcacatcgaattcatttatttttaataacgatgtcagtagcataac

SEQ ID NO: 38808 - DNA, 75 bp, synthetic construct
  source 1..75: mol_type = other DNA
gacttcgcgactgaaagcgtctttatcgaagacagcgatttaccgtccggcccgctgttaaccgaagtgaactat

SEQ ID NO: 38809 - DNA, 75 bp, synthetic construct
  source 1..75: mol_type = other DNA
atctggaagaacggcgattgatgctacagtggtgggccgattttctggatgtaaacagagaaagggaaggtgcga

SEQ ID NO: 38810 - DNA, 75 bp, synthetic construct
  source 1..75: mol_type = other DNA
catcggtgaaatatgaatcagatggaggcccaggcatcgcgcggatcatggcttttttgatggggtccagcgagg

SEQ ID NO: 38811 - DNA, 75 bp, synthetic construct
  source 1..75: mol_type = other DNA
gcaccggggcatcagcagcccacgattacgcagacggccagcggcattccgcaggtgaatattcagacgccttct

SEQ ID NO: 38812 - DNA, 75 bp, synthetic construct
  source 1..75: mol_type = other DNA
tgcgcattgcctattttggcggtggtggtggctggaagcgaaaaacgctcgagattttgctctgtggcgctctga

SEQ ID NO: 38813 - DNA, 75 bp, synthetic construct
  source 1..75: mol_type = other DNA
tgggaacacgatcttcatgctgcaatgaacaacattcaggaagaaatcgaattagttggtgagaatgcggcgagc

SEQ ID NO: 38814 - DNA, 75 bp, synthetic construct
  source 1..75: mol_type = other DNA
attgatggcggtaacaaatacctgaaagggcttaaccctgcctatccgttgatcccaatcgacggcaactgcaag

SEQ ID NO: 38815 - DNA, 75 bp, synthetic construct
  source 1..75: mol_type = other DNA
gcatcagcttctggccgcagcattttggcctcattccacagtgggttaccctggatccccgtgtcttcggctgga

SEQ ID NO: 38816 - DNA, 75 bp, synthetic construct
  source 1..75: mol_type = other DNA
taaaggtccgctggatcacgacggcttctctgctgtagaagcaatcgctccgggcgttatcgaacgtcagtccgt

SEQ ID NO: 38817 - DNA, 75 bp, synthetic construct
  source 1..75: mol_type = other DNA
gcatcagcttctggccgcagcattttggcctcattccacagtgggtaaccctggaaccccgtgtcttcggctgga

SEQ ID NO: 38818 - DNA, 75 bp, synthetic construct
  source 1..75: mol_type = other DNA
gcatcagcttctggccgcagcattttggcctcattccacagtgggtcaccctggacccccgtgtcttcggctgga

SEQ ID NO: 38819 - DNA, 75 bp, synthetic construct
  source 1..75: mol_type = other DNA
gtattggtatatggctctatcaccgttccgataatccacgcgagttaattccggggagaaaagacgatggtaacg

SEQ ID NO: 38820 - DNA, 75 bp, synthetic construct
  source 1..75: mol_type = other DNA
ggggggctattgttattggtggggatgatttaactcctttgcatggtaagacttatggtcgggaaaaaatagaga

SEQ ID NO: 38821 - DNA, 75 bp, synthetic construct
  source 1..75: mol_type = other DNA
aaggaagcaacccggaatgccgccgccctgttctctgttgactataaagcgtttctgaacgaggtcaacaacctg

SEQ ID NO: 38822 - DNA, 75 bp, synthetic construct
  source 1..75: mol_type = other DNA
tcgtctggagtttgacgccgggcacactgacattgcgcagtcctttatggcaatccgccgtgccactaccgccag

SEQ ID NO: 38823 - DNA, 75 bp, synthetic construct
  source 1..75: mol_type = other DNA
accataccgctgcacgcgcgtttttatcagtatggcccgacgaccagcaccggcgaggtggagtcgcatatgatc

SEQ ID NO: 38824 - DNA, 75 bp, synthetic construct
  source 1..75: mol_type = other DNA
cagttacgagaaacaactggcacaggaaggggtggacatcacgctgatttactccgggcagcacaaggttgacgg

SEQ ID NO: 38825 - DNA, 75 bp, synthetic construct
  source 1..75: mol_type = other DNA
ttggcctgctgacgtatctgacaaatctttatttcaagattaaagaagataagcgtaaggctgcgagaggtgaat

SEQ ID NO: 38826 - DNA, 75 bp, synthetic construct
  source 1..75: mol_type = other DNA
aagaaaaacagcgtgtgattgagatggaaaaacaactgaaggaattatccgcaacgattgagcggttaaaaaatg

SEQ ID NO: 38827 - DNA, 75 bp, synthetic construct
  source 1..75: mol_type = other DNA
tttgatgataatgataccggagatatcagttcgctcggctctacacaatacggatttggtgacgctttaacctct

SEQ ID NO: 38828 - DNA, 75 bp, synthetic construct
  source 1..75: mol_type = other DNA
aaatgcaagaaatcataatgagccatcctttatatctactctaatatatcttgtttcaagaattgaacataatga

SEQ ID NO: 38829 - DNA, 75 bp, synthetic construct
  source 1..75: mol_type = other DNA
cgattagggatgaagcgcaccacgctgctgtcacgaatgcagcgtctggggatctcggttcgcgaggtgttgtaa

SEQ ID NO: 38830 - DNA, 75 bp, synthetic construct
  source 1..75: mol_type = other DNA
cagtggcttgatcaggtcagtccttcacagtgggctgcgattggtgtactggggagtctggttctgggcttcctg

SEQ ID NO: 38831 - DNA, 75 bp, synthetic construct
  source 1..75: mol_type = other DNA
gttctacagcggttaagctggcatggtttgaaaacggggaactaaaaaccctcattagtcacaattctttcaagg

SEQ ID NO: 38832 - DNA, 75 bp, synthetic construct
  source 1..75: mol_type = other DNA
ctaaccgctctcttattaagaatgagatggaagatatcccgctacaacagattcacgatattgtatctaagttta

SEQ ID NO: 38833 - DNA, 75 bp, synthetic construct
  source 1..75: mol_type = other DNA
actctttctttaagagattgagcattaacataatgttaattgaaggcgtcatagcaagagccagacaaagtataa

SEQ ID NO: 38834 - DNA, 75 bp, synthetic construct
  source 1..75: mol_type = other DNA
gctgcataaccctgtctcggcgcgtgataaagataaccagcgcctgctgatgcttatccgcgactcatattccct

SEQ ID NO: 38835 - DNA, 75 bp, synthetic construct
  source 1..75: mol_type = other DNA
tgtcgggcgtttcgtcaggacagagacgcactgcttgaagcgcggaataaatacttaaacagtacgagagaagag

SEQ ID NO: 38836 - DNA, 75 bp, synthetic construct
  source 1..75: mol_type = other DNA
acggacatctgagccagcgcgtgccgtatggtggctactggcaggaaaggacgatgaagattctacgttacaaat

SEQ ID NO: 38837 - DNA, 75 bp, synthetic construct
  source 1..75: mol_type = other DNA
gaaagataaaccggtaaaattctcggcgatgttaaccagtaaaggaacgcccgcgtctggctggtcggtgaactt

SEQ ID NO: 38838 - DNA, 75 bp, synthetic construct
  source 1..75: mol_type = other DNA
tttataaactccgacacttatttctctcgaaaacttagcacgatgctgcatgaaaatacagttgcgatattaggc

SEQ ID NO: 38839 - DNA, 75 bp, synthetic construct
  source 1..75: mol_type = other DNA
ctgcgcaggaagcgggtaactaccagcgcaaactggttgccgaagatcagcaaaaaatcatcgacggcatgaaag

SEQ ID NO: 38840 - DNA, 75 bp, synthetic construct
  source 1..75: mol_type = other DNA
gatttaccgcctccggcagcagaagccggtctgggcactgtgcaatgacacggcctgttctgcagccatgctgct

SEQ ID NO: 38841 - DNA, 75 bp, synthetic construct
  source 1..75: mol_type = other DNA
actcaggcggctttctagctggtatcggtgggcaaaactcaaatgcgccaaaggcaagtgatgtaagtgaggcgt

SEQ ID NO: 38842 - DNA, 75 bp, synthetic construct
  source 1..75: mol_type = other DNA
ttatccaaaggattgtgagtttgacgagattaagcgtccctggctggccgaagctggtctaaaaaagggacgagg

SEQ ID NO: 38843 - DNA, 75 bp, synthetic construct
  source 1..75: mol_type = other DNA
ttgcaggtgccgctgcgtgacctgtgggatccgacgacctgtccggtcagtttcctgccttatctcgcctgggcg

SEQ ID NO: 38844 - DNA, 75 bp, synthetic construct
  source 1..75: mol_type = other DNA
atcgtcaaaacaaaagccactgcgacaggcacgacgctcaccggcggcgaacaaatcgtcgagggtgtggcgaat

SEQ ID NO: 38845 - DNA, 75 bp, synthetic construct
  source 1..75: mol_type = other DNA
ccggggaaagtacatccgttattgaagatttgtcgcttccccacccatccatgcccaaggggcgtgatcttttga

SEQ ID NO: 38846 - DNA, 75 bp, synthetic construct
  source 1..75: mol_type = other DNA
gcggcgatgtggttgctggtttccgtgatattgccgatcccgtgctggcaagtgaggcggcttatattcagtgtc

SEQ ID NO: 38847 - DNA, 75 bp, synthetic construct
  source 1..75: mol_type = other DNA
cgaatacagggccacggtcggggatgcagacacaaaagaaatcccgctggctgtagggatgctctggtcggttta

SEQ ID NO: 38848 - DNA, 75 bp, synthetic construct
  source 1..75: mol_type = other DNA
gattgaaatgctgcgtcgtatggggcttgagcgcttcatccgcacgaaagaggaagtgaataagcaagctgtcct

SEQ ID NO: 38849 - DNA, 75 bp, synthetic construct
  source 1..75: mol_type = other DNA
agctggccatccgttacgaatacctgaaagcgagtatccgagcgaaggttgagcatccatttcggatagtaaaat

SEQ ID NO: 38850 - DNA, 75 bp, synthetic construct
  source 1..75: mol_type = other DNA
ccatgcgcattcaccggcagcatcctgcatcccgtctttttccgttctgcaccggcaaataccgctggcaaggca

SEQ ID NO: 38851 - DNA, 75 bp, synthetic construct
  source 1..75: mol_type = other DNA
aggtcaagacttttataatcaaaactcttatactttcggtgtaacttataatggggttgattatgattctacatc

SEQ ID NO: 38852 - DNA, 75 bp, synthetic construct
  source 1..75: mol_type = other DNA
aaacccgacgccgttctggcaggtcttcagcaacagaaaaagcaacatcttctcatattgaatcacaggataacg

SEQ ID NO: 38853 - DNA, 75 bp, synthetic construct
  source 1..75: mol_type = other DNA
ccgagtgaagggctctcgcggccagggggagcatgatgtggtcgcgctacaaagtgcggaaagtacatcaaatcc

SEQ ID NO: 38854 - DNA, 75 bp, synthetic construct
  source 1..75: mol_type = other DNA
tgaagtgcaggatattcccggtgtgctggccgtgtttgctgaacgccgtaaggacagttttggcccgtatgtccg

SEQ ID NO: 38855 - DNA, 75 bp, synthetic construct
  source 1..75: mol_type = other DNA
cgcggaaaacttgcagagacaatccgcagcaatcaggctggcgaggcacttcaggcgagagggcaaaacctttcc

SEQ ID NO: 38856 - DNA, 75 bp, synthetic construct
  source 1..75: mol_type = other DNA
ctggcgctggggaaataccctgaagtgtcgttggcggatgcccgggcacgccgggatgaagcccgtaagctgtta

SEQ ID NO: 38857 - DNA, 75 bp, synthetic construct
  source 1..75: mol_type = other DNA
cgtgccgctggcctcgctgattaagtcaccgctgaatgtgcgcacggtgccgtattctgcggagtccgtcagcga

SEQ ID NO: 38858 - DNA, 75 bp, synthetic construct
  source 1..75: mol_type = other DNA
gacgtttataaagggggtatcagcaatggaacgacaattaagggcggtgcttcacgcgtagagggagggagtgcg

SEQ ID NO: 38859 - DNA, 75 bp, synthetic construct
  source 1..75: mol_type = other DNA
ttggcgctgggggtatatcccgatgtgtctttggctgatgccagagcaaagcgtgatgaagctcgaaaaggtatc

SEQ ID NO: 38860 - DNA, 75 bp, synthetic construct
  source 1..75: mol_type = other DNA
tttactggctggcctctctactcaaaagcgggggggatcatggctatcgaagctgtttccgcgactgttccgcta

SEQ ID NO: 38861 - DNA, 75 bp, synthetic construct
  source 1..75: mol_type = other DNA
aattgctggatggggttgaggttgagtggaaacccttgaaggatgtttgtgattttaaaaatggatttgcattta

SEQ ID NO: 38862 - DNA, 75 bp, synthetic construct
  source 1..75: mol_type = other DNA
ccagtgggctggcctgcgatgtgctgcgtataccggatgaaccgccccgccgctggtttgaccgtgatgttctgc

SEQ ID NO: 38863 - DNA, 75 bp, synthetic construct
  source 1..75: mol_type = other DNA
gactggtgagagacgctgatgattttgtcgcagtggcgatcgctggtttcaaccagatgaatcgtggtggcccgg

SEQ ID NO: 38864 - DNA, 75 bp, synthetic construct
  source 1..75: mol_type = other DNA
taaagaaacgactcatgtcacaggcagcaaactggatatttcggtcaactggcaaggggcggcaaaagcgtattc

SEQ ID NO: 38865 - DNA, 75 bp, synthetic construct
  source 1..75: mol_type = other DNA
atgtataccctgaactggcagccgccgtatgactggtcgtggatgttgggatttctcgccgcccgtgcggtgagt

SEQ ID NO: 38866 - DNA, 75 bp, synthetic construct
  source 1..75: mol_type = other DNA
ccattcccggtagttacagtgcggttattgatatgccgagtggtggtggtaacgtcactctggagtttaagattt

SEQ ID NO: 38867 - DNA, 75 bp, synthetic construct
  source 1..75: mol_type = other DNA
tattcggcagcctgtttttttcctgcagcgtgatggccgcaaacggtacgctgtcccccaccgtggtgccaatgg

SEQ ID NO: 38868 - DNA, 75 bp, synthetic construct
  source 1..75: mol_type = other DNA
tgttgctgttcagcaccagtgactttatctgcattggcattgtcgccctaccgctgacgatggtgattgtcagtg

SEQ ID NO: 38869 - DNA, 75 bp, synthetic construct
  source 1..75: mol_type = other DNA
gccttattgaaggggcaaaaccggcaagccgacacctgaccgggctcgctatcagcctgagcaccaccgggcgcg

SEQ ID NO: 38870 - DNA, 75 bp, synthetic construct
  source 1..75: mol_type = other DNA
tttattatattagagttagagtttaaagaaaataaaaaattaatgattattaggtctgtgactatagcagtcatg

SEQ ID NO: 38871 - DNA, 75 bp, synthetic construct
  source 1..75: mol_type = other DNA
tatagcgatccgggaagtggtaataacccgggaggtacaagatacacgggttatggttttgaagttcgcaaaaac

SEQ ID NO: 38872 - DNA, 75 bp, synthetic construct
  source 1..75: mol_type = other DNA
tccagaacattggcgttaatcagatacagacggttggtgtcaaccaggtggaaacggtgggcagtaaccagatta

SEQ ID NO: 38873 - DNA, 75 bp, synthetic construct
  source 1..75: mol_type = other DNA
gttacagagccagcacctgaacagcctggtgtatgaccgtgactacgggtggaatgacaacggcgacctggtgcg

SEQ ID NO: 38874 - DNA, 75 bp, synthetic construct
  source 1..75: mol_type = other DNA
gctgaaataacccgggcttattttgagcttggtatgacgttcccggaattatatgacgacagccatccggaagcc

SEQ ID NO: 38875 - DNA, 75 bp, synthetic construct
  source 1..75: mol_type = other DNA
acagaggcacgattgccggttcggtgcatgttgacgctgtaaacaatggtggcgaaggcgacggtatacaggctt

SEQ ID NO: 38876 - DNA, 75 bp, synthetic construct
  source 1..75: mol_type = other DNA
tttaccgcgatgacgtataccagaagcaaaacgtttaaaacggaagctggcgcgcgtcgctggttagcaagaaac

SEQ ID NO: 38877 - DNA, 75 bp, synthetic construct
  source 1..75: mol_type = other DNA
cgtttcgatggcggcaaaagcgaaagcgtccgaggagcaggaaactgatgtactgttgattggcggcggcattat

SEQ ID NO: 38878 - DNA, 75 bp, synthetic construct
  source 1..75: mol_type = other DNA
tcaggaaggccagtaccaggattaccagcgcacacagtatgaagtgtatgactaccccggacgtttcaagggtgc

SEQ ID NO: 38879 - DNA, 75 bp, synthetic construct
  source 1..75: mol_type = other DNA
gcgatgacatataccaaaagcaaaacgtttaaaaccggatctggcgcgcgttgctggttagccagaaacactgac

SEQ ID NO: 38880 - DNA, 75 bp, synthetic construct
  source 1..75: mol_type = other DNA
gttttatcagaaacatatcgccccgggtgttgatattgtaaaactacgaaatgaaatcccaggttatatgagtcg

SEQ ID NO: 38881 - DNA, 75 bp, synthetic construct
  source 1..75: mol_type = other DNA
accggggcggaacttgttctgtccggcagtcagtggcagtcgctgccggtacttccggcagacggaacgcaggtg

SEQ ID NO: 38882 - DNA, 75 bp, synthetic construct
  source 1..75: mol_type = other DNA
accgcgatgacgtataccaaaagcaaaacgtttaaaaccgaaactggcgcacgtcgctggctggaaagaaattca

SEQ ID NO: 38883 - DNA, 75 bp, synthetic construct
  source 1..75: mol_type = other DNA
acgaatccatggtgtgcggcgtgttccccaaccaggatggaacgttcaccgccatgacttataccaaaagcaaaa

SEQ ID NO: 38884 - DNA, 75 bp, synthetic construct
  source 1..75: mol_type = other DNA
tcgcaattaaacctgttgacatgcgccggggcatcgactcactgacgcagtatatacaggatgaactccggtcga

SEQ ID NO: 38885 - DNA, 75 bp, synthetic construct
  source 1..75: mol_type = other DNA
tgttgcatcagcgatcgttctgttcgatcagatgaatcgcggtggtccggcaggaaatactctgcttgtgcatta

SEQ ID NO: 38886 - DNA, 75 bp, synthetic construct
  source 1..75: mol_type = other DNA
gcgctggggaaaatggataaatggctgtacgccgatatcacgcatttttcccagttctggcattacctgaacgaa

SEQ ID NO: 38887 - DNA, 75 bp, synthetic construct
  source 1..75: mol_type = other DNA
cttattcgctcaatgtcccgtaaaggatgttcacctgataatgccgcatgcgaaggctttttcggcagactgaaa

SEQ ID NO: 38888 - DNA, 75 bp, synthetic construct
  source 1..75: mol_type = other DNA
gttctgcgggaggtggtccgggaagcccggaccgaaatccgcagcatggcggatgccctggcaaaaatccggaaa

SEQ ID NO: 38889 - DNA, 75 bp, synthetic construct
  source 1..75: mol_type = other DNA
gctggaatgatttgatggatgagttttttttctgccgttcagtacgtgaagctacggagtggagctacagaaagg

SEQ ID NO: 38890 - DNA, 75 bp, synthetic construct
  source 1..75: mol_type = other DNA
atggctacatcgacagtaattcctgatgacatcaaaacgctaaaatccgacgttagcaaattaaaaaacgatcaa

SEQ ID NO: 38891 - DNA, 75 bp, synthetic construct
  source 1..75: mol_type = other DNA
cctgaaagatgtcgcacgggttgaacttggcggtgaaaactataacgttatcgctcgcatcaacggaaaaccggc

SEQ ID NO: 38892 - DNA, 75 bp, synthetic construct
  source 1..75: mol_type = other DNA
ctggtcagaggcgcgttttagcggaatggtcaaaacggcgctgacgctggcagtaacgaccaccttaaaggaatt

SEQ ID NO: 38893 - DNA, 75 bp, synthetic construct
  source 1..75: mol_type = other DNA
atgaaatgaacctgaagatgcactggaagtgcgccattcgtccggcctggtactggattattgtggttaacacac

SEQ ID NO: 38894 - DNA, 75 bp, synthetic construct
  source 1..75: mol_type = other DNA
ggagcctggggatgtagagctttgggttacattacctgtatctgaatatttcactacagatatgcaagagaattc

SEQ ID NO: 38895 - DNA, 75 bp, synthetic construct
  source 1..75: mol_type = other DNA
gcatggcgatgaatgcctgggcacgtcctgatggcgaaaaagttccggcagctggaataacccaggcttattttg

SEQ ID NO: 38896 - DNA, 75 bp, synthetic construct
  source 1..75: mol_type = other DNA
caggtctgggctataatattggtgcttcaattactaataagtttgaatcgcaatacataaaaaatcagttgggaa

SEQ ID NO: 38897 - DNA, 75 bp, synthetic construct
  source 1..75: mol_type = other DNA
gcgacgccattcatctgttaacgccacgcgccatcaatgaagaagtgggcaggcgtctgctcgaagagatggcct

SEQ ID NO: 38898 - DNA, 75 bp, synthetic construct
  source 1..75: mol_type = other DNA
cccgaccggtattgccggtgcgggcgtactggtcaccgaaggttgccgtggtgaaggcggttatctgctgaacaa

SEQ ID NO: 38899 - DNA, 75 bp, synthetic construct
  source 1..75: mol_type = other DNA
cagaggctgagcgtttgcgccttgcgaaggcagagcaaaaagcccgtgaagaagctgaagcagcagaaaaagcgc

SEQ ID NO: 38900 - DNA, 75 bp, synthetic construct
  source 1..75: mol_type = other DNA
caattgccatggtgtttacggctcgttttatggggcgtgtgatacccaagtggggcagcccaagtgtcttgcgaa

SEQ ID NO: 38901 - DNA, 75 bp, synthetic construct
  source 1..75: mol_type = other DNA
ccctggcgtttaataatttaccgcgaccacaccgcgttatgttggggtcgctcaccgttcttactctggccgtcg

SEQ ID NO: 38902 - DNA, 75 bp, synthetic construct
  source 1..75: mol_type = other DNA
ttagcggcacaactcggtatcgggattatttatcaggaactcagcgttattgatgaattaaccgtactggaaaat

SEQ ID NO: 38903 - DNA, 75 bp, synthetic construct
  source 1..75: mol_type = other DNA
ctattcccgatggtgagcttgagatcaccgccattcgtgcgcagggcgcgggcgggcagcatgttaataagacct

SEQ ID NO: 38904 - DNA, 75 bp, synthetic construct
  source 1..75: mol_type = other DNA
aatatctgtcattacgtcaatcaggggctgcagcaaagcattcagtcactacaggcgcatattaccagcctgctg

SEQ ID NO: 38905 - DNA, 75 bp, synthetic construct
  source 1..75: mol_type = other DNA
gcagataaacgccccaataacggtgacctgcgtgattccggggcactggagcaggatgctgacctgattatgttt

SEQ ID NO: 38906 - DNA, 75 bp, synthetic construct
  source 1..75: mol_type = other DNA
aggacagcaagtcgcacagaccctgcagcaaaccggggatacctgcgaactgctggatattctggcaaatgatgg

SEQ ID NO: 38907 - DNA, 75 bp, synthetic construct
  source 1..75: mol_type = other DNA
ggaagaagacgcagaacaacgaaggtctcagtccggattatgggggaaaatttctcaatggtccggtatcaacaa

SEQ ID NO: 38908 - DNA, 75 bp, synthetic construct
  source 1..75: mol_type = other DNA
ttggacgtgggccgggaagcaactatggaaactggtatctgagcagtagtaaaaatactccagaaccaaggcctg

SEQ ID NO: 38909 - DNA, 75 bp, synthetic construct
  source 1..75: mol_type = other DNA
tcaggttactgacaatctgtatatcaatggaaatggtgctgtacgggtttcaacacccacagatgtgaatggtat

SEQ ID NO: 38910 - DNA, 75 bp, synthetic construct
  source 1..75: mol_type = other DNA
tctgtttgtgctggtcaataaattcgatgaaaaagatcgcaatggtgatggtgcggatgccgtacgccagaaggt

SEQ ID NO: 38911 - DNA, 75 bp, synthetic construct
  source 1..75: mol_type = other DNA
gcagaaggtttctaaaaccacttaacccacaatatccgatgattgagatcaacgggaactgcaaaatcatcggtg

SEQ ID NO: 38912 - DNA, 75 bp, synthetic construct
  source 1..75: mol_type = other DNA
acttcactgtaggcactaatgcattattagcatcccaaaaagaatattacagcgatttagttgcgttggttgatc

SEQ ID NO: 38913 - DNA, 75 bp, synthetic construct
  source 1..75: mol_type = other DNA
tggggtgattacctcaaaaacaggtgccgcactgcacgatattttgcatgtgttgaaacgccgcgatccgtctct

SEQ ID NO: 38914 - DNA, 75 bp, synthetic construct
  source 1..75: mol_type = other DNA
tgtcgcagtggcgattgccggtttcaatcagatgaaccgtggtggcccggcaggaaatgccgtggtgatgcacta

SEQ ID NO: 38915 - DNA, 75 bp, synthetic construct
  source 1..75: mol_type = other DNA
tgcgctagtggtatgggatggaacgagcgcaggcaaagcggtttatgtttccgctgtacaaatcgacacagcgaa

SEQ ID NO: 38916 - DNA, 75 bp, synthetic construct
  source 1..75: mol_type = other DNA
ccagccgtaatctgcgacgcaaacaaaaagcgttatcccgcaagcaaaagggaagcgcgaatcgtaaaaaggcca

SEQ ID NO: 38917 - DNA, 75 bp, synthetic construct
  source 1..75: mol_type = other DNA
aagcgggttgctgatatcagacaggttgaaaccacagcccgctatcttggcacggcgctgtactggatagccgcc

SEQ ID NO: 38918 - DNA, 75 bp, synthetic construct
  source 1..75: mol_type = other DNA
ccggcttctggcctgcggtatccgggacgtgttactggaagacgtggcgcagcggaatatcccgctctcgcataa

SEQ ID NO: 38919 - DNA, 75 bp, synthetic construct
  source 1..75: mol_type = other DNA
ggaatgccatgtggggcgtcaaaattgagcagaccgaagacggcaggcattatgtcgcggggcttggccttagta

SEQ ID NO: 38920 - DNA, 75 bp, synthetic construct
  source 1..75: mol_type = other DNA
aaccgtcacagtttacgatgaccagggcttcgaccggcagattatcattcccccggtgctgtttcgcgggacgaa

SEQ ID NO: 38921 - DNA, 75 bp, synthetic construct
  source 1..75: mol_type = other DNA
tccggatggtgaaaaagttccggcggccaagataaccagggcttatttcgaactgggaatgacgtccccggaact

SEQ ID NO: 38922 - DNA, 75 bp, synthetic construct
  source 1..75: mol_type = other DNA
atgaatgaaattagagaaataccagtagaacgtgatgaatatggctgctgggcacatcctgaatatgaaaaattc

SEQ ID NO: 38923 - DNA, 75 bp, synthetic construct
  source 1..75: mol_type = other DNA
gtgggtaaaggtggcggtaaggcgcacacaccgcgcgaggcgaaggataatctcaaatccacgcagatgatgagt

SEQ ID NO: 38924 - DNA, 75 bp, synthetic construct
  source 1..75: mol_type = other DNA
ggcagcggtaagccggtgagtgtggacatcacggcacaaccggcccctgcccggatacaggtcagtgccctgcct

SEQ ID NO: 38925 - DNA, 75 bp, synthetic construct
  source 1..75: mol_type = other DNA
tccaacggggccgaagtacggcggtcagagaaaaactggcagtggaaacccgcggtggcgtactgccgctatgcc

SEQ ID NO: 38926 - DNA, 75 bp, synthetic construct
  source 1..75: mol_type = other DNA
atggctgaaaaattatccacctggaagttcatccttatctggctggtgtttgtgattatggcctctggttatttt

SEQ ID NO: 38927 - DNA, 75 bp, synthetic construct
  source 1..75: mol_type = other DNA
atctgcggcttctgtcaggagaaggcagaaacgtcagccgcctggacgaattacgcaatattatcgaagtcagaa

SEQ ID NO: 38928 - DNA, 75 bp, synthetic construct
  source 1..75: mol_type = other DNA
tttaaagagtcgcttctggatgcagtaaaaaccggtgaaaatgcagtcatcgctgaatgcgtatcccggattatg

SEQ ID NO: 38929 - DNA, 75 bp, synthetic construct
  source 1..75: mol_type = other DNA
gccgggcgtggaaacccgaaattcaatatagagcacaaccgcgctcatgcggttttttcgtgtcatgagcatcgt

SEQ ID NO: 38930 - DNA, 75 bp, synthetic construct
  source 1..75: mol_type = other DNA
atcgatggtgcgatcaaatacctcagtggtctcaccgtggatcaaatccagcaattgctcacagattaagactcg

SEQ ID NO: 38931 - DNA, 75 bp, synthetic construct
  source 1..75: mol_type = other DNA
gaggctccttgatacccggaaaggcggtaaatcctgctccggctggctgtgggcttacgtcagcggagaaagaag

SEQ ID NO: 38932 - DNA, 75 bp, synthetic construct
  source 1..75: mol_type = other DNA
gaacgatgacggcacgtatgccatcactgccgtgcagcatgtaccggaaaaagaagccatcgtggataacggggc

SEQ ID NO: 38933 - DNA, 75 bp, synthetic construct
  source 1..75: mol_type = other DNA
ccaccgcacctatggagaaattgatttcacactgtatcaaaatcaaacgcgcaggctacaggccggtcatcctaa

SEQ ID NO: 38934 - DNA, 75 bp, synthetic construct
  source 1..75: mol_type = other DNA
ctggcgcagccgctgaccttctcaacgctaacatcatcgcccgtgatttgggcctcaaagagcagtcgcaagttg

SEQ ID NO: 38935 - DNA, 75 bp, synthetic construct
  source 1..75: mol_type = other DNA
tcgtgtttcacgcatcactcgcacggcttccggtgctaatgctggaggcgggaaccttaccgatcgcggcgacgg

SEQ ID NO: 38936 - DNA, 75 bp, synthetic construct
  source 1..75: mol_type = other DNA
gcagcgttttgaaaacgcctcaaaggaaagcaccgaatttacgaaaagaattaacgtgatcggcgtgaccgacca

SEQ ID NO: 38937 - DNA, 75 bp, synthetic construct
  source 1..75: mol_type = other DNA
atctgcggcttctgtcaggagaaggcagaaacgtcagtcgcctggacgaattacgcaatattatcgaagtcagaa

SEQ ID NO: 38938 - DNA, 75 bp, synthetic construct
  source 1..75: mol_type = other DNA
tcgcggcaaaattgccactatcttccacggcattgatatctccagtcgggaagtgctcaaccattacactcccga

SEQ ID NO: 38939 - DNA, 75 bp, synthetic construct
  source 1..75: mol_type = other DNA
tgtgggccggaaggctgcaaaaaatgggctgccccagagaaaaaatcgccgtatcgcgtatgggcgtggacatga

SEQ ID NO: 38940 - DNA, 75 bp, synthetic construct
  source 1..75: mol_type = other DNA
cttatccggattaaaatctggtaagccagacgtttttaataactttggtgttctatctggattatcaggtttcga

SEQ ID NO: 38941 - DNA, 75 bp, synthetic construct
  source 1..75: mol_type = other DNA
gctgaactggttgttccgccagaagtgggcggcttctggatgcgtgagcttggtctgtatgacgatgccggaaca

SEQ ID NO: 38942 - DNA, 75 bp, synthetic construct
  source 1..75: mol_type = other DNA
cggagcggtattgcagggagccggagataatgttctgaaaacaacaggggcaaatccgtcaacattgggggttgc

SEQ ID NO: 38943 - DNA, 75 bp, synthetic construct
  source 1..75: mol_type = other DNA
ggtgaggaagcatttcgtggcttcatgtcaaaacacgccaatgtggaaatcggtcttgccctgcgttctgaccgc

SEQ ID NO: 38944 - DNA, 75 bp, synthetic construct
  source 1..75: mol_type = other DNA
atggatatctcgcttctcagtaccaccagtgaccctgaacagcttcgcgctctggcaattgccatggtgcaaaaa

SEQ ID NO: 38945 - DNA, 75 bp, synthetic construct
  source 1..75: mol_type = other DNA
cctgcctctgtatcgccagcaacaggtctttgcccgttcagatgtcgggctgcccgtcagttcgatggctgacat

SEQ ID NO: 38946 - DNA, 75 bp, synthetic construct
  source 1..75: mol_type = other DNA
cgcacctggagcattgctccggcgcaggatgtgccatgggaagggcgcagccgcgaagatctcagcggctttagc

SEQ ID NO: 38947 - DNA, 75 bp, synthetic construct
  source 1..75: mol_type = other DNA
ccgtaacccgaataacgtgatcgatatgaagtctcgtcagtaccagtgcgaacaggtgaactacgatacctttat

SEQ ID NO: 38948 - DNA, 75 bp, synthetic construct
  source 1..75: mol_type = other DNA
ggaggatgttgaaccctaccactggcaggcaccggatgtctctgaatggagcacccgcacttttaaaggttatgt

SEQ ID NO: 38949 - DNA, 75 bp, synthetic construct
  source 1..75: mol_type = other DNA
acacctacgaacaaaaatacggcctgcgcgattatcgcggcggtggacgttcttccgcccgcgaaaccgccatgc

SEQ ID NO: 38950 - DNA, 75 bp, synthetic construct
  source 1..75: mol_type = other DNA
ggcaacggcggctcccattgcgacgctatgcactttgccgaagagttgaccggtcgctaccgtgaaaaccgtccg

SEQ ID NO: 38951 - DNA, 75 bp, synthetic construct
  source 1..75: mol_type = other DNA
atcgcacgggctggcgctcggctgcatcgtcgatggtgttccgccaggcattccgctgacggaagcggacctgca

SEQ ID NO: 38952 - DNA, 75 bp, synthetic construct
  source 1..75: mol_type = other DNA
cgggaacatttaccgttgaagtcggcacactggacagtggcgtgacggaggaaatgtatctggaaatggagcggt

SEQ ID NO: 38953 - DNA, 75 bp, synthetic construct
  source 1..75: mol_type = other DNA
cggtgagtttactgtcaaacgcctgcagcttaagccccgtattgccctgctgccgatgaatccagcctaccccac

SEQ ID NO: 38954 - DNA, 75 bp, synthetic construct
  source 1..75: mol_type = other DNA
gtcagtgaaatgcaggactatattccggaaaaccgctgttaccgtgcaaccctggagtttcaggtcacggtgtga

SEQ ID NO: 38955 - DNA, 75 bp, synthetic construct
  source 1..75: mol_type = other DNA
gtgaatccgcatcagggattgcaacagaaagcaaaagtgcctcagcatccgcagcctcaaaactcagtaaaggtg

SEQ ID NO: 38956 - DNA, 75 bp, synthetic construct
  source 1..75: mol_type = other DNA
tggacgcatttgatgaaatgactccggaacaacgacgctcatttcttgaggttgggcgattctatactcaaccca

SEQ ID NO: 38957 - DNA, 75 bp, synthetic construct
  source 1..75: mol_type = other DNA
tttatatttatgacgagattggtttctggggtgttacagcgaagcagtttatcagtgatctgaatgcactgggcg

SEQ ID NO: 38958 - DNA, 75 bp, synthetic construct
  source 1..75: mol_type = other DNA
tctcccgtgcgggaagcttatgatggcgcggccatacacgccagttactgtacagaagcagaatatgcacgtttt

SEQ ID NO: 38959 - DNA, 75 bp, synthetic construct
  source 1..75: mol_type = other DNA
ttgtcgcgctgcaaaaaggcgacacccagaacacccacgcggcatggacgaaatacaaccttgccgccagaaccc

SEQ ID NO: 38960 - DNA, 75 bp, synthetic construct
  source 1..75: mol_type = other DNA
acatgttgcaacaaccacgattaacaaaaatctggccatagctcatattcgacgctgcgatactttgttgcataa

SEQ ID NO: 38961 - DNA, 75 bp, synthetic construct
  source 1..75: mol_type = other DNA
tgagcaactggaggatgagatcaatcagcagatagagagtgatattgctgaagtgacccaaaaaatcggggagac

SEQ ID NO: 38962 - DNA, 75 bp, synthetic construct
  source 1..75: mol_type = other DNA
gcgtggcttgcgcagtgcgggctgacggtggagcaactggccagacaggtggagccggaatacacaccggcgcga

SEQ ID NO: 38963 - DNA, 75 bp, synthetic construct
  source 1..75: mol_type = other DNA
ttaacgcgcctgcaaaacccgccaccattgagctgacgccggggtattttcagataacggcggtaccggtgctgg

SEQ ID NO: 38964 - DNA, 75 bp, synthetic construct
  source 1..75: mol_type = other DNA
gctacagcaggtagctgatgccagcggtatgaccaaagggtatttaagccagttactgaatgccaaaattaaaag

SEQ ID NO: 38965 - DNA, 75 bp, synthetic construct
  source 1..75: mol_type = other DNA
tatgtcgcggggcttggcctcagcatggaggatacggaggaaggcaaactgagccagttcctggttgccgctaac

SEQ ID NO: 38966 - DNA, 75 bp, synthetic construct
  source 1..75: mol_type = other DNA
ctggtcagcgattgtattgaacatatcctgtccagtgggctggcctgcgatgtgctgcgtataccggatgaaccg

SEQ ID NO: 38967 - DNA, 75 bp, synthetic construct
  source 1..75: mol_type = other DNA
atggcggcgctgggggtgatgagcgtgctggctgccgtggtatggggaatgcaccagaagacgcagcgccttgaa

SEQ ID NO: 38968 - DNA, 75 bp, synthetic construct
  source 1..75: mol_type = other DNA
gacgacgaaaacctgcccgtggtgctcgatgccatcctgaaccggggcgcacgtttttcggcggtggaaatgtat

SEQ ID NO: 38969 - DNA, 75 bp, synthetic construct
  source 1..75: mol_type = other DNA
gacatgatgctgcccatcagcgacctgtgggccggacgcctcaaaaagatgggctgcccgggcgagaaaatcacc

SEQ ID NO: 38970 - DNA, 75 bp, synthetic construct
  source 1..75: mol_type = other DNA
tgcgaactcaggaacgctcaacaatgtcacgattaaccagaactgtacgattaagggcatgctggaggcgaccca

SEQ ID NO: 38971 - DNA, 75 bp, synthetic construct
  source 1..75: mol_type = other DNA
gccatgacgtataccaaaagcaaaacgtttaaaaccgaagctggcgcacgtcgctggcttgccagaaatacttgc

SEQ ID NO: 38972 - DNA, 75 bp, synthetic construct
  source 1..75: mol_type = other DNA
cgatcacccctgctggctcgatgaggacgacgaaaacctgcccgtggtgctcgatgccatcctgaaccggggcgc

SEQ ID NO: 38973 - DNA, 75 bp, synthetic construct
  source 1..75: mol_type = other DNA
atggtcgtacccagtatcgtacagatatttacaattatgatctgcctgcgcgatccagctcgcaaatcgtatcga

SEQ ID NO: 38974 - DNA, 75 bp, synthetic construct
  source 1..75: mol_type = other DNA
aacgcgctgtcaggctgaatatggcgacggatgaggaacgcgcacgactggagtcatgggaacgctacagtgttc

SEQ ID NO: 38975 - DNA, 75 bp, synthetic construct
  source 1..75: mol_type = other DNA
gcaacaacgaatctctggtgtacggcgtgtttccaaaccaggacggcacgttcaccgcgatgacgtataccaaaa

SEQ ID NO: 38976 - DNA, 75 bp, synthetic construct
  source 1..75: mol_type = other DNA
tggcagcaggagctgattgatgtggagcgtgagaatacccttcgacagcaccggtaccagcaacaacggacggcc

SEQ ID NO: 38977 - DNA, 75 bp, synthetic construct
  source 1..75: mol_type = other DNA
actatgcagcaggtttttgttccgctaccccggcgttaaggggaaatgaggtcagcatggatactatcgagcttg

SEQ ID NO: 38978 - DNA, 75 bp, synthetic construct
  source 1..75: mol_type = other DNA
aaaatggcaatggcaccggaggtgataaacccaaagacaacaaaccgctcacagacagcaataccgggacgctac

SEQ ID NO: 38979 - DNA, 75 bp, synthetic construct
  source 1..75: mol_type = other DNA
ggtgctgctgtttgcattacccggttttctcgaccgccagtatttaagtgtgcaaacgctgaccatggtttatag

SEQ ID NO: 38980 - DNA, 75 bp, synthetic construct
  source 1..75: mol_type = other DNA
gcttattaagtttgataatacagactcattgcagatcaaatatgctaatcacgggtcgaccatgacactaaacac

SEQ ID NO: 38981 - DNA, 75 bp, synthetic construct
  source 1..75: mol_type = other DNA
atgccagtgacatttgaagaagttcagcaacataaaaagcttcatggttttgatgatctggaaaccacgacagca

SEQ ID NO: 38982 - DNA, 75 bp, synthetic construct
  source 1..75: mol_type = other DNA
cgtttttcggcattttatccaaaagcaaactatggcttacaaggaagccaaccctctgatgttcgtgcgcataat

SEQ ID NO: 38983 - DNA, 75 bp, synthetic construct
  source 1..75: mol_type = other DNA
cgccgattcgccattttttgatgattaaacccgttgccactctggatgatattttgcatcgcggcgactggtgcg

SEQ ID NO: 38984 - DNA, 75 bp, synthetic construct
  source 1..75: mol_type = other DNA
gcacatataagatggatattgctgttctggaaatcgcactggtatcgctggcagcagagccagccggtaaattgc

SEQ ID NO: 38985 - DNA, 75 bp, synthetic construct
  source 1..75: mol_type = other DNA
atgaggggatctctcagcactgagctaagttctgtggcgaatatatcagcttcaacggcgagcagtcatttatct

SEQ ID NO: 38986 - DNA, 75 bp, synthetic construct
  source 1..75: mol_type = other DNA
atgccagtgacatttgaagaagtccagcaacataaaaagtttcatggttttgatgatctggaaaccacgacagca

SEQ ID NO: 38987 - DNA, 75 bp, synthetic construct
  source 1..75: mol_type = other DNA
tcccccgctggaagacatggagctttaccagacgtttactgatgaattctttggtcccgcatttgcggtgctggg

SEQ ID NO: 38988 - DNA, 75 bp, synthetic construct
  source 1..75: mol_type = other DNA
aatgaaaatgtttttaacccgcctcggggagaacgtgacggttatcgtcaacggtgatatcacgcaatgcgattt

SEQ ID NO: 38989 - DNA, 75 bp, synthetic construct
  source 1..75: mol_type = other DNA
agagtgaactgaatatcatcaggaattttattgatgaacagcagttaacgaatagtgatattccgaagaaaagta

SEQ ID NO: 38990 - DNA, 75 bp, synthetic construct
  source 1..75: mol_type = other DNA
ctgcccgccttgctggaagaagagctgaaccaggatatcgatgaactgcatttcgccccgttgaaaatcgaccag

SEQ ID NO: 38991 - DNA, 75 bp, synthetic construct
  source 1..75: mol_type = other DNA
ttcgaagctgcaggagcatgcagcactggtctacaaaatcttttgcatttcagaaagtaatgacgcccgcgagtg

SEQ ID NO: 38992 - DNA, 75 bp, synthetic construct
  source 1..75: mol_type = other DNA
cgcgctttagcccgcgtccggtgaaagcgcccgcaacgccgctggaaatcatctccgtcgcacgcttaaccgaga

SEQ ID NO: 38993 - DNA, 75 bp, synthetic construct
  source 1..75: mol_type = other DNA
aattcagcccagtggcacgcagacaaaagcgcggaagtcattcatcaactggcaacattactcaaagccggacta

SEQ ID NO: 38994 - DNA, 75 bp, synthetic construct
  source 1..75: mol_type = other DNA
atgaaaaatgaagtcgacaatgttatcactctggtacagccaaaatcagaggaggaaggactcctcaacgttgtg

SEQ ID NO: 38995 - DNA, 75 bp, synthetic construct
  source 1..75: mol_type = other DNA
ctgaaaacaggtggtgcgctggcaattggtgcggcagcggcgggcggctatgctgccgggcgttttttgcagcct

SEQ ID NO: 38996 - DNA, 75 bp, synthetic construct
  source 1..75: mol_type = other DNA
cgccgattcgccattttctgatgattaaacccgtcgccactctggatgatattcttcatcgcggcgactggtgcg

SEQ ID NO: 38997 - DNA, 75 bp, synthetic construct
  source 1..75: mol_type = other DNA
tgctctccggtgctcttgatgcacatcttgaccattatgattccataaccacaggtcatattagccaggcacttc

SEQ ID NO: 38998 - DNA, 75 bp, synthetic construct
  source 1..75: mol_type = other DNA
acacaccgcgcgaggcgaaggacaatctcaaatccacgcagatgatgagtgtgattgatgcgattggtgagggac

SEQ ID NO: 38999 - DNA, 75 bp, synthetic construct
  source 1..75: mol_type = other DNA
ggtcgttgggtctacaaattacaaggtagtaccaatagccagggtgaatactccgccgcactcggtgccggtatt

SEQ ID NO: 39000 - DNA, 75 bp, synthetic construct
  source 1..75: mol_type = other DNA
ggtgtggccgtacaccaacagcgatgtggtggtggatgataacggcgtggggttccgctacagcttcagtgccct

SEQ ID NO: 39001 - DNA, 75 bp, synthetic construct
  source 1..75: mol_type = other DNA
ccgcatagtgcactgggttatcgctcgccacgggaatatctacggcagcgggccagtaatgggttaagtgataac

SEQ ID NO: 39002 - DNA, 75 bp, synthetic construct
  source 1..75: mol_type = other DNA
gtacaggacgtcatgctgggagcggtggaacgccgcttcggcaacgatcttccgtcgtctccagtggagtggctg

SEQ ID NO: 39003 - DNA, 75 bp, synthetic construct
  source 1..75: mol_type = other DNA
aagatgtgctaattctggagccaagagtatttggtgatgatagaggtttcttttatgagagctttaatcaatcag

SEQ ID NO: 39004 - DNA, 75 bp, synthetic construct
  source 1..75: mol_type = other DNA
cagcttgcaaagcaaccggccacaccatcgcgccagcctgccaccggtggcaacaccgacctgaaaaccgactgt

SEQ ID NO: 39005 - DNA, 75 bp, synthetic construct
  source 1..75: mol_type = other DNA
ttggcagcgagcttccggcgtctccagtggagtggctgacggataatggttcatgctaccgggcgaatgaaacac

SEQ ID NO: 39006 - DNA, 75 bp, synthetic construct
  source 1..75: mol_type = other DNA
cgttggcggaattccctccaccgcgttaaaaggggcaggtctgctgccacatatccgcgccaccgtaaagttgcc

SEQ ID NO: 39007 - DNA, 75 bp, synthetic construct
  source 1..75: mol_type = other DNA
gtaaaaacgacagggcatcgatttccgcaccccggagaatacccacagggttcacttaccgttcatattaaggac

SEQ ID NO: 39008 - DNA, 75 bp, synthetic construct
  source 1..75: mol_type = other DNA
ctctgacagcactgatgccattaatggctcacaactttatggcgtagcggattcatttacgtcatatcttggtgg

SEQ ID NO: 39009 - DNA, 75 bp, synthetic construct
  source 1..75: mol_type = other DNA
gaaaactcagcaggaaaaatcaaccccgccactgccgccattcgtcgcgaatacaagcagacatggaaaacgctg

SEQ ID NO: 39010 - DNA, 75 bp, synthetic construct
  source 1..75: mol_type = other DNA
cagccgggatgtgcagtacgaggcgcgcccgttactcggtttcacccgcgacgatgagcagatgattgaagacgt

SEQ ID NO: 39011 - DNA, 75 bp, synthetic construct
  source 1..75: mol_type = other DNA
aggacgcgggattgcgccagaatggcagatgaagagagaaatgctttcacctgcgtacacaacacgctggaatga

SEQ ID NO: 39012 - DNA, 75 bp, synthetic construct
  source 1..75: mol_type = other DNA
atgcactgttacaattgcgggaatttatcgacgaaaactccggtgaattttttgttcaggtctggggaaatggag

SEQ ID NO: 39013 - DNA, 75 bp, synthetic construct
  source 1..75: mol_type = other DNA
gtggagcaagctgcacctgatgaattttttgcgcatcctaaatcagagcgtacgagggcatttttatcgcaggta

SEQ ID NO: 39014 - DNA, 75 bp, synthetic construct
  source 1..75: mol_type = other DNA
cagaaatattggtgacgggcatcgtgtcattcatggtgtggccggttccggaaaaaccatgattcttttgttccg

SEQ ID NO: 39015 - DNA, 75 bp, synthetic construct
  source 1..75: mol_type = other DNA
catgttaatcgttatctgtcgggtagggtgatgaagcggcgtatttacgctgttatagaagcttgcgacggtgga

SEQ ID NO: 39016 - DNA, 75 bp, synthetic construct
  source 1..75: mol_type = other DNA
ttccattccattagttgtcctttccgggcaggtagcgacctcgttgataggttacgatgcctttcaggagtgcga

SEQ ID NO: 39017 - DNA, 75 bp, synthetic construct
  source 1..75: mol_type = other DNA
atggctttaagctgttccgcgaaaaactggatacccgtcgcggctcaaattcacaactcgaaacggcagtgaaag

SEQ ID NO: 39018 - DNA, 75 bp, synthetic construct
  source 1..75: mol_type = other DNA
cagctgcacgcgcaaggggccgtgtgggagggagaaaaccgtcactttctgaagaagatgttaaacaaattagaa

SEQ ID NO: 39019 - DNA, 75 bp, synthetic construct
  source 1..75: mol_type = other DNA
agtcagtagcggaccgtcttggtgggggggctaccgtcaatgcgcaaggtgtcgttactgccccgaattacagac

SEQ ID NO: 39020 - DNA, 75 bp, synthetic construct
  source 1..75: mol_type = other DNA
tgccaactcaggaaggaggcaaaggggttttatatgattttaatgatggcgcaagggttttacttccaaaaggtg

SEQ ID NO: 39021 - DNA, 75 bp, synthetic construct
  source 1..75: mol_type = other DNA
tatccgaacctgctgatatggccggcggccatgctgctgggactggcggttaccgtgactgtggcatcgttcaaa

SEQ ID NO: 39022 - DNA, 75 bp, synthetic construct
  source 1..75: mol_type = other DNA
agcgcggtgaaggcggcatatgacctggcgaatagtaaggctgcgggaaaccatactcacccatggggacagatt

SEQ ID NO: 39023 - DNA, 75 bp, synthetic construct
  source 1..75: mol_type = other DNA
gggatccagacccgcgattctgtgaaccagaaccagcaagaaacggaacagaacgaccagaaagcggaacaaaac

SEQ ID NO: 39024 - DNA, 75 bp, synthetic construct
  source 1..75: mol_type = other DNA
gcgcggcggcgtggcgaaactggatgaaggtcaccggctggccgcactctggcaggcgctgccggaagaactccg

SEQ ID NO: 39025 - DNA, 75 bp, synthetic construct
  source 1..75: mol_type = other DNA
tcaacagcaactttgacggttctatggtggtggagctgaccgggcggcggaataacggtgtgcctgtgtcccttt

SEQ ID NO: 39026 - DNA, 75 bp, synthetic construct
  source 1..75: mol_type = other DNA
cactaaacagtggcaggcgatcgacaaatttgccggtgaaaacaccatctatggcagcattcgcctgaccaaccg

SEQ ID NO: 39027 - DNA, 75 bp, synthetic construct
  source 1..75: mol_type = other DNA
attcagcaatcactgctcatcagcgtcgctttgccggtgccgtcgcgccgcaatatctgaatttcaccaccggag

SEQ ID NO: 39028 - DNA, 75 bp, synthetic construct
  source 1..75: mol_type = other DNA
catagccatcaaggacagaatagacacaaatgcgccagttataggggaaatctatactcatctgatggcgatatt

SEQ ID NO: 39029 - DNA, 75 bp, synthetic construct
  source 1..75: mol_type = other DNA
cagaaagcgaaggcgctgaatatggggtatcaggtgatcgacagcgccagcgtgattgccacccatgtgaataag

SEQ ID NO: 39030 - DNA, 75 bp, synthetic construct
  source 1..75: mol_type = other DNA
gaggtggattttggacgctctgaaggaaataacattgagcaggccgacggtaaaaaatggtctgagcaggaccgt

SEQ ID NO: 39031 - DNA, 75 bp, synthetic construct
  source 1..75: mol_type = other DNA
tcgaacacggcaacaagaaaacctacgcccgcacggcgagcgagtttggctatctgccgctggagcatacgctgg

SEQ ID NO: 39032 - DNA, 75 bp, synthetic construct
  source 1..75: mol_type = other DNA
gcgtcatatccgtgctgcccgcgccaaaacaccgggcgtgtcccgcgtgctttgcattgagtgtgaagcgccaat

SEQ ID NO: 39033 - DNA, 75 bp, synthetic construct
  source 1..75: mol_type = other DNA
caggcatcgcagcggaagacaacatcactgtccgggccgggcgcgacgttaatctgctggcggaagagtccgtga

SEQ ID NO: 39034 - DNA, 75 bp, synthetic construct
  source 1..75: mol_type = other DNA
atgaataacgccgaagaactctcccccttactgacgaataccgtctccacccgcaaaattgatctggccggtgaa

SEQ ID NO: 39035 - DNA, 75 bp, synthetic construct
  source 1..75: mol_type = other DNA
agcagcgcgttgaagaagaacgccagcgccatatctgtgctgcccgtgctaaaacaccgggcgtgtcccgcgtgc

SEQ ID NO: 39036 - DNA, 75 bp, synthetic construct
  source 1..75: mol_type = other DNA
agcgccattaattccgggtattgcaatgatgatcgcaaacaaacttgaaaattttggggtaacagatgatgagca

SEQ ID NO: 39037 - DNA, 75 bp, synthetic construct
  source 1..75: mol_type = other DNA
atgcatcgccgcccgtcgctgtttttggcattccgttgccgttcaccctgatttacctgttctggtgcccgtttc

SEQ ID NO: 39038 - DNA, 75 bp, synthetic construct
  source 1..75: mol_type = other DNA
atgaacaaagccaaagaaaagtctccttcactgatacaaatgacacctccccgcaaaattgatctgtccggtgaa

SEQ ID NO: 39039 - DNA, 75 bp, synthetic construct
  source 1..75: mol_type = other DNA
gcactggatgacgctctccaccaggcaaaatacgttacagccaccatacaaaaaatgatcccggatcaggctgat

SEQ ID NO: 39040 - DNA, 75 bp, synthetic construct
  source 1..75: mol_type = other DNA
ctgcttaataatccctgcctgaatattcagaccggtgcctggatactggcccgccattttcaacgctgcggcgtt

SEQ ID NO: 39041 - DNA, 75 bp, synthetic construct
  source 1..75: mol_type = other DNA
cgatagaaggtccggtgaagggactgcagagtatcctggtgaacaaaaccccgctgacggacacggacggtaatc

SEQ ID NO: 39042 - DNA, 75 bp, synthetic construct
  source 1..75: mol_type = other DNA
cacgatctgacgtcactggcgcgcgacgtagccactggcgtactggctcgttcaatggacgtggacatttataac

SEQ ID NO: 39043 - DNA, 75 bp, synthetic construct
  source 1..75: mol_type = other DNA
ttaagggcatgctggaggcgactcaggtcagaggtgacttcgttaaagctgtatccaaatcattcccgaaacagg

SEQ ID NO: 39044 - DNA, 75 bp, synthetic construct
  source 1..75: mol_type = other DNA
tcggggaagcacagccccgcaatgaaccggtttttctgggctatcagcgccgctggtttgaggatgaaagccaga

SEQ ID NO: 39045 - DNA, 75 bp, synthetic construct
  source 1..75: mol_type = other DNA
tgatgcactggtgctgaaggcgcaggatgtgacacagaacggtgtgctgtccggcggcaaagggctgacggtcag

SEQ ID NO: 39046 - DNA, 75 bp, synthetic construct
  source 1..75: mol_type = other DNA
attctgataattcagccgcctttgccagcaggcacgggcggcactcttacgcatttaaatctgattggtaccagc

SEQ ID NO: 39047 - DNA, 75 bp, synthetic construct
  source 1..75: mol_type = other DNA
tcgatcgtcgtcactggataatctccgtcaggctcccttattccgaacgcccaccgcgtccgtcccgcacattcc

SEQ ID NO: 39048 - DNA, 75 bp, synthetic construct
  source 1..75: mol_type = other DNA
ggttgaacaactgaatgaggttttacggaatgtgccgggggatattattatttctggtgttgcatcaaccagtcc

SEQ ID NO: 39049 - DNA, 75 bp, synthetic construct
  source 1..75: mol_type = other DNA
ctgatgtattaattttggaaccggaagtttttggtgatgagcgcggtttttttatggaaagctttaatcagaaag

SEQ ID NO: 39050 - DNA, 75 bp, synthetic construct
  source 1..75: mol_type = other DNA
gttgaagcgttgatgaaaatgccagaagttaacgccatgtatccggaacttaagctgcatgccatcgggtgggtt

SEQ ID NO: 39051 - DNA, 75 bp, synthetic construct
  source 1..75: mol_type = other DNA
ggaaatggaaggcgctgaacatccacacaaggagaatgctggcagcgctcaggatcacgccagcgatagtgaaac

SEQ ID NO: 39052 - DNA, 75 bp, synthetic construct
  source 1..75: mol_type = other DNA
cagtaagtacgacagtaaacagaccagcgtggctgccggcggcagttttacctttggctccatgaccggctcagg

SEQ ID NO: 39053 - DNA, 75 bp, synthetic construct
  source 1..75: mol_type = other DNA
ttttcggccttgttcgtgaacgtccgatcgacattcataaagatcccgtggcgctgaacaaatacatcactgaat

SEQ ID NO: 39054 - DNA, 75 bp, synthetic construct
  source 1..75: mol_type = other DNA
gcctttcgcttgaggaagcccctccgacgaaacagcaaattgtctgcagccgcagttttggcgtgaagatcacgg

SEQ ID NO: 39055 - DNA, 75 bp, synthetic construct
  source 1..75: mol_type = other DNA
aggtacatttgggaaatgggttggggtgaatttgtctgctgagaacaagcgtcagttgtggatacctgaaggatt

SEQ ID NO: 39056 - DNA, 75 bp, synthetic construct
  source 1..75: mol_type = other DNA
tgcaccgcatgcggtcagaccggtggcggcaactgtcctgactgtggtgcggtgatggggaacgcaacctaccag

SEQ ID NO: 39057 - DNA, 75 bp, synthetic construct
  source 1..75: mol_type = other DNA
agggttcactcacgatccgcttggctatgccctctatgcgttcccgtggggggaagaggggactgaactggcaca

SEQ ID NO: 39058 - DNA, 75 bp, synthetic construct
  source 1..75: mol_type = other DNA
cgtcgaacattgcggatctggtgtgggaagttgccgagggtgcgctaacggacgaagacactgagattatctggg

SEQ ID NO: 39059 - DNA, 75 bp, synthetic construct
  source 1..75: mol_type = other DNA
gcgccatattcgtgctgcccgtgtcaaaacaccgggcgtgtctcgcgtgctttgcattgaatgtgaagtgccaat

SEQ ID NO: 39060 - DNA, 75 bp, synthetic construct
  source 1..75: mol_type = other DNA
cccggaagcacgccgcgctgcaattccgggtgtggcgttttgcgtgacgtgtcaacaaatcaatgagctcaaatc

SEQ ID NO: 39061 - DNA, 75 bp, synthetic construct
  source 1..75: mol_type = other DNA
gaatttatcgacgaaaactccggtgaattttttgttcaggtctggggaaatggagccaacttcgacaacacgatt

SEQ ID NO: 39062 - DNA, 75 bp, synthetic construct
  source 1..75: mol_type = other DNA
atgttcgccctggcagacgtcaactccttctacgccagttgcgagaaggttttcaggccggatttgcgcggcaaa

SEQ ID NO: 39063 - DNA, 75 bp, synthetic construct
  source 1..75: mol_type = other DNA
gcagatgctcaacaagcgtggggagatgttcaactcatgcaagacatggctgaggctgggcggcatgctggatga

SEQ ID NO: 39064 - DNA, 75 bp, synthetic construct
  source 1..75: mol_type = other DNA
acaggggccacggtgctggtggttcaccattccggcaaggatgagacgaaaggcgcgcgcggttccagtgcattt

SEQ ID NO: 39065 - DNA, 75 bp, synthetic construct
  source 1..75: mol_type = other DNA
taccggtggtcaggctgctggcgttctttcatgaagagttaagcgagcggcgaccaggtcgcgtgccgcagaccg

SEQ ID NO: 39066 - DNA, 75 bp, synthetic construct
  source 1..75: mol_type = other DNA
gatgcggtacgtgtcgcgctcaatctggtagcaaatatgcagcgcctggaaatgactgcgcgattttttattcag

SEQ ID NO: 39067 - DNA, 75 bp, synthetic construct
  source 1..75: mol_type = other DNA
gcaggtggcctgaccgacaccgctgactggcgcaacgtggtgctaacacacaatggtcgtgaagaacgcatttct

SEQ ID NO: 39068 - DNA, 75 bp, synthetic construct
  source 1..75: mol_type = other DNA
gtgagcgaaattaattatcaggcactgcgtgaaaaggcagagaaagcaactaaaggaagctacatcgtagggcat

SEQ ID NO: 39069 - DNA, 75 bp, synthetic construct
  source 1..75: mol_type = other DNA
atgtacgcaaaatcttttctcgcattcgatggcaacggacgcctgaccggtgcccgtactgcacagacagcgcct

SEQ ID NO: 39070 - DNA, 75 bp, synthetic construct
  source 1..75: mol_type = other DNA
atgtacgcaaaatcttttctcgcacttgatggcaacagacgtctgacgggcgcccgtaccgcacagactgcacct

SEQ ID NO: 39071 - DNA, 75 bp, synthetic construct
  source 1..75: mol_type = other DNA
tccgctaaccaccaccatgttgtcggtgcctggcgcgaagactgtgcgcggtttctcacagtttggcgactctta

SEQ ID NO: 39072 - DNA, 75 bp, synthetic construct
  source 1..75: mol_type = other DNA
taaaaccacgaaaagtaacgacaaaacattatctgtcagcgccacgccatcaacggatccgatcaaaaaattaga

SEQ ID NO: 39073 - DNA, 75 bp, synthetic construct
  source 1..75: mol_type = other DNA
tgatggggtatatgtaaaacccgccgtagaacttgaacaggatgatgcagtacttaacgagattaaccagcagtt

SEQ ID NO: 39074 - DNA, 75 bp, synthetic construct
  source 1..75: mol_type = other DNA
ctgaccaagcagcgaaccaaacagagcttcggtgcctaccctgccgtctcactttctgatgcgcgtaaactcaga

SEQ ID NO: 39075 - DNA, 75 bp, synthetic construct
  source 1..75: mol_type = other DNA
cttcagaacgaagccagacaacaaaaacgtgggctctggtcagatgctgatccggttcccccctggatatggagg

SEQ ID NO: 39076 - DNA, 75 bp, synthetic construct
  source 1..75: mol_type = other DNA
ctgtggcgggcgcggctgcgtcaacgaccaaggcccgaacatcgtttggtattttaggtgctatcagcctctcac

SEQ ID NO: 39077 - DNA, 75 bp, synthetic construct
  source 1..75: mol_type = other DNA
aatcattgcagctattgggtttgttgctggcaaaattatttttgctgataatgtagtgtttaggcgaaagatata

SEQ ID NO: 39078 - DNA, 75 bp, synthetic construct
  source 1..75: mol_type = other DNA
gcagggcttccatatgtcagtggcgaccggaaccgggtttatcgccctggccggggtggcagcagagtttggcgt

SEQ ID NO: 39079 - DNA, 75 bp, synthetic construct
  source 1..75: mol_type = other DNA
ccccttatcttttcgctatttcctttgtactgttgatcggccttttagaaatttttgcgcttatctgcggtcaca

SEQ ID NO: 39080 - DNA, 75 bp, synthetic construct
  source 1..75: mol_type = other DNA
tgtttgggattgttttcatagtgatgagtgtggcttctttggttgggcttgttttacacggccatgaatacacgc

SEQ ID NO: 39081 - DNA, 75 bp, synthetic construct
  source 1..75: mol_type = other DNA
gtgaacgcagaatgacgctggtcgatctgcccggcattggtgaaacaccgcagcatgatcaggaataccgggcac

SEQ ID NO: 39082 - DNA, 75 bp, synthetic construct
  source 1..75: mol_type = other DNA
agattgttattccggcggtggctttcagcggtgccagacatgagcgggagaacagcgatacttattcgtcatgcc

SEQ ID NO: 39083 - DNA, 75 bp, synthetic construct
  source 1..75: mol_type = other DNA
ggccgggattgtttgacggtaacacgcccaggcttcttgcctgtggtatccgggaggttttactggatgaggtgt

SEQ ID NO: 39084 - DNA, 75 bp, synthetic construct
  source 1..75: mol_type = other DNA
gtgaatccctgcgtgcccgggaggatgtggcgaccgtgaagaaatatctgggaaaccggcacaagctctaccgtg

SEQ ID NO: 39085 - DNA, 75 bp, synthetic construct
  source 1..75: mol_type = other DNA
cttcgtcttcaccagctacctggcgaaagtgaacgaagagtggaaaaacaacgttggtactggctctaccgtaaa

SEQ ID NO: 39086 - DNA, 75 bp, synthetic construct
  source 1..75: mol_type = other DNA
actggcggagaaggctgcccgggaagcagagctgacagcaaaaaaagcgcaggccagacaggcgctgtccattta

SEQ ID NO: 39087 - DNA, 75 bp, synthetic construct
  source 1..75: mol_type = other DNA
gccatcacccgttcagaaagctatctgtgtgccatgaaagccggtgcctgccggtatgacacggaagggtatgtg

SEQ ID NO: 39088 - DNA, 75 bp, synthetic construct
  source 1..75: mol_type = other DNA
aaaagcagcctgtgcaatgccatttttcagtcccgtgtctgcgccacgcatccgctgaacggctgcacccgtcag

SEQ ID NO: 39089 - DNA, 75 bp, synthetic construct
  source 1..75: mol_type = other DNA
gacgctgacactgacattcaccgtatcttcatcaggagcgaataactggacaccaacaaccagtatcagcgatct

SEQ ID NO: 39090 - DNA, 75 bp, synthetic construct
  source 1..75: mol_type = other DNA
atcctgcgaatggcaacacaaaaccgatgtttgttggtcagggtgatcagatattcatgaatgaagtgttcctga

SEQ ID NO: 39091 - DNA, 75 bp, synthetic construct
  source 1..75: mol_type = other DNA
atatgaagtgaggcttcgcgggtatatctcaccgaccttcgcgctcgccgcaatggataatgatgagcagcagac

SEQ ID NO: 39092 - DNA, 75 bp, synthetic construct
  source 1..75: mol_type = other DNA
gcatcagcgcacagattgcccgacaggtggcgcttgaccgcatcatgatcggctttaacggcacgtcacacgcgg

SEQ ID NO: 39093 - DNA, 75 bp, synthetic construct
  source 1..75: mol_type = other DNA
atatgaagtgaggcttcgcgggtataactcaccgaccttcgcgctcgctgcgctggataatgatgagcagcagag

SEQ ID NO: 39094 - DNA, 75 bp, synthetic construct
  source 1..75: mol_type = other DNA
aatggcctacctgacggtatggcagggcgatgacgtacagcgccgggtgaaaggtgtggtgacctggtttgaact

SEQ ID NO: 39095 - DNA, 75 bp, synthetic construct
  source 1..75: mol_type = other DNA
agatgtagatgagttgtgtaagaaagtgacaagttggatgtattcgcatcctggagagagaattagatatgaacg

SEQ ID NO: 39096 - DNA, 75 bp, synthetic construct
  source 1..75: mol_type = other DNA
tccacgacggatgctcagggcgtattttcctcagttatagatatgcctgccggacaggggacgctgacactgaca

SEQ ID NO: 39097 - DNA, 75 bp, synthetic construct
  source 1..75: mol_type = other DNA
tcggtgtcagcatggctggtaaatgactggtatcccacagcaagtatcagcgatttgctggttgtggtgatgaag

SEQ ID NO: 39098 - DNA, 75 bp, synthetic construct
  source 1..75: mol_type = other DNA
ttctgatggaatgcgcaagcacaggaaaaacggttatcactgcggaagaaggccggaaaattgaactcatgtatc

SEQ ID NO: 39099 - DNA, 75 bp, synthetic construct
  source 1..75: mol_type = other DNA
gacagcacctttgtgctgcgttctgactctacaggctctgataaggtggtagtaaaaaacaaacttgagggtaaa

SEQ ID NO: 39100 - DNA, 75 bp, synthetic construct
  source 1..75: mol_type = other DNA
tcgtaatggcgtggatcattatcgctcgtttaaacccgtggctgcgccggaaaaactggtttcatgggtatatac

SEQ ID NO: 39101 - DNA, 75 bp, synthetic construct
  source 1..75: mol_type = other DNA
ctgaaaaaccgcaaataccagtgcgaacaggtgaactacgacacgtttatttcatatccgcagcttgatgcctgg

SEQ ID NO: 39102 - DNA, 75 bp, synthetic construct
  source 1..75: mol_type = other DNA
gcggcaactgccctgattgtggtgcggtgatgggcgacgcaacataccaggaaacattcgatgaagagaatcagg

SEQ ID NO: 39103 - DNA, 75 bp, synthetic construct
  source 1..75: mol_type = other DNA
cgtgagctggattatctgtccgaccgcaagatggttgatctggagaaaaaaccctccggcgactggtttgccgac

SEQ ID NO: 39104 - DNA, 75 bp, synthetic construct
  source 1..75: mol_type = other DNA
agtgactatcttgagcaacgacgaccgatgatgcagtggtgggctgattttgttaaagcagcagatagcggcagc

SEQ ID NO: 39105 - DNA, 75 bp, synthetic construct
  source 1..75: mol_type = other DNA
agtaaagctggtaataacgggccgtgggtaactcactgggaagaaatggcaaaaaaaacggctattcgtcgcctg

SEQ ID NO: 39106 - DNA, 75 bp, synthetic construct
  source 1..75: mol_type = other DNA
aagccgctacggcggcctgccaggcatgtcagattcgggaagagctgaggctattatcgggagagtccaggccag

SEQ ID NO: 39107 - DNA, 75 bp, synthetic construct
  source 1..75: mol_type = other DNA
aatttaccatgacgcagtccgcaccgctgatggtgctgccggatccggatgagtttgtggtggtgcaggtgaaat

SEQ ID NO: 39108 - DNA, 75 bp, synthetic construct
  source 1..75: mol_type = other DNA
gccggtatgacgtttttctggagtgaggagggggcggcgcacagccgcgctgtcatgaacacggagctgggctgg

SEQ ID NO: 39109 - DNA, 75 bp, synthetic construct
  source 1..75: mol_type = other DNA
cgatgatgcagtggtgggctgattttgttaaagcagcagatagcggcagcattgtgaatagtagggttaggggaa

SEQ ID NO: 39110 - DNA, 75 bp, synthetic construct
  source 1..75: mol_type = other DNA
agcttatagtgtcacagcaacccataacggaacaactcatcatgcaataagcacccaaaactggggacaaagctc

SEQ ID NO: 39111 - DNA, 75 bp, synthetic construct
  source 1..75: mol_type = other DNA
ctctgactctggaaaaagactcacgactgacggctaatatgtggcttatgaactcaggcacaattaacgttggtg

SEQ ID NO: 39112 - DNA, 75 bp, synthetic construct
  source 1..75: mol_type = other DNA
cacaagacttattggaatcttatgccattcgtttattgagcggaccattgaatggatgcgagtatgaaatactta

SEQ ID NO: 39113 - DNA, 75 bp, synthetic construct
  source 1..75: mol_type = other DNA
cagatgtttggtctattctgaatcagtatgatgaaaatacagttaatggtttaaaaaacaaatttactcaaaaag

SEQ ID NO: 39114 - DNA, 75 bp, synthetic construct
  source 1..75: mol_type = other DNA
gcacgtttcgcctggatatcggcgtgcaggaccagggcatcactgaagatacctatctggaacttgagcgactga

SEQ ID NO: 39115 - DNA, 75 bp, synthetic construct
  source 1..75: mol_type = other DNA
tgctgttccgtccccgtgaggtacagggaaaaatgtacggtgatggtggtatgggcggatggcaaaatatgcagg

SEQ ID NO: 39116 - DNA, 75 bp, synthetic construct
  source 1..75: mol_type = other DNA
acttttcattgctgaaaaaactgctcccggccatgaacctctgccagctccccggacgtgcgggcgcactgctta

SEQ ID NO: 39117 - DNA, 75 bp, synthetic construct
  source 1..75: mol_type = other DNA
gataccggtcgggtgacggagcaggtcaacccggaggggctggactaccgctttgagtacggagagagccgggta

SEQ ID NO: 39118 - DNA, 75 bp, synthetic construct
  source 1..75: mol_type = other DNA
ggtgcagtcactggtggagaccacctcaaagggtgaccgtaatccctcttctgtccgcctgctgattcagcttga

SEQ ID NO: 39119 - DNA, 75 bp, synthetic construct
  source 1..75: mol_type = other DNA
atacgaagtcgacgaacgcctgattaccactatcgacaaacatcgttcggaaaaggatgcacaccacatctacct

SEQ ID NO: 39120 - DNA, 75 bp, synthetic construct
  source 1..75: mol_type = other DNA
aagaaacaggattatggccggtggtcgacagacatgatgaaatcactggttgcaggaaaaacggttaccgtcaca

SEQ ID NO: 39121 - DNA, 75 bp, synthetic construct
  source 1..75: mol_type = other DNA
ctatcatttggcacctatccaactattacattggctgaagctcgcaaacgtcgggatgaagccaagaaaatacat

SEQ ID NO: 39122 - DNA, 75 bp, synthetic construct
  source 1..75: mol_type = other DNA
cggggctgattaccgatctggcagaagaagccggaatgaccggaatttttatctattccgccgccaccgtgcgcc

SEQ ID NO: 39123 - DNA, 75 bp, synthetic construct
  source 1..75: mol_type = other DNA
aaatcatgatggcgcaggattttcaggatctcaccggacaggtcattaagcggatgatggatgtcattcaggaga

SEQ ID NO: 39124 - DNA, 75 bp, synthetic construct
  source 1..75: mol_type = other DNA
atgggaggatggcgaaatatgcagggaaatacccctgtaacgcctctggtcgatgccggatgcaatatggtgatt

SEQ ID NO: 39125 - DNA, 75 bp, synthetic construct
  source 1..75: mol_type = other DNA
gggctaccgctgtatgtgtcgctgtaccccacagaagggggcatgcaggatattattgactgcattcgtgctgaa

SEQ ID NO: 39126 - DNA, 75 bp, synthetic construct
  source 1..75: mol_type = other DNA
tcagtcgaagacaggtggcacttatttttgatatcggcctttcaaccctttatcgttattatcctgcgagcgttt

SEQ ID NO: 39127 - DNA, 75 bp, synthetic construct
  source 1..75: mol_type = other DNA
cataaagttggtgaaggcacattaactgttaatggaaaaggggttaataatggaggactgaaagtcggtgatgga

SEQ ID NO: 39128 - DNA, 75 bp, synthetic construct
  source 1..75: mol_type = other DNA
tcaccagcaacgcattgccattgagcgcaagcaactggatgattttttgaacttgatgacaacttccatcaactc

SEQ ID NO: 39129 - DNA, 75 bp, synthetic construct
  source 1..75: mol_type = other DNA
atgttgtgtattgttttgcttttggaatgacattttttgtcattggtaatattgtattgtcatctttttttaagg

SEQ ID NO: 39130 - DNA, 75 bp, synthetic construct
  source 1..75: mol_type = other DNA
tggcagataagttcacctgaccagcgctgggcagtggataccgccgatgcgcgtactgagaacgggcagctggtt

SEQ ID NO: 39131 - DNA, 75 bp, synthetic construct
  source 1..75: mol_type = other DNA
caggacataccgggttatctcttcaccggagccctgacctatgacggcgacatcatcacggtttaccccggataa

SEQ ID NO: 39132 - DNA, 75 bp, synthetic construct
  source 1..75: mol_type = other DNA
gagtaccgcaaacttggcccgttcgtggctgatattcaccagtggcaaaatctggatgactattacaaccagtac

SEQ ID NO: 39133 - DNA, 75 bp, synthetic construct
  source 1..75: mol_type = other DNA
taggttatgggctggaagaaaaggtaaccgatgctctggctggagatatcatccgtagcaacatgatacccgcat

SEQ ID NO: 39134 - DNA, 75 bp, synthetic construct
  source 1..75: mol_type = other DNA
tgatatctcacggctaacctccagcatcggtggtgatgtggcggagcattgggcgatgcgtcagggccattcctt

SEQ ID NO: 39135 - DNA, 75 bp, synthetic construct
  source 1..75: mol_type = other DNA
tcacgcagagtatgagccggcgcggaaactgctgggataacagcccaatggaacgcttcttcaggagtctgaaga

SEQ ID NO: 39136 - DNA, 75 bp, synthetic construct
  source 1..75: mol_type = other DNA
gacaaagcgatgccggtgatcacccgaaatatcgatcgcagtatctggcgcgatctcatgctgaagtccgggatg

SEQ ID NO: 39137 - DNA, 75 bp, synthetic construct
  source 1..75: mol_type = other DNA
gctggcttattgtactgatgccgaggcgttatgtatcgatcgggtaattagtgaagtgttggcagagcatccggg

SEQ ID NO: 39138 - DNA, 75 bp, synthetic construct
  source 1..75: mol_type = other DNA
atggtgaatttacgtaaagcggctaaaggccagatatgccagatcagaatccctggctactgcaatcacaatccc

SEQ ID NO: 39139 - DNA, 75 bp, synthetic construct
  source 1..75: mol_type = other DNA
aattgctgggataacagcccaatggaacggttcttcagaagcctgaaaacagagtgggtaccggataatggctac

SEQ ID NO: 39140 - DNA, 75 bp, synthetic construct
  source 1..75: mol_type = other DNA
ctggcggcgcaggaagcgttgagtacggcaattgatgcgcatgatgatgcagtccaggccgtttaccggaaagca

SEQ ID NO: 39141 - DNA, 75 bp, synthetic construct
  source 1..75: mol_type = other DNA
tgctatgggtacggcgccatgagccgcagcactttgcgcgcatttccaccgttttactgccgaaagactatttgc

SEQ ID NO: 39142 - DNA, 75 bp, synthetic construct
  source 1..75: mol_type = other DNA
ttagcaataaatcgctcgatttttataagaatcaagtattccagtcttttcttgatattgaagggctaacagaaa

SEQ ID NO: 39143 - DNA, 75 bp, synthetic construct
  source 1..75: mol_type = other DNA
gtgttgttgcggcaacgactaaacctgcaggtgcgaatgaaacacgcccacgaaatgtcgcttttaactatattg

SEQ ID NO: 39144 - DNA, 75 bp, synthetic construct
  source 1..75: mol_type = other DNA
cgggtaacaaacgacgagaagacggagacacacgacgaagaattaattgcattgtacaacgccagaaatattcct

SEQ ID NO: 39145 - DNA, 75 bp, synthetic construct
  source 1..75: mol_type = other DNA
acggtctggttttacggctctatattcagccgaaagccagccgtgattctattgtcggtttacatggcgacgaag

SEQ ID NO: 39146 - DNA, 75 bp, synthetic construct
  source 1..75: mol_type = other DNA
atttaccagtcaatacagaacggagttatctggggggaatgaaacccgcccacgtaacattgccttcaattatat

SEQ ID NO: 39147 - DNA, 75 bp, synthetic construct
  source 1..75: mol_type = other DNA
cttgctgaacgcatcggtgttactgccgcagcccgtgaactcagcctgtatgaatcacagcgctacaactggcgc

SEQ ID NO: 39148 - DNA, 75 bp, synthetic construct
  source 1..75: mol_type = other DNA
ggggctttttacgatgcaggaacacgatcagcgacaatggcgaataacacaactgctataggcaaaaccgatgac

SEQ ID NO: 39149 - DNA, 75 bp, synthetic construct
  source 1..75: mol_type = other DNA
agaaatccgcgttgaagccttcggttgtgagctgatgctttccggcctgttaagcattgacaccgagagcgcaga

SEQ ID NO: 39150 - DNA, 75 bp, synthetic construct
  source 1..75: mol_type = other DNA
accaccacggcaatggcggtaacgctgatgatatttcggctggtgtctccggttcacctcccaaaaactttgtca

SEQ ID NO: 39151 - DNA, 75 bp, synthetic construct
  source 1..75: mol_type = other DNA
tagaaaacgtgcctgcggatgcggatatcgtcgttactcacgccagtctggaagggcgcgtgaaacgtgtgacgg

SEQ ID NO: 39152 - DNA, 75 bp, synthetic construct
  source 1..75: mol_type = other DNA
atgacatccccggaccttatacaaggtgatttgcaccgaatgtcctggtctcagctggcaaaagccgcggaagag

SEQ ID NO: 39153 - DNA, 75 bp, synthetic construct
  source 1..75: mol_type = other DNA
gtttccgctgacgcgccgccatgcgttgcagtatgtgcaaccagggcttgcgctggtgggcgatgcggcgcacac

SEQ ID NO: 39154 - DNA, 75 bp, synthetic construct
  source 1..75: mol_type = other DNA
cgcatgacacggctgaagccatgcgcacggagcttgagctgagcgcggctgcgacgatggaaccccagagtgata

SEQ ID NO: 39155 - DNA, 75 bp, synthetic construct
  source 1..75: mol_type = other DNA
atggatgatttaaccctgcgctattacgaagcagagatgcgctatctgcgggaagccggtaaagagtttgcccgt

SEQ ID NO: 39156 - DNA, 75 bp, synthetic construct
  source 1..75: mol_type = other DNA
caggttgaagtgaaacttcgtgagtatggtcgaactgaaatgcatccgtgcacttttgttttcaatccgcaaatc

SEQ ID NO: 39157 - DNA, 75 bp, synthetic construct
  source 1..75: mol_type = other DNA
actggtatcccaccgcaagtatcagcgatttgctggttgtggtgatgaaaaaatccacagccggtatcacgatta

SEQ ID NO: 39158 - DNA, 75 bp, synthetic construct
  source 1..75: mol_type = other DNA
tgatcaacggcaagcaaaaaagctggctggtgcattgtaccgattcagaggcgttaataatcgacagggttattg

SEQ ID NO: 39159 - DNA, 75 bp, synthetic construct
  source 1..75: mol_type = other DNA
cgaaccttactttctgcacaagcagatgacttcaaaatgcatgagcataaatttttagggacaagcggaaatggt

SEQ ID NO: 39160 - DNA, 75 bp, synthetic construct
  source 1..75: mol_type = other DNA
acactacggcatcatgttcttttaccggggcaggaccccatcgacgggcagctggcgcaggtcattaatggcttc

SEQ ID NO: 39161 - DNA, 75 bp, synthetic construct
  source 1..75: mol_type = other DNA
cattgtactgatgcagaggcgttatgtattgatcgagtcataagtgaggtgctggcagagcatccaggattgatt

SEQ ID NO: 39162 - DNA, 75 bp, synthetic construct
  source 1..75: mol_type = other DNA
tccggggatgcgcagatggtcagcaatatgtttgtggcaaaaaccggctctgtcggtgcacaggcggattacagc

SEQ ID NO: 39163 - DNA, 75 bp, synthetic construct
  source 1..75: mol_type = other DNA
cttgattgcatgcttgaattgtgatggcagaactgtggattttgttagaaatcaaatatcacttgcatgtcttgc

SEQ ID NO: 39164 - DNA, 75 bp, synthetic construct
  source 1..75: mol_type = other DNA
gctacagcgcctcccatgatgcactgacgcatctcgccaaccggccagttttgagaaacaactgcgtatcctgct

SEQ ID NO: 39165 - DNA, 75 bp, synthetic construct
  source 1..75: mol_type = other DNA
ggaataaatcactcagtatatatggttctcaccacattattcgcagcggagagtcattgtctgtcaccttcagag

SEQ ID NO: 39166 - DNA, 75 bp, synthetic construct
  source 1..75: mol_type = other DNA
accgggctgagttaccgtacccggcttgatcgggccgcgcgttccggaggtgggaaccggacggctaccgacccg

SEQ ID NO: 39167 - DNA, 75 bp, synthetic construct
  source 1..75: mol_type = other DNA
gcttacagccagttacagccaagaagcaatgagtggttgtttaaatcatccgaatttaagcccccgaaatgttac

SEQ ID NO: 39168 - DNA, 75 bp, synthetic construct
  source 1..75: mol_type = other DNA
tgaagtgctcattgcggtgaccgctgcttcaactctgaatctgttcgctgcttttcttggtgttatccgggggct

SEQ ID NO: 39169 - DNA, 75 bp, synthetic construct
  source 1..75: mol_type = other DNA
taatggtattatggggctaaattccctgaaggaagcacgtgataaaaataataaaataatttattcctcagggct

SEQ ID NO: 39170 - DNA, 75 bp, synthetic construct
  source 1..75: mol_type = other DNA
taatgcgctgagtctggttgccagaggctgtgcggtcgcagcaccttgcaggactaaagttgcagagcagttgct

SEQ ID NO: 39171 - DNA, 75 bp, synthetic construct
  source 1..75: mol_type = other DNA
tcacggcatcctctgtttctgccgggcacagcgccctgctttctgcaggtaacgacctgagtctgaatgcagtca

SEQ ID NO: 39172 - DNA, 75 bp, synthetic construct
  source 1..75: mol_type = other DNA
gtcccagaaatggacagtgccattgaaggactggcgtatggcaatgagccgctttattatcgagttcggtgaccg

SEQ ID NO: 39173 - DNA, 75 bp, synthetic construct
  source 1..75: mol_type = other DNA
aactattcaatgtactggcaaatgacccaatacgttttctcccgacagaaactcgaaagaaatataatcaagagg

SEQ ID NO: 39174 - DNA, 75 bp, synthetic construct
  source 1..75: mol_type = other DNA
aacgcactcaaagcacagggcgatgccgtctggccggtgctgtcttatgccgatatcaaagcaggtcatgttact

SEQ ID NO: 39175 - DNA, 75 bp, synthetic construct
  source 1..75: mol_type = other DNA
gacacatctgtcagcccggaaaatgcgctgaccggacatgaaaatgaggtggtatcagcgcagccggataccgtg

SEQ ID NO: 39176 - DNA, 75 bp, synthetic construct
  source 1..75: mol_type = other DNA
caaaagaaatggtttacatgagtttgaaattgacgatctaaaaataatatttaatcgacaagatgataatgaaag

SEQ ID NO: 39177 - DNA, 75 bp, synthetic construct
  source 1..75: mol_type = other DNA
actggcctgagagcgtcgacaccgatgcgaaaaaatgcgccgcctttgcgggttccggcgtatccgttcagccgc

SEQ ID NO: 39178 - DNA, 75 bp, synthetic construct
  source 1..75: mol_type = other DNA
cgcgctggctggaaagcggcgcgattgactgcgacgtattgtttgaggggatggacgaggccctgccgtatacag

SEQ ID NO: 39179 - DNA, 75 bp, synthetic construct
  source 1..75: mol_type = other DNA
caaagtggcaaatggggtgaaatcgccccgtttacagtcacgcctgaacttatcgcagcggcaaaagatgccaaa

SEQ ID NO: 39180 - DNA, 75 bp, synthetic construct
  source 1..75: mol_type = other DNA
tggaagagacctaccagctcacctccgcgctaaagcatatctcgtggggcaagacggtgtcgctcatcaccgatg

SEQ ID NO: 39181 - DNA, 75 bp, synthetic construct
  source 1..75: mol_type = other DNA
aaaatgccctgaaggttcagagagagtaggcgattatcacactcacggtttttactctgacgataaaggaaataa

SEQ ID NO: 39182 - DNA, 75 bp, synthetic construct
  source 1..75: mol_type = other DNA
ttaacacggaaattgaaaccatacaaaaacaaattaattatgatataaatcatttgaatgatggtttgattaagc

SEQ ID NO: 39183 - DNA, 75 bp, synthetic construct
  source 1..75: mol_type = other DNA
gagataaagttccggtcgcttcgctactgcctgagattcccggcgctcaaacaacgaagtttaataaagaccact

SEQ ID NO: 39184 - DNA, 75 bp, synthetic construct
  source 1..75: mol_type = other DNA
tgatcaacacggataaagcacccacatatggacgtgctttatcacggttaaaacgggaaggtaaatgtccaccag

SEQ ID NO: 39185 - DNA, 75 bp, synthetic construct
  source 1..75: mol_type = other DNA
tatggatgatgatttaagccctgatgaacattgtttagaatacttacttgacagtgtaaatagtagcacaatttg

SEQ ID NO: 39186 - DNA, 75 bp, synthetic construct
  source 1..75: mol_type = other DNA
agcaactagattattgaaaaacaatcaagttaatgatttatcttcatggaaaggatacttcatgttaagaaactt

SEQ ID NO: 39187 - DNA, 75 bp, synthetic construct
  source 1..75: mol_type = other DNA
ggccgccggacacaagccagcaaaacgcgacattattcttgcagcgttatttatggtgctggcgaaccgctatga

SEQ ID NO: 39188 - DNA, 75 bp, synthetic construct
  source 1..75: mol_type = other DNA
atcaaacagagtctgagtcgacgaggaaattgctgggataacagcccgatggagcgcttcttcaggagtctgaaa

SEQ ID NO: 39189 - DNA, 75 bp, synthetic construct
  source 1..75: mol_type = other DNA
atggagattaaacaattccagcgagctgctggtattagcgaggcgctggccgcacgctggttctcgcatataact

SEQ ID NO: 39190 - DNA, 75 bp, synthetic construct
  source 1..75: mol_type = other DNA
gatcaggtagccgctgaaatggctgaacaacccagtcctgcagagattgcagaggttttgatgagaaaattaaaa

SEQ ID NO: 39191 - DNA, 75 bp, synthetic construct
  source 1..75: mol_type = other DNA
cattattcagtgaaggtggtttacctttccggttactcaaagaatcagacagtcgctttctggctgttttctcca

SEQ ID NO: 39192 - DNA, 75 bp, synthetic construct
  source 1..75: mol_type = other DNA
atgttcatgtgcagttatttgaagcaacaatggaacaggagaaaaagttcgagactctgatgccaaattttaaat

SEQ ID NO: 39193 - DNA, 75 bp, synthetic construct
  source 1..75: mol_type = other DNA
tacccggaactggcaaaggcttacccgacaaataaattacctgatttacgtggtgagtttattcgtggctgggat

SEQ ID NO: 39194 - DNA, 75 bp, synthetic construct
  source 1..75: mol_type = other DNA
atgcagcggctggacgatgcctttgaatatggtgcggatgtcagcgttgttcacgacgttgttcgtgaactgatg

SEQ ID NO: 39195 - DNA, 75 bp, synthetic construct
  source 1..75: mol_type = other DNA
atgcactctaaatcaatcaatcgatattatgtccatgtgcagttatttgaagcaacaatggaacaggagaaaaag

SEQ ID NO: 39196 - DNA, 75 bp, synthetic construct
  source 1..75: mol_type = other DNA
cgtcaccgacggcgtgaaggtgaaagtgagccgtgttcctgacggcgttgctgaatacagcgtatgggggctgaa

SEQ ID NO: 39197 - DNA, 75 bp, synthetic construct
  source 1..75: mol_type = other DNA
ggctacaaggcttttaaaaaataatcaaaaaaatgatttgaaaagctggaaaggatatttcatgttgagaaatca

SEQ ID NO: 39198 - DNA, 75 bp, synthetic construct
  source 1..75: mol_type = other DNA
ccccagaccggcacacctgccaccgatctggatgatgactactttgacatgttgcaggaagaactttgtagcgtg

SEQ ID NO: 39199 - DNA, 75 bp, synthetic construct
  source 1..75: mol_type = other DNA
aggtgctgtatcgtctgcgtctggcacaggcccggcttaagggcgtacaggccagaagcgcgaaagccgccatca

SEQ ID NO: 39200 - DNA, 75 bp, synthetic construct
  source 1..75: mol_type = other DNA
ggaactggaagtgacggtctcccgtctttcccgtctgctggccgaacaggtgcgttttggtgtgctgggtgtttc

SEQ ID NO: 39201 - DNA, 75 bp, synthetic construct
  source 1..75: mol_type = other DNA
actgggtgattaccggcgtaccgttcgatatggccacttctggtcgtgcgggtggtcgtcacggtccggcggcta

SEQ ID NO: 39202 - DNA, 75 bp, synthetic construct
  source 1..75: mol_type = other DNA
tccgtcaggtttcgacgaatctggcctgggaacacaaccgcttcccgtggaatttcgacatgcgtgagcgcctga

SEQ ID NO: 39203 - DNA, 75 bp, synthetic construct
  source 1..75: mol_type = other DNA
tcatcatgtacatgaccgacgccgcgcagaaccaggaggatgtaaacaacctccgcaacgcgatgaaaagtgcca

SEQ ID NO: 39204 - DNA, 75 bp, synthetic construct
  source 1..75: mol_type = other DNA
accacgcagccgtatcagttcacgaaaggaagcatctttcatctgatggaaccggacatcaaccaagagatctac

SEQ ID NO: 39205 - DNA, 75 bp, synthetic construct
  source 1..75: mol_type = other DNA
agtcgttattttcagcggagacgctgaagctggtttatgacagtaacggtataatcaccagcataagtaaggatg

SEQ ID NO: 39206 - DNA, 75 bp, synthetic construct
  source 1..75: mol_type = other DNA
tggctctgcttgccagtagcgccagcctggcagcgacgccgtggcaaaaaataacccaacctgtgccgggtagcg

SEQ ID NO: 39207 - DNA, 75 bp, synthetic construct
  source 1..75: mol_type = other DNA
aagcctgggaagaagcagaacaaaaacgaaaagcggcgctggcggcagaacgcaagcgcgaagaacaggaacaaa

SEQ ID NO: 39208 - DNA, 75 bp, synthetic construct
  source 1..75: mol_type = other DNA
acctctggtattgcacggcctatgtgtcgtcgatcgcgcatcagctggaagaggcgatttccggtgcggaagtgc

SEQ ID NO: 39209 - DNA, 75 bp, synthetic construct
  source 1..75: mol_type = other DNA
actgacgacgaggaactgcgagatattgaaaaatatgggttcggtgagatatttcagcgtccgtcagataaatat

SEQ ID NO: 39210 - DNA, 75 bp, synthetic construct
  source 1..75: mol_type = other DNA
aaaaagccgctggactctgcaggtcaaacttatcatggcgatcatgcgtcggtgttctatcaaataccggagaat

SEQ ID NO: 39211 - DNA, 75 bp, synthetic construct
  source 1..75: mol_type = other DNA
cggcctccggtttgggtatagaaatactggacggaaatatgcgtccggtgaaattgaatgaccttcatgccggga

SEQ ID NO: 39212 - DNA, 75 bp, synthetic construct
  source 1..75: mol_type = other DNA
ctgaccttcctgatgcgtcatgcgcgtaatgatttctcccgctgggatgcggcgcaaagcctgctggcaacctac

SEQ ID NO: 39213 - DNA, 75 bp, synthetic construct
  source 1..75: mol_type = other DNA
acaactaagatccttgctaaggggtatgggacagatgcggataacatcaagaagaacttttcccgtaatgctgaa

SEQ ID NO: 39214 - DNA, 75 bp, synthetic construct
  source 1..75: mol_type = other DNA
cggctccgtgtttcacctgctggagccggatattaatcaggagctgtacggcctgccggaatatctcagcgccct

SEQ ID NO: 39215 - DNA, 75 bp, synthetic construct
  source 1..75: mol_type = other DNA
gttacaaaagcgattgctggagctaaatgaatggcttggtgaagaggtagtccgattcaatccatatgagcttaa

SEQ ID NO: 39216 - DNA, 75 bp, synthetic construct
  source 1..75: mol_type = other DNA
aagcggttggtggtctggtcgataaaacggaaaatccagaaaagaactttgccaaaggtattgtttttgccgcta

SEQ ID NO: 39217 - DNA, 75 bp, synthetic construct
  source 1..75: mol_type = other DNA
cgccgctttattcaggcggggatgagcgaatgcgagatagccgctgaactggagtggtttatgcgccagcagggc

SEQ ID NO: 39218 - DNA, 75 bp, synthetic construct
  source 1..75: mol_type = other DNA
cttctggggttcccgctgtctgagtgatgacccactctttgcctttgaaaactacacccgcacggcgcaggtgct

SEQ ID NO: 39219 - DNA, 75 bp, synthetic construct
  source 1..75: mol_type = other DNA
tgccgccacctgcctctccccttgttcaggaagccgcatcactggattcccccctgaatgcaggtgaaattcggg

SEQ ID NO: 39220 - DNA, 75 bp, synthetic construct
  source 1..75: mol_type = other DNA
cgcaggctggcatcgaaagcacaaaaatcaagcgtgaaggcgatgcgcggcaaagtgcgcagcggtcgggaataa

SEQ ID NO: 39221 - DNA, 75 bp, synthetic construct
  source 1..75: mol_type = other DNA
caacgatgaactgttcgggatcatctataccgttgacgaaggtgacgactggaccaacccacaggtgctggaaaa

SEQ ID NO: 39222 - DNA, 75 bp, synthetic construct
  source 1..75: mol_type = other DNA
cgtatggctgcaagacagtgcaggaggcgatcacttaccgcgaaaacttcagccagcgtgaagggatgctgatct

SEQ ID NO: 39223 - DNA, 75 bp, synthetic construct
  source 1..75: mol_type = other DNA
aggctggtaaaaaaggcacgctggcggcatcgttgcaggccatcgccgaccagtcaaaaccggtcaccgttgtcg

SEQ ID NO: 39224 - DNA, 75 bp, synthetic construct
  source 1..75: mol_type = other DNA
gcgcgtttaccgaataatgagcgaaaacagcctgttgttgttacatgacaaaccatcacggctgcagcgggaaca

SEQ ID NO: 39225 - DNA, 75 bp, synthetic construct
  source 1..75: mol_type = other DNA
ttacaatgaaaaccacccgcacagcgcgctgggatatcactccccgagggaataccggcggcagcggacatcgtt

SEQ ID NO: 39226 - DNA, 75 bp, synthetic construct
  source 1..75: mol_type = other DNA
tggcagaagcacacatgtgggcggtggataaaccgcttaacccgtcgctggcccgcgacattatcgaaggtatcc

SEQ ID NO: 39227 - DNA, 75 bp, synthetic construct
  source 1..75: mol_type = other DNA
gcagcatcactcggaagccttcgctgcaagaaggcagaagaagtcgagcgtaaacagaaccgtatttactaccgc

SEQ ID NO: 39228 - DNA, 75 bp, synthetic construct
  source 1..75: mol_type = other DNA
cttgccggtgttctccggggtaaaaagatccgtactaccgtcagccggaaagccgtttccgcaggcgaccgcgta

SEQ ID NO: 39229 - DNA, 75 bp, synthetic construct
  source 1..75: mol_type = other DNA
gaaaaaaccagaaatcaggacgtgatgtaaaagaggcgggctggaccagcctgtttcaggcggtggctgagccct

SEQ ID NO: 39230 - DNA, 75 bp, synthetic construct
  source 1..75: mol_type = other DNA
tcagataaacgccatatcccggaatacaaacggtgtctttctcagttaagttgggctgggaataatattaaccag

SEQ ID NO: 39231 - DNA, 75 bp, synthetic construct
  source 1..75: mol_type = other DNA
aagcgtactggtgcacaccagagcagcttcaacagttagccatcagggagttgtaccagcttgaactgacgctgg

SEQ ID NO: 39232 - DNA, 75 bp, synthetic construct
  source 1..75: mol_type = other DNA
gacccaaattattgctggtgggatgttgatccagttgatgctgcaaatgaagctatgagttatcacaacgattaa

SEQ ID NO: 39233 - DNA, 75 bp, synthetic construct
  source 1..75: mol_type = other DNA
gcattcaaacggatgcccatcacgctggagccgtggcagctctttgtgatctgctgcgcgtttggctgggtcaat

SEQ ID NO: 39234 - DNA, 75 bp, synthetic construct
  source 1..75: mol_type = other DNA
gcctgccagtttgtgattcaggcctgccagcgccatcttgatgacctgatggcggaaaaaagtaagtcgtttcgt

SEQ ID NO: 39235 - DNA, 75 bp, synthetic construct
  source 1..75: mol_type = other DNA
ccgtccgactgctgattcagttgcagcgtaacggtaactgggtgacggaaaaggatgtcaccattaacggcaaga

SEQ ID NO: 39236 - DNA, 75 bp, synthetic construct
  source 1..75: mol_type = other DNA
actccgcgcagccctggcccggatgctccatatgcatcatatgatgctggaaaccacacattaccgggaaaatat

SEQ ID NO: 39237 - DNA, 75 bp, synthetic construct
  source 1..75: mol_type = other DNA
gcgaagcgggggcggcgctgaccatcaccggcagcagcacggcggaagtggggcagacggtgaccgtcacgctta

SEQ ID NO: 39238 - DNA, 75 bp, synthetic construct
  source 1..75: mol_type = other DNA
ctgttaagccgcaagaatccgtttggcgatatcaaatcggatggcacggtgaaaacggctctcgaaaaccttggt

SEQ ID NO: 39239 - DNA, 75 bp, synthetic construct
  source 1..75: mol_type = other DNA
tggtaccaatcgggtaattcaccttatcaagcctgcaatcgacgctctcaggagtcagatgacactaacgaggct

SEQ ID NO: 39240 - DNA, 75 bp, synthetic construct
  source 1..75: mol_type = other DNA
ggctggcaattcgtatgctgcgttgcgaactctgctatgttgcaggtgattatgccgatgaactggaatcatgga

SEQ ID NO: 39241 - DNA, 75 bp, synthetic construct
  source 1..75: mol_type = other DNA
ttactgatcaacaccgttccggtgcgcagtaatggcgttatcatcggtgccatttcaaccttcagggacaaaact

SEQ ID NO: 39242 - DNA, 75 bp, synthetic construct
  source 1..75: mol_type = other DNA
ccattaccagcggcggtaatcctccggcattttccctgacaccggacgggcggctgacggcgaaaaatgccgata

SEQ ID NO: 39243 - DNA, 75 bp, synthetic construct
  source 1..75: mol_type = other DNA
acgtgtgctggatgcagccggggaattagactgggaagtgcaatttcttgatgatggcgggatttggatggatga

SEQ ID NO: 39244 - DNA, 75 bp, synthetic construct
  source 1..75: mol_type = other DNA
gcagggcgaacctgcgaccaccaccttccggattaacgcgcctgcaaaacccgccaccattgagctgacgccggg

SEQ ID NO: 39245 - DNA, 75 bp, synthetic construct
  source 1..75: mol_type = other DNA
tctcgcaatcccttgccaaagaacagtcactggaaagtctggtccgacagcttctggagatgctggaaatggtca

SEQ ID NO: 39246 - DNA, 75 bp, synthetic construct
  source 1..75: mol_type = other DNA
atttcttccataaaagggcgctcagtggtcacagtaaactactatatgacaaccatagctggaatgtttcaattt

SEQ ID NO: 39247 - DNA, 75 bp, synthetic construct
  source 1..75: mol_type = other DNA
ccgaaagtaacgttacgtgtgccaggctcactgattgctctgcatcgccataatgatcttcaggaactggaactg

SEQ ID NO: 39248 - DNA, 75 bp, synthetic construct
  source 1..75: mol_type = other DNA
tgggaaacccgtggtaagcccgtcggggtgatgttccaagcgatcaaggcagtcattatacgagcaggcagttcc

SEQ ID NO: 39249 - DNA, 75 bp, synthetic construct
  source 1..75: mol_type = other DNA
gtgagcaagattgactatcaggcactgcgtgaggcggcagagcgtgcaattccggcaatggaacgcctgttaatg

SEQ ID NO: 39250 - DNA, 75 bp, synthetic construct
  source 1..75: mol_type = other DNA
ccgaaagtaacgttacgtgtgccaggctcgctgattgcattacatcgagataatgatcttcaggagctggaactg

SEQ ID NO: 39251 - DNA, 75 bp, synthetic construct
  source 1..75: mol_type = other DNA
tggatgagatggtggattgtgtggcagaactggaaaccaaagttggtaagtttgaaaaactggtgcaggaggtgc

SEQ ID NO: 39252 - DNA, 75 bp, synthetic construct
  source 1..75: mol_type = other DNA
atgggaaagagtaagaaaaaccgcgctgcggcgacgaatcagatccagcataaaaaccagacttcagccgaagca

SEQ ID NO: 39253 - DNA, 75 bp, synthetic construct
  source 1..75: mol_type = other DNA
ttatatcaattattatatgatgtttggcatgatgattcatatggaacatcatcaattgatattactggcagtgga

SEQ ID NO: 39254 - DNA, 75 bp, synthetic construct
  source 1..75: mol_type = other DNA
aatcgaaaactgtagctgaacaggggaatattgtaacctttgggattatacctgaatatgcggaaacaggttatg

SEQ ID NO: 39255 - DNA, 75 bp, synthetic construct
  source 1..75: mol_type = other DNA
cttgagcctgcgctggcaaaatacacccgacgcgggttagacctggatacctactggtttgtgcaatacggtatg

SEQ ID NO: 39256 - DNA, 75 bp, synthetic construct
  source 1..75: mol_type = other DNA
ctgctgccgggtgaggcggtgtacagccgcagcgagtccctgtggctggtgcgtggcggtaaggcaacgcagccg

SEQ ID NO: 39257 - DNA, 75 bp, synthetic construct
  source 1..75: mol_type = other DNA
ctttcctgcgaaactccattagtaataacaaatgagcaacatcgctttgtggttgcagaacaattacgtcaaatt

SEQ ID NO: 39258 - DNA, 75 bp, synthetic construct
  source 1..75: mol_type = other DNA
gtgatctggggtgcctgttccgtcaactgtggtagccgctgtgcacttcgtctacatgttaaagataatgaagtg

SEQ ID NO: 39259 - DNA, 75 bp, synthetic construct
  source 1..75: mol_type = other DNA
aagacttctctccaaaaagccaggatgctgtggcattgcagcagattaaagagcgtggcgctttacctatgattg

SEQ ID NO: 39260 - DNA, 75 bp, synthetic construct
  source 1..75: mol_type = other DNA
ctgcaggggaggtatatcactcaggatccgattgggctgaaggggggatggaatttttatcagtatccgctgaat

SEQ ID NO: 39261 - DNA, 75 bp, synthetic construct
  source 1..75: mol_type = other DNA
cgcacactgtcagcgtggcgctcggcgctccggtgctcgccattaacaccattgccgtcgatgacatcatcaacg

SEQ ID NO: 39262 - DNA, 75 bp, synthetic construct
  source 1..75: mol_type = other DNA
gcacgcgttacgcagattattaacggcggacagaacggcattaaagaccgccgtgaacgttacgccaaagctaaa

SEQ ID NO: 39263 - DNA, 75 bp, synthetic construct
  source 1..75: mol_type = other DNA
tggctgggcaacaggtgatcgattaaagcaggatcttgcattaagggcactgaatatggcgttggctttacgcaa

SEQ ID NO: 39264 - DNA, 75 bp, synthetic construct
  source 1..75: mol_type = other DNA
gcggagcttaagctgattgcggagaaggtgaagaaggggtatgtggagcaagcgaaggataattctttgcaacct

SEQ ID NO: 39265 - DNA, 75 bp, synthetic construct
  source 1..75: mol_type = other DNA
ttagaatggcaaaacaccgtcgcccaggcgatcagtcagatcgacggcctgaaaacaacacagctaccatcacca

SEQ ID NO: 39266 - DNA, 75 bp, synthetic construct
  source 1..75: mol_type = other DNA
agaacccgcatcagctgcagcagcttatccgcctgccggggcagcagtatgatgaggagtccggcctgtattaca

SEQ ID NO: 39267 - DNA, 75 bp, synthetic construct
  source 1..75: mol_type = other DNA
cggatctcagcaatctgaccgccagccagtacaccgtcagcgcctcggtaagcgataaagcgggtaacccggcgt

SEQ ID NO: 39268 - DNA, 75 bp, synthetic construct
  source 1..75: mol_type = other DNA
tttataaagagtggattcgtagtgatgatgtttcacctatatttatagaaactgaagataatttaagaaccttta

SEQ ID NO: 39269 - DNA, 75 bp, synthetic construct
  source 1..75: mol_type = other DNA
ggacgctgaatgattttctgggtgccatgacggaagaggatgtcatgccggaggcattgcgtcgttttgaggtaa

SEQ ID NO: 39270 - DNA, 75 bp, synthetic construct
  source 1..75: mol_type = other DNA
tgacaccacatgaacagaaagaggcagagagccgtttaatgatgctgaatgaccgacgaaaagccagaaagcgct

SEQ ID NO: 39271 - DNA, 75 bp, synthetic construct
  source 1..75: mol_type = other DNA
atggctacatcgacagtaattccaggagatatcaccaagctaaagggagatgtcagtaaagctaaggaagatatt

SEQ ID NO: 39272 - DNA, 75 bp, synthetic construct
  source 1..75: mol_type = other DNA
tgcctatcagtatcatggtcgcagtgctgacgggcgtgtcgcggatatctctgtcaccagtccgtctccggcctg

SEQ ID NO: 39273 - DNA, 75 bp, synthetic construct
  source 1..75: mol_type = other DNA
gaacgcaaggcagaatttgtggcgcttcatccgaaagatgagcaggaagcagtgatccgcacgctggaactggaa

SEQ ID NO: 39274 - DNA, 75 bp, synthetic construct
  source 1..75: mol_type = other DNA
catcgacgcatcgagtcaggcgatggatgaacttgtaaagcgtctctcagccatcagaaagccccgtgacgaggt

SEQ ID NO: 39275 - DNA, 75 bp, synthetic construct
  source 1..75: mol_type = other DNA
tggtgttaactataatgtgtatacacatgaggcagcgccagacattaaaatattaatcgatgaacacattacgaa

SEQ ID NO: 39276 - DNA, 75 bp, synthetic construct
  source 1..75: mol_type = other DNA
tatcacagcgcgacgttgatcgcgcagaaacagatttactcatcaacctgtcaacgcttacccagcgcggtctgg

SEQ ID NO: 39277 - DNA, 75 bp, synthetic construct
  source 1..75: mol_type = other DNA
ctgttgaaacgccctgttttcagattaaacagacggaactggagggggctgatgcgttaccacactggctgcctt

SEQ ID NO: 39278 - DNA, 75 bp, synthetic construct
  source 1..75: mol_type = other DNA
ggctggcagtgaatcttgatgtcgaaagtaacatcaatatttctaacaactcccgtgttgctggtatcagcctga

SEQ ID NO: 39279 - DNA, 75 bp, synthetic construct
  source 1..75: mol_type = other DNA
tcttcaaagaaatgtacgatgcagacgtctctccggcgctgatatcgaaagtcaccgatgccgtaatcgaccagg

SEQ ID NO: 39280 - DNA, 75 bp, synthetic construct
  source 1..75: mol_type = other DNA
tttcaggcgctggatgcgttcgggaaggaatgtgatgcactgtacccgcagataagtcgcagttggcgggcaaac

SEQ ID NO: 39281 - DNA, 75 bp, synthetic construct
  source 1..75: mol_type = other DNA
gacagtcgctacccgcagataagccggagctggcaggcaaactggaccaacctggcgacgttcttcgcttacccg

SEQ ID NO: 39282 - DNA, 75 bp, synthetic construct
  source 1..75: mol_type = other DNA
aggtcagaaagaactgctgggtatgtggctggccgaaaatgaaggggcgaagttctggctcaatgtgctgactga

SEQ ID NO: 39283 - DNA, 75 bp, synthetic construct
  source 1..75: mol_type = other DNA
agccgtgcggggaagtgactccacaggaacagaaagaggcagagacccggctaatggtgctgaatgaccgacaaa

SEQ ID NO: 39284 - DNA, 75 bp, synthetic construct
  source 1..75: mol_type = other DNA
cctttatcttaatcctgaccctgcaatttcgtctgtactgcggtcaacatcgtctatccgctataaacattcagt

SEQ ID NO: 39285 - DNA, 75 bp, synthetic construct
  source 1..75: mol_type = other DNA
gaaaggtgcaccttactccggctcagttgtccatgcttctcgagggcatcaactggaagcacccgaaacgaacag

SEQ ID NO: 39286 - DNA, 75 bp, synthetic construct
  source 1..75: mol_type = other DNA
ccctgacccaagggaccatcacatatgacatgcacggacagctgggaaatgacctgaatgccggtaagaatctgg

SEQ ID NO: 39287 - DNA, 75 bp, synthetic construct
  source 1..75: mol_type = other DNA
atcaatcagcagatagagagtgatattgctgaagtgacccaaaaaatcggggagacagaaaacagcctcacacag

SEQ ID NO: 39288 - DNA, 75 bp, synthetic construct
  source 1..75: mol_type = other DNA
gattatcaccatcactgaaggcatcccgacgctggatatgctgactgtgaaagtgaaactggatgaagcaggcgt

SEQ ID NO: 39289 - DNA, 75 bp, synthetic construct
  source 1..75: mol_type = other DNA
gatggcgacatcgttacggtgaaagaagcgacggacgccctgctgcattgtgcggaacagcttcgcaaaggaggc

SEQ ID NO: 39290 - DNA, 75 bp, synthetic construct
  source 1..75: mol_type = other DNA
cgcaagctcgcttcttacccacgacaaaacaaccttgcagttgcgcttcgtgaagttggtcgtattgaacggacc

SEQ ID NO: 39291 - DNA, 75 bp, synthetic construct
  source 1..75: mol_type = other DNA
agagcaggggaatactgggtatatctgccagcatggaacaaaggcatgaagatggcctatgacagtcgccctaaa

SEQ ID NO: 39292 - DNA, 75 bp, synthetic construct
  source 1..75: mol_type = other DNA
cgttggcaccaacaccattggttcttccgaggcctgtatgctcggcgggatggcgatgaaatggcgttggcgcaa

SEQ ID NO: 39293 - DNA, 75 bp, synthetic construct
  source 1..75: mol_type = other DNA
tgagaacaaagtacgcttcgttgaagggaaacactttttcaaagttgttggtaatgaccttaaagaattgcgggt

SEQ ID NO: 39294 - DNA, 75 bp, synthetic construct
  source 1..75: mol_type = other DNA
atggcacatacggtcgctgtattcctctcttttgatggcgaactcgacacccagccactcatagaacaactctgg

SEQ ID NO: 39295 - DNA, 75 bp, synthetic construct
  source 1..75: mol_type = other DNA
tcctccgcaccgaaggattaagtaaatttttccccggcgtcaaagcgttagacaacgttgatttcagcctgcgcc

SEQ ID NO: 39296 - DNA, 75 bp, synthetic construct
  source 1..75: mol_type = other DNA
ggaaataactattccatcatcaaaggtaaagtaagctcagtacttctgttattaaaaatgctgcagattaatcat

SEQ ID NO: 39297 - DNA, 75 bp, synthetic construct
  source 1..75: mol_type = other DNA
ggtgaagtaaaagaaggccagtttgctctgggtatttacctccacaccgatacggtcccggaaggtgtaaccatg

SEQ ID NO: 39298 - DNA, 75 bp, synthetic construct
  source 1..75: mol_type = other DNA
aacagttttcatgcagcagagattttgcggcttccacagggctcgttccccggcagtatagcacgggaggaaaat

SEQ ID NO: 39299 - DNA, 75 bp, synthetic construct
  source 1..75: mol_type = other DNA
atgggtaaaggtggcggcaaggcgcacacgccggttgaggcaaaggacaatcttaagtccacgcagatgatgagc

SEQ ID NO: 39300 - DNA, 75 bp, synthetic construct
  source 1..75: mol_type = other DNA
ctgtcaccagtccgtctccggcctgcgtcaccatctctgtgctgtcacgtgaaaataacggtgtggcatccgaag

SEQ ID NO: 39301 - DNA, 75 bp, synthetic construct
  source 1..75: mol_type = other DNA
ataataagcagggagaacggggcggtacgctggataaggcggctatgccggatttcagcgctgtggattcggaaa

SEQ ID NO: 39302 - DNA, 75 bp, synthetic construct
  source 1..75: mol_type = other DNA
tcgcagaaggagttccccgtcgggctacggtctctgttaatacgggaatacggcgacgatacagcgcatgatgtg

SEQ ID NO: 39303 - DNA, 75 bp, synthetic construct
  source 1..75: mol_type = other DNA
aggggaggtatatcactcaggatccgattgggctgaaggggggatggaatttttatcagtatccgctgaatccgg

SEQ ID NO: 39304 - DNA, 75 bp, synthetic construct
  source 1..75: mol_type = other DNA
aagtacgtgacaacctcatgccgttttaaaacagaacgacaggtaaggttacgtatacggtttgataagtatgat

SEQ ID NO: 39305 - DNA, 75 bp, synthetic construct
  source 1..75: mol_type = other DNA
ctggtgctgagttgctggaaggtgcacacgtcggtaacttcgttgagatgaaaaaagcgcgtctgggtaaaggct

SEQ ID NO: 39306 - DNA, 75 bp, synthetic construct
  source 1..75: mol_type = other DNA
tggtgtcatggctggcctggctgctgatgctgctgtatgcctttgcgcccctcagctatctgtgtggtcgcccgt

SEQ ID NO: 39307 - DNA, 75 bp, synthetic construct
  source 1..75: mol_type = other DNA
ggccgggcagaaaaaggatgaggctctgtcggcagcgacacgggctgaaaaggcggcagaccgcgcagaagtcgc

SEQ ID NO: 39308 - DNA, 75 bp, synthetic construct
  source 1..75: mol_type = other DNA
tttattcagaacacgccagccttccataacacaccaatgttgatggaagctgaagagagaattgctgaatacgct

SEQ ID NO: 39309 - DNA, 75 bp, synthetic construct
  source 1..75: mol_type = other DNA
atttcctcgcttttttcagagttgccttcttctgttttgtggtttcttaatctgatgtcttttgatgttgttttg

SEQ ID NO: 39310 - DNA, 75 bp, synthetic construct
  source 1..75: mol_type = other DNA
aaaaatcagtccagactaggagctaacacccgtaacggttatcccacaaagaccgttatcacaggcgacggtcca

SEQ ID NO: 39311 - DNA, 75 bp, synthetic construct
  source 1..75: mol_type = other DNA
ctccgatcacgaaaacagcttcccgcaagagctgctggataaactggttgaacgcgctaacctgcctggttatct

SEQ ID NO: 39312 - DNA, 75 bp, synthetic construct
  source 1..75: mol_type = other DNA
agcttttttaactccgtgtactgtcggttatttgaccaccgctcgcttactcccgagcggctttttatctttagc

SEQ ID NO: 39313 - DNA, 75 bp, synthetic construct
  source 1..75: mol_type = other DNA
tagccttgcgtgtcatattacatcccgccagctaaaccacgtcgaagcagcagaactgctgcgtgtgaccgctga

SEQ ID NO: 39314 - DNA, 75 bp, synthetic construct
  source 1..75: mol_type = other DNA
ggtttcatgttgttgcaggcagggtccggcatcctcaccagcaccttcaaaccggtggtggcgaaaatgtccgaa

SEQ ID NO: 39315 - DNA, 75 bp, synthetic construct
  source 1..75: mol_type = other DNA
atcatcatgttgacgttacggataaaacactgcgctcactgaaacatggcgaagccctgctgaaaatggagtgtt

SEQ ID NO: 39316 - DNA, 75 bp, synthetic construct
  source 1..75: mol_type = other DNA
cgaagctgtcggaacgcgcattacagacattccggtagacctcaacacgctgtggtcgccggacacctgcccggt

SEQ ID NO: 39317 - DNA, 75 bp, synthetic construct
  source 1..75: mol_type = other DNA
cgacaagcaaccagacttagctacgaattaccaagcgataaatattgtgcattgcttgctgtaatgtgtgcaaag

SEQ ID NO: 39318 - DNA, 75 bp, synthetic construct
  source 1..75: mol_type = other DNA
cttctaaagaatcttgatgaaattaactcagctaccgtgacaaaccatctccagcgtcaggcaaccaggttaagc

SEQ ID NO: 39319 - DNA, 75 bp, synthetic construct
  source 1..75: mol_type = other DNA
cggcttcgggcgttcactgactttccaccgcgaggccgcaggcgaactggctggtgaaatcaccagggtgacgga

SEQ ID NO: 39320 - DNA, 75 bp, synthetic construct
  source 1..75: mol_type = other DNA
gagcagtatatcagcgactacaccgccacctggcgggccgggatggacaatctgaatatccgcaattttgagtcc

SEQ ID NO: 39321 - DNA, 75 bp, synthetic construct
  source 1..75: mol_type = other DNA
ccgtcgtgtggctgaacgcggcatggagccaaaaaatacgaattctcccgagtggtgggcgtggcgctggtccgc

SEQ ID NO: 39322 - DNA, 75 bp, synthetic construct
  source 1..75: mol_type = other DNA
accagtcagtaccggatggctatggtggcacggagccgcgtatcacctgtaatgcttatctggcatcacagcgta

SEQ ID NO: 39323 - DNA, 75 bp, synthetic construct
  source 1..75: mol_type = other DNA
tcgcctggttttgacctgctggcgctgttcaccggatcggaaggtatgctcggcgtgaccaccgaagtgacggta

SEQ ID NO: 39324 - DNA, 75 bp, synthetic construct
  source 1..75: mol_type = other DNA
agacatttacctttcctgatggtacgagcacggaagatattgggtccgccattgatgagtattttgctggtcagt

SEQ ID NO: 39325 - DNA, 75 bp, synthetic construct
  source 1..75: mol_type = other DNA
atgacacataaaacaaaggcgaccgggggcggtcgccaatgggaaagcaccaaacataagcacggggatgatagc

SEQ ID NO: 39326 - DNA, 75 bp, synthetic construct
  source 1..75: mol_type = other DNA
ccggatgtactgaaaacattcttcccgaatatcccggtggccacaccgaccaccttcctggtcaacgtcaacacg

SEQ ID NO: 39327 - DNA, 75 bp, synthetic construct
  source 1..75: mol_type = other DNA
tctgaagtcaatgttacgaattcttccttactttctgatactattggcttaactaatggctcttcactgaacatt

SEQ ID NO: 39328 - DNA, 75 bp, synthetic construct
  source 1..75: mol_type = other DNA
actgacaatggcagatatccaggagtctctgctttctccaacaaccatgcctgcttatggagttaactcaactgg

SEQ ID NO: 39329 - DNA, 75 bp, synthetic construct
  source 1..75: mol_type = other DNA
cagtggcccaagcgccgcaaactttgttgcgccgcgcggagtgccgattatagcggtcaatggggccatcgactg

SEQ ID NO: 39330 - DNA, 75 bp, synthetic construct
  source 1..75: mol_type = other DNA
aagcaggtgcttctgttatgtcacttgcagaccagcgtttcctgtcgggggatggagaggaaacatcaaaatata

SEQ ID NO: 39331 - DNA, 75 bp, synthetic construct
  source 1..75: mol_type = other DNA
ttgaagggttaaagcttggcgactttaacgaacatcagattgacctgttcggcgatgcctatgagttcctgattt

SEQ ID NO: 39332 - DNA, 75 bp, synthetic construct
  source 1..75: mol_type = other DNA
acagcctgccaccggtggagtggctaacgtatggcagcggttacctggcgggaatgaaactgggcgacacgccgc

SEQ ID NO: 39333 - DNA, 75 bp, synthetic construct
  source 1..75: mol_type = other DNA
ccggggccggatggtggcgcaccgttacgcaggcaggccggagatgcgttaccgctacgacgacataggtcgcgt

SEQ ID NO: 39334 - DNA, 75 bp, synthetic construct
  source 1..75: mol_type = other DNA
gccgaagaacaccgtacagtcacagaaaatctgtcaggacattgccggtgaaaccaatatgttctccgactgggc

SEQ ID NO: 39335 - DNA, 75 bp, synthetic construct
  source 1..75: mol_type = other DNA
cctttactgcttcaggttccgactatgcgatgaagaacaatgtattcctcagcaattcaacgctgatgggtgatg

SEQ ID NO: 39336 - DNA, 75 bp, synthetic construct
  source 1..75: mol_type = other DNA
acgtcgacggtgaaggggatgccttcaccctggcctcaaagcgtaccaccacctttatgtcctcggggatgaccc

SEQ ID NO: 39337 - DNA, 75 bp, synthetic construct
  source 1..75: mol_type = other DNA
acggattatgaccgtttccctgaaaacgtggacggggaaggggatgccttcacgctggcctcaaagcgtaccacc

SEQ ID NO: 39338 - DNA, 75 bp, synthetic construct
  source 1..75: mol_type = other DNA
tactgtcgccaggattgaccagcttcgcagggatattgatgccatcgtcgctgaaattgaaggcgaggagcagga

SEQ ID NO: 39339 - DNA, 75 bp, synthetic construct
  source 1..75: mol_type = other DNA
gcgcggggaacacgtggcgtccgtcgtcgtttaaagcgtcaatgccggtttatccccgctggcgcggggaacact

SEQ ID NO: 39340 - DNA, 75 bp, synthetic construct
  source 1..75: mol_type = other DNA
taaaacttatccgtgagtctgaacggctcaagaagaaggaagtagctgaaatgacaggtattaattacgttacgt

SEQ ID NO: 39341 - DNA, 75 bp, synthetic construct
  source 1..75: mol_type = other DNA
gattttaaccgtttccttacggctcggaatcgttccgtaattagaggctttgatgatgtaagtattgctatttca

SEQ ID NO: 39342 - DNA, 75 bp, synthetic construct
  source 1..75: mol_type = other DNA
gacgttttataataataaagcaaaaaacattcatgttaaaatattagacgcttcagggtatttatttaaaggccg

SEQ ID NO: 39343 - DNA, 75 bp, synthetic construct
  source 1..75: mol_type = other DNA
ttgaggaagaacttcgcgagatccgccatcagatccacgaaaacccggagctgggattacaagaatttaaaacca

SEQ ID NO: 39344 - DNA, 75 bp, synthetic construct
  source 1..75: mol_type = other DNA
acagccaccgctgatgatgtcgcaccgacgggtcagcgaatctggcaggaactgcaaagtggcaaatggggtgag

SEQ ID NO: 39345 - DNA, 75 bp, synthetic construct
  source 1..75: mol_type = other DNA
gatctcacctccgctgcgggtaagcttctgctgtcaatgctggcagcggttgcagagatggaacgtgacctgctg

SEQ ID NO: 39346 - DNA, 75 bp, synthetic construct
  source 1..75: mol_type = other DNA
cgctggtccgtgagctcaccataggatgtgctcaaggctcgctggcggaggccctgactgggctacgcggccttt

SEQ ID NO: 39347 - DNA, 75 bp, synthetic construct
  source 1..75: mol_type = other DNA
atcgcctggtagacaccactcccttcagcgaggaaaaaacgctgcccttttcgccactggattttcagttatccg

SEQ ID NO: 39348 - DNA, 75 bp, synthetic construct
  source 1..75: mol_type = other DNA
gcatgctggacaagataaagcctggcggattcatgtgtgtgattgtgccgccgtccattgtttcaggttcaaaca

SEQ ID NO: 39349 - DNA, 75 bp, synthetic construct
  source 1..75: mol_type = other DNA
aggtgcgtgttctgattcattacatcgttaacgcaggggactctgtatcaccggaatttatgcgggcgctggctg

SEQ ID NO: 39350 - DNA, 75 bp, synthetic construct
  source 1..75: mol_type = other DNA
gatcagggctggtatgaaatgcgccgtcagcttgagtacaagcagctctggcgtggcggtcaggtgcttgctgtt

SEQ ID NO: 39351 - DNA, 75 bp, synthetic construct
  source 1..75: mol_type = other DNA
tacagcctgaaagagctgtccgacgctgtccgggcatggaaacggcagaaaaataccggagatacagaacaatga

SEQ ID NO: 39352 - DNA, 75 bp, synthetic construct
  source 1..75: mol_type = other DNA
cttgtggactgacggtcttggcgtgatgacccgcggtgtgaccgatgacagcggtaccttgcagttacaacatat

SEQ ID NO: 39353 - DNA, 75 bp, synthetic construct
  source 1..75: mol_type = other DNA
tggcgcggggaacacctgcgccttaattctgagcaggctatcggagtcggtttatccccgctggcgcggggaaca

SEQ ID NO: 39354 - DNA, 75 bp, synthetic construct
  source 1..75: mol_type = other DNA
acagcttgacgcccgacagccggttgcggccctgaccggccttcagaccgacaccgtgaccgtgccggataaaaa

SEQ ID NO: 39355 - DNA, 75 bp, synthetic construct
  source 1..75: mol_type = other DNA
cacacgtagacgtagaaatctggcaactgcctctggccagttttgccgaactgttaatgaacgaacccgaaggcc

SEQ ID NO: 39356 - DNA, 75 bp, synthetic construct
  source 1..75: mol_type = other DNA
tgagctggagcacgccagaaccacggctcctgccattcgcctgacactccatcatgaaatcgctgatttctgcgc

SEQ ID NO: 39357 - DNA, 75 bp, synthetic construct
  source 1..75: mol_type = other DNA
gatgcagacagtaatctgcagagcctgtgctggccgtgccataaggcgaagacggcccgtgaacggctaaagtga

SEQ ID NO: 39358 - DNA, 75 bp, synthetic construct
  source 1..75: mol_type = other DNA
atgccaccacgaacaccaaaagcctgccgtgttcgcggctgccgatcgacaaccacagacccgtcaggttattgc

SEQ ID NO: 39359 - DNA, 75 bp, synthetic construct
  source 1..75: mol_type = other DNA
ccgcttccgttttgatgacagggaggggcgcggcacctggtactgcaatcagtgtggtgccggtgacggcctgaa

SEQ ID NO: 39360 - DNA, 75 bp, synthetic construct
  source 1..75: mol_type = other DNA
tcattcccaaagcgcatggcggcaccgatgccgacagtaacctgcagagtctgtgctggccgtgtcataaggcga

SEQ ID NO: 39361 - DNA, 75 bp, synthetic construct
  source 1..75: mol_type = other DNA
ggcctgatgatgcttcagcttgggttaagtctgcgcacaatgcggtactacgagagctgtattgaagcattccat

SEQ ID NO: 39362 - DNA, 75 bp, synthetic construct
  source 1..75: mol_type = other DNA
cgaattattaagctggcaggcagctacaaacttttctcagtttgccgggaatataggcgaaggtgcgggacacgc

SEQ ID NO: 39363 - DNA, 75 bp, synthetic construct
  source 1..75: mol_type = other DNA
ccctccggcagtgcagcacctgacggtggaggtgagcgcggctgacggtcagtatctggcacaggcgaaatggga

SEQ ID NO: 39364 - DNA, 75 bp, synthetic construct
  source 1..75: mol_type = other DNA
aaaaggaacaggaaaagtatggtaccggtagcgatatgcagcggggtatccaggccgcgacagccgcgcttcagg

SEQ ID NO: 39365 - DNA, 75 bp, synthetic construct
  source 1..75: mol_type = other DNA
cgacgttctggcctggcctgctgccagtcagctatccattttgcgtgacgacccacgcttgcgtttaacgctgcg

SEQ ID NO: 39366 - DNA, 75 bp, synthetic construct
  source 1..75: mol_type = other DNA
atgaacgacgtgttcctgaaacgcctgtttgcggtgagtatcacgtcatccggcaaccccccgacgttttccctg

SEQ ID NO: 39367 - DNA, 75 bp, synthetic construct
  source 1..75: mol_type = other DNA
tttaatttgctggatatacgtcgccacacaatgtcgaaaacgttcagtattaaaacgaccaagagccaaaacgat

SEQ ID NO: 39368 - DNA, 75 bp, synthetic construct
  source 1..75: mol_type = other DNA
actggcccgagagcgtcgacaccgatgcgaaaaaatgcgccgcctttgcgggttctggcgtatccgttcagccgc

SEQ ID NO: 39369 - DNA, 75 bp, synthetic construct
  source 1..75: mol_type = other DNA
cagaccaacctcgcccactggtgcgatccgaaattcgacagcgtgttgcgtaaggcgctctcctcgcagcagctg

SEQ ID NO: 39370 - DNA, 75 bp, synthetic construct
  source 1..75: mol_type = other DNA
tgccgccggtggtcgtgcggaaaaacgcgacgtgattctggccgcactgtttatggtgctggcaaaccgctacga

SEQ ID NO: 39371 - DNA, 75 bp, synthetic construct
  source 1..75: mol_type = other DNA
gtcttcaggtgctgggtgagcaactgaaccgtgatgtcagcctgacggggacgaaagaagaactggcactccgtg

SEQ ID NO: 39372 - DNA, 75 bp, synthetic construct
  source 1..75: mol_type = other DNA
cccgtattgataaccgtctggttcacggtcaggttggcgtgacctggacatccaccatcggtgcaaatctgctgg

SEQ ID NO: 39373 - DNA, 75 bp, synthetic construct
  source 1..75: mol_type = other DNA
cgacaaataaattgcctgatttacgaggtgaatttattcgtggctgggatgatgggcgcggtattgatgcaggac

SEQ ID NO: 39374 - DNA, 75 bp, synthetic construct
  source 1..75: mol_type = other DNA
tggcgcatctacatttttaccgttaattcagtatttcaatgataactgtgttatggacatgtttgaagatgtaga

SEQ ID NO: 39375 - DNA, 75 bp, synthetic construct
  source 1..75: mol_type = other DNA
gtgcaaccagcccggcacctgcagaggtggtgctgacagtccttagccgcgaaggcgacggaacagcagaaaaag

SEQ ID NO: 39376 - DNA, 75 bp, synthetic construct
  source 1..75: mol_type = other DNA
ccgtattcatattgtttgcgatgtccctgatgaacttattgatttcacgtttgaatggaaaggactgaaaattca

SEQ ID NO: 39377 - DNA, 75 bp, synthetic construct
  source 1..75: mol_type = other DNA
gtattacccctgctgatagcggtacgctggagattgggggcaacaactacgccagattaacgccagttcatgctc

SEQ ID NO: 39378 - DNA, 75 bp, synthetic construct
  source 1..75: mol_type = other DNA
ttcgacaagacctggaagggaccggcaatcagctacatcgggcgcgatgaacttgaggcatgtggtgaggccttt

SEQ ID NO: 39379 - DNA, 75 bp, synthetic construct
  source 1..75: mol_type = other DNA
tgctgtatgcaccctggttcagacctggtagggaaggttgaaatgactgagtggttagttgactttgctgcccag

SEQ ID NO: 39380 - DNA, 75 bp, synthetic construct
  source 1..75: mol_type = other DNA
tggtggcccaagaatatgagtataaggatttcaaagcggcgcagagtgattgctgtatgcaccctggttcagacc

SEQ ID NO: 39381 - DNA, 75 bp, synthetic construct
  source 1..75: mol_type = other DNA
ggaaacaccgggcagcagtgcagtgcgcaggagattagccggagtgaatacacgaattacacctgtgagcgggat

SEQ ID NO: 39382 - DNA, 75 bp, synthetic construct
  source 1..75: mol_type = other DNA
ggtcaccggacggtatgcgcgttgagatcattcgtgctggtgagtatgaagataaagaattacccgaacgggtac

SEQ ID NO: 39383 - DNA, 75 bp, synthetic construct
  source 1..75: mol_type = other DNA
gtactcgacgggcaaacggcgatcctcgaagattatttcgcggtgaaaccggaaaacaaagaccgtgtgaagaaa

SEQ ID NO: 39384 - DNA, 75 bp, synthetic construct
  source 1..75: mol_type = other DNA
aacgctacttcaccgacggtttgcgtgacatcacttcggaccgccgctgggcgatccttgccgtctgtgttgtgg

SEQ ID NO: 39385 - DNA, 75 bp, synthetic construct
  source 1..75: mol_type = other DNA
ttctgcatggatacgaaaagatccgctggccggatgcaccggagtgggcgagccgggaaacctggctggagtgtg

SEQ ID NO: 39386 - DNA, 75 bp, synthetic construct
  source 1..75: mol_type = other DNA
gtgcgggtattacttcgacctgttctggtaccggaactcgggctggtggtcgttaagccgggccgtgaatccatg

SEQ ID NO: 39387 - DNA, 75 bp, synthetic construct
  source 1..75: mol_type = other DNA
ttatgccacacggcgccaaacccgtcagcagcacatggacacgctgcgcgaaatttacggctacaagaccttcac

SEQ ID NO: 39388 - DNA, 75 bp, synthetic construct
  source 1..75: mol_type = other DNA
ccctataccctggatggtcagggtgatacggccttcccgcaggcgttacctgcaccaccggatgtgctgaaaaca

SEQ ID NO: 39389 - DNA, 75 bp, synthetic construct
  source 1..75: mol_type = other DNA
acggaactcaggtcaatcttgctgactggaaagtggtgctgttcatgcaggggcgatgtccgtactgtcaccagt

SEQ ID NO: 39390 - DNA, 75 bp, synthetic construct
  source 1..75: mol_type = other DNA
tgcctgcaccgcagattgtggatgtgccggactttgagacgctgcttgccgaacgcaaggccgaatttgttgcgc

SEQ ID NO: 39391 - DNA, 75 bp, synthetic construct
  source 1..75: mol_type = other DNA
atggataagaagcaagtaacggatttaaggtcggaactactcgattcacgttttggcgctaagtcgatttccact

SEQ ID NO: 39392 - DNA, 75 bp, synthetic construct
  source 1..75: mol_type = other DNA
tggaatatctggccgtgtactggggggagggtgccacggtacctgatgaataccgtatccgtacgggcgatacgg

SEQ ID NO: 39393 - DNA, 75 bp, synthetic construct
  source 1..75: mol_type = other DNA
agggtgtatcaaggttaattaatatcccatatgctttggcaagagctctatttcctaaattggcatatagcaata

SEQ ID NO: 39394 - DNA, 75 bp, synthetic construct
  source 1..75: mol_type = other DNA
catcaccatcaactaacttaccaagttatggcaatggtgcattttctctttcagcaccgcatgttcctggtgctg

SEQ ID NO: 39395 - DNA, 75 bp, synthetic construct
  source 1..75: mol_type = other DNA
atggatttcgacacaatcatggaaaaggcttacgaagaatacttcgaaggtcttgccgaaggcgaagaagctctc

SEQ ID NO: 39396 - DNA, 75 bp, synthetic construct
  source 1..75: mol_type = other DNA
cacagctgtaactggagacagagcttttagtgcatacactcacactggtattgaatggaactcccttgcgaatga

SEQ ID NO: 39397 - DNA, 75 bp, synthetic construct
  source 1..75: mol_type = other DNA
gagtccggcgaaacggcggttactggaagaggtggtgtacgtcataacggagacggtgagaaaaacggcgatgca

SEQ ID NO: 39398 - DNA, 75 bp, synthetic construct
  source 1..75: mol_type = other DNA
ggttaaccagattctggttgaagcagcgaccgatatcgctaaagagctgtatctcggtgccgttgttgaccgtag

SEQ ID NO: 39399 - DNA, 75 bp, synthetic construct
  source 1..75: mol_type = other DNA
gctgcggatgtgatacaggaaatctgccgccaggcagatgtggtgccggggatattcacggtgatccacacatgg

SEQ ID NO: 39400 - DNA, 75 bp, synthetic construct
  source 1..75: mol_type = other DNA
ccgacagacccggtgctgtaccgctccggcagtaacagcccgttacctgcagaactgataatccggcatgcagaa

SEQ ID NO: 39401 - DNA, 75 bp, synthetic construct
  source 1..75: mol_type = other DNA
atgtcacaaactggcctgcggggacggtcaatattgccgtctctggcaccaacaccgccggaaccacaaccagca

SEQ ID NO: 39402 - DNA, 75 bp, synthetic construct
  source 1..75: mol_type = other DNA
agacggtgagaaagacggcgatgcaaatcaggtggagagggatgtatcagcggttactgaaggttgacccgctga

SEQ ID NO: 39403 - DNA, 75 bp, synthetic construct
  source 1..75: mol_type = other DNA
gaaaaattatcgattgaacttgataccgcaaaacagcgcattgcagagctggagggtaatcgcgcggcgctggcg

SEQ ID NO: 39404 - DNA, 75 bp, synthetic construct
  source 1..75: mol_type = other DNA
acttgaggcatgtggtgaggcgtttctggcgcaggttcgccagcaggcagaacggctggtcagggagatagtggc

SEQ ID NO: 39405 - DNA, 75 bp, synthetic construct
  source 1..75: mol_type = other DNA
gaggaaagccgccgctggctggcatcgtgcggcctgaccgtggagcagatgcaaaaccagatggacccggtgtac

SEQ ID NO: 39406 - DNA, 75 bp, synthetic construct
  source 1..75: mol_type = other DNA
tggatcgactggatattttctttgatgtgatgaatattaaaagcatcttggtattggtttgttgtgcaactattc

SEQ ID NO: 39407 - DNA, 75 bp, synthetic construct
  source 1..75: mol_type = other DNA
gataccgataagctacgcgccgtctgcctaccggaaggggtagccaacaaaaaattggtcgggaaaagtccgtcg

SEQ ID NO: 39408 - DNA, 75 bp, synthetic construct
  source 1..75: mol_type = other DNA
attgtgtcggcatttctggcattaccaccgccggttgcagaaggcgaaatggacgcacatgagcgcaaagcctgg

SEQ ID NO: 39409 - DNA, 75 bp, synthetic construct
  source 1..75: mol_type = other DNA
ggtaaagaaaaatcagacccgtattaccgggatgggtaaccagatcctctcgttgtatgccaaagggatggccac

SEQ ID NO: 39410 - DNA, 75 bp, synthetic construct
  source 1..75: mol_type = other DNA
acctgaaggaaccgacccaaattattgctggtgggaggttgatccggttgatgctgcaaatgaagccatgagtta

SEQ ID NO: 39411 - DNA, 75 bp, synthetic construct
  source 1..75: mol_type = other DNA
cgacacggcgaaaacctttgaagttgtgatccagttaggatcaattctggcggtagtagtgatgttctggcggcg

SEQ ID NO: 39412 - DNA, 75 bp, synthetic construct
  source 1..75: mol_type = other DNA
cgatgagtgtctggtgatatttgccgaccgctgcattgatttctggtggcaaagcgggggtgtacaggagccggt

SEQ ID NO: 39413 - DNA, 75 bp, synthetic construct
  source 1..75: mol_type = other DNA
ccacacccgtgccattcacagcatagacaccgacattaagctcaaccgggcgttgtgggtgatggcagaaacact

SEQ ID NO: 39414 - DNA, 75 bp, synthetic construct
  source 1..75: mol_type = other DNA
ggatgaaacgaacaagaaagcgcccttaaacagtcctgcgttgaccggaacgccaacaacgccaactgcgcgaca

SEQ ID NO: 39415 - DNA, 75 bp, synthetic construct
  source 1..75: mol_type = other DNA
tgtaccggcggccattccgctccggctggaaaaccagtatttcgcgctggatttaagtacggatgcggcccgggc

SEQ ID NO: 39416 - DNA, 75 bp, synthetic construct
  source 1..75: mol_type = other DNA
gtcgcagtgccagagggaaacgtatccatacccgtgccattcacagcatcgacaccgacattaagctcaatcgcg

SEQ ID NO: 39417 - DNA, 75 bp, synthetic construct
  source 1..75: mol_type = other DNA
ggaaattaacttcaaagccattgtagggcaaactgatgtttcagcagctactggcaaaactgctaccacgaatga

SEQ ID NO: 39418 - DNA, 75 bp, synthetic construct
  source 1..75: mol_type = other DNA
ggcagtcttggagttggtacgacgaatgcgttaggtggtagctctattgttcttggtgataatgacaccggattc

SEQ ID NO: 39419 - DNA, 75 bp, synthetic construct
  source 1..75: mol_type = other DNA
agaacggcgggatacaggagcctgttgatgacagaatgcatgatttatcggattcgttttgtattgtcggtcccc

SEQ ID NO: 39420 - DNA, 75 bp, synthetic construct
  source 1..75: mol_type = other DNA
gttccgctgattactgttggcattctggcgcggatgttagccaaaatgaattacctgaccatgtgcgggatgctg

SEQ ID NO: 39421 - DNA, 75 bp, synthetic construct
  source 1..75: mol_type = other DNA
tttttgtcgcctctacggcctttggtttttccattctgggcaaagttgcccaggtcgccgtgccggttatcgcac

SEQ ID NO: 39422 - DNA, 75 bp, synthetic construct
  source 1..75: mol_type = other DNA
tgatttagccattaaagatgtaccgattctcaacggcgacaaaattatctgctcgcgtctgaaacgagaagaaac

SEQ ID NO: 39423 - DNA, 75 bp, synthetic construct
  source 1..75: mol_type = other DNA
gaatgatgtgacagcttcaggtataagtgtcgccacgcataaacatggcggagttcagacaggcgggggaactac

SEQ ID NO: 39424 - DNA, 75 bp, synthetic construct
  source 1..75: mol_type = other DNA
tgcgcgacagggaacgaataatactcagatcgcaaacacggctttcgttatggccgcgattgccgcccttgtaga

SEQ ID NO: 39425 - DNA, 75 bp, synthetic construct
  source 1..75: mol_type = other DNA
taaaaccagcactcagggagttcttgattaccttggtttgggggaaggctctgcactgcccgttggtgtacctgt

SEQ ID NO: 39426 - DNA, 75 bp, synthetic construct
  source 1..75: mol_type = other DNA
gactttcacgtcgcacactgactgacccgccgtacctcgtcggttttcgtgaccgtcaggggcgtaccattactg

SEQ ID NO: 39427 - DNA, 75 bp, synthetic construct
  source 1..75: mol_type = other DNA
cattcctgtacatgtttcgatatcggcaagaagtacgacctgcacagtatgagtgctaatggtgtaatcaatggg

SEQ ID NO: 39428 - DNA, 75 bp, synthetic construct
  source 1..75: mol_type = other DNA
ccccggctggcgtcgtgactggaatcgtcagggcgactcaatgaccggaacgattaatcaggatggcggaagcca

SEQ ID NO: 39429 - DNA, 75 bp, synthetic construct
  source 1..75: mol_type = other DNA
gtgctggaaacagaaacgggccgctactctgacacgctgcgttcggcgctggtttctctggatggcgataacgca

SEQ ID NO: 39430 - DNA, 75 bp, synthetic construct
  source 1..75: mol_type = other DNA
accggcagtgatgcgtattatggcttcgtatgcgtttgaagattatgcccgtagcgcggcgagcaaaaaacagtg

SEQ ID NO: 39431 - DNA, 75 bp, synthetic construct
  source 1..75: mol_type = other DNA
ggaaggtgtcagtgcagacagacccgttcgctatcgggaagagtgggtaacgttgcaggatgcttttggctctga

SEQ ID NO: 39432 - DNA, 75 bp, synthetic construct
  source 1..75: mol_type = other DNA
gcaagactaaaccctctgacaaacccttcaaaatgacggacagttctggactgtacctgttgatcaaacctaacg

SEQ ID NO: 39433 - DNA, 75 bp, synthetic construct
  source 1..75: mol_type = other DNA
gcgttccttgggaaaatgggcattagtatgaatgacagagagcgggcaacagaattgctgacagaatatgcactc

SEQ ID NO: 39434 - DNA, 75 bp, synthetic construct
  source 1..75: mol_type = other DNA
tcgattactggactccggtcggtggggcgatcacacctcgcgaacgagaactgctgtctggtttcgtggattact

SEQ ID NO: 39435 - DNA, 75 bp, synthetic construct
  source 1..75: mol_type = other DNA
atgatgcgcttaaagaatggctgaaactggataagaccattcaacaacagtttgtgaaaaaactaaaaaaatgta

SEQ ID NO: 39436 - DNA, 75 bp, synthetic construct
  source 1..75: mol_type = other DNA
caaatggaactggcacggattgcgctggcatcgctggaagcagagccggtggcaaagattatagctcattaccca

SEQ ID NO: 39437 - DNA, 75 bp, synthetic construct
  source 1..75: mol_type = other DNA
gataatattggtggtgtttattacagaccaattcaaaaaaatattaatggtacatggtataacgtatcgagtgtt

SEQ ID NO: 39438 - DNA, 75 bp, synthetic construct
  source 1..75: mol_type = other DNA
gcgtgaacgtactggcaaaagacggttccatgaaaattcaggttggcgcgaatgatggccagaccatcactatcg

SEQ ID NO: 39439 - DNA, 75 bp, synthetic construct
  source 1..75: mol_type = other DNA
actggcaccaactccaagtctgacctggactccatccaggacgaaatcaaatcccgtctggacgaaattgaccgc

SEQ ID NO: 39440 - DNA, 75 bp, synthetic construct
  source 1..75: mol_type = other DNA
gaagacggcaatacggcgtggagcgcggaatatgatgaatggggcaaccagcttaatgaggagaacccgcatcac

SEQ ID NO: 39441 - DNA, 75 bp, synthetic construct
  source 1..75: mol_type = other DNA
tgaacggtatgcgtacattcccaccattaccgtcctggaaaatctgcagcgggaaggctttcagccgttcttcgc

SEQ ID NO: 39442 - DNA, 75 bp, synthetic construct
  source 1..75: mol_type = other DNA
atggcccacagtaacgagatggcacgtgcacaggatcgtattaacgaaattaaccaacgtgtcatttcaggtagt

SEQ ID NO: 39443 - DNA, 75 bp, synthetic construct
  source 1..75: mol_type = other DNA
atggtctatgaccataacggcgttattatttgtattgaaaaggatgtttcagcaattaatccagaaggcgcaagc

SEQ ID NO: 39444 - DNA, 75 bp, synthetic construct
  source 1..75: mol_type = other DNA
aagatgcctcgcagtttacgctcaccgttccggcgcgaccggataaaacactcaccatccgcaaatggacgctgc

SEQ ID NO: 39445 - DNA, 75 bp, synthetic construct
  source 1..75: mol_type = other DNA
ctcaggggccggaagaatgttgcctggcagtgaaaaaggcgctggacaggttgattaaagaagctacccgacaag

SEQ ID NO: 39446 - DNA, 75 bp, synthetic construct
  source 1..75: mol_type = other DNA
ctcgcagcaaaaatatgcgcgcgattgccacgcgtgatacggcgattgagaagcgcctcgccagtctgttaaccg

SEQ ID NO: 39447 - DNA, 75 bp, synthetic construct
  source 1..75: mol_type = other DNA
ccgccgccgggacaaagccccgcaccactgcgccgcataccctataaccctgacctgtacatcccggaaaatacc

SEQ ID NO: 39448 - DNA, 75 bp, synthetic construct
  source 1..75: mol_type = other DNA
aattaccggtaagcaggtgccggaaattatcctgctcaactcccatgatggcaccagctcgtaccagatgttacc

SEQ ID NO: 39449 - DNA, 75 bp, synthetic construct
  source 1..75: mol_type = other DNA
gtattaaccagatccgccgtgaccggcctctgacccacgaagagctgatgagccatgtccccagtgtgttcggga

SEQ ID NO: 39450 - DNA, 75 bp, synthetic construct
  source 1..75: mol_type = other DNA
aaggcatagatgtgactggcgatgatcagtacagtaaaggtccgtatgttaccgcgtcgttcagggtaagaagtg

SEQ ID NO: 39451 - DNA, 75 bp, synthetic construct
  source 1..75: mol_type = other DNA
cgttaatggtcggcatgatccccgatattggcgcatgggcatccaacagcgcgggtaaaaaagaccgcaatacgg

SEQ ID NO: 39452 - DNA, 75 bp, synthetic construct
  source 1..75: mol_type = other DNA
atgtaaatcagatccgccgggagcgcccgctgacacgtgaagaactgatgtaccacgtcccaagtatttttggtg

SEQ ID NO: 39453 - DNA, 75 bp, synthetic construct
  source 1..75: mol_type = other DNA
cctcctttgctacgcctcgcatggaaagctggcctcaagatcccaccgttgctttttgcctcgttctggcaaata

SEQ ID NO: 39454 - DNA, 75 bp, synthetic construct
  source 1..75: mol_type = other DNA
atgccattgccatcatggaaagcaagaaaatgtggcgtagtaactatgcgcctcctttgctacgcctcgcatgga

SEQ ID NO: 39455 - DNA, 75 bp, synthetic construct
  source 1..75: mol_type = other DNA
tgaggatggttcgtatgatgcatataaagatgcgcttatcgttaataagaaaacgggtgaacacgaggtaaactt

SEQ ID NO: 39456 - DNA, 75 bp, synthetic construct
  source 1..75: mol_type = other DNA
gtattaatcagatacgccgtgatcggcctttaacccatgaagaactaatgagtcatgtgcccagcgtattcggga

SEQ ID NO: 39457 - DNA, 75 bp, synthetic construct
  source 1..75: mol_type = other DNA
tgtacgaattttgttttcagtggcaggcctggcacaggaaaaaaccacctggcggcggctattggcaaccacctt

SEQ ID NO: 39458 - DNA, 75 bp, synthetic construct
  source 1..75: mol_type = other DNA
atgaagcgattagctatattcgagccagacgcccgcagattgtgctgacagacgagcacaaagcgatgctgagat

SEQ ID NO: 39459 - DNA, 75 bp, synthetic construct
  source 1..75: mol_type = other DNA
tctctaccaaaagaggagggatatacgttcattccaaacgcatttctggaaaagcttctcaaagaagacatatcc

SEQ ID NO: 39460 - DNA, 75 bp, synthetic construct
  source 1..75: mol_type = other DNA
aaacctagagacattaagagcgggcgcggttgcccgaaatgcgctaaatacgggtttttatcacactacaacgga

SEQ ID NO: 39461 - DNA, 75 bp, synthetic construct
  source 1..75: mol_type = other DNA
tgatttcatcggctacgcgcagcaacggcagattgccgccgggaaggctacatccgccgacgccattcctggcgg

SEQ ID NO: 39462 - DNA, 75 bp, synthetic construct
  source 1..75: mol_type = other DNA
ctgatacacacaaagaagttaagcgtttgcgcttccttcgttccattgatgaaagaactcaaatctcttttgtga

SEQ ID NO: 39463 - DNA, 75 bp, synthetic construct
  source 1..75: mol_type = other DNA
ttgctacaaggcgctggctggttattgttgctggccccgtttttcttcttcacctatggatctcttaatcagttc

SEQ ID NO: 39464 - DNA, 75 bp, synthetic construct
  source 1..75: mol_type = other DNA
agaaggagcaaccagttctgctgtcggttttaacattcaactgaacgattgtgacactactgttgcagacaaagc

SEQ ID NO: 39465 - DNA, 75 bp, synthetic construct
  source 1..75: mol_type = other DNA
cacccgtgccattcacaacatcgacaccgatattaagctcaaccgcgcattgtgggtaatggcagaaacgctgct

SEQ ID NO: 39466 - DNA, 75 bp, synthetic construct
  source 1..75: mol_type = other DNA
tatatttccagacatctgttatcacttaacccattacaagcccgctgccgcagatattcccgtggcgagcgataa

SEQ ID NO: 39467 - DNA, 75 bp, synthetic construct
  source 1..75: mol_type = other DNA
ctactatttatctgtcgaaggaagatcatacaaatttcccgaaaataaaccataattcatcaggaataaaaaacg

SEQ ID NO: 39468 - DNA, 75 bp, synthetic construct
  source 1..75: mol_type = other DNA
accgagtggatgctatatgcgcagaaagtcgaatctacagatacctccatcctgccagtaacgtttccagaaaaa

SEQ ID NO: 39469 - DNA, 75 bp, synthetic construct
  source 1..75: mol_type = other DNA
tacacatcgaaggccgcatatgtgggttatcgccacgaatgcgcctacgttctggcaaaaggccgtccggcgctg

SEQ ID NO: 39470 - DNA, 75 bp, synthetic construct
  source 1..75: mol_type = other DNA
gatcgttgtattgatttctggtggcagagcggcgggatacaggagcctgttgatgacagaatgcatgatttatcg

SEQ ID NO: 39471 - DNA, 75 bp, synthetic construct
  source 1..75: mol_type = other DNA
cagaggtgacctgctttatcaaacttaattgtgacaaaatggcgattgagaaggtgcaattgacttatccggatt

SEQ ID NO: 39472 - DNA, 75 bp, synthetic construct
  source 1..75: mol_type = other DNA
ctgcgggaatacagcgcgaagtttgataaaaccacggttaccgcgctgaaggtgtctgctgaggagatcgccgcc

SEQ ID NO: 39473 - DNA, 75 bp, synthetic construct
  source 1..75: mol_type = other DNA
gctatacatacaggcctgcgtagttctgaattatgtgcccttcgatggcgtgatatcgactttgttggaaaaact

SEQ ID NO: 39474 - DNA, 75 bp, synthetic construct
  source 1..75: mol_type = other DNA
gagcggatgtgggtcgttggcaaaaacgagttttaccacaaagaaactggacgccgccattttgcagaaaatacg

SEQ ID NO: 39475 - DNA, 75 bp, synthetic construct
  source 1..75: mol_type = other DNA
acgccgccattttgcagaaaatacgcgccgccgactgctgttagacaccatcaagcctatcgaggtgaagcatgt

SEQ ID NO: 39476 - DNA, 75 bp, synthetic construct
  source 1..75: mol_type = other DNA
gtgctggcgatgtggtacaccggcacgcataaccaggaagcgatagagctggccgaagcctggggatttacagtt

SEQ ID NO: 39477 - DNA, 75 bp, synthetic construct
  source 1..75: mol_type = other DNA
acgccgccactttgcagaaaatacgcgccgccgactgctgatcgacagcatcaagcctatcgaggtgaagcatgt

SEQ ID NO: 39478 - DNA, 75 bp, synthetic construct
  source 1..75: mol_type = other DNA
agatcaaaataaatcccaataaaggtggtaaggctgcgattgagcgattagtcgaagcttatggctttacgacac

SEQ ID NO: 39479 - DNA, 75 bp, synthetic construct
  source 1..75: mol_type = other DNA
ttcagaaacaaccctgaataacggaaccaataccattccgttccaggcgcgttattttgcaaccggggccgcaac

SEQ ID NO: 39480 - DNA, 75 bp, synthetic construct
  source 1..75: mol_type = other DNA
gattggaagagttagacgtctcatcggttttaaattcagagttattgcaaaaggcccggttacattatccggact

SEQ ID NO: 39481 - DNA, 75 bp, synthetic construct
  source 1..75: mol_type = other DNA
gttggtatcggtgcaggtgttgacgcttcagttatgactctggcttgtagaacgtggcaagaatgctgggtcaat

SEQ ID NO: 39482 - DNA, 75 bp, synthetic construct
  source 1..75: mol_type = other DNA
cgataaagccggaaaatctcgcgttgatctgctggcgcgggtgaaattaagtcacgataagctgaaagatttacg

SEQ ID NO: 39483 - DNA, 75 bp, synthetic construct
  source 1..75: mol_type = other DNA
cgttagcgtttcgtttgctggaagatgaattgctgattgcgctgccgggtgaggaatttacggtagccgccgtca

SEQ ID NO: 39484 - DNA, 75 bp, synthetic construct
  source 1..75: mol_type = other DNA
ggtcgttgatggcgagaatatcaaactgaaaaccgccatccagaacaccggtaaaatgagtaccggtctggcgct

SEQ ID NO: 39485 - DNA, 75 bp, synthetic construct
  source 1..75: mol_type = other DNA
ttcgggttgcccggggtgatacatccggtcagtatgttgcgttaaaaacagtcgcattgtctctggggttaccgg

SEQ ID NO: 39486 - DNA, 75 bp, synthetic construct
  source 1..75: mol_type = other DNA
tctttgcctggatggaacaaattgatcaggctacacctgtaacgccaggcgcagttacggcgaatgcaacctacg

SEQ ID NO: 39487 - DNA, 75 bp, synthetic construct
  source 1..75: mol_type = other DNA
ttccgcatcaaaagcatccagcgatcatttagtccgcgcgtggaaacgtacctatggtttaccgaccattgtgac

SEQ ID NO: 39488 - DNA, 75 bp, synthetic construct
  source 1..75: mol_type = other DNA
gcatctccctatgtcagctatgaagccgtgatgcataaacgtgagcagcgccgcaagtcgctggagtttttccgt

SEQ ID NO: 39489 - DNA, 75 bp, synthetic construct
  source 1..75: mol_type = other DNA
cgcggctgtatcgggcatgtatgcggcaggggccagtatgatcctgggcggtgtggctcagatgctggcaccgaa

SEQ ID NO: 39490 - DNA, 75 bp, synthetic construct
  source 1..75: mol_type = other DNA
ggtaagcagtgctgcagaagtgtatatccgcaaaatggagcaggcaggaaaagccacgcattcgctggggctgaa

SEQ ID NO: 39491 - DNA, 75 bp, synthetic construct
  source 1..75: mol_type = other DNA
cgttactggcaacagcttgaagttgtgcagggtaactggaaaaacggagtcctgcgtgcatttcaggattttacc

SEQ ID NO: 39492 - DNA, 75 bp, synthetic construct
  source 1..75: mol_type = other DNA
tcgggttaatgagtattgtcgtgggcgataaacaacgtttcttgcctcaaggcgactatcattatcaaattcatt

SEQ ID NO: 39493 - DNA, 75 bp, synthetic construct
  source 1..75: mol_type = other DNA
cttcagaaacagacggcactcaacgagctgaagaaaaaaacaattcagctgaccagtcaactggctgaagaagag

SEQ ID NO: 39494 - DNA, 75 bp, synthetic construct
  source 1..75: mol_type = other DNA
gttatccagagcgtgaaaaatgttttgacgatgcactaaaaattattgatgaactgcgtaaggcaggagcagaga

SEQ ID NO: 39495 - DNA, 75 bp, synthetic construct
  source 1..75: mol_type = other DNA
gccacagcaacacgtctctggcgtggggagctggcgtgcagtttaacccgaccgaatccgtggccattgatattg

SEQ ID NO: 39496 - DNA, 75 bp, synthetic construct
  source 1..75: mol_type = other DNA
cacaggcgctggcagagcaaaacggcgtggcgtgggaatccatcgatgcctggcagatcccttcctcgctgattg

SEQ ID NO: 39497 - DNA, 75 bp, synthetic construct
  source 1..75: mol_type = other DNA
cggatgatgagcgcacccaccggtaccattacgacagtcagcaccggctggtgcactacacgcggacacaatatg

SEQ ID NO: 39498 - DNA, 75 bp, synthetic construct
  source 1..75: mol_type = other DNA
gttgctgctcagccaggatcttttctgccatccgcgagccagtgccacggttgatgaagcatgttcacaactggt

SEQ ID NO: 39499 - DNA, 75 bp, synthetic construct
  source 1..75: mol_type = other DNA
gcccggacgcccacagcgaccagcacggataacggtaagcagaacacctatttctcatcactggataacatggtt

SEQ ID NO: 39500 - DNA, 75 bp, synthetic construct
  source 1..75: mol_type = other DNA
cggcaggcccaacccgacctggacaaatgcgacggtaagacaaagcagcgattatctggtcggcatgtttgctgc

SEQ ID NO: 39501 - DNA, 75 bp, synthetic construct
  source 1..75: mol_type = other DNA
aaaggccgcctgaccggcgaacgccagacggtggagaacccggagacgggggaactgctgtggcaccatgagacc

SEQ ID NO: 39502 - DNA, 75 bp, synthetic construct
  source 1..75: mol_type = other DNA
cggcggcatgttgcagcgcatgatgattgcgatggcggtgctgtgcgaatcaccgtttatcatcgccgatgaacc

SEQ ID NO: 39503 - DNA, 75 bp, synthetic construct
  source 1..75: mol_type = other DNA
aaaaagcatttgaatatatcgccggggtgggagatggcggtaaaaatcccctgaacaccatcatgaaaggctacg

SEQ ID NO: 39504 - DNA, 75 bp, synthetic construct
  source 1..75: mol_type = other DNA
cgcgtctggcgggagctaaaagtggcggtgtgtttcaggtggtgcttggggcggcgctgattgcggtggcatggt

SEQ ID NO: 39505 - DNA, 75 bp, synthetic construct
  source 1..75: mol_type = other DNA
gcggcgtctttaacgtctttggcaatgttgcctccattgtcactccactggtgattggctacctggtaagtgaac

SEQ ID NO: 39506 - DNA, 75 bp, synthetic construct
  source 1..75: mol_type = other DNA
tttatggcatctggtcacccattacagagggcaaaatctgcactcatgccgtgaagtggaaaatggttcgtaagg

SEQ ID NO: 39507 - DNA, 75 bp, synthetic construct
  source 1..75: mol_type = other DNA
gcacacctgaccgacggttatgtcctcggcgttattggttacgccattattcagcttacgcccgccatgcaactg

SEQ ID NO: 39508 - DNA, 75 bp, synthetic construct
  source 1..75: mol_type = other DNA
gctgccgataacgagcaggaacagctgcgccgcgatgcactgagtgagcaggtctgggagcgttatttctttaat

SEQ ID NO: 39509 - DNA, 75 bp, synthetic construct
  source 1..75: mol_type = other DNA
agagtgccgatgcggccctgctgcccgcgttgcgtctggggaatgcccgggcagatgatctggtgcgcaataacg

SEQ ID NO: 39510 - DNA, 75 bp, synthetic construct
  source 1..75: mol_type = other DNA
ctgatttacacgctgcgtaaggcacaccgcaccggcgcgaagttcatgatgaacaacaacagcctgtttgccatc

SEQ ID NO: 39511 - DNA, 75 bp, synthetic construct
  source 1..75: mol_type = other DNA
ctacattcctcgcgaactacccggcggtcgaccttcatttatccatgtattcgaaccgatggaggatggacagac

SEQ ID NO: 39512 - DNA, 75 bp, synthetic construct
  source 1..75: mol_type = other DNA
atctggataatcaacaatggattaacaacgtcaagagtggtgcctaccaatcctggattgaacaaaactataggg

SEQ ID NO: 39513 - DNA, 75 bp, synthetic construct
  source 1..75: mol_type = other DNA
aactactttctctggcgcgaccgcaaaggggcaatcagtaactttgtcagcttcctcgcgatgctggtgatgatc

SEQ ID NO: 39514 - DNA, 75 bp, synthetic construct
  source 1..75: mol_type = other DNA
agaagccgaaagggttcctggcgtatgaatccactgatgaaaccgacaaggtccgggcgttcggcaaacttcagc

SEQ ID NO: 39515 - DNA, 75 bp, synthetic construct
  source 1..75: mol_type = other DNA
tgtttaccggtatctacgctaaccagtccggcccgtggaccaacaacgtcgcgccaggcaaaaacatctccacta

SEQ ID NO: 39516 - DNA, 75 bp, synthetic construct
  source 1..75: mol_type = other DNA
ttacatcgggatatctcgcgaggacgccagggcgctggcgcgtgacgttgaggtcgcgtggactgaatacgccga

SEQ ID NO: 39517 - DNA, 75 bp, synthetic construct
  source 1..75: mol_type = other DNA
tgcacccggacagcaccctcagcatgtggccggataaccgtatcgcccgtgacgcgcactatctttaccggtatg

SEQ ID NO: 39518 - DNA, 75 bp, synthetic construct
  source 1..75: mol_type = other DNA
cgcagatgctggcaccgaaagccaaaacgcctaaagtgtcagccactgataacggtaagcaaaatacctattttt

SEQ ID NO: 39519 - DNA, 75 bp, synthetic construct
  source 1..75: mol_type = other DNA
tgaccttcactgactgttccggttatgtaacccgctatgaccatgaccgttttggtcaggtgacggcggtgcacc

SEQ ID NO: 39520 - DNA, 75 bp, synthetic construct
  source 1..75: mol_type = other DNA
gtgcgtaaccgctggttcagcgtgatggcggggccgtctgtgcgcgtgaatgaatggttcagcgcgtatgcgatg

SEQ ID NO: 39521 - DNA, 75 bp, synthetic construct
  source 1..75: mol_type = other DNA
ggtagcaaaatccaattgtgttggacttgaagcatatgatgctttatcgagtaggacgaattggatttgtgagaa

SEQ ID NO: 39522 - DNA, 75 bp, synthetic construct
  source 1..75: mol_type = other DNA
atatttctattacccccgattacagacaagcctggaaagtggaacataaattatcggatattctattgttgacta

SEQ ID NO: 39523 - DNA, 75 bp, synthetic construct
  source 1..75: mol_type = other DNA
gctatttcagagataaaaatcagcagctctacgttatctttcatctggccctggaaacagcaatgcgacaggggg

SEQ ID NO: 39524 - DNA, 75 bp, synthetic construct
  source 1..75: mol_type = other DNA
ttcctgcctgcaacatctgaaatgctgccccatcaccacattgaaaatcgaccaatcctttgtcgccaggctccc

SEQ ID NO: 39525 - DNA, 75 bp, synthetic construct
  source 1..75: mol_type = other DNA
acgtctgggggcagaagtcatgagccagcgtatccgtgaaatgtctgataacgatccgcgcgtggtggcgctggt

SEQ ID NO: 39526 - DNA, 75 bp, synthetic construct
  source 1..75: mol_type = other DNA
gcaatttacttgctgttccctttagtgccgctaccgatttcaccgatctggcggagtactgcgatcgcgttgcca

SEQ ID NO: 39527 - DNA, 75 bp, synthetic construct
  source 1..75: mol_type = other DNA
tttgtttcaaacgccattagcaaggaaaataaacttaatgacaattttattataaactcaatattctgggcaaaa

SEQ ID NO: 39528 - DNA, 75 bp, synthetic construct
  source 1..75: mol_type = other DNA
tcatcaacaggaaacagctcctggagatgattccactttcaacgcgcacaatttataacctggaacagcgtgggg

SEQ ID NO: 39529 - DNA, 75 bp, synthetic construct
  source 1..75: mol_type = other DNA
atggcttcaggcatgcgacggaaacagggttcaggaatacgtgaaactggagcgactgcagaacgcgctatcgga

SEQ ID NO: 39530 - DNA, 75 bp, synthetic construct
  source 1..75: mol_type = other DNA
aaacgtggtggacagggtcatagaaggtgcttacgaagtggtgggcgtgtttgacctgattgaggaaaagcgtga

SEQ ID NO: 39531 - DNA, 75 bp, synthetic construct
  source 1..75: mol_type = other DNA
agcacctcagcaaaactgtttactgcaaaggtggcagtgatggcggttcaaaagcccaggcacgcgcaactgaaa

SEQ ID NO: 39532 - DNA, 75 bp, synthetic construct
  source 1..75: mol_type = other DNA
cgcggctgtatcgggtatgtatgcggcaggggccagtatgatcctgggcggtgtggcgcagatgctggcccccaa

SEQ ID NO: 39533 - DNA, 75 bp, synthetic construct
  source 1..75: mol_type = other DNA
ggatgcacagcgccgtgctggcatcagcgatgctgaaattaccgctgctatggaagataaattgaagatcaacat

SEQ ID NO: 39534 - DNA, 75 bp, synthetic construct
  source 1..75: mol_type = other DNA
acatgacctggatatcgccacgacagggatgggggataaacagcgtcagcgataccaggcacagttcagtctgca

SEQ ID NO: 39535 - DNA, 75 bp, synthetic construct
  source 1..75: mol_type = other DNA
gcccgtcttaatgagccgctggcaaatggtgccgtgatccacatcgtgccgcgtctggcgggagctaaaagtggc

SEQ ID NO: 39536 - DNA, 75 bp, synthetic construct
  source 1..75: mol_type = other DNA
cgctacaaattgctgaaaaaagatgcgcgtaccgtcgccgcccagcaggtagcaaggctggaatccgccatgtgc

SEQ ID NO: 39537 - DNA, 75 bp, synthetic construct
  source 1..75: mol_type = other DNA
aatgaaaaaacacaacaaataccccacatatgtattacacatgccatcaaacaatatatttgaaataggctacaa

SEQ ID NO: 39538 - DNA, 75 bp, synthetic construct
  source 1..75: mol_type = other DNA
tgataacggttcgctgctgctggatttcggcccacgtcagttcaccgtcagctttgatgaaaccttaaaaccgtt

SEQ ID NO: 39539 - DNA, 75 bp, synthetic construct
  source 1..75: mol_type = other DNA
ggatgccggggatcagtatcgctttcagtgacattctcttttcaatgggtgcggcgatgacgcttggcggtgttg

SEQ ID NO: 39540 - DNA, 75 bp, synthetic construct
  source 1..75: mol_type = other DNA
gtcgcttatgaaggctccggcagtggtgactggcgcactgacggtttcatcgtgggtgtcggttataaattctga

SEQ ID NO: 39541 - DNA, 75 bp, synthetic construct
  source 1..75: mol_type = other DNA
ctgaaaatttgtaccaacaagggaaagacaaatcagctgatgggggctccagaacggacattacccgcatggatg

SEQ ID NO: 39542 - DNA, 75 bp, synthetic construct
  source 1..75: mol_type = other DNA
atatatccagtggaggcaatgctattgaaaccactattgaaaatgggttccaggaggtttccaatggtggcagtg

SEQ ID NO: 39543 - DNA, 75 bp, synthetic construct
  source 1..75: mol_type = other DNA
gatacgccgaatgttgatacaaatacagagattactacagagattacaacggagactaaaaacactattgatgca

SEQ ID NO: 39544 - DNA, 75 bp, synthetic construct
  source 1..75: mol_type = other DNA
tcaccctggctaaccgtgccggatggattgacgcgctgatgtccccgaaaggcatggctgtcggcggggttatcg

SEQ ID NO: 39545 - DNA, 75 bp, synthetic construct
  source 1..75: mol_type = other DNA
gtgagatgtggtctgcaatgtggaatggcaatcgctgggatgatggcaccgaatatccggatccgcactcagtta

SEQ ID NO: 39546 - DNA, 75 bp, synthetic construct
  source 1..75: mol_type = other DNA
ttaagccgggtaatggtattgagcaggcaactcactggatgcctctaccagaaccgcctcaggaggttaaccgtg

SEQ ID NO: 39547 - DNA, 75 bp, synthetic construct
  source 1..75: mol_type = other DNA
cccgccataccagcgtgaaatcggtattgtgttccagagctacgcgctgtttccgcatatgacggtcgagaagaa

SEQ ID NO: 39548 - DNA, 75 bp, synthetic construct
  source 1..75: mol_type = other DNA
tacatttcctataataaatcttctttaaacaatctggtgttctcacgatttattgaccgtctaaatgagtgtttt

SEQ ID NO: 39549 - DNA, 75 bp, synthetic construct
  source 1..75: mol_type = other DNA
gggtgtagcttacagccgtgtgtcgactttctccggggattatcttcgcgtaactgacaacaaggggaaaaagca

SEQ ID NO: 39550 - DNA, 75 bp, synthetic construct
  source 1..75: mol_type = other DNA
aggcggccatgtgcgaacgactgcacgaactcgcagaagaactccagaacagcatccagattcgctttgaggccg

SEQ ID NO: 39551 - DNA, 75 bp, synthetic construct
  source 1..75: mol_type = other DNA
catcttgagaaaaatctcagaggccttgaacaaacaattaatatagtcaataagtccgaactaaagaaaaacttt

SEQ ID NO: 39552 - DNA, 75 bp, synthetic construct
  source 1..75: mol_type = other DNA
gcgggtgtgtggacgtcaggcatcggccacactgccggggtggtaccgaaacgggatatcaccgagaaggaagcc

SEQ ID NO: 39553 - DNA, 75 bp, synthetic construct
  source 1..75: mol_type = other DNA
gtgaatacttaccacatcacactaccctggccgccgagcaataaccgctactaccggcataatcgcgggcgcacg

SEQ ID NO: 39554 - DNA, 75 bp, synthetic construct
  source 1..75: mol_type = other DNA
tgaacgccacagaccgtctgcagaacgacggcaaaatcctctccggcagtaacctcacgctgacggcgcaggtgc

SEQ ID NO: 39555 - DNA, 75 bp, synthetic construct
  source 1..75: mol_type = other DNA
gatatcacggtcggcaaccacacccagctcgatggtgcggttatcgcttccacggcgacggcagataaaaacagc

SEQ ID NO: 39556 - DNA, 75 bp, synthetic construct
  source 1..75: mol_type = other DNA
ttcaaaagatctacgataaccaggtgcatgtggtgaaggacttcaacctggaaattgccgataaagagttcatcg

SEQ ID NO: 39557 - DNA, 75 bp, synthetic construct
  source 1..75: mol_type = other DNA
gttgaccagtaccggcgatatcatgagccagggtgacaccacgctgaaagcagccaccacggacaaccggggcag

SEQ ID NO: 39558 - DNA, 75 bp, synthetic construct
  source 1..75: mol_type = other DNA
gttaacgacgacggtaaccgagtatcgtggcacatcggatgctaacggtacggcaaccatcacggtgacccagcc

SEQ ID NO: 39559 - DNA, 75 bp, synthetic construct
  source 1..75: mol_type = other DNA
tcgccgtgacctggataatctgcaaaaagccgcttttgacgcactcaccaaagcaggtttctggctggatgatgc

SEQ ID NO: 39560 - DNA, 75 bp, synthetic construct
  source 1..75: mol_type = other DNA
gggatttatggtgggtcagaaggatatgaccctgaacgccggaacgctcgataaccgtcagggcgtgctggggag

SEQ ID NO: 39561 - DNA, 75 bp, synthetic construct
  source 1..75: mol_type = other DNA
gcgtcagggcgaccacgctggatggtgacggcctgttgcagggcgccggtgcactggcgcttgctggcgacaccc

SEQ ID NO: 39562 - DNA, 75 bp, synthetic construct
  source 1..75: mol_type = other DNA
tctttcaggggggacacgggacagccggagatttgtataaaacaactttttacggtccgacacagtattatctgc

SEQ ID NO: 39563 - DNA, 75 bp, synthetic construct
  source 1..75: mol_type = other DNA
agtgggggaaactcgcgcgttaaactctcaggagataatcagattatacctgataatatttcctggggattccgg

SEQ ID NO: 39564 - DNA, 75 bp, synthetic construct
  source 1..75: mol_type = other DNA
aactgtataccgacagtgccggttacccggtcaaaattattcactgcataaataacatcgtgttgtacagaagaa

SEQ ID NO: 39565 - DNA, 75 bp, synthetic construct
  source 1..75: mol_type = other DNA
aaatacggtgatgtactgactgacagtctggcggtgaagcaggcaatagatcgtgctttgggtgaagatatcccg

SEQ ID NO: 39566 - DNA, 75 bp, synthetic construct
  source 1..75: mol_type = other DNA
taaaggccctggaaaagcggtgaagcaagtcataccttttgaaggcaatgaaaagtcttttgaaacaatattgaa

SEQ ID NO: 39567 - DNA, 75 bp, synthetic construct
  source 1..75: mol_type = other DNA
atccagcgttttggatcggcgctcaatctgaatgttcacttccacatgctgtttctcgacggtgtgtatgtcgag

SEQ ID NO: 39568 - DNA, 75 bp, synthetic construct
  source 1..75: mol_type = other DNA
caacccgcccggaactggaagacatcgaagcatcggcacgtttctttgaagacgacgacggcctgcatattcact

SEQ ID NO: 39569 - DNA, 75 bp, synthetic construct
  source 1..75: mol_type = other DNA
agcatggatgttgagcatggccagtacagcgtcatcctgctggttgaaggttttccgccttcacatgccgggacc

SEQ ID NO: 39570 - DNA, 75 bp, synthetic construct
  source 1..75: mol_type = other DNA
ggttcgctgcgagtcttgccacgccgagcacctggtcgctttcagctgtaagcgtcgcggtttctgcccgagctg

SEQ ID NO: 39571 - DNA, 75 bp, synthetic construct
  source 1..75: mol_type = other DNA
ctaccgattgtgctgggaatgttgctggcttccaccatcatcttatgtaactacaccaacaacaccacgctggtg

SEQ ID NO: 39572 - DNA, 75 bp, synthetic construct
  source 1..75: mol_type = other DNA
catagcgacagttccattgttccgttaagcaaaagcacgccggatgtcgaaacgcccagcctgaaaccgctctgg

SEQ ID NO: 39573 - DNA, 75 bp, synthetic construct
  source 1..75: mol_type = other DNA
ttggcaccggtctgcccattttacagatccggcaaagagaagcgttatttacgccgctgcatgccccgtctgatg

SEQ ID NO: 39574 - DNA, 75 bp, synthetic construct
  source 1..75: mol_type = other DNA
gtgatgagcgggggtactggacgcaccctgcactgttcggcagtggctgtgagagcgctgcagactttcattact

SEQ ID NO: 39575 - DNA, 75 bp, synthetic construct
  source 1..75: mol_type = other DNA
ttccgtcgggagatctaccgtgagctggggatctctctctactccaacgaggctgccgaagaggcaggtctgcgt

SEQ ID NO: 39576 - DNA, 75 bp, synthetic construct
  source 1..75: mol_type = other DNA
attcgagccagacgcccgcagattgtgctgacagacgagcacaaagcgatgctgagattatgggaaaacaggtaa

SEQ ID NO: 39577 - DNA, 75 bp, synthetic construct
  source 1..75: mol_type = other DNA
gttaccatcacagatggtgcatataacacgactatttcactgggggcgggagatgatgtatttgatgcaacttct

SEQ ID NO: 39578 - DNA, 75 bp, synthetic construct
  source 1..75: mol_type = other DNA
gattgatactgcaatggcttccattagtctgattcagctgaaattgcaggccggacggaatctgacgcaggcaga

SEQ ID NO: 39579 - DNA, 75 bp, synthetic construct
  source 1..75: mol_type = other DNA
ctatgtcaacgagtgtgaatgccgcgacctcaccgatgtgaagcacgtcctgacggcgctaatcagcatgaccgc

SEQ ID NO: 39580 - DNA, 75 bp, synthetic construct
  source 1..75: mol_type = other DNA
tttggtgtggatggtaagcggagtggaaaaatcaatcaaaccaccacaaagatgttatttatgtgtcgtgagtga

SEQ ID NO: 39581 - DNA, 75 bp, synthetic construct
  source 1..75: mol_type = other DNA
ccgaaacactttcacaacagcttgatgcttatgtaagcccaatccttgaaggtcgtagtgaagaagacttgctga

SEQ ID NO: 39582 - DNA, 75 bp, synthetic construct
  source 1..75: mol_type = other DNA
tgcgacattttgcccggaatgcgtcagttcggtgcgctggcgacggtggtgccaacgtcagtgcaggatgtggct

SEQ ID NO: 39583 - DNA, 75 bp, synthetic construct
  source 1..75: mol_type = other DNA
gacagtaatcgcttaaaactggatttatgccaacattgcctgaaagacgtcctgggccagtggattacggtctgt

SEQ ID NO: 39584 - DNA, 75 bp, synthetic construct
  source 1..75: mol_type = other DNA
catcaaccgcaaaaaagcgaacgtcatgcgcccggtggagtaccagaacggtgaggcattcactatccgtaacgt

SEQ ID NO: 39585 - DNA, 75 bp, synthetic construct
  source 1..75: mol_type = other DNA
cagcaatagagattgagtcattcgaaacagcatataaaggatcaccggaagaaaaacacgagttcacatcatact

SEQ ID NO: 39586 - DNA, 75 bp, synthetic construct
  source 1..75: mol_type = other DNA
taagccagtggatgcgtaacgtttccggtctgtctgccgggatggttcgtccgcgctggcagaaagagcaaccgc

SEQ ID NO: 39587 - DNA, 75 bp, synthetic construct
  source 1..75: mol_type = other DNA
gaaaataacgtcgctaaaacaaatctttgcgccattctggaacaacacggcctgactaacctgcacagcctgtaa

SEQ ID NO: 39588 - DNA, 75 bp, synthetic construct
  source 1..75: mol_type = other DNA
accgggaaagaatgagtaacctccgccgctggctccatgatgcccggcagggcatggaaggcgacacaccagagg

SEQ ID NO: 39589 - DNA, 75 bp, synthetic construct
  source 1..75: mol_type = other DNA
ttaccatttgcgacagaatatagagaaaaccgtgttgctcttaacgcgaattcccttgcagataatgttgaactg

SEQ ID NO: 39590 - DNA, 75 bp, synthetic construct
  source 1..75: mol_type = other DNA
tgccgaccgcattcaggagattcacattaaagtgatccatatcctgatccagttaattgaaaaagagatggttaa

SEQ ID NO: 39591 - DNA, 75 bp, synthetic construct
  source 1..75: mol_type = other DNA
agccatgcccgccgataccaatgccaatggtgacatctttggtggttggttaatgtcacaaatggatattggcgg

SEQ ID NO: 39592 - DNA, 75 bp, synthetic construct
  source 1..75: mol_type = other DNA
taccgcaacctgcgccccctgtatcccaaaacggtaattcgtatccgcaaaggtagctctaacggtgtggaactt

SEQ ID NO: 39593 - DNA, 75 bp, synthetic construct
  source 1..75: mol_type = other DNA
accacgcttgccgacctgacggctgccagccggggcagtgtctggcttaacagcaataattcctgtgcaggtacc

SEQ ID NO: 39594 - DNA, 75 bp, synthetic construct
  source 1..75: mol_type = other DNA
ggccattgtttttaaagacgataatgcggttggtttttatgaggatgttcagagcggtattgatgcgtataaaaa

SEQ ID NO: 39595 - DNA, 75 bp, synthetic construct
  source 1..75: mol_type = other DNA
gacccgggataacctcgagcgcatggtggttatcaaggcgtttatcgcggtgcgggtgctgggcctgcggcaggg

SEQ ID NO: 39596 - DNA, 75 bp, synthetic construct
  source 1..75: mol_type = other DNA
accccgcagcgatgcccatactggcaactgtcggaggattgatcatcggcagttttttgaatgtggtgatctggc

SEQ ID NO: 39597 - DNA, 75 bp, synthetic construct
  source 1..75: mol_type = other DNA
gctttggtttaagcatggcatttaagtttgattattatatcgtcgatgaagtaaccgcagtcggtgatgccaggt

SEQ ID NO: 39598 - DNA, 75 bp, synthetic construct
  source 1..75: mol_type = other DNA
tggagcgtgtcgctgacgtgcgcccggatttcgccttgccgctgggtagatgcgaccacatttaccctgagcgtg

SEQ ID NO: 39599 - DNA, 75 bp, synthetic construct
  source 1..75: mol_type = other DNA
gtttcctggctgatcagtatcagcacgccattgctcaccaccaccagcgtgatgttatcaacagtagtgctggtc

SEQ ID NO: 39600 - DNA, 75 bp, synthetic construct
  source 1..75: mol_type = other DNA
atgaataaagctgtattgaatagcgaactcattgccataaaagcgggagacattatcatttataattatgatggt

SEQ ID NO: 39601 - DNA, 75 bp, synthetic construct
  source 1..75: mol_type = other DNA
aacgttgtcctgactgtgatgccctcctgcacttcattcgcgatgaagtcagcgagaagctggaatatattccgg

SEQ ID NO: 39602 - DNA, 75 bp, synthetic construct
  source 1..75: mol_type = other DNA
cccaactcctggcggagatgagataataccggacgatccggatgatacgcctacacctcccaaaccggtttcgtt

SEQ ID NO: 39603 - DNA, 75 bp, synthetic construct
  source 1..75: mol_type = other DNA
caagaagaacgtcaggctaaactggaagccttccgccagaaattgttagaagacggtatcgatcctacagaacta

SEQ ID NO: 39604 - DNA, 75 bp, synthetic construct
  source 1..75: mol_type = other DNA
cgtggttcattcctgatgatgcgaagttgcatcgcaaactgttgcgctggtacagctcggtgcaaacaggtatgg

SEQ ID NO: 39605 - DNA, 75 bp, synthetic construct
  source 1..75: mol_type = other DNA
catcagggggagggttaaatatctctggcgggaataaccgcatcgcaggccgtgactataacgaaacaaagggta

SEQ ID NO: 39606 - DNA, 75 bp, synthetic construct
  source 1..75: mol_type = other DNA
tccggtacatcgacacggcggataagttcgcactactgaacatcaaccatgcggattacatgcgccatatcgtga

SEQ ID NO: 39607 - DNA, 75 bp, synthetic construct
  source 1..75: mol_type = other DNA
tgccctggaggcgcgccggctaacgtggcggtaggggttgcccgccttggcggcaacagcggatttatcggccgc

SEQ ID NO: 39608 - DNA, 75 bp, synthetic construct
  source 1..75: mol_type = other DNA
ggcgcccgttacgacctgaaggggcagccgtgcggggaagtgactccacaggaacagaaagaggcagagacccgg

SEQ ID NO: 39609 - DNA, 75 bp, synthetic construct
  source 1..75: mol_type = other DNA
agaaaatttttaaaactttcaaatgtaaactaactgaccaacaaaaaaaattgtatgatgctacagatcctttca

SEQ ID NO: 39610 - DNA, 75 bp, synthetic construct
  source 1..75: mol_type = other DNA
aacgcaccaatggaagccttcaccgaaaaagatcagttcttccacggcgttggcgttgacggtgtgtatctgccg

SEQ ID NO: 39611 - DNA, 75 bp, synthetic construct
  source 1..75: mol_type = other DNA
aagtttaaaagcgcctgggctacccaaaaaaacagaataaaaaatagggttgataaaaagctgcgccccctgaac

SEQ ID NO: 39612 - DNA, 75 bp, synthetic construct
  source 1..75: mol_type = other DNA
gagcatattgaccacctggaatatcacaagattctggctgaaacagaacaagaaaagcacctgaagaaattacgc

SEQ ID NO: 39613 - DNA, 75 bp, synthetic construct
  source 1..75: mol_type = other DNA
gcaagctgatttactaaaaataatcatggaggatacctctgttacagaaaatacctttaaaaacatagagatagc

SEQ ID NO: 39614 - DNA, 75 bp, synthetic construct
  source 1..75: mol_type = other DNA
ttgctgccggcctggccggtggtctggtgggagactcgggggcttcagcggtagccggcgcacagtcaggtaaga

SEQ ID NO: 39615 - DNA, 75 bp, synthetic construct
  source 1..75: mol_type = other DNA
acgggttatgcctgaatccattccggctggctttaaggcactggctgacatgagtccgtttgaatccctgctgat

SEQ ID NO: 39616 - DNA, 75 bp, synthetic construct
  source 1..75: mol_type = other DNA
cgctgagtgacagtgaggtggccagtgccgtgggtaactccatgtttgcggatctggtgagtgtcgccgggcata

SEQ ID NO: 39617 - DNA, 75 bp, synthetic construct
  source 1..75: mol_type = other DNA
aattcaaaagtcctgatgctgactaaagtaggtgatgatatttttgcggataatactattcgtaatcttgaatca

SEQ ID NO: 39618 - DNA, 75 bp, synthetic construct
  source 1..75: mol_type = other DNA
tgcgccagttgtgtcaggagatgcacgatctgtatgtcagtttcgacgtcaaagacctacaaaaagcgatgttcc

SEQ ID NO: 39619 - DNA, 75 bp, synthetic construct
  source 1..75: mol_type = other DNA
aatccggttaacctgcattgtgatgagtttaatgaactgatgggcgatgagttcattccgttaatcaacaaggga

SEQ ID NO: 39620 - DNA, 75 bp, synthetic construct
  source 1..75: mol_type = other DNA
agcgcgcagccgtgggactgggcattttatgccgaacaggtacggcgggagaaatttgatcttgatgaggcgcag

SEQ ID NO: 39621 - DNA, 75 bp, synthetic construct
  source 1..75: mol_type = other DNA
tcaagtacaaccgagacagcaaaggtgagcgtcacgtaatagttaacggcgtcctgatggtaacgccaggcaaaa

SEQ ID NO: 39622 - DNA, 75 bp, synthetic construct
  source 1..75: mol_type = other DNA
atgaacgccacaattcaaacgataccagagcttcttatccagacacgaggcaatcagaccgaagtggcaaggatg

SEQ ID NO: 39623 - DNA, 75 bp, synthetic construct
  source 1..75: mol_type = other DNA
agctaccatcggtgcgttacctgtcgccgttgcccgctcagaaggagtccttgtcggatacctccctggactggc

SEQ ID NO: 39624 - DNA, 75 bp, synthetic construct
  source 1..75: mol_type = other DNA
tgtatcatcatggggctatgagcaaaccaatgtaaccttctaccaggttctttctgttcacggtaaaaaaaccgt

SEQ ID NO: 39625 - DNA, 75 bp, synthetic construct
  source 1..75: mol_type = other DNA
acagattttcacgaggattaccaaacggtaatggcatacaaagtttctgaagtcatcgatgcaatccgcgctact

SEQ ID NO: 39626 - DNA, 75 bp, synthetic construct
  source 1..75: mol_type = other DNA
gctgacattctgacaccacgacgcagggaggattacggcaaggacctgtggagcgcatatcagaccatccaggag

SEQ ID NO: 39627 - DNA, 75 bp, synthetic construct
  source 1..75: mol_type = other DNA
atgcccagctttctaccccatgcactgacagcatcataaacagcattgcaacaggcattcgcatcaaaggaggtg

SEQ ID NO: 39628 - DNA, 75 bp, synthetic construct
  source 1..75: mol_type = other DNA
ttgccgggacttactgcaaaacgccattcgctgattcttatgcgttcatcagcaatccggcaacaggtgcgccgt

SEQ ID NO: 39629 - DNA, 75 bp, synthetic construct
  source 1..75: mol_type = other DNA
gagagaacaagaacaatcgcaatggtgccgaagatgagctggtcgggctgtttcgggagatgaaatattatgaat

SEQ ID NO: 39630 - DNA, 75 bp, synthetic construct
  source 1..75: mol_type = other DNA
aacatgcgctgagccaggcaaaatccatcgctgacgaactgatgaccgggtgcacgaattttgtgttcagcggta

SEQ ID NO: 39631 - DNA, 75 bp, synthetic construct
  source 1..75: mol_type = other DNA
tagtcgagatcgggtgccctcttacgaggcgacatttcatcaagtaccattcaggcatgatctctggtggaaagc

SEQ ID NO: 39632 - DNA, 75 bp, synthetic construct
  source 1..75: mol_type = other DNA
aacacgaaaaattaccgccaaaggtataccccaataaatatagttatgtatggaaaccgacatccagagaatctg

SEQ ID NO: 39633 - DNA, 75 bp, synthetic construct
  source 1..75: mol_type = other DNA
aaaggacgactacaaagacgccctgaaacagcttaccgatattcgtgataaccggatgacgctggctctgccatc

SEQ ID NO: 39634 - DNA, 75 bp, synthetic construct
  source 1..75: mol_type = other DNA
atagctgattttcgtgcactaccatttgcagacgcatctttttcgatggttatattcgaccctccgcatcttgag

SEQ ID NO: 39635 - DNA, 75 bp, synthetic construct
  source 1..75: mol_type = other DNA
gtgattattgatgaaagtgccggtgaggttgttatcggcgcgaatacccgtatttgccacggtgccgttattcag

SEQ ID NO: 39636 - DNA, 75 bp, synthetic construct
  source 1..75: mol_type = other DNA
tgattgagtttcatgaccgcttgatttcgcgtgatggtggcgtggcgggtatgccagaacccggtcgcgctgacg

SEQ ID NO: 39637 - DNA, 75 bp, synthetic construct
  source 1..75: mol_type = other DNA
gaggtgcttagccatatccgcaaagcggtgctgtttatcgaagggataacggtaagcggcggcgaagccacgacc

SEQ ID NO: 39638 - DNA, 75 bp, synthetic construct
  source 1..75: mol_type = other DNA
acagtcacacggcgcggactttgccttccccagccagacgctgtatatggataacattacaccgccggaccaggg

SEQ ID NO: 39639 - DNA, 75 bp, synthetic construct
  source 1..75: mol_type = other DNA
tcgcggcatttttcttctctgcctttggggcgctcgtctggtctgcaaaccattaccacagcaagtatcaggcag

SEQ ID NO: 39640 - DNA, 75 bp, synthetic construct
  source 1..75: mol_type = other DNA
ggttaaaaacgcggccacgcagacctttgacggtattgcacagaatatggcagcgatgctgaccggcagcgaaca

SEQ ID NO: 39641 - DNA, 75 bp, synthetic construct
  source 1..75: mol_type = other DNA
ttgaccggattgaggaaaagcgtgatgccatgcagtcgctgattctgccgccaccggcacgccaggcgctggccc

SEQ ID NO: 39642 - DNA, 75 bp, synthetic construct
  source 1..75: mol_type = other DNA
tagtaatgatgatggttatgcctgtgagctatgcggcatgttatagtgagttatctgttcagcacaatttggttg

SEQ ID NO: 39643 - DNA, 75 bp, synthetic construct
  source 1..75: mol_type = other DNA
acacggtcagcaggtgccggaaatcatcatcctgaattcgcacagtggtgagtccagttttcagttattgccggg

SEQ ID NO: 39644 - DNA, 75 bp, synthetic construct
  source 1..75: mol_type = other DNA
tgaaagacggtgcaggaaaaccgatacagaactgcaccattcagctcaaagcaaaacgtaacagcaccacagttg

SEQ ID NO: 39645 - DNA, 75 bp, synthetic construct
  source 1..75: mol_type = other DNA
tttttaccgcgctgatttatcttgtggcgtcgctgtttttccggctgatacgtaaagcctgtcgtcagcgtcttg

SEQ ID NO: 39646 - DNA, 75 bp, synthetic construct
  source 1..75: mol_type = other DNA
aattattctgctcaactcccatgacggttcatccagctaccagatgttacccggatattttcgtgccatttgtac

SEQ ID NO: 39647 - DNA, 75 bp, synthetic construct
  source 1..75: mol_type = other DNA
tgacgaacatcagcccgtcaccaccgctgacattcttacgccacgacgcagggaggattacggtaaggacctgtg

SEQ ID NO: 39648 - DNA, 75 bp, synthetic construct
  source 1..75: mol_type = other DNA
gcaggtaaaaccgctgggaaataacagctggacgctggagcccgcgcccgcaccaaaagaagatgccctgaccgt

SEQ ID NO: 39649 - DNA, 75 bp, synthetic construct
  source 1..75: mol_type = other DNA
gccgaaacagtttttatcctgtgctttattgtactatggcagggattgtttatatggttgttttctcaaatacga

SEQ ID NO: 39650 - DNA, 75 bp, synthetic construct
  source 1..75: mol_type = other DNA
tataacgatgacagtatcttccttactctctccattattaagcctgatggtttttatcattggtacactatacga

SEQ ID NO: 39651 - DNA, 75 bp, synthetic construct
  source 1..75: mol_type = other DNA
accaccgcacgtggcagcaccgttccggacgaccgacgaatggcgggaatggcaactggctgagggccgtaagcg

SEQ ID NO: 39652 - DNA, 75 bp, synthetic construct
  source 1..75: mol_type = other DNA
attgtgcgaagtaagcaggaactggagtacaccgcccaatgttgcgccaaggatatttgatgttggagggcacag

SEQ ID NO: 39653 - DNA, 75 bp, synthetic construct
  source 1..75: mol_type = other DNA
agtggctttgccggaaataacgcagcatcagtagtatctgttggtgatgcgggtaaagagcgtcagattgttaac

SEQ ID NO: 39654 - DNA, 75 bp, synthetic construct
  source 1..75: mol_type = other DNA
aaaggtaatgccagtggccgtacccgtgtcgctgttactcaggccggtggtactggtgcagagacacttaatggg

SEQ ID NO: 39655 - DNA, 75 bp, synthetic construct
  source 1..75: mol_type = other DNA
atgcactaattcatcgcgaggctgctggatatattcccatttgcagaattgaaggagcacatcctgaaagcggtt

SEQ ID NO: 39656 - DNA, 75 bp, synthetic construct
  source 1..75: mol_type = other DNA
atctcactacatatatgccgggtaatatactgactgtcggagggaattacactggcagaaatggacttattctcc

SEQ ID NO: 39657 - DNA, 75 bp, synthetic construct
  source 1..75: mol_type = other DNA
atttcacgacttgagacacacctgggcaagttggctggttcaagccggagtcccgttgtcagtgttacaggaaat

SEQ ID NO: 39658 - DNA, 75 bp, synthetic construct
  source 1..75: mol_type = other DNA
gattaactttaacaatcagtacgactccaaccagaccaacgacaccgtcactgcacgtggcaaaacgcgccatac

SEQ ID NO: 39659 - DNA, 75 bp, synthetic construct
  source 1..75: mol_type = other DNA
aacattacgacaagacgccagtagctggctgctgaaatacccggaacacgccattaccggcctgctgcctgcagc

SEQ ID NO: 39660 - DNA, 75 bp, synthetic construct
  source 1..75: mol_type = other DNA
cagatgccaggtatgtggatatacagcgaacgccgatgtaaatggcgctcgtaacattttagcggcggggcacgc

SEQ ID NO: 39661 - DNA, 75 bp, synthetic construct
  source 1..75: mol_type = other DNA
caattcggagcgtagcaaaagatttcagtgtcagcacacagacggtgcaacgtatcaagaaagagcaggaagcgt

SEQ ID NO: 39662 - DNA, 75 bp, synthetic construct
  source 1..75: mol_type = other DNA
acgagcattattgcaatgcaacgtggaggttttctttggcatgaaggtgacaattattctataaacgcagagctt

SEQ ID NO: 39663 - DNA, 75 bp, synthetic construct
  source 1..75: mol_type = other DNA
gtgaccttaaaacgaccgttaacgacctggtgaaagcgctggcgaaactgctcaatattgaccccaaatcatggt

SEQ ID NO: 39664 - DNA, 75 bp, synthetic construct
  source 1..75: mol_type = other DNA
gggaatgtggctggtggtcttgttgatattgggcaaatgagcaagcataaaaaagcagcagagcttggttttaag

SEQ ID NO: 39665 - DNA, 75 bp, synthetic construct
  source 1..75: mol_type = other DNA
gaagcagaagccgtaaggctctacatcgacaggatcttcactggaaagccctttctcatcacagaaaagcatctc

SEQ ID NO: 39666 - DNA, 75 bp, synthetic construct
  source 1..75: mol_type = other DNA
gaacccgataaccaatcaagcgcagaccgaccgcgacaacgggcaggataccgccattcaggacgcacaacatgc

SEQ ID NO: 39667 - DNA, 75 bp, synthetic construct
  source 1..75: mol_type = other DNA
cggcctgacctcatcatctaccctccactcggagtcatcgggccgctgattgccgccaaatatgatataccggtc

SEQ ID NO: 39668 - DNA, 75 bp, synthetic construct
  source 1..75: mol_type = other DNA
tacggtctgagaacaggagagttttttgaaatgctgattacagagaaatatcttgaacacaagcgaaggaagtaa

SEQ ID NO: 39669 - DNA, 75 bp, synthetic construct
  source 1..75: mol_type = other DNA
atgggggtaacatcgggatgggttggttcttcggctaagagcgaaacaggcgagcaatggatgggggctgccggt

SEQ ID NO: 39670 - DNA, 75 bp, synthetic construct
  source 1..75: mol_type = other DNA
ttaccgcttctctgaacgcaattacatgacgatggaccagtacctcaatgcccgttaccggaatgattttacggg

SEQ ID NO: 39671 - DNA, 75 bp, synthetic construct
  source 1..75: mol_type = other DNA
cttcgccgtcacagtgcctttctggacttcgtgaaaatggccggtgaaatcaaaaccgtcagggaggatatcgtt

SEQ ID NO: 39672 - DNA, 75 bp, synthetic construct
  source 1..75: mol_type = other DNA
aagtctgggtacatttacggcaacggcaacaactgttaaagcaactgcgttagatggtattgagcatacttatac

SEQ ID NO: 39673 - DNA, 75 bp, synthetic construct
  source 1..75: mol_type = other DNA
aggggcagggcttcgttcggcctgaaaaccagaatctgcaaaatttcggcgaaattatcccggttatttccggcg

SEQ ID NO: 39674 - DNA, 75 bp, synthetic construct
  source 1..75: mol_type = other DNA
tagccgaagctacacgtaaaaagggtctggcggaagcagaagcacaacgtgcgctgaacgatgctatcaacgtac

SEQ ID NO: 39675 - DNA, 75 bp, synthetic construct
  source 1..75: mol_type = other DNA
acgcgatgaactggcgctgagaaaatccattgcggaacgggatgcgcgtatacgccagggggaaatggggtacat

SEQ ID NO: 39676 - DNA, 75 bp, synthetic construct
  source 1..75: mol_type = other DNA
tggcaacaagctggtgcccccgcaaaagacaactgggcatttctggcgttaagtctctttggtgacgaaagcacg

SEQ ID NO: 39677 - DNA, 75 bp, synthetic construct
  source 1..75: mol_type = other DNA
atgcgattagcaagtcgttttggttatactgcaaaccagatacgtcgtgaccgtccactgacacatgaagagctg

SEQ ID NO: 39678 - DNA, 75 bp, synthetic construct
  source 1..75: mol_type = other DNA
ccatcagacctactgggaccgccggacatctgactattacacgctgtcggtgaaccgttacttcgatgccttcgg

SEQ ID NO: 39679 - DNA, 75 bp, synthetic construct
  source 1..75: mol_type = other DNA
taaaaccattatgctggtttcccgtcactatctgccggaatttcagctacagaaccccgccaataaaaaccgcgc

SEQ ID NO: 39680 - DNA, 75 bp, synthetic construct
  source 1..75: mol_type = other DNA
gcaggcatttaagcaggccgccacagagctgggaatcgccatcgaatggggcggggactggaaaacgttgaagga

SEQ ID NO: 39681 - DNA, 75 bp, synthetic construct
  source 1..75: mol_type = other DNA
tgggggaagtgcgtgttccgcaccggggaaatgtagtggagaaagttatcgaaggggcttacgaggtggtggggg

SEQ ID NO: 39682 - DNA, 75 bp, synthetic construct
  source 1..75: mol_type = other DNA
ccagcctgaccgaacgtctggttgctgcccaacgccacacggcaaacgaagagaaagtaaaagacagcctgaaag

SEQ ID NO: 39683 - DNA, 75 bp, synthetic construct
  source 1..75: mol_type = other DNA
gagtccgtcatcgagcgtctggcacacaccaccagcgtggatgaagtgctggaactgctggcaggtcgtaagtaa

SEQ ID NO: 39684 - DNA, 75 bp, synthetic construct
  source 1..75: mol_type = other DNA
gatctgctgtttttccaccgccgtttacgctgcctgctaatcgtcgatctaaaagtgggcaaattcagctatagc

SEQ ID NO: 39685 - DNA, 75 bp, synthetic construct
  source 1..75: mol_type = other DNA
ccagacccgtgtgcgcgacccgggccgccgggggtataccaaacacatgctgcgtctgcggcgggccggggagat

SEQ ID NO: 39686 - DNA, 75 bp, synthetic construct
  source 1..75: mol_type = other DNA
aagccagaaacggctgtagtcaagatggtaaaagagaataaattgccagttattgagcttcgtgatccaagtaag

SEQ ID NO: 39687 - DNA, 75 bp, synthetic construct
  source 1..75: mol_type = other DNA
gttcgccgtgcgctggagctgacggaggttgatttcggtattacggaagggctgcgcacgaaagaacgccagaaa

SEQ ID NO: 39688 - DNA, 75 bp, synthetic construct
  source 1..75: mol_type = other DNA
tcagccggcagatctacaaatggctgcagatcaccccggaagaaacactgacggatatccagcgtgcagcacggt

SEQ ID NO: 39689 - DNA, 75 bp, synthetic construct
  source 1..75: mol_type = other DNA
ggcacattccaggcagagcatgaagattttgcctttgatataagcgacagccacaaagagcggcttgcggcgttt

SEQ ID NO: 39690 - DNA, 75 bp, synthetic construct
  source 1..75: mol_type = other DNA
gaaaacagttacggtggcaatggcgacatgacctatgcccgtcttggttttaaaggggaaactcaaatcaattcc

SEQ ID NO: 39691 - DNA, 75 bp, synthetic construct
  source 1..75: mol_type = other DNA
tcgccgctatcctggctaactggtttctggttatggaaaacgggcagcaggatatttacaccgccgccgtgagtc

SEQ ID NO: 39692 - DNA, 75 bp, synthetic construct
  source 1..75: mol_type = other DNA
actgcattgattacgaccggatcagagatgacatcatgcaggacgcggagaaatttaatatcaggctggtgggct

SEQ ID NO: 39693 - DNA, 75 bp, synthetic construct
  source 1..75: mol_type = other DNA
gatgcccctggcacacataaggcgggttatgctatctgccgttcgatggatttaaactcatgggaatatgtgcca

SEQ ID NO: 39694 - DNA, 75 bp, synthetic construct
  source 1..75: mol_type = other DNA
cagcaaaagtaaaaagacaacgcggaagcctgcaacacgaaaaaccaccgcgacgcagaaggcaaagcgcggtta

SEQ ID NO: 39695 - DNA, 75 bp, synthetic construct
  source 1..75: mol_type = other DNA
aacgggtgcgtctgtggccagtctctgggggaagtccgtgttccacaccggggaaatgtggtggacagagtcatt

SEQ ID NO: 39696 - DNA, 75 bp, synthetic construct
  source 1..75: mol_type = other DNA
gattacattgacacggtgacggcaacagataccagcaccgcgccggatgtcatctggcctgaactgccggaggcg

SEQ ID NO: 39697 - DNA, 75 bp, synthetic construct
  source 1..75: mol_type = other DNA
aaaaatattatcttaagtctgatacactccctggaaacaacaagtgatattctcaaagctgatgtgattagaaaa

SEQ ID NO: 39698 - DNA, 75 bp, synthetic construct
  source 1..75: mol_type = other DNA
gatgatggcagatatgcaggcgacgcgcagacgctgggaagagctgaacaccgaacgaaaggaagcgatgagcca

SEQ ID NO: 39699 - DNA, 75 bp, synthetic construct
  source 1..75: mol_type = other DNA
gaataaagatctgaccatcagtgtgaaggacgacaggcgccgtatttacggcgtggaaggtgcggtggactacct

SEQ ID NO: 39700 - DNA, 75 bp, synthetic construct
  source 1..75: mol_type = other DNA
gcgtaaagtctggcgccagttgttacgcgaaggtatcagggtggccagatgtacagtggcacgtctcatggcggt

SEQ ID NO: 39701 - DNA, 75 bp, synthetic construct
  source 1..75: mol_type = other DNA
gattgctgggaaggctgggtcatatccctccggcagaagcagaaaaagcttattatgcttccatcagaaacgatg

SEQ ID NO: 39702 - DNA, 75 bp, synthetic construct
  source 1..75: mol_type = other DNA
tcaaacccgtgcggtcaaaggtatcgacggagacgtaaagcttaatcgcgctctatgggtgatggctgaaaatat

SEQ ID NO: 39703 - DNA, 75 bp, synthetic construct
  source 1..75: mol_type = other DNA
ggagcacacaaacgtcatcctgagcgctggagcaaacagttacgtgactgggaactcattcaggcagtttatcta

SEQ ID NO: 39704 - DNA, 75 bp, synthetic construct
  source 1..75: mol_type = other DNA
tagagcaggaagtgctcaccacctggcctgccgatgccattgcccgggcggaagacgtggtgttgtgcctgtccg

SEQ ID NO: 39705 - DNA, 75 bp, synthetic construct
  source 1..75: mol_type = other DNA
atggagactgtttttgacgcactgaaagtgatgggaaaagccacgtcggtagaactggctgcgcgacttgatatc

SEQ ID NO: 39706 - DNA, 75 bp, synthetic construct
  source 1..75: mol_type = other DNA
ggaagccagaaaaacagtttatcgcggagcacacaaacgtcatcctgagcgctggagcaaacagttacgtgactg

SEQ ID NO: 39707 - DNA, 75 bp, synthetic construct
  source 1..75: mol_type = other DNA
gcagggcaaacctggcgctgcgcagggcgaaaagtgatgttcagaagtgggagcgagtctgcgccgcgctgcggg

SEQ ID NO: 39708 - DNA, 75 bp, synthetic construct
  source 1..75: mol_type = other DNA
catccgtatttgcggtgcagttgagcattggcgatggcgggttattgtattcgtggaaggatgggagtggaacaa

SEQ ID NO: 39709 - DNA, 75 bp, synthetic construct
  source 1..75: mol_type = other DNA
aagcactgaaaagagcctcttcacaggtagtggcggcccgccttggaatcagccgtaaagatgcgatcaacgaac

SEQ ID NO: 39710 - DNA, 75 bp, synthetic construct
  source 1..75: mol_type = other DNA
ctacctgattcctgatactgactggagtaccggagtgaacttcaacgtgctgaaaactgagtcgaaagtgaacgg

SEQ ID NO: 39711 - DNA, 75 bp, synthetic construct
  source 1..75: mol_type = other DNA
tgacgccacgacgccgggaggattacggtaaggacctgtggagtgcttatcagaccattcaggagaatatgctga

SEQ ID NO: 39712 - DNA, 75 bp, synthetic construct
  source 1..75: mol_type = other DNA
gagtacttaccagaccatccaggagaacatgctgaaaggcgggatttccggtcgcagtgcaaaaggaaaacgtat

SEQ ID NO: 39713 - DNA, 75 bp, synthetic construct
  source 1..75: mol_type = other DNA
aaatttggcggctggtttgacggtaacggcgatgccaccctgcttgataacacccagaccggcctgcagcactcc

SEQ ID NO: 39714 - DNA, 75 bp, synthetic construct
  source 1..75: mol_type = other DNA
tcgtcgtttgcagcaacaattgcgcaaaccggctgaagaactggggcgagagatcactcatcagctattcttact

SEQ ID NO: 39715 - DNA, 75 bp, synthetic construct
  source 1..75: mol_type = other DNA
tcaccaacctggcggccttcctgcaatcaggctatgacatcaataatctctttaccctcaacggtggcgtacgct

SEQ ID NO: 39716 - DNA, 75 bp, synthetic construct
  source 1..75: mol_type = other DNA
ggcgtcacgatccgctggagttacgtcaggaacaacaaagtccgccgatggggctgtggcaaatgttgcgcacca

SEQ ID NO: 39717 - DNA, 75 bp, synthetic construct
  source 1..75: mol_type = other DNA
ttcactccagcaggtagagctgcgtctgttgtaggtgcaacactaaaatcaggcgctactgatttagctttacag

SEQ ID NO: 39718 - DNA, 75 bp, synthetic construct
  source 1..75: mol_type = other DNA
gagtgcttatcagaccatccaggaaaatatgctgaaaggcgggatttcgggtcgcagcgctaaaggaaaacgtat

SEQ ID NO: 39719 - DNA, 75 bp, synthetic construct
  source 1..75: mol_type = other DNA
actggttatcgctcacctgtccggttttggtcagtatggcaccgaggagtacaccaatcttccggcctataacac

SEQ ID NO: 39720 - DNA, 75 bp, synthetic construct
  source 1..75: mol_type = other DNA
acacaggaagaaataaaaacggaaagtgtggcggtcacagtgcagtcacagccgtcgttcaccagaaagcatccg

SEQ ID NO: 39721 - DNA, 75 bp, synthetic construct
  source 1..75: mol_type = other DNA
gacatactggaagctgaagctatcagaacagggcagagcaaaacaaccgttctcaaagcagcgctggcgatgtac

SEQ ID NO: 39722 - DNA, 75 bp, synthetic construct
  source 1..75: mol_type = other DNA
aaaagtgggcctgtggggatttggctatgatttcgacaacatgaaagcgcgctgttggtacgaacaccatttccc

SEQ ID NO: 39723 - DNA, 75 bp, synthetic construct
  source 1..75: mol_type = other DNA
tactgacagcaccgaagtggcgaaaaataacgcgcttactgatgatgatttttctgcgggaaagttttcgacggc

SEQ ID NO: 39724 - DNA, 75 bp, synthetic construct
  source 1..75: mol_type = other DNA
tcatgtccagaagtgggagcgagtctgcgccgcgctgcgggagttgaacaagcaccgggatatggttgccgggat

SEQ ID NO: 39725 - DNA, 75 bp, synthetic construct
  source 1..75: mol_type = other DNA
gtcgcagcgctaaaggaaaacgtatccacacccgggccattcacagcatcgacacggacattaagctcaatcgcg

SEQ ID NO: 39726 - DNA, 75 bp, synthetic construct
  source 1..75: mol_type = other DNA
gttttaacggtaatgccatcagttatgaaatcatgctcaaagatgaagggcgaccagctgcagggcgcagagacg

SEQ ID NO: 39727 - DNA, 75 bp, synthetic construct
  source 1..75: mol_type = other DNA
ctggtcgccacagactgaacatccagctatcgctattcagcgtcaagagcatgacaagcgtattgagcttgagca

SEQ ID NO: 39728 - DNA, 75 bp, synthetic construct
  source 1..75: mol_type = other DNA
gccatcgtttaccgaaacgcgtgcgaatgacctgattttaccatcgctgcacatggcaaaccgcgaactgcgtcg

SEQ ID NO: 39729 - DNA, 75 bp, synthetic construct
  source 1..75: mol_type = other DNA
agcaggtgctgcgttaccagtccgggaagccgcaacacaggaagaaattaaaacagaaactgtggcggacattgt

SEQ ID NO: 39730 - DNA, 75 bp, synthetic construct
  source 1..75: mol_type = other DNA
ctggcagaaagctggctgactgaaggccagaaggagattacagcactggggggctggcgcaaatacaccgggaat

SEQ ID NO: 39731 - DNA, 75 bp, synthetic construct
  source 1..75: mol_type = other DNA
ctactgtgacgcttgctcaggcaagagcaaaacgcgatgaagctaaaaagcttttagtacagggcatagacccaa

SEQ ID NO: 39732 - DNA, 75 bp, synthetic construct
  source 1..75: mol_type = other DNA
atgagcagttcattgaagcgccgggtattcgtggaatggtgatgttggtgtttacgctgccgggctttgatcggg

SEQ ID NO: 39733 - DNA, 75 bp, synthetic construct
  source 1..75: mol_type = other DNA
ccaggcgaaaccgcgaagatgctgattacctttccggagccaattgatgaagcattattgacgctggaacgcgat

SEQ ID NO: 39734 - DNA, 75 bp, synthetic construct
  source 1..75: mol_type = other DNA
atcaccgatcttggtgagcagattgtaattcgccatctctatatcgagcggcggatggtgccgctcaatatctgg

SEQ ID NO: 39735 - DNA, 75 bp, synthetic construct
  source 1..75: mol_type = other DNA
taccgttttctgacgtccgcgaggagctgccacgcggcacgtttgcttataccagtgttccgacgatgattattc

SEQ ID NO: 39736 - DNA, 75 bp, synthetic construct
  source 1..75: mol_type = other DNA
aggagcaggaggacacagaacgtcgtcgcgcggagcgacgggctgagcagctcaggcaaaatgacaatgccgtca

SEQ ID NO: 39737 - DNA, 75 bp, synthetic construct
  source 1..75: mol_type = other DNA
aaattttaacggtgtcagggtacagtgtggcgacttcatggaatggcagccggtgcagtattacagccggattat

SEQ ID NO: 39738 - DNA, 75 bp, synthetic construct
  source 1..75: mol_type = other DNA
cgtctttttcgtgcaggtgatgttttttcggttgattcttcgttggtcattgtgtgcgcctgtaaagcaatgcgc

SEQ ID NO: 39739 - DNA, 75 bp, synthetic construct
  source 1..75: mol_type = other DNA
ggcagcagtggggggaatccggccttgcagctctcagagcccagttgcttaaacgtgaagaggaattgcgccgga

SEQ ID NO: 39740 - DNA, 75 bp, synthetic construct
  source 1..75: mol_type = other DNA
atgctgggagtgaggcttgagatggatcggtatgttgagcgtgaattgccgggagggagaacctctgtattttat

SEQ ID NO: 39741 - DNA, 75 bp, synthetic construct
  source 1..75: mol_type = other DNA
atataatggtgggttacccccaaacgaatcggaaaatcgatactggaaaaactctaacgcggtggccagtttttg

SEQ ID NO: 39742 - DNA, 75 bp, synthetic construct
  source 1..75: mol_type = other DNA
gtatttcgtctcctttgccatcccgcaggcggggcttaagcgcatgctgaccgaggcccgccgctacgatattcc

SEQ ID NO: 39743 - DNA, 75 bp, synthetic construct
  source 1..75: mol_type = other DNA
tggaacgatggggagcttgggtggcaaataaccacgaggatgttacatggtcatctattgctgccggttttaaag

SEQ ID NO: 39744 - DNA, 75 bp, synthetic construct
  source 1..75: mol_type = other DNA
gtggcatatgctaaaagtgagcatggcataacccttattcgtgaggacattggcaactctttcgatgggggaggc

SEQ ID NO: 39745 - DNA, 75 bp, synthetic construct
  source 1..75: mol_type = other DNA
tggacaggcaaacgctgggcatacctcgctgttgttctcgacctgttcgcaagaaaaccagtgggctgggcaatg

SEQ ID NO: 39746 - DNA, 75 bp, synthetic construct
  source 1..75: mol_type = other DNA
gaacatatcgatgccgggatctcgctggctgatgccgtgaattttctggtggaaaaatacgaactggtgcgtatc

SEQ ID NO: 39747 - DNA, 75 bp, synthetic construct
  source 1..75: mol_type = other DNA
acgtagcggactgcataacgtcgataacgtctccacgatttcgcgttcgatgatgaataaagccatcgaaaaagg

SEQ ID NO: 39748 - DNA, 75 bp, synthetic construct
  source 1..75: mol_type = other DNA
atgcagacagtgccctgcatgctgccgatatcgcgatgtatcaggagaaaaaacacaaacagaaaacaccttttg

SEQ ID NO: 39749 - DNA, 75 bp, synthetic construct
  source 1..75: mol_type = other DNA
cggtgcagtattacagccggatcattatgaatccgccgttcagccacgggcaggatatccggcatatcctgcggg

SEQ ID NO: 39750 - DNA, 75 bp, synthetic construct
  source 1..75: mol_type = other DNA
agacggatgccgcaggccggacaacagagtacagcccggatgtggtgacgggcctcatcacgcgcatcaccacgc

SEQ ID NO: 39751 - DNA, 75 bp, synthetic construct
  source 1..75: mol_type = other DNA
aagacaaacacacctccagaagcgaaaactacgcgtacatccccaccatcatcgtgctggaaagcctgcagcggg

SEQ ID NO: 39752 - DNA, 75 bp, synthetic construct
  source 1..75: mol_type = other DNA
ggcagccacaccaccttccgttacgatgtactcgaccggctgatacaggaaaccggctttgacggccgcacacag

SEQ ID NO: 39753 - DNA, 75 bp, synthetic construct
  source 1..75: mol_type = other DNA
tggaatgaatttaaaacccagtctggtaccagaaaaattgcaggaaaaacgctggagcgtgtgaagaagttgata

SEQ ID NO: 39754 - DNA, 75 bp, synthetic construct
  source 1..75: mol_type = other DNA
cgcggttgtgttcagtgcgaaaaaacgccagtggggcagccaggaagatttggcgtgtgcgcagtggatctgggg

SEQ ID NO: 39755 - DNA, 75 bp, synthetic construct
  source 1..75: mol_type = other DNA
gccgccgaatgtgacggcgaagtggttcgtcccaaagaaccgaactggacagcctgggcaaacgaaattcgcctg

SEQ ID NO: 39756 - DNA, 75 bp, synthetic construct
  source 1..75: mol_type = other DNA
actaacgaggatgttcaccctagtagcgataacatgctacgcctgtgggatgacctgaatgaccgttacgcgccc

SEQ ID NO: 39757 - DNA, 75 bp, synthetic construct
  source 1..75: mol_type = other DNA
ctctgaaaattattgaggcagccgatgaggttattagtgcgcttgccggaactaacgaggatgttcaccctagta

SEQ ID NO: 39758 - DNA, 75 bp, synthetic construct
  source 1..75: mol_type = other DNA
gcacgggtacggaatccggcattcagccgcagtacggtgtaccgtatggtgtcacgctcaacccgttcctctcac

SEQ ID NO: 39759 - DNA, 75 bp, synthetic construct
  source 1..75: mol_type = other DNA
acagagggctactgacgctaatttctgctgctcttatgttttttatattactcaaagctgcaacgagtacgctgc

SEQ ID NO: 39760 - DNA, 75 bp, synthetic construct
  source 1..75: mol_type = other DNA
ggtaacagcgaagatctggaacgcctgtatcgacaatggcgcggtaaggcacctcagattatgccgatgctgcaa

SEQ ID NO: 39761 - DNA, 75 bp, synthetic construct
  source 1..75: mol_type = other DNA
gtgagctggctgggcgtgaaacttatgaatatcaggagctggcattactggcgggagtaacaacaaaaaactggt

SEQ ID NO: 39762 - DNA, 75 bp, synthetic construct
  source 1..75: mol_type = other DNA
gtttcgacttctgggcgctgactccgcgcagcgacattctggtcttcttcggcatctggctgatcctgccgtttg

SEQ ID NO: 39763 - DNA, 75 bp, synthetic construct
  source 1..75: mol_type = other DNA
tcagatcgcgataacgcagtgggcatggacagaatttaagactcactctggtaccaggaaaattgcagggaagac

SEQ ID NO: 39764 - DNA, 75 bp, synthetic construct
  source 1..75: mol_type = other DNA
tcaattcctctggtcagtcaggttgctttttctacatcatcatggcggcgggctgttttgtctcttgaagaacat

SEQ ID NO: 39765 - DNA, 75 bp, synthetic construct
  source 1..75: mol_type = other DNA
gcaagaaaaccagtgggctgggccatgtcgttctcgccggacagcaggcttaccatgaaagcactggaaatggca

SEQ ID NO: 39766 - DNA, 75 bp, synthetic construct
  source 1..75: mol_type = other DNA
ccagagacaggagcttgccagactgtgtggagttaagcctgataactggagccataattatgcgaactactggcg

SEQ ID NO: 39767 - DNA, 75 bp, synthetic construct
  source 1..75: mol_type = other DNA
tcaggtggtcattgcgaaatgggcgtgggataagtttcaggtgcattttggcaccagaaaaattacagggaaaac

SEQ ID NO: 39768 - DNA, 75 bp, synthetic construct
  source 1..75: mol_type = other DNA
cgctggcaaatcttcctgccgggttatctgatttgccgacagacaacttatacctgcagccgctgaacatggttg

SEQ ID NO: 39769 - DNA, 75 bp, synthetic construct
  source 1..75: mol_type = other DNA
cttcctgaacaaagcccacagaacaagccagagaatatgtcgttgtctgtcctggttgatgatatcgcccgcagt

SEQ ID NO: 39770 - DNA, 75 bp, synthetic construct
  source 1..75: mol_type = other DNA
ggcattagttttctgggtaaatggtttgaatcggaatcagctaaagctgagcgccacgccgaaaatcttcgccgg

SEQ ID NO: 39771 - DNA, 75 bp, synthetic construct
  source 1..75: mol_type = other DNA
gcaatgatcatttgtgggtgcatggcccggctgaataagaataacaaagatcagcatgatctactggtggattat

SEQ ID NO: 39772 - DNA, 75 bp, synthetic construct
  source 1..75: mol_type = other DNA
ccagatttacgcggtgaatttattcgtggctgggatgatgggcgcgggattgactctggtcgtaacttattatct

SEQ ID NO: 39773 - DNA, 75 bp, synthetic construct
  source 1..75: mol_type = other DNA
gtcatgttccgccacgcccggtgctgatgttcagttgcgtggacaatatcacccggatgcaggtggcgctgatgc

SEQ ID NO: 39774 - DNA, 75 bp, synthetic construct
  source 1..75: mol_type = other DNA
cacgtggagaataagctgcactggcgtctggacgtggtaatgaatgaagacgactgcaaaataagaagaggaaat

SEQ ID NO: 39775 - DNA, 75 bp, synthetic construct
  source 1..75: mol_type = other DNA
cgttcccaattatgtgatggtcggcggcttttttattctcggcttgtctacctttagtattatgctggcaattat

SEQ ID NO: 39776 - DNA, 75 bp, synthetic construct
  source 1..75: mol_type = other DNA
atatctctgttggacagtctacagcgggaaggcttccagccattctttgcctgtcagacccgggtacgtgatcct

SEQ ID NO: 39777 - DNA, 75 bp, synthetic construct
  source 1..75: mol_type = other DNA
accttaatctcgggtgtcatcattatgagcatcaccctgtggatcgcgacgcaaactattggtttgcacacccaa

SEQ ID NO: 39778 - DNA, 75 bp, synthetic construct
  source 1..75: mol_type = other DNA
ccctggatggtcagggtgatacggcctttccgcaggcgttacctgcaccaccggatgtactgaaaacattcttcc

SEQ ID NO: 39779 - DNA, 75 bp, synthetic construct
  source 1..75: mol_type = other DNA
agtcgatgaagctccgacagaatggcatgactggaagaatcgcataagttacagcaaatccagacatggccacgc

SEQ ID NO: 39780 - DNA, 75 bp, synthetic construct
  source 1..75: mol_type = other DNA
atgggaattttaaaaagtttatttacgctggggaaatcgtttatctcccaggcggaagagtccattgaagaaacc

SEQ ID NO: 39781 - DNA, 75 bp, synthetic construct
  source 1..75: mol_type = other DNA
ttgaccagccttactggatgatgaaggcatcactgcttgcgtcaatgaataaagtcatcacagatgtcggaccgg

SEQ ID NO: 39782 - DNA, 75 bp, synthetic construct
  source 1..75: mol_type = other DNA
atgcgactagccagtcgttttggttatgcgaaccagatacgccgtgaccgtccgctgacacatgaagagctgatg

SEQ ID NO: 39783 - DNA, 75 bp, synthetic construct
  source 1..75: mol_type = other DNA
caagggacggacaaacgcgcgagattgcctcctacctggcttcggaactgaaagaactggggatccaggcggatg

SEQ ID NO: 39784 - DNA, 75 bp, synthetic construct
  source 1..75: mol_type = other DNA
attccctttattgtgcggattgctcagccttgggatggtgattttgcaaggtggcgtctggttacaactgaaaac

SEQ ID NO: 39785 - DNA, 75 bp, synthetic construct
  source 1..75: mol_type = other DNA
cgctggctggagcaccgccgccaggtcttcacgccagagtttttgcagggctatgctgatgaattgcagatgctg

SEQ ID NO: 39786 - DNA, 75 bp, synthetic construct
  source 1..75: mol_type = other DNA
aaagtacgcatcgcgggtgatgatggccttcccacctggggggaaattccaccgccaactcatgaggaacaaatt

SEQ ID NO: 39787 - DNA, 75 bp, synthetic construct
  source 1..75: mol_type = other DNA
cctccacctgcgcagcaggcactggcaaaagctgcgctaacgtatcgctttggtgaggatcaccagccggttact

SEQ ID NO: 39788 - DNA, 75 bp, synthetic construct
  source 1..75: mol_type = other DNA
acgttcgccggatgttattggcgatggtcgatgattttcgctgcgtggtcatcaaactggcggagcgtattgctc

SEQ ID NO: 39789 - DNA, 75 bp, synthetic construct
  source 1..75: mol_type = other DNA
gaaaagcgtgttccaggatatttcgtttaacactgaccgcttgggtgaagaaaaacagaagaacaccatcctgcg

SEQ ID NO: 39790 - DNA, 75 bp, synthetic construct
  source 1..75: mol_type = other DNA
ctggcggtgcgagcagaacgcgagcaactgaaggcggaattggcgaagctggaaacggagatggctggatatttg

SEQ ID NO: 39791 - DNA, 75 bp, synthetic construct
  source 1..75: mol_type = other DNA
gaagttgcatggataaataataattgccgttcaagtgattcaagcactgatattattatccttccgaggatgata

SEQ ID NO: 39792 - DNA, 75 bp, synthetic construct
  source 1..75: mol_type = other DNA
cgatgatccggattacagtttcgatattctggaagcccgctacgccattgaagccagcaccgcatggcatgcggc

SEQ ID NO: 39793 - DNA, 75 bp, synthetic construct
  source 1..75: mol_type = other DNA
agacagagtgattcccgctcatgaaatcatagaaaggaaacacattgttgataattctgagaagaaacatgctat

SEQ ID NO: 39794 - DNA, 75 bp, synthetic construct
  source 1..75: mol_type = other DNA
aaccaggttacggaaggacgtcagcaacttgaacgcggtgacatggtcgaatcctctgctgcagcatggcgggat

SEQ ID NO: 39795 - DNA, 75 bp, synthetic construct
  source 1..75: mol_type = other DNA
gactgggcggttgccgaaatgcgccgtcatccgctgaaaggcgatcgttctttctatgctgaactgacacaatac

SEQ ID NO: 39796 - DNA, 75 bp, synthetic construct
  source 1..75: mol_type = other DNA
cgcctcacaagcggacgttcgttttcatctggcgattgccgaagcctcacataacatcgtgctgctgcaaaccat

SEQ ID NO: 39797 - DNA, 75 bp, synthetic construct
  source 1..75: mol_type = other DNA
aagggaatgagcacggtcaggcgttccgcgatgtggaactggaaaaagaattgctgatcgaagcgcaaaatcttg

SEQ ID NO: 39798 - DNA, 75 bp, synthetic construct
  source 1..75: mol_type = other DNA
ataagtttggccgttttcgtcgcggtgtaccgccgaagactaaaggagattacgcctttatctcgcatatgatcg

SEQ ID NO: 39799 - DNA, 75 bp, synthetic construct
  source 1..75: mol_type = other DNA
atggttcttttgataagtggagtgacagggtgcattcagcttatgaaaataatcctccagccagaattcagccaa

SEQ ID NO: 39800 - DNA, 75 bp, synthetic construct
  source 1..75: mol_type = other DNA
gcctctgacccacgaagaactgatgagtcatgttcccagcgtattcgggagtgacaaacatgaatcgcgctcgga

SEQ ID NO: 39801 - DNA, 75 bp, synthetic construct
  source 1..75: mol_type = other DNA
cgtaaaattgtctccgggcatgatagtcgtaactatgccttgttcggtcaggaagcgatcggttctacgtggtcg

SEQ ID NO: 39802 - DNA, 75 bp, synthetic construct
  source 1..75: mol_type = other DNA
tttgacctgccggacgagccaacaggcaatgcagcgccttcatggctgactgagccgacgccacagattaacggg

SEQ ID NO: 39803 - DNA, 75 bp, synthetic construct
  source 1..75: mol_type = other DNA
gtccatgaaacacgtttttatatggctcagagtgctgaagccatgctggaggcgggtaaacgactggtaattctc

SEQ ID NO: 39804 - DNA, 75 bp, synthetic construct
  source 1..75: mol_type = other DNA
cctgctcgcgtgaaagataaaataaaacgcgttgaccgtctgttgggtaataaacgacttcataatgatatccct

SEQ ID NO: 39805 - DNA, 75 bp, synthetic construct
  source 1..75: mol_type = other DNA
ccagcagcggctgaaattaagcctgtccggaaggctggcgataaagattattgccgagccaccggataagcgccg

SEQ ID NO: 39806 - DNA, 75 bp, synthetic construct
  source 1..75: mol_type = other DNA
gaacgctatcagcagttcatcaaagataatcacccgggtatgccagtacccacgaaaggacaaatcacacgcagc

SEQ ID NO: 39807 - DNA, 75 bp, synthetic construct
  source 1..75: mol_type = other DNA
ggagcgccttgcgttcggggcggtcacctacgcactcttcgccctcgactcgggtaacgaagagtacctcgctgc

SEQ ID NO: 39808 - DNA, 75 bp, synthetic construct
  source 1..75: mol_type = other DNA
ttcattgaaaaaaacaaggatgtaatcgctggcgttgtggttattcaggacagaaaaagtgatgcctttgcctct

SEQ ID NO: 39809 - DNA, 75 bp, synthetic construct
  source 1..75: mol_type = other DNA
caacaaggtcagggtggctgatgaaccggcaacaccagcacaacggcgagcgtcgatgacatgggcgcaacggct

SEQ ID NO: 39810 - DNA, 75 bp, synthetic construct
  source 1..75: mol_type = other DNA
ggggctcgcgaagctcctcctcacgtatgaagcggccggtggccgggtgtggccgcggctcgcccaccacatcgc

SEQ ID NO: 39811 - DNA, 75 bp, synthetic construct
  source 1..75: mol_type = other DNA
cataggggaaaaacgtcttgcttcgtcggtaacaaaggaagatttactgtttatcaggaaagatttgttaaccgg

SEQ ID NO: 39812 - DNA, 75 bp, synthetic construct
  source 1..75: mol_type = other DNA
cgactgatgtacctggacctggaatatcgcgacggcacctgtcgtctgctttcaggtagccatcagcgcgaactg

SEQ ID NO: 39813 - DNA, 75 bp, synthetic construct
  source 1..75: mol_type = other DNA
cagatggcgtcgctggcggttttgcggggataagcaatgattctcttatatttgccggaggggccggattcaaag

SEQ ID NO: 39814 - DNA, 75 bp, synthetic construct
  source 1..75: mol_type = other DNA
gttaagccacttccggcgaagccgccggtctggtaccgcctcagcaacggccgccagatcaatctggccgactgg

SEQ ID NO: 39815 - DNA, 75 bp, synthetic construct
  source 1..75: mol_type = other DNA
tgcacggcaaccgtcttcagtggctgtatgccatcgatgtgctgattgaaacacagggcgaggtctgcctccttc

SEQ ID NO: 39816 - DNA, 75 bp, synthetic construct
  source 1..75: mol_type = other DNA
ggatgagcggggctgttcatgcggatactgacagcaccgaagtggcgaaaaataacgcgctgactgatgatgatt

SEQ ID NO: 39817 - DNA, 75 bp, synthetic construct
  source 1..75: mol_type = other DNA
ccagtgcaagtgtcagtgaactgaaaaaaaatcctatggctacagtcagtgccggagatggttatcctgtcgcca

SEQ ID NO: 39818 - DNA, 75 bp, synthetic construct
  source 1..75: mol_type = other DNA
tattgaaccgaacctggattatgaagtggagcgccacgcctcactcactggcgacagcgtgcgttttaacaccga

SEQ ID NO: 39819 - DNA, 75 bp, synthetic construct
  source 1..75: mol_type = other DNA
cctgcttgaaaccctgctgattaccgccgaacaggcattgtgggacagggaatggaccgcacgggatcgcaatct

SEQ ID NO: 39820 - DNA, 75 bp, synthetic construct
  source 1..75: mol_type = other DNA
atgtttctgaaaacagaacaatttgaatataacggcgtgtccgtcaccctttccgaactgtctgcgctgcagcgt

SEQ ID NO: 39821 - DNA, 75 bp, synthetic construct
  source 1..75: mol_type = other DNA
cctgcgttgctgctggattacagttttagcgggagcaacagtgaatatgactcgacggggtcttccagcagttat

SEQ ID NO: 39822 - DNA, 75 bp, synthetic construct
  source 1..75: mol_type = other DNA
tgacgattattgaggcgcagcaaaagcagtttgcgctggtggatagcatttgtcgccatttccccggcagcgagt

SEQ ID NO: 39823 - DNA, 75 bp, synthetic construct
  source 1..75: mol_type = other DNA
gatcatggcactggatgaggcaaaaggggctgaggcgcaggctgaacagctggctgcctgcccgggaatgaccgt

SEQ ID NO: 39824 - DNA, 75 bp, synthetic construct
  source 1..75: mol_type = other DNA
gctgcgtgaatggtataacaaagcaccaacagaacgttcattaaccatcatccgtcctaccgttatcttcggtga

SEQ ID NO: 39825 - DNA, 75 bp, synthetic construct
  source 1..75: mol_type = other DNA
cgagatggtttttgcctgtctctatcccagcatgtttaattcgcgcgttgaggaagaggaaaggctttttcgcga

SEQ ID NO: 39826 - DNA, 75 bp, synthetic construct
  source 1..75: mol_type = other DNA
agttgactccctgagtgtcactgtcgggcaaatggtcaataccggagacagccttctgcaggttattcctgagaa

SEQ ID NO: 39827 - DNA, 75 bp, synthetic construct
  source 1..75: mol_type = other DNA
gtagaaaaactcccagtggagaaatgggatattccactgcctgcggtggttacaccgtcgaaagtctgggaatgg

SEQ ID NO: 39828 - DNA, 75 bp, synthetic construct
  source 1..75: mol_type = other DNA
ttaaagcatggttagtgggtgaaacggatgctgtaacaccaacaccggcaccgtttgaaacgctgacgacgttcc

SEQ ID NO: 39829 - DNA, 75 bp, synthetic construct
  source 1..75: mol_type = other DNA
atacacaggattacgtcacggtgagctggtatccctcgcatgggaagacatagatctgaaaactggaacgatgac

SEQ ID NO: 39830 - DNA, 75 bp, synthetic construct
  source 1..75: mol_type = other DNA
gggaaattattctgggctttaacggatgaaagcaataaagagcaagcggacgttattcctgtttatgctgccgcg

SEQ ID NO: 39831 - DNA, 75 bp, synthetic construct
  source 1..75: mol_type = other DNA
atatgctgatgcccggactggaagtgagcggagacgttcactttaccgatacctattattcccagtacgacaacg

SEQ ID NO: 39832 - DNA, 75 bp, synthetic construct
  source 1..75: mol_type = other DNA
tgtgggtgtgcttatagcctcaaactatctcggtggatacacagcattaagatattcatccgttgatatgtcttt

SEQ ID NO: 39833 - DNA, 75 bp, synthetic construct
  source 1..75: mol_type = other DNA
ttcttgggcatgtatcctggctctgggccagttccccattacacagaaactggccagtctctttgtttgcaataa

SEQ ID NO: 39834 - DNA, 75 bp, synthetic construct
  source 1..75: mol_type = other DNA
actcttcactttttattgcttatatgggctgtcttggatggggaagcgcttatttctatggatgggggacttcct

SEQ ID NO: 39835 - DNA, 75 bp, synthetic construct
  source 1..75: mol_type = other DNA
atattgcagccgatatcgagcgaaaaattctggtaaatgcttcgcaggaggtgttacaggcgattgagtatgaga

SEQ ID NO: 39836 - DNA, 75 bp, synthetic construct
  source 1..75: mol_type = other DNA
atctgctaccgaaatacccgaacgtcgatggcgtggtggggctgaatcatttgtacggttgtggcgtggcgatta

SEQ ID NO: 39837 - DNA, 75 bp, synthetic construct
  source 1..75: mol_type = other DNA
gtcaattgcaataggtggcgataccaaagctaccggatggggggctattgttattggtggcgatgatttaacccc

SEQ ID NO: 39838 - DNA, 75 bp, synthetic construct
  source 1..75: mol_type = other DNA
ccagtggtaagaggaatagctcgaactcaagcccgaattgaagtacgtcaaaatgggtatctgatacatagtcag

SEQ ID NO: 39839 - DNA, 75 bp, synthetic construct
  source 1..75: mol_type = other DNA
tatccagaaagcaaaagcaggatgcccggtttctcaggtactgaaagcggaaattacgctggattaccagttgaa

SEQ ID NO: 39840 - DNA, 75 bp, synthetic construct
  source 1..75: mol_type = other DNA
gtggaaaaactccccgttgaagagtgggatatccctcttcctgcggtggttacaccgtcgaaagtctgggagtgg

SEQ ID NO: 39841 - DNA, 75 bp, synthetic construct
  source 1..75: mol_type = other DNA
ttttctggcaatattgctgctttttattccgcctgttctggagttttcggtaattcatcagcacgttgagccaga

SEQ ID NO: 39842 - DNA, 75 bp, synthetic construct
  source 1..75: mol_type = other DNA
acggtcattcacgactgtacatttgtgttcaatcctcagttggttaaaaaaagtggcagcgtaggttacctgtac

SEQ ID NO: 39843 - DNA, 75 bp, synthetic construct
  source 1..75: mol_type = other DNA
gaagtggacattatcgccgggctgttggatgagctggacgaaaaacagcaatacatcaaactccgcgaccaggag

SEQ ID NO: 39844 - DNA, 75 bp, synthetic construct
  source 1..75: mol_type = other DNA
cacgctgtttcgtgaaagtcagggcgtagtctcaaaggaaatgaaaaaactgcgcacggaaattgcgctgggacg

SEQ ID NO: 39845 - DNA, 75 bp, synthetic construct
  source 1..75: mol_type = other DNA
actgtggcttacgcccaggggatgaatccaaaactggatgaggactgggattacgcttgtgatgccgctttgggt

SEQ ID NO: 39846 - DNA, 75 bp, synthetic construct
  source 1..75: mol_type = other DNA
tttaatcacccgccatcactagaagcattatgtttttttactgaagcctttataaaatggattaaaatagaaaac

SEQ ID NO: 39847 - DNA, 75 bp, synthetic construct
  source 1..75: mol_type = other DNA
tgcgtaaggcagcacaaaactatcaatcgactctggcgtggtatcaggaaaagccagacagtccaaacgctgaac

SEQ ID NO: 39848 - DNA, 75 bp, synthetic construct
  source 1..75: mol_type = other DNA
ttttgaggggggagatctttttacaggcgtcatgatgaccgttaccgatagtaaagccagcgctgaaagttatca

SEQ ID NO: 39849 - DNA, 75 bp, synthetic construct
  source 1..75: mol_type = other DNA
gaatgaatggttcagcgcgtatgcgatggcgggtgtggcttacagccgtgtgtcgactttctccggggattatct

SEQ ID NO: 39850 - DNA, 75 bp, synthetic construct
  source 1..75: mol_type = other DNA
cagcttattatgtctacagatggcaagaccagcagcggcatcaaggttgttgatacgtttagtggagaaaacaat

SEQ ID NO: 39851 - DNA, 75 bp, synthetic construct
  source 1..75: mol_type = other DNA
ggggcggcttcgccgcaccttggactcgtggcaataactgtccccatgatgaaaaaacagacaccggagagggta

SEQ ID NO: 39852 - DNA, 75 bp, synthetic construct
  source 1..75: mol_type = other DNA
gcaaagaaaccgcagcgcctgccggactgaccggcgcactgaatatgagcctgcatgaactggagaaaatgctgg

SEQ ID NO: 39853 - DNA, 75 bp, synthetic construct
  source 1..75: mol_type = other DNA
aacatcctgcagaccccacaattcaccaaatacactttatggttcatgacaaatcagatcgctcctgagtccggg

SEQ ID NO: 39854 - DNA, 75 bp, synthetic construct
  source 1..75: mol_type = other DNA
caatgtctacgctggataaggatgctgcaaaacaaaataatacgctcgaaggtcgttggcgcagaactcagattg

SEQ ID NO: 39855 - DNA, 75 bp, synthetic construct
  source 1..75: mol_type = other DNA
gcaggccaggtggactggattgccgaaccgttagcctttattcagccgggggaaattttgccctgttgttgccgg

SEQ ID NO: 39856 - DNA, 75 bp, synthetic construct
  source 1..75: mol_type = other DNA
atcgccggtggtattacgctggttgcgggaacaacatggaggagcaacaatacgatgcctgttactgctcagcca

SEQ ID NO: 39857 - DNA, 75 bp, synthetic construct
  source 1..75: mol_type = other DNA
gacagttacgcaattagtgaaaagagtcacggcagagaagaaacccgtcttcatattgtttgcgatgtccctgat

SEQ ID NO: 39858 - DNA, 75 bp, synthetic construct
  source 1..75: mol_type = other DNA
tggcagcatttctctacgccctcgatcggctcttccgcgaaggcggcgaagatacccgcgaggcgcataagcgta

SEQ ID NO: 39859 - DNA, 75 bp, synthetic construct
  source 1..75: mol_type = other DNA
acgtatggatacagcaggtcagtatgacgcattaaaaacagcggcgatgtctctgggattaccggttatggtgac

SEQ ID NO: 39860 - DNA, 75 bp, synthetic construct
  source 1..75: mol_type = other DNA
tttcgggttacccggcctgatacatcagagcaatacgttgcgttaaaaacggctgttcagtctctgaggccactg

SEQ ID NO: 39861 - DNA, 75 bp, synthetic construct
  source 1..75: mol_type = other DNA
cacaccagtaccgccggacgatggcggagacacgccagtaccgccggacgatggcggagacacgccagtaccgcc

SEQ ID NO: 39862 - DNA, 75 bp, synthetic construct
  source 1..75: mol_type = other DNA
cgttactcagtggtgcgcctgccgctgaaacccttctttatgtttaccggcagtttcatgtatctgatggccttc

SEQ ID NO: 39863 - DNA, 75 bp, synthetic construct
  source 1..75: mol_type = other DNA
acaggcagcagcgggatttcttctgcaacaccggctctgacgcccctgatgctggatgaagccaccgggaaactg

SEQ ID NO: 39864 - DNA, 75 bp, synthetic construct
  source 1..75: mol_type = other DNA
tacagaacacgattcccggaattgagtcgataatagacgataaatcgtttgtatgtagtgaaatagcattcgaaa

SEQ ID NO: 39865 - DNA, 75 bp, synthetic construct
  source 1..75: mol_type = other DNA
acaattcaggcactgcgaatcgcgctggatggcatagagcggagcgacgccatgcttcatggtgccgaacctgta

SEQ ID NO: 39866 - DNA, 75 bp, synthetic construct
  source 1..75: mol_type = other DNA
tgaggttattagtgcgcttgccggaactaacgaggatgttcaccctggtagcgataacatgctacgtctgtggga

SEQ ID NO: 39867 - DNA, 75 bp, synthetic construct
  source 1..75: mol_type = other DNA
gatggccatcgaactgatggccgatgaggggcgcgcatggccgctgattgacggaaccggcatgatccacgggat

SEQ ID NO: 39868 - DNA, 75 bp, synthetic construct
  source 1..75: mol_type = other DNA
tgtccgcagccatctgtctggccgtatccggtgcgcctgcatgggcatctgaacatcagtccacactgagcgcgg

SEQ ID NO: 39869 - DNA, 75 bp, synthetic construct
  source 1..75: mol_type = other DNA
atccaatgatgtctgaaaaacgcaggcaaccggttgaaaaggtagcgctcgatgcacatcgtacggtggtcgaga

SEQ ID NO: 39870 - DNA, 75 bp, synthetic construct
  source 1..75: mol_type = other DNA
gttaaactgctgaacctggaacaggcgggcaaaccggttgcagacgcggcttccatgcagcgttacagcacggag

SEQ ID NO: 39871 - DNA, 75 bp, synthetic construct
  source 1..75: mol_type = other DNA
taatgaaccgcatccgattgatggcctgtccggtgaatatgcggagaaatcccttgaagaatgggcggagcagat

SEQ ID NO: 39872 - DNA, 75 bp, synthetic construct
  source 1..75: mol_type = other DNA
cggctgaataaatttatcgtacagagttgctatgtgtttaatggcgagcaggatgaaatatctgatgcgtatatc

SEQ ID NO: 39873 - DNA, 75 bp, synthetic construct
  source 1..75: mol_type = other DNA
gaagatatccccaaactgctggcactcgctgaacaacaccctgcggcactgatctccggccagccaatttacgat

SEQ ID NO: 39874 - DNA, 75 bp, synthetic construct
  source 1..75: mol_type = other DNA
gacatttcgctcaccttcaggccacgggttatccggtattaatgtgcaggaaaccggaagtaattcggcagataa

SEQ ID NO: 39875 - DNA, 75 bp, synthetic construct
  source 1..75: mol_type = other DNA
gcgctgtttcgcggcgtaccggtcggcccgcttattgccgcgggtctggtttcgctgattgtggggaaacagtag

SEQ ID NO: 39876 - DNA, 75 bp, synthetic construct
  source 1..75: mol_type = other DNA
atgaatatcgcaattgtgacaataaatcaggagaatgccgcattagcgggctggctggcggcgcaggatttcagc

SEQ ID NO: 39877 - DNA, 75 bp, synthetic construct
  source 1..75: mol_type = other DNA
cagggggcggacgggctgatgtgggtgagtccggccgatcagtcacaggatgatccgctgagcagcggcggaaag

SEQ ID NO: 39878 - DNA, 75 bp, synthetic construct
  source 1..75: mol_type = other DNA
ttcttcgcgggaaatgtgtaccgcgagatctgaaagtgaacgaaacaaacgctgagtacctggtgcgtaaatttg

SEQ ID NO: 39879 - DNA, 75 bp, synthetic construct
  source 1..75: mol_type = other DNA
tgcagctttgttactttattttagtagtaataaagttgttgagttattgaatgttagttccgtttatattgaaac

SEQ ID NO: 39880 - DNA, 75 bp, synthetic construct
  source 1..75: mol_type = other DNA
ctgtaccaggccggagaactggatttagtggagaccaaaaagattggtcagaagctggcggcggcagatattcag

SEQ ID NO: 39881 - DNA, 75 bp, synthetic construct
  source 1..75: mol_type = other DNA
atgaactatcaggcagtatcagaattaatcacatcgtctaatcataatgttcttatagtgggggactcagcttct

SEQ ID NO: 39882 - DNA, 75 bp, synthetic construct
  source 1..75: mol_type = other DNA
catgctgcagccggtgcgctggctcaggtggtggggagtggtgcatttcgtggaaacgatatcggtatggtggcg

SEQ ID NO: 39883 - DNA, 75 bp, synthetic construct
  source 1..75: mol_type = other DNA
agcctgcagcaaaaatatcagcagcagatggagcaactggagcgtgacagtaaacagaaaggaacatacggcaca

SEQ ID NO: 39884 - DNA, 75 bp, synthetic construct
  source 1..75: mol_type = other DNA
gtacacgaccagaaacagcctttaccgcgtctatctggcgtttatggcgtacgcaggcaggagcaaaccgctaaa

SEQ ID NO: 39885 - DNA, 75 bp, synthetic construct
  source 1..75: mol_type = other DNA
acagggggacaaaaaagcaggtgcgccggtactggataacccgcgccttgatgcaatcctggctgctgctgatgc

SEQ ID NO: 39886 - DNA, 75 bp, synthetic construct
  source 1..75: mol_type = other DNA
atgactgataacaatcaaaatagccgcgagcaattttatcagcatatttccgggcaaaacctgaccccgctgtgg

SEQ ID NO: 39887 - DNA, 75 bp, synthetic construct
  source 1..75: mol_type = other DNA
gataatccgcttattaatattctggagaagttctccagctggtatgacacgaataacgtgacgctgggtggtgtc

SEQ ID NO: 39888 - DNA, 75 bp, synthetic construct
  source 1..75: mol_type = other DNA
aataaaacagttattgcccggttaacattttcagtcattctgactcaaaatggacacattgcttttattggcgga

SEQ ID NO: 39889 - DNA, 75 bp, synthetic construct
  source 1..75: mol_type = other DNA
ggtgccttctcaccgcgcgctggcgatgttccgtgggcgtaacgaaggcgtactccagctttcgctgaatgccga

SEQ ID NO: 39890 - DNA, 75 bp, synthetic construct
  source 1..75: mol_type = other DNA
gacggtcgccacagcaacacgtctctggcgtggggagctggcgtgcagtttaacccgaccgaatccgtggccatt

SEQ ID NO: 39891 - DNA, 75 bp, synthetic construct
  source 1..75: mol_type = other DNA
attaacgtgaaataccgttatgagttttcggacacactggggatggtgacgtctttcagctatgcaggagacaag

SEQ ID NO: 39892 - DNA, 75 bp, synthetic construct
  source 1..75: mol_type = other DNA
attaacgtgaaataccgttatgagtttacggacacactggggctggtgacgtcattcagctatgcaggagacagg

SEQ ID NO: 39893 - DNA, 75 bp, synthetic construct
  source 1..75: mol_type = other DNA
ttttataccaccaagcgaaccggcggtatgctggtggattctcaggcgattaagctgatgaaaattggggctgca

SEQ ID NO: 39894 - DNA, 75 bp, synthetic construct
  source 1..75: mol_type = other DNA
ggcgtggtctggctggcgagatcagtaaggaaacgggtaaatccctgcgtgataacgctgaatacgttaatgcct

SEQ ID NO: 39895 - DNA, 75 bp, synthetic construct
  source 1..75: mol_type = other DNA
tggacggcgcgcgctatatcctgatggaacggtttgccgaagatgccgcgctgctggcgaaagtgcgtgattatc

SEQ ID NO: 39896 - DNA, 75 bp, synthetic construct
  source 1..75: mol_type = other DNA
ttatcaccaatgcagttatttgtactggcatagcaattcgcgttgtcacattccggcgtaacggctctcaacatc

SEQ ID NO: 39897 - DNA, 75 bp, synthetic construct
  source 1..75: mol_type = other DNA
taagcgaggcagaaaaagacagggagctaccggaaaagatcgcggctgaaatccctgtcattatccgccgcttgc

SEQ ID NO: 39898 - DNA, 75 bp, synthetic construct
  source 1..75: mol_type = other DNA
ccgctctattcgatcacggattggcatcgaagtccgatcagcgattcgcatccattcgatcaaccgggaacttaa

SEQ ID NO: 39899 - DNA, 75 bp, synthetic construct
  source 1..75: mol_type = other DNA
tgggacagtcgcgggatattcacccctgatgagaacaaggttaccgtcaaggagaccgtcagccaggtcagcgcg

SEQ ID NO: 39900 - DNA, 75 bp, synthetic construct
  source 1..75: mol_type = other DNA
cagagccgggggaaatccggcgttttgtgcagcaggcggtggatcacaggccacatctgctggcaatccacttca

SEQ ID NO: 39901 - DNA, 75 bp, synthetic construct
  source 1..75: mol_type = other DNA
agcgtctcgggcggcgtacgcgccgtcagccggctggccgcggaacccagtcatctggtgaaaagcacgctgcag

SEQ ID NO: 39902 - DNA, 75 bp, synthetic construct
  source 1..75: mol_type = other DNA
aaacagttgcatctatctggatgccgggactaccaccctggcgctggcgcgggcgatcctcgaccggaacgatct

SEQ ID NO: 39903 - DNA, 75 bp, synthetic construct
  source 1..75: mol_type = other DNA
tatatttatgaagcctataaagatgaagccgccgttgcgttccataaaacaacgcctcactacctcgcttgcgtg

SEQ ID NO: 39904 - DNA, 75 bp, synthetic construct
  source 1..75: mol_type = other DNA
tgatctggattcaaggcaggaacgtgcaattggcctggctatcagacaggcctcgctgaaggttaaccaactgca

SEQ ID NO: 39905 - DNA, 75 bp, synthetic construct
  source 1..75: mol_type = other DNA
gtcaccttcaacgggcagcaactgacgctggaaagcctttctcagatccgcgccggacgtcaggagtgggaacgc

SEQ ID NO: 39906 - DNA, 75 bp, synthetic construct
  source 1..75: mol_type = other DNA
ttctgattatttccgtgcttatggcgattggcattatgcgaattatcgaagcgctgaaaaatatcgaatctttat

SEQ ID NO: 39907 - DNA, 75 bp, synthetic construct
  source 1..75: mol_type = other DNA
cagggcttctcacagtatgaagcctcactgatgattgccaaccgttttatcgacggtaaaggtaaggcgttttta

SEQ ID NO: 39908 - DNA, 75 bp, synthetic construct
  source 1..75: mol_type = other DNA
acacgccgccagaagttgagaaagcgatggaagctaaccaccgtcgcccggcgagtgtttataaggacccagcat

SEQ ID NO: 39909 - DNA, 75 bp, synthetic construct
  source 1..75: mol_type = other DNA
gagcgggaagtccgcgagctgcgccgcagcaatgatattctgcgtcaggcttcagcgtattttgcccaggcggag

SEQ ID NO: 39910 - DNA, 75 bp, synthetic construct
  source 1..75: mol_type = other DNA
tattttcaaggttattactttggtcaggctattgaactatgttcgtttattaaagaatatagaaagactgtatag

SEQ ID NO: 39911 - DNA, 75 bp, synthetic construct
  source 1..75: mol_type = other DNA
gtgaaatgcgcgtcgggtcgcgggtgatttcgcaagagatcagcacggcagatgaaggggatggcggccagattg

SEQ ID NO: 39912 - DNA, 75 bp, synthetic construct
  source 1..75: mol_type = other DNA
gccagcatttaacgcaggtatgcgcaaagcgttttttgatcagccgaaagaacgccgcgatgcatggttgttgtg

SEQ ID NO: 39913 - DNA, 75 bp, synthetic construct
  source 1..75: mol_type = other DNA
gccagcatttaacgcaggtatgcgcaaagcattttttgatcagccgaaagagcgccgcgacgcatggttgctctg

SEQ ID NO: 39914 - DNA, 75 bp, synthetic construct
  source 1..75: mol_type = other DNA
aatcttgattactttggtgcattccgcatgaatgacctggcgggtcatattgcaatgatcttgcatgttccgcat

SEQ ID NO: 39915 - DNA, 75 bp, synthetic construct
  source 1..75: mol_type = other DNA
atgcatatactggattcacttcttgcctttagcgcctatttttttattggcgtggctatggtgattatttttctt

SEQ ID NO: 39916 - DNA, 75 bp, synthetic construct
  source 1..75: mol_type = other DNA
ctcttgcgcgcttgttaaaagcggcagggctggcgagaagtacgttctactggcaactggcgagcggtaaaaaac

SEQ ID NO: 39917 - DNA, 75 bp, synthetic construct
  source 1..75: mol_type = other DNA
taaaggccgtgaagacggtctgcgcgatctggagcgcaaggcattgcaggtgggcaccgatgaagacggcggcta

SEQ ID NO: 39918 - DNA, 75 bp, synthetic construct
  source 1..75: mol_type = other DNA
actatttatgaaaatttttcagggaaaatcgtgtcggtacttctcgaatataactttttgtttttttttaatatt

SEQ ID NO: 39919 - DNA, 75 bp, synthetic construct
  source 1..75: mol_type = other DNA
attgtgccgctttcaaatcaagcattagcccatcttgaaacattaaaagaactgactggaaactatcctttgatg

SEQ ID NO: 39920 - DNA, 75 bp, synthetic construct
  source 1..75: mol_type = other DNA
tttggtctgcgggtacagtgctttaaggttaaaccctataagttcaacgacgatgtattcgttgatatccgtcag

SEQ ID NO: 39921 - DNA, 75 bp, synthetic construct
  source 1..75: mol_type = other DNA
ggcctgatgacccgcgacaattacagaacggtaaataacattacccgggggaagcatccggaggcgaaacaatga

SEQ ID NO: 39922 - DNA, 75 bp, synthetic construct
  source 1..75: mol_type = other DNA
cagcagcaccttcgaaaaactctgcgatggctttggcgcgaccgatggcgagctgaccatggatataacgctgaa

SEQ ID NO: 39923 - DNA, 75 bp, synthetic construct
  source 1..75: mol_type = other DNA
acgaaggtaaagcgttgaccgtatccaaacaaagcggaaaaacctggacgcttacccatggaactgatgcagccg

SEQ ID NO: 39924 - DNA, 75 bp, synthetic construct
  source 1..75: mol_type = other DNA
tgtgtgatgcagttaattttctcgtggaaaaatacgcgctggtgcgtaccgaccagccgggattcagcacctgtc

SEQ ID NO: 39925 - DNA, 75 bp, synthetic construct
  source 1..75: mol_type = other DNA
gttgccggaattacagttaaatcgggaattgaagatttttccattattccgtttgaacaggaagccggtatttaa

SEQ ID NO: 39926 - DNA, 75 bp, synthetic construct
  source 1..75: mol_type = other DNA
tggcaaaaatatttaccctgggttatgtggattttagcaaacgctccaacgaagcgggtagaaatatgatggctc

SEQ ID NO: 39927 - DNA, 75 bp, synthetic construct
  source 1..75: mol_type = other DNA
ggaatttcacttcggttattaaaaacaagcgtgcttttttctccggtctggactggaaaacgcttccttcagaag

SEQ ID NO: 39928 - DNA, 75 bp, synthetic construct
  source 1..75: mol_type = other DNA
tcccggcgatattcatcccggacagggatatccgttaccaggagaagtggcgcgtacgccggatgaaaatcaggc

SEQ ID NO: 39929 - DNA, 75 bp, synthetic construct
  source 1..75: mol_type = other DNA
tttatcgacgaaaactccggtgaattttttgttcaggtctggggtaacggtgcaactttcgacaacgtgatttta

SEQ ID NO: 39930 - DNA, 75 bp, synthetic construct
  source 1..75: mol_type = other DNA
cccgtacaccaataaaccgtttgtcggtttttataccaccaagcgcaccggcggcatgctggtcgattcgcaggc

SEQ ID NO: 39931 - DNA, 75 bp, synthetic construct
  source 1..75: mol_type = other DNA
gcccgtacaggtctggcagcaactgttaacgtatctgctggagcagcattacggcctcacactcaacgacacgcc

SEQ ID NO: 39932 - DNA, 75 bp, synthetic construct
  source 1..75: mol_type = other DNA
tcaccctcgcagatgccagacaaaaacgcgaagacgcaaagaaactactcgcagcaggtgaagatcctggcgaag

SEQ ID NO: 39933 - DNA, 75 bp, synthetic construct
  source 1..75: mol_type = other DNA
cgcgagatgctccagtggtacgccgactatatggactcactggaacagggcggcaacgtggtgcatggcaagttc

SEQ ID NO: 39934 - DNA, 75 bp, synthetic construct
  source 1..75: mol_type = other DNA
tcaacatggcgggattcataaaaagccagagcctgacgctgctcgaaaagctggacgcactcgatgccgacgaac

SEQ ID NO: 39935 - DNA, 75 bp, synthetic construct
  source 1..75: mol_type = other DNA
atgcttgcattacaaccgcgctactccaactacacattatcatctggtatcctgctcaaaactaaggaggttggt

SEQ ID NO: 39936 - DNA, 75 bp, synthetic construct
  source 1..75: mol_type = other DNA
atgtattggtgttgatagcggctgtaccaaagcgcagatgatcaactcctatgacaactcggtgacctatgtgga

SEQ ID NO: 39937 - DNA, 75 bp, synthetic construct
  source 1..75: mol_type = other DNA
ctaggacactggtcagcaccaaacccgctggcaggacttccgaccttcaaaattgccgaaggtgagctggctttt

SEQ ID NO: 39938 - DNA, 75 bp, synthetic construct
  source 1..75: mol_type = other DNA
agaaaaacagaacagtacccatatcacaggagctgtatgacgaactcccaaagaacagagggaagttattctcac

SEQ ID NO: 39939 - DNA, 75 bp, synthetic construct
  source 1..75: mol_type = other DNA
agactgcgtcagtcaggtatggtgatagtcacccgggaagttgaggtgtcagatgccctgaccggaaccaccaga

SEQ ID NO: 39940 - DNA, 75 bp, synthetic construct
  source 1..75: mol_type = other DNA
gccggagaatctcaaatcatccacgtaaccgcctggacggaacgcgaagcgcgtaaccgttgcccgtccggttgt

SEQ ID NO: 39941 - DNA, 75 bp, synthetic construct
  source 1..75: mol_type = other DNA
ttgagaaatatcagttcagggccaggaatgagtcaccgcgactgatgcgccagtgggaagatgtcatgcgtgaat

SEQ ID NO: 39942 - DNA, 75 bp, synthetic construct
  source 1..75: mol_type = other DNA
caacgtcgctggaagccggatcgcattatcggcgtagtgccaacgctgttttgcacgccgggaatgcgcctgctg

SEQ ID NO: 39943 - DNA, 75 bp, synthetic construct
  source 1..75: mol_type = other DNA
ggtaccccctgtgaggcagcgctggagcaattacacgctgatttcagaagtgccgggctgaatgaggcgttgccg

SEQ ID NO: 39944 - DNA, 75 bp, synthetic construct
  source 1..75: mol_type = other DNA
taaccgcctggacagaacgcgaagcgcgtaaccgttgtccgtccggttgtgtcgctgtattcgctgcccgtattc

SEQ ID NO: 39945 - DNA, 75 bp, synthetic construct
  source 1..75: mol_type = other DNA
tccgcctgacctgtgcggactggtggaaacgcaaactgtggcttttacgttgcgaatggagagaggaacaactcc

SEQ ID NO: 39946 - DNA, 75 bp, synthetic construct
  source 1..75: mol_type = other DNA
acctgctgcggggtggcctgaccagtggaaacaaaaaacagacagaaacgggattcacaaatcccgtaaatgagc

SEQ ID NO: 39947 - DNA, 75 bp, synthetic construct
  source 1..75: mol_type = other DNA
acttttatgttcgcagtgtgaataccgttggcaaatcggcattcgtggaggctgtcggccagccgggtaataatc

SEQ ID NO: 39948 - DNA, 75 bp, synthetic construct
  source 1..75: mol_type = other DNA
ttactgagagctcagatcaactttccagggcaacagatcgcgtacccggtttgccggccagtcctggatatgttc

SEQ ID NO: 39949 - DNA, 75 bp, synthetic construct
  source 1..75: mol_type = other DNA
gtattgatgatcgtagtgatattggcattgactccaatgatacagacgatattgatattgataatcaagaaccaa

SEQ ID NO: 39950 - DNA, 75 bp, synthetic construct
  source 1..75: mol_type = other DNA
cgcggtcaacttacacacgttctgcgtcatacgtttgcggcgcatttcatgatgtcgggtggaaacatccttgct

SEQ ID NO: 39951 - DNA, 75 bp, synthetic construct
  source 1..75: mol_type = other DNA
acaaattgctgctgatggttgacgctctaggcaatcctcttgcaaccaatctcacctctaaaatgtttgcccact

SEQ ID NO: 39952 - DNA, 75 bp, synthetic construct
  source 1..75: mol_type = other DNA
tagtgatattggcattgactccaatgatacagacgatattacttttgatattgatattgatattgatattgatat

SEQ ID NO: 39953 - DNA, 75 bp, synthetic construct
  source 1..75: mol_type = other DNA
taattggataacatatgggccatctgggcaccccatttctaatatgcaaggtacgccagaaaaacccagtgatat

SEQ ID NO: 39954 - DNA, 75 bp, synthetic construct
  source 1..75: mol_type = other DNA
cggcatgacggatgaacagacgaaacagttcatcaccatgttgcaggatcagggggccatgcacggctgggattt

SEQ ID NO: 39955 - DNA, 75 bp, synthetic construct
  source 1..75: mol_type = other DNA
agcccgtcacgcaaaaatgctcgaaactgatcaggcgtgggaggtattcgaaaaactggaagactgctatttcag

SEQ ID NO: 39956 - DNA, 75 bp, synthetic construct
  source 1..75: mol_type = other DNA
ttggtgcaggtaaattagatacaaaaatattacaagacttagatgtgccagtgccgccgaaggcggagttattac

SEQ ID NO: 39957 - DNA, 75 bp, synthetic construct
  source 1..75: mol_type = other DNA
gaaacgcaaattgtggcttttacgttgcgaatggagagaggaacaactccgcgctgcctgtctggtttccagaaa

SEQ ID NO: 39958 - DNA, 75 bp, synthetic construct
  source 1..75: mol_type = other DNA
agttttgaaaacaagcgtgcggcgctggcagcctcccttgaggaggtcatgaccaaagccgcagaggaaggccgc

SEQ ID NO: 39959 - DNA, 75 bp, synthetic construct
  source 1..75: mol_type = other DNA
caacaatacctttagctggttttacaagtacaacaggggtaaaaaaagctgtagaagtttttgaattacttacaa

SEQ ID NO: 39960 - DNA, 75 bp, synthetic construct
  source 1..75: mol_type = other DNA
cgttatccagatttttataacgaagagatattcagggaggtgacagaagagagagaatcaacttttaaagaactt

SEQ ID NO: 39961 - DNA, 75 bp, synthetic construct
  source 1..75: mol_type = other DNA
gccttaataatcacgtaatacagcacattggtgctatgccgctggataaatgcgagctacggcactggctggcct

SEQ ID NO: 39962 - DNA, 75 bp, synthetic construct
  source 1..75: mol_type = other DNA
acaggcctgatgacccgcgacaattacagaacggtgaacaatatcacccggggtaaacattcggaggcgaaacga

SEQ ID NO: 39963 - DNA, 75 bp, synthetic construct
  source 1..75: mol_type = other DNA
gaacatatccaggactggccggcaaaccgggtacgcgatctgttgccctggaaagttgatctgagctctcagtaa

SEQ ID NO: 39964 - DNA, 75 bp, synthetic construct
  source 1..75: mol_type = other DNA
aataagccgctgtttaccacggacgcacaagagaaaagttggctctatctgttatctaaatacagcgccaacccc

SEQ ID NO: 39965 - DNA, 75 bp, synthetic construct
  source 1..75: mol_type = other DNA
gtggggcgagcgttttccgtcactggccggaatggaacgctggcagtggcaggatatgccattctggcaggtcat

SEQ ID NO: 39966 - DNA, 75 bp, synthetic construct
  source 1..75: mol_type = other DNA
atccactattacaaccatgaaagaataaaacagaaactgaaaggcctgagtccggtagagtaccgaacccaggcc

SEQ ID NO: 39967 - DNA, 75 bp, synthetic construct
  source 1..75: mol_type = other DNA
gaacatcagtccacgctgagcgcggggtatcttcatgcctcgaccaacgttcccggcagcgatgatctgaacggg

SEQ ID NO: 39968 - DNA, 75 bp, synthetic construct
  source 1..75: mol_type = other DNA
ccaccccacatcatttattaatttccttcgctggtcatattatcgcccaagagatatattacggatgctcgaaat

SEQ ID NO: 39969 - DNA, 75 bp, synthetic construct
  source 1..75: mol_type = other DNA
gtgataatcttcggcggatcctaaaagattacggcaatgaggctgtacatgtcctgtacggaacaggcgtagatg

SEQ ID NO: 39970 - DNA, 75 bp, synthetic construct
  source 1..75: mol_type = other DNA
ccacacgtagctcgccatacatgggcttatttgatcttaaagagagtctatactgataaatatcagtctgttatg

SEQ ID NO: 39971 - DNA, 75 bp, synthetic construct
  source 1..75: mol_type = other DNA
atgcacgcggaaccctgcgcaaaatattcgaacgtctggatcgcactgacggacgctggctgacaccgggttatc

SEQ ID NO: 39972 - DNA, 75 bp, synthetic construct
  source 1..75: mol_type = other DNA
tagtaccggctctgcaaccaaagatccactaaatgcgctggatgaggcaattgcatccatcgacaaattccgttc

SEQ ID NO: 39973 - DNA, 75 bp, synthetic construct
  source 1..75: mol_type = other DNA
tgaaagcctatgcagcaaacggtgataatacggctcagatctccatcggcggaagcgctcaggacgttaaaattg

SEQ ID NO: 39974 - DNA, 75 bp, synthetic construct
  source 1..75: mol_type = other DNA
gttggtctgaccgcgttacgtggtctggctggagttgctgatatttacaatcaggaacagcaacagaaagcgatt

SEQ ID NO: 39975 - DNA, 75 bp, synthetic construct
  source 1..75: mol_type = other DNA
ctataaatgcgctgttatgtgcttgtgttgttattactctgatgttttatcgtcgtggtgattcgcggcatcgtc

SEQ ID NO: 39976 - DNA, 75 bp, synthetic construct
  source 1..75: mol_type = other DNA
cgctggcatgcggaaagcgaacagtactatttgcatctctttgcaccagaacaggcggatctcaactgggagaat

SEQ ID NO: 39977 - DNA, 75 bp, synthetic construct
  source 1..75: mol_type = other DNA
gcattccaaaagaccttaagctggatggcgtttccttgctgccctggttgcaagataagaaacaaggcgagccac

SEQ ID NO: 39978 - DNA, 75 bp, synthetic construct
  source 1..75: mol_type = other DNA
cggtagataaaccgagcactcaccagcaggtgcgtggtgcgaaaattgaagactttggcgaggagattaagggcg

SEQ ID NO: 39979 - DNA, 75 bp, synthetic construct
  source 1..75: mol_type = other DNA
ccccgcgcccggcgagccataactcaagccgcgcgatggtgtgggtgcgaaaaaatctgttctccagcttgagca

SEQ ID NO: 39980 - DNA, 75 bp, synthetic construct
  source 1..75: mol_type = other DNA
gctggggaccggtcaaaatgtccgatggagtcatctggatggctcacacgggcacattcggagaagtacaggcgt

SEQ ID NO: 39981 - DNA, 75 bp, synthetic construct
  source 1..75: mol_type = other DNA
gcgactttctgggcagcgtgttcatgcagctggagctgggggataaataccggagccagtttttcacgccatggg

SEQ ID NO: 39982 - DNA, 75 bp, synthetic construct
  source 1..75: mol_type = other DNA
ggttgagtggctgaaagagggctggctgctggcgtcggctgagatgcagcacagcgaactgcgcggcggcgtgtt

SEQ ID NO: 39983 - DNA, 75 bp, synthetic construct
  source 1..75: mol_type = other DNA
cttaccgggtatggttgaacgtaatcatggtcatattattaacattggctcaacggcaggcagctggccgtatgc

SEQ ID NO: 39984 - DNA, 75 bp, synthetic construct
  source 1..75: mol_type = other DNA
gtcgcttatgaaggttccggcagtggcgactggcgcactgacggtttcatcgtgggtgtcggttataaattctga

SEQ ID NO: 39985 - DNA, 75 bp, synthetic construct
  source 1..75: mol_type = other DNA
cccgaccgaatccgtgaccattgaccttgcttatgaaggttccggtagtggcgactggcgatcggatgcatttat

SEQ ID NO: 39986 - DNA, 75 bp, synthetic construct
  source 1..75: mol_type = other DNA
cgggtcagagagtcagtgcgctgcgagctattggtgccagtgcgccgatattgccaaagttatttattctgattt

SEQ ID NO: 39987 - DNA, 75 bp, synthetic construct
  source 1..75: mol_type = other DNA
tcccggtagtgatgatctgaacgggattaacgtgaaataccgttatgagtttacggacgcgctggggctgattac

SEQ ID NO: 39988 - DNA, 75 bp, synthetic construct
  source 1..75: mol_type = other DNA
attcttcattattcatcgcctatatgggatgtgtagggtgggtcagtgcttattcttatggctggggaacctctt

SEQ ID NO: 39989 - DNA, 75 bp, synthetic construct
  source 1..75: mol_type = other DNA
attttttgctattaccctactgtttttccctgtaatattcgaacttttaattctcaaacaatatttcatacttcc

SEQ ID NO: 39990 - DNA, 75 bp, synthetic construct
  source 1..75: mol_type = other DNA
tgccacgcgtgatacggcgattgagaagcgcctcgccagtctgttaaccgggcagggcctggcgtttcgcgttca

SEQ ID NO: 39991 - DNA, 75 bp, synthetic construct
  source 1..75: mol_type = other DNA
agagaatacgctgcggataatcaacgccactaatcatcagttaccaggcgaccgtgaaagcctgttctgggttaa

SEQ ID NO: 39992 - DNA, 75 bp, synthetic construct
  source 1..75: mol_type = other DNA
tgaccctacctggacggacagcagcctgaccaccatcctcaatccggaggcggtcatttttgcaaatccgatagc

SEQ ID NO: 39993 - DNA, 75 bp, synthetic construct
  source 1..75: mol_type = other DNA
aggtgttgcggcaggtaaagcacagatccctgtggttaccggcaatggtgagtttgcggcagtggcggaaattac

SEQ ID NO: 39994 - DNA, 75 bp, synthetic construct
  source 1..75: mol_type = other DNA
ttcgggttgtccggcctgatacatcagagcaatacgttgcgttaaaaacggctgttcagtctctgatgccacggg

SEQ ID NO: 39995 - DNA, 75 bp, synthetic construct
  source 1..75: mol_type = other DNA
tttttaagttttgcgcaaagttcacgcaaaaagaagttatcttaacggaatttaatcattttaataaaactgaca

SEQ ID NO: 39996 - DNA, 75 bp, synthetic construct
  source 1..75: mol_type = other DNA
tatggcaaaaattccagctgaacgtcatagcatcagcattaatgagctgaccactgacgaaaagcgggagttgat

SEQ ID NO: 39997 - DNA, 75 bp, synthetic construct
  source 1..75: mol_type = other DNA
gtcatgcgctgggaaacggggcgtaacccgccgaacacgaagaaaaactacggctatcttctctggcgcaagcgc

SEQ ID NO: 39998 - DNA, 75 bp, synthetic construct
  source 1..75: mol_type = other DNA
aacgctcctgtcgagccagtaggattaattgaccggacatttggtcaatcagaaaacatacagcaagcgaatgca

SEQ ID NO: 39999 - DNA, 75 bp, synthetic construct
  source 1..75: mol_type = other DNA
tgcagatgctggggagtgcaccacagcagaacgctcaggcgcaaccgcagcctcagcagaatggtcagccacaga

SEQ ID NO: 40000 - DNA, 75 bp, synthetic construct
  source 1..75: mol_type = other DNA
cagcggcaacaaaaccacaaagcctccagatacttcactgctgaaaagcattacgggtaacgtggcgtcattact

SEQ ID NO: 40001 - DNA, 75 bp, synthetic construct
  source 1..75: mol_type = other DNA
acgtgtgtgagcactgttgcgcagaacttatgagtgatccgaatagctcaatgtacgaggaagaagatgatggct

SEQ ID NO: 40002 - DNA, 75 bp, synthetic construct
  source 1..75: mol_type = other DNA
aggttttcaacatatcgactatgcacttggctgcacaggccatgttgattgtgaagtgcggatgctacgcgaact

SEQ ID NO: 40003 - DNA, 75 bp, synthetic construct
  source 1..75: mol_type = other DNA
tgcggcctgcttcctgtttgccggggcattcacgttgctggcggcgtgggttgcttatatccggctgcattcggc

SEQ ID NO: 40004 - DNA, 75 bp, synthetic construct
  source 1..75: mol_type = other DNA
gaacttgaggcgctggcgcgaggggcgactgtcatttatgatggaaaaacatttacatatcaggttgtaaatgaa

SEQ ID NO: 40005 - DNA, 75 bp, synthetic construct
  source 1..75: mol_type = other DNA
acttgcgcgtgctgcgctacctgaccgaagaactgaacgtcagtgaagaagaaaaaaaacgttggtatgcgcact

SEQ ID NO: 40006 - DNA, 75 bp, synthetic construct
  source 1..75: mol_type = other DNA
ggcaaagactcaaccgctattgctggcgtaaacgtggatatcggcaaatccggtaacccgctgaatctctggggc

SEQ ID NO: 40007 - DNA, 75 bp, synthetic construct
  source 1..75: mol_type = other DNA
catatgaaagacaaccgctgggttccaggctggatgtgtgcaccacatccacagacagatgccactgaacgcacc

SEQ ID NO: 40008 - DNA, 75 bp, synthetic construct
  source 1..75: mol_type = other DNA
tggaaccggaaaatgcaacggataagacattcagggcgatttccgccgatccatcaaaagccaccattagcgtga

SEQ ID NO: 40009 - DNA, 75 bp, synthetic construct
  source 1..75: mol_type = other DNA
agcgccataatgcacttgatgacgcccgttaccaggcaaaatacgtttcagctatctggcaaaaactgatcccga

SEQ ID NO: 40010 - DNA, 75 bp, synthetic construct
  source 1..75: mol_type = other DNA
acggcttagggaggcatgggaacgcggggaaagcctggtcatgaaaaaaatcccccagcgaaaaaccacgctacc

SEQ ID NO: 40011 - DNA, 75 bp, synthetic construct
  source 1..75: mol_type = other DNA
tggaagaaacccgcaaaccatgaagtcatcacaatggcggttccgtgcgggggcattggcgaccgtgacggctgg

SEQ ID NO: 40012 - DNA, 75 bp, synthetic construct
  source 1..75: mol_type = other DNA
acgtcgaaacagatagcggaagccaccggaaagaaaaacatggtgtcgcactggtttggtgcccgccagtggcag

SEQ ID NO: 40013 - DNA, 75 bp, synthetic construct
  source 1..75: mol_type = other DNA
ggcgtcgtgcaactggcgttgagctggagactgaacgttttgagcagacggtcagggaagtacaggatttagtca

SEQ ID NO: 40014 - DNA, 75 bp, synthetic construct
  source 1..75: mol_type = other DNA
tattctggatacgctggcgcgttgctttggtgggaatgatgaaaatgattcccgtgatatgggggcgtttatccg

SEQ ID NO: 40015 - DNA, 75 bp, synthetic construct
  source 1..75: mol_type = other DNA
cgccattgagaagcaccgcgcctctgaactcaaagcaccgcatcaccagctggtggccacatggcattcgttgaa

SEQ ID NO: 40016 - DNA, 75 bp, synthetic construct
  source 1..75: mol_type = other DNA
gaaatggttatcgctgcccgtcaggtggagcgggaaacgggtaaacctgtacgcatgattattctggatacgctg

SEQ ID NO: 40017 - DNA, 75 bp, synthetic construct
  source 1..75: mol_type = other DNA
ccataatgacgggcttttaccactggatgagataggccaggccggaaatgcgcgggaagtgtcaacgtctgctta

SEQ ID NO: 40018 - DNA, 75 bp, synthetic construct
  source 1..75: mol_type = other DNA
ctcggttacggtctgctgctgaaacgctatacgccaaacgtggctgatgcgactgaagcgcagattcaacaggca

SEQ ID NO: 40019 - DNA, 75 bp, synthetic construct
  source 1..75: mol_type = other DNA
cactgtcaggcgctggcgctggagaacgacaccgcgcgtcaggtgcaggtgtttgaagccgcctgccagtcggga

SEQ ID NO: 40020 - DNA, 75 bp, synthetic construct
  source 1..75: mol_type = other DNA
ggacaccacggctaaaacacctgaaaggggcgcgcctgagagtgtacggccttttgctggcgcaggaccacgaca

SEQ ID NO: 40021 - DNA, 75 bp, synthetic construct
  source 1..75: mol_type = other DNA
ctggtcgtgcatacccagcctggtgaccgttacggtgtcgccgcaggtggtcgccgactggctgcactcaacatg

SEQ ID NO: 40022 - DNA, 75 bp, synthetic construct
  source 1..75: mol_type = other DNA
accgccaacattggttgccagacgcatctggcgagcgccggtcgtacctctgtgcgtcactggattgaaattgta

SEQ ID NO: 40023 - DNA, 75 bp, synthetic construct
  source 1..75: mol_type = other DNA
ccttaaagaaaaaaatcacagaaagccagggcgatgatgaattaaaaccccgcgttgaaagtcgcgccgatggtg

SEQ ID NO: 40024 - DNA, 75 bp, synthetic construct
  source 1..75: mol_type = other DNA
atgtttgtcatatcactattacctgtaatcagtctggattccacctgacaaagaatggcgtgcgtgtattaacgg

SEQ ID NO: 40025 - DNA, 75 bp, synthetic construct
  source 1..75: mol_type = other DNA
atgtcgcaaaaatcgcttatcaccgtcacaatttgcatgacggtaatcttcaccatctggatgttacacggttcg

SEQ ID NO: 40026 - DNA, 75 bp, synthetic construct
  source 1..75: mol_type = other DNA
ctgaccaccattctcaacccggaagcggtcatctttgcaaatccgatagcacagggagcctgtgcggtggatgcc

SEQ ID NO: 40027 - DNA, 75 bp, synthetic construct
  source 1..75: mol_type = other DNA
aggatgccgtagcaagagcccttcacgaagccggaatgctgaaaaagccagccagcggggaaggatggcaaatca

SEQ ID NO: 40028 - DNA, 75 bp, synthetic construct
  source 1..75: mol_type = other DNA
ttacggaaagtgaagtggcggtggcggggaacagtaaattccgcttcgtgggggctgatgctttctcacctgacg

SEQ ID NO: 40029 - DNA, 75 bp, synthetic construct
  source 1..75: mol_type = other DNA
atacgctgcagcaaacacagctgcagagcgccatcgtgaaggcgatgtacgccgccacaatcgaatcagagctcg

SEQ ID NO: 40030 - DNA, 75 bp, synthetic construct
  source 1..75: mol_type = other DNA
aacataccgcagtctgccggagccggaagcggtgctgacggaggcagaagaagaacgcctgaacgaactgatggc

SEQ ID NO: 40031 - DNA, 75 bp, synthetic construct
  source 1..75: mol_type = other DNA
gctaatgaagcgcatccgattgatggcctgtctggtgaatatgcggagaaatcccttgaagaatgggcggaacag

SEQ ID NO: 40032 - DNA, 75 bp, synthetic construct
  source 1..75: mol_type = other DNA
atgacaacgttaattcctttcaaacctgacgggcgaggaccatttcagttcacggccagaatcggagaatatgaa

SEQ ID NO: 40033 - DNA, 75 bp, synthetic construct
  source 1..75: mol_type = other DNA
gccctatcaccacaaaaaactactcctgcgaccgacactttcctggatgaagtgaagactgaagcacgcaaggag

SEQ ID NO: 40034 - DNA, 75 bp, synthetic construct
  source 1..75: mol_type = other DNA
tggcggctgaagtgataaaagatctggtgaataccgtgcgttcttatgacacggaaaacgaacatgatgtttgtg

SEQ ID NO: 40035 - DNA, 75 bp, synthetic construct
  source 1..75: mol_type = other DNA
tggatataccctgtctgagttgccttttattaacaaaatgtgggatggctctgtattgtctgtggacagaaagaa

SEQ ID NO: 40036 - DNA, 75 bp, synthetic construct
  source 1..75: mol_type = other DNA
actgatttcatgaaagcgatatatttcctgtatctcaatcgtcacggttaccgtggtttatgtcgctataacaag

SEQ ID NO: 40037 - DNA, 75 bp, synthetic construct
  source 1..75: mol_type = other DNA
ggaaacctggcgatgaaagcgattttgatcccctttttttctcttctttttccgttgtcatcgctgtctgcattc

SEQ ID NO: 40038 - DNA, 75 bp, synthetic construct
  source 1..75: mol_type = other DNA
catcgccgcgcctcggagtcctgtcaataactgtggaaagctcaccggtggtgatacttcgttaccggctcccac

SEQ ID NO: 40039 - DNA, 75 bp, synthetic construct
  source 1..75: mol_type = other DNA
gatgtttcacatgctcacctgaagaggggcgtgctctttcccgacaaaacgtggcggcagattgtcaccattgag

SEQ ID NO: 40040 - DNA, 75 bp, synthetic construct
  source 1..75: mol_type = other DNA
aaagacgcattgagcattggctaaaggtggcagaatttattttgtacaaaccaatggttatggcttttggtatag

SEQ ID NO: 40041 - DNA, 75 bp, synthetic construct
  source 1..75: mol_type = other DNA
cggcgaaaatttattgcggcccggctggccacgcagatgttttcctgctggctggaagaggcacttcttcggggg

SEQ ID NO: 40042 - DNA, 75 bp, synthetic construct
  source 1..75: mol_type = other DNA
tactacggtttcctgagtccggtgaagcgccggttactggaagatgttgtgtacgtcataacggagacggtgaga

SEQ ID NO: 40043 - DNA, 75 bp, synthetic construct
  source 1..75: mol_type = other DNA
gcgctggccgaagaccaccagagagcgactgagtcaattaagcaggctgatgcggctgttaagttggcacacgag

SEQ ID NO: 40044 - DNA, 75 bp, synthetic construct
  source 1..75: mol_type = other DNA
gagcagggggggattgtgattctgactacccaccagccgctcaacgttgctgaaagtaaaattcgccgcatttca

SEQ ID NO: 40045 - DNA, 75 bp, synthetic construct
  source 1..75: mol_type = other DNA
aggtctcagcacgtatgaaaaagagtgcgccaaacgcggtgatgattatcaggagatttttgcccagcaggtccg

SEQ ID NO: 40046 - DNA, 75 bp, synthetic construct
  source 1..75: mol_type = other DNA
acggcagaatcctacgatgataactacctggatgatgaagacgcggactggaccgcgaccgggcaggggcagaaa

SEQ ID NO: 40047 - DNA, 75 bp, synthetic construct
  source 1..75: mol_type = other DNA
gacacctgatgaacctgagttgcgtgaatattatggctctgccaacacatccactgagcggcagagcgcctaccc

SEQ ID NO: 40048 - DNA, 75 bp, synthetic construct
  source 1..75: mol_type = other DNA
cgcaatgataaccttggtgattggagttacgtatatcatcgagagccagatgattttgagcgcaaacatttagtg

SEQ ID NO: 40049 - DNA, 75 bp, synthetic construct
  source 1..75: mol_type = other DNA
gctgcgttacaaccttgccgctatgattgcgcgcttcaatgaaacgggacgcagccaggtgctggcaaaacgtat

SEQ ID NO: 40050 - DNA, 75 bp, synthetic construct
  source 1..75: mol_type = other DNA
ggcgattctataatcttgcgactgtgggtgtattactttgcttgttctatggtcttattattatggggctggcaa

SEQ ID NO: 40051 - DNA, 75 bp, synthetic construct
  source 1..75: mol_type = other DNA
cattagtcgtttctggtttggtgtatgagtatcgaatgcactctctaacaaaaaaaataggaattctagaaaacg

SEQ ID NO: 40052 - DNA, 75 bp, synthetic construct
  source 1..75: mol_type = other DNA
atgaataacattgcgccgcaatcacctgtaatgcgtcgcctgacgcagcaggataatcccgctatcgcccgcgtc

SEQ ID NO: 40053 - DNA, 75 bp, synthetic construct
  source 1..75: mol_type = other DNA
tgcgtcaacacaggaaatgttgacctataagggagcacctcaaaatacgccgggtgcctctgttccctggtataa

SEQ ID NO: 40054 - DNA, 75 bp, synthetic construct
  source 1..75: mol_type = other DNA
gaaaaatttgggcagttctctgctacggttaaaactatatccaggactcctgcgtcaacacaggaaatgttgacc

SEQ ID NO: 40055 - DNA, 75 bp, synthetic construct
  source 1..75: mol_type = other DNA
ccaagaacgcggtcgaaaaccacttcgacacctcttatgaattagaatctcttcttgaacaacgtgtgaagcgtc

SEQ ID NO: 40056 - DNA, 75 bp, synthetic construct
  source 1..75: mol_type = other DNA
gagaaatacctggaaaatcctcgccacgtcgagattcaggtactggctgacggtcagggcaacgctatctatctg

SEQ ID NO: 40057 - DNA, 75 bp, synthetic construct
  source 1..75: mol_type = other DNA
tggttgctgaagttgaacaaagcctgaacaaaaagatcccttctatgcacttgccttacccactaggaatgctgg

SEQ ID NO: 40058 - DNA, 75 bp, synthetic construct
  source 1..75: mol_type = other DNA
tggggcatagcgatataaaaatgactatgcgttatgcgcattttgctccaggtcatttagaggctgctgttgaat

SEQ ID NO: 40059 - DNA, 75 bp, synthetic construct
  source 1..75: mol_type = other DNA
tgccgaactggcgaaaaaacagtccgttgatgccatgctgatgacaggtgacagctacgactgcggtaaaaaaat

SEQ ID NO: 40060 - DNA, 75 bp, synthetic construct
  source 1..75: mol_type = other DNA
tatcactggcaattatcgcatgtatttacggattgctcgtcccgtttctgatatcaatgaaggatacggtagcgg

SEQ ID NO: 40061 - DNA, 75 bp, synthetic construct
  source 1..75: mol_type = other DNA
acggtccagggcgttgccggattatcaataacggtattgatatggcaaccgaagcgattctggcggacttgcctc

SEQ ID NO: 40062 - DNA, 75 bp, synthetic construct
  source 1..75: mol_type = other DNA
ataatcatcgtcgggatatagaaaaccagctggttcgtgtggacaacattatttcccgtctggaagaaagtaaaa

SEQ ID NO: 40063 - DNA, 75 bp, synthetic construct
  source 1..75: mol_type = other DNA
tatttacaggttccgtctatcgactggaacgattccggctacatccaacatttcatcaacgtgatcgagaagatg

SEQ ID NO: 40064 - DNA, 75 bp, synthetic construct
  source 1..75: mol_type = other DNA
atgaaaaacaaattgttatttatgatgttaacaatactgggtgcgcctgggattgcagccgcagcaggttatgat

SEQ ID NO: 40065 - DNA, 75 bp, synthetic construct
  source 1..75: mol_type = other DNA
ggcaaaaactgacagcgcacaggttgcagaaattgttgcggtaatgggtaatgccagcgttgccagccgtgattt

SEQ ID NO: 40066 - DNA, 75 bp, synthetic construct
  source 1..75: mol_type = other DNA
tctgctgcattacgccaggggttacaggcaagtgaaactgtgctgctgcactacgactggccaagcaatattcgt

SEQ ID NO: 40067 - DNA, 75 bp, synthetic construct
  source 1..75: mol_type = other DNA
tcacttgccggagagattgtggatgaagacagcacgcttgctgaacgtcaggaagcacgggcggagcggtttacc

SEQ ID NO: 40068 - DNA, 75 bp, synthetic construct
  source 1..75: mol_type = other DNA
gcctggctgcgaaagtacagacggcgctgaaagacgatcccatgtccggccatgttttcattttccggggccgca

SEQ ID NO: 40069 - DNA, 75 bp, synthetic construct
  source 1..75: mol_type = other DNA
aactgaaagaattaacagaaataagcggacggtctcttatgatccacattggcggtgacaactatcatgaccatc

SEQ ID NO: 40070 - DNA, 75 bp, synthetic construct
  source 1..75: mol_type = other DNA
agtcacaacgccaaattacagttttctcgggtacagcggcacgatgaaagtgacgcccgatcgcatcacggacta

SEQ ID NO: 40071 - DNA, 75 bp, synthetic construct
  source 1..75: mol_type = other DNA
tcaccgaggctgaacaacgtcaaatactcaaagaacaagctgacgcctggtttgccctgaaccggttattaaggg

SEQ ID NO: 40072 - DNA, 75 bp, synthetic construct
  source 1..75: mol_type = other DNA
ctcagtcaggaggtgctgttatccctgctcagtttctgcaccgcatgcagccttaacggtgtccagacccgcgag

SEQ ID NO: 40073 - DNA, 75 bp, synthetic construct
  source 1..75: mol_type = other DNA
cctgtttcaaatcaagtgcatcgttctataaccgaacttgcacttgattgcggattagccagaaaaaatgctcat

SEQ ID NO: 40074 - DNA, 75 bp, synthetic construct
  source 1..75: mol_type = other DNA
gaactggaaaagccccaccaccagctggtggatacgtatacttcactgaaccgacagtatgcggagctgcagagt

SEQ ID NO: 40075 - DNA, 75 bp, synthetic construct
  source 1..75: mol_type = other DNA
ttggcgaatactcatctgcccccgttaaaaaacaatatgagtaccctgttttttctcatgttcaggccgggatgt

SEQ ID NO: 40076 - DNA, 75 bp, synthetic construct
  source 1..75: mol_type = other DNA
ttcacctgttggcgaatactcatcggccccagttaaaaaacaatatgagtaccctgttttttctcatgttcaggc

SEQ ID NO: 40077 - DNA, 75 bp, synthetic construct
  source 1..75: mol_type = other DNA
ggttatgatcacagctattattttgtctccagttttattggcgagcatattgcctaccacgccaataaactgaat

SEQ ID NO: 40078 - DNA, 75 bp, synthetic construct
  source 1..75: mol_type = other DNA
ctgatctttgctcaataaaaaataggctggtcattacagaaaggttttatccccaatattattggacggtatggt

SEQ ID NO: 40079 - DNA, 75 bp, synthetic construct
  source 1..75: mol_type = other DNA
aagtggtaataatattggcatagagttcgctcttaatcaggagaatatgaaatacgtctgggttctgaataatga

SEQ ID NO: 40080 - DNA, 75 bp, synthetic construct
  source 1..75: mol_type = other DNA
ctgcatgcggctacgttgtacaacattgccgcctatcctcatctgaaaggagatgacctggccgagcaagcgcag

SEQ ID NO: 40081 - DNA, 75 bp, synthetic construct
  source 1..75: mol_type = other DNA
atgttgctcacacccgtcgcgcacatttcatggacgatggcaccaagataatgattgcacagtgccggaatattt

SEQ ID NO: 40082 - DNA, 75 bp, synthetic construct
  source 1..75: mol_type = other DNA
ccgctgggtgcctggctggatgtgttcaccacgtccacagacggatgccactgaacgcgccgataacctggctga

SEQ ID NO: 40083 - DNA, 75 bp, synthetic construct
  source 1..75: mol_type = other DNA
gtttttaataagctttggattgaagataaatatcactcacggcttgaaaaacgttttaatttgatgttagtcgca

SEQ ID NO: 40084 - DNA, 75 bp, synthetic construct
  source 1..75: mol_type = other DNA
agatggagttctggtttgcgatgatcaaaatcgtcgccatcgtgtcgctgattgtcgtcggcctggtcatggtgg

SEQ ID NO: 40085 - DNA, 75 bp, synthetic construct
  source 1..75: mol_type = other DNA
taaccgtctggatgtgatgtgtacaccggacctggttaaccagttccgcttcatggcagcgcagatccgtttcat

SEQ ID NO: 40086 - DNA, 75 bp, synthetic construct
  source 1..75: mol_type = other DNA
aaagagggctggcagccgtttggtagtccggtggccataaccccttataccctgatgcaggcgattacagcagaa

SEQ ID NO: 40087 - DNA, 75 bp, synthetic construct
  source 1..75: mol_type = other DNA
accggagaatcaggcggccgtaaaacaggcgctgaccgacctgttatacaacgaatcccggcccggcggtctggt

SEQ ID NO: 40088 - DNA, 75 bp, synthetic construct
  source 1..75: mol_type = other DNA
gatggggcgtggctatgcatggctggatacgggtactcatcagagccttattgaggcaagtaattttattgcgac

SEQ ID NO: 40089 - DNA, 75 bp, synthetic construct
  source 1..75: mol_type = other DNA
tggtatcccacagcaagtatcagcgatttgctggttgtggtgatgaagaaagccaccgcaggcatcagtatcagc

SEQ ID NO: 40090 - DNA, 75 bp, synthetic construct
  source 1..75: mol_type = other DNA
gattctatccgcgaaaatccaaacaacggacgctccatttcacaggttcgcgccgcgattcgatccgggaagtaa

SEQ ID NO: 40091 - DNA, 75 bp, synthetic construct
  source 1..75: mol_type = other DNA
ctctctccgttattaagcctgatggtttttatcattggtacactatacgaattaaggcgagttagtggttgcata

SEQ ID NO: 40092 - DNA, 75 bp, synthetic construct
  source 1..75: mol_type = other DNA
tggaatgacggcggctggttcccgaaaggcttaagtggcttctttgccggattccagatagcggttttcgctttc

SEQ ID NO: 40093 - DNA, 75 bp, synthetic construct
  source 1..75: mol_type = other DNA
gccgtgttcgcgggtgccgccataccaccactgacccgtcaggttattgcgaaagccacaaaagcgaaggctgga

SEQ ID NO: 40094 - DNA, 75 bp, synthetic construct
  source 1..75: mol_type = other DNA
gccgtgttcgcggctgccgttctaccactacagatccgtcaggctactgcgaaaatcataaaggtgagggctgga

SEQ ID NO: 40095 - DNA, 75 bp, synthetic construct
  source 1..75: mol_type = other DNA
ccagctcattgaaggctacatgctgcgccataaggtgaaaccgggcattaccggctgggcgcagattaatggctg

SEQ ID NO: 40096 - DNA, 75 bp, synthetic construct
  source 1..75: mol_type = other DNA
acctggaacagcgcgcagttagtgggaaaagtgcgagtactgcaacatattgctggtcgcacctctgcaaaagag

SEQ ID NO: 40097 - DNA, 75 bp, synthetic construct
  source 1..75: mol_type = other DNA
atgagatgtttagcccatattgctctggtaacagtgatacagtttatcgcctgttatctggctgattgggggaat

SEQ ID NO: 40098 - DNA, 75 bp, synthetic construct
  source 1..75: mol_type = other DNA
attaaagagctggaaagtcgccagccgggtgtgcgtgcgcccacagaaccttctgccggtggtgaagtgaaaacg

SEQ ID NO: 40099 - DNA, 75 bp, synthetic construct
  source 1..75: mol_type = other DNA
atgtccgggaaagtcagtcagtctttcagaaaacaggctgatgctgctgagcagagtctgagccgacaggcgctg

SEQ ID NO: 40100 - DNA, 75 bp, synthetic construct
  source 1..75: mol_type = other DNA
tgctcagtttctgcaccgcatgcagccttaacggtgtccagacccgcgagtgtggtcgcacgtcacgcagtccgc

SEQ ID NO: 40101 - DNA, 75 bp, synthetic construct
  source 1..75: mol_type = other DNA
tggcaggataaacccgcagacaggaggcttgtatccgagttaatttctttatggtggagctaccatggaaagaat

SEQ ID NO: 40102 - DNA, 75 bp, synthetic construct
  source 1..75: mol_type = other DNA
ggaaaaagcgtcagtggaggaaatcagtctgccactactgacgaaaatgtcctcagagcgcacgctggcagtcca

SEQ ID NO: 40103 - DNA, 75 bp, synthetic construct
  source 1..75: mol_type = other DNA
gggggatgtggtgccgtcagcctctgtgtatattccggacagcgagaaaagttgcgacagtgatccggtggtcat

SEQ ID NO: 40104 - DNA, 75 bp, synthetic construct
  source 1..75: mol_type = other DNA
cccggcgttgatggcgtgaacaaaacaatgctacaggccagactagctgttgagctgcaaatcctcagggatgaa

SEQ ID NO: 40105 - DNA, 75 bp, synthetic construct
  source 1..75: mol_type = other DNA
ataaaattattgcttataactatccacaaggtgtacttacacaaaccttacgcgccgccgcagcccaccagcctg

SEQ ID NO: 40106 - DNA, 75 bp, synthetic construct
  source 1..75: mol_type = other DNA
ttaacgtatcaggaagttattctgttaacggtacaaaagttgttggcgctcgccagactggatggaccgcggcaa

SEQ ID NO: 40107 - DNA, 75 bp, synthetic construct
  source 1..75: mol_type = other DNA
tccacgatgcttctaacagtcagcgcatcaagcacatcattaatcaacatcccaatacgttatttatcgttttta

SEQ ID NO: 40108 - DNA, 75 bp, synthetic construct
  source 1..75: mol_type = other DNA
gataaacccgtgccgggtctgaagaatttgatggctgaaacctacccacgcttgcaacgcggacgtatggcctgg

SEQ ID NO: 40109 - DNA, 75 bp, synthetic construct
  source 1..75: mol_type = other DNA
atgtatggggctacaataggcaaaacatcaatactcaactctcgttcaacaactaatcaagccgtctgcgcttgt

SEQ ID NO: 40110 - DNA, 75 bp, synthetic construct
  source 1..75: mol_type = other DNA
gatatggataacgatttcaagacctgggtggggatcattcattcctttgcccgccataacgtgattggtgacaaa

SEQ ID NO: 40111 - DNA, 75 bp, synthetic construct
  source 1..75: mol_type = other DNA
cagcatcagtattgagggcagggatatcactactgtgctggacaaccgcctgatggggcttacgctgacggataa

SEQ ID NO: 40112 - DNA, 75 bp, synthetic construct
  source 1..75: mol_type = other DNA
ccgcgttaaggcatgggaaataacccacggtaaggcggttactgatttgtgtatcgtcaattcgccagtattccc

SEQ ID NO: 40113 - DNA, 75 bp, synthetic construct
  source 1..75: mol_type = other DNA
cgctggaaaaaattagcaaaccatgaagtcatcacaatggcgatcccgtgtggtggcattggcgaccgtgacggc

SEQ ID NO: 40114 - DNA, 75 bp, synthetic construct
  source 1..75: mol_type = other DNA
aacgccaaaagcggtcaaggcagcaaatgacaacgcaaattcacgtctggcgaaaaatcagaatggtgcagatat

SEQ ID NO: 40115 - DNA, 75 bp, synthetic construct
  source 1..75: mol_type = other DNA
accacacaggcgcagcgggcggaagccttccgtaaacagcgcgccacgtctttatcttcccctgccggtccccgt

SEQ ID NO: 40116 - DNA, 75 bp, synthetic construct
  source 1..75: mol_type = other DNA
cccggtactattctctgcaggaagtcttgcgggaacggtcaataatgaactcgggtatcagttatttcgtgattt

SEQ ID NO: 40117 - DNA, 75 bp, synthetic construct
  source 1..75: mol_type = other DNA
acagggggcctgcgcagcagatgccattgccagtgcctttaatatgcctctcgatgttctgttctggtgtgccgg

SEQ ID NO: 40118 - DNA, 75 bp, synthetic construct
  source 1..75: mol_type = other DNA
actttcagcacattcacggaagcattcggggatatttttgctgaagattccggtgatatcgatatccgtgacagc

SEQ ID NO: 40119 - DNA, 75 bp, synthetic construct
  source 1..75: mol_type = other DNA
tgcattgttgctggatgtttatcgtcagtaccacgacgcgcatgaaacgcatgagggatttgttcagtatcttgc

SEQ ID NO: 40120 - DNA, 75 bp, synthetic construct
  source 1..75: mol_type = other DNA
gaagggtttactacctttaccattgcgacacccaccggagagggaaccacgtcagcccgtacttttgtccgctct

SEQ ID NO: 40121 - DNA, 75 bp, synthetic construct
  source 1..75: mol_type = other DNA
gtcgctacggcgcaatctcacaaaccgacatattcagcttattgccattggcggtgccattggtacggggttgtt

SEQ ID NO: 40122 - DNA, 75 bp, synthetic construct
  source 1..75: mol_type = other DNA
ctgcccgcaggtatgtcggagcgagaacttgatgcccgtctttacgggagtgcctccacagtacctgtcgtactt

SEQ ID NO: 40123 - DNA, 75 bp, synthetic construct
  source 1..75: mol_type = other DNA
acctgctataccaacctcccctcggctggtgcgatgcgtggttatggcgcgccacaagtcgtatttgccgttgag

SEQ ID NO: 40124 - DNA, 75 bp, synthetic construct
  source 1..75: mol_type = other DNA
cctgccggaagtctttacctgttctgtggtcatcgcctggcatctgatatcgaaatcatgatgcgtgaacgcttc

SEQ ID NO: 40125 - DNA, 75 bp, synthetic construct
  source 1..75: mol_type = other DNA
gaactcaaactgatggacgaaagattatttatcgatgcggcgatgggttttgtcctgcctgaagcggctcattaa

SEQ ID NO: 40126 - DNA, 75 bp, synthetic construct
  source 1..75: mol_type = other DNA
tcgcaccgttacgtaactaccttcaggacgttcccggtttcgacctgtcgctggtcaggacaccatcagcctgga

SEQ ID NO: 40127 - DNA, 75 bp, synthetic construct
  source 1..75: mol_type = other DNA
acgatagtgactatgacgccgcgcaggcgttgtgtgacgagctgatgaacgacatcgggcgaaccatcaacaaag

SEQ ID NO: 40128 - DNA, 75 bp, synthetic construct
  source 1..75: mol_type = other DNA
tctctgtttccgtatccgttccttataccgacgtctggacacataaacccgttcagttttacccaggtaaacacc

SEQ ID NO: 40129 - DNA, 75 bp, synthetic construct
  source 1..75: mol_type = other DNA
atgattaatttgaaagcagttattccggtagcaggtctggggatgcacatgttgcctgccacgaaggcaatccct

SEQ ID NO: 40130 - DNA, 75 bp, synthetic construct
  source 1..75: mol_type = other DNA
gggagccaatacttccggtccgtgggagtcatcgctgacgccctatatgattgaccccattaatacattatcagc

SEQ ID NO: 40131 - DNA, 75 bp, synthetic construct
  source 1..75: mol_type = other DNA
cagtgcccacttaaaactcgaagtgctattgttaacgccattcgtcaggagttaactccgcatctgtctgtcctg

SEQ ID NO: 40132 - DNA, 75 bp, synthetic construct
  source 1..75: mol_type = other DNA
cgccgagcaccaatccgacggcaactattattaataacagcatcagtatgctggcggcgggtaacagcgtctatt

SEQ ID NO: 40133 - DNA, 75 bp, synthetic construct
  source 1..75: mol_type = other DNA
aaagagatgctaccgatcgttgacaagccgatgatccaatacatcgtcgacgaagttgttgctgcagggatcaaa

SEQ ID NO: 40134 - DNA, 75 bp, synthetic construct
  source 1..75: mol_type = other DNA
tcattcgtaatattttgtgcgaacaactggccccggtcgccccaaaaaacatcagcggaaacggtatttttcagt

SEQ ID NO: 40135 - DNA, 75 bp, synthetic construct
  source 1..75: mol_type = other DNA
agaagatatctcggtcgggaggaaatgagccggtattttacgggcattgcacttgaggtctggcccggaagtgaa

SEQ ID NO: 40136 - DNA, 75 bp, synthetic construct
  source 1..75: mol_type = other DNA
atgtccaaactcgatctaaacgccctgaacgaactgccaaaggtagaccggattctggcgctggcggaaactaac

SEQ ID NO: 40137 - DNA, 75 bp, synthetic construct
  source 1..75: mol_type = other DNA
ggagcaatggttaaagaagtatcgacatttgataatgtttattgtgatcagttggaatgtttgtttaacgaacaa

SEQ ID NO: 40138 - DNA, 75 bp, synthetic construct
  source 1..75: mol_type = other DNA
atgaatggaattaatttagtaaaaatcaaattaaccttttccgatacataccaggtgaccttttctcgtgttcga

SEQ ID NO: 40139 - DNA, 75 bp, synthetic construct
  source 1..75: mol_type = other DNA
acggtcaaaaaagcggaaatcaaggtggagctgctgccgaagtacgccgcctgggcggagggtgtcctggctgcc

SEQ ID NO: 40140 - DNA, 75 bp, synthetic construct
  source 1..75: mol_type = other DNA
gcgattgagatgtacaaaccaactgtgcgcatcgtggaagttaatgtgccacgcgccgctggcattcgcatcaaa

SEQ ID NO: 40141 - DNA, 75 bp, synthetic construct
  source 1..75: mol_type = other DNA
atattccgccaggatgaacggcgtctgggcatagagtacgaccaccacaaccggccggaaacactcaccgacgtg

SEQ ID NO: 40142 - DNA, 75 bp, synthetic construct
  source 1..75: mol_type = other DNA
aacccctcagcgtctatccccaactataccgcctcacccggtgagaaaaagtactatggcggtgtgacggcgacc

SEQ ID NO: 40143 - DNA, 75 bp, synthetic construct
  source 1..75: mol_type = other DNA
agcaattgagatgtacaaaccaactgtgcgcattgtggaagttaatgtgccacgcgtcgctggcattcgcatcaa

SEQ ID NO: 40144 - DNA, 75 bp, synthetic construct
  source 1..75: mol_type = other DNA
ccccgacgcctcccaaaccgattgcgtttaataatgacgttatcctcgataaaacagaaaaaacgttaactattc

SEQ ID NO: 40145 - DNA, 75 bp, synthetic construct
  source 1..75: mol_type = other DNA
aggcgaagggaatcaggcggtgctggtcagtgggaaagacgccacaggcaatacggtcactggcgcgcagctgct

SEQ ID NO: 40146 - DNA, 75 bp, synthetic construct
  source 1..75: mol_type = other DNA
gatggtgcaggaattaaggcaattactggcggcgacaaggtggcaattgatccgaaacataaagccccctactcc

SEQ ID NO: 40147 - DNA, 75 bp, synthetic construct
  source 1..75: mol_type = other DNA
actatcagcagactctgcgcaacctggcgcagtgcggcattcgcaccgtgtgctacaacttcatgccggtgctcg

SEQ ID NO: 40148 - DNA, 75 bp, synthetic construct
  source 1..75: mol_type = other DNA
cacagtgcgatccgaacgctgaaatctcggcagaagaacgtgaatggctggatgcgccggcggctggtcaggagg

SEQ ID NO: 40149 - DNA, 75 bp, synthetic construct
  source 1..75: mol_type = other DNA
ggaaaaaccactgttgatggaaaagattccacgggtaccaaaatcgcgggcaatatcggcattgtaaatctggat

SEQ ID NO: 40150 - DNA, 75 bp, synthetic construct
  source 1..75: mol_type = other DNA
atggaatttcacgaaaacaaagccaaagcgccgtttactggcatcgtacaactctggcaggcggtgaggacctgg

SEQ ID NO: 40151 - DNA, 75 bp, synthetic construct
  source 1..75: mol_type = other DNA
attggtaccatgaacactgctgatcattcgcttactgcacttgatactgcactacgtcgcagatttgattttgaa

SEQ ID NO: 40152 - DNA, 75 bp, synthetic construct
  source 1..75: mol_type = other DNA
ccatcgaagagaatggtggctgggttgtcggttatgaaaactgcaccggggcgaaagcgacagagcaatgcgtgg

SEQ ID NO: 40153 - DNA, 75 bp, synthetic construct
  source 1..75: mol_type = other DNA
aaaaaatgggtaccagacgtggtctggaacgaatcctgcccgttcagcaagagcgaaggtacgctcaaaaagacg

SEQ ID NO: 40154 - DNA, 75 bp, synthetic construct
  source 1..75: mol_type = other DNA
tatgatgattctgcggtcttgctgacgaagggtgtaaacctgattggtgcgcttgtacctgatctggttgctggc

SEQ ID NO: 40155 - DNA, 75 bp, synthetic construct
  source 1..75: mol_type = other DNA
accagacagcaagttgccggatgacgccatgatctggctaaataatgaaggacttaccagtatagaggatatttt

SEQ ID NO: 40156 - DNA, 75 bp, synthetic construct
  source 1..75: mol_type = other DNA
catttataccggtgcttattatctggcaatagcatttaaaaaatggggcgtcacctgggaggccgttggtgcata

SEQ ID NO: 40157 - DNA, 75 bp, synthetic construct
  source 1..75: mol_type = other DNA
gcaaacctgtagcgggatttctgatctgcaggtgccgctgcgtgacttgtggagtccggctacctgtccggtcag

SEQ ID NO: 40158 - DNA, 75 bp, synthetic construct
  source 1..75: mol_type = other DNA
ccttcaaagacgcagacatcgtttatccgaagtcatgggcaccttacaaagtgatggaagagcgtactgaattgc

SEQ ID NO: 40159 - DNA, 75 bp, synthetic construct
  source 1..75: mol_type = other DNA
ttcatcgaacagattttcacgaggattaccaaacggtaatggcatacaaagtttctgaagtcatcgctgcaatcc

SEQ ID NO: 40160 - DNA, 75 bp, synthetic construct
  source 1..75: mol_type = other DNA
atgcaggtagactcccagcattttaacgaactggcccgctacggaattaagccggaacatctgacaacagatccc

SEQ ID NO: 40161 - DNA, 75 bp, synthetic construct
  source 1..75: mol_type = other DNA
cgtgaacactttggttcgctggaaaacctgaaaggcaaaaaaatcgccatgacctgggcctactccccaagctat

SEQ ID NO: 40162 - DNA, 75 bp, synthetic construct
  source 1..75: mol_type = other DNA
tgcgtgaggcggcggaacgtgcaattcaagcaatggaacgcctgttaatgttgccagctgctgatgatttgttaa

SEQ ID NO: 40163 - DNA, 75 bp, synthetic construct
  source 1..75: mol_type = other DNA
gaagagtgtacctatgacaattacagtactgggaaccccactgagctggaatgccaaatactcagcagatgcctc

SEQ ID NO: 40164 - DNA, 75 bp, synthetic construct
  source 1..75: mol_type = other DNA
ggtgcataaactgcgcccggatgtgctgtttctcgatatccagatgccgcgcatcagtggtctggaaatggtggg

SEQ ID NO: 40165 - DNA, 75 bp, synthetic construct
  source 1..75: mol_type = other DNA
cacattcatttaatcttgggctggaggtttttcgtgcccgaattgcagccaatgggcgcggagatattacagtag

SEQ ID NO: 40166 - DNA, 75 bp, synthetic construct
  source 1..75: mol_type = other DNA
agagcgaatgagaagtctgttacaatgccatctggtctaagtcgggagcagagaagagcatgggcagcggagcag

SEQ ID NO: 40167 - DNA, 75 bp, synthetic construct
  source 1..75: mol_type = other DNA
tcaatgtccaattacactggagcaaccagcagaaggcgtattggtcagaaattcagagagctcagaagtatgctg

SEQ ID NO: 40168 - DNA, 75 bp, synthetic construct
  source 1..75: mol_type = other DNA
ttctgccgtcattactcagcggctgtacggcatttaatgccacgcctgttcctgacaccacgcctccggctctgg

SEQ ID NO: 40169 - DNA, 75 bp, synthetic construct
  source 1..75: mol_type = other DNA
taccgaaatcttgccgctttatgcgcggctttcgaacagcgaacagaaccgcgtgttccagtcgcacagcggacg

SEQ ID NO: 40170 - DNA, 75 bp, synthetic construct
  source 1..75: mol_type = other DNA
agccaagctgggactgtactttaacccgtatggcaaagtgctggagctgatcgacgactgtatctcctgcggtgt

SEQ ID NO: 40171 - DNA, 75 bp, synthetic construct
  source 1..75: mol_type = other DNA
attgtaaaaacctgtacggtcagggatttgaagaatgattttgtgaactgcgatgagaaaggtgagggacaatga

SEQ ID NO: 40172 - DNA, 75 bp, synthetic construct
  source 1..75: mol_type = other DNA
ccgtgcgcagcgcgatgactggctgaagagagagatacagagcgtatacgatgaaaatcacaaggtatacggtgt

SEQ ID NO: 40173 - DNA, 75 bp, synthetic construct
  source 1..75: mol_type = other DNA
tccagaacatcaggaaaagtgatggtctgtggtggtgatgtcttctgccttgacggtgaatgcgataaggcacag

SEQ ID NO: 40174 - DNA, 75 bp, synthetic construct
  source 1..75: mol_type = other DNA
ccgggtgtgcagctttgcattacctgtcaggaaatcgcagagctgaaaggcaaacattacaacgggggtgctgta

SEQ ID NO: 40175 - DNA, 75 bp, synthetic construct
  source 1..75: mol_type = other DNA
ccgggtgtgcaactttgcattacctgtcaggaaatcgcagagctgaaaggcaaacattacaacggaggtgctgta

SEQ ID NO: 40176 - DNA, 75 bp, synthetic construct
  source 1..75: mol_type = other DNA
tatactggcgttcgccctggtgagctgtgtgcacttggatgggaggacatagatctgaaaaatggaacaatgatg

SEQ ID NO: 40177 - DNA, 75 bp, synthetic construct
  source 1..75: mol_type = other DNA
gacagtattgcttaatgaagaagaatcttttgcgcgggcaatcgagttgattgccgcaactgaagatgttcaggt

SEQ ID NO: 40178 - DNA, 75 bp, synthetic construct
  source 1..75: mol_type = other DNA
accgattttgccagatacgaccgtgaagatcagcacggaaacaagatcagtctgaatgaacagcaaagaaaggcg

SEQ ID NO: 40179 - DNA, 75 bp, synthetic construct
  source 1..75: mol_type = other DNA
aaagacattctttcaccggatgcaccgtttatccagaccggcagggatgtggtgaaccgggctgacagcattgtg

SEQ ID NO: 40180 - DNA, 75 bp, synthetic construct
  source 1..75: mol_type = other DNA
tctgtgacggatctcagcggcaataccggcaacacctcccgcaccattaccgtcgacagccaggccccggcctta

SEQ ID NO: 40181 - DNA, 75 bp, synthetic construct
  source 1..75: mol_type = other DNA
ggaaggtgactccgcaggcggatctgccaagcaggcgcgcgatcgtgaatatcaggcgatcatgccgctgaaagg

SEQ ID NO: 40182 - DNA, 75 bp, synthetic construct
  source 1..75: mol_type = other DNA
accggcctgatgacccgcgacaattacagaacggtaaataacattacccggggtaagcatccggaggcgaaacaa

SEQ ID NO: 40183 - DNA, 75 bp, synthetic construct
  source 1..75: mol_type = other DNA
gactacgaggaatttattaaatggatattaacctttggcatattaccaattgcatcttcagttttttggtcagta

SEQ ID NO: 40184 - DNA, 75 bp, synthetic construct
  source 1..75: mol_type = other DNA
tcagtgggaggtcgttcctgcaaataatattaaagatccgttcacagcgtttgaaaatgcattatttgcagcgac

SEQ ID NO: 40185 - DNA, 75 bp, synthetic construct
  source 1..75: mol_type = other DNA
caaatgatgatattgagagctacgcagaatttagtgagggagtcactaatatcattattatgggcggcaatgtat

SEQ ID NO: 40186 - DNA, 75 bp, synthetic construct
  source 1..75: mol_type = other DNA
tagagattcaactggaaggtacgcgcctgagcgtaaaaggcacgccggagcagccaaaagaagagaaaaaatggc

SEQ ID NO: 40187 - DNA, 75 bp, synthetic construct
  source 1..75: mol_type = other DNA
aaacaccacaaattaattcagcaaaaaaaatcattgacgatgcaataaacgaaagagaaaaagagatagaaaagc

SEQ ID NO: 40188 - DNA, 75 bp, synthetic construct
  source 1..75: mol_type = other DNA
gatggcaacagcggttccgccagccataacgtgcaggttaataccgcgctgccgggcgtcaccattaacgtggtg

SEQ ID NO: 40189 - DNA, 75 bp, synthetic construct
  source 1..75: mol_type = other DNA
tcaacgggcaaaattacaccaccacagccgatgcttccgggaactggagcgtgaccgttccggcgtctgcggttg

SEQ ID NO: 40190 - DNA, 75 bp, synthetic construct
  source 1..75: mol_type = other DNA
ctcagtaaccgggagtttacggaagatgccattaagatgagaaaatatgaaccttatcttctcaatgataattcc

SEQ ID NO: 40191 - DNA, 75 bp, synthetic construct
  source 1..75: mol_type = other DNA
gtcggggaatcgcgggtcagtcagttacacagccaggccattaaacggttacgcactaaactgggtaagttataa

SEQ ID NO: 40192 - DNA, 75 bp, synthetic construct
  source 1..75: mol_type = other DNA
aggcgaagggaatcaggcagtgctggtcagcgggaaagatgccacgggcaatacggtcaccggcgcgcagctgtt

SEQ ID NO: 40193 - DNA, 75 bp, synthetic construct
  source 1..75: mol_type = other DNA
caactgggcggcgggaccaatatcgccagtgccgtggagtatggtcggcaacttattgaacaacctgcaaaaagt

SEQ ID NO: 40194 - DNA, 75 bp, synthetic construct
  source 1..75: mol_type = other DNA
agcatacgaaatgctcccacagaagttccggtaacaaatctggacgcccccagcgtggtagcaaccacactcatt

SEQ ID NO: 40195 - DNA, 75 bp, synthetic construct
  source 1..75: mol_type = other DNA
ggactgccaggatcaccggagactggaaatacacggatgaatatcgtgaggtgacgataccgcactcacagttcc

SEQ ID NO: 40196 - DNA, 75 bp, synthetic construct
  source 1..75: mol_type = other DNA
gcataagatcaaacgtcacacttcacgacgattcagaagactggatgcctatgtggaatgatacttctcacaata

SEQ ID NO: 40197 - DNA, 75 bp, synthetic construct
  source 1..75: mol_type = other DNA
caggcggtgacaaggtggctatcgatccgaaacacaaagcgccctattccacgcgcgttcctgcggtagtgctgg

SEQ ID NO: 40198 - DNA, 75 bp, synthetic construct
  source 1..75: mol_type = other DNA
tgtatgacccggctgtacagcgtccgttgcgtcagacccgcacccgtaagccgttccctgaatcactaccccgtg

SEQ ID NO: 40199 - DNA, 75 bp, synthetic construct
  source 1..75: mol_type = other DNA
ttaatgcctcggtgaccaacgccgttggcaacaccggtagcggcacgcgcgatatcaccatcgatgccagtctgc

SEQ ID NO: 40200 - DNA, 75 bp, synthetic construct
  source 1..75: mol_type = other DNA
accggcaaaacagcagattgtctgtagtcgcagttttggtgaacgaatcacagacaaagatgccatgcaccaggc

SEQ ID NO: 40201 - DNA, 75 bp, synthetic construct
  source 1..75: mol_type = other DNA
aaatgcacaaagtcaaatggaattctggcgagatccctatggtgctttttccagcgtgtttggaaatgatgattc

SEQ ID NO: 40202 - DNA, 75 bp, synthetic construct
  source 1..75: mol_type = other DNA
aattgatggcggcgaaggtgtactgttgattatcaaaaattacaccggcgatattcttaacttcgaaacagcaac

SEQ ID NO: 40203 - DNA, 75 bp, synthetic construct
  source 1..75: mol_type = other DNA
gtctggagaaaaaacgcagctactgtcagtttgattcgaagctggcgcagatagtccagcagcaggggcgcaacg

SEQ ID NO: 40204 - DNA, 75 bp, synthetic construct
  source 1..75: mol_type = other DNA
tgtccgtgctttcaccggtcaggcgaaattttgtaagaaggctgcagccggatacagcaactgctgtaaggacag

SEQ ID NO: 40205 - DNA, 75 bp, synthetic construct
  source 1..75: mol_type = other DNA
ggattatatccatgaaactgctatccgctctttggatgcatatcctgtaaactcagaacatcaggacttaaatta

SEQ ID NO: 40206 - DNA, 75 bp, synthetic construct
  source 1..75: mol_type = other DNA
tgaagggatcatcccggcgctggaatcctcccacgccctggcccatgcgctgaaaatgatgcgcgaaaatccgga

SEQ ID NO: 40207 - DNA, 75 bp, synthetic construct
  source 1..75: mol_type = other DNA
caggcgctggttaatgtcggcgcacaaatagccgcaatgacaccgggcgagctggcttcctggcttgcggagaat

SEQ ID NO: 40208 - DNA, 75 bp, synthetic construct
  source 1..75: mol_type = other DNA
cgctaccgtacaggccaatttaagctggagcgtggacgttccggcggcggatattcaggctatcggcaacggttc

SEQ ID NO: 40209 - DNA, 75 bp, synthetic construct
  source 1..75: mol_type = other DNA
cggaaggcgattttgaccgttcattctctgatggcgttctcgaagatatcgccgaacagcttcgtaaaggagtca

SEQ ID NO: 40210 - DNA, 75 bp, synthetic construct
  source 1..75: mol_type = other DNA
caacagttcagcggtcagcctcagccgcaaccgccggagggggaggattacgggttttcagacgatatcccgttc

SEQ ID NO: 40211 - DNA, 75 bp, synthetic construct
  source 1..75: mol_type = other DNA
atgagtgcacgtggtatcaacaaggtcatcctcgtcgggcgtctgggtaatgatccggaagtccgttacatcccc

SEQ ID NO: 40212 - DNA, 75 bp, synthetic construct
  source 1..75: mol_type = other DNA
cacaggcattaccatccccccgcctgacagaaatatttggtgtacagcctcacctgagcgcccgaatagaacttc

SEQ ID NO: 40213 - DNA, 75 bp, synthetic construct
  source 1..75: mol_type = other DNA
aatattcagttaaccaaaaccggctttaccaatgcggcgggccattgtctggtgatgcgtacggttatcaataat

SEQ ID NO: 40214 - DNA, 75 bp, synthetic construct
  source 1..75: mol_type = other DNA
acgctgaccgcacggaacaggtgcaggagaaagcgtcagtggaggaaatcagtctgccgttgctgacgaaaatgt

SEQ ID NO: 40215 - DNA, 75 bp, synthetic construct
  source 1..75: mol_type = other DNA
ccgaactgttcccgatgtcgaaaataaacgacgccatccagcatgtgcgcaacggtaaggcgcgttaccgcgtgg

SEQ ID NO: 40216 - DNA, 75 bp, synthetic construct
  source 1..75: mol_type = other DNA
tcacatgcgcgactggtggcagccgacaaaagcaaacttcttcggacacctgaaaaagccgcagattatcgcagc

SEQ ID NO: 40217 - DNA, 75 bp, synthetic construct
  source 1..75: mol_type = other DNA
cacatgcataccatcagacggaggagggattggggtaccgtgttcatccatcctatgacagtttagcccctgtcg

SEQ ID NO: 40218 - DNA, 75 bp, synthetic construct
  source 1..75: mol_type = other DNA
tatgtggctttaatatgcgccacgacgacaccaccgtcgcgttggaagcggcgcatataaaatggaaacagcacg

SEQ ID NO: 40219 - DNA, 75 bp, synthetic construct
  source 1..75: mol_type = other DNA
ccggcacaacacagactgccgcggcaaatacggtgaagtggcaggaaattctggctctgaaacacagcattgatc

SEQ ID NO: 40220 - DNA, 75 bp, synthetic construct
  source 1..75: mol_type = other DNA
gcgctatgccgttgatgctgaccggctgttccacgatgtcgtcagttaactggtctgccgctaacccgtggaact

SEQ ID NO: 40221 - DNA, 75 bp, synthetic construct
  source 1..75: mol_type = other DNA
gcgcactgcttgctggtgaggaaaacgccaggctgcgtgcagcccactggttacatgagagggggctgaaagtat

SEQ ID NO: 40222 - DNA, 75 bp, synthetic construct
  source 1..75: mol_type = other DNA
gcgcatataaaatggaaacagcacggcggtccttgtgaaattcctaatggcctggcgctttgcgcaattcaccat

SEQ ID NO: 40223 - DNA, 75 bp, synthetic construct
  source 1..75: mol_type = other DNA
ttaattaccagccagggattttccggagaggccacggatatgtttcttatgatggcctgcctgtctctgtttgaa

SEQ ID NO: 40224 - DNA, 75 bp, synthetic construct
  source 1..75: mol_type = other DNA
gagatgcgtgccggaagcggtgtggtggtgtcctggcgttatggcaacgtatgtgtccagcgtggtgtgcagttg

SEQ ID NO: 40225 - DNA, 75 bp, synthetic construct
  source 1..75: mol_type = other DNA
gattttaaagatcttggcccggaagtcagtttccgccgtatttatgaatacgctggcggcgactggcaggaagat

SEQ ID NO: 40226 - DNA, 75 bp, synthetic construct
  source 1..75: mol_type = other DNA
cttactttgaaacgtttatccgcgaacaaatagaaagtggtcggtataacaatacaagtgaagtcattcgtgccg

SEQ ID NO: 40227 - DNA, 75 bp, synthetic construct
  source 1..75: mol_type = other DNA
ggtgagttgtggctagccgcctgtacgactttcctgaacgggattgagacctcactgagggtgacgatgaagctg

SEQ ID NO: 40228 - DNA, 75 bp, synthetic construct
  source 1..75: mol_type = other DNA
atgacatcaaaacgctaaaatcggatgttagtaaattaaaaaccgatcaaggaaactacgcaacaaaatcttatg

SEQ ID NO: 40229 - DNA, 75 bp, synthetic construct
  source 1..75: mol_type = other DNA
attccctgcaggcaacacagcttcagtcggccattgttaaagccatgtatgcagcgacgattgaaagtgaacttg

SEQ ID NO: 40230 - DNA, 75 bp, synthetic construct
  source 1..75: mol_type = other DNA
cggagaagatgaagaaaggcgatgcggctgaacatgcagagcaccatatgaaagacaaccgctgggtgcctggct

SEQ ID NO: 40231 - DNA, 75 bp, synthetic construct
  source 1..75: mol_type = other DNA
ggggatcccgcccgtgaatttaccatgacgcagtccgcgccgctgatggtgttgccggacccggatgagtttgtg

SEQ ID NO: 40232 - DNA, 75 bp, synthetic construct
  source 1..75: mol_type = other DNA
gaccggcggtaacggtgaggcagtgtaccagatagtgcggcggttctggcctgccgccgtaccgtacacgttcac

SEQ ID NO: 40233 - DNA, 75 bp, synthetic construct
  source 1..75: mol_type = other DNA
aatggggttcggtgatacacacctccgttgctatgttcttcatgatgatcaggctggtcagcacatacacattat

SEQ ID NO: 40234 - DNA, 75 bp, synthetic construct
  source 1..75: mol_type = other DNA
gaatacgccgttctggcctgatgtggatctgtcggagttccgcagtgtgatgcgcactgacggtacggtgacgca

SEQ ID NO: 40235 - DNA, 75 bp, synthetic construct
  source 1..75: mol_type = other DNA
atctggtgcgcaataacggaatagcggccaatgcggtggccctgcataaggatcacattgtcgggcatatgtttc

SEQ ID NO: 40236 - DNA, 75 bp, synthetic construct
  source 1..75: mol_type = other DNA
agtggttgccaccggcgcagagtgccgatgcggccctgctgcccgcgttgcgtctggggaatgcccgtgcagatg

SEQ ID NO: 40237 - DNA, 75 bp, synthetic construct
  source 1..75: mol_type = other DNA
gcaagaggcacttaatgcaatccctgaatcagttggtagcacaataaagtacaagagcggggacaatgggtctga

SEQ ID NO: 40238 - DNA, 75 bp, synthetic construct
  source 1..75: mol_type = other DNA
taaatcgtcagctattactcctgctgaggcgacaactgtatgtgcgcagactgattcaaccaataaggttacata

SEQ ID NO: 40239 - DNA, 75 bp, synthetic construct
  source 1..75: mol_type = other DNA
gtaaaggagctggaagagcgttatgctgaaccgttgccagcgcttgaagcctccgttgaggcgttgagcgagaaa

SEQ ID NO: 40240 - DNA, 75 bp, synthetic construct
  source 1..75: mol_type = other DNA
tagtaagtatgccatcgcaactcttcactatggcgcgttcttttaaagcagttgccaatggcaaaatttatatcg

SEQ ID NO: 40241 - DNA, 75 bp, synthetic construct
  source 1..75: mol_type = other DNA
aaagacaaccgctgggtgcctggctggatgtgtgcaccacgcccacagacggatgccactgaacgcaccgataac

SEQ ID NO: 40242 - DNA, 75 bp, synthetic construct
  source 1..75: mol_type = other DNA
tcactatctaagacgcatagtgcgatccatgatttaactcttgatgctttaaataagaatacagcagtgttgagt

SEQ ID NO: 40243 - DNA, 75 bp, synthetic construct
  source 1..75: mol_type = other DNA
tggatggattcctgaaaggtaaatgcatcccccgagatttaaaggttaacgaaacaaacgctgaatatctggtgc

SEQ ID NO: 40244 - DNA, 75 bp, synthetic construct
  source 1..75: mol_type = other DNA
ttttgccgggcgcaacgataagaagaagccaatctgcgagaacgcggtattgcttgtgatcaaacaaatcggcta

SEQ ID NO: 40245 - DNA, 75 bp, synthetic construct
  source 1..75: mol_type = other DNA
gaacttctcactacgctaagctccatcaccaaaccagtatcagagtttgtttttgccgggcgcaacgataagaag

SEQ ID NO: 40246 - DNA, 75 bp, synthetic construct
  source 1..75: mol_type = other DNA
cttggcttggaaaaatgtctgaccgatttggtcggcgcccagtgctgttgttgtcattaataggcgcatcgctgg

SEQ ID NO: 40247 - DNA, 75 bp, synthetic construct
  source 1..75: mol_type = other DNA
tgttctggacgatggcaacgatgggcatcgcggtactgatgttgtctttgtttattttaaaagaaacgcgccctg

SEQ ID NO: 40248 - DNA, 75 bp, synthetic construct
  source 1..75: mol_type = other DNA
acgctgcgcaacatggtggcggcaggtagcgggatcactttactgcctgcgctggctgtgccgccggagcgcaaa

SEQ ID NO: 40249 - DNA, 75 bp, synthetic construct
  source 1..75: mol_type = other DNA
ggataaagacaaaaaagatgaacatggtggcattggtacgccagctacccgcgcagccattctggaaacgctgaa

SEQ ID NO: 40250 - DNA, 75 bp, synthetic construct
  source 1..75: mol_type = other DNA
tgccatctgcgggtcagtgccacagttgatgaagaatgttcgcaagtggtggatttactgcagcaggcctggcgg

SEQ ID NO: 40251 - DNA, 75 bp, synthetic construct
  source 1..75: mol_type = other DNA
tgaatcactccctcgtatggttcgtgactcccttccggaactggcacagcaggcagaagcacgcagacagaccgg

SEQ ID NO: 40252 - DNA, 75 bp, synthetic construct
  source 1..75: mol_type = other DNA
ccggcctgaaaccgtccgtagtgaagaaaggcgagaatcagtatgccgttgaaatggataatcctgcgttctctg

SEQ ID NO: 40253 - DNA, 75 bp, synthetic construct
  source 1..75: mol_type = other DNA
tacgatccgccgcaaatgatgtattcgcttcgtgatagcaaggggcgcgacctctttttctcggaaagccgggat

SEQ ID NO: 40254 - DNA, 75 bp, synthetic construct
  source 1..75: mol_type = other DNA
atgtttatcagtgataaagtgtcaagcatgacaaagttgcagccgaatacagtgatccgtgccgccctggacctg

SEQ ID NO: 40255 - DNA, 75 bp, synthetic construct
  source 1..75: mol_type = other DNA
tatagccggtacagtaattggcggtgggatgtttgctttacctgttgaccttgccggagcctggtttttttgggg

SEQ ID NO: 40256 - DNA, 75 bp, synthetic construct
  source 1..75: mol_type = other DNA
ggtcttttctgctgcgctaatccgccgtgcgctgattgttgctgcagtctgtctggccgtagcgatggggcttta

SEQ ID NO: 40257 - DNA, 75 bp, synthetic construct
  source 1..75: mol_type = other DNA
tcataatgtttgcaggaaatacatattcctctgactgttttgaacttgctggcagagattacaaaatagatcccg

SEQ ID NO: 40258 - DNA, 75 bp, synthetic construct
  source 1..75: mol_type = other DNA
atgagaaaatggcttctgacgatctgcctgttgtttataaatatgacctgcgaggctggtgattgctttgatctg

SEQ ID NO: 40259 - DNA, 75 bp, synthetic construct
  source 1..75: mol_type = other DNA
cagccagcagtttcatgcgttgcgccgaagctgtcggagcgcgcattacagacatcccggtagacctcaacacgc

SEQ ID NO: 40260 - DNA, 75 bp, synthetic construct
  source 1..75: mol_type = other DNA
atgcaaaactggaatgaagatttgcataccgctggatttatcatcgacgccaacccgcagtcagcaaaaattgcg

SEQ ID NO: 40261 - DNA, 75 bp, synthetic construct
  source 1..75: mol_type = other DNA
taaccgcaacgtgcagaccgtgctggcagaggaaatgtcagacgcggcgcagagcgcaatgcttgccgccaccgg

SEQ ID NO: 40262 - DNA, 75 bp, synthetic construct
  source 1..75: mol_type = other DNA
gtagcgggatcactttactgcctgcgctggctgtgccgccggagcgcaaacgcgatggggttgtttatctgccgt

SEQ ID NO: 40263 - DNA, 75 bp, synthetic construct
  source 1..75: mol_type = other DNA
agagcagaaaaagcattagttgatatcgtgcgccattctcaacatcctttagatgaaaaacaattagcagcactg

SEQ ID NO: 40264 - DNA, 75 bp, synthetic construct
  source 1..75: mol_type = other DNA
gcgttttcgtaaaaatccgtctcttggaatgggcgactggcgattctttattagtgagccgggaattatttcagt

SEQ ID NO: 40265 - DNA, 75 bp, synthetic construct
  source 1..75: mol_type = other DNA
ctgaaatccttattcttcggcagtgcgcgggaacaatgaaggtaaaaagcatcggcagtctgattggccgtagtg

SEQ ID NO: 40266 - DNA, 75 bp, synthetic construct
  source 1..75: mol_type = other DNA
gcccagcaaaatggcgttgcggtggtcggtatcagccggatgggtcacagcggcgcaatctcttattttgtgcag

SEQ ID NO: 40267 - DNA, 75 bp, synthetic construct
  source 1..75: mol_type = other DNA
tggtcaacagattcagacattttgtagttcctttcaccgacgggtacacgaacgtattacggagcataatcacac

SEQ ID NO: 40268 - DNA, 75 bp, synthetic construct
  source 1..75: mol_type = other DNA
gtgtccaggagagaaatcgccagaaaatttggaatgccgttgcgcacagtgaataactacgtttatttcgacagg

SEQ ID NO: 40269 - DNA, 75 bp, synthetic construct
  source 1..75: mol_type = other DNA
cgcgtattgctcgtgaaattgctgtacccaatagtgatgtccgaaaaaacctccgttctcacatgaaacagccat

SEQ ID NO: 40270 - DNA, 75 bp, synthetic construct
  source 1..75: mol_type = other DNA
atggtcatacattattgttgatcactaaaccttctttgcaggcgacagctctcttgcagcaccttaaacaatcgc

SEQ ID NO: 40271 - DNA, 75 bp, synthetic construct
  source 1..75: mol_type = other DNA
gagaaaaaaggcgtcatcacgataaagcgtggcgtggcccgggggataacgcttcataccgcggtgaaggacgac

SEQ ID NO: 40272 - DNA, 75 bp, synthetic construct
  source 1..75: mol_type = other DNA
agcaggtgctggatatgctgatttcttaccagcaagagcgtggctttccgccaaccaatcaggaggtggcaacca

SEQ ID NO: 40273 - DNA, 75 bp, synthetic construct
  source 1..75: mol_type = other DNA
atgacgacgttaactcaatgccagcagcaggtgctggatatgctgatttcttatcagaaagaacgtggctttccg

SEQ ID NO: 40274 - DNA, 75 bp, synthetic construct
  source 1..75: mol_type = other DNA
gctggggttactgccggaagtggtcgaaaccatcgaagaacaagcggaacgagcatggatccagtatcagggatt

SEQ ID NO: 40275 - DNA, 75 bp, synthetic construct
  source 1..75: mol_type = other DNA
atgagtaagttcaccacaccggccattctggagatgctggatgattaccgctggcggctggttgagccgtttgaa

SEQ ID NO: 40276 - DNA, 75 bp, synthetic construct
  source 1..75: mol_type = other DNA
acggtcaaaaaagcggaaatcaaagtggagctgctgccaaagtacgccgcctgggcggagggtgtcctggctgcc

SEQ ID NO: 40277 - DNA, 75 bp, synthetic construct
  source 1..75: mol_type = other DNA
gatgattgtgcccaccgcttccggctggagtctggcacaactggtcatgctctggggcgcatccatcatgggcat

SEQ ID NO: 40278 - DNA, 75 bp, synthetic construct
  source 1..75: mol_type = other DNA
cagtaatatgatcagtgatattagtggcattatttgcgatggtgcatcaaatagttgtgccatgaaagtgtctac

SEQ ID NO: 40279 - DNA, 75 bp, synthetic construct
  source 1..75: mol_type = other DNA
ttcaaaattggtcgcacacttgccgacgagcattatgaaaaatcacgcgtaacagtagttgatgacagtgaccct

SEQ ID NO: 40280 - DNA, 75 bp, synthetic construct
  source 1..75: mol_type = other DNA
aggcttatctgcctgaccatgtaattaattttctgggcggacgtgacggtgttaatatgctggggaatatggttt

SEQ ID NO: 40281 - DNA, 75 bp, synthetic construct
  source 1..75: mol_type = other DNA
ttactgattcatcatcaaaaccactacaggttgtctggaacccggtattttatccgggaaagacgattcatcctc

SEQ ID NO: 40282 - DNA, 75 bp, synthetic construct
  source 1..75: mol_type = other DNA
gaacgggctaaatatgttgtacgctaccagggcggtcacaacgcaggccatactctcgtaattaacggtgaaaaa

SEQ ID NO: 40283 - DNA, 75 bp, synthetic construct
  source 1..75: mol_type = other DNA
ctgtgatccctgctgctgttctgatgatgttcttcccgcaactggcaatggcagcacagggccaggacctgatgg

SEQ ID NO: 40284 - DNA, 75 bp, synthetic construct
  source 1..75: mol_type = other DNA
tcaatggtgcatcaccagaatcactgcagataacctggacaccgatattttaccctggtagcacggttcattctc

SEQ ID NO: 40285 - DNA, 75 bp, synthetic construct
  source 1..75: mol_type = other DNA
aggtcaaaaatggtaatccaacagttggtatccacgatacctctgaaggtaaagttgttgtagctgaaagcgcgc

SEQ ID NO: 40286 - DNA, 75 bp, synthetic construct
  source 1..75: mol_type = other DNA
ggaaattatccgccgttttggctttggcgaagtagagctgatagaaggtacggggcagatcggctacgacggtaa

SEQ ID NO: 40287 - DNA, 75 bp, synthetic construct
  source 1..75: mol_type = other DNA
aaactcgtcaatgaggtctggcgtcatgccctgaacaaaatcagccaggacaaaaaacataaaaattatgtcgtg

SEQ ID NO: 40288 - DNA, 75 bp, synthetic construct
  source 1..75: mol_type = other DNA
ctcattcttcaactctcgcctggaacgtgatctcgccaccttcaaacaacaagccgacgtcattatttccaaccg

SEQ ID NO: 40289 - DNA, 75 bp, synthetic construct
  source 1..75: mol_type = other DNA
ctccggctcgctgtcatctggcaagtctggaatatcagtctgtcgccattcgatacaacagtactacccgttatg

SEQ ID NO: 40290 - DNA, 75 bp, synthetic construct
  source 1..75: mol_type = other DNA
gccgcccagggggcaggtcaggacctgatggccgggggtaacgccaccgtcaaggccaccttcggtaaagactcc

SEQ ID NO: 40291 - DNA, 75 bp, synthetic construct
  source 1..75: mol_type = other DNA
ccgtcagtaaggggaaaaaaggtaaagagcttgtggaagagctggctaaggtcattaacgctgacactgatgcgc

SEQ ID NO: 40292 - DNA, 75 bp, synthetic construct
  source 1..75: mol_type = other DNA
agcagggcggcgcactggtcaccagtacggcggcaaccgtcaccggcagcaaccgtctgggcaatttcacggtgg

SEQ ID NO: 40293 - DNA, 75 bp, synthetic construct
  source 1..75: mol_type = other DNA
aacactgacgctggctgccgggggaagtctgagtggcagaacacagctcagtaaaggcgccagtatggtactgaa

SEQ ID NO: 40294 - DNA, 75 bp, synthetic construct
  source 1..75: mol_type = other DNA
tgctggtcggtgcggtcatgtacatgatgaccaaaaacgtcaagttcctggccggttttgccatcatctctgtat

SEQ ID NO: 40295 - DNA, 75 bp, synthetic construct
  source 1..75: mol_type = other DNA
gcagggcgaaggcaccggcaccgccacttcaggcacgatcacgctttccggtacggcaacggaagacggcaccct

SEQ ID NO: 40296 - DNA, 75 bp, synthetic construct
  source 1..75: mol_type = other DNA
gtgcttctgcgcccgtcaaaaagaagtcgttttttcctaaattcacgcgtctgaatatgcttcgcctggttcgtg

SEQ ID NO: 40297 - DNA, 75 bp, synthetic construct
  source 1..75: mol_type = other DNA
ttatcacacaacgttttccgcgccataaactggctgatgacgggacgcccgttcgtgccggtcagaatatcgtga

SEQ ID NO: 40298 - DNA, 75 bp, synthetic construct
  source 1..75: mol_type = other DNA
aacgcggtgattgaggatttcagcggcgaccagaatctgctgatggccccggttttgctgtggctgagggataac

SEQ ID NO: 40299 - DNA, 75 bp, synthetic construct
  source 1..75: mol_type = other DNA
ttcacgcagttaagcagtgcgaccgacagcacgtctgaggcgctcgcagcaacaccgaaagcggtcaaagtggtg

SEQ ID NO: 40300 - DNA, 75 bp, synthetic construct
  source 1..75: mol_type = other DNA
ttgctgtgttgttatccgtcgttgtctggcgatggcagttactttttcacgctaaatgatgggacgtttttacgg

SEQ ID NO: 40301 - DNA, 75 bp, synthetic construct
  source 1..75: mol_type = other DNA
cggtacgtactgctatcggtagttttaacggttcactcgcttccaccagcgccatcgacctgggggcgacagtaa

SEQ ID NO: 40302 - DNA, 75 bp, synthetic construct
  source 1..75: mol_type = other DNA
gcaaaatatgcaaggaatggtttcacccggcattctcaaatcagtggtggtgctgcccggaacacggaactcagt

SEQ ID NO: 40303 - DNA, 75 bp, synthetic construct
  source 1..75: mol_type = other DNA
acggcaattaccgacagatatcagaagaatgtcttgtcagggaggcccgtgccgcctcctattttatggaaacat

SEQ ID NO: 40304 - DNA, 75 bp, synthetic construct
  source 1..75: mol_type = other DNA
gaaatgaaagaaactattcttgatcgcgcggcgcatctaagctgcgcttcactgttgaaagagcatcttcagcag

SEQ ID NO: 40305 - DNA, 75 bp, synthetic construct
  source 1..75: mol_type = other DNA
gaccgcgaaccggtggcgaagtggggaacgaagcgcataacgcttgtgggcgatgcggcgcatccggtggcgcaa

SEQ ID NO: 40306 - DNA, 75 bp, synthetic construct
  source 1..75: mol_type = other DNA
atgaaaatgacagaactggcaccgggcattctggccagcccgtgcgttccgccggcctgctgtcgtaaggcggtt

SEQ ID NO: 40307 - DNA, 75 bp, synthetic construct
  source 1..75: mol_type = other DNA
aataaggctgcaaatgtggctgctcatgccgtggtgaatgccgcactggctgtggcacagggaaataacgctctt

SEQ ID NO: 40308 - DNA, 75 bp, synthetic construct
  source 1..75: mol_type = other DNA
acctacctttggcaaatgggtaggggtgaatttatctgctgagaataagcgccagttatggatcccggaggggtt

SEQ ID NO: 40309 - DNA, 75 bp, synthetic construct
  source 1..75: mol_type = other DNA
cgcgaaaaacatccgtcaaacaaacgctgattaatccaggcgacgttacggttgtcatttatgagccctctgtag

SEQ ID NO: 40310 - DNA, 75 bp, synthetic construct
  source 1..75: mol_type = other DNA
ttatctgacacgaaaatcgctgtgcgaaattcgttacagagacggggacagggaggtggcggctttcatggctta

SEQ ID NO: 40311 - DNA, 75 bp, synthetic construct
  source 1..75: mol_type = other DNA
gaactgagcgagacagagaagcagacggtctcgacactggcaacggttgctgctggcctggccggtggtctggtg

SEQ ID NO: 40312 - DNA, 75 bp, synthetic construct
  source 1..75: mol_type = other DNA
ggctatgtaccgcctgaagttgaaggtgcaccagcacaaccatcaaccagcgccaaaaaagactttatttcgtcg

SEQ ID NO: 40313 - DNA, 75 bp, synthetic construct
  source 1..75: mol_type = other DNA
ggaaaaatgggattgcttgctgtttatacgggtactgttttcatattatctcttccgttaagtatgatatatatt

SEQ ID NO: 40314 - DNA, 75 bp, synthetic construct
  source 1..75: mol_type = other DNA
acatgacgttctcaccgtcccagaatggcacgtcactggacctgcaggccggactggaagcccgtgtccgggaaa

SEQ ID NO: 40315 - DNA, 75 bp, synthetic construct
  source 1..75: mol_type = other DNA
gctggaaaatggcggcagctttacggttaatgccgggggacaggccagcaacaccactgtcggacatcgtggaac

SEQ ID NO: 40316 - DNA, 75 bp, synthetic construct
  source 1..75: mol_type = other DNA
tgctgctgtcacatcagtcccggcactggctgctgacacggtcgtacaggcgggagaaaccgtgagcggcggaac

SEQ ID NO: 40317 - DNA, 75 bp, synthetic construct
  source 1..75: mol_type = other DNA
gaagttgacggcatccaggcgtggtgggatcttgatgcgaaagagatcctcggcgatgaagctgatcagtacgtg

SEQ ID NO: 40318 - DNA, 75 bp, synthetic construct
  source 1..75: mol_type = other DNA
aatgaccatcttcctgctcttcccgttcacccgactggtgcatgtgtggagcgcgccgtttgagtactttactcg

SEQ ID NO: 40319 - DNA, 75 bp, synthetic construct
  source 1..75: mol_type = other DNA
tccaaccgtatggcagaagagcttaaggatgtggcagacaaagtctacacacgagatctctttggcagcgactaa

SEQ ID NO: 40320 - DNA, 75 bp, synthetic construct
  source 1..75: mol_type = other DNA
tcggggtggcaacctccggacagggtatccgggttgtggatgcacagaatggcgccaccacagaagaaggtgcgt

SEQ ID NO: 40321 - DNA, 75 bp, synthetic construct
  source 1..75: mol_type = other DNA
cttcgcgccgctcatccgcatcgaaacagacaacggtgaacgggagaaagcgcagtgccgcagcctggcggagaa

SEQ ID NO: 40322 - DNA, 75 bp, synthetic construct
  source 1..75: mol_type = other DNA
caacaacaatggccgacaggttatctggtcttcgggggtatcccgggacactctcatttacacaggcggtgacca

SEQ ID NO: 40323 - DNA, 75 bp, synthetic construct
  source 1..75: mol_type = other DNA
tttagtgcgaaaaaacgccagtggggtagcagggaggatttggcgtgtgcgcagtggatctgggggcggatcgtg

SEQ ID NO: 40324 - DNA, 75 bp, synthetic construct
  source 1..75: mol_type = other DNA
tctcgacaacaaagacgccagactttaccacctcgaaggcgtgatcagaacgcaggcgatactgctgagggaggg

SEQ ID NO: 40325 - DNA, 75 bp, synthetic construct
  source 1..75: mol_type = other DNA
aatattatcgttacaaaaaaccgggatttgctggcaacctggcagatagacggtgcttactttgagtgtgttgat

SEQ ID NO: 40326 - DNA, 75 bp, synthetic construct
  source 1..75: mol_type = other DNA
atgaaggcgggattgcaacgggtaccgtcattaatgagaagggctggcaggccgtcaaatccggcgcagtggcaa

SEQ ID NO: 40327 - DNA, 75 bp, synthetic construct
  source 1..75: mol_type = other DNA
aacaaatggtgggcagttactgacgatgtggaagaaccggcatcgaaagtaacccactggatgccgctaccggag

SEQ ID NO: 40328 - DNA, 75 bp, synthetic construct
  source 1..75: mol_type = other DNA
ggaaattcagtctctgttgtaagatgtaccctctgatactacgttttcgttttctccgtgtatttaactcactgt

SEQ ID NO: 40329 - DNA, 75 bp, synthetic construct
  source 1..75: mol_type = other DNA
tgccgcgaatacgcggcgacccaggttgacggtcagcgcaaagactttatccgtctgggcgtgctgggcgactgg

SEQ ID NO: 40330 - DNA, 75 bp, synthetic construct
  source 1..75: mol_type = other DNA
atgcaaaaccagatggacccggtgtacacgccggcgcgaaaaatccacctgtaccactgcgaccatcgcggcctg

SEQ ID NO: 40331 - DNA, 75 bp, synthetic construct
  source 1..75: mol_type = other DNA
aagactctgtcatcacggtacgcagactctataatggatatttcggtaatggcacagtcaatatttccaataatg

SEQ ID NO: 40332 - DNA, 75 bp, synthetic construct
  source 1..75: mol_type = other DNA
gttcaggtgtgtttgacccttcagattctggcaaaaatacgcgtttgacccttcagaatctgaccccagatccac

SEQ ID NO: 40333 - DNA, 75 bp, synthetic construct
  source 1..75: mol_type = other DNA
ccggtgtggcggttgctctgtctcttgctgctgtcacgtcagtcccggtactggctgctgacacggttgtacagg

SEQ ID NO: 40334 - DNA, 75 bp, synthetic construct
  source 1..75: mol_type = other DNA
ctcgtcacaggatgaagcccgttacgaagtacggctggagccgcgtatggcgctgctggcccgcagttgccagaa

SEQ ID NO: 40335 - DNA, 75 bp, synthetic construct
  source 1..75: mol_type = other DNA
acgcaaatttctcctcattaagcagccccaatttaaccaataatgaacctattaataaatggtggggagaagtag

SEQ ID NO: 40336 - DNA, 75 bp, synthetic construct
  source 1..75: mol_type = other DNA
ctggtgggtacagccttctgttatccgcaccttcagctcccggggtgacatgagcatgggtacagccgccgccgg

SEQ ID NO: 40337 - DNA, 75 bp, synthetic construct
  source 1..75: mol_type = other DNA
tgcgccggaaggcgattttgaccgctcattctctgatggcgttctcgaagatatcgccgaccagcttcgaaaagg

SEQ ID NO: 40338 - DNA, 75 bp, synthetic construct
  source 1..75: mol_type = other DNA
aacacccgtaccgaggtaagcaccctctgcatcagccagtttcgctacagcgcacaaatccgcccttcttccgtg

SEQ ID NO: 40339 - DNA, 75 bp, synthetic construct
  source 1..75: mol_type = other DNA
atgaccagaaaaccgtggcgtgcggggaaggatttatccacagttgtggagaacatggaaattggcaccgggcag

SEQ ID NO: 40340 - DNA, 75 bp, synthetic construct
  source 1..75: mol_type = other DNA
gtcgtttttttctaaattcactcgtctgaatatgcttcgcctggtacgcgctgtgctcccggctgctgttctgat

SEQ ID NO: 40341 - DNA, 75 bp, synthetic construct
  source 1..75: mol_type = other DNA
accgcaatacagacagaatattcaccctcctgatggtcctgctggttgtggttctgctgatgacggctgcggtca

SEQ ID NO: 40342 - DNA, 75 bp, synthetic construct
  source 1..75: mol_type = other DNA
atcattgatgtgttcgccggatacatcgtgggatggcgggtctcatcgtccatggaaacgacattcgtgctggat

SEQ ID NO: 40343 - DNA, 75 bp, synthetic construct
  source 1..75: mol_type = other DNA
acgaatcgtgagtctttacgagcaggctgccagcgatgatggcgaaatcatgcgaccgaaagaaccaaactggac

SEQ ID NO: 40344 - DNA, 75 bp, synthetic construct
  source 1..75: mol_type = other DNA
tcatcggtgagcgttcagaacgcgcagaacgttttgcggcgttattacaggaaggcgcgattaagcaaaatatcc

SEQ ID NO: 40345 - DNA, 75 bp, synthetic construct
  source 1..75: mol_type = other DNA
catctattgaatccgcaacgcgcagtatcatgacagctaaagatctagcatatctaattaaatttgatgggaatt

SEQ ID NO: 40346 - DNA, 75 bp, synthetic construct
  source 1..75: mol_type = other DNA
ggaagatatcaatggtggtatctccctttcaaaaggaagtgaaaagcttgatgatgctgccaagcaatcaatatt

SEQ ID NO: 40347 - DNA, 75 bp, synthetic construct
  source 1..75: mol_type = other DNA
cgctggttataaacacgcagctggcgatgaaaattggtctgaacgaagccatcgtgttgcagcagctgcattact

SEQ ID NO: 40348 - DNA, 75 bp, synthetic construct
  source 1..75: mol_type = other DNA
atgagcatggggacagccgccgccggcagtaacatgacgttctcaccgtcccggaatggcacgtcactggacctg

SEQ ID NO: 40349 - DNA, 75 bp, synthetic construct
  source 1..75: mol_type = other DNA
taaatataaagttggacgttattgagtttgatgagcatgttccttccttaaagtttagcgtctcaatttcagttg

SEQ ID NO: 40350 - DNA, 75 bp, synthetic construct
  source 1..75: mol_type = other DNA
taacacaggtgcacatacccacaatgtatctggtactgcaaatagtgctggcgcacatactcataccgttccatt

SEQ ID NO: 40351 - DNA, 75 bp, synthetic construct
  source 1..75: mol_type = other DNA
tcaaaacctttgatcgcaaaagcggcaaaggattcattatcccctccgacggtcgtaaagaagtccaggtccata

SEQ ID NO: 40352 - DNA, 75 bp, synthetic construct
  source 1..75: mol_type = other DNA
atgacagagcagaagcgaccggtactgacactgaagcggaaaacagaaggggagacgcctgtccgcagccggaaa

SEQ ID NO: 40353 - DNA, 75 bp, synthetic construct
  source 1..75: mol_type = other DNA
tgtcattaagatttttgaagaaaagatgggtaatgaattaaaaattagaacaagaatgatgaaaatcctccggaa

SEQ ID NO: 40354 - DNA, 75 bp, synthetic construct
  source 1..75: mol_type = other DNA
ggccgggattgtttgacggtaacacgccccggcttcttgcctgtggtatccgggaggttttactggatgaggtgt

SEQ ID NO: 40355 - DNA, 75 bp, synthetic construct
  source 1..75: mol_type = other DNA
ttcaattgcgtgcgttaacccgcaaagtcatcgaaaaaccttttgatgttgctgacggtggcagcctttctgttc

SEQ ID NO: 40356 - DNA, 75 bp, synthetic construct
  source 1..75: mol_type = other DNA
aataaaacaaagaccaatgccagaaaactattcccatcgaataatggaaactttactttctttgatgaacaaatt

SEQ ID NO: 40357 - DNA, 75 bp, synthetic construct
  source 1..75: mol_type = other DNA
tggaatatcaccgcgcgtgttctgcgctacctgattgttgaccggacagcagcgcctgccgggatatctgcggag

SEQ ID NO: 40358 - DNA, 75 bp, synthetic construct
  source 1..75: mol_type = other DNA
tgttctggcagtggggcgagcgttttccgtcactggccggaatggaacgctggcagtggcaggatatgccattct

SEQ ID NO: 40359 - DNA, 75 bp, synthetic construct
  source 1..75: mol_type = other DNA
aggccagacaggcgctgtccatttatctgaacctgcccacgctggatgaggccgtgaacaccctgaaaccctggt

SEQ ID NO: 40360 - DNA, 75 bp, synthetic construct
  source 1..75: mol_type = other DNA
cagatgagtactttaatttagatcctgaagtactcgatatgcttatggtttacgatgcctatatagaaccgacag

SEQ ID NO: 40361 - DNA, 75 bp, synthetic construct
  source 1..75: mol_type = other DNA
tcaaaagggaatccaatttatcccagtacgtttactatacgtctatacgaaccggggtcttccattcagggatgc

SEQ ID NO: 40362 - DNA, 75 bp, synthetic construct
  source 1..75: mol_type = other DNA
gtagtgccgctacgccgggcgcaagatgcagagattgccacggtacaggccgtgcggttgatatagccaaaacag

SEQ ID NO: 40363 - DNA, 75 bp, synthetic construct
  source 1..75: mol_type = other DNA
atcatcgttcgatactgtgggtatcaatgtcggtaattttggtagcggtatcgtaaatgtcagtaatggtgccac

SEQ ID NO: 40364 - DNA, 75 bp, synthetic construct
  source 1..75: mol_type = other DNA
tcctcaccctgagggaggttcttatctcgcagacgcagcagatcaccgtcgcggataaaaccaacatgaaggacg

SEQ ID NO: 40365 - DNA, 75 bp, synthetic construct
  source 1..75: mol_type = other DNA
aactggaataccaggaggtgacggacccgtataccaaagaaagatactttgagtacgcccatgacggcaaactga

SEQ ID NO: 40366 - DNA, 75 bp, synthetic construct
  source 1..75: mol_type = other DNA
acatgttctttggtcgtggtagcgctaaacagtctgcgggcggtgcggcaatcatccacttcctggggggtatcc

SEQ ID NO: 40367 - DNA, 75 bp, synthetic construct
  source 1..75: mol_type = other DNA
tagcgtttggctattctaaagtactaccaccggttattgaacagtttgtcaatccaatttgcatcttcattatca

SEQ ID NO: 40368 - DNA, 75 bp, synthetic construct
  source 1..75: mol_type = other DNA
cccgtataccaaagaaaaatactttgagtacgcccatgacggcaaactgatggggcagctactgataccctcgaa

SEQ ID NO: 40369 - DNA, 75 bp, synthetic construct
  source 1..75: mol_type = other DNA
tgatgaggggatttcacagaaagaatttatccgcacgctgacgccacgcctgcaaaagctgggatggtggggaaa

SEQ ID NO: 40370 - DNA, 75 bp, synthetic construct
  source 1..75: mol_type = other DNA
cggcattaatgaactgattgatgacctgatggagcacatcagtctggaaaacaatgtactattcccgcgcgcgct

SEQ ID NO: 40371 - DNA, 75 bp, synthetic construct
  source 1..75: mol_type = other DNA
actcacagctacggctgggcatcatttccgatgagaataaacagaaattaaccgcgtggatgctatatgcgcaga

SEQ ID NO: 40372 - DNA, 75 bp, synthetic construct
  source 1..75: mol_type = other DNA
tctcacgaactaacaggcaaagacggcggcgcaatccagattgaaacatcaccgatgagcactctattcggaaaa

SEQ ID NO: 40373 - DNA, 75 bp, synthetic construct
  source 1..75: mol_type = other DNA
gaatggtggtggacagcctttcgccgtcgttcaggtgcaacatatcttcacgcctgtcgcgatcagtcacacgct

SEQ ID NO: 40374 - DNA, 75 bp, synthetic construct
  source 1..75: mol_type = other DNA
actccgcgcgttattccggtgaagacgcgaccgatcaaaagaatctgcaaaaactgctggaaacactgaaagacg

SEQ ID NO: 40375 - DNA, 75 bp, synthetic construct
  source 1..75: mol_type = other DNA
cctacaaaaatgtgccgagcgtgactttgggccgtctggcaattgataaaagcattcatcaccagggatatggag

SEQ ID NO: 40376 - DNA, 75 bp, synthetic construct
  source 1..75: mol_type = other DNA
atcgaaccgtttgatgagaaccgtgtgaaaatcaaacacaaactctcatatgttcgcccaactaaccgcgggaaa

SEQ ID NO: 40377 - DNA, 75 bp, synthetic construct
  source 1..75: mol_type = other DNA
cagttaaaggaagaaaactgtaattcgctcttctacccgacaaaatctattgaagtattgttcgaagtaaatgac

SEQ ID NO: 40378 - DNA, 75 bp, synthetic construct
  source 1..75: mol_type = other DNA
gcgtcactggatacgcagggatacagcgttaacgacatcatccatatcctgatggcggaaggaggtcaggtatga

SEQ ID NO: 40379 - DNA, 75 bp, synthetic construct
  source 1..75: mol_type = other DNA
tatgtcgatacggtgggtaagaacacggcgaagatacaggactacataaagcaccagcttgaagaggataaaatg

SEQ ID NO: 40380 - DNA, 75 bp, synthetic construct
  source 1..75: mol_type = other DNA
ggcgtcaaaaaagagattgaacgactggagcgggagctgaaaccgaagccggagccgcagccaaaagcggccacc

SEQ ID NO: 40381 - DNA, 75 bp, synthetic construct
  source 1..75: mol_type = other DNA
tgcgtgaaaatgaatttgtcacatcattgcagtctctgaaagaagctgggcttaaggctggtttttctgcttttg

SEQ ID NO: 40382 - DNA, 75 bp, synthetic construct
  source 1..75: mol_type = other DNA
gtggctactatccctacccctactcatcctgaatttatctggcgcttttactcctgccaaaaacaccactatcac

SEQ ID NO: 40383 - DNA, 75 bp, synthetic construct
  source 1..75: mol_type = other DNA
ggcactggcggcatcactggatgaacagggatacagcgtcagtgacatcatccatatcctgatggcggaaggagg

SEQ ID NO: 40384 - DNA, 75 bp, synthetic construct
  source 1..75: mol_type = other DNA
taaatggatgttcaaagatggcgtagtggtaaagcgaacttataccgaggaagagcagaggcagcaggcggaaaa

SEQ ID NO: 40385 - DNA, 75 bp, synthetic construct
  source 1..75: mol_type = other DNA
gccttaactggtggttctacaggtcaaaatatggcgcagtaatcgttatcttcacagtggtctctttactgatga

SEQ ID NO: 40386 - DNA, 75 bp, synthetic construct
  source 1..75: mol_type = other DNA
gagcggagggcttggagaaggcggctggcagcaaactgctatccaggctgcattgcgtgcgaactggatcagaca

SEQ ID NO: 40387 - DNA, 75 bp, synthetic construct
  source 1..75: mol_type = other DNA
ctatattaccatgaacaagcccaaaatattatacaaagacatcaagatggcttaggaaacaaaaatattgatata

SEQ ID NO: 40388 - DNA, 75 bp, synthetic construct
  source 1..75: mol_type = other DNA
gacgaccagcgcggcgcgtgaccgcagctatgagctgacgttcacggcgataccgtactcagaacgctacggcta

SEQ ID NO: 40389 - DNA, 75 bp, synthetic construct
  source 1..75: mol_type = other DNA
atgtttcatgttgataataattccggcgtggcgaatatgcctgcgctggcaccggcgcagagtaataccaccacc

SEQ ID NO: 40390 - DNA, 75 bp, synthetic construct
  source 1..75: mol_type = other DNA
caggccgagttaaagcagaagcaagcggaagaggcggcagcgaaagcggcggcagatgctaaagcgaaggccgaa

SEQ ID NO: 40391 - DNA, 75 bp, synthetic construct
  source 1..75: mol_type = other DNA
ttaacccgcaacttttcgcgggttaaatttgaacaccgaggcaatacctataacgcctatcaaatcaccaaaaac

SEQ ID NO: 40392 - DNA, 75 bp, synthetic construct
  source 1..75: mol_type = other DNA
gatactgtcctcaacagcctgaccgacaaggtcaaagccattttcagccgcaagcaggcgagcgatgacgggcgt

SEQ ID NO: 40393 - DNA, 75 bp, synthetic construct
  source 1..75: mol_type = other DNA
tcggcaccgaatacctcgaattctgcagccgtgcgacccagaacccgttggccggtaaaaaagctcaccctgacg

SEQ ID NO: 40394 - DNA, 75 bp, synthetic construct
  source 1..75: mol_type = other DNA
atgagtgattcgcgactgctgccaactggctcatcgccgcttgaagtcgccgccgcaaaagcctgtgcggaaatt

SEQ ID NO: 40395 - DNA, 75 bp, synthetic construct
  source 1..75: mol_type = other DNA
atgacaaacttctcgaccagcacgccgcatgacgcattatttaagtcctttctcacgcaccctggcaccgcgcgg

SEQ ID NO: 40396 - DNA, 75 bp, synthetic construct
  source 1..75: mol_type = other DNA
tgcagcagaagtctgccgtgattttggggcagaacttaaagaaagtaacggagatgtcgatcatgtccacatgct

SEQ ID NO: 40397 - DNA, 75 bp, synthetic construct
  source 1..75: mol_type = other DNA
atctttcacgtgaacgctgccagttaatactgacccagcttgttatggcggggctggcagactatcagttcggtt

SEQ ID NO: 40398 - DNA, 75 bp, synthetic construct
  source 1..75: mol_type = other DNA
ttttattgatttgcgcgccgcgtattcaaagcccgtactctggtcacgctcttatttcatcggttcatgtggtgg

SEQ ID NO: 40399 - DNA, 75 bp, synthetic construct
  source 1..75: mol_type = other DNA
cgaggtcatactttgctggctcctgcggaggtgcgccgctggaagttgtgaagcaatacattcaacatcagcgtg

SEQ ID NO: 40400 - DNA, 75 bp, synthetic construct
  source 1..75: mol_type = other DNA
tttcggtagcattttcctgtgggtgattatcggtgttgcgcctgtcgctgtagcaaaaatggcgtggcgttttgt

SEQ ID NO: 40401 - DNA, 75 bp, synthetic construct
  source 1..75: mol_type = other DNA
tcggtggcgcagacgctcaagcagattgagcagtaccagacccagttgcagcagtacgaaaatcagctccagaac

SEQ ID NO: 40402 - DNA, 75 bp, synthetic construct
  source 1..75: mol_type = other DNA
aagaaccacagcaataatgcgatatgccgtccagaatggcttaattgactataatccagcacaagagatgtctgg

SEQ ID NO: 40403 - DNA, 75 bp, synthetic construct
  source 1..75: mol_type = other DNA
gatcgaatacccaccaacagtgcaactttcggtactggttaactcactgaaagcagtgacatcccgccgtctgcg

SEQ ID NO: 40404 - DNA, 75 bp, synthetic construct
  source 1..75: mol_type = other DNA
cgaggatgcgggagctggtgctcaggcgaatgccagaaaagctcttgggctggggactctggcgacaaaagataa

SEQ ID NO: 40405 - DNA, 75 bp, synthetic construct
  source 1..75: mol_type = other DNA
tattaccgcagcggagatgagaacgatactaccagaggatttaacacaggggaaatatagaaaaatttatctgct

SEQ ID NO: 40406 - DNA, 75 bp, synthetic construct
  source 1..75: mol_type = other DNA
gacggcgcggtgttccgctacgacgcggacgctggcgcactgagcgccagcggcatgaaaacggccactttacag

SEQ ID NO: 40407 - DNA, 75 bp, synthetic construct
  source 1..75: mol_type = other DNA
gaaagaaatcgtggtcagcgcgccggacggcgcggtgttccgctacgacgcggacgcaggcgcactgagcgccag

SEQ ID NO: 40408 - DNA, 75 bp, synthetic construct
  source 1..75: mol_type = other DNA
atgaaatggtttacaccggagcacgtcgtctcggcatttaaaaaaggtgagttatctcgccatcaagtagtaatg

SEQ ID NO: 40409 - DNA, 75 bp, synthetic construct
  source 1..75: mol_type = other DNA
gcgaacaggtggtaattgcctgcatcggcggcaatccggaaaccgccatgataatcggcagcctgtggagtgatg

SEQ ID NO: 40410 - DNA, 75 bp, synthetic construct
  source 1..75: mol_type = other DNA
gatggcgcggtgttccgctacgacgcggacgcaggcgcactgagcgccagcggcatgaaaacagccaccctgcag

SEQ ID NO: 40411 - DNA, 75 bp, synthetic construct
  source 1..75: mol_type = other DNA
tcagcgataaaaaaattcgtcaggctgtgcgccagttttccccccactcgttccagcaattaaaaaaattcattc

SEQ ID NO: 40412 - DNA, 75 bp, synthetic construct
  source 1..75: mol_type = other DNA
ataatggttcctatacagccaacgtaggtggtaaggcttatgccgtaaccgctggcgcagttcagacaggtggcg

SEQ ID NO: 40413 - DNA, 75 bp, synthetic construct
  source 1..75: mol_type = other DNA
tgatgtcagatttcgggagcattcgctcccgtttgcctgctgatggcaaaatcgacaccgtgaaattcgagcagt

SEQ ID NO: 40414 - DNA, 75 bp, synthetic construct
  source 1..75: mol_type = other DNA
ctgtggcgtcgggcaaaaatcctcgggcaaaaacctgcttatttctgggtctggttggttatgctgatactggtg

SEQ ID NO: 40415 - DNA, 75 bp, synthetic construct
  source 1..75: mol_type = other DNA
gctgaacgtcagcgtctgaaagagctggagcgtgaaaatcgtgaactgcgccgcagtaacgatatccttcgccag

SEQ ID NO: 40416 - DNA, 75 bp, synthetic construct
  source 1..75: mol_type = other DNA
atgcatttacgtcatctgttttcatcgcgcctgcgtggttcattactgttaggttcattgcttgttgcttcatca

SEQ ID NO: 40417 - DNA, 75 bp, synthetic construct
  source 1..75: mol_type = other DNA
gacaaaacaatctcaatccatcccaataactttagcagggagaacaatcgaaaaagcgcaagagaaagaaggatt

SEQ ID NO: 40418 - DNA, 75 bp, synthetic construct
  source 1..75: mol_type = other DNA
gtcaggttctggatatgactgatgcactagctcaacttcgcgaggcacagtctttggtagaggcactatgtagtg

SEQ ID NO: 40419 - DNA, 75 bp, synthetic construct
  source 1..75: mol_type = other DNA
ccggttactctggaagtgacgcaggcgatccataacgatctcaagccgtttggtgccaccatcaataacacgact

SEQ ID NO: 40420 - DNA, 75 bp, synthetic construct
  source 1..75: mol_type = other DNA
ggtgatgtcaccacacctgtgttggtgaagccgtcggatggagaaggcacagtaatcagcgccaccagagacacg

SEQ ID NO: 40421 - DNA, 75 bp, synthetic construct
  source 1..75: mol_type = other DNA
cggctttctgatccgcattattgagtggtggcagaccggagaaacacccggcacgtttcgcctggatatcggcgt

SEQ ID NO: 40422 - DNA, 75 bp, synthetic construct
  source 1..75: mol_type = other DNA
cagacgttgtggtttggtaacaccgtaaacagcgcggtcacggcgatagatgccaaaacgggcgaagtgaaaggc

SEQ ID NO: 40423 - DNA, 75 bp, synthetic construct
  source 1..75: mol_type = other DNA
ggaaaatctggctaaagctggagttttccgatgggttacaaatgtccatgaacacaaaaggtattactatacctt

SEQ ID NO: 40424 - DNA, 75 bp, synthetic construct
  source 1..75: mol_type = other DNA
tacaacctgtgcggggcggggttaattatcgcattactggtttacatcgcctgtcgtggaatggtgaaagacatt

SEQ ID NO: 40425 - DNA, 75 bp, synthetic construct
  source 1..75: mol_type = other DNA
gagtgctgggcaagaatagctccgagtttgctcgcatgcttgaaggcagtgaaggcaccaaaacctttaccctaa

SEQ ID NO: 40426 - DNA, 75 bp, synthetic construct
  source 1..75: mol_type = other DNA
cgcaatgccctgctgctggcgctgctcaccaccgtggcggcgtatctgattatgatgctcgcccccttccccggc

SEQ ID NO: 40427 - DNA, 75 bp, synthetic construct
  source 1..75: mol_type = other DNA
ccctgtatgaaaaaaaatgacattttacagcgtggtccgaaccgtttccggaaaaaggataaaatcaactggtta

SEQ ID NO: 40428 - DNA, 75 bp, synthetic construct
  source 1..75: mol_type = other DNA
gttcggtcagcaccggtattgccggacgcagtctgaccgctgacctgattgactgtgcagccgaaccgacacagt

SEQ ID NO: 40429 - DNA, 75 bp, synthetic construct
  source 1..75: mol_type = other DNA
acgagtacatggccggaggtaaacgaccggcccgtgtttaccgggtggtgaacggtattgcggtactgccggtga

SEQ ID NO: 40430 - DNA, 75 bp, synthetic construct
  source 1..75: mol_type = other DNA
catcaacggtgagagcgtgaacgtgcaccggtatcgacgcgcggtgtatgcactgacccgcgcgggcgttcttga

SEQ ID NO: 40431 - DNA, 75 bp, synthetic construct
  source 1..75: mol_type = other DNA
gtctcgacgttcgtgatggtcaggtggtgaaaggcgtacagtttcgcaaccatgaaatcattggcgatattgtac

SEQ ID NO: 40432 - DNA, 75 bp, synthetic construct
  source 1..75: mol_type = other DNA
gctgttgaagcggatgatgcggcgctttctgccgattttccggcggcggtggcactggctgaggcctgcccggca

SEQ ID NO: 40433 - DNA, 75 bp, synthetic construct
  source 1..75: mol_type = other DNA
ggtttgctaccaaggaagaacgggaaggaaaggtgagcacgaatatgatttttaaggagtgtcgccagagtgccg

SEQ ID NO: 40434 - DNA, 75 bp, synthetic construct
  source 1..75: mol_type = other DNA
tataaatatattgaaactccattcattaatatcggaaaaacaatatccaaaagactttcaaaaccaacattaact

SEQ ID NO: 40435 - DNA, 75 bp, synthetic construct
  source 1..75: mol_type = other DNA
tgccgacgttgcatccacacagtcttcttgcaccaggcgtttcgctacgtatgacggacacaacctgtcagtccc

SEQ ID NO: 40436 - DNA, 75 bp, synthetic construct
  source 1..75: mol_type = other DNA
tctcggacgtttttgccgccttcgcagaatttgctgccgccgttgccgaggaagctgcgctgctggcgctcgagg

SEQ ID NO: 40437 - DNA, 75 bp, synthetic construct
  source 1..75: mol_type = other DNA
caatcaatgcagcaacatctgcggcggttagtaaggatgaggcagaagagctaaaaaatcagacacagcagagcg

SEQ ID NO: 40438 - DNA, 75 bp, synthetic construct
  source 1..75: mol_type = other DNA
cggagacgccatcacccattacatcaccattcgctaccgccgggggatcactgctgattatgaggtggtctgtga

SEQ ID NO: 40439 - DNA, 75 bp, synthetic construct
  source 1..75: mol_type = other DNA
gccggtgtggatatcacgctgatttactcaggggcgcacaaggtggatggcaatcagtttgaagcgttgccggca

SEQ ID NO: 40440 - DNA, 75 bp, synthetic construct
  source 1..75: mol_type = other DNA
cactggacgcacaggctgcggatctgtggcgcgatgtgagctgggccatctctgacattctgggacgaccgcgaa

SEQ ID NO: 40441 - DNA, 75 bp, synthetic construct
  source 1..75: mol_type = other DNA
tgctaaaaatgcagagtatatggcaagactggcagggcttattcaccattttagcggtgaggaaggtgacatttc

SEQ ID NO: 40442 - DNA, 75 bp, synthetic construct
  source 1..75: mol_type = other DNA
tcgatgaagacgattaccacggcaagcatattgcgtatttcatgcgacaagcactggtctggctggaagggcatt

SEQ ID NO: 40443 - DNA, 75 bp, synthetic construct
  source 1..75: mol_type = other DNA
gtgctggcgagcctcggtgggctggtttcctatgcggcaaaggttcatttcaaagaacaggtatacgacatgaaa

SEQ ID NO: 40444 - DNA, 75 bp, synthetic construct
  source 1..75: mol_type = other DNA
aaagagaacaaaaaatgatcaaatccacattctggcgagcgttcgccctgaccgctacgcttatcctcaccggct

SEQ ID NO: 40445 - DNA, 75 bp, synthetic construct
  source 1..75: mol_type = other DNA
acggcctgcaagctccggcacggagacagcaacgagctgccgtttggcggtttccccggtacatctcttatcagg

SEQ ID NO: 40446 - DNA, 75 bp, synthetic construct
  source 1..75: mol_type = other DNA
atgaggacgattgaagccatgcagcgacaacttctcggcctgattgggcgggcagtggtgaaaagcatcagtgcc

SEQ ID NO: 40447 - DNA, 75 bp, synthetic construct
  source 1..75: mol_type = other DNA
ggacccagtttttctccacaacacggcaaggttaccggcagatgctggcatggatgacttcgtttggggcattaa

SEQ ID NO: 40448 - DNA, 75 bp, synthetic construct
  source 1..75: mol_type = other DNA
gctggaaaattattctgggctttaacggatgaaagcaataaagagcaatcggacgttattcctgtttatgccgcc

SEQ ID NO: 40449 - DNA, 75 bp, synthetic construct
  source 1..75: mol_type = other DNA
gtgaaaacgggggctgaagccatccgggcgctggccacgcagcttccggcgtttcgccagaaactgaatgagggc

SEQ ID NO: 40450 - DNA, 75 bp, synthetic construct
  source 1..75: mol_type = other DNA
ttgctgttctgtgtctttccactggcgcaaggtggggggaagcagctggcttacgtggtgagcatatcgttggta

SEQ ID NO: 40451 - DNA, 75 bp, synthetic construct
  source 1..75: mol_type = other DNA
aaccggatttgccaatggggcaagccacacatgcactaaggcacagctttgccactcatttcatgattaatggag

SEQ ID NO: 40452 - DNA, 75 bp, synthetic construct
  source 1..75: mol_type = other DNA
gcgcatccagtacggatttggggacgaaaaccacatcgtcgtttgattacggcactaaatccacgaataacaccg

SEQ ID NO: 40453 - DNA, 75 bp, synthetic construct
  source 1..75: mol_type = other DNA
gacgaagagctgcagaatgccgttctggttgatgagattggttttacgttcagtgagtcaggtgtttctgctgac

SEQ ID NO: 40454 - DNA, 75 bp, synthetic construct
  source 1..75: mol_type = other DNA
ccacaatgtatctggtactgcaaatagtgctggcgcacatactcataccgttccattaaggagaccaaacagtgg

SEQ ID NO: 40455 - DNA, 75 bp, synthetic construct
  source 1..75: mol_type = other DNA
ctataaagtcctcgatgactacttcaccggagaacttcagcatcgcaacagcttaagtgcgcagctcaacatgaa

SEQ ID NO: 40456 - DNA, 75 bp, synthetic construct
  source 1..75: mol_type = other DNA
tatacgccatcagagcagttttatccgcctggcgcaccaatcccgtggccatcagataccgttccgtctggctat

SEQ ID NO: 40457 - DNA, 75 bp, synthetic construct
  source 1..75: mol_type = other DNA
taatactcaaaagctcttgctatcaattgcagagcgaatcagaaaaaacattgaagagcaatgctcggaaaaatt

SEQ ID NO: 40458 - DNA, 75 bp, synthetic construct
  source 1..75: mol_type = other DNA
tgtaaaaccttcggacttcttttcattaaaagttgcggttcctggctttgaagagcaacaaaaaatcgcatcagt

SEQ ID NO: 40459 - DNA, 75 bp, synthetic construct
  source 1..75: mol_type = other DNA
cagttccattttcgtgcgcagccggtgtttccggcgaacgtgaaagcgggggaatacacaggcgcactgaccttt

SEQ ID NO: 40460 - DNA, 75 bp, synthetic construct
  source 1..75: mol_type = other DNA
atggaaaggagaacccggtggcgtgattgcggaatgtcatgttaactgcctgattgaatcagatgctcaggctta

SEQ ID NO: 40461 - DNA, 75 bp, synthetic construct
  source 1..75: mol_type = other DNA
gatgaacgggaaagaaacctgcaatacatcaaaagccgcgatcaggagaacgaggatattgcgctaacggtaggg

SEQ ID NO: 40462 - DNA, 75 bp, synthetic construct
  source 1..75: mol_type = other DNA
aaggaatacatctgcgataaacctgagtgcccccacgtcagatacgtcactaactcatgcggcagccgtgcctgc

SEQ ID NO: 40463 - DNA, 75 bp, synthetic construct
  source 1..75: mol_type = other DNA
cgacggaaacagggttcaggaatacgtgaaactggagcgactgcagaacgcgctatcgggcaactctccggtaat

SEQ ID NO: 40464 - DNA, 75 bp, synthetic construct
  source 1..75: mol_type = other DNA
tcttgaatctgcggctgaagaaatgcagaaagcagcagaccttgctcatttttccaaagatgatacagatcctgt

SEQ ID NO: 40465 - DNA, 75 bp, synthetic construct
  source 1..75: mol_type = other DNA
tgccggtggtctgttacctgagggggctgcagcctggcttgcgacggtgccgggagcgcttcagaatctggccgg

SEQ ID NO: 40466 - DNA, 75 bp, synthetic construct
  source 1..75: mol_type = other DNA
gcgaacaggaacttaaagattacggtgtggatattgatgcgctcaacgccttcaaatttctggccggaccagaaa

SEQ ID NO: 40467 - DNA, 75 bp, synthetic construct
  source 1..75: mol_type = other DNA
cattccttcaatggcttcctccacgccgaccggcattctgcgtgcggtagatcgcttcgatttaattgctgtaca

SEQ ID NO: 40468 - DNA, 75 bp, synthetic construct
  source 1..75: mol_type = other DNA
gcttattgatcagtgccagcttaaagggacgcaaattggtggggctgcggtacaccgtcaacaggcgctggttct

SEQ ID NO: 40469 - DNA, 75 bp, synthetic construct
  source 1..75: mol_type = other DNA
gctgagtctgggcggcaatctggaaaccgcctttgcgctgcccgctgtctactcgaatcagttcgcaccaccgtc

SEQ ID NO: 40470 - DNA, 75 bp, synthetic construct
  source 1..75: mol_type = other DNA
gaatacctatcacgaatgccgcatcaatgatgaatggggcggcgtggaaattattaaacgccctgactgggcacg

SEQ ID NO: 40471 - DNA, 75 bp, synthetic construct
  source 1..75: mol_type = other DNA
gcggttggtatgcgcgacgaatgccgatctcccggcgatggtcaatgaaggtacttttcgcgctgacctgctcga

SEQ ID NO: 40472 - DNA, 75 bp, synthetic construct
  source 1..75: mol_type = other DNA
tattgcagaaaaggcaggatatgacgttattgcaccagcagatgaagatgaagatgaagatgaagatgaggaata

SEQ ID NO: 40473 - DNA, 75 bp, synthetic construct
  source 1..75: mol_type = other DNA
tagtgacattggaacggttgtcacgggctctacacccccgaagaacgacagtgataactatggtggggatatatc

SEQ ID NO: 40474 - DNA, 75 bp, synthetic construct
  source 1..75: mol_type = other DNA
cacaaaacaagtaaacagcgaagagcgcgatgacacccgccaggcgcttgatgcagtgtgggaagaggaacaggt

SEQ ID NO: 40475 - DNA, 75 bp, synthetic construct
  source 1..75: mol_type = other DNA
ggatgcgcttcagcagtccggcggcgaagacggtggcagtgtggtgttcccgccggtgctggtgcagatgctcga

SEQ ID NO: 40476 - DNA, 75 bp, synthetic construct
  source 1..75: mol_type = other DNA
ctatttctgatatgacatctaatggaaagtggattgctacaactgaaaaatatctgactgaattaggattgaaca

SEQ ID NO: 40477 - DNA, 75 bp, synthetic construct
  source 1..75: mol_type = other DNA
gtccaggaaggcggtctggaatatgctactgatgtaataatacaccttcaacagattgatattaaatgggattat

SEQ ID NO: 40478 - DNA, 75 bp, synthetic construct
  source 1..75: mol_type = other DNA
gatttagaattaattgaagttcgctctggtgcatatcttgaagaagatgatgttattagatgttatgatcgctat

SEQ ID NO: 40479 - DNA, 75 bp, synthetic construct
  source 1..75: mol_type = other DNA
taacgcttcggggatgctggcgaaagctattgccttgcatggtaatagcgttggtacgggcggagattactctac

SEQ ID NO: 40480 - DNA, 75 bp, synthetic construct
  source 1..75: mol_type = other DNA
atgagtgtggaaaagctgatcgttgatcatatggaaacctggacctcggcgttgcaaacccgttccaccgccggg

SEQ ID NO: 40481 - DNA, 75 bp, synthetic construct
  source 1..75: mol_type = other DNA
cagatggacggctggcgaaacaacgcagaagtggcgcgcggaacaagccgttcgccggagatatggccgggacgg

SEQ ID NO: 40482 - DNA, 75 bp, synthetic construct
  source 1..75: mol_type = other DNA
tcagccccgtacttaccaccactggacatcagacaggatattacaaactcaatgacagcctggatattaaaacca

SEQ ID NO: 40483 - DNA, 75 bp, synthetic construct
  source 1..75: mol_type = other DNA
attacctggggacgcacaagagcttctgtgcgccggacgttgctgcgacaacaggtgtgacattaaccagcataa

SEQ ID NO: 40484 - DNA, 75 bp, synthetic construct
  source 1..75: mol_type = other DNA
gcatcatgaactgtatgggcaacgatctgattcgcacggttaacctgattaaatctgcccgtgttggttatacaa

SEQ ID NO: 40485 - DNA, 75 bp, synthetic construct
  source 1..75: mol_type = other DNA
accgggcgtaaaacggtatttcagtatctgattaaaccgataaccagaatgaagcaggcacttcaggaaagataa

SEQ ID NO: 40486 - DNA, 75 bp, synthetic construct
  source 1..75: mol_type = other DNA
gcttctataggtgaatgcagcattgctgctgtaaatttaacatcttcgcaggcaatcttgggtattagaccaaaa

SEQ ID NO: 40487 - DNA, 75 bp, synthetic construct
  source 1..75: mol_type = other DNA
tgattaaagaaatcaaagagcgaatcggtagcctggacgttcgagacaatattgagcgccgagcttatgaaatcg

SEQ ID NO: 40488 - DNA, 75 bp, synthetic construct
  source 1..75: mol_type = other DNA
tatgtcattccgtatacgttatatgcgcttgcagccgggtttcttgttacattttttttctgtccccaatgtacg

SEQ ID NO: 40489 - DNA, 75 bp, synthetic construct
  source 1..75: mol_type = other DNA
gtcaaagagcaaatcaccgaaatggcgttcaacggagcaggtgtccgcgatacctcaaggacactcaaaattgga

SEQ ID NO: 40490 - DNA, 75 bp, synthetic construct
  source 1..75: mol_type = other DNA
cacatcagcaactggttgaaaccctgttgggaacacttgcagacagccagaacgccgaggaactggctgaaaact

SEQ ID NO: 40491 - DNA, 75 bp, synthetic construct
  source 1..75: mol_type = other DNA
atgaaagaaaaacaacagaacataacacatgaaaaagtaagagtgttgttgaccattgaaaatgggaaagtgatt

SEQ ID NO: 40492 - DNA, 75 bp, synthetic construct
  source 1..75: mol_type = other DNA
taatgacaatgcttatctcacaaccagcactggcagaacaggtcattccctggctctcgacacccgcagttgccg

SEQ ID NO: 40493 - DNA, 75 bp, synthetic construct
  source 1..75: mol_type = other DNA
cagcagcaggttacgggatcacttacgtaagggacaggcagatggcagctcagctacagacagcactgcaggaaa

SEQ ID NO: 40494 - DNA, 75 bp, synthetic construct
  source 1..75: mol_type = other DNA
gaaaactggacgcgtattagcgagcatttcgacacactatttaccaccgaagccagcgtggatgcgctaaaacag

SEQ ID NO: 40495 - DNA, 75 bp, synthetic construct
  source 1..75: mol_type = other DNA
ccgccttctcgatggtaatggcctgtacctttatgtccctgtgtcagggaaaaaggtatggcagcttcgctacaa

SEQ ID NO: 40496 - DNA, 75 bp, synthetic construct
  source 1..75: mol_type = other DNA
gatgaccagcgtcgtattgaaaagctgggacaggataatgctgccctggcagagcaggtaaaagccctgggtgca

SEQ ID NO: 40497 - DNA, 75 bp, synthetic construct
  source 1..75: mol_type = other DNA
ctgacaacggtgaatggggtttcccagttccagcctgaatggatatgctgggagtcgggagtggaatgggtccgt

SEQ ID NO: 40498 - DNA, 75 bp, synthetic construct
  source 1..75: mol_type = other DNA
gtcctcggtacgaccaacggaatgaccatcagtaccggtctggagtatgggccggataacgaggccaataccggc

SEQ ID NO: 40499 - DNA, 75 bp, synthetic construct
  source 1..75: mol_type = other DNA
gaagtgtgcttctcgctgactcgggagccagtatcagcggtcactatgatgatggtggcatgttcagcatcggtg

SEQ ID NO: 40500 - DNA, 75 bp, synthetic construct
  source 1..75: mol_type = other DNA
catcgcgaacatgtttttccgagcaggaacgaccccaaaaaatcaatgaacagccaaacggcaaacgctgcctta

SEQ ID NO: 40501 - DNA, 75 bp, synthetic construct
  source 1..75: mol_type = other DNA
acgccgtcaacactggcctgattgatgcaaacccggcatctggtattggtatggcatttgagaaacccaaaaagc

SEQ ID NO: 40502 - DNA, 75 bp, synthetic construct
  source 1..75: mol_type = other DNA
atgtctcaggctgaacgtcgccatgaccggcttgcggtcagactgtcgatgattattggtcgtctggtggcgggt

SEQ ID NO: 40503 - DNA, 75 bp, synthetic construct
  source 1..75: mol_type = other DNA
gcacggggccggggctggctgggctcactggaaaccggtctgcccttcagtatcactgacaacctgatgctggag

SEQ ID NO: 40504 - DNA, 75 bp, synthetic construct
  source 1..75: mol_type = other DNA
aacgggtctgcaatttttcggtgcggtgctcattatgaccgggctgtatatcaatgtatttggcttgcggtggcg

SEQ ID NO: 40505 - DNA, 75 bp, synthetic construct
  source 1..75: mol_type = other DNA
cgcgcggctggcgctttcggtgcgcataaccctgcctgatggttcagtgagacccatgattttttatgctgattt

SEQ ID NO: 40506 - DNA, 75 bp, synthetic construct
  source 1..75: mol_type = other DNA
tccgaaggggattactggtgctttatggcagcgcacatcgacagggtttacaaattttgcctgggtcaatacatc

SEQ ID NO: 40507 - DNA, 75 bp, synthetic construct
  source 1..75: mol_type = other DNA
tgcgcatcagcggcccgcgacagacgcgggaatacggctacagtgccacgggcaggctggagagcgtgcgcaccc

SEQ ID NO: 40508 - DNA, 75 bp, synthetic construct
  source 1..75: mol_type = other DNA
atcagttgaataatgacaactttgcaccaggaaaaacggcggctgcttattcgtttcaaactcggcctcttgggt

SEQ ID NO: 40509 - DNA, 75 bp, synthetic construct
  source 1..75: mol_type = other DNA
gagattagtgctctaactggcgtcgctcctctaaacagagactccgggaaaatgcgagggaaacggaccacgttt

SEQ ID NO: 40510 - DNA, 75 bp, synthetic construct
  source 1..75: mol_type = other DNA
atcgtgcttggcgcgtttactttcggtgagcgactgcatggcaaacaattggcggggatcgccttagcgattttt

SEQ ID NO: 40511 - DNA, 75 bp, synthetic construct
  source 1..75: mol_type = other DNA
ctgccttagcccacagtgataaaaatgaagttagaaaagcatacaatcgttctacttatctcgtgcagcgaattg

SEQ ID NO: 40512 - DNA, 75 bp, synthetic construct
  source 1..75: mol_type = other DNA
gcaggtgaaagtgttagccgaaccgctgaagaaaaatgcttatggtcagtatcttctcaaaatgattaaaggtga

SEQ ID NO: 40513 - DNA, 75 bp, synthetic construct
  source 1..75: mol_type = other DNA
gctatgtcggcctctcgaacggcctgctgatcgcgcaacaccacgacgtcgtggcgttggacatcattccttcac

SEQ ID NO: 40514 - DNA, 75 bp, synthetic construct
  source 1..75: mol_type = other DNA
cacccagaacgaagccggagtggctctgacaaagttctgtttttatgttgaacgcgcattactgaataaggatta

SEQ ID NO: 40515 - DNA, 75 bp, synthetic construct
  source 1..75: mol_type = other DNA
cgtggatgtgcgggcggtggatacacaggcagattatcgcggacgtctgactcaggacagtcattcggtgaatta

SEQ ID NO: 40516 - DNA, 75 bp, synthetic construct
  source 1..75: mol_type = other DNA
aaagcttctctgtgatacctgagaaagtggagactgtgaagaggtgctttcagctacggttagagggtaagtcta

SEQ ID NO: 40517 - DNA, 75 bp, synthetic construct
  source 1..75: mol_type = other DNA
acacgtttgatgtcgataacctggatgttttcggtattgatggaacggagttcctggataataaggtgctggcca

SEQ ID NO: 40518 - DNA, 75 bp, synthetic construct
  source 1..75: mol_type = other DNA
ggctgggtgtttgataacccggacgatacgtttgatgtggacaacctggacgttttcggtatagacggaacggag

SEQ ID NO: 40519 - DNA, 75 bp, synthetic construct
  source 1..75: mol_type = other DNA
tgtacgaaccggtgatgaaagaggatgaattcttcagctcacgtgtcgttcgcgatctggatgccttcaagcaag

SEQ ID NO: 40520 - DNA, 75 bp, synthetic construct
  source 1..75: mol_type = other DNA
gttgggggacgggagccagtgggggcttaatctacagtataaagtacaaccgagtccggatggcctggcgcaagc

SEQ ID NO: 40521 - DNA, 75 bp, synthetic construct
  source 1..75: mol_type = other DNA
gaaatgacccaaaacagccaatgaatagccaaactgctaatgctgctttaaaacgtattggttatggcgggaagc

SEQ ID NO: 40522 - DNA, 75 bp, synthetic construct
  source 1..75: mol_type = other DNA
aggggcacaccagacacgcatcatcgcactgccactgactgatatccggtgcgtcacgcttcatccggacacttt

SEQ ID NO: 40523 - DNA, 75 bp, synthetic construct
  source 1..75: mol_type = other DNA
catgatggcgatggtctttttctactcgttaaaacgaacggtaagaagttatggcgtttccgttatcaacgtccg

SEQ ID NO: 40524 - DNA, 75 bp, synthetic construct
  source 1..75: mol_type = other DNA
tccaggaatgccggaaagtgacactgcgcggcaacggatgcaaccatacggatatctcaccctaccgcctggttc

SEQ ID NO: 40525 - DNA, 75 bp, synthetic construct
  source 1..75: mol_type = other DNA
atccgtggatgaactgacaaaattaacgacagaaatcgccagctattgcgctgatgaatttaagaagctgaacga

SEQ ID NO: 40526 - DNA, 75 bp, synthetic construct
  source 1..75: mol_type = other DNA
taaatttctgtgccaccacagataagcacgacacgtaccgtaatgccgactacgtgatcattgcgacgccgaccg

SEQ ID NO: 40527 - DNA, 75 bp, synthetic construct
  source 1..75: mol_type = other DNA
cgtggtgtcaggtgatgttagatacgcgcggcggcgtacggttgtcagagcagatccagaatgatttattgctgc

SEQ ID NO: 40528 - DNA, 75 bp, synthetic construct
  source 1..75: mol_type = other DNA
gcggtattgcccgtggggccacgccggaaagcagcggcagctatggcttcgtccgtctggagggtgacctgctga

SEQ ID NO: 40529 - DNA, 75 bp, synthetic construct
  source 1..75: mol_type = other DNA
ttcctctttggcgcagcaaccatctctttaagctatatcccaatgatgagttgggtggctgtctcgccggtgatc

SEQ ID NO: 40530 - DNA, 75 bp, synthetic construct
  source 1..75: mol_type = other DNA
atgaaacaaatgtcactaattgagatggatggttttctgaaaggtaaatgcatcccacgagatttaaaggttaac

SEQ ID NO: 40531 - DNA, 75 bp, synthetic construct
  source 1..75: mol_type = other DNA
acattacaaggacatgcgacagaacatgccatatttaaagaaggcagtaacaactgtctaattcctcttttatgt

SEQ ID NO: 40532 - DNA, 75 bp, synthetic construct
  source 1..75: mol_type = other DNA
ggaatgttaagggcgttgccggagataatctgcataaaataggtagtggtactctggatgtaaaaacagcacagg

SEQ ID NO: 40533 - DNA, 75 bp, synthetic construct
  source 1..75: mol_type = other DNA
gcagacagccattccacaagttccggtaactccggatggttggataagctgtagtgagcgaatgccggacgacag

SEQ ID NO: 40534 - DNA, 75 bp, synthetic construct
  source 1..75: mol_type = other DNA
aacgtatgaatgaaatgataaaggaaattattccgcatcatattaaatggcatgccggcacgagtaatatctgtg

SEQ ID NO: 40535 - DNA, 75 bp, synthetic construct
  source 1..75: mol_type = other DNA
gcagatatcgcccgcagaaaaaaacgacgtttttccgtgttgtttatcgactgggaagcgcagtatttatgtact

SEQ ID NO: 40536 - DNA, 75 bp, synthetic construct
  source 1..75: mol_type = other DNA
tgattaaagaaatcagagagcgaatcggcagcctggacgtccgagacaatattgagcgtcgggcttatgaaattg

SEQ ID NO: 40537 - DNA, 75 bp, synthetic construct
  source 1..75: mol_type = other DNA
atgtctgaacccttatccggttccggcacggcggctgcgctcggaggggcgacggtattcgggctgttcaccgga

SEQ ID NO: 40538 - DNA, 75 bp, synthetic construct
  source 1..75: mol_type = other DNA
cagggcttggtattgtcggtgaagtcgatggtgatgaccccgcagtattcagaccaatacaaaaatacatcaatg

SEQ ID NO: 40539 - DNA, 75 bp, synthetic construct
  source 1..75: mol_type = other DNA
aacggtattcctaacccgctgctgccggaatgccgcgacgacacccgcaatgcggtcatcaaacacggcgcggat

SEQ ID NO: 40540 - DNA, 75 bp, synthetic construct
  source 1..75: mol_type = other DNA
cactcgcgaaatcaccctggagccagcagacaacgcgcgtctgttgagcctgtgcggcccgtttgatgacaacat

SEQ ID NO: 40541 - DNA, 75 bp, synthetic construct
  source 1..75: mol_type = other DNA
gactgaaacgtggggaagtggcgctttatgacgatctgggacagtccgttgtcctgacccgttccggtattgtgg

SEQ ID NO: 40542 - DNA, 75 bp, synthetic construct
  source 1..75: mol_type = other DNA
aaatctgaacgagaatctggcccgtgttatcgatcagaatgctctggagatcattttcgccgccggtatacaaca

SEQ ID NO: 40543 - DNA, 75 bp, synthetic construct
  source 1..75: mol_type = other DNA
ggttagccggaggagttctaacgggagtcagtatttatggcctgtttacaggtacggattatggtgttgtatttg

SEQ ID NO: 40544 - DNA, 75 bp, synthetic construct
  source 1..75: mol_type = other DNA
cggacggcaatttccccaacggtattcctaacccgctactgccggaatgtcgcgacgacacccgcaatgcggtca

SEQ ID NO: 40545 - DNA, 75 bp, synthetic construct
  source 1..75: mol_type = other DNA
gtgaaattatgtgggaaatggaagatggctcccgcatggtgctgaaggctgaaaatcaggtggcaaccagtgagc

SEQ ID NO: 40546 - DNA, 75 bp, synthetic construct
  source 1..75: mol_type = other DNA
ggtggtgtgttcggttccctgatgtctacgcctatcatcaacccgccgcagagcgcaattctgggtatgcacgct

SEQ ID NO: 40547 - DNA, 75 bp, synthetic construct
  source 1..75: mol_type = other DNA
agtacgcgacgccattcatctgttaacgccacgcgccatcaatgaagaagtgggcaggcgtctgctcgaagagat

SEQ ID NO: 40548 - DNA, 75 bp, synthetic construct
  source 1..75: mol_type = other DNA
ttactgggtggcccttcccctgactacggtaaacggtgtctctcagtttcagccggagtggatatgctgggagcc

SEQ ID NO: 40549 - DNA, 75 bp, synthetic construct
  source 1..75: mol_type = other DNA
gtggagaataagctgcactggcgtctggacgtggtaatgaatgaagacgactgcaaaataagaagaggaaatgca

SEQ ID NO: 40550 - DNA, 75 bp, synthetic construct
  source 1..75: mol_type = other DNA
acacgcaactcccccatcttttaaagatgcattcaaaaagatggagaaagaacaaagtgaattttttaaagaaga

SEQ ID NO: 40551 - DNA, 75 bp, synthetic construct
  source 1..75: mol_type = other DNA
ttgtcattatatctgtttttagtctttctggatgttttgaagaaacaaaatcggttgattggtggaaggagcacc

SEQ ID NO: 40552 - DNA, 75 bp, synthetic construct
  source 1..75: mol_type = other DNA
atttggggacgaaaaccacatcgtcgtttgattacggcactaaatccacgaataacactggtgcgcatacccata

SEQ ID NO: 40553 - DNA, 75 bp, synthetic construct
  source 1..75: mol_type = other DNA
acacacaccattaccattgccgcttatggcaacgcggaaaacaccgtaaaaaacatcgcatttaactatattgtg

SEQ ID NO: 40554 - DNA, 75 bp, synthetic construct
  source 1..75: mol_type = other DNA
aaacgtggccagcatcgcaaaggggaatggcttcgtttatcttttcttaatgcgcttcctggtgttgttccagct

SEQ ID NO: 40555 - DNA, 75 bp, synthetic construct
  source 1..75: mol_type = other DNA
ttcctccaaagataaaacccgtcttgccttcgctggcctgaaattcggtgactacggctccatcgattacggccg

SEQ ID NO: 40556 - DNA, 75 bp, synthetic construct
  source 1..75: mol_type = other DNA
cgatatagggccgctacgcccctttacgcttaatctcagaactggtcgcataaatatggggcatggtctggatgt

SEQ ID NO: 40557 - DNA, 75 bp, synthetic construct
  source 1..75: mol_type = other DNA
gcagtcgagcggttcgttaacatttggagattgctacatatcacttaacgagttcgccgcccagcttcgcaaagg

SEQ ID NO: 40558 - DNA, 75 bp, synthetic construct
  source 1..75: mol_type = other DNA
tccccaacaccggagacacaatcgacagccaaacattgttgaagatggtcaatgaggcacgtaagttatgtggag

SEQ ID NO: 40559 - DNA, 75 bp, synthetic construct
  source 1..75: mol_type = other DNA
ggtcagtaccataacttcagcgaaaagctattcatccagaaagaggcacagaaattcgccgcccagcttcgcaaa

SEQ ID NO: 40560 - DNA, 75 bp, synthetic construct
  source 1..75: mol_type = other DNA
ccaccgacgccttcatggctgaagttcgggcgcagggcgtggagatgttcggtcagtaccataacttcagcgaaa

SEQ ID NO: 40561 - DNA, 75 bp, synthetic construct
  source 1..75: mol_type = other DNA
aacaagcagaaattgccaaagcactgggacgtagctccagcaccatttctcgcgagctgaaacgacacgctctag

SEQ ID NO: 40562 - DNA, 75 bp, synthetic construct
  source 1..75: mol_type = other DNA
cttcaacagccacaacgaaggctggcgaagccgctgtacaggccagcgcagcagcgaggtctgcttccgcagcga

SEQ ID NO: 40563 - DNA, 75 bp, synthetic construct
  source 1..75: mol_type = other DNA
cagccaccagatgacgctattacagatatgtcgtacttcccattttatcggtatgccatgacgtttgaagaattt

SEQ ID NO: 40564 - DNA, 75 bp, synthetic construct
  source 1..75: mol_type = other DNA
tctacgttacgcaacagtggcagcagaaatgagaaaggaggcacatagaatgaccggtaataatttgaatgttga

SEQ ID NO: 40565 - DNA, 75 bp, synthetic construct
  source 1..75: mol_type = other DNA
gggcgcagggaccgaagggcgataccggcgctcaggggatgcaggggctgagaggtgaggcaggaccgaaaggtg

SEQ ID NO: 40566 - DNA, 75 bp, synthetic construct
  source 1..75: mol_type = other DNA
ggaataaaaaatgcagcaatcctgtttcagaatttgatgaggcaaatgccctgaggttatgtgatgatcattatc

SEQ ID NO: 40567 - DNA, 75 bp, synthetic construct
  source 1..75: mol_type = other DNA
gcgcgaatatctggcccgtgagcgccagaatctttctgatggtctggtcattgagcttccggtaaagcaaaaggc

SEQ ID NO: 40568 - DNA, 75 bp, synthetic construct
  source 1..75: mol_type = other DNA
tgtacccagggcgaactctatctggagctggcagagaagcgagaagccaaccagtcatttgtctacggttggctg

SEQ ID NO: 40569 - DNA, 75 bp, synthetic construct
  source 1..75: mol_type = other DNA
atgcaatatgcattatttgatgggctggaacgaaagtttttgctggatgctcttgaattcggtgttctgaagtac

SEQ ID NO: 40570 - DNA, 75 bp, synthetic construct
  source 1..75: mol_type = other DNA
actgaaacaggcgtttgatgagaatattgaccgtatccggcgtgaacgtctgcccggagaactggcatacgcgct

SEQ ID NO: 40571 - DNA, 75 bp, synthetic construct
  source 1..75: mol_type = other DNA
atcatgtcactgaggatgcctggattgagccacaggctgagctggtttacggttctgtatccggtaaacagtttg

SEQ ID NO: 40572 - DNA, 75 bp, synthetic construct
  source 1..75: mol_type = other DNA
gatatgacctgaccggcgataacgcagcactggaaattacccgtggagcacatgcttccggtgatattcatgcct

SEQ ID NO: 40573 - DNA, 75 bp, synthetic construct
  source 1..75: mol_type = other DNA
ccggagcgctaaaaacgcgtcaggatgtcactgaggcgcttacagcggcaggttttgaggttgtgaggacaacca

SEQ ID NO: 40574 - DNA, 75 bp, synthetic construct
  source 1..75: mol_type = other DNA
agccgtgcggggaagtgacaccacaggaacagaaagaggcagagacccgtttaatgatgctgaatgaccgacgaa

SEQ ID NO: 40575 - DNA, 75 bp, synthetic construct
  source 1..75: mol_type = other DNA
gtctgacaggaacgccaaccgcgccgacggcagcgcaaggtacaaatagcacgcagatcgcaaatacagcctttg

SEQ ID NO: 40576 - DNA, 75 bp, synthetic construct
  source 1..75: mol_type = other DNA
ggattactgagtggttttaatacggcataccgcggtgcaattcatgccccgtcagcatctgccactatgaacaac

SEQ ID NO: 40577 - DNA, 75 bp, synthetic construct
  source 1..75: mol_type = other DNA
caatattgcgcccgatgccagcaacgcgcaggtcaccctgaacatccctgctcaacaggtggtgacgaataacag

SEQ ID NO: 40578 - DNA, 75 bp, synthetic construct
  source 1..75: mol_type = other DNA
atgcaaacagtagatataacgctggtggctggcccggcagacacctcgcagtccgtccttaagaacaatcggtca

SEQ ID NO: 40579 - DNA, 75 bp, synthetic construct
  source 1..75: mol_type = other DNA
ctctgacggcaacgctaacttctgcaaatggcactccagtggagggtcaggtcatcaactttagcgtaacgccag

SEQ ID NO: 40580 - DNA, 75 bp, synthetic construct
  source 1..75: mol_type = other DNA
aaaatctgcgcatctgtttttttcagaagtgcgcctccggatattcagtacaaaatactcatcagtcagttgaag

SEQ ID NO: 40581 - DNA, 75 bp, synthetic construct
  source 1..75: mol_type = other DNA
catttggttcgcgcatggaaacgtacttatggtttaccgaccattgtgactaattgctcgaacaactatggtcct

SEQ ID NO: 40582 - DNA, 75 bp, synthetic construct
  source 1..75: mol_type = other DNA
atgaatacagccctttcaccaatggtttctgagtttgaaaccattgaacaagaaaacagttacaacgaatggctg

SEQ ID NO: 40583 - DNA, 75 bp, synthetic construct
  source 1..75: mol_type = other DNA
taccgcacaggttgatctgcagaagtcgaaaaatgaagtggtcgctgacggcaatgacagcgccacaatgaccgc

SEQ ID NO: 40584 - DNA, 75 bp, synthetic construct
  source 1..75: mol_type = other DNA
ttgtgctggctggtgtactgctcatgagctttaatgcctctgcggtcccgggactctggcaacaggggtacggtc

SEQ ID NO: 40585 - DNA, 75 bp, synthetic construct
  source 1..75: mol_type = other DNA
cttttactggatcttaaggctcaggatacaaatgtcagtgaaccgacgattggaaatatatccccctttggtggt

SEQ ID NO: 40586 - DNA, 75 bp, synthetic construct
  source 1..75: mol_type = other DNA
tgtcgacaccgcacatcggctggcggaagatatcctgcgcttcgcccgctgccgtcagggtggtgcactgacctg

SEQ ID NO: 40587 - DNA, 75 bp, synthetic construct
  source 1..75: mol_type = other DNA
gcaaaatcgttgcattacaggtgcatctgctggggcgtctgtttatcgatgcatcagatttaatgtctgacagtt

SEQ ID NO: 40588 - DNA, 75 bp, synthetic construct
  source 1..75: mol_type = other DNA
acatgcgttatccctggaacgggagcgtcagctggaaatacaggaacgcacactggatggcccttcgctgggatg

SEQ ID NO: 40589 - DNA, 75 bp, synthetic construct
  source 1..75: mol_type = other DNA
tattgcccctcaattatctgatgctaaggaaagttatcaggatgttgagactaaatatttcctgtcaaaatatct

SEQ ID NO: 40590 - DNA, 75 bp, synthetic construct
  source 1..75: mol_type = other DNA
ctggtgagcggcgtgattatctggcgtccttattttgcgcctgctttctcaatcccggtgatccgattcgcgtta

SEQ ID NO: 40591 - DNA, 75 bp, synthetic construct
  source 1..75: mol_type = other DNA
acagaagtggctccggctgaagtatctgacgttggagcattgagcggtgcctatcaggctggtgggcgctttact

SEQ ID NO: 40592 - DNA, 75 bp, synthetic construct
  source 1..75: mol_type = other DNA
caaggtgaagtgtatcgccagcttttgcaaacgcccgcgccgatgcaaaaaccaaaagcgccagaaccgcaggaa

SEQ ID NO: 40593 - DNA, 75 bp, synthetic construct
  source 1..75: mol_type = other DNA
ctgacagcgcaggcggaggcgcaggagcttaaaaacgagcgcgaacgcggcgatgtgattagtacggaattttgt

SEQ ID NO: 40594 - DNA, 75 bp, synthetic construct
  source 1..75: mol_type = other DNA
gtggtgtcgaaatacattgtgcggctggcgaaagtgccgcaaagctctgtcgaccagatgtctccggcagacctg

SEQ ID NO: 40595 - DNA, 75 bp, synthetic construct
  source 1..75: mol_type = other DNA
ggaccgctttatcggcggcgggctgaaatatccttatgtcgaaggattgcgtctcgacgaagcaatgcatccgct

SEQ ID NO: 40596 - DNA, 75 bp, synthetic construct
  source 1..75: mol_type = other DNA
ggggccaggtaaagcaagtaatgatacaaaagaagctgctggccgttgtgacctcgttgaaaccgataatagttg

SEQ ID NO: 40597 - DNA, 75 bp, synthetic construct
  source 1..75: mol_type = other DNA
tttgattggtaaatatattcaccatgacaatgattacacaggtaactttgctagcctgggaacgaaacactacaa

SEQ ID NO: 40598 - DNA, 75 bp, synthetic construct
  source 1..75: mol_type = other DNA
accggaggtggtatcattactgaaaaaggtgtaaatgtgctttggcaggttaatggtgttaatgatgataactta

SEQ ID NO: 40599 - DNA, 75 bp, synthetic construct
  source 1..75: mol_type = other DNA
tcacgccactcatcagggttgaaaccgccaccggtgagcaggcgaaaacgcagcgccgcagcctggcggataccc

SEQ ID NO: 40600 - DNA, 75 bp, synthetic construct
  source 1..75: mol_type = other DNA
atgatagttaaatttcatgccaggggaaaaggcggtggcagtggtccggttgattacctgctgggaagggagcgt

SEQ ID NO: 40601 - DNA, 75 bp, synthetic construct
  source 1..75: mol_type = other DNA
aaaggagcattttatgagcaatcttttacagacgggcgcggagttcgagaaaaagctgaaagagagagccgaatc

SEQ ID NO: 40602 - DNA, 75 bp, synthetic construct
  source 1..75: mol_type = other DNA
agtacaatataaacaacgatatcaacaagaattgatattgcgtggcaattatgcgtctgcgacagatcaattacg

SEQ ID NO: 40603 - DNA, 75 bp, synthetic construct
  source 1..75: mol_type = other DNA
aaagggaacgatcgtccgcccgcccccgccggaaaaccgctggagttcagcaagcctgccgcctggcaaaataac

SEQ ID NO: 40604 - DNA, 75 bp, synthetic construct
  source 1..75: mol_type = other DNA
tccggggaaaattccgctcgatttaattgaagtgcgctccggctcttatctcgaagaggatgatgtggtgcgctt

SEQ ID NO: 40605 - DNA, 75 bp, synthetic construct
  source 1..75: mol_type = other DNA
gtcttcgccaccgctggatgcgcctgcgcttatatcgtttccccggttctgttttgaccgattaccggatactga

SEQ ID NO: 40606 - DNA, 75 bp, synthetic construct
  source 1..75: mol_type = other DNA
tcagatgcgcttcaggcagaaatcaatgagctggaatcactcattgtcaaagcagaacagattggcactgatacc

SEQ ID NO: 40607 - DNA, 75 bp, synthetic construct
  source 1..75: mol_type = other DNA
ctgggttatcgctcgccacgggaatatctgcggcagcgggccagtaatgggttaagtgataacaggtgtctggaa

SEQ ID NO: 40608 - DNA, 75 bp, synthetic construct
  source 1..75: mol_type = other DNA
atttatgtgctttaatcagacgatattttaaagaatcagaaaataaatttatcaatcatgcttggcaaacactga

SEQ ID NO: 40609 - DNA, 75 bp, synthetic construct
  source 1..75: mol_type = other DNA
gtccgtgccacactggaagcgcatgggatgggcgtcggaaatgagagtccctctgctccgccggagacaatgccg

SEQ ID NO: 40610 - DNA, 75 bp, synthetic construct
  source 1..75: mol_type = other DNA
ggttgagtcctttgttctgcagcttattgccgagcaggagcgggtttgggagcttattttaaccaatgatggtta

SEQ ID NO: 40611 - DNA, 75 bp, synthetic construct
  source 1..75: mol_type = other DNA
ctgaatactcttcaacagaggaccacattgacgaagtgtttcgacgcataaattccaatggtaaaattttatcaa

SEQ ID NO: 40612 - DNA, 75 bp, synthetic construct
  source 1..75: mol_type = other DNA
gaagacagcttccgggacgtcatcgacggtttcgccctgaaaaacccgctcatcgcctctctcgatgacgagctg

SEQ ID NO: 40613 - DNA, 75 bp, synthetic construct
  source 1..75: mol_type = other DNA
ttcgcaagacattcggcaatcgctacgacctgacccgtgatgtcgacggcttctactgccgtgaagttgtgaaac

SEQ ID NO: 40614 - DNA, 75 bp, synthetic construct
  source 1..75: mol_type = other DNA
ttatgcaccagtgaacatctgctggttcatcatccgatgctggaaggcattctcctgtctgaatgtgaacgtctg

SEQ ID NO: 40615 - DNA, 75 bp, synthetic construct
  source 1..75: mol_type = other DNA
atgcataagtcagtcgcagaacatattgatttaattccggatgaacatgagttgatattcagaaaaccgaaatct

SEQ ID NO: 40616 - DNA, 75 bp, synthetic construct
  source 1..75: mol_type = other DNA
agacaggctgacagaggttcaattcccatcaaccaggatgaaaagaactcaagacgcacagtaaatctcttcgct

SEQ ID NO: 40617 - DNA, 75 bp, synthetic construct
  source 1..75: mol_type = other DNA
gcgagaacgtgtatcgttttcgccggataagctcgatcaggcgcttgacagcctgcttgcgcagccgatggtgca

SEQ ID NO: 40618 - DNA, 75 bp, synthetic construct
  source 1..75: mol_type = other DNA
tcgatacagccaccaggcaattccccaatcaggcagcggcactagacgacgtataccggactttgaagagagaga

SEQ ID NO: 40619 - DNA, 75 bp, synthetic construct
  source 1..75: mol_type = other DNA
tctgaagccctgcacaacggcaatcagtagccctcagagtaatggagtgacagaacggttcgtgaaaacgatgaa

SEQ ID NO: 40620 - DNA, 75 bp, synthetic construct
  source 1..75: mol_type = other DNA
gtcttcgccaccgctgggggcgtctgcgcttatatcgtttccccggttctgttttgaccgattaccgaatactga

SEQ ID NO: 40621 - DNA, 75 bp, synthetic construct
  source 1..75: mol_type = other DNA
ttcatggcattgcgcactttatgatatattatttcatctggttttacgaaatatggaagaccagcctgaacatca

SEQ ID NO: 40622 - DNA, 75 bp, synthetic construct
  source 1..75: mol_type = other DNA
gtttactgatactcctgcctctgacggtaaccagtaagccattgattccaataatgaagactctttttacggatg

SEQ ID NO: 40623 - DNA, 75 bp, synthetic construct
  source 1..75: mol_type = other DNA
taccctgcggtggtgttcgatgaccgggaagtggtgtacggcaccaccgatgtggcacaggctgaacgactcagg

SEQ ID NO: 40624 - DNA, 75 bp, synthetic construct
  source 1..75: mol_type = other DNA
ccatatgcgcggtgaagtggcagcggctgatgatgacgagttactgagcaacaagctaaagcaaatcagagaaat

SEQ ID NO: 40625 - DNA, 75 bp, synthetic construct
  source 1..75: mol_type = other DNA
tttcgccaacaaaccggagttgtaccgtttattgtggttttacccgacattaataatgaagccagtctcaggcaa

SEQ ID NO: 40626 - DNA, 75 bp, synthetic construct
  source 1..75: mol_type = other DNA
tgccactcatatcaactaaatttgatggctcgcatgaatttgaaataaaaaaatggaaagatgttaaaaaaggtt

SEQ ID NO: 40627 - DNA, 75 bp, synthetic construct
  source 1..75: mol_type = other DNA
ggcagaactcccaaaaaacttggaatggattggggggatggggatatcgttgccctttctgctgctaatgttaaa

SEQ ID NO: 40628 - DNA, 75 bp, synthetic construct
  source 1..75: mol_type = other DNA
ggggctgcgaccggagagatatctgtatcttctgtcgccgacacgttacgtagattgtatggttctgcggagtag

SEQ ID NO: 40629 - DNA, 75 bp, synthetic construct
  source 1..75: mol_type = other DNA
taccccgcagaacagctccggcagcgtcatcaccgccacagtcgttgataataatggctttccggtgaaaggtgt

SEQ ID NO: 40630 - DNA, 75 bp, synthetic construct
  source 1..75: mol_type = other DNA
caaaagatgagatcacaggtaatggcgtcgatagcgcaacgctaactgcaacggttaaagatcagttcgacaatg

SEQ ID NO: 40631 - DNA, 75 bp, synthetic construct
  source 1..75: mol_type = other DNA
gtaaaagcgatacgaaaatcgtcaatattgtgcccgataccagcaacgcgcaggtcacgctgaatatcccggctc

SEQ ID NO: 40632 - DNA, 75 bp, synthetic construct
  source 1..75: mol_type = other DNA
gacttctgcggctatctcatgtcgtcggtaatgtgcgatggcctgttagtgggtaatgctgaaattattccgttc

SEQ ID NO: 40633 - DNA, 75 bp, synthetic construct
  source 1..75: mol_type = other DNA
ggtttgcgttcaaatgtgacactgacagaggattcagaagactggatgccatcatgtgcatcggtcacaaatgac

SEQ ID NO: 40634 - DNA, 75 bp, synthetic construct
  source 1..75: mol_type = other DNA
ataacacgggcgcgcatagcacaagtggtaacattaatggtggcccgaccgggcttggtgtaggtggtggtgctt

SEQ ID NO: 40635 - DNA, 75 bp, synthetic construct
  source 1..75: mol_type = other DNA
aactgccagtgaagaaggcagagcgcaaaaatgacgagcgtgcttcatctttggcgttgaatcagatgggggcca

SEQ ID NO: 40636 - DNA, 75 bp, synthetic construct
  source 1..75: mol_type = other DNA
tggaaaacctgcataaagctgtatcaggaaaactgcacaacaatagccagcagtcctcagataaacggaatagca

SEQ ID NO: 40637 - DNA, 75 bp, synthetic construct
  source 1..75: mol_type = other DNA
acgccattaaatttgccgtagagacaatgaaattgagtctacctgttatggggggagcggacagaaatcttattg

SEQ ID NO: 40638 - DNA, 75 bp, synthetic construct
  source 1..75: mol_type = other DNA
ctacagcgaccaagttgcagacagcatgtactatcaacggtgtctcgtttgatggttctaaaaatattgagctaa

SEQ ID NO: 40639 - DNA, 75 bp, synthetic construct
  source 1..75: mol_type = other DNA
tgaatcaattgagccagcgatgcgatgcctggcaatgccaaatatggggaaccggtggtcgactgcgcttgatgt

SEQ ID NO: 40640 - DNA, 75 bp, synthetic construct
  source 1..75: mol_type = other DNA
ccgggagaagaaggtcagaaagggcttataggctggtttgaaagcggggatgtgcgggcctataaaatccgtttc

SEQ ID NO: 40641 - DNA, 75 bp, synthetic construct
  source 1..75: mol_type = other DNA
gtgacacaccagggccgaactatatccactttcccgactggctggggcggtggttttacgatgagctgacctatg

SEQ ID NO: 40642 - DNA, 75 bp, synthetic construct
  source 1..75: mol_type = other DNA
catttcttcccaagctgactcgctgattaaaatttcgcggatctgggccgatttttttcccgcaaacacatcgaa

SEQ ID NO: 40643 - DNA, 75 bp, synthetic construct
  source 1..75: mol_type = other DNA
tgaaatttatcccttgtacggggcatagtcggatttatttgctgcaaatgaaagatgtggcatttgtcagcagtc

SEQ ID NO: 40644 - DNA, 75 bp, synthetic construct
  source 1..75: mol_type = other DNA
atggctgaagatcgcagtacggtgacggcagcaaccggcatgacggtaacgccagccagtgcttccgtagtgaaa

SEQ ID NO: 40645 - DNA, 75 bp, synthetic construct
  source 1..75: mol_type = other DNA
gttgtcaaaaatcagttccgccgtggagatacaaaacgctttgcagcccgtatcacgctggatctgtctggtatc

SEQ ID NO: 40646 - DNA, 75 bp, synthetic construct
  source 1..75: mol_type = other DNA
attatgctcagtaaacagctggcctttgcggatggttaaaggaactgttgtggggacaactgacacattgcgtga

SEQ ID NO: 40647 - DNA, 75 bp, synthetic construct
  source 1..75: mol_type = other DNA
tcaggatggactggggcgacgggtttttctggtaaagggagacagcacgaaacgccagaaaattatcaccatcac

SEQ ID NO: 40648 - DNA, 75 bp, synthetic construct
  source 1..75: mol_type = other DNA
aagtgttcgttactgaagacggcgctgaaaccgacttggacctggggcactacgagcgtttcattcgtaccaaaa

SEQ ID NO: 40649 - DNA, 75 bp, synthetic construct
  source 1..75: mol_type = other DNA
ctggcgcggggaacactccgcatcgctcatgccgataatcgggctcggcggtttatccccgctggcgcggggaac

SEQ ID NO: 40650 - DNA, 75 bp, synthetic construct
  source 1..75: mol_type = other DNA
attgctggcttatatcggtctgaaggaccgcttcgcccatgccagacagttcgccgcttttgcgggtctgacacc

SEQ ID NO: 40651 - DNA, 75 bp, synthetic construct
  source 1..75: mol_type = other DNA
agtgttatcagaaattattttcagcgaaaaattgacgagcgcgccgctgaaaaaatcagtcagaagtctgcacaa

SEQ ID NO: 40652 - DNA, 75 bp, synthetic construct
  source 1..75: mol_type = other DNA
cggcattgtcagctaccgcgaagtaacggcggcgatggcaaaaattttccaggccagaggcggcgagattatcta

SEQ ID NO: 40653 - DNA, 75 bp, synthetic construct
  source 1..75: mol_type = other DNA
taacgttaccggagcagatgcgcgagcggctcaatgaaacgatggacatcatcagtctgggtggagcgaccgagt

SEQ ID NO: 40654 - DNA, 75 bp, synthetic construct
  source 1..75: mol_type = other DNA
caagacgttcagagcggtttccgccgatccgtcgaaagccaccattagtgtgaaagatatgacaattacggtaaa

SEQ ID NO: 40655 - DNA, 75 bp, synthetic construct
  source 1..75: mol_type = other DNA
cgatgtgttccgtggctgggtcagcagcatcggtaaggcggtgacggcaaaggaagtgatcacccgtacggtgaa

SEQ ID NO: 40656 - DNA, 75 bp, synthetic construct
  source 1..75: mol_type = other DNA
ccagtggcgaaaagtgcgcgtcacccgtaccccggcctatgacgtgatgggggcggcggcgttgttcttttcggc

SEQ ID NO: 40657 - DNA, 75 bp, synthetic construct
  source 1..75: mol_type = other DNA
cgtcagtgcgctgatgaatgcaacacccggacgtgacctctgctggctcctgacacgtcatcctgaaaaaccgga

SEQ ID NO: 40658 - DNA, 75 bp, synthetic construct
  source 1..75: mol_type = other DNA
tccaggaaaaatacctttagaaataattgaggttcgctcaggttcttatcttgaagaagatgatatagttaagtt

SEQ ID NO: 40659 - DNA, 75 bp, synthetic construct
  source 1..75: mol_type = other DNA
ttgaggacgagaaccgccgtctaaaacaaatgtttgccgacctgagtctggagaaccgggcgctgaaagacgtta

SEQ ID NO: 40660 - DNA, 75 bp, synthetic construct
  source 1..75: mol_type = other DNA
ataaaaacagatatcggacgcagggatgtcagtgaggtccgtgaatggcctgcgtggatggactggttgcacggg

SEQ ID NO: 40661 - DNA, 75 bp, synthetic construct
  source 1..75: mol_type = other DNA
tgctggatgcctgcgcggattctcaaagccccagcctgctgatgattgcaaaaatatgcctagctactggtgcgc

SEQ ID NO: 40662 - DNA, 75 bp, synthetic construct
  source 1..75: mol_type = other DNA
caccgatgtgtggacgcataaaccggtgcagtactatcccgggaaacatccgtgcgaaaaaccggcagaaatgct

SEQ ID NO: 40663 - DNA, 75 bp, synthetic construct
  source 1..75: mol_type = other DNA
tgggccgccagtggctgcaaacctatccggactccagcctgaaaggcaaaatgccgtactacattgagccagcgg

SEQ ID NO: 40664 - DNA, 75 bp, synthetic construct
  source 1..75: mol_type = other DNA
gaaagggaactcaaacagcacataatggcaccgctgatatcgtatttcagggatgctcgtgccgaactgggtata

SEQ ID NO: 40665 - DNA, 75 bp, synthetic construct
  source 1..75: mol_type = other DNA
ggctggaccagtgtctggcgcagttctggcgggtgctgaaacctgccggaagtctttacctgttctgtggccatc

SEQ ID NO: 40666 - DNA, 75 bp, synthetic construct
  source 1..75: mol_type = other DNA
catcattaatgatgtgaaaacaccatcaatattcgatgaatacgtggttgctgttgagcatcaacttcgtggctg

SEQ ID NO: 40667 - DNA, 75 bp, synthetic construct
  source 1..75: mol_type = other DNA
caaagtccggcaaaaaactgtcagccctgctggttctcgggggcgtgattatcatcgggggcggatacctgctgc

SEQ ID NO: 40668 - DNA, 75 bp, synthetic construct
  source 1..75: mol_type = other DNA
gtctgtatgcccatcaaatcaagagcgccatcgaaaaacagttcggggatgcgagtaagtattcaggaaaagagt

SEQ ID NO: 40669 - DNA, 75 bp, synthetic construct
  source 1..75: mol_type = other DNA
ccgctggcgcggggaactcacgaacgcggcacaccagggcgtctcatcgtccggtttatccccgctggcgcgggg

SEQ ID NO: 40670 - DNA, 75 bp, synthetic construct
  source 1..75: mol_type = other DNA
aagacggatattttgtaaacgtgcgcatcattaatgatgcaaaaaaatcgtcaatattcgataaatacgcggttg

SEQ ID NO: 40671 - DNA, 75 bp, synthetic construct
  source 1..75: mol_type = other DNA
agcgggaagaactgaaggcacgaattatcgggctggtacacaggaacaaacgcatgacgatgtcgcaactggaga

SEQ ID NO: 40672 - DNA, 75 bp, synthetic construct
  source 1..75: mol_type = other DNA
cataaaaactacaatcgctgggtccgcaatctcgacaaagatattcaactgaatttgtcagcgggcgcagattta

SEQ ID NO: 40673 - DNA, 75 bp, synthetic construct
  source 1..75: mol_type = other DNA
ggtgcaaaaccaggtacacagccgcagacctgtccgacctgtcatggttctggtcaggtgcagatgcgccagggt

SEQ ID NO: 40674 - DNA, 75 bp, synthetic construct
  source 1..75: mol_type = other DNA
tttgatgagatagatgaaagctgcgcccttttaaatgagttaaaaaatctttgctctgaggactttatccataaa

SEQ ID NO: 40675 - DNA, 75 bp, synthetic construct
  source 1..75: mol_type = other DNA
gcatccttaacgggactcgctcactaacactagatcacatgaaagcacttgcgcggcgcttcaacattccgccca

SEQ ID NO: 40676 - DNA, 75 bp, synthetic construct
  source 1..75: mol_type = other DNA
cggattaattcatatcaatggtgaggatgacaagcttcatgagtccgcactgttaatgcttaaggatgttgctgc

SEQ ID NO: 40677 - DNA, 75 bp, synthetic construct
  source 1..75: mol_type = other DNA
ggcagttgatccatgttgaaaatggtaaacattttgttattcgtaatatcaaagcccgcaatatcacgccggatt

SEQ ID NO: 40678 - DNA, 75 bp, synthetic construct
  source 1..75: mol_type = other DNA
atgagcaaagaattttacgcaagactggcagctattcaggaaaatctgaacgcgcccaagaatcagtacaactca

SEQ ID NO: 40679 - DNA, 75 bp, synthetic construct
  source 1..75: mol_type = other DNA
tgcctggtaatgttattggcaaagggggtaacgctgtagtatatgaagatgctgaggatgcaacaaaagtcctga

SEQ ID NO: 40680 - DNA, 75 bp, synthetic construct
  source 1..75: mol_type = other DNA
aaaaatcacccgggccgaatacaacagcaccatgggatattttgttgaagtaacaggaaaagccggtgttaaaac

SEQ ID NO: 40681 - DNA, 75 bp, synthetic construct
  source 1..75: mol_type = other DNA
gtttttaacggagacaagaatgtaccgacagacagccttgagtcacagcctctgattcttccgggcaagggaaaa

SEQ ID NO: 40682 - DNA, 75 bp, synthetic construct
  source 1..75: mol_type = other DNA
cggataacattaaagtcacgcgcccggaagatttggcactggccgagttttacctcacccgaaccatccatcagg

SEQ ID NO: 40683 - DNA, 75 bp, synthetic construct
  source 1..75: mol_type = other DNA
ggaaggtcaggaaggacgtctgtttggcccgctggcattcacgaaaacgtactccatggcgggcgcggccgcgct

SEQ ID NO: 40684 - DNA, 75 bp, synthetic construct
  source 1..75: mol_type = other DNA
cttaaagttacaaactaagccagccttaagaattaaaaccaaacatcaaattatcacctcacgcaaaccaaaaac

SEQ ID NO: 40685 - DNA, 75 bp, synthetic construct
  source 1..75: mol_type = other DNA
agttcgggcaggatttcacattatacgaagcactacgcacggttgatcgtctgcttcgcgggcaaagttttatta

SEQ ID NO: 40686 - DNA, 75 bp, synthetic construct
  source 1..75: mol_type = other DNA
acggctgttgttgccgcgattggcaaaggaactgaatttaaaaatggtcgtcactttgccacatggcttggtctg

SEQ ID NO: 40687 - DNA, 75 bp, synthetic construct
  source 1..75: mol_type = other DNA
atcctcgtccgagaaacggcacatgtaaaacttcagccgtggcaggatgataagtggagtcgagtattgccgtat

SEQ ID NO: 40688 - DNA, 75 bp, synthetic construct
  source 1..75: mol_type = other DNA
acctggctgattgagaaagctggaatcgtgatccacaaatgcccacgcaatccgtttaccggaaaccgcattttt

SEQ ID NO: 40689 - DNA, 75 bp, synthetic construct
  source 1..75: mol_type = other DNA
agcaatggagctacgttggcagtaaagcccggcaacactggctcgggtacgcgtacaacaccaaaacaggcggtg

SEQ ID NO: 40690 - DNA, 75 bp, synthetic construct
  source 1..75: mol_type = other DNA
aatggattctgcacaagttacgggagctacaagctcttatgcacgcaagtattgcctcaatggtttgttcggcat

SEQ ID NO: 40691 - DNA, 75 bp, synthetic construct
  source 1..75: mol_type = other DNA
atctcgggttgacggcaggtaaagtgtggttcaacaccccaaccgatgattataacggtctgcaacttgcagccc

SEQ ID NO: 40692 - DNA, 75 bp, synthetic construct
  source 1..75: mol_type = other DNA
cagcttctcgtggagcgacgatcgccagtactgttcggaagtggtgtggaaggtttatcagaatgcgctgggaat

SEQ ID NO: 40693 - DNA, 75 bp, synthetic construct
  source 1..75: mol_type = other DNA
caggtggatggcgcccgcatcaccaacagcaaattcagccacctgcagggcgatgcgatagagtggaatgtggcc

SEQ ID NO: 40694 - DNA, 75 bp, synthetic construct
  source 1..75: mol_type = other DNA
agacgaaaggtgcggggacgacgttctggatgtataccggcaacggcgacgcatttgcgaaccctttgtcggaca

SEQ ID NO: 40695 - DNA, 75 bp, synthetic construct
  source 1..75: mol_type = other DNA
aaatcagatcgctcctgagtccgggcaaattgcgcccgctctcgcacactttgggcaaaacgaaacaacgtcgcc

SEQ ID NO: 40696 - DNA, 75 bp, synthetic construct
  source 1..75: mol_type = other DNA
cccgtaaagagacgttcacaccggaaggtcttgatgaagccctttatcatggtgccgtgctgcgtgtccggccga

SEQ ID NO: 40697 - DNA, 75 bp, synthetic construct
  source 1..75: mol_type = other DNA
gtggctgcgcgggctgttattcctaaagtcgttggccgggtgcttgttcgtcgctttgctgccaatgatgcgatt

SEQ ID NO: 40698 - DNA, 75 bp, synthetic construct
  source 1..75: mol_type = other DNA
gtaaggacaacctgaccgccaacggcattgaactgccggatgtggaaggggccgtggtgtccggtaccgccagtg

SEQ ID NO: 40699 - DNA, 75 bp, synthetic construct
  source 1..75: mol_type = other DNA
tcaaatttgtggtgcccgttgtggttgtgggcggggtattcatcgggcttaaaagctgtggtgatcccgcgtcgt

SEQ ID NO: 40700 - DNA, 75 bp, synthetic construct
  source 1..75: mol_type = other DNA
gtatggtgctgttagggacgagcacttttgctggaaatatatgggctgcggattggggaccatgtcagacatcaa

SEQ ID NO: 40701 - DNA, 75 bp, synthetic construct
  source 1..75: mol_type = other DNA
taaccgtattgatatgctctcaaccggcattaaaagtccgataggtattaaggtatcgggtactgttctgtcgga

SEQ ID NO: 40702 - DNA, 75 bp, synthetic construct
  source 1..75: mol_type = other DNA
cgggtgccgggattgagaccccggataatgcaaaaggcgacacagacgccaaaagcgtctttttttgtgtcatgc

SEQ ID NO: 40703 - DNA, 75 bp, synthetic construct
  source 1..75: mol_type = other DNA
agcacaggaggaggctgaacgaatccggcgcgaggctgaagcaaaagagcaagccagaatagcagaagaaaaaag

SEQ ID NO: 40704 - DNA, 75 bp, synthetic construct
  source 1..75: mol_type = other DNA
aagccatgctgtatggctccattgtaactttccttggctggacattgtatggcctggtatctccacgttttgaac

SEQ ID NO: 40705 - DNA, 75 bp, synthetic construct
  source 1..75: mol_type = other DNA
gtgctgctgatgcactcgatgctaaatacacgaaggagttagctgatgcgaaagctgaaaatgatgctcttcggc

SEQ ID NO: 40706 - DNA, 75 bp, synthetic construct
  source 1..75: mol_type = other DNA
gggtagccaggttcagcgcgataaagggtacgaaaccagcacgattaaacctggctacatgaagccaaagcacga

SEQ ID NO: 40707 - DNA, 75 bp, synthetic construct
  source 1..75: mol_type = other DNA
aacgtttcctgggatgcgctgaacacggcatacagtgaacacccggagtggttttcagggcttgtctccggggat

SEQ ID NO: 40708 - DNA, 75 bp, synthetic construct
  source 1..75: mol_type = other DNA
actggaaggtggacgttatattgatgtggacattaaccgggaaaaagcttcccggtacgggatgactgtgggcga

SEQ ID NO: 40709 - DNA, 75 bp, synthetic construct
  source 1..75: mol_type = other DNA
cgaaacgttctcggtatcagagacggaatcatcagagaccagacagcactgagaacgcttcaggaatacatcaga

SEQ ID NO: 40710 - DNA, 75 bp, synthetic construct
  source 1..75: mol_type = other DNA
aacagaaacagcaccattacacatcgacaaggaaattgtccggtcagtagccccgtcagagacgaaaaatgaaat

SEQ ID NO: 40711 - DNA, 75 bp, synthetic construct
  source 1..75: mol_type = other DNA
acagtgccgacgctggacaactggcaactggacttacagggcatttccgacaagctggacggcgtaaaagtggtc

SEQ ID NO: 40712 - DNA, 75 bp, synthetic construct
  source 1..75: mol_type = other DNA
gtgtggatcactattgcaccgttcgtgacacataccggcagagtggctgtgaaagaaagtaatcagcgatggtgc

SEQ ID NO: 40713 - DNA, 75 bp, synthetic construct
  source 1..75: mol_type = other DNA
aaagaaatactttcgttcagttaacttccgacactgggtattcggcacagaaacagggaagatcctgccatcagg

SEQ ID NO: 40714 - DNA, 75 bp, synthetic construct
  source 1..75: mol_type = other DNA
gcgctatatggaaattagccgttcatcgacaaaaattaatttagataatctcggtttattaaccatgcaggccaa

SEQ ID NO: 40715 - DNA, 75 bp, synthetic construct
  source 1..75: mol_type = other DNA
aggaaaacttattgacaccgggttctgtatttttgccctcagcaagctggcaatggcgttatccagtacgcttga

SEQ ID NO: 40716 - DNA, 75 bp, synthetic construct
  source 1..75: mol_type = other DNA
gtggcaagaacgacacgccccctgaccaacacagaagttctgcgcgctaaagcgttagaaaaggatctaacgttg

SEQ ID NO: 40717 - DNA, 75 bp, synthetic construct
  source 1..75: mol_type = other DNA
atttaagagatcttgccctttttgattatccctcttcggcaacactgtatatgacgaatgagcagtatattatgg

SEQ ID NO: 40718 - DNA, 75 bp, synthetic construct
  source 1..75: mol_type = other DNA
gacgttttactctggaagttaggaaaaaatgattcgcgtcgccgttcaggagtatattatttaaatgcttataaa

SEQ ID NO: 40719 - DNA, 75 bp, synthetic construct
  source 1..75: mol_type = other DNA
tggactggttcaacacccgcaccgggaatatcctgcgccagcaggtttccttttccgaaaatgatctttcgttgc

SEQ ID NO: 40720 - DNA, 75 bp, synthetic construct
  source 1..75: mol_type = other DNA
gcgcagcttcctcggcaacggcggcagcaaattctgcgaaggcggcaaaaacgtccgagacgaacgccaggtctt

SEQ ID NO: 40721 - DNA, 75 bp, synthetic construct
  source 1..75: mol_type = other DNA
aggggataatttgtttgcagttgatgtcagagggatagatccagaggaagggcggtttaataatctacggcttat

SEQ ID NO: 40722 - DNA, 75 bp, synthetic construct
  source 1..75: mol_type = other DNA
ctatatgttgtgctgacagaaggtggcgttgttgtgggggaaaaggaagatccgtaactatcaggactctgacga

SEQ ID NO: 40723 - DNA, 75 bp, synthetic construct
  source 1..75: mol_type = other DNA
tggccccgctgatttcttactttcgtgatgcgcgcgcggccctggggataacggcaaaacagattgcagatgcca

SEQ ID NO: 40724 - DNA, 75 bp, synthetic construct
  source 1..75: mol_type = other DNA
aagtaaccctttaggggccagcatgaaaactttgacaaaatatgctcatgcctgtggcgcaaccatcgatattca

SEQ ID NO: 40725 - DNA, 75 bp, synthetic construct
  source 1..75: mol_type = other DNA
gaagatgccgataaggaactggagatggtagaaatgttgtacgaaatgagagaaaaagcggggttaacaaagtct

SEQ ID NO: 40726 - DNA, 75 bp, synthetic construct
  source 1..75: mol_type = other DNA
atggaacactgcatcgttgatttaggcattataaactatcatcctgtcattacatggacagtacctgttgcattt

SEQ ID NO: 40727 - DNA, 75 bp, synthetic construct
  source 1..75: mol_type = other DNA
atgaacatgaaaaaaactggcttaactgccagcggcaaacctcgccctgaatttaagcgcggtgatatttaccgc

SEQ ID NO: 40728 - DNA, 75 bp, synthetic construct
  source 1..75: mol_type = other DNA
ctgggaaaacagataaatgcccgcattgacgaagattttttgaaagagctgatgcgtcttggtcgcctgcagaag

SEQ ID NO: 40729 - DNA, 75 bp, synthetic construct
  source 1..75: mol_type = other DNA
gaacccgacccgtctggtgattgtgccgcgttccaaccgcgtggatatggatcaggtgatgaaccacctcttcgc

SEQ ID NO: 40730 - DNA, 75 bp, synthetic construct
  source 1..75: mol_type = other DNA
gtcgtacggaaaacttccttaaccgtaagttgtatgcaaccgcagatgacaggcctgcggatgatcctgatgggc

SEQ ID NO: 40731 - DNA, 75 bp, synthetic construct
  source 1..75: mol_type = other DNA
caactgctggcctgtgcggcgcaaaagcggacggaaacgtatctgaaccggaagctctatgcaccggatgaaacc

SEQ ID NO: 40732 - DNA, 75 bp, synthetic construct
  source 1..75: mol_type = other DNA
tatcaggacatcgttccatgaatatgctgaaacggtatactcatcttcgtgcatggcaactggtcagtaagcttg

SEQ ID NO: 40733 - DNA, 75 bp, synthetic construct
  source 1..75: mol_type = other DNA
atgctgttaaaaatggaagagattaagcttcagctccgtctggatgatgatttctctgatgaagatgagttgctt

SEQ ID NO: 40734 - DNA, 75 bp, synthetic construct
  source 1..75: mol_type = other DNA
aacaaaacccagaactttgaagtcactgcacagtaccagtttgattttggtctgcgtccggcagtctctttcctg

SEQ ID NO: 40735 - DNA, 75 bp, synthetic construct
  source 1..75: mol_type = other DNA
cgccggacagcctgccgccggtggagtggctgacctacggcagcggttatctggcgggcatgaagcttggcgaca

SEQ ID NO: 40736 - DNA, 75 bp, synthetic construct
  source 1..75: mol_type = other DNA
cagttgccaggcgtgccggtgctgatgttgttgggcgcgctcgtgggactgctgaccggctcagtctctcccatt

SEQ ID NO: 40737 - DNA, 75 bp, synthetic construct
  source 1..75: mol_type = other DNA
catgttgaaacggtacacacatctccgggcatatcacctggtcagtaaactcgatgcaaggcgtaaacagaccag

SEQ ID NO: 40738 - DNA, 75 bp, synthetic construct
  source 1..75: mol_type = other DNA
tggtgcgttggtgctgaacagcagcaatgttatttatgaaattgccacgccatatactgaagccgatctgttccg

SEQ ID NO: 40739 - DNA, 75 bp, synthetic construct
  source 1..75: mol_type = other DNA
cacatcctgcgtgacaagttgtcaccgtatgacaccgaagagatgcttgagactatgcgtatttttctggaagaa

SEQ ID NO: 40740 - DNA, 75 bp, synthetic construct
  source 1..75: mol_type = other DNA
atgcgtggacggctcgcgtcgttggcgtcgttaaaaaagccttgcacgtacaaatagatggcttagaaaccgtgt

SEQ ID NO: 40741 - DNA, 75 bp, synthetic construct
  source 1..75: mol_type = other DNA
aaagggcgcaaatcagtgtgcgcgggcaggggataaattaccggatttgctggatgaatatatcagagcaacaac

SEQ ID NO: 40742 - DNA, 75 bp, synthetic construct
  source 1..75: mol_type = other DNA
gccgacaccctcggctcctgtggttacgtttatctggctgtttatcctgcgaccgaaacggaaagtaaccctccg

SEQ ID NO: 40743 - DNA, 75 bp, synthetic construct
  source 1..75: mol_type = other DNA
gatgaaatcaccaccgttgatatcgccacttaccgggatcagcgtttggctcaaattaacccacgaacagggcgt

SEQ ID NO: 40744 - DNA, 75 bp, synthetic construct
  source 1..75: mol_type = other DNA
gccgacaccctcggctcctgtggttacgtttatctggctgtttatccgacaccggcacccgcaatcacctcataa

SEQ ID NO: 40745 - DNA, 75 bp, synthetic construct
  source 1..75: mol_type = other DNA
ggaaaagtactggctgataatgtaaaaattgagcaggtaagaattttcatggataaacgggggattgagagcaag

SEQ ID NO: 40746 - DNA, 75 bp, synthetic construct
  source 1..75: mol_type = other DNA
gatgcgtgagcggtttaacgtactgaaccatatcatctgggcaaagccgtccggacgctggaacgggtgtaacaa

SEQ ID NO: 40747 - DNA, 75 bp, synthetic construct
  source 1..75: mol_type = other DNA
aaaagcagctcgaagaacaacagaaagccgaagagaaagcacaaaaaagtaaaattgttggtcaggtctttggtt

SEQ ID NO: 40748 - DNA, 75 bp, synthetic construct
  source 1..75: mol_type = other DNA
agccctttaccggtgccgccggcaggccactcattagtgacgccctctgctgctgaggatgtccttaataaattg

SEQ ID NO: 40749 - DNA, 75 bp, synthetic construct
  source 1..75: mol_type = other DNA
ggtaaaacgaccaccgtagcgaagttgctggcagcgttaattcaaatggccgacggcgaacgctgccgtatccgt

SEQ ID NO: 40750 - DNA, 75 bp, synthetic construct
  source 1..75: mol_type = other DNA
gtacaaaaaggtactgtttccaagttagtagggcagttacctgatttgtttttttataataaacaattgtcaatg

SEQ ID NO: 40751 - DNA, 75 bp, synthetic construct
  source 1..75: mol_type = other DNA
actcggcgcgagaagtggtgatgtttagctcggtgatgcgtgcgcagctttctctggcatgggttatcggtccac

SEQ ID NO: 40752 - DNA, 75 bp, synthetic construct
  source 1..75: mol_type = other DNA
cgccaacgcggcatcagcccggcaggtcttgccaccagctttgaaaaactggcaaaactggaagaaggtcgccaa

SEQ ID NO: 40753 - DNA, 75 bp, synthetic construct
  source 1..75: mol_type = other DNA
ccgcacaggacgccaccatagcgcgaaaaggccttgtccagctcagtagtgccaccaacagcacgtctgaaacac

SEQ ID NO: 40754 - DNA, 75 bp, synthetic construct
  source 1..75: mol_type = other DNA
cgtggcggcgtagtcggtgccatcaccaccatgggcgttatcgtcggcgcagacatgccgatgttcctcggttct

SEQ ID NO: 40755 - DNA, 75 bp, synthetic construct
  source 1..75: mol_type = other DNA
tggcgctgtatcgcaacaatccgcgctgtaaagcggtggtgcatttgcacagcacatggtcgacggcgctttcct

SEQ ID NO: 40756 - DNA, 75 bp, synthetic construct
  source 1..75: mol_type = other DNA
aaaacacgtagcgcaagcggcggagttctgggtgttctgtgccgactttaaccgccatttacagatctgtccgga

SEQ ID NO: 40757 - DNA, 75 bp, synthetic construct
  source 1..75: mol_type = other DNA
cgccaacgcggcatcagtccggctggccttgccaccagctttgaaaaactggctaaactggaagaaggtcgccaa

SEQ ID NO: 40758 - DNA, 75 bp, synthetic construct
  source 1..75: mol_type = other DNA
cagaagaggttgcgaaggctgccacatcagggagcagtatccccggaccgaaaggtgataaaggagagccgggac

SEQ ID NO: 40759 - DNA, 75 bp, synthetic construct
  source 1..75: mol_type = other DNA
aaacttttttgccaattatcgagcgttagccagcggtgttcggccaggtgtggcgaaagcggatgcgatatttat

SEQ ID NO: 40760 - DNA, 75 bp, synthetic construct
  source 1..75: mol_type = other DNA
agatcgtgttcgtcgccttaaaaatcatgcggaattcaatcttcagaaatctcactggcgtccgcttataggcac

SEQ ID NO: 40761 - DNA, 75 bp, synthetic construct
  source 1..75: mol_type = other DNA
ccgcaaagcgcggacttaaacgctactacaccggaaaaccatgtaagcacggacatgacagtgaacgctgggttt

SEQ ID NO: 40762 - DNA, 75 bp, synthetic construct
  source 1..75: mol_type = other DNA
aacagcgtcagtcattgctgtactcggtgccgcaggcttagctgttggtctggctttgcaggggtcactgtctaa

SEQ ID NO: 40763 - DNA, 75 bp, synthetic construct
  source 1..75: mol_type = other DNA
tacagtgaccttagtccaagaacacaaaaagattatctgcaacatcaaaaaaagttgcttgccgtattcggtaag

SEQ ID NO: 40764 - DNA, 75 bp, synthetic construct
  source 1..75: mol_type = other DNA
tatgatcggtaaattcgtcgatgtagaaattaccgacgtctacccgaactctctgcgcggtaaagtggtgcgtac

SEQ ID NO: 40765 - DNA, 75 bp, synthetic construct
  source 1..75: mol_type = other DNA
gttaattttgtctttcatgttttcactgattatgtggatgatgattatttaaagtcatttaatgaaacagcaaaa

SEQ ID NO: 40766 - DNA, 75 bp, synthetic construct
  source 1..75: mol_type = other DNA
aagattatctcaactccgatatttttgatggcttcagttacattggcggcagcatcagtaccgatgatcaaatgt

SEQ ID NO: 40767 - DNA, 75 bp, synthetic construct
  source 1..75: mol_type = other DNA
aaaagcggcactgtcgctgggacgcagggcgattggcgtggaactggaagaggaacgttttaatcagacggtcag

SEQ ID NO: 40768 - DNA, 75 bp, synthetic construct
  source 1..75: mol_type = other DNA
cttgaagattacatgatggaaaacaatcacttgaaagactcccctgttgaaaagcatgtagaagacgacaggaat

SEQ ID NO: 40769 - DNA, 75 bp, synthetic construct
  source 1..75: mol_type = other DNA
ccgaacgacatcgagctgtatatgttcgctcaggcgaactctgagcactgccgccacaaaatttttaacgccgac

SEQ ID NO: 40770 - DNA, 75 bp, synthetic construct
  source 1..75: mol_type = other DNA
taaggctctgaaccgtatgacggcgattgaggtgaatgacctgctgccgaagactgagcatgcagaactgccgga

SEQ ID NO: 40771 - DNA, 75 bp, synthetic construct
  source 1..75: mol_type = other DNA
taattctggtcagcctcggcctctctggtcaggcgctggcgctggaagtgggaaaaggtagcccatacgactacc

SEQ ID NO: 40772 - DNA, 75 bp, synthetic construct
  source 1..75: mol_type = other DNA
atattgtgctgcgcgagctgcgtctggcggtacgactgccgggccgcgtgaccacctcccgcctgctgcataccg

SEQ ID NO: 40773 - DNA, 75 bp, synthetic construct
  source 1..75: mol_type = other DNA
gccatgctcgaggagtacaaaaaaattgtgaatacgggggacggtgatgcgatcaaaggggatgaagcaggtcgt

SEQ ID NO: 40774 - DNA, 75 bp, synthetic construct
  source 1..75: mol_type = other DNA
aatcgaacgccgggcgcgaaggggcctctaaaatctggtacgggcagattaaagacatgcccgtcagcgatgcca

SEQ ID NO: 40775 - DNA, 75 bp, synthetic construct
  source 1..75: mol_type = other DNA
atgctgacgaaatatgcccttgcggcagtcatagtgctgtgtttgacggtgctgggatttacgcttctggtcgga

SEQ ID NO: 40776 - DNA, 75 bp, synthetic construct
  source 1..75: mol_type = other DNA
agtcatggctggaactggcgagagccaatggttggtttgttgttcgcagagataaactggtggaaaggttgatgc

SEQ ID NO: 40777 - DNA, 75 bp, synthetic construct
  source 1..75: mol_type = other DNA
gaacgaatgcaacagctttccggcgaatgggtgacggtagggacgggctggcaagcctggccggatctcggtaaa

SEQ ID NO: 40778 - DNA, 75 bp, synthetic construct
  source 1..75: mol_type = other DNA
tccggctgcgggaacgtccggcactcaccggaggtgcagcttaccgtcagtggttgtccgcgagtgacgccgtgt

SEQ ID NO: 40779 - DNA, 75 bp, synthetic construct
  source 1..75: mol_type = other DNA
cgcaggtttaatacaagcacttttaaagacacctatcagtatggttctacagctgtcggaagtaactcataccag

SEQ ID NO: 40780 - DNA, 75 bp, synthetic construct
  source 1..75: mol_type = other DNA
cttagtggcgagcgcgattttgttttcattggcgatcataatccgcgtaaaccgatgagtgaaaacactgtgaac

SEQ ID NO: 40781 - DNA, 75 bp, synthetic construct
  source 1..75: mol_type = other DNA
ctgattagcgatcgtccgttaccggcagattatgttacgcactgccggaatggttctgtaaagatcattacacct

SEQ ID NO: 40782 - DNA, 75 bp, synthetic construct
  source 1..75: mol_type = other DNA
aacgtaatatcgctgagttaaaaactcgagatttattagcacccattaaggccgtagaaatgtctggacgtcttg

SEQ ID NO: 40783 - DNA, 75 bp, synthetic construct
  source 1..75: mol_type = other DNA
ctgttgtatctggcaaatttatgcagatgcaatcacagccaacgcttgaacaaacaagcaataataaaattacga

SEQ ID NO: 40784 - DNA, 75 bp, synthetic construct
  source 1..75: mol_type = other DNA
cgtcgaactctctccagttgctggacgaaacgttctcagtatcagatccggaatcatcagcgaccaaacatcact

SEQ ID NO: 40785 - DNA, 75 bp, synthetic construct
  source 1..75: mol_type = other DNA
cgggtttattgatagcgataacagcatgctgaacgttgctgtctcccgtgcgaaggacagtttcctggtcttcgg

SEQ ID NO: 40786 - DNA, 75 bp, synthetic construct
  source 1..75: mol_type = other DNA
ctattcatcatcgtcatcctcttcattcgacaatgacaattttagcggtggtggcggtggcgcttccgggcgctg

SEQ ID NO: 40787 - DNA, 75 bp, synthetic construct
  source 1..75: mol_type = other DNA
cgtaaatgtgaacacccatctttaaaagcctttctggaacggcacggtggcgtccgtgcatttcagtggacgcca

SEQ ID NO: 40788 - DNA, 75 bp, synthetic construct
  source 1..75: mol_type = other DNA
tgtgggtattagctggattgtcaggctctgtgccctgtttaccacactcggtgctttgttcctttacactaataa

SEQ ID NO: 40789 - DNA, 75 bp, synthetic construct
  source 1..75: mol_type = other DNA
gcaaggtaacggtattgcaatgctccatatgactaaagaaaaaatggaacaacagataatcgctttaccgcctat

SEQ ID NO: 40790 - DNA, 75 bp, synthetic construct
  source 1..75: mol_type = other DNA
atggagacgtttcgctggaaggtgcgcccggatatgaatgtggtatcagagccaaaagtggtggcagtgaagctg

SEQ ID NO: 40791 - DNA, 75 bp, synthetic construct
  source 1..75: mol_type = other DNA
tacctccgctatgtccttgacgtcatagccgactggccgataaaccgggtcggcgaactgctcccctggcgcgta

SEQ ID NO: 40792 - DNA, 75 bp, synthetic construct
  source 1..75: mol_type = other DNA
tgctgaagaacgttgccggcgactggattaaaaatcctgagcaatatgaactcgctgagcacggttatattgtta

SEQ ID NO: 40793 - DNA, 75 bp, synthetic construct
  source 1..75: mol_type = other DNA
caatatgtgtcgctggcatacactcagcggcttaaggatgcagagttgctggcgtcaaccggcagcacaggcgac

SEQ ID NO: 40794 - DNA, 75 bp, synthetic construct
  source 1..75: mol_type = other DNA
atgccaacaccaaatcctctggcaccggtgaaaggggccggaaccacactgtgggtttataacgggagcggcgac

SEQ ID NO: 40795 - DNA, 75 bp, synthetic construct
  source 1..75: mol_type = other DNA
accaaaaagcggaacaaaacagcccaaatgcgttacaaaacgagccagaaacgaaacaatccgaaccagtagcgc

SEQ ID NO: 40796 - DNA, 75 bp, synthetic construct
  source 1..75: mol_type = other DNA
taacggagactgatcacgagaaccctaccgaggaaactctcgctgctgcacgacatacaccggaaaaagatatcc

SEQ ID NO: 40797 - DNA, 75 bp, synthetic construct
  source 1..75: mol_type = other DNA
ttgttctggaaaagcttgagatgaagtggtccccagagcaaatatcaggatggttaaggcgaacgaagccgcgtc

SEQ ID NO: 40798 - DNA, 75 bp, synthetic construct
  source 1..75: mol_type = other DNA
gttacaattgcgggaatttatcgacgaaaactccggtgaattttttgttcaggtctggggaaatggagccaactt

SEQ ID NO: 40799 - DNA, 75 bp, synthetic construct
  source 1..75: mol_type = other DNA
aaaaataatgaggaaaaatcacaaccgtctgacgcaatggcagatgaacaggcaacggctgaaacaatggaaccg

SEQ ID NO: 40800 - DNA, 75 bp, synthetic construct
  source 1..75: mol_type = other DNA
tgacgaacctgcctctgaactgctcaaacgaattgcgcaggaaaaagcacaactggtgaaagacgggaaaataaa

SEQ ID NO: 40801 - DNA, 75 bp, synthetic construct
  source 1..75: mol_type = other DNA
gtttttatgggatcattttatattgaaagaatattgagtttttctacattcccttcggttttgttgataacgaca

SEQ ID NO: 40802 - DNA, 75 bp, synthetic construct
  source 1..75: mol_type = other DNA
taagtactaagcctgaattaattatattagtgcttatggttatgatcattgctatgttgatcataccattaccta

SEQ ID NO: 40803 - DNA, 75 bp, synthetic construct
  source 1..75: mol_type = other DNA
gcagctgaagatgcggaaatacatcatgattatgcccgggcattaatattgtggcagcatgcatatcatgctgcc

SEQ ID NO: 40804 - DNA, 75 bp, synthetic construct
  source 1..75: mol_type = other DNA
cgacagtgaaacagtacaggacgtcatgctgggagcagtggaacgccgctttggcagcgagcttccggcgtctcc

SEQ ID NO: 40805 - DNA, 75 bp, synthetic construct
  source 1..75: mol_type = other DNA
atgaaagatgtcagtattttgaatgaaatgatcttcagtgcatcaacagaaaatgaactacaggaaaaatttgaa

SEQ ID NO: 40806 - DNA, 75 bp, synthetic construct
  source 1..75: mol_type = other DNA
ggtgaggtgatgcacagcctgcacgccggtaagagcggcactatcacggtaactttgctgaaaacctccccggta

SEQ ID NO: 40807 - DNA, 75 bp, synthetic construct
  source 1..75: mol_type = other DNA
gaagtgatgcacagcctgcacgcggacaaaagcggcacggtaaccgtcaacctgctgaaaacctcgccgacaaac

SEQ ID NO: 40808 - DNA, 75 bp, synthetic construct
  source 1..75: mol_type = other DNA
tatcaaaggaaaagtgcataacgcgccggtatggcaactgatgggcggcctggtgcgcgacaaaatcaaagccta

SEQ ID NO: 40809 - DNA, 75 bp, synthetic construct
  source 1..75: mol_type = other DNA
atgcagaacttaaagacgcaggactggttcgttacggaacaacatttatgccggagggcagggtgttgctgcgtc

SEQ ID NO: 40810 - DNA, 75 bp, synthetic construct
  source 1..75: mol_type = other DNA
aacatgaacagtcacgacgtcacccggacgcctcgctgaccgcaaaaggttttactcagttaagcagtgcgacca

SEQ ID NO: 40811 - DNA, 75 bp, synthetic construct
  source 1..75: mol_type = other DNA
aagggaaagaaaactccacgtatatcgatcccaccggtacacccaccatctgttacggccataccggcccggatg

SEQ ID NO: 40812 - DNA, 75 bp, synthetic construct
  source 1..75: mol_type = other DNA
tcgttgctgtaaccgttctgttctctgttaacgtagcagcaaaaacaataaagctaccggctggtatcaaatacg

SEQ ID NO: 40813 - DNA, 75 bp, synthetic construct
  source 1..75: mol_type = other DNA
tatgaccttgctaacgggaaatataccgcacaggacgccaccacagcacgaaaaggccttgtccagctcagtagt

SEQ ID NO: 40814 - DNA, 75 bp, synthetic construct
  source 1..75: mol_type = other DNA
agcacatctttatgcgaaatatcaaagtgatacaaccctcttcgcgcgggcccgcgctacagctccacttcgacc

SEQ ID NO: 40815 - DNA, 75 bp, synthetic construct
  source 1..75: mol_type = other DNA
cgtcatatataaacatcatcaagaaaactcaaattatgggatgcgctagagttcctcaaggaatactcaccggaa

SEQ ID NO: 40816 - DNA, 75 bp, synthetic construct
  source 1..75: mol_type = other DNA
tggtgagtttatgtaccagtgagcatttgcttgtgcatcatccgatgctggaaggtgttttgttatctgaatgtg

SEQ ID NO: 40817 - DNA, 75 bp, synthetic construct
  source 1..75: mol_type = other DNA
aatgggcggcgtgagaacggcagccgaaattatcaacctgatgaaaactcagcaggaagaagccgttattaccgc

SEQ ID NO: 40818 - DNA, 75 bp, synthetic construct
  source 1..75: mol_type = other DNA
tacggatgcgataattttgtccttgataatattaagatgagcaattctgctggaatattaataggctatggggta

SEQ ID NO: 40819 - DNA, 75 bp, synthetic construct
  source 1..75: mol_type = other DNA
tctatctccattatcattccctgttttaatgaggagaaaaacgttgaggaaaccatacacgccgctttagcacag

SEQ ID NO: 40820 - DNA, 75 bp, synthetic construct
  source 1..75: mol_type = other DNA
cccgtgctctgttcaaaggtgaagtttatacgcctgcaactgatgacctactgatctcttatgctgaactgttcg

SEQ ID NO: 40821 - DNA, 75 bp, synthetic construct
  source 1..75: mol_type = other DNA
ctaatcaccttaccgaacacgcacggcaaatagactcgatcctgaacccatcggtcccaaatttgtcccagtcaa

SEQ ID NO: 40822 - DNA, 75 bp, synthetic construct
  source 1..75: mol_type = other DNA
ggaaaggggttacagagcccgtctttttccgtcatgacctttccgttactcagcagccagaactgcagggtgtat

SEQ ID NO: 40823 - DNA, 75 bp, synthetic construct
  source 1..75: mol_type = other DNA
gataatctacgtcagactcccttattccgaacgcccgccgcgtccatcccgcacattccagcaacggatctggag

SEQ ID NO: 40824 - DNA, 75 bp, synthetic construct
  source 1..75: mol_type = other DNA
acagatatctggaatatggcctgatgcgtatactgagcggatatcaggtcacgacaggcagagagctgtttaatg

SEQ ID NO: 40825 - DNA, 75 bp, synthetic construct
  source 1..75: mol_type = other DNA
gcagaaaaaactggttcagttgttcgactccggtgaagtctgcgcgtttcgtatcaaatatcccaacggtactgt

SEQ ID NO: 40826 - DNA, 75 bp, synthetic construct
  source 1..75: mol_type = other DNA
tgaggatttaccacctggctggggattacttcacgttgttaacggaagagtacggaaagtacatggatggcccaa

SEQ ID NO: 40827 - DNA, 75 bp, synthetic construct
  source 1..75: mol_type = other DNA
gggcagactgtaacagataatgtaatgcgttcaccaagaactatttcaatcagtggtgtggttgtggttggtgaa

SEQ ID NO: 40828 - DNA, 75 bp, synthetic construct
  source 1..75: mol_type = other DNA
ccattgaccaggcattacagaaacatgatacacccgtcggcccgttattttttgtaacacgccacggaagaacaa

SEQ ID NO: 40829 - DNA, 75 bp, synthetic construct
  source 1..75: mol_type = other DNA
aaacgcagcgatcgagacacttaacccattcagagaagtggcgttagagtggcacaaaatgaaatctcccaaatg

SEQ ID NO: 40830 - DNA, 75 bp, synthetic construct
  source 1..75: mol_type = other DNA
tctttgtcgcaatgttgctctggtgtggcggctttttcagccaggcatgcgcagcacaacctccgcaggctgcgc

SEQ ID NO: 40831 - DNA, 75 bp, synthetic construct
  source 1..75: mol_type = other DNA
gggaaagagatgatctaccgtcaggtagaaaacagctttacccagccgaacgcggcgatgaatattcagatgctg

SEQ ID NO: 40832 - DNA, 75 bp, synthetic construct
  source 1..75: mol_type = other DNA
agatggaatatgacagccctatgatggtgaccactcaaaatatgcaatcagggcagactgtaacagataatgtaa

SEQ ID NO: 40833 - DNA, 75 bp, synthetic construct
  source 1..75: mol_type = other DNA
tattgccgcattaaaacaaaacaccaaatgggactataccgtgatggggctggcaatgaccggggttgttatccc

SEQ ID NO: 40834 - DNA, 75 bp, synthetic construct
  source 1..75: mol_type = other DNA
tgtgaagccgacaccctcggctcctgtggttacgtttatctggctgtttatccgacgcccgaaacgaaaaagtaa

SEQ ID NO: 40835 - DNA, 75 bp, synthetic construct
  source 1..75: mol_type = other DNA
atgccaacaccaaatcccctggcgccggtaaaaggtgccggtaccaccctgtgggtttataacggtcagggtgat

SEQ ID NO: 40836 - DNA, 75 bp, synthetic construct
  source 1..75: mol_type = other DNA
tcagatgccgctaatgagcaagcttcaaaggtgcttagtaatgctggtacaggtaatgttttgaagaggctgtct

SEQ ID NO: 40837 - DNA, 75 bp, synthetic construct
  source 1..75: mol_type = other DNA
atctccgtcaggcttccttactccgaacgcccaccgcgtccgtcccgcacattccagcaacggatctggaggtaa

SEQ ID NO: 40838 - DNA, 75 bp, synthetic construct
  source 1..75: mol_type = other DNA
accgacatccggtacggtggcaaaagggaaaacaaccaccctgactgtttcttttgagccggaaagtgcaaccga

SEQ ID NO: 40839 - DNA, 75 bp, synthetic construct
  source 1..75: mol_type = other DNA
acgcatcagatgtttaccggatttataccgggataaaaagcagtaaaggtatccggcttccggccacgaagaaat

SEQ ID NO: 40840 - DNA, 75 bp, synthetic construct
  source 1..75: mol_type = other DNA
gttgcactgcaaataattatttgaaacaggcctggaacgatataaaaaatgagtacgaaaaaaatcaaacatatt

SEQ ID NO: 40841 - DNA, 75 bp, synthetic construct
  source 1..75: mol_type = other DNA
ggacgcggtggtggtgagcggggatatcgtcaactgcggccgcccggaggagtatcaggtggcccgccagatcct

SEQ ID NO: 40842 - DNA, 75 bp, synthetic construct
  source 1..75: mol_type = other DNA
agaatgactttgacgctcttgtcgactttttccttaaagagagaaatacagagaaatgcctagatttcatagaaa

SEQ ID NO: 40843 - DNA, 75 bp, synthetic construct
  source 1..75: mol_type = other DNA
aatgcttttggtattactacaaagctggtaaatcgcgttcatagcaaaattgttattggtgatgatggtttgctg

SEQ ID NO: 40844 - DNA, 75 bp, synthetic construct
  source 1..75: mol_type = other DNA
atgccatggtgattggtttcggcctggctgctggtatccgggtttatattgcctgggagtcattaatcaatctgg

SEQ ID NO: 40845 - DNA, 75 bp, synthetic construct
  source 1..75: mol_type = other DNA
ctgtgcaaccagctatgacgatgtgaaagcttacacccctgcctgggcagagcagattaccggcgtttctcgcag

SEQ ID NO: 40846 - DNA, 75 bp, synthetic construct
  source 1..75: mol_type = other DNA
acggcgcatccgctgccgcgttcattaagccgtctgaatcctgatttactgtacggcaatgtgctggcaagcggc

SEQ ID NO: 40847 - DNA, 75 bp, synthetic construct
  source 1..75: mol_type = other DNA
cgtggcgacaggtaaggtgcagatccctgtggtgagcggaaatggtcagttcgccgcagtggctgaagtcaccgt

SEQ ID NO: 40848 - DNA, 75 bp, synthetic construct
  source 1..75: mol_type = other DNA
ttaccttgccgaccgcgccggtatcagaggccgcttcagcgacgcagatgcataccatctggaccaggcctttcc

SEQ ID NO: 40849 - DNA, 75 bp, synthetic construct
  source 1..75: mol_type = other DNA
gacagcagtgagacacgggcctacaaaatccgtttcccgaacggcacggtggatgtgttccgtggctgggtgagt

SEQ ID NO: 40850 - DNA, 75 bp, synthetic construct
  source 1..75: mol_type = other DNA
catttataccggtgcttattatctggctatagcctttaaaaaatggggcgtctcctgggaggccgttggtgcata

SEQ ID NO: 40851 - DNA, 75 bp, synthetic construct
  source 1..75: mol_type = other DNA
aaattggacaactacgcagcgttatgttgcatcgcccaaatctcagtctgaaacgtctaacaccatccaattgcc

SEQ ID NO: 40852 - DNA, 75 bp, synthetic construct
  source 1..75: mol_type = other DNA
aaaacatgctgattatatttctagatccggcgaatataagaactacaaatcgcgggaggatctggaattttcgtc

SEQ ID NO: 40853 - DNA, 75 bp, synthetic construct
  source 1..75: mol_type = other DNA
tcgtttctgcggcgcagaaggtctgaacaacgttatcaccctctccactttccgtaacgctgaattcctgcaagc

SEQ ID NO: 40854 - DNA, 75 bp, synthetic construct
  source 1..75: mol_type = other DNA
ataaaaagggagtactattcgcatacagttgatattgagaaaaatattcatgccatatgggttgcgggttcccca

SEQ ID NO: 40855 - DNA, 75 bp, synthetic construct
  source 1..75: mol_type = other DNA
catcagccgtttgttcgagctcggcacactgaacgttatggagattgcagccatttccggtcaccgctccctgaa

SEQ ID NO: 40856 - DNA, 75 bp, synthetic construct
  source 1..75: mol_type = other DNA
tgaaacatttaaatactatacgacagcgacatttatcgcttcagtcatcgctctggcgggcacattcctgctgtc

SEQ ID NO: 40857 - DNA, 75 bp, synthetic construct
  source 1..75: mol_type = other DNA
gccacaaaagaacaggccatatttcatgccagcgtgttgctgctacgaacactggcacaagccgcccagcgagga

SEQ ID NO: 40858 - DNA, 75 bp, synthetic construct
  source 1..75: mol_type = other DNA
aagagcgccgtttgcagcaacataccagtgcgcagcttcatgcaggcgagacagtgacgttgcaaaaactggtgt

SEQ ID NO: 40859 - DNA, 75 bp, synthetic construct
  source 1..75: mol_type = other DNA
aatcgcttccgtttccgtggtgcactttccactgccagcatcgatgattttacccgttattctaaagatcttgca

SEQ ID NO: 40860 - DNA, 75 bp, synthetic construct
  source 1..75: mol_type = other DNA
ccgctggctgctgcgcctgcaacgccatctcgacaaccgccgtttcctgtggcagttgccgtggtatatggtcat

SEQ ID NO: 40861 - DNA, 75 bp, synthetic construct
  source 1..75: mol_type = other DNA
ttatcgttttcccgtcatttatgtcatgtctgccaatgtgcaatgacccaaagacaattttcgaccttgaccgtt

SEQ ID NO: 40862 - DNA, 75 bp, synthetic construct
  source 1..75: mol_type = other DNA
tctggtacctgcctccggaactaccccgtaaagatgccggtgaaatccctgcaagaaaacgggctgagtacagaa

SEQ ID NO: 40863 - DNA, 75 bp, synthetic construct
  source 1..75: mol_type = other DNA
tgtcagaatgcaggtatcaccggatattcacggtgcgcccggaaatatcactctgcgactctcgaccacagacca

SEQ ID NO: 40864 - DNA, 75 bp, synthetic construct
  source 1..75: mol_type = other DNA
catgtaaccacttttaagcgtgtggatagtgagcaatttgttaaattgtttactgcgaatattgggctaacattt

SEQ ID NO: 40865 - DNA, 75 bp, synthetic construct
  source 1..75: mol_type = other DNA
ccaccgtcgcgggtaatgtctcggttgagaaaactacccgcaatgccctgcaactgctgcatttctggaatgcgg

SEQ ID NO: 40866 - DNA, 75 bp, synthetic construct
  source 1..75: mol_type = other DNA
ggccaggctgggcgagaaaccccgcgtaactgggtgactaccgttgaacgtaaacaagaagctccaacctggacg

SEQ ID NO: 40867 - DNA, 75 bp, synthetic construct
  source 1..75: mol_type = other DNA
gccctgatatttatcctaacccaaccgacggtttacctgttggattcaaggttaacacatcaaatgcaccggagc

SEQ ID NO: 40868 - DNA, 75 bp, synthetic construct
  source 1..75: mol_type = other DNA
aatcacgattgaagcaaaccagaccgctgattttgaagacaatgacttcagcggcaaacgctctctgatggagtc

SEQ ID NO: 40869 - DNA, 75 bp, synthetic construct
  source 1..75: mol_type = other DNA
atgactaacgggaatttcagacaaattataaatcagcttgatatgcgctggcgacgtcgtgttccggttattcat

SEQ ID NO: 40870 - DNA, 75 bp, synthetic construct
  source 1..75: mol_type = other DNA
agacttttctcaaaacctacaaagagtttacttactatctttgggttgatgaaaaagcatttggagccgcgaaat

SEQ ID NO: 40871 - DNA, 75 bp, synthetic construct
  source 1..75: mol_type = other DNA
acgcttcttgagcctgtaataaatgaactgcaagaaatagacatcttgcacgacagatataaagagcaacacacc

SEQ ID NO: 40872 - DNA, 75 bp, synthetic construct
  source 1..75: mol_type = other DNA
tcgtaggtcgttccgttagcctgcatcgccagcaaattaaagagtggctggcgcgtcgggccaataacccattgc

SEQ ID NO: 40873 - DNA, 75 bp, synthetic construct
  source 1..75: mol_type = other DNA
tgtctgcggaagatctcgccgcagcccgtctgctgggtaaaaccgaagcagaatttctgaaactgaaagaggatt

SEQ ID NO: 40874 - DNA, 75 bp, synthetic construct
  source 1..75: mol_type = other DNA
acgtttacatccagtcccaggctgatgcctggcaggtgattaaagatattgccgcgggcttcaacggaatgactt

SEQ ID NO: 40875 - DNA, 75 bp, synthetic construct
  source 1..75: mol_type = other DNA
aaaagtggtttttatctgaccggtaaagccggtgcctctgtggtgtcactttcagaccagcgtttcctgtcagga

SEQ ID NO: 40876 - DNA, 75 bp, synthetic construct
  source 1..75: mol_type = other DNA
cacaaaatttttagccatgaacccggcaaaaaattttgcgtccgcccccggacagctgtcccgtgaggcggtaaa

SEQ ID NO: 40877 - DNA, 75 bp, synthetic construct
  source 1..75: mol_type = other DNA
tattcccgggtgatgaggtgtttgtcagaaccgttgaaggacacaacatgatcaaagttcttggctatgacagag

SEQ ID NO: 40878 - DNA, 75 bp, synthetic construct
  source 1..75: mol_type = other DNA
ctgcgaacaaattggcgatccggcgaccagcaaaggtccggttgagcgcaaagttgtgcgtatcgttacgccagg

SEQ ID NO: 40879 - DNA, 75 bp, synthetic construct
  source 1..75: mol_type = other DNA
actggcttaaggcgcaacaactggatgcggtgcttctctcctcacggcagaacaaacagccgcatctggggatct

SEQ ID NO: 40880 - DNA, 75 bp, synthetic construct
  source 1..75: mol_type = other DNA
gtcgcggtggcgaatttcgtcacctcgctgactgaaaacaaatatatgttccttttgattatcaacgtattgctt

SEQ ID NO: 40881 - DNA, 75 bp, synthetic construct
  source 1..75: mol_type = other DNA
caaactgggtcgcaactcccgatggctgaaaagcgaagtggaagcctggctgcaggcgcggattgctcagtcccg

SEQ ID NO: 40882 - DNA, 75 bp, synthetic construct
  source 1..75: mol_type = other DNA
taattgtcttagctctctcgggtaatctgcctactgctattgcagatgcaaaaaacaactcagataaattttatt

SEQ ID NO: 40883 - DNA, 75 bp, synthetic construct
  source 1..75: mol_type = other DNA
tttcccgccgcgcgctggccattgttggcgtggtaatgctggcgttgctggtctggtttattgggccgctggtcg

SEQ ID NO: 40884 - DNA, 75 bp, synthetic construct
  source 1..75: mol_type = other DNA
cagcagcgatctgtcttcattatttaacgctagcagcgggatgtggaattttattcctaaaattgagatccccat

SEQ ID NO: 40885 - DNA, 75 bp, synthetic construct
  source 1..75: mol_type = other DNA
ggtgcacattttattggcggcgctggtaggcatcgcgcctatttatatcgccattcaggcaatccctgacggtac

SEQ ID NO: 40886 - DNA, 75 bp, synthetic construct
  source 1..75: mol_type = other DNA
ggtcgagtggctacgggaaattctgccaggtaaaaccactgctgaattgtatatggctatcggctgccagaagca

SEQ ID NO: 40887 - DNA, 75 bp, synthetic construct
  source 1..75: mol_type = other DNA
gcggcatcatcggcatgtcgaccgccatgcaactgattgatgtctatccggatgcccgcattgcgttgctggaaa

SEQ ID NO: 40888 - DNA, 75 bp, synthetic construct
  source 1..75: mol_type = other DNA
tcgctgaatggctggaagactgggccgacttcctcacagcctatgacagcgacggtaatgtgctggatatcaaac

SEQ ID NO: 40889 - DNA, 75 bp, synthetic construct
  source 1..75: mol_type = other DNA
atggaaaaaaatcaggaagaaaggaaaatccccgtcattgtagtgaaaaaacgtcgtaccttttcgttaccttcc

SEQ ID NO: 40890 - DNA, 75 bp, synthetic construct
  source 1..75: mol_type = other DNA
gctcaaaaggcgatttactggagctgtactgcggcaacggtaacttttcattagcgctggcgcgcaattttgatc

SEQ ID NO: 40891 - DNA, 75 bp, synthetic construct
  source 1..75: mol_type = other DNA
cagcagcttgcctatctggcgctgaaacgctgggcgcgcctttattgccccgaagtgattcttggagtgtacacc

SEQ ID NO: 40892 - DNA, 75 bp, synthetic construct
  source 1..75: mol_type = other DNA
accaggaaatgagccgtgtcgcggcacaccatctgcttggttatatgtcgaagacgcgtcgtgttaacctggcaa

SEQ ID NO: 40893 - DNA, 75 bp, synthetic construct
  source 1..75: mol_type = other DNA
accgtgcgttacctatattggtgccgatggcgcgggtcactatgtgaagatggttcacaacggtattgaatacgg

SEQ ID NO: 40894 - DNA, 75 bp, synthetic construct
  source 1..75: mol_type = other DNA
cacaggttaagttcgacacaatgaaagcattcgcaggtatgggtgctgctgttgaagttctgatgaaggctgctc

SEQ ID NO: 40895 - DNA, 75 bp, synthetic construct
  source 1..75: mol_type = other DNA
atgatgcaggtaactcgcttgcgggtatcgccgtccttgaacaattgacgaaacagttagggcgttcggtttatt

SEQ ID NO: 40896 - DNA, 75 bp, synthetic construct
  source 1..75: mol_type = other DNA
gagaaaaatgccaaagcccggttacgagcagccaggacagcaatactgtatgcggaaaatgaccttaaaaatatt

SEQ ID NO: 40897 - DNA, 75 bp, synthetic construct
  source 1..75: mol_type = other DNA
ggagcgctggatcaactggcgtcgtcgccgtactgcggcggtggcggtgatcaccggagtgaactacggcagtgc

SEQ ID NO: 40898 - DNA, 75 bp, synthetic construct
  source 1..75: mol_type = other DNA
tgcgtctggcggaatacagccgtgattgcctgaaagcattgcgcgccgaaaccaatattcagtatgaagggcgtc

SEQ ID NO: 40899 - DNA, 75 bp, synthetic construct
  source 1..75: mol_type = other DNA
ccggataattggtaagcatcttgccgttcctcgctggcaggatacatgtgattattataatcagatgatggagcg

SEQ ID NO: 40900 - DNA, 75 bp, synthetic construct
  source 1..75: mol_type = other DNA
ttaccgatctgactgaagattcaacgctgatagatggttttctggcacagattcactgcctgccatgtgtaccga

SEQ ID NO: 40901 - DNA, 75 bp, synthetic construct
  source 1..75: mol_type = other DNA
tggttcgcgatctctatccacgcggcggtcatgtcgagcaggcgactttctggactggtctgcgcccgatgacgc

SEQ ID NO: 40902 - DNA, 75 bp, synthetic construct
  source 1..75: mol_type = other DNA
agcgggagaatctgaaggctcgaataatcgatctggtgcgcaaaaatgaacgcatgacgatgtcacagctggaga

SEQ ID NO: 40903 - DNA, 75 bp, synthetic construct
  source 1..75: mol_type = other DNA
ttaccgctgaacgtattagcgactacatgaccgaagcagttaatacagactctatagccgttgcggaaatgtttc

SEQ ID NO: 40904 - DNA, 75 bp, synthetic construct
  source 1..75: mol_type = other DNA
aattgtagaagttatgaaaaaccataatgtaaattggaaaattgctatcattatcagaaaaatctcaaaactaat

SEQ ID NO: 40905 - DNA, 75 bp, synthetic construct
  source 1..75: mol_type = other DNA
ttaaccgcaccagatatctggctgcttactgatctgacagaagactcaacactggtagatggttttctggcacag

SEQ ID NO: 40906 - DNA, 75 bp, synthetic construct
  source 1..75: mol_type = other DNA
ggcacagcgtgactatttcggtgcgcatacttataagcgcattgataaagaaggtgtgttccataccgaatggct

SEQ ID NO: 40907 - DNA, 75 bp, synthetic construct
  source 1..75: mol_type = other DNA
tccgcgcaaagcggcagttgccgcggctattgcccgcgttcaggccaaaaaagccgcccagcaaaaggttgtaaa

SEQ ID NO: 40908 - DNA, 75 bp, synthetic construct
  source 1..75: mol_type = other DNA
aaagcttttaagagggtatcttactttcactgttatgggtagtaatgccaattctgtgcagacagcagctaacga

SEQ ID NO: 40909 - DNA, 75 bp, synthetic construct
  source 1..75: mol_type = other DNA
gtggaggcatccggtgccagcctggagaaggggcggcatgaccagctgcttactgcgcttcgtgcgctgctgtta

SEQ ID NO: 40910 - DNA, 75 bp, synthetic construct
  source 1..75: mol_type = other DNA
ttgaacgtattgggatgcttacaaaacgctatccttcaagaagtgcagctgccagagcgtggggaattaatatca

SEQ ID NO: 40911 - DNA, 75 bp, synthetic construct
  source 1..75: mol_type = other DNA
tctcctgccgtcgatactcatccccctgaagcttctgccagtaagaaaaaaaggaaaagacgccgttttccacgc

SEQ ID NO: 40912 - DNA, 75 bp, synthetic construct
  source 1..75: mol_type = other DNA
atgaccagatggtcgacatggcgtttatcactcaactgaccggcctgaccgataagtggtttgacaaactcatca

SEQ ID NO: 40913 - DNA, 75 bp, synthetic construct
  source 1..75: mol_type = other DNA
cgcgcgagaattatttcactgggtcgagagtacccagtagatcaattgattaatcatgtttaccttcctgttcgc

SEQ ID NO: 40914 - DNA, 75 bp, synthetic construct
  source 1..75: mol_type = other DNA
atcgtttttttccaaattcactcgtctgaatatgcttcgcctggctcgcgctgtgatcccggctgctgttctgat

SEQ ID NO: 40915 - DNA, 75 bp, synthetic construct
  source 1..75: mol_type = other DNA
tcgattttttcggtcgcttaaagaacatgagcgaagccgagcgacaaaattatttagccactgaggaagctcagc

SEQ ID NO: 40916 - DNA, 75 bp, synthetic construct
  source 1..75: mol_type = other DNA
atcagcgtaacggtgtcttttacatccgtcttaggatgaagaccactagtcgcctgaccgcttcgcttccttctc

SEQ ID NO: 40917 - DNA, 75 bp, synthetic construct
  source 1..75: mol_type = other DNA
aaatggaaagatgttaaaaaaggttatacacactttgctaatggtgatatcgctattgcaaaaataacaccttgc

SEQ ID NO: 40918 - DNA, 75 bp, synthetic construct
  source 1..75: mol_type = other DNA
atcgcagtctggagtccggaactggatgatgccggtaactcgcttgcgggcattgccgtccttgaacaattgacg

SEQ ID NO: 40919 - DNA, 75 bp, synthetic construct
  source 1..75: mol_type = other DNA
ttttccaatcccaaacagctcatggcttttctgggactggtgccaggtgaatattccagtggaaacagtattcgt

SEQ ID NO: 40920 - DNA, 75 bp, synthetic construct
  source 1..75: mol_type = other DNA
aattgcaccagaggctagaggtaaatgtatgctttttggtcattggttagaacaacgtgacatccccgatcctta

SEQ ID NO: 40921 - DNA, 75 bp, synthetic construct
  source 1..75: mol_type = other DNA
aggcctgtggtacggggatttattgcagagcaacatgtacgaagtatgtttacaggtaccagccagatttgtacc

SEQ ID NO: 40922 - DNA, 75 bp, synthetic construct
  source 1..75: mol_type = other DNA
gtaccggaaatatatgtcgttctcctattgcagaaagaattttccgtaaagaaatgcctggtaaaataattgatt

SEQ ID NO: 40923 - DNA, 75 bp, synthetic construct
  source 1..75: mol_type = other DNA
gtaccgggaatatatgtcgttcaccaataggtgagcgcttattacaaaagtatctacaaaacaaaactgttgact

SEQ ID NO: 40924 - DNA, 75 bp, synthetic construct
  source 1..75: mol_type = other DNA
tttaaaatttgaagctgcgatcaaccaaaactgtgcagcaattatttttggaaaatcacaagagcctgaatttta

SEQ ID NO: 40925 - DNA, 75 bp, synthetic construct
  source 1..75: mol_type = other DNA
agcagagggggcgtagtaatccttgtatatcggagtgaagagaaaaatgacgatcacaaaacaacgtgtagaaaa

SEQ ID NO: 40926 - DNA, 75 bp, synthetic construct
  source 1..75: mol_type = other DNA
cgacaaatttatcgccatgcccggtgggctggattattcccgcgccattgtggtggcttccgtgaaagaagcacc

SEQ ID NO: 40927 - DNA, 75 bp, synthetic construct
  source 1..75: mol_type = other DNA
atggcgactgactcacaactaaccatagatacggctcttaatgtcggtctggcgctccttggttatttctacatc

SEQ ID NO: 40928 - DNA, 75 bp, synthetic construct
  source 1..75: mol_type = other DNA
gtgaatattgacccggcgataacgattgatatggccctgaacgccggcctggcacttcttggttatttctacatt

SEQ ID NO: 40929 - DNA, 75 bp, synthetic construct
  source 1..75: mol_type = other DNA
gctctatacacctccggcgatgatgcctttgtggtggtaagtgatttcgtgagtgctggcgacggtaaaaccgtg

SEQ ID NO: 40930 - DNA, 75 bp, synthetic construct
  source 1..75: mol_type = other DNA
cgcagccgctggatgctcagtcacaggtaaattctgttgatgcgaaatatcagaaactgcgggcagaactccatg

SEQ ID NO: 40931 - DNA, 75 bp, synthetic construct
  source 1..75: mol_type = other DNA
atggaaggttccgattttttactcgcaggagtgctgtttctcttcgcggcggtggctgcggtgccgctggcatcg

SEQ ID NO: 40932 - DNA, 75 bp, synthetic construct
  source 1..75: mol_type = other DNA
aactccagacattacatattgcacgggccgaagaactaccagctgttactgccctagctgtttcccacaaaacca

SEQ ID NO: 40933 - DNA, 75 bp, synthetic construct
  source 1..75: mol_type = other DNA
ttagagtggaaagttggcgacgaaccctactatccagttaatgataataaaaacatggagctttttaagaaatat

SEQ ID NO: 40934 - DNA, 75 bp, synthetic construct
  source 1..75: mol_type = other DNA
ccttccttttaatatgaatactttccaccaaatgtggggagttaaagatcctcaagaagctcaaaatatcattaa

SEQ ID NO: 40935 - DNA, 75 bp, synthetic construct
  source 1..75: mol_type = other DNA
acacgcttgatgatctagctttagtcgaaagagggaagttttctgtacgccctcgaaatgaccctcgctattacg

SEQ ID NO: 40936 - DNA, 75 bp, synthetic construct
  source 1..75: mol_type = other DNA
catatctacatgctgtttttgccgaactgaagcgccttggggagtggtctggtgaaaaccccctgactggtattc

SEQ ID NO: 40937 - DNA, 75 bp, synthetic construct
  source 1..75: mol_type = other DNA
gtcagcgaatgccgatactgctctgataagcagtgccttgcggatggcgtatgaggtgcgtggtcagccgcggga

SEQ ID NO: 40938 - DNA, 75 bp, synthetic construct
  source 1..75: mol_type = other DNA
gcgcagaaaacatccgctgaatgggtgcttgagggggatatacggggatgctttgacaatatatctcatcaatgg

SEQ ID NO: 40939 - DNA, 75 bp, synthetic construct
  source 1..75: mol_type = other DNA
ttatcggaactaacaccagagaacattaccgcatggctaagtaaagagagacaaaataggcctaccgtcactgct

SEQ ID NO: 40940 - DNA, 75 bp, synthetic construct
  source 1..75: mol_type = other DNA
ggtttacggtttatgtgcgaatcctgcaggtatagcctcagcgccattaattccgggtattgcaatgatgattgc

SEQ ID NO: 40941 - DNA, 75 bp, synthetic construct
  source 1..75: mol_type = other DNA
ttccgggtattgcaatgatgattgcaaacaaacttgaaaattttggggtgacggatgatgagtacatgcccaatt

SEQ ID NO: 40942 - DNA, 75 bp, synthetic construct
  source 1..75: mol_type = other DNA
catcgtgattgcagtgatgaaactggtgaagcgtcagctcctgtagcaactgaaatcatgtggccgtcatatttc

SEQ ID NO: 40943 - DNA, 75 bp, synthetic construct
  source 1..75: mol_type = other DNA
tatcacacaaggaaaaaatggcgtacttgtgtattttcaggggcagtttatccactatcccgccaaacctgtttc

SEQ ID NO: 40944 - DNA, 75 bp, synthetic construct
  source 1..75: mol_type = other DNA
acctatttcatggaacggctacggcactaccggcagttaagcctccagttgccaaaagggagcgatccggtgtat

SEQ ID NO: 40945 - DNA, 75 bp, synthetic construct
  source 1..75: mol_type = other DNA
gggtatcgatacaaaaacattactaggacataaagtccaggcaaccaccgatcgctataacgatactcgaggtca

SEQ ID NO: 40946 - DNA, 75 bp, synthetic construct
  source 1..75: mol_type = other DNA
acagtaaaaccaccgccacggcgacgcagcagcgtaacgtggttgccagcacccttcgtacgaccgcaatcagcg

SEQ ID NO: 40947 - DNA, 75 bp, synthetic construct
  source 1..75: mol_type = other DNA
cacggcgagcagttcctgaaagcgattgatatcgtgctggtggcagtcagtgaacacattgaacgtttcgctgcc

SEQ ID NO: 40948 - DNA, 75 bp, synthetic construct
  source 1..75: mol_type = other DNA
tggctaacgaactgtccaaaaacctcaaaacccctgaagacctcagtcagtttgatcggctgctgaaaaagctca

SEQ ID NO: 40949 - DNA, 75 bp, synthetic construct
  source 1..75: mol_type = other DNA
cagaaagctttttccagttgttgaaacgcgaacggataaagaaaaagatctacggaacgcgggaagaagcccgca

SEQ ID NO: 40950 - DNA, 75 bp, synthetic construct
  source 1..75: mol_type = other DNA
ggacctgatcgcacgcaccaaagcggcattacagaagaacccgaaaaatgtgttgctggcggtgtgctggatgca

SEQ ID NO: 40951 - DNA, 75 bp, synthetic construct
  source 1..75: mol_type = other DNA
ggtaaacccaattactgggttcctaaccttaatctgaaaccagaaaataacatcacccgtgagattggcgcaggt

SEQ ID NO: 40952 - DNA, 75 bp, synthetic construct
  source 1..75: mol_type = other DNA
acggagagcgctgggattcgctggcatggcagtactacggtgacccgctgggctatccccggattattgccgcca

SEQ ID NO: 40953 - DNA, 75 bp, synthetic construct
  source 1..75: mol_type = other DNA
agccagtcaggattcggctcgctggggagtgggtaagccgttatatcaggatctgcttttccgcacgaaggcagc

SEQ ID NO: 40954 - DNA, 75 bp, synthetic construct
  source 1..75: mol_type = other DNA
gataaaccatctgacatcggtgaagaccgtaacggaagggctttctcaggcaacagagcagcttgccgttgagca

SEQ ID NO: 40955 - DNA, 75 bp, synthetic construct
  source 1..75: mol_type = other DNA
ctcacacgggcactctattaccgttaatgctacaggtaataccgaaaacaccgtcaaaaacatcgcatttaacta

SEQ ID NO: 40956 - DNA, 75 bp, synthetic construct
  source 1..75: mol_type = other DNA
gtcagggtgctattcgagcaaatattgggcaaaaggacttggctagggtttgtatcttggtccccccattggcgg

SEQ ID NO: 40957 - DNA, 75 bp, synthetic construct
  source 1..75: mol_type = other DNA
ttgttgtgtccggtgccattcacctgtttaagcccctgtcgccgggggctgatacagccacaacctgccgcactg

SEQ ID NO: 40958 - DNA, 75 bp, synthetic construct
  source 1..75: mol_type = other DNA
gttggcgatgatcctttcggtcgctttatgtatcagacactgagtacagaaaatgttgatacacgttatatgtct

SEQ ID NO: 40959 - DNA, 75 bp, synthetic construct
  source 1..75: mol_type = other DNA
gcattgtcatcatgagcgcgaaactttcccgcctcccttccggtgcaatgaaaagcacatgggaggatgttgcca

SEQ ID NO: 40960 - DNA, 75 bp, synthetic construct
  source 1..75: mol_type = other DNA
ttgtcagatggtgtatttaagatcaccaagcagagcaataaaacctggtccctgacgcatccggtggatgacgca

SEQ ID NO: 40961 - DNA, 75 bp, synthetic construct
  source 1..75: mol_type = other DNA
cttccggcaaccagatgaatattcatcagagcagtcagaacatggtggccaactggaacagctttgacattggta

SEQ ID NO: 40962 - DNA, 75 bp, synthetic construct
  source 1..75: mol_type = other DNA
gaagtgccacaaggtgtgaaatgtgaaatcgatgagatggtaagaacgctacaaccaaggtatggcgcatctgaa

SEQ ID NO: 40963 - DNA, 75 bp, synthetic construct
  source 1..75: mol_type = other DNA
gaaaccatgttcctgctgggaagcgaagcgctgaaatcgatgattgataacgaagcgtctcgtccgctggtcttc

SEQ ID NO: 40964 - DNA, 75 bp, synthetic construct
  source 1..75: mol_type = other DNA
aaagattttcagcaactggcgctgatccgcaaaatggttgctgatatgggctttgatattgagattgtcggtgtg

SEQ ID NO: 40965 - DNA, 75 bp, synthetic construct
  source 1..75: mol_type = other DNA
cctttaaaaattacccatatggcggtgggcgatggtggcggaacattgccgacgccggacgcaaagcagagtgca

SEQ ID NO: 40966 - DNA, 75 bp, synthetic construct
  source 1..75: mol_type = other DNA
tctggttcgggatggttcaggctaccaggtggatatattgttcagtttggcactttttcaggaaacacgacccgc

SEQ ID NO: 40967 - DNA, 75 bp, synthetic construct
  source 1..75: mol_type = other DNA
aaagcgcctttggcaagccctgcattaacgggtgtccctactgcgcctacggctgcacagggcacaaacaatacg

SEQ ID NO: 40968 - DNA, 75 bp, synthetic construct
  source 1..75: mol_type = other DNA
aaaagaggcactggaagccgcagccgaaccagacgatcttagcgagtgggctgatatgcagttcctgttgtggga

SEQ ID NO: 40969 - DNA, 75 bp, synthetic construct
  source 1..75: mol_type = other DNA
gcttctcattttattacaaagataacgataataaatataaagaaatctttgatgaaatactggcctataatttta

SEQ ID NO: 40970 - DNA, 75 bp, synthetic construct
  source 1..75: mol_type = other DNA
aacacagagcatcttaatcgcagaagggctggcaacggcattatctgcccatttaattcgtccagaggcgctgac

SEQ ID NO: 40971 - DNA, 75 bp, synthetic construct
  source 1..75: mol_type = other DNA
atgtcatccattgatgcggctgtggtggtggacgttacgcgtctccagcgggtctttgcccggcttcagtttgtg

SEQ ID NO: 40972 - DNA, 75 bp, synthetic construct
  source 1..75: mol_type = other DNA
cttggtttgggagaaggctcagcattacctgttggggtgcctgttccgtggccttcagccactccgccaacaggc

SEQ ID NO: 40973 - DNA, 75 bp, synthetic construct
  source 1..75: mol_type = other DNA
cgctaaaccgaaaattcaggggaattgttgacccaggattttatgctggtttcttgcctaagcctggcggtggga

SEQ ID NO: 40974 - DNA, 75 bp, synthetic construct
  source 1..75: mol_type = other DNA
tttcactggctggtatgtcgccaaaatccagcaatatgacagcaaagtcaggcattaatacagcagatacaagca

SEQ ID NO: 40975 - DNA, 75 bp, synthetic construct
  source 1..75: mol_type = other DNA
tatatccagcaagttgacgaccaggtaaatgatgaacttgaaaaagatctgaaagacaacatcgcgctgcgtatg

SEQ ID NO: 40976 - DNA, 75 bp, synthetic construct
  source 1..75: mol_type = other DNA
cgcgcgttaaaacaggtacttcaacacggcgatccacgtcgtgtcgcgtgggataaaacaacgcatgacttcccc

SEQ ID NO: 40977 - DNA, 75 bp, synthetic construct
  source 1..75: mol_type = other DNA
gtaacttgcctcctctatcatatcactctatatatgatattttctcaaaaattgattgtgtatttaaaaaagagt

SEQ ID NO: 40978 - DNA, 75 bp, synthetic construct
  source 1..75: mol_type = other DNA
attttagtattgcgctgggccgtctttttcggacgaaccagatagtatcacagctcgcttcatattatggggagc

SEQ ID NO: 40979 - DNA, 75 bp, synthetic construct
  source 1..75: mol_type = other DNA
aaggacccaaactattccagataatgtaaaagcagactatgtgcgtaccgctcaaaagttgggattcaatgtcaa

SEQ ID NO: 40980 - DNA, 75 bp, synthetic construct
  source 1..75: mol_type = other DNA
agcatgtaaggccccgacaccacctaaaggtgtgcagccgattacaaattttgacgccaaccgctacctcggaaa

SEQ ID NO: 40981 - DNA, 75 bp, synthetic construct
  source 1..75: mol_type = other DNA
acacctggcatattatttcaaacgataaaggctatgatggaataattcatactctgcaaaaacggggttttcgtt

SEQ ID NO: 40982 - DNA, 75 bp, synthetic construct
  source 1..75: mol_type = other DNA
cgcaggcatggtacaggcgctgggggcgaaattatgcgacgccaacggcaatgaaattggttttggcggcggtag

SEQ ID NO: 40983 - DNA, 75 bp, synthetic construct
  source 1..75: mol_type = other DNA
tggcgcaccaggccgccactggatgtacaaggcgttagctaaactggaggacgaggggaaaattgccaaagaggc

SEQ ID NO: 40984 - DNA, 75 bp, synthetic construct
  source 1..75: mol_type = other DNA
caaaatcgtcgcactggaaaatatgattgataagaaagccatgagagaacgtttatccgtggtattaaacgaatt

SEQ ID NO: 40985 - DNA, 75 bp, synthetic construct
  source 1..75: mol_type = other DNA
gtgtgccgagcgaagccggttgtatgccggaactcctcacccgcttgcgtggcaagctgccaattattggcattt

SEQ ID NO: 40986 - DNA, 75 bp, synthetic construct
  source 1..75: mol_type = other DNA
cacgagggagtatcggtaatactggcgggagtgaaacccgtccacgaaatattgcatttaactatatcgtgaggg

SEQ ID NO: 40987 - DNA, 75 bp, synthetic construct
  source 1..75: mol_type = other DNA
ttgaatggcaggaatgcccttaatgctgccgtggctgctgtttttgccagagccctccaggtggatgtctctgat

SEQ ID NO: 40988 - DNA, 75 bp, synthetic construct
  source 1..75: mol_type = other DNA
cagctcactgctttagggacagaatttaccgtccgccagcaggataatttcacgcagcttgacgttcagcagcac

SEQ ID NO: 40989 - DNA, 75 bp, synthetic construct
  source 1..75: mol_type = other DNA
ctaatcatcctgatcatattgattattgttatgccggtaagcgtaaaagaatggataaacctgcataatccagaa

SEQ ID NO: 40990 - DNA, 75 bp, synthetic construct
  source 1..75: mol_type = other DNA
actgaagggggaggaaaaagagcgtgcccggctggggtatgcggcggatgaccttggttttgtgggggattcgta

SEQ ID NO: 40991 - DNA, 75 bp, synthetic construct
  source 1..75: mol_type = other DNA
gaatgccgcacctgccgtttttgctgttcagcgccctgcttggttttaccggctggcggatgagcaaacagccgc

SEQ ID NO: 40992 - DNA, 75 bp, synthetic construct
  source 1..75: mol_type = other DNA
gctttatgccatccgctccggtacgattaaaagttataccatcactgagcaaggcgacgagcaaatcactggttt

SEQ ID NO: 40993 - DNA, 75 bp, synthetic construct
  source 1..75: mol_type = other DNA
tggtggaaagtaaattctgatgacacaatttttttaggtggggataataataaaaatcttttcttttacaataat

SEQ ID NO: 40994 - DNA, 75 bp, synthetic construct
  source 1..75: mol_type = other DNA
cacggcgtgtcactacgtggtcacattgatgtcacgacggaagatttagcaagtgcgcttgatgtgacggaagac

SEQ ID NO: 40995 - DNA, 75 bp, synthetic construct
  source 1..75: mol_type = other DNA
cacagaatacgggtattacgcgcaatgctggtctgaaggtcaagggtggcttggtgatgatatcagcatccctga

SEQ ID NO: 40996 - DNA, 75 bp, synthetic construct
  source 1..75: mol_type = other DNA
atgacaaagatcgcggtcgagctttccttgctaacttttgtgcgttccagtgagttacgtttcgcacgttgggat

SEQ ID NO: 40997 - DNA, 75 bp, synthetic construct
  source 1..75: mol_type = other DNA
agctggtaccagacctgaccgattatcagtggtataaggggtatgcggacgtcattggtaaactggtaacaaagt

SEQ ID NO: 40998 - DNA, 75 bp, synthetic construct
  source 1..75: mol_type = other DNA
ctttattaacatttgttcgttccagtgagctacgtttcgctcgctgggatgaattcgacttcgataaatctctat

SEQ ID NO: 40999 - DNA, 75 bp, synthetic construct
  source 1..75: mol_type = other DNA
tggtgcgttatcgacagctaaaacgcggcactatccagctctaccatcacatcgttttcctgagttcttagcacg

SEQ ID NO: 41000 - DNA, 75 bp, synthetic construct
  source 1..75: mol_type = other DNA
atggcatatttttatttcaaattagacatagtgtacacaaataaatatttaaccgaatatcagcgggatgtttta

SEQ ID NO: 41001 - DNA, 75 bp, synthetic construct
  source 1..75: mol_type = other DNA
atggaacaggctattttgggaaaagacggttacgctttaaatgatggggaaatcatcgtacataactatgatggc

SEQ ID NO: 41002 - DNA, 75 bp, synthetic construct
  source 1..75: mol_type = other DNA
ggcatgcgttattgctttgatagcaatgtttgccaatgaaaagacattgttacatggagaaaaaatagaatttat

SEQ ID NO: 41003 - DNA, 75 bp, synthetic construct
  source 1..75: mol_type = other DNA
gaatacctatcacgaatgccgcatcaacgatgagtggggcggagtggaaattattaaacgccctgactgggcacg

SEQ ID NO: 41004 - DNA, 75 bp, synthetic construct
  source 1..75: mol_type = other DNA
cattggctttaaccgcagctattatctggcctccttcatttttgccgctggctgtgccggccttggcctgatgat

SEQ ID NO: 41005 - DNA, 75 bp, synthetic construct
  source 1..75: mol_type = other DNA
gtcattgataaactggttacaaagtgctggcaggaagaagcgtatgctgaagatcaattgagaaaagtgacaaga

SEQ ID NO: 41006 - DNA, 75 bp, synthetic construct
  source 1..75: mol_type = other DNA
ggaggctgaccgcacgcgtattaacagcgaagtagtgatcaatggtggtgttacccagggcggcggtgcaatgag

SEQ ID NO: 41007 - DNA, 75 bp, synthetic construct
  source 1..75: mol_type = other DNA
atgcattcggaaaatattgcagcttacatcggactggatgtacataaagaaacgttggcggttgctattgctgca

SEQ ID NO: 41008 - DNA, 75 bp, synthetic construct
  source 1..75: mol_type = other DNA
tcattaggtaaacctgttttagtgatgcgagatacaacagaaagaccagaagcgatcttggccggcactgttgct

SEQ ID NO: 41009 - DNA, 75 bp, synthetic construct
  source 1..75: mol_type = other DNA
gatggttcaatggtgggctgattatctccaagcaaataagggcaaaacaataacaccttatgattttgctaaaat

SEQ ID NO: 41010 - DNA, 75 bp, synthetic construct
  source 1..75: mol_type = other DNA
tcaggcggcgctaattcagatatcactacccgcactatcgaagcggtgcgtaaatcgaaggaagcgttatacctg

SEQ ID NO: 41011 - DNA, 75 bp, synthetic construct
  source 1..75: mol_type = other DNA
gcgcaaacgttgagaacaacggtaccctggcgttgaataatagcgctgaaaaaagagcggctgcgtctgtgaatt

SEQ ID NO: 41012 - DNA, 75 bp, synthetic construct
  source 1..75: mol_type = other DNA
ggggcaaaaatgcgaatgccgcatatcgtccccctctcagaacagtccatcgccattctgaaacagattaaggat

SEQ ID NO: 41013 - DNA, 75 bp, synthetic construct
  source 1..75: mol_type = other DNA
atgaagctcaacgccagacaggtcgagaccgcaaagccaaaagacaaaacctacaaaatggccgatggtggtggt

SEQ ID NO: 41014 - DNA, 75 bp, synthetic construct
  source 1..75: mol_type = other DNA
tgtctggcactgaagcactggttactacgctggggatattttcagccaataaaggggtaatacctgcgtttacgc

SEQ ID NO: 41015 - DNA, 75 bp, synthetic construct
  source 1..75: mol_type = other DNA
cgatgtcatggggtttcgcttccatggtggaagagtattccggcgttacgctggacaagagtgaatcgcgcaccg

SEQ ID NO: 41016 - DNA, 75 bp, synthetic construct
  source 1..75: mol_type = other DNA
agacattaccgtttataattatgatggtgaaacacgggaatatatttccacatcaactgaatatcttgctgtggg

SEQ ID NO: 41017 - DNA, 75 bp, synthetic construct
  source 1..75: mol_type = other DNA
gacttatcggaagatgagttagagatgctgcgtttgtatcgcgcacttcctaaatcagagcaacaagcacaactc

SEQ ID NO: 41018 - DNA, 75 bp, synthetic construct
  source 1..75: mol_type = other DNA
catgtctcgtgcgcagatcctgcaacaagcgggtacctctgttctggcgcaggctaaccagaccacgcagaacgt

SEQ ID NO: 41019 - DNA, 75 bp, synthetic construct
  source 1..75: mol_type = other DNA
tatcaacaagaaccagtctgcgctgtcgacttctatcgagcgcctctcttctggtctgcgcattaacagcgctaa

SEQ ID NO: 41020 - DNA, 75 bp, synthetic construct
  source 1..75: mol_type = other DNA
tcatctctgaattatacgggaaaacaaatctgggcagcacaaagaaatggtgctaaggttccccgcgttcgtaat

SEQ ID NO: 41021 - DNA, 75 bp, synthetic construct
  source 1..75: mol_type = other DNA
atctcagacaattatttatcgtttgaatgtaatatttcagacattgatgttattgctaaatgcaaatttttgctt

SEQ ID NO: 41022 - DNA, 75 bp, synthetic construct
  source 1..75: mol_type = other DNA
caattgaatatcttgctgtgggtgtcggtatccccgcatattcctgtttagatgctcctggcacacataaggctg

SEQ ID NO: 41023 - DNA, 75 bp, synthetic construct
  source 1..75: mol_type = other DNA
atgatcgactggtttaccggaatcctgccttgcacacaccgaccgttaccggctggtagtgtcgtcagcgtcgat

SEQ ID NO: 41024 - DNA, 75 bp, synthetic construct
  source 1..75: mol_type = other DNA
atggatttgctgatcaggtgacgccagccgttaaggcaatggcatgtattcagtcaaaacgtacagaggaattta

SEQ ID NO: 41025 - DNA, 75 bp, synthetic construct
  source 1..75: mol_type = other DNA
tgaaggcggtgtatgacatggcccgcaagggggcgcaggatgagattcaggcgcagatgcgtgatggcggcgtct

SEQ ID NO: 41026 - DNA, 75 bp, synthetic construct
  source 1..75: mol_type = other DNA
gcaaaaaagttacttgaagacagttatggaaaggaatctgattactacaaagattttaatgatacacaaaggatt

SEQ ID NO: 41027 - DNA, 75 bp, synthetic construct
  source 1..75: mol_type = other DNA
ggacaacaccacgccggggaaattactggttaaggagattaacttcgtaagacaaacagcacctgccggacagtt

SEQ ID NO: 41028 - DNA, 75 bp, synthetic construct
  source 1..75: mol_type = other DNA
ctgcagtggaaatatgatgcggctaatggcaccggcaccctgactcagggaaacacgcgctgggatatgcatgga

SEQ ID NO: 41029 - DNA, 75 bp, synthetic construct
  source 1..75: mol_type = other DNA
agatgaactggtcgatgacttagtcattcgctgtggtctggaaagtgccgttgaaattgcccttctcgctcttca

SEQ ID NO: 41030 - DNA, 75 bp, synthetic construct
  source 1..75: mol_type = other DNA
ttcgaaccgctggactcagaagaacggggctgcgccgtcgaaactctggattgctcagattggcgcgatgactga

SEQ ID NO: 41031 - DNA, 75 bp, synthetic construct
  source 1..75: mol_type = other DNA
gatgcgtgagcggttcaacgtcctgaaccacatcatctgggctaaaccgtcgggccgctggaatggctgtaataa

SEQ ID NO: 41032 - DNA, 75 bp, synthetic construct
  source 1..75: mol_type = other DNA
cgccagtcggcgcaatgaaagtatttttgattttctatatcgcctgcgtggtgattacctgggcggtatatggtc

SEQ ID NO: 41033 - DNA, 75 bp, synthetic construct
  source 1..75: mol_type = other DNA
attacccgctggcaggggaaatccgtggtttttgatgccagtcataacgtgtttgactacaaagtattacgaaag

SEQ ID NO: 41034 - DNA, 75 bp, synthetic construct
  source 1..75: mol_type = other DNA
ttaaccagatttggcttggttatctggaagggctagaaaaatttgcaaatataaatgttcagagaatgatttcta

SEQ ID NO: 41035 - DNA, 75 bp, synthetic construct
  source 1..75: mol_type = other DNA
acgctgccgttgcccaattcagctttccggcctggatgttacagcttctgcgtaaggcccgggaccgcattatcc

SEQ ID NO: 41036 - DNA, 75 bp, synthetic construct
  source 1..75: mol_type = other DNA
aatacgtggagttgagcgacggcactttatcgtggttagggaacgccttgttctggatgccgctaccagaaccgc

SEQ ID NO: 41037 - DNA, 75 bp, synthetic construct
  source 1..75: mol_type = other DNA
ttgctgaccatctttatccttgccccgttgaatgaggaaacgctgttccgggggattatgctgaacgtcttccgt

SEQ ID NO: 41038 - DNA, 75 bp, synthetic construct
  source 1..75: mol_type = other DNA
gaactggaaaagccacaccaccagctggtcagcacatacagtgaactgaaccggcaatatgccagcctgctggaa

SEQ ID NO: 41039 - DNA, 75 bp, synthetic construct
  source 1..75: mol_type = other DNA
cggagattaaatcattcatcacaggcttcctgagcgacccggcgcacgataaccaatcttcagacagcctgcttg

SEQ ID NO: 41040 - DNA, 75 bp, synthetic construct
  source 1..75: mol_type = other DNA
cgttcagtgatttcgcccgcgatcgtcgtggtgtgcgcgagccggaagcccgttacttggtcggtaatccctggt

SEQ ID NO: 41041 - DNA, 75 bp, synthetic construct
  source 1..75: mol_type = other DNA
gcgaaaaaaatagagatgagcttgataaaatctcctgcaaatggtgttgtgattaaaagaaaaatttctgatgga

SEQ ID NO: 41042 - DNA, 75 bp, synthetic construct
  source 1..75: mol_type = other DNA
actatcgcgtcttaataggtgatctcgacgatgaacagatgcattggttatcccaaattggtaacgattataggc

SEQ ID NO: 41043 - DNA, 75 bp, synthetic construct
  source 1..75: mol_type = other DNA
cctggaatttatccagaccttacctgaaaactctgtcgatctgatagtcacggacccgccgtactttaaagtaaa

SEQ ID NO: 41044 - DNA, 75 bp, synthetic construct
  source 1..75: mol_type = other DNA
ggaaagtctgcgggcgtattttccggcaacagagcgcattctgtttgcagaacattatcagggaccgtatcgccc

SEQ ID NO: 41045 - DNA, 75 bp, synthetic construct
  source 1..75: mol_type = other DNA
gaatataagcatctgcggcggtattttggcgtgacggcgcaggtgccgtacaccgatgtgtggacgcataaaccg

SEQ ID NO: 41046 - DNA, 75 bp, synthetic construct
  source 1..75: mol_type = other DNA
attatccgctggcagggaaaatcagatgtttttgatgcaaaccataacgtgtttgactacaaagtattacgaaag

SEQ ID NO: 41047 - DNA, 75 bp, synthetic construct
  source 1..75: mol_type = other DNA
tcttttagagagaattacattttatgcgaaaaaaaatagagatgagcttgataaaatctcctgcaaatggtgttg

SEQ ID NO: 41048 - DNA, 75 bp, synthetic construct
  source 1..75: mol_type = other DNA
ggtgaaaacgagtctatctatattcctgttgggtcaacacactgtctggagaatcctggaaagatccctttagaa

SEQ ID NO: 41049 - DNA, 75 bp, synthetic construct
  source 1..75: mol_type = other DNA
taaataccgattcagccgtgctgttgccatggattgaacaggcactcagggatgttcgcgatcttcagcgtctgc

SEQ ID NO: 41050 - DNA, 75 bp, synthetic construct
  source 1..75: mol_type = other DNA
gcaactgaatatcaatctgctccggcaaatggttgatgagccggatgtgttatctgacagtaagaacgaaaacgg

SEQ ID NO: 41051 - DNA, 75 bp, synthetic construct
  source 1..75: mol_type = other DNA
agggcagcaagtcgcacagtccctgcagcaaaccggggatacccgcgaactactggatattctggcggatgatgt

SEQ ID NO: 41052 - DNA, 75 bp, synthetic construct
  source 1..75: mol_type = other DNA
cctgggaactggggcccggattacctgttatgaacatgaaaaatatgccggctgaaccacttgtattccagtccg

SEQ ID NO: 41053 - DNA, 75 bp, synthetic construct
  source 1..75: mol_type = other DNA
gaactcattaccgatgccctatcttgggcgatggtcaactttgatgagctggggtacaactgcaaaaccaataag

SEQ ID NO: 41054 - DNA, 75 bp, synthetic construct
  source 1..75: mol_type = other DNA
cttgttcaaataatttcgcagctgggatcagatgtattgatctttaaaagaattagtaggaaagtgtcatcagga

SEQ ID NO: 41055 - DNA, 75 bp, synthetic construct
  source 1..75: mol_type = other DNA
gataacccgacattgaacaaattgagtgaagaaacccggttacagatcatcccttaccttgtgaattttgccttt

SEQ ID NO: 41056 - DNA, 75 bp, synthetic construct
  source 1..75: mol_type = other DNA
gaaggcattctcctgtctgaatgtgaacgtctgaggcagcgttctctggcaaataaactgatcagcctcttccgt

SEQ ID NO: 41057 - DNA, 75 bp, synthetic construct
  source 1..75: mol_type = other DNA
atgaacgcaattaaagaagtgccagtgattcgtaatgaatatggctgctggacacatcctgaatatgaaaaattc

SEQ ID NO: 41058 - DNA, 75 bp, synthetic construct
  source 1..75: mol_type = other DNA
cgagagctgcattggagcattccatgaggctgaaaccagcctgaatcacactgcttttcgccgtaatcaatggga

SEQ ID NO: 41059 - DNA, 75 bp, synthetic construct
  source 1..75: mol_type = other DNA
gcaatctgaacagccttgatacccgtatggtaccgcaggccagtgcatgggcgataaaccgtgtggcgcagaaag

SEQ ID NO: 41060 - DNA, 75 bp, synthetic construct
  source 1..75: mol_type = other DNA
aatttaaaacacctttatggtagcgatatctcagataacatacgtcaaaatagatatttttccgatcagttatct

SEQ ID NO: 41061 - DNA, 75 bp, synthetic construct
  source 1..75: mol_type = other DNA
ctggcgggtgctgaaacctgccggaagtctttacctgttctgtggtcatcgcctggcatctgatatcgaaatcat

SEQ ID NO: 41062 - DNA, 75 bp, synthetic construct
  source 1..75: mol_type = other DNA
gccacagagcgcattctgttcgcggaacattatcaggggccgtatcgtccgaaagatgccgggtatgcggcgaag

SEQ ID NO: 41063 - DNA, 75 bp, synthetic construct
  source 1..75: mol_type = other DNA
ctctcaacattctgatcgactggctgcaggacaacatcgattgtggcagcgagattattttcgacaacgacgaaa

SEQ ID NO: 41064 - DNA, 75 bp, synthetic construct
  source 1..75: mol_type = other DNA
ttccggttccggttccggaagcagtagctccagtagcgactcacaattggatgtaagtgtatctcttgatgtctg

SEQ ID NO: 41065 - DNA, 75 bp, synthetic construct
  source 1..75: mol_type = other DNA
caaactgccgttcacaggggaagctgtgaaattcctgttggtcaagatagctgcgtgattgcaaatagcttcaca

SEQ ID NO: 41066 - DNA, 75 bp, synthetic construct
  source 1..75: mol_type = other DNA
ccatcaacgccattgtggggcaggaaattctgcctaaccgtaaccgccccatgacctctgtaccgacgctcatcc

SEQ ID NO: 41067 - DNA, 75 bp, synthetic construct
  source 1..75: mol_type = other DNA
agataccgctcgcgtactcggacgcatgtatgacggtattgagtatcgcggttatggtcagaatatcgttgaaga

SEQ ID NO: 41068 - DNA, 75 bp, synthetic construct
  source 1..75: mol_type = other DNA
atgagccagtcactgtttagccaaccattgaacgttattaacgtcggcatcgccatgtttagcgatgacctgaaa

SEQ ID NO: 41069 - DNA, 75 bp, synthetic construct
  source 1..75: mol_type = other DNA
gcatcagcatgacctttgccgactggcgctttaacctgcgctcctccaacaccgaaccggtggtgcgcctgaatg

SEQ ID NO: 41070 - DNA, 75 bp, synthetic construct
  source 1..75: mol_type = other DNA
tcaaactggtctggctctgctggcttgatttaatgaccggaaacagccttgacgactggacggagaacctgaaac

SEQ ID NO: 41071 - DNA, 75 bp, synthetic construct
  source 1..75: mol_type = other DNA
gtatcagaggcctgttcagcgatgcagatgcgtaccacctggaccaggcctttccgctgctgatgaaacaactgg

SEQ ID NO: 41072 - DNA, 75 bp, synthetic construct
  source 1..75: mol_type = other DNA
agcgcagcactgacggatctgatggatcagtacgtgctcctggcataccgcacaacggttgacgatagccgcaac

SEQ ID NO: 41073 - DNA, 75 bp, synthetic construct
  source 1..75: mol_type = other DNA
ttgatcctgaaggggcttctaaggggcttcaaatggcttgcgaggctggtttttgcagctatgaccatgattctg

SEQ ID NO: 41074 - DNA, 75 bp, synthetic construct
  source 1..75: mol_type = other DNA
gtgggaatcgaatatttttctttgctgatttgttgtttgtgttaccgctagacattgatgcacctcacttaaatg

SEQ ID NO: 41075 - DNA, 75 bp, synthetic construct
  source 1..75: mol_type = other DNA
atgcctgacttccgccgccgcttcctgcaggtctgtgttaatgagatcaacagcagaactccaatgcgcctctca

SEQ ID NO: 41076 - DNA, 75 bp, synthetic construct
  source 1..75: mol_type = other DNA
cgttcctcgaaaaaaatcccggcgcgaagatcatccacgatccacgtctctcctggaacaccgttgatgtggtga

SEQ ID NO: 41077 - DNA, 75 bp, synthetic construct
  source 1..75: mol_type = other DNA
gcacacaggtattacaggcagggataagagagcgtcgctatctcgtgcttgagccatctcctgaaaaagcacaga

SEQ ID NO: 41078 - DNA, 75 bp, synthetic construct
  source 1..75: mol_type = other DNA
atgacacagttaacatgctttaaggcttatgacatccgtggtgaactgggcgaggagctgaacgaggacatcgcc

SEQ ID NO: 41079 - DNA, 75 bp, synthetic construct
  source 1..75: mol_type = other DNA
agactggcagatgatgtaaggctcttgcgccaggaggagcgggaaaggcgaaaaaatatagaaaagctaattcag

SEQ ID NO: 41080 - DNA, 75 bp, synthetic construct
  source 1..75: mol_type = other DNA
gcgagcagatggcaaagatcctgcgtatgggcgctaacgaccagagcgttatagagcgtcttaactggatgcgag

SEQ ID NO: 41081 - DNA, 75 bp, synthetic construct
  source 1..75: mol_type = other DNA
taggtgggtttgtcgatctgaactgtggatggtattgtcaggatgctttacttcactggtattgtaataaaaata

SEQ ID NO: 41082 - DNA, 75 bp, synthetic construct
  source 1..75: mol_type = other DNA
attgcggaacgtcatgttaactgcctgattgaaacagatgctcaggcttatgcaaacgctgagttcatagcagag

SEQ ID NO: 41083 - DNA, 75 bp, synthetic construct
  source 1..75: mol_type = other DNA
cccgaagtacggtagcgagccgggacggctgttctatacccatatctccgaccagtacgcgccgttcagcacccg

SEQ ID NO: 41084 - DNA, 75 bp, synthetic construct
  source 1..75: mol_type = other DNA
acatcaacctgaccggcgattatgtctggcggcagagccgcaggctggaggacgggaagtttcggccgctaaggc

SEQ ID NO: 41085 - DNA, 75 bp, synthetic construct
  source 1..75: mol_type = other DNA
tgttcagctatcaaatggaacatccggacgaacatcaaaacgtcagacaattgatcggtaagcttcatgagcgcc

SEQ ID NO: 41086 - DNA, 75 bp, synthetic construct
  source 1..75: mol_type = other DNA
tgtcattttttattttacctgttcatgccggtgtggtcatctatggtacgcgcattatttatccggaaaaaaaca

SEQ ID NO: 41087 - DNA, 75 bp, synthetic construct
  source 1..75: mol_type = other DNA
ttacggggtttctccgcgttaaggattcattaaggtcgctacgtatacttctcgatatcttattgatttgcctta

SEQ ID NO: 41088 - DNA, 75 bp, synthetic construct
  source 1..75: mol_type = other DNA
agactatgaacagttaaatagttcggaatgtgttcatgagttaatggctgttgagatagccaggttatcacggca

SEQ ID NO: 41089 - DNA, 75 bp, synthetic construct
  source 1..75: mol_type = other DNA
tgatgacggcgtggtgtcccgtattgatctggatatccgccgcaccgggattaatgaactgggtaacagtatcac

SEQ ID NO: 41090 - DNA, 75 bp, synthetic construct
  source 1..75: mol_type = other DNA
ttcgcgcaccgagcaacaggctgcttcgctggaagagacggcagccagcatggagcaactgaccgcaacggtgaa

SEQ ID NO: 41091 - DNA, 75 bp, synthetic construct
  source 1..75: mol_type = other DNA
atccccatttcaatgaagcctgccgggccttcgccctacgacacaacatggcgaagctggcagagcgcgcaggta

SEQ ID NO: 41092 - DNA, 75 bp, synthetic construct
  source 1..75: mol_type = other DNA
gagaaatagagagaatgatacctaccgctttcagcgtcgccacaatggtcagggagaccatgcacagcagcccat

SEQ ID NO: 41093 - DNA, 75 bp, synthetic construct
  source 1..75: mol_type = other DNA
actggcaggctgttctgcatattgctgtcttcatccgggcacaggcaccggattcagagctggatatgtggatgg

SEQ ID NO: 41094 - DNA, 75 bp, synthetic construct
  source 1..75: mol_type = other DNA
accgaaccggtggtacgcctgaatgtagaatcaaaaagcgatgcaaaattgatgcaattaaaaacacaagagatt

SEQ ID NO: 41095 - DNA, 75 bp, synthetic construct
  source 1..75: mol_type = other DNA
aatggtgaaaaaccggagattgccatcgtaccccagagcctgcaccggctgatttatggccctgacaaacgggcc

SEQ ID NO: 41096 - DNA, 75 bp, synthetic construct
  source 1..75: mol_type = other DNA
tcgtggcgctgatcctctggcactacacccgtaatcgcaatttaatggatgtcacgaatagcgatttttcccaat

SEQ ID NO: 41097 - DNA, 75 bp, synthetic construct
  source 1..75: mol_type = other DNA
aggcggtactggcacgtctgtgtgaggagtgtggcgagtgcgccacattttttgacgggcttccggcctttattg

SEQ ID NO: 41098 - DNA, 75 bp, synthetic construct
  source 1..75: mol_type = other DNA
ccgactgcgttgcagggcggtatgtcacagacgtcagcagacggtgatgcggacgtgaaaatgctcatggccatg

SEQ ID NO: 41099 - DNA, 75 bp, synthetic construct
  source 1..75: mol_type = other DNA
aggtcgtactggcacgccttcgggaacagtgtggagacagcgccacgttttttgacgggcttccggcatttattg

SEQ ID NO: 41100 - DNA, 75 bp, synthetic construct
  source 1..75: mol_type = other DNA
ttaactatcagcgtgataacgatatggcaacatgggcgatggcggaaatcacgtatcaaatcacatatacaaatt

SEQ ID NO: 41101 - DNA, 75 bp, synthetic construct
  source 1..75: mol_type = other DNA
ccggcgcgtttgactgcgctgacatgatttaccgtctccggcagctgaagcctgtctgggcactgtgcaatgaca

SEQ ID NO: 41102 - DNA, 75 bp, synthetic construct
  source 1..75: mol_type = other DNA
cgccacaaagcagcaagtgactcaaaccatgaatgcaggcgtcgtttccagtggcgaagttacatcgacggagcc

SEQ ID NO: 41103 - DNA, 75 bp, synthetic construct
  source 1..75: mol_type = other DNA
acgagtacatggccggaggtaaacgaccggcccgtgtttaccgggtggtgaacggtattgctgtactgccggtga

SEQ ID NO: 41104 - DNA, 75 bp, synthetic construct
  source 1..75: mol_type = other DNA
acaccgaaacgggagacgccaaagaaatcacaactccgggtgattaccccgaaaaaacaaccactatcgccccgt

SEQ ID NO: 41105 - DNA, 75 bp, synthetic construct
  source 1..75: mol_type = other DNA
gtgatggtgtggtgattagtgaagttagcgccgtaacaaaaacgcgtaaaccgcgtaagaaagctgctaatccat

SEQ ID NO: 41106 - DNA, 75 bp, synthetic construct
  source 1..75: mol_type = other DNA
ttaaatatgggattaatcagtacaatatattacttttcaagttatatttataatgggatcttaaaaagaaacaac

SEQ ID NO: 41107 - DNA, 75 bp, synthetic construct
  source 1..75: mol_type = other DNA
aacagcgacgaaatgaacgcgctcgcgatggggtgggacagcagcgagcgaacacgccagaaatcgtatcgcgtg

SEQ ID NO: 41108 - DNA, 75 bp, synthetic construct
  source 1..75: mol_type = other DNA
atgccggcagcaccacggcaacaggaacaaccgcaaacgtctcgatgctggtcgcggcagggcgttcaattttag

SEQ ID NO: 41109 - DNA, 75 bp, synthetic construct
  source 1..75: mol_type = other DNA
ttatccggcgacttacgaacgctttacctctatcggcccgctgatggagaaaatcggtaatggcggtaaagggat

SEQ ID NO: 41110 - DNA, 75 bp, synthetic construct
  source 1..75: mol_type = other DNA
tatcaattattatgcctgcttataatgctgaagcaacgattaaaagtagtgtttattcagttattggacagacct

SEQ ID NO: 41111 - DNA, 75 bp, synthetic construct
  source 1..75: mol_type = other DNA
cttctggcgaggcggtttcatggattgtccgtaatcaggatatattactcggttacgccgtgaatcttgtggcag

SEQ ID NO: 41112 - DNA, 75 bp, synthetic construct
  source 1..75: mol_type = other DNA
tcatagatcggattctgcaggcttacggcttcacttcccgccaagcattctgtaaccacattggtatctcccaaa

SEQ ID NO: 41113 - DNA, 75 bp, synthetic construct
  source 1..75: mol_type = other DNA
atgagtgagaaaattgccgttgtctatatcggcccaaaacccgtgaaaaaggacaccattaccggaagccgcaca

SEQ ID NO: 41114 - DNA, 75 bp, synthetic construct
  source 1..75: mol_type = other DNA
atggcaacaagatagaaccatgtgcagcactggcaaagtcccttgagcgtgatgctgaatacacgatgcgaaaag

SEQ ID NO: 41115 - DNA, 75 bp, synthetic construct
  source 1..75: mol_type = other DNA
aagcagcatgtagaagtgacccaactcgactggacgccgccggggcagggcaatatgcaggtggtgcaggcgctg

SEQ ID NO: 41116 - DNA, 75 bp, synthetic construct
  source 1..75: mol_type = other DNA
ctgaccaccttggtgtctcaaaaagtacattagccaatcgttatatgagggatacttttccctccgactggatta

SEQ ID NO: 41117 - DNA, 75 bp, synthetic construct
  source 1..75: mol_type = other DNA
agccggtggcatccgcgcagagtgaagccgatcgcattatggcgtgtgaagaagcgaaaggtcgtgaacaactgg

SEQ ID NO: 41118 - DNA, 75 bp, synthetic construct
  source 1..75: mol_type = other DNA
accacaacagcaggtacagtttgatgctcccggaatgctggctgaaacggacgagtacatggccggaggtaaacg

SEQ ID NO: 41119 - DNA, 75 bp, synthetic construct
  source 1..75: mol_type = other DNA
caacagaaataaaaccattcacgtatagaacccctctaattacgcctgatgaaaatggtgaactatctattaaat

SEQ ID NO: 41120 - DNA, 75 bp, synthetic construct
  source 1..75: mol_type = other DNA
cgagagctgtattgatgcattccatgaagctgaaaccgtccaggtacattccgctttccgtcgtcatcaacggga

SEQ ID NO: 41121 - DNA, 75 bp, synthetic construct
  source 1..75: mol_type = other DNA
cctaccgtcgccgcgttgagatgtatcgggagaaggagaaaataacgtaccactggaagaagccggagcggttgc

SEQ ID NO: 41122 - DNA, 75 bp, synthetic construct
  source 1..75: mol_type = other DNA
accgttcaaagccgatcgtctgcaactgcgtgatatggcgtttaatagcccgaatagcgaatggaaactgagcgc

SEQ ID NO: 41123 - DNA, 75 bp, synthetic construct
  source 1..75: mol_type = other DNA
aatgttattaacggttggatatacccaggaaaccaagaagtatataacctcaatggaggcatatccacaatgcct

SEQ ID NO: 41124 - DNA, 75 bp, synthetic construct
  source 1..75: mol_type = other DNA
tcgtggtttaagcgaaagagaagcaatgctgaaattagcagaatggctacaaagattaagcattgctattgaaga

SEQ ID NO: 41125 - DNA, 75 bp, synthetic construct
  source 1..75: mol_type = other DNA
taaaagttaagcagtctaacgagcttaccgaagctgcttactacctctcgctaaaagcaaagcgcgttctctggt

SEQ ID NO: 41126 - DNA, 75 bp, synthetic construct
  source 1..75: mol_type = other DNA
gaaaaaaatcccggcgcgaagatcatccacgatccacgtctctcctggaacaccgttgatgtggtgactgccgca

SEQ ID NO: 41127 - DNA, 75 bp, synthetic construct
  source 1..75: mol_type = other DNA
aacggcgtggatatgcgcaacatacgaacaagagtccttgagttgctggcatatcgtcgccgttctcaacaacgg

SEQ ID NO: 41128 - DNA, 75 bp, synthetic construct
  source 1..75: mol_type = other DNA
agtctgattcaactgaaattgcaggccgggcggaagctgatgcagacagaaaacacccgacttaacgctgtgctg

SEQ ID NO: 41129 - DNA, 75 bp, synthetic construct
  source 1..75: mol_type = other DNA
aatcaaaactccgggtgattaccctgaaaatgcaaccactatcgccccgtcaacgccatacgataaatgggatgg

SEQ ID NO: 41130 - DNA, 75 bp, synthetic construct
  source 1..75: mol_type = other DNA
atgcgtgatatttatcttgaaacaatagaccgcgcatttagtgcccttgcttacgctgaaggtatgtacgaaata

SEQ ID NO: 41131 - DNA, 75 bp, synthetic construct
  source 1..75: mol_type = other DNA
cagcggtacagggtggcgtgccacagacgtcagcagacggtgatgcggacgtgaaaatgctcatggccatgccat

SEQ ID NO: 41132 - DNA, 75 bp, synthetic construct
  source 1..75: mol_type = other DNA
taatccgccgcgtcgccggaatcagccagcaggctgacgaacaggccacgcagccggacagcgtgaccgccgaaa

SEQ ID NO: 41133 - DNA, 75 bp, synthetic construct
  source 1..75: mol_type = other DNA
gcaatgagccgggatgtaataaacgggtgaagtctggcaagtgtgacgagcataagcgggatgcccgccgacaaa

SEQ ID NO: 41134 - DNA, 75 bp, synthetic construct
  source 1..75: mol_type = other DNA
aggctgatatcaaagtggctgttgcggatgatgattgtgctgtacgccctgtgcctgctgccgctgctgaccggt

SEQ ID NO: 41135 - DNA, 75 bp, synthetic construct
  source 1..75: mol_type = other DNA
cggcgcgaaaaatccacctgtaccactgcgaccatcgcggcctgccgctggcccttatcagcaaggaagggacaa

SEQ ID NO: 41136 - DNA, 75 bp, synthetic construct
  source 1..75: mol_type = other DNA
tatgcccgcctgttccactggtattgacccgagcgaaaacattccgggaaaagtggctgtatttacgggtaaggg

SEQ ID NO: 41137 - DNA, 75 bp, synthetic construct
  source 1..75: mol_type = other DNA
atgatgaccccaatttttgatgaaaatggactggctacagtgccgggcgatatgcgttgtttttattatgatgct

SEQ ID NO: 41138 - DNA, 75 bp, synthetic construct
  source 1..75: mol_type = other DNA
ggatgaagccatctcagtaatacgggaatacattgagattttctacaatcgtcagcgtcgtcactctcgtctggg

SEQ ID NO: 41139 - DNA, 75 bp, synthetic construct
  source 1..75: mol_type = other DNA
agagaacgaaaatttattagtatagacaaagacaattttgatgaagttatgacatcaatgagtccaagggctcat

SEQ ID NO: 41140 - DNA, 75 bp, synthetic construct
  source 1..75: mol_type = other DNA
aaaaactgaaagaaaaacttcaggaattactggtgaatactaatagcaatcctgaaaatgatgacagtaaggaat

SEQ ID NO: 41141 - DNA, 75 bp, synthetic construct
  source 1..75: mol_type = other DNA
aatgatgtggtcagcggcgtcaccggaattcaggtacgggaaaccgtgcccgatccttttttcgatgccgccgac

SEQ ID NO: 41142 - DNA, 75 bp, synthetic construct
  source 1..75: mol_type = other DNA
tcgcagcgtcagggattacttgtagaggctctggatggaatagaaaccctgaagctgaataatgccgttaactgg

SEQ ID NO: 41143 - DNA, 75 bp, synthetic construct
  source 1..75: mol_type = other DNA
tttttctgggaactctgcgtgaaaatctgcagctttcgcgtctgccgggaagcctgtcggatgtggatatgatta

SEQ ID NO: 41144 - DNA, 75 bp, synthetic construct
  source 1..75: mol_type = other DNA
ccactttgcggttcacacagcgtcttctgcacatttttacgtatgcggccggggatcggaaatacctgcatcatg

SEQ ID NO: 41145 - DNA, 75 bp, synthetic construct
  source 1..75: mol_type = other DNA
tatacgcatcgtattcgggttagaaaagaagtgcgacctgtatttgacagcaagatcccattcgtcaacagagtg

SEQ ID NO: 41146 - DNA, 75 bp, synthetic construct
  source 1..75: mol_type = other DNA
ccgggattgattttcgttctgttggcgagtttcttcgtagtgaagggtttgataatcatctttcccggcgggctc

SEQ ID NO: 41147 - DNA, 75 bp, synthetic construct
  source 1..75: mol_type = other DNA
gcgggaactgcgcgcgggagcggtgagtgcggagagtgaggcatggcttgcgcagtgcgggctgacggcggaaca

SEQ ID NO: 41148 - DNA, 75 bp, synthetic construct
  source 1..75: mol_type = other DNA
cacgacccggaatacccggagaatttacctgccgcgccgctggtgcgctatggctggacgccacgcggcgaactg

SEQ ID NO: 41149 - DNA, 75 bp, synthetic construct
  source 1..75: mol_type = other DNA
ggcttatcacgacggtcccggcaacgttatgaaggcaaagcgtggtgaatatacgccaggacctgaaggccgcgg

SEQ ID NO: 41150 - DNA, 75 bp, synthetic construct
  source 1..75: mol_type = other DNA
tttgccgatgcagccaggcgtgtacatgcagaactgtctcctggatgggaaaatccaaagcatgtaaggcagtgg

SEQ ID NO: 41151 - DNA, 75 bp, synthetic construct
  source 1..75: mol_type = other DNA
agccctgccgcagcgccacgtttcaggccatggagaacatccggcaggctggcggcagggtcagctttgacccca

SEQ ID NO: 41152 - DNA, 75 bp, synthetic construct
  source 1..75: mol_type = other DNA
ggtcaaagtgcagggcaaattgcagaacaggctggtcgtggtctggtaaacataccatttgacgtattgcagggt

SEQ ID NO: 41153 - DNA, 75 bp, synthetic construct
  source 1..75: mol_type = other DNA
ggtgcgtggactgacgttctgccagaattcggtggtgatacctggacccaaacagatgtgttcatgactggtcgc

SEQ ID NO: 41154 - DNA, 75 bp, synthetic construct
  source 1..75: mol_type = other DNA
ggttcagcagaatttcggcgcgtggcggcggggatggaagctgatgctgcagctatatgtgaggcaatcagtagt

SEQ ID NO: 41155 - DNA, 75 bp, synthetic construct
  source 1..75: mol_type = other DNA
atctatttgcgaagataaagagttcgctggtttaatatgtaaggataatagtggcagatatttctcaacagcacc

SEQ ID NO: 41156 - DNA, 75 bp, synthetic construct
  source 1..75: mol_type = other DNA
tccagcaatggaacgcctgttaatgttgccagctgatgatgacttgttaagtgaacaggaacttaaagattacgg

SEQ ID NO: 41157 - DNA, 75 bp, synthetic construct
  source 1..75: mol_type = other DNA
cgggtggcacaagagcctgtccaacgtaggcgtgaacggtgtcaccggaatttctgctgatgtgttctgggatct

SEQ ID NO: 41158 - DNA, 75 bp, synthetic construct
  source 1..75: mol_type = other DNA
cgtctgatttatctcgacctcgaatatcagaatggctgctgccgtctgctgagcgggggacgacacgagattcag

SEQ ID NO: 41159 - DNA, 75 bp, synthetic construct
  source 1..75: mol_type = other DNA
gcaggtataaaagcgaagtgtcacagtagatacagtaacgaatcgaagaatcacgggggcagaagtatgaaacgt

SEQ ID NO: 41160 - DNA, 75 bp, synthetic construct
  source 1..75: mol_type = other DNA
caggtaaagatgagaaaatagttaaaagtaaagataacaatatcaagtcattttatttaggtacgcccagtggta

SEQ ID NO: 41161 - DNA, 75 bp, synthetic construct
  source 1..75: mol_type = other DNA
aatgctcaggtcaaaaataaaataaaacgtgttgatcgtctgctcggtaatgagtctcttcatcacgacatcccc

SEQ ID NO: 41162 - DNA, 75 bp, synthetic construct
  source 1..75: mol_type = other DNA
gccggatacagcatctaccctgctcagggcagacgctatggcttgtattttccgtccgccactggtactgccgta

SEQ ID NO: 41163 - DNA, 75 bp, synthetic construct
  source 1..75: mol_type = other DNA
atgctgatcaccggcaaaaatgctaacccggaaatcctgcaacaactggaagcgcaaggggtcagcattctgcgt

SEQ ID NO: 41164 - DNA, 75 bp, synthetic construct
  source 1..75: mol_type = other DNA
ctacccgcattctcgaactgtggcgccgctgggaaaagtagaatcaaacatgaaattaaacttgggaattccaaa

SEQ ID NO: 41165 - DNA, 75 bp, synthetic construct
  source 1..75: mol_type = other DNA
atcagtcacataaagtagacatagagccatttatacatgcagtatgggttgcaggtgcaccgcctgaaaatacat

SEQ ID NO: 41166 - DNA, 75 bp, synthetic construct
  source 1..75: mol_type = other DNA
tgtgatattaaaaatacaaaacatacaaaatgaaacagtagattttaatgaaacaagagagagggtgaaggaact

SEQ ID NO: 41167 - DNA, 75 bp, synthetic construct
  source 1..75: mol_type = other DNA
acggcatggattggcaatcaaacatgtgggtgaagttgccgagctgtttatgtggcggcatatggcgctgacttc

SEQ ID NO: 41168 - DNA, 75 bp, synthetic construct
  source 1..75: mol_type = other DNA
taagatgcacggttacgatctcaccacgcagccattgcagtttgccatgaataatcagcatatgaatggcggcat

SEQ ID NO: 41169 - DNA, 75 bp, synthetic construct
  source 1..75: mol_type = other DNA
ccggatatggcgggaaatggtggcccgggggtttacaggcagtgaaaccatcgtcagggatgctgttgccaaatg

SEQ ID NO: 41170 - DNA, 75 bp, synthetic construct
  source 1..75: mol_type = other DNA
caccctcttagccgggagccgataaccacatcaatgattatttcgaaagataaatgctatcttgaccctacaaaa

SEQ ID NO: 41171 - DNA, 75 bp, synthetic construct
  source 1..75: mol_type = other DNA
tacgtagacgagttggaagtgagagaactttattttgacaaaattaaagccattgacccgttatctcgtcagttc

SEQ ID NO: 41172 - DNA, 75 bp, synthetic construct
  source 1..75: mol_type = other DNA
gagcatgccaaatggtctgactccacatttggctgcgttggccccattggtccgctgaaacatctctcaaaagag

SEQ ID NO: 41173 - DNA, 75 bp, synthetic construct
  source 1..75: mol_type = other DNA
ccgcatccctgcatgcgaccgatgtacaactttctgggaaaattcaaacccgaaccccgggaagaaacagaataa

SEQ ID NO: 41174 - DNA, 75 bp, synthetic construct
  source 1..75: mol_type = other DNA
gtatgccttaatccttcctggttggtatgccatcaaacgtgttacacaaatagatgaaagattttttgatctcct

SEQ ID NO: 41175 - DNA, 75 bp, synthetic construct
  source 1..75: mol_type = other DNA
aagctatttcccgtggctggttgcgattctggcagggtatatgacgttaacccagttggtgaaagggttctatag

SEQ ID NO: 41176 - DNA, 75 bp, synthetic construct
  source 1..75: mol_type = other DNA
atgaaacgaattagccttgccgttctggcgcttttaatgaccgcacaacagtgttttgctggcggcgtagcccta

SEQ ID NO: 41177 - DNA, 75 bp, synthetic construct
  source 1..75: mol_type = other DNA
caacaaccgctttatgaggatgccagaagatattctgaactatcgtcatccccgacgtgaattcatcgaatcatt

SEQ ID NO: 41178 - DNA, 75 bp, synthetic construct
  source 1..75: mol_type = other DNA
cagaaacgaaacaatccgaaccagtagtgcaacaggaaccggaaaaagtctgcaccgcctgcggtcagagcggtg

SEQ ID NO: 41179 - DNA, 75 bp, synthetic construct
  source 1..75: mol_type = other DNA
acattcacagtggactggaatctttgcgtcagcaggcacctgcccatccttacactcttctcgggccacaacgcg

SEQ ID NO: 41180 - DNA, 75 bp, synthetic construct
  source 1..75: mol_type = other DNA
aacgcttttctttcagcaccgcgcttttcgggatgctggttctgaccttaggtatgggtttaggccgcttccttt

SEQ ID NO: 41181 - DNA, 75 bp, synthetic construct
  source 1..75: mol_type = other DNA
gttagccattgattatgaagtgctgtttagtgatgtgccctgcgtctggttacgcaaagatcatccggcactgca

SEQ ID NO: 41182 - DNA, 75 bp, synthetic construct
  source 1..75: mol_type = other DNA
tctatggcaaatagtcgtgaattggttggtaaagtcgccctagcttctctacctgataatagcaaatttacattt

SEQ ID NO: 41183 - DNA, 75 bp, synthetic construct
  source 1..75: mol_type = other DNA
tgaagaacttatacgttttttccaagctatgcgcactgcaaaaggattcagccgcgagaacgagctgaccatgaa

SEQ ID NO: 41184 - DNA, 75 bp, synthetic construct
  source 1..75: mol_type = other DNA
acgatgcctcaatcatcgcattaagggcgtagaggggatttataaccgccatcagtattttgatgagcgtaaagc

SEQ ID NO: 41185 - DNA, 75 bp, synthetic construct
  source 1..75: mol_type = other DNA
gtgaccaactggaacagcaatccctgaccagtctggatgcacatcagcaactggttgaaaccctgttgggaacgc

SEQ ID NO: 41186 - DNA, 75 bp, synthetic construct
  source 1..75: mol_type = other DNA
tgtcagaagtcgcggcgaaggatgagtttttgaatatcaaaaatgtcagccgcgacgacatgatggctgcgcacc

SEQ ID NO: 41187 - DNA, 75 bp, synthetic construct
  source 1..75: mol_type = other DNA
attaagatcacgcatccagtccgcccaacaaacccaactgcatgttgcagacgcactcactgacgcggcggtaaa

SEQ ID NO: 41188 - DNA, 75 bp, synthetic construct
  source 1..75: mol_type = other DNA
ccagggatgcggcggcggtgtttgtgccgtcagtgctttacatgccgctcaacagattgcccaacgcgcaggagg

SEQ ID NO: 41189 - DNA, 75 bp, synthetic construct
  source 1..75: mol_type = other DNA
atcgtatgcttcggcaagtttttgtttttagttttatcacggccccatcaatagctttatttgttgtttttatgt

SEQ ID NO: 41190 - DNA, 75 bp, synthetic construct
  source 1..75: mol_type = other DNA
caatgctttttaccgagcatccatttattgaacgttttgcgcaggcaagtcacgcaggattccacggcgttgaat

SEQ ID NO: 41191 - DNA, 75 bp, synthetic construct
  source 1..75: mol_type = other DNA
atgaacggacaaatctcaattgttcgaccaggagcatgtgacgatagcgagatacacatgattattcgtctggcg

SEQ ID NO: 41192 - DNA, 75 bp, synthetic construct
  source 1..75: mol_type = other DNA
cctgcagaaacgattgcaggaactaaataactggttggacgaagaagtgctcaatttttcaacctatgagcttta

SEQ ID NO: 41193 - DNA, 75 bp, synthetic construct
  source 1..75: mol_type = other DNA
tcccctgcccgtggcgttacaccaatgatcgcgatgtaagaacgatggttgctctgggactggtgatggatttcg

SEQ ID NO: 41194 - DNA, 75 bp, synthetic construct
  source 1..75: mol_type = other DNA
gcgccgaaatgccggatgtgcctaatttcacgattcacgacttccgacgcaccgcacgtactcatttagcagcat

SEQ ID NO: 41195 - DNA, 75 bp, synthetic construct
  source 1..75: mol_type = other DNA
atgcactctgaacgcgcaccgtttttcctcaaactggcggcctggggcggcgtggttttcctacattttcccatc

SEQ ID NO: 41196 - DNA, 75 bp, synthetic construct
  source 1..75: mol_type = other DNA
agaatccaacagcatctccaggggatcgagcagcagcagaaaacgttcttcaggatttacagaatgctttgggag

SEQ ID NO: 41197 - DNA, 75 bp, synthetic construct
  source 1..75: mol_type = other DNA
ctgacggagcagcgcggctttgacggcaggacacagcgttaccggtacagcgccacagggcagctcatccgcagc

SEQ ID NO: 41198 - DNA, 75 bp, synthetic construct
  source 1..75: mol_type = other DNA
aaagtcaggaagaacgggataaggttaacgtagatctggctgccagcggtgtggcgtacaaagagcgattgaaca

SEQ ID NO: 41199 - DNA, 75 bp, synthetic construct
  source 1..75: mol_type = other DNA
ttacgtcagacgctcgctgcctttgctccggctcgctgccatctggcaagcctggaatatcagtctgtcgccatt

SEQ ID NO: 41200 - DNA, 75 bp, synthetic construct
  source 1..75: mol_type = other DNA
agtgctgttaaagtgaatgcagcctgggacactgaaaatggagctggcgtttcagccgggatggctctgggatgg

SEQ ID NO: 41201 - DNA, 75 bp, synthetic construct
  source 1..75: mol_type = other DNA
aacgggctgaagctgattatcttgagcagattgctcaactggaggaccagaacaaacaactacaggggcaaatta

SEQ ID NO: 41202 - DNA, 75 bp, synthetic construct
  source 1..75: mol_type = other DNA
ggcgtggttaatccgttgatgcgcctgccgcgcagtaatctgctcactgtcggttaccgcattcatgacggttac

SEQ ID NO: 41203 - DNA, 75 bp, synthetic construct
  source 1..75: mol_type = other DNA
atgcaactcccatcgctaatcaaggtaaaattgtaacgtttggaattataccagaatatgctgaaactggttatg

SEQ ID NO: 41204 - DNA, 75 bp, synthetic construct
  source 1..75: mol_type = other DNA
tgggaagcaggttgcccgaccgttaaggattcgcacgcctggctgaataccgtctggcgtcgggtctgccgcaga

SEQ ID NO: 41205 - DNA, 75 bp, synthetic construct
  source 1..75: mol_type = other DNA
ggcgcagatacgtcgttatcaacacagcaggctctcgaacgttatggcgttaattataaaggcgagaagaaactt

SEQ ID NO: 41206 - DNA, 75 bp, synthetic construct
  source 1..75: mol_type = other DNA
tttcgcaacttcatcaaatctttccagaggttcagttaactgaacgacagaaagatattgcagtgatgtatgtaa

SEQ ID NO: 41207 - DNA, 75 bp, synthetic construct
  source 1..75: mol_type = other DNA
cattggctatatcaacggcctgccggtggcggtgattgagctgaaaagcccaattgatgccaatgccgatatctg

SEQ ID NO: 41208 - DNA, 75 bp, synthetic construct
  source 1..75: mol_type = other DNA
tggaagtacactaaaacttccggaagtaccgtttcctgacttctctcctgtagcaaataaaggctcaaccacatc

SEQ ID NO: 41209 - DNA, 75 bp, synthetic construct
  source 1..75: mol_type = other DNA
agttgaaaaaagcgaaaccagattgcaaattaccggagaaggcgatggactacctgaagcggaacgaactgataa

SEQ ID NO: 41210 - DNA, 75 bp, synthetic construct
  source 1..75: mol_type = other DNA
atgagcagcaataaagagttaatgcagcgccgcagtcaggcgattccccgtggcgttgggcaaattcacccgatt

SEQ ID NO: 41211 - DNA, 75 bp, synthetic construct
  source 1..75: mol_type = other DNA
gccgcgcccgtgccaaatttacctggcaattcctggagcaatatcctgctgctcaggactgcgcttataaatttc

SEQ ID NO: 41212 - DNA, 75 bp, synthetic construct
  source 1..75: mol_type = other DNA
ctgggagcgatgatcgccatcgagctgtttgaagatggcgatcacagcaaaccggacgcaaaactcaccgccgag

SEQ ID NO: 41213 - DNA, 75 bp, synthetic construct
  source 1..75: mol_type = other DNA
attatgattgatggatgtgtggcccggttgcggaaatataaaccagaagaatatgagctgatcattgctcacttt

SEQ ID NO: 41214 - DNA, 75 bp, synthetic construct
  source 1..75: mol_type = other DNA
aagtgggcaggagacatcacgtacttacgtacagatgaaggctggctgtatctggcagtggtcattgacctgtag

SEQ ID NO: 41215 - DNA, 75 bp, synthetic construct
  source 1..75: mol_type = other DNA
gcgttatgttcaccgggcgatgtctctcaggtctgggtgctggttctggtgaatgccggtggtgagccgtttgcg

SEQ ID NO: 41216 - DNA, 75 bp, synthetic construct
  source 1..75: mol_type = other DNA
cgaggacgatgaagaggaaaccacgattactggtgactcagcctggcgtgccgaagttatcgttccgggtatcga

SEQ ID NO: 41217 - DNA, 75 bp, synthetic construct
  source 1..75: mol_type = other DNA
ccactaccactacgacagccagcaccgcctggtgttccacacgcggatacagcatggcgagccactggtcgagag

SEQ ID NO: 41218 - DNA, 75 bp, synthetic construct
  source 1..75: mol_type = other DNA
gacggtgacaattcgcgataaccaaccggagaaagtcaccatttctggcacagcggtgattttgtttcatgccga

SEQ ID NO: 41219 - DNA, 75 bp, synthetic construct
  source 1..75: mol_type = other DNA
atcggcgtaattctgtttctcgggggcctgattgggctgaaaaaagttgggaaacaaggggggatgggactggct

SEQ ID NO: 41220 - DNA, 75 bp, synthetic construct
  source 1..75: mol_type = other DNA
gagcgagatgacgttttacaggccgtattcgacaaaggcacatcaaaatttcagctaaggaaggtgcgaacaagt

SEQ ID NO: 41221 - DNA, 75 bp, synthetic construct
  source 1..75: mol_type = other DNA
ttcactggagcactatgtcgcagcgttgcggcgtaatgccgcactgcgcgatgcagaaaaaacactgactgaagc

SEQ ID NO: 41222 - DNA, 75 bp, synthetic construct
  source 1..75: mol_type = other DNA
attaaacatccggaaacggcgctggtggtggttgattatctcgggctgataaaaacccgaaccacggggcgtcat

SEQ ID NO: 41223 - DNA, 75 bp, synthetic construct
  source 1..75: mol_type = other DNA
actctgctgaaccgctccgctcgcggcgtggcgctgactgaaagtggccaacgttgttacgaacatgcgctggaa

SEQ ID NO: 41224 - DNA, 75 bp, synthetic construct
  source 1..75: mol_type = other DNA
gggagcgcccggagaagatggcaacacaacgcaggtcgtgatccccccgaacagccgggactggcataccaatat

SEQ ID NO: 41225 - DNA, 75 bp, synthetic construct
  source 1..75: mol_type = other DNA
tatatggttgttctctcaaatacgaaaaaaacggaatgtgtcggatgagtttaaattcagtaaaggcgtttggta

SEQ ID NO: 41226 - DNA, 75 bp, synthetic construct
  source 1..75: mol_type = other DNA
atgtgtgatatgtatgaagtattagaccgttggggagcgtgggctgcggcagagaacagtggtgtggattggcaa

SEQ ID NO: 41227 - DNA, 75 bp, synthetic construct
  source 1..75: mol_type = other DNA
cgtagtagttgaaccggcttatgaaggacaggaaagcgtagtggttgcacatcctactttcgttattctggctga

SEQ ID NO: 41228 - DNA, 75 bp, synthetic construct
  source 1..75: mol_type = other DNA
gcgacattatgttgatggcagaacactttgccatccagatgtgtcgggaaatcaagctgcctctgttcccgggtt

SEQ ID NO: 41229 - DNA, 75 bp, synthetic construct
  source 1..75: mol_type = other DNA
aatctctgagcttcgtttgcatctcataaatattgatctttggaggatatctgatgaagggaatgcagaagatta

SEQ ID NO: 41230 - DNA, 75 bp, synthetic construct
  source 1..75: mol_type = other DNA
gaaagtaaatggtctgcaaggcggttcgcaggctgaaagtgagcagggactggtggtgactcctcaagggaatgc

SEQ ID NO: 41231 - DNA, 75 bp, synthetic construct
  source 1..75: mol_type = other DNA
gcggatgccattcgttataatgctcgaacgcctctgcaaggttctttgctgccgttaacccgtctggtttgggca

SEQ ID NO: 41232 - DNA, 75 bp, synthetic construct
  source 1..75: mol_type = other DNA
cgatgcgctggaatctgatgctggcgctgaacaaggcgcggccctataccagcaatgaacggtttttactggcgg

SEQ ID NO: 41233 - DNA, 75 bp, synthetic construct
  source 1..75: mol_type = other DNA
aaacaaaaaacaaaggaaatgtgcgataaagataaaaaatgcacttatggaacggtatggatgtgatatcggcct

SEQ ID NO: 41234 - DNA, 75 bp, synthetic construct
  source 1..75: mol_type = other DNA
gtcggtagccacaaaaatgcttcagcgctggctgaatgtgtttaatcagaagggaatgctgtatccggacatagt

SEQ ID NO: 41235 - DNA, 75 bp, synthetic construct
  source 1..75: mol_type = other DNA
cttgatagcgaagctttattgcttgtaacgagaacacgttcaaaacaaaagaccacattttcacagcaaagtatt

SEQ ID NO: 41236 - DNA, 75 bp, synthetic construct
  source 1..75: mol_type = other DNA
tccattgcactggtcagccaggttgagttctcaacctcgtcatggcgccgcgcggttctgtctctcgaagaacat

SEQ ID NO: 41237 - DNA, 75 bp, synthetic construct
  source 1..75: mol_type = other DNA
cccggcggtgcgcccatcaccggctttttgcatatgccgaaaggcgatggcccgttcccgacagtattaatgtgt

SEQ ID NO: 41238 - DNA, 75 bp, synthetic construct
  source 1..75: mol_type = other DNA
tgtcagccagaaccactgaccgctcaattatccgggccatgatggaaggcggcacagcaaaaatttatcactgca

SEQ ID NO: 41239 - DNA, 75 bp, synthetic construct
  source 1..75: mol_type = other DNA
gtgatggttccttcgaaccacaactggtgaagaaaaataagacctgcattatcggcatgaacaaccagatcctgg

SEQ ID NO: 41240 - DNA, 75 bp, synthetic construct
  source 1..75: mol_type = other DNA
ggaggcaacaaattattggtatacatgcgccagagcagcatttaacgaccctgactggtttgtggaaaaccacca

SEQ ID NO: 41241 - DNA, 75 bp, synthetic construct
  source 1..75: mol_type = other DNA
atgaatactcaatttctcgaatacgtgcgccagcagttgatggtggccaccgccgatttaagtggtgcgacgaaa

SEQ ID NO: 41242 - DNA, 75 bp, synthetic construct
  source 1..75: mol_type = other DNA
gtacgccgatgatgcgggccatgatgatggagttcccggacgatccggcttgtgattaccttgaccgtcaataca

SEQ ID NO: 41243 - DNA, 75 bp, synthetic construct
  source 1..75: mol_type = other DNA
tgttctatggcaaattaatatattccctgactatccatttctttcgtgtggaaaaagaaaattattatcatcgtg

SEQ ID NO: 41244 - DNA, 75 bp, synthetic construct
  source 1..75: mol_type = other DNA
tattttggcagaaaaaaactggtttaatccggatgtttccgtgtctcctgaaaccgctgcgcagacaattcttgc

SEQ ID NO: 41245 - DNA, 75 bp, synthetic construct
  source 1..75: mol_type = other DNA
atgaataaccactatttacagtttgtgcgtgagctgctcattatcgctaccgccgatttgattggggcaacaaaa

SEQ ID NO: 41246 - DNA, 75 bp, synthetic construct
  source 1..75: mol_type = other DNA
tgaaccttccgcagcttgaccgtgactacgactggaacgacaacggacagctaatccgcatcagcggcccgcagg

SEQ ID NO: 41247 - DNA, 75 bp, synthetic construct
  source 1..75: mol_type = other DNA
cagatcagtccgtctctctcccctgatgggccaaaaagcacatcgccttctcaaaaaccccgcaagactggcaca

SEQ ID NO: 41248 - DNA, 75 bp, synthetic construct
  source 1..75: mol_type = other DNA
cccgtgttttacgaagatgaagtggatattcatctcaacccgaaaatcggtgctgactggcagttacgcgggcag

SEQ ID NO: 41249 - DNA, 75 bp, synthetic construct
  source 1..75: mol_type = other DNA
tcattcgccatttaccttctcgtctggttcatcgcgatccgttgcctggcgcgcaacagacagcgaatattccga

SEQ ID NO: 41250 - DNA, 75 bp, synthetic construct
  source 1..75: mol_type = other DNA
tacgtccgtttactttccgttaaaaacgctgacgcccgcagcttttatgaaaaagagacgctccgctgtggctgg

SEQ ID NO: 41251 - DNA, 75 bp, synthetic construct
  source 1..75: mol_type = other DNA
acatttgaggggaaaatagccgcgcaggcacaaacgtttgaagaaaaactggcgtccctgtctgtggtattacag

SEQ ID NO: 41252 - DNA, 75 bp, synthetic construct
  source 1..75: mol_type = other DNA
gcactgcaacagtatgaccgaagataaacccggagaagctcattcatcagcctggaccctggctgcaaaacgtgg

SEQ ID NO: 41253 - DNA, 75 bp, synthetic construct
  source 1..75: mol_type = other DNA
aacataaaccggttggttcgttcctgtttgccggccctaccggggtcgggaaaacagaggtgacggtacagcttt

SEQ ID NO: 41254 - DNA, 75 bp, synthetic construct
  source 1..75: mol_type = other DNA
gcttgcccggctggcaggctccctgctcacattctcgcttgagcataatgtggatgcggttccggcataccatca

SEQ ID NO: 41255 - DNA, 75 bp, synthetic construct
  source 1..75: mol_type = other DNA
cctgaacagtgcggagcctgttctgaaagagttgcttgacatgccttaccgccacccggaactgttgtacaggga

SEQ ID NO: 41256 - DNA, 75 bp, synthetic construct
  source 1..75: mol_type = other DNA
gatttaaccttaccaggcatggatggtcgcgatattttgcgcgaatggcgagaaaaaggtcagcgtgagccggta

SEQ ID NO: 41257 - DNA, 75 bp, synthetic construct
  source 1..75: mol_type = other DNA
gcgagctggggcaggggacggctgactgggtgccaaacttcgacggcactttgcaggagccgaaaatgctgcctg

SEQ ID NO: 41258 - DNA, 75 bp, synthetic construct
  source 1..75: mol_type = other DNA
aggtagctctaacggtgtggaactgactggactgcaactggacgaagaaaggaagcaagtgatgaaaattatgca

SEQ ID NO: 41259 - DNA, 75 bp, synthetic construct
  source 1..75: mol_type = other DNA
aagagcagaagattagccaggccacactggaagcccttgaatccgagctctaccgtaatttgcgccctctgtatc

SEQ ID NO: 41260 - DNA, 75 bp, synthetic construct
  source 1..75: mol_type = other DNA
acatcgacctgatcgaagcagtcggaaatcaccctgacattattgccgggagcaacaacggtgatggatacgact

SEQ ID NO: 41261 - DNA, 75 bp, synthetic construct
  source 1..75: mol_type = other DNA
catgtacctgccagaggttcgtggattcagcaaggaaatcgggctggcgttctggcgatacattctgactaacac

SEQ ID NO: 41262 - DNA, 75 bp, synthetic construct
  source 1..75: mol_type = other DNA
gatgctcccgtcgacgcgaaagatggttttgctgtgtgccgcgcgaccagtcttgatgggtgggaatatgttatc

SEQ ID NO: 41263 - DNA, 75 bp, synthetic construct
  source 1..75: mol_type = other DNA
gtgattacaaagccactgttacaggcggcggagagggtatcgcaacgctgatccctgtattgaatggtgttcatc

SEQ ID NO: 41264 - DNA, 75 bp, synthetic construct
  source 1..75: mol_type = other DNA
tcaatatcgacgaagtgattgagatcattcgtaatgaagatgaaccgaaaccggcgctgatgtcgcggtttggcc

SEQ ID NO: 41265 - DNA, 75 bp, synthetic construct
  source 1..75: mol_type = other DNA
tggaagctgccggagcgcatcgtcagcaacttgaggaacaggcaatggcatctgttgagcttattaatctcaaac

SEQ ID NO: 41266 - DNA, 75 bp, synthetic construct
  source 1..75: mol_type = other DNA
gtctccgttgcagtgctgatactctccttcgcagggttatcaataccccggagacgaaacagtcaggcgcgcctc

SEQ ID NO: 41267 - DNA, 75 bp, synthetic construct
  source 1..75: mol_type = other DNA
cctcagcccgggatgcggcggcctcaaaagaggcggcaaaatcatcagaaacgagcgcagcctcgagcgccagta

SEQ ID NO: 41268 - DNA, 75 bp, synthetic construct
  source 1..75: mol_type = other DNA
ggctgacgcgcagcatggagtacgacattgccggacgtgtcaccacgctgaccaacgagaacggcagtcacagcg

SEQ ID NO: 41269 - DNA, 75 bp, synthetic construct
  source 1..75: mol_type = other DNA
gtcgttcaggtgcaacatatcttcacgcctgtcgctatcagtcacacgctggcgcttgccgcgacacttgatgcg

SEQ ID NO: 41270 - DNA, 75 bp, synthetic construct
  source 1..75: mol_type = other DNA
atagaggcggatgcagacatcattctgatgctttacagggatgaagtgtacaacccggatacgcaggccaggggc

SEQ ID NO: 41271 - DNA, 75 bp, synthetic construct
  source 1..75: mol_type = other DNA
aacgattgtacttggtaaaacaggtaagggtaaaaaaactcttatgaaatcctgtttaagaacgaaactggacag

SEQ ID NO: 41272 - DNA, 75 bp, synthetic construct
  source 1..75: mol_type = other DNA
cctgaagtgatggatattctggccacactgccagcggacgttttttctgtacgagcgtatcaggatatctataca

SEQ ID NO: 41273 - DNA, 75 bp, synthetic construct
  source 1..75: mol_type = other DNA
ttataaaacggggatcgggattaccaccccgcaggagttagaggcgatacacgacgcgccagcgtctttttttgt

SEQ ID NO: 41274 - DNA, 75 bp, synthetic construct
  source 1..75: mol_type = other DNA
aaaagaggcagcgaaatcatcagaaacgaacgcatcctcgagcgccagtagtgccgcttcctcggcaacggcggc

SEQ ID NO: 41275 - DNA, 75 bp, synthetic construct
  source 1..75: mol_type = other DNA
ggtgactgagcaggggcatggcgtgcttctgttcaccatggagatggcgaacatccagattggtgaacgtatggt

SEQ ID NO: 41276 - DNA, 75 bp, synthetic construct
  source 1..75: mol_type = other DNA
tgaaaagttagacttcgggggcattgaacagcccccaacgacctactataacccttcaaccggatatcctatgca

SEQ ID NO: 41277 - DNA, 75 bp, synthetic construct
  source 1..75: mol_type = other DNA
ggaatgggatgttccgggggcgttccggatgagatgtttcagctcagaaccggcgataaaatccactgggggcct

SEQ ID NO: 41278 - DNA, 75 bp, synthetic construct
  source 1..75: mol_type = other DNA
gctttagtcctttgtggaaattcaggcgtgattttgttgagtgtgaaggaccaccagcacattgattctgccatt

SEQ ID NO: 41279 - DNA, 75 bp, synthetic construct
  source 1..75: mol_type = other DNA
gtgattatgatccggaagtactgaagcaggcggtgaatgatgcggttgcgaatattccggtaccggcggacggca

SEQ ID NO: 41280 - DNA, 75 bp, synthetic construct
  source 1..75: mol_type = other DNA
gacttccctgtcggcggtattacagaagcatgtgacggtggatgaggtgcgtccggttctgcaggcgatggtgga

SEQ ID NO: 41281 - DNA, 75 bp, synthetic construct
  source 1..75: mol_type = other DNA
atggatggttttagtacagagcgtaataataagggtatgaaaatgaaatggtatgaactggctagatccagaatg

SEQ ID NO: 41282 - DNA, 75 bp, synthetic construct
  source 1..75: mol_type = other DNA
cactaccggcggacgttttttctgtacgagcgtatcgggatatctacacaggcatctgcagacaggcccgtgttt

SEQ ID NO: 41283 - DNA, 75 bp, synthetic construct
  source 1..75: mol_type = other DNA
atgcgggtgtactttcatatctggatcggcaaggcaaacatggcgcaacgctggctgatatcaccgaacatagcc

SEQ ID NO: 41284 - DNA, 75 bp, synthetic construct
  source 1..75: mol_type = other DNA
ttgctgaatatacgcgagagcgtactgttgcccggctctatgtctgaaatgcatttttttttactgataggtatt

SEQ ID NO: 41285 - DNA, 75 bp, synthetic construct
  source 1..75: mol_type = other DNA
atgaccttgaaggcgctgtcatcggcgcgttctttctgcgcggagcagatcctgaagtgatggatattctggcca

SEQ ID NO: 41286 - DNA, 75 bp, synthetic construct
  source 1..75: mol_type = other DNA
gcactgttgccctgtattgaacaggccagggaggatatccgtaccctgcgccaactgcagcttctgtaccagaac

SEQ ID NO: 41287 - DNA, 75 bp, synthetic construct
  source 1..75: mol_type = other DNA
acagaacaatatcgactgcgaatccggaattatcttcgacaacgatgaggataaaatggattcggcagcactgct

SEQ ID NO: 41288 - DNA, 75 bp, synthetic construct
  source 1..75: mol_type = other DNA
gtgccgtaacagtgaagcaatgcagcgtgtgctggcattctatagacgttgcgcacaggcaaataacagtctgca

SEQ ID NO: 41289 - DNA, 75 bp, synthetic construct
  source 1..75: mol_type = other DNA
atggccttgttttgcaaacagataaaaaattaagatggtttactactatatatacctgggatattgaagatatgg

SEQ ID NO: 41290 - DNA, 75 bp, synthetic construct
  source 1..75: mol_type = other DNA
aggagaatatgctgaaaggcgggatttccggtcgcagtgcaaaaggaaaacgtatccatacccgggccattcaca

SEQ ID NO: 41291 - DNA, 75 bp, synthetic construct
  source 1..75: mol_type = other DNA
ttctggtttactgcactgggattgcctttctgtctctggggactgcttttctccctgcgccggtttgcatacaaa

SEQ ID NO: 41292 - DNA, 75 bp, synthetic construct
  source 1..75: mol_type = other DNA
gcgcagccacagttcggaatatcaccgggagcttgtcgagcgacgggagcgcctggtgaaagatatcgatgagtt

SEQ ID NO: 41293 - DNA, 75 bp, synthetic construct
  source 1..75: mol_type = other DNA
cctggttgtccgcaataacggtgccctggtctggcgtacctggaattttgaggacggtgccgggtactggatgaa

SEQ ID NO: 41294 - DNA, 75 bp, synthetic construct
  source 1..75: mol_type = other DNA
cgagtgccggaagagtgaggttatgcagcgagtgctggcgttttatcagggtaattttcaggaggtgatggcgtg

SEQ ID NO: 41295 - DNA, 75 bp, synthetic construct
  source 1..75: mol_type = other DNA
gggctgatcaacgccggattaattatctataccaaagttaacccgctggtgattacgcttggcacgctgtatctg

SEQ ID NO: 41296 - DNA, 75 bp, synthetic construct
  source 1..75: mol_type = other DNA
ggcgtcagaacataatctgtcgcgagtgccggaagagtgaagttatgaaacgtgtactggcattttatcaaggaa

SEQ ID NO: 41297 - DNA, 75 bp, synthetic construct
  source 1..75: mol_type = other DNA
acggcaacaaccgcgccatccgccttccccgcgatctggattttgaaggggtgagcgagctggagatcgtccggg

SEQ ID NO: 41298 - DNA, 75 bp, synthetic construct
  source 1..75: mol_type = other DNA
gacgagccactggtgttagatcgttatcagcaaaacccggttaccggtgggctgatttttatcgatcgcctgagt

SEQ ID NO: 41299 - DNA, 75 bp, synthetic construct
  source 1..75: mol_type = other DNA
atgaaaatcaagcatgaacacatccgcatggcgatgaatgtctgggcgcatccggacggcgaaaaagtgccggct

SEQ ID NO: 41300 - DNA, 75 bp, synthetic construct
  source 1..75: mol_type = other DNA
gtactggcagtatgtcgccgttatggacagcagaacgcgcccggaacatgcgcggctgcacaatgtggttttccg

SEQ ID NO: 41301 - DNA, 75 bp, synthetic construct
  source 1..75: mol_type = other DNA
atattttcgtgccatttgtaccaatggcctggtctgcggtcagtcgctgggagaagtccgggtgccacaccgggg

SEQ ID NO: 41302 - DNA, 75 bp, synthetic construct
  source 1..75: mol_type = other DNA
ccattcgcgtttttggtacggtggggttcattgtcgcgatgtgggcagtaagcctgctgcatctggaattgagta

SEQ ID NO: 41303 - DNA, 75 bp, synthetic construct
  source 1..75: mol_type = other DNA
gcatcagcctgctggtactgaacaaacaagccgaacaggccattttgcatgaaaacgccgaaagccagaatgagc

SEQ ID NO: 41304 - DNA, 75 bp, synthetic construct
  source 1..75: mol_type = other DNA
tccgctgacacacgaagaactgatgcgccatgtaccgagtatttttggggaagaccgacatacctcccgcagtga

SEQ ID NO: 41305 - DNA, 75 bp, synthetic construct
  source 1..75: mol_type = other DNA
gggaacttccgggcggcgttgcaacccaccttgaagtgctggaactcgaataccagccagaagctgctggcgact

SEQ ID NO: 41306 - DNA, 75 bp, synthetic construct
  source 1..75: mol_type = other DNA
gagatactgcgcttatacgatgagaatcatcaggtatacggtggcgtaaagtctgacgtcagttgttacaggaag

SEQ ID NO: 41307 - DNA, 75 bp, synthetic construct
  source 1..75: mol_type = other DNA
ggcacaaagatccgcagggcgtcatcagcgccgccacgctggcctgccgattagagccgggctgcgcaaaagggc

SEQ ID NO: 41308 - DNA, 75 bp, synthetic construct
  source 1..75: mol_type = other DNA
atgaaatccgcagcatggcggatgccctggcaaaaatccggaaatgatgacgctggcggggaaaaatctccgcct

SEQ ID NO: 41309 - DNA, 75 bp, synthetic construct
  source 1..75: mol_type = other DNA
tacagtgacgcgagtggtgcctcggagaattcaacccgctggggtgtggacaagccgctgtataaggaccttatc

SEQ ID NO: 41310 - DNA, 75 bp, synthetic construct
  source 1..75: mol_type = other DNA
tcacggagcagtatctggacaaccccagcgatggtattctggataaaacccgtaaaatccatatcgactatatct

SEQ ID NO: 41311 - DNA, 75 bp, synthetic construct
  source 1..75: mol_type = other DNA
taaaacggaaaagaatatccatttcgtgccgttcatgaccgatgagaacggggtgaatgtgccgacgaacaaacc

SEQ ID NO: 41312 - DNA, 75 bp, synthetic construct
  source 1..75: mol_type = other DNA
taaaggcgctactctgacggcaacgctaacctctgcaaatggcactccagtggagggtcaggtcatcaactttag

SEQ ID NO: 41313 - DNA, 75 bp, synthetic construct
  source 1..75: mol_type = other DNA
taaactgcatgtgacagacattaccagaggtgcgacttacccggtactgatagacagcattgcggtggaagtgaa

SEQ ID NO: 41314 - DNA, 75 bp, synthetic construct
  source 1..75: mol_type = other DNA
cgtggaatataccaggcaggtattaaagcctcattcagcagtacgttaagcgggcatctcggggtggggtatagc

SEQ ID NO: 41315 - DNA, 75 bp, synthetic construct
  source 1..75: mol_type = other DNA
ttagggcgcactataggtttcccgacggcgaatgtaccgctacgccgtcaggtttccccggtgaaaggggtttat

SEQ ID NO: 41316 - DNA, 75 bp, synthetic construct
  source 1..75: mol_type = other DNA
gagagtttgacatgagcgccgccacctacgcacagcaacctgcgctgtttacagccatgctgaagcagtttcgtg

SEQ ID NO: 41317 - DNA, 75 bp, synthetic construct
  source 1..75: mol_type = other DNA
gtggcaaaagtatttacacaagaagagcgggaaaaaattaagaggcaagttgttgaactcgtgcgccagagtggg

SEQ ID NO: 41318 - DNA, 75 bp, synthetic construct
  source 1..75: mol_type = other DNA
ggcgttaaggttaactacggcaagtttggcgatctgctggcagatgtcaaagccatcaccggcaatgccccagag

SEQ ID NO: 41319 - DNA, 75 bp, synthetic construct
  source 1..75: mol_type = other DNA
cgcgttttgcagcacgtacagcgatggaggcaagttgcggttgggcacgtggaatgggaagcggtgagttatcgg

SEQ ID NO: 41320 - DNA, 75 bp, synthetic construct
  source 1..75: mol_type = other DNA
atgcggaaaggcagaaaggcagttaatggacttcttttgcatacagataaaaagctaagatggttcactaccaaa

SEQ ID NO: 41321 - DNA, 75 bp, synthetic construct
  source 1..75: mol_type = other DNA
attgcagcagaagcgaacagccgtcttgccaggcaacaaatggaacaaatgctcagtctgcaggagaaaattatt

SEQ ID NO: 41322 - DNA, 75 bp, synthetic construct
  source 1..75: mol_type = other DNA
attgcagcagaagcgaacagccgtcttgccagacaacaaatggagcaaatgctcagtctgcaggagaaaattatt

SEQ ID NO: 41323 - DNA, 75 bp, synthetic construct
  source 1..75: mol_type = other DNA
atagaacggattcggcagcactgttgccctgtatcgaacaggccagggaggatatccgtatcctgcgccagttgc

SEQ ID NO: 41324 - DNA, 75 bp, synthetic construct
  source 1..75: mol_type = other DNA
taaacgcgccctgtaccacaatgccgctgccgtggtgctggcgcacaatcacccgtccggtgaagtcacccccag

SEQ ID NO: 41325 - DNA, 75 bp, synthetic construct
  source 1..75: mol_type = other DNA
gtgcgcggtcagctcgtttctggtgggcgactgggcgtgaagatttacgaaataatgcatgatgggcaggtccaa

SEQ ID NO: 41326 - DNA, 75 bp, synthetic construct
  source 1..75: mol_type = other DNA
cgaaaggtgttcgacctgagacgttactccgacaggttaacaccgtctcgttaccggatagtgcgatcccgccag

SEQ ID NO: 41327 - DNA, 75 bp, synthetic construct
  source 1..75: mol_type = other DNA
ggggatcgggcgtaggaacccgtttaactgtaaggcgataaatgacgccagaagcgtctttttttctgccagcgc

SEQ ID NO: 41328 - DNA, 75 bp, synthetic construct
  source 1..75: mol_type = other DNA
tgccatgcagtcgctgctcttaccgccaccggcacgtcaggcgctggcacaggcggcgctgacttaccgttatgg

SEQ ID NO: 41329 - DNA, 75 bp, synthetic construct
  source 1..75: mol_type = other DNA
tatcacaagtttttcaacctttcctcttcgcgtatggacttatataggcttgtttgttgcaagcatttcattttt

SEQ ID NO: 41330 - DNA, 75 bp, synthetic construct
  source 1..75: mol_type = other DNA
gcgacacaatggagaatcatcgaaaaaacgtgcacttacgaatagaagagtggcagagcatcgaaaacgagtaac

SEQ ID NO: 41331 - DNA, 75 bp, synthetic construct
  source 1..75: mol_type = other DNA
ttgccctgtatcgaacaggccagagaggatgtccgtaccctgcgtcatctgcagcttctgcaccagaaccggtga

SEQ ID NO: 41332 - DNA, 75 bp, synthetic construct
  source 1..75: mol_type = other DNA
gcaggcgaaccgattggaatactgacccgcgtagatgcgacgttctcttctggttgccagttgatgattaacgct

SEQ ID NO: 41333 - DNA, 75 bp, synthetic construct
  source 1..75: mol_type = other DNA
gtttgatgaaattaatattgtgcgcggtcttcctgttcctggtggtcggttggggataaaaatcacagaactgga

SEQ ID NO: 41334 - DNA, 75 bp, synthetic construct
  source 1..75: mol_type = other DNA
cgttttatgccagctgtgagacggtgtttcgccctgatttatggggtaaaccggtggttgttttatcgaataatg

SEQ ID NO: 41335 - DNA, 75 bp, synthetic construct
  source 1..75: mol_type = other DNA
cagaaagctggcgtgacaaacagacgggggagatgcgggagcagacagaatggcatcgcgtggtgctgttcggca

SEQ ID NO: 41336 - DNA, 75 bp, synthetic construct
  source 1..75: mol_type = other DNA
ctggccgcaacccgcagaccggtaaagagatcaccatcgctgctgctaaagtaccgagcttccgtgcaggtaaag

SEQ ID NO: 41337 - DNA, 75 bp, synthetic construct
  source 1..75: mol_type = other DNA
gcgaagtctatcgcagcaccggccagactctggcgttgagcgcaataccacgtctgctctggctggctcatcatc

SEQ ID NO: 41338 - DNA, 75 bp, synthetic construct
  source 1..75: mol_type = other DNA
ctgtcaggcatgaaactcggcgacacaccgctggtggagtacacccgcgaccgcctgcaccgggaaacgctgcgc

SEQ ID NO: 41339 - DNA, 75 bp, synthetic construct
  source 1..75: mol_type = other DNA
ccgtccgctgacatatgaagagctgatgcaccatgtgccgggaattttcggggaagagaaacacacgtcccgaag

SEQ ID NO: 41340 - DNA, 75 bp, synthetic construct
  source 1..75: mol_type = other DNA
cgagcagtttgatgaaatcaatattgtgcgcggtcagcgcgttcctgggggacggctgggcgtgaagatttacaa

SEQ ID NO: 41341 - DNA, 75 bp, synthetic construct
  source 1..75: mol_type = other DNA
tgctttccaggaccatgcgcacgctctgccaaccggagtgggtaatccgtcagaccagatggaaagcgatatcta

SEQ ID NO: 41342 - DNA, 75 bp, synthetic construct
  source 1..75: mol_type = other DNA
gacagggaagcgcgtaagtcgccggtgattcaggcggcgatcaaactggcgggtgccattcactatgctgacgtg

SEQ ID NO: 41343 - DNA, 75 bp, synthetic construct
  source 1..75: mol_type = other DNA
tgtacggtgaaatgcgcgtgggatcacgtgtggtatctcaggagatcagcacagcagatgaaggtgatggtggtc

SEQ ID NO: 41344 - DNA, 75 bp, synthetic construct
  source 1..75: mol_type = other DNA
tcaacgacactggaatatgtggagatggatctgaagggaacagcacgtatacttgaggccgaactgtcaaaactg

SEQ ID NO: 41345 - DNA, 75 bp, synthetic construct
  source 1..75: mol_type = other DNA
gtgtatttgcaggcatttgctgatcccgatggtgatgggctggtcaaagaggtctggtttccaaatcgtttgcta

SEQ ID NO: 41346 - DNA, 75 bp, synthetic construct
  source 1..75: mol_type = other DNA
caccacagggttgggctgccggaggtggcaaggctcaaatcgtggatgatgccggagccagcgggggtaaggcaa

SEQ ID NO: 41347 - DNA, 75 bp, synthetic construct
  source 1..75: mol_type = other DNA
atgcctgccgggtttacccactttcgactggtaaccagaaacaacatgaaatcattaaccactgaaacagcgctg

SEQ ID NO: 41348 - DNA, 75 bp, synthetic construct
  source 1..75: mol_type = other DNA
aatcaaataactgtgtcgatgcatacgccgacgcgtttggctactcttcgtttggtgacggctctcagcgcctag

SEQ ID NO: 41349 - DNA, 75 bp, synthetic construct
  source 1..75: mol_type = other DNA
gtgcgtgagtggaaatgccaccacggtgccgtggatttgcggtgataccacgtattactggaaaaacgctggcac

SEQ ID NO: 41350 - DNA, 75 bp, synthetic construct
  source 1..75: mol_type = other DNA
caggctacggattattcccgtccgagcaggcgcgtaaagactggcaaaacgcccgcaaaaaactatcaagggcaa

SEQ ID NO: 41351 - DNA, 75 bp, synthetic construct
  source 1..75: mol_type = other DNA
ccagcagcggctgaaattaagcctgtccggaaggctggcgataaaggtgattgcagagccaccggataagcgtcg

SEQ ID NO: 41352 - DNA, 75 bp, synthetic construct
  source 1..75: mol_type = other DNA
ccacacccgggccattcacagcatcgacaccgacattaagctcaatcgcgcattgtgggtgatggcagaaacgct

SEQ ID NO: 41353 - DNA, 75 bp, synthetic construct
  source 1..75: mol_type = other DNA
atccgccgacggtgaatacttactggcgacgtcatggcaatacgtatttcatctcggaggccggaaagcgttatc

SEQ ID NO: 41354 - DNA, 75 bp, synthetic construct
  source 1..75: mol_type = other DNA
gagaattgcgtgttccacaccggggaaatgtggtggagaaagttattgaaggggcttacgaggtggtgggggttt

SEQ ID NO: 41355 - DNA, 75 bp, synthetic construct
  source 1..75: mol_type = other DNA
cgccggggatacacaaaacatatgctgcgtctgcggcgggccggagagataaacggagaacatgtccctgaaatc

SEQ ID NO: 41356 - DNA, 75 bp, synthetic construct
  source 1..75: mol_type = other DNA
actcctgcatttaagttgtaacccgtttgagggtatgagcgtcagacaggaaaagaaacgcaaaaaaacactgac

SEQ ID NO: 41357 - DNA, 75 bp, synthetic construct
  source 1..75: mol_type = other DNA
actgcattcccgtatcgcaaatatccgcagggactaccttcataaagtcacaacgaccgtcagcaaaaaccacgc

SEQ ID NO: 41358 - DNA, 75 bp, synthetic construct
  source 1..75: mol_type = other DNA
ggcgcttgaacatgatttgtcacgattgtcggaagagcgaagttatgcagcgtgtgttggcgttttatcagggaa

SEQ ID NO: 41359 - DNA, 75 bp, synthetic construct
  source 1..75: mol_type = other DNA
gggtgacggacaccaccctgaaggtggtggcagccgatccgaatacggtgtccggtatcaagtccgtggggacgc

SEQ ID NO: 41360 - DNA, 75 bp, synthetic construct
  source 1..75: mol_type = other DNA
tgtcccggttgagactgaatcagatccgatgaacgtcacttttgacaagctggcccctgaagtacagaacgctgt

SEQ ID NO: 41361 - DNA, 75 bp, synthetic construct
  source 1..75: mol_type = other DNA
acaatgcgctggatgatgcccgttaccaggcaaaatacgtttcaactatctggcaaaaactgatcccgaatcagg

SEQ ID NO: 41362 - DNA, 75 bp, synthetic construct
  source 1..75: mol_type = other DNA
gccgatgctggtttattacggtatgttactggttgcgcccgcatggctttatgccatagcgttttttctgaacgc

SEQ ID NO: 41363 - DNA, 75 bp, synthetic construct
  source 1..75: mol_type = other DNA
aaaggtgttacagagattaatgatgagttacgaataaactaccttaaaaatgtaataaaactgtcagacgatgac

SEQ ID NO: 41364 - DNA, 75 bp, synthetic construct
  source 1..75: mol_type = other DNA
gggatggaggcgtgctcaggcgcccattactgggcaagagtgtttcggcagtatggccatgagccccgtttgatg

SEQ ID NO: 41365 - DNA, 75 bp, synthetic construct
  source 1..75: mol_type = other DNA
agccaatatcagccagcctgacgccgataagttgcttgctgcatcacgtggtgaatttgttgaagggattagtga

SEQ ID NO: 41366 - DNA, 75 bp, synthetic construct
  source 1..75: mol_type = other DNA
aaaaacctgttcacgtcaatttgcccgttgttgatgacctcccgccagaaggcgtgtttgatacggaattctgca

SEQ ID NO: 41367 - DNA, 75 bp, synthetic construct
  source 1..75: mol_type = other DNA
atcttgctaaaaatgtgttcgctgttcactgcgttgatcaaaatggaaaaactgttctggttaaacctaaagtat

SEQ ID NO: 41368 - DNA, 75 bp, synthetic construct
  source 1..75: mol_type = other DNA
aaagtgaacggtcatcatgaaatctcatccaccagcaggttgtggcaccatctgatgattgaccttgaaacaatg

SEQ ID NO: 41369 - DNA, 75 bp, synthetic construct
  source 1..75: mol_type = other DNA
agcaacagcagggatagatgatttgggtgaaattttagctaaaatgaaacagagaacatcgagaggaataagaaa

SEQ ID NO: 41370 - DNA, 75 bp, synthetic construct
  source 1..75: mol_type = other DNA
ctggttacgccctgatgcagggacagacttttgataaatctgcatacccgaaacttgcagtcgcttatccgtcag

SEQ ID NO: 41371 - DNA, 75 bp, synthetic construct
  source 1..75: mol_type = other DNA
gagaattcgatactcctaatgtgcgaggtttacgtatccttcagtgtctggcgcaagccgacgaagcaggattac

SEQ ID NO: 41372 - DNA, 75 bp, synthetic construct
  source 1..75: mol_type = other DNA
ctatcggtctatttccagtctcctgtgatacttaagaagatacaaacttttaatggaaaaataaaattcaggcag

SEQ ID NO: 41373 - DNA, 75 bp, synthetic construct
  source 1..75: mol_type = other DNA
cggaagttcatccccgggaagtgattaaacgcgccctgtaccacaatgccgctgccgtggtgctggcgcacaatc

SEQ ID NO: 41374 - DNA, 75 bp, synthetic construct
  source 1..75: mol_type = other DNA
agtgcaacaggaactggaaaaagtttgcaccgcatgcggtcagaccggtggcggcaactgtcctgactgtggtgc

SEQ ID NO: 41375 - DNA, 75 bp, synthetic construct
  source 1..75: mol_type = other DNA
cgtctggtacaggcgctggccctggtggacatccgggtgccggaccatctgatagtcggaggcaaccaggttttc

SEQ ID NO: 41376 - DNA, 75 bp, synthetic construct
  source 1..75: mol_type = other DNA
aggtttctacaaactaatagcccgcagccgcaaagcaacgacgcctggcacatttgctcatcgtttcagtaactg

SEQ ID NO: 41377 - DNA, 75 bp, synthetic construct
  source 1..75: mol_type = other DNA
acccgtccggtgaagtcacccccagtaaggcagaccgccttatcacggaacgtctggtacaggcactgggcctgg

SEQ ID NO: 41378 - DNA, 75 bp, synthetic construct
  source 1..75: mol_type = other DNA
atacctgacgcgcaagggcatccgggccgcgcctggcgtgcggctgaacaataaaaatgagctggttattccctt

SEQ ID NO: 41379 - DNA, 75 bp, synthetic construct
  source 1..75: mol_type = other DNA
ggtgaggttgcaggatcatttgcaacgttatccagatttttataatgaagaaatattcagggaggtgaccgaaga

SEQ ID NO: 41380 - DNA, 75 bp, synthetic construct
  source 1..75: mol_type = other DNA
ccattctgctggcctgttccccggtctttgcggcggggaataccgacagtattgaagcccggctggcggccctgg

SEQ ID NO: 41381 - DNA, 75 bp, synthetic construct
  source 1..75: mol_type = other DNA
ctccactgccgtgaaggaaatgcgtttctatggcgtgtcgggagtgacagcaaatgacctccgcactgccgaagc

SEQ ID NO: 41382 - DNA, 75 bp, synthetic construct
  source 1..75: mol_type = other DNA
tgtcccggtcgaacccgaatccgatccgatgaacatcacttttgacaatctggcccctgaagtacagaacgccgt

SEQ ID NO: 41383 - DNA, 75 bp, synthetic construct
  source 1..75: mol_type = other DNA
cgccagagccaatcaacagcacactgaaaattcaacaggaaaaatcaacccggtcattgctgccattcatcgcga

SEQ ID NO: 41384 - DNA, 75 bp, synthetic construct
  source 1..75: mol_type = other DNA
ggtaaactggtgccgcaggatccgaatgatgaaccggcgtcggacctgctgaagcgtattgcggcggaaaaagca

SEQ ID NO: 41385 - DNA, 75 bp, synthetic construct
  source 1..75: mol_type = other DNA
tttttaccgatgaaatctcgttagatgttgctctccggctattcatagaatttatcgaaaaaaactccggcgggc

SEQ ID NO: 41386 - DNA, 75 bp, synthetic construct
  source 1..75: mol_type = other DNA
aggcgtaccccacaatgcacttgatgatgcacgtcaccaggcaaaacaagtttcagcaatctggcaaaaactgat

SEQ ID NO: 41387 - DNA, 75 bp, synthetic construct
  source 1..75: mol_type = other DNA
aggccgctttcaagaacggcgtactcacgatcacaatggaaaagcgcgaggccagtgcgcccaagcagggccgct

SEQ ID NO: 41388 - DNA, 75 bp, synthetic construct
  source 1..75: mol_type = other DNA
tactgacgcactgaacagagcaaaacaacaggcagatcagcaaggaagccagccaccagagggagataatgagca

SEQ ID NO: 41389 - DNA, 75 bp, synthetic construct
  source 1..75: mol_type = other DNA
agcggctgaagcagggaggtggtctggtgatgtgcggcaagccgggaaccggtaaaaaccaccttgccctggcga

SEQ ID NO: 41390 - DNA, 75 bp, synthetic construct
  source 1..75: mol_type = other DNA
ggaaatggaaggcgctgaacatccacacaaggagaaccctggcggcaatcagcatcacgccagcgataataaaac

SEQ ID NO: 41391 - DNA, 75 bp, synthetic construct
  source 1..75: mol_type = other DNA
aaatacggtcgcgcaaacaaactttctggtctggaaaaagcactggccctgggagctacggaaatcacaaaagag

SEQ ID NO: 41392 - DNA, 75 bp, synthetic construct
  source 1..75: mol_type = other DNA
cgttccggtactggcgattgccgctcatattccctccagcgaaattggcagcggctatttccaggaaacccaccc

SEQ ID NO: 41393 - DNA, 75 bp, synthetic construct
  source 1..75: mol_type = other DNA
tggaaaccgtgtttgagcacaaaaagacgctcgaaagcggggccaccacccggtttaaggtgatgctggcggatg

SEQ ID NO: 41394 - DNA, 75 bp, synthetic construct
  source 1..75: mol_type = other DNA
aacggcggcatgggggattatcgccctagtgtggcttaccgtccgggtgatgaagcgcctgcaacagcttgaaaa

SEQ ID NO: 41395 - DNA, 75 bp, synthetic construct
  source 1..75: mol_type = other DNA
acttcctggctaaacatcaaaaaggcgacgttgccagcgtatccggcacgatgcaggtaagccagtggaccggac

SEQ ID NO: 41396 - DNA, 75 bp, synthetic construct
  source 1..75: mol_type = other DNA
gaacctataccgattcatatcagttaggagatggggagctgcttgtttgtacggtgaatatccctgctagtgtat

SEQ ID NO: 41397 - DNA, 75 bp, synthetic construct
  source 1..75: mol_type = other DNA
atctgatgcatcacaagaaagcaggaaacacaaagttgggcgagttcgggaattacagtaacgactggcagacgc

SEQ ID NO: 41398 - DNA, 75 bp, synthetic construct
  source 1..75: mol_type = other DNA
tgtcgactttctccggggattatctccgcgtaactgacaacaaggggaaaacgcacgatgtgctgaccggaagtg

SEQ ID NO: 41399 - DNA, 75 bp, synthetic construct
  source 1..75: mol_type = other DNA
aaattcctgctgccgcgtcaggatgcgacctacgataacccgtatggtttcccggatctgtcgatgtgcttctgg

SEQ ID NO: 41400 - DNA, 75 bp, synthetic construct
  source 1..75: mol_type = other DNA
ataaaaaaggagtactattcgcatacagttgatattgagaaaaatattcatgccatatgggttgcgggttcccca

SEQ ID NO: 41401 - DNA, 75 bp, synthetic construct
  source 1..75: mol_type = other DNA
accccgcagtactggaagcgcgagtatcaattacaggatggcgatatcgacgaaaccccggcacctgcgccagtg

SEQ ID NO: 41402 - DNA, 75 bp, synthetic construct
  source 1..75: mol_type = other DNA
aagacgtgatgacccgcactgtgaaaatcagcggtgtggggcgtccgtatctggcagaggaaggcactgaaaccg

SEQ ID NO: 41403 - DNA, 75 bp, synthetic construct
  source 1..75: mol_type = other DNA
ttgaaattaacgtggcggtattcgaagccattcataacggatcaccggattacaaagaaggtgagaatggcgata

SEQ ID NO: 41404 - DNA, 75 bp, synthetic construct
  source 1..75: mol_type = other DNA
cggcacgctggggtgtagataagccactgtacaaggacctgcttacccgtactcaggccgcactgaaggccaacc

SEQ ID NO: 41405 - DNA, 75 bp, synthetic construct
  source 1..75: mol_type = other DNA
ttatttcagaaggcggctgggtattcgagtcgctcagtaagccaagttttcctgtcaccggtgacgcaataactc

SEQ ID NO: 41406 - DNA, 75 bp, synthetic construct
  source 1..75: mol_type = other DNA
gaactggactttattgataaagtcttcttcgtggtcgacaggaaagacctcgattaccagaccatgaaggaatat

SEQ ID NO: 41407 - DNA, 75 bp, synthetic construct
  source 1..75: mol_type = other DNA
aggccctgttacagtcagtggacctgcgtttaatgaagcgctggaacgatatatccgattacgaagtcttgagtt

SEQ ID NO: 41408 - DNA, 75 bp, synthetic construct
  source 1..75: mol_type = other DNA
aaggcgtaaaaaacggcaaaattacggcctgtaaacgactgaaacaggccgttaaacggtatttttctgaccttg

SEQ ID NO: 41409 - DNA, 75 bp, synthetic construct
  source 1..75: mol_type = other DNA
gcattacgccggtggtggaacgccagttgatgctggtgcgcaggaagaaccgttcactttccaccgccgcacaag

SEQ ID NO: 41410 - DNA, 75 bp, synthetic construct
  source 1..75: mol_type = other DNA
tgtatttaagatcaccaagcagagcaataaagcctggtccctgacgcgcccggtggatgacgcagtctccctgct

SEQ ID NO: 41411 - DNA, 75 bp, synthetic construct
  source 1..75: mol_type = other DNA
aattcggtggcgatacctggacccaaacagatgtgttcatgactggtcgcaccactggtgttgcaacttatcgta

SEQ ID NO: 41412 - DNA, 75 bp, synthetic construct
  source 1..75: mol_type = other DNA
tgcgttccttcagacccaggttaagatgaagaagcactctctgcctgactgggctacagtacaccgggaactgcg

SEQ ID NO: 41413 - DNA, 75 bp, synthetic construct
  source 1..75: mol_type = other DNA
gattaaaattgcagctaatccgttcgatcctcaatgggagatgtactttgaggagcgttgtgcagacaaaatgcg

SEQ ID NO: 41414 - DNA, 75 bp, synthetic construct
  source 1..75: mol_type = other DNA
ctgaatccaataactttatcgttcttgataagtacatcaaagctgagcaaacaggcgacagctatcagagcgaat

SEQ ID NO: 41415 - DNA, 75 bp, synthetic construct
  source 1..75: mol_type = other DNA
ttgctggcggtgtgctggatgcagggcgaatttgacatgagcgctgccacctacgcacagcaaccggacctgttc

SEQ ID NO: 41416 - DNA, 75 bp, synthetic construct
  source 1..75: mol_type = other DNA
gattcaggattatcgttctgcctataacgatattcgcgactggcagcgccgtgagaaagaagctgagaaaaaaga

SEQ ID NO: 41417 - DNA, 75 bp, synthetic construct
  source 1..75: mol_type = other DNA
gaatatttcgcccgcaaaaacagtacatactcaggttcacaacaaaatactggtgcatctgacacgaccgcacaa

SEQ ID NO: 41418 - DNA, 75 bp, synthetic construct
  source 1..75: mol_type = other DNA
agtgcaacaggaaccggaaaagatctgcaccgcctgcggtcagagcggtggcggcaactgccctgattgtggtgc

SEQ ID NO: 41419 - DNA, 75 bp, synthetic construct
  source 1..75: mol_type = other DNA
aactgacgagaaaaaactgagtgcggctgaaaatcagcaggcgtttcttcatcccatgcgtattcaggaaatcac

SEQ ID NO: 41420 - DNA, 75 bp, synthetic construct
  source 1..75: mol_type = other DNA
aagaaaagcagatactttgtatcacctgacaccaaaaggtgatctacagataatatatcaggtagctacaaaaat

SEQ ID NO: 41421 - DNA, 75 bp, synthetic construct
  source 1..75: mol_type = other DNA
aatacggcgaggcagaaggaatgggtagagcgctgtttctttatcagaaaatgctcattacatacccagataaag

SEQ ID NO: 41422 - DNA, 75 bp, synthetic construct
  source 1..75: mol_type = other DNA
cgaatgatccgaaatgggtgaaggggattgaaacccgcgattctgtgaaccagaaccagcaagaaacggaacaga

SEQ ID NO: 41423 - DNA, 75 bp, synthetic construct
  source 1..75: mol_type = other DNA
tgtccgtgaatggctgcgactgcatatggccgtgcttgagcgggaagagttccgggtgttgtacctggacaacca

SEQ ID NO: 41424 - DNA, 75 bp, synthetic construct
  source 1..75: mol_type = other DNA
aggcggcactgacttaccgttatggtgatgaacatcagcccgtcatcaccgccgacatcctgacgccacgacgcc

SEQ ID NO: 41425 - DNA, 75 bp, synthetic construct
  source 1..75: mol_type = other DNA
ccccatcgtggttattggtgctgtgttcttcgatccgcagaccggggaaatcgggccaacattttatatcgttat

SEQ ID NO: 41426 - DNA, 75 bp, synthetic construct
  source 1..75: mol_type = other DNA
gcggatcatcttggtattgacggtctggagcaactccgggcaatccaggacgccacggggatcgggatggtgctt

SEQ ID NO: 41427 - DNA, 75 bp, synthetic construct
  source 1..75: mol_type = other DNA
cgtgctgtttctggtctttggtctggggcaggcgaactatgggttaatcctgctgttttatggtattcgtggcct

SEQ ID NO: 41428 - DNA, 75 bp, synthetic construct
  source 1..75: mol_type = other DNA
ggaagaaggtgcagtcgctgtagccactgccattgaagccggtgatgaacgtcgcgcccgcgcaaaatttcactg

SEQ ID NO: 41429 - DNA, 75 bp, synthetic construct
  source 1..75: mol_type = other DNA
acgttttctttgtgccgttcatgaccgacggtaacggcaacaacacgcccaccaacttaccggcagaagacccgg

SEQ ID NO: 41430 - DNA, 75 bp, synthetic construct
  source 1..75: mol_type = other DNA
accccgccctgccctcgattcatgggatgctgaatatatgcaggaaaaccgctgggatgaggattctgcttcttt

SEQ ID NO: 41431 - DNA, 75 bp, synthetic construct
  source 1..75: mol_type = other DNA
ttgtttgcgaggataaacccggtataccccgccctgccctcgattcctgggatgctgaatatatgcaggaaaacc

SEQ ID NO: 41432 - DNA, 75 bp, synthetic construct
  source 1..75: mol_type = other DNA
tgctgaacgactgacacaaaaactgaaggagggctggcagccatttggcagtccggtggccatcacgccttatac

SEQ ID NO: 41433 - DNA, 75 bp, synthetic construct
  source 1..75: mol_type = other DNA
ccttataaagaaaatcgctgtttttgctgtaccacctgtaccaccatgtcacaaacccttgtgtggcgcggcctg

SEQ ID NO: 41434 - DNA, 75 bp, synthetic construct
  source 1..75: mol_type = other DNA
ctgcgtgttcagggaatgttttggcgtcacgcctcaccggatgctggcgcttcaggagcacgggcagcataaaag

SEQ ID NO: 41435 - DNA, 75 bp, synthetic construct
  source 1..75: mol_type = other DNA
atttacctgataatcctttgaatttaaattgcgagggaacattagacttagtaagaaataacatggctcgtccgt

SEQ ID NO: 41436 - DNA, 75 bp, synthetic construct
  source 1..75: mol_type = other DNA
gccagccacaccatcgaaacgcagcgcgcggcgctgaaaagtaaagcgcacgaactgacgaagaaaaatagccag

SEQ ID NO: 41437 - DNA, 75 bp, synthetic construct
  source 1..75: mol_type = other DNA
cgaccggatgcgcttcacgaagagtgaccgggagcgcggttatgtggccaacagcgtctggacggtgacagcggt

SEQ ID NO: 41438 - DNA, 75 bp, synthetic construct
  source 1..75: mol_type = other DNA
accggatcgaggaactgaaacgtgagaacgaggatttacgccgctgggctgatactcctttgcctgctgacatta

SEQ ID NO: 41439 - DNA, 75 bp, synthetic construct
  source 1..75: mol_type = other DNA
atgaccacttttaccaacgacaacaaggaactaattaaagaaatccgagagcgaatcggcagcctggacgtccga

SEQ ID NO: 41440 - DNA, 75 bp, synthetic construct
  source 1..75: mol_type = other DNA
catgatgcacgggaaaaggccggtgagctggggaaagagcaggtcatggtgcctgtcctgaacacagcgaatata

SEQ ID NO: 41441 - DNA, 75 bp, synthetic construct
  source 1..75: mol_type = other DNA
atcaaagcacaaaacgtgaaagttaataatgaaagtatcttactacctccattttcgaacaacgacattacatta

SEQ ID NO: 41442 - DNA, 75 bp, synthetic construct
  source 1..75: mol_type = other DNA
accgctacggtgtcgccgcaggcggtcgccgactggcagcactcaacatgctggcagagcgcaacatccttccgg

SEQ ID NO: 41443 - DNA, 75 bp, synthetic construct
  source 1..75: mol_type = other DNA
gacacggaccagctgcaggccatcgcgcccggtcagcctttccgtctccagcagacgcgcagtgctgccgatgtg

SEQ ID NO: 41444 - DNA, 75 bp, synthetic construct
  source 1..75: mol_type = other DNA
ctgaacgggaaaccgcactgccggagagtgtgctgcgtgaatcacaacgggagcgggaagcggtccgggaggttg

SEQ ID NO: 41445 - DNA, 75 bp, synthetic construct
  source 1..75: mol_type = other DNA
cggacggcaatttccccaacggtattcctaacccgctgctgccggaatgtcgcgacgacacccgcaatgcggtca

SEQ ID NO: 41446 - DNA, 75 bp, synthetic construct
  source 1..75: mol_type = other DNA
tttatttcggtcagccttcctgggcgcacttcccgttctacttcaacagtcagacgctggaaatggcggaccgtg

SEQ ID NO: 41447 - DNA, 75 bp, synthetic construct
  source 1..75: mol_type = other DNA
gcgacaggccgtattgatgcaattgaacgggtaaacgtaggggcacaggtatcagggcaattaaaatcactgaaa

SEQ ID NO: 41448 - DNA, 75 bp, synthetic construct
  source 1..75: mol_type = other DNA
aacatttctgatattcttcctgttattgatgcactacccaatccaccagtgttagttacactgagttacgaatct

SEQ ID NO: 41449 - DNA, 75 bp, synthetic construct
  source 1..75: mol_type = other DNA
ggaatgcgaagcgtaatcagttatcttcttagtcccctggaagagtctgtaacagaaagtttacatgagcgttaa

SEQ ID NO: 41450 - DNA, 75 bp, synthetic construct
  source 1..75: mol_type = other DNA
aattgacgacttgcctcagcgtaatgatttgcgcaatgctgaggctgcgctcagcgaggttaaagccgaacttca

SEQ ID NO: 41451 - DNA, 75 bp, synthetic construct
  source 1..75: mol_type = other DNA
ggtcacggcagaggtgctggcacagcggcaggctgaagaggccatccgccgtgaaacggaacgccgtgcagatga

SEQ ID NO: 41452 - DNA, 75 bp, synthetic construct
  source 1..75: mol_type = other DNA
tgatgggctacgtggacctggcgaacttcacccgtccgctgaagctggtggtgaactccggcaacggggcggcgg

SEQ ID NO: 41453 - DNA, 75 bp, synthetic construct
  source 1..75: mol_type = other DNA
gagcgaaaacgtcaccagcaaaaagttgtttccgtactttgccggattgttcgttgcacactacatgacgctctg

SEQ ID NO: 41454 - DNA, 75 bp, synthetic construct
  source 1..75: mol_type = other DNA
cggccggaagtgccggtaactattacaccgacaaggataattactatgtactgggcagcatgggagaacgctggg

SEQ ID NO: 41455 - DNA, 75 bp, synthetic construct
  source 1..75: mol_type = other DNA
gacagattcgatatttccattcctattaatattctgctggatgtcaaaacccctgcgcaattaatggaaactcta

SEQ ID NO: 41456 - DNA, 75 bp, synthetic construct
  source 1..75: mol_type = other DNA
agcagatgaacaaggtgcagtccgccattatggcgctcaacgccatgaacactaccgtgcagagcgtcatgattg

SEQ ID NO: 41457 - DNA, 75 bp, synthetic construct
  source 1..75: mol_type = other DNA
tctcggtgcgggaacatccggtcgtctggggattctggatgccagcgaatgtccgccgacctacggcgtgaaacc

SEQ ID NO: 41458 - DNA, 75 bp, synthetic construct
  source 1..75: mol_type = other DNA
cctcacgccgctcaagctggtgattaactccgggaatggcgcagcgggtccggtggtggacgccattgaagcccg

SEQ ID NO: 41459 - DNA, 75 bp, synthetic construct
  source 1..75: mol_type = other DNA
gtcatcaatgattgtaagacctgaaaattgtatatatgacccatcaaagggaaacttcattataaaagatagtta

SEQ ID NO: 41460 - DNA, 75 bp, synthetic construct
  source 1..75: mol_type = other DNA
gctggcagatgctacaggtccgcttcccgactttccgggtaatgcaggaggacggctgggccgggctgcgcgatc

SEQ ID NO: 41461 - DNA, 75 bp, synthetic construct
  source 1..75: mol_type = other DNA
ctgccatgcttcagggtagccaacctgtaagccaaacttacaagtttccagttaatacaccttgccaggatgcgc

SEQ ID NO: 41462 - DNA, 75 bp, synthetic construct
  source 1..75: mol_type = other DNA
accggccttctgccgctggtcacagacagtcttccgatgcgcttgctgccaactgaaatcatggccggttcgccg

SEQ ID NO: 41463 - DNA, 75 bp, synthetic construct
  source 1..75: mol_type = other DNA
cggtaatgtcgaaaaccggacacgcctttattaaagaacgtatgcgcaaggaagacgccatctacggtggcgaaa

SEQ ID NO: 41464 - DNA, 75 bp, synthetic construct
  source 1..75: mol_type = other DNA
ttatccttattgtccttgcggctattctgtatcttgcatacagcgctgctactgtatatttatcagaagttcata

SEQ ID NO: 41465 - DNA, 75 bp, synthetic construct
  source 1..75: mol_type = other DNA
cagcaggtctataacggccttgccggaatgtggctggtggaagatgaagtcagcaagtcgctgcctatccccaac

SEQ ID NO: 41466 - DNA, 75 bp, synthetic construct
  source 1..75: mol_type = other DNA
gaatggtaaaatatatagagatgcatcctcttctcttgaaaatgctcttatagttgggctgcctgtagggtcaca

SEQ ID NO: 41467 - DNA, 75 bp, synthetic construct
  source 1..75: mol_type = other DNA
atggctgaacacgatattacgccagaagtcaccatttccaaaacacagcgccgctgtaccgtgggttatctgccc

SEQ ID NO: 41468 - DNA, 75 bp, synthetic construct
  source 1..75: mol_type = other DNA
atgacgaatttgatcaatataaaaaataggttagttattcattatttaaggactatatactatgaaaaaaattat

SEQ ID NO: 41469 - DNA, 75 bp, synthetic construct
  source 1..75: mol_type = other DNA
aataaaaaaaatcaaaatagttgtgaattctgggaatggtgcagctggtcctgttattgatgctattgaggaatg

SEQ ID NO: 41470 - DNA, 75 bp, synthetic construct
  source 1..75: mol_type = other DNA
gatgctcatgctgaatgggggattaaacctggaattcttggtgttggtggtggggttggtgtcagaggcgggttt

SEQ ID NO: 41471 - DNA, 75 bp, synthetic construct
  source 1..75: mol_type = other DNA
ccaaagtcagttgagtcatttgctcagcaagaagctgacaaattcaaagaggcgctgctggagacgctgaaaacc

SEQ ID NO: 41472 - DNA, 75 bp, synthetic construct
  source 1..75: mol_type = other DNA
atctttacccgtcttctggagggcaggctgccggacggggcggatttaagccgcatgcaggatggcagtaataag

SEQ ID NO: 41473 - DNA, 75 bp, synthetic construct
  source 1..75: mol_type = other DNA
ggaggccgtcggggaagacgcctcgctgaaatcccgggatgtggcggcactggatacgcgtaaatccaaacagca

SEQ ID NO: 41474 - DNA, 75 bp, synthetic construct
  source 1..75: mol_type = other DNA
gtcaacatggtcacctgcggcggccaggccaccattccaatggtggcggcagtttcacgcgtggcgcgtgttcat

SEQ ID NO: 41475 - DNA, 75 bp, synthetic construct
  source 1..75: mol_type = other DNA
caccctcctgcaggaacggctgaccacactcgcccggtcgatgcagctgaaaatggactggcaggaagtcagcaa

SEQ ID NO: 41476 - DNA, 75 bp, synthetic construct
  source 1..75: mol_type = other DNA
ccggaaatcatcaatctgtttcaggactacgtccagaactgcgtgctgggggatatttacctgaaccacaaatac

SEQ ID NO: 41477 - DNA, 75 bp, synthetic construct
  source 1..75: mol_type = other DNA
tggtaaaggaatggagagcgtaccttcgggtggtggcagccaggatattattgctgaccatcagggacatcaggc

SEQ ID NO: 41478 - DNA, 75 bp, synthetic construct
  source 1..75: mol_type = other DNA
tgaaaacaagaaagatgctaatgaaactttagagttaaaaattattgagcttcagatgaaaattaataatttaat

SEQ ID NO: 41479 - DNA, 75 bp, synthetic construct
  source 1..75: mol_type = other DNA
gggatgttattcctgatgataatgattgcgggcggtatgtgccgttctcttctgtcacgaaagaaaacatcatga

SEQ ID NO: 41480 - DNA, 75 bp, synthetic construct
  source 1..75: mol_type = other DNA
ttcaacaaactgcgcagcggtattgactgggtactggaaaaactcggcgtcatcaacaaagagtctgacgcactt

SEQ ID NO: 41481 - DNA, 75 bp, synthetic construct
  source 1..75: mol_type = other DNA
aaaaagtttatcgagactgaacggctgtataagcacggtcagcaaggactggcctatgaaatcgtcattaactct

SEQ ID NO: 41482 - DNA, 75 bp, synthetic construct
  source 1..75: mol_type = other DNA
gcgggaacgcaggaaggtattgccgatatttctgtctggggatcgcgattgcccgctggcggaatgcagtggagc

SEQ ID NO: 41483 - DNA, 75 bp, synthetic construct
  source 1..75: mol_type = other DNA
cagcagcacaactactaatgcaattcagggggataggcccgatgactgcaacagcaatcgttgccagcataggta

SEQ ID NO: 41484 - DNA, 75 bp, synthetic construct
  source 1..75: mol_type = other DNA
acccgggcttacatggaaaccctccggggttaccttaatgatcatggcgtaccgctcgctctctactctgataga

SEQ ID NO: 41485 - DNA, 75 bp, synthetic construct
  source 1..75: mol_type = other DNA
atcctgactcttaacaacgattccgcggcgtatcagggtacgacggatatcgtggggggggaaattgctttcggt

SEQ ID NO: 41486 - DNA, 75 bp, synthetic construct
  source 1..75: mol_type = other DNA
aatttaccctcagttcgttagctgaatggtgggatatcatggtcgggactcacctgtgcatgatgccaacgctgg

SEQ ID NO: 41487 - DNA, 75 bp, synthetic construct
  source 1..75: mol_type = other DNA
cgtactgcatgacgcttcccccgaagcgggcaatcagctacctgaagtccaaagggtatcagattacctgggact

SEQ ID NO: 41488 - DNA, 75 bp, synthetic construct
  source 1..75: mol_type = other DNA
ttcagtgaaccctccgtccgttttatctccgtaacaaggcaactggaagagggtcgtttccgttatcaattcaca

SEQ ID NO: 41489 - DNA, 75 bp, synthetic construct
  source 1..75: mol_type = other DNA
atgattgaaggtaatgtggtcactgtggaaaggaagctattttctgtcctgaatcatgagtatactgcaaagaaa

SEQ ID NO: 41490 - DNA, 75 bp, synthetic construct
  source 1..75: mol_type = other DNA
tagcagttgatattcgtaaatcgtcacctacatttgggaaatgggttggggtgaatttgtctgctgagaataagc

SEQ ID NO: 41491 - DNA, 75 bp, synthetic construct
  source 1..75: mol_type = other DNA
gtaagaggccttggtgccggattttccagcgtatacagccactttgcgtcttcttccatcacgccaaccgccagt

SEQ ID NO: 41492 - DNA, 75 bp, synthetic construct
  source 1..75: mol_type = other DNA
atgcgaagcagaacggtgccccggtggtgttgtcggaagtctctcagatacagctgaaatactccgacctggcat

SEQ ID NO: 41493 - DNA, 75 bp, synthetic construct
  source 1..75: mol_type = other DNA
acaagttttacatagatataaaaatagatccagtaaacacaggaaatataaaagataaaaacataaaatatcgtt

SEQ ID NO: 41494 - DNA, 75 bp, synthetic construct
  source 1..75: mol_type = other DNA
cggttacagcgatgccgtcagtgttctggcacaggatcgcccgtcgctggccattgtgtccgggcagggcggtgc

SEQ ID NO: 41495 - DNA, 75 bp, synthetic construct
  source 1..75: mol_type = other DNA
attgtgggcggcgttcctgaaacagatattcacggcaggctgatggcggggacgctggacagtcagagcagttgc

SEQ ID NO: 41496 - DNA, 75 bp, synthetic construct
  source 1..75: mol_type = other DNA
cttaaaaaaaattctctaattatgttttcaaagggatttatttcaaaagaaattttgaatgagatagatgagaaa

SEQ ID NO: 41497 - DNA, 75 bp, synthetic construct
  source 1..75: mol_type = other DNA
caccggaggtgcagcttatcgtcagtggttgtccgcgagtgacaccgtgtcggctggagcaggcagcgccgcgca

SEQ ID NO: 41498 - DNA, 75 bp, synthetic construct
  source 1..75: mol_type = other DNA
ataccggctcaaactctgccgataacattggtggcgtatattacagaccggtgcagaaatacattaacgggacat

SEQ ID NO: 41499 - DNA, 75 bp, synthetic construct
  source 1..75: mol_type = other DNA
attggtgcagcggttctggtttatttcgggattaaaaaactgaaaaaagggcggggcagttcctggttacgagac

SEQ ID NO: 41500 - DNA, 75 bp, synthetic construct
  source 1..75: mol_type = other DNA
ttaacgaaaaatatgctaaggctgttaatattttaaatgataatcttaaagaaaactaccatgttttttatggag

SEQ ID NO: 41501 - DNA, 75 bp, synthetic construct
  source 1..75: mol_type = other DNA
atttgatattaatgttttggttgttgagaacctgtctgaattgctgactaatgaaacgctggattcattatacaa

SEQ ID NO: 41502 - DNA, 75 bp, synthetic construct
  source 1..75: mol_type = other DNA
tggcctgtacgatgatgcgggaacgttaattgccgtggcgaacatggccgaaagttataaacctgcccttgccga

SEQ ID NO: 41503 - DNA, 75 bp, synthetic construct
  source 1..75: mol_type = other DNA
tgtacagtgaatggggagatatggggcattacacgactgaagctggttttcaatcaaatatgtattggtcatcta

SEQ ID NO: 41504 - DNA, 75 bp, synthetic construct
  source 1..75: mol_type = other DNA
gcgattcagaaacgctggcggcaacaccaaaggcggtaaaggcagcctatgaccttgctaacgggaaatataccg

SEQ ID NO: 41505 - DNA, 75 bp, synthetic construct
  source 1..75: mol_type = other DNA
tgttcggggcgaatctgattgtgaaaagcaccgatttcctgtcccggaatccggaaatcatcaatctgttccagg

SEQ ID NO: 41506 - DNA, 75 bp, synthetic construct
  source 1..75: mol_type = other DNA
acgaacagtcacgacgacacccggatgcatcgctgaccgcaaaaggttttactcagttaagcagcgcaaccaaca

SEQ ID NO: 41507 - DNA, 75 bp, synthetic construct
  source 1..75: mol_type = other DNA
ttggctgtatagtgattgagccaaaagtatttagggatgcacgtggtttttttgtggaaacatatcaaaaagaaa

SEQ ID NO: 41508 - DNA, 75 bp, synthetic construct
  source 1..75: mol_type = other DNA
ctgaatattgaaattctgagcatcaaaaaaaccagcaaagagcaggccggaatcgactggaacgccgttttcagt

SEQ ID NO: 41509 - DNA, 75 bp, synthetic construct
  source 1..75: mol_type = other DNA
cacataaaaaagtaagagtgttgctaaccattgaaaatggtgaagtaatttactcaaaacatctgttggataatg

SEQ ID NO: 41510 - DNA, 75 bp, synthetic construct
  source 1..75: mol_type = other DNA
atgataactttgctaaactaaacacaatgagctatcgggaatttcttgataacttatcacaaactatttttgcta

SEQ ID NO: 41511 - DNA, 75 bp, synthetic construct
  source 1..75: mol_type = other DNA
ctcgaatccgtgatcgccggtcacggtgccggggcgcaaaccctttctgaacaacggctgtgtcgggtactgaat

SEQ ID NO: 41512 - DNA, 75 bp, synthetic construct
  source 1..75: mol_type = other DNA
tgcaggactggtttctcaaatatgagctaaaaaccatccctgacgttgcggaagtggcgtcggtgggcggtgtgg

SEQ ID NO: 41513 - DNA, 75 bp, synthetic construct
  source 1..75: mol_type = other DNA
tggactggaaagccgaacaaactctagaacagatgttattggactcgtggcgttggaaaaaaaattatccagacg

SEQ ID NO: 41514 - DNA, 75 bp, synthetic construct
  source 1..75: mol_type = other DNA
gagacggcggagtttttgtataagacgacaaattattatcatcctcagagtgatagaggaataaaatgggatgat

SEQ ID NO: 41515 - DNA, 75 bp, synthetic construct
  source 1..75: mol_type = other DNA
gccgccaccatcaccaccggcttcaacatgaccctgctgccgttcattcagccggatgcgcgcagcctgcagctg

SEQ ID NO: 41516 - DNA, 75 bp, synthetic construct
  source 1..75: mol_type = other DNA
agcgaagggcgtcagtctggagcttaacgccgttccgctgccgcaggcgctgaacatgatttatgttcaggtgtt

SEQ ID NO: 41517 - DNA, 75 bp, synthetic construct
  source 1..75: mol_type = other DNA
accatgtttcgcgggctggagatcatcctgcaagggcgtgacccgcgcgatgcgtgggcgttcgttgaacgtatc

SEQ ID NO: 41518 - DNA, 75 bp, synthetic construct
  source 1..75: mol_type = other DNA
atgagctatcaaattctgacaaccacagcggccagtattactgacctgaaaaaaaatcctatgggaaccgtagct

SEQ ID NO: 41519 - DNA, 75 bp, synthetic construct
  source 1..75: mol_type = other DNA
gatggcagtgtacagcgatttaatgtgccatggtcttcggtgcctgtactgcaacgtgaagggcatctgaaatat

SEQ ID NO: 41520 - DNA, 75 bp, synthetic construct
  source 1..75: mol_type = other DNA
atttgcgcgtctttatgctggtggctcgccgggctggttttgccgccgtggcggaagaactgggcgtttcaccgg

SEQ ID NO: 41521 - DNA, 75 bp, synthetic construct
  source 1..75: mol_type = other DNA
tatgttgccacacaggagggatggttgtacctcgctggcatcaaagatgtttatacgtgcgaaattgtcggctac

SEQ ID NO: 41522 - DNA, 75 bp, synthetic construct
  source 1..75: mol_type = other DNA
cgaaaacgacggttggcggcagtatcacgttaacggtcaccaccaaagattgcgtcggtaatgttgtggggaata

SEQ ID NO: 41523 - DNA, 75 bp, synthetic construct
  source 1..75: mol_type = other DNA
ttacggttacacgccctaccccatgatgggcggacagatgtctgtttttgccacaacgtcagaaaccaccagttc

SEQ ID NO: 41524 - DNA, 75 bp, synthetic construct
  source 1..75: mol_type = other DNA
tcaaaatcgtctaaaggggtccttcgcggcctgcattttcaaaaaaatccttatgaacaaggtaaactagttcga

SEQ ID NO: 41525 - DNA, 75 bp, synthetic construct
  source 1..75: mol_type = other DNA
aactcgcgcgcgcactgcgcaacatgattcgcaccggccttgtcgtcgaaaccgaccttaacgccggtcgctgcc

SEQ ID NO: 41526 - DNA, 75 bp, synthetic construct
  source 1..75: mol_type = other DNA
tcaattttttcatgaaccgaaatccccacctgaaaaacatgagagtttcagatgtgatgaaactctctgattcta

SEQ ID NO: 41527 - DNA, 75 bp, synthetic construct
  source 1..75: mol_type = other DNA
taccaggatcttgccatcctatggaactgcctcggtgagttttctccttcattacagaaacggctttttcaaaaa

SEQ ID NO: 41528 - DNA, 75 bp, synthetic construct
  source 1..75: mol_type = other DNA
gcgctggcccgtatggttagcgttgaccgttcgacatggttgcgcgtctattcaggccactgggctgggttaaag

SEQ ID NO: 41529 - DNA, 75 bp, synthetic construct
  source 1..75: mol_type = other DNA
aagtaatgacggttaattctgtttcggagaatactaccggctctaatgcaattaccgcatctgctattaattcat

SEQ ID NO: 41530 - DNA, 75 bp, synthetic construct
  source 1..75: mol_type = other DNA
tatgatgacggataacgaagtcgaagcggtgctcggtcacgaaatggggcacgtggcattaggccatgtgaagaa

SEQ ID NO: 41531 - DNA, 75 bp, synthetic construct
  source 1..75: mol_type = other DNA
gcggtgctcctcgatctgatgctaccgaatgtcgatggcctagagatttgccgccgtatccgtcaaatggcgggc

SEQ ID NO: 41532 - DNA, 75 bp, synthetic construct
  source 1..75: mol_type = other DNA
aaacctttgaattttgttcataaactggcggatggttcgactcgtcatgtgcagacctatgccgggccgattgaa

SEQ ID NO: 41533 - DNA, 75 bp, synthetic construct
  source 1..75: mol_type = other DNA
aactactatatttcagggtatcttaattccatccatggcaaaatcacattgatgaatatgtgtaaaagtattgtt

SEQ ID NO: 41534 - DNA, 75 bp, synthetic construct
  source 1..75: mol_type = other DNA
gtcagcaaaaaccacgcaatgatagtcattgaggatttgaaggtcagcaacatgtcaaagtcagcagcgggtacg

SEQ ID NO: 41535 - DNA, 75 bp, synthetic construct
  source 1..75: mol_type = other DNA
gcgatcttcttttcaatcgtactaacagtaaggaacttgttggtaaaacagctgtgtatgaagaagacaggccta

SEQ ID NO: 41536 - DNA, 75 bp, synthetic construct
  source 1..75: mol_type = other DNA
cattactcaatcagataattcgccagtacggtcgcacctgccgccgttaccatcttcagataatcacatccacgg

SEQ ID NO: 41537 - DNA, 75 bp, synthetic construct
  source 1..75: mol_type = other DNA
atggcccgcatcccggaagcagagttgcagcacctgaaagccgccgtcgccttagtcgccgtggttcaggcgcag

SEQ ID NO: 41538 - DNA, 75 bp, synthetic construct
  source 1..75: mol_type = other DNA
ctgaatatacaatggccgatagacatgccaattatgtcatctaaagacaacgcgttaattagtttttcagaattt

SEQ ID NO: 41539 - DNA, 75 bp, synthetic construct
  source 1..75: mol_type = other DNA
ctgcggtattgctggcttatatcggtctgaaggaccgcttcgcccatgccagacagttcgccgcttttgcgggtc

SEQ ID NO: 41540 - DNA, 75 bp, synthetic construct
  source 1..75: mol_type = other DNA
tgcgtctgcttcaaaagatgaggcgaccagacaggcgtcagcagcgaagggcagcgccacgacggcatccacgaa

SEQ ID NO: 41541 - DNA, 75 bp, synthetic construct
  source 1..75: mol_type = other DNA
atgaacgtaattaaaacagacattccagatgtattaattttcgagccgaaagtttttggtgatgaacgtggtttt

SEQ ID NO: 41542 - DNA, 75 bp, synthetic construct
  source 1..75: mol_type = other DNA
atcggatttaatgaaaataccattaaaaaatatctacaatgcactaacatccagacagtgacggtgcctgttcct

SEQ ID NO: 41543 - DNA, 75 bp, synthetic construct
  source 1..75: mol_type = other DNA
ccaccgtagtgcgttctacaccgcttgtctcaattgatttgattgtggaaaacgcgcagggcgaatatctgcttg

SEQ ID NO: 41544 - DNA, 75 bp, synthetic construct
  source 1..75: mol_type = other DNA
gcatcttcgcctgcctgagtttatgctaaaagctgtcggttttgagccgcaggatgccatgctgccctggccgaa

SEQ ID NO: 41545 - DNA, 75 bp, synthetic construct
  source 1..75: mol_type = other DNA
gacaccggagcgacgattttctgttgtaattgaaactgcaacattatctgaaatggaactggctgattattgtcg

SEQ ID NO: 41546 - DNA, 75 bp, synthetic construct
  source 1..75: mol_type = other DNA
cgggtattgaaagatgagccgctggagcaggcttttatgcgcctgacggaagaggagctgggccagcaattttcg

SEQ ID NO: 41547 - DNA, 75 bp, synthetic construct
  source 1..75: mol_type = other DNA
gctcccgggatgctggctgaaacggacgagtacatggccggaggtaaacgaccggcccgtgtttaccgggtggtg

SEQ ID NO: 41548 - DNA, 75 bp, synthetic construct
  source 1..75: mol_type = other DNA
gacatttcccgcgcctgactgagagagcgcaggagccggaaccacaaccagttcgtgaaaccagacctgtgcgca

SEQ ID NO: 41549 - DNA, 75 bp, synthetic construct
  source 1..75: mol_type = other DNA
gcttattagtactaaacatcgtttcgaaaaatatttgctatcatcaaatcaaatgcgtcttcgcgtagatcctga

SEQ ID NO: 41550 - DNA, 75 bp, synthetic construct
  source 1..75: mol_type = other DNA
tgatgcgggtctcggcctctcaagccgcgcagcgggagcaagccccgctgcgccatgcaaccgcctatgagcaga

SEQ ID NO: 41551 - DNA, 75 bp, synthetic construct
  source 1..75: mol_type = other DNA
aactacctgtctggcaagacatacccgtctttagatcgattagcacaaatagcctacgcaacagggcgtccaata

SEQ ID NO: 41552 - DNA, 75 bp, synthetic construct
  source 1..75: mol_type = other DNA
tgggaggggagagggttagagtttcttatatgccagatacaggccgttttttagcagaaagtgaagggcagggac

SEQ ID NO: 41553 - DNA, 75 bp, synthetic construct
  source 1..75: mol_type = other DNA
agcatcaccgctttgcatttcctgctcatctggtcacggcatcaggcagttatcctgtcgactttaccactctct

SEQ ID NO: 41554 - DNA, 75 bp, synthetic construct
  source 1..75: mol_type = other DNA
aggcgatgcagcacctgcgcctgcaggatgatgaatatcagtggctctctgccctgcctttctttaaggccgact

SEQ ID NO: 41555 - DNA, 75 bp, synthetic construct
  source 1..75: mol_type = other DNA
ttcgcagaaaaaagtgctggtggttgatactctggataaagttgcagcgactgatgatggctggattcaggcgta

SEQ ID NO: 41556 - DNA, 75 bp, synthetic construct
  source 1..75: mol_type = other DNA
cgcaacattggcaggtgtagtgattggttttgctatcccactaaagggaaagcagggcgaacattctccacttaa

SEQ ID NO: 41557 - DNA, 75 bp, synthetic construct
  source 1..75: mol_type = other DNA
tttgtgctggaaagttcagggcaaagcgagtatttcgtcgcgggtcatgtgctgatttctctggcagccatatgc

SEQ ID NO: 41558 - DNA, 75 bp, synthetic construct
  source 1..75: mol_type = other DNA
ttaaccggcgggaggctgaacgctacctgcctgatatggcaccccacttcccactgcggtggttttcggtggata

SEQ ID NO: 41559 - DNA, 75 bp, synthetic construct
  source 1..75: mol_type = other DNA
tttgcaggttactcacggcagcgcgttctgcagtcagcaagcaagttacgtcagagtgggcgtgtggctcaccgt

SEQ ID NO: 41560 - DNA, 75 bp, synthetic construct
  source 1..75: mol_type = other DNA
gaaatcactaccccgtttctggcccggggattttttcccgattttctatgcctgtcatctggctgtgctgggcgt

SEQ ID NO: 41561 - DNA, 75 bp, synthetic construct
  source 1..75: mol_type = other DNA
gatttaccgcctccgtcagcagaagccggtctgggcactgtgcaatgacacggcctgttctgcagccatgctgct

SEQ ID NO: 41562 - DNA, 75 bp, synthetic construct
  source 1..75: mol_type = other DNA
cgcagggtggcaaaacgggtgtggcgacgtgaacgggacctgacgggctggatgtcgctgtcacggaaaccgcaa

SEQ ID NO: 41563 - DNA, 75 bp, synthetic construct
  source 1..75: mol_type = other DNA
atagtcaacttccggctattgatcgcttattgcgcgatagctccttcctttctttgcgtgatacttatggtcaca

SEQ ID NO: 41564 - DNA, 75 bp, synthetic construct
  source 1..75: mol_type = other DNA
gtgcgcagaatatgatgaatggggcaacctgctgaatgaagagaacccgcatcagctgcagcagcttatccggct

SEQ ID NO: 41565 - DNA, 75 bp, synthetic construct
  source 1..75: mol_type = other DNA
gaaagtccaatatattcttttcccataaaagaaataccaaatctcataaatacattacaaaacatttatgaagaa

SEQ ID NO: 41566 - DNA, 75 bp, synthetic construct
  source 1..75: mol_type = other DNA
ccgtatgggcagaagttaagggtatcagcgggagggagataatctcaggcggagcagaaaccgctcaggctacgg

SEQ ID NO: 41567 - DNA, 75 bp, synthetic construct
  source 1..75: mol_type = other DNA
aggaaaagtgagcacgaacctgattttcaaggagtgtcgccagagtgccgtgatgaaacgggtattgatgttttg

SEQ ID NO: 41568 - DNA, 75 bp, synthetic construct
  source 1..75: mol_type = other DNA
acaaaaacttcttccagaagcgggctgcttttccccgattcaaaaagcggggacagaatgatgcattccgctacc

SEQ ID NO: 41569 - DNA, 75 bp, synthetic construct
  source 1..75: mol_type = other DNA
aaagtgctgaccggtgcatttaaaggggccattctgggtatagaaggtccaccaataccggatgcacgcgctacc

SEQ ID NO: 41570 - DNA, 75 bp, synthetic construct
  source 1..75: mol_type = other DNA
tcccacgcctgactgagagagcgcaggagccggaaccacaaccagttcgtgaaaccagacctgtgcgcaatttct

SEQ ID NO: 41571 - DNA, 75 bp, synthetic construct
  source 1..75: mol_type = other DNA
atttgcccgtctgttttcccgtattgcaaagcgcactgcaattaataaaaccaaaaaagccgatgtaaaagctat

SEQ ID NO: 41572 - DNA, 75 bp, synthetic construct
  source 1..75: mol_type = other DNA
ctaccagaagcgctggtgcaaaaccttcgtttgccacgaagcctggtcgccgttctgatcggcgcaagcctggcg

SEQ ID NO: 41573 - DNA, 75 bp, synthetic construct
  source 1..75: mol_type = other DNA
cctatcggtcaagccagaaggcaaaagcgataaaaagtccgccacagagatcgtgaatgaattacgcagtaaagc

SEQ ID NO: 41574 - DNA, 75 bp, synthetic construct
  source 1..75: mol_type = other DNA
tcagagtgggcgtgtggctcaccgttgtgaaggagatacacgcagacatttcccgcgcctgactgagagagcgca

SEQ ID NO: 41575 - DNA, 75 bp, synthetic construct
  source 1..75: mol_type = other DNA
atgcgtttctcttttttgatctttgtggttgtccggctttgcctgacggattgcaggcggaattctttaccctgc

SEQ ID NO: 41576 - DNA, 75 bp, synthetic construct
  source 1..75: mol_type = other DNA
catgcggatccgctggcgttcgaagaaaagcatggttcccaggttgatttaatttttcgttttcttgatcacgcc

SEQ ID NO: 41577 - DNA, 75 bp, synthetic construct
  source 1..75: mol_type = other DNA
ctcttgttgtatctgcaattcttctttctgggtgtcaatctagcggtgctgattatgctgccgatgtttatgata

SEQ ID NO: 41578 - DNA, 75 bp, synthetic construct
  source 1..75: mol_type = other DNA
tcccggccatccatctgttggaaggaatgtttcccgagctaacaacaaatcagcttaaagtctgcgttttttatg

SEQ ID NO: 41579 - DNA, 75 bp, synthetic construct
  source 1..75: mol_type = other DNA
agcaacgattttgaatcgacctgtgccactctggactacctgatcgttaagtcaggtaaaaaactgagcagctat

SEQ ID NO: 41580 - DNA, 75 bp, synthetic construct
  source 1..75: mol_type = other DNA
tctctggtggtgttttcttcgggataccgcccacggcgcggggatcgcgttgtttatgacggacaacaatggacg

SEQ ID NO: 41581 - DNA, 75 bp, synthetic construct
  source 1..75: mol_type = other DNA
aaatagcctgcaatgcctgcggccagactggcggggataactgccctgactgtggtgcggtgatgggcgacgcaa

SEQ ID NO: 41582 - DNA, 75 bp, synthetic construct
  source 1..75: mol_type = other DNA
atgggatattcagctgctaaagtgtccactcatcttgagcttgagaaaaaccgtggttactggcgggcaaaaggg

SEQ ID NO: 41583 - DNA, 75 bp, synthetic construct
  source 1..75: mol_type = other DNA
gtgaataaccgcttttacatgatgtgcttgcgtgaaactgtgggtaataacgcttcattccattgccataacggc

SEQ ID NO: 41584 - DNA, 75 bp, synthetic construct
  source 1..75: mol_type = other DNA
agagcatcagttaacggcaccacccgtacttctgaccaggactttgaaagcgtttatgcgcattgccagagtgaa

SEQ ID NO: 41585 - DNA, 75 bp, synthetic construct
  source 1..75: mol_type = other DNA
ctgagttttccgcattcctgactcgccatatcagcgacacggtaaaaagctgggacgcacgggatatgtcgcggc

SEQ ID NO: 41586 - DNA, 75 bp, synthetic construct
  source 1..75: mol_type = other DNA
acagaactgcacaatccagctgaaagcaaaacgtaacagtaccacggtggtggtgaacacgctggcctcagaaaa

SEQ ID NO: 41587 - DNA, 75 bp, synthetic construct
  source 1..75: mol_type = other DNA
gtaatgaccttaaagaattgcgggtcgctttaaactactcacaaaatccagtttcacccaaagcccgctccctca

SEQ ID NO: 41588 - DNA, 75 bp, synthetic construct
  source 1..75: mol_type = other DNA
gcgttgggcgtgggaaaagacttctctacatggatcactgatcgtatctctgaatatgacttcaccattgggtac

SEQ ID NO: 41589 - DNA, 75 bp, synthetic construct
  source 1..75: mol_type = other DNA
aggaaatcagaaatttttggccttacgtgggatcgcgtgaatatgggcggtcgttttttctggatagacaccacg

SEQ ID NO: 41590 - DNA, 75 bp, synthetic construct
  source 1..75: mol_type = other DNA
tgcctttctgctatatggaatgcacagaacccacagtgggagccgtggtcaagagtaggccatcagtcagaatgt

SEQ ID NO: 41591 - DNA, 75 bp, synthetic construct
  source 1..75: mol_type = other DNA
atgacaactcaaatttctgttgaaactctctccccgatcacccataaccagattcctgttattaccaccgaactt

SEQ ID NO: 41592 - DNA, 75 bp, synthetic construct
  source 1..75: mol_type = other DNA
gttgcagatgctcatggagagcttcttctcccttactctgctgatgttgatccactcggtgctttcagaagtagt

SEQ ID NO: 41593 - DNA, 75 bp, synthetic construct
  source 1..75: mol_type = other DNA
gaaagcattgttcccggcttggtacagagttggacgttgtcaggttcagcaaccgagagggagccgtttcccctg

SEQ ID NO: 41594 - DNA, 75 bp, synthetic construct
  source 1..75: mol_type = other DNA
atgccagtggcatttgagtttaaatgcgttccgtttgaaggtctgaaagaacgtccgtttaaattacgcctcagc

SEQ ID NO: 41595 - DNA, 75 bp, synthetic construct
  source 1..75: mol_type = other DNA
aggggcggggcttcgttcggcctgaaaaccagaatctgcaaaatttcggcgaaattatcccgattatttccggcg

SEQ ID NO: 41596 - DNA, 75 bp, synthetic construct
  source 1..75: mol_type = other DNA
gtcatcctgctggcaaaagacgtgatatatgacgagtacttttttgatctgcggcagtcatttttcgtgagcgtt

SEQ ID NO: 41597 - DNA, 75 bp, synthetic construct
  source 1..75: mol_type = other DNA
catcagcccggatgggcaaagccgacaaaaaatgcagttttactcaacgccgggtacaggaacgattcgtgcacg

SEQ ID NO: 41598 - DNA, 75 bp, synthetic construct
  source 1..75: mol_type = other DNA
tttgtttttctcgccggactcttaagattggctgtttattgttgcttatagcaggagcgaccatttttattgccg

SEQ ID NO: 41599 - DNA, 75 bp, synthetic construct
  source 1..75: mol_type = other DNA
ttatcgtttatcccaaggttcaggcttcacaaagagcacaggcagaatccaataacattgccaccatacaggcag

SEQ ID NO: 41600 - DNA, 75 bp, synthetic construct
  source 1..75: mol_type = other DNA
acatacgataatgtgccagcagcggaatgtgtgaagattgcgacagcggcagcaggtaatttctacattaccacg

SEQ ID NO: 41601 - DNA, 75 bp, synthetic construct
  source 1..75: mol_type = other DNA
aaagaaaaagtaaaaaaggtttctcacttttagaactattacttgttcttggtattatcgcagcgttagtggtag

SEQ ID NO: 41602 - DNA, 75 bp, synthetic construct
  source 1..75: mol_type = other DNA
cctgcgcgtcaacgccacctgcgtgtccaccacagacaaaaccaccggaaccgccagcatggataatgcagcccg

SEQ ID NO: 41603 - DNA, 75 bp, synthetic construct
  source 1..75: mol_type = other DNA
catcatcgctgacatgcagaagcgtcaacgtgatgtagcagaacttgacgccagatacacaaaggagcttgctga

SEQ ID NO: 41604 - DNA, 75 bp, synthetic construct
  source 1..75: mol_type = other DNA
aatcaccctggtatggcatgggaaaaacgtcgcactttatggacgttgcgaatcaactaccgatttaacgcccat

SEQ ID NO: 41605 - DNA, 75 bp, synthetic construct
  source 1..75: mol_type = other DNA
tggataatgcaaccggcccccaactggcagacaccgttacacgggattatttcaccctcagagagcggctgatga

SEQ ID NO: 41606 - DNA, 75 bp, synthetic construct
  source 1..75: mol_type = other DNA
aaagccataaaaggcattctggcgctcggggatattatcgggcggctgttcttcagactgattgaggggacatca

SEQ ID NO: 41607 - DNA, 75 bp, synthetic construct
  source 1..75: mol_type = other DNA
gtcacagcgcaccggcgcgacagtccagggaattcagtctattggctatgcggtttcgcaggttggcggcagcgt

SEQ ID NO: 41608 - DNA, 75 bp, synthetic construct
  source 1..75: mol_type = other DNA
agaaggaaaacgccgccggagaagttgaacatattccgatgctgaaaacctttaccgtgtttaacgttcagcaaa

SEQ ID NO: 41609 - DNA, 75 bp, synthetic construct
  source 1..75: mol_type = other DNA
tatgccactggcgtaccctacagcggcatgaatatcatgttgctgtggtgcagtgcgtcaaaacagggtttcagt

SEQ ID NO: 41610 - DNA, 75 bp, synthetic construct
  source 1..75: mol_type = other DNA
gccctgatttttcattcagttacatggacaatcagagagcagatgaaataaaggctttaaaaatattattattca

SEQ ID NO: 41611 - DNA, 75 bp, synthetic construct
  source 1..75: mol_type = other DNA
gctaattgaatggcaattgttgacatgggttcgtccgggtgaagccgttcgcgcaaggtggtctgatattgatac

SEQ ID NO: 41612 - DNA, 75 bp, synthetic construct
  source 1..75: mol_type = other DNA
ttcctgcacgaaccactgaccgcgatattgtccgggcgattatggaagggggcaccgcgaaaatttatcactgca

SEQ ID NO: 41613 - DNA, 75 bp, synthetic construct
  source 1..75: mol_type = other DNA
ccgtcacggccattgaacgggcagagcaggaaaaaaatgcgctggcgcaggccgacggaaacgacgctgacgact

SEQ ID NO: 41614 - DNA, 75 bp, synthetic construct
  source 1..75: mol_type = other DNA
ttaattaccagtcagagactttccggagagaccacggatatgtttcttatgatggcctgcctgtcgctgtttgaa

SEQ ID NO: 41615 - DNA, 75 bp, synthetic construct
  source 1..75: mol_type = other DNA
aagcagcgtatgtaatgcgctgtttaaaggggaggtttgtgcagttagcgacgttgaggcatgtactcgtgaagt

SEQ ID NO: 41616 - DNA, 75 bp, synthetic construct
  source 1..75: mol_type = other DNA
atatatactttttacggattatctactgaaacaacaaagtcatttgtttcccatgaaacggcgaagaagcttaaa

SEQ ID NO: 41617 - DNA, 75 bp, synthetic construct
  source 1..75: mol_type = other DNA
gctttgccactccagcagagcggaaaaaacctgctcagaatagtcactgaactggctgcgccatttggcatcact

SEQ ID NO: 41618 - DNA, 75 bp, synthetic construct
  source 1..75: mol_type = other DNA
gaaagaaatggccggagacccggaattacagaaatggcgggagaaatatctggatatttacccgcaggcccctgt

SEQ ID NO: 41619 - DNA, 75 bp, synthetic construct
  source 1..75: mol_type = other DNA
gctgctattgccattaaaaataacactaccgtttcacaggtagatattcagacggtacaggaacgcttacagcaa

SEQ ID NO: 41620 - DNA, 75 bp, synthetic construct
  source 1..75: mol_type = other DNA
cttcaagtacctggttgatccacagatgctgggggtttctaacagcctcgtttatcagctaaccgattacatcgg

SEQ ID NO: 41621 - DNA, 75 bp, synthetic construct
  source 1..75: mol_type = other DNA
taacaagattctggcatgttaccaacgcgaagctaacaaggaaatagctcgtctattaaatattccgcaggagtt

SEQ ID NO: 41622 - DNA, 75 bp, synthetic construct
  source 1..75: mol_type = other DNA
acagaagaagaagccgcagttattgccagtatgggtgatatggttttccataagccacgcataaagaaagattat

SEQ ID NO: 41623 - DNA, 75 bp, synthetic construct
  source 1..75: mol_type = other DNA
ttgacagcgacagctatcaattgctcaaggcatatgatgtcaatatctccggtctggtaagcacaaccatgcaga

SEQ ID NO: 41624 - DNA, 75 bp, synthetic construct
  source 1..75: mol_type = other DNA
agcacattaagctgctggcactggataacgacatcagacaactgcacaacatggagctgctgtctgacaagctgg

SEQ ID NO: 41625 - DNA, 75 bp, synthetic construct
  source 1..75: mol_type = other DNA
atcactactatggggactcgtcaaggacatacggctattatatttcaacaacctgatggttcgactaatcgttat

SEQ ID NO: 41626 - DNA, 75 bp, synthetic construct
  source 1..75: mol_type = other DNA
atgaacccgaccgacaccatgaagccgcggtcgcattttgtattcacgccggaacggatgagttaaccagtcctg

SEQ ID NO: 41627 - DNA, 75 bp, synthetic construct
  source 1..75: mol_type = other DNA
gggccatcgtaaagccgtaaatcagaaacgtgcagcaagtcatatccgcaaaatccgtgaaatgctggtcgcagg

SEQ ID NO: 41628 - DNA, 75 bp, synthetic construct
  source 1..75: mol_type = other DNA
ttgccagcggccccgctcgacctgaatttatgaacggcgatatttaccgcgataaatacggcggcacggtaacga

SEQ ID NO: 41629 - DNA, 75 bp, synthetic construct
  source 1..75: mol_type = other DNA
gttgttgaccgtcagatgagttacatgcgccagcagctgtccgcccgtatgctcagccgttaccagaacaactat

SEQ ID NO: 41630 - DNA, 75 bp, synthetic construct
  source 1..75: mol_type = other DNA
gttcaggtctggggaaatggagccaacttcgacaacacgattttgcgccgttcatacgaacggcaggggatcccc

SEQ ID NO: 41631 - DNA, 75 bp, synthetic construct
  source 1..75: mol_type = other DNA
cgagagatgcggtggaaaggcagatgagccatcaagagcgtagctctgtgcgtgcggcgtatattcataaggcgg

SEQ ID NO: 41632 - DNA, 75 bp, synthetic construct
  source 1..75: mol_type = other DNA
gtaatgaccttaaagaattgcgggtagctttaaactactcacaaaatcccatctctcccaaagcccgctccctca

SEQ ID NO: 41633 - DNA, 75 bp, synthetic construct
  source 1..75: mol_type = other DNA
tgggtactattgatgaaccaggtcacgcagataacaccgccactctcaaactgaaaaagacagcaccgttctctg

SEQ ID NO: 41634 - DNA, 75 bp, synthetic construct
  source 1..75: mol_type = other DNA
ttggtgatcacgattcgcacaagcctatgagtgaaaatacggtaaatagtgcgttacgggtcatggggtatgata

SEQ ID NO: 41635 - DNA, 75 bp, synthetic construct
  source 1..75: mol_type = other DNA
ttgttatcgatcctaaccaggacgaccaaccagcattgcggcgagctgtttatttacatcaacggattggtggca

SEQ ID NO: 41636 - DNA, 75 bp, synthetic construct
  source 1..75: mol_type = other DNA
atgggatatgacctgcgtaaagccgagctaatccgcctctctcagcgctggttagctaaacatctgggggctaat

SEQ ID NO: 41637 - DNA, 75 bp, synthetic construct
  source 1..75: mol_type = other DNA
gcataaccgtcctttcgaagccatcattcaggaagtgatcagcggcgggcacgatttggtgctaaaaatggcgca

SEQ ID NO: 41638 - DNA, 75 bp, synthetic construct
  source 1..75: mol_type = other DNA
atcgcccgtatcgtgctgggtggcatgacggcgaagcagtgggcgcaggcaaatggcattactggcgaaccacgg

SEQ ID NO: 41639 - DNA, 75 bp, synthetic construct
  source 1..75: mol_type = other DNA
atggctctgacagatactaaagtacgttctgcgaaaccgcaggaaaaggagtacaccctagtcgatggggatggc

SEQ ID NO: 41640 - DNA, 75 bp, synthetic construct
  source 1..75: mol_type = other DNA
cgctggaaatgctttatccgatttatgatacgccaacaaatatgttgttcactcagggagcaatacatcgtaccg

SEQ ID NO: 41641 - DNA, 75 bp, synthetic construct
  source 1..75: mol_type = other DNA
ggatgggatttatcagatgctaaggaagtgaatcaaaatattatcagtgagtttatggctgaaccgccacaagga

SEQ ID NO: 41642 - DNA, 75 bp, synthetic construct
  source 1..75: mol_type = other DNA
catgaaaatagtcagcaatcaggagggatatccggttttgacagagcaaccacctttatcaaaagaaaaccttat

SEQ ID NO: 41643 - DNA, 75 bp, synthetic construct
  source 1..75: mol_type = other DNA
actaattaaccaggctaacgaatacatgaacagtaaacagtggcccggtaaagcggctattggtcgtctgaaagg

SEQ ID NO: 41644 - DNA, 75 bp, synthetic construct
  source 1..75: mol_type = other DNA
ggtttaacattcccagccacaacacggttaaaaactggataaaaggctaccgcaaatctggtaatgaggccttta

SEQ ID NO: 41645 - DNA, 75 bp, synthetic construct
  source 1..75: mol_type = other DNA
cctctaccgatcactggatcagtgcgggctctggtattagcgcggtgtcgtataacctgattttcagtaaaaaag

SEQ ID NO: 41646 - DNA, 75 bp, synthetic construct
  source 1..75: mol_type = other DNA
cgccgcactttctgaccgaatttcccggctggagcatcaactcgccgccgagaaaaagactgactattccacgtt

SEQ ID NO: 41647 - DNA, 75 bp, synthetic construct
  source 1..75: mol_type = other DNA
aatcacgattgaagcaaaccagaccgctgattttgaagacaatgacttcagcggcaaacgctccctgatggagtc

SEQ ID NO: 41648 - DNA, 75 bp, synthetic construct
  source 1..75: mol_type = other DNA
aatgcccgtctgtccgcgccgggaaaaaaccgcgcgccggtggcgctgaaaggggccgcgctcacgcgccgcccc

SEQ ID NO: 41649 - DNA, 75 bp, synthetic construct
  source 1..75: mol_type = other DNA
ccttacaaaatttgtcgaacgacgagctgctgcccgttgcgcgtgcgtttagtcagttcctgaacctggccaaca

SEQ ID NO: 41650 - DNA, 75 bp, synthetic construct
  source 1..75: mol_type = other DNA
cctgaatggacttaatcacattgcggaattaagggcgaaagtatttggcctgaatattgagtcagagcttgagcg

SEQ ID NO: 41651 - DNA, 75 bp, synthetic construct
  source 1..75: mol_type = other DNA
caaccagaaactggtgtatgtcttccaaatgtagctctttacgcggcaggctacaggaaatcaaaacaactgaca

SEQ ID NO: 41652 - DNA, 75 bp, synthetic construct
  source 1..75: mol_type = other DNA
ttggggtccggtattttgatgcccgtgacggacgcacacgtgaagttaaagttgacgtggagtcaacagataagc

SEQ ID NO: 41653 - DNA, 75 bp, synthetic construct
  source 1..75: mol_type = other DNA
ttgccagaacaagaaagaagagcgaaaaggcaatacgaattgagatgcagattgctgaaggatttattgacggat

SEQ ID NO: 41654 - DNA, 75 bp, synthetic construct
  source 1..75: mol_type = other DNA
aagggattcgaatagaaccccttgaaaattaccttgcaacaaaaagcattaattcttttgattcaaaacaagaga

SEQ ID NO: 41655 - DNA, 75 bp, synthetic construct
  source 1..75: mol_type = other DNA
atgtcaaagctgatgattgtgctggttgtgttgttatcactggcggtggccggtctgtttctggtgaaacacaaa

SEQ ID NO: 41656 - DNA, 75 bp, synthetic construct
  source 1..75: mol_type = other DNA
cgtctaaatctgcaacctacgattttaaagcatcctatgttcgtgcggatgcaagcaaagcagctactgccggtt

SEQ ID NO: 41657 - DNA, 75 bp, synthetic construct
  source 1..75: mol_type = other DNA
gcgtcagacctcaccattataacggtgggctgacgccggaagagtcagagaacagataccatttttactgtaaaa

SEQ ID NO: 41658 - DNA, 75 bp, synthetic construct
  source 1..75: mol_type = other DNA
gataccggtgcggcaggtccggcaggcccacagggaccgaaaggagaaacaggtgcggctggcccggtgggggca

SEQ ID NO: 41659 - DNA, 75 bp, synthetic construct
  source 1..75: mol_type = other DNA
ggccatcaacgatgacgacagtgccgatatcctgctggaaatcccggtatgggagcgcgtgattgtgcgccgtaa

SEQ ID NO: 41660 - DNA, 75 bp, synthetic construct
  source 1..75: mol_type = other DNA
gaggcactgcgtcgttttgaactgatggtggaagaggtggcgcgtcacgcagaggaggcgaagaagaatgccgga

SEQ ID NO: 41661 - DNA, 75 bp, synthetic construct
  source 1..75: mol_type = other DNA
ttacaacgaacatcatccgcatagtgcactgggatatcgctcaccacgggaatatatacgcaggaagttatcgca

SEQ ID NO: 41662 - DNA, 75 bp, synthetic construct
  source 1..75: mol_type = other DNA
ttattaccgtctccgaagtggaatcgacaagataaccgcgcaggtcaactacctgcaggagtacatcaggacgca

SEQ ID NO: 41663 - DNA, 75 bp, synthetic construct
  source 1..75: mol_type = other DNA
cagtggcaggatgttctggaggagtgccggcagacagaggccggaccagaagaacggctgcgtattgccctgctg

SEQ ID NO: 41664 - DNA, 75 bp, synthetic construct
  source 1..75: mol_type = other DNA
ttggcccggtagtgaaaggtgatgtgatcacaggcaacgtcgagggcttaacgcctatcgcggtgaagattgtct

SEQ ID NO: 41665 - DNA, 75 bp, synthetic construct
  source 1..75: mol_type = other DNA
agaaaaatgtggtgttcaacgataaacggtttggctgcgtgtacagcctgaaggccagtctttctggtgtgccgg

SEQ ID NO: 41666 - DNA, 75 bp, synthetic construct
  source 1..75: mol_type = other DNA
cgtcgtccggccagcgtggcaatcgtcgcaatggcaaacaagctggcgcgaacggtgtgggcaatagccgctcac

SEQ ID NO: 41667 - DNA, 75 bp, synthetic construct
  source 1..75: mol_type = other DNA
ggcccggcaggcccacagggaccgaaaggagaaacaggtgcggctggcccggtgggggcaaccggacctcaggga

SEQ ID NO: 41668 - DNA, 75 bp, synthetic construct
  source 1..75: mol_type = other DNA
ttcgctgtgcccgagccagatagggtatggtgcggagatattacgtatatctgggcaggaaatcgctggtgctat

SEQ ID NO: 41669 - DNA, 75 bp, synthetic construct
  source 1..75: mol_type = other DNA
atatctgaacctgagcagttgtcagcccggaaaacatcagtacaaaaatgctcgtcaggaacatacctgtctgcc

SEQ ID NO: 41670 - DNA, 75 bp, synthetic construct
  source 1..75: mol_type = other DNA
gacatcgtcctgataaacgcagtgcccgtgcgcagcgcgatgactggctgaagaaagagatactgcgcgtatacg

SEQ ID NO: 41671 - DNA, 75 bp, synthetic construct
  source 1..75: mol_type = other DNA
catgtgctgatgcgaaacctgccgatggtacagaccattctggtgggtattaccattggtatattcccgctcctg

SEQ ID NO: 41672 - DNA, 75 bp, synthetic construct
  source 1..75: mol_type = other DNA
ttcgggattgacctccgccagcgcgttttccggctcagcaacggcaggtttatggaagagccgtgcatctggttc

SEQ ID NO: 41673 - DNA, 75 bp, synthetic construct
  source 1..75: mol_type = other DNA
tgtatacgctggatgaactttcctgcccggcacggggaaaagcccgcgactggtaccgtcagcatcatgctgaca

SEQ ID NO: 41674 - DNA, 75 bp, synthetic construct
  source 1..75: mol_type = other DNA
acctgtctcatattcttattgattccttagatgatgcaaaagttaaccttacaccggtcatcgattctggagatt

SEQ ID NO: 41675 - DNA, 75 bp, synthetic construct
  source 1..75: mol_type = other DNA
cgctgccggaacgggagcagccgcgcgttatcggcgtggcccccacccaccgggcggtgagcgagatgcgcgatg

SEQ ID NO: 41676 - DNA, 75 bp, synthetic construct
  source 1..75: mol_type = other DNA
ggttgcttaacaatgttctaaaaagcgcatcaggccgggcgacagccttggcgtttatggtgagctggcgcgaca

SEQ ID NO: 41677 - DNA, 75 bp, synthetic construct
  source 1..75: mol_type = other DNA
ctccaactggcaaagcctatgatgccattaaagagcttggcgttaagacgatggataaaaaaggcaatacacggc

SEQ ID NO: 41678 - DNA, 75 bp, synthetic construct
  source 1..75: mol_type = other DNA
aacagccatggctggttcccggatacagatggtgcgctcatcaccggactgacctttcttgaccccaaagatgcc

SEQ ID NO: 41679 - DNA, 75 bp, synthetic construct
  source 1..75: mol_type = other DNA
aaagccaggtaaagacattcgattatgtctacgggctgttacaggccaaatggaaccgcatgaggaaaacaaggt

SEQ ID NO: 41680 - DNA, 75 bp, synthetic construct
  source 1..75: mol_type = other DNA
agctaaaaacggagaggtcgttaccacatccagaaaagttgctacgtacttcggaaagcgacacggtgatgtgct

SEQ ID NO: 41681 - DNA, 75 bp, synthetic construct
  source 1..75: mol_type = other DNA
attctgaacagtgccatgacattttatgcgaaacagaatggtgcaccggtggtgctctcggaaatttcacagata

SEQ ID NO: 41682 - DNA, 75 bp, synthetic construct
  source 1..75: mol_type = other DNA
agggctacccatgatgctcgccatgatattgacgctaaagccagtaaggactttaaagaggccagcgattacttt

SEQ ID NO: 41683 - DNA, 75 bp, synthetic construct
  source 1..75: mol_type = other DNA
atatcgatgccagggctacacaagactttaaagaggccagcgattactttaccagtcgcaaggtcagtgaatccg

SEQ ID NO: 41684 - DNA, 75 bp, synthetic construct
  source 1..75: mol_type = other DNA
tcctcgtcctcagcctctgaggccgctcaaaaagccagtgagtcattacaaagtgcaacagatgccgagttgtca

SEQ ID NO: 41685 - DNA, 75 bp, synthetic construct
  source 1..75: mol_type = other DNA
gtgatgatcccgaccgggatgatggtcacgccgttgctgctgatctggttcggcggaagctggatcacccggatg

SEQ ID NO: 41686 - DNA, 75 bp, synthetic construct
  source 1..75: mol_type = other DNA
tccggacaagcataaaaccaccgccgcctccggcgtggatgatgcttccagccccagacttactgacaccgctca

SEQ ID NO: 41687 - DNA, 75 bp, synthetic construct
  source 1..75: mol_type = other DNA
atgaatgctattttgagtgttcagggtgcttctgcgcccgtcgaaaagaaatcgtttttttctaaattcacgcgt

SEQ ID NO: 41688 - DNA, 75 bp, synthetic construct
  source 1..75: mol_type = other DNA
gcgagacgctgcataccagcgcgtatgtactgcgcaaactgaaatccgtcattaccagtaagtacgggcgtcaca

SEQ ID NO: 41689 - DNA, 75 bp, synthetic construct
  source 1..75: mol_type = other DNA
acgttttggctgcgtgtacagcctgaaggccagcctttcgggtgtgccagatacattccggtatcatctgtctca

SEQ ID NO: 41690 - DNA, 75 bp, synthetic construct
  source 1..75: mol_type = other DNA
gcgtcagttggctactcaatatccagaccagattgaatctgttcgtaaaggcatgggattcattgatgaagacca

SEQ ID NO: 41691 - DNA, 75 bp, synthetic construct
  source 1..75: mol_type = other DNA
tgaagtccgtaaagcatataatcgttcgacttacctttatcaacgaattgatttaatgaattggtgggctaactt

SEQ ID NO: 41692 - DNA, 75 bp, synthetic construct
  source 1..75: mol_type = other DNA
tgaagttcggagagcttacaatagatcaacatatctagagcaaagaattaatctcatggaatggtggggtagcga

SEQ ID NO: 41693 - DNA, 75 bp, synthetic construct
  source 1..75: mol_type = other DNA
cggtgcgctgctggtgggcctgggcttcaaaccgttatacgcggcggggctgtgtctgattgccaatactgcgcc

SEQ ID NO: 41694 - DNA, 75 bp, synthetic construct
  source 1..75: mol_type = other DNA
ccaacggcgatataaccctggttgctggccaaaacctgacgcctgtcgattctgcggctaatttagctaatttga

SEQ ID NO: 41695 - DNA, 75 bp, synthetic construct
  source 1..75: mol_type = other DNA
gccgggtaatcgctactttacccgacgtattgataccgcagcagagttgtaccacgccggaaaagtgaaatggct

SEQ ID NO: 41696 - DNA, 75 bp, synthetic construct
  source 1..75: mol_type = other DNA
gatgtcaacgcagttccggcgcgtaacgtgggtttattgctgggggcgaggccgggtaatcgctactttacccga

SEQ ID NO: 41697 - DNA, 75 bp, synthetic construct
  source 1..75: mol_type = other DNA
gaaagtaataacatagcaacgatacaggctggtgttaaagcgctctatacatcagcatccagttttactggatta

SEQ ID NO: 41698 - DNA, 75 bp, synthetic construct
  source 1..75: mol_type = other DNA
ttattaccgtctccgaagtggaatcgacaagataaccgcgcaggttaactacttgcaggagtacatcaggacgca

SEQ ID NO: 41699 - DNA, 75 bp, synthetic construct
  source 1..75: mol_type = other DNA
ctgaaaaacatcaacctggatatcgccaaaaaccaggtaacggcgtttatcgggccgtccggctgcggtaaatcg

SEQ ID NO: 41700 - DNA, 75 bp, synthetic construct
  source 1..75: mol_type = other DNA
gaaactggcggcggcaggcgtacaggatgcaaatttttaccctgagggaatgcacgttcagaaggtggagaactg

SEQ ID NO: 41701 - DNA, 75 bp, synthetic construct
  source 1..75: mol_type = other DNA
cacgctgtcagaactggtgaccgcaggtgaccagtttaaccagcagcacattaccctggcggggtacgaaaaaga

SEQ ID NO: 41702 - DNA, 75 bp, synthetic construct
  source 1..75: mol_type = other DNA
gcagacccttttatctcacggcgtggcgacggcttatgtggaaggcggcacgttgcggatccagcgttctgtaac

SEQ ID NO: 41703 - DNA, 75 bp, synthetic construct
  source 1..75: mol_type = other DNA
ctgccaacagtggcaggtgccgctggtggtcgaacgtgtgcagcttgcgcaagaggggctaggtattgaggccca

SEQ ID NO: 41704 - DNA, 75 bp, synthetic construct
  source 1..75: mol_type = other DNA
tcacatacaaagaaaacaaaatcagataattacagcaaacatcataaaaacacgttaattgacaataaagccctc

SEQ ID NO: 41705 - DNA, 75 bp, synthetic construct
  source 1..75: mol_type = other DNA
ttattgtcctggcgggtggctgtggtgcgctgtggctggcaacagaccattaccgcgataacgccatcacctaca

SEQ ID NO: 41706 - DNA, 75 bp, synthetic construct
  source 1..75: mol_type = other DNA
catatcaacagcctgccgcgcgcgcagtggaacagcaatattcaggagctggttaatcgactgcaaagcgatcag

SEQ ID NO: 41707 - DNA, 75 bp, synthetic construct
  source 1..75: mol_type = other DNA
aaatcaaagacaagaaaaaatcaatggaagaaaccattgctaggtggctggcggcacaaaaaagccgccgggcgt

SEQ ID NO: 41708 - DNA, 75 bp, synthetic construct
  source 1..75: mol_type = other DNA
tgaaggacggcaccgggaagccggtgccgggatgcaccatagagctgaaagcgcgacgcaccacagagacagtga

SEQ ID NO: 41709 - DNA, 75 bp, synthetic construct
  source 1..75: mol_type = other DNA
ctgcctgtcatgggctgttaatcattaccgtgataacgccattacctataaagaacagcgcgataaagccaggta

SEQ ID NO: 41710 - DNA, 75 bp, synthetic construct
  source 1..75: mol_type = other DNA
gaagccgctgaacgggattatttcatcctcagagaacggctgatggcaatgcagaagcaactggaaggagcacag

SEQ ID NO: 41711 - DNA, 75 bp, synthetic construct
  source 1..75: mol_type = other DNA
atatatgaaggccagagataatatggcctatgcgcaatatctggccggtattgccttcaataatgcgtcgttagg

SEQ ID NO: 41712 - DNA, 75 bp, synthetic construct
  source 1..75: mol_type = other DNA
tactggtgaacacggtggcctctgaaaatccggatgaagccgggcgttacagtatggacgttgagtatggtcagt

SEQ ID NO: 41713 - DNA, 75 bp, synthetic construct
  source 1..75: mol_type = other DNA
aaacattaaatgtcaaaaaaatactgattgtgacggatgcatttctcgccaaaagtggtatggcagataaagtgg

SEQ ID NO: 41714 - DNA, 75 bp, synthetic construct
  source 1..75: mol_type = other DNA
atgatttcacgctggaaatggatgctgaagcagacaattaaaaaactatggttcagggcaacgttattcgcaatt

SEQ ID NO: 41715 - DNA, 75 bp, synthetic construct
  source 1..75: mol_type = other DNA
ccgtgaacggctgaagtatgcgctggaggcggggttactggtgaccgcactggacggcctgttctggtctggcag

SEQ ID NO: 41716 - DNA, 75 bp, synthetic construct
  source 1..75: mol_type = other DNA
cctccggcgtggataatgcaaccggtccccgactggcagaagccgctgaacgggattatttcatcctcagagaac

SEQ ID NO: 41717 - DNA, 75 bp, synthetic construct
  source 1..75: mol_type = other DNA
ggctgtggctggcgtgaagaccgtatacgaatatgcggggataactgacaccagcccggcggatttatccgacca

SEQ ID NO: 41718 - DNA, 75 bp, synthetic construct
  source 1..75: mol_type = other DNA
gccggcaatataaagatagagataggagatgctgatgtttcatcagtaacatatggtcccaacacaataaaaacg

SEQ ID NO: 41719 - DNA, 75 bp, synthetic construct
  source 1..75: mol_type = other DNA
ctgtgatcccggctgctgttctgatgatgttcttccctcaggcggccctggctgctggcggtcaggacctcatgc

SEQ ID NO: 41720 - DNA, 75 bp, synthetic construct
  source 1..75: mol_type = other DNA
gcttatggagaaagggggagagtcattttattcattgtcacactggttgtcattgccttaatcctcatcacattg

SEQ ID NO: 41721 - DNA, 75 bp, synthetic construct
  source 1..75: mol_type = other DNA
taaagcaactttcggtaaggactccagtattgttacatgggttatcctggctgaagtgctggtcggtgcagtcat

SEQ ID NO: 41722 - DNA, 75 bp, synthetic construct
  source 1..75: mol_type = other DNA
gacggtatgcaactgaaatggcagatggataacgatgaacaggtatatgttggcgattccgcattaaacctgaaa

SEQ ID NO: 41723 - DNA, 75 bp, synthetic construct
  source 1..75: mol_type = other DNA
tgatgatcgttaaatttcatccccggggacgcggtggtggtgccggtccggtggattacctgctgggaaaagacc

SEQ ID NO: 41724 - DNA, 75 bp, synthetic construct
  source 1..75: mol_type = other DNA
tcgtctatgtggcgttcatcattgatgtgtttgccggatacattgtggggtggcgggtctcatcgtccatggaga

SEQ ID NO: 41725 - DNA, 75 bp, synthetic construct
  source 1..75: mol_type = other DNA
gccaggcattgcgtaaaccgattcgaacggagcagggcgctaacggggcgatacgggagctggaaaaattccgcc

SEQ ID NO: 41726 - DNA, 75 bp, synthetic construct
  source 1..75: mol_type = other DNA
cacgaagcgccgccgtggtgggcactccactaaacccaagtgtgaaaatccgtcctggttccgtcccgacaacta

SEQ ID NO: 41727 - DNA, 75 bp, synthetic construct
  source 1..75: mol_type = other DNA
gcgatacgggcgtgaacatggggccaactgtggcgtccagaatgcttcagcgctggctgaacgttttcaacctgc

SEQ ID NO: 41728 - DNA, 75 bp, synthetic construct
  source 1..75: mol_type = other DNA
gagaaaagccggcgcatccagcttctggaagaaatgctgaaactggttcgtcaacagcgcttcggtaaaaaatgt

SEQ ID NO: 41729 - DNA, 75 bp, synthetic construct
  source 1..75: mol_type = other DNA
agtacaaacggttcctgcaaaccgctgaacggtggaaagagctggtggtcgcaaactctgttttccatgatacca

SEQ ID NO: 41730 - DNA, 75 bp, synthetic construct
  source 1..75: mol_type = other DNA
tctttgagctctgcagtactattatggatagtatccccatggcgaccaaaaggcaaacctagacatgtgataaat

SEQ ID NO: 41731 - DNA, 75 bp, synthetic construct
  source 1..75: mol_type = other DNA
cggggtttactggccttagcctcgtccggggagctgaaaacccgccaggacgtcactgaggcgctggaaagcgca

SEQ ID NO: 41732 - DNA, 75 bp, synthetic construct
  source 1..75: mol_type = other DNA
gtggtatcgcttctgcaatggcaatgaccggtctgccgcaggcttacacgccgggtgccagcatggcgtctattg

SEQ ID NO: 41733 - DNA, 75 bp, synthetic construct
  source 1..75: mol_type = other DNA
ataaatggtgattttttcgttattcgtcacggtagttatacaagacagcatggctacacatcgtatcaacccatt

SEQ ID NO: 41734 - DNA, 75 bp, synthetic construct
  source 1..75: mol_type = other DNA
gcatgcacgtctgcagactaatccagctatgtcgagcgtggtcgataccatgagcggtattggcgcatcgtttgg

SEQ ID NO: 41735 - DNA, 75 bp, synthetic construct
  source 1..75: mol_type = other DNA
gtggtgctgaacccggaactgaaaatgcctgcgatgacccagtacattgacggtactggcccgctgtggaaaggc

SEQ ID NO: 41736 - DNA, 75 bp, synthetic construct
  source 1..75: mol_type = other DNA
gcggtatgctggtggattctcaggcgattaagctgatgaagatcggtgctgcaacccgccagaaagccgctgcgt

SEQ ID NO: 41737 - DNA, 75 bp, synthetic construct
  source 1..75: mol_type = other DNA
agcaatggcttccattagtctgattcagctgaaattacaggccggacggaaactgactcaggcagaaacaacccg

SEQ ID NO: 41738 - DNA, 75 bp, synthetic construct
  source 1..75: mol_type = other DNA
aggttgatagcaaaaccatgcaatcatttaaagatatcacacaaattatttatcaaatcgctgtagctgctaacg

SEQ ID NO: 41739 - DNA, 75 bp, synthetic construct
  source 1..75: mol_type = other DNA
tcgcgtctggtgcacatctggagcgtaccggtggagtatctgacacgtaagtatcagctggtgcgcgctcgtcac

SEQ ID NO: 41740 - DNA, 75 bp, synthetic construct
  source 1..75: mol_type = other DNA
catctccagttctttgctggcctttggtgggcaaaaagactccccgagcaataccgggaaaaaatggggcggcgt

SEQ ID NO: 41741 - DNA, 75 bp, synthetic construct
  source 1..75: mol_type = other DNA
catcatgcgggaatctggcatttaactgttgcgacttattatttgttgaacctgttgccattactgaatcctctc

SEQ ID NO: 41742 - DNA, 75 bp, synthetic construct
  source 1..75: mol_type = other DNA
gataaagacaagccagtcaccatccgcattactgactacaagcgcaaccttgaccagaacgcaaaatttcacgcg

SEQ ID NO: 41743 - DNA, 75 bp, synthetic construct
  source 1..75: mol_type = other DNA
cagcagggcggctttgacgggcggacgcaacgttatcattatgacctgaccggaaaactcacacagagtgaggat

SEQ ID NO: 41744 - DNA, 75 bp, synthetic construct
  source 1..75: mol_type = other DNA
gcatggaaggtcacgccacatggcttaaggccagatctttatcctcaccctgaagatggaattcctgattcgtta

SEQ ID NO: 41745 - DNA, 75 bp, synthetic construct
  source 1..75: mol_type = other DNA
ccggcgattaccgcgctccggggtcactggccggaatgattaaacaggcgtggtgcagtgccctgggagtggatg

SEQ ID NO: 41746 - DNA, 75 bp, synthetic construct
  source 1..75: mol_type = other DNA
ggaatgaatccaccgggatgtgggtcgttacctcagaactgacccgtaaaggaggtcagcgcccccggcaaatca

SEQ ID NO: 41747 - DNA, 75 bp, synthetic construct
  source 1..75: mol_type = other DNA
ggttgagatcaccggcccccgcctggatatggataatgatttcaagacctgggtggggatcattcattcctttgc

SEQ ID NO: 41748 - DNA, 75 bp, synthetic construct
  source 1..75: mol_type = other DNA
ttagcggaagatgccgaatatccacggcgactctataatcttgcgactgtgggcgtattactttgcttgttctat

SEQ ID NO: 41749 - DNA, 75 bp, synthetic construct
  source 1..75: mol_type = other DNA
tcaatggtagctcaggcggggcagcctccgggctggccggtattcttcgaggccggtatttccacccccgtctgg

SEQ ID NO: 41750 - DNA, 75 bp, synthetic construct
  source 1..75: mol_type = other DNA
attcctgttattttctggctgttgattttgatgaagctgaatggcagaaggatgcatccgcattcatgcgatcct

SEQ ID NO: 41751 - DNA, 75 bp, synthetic construct
  source 1..75: mol_type = other DNA
gtcagtggcatccagaatgcttcagcgctggcttaatgtatttaaccagaaaggagagttgtatccggacattga

SEQ ID NO: 41752 - DNA, 75 bp, synthetic construct
  source 1..75: mol_type = other DNA
taacgcctcgctgaacacacagcggcgcgtggcgctggcgcaggcgcagcttggagataccgcagcggcgcagca

SEQ ID NO: 41753 - DNA, 75 bp, synthetic construct
  source 1..75: mol_type = other DNA
tgtacgcagggagatcgctaccttgaactggcagaaaaacgtgaggctaatgaatcgttcgtgtatggctggatg

SEQ ID NO: 41754 - DNA, 75 bp, synthetic construct
  source 1..75: mol_type = other DNA
tcaattgatattactggcagtggagatctaatatcattaggtggtcatgcaggacttggcgttgcgtttgctaaa

SEQ ID NO: 41755 - DNA, 75 bp, synthetic construct
  source 1..75: mol_type = other DNA
acatacatttaaagcaaaccacaattactacaacgaatgaaaaaaactatgccattgcctcagaaagttcatcat

SEQ ID NO: 41756 - DNA, 75 bp, synthetic construct
  source 1..75: mol_type = other DNA
tgaccggatgcgcttcacgaagagtgaccgggagcgcggttatgtggccaacagcgtctggacggtgacggcggt

SEQ ID NO: 41757 - DNA, 75 bp, synthetic construct
  source 1..75: mol_type = other DNA
cggaccgcctcactcaccgcacggtgaacggcgaaccggcagagcagtggcagtacgacgagcacggctggctga

SEQ ID NO: 41758 - DNA, 75 bp, synthetic construct
  source 1..75: mol_type = other DNA
agcagtacggggtcggaccggtatgcagtgaactacatattgccccgtcaacgtattaccactgtcagcagcagc

SEQ ID NO: 41759 - DNA, 75 bp, synthetic construct
  source 1..75: mol_type = other DNA
gatatgggagcagtgggaatctccaaaatatgtgatgtcagtagatgaaatagaagaaagatacggcgtcagaga

SEQ ID NO: 41760 - DNA, 75 bp, synthetic construct
  source 1..75: mol_type = other DNA
caacaaatgaccagaataccgatctacaacgtaatgcgctgaactgtgcaggatgtgagctgatttttgaagaca

SEQ ID NO: 41761 - DNA, 75 bp, synthetic construct
  source 1..75: mol_type = other DNA
cagtattgacacatcaacacccatggggcgtttcttttttcatgtcatgggtgctttagcagaaatggaacgtga

SEQ ID NO: 41762 - DNA, 75 bp, synthetic construct
  source 1..75: mol_type = other DNA
gcctgatacagcgttttgaaagaggctttctgctgcgtggcgtggatattcaggtgacgctggacagtaacggct

SEQ ID NO: 41763 - DNA, 75 bp, synthetic construct
  source 1..75: mol_type = other DNA
atggaatttaaagatttaccaatgcaattccaggaaatggcagcgaatatagttcgttcccaactggcgactctt

SEQ ID NO: 41764 - DNA, 75 bp, synthetic construct
  source 1..75: mol_type = other DNA
gcgcagcaaatcttatccgtcgtgaccgtccgttaacgcacgaagagctgtttcgtgtggtgcccagtgtcttca

SEQ ID NO: 41765 - DNA, 75 bp, synthetic construct
  source 1..75: mol_type = other DNA
gcgccggagctggcgaacatcatcggtcatcacgcgggtattgatgacaatacagcggcaaaagccattgcccat

SEQ ID NO: 41766 - DNA, 75 bp, synthetic construct
  source 1..75: mol_type = other DNA
atgtactgcaccctggaggatttgcttgagcaggtgccggaacgaacgctgatcgagctcaccagtgaagagatg

SEQ ID NO: 41767 - DNA, 75 bp, synthetic construct
  source 1..75: mol_type = other DNA
tacctgcgcgggcgctacacgctgccgctgccggaagtgccaaccgttatccatgacgtagccgtgtcgattacc

SEQ ID NO: 41768 - DNA, 75 bp, synthetic construct
  source 1..75: mol_type = other DNA
gtttgctgacagtgccacacagcgctttctcagcagccagaacatcacaacagtaaccggtgctgataatccggc

SEQ ID NO: 41769 - DNA, 75 bp, synthetic construct
  source 1..75: mol_type = other DNA
ttgtctggaagctggatcggctgggacgtagtatgcggcatctggtcattctggttgaggagttgcgcgaacgtg

SEQ ID NO: 41770 - DNA, 75 bp, synthetic construct
  source 1..75: mol_type = other DNA
atgtttctgataattctcacgccactggtgggtgtgctgggggcgcttttgctgtcgtatggtgcctggctgatt

SEQ ID NO: 41771 - DNA, 75 bp, synthetic construct
  source 1..75: mol_type = other DNA
gtcgctgaatcctgggataataaagacgcgaaagtctggaccttccatttgcgtaaagatgcgaaatggtctgat

SEQ ID NO: 41772 - DNA, 75 bp, synthetic construct
  source 1..75: mol_type = other DNA
agatattgtgaggattatatcagagataaccaggacgatatcgataacgtcattaccacccaaatcaatgcctgg

SEQ ID NO: 41773 - DNA, 75 bp, synthetic construct
  source 1..75: mol_type = other DNA
gcccgtaaggagcaaaggttacctgacgatgaagagcgactggctcagacgccaccgcgctatgttactgttcag

SEQ ID NO: 41774 - DNA, 75 bp, synthetic construct
  source 1..75: mol_type = other DNA
atgggcgataccatctccgatatcgaggacgatgccctgttgtgggatggttcttccttcagtgccaaacacggt

SEQ ID NO: 41775 - DNA, 75 bp, synthetic construct
  source 1..75: mol_type = other DNA
atgtgatatgttctgtaacaagtaaaatcaacataaaaaattcagcaaaatttaatattcgttcaactagccgtc

SEQ ID NO: 41776 - DNA, 75 bp, synthetic construct
  source 1..75: mol_type = other DNA
gaatcatgactttactgatggaacaacaaaccagttgaacatcagcaactccctgattcatggttcaatcacttc

SEQ ID NO: 41777 - DNA, 75 bp, synthetic construct
  source 1..75: mol_type = other DNA
cgccagatgctgccggcggatttgcagtcggcactgtgggaaatctcccgggacagtcagcgaaatgaactccgg

SEQ ID NO: 41778 - DNA, 75 bp, synthetic construct
  source 1..75: mol_type = other DNA
acggtaccgacacgatggaagaaaccgcttacttcctcgacctgacggtgaaatgcgacaaaccggtggtgatgg

SEQ ID NO: 41779 - DNA, 75 bp, synthetic construct
  source 1..75: mol_type = other DNA
gaaggagcacatcctgaaagcggtttcgatgaagatttccaaatggaacagcaggccaatgctgaattcatcgcc

SEQ ID NO: 41780 - DNA, 75 bp, synthetic construct
  source 1..75: mol_type = other DNA
ctggcactgctcacgccctttaacatcggaatgctgaccactgatgagtgggggagctatgccagggcgcttccg

SEQ ID NO: 41781 - DNA, 75 bp, synthetic construct
  source 1..75: mol_type = other DNA
gtgcagggcgagagcgggctgactcttacattgctgaatgccctgaccaaccagaccagcggtgtgcttctcagc

SEQ ID NO: 41782 - DNA, 75 bp, synthetic construct
  source 1..75: mol_type = other DNA
tggctgtcctcctttctctgtttttctgccgtcagtccatgggcgcgtttgtgttgaacgggacccgtttcattt

SEQ ID NO: 41783 - DNA, 75 bp, synthetic construct
  source 1..75: mol_type = other DNA
tgcgtgaagcggcgcaactggcaacacagggtgaatgggtcgcatttatttcgtctggtactggtacatatgcgg

SEQ ID NO: 41784 - DNA, 75 bp, synthetic construct
  source 1..75: mol_type = other DNA
ctcactggtcattattgttaacgtgatttctgatattttgggtgccatggctaaccctctgaaacataaggaatg

SEQ ID NO: 41785 - DNA, 75 bp, synthetic construct
  source 1..75: mol_type = other DNA
aacgtaaagcatgacggtaaggatatagccctcagcgataaggtgatgaaagaagtcgcgcaacttaagccgttc

SEQ ID NO: 41786 - DNA, 75 bp, synthetic construct
  source 1..75: mol_type = other DNA
agccgcaaaacttgagcaggagcttcgtcaacactaccgctgcggcgactatcttcccgccgagcagcaactggc

SEQ ID NO: 41787 - DNA, 75 bp, synthetic construct
  source 1..75: mol_type = other DNA
ccaccacctgcgcagcaggcactggcaaaagccgcgctgacgtaccgctttggtgaggaccaccagccggtgact

SEQ ID NO: 41788 - DNA, 75 bp, synthetic construct
  source 1..75: mol_type = other DNA
agcaaagtgtgcaggaaacgaagcaatacaccgatcagcgcatggttgagatggataacaaactgtccaaaactg

SEQ ID NO: 41789 - DNA, 75 bp, synthetic construct
  source 1..75: mol_type = other DNA
tctggttatatgacgtcatcaggggcatcaacctgctcatcatcgtcatcaccattgttgtcattcccttgctgc

SEQ ID NO: 41790 - DNA, 75 bp, synthetic construct
  source 1..75: mol_type = other DNA
gaagggctttgttttattcgtgacggcgaacctgtcacgttagactggaaaggatatgaccattttgccacgcca

SEQ ID NO: 41791 - DNA, 75 bp, synthetic construct
  source 1..75: mol_type = other DNA
caataaataacaataacaaaaatattaataccgttgacgtaatgaatgcttttatcaacgcatcaaacagagaac

SEQ ID NO: 41792 - DNA, 75 bp, synthetic construct
  source 1..75: mol_type = other DNA
gtagagggttcggatgtggtggctgaccgggatgtgtcactggcggcgggtaaccatgttgatgttcttgctgcc

SEQ ID NO: 41793 - DNA, 75 bp, synthetic construct
  source 1..75: mol_type = other DNA
atgcatcagcctcccgtacgcttcccttaccgcctgctgagttaccttatcagtacgattatcgccgggcagccg

SEQ ID NO: 41794 - DNA, 75 bp, synthetic construct
  source 1..75: mol_type = other DNA
tgacggaaaagtatctgatatccgcagccaggagacactaccaaaagaagaaaatcgccaggagcagaagtggtg

SEQ ID NO: 41795 - DNA, 75 bp, synthetic construct
  source 1..75: mol_type = other DNA
cgtaccgggccctgttcagtcttacctggttttttgttgtgttatatatcgtcagggaagagccacagtgccctg

SEQ ID NO: 41796 - DNA, 75 bp, synthetic construct
  source 1..75: mol_type = other DNA
ccaaacacaaaggcgtaagccgccagacagtttacgactggatcgagaaaggcgaagtggtcatgtccggtaaaa

SEQ ID NO: 41797 - DNA, 75 bp, synthetic construct
  source 1..75: mol_type = other DNA
gagactatacaggccctgaatcacctgcgcagggtgcttcatgaggtcagcccttttgcgcaggagcctgtggac

SEQ ID NO: 41798 - DNA, 75 bp, synthetic construct
  source 1..75: mol_type = other DNA
ggcaacaacgtatccgtgagacggtgctgcgcgcactggatgttcatccccgtctgacggcattgcggattgacc

SEQ ID NO: 41799 - DNA, 75 bp, synthetic construct
  source 1..75: mol_type = other DNA
tgctggcctttacggactgctcggggtacacgacgcggtatgagtacgaccggtacggtcaacaaatcgccgttc

SEQ ID NO: 41800 - DNA, 75 bp, synthetic construct
  source 1..75: mol_type = other DNA
gacaacggcaatgaatatttcaaatggagaagccgccagagcaccacaacaaaagacctgatgacgctgaaatgg

SEQ ID NO: 41801 - DNA, 75 bp, synthetic construct
  source 1..75: mol_type = other DNA
ttattgagcatgagatcattgagtctgataatggtactccagataatgttattcagatcagctttggaaagagat

SEQ ID NO: 41802 - DNA, 75 bp, synthetic construct
  source 1..75: mol_type = other DNA
aggtgcggaagataatggcgtaggatttattcttgaaagtaatggttcgccagtcacacttttaaatatcactaa

SEQ ID NO: 41803 - DNA, 75 bp, synthetic construct
  source 1..75: mol_type = other DNA
aatggcaacggccaatgccatgtacgatcggctggtcaaaacctggcttgctttctattcgccagaatcccgccc

SEQ ID NO: 41804 - DNA, 75 bp, synthetic construct
  source 1..75: mol_type = other DNA
ttggttcgaatctgccgctggatacattgctaaacaacctgaccatcgctgaaaaaaaacgcttaaacccaatta

SEQ ID NO: 41805 - DNA, 75 bp, synthetic construct
  source 1..75: mol_type = other DNA
tgacctgacgcgagatgttgacggcttctactgtcgtgaagttgtgaagcgaatgtttgaagtgtggtgccactg

SEQ ID NO: 41806 - DNA, 75 bp, synthetic construct
  source 1..75: mol_type = other DNA
tgccaagctccttcttgccagatgaggaccagggcgtgtttatgaccatggttcagctgccagcaggtgcaacgc

SEQ ID NO: 41807 - DNA, 75 bp, synthetic construct
  source 1..75: mol_type = other DNA
tgtctgatattgtcagggacctttcgcgtctgggctggtcggatgagcgtattggcacagagctgggcatggacc

SEQ ID NO: 41808 - DNA, 75 bp, synthetic construct
  source 1..75: mol_type = other DNA
atgattaaaaaagcttcgctgctgacggcgtgttccgtcacagccttttccgcttgggcacaggataccagcccg

SEQ ID NO: 41809 - DNA, 75 bp, synthetic construct
  source 1..75: mol_type = other DNA
cgggacagccgttggcatcatcatgtttatgctggtgattggcggcgcgtttggcattgtgatgcgtacaggaac

SEQ ID NO: 41810 - DNA, 75 bp, synthetic construct
  source 1..75: mol_type = other DNA
gcatggcgagccactggtcgagagccgctacctctacgacccgctgggacggcgaatggcgaaacgggtatggcg

SEQ ID NO: 41811 - DNA, 75 bp, synthetic construct
  source 1..75: mol_type = other DNA
tgcgaccattcgacataaccgggccaggggaaaacaccagataacctcaatgtctgatattgtcagagacctttc

SEQ ID NO: 41812 - DNA, 75 bp, synthetic construct
  source 1..75: mol_type = other DNA
atgatgtggaaactgccgggcagtttcttacccactgaagaccagggcgaaatcatggtgcagtacacgctgccg

SEQ ID NO: 41813 - DNA, 75 bp, synthetic construct
  source 1..75: mol_type = other DNA
aatctgcggacgggtgaaatatccatgtcgcataaagtgtctgttggcggtggttcgcaggtcaatggtgcgctg

SEQ ID NO: 41814 - DNA, 75 bp, synthetic construct
  source 1..75: mol_type = other DNA
atgaacaagcagcagcaaaccgtactcaacatggcaggattcataaaaagccagagcctgacgctgctcgaaaaa

SEQ ID NO: 41815 - DNA, 75 bp, synthetic construct
  source 1..75: mol_type = other DNA
acaaggaggccggcagtggcatgggtagtgtaggttatctggaactggtttcctggacagggagtggtaccccac

SEQ ID NO: 41816 - DNA, 75 bp, synthetic construct
  source 1..75: mol_type = other DNA
tctgttacacgcactgcagataaggattctgcaaaaacatttgttcaggagactctgaaagatacctgggaatct

SEQ ID NO: 41817 - DNA, 75 bp, synthetic construct
  source 1..75: mol_type = other DNA
tatcgtcggtgccatatgcctgctctttgcgattatcatctggcgctttttacctgaaatcgtcttcgcctcctg

SEQ ID NO: 41818 - DNA, 75 bp, synthetic construct
  source 1..75: mol_type = other DNA
aggcgctgggctatgaaaccgaagtggtgggtaagcacggtatgtgggagatgccgggcgtaccggtggaggcct

SEQ ID NO: 41819 - DNA, 75 bp, synthetic construct
  source 1..75: mol_type = other DNA
cgataaagattcagctaaaacttttgttcaggagactctgaaagatacctgggaatctgctgacgagtggtttgt

SEQ ID NO: 41820 - DNA, 75 bp, synthetic construct
  source 1..75: mol_type = other DNA
ggtcggtaagcacggtatgtgggagatgccgggcgtaccggtggaggccttttccggacgctcacaggctatccg

SEQ ID NO: 41821 - DNA, 75 bp, synthetic construct
  source 1..75: mol_type = other DNA
gggcgcgcggattggtaaaggcctcatgttacctcatcatgcaggaggtaatgactccaacttattgatagtgtt

SEQ ID NO: 41822 - DNA, 75 bp, synthetic construct
  source 1..75: mol_type = other DNA
atgtacggtgtgcgtaaagtctggcgtcagttgttacgggaaggaatcagggtggccagatgtacagtggcgcgc

SEQ ID NO: 41823 - DNA, 75 bp, synthetic construct
  source 1..75: mol_type = other DNA
ctgaagaggacaggcataaactggttgtagagtataaggatgctctgcaacctgccgatttttatcacaatttca

SEQ ID NO: 41824 - DNA, 75 bp, synthetic construct
  source 1..75: mol_type = other DNA
tgtgtgctgtgggtgaaagcagatgaggtggtggccaacgattataaccccaatgtcatggcgccgggtgagaag

SEQ ID NO: 41825 - DNA, 75 bp, synthetic construct
  source 1..75: mol_type = other DNA
ggatatgcaccactttagggggtatatggctcttaacagtctgcaatatgcaggggtgagagaaaccgaattact

SEQ ID NO: 41826 - DNA, 75 bp, synthetic construct
  source 1..75: mol_type = other DNA
ataaaagcgggacgattaccgttaaccttctgaagacatcaccgacaaataaaaaattgtcgctggcgtataacg

SEQ ID NO: 41827 - DNA, 75 bp, synthetic construct
  source 1..75: mol_type = other DNA
ctggacgatggcgatctcgttacggtgaaagaagcgactgatgcgctgctgcactgtgcagaacagcttcgggag

SEQ ID NO: 41828 - DNA, 75 bp, synthetic construct
  source 1..75: mol_type = other DNA
aaccaccctgctgcgccatattcttaacgaacagcacggctacaagattgccgtgattgaaaacgaattcggcga

SEQ ID NO: 41829 - DNA, 75 bp, synthetic construct
  source 1..75: mol_type = other DNA
gatgacgactaatcgttaccgctgcgaaaaaaccaactacgacaccgcgctgaaatacgccaaactggacgcatg

SEQ ID NO: 41830 - DNA, 75 bp, synthetic construct
  source 1..75: mol_type = other DNA
attacaaaatcaacctgcttgacaaaaatgacttcactaaagcactcggtgtaagcactgatgacatcgttgctg

SEQ ID NO: 41831 - DNA, 75 bp, synthetic construct
  source 1..75: mol_type = other DNA
agaaaaccatcggcggacgccctgccgtgcgcgtgccgggtttcccgcgcaacaccattctggtcaccgccttca

SEQ ID NO: 41832 - DNA, 75 bp, synthetic construct
  source 1..75: mol_type = other DNA
accgcatagcacgatggtgtttatcgggatccagctgccggaggaagagattcgggctgcgtttgcggggttgag

SEQ ID NO: 41833 - DNA, 75 bp, synthetic construct
  source 1..75: mol_type = other DNA
cgtcatcgacagtcacgacgacaaagcctggcgcgacacgctgttaaaagtggcggccattttatgtgaacgcca

SEQ ID NO: 41834 - DNA, 75 bp, synthetic construct
  source 1..75: mol_type = other DNA
atcgacattgtgctcagtgaagcctggtcatctggtttgccttttgagacagaaaactttcgcctgcactgtgcg

SEQ ID NO: 41835 - DNA, 75 bp, synthetic construct
  source 1..75: mol_type = other DNA
tgacgccatcagccgctggacgccatatgacaagcccgtggtatcagcacagaaagaactgagcaaactgcctgt

SEQ ID NO: 41836 - DNA, 75 bp, synthetic construct
  source 1..75: mol_type = other DNA
agggctggcggacaaaaactgtacctgtccccgatacttgatttgtttaacggggaaatcgtggcatgggaaaca

SEQ ID NO: 41837 - DNA, 75 bp, synthetic construct
  source 1..75: mol_type = other DNA
tgaatctggataagcctggcgcctgcgatcccagtgtggaacgtctgtttgaaggctttgccttcctgatgggac

SEQ ID NO: 41838 - DNA, 75 bp, synthetic construct
  source 1..75: mol_type = other DNA
caaattcggcttcgagaatgtgctgcgctacatcctgcgcgtaaaagatgcacaaggtaactacctaactggcgg

SEQ ID NO: 41839 - DNA, 75 bp, synthetic construct
  source 1..75: mol_type = other DNA
tagcactcatgctaagcggctgttccatgttaagcagatcccctgtcgaacccgttcaaagcactgcaccccagc

SEQ ID NO: 41840 - DNA, 75 bp, synthetic construct
  source 1..75: mol_type = other DNA
gatgcgctggccgatttcagccgtgacgagcatttgatgtcgctgaaatatgtggccggacgttctggtcgggtg

SEQ ID NO: 41841 - DNA, 75 bp, synthetic construct
  source 1..75: mol_type = other DNA
agcagtaacagtgtgggctatacccgtaccagtggtacgactttcaacagcagtgtttctgccatgccgactgac

SEQ ID NO: 41842 - DNA, 75 bp, synthetic construct
  source 1..75: mol_type = other DNA
ctataacaatcaaaaccagttaacctcagccaccgggcctgacggactggaaatgcgccggaaatatgatgagta

SEQ ID NO: 41843 - DNA, 75 bp, synthetic construct
  source 1..75: mol_type = other DNA
taagagcctacattcaatccgcccagcaaacccaactgcaccttgcagacgcactcactgacgcggctataaact

SEQ ID NO: 41844 - DNA, 75 bp, synthetic construct
  source 1..75: mol_type = other DNA
caaaacattcttcagagcattaagcccttacgactacacactgtattgcaggaagtgggtaaaaccaaatctgac

SEQ ID NO: 41845 - DNA, 75 bp, synthetic construct
  source 1..75: mol_type = other DNA
tagcgaggaagagaagccgtttgaattgccggaggggtgggaatggactcgattaattaatcttggtatatgggc

SEQ ID NO: 41846 - DNA, 75 bp, synthetic construct
  source 1..75: mol_type = other DNA
gtgataaattaaacatcacaggggatgcaaacggtaattttgttttgaatatcaaaaataccggtcaggagcctg

SEQ ID NO: 41847 - DNA, 75 bp, synthetic construct
  source 1..75: mol_type = other DNA
aattccctcattggtctcttcatgatttgagacgaacagcacgaacaaacttttctgatcttactgcgcctcata

SEQ ID NO: 41848 - DNA, 75 bp, synthetic construct
  source 1..75: mol_type = other DNA
cagccgctttatgccaacgctgtggctgaccataaccagtatggtctgggcggtgatatttggtatggcggcggg

SEQ ID NO: 41849 - DNA, 75 bp, synthetic construct
  source 1..75: mol_type = other DNA
gagaagcaggagcgcgcccagcagatcaaagagcgattcaaggccaagcgggaacgggagcgcagcgaccgcagc

SEQ ID NO: 41850 - DNA, 75 bp, synthetic construct
  source 1..75: mol_type = other DNA
cgttaacgaatacataacttactggaatcaaaaaagaataaaactcagtcttgggggactcagtccggtagaata

SEQ ID NO: 41851 - DNA, 75 bp, synthetic construct
  source 1..75: mol_type = other DNA
ggcgtaattgccagttggttacatacccgtgaacccgcgaagaaagaaagcactgccgtgaagcgtaagcgcagg

SEQ ID NO: 41852 - DNA, 75 bp, synthetic construct
  source 1..75: mol_type = other DNA
aaaacactatcacctcctgctgctggtcaaccgggatacctggtgtcgtgccggcgattaccgcgatccggggtc

SEQ ID NO: 41853 - DNA, 75 bp, synthetic construct
  source 1..75: mol_type = other DNA
tactgtcagcccggataacggttttacgaccagtttggagcttgaagtgaagattgatgatttcgaaatggagtg

SEQ ID NO: 41854 - DNA, 75 bp, synthetic construct
  source 1..75: mol_type = other DNA
ctatcgaaaaaatgctggaagttctcggcaggccgccagagcaactccctaactgcgagaccgtcttcgaaacgg

SEQ ID NO: 41855 - DNA, 75 bp, synthetic construct
  source 1..75: mol_type = other DNA
ccgggtgttgcaaattgaagaaagctctgatgatggtgatgaatatgactattcacccgcaaaagaagagtgggt

SEQ ID NO: 41856 - DNA, 75 bp, synthetic construct
  source 1..75: mol_type = other DNA
gtgatgattaaaccggttcttggttccagttatcgccagtacatcctgagtttgtggctgccgttttatctctcg

SEQ ID NO: 41857 - DNA, 75 bp, synthetic construct
  source 1..75: mol_type = other DNA
ataactttgtaccgctggtatttggcgaaaagtggaacagcattattccggtgctgcaattgctgtgtgtggtgg

SEQ ID NO: 41858 - DNA, 75 bp, synthetic construct
  source 1..75: mol_type = other DNA
tactggcgtcggcatattctgctgaccatctggctgggttacgcgctgttttacttcacgcggaaaagttttaac

SEQ ID NO: 41859 - DNA, 75 bp, synthetic construct
  source 1..75: mol_type = other DNA
caggtgattaccgcgatccggggtcactggccgggatgattaaacaggcctggtgcagtgccctgggtgtggata

SEQ ID NO: 41860 - DNA, 75 bp, synthetic construct
  source 1..75: mol_type = other DNA
tgtgccactgacaccagaaggattgattaaagcagtgcgtttctatgaacaggtaaagcgtgagaatccgccagt

SEQ ID NO: 41861 - DNA, 75 bp, synthetic construct
  source 1..75: mol_type = other DNA
gaaatgtagaagagctggaaaatgccgttaacgaatacataacttactggaatcaaaaaagaataaaactcagtc

SEQ ID NO: 41862 - DNA, 75 bp, synthetic construct
  source 1..75: mol_type = other DNA
cgaaacaggagcatggaaggatgctgttgactgggtgctcagagaggcctgctgcgctgccattctgggtaaagc

SEQ ID NO: 41863 - DNA, 75 bp, synthetic construct
  source 1..75: mol_type = other DNA
tgaacaaacagttcgcacaacttgaaagcgagcgtcagtcgttcgagccgcactggcgcgagttgagtgattaca

SEQ ID NO: 41864 - DNA, 75 bp, synthetic construct
  source 1..75: mol_type = other DNA
gacgaccaggactatgagtttgagtcttacgatttggaagttgaagccttagcacaggctggagagaaaacttga

SEQ ID NO: 41865 - DNA, 75 bp, synthetic construct
  source 1..75: mol_type = other DNA
ttcatcaatgccctgaaagcccgaatcgatgcttaccagaagcgtaagcgccgtgaaggtaaacgcgtacatccc

SEQ ID NO: 41866 - DNA, 75 bp, synthetic construct
  source 1..75: mol_type = other DNA
gctggcgatgaccgcgatcctcggttatctggtcaatagtgcggtgagaacgctgctgtttggctactttggtcg

SEQ ID NO: 41867 - DNA, 75 bp, synthetic construct
  source 1..75: mol_type = other DNA
tatactcagcctggcatttactgccagtgcctgaagaggttgacgaccaggactatgagtttgagtcttacgatt

SEQ ID NO: 41868 - DNA, 75 bp, synthetic construct
  source 1..75: mol_type = other DNA
accatggatatctgcagggattggctacgccagagttcaccagaaaacaaccggtatcagtatctgggattatgg

SEQ ID NO: 41869 - DNA, 75 bp, synthetic construct
  source 1..75: mol_type = other DNA
ggcggagatgaagaccaccatcacagaaacccgcaatgaaatcacgcagacggtcagtaaaaccctggaagacca

SEQ ID NO: 41870 - DNA, 75 bp, synthetic construct
  source 1..75: mol_type = other DNA
ggaaggggatcagtttgatactgtcgaggtggattttggacgctctgaaggaaataacattgagcaggccgacgg

SEQ ID NO: 41871 - DNA, 75 bp, synthetic construct
  source 1..75: mol_type = other DNA
tgctgttgatagcagggctgtttgtatcatctctaagttatgcagaaaacacggagatcccttcttatgaagaag

SEQ ID NO: 41872 - DNA, 75 bp, synthetic construct
  source 1..75: mol_type = other DNA
gggaatactgctgcagatgggatccgttgttacggtgccattcaggatgcacaggcgttgtctgaaggagtggtg

SEQ ID NO: 41873 - DNA, 75 bp, synthetic construct
  source 1..75: mol_type = other DNA
gggaatactgctgcagatgggatccgttgttacggagccattcaggatgcgcaggcgttttccgaaggtgtggtg

SEQ ID NO: 41874 - DNA, 75 bp, synthetic construct
  source 1..75: mol_type = other DNA
cgtgcagcgtgtcgaacttgtcgcgccggtcgctgacatcgtactcaatgagacgcaggcgtcatattgcactgc

SEQ ID NO: 41875 - DNA, 75 bp, synthetic construct
  source 1..75: mol_type = other DNA
cacattaagccggggaaggatttctggttttatgtgcgcagcgtcaacctggtggggaaatctgcgtttgtggaa

SEQ ID NO: 41876 - DNA, 75 bp, synthetic construct
  source 1..75: mol_type = other DNA
aaggcactggcagagtgtggtacacagatcagcatggtttcaggggccagcattggcgcattcaatggtgccatt

SEQ ID NO: 41877 - DNA, 75 bp, synthetic construct
  source 1..75: mol_type = other DNA
aactcacacagagtggtccttcagggagagtccctgaggaaaaatccccctacagtggaaagcagcgaaaaaacg

SEQ ID NO: 41878 - DNA, 75 bp, synthetic construct
  source 1..75: mol_type = other DNA
cgtgccattcacagcattgacactgacattaagctcaaccgcgcattgtgggtgatggcggaaacgctgctggag

SEQ ID NO: 41879 - DNA, 75 bp, synthetic construct
  source 1..75: mol_type = other DNA
tgaattctggttttcggaggcaaaaatcgcagacaccgcacaggtggaaaccgctgcccgttatctggggaccgg

SEQ ID NO: 41880 - DNA, 75 bp, synthetic construct
  source 1..75: mol_type = other DNA
agacggcggacagcaccacggaccagctgcagaataagacgctgtggtcgtcatacaccgaaatcatcgatgtga

SEQ ID NO: 41881 - DNA, 75 bp, synthetic construct
  source 1..75: mol_type = other DNA
tcgaaacagcggtgaaagacctgggcgcggtggtgtccttcaaagggtattacggcgatctggccattgtggtgg

SEQ ID NO: 41882 - DNA, 75 bp, synthetic construct
  source 1..75: mol_type = other DNA
atccacgaaatcgtagccgagtgcgagaaagagatcgccttcatgtatcaggttcacgacttcgtttatggcgac

SEQ ID NO: 41883 - DNA, 75 bp, synthetic construct
  source 1..75: mol_type = other DNA
ccttaatggtgaggacgtcagaccggtggccgaccgtgtgaccgtgcagtctgccgtcatcgttgaataccagat

SEQ ID NO: 41884 - DNA, 75 bp, synthetic construct
  source 1..75: mol_type = other DNA
cggtcgcctggtacgataacgaatatggcttcgtcacacagcttattcgcaccctcgaaaaattcgctaaactct

SEQ ID NO: 41885 - DNA, 75 bp, synthetic construct
  source 1..75: mol_type = other DNA
atgagcactgataaagaagaattttcgctatattgcgaagcaaaaaatgacaaggtcagaaaacgccttgggatt

SEQ ID NO: 41886 - DNA, 75 bp, synthetic construct
  source 1..75: mol_type = other DNA
tctttggtgggctcatcagcgcctgttatgcgttacgcgatagtgagcagatagtcatcagcgttggggcatccg

SEQ ID NO: 41887 - DNA, 75 bp, synthetic construct
  source 1..75: mol_type = other DNA
gaaacccgcaatgaaatcacacagacggtcagtaaaacgctggagagccagagcgccaccatacagcagatacag

SEQ ID NO: 41888 - DNA, 75 bp, synthetic construct
  source 1..75: mol_type = other DNA
atggatcaggaaatgacgttttcactcagctatgaacaactgacccggtttgcggaaaaacgcatccgggaatgc

SEQ ID NO: 41889 - DNA, 75 bp, synthetic construct
  source 1..75: mol_type = other DNA
tctgagcctctcgtcaaactgctggaggaaaatgcttatcgtgagcttatctggcgtcagcgtgtgaatgaggct

SEQ ID NO: 41890 - DNA, 75 bp, synthetic construct
  source 1..75: mol_type = other DNA
tgaatgccataaagagacaggagatcattgacgccgactttcagcgcctcagaaagctcatctggccggaggatg

SEQ ID NO: 41891 - DNA, 75 bp, synthetic construct
  source 1..75: mol_type = other DNA
gaatgagcgtggccgggtcgaccggtgcgtatcagtttcatggccgcagtgctgacgggcgggtcgccgatattt

SEQ ID NO: 41892 - DNA, 75 bp, synthetic construct
  source 1..75: mol_type = other DNA
aaagcccaaatttggcagtgtgctgatggggtcactgaaaaacaccagcgaatggcaatttgcaggaacagacct

SEQ ID NO: 41893 - DNA, 75 bp, synthetic construct
  source 1..75: mol_type = other DNA
atcaccgtactggaaagcctgcagcgggaaggctttcagccattcttcgcctgccagacccgtgtgcgcgacccg

SEQ ID NO: 41894 - DNA, 75 bp, synthetic construct
  source 1..75: mol_type = other DNA
ctgtcaccagtccgtctccggcctgtgtcaccatctctgtgctgtcacgtgaaaataacggtgtcgcatccgaag

SEQ ID NO: 41895 - DNA, 75 bp, synthetic construct
  source 1..75: mol_type = other DNA
ccggtcgctgacatcgtactcaatgagacgcaggcgtcatattgcaccgagtacagcgtaaagatcgggggcaac

SEQ ID NO: 41896 - DNA, 75 bp, synthetic construct
  source 1..75: mol_type = other DNA
acgctatacgtatatccccaccatcaccgtgctggaaagtctgcagcgggagggctttcagcccttcttcgcctg

SEQ ID NO: 41897 - DNA, 75 bp, synthetic construct
  source 1..75: mol_type = other DNA
gaccgtgtggcattcattaatccggagaatggtgataccacacccgcactggtcacgcaggggggacagacgttt

SEQ ID NO: 41898 - DNA, 75 bp, synthetic construct
  source 1..75: mol_type = other DNA
tgatattgaggggaaaatatcacaatgtaagttttctgttaatacggagagccttcagtgtccatccgaggcggt

SEQ ID NO: 41899 - DNA, 75 bp, synthetic construct
  source 1..75: mol_type = other DNA
tttttttaattctgtgcttgagttgttataccgcgagtgctggcactgatgataacgtaggatatattgttggga

SEQ ID NO: 41900 - DNA, 75 bp, synthetic construct
  source 1..75: mol_type = other DNA
actgcctcaataccgatgaatggccagctattaagacgttatcactgccccgctgggctaaggaatatgcaaatg

SEQ ID NO: 41901 - DNA, 75 bp, synthetic construct
  source 1..75: mol_type = other DNA
ccgctggccgacatcgtgctcaacagtacgcaggcgtctttctgtaccgaataccgcgtcgtgaccggaggctcg

SEQ ID NO: 41902 - DNA, 75 bp, synthetic construct
  source 1..75: mol_type = other DNA
gggcgcttatcaggcgggagtggttaaggcactggcagagtgtggtacacagatcagcatggtttcaggggccag

SEQ ID NO: 41903 - DNA, 75 bp, synthetic construct
  source 1..75: mol_type = other DNA
ccatacccgcgccattcacagtatcgacaccgacatcaagctcaatcgcgcattgtgggtgatggcggaaacgct

SEQ ID NO: 41904 - DNA, 75 bp, synthetic construct
  source 1..75: mol_type = other DNA
actgacacaaaaattattacgttagatactacagattcagattttattggtcctatagttccaacaattgcattg

SEQ ID NO: 41905 - DNA, 75 bp, synthetic construct
  source 1..75: mol_type = other DNA
ggggcttacgaggtggtgggcgtgtttgaccggattgaagagaaacgtgacgccatgcagtcgctggtcctgccg

SEQ ID NO: 41906 - DNA, 75 bp, synthetic construct
  source 1..75: mol_type = other DNA
ctctgggccgaactccacgttgccggtacgtgtccatggtgcttttgttcgcgatcaggaagttcatgccgtggt

SEQ ID NO: 41907 - DNA, 75 bp, synthetic construct
  source 1..75: mol_type = other DNA
tttagctgcaggtggcggtggaagcaaacatagacatgaaaatgatgactctgatactacagccccatcgtcacc

SEQ ID NO: 41908 - DNA, 75 bp, synthetic construct
  source 1..75: mol_type = other DNA
gtaaagatgggattaaaattgatgattccattattacgagttttaaagcctctaaagatgttggaatttcaaacg

SEQ ID NO: 41909 - DNA, 75 bp, synthetic construct
  source 1..75: mol_type = other DNA
tatttctgaaatcaatgccaagaccaaagtaaaaacattcaaactcaaattcaaagactgtgcgggtatccccaa

SEQ ID NO: 41910 - DNA, 75 bp, synthetic construct
  source 1..75: mol_type = other DNA
agcatcgacaccgatattaagctcaaccgcgcattgtgggtgatggcagaaacgctgctggagagcatgcgctga

SEQ ID NO: 41911 - DNA, 75 bp, synthetic construct
  source 1..75: mol_type = other DNA
gattaacggcagcggtaagccggtgcgcgtggacatcactgcacaccccgcccctgaccggatacaggtcagcgt

SEQ ID NO: 41912 - DNA, 75 bp, synthetic construct
  source 1..75: mol_type = other DNA
cgcattgagcgacataatctgaatctgagacaacatctggcaaggctggtacggaagtcactgtcgttctcaaaa

SEQ ID NO: 41913 - DNA, 75 bp, synthetic construct
  source 1..75: mol_type = other DNA
ttcacagcatcgacaccgacattaagctcaaccgcgcattgtgggtgatggctgaaacgctgctggagagtatgc

SEQ ID NO: 41914 - DNA, 75 bp, synthetic construct
  source 1..75: mol_type = other DNA
gtgccggtattgagaacacccctgacggcatgcagagtcaggtgctgctggcggcagacaggattgcgatgatta

SEQ ID NO: 41915 - DNA, 75 bp, synthetic construct
  source 1..75: mol_type = other DNA
ctgccagacccgtgtgcgcgaccagagccgccgggaatataccaaacatatgctgcgtctgcggcgggccggaca

SEQ ID NO: 41916 - DNA, 75 bp, synthetic construct
  source 1..75: mol_type = other DNA
ggatgcgtctgtggtcagtctccgggggaagtgcgtgttccgcatcggggaaatgtggtggacagagtcattgaa

SEQ ID NO: 41917 - DNA, 75 bp, synthetic construct
  source 1..75: mol_type = other DNA
aactcagatcgcttatgaaaatggtgattatggtgcagacaaatggttgcaacaccatgaaaaaaatttggaaag

SEQ ID NO: 41918 - DNA, 75 bp, synthetic construct
  source 1..75: mol_type = other DNA
tctccggagacagagatgcagcagatccgccgtgaagtgatgctgggatggcctgctgatgcactgaatcaggca

SEQ ID NO: 41919 - DNA, 75 bp, synthetic construct
  source 1..75: mol_type = other DNA
tgcgccggaaggcgattttgaccgctcattctctgatggcgttctcgaagatatcgccgcccagcttcgcaaagg

SEQ ID NO: 41920 - DNA, 75 bp, synthetic construct
  source 1..75: mol_type = other DNA
ggcggtaatcctccggcattttccctgacaccggacgggcggctgacggcgaaaaatgccgatatcagcggtaac

SEQ ID NO: 41921 - DNA, 75 bp, synthetic construct
  source 1..75: mol_type = other DNA
tgctggccgtggccgggctgctctggatgcgccacgaaaacaccagtctgacccgttcctttgaacgggcgaata

SEQ ID NO: 41922 - DNA, 75 bp, synthetic construct
  source 1..75: mol_type = other DNA
cgggccattcacagcattgataccgacattaagctcaatcgcgcattgtgggtgatggcagaaacgatgctggag

SEQ ID NO: 41923 - DNA, 75 bp, synthetic construct
  source 1..75: mol_type = other DNA
gattggcatgctgaaaaatcagctcagtgttgccggtcagcttgcccgacgtaatgaatccgcgcaggtggaact

SEQ ID NO: 41924 - DNA, 75 bp, synthetic construct
  source 1..75: mol_type = other DNA
cacaacaaagttcactacatccgaaaaggcagaacatgtatcgccagcatgttccgctttaatcatgactttgaa

SEQ ID NO: 41925 - DNA, 75 bp, synthetic construct
  source 1..75: mol_type = other DNA
caccgccatcaccgcagacacggagcaccgtttcagcggcctgccactgggggaatacaccctgacggtgcgggc

SEQ ID NO: 41926 - DNA, 75 bp, synthetic construct
  source 1..75: mol_type = other DNA
gattaaaggcagtccggttttgattcaatggacgcctgcagcgggcagtagcaatgctggggtcatggagatgat

SEQ ID NO: 41927 - DNA, 75 bp, synthetic construct
  source 1..75: mol_type = other DNA
atgggcaaaggtggcggcaaggggcacacgccggttgaggcaaaggacaatctcaaatccacgcagatgatgagc

SEQ ID NO: 41928 - DNA, 75 bp, synthetic construct
  source 1..75: mol_type = other DNA
atcacgaacacggcacaggtggaaaaatctgcccgttatctggggaccggcagtcagtggactgtccagggcgat

SEQ ID NO: 41929 - DNA, 75 bp, synthetic construct
  source 1..75: mol_type = other DNA
ggtggttgaacttaccggacacggcaataacggcgcaccggtttccctttccgtatcaacaggagcagacaatgg

SEQ ID NO: 41930 - DNA, 75 bp, synthetic construct
  source 1..75: mol_type = other DNA
tagagctgtatccgctgctcagtaccggcctgccggacgacagcatcctcacgctggtagagagtttctgttctg

SEQ ID NO: 41931 - DNA, 75 bp, synthetic construct
  source 1..75: mol_type = other DNA
accgtgttaccgaatatctgaacaaagtactgaccgaaaccgatcatgccaaccctgatccggaaatcgtggata

SEQ ID NO: 41932 - DNA, 75 bp, synthetic construct
  source 1..75: mol_type = other DNA
taccatatcagacttttcgtgactttgctgaaaataaaggtgtgtttacccccggagtgacaggaattgaaataa

SEQ ID NO: 41933 - DNA, 75 bp, synthetic construct
  source 1..75: mol_type = other DNA
acaatgcgctggatgatgcccgtcaccaggcgaaatacgtttcagcaatctggcaaaaactgatcccgaatcagt

SEQ ID NO: 41934 - DNA, 75 bp, synthetic construct
  source 1..75: mol_type = other DNA
aatccgggcagaccgcgtgagcagtgaaagccgggcgtggcttgcgcagtgcgggctgacggtggagcaactggc

SEQ ID NO: 41935 - DNA, 75 bp, synthetic construct
  source 1..75: mol_type = other DNA
cgcgtcggtgttgaccctaataacgttgctcagatgtatcagcagaatccttcaggatttggtgagtttgttgat

SEQ ID NO: 41936 - DNA, 75 bp, synthetic construct
  source 1..75: mol_type = other DNA
gatcgctctctggaaaaccgtcgtatgcaggccgggcaggtaatcagcggtgcaattctgattgtgacgactgag

SEQ ID NO: 41937 - DNA, 75 bp, synthetic construct
  source 1..75: mol_type = other DNA
gactcggtagggcgttacagctccctatcgcggtgctgccggtggcggcgctgttgctgcgattcggtcagccag

SEQ ID NO: 41938 - DNA, 75 bp, synthetic construct
  source 1..75: mol_type = other DNA
cacagagcaagcacaggtcgcagagcaggccacatcttcatatgatcctggtgttattaccagggcaaacaccct

SEQ ID NO: 41939 - DNA, 75 bp, synthetic construct
  source 1..75: mol_type = other DNA
agctaactaatgacacggttatatgggagagaggtgaaaaagcatggcgaaaaagacaaggttatgatgcccctg

SEQ ID NO: 41940 - DNA, 75 bp, synthetic construct
  source 1..75: mol_type = other DNA
atcaccgtactggaaagcctgcagcgggaaggctttcagccattcttcgcctgccagacccgcgtacgtgacccg

SEQ ID NO: 41941 - DNA, 75 bp, synthetic construct
  source 1..75: mol_type = other DNA
gctggggaccggtaaaaatgtcggacggtatggtctggatggcgcataccggcaccttcggtacggcaaccagtt

SEQ ID NO: 41942 - DNA, 75 bp, synthetic construct
  source 1..75: mol_type = other DNA
ggataactccagtggaattgccggatggcatttgaatggcgatatcgctacatgggaagagattcttcctgaaat

SEQ ID NO: 41943 - DNA, 75 bp, synthetic construct
  source 1..75: mol_type = other DNA
tatcccatgtgggtcggcgtcgaccttgctcataagattgatatctgtgcggcggcaaaactctggcgaaccgat

SEQ ID NO: 41944 - DNA, 75 bp, synthetic construct
  source 1..75: mol_type = other DNA
cagaagtatgaaacacctgatcacgcttattgaggaattgcggaaaaaaggtgttaatttccgtagtctgacgga

SEQ ID NO: 41945 - DNA, 75 bp, synthetic construct
  source 1..75: mol_type = other DNA
tcaccctgtaccacaatggtttcacctgcgaagccgatacccttggcagttgcggctacgtatacatcgccgttt

SEQ ID NO: 41946 - DNA, 75 bp, synthetic construct
  source 1..75: mol_type = other DNA
aaggccctggaaaagcggtgaagcaagtcataccttttgaaggcaatgaaaagtcttttgaaacaatattgaaac

SEQ ID NO: 41947 - DNA, 75 bp, synthetic construct
  source 1..75: mol_type = other DNA
cgatttaatcccatcttttctaacgtctggacaacaaaatccagctttcgccagaaaagtgtctggagtcgttga

SEQ ID NO: 41948 - DNA, 75 bp, synthetic construct
  source 1..75: mol_type = other DNA
gcgttctggttggtgaactggacgatgagcagatggctgcattgtcccgactgggtaacgattatcggccgacga

SEQ ID NO: 41949 - DNA, 75 bp, synthetic construct
  source 1..75: mol_type = other DNA
tttgatggtaacgttaaagcattagccgaggctgaaaatatagacagaaatattatcactcgctgtattaataca

SEQ ID NO: 41950 - DNA, 75 bp, synthetic construct
  source 1..75: mol_type = other DNA
atgaacggcaaatctaggttagcctcttacgtgccgaaaggcaaggagaagcaggctatgaagcagcaaaaggcg

SEQ ID NO: 41951 - DNA, 75 bp, synthetic construct
  source 1..75: mol_type = other DNA
ctttggatgctttagccaatcatctgtttgctaatccgcaacgttcgctgccatgtcttgcctggacactgctga

SEQ ID NO: 41952 - DNA, 75 bp, synthetic construct
  source 1..75: mol_type = other DNA
caatagcaatgggtagtggagcaactgccactggtgaccattctctggcgctagggggggcaactaagactctag

SEQ ID NO: 41953 - DNA, 75 bp, synthetic construct
  source 1..75: mol_type = other DNA
gcgacatgacgccgtgcttcggtgcaaggcttgtgcaggaaggccgtcgcctgcattttctggcggaccgtgcag

SEQ ID NO: 41954 - DNA, 75 bp, synthetic construct
  source 1..75: mol_type = other DNA
gttaatgaaaccggtatcgttcgtttcggctatggaaccattaaaaaaatcataaattacaggttggttgcgatg

SEQ ID NO: 41955 - DNA, 75 bp, synthetic construct
  source 1..75: mol_type = other DNA
acgaggtggtgggggtttttgaccggattgaagagaaacgtgatgccatgcagtcgctggtcctgccaccaccgg

SEQ ID NO: 41956 - DNA, 75 bp, synthetic construct
  source 1..75: mol_type = other DNA
cagaggatgtagtcatcaatatcgaaagcaatgacttaccacatcataatccattaaatcatgttgatatcgttg

SEQ ID NO: 41957 - DNA, 75 bp, synthetic construct
  source 1..75: mol_type = other DNA
ccgttcttaccaatgctgccgcaaatgcgcttggcgccgcaggagggtttgcagtatccaaaatccccggagtag

SEQ ID NO: 41958 - DNA, 75 bp, synthetic construct
  source 1..75: mol_type = other DNA
ccgatgatagtaccgctgccgccagctcaatgacgtattgccaggccgtcctctggattgaacctttgctggctg

SEQ ID NO: 41959 - DNA, 75 bp, synthetic construct
  source 1..75: mol_type = other DNA
acactatcggcaggagacacgctggttgtctggaagctggacaggttggggcgcagtatgcggcatcttgttacg

SEQ ID NO: 41960 - DNA, 75 bp, synthetic construct
  source 1..75: mol_type = other DNA
caacaaatgaccaaaacacagatttacaaagaaatgcactgaattgcgcaggatgtgaactgatttttgaagata

SEQ ID NO: 41961 - DNA, 75 bp, synthetic construct
  source 1..75: mol_type = other DNA
cgccggggatacaccaaacatatgctgcgtctgcggcgggccggagagataaacggagaacatgtccctgaaatt

SEQ ID NO: 41962 - DNA, 75 bp, synthetic construct
  source 1..75: mol_type = other DNA
tgatagttctggggtagactattcgcctatagctgctgggtttaaagggcttcttccctatacaagcaaaacacg

SEQ ID NO: 41963 - DNA, 75 bp, synthetic construct
  source 1..75: mol_type = other DNA
attccctttgcatgatgaaataggtattaattttaaagaccttcctggtccattaaaaaatgcattaagcaatat

SEQ ID NO: 41964 - DNA, 75 bp, synthetic construct
  source 1..75: mol_type = other DNA
gattctccgacgtgaaaagacctgtgatctgcctgttcctgctgatgtcgctggtgggctgctcaaatacgcgta

SEQ ID NO: 41965 - DNA, 75 bp, synthetic construct
  source 1..75: mol_type = other DNA
tatcgttatcaccctgtaggcgatatacagactgaagaaacaaccgggcagactcaggaaaatgaaaaccgctaa

SEQ ID NO: 41966 - DNA, 75 bp, synthetic construct
  source 1..75: mol_type = other DNA
ggcatccggcaaatccttcctgaaacgccagtatatgggatacagcctgccagtctgggccggctgtgtcctcat

SEQ ID NO: 41967 - DNA, 75 bp, synthetic construct
  source 1..75: mol_type = other DNA
atgaaaaacgaacatgaagatcccggcagctttggcgaaacgccggcaccggcatccggcaaatccttcctgaaa

SEQ ID NO: 41968 - DNA, 75 bp, synthetic construct
  source 1..75: mol_type = other DNA
cctatcgaaaattatgatgagtgtaagaaaaaatgcaatcatatgaattatatagcggatgtcaatgctcaatta

SEQ ID NO: 41969 - DNA, 75 bp, synthetic construct
  source 1..75: mol_type = other DNA
cgcatggtcatcatcgtcagcagtgtggcctcagtggagctgaccattgacaccacaacggtgatggcaacgcag

SEQ ID NO: 41970 - DNA, 75 bp, synthetic construct
  source 1..75: mol_type = other DNA
ccggggcgctgtgcctgtgctggtcgtggctggttgcgcgttatctcgatcgcggtcagtgggtcgcctccggag

SEQ ID NO: 41971 - DNA, 75 bp, synthetic construct
  source 1..75: mol_type = other DNA
cgaagttgaagtgaccgaagtgatggtgaaagtgggcgacaaagttgccgctgaacagtcactgatcaccgtaga

SEQ ID NO: 41972 - DNA, 75 bp, synthetic construct
  source 1..75: mol_type = other DNA
gcgctcggcatcgtgccttacggcgtggcggacaccatcaactatcgcctgtgggtcagcgaaccgccattgccg

SEQ ID NO: 41973 - DNA, 75 bp, synthetic construct
  source 1..75: mol_type = other DNA
agcgggcggaagtattccgtaaacagcgcgccacgtctttatcttcccctgccggtccccgttctgcttcctctt

SEQ ID NO: 41974 - DNA, 75 bp, synthetic construct
  source 1..75: mol_type = other DNA
ttcaatgacaacatcaacggtgaagatgccacaactgctggcgatgacaacgatgacccggacggaactattccg

SEQ ID NO: 41975 - DNA, 75 bp, synthetic construct
  source 1..75: mol_type = other DNA
aggtgagatcgattttacctggagtgaacgctatcaactcagcaaagactccatgacctgggaactaaaaccggg

SEQ ID NO: 41976 - DNA, 75 bp, synthetic construct
  source 1..75: mol_type = other DNA
ccatgctggaagctcacaccctgccgctgacggaacagggcatgtcgcaactgctggctgataaccgccatgatt

SEQ ID NO: 41977 - DNA, 75 bp, synthetic construct
  source 1..75: mol_type = other DNA
cctgatccgggggtttgaggtgcagcttacggcactgttgcaaatagtcggtggtgataaacttatcatcccctt

SEQ ID NO: 41978 - DNA, 75 bp, synthetic construct
  source 1..75: mol_type = other DNA
ggattgaggatactgatggccagccactgagcaacatactgctgctggctgactgtatcgcgatgataaatccgg

SEQ ID NO: 41979 - DNA, 75 bp, synthetic construct
  source 1..75: mol_type = other DNA
cacctttgagcggaagctgttgccgcgtcttgagcgcgttaacgagctgtgcgggatgaatgaatctgcgtcgat

SEQ ID NO: 41980 - DNA, 75 bp, synthetic construct
  source 1..75: mol_type = other DNA
gtgcacatatatggtcaggtggctggtgttgcacgcgcgttcaacttaaccccgctctactggaaaaaataccgt

SEQ ID NO: 41981 - DNA, 75 bp, synthetic construct
  source 1..75: mol_type = other DNA
aagtataaagaacgtccggacgttcgctggcgtcgtatcaaaaaaatcgaagctgatttgcgcaaggctgaaaag

SEQ ID NO: 41982 - DNA, 75 bp, synthetic construct
  source 1..75: mol_type = other DNA
tgaggaaagccgccgctggctggcatcgtgcggcctgaccgtggagcagatgcaaaaccagatggacccggtgta

SEQ ID NO: 41983 - DNA, 75 bp, synthetic construct
  source 1..75: mol_type = other DNA
gaccgggcatcaggtgccggaaatcattctacttaacagccatgacggctcatcaagctaccagatgctgccggg

SEQ ID NO: 41984 - DNA, 75 bp, synthetic construct
  source 1..75: mol_type = other DNA
tgtcgcggaaatccttcttgggcgccaccgttggccttcctgtaaaggatctgggtccagcgagccttgcggcgg

SEQ ID NO: 41985 - DNA, 75 bp, synthetic construct
  source 1..75: mol_type = other DNA
ttgccatcacggcggtgcagcacgtaccggaaaaagaagccattgtggataacggggccagctttgagccgcagt

SEQ ID NO: 41986 - DNA, 75 bp, synthetic construct
  source 1..75: mol_type = other DNA
aaggctttgagccgttctttgcctgccagacaaaggtccgtgaccagagcaagcgggaacacaccaaacacatgc

SEQ ID NO: 41987 - DNA, 75 bp, synthetic construct
  source 1..75: mol_type = other DNA
gcccgtgaagccctgattgacgctctgcttaccggacgtaaccagatttttctttccgccagcaaggcacaggct

SEQ ID NO: 41988 - DNA, 75 bp, synthetic construct
  source 1..75: mol_type = other DNA
gtggtggcgaaaacatcttatgtggcagaggacggtaccgaaaaacgttatctgccggagggcacgctggtcctg

SEQ ID NO: 41989 - DNA, 75 bp, synthetic construct
  source 1..75: mol_type = other DNA
aaaacctgttatttatggttctttagctgctaaaatagcaggggtgaaaaaaatatttagtctcttggaaggact

SEQ ID NO: 41990 - DNA, 75 bp, synthetic construct
  source 1..75: mol_type = other DNA
cagctgattaaacgtctgcagcaattcgtaccggatgccttacccgtggtgcgtaaagcctgctggtactgcaga

SEQ ID NO: 41991 - DNA, 75 bp, synthetic construct
  source 1..75: mol_type = other DNA
cgaagagcaccagccggtgacggaatcccagttgctggctccccgccgctggcaggatgaatccggcgatctgtg

SEQ ID NO: 41992 - DNA, 75 bp, synthetic construct
  source 1..75: mol_type = other DNA
ttaggcgataaggtaaaagatctctccggcgtgaagatcttcactacctttgactcggtggcccaggacgcggca

SEQ ID NO: 41993 - DNA, 75 bp, synthetic construct
  source 1..75: mol_type = other DNA
gttcgccaaattattgaacatatgtggtttcaacgtaaggcattattaaacggtcgtaatggcaatctatcgaat

SEQ ID NO: 41994 - DNA, 75 bp, synthetic construct
  source 1..75: mol_type = other DNA
ccatacccgggccattcacagcatcgacacggacattaagctcaatcgcgcattgtgggtgatggcagaaacgct

SEQ ID NO: 41995 - DNA, 75 bp, synthetic construct
  source 1..75: mol_type = other DNA
accggcgtcggtcacggtgtttatgagaacgtaaaagcgttctttcctgccgtgcgggagtttgtctacaacccc

SEQ ID NO: 41996 - DNA, 75 bp, synthetic construct
  source 1..75: mol_type = other DNA
taatggacaacgggaacccatttgtaacgccccagtcaacgcctttttgtctttacggcaagtacactttcaact

SEQ ID NO: 41997 - DNA, 75 bp, synthetic construct
  source 1..75: mol_type = other DNA
cttatgcgccgaaaggcaaggagcagcaggctatgaagcagcaaaaggcgatgctaatcgccctgatcgtcatct

SEQ ID NO: 41998 - DNA, 75 bp, synthetic construct
  source 1..75: mol_type = other DNA
tcttgtcccccttatgtgagaaaacggtgttgcttgaaatcgatcttggtagtggtactgacgatgaaatagccg

SEQ ID NO: 41999 - DNA, 75 bp, synthetic construct
  source 1..75: mol_type = other DNA
tacagataacgggcaactggtttttaatttgcgtgataaaggggctctgccgtttctggagggacatctgcatga

SEQ ID NO: 42000 - DNA, 75 bp, synthetic construct
  source 1..75: mol_type = other DNA
ccatacccgtaccattcacagcattgacactgacattaagctcaaccgcgcattgtgggtgatggcggaaacgct

SEQ ID NO: 42001 - DNA, 75 bp, synthetic construct
  source 1..75: mol_type = other DNA
atggaaccggacgcaactgaacatcatcaggacacgcagccgctggatgctcagtcacaggtaaattctgttgat

SEQ ID NO: 42002 - DNA, 75 bp, synthetic construct
  source 1..75: mol_type = other DNA
gcgaactgcgtaagctgccgcgcggggtgagtatcgccagcgagtttgacgaccgtgtcgaggccgtccgggctg

SEQ ID NO: 42003 - DNA, 75 bp, synthetic construct
  source 1..75: mol_type = other DNA
caaagagattttgtcaaagtatgggattcatgaacaggaaagtgttgtagtaccttcacaggaaccacaggaggt

SEQ ID NO: 42004 - DNA, 75 bp, synthetic construct
  source 1..75: mol_type = other DNA
aggtgacagcaaaacggtgcagctcaatcacggctggaacgaaaccgcattcacccctaaaaacggccagcgcta

SEQ ID NO: 42005 - DNA, 75 bp, synthetic construct
  source 1..75: mol_type = other DNA
catccaggtgccgtcaaactatgacccggaaaaacgcacgtacagtggtatctgggacggcagcctgaaaccggc

SEQ ID NO: 42006 - DNA, 75 bp, synthetic construct
  source 1..75: mol_type = other DNA
cagcagacaccagcattcggtcgaagagtgtctggggtcatagaaattgccgatgggagccgccgtcgtaaagct

SEQ ID NO: 42007 - DNA, 75 bp, synthetic construct
  source 1..75: mol_type = other DNA
agcggtatcgatctcgccgtgtcctacaacatgcaggtcgatcatggcttcgcgcagccgctggagtttttgctc

SEQ ID NO: 42008 - DNA, 75 bp, synthetic construct
  source 1..75: mol_type = other DNA
ataaactggatgtgcccattaagttcatctggaacttcaaggacttgaagcggacccttagtaggcctgaggtcc

SEQ ID NO: 42009 - DNA, 75 bp, synthetic construct
  source 1..75: mol_type = other DNA
tgaattcaccatgacgcagtctgcaccgctgatggtgctgccggatccggatgagtttgtggtggtacaggtgaa

SEQ ID NO: 42010 - DNA, 75 bp, synthetic construct
  source 1..75: mol_type = other DNA
tgagaaagatattccggtggccgagctggtactgcttatcgacccggcttggttcagcatcctgatggaacataa

SEQ ID NO: 42011 - DNA, 75 bp, synthetic construct
  source 1..75: mol_type = other DNA
tggtgtactggaaagcggtatcacagaggcaatgtatcaggaaatggaacggctgattgctgatgccaaacctgc

SEQ ID NO: 42012 - DNA, 75 bp, synthetic construct
  source 1..75: mol_type = other DNA
gaagaaaagcgcgccagccgtcaggtgacagtcccggcggtgatgctggaaaaagtgatggcgctggcaggcagt

SEQ ID NO: 42013 - DNA, 75 bp, synthetic construct
  source 1..75: mol_type = other DNA
aaaagtgatggtgatggctggtagtgaaatttatcgcctccatgctgtcgggagcgagaacgggggcgacggtga

SEQ ID NO: 42014 - DNA, 75 bp, synthetic construct
  source 1..75: mol_type = other DNA
aaatttattctgaacgactggcgaagattgcagatacctgggaattgaaaaaagatgaaattattcatccccttc

SEQ ID NO: 42015 - DNA, 75 bp, synthetic construct
  source 1..75: mol_type = other DNA
atgttctttaaaacatcaaacccttccgcgctggccgcgtggcaaaaatatcagcaggactgccagaaagttaag

SEQ ID NO: 42016 - DNA, 75 bp, synthetic construct
  source 1..75: mol_type = other DNA
attacagcttgttgctcatcgacaccgatcgttttaaacacattaacgatctctatgggcattctaaaggtgatg

SEQ ID NO: 42017 - DNA, 75 bp, synthetic construct
  source 1..75: mol_type = other DNA
acccttgaaccccacatttttggctggatggaccggttttgcagggactacagcggcgggatatggaatttcttt

SEQ ID NO: 42018 - DNA, 75 bp, synthetic construct
  source 1..75: mol_type = other DNA
cgctgaccggacatgaaaatgaggtggtatcagcgcagccggataccgtgactgatacggctgatctggtcacgg

SEQ ID NO: 42019 - DNA, 75 bp, synthetic construct
  source 1..75: mol_type = other DNA
ggagagtttattacgctgctcggcccgtccggctgcggcaagacgacgctgctgaatctgatggcgggtttcgcc

SEQ ID NO: 42020 - DNA, 75 bp, synthetic construct
  source 1..75: mol_type = other DNA
ctccctgcgttatagcacccgccagtcctgttccttcgccaacaggcgcattgtctttctggcgactaattcagg

SEQ ID NO: 42021 - DNA, 75 bp, synthetic construct
  source 1..75: mol_type = other DNA
gcagacctgtagcgggatttctgatctgcaggtgccgctgcgtgacttgtggaatccagcaacctgtccggtcag

SEQ ID NO: 42022 - DNA, 75 bp, synthetic construct
  source 1..75: mol_type = other DNA
gcttcttgcgattgttactggtcagcgccgtgatgacatttgccacatgcgtttttcagatgtgtggaacgaaca

SEQ ID NO: 42023 - DNA, 75 bp, synthetic construct
  source 1..75: mol_type = other DNA
ttctctgtggatcgctgggacgaaggctggacagaaagcgtcaaacgccaggtagtgaaggatgctttttatatt

SEQ ID NO: 42024 - DNA, 75 bp, synthetic construct
  source 1..75: mol_type = other DNA
atgcaacgcctgaaaaacactttatccgtaacgcaatgcttcttgcgattgttactggtcagcgccgtgatgaca

SEQ ID NO: 42025 - DNA, 75 bp, synthetic construct
  source 1..75: mol_type = other DNA
ttgcgaagggggaaaaaattaattattccgcacaggatagcgacattttaacgaccatcggattcaggcctgacg

SEQ ID NO: 42026 - DNA, 75 bp, synthetic construct
  source 1..75: mol_type = other DNA
gataaaaacttccgtggtaagccagagcagaacccgcagcagtgcatcggctgtgcggcctgcgtcaatgcctgc

SEQ ID NO: 42027 - DNA, 75 bp, synthetic construct
  source 1..75: mol_type = other DNA
agagcgccagaaaaaagaccggtcgtgttaagcgaaaaatgtttgcgaaacttatcaccagtcgttttttgcata

SEQ ID NO: 42028 - DNA, 75 bp, synthetic construct
  source 1..75: mol_type = other DNA
gctggcggttctatggtcttgtaggtttgggcgcaatagtactgctttccgctggcgtctgggcgttgcaatatg

SEQ ID NO: 42029 - DNA, 75 bp, synthetic construct
  source 1..75: mol_type = other DNA
gtccactgacgcctgcgaacgtgaaggatgttatcagtgccatcagggcaaaactggattcgctggttactgccg

SEQ ID NO: 42030 - DNA, 75 bp, synthetic construct
  source 1..75: mol_type = other DNA
ttatcgctccggggctggcgatgccgcacggacggccagaagagggagtcaaaaaaactggatttgctctcgtca

SEQ ID NO: 42031 - DNA, 75 bp, synthetic construct
  source 1..75: mol_type = other DNA
gaccgtgaagcgctggaagaattaaagtcgattatgacagaactgtttgaaggtgaaattgttgagccttacttc

SEQ ID NO: 42032 - DNA, 75 bp, synthetic construct
  source 1..75: mol_type = other DNA
cggaaacttgccggattgaagccggtgataaacaaatgacggtcaatatggggcaaatcagcagtaaccggtttc

SEQ ID NO: 42033 - DNA, 75 bp, synthetic construct
  source 1..75: mol_type = other DNA
atgaacaattttgaattcaaaccagaagcgacagctcatggcataaaaattgacaatacaaccattgattatgtt

SEQ ID NO: 42034 - DNA, 75 bp, synthetic construct
  source 1..75: mol_type = other DNA
attttcatctaaatagttgggtaaaggatcatatgccatcttacttaaattctgatggcgtttttagctcatttc

SEQ ID NO: 42035 - DNA, 75 bp, synthetic construct
  source 1..75: mol_type = other DNA
gagttcgtgaaggcaagcttgatctggatattttaaaaaacataaaaggtataggtgctaagacgcttagtaata

SEQ ID NO: 42036 - DNA, 75 bp, synthetic construct
  source 1..75: mol_type = other DNA
ccggggccggatggtggcgcaccgttacgcaggcaggccggagatgcgttaccgctatgacgacaccgggcgcgt

SEQ ID NO: 42037 - DNA, 75 bp, synthetic construct
  source 1..75: mol_type = other DNA
ggatgttaatgatggtgcaacccttgcgggacgccattcatgcagcaaaagccgcggcgggtgaaggcgcaaagg

SEQ ID NO: 42038 - DNA, 75 bp, synthetic construct
  source 1..75: mol_type = other DNA
tcgtcgagggtggaaacagagccttcgaatgtaagatagaagacattgaaataattggtaaaattataagtttaa

SEQ ID NO: 42039 - DNA, 75 bp, synthetic construct
  source 1..75: mol_type = other DNA
gccaccgactgtaccgggcggaagacagagcggaacgtctggcgctggtcgcctgcctgctggctgttattccgg

SEQ ID NO: 42040 - DNA, 75 bp, synthetic construct
  source 1..75: mol_type = other DNA
cgtccaatgatgcagtggtggacgaattttgttcaagcggcagatcgtggaagtattattgaaggtgggatgaaa

SEQ ID NO: 42041 - DNA, 75 bp, synthetic construct
  source 1..75: mol_type = other DNA
atggcccgttcagctaaaccccgtaaacgtaaacccgcctctcaaagaagcaaacttccccgctatgtcgtgaag

SEQ ID NO: 42042 - DNA, 75 bp, synthetic construct
  source 1..75: mol_type = other DNA
tgacactgtcgatcaggatacccctatcagcccggaaaatgcgctgaccgggcatgaaaatgaggtggtatcagc

SEQ ID NO: 42043 - DNA, 75 bp, synthetic construct
  source 1..75: mol_type = other DNA
ccattttcgatcaattctctgaagctcgccagaaaggttttctcgccgttatggatttcaaagagcgcggcattc

SEQ ID NO: 42044 - DNA, 75 bp, synthetic construct
  source 1..75: mol_type = other DNA
caaacttccccgctatgttgtgaaacttcatccggatgatttttttgacgaagaagacgctgaagttctgcgctt

SEQ ID NO: 42045 - DNA, 75 bp, synthetic construct
  source 1..75: mol_type = other DNA
atcatcttgggcagttaaatcctccggcgcttagcggcagcgacattctgaaagtggtttacggcgcaacattcc

SEQ ID NO: 42046 - DNA, 75 bp, synthetic construct
  source 1..75: mol_type = other DNA
ctgagcaggcagcaataactgcctcagcggtccctgacgagttacgcatcggcttctggccgcagcactttggct

SEQ ID NO: 42047 - DNA, 75 bp, synthetic construct
  source 1..75: mol_type = other DNA
acagcgacaagatccggagatggcaaacgtgattttagtcaacgatgacgaaagttgcgggtattcggctacgga

SEQ ID NO: 42048 - DNA, 75 bp, synthetic construct
  source 1..75: mol_type = other DNA
gcattataaactatcatcctgtcattacatggacagtacctgttgcatttttctttttagtagtgctggctggta

SEQ ID NO: 42049 - DNA, 75 bp, synthetic construct
  source 1..75: mol_type = other DNA
aggaagccggattactggcatcaacagggagcacaggcgactcgtatgacaacgcgatggctgagagcatcaatg

SEQ ID NO: 42050 - DNA, 75 bp, synthetic construct
  source 1..75: mol_type = other DNA
aatccagataagtatcctaattatcgtcttttgattcactcagccaaattacaaaatgaaataaagagccactat

SEQ ID NO: 42051 - DNA, 75 bp, synthetic construct
  source 1..75: mol_type = other DNA
gcatgattttcaacgatgagatggtccgggcaattcttggcgggaataaaacacagactcgcaggattgttgaag

SEQ ID NO: 42052 - DNA, 75 bp, synthetic construct
  source 1..75: mol_type = other DNA
atatatacacagggcttttgttattgcttgctctggcatttgtgttgttctacgaagcaatcaatggttttcatg

SEQ ID NO: 42053 - DNA, 75 bp, synthetic construct
  source 1..75: mol_type = other DNA
aactggtgaatgcaggacgcagcaaaaaatacactctcggcgcggtaaatagcgtgattcagcgcgcttcttcgc

SEQ ID NO: 42054 - DNA, 75 bp, synthetic construct
  source 1..75: mol_type = other DNA
aatgtcggtaattttggtagcggtatcgtaaatgtcagtaatggtgccacccttaattcaacgggctatggattt

SEQ ID NO: 42055 - DNA, 75 bp, synthetic construct
  source 1..75: mol_type = other DNA
aacttgagaaaagtatatgcaacgtctaaaataagttattatgacactggtgataatttagggggcgctgggggc

SEQ ID NO: 42056 - DNA, 75 bp, synthetic construct
  source 1..75: mol_type = other DNA
agtgccaatattgaggctgatactgacgcgccagtgacgccaacgagtacaaccgaaaatattaactggacttac

SEQ ID NO: 42057 - DNA, 75 bp, synthetic construct
  source 1..75: mol_type = other DNA
ggttactgctctggtacaaaataaagatattggttttattaacgtcgggcagaatgccatcattaaagtggaggc

SEQ ID NO: 42058 - DNA, 75 bp, synthetic construct
  source 1..75: mol_type = other DNA
acggcaataaccgcgccatccgtctgccccgggacctggattttgatggcgtcagcgagctggagatcgtccggg

SEQ ID NO: 42059 - DNA, 75 bp, synthetic construct
  source 1..75: mol_type = other DNA
gcgcagctggacagggccgatccggactttatggcggagcgtgaggatgtggtcagcgatgaaggacgctttgag

SEQ ID NO: 42060 - DNA, 75 bp, synthetic construct
  source 1..75: mol_type = other DNA
cgggaaggggacagcatcattctgcgccccgtccggccgacctggggctcattcctggagctagaaaaggccgat

SEQ ID NO: 42061 - DNA, 75 bp, synthetic construct
  source 1..75: mol_type = other DNA
gcttatggatgatgatctaaagcctgaaatagaatgtctttataacctgatatcctctgcaactgaacatggtat

SEQ ID NO: 42062 - DNA, 75 bp, synthetic construct
  source 1..75: mol_type = other DNA
gtttctaaattgagcgaaaataatcccaaaatagaatatcataatactggagcgaatattggaggcgctggcggg

SEQ ID NO: 42063 - DNA, 75 bp, synthetic construct
  source 1..75: mol_type = other DNA
gactggtaccatcgaactgccggaaggtgtagagatggtaatgccgggcgacaacatcaaaatggttgttaccct

SEQ ID NO: 42064 - DNA, 75 bp, synthetic construct
  source 1..75: mol_type = other DNA
tatgcgctgggaaggtgtcagcgatggcctgaaggtgaccgccgggagtgttattcagcgcgatgacctggttca

SEQ ID NO: 42065 - DNA, 75 bp, synthetic construct
  source 1..75: mol_type = other DNA
ctggacgatgcctttgagcatggtgcggatgtcagcgttgttcacgacgttgttcgtgaactgatggaagaaaag

SEQ ID NO: 42066 - DNA, 75 bp, synthetic construct
  source 1..75: mol_type = other DNA
cgccggtgacctgaccgccgtcattgccccggacggcagcagaaacgggacacagtacgatgcgtggggaaaggc

SEQ ID NO: 42067 - DNA, 75 bp, synthetic construct
  source 1..75: mol_type = other DNA
atggatttccagttatattcgctcggcgcagcgttagtgtttcatgaaatattttttcctgaatcatcaacggca

SEQ ID NO: 42068 - DNA, 75 bp, synthetic construct
  source 1..75: mol_type = other DNA
tggtcaggtactggctaagccgggcaccatcaagccgcacaccaagttcgaatctgaagtgtacattctgtccaa

SEQ ID NO: 42069 - DNA, 75 bp, synthetic construct
  source 1..75: mol_type = other DNA
ggcagacggcggcttgtcacctatgctgggccaggacgcacaagggccaacagcggtactgaagtcagtcagtaa

SEQ ID NO: 42070 - DNA, 75 bp, synthetic construct
  source 1..75: mol_type = other DNA
atggctgccggagttgcatatgttgcgatgaagccaatcgttgaaaacctcggaatgagctggggtactcagcaa

SEQ ID NO: 42071 - DNA, 75 bp, synthetic construct
  source 1..75: mol_type = other DNA
gcgctgacgctgacggatgttacaaaaaatgcagcgtatggcgttgagatagaaagtctggtgctggagataaat

SEQ ID NO: 42072 - DNA, 75 bp, synthetic construct
  source 1..75: mol_type = other DNA
gaatgcgacgccatgacagcgcactattatcacctgcgggattacgcgctcagccacgcggaatgcagcgccatc

SEQ ID NO: 42073 - DNA, 75 bp, synthetic construct
  source 1..75: mol_type = other DNA
aactgtctaacccggttcgtctggttaaagattacctcgacggcgttgacgttgctgaaggtgaactggttgttc

SEQ ID NO: 42074 - DNA, 75 bp, synthetic construct
  source 1..75: mol_type = other DNA
atcagtattaattggttcaccgtaaatggttatcgggtccatggtttgggcggtggatattgctgcataatgtta

SEQ ID NO: 42075 - DNA, 75 bp, synthetic construct
  source 1..75: mol_type = other DNA
atgctaaccgtccagaagaagatattttcactggctggtatgtcgccaaaatccagcaatatgacagcaaagtct

SEQ ID NO: 42076 - DNA, 75 bp, synthetic construct
  source 1..75: mol_type = other DNA
cgctaacacctttatcgcggcacaaggccacgatgtgggtaaatccctgtacgaagctgacctggttgacgaagc

SEQ ID NO: 42077 - DNA, 75 bp, synthetic construct
  source 1..75: mol_type = other DNA
caaaaccgcacgttaacgtcggtactatcggccacgttgaccaaggtaaaacaacactgaccgctgcaatcacga

SEQ ID NO: 42078 - DNA, 75 bp, synthetic construct
  source 1..75: mol_type = other DNA
caaaaccgcacgttaacgtaggtactatcggccacgttgaccaaggtaaaaccacactgaccgctgcaatcacga

SEQ ID NO: 42079 - DNA, 75 bp, synthetic construct
  source 1..75: mol_type = other DNA
tatcggccacgttgaccacggtaaaactactctgaccgctgcaatcacgaccgtactggctaaaacctacggcgg

SEQ ID NO: 42080 - DNA, 75 bp, synthetic construct
  source 1..75: mol_type = other DNA
tatcggccacgttgaccatggtaaaactaccctgaccgctgcaatcacgaccgtactggctaaaacctacggcgg

SEQ ID NO: 42081 - DNA, 75 bp, synthetic construct
  source 1..75: mol_type = other DNA
ggtaaaaatgcccgctcccttatcctctggacagaacgtggcgctgcccgccatgcaaaaatgctcgaaaccgat

SEQ ID NO: 42082 - DNA, 75 bp, synthetic construct
  source 1..75: mol_type = other DNA
tgccgtggcagaaaatgcccgccaaatctggactgacagcccctttgtcttctgtgccgacaacgatcatcaacg

SEQ ID NO: 42083 - DNA, 75 bp, synthetic construct
  source 1..75: mol_type = other DNA
accatcagtcagtatttctgattctggaaaaaatactattctgaaaacatcctcctctcaagccctaaacagggc

SEQ ID NO: 42084 - DNA, 75 bp, synthetic construct
  source 1..75: mol_type = other DNA
atgctcacgtcatgttaaccctgaaaaccattggtccagacggcttcggtaaaaaagacagaagctggaatgata

SEQ ID NO: 42085 - DNA, 75 bp, synthetic construct
  source 1..75: mol_type = other DNA
gttcatacgacgtgtttgcgaccctacgttctgatgcgaaagtaccgctggtggttaatggggtgcgtatcgagc

SEQ ID NO: 42086 - DNA, 75 bp, synthetic construct
  source 1..75: mol_type = other DNA
atgacaaaaaaaccgtggcgcgcagggaaggatttatctgcggttgtggaaaatatggagattggcacagggcag

SEQ ID NO: 42087 - DNA, 75 bp, synthetic construct
  source 1..75: mol_type = other DNA
ccctttcccttcttcctgacggcagctatggctatttcacccgtgaagttgaaaatcagcacggtacgccctgca

SEQ ID NO: 42088 - DNA, 75 bp, synthetic construct
  source 1..75: mol_type = other DNA
agaagctttacgattacacatcttgctgaaccagaagagattgtattaccagaaacgcgctccggctcttcgacc

SEQ ID NO: 42089 - DNA, 75 bp, synthetic construct
  source 1..75: mol_type = other DNA
cgtttccgtttaaatttagctggtaaagtattagatgttattgagtgggcgaataagaaaaatgaaaagacgaat

SEQ ID NO: 42090 - DNA, 75 bp, synthetic construct
  source 1..75: mol_type = other DNA
ttatgaagagcgtggacgtcgtgtgcgttatgacttcaccctgccgggagaagcgggcgaccggggcggccttga

SEQ ID NO: 42091 - DNA, 75 bp, synthetic construct
  source 1..75: mol_type = other DNA
ggcaggtaaagtcagtgtgattgacgcgaaaagctataaagtggtgaaaacgttcgatacgccgactcatccgaa

SEQ ID NO: 42092 - DNA, 75 bp, synthetic construct
  source 1..75: mol_type = other DNA
gaacatggggcgaatcgtcgttgacgtcgatggtgttactctcgctgaactgattaacgtggcctgcgataatgg

SEQ ID NO: 42093 - DNA, 75 bp, synthetic construct
  source 1..75: mol_type = other DNA
catatcacggaaacagacaacgcctggctgtactcgctgtcgcatcagacgaatgacaccggcgaatcagaatgg

SEQ ID NO: 42094 - DNA, 75 bp, synthetic construct
  source 1..75: mol_type = other DNA
agacgatcaggggcgggtggtttcctatgaaaaacatctgctgtcgatgaaagataacgatcagactgccaacct

SEQ ID NO: 42095 - DNA, 75 bp, synthetic construct
  source 1..75: mol_type = other DNA
tgacagtttttcttaatacaggcgaaccagtcgatcttgttattggtatacatgactcaatgaaagaatgcatgg

SEQ ID NO: 42096 - DNA, 75 bp, synthetic construct
  source 1..75: mol_type = other DNA
tctgcggcttaaacgcctggggctgtcaaaaacgttccgccgtctggttgtcacactcatccgacgttatggcgt

SEQ ID NO: 42097 - DNA, 75 bp, synthetic construct
  source 1..75: mol_type = other DNA
cggaaattgagcgtggcgctgatgccgtaggcggcattccctctactgcgttgaaaggcgcgggtctgttaccac

SEQ ID NO: 42098 - DNA, 75 bp, synthetic construct
  source 1..75: mol_type = other DNA
gatggaatttatatcagtatcctttaaatccactacaacaaattgaccctatgggattattgcagacttgggatg

SEQ ID NO: 42099 - DNA, 75 bp, synthetic construct
  source 1..75: mol_type = other DNA
ggtatgaaatgcgccgccagcttgcgtacaagcagctctggcgtggcggtcaggtgcttgctgttccgccagcgt

SEQ ID NO: 42100 - DNA, 75 bp, synthetic construct
  source 1..75: mol_type = other DNA
gagctgtgggaataccgccacgacgccagcggcagacgaacagagaaacgctgcgaccggaagaaaatccgcttc

SEQ ID NO: 42101 - DNA, 75 bp, synthetic construct
  source 1..75: mol_type = other DNA
ctactggtacaagtatgttggcctgaacggtgctatcgtcggtatgaccaccttcggtgaatctgctccggcaga

SEQ ID NO: 42102 - DNA, 75 bp, synthetic construct
  source 1..75: mol_type = other DNA
cttatcctctcgcatctgcgttttgttatccacattgcccgacagtattccggctatggtttaccacaagctgat

SEQ ID NO: 42103 - DNA, 75 bp, synthetic construct
  source 1..75: mol_type = other DNA
aaacgcaacaacaggtttatggcgtgacattacccacttcactgctatttattgctggacacgacactaatctgg

SEQ ID NO: 42104 - DNA, 75 bp, synthetic construct
  source 1..75: mol_type = other DNA
gtggacctgaccctgtttgaggagggtgggcagttacccggcatttatccggttgacattatcctgaatggttcc

SEQ ID NO: 42105 - DNA, 75 bp, synthetic construct
  source 1..75: mol_type = other DNA
gttggaacatagattttctaccaagatcagacgaacaaaatgcagcgtataaaaaccccgacaatgaccctcgtg

SEQ ID NO: 42106 - DNA, 75 bp, synthetic construct
  source 1..75: mol_type = other DNA
ctgcggcgcagcggcgctatttatcgcagcattaatctgcgggatgcaaatattcaaattgcatacgaattattc

SEQ ID NO: 42107 - DNA, 75 bp, synthetic construct
  source 1..75: mol_type = other DNA
atgagaaaaaataatacagcaataatattcggcggcctgtttttttcctgcagcgtgatggccggagccggtacg

SEQ ID NO: 42108 - DNA, 75 bp, synthetic construct
  source 1..75: mol_type = other DNA
ccttcggtgagtcagctccggcagagttgctgttcgaagagttcggcttcaccgtcgacaacgtcgttgcgaaag

SEQ ID NO: 42109 - DNA, 75 bp, synthetic construct
  source 1..75: mol_type = other DNA
tgattaacgtggtctgtgataatggccactcccttcgtgttgttgatgcatctgaccgggcctcaacagactgca

SEQ ID NO: 42110 - DNA, 75 bp, synthetic construct
  source 1..75: mol_type = other DNA
gggatgaccgtacagggcgacaaaacatctggtacagcaacgctctataacgcatggggcggtgctgtaactgtt

SEQ ID NO: 42111 - DNA, 75 bp, synthetic construct
  source 1..75: mol_type = other DNA
tattattccgttattcaggcgggcggggatgttaagacccgttttaccagcagtatcaataacggaacaaccact

SEQ ID NO: 42112 - DNA, 75 bp, synthetic construct
  source 1..75: mol_type = other DNA
cctatccgtttgcggtatcaggtggcaaggttgtgatcccgaaagcgatgatttatgacgcggtgattgaaacac

SEQ ID NO: 42113 - DNA, 75 bp, synthetic construct
  source 1..75: mol_type = other DNA
ggctgctctgaaagaaggcgtgagcaaagacgacgcagaagcactgaaaaaagctctggaagaagctggcgctga

SEQ ID NO: 42114 - DNA, 75 bp, synthetic construct
  source 1..75: mol_type = other DNA
tgaagcctgtcgccggaggctggcagcagacataaaatgtgcccgtcagttaactgtaacaaagaatgatacacc

SEQ ID NO: 42115 - DNA, 75 bp, synthetic construct
  source 1..75: mol_type = other DNA
tacggcgaattaggggttggtggatatatggatttagagggtgagaataaacataaatacagcgacggcacctat

SEQ ID NO: 42116 - DNA, 75 bp, synthetic construct
  source 1..75: mol_type = other DNA
atggctttttaccaaatcattacacccggttcaatttcaaagaaaaacccacttaatcccttccccgctggtgaa

SEQ ID NO: 42117 - DNA, 75 bp, synthetic construct
  source 1..75: mol_type = other DNA
attcggcagataacatcggcggcgtgtattaccgtccgcttcagaaactgattaatggcacctggtataacgtgg

SEQ ID NO: 42118 - DNA, 75 bp, synthetic construct
  source 1..75: mol_type = other DNA
gatattaatcctgatttaatcaacatctataaaaaggttgccgctgattgtgaatcgtttatatctcgcgccaga

SEQ ID NO: 42119 - DNA, 75 bp, synthetic construct
  source 1..75: mol_type = other DNA
tgccttcctggatgaataaaggcgaaccggggaaattgctgaacacggcgcggcggttctgggctgaggtttacg

SEQ ID NO: 42120 - DNA, 75 bp, synthetic construct
  source 1..75: mol_type = other DNA
gcagtaaatacggtgtgccttttgccatgatcctgcgtgcttcttacggtgtacgtggtgcactgtttcccggat

SEQ ID NO: 42121 - DNA, 75 bp, synthetic construct
  source 1..75: mol_type = other DNA
cagcgcggccacaaataccgccgcaccgccgccgggacaaagccccgcaccactgcgccgcataccctataaccc

SEQ ID NO: 42122 - DNA, 75 bp, synthetic construct
  source 1..75: mol_type = other DNA
tcgccagaagttcccgtctggccgctacccgcgaagaagatatgtgtagtggggataagcgggctgatggatttt

SEQ ID NO: 42123 - DNA, 75 bp, synthetic construct
  source 1..75: mol_type = other DNA
atgcagacaaaacagcgtcttgatataccgctgaacctgaaatccgtcagtgattccggggaatttgaaggttac

SEQ ID NO: 42124 - DNA, 75 bp, synthetic construct
  source 1..75: mol_type = other DNA
cggtaaaagataagtttggcccgggcaagaacggatttactgacggaaatcttcgcacaggacgccttgccacct

SEQ ID NO: 42125 - DNA, 75 bp, synthetic construct
  source 1..75: mol_type = other DNA
tcagggatgcggcggcggcgtttgtgctgtcagtgcattacatgctgctcaacagattgcccaacgcgcaggagg

SEQ ID NO: 42126 - DNA, 75 bp, synthetic construct
  source 1..75: mol_type = other DNA
gtacgctggcgctggctatcgccggtgttacagcaatgtcgggctttatggcaatgccggaggctcgcgccgaag

SEQ ID NO: 42127 - DNA, 75 bp, synthetic construct
  source 1..75: mol_type = other DNA
cgttatggcgtcagtctcattcatctggacgccagcgcagaatgtctgccggggttccccactttcgactggtaa

SEQ ID NO: 42128 - DNA, 75 bp, synthetic construct
  source 1..75: mol_type = other DNA
cggcgagtgtgatttctgtacctccggtaaaaccaacctctgtgttgccgtccgcgaaacccagggcaaaggcgt

SEQ ID NO: 42129 - DNA, 75 bp, synthetic construct
  source 1..75: mol_type = other DNA
atagcgtgcgttatcatgtttccaactatcagcccagcccaatggtgcggatgatgaaagctgatgctgcaccgg

SEQ ID NO: 42130 - DNA, 75 bp, synthetic construct
  source 1..75: mol_type = other DNA
actgatttcatgaaagcagtatatttcctgtatctcaatcgtcacggttaccgtgggttatgtcgctataacaaa

SEQ ID NO: 42131 - DNA, 75 bp, synthetic construct
  source 1..75: mol_type = other DNA
tcgtcatcgtattatcgtattgtcggtccgctggtgatggtcggttattctttgacccatattgacggtgtagtc

SEQ ID NO: 42132 - DNA, 75 bp, synthetic construct
  source 1..75: mol_type = other DNA
ttgtctggcgctttatgcagtgcctgacagacagcattgcaatattcaccgttaccgctgccactgagcgcgaag

SEQ ID NO: 42133 - DNA, 75 bp, synthetic construct
  source 1..75: mol_type = other DNA
gtgatccaagtgattttaatcaggctgttgagtatttaaaacaagattcacaaatgaaagaaactatagattttt

SEQ ID NO: 42134 - DNA, 75 bp, synthetic construct
  source 1..75: mol_type = other DNA
tgaataaagaggcgattaagaaaaagttaccgttagcattgatttctctggctgtattcctggttggtgtggtaa

SEQ ID NO: 42135 - DNA, 75 bp, synthetic construct
  source 1..75: mol_type = other DNA
tgccgatgccgggcgcaaaccctgttctggttcgaaaggggggatctcacactgtacggcaggcggcaaatttgt

SEQ ID NO: 42136 - DNA, 75 bp, synthetic construct
  source 1..75: mol_type = other DNA
tggaactccgtggatacacgggacattttctggcagtgccagaagtacaaggaaaaactcaatgcacagaatgaa

SEQ ID NO: 42137 - DNA, 75 bp, synthetic construct
  source 1..75: mol_type = other DNA
gaccttcagcccggcaccattgattacgaacgttaccgactgacgaaggcacaggccgatgcacaggagctgaaa

SEQ ID NO: 42138 - DNA, 75 bp, synthetic construct
  source 1..75: mol_type = other DNA
gtgcctgctgccgctgctgaccggttgcggaaatacgcggacagtttacgtacaagttccggtgataccgctacc

SEQ ID NO: 42139 - DNA, 75 bp, synthetic construct
  source 1..75: mol_type = other DNA
atgaaactggccctgacgctggaagcagacagcgttaacgtgcaggcgctgaacatgggacgaattgtcgttgac

SEQ ID NO: 42140 - DNA, 75 bp, synthetic construct
  source 1..75: mol_type = other DNA
gtgagcgggtcagtctctatggcatggccgggatggcgtacacccgctggtctgacagtgttcaggattaccggc

SEQ ID NO: 42141 - DNA, 75 bp, synthetic construct
  source 1..75: mol_type = other DNA
cgggtggtaaccgcagatgaacatctgaaggaagtttatacggaagacgcttccctgccgggaaaaatcaggaaa

SEQ ID NO: 42142 - DNA, 75 bp, synthetic construct
  source 1..75: mol_type = other DNA
gcaattgttgaagtgctgtcgcccggtcaacacccgactaaacgcggattaatttacgccgcgacgccagccagc

SEQ ID NO: 42143 - DNA, 75 bp, synthetic construct
  source 1..75: mol_type = other DNA
catacgctgcagtaccgcgcatatcacggcaaaagacaacgtctggctgtactcgctgtcgcatcagacgaatga

SEQ ID NO: 42144 - DNA, 75 bp, synthetic construct
  source 1..75: mol_type = other DNA
tagtgacgcttatccgtcgctacgccgttggcattgttcatctggatgcctttggcgaagtgctgccgggatttg

SEQ ID NO: 42145 - DNA, 75 bp, synthetic construct
  source 1..75: mol_type = other DNA
gatccgattggactgaaggggggatggaacctgtatggatatcaattgaatccgatatcagacatcgaccccctg

SEQ ID NO: 42146 - DNA, 75 bp, synthetic construct
  source 1..75: mol_type = other DNA
ctgttgccgggccgcgctgctggataggatttgatccttcgcgtggcgtggattgttccgccgtgtacggagtgc

SEQ ID NO: 42147 - DNA, 75 bp, synthetic construct
  source 1..75: mol_type = other DNA
tcgtcattgctcttctggtgatggcggtgttggtggattttacgggaaagatgatgtctgtcatttctgatggcg

SEQ ID NO: 42148 - DNA, 75 bp, synthetic construct
  source 1..75: mol_type = other DNA
ctgtcaaaaacgttccgtcgtctggttgtcacactcatccggcgttatggcgtcagcctcattcatctggatgcc

SEQ ID NO: 42149 - DNA, 75 bp, synthetic construct
  source 1..75: mol_type = other DNA
gtgcctgctgccgctgctgaccggttgcggaagtacgcggacagtttacgtgcaggttccaacgatgccgttacc

SEQ ID NO: 42150 - DNA, 75 bp, synthetic construct
  source 1..75: mol_type = other DNA
tggcagtcagttgatatgccggaaattcttcaccactgtcaacgttataaggaaaaatattgtgtacagaaaatt

SEQ ID NO: 42151 - DNA, 75 bp, synthetic construct
  source 1..75: mol_type = other DNA
tggcagtccgttgatatgccagaaattatccaccattgccggcgttacagagaaaaataccatgtacagaaaatt

SEQ ID NO: 42152 - DNA, 75 bp, synthetic construct
  source 1..75: mol_type = other DNA
ctctaaatcgcgcacaggctctggagaagatcgccgaaatcaaagcgaagtttgggctgaaaggagcaagtgtat

SEQ ID NO: 42153 - DNA, 75 bp, synthetic construct
  source 1..75: mol_type = other DNA
taaaactcaatatgagataaaagcaatagagaaagaactaacccatgaagttgttagagtaaaaaatgttagatt

SEQ ID NO: 42154 - DNA, 75 bp, synthetic construct
  source 1..75: mol_type = other DNA
acggatagtaattgattcacttttgaccctggtgatgattggttttgttgtctggttctggtttagaactgctta

SEQ ID NO: 42155 - DNA, 75 bp, synthetic construct
  source 1..75: mol_type = other DNA
aatcgtgtaatttcccagctagtaccaaccattacaggagtgcatgatatgactgagactggaaaatttattcgt

SEQ ID NO: 42156 - DNA, 75 bp, synthetic construct
  source 1..75: mol_type = other DNA
gccgcgcggcgaccgcgccgtcgcgaatgccgcccgcctgacggcgacggcaaaagcgctgggtgaggtgcctgc

SEQ ID NO: 42157 - DNA, 75 bp, synthetic construct
  source 1..75: mol_type = other DNA
ggtcggcaaacacggcatgtgggagctgaagggcgtaccgacggagccgtattccagccgcagcaggaccatcag

SEQ ID NO: 42158 - DNA, 75 bp, synthetic construct
  source 1..75: mol_type = other DNA
gcagcgcctttctctggtatcccgtttgcaggcagagattgaccgttttggtaaccccggtcgcggtccgatagc

SEQ ID NO: 42159 - DNA, 75 bp, synthetic construct
  source 1..75: mol_type = other DNA
tcgcatcccgccatggtccctgtatcagactttccatggcgtgaattacctttttaatatttcatccatgctgca

SEQ ID NO: 42160 - DNA, 75 bp, synthetic construct
  source 1..75: mol_type = other DNA
ttctcacgcctgccaatatccgcgacggggagctgcggcgcatggcaacgtgggaggcatcccgcgacagcctgg

SEQ ID NO: 42161 - DNA, 75 bp, synthetic construct
  source 1..75: mol_type = other DNA
aaacagtgttatgggtggattctctgtatccggcgttaattgttaactggttaacgtcacctggaggcaccaggc

SEQ ID NO: 42162 - DNA, 75 bp, synthetic construct
  source 1..75: mol_type = other DNA
gcacgtcataacgtacaggtcctgataaccgacagcgggcagcgaaccggtacaggcagtgcgctgatggccatg

SEQ ID NO: 42163 - DNA, 75 bp, synthetic construct
  source 1..75: mol_type = other DNA
tcttgaaggtttacgtcgtctggaataccgcggatatgactctgccggtctggccgttgttgatgcggaaggtca

SEQ ID NO: 42164 - DNA, 75 bp, synthetic construct
  source 1..75: mol_type = other DNA
gcagaacagtagccagattattgctgaacaggtaatccctgaaaatgagggcggttggtggatacgtgaagtggg

SEQ ID NO: 42165 - DNA, 75 bp, synthetic construct
  source 1..75: mol_type = other DNA
gtgattattttcgaaggtatcgaagcgccggcaacgctgggtttaaaagccagtcgctcggcaaattatcagcgc

SEQ ID NO: 42166 - DNA, 75 bp, synthetic construct
  source 1..75: mol_type = other DNA
ctattggtattccacaacagcttgctattacatatccaacgccattccctaacggagtatggggtgtgtttgtca

SEQ ID NO: 42167 - DNA, 75 bp, synthetic construct
  source 1..75: mol_type = other DNA
cattcacgctgaagcctacgctgctggcgaactgaaacacggtccgctggcgctgattgatgccgatatgccggt

SEQ ID NO: 42168 - DNA, 75 bp, synthetic construct
  source 1..75: mol_type = other DNA
ctttactgaagtgcgttacaaaggaaccaaaactgttgccgtcacaccagactacgctgaaatcgccaaactgtg

SEQ ID NO: 42169 - DNA, 75 bp, synthetic construct
  source 1..75: mol_type = other DNA
ttgaagaagttcgcgcgcgtggtggtcagttgtatgtcttcgccgatcaggatgcgggttttgtgagcagtgaca

SEQ ID NO: 42170 - DNA, 75 bp, synthetic construct
  source 1..75: mol_type = other DNA
gtcgcctgaaaatggagcatctgagttatcacgttgaaagcctgctggaacaggctgctaaaaaagagctgaact

SEQ ID NO: 42171 - DNA, 75 bp, synthetic construct
  source 1..75: mol_type = other DNA
atggaaacgttattaccaaacgttaatacgtctgaaggttgttttgatattggtgttctgctcagtaataaagcg

SEQ ID NO: 42172 - DNA, 75 bp, synthetic construct
  source 1..75: mol_type = other DNA
caacaacacaggaggatttggagatgtaacaaaagcagcacaagtctttgtacgcaacgagctaacgttcctcca

SEQ ID NO: 42173 - DNA, 75 bp, synthetic construct
  source 1..75: mol_type = other DNA
cgcggggaccgaagggggataagggagacacggggccacagggtattcccgggccaaaaggcgataccggcgagc

SEQ ID NO: 42174 - DNA, 75 bp, synthetic construct
  source 1..75: mol_type = other DNA
aacggccaatggtatgagccgccggtgagcttctccgggctggcgaagagcatgcgcgccgccgttcatcacagc

SEQ ID NO: 42175 - DNA, 75 bp, synthetic construct
  source 1..75: mol_type = other DNA
atttgcctagaaacttaacatatcgaaggagagacaaagcatattactggcgcaaccctctgacgaaagaagaat

SEQ ID NO: 42176 - DNA, 75 bp, synthetic construct
  source 1..75: mol_type = other DNA
attcaatatcgcccgtgtggaatggggaacatgccgtatgaatcctgttgaactggtccgaaaaccgaaaatcag

SEQ ID NO: 42177 - DNA, 75 bp, synthetic construct
  source 1..75: mol_type = other DNA
atggctgggttcaggggattcgtcaggtggtgatgccattcagtgtgacagaagaggaaagccggctgatgcgtc

SEQ ID NO: 42178 - DNA, 75 bp, synthetic construct
  source 1..75: mol_type = other DNA
gcaatagaagtctttggaacggggggttctaatgataatggactggctaaagtcgtttatccaattgcgctacct

SEQ ID NO: 42179 - DNA, 75 bp, synthetic construct
  source 1..75: mol_type = other DNA
tcgctgatgagcagtctgaacttgttaagaagatggtgtttgatacgctgaaggatttgtacaaaaaacccacct

SEQ ID NO: 42180 - DNA, 75 bp, synthetic construct
  source 1..75: mol_type = other DNA
ccgcattcacagtatgcacccaaagaaagtccgacgtttaccggaacccccaaagcgccaacgccagcggcgggg

SEQ ID NO: 42181 - DNA, 75 bp, synthetic construct
  source 1..75: mol_type = other DNA
atgaccgccagcgccccgaaaatggaggcattcacctttggtgagccggtgccggtactcgaccgccgtgacatt

SEQ ID NO: 42182 - DNA, 75 bp, synthetic construct
  source 1..75: mol_type = other DNA
ggcatagtgctgaacaaatcgaacagcagcgcctttctctggtatcccgtttgcaggcagagattgaccgttttg

SEQ ID NO: 42183 - DNA, 75 bp, synthetic construct
  source 1..75: mol_type = other DNA
agatggtaaccgtacagcttgagcaaaaagatggcgatatttctattcttgagctgaacgtgaccttaccggaag

SEQ ID NO: 42184 - DNA, 75 bp, synthetic construct
  source 1..75: mol_type = other DNA
tacattaacggcagtcatgcaggcttcatcatgtacatgaccgatgccgcgcaaaaccaggaggatgtgaacaac

SEQ ID NO: 42185 - DNA, 75 bp, synthetic construct
  source 1..75: mol_type = other DNA
ccgttatggctaactaatcagcaaagcggctgtagtgttcttattgttcgccatggattatcagaatctggagaa

SEQ ID NO: 42186 - DNA, 75 bp, synthetic construct
  source 1..75: mol_type = other DNA
acctctatcggcccgctgatggagaaaatcggtaacggcggtaaaggaattgcctggaacacccagagcgagatg

SEQ ID NO: 42187 - DNA, 75 bp, synthetic construct
  source 1..75: mol_type = other DNA
gtgcagctggaaggcgacgaaatggtttctgacacctatcacggtggtgatggtctgttcgtcgggcaccgatac

SEQ ID NO: 42188 - DNA, 75 bp, synthetic construct
  source 1..75: mol_type = other DNA
acaacccagccatatcagttcacgaaaggcagcatttttcatctgatggaaccggacattaaccaggagatctac

SEQ ID NO: 42189 - DNA, 75 bp, synthetic construct
  source 1..75: mol_type = other DNA
aaagtggaagccattgttgatttcatcaatgccagccagcaacaaggcaaacaggccagcggcctgattacttca

SEQ ID NO: 42190 - DNA, 75 bp, synthetic construct
  source 1..75: mol_type = other DNA
ttctgattgagttaagttttaactctcagaaagttttaaaaggcttggaaaaagccgagaaacaaacgatgcagg

SEQ ID NO: 42191 - DNA, 75 bp, synthetic construct
  source 1..75: mol_type = other DNA
ctggaaaagccgcgactacgaatgatggtggtgcaacttctaagaagaatgcgggtaacgtgactactgaacgca

SEQ ID NO: 42192 - DNA, 75 bp, synthetic construct
  source 1..75: mol_type = other DNA
gcctgcaggtggcatccgtcagcgaggacgcgatgacggttgttgtgccggggcgggctgaaccggcctccctgc

SEQ ID NO: 42193 - DNA, 75 bp, synthetic construct
  source 1..75: mol_type = other DNA
ctttgggaaaatggcattaacgcggctacgctgtcttataacatcaacgcttatcgcagtgaaaattcaaattat

SEQ ID NO: 42194 - DNA, 75 bp, synthetic construct
  source 1..75: mol_type = other DNA
acactggacacactgaaagaaattgccgcggccattaacaatgacccgaaattcagcaccaccattaacaatgcg

SEQ ID NO: 42195 - DNA, 75 bp, synthetic construct
  source 1..75: mol_type = other DNA
gagccgttatctgcgggatatgtaccgcccgggaatggtgatggagcagtggaacccggagacacgcagtcatga

SEQ ID NO: 42196 - DNA, 75 bp, synthetic construct
  source 1..75: mol_type = other DNA
gaattaatattcgggaatatcatgatattcctgctgaaacgtcgtatgcgccgggagaacagtttcagggagggt

SEQ ID NO: 42197 - DNA, 75 bp, synthetic construct
  source 1..75: mol_type = other DNA
cgcactcgatgttctgtggcgttggatcctgtccagggcattcaagagccgtagcgacgcggataatgccgctgc

SEQ ID NO: 42198 - DNA, 75 bp, synthetic construct
  source 1..75: mol_type = other DNA
atcgccttcgccaatatggacgaaaccgagttccagcaactctacagggccgcactcgatgttctgtggcgttgg

SEQ ID NO: 42199 - DNA, 75 bp, synthetic construct
  source 1..75: mol_type = other DNA
atcagccccgttaccggcggccctgtactggcgagcttatacagattgacggctgtgaccatcactggtttgaaa

SEQ ID NO: 42200 - DNA, 75 bp, synthetic construct
  source 1..75: mol_type = other DNA
tagaccaaatgaagtttatagattcaagaattttagatgtctctttacataagggggtttgtttatctatgtgca

SEQ ID NO: 42201 - DNA, 75 bp, synthetic construct
  source 1..75: mol_type = other DNA
ctcacgagtgcgtggaaaaaataaaggccctgtttcctcatcttcgtgctgaaggtggtggatttattcccctga

SEQ ID NO: 42202 - DNA, 75 bp, synthetic construct
  source 1..75: mol_type = other DNA
gcttacccgtggtcagacggtggcgctggcctcctggattttctgggccggtgaaacgaactttcgcaactccac

SEQ ID NO: 42203 - DNA, 75 bp, synthetic construct
  source 1..75: mol_type = other DNA
accattttaagagccgtcgataaagaatcagcactggagttcgtacaggaaacactacaggaagtctggcaaacc

SEQ ID NO: 42204 - DNA, 75 bp, synthetic construct
  source 1..75: mol_type = other DNA
aaaggctataagaaagcacaaagtgaagtagacaagattgctcaacagaaagcgaaaaacgaaaaacagaatcaa

SEQ ID NO: 42205 - DNA, 75 bp, synthetic construct
  source 1..75: mol_type = other DNA
tcatgctgtatatattgaggggagaagggggatgatacagtggtattcggatttcctgtttacaaaaaagtgcta

SEQ ID NO: 42206 - DNA, 75 bp, synthetic construct
  source 1..75: mol_type = other DNA
tgcatcatttcttcagcatggcaaacatggtctgagggaccggtatatcttttaacgattggaggagttgcagca

SEQ ID NO: 42207 - DNA, 75 bp, synthetic construct
  source 1..75: mol_type = other DNA
tggcggaactgcgtatccacaccccggctgagcgcgtagctatagctgaaggccatcttttccgggtggcttttg

SEQ ID NO: 42208 - DNA, 75 bp, synthetic construct
  source 1..75: mol_type = other DNA
gtgcatgccattatgatatttatgagggcgagttttttgaacgggtggcggcagtacagacgcaatggtttaaaa

SEQ ID NO: 42209 - DNA, 75 bp, synthetic construct
  source 1..75: mol_type = other DNA
attatttctggcgttcggagaccacttattatccagtggggagtggggcagtttgggggaagtctgggggatgat

SEQ ID NO: 42210 - DNA, 75 bp, synthetic construct
  source 1..75: mol_type = other DNA
gcgcagagtcacagcctgaccctgcgggatgcgcagggtgaaacgcaggtggtgcgtatttcttctctggacagc

SEQ ID NO: 42211 - DNA, 75 bp, synthetic construct
  source 1..75: mol_type = other DNA
cctggaaaaagatatccagctggtttatgggaccgccaataatacgaaaatcaatcctggcggagaacagcatat

SEQ ID NO: 42212 - DNA, 75 bp, synthetic construct
  source 1..75: mol_type = other DNA
cgtccgtggaatcccggtgccatcaccggtggccgcgtgtggggggatatcccggacaacagcgtccagccggga

SEQ ID NO: 42213 - DNA, 75 bp, synthetic construct
  source 1..75: mol_type = other DNA
gcaggcggtgacacaggccattgccggattaagtgaacgaaaagtgcagtttacgtacacggacgtgctggccag

SEQ ID NO: 42214 - DNA, 75 bp, synthetic construct
  source 1..75: mol_type = other DNA
ttgagatccaaatccgcaccaaacagatgcatgaagatgcagagttgggtgttgctgcgcactggaaatataaag

SEQ ID NO: 42215 - DNA, 75 bp, synthetic construct
  source 1..75: mol_type = other DNA
ctggattagcgataaaacaaaatcattcttctttaagttcatgtcagcaccagatcgcacaaggggaagtataga

SEQ ID NO: 42216 - DNA, 75 bp, synthetic construct
  source 1..75: mol_type = other DNA
tacacgtttaatgtcagcggttcgactccggtatcaccagaacttcgtccgcgtaatattgcatttaactatatc

SEQ ID NO: 42217 - DNA, 75 bp, synthetic construct
  source 1..75: mol_type = other DNA
cattaacgaaagagttcactcttcctaaaaccgaagcgggaacaaaccgtgttatcaacctaattcaaccagcaa

SEQ ID NO: 42218 - DNA, 75 bp, synthetic construct
  source 1..75: mol_type = other DNA
attcagtaccaccattaacaatgcactggcactgaaagcgccgctatcgagtccggcactcaccggaacgccaac

SEQ ID NO: 42219 - DNA, 75 bp, synthetic construct
  source 1..75: mol_type = other DNA
attcagtaccaccattaataatgcgctggcactgaaagcgccgctgttgagtccggcactcaccggaacgccaac

SEQ ID NO: 42220 - DNA, 75 bp, synthetic construct
  source 1..75: mol_type = other DNA
gtttttcctagaccattccccttgccaattccatggcccaaaagccctgcacagcagcaagcagatgataatgct

SEQ ID NO: 42221 - DNA, 75 bp, synthetic construct
  source 1..75: mol_type = other DNA
caatctggaaaaatttggtgaggcccgacaagatttaaccataaaagaactggctgaaaaatttctggcactgaa

SEQ ID NO: 42222 - DNA, 75 bp, synthetic construct
  source 1..75: mol_type = other DNA
gctgtgtacacaggaatgcgtcacggtgaactggtctccctggcctgggaagatatcgatctgaaggcaggaaca

SEQ ID NO: 42223 - DNA, 75 bp, synthetic construct
  source 1..75: mol_type = other DNA
aattggaggtagcagactggtgtcaacggtgaccaaagaggaattgctgtatatcaggaaagatttgctgaccgg

SEQ ID NO: 42224 - DNA, 75 bp, synthetic construct
  source 1..75: mol_type = other DNA
aacatatttatccggtgattggtcatgtaccacttagtgattgctctatatctatgtggattaagtgttttgaca

SEQ ID NO: 42225 - DNA, 75 bp, synthetic construct
  source 1..75: mol_type = other DNA
ctccaatgcgcctctcatacattgagaaaaagaaaggccgccagacgactcatatcgtattttccttccgcgata

SEQ ID NO: 42226 - DNA, 75 bp, synthetic construct
  source 1..75: mol_type = other DNA
cgcaggcagtcaggtccatcgtctggttcccctttccgatcaccactacgtcagtcagctgcagatgatggtggc

SEQ ID NO: 42227 - DNA, 75 bp, synthetic construct
  source 1..75: mol_type = other DNA
gtttcagtaatatggaaaataatgaaatgaataacacagacacattagaaaaaataatcagacaccaaaaaaaca

SEQ ID NO: 42228 - DNA, 75 bp, synthetic construct
  source 1..75: mol_type = other DNA
agtaacctttaatcaagacgtgaaagcgttagtgccaaaaagtgaagacataactccatattatctcctcgcgtg

SEQ ID NO: 42229 - DNA, 75 bp, synthetic construct
  source 1..75: mol_type = other DNA
tacctgctcgcccctgaagtgagtgccctgctccattacgtcccggatctgcgccgcaagatgctgctggccaca

SEQ ID NO: 42230 - DNA, 75 bp, synthetic construct
  source 1..75: mol_type = other DNA
atgacaacccagtatggattttttattgattccagccgttgcaccggttgcaaaacctgcgagctggcctgtaaa

SEQ ID NO: 42231 - DNA, 75 bp, synthetic construct
  source 1..75: mol_type = other DNA
gttgttgaacactttcttgcacgatggtttgtagctctgatttttgtccctctcctgttaattggtacttttgtg

SEQ ID NO: 42232 - DNA, 75 bp, synthetic construct
  source 1..75: mol_type = other DNA
ttcaggtaccagaatcacctgacgccccggaggcgctgccggggtgtcgttccatttctgatgatgacctgtgcg

SEQ ID NO: 42233 - DNA, 75 bp, synthetic construct
  source 1..75: mol_type = other DNA
tatttacgattatcaggatgtacaacaggcatttgaagagtcggttaacaacaaacgcgacattattaaaggcgt

SEQ ID NO: 42234 - DNA, 75 bp, synthetic construct
  source 1..75: mol_type = other DNA
tgctgaaagatggcacaggaaaaccagtacagaactgcaccattgtgctgaaggccagacggaccagcagcacgg

SEQ ID NO: 42235 - DNA, 75 bp, synthetic construct
  source 1..75: mol_type = other DNA
agaataatctttataatcttccttttacggttctttgtgaggtacataagaactggtataaaacgccaaatgcag

SEQ ID NO: 42236 - DNA, 75 bp, synthetic construct
  source 1..75: mol_type = other DNA
cagccagcaatgcgccttcagtagagtcagcgcagaatggtgaaccagagcaagggaatatgttacgcgcgacgc

SEQ ID NO: 42237 - DNA, 75 bp, synthetic construct
  source 1..75: mol_type = other DNA
actgcttatcgccgctgctacctttgtcgttacgctgtttttgccgcccaatttttgggtgagcggcgtgaaggc

SEQ ID NO: 42238 - DNA, 75 bp, synthetic construct
  source 1..75: mol_type = other DNA
acgctggttggcggttgtattgggctaattttatatttgttgtcgcagctcccggccttgttccccctcagcaat

SEQ ID NO: 42239 - DNA, 75 bp, synthetic construct
  source 1..75: mol_type = other DNA
gaccgttcgcacgttgaagaagcgtatccgggcgatatcctcggcctgcacaaccacggcaccattcagatcggc

SEQ ID NO: 42240 - DNA, 75 bp, synthetic construct
  source 1..75: mol_type = other DNA
atctgaaggtatgttttttattcagaggctcactcttgcacaaagcatgtatctgaaagaaatctgggattatct

SEQ ID NO: 42241 - DNA, 75 bp, synthetic construct
  source 1..75: mol_type = other DNA
atgaaaccgtattaattcattatgtcggcccgacaaaaccctggcattactgggccggttatccaagtgcgcaac

SEQ ID NO: 42242 - DNA, 75 bp, synthetic construct
  source 1..75: mol_type = other DNA
gagcagaaaaccctgaaatcctggcaggcggtgtggctggaaaacgactacatcaaagtgatgatcctgccggaa

SEQ ID NO: 42243 - DNA, 75 bp, synthetic construct
  source 1..75: mol_type = other DNA
tgcaagaaagcggtacggcaattgagcaatgctcgctggtaggtgggggggcgagaagtccattctgggcgcagt

SEQ ID NO: 42244 - DNA, 75 bp, synthetic construct
  source 1..75: mol_type = other DNA
gaaaacggtggtcatttagacataaacgcatatggttcggcaaacaagacgattattaaagataaaggaacaatg

SEQ ID NO: 42245 - DNA, 75 bp, synthetic construct
  source 1..75: mol_type = other DNA
atgcttaatgtaaataacgatatccagtctgtgaggtctggagccagtgctgctacggctacttcaggtattaat

SEQ ID NO: 42246 - DNA, 75 bp, synthetic construct
  source 1..75: mol_type = other DNA
gattgaaaaaggcgaacttggccgccacaaacaaattaaaatcattaatccgcaacaaatcccgccagaaatcgc

SEQ ID NO: 42247 - DNA, 75 bp, synthetic construct
  source 1..75: mol_type = other DNA
gagtgctgatcttcgtctttctggtgattttttatggaatcatcgcgatacatgacatcccttatctgattgcca

SEQ ID NO: 42248 - DNA, 75 bp, synthetic construct
  source 1..75: mol_type = other DNA
gagagttttgatgagctattgtgtgcaaactctgtaaaaaacgatgacatgtttgtctttgcagatgatgcaagt

SEQ ID NO: 42249 - DNA, 75 bp, synthetic construct
  source 1..75: mol_type = other DNA
gggttaaaatcagcgattcttgaactggaaaacaatggaaagctatctcctgagctcttggatacagcatttgag

SEQ ID NO: 42250 - DNA, 75 bp, synthetic construct
  source 1..75: mol_type = other DNA
acgttaactgatatcactaaaaatgccgcgtacggcgtcgatatcggcagcctggtgctggaaatcaataatccc

SEQ ID NO: 42251 - DNA, 75 bp, synthetic construct
  source 1..75: mol_type = other DNA
ttttattgggtagtttattgccaaatattactcaatcacatgtgttatcatggtatggcatactgagaggagact

SEQ ID NO: 42252 - DNA, 75 bp, synthetic construct
  source 1..75: mol_type = other DNA
cacccagtggcgggagactgaccttgagtttatccggcgcctgctggcggaggtggggatttactggcgttatga

SEQ ID NO: 42253 - DNA, 75 bp, synthetic construct
  source 1..75: mol_type = other DNA
ggtttgtagccctgatttttgtcccttttctgttaattggcactttggcagacggttttcctagcacatggcagg

SEQ ID NO: 42254 - DNA, 75 bp, synthetic construct
  source 1..75: mol_type = other DNA
atgcaaatgcagcacctgatggttggctatcctaagtactaccaaacagccgattatgcgttgaggctttcagtg

SEQ ID NO: 42255 - DNA, 75 bp, synthetic construct
  source 1..75: mol_type = other DNA
ccggggtgttgtttgtagtgacagatgcctatcgtcctgcgccgcaatcagcagtccatgctttctgtcacgtac

SEQ ID NO: 42256 - DNA, 75 bp, synthetic construct
  source 1..75: mol_type = other DNA
atgcaggatatccacgaagaaagtcttaacgagtcggtaaaatcagagcagtcaccgcgggtggtgctctgggaa

SEQ ID NO: 42257 - DNA, 75 bp, synthetic construct
  source 1..75: mol_type = other DNA
atggctgatatagcaacaatgagaatgaaggctctgcacttctgggataaacacggtatttctgcagcttctgaa

SEQ ID NO: 42258 - DNA, 75 bp, synthetic construct
  source 1..75: mol_type = other DNA
tatcttgcacaatcaggcaatacgaaaagctcctcacttacggctgacaccaccatgacctggtatggacaaacc

SEQ ID NO: 42259 - DNA, 75 bp, synthetic construct
  source 1..75: mol_type = other DNA
aacgcgcagggactggcgaaccgctgtataccggacagcctgcccgccgtggaatggctgacctacggcagcggt

SEQ ID NO: 42260 - DNA, 75 bp, synthetic construct
  source 1..75: mol_type = other DNA
ggtaatccgttcctgatgtcgtacttcactcagaccactgacggcagagtgaatctgatgcatcacaggaaagcc

SEQ ID NO: 42261 - DNA, 75 bp, synthetic construct
  source 1..75: mol_type = other DNA
acattggcaagcgccctattgccgaaatcaaaccaatggagttactggaagcactgcgtaaaatggaaaaacgtg

SEQ ID NO: 42262 - DNA, 75 bp, synthetic construct
  source 1..75: mol_type = other DNA
tcaatatctggaaagtcagcataagctgacgaggactcgtctgactgacattccgctttacctgttgctggaacc

SEQ ID NO: 42263 - DNA, 75 bp, synthetic construct
  source 1..75: mol_type = other DNA
ctgcccgcatgatactctccctggacagggcccggatttgtgaagccctgctcaacaaccgccagctgcagccca

SEQ ID NO: 42264 - DNA, 75 bp, synthetic construct
  source 1..75: mol_type = other DNA
gcatcagccaacagtcaaaaagcggcaaaaaccagtgaaaccaatgcaaagacaagcgagactgcagcggcgaac

SEQ ID NO: 42265 - DNA, 75 bp, synthetic construct
  source 1..75: mol_type = other DNA
tttccagtccggcactgactgcacaggaaatcgcagagatggacccggcagatctcacagccatgtcggttgagg

SEQ ID NO: 42266 - DNA, 75 bp, synthetic construct
  source 1..75: mol_type = other DNA
tgtggcgacacactgttaatcgcgtcatcctggacgcaacacatcagaaccgcattattgcggagctggttattc

SEQ ID NO: 42267 - DNA, 75 bp, synthetic construct
  source 1..75: mol_type = other DNA
acggttacgctgacggtgaccggggcggcaaccgaaaccggcacggtgaatgtttatgtgggacgtacccgcgtg

SEQ ID NO: 42268 - DNA, 75 bp, synthetic construct
  source 1..75: mol_type = other DNA
ttacttgggaacaccaaataacacctatctaaaatataatcccaaagctaaagggaatggagttacaattatcag

SEQ ID NO: 42269 - DNA, 75 bp, synthetic construct
  source 1..75: mol_type = other DNA
ggaaatgggtgacctgctgtttgccacggtcaatctggctcgtcatttagggacaaaagcggaaatcgcattgca

SEQ ID NO: 42270 - DNA, 75 bp, synthetic construct
  source 1..75: mol_type = other DNA
tggatatcgcaactccacaagtggaaggtggatcaagtgcttcgtcatttattgtaactgatataactgcaagca

SEQ ID NO: 42271 - DNA, 75 bp, synthetic construct
  source 1..75: mol_type = other DNA
ctaacgcaaagtccagccagacggcagcgaagaccagcgaaacgaatgccaaagccagtgaaactgcggcgaaaa

SEQ ID NO: 42272 - DNA, 75 bp, synthetic construct
  source 1..75: mol_type = other DNA
tcagcagtttctttcccttgaatttgcgcaggtgctggacaaaatggcctacctgacggtatggcagggcgatga

SEQ ID NO: 42273 - DNA, 75 bp, synthetic construct
  source 1..75: mol_type = other DNA
gaccgggccctgtctgtggatgagtatttctggcgacacatcctgcagtgcggacatcagcaggtgctgtttgtg

SEQ ID NO: 42274 - DNA, 75 bp, synthetic construct
  source 1..75: mol_type = other DNA
ccattgttttttgaaaaaataaaactcaataaaccattgactgtaactgatcctaatatgacaaggttcctcatg

SEQ ID NO: 42275 - DNA, 75 bp, synthetic construct
  source 1..75: mol_type = other DNA
cactgacctgcccggggtgggcgagagccgggacagggatgcagagtatgaagccctgtaccgtgacattctgcc

SEQ ID NO: 42276 - DNA, 75 bp, synthetic construct
  source 1..75: mol_type = other DNA
ctccacagcaggaagtgcgcgaaaagtgcattgaagctacgaggtttgctcgtgtccccggaggtcaatgggaag

SEQ ID NO: 42277 - DNA, 75 bp, synthetic construct
  source 1..75: mol_type = other DNA
cctgccatgaatgggatatggcaggtattcagccttctcccgcacaggaacagaacattcgtgagaaaacggagg

SEQ ID NO: 42278 - DNA, 75 bp, synthetic construct
  source 1..75: mol_type = other DNA
agctcgatgagttcgtgcgtaaccacgccgaaaccgccttccatccgtgcggtacctgcaaaatgggttacgacg

SEQ ID NO: 42279 - DNA, 75 bp, synthetic construct
  source 1..75: mol_type = other DNA
taatcgaagaagccaaattaaaaatagcgattgcgaaatgctaccccaattcagggatggcacgggtagagggcg

SEQ ID NO: 42280 - DNA, 75 bp, synthetic construct
  source 1..75: mol_type = other DNA
tggtcagtgcgctcatgacagcacttcccgaccatgccgccagtcccctgatgacccgcctgcaggacgagctgt

SEQ ID NO: 42281 - DNA, 75 bp, synthetic construct
  source 1..75: mol_type = other DNA
gtgagaaagttaagccgacttgaaaaatatcacatgaacaaggtttcaatgcgcagcccttcaaaggttgttgcc

SEQ ID NO: 42282 - DNA, 75 bp, synthetic construct
  source 1..75: mol_type = other DNA
atgattacgggcttttcgccatcatataaaaaaattgttattggtgacgatgaaataacgatgcctggcgacaag

SEQ ID NO: 42283 - DNA, 75 bp, synthetic construct
  source 1..75: mol_type = other DNA
gcggcggcaaagaaatccgaaactgcagcggcatcatcaaagaacgcggcgaaaacctcagaaacgaatgcagct

SEQ ID NO: 42284 - DNA, 75 bp, synthetic construct
  source 1..75: mol_type = other DNA
tgacgcactgaatacgctgaacgagttagcggcggcgctgggaaacgacccgaattttgcgaccaccatgactaa

SEQ ID NO: 42285 - DNA, 75 bp, synthetic construct
  source 1..75: mol_type = other DNA
tcttacagccgctgcctgatgtgtggataccatttaacgattcgctggatatgattacgggcttttcgccatcat

SEQ ID NO: 42286 - DNA, 75 bp, synthetic construct
  source 1..75: mol_type = other DNA
tgcaagcgcggcggctgcttctgccactgcatcagccaacagtcaaaaagcagcaaaaaccagtgaaaccaacgc

SEQ ID NO: 42287 - DNA, 75 bp, synthetic construct
  source 1..75: mol_type = other DNA
ggtacggctgggacggcgacaggctgacgacggtacagaccgacaccacgcgtatccagacggtataccagccgg

SEQ ID NO: 42288 - DNA, 75 bp, synthetic construct
  source 1..75: mol_type = other DNA
tcgatgtcgcggcacggcaccgggtgcagtttgctatgccggaagctgaagctgttgcgttgataaaaaagttaa

SEQ ID NO: 42289 - DNA, 75 bp, synthetic construct
  source 1..75: mol_type = other DNA
gacaatggcggcgctagcctgtatcgcgcaaaatgacagccaacagttgctcgacgaaatcgtccaacaagaggg

SEQ ID NO: 42290 - DNA, 75 bp, synthetic construct
  source 1..75: mol_type = other DNA
tcagccgcaacaagagcagagaatgcagcccggattgcagaagatgccgctgatcctgcttctgtccctccgctt

SEQ ID NO: 42291 - DNA, 75 bp, synthetic construct
  source 1..75: mol_type = other DNA
gcctctgttgtccgtacggccctgcgcgctgttcgtgacaccgtggtctctgttgcccgcgcggtatggaactgg

SEQ ID NO: 42292 - DNA, 75 bp, synthetic construct
  source 1..75: mol_type = other DNA
gagcagacatttgccaccattgcgccttacacccttgaagaaacctacgaagtgctggacgccatcgcccgtgaa

SEQ ID NO: 42293 - DNA, 75 bp, synthetic construct
  source 1..75: mol_type = other DNA
cattacattacactataaaaaagaaatcatttccttatttctggaaaccacgcctattaaagctaaccatttgcg

SEQ ID NO: 42294 - DNA, 75 bp, synthetic construct
  source 1..75: mol_type = other DNA
tcctgcaactcactatcattggcattctctcgatcatcgtgctttttttcaaatggaaagatcttatggtgacct

SEQ ID NO: 42295 - DNA, 75 bp, synthetic construct
  source 1..75: mol_type = other DNA
aggcgactctctcgctattgtaattaaaaataaaaatggaaatgattacttatctctcggttactacgatcagga

SEQ ID NO: 42296 - DNA, 75 bp, synthetic construct
  source 1..75: mol_type = other DNA
tcaatgcttacctgtcccgcgtggcagaactgaacggcgtcgacaccgatgacgtggtgaaaaaattcaccgttg

SEQ ID NO: 42297 - DNA, 75 bp, synthetic construct
  source 1..75: mol_type = other DNA
catctttatccgggggattcactgaatctgcagacagcacagaatgcggataatggtttctctgaactggaaaag

SEQ ID NO: 42298 - DNA, 75 bp, synthetic construct
  source 1..75: mol_type = other DNA
tgccgatgggaggactggggctatccgctctggtcgccctgatcccaataatattcttcttcgttgcactcgcgg

SEQ ID NO: 42299 - DNA, 75 bp, synthetic construct
  source 1..75: mol_type = other DNA
ggaattctgccggcatcgcccgtgacaccgggggacgtcttgccctgtttgtcaggtcgaaagactgcagtacct

SEQ ID NO: 42300 - DNA, 75 bp, synthetic construct
  source 1..75: mol_type = other DNA
tgcttgtcccccggcatgaggaagagcaggtggagaggccggatgaggacaaaatgctgatgcagaaagcggcag

SEQ ID NO: 42301 - DNA, 75 bp, synthetic construct
  source 1..75: mol_type = other DNA
ggcgatatttcaccttctgcggatgtggtggatgtcagcgaggatgatgttgcattaatgatggcttcagcgggg

SEQ ID NO: 42302 - DNA, 75 bp, synthetic construct
  source 1..75: mol_type = other DNA
cgtcgtcacatccagactgaaatcaaccgcagactttcccgcgcattccgcgtcgctaaaatcatgcacatcaat

SEQ ID NO: 42303 - DNA, 75 bp, synthetic construct
  source 1..75: mol_type = other DNA
aaaacaggcttttatatgaccggtaaggcgggaacttccgttttatctctttccaaccagcgttttgtcgaaggt

SEQ ID NO: 42304 - DNA, 75 bp, synthetic construct
  source 1..75: mol_type = other DNA
tgacagacttgaccgaagactcgaccctcgtcgatggttttctggcgcagatccattgtctgccatgcgtaccgg

SEQ ID NO: 42305 - DNA, 75 bp, synthetic construct
  source 1..75: mol_type = other DNA
gctgatgcggatgcgtaatttgattttgctgatggaaaaacgccgtccgtgggtgagtgaactgatactgaaaag

SEQ ID NO: 42306 - DNA, 75 bp, synthetic construct
  source 1..75: mol_type = other DNA
atggcaccgcaacgtgatgtttatgctcgtcttgccagtgaacgtttgccgtggatgagcgatgaccaacgccgt

SEQ ID NO: 42307 - DNA, 75 bp, synthetic construct
  source 1..75: mol_type = other DNA
aatttctcaaaccgaaaaccattgtgttaggcggtgatgtccgtctcaccagcgaaaccttaaaactggcgctgg

SEQ ID NO: 42308 - DNA, 75 bp, synthetic construct
  source 1..75: mol_type = other DNA
gagacaatgaccccagctatctggatgtggaaaccgtctacaccctttcatatctgcgttactccctgcgaacgt

SEQ ID NO: 42309 - DNA, 75 bp, synthetic construct
  source 1..75: mol_type = other DNA
ttctggtgtgcggcttctggtatacagagaatcactatcagtcccgcatacgacatgccagaaccaacggatgga

SEQ ID NO: 42310 - DNA, 75 bp, synthetic construct
  source 1..75: mol_type = other DNA
accatcctaatccggagaaaattggttatcctatgcagttcaccaaacagggcgcgctggagaaaggggagagct

SEQ ID NO: 42311 - DNA, 75 bp, synthetic construct
  source 1..75: mol_type = other DNA
tcgtgacggtatatctgtaccgcagaacaacgcagcactgaatgtgctggggctgtctattggcgattacacagg

SEQ ID NO: 42312 - DNA, 75 bp, synthetic construct
  source 1..75: mol_type = other DNA
acattcacctgtcgacaacgaccggcggcgtgacatcagaccacacctggaaaaaccttcatttttacgcccgta

SEQ ID NO: 42313 - DNA, 75 bp, synthetic construct
  source 1..75: mol_type = other DNA
ggagcgtaacacatcagatcgcaaccgccttgatgtgttgtgcacaccggacctggttaaccagttccgctttat

SEQ ID NO: 42314 - DNA, 75 bp, synthetic construct
  source 1..75: mol_type = other DNA
gtgaaggctggcgcacagtggacacagtatctgctgagtctggtccccgactgtccgtggcagcatattgtgttc

SEQ ID NO: 42315 - DNA, 75 bp, synthetic construct
  source 1..75: mol_type = other DNA
gcccatagtgaccgctgtgtcccgttggtagatggtgcttatggttttttattggctgactttatgtcactcgtg

SEQ ID NO: 42316 - DNA, 75 bp, synthetic construct
  source 1..75: mol_type = other DNA
cagtgccggtcgtcgtgatgccatcagcagcattaattctgtaacacgactgatggcgctggcggctgtttcatt

SEQ ID NO: 42317 - DNA, 75 bp, synthetic construct
  source 1..75: mol_type = other DNA
cctgccgttggccagccgctggcggaagacaaaacattgctgccgttttttagtaacgaacgggtgattcgtgct

SEQ ID NO: 42318 - DNA, 75 bp, synthetic construct
  source 1..75: mol_type = other DNA
ccgggcggaaactgactcaggcagaaacaacccgacttaacgccgtgctggattacattgacgcggtgacggcaa

SEQ ID NO: 42319 - DNA, 75 bp, synthetic construct
  source 1..75: mol_type = other DNA
gcaacgcctggtggcactattgtgaaagcgacacctacgtttgatcgcacccgcgcagatgatttgttgctggat

SEQ ID NO: 42320 - DNA, 75 bp, synthetic construct
  source 1..75: mol_type = other DNA
acagtgcgtcattcgacatttgtgaaaacggcgcaaaagcaatcgcctgggaagtcacggataagcaggtaaatg

SEQ ID NO: 42321 - DNA, 75 bp, synthetic construct
  source 1..75: mol_type = other DNA
ctacacggtaaccgcgaacgtcaccgacagcgcaggcaacagcaattccgccagccataacgtgctggtcaacag

SEQ ID NO: 42322 - DNA, 75 bp, synthetic construct
  source 1..75: mol_type = other DNA
caccacaggaaaagacggttgtaagtatcacagttgatccggagtcaccggaatctttcatgaagcggcctaaac

SEQ ID NO: 42323 - DNA, 75 bp, synthetic construct
  source 1..75: mol_type = other DNA
ctgggatagatactacagacaaaaaatactaaggggttccaagccgcaactgaaccgccccggttttcctggaga

SEQ ID NO: 42324 - DNA, 75 bp, synthetic construct
  source 1..75: mol_type = other DNA
tgccacgcgaaccacagacgcatttatggaaacggagtgcgtggaaaatgtcgccacaaccgaaatcattaaagc

SEQ ID NO: 42325 - DNA, 75 bp, synthetic construct
  source 1..75: mol_type = other DNA
gtcagtctgccgttatcggttttcgatccccaggactaccatccactgctaattaccgtttccggaaaaaacgtt

SEQ ID NO: 42326 - DNA, 75 bp, synthetic construct
  source 1..75: mol_type = other DNA
ccggcaactggcagaaatctcagtgctgacagcaggcattggcggcaaaaccgccctggactgggccatgaaaca

SEQ ID NO: 42327 - DNA, 75 bp, synthetic construct
  source 1..75: mol_type = other DNA
ctccatccggtttatggattttgtgcgcgataatccgcatcagcagattttcgaagatgagttgttcactattcg

SEQ ID NO: 42328 - DNA, 75 bp, synthetic construct
  source 1..75: mol_type = other DNA
gcgtttctcgacggcccggtagaagaagcctgccggatggcgaatgatttccagatcacccatgagctggcggat

SEQ ID NO: 42329 - DNA, 75 bp, synthetic construct
  source 1..75: mol_type = other DNA
cttactgcgtcagatatctggcagttaaccgatctcactgaagacccaacactggttgatggatttctggctcag

SEQ ID NO: 42330 - DNA, 75 bp, synthetic construct
  source 1..75: mol_type = other DNA
tgagcacatttaaacaactgcaccagaataaggatgagctgtttgagcggggggagatcaatgtcttcagaggac

SEQ ID NO: 42331 - DNA, 75 bp, synthetic construct
  source 1..75: mol_type = other DNA
caacgctgttaaacgccatcattgctgaaatagttcgtcagtttccagacgagcgtatctgcattatcgaagata

SEQ ID NO: 42332 - DNA, 75 bp, synthetic construct
  source 1..75: mol_type = other DNA
gatcagcgagcagcggctgtcgatctcaccgcagggtagggtgcggtatcagctcaagacgccgtggcgaaatgg

SEQ ID NO: 42333 - DNA, 75 bp, synthetic construct
  source 1..75: mol_type = other DNA
attaatccggtggcgaccgataacgtcatcaacacgccggaacacacccaggcgcaaatcatcagcggcacggtt

SEQ ID NO: 42334 - DNA, 75 bp, synthetic construct
  source 1..75: mol_type = other DNA
agatctatttcgccacgttccatctcggcgtggatggcggcattgaagttaccgccagccataatccgatggatt

SEQ ID NO: 42335 - DNA, 75 bp, synthetic construct
  source 1..75: mol_type = other DNA
cagatgaatttggcgttacagaacgtactttacagcgcgattttcatcagcgtctggttcacctggacttagagt

SEQ ID NO: 42336 - DNA, 75 bp, synthetic construct
  source 1..75: mol_type = other DNA
aaacaattgaatgatcgaggtgtaattgttcgctttcacaaagaaggaatcattgctgacattacaagcgcgatg

SEQ ID NO: 42337 - DNA, 75 bp, synthetic construct
  source 1..75: mol_type = other DNA
caaagtggctgaggctggattaaaagtccatcagcatcatcaggccaatgtgccatcgtggaacgactacttcta

SEQ ID NO: 42338 - DNA, 75 bp, synthetic construct
  source 1..75: mol_type = other DNA
ttttcttaaacgttggtttgggagaaggctctgcattacctgttggtgtccctgttccgtggccttcagccactc

SEQ ID NO: 42339 - DNA, 75 bp, synthetic construct
  source 1..75: mol_type = other DNA
ccatgcgtattcaccaacaacatcctgcatcccgtctttttccgttctgcaccggtaagtaccgctggcacggca

SEQ ID NO: 42340 - DNA, 75 bp, synthetic construct
  source 1..75: mol_type = other DNA
gacatcccgtctttttccgttctgtaccggcaaataccgctggcacggcagtgctgaggcgtataccggtcgtga

SEQ ID NO: 42341 - DNA, 75 bp, synthetic construct
  source 1..75: mol_type = other DNA
ggcgtcagcgaaattcgcctggcgctacgctataaatcgaacgattcgctgctgcgccactttaaggatacctcc

SEQ ID NO: 42342 - DNA, 75 bp, synthetic construct
  source 1..75: mol_type = other DNA
cggggatgccctcccagatggcagcccggctggatgaggcctgggctgccattaagaccgggctggtcagggggc

SEQ ID NO: 42343 - DNA, 75 bp, synthetic construct
  source 1..75: mol_type = other DNA
gcatcaccgttaagcaagtgcccgtggaagaagatgcctataacactaaagtcattactctttcacgtagcggtt

SEQ ID NO: 42344 - DNA, 75 bp, synthetic construct
  source 1..75: mol_type = other DNA
ctgacaggcacactgatgaaagtagcggctgttgtggctgcggttaccgtaggcctcggcaccttagcggtggcg

SEQ ID NO: 42345 - DNA, 75 bp, synthetic construct
  source 1..75: mol_type = other DNA
cctttggcacttccagcgaaaggtggagaagcgatggtgagtcgcgcagccactgtgccgcccgtttacagcatt

SEQ ID NO: 42346 - DNA, 75 bp, synthetic construct
  source 1..75: mol_type = other DNA
atgccatgacggttcattattaccggctgcgggattatgccctgcagcatccggaatgcagtgccattatgcgca

SEQ ID NO: 42347 - DNA, 75 bp, synthetic construct
  source 1..75: mol_type = other DNA
caggcaagaacactcagcgcccacagtttgaggcaatgatgaactatgtgcgggagggtgacgtgttacacgtcc

SEQ ID NO: 42348 - DNA, 75 bp, synthetic construct
  source 1..75: mol_type = other DNA
tgccgcaggcgcggtgctgcgagtactggcatccggtccgctggcgatgctgcgcgttgctctgtatgccgtatc

SEQ ID NO: 42349 - DNA, 75 bp, synthetic construct
  source 1..75: mol_type = other DNA
aaaccggagcgcagaataccttcagcagcctgggcgaaacgctgcaccagccgctgatggatattctgtacacgg

SEQ ID NO: 42350 - DNA, 75 bp, synthetic construct
  source 1..75: mol_type = other DNA
taatttcttcaactattgcattgtcaaaggtgttacagagattaatgatgagttacgaataaactaccttaaaaa

SEQ ID NO: 42351 - DNA, 75 bp, synthetic construct
  source 1..75: mol_type = other DNA
gcactgaagcgtataccggtcgtgaagtacaggatattcccggtgtgctggccgtgtttgccgaacgccgtaagg

SEQ ID NO: 42352 - DNA, 75 bp, synthetic construct
  source 1..75: mol_type = other DNA
gtctctgtttccccatcttcgcgcagaaagcgggggatttcttccactgaaaattggcataaccaatgattttgc

SEQ ID NO: 42353 - DNA, 75 bp, synthetic construct
  source 1..75: mol_type = other DNA
gcacgtctcaaacgccagctggcagaacgggatgaagagctggctatcctccaaaaggccgcgacatacttcgcg

SEQ ID NO: 42354 - DNA, 75 bp, synthetic construct
  source 1..75: mol_type = other DNA
gagcgtggcgctttgccgatgattgatcgcggtgatatccgtcaggctatcgaccgttgcagcaatatctgggct

SEQ ID NO: 42355 - DNA, 75 bp, synthetic construct
  source 1..75: mol_type = other DNA
atatgccgactggcaccgtttttaccgcacgcattattttcaggatacccagctggatatgcatttttccgggct

SEQ ID NO: 42356 - DNA, 75 bp, synthetic construct
  source 1..75: mol_type = other DNA
tggcggatacggtggagacagcactgctgatgcgcaggatgattatgacggggatgtcggaaccaaatgcaacag

SEQ ID NO: 42357 - DNA, 75 bp, synthetic construct
  source 1..75: mol_type = other DNA
gatgatggctggttcctgggatctgtccatgatacccgctacgggcctgcctgttactggttacgtcatatcaga

SEQ ID NO: 42358 - DNA, 75 bp, synthetic construct
  source 1..75: mol_type = other DNA
ggcctgctgacgtatctgactaacctgtatttcaaaatcagagaggaccgtcgtaaggcggcgcggggagagtaa

SEQ ID NO: 42359 - DNA, 75 bp, synthetic construct
  source 1..75: mol_type = other DNA
acgagcggacccaccactaccactacgacagccagcaccgtctggtgttctacacgcggatacagcatggcgagc

SEQ ID NO: 42360 - DNA, 75 bp, synthetic construct
  source 1..75: mol_type = other DNA
tcagcaatattcgcagacaaaattgaatcactggcagcagaagccgagatggaagaaaatcagcagaataattaa

SEQ ID NO: 42361 - DNA, 75 bp, synthetic construct
  source 1..75: mol_type = other DNA
atgcaaaatcttaatcctcagcgtaaagctttcctcgatatgttggcgtggtcagagggaacggataacgggcga

SEQ ID NO: 42362 - DNA, 75 bp, synthetic construct
  source 1..75: mol_type = other DNA
tgcacaaatgagtgcaaatatccgcgcccgttatgaagcgtcacctcgtagtgcgaatgctcaggctttgcgtga

SEQ ID NO: 42363 - DNA, 75 bp, synthetic construct
  source 1..75: mol_type = other DNA
ctggccgtgtttgcagaacgccgtaaggacagttttggtccgtatgtccggctgatgagcgtcaccctgaactga

SEQ ID NO: 42364 - DNA, 75 bp, synthetic construct
  source 1..75: mol_type = other DNA
ataatgggagaatacaatcttttaccggataaaaacagtcgtaatggtctaaaacttctacagaagcaagctgat

SEQ ID NO: 42365 - DNA, 75 bp, synthetic construct
  source 1..75: mol_type = other DNA
agcgcacccgcgcccttgttgaacggtatctcaacgagtgtgaatgccgtgacctcaccgatatcatgtgcgccc

SEQ ID NO: 42366 - DNA, 75 bp, synthetic construct
  source 1..75: mol_type = other DNA
ctgaagttccgggattatctccgtattttgacaaaagaaataacaaagtttactggcgttacaggcatcccataa

SEQ ID NO: 42367 - DNA, 75 bp, synthetic construct
  source 1..75: mol_type = other DNA
tttatatttcggttctgcgtagtaataaaataagtgtatttaaattaatcactatcacaactgtcttgattgtat

SEQ ID NO: 42368 - DNA, 75 bp, synthetic construct
  source 1..75: mol_type = other DNA
gccggatctcaccattaacaccgtcgcgggcgatgacattatcaacgccatcgaacacgggcaggcgctggtggt

SEQ ID NO: 42369 - DNA, 75 bp, synthetic construct
  source 1..75: mol_type = other DNA
tgagtttattttcacgtttgatggccgtcgttttgatggcggaaaaacctcgcagtcacgccttgcccccgtggt

SEQ ID NO: 42370 - DNA, 75 bp, synthetic construct
  source 1..75: mol_type = other DNA
ctggtgggcggtctgcaatcaggtagcggacgcactaccggaggctgtattacgccgctcactgggattaccggc

SEQ ID NO: 42371 - DNA, 75 bp, synthetic construct
  source 1..75: mol_type = other DNA
gattgcggatgaacctgccttactggaatccctgctaagaaaagcattgggaacctaccaggatagggcggggca

SEQ ID NO: 42372 - DNA, 75 bp, synthetic construct
  source 1..75: mol_type = other DNA
ccgataatcaacaggtgaaactgtcaatgccggaactggaagaactggcgacagcaatggcgcaggcacaggtcg

SEQ ID NO: 42373 - DNA, 75 bp, synthetic construct
  source 1..75: mol_type = other DNA
ggtctttcatcagctgatacaggtggcggataaccgctggtactggtatcagcgttatcaccatttgctggtcga

SEQ ID NO: 42374 - DNA, 75 bp, synthetic construct
  source 1..75: mol_type = other DNA
caacatcacgcagtcgctgcgttgtgacaataacggggaaagcctgcgtattgaccctgccggttatccggagga

SEQ ID NO: 42375 - DNA, 75 bp, synthetic construct
  source 1..75: mol_type = other DNA
atggctgtaccaaaacatcttcgcttttttacgttgtttgtggatggtgaaaacgaagtgggcaaagtgacatcc

SEQ ID NO: 42376 - DNA, 75 bp, synthetic construct
  source 1..75: mol_type = other DNA
tcgttcggcaatcgaagatggggtcgtggagccacacgagcagacagcaattaatgatgagttgtatctgtcaat

SEQ ID NO: 42377 - DNA, 75 bp, synthetic construct
  source 1..75: mol_type = other DNA
gatgctcctggttcatataagtcaggttatgtgtcctgtcgaactctggatttgagatcatgggaatatgtgcca

SEQ ID NO: 42378 - DNA, 75 bp, synthetic construct
  source 1..75: mol_type = other DNA
gtgcgggtattacttcgacctgttctggtaccggagttcgggctggtggtccttaagccgggccgtgaatccatg

SEQ ID NO: 42379 - DNA, 75 bp, synthetic construct
  source 1..75: mol_type = other DNA
gttatgcaatctgccgttctgcagattttaactcatgggaatatgtgccagaccatcgcggtgaaatcgtctata

SEQ ID NO: 42380 - DNA, 75 bp, synthetic construct
  source 1..75: mol_type = other DNA
aagctctcgatatttattgaaatgaccactggcgtatcaaaagaaaaattacgtccagatatttttcaaaagatt

SEQ ID NO: 42381 - DNA, 75 bp, synthetic construct
  source 1..75: mol_type = other DNA
caccacaggaaaagacggtggtcagcattgccgttgatccggagtctccggaatctttcatgaaacgacctaaac

SEQ ID NO: 42382 - DNA, 75 bp, synthetic construct
  source 1..75: mol_type = other DNA
tgatgttatcgatcatgctcagataaaaagtgacttactggaatggattggtggtgaaaacctcagggaactggg

SEQ ID NO: 42383 - DNA, 75 bp, synthetic construct
  source 1..75: mol_type = other DNA
atgaccgtgatgtgggcgctggaagctgataccgtagaatacggtgaatacctgaccggcgtgcgaattgaaggg

SEQ ID NO: 42384 - DNA, 75 bp, synthetic construct
  source 1..75: mol_type = other DNA
agtgtaacggtactggtggcgctgctggtctgtctgatcccaaccactattggcggcctgttgtcagcgatcggc

SEQ ID NO: 42385 - DNA, 75 bp, synthetic construct
  source 1..75: mol_type = other DNA
ctggcgaaaaaagcgaaagaacaggtctctgcgcgggtgaatttttttaccaaacacatgaatgtgtgggtcact

SEQ ID NO: 42386 - DNA, 75 bp, synthetic construct
  source 1..75: mol_type = other DNA
gatgacattgatgactgctggcgactactgggtgaaaactgccggtgcggcaaccgtagggcagaagattttcgc

SEQ ID NO: 42387 - DNA, 75 bp, synthetic construct
  source 1..75: mol_type = other DNA
tggcgaagatgtctatccgattctgtcgctgcaatcgtgcctcgacaagcgtgcggcaaaaggcggcgtctcacc

SEQ ID NO: 42388 - DNA, 75 bp, synthetic construct
  source 1..75: mol_type = other DNA
caccccgacccctgacgataaaatcgactgccataaacatccctcctcactgacgcagtttctcgcacaaaaaaa

SEQ ID NO: 42389 - DNA, 75 bp, synthetic construct
  source 1..75: mol_type = other DNA
ccggcggcatcacaaccgctggcggatgatcctgccattcgggccgtgttccgcaatgaggctgtgatccgtcgg

SEQ ID NO: 42390 - DNA, 75 bp, synthetic construct
  source 1..75: mol_type = other DNA
gctgtcagccgccatcgtctgtcagacagcacatgctgatgtcaacacaccgaacatcaccggagaaaaaaacaa

SEQ ID NO: 42391 - DNA, 75 bp, synthetic construct
  source 1..75: mol_type = other DNA
ggtcagggatatcagaagcggcaggtcgcagataaccctggtggcaaccgtggcgctgatgtttcttcgcccggg

SEQ ID NO: 42392 - DNA, 75 bp, synthetic construct
  source 1..75: mol_type = other DNA
cgcaatcgctggatactcaggcacagatagatccggttaatcaggtaaaagttaccgctgacgaagtaaacaaaa

SEQ ID NO: 42393 - DNA, 75 bp, synthetic construct
  source 1..75: mol_type = other DNA
gtatggagatggacacagaagacagttaccttcagagcctgcttactgctgtgcgttcacatccagagctggata

SEQ ID NO: 42394 - DNA, 75 bp, synthetic construct
  source 1..75: mol_type = other DNA
gcaggaagttgcggagtctattcttgcgggaattaaagcgtattttgccgatggggcgacgctggcgagaagggg

SEQ ID NO: 42395 - DNA, 75 bp, synthetic construct
  source 1..75: mol_type = other DNA
gtggctgattcgtaatgacctggcggatgccttaccggaaagtgcagcccgtaaggcactgagattaccgaagcc

SEQ ID NO: 42396 - DNA, 75 bp, synthetic construct
  source 1..75: mol_type = other DNA
aaggttcactaatcttaggcacgcttggtttcactcaagaagaaaatgaaaaacttgtagaaatatggaagaagc

SEQ ID NO: 42397 - DNA, 75 bp, synthetic construct
  source 1..75: mol_type = other DNA
gaaaatacaaccactatcgccccattaacgccatacgataaatgggatggtgagaaatgggtgacggataccgag

SEQ ID NO: 42398 - DNA, 75 bp, synthetic construct
  source 1..75: mol_type = other DNA
acagcaccagtgaaaagctggcggcaacgccaaaagcggtcaaggcagcaaatgacaacgcaaattcacgtctgg

SEQ ID NO: 42399 - DNA, 75 bp, synthetic construct
  source 1..75: mol_type = other DNA
gacaatgttttctgctatgacgtttgacccgcgtttgtcgtgggatcgtcaacctgaatcagagcatgaggagtc

SEQ ID NO: 42400 - DNA, 75 bp, synthetic construct
  source 1..75: mol_type = other DNA
tcagcgggagatgaagcaagagctgaataacctggaggatttgcattcaatcaggaaactggtcgttagctcaga

SEQ ID NO: 42401 - DNA, 75 bp, synthetic construct
  source 1..75: mol_type = other DNA
ctgacgatatctggtattttgcctccggtggcgtcattggcagcttactaagtactacgctacaaccactgctac

SEQ ID NO: 42402 - DNA, 75 bp, synthetic construct
  source 1..75: mol_type = other DNA
cagccgcagtatcagcagccacaacagcaggttgcgccgcagccacaatatcagcagccgcaacaaccggttgcg

SEQ ID NO: 42403 - DNA, 75 bp, synthetic construct
  source 1..75: mol_type = other DNA
cagctgggcattaccagtattctggtgaaagataaaaccaccatcccggactatttcgcgaaggtgttatgctaa

SEQ ID NO: 42404 - DNA, 75 bp, synthetic construct
  source 1..75: mol_type = other DNA
accacaggaaccagcgcagctacaaaagaccgtttatatgagcgagtgtttcttggtggctcatttaacgcgtgg

SEQ ID NO: 42405 - DNA, 75 bp, synthetic construct
  source 1..75: mol_type = other DNA
gcacagcatagcgccgcagtagacgcggcagaagcacagcgccagtcactgattgatgcagcaatggcttccatc

SEQ ID NO: 42406 - DNA, 75 bp, synthetic construct
  source 1..75: mol_type = other DNA
catcaccgttgatccagagtctccggaatctttcatgaagctgcctaaacgtcaccgttgggttaaggagaaata

SEQ ID NO: 42407 - DNA, 75 bp, synthetic construct
  source 1..75: mol_type = other DNA
ctcagaatacaaccgatatcgacgcacttgataccaggctcacagcggcagagggaagtatttcgacgctacaaa

SEQ ID NO: 42408 - DNA, 75 bp, synthetic construct
  source 1..75: mol_type = other DNA
gaaaacgacaacaatcaaacggtaattgacgcgtattttgaagatgggaatccaaacatcagtggatgggagcca

SEQ ID NO: 42409 - DNA, 75 bp, synthetic construct
  source 1..75: mol_type = other DNA
caccacgaccgactcttccggcaactggagcgtcaccgttccggcatcggcggtaaccgccttgggccaggccaa

SEQ ID NO: 42410 - DNA, 75 bp, synthetic construct
  source 1..75: mol_type = other DNA
acctgtctgcagttatggaataaagaaggcagggtggtacgcctggagggcgatccgctggaagtggcgcagtgg

SEQ ID NO: 42411 - DNA, 75 bp, synthetic construct
  source 1..75: mol_type = other DNA
aggcggcacttctgccactgatctggcggtggagctgaacggcataacgtatcaggcctgccgtggggattttgt

SEQ ID NO: 42412 - DNA, 75 bp, synthetic construct
  source 1..75: mol_type = other DNA
tgtccagtcagtttacaacatactcactctatgattgcgggaaaatcaacagtgtcagggtcatcagattgtacg

SEQ ID NO: 42413 - DNA, 75 bp, synthetic construct
  source 1..75: mol_type = other DNA
tgtgattctcgctgaccatgagcagcgaatttctgctgcggaagcaacgcttgttaatcatgaggagcgaatcag

SEQ ID NO: 42414 - DNA, 75 bp, synthetic construct
  source 1..75: mol_type = other DNA
gtgggcaaagggttacatcctgattgctacattgaactggtgattgaagacagttactacaatatgcgcgagaaa

SEQ ID NO: 42415 - DNA, 75 bp, synthetic construct
  source 1..75: mol_type = other DNA
attttggcggtgttgttaaaacagcatcagcgctaggaacttcgaaaaccacagtcagcatgtggggagagaatg

SEQ ID NO: 42416 - DNA, 75 bp, synthetic construct
  source 1..75: mol_type = other DNA
acagttggccagcaactggcgaccagcaagcgagtacaaatgctgctctcgcaattgggttacgacgagtttgtc

SEQ ID NO: 42417 - DNA, 75 bp, synthetic construct
  source 1..75: mol_type = other DNA
gggaaatatttgtgcttaccagttccggctggataatggcggaaacggtgaaggatttggccccctcaccatcac

SEQ ID NO: 42418 - DNA, 75 bp, synthetic construct
  source 1..75: mol_type = other DNA
cgctaacgcatccgatcttccggctaaagcactggtagatgcgggctatgatggcatcgttagcgctggtgtggg

SEQ ID NO: 42419 - DNA, 75 bp, synthetic construct
  source 1..75: mol_type = other DNA
agtgacgaacaacatttatttggcagagctgcattgatggtcaggtatgaagatgaaaataaaacgcctgtgacg

SEQ ID NO: 42420 - DNA, 75 bp, synthetic construct
  source 1..75: mol_type = other DNA
tgctgcatgtcaggcaaactatatccgcgatgttcagggcgggactgtatccccgtcatcctcagctgaactgac

SEQ ID NO: 42421 - DNA, 75 bp, synthetic construct
  source 1..75: mol_type = other DNA
aaaatgcacttctttggcgacagcgaaggacgtatagtgcgcggcctgctggcggtgctgttgactgccgttgag

SEQ ID NO: 42422 - DNA, 75 bp, synthetic construct
  source 1..75: mol_type = other DNA
gcatcaacaaatccattcatcatcaaggcatgctcctcgattaccattactcattatgcgtagcgactttatgga

SEQ ID NO: 42423 - DNA, 75 bp, synthetic construct
  source 1..75: mol_type = other DNA
accgcgttgggaaggcattactcgcccatacagcgcggaagatgtggtgaaattacgcggttcagtcaatcctga

SEQ ID NO: 42424 - DNA, 75 bp, synthetic construct
  source 1..75: mol_type = other DNA
gcacagcatagcgccgcagtagacgcggcagaagcacagcgtcagtcactgattgatactgcaatggcttccatc

SEQ ID NO: 42425 - DNA, 75 bp, synthetic construct
  source 1..75: mol_type = other DNA
gcacagcatagcgccgcagtagaagcggcagaagcacagcgccagtcactgattgatgctgcaatggcttccatt

SEQ ID NO: 42426 - DNA, 75 bp, synthetic construct
  source 1..75: mol_type = other DNA
aactcaaatggcaatggggcaagtacaacaaatgtctataacagacaacgcaagcaaaaacactatccaacaacg

SEQ ID NO: 42427 - DNA, 75 bp, synthetic construct
  source 1..75: mol_type = other DNA
atgagtctggcatcgcgcaggccactctcgcaggcgttgcctttggtgagcagactgttactgcatcactggcta

SEQ ID NO: 42428 - DNA, 75 bp, synthetic construct
  source 1..75: mol_type = other DNA
ctggagttctcggcttatgcccagtctcgcgtgctgcaaaaactctccggcgtgagcgggatcctggcgattacc

SEQ ID NO: 42429 - DNA, 75 bp, synthetic construct
  source 1..75: mol_type = other DNA
atgagtctctctttcagtgaagcaaaattagaacaagcgatcattgaactgttacaggatcagggatatcaacac

SEQ ID NO: 42430 - DNA, 75 bp, synthetic construct
  source 1..75: mol_type = other DNA
atgaattacgatgaaataacgaaaattaccgctgaacgtattagcgactacatgaccgaagcagttaatacagac

SEQ ID NO: 42431 - DNA, 75 bp, synthetic construct
  source 1..75: mol_type = other DNA
ccaggcagacgttggcgcagtggtttgaagagaagggaaggcaggcggttagacaggaggtaagtcaggaattcg

SEQ ID NO: 42432 - DNA, 75 bp, synthetic construct
  source 1..75: mol_type = other DNA
gatgcaccaggtaaaaacaaagaggggtataccatttgcaggacggctgattttacagcgtgggaatacattgtc

SEQ ID NO: 42433 - DNA, 75 bp, synthetic construct
  source 1..75: mol_type = other DNA
ccggacggaatctgacgcagtcagaaaccagccgacttaacacggtgttggattacattgacgcggtgacggcaa

SEQ ID NO: 42434 - DNA, 75 bp, synthetic construct
  source 1..75: mol_type = other DNA
tcaagcatcaatttcttatatccacgattatagatgggagtggaaggaggttgaggcaaagaaaataaataatat

SEQ ID NO: 42435 - DNA, 75 bp, synthetic construct
  source 1..75: mol_type = other DNA
gcattgaccgtttagagcgatttcattctttgctggcgggtcagtactggacgtccactgacagcatccctgaag

SEQ ID NO: 42436 - DNA, 75 bp, synthetic construct
  source 1..75: mol_type = other DNA
ggagcgtcgatttacccacacaaagcgcgggcgaacatacctggtcagtggtgcaaatcgtcggcagcaccatta

SEQ ID NO: 42437 - DNA, 75 bp, synthetic construct
  source 1..75: mol_type = other DNA
acccaattaattttgcttccaagggactgtttaaatttgaggcaaaaccaattatccctgacgatattcgttctg

SEQ ID NO: 42438 - DNA, 75 bp, synthetic construct
  source 1..75: mol_type = other DNA
caggccgggcagacgctgaccgtcacgctcaataacaacacgtaccagaccaccgttcaggcggatggcacctgg

SEQ ID NO: 42439 - DNA, 75 bp, synthetic construct
  source 1..75: mol_type = other DNA
gtggctggattatctggacgcactggaactggtcgatacttcctgtgcgccagatattgaatggcctacgcctcc

SEQ ID NO: 42440 - DNA, 75 bp, synthetic construct
  source 1..75: mol_type = other DNA
agaccgccaccagcatactgaaacagcgcacaaaaaatcttgcgccgctgcctcacgcccaccagcaacagaacc

SEQ ID NO: 42441 - DNA, 75 bp, synthetic construct
  source 1..75: mol_type = other DNA
cgaaaggtttacaggatgcgggcgtcgatgtgctggatattggcatgtccggcaccgaagagatctatttcgcca

SEQ ID NO: 42442 - DNA, 75 bp, synthetic construct
  source 1..75: mol_type = other DNA
cgccccgacaggccagcgcatctgggaagagttacagagcggcaaatggggtgaaatcgccccgttcaccgtcac

SEQ ID NO: 42443 - DNA, 75 bp, synthetic construct
  source 1..75: mol_type = other DNA
agatcgatctcgaagcaaagctctggaccattccagccgaacgtatgaaggctaagcgcgagcacatagttccac

SEQ ID NO: 42444 - DNA, 75 bp, synthetic construct
  source 1..75: mol_type = other DNA
gctaaacgggaacacataattcctctatcatctcaggcattagagattcttaatgtgatgaagcctattagtgct

SEQ ID NO: 42445 - DNA, 75 bp, synthetic construct
  source 1..75: mol_type = other DNA
tttggctatgaattgtgccagcgccgcgtgaatgaaaaagatctcgctgaactggatctttcctgctggcgcgtc

SEQ ID NO: 42446 - DNA, 75 bp, synthetic construct
  source 1..75: mol_type = other DNA
caacagagcagcttgccgttgagcagtcccgtctggcacagatgcaggaaaaagcgcagtccattcaggatgtgc

SEQ ID NO: 42447 - DNA, 75 bp, synthetic construct
  source 1..75: mol_type = other DNA
agtgcattcaaaggaaagcatgcacaatcaggagctttttcggaatttttagatgctatagagcatggttatata

SEQ ID NO: 42448 - DNA, 75 bp, synthetic construct
  source 1..75: mol_type = other DNA
ctgtatgactggatacagactcagatgaaaacactgtctcgtcactcggatacggcaaaagcgttcgcatacctg

SEQ ID NO: 42449 - DNA, 75 bp, synthetic construct
  source 1..75: mol_type = other DNA
acaacattatcagtgctgcggaacataacgtcgcgctggtactgagcggcacgtcgaatgcagaagcggggcaaa

SEQ ID NO: 42450 - DNA, 75 bp, synthetic construct
  source 1..75: mol_type = other DNA
tcgcggatggtaaaaatccggatgtgctttccgtgggagaggggccagggatagccaccaatattggcgtagcgt

SEQ ID NO: 42451 - DNA, 75 bp, synthetic construct
  source 1..75: mol_type = other DNA
gcgctgaggcgtataccggtcgcgaagtacaggatattcccggcgttcttgccgtgtttgcagaacgccgtaagg

SEQ ID NO: 42452 - DNA, 75 bp, synthetic construct
  source 1..75: mol_type = other DNA
aaagcgcaatccattcaggatgtgcttgccgggctggaggagcgacgggtggcgttgatccgtcaacaggcggcg

SEQ ID NO: 42453 - DNA, 75 bp, synthetic construct
  source 1..75: mol_type = other DNA
gatgctggagtccgggtgctgcatgatttatgcgccaggaaccatgggcgacctgaaacctgaactgtttgcggt

SEQ ID NO: 42454 - DNA, 75 bp, synthetic construct
  source 1..75: mol_type = other DNA
ttgctgaactactggagccgcagtatgacgtcctgcgccagtatgtgctgatgcccggtaaagtccatgctgatg

SEQ ID NO: 42455 - DNA, 75 bp, synthetic construct
  source 1..75: mol_type = other DNA
tcactgaatgatgggcgtattcgttttcgctcaactttaacataccacggtatgctttatcgcatgtgtgcgttg

SEQ ID NO: 42456 - DNA, 75 bp, synthetic construct
  source 1..75: mol_type = other DNA
agttaaatggatggctgttcagcatcaaccctgagaaagttcgtgctgacatccgtgataaactgattcagtacc

SEQ ID NO: 42457 - DNA, 75 bp, synthetic construct
  source 1..75: mol_type = other DNA
ataaacccgatgggccagcaacagcagggatagatgatttgggtgaaattttagctaaaatgaaacagagaacat

SEQ ID NO: 42458 - DNA, 75 bp, synthetic construct
  source 1..75: mol_type = other DNA
ccgttggtgtgcctgttccgtggccttcagccacaccgcctactggctggctgaaatgcaacggtgcggcttttt

SEQ ID NO: 42459 - DNA, 75 bp, synthetic construct
  source 1..75: mol_type = other DNA
gaaaatgcacgtaagaaaacatctgttgatgacaggactccgcttcgtgatgctgtaaatatgctagtcagcaaa

SEQ ID NO: 42460 - DNA, 75 bp, synthetic construct
  source 1..75: mol_type = other DNA
ataatgaggcgaataagccgaagagaaaagggccaaaatcggaagctgaaaaagcagaagatgtttacaacaggc

SEQ ID NO: 42461 - DNA, 75 bp, synthetic construct
  source 1..75: mol_type = other DNA
gctgaagcggggcagattgttacggtaacgctcaatagcccgaccgtgcagacctatcaggcaacggtacaggcc

SEQ ID NO: 42462 - DNA, 75 bp, synthetic construct
  source 1..75: mol_type = other DNA
gagtgttatgccatgacggttcattattaccgtctgcgggactacgccctgcagcatccggaatgcaacgccatt

SEQ ID NO: 42463 - DNA, 75 bp, synthetic construct
  source 1..75: mol_type = other DNA
gcacacgttgccatctggaaagcattaagcgtcggtgaaaccctgcccgcccgcgagcttcagcacgttgataaa

SEQ ID NO: 42464 - DNA, 75 bp, synthetic construct
  source 1..75: mol_type = other DNA
cgcagcttcggccgttatgaactcaccaccgcttatacccctgccgggcagttacagagccagcacctgaacagc

SEQ ID NO: 42465 - DNA, 75 bp, synthetic construct
  source 1..75: mol_type = other DNA
cggggctgaaaatctccggtgccagtacggcagaggcgggctcggtgatcacccagttcagccaggcgctggcac

SEQ ID NO: 42466 - DNA, 75 bp, synthetic construct
  source 1..75: mol_type = other DNA
cttgccgttatgctgaatttactggtttttattcgttccagtgaactcagataagcccgttggtctgaaattgat

SEQ ID NO: 42467 - DNA, 75 bp, synthetic construct
  source 1..75: mol_type = other DNA
gggtaaccggtgcggggaaaggtatcggttacgccacggcgctggcatttgttgaagcgggtgcgaaggtcacgg

SEQ ID NO: 42468 - DNA, 75 bp, synthetic construct
  source 1..75: mol_type = other DNA
taagcgtcggtgaaaccctgcccgcccgcgagcttcagcacgttgataaatatgttttagacaacggccagggtg

SEQ ID NO: 42469 - DNA, 75 bp, synthetic construct
  source 1..75: mol_type = other DNA
cgcctgcgtgacagaacatcctgacggcggctggtttgaatacgaacccactaccgggcgctggtatgtcagggg

SEQ ID NO: 42470 - DNA, 75 bp, synthetic construct
  source 1..75: mol_type = other DNA
gctcaaatctttgggcaataatgtctgggcccttgaggccgcacctgtcatcgcagaatccaccttaatagtggt

SEQ ID NO: 42471 - DNA, 75 bp, synthetic construct
  source 1..75: mol_type = other DNA
tggaaagtgaaatcctggctgaccgggtgagtgaggaaagccgccgctggctggcatcgtgcggcctgacggtgg

SEQ ID NO: 42472 - DNA, 75 bp, synthetic construct
  source 1..75: mol_type = other DNA
cttgcgctgctgaaagcagacaaggaaggtaaaacccttagccaaccgcgcgcaggtgtggcgctgatggacgaa

SEQ ID NO: 42473 - DNA, 75 bp, synthetic construct
  source 1..75: mol_type = other DNA
ctcctggcgtgcctggctatggccgggatggggcaatcccgagccctcctgcttgcgcacgcgtccggcaacgca

SEQ ID NO: 42474 - DNA, 75 bp, synthetic construct
  source 1..75: mol_type = other DNA
tcattatgcgcagcatgaaaatagaagaatatttactaaagcatttcgatggcatataaggagtattacgcgcta

SEQ ID NO: 42475 - DNA, 75 bp, synthetic construct
  source 1..75: mol_type = other DNA
gcattgaccacggtaaaacgccagcatcgccctgctcttgatctttcacgcctgcctgaacttctgtcgcgtatt

SEQ ID NO: 42476 - DNA, 75 bp, synthetic construct
  source 1..75: mol_type = other DNA
ccccgtatttcgggtgtctttgagaattgcgaatcgcgacgagaattttatggtcgccagttagaaaccgctgcc

SEQ ID NO: 42477 - DNA, 75 bp, synthetic construct
  source 1..75: mol_type = other DNA
cggatggcagggcatcggcgttttactataaccaccacaaccagttaacgtcagccaccgggcctgacgggctgg

SEQ ID NO: 42478 - DNA, 75 bp, synthetic construct
  source 1..75: mol_type = other DNA
gcattgaccacggtaaaacgccagcatcgccctgctcttgatctttcccgcctgcctgaacttatgtcgcgtatt

SEQ ID NO: 42479 - DNA, 75 bp, synthetic construct
  source 1..75: mol_type = other DNA
cgatctgctgattcacgaaggcgcgccatgcattgcacagcaacatgcggcaaaagtgtttaatgccgataaaac

SEQ ID NO: 42480 - DNA, 75 bp, synthetic construct
  source 1..75: mol_type = other DNA
accgcacctgggtgtacatccgttaggttttgaggttgccagcgttaatggcgtccagtggtttaagtctggcgg

SEQ ID NO: 42481 - DNA, 75 bp, synthetic construct
  source 1..75: mol_type = other DNA
aagactggcgtctccatcattactgaagcagttaagcatgcgatggatgtgaatgtgagtacacgaaccagttct

SEQ ID NO: 42482 - DNA, 75 bp, synthetic construct
  source 1..75: mol_type = other DNA
aacagcgcatcagcttctggccgcagcactttggcctcattccacagtgggtggccctggagccccgtgtcttcg

SEQ ID NO: 42483 - DNA, 75 bp, synthetic construct
  source 1..75: mol_type = other DNA
cgatatgcgcgttactgtttcgctgtgaacaacaatcggtcaaagaaatggataaaattcacgcaatgcagttgt

SEQ ID NO: 42484 - DNA, 75 bp, synthetic construct
  source 1..75: mol_type = other DNA
atgtggattgggggatcgtttacgtcgtctgaccgccggtatttgcctgataacacaaactattttccctgttat

SEQ ID NO: 42485 - DNA, 75 bp, synthetic construct
  source 1..75: mol_type = other DNA
atggcgcatatacaactggtcaaacaaacctcttctggattacttctcccggcgacgccggagagttgcgatttt

SEQ ID NO: 42486 - DNA, 75 bp, synthetic construct
  source 1..75: mol_type = other DNA
acccagttcagccaggcgctggcacagggtgtgttgcgcggtgaggaatttaattcggtcaatgaaagtggtgac

SEQ ID NO: 42487 - DNA, 75 bp, synthetic construct
  source 1..75: mol_type = other DNA
ccggaaagaaaaatatggcttcgcactggtttggtgccagtcagtggcagttaccgaacgaagctgattacagaa

SEQ ID NO: 42488 - DNA, 75 bp, synthetic construct
  source 1..75: mol_type = other DNA
tagatcgaatggttacagttacgtatggaaacccgaaggaagcacaagaactatagggctcggaagagtgcggga

SEQ ID NO: 42489 - DNA, 75 bp, synthetic construct
  source 1..75: mol_type = other DNA
tcaaagggcattgttggcggtattcggaaaagtgcttgctgataatgtaaaaattgagcaggtaagaattttcat

SEQ ID NO: 42490 - DNA, 75 bp, synthetic construct
  source 1..75: mol_type = other DNA
gtgcagtatggtgtgactgatcttcagcaaacttattaccgccaggtaaagaacccgaatccggtattcacaccc

SEQ ID NO: 42491 - DNA, 75 bp, synthetic construct
  source 1..75: mol_type = other DNA
cccccgtctgggctatcgccatcgagcgtggaaactccggcgatagcgtcatttacgctgttatcggaggttgcc

SEQ ID NO: 42492 - DNA, 75 bp, synthetic construct
  source 1..75: mol_type = other DNA
tcttgcgcgcggcctgctctgccctgacggacagtaccgccagatagtcactgtggaagatgcggtgcgcggcgg

SEQ ID NO: 42493 - DNA, 75 bp, synthetic construct
  source 1..75: mol_type = other DNA
gaaccacaatccccccaaagtctaaaaggcccgctgcgggatagtaatggacgttttgtatcccaaaaaagcaat

SEQ ID NO: 42494 - DNA, 75 bp, synthetic construct
  source 1..75: mol_type = other DNA
tgatgtttggtttgagactaaactcgaagaacaactgaaaatattgagtgctggaaattataaagttgtttgttc

SEQ ID NO: 42495 - DNA, 75 bp, synthetic construct
  source 1..75: mol_type = other DNA
ttgctgaactgctggagccgctgtatgacgtcctgcgccagtatgtgctgatgcccggtaaagtccatgccgatg

SEQ ID NO: 42496 - DNA, 75 bp, synthetic construct
  source 1..75: mol_type = other DNA
atgccagttagccgtaatctctgcattttcttaaacgttggtttgggagaaggtactccagctattggcgttccg

SEQ ID NO: 42497 - DNA, 75 bp, synthetic construct
  source 1..75: mol_type = other DNA
gtaccgtatcacccccgacgacctagatgatctcactgacacaattgaatatctcatgaccactaaccagccaga

SEQ ID NO: 42498 - DNA, 75 bp, synthetic construct
  source 1..75: mol_type = other DNA
cctgatttacgtggtgagtttattcgtggctgggatgacgggcgggggattgatacaggtcgctctattttaagt

SEQ ID NO: 42499 - DNA, 75 bp, synthetic construct
  source 1..75: mol_type = other DNA
tctccctgttagccaccctgccgctggcggtacacgccagcccgcagccgcttgagcaaattaaacaaagcgaaa

SEQ ID NO: 42500 - DNA, 75 bp, synthetic construct
  source 1..75: mol_type = other DNA
accctaacgtcgccaaccgtaacaaaggcccgcgccgtcagccggaaaagaatgttttcaccgatgaacagattg

SEQ ID NO: 42501 - DNA, 75 bp, synthetic construct
  source 1..75: mol_type = other DNA
tggtgggaagccggaaaaaccaaccgcatccgcaacctgctgaagtcacgccagatcggcgcgaccttctatttt

SEQ ID NO: 42502 - DNA, 75 bp, synthetic construct
  source 1..75: mol_type = other DNA
gaagtggagcgtcgtgtgaaggagcgcatgattctgtcacgtaaccgtaattacagccggctggccacagcttcc

SEQ ID NO: 42503 - DNA, 75 bp, synthetic construct
  source 1..75: mol_type = other DNA
tcccgtatgggcagtgaatattaccggaccctgcagaatggcgggcgtcaggccgctgcggcagcccgggagcag

SEQ ID NO: 42504 - DNA, 75 bp, synthetic construct
  source 1..75: mol_type = other DNA
gcccggctggggtatgcggcggatgaccttggttttgtgggggattcgtatcaggaggcgagacagcgttatatc

SEQ ID NO: 42505 - DNA, 75 bp, synthetic construct
  source 1..75: mol_type = other DNA
aggcctacgacattatcagtcaccgccgtctggagtttgacgccggacacaccgacatagcgcagtcatttatgg

SEQ ID NO: 42506 - DNA, 75 bp, synthetic construct
  source 1..75: mol_type = other DNA
agtctttacctgttctgtggtcatcgcctggcatctgatatcgaaatcatgatgcgtgaacgctttaatgtgctg

SEQ ID NO: 42507 - DNA, 75 bp, synthetic construct
  source 1..75: mol_type = other DNA
gcaatgtgctgccggagcagaccgtcacctttacggtgacgaagggggcggctgtatttgccaatgcagggcaga

SEQ ID NO: 42508 - DNA, 75 bp, synthetic construct
  source 1..75: mol_type = other DNA
ggagctgccgcatggtacacgctgtaccagaatcaggaacaggccagggagtctgcgcgccagtatgcactgacg

SEQ ID NO: 42509 - DNA, 75 bp, synthetic construct
  source 1..75: mol_type = other DNA
aggtttccggttatctgcggggaagtgacgcacctggcgggctgagagatatggaggtgaaagtatgtcttcctc

SEQ ID NO: 42510 - DNA, 75 bp, synthetic construct
  source 1..75: mol_type = other DNA
gtgactgatcttcaacaaacgtattaccgccaggtaaagaacccgaatccggtatttacaccccgtaaaggtgcc

SEQ ID NO: 42511 - DNA, 75 bp, synthetic construct
  source 1..75: mol_type = other DNA
atgactgtactgattgaaacctctgcatcggataaagagcgtgagcgaacaacccttattcgtttatggaaagag

SEQ ID NO: 42512 - DNA, 75 bp, synthetic construct
  source 1..75: mol_type = other DNA
cgaaaaactccagactgggcgaagcgttcagctatgtactgaatcagtgggacgtcctctgttattacagtgatg

SEQ ID NO: 42513 - DNA, 75 bp, synthetic construct
  source 1..75: mol_type = other DNA
aaaagcagcattatcgctgggacggcatgcaataggtgtggagctggaagaagagagatttaaccagactgtaag

SEQ ID NO: 42514 - DNA, 75 bp, synthetic construct
  source 1..75: mol_type = other DNA
ttacccgtaatattgctgccagaacagcggcacaggcaacgctgaataacgttacgtcagttagtagtcggttgt

SEQ ID NO: 42515 - DNA, 75 bp, synthetic construct
  source 1..75: mol_type = other DNA
actcggcaatatggataccattgatgtggtacgcggcggcggtgcggtgcgctatgggccgcaaagcgtcggcgg

SEQ ID NO: 42516 - DNA, 75 bp, synthetic construct
  source 1..75: mol_type = other DNA
cagacaatatttgggcgatgggagatgttaccggcgggctgcaatttacttacatatcactggatgattaccgca

SEQ ID NO: 42517 - DNA, 75 bp, synthetic construct
  source 1..75: mol_type = other DNA
tacaggatggcagcggcgtggataaactgaccgctgaacagcgtgaacgttatctacaggccagcgccgattgcc

SEQ ID NO: 42518 - DNA, 75 bp, synthetic construct
  source 1..75: mol_type = other DNA
atgcgatacagacgtgaagacgccgacggtgattacacctttggcagcggcgatgatacctggctgattaactca

SEQ ID NO: 42519 - DNA, 75 bp, synthetic construct
  source 1..75: mol_type = other DNA
ctgaatgataccctgtaccgttacgtgatgaacacccgcaaggttcacactgacgacacaccagtaaaagtgctg

SEQ ID NO: 42520 - DNA, 75 bp, synthetic construct
  source 1..75: mol_type = other DNA
atgcacgacgagcggacccaccactaccactacgacagccagcaccgtctggtgttctacacgcggatacagcac

SEQ ID NO: 42521 - DNA, 75 bp, synthetic construct
  source 1..75: mol_type = other DNA
gcacagcatagcgccgcagtaggcgcggcagaagcacagcgtcagtcactgattgatactgcaatggcttccatt

SEQ ID NO: 42522 - DNA, 75 bp, synthetic construct
  source 1..75: mol_type = other DNA
cagatatgcccgctggtcagaaattgatattgaaaatgccatgtggactattcctgctgaacgcgagcctctgcc

SEQ ID NO: 42523 - DNA, 75 bp, synthetic construct
  source 1..75: mol_type = other DNA
gatattgacaatgccatgtggactattccagccgaacgcgaacctctgccaggcgtaaaattctcacaccgggga

SEQ ID NO: 42524 - DNA, 75 bp, synthetic construct
  source 1..75: mol_type = other DNA
ttttcaaagagtgtttaagttctggtaagtcggaatatgaaaaccatcttagtgaaaaagaacatgcgcttcgct

SEQ ID NO: 42525 - DNA, 75 bp, synthetic construct
  source 1..75: mol_type = other DNA
tattgatatcttccccagcctgaaacagtggtcttatgcaacattcttccgtttagttgcgttccagtatctgag

SEQ ID NO: 42526 - DNA, 75 bp, synthetic construct
  source 1..75: mol_type = other DNA
cttctttgtgtgaagccgtccgtgcctttccggcgatagccctggatactgaatttgttcgtacgcgcacttatt

SEQ ID NO: 42527 - DNA, 75 bp, synthetic construct
  source 1..75: mol_type = other DNA
gtgggccgattttctggatgcaaacagagaaaaatttatcagtccatttgaatatgcaaagattaataatccatt

SEQ ID NO: 42528 - DNA, 75 bp, synthetic construct
  source 1..75: mol_type = other DNA
gacatacttatgcctgctggtcgctaacagctggtgctaatcctgcattcatagcaaaccagatggggcatgccg

SEQ ID NO: 42529 - DNA, 75 bp, synthetic construct
  source 1..75: mol_type = other DNA
atctatccttgaacataaccatgaaatgcatggatggacagggaacccactcatggctagagatgttggtgaatt

SEQ ID NO: 42530 - DNA, 75 bp, synthetic construct
  source 1..75: mol_type = other DNA
gcaatggtttctcgacaccaccgaagggactccatggatccagtccgtgctgggcaggcagaagccggaaaccta

SEQ ID NO: 42531 - DNA, 75 bp, synthetic construct
  source 1..75: mol_type = other DNA
aattgaccatattagatttccagtttcctcaagggaaggattcactctgacacgcggtgatagttacgacgtgac

SEQ ID NO: 42532 - DNA, 75 bp, synthetic construct
  source 1..75: mol_type = other DNA
ttttcataaacgttggtttgggagaaggctcagcgttacccgttggtgtgcctgttccgtggccttcagccacac

SEQ ID NO: 42533 - DNA, 75 bp, synthetic construct
  source 1..75: mol_type = other DNA
aacttattaaagcaattagcgagagattgaaagaacaacccaacaaaccaaaacgaatcaaatcatccacctcta

SEQ ID NO: 42534 - DNA, 75 bp, synthetic construct
  source 1..75: mol_type = other DNA
cgaaacatgggtgctgtttaacgtcatgaacggtaaccgcgctgaaatgagcccggaagctgccggcattgctgc

SEQ ID NO: 42535 - DNA, 75 bp, synthetic construct
  source 1..75: mol_type = other DNA
ggcatcccgtctttttccgttctgcacaggtaagtaccgctggcacggcagcactgaagcgtataccggccgtga

SEQ ID NO: 42536 - DNA, 75 bp, synthetic construct
  source 1..75: mol_type = other DNA
tatgctgcaatggtgggcagattttctggatgcaaacagggaggagtgtatcagtccgtttgaatatgcaaaagt

SEQ ID NO: 42537 - DNA, 75 bp, synthetic construct
  source 1..75: mol_type = other DNA
tttctcgaccgccagtatttaagtgtgcaaacgctgaccatggtttatagcagcgcgcaaatcctgatcctgctg

SEQ ID NO: 42538 - DNA, 75 bp, synthetic construct
  source 1..75: mol_type = other DNA
catccttcccgtgagttttgtgtccagtacggcgaaactgattacgatttcctgtgccggatggcggcggaggaa

SEQ ID NO: 42539 - DNA, 75 bp, synthetic construct
  source 1..75: mol_type = other DNA
tcaaagcggcggcaggtcccatcagtgctgcattcgaaccacttaagcctgtgttccagtggattggcgacaaag

SEQ ID NO: 42540 - DNA, 75 bp, synthetic construct
  source 1..75: mol_type = other DNA
ccgctgatggatattctgtacacggtaaaaagcatcacgggggcgttgcgccgctgggtggaagctaacccggaa

SEQ ID NO: 42541 - DNA, 75 bp, synthetic construct
  source 1..75: mol_type = other DNA
ggcaaacaaccttccggaactgcagcgccagctaaaactgacagcgggcaatgatgcgctcggctccatgcagaa

SEQ ID NO: 42542 - DNA, 75 bp, synthetic construct
  source 1..75: mol_type = other DNA
gaagcaccgacgcagatcatcatccagacacagccaggacaaagtgcgcaggatattgcgcgggaggtggcccgc

SEQ ID NO: 42543 - DNA, 75 bp, synthetic construct
  source 1..75: mol_type = other DNA
agtacaggatattcccggtgtgctggctgtgtttgcagaacgccgtaaggacagttttggtccgaatgtccggct

SEQ ID NO: 42544 - DNA, 75 bp, synthetic construct
  source 1..75: mol_type = other DNA
agccgaactcctgaaacactgcgcattctggggtgtcatccgtaaaccggcttcccgcgctgacggaccggtaca

SEQ ID NO: 42545 - DNA, 75 bp, synthetic construct
  source 1..75: mol_type = other DNA
atgtgtgtaaacctgtttggcacaattctctgcgtctgcctgctggtgagtgtctacctatacaacgatggaagc

SEQ ID NO: 42546 - DNA, 75 bp, synthetic construct
  source 1..75: mol_type = other DNA
gacgcacctggcgaaagcaaagacggatttgctatttgtcgaacagcagaccttacatcatggatatacattatc

SEQ ID NO: 42547 - DNA, 75 bp, synthetic construct
  source 1..75: mol_type = other DNA
tctgaatggtctggcggcaggtgaatatcttgaaggtcatacttcgatgatccgtcgcgatccgttgggggtcgt

SEQ ID NO: 42548 - DNA, 75 bp, synthetic construct
  source 1..75: mol_type = other DNA
ccacaccttctgtttccgtgaccactgcatcagggaataatccgcctcagctggttgccaccctcgtccctgatg

SEQ ID NO: 42549 - DNA, 75 bp, synthetic construct
  source 1..75: mol_type = other DNA
gcctgtcgtacagagaattatgccatgacggttcattattaccgtctacgggattacgccctgcagcatccggaa

SEQ ID NO: 42550 - DNA, 75 bp, synthetic construct
  source 1..75: mol_type = other DNA
gtcggatctacgcgcaaaaaggcatttacgatacgctggtggaaaaactcggtgctgcggtggcaacgttaaaat

SEQ ID NO: 42551 - DNA, 75 bp, synthetic construct
  source 1..75: mol_type = other DNA
tgatgacgaaacatgggtactgttcagtaccatgaacggtaaccgcgctgaaatgagcccggaagccgccggcat

SEQ ID NO: 42552 - DNA, 75 bp, synthetic construct
  source 1..75: mol_type = other DNA
cagccgggcagagtaacttaagcggggctttagttaaagctattaatgtgttagtacctccttataatgagcaaa

SEQ ID NO: 42553 - DNA, 75 bp, synthetic construct
  source 1..75: mol_type = other DNA
ctgaaaatgaatcttcaggggtatgactaccgccgggatgatgagtttatgatgtggggatcggcagatctcctg

SEQ ID NO: 42554 - DNA, 75 bp, synthetic construct
  source 1..75: mol_type = other DNA
taatcctgctctggatatggctggcgcattgactacggtaaaacgccagcatcgccccgctcttgatctttctcg

SEQ ID NO: 42555 - DNA, 75 bp, synthetic construct
  source 1..75: mol_type = other DNA
tgttttaggaaaaagtgcgtcttatatcaacataaaggatagtgttaatttagactttatttactacgtactatc

SEQ ID NO: 42556 - DNA, 75 bp, synthetic construct
  source 1..75: mol_type = other DNA
gttgaatatattgatgtaggtgcaacctattacttcaacaaaaatatgtccacttttgttgattacaaaatcaac

SEQ ID NO: 42557 - DNA, 75 bp, synthetic construct
  source 1..75: mol_type = other DNA
gataaggcgcgccagcttttcgatatggcttctcaggtctgcgaaattgtcgacggtgtccggcagtgtatgcag

SEQ ID NO: 42558 - DNA, 75 bp, synthetic construct
  source 1..75: mol_type = other DNA
cttatcagcagcgcctttaaggttatcgaaacacaacgtccgaaactggcctgttgtcgttgtgaccatatcgtg

SEQ ID NO: 42559 - DNA, 75 bp, synthetic construct
  source 1..75: mol_type = other DNA
atcaacagctcaaaccggaacaaatcaaactggccgatgatattcatcttgccagctccggctggccgcaggcgc

SEQ ID NO: 42560 - DNA, 75 bp, synthetic construct
  source 1..75: mol_type = other DNA
actgttggacaatctcacctcggcgctgaacaaagtgtatcaacgcaaaggggtcaatatctctctcgatatttc

SEQ ID NO: 42561 - DNA, 75 bp, synthetic construct
  source 1..75: mol_type = other DNA
aaaatgtgttttctgaaactaaaaaattatcgaataaaaataatgccgatcagttttttgaatgcgctaagagaa

SEQ ID NO: 42562 - DNA, 75 bp, synthetic construct
  source 1..75: mol_type = other DNA
gtggcgcacgtattcggtgaacgcacgttggccacgctggagcgtcttccgggcctgctgtcggcctttgaggtc

SEQ ID NO: 42563 - DNA, 75 bp, synthetic construct
  source 1..75: mol_type = other DNA
gtatgtcaggggcatcaaatcaatggtcattgaggccgctgacaacatcaccatgaaaaccagtgagtttgtact

SEQ ID NO: 42564 - DNA, 75 bp, synthetic construct
  source 1..75: mol_type = other DNA
atgagcgagttgacttatctggaaaaattgctggatggggttaaggttgagtggcaaacactagggaaagtgctt

SEQ ID NO: 42565 - DNA, 75 bp, synthetic construct
  source 1..75: mol_type = other DNA
tcgttacagtgggcgggaagacgatccacaggttccccgccagttgcgacagtcgcgccatcgtcgtccgttacc

SEQ ID NO: 42566 - DNA, 75 bp, synthetic construct
  source 1..75: mol_type = other DNA
gcgatgctgttgaacgtcagatgagccatcaggaacgtaacggtgtacgtgctgcttacattcataaagcagaac

SEQ ID NO: 42567 - DNA, 75 bp, synthetic construct
  source 1..75: mol_type = other DNA
acctgacggtatggcagggcgatgacgtacagcgccgggtgaaaggtgtggtgacctggtttgaactgggggaga

SEQ ID NO: 42568 - DNA, 75 bp, synthetic construct
  source 1..75: mol_type = other DNA
tgcatcgttgaagcaccgccgccgtcccgcccgatagagcgtggtatcgtgggccccggattacttgcccgcgtg

SEQ ID NO: 42569 - DNA, 75 bp, synthetic construct
  source 1..75: mol_type = other DNA
cgacggatcgctggtacatatattaaagctcccgaagcggtagttgaggcatggctaaatgaagattattcaacc

SEQ ID NO: 42570 - DNA, 75 bp, synthetic construct
  source 1..75: mol_type = other DNA
gttgaagagacggaagccttcctgcgctctgcactgacacgtgccgaagaaaagatcgaagaagatgaacgggaa

SEQ ID NO: 42571 - DNA, 75 bp, synthetic construct
  source 1..75: mol_type = other DNA
ctatccatgatcttcttcgtatcaatcagggtctccactcttgcaacgccgtctatttggagacggatttgggac

SEQ ID NO: 42572 - DNA, 75 bp, synthetic construct
  source 1..75: mol_type = other DNA
tgtggcatcaacccgcgacattaaaaacgacgacttcatgaaccgtcgttacaccttcagcggcggacagaaagc

SEQ ID NO: 42573 - DNA, 75 bp, synthetic construct
  source 1..75: mol_type = other DNA
tggtgggtgccattgttggcggatcaggggcaatcactattgctgcagtaatgctgggcaatgcggatggactcg

SEQ ID NO: 42574 - DNA, 75 bp, synthetic construct
  source 1..75: mol_type = other DNA
cataaatgtagatccgcaaggtttggttgatataaatttataccccgaaagtgatcttatccattctgtagctga

SEQ ID NO: 42575 - DNA, 75 bp, synthetic construct
  source 1..75: mol_type = other DNA
tataagcgaactgaaggatgctgttacggaatatattgaatactacaacagcagaagaattagcctgaaattaaa

SEQ ID NO: 42576 - DNA, 75 bp, synthetic construct
  source 1..75: mol_type = other DNA
gcggcagcaatttccggtgcgtaaggcaaaaggcggcaggcaaagggacgaggcagttggtgttgaagaactatg

SEQ ID NO: 42577 - DNA, 75 bp, synthetic construct
  source 1..75: mol_type = other DNA
gatcgcttcgttgataagacactgcgcaacaccgacgtttcgttacactcagcgttaaaggctggcggatttacc

SEQ ID NO: 42578 - DNA, 75 bp, synthetic construct
  source 1..75: mol_type = other DNA
cagttccgaacgatatcgcctacctccagtacacctccggcagcacccgttttccccgtggcgtcattatcaccc

SEQ ID NO: 42579 - DNA, 75 bp, synthetic construct
  source 1..75: mol_type = other DNA
caccgccagcaggctggttaaagtgcgacgggcgcgcctttacaaaagaacaatatcctgttctggccagagtct

SEQ ID NO: 42580 - DNA, 75 bp, synthetic construct
  source 1..75: mol_type = other DNA
cgggagcacacgacccacgtaaaccaatcagtgaaaataccgtaaataaggccctcagagtgatggggtatgaca

SEQ ID NO: 42581 - DNA, 75 bp, synthetic construct
  source 1..75: mol_type = other DNA
gtgtacacgccggcgcgaaaaatccacctgtaccactgcgaccatcgcggcctgccgctggcgcttatcagcacg

SEQ ID NO: 42582 - DNA, 75 bp, synthetic construct
  source 1..75: mol_type = other DNA
ccagtaaatggcagccttgtgatcgcaaagctatccgaatcaaacgaagcgacattcaaaaagctgattattgat

SEQ ID NO: 42583 - DNA, 75 bp, synthetic construct
  source 1..75: mol_type = other DNA
atctgccgggaaaggcatacagggtttcatatacagatgaatgcccggcaggtggaaggcaggccagggcactat

SEQ ID NO: 42584 - DNA, 75 bp, synthetic construct
  source 1..75: mol_type = other DNA
tacgggaatacacatcagcgatctcaaactggcaatggggcttaacgcatccaaaggcaaaaaaacggcaatcga

SEQ ID NO: 42585 - DNA, 75 bp, synthetic construct
  source 1..75: mol_type = other DNA
agtgcaggatattcccggtgtgttggccgtgtttgctgaacgtcgtaaggacagttttggcccgtatgtccggct

SEQ ID NO: 42586 - DNA, 75 bp, synthetic construct
  source 1..75: mol_type = other DNA
cacactctgcgctcccgctgatgcggatatcctgcatcgccgtctgtgggaacatgccctcggctggctgaaaga

SEQ ID NO: 42587 - DNA, 75 bp, synthetic construct
  source 1..75: mol_type = other DNA
gggatcgcatacggtccggaaatggcagcgaaagcgcagtctgacgcgaaagcagccatcgacagtattgttgct

SEQ ID NO: 42588 - DNA, 75 bp, synthetic construct
  source 1..75: mol_type = other DNA
gttgaacaatggcgcgaaaagcactccgctgatgaaatcaccgttcgcgacctggctgcaaatccgattccggta

SEQ ID NO: 42589 - DNA, 75 bp, synthetic construct
  source 1..75: mol_type = other DNA
cattattcattgctggcctggctgcattcagcacatcttctctggcggcgcaatctttacgtttcggttatgaaa

SEQ ID NO: 42590 - DNA, 75 bp, synthetic construct
  source 1..75: mol_type = other DNA
gcttacggtgaacagttcggttccccatggcgttctgatgtgttgccgctgataccggaacaatggcagatggtg

SEQ ID NO: 42591 - DNA, 75 bp, synthetic construct
  source 1..75: mol_type = other DNA
atgccccgtctgcagcggcaaactgaaacctctgaacaactggatatcatcaacaccgcgttcagggtaatcgaa

SEQ ID NO: 42592 - DNA, 75 bp, synthetic construct
  source 1..75: mol_type = other DNA
aaagggaacgatcgcccgcccgcccccgccggaaaaccgctggagttcagcaagcctgccgcctggcaaaataac

SEQ ID NO: 42593 - DNA, 75 bp, synthetic construct
  source 1..75: mol_type = other DNA
gatgccgtactcgcgctgcgtaatcatctcgataccgccaggcaatcgatgattcgctcagtcaaacagcatcat

SEQ ID NO: 42594 - DNA, 75 bp, synthetic construct
  source 1..75: mol_type = other DNA
atgagtcgttcgcagaatttacgtcatagcgtcataaatcaggtgattgaagatatggcgaggggcaatattcct

SEQ ID NO: 42595 - DNA, 75 bp, synthetic construct
  source 1..75: mol_type = other DNA
atagtgtgcgcaaaggtcagtcttggcacgcatatcaggaatacaagaagcataaagagcagttggaaaaattgt

SEQ ID NO: 42596 - DNA, 75 bp, synthetic construct
  source 1..75: mol_type = other DNA
aacacgtcagcagtcgaacggtattactctgaagctgctgatagtattccatatatttcgggaaaggtaattaaa

SEQ ID NO: 42597 - DNA, 75 bp, synthetic construct
  source 1..75: mol_type = other DNA
cacaaggctccgcttgtttgtgagaaatcagggcagagctttacaggggtatacaactcagccgcccctggcagg

SEQ ID NO: 42598 - DNA, 75 bp, synthetic construct
  source 1..75: mol_type = other DNA
ccgccggtcaacttctctggtctagcaaaaagcctgcgagccgccgtgcatcacagctcgccgatttacgtaaaa

SEQ ID NO: 42599 - DNA, 75 bp, synthetic construct
  source 1..75: mol_type = other DNA
cgccagcgggctggtagagcgcgtgaaagcgagcacgatgggcgatcgtgaagctgaactggcaacgctcgaatt

SEQ ID NO: 42600 - DNA, 75 bp, synthetic construct
  source 1..75: mol_type = other DNA
gtgatttctgggggtgcatacgctatccggactgtgagggaattatcagtacaggtaagaagaaagcagcgaagc

SEQ ID NO: 42601 - DNA, 75 bp, synthetic construct
  source 1..75: mol_type = other DNA
caaccacggaggttaaggtggcgctgcgcctcgccggcacgccgatcggtccaaacgacacggcgatcgccgggc

SEQ ID NO: 42602 - DNA, 75 bp, synthetic construct
  source 1..75: mol_type = other DNA
gggggcgttgcagaaaaaactctttatcgacggcaagcgtgtcggggacagggagtatgcggaggtgctgatcgc

SEQ ID NO: 42603 - DNA, 75 bp, synthetic construct
  source 1..75: mol_type = other DNA
ctacaaaaagctgagaagaaaaaaaacattgtctggcgttatgaaaatttttcactggagtggcagtccgccatc

SEQ ID NO: 42604 - DNA, 75 bp, synthetic construct
  source 1..75: mol_type = other DNA
tccgggcgtcagttgccggacaaagccattgatgtgctggatactgcctgcgcccgcgtggcaatcaacctttca

SEQ ID NO: 42605 - DNA, 75 bp, synthetic construct
  source 1..75: mol_type = other DNA
atgcgacagaaaaattttattttgccagtcagaaattatacttggggattccacaggtggctttacgaccacctc

SEQ ID NO: 42606 - DNA, 75 bp, synthetic construct
  source 1..75: mol_type = other DNA
ggcgtaacagttcttgccgtgcaaattatcgacttccagaggagaaagaagcaactggtatttttctggtgcgca

SEQ ID NO: 42607 - DNA, 75 bp, synthetic construct
  source 1..75: mol_type = other DNA
tacccaggatatgcttgttcgttatggcgtaaaggtagagatgtatcctgagctgtttcatatcagtggtaagaa

SEQ ID NO: 42608 - DNA, 75 bp, synthetic construct
  source 1..75: mol_type = other DNA
agactggcagatgatgtaaggctattgcgccaggaggaacaggaaaggcgaaaaaatatagaaaagctaattcag

SEQ ID NO: 42609 - DNA, 75 bp, synthetic construct
  source 1..75: mol_type = other DNA
taactcctttacaggaacggttcaaagaactaaacaactggttagaaatggacgttataagatttaaaaaatatt

SEQ ID NO: 42610 - DNA, 75 bp, synthetic construct
  source 1..75: mol_type = other DNA
gtttgtgcgcccggcatttgatgtgcgcagtgaacaggcggcacaggtggcgattgcgcggatgaaccgggccat

SEQ ID NO: 42611 - DNA, 75 bp, synthetic construct
  source 1..75: mol_type = other DNA
gctgttgttacaggcatcattcttactggcattaatatgctcctggtatctaatgccatgagtggagtaactgac

SEQ ID NO: 42612 - DNA, 75 bp, synthetic construct
  source 1..75: mol_type = other DNA
cacgcagttggttgtgcctcccgctttccgtcgggagatctaccgtgagctggggatctctctctactccaacga

SEQ ID NO: 42613 - DNA, 75 bp, synthetic construct
  source 1..75: mol_type = other DNA
tatctcaatagtggttcgcaatttattgataccagttcctttccgccaggcagctacagcgtggcattaaaagtc

SEQ ID NO: 42614 - DNA, 75 bp, synthetic construct
  source 1..75: mol_type = other DNA
gcaggcatttttcaccatgattaaccagcgtcagctacgcgccggagagagtttttccgagctgcaactggcgcg

SEQ ID NO: 42615 - DNA, 75 bp, synthetic construct
  source 1..75: mol_type = other DNA
ttgatgagcatatgacgattcttagcgcgctaatttgccgcagtgatttagatgccgtactcgcgctgcgtaatc

SEQ ID NO: 42616 - DNA, 75 bp, synthetic construct
  source 1..75: mol_type = other DNA
tcaaagggggaccggaatccgtcggaagttcgcctgctggttcagatacagcgtaatggtggctgggtgacggaa

SEQ ID NO: 42617 - DNA, 75 bp, synthetic construct
  source 1..75: mol_type = other DNA
agccagtacatgcagcttaatggcgggccgcagttgtttgtggtgctggccttcgctgaagacggacaacaaaaa

SEQ ID NO: 42618 - DNA, 75 bp, synthetic construct
  source 1..75: mol_type = other DNA
tacggcaatggctggatcaaagtcagcagcggaacggagccgaatcgcgcctggttccaggtggaagatgacggt

SEQ ID NO: 42619 - DNA, 75 bp, synthetic construct
  source 1..75: mol_type = other DNA
ggcgggctacccgcgcacggacgatctcaacggctatcagcaggaaggttttggcccgatggatcgcaccgtcac

SEQ ID NO: 42620 - DNA, 75 bp, synthetic construct
  source 1..75: mol_type = other DNA
atgcaacacgaactacaacctgattcactggttgatttgaaattcatcatggctgatactggcttcggtaaaacc

SEQ ID NO: 42621 - DNA, 75 bp, synthetic construct
  source 1..75: mol_type = other DNA
cttaaacttagctggaatgccgttgacggcatcatgacccgcgcggttaagcgaggcctgtcgcggattaaaaag

SEQ ID NO: 42622 - DNA, 75 bp, synthetic construct
  source 1..75: mol_type = other DNA
cttccgcacccagatgcccgccgcgctggcattcccgctacagggtaaacgctacaactgggcctatgaaacgga

SEQ ID NO: 42623 - DNA, 75 bp, synthetic construct
  source 1..75: mol_type = other DNA
ttcagtctgcgcctgaccagcggaagcggagaagacagccgtctggtgaccaccgccatcactgcggatacagag

SEQ ID NO: 42624 - DNA, 75 bp, synthetic construct
  source 1..75: mol_type = other DNA
gacctttaccgagtggaataacggtgaactgagtagctacctgatcgacatcaccaaagatatcttcaccaaaaa

SEQ ID NO: 42625 - DNA, 75 bp, synthetic construct
  source 1..75: mol_type = other DNA
tccggcagtgcagcacctgacggtggaggtgagcgcagctgacggtcagtatctggcgcaggcgaaatgggacac

SEQ ID NO: 42626 - DNA, 75 bp, synthetic construct
  source 1..75: mol_type = other DNA
ctcacgttgtttatggtcatgcgggtaacagtgcggcagagtttccgatgcgccgcctgggcgcgaacgtctggc

SEQ ID NO: 42627 - DNA, 75 bp, synthetic construct
  source 1..75: mol_type = other DNA
ccgggaaaagataggaaaaacgcatctggcagaggcgctgtgggcagagattgacaacagtcagctgaaggacga

SEQ ID NO: 42628 - DNA, 75 bp, synthetic construct
  source 1..75: mol_type = other DNA
caggcgctacaactggcggatgtcgtcaagctctcggaagaagaatggcgacttatcagtggaaaaacacagaac

SEQ ID NO: 42629 - DNA, 75 bp, synthetic construct
  source 1..75: mol_type = other DNA
taaaggtgacatcatcattgatggtggtaataccttcttccaggacaccattcgtcgtaatcgtgagctttctgc

SEQ ID NO: 42630 - DNA, 75 bp, synthetic construct
  source 1..75: mol_type = other DNA
ccagagtgcgctggatctcggcgaaccgctgtcgctgattaccgagtctgtgtttgcacgttatatctcttctct

SEQ ID NO: 42631 - DNA, 75 bp, synthetic construct
  source 1..75: mol_type = other DNA
ccggacccgcagaggacgacatcaccgataccgatgatggcgatacccgcatttcagcgggtgcattctggccgg

SEQ ID NO: 42632 - DNA, 75 bp, synthetic construct
  source 1..75: mol_type = other DNA
acatctcgataagccgatcccggtacgtcgcgcgctggcactggcgcatcacctggcgaatcgcaccatctggat

SEQ ID NO: 42633 - DNA, 75 bp, synthetic construct
  source 1..75: mol_type = other DNA
cggcgaccggctgaccacgatacagaacgacaggagccgcatccagacgatttatcagccggggagcttcacgcc

SEQ ID NO: 42634 - DNA, 75 bp, synthetic construct
  source 1..75: mol_type = other DNA
gccgaaggcgaagaagctcacagcttcaacgaatttaaacaggcgctttccagttcggcaaaatctaacggctga

SEQ ID NO: 42635 - DNA, 75 bp, synthetic construct
  source 1..75: mol_type = other DNA
cccggcagccagtggcgcaaccggacgctggcacagattgccgcagatttatgtgcgcccttcgggatagccgtg

SEQ ID NO: 42636 - DNA, 75 bp, synthetic construct
  source 1..75: mol_type = other DNA
gctaaccgtttcactgccaacgttaaaggcctgacccaggcttcccgtaacgccaacgacggtatctccatcgcg

SEQ ID NO: 42637 - DNA, 75 bp, synthetic construct
  source 1..75: mol_type = other DNA
aaaacgtacagtaaatctcttcgcaattttcctgaaaaccatcagaaacgcagagaaatacgtgcagatgacaaa

SEQ ID NO: 42638 - DNA, 75 bp, synthetic construct
  source 1..75: mol_type = other DNA
aggcaggccgacagatcagtaatccccgtcacccaagaaggaagaaacacaaaacgcaaagtaaaccttttcgca

SEQ ID NO: 42639 - DNA, 75 bp, synthetic construct
  source 1..75: mol_type = other DNA
atgactgcgaaaaacataaacgcgggtgcacccaccgacatcgtgactcactggcacaatatcaactgggccaag

SEQ ID NO: 42640 - DNA, 75 bp, synthetic construct
  source 1..75: mol_type = other DNA
cgactccagccttgcaataggtgagttaagtgagaccaatgctgaaaatgctattgcactgggaaaactcagtaa

SEQ ID NO: 42641 - DNA, 75 bp, synthetic construct
  source 1..75: mol_type = other DNA
accgggagacggtgcgcagcttcggcggggaggcctgtgaacttgccaccgcctggaataccagcggccagctac

SEQ ID NO: 42642 - DNA, 75 bp, synthetic construct
  source 1..75: mol_type = other DNA
agccgggagtctgtctgtgacagcgggagtgatccgtgccctgcagcgtgatccggacaatggtgccctgacgtc

SEQ ID NO: 42643 - DNA, 75 bp, synthetic construct
  source 1..75: mol_type = other DNA
aaagcgagcacgatgggcgatcgtgaagctgaactggcaacgctcgaattcttaaaacagtgggtgcctgcggga

SEQ ID NO: 42644 - DNA, 75 bp, synthetic construct
  source 1..75: mol_type = other DNA
gaccgccagccggagctgatcaccgaagcgttgaaaaacaatatcatgctggttagcccgactacgctgctggtg

SEQ ID NO: 42645 - DNA, 75 bp, synthetic construct
  source 1..75: mol_type = other DNA
agtgggtaaccagctgaacgggatcactgatggtttcaaaaacctgatgggggatgtgattcagggggcgagcgg

SEQ ID NO: 42646 - DNA, 75 bp, synthetic construct
  source 1..75: mol_type = other DNA
cggacggacgacgagcggacccaccactaccactacgacagccagcaccgcctggtgttccacacgcggatacag

SEQ ID NO: 42647 - DNA, 75 bp, synthetic construct
  source 1..75: mol_type = other DNA
tttgcgctggatgtggctgcccggcaccgggtgcagtttgcgatgccggagtctgatgcggttgcgatgctgaaa

SEQ ID NO: 42648 - DNA, 75 bp, synthetic construct
  source 1..75: mol_type = other DNA
ttgaccgcctgcgggttaccttcggggtgcagtcactggtgcagaccacctcacagggtgaccgtaacccggcat

SEQ ID NO: 42649 - DNA, 75 bp, synthetic construct
  source 1..75: mol_type = other DNA
aaaagctgagaacagcacgctttctgagaatcatccccgacacaaacggcgtaagtgtcggctttcagggccggg

SEQ ID NO: 42650 - DNA, 75 bp, synthetic construct
  source 1..75: mol_type = other DNA
agagcggcaacagcacgccgttatttgtggcgcaggggaatcagctgttcatgaacgacgtgttcctgaagcgac

SEQ ID NO: 42651 - DNA, 75 bp, synthetic construct
  source 1..75: mol_type = other DNA
ggtttgggcatgatcgctgcatctgcagcagcgtggcgattctggcctgaaacccgggtgcaacgagttgcgggc

SEQ ID NO: 42652 - DNA, 75 bp, synthetic construct
  source 1..75: mol_type = other DNA
cggacgtgtcctgtccatcgatgccgccagccgtaccctgacgctggaccgggaggtgacactgccggagaccgg

SEQ ID NO: 42653 - DNA, 75 bp, synthetic construct
  source 1..75: mol_type = other DNA
ccgccggtggagtggctgacctacggcagcggttacctggcgggcatgaagctgggcgggacgccgctggtcgag

SEQ ID NO: 42654 - DNA, 75 bp, synthetic construct
  source 1..75: mol_type = other DNA
gaggtgagcgcagctgacggccagtatctggcgcaggcgaaatgggacacgccgcgggtggtgaagggcgtgcgc

SEQ ID NO: 42655 - DNA, 75 bp, synthetic construct
  source 1..75: mol_type = other DNA
aagagaaaacagcaacatataaccgattaagaggtttgatatctgaattcggcgtcatcgctccacaaagtacag

SEQ ID NO: 42656 - DNA, 75 bp, synthetic construct
  source 1..75: mol_type = other DNA
ctattcctgatgaactggccataagggaagatggcgctgttgctgtggccactgccattgaagctggtgatgagc

SEQ ID NO: 42657 - DNA, 75 bp, synthetic construct
  source 1..75: mol_type = other DNA
tacgccgaaggtggtgaagggcgtgagtttcatgcttcgcctgaccgtggcagcggatgacggcagtgagcggct

SEQ ID NO: 42658 - DNA, 75 bp, synthetic construct
  source 1..75: mol_type = other DNA
acaggtgattcgtgatgcatggctgatacaccgacacaaagggaccatcagcgcactgcgaagagccgtggagcc

SEQ ID NO: 42659 - DNA, 75 bp, synthetic construct
  source 1..75: mol_type = other DNA
gaatgcgatgggagtcagcctgtcgctcaccacccagaaatcgaaatcacaacaacattctgaaagtgacacagt

SEQ ID NO: 42660 - DNA, 75 bp, synthetic construct
  source 1..75: mol_type = other DNA
tgtttgtatcgcttcctgaaattgaggaagtagagaacgccgatataaaccagcgcctgctggaagtcatcgaac

SEQ ID NO: 42661 - DNA, 75 bp, synthetic construct
  source 1..75: mol_type = other DNA
cgctttattcaaccgccttcgtgcagatggcgatcagattttcccgctgggatgggcaatggttttacagcgtgc

SEQ ID NO: 42662 - DNA, 75 bp, synthetic construct
  source 1..75: mol_type = other DNA
gggctacatgcaggcgtttgtgaagtatgggctacgcaacctgaaagaagggacgaagttccgtaaaagtattga

SEQ ID NO: 42663 - DNA, 75 bp, synthetic construct
  source 1..75: mol_type = other DNA
tcaggagtgctacgcggggctggacttatcatcaaccagcgatatttccagcgtgtgctatgcctttccggtcgg

SEQ ID NO: 42664 - DNA, 75 bp, synthetic construct
  source 1..75: mol_type = other DNA
cggtatccgtcatggcgataccgtgcgggtatttaacaataatggagaaatgctgattgccgcaaaagtgactcc

SEQ ID NO: 42665 - DNA, 75 bp, synthetic construct
  source 1..75: mol_type = other DNA
agaaatcacgatctatccgtatatcaacgaaacaattatttctggcggcaccgcgcatgaaggcggggcggtcca

SEQ ID NO: 42666 - DNA, 75 bp, synthetic construct
  source 1..75: mol_type = other DNA
atcaataaactgcttaccccccaacttatcttcattaagtatggttggatgctcatcattagaggttataaattg

SEQ ID NO: 42667 - DNA, 75 bp, synthetic construct
  source 1..75: mol_type = other DNA
gttacggcagcagtaacccgaaccagcaacgcgttgtcctggctggcaggcgcaccactggcagtgctgcgacac

SEQ ID NO: 42668 - DNA, 75 bp, synthetic construct
  source 1..75: mol_type = other DNA
cgagtcactgcgtgcaaccgttcaccagccgctgtggctggagtggcactatcgtaacaacgaaggcgaatggct

SEQ ID NO: 42669 - DNA, 75 bp, synthetic construct
  source 1..75: mol_type = other DNA
cttacggcaacgttgatgtgctgaaagcagcttgccgtcaggaaatgtggatcaacccgcttgatgcgcaaaaac

SEQ ID NO: 42670 - DNA, 75 bp, synthetic construct
  source 1..75: mol_type = other DNA
cacgctggacagtggcgtgacggaggaaatgtatctggaaatggagcggttgattgctgatgcccgcccggtcag

SEQ ID NO: 42671 - DNA, 75 bp, synthetic construct
  source 1..75: mol_type = other DNA
attaccgtcagggtttatgacgatcagccgtttgaccggcagattgttattccggcggtggcattcagcggcgct

SEQ ID NO: 42672 - DNA, 75 bp, synthetic construct
  source 1..75: mol_type = other DNA
cggcggctgggcagatggtaacagcccgtcggatatcgaaaacagtaaactggtagtgctgtttggtaataaccc

SEQ ID NO: 42673 - DNA, 75 bp, synthetic construct
  source 1..75: mol_type = other DNA
attgcgcgctttaacgaaactggccgcagccaggttctggcaaaacgcatgccgggcgatctctctgaatactcc

SEQ ID NO: 42674 - DNA, 75 bp, synthetic construct
  source 1..75: mol_type = other DNA
cattaacagctacggccagcagggcgaacctgcgaccaccaccttccggattaacgcgcctgcaaaacccgccac

SEQ ID NO: 42675 - DNA, 75 bp, synthetic construct
  source 1..75: mol_type = other DNA
cggatatgctgcgctgccgtaaatctggtgtactgaccggtttaccagatggttatggtcgtgggcgtatcatcg

SEQ ID NO: 42676 - DNA, 75 bp, synthetic construct
  source 1..75: mol_type = other DNA
ttccgatcttctgaaggggcgaatacctataacgagccaggccgggcttattatgccggagttaccgcatcattc

SEQ ID NO: 42677 - DNA, 75 bp, synthetic construct
  source 1..75: mol_type = other DNA
acggaacatcgatcacgttgcggaatttatcgtcgtcccaagaacaaacaggcgccagatggactattgatatta

SEQ ID NO: 42678 - DNA, 75 bp, synthetic construct
  source 1..75: mol_type = other DNA
cattggcccggatgaagaagcgcaactgaagaaaattgctcaggcgctgcagctaccactggagcagtacctgtg

SEQ ID NO: 42679 - DNA, 75 bp, synthetic construct
  source 1..75: mol_type = other DNA
tgtccgagcagaatctctgagattttagccttacctgctgattgtgagattacacaaatagatggcaagggtatc

SEQ ID NO: 42680 - DNA, 75 bp, synthetic construct
  source 1..75: mol_type = other DNA
ggatgcgtctgtggtcagtctctgggggaagtacgtgttccgcaccggggaaatgtggtggacagagtcattgaa

SEQ ID NO: 42681 - DNA, 75 bp, synthetic construct
  source 1..75: mol_type = other DNA
gccgccagcagtgcagcacctgaccgcagaagtcaccgcagacagcggggaataccaggtgctggcgcgctggga

SEQ ID NO: 42682 - DNA, 75 bp, synthetic construct
  source 1..75: mol_type = other DNA
attgcatattattgaaggtcgtgaagggggaagagtgacgcggatcccttgcccgctgttgatccgttgttccac

SEQ ID NO: 42683 - DNA, 75 bp, synthetic construct
  source 1..75: mol_type = other DNA
cagactgaagctccgctgaaacgtgctcttatcccgttcggtggtatcaaaatgatcgagggttcctgcaaagcg

SEQ ID NO: 42684 - DNA, 75 bp, synthetic construct
  source 1..75: mol_type = other DNA
tctcacagggtagtcacggacgctggctgacggcggacgacctctccctccggggcaaaacactgaataccgcag

SEQ ID NO: 42685 - DNA, 75 bp, synthetic construct
  source 1..75: mol_type = other DNA
gttgacgcaatgctgatgactggggacagttacgactgcggaaagaaaatgggttatatgcaagcgtttgtgaag

SEQ ID NO: 42686 - DNA, 75 bp, synthetic construct
  source 1..75: mol_type = other DNA
ggtgcatgggctgagtgcgccggaacgttcacggaggaagatttacacggtcaggagtgttacgcggggcttgat

SEQ ID NO: 42687 - DNA, 75 bp, synthetic construct
  source 1..75: mol_type = other DNA
atgaacggcaccgaagccgctgaactgctgcgccgtgaggccacccgctacgaaaacgaatcacaggagctgcac

SEQ ID NO: 42688 - DNA, 75 bp, synthetic construct
  source 1..75: mol_type = other DNA
ctgaagcaatggctgcccgccttgatagtcttgcgtgtcatatcacatcccgccagctaaaccacgtcgaagcgg

SEQ ID NO: 42689 - DNA, 75 bp, synthetic construct
  source 1..75: mol_type = other DNA
acatggatgatcacttcggagcaaaaagacaccggtaatcctctgtcggtcatcccgaaatatactatcaataac

SEQ ID NO: 42690 - DNA, 75 bp, synthetic construct
  source 1..75: mol_type = other DNA
gccacgacgccgggaggattacggtaaggacctgtggagtgcttatcagaccattcaggagaatatgctgaaagg

SEQ ID NO: 42691 - DNA, 75 bp, synthetic construct
  source 1..75: mol_type = other DNA
tgaaatttataaccgtaccgcgctggataatacgctgatttacagtggtgttattgatatgcctgccggtcacgg

SEQ ID NO: 42692 - DNA, 75 bp, synthetic construct
  source 1..75: mol_type = other DNA
tgacggtgaactaccatatccgcggtcgcatcatccaggtgccgtcaaactatgacccggaaaaacgcacgtaca

SEQ ID NO: 42693 - DNA, 75 bp, synthetic construct
  source 1..75: mol_type = other DNA
ggttcagggatttatggccttgccacccccggtatgcctgcgggaagcccgggaatggagatgggggcccgtaaa

SEQ ID NO: 42694 - DNA, 75 bp, synthetic construct
  source 1..75: mol_type = other DNA
aaggctttcagcccttcttcgcctgccagacccgtgtgcgcgacccgggccgccggggatacacaaaacacatgc

SEQ ID NO: 42695 - DNA, 75 bp, synthetic construct
  source 1..75: mol_type = other DNA
aatgtttgaacgtcaggatgtgacatttgttcaggataatccagatgctgatctgcacgcttgctttattgccat

SEQ ID NO: 42696 - DNA, 75 bp, synthetic construct
  source 1..75: mol_type = other DNA
tgatcgacgacgccagcgccgacccgctgcgctacaaccttgctgccatgattgcgcgcttcaacgaaacgggcc

SEQ ID NO: 42697 - DNA, 75 bp, synthetic construct
  source 1..75: mol_type = other DNA
agccaccaccacggctgcagggctggcaatgggtgcgccagtgatgtcggcagtaaaaagctataccagcatgga

SEQ ID NO: 42698 - DNA, 75 bp, synthetic construct
  source 1..75: mol_type = other DNA
cagagttaacctgggctcagagacatcaacactctctgaatttaatcctaatccggaactgaccgacctgatgtt

SEQ ID NO: 42699 - DNA, 75 bp, synthetic construct
  source 1..75: mol_type = other DNA
tattcggtttctagaatgttcagaaagtgaactaaaccgccacaaattacaagatggagatcttttatttactcg

SEQ ID NO: 42700 - DNA, 75 bp, synthetic construct
  source 1..75: mol_type = other DNA
ctgatagcaggcggtgcgttgctggcaatgactgcaacggttggctcgttgtcgctggctattggtgtgcttgct

SEQ ID NO: 42701 - DNA, 75 bp, synthetic construct
  source 1..75: mol_type = other DNA
cgataatatagcgggcgtttattacagacccgttcaaaagtatataaatggcacctggtataatgtagcgagcgt

SEQ ID NO: 42702 - DNA, 75 bp, synthetic construct
  source 1..75: mol_type = other DNA
gcactgaatggaagtgcttcccgaacagtcactgtcatttgtataaccccgagaattattgatctcaaggcttct

SEQ ID NO: 42703 - DNA, 75 bp, synthetic construct
  source 1..75: mol_type = other DNA
ctacggtactgaacaagctggcggaaaagctggctaaagaccagaacggcgcagatattcctgagcctgcgctgt

SEQ ID NO: 42704 - DNA, 75 bp, synthetic construct
  source 1..75: mol_type = other DNA
cagtcagcgtattgcggctgatgtcctgagactaagacagagcggaatgccggtggtgacaacgaccgtggaggt

SEQ ID NO: 42705 - DNA, 75 bp, synthetic construct
  source 1..75: mol_type = other DNA
gtacggtcagcgccgtcgatgccgacaaggttcaggcccgcgttcgtctgccggaatgcgataacctgcgcacta

SEQ ID NO: 42706 - DNA, 75 bp, synthetic construct
  source 1..75: mol_type = other DNA
gtgttattcatctggtcgccagacaccagagcattaccaccgcagccgagcagttaaataaagtcccttccgcca

SEQ ID NO: 42707 - DNA, 75 bp, synthetic construct
  source 1..75: mol_type = other DNA
tgggtatatcacaggtgagccagagagtggataacgtcagcagcgaactcacgcagacggtcagtcagagtaatg

SEQ ID NO: 42708 - DNA, 75 bp, synthetic construct
  source 1..75: mol_type = other DNA
cgaatgcagccattatgatcgaagctctgcgagggctcggctacaacaccgccaccgcactggctgatatcatcg

SEQ ID NO: 42709 - DNA, 75 bp, synthetic construct
  source 1..75: mol_type = other DNA
ctaattcttttataaatgagacaataaaaagtgactcaaaagaaattgttgtaaaaaacaagaaagaagatatca

SEQ ID NO: 42710 - DNA, 75 bp, synthetic construct
  source 1..75: mol_type = other DNA
tcgttatattcgttcgcatgaagccgttcagcacatcagcatccgcgaccggctgaatgattttatgcagcagca

SEQ ID NO: 42711 - DNA, 75 bp, synthetic construct
  source 1..75: mol_type = other DNA
accgaacggctctggataatactctgatttacacgggtgttattgatatgcctgcaggcagtggtgtaatgacac

SEQ ID NO: 42712 - DNA, 75 bp, synthetic construct
  source 1..75: mol_type = other DNA
taagggatcgtattgcaggtgctggagccaccaccacggcggcagggctggcaatgggcgcgccagtgatggcgg

SEQ ID NO: 42713 - DNA, 75 bp, synthetic construct
  source 1..75: mol_type = other DNA
cagaacctacgcgttctacagcacctttgtacacagaacgctgcccggcaggttttccgtcaccgactgcggact

SEQ ID NO: 42714 - DNA, 75 bp, synthetic construct
  source 1..75: mol_type = other DNA
taatacggaatgttgcccgggctacgtgtcagcagatcccttcgattattaccggaataccgatcgtctgctttg

SEQ ID NO: 42715 - DNA, 75 bp, synthetic construct
  source 1..75: mol_type = other DNA
ttgaccggattgaagaaaagcgtgacgccatgcggtcgctggtcttaccgccaccggcacgccaggcactggcgc

SEQ ID NO: 42716 - DNA, 75 bp, synthetic construct
  source 1..75: mol_type = other DNA
gtgagggctccgttgcgctgggagagaatagttttgctggaggcataaacagtcttgctttgggtagtcaatcca

SEQ ID NO: 42717 - DNA, 75 bp, synthetic construct
  source 1..75: mol_type = other DNA
catctcagcctgaactctttccgctgacgactatggccccacatggttgcttactccccgcgacttccgtattaa

SEQ ID NO: 42718 - DNA, 75 bp, synthetic construct
  source 1..75: mol_type = other DNA
ctcgcatccggcccgctggcgatgttgcgcattgccctgtatgccgtatctggtctgttaggtgctctgctcagt

SEQ ID NO: 42719 - DNA, 75 bp, synthetic construct
  source 1..75: mol_type = other DNA
acttatcggaagatgagttagagatgctgcgtttgtatcgcgcacttcctaaatcagagcaacaagcacaactca

SEQ ID NO: 42720 - DNA, 75 bp, synthetic construct
  source 1..75: mol_type = other DNA
acactttcacgtgaaattgtcacaaacctacaaaaagctgtaatcaaagctatcaatgcaactgcgcttgtacca

SEQ ID NO: 42721 - DNA, 75 bp, synthetic construct
  source 1..75: mol_type = other DNA
gcagagtcttaagacagccacctttggttataatgccgaatataaaatagttaataacaatcatgcatcatatga

SEQ ID NO: 42722 - DNA, 75 bp, synthetic construct
  source 1..75: mol_type = other DNA
cgctaccgccgcacaatggataataatttccgcctggtgagtgtgtatatcaccgacatgaaaatcacggaaatc

SEQ ID NO: 42723 - DNA, 75 bp, synthetic construct
  source 1..75: mol_type = other DNA
ctggctgcagtgctggggccgctggcagtcatccgtctgggattctctgtgctgggtatcaaaacgttaccttcc

SEQ ID NO: 42724 - DNA, 75 bp, synthetic construct
  source 1..75: mol_type = other DNA
ttcaaactgctgaccggcccggaaacggtgctggcactgctggatgaacgggaaagaaaccagcaatacataaaa

SEQ ID NO: 42725 - DNA, 75 bp, synthetic construct
  source 1..75: mol_type = other DNA
gacaaaaatggaaacctgactggcgttctcaatacccccatgcttgacttctccagtttgtctcgagatggtcat

SEQ ID NO: 42726 - DNA, 75 bp, synthetic construct
  source 1..75: mol_type = other DNA
cctatgacgcctgtcagacgaacaaaaccgcgtggctgaaccgtaaaaccgaactggccgccgcaatgcaggaat

SEQ ID NO: 42727 - DNA, 75 bp, synthetic construct
  source 1..75: mol_type = other DNA
ctcaatatcaagcgtcccgtgaaaggttgttcgatatgggtgagccaaccgaccgttcagaaaacagagggtttt

SEQ ID NO: 42728 - DNA, 75 bp, synthetic construct
  source 1..75: mol_type = other DNA
gacgcccgtaccctggagcggctgcaaggcgcggcccagggtgcaactggccagctacaggccatcggctacgcc

SEQ ID NO: 42729 - DNA, 75 bp, synthetic construct
  source 1..75: mol_type = other DNA
ctggatgcgtgactgccattcatcaaatgataaagacgtcattgcaattgatggaaaaacgctccggcactctta

SEQ ID NO: 42730 - DNA, 75 bp, synthetic construct
  source 1..75: mol_type = other DNA
gaagtggcaacgctgggctgctcaaccattttagcgatcggtatagcaacagcggtatttatgtcgtatcagggc

SEQ ID NO: 42731 - DNA, 75 bp, synthetic construct
  source 1..75: mol_type = other DNA
gtgtgaccgtcaccgtcgaccgtgagttagtcaatcgcgctcgtgatgcaggcttaaatatgagcgccaccctta

SEQ ID NO: 42732 - DNA, 75 bp, synthetic construct
  source 1..75: mol_type = other DNA
cggcgaaaaatgcggatatcagtggcagtgtgaatgcgaactcaggaacgctcaacaatgtcacgattaaccaga

SEQ ID NO: 42733 - DNA, 75 bp, synthetic construct
  source 1..75: mol_type = other DNA
tctgatatcaaaaagatgaaagacctggaagatgagaaccggcgtttaaagcagatgtttgccgacctgagcctt

SEQ ID NO: 42734 - DNA, 75 bp, synthetic construct
  source 1..75: mol_type = other DNA
tgagctctgctatgttgcaggtgattgtcccgatgagctggataactggagtgaagccggactaaacgccctggc

SEQ ID NO: 42735 - DNA, 75 bp, synthetic construct
  source 1..75: mol_type = other DNA
taactggagcacaggggcaaatggaagctattcaggccgctaaccagcttgccagtgcgcaaacaaaccagttac

SEQ ID NO: 42736 - DNA, 75 bp, synthetic construct
  source 1..75: mol_type = other DNA
attatcactggcgatcgtcctgtactggttctgcgcattattcagctggaagcggtgcaggaagaaatggctaac

SEQ ID NO: 42737 - DNA, 75 bp, synthetic construct
  source 1..75: mol_type = other DNA
tggtcaggtaactgaagctgtcctgacccaggatggtcctgtactggagaattttactgcagggcaaagtggcac

SEQ ID NO: 42738 - DNA, 75 bp, synthetic construct
  source 1..75: mol_type = other DNA
aacgatttgccgggacggaatgtaatgccgtttttatgggaaacctcagagcggagcaggaagaggccgtttcgg

SEQ ID NO: 42739 - DNA, 75 bp, synthetic construct
  source 1..75: mol_type = other DNA
caattaatcaaatccatgcccttatttctgctcagggtgttaatgaaatcatcagtaagattggtgccgatgctg

SEQ ID NO: 42740 - DNA, 75 bp, synthetic construct
  source 1..75: mol_type = other DNA
cgaaattaaacgtaaaaaaattgatggtgttatttattattcaccatcaattttctttggggcttttgtaaaaaa

SEQ ID NO: 42741 - DNA, 75 bp, synthetic construct
  source 1..75: mol_type = other DNA
gcttcgcctgccgggggaacatgacaacatcttcagtgacagaaaaacctggttcggtatggcctttatcgaaac

SEQ ID NO: 42742 - DNA, 75 bp, synthetic construct
  source 1..75: mol_type = other DNA
aagacagttaccgcagcggcagtgattgccagacggaaagtgaatacactgatactggtacaccggactgaattg

SEQ ID NO: 42743 - DNA, 75 bp, synthetic construct
  source 1..75: mol_type = other DNA
gttacgtggtgttgcgctgctgcgccgccagattgccgccgtgggagacattgaaggtccgttgtcaccccgtca

SEQ ID NO: 42744 - DNA, 75 bp, synthetic construct
  source 1..75: mol_type = other DNA
ttattggtgccggtattgcaggcaccgcttgcgcgttacgctgcgcgcgagcgggtttatccgttttgttactgg

SEQ ID NO: 42745 - DNA, 75 bp, synthetic construct
  source 1..75: mol_type = other DNA
cttcctcatcaggtaacaagcgtgcataccggaaaggtaaccctgttccggccagagagagacaaagggcttctc

SEQ ID NO: 42746 - DNA, 75 bp, synthetic construct
  source 1..75: mol_type = other DNA
atgaacgatagattatgctttgaagtgcacgataaccagggttatttcgtatttccggatacctggtttggccca

SEQ ID NO: 42747 - DNA, 75 bp, synthetic construct
  source 1..75: mol_type = other DNA
atgaaaatcctttgtacccgtaacggctcgacgatctccccacgcgatgaacgacgtctgagtgatgcggtcaat

SEQ ID NO: 42748 - DNA, 75 bp, synthetic construct
  source 1..75: mol_type = other DNA
acagtgtccgagtattttataacccagatgtaaataattcggcaacagccaccgcaggaaacaccgaaatcgaaa

SEQ ID NO: 42749 - DNA, 75 bp, synthetic construct
  source 1..75: mol_type = other DNA
ccaaacgttttgccgctcgtgtcacgctagacctgtcgggtatcggcagatataccaaagtcatgagcggcgatg

SEQ ID NO: 42750 - DNA, 75 bp, synthetic construct
  source 1..75: mol_type = other DNA
ttttgctttagcagcgaaagagcatcaaagattactctcaattgcaaacacggtgccgtattttcaattatcagt

SEQ ID NO: 42751 - DNA, 75 bp, synthetic construct
  source 1..75: mol_type = other DNA
aatttctaccatatagctgaaaatattatatctaatatatacagaatagatatttacattgttcatggcataatg

SEQ ID NO: 42752 - DNA, 75 bp, synthetic construct
  source 1..75: mol_type = other DNA
ggaatacagaccgtatcgttaccatactgctggcactgattattgtggtcctgctgactactgtcagcgtcagtg

SEQ ID NO: 42753 - DNA, 75 bp, synthetic construct
  source 1..75: mol_type = other DNA
tgctcaacgctatcaaagatggccgctgggctgatgccgtcagcatcagcaaacagatacttaatcagggcagcg

SEQ ID NO: 42754 - DNA, 75 bp, synthetic construct
  source 1..75: mol_type = other DNA
ccgattaccagacccggacggcttattgggaattagtccgcgatcactttgcaatattgaaagtcggtcccgcat

SEQ ID NO: 42755 - DNA, 75 bp, synthetic construct
  source 1..75: mol_type = other DNA
attgctggaatatttcacctttcgggaaaagtttatgtttgttcatctgaacggactggagaatgtttctctgcc

SEQ ID NO: 42756 - DNA, 75 bp, synthetic construct
  source 1..75: mol_type = other DNA
cgatcccagtgtggaacgtctgtttgaaggctttgccttcctgatgggacgtttgcgtgaaaagctggatgatga

SEQ ID NO: 42757 - DNA, 75 bp, synthetic construct
  source 1..75: mol_type = other DNA
atgataaatagcattaattcttttttttccggccttcctcgcagtatatcaagtgctatacgcagcagtaccttc

SEQ ID NO: 42758 - DNA, 75 bp, synthetic construct
  source 1..75: mol_type = other DNA
tgtggtcaccggacacctgcccggtgcatctgctgccttatctcgcctgggcattttccgttgaccgctgggatc

SEQ ID NO: 42759 - DNA, 75 bp, synthetic construct
  source 1..75: mol_type = other DNA
aaatcacaacatggtgattcagaggcatcatttcgactatatcaatattactgctttactaaaaataacatttac

SEQ ID NO: 42760 - DNA, 75 bp, synthetic construct
  source 1..75: mol_type = other DNA
caattagtcacgataggatgcataaaaagttaaatgaactgaatggctacttctacaatcgcaaacatgaaacac

SEQ ID NO: 42761 - DNA, 75 bp, synthetic construct
  source 1..75: mol_type = other DNA
ctttgatattgagattgtcggtgtgccaattatgcgcgccaaagacggtctggcgctgagttcccgtaacggtta

SEQ ID NO: 42762 - DNA, 75 bp, synthetic construct
  source 1..75: mol_type = other DNA
aaacaattgcgattcttggaaagatcagcatctcaggggaatgttacagcgcagtttaattatggggtcttttta

SEQ ID NO: 42763 - DNA, 75 bp, synthetic construct
  source 1..75: mol_type = other DNA
gagacactttctgaggaaattgtacagaaatgcagaaatattaacgatgaatatgtctggccctggatattgccg

SEQ ID NO: 42764 - DNA, 75 bp, synthetic construct
  source 1..75: mol_type = other DNA
gccagcggtaacatgcgtgacatggccgctatttttacgggcgttggacagaaactcagcagcatgccgtattac

SEQ ID NO: 42765 - DNA, 75 bp, synthetic construct
  source 1..75: mol_type = other DNA
ggaaggaaggcggcgacagcctgattgactggggcaagtggaaaccggaggtcgatgccgcgctgaagatggttc

SEQ ID NO: 42766 - DNA, 75 bp, synthetic construct
  source 1..75: mol_type = other DNA
acttgaggcatgtggtgaggcgtttttggcgcaggttcgccagcaggcagaaaaacttgtcagggagatggcggc

SEQ ID NO: 42767 - DNA, 75 bp, synthetic construct
  source 1..75: mol_type = other DNA
atactgcggccatctttactggcgttgggcaaaagctcaacaacatgccgtattaccgcgcgaagcaatacgcgc

SEQ ID NO: 42768 - DNA, 75 bp, synthetic construct
  source 1..75: mol_type = other DNA
cactgtgcagcctgaagataatgtgccatctgacagccagccagaaacatcaacagaggtcagtgcgccggaaat

SEQ ID NO: 42769 - DNA, 75 bp, synthetic construct
  source 1..75: mol_type = other DNA
gcgcgcccgggcagaaggacgtcacagtatgggaccgggaaaatttattgccggtatcttcatctgcggcatgct

SEQ ID NO: 42770 - DNA, 75 bp, synthetic construct
  source 1..75: mol_type = other DNA
gagagcccagaacatggatcagtgatttaatggtctcggtcacgaaaaaagccgcatccggtatcagtatcagtt

SEQ ID NO: 42771 - DNA, 75 bp, synthetic construct
  source 1..75: mol_type = other DNA
ccatcagggaccattaccgtcagggtttatgacgatcagccgtttgaccggcagattgttattccggcggtggca

SEQ ID NO: 42772 - DNA, 75 bp, synthetic construct
  source 1..75: mol_type = other DNA
atcaggaaacctttaatgaagaaaatctggatgaatctcaggaaaaagagccggaggaaatggaaggccctgaac

SEQ ID NO: 42773 - DNA, 75 bp, synthetic construct
  source 1..75: mol_type = other DNA
gtgaatgccaaatattacccgcatatcattacggtctgcgtgattaacgcattgctgtcgatctgggttatgcag

SEQ ID NO: 42774 - DNA, 75 bp, synthetic construct
  source 1..75: mol_type = other DNA
gaaacgaaacaacctgaaccagtagtgcaacaggaaccggaaaagatctgcaccgcctgcggtcagaggagtggc

SEQ ID NO: 42775 - DNA, 75 bp, synthetic construct
  source 1..75: mol_type = other DNA
agaatctgttggtatcggtgcaggtgttgacgcttcagttatgactctggcttgtagaacgtggcaagaatgctg

SEQ ID NO: 42776 - DNA, 75 bp, synthetic construct
  source 1..75: mol_type = other DNA
gaaaaacaatacagacgaaacaaacaacagtatcgctaaacaaaactgttgatgaatatcaagttggcgcaacaa

SEQ ID NO: 42777 - DNA, 75 bp, synthetic construct
  source 1..75: mol_type = other DNA
gctcgaagctcccggccagttatgaagtaaacgccgtatcgtttgatcactataacggcgtggcaacggtctatt

SEQ ID NO: 42778 - DNA, 75 bp, synthetic construct
  source 1..75: mol_type = other DNA
tggtggagctgcggaacaaaccatcccatgaactgaaggaggtgggcgatcagtggcgcacgccggacagcattt

SEQ ID NO: 42779 - DNA, 75 bp, synthetic construct
  source 1..75: mol_type = other DNA
catcttgctcaggatctggctctgaagggattacgtgttctgctcgtggaaggtaacgacccccagggaacagca

SEQ ID NO: 42780 - DNA, 75 bp, synthetic construct
  source 1..75: mol_type = other DNA
ggaatccagcgacgggcagttacagcgttgccagcgaaacggcgaagagccgtggcaaaaagagcggacgcagta

SEQ ID NO: 42781 - DNA, 75 bp, synthetic construct
  source 1..75: mol_type = other DNA
cgacgcggacacacaaagcccggcgggaaaaccgaactgccgaccagttaagccagtacggggccgtgtcgttac

SEQ ID NO: 42782 - DNA, 75 bp, synthetic construct
  source 1..75: mol_type = other DNA
cggtgctccgacgttatgcctgacgcctgagctgctttcattgattgatttagtcaaagatactatgtcgggaaa

SEQ ID NO: 42783 - DNA, 75 bp, synthetic construct
  source 1..75: mol_type = other DNA
agcgccgtgcgcctgccacgaatggaagcctttttgatcttccttaccacggtgatgatggtgtcgctgatgatg

SEQ ID NO: 42784 - DNA, 75 bp, synthetic construct
  source 1..75: mol_type = other DNA
ttcgcggatatcggccagactctggcaaaatattttggtacttctgatatggaatatggcaaagccatgttctga

SEQ ID NO: 42785 - DNA, 75 bp, synthetic construct
  source 1..75: mol_type = other DNA
atgtcaccagggatcgaagatacgccccaaaaaccactgtcctgctggccacttgcgttcagtgccgggcttctc

SEQ ID NO: 42786 - DNA, 75 bp, synthetic construct
  source 1..75: mol_type = other DNA
tgtcgcaatcgcgctgattatggcagcattatttgcaactatattatttaccattgtgtctgtatttatctggca

SEQ ID NO: 42787 - DNA, 75 bp, synthetic construct
  source 1..75: mol_type = other DNA
tcgccattggttttctcttgctgtccgtgctggtggatttcaccagcacaatcctgtcagttttatcggacgggg

SEQ ID NO: 42788 - DNA, 75 bp, synthetic construct
  source 1..75: mol_type = other DNA
ccctggttattgccccgaccattgtcaattttgacgtttcagtccaggtatctctggatggtctgacactagccg

SEQ ID NO: 42789 - DNA, 75 bp, synthetic construct
  source 1..75: mol_type = other DNA
aaggtcgtttggtagcgatgaccggcgacggcaccaacgatgctccggcgctggcgcaggcagatgtcgcggtgg

SEQ ID NO: 42790 - DNA, 75 bp, synthetic construct
  source 1..75: mol_type = other DNA
ttaattccagtctggggttcatgactgcttttttcgaagcatacctggacactgactataccgatcgaggtctgc

SEQ ID NO: 42791 - DNA, 75 bp, synthetic construct
  source 1..75: mol_type = other DNA
gcgtttagttgttgaagacgtcaccacacaaaatgtactggccaccttcatcggttcttttctcttgaagtggtc

SEQ ID NO: 42792 - DNA, 75 bp, synthetic construct
  source 1..75: mol_type = other DNA
atgaatgctatcccttatttcgactatagcctggcacccttctggccgtcttatcagaacaaaatcatcggtgtc

SEQ ID NO: 42793 - DNA, 75 bp, synthetic construct
  source 1..75: mol_type = other DNA
gcgacgcggttccgtatcaggagtttgcgcgtcttattggtaaaacccctgctgctgtcaaagggatgattgaga

SEQ ID NO: 42794 - DNA, 75 bp, synthetic construct
  source 1..75: mol_type = other DNA
agcgtaactcccagaaatcactggcagaatggattgaagactgggccgactaccttgtgggctttgatgctaatg

SEQ ID NO: 42795 - DNA, 75 bp, synthetic construct
  source 1..75: mol_type = other DNA
ccgtctgatagtgcggaaaaacggtgctgaaatttataaccgtaccgcgctggataatacgctgatttacagtgg

SEQ ID NO: 42796 - DNA, 75 bp, synthetic construct
  source 1..75: mol_type = other DNA
tcaaatgcgttggcgttggatggattcttctgacgttttttattgttctgcatagctacattcgtcttgtgaatg

SEQ ID NO: 42797 - DNA, 75 bp, synthetic construct
  source 1..75: mol_type = other DNA
aacgaaacagcctgagccagtagaaacggagaaagtttgcaccgcctgcggtaaggctggcggcggcaactgtcc

SEQ ID NO: 42798 - DNA, 75 bp, synthetic construct
  source 1..75: mol_type = other DNA
tataaaggctggaccttgttctggaagaactatgatcgactcccccatatctaccgttcgcaatggcgatatcag

SEQ ID NO: 42799 - DNA, 75 bp, synthetic construct
  source 1..75: mol_type = other DNA
agcggtggcttttgccattaagtgggtggcggtcggtatcgctgtgtctccgatgctgtatgggatggcaaaatt

SEQ ID NO: 42800 - DNA, 75 bp, synthetic construct
  source 1..75: mol_type = other DNA
tgttgaccgaaaccgatcacgctaacccggatccggaaatcgtggaaattgcctgcggtcgctcatcagcaccga

SEQ ID NO: 42801 - DNA, 75 bp, synthetic construct
  source 1..75: mol_type = other DNA
ggcaatcagtgggcaggtaatatcaccgactgtacggtgattgtgaccaaaaaagccgcttccggcatcagtatt

SEQ ID NO: 42802 - DNA, 75 bp, synthetic construct
  source 1..75: mol_type = other DNA
ccgtcaaccagtatattgctcaggaataagtggttgacaccgccggaggatattccggagcaggttacccgtgaa

SEQ ID NO: 42803 - DNA, 75 bp, synthetic construct
  source 1..75: mol_type = other DNA
gtgcctgagtctgaagtttttaactggatcccccgcgaggggatggagacgacacgaaagccatctgttattacg

SEQ ID NO: 42804 - DNA, 75 bp, synthetic construct
  source 1..75: mol_type = other DNA
ccgagaaaactggttaaagagagatccagactgaaacgggcgacggtcagaaatccgaatgccaaaattatcgtt

SEQ ID NO: 42805 - DNA, 75 bp, synthetic construct
  source 1..75: mol_type = other DNA
atgtgatgcgacgtattgatggcaaaaatcgttaccccattgatgtggtgaaaatcccgctgtccggaccgctga

SEQ ID NO: 42806 - DNA, 75 bp, synthetic construct
  source 1..75: mol_type = other DNA
cgcccgttacgctaccgatgataataatcatgaaggcgcgctgaatgtgattcaggcggtgctggaaaataaacc

SEQ ID NO: 42807 - DNA, 75 bp, synthetic construct
  source 1..75: mol_type = other DNA
accggaaaaagaagccatcgtggataacggtgcccgctttgagccgcagtcaggcaccctgaacagcgtcatccc

SEQ ID NO: 42808 - DNA, 75 bp, synthetic construct
  source 1..75: mol_type = other DNA
gtgctggattgcagcgtcaatttttccatttcaccggaaacacaggtgattgattttggtaaatttaatttgctg

SEQ ID NO: 42809 - DNA, 75 bp, synthetic construct
  source 1..75: mol_type = other DNA
cgccaatcccccgacgttttccctgacgccggagggcaggctgaccgcaagaaatgctgatatcagcggtaacgt

SEQ ID NO: 42810 - DNA, 75 bp, synthetic construct
  source 1..75: mol_type = other DNA
tgtttgcacgttatatctcttctctgaaagatcagcgtgttgccgcatctaaagttctctctggcccgcaagcgc

SEQ ID NO: 42811 - DNA, 75 bp, synthetic construct
  source 1..75: mol_type = other DNA
gtaatgaccttaaagaattgcgggtagctttaaactactcacaaaatcccatctctcccaaagcccgctccctta

SEQ ID NO: 42812 - DNA, 75 bp, synthetic construct
  source 1..75: mol_type = other DNA
ttagcagaaagtgaagggctgggactggtttatgcagaattattgaatattggttttaatgatggagttgatgcg

SEQ ID NO: 42813 - DNA, 75 bp, synthetic construct
  source 1..75: mol_type = other DNA
atccgccggcgggaaggccaggatgccgctcgtgacctacaaggtgtgggcggcgagcctcctgccgtgaccgcg

SEQ ID NO: 42814 - DNA, 75 bp, synthetic construct
  source 1..75: mol_type = other DNA
cagggcaaaaatgagcgcgatgacctccagaaggccaatggtgatgggtatggtttctcagccagctatgagttt

SEQ ID NO: 42815 - DNA, 75 bp, synthetic construct
  source 1..75: mol_type = other DNA
gggagatttgcaggattttatcgcattggttaaagatgctaaaaaatttggtatcgatatcattcctgattatac

SEQ ID NO: 42816 - DNA, 75 bp, synthetic construct
  source 1..75: mol_type = other DNA
atatatctacaaaaagctgtgtaatacgcaatgcggcgcaggccttaactgacgatggaactctatacggagcca

SEQ ID NO: 42817 - DNA, 75 bp, synthetic construct
  source 1..75: mol_type = other DNA
atgtgcaacactgctcaaacccacctcagctgagcatcacgaaaataagggtggtttcttcggctggtttaatac

SEQ ID NO: 42818 - DNA, 75 bp, synthetic construct
  source 1..75: mol_type = other DNA
ttttctggtgcctgtatgccattcgccagtctctcagcggcattgtccatttctgtgacgcggcctggattgcca

SEQ ID NO: 42819 - DNA, 75 bp, synthetic construct
  source 1..75: mol_type = other DNA
gttggttgaagaagataaagcattgttgattggtaatggtctgaagctacgtttactggatgaaaacgcctcgcc

SEQ ID NO: 42820 - DNA, 75 bp, synthetic construct
  source 1..75: mol_type = other DNA
ggtaaaggggactatacttgtggtggccaagaccaacggggagaatcaaaaggagatggtctatgggggccaggt

SEQ ID NO: 42821 - DNA, 75 bp, synthetic construct
  source 1..75: mol_type = other DNA
tatcttcgtcttccggggccgcagtggcaaaatggtgaaaatactgtgggccgatcgtgacgggttatgcctgtt

SEQ ID NO: 42822 - DNA, 75 bp, synthetic construct
  source 1..75: mol_type = other DNA
acgaagcattcaatcttaacagccttcagcctggttctgtcattgtagtcaccactcaaagcggcatgaccattc

SEQ ID NO: 42823 - DNA, 75 bp, synthetic construct
  source 1..75: mol_type = other DNA
gtgtggagaactgtttaaaagggaagtttaaagaggtaaggccgcgttattctgtattgcctgatatattcacac

SEQ ID NO: 42824 - DNA, 75 bp, synthetic construct
  source 1..75: mol_type = other DNA
cgaatggcaacacaaagccgatgtttgttggtcagggcgatcagatatttatgaatgaagtgttcctgaaatatc

SEQ ID NO: 42825 - DNA, 75 bp, synthetic construct
  source 1..75: mol_type = other DNA
acgaagcattcaatcttaacagtcttcagcctggttctgtcgttgtagtcaccactcaaagcggcatgacgatac

SEQ ID NO: 42826 - DNA, 75 bp, synthetic construct
  source 1..75: mol_type = other DNA
gggctggcggcatggcgctatacgaagccagtgttggtcgctgagattaactccctggctaaccagctgcagata

SEQ ID NO: 42827 - DNA, 75 bp, synthetic construct
  source 1..75: mol_type = other DNA
tgcggctgcggcagtgctgaaaacgtgctgggataaatatgaaaaaaaaggaggggaacaacaaaaaatattacg

SEQ ID NO: 42828 - DNA, 75 bp, synthetic construct
  source 1..75: mol_type = other DNA
ctgaattatggtgaaatcgcgaagatcttccgtgccggttgtatcattcgtgctcagttcctgcagaaaatcacg

SEQ ID NO: 42829 - DNA, 75 bp, synthetic construct
  source 1..75: mol_type = other DNA
ggctggagcaaccagctctgccgttggttttaacattcagttgaatgattgcgataccactgttgccacaaaagc

SEQ ID NO: 42830 - DNA, 75 bp, synthetic construct
  source 1..75: mol_type = other DNA
acaggagctgcgcccggttatttctgccgtcacggaaaccattgaggccggcacgctgcgcctggagatccgcgt

SEQ ID NO: 42831 - DNA, 75 bp, synthetic construct
  source 1..75: mol_type = other DNA
gatatcgcgcaagtgcaggtgcagaacaaactccagctcgccacgccgttgctgccgcaggaggttcagcagcag

SEQ ID NO: 42832 - DNA, 75 bp, synthetic construct
  source 1..75: mol_type = other DNA
gctggggcgctataaattcaatatgccgagttcagaggccatttatttgcatgacacgccgaaccacaatctgtt

SEQ ID NO: 42833 - DNA, 75 bp, synthetic construct
  source 1..75: mol_type = other DNA
gctaaaacatacggaaggctggactttacaaacaggctttctgggtatagtcagacgttaccgctgcagcaagac

SEQ ID NO: 42834 - DNA, 75 bp, synthetic construct
  source 1..75: mol_type = other DNA
cagcactgataagtcagtgtgcccctgatgtatcacccgatacgatgaatgccctgattatgactgaatcagggg

SEQ ID NO: 42835 - DNA, 75 bp, synthetic construct
  source 1..75: mol_type = other DNA
cagatatacagcaaaaatttcccatcacttaatctgaattacaaaacagtttttgacccatgtacaaatattaaa

SEQ ID NO: 42836 - DNA, 75 bp, synthetic construct
  source 1..75: mol_type = other DNA
atgaacggtataaaaacggggctggggatcacgccgggtgagcacattatcagtgccgacgctgcgctcagcaga

SEQ ID NO: 42837 - DNA, 75 bp, synthetic construct
  source 1..75: mol_type = other DNA
tcatcagagggaaactgtctgcaaaccagattgaaggcgacctggtgaagacggtggggaaagcctttccccgga

SEQ ID NO: 42838 - DNA, 75 bp, synthetic construct
  source 1..75: mol_type = other DNA
atgaaaactgaactgaccctgaatgtcctgcagaccatgaacgcacaggaatatgaagatatccgtgctgcggga

SEQ ID NO: 42839 - DNA, 75 bp, synthetic construct
  source 1..75: mol_type = other DNA
gacataccacacacactcaatcgactgaagatacttcatcaccggcgccagccgcgcctatggtggattcattaa

SEQ ID NO: 42840 - DNA, 75 bp, synthetic construct
  source 1..75: mol_type = other DNA
acaccaccaatatcgccacgaacaccaccaacatcaccaacctgactgacgctgttgacagtctcggtgatgact

SEQ ID NO: 42841 - DNA, 75 bp, synthetic construct
  source 1..75: mol_type = other DNA
aaaaatcatcgccctgtacgagcaggccgccgaatgtgacggcgaggtggttcgtcccaaagaaccgaactggac

SEQ ID NO: 42842 - DNA, 75 bp, synthetic construct
  source 1..75: mol_type = other DNA
atgcctgctgtggactgctgtgtccagcttatccacagcattatgcgcacggttctgtggacaaaatacctggtt

SEQ ID NO: 42843 - DNA, 75 bp, synthetic construct
  source 1..75: mol_type = other DNA
cttgcaaaatctggctgactggctgcgtctggcactcggcagcgccattgttccgcctctgttggggggtgcccc

SEQ ID NO: 42844 - DNA, 75 bp, synthetic construct
  source 1..75: mol_type = other DNA
cggcaatcccccgacgttttccctgacgccggacgggcgactgacggcgaaaaatgcggatatcagtggcagtgt

SEQ ID NO: 42845 - DNA, 75 bp, synthetic construct
  source 1..75: mol_type = other DNA
aggctggttaacgcgtaaggcgcgtcgccagggtaaccgcaatgcgtcgaatgtttatcagcttaacgttgcgaa

SEQ ID NO: 42846 - DNA, 75 bp, synthetic construct
  source 1..75: mol_type = other DNA
ggcggagatgaagaccaccatcacggaaacccgcaatgaaatcacacagacggtcagtaaaacgctggagaacca

SEQ ID NO: 42847 - DNA, 75 bp, synthetic construct
  source 1..75: mol_type = other DNA
cggtagtttcaccacaagccgttttcgacgcgccacaactcaccacggttgccaaagagtggccgctgttttcgt

SEQ ID NO: 42848 - DNA, 75 bp, synthetic construct
  source 1..75: mol_type = other DNA
atcaacaccggtagccgtctgatcccgctcagtctcgcctggcgttcgcttgccgatcatcaaagtgccgccgct

SEQ ID NO: 42849 - DNA, 75 bp, synthetic construct
  source 1..75: mol_type = other DNA
ggaatcttcaaaacaggttcctgttacgtatgagtggttgcgtctggaagaccgcacgagccacagcggagatct

SEQ ID NO: 42850 - DNA, 75 bp, synthetic construct
  source 1..75: mol_type = other DNA
atgaacgacagattacgctttgaagtgaacgataaccaggggcgtttcgtatttccggatacctggtttggccca

SEQ ID NO: 42851 - DNA, 75 bp, synthetic construct
  source 1..75: mol_type = other DNA
agggaagatgatacatcgccatctgttgcagagcgtgcccgccgaaatctggaggcggacgttgaactgttcatt

SEQ ID NO: 42852 - DNA, 75 bp, synthetic construct
  source 1..75: mol_type = other DNA
gaaagccggatggcgcaaattgttgggctgcaagatcgcaaacagatgcgcgtgcgctactacggcctgaaccac

SEQ ID NO: 42853 - DNA, 75 bp, synthetic construct
  source 1..75: mol_type = other DNA
tattcaggcccgccagcgcctgggaagtgaggctgtccgccgcgtgttcacgaaaacagcgcagcttctggcata

SEQ ID NO: 42854 - DNA, 75 bp, synthetic construct
  source 1..75: mol_type = other DNA
cactggcgacgatgtctggttttcgccacaaaacagttgatgttcctgagtgggaaggtacaacggttgtattac

SEQ ID NO: 42855 - DNA, 75 bp, synthetic construct
  source 1..75: mol_type = other DNA
tttttttagcactatgctcttgttgttatacagcaagcgccggcaccgatgatgacgtcggctatattgttggga

SEQ ID NO: 42856 - DNA, 75 bp, synthetic construct
  source 1..75: mol_type = other DNA
ctaatcgtggattcattaaggtagcagagcgcaaggtgaagcgtcggcgtgtgtataagtcgatcatcacctgca

SEQ ID NO: 42857 - DNA, 75 bp, synthetic construct
  source 1..75: mol_type = other DNA
atggtgacaatttttgctgccattgttggttgtctgatttacgttccacaatttctggcttctgttcagactatg

SEQ ID NO: 42858 - DNA, 75 bp, synthetic construct
  source 1..75: mol_type = other DNA
caccttatctgtcgcgctgggaaaagctggataattttattaatcgcccagtgaaacttatcattggtgataaag

SEQ ID NO: 42859 - DNA, 75 bp, synthetic construct
  source 1..75: mol_type = other DNA
aggcagcagaacgcgcccaccaaatcgaagttatttgcgcactggcagaggattaccctagcatgatgaccgaca

SEQ ID NO: 42860 - DNA, 75 bp, synthetic construct
  source 1..75: mol_type = other DNA
aagcggcggatagtgttccggcggagaaaattcaggtgacatatcgtcgctatcgtatgcaggcgttacttagcg

SEQ ID NO: 42861 - DNA, 75 bp, synthetic construct
  source 1..75: mol_type = other DNA
tgcacgccagcacttccgtaaaaatagtgcgaccacaaccactgaaatccatgccacaccagacggtcacccggt

SEQ ID NO: 42862 - DNA, 75 bp, synthetic construct
  source 1..75: mol_type = other DNA
gattagtagggcttttaagtatgcgcttgatgaaatcacaaagaaaaaacgcccggcggcaaccgagcgttctga

SEQ ID NO: 42863 - DNA, 75 bp, synthetic construct
  source 1..75: mol_type = other DNA
ccctgccattattcaccaaaaaatataaactttgcataacacctgacagcggcgttatctgctcaatatcacagg

SEQ ID NO: 42864 - DNA, 75 bp, synthetic construct
  source 1..75: mol_type = other DNA
atgatggaaatcaaggctcaacagtttgtcacatcaacggggcggcaagtccttactgacaacggacaacaaggt

SEQ ID NO: 42865 - DNA, 75 bp, synthetic construct
  source 1..75: mol_type = other DNA
catccaggtgccgtcaaactacgacccggaaaaacgcacttacagcggtatctgggacggcagtctgaaaccggc

SEQ ID NO: 42866 - DNA, 75 bp, synthetic construct
  source 1..75: mol_type = other DNA
tcctggtatgtgattcgccggatggtcagcaacatgtatgttctgcaaagctcgttgcagtggcaggcgtggcac

SEQ ID NO: 42867 - DNA, 75 bp, synthetic construct
  source 1..75: mol_type = other DNA
tgccgattggtccaatctcctacatggaaaaccctgaagtgccgcaagccaacgcttacatgcttgaggctgcca

SEQ ID NO: 42868 - DNA, 75 bp, synthetic construct
  source 1..75: mol_type = other DNA
gattgacggtccgctgcgttctgtcacgcagtggctgacgaaggtggtctcaaaggtgacggcgctggcgcaggc

SEQ ID NO: 42869 - DNA, 75 bp, synthetic construct
  source 1..75: mol_type = other DNA
gatcgccatactggtaaacaaaaatggacagcatcatcagtagatttaatattcagctcaaatcctgaattacgt

SEQ ID NO: 42870 - DNA, 75 bp, synthetic construct
  source 1..75: mol_type = other DNA
tgccgccgcgaaccattcaaaacccgcgaaggcagagaaatcaccggaccgtggcagtcgcatcccaaacggatg

SEQ ID NO: 42871 - DNA, 75 bp, synthetic construct
  source 1..75: mol_type = other DNA
gaaggccccggtggaaaaccagatcctctggcttccgcgaaagatatcagggaagctttttcacgtatggccatg

SEQ ID NO: 42872 - DNA, 75 bp, synthetic construct
  source 1..75: mol_type = other DNA
ttacttccatggaaaaaacgtgggatgacgacctgttgccgctctgttcccagatttttcgccgcaacatttaca

SEQ ID NO: 42873 - DNA, 75 bp, synthetic construct
  source 1..75: mol_type = other DNA
cattgccaacattgtatggcagtcgaaagataccccggggaatgactctatatctatagctcaaacccacaatca

SEQ ID NO: 42874 - DNA, 75 bp, synthetic construct
  source 1..75: mol_type = other DNA
aattgtcgaaatgtaaaagaagctaatttccgttatcaacaacttcatgccaaagaaccaaattttaaagagtat

SEQ ID NO: 42875 - DNA, 75 bp, synthetic construct
  source 1..75: mol_type = other DNA
gggcgttatcacctcaaagaccggtgctgcactgcacgatattttgcatgtgttgaaacgccgcgatccgtctct

SEQ ID NO: 42876 - DNA, 75 bp, synthetic construct
  source 1..75: mol_type = other DNA
aaaggggtaattcctgcatttacgccactgatgcaggaagatgcaacaggtgcactggtggtatgggatggttcg

SEQ ID NO: 42877 - DNA, 75 bp, synthetic construct
  source 1..75: mol_type = other DNA
ggagcttggcgcagatgactacctgattaagccctttgattttacggagctggttgcacgtgtaagaaccctact

SEQ ID NO: 42878 - DNA, 75 bp, synthetic construct
  source 1..75: mol_type = other DNA
ttgccgcattccgggattactggatggcggaggggaaggttttcacgcaggttcagtgggagcagaaatttgccc

SEQ ID NO: 42879 - DNA, 75 bp, synthetic construct
  source 1..75: mol_type = other DNA
actgatctgctggatcagcgtataccgatgatgcaggcatgggcggattatgtgatgtctcagattatggaaaac

SEQ ID NO: 42880 - DNA, 75 bp, synthetic construct
  source 1..75: mol_type = other DNA
atgcaagtttcagttgaaaccactcaaggccttggccgccgtgtaacgattactatcgctgctgacagcatcgag

SEQ ID NO: 42881 - DNA, 75 bp, synthetic construct
  source 1..75: mol_type = other DNA
tcatgggggaggtttattcgaaccgctggacccagaagaacggggccgcaccttcgaagctctggattgcccaga

SEQ ID NO: 42882 - DNA, 75 bp, synthetic construct
  source 1..75: mol_type = other DNA
cgatatgagaaatagcttcaacggcctggctgcgaaagtacaaacggcgctgaaagacgatcccatgtccggcca

SEQ ID NO: 42883 - DNA, 75 bp, synthetic construct
  source 1..75: mol_type = other DNA
tatcgcgatgaaggttatccttcgcgaaggccagcaaatcgggcctaacaagaacatcgaggaatggcaaatcga

SEQ ID NO: 42884 - DNA, 75 bp, synthetic construct
  source 1..75: mol_type = other DNA
cccgggctgggaagattacaggaaacgagactttgacccggaaaaccccgagataacactaaataatcgcaggga

SEQ ID NO: 42885 - DNA, 75 bp, synthetic construct
  source 1..75: mol_type = other DNA
cgcagtatggatgaagatgattttgatctggacgcagctggtcccgatattgccgcctgggaaccggagcgacca

SEQ ID NO: 42886 - DNA, 75 bp, synthetic construct
  source 1..75: mol_type = other DNA
atgcgtgatattcagatggttctggagcgttggggagcatgggcggcgagtgatagttctggagtagattattcg

SEQ ID NO: 42887 - DNA, 75 bp, synthetic construct
  source 1..75: mol_type = other DNA
aaacgacgtttaccccgatttgccacaataacagaatttggcttactgccactgaagttggtttagcactggaat

SEQ ID NO: 42888 - DNA, 75 bp, synthetic construct
  source 1..75: mol_type = other DNA
ttcatgttaagggcaccagtcgtctgacttatacgcaggggaatgtaagcggcgaaggtagtcaggtaaatgcag

SEQ ID NO: 42889 - DNA, 75 bp, synthetic construct
  source 1..75: mol_type = other DNA
aaaaagaagctcaattaggtgagcttggagtaaatatagtaaaatcagtaattaatgaaaattttggatggattt

SEQ ID NO: 42890 - DNA, 75 bp, synthetic construct
  source 1..75: mol_type = other DNA
gcacgatttattagtagattattatgtagtcggtatgacattcatgtcactggcaggtaagcattgctgctctga

SEQ ID NO: 42891 - DNA, 75 bp, synthetic construct
  source 1..75: mol_type = other DNA
atgcgtgatattcagatggttctcgaacgctggggagcatgggcggcaaataatcatgaggatgtgacctggtcg

SEQ ID NO: 42892 - DNA, 75 bp, synthetic construct
  source 1..75: mol_type = other DNA
atgttcgctctgattcaacgtggtcagatatacaccgatagcgccggctatccgataaaaattcttcgctgcata

SEQ ID NO: 42893 - DNA, 75 bp, synthetic construct
  source 1..75: mol_type = other DNA
tggcgacccaacgtcgcctattttgaaggcgacaacgaaatgaaacgtaccgcgaaagcgattccggtacaggtt

SEQ ID NO: 42894 - DNA, 75 bp, synthetic construct
  source 1..75: mol_type = other DNA
cgtgctggtcgccgtctgtctcaacggaccacgccagcaggagaagctgttaccgttttctgacgtccgcgagga

SEQ ID NO: 42895 - DNA, 75 bp, synthetic construct
  source 1..75: mol_type = other DNA
atgttacagatagtcggcgcgctgatcctgctgatagcaggatttgccattcttcgccttttgttcagagcatta

SEQ ID NO: 42896 - DNA, 75 bp, synthetic construct
  source 1..75: mol_type = other DNA
accagtagccatctggcgcagggaacagaactcaccgttacgctaaacggcaaaacctacaccaccagcgtaggc

SEQ ID NO: 42897 - DNA, 75 bp, synthetic construct
  source 1..75: mol_type = other DNA
cgatgtggtcaaaaaaagcgggagttgatggtatcactgcggggatcgggattgtcgccggaaaagacagtgaag

SEQ ID NO: 42898 - DNA, 75 bp, synthetic construct
  source 1..75: mol_type = other DNA
ctggccggtttcttcactgcctcagggcgtcacactggaaggtaatgccggtcataacctgctggcgtcgtttta

SEQ ID NO: 42899 - DNA, 75 bp, synthetic construct
  source 1..75: mol_type = other DNA
cacgaaataacaaaaaggtttgatgaaatctgcgcattgcaacaaaaacttgaagccaagaaaaaggatatcgaa

SEQ ID NO: 42900 - DNA, 75 bp, synthetic construct
  source 1..75: mol_type = other DNA
catgaatccgccgttcagtcacgggcaggatatccggcatatcctgcgggctttttccctgttgcgtccgggtgg

SEQ ID NO: 42901 - DNA, 75 bp, synthetic construct
  source 1..75: mol_type = other DNA
tcaaaaaaatgcaaaaatttcttctgaagagaggaaaatggtcttttctcttgtaagtaaggagtttgaactaac

SEQ ID NO: 42902 - DNA, 75 bp, synthetic construct
  source 1..75: mol_type = other DNA
gcatagcaaacttgcttgcagacaagttttaccagaaacatatcgagccggatattgatattgtaaaactacgaa

SEQ ID NO: 42903 - DNA, 75 bp, synthetic construct
  source 1..75: mol_type = other DNA
atgtactaatggtctttgcggcacactatccgctatgataggtccagataaatttgattctatagatagcaccgc

SEQ ID NO: 42904 - DNA, 75 bp, synthetic construct
  source 1..75: mol_type = other DNA
cgcgttatgccctgacttttcagggatatatccttttcagtaaactgtcagtgccggattcttatccgtgtccgg

SEQ ID NO: 42905 - DNA, 75 bp, synthetic construct
  source 1..75: mol_type = other DNA
taccctacatcgtgatttccgcgagcgtctgatttatctcgacctcgaatatcaggatggctgctgccgtctgct

SEQ ID NO: 42906 - DNA, 75 bp, synthetic construct
  source 1..75: mol_type = other DNA
gggccgcgccagcaggagaagctgttaccgttttctgacgtccgcgaggagctgccacgcggcacgtttgcttat

SEQ ID NO: 42907 - DNA, 75 bp, synthetic construct
  source 1..75: mol_type = other DNA
aacagttttatttccgatgcaacggcgaatggtctgattctcatgaaactgccggaaacctggagtacaaatgag

SEQ ID NO: 42908 - DNA, 75 bp, synthetic construct
  source 1..75: mol_type = other DNA
agcctcatgtggggacttgatggtaaacatatcgcgctggaggctcacacctttgactctgtgaaatttattctg

SEQ ID NO: 42909 - DNA, 75 bp, synthetic construct
  source 1..75: mol_type = other DNA
tttttcgactgccagcccgactgtccgactggctcttcagaaggggaccggtgcaggaaatatcagtgccctgaa

SEQ ID NO: 42910 - DNA, 75 bp, synthetic construct
  source 1..75: mol_type = other DNA
ccgttgtgcctggcgcatccggtgcggcagcggcagttaagaatccgcaggcctctaaaagcagcttctggggtg

SEQ ID NO: 42911 - DNA, 75 bp, synthetic construct
  source 1..75: mol_type = other DNA
tcatccctaaagcgcgtggcggcactgatgccgacagtaatctacagagcctgtgttggccgtgtcataaggcga

SEQ ID NO: 42912 - DNA, 75 bp, synthetic construct
  source 1..75: mol_type = other DNA
tcgcgaatgacgaaagctgtctgcgccatcaggccttctggcatagctggcaggggccgcttcttgaagggcaac

SEQ ID NO: 42913 - DNA, 75 bp, synthetic construct
  source 1..75: mol_type = other DNA
gcggctgcgtcgtctgccagtgccgcgtcaacaagtgccgggcaggcctcagccagtgccatcgccgccggaaaa

SEQ ID NO: 42914 - DNA, 75 bp, synthetic construct
  source 1..75: mol_type = other DNA
cactactgacccgtcaggctattgcgaaagccacaaaagcgaaggctggaagcaatacaaaccaggcctgtcacg

SEQ ID NO: 42915 - DNA, 75 bp, synthetic construct
  source 1..75: mol_type = other DNA
tgatatccggaagtgggagcgtgtctgtgctgcgctgcgggagctgaacaaacacagggatattctccggaagat

SEQ ID NO: 42916 - DNA, 75 bp, synthetic construct
  source 1..75: mol_type = other DNA
acggaaactgattttaaagcctttcctcagccagcaggtgttgcgttaccggtacagaaagatgcaacacaggaa

SEQ ID NO: 42917 - DNA, 75 bp, synthetic construct
  source 1..75: mol_type = other DNA
aattctgcccaaccgtaaccgccccatgacctcggtgccgacattgatccgccacgttcccggaaaaacggaacc

SEQ ID NO: 42918 - DNA, 75 bp, synthetic construct
  source 1..75: mol_type = other DNA
atgcctccacgaaccccaaaagcctgccgcgttcgcggctgccgccataccacgactgacccgtcaggctattgc

SEQ ID NO: 42919 - DNA, 75 bp, synthetic construct
  source 1..75: mol_type = other DNA
ctgcccgcctcccgcgtttatcccggctcatcacgtcaggcgtacctggctaaccgtgcgcttcatgagttacga

SEQ ID NO: 42920 - DNA, 75 bp, synthetic construct
  source 1..75: mol_type = other DNA
ttttacaggcgttacctcatttccggttcattggtgaagtgctgtccggcttcgtccctgaaccacatcaacccg

SEQ ID NO: 42921 - DNA, 75 bp, synthetic construct
  source 1..75: mol_type = other DNA
gccggaagaaaccaccacggcaacagtagcgaaaatctcagagtgcgatttaaccgcgacgattgaacaacgtgg

SEQ ID NO: 42922 - DNA, 75 bp, synthetic construct
  source 1..75: mol_type = other DNA
tctggataaactgctcccgcaatcccctgaagaagacgaaaaagcgtcccgttcacgcccgatacgcaaaccctt

SEQ ID NO: 42923 - DNA, 75 bp, synthetic construct
  source 1..75: mol_type = other DNA
caaagccactgagcaagccactgcagcagcgaggtctgcttctgcagcaaaaacctctgaaacaaatgcaaagac

SEQ ID NO: 42924 - DNA, 75 bp, synthetic construct
  source 1..75: mol_type = other DNA
atgagaaacaaactctctttcgacttgcagttgagcgccagaaaagcggcaatcgctgaacggattgccgcccat

SEQ ID NO: 42925 - DNA, 75 bp, synthetic construct
  source 1..75: mol_type = other DNA
ctggaagggcatcttgatgactttgaaataccggaagcctttgtcaccaaagaattaccgctaaagctcgcacag

SEQ ID NO: 42926 - DNA, 75 bp, synthetic construct
  source 1..75: mol_type = other DNA
agaaactgccggtgatcgacgtggaattcagccatctggtggggatggatgaatgccagggaacactcacactgc

SEQ ID NO: 42927 - DNA, 75 bp, synthetic construct
  source 1..75: mol_type = other DNA
aactgtataccgacagtgccggttacccggtaataattattcgctgcataaacaacactgtgttgtacagaagaa

SEQ ID NO: 42928 - DNA, 75 bp, synthetic construct
  source 1..75: mol_type = other DNA
gtgaatgttaactttttcgtcacctgcattggtgacgcctttaaatcccggatggcacaaaaaagtgtgctgtta

SEQ ID NO: 42929 - DNA, 75 bp, synthetic construct
  source 1..75: mol_type = other DNA
ttagtgattggcgtggtcattgcggtcagagcaaaaccagaaaaacctttaactgaatctgtctcagaaagttga

SEQ ID NO: 42930 - DNA, 75 bp, synthetic construct
  source 1..75: mol_type = other DNA
tgcgtgaaaccgacactttcgacacctttatggagtcctcctggtactatgcgcgctacacttgcccggagtaca

SEQ ID NO: 42931 - DNA, 75 bp, synthetic construct
  source 1..75: mol_type = other DNA
gcaatgccggtaaagtgcgtgagctggcgtcgctgcttagcgacttcggtcttgatatcgtggcccaaacagacc

SEQ ID NO: 42932 - DNA, 75 bp, synthetic construct
  source 1..75: mol_type = other DNA
ctattttgccctgcgtaagcgtatcacgaagccgcctcatcatacctggcgtagctatgcgatgttcctgctgga

SEQ ID NO: 42933 - DNA, 75 bp, synthetic construct
  source 1..75: mol_type = other DNA
gagcggtatcgcgctgttagtgattggcgtggtcattgcggtcagagccaaaccggaaaagcctttaactgaatc

SEQ ID NO: 42934 - DNA, 75 bp, synthetic construct
  source 1..75: mol_type = other DNA
agcagaaatcgaaaaactgttaaatgttttggctggtgatgacttacttgtcgcgcttttatgtctgagcactgg

SEQ ID NO: 42935 - DNA, 75 bp, synthetic construct
  source 1..75: mol_type = other DNA
atggcgcgtgatattcagcaggttatggagcggtggggagcatgggctgcaaacaatcacgaagatgtgtcatgg

SEQ ID NO: 42936 - DNA, 75 bp, synthetic construct
  source 1..75: mol_type = other DNA
gagggtgatggctggtttattggttccattcatgacaccgaagatggtccggtttgtgtctggttgcgaaataag

SEQ ID NO: 42937 - DNA, 75 bp, synthetic construct
  source 1..75: mol_type = other DNA
cgcacttgctgatggcggcggccatcgtcgccgtggagagcggcgaggaagcgatcaaccatcgcacactcagca

SEQ ID NO: 42938 - DNA, 75 bp, synthetic construct
  source 1..75: mol_type = other DNA
tcaggatacctgttgcggctttggcgggacgttctcggtcaagatggccgagatatccggtgagatggtgaaaga

SEQ ID NO: 42939 - DNA, 75 bp, synthetic construct
  source 1..75: mol_type = other DNA
tcaccctgggcattctgggcggaatcgctgccgcaagtcgggtgctggctggcgcagagccgattacgttgcggt

SEQ ID NO: 42940 - DNA, 75 bp, synthetic construct
  source 1..75: mol_type = other DNA
tgcgccgcgctgcgggagctgaacaagcaccgggatattgtccgacagattgtcgattcctccagtcgtattgtg

SEQ ID NO: 42941 - DNA, 75 bp, synthetic construct
  source 1..75: mol_type = other DNA
atatgtcgtatttcccattttatcggtatgccatgacgtttgaagaatttgttccggcattttcttcctggtttg

SEQ ID NO: 42942 - DNA, 75 bp, synthetic construct
  source 1..75: mol_type = other DNA
aacgggccatcaaaaacgtggttctgggcagaaaatcgtggctgttcgccggttcgcagatggcgggagaacgcg

SEQ ID NO: 42943 - DNA, 75 bp, synthetic construct
  source 1..75: mol_type = other DNA
tgacgttcgtcgaatcggcgaaatttattataaggatgctgatttagagtcgtacagaaagaggttccgcgatga

SEQ ID NO: 42944 - DNA, 75 bp, synthetic construct
  source 1..75: mol_type = other DNA
atgacctcagtaccgacattgatccgccacgttcccggaaaaacggaaccgctcctccacctggaacatattcag

SEQ ID NO: 42945 - DNA, 75 bp, synthetic construct
  source 1..75: mol_type = other DNA
accggatgaatccagacagaattttattaacagaagtgaggggtggagaggcatgggattttctgaaaataacgg

SEQ ID NO: 42946 - DNA, 75 bp, synthetic construct
  source 1..75: mol_type = other DNA
tgctgggaaaactgaactgtcatagcaccattgagctggtgcattttgcactcaaccaccatctgctggcggggc

SEQ ID NO: 42947 - DNA, 75 bp, synthetic construct
  source 1..75: mol_type = other DNA
ccatgtggtcaaaaaagaccggtgttgagggaattactgcggggatcggaattgttgcaggaaaagatggtgaag

SEQ ID NO: 42948 - DNA, 75 bp, synthetic construct
  source 1..75: mol_type = other DNA
atgaaattaatcattaccgaagattaccaggaaatgagccgtgtcgcggcacaccatctgcttggttatatgtcg

SEQ ID NO: 42949 - DNA, 75 bp, synthetic construct
  source 1..75: mol_type = other DNA
ggacaggcattcaccagcgccgaagctctgtcatttaacggacaggctgatttcgttatatggctgcagacagtc

SEQ ID NO: 42950 - DNA, 75 bp, synthetic construct
  source 1..75: mol_type = other DNA
cagtatacccgtcctgtgcttgaacgtttactgctgcggacctggctgcgggatggtgaagtgtttgcgcagatg

SEQ ID NO: 42951 - DNA, 75 bp, synthetic construct
  source 1..75: mol_type = other DNA
ggctgattgctgatgccaaacctgcaagccgccaccttattggtctgaacattacccgggacattcccggctacc

SEQ ID NO: 42952 - DNA, 75 bp, synthetic construct
  source 1..75: mol_type = other DNA
tgatatcctccgggcacgccgggcaaccggcctgatgacacgcgacaactacagaacggtaaataacattaccct

SEQ ID NO: 42953 - DNA, 75 bp, synthetic construct
  source 1..75: mol_type = other DNA
aaatgtcggctttacttggaatcggccgcactacgctgtggcggaaaatgaagcaacatggcattgatgcagggc

SEQ ID NO: 42954 - DNA, 75 bp, synthetic construct
  source 1..75: mol_type = other DNA
aagagaaccagccaattgatctagcctcactttaccttgaaaatctcttaaaacagaaaggtaccagcatttgcg

SEQ ID NO: 42955 - DNA, 75 bp, synthetic construct
  source 1..75: mol_type = other DNA
gcaggataaaaatggcaacccactaaaagataaagaaatcaccttctctgtgccaaacgacgtcgcaagtcggtt

SEQ ID NO: 42956 - DNA, 75 bp, synthetic construct
  source 1..75: mol_type = other DNA
attaatttctattgtgattcaccagactctaataacgttgttccgctaataagaacgctggaagccaagccagcg

SEQ ID NO: 42957 - DNA, 75 bp, synthetic construct
  source 1..75: mol_type = other DNA
cagaaagcgttgaatgaattttatgacgcatttgaccttggcagcatagagccaggaacaacagtcagggtagca

SEQ ID NO: 42958 - DNA, 75 bp, synthetic construct
  source 1..75: mol_type = other DNA
aacaggcaacaagcgcttccttctgcggtatacattccacggtaccaaaaaaagtatcagtattggcagatttcc

SEQ ID NO: 42959 - DNA, 75 bp, synthetic construct
  source 1..75: mol_type = other DNA
tttctcctgcccctcgtttctgatatttacaatgggagtgggttttttatgggcttcatttgaagttgagggggc

SEQ ID NO: 42960 - DNA, 75 bp, synthetic construct
  source 1..75: mol_type = other DNA
gcagcactgacgccgttaacggctcccagctcaaaaccaccaacgacaacgtgacgaccaacaccaccaacatcg

SEQ ID NO: 42961 - DNA, 75 bp, synthetic construct
  source 1..75: mol_type = other DNA
tgctccggtcgttaccatcaacacggtagcaagcgacgacgtcattaacgccacagaacacggacaggcgcaaat

SEQ ID NO: 42962 - DNA, 75 bp, synthetic construct
  source 1..75: mol_type = other DNA
gtggcgacgtttatcagtgaagaggaaaacaagaacggtaccattgatatccctaacgataacggaaccacagat

SEQ ID NO: 42963 - DNA, 75 bp, synthetic construct
  source 1..75: mol_type = other DNA
tattaccaatacccggccgtcggtgtgccgattatggcggtatatcagggagaaagttttggtgaaaatgcttct

SEQ ID NO: 42964 - DNA, 75 bp, synthetic construct
  source 1..75: mol_type = other DNA
ttttaggtttatggattattgcattcaactacgctagagcaaacaagctaagtaatttggtaattgtgcttatta

SEQ ID NO: 42965 - DNA, 75 bp, synthetic construct
  source 1..75: mol_type = other DNA
caaagagtttattgaggcggcacaagttggcggtgtatcgacgccgggcattgttattcgccacattgtgccgaa

SEQ ID NO: 42966 - DNA, 75 bp, synthetic construct
  source 1..75: mol_type = other DNA
tgaaaaatacgcgctggtgcgtaccgaccagccgggattcagcgtctgtacccactctcagttaataaacagcat

SEQ ID NO: 42967 - DNA, 75 bp, synthetic construct
  source 1..75: mol_type = other DNA
gctaaaggatggaacctttatacgtggtgaaaaagtacaagaagtgatgcgtataaagacatcacctcttgaacg

SEQ ID NO: 42968 - DNA, 75 bp, synthetic construct
  source 1..75: mol_type = other DNA
agcacagcgagagtaaatcgtggattatgggttgatatttataaagaagcacagcatgcaggggaagttcctcct

SEQ ID NO: 42969 - DNA, 75 bp, synthetic construct
  source 1..75: mol_type = other DNA
ggaatgcgtctggccttacctcttacgctacgatgcgatgaaattggggtatcgttaaaagaagttattgatgga

SEQ ID NO: 42970 - DNA, 75 bp, synthetic construct
  source 1..75: mol_type = other DNA
gaaaccagacctgtgcgcaatttctatgtcggcactaacgatccccgggtgattttgtgcctgacccgccaggct

SEQ ID NO: 42971 - DNA, 75 bp, synthetic construct
  source 1..75: mol_type = other DNA
aagccgccactcaatatacccaacaggttaatcagaattacgccaaatcattaccgtttagcgatcgtcaggatt

SEQ ID NO: 42972 - DNA, 75 bp, synthetic construct
  source 1..75: mol_type = other DNA
cgtggtatgaagatgaaagaagagcatatcgttcctctcagtcggcaggcgatgattttgttagagcagctcaag

SEQ ID NO: 42973 - DNA, 75 bp, synthetic construct
  source 1..75: mol_type = other DNA
gcagatagttatcgcgatgctgatggtgaagtagacaccaacggttgggatggaacagatcgcctggatctgaca

SEQ ID NO: 42974 - DNA, 75 bp, synthetic construct
  source 1..75: mol_type = other DNA
cgcgtcgtgagcagtgtttacggaaaagcagcaagcgcgctgtatcgggtgatgagtggtatctgtcagggaatt

SEQ ID NO: 42975 - DNA, 75 bp, synthetic construct
  source 1..75: mol_type = other DNA
aacacgacgtcgctcagcgcctacaacagcgcgtcacggccattatgcggtatgcggtacagaacgattacatcg

SEQ ID NO: 42976 - DNA, 75 bp, synthetic construct
  source 1..75: mol_type = other DNA
accgatgcggcaggcaacagcgacgacgccagccgcacggttactgtgaatctcacctcgccgacaattggcatc

SEQ ID NO: 42977 - DNA, 75 bp, synthetic construct
  source 1..75: mol_type = other DNA
gaaacaaaccggtctgtatgttcaggatcaggcgcagtgggataaggtgctggtgactctgggtggtcgctatga

SEQ ID NO: 42978 - DNA, 75 bp, synthetic construct
  source 1..75: mol_type = other DNA
gccttgctggcgagcgactgcaatttagtgacaacgggttaacaccgtttggcacctgtattgatgaagtgtatt

SEQ ID NO: 42979 - DNA, 75 bp, synthetic construct
  source 1..75: mol_type = other DNA
atgaaaacattacccgatacacacgtacgggaggcatcgcgctgcccgtctcccgtcaccatctggcagactctg

SEQ ID NO: 42980 - DNA, 75 bp, synthetic construct
  source 1..75: mol_type = other DNA
atatgatgttaccgctacctggaaaaaagatcccgaacgtaaacgggagattgagcgattacaggctgaaaatcc

SEQ ID NO: 42981 - DNA, 75 bp, synthetic construct
  source 1..75: mol_type = other DNA
agacagttcgccgcttttgcgggtctgacaccacggcgttatgaatcaggtagcagtgtgagaggggcgagccgg

SEQ ID NO: 42982 - DNA, 75 bp, synthetic construct
  source 1..75: mol_type = other DNA
ggcgtatcagatgctggcccgcatggcgttacacctgcacgccatgcctccgcattatgacgcactgacaacaga

SEQ ID NO: 42983 - DNA, 75 bp, synthetic construct
  source 1..75: mol_type = other DNA
atgattaatcctgcgaatggcaacacaaagccgatgtttgttggtcagggcgatcagatattcatgaatgaagtg

SEQ ID NO: 42984 - DNA, 75 bp, synthetic construct
  source 1..75: mol_type = other DNA
tgaggaaagcgaagccggactgcaaactgccggataaggcgatggactacctggagcgaaacggactgacaagcg

SEQ ID NO: 42985 - DNA, 75 bp, synthetic construct
  source 1..75: mol_type = other DNA
ggacacacctggaatggcggccccgactcgctggcccgcctttacccggtggtaatggctgcaggggctaactca

SEQ ID NO: 42986 - DNA, 75 bp, synthetic construct
  source 1..75: mol_type = other DNA
tggtcgtacgccaccaggcgctgacagatatgcacacgcaggaactgaaccgcactgaaacggcgcgggaagtcc

SEQ ID NO: 42987 - DNA, 75 bp, synthetic construct
  source 1..75: mol_type = other DNA
cggcgtgctatttctccgcgcatggcggttacgataaatcctgcattgctctcgccgtccagcttaacggattcc

SEQ ID NO: 42988 - DNA, 75 bp, synthetic construct
  source 1..75: mol_type = other DNA
gtgagcgagattgactatcaggcactgcgtgacaaggcagagaaagcaacgtgtggtgagtggtcgatcgaatat

SEQ ID NO: 42989 - DNA, 75 bp, synthetic construct
  source 1..75: mol_type = other DNA
accgttaccggcacgacctggcgctataacgacagccgcacgctgaccgatggcaactatctctatcaggtgcgg

SEQ ID NO: 42990 - DNA, 75 bp, synthetic construct
  source 1..75: mol_type = other DNA
agtctgctctcgcagtcgcagtggcacttatctccacccaggcctggtcggcaggctttcagttaaacgaatttt

SEQ ID NO: 42991 - DNA, 75 bp, synthetic construct
  source 1..75: mol_type = other DNA
cgctttgccgataagctgccgtcagaacctcgggaaaatatcgtttatcagtgttgggagcgtttttgccaggag

SEQ ID NO: 42992 - DNA, 75 bp, synthetic construct
  source 1..75: mol_type = other DNA
acgaatccatggtgtgcggcgtgttccctaaccaagatggaacgttcactgctatgacgtataccaaaagcaaaa

SEQ ID NO: 42993 - DNA, 75 bp, synthetic construct
  source 1..75: mol_type = other DNA
acgaatctctggtatgcggcgtgtttcccaaccaggacggcacgttcaccgcgatgacgtataccaaaagcaaaa

SEQ ID NO: 42994 - DNA, 75 bp, synthetic construct
  source 1..75: mol_type = other DNA
ggtccattgcgccgggcaagtgcgcgggcacaaagaagagattttcacccgctgtaacgttgacggcagcctgcg

SEQ ID NO: 42995 - DNA, 75 bp, synthetic construct
  source 1..75: mol_type = other DNA
aactattttgttacagatcgttttgtggatatttttcagaattattttcgcggggtaatttttaaaaaagttggt

SEQ ID NO: 42996 - DNA, 75 bp, synthetic construct
  source 1..75: mol_type = other DNA
ccagtcgaaacagaggcatggaaagacgctattgactgggtgctcaaagagtcttgtcaggctgtaaacattgat

SEQ ID NO: 42997 - DNA, 75 bp, synthetic construct
  source 1..75: mol_type = other DNA
cctttaatggtgccggggttcgcgataccgccaggacactgaaaattggtagtaacaccgtcatccggactttaa

SEQ ID NO: 42998 - DNA, 75 bp, synthetic construct
  source 1..75: mol_type = other DNA
aagcttatgcggcagagcgtctggcgaaaatccgccgccagaaccggataaagaccgaacttcaggcagtactgg

SEQ ID NO: 42999 - DNA, 75 bp, synthetic construct
  source 1..75: mol_type = other DNA
ggtaagaacccgcaggaacactacaacgaactggcaaaacgctttggtgcgccgagctacaaccgtttgcaggca

SEQ ID NO: 43000 - DNA, 75 bp, synthetic construct
  source 1..75: mol_type = other DNA
acggagcatatttctcaggaagaggaagcgtatgcggcagagcgtctggcgaaaattcgccgtcagaaccggata

SEQ ID NO: 43001 - DNA, 75 bp, synthetic construct
  source 1..75: mol_type = other DNA
cacaaaatttgaccgtatgaataatgttgtcaaagcgaaaaaaggtgaagaagccgtattacgagtgaccactaa

SEQ ID NO: 43002 - DNA, 75 bp, synthetic construct
  source 1..75: mol_type = other DNA
ttgggcatatcacaccacaagctgcgctggcgacacatttcccggctgggctgccggttgtttgtaccaccagtg

SEQ ID NO: 43003 - DNA, 75 bp, synthetic construct
  source 1..75: mol_type = other DNA
gcagcctacagggcgtatggcaatgcagatttgcgctgggtattccgggtgctggtgggccatgagtcagaaatg

SEQ ID NO: 43004 - DNA, 75 bp, synthetic construct
  source 1..75: mol_type = other DNA
tcccgtcaccatctggcagactctgctctcccgactgctgggccagcattacggccttacactgaatgacacacc

SEQ ID NO: 43005 - DNA, 75 bp, synthetic construct
  source 1..75: mol_type = other DNA
gacacaaaggccatgatgattgcggcttatcccgccgaacagcgtgaagccgtttccgccgcgctggagctggaa

SEQ ID NO: 43006 - DNA, 75 bp, synthetic construct
  source 1..75: mol_type = other DNA
gcgatgacgtataccaaaagcaaaacgtttaaaaccgaatctggcgcacgtcgctggctggaaagaaattcaggt

SEQ ID NO: 43007 - DNA, 75 bp, synthetic construct
  source 1..75: mol_type = other DNA
attatgtgaagaaagttagctgcacagaagaagcaaacaatgtttataactgcattgtcgatgcctctattagta

SEQ ID NO: 43008 - DNA, 75 bp, synthetic construct
  source 1..75: mol_type = other DNA
gtgtctcagctttgtccctgtggtagtgctgtcgagtatagcctatgttgccacccttatgtgtctggtgaaaag

SEQ ID NO: 43009 - DNA, 75 bp, synthetic construct
  source 1..75: mol_type = other DNA
atcaacgccatcgaacatggtcaggcgttggtggtcagcggcaccagtacgggcgcggcggcgggtgatgtggta

SEQ ID NO: 43010 - DNA, 75 bp, synthetic construct
  source 1..75: mol_type = other DNA
gcagcggttcgcgagatattactatcgacgccaacctgcctggcctgcgcgtcgataccgtggcgggcgatgatg

SEQ ID NO: 43011 - DNA, 75 bp, synthetic construct
  source 1..75: mol_type = other DNA
tacccgacaatactgcgctctaccgcgtcgacggcgaaccggcattcctggataaactcaaccgtctggaaatgg

SEQ ID NO: 43012 - DNA, 75 bp, synthetic construct
  source 1..75: mol_type = other DNA
ttaacgccgccgaagcgggcgtggcgcaaaccatcagcgggcaggtgactggagccgccgttggcgacgcggtaa

SEQ ID NO: 43013 - DNA, 75 bp, synthetic construct
  source 1..75: mol_type = other DNA
ggtacattgaagacgatatttttcgtgcgctgtttcaccaggaaatgattaagcgggtatcggagtatcactctg

SEQ ID NO: 43014 - DNA, 75 bp, synthetic construct
  source 1..75: mol_type = other DNA
ttgatgatagttcctctgaggatgatcccgttgagaatagtcctgttgtgactagtcccgttgtatcaagttcta

SEQ ID NO: 43015 - DNA, 75 bp, synthetic construct
  source 1..75: mol_type = other DNA
atgacgtataccaaaagcaaaacgtttaaaaccgaagctggcgcgcatcgctggttagcaagaaactctgactga

SEQ ID NO: 43016 - DNA, 75 bp, synthetic construct
  source 1..75: mol_type = other DNA
cccatacctatgaagggatcactgatgctaacggagaggcctctctgacgctgacccagccaggcggcgtggggg

SEQ ID NO: 43017 - DNA, 75 bp, synthetic construct
  source 1..75: mol_type = other DNA
gtgagcgcagaactcatgcgactgctgagcaacatcatccgcaccgggatcatctctgaagttgatgaggaatcc

SEQ ID NO: 43018 - DNA, 75 bp, synthetic construct
  source 1..75: mol_type = other DNA
gagcatattgatgccggtatcactctggctaatgccgttaactttctggtagagaaatatgagttagttcgtatt

SEQ ID NO: 43019 - DNA, 75 bp, synthetic construct
  source 1..75: mol_type = other DNA
ctccggcggcgaagccctgtccgtcgcccgttgcagtctggcaaatgttacttactcgtttgcttgagcagcact

SEQ ID NO: 43020 - DNA, 75 bp, synthetic construct
  source 1..75: mol_type = other DNA
agcaccgggctgacggcaggaacggcattaacggtcgtgattaacaacgtcacttacgctgccacggtgttagct

SEQ ID NO: 43021 - DNA, 75 bp, synthetic construct
  source 1..75: mol_type = other DNA
ggcaggcggccagttcacgcccgtctccggttgaaatctggcagacactgctcacccgactgctggaccagcatt

SEQ ID NO: 43022 - DNA, 75 bp, synthetic construct
  source 1..75: mol_type = other DNA
aaactaacgtggcattatggctatatcttgaaatgtttgctctggtggcattcattaaactgtatacaggaaaag

SEQ ID NO: 43023 - DNA, 75 bp, synthetic construct
  source 1..75: mol_type = other DNA
ggcgatgagtacgacgaggcgctctccactctggcggaactggaagatatcggctggaaagttcgcctgtgtctg

SEQ ID NO: 43024 - DNA, 75 bp, synthetic construct
  source 1..75: mol_type = other DNA
ttcagaatttgatgaggcaaatgccttaaggttatgcgatgatcattataagctatggaagcgaaataaagagaa

SEQ ID NO: 43025 - DNA, 75 bp, synthetic construct
  source 1..75: mol_type = other DNA
cagaagatttagaaatctttgaagggcttgttgatgcccttgaagatgacgacgatgtacaaaaagtttatcata

SEQ ID NO: 43026 - DNA, 75 bp, synthetic construct
  source 1..75: mol_type = other DNA
aatttatccagtcttttcacattcatttattgaacgagagcttccgctactgaatcttgcccgatcacagtataa

SEQ ID NO: 43027 - DNA, 75 bp, synthetic construct
  source 1..75: mol_type = other DNA
gtaccttacacgttctcgccaaaggtggtcgaatcgcgcacgtccgcgatgcatcaggtcgcatcaccgccgttg

SEQ ID NO: 43028 - DNA, 75 bp, synthetic construct
  source 1..75: mol_type = other DNA
cggcttcgcgcgatgatagccgtgaaaaattcacacctgcacagaacctgaattacacccgccgtcgtgcagaac

SEQ ID NO: 43029 - DNA, 75 bp, synthetic construct
  source 1..75: mol_type = other DNA
tggcatcagtattgaaaacatcgttaaaaccgactcagtcgtgacaatttataatcttgttctcaatgctgattt

SEQ ID NO: 43030 - DNA, 75 bp, synthetic construct
  source 1..75: mol_type = other DNA
actggcctgagagcgccgacactgacgcgaaaaaatgcgctgcctttgcgggggctggcgtatccgttcagccgc

SEQ ID NO: 43031 - DNA, 75 bp, synthetic construct
  source 1..75: mol_type = other DNA
ctgaaactggtgccggacagcctgcgtgaagcggcttatgcgctgggtacaccgaagtggaagatgatctccgcg

SEQ ID NO: 43032 - DNA, 75 bp, synthetic construct
  source 1..75: mol_type = other DNA
tataatcgtgcgattcgtgatgaagctgagcgcaggtttccttttaacgttgaatgcaaaacgtcgcatcagctg

SEQ ID NO: 43033 - DNA, 75 bp, synthetic construct
  source 1..75: mol_type = other DNA
ccattatcgggagagttcaggccagagttgcctacgaagagatcaccgaccttttcgaagtctccgccacctacc

SEQ ID NO: 43034 - DNA, 75 bp, synthetic construct
  source 1..75: mol_type = other DNA
tcgccgctgctgttagaacttaacgaaaacgatccggggatctttgtgacccagtcggtgcacaaacagcaggcg

SEQ ID NO: 43035 - DNA, 75 bp, synthetic construct
  source 1..75: mol_type = other DNA
actgcagcgttgaaggtttcgttttttggccccttctatggtggctataatgtaatcaaactggatgatgagtat

SEQ ID NO: 43036 - DNA, 75 bp, synthetic construct
  source 1..75: mol_type = other DNA
ttgcacttcttgaaattctggggggactggttgtcatcagcctgctcatgccgctgttctggtcttacattgaag

SEQ ID NO: 43037 - DNA, 75 bp, synthetic construct
  source 1..75: mol_type = other DNA
cgaagcaggtacgtcgcccggacgttatctgctatatcaacggattgccagtagtagtgattgagctgaaaagcc

SEQ ID NO: 43038 - DNA, 75 bp, synthetic construct
  source 1..75: mol_type = other DNA
gctgttaacccacctgaaaaagaaagatgttcagttgcgagatattaaccgaaccatagttacaggctggttaga

SEQ ID NO: 43039 - DNA, 75 bp, synthetic construct
  source 1..75: mol_type = other DNA
atgaaaaataatatctcttttgctgttaacagcattacatatgcgctgctgctttctctggctggcgcaccggct

SEQ ID NO: 43040 - DNA, 75 bp, synthetic construct
  source 1..75: mol_type = other DNA
ccctgctgctctccaccgcggcggcgattatcgtcacccgcgtcagcgacaacggcgatatcgcccatgacgtgc

SEQ ID NO: 43041 - DNA, 75 bp, synthetic construct
  source 1..75: mol_type = other DNA
gcgcgtaatcacggctatacggtgctggatattcagcaagacgggccgaccattcgttatttaattcagaagtaa

SEQ ID NO: 43042 - DNA, 75 bp, synthetic construct
  source 1..75: mol_type = other DNA
ttgaatgggttaaacactgtcagtgccacggggtgccgctgacgacatataaatgccccggatgcggtgaacaga

SEQ ID NO: 43043 - DNA, 75 bp, synthetic construct
  source 1..75: mol_type = other DNA
tataaatcggatgggcgcatcagcggttacagcgctgggctgtacgcgacctggtatcagaacgatgcgaataag

SEQ ID NO: 43044 - DNA, 75 bp, synthetic construct
  source 1..75: mol_type = other DNA
ggaattgtccgcattgcggaaaaatcacctggcagtacaacccatatgattttgaaggctgtagtgattacaact

SEQ ID NO: 43045 - DNA, 75 bp, synthetic construct
  source 1..75: mol_type = other DNA
attcaccagttcgggggtaaaacggggcgtaatgagtctgttgaacttccggcccgcccgttcctgccggtgacg

SEQ ID NO: 43046 - DNA, 75 bp, synthetic construct
  source 1..75: mol_type = other DNA
ccacgctcagcggtccggtcattttatgaggcgcggaactcctggacgaacgcgctttggataggtgcaggtcgc

SEQ ID NO: 43047 - DNA, 75 bp, synthetic construct
  source 1..75: mol_type = other DNA
cggcaatcgaatacagcgtttcatcatcaatgtccgggagctggagcaaaatctcgacatgcagacgcgcatgat

SEQ ID NO: 43048 - DNA, 75 bp, synthetic construct
  source 1..75: mol_type = other DNA
gcgccgccaggaaatggctgatgcggcgttctccgccacgccgctgggcaacctgattaataaaagcctggacgc

SEQ ID NO: 43049 - DNA, 75 bp, synthetic construct
  source 1..75: mol_type = other DNA
ttgcgcctgacaacccacaaaactgtatcagaaatgttaattcgtttttaaaagaaaagtattataaagcttcaa

SEQ ID NO: 43050 - DNA, 75 bp, synthetic construct
  source 1..75: mol_type = other DNA
agcgtgctggagcagtccacgccgaatcagtggtcggagtgggatgtgcccggcgggcagctcaccacgaaaggc

SEQ ID NO: 43051 - DNA, 75 bp, synthetic construct
  source 1..75: mol_type = other DNA
gttaccgccgttaactacgccgatcgtgcaacgctgtctattgctggtaccgaagtggcaaaagagttgcagtta

SEQ ID NO: 43052 - DNA, 75 bp, synthetic construct
  source 1..75: mol_type = other DNA
caatctcgacaaaatccatcgcgttctggattgggcggcagaaggactgcataacgtttcgatttcccaggtcga

SEQ ID NO: 43053 - DNA, 75 bp, synthetic construct
  source 1..75: mol_type = other DNA
cacgctccagttctccgtagatgaggcactggccattgatgtgctgatcccggcaggcacccgcgtcagcgcttc

SEQ ID NO: 43054 - DNA, 75 bp, synthetic construct
  source 1..75: mol_type = other DNA
ctcgaccacaaaattaccgggtgatcgcgaaacgctatttttctacaatatgcgtgaaattcctcccgccccgga

SEQ ID NO: 43055 - DNA, 75 bp, synthetic construct
  source 1..75: mol_type = other DNA
gaggtcaccccggagcagcttgcccgactggaggcggagccatgcctcactgtgcgaatactacagacgcctgct

SEQ ID NO: 43056 - DNA, 75 bp, synthetic construct
  source 1..75: mol_type = other DNA
gacgtcaccccggagcagcttgcccgactggaagcggagccatgcctcactgtacgaatactacagacgcctggt

SEQ ID NO: 43057 - DNA, 75 bp, synthetic construct
  source 1..75: mol_type = other DNA
gtgctgggcgttatccctctggtatcaacaacagcttatggtggtgtatccagtaatattacaggttcatacgcg

SEQ ID NO: 43058 - DNA, 75 bp, synthetic construct
  source 1..75: mol_type = other DNA
aaagcctggctagagcgtaaacagagagagaacgaagaaagaaaactccttagtgagttgaaatggcttagagag

SEQ ID NO: 43059 - DNA, 75 bp, synthetic construct
  source 1..75: mol_type = other DNA
agggagatattagtgctgccaacggaagcaccgtcattctgggaagttctcgggtctttactgacaagaatgacg

SEQ ID NO: 43060 - DNA, 75 bp, synthetic construct
  source 1..75: mol_type = other DNA
gggtgacgattatgacatttatcacgcagcgcctgccgtcaggagcgatccggcagatatggacggaaggggaaa

SEQ ID NO: 43061 - DNA, 75 bp, synthetic construct
  source 1..75: mol_type = other DNA
cgagacgcagaaaaaggctattgttgccacggctttgatcgcgattgctgccctcttggttgcggtgatttagat

SEQ ID NO: 43062 - DNA, 75 bp, synthetic construct
  source 1..75: mol_type = other DNA
gaagtgggccagacggtgaccgtcacctttaacggtcagagctggactgcaacggtcggcagcggcggaagctgg

SEQ ID NO: 43063 - DNA, 75 bp, synthetic construct
  source 1..75: mol_type = other DNA
gctgccgtggtgctggcgcacaatcacccgtccggtgaagtcacccccagcaaggcagaccgccttatcactgag

SEQ ID NO: 43064 - DNA, 75 bp, synthetic construct
  source 1..75: mol_type = other DNA
atgacatttgttcatacgatgctgctttatttctgcactgtggtcagtgcgttatatctggtgagcggtggttat

SEQ ID NO: 43065 - DNA, 75 bp, synthetic construct
  source 1..75: mol_type = other DNA
tcgttatcacctatggcctgatggatggaatattcgtgggctcaatggattcatgctatcacataaaggtagtga

SEQ ID NO: 43066 - DNA, 75 bp, synthetic construct
  source 1..75: mol_type = other DNA
taatgcctcggtgaccaacgccgttggcaacaccggtagcggcacgcgcgatatcaccatcgatgccagtctgcc

SEQ ID NO: 43067 - DNA, 75 bp, synthetic construct
  source 1..75: mol_type = other DNA
agttaattgatcaggctgggctgggtcacgatgccctaacccaggcccgtaaccagttgcttggtatggcggcgc

SEQ ID NO: 43068 - DNA, 75 bp, synthetic construct
  source 1..75: mol_type = other DNA
gggaagcgaaaatcctggaactggctggcttcctggattcttatattccggaaccagagcgtgcgattgacaagc

SEQ ID NO: 43069 - DNA, 75 bp, synthetic construct
  source 1..75: mol_type = other DNA
cagctggcgcgaattctgcacccgtttgtcggcgtggttatgtttgcctcgttcatcatcatgtttttccgttac

SEQ ID NO: 43070 - DNA, 75 bp, synthetic construct
  source 1..75: mol_type = other DNA
tatcggccacgttgaccaaggtaaaactacactgaccgctgcaatcacgaccgtactggctaaaacctacggcgg

SEQ ID NO: 43071 - DNA, 75 bp, synthetic construct
  source 1..75: mol_type = other DNA
cgggcgtaatgccattgtactggcaggtcactcgcccactgccggacgtgctggcgaactctgtgcacatctggc

SEQ ID NO: 43072 - DNA, 75 bp, synthetic construct
  source 1..75: mol_type = other DNA
gccacacacccgtatgagtccctgtcgccgggggcatagacagccacaacctgccgcactgactgtccagggtaa

SEQ ID NO: 43073 - DNA, 75 bp, synthetic construct
  source 1..75: mol_type = other DNA
ggtgaagtcacacccagtaaggcagaccggcttatcaccgaacgtctggtacaggcactgggcctggtggatatc

SEQ ID NO: 43074 - DNA, 75 bp, synthetic construct
  source 1..75: mol_type = other DNA
tttatttctgcgcagtggtcagtgcgttatatctggtgagcggcggttataaggtcatcagaaattatattcgcc

SEQ ID NO: 43075 - DNA, 75 bp, synthetic construct
  source 1..75: mol_type = other DNA
caagctgactcgctgattaaaatttctcggatctgggccgatttttttcccgcaaacacatcgaatcagcctatt

SEQ ID NO: 43076 - DNA, 75 bp, synthetic construct
  source 1..75: mol_type = other DNA
accgtaggggctgcgaccggagagatatctgtatcttctgtcgccgacacgttacgtagattgtatggttccgcg

SEQ ID NO: 43077 - DNA, 75 bp, synthetic construct
  source 1..75: mol_type = other DNA
atgaataactctgaattagaaacactgatccgcaatattctgcgtgagcagcttgcccccgctacgcaacgagcg

SEQ ID NO: 43078 - DNA, 75 bp, synthetic construct
  source 1..75: mol_type = other DNA
aaatatacacggacaggaccggataccctgtggtgattactcgcagcactgagcactcagtgttctttcgacgca

SEQ ID NO: 43079 - DNA, 75 bp, synthetic construct
  source 1..75: mol_type = other DNA
gaacatattgaccaccaagaatatcacaaaattctggctgacactgagcaggaagctcatctgaaaaaattacgc

SEQ ID NO: 43080 - DNA, 75 bp, synthetic construct
  source 1..75: mol_type = other DNA
aacaacactgtgttgtacagaagaatggatgggcgaacacagtcggtaaaaataaacgattttaatgaactgttt

SEQ ID NO: 43081 - DNA, 75 bp, synthetic construct
  source 1..75: mol_type = other DNA
agatatacacggatagcactggttatccggtaaaaattattcgcagtactgatcactcggtattcttccggagaa

SEQ ID NO: 43082 - DNA, 75 bp, synthetic construct
  source 1..75: mol_type = other DNA
tgtgcacggatctgccctggcttcaggagatcggaagacctcggccgtcgcggcgcttgccggtggtgctgaccc

SEQ ID NO: 43083 - DNA, 75 bp, synthetic construct
  source 1..75: mol_type = other DNA
gatcagcctgttaataccgccatcaccgtaacgctgaacgggcaaaattacaccaccacgaccgacgcctccggc

SEQ ID NO: 43084 - DNA, 75 bp, synthetic construct
  source 1..75: mol_type = other DNA
gactgggagaacagggagttctcactcaacaatctgaatcttaataatgtggacttcagtctgtcccgtaatgca

SEQ ID NO: 43085 - DNA, 75 bp, synthetic construct
  source 1..75: mol_type = other DNA
gctgattgccattgtgaacgccgacgatttatgggtaacctgtgaacaacttatgcctgtgttaccgatcgtgaa

SEQ ID NO: 43086 - DNA, 75 bp, synthetic construct
  source 1..75: mol_type = other DNA
aactggatattgaactggtgagtgcaccggggaacagcagtaaggatgtttttaaaggaagtgaacaggaaatag

SEQ ID NO: 43087 - DNA, 75 bp, synthetic construct
  source 1..75: mol_type = other DNA
ggatacagccgccctctatgcctgcatttacccgtcaaccatctggcgacgcgtcgtcgtcgtcgtgggcttgat

SEQ ID NO: 43088 - DNA, 75 bp, synthetic construct
  source 1..75: mol_type = other DNA
ataacgttaatacagttttgggtagtagaagttgtaatgaaaacaattcttccaaccccatggagctactagctt

SEQ ID NO: 43089 - DNA, 75 bp, synthetic construct
  source 1..75: mol_type = other DNA
acgcattacagaaaaaacaagataaagtacaaataatcaaagggatgttatcacagttgatttctatatcccctt

SEQ ID NO: 43090 - DNA, 75 bp, synthetic construct
  source 1..75: mol_type = other DNA
ggtatttcgattctgcaaccggatctctcccacgcaggcggtattaccgaatgctacaaaattgccggaatggca

SEQ ID NO: 43091 - DNA, 75 bp, synthetic construct
  source 1..75: mol_type = other DNA
atggctatttttcatcttgattttaaaattgtgaaacgttcagaaggcaggtcttccgttgcgaaggctgcctat

SEQ ID NO: 43092 - DNA, 75 bp, synthetic construct
  source 1..75: mol_type = other DNA
aaattgtgaaacgttctgaaggtaggtcttccgttgcgaaagctgcttaccatgctcgttgcaaaatcacagatg

SEQ ID NO: 43093 - DNA, 75 bp, synthetic construct
  source 1..75: mol_type = other DNA
cattctgcaaaccgggtgacagcgtgatgatgaacacgccggtctacgatccttttgcgatggcggcacagcgcc

SEQ ID NO: 43094 - DNA, 75 bp, synthetic construct
  source 1..75: mol_type = other DNA
ctggtggtcgatgaggttcacgctgaacacattctggatggcaaattcgccagttgtctcacctctggctgtgcc

SEQ ID NO: 43095 - DNA, 75 bp, synthetic construct
  source 1..75: mol_type = other DNA
ctgaagcaatggcagctcgccttgatcgcctggcgtgtcatatcacatcccgccagttaaaccacgtcgaagcgg

SEQ ID NO: 43096 - DNA, 75 bp, synthetic construct
  source 1..75: mol_type = other DNA
acgcgggaccggctgcaccgtgagacggtgcgcagcttcggcagcatggcaggcagtaatgcagcatatgaactg

SEQ ID NO: 43097 - DNA, 75 bp, synthetic construct
  source 1..75: mol_type = other DNA
aatatatcggtcgtggcgttgcaatgtgcttttgcccgttctgtggtgaaagtttgaaaacgtgggaagcggagg

SEQ ID NO: 43098 - DNA, 75 bp, synthetic construct
  source 1..75: mol_type = other DNA
aaattgtgaaacgttcagaaggtaggtcttccgttgcgaaggctgcttatcatgctcgttgcaaaataacagatg

SEQ ID NO: 43099 - DNA, 75 bp, synthetic construct
  source 1..75: mol_type = other DNA
gcccgtgacgcgcactatctttaccggtatgaccgtcacggcaggctgacagagaaaaccgacctcatcccggaa

SEQ ID NO: 43100 - DNA, 75 bp, synthetic construct
  source 1..75: mol_type = other DNA
ctcacaccacctgtaccatccagaccacctgagcattcgagcagccgtcccccaaggctgaggccatcgagttat

SEQ ID NO: 43101 - DNA, 75 bp, synthetic construct
  source 1..75: mol_type = other DNA
tttccatatcctttctctttatgatcacctgcttgtttgcaataaggatgtgccgctcttcaatcgcttcgcctc

SEQ ID NO: 43102 - DNA, 75 bp, synthetic construct
  source 1..75: mol_type = other DNA
gatgccgacagtaatctgcagagcctgtgctggccgtgtcataaggcgaagacggcccgtgaacggttgaagtga

SEQ ID NO: 43103 - DNA, 75 bp, synthetic construct
  source 1..75: mol_type = other DNA
ctttaactttatgggaattgggggtagtggtaaaaatgacctggattatccctctgctgatatacgagcgaagat

SEQ ID NO: 43104 - DNA, 75 bp, synthetic construct
  source 1..75: mol_type = other DNA
gcaacccggttacagtcgccaattccatcccgcaggcgggtagcaaagcgcagacttttactctcgtggcaaaag

SEQ ID NO: 43105 - DNA, 75 bp, synthetic construct
  source 1..75: mol_type = other DNA
tcaggatggggctaaaacgtgtgaggaactggcgggtaagttcggtgtcagtactcgcaaggttgcttccacgct

SEQ ID NO: 43106 - DNA, 75 bp, synthetic construct
  source 1..75: mol_type = other DNA
attgacggtttccggcgcatcgtggagcacggcacctttggttatacctggtgctttgacgaattctacgacgcg

SEQ ID NO: 43107 - DNA, 75 bp, synthetic construct
  source 1..75: mol_type = other DNA
gcacctgaacagcctgcagtatgaccgcgattacacctggaacgacaacggcgaactcatccgcatcagcagccc

SEQ ID NO: 43108 - DNA, 75 bp, synthetic construct
  source 1..75: mol_type = other DNA
actttaggtgagtgtaccagaggagctcatagtggactgcctttttatcgggtggatggaccgttgcagacgatg

SEQ ID NO: 43109 - DNA, 75 bp, synthetic construct
  source 1..75: mol_type = other DNA
gacattaatggcagtaattatgagcaaacggtgccgtattccattacctgtgatacggcggttcgcgacccatca

SEQ ID NO: 43110 - DNA, 75 bp, synthetic construct
  source 1..75: mol_type = other DNA
agaacagacctttacggatgaggcttccgccccggtgctgaacgggttatatcaggcacttgaaaatcgcctgat

SEQ ID NO: 43111 - DNA, 75 bp, synthetic construct
  source 1..75: mol_type = other DNA
gaccctccgcacccgcatcaagcggctggcacgtaaaacaatctgcttctcgcgttccgtggaaatccacgaaaa

SEQ ID NO: 43112 - DNA, 75 bp, synthetic construct
  source 1..75: mol_type = other DNA
ggcaacggcggctcccattgcgacgctatgcactttgccgaagagttgacggggcgctaccgtgaaaaccgtccg

SEQ ID NO: 43113 - DNA, 75 bp, synthetic construct
  source 1..75: mol_type = other DNA
cgtcaccaggaactctcactggcaactgttacagccagggtggcaaccctgttcccgtcatcatttccggtactc

SEQ ID NO: 43114 - DNA, 75 bp, synthetic construct
  source 1..75: mol_type = other DNA
tccggtctggatgttacatcttctgcgtaaagcccgggatcgcattatccacctgctgagcgcactgtgggatcg

SEQ ID NO: 43115 - DNA, 75 bp, synthetic construct
  source 1..75: mol_type = other DNA
agtcgtgaagaagtgctgaacgagctgtgggaactgagaaaggctggcttcgttgataaaagcgtatacacctgg

SEQ ID NO: 43116 - DNA, 75 bp, synthetic construct
  source 1..75: mol_type = other DNA
accacaaacggcggatgaactggctacgctgtccggtaccacatcccgcaaagtggcttcaacgctggcaatggc

SEQ ID NO: 43117 - DNA, 75 bp, synthetic construct
  source 1..75: mol_type = other DNA
gcgaattgcggcagaaggggcgttgccttatccacctggcgtgctttgcgtggtacccggggaagtctggggtgg

SEQ ID NO: 43118 - DNA, 75 bp, synthetic construct
  source 1..75: mol_type = other DNA
catctgtgtgattacattctgtttgattccgcgtgggtcggttacgaacagtttatcccgatgatggcggatagc

SEQ ID NO: 43119 - DNA, 75 bp, synthetic construct
  source 1..75: mol_type = other DNA
aggtaggatgtcttaagaaattatcagaattaaggtctcacctttgtgacctgagaaacagggcggcaagtaatg

SEQ ID NO: 43120 - DNA, 75 bp, synthetic construct
  source 1..75: mol_type = other DNA
cactccgttgcgattggctcacatggacacaccatcaccgttaacgctgctggtaacgcggaaaacaccgtcaaa

SEQ ID NO: 43121 - DNA, 75 bp, synthetic construct
  source 1..75: mol_type = other DNA
gggtaaccgaagagcggccagtaaaatctgaagcacaggatatgctgaccggggaggtcgaacaaaaagttaccg

SEQ ID NO: 43122 - DNA, 75 bp, synthetic construct
  source 1..75: mol_type = other DNA
tcactcaccggacggtgaacggcgacccggcagagcagtggcagtatgatgagcacgggtggttaaccaccctca

SEQ ID NO: 43123 - DNA, 75 bp, synthetic construct
  source 1..75: mol_type = other DNA
aaaaactgaaggaaaaacttcaggaattactggtgaataataattacgctcctgaaaatgatgaaaataaggaat

SEQ ID NO: 43124 - DNA, 75 bp, synthetic construct
  source 1..75: mol_type = other DNA
tctgcgccgcgctgcgggagctgaacaagtaccgggatattgttcgacagattactgattcttctcgctgtgttg

SEQ ID NO: 43125 - DNA, 75 bp, synthetic construct
  source 1..75: mol_type = other DNA
cttcacaggccagtgacattgccagagtgcttggggctgccagacgcggtgaaggcctgattgaaggtaacgact

SEQ ID NO: 43126 - DNA, 75 bp, synthetic construct
  source 1..75: mol_type = other DNA
agagagcgaaaattcattagtatagacaaagacaattttgatgaagttatggcatcaatgagtccgaaggctcat

SEQ ID NO: 43127 - DNA, 75 bp, synthetic construct
  source 1..75: mol_type = other DNA
aaaaattgaaagaaaaacttcaggaattactggtaaatactcaaaataatcctgaaaatgatgaaggtaaggaat

SEQ ID NO: 43128 - DNA, 75 bp, synthetic construct
  source 1..75: mol_type = other DNA
ttattgctgcaacgctatcctttccagggcgatgcgcgtgtcagccagactttaatggcgcgactggcgtctctg

SEQ ID NO: 43129 - DNA, 75 bp, synthetic construct
  source 1..75: mol_type = other DNA
ggtgattcaaaaatgtggcttgaagcaaataaagcgatgaaatcagctatcaaccttccgtggtaccgcaggaaa

SEQ ID NO: 43130 - DNA, 75 bp, synthetic construct
  source 1..75: mol_type = other DNA
gcggcgggagcgtgacctgacggggtggatgtcgctgtcgcgtaaaccggaggtgacgtggtatggctgggacgg

SEQ ID NO: 43131 - DNA, 75 bp, synthetic construct
  source 1..75: mol_type = other DNA
cagttgaaggggtggcccggtaccctattaacattcgctacccgcaggattaccggaacagtccgcaggcgctga

SEQ ID NO: 43132 - DNA, 75 bp, synthetic construct
  source 1..75: mol_type = other DNA
aattgctaagaaaatgggcgataaaggccatttcaccacgccaatgatgcagcttcaggacccggagcgaaccaa

SEQ ID NO: 43133 - DNA, 75 bp, synthetic construct
  source 1..75: mol_type = other DNA
gatggttccccaacctataacttctgtgtggttgttgatgactgggatatggaaatcacccatgttatccgtggc

SEQ ID NO: 43134 - DNA, 75 bp, synthetic construct
  source 1..75: mol_type = other DNA
tctcactgctgttgctgccggagaggatgttgttcctgcctcagaactggctgccgctataaaaaataaaagagt

SEQ ID NO: 43135 - DNA, 75 bp, synthetic construct
  source 1..75: mol_type = other DNA
ttattggcattataagtattcttttacagaaaactgagattatacatgataaaagtatgattctttttcctgaac

SEQ ID NO: 43136 - DNA, 75 bp, synthetic construct
  source 1..75: mol_type = other DNA
ggcgatgcgtcaggcgggggcatggacccttgcgcaaaacgaagcaagttgcgtggtgttcggcatgccgcgcga

SEQ ID NO: 43137 - DNA, 75 bp, synthetic construct
  source 1..75: mol_type = other DNA
ctgggtacgctgcatcgtgtggtgtgtcagccccagcgggtggggcagagcagcagtgtggccgtgacagcagaa

SEQ ID NO: 43138 - DNA, 75 bp, synthetic construct
  source 1..75: mol_type = other DNA
catccgcgctggtatatccaggtggtggatgcggccgatctgttctacctgctgctctggctgtgtgatggcggg

SEQ ID NO: 43139 - DNA, 75 bp, synthetic construct
  source 1..75: mol_type = other DNA
aaaaggatgcacaccacatctacctcactgacggcacttacttctgcgccactaatgtggcgcgggtaaacctta

SEQ ID NO: 43140 - DNA, 75 bp, synthetic construct
  source 1..75: mol_type = other DNA
tgctttggtatcaggtcactcatcagccactgtgatctgctggcgttgagttttaatccatttaagaatattggt

SEQ ID NO: 43141 - DNA, 75 bp, synthetic construct
  source 1..75: mol_type = other DNA
gaatggcgggaaattccccgcacggagcctgacccggaaaccaccccggataacagttaccgcaattatctgtaa

SEQ ID NO: 43142 - DNA, 75 bp, synthetic construct
  source 1..75: mol_type = other DNA
ctcttgaatcgtctaaccaggaggccggtggttcatccgttgaaatggccgaagcggagtatatggtccgtgcca

SEQ ID NO: 43143 - DNA, 75 bp, synthetic construct
  source 1..75: mol_type = other DNA
gaaacccttaccgctggcggagcaacgtcagtggcaaagtcagttgccgggtattgcagataattgcccggcaat

SEQ ID NO: 43144 - DNA, 75 bp, synthetic construct
  source 1..75: mol_type = other DNA
cggaggtgatgacagaggtcatgcccgggggcagcgtgttttttctgccgccgcagggaaaaccgggtgttgcgg

SEQ ID NO: 43145 - DNA, 75 bp, synthetic construct
  source 1..75: mol_type = other DNA
ttgaacactaaatttactgaagatatggcgttatggttttgtcttcttgaggagggatatcatttccataattta

SEQ ID NO: 43146 - DNA, 75 bp, synthetic construct
  source 1..75: mol_type = other DNA
agcgcgggcaacagcggcagcaccacccatacggtgaatgtcgaatcgctcctgcctggggtgatcattaatacc

SEQ ID NO: 43147 - DNA, 75 bp, synthetic construct
  source 1..75: mol_type = other DNA
caggcatgtcaggagatggacagcaaggcgacgattgcgccagccaatagcgaatacgctaaacgtctgacaact

SEQ ID NO: 43148 - DNA, 75 bp, synthetic construct
  source 1..75: mol_type = other DNA
tgatgctgactgcaatctgcagagtttgtgctggccgtgtcataaggcgaagacggcccgtgaacggcttaagtg

SEQ ID NO: 43149 - DNA, 75 bp, synthetic construct
  source 1..75: mol_type = other DNA
aaaccgggcaccagcgtggcattctccgggcagttcgagctactggagcgcgccaaccataagctgaaactcatg

SEQ ID NO: 43150 - DNA, 75 bp, synthetic construct
  source 1..75: mol_type = other DNA
gtgtggtgatgacatgctatatgctgcccggcaatatgcagataagtgagcacaaaggacaacgtaaattcgaga

SEQ ID NO: 43151 - DNA, 75 bp, synthetic construct
  source 1..75: mol_type = other DNA
tgaagcgtgacaaaggtttatgtcaattatgtctgcatgctggtgtggtgggtgaggcgaaaaccgttgaccaca

SEQ ID NO: 43152 - DNA, 75 bp, synthetic construct
  source 1..75: mol_type = other DNA
tgatgccgacagcaatctgcagagcctgtgctggccgtgtcataaggcgaagacggcccgtgaacggttgaagta

SEQ ID NO: 43153 - DNA, 75 bp, synthetic construct
  source 1..75: mol_type = other DNA
ctccccggttactggagcttccttgcgttctggccaactgcgagaacaagggagagccggttgccagctatatac

SEQ ID NO: 43154 - DNA, 75 bp, synthetic construct
  source 1..75: mol_type = other DNA
agacttcccggctacaactaaacagcaacctgttttagcgacacacgccacaagcagaagaccaaccgtaaaatc

SEQ ID NO: 43155 - DNA, 75 bp, synthetic construct
  source 1..75: mol_type = other DNA
taatggattcgaaagaatgcattgacgtaattcgtgaagaagtaaagcgatggaatgattcccgtgccgctggca

SEQ ID NO: 43156 - DNA, 75 bp, synthetic construct
  source 1..75: mol_type = other DNA
ctcgctgagcacggttatattgttaaaacggcgcaatctggcggtgccagtttccatatcctttctctttatgat

SEQ ID NO: 43157 - DNA, 75 bp, synthetic construct
  source 1..75: mol_type = other DNA
gcagccagtgggcgcaggccgcctggtcgccggatattgacgtcatcgagcagatgatttttcactacagcttgt

SEQ ID NO: 43158 - DNA, 75 bp, synthetic construct
  source 1..75: mol_type = other DNA
gaagtgctggtgtcggatcgtacggtgaccgggcgcctgaagtcgccggacagccggggcaagacgacgatcgtg

SEQ ID NO: 43159 - DNA, 75 bp, synthetic construct
  source 1..75: mol_type = other DNA
gacgcttttcaactccttaagcaaccatgcggtagggcggctggaagtgatcctcgtcggcattaaaatgatgat

SEQ ID NO: 43160 - DNA, 75 bp, synthetic construct
  source 1..75: mol_type = other DNA
acctggatatcgatatcccgtatgcgacggacccggcaggaaaccggctgccggacccggaactgcacccggaca

SEQ ID NO: 43161 - DNA, 75 bp, synthetic construct
  source 1..75: mol_type = other DNA
ggatgcagacagtaacctgcagagtctgtgctggccctgccataaagcaaaaacagcgcgcgaacgcatcaattg

SEQ ID NO: 43162 - DNA, 75 bp, synthetic construct
  source 1..75: mol_type = other DNA
gacagtgttgataagactgccgaaacggatgaagaacgggaagcacgatatgcagccttgcagcaggagtggcgt

SEQ ID NO: 43163 - DNA, 75 bp, synthetic construct
  source 1..75: mol_type = other DNA
gcctaccgtttaagcgacttacctgcacatgttgtttccatcattacaggtagtgcagaaataaaacaccagccc

SEQ ID NO: 43164 - DNA, 75 bp, synthetic construct
  source 1..75: mol_type = other DNA
caccacagacccgtcaggctactgcgaaagccacaaaagcgaaggctggaagcaatacaagccaggacaatcccg

SEQ ID NO: 43165 - DNA, 75 bp, synthetic construct
  source 1..75: mol_type = other DNA
gccggctggcgtgctttcaccaataactatggtcttgttgatgcactgaaggcggaaaaagtcggtgataaagtg

SEQ ID NO: 43166 - DNA, 75 bp, synthetic construct
  source 1..75: mol_type = other DNA
tatctatcttctgcctcttgctcgtggcaataaccataattacgatggaaaaagcgttgtcgaaattagaaaact

SEQ ID NO: 43167 - DNA, 75 bp, synthetic construct
  source 1..75: mol_type = other DNA
caacccgtccagtagttgcagagttaggcgatgaggcaggatggcatttctatagccagcgaaatacagataact

SEQ ID NO: 43168 - DNA, 75 bp, synthetic construct
  source 1..75: mol_type = other DNA
gcacactctacacacttgatgtgcatcaagaagctgaacttaaagctttggttaataaatccgacgaacatattg

SEQ ID NO: 43169 - DNA, 75 bp, synthetic construct
  source 1..75: mol_type = other DNA
gccaatatctttatgaactgaaaagcgaatttacgcagatgaatcttgagcatatggtgaaacttgatacaccat

SEQ ID NO: 43170 - DNA, 75 bp, synthetic construct
  source 1..75: mol_type = other DNA
gcaaaaaaatggcgataccttgtccggtggacttacttttgaaaacgactcaatccttgcctggattcgaaatac

SEQ ID NO: 43171 - DNA, 75 bp, synthetic construct
  source 1..75: mol_type = other DNA
cgcatggtcatcatcgtcagcagtgtgacctcagtggagctgaccattgacaccacaacggtgatggcgacgcag

SEQ ID NO: 43172 - DNA, 75 bp, synthetic construct
  source 1..75: mol_type = other DNA
ctgtggaactattcatcttgcaggttgcgttattgaggttatgggtaataaaggtgccatgaccatccgtgtaac

SEQ ID NO: 43173 - DNA, 75 bp, synthetic construct
  source 1..75: mol_type = other DNA
cgaaatgttttataacagtaagcgtcggcatggttctagcgaacagatgtcaccgacagaatatgaaaaccagta

SEQ ID NO: 43174 - DNA, 75 bp, synthetic construct
  source 1..75: mol_type = other DNA
atgaatagtctacccgctggatgggcgcggccattgatggctaagaagcatcatttttttaaaacaggtgaaaat

SEQ ID NO: 43175 - DNA, 75 bp, synthetic construct
  source 1..75: mol_type = other DNA
atcagtatatgtggacggtggttatatctggctcataatcgcgagccggatacatttgaaagccctgatgactgt

SEQ ID NO: 43176 - DNA, 75 bp, synthetic construct
  source 1..75: mol_type = other DNA
gcggatgtcggcggtgattacgttgattctcggcgcgttgctgctgcttgctgcatggaagccgcctgaaatgat

SEQ ID NO: 43177 - DNA, 75 bp, synthetic construct
  source 1..75: mol_type = other DNA
atggctaacctacgcaaagaagcgcgcggaagagaatgtcaggtacgtatttacggcgtatgcaatggcaaccct

SEQ ID NO: 43178 - DNA, 75 bp, synthetic construct
  source 1..75: mol_type = other DNA
acagaatacgccctgtgttgaatcactggtaacgtccgtaggtccggataccttcactgcagatgtctctcccgg

SEQ ID NO: 43179 - DNA, 75 bp, synthetic construct
  source 1..75: mol_type = other DNA
acacagggcgaggtctgcctccttccccttcccggcgatgcagcagagcagttgttcccgtcagtgcggttccgt

SEQ ID NO: 43180 - DNA, 75 bp, synthetic construct
  source 1..75: mol_type = other DNA
gcaaaggaggccggtcatgttgtccgtgagatggagcggtggatggtgccgaacaaactccgggaggtggcgtga

SEQ ID NO: 43181 - DNA, 75 bp, synthetic construct
  source 1..75: mol_type = other DNA
acaaaatggcgacggtaatctggatgtttatgctaataacgtccatgttatgcgctttgtctccggtagcattca

SEQ ID NO: 43182 - DNA, 75 bp, synthetic construct
  source 1..75: mol_type = other DNA
cgcagaagaactgcgcggcaaccgttctcagtggctgtatgccgtcgatgtgctgattgaaacacagggcgaggt

SEQ ID NO: 43183 - DNA, 75 bp, synthetic construct
  source 1..75: mol_type = other DNA
atgcaatcccggatgacaaaggacattgtcctgaacgcactgctgatggctgtatggcggcgtaatcccgaaaaa

SEQ ID NO: 43184 - DNA, 75 bp, synthetic construct
  source 1..75: mol_type = other DNA
ggagcgcatccagaaagcggtttcgatgaagatttccaaatggaacagcaggccaatgctgaattcatcgccgca

SEQ ID NO: 43185 - DNA, 75 bp, synthetic construct
  source 1..75: mol_type = other DNA
accagaatgaactgaacgaaatccgccgccagtgggttctggctttccgggaaaacgggatcaccacaatggaac

SEQ ID NO: 43186 - DNA, 75 bp, synthetic construct
  source 1..75: mol_type = other DNA
ccgccacgtccagcgaatgctgaaactggcagaccttgcgcctgtcatcctcgatgcgctggcagaagaccgcat

SEQ ID NO: 43187 - DNA, 75 bp, synthetic construct
  source 1..75: mol_type = other DNA
ctggtgcggatatagcggataatgcaccaggggaaacccgctgcaccctcaggcccggaacatgttttgaagtga

SEQ ID NO: 43188 - DNA, 75 bp, synthetic construct
  source 1..75: mol_type = other DNA
tgggtaaattgtctattgctatgggggactcttccaaagcggaaggagcaaacgccattgccctgggaaatgcca

SEQ ID NO: 43189 - DNA, 75 bp, synthetic construct
  source 1..75: mol_type = other DNA
taagccaatgagtgagaatacgcttaacaaggccttgcgagtgatgggctatgacacgaaaacggaagtgtgtgg

SEQ ID NO: 43190 - DNA, 75 bp, synthetic construct
  source 1..75: mol_type = other DNA
gcgtaccctgccgaagcgcgaggaagagaaaacggttgctgaagcgcgccgctatccgtccgaaccacaagaaaa

SEQ ID NO: 43191 - DNA, 75 bp, synthetic construct
  source 1..75: mol_type = other DNA
atatacaattaaataaggatggcagcctccagagtaagcactacacatttgatgtaggtgaagttataaacagtt

SEQ ID NO: 43192 - DNA, 75 bp, synthetic construct
  source 1..75: mol_type = other DNA
aaatggtcgtcagattgtgcaggcaggaggaactgccagtgatacggttattcgtgatggcggagggcagagcct

SEQ ID NO: 43193 - DNA, 75 bp, synthetic construct
  source 1..75: mol_type = other DNA
aatgttctggaatctgcaagaggatttaaatcttacatgctggttccattataaagacgggcagtggcgggttat

SEQ ID NO: 43194 - DNA, 75 bp, synthetic construct
  source 1..75: mol_type = other DNA
tatgaagtttttggggggcatggtagtcctggtgacttatattatgtttctgcatcaaatacttactttatcctg

SEQ ID NO: 43195 - DNA, 75 bp, synthetic construct
  source 1..75: mol_type = other DNA
ccactggccgacatcgtgctcaacaatacgcaggcgtctttctgtaccgaataccgcgtcgtgaccggaggctcg

SEQ ID NO: 43196 - DNA, 75 bp, synthetic construct
  source 1..75: mol_type = other DNA
gttaattatccctgtattccggggcatgaaattggcggcacggtgctggcaactggcgatatggcaggggcgatc

SEQ ID NO: 43197 - DNA, 75 bp, synthetic construct
  source 1..75: mol_type = other DNA
ccggtcgctgacatcgtactcaatgagacacaggcgtcatattgcactgcttacagcgtaaacatcgggggcaac

SEQ ID NO: 43198 - DNA, 75 bp, synthetic construct
  source 1..75: mol_type = other DNA
cgatgccgcgctttatctttatcccggccccgaaagcgagccggtgctcagtgcggcaaaagcgaagctgcagac

SEQ ID NO: 43199 - DNA, 75 bp, synthetic construct
  source 1..75: mol_type = other DNA
tgtggtcacacgtcacgcagtccgcttgactcgctggaaaccgctatcggctttcacatgcgcgactggtggcag

SEQ ID NO: 43200 - DNA, 75 bp, synthetic construct
  source 1..75: mol_type = other DNA
cgcagctgaaacgggaaattccggcggggtgggcggttaacacgctgtctcaaatagcgaatatcacaatggggc

SEQ ID NO: 43201 - DNA, 75 bp, synthetic construct
  source 1..75: mol_type = other DNA
atgtcagttacagagtctaaggcaaaaaaggggtataaatccagccataaactgtcaaaagcacaggaaaccgtc

SEQ ID NO: 43202 - DNA, 75 bp, synthetic construct
  source 1..75: mol_type = other DNA
ggattctggcaggctcccgcagccatcagaccggtgtaagcggtgaaaataacagcgtccgtctcagcattcagg

SEQ ID NO: 43203 - DNA, 75 bp, synthetic construct
  source 1..75: mol_type = other DNA
atgaattctattaccaaagaacgtattgaattgttcattaaagatccgcttgaaaacgggcttactcgtggcgaa

SEQ ID NO: 43204 - DNA, 75 bp, synthetic construct
  source 1..75: mol_type = other DNA
agattaaagaaatcaaagaacgaatcggcagcctagacgtgcgagacaatgttgagcgccttgcttatgaaattg

SEQ ID NO: 43205 - DNA, 75 bp, synthetic construct
  source 1..75: mol_type = other DNA
ttaccaactttaaccagacctcgaaagaacatttcaatccgaacaatgcctttgacgccgaaggtttaaccaaac

SEQ ID NO: 43206 - DNA, 75 bp, synthetic construct
  source 1..75: mol_type = other DNA
gcgggagtgacaactaaaaactggtccaaaacatttactcgtcactgggttgcaatgaaacacatttttcaccga

SEQ ID NO: 43207 - DNA, 75 bp, synthetic construct
  source 1..75: mol_type = other DNA
atggtaactaatgagcttgttttgcttatcaccaatgcacttatttgtactggcatagcaattcgtgttgtcaca

SEQ ID NO: 43208 - DNA, 75 bp, synthetic construct
  source 1..75: mol_type = other DNA
tgcacaacggcggtacagcgtctgacactgttgtgaacagtgacggctggcagattgtcaaggaaggtggtctgg

SEQ ID NO: 43209 - DNA, 75 bp, synthetic construct
  source 1..75: mol_type = other DNA
atcgcgatggcaagcggtgcgatgcctggcaatgcgctgtttagcgcggcaattagcggctggctgtgggtcacc

SEQ ID NO: 43210 - DNA, 75 bp, synthetic construct
  source 1..75: mol_type = other DNA
tgacgctggatgttaatgaagaacacctcaggcggcttgaggcgatatttgaaaagtatcgcaacggactgatga

SEQ ID NO: 43211 - DNA, 75 bp, synthetic construct
  source 1..75: mol_type = other DNA
tcattcggccaacgcgtagaaaccctgacggacatgcagcaggctgtcaccggatttgcagcgcgcgcagctgaa

SEQ ID NO: 43212 - DNA, 75 bp, synthetic construct
  source 1..75: mol_type = other DNA
ccaaagagcagttgattgagcaggctaagaagaatattgaggttcttcgcgttgcggtggaaagagtcccaggcg

SEQ ID NO: 43213 - DNA, 75 bp, synthetic construct
  source 1..75: mol_type = other DNA
ctgtagcagaaaaatgcggttattcaagctggtcctactttatttctgtatttcaccgctattatggcttcccgc

SEQ ID NO: 43214 - DNA, 75 bp, synthetic construct
  source 1..75: mol_type = other DNA
gggaagatattgcgtatgcaaaagcagggatcatgctggccgatttcagcggaaaggaggcccagctggatttat

SEQ ID NO: 43215 - DNA, 75 bp, synthetic construct
  source 1..75: mol_type = other DNA
gtgcaaaaaaatggcgataccttgtccggtgggcttacttttgaaaatgactcaatccttgcctggattcgaaat

SEQ ID NO: 43216 - DNA, 75 bp, synthetic construct
  source 1..75: mol_type = other DNA
ttcagggctatgactacgaagcggatggtaatggcatcgtactgttaccggagcgcgtgatattcaacaaagaga

SEQ ID NO: 43217 - DNA, 75 bp, synthetic construct
  source 1..75: mol_type = other DNA
aaatctggtattcaattacgtacccgtgatgggtttattataattgtaatgttttggattttgttttctgttatt

SEQ ID NO: 43218 - DNA, 75 bp, synthetic construct
  source 1..75: mol_type = other DNA
gatgctggagccacaactgcagtacacctggcagggactctccctggatgacggccaggataacgccggttatgt

SEQ ID NO: 43219 - DNA, 75 bp, synthetic construct
  source 1..75: mol_type = other DNA
aaagaaggctatcaggagaatggaatcccaaggggaagaaaaaacttagtgaagcaaccgttaatcgcgagcagt

SEQ ID NO: 43220 - DNA, 75 bp, synthetic construct
  source 1..75: mol_type = other DNA
atcctcgcccgagaaacggcacatgtaaaacttcagccgtggcaggatgataagtggagtcgagtattgccgcat

SEQ ID NO: 43221 - DNA, 75 bp, synthetic construct
  source 1..75: mol_type = other DNA
tcagcactctttaattccggtgcttattttgacctgattggtaaatatctccatgatgataatcagtatacggcg

SEQ ID NO: 43222 - DNA, 75 bp, synthetic construct
  source 1..75: mol_type = other DNA
ttacactggcgcttactaccttgccattgcttttaaacgctggggatactcatggcgggctgtaggggcttataa

SEQ ID NO: 43223 - DNA, 75 bp, synthetic construct
  source 1..75: mol_type = other DNA
cataaaggacggtatggatacaggcgaatcacgctggctatccgccgggaaggaagcttactgaaccataaaaag

SEQ ID NO: 43224 - DNA, 75 bp, synthetic construct
  source 1..75: mol_type = other DNA
catgaatgcagattaccaaatcaccaggctgtaagtaaccacagagaactttacctgactgtggggggcgagttg

SEQ ID NO: 43225 - DNA, 75 bp, synthetic construct
  source 1..75: mol_type = other DNA
tacagctatattaaaccaaaaggtgaaatagccggagcacgttggggacacgctggtagcgactcgacgcatatg

SEQ ID NO: 43226 - DNA, 75 bp, synthetic construct
  source 1..75: mol_type = other DNA
gactgtcctgggtaaaggcatggggcgagggtcagcaagaaaaattagatggtgcttataatgttcagaatatca

SEQ ID NO: 43227 - DNA, 75 bp, synthetic construct
  source 1..75: mol_type = other DNA
gggtggcaccatcaatatgcgtgttcgccttgatggcagcaatacctctgaccagctggtgattaatggtggtca

SEQ ID NO: 43228 - DNA, 75 bp, synthetic construct
  source 1..75: mol_type = other DNA
tagtaaaagccaggtctacgttgagttttataaaccatccgaacagttgggtgttcgattcggcgatgggctaat

SEQ ID NO: 43229 - DNA, 75 bp, synthetic construct
  source 1..75: mol_type = other DNA
gagcacattgcggcatttatgcaacgtatggctgaacgtccggaagtacaagacgcgctgtcagcggaaggctta

SEQ ID NO: 43230 - DNA, 75 bp, synthetic construct
  source 1..75: mol_type = other DNA
tggaaaaaggcagttcattcacgctgaacgccggtgatacggccacggataccacggtaaatggcggactgttca

SEQ ID NO: 43231 - DNA, 75 bp, synthetic construct
  source 1..75: mol_type = other DNA
ttgataatcagacaacaccggatgccgcgctgagccgtgctgttgcaaaaagtaactccccggtaacgttccata

SEQ ID NO: 43232 - DNA, 75 bp, synthetic construct
  source 1..75: mol_type = other DNA
ttttcacgcagaaatatttaggcggtggcgtggtggattcgaacgctataaagattctggaactgccgcaggacg

SEQ ID NO: 43233 - DNA, 75 bp, synthetic construct
  source 1..75: mol_type = other DNA
ttcagcccatcaactgatgaagtctggttaccggagcgccatttgttttcggatgcggctaacttctacgctacc

SEQ ID NO: 43234 - DNA, 75 bp, synthetic construct
  source 1..75: mol_type = other DNA
cttaccttgatgagttagctgcgcagcagtggaaagcgaaggcgaagcaactggcggagcgcggggatttgactc

SEQ ID NO: 43235 - DNA, 75 bp, synthetic construct
  source 1..75: mol_type = other DNA
atggtatcacaacactgactctggacgttcataatgaatccggagataaaattggtatcatgacaacattgttta

SEQ ID NO: 43236 - DNA, 75 bp, synthetic construct
  source 1..75: mol_type = other DNA
ctcacagtggcttgatgccgtgattcagcgtgtcgaaatgtacaacgcatcgcttcccgttccgctttcaccgcc

SEQ ID NO: 43237 - DNA, 75 bp, synthetic construct
  source 1..75: mol_type = other DNA
atggcgtgacccgttatcgccctttgttgattcagcagtcaggcacagcaacgacagcaacctgtaaggcccgtt

SEQ ID NO: 43238 - DNA, 75 bp, synthetic construct
  source 1..75: mol_type = other DNA
cggaaagccgtcgcagaccttgcggcgcgcgggttcagcattgttaacagtcagggcggcgagagcagaaacccc

SEQ ID NO: 43239 - DNA, 75 bp, synthetic construct
  source 1..75: mol_type = other DNA
taactatccgcactggtcattcggtaaaaagtttatcgagactgaacggctgtataagcacggtcagcaaggact

SEQ ID NO: 43240 - DNA, 75 bp, synthetic construct
  source 1..75: mol_type = other DNA
gtgcacagctcgccgtgactggtcatgcacttgaaaaggcacggcaggaagccgaagcccttgccacacagttta

SEQ ID NO: 43241 - DNA, 75 bp, synthetic construct
  source 1..75: mol_type = other DNA
tggcgctgctgctcgctgaactctggcagggggatacccgtgatattccccgcccggcggcgtatgacccgcctg

SEQ ID NO: 43242 - DNA, 75 bp, synthetic construct
  source 1..75: mol_type = other DNA
tgatatgcagttcctgttgtgggatgcacagcgccgtgccggtatcagtgatgctgaaattaccgctgctatgga

SEQ ID NO: 43243 - DNA, 75 bp, synthetic construct
  source 1..75: mol_type = other DNA
ttcaggacgccgactatgcgaccgaagtgtccaatatgtcgaaagcgcagatcatccagcaggccggtaactccg

SEQ ID NO: 43244 - DNA, 75 bp, synthetic construct
  source 1..75: mol_type = other DNA
tgatcaggagatctgctcaagagacaggtcaaagatgggggacaacgtctggtgctgtataacagcacaggcctc

SEQ ID NO: 43245 - DNA, 75 bp, synthetic construct
  source 1..75: mol_type = other DNA
tggtttatgccggcggcgaccagacggtacatggccacgcactggataccacgctgaatggcggtaaccagtatg

SEQ ID NO: 43246 - DNA, 75 bp, synthetic construct
  source 1..75: mol_type = other DNA
ggtatcagagccgccggataccgtaattcaggatacggctgatctggtcacggtcgtggcactggtgacgctgca

SEQ ID NO: 43247 - DNA, 75 bp, synthetic construct
  source 1..75: mol_type = other DNA
gaggctgtggcatttgtgctgccgggaacggcgttccgtgtttctgccagtgtggcagccgaaatgacagaacat

SEQ ID NO: 43248 - DNA, 75 bp, synthetic construct
  source 1..75: mol_type = other DNA
actcatccttggtgtttcagggtgtttaattttaccattgtttcgactactttctcgaacgaaagttataacaaa

SEQ ID NO: 43249 - DNA, 75 bp, synthetic construct
  source 1..75: mol_type = other DNA
gtgtggtgtgtggtcgctcgaatatggagaggagagatttgatgctggtgatgcgctaattcatcgtgaagttgt

SEQ ID NO: 43250 - DNA, 75 bp, synthetic construct
  source 1..75: mol_type = other DNA
cgctcattcgccagtgcgtcacgcccggcatgatggcattgcatgaaggccgcacatatcgcgtctcagcagtca

SEQ ID NO: 43251 - DNA, 75 bp, synthetic construct
  source 1..75: mol_type = other DNA
caagcaagaaaattaaagggcttgatttccatttatctattgtaaatagcccccaactatataatgatgatggtc

SEQ ID NO: 43252 - DNA, 75 bp, synthetic construct
  source 1..75: mol_type = other DNA
gttcttacgggttcagaccggggttaaactgtcacatggcattacaggctctgcaacagcagacgttccgcaact

SEQ ID NO: 43253 - DNA, 75 bp, synthetic construct
  source 1..75: mol_type = other DNA
tagtactagcgggaaagtggatgatgttggtacagtgactatgggtctggttgatgccagtgcagtaatgaccat

SEQ ID NO: 43254 - DNA, 75 bp, synthetic construct
  source 1..75: mol_type = other DNA
ggcggggaagccactgcagtcacccagaacacgggcggtgcactggttaccagtactgctgcaactgtcatcggc

SEQ ID NO: 43255 - DNA, 75 bp, synthetic construct
  source 1..75: mol_type = other DNA
tatgaaattacagatggtgtaaaaaaccagtccactgctgcaccaaccgatattgctcagaccattgatctggat

SEQ ID NO: 43256 - DNA, 75 bp, synthetic construct
  source 1..75: mol_type = other DNA
aacctttgcaggttgatggtgcagaaaatactgtaactgttcagaataatggcactggtgctttaccaaatcagg

SEQ ID NO: 43257 - DNA, 75 bp, synthetic construct
  source 1..75: mol_type = other DNA
ggcaggctgcatgcggtggcctctgacgttaacgatccggcaacgacgtgtacctgtgcgctgtacggctttcag

SEQ ID NO: 43258 - DNA, 75 bp, synthetic construct
  source 1..75: mol_type = other DNA
gccgtggctgctcgccattccccatgtggcttttgccaccagcgcccttctgctctttgctgacggagggctgct

SEQ ID NO: 43259 - DNA, 75 bp, synthetic construct
  source 1..75: mol_type = other DNA
tgtttgaccggatagaggagaagcatgatgccatgcagtcgctggtcctgtcgccaccggcacgccaggcgctgg

SEQ ID NO: 43260 - DNA, 75 bp, synthetic construct
  source 1..75: mol_type = other DNA
tatcagccggggagcttcacaccactcatcagagttgaaactgccaccggtgaactggccagaacgcagcgccgc

SEQ ID NO: 43261 - DNA, 75 bp, synthetic construct
  source 1..75: mol_type = other DNA
tggcaagccgctgccggtttatggtaaaggtgaccaaattcgtgactggttgtatgtggaagatcatgcacgagc

SEQ ID NO: 43262 - DNA, 75 bp, synthetic construct
  source 1..75: mol_type = other DNA
agcatcgacacggacattaagctcaatcgcgcattgtggatgatggcagaaacgctgctggagagcatgcgctga

SEQ ID NO: 43263 - DNA, 75 bp, synthetic construct
  source 1..75: mol_type = other DNA
aaccggactgtttgccaaaagcggtgtggcagcggatgccgttaacgttcccggcggctggaataatgacacttt

SEQ ID NO: 43264 - DNA, 75 bp, synthetic construct
  source 1..75: mol_type = other DNA
atgatcactgaccttatattacacaatcatcccaggatgaaaacaatcactttaaacgacaaccatattgcacat

SEQ ID NO: 43265 - DNA, 75 bp, synthetic construct
  source 1..75: mol_type = other DNA
ggaaaatatcaccctgggcgttcaggccggttatgcccacagcgtcagcggcagcagcgctgaaggctataacgg

SEQ ID NO: 43266 - DNA, 75 bp, synthetic construct
  source 1..75: mol_type = other DNA
cgtgaattgccggtgaactggtgggtacagccttctgttatccgcactttcagctcccggggtgacatgagcatg

SEQ ID NO: 43267 - DNA, 75 bp, synthetic construct
  source 1..75: mol_type = other DNA
agcatgatgccggtaatggcgcagacctgctggagaagggcgggcttatcagttgtcgttttaaagttgatggca

SEQ ID NO: 43268 - DNA, 75 bp, synthetic construct
  source 1..75: mol_type = other DNA
gggaaatgtaccatgatgtgacggaaaccttttactgggtggcacttcccctgaccacggtaaacggcgtctcgc

SEQ ID NO: 43269 - DNA, 75 bp, synthetic construct
  source 1..75: mol_type = other DNA
gctttaggcattatcgggtatggtttactgatggctgtcaccggtacactgattgatgaaacgcttgtggaaaaa

SEQ ID NO: 43270 - DNA, 75 bp, synthetic construct
  source 1..75: mol_type = other DNA
cacgccaaaaagaggaatttaagcctattcacgccggggaagtcggcatgtacgtgtgtggaatcaccgtttacg

SEQ ID NO: 43271 - DNA, 75 bp, synthetic construct
  source 1..75: mol_type = other DNA
cataatgccgttgaaaacggtgtctgacagcatttactggttcaatacgcattacagcccaccggaaaaaaatgt

SEQ ID NO: 43272 - DNA, 75 bp, synthetic construct
  source 1..75: mol_type = other DNA
gtgcaaaaggaaaacgtatccacacccgtgccattcacagcatcgacaccgatattaagctcaaccgcgcattgt

SEQ ID NO: 43273 - DNA, 75 bp, synthetic construct
  source 1..75: mol_type = other DNA
acatcagcatggcagcttaccaacaatatcagtggttatggtaatgttcgcaagacgggagcaggtgcactgaac

SEQ ID NO: 43274 - DNA, 75 bp, synthetic construct
  source 1..75: mol_type = other DNA
actacgaaagcgtcagaagctgccacctcagcccgggatgcggcggcctcaaaagaggcagcgaaatcatcagaa

SEQ ID NO: 43275 - DNA, 75 bp, synthetic construct
  source 1..75: mol_type = other DNA
cacagattctttccaccccaatgcagcagcctcagccgcgcagatacagcaacaaacgaactgacagcagtaaga

SEQ ID NO: 43276 - DNA, 75 bp, synthetic construct
  source 1..75: mol_type = other DNA
tggcacgtcactggacctgcaggccggactggaagcccgtgtccgggaaaatatcaccctgggcgttcaggccgg

SEQ ID NO: 43277 - DNA, 75 bp, synthetic construct
  source 1..75: mol_type = other DNA
gttctgcaaaaccacaggaaaaggagtatacccttgccgatggagatggcatgtttttgctcattcaccctaacg

SEQ ID NO: 43278 - DNA, 75 bp, synthetic construct
  source 1..75: mol_type = other DNA
ggttacggtatcgctgaaaacgaacagatgccggatatcgccgctgatgcgaaagccattgcatttggtaacttc

SEQ ID NO: 43279 - DNA, 75 bp, synthetic construct
  source 1..75: mol_type = other DNA
gatgcgtcttggtcgcctgcagaagcatctgtttgtggaaggaaaacgcacgggagataaagagtatgcagaggt

SEQ ID NO: 43280 - DNA, 75 bp, synthetic construct
  source 1..75: mol_type = other DNA
attgcgctgggtgcctatcctgccgtctccctctctgatgcgcgacagcagcgtgaaggtgtccgtaaaatgctg

SEQ ID NO: 43281 - DNA, 75 bp, synthetic construct
  source 1..75: mol_type = other DNA
gcagtgcaaagcgggttaattgattacaatccggcgcaagagatggcgggggcggttgcttccagtaatcgacag

SEQ ID NO: 43282 - DNA, 75 bp, synthetic construct
  source 1..75: mol_type = other DNA
ccgccagtggcttgcgcagtgcgggctgacggtggagcggctggcggcacagatagagccggtttatttgcctga

SEQ ID NO: 43283 - DNA, 75 bp, synthetic construct
  source 1..75: mol_type = other DNA
ggagagggccgatttgatggtgatgatgcgctaattcatcgcgaggctgctggatatattcccatttgcagaatt

SEQ ID NO: 43284 - DNA, 75 bp, synthetic construct
  source 1..75: mol_type = other DNA
aagcagaaacgcaaaatacagcgactgcattcccgtatcgcaaatatccgcagggactaccttcacaaagtcaca

SEQ ID NO: 43285 - DNA, 75 bp, synthetic construct
  source 1..75: mol_type = other DNA
agtgatgcgtgatttccgcttcttcaccgtgctggatgatgatcggcataattatctggagatttccgctattca

SEQ ID NO: 43286 - DNA, 75 bp, synthetic construct
  source 1..75: mol_type = other DNA
ctcagcgagctggaaaatctcaaaagcgatcttgaaaaagagctgcttgagctgaaacgtccggcaggtggtgcg

SEQ ID NO: 43287 - DNA, 75 bp, synthetic construct
  source 1..75: mol_type = other DNA
gcggatattgcccgcagaaaaaaacgacgtttttccgtgttgtttatcgactgggaagcgcagtatttatgtact

SEQ ID NO: 43288 - DNA, 75 bp, synthetic construct
  source 1..75: mol_type = other DNA
ttttcattgctgataaatggctcaaatcaacacgtgaaaatttccctacgatgaaatactgggacgaggatcctg

SEQ ID NO: 43289 - DNA, 75 bp, synthetic construct
  source 1..75: mol_type = other DNA
gacgaaagaggctattacctttgagtcagttgccagagagtggcacgcagtaaataaaaaatggacagaagaaca

SEQ ID NO: 43290 - DNA, 75 bp, synthetic construct
  source 1..75: mol_type = other DNA
cgggagttggtggagacgcgggaacgactggtgagagacgctgatgattttgtcgcagtggcaatcgccggtttc

SEQ ID NO: 43291 - DNA, 75 bp, synthetic construct
  source 1..75: mol_type = other DNA
tgaagcagcacttattgatgcctaccctgggttaacgaatatcatgaatggtgctggcagcaatgaattcggcgc

SEQ ID NO: 43292 - DNA, 75 bp, synthetic construct
  source 1..75: mol_type = other DNA
aacgtggtggttgaggatttcagcggcgaccagaatctgttgatggccccggttttgctgtggctgcgggataac

SEQ ID NO: 43293 - DNA, 75 bp, synthetic construct
  source 1..75: mol_type = other DNA
caactaattgctagaacagacggcaagtatgggtttggtttctctgaggctgctgatggaggatcatggttcgtt

SEQ ID NO: 43294 - DNA, 75 bp, synthetic construct
  source 1..75: mol_type = other DNA
cactgacggcagtgtgtcgagcgttgaagctatagcggaacctgatgaacctgaagaaatgtggacggtgaaacg

SEQ ID NO: 43295 - DNA, 75 bp, synthetic construct
  source 1..75: mol_type = other DNA
aagaatatcccggaacctccgccgccggagccggtcacccgcccgatggagctgtatatcaatggcgaactggtg

SEQ ID NO: 43296 - DNA, 75 bp, synthetic construct
  source 1..75: mol_type = other DNA
atgctcaaacccgacagcctgcgcagggcgctgactgatgccgtcacggtgctgaaaaccagtccagagatgctg

SEQ ID NO: 43297 - DNA, 75 bp, synthetic construct
  source 1..75: mol_type = other DNA
tcaaatccgtggattaacatttacgtcattaaccgatttatgtgagccacatccattttggctgtctaatttttc

SEQ ID NO: 43298 - DNA, 75 bp, synthetic construct
  source 1..75: mol_type = other DNA
cgtcattgttgataccgtctggcactccagtcattctcatcgcacgggtaaaaatggttcgtggtatcccgtcgt

SEQ ID NO: 43299 - DNA, 75 bp, synthetic construct
  source 1..75: mol_type = other DNA
ttaacgattttatgaagcacttttcgccagatatcgcgctggcattgttggatgaacgggaaagaaaccagcaat

SEQ ID NO: 43300 - DNA, 75 bp, synthetic construct
  source 1..75: mol_type = other DNA
tgttcctgctactgctactgctactgctactgctactgctactgctactgctactgctactgttcttcttttttc

SEQ ID NO: 43301 - DNA, 75 bp, synthetic construct
  source 1..75: mol_type = other DNA
agattttgggtttatagtctgttccccgtcatcagatttttacaataagcgctgcacaataacgttgacgcctcg

SEQ ID NO: 43302 - DNA, 75 bp, synthetic construct
  source 1..75: mol_type = other DNA
acaaaaggccgcgttactttccgaagctgaatcagttatccagccgctggaacgcgccgtcaggctgaatatggc

SEQ ID NO: 43303 - DNA, 75 bp, synthetic construct
  source 1..75: mol_type = other DNA
cgaatttgccgaacaggaagaaattgcctttacctccggcgatggcaccaagaagccgaaagggttcctggcgta

SEQ ID NO: 43304 - DNA, 75 bp, synthetic construct
  source 1..75: mol_type = other DNA
taaggttatgagtgaaaacaccgtaaacaatgcattgcgtgccatgggttatgatacgaaaactgaggtctgtgg

SEQ ID NO: 43305 - DNA, 75 bp, synthetic construct
  source 1..75: mol_type = other DNA
gccgctatggtctgattcagagcgaaaaacgcgggcagtggagcatgaagcagttcgatcagtcttatgccgaac

SEQ ID NO: 43306 - DNA, 75 bp, synthetic construct
  source 1..75: mol_type = other DNA
ctggcgtcatagcagactggccggtcaaccgggtcagcgaactgcttccgtggcgcatagcactgccagctgaat

SEQ ID NO: 43307 - DNA, 75 bp, synthetic construct
  source 1..75: mol_type = other DNA
aacattctgtggtgagtgacattaccggtaattatgtggagatcaggagtattaataacatatccgatcccgtgc

SEQ ID NO: 43308 - DNA, 75 bp, synthetic construct
  source 1..75: mol_type = other DNA
aaatccaggacgttgatgaccggtattgatgaactggacgcaaaaacaggcggcatggagcccggcgacctggta

SEQ ID NO: 43309 - DNA, 75 bp, synthetic construct
  source 1..75: mol_type = other DNA
cgatgatggcagaaaaagcccgtcttgcggccctgttaccggagggatggtcacgggacatgacgacgttcctgt

SEQ ID NO: 43310 - DNA, 75 bp, synthetic construct
  source 1..75: mol_type = other DNA
ctggttatacgcaactatggctaagccgcggaacaggtgcttacacctacgactggacgccagaaacacgctacg

SEQ ID NO: 43311 - DNA, 75 bp, synthetic construct
  source 1..75: mol_type = other DNA
ccaggctgggttaaaacgtgagcacgctgcaaccgtggctgaagtattggtttacgccgatgccagagggatcca

SEQ ID NO: 43312 - DNA, 75 bp, synthetic construct
  source 1..75: mol_type = other DNA
cagaacagcaaaaacagctggccgatcctgctttccgcgctcgtgcgcaaggtttagcggcggtggactctggta

SEQ ID NO: 43313 - DNA, 75 bp, synthetic construct
  source 1..75: mol_type = other DNA
gtaatctgaacagccttgatacccggatggtaccgcaggccagtgcatgggcgataaaccgtgtggcacagaaag

SEQ ID NO: 43314 - DNA, 75 bp, synthetic construct
  source 1..75: mol_type = other DNA
gtacgctgcgcctgctcgaggcgatccgcttcctcggtctggaaaagaaaacccgtttttatcaggcttccacct

SEQ ID NO: 43315 - DNA, 75 bp, synthetic construct
  source 1..75: mol_type = other DNA
tatgacaacaataataatttcataacctgtaaggatgcgtcggtcacgctgaaagacaggctgaatctcgataca

SEQ ID NO: 43316 - DNA, 75 bp, synthetic construct
  source 1..75: mol_type = other DNA
tttcctgctggctggaagaggcacttcttcgggggattattcgtccgccacgggcacggtttgatttttatcagg

SEQ ID NO: 43317 - DNA, 75 bp, synthetic construct
  source 1..75: mol_type = other DNA
aaagctgtgtgagtggaaaagggtacggattctggaagctgaatgctgtgcagatcatatccatatgcttgtgga

SEQ ID NO: 43318 - DNA, 75 bp, synthetic construct
  source 1..75: mol_type = other DNA
cacgactgaaaccatctgggcgggttataccaccgtcagggtactttccacggccggcagcaactccgtttttgg

SEQ ID NO: 43319 - DNA, 75 bp, synthetic construct
  source 1..75: mol_type = other DNA
acctgcacaggcattcgtcacctatcaggacattgtgagcgccgccaccaatccggatgacctgtcgcgccaggc

SEQ ID NO: 43320 - DNA, 75 bp, synthetic construct
  source 1..75: mol_type = other DNA
gtgacaataaatgcactgaaagagggtatcaccagtaatgcggcccgtaacggtgatacggccagcctggtgagt

SEQ ID NO: 43321 - DNA, 75 bp, synthetic construct
  source 1..75: mol_type = other DNA
aagcgtcattgataacgagatgccgaaacagctggggtatgccctgaaacaacaactgaggtcatatctgaacct

SEQ ID NO: 43322 - DNA, 75 bp, synthetic construct
  source 1..75: mol_type = other DNA
ctctccgttcggcagaaggaagcatcaacgggcaacagattcaggtattctgtacttctttttaccgacaggtgc

SEQ ID NO: 43323 - DNA, 75 bp, synthetic construct
  source 1..75: mol_type = other DNA
ttgctgaccatcagggacatcaggccattattgagcaaagaacgcaggacagtaatatccgtaatgatgtaaaac

SEQ ID NO: 43324 - DNA, 75 bp, synthetic construct
  source 1..75: mol_type = other DNA
tccccggagtttaaacagttctttagccaatacagcattgctgtgggctcaaccggaaatctggggttatcaatc

SEQ ID NO: 43325 - DNA, 75 bp, synthetic construct
  source 1..75: mol_type = other DNA
atgaaggggcttgagaatgccatccgtaatctgaacagccttgatacccgtatggtgccacaggccagcgcatgg

SEQ ID NO: 43326 - DNA, 75 bp, synthetic construct
  source 1..75: mol_type = other DNA
ttactacacccgcaaaatgagtcagggaaaacgacacaatcaggcgcttatcgccctggcgagacgacgctgcga

SEQ ID NO: 43327 - DNA, 75 bp, synthetic construct
  source 1..75: mol_type = other DNA
gtattacgctggttgcgggaacaacatggaggagcaacaattcgatgcctgttgctgctcagccagacgagtatt

SEQ ID NO: 43328 - DNA, 75 bp, synthetic construct
  source 1..75: mol_type = other DNA
caaatgggtgcaggccgatagccagcaaatcaacgattttcgcaccgtgatgaccggtgaattacatcatttact

SEQ ID NO: 43329 - DNA, 75 bp, synthetic construct
  source 1..75: mol_type = other DNA
tggcgcggctctggttaatgtgcaggcggactcccttacggggttattcagcatcgctggatttttgctgattta

SEQ ID NO: 43330 - DNA, 75 bp, synthetic construct
  source 1..75: mol_type = other DNA
gatactgggggtcgatgattgtcagcgtgggtattttgtccgctttggcgtcagcaaggccaactatggcgcacc

SEQ ID NO: 43331 - DNA, 75 bp, synthetic construct
  source 1..75: mol_type = other DNA
tggggtaggcatcagaggtggatttaaggggagcctggatgcaacggatgatgactcacattcagcaagtagtgg

SEQ ID NO: 43332 - DNA, 75 bp, synthetic construct
  source 1..75: mol_type = other DNA
gcagaacggaacggctgtggccagtatcgccatgcgggccagaaacagaatttatgtcagaggctatgatgagtt

SEQ ID NO: 43333 - DNA, 75 bp, synthetic construct
  source 1..75: mol_type = other DNA
tcacggaattgccgccacccattgattatgttctgcctaatatggttgctggcactgttggtgctcttgtgtcgc

SEQ ID NO: 43334 - DNA, 75 bp, synthetic construct
  source 1..75: mol_type = other DNA
tgccctgcatggtttcagcagcagtattgccagtgcctggaacacactcagtcagtttggctctaaccgggggag

SEQ ID NO: 43335 - DNA, 75 bp, synthetic construct
  source 1..75: mol_type = other DNA
cgctaccgctggcgagtaaatttaaagctgaagcgcgggcaatggctgacagatgtctatcaacctacgaagcta

SEQ ID NO: 43336 - DNA, 75 bp, synthetic construct
  source 1..75: mol_type = other DNA
aataaccatgtcatcgatcaagcatatgtagaacctattaggaaggagttaggggtatatcgagattatatccag

SEQ ID NO: 43337 - DNA, 75 bp, synthetic construct
  source 1..75: mol_type = other DNA
gcgagttacgcccggaacccgcggatgagattgccgaagtgttgcttaataacacgtatgcggtgtttaacgttc

SEQ ID NO: 43338 - DNA, 75 bp, synthetic construct
  source 1..75: mol_type = other DNA
gcaacagggggatatctttgttcagaaggccccggcaagtactattgaagacttagctcaggcaatcaaaggttt

SEQ ID NO: 43339 - DNA, 75 bp, synthetic construct
  source 1..75: mol_type = other DNA
ggccaaacttccaaggtaatgcggttatcaactatacagaacgcgatattccgtttacgcgtataattgaacata

SEQ ID NO: 43340 - DNA, 75 bp, synthetic construct
  source 1..75: mol_type = other DNA
tatcgggtctggttgcgggggctctgatggccgtctctgtcagcacgctcgcggctgaacaaaaaacactccaca

SEQ ID NO: 43341 - DNA, 75 bp, synthetic construct
  source 1..75: mol_type = other DNA
aggctggatttgataacttcaccaataatgactggttagcttgtcttctgcgttgggccgatatgcagccctacg

SEQ ID NO: 43342 - DNA, 75 bp, synthetic construct
  source 1..75: mol_type = other DNA
atgaaaatttcccgcctcggagaagcacctgattatcgcttctcgctggctaatgagcgtacttttctggcgtgg

SEQ ID NO: 43343 - DNA, 75 bp, synthetic construct
  source 1..75: mol_type = other DNA
gtcggaatatatatcgacgcatccattctgttatgggaaaaattcaatacattggctttctaaaagctgtccacc

SEQ ID NO: 43344 - DNA, 75 bp, synthetic construct
  source 1..75: mol_type = other DNA
tggtatgttggaaaaacatagcgatgtgtctcttgatcagctacagcaggcgctggaaaggcgtccggcgaaggt

SEQ ID NO: 43345 - DNA, 75 bp, synthetic construct
  source 1..75: mol_type = other DNA
cctgtaaggacgcgtcggtttcgctgaaagacaagctgaatctggacacacagagtggcggaaaaacctggcatt

SEQ ID NO: 43346 - DNA, 75 bp, synthetic construct
  source 1..75: mol_type = other DNA
atgacagatataaaacaactggtcactgctgaggcagtgaaggaagtcattcgctctgaagaagtcagaagcgtc

SEQ ID NO: 43347 - DNA, 75 bp, synthetic construct
  source 1..75: mol_type = other DNA
agatgtcaccacggaaaatggtgatattcagccggagccaccggtgacggatatgacagacacacagccagaatc

SEQ ID NO: 43348 - DNA, 75 bp, synthetic construct
  source 1..75: mol_type = other DNA
ccacttttcgcctggcagcgcgtcaccgattttctgaccatcgatcgcggcggcagtgacaactgtgatgttgaa

SEQ ID NO: 43349 - DNA, 75 bp, synthetic construct
  source 1..75: mol_type = other DNA
gtggggcgataccattcgtaacccgaagctgctcgataaaaatggcgacctgatgctgtttgatatcgtgaccgc

SEQ ID NO: 43350 - DNA, 75 bp, synthetic construct
  source 1..75: mol_type = other DNA
tactcgccgtgctggattacggtggctttactgaagccagcaagcgattgttcatgacgcagtcggcggtaagtc

SEQ ID NO: 43351 - DNA, 75 bp, synthetic construct
  source 1..75: mol_type = other DNA
agcaaagcgcgatgaagctaaaaagctgttagcgcagggcattgatccaaaagccgaacagaaagaagctcaggc

SEQ ID NO: 43352 - DNA, 75 bp, synthetic construct
  source 1..75: mol_type = other DNA
caccgcatccgccagttccagttcttcggtatcccgccccgccaggtatggcgcgaactccgccgccttgccggg

SEQ ID NO: 43353 - DNA, 75 bp, synthetic construct
  source 1..75: mol_type = other DNA
gcagaacttcgcgccctgccctcgtttcttggcaacgcgctcattcgtgatctgacgcgtttaaaccgcaaacag

SEQ ID NO: 43354 - DNA, 75 bp, synthetic construct
  source 1..75: mol_type = other DNA
atggcaacaaccgcgccatccgtctgccccgtgatctggattttgagggggtgagcgagcttgagatcgtccgcg

SEQ ID NO: 43355 - DNA, 75 bp, synthetic construct
  source 1..75: mol_type = other DNA
cccggccaaagttgatcgaatttttggcgacatgccccgctacaaccatcgcaatggaagcctgtggcggttctc

SEQ ID NO: 43356 - DNA, 75 bp, synthetic construct
  source 1..75: mol_type = other DNA
ttatggccttcatgttgacgacgccagctgcgtttgctgcccctgaagcaacaaacgggaccgaggcaacgacgg

SEQ ID NO: 43357 - DNA, 75 bp, synthetic construct
  source 1..75: mol_type = other DNA
tatccgtaatgcacagatcgtgaaagcggttttcggggcacaggggatgaatgttgcactgaaggacgccatgct

SEQ ID NO: 43358 - DNA, 75 bp, synthetic construct
  source 1..75: mol_type = other DNA
atacaaaatggccgatggcggcggtttgtatctcgaggtttcggccaagggttctaaatactggcgcatgaaata

SEQ ID NO: 43359 - DNA, 75 bp, synthetic construct
  source 1..75: mol_type = other DNA
gaaaaccactgccggcccagatgagctggcagtgctgaaccgctgcctggcgctaattaaggccgaagccagtgc

SEQ ID NO: 43360 - DNA, 75 bp, synthetic construct
  source 1..75: mol_type = other DNA
ctgttgagcctttttgtggagtgggttaaattatttacggataaagtcaccagaggtggaaaaatgaaaaaatgg

SEQ ID NO: 43361 - DNA, 75 bp, synthetic construct
  source 1..75: mol_type = other DNA
catagtttttgcgccaaaataccgaagacaagtgttctacagagagaaacgtagagcaataggcagtattttgag

SEQ ID NO: 43362 - DNA, 75 bp, synthetic construct
  source 1..75: mol_type = other DNA
ctgcttgatccgcaaccgggtgataccatctgcgatccggcctgcggctctggttcgttattgatgaagtgcgga

SEQ ID NO: 43363 - DNA, 75 bp, synthetic construct
  source 1..75: mol_type = other DNA
gacgtttactatgatggttatgtaggctggaacaactatgccgctgatagttattacaacggcgatatctacccg

SEQ ID NO: 43364 - DNA, 75 bp, synthetic construct
  source 1..75: mol_type = other DNA
tgtgtgtttataaaaatgataaagaacaagatataaagttagcaatagagagtatcataaatcaaagtataaaaa

SEQ ID NO: 43365 - DNA, 75 bp, synthetic construct
  source 1..75: mol_type = other DNA
gccgactgagtacccttcttgaggacaatagtttgcctctatacctcagccagttattgctgaaattacaacagc

SEQ ID NO: 43366 - DNA, 75 bp, synthetic construct
  source 1..75: mol_type = other DNA
tcggcgtggttatcgttatcttactgttgctgggatcggtggcgtttctggtgggcaccaccagcggcctgcatc

SEQ ID NO: 43367 - DNA, 75 bp, synthetic construct
  source 1..75: mol_type = other DNA
atgatattagtagtgatttagtccgtcgaaaaatgaatgatcttcctgaaagccccatagttaataacctcgaag

SEQ ID NO: 43368 - DNA, 75 bp, synthetic construct
  source 1..75: mol_type = other DNA
aatagcgcattgcgtgcgatgggatatgacacaaaaaccgaagtctgcgggcatgggtttaggacgatggcacgt

SEQ ID NO: 43369 - DNA, 75 bp, synthetic construct
  source 1..75: mol_type = other DNA
cttattcaacttggtcttgataaagaaaaacgcgaaataactgagtctgttatcgcgatttatcagaacgaatta

SEQ ID NO: 43370 - DNA, 75 bp, synthetic construct
  source 1..75: mol_type = other DNA
tgctttcaattgatgcaaataatgtgcggcagcgtgtgtttcagaccgggtgcagcactttcgaagcaatccaat

SEQ ID NO: 43371 - DNA, 75 bp, synthetic construct
  source 1..75: mol_type = other DNA
cctacagatgatgaatcgcttctgaatatgagggttagtaaattaattaagaaaacgttgagtcaacccgagggc

SEQ ID NO: 43372 - DNA, 75 bp, synthetic construct
  source 1..75: mol_type = other DNA
ggtgcgttgggggagtcggggttatggagtgatgacgcgatagagaggcaactgagccactcagagcgtaataat

SEQ ID NO: 43373 - DNA, 75 bp, synthetic construct
  source 1..75: mol_type = other DNA
cgggcgataacttctgcgcgtattcaacaggcgcttaccctgaacgacaatcttacgctgccgggcaatattggc

SEQ ID NO: 43374 - DNA, 75 bp, synthetic construct
  source 1..75: mol_type = other DNA
atggcctatgcgcaccttgcgcctgactacctgcaaaatgccgtcgcactgaatcctctaaaaggcggagtgacg

SEQ ID NO: 43375 - DNA, 75 bp, synthetic construct
  source 1..75: mol_type = other DNA
gatcgcgcagaactggggaatgatatttctccgcgcttcaagtgcgaaaaaatcgacccggcaaaaggcacaccg

SEQ ID NO: 43376 - DNA, 75 bp, synthetic construct
  source 1..75: mol_type = other DNA
gcatcgcgtccgtctatgcgttttgtacagcccagaactgaatctcagcaggcaatgcgtgcgctgcatcgtgtc

SEQ ID NO: 43377 - DNA, 75 bp, synthetic construct
  source 1..75: mol_type = other DNA
taacttcgttcgccgtggactgcgcacacgcctgaaacgcatcgaacaggtgaatgaatgcttcgccacgacagc

SEQ ID NO: 43378 - DNA, 75 bp, synthetic construct
  source 1..75: mol_type = other DNA
cagtggcgctgcgcacgaagctgaaactgttctaccgaccgaaggcactgcttgaaggccgcaagggggcagagg

SEQ ID NO: 43379 - DNA, 75 bp, synthetic construct
  source 1..75: mol_type = other DNA
ctggactctgttcgaactattaaatttacgaattatatcgcaacggtgttaagtggttcaggcagcacgacagac

SEQ ID NO: 43380 - DNA, 75 bp, synthetic construct
  source 1..75: mol_type = other DNA
gaaaccgaatggtcagcagacactgcgtatcatcatggcctcggaccatctgccgaaggataaagagtcggtgta

SEQ ID NO: 43381 - DNA, 75 bp, synthetic construct
  source 1..75: mol_type = other DNA
tacagttctgcacccgctgtatttggggtgcttacttacatcatcaatgacgccaggaatgcagagtttgatgat

SEQ ID NO: 43382 - DNA, 75 bp, synthetic construct
  source 1..75: mol_type = other DNA
tggccacgccggaagcgctgaaccagagctggtctgtcgattttatgcatgatgccctggtctgtggccgtcgtt

SEQ ID NO: 43383 - DNA, 75 bp, synthetic construct
  source 1..75: mol_type = other DNA
atgtgaacggcgttccgcttcgggagagtctcagctacaacgggggcggtgcaggatttggcgggcaaatggcag

SEQ ID NO: 43384 - DNA, 75 bp, synthetic construct
  source 1..75: mol_type = other DNA
tcctgcatccgatgggaaatctttgcacgctggattccgtaagcgtcccggaactgtcgctacgcctgactggta

SEQ ID NO: 43385 - DNA, 75 bp, synthetic construct
  source 1..75: mol_type = other DNA
caagcatagtcgcaggtatttgctttggtgttcttatggctgcgtatcattggtggcgaaaggtagttaacaatc

SEQ ID NO: 43386 - DNA, 75 bp, synthetic construct
  source 1..75: mol_type = other DNA
aggtgcaaagttctggctgaatgtactgacggaactgaaaaatcgcggcctgaacgatatccttatcgcctgcgt

SEQ ID NO: 43387 - DNA, 75 bp, synthetic construct
  source 1..75: mol_type = other DNA
gggagtgtcattaacaaagcggtgttcctcgcgctgggcatcaataccgacggtcagaaagagctgctgggtatg

SEQ ID NO: 43388 - DNA, 75 bp, synthetic construct
  source 1..75: mol_type = other DNA
cagcgtaatccggcatgccatcaaaaaacgcaaggtgttcccgacggatgactcagtgaaaaaggtcgtgtggct

SEQ ID NO: 43389 - DNA, 75 bp, synthetic construct
  source 1..75: mol_type = other DNA
atgggctggacgccggaacggattcaggaggcaaccggactttccggtgaagaactgaaaaagctgtttcctgat

SEQ ID NO: 43390 - DNA, 75 bp, synthetic construct
  source 1..75: mol_type = other DNA
gtatcgatctcggcactaccaatagtttaattgccgtctggaaagacggtgccgcgcaattaattccaaataagt

SEQ ID NO: 43391 - DNA, 75 bp, synthetic construct
  source 1..75: mol_type = other DNA
tcaaggggggaacctggtttttcacggtaaatttacagaatcgtcgaaaccaacttttgaccacccagtttcaga

SEQ ID NO: 43392 - DNA, 75 bp, synthetic construct
  source 1..75: mol_type = other DNA
ccgcaagaagaacttcccgtttcttcctgcagaccagatccctgcattcaacaaagcactggcaacattttcagg

SEQ ID NO: 43393 - DNA, 75 bp, synthetic construct
  source 1..75: mol_type = other DNA
atctcccggaattaatttgaaggagccaagactgacgatatcggtgatgattcagcctgatgtttaccacaaagg

SEQ ID NO: 43394 - DNA, 75 bp, synthetic construct
  source 1..75: mol_type = other DNA
gaatcgaagctggggggattggggcctttaagacattgccgggaatatgctgctaaaaatgcagagtatatggca

SEQ ID NO: 43395 - DNA, 75 bp, synthetic construct
  source 1..75: mol_type = other DNA
aagctattgcattgagaaggggatcccctgtatgaaaaaaaatgacattttacagcgtggtccgaaccgtttccg

SEQ ID NO: 43396 - DNA, 75 bp, synthetic construct
  source 1..75: mol_type = other DNA
atgcctgacatcctcaaacctgctgtccggtacatcgacacggcggataagttcgcactactgaacatcaaccat

SEQ ID NO: 43397 - DNA, 75 bp, synthetic construct
  source 1..75: mol_type = other DNA
agcaccttttcctacgcaatatcaatgtgatgcaggaagcagcaatcggacccgcgctgaagctgaacttcgacc

SEQ ID NO: 43398 - DNA, 75 bp, synthetic construct
  source 1..75: mol_type = other DNA
cgttgagcgttgtaggcctgctgatcactatcgttaacttcgccttctgccaacgctgggttaaacagtacggtt

SEQ ID NO: 43399 - DNA, 75 bp, synthetic construct
  source 1..75: mol_type = other DNA
ccatcagtaccgggctggagtatgggccggataacgaggccaataccggcgggcaatgggtacaggatggcggca

SEQ ID NO: 43400 - DNA, 75 bp, synthetic construct
  source 1..75: mol_type = other DNA
cggtggaaaacggtaaggctgacggcgttgttctggagtccggcggtcgcctggatgtactggagggccattcag

SEQ ID NO: 43401 - DNA, 75 bp, synthetic construct
  source 1..75: mol_type = other DNA
ataacataagtaaagctatggccgaacaattgtttgatgctgtaggtgaccaaaattctggagttttgaaatggg

SEQ ID NO: 43402 - DNA, 75 bp, synthetic construct
  source 1..75: mol_type = other DNA
gtaatgcgatggaagcggcgaactacacgtttgagcacaatgggcgtaaatgggactacggcaaacagacacagg

SEQ ID NO: 43403 - DNA, 75 bp, synthetic construct
  source 1..75: mol_type = other DNA
gtactggagagccattcagcacagaataccctggtggatgacggcggtaccctggcagtgtctgccggcggtaag

SEQ ID NO: 43404 - DNA, 75 bp, synthetic construct
  source 1..75: mol_type = other DNA
tgcgaggtggaacctcgaggggcgcgttcctgttagcggaacatttacccgaagatcaaacgcagcgcgataaaa

SEQ ID NO: 43405 - DNA, 75 bp, synthetic construct
  source 1..75: mol_type = other DNA
gtacggaaggctatggtgtggattttcctgaagggaactactcgcggctggcagagctggcccggtgcatcagag

SEQ ID NO: 43406 - DNA, 75 bp, synthetic construct
  source 1..75: mol_type = other DNA
aggccgccatgtgcgaacgactgcacgaactggcggaagaactcggtaacagcatacagacacactttgaagcgc

SEQ ID NO: 43407 - DNA, 75 bp, synthetic construct
  source 1..75: mol_type = other DNA
gcatgtacgccagctgtgagcaggcatttaggccagatctggcaaaccgagcagtggccgttttatccaacaatg

SEQ ID NO: 43408 - DNA, 75 bp, synthetic construct
  source 1..75: mol_type = other DNA
tttgatgtggagccggggtggtaccgggtgacgctgaacacggaagggtacgccccgtcgtatgtgggtgacatt

SEQ ID NO: 43409 - DNA, 75 bp, synthetic construct
  source 1..75: mol_type = other DNA
ggattatttatcagttgatatgctgtgccatgatacgtcctaaaaaaaacaggacaggatgtgcaattgtaatac

SEQ ID NO: 43410 - DNA, 75 bp, synthetic construct
  source 1..75: mol_type = other DNA
ttcggagtaagaagtccaggactcaaacgctgactaatagtgtattggccagggctgagattcttaatattataa

SEQ ID NO: 43411 - DNA, 75 bp, synthetic construct
  source 1..75: mol_type = other DNA
cttacgccagggatttcataaccagataatcggtgccaacatcaccaattgtaagttcagcgacttacagggcga

SEQ ID NO: 43412 - DNA, 75 bp, synthetic construct
  source 1..75: mol_type = other DNA
ataacgccacggtgcagtcggtggtggatgacctcagccatgccggacagattcatttcacctccacccgcacag

SEQ ID NO: 43413 - DNA, 75 bp, synthetic construct
  source 1..75: mol_type = other DNA
cttacggaatcacaagccgatcacttttcgagcgccttattagttcccaggttatctttcattaaagaatttcca

SEQ ID NO: 43414 - DNA, 75 bp, synthetic construct
  source 1..75: mol_type = other DNA
gcgaatatcacgggatcggattgtcggcagttgatccatgttgaaaatggtaaacattttgttattcgtaatatc

SEQ ID NO: 43415 - DNA, 75 bp, synthetic construct
  source 1..75: mol_type = other DNA
attcgtatctccagtaacaggggggttgtattgtattttattgtgccggttcaggtgtgcgtttcccggcgcgtc

SEQ ID NO: 43416 - DNA, 75 bp, synthetic construct
  source 1..75: mol_type = other DNA
ccttcagcccaaacaaaccccgtcactatgaacgctatcagcaaagaatgaaagagaggagaaaagaatggggga

SEQ ID NO: 43417 - DNA, 75 bp, synthetic construct
  source 1..75: mol_type = other DNA
caggaccggtggggccgcaaggagagcgggggattcaggggcctgctggtccacgaggtgaaaccggggccagag

SEQ ID NO: 43418 - DNA, 75 bp, synthetic construct
  source 1..75: mol_type = other DNA
gcagatgctggaggcactgaacgtcggtagtatcgatctgggtagtacgggagatattccgccaatctttgctca

SEQ ID NO: 43419 - DNA, 75 bp, synthetic construct
  source 1..75: mol_type = other DNA
cacgatgccacaggtgatttctgtctggcgtgtggcggcgcattttctggtgtcgttcattgttggcgtgctggg

SEQ ID NO: 43420 - DNA, 75 bp, synthetic construct
  source 1..75: mol_type = other DNA
aaattgcggctattgcgaaaattaatcctgatgttgaagtgctgggagaaattaccggaaatcataaaaaagtgt

SEQ ID NO: 43421 - DNA, 75 bp, synthetic construct
  source 1..75: mol_type = other DNA
gataatccgcttattaatattctggataagttctccacctggtatgacacgaataacgtgacgctgggcggtgtc

SEQ ID NO: 43422 - DNA, 75 bp, synthetic construct
  source 1..75: mol_type = other DNA
aatggccattgacgggctcaaggaggttcaggaatcagtgatgcgcattgaggccggactgagcacgtatgagaa

SEQ ID NO: 43423 - DNA, 75 bp, synthetic construct
  source 1..75: mol_type = other DNA
ccttccatcgttttgactgtatcctggaagacacctctgccattaaagcgctggtggggaaaggtagcgttggtg

SEQ ID NO: 43424 - DNA, 75 bp, synthetic construct
  source 1..75: mol_type = other DNA
caggcctcaccattacaacggtgggttgacgccggaagaatcagagaacagataccgtttttactgtaaaaccgt

SEQ ID NO: 43425 - DNA, 75 bp, synthetic construct
  source 1..75: mol_type = other DNA
cggcgcaataaaagcccggtgcacgggttttatttcctcacatccacttttcagcgtcgtttatggccgcgcatt

SEQ ID NO: 43426 - DNA, 75 bp, synthetic construct
  source 1..75: mol_type = other DNA
gatggccagccgtatgcgcagtgcggtggaaagctatgcgaaggcgcataatatcagtaatgagcaggcgacaag

SEQ ID NO: 43427 - DNA, 75 bp, synthetic construct
  source 1..75: mol_type = other DNA
ggttgaagccctgaaacgttacccggaagtgaatgcttctatcgacggcgatgatgtggtttaccacaactattt

SEQ ID NO: 43428 - DNA, 75 bp, synthetic construct
  source 1..75: mol_type = other DNA
tgatccttgccgcaggcaaaggcacgcgcatgtattccgatcttccgaaagtgctgcatacccttgccgggaaag

SEQ ID NO: 43429 - DNA, 75 bp, synthetic construct
  source 1..75: mol_type = other DNA
taacggtgggttgactccggaagagtccgagaacaggtaccatttttactgtaaaaccgtggccagtattacttg

SEQ ID NO: 43430 - DNA, 75 bp, synthetic construct
  source 1..75: mol_type = other DNA
aagctaccaatgacgatgtcgaggccaataccgccaatatcgctactaataccagcaacattgccacgaatacgg

SEQ ID NO: 43431 - DNA, 75 bp, synthetic construct
  source 1..75: mol_type = other DNA
aaagaggacggacacgaaaagggcgcggcaaaacagcgctttgagtcgcgtcaccttaatcaggggggcgcggcg

SEQ ID NO: 43432 - DNA, 75 bp, synthetic construct
  source 1..75: mol_type = other DNA
aaaaaagcgcagaaattgagggccaagagattacaacagttgcttgagaaaatggcgtgtgaccgaatttcacca

SEQ ID NO: 43433 - DNA, 75 bp, synthetic construct
  source 1..75: mol_type = other DNA
gcgcgatgaaagtgtttttaatcttctacatcgtttgtgtgctactgacctggctggtttatggtcggcggaagt

SEQ ID NO: 43434 - DNA, 75 bp, synthetic construct
  source 1..75: mol_type = other DNA
gcacggctgcggcgctcggcggggcgacggtattcgggctgtttaccggaacggatttcgggattgtgtttggtg

SEQ ID NO: 43435 - DNA, 75 bp, synthetic construct
  source 1..75: mol_type = other DNA
tgcgtggtcagccgcgggacgtcatgttccatagcgaccagggaagtcaatatacaggactgaaatatcaacaac

SEQ ID NO: 43436 - DNA, 75 bp, synthetic construct
  source 1..75: mol_type = other DNA
tgcttacggttacccttcagaagctgacatcaaaggtttgtttgctgatttcgataccaccagtaaccgcctggg

SEQ ID NO: 43437 - DNA, 75 bp, synthetic construct
  source 1..75: mol_type = other DNA
ctgggcatttgcctgggtatgcaggtggcgttaattgattacgctcgccatgttgccaacatggagaacgccaac

SEQ ID NO: 43438 - DNA, 75 bp, synthetic construct
  source 1..75: mol_type = other DNA
gttgaagcgttaggcgatcacccggttattcgaaagatgagcagtaccttcatttttcagcctattgaaccacta

SEQ ID NO: 43439 - DNA, 75 bp, synthetic construct
  source 1..75: mol_type = other DNA
gcggcacactcgtgggcttaatgttgtcaaccagcgcttttgctgccgccgaatatgctgtcgtattgaaaacac

SEQ ID NO: 43440 - DNA, 75 bp, synthetic construct
  source 1..75: mol_type = other DNA
ctgacggtaaaacgccactacgccgttacgcggggtataacggcggcggtcccggcttcggtggccagctgattg

SEQ ID NO: 43441 - DNA, 75 bp, synthetic construct
  source 1..75: mol_type = other DNA
aaaatgctcactgtgtcgccaattatcaactgccaccagagagtcagcagcagttattaacccagctatcagctg

SEQ ID NO: 43442 - DNA, 75 bp, synthetic construct
  source 1..75: mol_type = other DNA
cgttattttgcaaccggtgccgcaaccccgggtgctgctaatgcggatgcgaccttcaaggttcagtatcaataa

SEQ ID NO: 43443 - DNA, 75 bp, synthetic construct
  source 1..75: mol_type = other DNA
ggtgtggcctggaaagtccgtattgatgctggtgtggccgctctggattatcgcggtatggtcaaatcaggcggt

SEQ ID NO: 43444 - DNA, 75 bp, synthetic construct
  source 1..75: mol_type = other DNA
cagcgggaaaatgaccggatttggcattcaggggatgcgtgaacgcgtcagtgccctgggcggcgacttaacgct

SEQ ID NO: 43445 - DNA, 75 bp, synthetic construct
  source 1..75: mol_type = other DNA
tttcaatgtatctttttacccctataacccacgaatggggatggcaggagttactgtttccacaggcaattagag

SEQ ID NO: 43446 - DNA, 75 bp, synthetic construct
  source 1..75: mol_type = other DNA
ctcttggtccgctgcttcttgtcgtgctgtcaccagctgtcgcccagcaaaacgatgataatgagatcatagtgt

SEQ ID NO: 43447 - DNA, 75 bp, synthetic construct
  source 1..75: mol_type = other DNA
ggtaacgcccgcgcggatgagctggtccgtaacaacggtattgcatcgaatgcagtggaaattcataaggatcat

SEQ ID NO: 43448 - DNA, 75 bp, synthetic construct
  source 1..75: mol_type = other DNA
cgcctggctgcggttctgaaaggggttgaagggttaaagcttggcgactttaacgaacatcagattgacctgttc

SEQ ID NO: 43449 - DNA, 75 bp, synthetic construct
  source 1..75: mol_type = other DNA
atgacaagtattcaacaacgtgcagagcttcatcgccagatctggcaaattgctaacgatgtcaggggttcagtc

SEQ ID NO: 43450 - DNA, 75 bp, synthetic construct
  source 1..75: mol_type = other DNA
ttgttgatttattgaagaaggccagcgatggaattgattccgccattgcattcagtcaggctcagattccggatg

SEQ ID NO: 43451 - DNA, 75 bp, synthetic construct
  source 1..75: mol_type = other DNA
tgaaaccgacctggacctggggcactacgagcgtttcattcgtaccaaaatgagccgccgcaacaacttcaccac

SEQ ID NO: 43452 - DNA, 75 bp, synthetic construct
  source 1..75: mol_type = other DNA
ttgtcgcgaatgactataacctgtcggtgagcagctatgtggaagcgaaagataaccgcgaaattatcgatatcg

SEQ ID NO: 43453 - DNA, 75 bp, synthetic construct
  source 1..75: mol_type = other DNA
ggttaacgtgcacggtcagtttggcggcattgtttactatcaggagattcagccgcttacattcgattgccacgc

SEQ ID NO: 43454 - DNA, 75 bp, synthetic construct
  source 1..75: mol_type = other DNA
attgaagccggtgatgacagtatctgttatgcgaaactggatgacagcgtaattactgatgacattaaagacgat

SEQ ID NO: 43455 - DNA, 75 bp, synthetic construct
  source 1..75: mol_type = other DNA
gtaagcggaacattgcggaactgaagacgcgggatcttcttgtacccattaaagcagtcgagtcatccgggcggc

SEQ ID NO: 43456 - DNA, 75 bp, synthetic construct
  source 1..75: mol_type = other DNA
tttccggtgctgatgaaacaactggagctgaaactggctgacggtgaactctccccctgccaacaacgtaccgtc

SEQ ID NO: 43457 - DNA, 75 bp, synthetic construct
  source 1..75: mol_type = other DNA
aatccacgtccggcagcgcaccatgaagaaggagctggaaaagctgaccagtgcggatgagatactggcatacag

SEQ ID NO: 43458 - DNA, 75 bp, synthetic construct
  source 1..75: mol_type = other DNA
gtatactgcaacggaaacggataatacagaacacggaaaagcattgtggtctgggctgacagcaggaacgtacgg

SEQ ID NO: 43459 - DNA, 75 bp, synthetic construct
  source 1..75: mol_type = other DNA
accggcgatgcgatctctggtttcgaaggcagcgtaccgaacccgtatgttaaagcgtctgactggggctggcag

SEQ ID NO: 43460 - DNA, 75 bp, synthetic construct
  source 1..75: mol_type = other DNA
accagcgcggtgtattcacatatccggggagaaaaccgctctgaacaggcccagaaacacgcacaacagactttt

SEQ ID NO: 43461 - DNA, 75 bp, synthetic construct
  source 1..75: mol_type = other DNA
ttgattgaatctggtctatggtccagggatgctgttgaacgtcagatgagccatcaggagcgtaatggcgtacgt

SEQ ID NO: 43462 - DNA, 75 bp, synthetic construct
  source 1..75: mol_type = other DNA
ctggttgagccgctaatatgctctgcacgctataccggaagtacattccggcgtggagatgtaacgattaagccg

SEQ ID NO: 43463 - DNA, 75 bp, synthetic construct
  source 1..75: mol_type = other DNA
atggaggcctgtgggggttctcatcactgggcgcgtgagcttcagaaactgggacataaggtcagattactcaaa

SEQ ID NO: 43464 - DNA, 75 bp, synthetic construct
  source 1..75: mol_type = other DNA
cagatccgccttggcaatatcgcgacaaagccaacgatggcaatcgcggtgctggacataaatacgatgttatga

SEQ ID NO: 43465 - DNA, 75 bp, synthetic construct
  source 1..75: mol_type = other DNA
atttattcgggaactaccggaaattacttttagcggaaaaatcgcgctcgaacggggactggatgttcgttacat

SEQ ID NO: 43466 - DNA, 75 bp, synthetic construct
  source 1..75: mol_type = other DNA
tggtacaaacctcagtttaagaaggagtatcagacacttcactatgagagcgtttggtattacgttcttgctcgc

SEQ ID NO: 43467 - DNA, 75 bp, synthetic construct
  source 1..75: mol_type = other DNA
gagctttgttttactacggatagtgctgacaggagtaaattatgggaaattcaaagccgcgagaattgtagctat

SEQ ID NO: 43468 - DNA, 75 bp, synthetic construct
  source 1..75: mol_type = other DNA
cagaacagcaaaaacagctggccgaccctgctttccgcgctcgtgcgcaaggtttagcggcggtggactctggta

SEQ ID NO: 43469 - DNA, 75 bp, synthetic construct
  source 1..75: mol_type = other DNA
ccattgctgacgtctcagccggtcgtctgtttgtgctggtcaataaattcgatgaaaaagatcgcaatggtgatg

SEQ ID NO: 43470 - DNA, 75 bp, synthetic construct
  source 1..75: mol_type = other DNA
ggaagcgatgctgcgtcagcaaccaccttccacgcgtattgacctcacgctggctgactgggcgcagcagcgacg

SEQ ID NO: 43471 - DNA, 75 bp, synthetic construct
  source 1..75: mol_type = other DNA
cgcaatgggcagataaagatcacactgctgtgaattgcatggtgaagtttgagcacattgagcaggcggttcctt

SEQ ID NO: 43472 - DNA, 75 bp, synthetic construct
  source 1..75: mol_type = other DNA
cagtgcagcctgtttttacgctccgttcaaaaaagtaaaaaaatggtcatgggaaaccatgtggtcagtcggtgg

SEQ ID NO: 43473 - DNA, 75 bp, synthetic construct
  source 1..75: mol_type = other DNA
ccgtatgttcagattaaacgagagtattgatcaggctctacaccatttcttaagcaaagaaggtggtaaaaatga

SEQ ID NO: 43474 - DNA, 75 bp, synthetic construct
  source 1..75: mol_type = other DNA
caccgctacgccatcaaagaaacacgctcaaagctgaaaggtacgatcggcagtcggttaatgaacgaacggaag

SEQ ID NO: 43475 - DNA, 75 bp, synthetic construct
  source 1..75: mol_type = other DNA
atgaaagttatgcgtaccaccgtcgcaactgttgtcgccgcgaccttatcgatgagtgctttctctgtgtttgca

SEQ ID NO: 43476 - DNA, 75 bp, synthetic construct
  source 1..75: mol_type = other DNA
accagaacagtggaaagttttgttaatcagcggtcatgccgtggcgacaaaacaggaagctgatgttttgccagg

SEQ ID NO: 43477 - DNA, 75 bp, synthetic construct
  source 1..75: mol_type = other DNA
tttcattgcaggtcattaacggcagtgagctggaaagcgggcgggcggcgcgctgtctgttcacacagcagggaa

SEQ ID NO: 43478 - DNA, 75 bp, synthetic construct
  source 1..75: mol_type = other DNA
tttgtattaatatccgtaaacaaaacatggttaattaaactactgactattcgctggcgcgaatggttaacagat

SEQ ID NO: 43479 - DNA, 75 bp, synthetic construct
  source 1..75: mol_type = other DNA
acctgcaggctgaccttgaaagagcggggattcatccgtggggctggattatcaataacagcctttccattgcgg

SEQ ID NO: 43480 - DNA, 75 bp, synthetic construct
  source 1..75: mol_type = other DNA
gtgaaacgctggccagaaggcgtggcggaagaagaactggacgccgccgcgcagcagcttaccgcccgagtgcaa

SEQ ID NO: 43481 - DNA, 75 bp, synthetic construct
  source 1..75: mol_type = other DNA
gatcgtcagtcgggaactgtttacctgtagaaacactttaccaccacgtgaggctgaacctgatttcggtgcgat

SEQ ID NO: 43482 - DNA, 75 bp, synthetic construct
  source 1..75: mol_type = other DNA
attgaggctgttaagaatcagcacgctgaccgtatagcacttgttccggtgctggcgtcagagcccgctggtatt

SEQ ID NO: 43483 - DNA, 75 bp, synthetic construct
  source 1..75: mol_type = other DNA
ctactcgtgagcgcgccagtttaatcctgacgaaaagtgctaatcatgcggtagaagaggtcagactacgcaaat

SEQ ID NO: 43484 - DNA, 75 bp, synthetic construct
  source 1..75: mol_type = other DNA
tggctgtccacctgctgctgaaagaagcgggtatcgggtttgcgatgccggttgctccgctgtttgaaaccctcg

SEQ ID NO: 43485 - DNA, 75 bp, synthetic construct
  source 1..75: mol_type = other DNA
tcccgatttacttgttccagtaaaggcagccgaagccaaagagatttatgagattgcagcgcgccttcagcagcg

SEQ ID NO: 43486 - DNA, 75 bp, synthetic construct
  source 1..75: mol_type = other DNA
gatccacgcactgccaccacaggcaaccagcgcggtgtattcacatatccggggagaaaaccgctctgaacaggc

SEQ ID NO: 43487 - DNA, 75 bp, synthetic construct
  source 1..75: mol_type = other DNA
gcgtaagcatctctctctggcagaggaaagcagctggcagcgttgcgccgacaaactcattgccgcactgccagg

SEQ ID NO: 43488 - DNA, 75 bp, synthetic construct
  source 1..75: mol_type = other DNA
cgaccagtcgtgacggcatccattttgaacggcacggcaaggtgattgatacaccgcccggactgcatcactttc

SEQ ID NO: 43489 - DNA, 75 bp, synthetic construct
  source 1..75: mol_type = other DNA
gccttttatcaacaccatccctactccccgaaatggggtccgatgcactgggggcacgcccgaagcaaagatctg

SEQ ID NO: 43490 - DNA, 75 bp, synthetic construct
  source 1..75: mol_type = other DNA
gaccgacaacaacaccggcaaactgaccggtacccgtactcacaagccctttacgtttaccaaagaaatcgatgc

SEQ ID NO: 43491 - DNA, 75 bp, synthetic construct
  source 1..75: mol_type = other DNA
accggtacccgtattcacacgccgttcctgtttaccaaggaaattgattcttccagcccgtacctttacaaggcc

SEQ ID NO: 43492 - DNA, 75 bp, synthetic construct
  source 1..75: mol_type = other DNA
gataccatgctgcgcgccagcgcctcattctttaatggcggcaaatacagcgacgaatggcacccgaacggttca

SEQ ID NO: 43493 - DNA, 75 bp, synthetic construct
  source 1..75: mol_type = other DNA
gatatacttattattagcaccccacaggatacaccccggtttgaacaattgctcggagacggaactcaatgggga

SEQ ID NO: 43494 - DNA, 75 bp, synthetic construct
  source 1..75: mol_type = other DNA
ctgttgatggtgtcgcctggaaggtgcgcatagatgcaggtgtcgcggccctcgattatcgtggattgctgaaat

SEQ ID NO: 43495 - DNA, 75 bp, synthetic construct
  source 1..75: mol_type = other DNA
ctgtttttgcatatcacgttaatgatccggaacgttatggcgttattgagtttgataaagatggtacagcgatat

SEQ ID NO: 43496 - DNA, 75 bp, synthetic construct
  source 1..75: mol_type = other DNA
gttgctttaggtgtgtcgatggtgagcgccaatggtcgttgggtctacaaattacaaggtagtaccaatagccag

SEQ ID NO: 43497 - DNA, 75 bp, synthetic construct
  source 1..75: mol_type = other DNA
tgcatggtgccgggtgcctcccggtgaattcagtatcagcacctgaatccgcgattatcacatatacctggttgc

SEQ ID NO: 43498 - DNA, 75 bp, synthetic construct
  source 1..75: mol_type = other DNA
gcaggttaatgtattagcagaaccactaaagaaaaatgcttatggtcagtatctgctaaaaatgattaaaggtta

SEQ ID NO: 43499 - DNA, 75 bp, synthetic construct
  source 1..75: mol_type = other DNA
aagtccacaccagaatggtgaaagaggttctgaaagccgtcgccagggccaataatcacccttatcagtctgtat

SEQ ID NO: 43500 - DNA, 75 bp, synthetic construct
  source 1..75: mol_type = other DNA
gatgcgcttcagcagtccggcggcgaagacggtggcagtgtggtgttcccgccggtgctggtgcagatgctcgac

SEQ ID NO: 43501 - DNA, 75 bp, synthetic construct
  source 1..75: mol_type = other DNA
gtcgatgtcgcctcgttcaaggcatggggtgattttgccgcagataaacacagtctctattttgaaggcaagcgc

SEQ ID NO: 43502 - DNA, 75 bp, synthetic construct
  source 1..75: mol_type = other DNA
atccttgtgcgtatcctcgctgacggacgcaccacagacatcccgctggggcgttttctgcgggaatttacctgt

SEQ ID NO: 43503 - DNA, 75 bp, synthetic construct
  source 1..75: mol_type = other DNA
ccagccggaaatacaggaacggacactggatggcccttcgctgggatggtaaccagagacaggctaaaatgttgt

SEQ ID NO: 43504 - DNA, 75 bp, synthetic construct
  source 1..75: mol_type = other DNA
gcaggtgaaagtattagccgaaccgctgaagaaaaatgcttatggtcagtatctgctcaaaatgattaaaggtta

SEQ ID NO: 43505 - DNA, 75 bp, synthetic construct
  source 1..75: mol_type = other DNA
ttacggggcgtgttaatccctcggattacggtaactttgattcccgctatgtgagagatgtcagacttggcacac

SEQ ID NO: 43506 - DNA, 75 bp, synthetic construct
  source 1..75: mol_type = other DNA
gcaggtgaagaagctggctgagccgctgaagaaaaatgcctatggtcaatacctgcttaagatgattaaaggtta

SEQ ID NO: 43507 - DNA, 75 bp, synthetic construct
  source 1..75: mol_type = other DNA
ctgttttcgcctatcacgtcaacgatcctgaacgttatggtgtggtcgagttcgacaaaaatggtacggccatca

SEQ ID NO: 43508 - DNA, 75 bp, synthetic construct
  source 1..75: mol_type = other DNA
caaagaattaaacttcgtaatgaattacgtgttcactcttgagacttggtattcatttttcgtcttgcgacgtta

SEQ ID NO: 43509 - DNA, 75 bp, synthetic construct
  source 1..75: mol_type = other DNA
cgcactgggtaccggttccgttgcagacgaagaaaatacaatctctgtaggttcttctactaaccaacgccgtat

SEQ ID NO: 43510 - DNA, 75 bp, synthetic construct
  source 1..75: mol_type = other DNA
tctcagacgtctttgccgccttcgcggaatttcctgccgccgttgccgaggaagctgcactactggcgcttgatg

SEQ ID NO: 43511 - DNA, 75 bp, synthetic construct
  source 1..75: mol_type = other DNA
aagaattaagccgtcatcagttaggtggatttattcccgtgtatgatcagattccgggtacacattattttctac

SEQ ID NO: 43512 - DNA, 75 bp, synthetic construct
  source 1..75: mol_type = other DNA
ctttcgtggtcgcggtggatgcagaagtggctgctgattgttgtgacgctgcggcattcgtttctgacgttttcg

SEQ ID NO: 43513 - DNA, 75 bp, synthetic construct
  source 1..75: mol_type = other DNA
accttgatgcgtgtgatgctgatatttctgcatgggaaccggaacgaccagagggcaatggatggtttattggtt

SEQ ID NO: 43514 - DNA, 75 bp, synthetic construct
  source 1..75: mol_type = other DNA
cggccatcagccgggaagcctcccgtaatgagctgattgcccgtaacctgcgtgatttacgcgagcagacaaaag

SEQ ID NO: 43515 - DNA, 75 bp, synthetic construct
  source 1..75: mol_type = other DNA
ggtccttgaggatttgcccggttactgtaatcaggttattggtgatcttcttaatgagctttatcacatagaaga

SEQ ID NO: 43516 - DNA, 75 bp, synthetic construct
  source 1..75: mol_type = other DNA
ctgcagttaaaagaaaggcgaggatatggacgagcgcttgttgcgatagcagcaaaaaatgcacgtatgtgctgg

SEQ ID NO: 43517 - DNA, 75 bp, synthetic construct
  source 1..75: mol_type = other DNA
tacgcaaggtggatttgctccccgacagcatccgtaagccgctgctggaaatgctgcgtgaaaaacgtctgacgc

SEQ ID NO: 43518 - DNA, 75 bp, synthetic construct
  source 1..75: mol_type = other DNA
aaatcgttcgtgccattgaactggcgaataagcgcaacgagtgtgacgtgttgatcgttggccgtggcggtggtt

SEQ ID NO: 43519 - DNA, 75 bp, synthetic construct
  source 1..75: mol_type = other DNA
gggttgggagaaagtacagtcagaacggcaatctccgaactggaggctgatggctggctgacgcgtcagtcacgc

SEQ ID NO: 43520 - DNA, 75 bp, synthetic construct
  source 1..75: mol_type = other DNA
cgcgtcacgaaatgtcacgcgaggtcacattgatgtcacgacagaagatttggcaagtgcgctcgacgtgacaga

SEQ ID NO: 43521 - DNA, 75 bp, synthetic construct
  source 1..75: mol_type = other DNA
attggcgcatccgctgacgcgtctgcaccagcgcgttctgccagacaggaatattcaccggaatttgaacaggcc

SEQ ID NO: 43522 - DNA, 75 bp, synthetic construct
  source 1..75: mol_type = other DNA
gtacctctcttgagattggagggttgatgcaacaagatacaagtggaaatattgagcatctacgcaaaaaaacta

SEQ ID NO: 43523 - DNA, 75 bp, synthetic construct
  source 1..75: mol_type = other DNA
tgggcattggacaaaacatggaaaagagtttccagagtatcagaatgcgaagcaatatgttgatgctgcacataa

SEQ ID NO: 43524 - DNA, 75 bp, synthetic construct
  source 1..75: mol_type = other DNA
agcgtgcggaagtacgtatttttgccggtaatgatccggctcataccgccacaggcagcagcgggatttcttctg

SEQ ID NO: 43525 - DNA, 75 bp, synthetic construct
  source 1..75: mol_type = other DNA
tttctcaatggtccggtatcaacaaccagggccgggaggattacaggaaacgagattttgccccggacagccccg

SEQ ID NO: 43526 - DNA, 75 bp, synthetic construct
  source 1..75: mol_type = other DNA
tttaacccggtcagccaggtgaaatttgtgcacaccgtaatggcgggctacgtgaccggggccatgtttattatg

SEQ ID NO: 43527 - DNA, 75 bp, synthetic construct
  source 1..75: mol_type = other DNA
aattcctgtgatttaaagcatcccgccacagacgggagtgttacagttagccatgagatttcgattaatcattaa

SEQ ID NO: 43528 - DNA, 75 bp, synthetic construct
  source 1..75: mol_type = other DNA
cacagtggctctgacccgggccacgcttaccggaggggcgggcaggttcagtattgtccgtcagaagacatatct

SEQ ID NO: 43529 - DNA, 75 bp, synthetic construct
  source 1..75: mol_type = other DNA
tgatgcaaaaagagctggagttcaacaagattggcctgattgaaaccagttcggtgctggcgggtttcaccttca

SEQ ID NO: 43530 - DNA, 75 bp, synthetic construct
  source 1..75: mol_type = other DNA
cctggaagacgcacagtattacccgaaagcccttgcagagctggaagcggtggccgcggaaatcctgaaacgtgc

SEQ ID NO: 43531 - DNA, 75 bp, synthetic construct
  source 1..75: mol_type = other DNA
cttttcgaagtctccgccacctacctggtggctacggcgagagggcatatattcaatgatgccaataagcgtacc

SEQ ID NO: 43532 - DNA, 75 bp, synthetic construct
  source 1..75: mol_type = other DNA
ggcggatagcgtcatcaactacgtgaatactaacctctcaacgctggtgctggcgcgtattctgggggcgagcgt

SEQ ID NO: 43533 - DNA, 75 bp, synthetic construct
  source 1..75: mol_type = other DNA
gacatcagcgctatctctgctctcattgccgtaaaacatggcaactacagttcacttacaccgcctctcagcccg

SEQ ID NO: 43534 - DNA, 75 bp, synthetic construct
  source 1..75: mol_type = other DNA
gattgttgagccgtacagacgcccgcaatattcactggctgagctactggcacagtgtgatccgaatgctgaaat

SEQ ID NO: 43535 - DNA, 75 bp, synthetic construct
  source 1..75: mol_type = other DNA
tcaaaacctttgatcgcaaaagcggcaaaggattcattatcccctccgacggtcgtaaagaagttcaggtccata

SEQ ID NO: 43536 - DNA, 75 bp, synthetic construct
  source 1..75: mol_type = other DNA
gttgggcgctatatgctcatccctgttttcaggaaacctacgacgctttagttgccgaagtcgagacattaaagg

SEQ ID NO: 43537 - DNA, 75 bp, synthetic construct
  source 1..75: mol_type = other DNA
accggcaacgccgctgcaggataaaacggacacagcacacaaaatgaaggcaggtgaccggatatcacagcagaa

SEQ ID NO: 43538 - DNA, 75 bp, synthetic construct
  source 1..75: mol_type = other DNA
ctgccggggctgattaaccagacccaccgaaaaataagagaagcttcagcagacggcgcttatgacacgcgcaac

SEQ ID NO: 43539 - DNA, 75 bp, synthetic construct
  source 1..75: mol_type = other DNA
caatattgatacatccactcccatgggacgtttctttttccatataatgggcgcactggcggaaatggagcggga

SEQ ID NO: 43540 - DNA, 75 bp, synthetic construct
  source 1..75: mol_type = other DNA
aacaaccgatatttttaaaataccgacgctgcagtatggcgctgaaatactttgtcccttacgctatattgggct

SEQ ID NO: 43541 - DNA, 75 bp, synthetic construct
  source 1..75: mol_type = other DNA
cgatattatcattatttacactattgccgtttataatagcatccgggacatgttttattaaattctcgattgttt

SEQ ID NO: 43542 - DNA, 75 bp, synthetic construct
  source 1..75: mol_type = other DNA
gtcattagtgtctgtgactctgataacagtcaggggatgctacggcaagttttcatgggaagcgatcggatactg

SEQ ID NO: 43543 - DNA, 75 bp, synthetic construct
  source 1..75: mol_type = other DNA
aacaatccggcagccgcgccaatttaccggtgctggcaattcagcgtggcgtatttaaagtgctgccgattatcg

SEQ ID NO: 43544 - DNA, 75 bp, synthetic construct
  source 1..75: mol_type = other DNA
cctcggtgcgcggtcattgtcgacatcgactctcctgcgaaaactcaacgccggagattacgctggtgcagccga

SEQ ID NO: 43545 - DNA, 75 bp, synthetic construct
  source 1..75: mol_type = other DNA
gcctgaaagacgagaagaaagccttgatgcagcaactgctgaccgggaaacgtcgggtgaaagtggatgaggcgg

SEQ ID NO: 43546 - DNA, 75 bp, synthetic construct
  source 1..75: mol_type = other DNA
tgggcgaacttcagccgcaatatcgatccgctggtagaggcgggctatcgggtgatcctgctggattgtccgggt

SEQ ID NO: 43547 - DNA, 75 bp, synthetic construct
  source 1..75: mol_type = other DNA
tccaataaaagaggatgttatttatactgaaagcgtaccatttcaggataaagatgggctaaaaatatataaggc

SEQ ID NO: 43548 - DNA, 75 bp, synthetic construct
  source 1..75: mol_type = other DNA
ccggcagagttttcagtgaaacaactgaaagaggttatgacacagcgcgggataccttttgccacctgctttgac

SEQ ID NO: 43549 - DNA, 75 bp, synthetic construct
  source 1..75: mol_type = other DNA
tcgatcaagggcaaagtcgaattgctgggtactgtaataatttagaggtttattcggacgtgcctgtgattgttt

SEQ ID NO: 43550 - DNA, 75 bp, synthetic construct
  source 1..75: mol_type = other DNA
ggctcagagagttattactctaaggggtaaaaaaggaatcctagaaaatgattaccttttatatctattgcagtc

SEQ ID NO: 43551 - DNA, 75 bp, synthetic construct
  source 1..75: mol_type = other DNA
ccggtgctttatgtggcgtttacccgtgcaacccatgaattactggtgacttgttaccgtgaaaacagtatcagc

SEQ ID NO: 43552 - DNA, 75 bp, synthetic construct
  source 1..75: mol_type = other DNA
actgtgacgagactgagcactatttcaactcagatatccgggacattacactcagtaatcttcccgatgtttcgg

SEQ ID NO: 43553 - DNA, 75 bp, synthetic construct
  source 1..75: mol_type = other DNA
gaatggggtgaggtttagtggggagtgggtatatttaacgtttgataatgctttcattgttgcaaataaaaaatc

SEQ ID NO: 43554 - DNA, 75 bp, synthetic construct
  source 1..75: mol_type = other DNA
cagaaagagggggagcgtcatctgaatattcgtcctgcgttcgtactggtaccgacggcgatggagtctgttgct

SEQ ID NO: 43555 - DNA, 75 bp, synthetic construct
  source 1..75: mol_type = other DNA
ggtcagctggatacgaactttaaaattggtcgtcgagcggcgttacgtgagatcgaggatgtgaaacacgatacg

SEQ ID NO: 43556 - DNA, 75 bp, synthetic construct
  source 1..75: mol_type = other DNA
gtggcggctgtcgccgcccttgatgtgctgcaacgtatgaaccgggaactattcaatcccgagtttctttttaag

SEQ ID NO: 43557 - DNA, 75 bp, synthetic construct
  source 1..75: mol_type = other DNA
ttggtcgtcgtgccgcgttacgcgagattgaggatgtgaaacacgatacgcgtgaagcggaagatgtgctggatg

SEQ ID NO: 43558 - DNA, 75 bp, synthetic construct
  source 1..75: mol_type = other DNA
tcgctgtgcttattgcggctgcgaacttggcgaaaagtggcatgcagaccatgtaaaaccggtcattcgttttga

SEQ ID NO: 43559 - DNA, 75 bp, synthetic construct
  source 1..75: mol_type = other DNA
gatcagcgacagaggtacgcttatcgcgtacggacgttatccggacacctttttaccagaccagacggactccgt

SEQ ID NO: 43560 - DNA, 75 bp, synthetic construct
  source 1..75: mol_type = other DNA
cgtctttcggcggtgtggctgatgcacgacccggcatacccggaaagcctgcccggtgcgccactggcgcggtac

SEQ ID NO: 43561 - DNA, 75 bp, synthetic construct
  source 1..75: mol_type = other DNA
acgagccgggaagcttcacgccgctcatccgggtcgagacagagaacggcgagcgggaaaaagcgcagcggcgca

SEQ ID NO: 43562 - DNA, 75 bp, synthetic construct
  source 1..75: mol_type = other DNA
tgtgctggtgttcctgctgagcgatgtgatcgccagcgtgctgcacaacccggatctggccccgctgatgcgcac

SEQ ID NO: 43563 - DNA, 75 bp, synthetic construct
  source 1..75: mol_type = other DNA
tttatggctgccgttttatctctcgctgccgacgctggtggttagttatgcgctgggcattgtgctgaaagggca

SEQ ID NO: 43564 - DNA, 75 bp, synthetic construct
  source 1..75: mol_type = other DNA
cactgacggcacttatttctgcgccaccaacgtggcgcgggtgaatcttatccgacaagtacaggagccacgcag

SEQ ID NO: 43565 - DNA, 75 bp, synthetic construct
  source 1..75: mol_type = other DNA
attacagggagtgatgtctatccaaacaaagagtcatcagcaaggtgctttacagggattattggtgagccttac

SEQ ID NO: 43566 - DNA, 75 bp, synthetic construct
  source 1..75: mol_type = other DNA
ttcctgacaccattcgcgtgcgcgactatcgcggcaaactgatagtaccgggctttgtcgatacacatatccatt

SEQ ID NO: 43567 - DNA, 75 bp, synthetic construct
  source 1..75: mol_type = other DNA
atatttctattatccccgattccagacaagtctggaaagtggaacataaattatcggatattctactgttgacta

SEQ ID NO: 43568 - DNA, 75 bp, synthetic construct
  source 1..75: mol_type = other DNA
ctcaacatgatgaatcaggacggcgtgcgtaacggttacgacctcgagcagctgaaaaaagtacgtgaagtttgc

SEQ ID NO: 43569 - DNA, 75 bp, synthetic construct
  source 1..75: mol_type = other DNA
cgcttgtcagcacggaaggggcaacagaatggtgcgcagaatacgatgaatggggcaacctgctgaatgaagaga

SEQ ID NO: 43570 - DNA, 75 bp, synthetic construct
  source 1..75: mol_type = other DNA
aatagccactaaatggggcgaaaaaacggcagtactgctcggatttattgcagatagtagtgcatttgccttttt

SEQ ID NO: 43571 - DNA, 75 bp, synthetic construct
  source 1..75: mol_type = other DNA
ttaccgtacctatggctacatgaacggcagcagcgccgtcgcgcaggtcaatatgggtcgcaccgtcggtatcaa

SEQ ID NO: 43572 - DNA, 75 bp, synthetic construct
  source 1..75: mol_type = other DNA
ttacccacgcttattaccagctatggcgttggacgtgtgcttgaggggaatgtctctttgccgctgctgctggca

SEQ ID NO: 43573 - DNA, 75 bp, synthetic construct
  source 1..75: mol_type = other DNA
gcgctgtcggtcgacaggtgggatgagaaatggccggaggcgacaaagcgcaacgtctgcgcgtcctcgtttttc

SEQ ID NO: 43574 - DNA, 75 bp, synthetic construct
  source 1..75: mol_type = other DNA
acgcctggccgttggttcgtggtcatgagctaatgagcgcacttcaggacgtgatgggatttacaccattgctga

SEQ ID NO: 43575 - DNA, 75 bp, synthetic construct
  source 1..75: mol_type = other DNA
ggcaggagcggaagattgcgcaggtcagtaagcctgcccccgcaattaatatcacacccgtggtccctgctccgc

SEQ ID NO: 43576 - DNA, 75 bp, synthetic construct
  source 1..75: mol_type = other DNA
gaaatcgccggtgaattgttacacgagcaggcagatgagcgtcaggcactgagccttgcgatgcctaaagtcagc

SEQ ID NO: 43577 - DNA, 75 bp, synthetic construct
  source 1..75: mol_type = other DNA
gaattgctgctttcgaatctggaatacaaatcttttagtgacttcgcttccgatttactcgggccgtgggcagga

SEQ ID NO: 43578 - DNA, 75 bp, synthetic construct
  source 1..75: mol_type = other DNA
tatctctctgccgcttggcctgtgtatcgcctttatcgtcatgcacttccagggactgaacgccaatatcatgtc

SEQ ID NO: 43579 - DNA, 75 bp, synthetic construct
  source 1..75: mol_type = other DNA
acgatatttcaccgtcactgatgtggtggggcgggttgttgtactggctggctgcattagtgacgctgctatggg

SEQ ID NO: 43580 - DNA, 75 bp, synthetic construct
  source 1..75: mol_type = other DNA
ctggtggtgggatcgctttacctgcattacagggagtgatgtctatccaaacaaagagtcatcagcaaggtgctt

SEQ ID NO: 43581 - DNA, 75 bp, synthetic construct
  source 1..75: mol_type = other DNA
atcgataaaatttagctcacataaaatatattcatgggaacaagttattgaatgtgcgtcttggttcaaaggagt

SEQ ID NO: 43582 - DNA, 75 bp, synthetic construct
  source 1..75: mol_type = other DNA
agaagaaattaccaccggattacgcgtggaattttgccggataaatggtctgcgtggcccttcagctgccaatgt

SEQ ID NO: 43583 - DNA, 75 bp, synthetic construct
  source 1..75: mol_type = other DNA
aatggcgaaaaacgggctgtatggtgtgagcgtcagacggcttgttggtgcctgatggcggtcctgccggatgcg

SEQ ID NO: 43584 - DNA, 75 bp, synthetic construct
  source 1..75: mol_type = other DNA
atgaagatcgtaaaggctgaagtttttgttacctgtccggggcgtaatttcgtcacattaaaaatcaccactgag

SEQ ID NO: 43585 - DNA, 75 bp, synthetic construct
  source 1..75: mol_type = other DNA
tgaacgttaaaattgagcatgaaatcatcattaaagcggataaggacgttgaagacctgctcaaaacccgtagcg

SEQ ID NO: 43586 - DNA, 75 bp, synthetic construct
  source 1..75: mol_type = other DNA
caaagggcacgccattgttgatggtgttctgattgttcatcgtggatgggacaggggtaaagacagtgatgcgtg

SEQ ID NO: 43587 - DNA, 75 bp, synthetic construct
  source 1..75: mol_type = other DNA
ggcagggttatctgctcaggagcatgagcatctggcctggattgcgcgtcagatcatcccgaccgaagccgatga

SEQ ID NO: 43588 - DNA, 75 bp, synthetic construct
  source 1..75: mol_type = other DNA
taacagcaacgagttggacaaggcgtttcattcagacagtggtctgttctggctgggtagtctggactacggctt

SEQ ID NO: 43589 - DNA, 75 bp, synthetic construct
  source 1..75: mol_type = other DNA
cacaatagtaaacttgacttaacagatcttcacttggggtctttgccacctcttccagactggattgaggtgctt

SEQ ID NO: 43590 - DNA, 75 bp, synthetic construct
  source 1..75: mol_type = other DNA
gactgggttaaagatgagtgcgaagttatttatttgcccagaacaccatcgatatcaactaccgagattatagaa

SEQ ID NO: 43591 - DNA, 75 bp, synthetic construct
  source 1..75: mol_type = other DNA
accggttttatttccgatgcaacggcgaatggtctgattctcatgaaactgccggaaacctggagtacaaatgag

SEQ ID NO: 43592 - DNA, 75 bp, synthetic construct
  source 1..75: mol_type = other DNA
tggctgttcccctgcagatcaaaaacattcagcagaacgggatcacaccagaagatatcagcaaggaaattaacg

SEQ ID NO: 43593 - DNA, 75 bp, synthetic construct
  source 1..75: mol_type = other DNA
gaacttggaggtaccctgactccggcggagaaagttaccctatgggaggtgaaaacgggggatacagtaaccaat

SEQ ID NO: 43594 - DNA, 75 bp, synthetic construct
  source 1..75: mol_type = other DNA
gaagggctggacccgctagcgcctgccgacgaaaaccggctggcagacattgccgccgcgtggaccgattatctc

SEQ ID NO: 43595 - DNA, 75 bp, synthetic construct
  source 1..75: mol_type = other DNA
aaggaatcggatttatggagaagtaagccactgtaaggtaaagcaacaccttcgtcagctttggattgtctataa

SEQ ID NO: 43596 - DNA, 75 bp, synthetic construct
  source 1..75: mol_type = other DNA
tttgccggtggcggggtccgtattgaaggaagcagcccgtcattatttgtgcggacggatacggtgcgtgccgtg

SEQ ID NO: 43597 - DNA, 75 bp, synthetic construct
  source 1..75: mol_type = other DNA
ggtacaggtcttaatggatttggtaatgtattgaatgacctgaccaatggtggaaccaaactgaccattactgtt

SEQ ID NO: 43598 - DNA, 75 bp, synthetic construct
  source 1..75: mol_type = other DNA
ctggagactgatgaaacgtgtcggaataaaggctcaggtcggataccgaagcccgcgggcacgtaaaggcgaggc

SEQ ID NO: 43599 - DNA, 75 bp, synthetic construct
  source 1..75: mol_type = other DNA
cattgattatcggcgctggcgtaggttctgtggtaacagagtggcggcgcttatggcgcttgcgacagcgcgccc

SEQ ID NO: 43600 - DNA, 75 bp, synthetic construct
  source 1..75: mol_type = other DNA
tacgatcgctacacttgccacctttgcggcagtgcgctcagataccacccgcaatacgacactgagcgtccctgg

SEQ ID NO: 43601 - DNA, 75 bp, synthetic construct
  source 1..75: mol_type = other DNA
gcagggaaaacaaatctgacagcagagttaatttctgctgttgtggggagtaataaaaaaggagaagggcaatga

SEQ ID NO: 43602 - DNA, 75 bp, synthetic construct
  source 1..75: mol_type = other DNA
caatgtcagcacgattattatggagaacgctattgtacacactgccatacagggcgtttcagtgatgaggtgccg

SEQ ID NO: 43603 - DNA, 75 bp, synthetic construct
  source 1..75: mol_type = other DNA
tgctggtgctcaggatgcaacgatcaccttcgatagcggcatgacagctaaattcgatcaaactgctggtaccgt

SEQ ID NO: 43604 - DNA, 75 bp, synthetic construct
  source 1..75: mol_type = other DNA
gttgatcacggtttcagaaaatcctttcagtggcatgctggttaagcaggaaaaaagacggaagaaaacgctgac

SEQ ID NO: 43605 - DNA, 75 bp, synthetic construct
  source 1..75: mol_type = other DNA
cataacgtggtgatttaccgcaaccatattccggcgcagaccttaattgaacgcctggcgacgatgagcaatccg

SEQ ID NO: 43606 - DNA, 75 bp, synthetic construct
  source 1..75: mol_type = other DNA
cacttgaattatcgcgcagcttaatgcgttcacaaatcgaggctctgcgggaggaggctgaagacttgtgtacaa

SEQ ID NO: 43607 - DNA, 75 bp, synthetic construct
  source 1..75: mol_type = other DNA
acgctactaccgcgattatatcgcggcgaacagcaacgatgaaataactttgccttcactggaactggaaaaaca

SEQ ID NO: 43608 - DNA, 75 bp, synthetic construct
  source 1..75: mol_type = other DNA
gaggaattatggaaaaccttcgacacccatccggaagggttaaatcaggcggaagtggaattagcccgcgaacaa

SEQ ID NO: 43609 - DNA, 75 bp, synthetic construct
  source 1..75: mol_type = other DNA
gatgaagagtcagcgcgctcgctggccagccgttggcaaaaaattgatgagattccgtttgatttcgagcgtcgc

SEQ ID NO: 43610 - DNA, 75 bp, synthetic construct
  source 1..75: mol_type = other DNA
gcagccagtcattgaccgtcacggtcaataccgcagcgccccttatcggcattaacagcattgcgggcgatgatg

SEQ ID NO: 43611 - DNA, 75 bp, synthetic construct
  source 1..75: mol_type = other DNA
ggaagtggaatctgcccgcgaacaacatggtgaaaataaattacccgcacaacaaccgtcgccgtggtgggtaca

SEQ ID NO: 43612 - DNA, 75 bp, synthetic construct
  source 1..75: mol_type = other DNA
ttgctggaacctggtcgtgaaaaggaggtggaaatttattaccagaatcacctccgggataaaaaggcagagcat

SEQ ID NO: 43613 - DNA, 75 bp, synthetic construct
  source 1..75: mol_type = other DNA
gtcccctgattaacataattcgcggaactcaaacactaacgcaaaaacaagtgccgcaaggagaattaacaggta

SEQ ID NO: 43614 - DNA, 75 bp, synthetic construct
  source 1..75: mol_type = other DNA
aggattttttaacccggaaccccgacgcggttgtgtttagtgcgaaaaaacgccagtggggtagcagggaggatt

SEQ ID NO: 43615 - DNA, 75 bp, synthetic construct
  source 1..75: mol_type = other DNA
gatattcagaaagaagccagccaggtagcagcggaagcgatcaagaacggcggtaatgctcaggctgcgagggat

SEQ ID NO: 43616 - DNA, 75 bp, synthetic construct
  source 1..75: mol_type = other DNA
ggaggatgttgccattctctgccatctggatccgaacattccatatacacatccaagcttagcgcacacggggga

SEQ ID NO: 43617 - DNA, 75 bp, synthetic construct
  source 1..75: mol_type = other DNA
atcccgtcttgatgaaattgaccgcgtatccggccagacccagttcaacggcgtgaacgtactgtcaaaagatgg

SEQ ID NO: 43618 - DNA, 75 bp, synthetic construct
  source 1..75: mol_type = other DNA
ttttgaacgttatggttttcagacagttaagcagcagcgcgttgaatgccggggagcgtggtttactaattttta

SEQ ID NO: 43619 - DNA, 75 bp, synthetic construct
  source 1..75: mol_type = other DNA
ctcgtgcgcagatcctgcaacaagcgggtacctctgttctggcgcaggctaaccagaccacgcagaacgtactgt

SEQ ID NO: 43620 - DNA, 75 bp, synthetic construct
  source 1..75: mol_type = other DNA
aagcgacagtggggaacccgggaggatttgacgtgtgcacagtggatctggggacgggttgttgcgttgtatgaa

SEQ ID NO: 43621 - DNA, 75 bp, synthetic construct
  source 1..75: mol_type = other DNA
gcgcgtgaggcatataaaccaaaaagaaaaattagccaggcaaaaaatgacccgtcaaatattgccccctcaacg

SEQ ID NO: 43622 - DNA, 75 bp, synthetic construct
  source 1..75: mol_type = other DNA
atttctcaccatgacgatgcgcccgtggctggcgaactttgagcagcagataaaaaacgccctgctggtggcctc

SEQ ID NO: 43623 - DNA, 75 bp, synthetic construct
  source 1..75: mol_type = other DNA
taatactgggtgttagtgctggcgttattgccgcattaaagcaaaacaccaaatgggactataccgtgatggggc

SEQ ID NO: 43624 - DNA, 75 bp, synthetic construct
  source 1..75: mol_type = other DNA
ctgtagatgttgttctgtcaagcgatggtaaaatcactgcgaaagatggttccaagcttttcattggtattgatg

SEQ ID NO: 43625 - DNA, 75 bp, synthetic construct
  source 1..75: mol_type = other DNA
ggcgagtcctgcatatccctggaagaagcaccaccggcaaaacagcagattgtctgtagtcgcagttttggtgaa

SEQ ID NO: 43626 - DNA, 75 bp, synthetic construct
  source 1..75: mol_type = other DNA
tacccgtggctctatgattgaggttttacactccaactttattcgtactgcccgggcgaaagggttacctatgcg

SEQ ID NO: 43627 - DNA, 75 bp, synthetic construct
  source 1..75: mol_type = other DNA
cttccgtccacaacccgtgttctcgatagtggtgcacacaccagcgatgaacttgcagcgatggtgctcgacaga

SEQ ID NO: 43628 - DNA, 75 bp, synthetic construct
  source 1..75: mol_type = other DNA
gaaaaattagcccggcaaaaaatgacccgttaacagttgacccgtcaaatattgacccctcaacggttgacccgt

SEQ ID NO: 43629 - DNA, 75 bp, synthetic construct
  source 1..75: mol_type = other DNA
tatcaggtgccgattacagtacgttttcaggacgcaaaccccgttgccggagggtttgatggtagtgctgtatta

SEQ ID NO: 43630 - DNA, 75 bp, synthetic construct
  source 1..75: mol_type = other DNA
tcggcgccggaaagacgactctcgctgagcggctgcgcgatcggcgtccgaaatcgctgatctttgaccctgagg

SEQ ID NO: 43631 - DNA, 75 bp, synthetic construct
  source 1..75: mol_type = other DNA
tcagcacgcgcagccagcacgtcagccggacaggccgtgtcgtcggctcagtcagcgtcttccagcgcaggaacg

SEQ ID NO: 43632 - DNA, 75 bp, synthetic construct
  source 1..75: mol_type = other DNA
gaacttgtgacagatggttttattttgcgtgaaaatgaatttgtcacatcattgcagtctctgaaagaagctggg

SEQ ID NO: 43633 - DNA, 75 bp, synthetic construct
  source 1..75: mol_type = other DNA
tttttagtgaagatggcctctatactgtgcgcgttgagaatggcgcaattgtcagccactgccgtattaaatgtt

SEQ ID NO: 43634 - DNA, 75 bp, synthetic construct
  source 1..75: mol_type = other DNA
acacctatactgatgcagacaaagagctcaccacaaccgcatcttacactatcaactacaacgtcgataaggata

SEQ ID NO: 43635 - DNA, 75 bp, synthetic construct
  source 1..75: mol_type = other DNA
atacgcgcctaatccgtaaaacattcggcgttgtgcttgaaagaacggtacgggagttgcgcggcgaggcttgct

SEQ ID NO: 43636 - DNA, 75 bp, synthetic construct
  source 1..75: mol_type = other DNA
gagagcaaaaaacggcgataacgaatacatggcatgggatatgactctcggttggatcgtctggcagcaacgagc

SEQ ID NO: 43637 - DNA, 75 bp, synthetic construct
  source 1..75: mol_type = other DNA
tcccttaacgacgcatttaaatttgtaaccgatgtcgccgctaaagacatcatgtttatgctgaaaagtgctgag

SEQ ID NO: 43638 - DNA, 75 bp, synthetic construct
  source 1..75: mol_type = other DNA
atgcggaaaaggccacagggcagagtaattcgccgaagctgtggccggggacgtggtttacgctgacggggcatc

SEQ ID NO: 43639 - DNA, 75 bp, synthetic construct
  source 1..75: mol_type = other DNA
ggagaccagccgcaggcgcttcacggcagccaggggagaggaaccacgctgggaaatcagttagaggtgataccg

SEQ ID NO: 43640 - DNA, 75 bp, synthetic construct
  source 1..75: mol_type = other DNA
gtttcactgggacaggtataacccggcaacggaggcgagttcgtgctgggtgagcgtgtcgcaggcgtgggcggg

SEQ ID NO: 43641 - DNA, 75 bp, synthetic construct
  source 1..75: mol_type = other DNA
gtttcactgggacaggtataacccggcaacggaggcgagttcgtgctgggtgggcgtgtcacaggcgtgggcggg

SEQ ID NO: 43642 - DNA, 75 bp, synthetic construct
  source 1..75: mol_type = other DNA
cctgaaaagcgacggcaacagcaactggaacctgaccaatgatgtcaaacccaacccggaccccaacccaaatcc

SEQ ID NO: 43643 - DNA, 75 bp, synthetic construct
  source 1..75: mol_type = other DNA
gtttcactgggacaggtataacccggcaacggaggcgagttcgtgctgggtgtgcgtgtctcaggcgtgggcggg

SEQ ID NO: 43644 - DNA, 75 bp, synthetic construct
  source 1..75: mol_type = other DNA
gtttcactgggacaggtataacccggcaacggaggcgagttcgtgctgggtgcgagtgtcccaggcgtgggcggg

SEQ ID NO: 43645 - DNA, 75 bp, synthetic construct
  source 1..75: mol_type = other DNA
cagcgactcttttatgcagacggcggagatgctgctggagaagaaggcgacgctgaccatctggcagggcgtcat

SEQ ID NO: 43646 - DNA, 75 bp, synthetic construct
  source 1..75: mol_type = other DNA
gggatggaatttttatcagtatccgctgaatccggttcagtatatagattcaatgggactggcatcaaaatatgg

SEQ ID NO: 43647 - DNA, 75 bp, synthetic construct
  source 1..75: mol_type = other DNA
aactacaatcaatgaatatcactgaagataatatctgtaagctcaaatcattgtttcctgaagcctttaatgaaa

SEQ ID NO: 43648 - DNA, 75 bp, synthetic construct
  source 1..75: mol_type = other DNA
gtgcgcaatgattttgcccttgaactgcatatcgatacggaagaagccaatgctgccggactgaaaaacggggcg

SEQ ID NO: 43649 - DNA, 75 bp, synthetic construct
  source 1..75: mol_type = other DNA
gattgaatggctggcgctcggcgtaattgtcttcgcggtggtactggtcacgttgggaaaatatctcttcccggc

SEQ ID NO: 43650 - DNA, 75 bp, synthetic construct
  source 1..75: mol_type = other DNA
cgctggagattgacggccaggagccggacacctttgcagtggtgcatttcaggttaatccagaaccagtcttatc

SEQ ID NO: 43651 - DNA, 75 bp, synthetic construct
  source 1..75: mol_type = other DNA
taccgatgctaactacctcggtggtggtgacgtagatcaagactggtccgcgaacgtgggtgttaaatatacctg

SEQ ID NO: 43652 - DNA, 75 bp, synthetic construct
  source 1..75: mol_type = other DNA
caatgtcatcacgattattatggggagcggtactgcacgcacagccataccgggcacttcagtgaggagggggtg

SEQ ID NO: 43653 - DNA, 75 bp, synthetic construct
  source 1..75: mol_type = other DNA
atggcaccagctacacggttagcgcctccgcgcaggacagcgccggaaacagcgccacggcctcgcgcagcgtgg

SEQ ID NO: 43654 - DNA, 75 bp, synthetic construct
  source 1..75: mol_type = other DNA
atgaatgttttcgaaatggaagggtttcttcgcgggaaatgtgtaccgcgagatctgaaagtgaacgaaacaaat

SEQ ID NO: 43655 - DNA, 75 bp, synthetic construct
  source 1..75: mol_type = other DNA
aaaaaccagcctaaaccgggtgccaactcccgcaatggctattccacaaagaccgttatcaccggtgatggcccc

SEQ ID NO: 43656 - DNA, 75 bp, synthetic construct
  source 1..75: mol_type = other DNA
ggaactttgattacagagccaaagtcgacgaccgtaattatgcactgcaggaaagggagtttaacgccaaccaga

SEQ ID NO: 43657 - DNA, 75 bp, synthetic construct
  source 1..75: mol_type = other DNA
accgtttatttaataggttttcagttttccaaacaacttgctgcaatacttctctctacctttgccggccacctg

SEQ ID NO: 43658 - DNA, 75 bp, synthetic construct
  source 1..75: mol_type = other DNA
cttgctgtttacctggattgtcctgctcggtgctgccgttgccgccctgtttgccaatgatggcgcggcgcttat

SEQ ID NO: 43659 - DNA, 75 bp, synthetic construct
  source 1..75: mol_type = other DNA
ccaccgcgtaaaaccattgggaagaaatcttgcgggtggttgttaagtgaccttctgtggtggattactgaacgt

SEQ ID NO: 43660 - DNA, 75 bp, synthetic construct
  source 1..75: mol_type = other DNA
agcagcgcgttgaagaagaacgccagcgccatatccgtgctgcccgtgccagaacgccgggcgtgtcacgcgtgc

SEQ ID NO: 43661 - DNA, 75 bp, synthetic construct
  source 1..75: mol_type = other DNA
gataaaccggaaccagtggcgaaagtgtgctatgtgcagatggtgaagcagttcctgaatcgtgacccgttcgaa

SEQ ID NO: 43662 - DNA, 75 bp, synthetic construct
  source 1..75: mol_type = other DNA
aagctatgcttgtctgacaccggaactggtagcgcagtttggtttaaaagaagacgtggcgaaaaatctgcaatg

SEQ ID NO: 43663 - DNA, 75 bp, synthetic construct
  source 1..75: mol_type = other DNA
acgtacagacagttaccgggattttattcccgacagctgttcgtccggcacccttttcccttttttcatatagcc

SEQ ID NO: 43664 - DNA, 75 bp, synthetic construct
  source 1..75: mol_type = other DNA
atgacagtctttgtaatgcatatcccggtcggtacagttatgagcgcaaagatgctgtccgtaccttctgaccag

SEQ ID NO: 43665 - DNA, 75 bp, synthetic construct
  source 1..75: mol_type = other DNA
aaccagacccgactcccgatccaacgccgacacccgttccggagaaacgcatcacgccttctacggcagccgtac

SEQ ID NO: 43666 - DNA, 75 bp, synthetic construct
  source 1..75: mol_type = other DNA
atatcaagctgaatgattgtgataccaatgtttccagtaatgcagctgttgcattcctgggtactactgtcacca

SEQ ID NO: 43667 - DNA, 75 bp, synthetic construct
  source 1..75: mol_type = other DNA
tccccgccattgataaaccgctggaggaagaatgggcattacgtaaaacggatctgccgggaaaccgcacgttgc

SEQ ID NO: 43668 - DNA, 75 bp, synthetic construct
  source 1..75: mol_type = other DNA
gacaagcattggcctggctggaagggcattcatgcagcgacgacagactgggtaaagccgacaatcaaccagtac

SEQ ID NO: 43669 - DNA, 75 bp, synthetic construct
  source 1..75: mol_type = other DNA
acggaagaactgacgcgcctgtctctcgccagagccgaaggttttgataaggtggagatcaccggcccgcgtctg

SEQ ID NO: 43670 - DNA, 75 bp, synthetic construct
  source 1..75: mol_type = other DNA
acgcggtttacgctgacggggcatccgcagaagatgctgaaccgtgaatggcaggtggtacagagtattctgtca

SEQ ID NO: 43671 - DNA, 75 bp, synthetic construct
  source 1..75: mol_type = other DNA
cgtcaacaaaatctatgaccctgccgcaggctctggctcactactgcttcaggcgaagaagcactttgataacca

SEQ ID NO: 43672 - DNA, 75 bp, synthetic construct
  source 1..75: mol_type = other DNA
cttttaccggcgaacgtactttaccgccagaagtgatggccaatatcgaagcgaaatatcatcttaatgatccga

SEQ ID NO: 43673 - DNA, 75 bp, synthetic construct
  source 1..75: mol_type = other DNA
gagcgccaatggtcgttgggtctacaaattacaaggtagtaccaatagccagggtgaatactccgccgcgctcgg

SEQ ID NO: 43674 - DNA, 75 bp, synthetic construct
  source 1..75: mol_type = other DNA
aacatccggtcgtttggacgtggtgctcagtcgtctggctgactataccgagcagcgccagatcatgcgaaaccg

SEQ ID NO: 43675 - DNA, 75 bp, synthetic construct
  source 1..75: mol_type = other DNA
gaactgacggcgctgtggttccagcatgtgatgttactgaaaccttgcgtgctctgtatttatgaacgctgcgcg

SEQ ID NO: 43676 - DNA, 75 bp, synthetic construct
  source 1..75: mol_type = other DNA
ccagcgcattgcggctgatatcctgagactgagaaagagcggaatgccggtggtgacaacgtccgtggaagcgag

SEQ ID NO: 43677 - DNA, 75 bp, synthetic construct
  source 1..75: mol_type = other DNA
aatgtggattacgtcaccagttttgaactgccttttcggctgcttttaacccgcacgccgcaactgattgccgcg

SEQ ID NO: 43678 - DNA, 75 bp, synthetic construct
  source 1..75: mol_type = other DNA
atcgttgaagacgcaggcctggtgtggtctgtcgtagaaagcgtaccaattcacgaagatatcaaaacccacact

SEQ ID NO: 43679 - DNA, 75 bp, synthetic construct
  source 1..75: mol_type = other DNA
ggggcgactggcggcgaatgctgtcagaaatgtcagccacagaactgggagagtggggggattatttccggcggc

SEQ ID NO: 43680 - DNA, 75 bp, synthetic construct
  source 1..75: mol_type = other DNA
ctaaacaggatcagaaagaacacggtattattctgggccgtagcaggcttcccgaaaaaagcaaccggggccgac

SEQ ID NO: 43681 - DNA, 75 bp, synthetic construct
  source 1..75: mol_type = other DNA
tcaaaaacgccgttgccgttacggttttatactttttgggaaagagggagagaagtttctttttggtgagaaaag

SEQ ID NO: 43682 - DNA, 75 bp, synthetic construct
  source 1..75: mol_type = other DNA
ccttgccgcaacggtttgtgattttgcgtttactgcttttgtcgccatgtggtgtacccctcataaaaaacaaat

SEQ ID NO: 43683 - DNA, 75 bp, synthetic construct
  source 1..75: mol_type = other DNA
atgcgtacacgaattgactatctggcggataaatactgctttacagaactgaatgagtctccccgccttctccgg

SEQ ID NO: 43684 - DNA, 75 bp, synthetic construct
  source 1..75: mol_type = other DNA
ggaatacacccgtaacctttttgacgtgatgtacggcgctaaaaagcctattacgccggaaaagaatttcatgtc

SEQ ID NO: 43685 - DNA, 75 bp, synthetic construct
  source 1..75: mol_type = other DNA
agctcaaaatcagaagtacagaacgagattataaatacatttccagaattactggcaggtatgctgggttgtctc

SEQ ID NO: 43686 - DNA, 75 bp, synthetic construct
  source 1..75: mol_type = other DNA
agttacctgcagtgccagaatgtgcactgctcggcgacattcaaaacgcatgagtccatctttgaagtgatacgt

SEQ ID NO: 43687 - DNA, 75 bp, synthetic construct
  source 1..75: mol_type = other DNA
atgaatgttaattacctgaatgattcagatctggattttctccagcattgtagtgaggaacagttggcaaatttc

SEQ ID NO: 43688 - DNA, 75 bp, synthetic construct
  source 1..75: mol_type = other DNA
tttcctcaagttatggcgatagccaacctcaacagcaattgtccgatgacgaattaattagcaaatatctcggag

SEQ ID NO: 43689 - DNA, 75 bp, synthetic construct
  source 1..75: mol_type = other DNA
aggtgtagagactgttctgacactactggataaagaaaaccaggatttattacaactagagggcaggaagcgcct

SEQ ID NO: 43690 - DNA, 75 bp, synthetic construct
  source 1..75: mol_type = other DNA
tggctctcgacacccgcagttgccgtactgaaatcatgccagcaacaactgacacagccctcaaaccatgccagc

SEQ ID NO: 43691 - DNA, 75 bp, synthetic construct
  source 1..75: mol_type = other DNA
ggcgacaacatcctgaccaactctcaggatatcgccctgctgcgtgcgaaagtgggcatggtgttccagaaaccg

SEQ ID NO: 43692 - DNA, 75 bp, synthetic construct
  source 1..75: mol_type = other DNA
gatcagtcattacctgtcggaaaggtcatcgatatagcgggatgttgcttcatcattggtgatattgaccacacc

SEQ ID NO: 43693 - DNA, 75 bp, synthetic construct
  source 1..75: mol_type = other DNA
tgccttacccgccgacggtgaacacctactggcgccgtcgtggtagtacatattttgtatcaaaagctggtgagc

SEQ ID NO: 43694 - DNA, 75 bp, synthetic construct
  source 1..75: mol_type = other DNA
agcgtctgtgcggttgcggaaagcatgatggccgtgaacacgggcagtcgcttacagtacaactgcgactgggac

SEQ ID NO: 43695 - DNA, 75 bp, synthetic construct
  source 1..75: mol_type = other DNA
tggtgtcctgagcgacgagctgaaacagcgccacattgagcgcgtggcacgccgggagctggtacaggaatatga

SEQ ID NO: 43696 - DNA, 75 bp, synthetic construct
  source 1..75: mol_type = other DNA
atctctgtgggttcttctaccaaccagcgccgtatcaccaacgttgctgccggtgttaatgccaccgatgcggtt

SEQ ID NO: 43697 - DNA, 75 bp, synthetic construct
  source 1..75: mol_type = other DNA
atccgccaacggtgaacacctactggcgacgtcgtgacaacacatattttgtatcaaaagccggtgagcgttatc

SEQ ID NO: 43698 - DNA, 75 bp, synthetic construct
  source 1..75: mol_type = other DNA
tatttggttgatggatgttcaagaaagttcgtttgcgaacactataatataaataatggatacttaacagtgagc

SEQ ID NO: 43699 - DNA, 75 bp, synthetic construct
  source 1..75: mol_type = other DNA
atgcgtatagagtttgttttgccttatccgccgacggtgaatacttactggcgacgtcgtggcagcacatatttt

SEQ ID NO: 43700 - DNA, 75 bp, synthetic construct
  source 1..75: mol_type = other DNA
tgccttacccgccgacggtgaatacctactggcgacgtcgtggcagcacatattttgtatcaaaagccggtgagc

SEQ ID NO: 43701 - DNA, 75 bp, synthetic construct
  source 1..75: mol_type = other DNA
tttaaatgatggaagcccatacttggaagtgcatcatgtaattcccctgtcttcaggtggtgctgatacaacaga

SEQ ID NO: 43702 - DNA, 75 bp, synthetic construct
  source 1..75: mol_type = other DNA
atgactgaacgcatagaatttgttttgccttacccgccgacggtgaatacttactggcgacgtcgtggcaacaca

SEQ ID NO: 43703 - DNA, 75 bp, synthetic construct
  source 1..75: mol_type = other DNA
cgcatcttatagatcaagctatagattttatggcatcaacccaggcgttccgagagtatttgaaaaaactccccc

SEQ ID NO: 43704 - DNA, 75 bp, synthetic construct
  source 1..75: mol_type = other DNA
cggggctgctcatagacgacgagcagtttgatgaaattaatattgtgcgcggtcagcttgttcctggtgggcggt

SEQ ID NO: 43705 - DNA, 75 bp, synthetic construct
  source 1..75: mol_type = other DNA
aacctgtccggaaggctggcgataaagattattgcagagccaccggataaacgtcgtcgtgacctggacaatatc

SEQ ID NO: 43706 - DNA, 75 bp, synthetic construct
  source 1..75: mol_type = other DNA
aaagtgaatggccactcgctgagcgctgatatcagtgtgaccgcacaggatattttcaacggtcaggcggtgggt

SEQ ID NO: 43707 - DNA, 75 bp, synthetic construct
  source 1..75: mol_type = other DNA
gaaggcacatcatcacctgctgagtctgtatgcagagcatgagctggaacacgccctgaatgaaacctgtgaggc

SEQ ID NO: 43708 - DNA, 75 bp, synthetic construct
  source 1..75: mol_type = other DNA
tcagccaaataacgcacaggcgctggccgggaagaattatccagaagcactggctggttctctggaagtgtataa

SEQ ID NO: 43709 - DNA, 75 bp, synthetic construct
  source 1..75: mol_type = other DNA
cggcagacattctggagtcagatgagaatggcattatcccggagcaggccagggtaatcacgcaggtggtgatac

SEQ ID NO: 43710 - DNA, 75 bp, synthetic construct
  source 1..75: mol_type = other DNA
tccaccatgcagtacataatccggatcccgattcactgtttggcgtacagggttgctctaccgatccaacttttc

SEQ ID NO: 43711 - DNA, 75 bp, synthetic construct
  source 1..75: mol_type = other DNA
cgccataataccgaagcacagcatatgacaattgacacaaatggtcagatggtcatgaagagcaaacaacagtta

SEQ ID NO: 43712 - DNA, 75 bp, synthetic construct
  source 1..75: mol_type = other DNA
tgcatttagcaaactcaaagatggtgattctgttgccgttgctgctcagaaatatacttataacgcatcgaccaa

SEQ ID NO: 43713 - DNA, 75 bp, synthetic construct
  source 1..75: mol_type = other DNA
atgatttataacgcagcggaaaaggatggttactttttacagcgcggtatgctgctggcactgatgacaggccag

SEQ ID NO: 43714 - DNA, 75 bp, synthetic construct
  source 1..75: mol_type = other DNA
tgacaattgacacaaatggtcagatggtcatgaagagcaaacaacagttaaaagaagattttggtatctcagcaa

SEQ ID NO: 43715 - DNA, 75 bp, synthetic construct
  source 1..75: mol_type = other DNA
attttttcagaactcatgaaagcgaaattctccggagtcagtggtcaatatgcttatagtatatatctctgttcc

SEQ ID NO: 43716 - DNA, 75 bp, synthetic construct
  source 1..75: mol_type = other DNA
tctatgacacagacgtggacggtgactatctaaaaaaattcatttcgacgcgtatgagcagaccatccagcgcca

SEQ ID NO: 43717 - DNA, 75 bp, synthetic construct
  source 1..75: mol_type = other DNA
acgcagcaatatcactaccgcaaaagttgaacatggcgtcgataccgcgtggctggtcgatcaccacacagaaga

SEQ ID NO: 43718 - DNA, 75 bp, synthetic construct
  source 1..75: mol_type = other DNA
tcagttcattgggcatgctgttcggtgccatcgctttaatgatggggattatccacttttcattcggccctttct

SEQ ID NO: 43719 - DNA, 75 bp, synthetic construct
  source 1..75: mol_type = other DNA
agaggccggttcagagatgcggatgcgtaccatttggaccaggtctttccgctgctgatgaaacaactggagctc

SEQ ID NO: 43720 - DNA, 75 bp, synthetic construct
  source 1..75: mol_type = other DNA
gcgtgatggtggtgatgagttcagtcaggcatggaaacaggaagtaaaaatcagcgagggagaaaaaccggaatg

SEQ ID NO: 43721 - DNA, 75 bp, synthetic construct
  source 1..75: mol_type = other DNA
aagagtttcgaaaagccagtgtcgaatcggagtctaccaaagccgcaataaacactcttattcgcatggggttca

SEQ ID NO: 43722 - DNA, 75 bp, synthetic construct
  source 1..75: mol_type = other DNA
aaatggttgccccggcgctggcgctgctggtgaccgccgccagttttacaacccacgcatcggtaacgcccgacc

SEQ ID NO: 43723 - DNA, 75 bp, synthetic construct
  source 1..75: mol_type = other DNA
gcagcaactaaagcagcaaccactgctgacccactgaaagcgctggacgatgcaatcagctctatcgacaaattc

SEQ ID NO: 43724 - DNA, 75 bp, synthetic construct
  source 1..75: mol_type = other DNA
gtccggtgaagcgtcgcttactggaagaagtggtgtacgtcataacggaaacggtgagaaaaacagcgaggcaaa

SEQ ID NO: 43725 - DNA, 75 bp, synthetic construct
  source 1..75: mol_type = other DNA
aaattttaacgttgtgctggagagaaccgtccgtgaactcaacggtgaaagctgtatttcgctggaagaagcgcc

SEQ ID NO: 43726 - DNA, 75 bp, synthetic construct
  source 1..75: mol_type = other DNA
tccgtttgcgcaaacttactgccgccgataatcctgctatcgccagcgtcatccgtcaggtttccgcagagtatg

SEQ ID NO: 43727 - DNA, 75 bp, synthetic construct
  source 1..75: mol_type = other DNA
agcttgagtacaagcagctctggcgtggcggtcaggtgcttgctgttccgccagcgtatacaagccagcgttgcg

SEQ ID NO: 43728 - DNA, 75 bp, synthetic construct
  source 1..75: mol_type = other DNA
tctttcaatgcaggtagtaaaaggtttgtcatttatcaatcagcacaagataagaatcttcaggttgatattgta

SEQ ID NO: 43729 - DNA, 75 bp, synthetic construct
  source 1..75: mol_type = other DNA
ctgtttttttattactggaatacaatgcgtgtgcagcaaaaacaggggggctaacgcttgaacaaagaatggcat

SEQ ID NO: 43730 - DNA, 75 bp, synthetic construct
  source 1..75: mol_type = other DNA
atgaatcttgatgacattatcaacagcatgacgcctgaggtataccagcgtttgtcgaccgccgttgaactgggg

SEQ ID NO: 43731 - DNA, 75 bp, synthetic construct
  source 1..75: mol_type = other DNA
actgaacgaattctctgatggcaacaaagtccgtctgggtgatgagtctgtcaatgccagcattgacggtgcagc

SEQ ID NO: 43732 - DNA, 75 bp, synthetic construct
  source 1..75: mol_type = other DNA
tgcgtgtgcagcaaaaacaggggggctaacgcttgaacaaagaatggcattgctggaagaacgcctggaagctgc

SEQ ID NO: 43733 - DNA, 75 bp, synthetic construct
  source 1..75: mol_type = other DNA
aagataatccgcagcgcacattaaaagaacagaacattttcgcggtgctgaagcagttaggattcagttctgacc

SEQ ID NO: 43734 - DNA, 75 bp, synthetic construct
  source 1..75: mol_type = other DNA
tcaacaaaaagccttttacgttcattctggaaacagaacgtggtcttaacctttccattcaggccgttccccgtg

SEQ ID NO: 43735 - DNA, 75 bp, synthetic construct
  source 1..75: mol_type = other DNA
tgaaaaggaaccactgacaatcgatccggcagactcctctgtattaaccggggaatacagtgtaatcgataattc

SEQ ID NO: 43736 - DNA, 75 bp, synthetic construct
  source 1..75: mol_type = other DNA
gttatcgccgtgatgtggcgctaattgttcgccagcagcggttgaaattaaacctgtccggaaggctggcgataa

SEQ ID NO: 43737 - DNA, 75 bp, synthetic construct
  source 1..75: mol_type = other DNA
taacgagaacgtcaacctgattaaatccatacctgaacactatcacacacaggttgagacgatagtcatgcagtc

SEQ ID NO: 43738 - DNA, 75 bp, synthetic construct
  source 1..75: mol_type = other DNA
cgccaccctggattttggtaacccgggacaactggacgctgccggcgtggtcacccgcggtgccggtgatggtat

SEQ ID NO: 43739 - DNA, 75 bp, synthetic construct
  source 1..75: mol_type = other DNA
cgtctgtacgaaaacggagccacggttcagggctgttctgcttttcaggccggacaggtcgccaccctggatttt

SEQ ID NO: 43740 - DNA, 75 bp, synthetic construct
  source 1..75: mol_type = other DNA
acaccatcaccgttaacgctgctggtaacgcggaaaacaccgttaaaaacatcgcatttaattatattgtgaggc

SEQ ID NO: 43741 - DNA, 75 bp, synthetic construct
  source 1..75: mol_type = other DNA
tgacgcaggataaccattccgtgaaatatccggtggattttgccgctaagggccagtttcgttttcgtgcgcagc

SEQ ID NO: 43742 - DNA, 75 bp, synthetic construct
  source 1..75: mol_type = other DNA
ttacaaggcaaaaggacataacagaatgggacaaattttcaggaaagtactgattgatgttttccgggaggccca

SEQ ID NO: 43743 - DNA, 75 bp, synthetic construct
  source 1..75: mol_type = other DNA
acttgccagtggtgcagacagggatgctgcggtgcgggaggctcttctttgtgatttcaatacgccaccctttaa

SEQ ID NO: 43744 - DNA, 75 bp, synthetic construct
  source 1..75: mol_type = other DNA
ctgactttaacaccaatggttttggtgcgatggttaaaggcggttacacatggaaagacggtaatggcctgttta

SEQ ID NO: 43745 - DNA, 75 bp, synthetic construct
  source 1..75: mol_type = other DNA
aagatgtggtatcggtgctggaagattacaaggcaaaaggacataacagaatgggacaaattttcaggaaagtac

SEQ ID NO: 43746 - DNA, 75 bp, synthetic construct
  source 1..75: mol_type = other DNA
gggctaccctgcaccgtgacgccctgtttcggggcacgtctggtgcaggagggcaatcagttgcattaccttgcc

SEQ ID NO: 43747 - DNA, 75 bp, synthetic construct
  source 1..75: mol_type = other DNA
cgttcacccggaagcctatccggtggtggaacgcattctggcagcaacacagcaggcactgaaagatctgatggg

SEQ ID NO: 43748 - DNA, 75 bp, synthetic construct
  source 1..75: mol_type = other DNA
taactgctcgaataactacggtccttatcactttccagaaaaattgattccgttggtcattcttaatgcgctgga

SEQ ID NO: 43749 - DNA, 75 bp, synthetic construct
  source 1..75: mol_type = other DNA
ttatatcgaatgtgattacaatcggtggcggcggcacagttggtgtggcggcctcagtccggaacaatttgaaaa

SEQ ID NO: 43750 - DNA, 75 bp, synthetic construct
  source 1..75: mol_type = other DNA
gaaggggcgaaattccgcgactatttcgatcatcacgaaccgctgtccacggtgccttctcaccgcgcgctggcg

SEQ ID NO: 43751 - DNA, 75 bp, synthetic construct
  source 1..75: mol_type = other DNA
tggcgatgcccgatgctgatgcagttgaatttgaaccgcctcgtattacggttagtttaaaacctgcggagtttt

SEQ ID NO: 43752 - DNA, 75 bp, synthetic construct
  source 1..75: mol_type = other DNA
gagcaaatactaaacaaccccagatttgagaaatatgcgttgtggtttatgactgggaaaattgcgcctgaatcc

SEQ ID NO: 43753 - DNA, 75 bp, synthetic construct
  source 1..75: mol_type = other DNA
atgtttgcagatgaagaacttgttatggagttactgatcaacgcgggacaggcacgttctgatgcgatggaagcc

SEQ ID NO: 43754 - DNA, 75 bp, synthetic construct
  source 1..75: mol_type = other DNA
gaatcagttgattgccggtgaaaccctcttcaccggcaccatcaaccgcacggaggtccatccccgggaagtgat

SEQ ID NO: 43755 - DNA, 75 bp, synthetic construct
  source 1..75: mol_type = other DNA
tgctgtgcgcgctttctggctgcgcccagaacacgcctccctctgcctttagcggtaagggagaacccgtaaaca

SEQ ID NO: 43756 - DNA, 75 bp, synthetic construct
  source 1..75: mol_type = other DNA
ggacagcacagcgggggtaatttcaaaaatgacccgcagcgcgcatctgaagcaggtaaaaaaggtggcaagagc

SEQ ID NO: 43757 - DNA, 75 bp, synthetic construct
  source 1..75: mol_type = other DNA
acgcggaaaaatataacgagtgggtgaaaaaattttctgagcagattcttaaaatcactggcgacgagaatgtgg

SEQ ID NO: 43758 - DNA, 75 bp, synthetic construct
  source 1..75: mol_type = other DNA
tgtgacgttctctgttccggtcacaccacatacgttccgccattcctatgcgatgcacatgctgtatgccggtat

SEQ ID NO: 43759 - DNA, 75 bp, synthetic construct
  source 1..75: mol_type = other DNA
attctgataattcagccgtctttgccagcaggcacgggcggcgttttctcacattcaaatctgactggttccagc

SEQ ID NO: 43760 - DNA, 75 bp, synthetic construct
  source 1..75: mol_type = other DNA
ccggtaaccggtgtggagtggcaatactgactggtgtccgtgctgatgaatcgctcaatcgctttatgggactgg

SEQ ID NO: 43761 - DNA, 75 bp, synthetic construct
  source 1..75: mol_type = other DNA
tgcacctgtgcggcctgtcacgctcgaccatctacgaactcatccgtaagggggaatttccgccgcaggtgagtc

SEQ ID NO: 43762 - DNA, 75 bp, synthetic construct
  source 1..75: mol_type = other DNA
agtcaataataagcacgctaccactggtcccggtgaaacccagtttgcccgagccatgcgctgcctcaacattac

SEQ ID NO: 43763 - DNA, 75 bp, synthetic construct
  source 1..75: mol_type = other DNA
tctggagccggaaacctgggccaggatgtgtgaacgggtgtcaggggctgccagcggggcgctttatgccaatga

SEQ ID NO: 43764 - DNA, 75 bp, synthetic construct
  source 1..75: mol_type = other DNA
acaaccgccgcgccgagcgtctgcgcgagctggcagaaaataatccgctgggtgattacctgcgctttgctgcgc

SEQ ID NO: 43765 - DNA, 75 bp, synthetic construct
  source 1..75: mol_type = other DNA
atgtgggtcatcgagacaactgacacctttgatgagtggttcgatgcactggatgataccgatagagccaacgtg

SEQ ID NO: 43766 - DNA, 75 bp, synthetic construct
  source 1..75: mol_type = other DNA
atgggtgagcgttctcagctggaggcattccagactgcggcgcagcaaatctcagcgcaagggctggattctctg

SEQ ID NO: 43767 - DNA, 75 bp, synthetic construct
  source 1..75: mol_type = other DNA
accgcaggggcgacaccgtggcagcatatgaccaaaaggcagcgcaaaaaccgccgacgcgttaaccgcctcact

SEQ ID NO: 43768 - DNA, 75 bp, synthetic construct
  source 1..75: mol_type = other DNA
ccgcaaacaggccgaagccgttgccgcacagtaccggaatgtctttatcgaggatgatcagggaacgcattttcg

SEQ ID NO: 43769 - DNA, 75 bp, synthetic construct
  source 1..75: mol_type = other DNA
aagtactcaaagggctgaaagtcgcgttgagtaaagccgaaggtgagaagtgcccacgctgctggcactacaccc

SEQ ID NO: 43770 - DNA, 75 bp, synthetic construct
  source 1..75: mol_type = other DNA
caatgcgctcaaaggcgatggcttgatgcgagtgcagctgtcatcctccgacaagatgtttggctttacccatgc

SEQ ID NO: 43771 - DNA, 75 bp, synthetic construct
  source 1..75: mol_type = other DNA
tccgtcttcatattgtttgcgatgtccctgatgaacttattgatttcacgtttgaatggaaagggctgaagaaat

SEQ ID NO: 43772 - DNA, 75 bp, synthetic construct
  source 1..75: mol_type = other DNA
ttatacccctgacacacaggtgcaggagaaagacggcagagtttactggcaactgaaaagtcatgccggaacaac

SEQ ID NO: 43773 - DNA, 75 bp, synthetic construct
  source 1..75: mol_type = other DNA
aaccgaagggcatttacggcacgccgcagaaaacagcacaggcggcgcagcagcagaataaaaccacatcggcgc

SEQ ID NO: 43774 - DNA, 75 bp, synthetic construct
  source 1..75: mol_type = other DNA
ggggcgggttccctgacgttccgtgataattacacagtaacaacctctaacggaagtacctggaccggtgccggt

SEQ ID NO: 43775 - DNA, 75 bp, synthetic construct
  source 1..75: mol_type = other DNA
cgatattgaaatatattgatgaaaacattgaagttttccctattaatataaatgttctggttaaatattcagggt

SEQ ID NO: 43776 - DNA, 75 bp, synthetic construct
  source 1..75: mol_type = other DNA
gtttaaaaaaaaatccggctacacaccattacagtacagaaaatataaagtatggacatttaaatatcaaacagg

SEQ ID NO: 43777 - DNA, 75 bp, synthetic construct
  source 1..75: mol_type = other DNA
gcggtagatgacgaagcggaactgctgctgccggataacctgacccgtaccgactccattctgcgtgggctggtt

SEQ ID NO: 43778 - DNA, 75 bp, synthetic construct
  source 1..75: mol_type = other DNA
ggctataagtctgttcggctggattgccgttaccgctaatatgtttggtcattcggtgcatgacttactggcgca

SEQ ID NO: 43779 - DNA, 75 bp, synthetic construct
  source 1..75: mol_type = other DNA
cgagcgatacacaaaacagcaacaccagttaagactgcacggcatcccatttgtaatcggtcctaaaaacgaacc

SEQ ID NO: 43780 - DNA, 75 bp, synthetic construct
  source 1..75: mol_type = other DNA
cagttaaggttgcacggtatcccatttgtacccggtcctaaaaacgaaccaatagttcttcgcagtgatgtcccg

SEQ ID NO: 43781 - DNA, 75 bp, synthetic construct
  source 1..75: mol_type = other DNA
tggatatccgggtaccggaccatctgatagttggtggcagtcaagttttctcctttgcagaacacggtctgcttt

SEQ ID NO: 43782 - DNA, 75 bp, synthetic construct
  source 1..75: mol_type = other DNA
acaagagtccattatctaccgaaagtcattacttgagaaaagccctgatgaactcgtcgctctggtcataaaaca

SEQ ID NO: 43783 - DNA, 75 bp, synthetic construct
  source 1..75: mol_type = other DNA
atctggcaaaaatgcagtgggtggaaaacgtgaaaaccggtaattatcagtcttggattgaacagaactacatgg

SEQ ID NO: 43784 - DNA, 75 bp, synthetic construct
  source 1..75: mol_type = other DNA
atggcgacacaatccagtcctgttattactgatatgaaagtcattccggtggccgggcatgacagcatgttgctt

SEQ ID NO: 43785 - DNA, 75 bp, synthetic construct
  source 1..75: mol_type = other DNA
ccgatcgtgacgggttatgcctgttcgccaaacgcctggaacggggccgcttcgtctggccggtaacccgggaag

SEQ ID NO: 43786 - DNA, 75 bp, synthetic construct
  source 1..75: mol_type = other DNA
aggcgtgcgtgcggttcgtgacctgaaagcgctctacccgcacaaaatcgtactggcagacgccaaaattgccga

SEQ ID NO: 43787 - DNA, 75 bp, synthetic construct
  source 1..75: mol_type = other DNA
aaagcgctttacccgcacaaaatcgtactcgcagacgccaaaattgccgatgcgggcaaaattctttctcgtatg

SEQ ID NO: 43788 - DNA, 75 bp, synthetic construct
  source 1..75: mol_type = other DNA
atacatcgatgcgggattttataaccgggtaacaggcgaggaaaaaacggagacgcacgacgaggaattaattgc

SEQ ID NO: 43789 - DNA, 75 bp, synthetic construct
  source 1..75: mol_type = other DNA
atctcgatgagcggaggctaatgctacagtggtgggctgactatcttgatgccaatcgagaaagagcggtcaggc

SEQ ID NO: 43790 - DNA, 75 bp, synthetic construct
  source 1..75: mol_type = other DNA
cgtccgggagtggttgcggctgcatatggccgcgcttgaacgggaagagttccgggtgctgtatctgaaccagca

SEQ ID NO: 43791 - DNA, 75 bp, synthetic construct
  source 1..75: mol_type = other DNA
acccgtccggtgaagtcacacccagtaaggcagaccgccttatcacggaacgtctggtacaggcactgggcctgg

SEQ ID NO: 43792 - DNA, 75 bp, synthetic construct
  source 1..75: mol_type = other DNA
atcacatgctgcgcaccaaactgccgcgcggtattccgttgtgtatccatctgatgtccagtcagctggttggtg

SEQ ID NO: 43793 - DNA, 75 bp, synthetic construct
  source 1..75: mol_type = other DNA
ttcccggaggtatccggatgtgctgccagccttctcagttaaccgatgttttccgggctcttcgccatgctgacg

SEQ ID NO: 43794 - DNA, 75 bp, synthetic construct
  source 1..75: mol_type = other DNA
gccagtggtgatggatggatgaaattacccaacgggaaaatcctgcaatatggtcgtggtgcggttacgccgaca

SEQ ID NO: 43795 - DNA, 75 bp, synthetic construct
  source 1..75: mol_type = other DNA
gtgaaagaaagtaatcagcgatggtgctctgacgggttcgagttccgctgtgataacggagaaaaactgcgagtc

SEQ ID NO: 43796 - DNA, 75 bp, synthetic construct
  source 1..75: mol_type = other DNA
cctcttatgcccgtgtaggcgtgaaaggtgaaactcagatcaaccctgaattgactggttacggtcagtttgaac

SEQ ID NO: 43797 - DNA, 75 bp, synthetic construct
  source 1..75: mol_type = other DNA
aggtccaacactaaccggttttaattccgcttacagaactgcatcaaccagctccacagtatcgatgaattacag

SEQ ID NO: 43798 - DNA, 75 bp, synthetic construct
  source 1..75: mol_type = other DNA
aacgcaagcagtacctgtggctggggattgtggttgtcggtgcagcctccgcgattggtggggcactgtatctgt

SEQ ID NO: 43799 - DNA, 75 bp, synthetic construct
  source 1..75: mol_type = other DNA
acccttagagaacatactgcattaattaaggaatattacggctatcatgaatttggtgattttccatggtctttc

SEQ ID NO: 43800 - DNA, 75 bp, synthetic construct
  source 1..75: mol_type = other DNA
accggcctgatgcagggatgcccgaatggtgtacagacgctcctgggcagccgtatcagtattaacggtaacctg

SEQ ID NO: 43801 - DNA, 75 bp, synthetic construct
  source 1..75: mol_type = other DNA
cggaaattttctgaccgaaattggcgaagcccaacaaggcactcagcaagatgaagtcattattgctgtaggccc

SEQ ID NO: 43802 - DNA, 75 bp, synthetic construct
  source 1..75: mol_type = other DNA
ttggtgattggtgtctatccaggtatatcactggctctggcgcgtcagaaacgggatgaagcacgtaaactcctc

SEQ ID NO: 43803 - DNA, 75 bp, synthetic construct
  source 1..75: mol_type = other DNA
gagctgcattgaagcattccatgaggcagggaacagcctgaatcttaccgctttccgccgtaatcagtgggaggc

SEQ ID NO: 43804 - DNA, 75 bp, synthetic construct
  source 1..75: mol_type = other DNA
atgaaagccttcagagctgcatggttcttattttcagcgccaatagcaggcttattattgaaggttccaaaagtc

SEQ ID NO: 43805 - DNA, 75 bp, synthetic construct
  source 1..75: mol_type = other DNA
gttcgtacagctggccacgctgaagcaacgtgccgagaaggctgccagaacagcaggacgtctgcccgccggcag

SEQ ID NO: 43806 - DNA, 75 bp, synthetic construct
  source 1..75: mol_type = other DNA
agaacccgtgccatctacaatcccctgtatgacctgatgtaccgtgccggcgtgccgttacgcaacatgcgggtc

SEQ ID NO: 43807 - DNA, 75 bp, synthetic construct
  source 1..75: mol_type = other DNA
tgttatcccttcttggtggggtgtattcgtatttgagtgggctatgtgaaaaccgttacgagtcttcatgcaaga

SEQ ID NO: 43808 - DNA, 75 bp, synthetic construct
  source 1..75: mol_type = other DNA
cagcctctggatgcaactttaaccgctctcgcggcccttgcgactggtgcaaacaaactgccttattttactggt

SEQ ID NO: 43809 - DNA, 75 bp, synthetic construct
  source 1..75: mol_type = other DNA
gatggtccatgatgaactgccaaaatatctgctggctccggaagtgagtgccctgctccattacgtcccggatct

SEQ ID NO: 43810 - DNA, 75 bp, synthetic construct
  source 1..75: mol_type = other DNA
cttgaaaaatacaaacgaagcaacgatgagaaataaaaaggtagaatgcttcaaactgtggccaacttttcgaga

SEQ ID NO: 43811 - DNA, 75 bp, synthetic construct
  source 1..75: mol_type = other DNA
tgtgctacaactgagatttgacgagtcactgtcgtacccgcgcatttctgcgcagaccggtatcagcaaaaccgc

SEQ ID NO: 43812 - DNA, 75 bp, synthetic construct
  source 1..75: mol_type = other DNA
tcagggataacacacggaacacctcgatgaatctgccagtagccatcgattaccctgccgctctcgccctgcgtc

SEQ ID NO: 43813 - DNA, 75 bp, synthetic construct
  source 1..75: mol_type = other DNA
gcggtcatggctttcgcccctcgagatagcctgttacatgcgcccgatatgtatatgaaaaagctggttgttaat

SEQ ID NO: 43814 - DNA, 75 bp, synthetic construct
  source 1..75: mol_type = other DNA
aggtgtggcgacagccggtagacctgttgcacgacatttggacgatggattaacgcttgaagtaaatcgcacatg

SEQ ID NO: 43815 - DNA, 75 bp, synthetic construct
  source 1..75: mol_type = other DNA
taacggacaggaagagcgtccactgtcagagcgtgtaaaaacggatattaataaaaacaattttaatgatgttct

SEQ ID NO: 43816 - DNA, 75 bp, synthetic construct
  source 1..75: mol_type = other DNA
gtatcgttgcgggggcgtatgactacactctcgcgcgtggacaaggggcaaatagtggtaactggtatctgacca

SEQ ID NO: 43817 - DNA, 75 bp, synthetic construct
  source 1..75: mol_type = other DNA
tttactgacggaatgtctcaggtcgtcgaatcaacgacctcaggaaattatcgtaagaagactcgcattttctcc

SEQ ID NO: 43818 - DNA, 75 bp, synthetic construct
  source 1..75: mol_type = other DNA
gagaactggttagcggcgaaggggaaaaacagcctgtctataatccggcaacgggggacgttttactggagattg

SEQ ID NO: 43819 - DNA, 75 bp, synthetic construct
  source 1..75: mol_type = other DNA
acggcacatgtaaaattccagccttggcaggataataagtggagcagggtattgccacatttgcgtcaggctaga

SEQ ID NO: 43820 - DNA, 75 bp, synthetic construct
  source 1..75: mol_type = other DNA
attccgccgctgggttctggatattctcgatcgagaagttcaacaatccccaatcacaaaacaattcactgataa

SEQ ID NO: 43821 - DNA, 75 bp, synthetic construct
  source 1..75: mol_type = other DNA
gcgcggataacacatctcttctgaagaaagcgcgtgccatgtttgccgcccgtgagttcattctcagcgacagtg

SEQ ID NO: 43822 - DNA, 75 bp, synthetic construct
  source 1..75: mol_type = other DNA
ggcatccgcatagtgcactgggttatcgctcgccacgggaatatctacggcagcaagccagtaatgggttaagtg

SEQ ID NO: 43823 - DNA, 75 bp, synthetic construct
  source 1..75: mol_type = other DNA
ttcagcggggcagttttcattttttactgctcaccctggtattacgcgtggcggacattaccatcacagtaaaaa

SEQ ID NO: 43824 - DNA, 75 bp, synthetic construct
  source 1..75: mol_type = other DNA
ttggtaaatggtgtaagccaaactataattcttttatagcaactttttgctacaatatttccaatgatattgaga

SEQ ID NO: 43825 - DNA, 75 bp, synthetic construct
  source 1..75: mol_type = other DNA
gctggttactcatttgatgaaggcaggtttgagcattacccgcgctttgaactgaataagattgcccgtgaatgt

SEQ ID NO: 43826 - DNA, 75 bp, synthetic construct
  source 1..75: mol_type = other DNA
tatctagcttgatatatttgatttcaaaaattgagaataatgaaaaaataatagaatcaatttatatatcatctg

SEQ ID NO: 43827 - DNA, 75 bp, synthetic construct
  source 1..75: mol_type = other DNA
ttacggatggttaaaggaacagttgtggggacaactgacacattgcgtgaaatgcagcgttatgaacaactgagt

SEQ ID NO: 43828 - DNA, 75 bp, synthetic construct
  source 1..75: mol_type = other DNA
tcaaacgtcgccagggcagagcttaaaaaacatctgttgcctgactttgaagggtggattgaaggcaccctggca

SEQ ID NO: 43829 - DNA, 75 bp, synthetic construct
  source 1..75: mol_type = other DNA
ctctccccgcctgtgccgtcccttcagggcgcagactaaaggcaaggtggagaggatggtgcagtacgcccgcaa

SEQ ID NO: 43830 - DNA, 75 bp, synthetic construct
  source 1..75: mol_type = other DNA
atggtggctcaggcaggggcttcttcggaagcgccggtatccattcgagccggttacgccaaccctgtctgggct

SEQ ID NO: 43831 - DNA, 75 bp, synthetic construct
  source 1..75: mol_type = other DNA
tgcacatgatggggtctcatccgaacccgtgtgatcggcttcactcctggcagaataattacctggagcagtatt

SEQ ID NO: 43832 - DNA, 75 bp, synthetic construct
  source 1..75: mol_type = other DNA
tatcggccacgttgaccatggtaaaactaccctgaccgctgcaatcactaccgtactggctaaaacctacggcgg

SEQ ID NO: 43833 - DNA, 75 bp, synthetic construct
  source 1..75: mol_type = other DNA
gatgaatcttctaagattgcacttttccttgatcatgaaaccgcaaaaatcgataacctaatcgagaaacaacaa

SEQ ID NO: 43834 - DNA, 75 bp, synthetic construct
  source 1..75: mol_type = other DNA
atgaacgttttaagacacgttaatgcgattaacatgggagtgtgcattctaatttgggttattggatgtgcaaat

SEQ ID NO: 43835 - DNA, 75 bp, synthetic construct
  source 1..75: mol_type = other DNA
cgtgagacgctacggcaactggaagctaaaacaggtgcgacaagatatctgatgagcgttcttgccagagagctg

SEQ ID NO: 43836 - DNA, 75 bp, synthetic construct
  source 1..75: mol_type = other DNA
gcctatgaagcgcgcctggcacgctgccgccatgcgctggaaaaaatcgaaaacaggttagcgcgtttaacccgc

SEQ ID NO: 43837 - DNA, 75 bp, synthetic construct
  source 1..75: mol_type = other DNA
cggtgctgtttattgaagggataacggtaagcggcggcgaagccacgacccagctgccgtttgtggtggcgctgt

SEQ ID NO: 43838 - DNA, 75 bp, synthetic construct
  source 1..75: mol_type = other DNA
attcagacatggtgtgaggcacaccgtgatgaactgaccggcaacgggaaggtgaagttcgctaacctcaccacc

SEQ ID NO: 43839 - DNA, 75 bp, synthetic construct
  source 1..75: mol_type = other DNA
caggatttatcggatcgcatgtcagcaaacgcttgctggatgccggacaccaggtagtcggtattgataatctga

SEQ ID NO: 43840 - DNA, 75 bp, synthetic construct
  source 1..75: mol_type = other DNA
ggttgaaagttttcataaaagataatgatcccttttatgagcaagttctaaatgactttttaacttgcagggtta

SEQ ID NO: 43841 - DNA, 75 bp, synthetic construct
  source 1..75: mol_type = other DNA
acatcaaaacacgcctcaagtgttcactcttcagagggtatcccgtggcatgctctgcctgcttcacacagggga

SEQ ID NO: 43842 - DNA, 75 bp, synthetic construct
  source 1..75: mol_type = other DNA
tgtaaatgatgaagatgttgttgagtttgcactacgaatccacatgaaggaagtattaactgagtttgagtatta

SEQ ID NO: 43843 - DNA, 75 bp, synthetic construct
  source 1..75: mol_type = other DNA
gtgcgagcacacgcacccgcaccagtcgcgcagcgaacgataccggaactgtccgctggaaactctgccagtgca

SEQ ID NO: 43844 - DNA, 75 bp, synthetic construct
  source 1..75: mol_type = other DNA
acagcgccagcccgtcgttgggcagaggttatgatgctttgctaagccgcgttacggcggttgagcctctgcaat

SEQ ID NO: 43845 - DNA, 75 bp, synthetic construct
  source 1..75: mol_type = other DNA
cgatgaatgtcggttctaccacgcttgagagttgggtgcgccagctcaggcgagagcgtcaggggattgcgccct

SEQ ID NO: 43846 - DNA, 75 bp, synthetic construct
  source 1..75: mol_type = other DNA
acattaaggcacaacaggacaaaatggtcaattcttcgttatgtaaaaaagcgtcagtggatacatattttaatg

SEQ ID NO: 43847 - DNA, 75 bp, synthetic construct
  source 1..75: mol_type = other DNA
tatcggccacgttgaccaaggtaaaacgactctgaccgctgcaatcacgaccgtactggctaaaacctacggcgg

SEQ ID NO: 43848 - DNA, 75 bp, synthetic construct
  source 1..75: mol_type = other DNA
gcaacgtatccgcgagctggaaaagcaggttcgccgcctggaggaacaaaatacgatattaaaaaaggctactgc

SEQ ID NO: 43849 - DNA, 75 bp, synthetic construct
  source 1..75: mol_type = other DNA
gcagtaacgattactcactgcaggcgtggagtggccaggaaggcagcgaaatttaccatgttatcttcaatggta

SEQ ID NO: 43850 - DNA, 75 bp, synthetic construct
  source 1..75: mol_type = other DNA
gttatgttggcctgtctaatgggctcttaatctcacaaaatcataacgttgtagcattagatattttaccatctc

SEQ ID NO: 43851 - DNA, 75 bp, synthetic construct
  source 1..75: mol_type = other DNA
gcaattttgcgtcggctgattatatcgatgagcagggcaaggttcgcccgatgtacagcctgacgaaagatggct

SEQ ID NO: 43852 - DNA, 75 bp, synthetic construct
  source 1..75: mol_type = other DNA
ctggcaatccaggcggcttcacagaaatggacgatgccgttgaaggactggcgaatggcaatgagccgctttatt

SEQ ID NO: 43853 - DNA, 75 bp, synthetic construct
  source 1..75: mol_type = other DNA
tccggaccttatctggtcgttaccagacggcgaaatacgccgctacgacaggcaccagaacataatttgtcgtga

SEQ ID NO: 43854 - DNA, 75 bp, synthetic construct
  source 1..75: mol_type = other DNA
tgaatataatctgtcgcgagtgccggaagagcgaagctatgcagcgtgtactggctttctatcagggtaattttc

SEQ ID NO: 43855 - DNA, 75 bp, synthetic construct
  source 1..75: mol_type = other DNA
atgaatataagaaaactgttttgtccgggcaacactccccggattatattgtttttattcttttttgttgtttct

SEQ ID NO: 43856 - DNA, 75 bp, synthetic construct
  source 1..75: mol_type = other DNA
tgccgaccagagcgggaaaatcaccgctatctcacatgaaagctggtctggaaacctgcccggcggcacgccgga

SEQ ID NO: 43857 - DNA, 75 bp, synthetic construct
  source 1..75: mol_type = other DNA
tgaaaatgctattattgataactccaaaccagcatggatctacttcactggtggaggaagtcagagtttccgaga

SEQ ID NO: 43858 - DNA, 75 bp, synthetic construct
  source 1..75: mol_type = other DNA
taaacgcgctggtggttgcgaatacgggtctttcagcttgccggctttttcgacaagagttattggtatgtcacg

SEQ ID NO: 43859 - DNA, 75 bp, synthetic construct
  source 1..75: mol_type = other DNA
tttgggctcgtcggggattcgccgggtgctgcaaaaccatctacgctcaggactgggcgagatgaaaaactcgct

SEQ ID NO: 43860 - DNA, 75 bp, synthetic construct
  source 1..75: mol_type = other DNA
atgtatgattttgtgattattggcggtggcatcatcggcatgtcgaccgccatgcaactgattgatgtctacccg

SEQ ID NO: 43861 - DNA, 75 bp, synthetic construct
  source 1..75: mol_type = other DNA
attttctgtttgtcaccaccccgcgcacgatccacacctgcaatgcgccctccccggcagcgacatcagcaattc

SEQ ID NO: 43862 - DNA, 75 bp, synthetic construct
  source 1..75: mol_type = other DNA
atggatagcaaagaaagcgggatatcaggtaatcgctcctgatctggaggaaatcggtgacattaacagcaatac

SEQ ID NO: 43863 - DNA, 75 bp, synthetic construct
  source 1..75: mol_type = other DNA
tgcccgcgccgcgttccagcaaggtaacgttgacgcctgggctatctgggatccctactactccgctgcattatt

SEQ ID NO: 43864 - DNA, 75 bp, synthetic construct
  source 1..75: mol_type = other DNA
atgccaactccgtccggtttcaccacccgtgaaattggcatttccggtggtggagatcatcatcactcactggag

SEQ ID NO: 43865 - DNA, 75 bp, synthetic construct
  source 1..75: mol_type = other DNA
atggatttcgtcaaagtacccgcgtgctggcagggatgagtctgggatttttgattgtgatgttactgtgtgcgg

SEQ ID NO: 43866 - DNA, 75 bp, synthetic construct
  source 1..75: mol_type = other DNA
tcaccttcaaaaacgtcacgcccttgtacactggattttacaaaagtctcgtaaaactctttgctgttctgggct

SEQ ID NO: 43867 - DNA, 75 bp, synthetic construct
  source 1..75: mol_type = other DNA
ttgatgcatacgacactgacgaaataagcgagacaagttacatcaacaaactcagacgccttgctcaacgggagc

SEQ ID NO: 43868 - DNA, 75 bp, synthetic construct
  source 1..75: mol_type = other DNA
accgctattatgacccgctgcaggggcgatatatcactcaggatccgattggactgaaggggggatggaacctgt

SEQ ID NO: 43869 - DNA, 75 bp, synthetic construct
  source 1..75: mol_type = other DNA
gatgagcgttctcgccagagagctggttgccagtggcgatgtatacaactctggctacgggttattcccgtctga

SEQ ID NO: 43870 - DNA, 75 bp, synthetic construct
  source 1..75: mol_type = other DNA
tccggaccttatctggtcattaccagatggcgaaatacgccgctacgacaggcgtctgaacataatctgtctcga

SEQ ID NO: 43871 - DNA, 75 bp, synthetic construct
  source 1..75: mol_type = other DNA
atgagcggaaaaccggcggcgcgtcagggcgacatgacgcagtatggcggtagcattgttcagggttctgccggg

SEQ ID NO: 43872 - DNA, 75 bp, synthetic construct
  source 1..75: mol_type = other DNA
agcgtgaaaaaattaaggagcaggttgttgagttggtacgccagagtgggcgcgagacgttaaggcaactggagg

SEQ ID NO: 43873 - DNA, 75 bp, synthetic construct
  source 1..75: mol_type = other DNA
ctattaacggaaataccgcaaccggctccggtacaaactggactgcaccggccagccaggttcgcgctggccaga

SEQ ID NO: 43874 - DNA, 75 bp, synthetic construct
  source 1..75: mol_type = other DNA
aggccagaggcggcgagattatctataacgccgaagtcagcggcctcagtgagcataaaaacggcgtggtgatac

SEQ ID NO: 43875 - DNA, 75 bp, synthetic construct
  source 1..75: mol_type = other DNA
gacgctacaacacaatttgtcgcgagtgccgtaacagtgaagcaatgcagcgtgtgctggcattctatagacgtt

SEQ ID NO: 43876 - DNA, 75 bp, synthetic construct
  source 1..75: mol_type = other DNA
cacgaccatcaacggcgaaacggtgctgagtactggaatcagcggttttggcattcgtattcagaatgctgtcga

SEQ ID NO: 43877 - DNA, 75 bp, synthetic construct
  source 1..75: mol_type = other DNA
cgcgagacgttacgggctctggaggctaaaaccggtgcatcaaggtattacataagcactctcgccagagaacta

SEQ ID NO: 43878 - DNA, 75 bp, synthetic construct
  source 1..75: mol_type = other DNA
ctacagtcactgagcaggtgcagaccagcctgagcaatagcgaaaaacgtttaaccgaactcgaaaccgcatttg

SEQ ID NO: 43879 - DNA, 75 bp, synthetic construct
  source 1..75: mol_type = other DNA
tctggtgcttccaatagtgagttttcggagtccataaaaaagagcttgccgttatgcggcaacacggtttatggt

SEQ ID NO: 43880 - DNA, 75 bp, synthetic construct
  source 1..75: mol_type = other DNA
atttagtgtacaaacaaccttgaataacggtaccaacaccattccgttccaggcgcgttattatgcaatcggcga

SEQ ID NO: 43881 - DNA, 75 bp, synthetic construct
  source 1..75: mol_type = other DNA
atgctaaaacagcaggatatgacagaaaccgccagagaggtgtttaatgaattgagcgtcaccgaaccggcgaca

SEQ ID NO: 43882 - DNA, 75 bp, synthetic construct
  source 1..75: mol_type = other DNA
gcaggaagtgatcgatgagctggaaactaccttccgcttcaacgatgccgttatccgcagcatggttatgcgtac

SEQ ID NO: 43883 - DNA, 75 bp, synthetic construct
  source 1..75: mol_type = other DNA
tggtgttcttatggctgcgtatcattggtggcgaaaggtagttaacaatcttccagactgggacagtctggagta

SEQ ID NO: 43884 - DNA, 75 bp, synthetic construct
  source 1..75: mol_type = other DNA
acaggctcgtaaggactggcaaaatgcccgcaaaaaactatccagggcaaaggtgaagaaaccatctgtggttga

SEQ ID NO: 43885 - DNA, 75 bp, synthetic construct
  source 1..75: mol_type = other DNA
attgtaaaacatgagcaatcacgtaatcatcctgatgcaactttaacatcaaaaggcattgttcaactcagtaat

SEQ ID NO: 43886 - DNA, 75 bp, synthetic construct
  source 1..75: mol_type = other DNA
gtgcaaaagcggctatctgcggctggtgcaaaagtattgtccccggctttcgttaagcgatctccagccctggcc

SEQ ID NO: 43887 - DNA, 75 bp, synthetic construct
  source 1..75: mol_type = other DNA
gcggcgaaacagacattcagcggtggtctttcaggcgaactatccggcaatgctgctacagcaacaaagctgaaa

SEQ ID NO: 43888 - DNA, 75 bp, synthetic construct
  source 1..75: mol_type = other DNA
ctgacgccgggcgtaaggcgctggttaatgccaacaagactggaacaaataaagttgagatcgtttctgttggtt

SEQ ID NO: 43889 - DNA, 75 bp, synthetic construct
  source 1..75: mol_type = other DNA
acatcgccatgccgacacagaagacaccgtgctggaaattcagcggctggctgccgtttgccgtgacaccctgaa

SEQ ID NO: 43890 - DNA, 75 bp, synthetic construct
  source 1..75: mol_type = other DNA
caggtttgggggaatggagcatcatttgactgcgttattctccgcaacagttattcgctgacagggcagccagtt

SEQ ID NO: 43891 - DNA, 75 bp, synthetic construct
  source 1..75: mol_type = other DNA
ttgaaccgaagaacacggcggtgcggagtccggagagtaacggcatagcagagagcttcgtgaaaacgataaagc

SEQ ID NO: 43892 - DNA, 75 bp, synthetic construct
  source 1..75: mol_type = other DNA
atgattctcgccaacgactttcttgaatacctgctcaacacagagcgtgatcttgccgctcgcgtgcgtgatcgt

SEQ ID NO: 43893 - DNA, 75 bp, synthetic construct
  source 1..75: mol_type = other DNA
cagaggacgcatttattgcccgttaccgtccgatgtatatcaggcagacagggcaggccacgggggcaggctgta

SEQ ID NO: 43894 - DNA, 75 bp, synthetic construct
  source 1..75: mol_type = other DNA
gcgacatgtcatgatacctaaagaaaatggcagttggctttacctgattgacctagaacacgcattacgcgtcgc

SEQ ID NO: 43895 - DNA, 75 bp, synthetic construct
  source 1..75: mol_type = other DNA
atgggaaattctgaccgtaagcctggtctgattaagcgcctgtggaaatggtggcgtacccccagccgtctggcg

SEQ ID NO: 43896 - DNA, 75 bp, synthetic construct
  source 1..75: mol_type = other DNA
ctgacatcagatatggtcagactgatggggttaacagcagaatctctggataaagttgtttactggcatgatggt

SEQ ID NO: 43897 - DNA, 75 bp, synthetic construct
  source 1..75: mol_type = other DNA
atgccgcaggcctggcttgagtattctgatgccacctggctgcctccctcacgctgggacgacggcattcccgga

SEQ ID NO: 43898 - DNA, 75 bp, synthetic construct
  source 1..75: mol_type = other DNA
attcacgggatggaatccgccatgctgaatgtggatgccacccgctttcgccgcaagtattacaagaacggcgca

SEQ ID NO: 43899 - DNA, 75 bp, synthetic construct
  source 1..75: mol_type = other DNA
aaggcggtcagcaccacgcagggcgggctgacgcgcagtatggagtacgatgctgccggacgtgtcatcagcctg

SEQ ID NO: 43900 - DNA, 75 bp, synthetic construct
  source 1..75: mol_type = other DNA
cagtacgatgcgtggggaaaagccatctgtaccacgcagggcggtctgacgcgcagtatggaatacgatgctgcc

SEQ ID NO: 43901 - DNA, 75 bp, synthetic construct
  source 1..75: mol_type = other DNA
cggcgaactgaataaacgcgtcctgatccgccagcgggtggatatgcccgcggataactttggcgtggagcctca

SEQ ID NO: 43902 - DNA, 75 bp, synthetic construct
  source 1..75: mol_type = other DNA
ctctttgggtgttaatttcgcagtctgcactagcgagtggggttgggcttagttctactcgggtgatttatgacg

SEQ ID NO: 43903 - DNA, 75 bp, synthetic construct
  source 1..75: mol_type = other DNA
tgcgcgtaaacctgaccatgatgacggtttcgcctgtactaccgcttcaatgagtgaacaaaacaaagtgtttga

SEQ ID NO: 43904 - DNA, 75 bp, synthetic construct
  source 1..75: mol_type = other DNA
atgaaagcttacggcagcctggcaaaacgtgaaaaggatgacccgcaaaactcaacgaccaccgataccggagaa

SEQ ID NO: 43905 - DNA, 75 bp, synthetic construct
  source 1..75: mol_type = other DNA
aagcatccatgaccagcgttgagatcgcagagctggtgggtaaacgtcatgacaatgtgaaacgcactattgaaa

SEQ ID NO: 43906 - DNA, 75 bp, synthetic construct
  source 1..75: mol_type = other DNA
agaattacacaacatccgttgatgagcgatcttatctactatcctgcaaagaagggagatgatgaacctgaaaac

SEQ ID NO: 43907 - DNA, 75 bp, synthetic construct
  source 1..75: mol_type = other DNA
ttgacgttttgcggggacctgccttttgttccctccggtattcaccatcacctgtttgagaaccttcgccgcaag

SEQ ID NO: 43908 - DNA, 75 bp, synthetic construct
  source 1..75: mol_type = other DNA
gacgaggcgcgccgcacggtacaaatggcctattttgaggtgttcgagaacctggaagggccgatccgcatcaac

SEQ ID NO: 43909 - DNA, 75 bp, synthetic construct
  source 1..75: mol_type = other DNA
gaaacactcatacgtttgaaaccacttttcaaaattggaaagaaaatggcgaagatgttgcattattaatgcccg

SEQ ID NO: 43910 - DNA, 75 bp, synthetic construct
  source 1..75: mol_type = other DNA
tgtagctggtcttctcacataccttggtttgggagaaggttcggcattacccgttggtgtgcctgttccgtggcc

SEQ ID NO: 43911 - DNA, 75 bp, synthetic construct
  source 1..75: mol_type = other DNA
aacataccgtgtgacgctttccgtgacccgggaggaggcccggcatctggaagcgttcctggcagagcacggagg

SEQ ID NO: 43912 - DNA, 75 bp, synthetic construct
  source 1..75: mol_type = other DNA
ctggcactgaaagcgccgctgtcgagtccggcacttaccggaacgccaacagcacctactgcggcacagtcggtc

SEQ ID NO: 43913 - DNA, 75 bp, synthetic construct
  source 1..75: mol_type = other DNA
aacggtactaactctgacagcgatctttcttctatccaggctgaaattactcaacgtctggaagaaattgaccgt

SEQ ID NO: 43914 - DNA, 75 bp, synthetic construct
  source 1..75: mol_type = other DNA
actggcaggagctgaaagagggcttctccgtggttgtcatactgagtaacgggcgtgatgagcgcggtcagtttg

SEQ ID NO: 43915 - DNA, 75 bp, synthetic construct
  source 1..75: mol_type = other DNA
aatggtctgctgtatatcgatctcgaacgcgtgattccggaagcgaaaaaaccgcgccgtatcgaaatcaactaa

SEQ ID NO: 43916 - DNA, 75 bp, synthetic construct
  source 1..75: mol_type = other DNA
tggatggtatcaacccggcaccgcgcggcatgccgcagatcgaagttaccttcgatatcgatgctgacggtatcc

SEQ ID NO: 43917 - DNA, 75 bp, synthetic construct
  source 1..75: mol_type = other DNA
gacagggattagaccgcatcctgattggcttcaacggtatcctcgttgccgcccagaccgacttccagcgttacc

SEQ ID NO: 43918 - DNA, 75 bp, synthetic construct
  source 1..75: mol_type = other DNA
accaaaatcaacgtccatgaagtggtggatcaggaaggtgaaaaagtcggtatcggcattgatcgccccacggcc

SEQ ID NO: 43919 - DNA, 75 bp, synthetic construct
  source 1..75: mol_type = other DNA
atgagtatcagaaagctcgatgatggacgttatgaagtggatattaggcctcgcggtcgcgatggaaagcgcatc

SEQ ID NO: 43920 - DNA, 75 bp, synthetic construct
  source 1..75: mol_type = other DNA
ctttctgtgcatgaacattatggtactgtttattattattcacctggttatggtgttattggttccgcgtgcatt

SEQ ID NO: 43921 - DNA, 75 bp, synthetic construct
  source 1..75: mol_type = other DNA
tgcggagtgaaggctggcgcacagtggatacagtatctgctgagtctggtccccgacagcccgtggcagcatatt

SEQ ID NO: 43922 - DNA, 75 bp, synthetic construct
  source 1..75: mol_type = other DNA
tcaatgcctatctgacccagctcgccaaactgaacggcatcagcgttgatgacgtcagcaaaaaattcaccgtcg

SEQ ID NO: 43923 - DNA, 75 bp, synthetic construct
  source 1..75: mol_type = other DNA
ggtcgtgattaacggtgaaacagttatcagcacggggattcctgggtttggtattcgggttcagaaaagtagtga

SEQ ID NO: 43924 - DNA, 75 bp, synthetic construct
  source 1..75: mol_type = other DNA
cccgaaaggtcgatgttcatcttacggataatggtactccttttgcctattcaatgacctctcataaaaatgtca

SEQ ID NO: 43925 - DNA, 75 bp, synthetic construct
  source 1..75: mol_type = other DNA
ggccgtccacgcggtggtacatcgtaatgaaaccgcagaccgcgcgtatgaactctatctgagcgagaaaaacta

SEQ ID NO: 43926 - DNA, 75 bp, synthetic construct
  source 1..75: mol_type = other DNA
aaaaaacgtgttaacactgaaaaatcaagtagtgaaggtgaagacactattactcctgcctttaaacaggaatag

SEQ ID NO: 43927 - DNA, 75 bp, synthetic construct
  source 1..75: mol_type = other DNA
gcttattaaatttgattacaccgacacattacagatcaaatatgccaatcatgggtcaaccatgacattaaacac

SEQ ID NO: 43928 - DNA, 75 bp, synthetic construct
  source 1..75: mol_type = other DNA
ccgtttatggctgctttttatcgggttatggaggaagcagaaccgcgagggactcgctggtatcacccgaaaatg

SEQ ID NO: 43929 - DNA, 75 bp, synthetic construct
  source 1..75: mol_type = other DNA
gaagatgtcccgttgcaacaggcggcggaactcccgccctcctatattaatccgccgcttaaccggattaagatt

SEQ ID NO: 43930 - DNA, 75 bp, synthetic construct
  source 1..75: mol_type = other DNA
ccgttgatatggtgcgccggaccgtgatccgttcggggaagaagatccatctcaccggtaaagaatacgttctgc

SEQ ID NO: 43931 - DNA, 75 bp, synthetic construct
  source 1..75: mol_type = other DNA
aaggctcgaacgccgcctcggctgaaattgaccgcgtatcgacgctggaaatgtgccggattatcaacgatgaag

SEQ ID NO: 43932 - DNA, 75 bp, synthetic construct
  source 1..75: mol_type = other DNA
tcactatacagggataactaaaccatggcatagctgggctggatatccgtctgcatcatactttaatatcgcgcg

SEQ ID NO: 43933 - DNA, 75 bp, synthetic construct
  source 1..75: mol_type = other DNA
ctgatgcgtgggccgcttctggttactctgtggtcccgcgtgatttgctgatcccgcctgaacagtttgctctgt

SEQ ID NO: 43934 - DNA, 75 bp, synthetic construct
  source 1..75: mol_type = other DNA
cgttcaccgggaggaaggcatcagcacttacagcagttataacccgcgtgggcaactggtcagtcagaaggatgc

SEQ ID NO: 43935 - DNA, 75 bp, synthetic construct
  source 1..75: mol_type = other DNA
gataagcgcggcgatcgcaaatcgctgattgtcttttgctgcctgttaggcgtgctggcctgcaccctttttgcc

SEQ ID NO: 43936 - DNA, 75 bp, synthetic construct
  source 1..75: mol_type = other DNA
ccctgaacgtgcgtgacgcggcaggtcagcccgtgaaggacaaggccgtgcagtggagcaccgacctgggcacac

SEQ ID NO: 43937 - DNA, 75 bp, synthetic construct
  source 1..75: mol_type = other DNA
cagtaaaaggaacagaagccctcggccttggtgatgtcttcctgatcgccggaatcgcaatgtggacacagccgc

SEQ ID NO: 43938 - DNA, 75 bp, synthetic construct
  source 1..75: mol_type = other DNA
gtttatttgcctgagcgaaaaatacatctttatcactgtgaccaccggggcctgccgctggcgcttatcagtgaa

SEQ ID NO: 43939 - DNA, 75 bp, synthetic construct
  source 1..75: mol_type = other DNA
caggcgcgtaatgtcgataacaccgacagttatgcagtgctggggctgggcgatgtggcgatggcgcgaaaagat

SEQ ID NO: 43940 - DNA, 75 bp, synthetic construct
  source 1..75: mol_type = other DNA
acgggtcgaccatgacactaaacacgcaaggtacggcgtattctggtgtgtcgacgttattatggggaaattcca

SEQ ID NO: 43941 - DNA, 75 bp, synthetic construct
  source 1..75: mol_type = other DNA
acctgttgttgcgtcttcgacaaatagtgaattcatggtccgtgcgagtgacaaaaatgacactgaaaatgtcaa

SEQ ID NO: 43942 - DNA, 75 bp, synthetic construct
  source 1..75: mol_type = other DNA
ctgctgcggcggttatctgaaccattacggtgactactcttccgcgcaaattgcggaaggtttgaactataccta

SEQ ID NO: 43943 - DNA, 75 bp, synthetic construct
  source 1..75: mol_type = other DNA
gatgttgggacttgaaccgaagaacacggcggtgcggagtccggagagtaacggaatagcagagagcttcgtgaa

SEQ ID NO: 43944 - DNA, 75 bp, synthetic construct
  source 1..75: mol_type = other DNA
tcatcaggttgcgctcgaacaattggcctttgttgaaaaagaagtaaatagagcatatcaacgcttacaggatga

SEQ ID NO: 43945 - DNA, 75 bp, synthetic construct
  source 1..75: mol_type = other DNA
cgaacaggttgaaaaatacatgtcaggtgcatggtggaataacgaccctgtcattgctgcccgtaatattcatat

SEQ ID NO: 43946 - DNA, 75 bp, synthetic construct
  source 1..75: mol_type = other DNA
actgctcaattgtggggcaactccagccgtcctgttgtttatgaagtcggtgttgatggtggcgcttatatgttc

SEQ ID NO: 43947 - DNA, 75 bp, synthetic construct
  source 1..75: mol_type = other DNA
tcgcgctctgtagaacttcatgaaaaagtcatcggtgcttttatcgaaaatatatgttctactaattggagtcat

SEQ ID NO: 43948 - DNA, 75 bp, synthetic construct
  source 1..75: mol_type = other DNA
ggcgactctataatcttgcgactgtgggcgtattactttgcttgttctatggtcttattattatggggctggcga

SEQ ID NO: 43949 - DNA, 75 bp, synthetic construct
  source 1..75: mol_type = other DNA
ttacgatgtactcgaccggctgatacaggaaaccggttttgacggccgcacacagcgttatcaccacgacctgac

SEQ ID NO: 43950 - DNA, 75 bp, synthetic construct
  source 1..75: mol_type = other DNA
gcatttctgaatcagtgttcaacggctgatccggctgctatctcaaaaattatgagtaagttcggacgcgttaag

SEQ ID NO: 43951 - DNA, 75 bp, synthetic construct
  source 1..75: mol_type = other DNA
atatcgccctgcatctgcataaagcagaagagcgcggtgaagatctgccgattgcgatcacgctcggtaacgatc

SEQ ID NO: 43952 - DNA, 75 bp, synthetic construct
  source 1..75: mol_type = other DNA
tatccgccgctgggataacttcccgattgccccggagcgccgcgccaatccagcctgggcgcagaacaccgtcga

SEQ ID NO: 43953 - DNA, 75 bp, synthetic construct
  source 1..75: mol_type = other DNA
gcatgactggcgctgactggctgacagcaattgagatgtacaaaccaactgtgcgcattgtggaagttaatgtgc

SEQ ID NO: 43954 - DNA, 75 bp, synthetic construct
  source 1..75: mol_type = other DNA
ctggcagtgctgttgggcggcatggttggcgcggggattgtgctggggcgtaatgcgctgcgtaattacaacgcg

SEQ ID NO: 43955 - DNA, 75 bp, synthetic construct
  source 1..75: mol_type = other DNA
atatcgatactttgatgaacattttaacgttattacatgcattagtgtcatatttgtcattgtatggaacatcta

SEQ ID NO: 43956 - DNA, 75 bp, synthetic construct
  source 1..75: mol_type = other DNA
gccatgccaaaagtgaacacggtggcacgtgaatatgccgaacgcacgctcgagaaagagaacgtgctgagccaa

SEQ ID NO: 43957 - DNA, 75 bp, synthetic construct
  source 1..75: mol_type = other DNA
atgaattgcgaattgtcagtctggatgttccaacatcatggcaagccctgtcagataaagagccttcacaatcag

SEQ ID NO: 43958 - DNA, 75 bp, synthetic construct
  source 1..75: mol_type = other DNA
tttgctcaacgtcttctcgggcataaatcagattcaatggcggcgcggtatagggacagccgtggacgggaatgg

SEQ ID NO: 43959 - DNA, 75 bp, synthetic construct
  source 1..75: mol_type = other DNA
tttgctcaacgtcttctcgggcataaatcagattcaatggcggcgcgttacagggacagtcgcgggcgggagtgg

SEQ ID NO: 43960 - DNA, 75 bp, synthetic construct
  source 1..75: mol_type = other DNA
cccggggatggagagtaagcttagtcagccgttgtctccgggtgtcgcgtgcgcagttgcacgtcattctcagac

SEQ ID NO: 43961 - DNA, 75 bp, synthetic construct
  source 1..75: mol_type = other DNA
ccaggaacgggggcgattactgatggacagtcaccgtaatgatattttactggttgagcagatagaccgcctgac

SEQ ID NO: 43962 - DNA, 75 bp, synthetic construct
  source 1..75: mol_type = other DNA
catgtgctgcacagctactggttgaatcttaagagcgtggtgcgcttttgcgaaaaagtgaaaaaccataaaccg

SEQ ID NO: 43963 - DNA, 75 bp, synthetic construct
  source 1..75: mol_type = other DNA
gatccacagacagccactgtgaccctgaacgggcttgtggccacggtgaaaggcgtgaagcagggcagtgtcagc

SEQ ID NO: 43964 - DNA, 75 bp, synthetic construct
  source 1..75: mol_type = other DNA
ctttgaaccagaagtcaaacgtcaggctgtcatggcactctgtacacgacaagtatcagccagtgaaatcgccag

SEQ ID NO: 43965 - DNA, 75 bp, synthetic construct
  source 1..75: mol_type = other DNA
cagtaagcaatggcctggcaaagcagctattggtcgtctgaaaggtgaggaactggcactatataatttgtggct

SEQ ID NO: 43966 - DNA, 75 bp, synthetic construct
  source 1..75: mol_type = other DNA
gaagaggtggtgttacgtctgtccgggatgagcggggctgttcatgcggatactgacagcaccgaagtggcgaaa

SEQ ID NO: 43967 - DNA, 75 bp, synthetic construct
  source 1..75: mol_type = other DNA
ggggcaacgacgacgctgacattcagcacagtaccggaagatgcttctgataaaacggtgagcgtggcgtcatca

SEQ ID NO: 43968 - DNA, 75 bp, synthetic construct
  source 1..75: mol_type = other DNA
gcctgcggatgccattgcccgggcggaagatgtggtgttgcgtctgtccgggatgagcgggcctgttcatgcgga

SEQ ID NO: 43969 - DNA, 75 bp, synthetic construct
  source 1..75: mol_type = other DNA
gatatcctattatcatgcacaatacggcgacagattgcctgatgagcgtctcaccacttctgttgactgcgacta

SEQ ID NO: 43970 - DNA, 75 bp, synthetic construct
  source 1..75: mol_type = other DNA
cagaaaaagctgaagcgtttatcgcctcgctctctgccagccagcggcgcagcattgatgatatcgaacgcagcc

SEQ ID NO: 43971 - DNA, 75 bp, synthetic construct
  source 1..75: mol_type = other DNA
aggtgatctcgatggcgctgtcgtttttgggcgtgctggtcgccgccgggaagatgctgctgacccagattgaga

SEQ ID NO: 43972 - DNA, 75 bp, synthetic construct
  source 1..75: mol_type = other DNA
tttttgaatcagtgctcaacggctgatccggctgctatctcaaaaattatgagtaagttcggtaagattaagggg

SEQ ID NO: 43973 - DNA, 75 bp, synthetic construct
  source 1..75: mol_type = other DNA
ttaagtcctccctgcttatgggattctcgttacgcatgtcagcaaaaaatgcgaattttcaacttactatcacca

SEQ ID NO: 43974 - DNA, 75 bp, synthetic construct
  source 1..75: mol_type = other DNA
gacagcacctgcgtatgcatctgacccttgcgcttcggtactttgcttatatggaaaagcagtcgggcaaggtgg

SEQ ID NO: 43975 - DNA, 75 bp, synthetic construct
  source 1..75: mol_type = other DNA
aggggctgttttttggtctgccaacaatggcaacggccaatgccatgtacgatcggctggtcaaaacctggcttg

SEQ ID NO: 43976 - DNA, 75 bp, synthetic construct
  source 1..75: mol_type = other DNA
cgaaggaaaacattgcaaaagccattgctgatgcggtgacgaaaaagcctgccacgcaggtggccgctgcggtga

SEQ ID NO: 43977 - DNA, 75 bp, synthetic construct
  source 1..75: mol_type = other DNA
gtaccggttctgcggcgctggatctggcttacgtcgctgcgggtcgtgttgacggtttctttgaaatcggtctgc

SEQ ID NO: 43978 - DNA, 75 bp, synthetic construct
  source 1..75: mol_type = other DNA
gaaggatctgcaacctggcgaaatgaccgctgatgcagaagatgacacttatctcgatgatgaagatgcagactg

SEQ ID NO: 43979 - DNA, 75 bp, synthetic construct
  source 1..75: mol_type = other DNA
agccaacgcagccgcgccgcctacagtggacaacagatgctggaggagtatgtcaacttctatcagaatctgtag

SEQ ID NO: 43980 - DNA, 75 bp, synthetic construct
  source 1..75: mol_type = other DNA
tggatggttttctgaaaggcaaatgcatcccaagtgatttaaatgttaacgaaacaaacgctgaatatcttgtcc

SEQ ID NO: 43981 - DNA, 75 bp, synthetic construct
  source 1..75: mol_type = other DNA
gcctgctgatgccattgcccgggcggaagatgtggtgttgcgtctgtccgggatgagcggggctgttcatgtgga

SEQ ID NO: 43982 - DNA, 75 bp, synthetic construct
  source 1..75: mol_type = other DNA
atgacccgaagtggtggtgattttcagccccgaccgctgaaacgcctgttcacaaccaaccagtgctggacatcc

SEQ ID NO: 43983 - DNA, 75 bp, synthetic construct
  source 1..75: mol_type = other DNA
ggcgcggtcggcactgcttcacgcgaagtataaagaacgtccggacgttcgctggcgtcgtatcaaaaaaatcga

SEQ ID NO: 43984 - DNA, 75 bp, synthetic construct
  source 1..75: mol_type = other DNA
cctgcaacagcgtctggacaaaacccgccagcttaagcaagggatgatgcaggaactgttaaccgggaaaatccg

SEQ ID NO: 43985 - DNA, 75 bp, synthetic construct
  source 1..75: mol_type = other DNA
tgccctgaaggtggtttatgacctcgggaaaaaagcggcagcggactttatgcaacagcaggcccgtgatggtgg

SEQ ID NO: 43986 - DNA, 75 bp, synthetic construct
  source 1..75: mol_type = other DNA
tgcagatactttcgttccacctgataatgatggaatgggctatatgctggcagaaattgagcgcggcgctgatgc

SEQ ID NO: 43987 - DNA, 75 bp, synthetic construct
  source 1..75: mol_type = other DNA
aacttgatctcgatagcgcggctcagccccccagagtttatatccggggggactgggtgttggcgcattactgcg

SEQ ID NO: 43988 - DNA, 75 bp, synthetic construct
  source 1..75: mol_type = other DNA
aagctgctagccagcgagctttggaatctatgtatgcttgcctcagtgaaggacgaagcttccggctggaagctg

SEQ ID NO: 43989 - DNA, 75 bp, synthetic construct
  source 1..75: mol_type = other DNA
cagacccgactcatcatttcaggaaaatggaaaaatggcggggcaaggttggcaatgctaagccgttatgagcag

SEQ ID NO: 43990 - DNA, 75 bp, synthetic construct
  source 1..75: mol_type = other DNA
tgcagatgcaatggccgaaatctcattgtcgcttcatgaaggtccaattctgttaggtcacacaattccaaaagg

SEQ ID NO: 43991 - DNA, 75 bp, synthetic construct
  source 1..75: mol_type = other DNA
gtcgggcggtgatccgttcgccgcgattgaggcgatcatcccctgggatgcgttcagcgaaagcattaccgaagc

SEQ ID NO: 43992 - DNA, 75 bp, synthetic construct
  source 1..75: mol_type = other DNA
atgattactaattatgaaaccactattgtaactactgatgacattgttcacgaggttaatctggaaggaaagcgt

SEQ ID NO: 43993 - DNA, 75 bp, synthetic construct
  source 1..75: mol_type = other DNA
gagtttaataatgaaaagcaagttatattttccagtgatgtcaatagcgaagatactttcgttattttagagggc

SEQ ID NO: 43994 - DNA, 75 bp, synthetic construct
  source 1..75: mol_type = other DNA
cgatgtaaatggcgctcgtaacattttagcggcggggcacgccgttcttgcctgtggaggatgtcaacaaacagg

SEQ ID NO: 43995 - DNA, 75 bp, synthetic construct
  source 1..75: mol_type = other DNA
caattattgaactggcggaggccacccgtcagaaaggtctggcagaagcagaagcacagcgcgcactgaacgatg

SEQ ID NO: 43996 - DNA, 75 bp, synthetic construct
  source 1..75: mol_type = other DNA
gtgaacttgaacttgctgctcaaaaagcattagagcttttagattatgtatcagacataaccactgtcgatggaa

SEQ ID NO: 43997 - DNA, 75 bp, synthetic construct
  source 1..75: mol_type = other DNA
gggcattagtgtcatctccgtgtcagctggatactaatgaggtgcaaatttcagaacggaagaaacgacgtgata

SEQ ID NO: 43998 - DNA, 75 bp, synthetic construct
  source 1..75: mol_type = other DNA
gcgttaccagtacaggaagcggcaacacaggaagaaattaaaacagatactgtgggggacattgtgcagtcgttg

SEQ ID NO: 43999 - DNA, 75 bp, synthetic construct
  source 1..75: mol_type = other DNA
atttaattcgccctgacgcaatgacagtggcagcaatcgacgctggcaacctgttgccagtagcggaagtcatgc

SEQ ID NO: 44000 - DNA, 75 bp, synthetic construct
  source 1..75: mol_type = other DNA
ttgtgtatggattgtcatggatgtggagtgggcgtttgtgggttgccacccttttccattttggtttgaatctgt

SEQ ID NO: 44001 - DNA, 75 bp, synthetic construct
  source 1..75: mol_type = other DNA
tgaatacggatgcggaagatacgccgctttccacgatggtgcatgtctggcaactgaaaacccgcgaagattttg

SEQ ID NO: 44002 - DNA, 75 bp, synthetic construct
  source 1..75: mol_type = other DNA
gcggtgggatggcaaaaccggttgccatgctccaaagtggccgcagtgtggttgtatttatggaccgcagcgaaa

SEQ ID NO: 44003 - DNA, 75 bp, synthetic construct
  source 1..75: mol_type = other DNA
aagtgtctttgtggatgtgggggtgtctctttctctctgttcctcttatcttatttttggctgtgtttttgggtg

SEQ ID NO: 44004 - DNA, 75 bp, synthetic construct
  source 1..75: mol_type = other DNA
gttaagcgaagctgggtcagcaatgctcaaatcgaatattggttgcaagacctgaaaaatccatctgtggttatt

SEQ ID NO: 44005 - DNA, 75 bp, synthetic construct
  source 1..75: mol_type = other DNA
aaaagggacgaactggaggccgacaagccgcgctcgattgaactgatgagaagcgacctgcgactgctgcctctc

SEQ ID NO: 44006 - DNA, 75 bp, synthetic construct
  source 1..75: mol_type = other DNA
cgagaagttttcggcgctggcggcggagaatgcggggctgaaacacgcaatggccgtaactcttgagcatgtgtc

SEQ ID NO: 44007 - DNA, 75 bp, synthetic construct
  source 1..75: mol_type = other DNA
gatctggcgcagacgctgtcggcagtctcgaaagtatggattgcaggcctgcatcaatattggtgtgataacaat

SEQ ID NO: 44008 - DNA, 75 bp, synthetic construct
  source 1..75: mol_type = other DNA
tcaaaaggtccgcaactaactccatcacgccgccttctcaggtgcgtgattacaaagcagaagtcgcgaaactta

SEQ ID NO: 44009 - DNA, 75 bp, synthetic construct
  source 1..75: mol_type = other DNA
taaagatttgcacgttgccgctgtcgtagatcagaacaataaagtccttgggactcagtatttctccacaacacg

SEQ ID NO: 44010 - DNA, 75 bp, synthetic construct
  source 1..75: mol_type = other DNA
taagatatagcgcaaaacatatgcttaaaaagcatagatatctaaaaggatttagcaactatcttttttatttta

SEQ ID NO: 44011 - DNA, 75 bp, synthetic construct
  source 1..75: mol_type = other DNA
atgaatattctgcaatttaatgtgcgactggcggaaggcggggcagcaggtgtggcgttagatctccaccagcgt

SEQ ID NO: 44012 - DNA, 75 bp, synthetic construct
  source 1..75: mol_type = other DNA
gataatctcagtcagactgccttactctgaacgcccaccgcgtccgtcccgcacattccagcagcgtatctggag

SEQ ID NO: 44013 - DNA, 75 bp, synthetic construct
  source 1..75: mol_type = other DNA
tgacggtttttctgataacaggtgagccacagaatgtgattaccggaatttatgccagtaaagaatcctgccatc

SEQ ID NO: 44014 - DNA, 75 bp, synthetic construct
  source 1..75: mol_type = other DNA
cggcccgctgccgtttattctttcccgcgcctacagcagctaccggaccagaacacccgcgccggtgggggtgtt

SEQ ID NO: 44015 - DNA, 75 bp, synthetic construct
  source 1..75: mol_type = other DNA
aggtgctgccgggcgagacggacattgcgctgcccggcccgctgccgttcatcctttcccgcgcctacagcagtt

SEQ ID NO: 44016 - DNA, 75 bp, synthetic construct
  source 1..75: mol_type = other DNA
tcagccttccgaaatgcgctccagttagggaccgccgcaacacgagatgttggagcagataatgcctcgaagtta

SEQ ID NO: 44017 - DNA, 75 bp, synthetic construct
  source 1..75: mol_type = other DNA
cattccatgcattgcgacgacaggaaacccggtgaaacttatgttgcagtggggaacggtggcaacacaaaaggg

SEQ ID NO: 44018 - DNA, 75 bp, synthetic construct
  source 1..75: mol_type = other DNA
atgcatacagtttctgaaaatcagtgcggtatatacgcattactgctgcaacaggccagaaccgaagcacaggcc

SEQ ID NO: 44019 - DNA, 75 bp, synthetic construct
  source 1..75: mol_type = other DNA
cgtcgctgatggcaaaaccacaggcggtattgtgggacagggagaaccaccagttgctgtatgttgtggcaaccc

SEQ ID NO: 44020 - DNA, 75 bp, synthetic construct
  source 1..75: mol_type = other DNA
cgcggggaccgaagggggataagggggacaccgggccgcagggtattcccgggccaaaaggcgataccggcgagc

SEQ ID NO: 44021 - DNA, 75 bp, synthetic construct
  source 1..75: mol_type = other DNA
gcggcaaattttgccacgctgacagagcgggagattgccgaagcggaacaggtaacaaccatcaacgttaaaacc

SEQ ID NO: 44022 - DNA, 75 bp, synthetic construct
  source 1..75: mol_type = other DNA
gtggaagtggcaaaacagggaagacctatcaataccagaacattgcttgattacattgaaggaaacataaagaaa

SEQ ID NO: 44023 - DNA, 75 bp, synthetic construct
  source 1..75: mol_type = other DNA
ctacccgctctcgacgccggttgccgacattgcggcccaggcgttaagcccgcagggaatcgtcgccatgcgcga

SEQ ID NO: 44024 - DNA, 75 bp, synthetic construct
  source 1..75: mol_type = other DNA
tactgacgcactgaacagggcaaagcagcatacgggccagcaagatgacccgtatgaggacgaaataccatttta

SEQ ID NO: 44025 - DNA, 75 bp, synthetic construct
  source 1..75: mol_type = other DNA
tgtatgcaggtgctgaagcaggctaccgctatcatgtaacagaagacgcctggattgagccgcaggcggaactgg

SEQ ID NO: 44026 - DNA, 75 bp, synthetic construct
  source 1..75: mol_type = other DNA
atgtatctgtatgagcatcgtcgctgtttcaataacatcatcggctactgtaactcactttgctatcacggtaag

SEQ ID NO: 44027 - DNA, 75 bp, synthetic construct
  source 1..75: mol_type = other DNA
aagctatcacgctgaaaatcgatccgtcggtggtactggcgacccgtaaatacgtggatgatgaagtcctggaat

SEQ ID NO: 44028 - DNA, 75 bp, synthetic construct
  source 1..75: mol_type = other DNA
gggaaaatgcggaacaggtggacgtcaccgtctggaggaccacccaggcactttcagtccgtgacctgctgcctc

SEQ ID NO: 44029 - DNA, 75 bp, synthetic construct
  source 1..75: mol_type = other DNA
gataagcgcattcatgaccacgacggcggcaaattttgccacgctgacagagcgggagattgccgaagcggaaca

SEQ ID NO: 44030 - DNA, 75 bp, synthetic construct
  source 1..75: mol_type = other DNA
accggatctggcgaaaatatgcgtatccggccactttcgaggagggggggcgcgatgccacatcgcagtgtctgc

SEQ ID NO: 44031 - DNA, 75 bp, synthetic construct
  source 1..75: mol_type = other DNA
tgttgaacgtggaaaactcgatgaaatagacgctactggctatggcattcctgtttttattgcaacggaaaatga

SEQ ID NO: 44032 - DNA, 75 bp, synthetic construct
  source 1..75: mol_type = other DNA
agacgctgactcatttgagtggaaaggatgttgccggtcttctcgcataccttggtttgggagaagcggcaaaac

SEQ ID NO: 44033 - DNA, 75 bp, synthetic construct
  source 1..75: mol_type = other DNA
tcaatttcaaatccttcacctcttctctgttgtctgatatggcaaaaattatggcacagatggctatgatgcagg

SEQ ID NO: 44034 - DNA, 75 bp, synthetic construct
  source 1..75: mol_type = other DNA
gggattcccgctcatgagcttaggccagataagccaaaacttttcccacacccaagcttagcgcacacagaagat

SEQ ID NO: 44035 - DNA, 75 bp, synthetic construct
  source 1..75: mol_type = other DNA
catgacagagcacgccttaaaggtggcaatcagaacgatagaccgccacgccggggaaggatacgcgaaagcaca

SEQ ID NO: 44036 - DNA, 75 bp, synthetic construct
  source 1..75: mol_type = other DNA
ggcatcaacagggagcacaggcgactcgtatgacaacgcgatggcggagagcatcaatggtctttacaaagcgga

SEQ ID NO: 44037 - DNA, 75 bp, synthetic construct
  source 1..75: mol_type = other DNA
agtcaaatgcacaaacactgccggagatcatcgaagagatgctggtttccaccaccagtgaacgtcagggccgcg

SEQ ID NO: 44038 - DNA, 75 bp, synthetic construct
  source 1..75: mol_type = other DNA
tttgaaccggggatgacggtctctctcgttgcccggcaacatggtgtagcagccagccagttatttctctggcgt

SEQ ID NO: 44039 - DNA, 75 bp, synthetic construct
  source 1..75: mol_type = other DNA
tggaaagcggtgttgggtgtgttggcctggccggatattgccagcttgccctttacacccgaccttgcggtttta

SEQ ID NO: 44040 - DNA, 75 bp, synthetic construct
  source 1..75: mol_type = other DNA
cgcccaatacgcaaaccgcttctccccaggcgttggcagattctttaatgcagctggcgcgacaaatttcccgac

SEQ ID NO: 44041 - DNA, 75 bp, synthetic construct
  source 1..75: mol_type = other DNA
aggttgttgatgaaatctgcgattttgtggtgaatcagcaggctgttttcctcggtggtcagtacatccttcagg

SEQ ID NO: 44042 - DNA, 75 bp, synthetic construct
  source 1..75: mol_type = other DNA
atgctggtggagtggggaccggttatcccggaagggaaggtcgagatcactatcagtaagtacgaaaaagcgagt

SEQ ID NO: 44043 - DNA, 75 bp, synthetic construct
  source 1..75: mol_type = other DNA
cttaatcgcgtactggggcgtgatttattcgatctcagtatgccgcccgcactgattcagtggcgcagcggcagc

SEQ ID NO: 44044 - DNA, 75 bp, synthetic construct
  source 1..75: mol_type = other DNA
cagaaaaaatggtgttgccgcgccatcatccaccagccagctatcaactcgcgccctggaagggatttttgaagc

SEQ ID NO: 44045 - DNA, 75 bp, synthetic construct
  source 1..75: mol_type = other DNA
caacaatgttgaagccggggaagaggttgaaatcacccgcagaggccgtgagccagcagtaattgtcagcaaggc

SEQ ID NO: 44046 - DNA, 75 bp, synthetic construct
  source 1..75: mol_type = other DNA
gcttaacgccgccggcacagcattcaaccgcatgtctccgggattaagtgcaatggccgccagaatactgacgag

SEQ ID NO: 44047 - DNA, 75 bp, synthetic construct
  source 1..75: mol_type = other DNA
tgaacacagcgtggcgcaggtcaccggtccgcgcgagcaggcggtgctcgcaggcgtagtccgcgaggcgcttaa

SEQ ID NO: 44048 - DNA, 75 bp, synthetic construct
  source 1..75: mol_type = other DNA
atcgttcgctaccgcagcatgggtaaaagatgctctcaaacacacatacctcggttatgaaaccaaggacctggt

SEQ ID NO: 44049 - DNA, 75 bp, synthetic construct
  source 1..75: mol_type = other DNA
ggctacacggctgccatcatcgcctttccgatggttaatattactgaggccagccagctgtgggatatcgctcag

SEQ ID NO: 44050 - DNA, 75 bp, synthetic construct
  source 1..75: mol_type = other DNA
gggaaaaacattgatattaccggggcaacggtctcgtccggtggaacccttggaatgtctgcgggtaatgatatc

SEQ ID NO: 44051 - DNA, 75 bp, synthetic construct
  source 1..75: mol_type = other DNA
aaatgaagtttattgcacgctatgtggcaaccaatgcaactgtaacggcgggtacggcgaacgccgattcacaat

SEQ ID NO: 44052 - DNA, 75 bp, synthetic construct
  source 1..75: mol_type = other DNA
ttgttgcccggcaacatggtgtggcagccagccagttatttctctggcgtaagcaataccaggaaggaagtctta

SEQ ID NO: 44053 - DNA, 75 bp, synthetic construct
  source 1..75: mol_type = other DNA
atgaaaatcaagcatgaacacatccgtatggcgatgaatgcctgggcatatcctgatggtgagaaagttcccgca

SEQ ID NO: 44054 - DNA, 75 bp, synthetic construct
  source 1..75: mol_type = other DNA
cattgacggcagcatccatcgctgggcaaaaaatgaagttatcgagaacgatcgcgaagactggaagcgtatttc

SEQ ID NO: 44055 - DNA, 75 bp, synthetic construct
  source 1..75: mol_type = other DNA
tgacatcgctgaatgaatggatggtggagaagaatggtacgctgtcgaaaaaatccagactgggcgaagcgttca

SEQ ID NO: 44056 - DNA, 75 bp, synthetic construct
  source 1..75: mol_type = other DNA
atgaagttgatccttcctttcccgcccagtgtgaacacgtactggcgacaccccaacaaaggggcatttgctggt

SEQ ID NO: 44057 - DNA, 75 bp, synthetic construct
  source 1..75: mol_type = other DNA
gggtggagcggaaaaaagcccgcgaaaacgaaagctgaaaaaccatttttccgaatcgcaggttgccgcactgcg

SEQ ID NO: 44058 - DNA, 75 bp, synthetic construct
  source 1..75: mol_type = other DNA
ttggcgtgttaggcgcaacggggcgcggactggctgaagctgtcggcgttgaagatgatgtggatattatcgttg

SEQ ID NO: 44059 - DNA, 75 bp, synthetic construct
  source 1..75: mol_type = other DNA
gccaagataaccagggcttatttcgaactgggaatgacgtccccggaactgtacgacgacagccatccagaagcc

SEQ ID NO: 44060 - DNA, 75 bp, synthetic construct
  source 1..75: mol_type = other DNA
gtgcgcaattttctgcgccaaccggtgaaagcattgattctgcgctcatatggcgtgggtaatgcgccacaaaac

SEQ ID NO: 44061 - DNA, 75 bp, synthetic construct
  source 1..75: mol_type = other DNA
tgtgcgcttttttgtggctggcggtaagtcacgctttggctgcggatagcacgattactatccgcggctatgtca

SEQ ID NO: 44062 - DNA, 75 bp, synthetic construct
  source 1..75: mol_type = other DNA
atgcggggaataacctgaagctgtttacagaccgtctgcataaccagcatggtgatatcctggccggcaacagtc

SEQ ID NO: 44063 - DNA, 75 bp, synthetic construct
  source 1..75: mol_type = other DNA
aactccaggaagaagcagcatattgcgtaccaatttctgcaatatctgtaaaacgatgggatatgcctcttcagg

SEQ ID NO: 44064 - DNA, 75 bp, synthetic construct
  source 1..75: mol_type = other DNA
gatgtcctgggcgcagataacggcagcagctgaagatgcggaaatacatcatgattatgcccgggcattaatatt

SEQ ID NO: 44065 - DNA, 75 bp, synthetic construct
  source 1..75: mol_type = other DNA
catcggcgggtgatcctcaatgaggaatcctggacgcgggtgatggatgcgctgagtaatccaccgtcacctggt

SEQ ID NO: 44066 - DNA, 75 bp, synthetic construct
  source 1..75: mol_type = other DNA
gtttcagcaaaaataacacagcccggcgcatgatatatgcccgaaaaatccacaaccggtatttcagacaatatt

SEQ ID NO: 44067 - DNA, 75 bp, synthetic construct
  source 1..75: mol_type = other DNA
cattagtctgcgcatccttgctggctctggttagcactggcgtaaacgccgcagaaaaagtgacgttaaagttag

SEQ ID NO: 44068 - DNA, 75 bp, synthetic construct
  source 1..75: mol_type = other DNA
caaagtaagaaaacgtctcggtattaaaggcggtttctactggactgaagcgaaaaaattatccattgccatatc

SEQ ID NO: 44069 - DNA, 75 bp, synthetic construct
  source 1..75: mol_type = other DNA
tggatacgcgtaaatccaaacagcacgtcgatccggaaatcagaatggctgaatggatgcagacgctgaaggaaa

SEQ ID NO: 44070 - DNA, 75 bp, synthetic construct
  source 1..75: mol_type = other DNA
tgcgattcatcgcgtacagaagaaagccaaaggtggcgataaagacgcgaaagctgagctggcggtcctggaaaa

SEQ ID NO: 44071 - DNA, 75 bp, synthetic construct
  source 1..75: mol_type = other DNA
gttagtgcaacttgttgaaactggtggagctcatcctctgagtcgagaacctataacagaatcaatgattatgag

SEQ ID NO: 44072 - DNA, 75 bp, synthetic construct
  source 1..75: mol_type = other DNA
gagggcgatatcatactgagcagtgccggaaaactggtcctgaagaacagccttgccggcggcaataccaccgta

SEQ ID NO: 44073 - DNA, 75 bp, synthetic construct
  source 1..75: mol_type = other DNA
acgacgaagagcgcgtgcgcgaaacggcgttgcccctcacatcccggcggccttttgccgggatgccaggagcgc

SEQ ID NO: 44074 - DNA, 75 bp, synthetic construct
  source 1..75: mol_type = other DNA
aaggcattaatctgcagatagctgatgccagggggaatattgcccgggcagggaaagtaatgcctgcaataccat

SEQ ID NO: 44075 - DNA, 75 bp, synthetic construct
  source 1..75: mol_type = other DNA
cggtgagggactgccattgccggatacattcgacagccctgatccacgtattaaacagttagcgcgtcgcagtac

SEQ ID NO: 44076 - DNA, 75 bp, synthetic construct
  source 1..75: mol_type = other DNA
gcgaccataaagcgggaggtaacctgagcgtcagcagccggagcgatatcgttctcagcaatggaacgcttaaca

SEQ ID NO: 44077 - DNA, 75 bp, synthetic construct
  source 1..75: mol_type = other DNA
acggttacgcaactgtgagcttgcaggtgcaggaaagcaggtctatacggcaacccgggtgcgtgtgacttttga

SEQ ID NO: 44078 - DNA, 75 bp, synthetic construct
  source 1..75: mol_type = other DNA
gtgaaaatatttatgcaagaaattcagtcactggtagataatcacatcattcatgaagataatctggttaaatta

SEQ ID NO: 44079 - DNA, 75 bp, synthetic construct
  source 1..75: mol_type = other DNA
tccgatccttccttagcaaacgagcagctaagttgggttgctaaaaggactcttaataatatggtggaagatgca

SEQ ID NO: 44080 - DNA, 75 bp, synthetic construct
  source 1..75: mol_type = other DNA
gtgccttcaggtgatatcaccgtcaccaacacagctccgcaatatatgactgcaaccttgcaggataaaaatggc

SEQ ID NO: 44081 - DNA, 75 bp, synthetic construct
  source 1..75: mol_type = other DNA
caaaatcctctccggcagtaacctcacgctgacggcgcaggtgctggcgaacaccggcagcggactggtacaggc

SEQ ID NO: 44082 - DNA, 75 bp, synthetic construct
  source 1..75: mol_type = other DNA
agatagcctcaagcacccgcagcaattttacttaactccccttttcccacaaatcgtttttatccctattggtaa

SEQ ID NO: 44083 - DNA, 75 bp, synthetic construct
  source 1..75: mol_type = other DNA
ggctttgatattggaagtaccaacagaactaaaatcagatttacttacacttctgctacaacaaattcaatttac

SEQ ID NO: 44084 - DNA, 75 bp, synthetic construct
  source 1..75: mol_type = other DNA
aaaagactattgctgacattctcacataccttggtttgggagaaacgataaataaagcctccggagctatgcaga

SEQ ID NO: 44085 - DNA, 75 bp, synthetic construct
  source 1..75: mol_type = other DNA
ttttacttaactccccttttcccacaaatcgtttttatccctattggtaatgttctcccgatgtgggattcccac

SEQ ID NO: 44086 - DNA, 75 bp, synthetic construct
  source 1..75: mol_type = other DNA
tactacagagactttttcctgatggtcctccgccgctggataaatttgataaggatttttgttctgtcacctata

SEQ ID NO: 44087 - DNA, 75 bp, synthetic construct
  source 1..75: mol_type = other DNA
tgacgctgacagtaatctgcagagcctgtgctggccatgtcataaggcgaagacggcccgtgaacggttgaagta

SEQ ID NO: 44088 - DNA, 75 bp, synthetic construct
  source 1..75: mol_type = other DNA
ggatgcagacggtaatctgcagagcctgtgctggccatgccacaaggcgaaaacagcgcgtgaacgcatcaactg

SEQ ID NO: 44089 - DNA, 75 bp, synthetic construct
  source 1..75: mol_type = other DNA
ggcgtcagaaagaagtcgacaccggagagggtaaacagggagaggataccgaatcgaaactcccggtgatttgta

SEQ ID NO: 44090 - DNA, 75 bp, synthetic construct
  source 1..75: mol_type = other DNA
tgataaattccgtgcagacctggcggatatggcaggtcagtgcgtcggtggctctgctggcggtgttccctggat

SEQ ID NO: 44091 - DNA, 75 bp, synthetic construct
  source 1..75: mol_type = other DNA
ttatggtcatgactatccaacgcctgatgggactggtatcagagattatattcatgtaaatgatttagctgaggg

SEQ ID NO: 44092 - DNA, 75 bp, synthetic construct
  source 1..75: mol_type = other DNA
atgccatcacgaatcccaaaagcctgccgtgttcgtggctgccgccataccaccacagacccgtcaggctattgt

SEQ ID NO: 44093 - DNA, 75 bp, synthetic construct
  source 1..75: mol_type = other DNA
gagatgggccggaaaatggatgcctttaaggagcgggtgatccgcaacagcctgcggccccctgccgtgcccggt

SEQ ID NO: 44094 - DNA, 75 bp, synthetic construct
  source 1..75: mol_type = other DNA
ttcgcaccagtaagccgggattttttgccatggctaaacgcttcattaaatccagagggttaacgttatggcggt

SEQ ID NO: 44095 - DNA, 75 bp, synthetic construct
  source 1..75: mol_type = other DNA
ttccattgacggagtcctctcgcattggtggcactacaaacccttatggtacatctaagcttatggttgagaaaa

SEQ ID NO: 44096 - DNA, 75 bp, synthetic construct
  source 1..75: mol_type = other DNA
gagtcgaaaatctccgtggtctgcacctatttccggctgacgatggacggtaaggagctggtcgaaattgacacc

SEQ ID NO: 44097 - DNA, 75 bp, synthetic construct
  source 1..75: mol_type = other DNA
aatatgagaagtatcgcggcggcggtatgcccggagcggtggatgtggatctgggactggatgacagtgcactgg

SEQ ID NO: 44098 - DNA, 75 bp, synthetic construct
  source 1..75: mol_type = other DNA
aggaatcagaagaaaccttccagaagtggacccgtaagggacgcctgtcagacttcaaaacagcgtatcgcgtgg

SEQ ID NO: 44099 - DNA, 75 bp, synthetic construct
  source 1..75: mol_type = other DNA
atgccatcacgaatcccaaaagcctgccgtgttcgtggctgccgccataccaccacagacccgtcaggctactgc

SEQ ID NO: 44100 - DNA, 75 bp, synthetic construct
  source 1..75: mol_type = other DNA
aaagatatctacctggacggaacagcgctggagaatgctgacggctcccaaaacttcagcggggtaacgtgggag

SEQ ID NO: 44101 - DNA, 75 bp, synthetic construct
  source 1..75: mol_type = other DNA
tgatgccgacagtaatctgcagagtctgtgctggccgtgtcataaggcgaagacggcccgtgaacggctaaagtg

SEQ ID NO: 44102 - DNA, 75 bp, synthetic construct
  source 1..75: mol_type = other DNA
tcatcagcgcggttatggttcgaagtgggacagtatccgcgcgcgtgtgctgaagcgtgacaaaggtttatgtca

SEQ ID NO: 44103 - DNA, 75 bp, synthetic construct
  source 1..75: mol_type = other DNA
caggacagtgctgcggtgcctgaaaagaaattccgtctgcggttgcgtaactgtgagctggcgggaacaggtaaa

SEQ ID NO: 44104 - DNA, 75 bp, synthetic construct
  source 1..75: mol_type = other DNA
agcaatacaagccaggacaatcccgtcatcagcgcggctacggttcgaagtgggacgttatccgcgcgcgtgtgc

SEQ ID NO: 44105 - DNA, 75 bp, synthetic construct
  source 1..75: mol_type = other DNA
ataagtatctcaattggaaagctaaaagggaattggaaacaatgcttgaggatgcctggcgctggcaaatgaaaa

SEQ ID NO: 44106 - DNA, 75 bp, synthetic construct
  source 1..75: mol_type = other DNA
atgatacagaatatttttgaaacaaatgaagatgaaatgacatcatatttcaatatgtctgttgcgctgtggttt

SEQ ID NO: 44107 - DNA, 75 bp, synthetic construct
  source 1..75: mol_type = other DNA
cttggcttcgacgctggcgccctggatatggatatcacgcttggcggtctggatgccggattgctgaaaaaatgg

SEQ ID NO: 44108 - DNA, 75 bp, synthetic construct
  source 1..75: mol_type = other DNA
ggcaacgaatatagttacggattcaccactgttaattaccggttcgataaatgcaagtggactggtatttatcga

SEQ ID NO: 44109 - DNA, 75 bp, synthetic construct
  source 1..75: mol_type = other DNA
atgtttaagcccaggatttgcagctggataggtttacttcccctgtttatgctgagtcttccagtacaggcggaa

SEQ ID NO: 44110 - DNA, 75 bp, synthetic construct
  source 1..75: mol_type = other DNA
gctgctggacaggctggaggaagaaatccgggcagaccgcgtgagcagtgaaagccgggcgtggcttgcgcagtg

SEQ ID NO: 44111 - DNA, 75 bp, synthetic construct
  source 1..75: mol_type = other DNA
taaaaccagtcagcaagggggtaagccatgcagcatcaggtggcacggcatcacgggcagttcaggaaatccggg

SEQ ID NO: 44112 - DNA, 75 bp, synthetic construct
  source 1..75: mol_type = other DNA
gccagccagaccatcagcacgcaggcagacgagctgcggagcaaaagtcaggcactggcaaagagcaacagccag

SEQ ID NO: 44113 - DNA, 75 bp, synthetic construct
  source 1..75: mol_type = other DNA
tgcctggatgattgatgtcatccgtcacgcaataagcggtacgcaggagagggagttatcgctggccgaattatc

SEQ ID NO: 44114 - DNA, 75 bp, synthetic construct
  source 1..75: mol_type = other DNA
tcgctggcgtgcggcgttcttgccatggccgtggccgggtcgttgcgcttcttcggttttcctgaagatgccgtg

SEQ ID NO: 44115 - DNA, 75 bp, synthetic construct
  source 1..75: mol_type = other DNA
acgtttatcggcgcatcaatcggttttatgggggcagagaaagcacgcgacaaggttattgcggcctttaatcgc

SEQ ID NO: 44116 - DNA, 75 bp, synthetic construct
  source 1..75: mol_type = other DNA
tgtggctgagtatgacacgccgggtggtgagcccattgccgccctggtttcagcctgggagtttgatgcatctgc

SEQ ID NO: 44117 - DNA, 75 bp, synthetic construct
  source 1..75: mol_type = other DNA
atgaatttgataacagcccgcaggatattgccctgctgcgtaatatttccagagtgtctgccgcttcccatatgc

SEQ ID NO: 44118 - DNA, 75 bp, synthetic construct
  source 1..75: mol_type = other DNA
tgcagagcttgattatcagatcagccgtcagctggatgccgtgcttcatcatccggaatttcagaaagtggagtc

SEQ ID NO: 44119 - DNA, 75 bp, synthetic construct
  source 1..75: mol_type = other DNA
caccggaggtgcagcttaccgtcagtggttgtccgcgagtgacgccgtgtcggctggagcaggcagcgccgcgca

SEQ ID NO: 44120 - DNA, 75 bp, synthetic construct
  source 1..75: mol_type = other DNA
gtattgattttctcgatggaaatgagcgcattgcagattgcagagcgaagcattgccaacgccgggaggatgtcg

SEQ ID NO: 44121 - DNA, 75 bp, synthetic construct
  source 1..75: mol_type = other DNA
tatacagaaacgtgtcaatcgccttatatcttccacgatttcggggcgaaataaagatttaggtctttacgattt

SEQ ID NO: 44122 - DNA, 75 bp, synthetic construct
  source 1..75: mol_type = other DNA
atgcgctacgacaacgaaagaggtaaaggcgaccacaaacacattggtgctcaggaaatcagtacccactttgtt

SEQ ID NO: 44123 - DNA, 75 bp, synthetic construct
  source 1..75: mol_type = other DNA
cggatgctggcgggattactgaaacccgacagcggcagtgccacggtgattggctttgatccgatcaaaaacgac

SEQ ID NO: 44124 - DNA, 75 bp, synthetic construct
  source 1..75: mol_type = other DNA
ttctgtatggatagaaatgcatcaaagcatttttgaacaaagtcggtttaagaaaagtaactttacttttcggga

SEQ ID NO: 44125 - DNA, 75 bp, synthetic construct
  source 1..75: mol_type = other DNA
aattacaaggtcgatcattcatgctcatggcggcgagctgtcagcagaacagcaggggcgggaaattgtgttcag

SEQ ID NO: 44126 - DNA, 75 bp, synthetic construct
  source 1..75: mol_type = other DNA
gcaggcggtgacacaggccattgccggattaagtgaacgaaaagtgcagttcacgtacacggacgtgctggccag

SEQ ID NO: 44127 - DNA, 75 bp, synthetic construct
  source 1..75: mol_type = other DNA
cactattgatactcctgataaggatattctctgccagactaataattccggcagtgggcgtgtttctgccagtgt

SEQ ID NO: 44128 - DNA, 75 bp, synthetic construct
  source 1..75: mol_type = other DNA
ggcatccggttatccatgcatacaatactcagtctgtggctgacaaactggctgccagtggagaccattcggttc

SEQ ID NO: 44129 - DNA, 75 bp, synthetic construct
  source 1..75: mol_type = other DNA
cgtgagtttcacgagaagctgcgtgaactgctgacgacgctgaatctgaagctggaaccggcggatgattttcgt

SEQ ID NO: 44130 - DNA, 75 bp, synthetic construct
  source 1..75: mol_type = other DNA
atctataacaaagacagtaacaaactggatctgtacggaaaagttaatgctaagcactacttctcttctaacgat

SEQ ID NO: 44131 - DNA, 75 bp, synthetic construct
  source 1..75: mol_type = other DNA
acactacggcatcatgttcttttaccgggggcaggaccccatcgacgggcagctggcgcaggtcattaatggctt

SEQ ID NO: 44132 - DNA, 75 bp, synthetic construct
  source 1..75: mol_type = other DNA
agcagcaatcacaccattactgtcgatctcagcgccccggcgatgggcattaatatcgattccctgcaagccgac

SEQ ID NO: 44133 - DNA, 75 bp, synthetic construct
  source 1..75: mol_type = other DNA
aagaataataaaacttcagtgttgttaatcattattatcctcgccatgatccttggcgtggttaaaattcaggtc

SEQ ID NO: 44134 - DNA, 75 bp, synthetic construct
  source 1..75: mol_type = other DNA
aagcggggcggtcaaacccgtctcgtatggctttatcagccaggatgacctggcgaagcagttcctcaacgtttc

SEQ ID NO: 44135 - DNA, 75 bp, synthetic construct
  source 1..75: mol_type = other DNA
agagtggtcggcatttacgcgccgcatctcggcgcgcgtcatattcatatcaccagaacgacggactggcgcatt

SEQ ID NO: 44136 - DNA, 75 bp, synthetic construct
  source 1..75: mol_type = other DNA
ttcgtctggccggtcacccgtgacggcaaggtgcaccttactccggcccagttatccatgcttcttgagggcatc

SEQ ID NO: 44137 - DNA, 75 bp, synthetic construct
  source 1..75: mol_type = other DNA
ggaggcgctggcctccacacgggtgatgacggacggacagtcagaaacggtactgaccggtaatctggtgatggc

SEQ ID NO: 44138 - DNA, 75 bp, synthetic construct
  source 1..75: mol_type = other DNA
cggcctcctggaaaaaggagaaaatggaacatcttttccgtatgacgacatccactttgattttacgctgggtaa

SEQ ID NO: 44139 - DNA, 75 bp, synthetic construct
  source 1..75: mol_type = other DNA
atggtttcacaggaaattcttttaaatggttcttttgataagtggagtaacagggttcattcagcttatgaaaat

SEQ ID NO: 44140 - DNA, 75 bp, synthetic construct
  source 1..75: mol_type = other DNA
atgctgatgtctgtacagaaagaaaagaacgttgcagagagcgtggtatctgaagcgcatgccggcgacagcgta

SEQ ID NO: 44141 - DNA, 75 bp, synthetic construct
  source 1..75: mol_type = other DNA
ggcacgctgggcgcggcgctttctgctggtgagttcgcgcaaatcagtatcgacggcggcaccacctggcagaac

SEQ ID NO: 44142 - DNA, 75 bp, synthetic construct
  source 1..75: mol_type = other DNA
tgaccgggaaattgcagttcgatatcagcagccagtacgacaagcaacaggaacacctgctgtttactccgttgt

SEQ ID NO: 44143 - DNA, 75 bp, synthetic construct
  source 1..75: mol_type = other DNA
ggagcatttcacgtcaatcctgatgaccagcaaaaactgcccgagtgccgcaaacctgaagggatatgccggaat

SEQ ID NO: 44144 - DNA, 75 bp, synthetic construct
  source 1..75: mol_type = other DNA
aagctaaaaataactgaagatggcttaataaatggctctcgactcgcccctgctaatagcattcttcttttagta

SEQ ID NO: 44145 - DNA, 75 bp, synthetic construct
  source 1..75: mol_type = other DNA
tttgtgttgccatggcgttaagtagccagacatgggctgcggatacttcaatacccgactcaaccgaaaaaacac

SEQ ID NO: 44146 - DNA, 75 bp, synthetic construct
  source 1..75: mol_type = other DNA
cggtttctccactacttatgagtatgaaggattcggcgtgggtgcaacctatgctaaatcagatcgcactgacgg

SEQ ID NO: 44147 - DNA, 75 bp, synthetic construct
  source 1..75: mol_type = other DNA
tcaaactgttctttcagttctggagatattcgcatatggaacgggggggctttacctgttccctttggtttttta

SEQ ID NO: 44148 - DNA, 75 bp, synthetic construct
  source 1..75: mol_type = other DNA
tgcgataacgaatggggctttgctaacagaatgctcgacacgacgttagctatggctactgttgctttcaggtaa

SEQ ID NO: 44149 - DNA, 75 bp, synthetic construct
  source 1..75: mol_type = other DNA
gcggcgatctgacaatcaccgcaggcagtattaccagttccggacactggcagggcaaacgggtgctgatcaccg

SEQ ID NO: 44150 - DNA, 75 bp, synthetic construct
  source 1..75: mol_type = other DNA
acggcagatttctgcatccaggcgtgttttcgttatgcgttttgctccctttactcgccagcgccaccacatcac

SEQ ID NO: 44151 - DNA, 75 bp, synthetic construct
  source 1..75: mol_type = other DNA
cagacatgcaaacaggcgcttaagttctgccggaagcggcgctatgcaatcagcaacgttcttgatgatatgagt

SEQ ID NO: 44152 - DNA, 75 bp, synthetic construct
  source 1..75: mol_type = other DNA
acggtgattacacctttggacagggtgatgatacctggctggtaaactctcctgaggccgtagcgcaggccatta

SEQ ID NO: 44153 - DNA, 75 bp, synthetic construct
  source 1..75: mol_type = other DNA
tggataagcacatcatttgccatataggggcaattcctcttgataaatgcgatacaaggcagtggatcgcatgtt

SEQ ID NO: 44154 - DNA, 75 bp, synthetic construct
  source 1..75: mol_type = other DNA
aaccgctatcgctggactgtcgaagagtgcagggccatcaaggcggagtatcaacagaaacttaaaaaactgcga

SEQ ID NO: 44155 - DNA, 75 bp, synthetic construct
  source 1..75: mol_type = other DNA
aactgaaacaggaagccagcgtgtcgcaatacggcagattcacgcacaaaaaattaaaccatccgcactggtcac

SEQ ID NO: 44156 - DNA, 75 bp, synthetic construct
  source 1..75: mol_type = other DNA
tgcgaattacgtcactggctggcctgttttgaccggatacgcaaaaaatcccccgtaacgtctggtcacatgatg

SEQ ID NO: 44157 - DNA, 75 bp, synthetic construct
  source 1..75: mol_type = other DNA
caacaacaacccatcgggacaacaagagtacttaaacaaactcagagagctttatgctacttatcaaaaaatatc

SEQ ID NO: 44158 - DNA, 75 bp, synthetic construct
  source 1..75: mol_type = other DNA
gcggtgcgtcattcgattataacctgccctgtattgcggaaaagagtctgattgtagttgaaagcgttgccgagc

SEQ ID NO: 44159 - DNA, 75 bp, synthetic construct
  source 1..75: mol_type = other DNA
ccgctcaccagatgccagggatgcagcgagtctataaccactcccgttatctcgatgcgaaacgtaatgcgctgg

SEQ ID NO: 44160 - DNA, 75 bp, synthetic construct
  source 1..75: mol_type = other DNA
atttcacttagtgatgagcttaaaacaaaatatgcaaatgaaattatagagataaaaagaataatgggagaatac

SEQ ID NO: 44161 - DNA, 75 bp, synthetic construct
  source 1..75: mol_type = other DNA
gagaattgccggtgaaggtcgtccgtggaatcccggtgccatcaccggtggccgcgtgtggggggatatcccgga

SEQ ID NO: 44162 - DNA, 75 bp, synthetic construct
  source 1..75: mol_type = other DNA
aatgaaggcaacaggaaatatgccagccaccgatgctttcctgtctgaagtgcgggcgcagggggtggatgctgc

SEQ ID NO: 44163 - DNA, 75 bp, synthetic construct
  source 1..75: mol_type = other DNA
aaccctccggggttaccttaatgatcatggcgtaccactggctctctattctgacagacacagtatattcagagt

SEQ ID NO: 44164 - DNA, 75 bp, synthetic construct
  source 1..75: mol_type = other DNA
atattaatgttcagaacaatattgatcttgttgatggaaaaataaatccgaacaaagatacaaaagcattacaaa

SEQ ID NO: 44165 - DNA, 75 bp, synthetic construct
  source 1..75: mol_type = other DNA
cgcatcgcctctggatgaaaatgaggttataggcatagcaaagagtatttcaaaatggacgagccgaaatttatc

SEQ ID NO: 44166 - DNA, 75 bp, synthetic construct
  source 1..75: mol_type = other DNA
cgtctgctgaagccggacgtgatcgtcaacgccgccgcccataccgcggtggataaagccgagagcgagcgcgac

SEQ ID NO: 44167 - DNA, 75 bp, synthetic construct
  source 1..75: mol_type = other DNA
ggttttgctgtggctgcgtgataaccagcccgatgccatcaataatccggcgttacgggaaaagttattcacctt

SEQ ID NO: 44168 - DNA, 75 bp, synthetic construct
  source 1..75: mol_type = other DNA
tgctggaaaacgaggtggtaagcggttcgctggaggtgcagaacggcgaaatccgcgcctttgccgaaagccaga

SEQ ID NO: 44169 - DNA, 75 bp, synthetic construct
  source 1..75: mol_type = other DNA
tgactcgttgggagaagaaagtcgagaattatgaggcgatgctgcattttgcctgtggtgtcattgtctggaata

SEQ ID NO: 44170 - DNA, 75 bp, synthetic construct
  source 1..75: mol_type = other DNA
cagcaagttccagcgcaccttcgggatgacgctgccggactggactatcggcgtggatcgcatgctggctgaaat

SEQ ID NO: 44171 - DNA, 75 bp, synthetic construct
  source 1..75: mol_type = other DNA
cggttgagttcagagataatgagtctcaaaagtgagtttgaaaactacattatgttatgcaaagggcgaactgtt

SEQ ID NO: 44172 - DNA, 75 bp, synthetic construct
  source 1..75: mol_type = other DNA
ccggattgcccgtgataaccccgacagcggtgtggtggtgagaatcgccggtgaaggtcgtccgtggaatcccgg

SEQ ID NO: 44173 - DNA, 75 bp, synthetic construct
  source 1..75: mol_type = other DNA
aagaacaacagcatgatgaacttcttgattgtcttaaaattctttatccagatgagccagctttaacagtagcga

SEQ ID NO: 44174 - DNA, 75 bp, synthetic construct
  source 1..75: mol_type = other DNA
atgacaacttttaccgacgacgacaagggactgattaaagaaatcagagagcgaatcggcagcttggacgtgcga

SEQ ID NO: 44175 - DNA, 75 bp, synthetic construct
  source 1..75: mol_type = other DNA
aatattaacgtggaatttttataaggctgacggttcgcatttctgcattgactggttaaagcgccgtgtggcgcg

SEQ ID NO: 44176 - DNA, 75 bp, synthetic construct
  source 1..75: mol_type = other DNA
aagtgaagcccgaagagcactggtgcttccacaggagctgggaacgctggactttaaagaagagtttatcatcct

SEQ ID NO: 44177 - DNA, 75 bp, synthetic construct
  source 1..75: mol_type = other DNA
cgcagggacagaatctcaccgtgcaggcggacaactgggcgaacagtggttccgtgctggcaaccggtaacctta

SEQ ID NO: 44178 - DNA, 75 bp, synthetic construct
  source 1..75: mol_type = other DNA
ttcaaaaacatattcgtcaacgcgacctgatggggctggtagagcaaatggcctgcttattaagtagtggatacg

SEQ ID NO: 44179 - DNA, 75 bp, synthetic construct
  source 1..75: mol_type = other DNA
gcaaacagtgaatctcaccagcgcagtgcagaacttacgaccattactgccggcgacagtgtgatgctgagtgca

SEQ ID NO: 44180 - DNA, 75 bp, synthetic construct
  source 1..75: mol_type = other DNA
gtgcaattgttggcataacagattttaagaacaaaacgattattctggttgacgtgctccctgaacctatcgaca

SEQ ID NO: 44181 - DNA, 75 bp, synthetic construct
  source 1..75: mol_type = other DNA
gagagcaggaaaacacgctggcgaaactcgaggcaaaaacctggggggtgacgttcgtcaatggcgagaacggga

SEQ ID NO: 44182 - DNA, 75 bp, synthetic construct
  source 1..75: mol_type = other DNA
gcgctgcgggtgacacaaattgatgtcagtgctgctgagaagcctgggatggtgaatgtgcagcggctggagttt

SEQ ID NO: 44183 - DNA, 75 bp, synthetic construct
  source 1..75: mol_type = other DNA
tggttttcctcgatgcaatggtgatgaacaagccagaatttatgggcggcgtgattcagaacaaagttgatccgc

SEQ ID NO: 44184 - DNA, 75 bp, synthetic construct
  source 1..75: mol_type = other DNA
tccggtcctgaagtcgctgtcggcacgggtggggtttggggtgatggcctacaccatcgacggtcagggggatgc

SEQ ID NO: 44185 - DNA, 75 bp, synthetic construct
  source 1..75: mol_type = other DNA
gctcgttacgcaccggaaacgttcggtctggtgctcagccactctccttcaatgtggtggacgccagaaagaacc

SEQ ID NO: 44186 - DNA, 75 bp, synthetic construct
  source 1..75: mol_type = other DNA
taaaggatatcgccggacatctgctgccgatgattcgcgctgaacaaccgcagcgtcagtgggcagaccgttcgc

SEQ ID NO: 44187 - DNA, 75 bp, synthetic construct
  source 1..75: mol_type = other DNA
cgctggaaggttcgacagtgcctcacgttcagcagcttcaccagcggctgattaccgctggcgtcgaaagccatt

SEQ ID NO: 44188 - DNA, 75 bp, synthetic construct
  source 1..75: mol_type = other DNA
ggtcgtatattggcgacggtaagacgggaaatatgttcaaccaattactgacctctaaaaagctgacaaaaacgg

SEQ ID NO: 44189 - DNA, 75 bp, synthetic construct
  source 1..75: mol_type = other DNA
aaaacactgaataccgcagggaccacgcagggacagaatatcaccgtgcaggcggacagatgggcgaacagtggt

SEQ ID NO: 44190 - DNA, 75 bp, synthetic construct
  source 1..75: mol_type = other DNA
ccgtgttcttcattgtcgaatcactttttcaaaaacgaagaacagcaaaaaccgtaccgttcctatttctgaaag

SEQ ID NO: 44191 - DNA, 75 bp, synthetic construct
  source 1..75: mol_type = other DNA
gccgcagcgaattattctggctggtacgcggcggcgtggcgaaactgaatgaaagtcaccgtcttgccccactct

SEQ ID NO: 44192 - DNA, 75 bp, synthetic construct
  source 1..75: mol_type = other DNA
cgccctgccgtcattaaaagccaaacttgcgctcggcgaagattacctcaactccgatattttcgacggctttaa

SEQ ID NO: 44193 - DNA, 75 bp, synthetic construct
  source 1..75: mol_type = other DNA
ggaatggaactgtgccttcttctggcgcacatacccactcagtatcaggtaccgctacaagtgctggggcacatg

SEQ ID NO: 44194 - DNA, 75 bp, synthetic construct
  source 1..75: mol_type = other DNA
ggggcaacagcgtggtgcgcagaatatgatgaatggggcaacctgctgaatgaagagaacccgcatcagctgcag

SEQ ID NO: 44195 - DNA, 75 bp, synthetic construct
  source 1..75: mol_type = other DNA
cgctgaatatcagtcaactggcggcattgtcaggtgtacatcgccagactgctgcggcaaggctgcaaaatctac

SEQ ID NO: 44196 - DNA, 75 bp, synthetic construct
  source 1..75: mol_type = other DNA
ccgggctgagcgtgaggcgtcacagctgaagtataccggagaggcgcagaaggcgtatgagcgcctgctgacgcc

SEQ ID NO: 44197 - DNA, 75 bp, synthetic construct
  source 1..75: mol_type = other DNA
cgcccgtcttcacgaacagctgggtgagggaacggtcatccatattgtgccgcgactggccggggccggaaaggg

SEQ ID NO: 44198 - DNA, 75 bp, synthetic construct
  source 1..75: mol_type = other DNA
gtaaaggtgatgttgttactgatatttatataaggccttttttattcctactgagaaggctagaggcggtagatg

SEQ ID NO: 44199 - DNA, 75 bp, synthetic construct
  source 1..75: mol_type = other DNA
cagtaataccgatcccaatatgatttttattccgggagataaagtcacagccatcacagctcagaacgggatgct

SEQ ID NO: 44200 - DNA, 75 bp, synthetic construct
  source 1..75: mol_type = other DNA
ttttgacgcgcagctgcgggcgcagtttggtggttcgctggcgcagaaagtgatcgacgcgacaggtaatcaaca

SEQ ID NO: 44201 - DNA, 75 bp, synthetic construct
  source 1..75: mol_type = other DNA
ctggtatatctctgcaaccgtcgtgctcgcagactggacgggttcgtcaacgcgattttttccacgcgtcgcaca

SEQ ID NO: 44202 - DNA, 75 bp, synthetic construct
  source 1..75: mol_type = other DNA
ctggcgcaaattggcgatgaaactgcagacggcatttatcatccaactgaattctccccgctatcgcattttgat

SEQ ID NO: 44203 - DNA, 75 bp, synthetic construct
  source 1..75: mol_type = other DNA
ccctgcactggcaggcatgattaccacgatggttacgcagggctatgagtatcgtcgtgatgacgatatggcatt

SEQ ID NO: 44204 - DNA, 75 bp, synthetic construct
  source 1..75: mol_type = other DNA
aagcgaagaaaggtaaaaagaccggaaaaacccagacgctgaccgtctataaaccggacggcagcacgtccacgg

SEQ ID NO: 44205 - DNA, 75 bp, synthetic construct
  source 1..75: mol_type = other DNA
agaaaggcgcagggatggtgttttccattcgtaccaggagaaacaatcccactacagattcaatctggaagcaca

SEQ ID NO: 44206 - DNA, 75 bp, synthetic construct
  source 1..75: mol_type = other DNA
gccaacaccaccaatatcgccacgaacaccaccaacatcaccaacctgactgacgctgttgacagtctcggtgat

SEQ ID NO: 44207 - DNA, 75 bp, synthetic construct
  source 1..75: mol_type = other DNA
aaacagaatgtacggaggctggcgggaacaggacgctggtgaaagacggtcagtcatacagcatgtaccagagct

SEQ ID NO: 44208 - DNA, 75 bp, synthetic construct
  source 1..75: mol_type = other DNA
cagcttcacatcggctttggcaaggccagcagcccggactgtcgcggcatcacccagactgagttgcaacaaatc

SEQ ID NO: 44209 - DNA, 75 bp, synthetic construct
  source 1..75: mol_type = other DNA
tggagtatcagcctgcacctggttgagcgccctgatatggcggtgctgttatttccgtttggtctgcgtctgggg

SEQ ID NO: 44210 - DNA, 75 bp, synthetic construct
  source 1..75: mol_type = other DNA
cgaagccgctgtacaggccagcgcagcagcgaggtctgcttccgcagcgaagacatccgagacgaacgcgaaagc

SEQ ID NO: 44211 - DNA, 75 bp, synthetic construct
  source 1..75: mol_type = other DNA
gcccctctgattatatgccggaggtggctgacgatatctgctcgttgctttcttctggcgaaagtttgctgaaag

SEQ ID NO: 44212 - DNA, 75 bp, synthetic construct
  source 1..75: mol_type = other DNA
gatgcgcggtgaatggcgtgatgtcctgaccagaggtatccgggatgaactggtccgtcgcggggtaatgaaaat

SEQ ID NO: 44213 - DNA, 75 bp, synthetic construct
  source 1..75: mol_type = other DNA
atttactaattttgcatgggtgaatacatccggtgatacctatgatgtttatgttgaaataggtaattacgccac

SEQ ID NO: 44214 - DNA, 75 bp, synthetic construct
  source 1..75: mol_type = other DNA
cacagagtccttcatgaacaagccgaaagacattctgtcaccggatgcaccgttcattcagaccggcagggatgt

SEQ ID NO: 44215 - DNA, 75 bp, synthetic construct
  source 1..75: mol_type = other DNA
gcatataccggcgctttccgggctgatcgacaccatgacaccgcaggggtttaactaccagcgcgatgatgagat

SEQ ID NO: 44216 - DNA, 75 bp, synthetic construct
  source 1..75: mol_type = other DNA
gaatgggttccccgggtggagtgggtggagagttgtccgtttaataaagcggatggcgtgctgacaggcactgag

SEQ ID NO: 44217 - DNA, 75 bp, synthetic construct
  source 1..75: mol_type = other DNA
gtggccggataaccgcatcgcagaggatgcgcactatgtttaccactatgatgaatacggcagactgacggagaa

SEQ ID NO: 44218 - DNA, 75 bp, synthetic construct
  source 1..75: mol_type = other DNA
tttaaataatggcatagtcggttttgatgaaggctggaacgcctgccgcgccaccatgcttcatggtgccaaacc

SEQ ID NO: 44219 - DNA, 75 bp, synthetic construct
  source 1..75: mol_type = other DNA
gtatctctgtagggcagtataaagctgccatgcgtatgctgcctgcgcagttcaccgacgtggccacgcagcttg

SEQ ID NO: 44220 - DNA, 75 bp, synthetic construct
  source 1..75: mol_type = other DNA
ggaaaacagacattgaaagatatggtcccaatcgtctgagaagagcagaaaaacttacacctgtactcaatcagt

SEQ ID NO: 44221 - DNA, 75 bp, synthetic construct
  source 1..75: mol_type = other DNA
ggccgttaatcacttaccgacaggggattacggggcgctcacgtattgatgacgcatttgcccgcaaaggtttgc

SEQ ID NO: 44222 - DNA, 75 bp, synthetic construct
  source 1..75: mol_type = other DNA
cgaatttgcggcgtgatttttgactgggatgagtacagtctcgatttatgtagcgatatcaatcagcttaatgaa

SEQ ID NO: 44223 - DNA, 75 bp, synthetic construct
  source 1..75: mol_type = other DNA
tcttgcgattcccgacggcgaaacagttccgtatctcgtctaactttaacccgcgtcgtactaatccggtgaccg

SEQ ID NO: 44224 - DNA, 75 bp, synthetic construct
  source 1..75: mol_type = other DNA
gttcgcagtgacagagccaaatcaggtatggtgcggcgacgtgacgtacatctggacggggaaacgttgggcata

SEQ ID NO: 44225 - DNA, 75 bp, synthetic construct
  source 1..75: mol_type = other DNA
gtgaactggcgcagaatcgtctggctattggcgttggttactctgccaacgcttgcggaggagacgccgttacaa

SEQ ID NO: 44226 - DNA, 75 bp, synthetic construct
  source 1..75: mol_type = other DNA
accattacaacggtgggttgacgccggaagaatcagagaacagataccgtttttactgtaaaaccgtggccaata

SEQ ID NO: 44227 - DNA, 75 bp, synthetic construct
  source 1..75: mol_type = other DNA
tgcagacatcccaccacttcccagctgatttaacctacagattatttcctagtgagcttgcatatctcattgacg

SEQ ID NO: 44228 - DNA, 75 bp, synthetic construct
  source 1..75: mol_type = other DNA
ggagggccgtgattcatattgtaccgaggctggcaggggccgggggaaatggtgtttttcaggtggtgctggggg

SEQ ID NO: 44229 - DNA, 75 bp, synthetic construct
  source 1..75: mol_type = other DNA
ctgctgttcactccggatcttcactctttacccgaaggtattcatggttttcatgtacacgagaacggaaactgc

SEQ ID NO: 44230 - DNA, 75 bp, synthetic construct
  source 1..75: mol_type = other DNA
aactgacagggttacaagagataggcgggcgttctctcatgatccacataggcggtgacaaccatcatgaccatc

SEQ ID NO: 44231 - DNA, 75 bp, synthetic construct
  source 1..75: mol_type = other DNA
gaccaacggggagaatcaaaaggagatggtctatgggggccaggtaaagcaagtaatgatacaaaagaagctgct

SEQ ID NO: 44232 - DNA, 75 bp, synthetic construct
  source 1..75: mol_type = other DNA
cgataaaaagtgcggtgtctcagattgcctcgtcactcagtttctctctgagtaacggcagcaatctgtcgatga

SEQ ID NO: 44233 - DNA, 75 bp, synthetic construct
  source 1..75: mol_type = other DNA
aggaaagccgccgctggctggcatcgtgcggcctgaccgtggagcagatgcaaaaccagatggacccggtgtaca

SEQ ID NO: 44234 - DNA, 75 bp, synthetic construct
  source 1..75: mol_type = other DNA
aacacgtacttttcctcgctggataacatgattgcccaggggaacccgatgccggtgccttacggtgaaatgctg

SEQ ID NO: 44235 - DNA, 75 bp, synthetic construct
  source 1..75: mol_type = other DNA
cctgtaaccacactcagtgggacgattattcttcagctggcactgttcaacattctgctccccttcgtcatcgtc

SEQ ID NO: 44236 - DNA, 75 bp, synthetic construct
  source 1..75: mol_type = other DNA
ctgtttcatgtgtgggcaatgatcattcagcctcgatcattcttgatggatttaaaaaatatcatgtaaattgtg

SEQ ID NO: 44237 - DNA, 75 bp, synthetic construct
  source 1..75: mol_type = other DNA
ccgagtatgccggcaagggcaagcagacccgcaaggaactgttcctgatcgagatgggtcaggtggtgccgtgga

SEQ ID NO: 44238 - DNA, 75 bp, synthetic construct
  source 1..75: mol_type = other DNA
ctgtggaaacgctgtcgttatgcctggtatacctttcgtattccagctagcgaattacccggccaggttaacagt

SEQ ID NO: 44239 - DNA, 75 bp, synthetic construct
  source 1..75: mol_type = other DNA
aaaattcttcaccgcaaaatttgagccattggtttctgacggagtgctgacgcgagaagagtcatttgaactaaa

SEQ ID NO: 44240 - DNA, 75 bp, synthetic construct
  source 1..75: mol_type = other DNA
ctcctgcggcagagataaatagtaagcaaaacgaatcgttacctgatttaggcagccaggcggctcaacaagtag

SEQ ID NO: 44241 - DNA, 75 bp, synthetic construct
  source 1..75: mol_type = other DNA
gtggctggtctgccggggtgaaattcaccggttccgctgtgtgccgcacctgaccggacggcgctttgaacacgg

SEQ ID NO: 44242 - DNA, 75 bp, synthetic construct
  source 1..75: mol_type = other DNA
gtactgacctaccgacaactacattcccttcgcaggggttcaccggggcgtattatcagttgaataatgacaact

SEQ ID NO: 44243 - DNA, 75 bp, synthetic construct
  source 1..75: mol_type = other DNA
acgagtttggctttgctgaaggcgcggcggtatttggcgaaagttacaaagccctgccggaaaccccggcacaga

SEQ ID NO: 44244 - DNA, 75 bp, synthetic construct
  source 1..75: mol_type = other DNA
atgaacaggcacacacaaatccgccaggcagtactggcaagcctgaagggcgaatgcggggggaatgtcgtgctt

SEQ ID NO: 44245 - DNA, 75 bp, synthetic construct
  source 1..75: mol_type = other DNA
gatccgggtaatgaactaacaggaaaggttgctgtattcgaaaatggaggatgggtcttgaaagaagaccatcga

SEQ ID NO: 44246 - DNA, 75 bp, synthetic construct
  source 1..75: mol_type = other DNA
atgcacgattacctgctttttttactgggacttacaccgcttctggcgatgatcattttgattctgaaagtcaaa

SEQ ID NO: 44247 - DNA, 75 bp, synthetic construct
  source 1..75: mol_type = other DNA
tggaaatacgcatcccgtttattgcacaaacaggtcaaacccttaaagaaaaggcggaaggcaagcaaccagaaa

SEQ ID NO: 44248 - DNA, 75 bp, synthetic construct
  source 1..75: mol_type = other DNA
aattttaaagcaatagataaccacgggaaggaaataacaaacagaaaaggattacctaatgtctgcagagttcat

SEQ ID NO: 44249 - DNA, 75 bp, synthetic construct
  source 1..75: mol_type = other DNA
tatgctgggccagcataaaacgcgcctgaagcgcctcatgcccgaccggcaaccggagagtccggtctgtatgac

SEQ ID NO: 44250 - DNA, 75 bp, synthetic construct
  source 1..75: mol_type = other DNA
aaaggtcagggcgtcaccttaaccggcgaccataaagcgggaggtaacctgagcgtcagcagccggagagatatc

SEQ ID NO: 44251 - DNA, 75 bp, synthetic construct
  source 1..75: mol_type = other DNA
tacaaaaccctggcatgagtgggctgattatccggtgtcacgtagttttttgatcgccaaagcagcttctccgtg

SEQ ID NO: 44252 - DNA, 75 bp, synthetic construct
  source 1..75: mol_type = other DNA
ttgaactagtggaagatgcaccgctgaccgatggtctcagtgtcagtcttaatgctatgtccgaacatcgcctcg

SEQ ID NO: 44253 - DNA, 75 bp, synthetic construct
  source 1..75: mol_type = other DNA
ccgttcccataccgtttctgcgcaaggcggcattaccgttgcgctgggtaatacccatgaagataactgggaatg

SEQ ID NO: 44254 - DNA, 75 bp, synthetic construct
  source 1..75: mol_type = other DNA
caaaccgcctacgcccgatccaagtaaattgccggacatagcgaaacaattaagactgccatatcctattgacca

SEQ ID NO: 44255 - DNA, 75 bp, synthetic construct
  source 1..75: mol_type = other DNA
aacgcagcacaacagcgcgtgcttgccgacaaaaacgaaaaaatcgactcgctctccacaaaactggagaagaaa

SEQ ID NO: 44256 - DNA, 75 bp, synthetic construct
  source 1..75: mol_type = other DNA
gcgagcggcaccagatgcgcggtcaggacttcgtgtttaacctcaaaagcgaatacccggcccgcgaacaggtga

SEQ ID NO: 44257 - DNA, 75 bp, synthetic construct
  source 1..75: mol_type = other DNA
gagaagatacagcaggaagggagcgaagacggtcacggtgtggtgttcccggctgaactggtggggctgctggac

SEQ ID NO: 44258 - DNA, 75 bp, synthetic construct
  source 1..75: mol_type = other DNA
catgttgatgttcttgctgccaccagtacagatacgtcctggcgctttaaggaaacgaagaaatccggtctgatg

SEQ ID NO: 44259 - DNA, 75 bp, synthetic construct
  source 1..75: mol_type = other DNA
gcgccatcggctttcacatgcgcgactggtggcagccgacgaaagcaaactttttcggacacctgaaaaagccgc

SEQ ID NO: 44260 - DNA, 75 bp, synthetic construct
  source 1..75: mol_type = other DNA
tttgacgccgcacccggtctggattccgaagctggttaccgccaccatgaggcacagcggaaaaaaagtaatatc

SEQ ID NO: 44261 - DNA, 75 bp, synthetic construct
  source 1..75: mol_type = other DNA
aatggttgatggtctggagctgatttcatgggttatggattctgcaaatgaagttgatgctgatatcattttgca

SEQ ID NO: 44262 - DNA, 75 bp, synthetic construct
  source 1..75: mol_type = other DNA
gacgtctaccgtcagacagatcctttcggtgaactgtatgttattgcagtaccggaagccaaaggggcggcggcg

SEQ ID NO: 44263 - DNA, 75 bp, synthetic construct
  source 1..75: mol_type = other DNA
tcgccagtatgtgtatgggattatttattgctcagcttgatattcaaattgtatcgtcatccctaaatgaaatag

SEQ ID NO: 44264 - DNA, 75 bp, synthetic construct
  source 1..75: mol_type = other DNA
tttatattgcttgttgatataattaatttatttctttttctaagaaaaggaatgatggtaagtagtttttctcaa

SEQ ID NO: 44265 - DNA, 75 bp, synthetic construct
  source 1..75: mol_type = other DNA
gagacgctgaattgtgttcctggtgcacgtcagactttgcctgatggcgcaatacagcttcttgacgtgatatgc

SEQ ID NO: 44266 - DNA, 75 bp, synthetic construct
  source 1..75: mol_type = other DNA
gcaacttgggatcaaacagggggcagacagtgcattgtctgcccgtaaaaaagtgtttaacggaggtggagtgtg

SEQ ID NO: 44267 - DNA, 75 bp, synthetic construct
  source 1..75: mol_type = other DNA
atggttactcctactcttaatttcgaccactcgcaccacaaactcaaaattcgcggcctgcaaggtccggtggat

SEQ ID NO: 44268 - DNA, 75 bp, synthetic construct
  source 1..75: mol_type = other DNA
tgttcttcgcaaactgaaatcggtcatcacaagcaagtacggacgtcacaagctggcaaatgatggtacccgttt

SEQ ID NO: 44269 - DNA, 75 bp, synthetic construct
  source 1..75: mol_type = other DNA
aaggagactgtgagtctttcttctctggtcatgtcagccacatctgctatttatcaggctattacggacggctgg

SEQ ID NO: 44270 - DNA, 75 bp, synthetic construct
  source 1..75: mol_type = other DNA
gcacggaccaatcgcagtgtattgctgacggaagcaggaaaacagtttcttgtagatagtcggcaaatcctgtct

SEQ ID NO: 44271 - DNA, 75 bp, synthetic construct
  source 1..75: mol_type = other DNA
cgaaaaatacagacgcccggcggctatatcacctatgacactgaccgctcacgcggtgtcagtcatggtgatctc

SEQ ID NO: 44272 - DNA, 75 bp, synthetic construct
  source 1..75: mol_type = other DNA
gagatgatgacagagcagcatgacgccaccgggggcgataacaccacctatggcgaagcctaccactacgctgac

SEQ ID NO: 44273 - DNA, 75 bp, synthetic construct
  source 1..75: mol_type = other DNA
tattttcattttccggggccgcagcggcagtcaggttaaactgctgtggtccaccggtgacggactgtgcctcct

SEQ ID NO: 44274 - DNA, 75 bp, synthetic construct
  source 1..75: mol_type = other DNA
gaagccgagatactcaaagaggccgtggagttcggccgggcaaaaaaatggattgcgcatgcgccctcgttgcct

SEQ ID NO: 44275 - DNA, 75 bp, synthetic construct
  source 1..75: mol_type = other DNA
gcgcttcgtgcgctgctgttaagtcgcaaaaatccgtttggcgatatcaaatcggacggcacggtgaaaacggct

SEQ ID NO: 44276 - DNA, 75 bp, synthetic construct
  source 1..75: mol_type = other DNA
gaatgagcaacgcactgccgtgaccccaatgggatttaatgtgccctttgccgtgtcacagaacagtgccgatgc

SEQ ID NO: 44277 - DNA, 75 bp, synthetic construct
  source 1..75: mol_type = other DNA
ctcagcctctctgttaacgtcattcagggggtgaataactaccgtcttcagaatgagcaacgcactgccgtgacg

SEQ ID NO: 44278 - DNA, 75 bp, synthetic construct
  source 1..75: mol_type = other DNA
ccgaagctaacagagccaatacgcgtcttgatgctcaggactattttgattgcctgcgctgcttgcgtatgtacg

SEQ ID NO: 44279 - DNA, 75 bp, synthetic construct
  source 1..75: mol_type = other DNA
gctggggctgggtgttggcagcaccattgccggaaccactgataccacagctaaagagcgtgagcctgtcgatcc

SEQ ID NO: 44280 - DNA, 75 bp, synthetic construct
  source 1..75: mol_type = other DNA
ctgaaaaatgaggatgtttttgccggtggtgatattgcacttgctacagcggctggggcttggctggggcttgag

SEQ ID NO: 44281 - DNA, 75 bp, synthetic construct
  source 1..75: mol_type = other DNA
gtctgcgtgaggccatcaagtcaggcatggcggaaacgaatgcggagctgtacgagtaccgcgaacagaaaattg

SEQ ID NO: 44282 - DNA, 75 bp, synthetic construct
  source 1..75: mol_type = other DNA
cgttcttttttcccgatatcgacccgaagcgcgtccgggaacgtatgcgccttgagcagaccgtcgcccccgccc

SEQ ID NO: 44283 - DNA, 75 bp, synthetic construct
  source 1..75: mol_type = other DNA
actttccaaccagaagtggttgtgttgaatgccggatttgcgcatgttctggggcatggcgcgataattatggga

SEQ ID NO: 44284 - DNA, 75 bp, synthetic construct
  source 1..75: mol_type = other DNA
tacaccgaccaccctttcgcacatggcagaccagcgaaagtgtttaatcgacgcggcgaaaaatccacggcatca

SEQ ID NO: 44285 - DNA, 75 bp, synthetic construct
  source 1..75: mol_type = other DNA
atatcgaacagccgctttatgagcactgggaaaagcagggctactttaagcctaatggcgatgaaagccaggaaa

SEQ ID NO: 44286 - DNA, 75 bp, synthetic construct
  source 1..75: mol_type = other DNA
gggataataaaaaaggtggtatgtggtcacaggattatacaactactgataaatattcaacgtgcaaagaggatg

SEQ ID NO: 44287 - DNA, 75 bp, synthetic construct
  source 1..75: mol_type = other DNA
gaacctaacccaaccgatagaaatgtggaagaggggattaaatcctatcgtgagaatgagtgtaatgccattgtg

SEQ ID NO: 44288 - DNA, 75 bp, synthetic construct
  source 1..75: mol_type = other DNA
ggaaaactacgtatgtgggggcgctggtcatatattggtggtggcaggtcaggaaatatgttcaatcagttgttg

SEQ ID NO: 44289 - DNA, 75 bp, synthetic construct
  source 1..75: mol_type = other DNA
ttacgtttatctgaacggcacgcgactgcttgtggaacttccgtaccagaccgtacgagaaatcattagcgaagc

SEQ ID NO: 44290 - DNA, 75 bp, synthetic construct
  source 1..75: mol_type = other DNA
gcgggcgtcgttaaatggtcatctggaacaagccgcacaccgcattgcgcctgagttttccgcattcctgactcg

SEQ ID NO: 44291 - DNA, 75 bp, synthetic construct
  source 1..75: mol_type = other DNA
gtgaggtgctggcagaacatccgggattgattagcatcctccgacaacggtatgaggggcgaggaatgagtaaga

SEQ ID NO: 44292 - DNA, 75 bp, synthetic construct
  source 1..75: mol_type = other DNA
atatgtttgcgggcctgagtggtctttcactggctgcatttgtcgtgctgggcggtatgacgttatctataggtg

SEQ ID NO: 44293 - DNA, 75 bp, synthetic construct
  source 1..75: mol_type = other DNA
acatgcgaaaagcgaattgctaattggttggcagttgctgagtatgtcctatatattcccatgcgagaatcattt

SEQ ID NO: 44294 - DNA, 75 bp, synthetic construct
  source 1..75: mol_type = other DNA
ctgatttgccaaaaggacaggctactcatgtgatgcgtcatacgttcgccacgcatttcatgatgaacgggggaa

SEQ ID NO: 44295 - DNA, 75 bp, synthetic construct
  source 1..75: mol_type = other DNA
tatttatccgttttattgattttcgcggtgaactgttattacgcgcatccgctattgatggagtgactccggcgg

SEQ ID NO: 44296 - DNA, 75 bp, synthetic construct
  source 1..75: mol_type = other DNA
gcaaccatcctcaaactaatgaatatggtctgattagcaatgtcacacactggatgccactaccagaaccgccgc

SEQ ID NO: 44297 - DNA, 75 bp, synthetic construct
  source 1..75: mol_type = other DNA
gcagtcgtcttgcgcgtcgggaatatggttccctgctgtctgccctgatagaccagccgcagaccccggcgctgc

SEQ ID NO: 44298 - DNA, 75 bp, synthetic construct
  source 1..75: mol_type = other DNA
tttatgcgtgataacgactttgacactccggtgatggtgatgtgttatcacggcaatagcagcaaaggcgcggcg

SEQ ID NO: 44299 - DNA, 75 bp, synthetic construct
  source 1..75: mol_type = other DNA
gggaacaggaacaggctgggttgctatcggtgaagatgcaaaagcaaatagttttacagacaccgggggtggctc

SEQ ID NO: 44300 - DNA, 75 bp, synthetic construct
  source 1..75: mol_type = other DNA
gtattctgtaaacctgctgctttcaacgctatccgttacagtgctggcatggttaacgcgttccagtatgcaagc

SEQ ID NO: 44301 - DNA, 75 bp, synthetic construct
  source 1..75: mol_type = other DNA
ccatcaatgaagccctgcgcagaatgaaaaaagcgggaatagagaaagctgagctggaagcgtttttgcgagaga

SEQ ID NO: 44302 - DNA, 75 bp, synthetic construct
  source 1..75: mol_type = other DNA
gacggtggatgaatccatcgccagtatgaaggcgtcgttactgaaaaaaatcaaacgttctgcctacgtttaccg

SEQ ID NO: 44303 - DNA, 75 bp, synthetic construct
  source 1..75: mol_type = other DNA
tgtctatgacgcttccttacctgttcctcgcgctggctttcccgttctttaaagcacgtcaggatctcgacagac

SEQ ID NO: 44304 - DNA, 75 bp, synthetic construct
  source 1..75: mol_type = other DNA
ctggcggcgtaaaagtgcttaagcagctgccggaagcacaggcttttgtacagcaaatgttgggatcgcaactgg

SEQ ID NO: 44305 - DNA, 75 bp, synthetic construct
  source 1..75: mol_type = other DNA
tcgccgactggcagcactcaacatgctggcagagcgtggcatcattccggctgactggcctgtacgcgtgaaggt

SEQ ID NO: 44306 - DNA, 75 bp, synthetic construct
  source 1..75: mol_type = other DNA
gggccgtgattatcgtgtgactttcgtcgacccgtatacagcttatgggtccggattcgttcaggcgcattgtga

SEQ ID NO: 44307 - DNA, 75 bp, synthetic construct
  source 1..75: mol_type = other DNA
ctgaagtataccggagaggcgcagaaggcgtatgagcgcctgcagacgccactggagaaatataccgcccgtcag

SEQ ID NO: 44308 - DNA, 75 bp, synthetic construct
  source 1..75: mol_type = other DNA
caggcttcagtaatcagggcccctgtttcgggaaaagttcagcaactgaaggttcatactgaaggtggggttgtt

SEQ ID NO: 44309 - DNA, 75 bp, synthetic construct
  source 1..75: mol_type = other DNA
gattggcatgctgaaaaatcagctcagtgttgccggtcagattgccagacgtaatgaatccgcgcaggtggttct

SEQ ID NO: 44310 - DNA, 75 bp, synthetic construct
  source 1..75: mol_type = other DNA
ggtgaaccgggctgacagcattgtgggaaacaccgggcagcagtgcagtgcgcagcagataaaccgcagtgagtt

SEQ ID NO: 44311 - DNA, 75 bp, synthetic construct
  source 1..75: mol_type = other DNA
tggagcgtagctgatatggctgccacgatcccctgtagcgaagcctggttgcgtcgtctgtttttacgctatacc

SEQ ID NO: 44312 - DNA, 75 bp, synthetic construct
  source 1..75: mol_type = other DNA
cgacattatcagcgaactgaacagcctgagcgataaaatccagaaactgtctgacgatgcggccacggcgaacgc

SEQ ID NO: 44313 - DNA, 75 bp, synthetic construct
  source 1..75: mol_type = other DNA
gctgatgccggggctggagataaaagttcagggcgacgacgcgccagcggtgttccgcaagggcgtactgattac

SEQ ID NO: 44314 - DNA, 75 bp, synthetic construct
  source 1..75: mol_type = other DNA
caacagtgaagaaaaggcgctgggaaaggcaaaggacaataaactgacggtgagtgtgggtgagttctgttcgaa

SEQ ID NO: 44315 - DNA, 75 bp, synthetic construct
  source 1..75: mol_type = other DNA
gctgcaggatgtggaaagcggggagatgatcctgctggatgtgacggccgcagaaaaggggcccactgagcctgt

SEQ ID NO: 44316 - DNA, 75 bp, synthetic construct
  source 1..75: mol_type = other DNA
accaaaggagggtgatttacgccctgaggtaatgaagcgttttgaggaaatggtaaataccgttgttcgcttgtc

SEQ ID NO: 44317 - DNA, 75 bp, synthetic construct
  source 1..75: mol_type = other DNA
acgctgaccgcacggaacaggtgcaggaaaaagcgtcagtggaggaaatcagtctgccactactgacgaaaatgt

SEQ ID NO: 44318 - DNA, 75 bp, synthetic construct
  source 1..75: mol_type = other DNA
ccggcggtgatcaaaggggaactgctggcaacctaccgtcagcttgagcgtgcggggatcgtggaaaactacgaa

SEQ ID NO: 44319 - DNA, 75 bp, synthetic construct
  source 1..75: mol_type = other DNA
gggtatgctggcaaacatagcgggcaaagggcaactctatcgcgccgatcttgatcgtaacggcattcaggatct

SEQ ID NO: 44320 - DNA, 75 bp, synthetic construct
  source 1..75: mol_type = other DNA
cggtagcaaaagtggtggcaggaaataagcgttatcccggcgtcgttgcgctggataacgttaacttcacgctca

SEQ ID NO: 44321 - DNA, 75 bp, synthetic construct
  source 1..75: mol_type = other DNA
aacttcctgcaaaaaggcgataaagaggcagcggaaagcggcgcgttttatgcccgtatccgtcacgaacgctac

SEQ ID NO: 44322 - DNA, 75 bp, synthetic construct
  source 1..75: mol_type = other DNA
ataatagttttttcgctaaaaatgatgtggcgaaatatgaacaggccggatgggaacttgctgatattgtcgaag

SEQ ID NO: 44323 - DNA, 75 bp, synthetic construct
  source 1..75: mol_type = other DNA
gtgaagtggtgaaaggcgcgaaagtctatggttaccgccagaaaccacgtgaagcgacgctggactgcaaatttc

SEQ ID NO: 44324 - DNA, 75 bp, synthetic construct
  source 1..75: mol_type = other DNA
gcgggcgtcgttaaatggtcatctggaacaagccgcgcaccgcgtcgcgcctgagttttccgcattcctgacgcg

SEQ ID NO: 44325 - DNA, 75 bp, synthetic construct
  source 1..75: mol_type = other DNA
gacaacggcggaagtggtgaaggattcgggcctttgatactttccctgcgtctgaaagataaaggggggaacacg

SEQ ID NO: 44326 - DNA, 75 bp, synthetic construct
  source 1..75: mol_type = other DNA
atgaaggctggtatctcagtccgttctggtcgtcggatcgaaaaaggagagtgggcaaaaaacagtgttcggcac

SEQ ID NO: 44327 - DNA, 75 bp, synthetic construct
  source 1..75: mol_type = other DNA
gcagagtcacgctctctcctggcgaaacaaatcgatccacaggaacatcagcaagaacaacttcgcagttcgctt

SEQ ID NO: 44328 - DNA, 75 bp, synthetic construct
  source 1..75: mol_type = other DNA
ggcaaaatcaggtttaaaccgttcgatactggatcagggctggtatgaaatgcgccgccagcttgagtacaagca

SEQ ID NO: 44329 - DNA, 75 bp, synthetic construct
  source 1..75: mol_type = other DNA
gtgaagcacgtcgtctacagcgtaccttcccggcttgtaggtcaactgttacgggtccggttatgggacgatcgt

SEQ ID NO: 44330 - DNA, 75 bp, synthetic construct
  source 1..75: mol_type = other DNA
gatgcaccggccgcacaggatggacagtgtctgaccgccgcacgtgctgccatcgatgtcaataaccaggctttc

SEQ ID NO: 44331 - DNA, 75 bp, synthetic construct
  source 1..75: mol_type = other DNA
agattgctggtggtattcgtccgctagggcgtgcaataggggcttggccatctcaaatacacaaatgggcaaatg

SEQ ID NO: 44332 - DNA, 75 bp, synthetic construct
  source 1..75: mol_type = other DNA
ataatatgatggctgctgtttcagttgcgctgcagcctctggtcagggttgtaccgatgacggcagttgaatggg

SEQ ID NO: 44333 - DNA, 75 bp, synthetic construct
  source 1..75: mol_type = other DNA
ccacgctggcttaccctacatctcaggaatggagagctgaaccagtaaccgacacagagacaccacgcccacata

SEQ ID NO: 44334 - DNA, 75 bp, synthetic construct
  source 1..75: mol_type = other DNA
gctatgtattgcagctaggcggcgatttggcgcagtggagtagcaacgcgcaggatcgctggcatcttggcgtga

SEQ ID NO: 44335 - DNA, 75 bp, synthetic construct
  source 1..75: mol_type = other DNA
cgaaggtgagcgccacaatgcgctggatgatgcccgttaccaggcaaaatacgtttcaactatctggcaaaaact

SEQ ID NO: 44336 - DNA, 75 bp, synthetic construct
  source 1..75: mol_type = other DNA
taccaaaagagatggctacgcctgcagagttcgcggaatgggaaggtatctcccgcggctccgtgtatcaaaaaa

SEQ ID NO: 44337 - DNA, 75 bp, synthetic construct
  source 1..75: mol_type = other DNA
aacgtgattccactggcaccgggccatgcctacgggatgtttatggaacgcttcaacgagttatcggaattacgc

SEQ ID NO: 44338 - DNA, 75 bp, synthetic construct
  source 1..75: mol_type = other DNA
gggaaaagtgctgcccgagttgtggtaccggggtatacagcagggaggggggggcaggagggcaactggaaggat

SEQ ID NO: 44339 - DNA, 75 bp, synthetic construct
  source 1..75: mol_type = other DNA
caagttcgaggcgcagcgacgctatgccaccctggtggcgcttgccatcgagggcatggccaccgtcaccgacga

SEQ ID NO: 44340 - DNA, 75 bp, synthetic construct
  source 1..75: mol_type = other DNA
agtaccgaccagagcctggtgctgtgcgacacagtccgccatctgcccgaatcttttgaaatcccctggaatccg

SEQ ID NO: 44341 - DNA, 75 bp, synthetic construct
  source 1..75: mol_type = other DNA
ttgacgttttgcggggacctgccgtttgttccctccggtattaaccatcacccgtttgagaaccttcgccgcaag

SEQ ID NO: 44342 - DNA, 75 bp, synthetic construct
  source 1..75: mol_type = other DNA
ttgacgtttcgcgggaacctgctgctgtattcactgtggtatgaacttcacccgtttgagaaccttcgccgcaag

SEQ ID NO: 44343 - DNA, 75 bp, synthetic construct
  source 1..75: mol_type = other DNA
gataatccagaatcatcgacagaatctgttggtatcggtgcaggtgttgacgcttcagttatgactctggcttgt

SEQ ID NO: 44344 - DNA, 75 bp, synthetic construct
  source 1..75: mol_type = other DNA
ccgccagcttgagtacaagcagctctggcgtggcggtcaggtgcttgctgttccgccagcgtacacaagccagcg

SEQ ID NO: 44345 - DNA, 75 bp, synthetic construct
  source 1..75: mol_type = other DNA
ggggaaaatcagatacctgatatgtcatcatatgcatcaggttcaggctggcgaaaaatgccagatggttcaatt

SEQ ID NO: 44346 - DNA, 75 bp, synthetic construct
  source 1..75: mol_type = other DNA
cggctgaactggtgcggctgctggacaggctggaggaagaaatccgggcagaccgcgtgagcagtgaaagccggg

SEQ ID NO: 44347 - DNA, 75 bp, synthetic construct
  source 1..75: mol_type = other DNA
cttctgtgggaggactatcagacctggaaggaaggcggcgacagcctgattgactggggcaagtggaagccggag

SEQ ID NO: 44348 - DNA, 75 bp, synthetic construct
  source 1..75: mol_type = other DNA
tatccaaggctgttcccctcattcgagccttccgaaaactatgcgcttagcgtgacggtctccgacagtcagtcg

SEQ ID NO: 44349 - DNA, 75 bp, synthetic construct
  source 1..75: mol_type = other DNA
ctccatggagcagatggtggaggacgctgtggccgccatccccgatgacagcagcattgaactcaaagccgcgga

SEQ ID NO: 44350 - DNA, 75 bp, synthetic construct
  source 1..75: mol_type = other DNA
ggaaatggaaggcactgaacatctgcacaaggagaacactggcagcgatcagtatcacgccagcgataataaaac

SEQ ID NO: 44351 - DNA, 75 bp, synthetic construct
  source 1..75: mol_type = other DNA
ctcaccattccttaacagcatcactatggttcctgacaccacgaaatacggacgggcaattatccgtttgcttgg

SEQ ID NO: 44352 - DNA, 75 bp, synthetic construct
  source 1..75: mol_type = other DNA
ttatccgcgcggtggcggtggtaacgcgccgtctgaaaccgctgaatgtaaacggtcagcaggttgaaacggtgg

SEQ ID NO: 44353 - DNA, 75 bp, synthetic construct
  source 1..75: mol_type = other DNA
cgaaagggaagaaatttctctttggtttgttggcggttttcattattgcggcgtcggttgtgactcgcgcgacta

SEQ ID NO: 44354 - DNA, 75 bp, synthetic construct
  source 1..75: mol_type = other DNA
atgaccatccgctacactgcaacactgaacaataaacacctgtccctgaccgccctgtaccctgacggtggtcag

SEQ ID NO: 44355 - DNA, 75 bp, synthetic construct
  source 1..75: mol_type = other DNA
ggaaatggaagaaacgccatctgatgaaaaggtagctaatgataatgaggaggatgtgttagagaattttgcctc

SEQ ID NO: 44356 - DNA, 75 bp, synthetic construct
  source 1..75: mol_type = other DNA
ccgtcggaaccgattttcaccggagtttaaatggagacttgttcagcaaactcttttacccggtgcctgtgtcgc

SEQ ID NO: 44357 - DNA, 75 bp, synthetic construct
  source 1..75: mol_type = other DNA
acaacccgatgatattcaccgaacgggccggaggtgtggcacgtcgtcgcgtgattttccgtttcgacaatatcg

SEQ ID NO: 44358 - DNA, 75 bp, synthetic construct
  source 1..75: mol_type = other DNA
attctgaactctggcggttgtggcagaaagccgggatcaatgatgtggagagtgtggatgggctggatgtcatga

SEQ ID NO: 44359 - DNA, 75 bp, synthetic construct
  source 1..75: mol_type = other DNA
ttgatttgtggatggaaagagaatatcggggggtaccgtttgagaggtacgctgatgatattgtaacattgttca

SEQ ID NO: 44360 - DNA, 75 bp, synthetic construct
  source 1..75: mol_type = other DNA
ccgcataagcaatacccgctgattgcgaacgcactaaaagaaatggccgacgccggattggttgctgaggttctc

SEQ ID NO: 44361 - DNA, 75 bp, synthetic construct
  source 1..75: mol_type = other DNA
gtgaagacgctggataaacaggttgatgtaactcccgatgaagatgctgttatgcagaaaatcagtggtggcgtc

SEQ ID NO: 44362 - DNA, 75 bp, synthetic construct
  source 1..75: mol_type = other DNA
gtttttctgctgccttcgattaccggaagtgatggcgacatggaagggatccctgtcgcgctgatggaggcaatg

SEQ ID NO: 44363 - DNA, 75 bp, synthetic construct
  source 1..75: mol_type = other DNA
atgacagactggttaagccgcttcggtaccgcaagaatcacgctgggcgtggatgaagattttagcctgaagaac

SEQ ID NO: 44364 - DNA, 75 bp, synthetic construct
  source 1..75: mol_type = other DNA
gtgtgagctgcatcttaaatcaggtgtggtaaaactgtttgcccccctcactccggaacttcttagggtgctcat

SEQ ID NO: 44365 - DNA, 75 bp, synthetic construct
  source 1..75: mol_type = other DNA
cttcagtggctgtatgccatcgatgtgctgattgaaacacagggcgaggtttgcctccttccccttccaggcgat

SEQ ID NO: 44366 - DNA, 75 bp, synthetic construct
  source 1..75: mol_type = other DNA
gccattatgaccgatgaaatcccgttagatgatgcactgttacaattgcgggaatttatcgacgaaaactccggt

SEQ ID NO: 44367 - DNA, 75 bp, synthetic construct
  source 1..75: mol_type = other DNA
atgaaggataacaccgtgccactgaaattgattgccctgttagcgaacggtgaatttcactctggcgagcagttg

SEQ ID NO: 44368 - DNA, 75 bp, synthetic construct
  source 1..75: mol_type = other DNA
taagctgcatgccatcgggtgggttaagcataaatgtaagcctggtgccaaatggcccgaaattcaggcagagat

SEQ ID NO: 44369 - DNA, 75 bp, synthetic construct
  source 1..75: mol_type = other DNA
aaaagcgatgctcgacgacgcggatgtgtttctgctgccgtcaattaccggcgcggatggcgatatggaaggcat

SEQ ID NO: 44370 - DNA, 75 bp, synthetic construct
  source 1..75: mol_type = other DNA
tcgtacctgggacgaatggcggcgcgaggaagatgcacgaacacacgccaccgagaggagacatgatcgcggttg

SEQ ID NO: 44371 - DNA, 75 bp, synthetic construct
  source 1..75: mol_type = other DNA
cgtatagtgtgcggggaagtaacgcgcttattaagtttgattacaccgacacattacagatcaaatatgctaatc

SEQ ID NO: 44372 - DNA, 75 bp, synthetic construct
  source 1..75: mol_type = other DNA
aagaagagacgacccggccaaccctgaaagaactggcagcgaagctgtccggaggagtgaatggttacagtcgct

SEQ ID NO: 44373 - DNA, 75 bp, synthetic construct
  source 1..75: mol_type = other DNA
gacattttttctgatgttgaagctaaacaactcgtggcagaagagctggttgaaaaagttgtgaacgggcgggtg

SEQ ID NO: 44374 - DNA, 75 bp, synthetic construct
  source 1..75: mol_type = other DNA
cacatggataaaacaaatccccatgcgcacatcatgctgaccacgagggctatcggacctgctgggttcagcgga

SEQ ID NO: 44375 - DNA, 75 bp, synthetic construct
  source 1..75: mol_type = other DNA
aactatcgatctggaaactgctggcggagtcattgatcgggacaccattaagtggtggctgaaacagtcacgcga

SEQ ID NO: 44376 - DNA, 75 bp, synthetic construct
  source 1..75: mol_type = other DNA
cagctctggcacttcgccagatgtcgatggtccatgatgaactgccaaaatatctgctggctccggaagtgagtg

SEQ ID NO: 44377 - DNA, 75 bp, synthetic construct
  source 1..75: mol_type = other DNA
gttatgataatccacacagtgacttaccctgcgcaacggaagatgccaccggcagccggaaaaccatgacgtgga

SEQ ID NO: 44378 - DNA, 75 bp, synthetic construct
  source 1..75: mol_type = other DNA
aatggcgcgccttaacctgaacgataacggtgaaaatatttgctgggattttaccaacctttacggcggaacaat

SEQ ID NO: 44379 - DNA, 75 bp, synthetic construct
  source 1..75: mol_type = other DNA
gtgagggtgagggtttatatcgccggtccaatgacggggtatgaaaatttcaaccgtgaggcgtttcacaaggca

SEQ ID NO: 44380 - DNA, 75 bp, synthetic construct
  source 1..75: mol_type = other DNA
aagcaggttattttcgcactcatttcgtttgttggcggtgtgtattgcgctgagacagcatcagccatcattacc

SEQ ID NO: 44381 - DNA, 75 bp, synthetic construct
  source 1..75: mol_type = other DNA
atattctggctgctattgaagcgcgtttcctgcaaaccggacaccctcgcgacctgacgctaatccactcgctgg

SEQ ID NO: 44382 - DNA, 75 bp, synthetic construct
  source 1..75: mol_type = other DNA
catcatggctgcgtgatccatcagtctgaactggaccagagcaacgggcggtggatctgtgaaaacacggggatg

SEQ ID NO: 44383 - DNA, 75 bp, synthetic construct
  source 1..75: mol_type = other DNA
aagaaataacatcaatcaaagtaaaaggagcagatgccatgcattcattagacagttattttcagcgcacgacag

SEQ ID NO: 44384 - DNA, 75 bp, synthetic construct
  source 1..75: mol_type = other DNA
caggcgattggcgttgaattgtttaaccgccaggtgacgccgctgcaactctcggaacaaggtaaaatattccat

SEQ ID NO: 44385 - DNA, 75 bp, synthetic construct
  source 1..75: mol_type = other DNA
gaacaaaaagatcccttctatgcacttgccttacccactaggaatgctgggtggatattgttttgatatcctgag

SEQ ID NO: 44386 - DNA, 75 bp, synthetic construct
  source 1..75: mol_type = other DNA
tcttctgcattgtcccgtaatacttctgttcaggtgtcacgtcaggaaagttttctttcatcttccggtgattcg

SEQ ID NO: 44387 - DNA, 75 bp, synthetic construct
  source 1..75: mol_type = other DNA
agcagagccacttttatccagaaatcacacagattggcgatgttcgcgatcaacaggcactcgaccaggcgttag

SEQ ID NO: 44388 - DNA, 75 bp, synthetic construct
  source 1..75: mol_type = other DNA
ctggctccgggccatgcctacgggatgtttatggaacgttttaacgagttatcggagttacgcaaatgcgcatga

SEQ ID NO: 44389 - DNA, 75 bp, synthetic construct
  source 1..75: mol_type = other DNA
gtactcagcggcacgctgtaccccgaaataagcggcggtgatgtgtcgcttgtcatgctggaaactatggctttt

SEQ ID NO: 44390 - DNA, 75 bp, synthetic construct
  source 1..75: mol_type = other DNA
cgtatccggacttccggagggtcggggaacaactgcgactgcccccgctgacgaaccggtttcgttatatctgcc

SEQ ID NO: 44391 - DNA, 75 bp, synthetic construct
  source 1..75: mol_type = other DNA
gatggaagaaaaaatagacgccgtaatccgtgagaaatacgggttacccccagttatgagtacacccgtgaaata

SEQ ID NO: 44392 - DNA, 75 bp, synthetic construct
  source 1..75: mol_type = other DNA
gcgctgcctgggtgtacccggactacaataatgactatactctcccgccgctccagcgtgatgcccgcgccctga

SEQ ID NO: 44393 - DNA, 75 bp, synthetic construct
  source 1..75: mol_type = other DNA
ccaggcagatgcgctactcacgagtatcagagatgtaatgaaaaatagtctttcagatattcactttcctcttga

SEQ ID NO: 44394 - DNA, 75 bp, synthetic construct
  source 1..75: mol_type = other DNA
tcgcgtcctgccagacagacaggcagtgacgatggataaacccttcctgaatgcttactcacgcctgttgattaa

SEQ ID NO: 44395 - DNA, 75 bp, synthetic construct
  source 1..75: mol_type = other DNA
aaacagccctgaatggacgaagtttgcagtgtttgcttccgatcctgaaaatcagccatgctggtcagcggaggt

SEQ ID NO: 44396 - DNA, 75 bp, synthetic construct
  source 1..75: mol_type = other DNA
atcgtaaaaatacctggcaggcgctcaacctcaaacgctatggtgctgagtcgcggaacctgattttgtctgcca

SEQ ID NO: 44397 - DNA, 75 bp, synthetic construct
  source 1..75: mol_type = other DNA
gcgttaagcaagatggatctccgggaactggctcgaccgcgtttgacgcaactgatggataccaccgggctgtta

SEQ ID NO: 44398 - DNA, 75 bp, synthetic construct
  source 1..75: mol_type = other DNA
gccccgccctgccatcgactcctgggataccgaatatatgctggaaaaccgctgggatgaggaatccgcttcctt

SEQ ID NO: 44399 - DNA, 75 bp, synthetic construct
  source 1..75: mol_type = other DNA
tgttgttaccgttattgctgtcagtgaagacgtgcgcaggtttaagatcccctccccgcgcacaaatttacatac

SEQ ID NO: 44400 - DNA, 75 bp, synthetic construct
  source 1..75: mol_type = other DNA
gtcgcatcggtttttactgcgggctggcgctgtttctcatcatcacgctgtttccattttttgtgatgctgatga

SEQ ID NO: 44401 - DNA, 75 bp, synthetic construct
  source 1..75: mol_type = other DNA
aagagaagccgttgctgcattgataaaacttggaaatttgcatagcaacgacttcttgtttcggtctcggatcgg

SEQ ID NO: 44402 - DNA, 75 bp, synthetic construct
  source 1..75: mol_type = other DNA
tgatccgcaaaatacaccgcgagcgagctggcgtagtcacggtaatttgctgtttaccaactggctcaactatta

SEQ ID NO: 44403 - DNA, 75 bp, synthetic construct
  source 1..75: mol_type = other DNA
gcgctgaccgccgctgtggccggcctcggctacaaggccacacccgccgatgccccatccacttcagcgcggggc

SEQ ID NO: 44404 - DNA, 75 bp, synthetic construct
  source 1..75: mol_type = other DNA
ttttccggacgaaagaagccgcaatatctacctcgctctgccggtcgccagtgatgtgagaaatgaaatcagcga

SEQ ID NO: 44405 - DNA, 75 bp, synthetic construct
  source 1..75: mol_type = other DNA
cgctatggcttgtattttccgtccgccactggtactgccgtaacccggcttgttcacgaaaaatttttgccgagt

SEQ ID NO: 44406 - DNA, 75 bp, synthetic construct
  source 1..75: mol_type = other DNA
cattgcagttgagcgtggctgcgctgttttcttctgcttttatggctaacgccgctgatgtgccgcaggtcaaag

SEQ ID NO: 44407 - DNA, 75 bp, synthetic construct
  source 1..75: mol_type = other DNA
ttcaaaactgaagacatcgatgaggtttatctctctgctgctaaagttggtggtattatggcaaataatacttat

SEQ ID NO: 44408 - DNA, 75 bp, synthetic construct
  source 1..75: mol_type = other DNA
taatgctgccttttatcggcgcactggtcgtttcgttttcgccacaacgtcgggccgccgaatgggggttttgtt

SEQ ID NO: 44409 - DNA, 75 bp, synthetic construct
  source 1..75: mol_type = other DNA
tccgcctgctaccgctggctgctcttgtgctcactgcctgttccgttaccacgcccaaaggtcctggcaaaagcc

SEQ ID NO: 44410 - DNA, 75 bp, synthetic construct
  source 1..75: mol_type = other DNA
tgacttacaggatgccgaacctgattttcgcggtatgaatctggtgggctatgacgcgatggcgatcggtaatca

SEQ ID NO: 44411 - DNA, 75 bp, synthetic construct
  source 1..75: mol_type = other DNA
cattgatgatgtggtggatttcctgaaaaacgcccgtgataacgaccagtatgtcgagtcaccgaccatccgcag

SEQ ID NO: 44412 - DNA, 75 bp, synthetic construct
  source 1..75: mol_type = other DNA
gaagagggactggtacaacggctggaaaatgggcgcttcgccatgagtatggcgatgctgcaaatcgcccacgcc

SEQ ID NO: 44413 - DNA, 75 bp, synthetic construct
  source 1..75: mol_type = other DNA
aggcgcttaataataaaggagaatatatttttatcagaaatagtgtcccgggattgagttcagtatgcataccgt

SEQ ID NO: 44414 - DNA, 75 bp, synthetic construct
  source 1..75: mol_type = other DNA
tgaaatcaagacaatcacacatccgcacttcggagataaaccggtaaaggtgttcgcgataaaggtgaatattga

SEQ ID NO: 44415 - DNA, 66 bp, synthetic construct
  source 1..66: mol_type = other DNA
atgcaaaatagcctgatgcgctacgcttatcaggccttgtattatccctccagtgcagagaaaatc

SEQ ID NO: 44416 - DNA, 75 bp, synthetic construct
  source 1..75: mol_type = other DNA
cccggcagcaggccatcgccgcaggaacgaaaggatcggatatcccggattcactgccggactatacggagtatg

SEQ ID NO: 44417 - DNA, 75 bp, synthetic construct
  source 1..75: mol_type = other DNA
ttaaagaatgcaacaggaatactcagcaaattaatctattcagtttctgaggatcatgattttttgtactctgcg

SEQ ID NO: 44418 - DNA, 75 bp, synthetic construct
  source 1..75: mol_type = other DNA
cgctatacatttattcaagcagatatttgtgatgcaaaattaattacggatatatttaagcaacatcaacccgat

SEQ ID NO: 44419 - DNA, 75 bp, synthetic construct
  source 1..75: mol_type = other DNA
tgcaagcgtaacgattattggagatgcggcaaaaggtgttctaaatataaacgactcaagtaagttgtatacaca

SEQ ID NO: 44420 - DNA, 75 bp, synthetic construct
  source 1..75: mol_type = other DNA
ggcgcacctttacaaccatgctgaacgatttaggcgttgatccgcatgtcgtggagcagcttacaggccaccaga

SEQ ID NO: 44421 - DNA, 75 bp, synthetic construct
  source 1..75: mol_type = other DNA
gcatacgatgccggttatagcggaaccagtatgacaggcgggaaaggtgccgctgggatttgtattatcgaggag

SEQ ID NO: 44422 - DNA, 75 bp, synthetic construct
  source 1..75: mol_type = other DNA
tggcaataaataattcatcgctgactactgatggggcattatctattggttcaggaaacaactctgaagtcatta

SEQ ID NO: 44423 - DNA, 75 bp, synthetic construct
  source 1..75: mol_type = other DNA
ggcagggtgacatgacccgcaagggactggatattgtgcagggttcagcgggggtgctgataggtgcgccgacgg

SEQ ID NO: 44424 - DNA, 75 bp, synthetic construct
  source 1..75: mol_type = other DNA
atcgtgagcaggtgaaaaatgctttcgatttcggtttttctcgttacgagaaggcaatggaagaactttcaaaag

SEQ ID NO: 44425 - DNA, 75 bp, synthetic construct
  source 1..75: mol_type = other DNA
gactggaacaggaaaatactgactgtcacgacctctgcaacaccgccggtcgacgtcacggcaccgcagggttca

SEQ ID NO: 44426 - DNA, 75 bp, synthetic construct
  source 1..75: mol_type = other DNA
cactgacggcagtgtgtcgagtgttgaagcggtagcggaacctgatgaacctgaagaaatgtggacggtgaaacg

SEQ ID NO: 44427 - DNA, 75 bp, synthetic construct
  source 1..75: mol_type = other DNA
acgggaggccgtgaggttgccgcagagcggttaaagctgggggcttacccggaattgtcgctgaaatctgcaagg

SEQ ID NO: 44428 - DNA, 75 bp, synthetic construct
  source 1..75: mol_type = other DNA
agaatgaacatccgcatcttcctgttgaaagtcgtcgtcaggcaaagggaacgcgcttctggtggcagtacagcg

SEQ ID NO: 44429 - DNA, 75 bp, synthetic construct
  source 1..75: mol_type = other DNA
tcaaggatgatgccgtcgaatgggccttaactcatggtgttgctttcaaggaatcgtcgtattccgcagtgcata

SEQ ID NO: 44430 - DNA, 75 bp, synthetic construct
  source 1..75: mol_type = other DNA
ataattctcggcactcgtttgttttcacaggcaaaggtggtgagtattttcttatttgtcttgtgaattttttac

SEQ ID NO: 44431 - DNA, 75 bp, synthetic construct
  source 1..75: mol_type = other DNA
actcatgtattatgttttcaggaaattaaatcatgctaatcatatggcaattcatgatccactaacgaatacata

SEQ ID NO: 44432 - DNA, 75 bp, synthetic construct
  source 1..75: mol_type = other DNA
tcgcctccgcgagagcgcgcggtcgcaagggcggacgaaaattcgcgctcaccaaagctcaggtgcgtctcgcgc

SEQ ID NO: 44433 - DNA, 75 bp, synthetic construct
  source 1..75: mol_type = other DNA
tgcgccgatggcctgttttgtcgccgctgtacgtgcactggcggagatcgtcgcaaaggagaaccatcatggtta

SEQ ID NO: 44434 - DNA, 75 bp, synthetic construct
  source 1..75: mol_type = other DNA
gctggatgtctgcaacggcacgctgacggcctgcaagctccggcacggagacagcaacgagctgccgtttggcgg

SEQ ID NO: 44435 - DNA, 75 bp, synthetic construct
  source 1..75: mol_type = other DNA
gaaggaatatgcagcctgaatctgtgtggttacaggccacagccactacggcgaatacatatcccaaaatcaaac

SEQ ID NO: 44436 - DNA, 75 bp, synthetic construct
  source 1..75: mol_type = other DNA
caccaacttgatcctcgcctgcctgtattgctgacagccattttgagcgaggagttttcagcagatcaggttgta

SEQ ID NO: 44437 - DNA, 75 bp, synthetic construct
  source 1..75: mol_type = other DNA
cgcagcacaaaactaaaagcataaaactgatggctatcgttcatcgcttgcagacgataatggtcaatgagaacc

SEQ ID NO: 44438 - DNA, 75 bp, synthetic construct
  source 1..75: mol_type = other DNA
ggacaggtaattgcaccagcctgtacgctggcgatggaagatacctggcaggcgattgatatgggtgaaacgccg

SEQ ID NO: 44439 - DNA, 75 bp, synthetic construct
  source 1..75: mol_type = other DNA
taacatttttcctgtgtgcagcggctcaggctgcgccatcgccctcctttccgccgccggggatgaccctgccgg

SEQ ID NO: 44440 - DNA, 75 bp, synthetic construct
  source 1..75: mol_type = other DNA
tgctgccggacgtgtcatcagcctgaccaacgagaacggcagccacagcgtcttcagttacgatgcgctggaccg

SEQ ID NO: 44441 - DNA, 75 bp, synthetic construct
  source 1..75: mol_type = other DNA
ctgcctgcgcaacctgactttgttgtcggcccggcgggtactcaaggtgtaacgcataccacgattcaggcggcg

SEQ ID NO: 44442 - DNA, 75 bp, synthetic construct
  source 1..75: mol_type = other DNA
gcatttaatgctatatgcgaggtgacaaaccagataacacgcgcgtcatgggaaaaaacagttaagaaattctat

SEQ ID NO: 44443 - DNA, 75 bp, synthetic construct
  source 1..75: mol_type = other DNA
agaagttaaaagaaatttttcagattgatcgaccagaactggatttcggtatttatcgtattttaaatgcacgtg

SEQ ID NO: 44444 - DNA, 75 bp, synthetic construct
  source 1..75: mol_type = other DNA
ggagagccgctaccggtatgatgataccggccgggtgacggagcaggtcaacccggaggggctggactaccgctt

SEQ ID NO: 44445 - DNA, 75 bp, synthetic construct
  source 1..75: mol_type = other DNA
atgccactgctgctgcgtgagcagtacggggtcggaccggtatgcagtgaactgcatattgccccgtcaacgtat

SEQ ID NO: 44446 - DNA, 75 bp, synthetic construct
  source 1..75: mol_type = other DNA
gcatcccgtatgccacggacccggcgggcaaccggctgccggacccggagctgcacccggacagtacactcacag

SEQ ID NO: 44447 - DNA, 75 bp, synthetic construct
  source 1..75: mol_type = other DNA
ggcgcggggaacacacatatgatcaggcgtgcgcggcgctggcactcggtttatccccgctggcgcggggaacac

SEQ ID NO: 44448 - DNA, 75 bp, synthetic construct
  source 1..75: mol_type = other DNA
acagataggagcctttcacatggctgtatccgcacgcacatctgatttttgtcgcccgtatccgtcaggaggtga

SEQ ID NO: 44449 - DNA, 75 bp, synthetic construct
  source 1..75: mol_type = other DNA
tggcgtaatgatattgaaggactggcgacgttgttctctaaccacattcctgattatcgtaatttgatgaccagt

SEQ ID NO: 44450 - DNA, 75 bp, synthetic construct
  source 1..75: mol_type = other DNA
tttatcgcgcctgcagccaatatcttcccggtcgtcaatgaggagaaagtggagtggcttcgactcggtaatgtg

SEQ ID NO: 44451 - DNA, 75 bp, synthetic construct
  source 1..75: mol_type = other DNA
atggcattaatcggagtgtatgcggattgggaaggcctggatggtccggagcggattggttatttacacagtcgc

SEQ ID NO: 44452 - DNA, 75 bp, synthetic construct
  source 1..75: mol_type = other DNA
atggcggattcgaatctcaatgtgccggtaatcatccaggctacgcggctcgacacatcagtccttccacgcaat

SEQ ID NO: 44453 - DNA, 75 bp, synthetic construct
  source 1..75: mol_type = other DNA
atctttacaatagtaataacagtggtattggtaacgctgtcactttagggagtcagtttacgcccggaaaaatca

SEQ ID NO: 44454 - DNA, 75 bp, synthetic construct
  source 1..75: mol_type = other DNA
ggggacatccgggattcagctgtatgaggcatacaacaatggctacccttccccctatggcaatgtgcttcacct

SEQ ID NO: 44455 - DNA, 75 bp, synthetic construct
  source 1..75: mol_type = other DNA
cattgagccttaataatttatcagatcaaaaggttagagagattttcgagggagatgaaaccaaggatcatcatt

SEQ ID NO: 44456 - DNA, 75 bp, synthetic construct
  source 1..75: mol_type = other DNA
cctcattaacagtaacagccctgaagcgcgcaacctgaaagcaatgcagatggagcgcgacggcaaagatccgca

SEQ ID NO: 44457 - DNA, 75 bp, synthetic construct
  source 1..75: mol_type = other DNA
gtcccgcattaagaaactgatgcgcgacctggcggataccacctgttccgtgatcctcattccggacgtctttac

SEQ ID NO: 44458 - DNA, 75 bp, synthetic construct
  source 1..75: mol_type = other DNA
atgacaaatctaaaaaagcgcgagcgagcgaaaaccaatgcatcgttaatctctatggtgcaacgcttttcagat

SEQ ID NO: 44459 - DNA, 75 bp, synthetic construct
  source 1..75: mol_type = other DNA
cgcacgatggaatggcgatgggatgaacaacagcttatcggaaaaaacgacctgctgcagtataccggtaagggg

SEQ ID NO: 44460 - DNA, 75 bp, synthetic construct
  source 1..75: mol_type = other DNA
cgtggcggaggtgacgctgcctgtcaccggagataataacgtccgggcaggcacatttgttttcagaatgcaggc

SEQ ID NO: 44461 - DNA, 75 bp, synthetic construct
  source 1..75: mol_type = other DNA
aagttaccgctgacgaagtaaacaaaattatgcaggcagccaatatcagccagcctgacgccgataaattgcttg

SEQ ID NO: 44462 - DNA, 75 bp, synthetic construct
  source 1..75: mol_type = other DNA
gttgcctgccactttaagcgcatgcaccagaacatcgtcgacaaaatcgagtatctgaactgctcgcgcgaattt

SEQ ID NO: 44463 - DNA, 75 bp, synthetic construct
  source 1..75: mol_type = other DNA
cctggcagatcgcggagcctatacgggcgtaattgccagttggttgcatacccgcgaacccgcgaagaaagaaag

SEQ ID NO: 44464 - DNA, 75 bp, synthetic construct
  source 1..75: mol_type = other DNA
tatgataaacgcgggcgtccggtgagtgtgacggaaggtggactgacgcgcagcatggggtatgacgctgccggg

SEQ ID NO: 44465 - DNA, 75 bp, synthetic construct
  source 1..75: mol_type = other DNA
atgcaaacacaaaaaccgactctcgaactgctaacctgcgaaggcgcttatcgcgacaatcccaccgcgcttttt

SEQ ID NO: 44466 - DNA, 75 bp, synthetic construct
  source 1..75: mol_type = other DNA
atgaaactggaagatttaccgaaatactactccccaaaatcccccggcctgactgatgcatcggcctcaacgtcg

SEQ ID NO: 44467 - DNA, 75 bp, synthetic construct
  source 1..75: mol_type = other DNA
acttggttgtttttaccgatgaaaacaattcaaagtacctcaatgtattaaatgacttcttgtcttataatataa

SEQ ID NO: 44468 - DNA, 75 bp, synthetic construct
  source 1..75: mol_type = other DNA
gctatacaagccaatgtgtgatgcatttggcacaaatggcgacagattccgcttgaatagttgcgcggaaagtgc

SEQ ID NO: 44469 - DNA, 75 bp, synthetic construct
  source 1..75: mol_type = other DNA
gaagcgggcgcggcctggaagcgatgaagtgggtcgttgtggtggcattgctcctggtggcgattgtcggcaact

SEQ ID NO: 44470 - DNA, 75 bp, synthetic construct
  source 1..75: mol_type = other DNA
tgccgctgtacgacacgccgctgtcaggtatcaaccgtgttctcaaacgcctggaggacattgtgctctcttcac

SEQ ID NO: 44471 - DNA, 75 bp, synthetic construct
  source 1..75: mol_type = other DNA
tgcgggcgctggctcccggtgtgatgatggtaccggcttccggttcagcactggcccgccgtctgcagcttgacc

SEQ ID NO: 44472 - DNA, 75 bp, synthetic construct
  source 1..75: mol_type = other DNA
agcggcctgcgtcttgagcgtcgtcgcgtaccgctgggggttattggcgtgatttatgaagcgcgcccgaacgtg

SEQ ID NO: 44473 - DNA, 75 bp, synthetic construct
  source 1..75: mol_type = other DNA
ggaggccagtactgttcagcagattatcaggcgcaactgaagcggcataatctgcgtggaagtatgagcgcaaaa

SEQ ID NO: 44474 - DNA, 75 bp, synthetic construct
  source 1..75: mol_type = other DNA
atttgcctgttactgatgatgttgttgttcctgctactgctactgctactgctactgttcttcttttttctgctg

SEQ ID NO: 44475 - DNA, 75 bp, synthetic construct
  source 1..75: mol_type = other DNA
gtcgtatctggaagcgaacacgccgaaagcgacgctggctgatcaggtgaactactggagcaactatccgaagtt

SEQ ID NO: 44476 - DNA, 75 bp, synthetic construct
  source 1..75: mol_type = other DNA
atttgtctgttactgatgatgttgttgttcctgctactgctactgctactgctactgctactgctactgctcttc

SEQ ID NO: 44477 - DNA, 75 bp, synthetic construct
  source 1..75: mol_type = other DNA
gccgcgctacccggaggacgaacttgccagcgaaccgtggtacagcgtctcgccgggcgatgttttcccggaaga

SEQ ID NO: 44478 - DNA, 75 bp, synthetic construct
  source 1..75: mol_type = other DNA
tcttccgacgaagtgctggctgcgcaggaagtgcacgatatttcggtagcgatcggtatcgatcctgacagcgac

SEQ ID NO: 44479 - DNA, 75 bp, synthetic construct
  source 1..75: mol_type = other DNA
aggtgaacgccataacgccctgcacgatgcgcgttaccaggcaaaatacgtttcagccatctggcaaaaactgct

SEQ ID NO: 44480 - DNA, 75 bp, synthetic construct
  source 1..75: mol_type = other DNA
ccgaacaacgctggtgctatcaggacggtctgaacgattacctcgcggaagcggtaaatggcctgccgacgctgc

SEQ ID NO: 44481 - DNA, 75 bp, synthetic construct
  source 1..75: mol_type = other DNA
acgaagtaaacaaaattatgcaggcagccaatatcagccagcctgacgccgataagttacttgctgtatcgcgtg

SEQ ID NO: 44482 - DNA, 75 bp, synthetic construct
  source 1..75: mol_type = other DNA
gagcagttgcagcgttttgttaagcagattatgagcaatgctgccggttacttttttgaccttgccctgcagaca

SEQ ID NO: 44483 - DNA, 75 bp, synthetic construct
  source 1..75: mol_type = other DNA
cgcaccagtgctgcgctcagtgctgaagtacgtccgcaggttgggggaattatccagaaacgcttatttaaggaa

SEQ ID NO: 44484 - DNA, 75 bp, synthetic construct
  source 1..75: mol_type = other DNA
cggtcgcgaccgctttaccgcgcatccggatctgcgtcgtgaactgatgcgccagcgcggctatttcgcttacgc

SEQ ID NO: 44485 - DNA, 75 bp, synthetic construct
  source 1..75: mol_type = other DNA
catcgtcccggctacgacctgaccttttccgctcccaaaagtgtctccatgatggccatgctcgggggggacaaa

SEQ ID NO: 44486 - DNA, 75 bp, synthetic construct
  source 1..75: mol_type = other DNA
ctctgcagtgggtttctgaattaactgatgaactcatggcaaaaatcagaacccatgaatacaaccgctcaatgg

SEQ ID NO: 44487 - DNA, 75 bp, synthetic construct
  source 1..75: mol_type = other DNA
tgcaactttcgacaacgtgattttacgccgttcatatgaacggcaggggatcccctgcccgtggcgttacaccaa

SEQ ID NO: 44488 - DNA, 75 bp, synthetic construct
  source 1..75: mol_type = other DNA
ttgttcctgctactgctactgctactgctactgctactgctactgctactgctcttctttttcctgccgctctga

SEQ ID NO: 44489 - DNA, 75 bp, synthetic construct
  source 1..75: mol_type = other DNA
aatgcgctcgaccgcgcttatgcctcctttaacgccaaccgtaacagcaacgggcaaaatagctggctggcaggt

SEQ ID NO: 44490 - DNA, 75 bp, synthetic construct
  source 1..75: mol_type = other DNA
atttgcctgttactgatgatgttgttgttcctgctactgctactgctactgctactgctactgctactgttcttc

SEQ ID NO: 44491 - DNA, 75 bp, synthetic construct
  source 1..75: mol_type = other DNA
cagaagaacaacaaccagaaccagcagtgcaacaggaactggaaaaagtttgcaccgcatgcggtcagaccggtg

SEQ ID NO: 44492 - DNA, 75 bp, synthetic construct
  source 1..75: mol_type = other DNA
gcagtatgaccgcgattacacctggaacgacaacggcgaactcatccgcatcagcagcccgcgccagacccggag

SEQ ID NO: 44493 - DNA, 75 bp, synthetic construct
  source 1..75: mol_type = other DNA
agacccaacagacaagaatccagacggtataccagccgggaagcttcacgccgctcctgagaatcgaaacagaga

SEQ ID NO: 44494 - DNA, 75 bp, synthetic construct
  source 1..75: mol_type = other DNA
ataagttgcctgttaatgtcaccagtttaagcagaaaaagcgctaagtatggggtcgctatcgctgaagaaatct

SEQ ID NO: 44495 - DNA, 75 bp, synthetic construct
  source 1..75: mol_type = other DNA
tttcatccacgatcaggcatcattggcgcgcgacatagccactggcgtactggcccgttcaatggacgtggacat

SEQ ID NO: 44496 - DNA, 75 bp, synthetic construct
  source 1..75: mol_type = other DNA
ccgccagcgccgattctgccagcgtgcagtttgaaggtaaggtgcagcgcattgcccgcgttcatcactacggcc

SEQ ID NO: 44497 - DNA, 75 bp, synthetic construct
  source 1..75: mol_type = other DNA
tttcttcaaaaacagcgaacgccgcttgcggtggcccgcagggcggaggcatggatagccgacgtaatggagtag

SEQ ID NO: 44498 - DNA, 75 bp, synthetic construct
  source 1..75: mol_type = other DNA
accacaatgcgagattaagcggatatatttttgtcgatttttcagtaagttttttacgtctattccttgaaaaag

SEQ ID NO: 44499 - DNA, 75 bp, synthetic construct
  source 1..75: mol_type = other DNA
ctggactattcccgcgccgctatttttgcacttatccggagcgctcaccctgagttttatcactacccgggacgc

SEQ ID NO: 44500 - DNA, 75 bp, synthetic construct
  source 1..75: mol_type = other DNA
attgcccgtgttcaccattacggcttgcgtgatcgcgtcagccgtaaggggccacagatacgttatgctaaacgt

SEQ ID NO: 44501 - DNA, 75 bp, synthetic construct
  source 1..75: mol_type = other DNA
gaagacgatgatgcgtaccgtgcgggacgcagtggtgtcggtggcccgggccgtctgggactggattttcttctg

SEQ ID NO: 44502 - DNA, 75 bp, synthetic construct
  source 1..75: mol_type = other DNA
tatggaatactctggtattgtctgtaaagatactaatggaaaatattttgcatctaaggcagaaactgataattt

SEQ ID NO: 44503 - DNA, 75 bp, synthetic construct
  source 1..75: mol_type = other DNA
tctcactccatgtacgcgatatgaccttcgctgatgcccttcgtctcacagaggcccagactgcctggcgggcag

SEQ ID NO: 44504 - DNA, 75 bp, synthetic construct
  source 1..75: mol_type = other DNA
gggtgtggctggaggtgcaatatatgactatgcatccactcacaaacctaatcctgcaatgtctccatccggttt

SEQ ID NO: 44505 - DNA, 75 bp, synthetic construct
  source 1..75: mol_type = other DNA
cttgcgcagtgcgggctgacggtggagcaactggccagacaggtggagccggaatacacaccggcgcgaaaagtt

SEQ ID NO: 44506 - DNA, 75 bp, synthetic construct
  source 1..75: mol_type = other DNA
ctcgcgccgataagcggccgggaatgagttccgtgcaactgcgccagcaactacagggacgttatcaggaactgc

SEQ ID NO: 44507 - DNA, 75 bp, synthetic construct
  source 1..75: mol_type = other DNA
gattccgtatcgggctgcgtcgcattggctggtatgaagatgaggtactcgcctggttgaaagaacgtgagagag

SEQ ID NO: 44508 - DNA, 75 bp, synthetic construct
  source 1..75: mol_type = other DNA
ctggcggttctgtttactggctttaacgtggaagcagcgagcgtgaaacaagcgctcagctgcgacccaaacgcc

SEQ ID NO: 44509 - DNA, 75 bp, synthetic construct
  source 1..75: mol_type = other DNA
gcctggcagagctggagagccgactggcttttcaggaaatcaccattgaagaactgaacgtcacggtgaccgctc

SEQ ID NO: 44510 - DNA, 75 bp, synthetic construct
  source 1..75: mol_type = other DNA
gtcacagagaacccaggaagatatcaaagtggctgttgagaatgatgattgcgcttcccgtcttgttcctgctcg

SEQ ID NO: 44511 - DNA, 75 bp, synthetic construct
  source 1..75: mol_type = other DNA
gctgttgttgatgatggtgtaatcgtatgtaagaacggttcttttatggcgtctttcttttttaaaggtgcagac

SEQ ID NO: 44512 - DNA, 75 bp, synthetic construct
  source 1..75: mol_type = other DNA
agcgtctcttgcctgtttattgaatacgtatcgtgacggttatatcagagataaccaggacgatatcgataaagc

SEQ ID NO: 44513 - DNA, 75 bp, synthetic construct
  source 1..75: mol_type = other DNA
gtcagactgggataatgcagaaacacatacccgtccggcaggaaatgaaactgcttccagctccccttcctggta

SEQ ID NO: 44514 - DNA, 75 bp, synthetic construct
  source 1..75: mol_type = other DNA
gcccgggaaatcctgatggattgtttactgcgataatactgaatagtgaagaatctccgcttgtagatgcaaaat

SEQ ID NO: 44515 - DNA, 75 bp, synthetic construct
  source 1..75: mol_type = other DNA
cgaaagtctggacgtgggataaatccgctggcggcgcgttcgccaatatcaatcgcccggtttctggtccgacgc

SEQ ID NO: 44516 - DNA, 75 bp, synthetic construct
  source 1..75: mol_type = other DNA
aaacgttctgatgtgaacggtgtatctcgaggcgtcgagtacaacatggcgcagaatgctgtttatcgcgtgtgt

SEQ ID NO: 44517 - DNA, 75 bp, synthetic construct
  source 1..75: mol_type = other DNA
ggaaaaagtctgcaccgcctgcggtcagaccggcggcggcaactgccctgattgtggcgcggtgatgggcgacgc

SEQ ID NO: 44518 - DNA, 75 bp, synthetic construct
  source 1..75: mol_type = other DNA
ccgggttcgacatccgggcgtatcgtgacgcggcggaccaacgggcggagacccgcacgcagacgcccggacccg

SEQ ID NO: 44519 - DNA, 75 bp, synthetic construct
  source 1..75: mol_type = other DNA
tctaatattgaataatccgggactagcattagatataacaatgatagcttctcgtggaaatgttgcagacacagg

SEQ ID NO: 44520 - DNA, 75 bp, synthetic construct
  source 1..75: mol_type = other DNA
ctgcaataattacaggtttaacctggccgcttagtctcattccttccattataagtctcatgattcgtaaatccg

SEQ ID NO: 44521 - DNA, 75 bp, synthetic construct
  source 1..75: mol_type = other DNA
cgttcaccgtcgatttaacggcggtggcaatcagcatcaacaccgttgccagcgatgacgtaattaacgccgccg

SEQ ID NO: 44522 - DNA, 75 bp, synthetic construct
  source 1..75: mol_type = other DNA
agtcatcgagtcttatattgatagtttcgcggtaggcggcgcaactcccgattctatgcagtgggtcgagcagaa

SEQ ID NO: 44523 - DNA, 75 bp, synthetic construct
  source 1..75: mol_type = other DNA
gcagaatctctcggcgcgaaagtatttgtacagtctgcaaatggcaatgaagaaacacaaatgtcgcagattgaa

SEQ ID NO: 44524 - DNA, 75 bp, synthetic construct
  source 1..75: mol_type = other DNA
gaaaggttcaccttactccggctcagttatccatgcttcttgaaggtatcaactggaagcacccgaaacgaacgg

SEQ ID NO: 44525 - DNA, 75 bp, synthetic construct
  source 1..75: mol_type = other DNA
gccttcgctggcctgaaattcggtgactacggctccatcgattatggccgtaactacggtgtagcatacgatatc

SEQ ID NO: 44526 - DNA, 75 bp, synthetic construct
  source 1..75: mol_type = other DNA
atgatatctctccctgccggttcacgtatctggctggttgccggtattactgacatgcggaatggctttaacggc

SEQ ID NO: 44527 - DNA, 75 bp, synthetic construct
  source 1..75: mol_type = other DNA
atgatatctctccctgccggttcgcgtatctggctggttgccggtatcaccgacatgcgaaatggctttaacggc

SEQ ID NO: 44528 - DNA, 75 bp, synthetic construct
  source 1..75: mol_type = other DNA
acgtcaagggtatgaatgaacctgaagatggcgcaattaatttagttaaaacaagcaatggctggaaagcgctct

SEQ ID NO: 44529 - DNA, 75 bp, synthetic construct
  source 1..75: mol_type = other DNA
atgaaactggccctgacgctggaagccgacagcgttaacgtacaggcactgaacatggggcgcattgtcgttgac

SEQ ID NO: 44530 - DNA, 75 bp, synthetic construct
  source 1..75: mol_type = other DNA
aaagcgtgttgatactggaatttatcggaatgatgttgctggcggtggcgctgctgtcggtaagcgactccctgt

SEQ ID NO: 44531 - DNA, 75 bp, synthetic construct
  source 1..75: mol_type = other DNA
ttcaagcgacctgagttgattgataagctgaacaacatcatcgcccgacactatccgggagcactgccagcgaga

SEQ ID NO: 44532 - DNA, 75 bp, synthetic construct
  source 1..75: mol_type = other DNA
cgcatcaatgcgcaaacaacccgatgccgttcgctacgaccgtcagactatttttggccttgtccgtgagcgtcc

SEQ ID NO: 44533 - DNA, 75 bp, synthetic construct
  source 1..75: mol_type = other DNA
gagcttgaggcgctggcgcgtggcgcaacagtaaattatgacgggaaaaaatttatttacccagttactgatgag

SEQ ID NO: 44534 - DNA, 75 bp, synthetic construct
  source 1..75: mol_type = other DNA
gtgccggaaataaaaaccgcaaaagacttcctgcagaaaatggcaagtgacattaacagtatgaacctcagttcc

SEQ ID NO: 44535 - DNA, 75 bp, synthetic construct
  source 1..75: mol_type = other DNA
gggatcaaccaggttcaatgctccgttgctgaatatccggaagcgatcacctatctgctggaacagtacgatcgt

SEQ ID NO: 44536 - DNA, 75 bp, synthetic construct
  source 1..75: mol_type = other DNA
tataaaatcaaacttcgtgcatctggttacagacttgtatatcaagtcattgatgagaaagtcgttttactcgtt

SEQ ID NO: 44537 - DNA, 75 bp, synthetic construct
  source 1..75: mol_type = other DNA
gttaattttctttatgaaccatcggaaagaccatattgtcatcacgcttctgtccgggttgacgaaaaagagcgt

SEQ ID NO: 44538 - DNA, 75 bp, synthetic construct
  source 1..75: mol_type = other DNA
gcgcgacggtatccgcaagttactggcgcagaatatcaacccggcgcagcagcgcatggcagagaaagccgcctg

SEQ ID NO: 44539 - DNA, 75 bp, synthetic construct
  source 1..75: mol_type = other DNA
cgaagcagttatcgaacatattaacgacaacatgaatgatgcaacccggcagattgcggcgtttcagtcacaggt

SEQ ID NO: 44540 - DNA, 75 bp, synthetic construct
  source 1..75: mol_type = other DNA
cgcactggccgacaccgagtggctgaagcaggcgatcgttgcggtacgtaacatccgtgcagaaatgaacatcgc

SEQ ID NO: 44541 - DNA, 75 bp, synthetic construct
  source 1..75: mol_type = other DNA
catgcagggcaaaaacaccctgtggcaggtcggtactgaccacgccgggatcgctacccagatggtcgttgagcg

SEQ ID NO: 44542 - DNA, 75 bp, synthetic construct
  source 1..75: mol_type = other DNA
gcgcgacggtatccgtaagctactggcgcagaatatcaacccggcgcagcagcgcatggcagagaaagccgcctg

SEQ ID NO: 44543 - DNA, 75 bp, synthetic construct
  source 1..75: mol_type = other DNA
aaaaattattgatgaatgcttatcatcctgatgaatactctttttatgcggaagctcatttgcctaaaattcgtc

SEQ ID NO: 44544 - DNA, 75 bp, synthetic construct
  source 1..75: mol_type = other DNA
atgatggtatcgttgattatctgataaatggtcgcaaagcagaacgccagtacacgcgtgatgaacttgatcatc

SEQ ID NO: 44545 - DNA, 75 bp, synthetic construct
  source 1..75: mol_type = other DNA
cctacaaccgcgctgacgttacccgtcgtctcagcgatcatatccatgagaacaggcacagtaaccgttacgagg

SEQ ID NO: 44546 - DNA, 75 bp, synthetic construct
  source 1..75: mol_type = other DNA
gtctgaaatatattacagccgcatgacctgtctgcatgaatcatcagaaatatcagagggaacttatgatgaaag

SEQ ID NO: 44547 - DNA, 75 bp, synthetic construct
  source 1..75: mol_type = other DNA
aaagaccatattgtcatcacgcctctgttcgggttgacgaaaaagagcgccaggtccgctgtaaaatctgcggtg

SEQ ID NO: 44548 - DNA, 75 bp, synthetic construct
  source 1..75: mol_type = other DNA
gccctgccggaaacaccggcgcagacggcggcaaaagaaactgaagcactggtcaccggtacagacaacgccaca

SEQ ID NO: 44549 - DNA, 75 bp, synthetic construct
  source 1..75: mol_type = other DNA
acctgactacaaagggcgtgtttgaagatgacgaaggaacaaatcagggcacagctaatactctctcgtcgccag

SEQ ID NO: 44550 - DNA, 75 bp, synthetic construct
  source 1..75: mol_type = other DNA
cgggtaaagatggtgttagtttcacttttggttttggcccaagttggggttggagtgcaactgaaattaaaggcg

SEQ ID NO: 44551 - DNA, 75 bp, synthetic construct
  source 1..75: mol_type = other DNA
ggatgcccgttaacacttcagcggggcaatgacggacaaccaccgtggtttgaacatgaccagatgactgtcgct

SEQ ID NO: 44552 - DNA, 75 bp, synthetic construct
  source 1..75: mol_type = other DNA
aagaaaggtcaaatgcctggtggggcaggggttgtgggggataatggagaagtgtatttgagcggactggatgaa

SEQ ID NO: 44553 - DNA, 75 bp, synthetic construct
  source 1..75: mol_type = other DNA
gctcaggactgcgcttataaatttcttgtctgcgaggataaacccggcatgccccgccctgccatcgactcctgg

SEQ ID NO: 44554 - DNA, 75 bp, synthetic construct
  source 1..75: mol_type = other DNA
cgtggatgcagagctttaaatgttggttcagtgattgctggaactcaaagtaatgccggtaaaggtgtcatatcc

SEQ ID NO: 44555 - DNA, 75 bp, synthetic construct
  source 1..75: mol_type = other DNA
aggagccaaatttattgagttttctggcgaatccgacgacggacgtaaaatccaatatcttagcgtctgtgttca

SEQ ID NO: 44556 - DNA, 75 bp, synthetic construct
  source 1..75: mol_type = other DNA
tggatggtacggcgattgggatgtgtgcattacccaacggcaaacgctgtagcgaacagtcacttgccgccggga

SEQ ID NO: 44557 - DNA, 60 bp, synthetic construct
  source 1..60: mol_type = other DNA
atgagtaaagtctttatttgcgccgccattccggacgaacaggcaataaaggaagaaggt

SEQ ID NO: 44558 - DNA, 75 bp, synthetic construct
  source 1..75: mol_type = other DNA
gtagcgcagaatatttctctgggagaggtttctgcttctgctcttaaggctacgggagttgctcctgctaaaagt

SEQ ID NO: 44559 - DNA, 75 bp, synthetic construct
  source 1..75: mol_type = other DNA
tcgcagactggcagcactcaacatgctggcagagcgtggcatcattccggctgactggcctgtccgcgtgaaaat

SEQ ID NO: 44560 - DNA, 75 bp, synthetic construct
  source 1..75: mol_type = other DNA
ccgtaaggcggatgaccatggacagccggacacctacgcttatccgacgaatgcagaactggatggcggtattcg

SEQ ID NO: 44561 - DNA, 75 bp, synthetic construct
  source 1..75: mol_type = other DNA
ctattatgatcgaagcgctgcgaggactcggttacaacaccgccaccgcgctggctgacatcatcgacaacagta

SEQ ID NO: 44562 - DNA, 75 bp, synthetic construct
  source 1..75: mol_type = other DNA
tcgttctggccctctttggctatccaaacggtagtccgagtggtttgtcagtaaacgtcagtaatatcaatgtca

SEQ ID NO: 44563 - DNA, 75 bp, synthetic construct
  source 1..75: mol_type = other DNA
tcgttctggccctctttggctatccatatggtagtccaagtggtttgtcagtaaacgtcagtaatatccatgtaa

SEQ ID NO: 44564 - DNA, 75 bp, synthetic construct
  source 1..75: mol_type = other DNA
ggggatgaatcgcgagcagcttctggaacagtatgctgatgcggatatggcacatgagggagacacgtctgccgt

SEQ ID NO: 44565 - DNA, 75 bp, synthetic construct
  source 1..75: mol_type = other DNA
tcgcggcaaaattgccactatcttccacggtattgatatctccagtcgggaagtgctcaaccactacactcccga

SEQ ID NO: 44566 - DNA, 75 bp, synthetic construct
  source 1..75: mol_type = other DNA
attaaaccagaaaaattaattacccatacgtttgatttccagcatgttgctgatgccattagtttatttgaacag

SEQ ID NO: 44567 - DNA, 75 bp, synthetic construct
  source 1..75: mol_type = other DNA
tcacaggacggcaggtgttgaggatgcgtattgcgaactatacctcaaaaaatggatagacagtccaggtaacgc

SEQ ID NO: 44568 - DNA, 75 bp, synthetic construct
  source 1..75: mol_type = other DNA
atgaattcgttacaaatcttgagttttgtcggttttacgctgctggtggcgatcatcacctggtggaaggttcgc

SEQ ID NO: 44569 - DNA, 75 bp, synthetic construct
  source 1..75: mol_type = other DNA
cctcagagcgcacgctggcagtccaggcagcactgatgcagcaaccggacaaatctctggcactgctggcatgga

SEQ ID NO: 44570 - DNA, 75 bp, synthetic construct
  source 1..75: mol_type = other DNA
agaatccgatactcaaaaaaatgaaatcctggtggaagctgaaccatctgtagagcgtgaagggcctttttattt

SEQ ID NO: 44571 - DNA, 75 bp, synthetic construct
  source 1..75: mol_type = other DNA
acaggaagctctggaagcaatcccagaagttgtaggttccgcaatgaaatatcaggacggtgcaagcggatcgga

SEQ ID NO: 44572 - DNA, 75 bp, synthetic construct
  source 1..75: mol_type = other DNA
tatgctggtcggcaccattggtattcaatggtcgcgctggtatctggcgcatccgaaagtgtttaccgtggcggc

SEQ ID NO: 44573 - DNA, 75 bp, synthetic construct
  source 1..75: mol_type = other DNA
tccctatatagagcgcggcaaatccggaaaaatggaatgcacaatacacatgaaaggatgccgaacaatgatgat

SEQ ID NO: 44574 - DNA, 75 bp, synthetic construct
  source 1..75: mol_type = other DNA
atgctgggtttaaaacaggttcaccatattgcgattattgcgacggattatgcggtgagcaaagctttctactgc

SEQ ID NO: 44575 - DNA, 75 bp, synthetic construct
  source 1..75: mol_type = other DNA
ttaaccaactttcttacagcttcatcgattgttggtgcgttatccatcggtctttccattcctggattatggttg

SEQ ID NO: 44576 - DNA, 75 bp, synthetic construct
  source 1..75: mol_type = other DNA
agtagcagaaaaattgtcagaaaaagttgagtcttatctgcagcatcagtactcctttaagattgaaaatcctgc

SEQ ID NO: 44577 - DNA, 75 bp, synthetic construct
  source 1..75: mol_type = other DNA
cttcacaggacgggccggatgtgcagcaggcggtgacacaggcgattgccggattaagtgaacgcaaagtgcagt

SEQ ID NO: 44578 - DNA, 75 bp, synthetic construct
  source 1..75: mol_type = other DNA
atgatgagtatcgcgcaggtcagatcggccggaagtgccggtaactattataccgacaaggataattactatgta

SEQ ID NO: 44579 - DNA, 75 bp, synthetic construct
  source 1..75: mol_type = other DNA
tatggctggtcgcattttaatatcagctggctgtggtatttgttaccgagtctgttgctggttcgcccgtttcgt

SEQ ID NO: 44580 - DNA, 75 bp, synthetic construct
  source 1..75: mol_type = other DNA
aacggtatccggctggaggcggtatggctgacacacgacccggcatacccggatgaacagccgactgcgccgctg

SEQ ID NO: 44581 - DNA, 75 bp, synthetic construct
  source 1..75: mol_type = other DNA
accaccccggacattcgctacgtgcgtgaggcgctgtaccagacagcccgtcatggcgggtttatggctgtcatc

SEQ ID NO: 44582 - DNA, 75 bp, synthetic construct
  source 1..75: mol_type = other DNA
acccggaggggctggactaccgctttgagtacggagagagccgggtaatcatcacggacagcctgaaccggcggg

SEQ ID NO: 44583 - DNA, 75 bp, synthetic construct
  source 1..75: mol_type = other DNA
agttgcaactgacttcagtgacatatccggatggtttacgcagcagccggaaatatgaccgtcagggccgactgg

SEQ ID NO: 44584 - DNA, 75 bp, synthetic construct
  source 1..75: mol_type = other DNA
ctgacggacattatggacgccggcgcagtggatgccatacgtgcccgcctgagcaatccgggaagtcaccgtaaa

SEQ ID NO: 44585 - DNA, 75 bp, synthetic construct
  source 1..75: mol_type = other DNA
caaacgtcagatgtttacaaagctgcgcaccaccaaatacctgaaaactgccgccagcgccgattctgccagcgt

SEQ ID NO: 44586 - DNA, 75 bp, synthetic construct
  source 1..75: mol_type = other DNA
atgagtaaggtctttatttgcgctgctattcctgatgaacaggcaataaaggaagaaggtgccgtcgctgtagcc

SEQ ID NO: 44587 - DNA, 75 bp, synthetic construct
  source 1..75: mol_type = other DNA
tgcgccggacacagcagcagaacatcaggatgcaacgcaatcctgatggcagcagctatgaaccgaggcgagtaa

SEQ ID NO: 44588 - DNA, 75 bp, synthetic construct
  source 1..75: mol_type = other DNA
ctttcgactatggtcgtaactacggtgtcgtatatgacgtagaagcatggaccgatatgctgccagaatttggtg

SEQ ID NO: 44589 - DNA, 75 bp, synthetic construct
  source 1..75: mol_type = other DNA
aggtactcgaacgcattaagtctggggcaagtataagtgctattgccagggaattccgaaccacacggcaaacaa

SEQ ID NO: 44590 - DNA, 75 bp, synthetic construct
  source 1..75: mol_type = other DNA
ccgggatagtaagagcccggggcgcagggaaacgttttggtcgaccacctgtgttaaatgaagaacagaaacagg

SEQ ID NO: 44591 - DNA, 75 bp, synthetic construct
  source 1..75: mol_type = other DNA
cactggtcatgaacgcacactctacgccttccttgaccccgcatgcatcaactgccgtcttctggagcccgcgct

SEQ ID NO: 44592 - DNA, 75 bp, synthetic construct
  source 1..75: mol_type = other DNA
cttccgggcagcgcgcgcacaaaccgttcattttcaccgtggcgctgaacaaagccgttccgctgctgtacaacg

SEQ ID NO: 44593 - DNA, 75 bp, synthetic construct
  source 1..75: mol_type = other DNA
ttcgtcacctacgggatgcgtaacctgaaagaaggtaccaaattccgcgaaagcattaaaaaattgctggcctga

SEQ ID NO: 44594 - DNA, 75 bp, synthetic construct
  source 1..75: mol_type = other DNA
acctgctgcccgtcgtgcagcttatccgtcagccacgcgttgtgtttcctgccagtcagtctttgaagcaaaaaa

SEQ ID NO: 44595 - DNA, 75 bp, synthetic construct
  source 1..75: mol_type = other DNA
gtcgccagcctggcaaccctgacaaaagtcgggcgggatattcttgcgaaatcgaccgttgctgccgttatcgaa

SEQ ID NO: 44596 - DNA, 75 bp, synthetic construct
  source 1..75: mol_type = other DNA
gtcttacatgcaatagttgctcaatgcattgccaaataatgccagaagagtcaccgcgtttgcagtactgcgcaa

SEQ ID NO: 44597 - DNA, 75 bp, synthetic construct
  source 1..75: mol_type = other DNA
cgccatacacagagtcgccacccgggatgacaaaaaaggggccaaaagtggcgcatacaaggcctatcttgatgg

SEQ ID NO: 44598 - DNA, 75 bp, synthetic construct
  source 1..75: mol_type = other DNA
ggtttgggagaattatctctggctggcactgcatcgggtgtcattggcctgaatgggtatgtaacgatcccgtta

SEQ ID NO: 44599 - DNA, 75 bp, synthetic construct
  source 1..75: mol_type = other DNA
agatgaaggaacaaatcagagcgcaactgatactctctcgtcgccagtaccagaaactgatgcagtggaaacggc

SEQ ID NO: 44600 - DNA, 75 bp, synthetic construct
  source 1..75: mol_type = other DNA
ctctgcaccatcaccggctgaaccaggcaaaacggcagatgtggcaccagacgaagaaccaccaggaaaacttcg

SEQ ID NO: 44601 - DNA, 75 bp, synthetic construct
  source 1..75: mol_type = other DNA
cggcgtgggcgaaagtggcacgcgcgataccgagtatgctgcgctgtaccgagagcagctttctcgcctcgacct

SEQ ID NO: 44602 - DNA, 75 bp, synthetic construct
  source 1..75: mol_type = other DNA
ctgaagctcagaaaaatgatccggaggaaatggaaggcactgaacatctgcacaaggagaacactggcagcgatc

SEQ ID NO: 44603 - DNA, 75 bp, synthetic construct
  source 1..75: mol_type = other DNA
tggggcaaattctcacgtgtaattacggaaactacttgaaagatgaaaaaggagatgtagtttcgactgctgtcg

SEQ ID NO: 44604 - DNA, 75 bp, synthetic construct
  source 1..75: mol_type = other DNA
atgattatttccgcagccagcgattatcgcgccgcagcgcaacgcattctgccgccgttcctgttccactatatg

SEQ ID NO: 44605 - DNA, 75 bp, synthetic construct
  source 1..75: mol_type = other DNA
tgacgctgactggcgcgaaatcgatcagtgaaattacgcaagattcgctggtgcaggggctgggtaaagagttgc

SEQ ID NO: 44606 - DNA, 75 bp, synthetic construct
  source 1..75: mol_type = other DNA
catcagggtgcattgcctggcattaggtggtgttgatctgaccagtccggcaggaaaaatgacaatgcaagtgat

SEQ ID NO: 44607 - DNA, 75 bp, synthetic construct
  source 1..75: mol_type = other DNA
acagtactttaaacaccagcgatggccgtgcggaatacaactccattagtacctggatacagcgcgatattgccg

SEQ ID NO: 44608 - DNA, 75 bp, synthetic construct
  source 1..75: mol_type = other DNA
ccgtgatgccggtttgtcacgccagcaggcggcatctcttgccaaaaacatgacggtgaactttaaccgtcgtgg

SEQ ID NO: 44609 - DNA, 75 bp, synthetic construct
  source 1..75: mol_type = other DNA
tgttctggtccgtgaaaaaacaggcacgctggacctggtgctgggtgaacacgatctggctgcgccggtggacta

SEQ ID NO: 44610 - DNA, 75 bp, synthetic construct
  source 1..75: mol_type = other DNA
caggacctcagcaaacacctgtatccgatcatgaaagagctgaactcatcatgcacgaacaaactgtatgacatt

SEQ ID NO: 44611 - DNA, 75 bp, synthetic construct
  source 1..75: mol_type = other DNA
cggagagtgtactgcgtgaaccacaacgggagcgggaagcggtccgggaggttgcccgggaaaatctgctgcagg

SEQ ID NO: 44612 - DNA, 75 bp, synthetic construct
  source 1..75: mol_type = other DNA
taccgccagttaacggcacagtatccggacggcgtaccggaagccgcactggatgaagtcatggccacgctgacc

SEQ ID NO: 44613 - DNA, 75 bp, synthetic construct
  source 1..75: mol_type = other DNA
cagggcaggtgggttgggaactgcagcgtgctctggcgccgctgggtaatctgatcgctcttgatgttcactcca

SEQ ID NO: 44614 - DNA, 75 bp, synthetic construct
  source 1..75: mol_type = other DNA
cagtggtaccacaacctggcacgattatgctgcgctggtttttgaagaggcgcgcaaagcaggcattccccttgc

SEQ ID NO: 44615 - DNA, 75 bp, synthetic construct
  source 1..75: mol_type = other DNA
tgctatgacgaactctcctcgtttgaaccggatgtggaaaaagaaggttcaccaaccctgcttggcgataagcgt

SEQ ID NO: 44616 - DNA, 75 bp, synthetic construct
  source 1..75: mol_type = other DNA
acgatctcgacgccctgcacgcttaccgcgcctgtatgaatatggggacgttaagcggtgcgccgaaagtacgcg

SEQ ID NO: 44617 - DNA, 75 bp, synthetic construct
  source 1..75: mol_type = other DNA
ttcactcccacatggatgtcgggcatcaacttctttttcgaccacgatcttagccgttaccactcccgcgccggc

SEQ ID NO: 44618 - DNA, 75 bp, synthetic construct
  source 1..75: mol_type = other DNA
tgtcaccggtctggctggacagccggagccgttatctgcgggatatgtaccgcccggggatggtgatggagcagt

SEQ ID NO: 44619 - DNA, 75 bp, synthetic construct
  source 1..75: mol_type = other DNA
aggtgtaccccacaatgcacttgatgatgcacgtcaccaggcaaaacaagtttcagcaatctggcaaaaactgat

SEQ ID NO: 44620 - DNA, 75 bp, synthetic construct
  source 1..75: mol_type = other DNA
cgcgggggcgcgcggctttctctccaaacgctgtagcccggatgaactcattgctgcggtgcatacggttgccac

SEQ ID NO: 44621 - DNA, 75 bp, synthetic construct
  source 1..75: mol_type = other DNA
gatgctttttctgagttaccagaaaacacaatagtcgttccttatggcgagcttacaggtagttttgagataata

SEQ ID NO: 44622 - DNA, 75 bp, synthetic construct
  source 1..75: mol_type = other DNA
attgcttttaaaaatattcaggcaggtgatagtaaaaagttctcgctatccagctctaatacatccacgaagaat

SEQ ID NO: 44623 - DNA, 75 bp, synthetic construct
  source 1..75: mol_type = other DNA
aatggcgagagacgttttaatcaatcacacacgagatgttgatattaatgagccagacggaccaacgaatctttc

SEQ ID NO: 44624 - DNA, 75 bp, synthetic construct
  source 1..75: mol_type = other DNA
gtattcttgatgtttatgctaacagtcagcgtgtattccgttttcagaatggagtggctattgcttttaaaaata

SEQ ID NO: 44625 - DNA, 75 bp, synthetic construct
  source 1..75: mol_type = other DNA
catgagttctcgtatgttatcggaatggcgagagacgttttaatcaatcacacacgagatgttgatatcaatgag

SEQ ID NO: 44626 - DNA, 75 bp, synthetic construct
  source 1..75: mol_type = other DNA
ctcggtttacaggaaacggtaaacaaggctggtaacgccgtccaaaagacaggcgatatcttgtccggtgggctt

SEQ ID NO: 44627 - DNA, 75 bp, synthetic construct
  source 1..75: mol_type = other DNA
tattcagtcggcagtgctacgcgccaggggagcaattcgccgacccggtttatcggccagtcggctatgacgtca

SEQ ID NO: 44628 - DNA, 75 bp, synthetic construct
  source 1..75: mol_type = other DNA
cctgttccgtggccttcagccacaccgcctactggctggctgaaatgcaacggtgcggctttttctgctgaagaa

SEQ ID NO: 44629 - DNA, 75 bp, synthetic construct
  source 1..75: mol_type = other DNA
ttcgtagaaatgacggttcgatccgctttaacaataagatgccttatcacgttacgctgggttatatcggaacaa

SEQ ID NO: 44630 - DNA, 75 bp, synthetic construct
  source 1..75: mol_type = other DNA
tctgaacgcctggcggtcaggcaaatgcagagtaaaccgctactgacttccctgtataagctgatgcaggagaaa

SEQ ID NO: 44631 - DNA, 75 bp, synthetic construct
  source 1..75: mol_type = other DNA
gcctgtcgctgttgacacaaaataacctgaacaaatctcagtcctctctgagttccgcaatcgagcgtctgtctt

SEQ ID NO: 44632 - DNA, 75 bp, synthetic construct
  source 1..75: mol_type = other DNA
ccaacaccgggtacccggaaaattaaggtaattcttaccgggggaggtggcggtggtagttctgtcatcgccaca

SEQ ID NO: 44633 - DNA, 75 bp, synthetic construct
  source 1..75: mol_type = other DNA
caacgcagggctgaatcagcaggaaagcaacaaatggggcaatagcagccagtttaatttctggagcagtggccc

SEQ ID NO: 44634 - DNA, 75 bp, synthetic construct
  source 1..75: mol_type = other DNA
tgctgttgagccatcggtcatcgcacaggttgtcatcagcaaatataccgaccatctgcccctgtatcgccagca

SEQ ID NO: 44635 - DNA, 75 bp, synthetic construct
  source 1..75: mol_type = other DNA
gttgttcctggaataggtactgcggcaggcgctattggtggtgggcttattggtcttgttggggggcttggattc

SEQ ID NO: 44636 - DNA, 75 bp, synthetic construct
  source 1..75: mol_type = other DNA
ttgccctgatgcatctgttgggatttgcgttctgtccgcgaatcagggatctccacgacaaaaaactgtttatca

SEQ ID NO: 44637 - DNA, 75 bp, synthetic construct
  source 1..75: mol_type = other DNA
aatcaatggtaagaacgtgctgcaacatcttgatcggctcagcagcattgaatcgctggcattacctgaaggtat

SEQ ID NO: 44638 - DNA, 75 bp, synthetic construct
  source 1..75: mol_type = other DNA
tgcactaaatattcttgttaatgccgtcattaatggctgttttggagttggtacgacgaatgcactaggtggtag

SEQ ID NO: 44639 - DNA, 75 bp, synthetic construct
  source 1..75: mol_type = other DNA
agcctgaatctgaaagagatcgaaatccactggcgtgaagtgctgcgtctggcaacctcgataaagcagggaacc

SEQ ID NO: 44640 - DNA, 75 bp, synthetic construct
  source 1..75: mol_type = other DNA
cgggcatgacattgattatcttgagccatctgaagtttactcgcttgggcgaacagctggctggaacgcctgccg

SEQ ID NO: 44641 - DNA, 75 bp, synthetic construct
  source 1..75: mol_type = other DNA
atccaggcctttgcgccttcatactgcaccgagttttgcccatcaatggcttttaccacgtcttggtaagttcat

SEQ ID NO: 44642 - DNA, 75 bp, synthetic construct
  source 1..75: mol_type = other DNA
ccctatgtgtttatgttattttcatcaatatttttgtgcaaatatcacgctaaaaatatcttgatgaaatctaat

SEQ ID NO: 44643 - DNA, 75 bp, synthetic construct
  source 1..75: mol_type = other DNA
cgattcggaagtagaagcaagaagaatggcatctaagctggataacgtaaaaaaaatagttgctcaattaaatga

SEQ ID NO: 44644 - DNA, 75 bp, synthetic construct
  source 1..75: mol_type = other DNA
gcgccgcttgaagtattgctggtgacactggcgaaagagatgacgccagttgaacaaaaacagtttacatccttg

SEQ ID NO: 44645 - DNA, 75 bp, synthetic construct
  source 1..75: mol_type = other DNA
aagttatggctattggccaactcaatatttctggcaatgtcacaccagcgaactggtggaaacatattcggctac

SEQ ID NO: 44646 - DNA, 75 bp, synthetic construct
  source 1..75: mol_type = other DNA
ctactgcgggaggcggcacagcttgaccagtcaagtttcgttgtccagcgggccagaccaatgctgaaaagcctg

SEQ ID NO: 44647 - DNA, 75 bp, synthetic construct
  source 1..75: mol_type = other DNA
tggagtgcattttaaaccgctataaacccgcctggcagacgtttttatatcagtacgaaaacagtcatgaggaga

SEQ ID NO: 44648 - DNA, 75 bp, synthetic construct
  source 1..75: mol_type = other DNA
gcaaacggtgttttgggtaggtggtgtggtgccgttgattctggtgccgctattaatgcgctggctgccggagtc

SEQ ID NO: 44649 - DNA, 75 bp, synthetic construct
  source 1..75: mol_type = other DNA
attctggatggtgacagcgtgtttgaatccagtgatggcgcagcaaaaggtgaaatagaaatccttacaaaagag

SEQ ID NO: 44650 - DNA, 75 bp, synthetic construct
  source 1..75: mol_type = other DNA
caaccctgagaaagttcgtgctgacatccgtgataaactgattcagtaccaggaagaatgctttagcgtgctgca

SEQ ID NO: 44651 - DNA, 75 bp, synthetic construct
  source 1..75: mol_type = other DNA
gtaccggcatgtggattcatatgcgtgaccagaatgttattttgggacgcaatgcggtatccaccgatggtgcgc

SEQ ID NO: 44652 - DNA, 75 bp, synthetic construct
  source 1..75: mol_type = other DNA
caggatatgccattctggcaggttatcgcggaagccagtctggcagccagagaggccggtcatgctgtccgtgag

SEQ ID NO: 44653 - DNA, 75 bp, synthetic construct
  source 1..75: mol_type = other DNA
agaaagcacaggacatcagcaaacgcctgtatccgatattgaaggaactgaactcatcatactcgagcaagctgt

SEQ ID NO: 44654 - DNA, 75 bp, synthetic construct
  source 1..75: mol_type = other DNA
cgcagaagaactgcacggcagccgtcttcagtggctgtatgccgtcgatgtactgattgaaacacagggcgaggt

SEQ ID NO: 44655 - DNA, 75 bp, synthetic construct
  source 1..75: mol_type = other DNA
atagcctactgccaatacaaaacagaagtatttgatagacttaatataactctccataatgtttcttcaggtgta

SEQ ID NO: 44656 - DNA, 75 bp, synthetic construct
  source 1..75: mol_type = other DNA
ctatccgacagccatcagttttctcctgaattacaggaggctgtaagtcaactggcacatcaggagatacagatg

SEQ ID NO: 44657 - DNA, 75 bp, synthetic construct
  source 1..75: mol_type = other DNA
ggcgcgcattgacgacgtggtggactacctgatgatggcccgcgacagcgaggagtacagcggatcgccaaccat

SEQ ID NO: 44658 - DNA, 75 bp, synthetic construct
  source 1..75: mol_type = other DNA
cgaggtgccggtggccgttcacctggtgtccagccatctggtgggtcaggatatcgagtatggcctgcgcgagct

SEQ ID NO: 44659 - DNA, 75 bp, synthetic construct
  source 1..75: mol_type = other DNA
gtccggcagccgtcagcgggaactggcagtgataacctttgcccgtcagtcgggcgttgagtccctgtttccggg

SEQ ID NO: 44660 - DNA, 75 bp, synthetic construct
  source 1..75: mol_type = other DNA
ggttacggatggtggccgtaacctgttgtcctttaactggcccagctaccgtgcacatgccggaggtgtggcagc

SEQ ID NO: 44661 - DNA, 75 bp, synthetic construct
  source 1..75: mol_type = other DNA
ggcagagccgcagacgcggcgtgagcgcaaccatgcggagatggagcgggcgctggtcagcaggaagcgcagccg

SEQ ID NO: 44662 - DNA, 75 bp, synthetic construct
  source 1..75: mol_type = other DNA
taggcagcctgcaacaagcgcgttacgatgcgcgcatcgaccagttgcgccagctgcaggaacgctttaagcctt

SEQ ID NO: 44663 - DNA, 75 bp, synthetic construct
  source 1..75: mol_type = other DNA
cggcttcccttgcgcccttgcaaccctgcaggcccggcaaagatggaggcacggcaccgcccggtgtcgcagaac

SEQ ID NO: 44664 - DNA, 75 bp, synthetic construct
  source 1..75: mol_type = other DNA
gacaacttttggaaaggtggcgaagaaggcgcttatgcgatggggcatgaggatgggaaggacaaaacggtaatt

SEQ ID NO: 44665 - DNA, 75 bp, synthetic construct
  source 1..75: mol_type = other DNA
gtggctaatacggaagaattttactggttaccagaggatggaatgaaaacagaaaataagccatcgataaaaact

SEQ ID NO: 44666 - DNA, 75 bp, synthetic construct
  source 1..75: mol_type = other DNA
atcaaccagccatgccatggaaagtcataccgttatatattgccagccgtgtttacactgaggatcggtacaacg

SEQ ID NO: 44667 - DNA, 75 bp, synthetic construct
  source 1..75: mol_type = other DNA
cctggtctcagcagcttgaagactgggtgatgagtcatgttcgctgcttccagtggttgggtggcgttcctgaac

SEQ ID NO: 44668 - DNA, 75 bp, synthetic construct
  source 1..75: mol_type = other DNA
aacctgccggaattggcattcgtgaagaccgtgcattgatcacccaggatatgtctcggttttatccacatattt

SEQ ID NO: 44669 - DNA, 75 bp, synthetic construct
  source 1..75: mol_type = other DNA
gaggcggcgttctttcagtggatctggctggaagatcagcttaacgccggtaacttgccggagggcagcgaccag

SEQ ID NO: 44670 - DNA, 75 bp, synthetic construct
  source 1..75: mol_type = other DNA
ctcattctctacattgagaaccgcatgtaccgcacgccgcgcagcctgaagaagctcaacgtgatagacgaaggc

SEQ ID NO: 44671 - DNA, 75 bp, synthetic construct
  source 1..75: mol_type = other DNA
gacttggtcaaaagtagttcgcggtttagctattaaggctgatcttccactcatcagcacccacacattccgaca

SEQ ID NO: 44672 - DNA, 75 bp, synthetic construct
  source 1..75: mol_type = other DNA
atgttcccgaatcacccgaacctgctgcccgcttattttgcggaagatgatcatccgcaaatggaaaaatatgtg

SEQ ID NO: 44673 - DNA, 75 bp, synthetic construct
  source 1..75: mol_type = other DNA
agcatgcctgtactcagtgcgatgccatcgtgcaggcccccgcgccttcacggcccatcgagcggggtatcgcag

SEQ ID NO: 44674 - DNA, 75 bp, synthetic construct
  source 1..75: mol_type = other DNA
atttctaaaactcagggttatgatcctgattcccgtctgagcagagccacgcttgaatttcaggtaatagcctga

SEQ ID NO: 44675 - DNA, 75 bp, synthetic construct
  source 1..75: mol_type = other DNA
acacccgtgccacccgcgacgaaaaactcacccgcgcgggactacgcctgaccccgcagtacttcatgcgggagt

SEQ ID NO: 44676 - DNA, 75 bp, synthetic construct
  source 1..75: mol_type = other DNA
gatcgccaacacgattttgttcctcgcctctgacctcgccagccatatcaccctacaggatattgtggtcgatgg

SEQ ID NO: 44677 - DNA, 75 bp, synthetic construct
  source 1..75: mol_type = other DNA
cgatgtgccgtgtccggtctgggccatgtgggaacaggagaccattgatgacacccgcgccacccgcgacgaaaa

SEQ ID NO: 44678 - DNA, 75 bp, synthetic construct
  source 1..75: mol_type = other DNA
attgggctgaaggggggatggaatttttatcagtatccgttgaatccgatctcaaatatagatccattaggatta

SEQ ID NO: 44679 - DNA, 75 bp, synthetic construct
  source 1..75: mol_type = other DNA
tggctgacctacggcagcggttacctggcgggcatgaagctgggcgggacgccgctggtcgagtatacgcgggac

SEQ ID NO: 44680 - DNA, 75 bp, synthetic construct
  source 1..75: mol_type = other DNA
aaaagaacgtgtgccggagtcggtattttttgagtgtgaggctgttgcccgtagcaaagcactggaaactgatta

SEQ ID NO: 44681 - DNA, 75 bp, synthetic construct
  source 1..75: mol_type = other DNA
gcgctggcacgcgaagcatggttaaacgcgggaggcgagatccatgcttcgaatattgtctggcccgaatcggta

SEQ ID NO: 44682 - DNA, 75 bp, synthetic construct
  source 1..75: mol_type = other DNA
gtaatttaagtaaaacgttccgctaccggaccggctggtttcgtcgtcagaccgtagaagcggtaaaacccttga

SEQ ID NO: 44683 - DNA, 75 bp, synthetic construct
  source 1..75: mol_type = other DNA
aaaaacatcatgagtccggcaaaactccgggaaaaatgggatgaactggttatccgcctggggcgttcgcctgcg

SEQ ID NO: 44684 - DNA, 75 bp, synthetic construct
  source 1..75: mol_type = other DNA
gatttaatgctttctttgctaaaagaagcggccaaaaaaatgattaacacctgtaatgagtatcagaaaagacac

SEQ ID NO: 44685 - DNA, 75 bp, synthetic construct
  source 1..75: mol_type = other DNA
tcgcccctggtagtgaagagactgaagccgtcaccactatcgacctcttggttcgcggcggtatcaaagtcacca

SEQ ID NO: 44686 - DNA, 75 bp, synthetic construct
  source 1..75: mol_type = other DNA
gctctgcgaaacctgaggagaaagagtattcacttgttgacggcgacggcatgtccttacttgtaaaacctggcg

SEQ ID NO: 44687 - DNA, 75 bp, synthetic construct
  source 1..75: mol_type = other DNA
gcggtggccgccatccccgatgacagcagtattgagctcagggcagcggatggcaaggcagacagcagcgaggta

SEQ ID NO: 44688 - DNA, 75 bp, synthetic construct
  source 1..75: mol_type = other DNA
agggcgggctggatatctccaacctgctcaaaccggcgctggcgcgcggcgagctgaaaaccatcgccgccacca

SEQ ID NO: 44689 - DNA, 75 bp, synthetic construct
  source 1..75: mol_type = other DNA
ggtgaaactttccgacagaaaagctggtcggtatttgctgaggatgagtggcatctcacggatgtacttgcgctg

SEQ ID NO: 44690 - DNA, 75 bp, synthetic construct
  source 1..75: mol_type = other DNA
ctgcaggagcggctggcccgcattctctttgtgacaaatatctgggggcgtctgcatgagcgtgacaacggctga

SEQ ID NO: 44691 - DNA, 75 bp, synthetic construct
  source 1..75: mol_type = other DNA
ccctgaacacatggtgaatgcgaaactgaactggcagatcaccgaagaggtggcatcatggctgggtgcccgtta

SEQ ID NO: 44692 - DNA, 75 bp, synthetic construct
  source 1..75: mol_type = other DNA
acggcttatcagtgccatgagcgaagtgcgaaatctggtggaaccggcgattgcccgttgggcagcagagcgcgc

SEQ ID NO: 44693 - DNA, 75 bp, synthetic construct
  source 1..75: mol_type = other DNA
gacctcttctgacactggcgttgaattattacctgtagaaataacgccggatgagcagaaaaacctgtggcggcc

SEQ ID NO: 44694 - DNA, 75 bp, synthetic construct
  source 1..75: mol_type = other DNA
ctcaccctaaatttatatacatctttctggcgctacatcgcgatcgcatagcagatggagcaactacggtacatg

SEQ ID NO: 44695 - DNA, 75 bp, synthetic construct
  source 1..75: mol_type = other DNA
tcagccatactcacccgtggagtcagataacgggagtgcctgctgcctcgctgacggcaaaaggcaccgtacaac

SEQ ID NO: 44696 - DNA, 75 bp, synthetic construct
  source 1..75: mol_type = other DNA
cgctgattgaaaacgcagagtttgttgaaggttctgacaaactgctgcgcctgacgctggatctcggcggtgaaa

SEQ ID NO: 44697 - DNA, 75 bp, synthetic construct
  source 1..75: mol_type = other DNA
atgtggccggataaccgtattgcccgtgacgcgcactatctttaccggtatgaccgtcacggcaggctgacggag

SEQ ID NO: 44698 - DNA, 75 bp, synthetic construct
  source 1..75: mol_type = other DNA
atgagatttctggaaaaactcaacaacaccgacattgagctgacagcactgactgtctggatagccagaaaaacc

SEQ ID NO: 44699 - DNA, 75 bp, synthetic construct
  source 1..75: mol_type = other DNA
tcgtcgttctcaacgtggtgctggtgatccatatacaggtgaagtcgttggttgtgagacaaatggatcaggaat

SEQ ID NO: 44700 - DNA, 75 bp, synthetic construct
  source 1..75: mol_type = other DNA
aagccttttacagtagcggtgtacaagttggctacggagtaggtttactgctttcaaccggactggtttcattga

SEQ ID NO: 44701 - DNA, 75 bp, synthetic construct
  source 1..75: mol_type = other DNA
agtccggcggcgaagacggtggcagtgtggtgttcccgccggtgctggtgcagatgctcgaccggctggaaagtg

SEQ ID NO: 44702 - DNA, 75 bp, synthetic construct
  source 1..75: mol_type = other DNA
ggctggttaaagtgcgacgggcgcgcctttacaaaagaacaatatcctgttctggccagagtctacccgaccctc

SEQ ID NO: 44703 - DNA, 75 bp, synthetic construct
  source 1..75: mol_type = other DNA
tggctcggtttggcgcataacagcctgcactggctgtcgccgctgatggcgttgctgcttttattgcgcctgcgc

SEQ ID NO: 44704 - DNA, 75 bp, synthetic construct
  source 1..75: mol_type = other DNA
gcaagagcactgggtgacagaagtgtcgcactgggtgcatcttcaacagcaactggcgaccgttcgacggctttt

SEQ ID NO: 44705 - DNA, 75 bp, synthetic construct
  source 1..75: mol_type = other DNA
gtacacgccggcgcgaaaaatccacctgtaccactgcgaccatcgcggcctgccgctggcgctcatcagcacgga

SEQ ID NO: 44706 - DNA, 75 bp, synthetic construct
  source 1..75: mol_type = other DNA
aacataaaagttactggaaccgtgaagagcacacgatagaggaaatccgcgcaaaatatggcacaagcggaaaat

SEQ ID NO: 44707 - DNA, 75 bp, synthetic construct
  source 1..75: mol_type = other DNA
tatctgggcaaaatcgtttcttacgctcagggcttctctcagctgcgtgcggcgtctgaagagtacaactgggat

SEQ ID NO: 44708 - DNA, 75 bp, synthetic construct
  source 1..75: mol_type = other DNA
tggcctgtccggtgaatatgcggagaaatcccttgaagaatgggcggaacagattcgcaaaggaggcaagcagtg

SEQ ID NO: 44709 - DNA, 75 bp, synthetic construct
  source 1..75: mol_type = other DNA
ttctttagaaacatgtaagatgaagtgctccggaaataacattggacgttttattagatttgtattcaccggagt

SEQ ID NO: 44710 - DNA, 75 bp, synthetic construct
  source 1..75: mol_type = other DNA
taaaggcgacatcatcattgatggcggtaataccttctttcaggacacaattcgtcgtaaccgtgaactttccgc

SEQ ID NO: 44711 - DNA, 75 bp, synthetic construct
  source 1..75: mol_type = other DNA
cgatattttaatcccgttggtgctcatccttctggtgatatgggcgaagatccgaatggtattccaaataatctc

SEQ ID NO: 44712 - DNA, 75 bp, synthetic construct
  source 1..75: mol_type = other DNA
atgaacttcagagcacgtcttttttattatttttctttaaaaaaagagaaagaggaggataagggtttaacctta

SEQ ID NO: 44713 - DNA, 75 bp, synthetic construct
  source 1..75: mol_type = other DNA
aaatgttcggtcaaaaaggcggtgcgcaaaaaagccaaaaccaacgcgatgcgcgtggtcgttttattggaaagt

SEQ ID NO: 44714 - DNA, 75 bp, synthetic construct
  source 1..75: mol_type = other DNA
ggaagagcaggaagcgatggcgctgacccgtgcttacacgacgctgcgcgatgaacttcatcatctggcattaca

SEQ ID NO: 44715 - DNA, 75 bp, synthetic construct
  source 1..75: mol_type = other DNA
caaaacgctagcaaagtcagcacagtgggcttccaaagagtggccacagtttggtggcgtgctggcgttaacgct

SEQ ID NO: 44716 - DNA, 75 bp, synthetic construct
  source 1..75: mol_type = other DNA
tttctgtctcaccaaccggaggaagtgttggaacagttgatataacattacctgtagctttccctgctgcttgtc

SEQ ID NO: 44717 - DNA, 75 bp, synthetic construct
  source 1..75: mol_type = other DNA
aattgattggcgacgacgaaagtgaaactcaggaagagtcgctgtcggaacagtggcgtgagctgtggcaggatg

SEQ ID NO: 44718 - DNA, 75 bp, synthetic construct
  source 1..75: mol_type = other DNA
tcaggaaaccatcacctttgacgacttcgccaaagttgacctgcgcgtggcgctgattgaaaacgcagagtttgt

SEQ ID NO: 44719 - DNA, 75 bp, synthetic construct
  source 1..75: mol_type = other DNA
tattcatttattctttttgtgtttctgctgaaactgttaatcttaataattcatccgttcgttcatttgtccagt

SEQ ID NO: 44720 - DNA, 75 bp, synthetic construct
  source 1..75: mol_type = other DNA
ttggattaattattaccggtatatcaggaggttttgtcttcttttttattcttaacatgatatctgccatctaca

SEQ ID NO: 44721 - DNA, 75 bp, synthetic construct
  source 1..75: mol_type = other DNA
catttttaccactgcgaccaccggggcctgccgctggcgctcatcagcgaagacggcaatacggcgtggcgcggg

SEQ ID NO: 44722 - DNA, 75 bp, synthetic construct
  source 1..75: mol_type = other DNA
cgggtggtcgccgattcactgggaaattttttgcccgtgagccctaccagcgcgacgccgggccagcctcagggt

SEQ ID NO: 44723 - DNA, 75 bp, synthetic construct
  source 1..75: mol_type = other DNA
tctaatccttcgaaggcgtatgcggaacttggatggaaagcgaagcgcggactggaagacatggttcgagatgcc

SEQ ID NO: 44724 - DNA, 75 bp, synthetic construct
  source 1..75: mol_type = other DNA
cagacagcctggagagcaacaatccatcaatatccgggcttgttacaggtcagcttcatgcagccggagaaccgg

SEQ ID NO: 44725 - DNA, 75 bp, synthetic construct
  source 1..75: mol_type = other DNA
gagcgacataacctgaatctgagacaacatctggcaaggctgggacggaagtcactgtcgttctcaaaatcggtg

SEQ ID NO: 44726 - DNA, 75 bp, synthetic construct
  source 1..75: mol_type = other DNA
acctgaaaaacaccagcgtggcaattgtcggattcagcacgccaaacgtgatgcgtccttatgttgaacgcggca

SEQ ID NO: 44727 - DNA, 75 bp, synthetic construct
  source 1..75: mol_type = other DNA
ccagtatttcagccttaaactgttgcttatctcgctggtatatactgcggtgtccgtttttctgtggacacgtct

SEQ ID NO: 44728 - DNA, 75 bp, synthetic construct
  source 1..75: mol_type = other DNA
tcagttttgtcgccagcgtcgcccagttcacgccaaaaaccgtcgaaaccagcgatgaacggctgaaactgatgt

SEQ ID NO: 44729 - DNA, 75 bp, synthetic construct
  source 1..75: mol_type = other DNA
ggtcgatctcagcgacgtctatatgaccttcttcctgccaaccgaacaggcgggcacgctgaaactgggcggtga

SEQ ID NO: 44730 - DNA, 75 bp, synthetic construct
  source 1..75: mol_type = other DNA
gctatcgccactgagcgtggaaactccggcgatagcaataatttgctactcgaaggaggttgccttatggctacg

SEQ ID NO: 44731 - DNA, 75 bp, synthetic construct
  source 1..75: mol_type = other DNA
tgaagcattttatctcgcaacacctgatggacgatttgaggcgcttaataataaaggagaatatatttttatcag

SEQ ID NO: 44732 - DNA, 75 bp, synthetic construct
  source 1..75: mol_type = other DNA
gtctcctgagtatttatatcttcggtcttgccgtcatcgcttataccttcgctgatataggacggacagcaaacc

SEQ ID NO: 44733 - DNA, 75 bp, synthetic construct
  source 1..75: mol_type = other DNA
aacaccgctgttcgtaattatgttgctgacaatgcatcaacactacttgcaggctctttacccaaaacaatcacg

SEQ ID NO: 44734 - DNA, 75 bp, synthetic construct
  source 1..75: mol_type = other DNA
atgagcggtgatgacctgcaggaaagtgaccgtctctaccgttttcaggtagcaggtcgtcctgaactgaatcag

SEQ ID NO: 44735 - DNA, 75 bp, synthetic construct
  source 1..75: mol_type = other DNA
tatcaccaactgatatcgtcaatcgtctggtagaacataatcttcatgaagtagaagacatcagattaacatcct

SEQ ID NO: 44736 - DNA, 75 bp, synthetic construct
  source 1..75: mol_type = other DNA
tgggaaaaactatttaacggtgaaatcgactgcctggtttccgaccactcaccatgccctccggaaatgaaagcc

SEQ ID NO: 44737 - DNA, 75 bp, synthetic construct
  source 1..75: mol_type = other DNA
tagatgcctcaaacctgtcagtgaatggagtctctaccatcggaagtggagatggctccataactaaatttgata

SEQ ID NO: 44738 - DNA, 75 bp, synthetic construct
  source 1..75: mol_type = other DNA
gttgctaatgtctatccaacattcactttcgccgattaccctgagcgttgggctcctgacgcacctgaacagtta

SEQ ID NO: 44739 - DNA, 75 bp, synthetic construct
  source 1..75: mol_type = other DNA
aaatatttctctctatgcaaaacttggatataaaggaaatatgcagaacttgcaggcaggggcattcgctgcaac

SEQ ID NO: 44740 - DNA, 75 bp, synthetic construct
  source 1..75: mol_type = other DNA
ttcgccacagcaatccgaaaccactggcacgtggagaataagctgcactggcgtctggacgtggtaatgaatgaa

SEQ ID NO: 44741 - DNA, 75 bp, synthetic construct
  source 1..75: mol_type = other DNA
gttgctaatgtctatccaacgttcactttcgccgattaccctgagcgttgggcatctgacgcacctgaacagtta

SEQ ID NO: 44742 - DNA, 75 bp, synthetic construct
  source 1..75: mol_type = other DNA
ttgggatgatgccagatctggagcatgtacggggggagtttgtggtgttctttcacgtataataggaccaagtaa

SEQ ID NO: 44743 - DNA, 75 bp, synthetic construct
  source 1..75: mol_type = other DNA
cggtacaagggaaaagtggtacctgtcgccagttctccgatctgtttaaccgggaaattatctcctacagcttgt

SEQ ID NO: 44744 - DNA, 75 bp, synthetic construct
  source 1..75: mol_type = other DNA
attcagcagcgtctggcctcgcatcaaccgcagccttctctgttgcacggcgatttatggtccggcaactgtgcg

SEQ ID NO: 44745 - DNA, 75 bp, synthetic construct
  source 1..75: mol_type = other DNA
ccaatatcgccgataacactgctgatattgcaaccaacactaccaatatcgccgataacactgctgatatcgcca

SEQ ID NO: 44746 - DNA, 75 bp, synthetic construct
  source 1..75: mol_type = other DNA
ccggttataaccaggacccggtgaaatttatttccagagcaggcgtacccggtatcggtgcttcatttttcgcat

SEQ ID NO: 44747 - DNA, 75 bp, synthetic construct
  source 1..75: mol_type = other DNA
actggctactacggcctgacgcaggggctgctatctgtcctgcgtcttttctggggcaacctgattaacttcatg

SEQ ID NO: 44748 - DNA, 75 bp, synthetic construct
  source 1..75: mol_type = other DNA
gtgcaagtagcgccgcatctgcagctaacgcgattgcagtaggccgcaacagtgctgcagctggcgtagacagcc

SEQ ID NO: 44749 - DNA, 75 bp, synthetic construct
  source 1..75: mol_type = other DNA
tcggcaatatggccgagctggcggcgaccacgctcgactacgaaaactatcatatctttgttggcacctacccca

SEQ ID NO: 44750 - DNA, 75 bp, synthetic construct
  source 1..75: mol_type = other DNA
tactgataagtttcaaaataaatttggattagtattgccaaattgggaaataggtgtcaaacgtatgttgactga

SEQ ID NO: 44751 - DNA, 75 bp, synthetic construct
  source 1..75: mol_type = other DNA
tcacaaattaccatgaatatgctcaaaaaatggacaattcacccgcacatgaagccgcacaaacaaccgcacatg

SEQ ID NO: 44752 - DNA, 75 bp, synthetic construct
  source 1..75: mol_type = other DNA
tagatggcgatgatgaagccatcttcagaccaatacaaaaatacatcaatggcacatggtataacgtcgcacagg

SEQ ID NO: 44753 - DNA, 75 bp, synthetic construct
  source 1..75: mol_type = other DNA
ctgcacgctggtgagtaatgaggtgccgttaagcctccggccggagaatcactctgcgtcagccggagcacctct

SEQ ID NO: 44754 - DNA, 75 bp, synthetic construct
  source 1..75: mol_type = other DNA
aatcagagacaggctaaaatgttgtcagcgcgtttccggtgcattttttgggataatggttggttcgggggcacc

SEQ ID NO: 44755 - DNA, 75 bp, synthetic construct
  source 1..75: mol_type = other DNA
ccgcgaacgtaacgaagttgaacaggatgtagaagttgcggtgcgtgaaaaaaatcgcgatgcgctatcgcgcaa

SEQ ID NO: 44756 - DNA, 75 bp, synthetic construct
  source 1..75: mol_type = other DNA
gctgttctttagttgccatttcatcaatgacggctcgctcttctgctgacaatcgaagtgccagtcgcggtcctg

SEQ ID NO: 44757 - DNA, 75 bp, synthetic construct
  source 1..75: mol_type = other DNA
gctcgccagttaagggcttctcagacaataaacgtcattcatttcatctgtcaggccgcgtcttctccgggagac

SEQ ID NO: 44758 - DNA, 75 bp, synthetic construct
  source 1..75: mol_type = other DNA
ggcaggaaaatttaccccgccccgtcattgacagagcatgggatgctcaactcaggctttgtaagaggtatcgaa

SEQ ID NO: 44759 - DNA, 75 bp, synthetic construct
  source 1..75: mol_type = other DNA
ctgaagggaaagctgcacgttatcagcaagcgttacactcagcgcattgagcgacataatctgaatctgagacaa

SEQ ID NO: 44760 - DNA, 75 bp, synthetic construct
  source 1..75: mol_type = other DNA
tcgtgcagtcgatcaacgtggcgataccattgatttttatctttcttctagacgtaataccaaatcagcatattg

SEQ ID NO: 44761 - DNA, 75 bp, synthetic construct
  source 1..75: mol_type = other DNA
ttattccgccaggtactaccttgctggcagaagtgccgctgctggataataacggcaaatttaacggtcagtacg

SEQ ID NO: 44762 - DNA, 75 bp, synthetic construct
  source 1..75: mol_type = other DNA
gcagactgagaaaaaagccgctgatgcctcttcgcagccacaggtggcgctggatgtgtccagccttggtggaat

SEQ ID NO: 44763 - DNA, 75 bp, synthetic construct
  source 1..75: mol_type = other DNA
cgatccgctggaagtggcgcagtggctgcaggcctgtcacgatgccggaatggaagttcgtgtacaggttaatga

SEQ ID NO: 44764 - DNA, 75 bp, synthetic construct
  source 1..75: mol_type = other DNA
tgattaccaccgttcgcccggtaagccgacaccttgccgccatgaaaatgacctacgttgcacggggtgtatccc

SEQ ID NO: 44765 - DNA, 75 bp, synthetic construct
  source 1..75: mol_type = other DNA
cattgtgccgcgactggccggggccggaaagggtggactgcagattgtgctgggggcggcagccatcgtgggctc

SEQ ID NO: 44766 - DNA, 75 bp, synthetic construct
  source 1..75: mol_type = other DNA
tattttcttgagggatttaaagataataaacggaatggactaatattccaggacggcaaaacaattaatttagag

SEQ ID NO: 44767 - DNA, 75 bp, synthetic construct
  source 1..75: mol_type = other DNA
tgcggtccaacaatattctgcttatgttaacgtggaaagtggaatgttaaaaacgataaaagatctggtttcaac

SEQ ID NO: 44768 - DNA, 75 bp, synthetic construct
  source 1..75: mol_type = other DNA
aaaggtatccatccacaaaatcacctggccggttacagcggtgtgcttcaggccgatgcttacggtggttaccgg

SEQ ID NO: 44769 - DNA, 75 bp, synthetic construct
  source 1..75: mol_type = other DNA
gcagaataacggaagccgcgtgtatggcccatgcccggagaaaaatccacgatgtgcatgcaagagcgccaaccg

SEQ ID NO: 44770 - DNA, 75 bp, synthetic construct
  source 1..75: mol_type = other DNA
gccttccgcacagcctggcgatatcctgctgtgctgctttggcgcatcggtggccaatcatgccgccatatactg

SEQ ID NO: 44771 - DNA, 75 bp, synthetic construct
  source 1..75: mol_type = other DNA
gaagatgctaccatcgctgacctggctgttggtactgctgcaggccagatcaaaacgggttctatgagccgttct

SEQ ID NO: 44772 - DNA, 75 bp, synthetic construct
  source 1..75: mol_type = other DNA
taacccgactgttgaagccgaagtacatctggagggtggtttcgtcggtatggcagcagctccgtcaggtgcttc

SEQ ID NO: 44773 - DNA, 75 bp, synthetic construct
  source 1..75: mol_type = other DNA
atgcgaacatataatggtaatgtaggattaattacggctaatactttaccaattatcattgagtggctaaatgaa

SEQ ID NO: 44774 - DNA, 75 bp, synthetic construct
  source 1..75: mol_type = other DNA
gtgacgaacgacgcctgatgcagaaagccatccataaaacacacgataaaaattatgcccgcagactgactgcca

SEQ ID NO: 44775 - DNA, 75 bp, synthetic construct
  source 1..75: mol_type = other DNA
acttttaaagatgagatcaacaataccgaacaacgctggtgctatcaggacggtctgaatgattacctggcggaa

SEQ ID NO: 44776 - DNA, 75 bp, synthetic construct
  source 1..75: mol_type = other DNA
atgcgaacctataatagtaatataggaaagattacagcagtaactttacctataattgtagagtggctagaaaaa

SEQ ID NO: 44777 - DNA, 75 bp, synthetic construct
  source 1..75: mol_type = other DNA
acaaagagctgaaaaaatttgcggccagaattgccgcgcagctctggcgtaaatacgaggaactcagcgacgaat

SEQ ID NO: 44778 - DNA, 75 bp, synthetic construct
  source 1..75: mol_type = other DNA
gatggaaaaacgctccggcactcttatgacaagagtcgccgcaggggagcgattcatgtcattagtgcgttctca

SEQ ID NO: 44779 - DNA, 75 bp, synthetic construct
  source 1..75: mol_type = other DNA
gctgaaattattcatgaatggaagaaggcagatatatcagaacaagtgacacttgtcagattatatctgaaggtg

SEQ ID NO: 44780 - DNA, 75 bp, synthetic construct
  source 1..75: mol_type = other DNA
ccggcagtgacatgacgctggatgtacaggacggggtactcagtaaccggaacacgaaaacacggggtggtatca

SEQ ID NO: 44781 - DNA, 75 bp, synthetic construct
  source 1..75: mol_type = other DNA
gccagcctcgtccctgatgaacagcgcatcggcttctggccgcagcattttggcctcattccacagtgggtgacc

SEQ ID NO: 44782 - DNA, 75 bp, synthetic construct
  source 1..75: mol_type = other DNA
gtggggcgcagccctgagtgccggagggctgactgccaccacgatgctgttctcactgggtgccagcatgatact

SEQ ID NO: 44783 - DNA, 75 bp, synthetic construct
  source 1..75: mol_type = other DNA
caggctgccgttgatgcgcatatcaaactgggtatccagccaacaggcaaacgacttggcgcgatggatgtcgcc

SEQ ID NO: 44784 - DNA, 75 bp, synthetic construct
  source 1..75: mol_type = other DNA
cgcatgccggacttctcatagacgacgagcagtttgatgaaatcaatattgtgcgcggtcagcgcgttcctgggg

SEQ ID NO: 44785 - DNA, 75 bp, synthetic construct
  source 1..75: mol_type = other DNA
tggttcacgacggatatcccaggacatcagcacccgtgatgagggcggagacgggaaagtggtggttatcggacg

SEQ ID NO: 44786 - DNA, 75 bp, synthetic construct
  source 1..75: mol_type = other DNA
gtgacacgataagcaacaagaagggatttttctccctgttactcagccaacttttccacggtgaaccgaaaaacc

SEQ ID NO: 44787 - DNA, 75 bp, synthetic construct
  source 1..75: mol_type = other DNA
aaggaatgaattaggagaaaatggtcattcacttttagagaagaccttttctacgcaatctgctgtcgagaacat

SEQ ID NO: 44788 - DNA, 75 bp, synthetic construct
  source 1..75: mol_type = other DNA
gagcgtaaggaggaaaagaaaaaagaagaactttatttctttgcatccgagcgtgaccgcaatttaaagaaagac

SEQ ID NO: 44789 - DNA, 75 bp, synthetic construct
  source 1..75: mol_type = other DNA
caggtgcaaggtgttttataccggattgaccgcctgcctttctttcttaagacgttgtttacttcccgttataac

SEQ ID NO: 44790 - DNA, 75 bp, synthetic construct
  source 1..75: mol_type = other DNA
atggctacgtggcaacagggtattaattctggtggttttctggctggcatcggtgcgcaaaatgagaatgcgcca

SEQ ID NO: 44791 - DNA, 75 bp, synthetic construct
  source 1..75: mol_type = other DNA
tgatggcatgttaattattgcggttatcgcggtaggtaaacgtgaacgtagtaacgtttatgatctcgcaagcga

SEQ ID NO: 44792 - DNA, 75 bp, synthetic construct
  source 1..75: mol_type = other DNA
aagcttttccagaacacctatcgcgccgtggttgagggaatggcctacaacccggacgaaattatctcaatcagc

SEQ ID NO: 44793 - DNA, 75 bp, synthetic construct
  source 1..75: mol_type = other DNA
ttcgtggtagcggcgcggtatttgatccggacgatgaagcggtgcgcggggacaacggacaggccgcacgcctga

SEQ ID NO: 44794 - DNA, 75 bp, synthetic construct
  source 1..75: mol_type = other DNA
atgacaaccgtctcgcataatttcaccacaccttctgtttccgtaaccactgcatcagggaataaccagtctcag

SEQ ID NO: 44795 - DNA, 75 bp, synthetic construct
  source 1..75: mol_type = other DNA
agtgcggcaatctggtatttctttggtccggcaccgcagattgtctataccctggtgattgccaccacggtgctg

SEQ ID NO: 44796 - DNA, 75 bp, synthetic construct
  source 1..75: mol_type = other DNA
cggggtatcctgcaggcggatgcgttcacaggttatgacaggctgttcagtgcagaacgtgaaggtagtgcgctg

SEQ ID NO: 44797 - DNA, 75 bp, synthetic construct
  source 1..75: mol_type = other DNA
atcctcatcgcctgtgtggatggcctgaaaggcttcccggatgccatcaacacagtatatccgaaggcccgcatc

SEQ ID NO: 44798 - DNA, 75 bp, synthetic construct
  source 1..75: mol_type = other DNA
ctgaattgaaaaaaagcaccccaacaaaaaatgaggtgcttgcagcagacgaaatgaaagaagctattcctgatc

SEQ ID NO: 44799 - DNA, 75 bp, synthetic construct
  source 1..75: mol_type = other DNA
gagcacccgtaccagttcgtattttgccgaccgtctgatccaggcgcgaaatgacgaaacgtttctttcccgtta

SEQ ID NO: 44800 - DNA, 75 bp, synthetic construct
  source 1..75: mol_type = other DNA
aacggtatcgatccggaagcgtatctgcgccatatcctgagcgtactgccggaatggccttccaaccgagttgat

SEQ ID NO: 44801 - DNA, 75 bp, synthetic construct
  source 1..75: mol_type = other DNA
ctgacgtcggtgtccggttggtttcatttgcggtccactgggttaaatctgaaatccatgaatatgtcttacgta

SEQ ID NO: 44802 - DNA, 75 bp, synthetic construct
  source 1..75: mol_type = other DNA
agtacctggatgaaaacgatcagcctaatatggccaacatcgagcggaaaaaagcgaacgtgaagcgcgcggtgg

SEQ ID NO: 44803 - DNA, 75 bp, synthetic construct
  source 1..75: mol_type = other DNA
atgcgtatttttgttgacgacggttccaccaacatcaaactggcatggatggaagatggtgcggtcaaaacgttg

SEQ ID NO: 44804 - DNA, 75 bp, synthetic construct
  source 1..75: mol_type = other DNA
aaggattgaaaaactacctgcaatccacgcagcaggctgcaaaagcggcagtaacaacacccacagggcagcaaa

SEQ ID NO: 44805 - DNA, 75 bp, synthetic construct
  source 1..75: mol_type = other DNA
atgaaaattatcccccgtggtgaagccatgcgtattcaccaacagcatccggcatcccgtctttttccgttctgc

SEQ ID NO: 44806 - DNA, 75 bp, synthetic construct
  source 1..75: mol_type = other DNA
ttgaccacgagggaacttcacgcgatttattaaaaaccctgaatccgttgtgtcaggttccgacactggcgctgt

SEQ ID NO: 44807 - DNA, 75 bp, synthetic construct
  source 1..75: mol_type = other DNA
tggccactaacggtatgcgtaccagtcaccacatcgccaataccattattgagcaccgtcacgatgaagcctggc

SEQ ID NO: 44808 - DNA, 75 bp, synthetic construct
  source 1..75: mol_type = other DNA
ttgattctctgaaaccgtatctggataaaggcgacatcattattgatggtggcaatactttcttccaggacacca

SEQ ID NO: 44809 - DNA, 75 bp, synthetic construct
  source 1..75: mol_type = other DNA
cgggatgcttaccatctggcggggataacgctgccggattttgtgcgtgaggatgactggtggcgcaacggtcag

SEQ ID NO: 44810 - DNA, 75 bp, synthetic construct
  source 1..75: mol_type = other DNA
ggttcgcgagctgctggaacagaacccgtctttcgtcttctttaaaccgcaatcttttgctccggtgaaaggggc

SEQ ID NO: 44811 - DNA, 75 bp, synthetic construct
  source 1..75: mol_type = other DNA
attggaaaggcgatggagaaatctggcggatcccctgaccagttccttcggcagcttaacatcctgcaaaaccag

SEQ ID NO: 44812 - DNA, 75 bp, synthetic construct
  source 1..75: mol_type = other DNA
acggtgaacacttactggcgacgccgtggcagcacatattttatctcggaggagggaaagcgttatcgccgggct

SEQ ID NO: 44813 - DNA, 75 bp, synthetic construct
  source 1..75: mol_type = other DNA
actcccaccggaacgtatatagcatccccacaatttttcattacgggatgttcagagcattcattaccggggtca

SEQ ID NO: 44814 - DNA, 75 bp, synthetic construct
  source 1..75: mol_type = other DNA
ccatcatttttagtcaccgataatcagggcgatcagcgcggtattcttgccaccaatgacatcaccgatgacacc

SEQ ID NO: 44815 - DNA, 75 bp, synthetic construct
  source 1..75: mol_type = other DNA
agaactgtcctctttggtattacgctcattaaaagaagatgccgaagaatttctgcaacgtccgattaaagatgt

SEQ ID NO: 44816 - DNA, 75 bp, synthetic construct
  source 1..75: mol_type = other DNA
caacggataacggtaaacagaacacgtatttttcgtcactggataacatgattgcccaggggaacccgatgccgg

SEQ ID NO: 44817 - DNA, 75 bp, synthetic construct
  source 1..75: mol_type = other DNA
cggtttcaggacgatggcctgtagcgccctgaatgagtcggggctgtggtcaaaggacgctatcgagcgacagat

SEQ ID NO: 44818 - DNA, 75 bp, synthetic construct
  source 1..75: mol_type = other DNA
tttatcgctcagattgaagacattaacgagctaaaacgcaccgaacaggtgaatcagcaactgatggagcgcatc

SEQ ID NO: 44819 - DNA, 75 bp, synthetic construct
  source 1..75: mol_type = other DNA
tgcagataaaaagcgcactgccctggtggctggtctgccggggtgacattcacaaattccgctgcgtgccgcacc

SEQ ID NO: 44820 - DNA, 75 bp, synthetic construct
  source 1..75: mol_type = other DNA
atcaccggcgagtcggttttcgtttttccgggagcgcattcgctggagaagccgatgagcgagaacactatcaac

SEQ ID NO: 44821 - DNA, 75 bp, synthetic construct
  source 1..75: mol_type = other DNA
ggtaccagatacgtattgccggtgaggataccgcgccggaggcggtgtatgcccgtcttcatgaaccgctgagcg

SEQ ID NO: 44822 - DNA, 75 bp, synthetic construct
  source 1..75: mol_type = other DNA
gactggctgcgggcagaaatgcagggggagattgtggcactggtccacagtcatcccggtggtctgccctggctg

SEQ ID NO: 44823 - DNA, 75 bp, synthetic construct
  source 1..75: mol_type = other DNA
cgagcagtttgatgaaattaatattgtgcgcggtctgcctgttccaggcggacggcttggtgtgaaaatttacga

SEQ ID NO: 44824 - DNA, 75 bp, synthetic construct
  source 1..75: mol_type = other DNA
cactgaaggccgggacggatatgttgctgagtggtggtgatgtcagtaatcaggaagggacgcttgccgccggcg

SEQ ID NO: 44825 - DNA, 75 bp, synthetic construct
  source 1..75: mol_type = other DNA
atgggaagaccaagaaaaaacaaaaaagataatgcactaccaccgcgtgttagatcgaatggttacagttacgta

SEQ ID NO: 44826 - DNA, 75 bp, synthetic construct
  source 1..75: mol_type = other DNA
ctccatcgcaccagcacagtgaggagctcattgaatttgccattgattacctgaagaacaataaaaagcaggggc

SEQ ID NO: 44827 - DNA, 75 bp, synthetic construct
  source 1..75: mol_type = other DNA
tgggcgctactgtggctgccggaaggcggtgaactgctgaccgaaagctacgtcaacctgatcccaacgatgcag

SEQ ID NO: 44828 - DNA, 75 bp, synthetic construct
  source 1..75: mol_type = other DNA
ggatgactggtggcgcaacggtcagaacctgtacctggacaatatggaggcgactggtttttacaggatttccct

SEQ ID NO: 44829 - DNA, 75 bp, synthetic construct
  source 1..75: mol_type = other DNA
ccagcagcgactgaaattaaacctgtccggaaggctggcaataaaaattattgcagagccaccggataagcgccg

SEQ ID NO: 44830 - DNA, 75 bp, synthetic construct
  source 1..75: mol_type = other DNA
tatctgacactaggcttaatgaggccaaatgcttgcttgatcatggcttttttcatggtgcatattatctttgtg

SEQ ID NO: 44831 - DNA, 75 bp, synthetic construct
  source 1..75: mol_type = other DNA
aggcctttggcggctacaagatgattgatgtcccacaacccatgtgtggcccggaagatgtagtgattgaaatta

SEQ ID NO: 44832 - DNA, 75 bp, synthetic construct
  source 1..75: mol_type = other DNA
tcactcaggcggtcaattcactgctgaccgcacttaaattaccggatgaatctgctcaggctaatcagatcctcg

SEQ ID NO: 44833 - DNA, 75 bp, synthetic construct
  source 1..75: mol_type = other DNA
caatgttcccgtttgtgatgccgtccagcaccatgatgaacgcaagtctgacaatgtgggatgcaacttccagcc

SEQ ID NO: 44834 - DNA, 75 bp, synthetic construct
  source 1..75: mol_type = other DNA
tgctcacccgtttcctcggtcgtaacgacaccgagcgtcgaattatgattaactccattgcaccacactgggacg

SEQ ID NO: 44835 - DNA, 75 bp, synthetic construct
  source 1..75: mol_type = other DNA
atccgctacatcgagcgcgacaacgacggcaacaaaagcacgaaggattatccgctgctggtggatgttccagtt

SEQ ID NO: 44836 - DNA, 75 bp, synthetic construct
  source 1..75: mol_type = other DNA
atgcttaatccgttgctcctcaacatttaccgtttatttcagcgtaaaaaaatatcaacacccacagttgggcag

SEQ ID NO: 44837 - DNA, 75 bp, synthetic construct
  source 1..75: mol_type = other DNA
gtcgctgccaatgcgcagggggccatcgtcatcgacaagggcatgcgcaccagtacgccacacatttatgcggct

SEQ ID NO: 44838 - DNA, 75 bp, synthetic construct
  source 1..75: mol_type = other DNA
cgctggcggaagtggaaattttcgttggcaaacaggttaaagtacaaattgaaccgctctataaccaggagcagt

SEQ ID NO: 44839 - DNA, 75 bp, synthetic construct
  source 1..75: mol_type = other DNA
gacagcaggcggtaagagcctgatgacgcacatgcatggtggggttgagcatggtaacgacagcaccggggggcc

SEQ ID NO: 44840 - DNA, 75 bp, synthetic construct
  source 1..75: mol_type = other DNA
tcagggatggaaacccgccagggggacgcccggaaaagacactgcaaggagaacaacaaaacagacaataatcag

SEQ ID NO: 44841 - DNA, 75 bp, synthetic construct
  source 1..75: mol_type = other DNA
atgagaatgaccagccgtaaaaaagagatactcagttattttgagccggataacctagaatgggtgacaggtgag

SEQ ID NO: 44842 - DNA, 75 bp, synthetic construct
  source 1..75: mol_type = other DNA
ttcgcgggttccgacagcggtggcgaacatgcggcggtgttgtactcgctgatcggcacatgccgtctgaacaat

SEQ ID NO: 44843 - DNA, 75 bp, synthetic construct
  source 1..75: mol_type = other DNA
cgccatttccaggtatagtttttccgctgtcgcaaaatcggcagccggaattggcgttccgtataacttattggc

SEQ ID NO: 44844 - DNA, 75 bp, synthetic construct
  source 1..75: mol_type = other DNA
cggcgacaaggcggttgtcaataacgacggtgacaacgccatcagcaacggcggcaccggcacgcaggttaacgg

SEQ ID NO: 44845 - DNA, 75 bp, synthetic construct
  source 1..75: mol_type = other DNA
attgtttacgacgagaataatataattgtcggcatcaccagagatgcttcaacgcttaaccctgaaggtttcagc

SEQ ID NO: 44846 - DNA, 75 bp, synthetic construct
  source 1..75: mol_type = other DNA
tgatgagccgtccctgcgggatgatgcgaaaatggtggtgctggagctgggcggactggaagaccgtccgtcact

SEQ ID NO: 44847 - DNA, 75 bp, synthetic construct
  source 1..75: mol_type = other DNA
atggcgacgttacgtgaactgattatcaaaatttcggcaaattcacagtcattccagtcggagctccagcgtgct

SEQ ID NO: 44848 - DNA, 75 bp, synthetic construct
  source 1..75: mol_type = other DNA
cgacgttctttggacccgatcgtcacttcgaagatttctggcaacagccagcagctcccggaggtgggcgacagc

SEQ ID NO: 44849 - DNA, 75 bp, synthetic construct
  source 1..75: mol_type = other DNA
tgttcctctctgcaaccactgacggcatcaattacggtcgtgagcagatgattgagcagaatgaaccgttcgttt

SEQ ID NO: 44850 - DNA, 75 bp, synthetic construct
  source 1..75: mol_type = other DNA
cggctgtgggtctacgtccgtgatgaccgtaacgccggttcacagatgcctccggcggtctggttcgcgtacagc

SEQ ID NO: 44851 - DNA, 75 bp, synthetic construct
  source 1..75: mol_type = other DNA
gttaaggaacttaaaaaactatcaactgctgtagatcgtgttggtcgcaacattcattttatcataaaaggtgaa

SEQ ID NO: 44852 - DNA, 75 bp, synthetic construct
  source 1..75: mol_type = other DNA
actactgtcagtgccagctcctgcaagttggagctccgtcacggcaacatgacgctggaaaatccttcaccagag

SEQ ID NO: 44853 - DNA, 75 bp, synthetic construct
  source 1..75: mol_type = other DNA
gccagttgacggaaattcgcggttctgctgtcggaatgaccggtgcgtttgccggtgcctttgccaccggacacc

SEQ ID NO: 44854 - DNA, 75 bp, synthetic construct
  source 1..75: mol_type = other DNA
aatgtcggcttcaaattgcgcgttatcacgaagtcacctgtcactctgtctggctgccagataaggattgagtaa

SEQ ID NO: 44855 - DNA, 75 bp, synthetic construct
  source 1..75: mol_type = other DNA
ccgggcgctgcgcctgatggggtatgacacgaaaactgaaatctgcgggcatggactcagggcaatggcctgtag

SEQ ID NO: 44856 - DNA, 75 bp, synthetic construct
  source 1..75: mol_type = other DNA
cacgcgctgtaaatcatcaaggccacgttattgatattcggcaaaacgtgaacgccaccagcgttaatgcagcta

SEQ ID NO: 44857 - DNA, 75 bp, synthetic construct
  source 1..75: mol_type = other DNA
attgaacatatgctgacctttatgcgcgatctgcatcgttatacggcgcgcaatatgggcgatgagcggatgtgg

SEQ ID NO: 44858 - DNA, 75 bp, synthetic construct
  source 1..75: mol_type = other DNA
tgcttgtcttgatggctttgctatcaggctgccaggctaattatattcgcgatgttcagggagggaccgtcgcac

SEQ ID NO: 44859 - DNA, 75 bp, synthetic construct
  source 1..75: mol_type = other DNA
tttttgcaatatgaaccgccccgggtttcctggagagtgttttatctgtgaactcaggctgccagatcattattt

SEQ ID NO: 44860 - DNA, 75 bp, synthetic construct
  source 1..75: mol_type = other DNA
atggcaacagttaaccagctggtacgcaaaccacgtgctcgcaaagttgcgaaaagcaacgtgcctgcgctggaa

SEQ ID NO: 44861 - DNA, 75 bp, synthetic construct
  source 1..75: mol_type = other DNA
actgcgccggatgctgttcggtacccgttctgaaaaactgcgtcgtgaagttgaacttgaaccgccccgggtttc

SEQ ID NO: 44862 - DNA, 75 bp, synthetic construct
  source 1..75: mol_type = other DNA
aggttataaaggatgagcaagacaggttacgtaagttgcttctagaaaaagaaacaaagtcagcaattaatgaga

SEQ ID NO: 44863 - DNA, 75 bp, synthetic construct
  source 1..75: mol_type = other DNA
tatgcgtggtcaaaagacggcactgattcatggtttatcactgaccttgaagacgaatcacatcctgaccgatac

SEQ ID NO: 44864 - DNA, 75 bp, synthetic construct
  source 1..75: mol_type = other DNA
cttgcaaaatctggctgactggctgcgtctggcactcggcagcgccattgttccgcctctgttgggggggggctg

SEQ ID NO: 44865 - DNA, 75 bp, synthetic construct
  source 1..75: mol_type = other DNA
ttgccgtggtgttcgacatgggggatggctacaagtctttgtgtgagaacatggggggcgtatatctggacggtg

SEQ ID NO: 44866 - DNA, 75 bp, synthetic construct
  source 1..75: mol_type = other DNA
ggctctgctgatggcggtttcactgaccactataccctgctgcagatgggggctgaccgtaagcacgaactggga

SEQ ID NO: 44867 - DNA, 75 bp, synthetic construct
  source 1..75: mol_type = other DNA
tatccggccatgcttcgcatggataacggaccggaatttatctctctggcgctggctgaatgggcagagaaatat

SEQ ID NO: 44868 - DNA, 75 bp, synthetic construct
  source 1..75: mol_type = other DNA
ggttgttcatcaaacaaaatcattaacaggggccagcatctggcaggcaggtcccgggggatttaatgtggacat

SEQ ID NO: 44869 - DNA, 75 bp, synthetic construct
  source 1..75: mol_type = other DNA
gtgataatcttcggcggatcctaaaagattacggcaatgaggctgtacatgttctctatggaacaggcgtagatg

SEQ ID NO: 44870 - DNA, 75 bp, synthetic construct
  source 1..75: mol_type = other DNA
tatgtggatgataaggtactggagctgaaggtgtacgtggatgacctgatggcaaaacatcttgccgcaccggac

SEQ ID NO: 44871 - DNA, 75 bp, synthetic construct
  source 1..75: mol_type = other DNA
tgcatgaatggatggtggagaagaatggcacgctgtcgaaaaaatccagactgggcgaagcgttcagctatgtac

SEQ ID NO: 44872 - DNA, 75 bp, synthetic construct
  source 1..75: mol_type = other DNA
cgcagtatgagttaggctcggtccgcgacattacgcgcttacgtgggcgttatgcgtggtcaaaagacggaactg

SEQ ID NO: 44873 - DNA, 75 bp, synthetic construct
  source 1..75: mol_type = other DNA
caaccgacacgtaaccacggttatgacgttattgtcggtggtgaactcttcactgattactccgatcaccctcgc

SEQ ID NO: 44874 - DNA, 75 bp, synthetic construct
  source 1..75: mol_type = other DNA
aagctttcctcgatatggtggcctggtcagaaggaacggataatgggctacaaccgacacgtaatcatggttatg

SEQ ID NO: 44875 - DNA, 75 bp, synthetic construct
  source 1..75: mol_type = other DNA
cggcactcgcttttttgctggcgagtctggtctggccggaaagtggatgggcgctggcggtgatgatattatccg

SEQ ID NO: 44876 - DNA, 75 bp, synthetic construct
  source 1..75: mol_type = other DNA
cggacatctcaggctgtaggcgttaatggtcaactggtcgagtatcgctatgatggcacggttaaaaccgtctca

SEQ ID NO: 44877 - DNA, 75 bp, synthetic construct
  source 1..75: mol_type = other DNA
gcaccgccgttactgcgtcagctggccgccatcggaaataacctgaatcagacagcccgtaaggtgaacagcggg

SEQ ID NO: 44878 - DNA, 75 bp, synthetic construct
  source 1..75: mol_type = other DNA
gacgcgtttattcatcgcgccgaaatgttcctcaaagaactgtggctaccagaaactcagcccgacggcgttttg

SEQ ID NO: 44879 - DNA, 75 bp, synthetic construct
  source 1..75: mol_type = other DNA
atggaaggtcaacagcacggcgagcagctaaagcgcggccttaaaaaccgccacatacagcttatcgcgctggga

SEQ ID NO: 44880 - DNA, 75 bp, synthetic construct
  source 1..75: mol_type = other DNA
cgcctgatgcacctgctgtttgtgaaatctgagtccacatttacctattttgaagctacacgtggctatatcgag

SEQ ID NO: 44881 - DNA, 75 bp, synthetic construct
  source 1..75: mol_type = other DNA
gcaacgttcaaaatcgatatctgacttcaaagatcaaagcatggtgaaatttatgagaggtgtaatggatgattt

SEQ ID NO: 44882 - DNA, 75 bp, synthetic construct
  source 1..75: mol_type = other DNA
ccaattcttggtcgcttacttatgaagtaatatactatttttgtaccttctatattgtatcatcttatacaccaa

SEQ ID NO: 44883 - DNA, 75 bp, synthetic construct
  source 1..75: mol_type = other DNA
ctggacacactgaatgaactggcagctgcgctggggaatgatcctaactttgcgacaacagtgatgaacgcgctg

SEQ ID NO: 44884 - DNA, 75 bp, synthetic construct
  source 1..75: mol_type = other DNA
gtggatgcgctgaggctctggttccacgaaacccgtttcggatggctgggctggcggttttgtatttactgcggg

SEQ ID NO: 44885 - DNA, 75 bp, synthetic construct
  source 1..75: mol_type = other DNA
gtgtgaagataaaaacgcaacaccacattcgccgcagcagcgaatggaaacgttaatcagccaggcgctggttcc

SEQ ID NO: 44886 - DNA, 75 bp, synthetic construct
  source 1..75: mol_type = other DNA
atgaaaatcatcacccgtggcgaagccatgcgtattcaccgtcagcatccgacatcccgtctttttccgttctgt

SEQ ID NO: 44887 - DNA, 75 bp, synthetic construct
  source 1..75: mol_type = other DNA
cacgttgagtttcacgaaaccggacgcgccgcctgtttctgggtcgatgtgtgtgaagataaaaacgcaacacca

SEQ ID NO: 44888 - DNA, 75 bp, synthetic construct
  source 1..75: mol_type = other DNA
agaaattatcatccagtgggagagcggagagtatgaaccaactatcagtatgcttatcccactggcaaatattct

SEQ ID NO: 44889 - DNA, 75 bp, synthetic construct
  source 1..75: mol_type = other DNA
tgatggttggtgcaatgggaatgatcgagattggcacgaaaaaatgaagggctatatctgcgattttttacgtaa

SEQ ID NO: 44890 - DNA, 75 bp, synthetic construct
  source 1..75: mol_type = other DNA
tataccctgaacaacggtggcgcatttatggcacctgaaccggatgaagatgatgacgaaacatgggtactgttc

SEQ ID NO: 44891 - DNA, 75 bp, synthetic construct
  source 1..75: mol_type = other DNA
agcgcacaatatcgcgcagaatcgcagcctgacggcatcatcggcatcggaacatggcgagacttcatcgtctgc

SEQ ID NO: 44892 - DNA, 75 bp, synthetic construct
  source 1..75: mol_type = other DNA
agttggtcgagttagacgcctcattggatttaaattcagagttattgcaaaaggtcctgttacattatcaggcct

SEQ ID NO: 44893 - DNA, 75 bp, synthetic construct
  source 1..75: mol_type = other DNA
ggcgacggtgaaagatccgtcgaatcatccggtggcgggaataacggtgaacttcaccataccacaggacgtggc

SEQ ID NO: 44894 - DNA, 75 bp, synthetic construct
  source 1..75: mol_type = other DNA
cgttaactttcccggtggaagccggcgatgaatgcctggtgatttttgccgatcgttgtattgatttctggtggc

SEQ ID NO: 44895 - DNA, 75 bp, synthetic construct
  source 1..75: mol_type = other DNA
gtgtataacaacggatatccaacagcgtatggaaatatcattcacctgaaagggatgacagccgttggcgaaggt

SEQ ID NO: 44896 - DNA, 75 bp, synthetic construct
  source 1..75: mol_type = other DNA
aatcagcaaaaacttgtttttgcgtggggtgtggtgcttttggtggtgagaaccaccaacctgttgagccttttt

SEQ ID NO: 44897 - DNA, 75 bp, synthetic construct
  source 1..75: mol_type = other DNA
cgcctgttcgatgaggtgggatatcagggctggatcggttgtgaatataaacctcgtggcctcaccgaagaaggg

SEQ ID NO: 44898 - DNA, 75 bp, synthetic construct
  source 1..75: mol_type = other DNA
agaaactgaggctgccacgccgaaggcggtcaaggctgcatacgaccttgcagccggcaaggcgcccgtcagcca

SEQ ID NO: 44899 - DNA, 75 bp, synthetic construct
  source 1..75: mol_type = other DNA
ttattactccgccagagaaaccgactcagtccggacctgagggtatccgatatgattttaatgatggtgcgcgtg

SEQ ID NO: 44900 - DNA, 75 bp, synthetic construct
  source 1..75: mol_type = other DNA
gtgatccagttcagttgttggcagtccttgataattcaatcatggtaaaatattttaaagatgagaaaccaactt

SEQ ID NO: 44901 - DNA, 75 bp, synthetic construct
  source 1..75: mol_type = other DNA
agcggtctgtcatggctggcgtgggctacccgtattccggtggtgctgataagtggcttcagcctgcccaacagc

SEQ ID NO: 44902 - DNA, 75 bp, synthetic construct
  source 1..75: mol_type = other DNA
agttcgaacataaggttgacagcctgattgaaaaattcaaagaatcgggcggaacggtcagagaaattcagctat

SEQ ID NO: 44903 - DNA, 75 bp, synthetic construct
  source 1..75: mol_type = other DNA
agcgatgccagcaaaagcgatcgggagaagctgaaccgcatgctggaggaaatgtttgaagaatccgatatgtgg

SEQ ID NO: 44904 - DNA, 75 bp, synthetic construct
  source 1..75: mol_type = other DNA
gattgccgcccttgtagactcgtcgcctgacgcactgaatacgctgaacgagctggcggcggcgctgggcaatga

SEQ ID NO: 44905 - DNA, 75 bp, synthetic construct
  source 1..75: mol_type = other DNA
ctttgacccgaaaaaaacagggaagcatctcggtccatggtctcctgatggccacctgggtgatctccctgcgct

SEQ ID NO: 44906 - DNA, 75 bp, synthetic construct
  source 1..75: mol_type = other DNA
acaacaacattaatgtgtctaactccactgtaacttcagggtcacagactccgctggaagaaagcaatggcttct

SEQ ID NO: 44907 - DNA, 75 bp, synthetic construct
  source 1..75: mol_type = other DNA
ccgcgcgaaaaggccttgtccagctcagtagcgccaccaacagcgattctgaaacgcttgcggcaacgccaaagg

SEQ ID NO: 44908 - DNA, 75 bp, synthetic construct
  source 1..75: mol_type = other DNA
caaaagacgggaaggaaacactctgtttcgctgggcagggcattcagcagcagtggcagatgaaacgcgagatat

SEQ ID NO: 44909 - DNA, 75 bp, synthetic construct
  source 1..75: mol_type = other DNA
ctttgacccggaaaaaacagggaagcatctcggtccatggtctcctgatggccacctaggtgatctccctgcgct

SEQ ID NO: 44910 - DNA, 75 bp, synthetic construct
  source 1..75: mol_type = other DNA
tgtcgatttatattcagaaatatgaggcaataatatctgttaatatacctttattgttaaccgaaaaagaattat

SEQ ID NO: 44911 - DNA, 75 bp, synthetic construct
  source 1..75: mol_type = other DNA
tgcgctgggtaactggatcggcaacaaagatcctctgtctggtgcaatttcaaatggtatcggttctgctgctgg

SEQ ID NO: 44912 - DNA, 75 bp, synthetic construct
  source 1..75: mol_type = other DNA
tggctgagcgaggccgaccggcggctgcagataaaaagtgcactgtcctggtggctggtctgccggggggaaatt

SEQ ID NO: 44913 - DNA, 75 bp, synthetic construct
  source 1..75: mol_type = other DNA
gaaaaacaaaacttatcgcaactatcaacacatgcaaagaaacctgtaaacatctgctttatttaagtaatgaag

SEQ ID NO: 44914 - DNA, 75 bp, synthetic construct
  source 1..75: mol_type = other DNA
aacgccggtgatacggccacggataccacggtaaatggcggactgttcactgccagaggggctcgctggcgggca

SEQ ID NO: 44915 - DNA, 75 bp, synthetic construct
  source 1..75: mol_type = other DNA
aaacagcaacaaatttatgggtgacccttcggcacgacattctcgcgctggccgtctttttaaatggattgctta

SEQ ID NO: 44916 - DNA, 75 bp, synthetic construct
  source 1..75: mol_type = other DNA
gttctgcaagaagtttgcggcaggcttcagcaactgctgtaaggacggcggctggggccaggacgtcgggcttgc

SEQ ID NO: 44917 - DNA, 75 bp, synthetic construct
  source 1..75: mol_type = other DNA
aatttatcaatgatgccttcctgatttgggaaagaaacactgactgggcgaaaattggatttaaaaatgattcag

SEQ ID NO: 44918 - DNA, 75 bp, synthetic construct
  source 1..75: mol_type = other DNA
ctcctgttcacaccagatctgcactctttacctcagggcattcatggatttcatgtgcacgaaaagggaagttgc

SEQ ID NO: 44919 - DNA, 75 bp, synthetic construct
  source 1..75: mol_type = other DNA
gcgcagaacggtaaaaacaacgattttgcacctgtcgtttcggcactcgccgcgctggccgctgcgggcaaggac

SEQ ID NO: 44920 - DNA, 75 bp, synthetic construct
  source 1..75: mol_type = other DNA
gatacagcaactgctgtaaggacagcggctggggacaggatatcgggctggccaaatgcagcagtgatgaaaaag

SEQ ID NO: 44921 - DNA, 75 bp, synthetic construct
  source 1..75: mol_type = other DNA
gcgagggagacattgtctatggactatcttcacccagagaaaaacttgtcaacagcattaaactagttaacgact

SEQ ID NO: 44922 - DNA, 75 bp, synthetic construct
  source 1..75: mol_type = other DNA
tggtcaggtaactgaagctgtcctgacccaggatggtcctgtactggagaatttcactgcaggacaatccgggac

SEQ ID NO: 44923 - DNA, 75 bp, synthetic construct
  source 1..75: mol_type = other DNA
acaacgcttacgttgaaaccgtcgccgggctgtccggtgtccagagcgccgccgtcgaattcacggtagaacctt

SEQ ID NO: 44924 - DNA, 75 bp, synthetic construct
  source 1..75: mol_type = other DNA
catcatcttttctgccagcgcctgtaagggctgtgattcgaaccgtgcgggaagcggtggtgactgttgctcgtg

SEQ ID NO: 44925 - DNA, 75 bp, synthetic construct
  source 1..75: mol_type = other DNA
caggcgcatgctgccctgctggcgcttgaaaccgagctccggacgctggaaaaacacagcggtgcgaatgagaaa

SEQ ID NO: 44926 - DNA, 75 bp, synthetic construct
  source 1..75: mol_type = other DNA
agccagggtgatacagccacaatcgccccagacactgttaaagataacagtgaagtcacagcagttgctaaagat

SEQ ID NO: 44927 - DNA, 75 bp, synthetic construct
  source 1..75: mol_type = other DNA
ttatggggttcagccctggcagccggtggtttttctgccaccacgatgctgttttcactgggggccagcatgata

SEQ ID NO: 44928 - DNA, 75 bp, synthetic construct
  source 1..75: mol_type = other DNA
cgggaattgagatgccggatttgcatcgcggggatgactggtggcgtcacggccagaatctctatcttgacaata

SEQ ID NO: 44929 - DNA, 75 bp, synthetic construct
  source 1..75: mol_type = other DNA
accgtcaccacggatgtcattgctcagcgcggtacagccctgaagctgaccggcagcactgtgctgaacggtgcc

SEQ ID NO: 44930 - DNA, 75 bp, synthetic construct
  source 1..75: mol_type = other DNA
tcagatgcagtgggaggtctgggcagagaggtatctggttatctccgcaagcagtgttatgcttcctggtggtgt

SEQ ID NO: 44931 - DNA, 75 bp, synthetic construct
  source 1..75: mol_type = other DNA
tggctggcttgaactgtggggcgcatgggtttattcaggtcgtctggaaaagcgcatgagcagcgtaatagcgaa

SEQ ID NO: 44932 - DNA, 75 bp, synthetic construct
  source 1..75: mol_type = other DNA
gatggtatttttgttggggagactggtgataaaattattgtcgccatcatgttttttatactttacacatcattg

SEQ ID NO: 44933 - DNA, 75 bp, synthetic construct
  source 1..75: mol_type = other DNA
tgttctttctcacgttagaaacatacttcggggtgttttcctttaaaagaaaaggaaaaataaatggcaaaaaga

SEQ ID NO: 44934 - DNA, 75 bp, synthetic construct
  source 1..75: mol_type = other DNA
gggactatgactataggtacagctatcgacttcggcattgaagaatctcagaagaaaggagatagtaatgaaaaa

SEQ ID NO: 44935 - DNA, 75 bp, synthetic construct
  source 1..75: mol_type = other DNA
tttcccgctctcgctgggcagtatcaaagtcagtcagggtaaggtccccgacacggcgaacccgtcgatgcccat

SEQ ID NO: 44936 - DNA, 75 bp, synthetic construct
  source 1..75: mol_type = other DNA
tggatatcgggtacatctctgaaattgaccccacctggacagacagcagcctgaccaccatcctcaacccggaag

SEQ ID NO: 44937 - DNA, 75 bp, synthetic construct
  source 1..75: mol_type = other DNA
accacgggcaccatgcagatgctgggacgtgccgcaggtgctcagactcagccggaagaggggcaacagttcagc

SEQ ID NO: 44938 - DNA, 75 bp, synthetic construct
  source 1..75: mol_type = other DNA
gtgaccgattcggcagagaaagcacagagtgtgacgtctgttgaatgcaccgtgacagtgagcgcagccgccgga

SEQ ID NO: 44939 - DNA, 75 bp, synthetic construct
  source 1..75: mol_type = other DNA
atcaaaaagcatggaaagaacaccgcgatcgataccaacaagacatggaaaagcttgaatcagaaaacatggaat

SEQ ID NO: 44940 - DNA, 75 bp, synthetic construct
  source 1..75: mol_type = other DNA
gtataccgcaacggaaacggataatacagaacacggaaaagccttgtggtcggggctgacagcaggaacatacgg

SEQ ID NO: 44941 - DNA, 75 bp, synthetic construct
  source 1..75: mol_type = other DNA
tatttaaaacaagattcacaaatgaaagaaactatagattttttatcaagctctgaagaaactataaatatagag

SEQ ID NO: 44942 - DNA, 75 bp, synthetic construct
  source 1..75: mol_type = other DNA
agagatggctatggttttgaggaagactgggcagaagtttatacctcgaaaaatcttccaccagaaagctaccca

SEQ ID NO: 44943 - DNA, 75 bp, synthetic construct
  source 1..75: mol_type = other DNA
atgtttaaaggacaaaaaacattgaccgctctggccatatctctgctattcactgcacctgtttatgcagctgat

SEQ ID NO: 44944 - DNA, 75 bp, synthetic construct
  source 1..75: mol_type = other DNA
cgaaaaaaagatggctactggccaccggatgcggtggaagaaaacaccggcacccgtaatcacaagtggcagcgc

SEQ ID NO: 44945 - DNA, 75 bp, synthetic construct
  source 1..75: mol_type = other DNA
atgacctggaaaacattaggcagcgccgcagaccggaaaacaggattggctttgccctgcaactttgtgccttac

SEQ ID NO: 44946 - DNA, 75 bp, synthetic construct
  source 1..75: mol_type = other DNA
tacagccttccgttatccgcaccttcagctcccggggtgatatgcgtgtggggacctccaccgcaggcagcggga

SEQ ID NO: 44947 - DNA, 75 bp, synthetic construct
  source 1..75: mol_type = other DNA
gaggctttcagctttggtgacccgatcccggtgctggatcgccgcgagctgctggactatgtggaatgcgtacag

SEQ ID NO: 44948 - DNA, 75 bp, synthetic construct
  source 1..75: mol_type = other DNA
ccgataacattggtggcgtatattacagaccggttcagaaatacattaacgggacatggtataacgtggcacagg

SEQ ID NO: 44949 - DNA, 75 bp, synthetic construct
  source 1..75: mol_type = other DNA
gagggggcgagagaaaaagatgtcagtttttcagcaacagcttcaatgcttcttgagttagggcttcgtgtatat

SEQ ID NO: 44950 - DNA, 75 bp, synthetic construct
  source 1..75: mol_type = other DNA
ttttgggtattgagtctctcagtcctcatgtctccgggaatccaaagtttgaatatgccaatatggttgaagata

SEQ ID NO: 44951 - DNA, 75 bp, synthetic construct
  source 1..75: mol_type = other DNA
ctcgatttgcgaagtaatatgagcgctactcctggcaaaatgacaccctggctgaataataatcttttgtgtcgc

SEQ ID NO: 44952 - DNA, 75 bp, synthetic construct
  source 1..75: mol_type = other DNA
tgaagcgcaggtcaaaaacacctttcagcaaattgcgctcgaatggcacagcatgaaagtgaaaaaatggtcagt

SEQ ID NO: 44953 - DNA, 75 bp, synthetic construct
  source 1..75: mol_type = other DNA
gctgcttcaggacgttaacgtgggctggctggagcacatcagaaccgatgccagcgagcgcgtaatgaatgacgt

SEQ ID NO: 44954 - DNA, 75 bp, synthetic construct
  source 1..75: mol_type = other DNA
cgatagggctgagaggtgaatggaatctgtataaatatccattaaaccctgttcggtttatagattctttgggtt

SEQ ID NO: 44955 - DNA, 75 bp, synthetic construct
  source 1..75: mol_type = other DNA
ttaaacagcccggcgctgaccggaacgccaacaacaccaactgcgcgacagggaacgaataatacccaaatcgca

SEQ ID NO: 44956 - DNA, 75 bp, synthetic construct
  source 1..75: mol_type = other DNA
gtgccgatggctttgagttcggttgtgatgatgacgaaaaactgcgtgtcacgttcgcactggactgttgcgatc

SEQ ID NO: 44957 - DNA, 75 bp, synthetic construct
  source 1..75: mol_type = other DNA
tactatccgcgctgttcatgttcaatgctcaggctgcagacacaatggataaaacacatgaagtaaaaggcagca

SEQ ID NO: 44958 - DNA, 75 bp, synthetic construct
  source 1..75: mol_type = other DNA
tcagggctttaagccacaggagagtatccccggctataacgcgaatccggacgagacaaaatattacggaggcgt

SEQ ID NO: 44959 - DNA, 75 bp, synthetic construct
  source 1..75: mol_type = other DNA
cacagccgcactacatggatatttgcatggcaatgattcgttgtgtggatgcgatttacatgctgaatggctggc

SEQ ID NO: 44960 - DNA, 75 bp, synthetic construct
  source 1..75: mol_type = other DNA
aaaagccaaagcagaagctgagaagaaagcggctgctgaaaaggctgcagctgataagaaagcggcagcagagaa

SEQ ID NO: 44961 - DNA, 75 bp, synthetic construct
  source 1..75: mol_type = other DNA
tgctgcgcaaaacccacttcgacaacgtgccggtgaaaccgcagcgcgtgtatgaagagatgaacaaagcctttg

SEQ ID NO: 44962 - DNA, 75 bp, synthetic construct
  source 1..75: mol_type = other DNA
gcaaacgcgacttggggtgaaaacctacctgaacagccatcaccagcgtgacgatggtaaacagcgtgagttcca

SEQ ID NO: 44963 - DNA, 75 bp, synthetic construct
  source 1..75: mol_type = other DNA
gctttgggtgtgcgcgcagaatggttatcttctggcgttggaaatatgtcagacagtacagtgcaaccaatacaa

SEQ ID NO: 44964 - DNA, 75 bp, synthetic construct
  source 1..75: mol_type = other DNA
agagacgctgataaaccgtgatggctggcaggtgattaaggaaggaggaactgccgcgcataccaccatcaacca

SEQ ID NO: 44965 - DNA, 75 bp, synthetic construct
  source 1..75: mol_type = other DNA
caatccggtggtggtgtgggatatctttggcgagaaaggccatccggtgcgggcgacggtttcggatctggggcc

SEQ ID NO: 44966 - DNA, 75 bp, synthetic construct
  source 1..75: mol_type = other DNA
ttggatgtcaaacggcggtggatggtggcaccaacttgattctgagcaggatgtgcaactcaaataccttctgcc

SEQ ID NO: 44967 - DNA, 75 bp, synthetic construct
  source 1..75: mol_type = other DNA
tggccaggtaactgaagctgtcctgacccaggatggccctgtactggagaattttactgcagggcaaagtggcac

SEQ ID NO: 44968 - DNA, 75 bp, synthetic construct
  source 1..75: mol_type = other DNA
tgacgggggttctggccttttcctccctgccctcaatagccgccgattcgccatcggtacaggtcgggttttctc

SEQ ID NO: 44969 - DNA, 75 bp, synthetic construct
  source 1..75: mol_type = other DNA
tgaagtcacagcagttgctaaagatccggctggtaatgaaagtgctccggtcactgtgacgtcaaaaactgacgg

SEQ ID NO: 44970 - DNA, 75 bp, synthetic construct
  source 1..75: mol_type = other DNA
cagtacagctgcaaccgtcaccggcacaaaccgcctgggagcattctccgttgtggcgggtaaggctgataatgt

SEQ ID NO: 44971 - DNA, 75 bp, synthetic construct
  source 1..75: mol_type = other DNA
aaaagcgccgcccgtcaggtgacgaaccagattatacgcggggtgctggggagtttgctggggggaagaagaagg

SEQ ID NO: 44972 - DNA, 75 bp, synthetic construct
  source 1..75: mol_type = other DNA
tcggaatggcatcagacatcagtccgattagcagggcttttaagtatgcgcttgatgaaatcacaaagaaaaaat

SEQ ID NO: 44973 - DNA, 75 bp, synthetic construct
  source 1..75: mol_type = other DNA
ggagtacaaacgccagctggctgacctgggtgacaaggttgaataccagaaacggctgaatgagctggcaaatca

SEQ ID NO: 44974 - DNA, 75 bp, synthetic construct
  source 1..75: mol_type = other DNA
gaaatattaaggttgcgtgaatcagtaccttcgcatgttaatcccaccgctcagtggctggcgtttaatcaacgg

SEQ ID NO: 44975 - DNA, 75 bp, synthetic construct
  source 1..75: mol_type = other DNA
tctaaaggtcgcagacacatcagaattactaagaacgctctggctactctgaaggaactgaacaactttaaaatt

SEQ ID NO: 44976 - DNA, 75 bp, synthetic construct
  source 1..75: mol_type = other DNA
tatcttgctggaaaatagtgattttactgtcacgtcttttcgctatgacagtggtgtcgaggggcttaaaattgc

SEQ ID NO: 44977 - DNA, 75 bp, synthetic construct
  source 1..75: mol_type = other DNA
gggtctccacactggaacagacgaccgaaaatcaacgtcgggaaatcgaaagcgcgggttttaacgtcagaccac

SEQ ID NO: 44978 - DNA, 75 bp, synthetic construct
  source 1..75: mol_type = other DNA
ttagatgatttcaaagataatgattttgtatttgtaccggagcacatatttcaaaaactttcacgtagcgagtgt

SEQ ID NO: 44979 - DNA, 75 bp, synthetic construct
  source 1..75: mol_type = other DNA
tttcgctgatatcccaggatatcgccaaaatgcggctgcgtcttatgcagacggatgcgcaggggatacgcaggg

SEQ ID NO: 44980 - DNA, 75 bp, synthetic construct
  source 1..75: mol_type = other DNA
ttaacaaaataattcaagattcagagtgtacaggcgtccctaaaataaatctcgcttacttgaaaagcttcccta

SEQ ID NO: 44981 - DNA, 75 bp, synthetic construct
  source 1..75: mol_type = other DNA
ccacagggctgtatcaggtgccgttgtcatcagcacaaccgggcgatgtgctgctgtgctgctttggttcatcgg

SEQ ID NO: 44982 - DNA, 75 bp, synthetic construct
  source 1..75: mol_type = other DNA
acttaaccgaatcaaaaacattacaggtctgccacactcagcagtgatgaagcttgcaattaaccgtgatattaa

SEQ ID NO: 44983 - DNA, 75 bp, synthetic construct
  source 1..75: mol_type = other DNA
catttatgttctgctggatgcgccccggctggcgacgttacttatcaaccgtcacggcggcgcactgccgccgct

SEQ ID NO: 44984 - DNA, 75 bp, synthetic construct
  source 1..75: mol_type = other DNA
taacgctgccggattttgcgcgcgaggatgagtggtggcgcaacggccagaacctgtacctggacaatatggagg

SEQ ID NO: 44985 - DNA, 75 bp, synthetic construct
  source 1..75: mol_type = other DNA
tgcagcaaccactggtgtggatggatggtcctgccaacctgcgccattttgatcgtcaactggaaggtattaccg

SEQ ID NO: 44986 - DNA, 75 bp, synthetic construct
  source 1..75: mol_type = other DNA
tcagcgtttgtggaagttgataccgtccgtgctgtgggggcagacagtaatgttctgatcagggaaaagagcagt

SEQ ID NO: 44987 - DNA, 75 bp, synthetic construct
  source 1..75: mol_type = other DNA
tgtgacggactgttacaccctgttccgggatgcataccatctggcggggataacgctgccggattttgtgcgtga

SEQ ID NO: 44988 - DNA, 75 bp, synthetic construct
  source 1..75: mol_type = other DNA
catgaacagtaagcaatggcccggtaaagccgctattggtcgtctgaaaggtgaggaactggcacaatataattt

SEQ ID NO: 44989 - DNA, 75 bp, synthetic construct
  source 1..75: mol_type = other DNA
agcgcactaagaccgcacgaatataacggtgggttacccccaaacgaatcggaaaatcgatactggaaaaactct

SEQ ID NO: 44990 - DNA, 75 bp, synthetic construct
  source 1..75: mol_type = other DNA
tggctgagcgaggcggaccggcggctgcagataaagagtgccctgccctggtggctggtctgccggggtgacatt

SEQ ID NO: 44991 - DNA, 75 bp, synthetic construct
  source 1..75: mol_type = other DNA
ctcccggcgaatctcccaggacatcagcacccgtgatgaaggcggtgacgggaaggtggtggttatcgggcggca

SEQ ID NO: 44992 - DNA, 75 bp, synthetic construct
  source 1..75: mol_type = other DNA
agttactgtggcgataccggatcaggcagagtatgagtcggcgtggaaactgctgggataacagcccaatggagc

SEQ ID NO: 44993 - DNA, 75 bp, synthetic construct
  source 1..75: mol_type = other DNA
tggtcgcgctgggctggacggtaaccgagttcgcggcgggcaagtacgacatcacccggcccaaggcggcaggct

SEQ ID NO: 44994 - DNA, 75 bp, synthetic construct
  source 1..75: mol_type = other DNA
catgaacagtaagcaatggcccggcaaagccgctattggtcgtctgaaaggtgatgaactggcgcaatataattt

SEQ ID NO: 44995 - DNA, 75 bp, synthetic construct
  source 1..75: mol_type = other DNA
gacggatgtcacccgctcaccgggatgcatggttaatctggggttcagtctgccggaattcgggaaaacggcaca

SEQ ID NO: 44996 - DNA, 75 bp, synthetic construct
  source 1..75: mol_type = other DNA
atactgacgccagaaaaaccgccactgctgttgaacagggcctgagccgtcaggcgctggctgcgcaaaaagccg

SEQ ID NO: 44997 - DNA, 75 bp, synthetic construct
  source 1..75: mol_type = other DNA
gcttcgctttagatattttcttttgtcgaatgatggcaaacaatgtcagtcatatgtccgcgattttatatatag

SEQ ID NO: 44998 - DNA, 75 bp, synthetic construct
  source 1..75: mol_type = other DNA
atgaaggtgcgatagccacaggaaccgtcattaatgagaagggctggcaggtcgtcaaacccggcgcagtggcaa

SEQ ID NO: 44999 - DNA, 75 bp, synthetic construct
  source 1..75: mol_type = other DNA
cgaccccacctggacggacagcagcctgaccaccattctcaatccggaagccgtcatctttgccaatccgatagc

SEQ ID NO: 45000 - DNA, 75 bp, synthetic construct
  source 1..75: mol_type = other DNA
ttcgcagggcagtatgtacccgttcaatggctgggtgagtaatgagtccagtccgttgcagtcctccctgctggt

SEQ ID NO: 45001 - DNA, 75 bp, synthetic construct
  source 1..75: mol_type = other DNA
agcaaatgacaagaagcgagatcaagcttatgaggatgagcttcgcaagctgcaactcgaaagcatgaaactcga

SEQ ID NO: 45002 - DNA, 75 bp, synthetic construct
  source 1..75: mol_type = other DNA
ttcaagaatagccgcaaaatgttgtcattacaacaaggcggctatatgacgctcgcgcagtttgccatgactttc

SEQ ID NO: 45003 - DNA, 75 bp, synthetic construct
  source 1..75: mol_type = other DNA
taccagtcagaacgtgaccgactgaaatttgagcaggaaactggtcagcttgtgccagtcagtgatgtcaggcgg

SEQ ID NO: 45004 - DNA, 75 bp, synthetic construct
  source 1..75: mol_type = other DNA
tggcgtgggggaaagcgggcaacgggatcatgaatatattgcgctatacaaccgtattctgccggagatggatct

SEQ ID NO: 45005 - DNA, 75 bp, synthetic construct
  source 1..75: mol_type = other DNA
ttttatcccatgtctgcacgatgccagtttgaacaggatgcctgtgaactgtatgcatggattatgacccgaata

SEQ ID NO: 45006 - DNA, 75 bp, synthetic construct
  source 1..75: mol_type = other DNA
ccgaaatgacaccttctgatgaagcacgattttttaccgtttttgatagacaacttggatatgatgcaggtgaag

SEQ ID NO: 45007 - DNA, 75 bp, synthetic construct
  source 1..75: mol_type = other DNA
tgcagacatcccaccacttcccagctgatttaacctacagattatttcctagtgagcttgcgtatctcattgacg

SEQ ID NO: 45008 - DNA, 75 bp, synthetic construct
  source 1..75: mol_type = other DNA
gggagctacggaaatcacaaaagaggaatacttcgcacgtaaaaacggcacgtactcaggttcacaacaaaatac

SEQ ID NO: 45009 - DNA, 75 bp, synthetic construct
  source 1..75: mol_type = other DNA
tggatatcctgttctggtgtgccggttcgcagggcagtatgtatccgtttaatggctgggtgagcaatgaatcca

SEQ ID NO: 45010 - DNA, 75 bp, synthetic construct
  source 1..75: mol_type = other DNA
tgaccaccagtaacctcaccggtcagggtggcaccatcaatatgcgtgttcgccttgatggcagcaatgcctctg

SEQ ID NO: 45011 - DNA, 75 bp, synthetic construct
  source 1..75: mol_type = other DNA
tcaccctgggcgttcaggccggttatgcccacagcatcaacggcagcagcgctgaaggttataacagtcaggcca

SEQ ID NO: 45012 - DNA, 75 bp, synthetic construct
  source 1..75: mol_type = other DNA
ttcatgtaacattcagacttaccgaagaagaatatgctccgttcgatagggctataaaagagcttaatattagta

SEQ ID NO: 45013 - DNA, 75 bp, synthetic construct
  source 1..75: mol_type = other DNA
gcactgttgtaaacagtgacggctggcagattgtcaaaaacgggggtgtggccgggaataccaccgttaatcaga

SEQ ID NO: 45014 - DNA, 75 bp, synthetic construct
  source 1..75: mol_type = other DNA
aaagtgagccagggaaaggtgccggatacggcaaacccgtcaatgccgctccagttctgcccggcgcctccccct

SEQ ID NO: 45015 - DNA, 75 bp, synthetic construct
  source 1..75: mol_type = other DNA
cggggattgagatgccggattttcatcgcggggatgactggtggcgtaacggtcagaatctctatcttgacaata

SEQ ID NO: 45016 - DNA, 75 bp, synthetic construct
  source 1..75: mol_type = other DNA
cggtcatttttgcaaatccgatagcacagggagcctgtgcggcggatgccattgccagtgcctttaacaagccgc

SEQ ID NO: 45017 - DNA, 75 bp, synthetic construct
  source 1..75: mol_type = other DNA
gtgaagcgaagcccggctcagagatcttgtggactgacggtcttggcgtgatgacccgcggtgtgaccgatgaca

SEQ ID NO: 45018 - DNA, 75 bp, synthetic construct
  source 1..75: mol_type = other DNA
agactggtcattgacggtggcagggcaaccggaaaaaccatcctgaacctggtgaacgccggcaacagtgcgtcg

SEQ ID NO: 45019 - DNA, 75 bp, synthetic construct
  source 1..75: mol_type = other DNA
catacacgggcttaccgcaaaatgtagataccgctgaagattcagaacaaccagagccgataaaagttaccgctg

SEQ ID NO: 45020 - DNA, 75 bp, synthetic construct
  source 1..75: mol_type = other DNA
cacgccgggaagcagccaaggccatcccatgtgaaagctgacggtaaagagttcgacctcgataaagggctgtat

SEQ ID NO: 45021 - DNA, 75 bp, synthetic construct
  source 1..75: mol_type = other DNA
gcgtgaacgtactgtcaaaagatggctcgatgaaaattcaggtcggcgcaaatgatggtgaaaccatcacgattg

SEQ ID NO: 45022 - DNA, 75 bp, synthetic construct
  source 1..75: mol_type = other DNA
acctgactacaaagggcgtgtttgaagatgaaggaagaaatcagagcgcaactgatactctctcgtcgccagtac

SEQ ID NO: 45023 - DNA, 75 bp, synthetic construct
  source 1..75: mol_type = other DNA
cagaccaccgaaggcgcgctgtccgaaatcaacaacaacttacagcgtatccgtgaactgacggttcaggcttct

SEQ ID NO: 45024 - DNA, 75 bp, synthetic construct
  source 1..75: mol_type = other DNA
gtctggttgtgaaggaaagcgatcacccctgctggcttgatgaagatgacgaaaatctgcccgtggtgctcgatg

SEQ ID NO: 45025 - DNA, 75 bp, synthetic construct
  source 1..75: mol_type = other DNA
tcctttcacgcggtgttttcatgcatttcgctgatatcccaggatattgccaaaatgcggcttcgcctgatgcag

SEQ ID NO: 45026 - DNA, 75 bp, synthetic construct
  source 1..75: mol_type = other DNA
ggtgacggactgttacaccctgttccgggatgcataccatctggcggggataacgctgccggattttgagcgtga

SEQ ID NO: 45027 - DNA, 75 bp, synthetic construct
  source 1..75: mol_type = other DNA
atggctatttcagtaaagccggtattgataagtgagaagcaaatggaagcgataaagaaaattcaggaggagcag

SEQ ID NO: 45028 - DNA, 75 bp, synthetic construct
  source 1..75: mol_type = other DNA
tgctgctgtcacatcagtcccggcactggctgctgacacggttgtacaggcgggagaaaccgtgaacgacggaac

SEQ ID NO: 45029 - DNA, 75 bp, synthetic construct
  source 1..75: mol_type = other DNA
atcacaactactgaggatgcggctgccggtaaactggtctacaaaggttccgatggtaagttaacaacggatacg

SEQ ID NO: 45030 - DNA, 75 bp, synthetic construct
  source 1..75: mol_type = other DNA
ggcgcatcggcccagacgctggaaaacaccgtgacccaggttatcgagcaaaatatgaccggcctcgataatctc

SEQ ID NO: 45031 - DNA, 75 bp, synthetic construct
  source 1..75: mol_type = other DNA
tttatctctgtatttcaccgctattatggcttcccgccagacagatatgtatccaggcaagggcttgatttttga

SEQ ID NO: 45032 - DNA, 75 bp, synthetic construct
  source 1..75: mol_type = other DNA
tacagaaacgggtaatcactgtctgtgaccgggaagcggatatctggcattacctgcattataaagtcagccacg

SEQ ID NO: 45033 - DNA, 75 bp, synthetic construct
  source 1..75: mol_type = other DNA
gttaacgcaggagagattcactttgataatcagacgacaccggatgccgcgctgagccgtgctgttgcaaaaggc

SEQ ID NO: 45034 - DNA, 75 bp, synthetic construct
  source 1..75: mol_type = other DNA
cactaccaacctgtctgaagcgcagtcccgtattcaggacgccgactatgcgaccgaagtgtccaacatgtcgaa

SEQ ID NO: 45035 - DNA, 75 bp, synthetic construct
  source 1..75: mol_type = other DNA
tgctgatggtgaaatgactacaattggttcatacaccacgaagtattcaatcgatgctaacaacggcaaggtaac

SEQ ID NO: 45036 - DNA, 75 bp, synthetic construct
  source 1..75: mol_type = other DNA
attacagtcgctggtacaccaatccggccggcaatctgagcgtccgggtctgtatgttccgtcgtggcggtgtct

SEQ ID NO: 45037 - DNA, 75 bp, synthetic construct
  source 1..75: mol_type = other DNA
tgaaataacggactatatcgttgggtattacaacgcgctcaggccgcacgaatataacggtgggttgccaccaaa

SEQ ID NO: 45038 - DNA, 75 bp, synthetic construct
  source 1..75: mol_type = other DNA
ccgacaactggctgaaatctcggtgctgacggaaagcatcggaggtaaaactgccccggactgggccatgaaaca

SEQ ID NO: 45039 - DNA, 75 bp, synthetic construct
  source 1..75: mol_type = other DNA
ggaaagtgcgacggacagtttttcgcaggttaaaagtgctgccacgcagacctttgacggtattgcacagaatat

SEQ ID NO: 45040 - DNA, 75 bp, synthetic construct
  source 1..75: mol_type = other DNA
gaatcgggggcaggagtgagttttctgggtttcagaacagcacaaataaaagacggttatgtatattcttataat

SEQ ID NO: 45041 - DNA, 75 bp, synthetic construct
  source 1..75: mol_type = other DNA
atggagcaaattgagcgccagcagcgccgtctgtcagcggcatccgctaccagtgatgcgctgaaagctaaccgc

SEQ ID NO: 45042 - DNA, 75 bp, synthetic construct
  source 1..75: mol_type = other DNA
ggacgttatctgctcaaccagtatccgccacattctggctgtacgaaagagtgcgctgctgcaaatcgacacact

SEQ ID NO: 45043 - DNA, 75 bp, synthetic construct
  source 1..75: mol_type = other DNA
tcagcaaatcagcatgctggtcaccattgcctcaggtattgcgggcgggcttgccggcaacagtacaagtgctgc

SEQ ID NO: 45044 - DNA, 75 bp, synthetic construct
  source 1..75: mol_type = other DNA
ggttgggatcgtatctgagaagtcgtcgctatgaacctcatatccagtcacggaaggatgaatcagaagccatca

SEQ ID NO: 45045 - DNA, 75 bp, synthetic construct
  source 1..75: mol_type = other DNA
cttccggattcgcccttgccgcattacttaatgctaatattgagttgggtaatgacccaataattggtatagaag

SEQ ID NO: 45046 - DNA, 75 bp, synthetic construct
  source 1..75: mol_type = other DNA
cgtctgtcgctcgcactggggcaaggcggtaagctccgctggctggtgaccggatttagcgccgtcgccagagga

SEQ ID NO: 45047 - DNA, 75 bp, synthetic construct
  source 1..75: mol_type = other DNA
ggcgcaaatataactacccggcgtcgtttgaagcaggtgctatggatgacatttcccgttgtctgctgggactca

SEQ ID NO: 45048 - DNA, 75 bp, synthetic construct
  source 1..75: mol_type = other DNA
gaagcatgggaacgctacagtgttctggtcaaccgtgtggatacggcaaatcctgaatggccacaaaagcctgaa

SEQ ID NO: 45049 - DNA, 75 bp, synthetic construct
  source 1..75: mol_type = other DNA
tggatggttttctgaaaggtaaatgcatcccacgagatttaaaggttaacgaaacaaatgctgaatatctggtgc

SEQ ID NO: 45050 - DNA, 75 bp, synthetic construct
  source 1..75: mol_type = other DNA
gtgggtatctggttccgctttgccaccgacgcccggttgaaaatcgaagttatcgaattttacgacgaccagagc

SEQ ID NO: 45051 - DNA, 75 bp, synthetic construct
  source 1..75: mol_type = other DNA
tatcggtctcaagctggggctgaatctccttatttccccctttgttaacgtctggaaaaatgccgttttactgcg

SEQ ID NO: 45052 - DNA, 75 bp, synthetic construct
  source 1..75: mol_type = other DNA
ccgtcaggattcgcctggcaaacatcgatgcaccggagaaaaaacaggctttcgggcgctggtcagcaaatcagc

SEQ ID NO: 45053 - DNA, 75 bp, synthetic construct
  source 1..75: mol_type = other DNA
gcaccaccactaccaacattaaccaaagatgagagagaagaacttgaacaactcagggtcgagaatgcctactta

SEQ ID NO: 45054 - DNA, 75 bp, synthetic construct
  source 1..75: mol_type = other DNA
taaatggatgtttaaggatggtgctgtggttaaacggatttatacggcagatgaacagcaacaacaggcagaatc

SEQ ID NO: 45055 - DNA, 75 bp, synthetic construct
  source 1..75: mol_type = other DNA
acgggcagacggtcatcagtggctggctggatcaggtcagtcagcggatcagtgcaacccgtcatcagatcagca

SEQ ID NO: 45056 - DNA, 75 bp, synthetic construct
  source 1..75: mol_type = other DNA
gtttctatgccacgcttccctggcagccattaactgtccagcctgaatgcccggtaacgcttaaggatgtgagcg

SEQ ID NO: 45057 - DNA, 75 bp, synthetic construct
  source 1..75: mol_type = other DNA
gctgtatcccaatattaaagtgcggattctggaacaaggcacgaataattgcatggaatcggtgctgtgtactga

SEQ ID NO: 45058 - DNA, 75 bp, synthetic construct
  source 1..75: mol_type = other DNA
tcctgagattaccgacaaactggcacgtacagctgtacttcgcgctgctattgaaaaggtgcacccgccatcgat

SEQ ID NO: 45059 - DNA, 75 bp, synthetic construct
  source 1..75: mol_type = other DNA
acgggccggcaaccctggatactgcccgatgcactgcatgccaccattgcggcactgatgacagtttacgatcag

SEQ ID NO: 45060 - DNA, 75 bp, synthetic construct
  source 1..75: mol_type = other DNA
atctgccgtggagccacccgggtggatggtaagcctgttattcctggcatgaagctgtcaaaggaaaaatgcgac

SEQ ID NO: 45061 - DNA, 75 bp, synthetic construct
  source 1..75: mol_type = other DNA
acatcggactggatgtacataaagaaacgttggcggttgctattgctgcacctgaacggcttggcgaagttcgtt

SEQ ID NO: 45062 - DNA, 75 bp, synthetic construct
  source 1..75: mol_type = other DNA
cgaatgctgcagcgtcacaaaaatcagcagccacttctgcatccactgcgacgacgaaagcgtcagaagccgcca

SEQ ID NO: 45063 - DNA, 75 bp, synthetic construct
  source 1..75: mol_type = other DNA
acgggctttcgcattttgatgccctgaaagataacgtccgcatctcgctcatgcacacgcgtctgtttttcggca

SEQ ID NO: 45064 - DNA, 75 bp, synthetic construct
  source 1..75: mol_type = other DNA
tttctataaacactactaatcctaaaaataataaagagtttctttggcttagttatagcatgaataatttgagtt

SEQ ID NO: 45065 - DNA, 75 bp, synthetic construct
  source 1..75: mol_type = other DNA
ccgtgatggtgcggggatctggaccatctgccgtggtgccatcatggtggatggtaaacctgttgttccaggcat

SEQ ID NO: 45066 - DNA, 75 bp, synthetic construct
  source 1..75: mol_type = other DNA
ggctccgcgcacatcacgttcagaaaaccggaactgattgatcggctaaatgacatcattgcgaagtattatcca

SEQ ID NO: 45067 - DNA, 75 bp, synthetic construct
  source 1..75: mol_type = other DNA
gatgaacacatccagtctgttcagggtaaagaggactatgaagatgagatgttcagtatcagatactttaagaag

SEQ ID NO: 45068 - DNA, 75 bp, synthetic construct
  source 1..75: mol_type = other DNA
attttcagcaatggcgtgaacgccagttaagccgtggcgaacactggctggcacaacacctggcggggcgttctc

SEQ ID NO: 45069 - DNA, 75 bp, synthetic construct
  source 1..75: mol_type = other DNA
cagggtttatgcgaaggtcatcatcaacaccggtaatctgcccgccataaaactggggacggccagcgtgcggct

SEQ ID NO: 45070 - DNA, 75 bp, synthetic construct
  source 1..75: mol_type = other DNA
gagccggaatacacaccggcgcgaaaagttcatttttaccactgcgaccaccggggcctgccgctggcgctcatc

SEQ ID NO: 45071 - DNA, 75 bp, synthetic construct
  source 1..75: mol_type = other DNA
cgatgaaagtgaaagacgcgatcgtcgatgctttcacgcggaaaaatctgccgcgtccaaatgttgatcgcgatg

SEQ ID NO: 45072 - DNA, 75 bp, synthetic construct
  source 1..75: mol_type = other DNA
tcacctcccgcgactttatgaaattccgcctcggcggtttcgaagccattaagtccgagtacatggcccaggtgc

SEQ ID NO: 45073 - DNA, 75 bp, synthetic construct
  source 1..75: mol_type = other DNA
ccgggaaaacatcatcattcgtttggatgagcacatccagtctgttcagggtaaaacatgctatgaagatgagat

SEQ ID NO: 45074 - DNA, 75 bp, synthetic construct
  source 1..75: mol_type = other DNA
tcaactccccacaaattccttcgatgaaagccattctcggcgcggcgaaaaagccagtccaggtatggtcggcgg

SEQ ID NO: 45075 - DNA, 75 bp, synthetic construct
  source 1..75: mol_type = other DNA
gagtaaggatgaggtgtttgagcgcggggtgatcaacgtcttcagagggctgaactggaattacaaaaccaattc

SEQ ID NO: 45076 - DNA, 75 bp, synthetic construct
  source 1..75: mol_type = other DNA
agaggaggcgaagaagaatgccggagaggcggagacatcagcgaggaatgccggcatatcagccagtcaggcaga

SEQ ID NO: 45077 - DNA, 75 bp, synthetic construct
  source 1..75: mol_type = other DNA
gtggcgcacgtattcggtgaacgcacgttggccacgctggagcgtcttctgagcctgctgtcggcctttgaggtc

SEQ ID NO: 45078 - DNA, 75 bp, synthetic construct
  source 1..75: mol_type = other DNA
attttgaagttcgcagcccgctgaagtccgtgatggccggagatacagagttgctgaccgtgggggaaatcacat

SEQ ID NO: 45079 - DNA, 75 bp, synthetic construct
  source 1..75: mol_type = other DNA
atcaatggtggttaacgccctgtttggcgaacgcgtaccgtgcagctccaccaaacatttgaccggacacacgct

SEQ ID NO: 45080 - DNA, 75 bp, synthetic construct
  source 1..75: mol_type = other DNA
aggcagcggaaagcggcgcgttttatgcccgtatccgccacgaacgctacctgaatgaacaggccattctcaaag

SEQ ID NO: 45081 - DNA, 75 bp, synthetic construct
  source 1..75: mol_type = other DNA
cggcctttaaggtggcatccggagatgtggatctgaacgtgctgcatctgtccttgctgggattactgattgccg

SEQ ID NO: 45082 - DNA, 75 bp, synthetic construct
  source 1..75: mol_type = other DNA
atcagaaaaaacatcacgttgccgcatggcgcgcaagcggccttacccgtgaacagtactgtgaactttacgaca

SEQ ID NO: 45083 - DNA, 75 bp, synthetic construct
  source 1..75: mol_type = other DNA
gtcgtgaccgcgcaggtatcaccattggtgaaggggcggggctaatgctgctgacccgggaaccgcagcccatcg

SEQ ID NO: 45084 - DNA, 75 bp, synthetic construct
  source 1..75: mol_type = other DNA
tggataacctacaaaggaaagctaccgggaagaattactggttctctgaagactcctccggaatcacaaccttaa

SEQ ID NO: 45085 - DNA, 75 bp, synthetic construct
  source 1..75: mol_type = other DNA
cattaattgaagtaatgattggcgtcctttttttttcgattgtttctctttctgtatataactattacaacagga

SEQ ID NO: 45086 - DNA, 75 bp, synthetic construct
  source 1..75: mol_type = other DNA
atcaggagccggtgcagaatacgccaggacaacaatctcctgctggcagtaacttttcttcactatggggtgatt

SEQ ID NO: 45087 - DNA, 75 bp, synthetic construct
  source 1..75: mol_type = other DNA
ctgaatgacgggcaatgcttccgccttcaggttaagccatggcgcgagaagcgcagcctgtcgcagaacgcgctc

SEQ ID NO: 45088 - DNA, 75 bp, synthetic construct
  source 1..75: mol_type = other DNA
agaatcaataacttagggttcaatgttcagtacgagcattacgtcttcgaaggcgaacaaggtaagcgagacagt

SEQ ID NO: 45089 - DNA, 75 bp, synthetic construct
  source 1..75: mol_type = other DNA
gatgccgccattgtgggtggcgcagacaccctgagccggatgccgattaacggttttcacagcctcgaatcgctc

SEQ ID NO: 45090 - DNA, 75 bp, synthetic construct
  source 1..75: mol_type = other DNA
aaaccattggtatgggaatgagtggtcagcagtataccagtgctttttttaacggtaatgcccgtcctgccggga

SEQ ID NO: 45091 - DNA, 75 bp, synthetic construct
  source 1..75: mol_type = other DNA
ggtcggtaacgctgacgacggtacgtcattaatcctggtcacgccggttaatggtctgccgtcttccggcgaggc

SEQ ID NO: 45092 - DNA, 75 bp, synthetic construct
  source 1..75: mol_type = other DNA
tgcccggcattacccgcgcatggacataccgacactggatgggaacggggactgtcggtgtgatgattgccagca

SEQ ID NO: 45093 - DNA, 75 bp, synthetic construct
  source 1..75: mol_type = other DNA
gttcccgattttcggtgcgggctgggatcgcctgatgggacgtcagaacgagacggtgaaagtgaccacctttaa

SEQ ID NO: 45094 - DNA, 75 bp, synthetic construct
  source 1..75: mol_type = other DNA
gctggaatgctcaaagatggtaagagcctacatgagtgttcaccgcaggaaaagcgcctggtagcccgattgaaa

SEQ ID NO: 45095 - DNA, 75 bp, synthetic construct
  source 1..75: mol_type = other DNA
ttcttgagcaatcgcggtttattgccctactgatgtatatcttacgcagcagcgtccgcgacagcgtctgccgca

SEQ ID NO: 45096 - DNA, 75 bp, synthetic construct
  source 1..75: mol_type = other DNA
aagttgtatcggtagtgaaaacacctggtaaaggctttcctcagccagccggtgttgcgttaccagtacaggaag

SEQ ID NO: 45097 - DNA, 75 bp, synthetic construct
  source 1..75: mol_type = other DNA
atgatgaaaattgcaaaatacatctctttttttgtctttcttttttcctgttctctgtatgcagcagaatttcag

SEQ ID NO: 45098 - DNA, 75 bp, synthetic construct
  source 1..75: mol_type = other DNA
cacaccacaagctcaaaattcgcggcctgaaaagcccggtggacgtgctgacgtttacgggccgggaacaactca

SEQ ID NO: 45099 - DNA, 75 bp, synthetic construct
  source 1..75: mol_type = other DNA
cattacttgcgttcaagatggcaaccatcggcctcaagctcgggctgaatctccttatttcacctttcgtcaacg

SEQ ID NO: 45100 - DNA, 75 bp, synthetic construct
  source 1..75: mol_type = other DNA
ctagaaattctgtctccatatttcaggccattgtgaacgaggaaatctgcaacggaaagtttggcacagcaagcc

SEQ ID NO: 45101 - DNA, 75 bp, synthetic construct
  source 1..75: mol_type = other DNA
ataatcgttatggcgtgagtaatggtgaacttaccggtggacgttatgccgtggcccgccacgttggcgagctgg

SEQ ID NO: 45102 - DNA, 75 bp, synthetic construct
  source 1..75: mol_type = other DNA
caggtaatccaaaaacaaaagaacaatatcagctaacaaagaattttgatgttatctggttatggtccgaagacg

SEQ ID NO: 45103 - DNA, 75 bp, synthetic construct
  source 1..75: mol_type = other DNA
caatcacggacatgccgttatcctgaaactcagggaactctatccgacgcgttatatctacaacgaacagcacct

SEQ ID NO: 45104 - DNA, 75 bp, synthetic construct
  source 1..75: mol_type = other DNA
atgaacgtacagttcttcgaccacgcacaccacaagctcaaaattcgcggcctgcaaagtccggtggatgtgctg

SEQ ID NO: 45105 - DNA, 75 bp, synthetic construct
  source 1..75: mol_type = other DNA
ggtaaaacggtggacgatctcgacctcgatattgcggtgagcaaaaacacgttcccgattttcggtgcgggctgg

SEQ ID NO: 45106 - DNA, 75 bp, synthetic construct
  source 1..75: mol_type = other DNA
tgattgtttatgacattgaacctgttacaggaaggaagactaaagcgcagtctctgcgtgacgggaataaagccg

SEQ ID NO: 45107 - DNA, 75 bp, synthetic construct
  source 1..75: mol_type = other DNA
tcatccttgagatggtagctgaaaaaggcattgtcagtattgctgaactaacggacagaatgaatgtgtcacata

SEQ ID NO: 45108 - DNA, 75 bp, synthetic construct
  source 1..75: mol_type = other DNA
aacccagggttctcagaggaatccattaaggagctggctgataccattaaagcgcgtggtgtgaaaatgcctgtc

SEQ ID NO: 45109 - DNA, 75 bp, synthetic construct
  source 1..75: mol_type = other DNA
gatattttatttggaatgtgggacgcatatccgaagtcctgagaaagtcggcagagaggaaaatgctcttatcag

SEQ ID NO: 45110 - DNA, 75 bp, synthetic construct
  source 1..75: mol_type = other DNA
ggaagaaggcgctgtggctgtagccacagccattgaagctggcgacgaacgccgtgctcgagcaaaatttcactg

SEQ ID NO: 45111 - DNA, 75 bp, synthetic construct
  source 1..75: mol_type = other DNA
ttgagggtcgggctgggttatgacgtcaaagtcggaaataacgttaccttcaccgttggtaaaacgaaaaaggat

SEQ ID NO: 45112 - DNA, 75 bp, synthetic construct
  source 1..75: mol_type = other DNA
aatatgagaagtatcgcggcggcggtatgccggggtcggtggatgtggatttgggactggatgacagtgcactgg

SEQ ID NO: 45113 - DNA, 75 bp, synthetic construct
  source 1..75: mol_type = other DNA
cgattcgctggtggattaaggacggtggcagagactgccgtatccgctcaaataattgctacggtcaggtatccc

SEQ ID NO: 45114 - DNA, 75 bp, synthetic construct
  source 1..75: mol_type = other DNA
ggtaaagcgtctgatgtcacccagaacacgggaggtgcactggttaccagcacagctgcaaccgtcaccggcaca

SEQ ID NO: 45115 - DNA, 75 bp, synthetic construct
  source 1..75: mol_type = other DNA
ggcacgttccacccgcacagtccgtcacactggatgcgcaccctgtgcgatgtggatttcaccccgccggtggac

SEQ ID NO: 45116 - DNA, 75 bp, synthetic construct
  source 1..75: mol_type = other DNA
cctacgcctgcctaccagccggtgttgaatgccaaagttggtggatattttaataacctgcgggcggcaaatcag

SEQ ID NO: 45117 - DNA, 75 bp, synthetic construct
  source 1..75: mol_type = other DNA
atcgtcaacaatctggtgagatgggaccggtggggatttcatcttatcaccgggcaacaggcagatcgacttgcc

SEQ ID NO: 45118 - DNA, 75 bp, synthetic construct
  source 1..75: mol_type = other DNA
gcaggtttgcgccaaactatctgcttctgccagcgattatctgcgcgagcgggtcagcgacattcgcgatatcag

SEQ ID NO: 45119 - DNA, 75 bp, synthetic construct
  source 1..75: mol_type = other DNA
ccggtggtgccctgattgcagacagtggtgccattgttgaggggaccaatgccagcggtaagttcagtattgatg

SEQ ID NO: 45120 - DNA, 75 bp, synthetic construct
  source 1..75: mol_type = other DNA
caatggagtggtcgctcggtggcttcccggattcggttatctgggagctttacgccgcaaccggtgtggatgccg

SEQ ID NO: 45121 - DNA, 75 bp, synthetic construct
  source 1..75: mol_type = other DNA
atgctggaagagtacaagaaggtggtgaacagcggtgacggtgatgcggtgaaaggggatgaggccgggcgtcag

SEQ ID NO: 45122 - DNA, 75 bp, synthetic construct
  source 1..75: mol_type = other DNA
ttcccagcttgtcgaaagcaacgaatctctctttaacaaagagacaagccgttttagttctgaacacaatgttac

SEQ ID NO: 45123 - DNA, 75 bp, synthetic construct
  source 1..75: mol_type = other DNA
atgaacacaaaaatcagatacggcctgtcggctgccgttctggcgctgattggtgctggcgcatctgctcctcag

SEQ ID NO: 45124 - DNA, 75 bp, synthetic construct
  source 1..75: mol_type = other DNA
gccaccatcgagacgctggaatccccgcgtgaacgtgccgcgttaactggcttctcactgatacgcctgccggac

SEQ ID NO: 45125 - DNA, 75 bp, synthetic construct
  source 1..75: mol_type = other DNA
cgtatccgctcaaacaactgttacggccagatatcccgtcgtgaccaggagagcgcgctggcgtgctggggaatc

SEQ ID NO: 45126 - DNA, 75 bp, synthetic construct
  source 1..75: mol_type = other DNA
gtggacgagccggatgatgagacggcctgtctgatgctgcgctccctgaaatcccgttatgcggaacatcataac

SEQ ID NO: 45127 - DNA, 75 bp, synthetic construct
  source 1..75: mol_type = other DNA
aaacgtgaaggaatttctgcaatcttatcaatcacccgaagtcgctaaagcggcagaaaccatttttaacggtgg

SEQ ID NO: 45128 - DNA, 75 bp, synthetic construct
  source 1..75: mol_type = other DNA
gtaaagagcgctatgaagatgaaatgttcagaattaaatactttaagaaaggctccgcgcacatcacgttcagga

SEQ ID NO: 45129 - DNA, 75 bp, synthetic construct
  source 1..75: mol_type = other DNA
cgtattcgctcaaataactgttatggtcaggtatcccgtcgtgaccaggagagcgcgctggcgtgctggggaatc

SEQ ID NO: 45130 - DNA, 75 bp, synthetic construct
  source 1..75: mol_type = other DNA
attacaaaaaaaaatactggaactgaacacttggttagatgatgatgtaattaattttaatgagtatatgctttg

SEQ ID NO: 45131 - DNA, 75 bp, synthetic construct
  source 1..75: mol_type = other DNA
cggggccagtttttcacgccctggagtgtggccagcatgatggcacagatgcagctggggaatgtgaaggcgttg

SEQ ID NO: 45132 - DNA, 75 bp, synthetic construct
  source 1..75: mol_type = other DNA
cactggcttcacggcgggtgaagcaaacccaaattcgctcacgcgataaatgggctgaaacggatttgtttgttg

SEQ ID NO: 45133 - DNA, 75 bp, synthetic construct
  source 1..75: mol_type = other DNA
cctgcaaagtccggtggatgtgctgaccttcgaaggccgcgaacaactgagtaccccgttccgctacgacattca

SEQ ID NO: 45134 - DNA, 75 bp, synthetic construct
  source 1..75: mol_type = other DNA
cactattcgtctggatgatcacattcagtctgttcagggtaaagagagctatgaagatgagatgttcagcatcag

SEQ ID NO: 45135 - DNA, 75 bp, synthetic construct
  source 1..75: mol_type = other DNA
atttatggactaccagaatacctgtccgctatcccttccgcccttctgaatgagtccgccacgctgttccgccgc

SEQ ID NO: 45136 - DNA, 75 bp, synthetic construct
  source 1..75: mol_type = other DNA
gagggcgcaagagataaagatataagcgtatcgggaactgcttcaatgcttcttgaactagggcttcgtgtatat

SEQ ID NO: 45137 - DNA, 75 bp, synthetic construct
  source 1..75: mol_type = other DNA
ttgctgattctggctcccgtctgggacgactctcctggcgacgaatggtttggcagtgccatgcgtaacagtgca

SEQ ID NO: 45138 - DNA, 75 bp, synthetic construct
  source 1..75: mol_type = other DNA
gcctaatcctcttagcatgtacgcggttgatgctgttgccgctattgcagaggtgagaggctggaacgcctgccg

SEQ ID NO: 45139 - DNA, 75 bp, synthetic construct
  source 1..75: mol_type = other DNA
aatggactgattatcactaatatcgattatgatttttcaggaagtaactggaacgtgaaaggtgttttttggggg

SEQ ID NO: 45140 - DNA, 75 bp, synthetic construct
  source 1..75: mol_type = other DNA
ttctgactcacgggcgaccggacaaagttctgacttaccggacgttgcgtcgtgctggctataccgggaaaattt

SEQ ID NO: 45141 - DNA, 75 bp, synthetic construct
  source 1..75: mol_type = other DNA
acttcaaaaaagattcatggaaataaacagatggcttggtcatgaaattataaattttgaaatatatacattata

SEQ ID NO: 45142 - DNA, 75 bp, synthetic construct
  source 1..75: mol_type = other DNA
gtaacgcctacctggagaaacgcacgaaccggttcggtgaaattatcgcccttgagcctgcgctggcaaaataca

SEQ ID NO: 45143 - DNA, 75 bp, synthetic construct
  source 1..75: mol_type = other DNA
aaggcagcatctttcatctgatggaaccggacattaaccaggagatctacggcctgcccggctatctttctgcca

SEQ ID NO: 45144 - DNA, 75 bp, synthetic construct
  source 1..75: mol_type = other DNA
atggatataacacctttccttcatgcgttttgtgctgtggctgcgcaggtactgattggcctttttaccggaaac

SEQ ID NO: 45145 - DNA, 75 bp, synthetic construct
  source 1..75: mol_type = other DNA
ctactggtttgtgcaatacggtatgactacgcagttgtatcagttcacgaaaggcaacatttttcatctgatgga

SEQ ID NO: 45146 - DNA, 75 bp, synthetic construct
  source 1..75: mol_type = other DNA
ctactggtttgtgcaatacggtatgacaacacagccgtatcagttcacgaaaggcagcatctttcatctgatgga

SEQ ID NO: 45147 - DNA, 75 bp, synthetic construct
  source 1..75: mol_type = other DNA
acatcatgctcggtaaaacgtataccaaagcagaatgcaaagcactcctgaataaagaccttgccactgtcgcca

SEQ ID NO: 45148 - DNA, 75 bp, synthetic construct
  source 1..75: mol_type = other DNA
attctcggcgcgatgatgcgcaagctggcacaggtggcgtatggagtgctgaagtcaggcgtgccgttcgatgcg

SEQ ID NO: 45149 - DNA, 75 bp, synthetic construct
  source 1..75: mol_type = other DNA
cgttctgggccctgttccttctgacctgggtttgtgttgtgtattttttcatttatgaagaacctcgttgccccc

SEQ ID NO: 45150 - DNA, 75 bp, synthetic construct
  source 1..75: mol_type = other DNA
ccaaagcaaagaaaggctttgaagaaacattatgggatacagcaaaccagcttcgcggtagcgttgagtcctccg

SEQ ID NO: 45151 - DNA, 75 bp, synthetic construct
  source 1..75: mol_type = other DNA
tgctgctgtcacgtcagtcccggcactggctgctgacatcgttgtacatccgggagaaaccgtgaacggcggaac

SEQ ID NO: 45152 - DNA, 75 bp, synthetic construct
  source 1..75: mol_type = other DNA
gacgcttcttcgcaaaataaaccagggcgatatcaaaggcgcatgtgaccagctacgtcgctggacatacgctgg

SEQ ID NO: 45153 - DNA, 75 bp, synthetic construct
  source 1..75: mol_type = other DNA
aagaggggaatcacaccactgcataccgcgatggctccggcatatggaccatctgtcggggagcaacgatggtgg

SEQ ID NO: 45154 - DNA, 75 bp, synthetic construct
  source 1..75: mol_type = other DNA
cggcggcaggagcattcactttgagccgctgtttcccggcgagataagctacagccgcagcgagtcactctggct

SEQ ID NO: 45155 - DNA, 75 bp, synthetic construct
  source 1..75: mol_type = other DNA
ctgcgcgtatcgggtctggtgacattcgacgacgaagccgtcttacagcggcttttccagctggcatccgcgacc

SEQ ID NO: 45156 - DNA, 75 bp, synthetic construct
  source 1..75: mol_type = other DNA
ggaactctcaggcttaaaggtaaactgacgccggcgttattacagacacttatccgcgaaataaaagggagcagc

SEQ ID NO: 45157 - DNA, 75 bp, synthetic construct
  source 1..75: mol_type = other DNA
gaataaatggcgtgaccggaaatctgccaccagtatctcaggaaatacttgtatctgatgccgttgataaagaag

SEQ ID NO: 45158 - DNA, 75 bp, synthetic construct
  source 1..75: mol_type = other DNA
cgtattcgctcaaacaactgctctggtcaggtatcacggcgtgaccaggaaagcatgctgacgtgctgggggata

SEQ ID NO: 45159 - DNA, 75 bp, synthetic construct
  source 1..75: mol_type = other DNA
aggcgctggcatgggtggagaaaaacatcaaagtgccactgactgaaccccagaaagcggggatcgcgtcattct

SEQ ID NO: 45160 - DNA, 75 bp, synthetic construct
  source 1..75: mol_type = other DNA
acgatttgcccgaccggcgccatcgtcgagccatatactgtcgatgctcgccgttgtatttcttatctgacgatt

SEQ ID NO: 45161 - DNA, 75 bp, synthetic construct
  source 1..75: mol_type = other DNA
gatgaccacattcagtccgttcagggtcaggagtgctatgaagatgagatgttcagcatcagatactttaagaag

SEQ ID NO: 45162 - DNA, 75 bp, synthetic construct
  source 1..75: mol_type = other DNA
ctgcgcgtgtcgggtctggtgacattcgacgatgaagccgttttacagcggcttttccagctggcatccgcaacc

SEQ ID NO: 45163 - DNA, 75 bp, synthetic construct
  source 1..75: mol_type = other DNA
gtgatcaacgtcttcaggggactgagctggaattacaaaaccaattgcccctgcaaatttggcagtaaaattatc

SEQ ID NO: 45164 - DNA, 75 bp, synthetic construct
  source 1..75: mol_type = other DNA
cggattaatgcaggagatcgaaaaggtgcctgcgaagcgattcgctggtggattaaggacggtggcagagactgc

SEQ ID NO: 45165 - DNA, 75 bp, synthetic construct
  source 1..75: mol_type = other DNA
tgcatccattcctgaccatgatgttttgctcgccggtttcccatgccagccgttcagtattgccggtgtcagcaa

SEQ ID NO: 45166 - DNA, 75 bp, synthetic construct
  source 1..75: mol_type = other DNA
gtgtgtccagcgtggtgtgcagttgcgcagtgaggatgacgcggctgacgacgctgaccgcacggaacaggtgca

SEQ ID NO: 45167 - DNA, 75 bp, synthetic construct
  source 1..75: mol_type = other DNA
atgacagaaagtattggcggtaaaaccgcactggactgggcgatgaaacaggattttcgctgtggctgctggctc

SEQ ID NO: 45168 - DNA, 75 bp, synthetic construct
  source 1..75: mol_type = other DNA
cggtggctatgcagtgtgccgccacagttcacccctccacatcactggatattgcgcgggtcgagtctggtttta

SEQ ID NO: 45169 - DNA, 75 bp, synthetic construct
  source 1..75: mol_type = other DNA
aacgcgctgtcaggctgaatatggcgacggatgaggaatgcgcacgactggagtcatgggaacgctacagcgttc

SEQ ID NO: 45170 - DNA, 75 bp, synthetic construct
  source 1..75: mol_type = other DNA
tgtttgaacttcgcaccctgccttaccagtcgatgcagcattcgaaagattatcgctgggtgtccaatgaccggg

SEQ ID NO: 45171 - DNA, 75 bp, synthetic construct
  source 1..75: mol_type = other DNA
ttcactctcggcatgtccgaggtaatcaaaatggttacctcggggaatttacaggcctcgcgccgcattttctcc

SEQ ID NO: 45172 - DNA, 75 bp, synthetic construct
  source 1..75: mol_type = other DNA
tctgaccggacgccagttgccggacaaggcggttgatttgctggataccgccggggcaagagtccgcatgagcct

SEQ ID NO: 45173 - DNA, 75 bp, synthetic construct
  source 1..75: mol_type = other DNA
tgaataaacaggccagtgagcttctcggctctgccggtaatttgacagataaactgcagggtatgcccggaggtt

SEQ ID NO: 45174 - DNA, 75 bp, synthetic construct
  source 1..75: mol_type = other DNA
catcaaagtgccactgactgaaccccagaaagcggggatcgcgtcattctgcccgtataacattggccccggtaa

SEQ ID NO: 45175 - DNA, 75 bp, synthetic construct
  source 1..75: mol_type = other DNA
gctgaacccagctcaacctcatttattaaccgcaccagatatctggctacttaccgatctgactgaagattcaac

SEQ ID NO: 45176 - DNA, 75 bp, synthetic construct
  source 1..75: mol_type = other DNA
gatatatgacggcggcagggactgtcggaatcgctcaaataactgttacgggcaggtatcgcggcgtgaccagga

SEQ ID NO: 45177 - DNA, 75 bp, synthetic construct
  source 1..75: mol_type = other DNA
gaaagttgtgaaaagatagcggagggcgaactacctgtaacatgccctacctgcttcgcagtctggcaagacgta

SEQ ID NO: 45178 - DNA, 75 bp, synthetic construct
  source 1..75: mol_type = other DNA
atggagaaaccggaaaccgcaatgaaagctatcacacgcaatctcgatcgtgaaatctggcgtgacctgatgcaa

SEQ ID NO: 45179 - DNA, 75 bp, synthetic construct
  source 1..75: mol_type = other DNA
agcgagcagaccgacagcaccggcaacgtgctggccgtcaatgccaccgcgtctctccgggagtacatcggcgac

SEQ ID NO: 45180 - DNA, 75 bp, synthetic construct
  source 1..75: mol_type = other DNA
atgaacaaaagggctttgatggattatcgctccatgcgactacgtgatggcatcagtgctgcaacgataaaccgc

SEQ ID NO: 45181 - DNA, 75 bp, synthetic construct
  source 1..75: mol_type = other DNA
aaactgctggcggagtcattgatcgggacaccattaagtggtggctgaaacagtcacgcgaagcgcaatccgcca

SEQ ID NO: 45182 - DNA, 75 bp, synthetic construct
  source 1..75: mol_type = other DNA
cggcttcgaggtcacgttcggcgtcgattatgcggagcatccccgtatcgagggtaagcccggcctgcagttcgt

SEQ ID NO: 45183 - DNA, 75 bp, synthetic construct
  source 1..75: mol_type = other DNA
cgatagccatgcagtgcgccgccagcattcatccgtccacggcattcgacgtggcacgggtggaatccggtttta

SEQ ID NO: 45184 - DNA, 75 bp, synthetic construct
  source 1..75: mol_type = other DNA
gatctggagctggacgacgccgatggaaaaatagcgctgccgcgccgtggtgctgtcattacgctggcgctgggc

SEQ ID NO: 45185 - DNA, 75 bp, synthetic construct
  source 1..75: mol_type = other DNA
cccgatgccggtgccttacggtgaaatgctggttggctcccggcgaatctcccaggacatcagtacccgtgatga

SEQ ID NO: 45186 - DNA, 75 bp, synthetic construct
  source 1..75: mol_type = other DNA
acaacgaagtcgcccgtaaaaacgcaaaatcaaccctgtcatcgggtatcggcctgtatatgacgggggcagatg

SEQ ID NO: 45187 - DNA, 75 bp, synthetic construct
  source 1..75: mol_type = other DNA
attttcgtgaaacactgaatacccgccgcgaaaaatcgtggcacaagaccactgtcggggaagtggtgaaggaaa

SEQ ID NO: 45188 - DNA, 75 bp, synthetic construct
  source 1..75: mol_type = other DNA
cgacgctcggctgtttctggatgatcctggcctggatttttattccgctggagcacccgcgctggcagcgtattc

SEQ ID NO: 45189 - DNA, 75 bp, synthetic construct
  source 1..75: mol_type = other DNA
ttgttgacccatggttggagcgaattaccaaccggaagtctattttttccatgagcaaggaggatctggagacca

SEQ ID NO: 45190 - DNA, 75 bp, synthetic construct
  source 1..75: mol_type = other DNA
gaaagctcgcaactacctgcaaattctgccacaacagataaacggcaatgtgttcagttacacctcatccggttt

SEQ ID NO: 45191 - DNA, 75 bp, synthetic construct
  source 1..75: mol_type = other DNA
ggacaaatgaacttggccagttctttactatcagaacgtcgaactcatcttccgttccgatgttgttacaacagc

SEQ ID NO: 45192 - DNA, 75 bp, synthetic construct
  source 1..75: mol_type = other DNA
ggatttgttacgagcagcgtgattacgccatcaaggtattgcgaggctataacagcgacgtggagggcgctgtaa

SEQ ID NO: 45193 - DNA, 75 bp, synthetic construct
  source 1..75: mol_type = other DNA
tctcactgggtgccagcatgatactgggtggtgtggctcagatgctggccccgaaggcaaagacgccggagtaca

SEQ ID NO: 45194 - DNA, 75 bp, synthetic construct
  source 1..75: mol_type = other DNA
aatgaaatccaggtcgggaacgcactgaaacaaagcggtatcgcccgtaacgaactctttgtcaccacgaaactc

SEQ ID NO: 45195 - DNA, 75 bp, synthetic construct
  source 1..75: mol_type = other DNA
tacagaattaccggagacgatggaatgccagcatgggcagatgttccaccgccaacacgtgaagaacaaattgca

SEQ ID NO: 45196 - DNA, 75 bp, synthetic construct
  source 1..75: mol_type = other DNA
gtgagtgatagtgcagtaagaaagaaaagtgaggtacggcaaaagacagttgtcagaacactcagattctctcct

SEQ ID NO: 45197 - DNA, 75 bp, synthetic construct
  source 1..75: mol_type = other DNA
ccggggctttgaagcggaccagcttgatctggagttggatgacgctgacggaaaaatcgtgctgccgcgccgtgg

SEQ ID NO: 45198 - DNA, 75 bp, synthetic construct
  source 1..75: mol_type = other DNA
catgtctgatggggttcataacgtttgggaaaaacgccccagatttacatcaaatacgatgagtaatagtcagaa

SEQ ID NO: 45199 - DNA, 75 bp, synthetic construct
  source 1..75: mol_type = other DNA
acctctacgaaatgcaatttgatgacggtcgcacttgtacctttcacactgatgcgcaaaaggctgtgcaatggc

SEQ ID NO: 45200 - DNA, 75 bp, synthetic construct
  source 1..75: mol_type = other DNA
tgtacttgtttagcgagcgatttatgacctatggcaaggcttatggcttatgcgaatggttcgaggtagagcagt

SEQ ID NO: 45201 - DNA, 75 bp, synthetic construct
  source 1..75: mol_type = other DNA
tcgtaacttctttacgcttcaggatcggctggatttaacccatgagtatctgcacctggcctttgatggttatcc

SEQ ID NO: 45202 - DNA, 75 bp, synthetic construct
  source 1..75: mol_type = other DNA
attcagtggcggtattgcggccggttatgatttttatccgcagttcagtattccggttcgtacagaactggagtt

SEQ ID NO: 45203 - DNA, 75 bp, synthetic construct
  source 1..75: mol_type = other DNA
gtccgatgcttgagcagatggtgaaggaggcggtaagccatatccctgttccgcgtgacggtcgtgactatgatc

SEQ ID NO: 45204 - DNA, 75 bp, synthetic construct
  source 1..75: mol_type = other DNA
ggcttccctgtccgctctgttacagaagcatgtgacggtggatgaggttagccctgttctgcaggcgatggtgga

SEQ ID NO: 45205 - DNA, 75 bp, synthetic construct
  source 1..75: mol_type = other DNA
gcaggcccgtttacaggctaatcctgcgatggtgagtgcagttgataccgtgactggcctcggtgcttcattcgg

SEQ ID NO: 45206 - DNA, 75 bp, synthetic construct
  source 1..75: mol_type = other DNA
tctggcgggcgtatgaaaaaacgcacgggatgcggggatgggaatgcctggttgacggggtggcggatattgacg

SEQ ID NO: 45207 - DNA, 75 bp, synthetic construct
  source 1..75: mol_type = other DNA
agtgaacttggcgaactggcaagcggtgcagtttccgacgaccgcctcacgccagccagaaaacaaaacatgatt

SEQ ID NO: 45208 - DNA, 75 bp, synthetic construct
  source 1..75: mol_type = other DNA
gctgccgctgtagtgtgattgccctgagtgcggcggatgtacgtgcccgtggcctgaaggttatcagctccggct

SEQ ID NO: 45209 - DNA, 75 bp, synthetic construct
  source 1..75: mol_type = other DNA
ctggcatggtggttaccgtgcctttttgtggcgaccgccgaaacataaccggacggtgagggttgtgtgccgtga

SEQ ID NO: 45210 - DNA, 75 bp, synthetic construct
  source 1..75: mol_type = other DNA
tatttgcctgttcattctgcgtttctgctgaaactgttaatttaaataattcatctgttcgctcatttgttcagt

SEQ ID NO: 45211 - DNA, 75 bp, synthetic construct
  source 1..75: mol_type = other DNA
cggttatctctcgtataacgtgcagaaaaaaccactcgatgacgtgaaagttcgccaggctctgacctacgcggt

SEQ ID NO: 45212 - DNA, 75 bp, synthetic construct
  source 1..75: mol_type = other DNA
ctacctgcaaattctgccacaacagataaacggcaatgtgttcagttacacctcgtccggtttcaaaagcgcctg

SEQ ID NO: 45213 - DNA, 75 bp, synthetic construct
  source 1..75: mol_type = other DNA
ctggtcagtaaactcgatgcaaggcgtaaacagaccagcaaaatttccccttattttgttccctaccctgcaact

SEQ ID NO: 45214 - DNA, 75 bp, synthetic construct
  source 1..75: mol_type = other DNA
tggccaatcatgccgccatttactgcggcaacggtgaactgcttcaccatctgcctgaacaactgagtaaacggg

SEQ ID NO: 45215 - DNA, 75 bp, synthetic construct
  source 1..75: mol_type = other DNA
gatgcactgacggagtcggtcaacgcctatggtcgcaaactgattggcgacggtgcgctgctgggcttcagctgc

SEQ ID NO: 45216 - DNA, 75 bp, synthetic construct
  source 1..75: mol_type = other DNA
tcaaattaacccacgaacagggcgtcaaatcaccggaaatactgtccgccttgaactggcgctcttgtcgtcatt

SEQ ID NO: 45217 - DNA, 75 bp, synthetic construct
  source 1..75: mol_type = other DNA
cgagcgcgccctgatccgcgagcggcagcgtgagggcatcgccttggccaagcagcgtggcgcgtaccggggccg

SEQ ID NO: 45218 - DNA, 75 bp, synthetic construct
  source 1..75: mol_type = other DNA
tgagctatgagtacgcggacccgtcgaaggtgactgcggcggacatcatcggcggggtgaacagcgccggaaacc

SEQ ID NO: 45219 - DNA, 75 bp, synthetic construct
  source 1..75: mol_type = other DNA
atcattgatgtgttcgccggatacatcgtggggtggcgggtctcatcgtctatggaagcgacattcttgctggat

SEQ ID NO: 45220 - DNA, 75 bp, synthetic construct
  source 1..75: mol_type = other DNA
gcgttatgacattatttttatttgttaaatgtaaagcagcgtgtgtaacttccttatatgaggttcagcaatcgc

SEQ ID NO: 45221 - DNA, 75 bp, synthetic construct
  source 1..75: mol_type = other DNA
actcaaagcacagtccgcagtagcaggttgctcaatgattcaagtgttaagtaccaaggttcatcaactggcgga

SEQ ID NO: 45222 - DNA, 75 bp, synthetic construct
  source 1..75: mol_type = other DNA
gtggctggtctgccggggcgaaattcatcatttccgctgcgttccgcacctcaccggacggcgttttgaacacgg

SEQ ID NO: 45223 - DNA, 75 bp, synthetic construct
  source 1..75: mol_type = other DNA
gagtaacggacaccgtcagtgacgccattgaagatactccgcaatatcgactcaaactcgtgaacggccctgacg

SEQ ID NO: 45224 - DNA, 75 bp, synthetic construct
  source 1..75: mol_type = other DNA
acgccatcgcggcgggcgccatcctggtgacgaataatacaagagagtttgagcgggtgccgggtctggttctgg

SEQ ID NO: 45225 - DNA, 75 bp, synthetic construct
  source 1..75: mol_type = other DNA
gtctgtttgccgctttcacgactggaaaataacgaggcgtcgcatccgctgttggcgacctgtgtcagtgaaatc

SEQ ID NO: 45226 - DNA, 75 bp, synthetic construct
  source 1..75: mol_type = other DNA
ctttgaatctgacggtaaaaaaatagagcttccagggaagtcatcttataatttagaagaaatgctatctgcgat

SEQ ID NO: 45227 - DNA, 75 bp, synthetic construct
  source 1..75: mol_type = other DNA
tgccagaggcatattccagactggcagcaatcaaagacaaatacccagccatgagccacacagcacttgttggtg

SEQ ID NO: 45228 - DNA, 75 bp, synthetic construct
  source 1..75: mol_type = other DNA
tactgtgtggcctccttcttgcgtgttcagcgagcgtgagtgccgacgtgaacagtgacatgaacaccttcttta

SEQ ID NO: 45229 - DNA, 75 bp, synthetic construct
  source 1..75: mol_type = other DNA
tgtcaggtggcacaggggcttgtgggggggctgttccctcagacgcaggaatctcagcagaaagtttgtcaggac

SEQ ID NO: 45230 - DNA, 75 bp, synthetic construct
  source 1..75: mol_type = other DNA
ggggtaagaactttgctggtgtagtccagtatgcattgaagcccggagtacaccataaaagcgatccagttgtca

SEQ ID NO: 45231 - DNA, 75 bp, synthetic construct
  source 1..75: mol_type = other DNA
ggtgtttttcaggtggtgctgggggctgcagccatcgtgggctctttcttcaccgccggtgcaacgatggcgttg

SEQ ID NO: 45232 - DNA, 75 bp, synthetic construct
  source 1..75: mol_type = other DNA
tgcaatggcttccatcagtctgattcagctgaaattacagaccggacggaaactgactcaggcagaaacaacccg

SEQ ID NO: 45233 - DNA, 75 bp, synthetic construct
  source 1..75: mol_type = other DNA
tctggcgttctgtaccgatgaggaagcgctgaccatcaacgctgtactcagcgatgtccttgtgcagtcaggaca

SEQ ID NO: 45234 - DNA, 75 bp, synthetic construct
  source 1..75: mol_type = other DNA
gattatattgacgcggtgacggcaacagataccagcacagcgccagacgtcatctggcctgaactgccggaggcg

SEQ ID NO: 45235 - DNA, 75 bp, synthetic construct
  source 1..75: mol_type = other DNA
gccttacggtgaaatgctggttggttcacgacggatatcccaggacatcagcacccgtgatgaaggcggagacgg

SEQ ID NO: 45236 - DNA, 75 bp, synthetic construct
  source 1..75: mol_type = other DNA
ccgatcgctctatagcgtgattgttgaccggtatcgtcttcgtaagagcaagttgcagatggccaatgaactgca

SEQ ID NO: 45237 - DNA, 75 bp, synthetic construct
  source 1..75: mol_type = other DNA
tgaaaatggccgaaaggttaaatgcagatcatcctgattggtcgttggttacgtgcagacgccgaattgatcaat

SEQ ID NO: 45238 - DNA, 75 bp, synthetic construct
  source 1..75: mol_type = other DNA
ttctttgtgccgccttactgacggccatacccacagcgtcagcggatgtgaacagcgacatgaatcagttcttta

SEQ ID NO: 45239 - DNA, 75 bp, synthetic construct
  source 1..75: mol_type = other DNA
aactaataaaagcgggcgcaacgggtgataccgctactttccgtcgtgtttcggaagccattattgatgaggaac

SEQ ID NO: 45240 - DNA, 75 bp, synthetic construct
  source 1..75: mol_type = other DNA
agaacacacgatagaggaaatccgcgcaaaatatggttcgaccggacagcgcagggcgacgggatggcaacaagt

SEQ ID NO: 45241 - DNA, 75 bp, synthetic construct
  source 1..75: mol_type = other DNA
ggccagttctccactacacagaaactggccagtatctttgtttgcaataaatgtattacccgcaatacaggctaa

SEQ ID NO: 45242 - DNA, 75 bp, synthetic construct
  source 1..75: mol_type = other DNA
gtcggggcaggtgttggtgagctggtcttactcagcagcggctccagcgccagacaggtattttctggtcctaat

SEQ ID NO: 45243 - DNA, 75 bp, synthetic construct
  source 1..75: mol_type = other DNA
acgattcggacaagtgtctgaaggtggtggcggatgcaaatgtgaccatcgcccgggataaagccctgaaatcac

SEQ ID NO: 45244 - DNA, 75 bp, synthetic construct
  source 1..75: mol_type = other DNA
actaagaagcagaagaaagagccagaagcgaagcagggcgattatctggtgggtacggatgaaaacgtgctggta

SEQ ID NO: 45245 - DNA, 75 bp, synthetic construct
  source 1..75: mol_type = other DNA
ggcgatcgtcttgttcaggcttcgcgctcgcctgcgcttcctcaagcaccgatagataaagaaaggggcctgccg

SEQ ID NO: 45246 - DNA, 75 bp, synthetic construct
  source 1..75: mol_type = other DNA
tgccggggcagcagcatgatgaggaatcagggctgtactataaccggaaccggtactatgacccgctacagggga

SEQ ID NO: 45247 - DNA, 75 bp, synthetic construct
  source 1..75: mol_type = other DNA
tggatacactgaacgaactggcggcggcgctggggaatgacccgaactttgccacgacaatgcttaatgcactgg

SEQ ID NO: 45248 - DNA, 75 bp, synthetic construct
  source 1..75: mol_type = other DNA
ccaactgggtgccaccggaacaggttgagcgtattgaagtgatccgcggccctgcggcggcgcgctacggttcgg

SEQ ID NO: 45249 - DNA, 75 bp, synthetic construct
  source 1..75: mol_type = other DNA
gccggaggattatttccggatggctccggaggactggctgcaggcagagatgcagggtgagattgtggcgctggt

SEQ ID NO: 45250 - DNA, 75 bp, synthetic construct
  source 1..75: mol_type = other DNA
gtggaggcctccggtgccagcctggagaaagggcggcatgaccagatgcttaccgcacttcgtgcgctgctgtta

SEQ ID NO: 45251 - DNA, 75 bp, synthetic construct
  source 1..75: mol_type = other DNA
tgtttatgctgcgcaccgtgccgtatcaggagctgcagtatcagcgcagctggcgacatgcggctaacagccggg

SEQ ID NO: 45252 - DNA, 75 bp, synthetic construct
  source 1..75: mol_type = other DNA
cattctgtttatcgacgaagcgcataccctgattggcgcgggcaaccagcagggcgggctggatatctccaacct

SEQ ID NO: 45253 - DNA, 75 bp, synthetic construct
  source 1..75: mol_type = other DNA
tggttaaacatcttaatccgttttcccgccaggcgctggaagcggcggcagcggagtgcatgagtcagcaggcat

SEQ ID NO: 45254 - DNA, 75 bp, synthetic construct
  source 1..75: mol_type = other DNA
ggtgacgcctgttgttatggggaacggccagcttgtacttactattgatacccgcgctgattccatcagcaacga

SEQ ID NO: 45255 - DNA, 75 bp, synthetic construct
  source 1..75: mol_type = other DNA
ggctccgtaacagtatttaatgctgatgttaatcccacaaatattgatgactttttcaaatctgttctgaatgct

SEQ ID NO: 45256 - DNA, 75 bp, synthetic construct
  source 1..75: mol_type = other DNA
ttcgattttttaatggcgaatcttgataagattaatcagtaccaaagtcctgaacaaagtgcaatatataactat

SEQ ID NO: 45257 - DNA, 75 bp, synthetic construct
  source 1..75: mol_type = other DNA
aggttgatggttcggcagcagataaattctaggagcagagtacttaaaaccacgctgggaaaactgtccacttgg

SEQ ID NO: 45258 - DNA, 75 bp, synthetic construct
  source 1..75: mol_type = other DNA
aaaaagctcagattatagcaaagacaatgcgtaaaggattttattttataaaccccaattttgtatttaatggag

SEQ ID NO: 45259 - DNA, 75 bp, synthetic construct
  source 1..75: mol_type = other DNA
ggcgcaggtggaaaaactcggaatcaaagccgccgaggagatcgggcagctcgtcactgtcgcacgtgaagaact

SEQ ID NO: 45260 - DNA, 75 bp, synthetic construct
  source 1..75: mol_type = other DNA
tgatgtggagagtaaaaaagcagcactgaaagcgcaagagcttgccagatatcctcgggtggatttgacgggatc

SEQ ID NO: 45261 - DNA, 75 bp, synthetic construct
  source 1..75: mol_type = other DNA
tcggggcgagtgtgggcggacgatagtgcaccagaaaaaagagaaatagccgtctggcgacaatgtcttttttag

SEQ ID NO: 45262 - DNA, 75 bp, synthetic construct
  source 1..75: mol_type = other DNA
ggcgaaggaattattcacagaaagcatggttcaggaacatacattcaaaaaaagaattttgttgcacacattgat

SEQ ID NO: 45263 - DNA, 75 bp, synthetic construct
  source 1..75: mol_type = other DNA
ttaaccgtaatgccagttacggtgtcagtgaaaaagctgcgcagatagccgcagctacgggccgactggactctg

SEQ ID NO: 45264 - DNA, 75 bp, synthetic construct
  source 1..75: mol_type = other DNA
gtctgttctccgtgagaattggcgaatgtggcgtgagtttctggtgtacaaatccaccaccggaaaaaccgttcc

SEQ ID NO: 45265 - DNA, 75 bp, synthetic construct
  source 1..75: mol_type = other DNA
gtgttaatcggcaataacctggtcaatattcttgcctccgcgctcggcactattgttgggatgcgtttgtacggc

SEQ ID NO: 45266 - DNA, 75 bp, synthetic construct
  source 1..75: mol_type = other DNA
ggatgcggatatcagatatgtggatattgaggtccgtgggcgcatcactgaaatcgatatgggggaggcgaagca

SEQ ID NO: 45267 - DNA, 75 bp, synthetic construct
  source 1..75: mol_type = other DNA
atgttcaggcagttgaaaaaaaacctggttgcaaccctcattgctgctatgaccattggtcaggtagccccggcg

SEQ ID NO: 45268 - DNA, 75 bp, synthetic construct
  source 1..75: mol_type = other DNA
acgccgccactttgcagaaaatacgcgccgccgactgctcctggacagcatcaggccaattaaacaggtagcaac

SEQ ID NO: 45269 - DNA, 75 bp, synthetic construct
  source 1..75: mol_type = other DNA
atatgcgtgaacaggtggctgaactggccaacaccatgtgcgacctgcgcacaaccatgaatgagatggagcagc

SEQ ID NO: 45270 - DNA, 75 bp, synthetic construct
  source 1..75: mol_type = other DNA
atgaaacagtgcgtcgctatgggcatgagagtggcgagatttggcaccggatgcagaaaaatctgccgggtgatt

SEQ ID NO: 45271 - DNA, 75 bp, synthetic construct
  source 1..75: mol_type = other DNA
tgaaggaagactacatcgcgttcatgccgaaaccgaatgtaagaacggcattgcgtaaccttgccgtggcgattg

SEQ ID NO: 45272 - DNA, 75 bp, synthetic construct
  source 1..75: mol_type = other DNA
ggcgcaggtggaaaaaatcggagtcaaagctgccgaggagatcgggcagctcgtcaccgtcgcacgtgaagaact

SEQ ID NO: 45273 - DNA, 75 bp, synthetic construct
  source 1..75: mol_type = other DNA
attcgcgggcaatatccgtcgtctgatgacagaacagcatcaagggctgggggcggcgatcatcagcaatatgga

SEQ ID NO: 45274 - DNA, 75 bp, synthetic construct
  source 1..75: mol_type = other DNA
tgattaacgtggtctgtgataatggccactcccttcgtgttgttgatgcatctgacctggcctcaacagaccgca

SEQ ID NO: 45275 - DNA, 75 bp, synthetic construct
  source 1..75: mol_type = other DNA
gccccggcggctcatatttgggaccaggcgcagcgcaccatcaacgatctgaaccaggcgaccaacacactcgcc

SEQ ID NO: 45276 - DNA, 75 bp, synthetic construct
  source 1..75: mol_type = other DNA
ctaccgcccattgcacaggcattaaaagatcatttagctgcctatgaactatcgaaagcgtctgagactgtaagc

SEQ ID NO: 45277 - DNA, 75 bp, synthetic construct
  source 1..75: mol_type = other DNA
ctgacaggaggaaccgtcagcgcgctgagctcctataataacggacagatgatttcggctcagaccgctaatatt

SEQ ID NO: 45278 - DNA, 75 bp, synthetic construct
  source 1..75: mol_type = other DNA
acggactcgcttttctggctggtgaagcaatattgcggcgctacgctcaatgaaacatttaaatactatacgaca

SEQ ID NO: 45279 - DNA, 75 bp, synthetic construct
  source 1..75: mol_type = other DNA
ccggtacgctgatattccagggccatccggttattcatgccgggacgacgacctctgccagccagagcgactggg

SEQ ID NO: 45280 - DNA, 75 bp, synthetic construct
  source 1..75: mol_type = other DNA
ttataccagtccacccacgttagtgtggccagttccacttctgcacggtttttccagctcttacggtgtattacc

SEQ ID NO: 45281 - DNA, 75 bp, synthetic construct
  source 1..75: mol_type = other DNA
ctattttgcacaaagtgctgatcctgatgtgctggatgtgaaggcttacgggccggaaacgcattcgcaggaagg

SEQ ID NO: 45282 - DNA, 75 bp, synthetic construct
  source 1..75: mol_type = other DNA
ccagttaacgctggcgtgggctgccgcgctgattttaccgctgaccacaccgtcgatgatggcagacttcagcgc

SEQ ID NO: 45283 - DNA, 75 bp, synthetic construct
  source 1..75: mol_type = other DNA
gcatggccggctctggcggcaacggtcagtgcagagatcccttatcagatattccgcgactttgccgagaataaa

SEQ ID NO: 45284 - DNA, 75 bp, synthetic construct
  source 1..75: mol_type = other DNA
ttggcaacgtctcaggcaatcattgatctgtccgcgataccggtaccggatgcggtggaagtgccggataccgca

SEQ ID NO: 45285 - DNA, 75 bp, synthetic construct
  source 1..75: mol_type = other DNA
gttaactgggggctaaatccatggttatctgttggtgcagctggctggagcacactcaatagtcgggggggaaat

SEQ ID NO: 45286 - DNA, 75 bp, synthetic construct
  source 1..75: mol_type = other DNA
acaaacgcaagtgatctcatcgcgatgctggataagcgtcgtttagtagcggtcaaatcgcccgtgacaactgac

SEQ ID NO: 45287 - DNA, 75 bp, synthetic construct
  source 1..75: mol_type = other DNA
ccggtggcctgatcatgatgatttcaacaatatgctcatgaacggcgatcaggttcgggaactggttttttacag

SEQ ID NO: 45288 - DNA, 75 bp, synthetic construct
  source 1..75: mol_type = other DNA
agcggtaagacgctcgcaaaaaagtgggtcgaacttttcaacgcaactcgcgaacgcttccagaatgaaatttcc

SEQ ID NO: 45289 - DNA, 75 bp, synthetic construct
  source 1..75: mol_type = other DNA
gacagtatacacacaagaaaacggaaaaacactattgacgtggctgacacccgttactaatatagtggctgacac

SEQ ID NO: 45290 - DNA, 75 bp, synthetic construct
  source 1..75: mol_type = other DNA
gaccgaagcactggacagagcaaagcgacagaccggacagcagggaaatcagccaccagcgggaggtgatgaccc

SEQ ID NO: 45291 - DNA, 75 bp, synthetic construct
  source 1..75: mol_type = other DNA
cggtgcgattggctgcacgatcgttacggactcgcttttctggctggtgaagcaatattgcggcgctacgctcaa

SEQ ID NO: 45292 - DNA, 75 bp, synthetic construct
  source 1..75: mol_type = other DNA
gctgtgcggaaatctgcatccatttccacttgctgtgtggcatgacttctccggctctctggatacggcagaaga

SEQ ID NO: 45293 - DNA, 75 bp, synthetic construct
  source 1..75: mol_type = other DNA
ccatgccgtcgctgaccgagcaggaagccgccgcactggagctgcccgacctgctgtcgtttgccggtaaggtgg

SEQ ID NO: 45294 - DNA, 75 bp, synthetic construct
  source 1..75: mol_type = other DNA
cggtcaacgcagcaatgctgatttacgtcatttcacgcgcatcctgggtattgaagggctgttccctcgctggga

SEQ ID NO: 45295 - DNA, 75 bp, synthetic construct
  source 1..75: mol_type = other DNA
gccgcattacgtcatgagtgcaactgcagagatagggcgtgtcgcggcaggtgcggtttctggcgatgtaaaaac

SEQ ID NO: 45296 - DNA, 75 bp, synthetic construct
  source 1..75: mol_type = other DNA
cctggcggaaaagctggacgctatcacctatatcgatgcgccagttggcacgaccttcagccaggtgctggcagg

SEQ ID NO: 45297 - DNA, 75 bp, synthetic construct
  source 1..75: mol_type = other DNA
aggaaaagtggttcggcgtcatcaccgtctcaatgctattgccagtatcgagaagatgataaatgaccttccttc

SEQ ID NO: 45298 - DNA, 75 bp, synthetic construct
  source 1..75: mol_type = other DNA
atttttctcagttagcaaaggaagttgctgcccacgcggacgccactcgcgatattaatcaaacccccaccgcgc

SEQ ID NO: 45299 - DNA, 75 bp, synthetic construct
  source 1..75: mol_type = other DNA
gcagaatcaaaactctgaacacccggcgggtgaatattctgaagggtgaacagcgtcgtgtcagtggcagtgccc

SEQ ID NO: 45300 - DNA, 75 bp, synthetic construct
  source 1..75: mol_type = other DNA
atgaacaaagaaaatgtgattaccctggaaaatccggtcaaacgtggtgagcaggttatcaaacaggtcacgctg

SEQ ID NO: 45301 - DNA, 75 bp, synthetic construct
  source 1..75: mol_type = other DNA
agccgcgttttttcacgttaatgtcctgcgtgatgaatatttctttggtggcattctggatctcaagatgactgc

SEQ ID NO: 45302 - DNA, 75 bp, synthetic construct
  source 1..75: mol_type = other DNA
gtcgatggtgatgaccccgcagtattcagaccaatacaaaaatacatcaatggcacatggtataacgtcgcacag

SEQ ID NO: 45303 - DNA, 75 bp, synthetic construct
  source 1..75: mol_type = other DNA
ctggtggcgcaacggtcagaacctttacctggacaatatggcggtcaccggcttttaccgggtgcccctgtcctc

SEQ ID NO: 45304 - DNA, 75 bp, synthetic construct
  source 1..75: mol_type = other DNA
caacaagaagggcgagagtcaatatttgatttttacaaaattagtattgctcatattactcgcgaatattcattt

SEQ ID NO: 45305 - DNA, 75 bp, synthetic construct
  source 1..75: mol_type = other DNA
acgaacgcattctgtctggcgtcaccgccactggtccgtatctgccttcacggggatttacaacgatttggtcgc

SEQ ID NO: 45306 - DNA, 75 bp, synthetic construct
  source 1..75: mol_type = other DNA
acgcccggcgatgtgcaccagcggagtcgtgcggcttcgtggtgagaacgccggaaggggaaagatattttccct

SEQ ID NO: 45307 - DNA, 75 bp, synthetic construct
  source 1..75: mol_type = other DNA
gctggcgcggatatgatcgagtgtaacttctcctgtccgcaaatgacttctcatgcgatgggtagcgatgtcggg

SEQ ID NO: 45308 - DNA, 75 bp, synthetic construct
  source 1..75: mol_type = other DNA
gctcaaaaggcgatttactggagctgtactgcggcaacggtaacttctcattagccctggcgcgcaattttgatc

SEQ ID NO: 45309 - DNA, 75 bp, synthetic construct
  source 1..75: mol_type = other DNA
gatggtccgttgccggaaaagcgccccgtaattttagaggcgcaggatgtgttgataacctacagaggaaaacta

SEQ ID NO: 45310 - DNA, 75 bp, synthetic construct
  source 1..75: mol_type = other DNA
tgaccgccgataaaccgggggatgcgcatgcatctggctggacgctggctgccaaacggggacgggatgcaggag

SEQ ID NO: 45311 - DNA, 75 bp, synthetic construct
  source 1..75: mol_type = other DNA
ccaccccggaaaagaacttcatggtatctgtactctgcgcactgtgcgtggataccggcaccggtcagccctgta

SEQ ID NO: 45312 - DNA, 75 bp, synthetic construct
  source 1..75: mol_type = other DNA
ggcagtatgacgaacgtggctggctgacagacatcagccatatcagcgaagggcaccgggtggcggtgcattaca

SEQ ID NO: 45313 - DNA, 75 bp, synthetic construct
  source 1..75: mol_type = other DNA
ctggcgattgaccattttcgctatttcgcctcgtgtattcgggcgcaggaaggtgggatcagtgaagttgatagc

SEQ ID NO: 45314 - DNA, 75 bp, synthetic construct
  source 1..75: mol_type = other DNA
tcagttagatattctggtcaataacgcgggcgtgtgtaacattaatcgtcctatcgatttcaatcgaaacgactg

SEQ ID NO: 45315 - DNA, 75 bp, synthetic construct
  source 1..75: mol_type = other DNA
gtttctcactggattaatgacggcctaatggctgttttcttcttactcattggccttgaagttaagcgagagctg

SEQ ID NO: 45316 - DNA, 75 bp, synthetic construct
  source 1..75: mol_type = other DNA
tcttctggtcgccctgccgccgatacaacgtctggaaccgaaagcaacaacgcaggtacggatagtaaagcaagc

SEQ ID NO: 45317 - DNA, 75 bp, synthetic construct
  source 1..75: mol_type = other DNA
tgatgcgctacgcttatcaggccttgtattatccctccagtgcagagaaaatcggccagttttctctgcctgcag

SEQ ID NO: 45318 - DNA, 75 bp, synthetic construct
  source 1..75: mol_type = other DNA
gaaattctgcaactgcgtaaggcgttaaatgaagctcgccttgagcgagatatattaaaaaaagcaactgtagat

SEQ ID NO: 45319 - DNA, 75 bp, synthetic construct
  source 1..75: mol_type = other DNA
atggccgtgcttcgtacgttaccgggcagaatcaaaactctgaatacccggcgggtgaatgtcctgaagggtgaa

SEQ ID NO: 45320 - DNA, 75 bp, synthetic construct
  source 1..75: mol_type = other DNA
aatgccgggtatatcatggcggctcagcgggcacattatcaggcaatgccccagcttcccgaagtgtcctcgatg

SEQ ID NO: 45321 - DNA, 75 bp, synthetic construct
  source 1..75: mol_type = other DNA
gactttatcgcgcctcaacggaagaactggtggattcagcactgcaggactcgggactgtatgaaaaacatgatg

SEQ ID NO: 45322 - DNA, 75 bp, synthetic construct
  source 1..75: mol_type = other DNA
agcgggcacactaccaggccatgcccctgctggctgaaatgtccgccctgctgggacagccgtccatccgggatg

SEQ ID NO: 45323 - DNA, 75 bp, synthetic construct
  source 1..75: mol_type = other DNA
ggtcgttctccggctgaaaacagcacggaaaatgagcctcaacccgtagagcaaccagagccggttcaacccgga

SEQ ID NO: 45324 - DNA, 75 bp, synthetic construct
  source 1..75: mol_type = other DNA
agcacctcagcaaagctgtttactgcaaaggtggcagtgatggcggttcaaaagcccaggcacgcgcaactgaaa

SEQ ID NO: 45325 - DNA, 75 bp, synthetic construct
  source 1..75: mol_type = other DNA
gccctgactttccagaaccatacggactgcccgttgacggacttcaggggaaaaacgagtatttttagtcatcct

SEQ ID NO: 45326 - DNA, 75 bp, synthetic construct
  source 1..75: mol_type = other DNA
gctgtcgccggcgtcccacgttatggcctggatggtcaccccaaagggcaggtctcagactctgaagcacagagt

SEQ ID NO: 45327 - DNA, 75 bp, synthetic construct
  source 1..75: mol_type = other DNA
tcgcggggatgactggtggcgtcacggccagaatctctatctggataatatggaggcaacggggttgtatcaggt

SEQ ID NO: 45328 - DNA, 75 bp, synthetic construct
  source 1..75: mol_type = other DNA
atgaatagaattgaacattaccatgactggcttcgtgatgcacatgcgatggaaaaacaagctgaaaaaatgctt

SEQ ID NO: 45329 - DNA, 75 bp, synthetic construct
  source 1..75: mol_type = other DNA
aaattattcacctctatggaagtcagcccgaagtttgctgatacgggcaaagcctacctggtcggcctggctgcc

SEQ ID NO: 45330 - DNA, 75 bp, synthetic construct
  source 1..75: mol_type = other DNA
cgaactggaagaagtccaggacgaaaaaccatccctgtttgcccgtgtcacggcgctgttcaccaaaaaagagca

SEQ ID NO: 45331 - DNA, 75 bp, synthetic construct
  source 1..75: mol_type = other DNA
gcgaagatttaccatgcgggcccgtccattattgattttctgccctgggtggaatacctggatgaagagcagtgc

SEQ ID NO: 45332 - DNA, 75 bp, synthetic construct
  source 1..75: mol_type = other DNA
agaaactatcataaacactgacctagaatatgcagccaagtcaatttccatggccagacttgaagatctctggaa

SEQ ID NO: 45333 - DNA, 75 bp, synthetic construct
  source 1..75: mol_type = other DNA
tgcgcctgagcagcttcagagccgcttttggggcctgttgcctgctgatgcgggtgaggctgaatcggtggtcag

SEQ ID NO: 45334 - DNA, 75 bp, synthetic construct
  source 1..75: mol_type = other DNA
tgtcatggtaagggagaagtcagcacagcgtgcagagggtgtaagggtaaaggtattgtcctggatgaaaaaagg

SEQ ID NO: 45335 - DNA, 75 bp, synthetic construct
  source 1..75: mol_type = other DNA
gtggtttatataaaggtaaaaaacgcagcgccggtatgaatgaattacgtcatccgggaagcacacagatgacgc

SEQ ID NO: 45336 - DNA, 75 bp, synthetic construct
  source 1..75: mol_type = other DNA
caggaagaacgcctgtctgagatggagactgccctgcaggcacaacaagccgcctttaacgaactggtggataag

SEQ ID NO: 45337 - DNA, 75 bp, synthetic construct
  source 1..75: mol_type = other DNA
ggagtaaagaggttgcagagagttggttatcaaaaggctggtatgtccaacccttgcatctagcccagcctgcat

SEQ ID NO: 45338 - DNA, 75 bp, synthetic construct
  source 1..75: mol_type = other DNA
catcattgtgcagatgagcgatggtgataaccagtacagcaatgcgtattcactactgagttcgccgcatgacac

SEQ ID NO: 45339 - DNA, 75 bp, synthetic construct
  source 1..75: mol_type = other DNA
gtcagctatgacaccagcgcgacgctgaatcctgatgcaggtttctggaataacacccgatatggcgctgaattt

SEQ ID NO: 45340 - DNA, 75 bp, synthetic construct
  source 1..75: mol_type = other DNA
ttgacggactggcgcgtacctttcgcgccgccgtgcaccacagctcaccgattgcagtgaaatgcaacattctga

SEQ ID NO: 45341 - DNA, 75 bp, synthetic construct
  source 1..75: mol_type = other DNA
gtcggtctgaatcccattgcatatgcgcgcgaggccatttcactggcagcggcaaccgaggagcacggcgccagg

SEQ ID NO: 45342 - DNA, 75 bp, synthetic construct
  source 1..75: mol_type = other DNA
tatttaattgctgagattattgttattccgctctctgggtggctgtcacgggtattttccactcgttggcttttt

SEQ ID NO: 45343 - DNA, 75 bp, synthetic construct
  source 1..75: mol_type = other DNA
atgaaaaagtttttgcgtattaagacgtggtttgtgcgtcttttctctcctgacaagaagactctgggagctatc

SEQ ID NO: 45344 - DNA, 75 bp, synthetic construct
  source 1..75: mol_type = other DNA
tgttgttattatcgctccccgccgtggcaattgggattgcgtccagtcttattctgattgtggtgatgaaaatcg

SEQ ID NO: 45345 - DNA, 75 bp, synthetic construct
  source 1..75: mol_type = other DNA
gctggcgagccgggcggttcaaccaatggagttcagtcctcaaagtccgtggataaggtaagcgtcagttatgac

SEQ ID NO: 45346 - DNA, 75 bp, synthetic construct
  source 1..75: mol_type = other DNA
ctggggctgctgctggcgtttaccttgtttggtaaagggatgagtaaacgttctgcgcccggggcgatgattatt

SEQ ID NO: 45347 - DNA, 75 bp, synthetic construct
  source 1..75: mol_type = other DNA
ccagcgtaatgaagtgcgccgggtgaaagcggcagagatggccgaagccctggggatgttcacccagccgggtag

SEQ ID NO: 45348 - DNA, 75 bp, synthetic construct
  source 1..75: mol_type = other DNA
tgccgcatgtggtcggttctgtagaggtgtatgaacagcagacctcctggccgctgattctggaaaacagccagg

SEQ ID NO: 45349 - DNA, 75 bp, synthetic construct
  source 1..75: mol_type = other DNA
aaggaatacaactgcgataaacctgagtgcccccacgtcagatacgtcactaactcatgcggcagccgtgcctgc

SEQ ID NO: 45350 - DNA, 75 bp, synthetic construct
  source 1..75: mol_type = other DNA
tatcagccaaaacctgccgattaaatctgcgggatataccttagtgctggcgcaaagtagcggcacgacggtaaa

SEQ ID NO: 45351 - DNA, 75 bp, synthetic construct
  source 1..75: mol_type = other DNA
atagcctggcacccttctggccatcttatcagagcaaagtcatcggcgttcttgagcgtgcgctgcgtgagcagt

SEQ ID NO: 45352 - DNA, 75 bp, synthetic construct
  source 1..75: mol_type = other DNA
cggccggatggtataccgccgggccattgcggggctgaatgtggaggggctgaagaaaaacgcgcgggatatcag

SEQ ID NO: 45353 - DNA, 75 bp, synthetic construct
  source 1..75: mol_type = other DNA
atgacccgaagtggtggtgattttcagccccgaccgctgaaacgcctgttcacagccaaccagtgctggacatcc

SEQ ID NO: 45354 - DNA, 75 bp, synthetic construct
  source 1..75: mol_type = other DNA
ctcctggggtactcaggatggactgtccggacgctctgccggcgtctgtacagcctggtgcagggtaaacaggcg

SEQ ID NO: 45355 - DNA, 75 bp, synthetic construct
  source 1..75: mol_type = other DNA
atgctgagggcgcaaaatttgacgaattacgcgctaaagctgaatccctcgataaagacatttcccgccttgaag

SEQ ID NO: 45356 - DNA, 75 bp, synthetic construct
  source 1..75: mol_type = other DNA
gacacttcgcgacaacggtgacaaacgcgagctgcgtaacgccagcggcaaactggtcacggaaatcacctatct

SEQ ID NO: 45357 - DNA, 75 bp, synthetic construct
  source 1..75: mol_type = other DNA
ttgccgtcggtgcattgatgcgtgagctttacccccaaagtgcgctgctgcttagcagcgcactgcttggtgggg

SEQ ID NO: 45358 - DNA, 75 bp, synthetic construct
  source 1..75: mol_type = other DNA
gtgtggtaccgaagcttaacagtagctgggagccggtctatcaggtcacattcccggacggctccacggatgtac

SEQ ID NO: 45359 - DNA, 75 bp, synthetic construct
  source 1..75: mol_type = other DNA
gtgcataaggccgtggaactggtcgccactgagcagcaaaacctgagtgtgcgcaccgaaaaatccctttctgag

SEQ ID NO: 45360 - DNA, 75 bp, synthetic construct
  source 1..75: mol_type = other DNA
tccggtaagaaaatgggcaatgctgttttcgcgcaaacattgaaggttatcaataaacaagccgacggtgaaaaa

SEQ ID NO: 45361 - DNA, 75 bp, synthetic construct
  source 1..75: mol_type = other DNA
agtttcatattcaaccgctggacctgcggcagatgcaggaggcggtgaatcgtggaacggtacactttgtggtca

SEQ ID NO: 45362 - DNA, 75 bp, synthetic construct
  source 1..75: mol_type = other DNA
ccacatcctgcggcatacattcgcaagccatttcatgatgaatgggggcaatataatcgcactgcaacagattct

SEQ ID NO: 45363 - DNA, 75 bp, synthetic construct
  source 1..75: mol_type = other DNA
cgcaccagttccgccctctgcgctaccaggacttatcgtagcattaattctcggtcttgctggcggcgtcagcct

SEQ ID NO: 45364 - DNA, 75 bp, synthetic construct
  source 1..75: mol_type = other DNA
actgttgccagggtaagagaattagaccagatccgtaattttctgacaggacaggcattaacatctgttctggac

SEQ ID NO: 45365 - DNA, 75 bp, synthetic construct
  source 1..75: mol_type = other DNA
tcaaaaatcagcaggccccggacggtaaagcgggggcgagagtgacattgtattttaagccaaatcaggaaggag

SEQ ID NO: 45366 - DNA, 75 bp, synthetic construct
  source 1..75: mol_type = other DNA
tggccccgcagtgggtgacgcggacgaatcatgcggtgagcgacctgacgggccgtccgctgatgctctttaaca

SEQ ID NO: 45367 - DNA, 75 bp, synthetic construct
  source 1..75: mol_type = other DNA
ttgtagataaaaactggaatattgatatggatatattcgaaaggtcaaaagttgaaccgtttgttctaataaata

SEQ ID NO: 45368 - DNA, 75 bp, synthetic construct
  source 1..75: mol_type = other DNA
gtaacggaaaagccttcctgaacgtccaactgctgcaaaacagcatggatgctccgaaaatcattggatcttacc

SEQ ID NO: 45369 - DNA, 75 bp, synthetic construct
  source 1..75: mol_type = other DNA
attagcgaagttctgctgtcacaaagcgaaatcagacacaacaaggtaacgcgttatgtcagaagaacagacagg

SEQ ID NO: 45370 - DNA, 75 bp, synthetic construct
  source 1..75: mol_type = other DNA
gagtcaagatttaattcgtgagttgttctccatcaatcgacctattacaaatccaagaaatatttttcagattgt

SEQ ID NO: 45371 - DNA, 75 bp, synthetic construct
  source 1..75: mol_type = other DNA
acagagccagttatctcgtgaaatatgaaacgaagctgcatgacggttccgggcaacgtaattatggttgcagtc

SEQ ID NO: 45372 - DNA, 75 bp, synthetic construct
  source 1..75: mol_type = other DNA
gttatgtggcacagattatgtcgcagtaatccagaatcaggaaaaatcggttaatcaaaaacaaaatacagacta

SEQ ID NO: 45373 - DNA, 75 bp, synthetic construct
  source 1..75: mol_type = other DNA
ctgacccgcctcggcgttgacctggtggaatataccgtggaatgcggccccggtatcgcccgcccggaaaagtac

SEQ ID NO: 45374 - DNA, 75 bp, synthetic construct
  source 1..75: mol_type = other DNA
cgaatccgtgtgggtatgttgatcctttgggattagcaacatgtcccataatcagacaacgggtgctggctaacc

SEQ ID NO: 45375 - DNA, 75 bp, synthetic construct
  source 1..75: mol_type = other DNA
gctaacgacggtaacttcccgaaagtttatggtgaagtcgacagcaacggtattccgaaaaaaggtctgctgctg

SEQ ID NO: 45376 - DNA, 75 bp, synthetic construct
  source 1..75: mol_type = other DNA
cccggcttcgttaaacctggaaccgaatggcactgcgacaacgaatgagcaagggcaggctattttcaccgctac

SEQ ID NO: 45377 - DNA, 75 bp, synthetic construct
  source 1..75: mol_type = other DNA
gccgccagccagtttctttgatgagctggacccgatcctcaatcgccatttgccttccccgctgttcactgatac

SEQ ID NO: 45378 - DNA, 75 bp, synthetic construct
  source 1..75: mol_type = other DNA
gcggcatcgcgcggaaaaaccaggtcattatgcaggcctgctgcgacgtgctgaatcgcccgctgcaaattgttg

SEQ ID NO: 45379 - DNA, 75 bp, synthetic construct
  source 1..75: mol_type = other DNA
taaatggggtgccaggtttaaacagagataactttatttatatcagcaatattttttcaaatataaaacaacgga

SEQ ID NO: 45380 - DNA, 75 bp, synthetic construct
  source 1..75: mol_type = other DNA
attacctatgggatttatgtttactcactggggttaagcctctggcaggcgattgttgccggtgtcgtgggctat

SEQ ID NO: 45381 - DNA, 75 bp, synthetic construct
  source 1..75: mol_type = other DNA
atgtcccgcgtatcgcaggcgaggaacctgggtaaatatttcctgctcatcgataatatgctggtcgtgctgggg

SEQ ID NO: 45382 - DNA, 75 bp, synthetic construct
  source 1..75: mol_type = other DNA
cgtggagaaaaatgtcgcgtcgtttgccgcaaatgccgggacatttttaagcagtcagccagatagcgatgcgac

SEQ ID NO: 45383 - DNA, 75 bp, synthetic construct
  source 1..75: mol_type = other DNA
tctacaaaggcgtttagaagagcttaatttgtggctagaagaggaagccataaaattcaaaccatacaatttatc

SEQ ID NO: 45384 - DNA, 75 bp, synthetic construct
  source 1..75: mol_type = other DNA
ttcacaataacaggcctgttatcatcaggaacaatgttaaaaaaagcatatgtagatttcgctctgatttaggtc

SEQ ID NO: 45385 - DNA, 75 bp, synthetic construct
  source 1..75: mol_type = other DNA
cctgggagctacggaaatcacaaaagaggaatacttcgcacgtaaaaacggcacgtactcaggttcacaacaaaa

SEQ ID NO: 45386 - DNA, 75 bp, synthetic construct
  source 1..75: mol_type = other DNA
tggcgcttgtcagcacggaaggggcaacagaatggtgcgcagaatacgatgaatggggcaacctgctgaatgaag

SEQ ID NO: 45387 - DNA, 75 bp, synthetic construct
  source 1..75: mol_type = other DNA
aatagcccaggattcacgggatatttcggaacaaacctaaacccactatcgagtagattcattccaggaacagag

SEQ ID NO: 45388 - DNA, 75 bp, synthetic construct
  source 1..75: mol_type = other DNA
aatggggtgttgaagacgaggagttggcggaactggctaagaaagtagccagaatgctgacaaaagaaaaagccc

SEQ ID NO: 45389 - DNA, 75 bp, synthetic construct
  source 1..75: mol_type = other DNA
gcggggaatctgttatcaaggaagagtgggtgaaggaactatgtcagcattgccatggtaagggagaagtcagca

SEQ ID NO: 45390 - DNA, 75 bp, synthetic construct
  source 1..75: mol_type = other DNA
ttaatgaggagaaaaacgttgaggaaaccatacacgccgctttagcacagcgttatgagaacattgaagttattg

SEQ ID NO: 45391 - DNA, 75 bp, synthetic construct
  source 1..75: mol_type = other DNA
cacgtctttaaacagtacatcatcgacttcgccaaagaagtggaggtggagctgaaaggcgatccgatggtgctt

SEQ ID NO: 45392 - DNA, 75 bp, synthetic construct
  source 1..75: mol_type = other DNA
ggaaaccgggtggatatcatcagccagggagccacgctgagatttgccttcgacggtgacagtgatacgacggtt

SEQ ID NO: 45393 - DNA, 75 bp, synthetic construct
  source 1..75: mol_type = other DNA
gtttctgaacatcaagaacgtaagccgggacgacatgatggcggcgcatcgtgtgccgccgcaaatgatggggat

SEQ ID NO: 45394 - DNA, 75 bp, synthetic construct
  source 1..75: mol_type = other DNA
ccagcctgactcacagtgcctatccgttctggtccggtgcgctgtttaatcggggccgcgccaaagcggacaagg

SEQ ID NO: 45395 - DNA, 75 bp, synthetic construct
  source 1..75: mol_type = other DNA
tcgtgatgtgtgcgatccggaggcccgttgcctcgccggtaatcccgggtatcccggatctgcagggccgttctg

SEQ ID NO: 45396 - DNA, 75 bp, synthetic construct
  source 1..75: mol_type = other DNA
tatcgatgagctgtggcgggatatgcgctggtctgtggcgcgtattcaggacaagccgcgctgtattgtcggtca

SEQ ID NO: 45397 - DNA, 75 bp, synthetic construct
  source 1..75: mol_type = other DNA
tacgcagaacggtgacagcgcaggctgcgtggttatggcaccacccactgtacctggcggaaagttccgcattct

SEQ ID NO: 45398 - DNA, 75 bp, synthetic construct
  source 1..75: mol_type = other DNA
atgatgtttttacgtcaggaagactttgccacggtagtgcgctccaccccgcttgtctctctcgactttattgtc

SEQ ID NO: 45399 - DNA, 75 bp, synthetic construct
  source 1..75: mol_type = other DNA
ctatgtggaatgcgtacagatggaccgctggtatgagccaccagtgagtttcgacgggctggcgcgaaccttccg

SEQ ID NO: 45400 - DNA, 75 bp, synthetic construct
  source 1..75: mol_type = other DNA
tacattaacggcagtcatgctggcttcatcatgtacatgaccgatgctgcgcagaaccaggaggatgtgaacaac

SEQ ID NO: 45401 - DNA, 75 bp, synthetic construct
  source 1..75: mol_type = other DNA
tcaaaaaactgaccgaacagtacaacgtgacctatatcggcatcgactcgaccggcgtcggtcacggggtttatg

SEQ ID NO: 45402 - DNA, 75 bp, synthetic construct
  source 1..75: mol_type = other DNA
cgccagagtcaatcaacagaacactgaaaactcagcaggaaaaatcaacccagtcactgccgccatttgtcgcga

SEQ ID NO: 45403 - DNA, 75 bp, synthetic construct
  source 1..75: mol_type = other DNA
gcgaactgcctgatgaagtgctggagatctgccagcggctggcaaaactcaccgagatgctgcgtggtctggcgg

SEQ ID NO: 45404 - DNA, 75 bp, synthetic construct
  source 1..75: mol_type = other DNA
tacatcccgcctgagtgcggactacttaatccatgatttgcagacgggtcacttcgtgacagtactgcgttttat

SEQ ID NO: 45405 - DNA, 75 bp, synthetic construct
  source 1..75: mol_type = other DNA
gccagacggaccagcagcacggtggtggtgaacacggtggcctctgaaaatccggatgaagccgggcgttacagc

SEQ ID NO: 45406 - DNA, 75 bp, synthetic construct
  source 1..75: mol_type = other DNA
gatgcccctggcacatataaggtgggttatgctatctgtcgttctgcaaattttaactcatgggaatatgtgcca

SEQ ID NO: 45407 - DNA, 75 bp, synthetic construct
  source 1..75: mol_type = other DNA
gacctcccgggccaaagggggaacaggggcccgcgggtcctcaggggccgaagggtgataagggagagcgcggtg

SEQ ID NO: 45408 - DNA, 75 bp, synthetic construct
  source 1..75: mol_type = other DNA
tgcccgtcttcacgaacagctgggtgagggaacggtcatccacattgtgccgcgactggccggggccggaaaggg

SEQ ID NO: 45409 - DNA, 75 bp, synthetic construct
  source 1..75: mol_type = other DNA
ttgatccttctaaacaaaaccagttattaacagcattaaaagcgctgttactgagtcgctcaaatccgtttggcg

SEQ ID NO: 45410 - DNA, 75 bp, synthetic construct
  source 1..75: mol_type = other DNA
ggctggacaaaaacttttcacctccatagaggtaaaggaaaactacctgggaacaggcaaattctttgtatccgg

SEQ ID NO: 45411 - DNA, 75 bp, synthetic construct
  source 1..75: mol_type = other DNA
atgagtgcacgtggtatcaacaaggtcatcctcgtcgggcgtctgggcaatgatccggaggtccgttacatcccc

SEQ ID NO: 45412 - DNA, 75 bp, synthetic construct
  source 1..75: mol_type = other DNA
cataaccgtttataattatgatggtgaaacgcgggaatatatttccacatcaactgaatatcttgcggttggcgt

SEQ ID NO: 45413 - DNA, 75 bp, synthetic construct
  source 1..75: mol_type = other DNA
gcgttcgatagcgctactgtcggcgcggcgcagctggtctataaagcgcatctgcgtacctatagcgtggagaag

SEQ ID NO: 45414 - DNA, 75 bp, synthetic construct
  source 1..75: mol_type = other DNA
gatgacatcctatcgcagtttgcagaacagattagtggcgctgttggtattccactggtgcggttgttcggacag

SEQ ID NO: 45415 - DNA, 75 bp, synthetic construct
  source 1..75: mol_type = other DNA
gaaataaatcaaaatacatgtagaccttctatttcagtagttgtgacaaaagcaattattgaaatgttatgtgac

SEQ ID NO: 45416 - DNA, 75 bp, synthetic construct
  source 1..75: mol_type = other DNA
gtgctgggcggactgaatgcagggaatccaggtcaggcactggcgggcggtctgaatccggcagtggcacagctt

SEQ ID NO: 45417 - DNA, 75 bp, synthetic construct
  source 1..75: mol_type = other DNA
gctcatttgtcagcacgacgccagcgccgggtcagacgatattcccgcccttgcctggcagcaggccattgaggc

SEQ ID NO: 45418 - DNA, 75 bp, synthetic construct
  source 1..75: mol_type = other DNA
gggttcagccctggcagccggtggtttttctgccaccacgatgctgttttcacttggagccagcatgattctggg

SEQ ID NO: 45419 - DNA, 75 bp, synthetic construct
  source 1..75: mol_type = other DNA
aattcatcgtcatccgcactctcgttggtacgaaggccgaccggtgatgattgcccgtaatgacagcgcgcttgg

SEQ ID NO: 45420 - DNA, 75 bp, synthetic construct
  source 1..75: mol_type = other DNA
gccaactcagtgacatggcaaaaagcagtggcacttatctggatccggcactcgtcaaacgtatcgaagttgtcc

SEQ ID NO: 45421 - DNA, 75 bp, synthetic construct
  source 1..75: mol_type = other DNA
gtgctgctgctggatgaacctttctcggcactggataaaaatctgcgcctgtcgatgcaggttgagctgaaagcg

SEQ ID NO: 45422 - DNA, 75 bp, synthetic construct
  source 1..75: mol_type = other DNA
tatttctttactcggcgattatcctgacgacgtgaccttgcttaagccattaacgccttatgataagtggaacgg

SEQ ID NO: 45423 - DNA, 75 bp, synthetic construct
  source 1..75: mol_type = other DNA
tggcatcgcgtggtgctgttcggcaagctcgcggaagtggcaggtgaatatctgcgcaagggcgcgcaggtctac

SEQ ID NO: 45424 - DNA, 75 bp, synthetic construct
  source 1..75: mol_type = other DNA
tgcagatagtcatggagaatattgggacgaaatattttcaggtaaagatgagaaaatagttaaaagtaaagataa

SEQ ID NO: 45425 - DNA, 75 bp, synthetic construct
  source 1..75: mol_type = other DNA
cactgatcttttctgcttcaccactttctatagacctaccatctgttccctctgttgaaaaatctgtgaaaaaaa

SEQ ID NO: 45426 - DNA, 75 bp, synthetic construct
  source 1..75: mol_type = other DNA
aattgctggatggggttgaggttgagtggaaatcattgggagatgttgtaaattttcagcgcggaaggcggctcg

SEQ ID NO: 45427 - DNA, 75 bp, synthetic construct
  source 1..75: mol_type = other DNA
atccgcacggatgatgagcggactcaccggtaccattacgacagtcagcaccggctggtgcactacacgcggaca

SEQ ID NO: 45428 - DNA, 75 bp, synthetic construct
  source 1..75: mol_type = other DNA
agataacgggcggcaggctgtcgttgctggctctggagcagatggcagaacagggaaaagcatggcccctgattg

SEQ ID NO: 45429 - DNA, 75 bp, synthetic construct
  source 1..75: mol_type = other DNA
ggggtaaacagttcgcaggtgttgttctctatagccttaagtcaggatctcaccacaaaatcacgccttatatta

SEQ ID NO: 45430 - DNA, 75 bp, synthetic construct
  source 1..75: mol_type = other DNA
atgattctggttgtcacgaataccgaagccatcacgctgaaaatcgacccgtcggtggtactggcgacccgtaaa

SEQ ID NO: 45431 - DNA, 75 bp, synthetic construct
  source 1..75: mol_type = other DNA
caggctttattggttctgcggttgttcgtcatattattaataataccaatgacgctattattaatgtcgacaaac

SEQ ID NO: 45432 - DNA, 75 bp, synthetic construct
  source 1..75: mol_type = other DNA
gctggttcattcggatcagggcagtcagtacacaagccatgagtggcagtcgttcctgaaatcacacggcctgga

SEQ ID NO: 45433 - DNA, 75 bp, synthetic construct
  source 1..75: mol_type = other DNA
ctaaggacggattgactgacgtcgggcgtgagatatggcaaagcatggttaatgacatgggcgcaactgtagcgg

SEQ ID NO: 45434 - DNA, 75 bp, synthetic construct
  source 1..75: mol_type = other DNA
tgtggaaatcgtcaatggagtaaaaggcgttcgcagcctgatcgatagctacacactggcagccatgaaagtgtt

SEQ ID NO: 45435 - DNA, 75 bp, synthetic construct
  source 1..75: mol_type = other DNA
tcgaacaggaaacggcacaactcattccggccagtgatgtcagacgggagtttgccatctgggcaaaagcggtcg

SEQ ID NO: 45436 - DNA, 75 bp, synthetic construct
  source 1..75: mol_type = other DNA
tttcgcaatcacaccagaatacataaatgacaggtttttgtttcattttttgttgacgcaaaagaataaaatttc

SEQ ID NO: 45437 - DNA, 75 bp, synthetic construct
  source 1..75: mol_type = other DNA
ggacagatcaagacggatgagaaatctaatgagattacagctatcccagaacttcttaacatgctggatattaaa

SEQ ID NO: 45438 - DNA, 75 bp, synthetic construct
  source 1..75: mol_type = other DNA
ccggctgaccggtgagcgtcagacggtgcatcacccgcagacggaagcactgctctggcagcatgagaccagaca

SEQ ID NO: 45439 - DNA, 75 bp, synthetic construct
  source 1..75: mol_type = other DNA
ataatccgacatttaccggagaaccaaaagcgccgacgcctgctgcaggaaataacaccacgcggattgcgacca

SEQ ID NO: 45440 - DNA, 75 bp, synthetic construct
  source 1..75: mol_type = other DNA
ctggcggagctggggctggagctgccgggtggtaacaagccggaaccgcgtgactacgcggaactgctggagtcg

SEQ ID NO: 45441 - DNA, 75 bp, synthetic construct
  source 1..75: mol_type = other DNA
attattgagacaaacagcaatggctggttcccggatacagatggcgcactcatcaccggactgacctttcttgac

SEQ ID NO: 45442 - DNA, 75 bp, synthetic construct
  source 1..75: mol_type = other DNA
gcgcagccgctgggcgctgaccgtaaaggtcgtcgtgaagcgcgtattgtccgcgtactggtgccaaaaaccagc

SEQ ID NO: 45443 - DNA, 75 bp, synthetic construct
  source 1..75: mol_type = other DNA
agctctcacgcgcgtctgacctacaccaaagtctggcatattctgcagggcgatcaggatctgcgcgagcagtac

SEQ ID NO: 45444 - DNA, 75 bp, synthetic construct
  source 1..75: mol_type = other DNA
gtggcgtcagctggaattgccttgggtcatacaatgccggattccgtaaggacagacatgaaacaagagagcaat

SEQ ID NO: 45445 - DNA, 75 bp, synthetic construct
  source 1..75: mol_type = other DNA
cctttcagaaccgttgctgaagtcggtaatactgacggtcagtaaggacacatacgggctgttttactgggaggc

SEQ ID NO: 45446 - DNA, 75 bp, synthetic construct
  source 1..75: mol_type = other DNA
tagatcttggcaagcattcctttcacattcactgccaagataagtcaggcaaggtattgctgcgtaaaaagttta

SEQ ID NO: 45447 - DNA, 75 bp, synthetic construct
  source 1..75: mol_type = other DNA
gattacattgacgcggtgacggcaacagataccagcacagcgccggatgtcatctggcctgaactgccggaggcg

SEQ ID NO: 45448 - DNA, 75 bp, synthetic construct
  source 1..75: mol_type = other DNA
cgatttcgtcaccggaattaagacgattgaattagaactccgccacacgtccgatctggacactggcgacatgca

SEQ ID NO: 45449 - DNA, 75 bp, synthetic construct
  source 1..75: mol_type = other DNA
tgtcaaatgtttttcttgcaccaggagaagagaaaatcattaatatatcgggaggccagaaggggatatcttccg

SEQ ID NO: 45450 - DNA, 75 bp, synthetic construct
  source 1..75: mol_type = other DNA
ccgtgcagaccctgcgtgagatgaacgccgacaacctgcgcaaggtgccggccgatgcacccacggccttcatca

SEQ ID NO: 45451 - DNA, 75 bp, synthetic construct
  source 1..75: mol_type = other DNA
agctggttccagacctgactgattatcagtggtacaaaggatatgcagacgtaattgataaactagtaacaaagt

SEQ ID NO: 45452 - DNA, 75 bp, synthetic construct
  source 1..75: mol_type = other DNA
aatgctggcctgcggcacgcggatactgggtgtgaaggaatacaactgcgataaacctgagtgcccccacgtcag

SEQ ID NO: 45453 - DNA, 75 bp, synthetic construct
  source 1..75: mol_type = other DNA
gtgtgtggagagaagctgccgcaggtgtaccgtgctctggggatggataagccggaaccagtggcgaaagtgtgc

SEQ ID NO: 45454 - DNA, 75 bp, synthetic construct
  source 1..75: mol_type = other DNA
atgagccatattcaacgggaaacgtcttgctcgaggccgcgattaaattccaacctggatgctgatttatatggg

SEQ ID NO: 45455 - DNA, 75 bp, synthetic construct
  source 1..75: mol_type = other DNA
tggacgagtcggaatcgcagaccgataccaggatcttgccatcctatggaactgcctcggtgaattttctccttc

SEQ ID NO: 45456 - DNA, 75 bp, synthetic construct
  source 1..75: mol_type = other DNA
cgcagtgaggatgatgcggctgacgacgctgaccgcacggaacaggtgcaggaaaaagcgtcagtggaggaaatc

SEQ ID NO: 45457 - DNA, 75 bp, synthetic construct
  source 1..75: mol_type = other DNA
atgtggagatggtatcagaatgaggacataggtgagtattattggcaaacagagcttggtatatgtaaaaataac

SEQ ID NO: 45458 - DNA, 75 bp, synthetic construct
  source 1..75: mol_type = other DNA
tggcactcttgcaagagcagcagtgaaacctcagcagtatattgaaagaacagggagaactgccaatgtactacg

SEQ ID NO: 45459 - DNA, 75 bp, synthetic construct
  source 1..75: mol_type = other DNA
attggagtggtgacgtaggtgtagtcactgaaaataacagtaatattattgttactattcttcgcaggagtgggc

SEQ ID NO: 45460 - DNA, 75 bp, synthetic construct
  source 1..75: mol_type = other DNA
ttcagcacctgaccgcagaagtcaccgcagacagcggggaataccaggtgctggcgcgctgggacacgccgaagg

SEQ ID NO: 45461 - DNA, 75 bp, synthetic construct
  source 1..75: mol_type = other DNA
tctatgcccgccagggcgtggagctgcaccgcaatacgatggggcgctgggttgacatcatgggagagcagcttc

SEQ ID NO: 45462 - DNA, 75 bp, synthetic construct
  source 1..75: mol_type = other DNA
tacattgacgcggtgacggcaacagataccagcacagcgccggatgtcatctggcctgaactgccggaggcgtag

SEQ ID NO: 45463 - DNA, 75 bp, synthetic construct
  source 1..75: mol_type = other DNA
cctcagggaccgaagggcgacccgggggagacacaaatccgttttcgtctggggccgggaaacattattgagaca

SEQ ID NO: 45464 - DNA, 75 bp, synthetic construct
  source 1..75: mol_type = other DNA
ccgcagacatttttccaggaactccttttcctttgttgttcgaaattgaagtgagttcatgtacagggaataata

SEQ ID NO: 45465 - DNA, 75 bp, synthetic construct
  source 1..75: mol_type = other DNA
ttgcgcggtattcagatctcctctggtaatgcgacatcatttgtggcgattaccaatgtggagatgaaacgtgcc

SEQ ID NO: 45466 - DNA, 75 bp, synthetic construct
  source 1..75: mol_type = other DNA
ccgctgcacgccgccatgctctggtatgtcgaacagtttgccgcgttgagtcatcagcatcgctatatcttcatc

SEQ ID NO: 45467 - DNA, 75 bp, synthetic construct
  source 1..75: mol_type = other DNA
tgatgccattgaatggaacgtcgcgattaacgacaagaatatcctcatctccgatcatgtgattgaccatatcga

SEQ ID NO: 45468 - DNA, 75 bp, synthetic construct
  source 1..75: mol_type = other DNA
gctgtcctgcggtacattctcaatagacgagatcgaagtgagttcgcccgcgtccgttgtcgctatccgtggggt

SEQ ID NO: 45469 - DNA, 75 bp, synthetic construct
  source 1..75: mol_type = other DNA
gcagatttgctgacgttgcgcgcccagtgtctggctcatgacttgcctgacccgttagagccgctggaaatcgac

SEQ ID NO: 45470 - DNA, 75 bp, synthetic construct
  source 1..75: mol_type = other DNA
gacaaacagcaatggctggttcccggatacagatggcgcactcatcaccggactgacctttcttgaccccaaaga

SEQ ID NO: 45471 - DNA, 75 bp, synthetic construct
  source 1..75: mol_type = other DNA
cgacgtccttcggaagtggtaatgcaggtcggtttcgctggtggcggttccttgcttgactttgtagatacgtct

SEQ ID NO: 45472 - DNA, 75 bp, synthetic construct
  source 1..75: mol_type = other DNA
aaaatgtcgaatgtctggaactattgcagatgccctggttcagggcagtgatggggaaccatgagcggttgatgc

SEQ ID NO: 45473 - DNA, 75 bp, synthetic construct
  source 1..75: mol_type = other DNA
gattacattgacgcggtgacggcaacagataccagcaccgcgccggatgtcatctggcctgaactgccggaggag

SEQ ID NO: 45474 - DNA, 75 bp, synthetic construct
  source 1..75: mol_type = other DNA
tctgcagcaccgcattattcacaattatctggatgatgttctgcttcagggcagcagccgtaaactcacttcatt

SEQ ID NO: 45475 - DNA, 75 bp, synthetic construct
  source 1..75: mol_type = other DNA
ggattgccgttgtggtggaagaccgccgctaccgcccgacaaatcttgaaccgggtgatgcaggcatttaccacc

SEQ ID NO: 45476 - DNA, 75 bp, synthetic construct
  source 1..75: mol_type = other DNA
gtgaacggggaccggcaggtgatgctggtccggcaggcccgcaggggccgaaaggtgacaggggagagcggggag

SEQ ID NO: 45477 - DNA, 75 bp, synthetic construct
  source 1..75: mol_type = other DNA
agtgggaaataatgatggatggcgatgagattaaaatcatccaggcagactcacttgaaaatggcgcaggctggc

SEQ ID NO: 45478 - DNA, 75 bp, synthetic construct
  source 1..75: mol_type = other DNA
atgtcgatacctttcgtggcacccgtgaaggcgtgccgcgtctgctggaaatcttgagtaagcataatattcagg

SEQ ID NO: 45479 - DNA, 75 bp, synthetic construct
  source 1..75: mol_type = other DNA
ggcgcccaggtcaatggcgtcatcaataaacttcaccgttctttaactgaacagggtgttgaggccaccctgaaa

SEQ ID NO: 45480 - DNA, 75 bp, synthetic construct
  source 1..75: mol_type = other DNA
ctgggatgatacttcactgaattttgatcataaagattttctgtggtgtccgagacataaaaacacccccagaca

SEQ ID NO: 45481 - DNA, 75 bp, synthetic construct
  source 1..75: mol_type = other DNA
catgcggcaggggaagatagcgcaccggtgccttttgttattcatttacgggaatgtagcacggtggtgagtgaa

SEQ ID NO: 45482 - DNA, 75 bp, synthetic construct
  source 1..75: mol_type = other DNA
cgcaatttacccctgcggatttcaccggcggaataaaatctaaatgcgtcaaactactcatagagcagggatttc

SEQ ID NO: 45483 - DNA, 75 bp, synthetic construct
  source 1..75: mol_type = other DNA
gacgggcagtaccgccagatagtcaccgtggaagatgcggtgcgcggcggctgtaacctgttcgaccttgaccag

SEQ ID NO: 45484 - DNA, 75 bp, synthetic construct
  source 1..75: mol_type = other DNA
atgactttgaaagtcctagcatgcaaagagattactctaactatttacttggagaaataaaagatcatttatcat

SEQ ID NO: 45485 - DNA, 75 bp, synthetic construct
  source 1..75: mol_type = other DNA
atttatgcctgcaagccataaatgagcgggtaaaatcggaatgcctcttactcctcccgcaagaacacaaagcag

SEQ ID NO: 45486 - DNA, 75 bp, synthetic construct
  source 1..75: mol_type = other DNA
gactgggcgtggcgcgtaaagacctgaaggcgatggcgaacgacggcaaactgaccaccgataaagttgtcccgg

SEQ ID NO: 45487 - DNA, 75 bp, synthetic construct
  source 1..75: mol_type = other DNA
tttatgccggagggcagggtgttgctgcgccatcttaagcaacagcagtttgtggacaattcatcttattatcat

SEQ ID NO: 45488 - DNA, 75 bp, synthetic construct
  source 1..75: mol_type = other DNA
ttcaagcgacctgagctgattgataagctgaacaacatcatcgcccgacaccaatccgggagcactgccagcgag

SEQ ID NO: 45489 - DNA, 75 bp, synthetic construct
  source 1..75: mol_type = other DNA
atgaaaaaggttttagctcgagggcgagttctcggcaatagcaattcagagttcgctcgcatgcttgaaggtgac

SEQ ID NO: 45490 - DNA, 75 bp, synthetic construct
  source 1..75: mol_type = other DNA
gaaacggtgtccggcagtatcacgaaggtggaaaacgcttttatggcctgggtgggtggcgcgaatgaagccagc

SEQ ID NO: 45491 - DNA, 75 bp, synthetic construct
  source 1..75: mol_type = other DNA
gcaggcagggcctgaaaatattttttatgactttaatgatggtgcacgtgtattgcttcctgaagggaaatggca

SEQ ID NO: 45492 - DNA, 75 bp, synthetic construct
  source 1..75: mol_type = other DNA
actgccacaggctactctggataataaacagcagagcgccctgaataacacggagcgtcaactggccctgtcacg

SEQ ID NO: 45493 - DNA, 75 bp, synthetic construct
  source 1..75: mol_type = other DNA
atgaattcagcatttgcgcttgttctgacagtttttcttgtttccggagagccagttgatattgcagtcagtgtt

SEQ ID NO: 45494 - DNA, 75 bp, synthetic construct
  source 1..75: mol_type = other DNA
atggtgaattaccgtcttatatcactggcgctaacaatttaacccccttaatcgccagaccatggaggaaagctg

SEQ ID NO: 45495 - DNA, 75 bp, synthetic construct
  source 1..75: mol_type = other DNA
aacctgatcgaaggtctcactgtgtacttcgccttaaaaagcggctctgccacattaacgtcattaacagcggtg

SEQ ID NO: 45496 - DNA, 75 bp, synthetic construct
  source 1..75: mol_type = other DNA
tacacagaacggcgacagtgccggatgcgtggtggtggctccgccagccgtgccgggcggcaagttccgcattct

SEQ ID NO: 45497 - DNA, 75 bp, synthetic construct
  source 1..75: mol_type = other DNA
tcaatcgtcatggcaataccggcacggtgtattgcattcaggcaaatggcgctatttatgacacagaccaacagt

SEQ ID NO: 45498 - DNA, 75 bp, synthetic construct
  source 1..75: mol_type = other DNA
actgaagagctggaaacgtggcgcgcccgcgtcattgagcggtattactggacgcctcagggcggggctgacggg

SEQ ID NO: 45499 - DNA, 75 bp, synthetic construct
  source 1..75: mol_type = other DNA
tatactcagcgcattgagcggcataacctgaatctgagacaacatctggcaaggctgggacggaagtcactgtcg

SEQ ID NO: 45500 - DNA, 75 bp, synthetic construct
  source 1..75: mol_type = other DNA
ggtatgaaacggcggggcaagcaaaaccagtggcatggcgatatcgctacgtgaaaaaaggcgttacggactttc

SEQ ID NO: 45501 - DNA, 75 bp, synthetic construct
  source 1..75: mol_type = other DNA
atggcggattcgaatctcaatacacctgttattgttcaggcgacgcggctcgatacatcaatccttccacgcaat

SEQ ID NO: 45502 - DNA, 75 bp, synthetic construct
  source 1..75: mol_type = other DNA
aaacgttgccggatacgatctctcacggttaatggccggaagctacggttgtcttggcgtgctcactgaaatctc

SEQ ID NO: 45503 - DNA, 75 bp, synthetic construct
  source 1..75: mol_type = other DNA
ttgcgtttgttaatcagcgccaataccgtgctcaacaatgctttatgtcgataaaattggtagacaatgcagatg

SEQ ID NO: 45504 - DNA, 75 bp, synthetic construct
  source 1..75: mol_type = other DNA
caagaagtcagaggttgtttactctggcgtatcagtaaccatcccgacagcgccgaccaaccttgttagcctgct

SEQ ID NO: 45505 - DNA, 75 bp, synthetic construct
  source 1..75: mol_type = other DNA
agccatcagttgcttgcaccagcggacaatatctccattgcaaaaaatgagctggcagttctggggacgatttca

SEQ ID NO: 45506 - DNA, 75 bp, synthetic construct
  source 1..75: mol_type = other DNA
cccgcgtcattgagcggtattactggacgccgcagggcggggctgacggggactatgtcgtctgggctaaagaag

SEQ ID NO: 45507 - DNA, 75 bp, synthetic construct
  source 1..75: mol_type = other DNA
gcccgtgaagccctgattgacgctctgcttaccggacgtaaccagatttttctttccgccagcaaggcacaggcc

SEQ ID NO: 45508 - DNA, 75 bp, synthetic construct
  source 1..75: mol_type = other DNA
cagggttcagccatgcggtgcaggtggatgctgacggtcaacatgcgattgaagatatccccaaactgctggcac

SEQ ID NO: 45509 - DNA, 75 bp, synthetic construct
  source 1..75: mol_type = other DNA
cacttccaccagttaatttcattggccctgataactggcagccctacaccagattgattcccgccaatgaagtgc

SEQ ID NO: 45510 - DNA, 75 bp, synthetic construct
  source 1..75: mol_type = other DNA
ggatcggatatgacccggcgaaaggtacgcagaacggcgacagcgccggatgcgtggtggtggctccgccagccg

SEQ ID NO: 45511 - DNA, 75 bp, synthetic construct
  source 1..75: mol_type = other DNA
tagcaaaacagacgcttaaaaacagtaaagatccggcagaacgtgaaaaggtacagcagaaatatgatgcattgc

SEQ ID NO: 45512 - DNA, 75 bp, synthetic construct
  source 1..75: mol_type = other DNA
atggtccattccgcatcatctaacgaagctgacttaaaccctaacgtcgccaaccgcaacaaaggcccgcgccgt

SEQ ID NO: 45513 - DNA, 75 bp, synthetic construct
  source 1..75: mol_type = other DNA
caggtttgtggtcccgcgatgcagttgaacgtcagatgagccatcaggaacgtaacggtgtacgtgctgcttaca

SEQ ID NO: 45514 - DNA, 75 bp, synthetic construct
  source 1..75: mol_type = other DNA
ttgccctgaccacaggactgtttatttctgcccatgcttcggaaaacgtgaatacgcccgaaaaccgccagttcc

SEQ ID NO: 45515 - DNA, 75 bp, synthetic construct
  source 1..75: mol_type = other DNA
cgtgtactttgtgtccttctccattcccgaagaggggctgaaacggatgctgggcgaaacccggcactacggtat

SEQ ID NO: 45516 - DNA, 75 bp, synthetic construct
  source 1..75: mol_type = other DNA
cgggcacgcctacaaccgtctggtgaaaaaggacccggtgaccggcgagcagagcctgcgcatgcacatgtctct

SEQ ID NO: 45517 - DNA, 75 bp, synthetic construct
  source 1..75: mol_type = other DNA
ttatcgttgaattaggtttcaatgagaacgttattaaaggtctgcaaagagttgaaaagctcgctatgcagtcag

SEQ ID NO: 45518 - DNA, 75 bp, synthetic construct
  source 1..75: mol_type = other DNA
tatctctcttgcacttaacgcaggcaagaaatatgcaattgtgctgaagggaagataccttcttggagaagatac

SEQ ID NO: 45519 - DNA, 75 bp, synthetic construct
  source 1..75: mol_type = other DNA
tgagcagtgccatcaacagcacgtctgaaatactggccgccacaccgaaagcggtcaaggctgcatacgatctgg

SEQ ID NO: 45520 - DNA, 75 bp, synthetic construct
  source 1..75: mol_type = other DNA
aaaccagatgaaaccagctttatgacctttagcagtaatatctacgaccaatatgcagaagctacgctattaagt

SEQ ID NO: 45521 - DNA, 75 bp, synthetic construct
  source 1..75: mol_type = other DNA
cacagtttgctggttttggtgcttcagctaaagagtctatgggtattcaaggttctgaagaactttttaaaaata

SEQ ID NO: 45522 - DNA, 75 bp, synthetic construct
  source 1..75: mol_type = other DNA
ccgttcgctgatcgacaaactggaagaattgcagcaggcaaactcccctaccccatcgatcccccaaacattacc

SEQ ID NO: 45523 - DNA, 75 bp, synthetic construct
  source 1..75: mol_type = other DNA
ttgatatcagcaaagagtacgatgaaagcctgggcacggacgatgtgcattatcagtcgttcgcccgcatggcgg

SEQ ID NO: 45524 - DNA, 75 bp, synthetic construct
  source 1..75: mol_type = other DNA
caggttgcgcgaaaaattgaagctgccgccaataaaccccgtaactggcttgatattgatcgctcgctttctcag

SEQ ID NO: 45525 - DNA, 75 bp, synthetic construct
  source 1..75: mol_type = other DNA
gccgattttctggatgcaaacagagaaagatttatcagtccatttgaatatgcaaagattaataatccattaaaa

SEQ ID NO: 45526 - DNA, 75 bp, synthetic construct
  source 1..75: mol_type = other DNA
attgaaaaactggagtgctatatcgctgaattgaaaaaagcatctcaacaaaaaatgaggtgcttgcagcagacg

SEQ ID NO: 45527 - DNA, 75 bp, synthetic construct
  source 1..75: mol_type = other DNA
agtacctgaaggactggttaaagctgtgcacttctatgaacaagtaaaacgtgagaatccgccagttgagactgg

SEQ ID NO: 45528 - DNA, 75 bp, synthetic construct
  source 1..75: mol_type = other DNA
aagaacgccgcttgatgctacaatggtgggccgattttctggatgcaaacagagaaaaatttatcagtccatttg

SEQ ID NO: 45529 - DNA, 75 bp, synthetic construct
  source 1..75: mol_type = other DNA
aggctgacagtggtaaatcctgtggcattgcactggatgaggcaaaggccgaaggcgacatcatccgtatcctgc

SEQ ID NO: 45530 - DNA, 75 bp, synthetic construct
  source 1..75: mol_type = other DNA
ggggcagataataccccctgtaaagccggtgccgcagcgctcggggttgccgaagtggatgctgttaccggcgac

SEQ ID NO: 45531 - DNA, 75 bp, synthetic construct
  source 1..75: mol_type = other DNA
gcgcttatatcgtttccccggttctgttttgaccgattaccggatactgaagaattacgccaaaacactgaaagg

SEQ ID NO: 45532 - DNA, 75 bp, synthetic construct
  source 1..75: mol_type = other DNA
aaagtagcatcgggacagttgtcagaacttcgtgattcggtaagccggatgaatgatataagagtggaggggcat

SEQ ID NO: 45533 - DNA, 75 bp, synthetic construct
  source 1..75: mol_type = other DNA
gaaaacaagaacgggagctattaaataaaatatgcattgtttcaatgctggctcgtttacgtctgatgccaaaaa

SEQ ID NO: 45534 - DNA, 75 bp, synthetic construct
  source 1..75: mol_type = other DNA
tctttgggttgttttattcctgcggagctttttctgccactcaatgcggaccttttttcttaaagggcgaaagcg

SEQ ID NO: 45535 - DNA, 75 bp, synthetic construct
  source 1..75: mol_type = other DNA
ttgataagtgctcttgagaagatgagtaatgccgttgaagactcaatgaaaagtcatcctgaaaagctctcatct

SEQ ID NO: 45536 - DNA, 75 bp, synthetic construct
  source 1..75: mol_type = other DNA
tgctggtcatgaacggtcagcatacggaattcaaccgcctgctggggctgggtaatgaactgctgcaacagcgtc

SEQ ID NO: 45537 - DNA, 75 bp, synthetic construct
  source 1..75: mol_type = other DNA
ctgataatgagggtaaaactcgcgaggcactggaagagcagaatcgtctgattgctgagcaggaaagtaaagtcc

SEQ ID NO: 45538 - DNA, 75 bp, synthetic construct
  source 1..75: mol_type = other DNA
actacgatccgttgcaggggcggtatatcaccccggacccgattgggttgagaggtggatggaatatgtatcagt

SEQ ID NO: 45539 - DNA, 75 bp, synthetic construct
  source 1..75: mol_type = other DNA
cattccgttcaggtacggtgcagcgcctgcatatctcagagcacggcaaaatttgcgcgaaatatccggctaagg

SEQ ID NO: 45540 - DNA, 75 bp, synthetic construct
  source 1..75: mol_type = other DNA
gctgaaaggcgatccgatggtgcttcctaacggggccacgctttacttcctaggcaccaatgcccgcacggccca

SEQ ID NO: 45541 - DNA, 75 bp, synthetic construct
  source 1..75: mol_type = other DNA
gctgccgatggcggataaacacagtccactgccggaatccgtcgcgcaactggcagcctggatgcaggcgcgcca

SEQ ID NO: 45542 - DNA, 75 bp, synthetic construct
  source 1..75: mol_type = other DNA
gaagataaagagttcgctggtttaatatgtaaggataatagtggcagatatttctcaacagcacctaaccgagga

SEQ ID NO: 45543 - DNA, 75 bp, synthetic construct
  source 1..75: mol_type = other DNA
ggttgttgtggctttgtttttccttaacgccgtcatttttcttttcatgttaatgaaatatttcactaacaaaca

SEQ ID NO: 45544 - DNA, 75 bp, synthetic construct
  source 1..75: mol_type = other DNA
agggagtgctgcgcggtgaagagtttaactcggtgaatgagaacggcgatcgtgttattcgtgcgctggctgcgg

SEQ ID NO: 45545 - DNA, 75 bp, synthetic construct
  source 1..75: mol_type = other DNA
ctgagcgagagctgaccttatcccgtatgaagggggaagcgcgtgagcgtactcgtctgggctatgtagcggatg

SEQ ID NO: 45546 - DNA, 75 bp, synthetic construct
  source 1..75: mol_type = other DNA
atcttccgagtcggcgctgccgcgtatgctcgacaagatggagaaactcggctgccgcaaatcggtggtggggct

SEQ ID NO: 45547 - DNA, 75 bp, synthetic construct
  source 1..75: mol_type = other DNA
atgacaaactgcagtttaaggccttcctgtcatctcttggctgggcggaagatgaagacctccagaataaactgt

SEQ ID NO: 45548 - DNA, 75 bp, synthetic construct
  source 1..75: mol_type = other DNA
gggcagcaaaggccaactgatttttaacgtgatcgaaagtttctcgcaggtcatcttcggcatcatcaatatgat

SEQ ID NO: 45549 - DNA, 75 bp, synthetic construct
  source 1..75: mol_type = other DNA
tttatcgtgctggcggcgacgctctctgcggtgggccatttgccggtagcgggtctggcgctgatcctcggtatc

SEQ ID NO: 45550 - DNA, 75 bp, synthetic construct
  source 1..75: mol_type = other DNA
cttatttatgaacgtaagagttttgtgatcgaaaatgtttccgatgttagtgaaacggtaaaaagagtggagcat

SEQ ID NO: 45551 - DNA, 75 bp, synthetic construct
  source 1..75: mol_type = other DNA
atgtggtcagaatattcactcgaagttgttgatgcggtagcgcgtaatggtagttttagcgctgcggcacaggag

SEQ ID NO: 45552 - DNA, 75 bp, synthetic construct
  source 1..75: mol_type = other DNA
ggcgacaactggcagcacccaaacgtcctgcgggaccaacgccaattgagttgctgaaacaggaatatgaacgcc

SEQ ID NO: 45553 - DNA, 75 bp, synthetic construct
  source 1..75: mol_type = other DNA
cggtaaaaggtgccggtaccactctgtgggtttacaacggcaaggctgatgcttacgcaaacccgttgtcagacg

SEQ ID NO: 45554 - DNA, 75 bp, synthetic construct
  source 1..75: mol_type = other DNA
gtgcgcacgcaaaaacgctggatacccaggggctgcgcaatgaatttttggttgaaaaggtatttgtcgccgatg

SEQ ID NO: 45555 - DNA, 75 bp, synthetic construct
  source 1..75: mol_type = other DNA
ccatcccccctgcgccagtcttcagcccgtaaaccgttaccggcttcacttccccgtgaaacccgggtcatccgg

SEQ ID NO: 45556 - DNA, 75 bp, synthetic construct
  source 1..75: mol_type = other DNA
cgaatcagcaatgtgcttccggagtatcggggagaggatggtgtcagagtggggagaatatcctttaataatata

SEQ ID NO: 45557 - DNA, 75 bp, synthetic construct
  source 1..75: mol_type = other DNA
tactgtgcctgttactgggcttttcttcggtatcctattcccgggaatttacgatagacttttcgactcaacaaa

SEQ ID NO: 45558 - DNA, 75 bp, synthetic construct
  source 1..75: mol_type = other DNA
ccgtctggagtttgacgccgggcacaccgacattgcgcagtcattcatggcaatccgtcgcgcaaccaccgccag

SEQ ID NO: 45559 - DNA, 75 bp, synthetic construct
  source 1..75: mol_type = other DNA
gacgcctctcgctcagttcgcacagcatctgaaacacgcccccataacattgcgtttaattacatcgtaagggca

SEQ ID NO: 45560 - DNA, 75 bp, synthetic construct
  source 1..75: mol_type = other DNA
ggctgccgccaggcgtaccgctacaacgcgctgaacgcggtcacggaagtggtgttcaccggggaccggggcggt

SEQ ID NO: 45561 - DNA, 75 bp, synthetic construct
  source 1..75: mol_type = other DNA
gcctgaaaacctggcagagctgcgtcaggcgattgaaacggccgtaccgcacggacgtactaccgggcgttgtaa

SEQ ID NO: 45562 - DNA, 75 bp, synthetic construct
  source 1..75: mol_type = other DNA
gcggcaaaagtttacggacatgaatatattacgcggagagttaagggagtaacgcagaccaacgcaattacaact

SEQ ID NO: 45563 - DNA, 75 bp, synthetic construct
  source 1..75: mol_type = other DNA
gcgcacacagacgttccaccgcgaagccgccggtgaattcagcggcgaaatcaccggcgtgacggatggtgcctg

SEQ ID NO: 45564 - DNA, 75 bp, synthetic construct
  source 1..75: mol_type = other DNA
ggttaatgccggaaaagtgagtatccccgtgatttccggtaatggtcagtttgctgcggtggctgaaattaccgt

SEQ ID NO: 45565 - DNA, 75 bp, synthetic construct
  source 1..75: mol_type = other DNA
aatcagaattttgcgaccattaccgtgaaagggaacacgatcacggtgaaaggtgttgcggccggtaaagcgcag

SEQ ID NO: 45566 - DNA, 75 bp, synthetic construct
  source 1..75: mol_type = other DNA
aataaacaatacattatgggaaagtaatacagcagcagcgtttctgaacagaaagtcacagtctttatatacaac

SEQ ID NO: 45567 - DNA, 75 bp, synthetic construct
  source 1..75: mol_type = other DNA
ctgagtaccacgatagaattcattagcgcggaaaccagaccaatgacgggtacagtgtcagtgaatagtgcaaac

SEQ ID NO: 45568 - DNA, 75 bp, synthetic construct
  source 1..75: mol_type = other DNA
cctttacaaaagaacaatatcctgttctggccagagtctacccgaccctccgtcttcccgatttgcgcggtgagt

SEQ ID NO: 45569 - DNA, 75 bp, synthetic construct
  source 1..75: mol_type = other DNA
ccgccacgttcagcgaatgctgaaactggcagaccttgcacctgtcatccttgatgcgctggcagaagaccgcat

SEQ ID NO: 45570 - DNA, 75 bp, synthetic construct
  source 1..75: mol_type = other DNA
ttttcggataatgcggcgttgtttgcccgttctgcggcctcaatgcgtgaatatggttacagtgccggtgatgtc

SEQ ID NO: 45571 - DNA, 75 bp, synthetic construct
  source 1..75: mol_type = other DNA
ctgaagaatacccggaactggcaaaggcttatccgacaaataaattgcctgatttacgtggtgagtttattcgtg

SEQ ID NO: 45572 - DNA, 75 bp, synthetic construct
  source 1..75: mol_type = other DNA
aagccgctcagagagccagacaagctgcatctggtgtgcgtaagctggagattgtgcttgatgctcaggaaattg

SEQ ID NO: 45573 - DNA, 75 bp, synthetic construct
  source 1..75: mol_type = other DNA
tctctgtgacagtagccgtgccctatacagacgtctggacacataaacccgtccagttctatccaggcaaacacc

SEQ ID NO: 45574 - DNA, 75 bp, synthetic construct
  source 1..75: mol_type = other DNA
cgtgcaactggtgttgagctggagagtgaacgttttttacagacagtgaaggagatccgggacgatttttgcagg

SEQ ID NO: 45575 - DNA, 75 bp, synthetic construct
  source 1..75: mol_type = other DNA
ttgtgcttgccgcaatccgccgtgctgacactcaaccccgcatctgtatgcttcgcaccgtggcctgcgatgagc

SEQ ID NO: 45576 - DNA, 75 bp, synthetic construct
  source 1..75: mol_type = other DNA
ttccgtgaccgcttccatcgctgggatccgaaaaatcagcgcccggagctgtggcacaactacaacgggcaaatt

SEQ ID NO: 45577 - DNA, 75 bp, synthetic construct
  source 1..75: mol_type = other DNA
ccggtgctgtttcgcgggacgaaacaccagaatttcaacagcccgaatcagcagtcgtactggtattccacctgt

SEQ ID NO: 45578 - DNA, 75 bp, synthetic construct
  source 1..75: mol_type = other DNA
cgaaagcggagctgtgttggcttattcctccatcgttaccgacaaaacggcctacaccgcgggcggcgcgataaa

SEQ ID NO: 45579 - DNA, 75 bp, synthetic construct
  source 1..75: mol_type = other DNA
tttgcgcgtgagtccctcctgcgtgcgcttaagaccgggcaaaaccagatatttttgtcagccagtaagacgcag

SEQ ID NO: 45580 - DNA, 75 bp, synthetic construct
  source 1..75: mol_type = other DNA
gaaactggtccgaagggggatgtcggtcctaaaggcgaaacaggtccagtgggccctcaagggcccgcagggccg

SEQ ID NO: 45581 - DNA, 75 bp, synthetic construct
  source 1..75: mol_type = other DNA
ttaaacaacaaaaattagctaagggattagagttagctataatcgctttgaataaccaactcacttcacaacacc

SEQ ID NO: 45582 - DNA, 75 bp, synthetic construct
  source 1..75: mol_type = other DNA
gacttccgcgcccaggctgacgccatcaaaaaactgaccgaacagtataacgtgacctatatcggtatcgactcg

SEQ ID NO: 45583 - DNA, 75 bp, synthetic construct
  source 1..75: mol_type = other DNA
tacgcagaacggcgacagcgccggatgcgtggtggtggcaccgccagccgtgcagggcggtaagttccgcattct

SEQ ID NO: 45584 - DNA, 75 bp, synthetic construct
  source 1..75: mol_type = other DNA
ttttcatgggttctggctcaaccataaaagcagctatggcgctcgggcgtcgtgcaactggtgttgaactggagg

SEQ ID NO: 45585 - DNA, 75 bp, synthetic construct
  source 1..75: mol_type = other DNA
gaatataagcatctgcggcggtattttggcgtgacggcgcaggtgccgtacacggatgtgtggacgcataaaccg

SEQ ID NO: 45586 - DNA, 75 bp, synthetic construct
  source 1..75: mol_type = other DNA
ttatgcgggatgggtattaaactacgccgcttaactgcgggtatctgcctggtaactcaacttgtgttccctatg

SEQ ID NO: 45587 - DNA, 75 bp, synthetic construct
  source 1..75: mol_type = other DNA
tcaaaatttcggcaaattcacagtcattccagtcggagatccagcgggcttcccgtatgggcagtgaatattacc

SEQ ID NO: 45588 - DNA, 75 bp, synthetic construct
  source 1..75: mol_type = other DNA
atcaccgttaagaccaacggcctgcgccgccgtgtgaaggccacccgcataagcggatgcacggtttactgggaa

SEQ ID NO: 45589 - DNA, 75 bp, synthetic construct
  source 1..75: mol_type = other DNA
cgcttaagaccgggcaaaaccagatatttttgtcagccagtaagacgcaggcttacgtgttccgaaagtacatca

SEQ ID NO: 45590 - DNA, 75 bp, synthetic construct
  source 1..75: mol_type = other DNA
actgtaaatctgggtgaagtagcagataccgtactgaaaagcgatcagaaatctttggctgaacctttcactatt

SEQ ID NO: 45591 - DNA, 75 bp, synthetic construct
  source 1..75: mol_type = other DNA
taataatgttccatcaatcaaaagattcctgactgaggtccaagatggtgttgttcctacaacatggtggtcata

SEQ ID NO: 45592 - DNA, 75 bp, synthetic construct
  source 1..75: mol_type = other DNA
ttgcccgttggtgtacccgttccgtggccctcagctacaccgccaacgggctggctgaaatgtaacggcgcagca

SEQ ID NO: 45593 - DNA, 75 bp, synthetic construct
  source 1..75: mol_type = other DNA
acctggatgatgaagacgcggactggaccgcgaccgggcaggggcagaaatctgcaggtgataccagttttacgc

SEQ ID NO: 45594 - DNA, 75 bp, synthetic construct
  source 1..75: mol_type = other DNA
gaccgcgaccgggcaggggcagaaatctgcaggtgataccagttttacgctggcctggaaaccgggagaggaagg

SEQ ID NO: 45595 - DNA, 75 bp, synthetic construct
  source 1..75: mol_type = other DNA
tcaatcagaattggctcggaagctcacagccagcagtggtcgtttagtaaagcaacaacatgtctggaactggtt

SEQ ID NO: 45596 - DNA, 75 bp, synthetic construct
  source 1..75: mol_type = other DNA
agccgcagcgaagaagccagccatgccgatctggcctgggcaacgatgcacgcattgtttaacgaaccgctgcag

SEQ ID NO: 45597 - DNA, 75 bp, synthetic construct
  source 1..75: mol_type = other DNA
tgtctctgtcgttatgtgcagatatgctgatgctcttagctactatttacaggatagcacagcaaccaatggtaa

SEQ ID NO: 45598 - DNA, 75 bp, synthetic construct
  source 1..75: mol_type = other DNA
tggcaggcgaaggaatgttaattctctggagcacctcgtatctcgacgaagccgaacagtgccgtgacgtgttgc

SEQ ID NO: 45599 - DNA, 75 bp, synthetic construct
  source 1..75: mol_type = other DNA
aagataataaaatcatatctgcaggtgggtattattcattgcctgtatctgactttacaggttttcgcactgtta

SEQ ID NO: 45600 - DNA, 75 bp, synthetic construct
  source 1..75: mol_type = other DNA
cggaagaacgcagcaaaattacgccggtcactgcgattaaggtgacgccgacatccggtacggtggcaaaaggga

SEQ ID NO: 45601 - DNA, 75 bp, synthetic construct
  source 1..75: mol_type = other DNA
agcagtactggcagaccgttgttgagcggctgccagagcctttagccgaggaatcacttagcgcacaggcgaagt

SEQ ID NO: 45602 - DNA, 75 bp, synthetic construct
  source 1..75: mol_type = other DNA
tacagatcagttaactggttatggtcaagcactgaccaaaacaaaggctagcgacactgaaggttctgataatac

SEQ ID NO: 45603 - DNA, 75 bp, synthetic construct
  source 1..75: mol_type = other DNA
tcagaaagggcttataggctggtttgaaagcggggatgtgcgggcctataaaatccgttttccgaacggcacggt

SEQ ID NO: 45604 - DNA, 75 bp, synthetic construct
  source 1..75: mol_type = other DNA
cagcatggtgtttttgaagttcaacggcgcgaaattctctgccactgattaccctgtgctggcgaaagtgtttcc

SEQ ID NO: 45605 - DNA, 75 bp, synthetic construct
  source 1..75: mol_type = other DNA
ccaaaatattatgatcgaaggtgataaccttgaagtgttaaagctccttcaaaaaagctacgccggaaaagtaaa

SEQ ID NO: 45606 - DNA, 75 bp, synthetic construct
  source 1..75: mol_type = other DNA
ctggagtttatctgtaatgtcgaaactgactttggcacccggaaaggaacatccggcatgtactttctggccaga

SEQ ID NO: 45607 - DNA, 75 bp, synthetic construct
  source 1..75: mol_type = other DNA
gacagcagcgagacccgggcctacaaaatccgcttcccgaacggcacggtggatgtgttccgtggctgggtgagc

SEQ ID NO: 45608 - DNA, 75 bp, synthetic construct
  source 1..75: mol_type = other DNA
cacatgggttcccccggaagaagcggcactgatcaggaacggtgaagaacgcgggaacatcgccgaagccctgtt

SEQ ID NO: 45609 - DNA, 75 bp, synthetic construct
  source 1..75: mol_type = other DNA
ggtcagagcaccaccctgactgtggccgttcagccggaaggcgcaacggataaaacattccgcgcaacgtcggca

SEQ ID NO: 45610 - DNA, 75 bp, synthetic construct
  source 1..75: mol_type = other DNA
gtctaaaaactagtattaagactatcacttatttaagtgatattggttgtctggagattcagggggccagtctag

SEQ ID NO: 45611 - DNA, 75 bp, synthetic construct
  source 1..75: mol_type = other DNA
ggtggacgtgcgcaggttgtcgggagtcgtcttatcgtcctggcagaccagccgaaatatacaggcgaaggaacg

SEQ ID NO: 45612 - DNA, 75 bp, synthetic construct
  source 1..75: mol_type = other DNA
agggccacggcagaaaacagcgtggtgccgttcaaccggctgatgtcttaccgtggtgtgcactaccgttatgac

SEQ ID NO: 45613 - DNA, 75 bp, synthetic construct
  source 1..75: mol_type = other DNA
ccgcgcgtcaggcgatggtctggacgctgtttcactacggcttaaccggctggtcgatgtatgcgctgatgggca

SEQ ID NO: 45614 - DNA, 75 bp, synthetic construct
  source 1..75: mol_type = other DNA
tactcagcgacccgcgacgacaggccgcgcttttgttctggcagggctattccgtgccacaaatcgcggagcagt

SEQ ID NO: 45615 - DNA, 75 bp, synthetic construct
  source 1..75: mol_type = other DNA
ctggcagagcactacttcggtgcaagtcaggattgcgaagactccattctggtgcgtgtccatcgcggaaccggg

SEQ ID NO: 45616 - DNA, 75 bp, synthetic construct
  source 1..75: mol_type = other DNA
cggtgaaaggtgccggaaccaccctgtgggtttataacgggagcggcgacccttatgcgaacccgctttcagacg

SEQ ID NO: 45617 - DNA, 75 bp, synthetic construct
  source 1..75: mol_type = other DNA
atatatccttttcagtaaactgtcagtgccggattcttatccgtgtccggcgcacgcactctacctcacctgtga

SEQ ID NO: 45618 - DNA, 75 bp, synthetic construct
  source 1..75: mol_type = other DNA
tcaggctgaataacgagcaacggtcagcagtacgcgaacgtctctctgagcgcggagcaaggcgacaggaaaggt

SEQ ID NO: 45619 - DNA, 75 bp, synthetic construct
  source 1..75: mol_type = other DNA
aggcaacttataaaccagctagaaccgtcagatattaacgatgatttaagaaaagatatattaaaaatcaatcag

SEQ ID NO: 45620 - DNA, 75 bp, synthetic construct
  source 1..75: mol_type = other DNA
gaatcatgattttactgatggaacaacaaaccagttgaacatcagcaactccctgattcatggttcaatcacttc

SEQ ID NO: 45621 - DNA, 75 bp, synthetic construct
  source 1..75: mol_type = other DNA
tcacactctgtctttatccccttctgctgctttcactctgtgtggagaatatgtacaacgcacatacccgcctca

SEQ ID NO: 45622 - DNA, 75 bp, synthetic construct
  source 1..75: mol_type = other DNA
agacactgcgtatactctccaaactggataagtacaccgaaaccaatgggctggatcccacccgtagacttattt

SEQ ID NO: 45623 - DNA, 75 bp, synthetic construct
  source 1..75: mol_type = other DNA
ggggattaaggccggaaaagtgagtatccccgtgatttccggtaatggtcagtttgccacggtagctgaagtcac

SEQ ID NO: 45624 - DNA, 75 bp, synthetic construct
  source 1..75: mol_type = other DNA
caggaagcaaaaaggctcaagaaaccgtattaaagcccgcttaaaggtcgcccgactccacgcgaaaatcgccga

SEQ ID NO: 45625 - DNA, 75 bp, synthetic construct
  source 1..75: mol_type = other DNA
aatctattcttgttaaaatgggttttgttggcgctgtagtggaaaatatatatttggattcaaaaccatttcggc

SEQ ID NO: 45626 - DNA, 75 bp, synthetic construct
  source 1..75: mol_type = other DNA
gcgcccggaagagggagctaacaagctgtcattagcactgaccctgatcccttcaggtgtgaattttgatgccga

SEQ ID NO: 45627 - DNA, 75 bp, synthetic construct
  source 1..75: mol_type = other DNA
tgccggtgattacttccagacgggatcatcaacaacgggatatgtgatacctgagcgaaattactggatgtcgct

SEQ ID NO: 45628 - DNA, 75 bp, synthetic construct
  source 1..75: mol_type = other DNA
aacatttgccgataccgcggcaggtggattagcgcccgtggagctgaccgctcagaccaccgcaattgaaagcat

SEQ ID NO: 45629 - DNA, 75 bp, synthetic construct
  source 1..75: mol_type = other DNA
catacaaacatggaatgaaggagcatcaacttaatgcgcagttgacgaagattgaccgggagagaactgatggtg

SEQ ID NO: 45630 - DNA, 75 bp, synthetic construct
  source 1..75: mol_type = other DNA
attctcgaccagtttctggatgaaaaagaaggtaaccacacaacggcataccgcgatgggtccggcatctggacc

SEQ ID NO: 45631 - DNA, 75 bp, synthetic construct
  source 1..75: mol_type = other DNA
ttgaacgactgcttgaagaaaaacgttctataccatctcaggtcatgaacgatccaaacttcaggcgtatgtact

SEQ ID NO: 45632 - DNA, 75 bp, synthetic construct
  source 1..75: mol_type = other DNA
gggtgattacttccagacgggggcatcgacaacaggttatgtgataccggagagaaattactggatgtcgctgag

SEQ ID NO: 45633 - DNA, 75 bp, synthetic construct
  source 1..75: mol_type = other DNA
ccgctacccgcatgggcagaagagaagggcggtaaaatcctcaccgcgggacgttggggagcgatgaacgtagaa

SEQ ID NO: 45634 - DNA, 75 bp, synthetic construct
  source 1..75: mol_type = other DNA
cgcgacattggtggctttgccaatatatccacgttagtaaaacaagagaaagccaaaaataaagccaccttttat

SEQ ID NO: 45635 - DNA, 75 bp, synthetic construct
  source 1..75: mol_type = other DNA
gcgcaccaatcccgtggccatcagataccgttccgtctggttatgccctgatgcaggggcagacttttgacaaat

SEQ ID NO: 45636 - DNA, 75 bp, synthetic construct
  source 1..75: mol_type = other DNA
tggataaccatgctttgacggtccggctaagaataaagaacacaactgaaggatgtacccattacgtggtttcgg

SEQ ID NO: 45637 - DNA, 75 bp, synthetic construct
  source 1..75: mol_type = other DNA
cgttcttgatcgctgtccatcaccgaaaaaaattggtttttacaccattggcgataaaagcatttacctgtatga

SEQ ID NO: 45638 - DNA, 75 bp, synthetic construct
  source 1..75: mol_type = other DNA
aactggtaaccagaaacaacatgaaatcattaaccactgaaacagcgctggatattctgattgcgtggctgcagg

SEQ ID NO: 45639 - DNA, 75 bp, synthetic construct
  source 1..75: mol_type = other DNA
aaagatgccaaatgatgatagtgaatggcaattgaacggtaaagatcgcgccggtaaatcctggtctgtgcctgt

SEQ ID NO: 45640 - DNA, 75 bp, synthetic construct
  source 1..75: mol_type = other DNA
cattgaattcaacataggggctgtcaccatgactactctcccaacccaatctcgccctgaaatcacgattatcaa

SEQ ID NO: 45641 - DNA, 75 bp, synthetic construct
  source 1..75: mol_type = other DNA
atgatgaaatatttgatggttttattgtctctattttctggttcggtactggggatggggcgagtgaatgaattg

SEQ ID NO: 45642 - DNA, 75 bp, synthetic construct
  source 1..75: mol_type = other DNA
ttgcgttccggcagtacccgtccgtggtgggaagtgcccccgtcgacggtttactccttcgccttttatatcttc

SEQ ID NO: 45643 - DNA, 75 bp, synthetic construct
  source 1..75: mol_type = other DNA
gttttcaaaacattcttcagagcattaagcccttacgactacacactgtattgcaggaagtgggtaaaaccaaat

SEQ ID NO: 45644 - DNA, 75 bp, synthetic construct
  source 1..75: mol_type = other DNA
gggccagcaacagcagggatagatgatttgggtgaaattttagctaaaatgaaacagagaacatcgagaggaata

SEQ ID NO: 45645 - DNA, 75 bp, synthetic construct
  source 1..75: mol_type = other DNA
atgttcctggaaaatcgcgtttatcagggatcgtccggcgcggtttatccctacggcgtgaccgatacgctgagc

SEQ ID NO: 45646 - DNA, 75 bp, synthetic construct
  source 1..75: mol_type = other DNA
gacagcaagtgattacctgccacagacaaattggccaacaactcaattaccaccaggatatacttgtgcagaacc

SEQ ID NO: 45647 - DNA, 75 bp, synthetic construct
  source 1..75: mol_type = other DNA
ctctgagtcgagaacctataacagaatcaatgattatgagaaaagacgaatgtcactttgattcaaaaaaagaag

SEQ ID NO: 45648 - DNA, 75 bp, synthetic construct
  source 1..75: mol_type = other DNA
agcgttggctgcactagccgcaactcgtgcccagcccgaaggtaaggcgctcatgctggttcttgccgccgacca

SEQ ID NO: 45649 - DNA, 75 bp, synthetic construct
  source 1..75: mol_type = other DNA
ggcaacagtgatccctgagcatctgctgcatcactcaaccacgctgaatattaaggggggaaagctaccacctga

SEQ ID NO: 45650 - DNA, 75 bp, synthetic construct
  source 1..75: mol_type = other DNA
ctatgataaccgtaccaattatgacgcgtattattctcccggttcaccgttgctcgatacccgtaaactctatag

SEQ ID NO: 45651 - DNA, 75 bp, synthetic construct
  source 1..75: mol_type = other DNA
ccgtgatggtgcggggatctggaccatctgccgtggtgccattctggtggatggtaagcctgttattcctggcat

SEQ ID NO: 45652 - DNA, 75 bp, synthetic construct
  source 1..75: mol_type = other DNA
cgagtttaatcgccttcttgggcttggtaatgaattacttcagcagcgacaggggctggtgaatgtaccgttacg

SEQ ID NO: 45653 - DNA, 75 bp, synthetic construct
  source 1..75: mol_type = other DNA
tcaaatttgtggtgcccgttgttgtggtggtcggggtattcatcgggcttaaaggctgtggtgatcccgcgtcgt

SEQ ID NO: 45654 - DNA, 75 bp, synthetic construct
  source 1..75: mol_type = other DNA
acggttacggcggacgttacaaccgtaatccggtcacggtggaaggccgggacaactggcaggttcgtctcgact

SEQ ID NO: 45655 - DNA, 75 bp, synthetic construct
  source 1..75: mol_type = other DNA
tattaactgaatttttaacacaatatggtgatattctgatttctattgaggacccaccagaactacctgcacaag

SEQ ID NO: 45656 - DNA, 75 bp, synthetic construct
  source 1..75: mol_type = other DNA
caacgccgggctgaatctgcaggagagtaacaaatggggcaacagcagccagtttaatttctggagcagtggccc

SEQ ID NO: 45657 - DNA, 75 bp, synthetic construct
  source 1..75: mol_type = other DNA
attcgccgccatgttgaggctaacggtggtcacttccctgccgatgtcgatcaaaaagtcgatcaggttgcgcgt

SEQ ID NO: 45658 - DNA, 75 bp, synthetic construct
  source 1..75: mol_type = other DNA
ggctgatgaaacgccggaaggccgcagtattgtgatcctcgccaagcagcgttttaacctgcgcgagcgcgatgt

SEQ ID NO: 45659 - DNA, 75 bp, synthetic construct
  source 1..75: mol_type = other DNA
ccggcagatgctctttaaggccctgctgggctggaacccggaagcgtgcggtaacccgattacctatgacggcgg

SEQ ID NO: 45660 - DNA, 75 bp, synthetic construct
  source 1..75: mol_type = other DNA
aaaacctgtattgcgcagtaccagcaacccaatgtgacatcggagaaaatccagcaaacgattattctcaataat

SEQ ID NO: 45661 - DNA, 75 bp, synthetic construct
  source 1..75: mol_type = other DNA
aatgccaccgcagccagtttggagaagcgcagaaaaacctgaagaagaaattcaaacgctattatcagtttggtt

SEQ ID NO: 45662 - DNA, 75 bp, synthetic construct
  source 1..75: mol_type = other DNA
atgcgcctccaggaagacgctaacggcgattcgctgaatattacccccgcatttgtcctggtccccgccgcgctg

SEQ ID NO: 45663 - DNA, 75 bp, synthetic construct
  source 1..75: mol_type = other DNA
atgggaaccactcagcaggtcattctgatcacaaccgtaacggcaggggcagcactggcacagcagcgttttgtc

SEQ ID NO: 45664 - DNA, 75 bp, synthetic construct
  source 1..75: mol_type = other DNA
gtggtttttgaggtcgatttgctgaagtctcaggaaataaacctggattatatccttggactgattttcgaacac

SEQ ID NO: 45665 - DNA, 75 bp, synthetic construct
  source 1..75: mol_type = other DNA
ggccaaaaggtgttttgaatcagcatatctacaaggtatttgcaaatgaaaatgttcatgaacactggctgtatt

SEQ ID NO: 45666 - DNA, 75 bp, synthetic construct
  source 1..75: mol_type = other DNA
gcagtccgcgctggcccattttttcaatcccttcattgaaacggaatatcagggggttctgacggcacaacgctc

SEQ ID NO: 45667 - DNA, 75 bp, synthetic construct
  source 1..75: mol_type = other DNA
cttatgatggaatgaaggttgtagctgcttcgatggctccagtaataggtgctgcggcggccagtaagatagaag

SEQ ID NO: 45668 - DNA, 75 bp, synthetic construct
  source 1..75: mol_type = other DNA
tttgtgatgcggatgatttgtggcacgagaaaaaattagagcgtcaaatcgaagtgttaaataatgaatgtgtag

SEQ ID NO: 45669 - DNA, 75 bp, synthetic construct
  source 1..75: mol_type = other DNA
aaagtttctttccagccaacagattactgagctggttcaggaattgatcgatacccaaaatctgggtgtcggttc

SEQ ID NO: 45670 - DNA, 75 bp, synthetic construct
  source 1..75: mol_type = other DNA
gccactgacgcactgaacagggcaaaacaacagtcggggaatgatgatccgtacggcgataatataccgttttaa

SEQ ID NO: 45671 - DNA, 75 bp, synthetic construct
  source 1..75: mol_type = other DNA
tcaggttatcgcagacagtgtaatcagtgccagtgctgcccgtcctggcgggagccgacgcaagaccacaggcac

SEQ ID NO: 45672 - DNA, 75 bp, synthetic construct
  source 1..75: mol_type = other DNA
gaaatgcagaaatatgaacggtgaatatatctggccctggatattgcccttttccgcagcagggatgaaacattc

SEQ ID NO: 45673 - DNA, 75 bp, synthetic construct
  source 1..75: mol_type = other DNA
aggaggtggacgaccatcgttgggtgagccatggaaggatttaggtattagcagaaggaagtatttctatttaaa

SEQ ID NO: 45674 - DNA, 75 bp, synthetic construct
  source 1..75: mol_type = other DNA
atgagaaatgacggtcaacaattagggaagcctactgccaaccatcccaaatacttcaagattgacgttcttgat

SEQ ID NO: 45675 - DNA, 75 bp, synthetic construct
  source 1..75: mol_type = other DNA
gtagtctgttcgggtacgatgctgacgatctatggattaccaattgacatgctgaagcaaagcgtaagtttgcag

SEQ ID NO: 45676 - DNA, 75 bp, synthetic construct
  source 1..75: mol_type = other DNA
aaagacttcgttaaactgtttggtgaatacctgcgtgccgagaacatcctgcaaaactatgatgaatttgccacg

SEQ ID NO: 45677 - DNA, 75 bp, synthetic construct
  source 1..75: mol_type = other DNA
taccgcgattaacaacatcaaaaaattctggtcgctgacggcgaaaggctgcatgttcggcaagaacatcaccag

SEQ ID NO: 45678 - DNA, 75 bp, synthetic construct
  source 1..75: mol_type = other DNA
agaaagcgacctgcctgtatataatcagcaagtggtgtttatatttgatgaatgccaccgcagccagtttggaga

SEQ ID NO: 45679 - DNA, 75 bp, synthetic construct
  source 1..75: mol_type = other DNA
tcctgtcatcttctctggccgggcttctggtgatgagtggtggggtgagtgcgcaggaagaaaaatacacagtgc

SEQ ID NO: 45680 - DNA, 75 bp, synthetic construct
  source 1..75: mol_type = other DNA
aactgactgactgggttgaaaaggaaaaagaacgtgagcgattggaagatgaggcattggaacaacggtttgaat

SEQ ID NO: 45681 - DNA, 75 bp, synthetic construct
  source 1..75: mol_type = other DNA
atgaacagtttaacggcaaataaccgttggtcgcaacagctggtggtccgcgtggctgaacacctgttgttacgg

SEQ ID NO: 45682 - DNA, 75 bp, synthetic construct
  source 1..75: mol_type = other DNA
atgacaatcgtaaaaacccataccggcaccgtgatcaccaaagacggtccgcaggtaaaaaaactgcaccaaaca

SEQ ID NO: 45683 - DNA, 75 bp, synthetic construct
  source 1..75: mol_type = other DNA
ctgaaaggtaacgcctttaccctggtactacgcgaagtgagcaatcgcgatgacgttgaacaacgtctgatcgat

SEQ ID NO: 45684 - DNA, 75 bp, synthetic construct
  source 1..75: mol_type = other DNA
ggcaacgcacatggaggccgtaaaccactgtctgctgacccgtcaggaactgctggaatatgcccgcgataacca

SEQ ID NO: 45685 - DNA, 75 bp, synthetic construct
  source 1..75: mol_type = other DNA
acatgatgaaaagatcctgcgttcccagggcttcagcaaccttgttattctgtctgacaaaagcacatttggcga

SEQ ID NO: 45686 - DNA, 75 bp, synthetic construct
  source 1..75: mol_type = other DNA
ctgattgcgtggctgcaggacaatattgactgcgaatcagggattatcttcgacaacgatgaggataaaacggat

SEQ ID NO: 45687 - DNA, 75 bp, synthetic construct
  source 1..75: mol_type = other DNA
cgcgacacatatggaggccgtaaaccactgtttgctgacgcgtgatgcgctcaaggaatacgccagagataatca

SEQ ID NO: 45688 - DNA, 75 bp, synthetic construct
  source 1..75: mol_type = other DNA
ggacaggttaagccgcagtttgattacatcattaagctggcccagcttctggaagtcagtattgaccacctgctg

SEQ ID NO: 45689 - DNA, 75 bp, synthetic construct
  source 1..75: mol_type = other DNA
gttaaaagaactgtgtaagcaggttgatgagcttaaagcagacgatcaggaagtgatctgccgtattctggatat

SEQ ID NO: 45690 - DNA, 75 bp, synthetic construct
  source 1..75: mol_type = other DNA
cgtatgccacaggtaacaataaatgggggaatacctatgaagttgtaaagacaggcgataatggtaacttcaaat

SEQ ID NO: 45691 - DNA, 75 bp, synthetic construct
  source 1..75: mol_type = other DNA
gcggttacaatttcgataagatcttatgggcgatttttatcggtatcatgcttctatgataagccatttataaaa

SEQ ID NO: 45692 - DNA, 75 bp, synthetic construct
  source 1..75: mol_type = other DNA
atgccggcgcatttttgttgtggacagcgactgtttccgtggccggcgcttccctgaatacggcacagatagtgg

SEQ ID NO: 45693 - DNA, 75 bp, synthetic construct
  source 1..75: mol_type = other DNA
atatgccgtgatgcaggaacagtttggtctgggcgtggatgatgcgaaacatggctttactgtggatgagttagc

SEQ ID NO: 45694 - DNA, 75 bp, synthetic construct
  source 1..75: mol_type = other DNA
tcaggccgcggaggatggtaatgccgcttttgcgctctggcagccctacagttgctgcaagaagcgggggcagcg

SEQ ID NO: 45695 - DNA, 75 bp, synthetic construct
  source 1..75: mol_type = other DNA
aagcgcgggatattcagctggcaatggaattgatcaccctgggcgctcgtttgcagatgctggaaagcgaaacac

SEQ ID NO: 45696 - DNA, 75 bp, synthetic construct
  source 1..75: mol_type = other DNA
ctacattctgggcgttgacccgcgtgaagcccccgtccggcttgacctgtctgcgcccagggttatccaggagcc

SEQ ID NO: 45697 - DNA, 75 bp, synthetic construct
  source 1..75: mol_type = other DNA
tggtggacatccgtctgctggaccatctggtggtgggcgggatagacattgtgtcctttgctgaacgcggctggt

SEQ ID NO: 45698 - DNA, 75 bp, synthetic construct
  source 1..75: mol_type = other DNA
gaacaataaatgaaatgagttcttatactccgcacatgaaagtaaacagaattgctgaacggttgagtaaggtgc

SEQ ID NO: 45699 - DNA, 75 bp, synthetic construct
  source 1..75: mol_type = other DNA
atgcctcacacgataaaaaaaatgagtctgataggactcatattgatgatctttacttccgtatttggttttgcc

SEQ ID NO: 45700 - DNA, 75 bp, synthetic construct
  source 1..75: mol_type = other DNA
tatggagcatatgcagtcgagcggttcgttaacatttggagattgctacatatcacttaacgagttcgccgccca

SEQ ID NO: 45701 - DNA, 75 bp, synthetic construct
  source 1..75: mol_type = other DNA
aaagtatatatataattttaaaggggaggtggtcaatgaattaatatatgacattgatagtgatgagcaacatat

SEQ ID NO: 45702 - DNA, 75 bp, synthetic construct
  source 1..75: mol_type = other DNA
ccagcagatttacgagatgtcacagcacatcctgaagcgtatgccgccggatgaagcctactggtgcacgccgga

SEQ ID NO: 45703 - DNA, 75 bp, synthetic construct
  source 1..75: mol_type = other DNA
taatcctgctggcggcttgcagcctggcggcgatggcgacggcggcgttcagagtgcccgccttgctggggtatc

SEQ ID NO: 45704 - DNA, 75 bp, synthetic construct
  source 1..75: mol_type = other DNA
gtccctataacattggccccggtaagtgtttcccgtcgacgttttataagcggcttaatgccggtgatcgtaaag

SEQ ID NO: 45705 - DNA, 75 bp, synthetic construct
  source 1..75: mol_type = other DNA
aaataggtgattttacgctaccaaagactgacgcaggcactaaccgggttatacatcttctggcaccagcaattg

SEQ ID NO: 45706 - DNA, 75 bp, synthetic construct
  source 1..75: mol_type = other DNA
tgctgaacggtgttgccggtaatattgataatgtggcaacagccgcgggggcgctggttgccgtcggggttgccc

SEQ ID NO: 45707 - DNA, 75 bp, synthetic construct
  source 1..75: mol_type = other DNA
cgaacatagccccggacagttccgcgatgtgccgtttggcgaaggctgtgtcgattttgttggcatcttcaaaac

SEQ ID NO: 45708 - DNA, 75 bp, synthetic construct
  source 1..75: mol_type = other DNA
atggcgacattacgtgaactgattattaaaatttcggcaaattcccggtcattccagtcagagatcgcccgggct

SEQ ID NO: 45709 - DNA, 75 bp, synthetic construct
  source 1..75: mol_type = other DNA
gatgctgggctcatgcgcggcgcaaaatccacgatgtatatatcagtaccaaaagcgcgacggcggaagaagcac

SEQ ID NO: 45710 - DNA, 75 bp, synthetic construct
  source 1..75: mol_type = other DNA
aactatttccggtggtcaacatgcttccagcactacttctggcaatgcctctttccgccgcctggagcgcctggt

SEQ ID NO: 45711 - DNA, 75 bp, synthetic construct
  source 1..75: mol_type = other DNA
atcctcgaccagtttctggatgaaaaggaaggtaaccacaccacggcataccgtgatggtgcggggatctggacc

SEQ ID NO: 45712 - DNA, 75 bp, synthetic construct
  source 1..75: mol_type = other DNA
ttttattggttagtttattgccaaacattgctaaatccaattctctatcatggtatggtatcctaagaggagata

SEQ ID NO: 45713 - DNA, 75 bp, synthetic construct
  source 1..75: mol_type = other DNA
gaggcagcgagtggtctggttggtctgattgaccagcgtgtgcgtgcagtaatgctgtccatgcgacgtgacggg

SEQ ID NO: 45714 - DNA, 75 bp, synthetic construct
  source 1..75: mol_type = other DNA
aatatggacattattctctggcatggttttccgtttgccggaacgcattccggagaatattgcggcgttctgctc

SEQ ID NO: 45715 - DNA, 75 bp, synthetic construct
  source 1..75: mol_type = other DNA
gaaactgtcgaaggaaaaatgcgcccaggttaacgccattgagcgggataaggcgctggcatgggtggagcgtaa

SEQ ID NO: 45716 - DNA, 75 bp, synthetic construct
  source 1..75: mol_type = other DNA
cgataaagtactcaaaagcctcgagacacacgttttcccctttatcggcaaccgggatatcacaacactcagtac

SEQ ID NO: 45717 - DNA, 75 bp, synthetic construct
  source 1..75: mol_type = other DNA
ctgattgaatcaggtttgtggtcccgcgatgctgttgaaaggcagatgagtcatcaggagcgtaacggagtacga

SEQ ID NO: 45718 - DNA, 75 bp, synthetic construct
  source 1..75: mol_type = other DNA
tactggcgttgccgggcattatctttttagttctctttcccatcatactgtcgctatggattgccttcctttggg

SEQ ID NO: 45719 - DNA, 75 bp, synthetic construct
  source 1..75: mol_type = other DNA
ctgacggcggataaagtcgttcctgcgttaatcagccagctgggggtattgcgtgatgaatatgccgccatgccg

SEQ ID NO: 45720 - DNA, 75 bp, synthetic construct
  source 1..75: mol_type = other DNA
ctgacaccaacaactctgctggagatgctacaggataaatatcccggccagtatcccaacagctttcgaagaaca

SEQ ID NO: 45721 - DNA, 75 bp, synthetic construct
  source 1..75: mol_type = other DNA
tcggatttagaactaactacagaaaaaatatatattcaacggataaaaaatggattcagtacagtccatccactt

SEQ ID NO: 45722 - DNA, 75 bp, synthetic construct
  source 1..75: mol_type = other DNA
ttggaatagtagagcatctttattttgttcaactgaattaaactcgaaatcacaatcgcctgcattaggtttggg

SEQ ID NO: 45723 - DNA, 75 bp, synthetic construct
  source 1..75: mol_type = other DNA
atcatgaaattaatttactacttcaatctgtaaaacaaaagagttgctcttcacgcgatgtttgcatgattttat

SEQ ID NO: 45724 - DNA, 75 bp, synthetic construct
  source 1..75: mol_type = other DNA
agtcttcatcctccaataccccgtagagatgctcagttagccctaaaacgagagattgttttagaatcattggct

SEQ ID NO: 45725 - DNA, 75 bp, synthetic construct
  source 1..75: mol_type = other DNA
tgccactcagcaaacaggctgtagccatactgacagaacttcagacatgggctggtgaaaatggtctgatattta

SEQ ID NO: 45726 - DNA, 75 bp, synthetic construct
  source 1..75: mol_type = other DNA
tgcagattctttatccggcacgttttcaatctagccaaaaccagaatgggtttaaaccacaggaacaggaggtga

SEQ ID NO: 45727 - DNA, 75 bp, synthetic construct
  source 1..75: mol_type = other DNA
agtatcgcttttggtctgagcattggttttgtggcctcggtggggatctcttttaccctgaaaaccgggctgctc

SEQ ID NO: 45728 - DNA, 75 bp, synthetic construct
  source 1..75: mol_type = other DNA
cgaacaccacatcttgtgccactcagcaaacaggctgtagccatactgacagaacttcagacatgggctggtgaa

SEQ ID NO: 45729 - DNA, 75 bp, synthetic construct
  source 1..75: mol_type = other DNA
gtatgtcacggacacaccggaaaagacatcattcccggtaaaacgtataccgaagcagaatgcaaagccctcctg

SEQ ID NO: 45730 - DNA, 75 bp, synthetic construct
  source 1..75: mol_type = other DNA
gtcttcgacggcgagctgaactttgccctcagactggcgcgtgagatggggagacccgactggcgcgccatgctt

SEQ ID NO: 45731 - DNA, 75 bp, synthetic construct
  source 1..75: mol_type = other DNA
cgcagcgataaaacgtgccggactccgccatcgaaaatcatatcagtcgagacatacttatgcctgctggtcgct

SEQ ID NO: 45732 - DNA, 75 bp, synthetic construct
  source 1..75: mol_type = other DNA
tggaaggtgtcagctacataccatataaagatatcgttggtgtatggactgtatgtcacggacacaccggaaaag

SEQ ID NO: 45733 - DNA, 75 bp, synthetic construct
  source 1..75: mol_type = other DNA
gcgatgctgtggaacgtcagatgagccatcaggagcgtaatggtgtacgtgctgcgtatatccataaagcagaac

SEQ ID NO: 45734 - DNA, 75 bp, synthetic construct
  source 1..75: mol_type = other DNA
tcacgcttaaagcccgtactgtttacatcactgatgaacagtatgctgcgatatatgcggaagcaattccacagt

SEQ ID NO: 45735 - DNA, 75 bp, synthetic construct
  source 1..75: mol_type = other DNA
gcccgttgagtatgttgatgctggcagagtaattctgatgcctccctcagtggcaaaagacatggtcaagagcgg

SEQ ID NO: 45736 - DNA, 75 bp, synthetic construct
  source 1..75: mol_type = other DNA
tgtaaattcggactcgaaaaagaaaccaaggattccgttaaaaaattccttaatgctgagaaggttctcacgcaa

SEQ ID NO: 45737 - DNA, 75 bp, synthetic construct
  source 1..75: mol_type = other DNA
catttgttcgtgaccgatggcgtggtgaaaatccgcaatgcgaagtataagagcgatactggcccactcgatcct

SEQ ID NO: 45738 - DNA, 75 bp, synthetic construct
  source 1..75: mol_type = other DNA
gaacacaatggcgtggaattacagacggcatcctggtacaccattgcccggatgcatacaacagggttaagtggt

SEQ ID NO: 45739 - DNA, 75 bp, synthetic construct
  source 1..75: mol_type = other DNA
tcggttccatgttcgctgttaggccagcaactggaagcatggatctccggagaactggtaagactcttcaatcag

SEQ ID NO: 45740 - DNA, 75 bp, synthetic construct
  source 1..75: mol_type = other DNA
tcgagcaatcccacggctcagcgcgtttccgctgggtcaaggcgccgaccagcccagagctcacccagctgacgc

SEQ ID NO: 45741 - DNA, 75 bp, synthetic construct
  source 1..75: mol_type = other DNA
agaaggggcggcacgatcagttgcttaccgcacttcgcgcgctgctgttaagccgcaagaatccgtttggcgata

SEQ ID NO: 45742 - DNA, 75 bp, synthetic construct
  source 1..75: mol_type = other DNA
gaaaagacatcatgctcggtaaaacgtataccgaagcagaatgcaaagccctcctgaataaagaccttgccacgg

SEQ ID NO: 45743 - DNA, 75 bp, synthetic construct
  source 1..75: mol_type = other DNA
aattcaccaattgttatttgtaatgagcaacatagatttatagttgcagaacaattaagaatggtaaacaggtta

SEQ ID NO: 45744 - DNA, 75 bp, synthetic construct
  source 1..75: mol_type = other DNA
atcagaatcaggagcaggccagagaatctgcacgccagtatgccgcaaaaatcgacgaaattcgccagaaaacgt

SEQ ID NO: 45745 - DNA, 75 bp, synthetic construct
  source 1..75: mol_type = other DNA
ggtgaaggccggtctgaagcataactgcgctgcggtcatcgtcgcacacagccatccctccggggaggcggaacc

SEQ ID NO: 45746 - DNA, 75 bp, synthetic construct
  source 1..75: mol_type = other DNA
gcgcaattcgttgagaaacctaatcttgaaacggctgaagcctacgtttcctgcggtgaatactactggaatagt

SEQ ID NO: 45747 - DNA, 75 bp, synthetic construct
  source 1..75: mol_type = other DNA
gttcgggaagtcgcttgtggccactttcacgagaaaagttccccaagcagtttttaaagttgactggcagtttga

SEQ ID NO: 45748 - DNA, 75 bp, synthetic construct
  source 1..75: mol_type = other DNA
cacgcgtatccagacggtatatcagccggggagcttcgcgccgctcatccgcatcgaaacagacaacggcgagcg

SEQ ID NO: 45749 - DNA, 75 bp, synthetic construct
  source 1..75: mol_type = other DNA
gtatgggcgtggcccgtaaagatctgaaggcaatggcggatgacggaaaactgacagcggataaagtggtccccg

SEQ ID NO: 45750 - DNA, 75 bp, synthetic construct
  source 1..75: mol_type = other DNA
atgaacacaaaaatcaaatacggcctgtcggctgccgttctggcgctgattgccgcaggggcttctgcgcctgaa

SEQ ID NO: 45751 - DNA, 75 bp, synthetic construct
  source 1..75: mol_type = other DNA
ggtcatcgtagctgttctcggggcatcaagttacacatgggcagaggccacctggtctcagcagcttgaagactg

SEQ ID NO: 45752 - DNA, 75 bp, synthetic construct
  source 1..75: mol_type = other DNA
cgtgagcggatcctgacagtattacgtgaccgggaaaaaaaactgcagcatcgtgtggcggattcagtaggacgc

SEQ ID NO: 45753 - DNA, 75 bp, synthetic construct
  source 1..75: mol_type = other DNA
caaaaagcaggtatcgcgtcattttgcccctataacattggccccggtaagtgtttcccgtcgacgttttataag

SEQ ID NO: 45754 - DNA, 75 bp, synthetic construct
  source 1..75: mol_type = other DNA
agtttggtggcaagggacaggctgcaaaccatgccgattacatcgagcgcaaagagaaataccgcgaccgtcaag

SEQ ID NO: 45755 - DNA, 75 bp, synthetic construct
  source 1..75: mol_type = other DNA
ggggggaaaggtacgcgttatctccacccatgacggtgacgacaatccgttcaatacgcttatcggggatatccg

SEQ ID NO: 45756 - DNA, 75 bp, synthetic construct
  source 1..75: mol_type = other DNA
ccctcccatttctggcaggcggctgaccagtttgaacgtgcaaacggttcgacttatcgggaactggagatagcg

SEQ ID NO: 45757 - DNA, 75 bp, synthetic construct
  source 1..75: mol_type = other DNA
gtgagtcagaaagtccgttatggtttatcggctgcggttctggcgctgattgccgcaggtgcttctgcgcctgac

SEQ ID NO: 45758 - DNA, 75 bp, synthetic construct
  source 1..75: mol_type = other DNA
gaaacggtctctgacgggatcacaaaggtggaaaacgcctttatggcctgggtgggtggtgcgaatgaggccagc

SEQ ID NO: 45759 - DNA, 75 bp, synthetic construct
  source 1..75: mol_type = other DNA
tcactgcgatgatcgaaacgggtgttgctattccgtcaatgtgcctgtccgcacatcgtcgttttccttttggta

SEQ ID NO: 45760 - DNA, 75 bp, synthetic construct
  source 1..75: mol_type = other DNA
taaacgccgctggcggcggccccgaagggatgagtcccatggacgggaggaataaccttgctcccgttttgcctg

SEQ ID NO: 45761 - DNA, 75 bp, synthetic construct
  source 1..75: mol_type = other DNA
ttgcaacgggtaaaaatgccaatgttatgtcgcaggaggaatgggaagcgttgcctgcgcttttatccggattta

SEQ ID NO: 45762 - DNA, 75 bp, synthetic construct
  source 1..75: mol_type = other DNA
tggaaggtgtcagttacataccatacaaagatattgttggcgtatggactgtatgttacggacacactggaaaag

SEQ ID NO: 45763 - DNA, 75 bp, synthetic construct
  source 1..75: mol_type = other DNA
tgatatgaaaaattttatgcttaagttttccagagatgcatttggatatcttgaaccgataagaaacacagtgta

SEQ ID NO: 45764 - DNA, 75 bp, synthetic construct
  source 1..75: mol_type = other DNA
atgcctccatcattacgcaaggctgttgcagctgctattggtggcggggctattgccatagcgtctgtgctcatc

SEQ ID NO: 45765 - DNA, 75 bp, synthetic construct
  source 1..75: mol_type = other DNA
gccggtacatcagccgcccggcggtatccgagaagcggctgtcgttaacacgaggcggcaacgtgcgctaccagc

SEQ ID NO: 45766 - DNA, 75 bp, synthetic construct
  source 1..75: mol_type = other DNA
gtccgtacaacatcgggccttcgaaatgcttcacctcaacgttttaccggaaactgaacgccggagaccggaaag

SEQ ID NO: 45767 - DNA, 75 bp, synthetic construct
  source 1..75: mol_type = other DNA
ggcgtccggtgagtgtgacggaaggcggactgacgcgcagcatggggtatgacgccgccgggcgcatcaccacgc

SEQ ID NO: 45768 - DNA, 75 bp, synthetic construct
  source 1..75: mol_type = other DNA
tggaatagcggtgtttatgatgcagatatcagtggtgcatcgacattaatcctccacttcaatatgaatgcgggg

SEQ ID NO: 45769 - DNA, 75 bp, synthetic construct
  source 1..75: mol_type = other DNA
acgcgaacctcagcgcgacaaacccacccgctattccgcactggtggaagcgtcaaccgcttattcccaaccttc

SEQ ID NO: 45770 - DNA, 75 bp, synthetic construct
  source 1..75: mol_type = other DNA
gttaccgacgtggtgctgatcacgcgtgacaactttaaagaagaactggagaaaaaaggtttaggcggtaagtaa

SEQ ID NO: 45771 - DNA, 75 bp, synthetic construct
  source 1..75: mol_type = other DNA
atgaaacagatttctttatttattcctctgctgggaaccttattactttccggctgtgcaggaacgaactctgat

SEQ ID NO: 45772 - DNA, 75 bp, synthetic construct
  source 1..75: mol_type = other DNA
agtgccgccgtggtggctcaggcgcagacggtgggaaaactgctgggtcaggttctcagccaggaaaccctgccg

SEQ ID NO: 45773 - DNA, 75 bp, synthetic construct
  source 1..75: mol_type = other DNA
gggcaaaccgtcacagataatgtgcaaagagcacccagaacaatcactattagtggtgtcgttgtagttggctat

SEQ ID NO: 45774 - DNA, 75 bp, synthetic construct
  source 1..75: mol_type = other DNA
tgaaagggatccgcaattttgagaataaagttacggtaactttagcattacaggacaaagaacgctttgacggtg

SEQ ID NO: 45775 - DNA, 75 bp, synthetic construct
  source 1..75: mol_type = other DNA
cagccgggaagagcgtgaggcactggaagccaggcaacaggccatgatggaagggcagcaggagggcagacatgt

SEQ ID NO: 45776 - DNA, 75 bp, synthetic construct
  source 1..75: mol_type = other DNA
gtgcatcacaacatcccggataagaaagatattccgtggctgttgaacattgtcgaagtattgaaaggcaatgag

SEQ ID NO: 45777 - DNA, 75 bp, synthetic construct
  source 1..75: mol_type = other DNA
aatgcggcactgttcactggccggatggagttaccccgccttctgatgcttccccgttttgcagacatcttgcag

SEQ ID NO: 45778 - DNA, 75 bp, synthetic construct
  source 1..75: mol_type = other DNA
actcaggtaaagatggtatctattttcaccttagagataatgtagaatcttttcttgccttaacagctactgaac

SEQ ID NO: 45779 - DNA, 75 bp, synthetic construct
  source 1..75: mol_type = other DNA
tggtcagttttattgaagagcatctggatctcggcgtgaccaccgtggaccatgctgatatttatggtggctatc

SEQ ID NO: 45780 - DNA, 75 bp, synthetic construct
  source 1..75: mol_type = other DNA
gtgatccagctcagttgttggcagtccttgataattcaatcatggttaaatattttaaagaagagaagccaactt

SEQ ID NO: 45781 - DNA, 75 bp, synthetic construct
  source 1..75: mol_type = other DNA
ggcatacagacgctggcgacctacgaacaggatgcgcgggggcggctgacagaagcggatgcgcggctggactac

SEQ ID NO: 45782 - DNA, 75 bp, synthetic construct
  source 1..75: mol_type = other DNA
tttggaaaatttcagaagtatatctaagtataattacaatagctttaactacatattatttacctaggctatcac

SEQ ID NO: 45783 - DNA, 75 bp, synthetic construct
  source 1..75: mol_type = other DNA
aatgttcctggaactgctggagatattggcggttctataggatccgagctaggtggaaaagtaacagataaagta

SEQ ID NO: 45784 - DNA, 75 bp, synthetic construct
  source 1..75: mol_type = other DNA
cagtgcgaagacaacgcttcgctacgcgaggcgctaaccctgtacaaatacgatagcgccgggagtcggatgttc

SEQ ID NO: 45785 - DNA, 75 bp, synthetic construct
  source 1..75: mol_type = other DNA
gattgatacatatcgcaaatttgaagacctctcattgattcagttctaccatgagatatgggcccgtaaattgtt

SEQ ID NO: 45786 - DNA, 75 bp, synthetic construct
  source 1..75: mol_type = other DNA
cgagagaggtgaagaagtggctggatatagatacatatcgcggattcgaagagcttccgcttatacacctctacc

SEQ ID NO: 45787 - DNA, 75 bp, synthetic construct
  source 1..75: mol_type = other DNA
gtacagaacgctgtcatggttaagttcgacacatgtgaaaacatcaccgttgatatggttattagcgcacaggaa

SEQ ID NO: 45788 - DNA, 75 bp, synthetic construct
  source 1..75: mol_type = other DNA
acactggcaaagatggcgtttactttcatctacaaggccaaccagataatttcttgtcactatcagcaactgaaa

SEQ ID NO: 45789 - DNA, 75 bp, synthetic construct
  source 1..75: mol_type = other DNA
tgctgcgcatacctgcatattccgttctttgtggatgagggaaacaaaaagcaggtcttctggttggttcgtgtt

SEQ ID NO: 45790 - DNA, 75 bp, synthetic construct
  source 1..75: mol_type = other DNA
cgcgaatctgcccggtctgcgggtcgatactgtcgctggcgatgatgtggtcaatattatcgagcacggacaggc

SEQ ID NO: 45791 - DNA, 75 bp, synthetic construct
  source 1..75: mol_type = other DNA
ttgctattgtttttatccttggcctgctggccatgttgatgccgctgtcgattgatatgtatctgcccgcgctac

SEQ ID NO: 45792 - DNA, 75 bp, synthetic construct
  source 1..75: mol_type = other DNA
gaagaaacctacagcgattttaaaacgctgatactgctatttggtttccgggatcataaatcgctttataccctt

SEQ ID NO: 45793 - DNA, 75 bp, synthetic construct
  source 1..75: mol_type = other DNA
aggtacggagagagagccggaagccccggtcagtaaccgaaccctgatgagtctgctggcgtccggcgaagacct

SEQ ID NO: 45794 - DNA, 75 bp, synthetic construct
  source 1..75: mol_type = other DNA
tgccggaagtccggcgcagatgcggcgggcggaaggcattagttttaatcagaacaatcacgtggtgattcagaa

SEQ ID NO: 45795 - DNA, 75 bp, synthetic construct
  source 1..75: mol_type = other DNA
tgtggaggtggacaaggttgcagaggctttcggaaaactgaccaccgacccgacgtcggggctgatggcgatggc

SEQ ID NO: 45796 - DNA, 75 bp, synthetic construct
  source 1..75: mol_type = other DNA
ctgggcgcgggtcgatgaatcttccgataacaattctctccttaaccctgcgaagaagtttacgtaccaggctcc

SEQ ID NO: 45797 - DNA, 75 bp, synthetic construct
  source 1..75: mol_type = other DNA
gttcaggatatgagtacgattaaccatccccgggctgacctgagcaaagggcagtacggctgtgtcggacagggc

SEQ ID NO: 45798 - DNA, 75 bp, synthetic construct
  source 1..75: mol_type = other DNA
ccgaccagattaagcggatgcaggacgtcattagcaaccccaaacgactggatggagttctgatcctacccacgt

SEQ ID NO: 45799 - DNA, 75 bp, synthetic construct
  source 1..75: mol_type = other DNA
gaatgcgtgctgtgtggcggccggatggtataccgccgggccattacggggctgaatgtatcagggctgaagaaa

SEQ ID NO: 45800 - DNA, 75 bp, synthetic construct
  source 1..75: mol_type = other DNA
gaacaaaccggaagaagacccggacattccgggtatcgggtattacggttcgaaatggcgtgacagctcagccac

SEQ ID NO: 45801 - DNA, 75 bp, synthetic construct
  source 1..75: mol_type = other DNA
gcccggtggccatcacgccttatactctgatgcaggccattgcggcggaaggtgatgtcaccacacctgtgttgg

SEQ ID NO: 45802 - DNA, 75 bp, synthetic construct
  source 1..75: mol_type = other DNA
acgttacccctttacccagtttcacatctcccgacaaatctatatgggcgtctgggactcgctattgtacgaagg

SEQ ID NO: 45803 - DNA, 75 bp, synthetic construct
  source 1..75: mol_type = other DNA
tgctggaaaacgaggtggtacacggttcgctggaggtgcaggacggcgaaatccgcgcctttgccgaaagccaga

SEQ ID NO: 45804 - DNA, 75 bp, synthetic construct
  source 1..75: mol_type = other DNA
tcttggatgttctgccagcattagcaatataggtgaagtatatgaagggaaagatataactgatagagcagaaag

SEQ ID NO: 45805 - DNA, 75 bp, synthetic construct
  source 1..75: mol_type = other DNA
tgaaggccaccgctggcagtaccgctacgataaagacacgctgcaactgacagaagtcattaacccgcagggcga

SEQ ID NO: 45806 - DNA, 75 bp, synthetic construct
  source 1..75: mol_type = other DNA
ggcgtctattcagactgaagtattccgtctgccttcgacctgctttgctgaagaagatggttctatcgctaactc

SEQ ID NO: 45807 - DNA, 75 bp, synthetic construct
  source 1..75: mol_type = other DNA
tgacgtttgacgacgttctcctcgttcctgctcattctaccgttctgccgaatactgctgacctcagcacccagc

SEQ ID NO: 45808 - DNA, 75 bp, synthetic construct
  source 1..75: mol_type = other DNA
aacgcgaagcgcgtagccgttgcccgtccggttgtgttgctgtattcgccgcccgtattcgtcaggaggtgtgcc

SEQ ID NO: 45809 - DNA, 75 bp, synthetic construct
  source 1..75: mol_type = other DNA
gtctctttatgaaacgcataaacttaccagttatccacgttctgatagttcttatttgcctgaatctcaacacgc

SEQ ID NO: 45810 - DNA, 75 bp, synthetic construct
  source 1..75: mol_type = other DNA
tgcagtggttatcccaattgtaaagagtcgtacccagatattaaaggtagtccaaactataaccccataaaacgc

SEQ ID NO: 45811 - DNA, 75 bp, synthetic construct
  source 1..75: mol_type = other DNA
accgaataaaattggtgctggaaaaaacaggacttaagcaggcagaactagcccgcaggattggtgttgcccaac

SEQ ID NO: 45812 - DNA, 75 bp, synthetic construct
  source 1..75: mol_type = other DNA
aaatcaaagacaagaaaaaatcaatggaagaaaccattgcccggtggttggcggcacaaaaaagccgccgggcgt

SEQ ID NO: 45813 - DNA, 75 bp, synthetic construct
  source 1..75: mol_type = other DNA
atgtctgatatcacagtctcccgtccggaagttgtcaacgggcatacggacgttatctgctcaagcagtatcctc

SEQ ID NO: 45814 - DNA, 75 bp, synthetic construct
  source 1..75: mol_type = other DNA
cacatgctgaccgtacgaaagagcatgctgctgcaaatcgagacaatcatccggcatcgagtgagcgatatcagt

SEQ ID NO: 45815 - DNA, 75 bp, synthetic construct
  source 1..75: mol_type = other DNA
gcgaaaagtatcagtatcgcccagctgtcaggcttacaactggtgatttacgatgcgtatcgcccacaacaagca

SEQ ID NO: 45816 - DNA, 75 bp, synthetic construct
  source 1..75: mol_type = other DNA
taccaggaaattcgaccgtcgatctgcgggaagttgcggtgccgacgccggggattaaccaggtactgatcaaaa

SEQ ID NO: 45817 - DNA, 75 bp, synthetic construct
  source 1..75: mol_type = other DNA
gcggattatcggctcctgggtgaccagtctgttccatatggaaaaatgcgcccatgatctgacggactggaagct

SEQ ID NO: 45818 - DNA, 75 bp, synthetic construct
  source 1..75: mol_type = other DNA
cgcgcctggttactccagttcctgaaggcagaggtgacacggcaggctgatgtgagcaggatacagccgttgatt

SEQ ID NO: 45819 - DNA, 75 bp, synthetic construct
  source 1..75: mol_type = other DNA
atgaaaacgatgctggcagcttatttaccaggaaattcgaccgtcgatctgcgggaagttgcggtgccgacgccg

SEQ ID NO: 45820 - DNA, 75 bp, synthetic construct
  source 1..75: mol_type = other DNA
cattgatgctcaggcgtttggcggctatttgctgggatataaagcgctcagtgatgccggtctgcgccctgaacg

SEQ ID NO: 45821 - DNA, 75 bp, synthetic construct
  source 1..75: mol_type = other DNA
cggaaagtgatgagcagaaatctcgcagagtgtttccgtattcaaaaaaacagagagcgctctgcaaatagtgag

SEQ ID NO: 45822 - DNA, 75 bp, synthetic construct
  source 1..75: mol_type = other DNA
tgagaaagatggtacggcaactggcagcaatattagcgccggaggctcgctgattgtctataccggcggtattgc

SEQ ID NO: 45823 - DNA, 75 bp, synthetic construct
  source 1..75: mol_type = other DNA
aggtgctcatggcggagcctcgatcggattatcctttggcccgtatttcccgggattaataaattcaaatgataa

SEQ ID NO: 45824 - DNA, 75 bp, synthetic construct
  source 1..75: mol_type = other DNA
gaaaaatcatcacaactgatgcgatgggttgccagaaagatattgcagagaagatacaaaaacagggaggtgatt

SEQ ID NO: 45825 - DNA, 75 bp, synthetic construct
  source 1..75: mol_type = other DNA
ttgacgctgcaattaagagagcgaagatcgagcttcctgatgggcaattaactcatgtgctacgtcacacgtttg

SEQ ID NO: 45826 - DNA, 75 bp, synthetic construct
  source 1..75: mol_type = other DNA
ctggaaaaacaggtggctgaactctggcaatcgctgctgtctcgccccgtggcaaggcatcacgactttttcgaa

SEQ ID NO: 45827 - DNA, 75 bp, synthetic construct
  source 1..75: mol_type = other DNA
aaatcctggctgaccgggtgagtgaggaaagccgccgctggctggcatcgtgcggcctgaccgtggagcagatgc

SEQ ID NO: 45828 - DNA, 75 bp, synthetic construct
  source 1..75: mol_type = other DNA
gcagctggccagatcgccatggtcggtttgttcgtcgatgcggatgatgctgtcatcgccgacgcactggtggca

SEQ ID NO: 45829 - DNA, 75 bp, synthetic construct
  source 1..75: mol_type = other DNA
atccgatcggacaaatgcgcaggaaagagccgctgctaatcctctcaatgcctccggtaagaatgcagaactgtg

SEQ ID NO: 45830 - DNA, 75 bp, synthetic construct
  source 1..75: mol_type = other DNA
gagagggattgccagggctaaccttcaggatctgttcagccattcgacgctgagcgacttctgcgcccatctaca

SEQ ID NO: 45831 - DNA, 75 bp, synthetic construct
  source 1..75: mol_type = other DNA
gtatgaccgtagtggcaaacaggtgcgcagctttacttacgatgataaataccggggccggatggtggcgcaccg

SEQ ID NO: 45832 - DNA, 75 bp, synthetic construct
  source 1..75: mol_type = other DNA
tagaattgaaaaatttaaagaaaaaatagaaatatcattaaatcatttagaaatgcaatttttatcactacagaa

SEQ ID NO: 45833 - DNA, 75 bp, synthetic construct
  source 1..75: mol_type = other DNA
ggttcagtatatagattcaatgggactggcatcaaaatatggacacttaaataatggcggatatggagcgagacc

SEQ ID NO: 45834 - DNA, 75 bp, synthetic construct
  source 1..75: mol_type = other DNA
cagacatgcttacaacgcgcagggactggcgaaccgctgtataccggacagcctgcccgccgtggaatggctgac

SEQ ID NO: 45835 - DNA, 75 bp, synthetic construct
  source 1..75: mol_type = other DNA
acaatcgcgttgctgggcgtgattttcacgaaaagaatattcagatagagcgatatgatggttctcataccgtca

SEQ ID NO: 45836 - DNA, 75 bp, synthetic construct
  source 1..75: mol_type = other DNA
aggcggctaactcagatattcgcacgtctgatattacgccgaccaccagcccggtacaagtacctaggcgtaccc

SEQ ID NO: 45837 - DNA, 75 bp, synthetic construct
  source 1..75: mol_type = other DNA
atttaaggccccttcctcgggaggggctttcccgtttcagcatccggctgaaatctgcggcttacctcctttcgc

SEQ ID NO: 45838 - DNA, 75 bp, synthetic construct
  source 1..75: mol_type = other DNA
gaccgatgtcagtgttaataaggcgacggcgaaactctacccggtggcgaatacgcctgcagcgatgcttgaact

SEQ ID NO: 45839 - DNA, 75 bp, synthetic construct
  source 1..75: mol_type = other DNA
tgttggcactcaacgcagcaattgaggccgcgcgtgctggtgagcaggggcgtggttttgctgttgtcgccgatg

SEQ ID NO: 45840 - DNA, 75 bp, synthetic construct
  source 1..75: mol_type = other DNA
caacagagtcaggtggtttactgaatccgcagggatggggagctgaaggagggcgtgcattggtagttgatgatg

SEQ ID NO: 45841 - DNA, 75 bp, synthetic construct
  source 1..75: mol_type = other DNA
ttagcgatattcaacgtatctatcctgcgacgacggtggttgagctggtcttcagcgacgcgcaacaggcgttgt

SEQ ID NO: 45842 - DNA, 75 bp, synthetic construct
  source 1..75: mol_type = other DNA
catggaatcaaaccgtcgcatcagggcagagattaagcagatcatgattaattcctccccacaacattcaagctg

SEQ ID NO: 45843 - DNA, 75 bp, synthetic construct
  source 1..75: mol_type = other DNA
cctgtctatgtccgtgcgtggtcaatggagggtagggaaggtgtaacttataatgtttcttccgatggtggcatc

SEQ ID NO: 45844 - DNA, 75 bp, synthetic construct
  source 1..75: mol_type = other DNA
gtgcgcgacggcggcgatcggctggagaatctggagaagatgatcaacgccatcgaagagacgcagaaacgcggc

SEQ ID NO: 45845 - DNA, 75 bp, synthetic construct
  source 1..75: mol_type = other DNA
ctggagtttgacgggcgcaaccatcacgaactggcccgcaaatttggtgtttcactacagtgggtttacagcgtg

SEQ ID NO: 45846 - DNA, 75 bp, synthetic construct
  source 1..75: mol_type = other DNA
cgcatccgattgatggcctgtctggtgaatatgcggagaaatcccttgaagaatgggcggaacagattcgcaaag

SEQ ID NO: 45847 - DNA, 75 bp, synthetic construct
  source 1..75: mol_type = other DNA
aagatcgccgtctgcttgagctggagctgaataactggatccggggtctggtgacggagatgaccgatccgggtg

SEQ ID NO: 45848 - DNA, 75 bp, synthetic construct
  source 1..75: mol_type = other DNA
tctgggcgactggtatctggatgaacagaagtatccggacggactgatgccggtgattaaccatgtgaaatcact

SEQ ID NO: 45849 - DNA, 75 bp, synthetic construct
  source 1..75: mol_type = other DNA
gccgaggcgattgccgatcttatcgacgccagttcggaacaggcggcccgttcggcacttaactcgctgcaaggc

SEQ ID NO: 45850 - DNA, 75 bp, synthetic construct
  source 1..75: mol_type = other DNA
ctgaggatttaattaccaaaccatgtcttaatatccatataggaagctggatactggcaagacattttcagatat

SEQ ID NO: 45851 - DNA, 75 bp, synthetic construct
  source 1..75: mol_type = other DNA
ctggaagcagatccagttgcttatattttcaaacatccggccgggaaattattctgggctttaacggatgaaagc

SEQ ID NO: 45852 - DNA, 75 bp, synthetic construct
  source 1..75: mol_type = other DNA
gcgcagcagaacttaagcgagatcaccggggaatttacttctgacgacctgctggggcgaattttctccagcttc

SEQ ID NO: 45853 - DNA, 75 bp, synthetic construct
  source 1..75: mol_type = other DNA
gtgaagcgggtcagaaaagaagaactggatcggatgcagggcaaactgtttgatggcgaacctgatgccgataca

SEQ ID NO: 45854 - DNA, 75 bp, synthetic construct
  source 1..75: mol_type = other DNA
tattaccgtctccgaagtggaatcgacaagataacggcgcaggttaactacttgcaggagtatgtaaagttgcag

SEQ ID NO: 45855 - DNA, 75 bp, synthetic construct
  source 1..75: mol_type = other DNA
ccgtacctgaccctcgccatcgacgtgttcacccgctgcgtgctcggcatggtcgtcacgctggaagcgccgtct

SEQ ID NO: 45856 - DNA, 75 bp, synthetic construct
  source 1..75: mol_type = other DNA
gtgagcaagatgaaagagcgcggcatgatttttaatgatgcgatggtcagggccatcctcgaaggcaggaagacg

SEQ ID NO: 45857 - DNA, 75 bp, synthetic construct
  source 1..75: mol_type = other DNA
ggtgaacccattgcagccctgatttctgcctgggagtttgatgcgtctgcgcaggatgtggcgctgctgaaaaat

SEQ ID NO: 45858 - DNA, 75 bp, synthetic construct
  source 1..75: mol_type = other DNA
acaaagcgaccaatacacaagcgatgatcgccactatcgccagcggcaatgtgcatataataagccatcccggaa

SEQ ID NO: 45859 - DNA, 75 bp, synthetic construct
  source 1..75: mol_type = other DNA
gatttaccgatggtaactggaacctgacgccgtatgcatcgttaacggggttcaccgctgataaccccgaatatc

SEQ ID NO: 45860 - DNA, 75 bp, synthetic construct
  source 1..75: mol_type = other DNA
cgtttattgccacaccaccattattggtacttaaacaagataaaaataccaaaataagaatcaatcgcgtggggg

SEQ ID NO: 45861 - DNA, 75 bp, synthetic construct
  source 1..75: mol_type = other DNA
gaacatggggcgcattgtcgttgacgtcgatggtgttaatctcgctgaactgattaacaaggtctctgaaaacgg

SEQ ID NO: 45862 - DNA, 75 bp, synthetic construct
  source 1..75: mol_type = other DNA
aaatggtctgttccgtgctgactacgaagaaactgatggcggtgaggcttgcgataatgcatttgacgacgctgc

SEQ ID NO: 45863 - DNA, 75 bp, synthetic construct
  source 1..75: mol_type = other DNA
agcgtggtgcgcagaatacgatgaatggggcaacctgctgaatgaagagaacccgcatcagctgcagcagcttat

SEQ ID NO: 45864 - DNA, 75 bp, synthetic construct
  source 1..75: mol_type = other DNA
gcatgatgaactgctcctacggcgcaatggttcccgctatcaccaaaaaccccaacgaacgcgcctcactggcgg

SEQ ID NO: 45865 - DNA, 75 bp, synthetic construct
  source 1..75: mol_type = other DNA
tcagcgaagacggcaatacggcgtggcgcggggagtatgatgaatggggcaaccagcttaatgaagagaacccgt

SEQ ID NO: 45866 - DNA, 75 bp, synthetic construct
  source 1..75: mol_type = other DNA
tatttgcagccgtagtgagagcaaagggattctcccaagctgcacgtgaaaccggccacccaaaatccaccataa

SEQ ID NO: 45867 - DNA, 75 bp, synthetic construct
  source 1..75: mol_type = other DNA
aggcagcaggcagagaaaaagaatgaagacgcgacagttcagcctgataaaaagaagagaaaaagacgatacaaa

SEQ ID NO: 45868 - DNA, 75 bp, synthetic construct
  source 1..75: mol_type = other DNA
cggccgacatgtgcgagcggctacacgaggatgcggaaacactctggcaggtgatgcgggataagctcggggagg

SEQ ID NO: 45869 - DNA, 75 bp, synthetic construct
  source 1..75: mol_type = other DNA
gatttttacgccagtggcccgaaccagaagtgggcaggagacatcacgtacttacgtacagatgaaggctggctg

SEQ ID NO: 45870 - DNA, 75 bp, synthetic construct
  source 1..75: mol_type = other DNA
tgaatgagctggcacagcaggcggcgcggtttgaacagcagcagagcgcgaagcaggccgccatcagcgcaaaag

SEQ ID NO: 45871 - DNA, 75 bp, synthetic construct
  source 1..75: mol_type = other DNA
ttttacagcggatgttaggaaataccaccgctactttcagggaagggcaatgggaagccatagacgcggtggtga

SEQ ID NO: 45872 - DNA, 75 bp, synthetic construct
  source 1..75: mol_type = other DNA
agtgcaggttttaaaatcaaacctcagcaaataatcgaagaacacattagcggctcagcagcaaccagtgagcgt

SEQ ID NO: 45873 - DNA, 75 bp, synthetic construct
  source 1..75: mol_type = other DNA
gaaagccagccggaagttcagcccagtcagctaccgtgcacatggcctgcccgtattggagaatctgctggagca

SEQ ID NO: 45874 - DNA, 75 bp, synthetic construct
  source 1..75: mol_type = other DNA
gaaggcggtgaatgatgcggtcgcaaatattccgcagccggcagacggtaaaagtctcaccccggatgatgtgcg

SEQ ID NO: 45875 - DNA, 75 bp, synthetic construct
  source 1..75: mol_type = other DNA
cagtttatgtattgattttccccgtctggatatcgtgctgcgcggcgaatacggcaacctgctggaagcaaagca

SEQ ID NO: 45876 - DNA, 75 bp, synthetic construct
  source 1..75: mol_type = other DNA
gctctggatatggctggcgcattgactacggtaaaacgccagcatcgccccgctcttgatctttctcgcctgcct

SEQ ID NO: 45877 - DNA, 75 bp, synthetic construct
  source 1..75: mol_type = other DNA
taccgtgatcacgccatcatctacaaagagcagcgcgataaaaaagccagtgagctggagctggcgaacgcgaca

SEQ ID NO: 45878 - DNA, 75 bp, synthetic construct
  source 1..75: mol_type = other DNA
tgtggaggtggacaaggttgcagaggctttcggaaaactgaccaccgaccctacgtcggggctgattgcgatggc

SEQ ID NO: 45879 - DNA, 75 bp, synthetic construct
  source 1..75: mol_type = other DNA
gaaaaatcagggcagcatcggcagacggcgcttacgacacccggctctgtcacgatgaactgcggcgtaagaaaa

SEQ ID NO: 45880 - DNA, 75 bp, synthetic construct
  source 1..75: mol_type = other DNA
ccctttccagtggcatttccccttcagttaatcgtacatcacaggcggaacaacgctcgcaggcacgaatgcaga

SEQ ID NO: 45881 - DNA, 75 bp, synthetic construct
  source 1..75: mol_type = other DNA
ttaacggcgggaacggcgttaacggtcgagattaacaacgttacttatggcgcgacggtattagccgacggcaca

SEQ ID NO: 45882 - DNA, 75 bp, synthetic construct
  source 1..75: mol_type = other DNA
cgcctgtgtaccgattatcacggcggtatctggagctttttgacgctcagcaatggcggcgcttttatggctcct

SEQ ID NO: 45883 - DNA, 75 bp, synthetic construct
  source 1..75: mol_type = other DNA
cgccgggatgcctgatccgcgatccggacaccatgaaaccgctggcgcaggagggagaggaaaaacccttcaccc

SEQ ID NO: 45884 - DNA, 75 bp, synthetic construct
  source 1..75: mol_type = other DNA
agcgtcagcgtcccgaccggggatttagctaaccttaccgccagctcgtataccgttaacgcctcggtcagcgac

SEQ ID NO: 45885 - DNA, 75 bp, synthetic construct
  source 1..75: mol_type = other DNA
tcagcaattaaaaaatatgtggtcactggctgtttatacgggagttcgccacggagagttggtttctctggcatg

SEQ ID NO: 45886 - DNA, 75 bp, synthetic construct
  source 1..75: mol_type = other DNA
agtgcagcaagcggcggaacgcgcagcgttaccgaaacgcctcactatcgtgaactgttaagagcggataatgaa

SEQ ID NO: 45887 - DNA, 75 bp, synthetic construct
  source 1..75: mol_type = other DNA
atgatgagaaaggccgcctgaccggtgagcgccagacggtgcatcacccgcagacggaagcactgctctggcagc

SEQ ID NO: 45888 - DNA, 75 bp, synthetic construct
  source 1..75: mol_type = other DNA
tctctactcttggctggccggaaaacaccgacgccctgcgtcagttccacccgaccagtgtgatggtatctggct

SEQ ID NO: 45889 - DNA, 75 bp, synthetic construct
  source 1..75: mol_type = other DNA
cgcaggtgccgttccacaccgtttacatgaccggtctgattcgtgatgacgaaggccagaagatgtccaaatcca

SEQ ID NO: 45890 - DNA, 75 bp, synthetic construct
  source 1..75: mol_type = other DNA
cccggggttgattattgttcctgagggtgccgaacagctgagcggaattatttgcgatataaatgatgccaaaag

SEQ ID NO: 45891 - DNA, 75 bp, synthetic construct
  source 1..75: mol_type = other DNA
tgtggaattcgtgcgcctgagcggacgagaaacttttcgacaactggcagataaaacgggtgtcagtaagaccgc

SEQ ID NO: 45892 - DNA, 75 bp, synthetic construct
  source 1..75: mol_type = other DNA
ccgcgcaccggaagcggtcatcgcgaaagagcgtgagaagctggaaggctatgcggaagcgaaagcgaagctgat

SEQ ID NO: 45893 - DNA, 75 bp, synthetic construct
  source 1..75: mol_type = other DNA
atcccggagcagaaggctttctgaatcgcctgggcgtacagacccgtgatgccagcggtaacatgcgtgacatgg

SEQ ID NO: 45894 - DNA, 75 bp, synthetic construct
  source 1..75: mol_type = other DNA
gccagtgagccagttaaagccgcaatggaaatagcttatttatgtgcagcgagggtatccgatgtcttgaaaatg

SEQ ID NO: 45895 - DNA, 75 bp, synthetic construct
  source 1..75: mol_type = other DNA
aatgcggtgaaagaagttttcgttcgtctgtataaagaagacctgatttaccgtggcaagcgcctggtaaactgg

SEQ ID NO: 45896 - DNA, 75 bp, synthetic construct
  source 1..75: mol_type = other DNA
ctggggagaacggctgctggatacctcaattcagatgttgcgcaacgtgccgcatctggcgctgatcccgctggt

SEQ ID NO: 45897 - DNA, 75 bp, synthetic construct
  source 1..75: mol_type = other DNA
tccccgactggcagaagccgctgaacgggattatttcatcctcagagaacggctgatggcaatgcagaagcaact

SEQ ID NO: 45898 - DNA, 75 bp, synthetic construct
  source 1..75: mol_type = other DNA
caccaccaccgtgcaggccggcttaagctggagcgtggacgttccggcggacgctattcaggcgctgggtaatgg

SEQ ID NO: 45899 - DNA, 75 bp, synthetic construct
  source 1..75: mol_type = other DNA
cccgcgctgagcgtcttcacatccgcactgaaattaaccgcagactccatcgggctgcatctgtcaccttcatca

SEQ ID NO: 45900 - DNA, 75 bp, synthetic construct
  source 1..75: mol_type = other DNA
ttatcagcattaccggttgttttccaaaaaattgtaatgttgaatcctctggcatttatgattgaagaagcaaga

SEQ ID NO: 45901 - DNA, 75 bp, synthetic construct
  source 1..75: mol_type = other DNA
gctttattaaacaacgcggtgtgaatatttttattcaggacgtccccggcgatcaaaaagaacaaatccctgact

SEQ ID NO: 45902 - DNA, 75 bp, synthetic construct
  source 1..75: mol_type = other DNA
ttgcacatgaaattgcccagcgtctactggggcaaaaaaaattaccctcgcttgagtggttaaaaatagtggcga

SEQ ID NO: 45903 - DNA, 75 bp, synthetic construct
  source 1..75: mol_type = other DNA
cgagggttgataacgctcaggccattctggatgcgctccggtcgctaaccaaaaaggatgtgctggtgggcatcc

SEQ ID NO: 45904 - DNA, 75 bp, synthetic construct
  source 1..75: mol_type = other DNA
ttccggcaggggggatcgagcaggagctgaaaatgaaaccggaagaagagatggaacagcaactgccacccggga

SEQ ID NO: 45905 - DNA, 75 bp, synthetic construct
  source 1..75: mol_type = other DNA
tgccagcaacaactgacacagccctcaaaccatgccagcgccgatctactgccagccgtagtagtctcccctccc

SEQ ID NO: 45906 - DNA, 75 bp, synthetic construct
  source 1..75: mol_type = other DNA
aattccagaaagtcgagtcgctgtggcgcggcacatggttcgtcgtacagcgcactgattttcgcaaaaatgtca

SEQ ID NO: 45907 - DNA, 75 bp, synthetic construct
  source 1..75: mol_type = other DNA
cacgaacagatagaactccttaacaaaagactatctgaaagtgtcccatgtatgccccataagaaagtggggtaa

SEQ ID NO: 45908 - DNA, 75 bp, synthetic construct
  source 1..75: mol_type = other DNA
accaatcccgtggccatcagataccgttccgtctggctatgccctgatgcaggggcagacttttgacaaatctgc

SEQ ID NO: 45909 - DNA, 75 bp, synthetic construct
  source 1..75: mol_type = other DNA
cactgcttattgtgtgcggcactgtcacggctgcagataacccgggctggcagaacgcacgaaccccacaggctg

SEQ ID NO: 45910 - DNA, 75 bp, synthetic construct
  source 1..75: mol_type = other DNA
ttcctcaagtcctatgacttcccatacatcgaggggagggaacaggctttcatacaagggctattaagtcagatc

SEQ ID NO: 45911 - DNA, 75 bp, synthetic construct
  source 1..75: mol_type = other DNA
gacagtctgcaaatcccgaccttcagcatgctgggctaccaccctgagcaggagcgcaccctgcgccgtattctg

SEQ ID NO: 45912 - DNA, 75 bp, synthetic construct
  source 1..75: mol_type = other DNA
gacagcaatgcagaacagatcgcaatgctgaatcagaagctggcagattatgtcccaatgatgtcccatagtcac

SEQ ID NO: 45913 - DNA, 75 bp, synthetic construct
  source 1..75: mol_type = other DNA
tgacggtggcgattaacacggtcacttacgctgcaacagttttagccgatggcacatggagcgttggtgttccgg

SEQ ID NO: 45914 - DNA, 75 bp, synthetic construct
  source 1..75: mol_type = other DNA
aaagcgcatgcttacttccgtctgcttccttagttggcaacgattttgttcatcacgatcttacgcctaagccca

SEQ ID NO: 45915 - DNA, 75 bp, synthetic construct
  source 1..75: mol_type = other DNA
ccccgagccatcagattgcagagttcgcggccggtgagattggtgagaaagagcacctgaaagccagtctgcagt

SEQ ID NO: 45916 - DNA, 75 bp, synthetic construct
  source 1..75: mol_type = other DNA
atgaagaaatatataccagtggtattatttgttttttcatgtcaggtattttctgctgatattcatggacggggc

SEQ ID NO: 45917 - DNA, 75 bp, synthetic construct
  source 1..75: mol_type = other DNA
gccagacaacaaaaacgtgggctctggtcagatgctgatccggttcccccctggatatggaggcaccgtaaataa

SEQ ID NO: 45918 - DNA, 75 bp, synthetic construct
  source 1..75: mol_type = other DNA
acaatatcaccctgaaaattgaccctgccgtcgtgctggcaacccgcaagtatgtggatgacaaggtactggagc

SEQ ID NO: 45919 - DNA, 75 bp, synthetic construct
  source 1..75: mol_type = other DNA
gggtcatattgctactggataatacaggaaatttggtatcggaggcgcagccgcactttgatataatcatcaagg

SEQ ID NO: 45920 - DNA, 75 bp, synthetic construct
  source 1..75: mol_type = other DNA
ataacatcaccctgaaaattgaccccgctgtggttctggcaacccgcaaatatgtggatgataaggtgctggaac

SEQ ID NO: 45921 - DNA, 75 bp, synthetic construct
  source 1..75: mol_type = other DNA
caagccttcagcgaagggcaaacggtcgtcgtgcctgccggattggtttgcgacaatatcaacaccggcatcttc

SEQ ID NO: 45922 - DNA, 75 bp, synthetic construct
  source 1..75: mol_type = other DNA
aaaaagggcaaagctccgtcgatatcgacaggattaatcaccatattgttaatgtggaaaagattaactttagat

SEQ ID NO: 45923 - DNA, 75 bp, synthetic construct
  source 1..75: mol_type = other DNA
accctcagtaattttttctcccgacactcacactttcaaaccgtttataaatacagactatcagcctgtgggagc

SEQ ID NO: 45924 - DNA, 75 bp, synthetic construct
  source 1..75: mol_type = other DNA
cgggaaataatgcgggcaacggtgtttaattatatcgaatgtgattacaatcggtggcggcggcacagttggtgt

SEQ ID NO: 45925 - DNA, 75 bp, synthetic construct
  source 1..75: mol_type = other DNA
gcatgacggcattgccacgcacatggtggacgccggggataacgtctgcatcgagcgtgaaatcaccatgtaccg

SEQ ID NO: 45926 - DNA, 75 bp, synthetic construct
  source 1..75: mol_type = other DNA
gcggactcgagacaattatcgttatatgccgctcatggcgatgcgatattaactaatggcactttatggatgctg

SEQ ID NO: 45927 - DNA, 75 bp, synthetic construct
  source 1..75: mol_type = other DNA
ttcacgtggtggggaaaacgctcgctgaaatccgcagtgatattaccgggcgcttagcgacgtacatcgctgacc

SEQ ID NO: 45928 - DNA, 75 bp, synthetic construct
  source 1..75: mol_type = other DNA
ggctgggacggcgaccggctgaccacgatacagaacgacaggagccgcatccagacgatttatcagccggggagc

SEQ ID NO: 45929 - DNA, 75 bp, synthetic construct
  source 1..75: mol_type = other DNA
tgattaatgccgctgaaaaaagtgcagatttaaccctttccggcagcacctccggcgtggaagcagggcaaacgg

SEQ ID NO: 45930 - DNA, 75 bp, synthetic construct
  source 1..75: mol_type = other DNA
taacgtcgcgctggtactgagcggcacgtcgaatgcagaagcggggcaaaccgtaacactgaccgtcaacgggaa

SEQ ID NO: 45931 - DNA, 75 bp, synthetic construct
  source 1..75: mol_type = other DNA
tctgtttcaggtactggatatcaaaaattaccatcaggttttattcttcagtggggctcaatcggcgcaccaggc

SEQ ID NO: 45932 - DNA, 75 bp, synthetic construct
  source 1..75: mol_type = other DNA
actgggtattcagaaatgtgataccgggtatcagaaaaacgggggcttatggtatcccgtggggtgcattacagg

SEQ ID NO: 45933 - DNA, 75 bp, synthetic construct
  source 1..75: mol_type = other DNA
cttgctgccagtcaaaagtatggcgttattcctcaaactttaatgatgcaacttaatgactctaaagtaatgttg

SEQ ID NO: 45934 - DNA, 75 bp, synthetic construct
  source 1..75: mol_type = other DNA
ccggtcttcctggtttgcccggtacagttcagggggtgcgctggacgctcaatcggatcacagagacgcacccgg

SEQ ID NO: 45935 - DNA, 75 bp, synthetic construct
  source 1..75: mol_type = other DNA
ggctaccacattctttgggggttaaccaacgaagccgtccccacttccgaacttccggctcacttcctttcccac

SEQ ID NO: 45936 - DNA, 75 bp, synthetic construct
  source 1..75: mol_type = other DNA
gccggaatttatcgcccgtctgccagcgaaactgccgatcaccgtggtgcgcaataaagccgatatcaccggcga

SEQ ID NO: 45937 - DNA, 75 bp, synthetic construct
  source 1..75: mol_type = other DNA
cggacggggtattgcgccggactggcagatgaaacgggagatgctgtcaccggcatataccacacgctggaagga

SEQ ID NO: 45938 - DNA, 75 bp, synthetic construct
  source 1..75: mol_type = other DNA
ccggctgatgagcgtcaccctgaactgatgttccgtcacccggaaaacgagtacgactggcagagctcagacgcc

SEQ ID NO: 45939 - DNA, 75 bp, synthetic construct
  source 1..75: mol_type = other DNA
cgcaatccatcataaagtgtttgatcgcggttcgattggcctggatgaaaatatgcgtgtggtggtttccggtgc

SEQ ID NO: 45940 - DNA, 75 bp, synthetic construct
  source 1..75: mol_type = other DNA
cagcttctggtacgcaccacgcgcaagttatcgctcacccatgccggcgagttactctatcgaaacgtcgaatct

SEQ ID NO: 45941 - DNA, 75 bp, synthetic construct
  source 1..75: mol_type = other DNA
tgctcacggcggcgagctgtcagcagaacagcaggggcgtgaaattgtgttcaaagtgcgcctgttaatggatta

SEQ ID NO: 45942 - DNA, 75 bp, synthetic construct
  source 1..75: mol_type = other DNA
tccgtcaacgcgatccggggtttcgcaagatggttctacgtgcttacaattatcagtgcgctatctgcggcttta

SEQ ID NO: 45943 - DNA, 75 bp, synthetic construct
  source 1..75: mol_type = other DNA
ccacccatccgagcgatatggcggtcgcaatgcggttgctggatgcggtggtggaaaccatcacgccggagggaa

SEQ ID NO: 45944 - DNA, 75 bp, synthetic construct
  source 1..75: mol_type = other DNA
taccttgaagcgctgatcaattatgaagatcgctggttctggaagcatccgggggtgaatccattctcggtggcg

SEQ ID NO: 45945 - DNA, 75 bp, synthetic construct
  source 1..75: mol_type = other DNA
gtagcggtgcgcagaccatcaccgccagcgtcagcgatcgggcaggcaacagcgacgacgccagccgcaccgtga

SEQ ID NO: 45946 - DNA, 75 bp, synthetic construct
  source 1..75: mol_type = other DNA
tctctggagagaaagattatgatttgaatggttttgattgcggtgaagaatcactaaatgcctttttaaccaacc

SEQ ID NO: 45947 - DNA, 75 bp, synthetic construct
  source 1..75: mol_type = other DNA
cctatccactgatgcttctcaaggattatcgtgtaaatgaaagcatgtggtgggaggatatttgggataaaagtc

SEQ ID NO: 45948 - DNA, 75 bp, synthetic construct
  source 1..75: mol_type = other DNA
gaagatgtgctggaactgcaaggtcatggcggtccggtgatcctcgacctgctgttaaaacgcattctgaccatt

SEQ ID NO: 45949 - DNA, 75 bp, synthetic construct
  source 1..75: mol_type = other DNA
tgtacgggaactggtttcctacggccgcagcccgtggctgtcgttgtgggggcgactctccgcggaagacaacga

SEQ ID NO: 45950 - DNA, 75 bp, synthetic construct
  source 1..75: mol_type = other DNA
gtgatgaaaagtggagatgagttgattgtctggaagttagatcggatagggagaaatgtgctgcatgcgctattg

SEQ ID NO: 45951 - DNA, 75 bp, synthetic construct
  source 1..75: mol_type = other DNA
gatgcaaacagcgtcattgtccggcgggctgatggctcttatatctgcgatgccatctggaacggtaacaaggtt

SEQ ID NO: 45952 - DNA, 75 bp, synthetic construct
  source 1..75: mol_type = other DNA
cagcatcagtattgagggcagggatatcaccacagtgctggataaccgcctgatggggctgacgctgacggataa

SEQ ID NO: 45953 - DNA, 75 bp, synthetic construct
  source 1..75: mol_type = other DNA
atgagcgatatggcagagcgccttgcgctacatgaatttacggaaaacgcctacttaaactactccatgtacgtg

SEQ ID NO: 45954 - DNA, 75 bp, synthetic construct
  source 1..75: mol_type = other DNA
agcgtattaaaaaactgctggcaatggcgcgtaataactccagcgctgaagaagcagcactcgcgctgagccgcg

SEQ ID NO: 45955 - DNA, 75 bp, synthetic construct
  source 1..75: mol_type = other DNA
ttgctgctcagctaaacaacagaccgagaaagacactgaagttcaaaacaccgaaagagataattgaaaggggtg

SEQ ID NO: 45956 - DNA, 75 bp, synthetic construct
  source 1..75: mol_type = other DNA
gataatccggatgcatttgccctgcaaagatggttaattgctgtaagaaacgggaaaacattggctgaagcgatg

SEQ ID NO: 45957 - DNA, 75 bp, synthetic construct
  source 1..75: mol_type = other DNA
caggcgctgacagacctgttgtataacgaatcaagcccgggggccctggttcttccgtcttcattctggcgaacc

SEQ ID NO: 45958 - DNA, 75 bp, synthetic construct
  source 1..75: mol_type = other DNA
gatccgcatattgtcgaacaactcaccgctcaccagatgccagggatgcagcgagtctataaccactcccgttat

SEQ ID NO: 45959 - DNA, 75 bp, synthetic construct
  source 1..75: mol_type = other DNA
acaattacaaaaataaaaacattgatttaaaatccaataacgctaatttatatagagataaactaaggcaacact

SEQ ID NO: 45960 - DNA, 75 bp, synthetic construct
  source 1..75: mol_type = other DNA
aaattatactttataaaacaatggccccagtcaatattttctctcgcactggtttttttctaaaaaaatccgcaa

SEQ ID NO: 45961 - DNA, 75 bp, synthetic construct
  source 1..75: mol_type = other DNA
ccggggccggatggtggcgcaccgtcacacgagccgaccggaaatccgttaccgttacgacagcgacgggcgggt

SEQ ID NO: 45962 - DNA, 75 bp, synthetic construct
  source 1..75: mol_type = other DNA
ccggggctttgaagcggaccagcttgatctggagctggatgacgctgacggaaaaatcgtgctgccgcgccgtgg

SEQ ID NO: 45963 - DNA, 75 bp, synthetic construct
  source 1..75: mol_type = other DNA
aaaatgaaaccactccagaagttgcatctgaaacaacgcctgtagttaaagtaaggaagcctagaaaaaaagcga

SEQ ID NO: 45964 - DNA, 75 bp, synthetic construct
  source 1..75: mol_type = other DNA
aaattcaggaactctacaacttaccacctgcgatagcagcaccaacaagaggactggtaaacgcagtacgcttct

SEQ ID NO: 45965 - DNA, 75 bp, synthetic construct
  source 1..75: mol_type = other DNA
ccactgggcacagtgaaagtgcagtttaacggggagtatacccggttcagtgatttttctcagggatattatttt

SEQ ID NO: 45966 - DNA, 75 bp, synthetic construct
  source 1..75: mol_type = other DNA
tcgtcacggaacggggatgtcatctccggctaaccaggcatttgaacagtggctggggctgctggtaaaagatgc

SEQ ID NO: 45967 - DNA, 75 bp, synthetic construct
  source 1..75: mol_type = other DNA
gcggtgctcaataccgggcacctgcatccgaaggtggtggccgcggtggaagcgcagttgaaaaaactgtcgcac

SEQ ID NO: 45968 - DNA, 75 bp, synthetic construct
  source 1..75: mol_type = other DNA
taccctatgcggaaatcgtgagggttcggcacaatttatgtcacgggaacatcctggagcacatcatcactgcga

SEQ ID NO: 45969 - DNA, 75 bp, synthetic construct
  source 1..75: mol_type = other DNA
ctcctgaagaccaggctgagtacgatgcttatatgtcaagattcagcgagataaatcactattatgattatcaca

SEQ ID NO: 45970 - DNA, 75 bp, synthetic construct
  source 1..75: mol_type = other DNA
ccgggatccgtatcggtgaagcccggacactcaccccggaatccttcgacctggatggtctgcgcccttttgtgc

SEQ ID NO: 45971 - DNA, 75 bp, synthetic construct
  source 1..75: mol_type = other DNA
atggacccggtgtacacgccggcgcgaaaaatccacctgtaccactgcgaccatcgcggcctgccgctggcgctt

SEQ ID NO: 45972 - DNA, 75 bp, synthetic construct
  source 1..75: mol_type = other DNA
agcgagacccaacaaaccgcctacgcccgatccaagtaaattgccggacatagcgaaacaattaagactgccata

SEQ ID NO: 45973 - DNA, 75 bp, synthetic construct
  source 1..75: mol_type = other DNA
atgcgtaacgggaaatatgacgttctgagccccctgtattccggtgagccggtcaatgaagcggaagtgctggga

SEQ ID NO: 45974 - DNA, 75 bp, synthetic construct
  source 1..75: mol_type = other DNA
gtgagggatttttatggaaaacaacttttgccaggagggttgatactccagtggctgacgattccatcaagtgca

SEQ ID NO: 45975 - DNA, 75 bp, synthetic construct
  source 1..75: mol_type = other DNA
tgaaaggagagaagcaggcggggcagagttgttcactttgcaaactctgccgaccagtggtgatccgttcggtga

SEQ ID NO: 45976 - DNA, 75 bp, synthetic construct
  source 1..75: mol_type = other DNA
ataactatagcgacataaaacaaggagtttataaagcatataagaaaatggggcttgtaaatgaaaaaattttta

SEQ ID NO: 45977 - DNA, 75 bp, synthetic construct
  source 1..75: mol_type = other DNA
aagaaatattcacccctggcgtctgggggccatactggtcggccatgttgccaaattactggctaactgaaggcg

SEQ ID NO: 45978 - DNA, 75 bp, synthetic construct
  source 1..75: mol_type = other DNA
aaagttatatgtgggaatgccccgatttcttcaggtgtggtaattttcactggctgatgttctcaccacagggga

SEQ ID NO: 45979 - DNA, 75 bp, synthetic construct
  source 1..75: mol_type = other DNA
gcggctgaagcagcaccggcagcagcgtctgcaacgactgatgccgccggaaaacccgcgggagcggcagcagaa

SEQ ID NO: 45980 - DNA, 75 bp, synthetic construct
  source 1..75: mol_type = other DNA
cttgatgcaaaacgtgacgctcttaatctatgggttgagcgcctcgatgtgctggctggaaatcatgaaaatatt

SEQ ID NO: 45981 - DNA, 75 bp, synthetic construct
  source 1..75: mol_type = other DNA
ggccagtttctctaatgaattcgattttgatccgctgcgtggtccggtaaaagatttcactcagacattaatgga

SEQ ID NO: 45982 - DNA, 75 bp, synthetic construct
  source 1..75: mol_type = other DNA
gtaaggacacgttgcaggccaaagataaaacttaccactactacagcctgccgcttgctgccaaatcactgggcg

SEQ ID NO: 45983 - DNA, 75 bp, synthetic construct
  source 1..75: mol_type = other DNA
cgctatccgctggctgacggcgcgaaaaccgcagatggtaaagattatctggtggttgcgactacccgtccggaa

SEQ ID NO: 45984 - DNA, 75 bp, synthetic construct
  source 1..75: mol_type = other DNA
gaagtgggtcgttgtggtggcattgctcctggtggcgattgtcggcaactacctttatcgcgacattatgctgcc

SEQ ID NO: 45985 - DNA, 75 bp, synthetic construct
  source 1..75: mol_type = other DNA
caaaatattgttccaggactataccagagcgtatttcagttgaaaaaattaacgaggttaaaatttatccagaat

SEQ ID NO: 45986 - DNA, 75 bp, synthetic construct
  source 1..75: mol_type = other DNA
ataatcatggaatacctacaaaagtggggtcagttactaatatcccgtatggaatagaacaggttatatctgatg

SEQ ID NO: 45987 - DNA, 75 bp, synthetic construct
  source 1..75: mol_type = other DNA
gaagttgaacatctctgtccgtggtgtattgcggacggttctgctgctgaaaagtttgcaggtagttttcaggat

SEQ ID NO: 45988 - DNA, 75 bp, synthetic construct
  source 1..75: mol_type = other DNA
gcaatacggcagattcacgcacaaaaaattaaaccatccgcactggtcactacacgatatacggcgcacgtttac

SEQ ID NO: 45989 - DNA, 75 bp, synthetic construct
  source 1..75: mol_type = other DNA
atgatgcgccagctggcgcaagaactgcgccggacacagcagcagaacatcaggatgcagcgcaatccagatggc

SEQ ID NO: 45990 - DNA, 75 bp, synthetic construct
  source 1..75: mol_type = other DNA
ggctgccagatatcgtcatgccgccgaactacactggtccgcaacgctggcagaaattgaacgggtaaagcggct

SEQ ID NO: 45991 - DNA, 75 bp, synthetic construct
  source 1..75: mol_type = other DNA
aacatctggaagcgcggatggaaatgatgcaatggtggtcggactatctggacatgagccgcgaggggtacgttg

SEQ ID NO: 45992 - DNA, 75 bp, synthetic construct
  source 1..75: mol_type = other DNA
aaagaactggggccatccatccgccaggtatcccgcatcagcgatttgttattagagaacgagttaaaggaaaaa

SEQ ID NO: 45993 - DNA, 75 bp, synthetic construct
  source 1..75: mol_type = other DNA
ggatggatatactgatgaagaaaccactaacgcacataatttcatcgtgtggaacatcaggaccctggaaaaaca

SEQ ID NO: 45994 - DNA, 75 bp, synthetic construct
  source 1..75: mol_type = other DNA
gatgcaatggtggtcggactatctggacatgagccgcgaggggtacgttgcgccgtatatttatgcgcggcagca

SEQ ID NO: 45995 - DNA, 75 bp, synthetic construct
  source 1..75: mol_type = other DNA
tggtttgcaggtagggcaacaactgagtgaatctggcctggaagggctgctgccagaagcactggttgcaggcat

SEQ ID NO: 45996 - DNA, 75 bp, synthetic construct
  source 1..75: mol_type = other DNA
gttaacggcgtgatccctggctggattgaagcactgactctgatgccggtaggttctaaatgggaactgactatc

SEQ ID NO: 45997 - DNA, 75 bp, synthetic construct
  source 1..75: mol_type = other DNA
ctggttccagatggatatgccggcccggatgcactctgaccggttgcgcagggattaccggaattttgatgaata

SEQ ID NO: 45998 - DNA, 75 bp, synthetic construct
  source 1..75: mol_type = other DNA
acctttgaaaaagatatctttccctacatcggtaagcgccctattgctgaaattaaaccaatggaactactggaa

SEQ ID NO: 45999 - DNA, 75 bp, synthetic construct
  source 1..75: mol_type = other DNA
gtacgtattggtgcccccaccggcgtggcctgttcggtgtgccccggcggagtgacgtccggccatccggtcaat

SEQ ID NO: 46000 - DNA, 75 bp, synthetic construct
  source 1..75: mol_type = other DNA
cccggaactgtccatctcctgcccgttcatcctgacgctgactctggtggtggaagaccaggtgaaaacccacag

SEQ ID NO: 46001 - DNA, 75 bp, synthetic construct
  source 1..75: mol_type = other DNA
ggcgcgggtgtttcgctttgtgcgtgatctgttcgcggatttagatatcgcccgcatcaccggtgaaatgaccga

SEQ ID NO: 46002 - DNA, 75 bp, synthetic construct
  source 1..75: mol_type = other DNA
taaacccaacgccattctatatggacattgctgagttgagagtaggtgaaaaagaaataactgaaacccattata

SEQ ID NO: 46003 - DNA, 75 bp, synthetic construct
  source 1..75: mol_type = other DNA
aaaatcatgatcaacgatgtactgcctccgacacatgaccgtcacttttttggcggtgatgcgacaagctttgag

SEQ ID NO: 46004 - DNA, 75 bp, synthetic construct
  source 1..75: mol_type = other DNA
cgatgggagatgagcgtgttgaaggtcgtggtgaggatctcagccatgctgacttctccctgaaaatcaatcagg

SEQ ID NO: 46005 - DNA, 75 bp, synthetic construct
  source 1..75: mol_type = other DNA
ccgcctgccagaacgttacgccccttcttcaggtcgcagagcatcgcgaagcaggtagattcacttcaatcgaac

SEQ ID NO: 46006 - DNA, 75 bp, synthetic construct
  source 1..75: mol_type = other DNA
cgaaagacgctggctacactgcagttatctctcaccgttcaggcgaaactgaagacgctaccatcgctgacctgg

SEQ ID NO: 46007 - DNA, 75 bp, synthetic construct
  source 1..75: mol_type = other DNA
cttaccaggcgcatttcgcccaggggatcaccataataaaatgctgaggcctggcctttgcgtagtgcacgcatc

SEQ ID NO: 46008 - DNA, 75 bp, synthetic construct
  source 1..75: mol_type = other DNA
tgtgaaccggatacagccgctgattaacgagctggagaagctacccggaccacctgtaaaaccgcaaaagaacgg

SEQ ID NO: 46009 - DNA, 75 bp, synthetic construct
  source 1..75: mol_type = other DNA
atgaccaaccactgggtcgacatcaagaacgccaacctcgtcgtggtgatgggcggtaacgccgctgaagctcac

SEQ ID NO: 46010 - DNA, 75 bp, synthetic construct
  source 1..75: mol_type = other DNA
ggttgccgcaaccggtccgggcgtcgacaccccggcatgccttgaaaaggtgcgcgctctgatggcgcaagaact

SEQ ID NO: 46011 - DNA, 75 bp, synthetic construct
  source 1..75: mol_type = other DNA
tcgcgccagactataccaatgatgaactttatgagtggatgcaccagaaaattaatgcagcgcaggatctgaaat

SEQ ID NO: 46012 - DNA, 75 bp, synthetic construct
  source 1..75: mol_type = other DNA
cgacgcagggcagaaaaatgagattgtccgccttgagatggacaccgatgacgcgtacgtccagaacctgctgct

SEQ ID NO: 46013 - DNA, 75 bp, synthetic construct
  source 1..75: mol_type = other DNA
cttcttcgtgattttgataatccgccctttaaaaaaagtgccggcttactggtttcatccaggactgacttatct

SEQ ID NO: 46014 - DNA, 75 bp, synthetic construct
  source 1..75: mol_type = other DNA
ggcagaaggtggcgtcgttgatggtgaagtcgataccgaagagcaatcccagcagacacagcaaccgaacctgat

SEQ ID NO: 46015 - DNA, 75 bp, synthetic construct
  source 1..75: mol_type = other DNA
taatgaaatatttcactaacaaacaaattttaccaacactcattttaagccttgcatttttaagtggccttatct

SEQ ID NO: 46016 - DNA, 75 bp, synthetic construct
  source 1..75: mol_type = other DNA
aagacgtgctgaaagtgcaggatcagaatcagatcccggaactgaacgtctaccagtgtggcacttaccagatgc

SEQ ID NO: 46017 - DNA, 75 bp, synthetic construct
  source 1..75: mol_type = other DNA
acctttgaaaaagatatttttccctatattggcaaacgccctattgctgaaatcaaaccaatggagttactggaa

SEQ ID NO: 46018 - DNA, 75 bp, synthetic construct
  source 1..75: mol_type = other DNA
tttcgtatttagcagataataaaaaagaaaacgtcccagagctaaatgtttcctacggtatcgataagaattttt

SEQ ID NO: 46019 - DNA, 75 bp, synthetic construct
  source 1..75: mol_type = other DNA
aacggccccatccccagaggcgggaaacgttaccagctggaaaagcctgaaatctgggtggctcaggcgcatcag

SEQ ID NO: 46020 - DNA, 75 bp, synthetic construct
  source 1..75: mol_type = other DNA
caaacggcacgccgtcgtcaacggtgtccttatggttcaccgtggatgggataaggggaaagctactgatgcgtg

SEQ ID NO: 46021 - DNA, 75 bp, synthetic construct
  source 1..75: mol_type = other DNA
caaccggattcgacacaggtgaatggccagcgccaatcactgctgactacaccgacgaactgaacgacttcgacc

SEQ ID NO: 46022 - DNA, 75 bp, synthetic construct
  source 1..75: mol_type = other DNA
cgctacgcgatcatcactggccgcgctgaatacaatccagcacctgatttagctatcgcattagcagtgccgaag

SEQ ID NO: 46023 - DNA, 75 bp, synthetic construct
  source 1..75: mol_type = other DNA
aacacgcacggcaaatagactcgattctgaacccatcggtcccaaatttgtcccagtcaaaaaataaggaaggta

SEQ ID NO: 46024 - DNA, 75 bp, synthetic construct
  source 1..75: mol_type = other DNA
tcgagctgtatgaaattcctccgcatatcaaaccgaactggcaggtgtggtacgagtgcgtgctgccggaagatc

SEQ ID NO: 46025 - DNA, 75 bp, synthetic construct
  source 1..75: mol_type = other DNA
tcgccataataatgtgttttattaccatgatttgctggggttcatgggcgaatacaactaaacttgtcagcaata

SEQ ID NO: 46026 - DNA, 75 bp, synthetic construct
  source 1..75: mol_type = other DNA
atgaaagtaaaaggtgttccgttcagccaggtaaagcaaaaactgcttaatactccagaagctgttaaagggtat

SEQ ID NO: 46027 - DNA, 75 bp, synthetic construct
  source 1..75: mol_type = other DNA
cgccacgcgtcgggctatgacctgatgttgctgcaactggcggaagatcgccgccgtctcaagggcgttcagtcc

SEQ ID NO: 46028 - DNA, 75 bp, synthetic construct
  source 1..75: mol_type = other DNA
gcgcagagggaagctgatatcgaaaatgaaaaactccgtaaagaggttgaggattacagggctgccagtgaggca

SEQ ID NO: 46029 - DNA, 75 bp, synthetic construct
  source 1..75: mol_type = other DNA
ccagctgacgatgcccggctggcaaaccaaacattcggatgcgttcagtattgcgggtgataaagataccgccaa

SEQ ID NO: 46030 - DNA, 75 bp, synthetic construct
  source 1..75: mol_type = other DNA
cgatagtaaaacggtgaactttgttgctgatgtcagcacggcgcagatcgctgatctggtggtcattaaggatgg

SEQ ID NO: 46031 - DNA, 75 bp, synthetic construct
  source 1..75: mol_type = other DNA
tgacattacagcgtaaatatccggacatttcaccatcacaccttgatgtggtgaaaactgaaatcgcgaaagcct

SEQ ID NO: 46032 - DNA, 75 bp, synthetic construct
  source 1..75: mol_type = other DNA
tgctcgccaatgagaatgcagcaaacaccgtctcggtcaatgtcgctgatgagggaagcaacccaatcaatgatc

SEQ ID NO: 46033 - DNA, 75 bp, synthetic construct
  source 1..75: mol_type = other DNA
gcgattggcgcggcgctggcgaacccggatcgcaaagtgttgtgtttctccggcgacggcagcctgatgatgaat

SEQ ID NO: 46034 - DNA, 75 bp, synthetic construct
  source 1..75: mol_type = other DNA
ccaatccggggtgtagcggtggagaaatcgccgcagcactgaataccccaaccacagccattaatgcggagttac

SEQ ID NO: 46035 - DNA, 75 bp, synthetic construct
  source 1..75: mol_type = other DNA
cgctgatccatgtgcgcattgatgccgaagaaaaagtgtacccgatggtgccgccaggtgcggcgaatactgaaa

SEQ ID NO: 46036 - DNA, 75 bp, synthetic construct
  source 1..75: mol_type = other DNA
caatgcaggagtctgccacccgtcagcgtgaacaggataccatccggaagtttgctgaagagagtaaagtttgct

SEQ ID NO: 46037 - DNA, 75 bp, synthetic construct
  source 1..75: mol_type = other DNA
atgaacaaaaacagagggtttacgcctctggcggtcgttctgatgctctcaggcagcttagccctaacaggatgt

SEQ ID NO: 46038 - DNA, 75 bp, synthetic construct
  source 1..75: mol_type = other DNA
acgaaggtgttcaggacatcaccctttctgactggaaagataatggtgacggaagctatacccagatcctgacca

SEQ ID NO: 46039 - DNA, 75 bp, synthetic construct
  source 1..75: mol_type = other DNA
tttcgtcgctacaaaccaaatatgccctgaaaggctataacgtcgaagccaccgctctggaagctgccggtggta

SEQ ID NO: 46040 - DNA, 75 bp, synthetic construct
  source 1..75: mol_type = other DNA
aacccgatgccgttcgggtgcggcaatccacttaccaacatgtttaaccagctactgaaggaagccagagcatga

SEQ ID NO: 46041 - DNA, 75 bp, synthetic construct
  source 1..75: mol_type = other DNA
acagctattgattcctgcctgcgccttgaatacctgatggaacgccgcttcagcagaacacctttgttccgtgca

SEQ ID NO: 46042 - DNA, 75 bp, synthetic construct
  source 1..75: mol_type = other DNA
gacgtatcggataattgtaaaaacgccaagactgcgttgtacaagaatcagcaacaagatgcgcctgtgcctcaa

SEQ ID NO: 46043 - DNA, 75 bp, synthetic construct
  source 1..75: mol_type = other DNA
gtgccgctttattgttgtcggcgtgtagtagtgaacctgttcagcaggcgactgcggcgcacgtagcgccaggtt

SEQ ID NO: 46044 - DNA, 75 bp, synthetic construct
  source 1..75: mol_type = other DNA
accggcaacgccgctgcaggataaaatgaacactgcacacaacgtgaaggccagggaacggataccacagttgaa

SEQ ID NO: 46045 - DNA, 75 bp, synthetic construct
  source 1..75: mol_type = other DNA
atgaccgctaagaatatttccctggaccgctataaacagcgattttttggtgactttctggaattaccaggactg

SEQ ID NO: 46046 - DNA, 75 bp, synthetic construct
  source 1..75: mol_type = other DNA
acgccttactgaccagtggtctgccggtaagcgaagtggatattgtttgcacacttcctctgacagagtattacg

SEQ ID NO: 46047 - DNA, 75 bp, synthetic construct
  source 1..75: mol_type = other DNA
cgacctgacagaacggctggcgcgtgtgctgtttgtggcgaatatctgggggcggctccatgagcgtgacgagca

SEQ ID NO: 46048 - DNA, 75 bp, synthetic construct
  source 1..75: mol_type = other DNA
ttctctgcctcgtctggatggatttgagcgatgcggcgagtctttcgacaccgtaatcagtgccaacccgcaatc

SEQ ID NO: 46049 - DNA, 75 bp, synthetic construct
  source 1..75: mol_type = other DNA
caaaaagacgttgccaaaagcgccgcctaaatatcagtttgatgaaaacggcgaaacgaaatactggtctggtcg

SEQ ID NO: 46050 - DNA, 75 bp, synthetic construct
  source 1..75: mol_type = other DNA
aactgtacccccagatgaacaccgacgacctgacagaacggctggcgcgtgtgctgtttgtggcgaatatctggg

SEQ ID NO: 46051 - DNA, 75 bp, synthetic construct
  source 1..75: mol_type = other DNA
gcacaacgtcttcttggacataaatctgattcaatggcggcgcattatagggacagtcgcgggcgggagtgggac

SEQ ID NO: 46052 - DNA, 75 bp, synthetic construct
  source 1..75: mol_type = other DNA
ttataccctgcggcttgttcgtaatggtcagccgttaaaggcgggggattattatgccgcattacgtttcagaat

SEQ ID NO: 46053 - DNA, 75 bp, synthetic construct
  source 1..75: mol_type = other DNA
atggctgatgcaatggatctcgtccagcagcgcgttgaagaagaacgccaacgtcatatccgtgctgcccgtgcc

SEQ ID NO: 46054 - DNA, 75 bp, synthetic construct
  source 1..75: mol_type = other DNA
gtgtgattgtattatttattgcctgtaatgcagataaatacggttaccctctgttatcacgcattggcgcttatt

SEQ ID NO: 46055 - DNA, 75 bp, synthetic construct
  source 1..75: mol_type = other DNA
atgaaggtgaatttatggacgacaaacaattggcaggctctggctaacgaactggccaaaaatctcaaaactcct

SEQ ID NO: 46056 - DNA, 75 bp, synthetic construct
  source 1..75: mol_type = other DNA
atctttggctgaacctttcactattcacctgcaggactgcatgctgagtcagggtggaactacttattcaaaagc

SEQ ID NO: 46057 - DNA, 75 bp, synthetic construct
  source 1..75: mol_type = other DNA
gggaaaagtgctgcccacgctgcggtaccggggtatacagcagggagggggggctgcaggaaggcaactggaagg

SEQ ID NO: 46058 - DNA, 75 bp, synthetic construct
  source 1..75: mol_type = other DNA
gatagaagacaacccagagataatattctacaaacataagaactatgttcatctgttttatccttctgagtcatc

SEQ ID NO: 46059 - DNA, 75 bp, synthetic construct
  source 1..75: mol_type = other DNA
agcagcgcgttgaagaagaactccagcgccatattcgtgctgcccgtgccaaaacaccgggcgtgtctcgcgtgc

SEQ ID NO: 46060 - DNA, 75 bp, synthetic construct
  source 1..75: mol_type = other DNA
atctgttggcatttactaccgctgcgcgttttggcagtttcagtaaagccgcagaagagttgggtttaaccactt

SEQ ID NO: 46061 - DNA, 75 bp, synthetic construct
  source 1..75: mol_type = other DNA
tgatgccgcacaccgcgcagccggtactgccagcgcaaaatcaggctctaccgccggaagttcgtgcgttcctta

SEQ ID NO: 46062 - DNA, 75 bp, synthetic construct
  source 1..75: mol_type = other DNA
taacctgatggtgtttatccgtccgaccattctgcgtgacggtatggcggcagacggcgtgtcgcagcgcaaata

SEQ ID NO: 46063 - DNA, 75 bp, synthetic construct
  source 1..75: mol_type = other DNA
tcttttattatggaagatgttccggataactgtacttatgttaccaggaaagaatctagggtaataatgcgttaa

SEQ ID NO: 46064 - DNA, 75 bp, synthetic construct
  source 1..75: mol_type = other DNA
ggctggactaccgctttgagtacgggcaggaccgtgtgaccatcacggacagcctgaaccggcgggaggtgctgt

SEQ ID NO: 46065 - DNA, 75 bp, synthetic construct
  source 1..75: mol_type = other DNA
cggcccggcagcgtttattgaaaccaacattgtcgggacttatacattgcttgaagcggcgcgggcttactggaa

SEQ ID NO: 46066 - DNA, 75 bp, synthetic construct
  source 1..75: mol_type = other DNA
ataaggctctttatttaatccttatcttttccttatggccagtaggtatagctacggttattggattaactattg

SEQ ID NO: 46067 - DNA, 75 bp, synthetic construct
  source 1..75: mol_type = other DNA
ccgcgttgctgtaattctttgcggattattcgctttatccaggcagcaagagaatcatcgccgtcatgttgttgt

SEQ ID NO: 46068 - DNA, 75 bp, synthetic construct
  source 1..75: mol_type = other DNA
ttatgtcgtgacactgacctcccgtggtcaggatgtggctgaaggccgggctcgtgtttccggtgtcaaacgtcc

SEQ ID NO: 46069 - DNA, 75 bp, synthetic construct
  source 1..75: mol_type = other DNA
gtaaccaaaggtgttgccgctaataagggggccggcgcaccggcgggttttgttcctcgtgacgggcaggcttcc

SEQ ID NO: 46070 - DNA, 75 bp, synthetic construct
  source 1..75: mol_type = other DNA
cacgttgtacgaagcgctacgcacagttgatcgccttctttacggagaaaattttattaaacaggctgagttata

SEQ ID NO: 46071 - DNA, 75 bp, synthetic construct
  source 1..75: mol_type = other DNA
ccagagccggagccagcgccggggaaaaaccgcctctttccgggccaaccttcagggcgcatggaatgaccggga

SEQ ID NO: 46072 - DNA, 75 bp, synthetic construct
  source 1..75: mol_type = other DNA
attggcgaacacacctggctgattgagaaagctggaatcgtggttcacagatgcccacgcaatccgtttaccgga

SEQ ID NO: 46073 - DNA, 75 bp, synthetic construct
  source 1..75: mol_type = other DNA
atgaaaagattacctccgttgatgttgaagactggacaccggagcgtcgattctcagttgttcttgagacggcta

SEQ ID NO: 46074 - DNA, 75 bp, synthetic construct
  source 1..75: mol_type = other DNA
caaatcgccgctgattgggaaaagaatatcctgatcgctgaacgctgtattaatcagcacttccggggcaaagac

SEQ ID NO: 46075 - DNA, 75 bp, synthetic construct
  source 1..75: mol_type = other DNA
gggggaaaacttcattcaggtagatttcgacacgccgtggtgtcagccggaaagcgacgttgttgcagaattaag

SEQ ID NO: 46076 - DNA, 75 bp, synthetic construct
  source 1..75: mol_type = other DNA
agcgtgattcaccgtcggatttactgctacgtcgccctcagggaattaaacctaaaaagaaaatcgtcaaaatta

SEQ ID NO: 46077 - DNA, 75 bp, synthetic construct
  source 1..75: mol_type = other DNA
gatcatctgagcaaaatccatacgttaaaacctaaccgtcttgaagccgaaacgttgagcggaattgcactttcc

SEQ ID NO: 46078 - DNA, 75 bp, synthetic construct
  source 1..75: mol_type = other DNA
gcttttttttaatgagcgggtggtatggtgaaaaattatattcatttggtatcgaaatgctgaatttagcattcg

SEQ ID NO: 46079 - DNA, 75 bp, synthetic construct
  source 1..75: mol_type = other DNA
gccagaagtttactctatgctatcatagtaatgggtatactttttaccggttgggggattggtattttatttttt

SEQ ID NO: 46080 - DNA, 75 bp, synthetic construct
  source 1..75: mol_type = other DNA
ggcctctgccagcctcgcaccgatctctgcatttgacgttctgattagcgatcgtccgttaccggcagattatgt

SEQ ID NO: 46081 - DNA, 75 bp, synthetic construct
  source 1..75: mol_type = other DNA
aagaaaaccgtcatcattgatcctgacgtacaaggcacaataaccgtgcgcagttacgatatgttaaatgaagaa

SEQ ID NO: 46082 - DNA, 75 bp, synthetic construct
  source 1..75: mol_type = other DNA
atgaagctgatcctgccttttccgcccagcgtgaacacgtactggcgacaccccaacaaaggggcgtttgctggt

SEQ ID NO: 46083 - DNA, 75 bp, synthetic construct
  source 1..75: mol_type = other DNA
cagcacaaggacggcagcgcgaggcatctttgagatggagttgtgcaaatatgccatcaaccagtcgctgtcaga

SEQ ID NO: 46084 - DNA, 75 bp, synthetic construct
  source 1..75: mol_type = other DNA
acggttacggcggacgttacaaccgtgacccggtcacggtggaggggcgggacaactggcttgtccgtctcgacc

SEQ ID NO: 46085 - DNA, 75 bp, synthetic construct
  source 1..75: mol_type = other DNA
tgcaccagttcgacaaagttgaaatggtgcagatcgtgcgcccggaagactcaatggcggcgctggaagagatga

SEQ ID NO: 46086 - DNA, 75 bp, synthetic construct
  source 1..75: mol_type = other DNA
caaattgcaggacagcttttatatgaacgtttcctgggatgcactgaacacggcatgcaaggatgtctgttttcc

SEQ ID NO: 46087 - DNA, 75 bp, synthetic construct
  source 1..75: mol_type = other DNA
gtgaaaagaatgctggtggagtggggaccggttatcccggaagggaaggtcgagatcactatcagtaagtacgag

SEQ ID NO: 46088 - DNA, 75 bp, synthetic construct
  source 1..75: mol_type = other DNA
cacgctaccgctgtgtcgggagcatcacaacgagcttcatgcggatccgctggcgttcgaagaaaagcatggttc

SEQ ID NO: 46089 - DNA, 75 bp, synthetic construct
  source 1..75: mol_type = other DNA
tggtggtgcgtctgcctccacggggacggccattcaggctgcggcggcgaacttccatttcgcgaccgggggatt

SEQ ID NO: 46090 - DNA, 75 bp, synthetic construct
  source 1..75: mol_type = other DNA
gcggtttgaacagcagcagagcgcgaagcaggcggcaatcagcgcaaaagcccgcggactcaccgaccgtcaggc

SEQ ID NO: 46091 - DNA, 75 bp, synthetic construct
  source 1..75: mol_type = other DNA
tgccggaacgcccttgtgaacaattaacctgctgcgccttatgtgtatgtgatcccaaacataagcacgggaatg

SEQ ID NO: 46092 - DNA, 75 bp, synthetic construct
  source 1..75: mol_type = other DNA
gtgagcaaattgatcttacccagcaatacggtcagttaccgcgcacatggcctgcctgtgtcagaaaatctgctg

SEQ ID NO: 46093 - DNA, 75 bp, synthetic construct
  source 1..75: mol_type = other DNA
ctggcgtcgctggcaaattccgacgttgatgcgctgattaaggtgctgccgcgcatgacatatccggcactgacc

SEQ ID NO: 46094 - DNA, 75 bp, synthetic construct
  source 1..75: mol_type = other DNA
tcgacgcagaacgttttggcattaaggttgtttcatcaccgcgtcacgccgatattttgttatttacaggcgcag

SEQ ID NO: 46095 - DNA, 75 bp, synthetic construct
  source 1..75: mol_type = other DNA
tattaagcctgcgagttcaaaaagatgaaggatatgtacctgttcaggaaagttttaaaagaacagatgtttttt

SEQ ID NO: 46096 - DNA, 75 bp, synthetic construct
  source 1..75: mol_type = other DNA
ctcattttttttacatgcgtctcgtcgataaattcaccggagcaggcgaaggggactatggatgtggtcaatgga

SEQ ID NO: 46097 - DNA, 75 bp, synthetic construct
  source 1..75: mol_type = other DNA
aacccgatgggccagcaacagcagggatagatgatttgggtgaaattttagctaaaatgaaacagagaacatcga

SEQ ID NO: 46098 - DNA, 75 bp, synthetic construct
  source 1..75: mol_type = other DNA
ggaaaaccggaagtacagaccattcgtcgtctggtgaccgaaagtgaagtggcggtggcggggaacagtaaattc

SEQ ID NO: 46099 - DNA, 75 bp, synthetic construct
  source 1..75: mol_type = other DNA
cccgatgggccagcaacagcagggatagatgatttgggtgaaattttagctaagatgaaacagagaacatcgaga

SEQ ID NO: 46100 - DNA, 75 bp, synthetic construct
  source 1..75: mol_type = other DNA
aagccacgatgccagaaaactgctgcagatgaccggagaatggctgaatacaacaggaactgatcagcaatcacc

SEQ ID NO: 46101 - DNA, 75 bp, synthetic construct
  source 1..75: mol_type = other DNA
tcttcagcattacatttttattttcggccatcgcctcaccgttttggggtggactcgccgaccgtaaaggccgaa

SEQ ID NO: 46102 - DNA, 75 bp, synthetic construct
  source 1..75: mol_type = other DNA
atgacaacaaacactgtttcccgcaaagtggcgtggctacgggtcgttacgctggcagtcgccgccttcatcttc

SEQ ID NO: 46103 - DNA, 75 bp, synthetic construct
  source 1..75: mol_type = other DNA
aatctgatattactgccgagtcggtattctttatgcagcgtcggcaggtgttaaaagcactgggcatcagcgcag

SEQ ID NO: 46104 - DNA, 75 bp, synthetic construct
  source 1..75: mol_type = other DNA
actcactttctgctatcagcgtcacgacggtgacgcccgccacaccgccagtagcgggaagatccgcctatgtcg

SEQ ID NO: 46105 - DNA, 75 bp, synthetic construct
  source 1..75: mol_type = other DNA
cgagcagtactgagtcgtttgcaggcaccaaccgggaaagcgtatgacgctattaaagagcttggcgtaaagaca

SEQ ID NO: 46106 - DNA, 75 bp, synthetic construct
  source 1..75: mol_type = other DNA
ggtcagttcctgaccctgcccgcggcgaccttttgcccgccgaagggcgaaatgttgacgagaacaactactggc

SEQ ID NO: 46107 - DNA, 75 bp, synthetic construct
  source 1..75: mol_type = other DNA
cgctggtacggtgctgacctgcctgatgctgtgcgccggttgcaccagcgccccgcctgcaccgacgccagtgat

SEQ ID NO: 46108 - DNA, 75 bp, synthetic construct
  source 1..75: mol_type = other DNA
cgaggatttgcgccgctggtatagcgctgacttgcctgatgctgtgcgccggttgcacacccgcaccggctgcgc

SEQ ID NO: 46109 - DNA, 75 bp, synthetic construct
  source 1..75: mol_type = other DNA
agtccggcgcagatgcggcgggctgaaggcattaattttaatcagaacaatcacgtggtgattcagaacgacggt

SEQ ID NO: 46110 - DNA, 75 bp, synthetic construct
  source 1..75: mol_type = other DNA
cttcagtggctgtatgccgtcgatgtgctgattgaaacacagggcgaggtctgcctccttccccttcccggtgat

SEQ ID NO: 46111 - DNA, 75 bp, synthetic construct
  source 1..75: mol_type = other DNA
gccacaatatcaatttttagtgctgctagcgaaaactcaaatggaataataaaagcattaaaaaacaacaacata

SEQ ID NO: 46112 - DNA, 75 bp, synthetic construct
  source 1..75: mol_type = other DNA
acattgcagactattgaagagatggaggatggacagaaacgcccgttatggctgccggatattgcaggcggtacg

SEQ ID NO: 46113 - DNA, 75 bp, synthetic construct
  source 1..75: mol_type = other DNA
tctgaatgttgaaggcgctattaaagaagctgctctggctgctctggctgctaaaggcttccagatggctggttt

SEQ ID NO: 46114 - DNA, 75 bp, synthetic construct
  source 1..75: mol_type = other DNA
tgacgggaaccatccagactgcagcctctgccgctttcacctggaaagaaatgaatgccctgaaacatgccattg

SEQ ID NO: 46115 - DNA, 75 bp, synthetic construct
  source 1..75: mol_type = other DNA
caacctgctgaatgaagagaacccgcatcagctgcagcagcttatccgcctgccggggcagcagtatgatgagga

SEQ ID NO: 46116 - DNA, 75 bp, synthetic construct
  source 1..75: mol_type = other DNA
agtaatcaggcggtaccggcattgtccttgtattcaggtaatcactggtctacggcaaaggaaattttaaactca

SEQ ID NO: 46117 - DNA, 75 bp, synthetic construct
  source 1..75: mol_type = other DNA
gcgacaatcagttcgggcaggatttcacattatacgaagcacttcgcacggttgatcgtctgcttcgcgggcaaa

SEQ ID NO: 46118 - DNA, 75 bp, synthetic construct
  source 1..75: mol_type = other DNA
tgctgttgagcaggggctgagccgccaggcgctggctgcacaaaaagccgggatgtccgtcgggcagtataaagc

SEQ ID NO: 46119 - DNA, 75 bp, synthetic construct
  source 1..75: mol_type = other DNA
gtgtatgacatggcccgcaagggggcgcaggatgaactccggctgcagttgcgtgatggcggtatgttatcaggg

SEQ ID NO: 46120 - DNA, 75 bp, synthetic construct
  source 1..75: mol_type = other DNA
gctgcgttctcaactcattcttggtgagtcttatacgacgggcgaaacctttgattccgtcagtatccgaggcat

SEQ ID NO: 46121 - DNA, 75 bp, synthetic construct
  source 1..75: mol_type = other DNA
tcaccgacggtctgatcatggttgatgcagccagcgctaaacgtgccgaagactcactggccctgcttcgtaaaa

SEQ ID NO: 46122 - DNA, 75 bp, synthetic construct
  source 1..75: mol_type = other DNA
ggaaagcggaaaatcagtatgcggtcctgaaagaggctgccacgaaacggcagttatctgagcaggaaaaatccc

SEQ ID NO: 46123 - DNA, 75 bp, synthetic construct
  source 1..75: mol_type = other DNA
cggcgttcgttcagtattgttgcagcagtagagctggatgatgccagccatttacgaccggaacgcagacgccgg

SEQ ID NO: 46124 - DNA, 75 bp, synthetic construct
  source 1..75: mol_type = other DNA
ggaaatgcgtcctctggattctgttgacctatgcagcgacaaaactgtttaaaccgatgaagcatgctgacgtac

SEQ ID NO: 46125 - DNA, 75 bp, synthetic construct
  source 1..75: mol_type = other DNA
gcgctggcgaaggccacatctgcactgaagaacacctggtctgcggaggagcagcttcgtggaagctggatggcc

SEQ ID NO: 46126 - DNA, 75 bp, synthetic construct
  source 1..75: mol_type = other DNA
cacgcctggctgattgagaaagctggaatcgtggtccacaaatgcccgcgtaatccgtttaccggaagccgcatt

SEQ ID NO: 46127 - DNA, 75 bp, synthetic construct
  source 1..75: mol_type = other DNA
gacacaggcaatggactatgaccggattctggcaggctcccgcagccatcagaccggtgtaagcggtgaaaataa

SEQ ID NO: 46128 - DNA, 75 bp, synthetic construct
  source 1..75: mol_type = other DNA
ccacctgacacggaaaccgtgaaaaacggcggcatcagtgcgcccgctggcggcgttcgcgtgagtgtcgcactg

SEQ ID NO: 46129 - DNA, 75 bp, synthetic construct
  source 1..75: mol_type = other DNA
tctgcgccagcttcgatgaaacgctggcgatgttgcacgcgggggatgtggtgtattgcgatccgccttatgacg

SEQ ID NO: 46130 - DNA, 75 bp, synthetic construct
  source 1..75: mol_type = other DNA
agattgcgcagaaaccaggtgcgcttcgcattctgaatcattcacttcgccttgccgccatgacggctcacggta

SEQ ID NO: 46131 - DNA, 75 bp, synthetic construct
  source 1..75: mol_type = other DNA
cgtaccgtgattttgctggtgagtccaccgtgtacaacggtaaagatggtcgtatgttagccaatattgggattg

SEQ ID NO: 46132 - DNA, 75 bp, synthetic construct
  source 1..75: mol_type = other DNA
atggctaagcaagattattacgagattttaggcgtttccaaaacagcggaagagcgtgaaatcagaaaggcctac

SEQ ID NO: 46133 - DNA, 75 bp, synthetic construct
  source 1..75: mol_type = other DNA
atttaggcggcctgaaacgggcgattaaacgcactgaaaaagaaatggggatagacgggagaggcaaaaaaatct

SEQ ID NO: 46134 - DNA, 75 bp, synthetic construct
  source 1..75: mol_type = other DNA
tgaatataatcatgaaattaatgcattggttagtgataaaaaatactacaactttatagcaattaatgcacgtaa

SEQ ID NO: 46135 - DNA, 75 bp, synthetic construct
  source 1..75: mol_type = other DNA
acttcagaagaagttacaagatctcaactattggatcaatgaagaagcaataactttcgaacactataaactata

SEQ ID NO: 46136 - DNA, 75 bp, synthetic construct
  source 1..75: mol_type = other DNA
ccgatgaggctgatcttgtgggggcattcgaagatgatgcgctgaatgtacgtgacgcatacgaaagcgcttttg

SEQ ID NO: 46137 - DNA, 75 bp, synthetic construct
  source 1..75: mol_type = other DNA
tgtagttgatggcgacactaacgtcattcgagaatatgacagtgaagatactgacttcggcatttacaatgaagg

SEQ ID NO: 46138 - DNA, 75 bp, synthetic construct
  source 1..75: mol_type = other DNA
ctctgcgttatttctggtgtcgggagtttggcaaggaaaaaggcaggaaacattatcacgtgatattactgctca

SEQ ID NO: 46139 - DNA, 75 bp, synthetic construct
  source 1..75: mol_type = other DNA
ctacttcgctatttcatcgtcagagtgtttatcgtgttcagattgtttggtcgtgaatggtcgtttgacctcaag

SEQ ID NO: 46140 - DNA, 75 bp, synthetic construct
  source 1..75: mol_type = other DNA
cgtgccgtctcgttaatccgggtggatttacgtttccctgagcatatgcctgtcaccatcatggatcccgatccg

SEQ ID NO: 46141 - DNA, 75 bp, synthetic construct
  source 1..75: mol_type = other DNA
ttatgctcaaggtaaattagttcgttgtgtggtcggtgaagtttttgatgtagcagttgatattcgtaaatcgtc

SEQ ID NO: 46142 - DNA, 75 bp, synthetic construct
  source 1..75: mol_type = other DNA
atgcggaaaaattagcactaggattagttaatttttcttgttcaacgctggcatcaatcccatctataagctcat

SEQ ID NO: 46143 - DNA, 75 bp, synthetic construct
  source 1..75: mol_type = other DNA
agttcacgccggaagtcatgatgatggtaaaggacaattgtgttaacaaacggcagcaggcagcgcttgcagccc

SEQ ID NO: 46144 - DNA, 75 bp, synthetic construct
  source 1..75: mol_type = other DNA
caaagataaagctctggcggaagcagcggccctgcttatattaagggaaaagttcaatgccctctgggacaacag

SEQ ID NO: 46145 - DNA, 75 bp, synthetic construct
  source 1..75: mol_type = other DNA
gagaactggagaaagagcttaagcgcaaagataaagctctggcggaagcagcggccctgcttatattaagggaaa

SEQ ID NO: 46146 - DNA, 75 bp, synthetic construct
  source 1..75: mol_type = other DNA
tttttcacccttcaatcccgccaatgcacgcagtggttaacaatcacaatagaaatattgattattggacggtaa

SEQ ID NO: 46147 - DNA, 75 bp, synthetic construct
  source 1..75: mol_type = other DNA
ttttgatattaacgccacgccgattgtggttggcgctaaatgctggttggcgacagatgtctttgtcgcgcctgg

SEQ ID NO: 46148 - DNA, 75 bp, synthetic construct
  source 1..75: mol_type = other DNA
accttaaggtcaatgcatatgctcaacgggaagacaacctgatgtcatccgtggccagcaatgtgaatacacgct

SEQ ID NO: 46149 - DNA, 75 bp, synthetic construct
  source 1..75: mol_type = other DNA
tttacaaaaacgattacaggaatttaatgaatggttaggaattaatattatccattttgaaaaatataacttaat

SEQ ID NO: 46150 - DNA, 75 bp, synthetic construct
  source 1..75: mol_type = other DNA
cggcggaatccgcggcaacgcgcgccgagacagcggcaaaacgggcagaggatattgcatccgccgtggcgcttg

SEQ ID NO: 46151 - DNA, 75 bp, synthetic construct
  source 1..75: mol_type = other DNA
tcatcatgtacatgaccgacgccgcgcagaaccaggaggacgtgaacaacatccgccatgccatgaaaagcgcca

SEQ ID NO: 46152 - DNA, 75 bp, synthetic construct
  source 1..75: mol_type = other DNA
ttcgtatattcctcggtatcggtctggtactgatcctcatttctgttgttgtcttttataaccagttcacctata

SEQ ID NO: 46153 - DNA, 75 bp, synthetic construct
  source 1..75: mol_type = other DNA
accgcgcagaaggataagttcggcgcgggtaagaacggttttacccgtggtaacccccagaccggcacgcctgcc

SEQ ID NO: 46154 - DNA, 75 bp, synthetic construct
  source 1..75: mol_type = other DNA
gcagaaccaggaggacgtgaacaacatccgccatgccatgaaaagcgccaaagggccgggcaacttccgcaacct

SEQ ID NO: 46155 - DNA, 75 bp, synthetic construct
  source 1..75: mol_type = other DNA
ggggatgtggagaaggcaagtacggtttttgttagaaatgaattaataccactacaacatcaaatatcgcagcta

SEQ ID NO: 46156 - DNA, 75 bp, synthetic construct
  source 1..75: mol_type = other DNA
cctgagcacgtggacaactcacgtggtgaagtcacaaaaaccataagcatatcctgtccgtataagagtggctct

SEQ ID NO: 46157 - DNA, 75 bp, synthetic construct
  source 1..75: mol_type = other DNA
atgatgaatggggcaacctgctgaatgaagagaacccgcatcagctgcagcagcttatccggctgccggggcagc

SEQ ID NO: 46158 - DNA, 75 bp, synthetic construct
  source 1..75: mol_type = other DNA
ataaggaagcagatcagcaacgggaaaaataaatcttttgatgtctatatattagatttaaaggatgagttagaa

SEQ ID NO: 46159 - DNA, 75 bp, synthetic construct
  source 1..75: mol_type = other DNA
atcagataccgttccgtctggttatgccctgatgcaggggcagacttttgacaaatctgcatacccgaaacttgc

SEQ ID NO: 46160 - DNA, 75 bp, synthetic construct
  source 1..75: mol_type = other DNA
aatgcaaaaacggatcaaggagattaatgtctggttaggtacagatattatcgcatttacagaatataacttaga

SEQ ID NO: 46161 - DNA, 75 bp, synthetic construct
  source 1..75: mol_type = other DNA
ggttgaagccggacgaactgtcaaggatgtttgccgcgaggccggtatctctgaagcgacctactacaattggaa

SEQ ID NO: 46162 - DNA, 75 bp, synthetic construct
  source 1..75: mol_type = other DNA
acgtcacccggacgcctcgctgaccgcaaaaggctttgttcaactcagtagcgccaccaacagcacgtctgaagc

SEQ ID NO: 46163 - DNA, 75 bp, synthetic construct
  source 1..75: mol_type = other DNA
ttacccggtttatccccgctggcgcggggaacacagtgctggaccatttcaaattcacaatagattcggtttatc

SEQ ID NO: 46164 - DNA, 75 bp, synthetic construct
  source 1..75: mol_type = other DNA
gaacatgaatgtgtggaaaacgtcagttccgtcgaaatcatgaaggcgacggaagcctctgagggttaccagact

SEQ ID NO: 46165 - DNA, 75 bp, synthetic construct
  source 1..75: mol_type = other DNA
aggaaggtaagctggtaacttttggtattgtgccaaccaaacccgaaactggatatggctacataaaaaccggag

SEQ ID NO: 46166 - DNA, 75 bp, synthetic construct
  source 1..75: mol_type = other DNA
cggcgatcccacttgccgaaaatgggaaactggtcacgtttggcatcgtgcccgatgcccccgaaacaggctatg

SEQ ID NO: 46167 - DNA, 75 bp, synthetic construct
  source 1..75: mol_type = other DNA
ctttccgctgtttgccctggtgtgggggctgaatctgtcccgtcatacgcatatccggcaggaggccattaaccg

SEQ ID NO: 46168 - DNA, 75 bp, synthetic construct
  source 1..75: mol_type = other DNA
ctatttgattcgccgctatatcgacagcgtaccgtggggaaattgtctcgataaacggatctggaacatcttctg

SEQ ID NO: 46169 - DNA, 75 bp, synthetic construct
  source 1..75: mol_type = other DNA
acgggatttagaaaaaatgttagcagacgcatggcgatggcaattgaaaaatcctaatggctataatgataggtg

SEQ ID NO: 46170 - DNA, 75 bp, synthetic construct
  source 1..75: mol_type = other DNA
tgcgttagcacaactggatgtactggcaaaacaaccggatcgtatatggtggagtacactggcgaaaagcaatct

SEQ ID NO: 46171 - DNA, 75 bp, synthetic construct
  source 1..75: mol_type = other DNA
caggttatattggtagtcatacagttttgactctcttacaaaaaggaatagatgtcattgtgattgatgattttt

SEQ ID NO: 46172 - DNA, 75 bp, synthetic construct
  source 1..75: mol_type = other DNA
ccagagtgtcgcgcgttttgcttctgcatccgacgtggaggtggacaaggttgcagaggctttcggaaaactgac

SEQ ID NO: 46173 - DNA, 75 bp, synthetic construct
  source 1..75: mol_type = other DNA
tggctcttgccgcactgctcgttattgagattgtcgcatttggtgcaattaacccgcggatgttagatctcaata

SEQ ID NO: 46174 - DNA, 75 bp, synthetic construct
  source 1..75: mol_type = other DNA
attccatttcaattgttgaacaaggaaatattttaacatttggtattattcctgattatgcagaaaccggttacg

SEQ ID NO: 46175 - DNA, 75 bp, synthetic construct
  source 1..75: mol_type = other DNA
ttcgacacgccgtggtgtcagccggaaagcgacgttattgcagaattaagccgccgtttcagttgcacactggag

SEQ ID NO: 46176 - DNA, 75 bp, synthetic construct
  source 1..75: mol_type = other DNA
gctaaaaatgcccgaaattttgttttctcaaaatatagctgggaacatgttactcagcgttttgaagcacaaata

SEQ ID NO: 46177 - DNA, 75 bp, synthetic construct
  source 1..75: mol_type = other DNA
tcacaccaatattttctataccgccaaaaggagctgcagcggttgaaacatggatttatcaggtcgcaaaaagac

SEQ ID NO: 46178 - DNA, 75 bp, synthetic construct
  source 1..75: mol_type = other DNA
gttgtggggatggggagtgattgcccagttcgcgtattatctggccggttttccctggtatgaaggaaatatcct

SEQ ID NO: 46179 - DNA, 75 bp, synthetic construct
  source 1..75: mol_type = other DNA
cgttgaatttaaagaaggcgagaaactctaccgggtgcttgaccctggcagtagcgataatagtttttgctggat

SEQ ID NO: 46180 - DNA, 75 bp, synthetic construct
  source 1..75: mol_type = other DNA
tgctgatgccggtgcggaagcccagcgtcttgcccgtggttatcttggtcttggggcgcttgccacaaaaaacag

SEQ ID NO: 46181 - DNA, 75 bp, synthetic construct
  source 1..75: mol_type = other DNA
ccagcggctggatctggatgtggcgcttgacctgctgacatcggggaaaatcgcttacggcaagcaccatttttc

SEQ ID NO: 46182 - DNA, 75 bp, synthetic construct
  source 1..75: mol_type = other DNA
aaattaacgcgcgcaagcgtggatggtgcagtcggtgagatggaggctcagggctatcagtttgaaaaacgccca

SEQ ID NO: 46183 - DNA, 75 bp, synthetic construct
  source 1..75: mol_type = other DNA
atgtacggaacatgcgaaacgctctgccgggagctggcagcgcagtatccgggagacgcgccgctgatgctggtt

SEQ ID NO: 46184 - DNA, 75 bp, synthetic construct
  source 1..75: mol_type = other DNA
atggacaaatggtatgagccgcccgtgagctttgacggcctggctcgcacctaccgcgccgccgtgcatcacagc

SEQ ID NO: 46185 - DNA, 75 bp, synthetic construct
  source 1..75: mol_type = other DNA
acaccgcattagatattctgtggcaaaacaacccagaccgaattgcacaataccagcgtattcaggttgaccatc

SEQ ID NO: 46186 - DNA, 75 bp, synthetic construct
  source 1..75: mol_type = other DNA
tggcggtggatatccgtcgttcatcgcccacctttggcaaatgggtgggcgcggtactcagcgcagagaataaac

SEQ ID NO: 46187 - DNA, 75 bp, synthetic construct
  source 1..75: mol_type = other DNA
atttaaatacagcggctgggtggaagcatctgataacgatgagcactatgacccaggaaaaagaatcacttatcg

SEQ ID NO: 46188 - DNA, 75 bp, synthetic construct
  source 1..75: mol_type = other DNA
atggtttactggttattgaacctactgtttatgaagatgagagaggatttttttatgaaagttataatgaaaaaa

SEQ ID NO: 46189 - DNA, 75 bp, synthetic construct
  source 1..75: mol_type = other DNA
gcttgcccgtatcaacacacagcatcaggatgcccggccaccggtagtggcagcagccatgtggagcaccaccgg

SEQ ID NO: 46190 - DNA, 75 bp, synthetic construct
  source 1..75: mol_type = other DNA
tcgctgatgactcgctgcctgctgaaatggcagcttctgactctggtgcgccccggtgaagcagcgggaacaatg

SEQ ID NO: 46191 - DNA, 75 bp, synthetic construct
  source 1..75: mol_type = other DNA
cagtaccaccggatgatggcggagacacaccagtaccaccagacgatggcggagatacaccagtaccgccggacg

SEQ ID NO: 46192 - DNA, 75 bp, synthetic construct
  source 1..75: mol_type = other DNA
tcacgcagggtaacatctttcatttactggagccggatattaatcaggagatttacgggctgcccggctatcttt

SEQ ID NO: 46193 - DNA, 75 bp, synthetic construct
  source 1..75: mol_type = other DNA
agtcggccattaaccggctgtggggatgggctgtgattgcccagttcgcgtattacgttgccggctttccctggt

SEQ ID NO: 46194 - DNA, 75 bp, synthetic construct
  source 1..75: mol_type = other DNA
taacgccgtgcaggatgttaaaaaggtggtggagaagatcaaagccgacggtcgccacgagcaccatattcaccg

SEQ ID NO: 46195 - DNA, 75 bp, synthetic construct
  source 1..75: mol_type = other DNA
cgtaccccggcctatgacgtgatgggggcggcggcgttgttcttttcggctgaatccgggcagataaaccacgcc

SEQ ID NO: 46196 - DNA, 75 bp, synthetic construct
  source 1..75: mol_type = other DNA
gaagtggatcagaaaaaggggatgcgatacgttgtggtaaatgccccggcgggtgtccaggaaggtaaatattat

SEQ ID NO: 46197 - DNA, 75 bp, synthetic construct
  source 1..75: mol_type = other DNA
tgaaactattctggcggccaaaagccattgaattagaagacgatggggtaatgacttacgaaaaagttgaaatca

SEQ ID NO: 46198 - DNA, 75 bp, synthetic construct
  source 1..75: mol_type = other DNA
ttcacaagcagagcgcggagcgcaggttaaagccaatacattgacgatgaattttagtaaagcgagagatttagc

SEQ ID NO: 46199 - DNA, 75 bp, synthetic construct
  source 1..75: mol_type = other DNA
atgccggaggatatttattgtggggtgaatatggcagtaaagatttcaggtgtactgaaagacggcacaggaaaa

SEQ ID NO: 46200 - DNA, 75 bp, synthetic construct
  source 1..75: mol_type = other DNA
aaaacgcaaagtaaatctcttcgcaattttcctgaaaaccatcagaaacgcagagaaatacgtgcagatgacaaa

SEQ ID NO: 46201 - DNA, 75 bp, synthetic construct
  source 1..75: mol_type = other DNA
ctccatgacagacaggcctggagcaacgactccggtacggatgaatggcatagttgggcgcaacattatgcggtt

SEQ ID NO: 46202 - DNA, 75 bp, synthetic construct
  source 1..75: mol_type = other DNA
gaacaaattaaagataatcgattcatccggttaattgagaaactgctttactccggatatatggaggaatggaaa

SEQ ID NO: 46203 - DNA, 75 bp, synthetic construct
  source 1..75: mol_type = other DNA
gatgaaggcgcattacagaaatggtggtctgttctaccgttcttcaagagacggttatggttttgaaagtggttg

SEQ ID NO: 46204 - DNA, 75 bp, synthetic construct
  source 1..75: mol_type = other DNA
gttcgctggaagtcagcacgctggggcttggcacgatgacgtttggtgaacagaacagcgaagccgacgcccacg

SEQ ID NO: 46205 - DNA, 75 bp, synthetic construct
  source 1..75: mol_type = other DNA
ggtagaggcgttgaaaaccggggcgctggattatctcatcaagccgctggatttcgataacctgcaggcgacgct

SEQ ID NO: 46206 - DNA, 75 bp, synthetic construct
  source 1..75: mol_type = other DNA
tgcgaggtggaaaacacagcatccgagatatggcaaagattcttggtatctcaagatcgaaggtttcttggttca

SEQ ID NO: 46207 - DNA, 75 bp, synthetic construct
  source 1..75: mol_type = other DNA
cacaactcgactatgccgtcgctcagggcattaaccttatcgacgttgccgaaatgtacccagtacctccgcgcc

SEQ ID NO: 46208 - DNA, 75 bp, synthetic construct
  source 1..75: mol_type = other DNA
aagcccggctggaagcggtattccatcagaataccggtgagtcgcaacagattgcgcaggatatcgatcaatccg

SEQ ID NO: 46209 - DNA, 75 bp, synthetic construct
  source 1..75: mol_type = other DNA
ataatccggatgcgctggcgaaggccacatctgcactgaagaacacctggtctgcggaggagcagcttcgtggaa

SEQ ID NO: 46210 - DNA, 75 bp, synthetic construct
  source 1..75: mol_type = other DNA
acgtatccgaatatcaaaatgatctggtgggcgggtggcggtaactttacccatcaccaggatactaatcgtctg

SEQ ID NO: 46211 - DNA, 75 bp, synthetic construct
  source 1..75: mol_type = other DNA
agcctttctgccaatatcatgcaacctttatccaataatctgggaaatgtatcattaagtgcgctttggcggaat

SEQ ID NO: 46212 - DNA, 75 bp, synthetic construct
  source 1..75: mol_type = other DNA
tgaatagatcattggcccaaataacaggcgagaatatgattggtgcaaatggcaggagcgtaccagaaatggcac

SEQ ID NO: 46213 - DNA, 75 bp, synthetic construct
  source 1..75: mol_type = other DNA
gtgaacgcccctgacaaactgccgcccgagacgcgccaacccgtttccggctacctgtggggtgcgctggccgtg

SEQ ID NO: 46214 - DNA, 75 bp, synthetic construct
  source 1..75: mol_type = other DNA
accgctgggagcaatctcttttgatgctacccgatcgagtagtaagttaaataatgataccagacacgaaggtac

SEQ ID NO: 46215 - DNA, 75 bp, synthetic construct
  source 1..75: mol_type = other DNA
gatgtgcccggctcgatggaatttgatctgggaaaaaactggcaactgacctgtgaatgcattcgccaggcactg

SEQ ID NO: 46216 - DNA, 75 bp, synthetic construct
  source 1..75: mol_type = other DNA
gcgcaacagttttcacccttatgctcttatttagggcattgttcacttacatttatccagacacacttcctttcg

SEQ ID NO: 46217 - DNA, 75 bp, synthetic construct
  source 1..75: mol_type = other DNA
aagccatcttccgtgtccgtcagagtggcaatgaacctgctcagacagacaaagagatgccaccggaaaaacagg

SEQ ID NO: 46218 - DNA, 75 bp, synthetic construct
  source 1..75: mol_type = other DNA
cagccatgggagaaacgaaaacgccgcatcatgcgcatacaaaaaggcgtgaagtttatctggaaggacggccag

SEQ ID NO: 46219 - DNA, 75 bp, synthetic construct
  source 1..75: mol_type = other DNA
gcggccacgcagacctttgacggtattgcacagaatatggcagcgatgctgaccggcagcgaacagaactggcgt

SEQ ID NO: 46220 - DNA, 75 bp, synthetic construct
  source 1..75: mol_type = other DNA
ttccccgtcgggctacggtcatggttaatgcgggaatacggcgacgatacagcgcatgatgtgtcaggcttgaat

SEQ ID NO: 46221 - DNA, 75 bp, synthetic construct
  source 1..75: mol_type = other DNA
ctgcatgattttaacgcacatcggccgctggcattagacgatgacctggatgcggaatttacctggcgagagccc

SEQ ID NO: 46222 - DNA, 75 bp, synthetic construct
  source 1..75: mol_type = other DNA
ctctttacccggtcctgaccagtatgcccggagtcggtgtcaggaccgcagccagactcctcaccgaggtcgcct

SEQ ID NO: 46223 - DNA, 75 bp, synthetic construct
  source 1..75: mol_type = other DNA
tttaacccatgagtatctgcacctggcctttgatggttatcccaccgggcttgatgagaactatatcgaaacgct

SEQ ID NO: 46224 - DNA, 75 bp, synthetic construct
  source 1..75: mol_type = other DNA
gcgcagcttcctcggcaacggcggcaggaaattccgcgaaggcggcaaagacgtctgagacgaacgccaggtctt

SEQ ID NO: 46225 - DNA, 75 bp, synthetic construct
  source 1..75: mol_type = other DNA
ttctggacttatgaacatggtcgtcttgttttttcgacagaagaaacgaaaagtttcagtattagtgtattaccc

SEQ ID NO: 46226 - DNA, 75 bp, synthetic construct
  source 1..75: mol_type = other DNA
tcgtcactctcgtctggggaatatctccccggcagccttcagggaaaaatatcatcagatggctgcttaaaaaaa

SEQ ID NO: 46227 - DNA, 75 bp, synthetic construct
  source 1..75: mol_type = other DNA
caactaacgcccagtttacctatattaatcacggaacagattattcacctggctggcgaagggactataactcca

SEQ ID NO: 46228 - DNA, 75 bp, synthetic construct
  source 1..75: mol_type = other DNA
atctggctaatacaaattgggttgagaatgtgaaaagcggtgcttatcagtcgtggattgaacaaaactatgagg

SEQ ID NO: 46229 - DNA, 75 bp, synthetic construct
  source 1..75: mol_type = other DNA
gtatctggctggttgcaggtatcaccgatatgcgaaatggctttaacggcctggcgtcaaaagttcagaacgtcc

SEQ ID NO: 46230 - DNA, 75 bp, synthetic construct
  source 1..75: mol_type = other DNA
gagcctgttacgttgttaaccgggcagttgactttctcttttattcttgcttgtttttttattgttctaactggc

SEQ ID NO: 46231 - DNA, 75 bp, synthetic construct
  source 1..75: mol_type = other DNA
atgaaaggattattagctttactcatttcttctatggtccttcctgcacatgccggtattgttatctacgggacg

SEQ ID NO: 46232 - DNA, 75 bp, synthetic construct
  source 1..75: mol_type = other DNA
gaaaacggtgattcgtagcgtgcgtgatgcggtggtgtcggtcgcacgggccgtctgggactggatattcttctg

SEQ ID NO: 46233 - DNA, 75 bp, synthetic construct
  source 1..75: mol_type = other DNA
acggctcgccacggctcaggcagatgcccggcagcagttccggacagacgccgcgtttttcgaatcatacctggc

SEQ ID NO: 46234 - DNA, 75 bp, synthetic construct
  source 1..75: mol_type = other DNA
gcggaccggctatctggaggatgagtatatcctgtcctgcaaatgcactcgcagccagatgtcgtcagtaaattt

SEQ ID NO: 46235 - DNA, 75 bp, synthetic construct
  source 1..75: mol_type = other DNA
accagctaatcgagaataaactctgccaggctgggttaaaacgtgagcacgctgcaaccgtggctgaagtattgg

SEQ ID NO: 46236 - DNA, 75 bp, synthetic construct
  source 1..75: mol_type = other DNA
atgaaccgggcactgtgtggcgtgattattgtcctgctggtggcctgtggtgcgctgtggctggcaacagaccat

SEQ ID NO: 46237 - DNA, 75 bp, synthetic construct
  source 1..75: mol_type = other DNA
tactttccgctataccgagaacggtccggaaggtctggtaacgggtaaaaaagccatcgttattaccagccgcgg

SEQ ID NO: 46238 - DNA, 75 bp, synthetic construct
  source 1..75: mol_type = other DNA
ccagtagcactcaacagcgccttagacttatcggaagatgagttggagatgttgcgattgtatcgcgcacttcca

SEQ ID NO: 46239 - DNA, 75 bp, synthetic construct
  source 1..75: mol_type = other DNA
agatttaaggattctggttattgaccttgatccgcaatcttcagcaacgatgtttttaagccataaacactctat

SEQ ID NO: 46240 - DNA, 75 bp, synthetic construct
  source 1..75: mol_type = other DNA
atttacacgcatgtgctgaaagttggcggtgccggagtgcgctcaccgcttgatgcgctgccgcccctcactagt

SEQ ID NO: 46241 - DNA, 75 bp, synthetic construct
  source 1..75: mol_type = other DNA
cccactccattgttttcgatgaagcagaaaaccggatgcacaccattaaagcggtgatggtagcaactctcggcg

SEQ ID NO: 46242 - DNA, 75 bp, synthetic construct
  source 1..75: mol_type = other DNA
cccccgactggcagacaccgctgaacgggattatttcaccctcagagaccgattgatgacgatgcagatgcaact

SEQ ID NO: 46243 - DNA, 75 bp, synthetic construct
  source 1..75: mol_type = other DNA
tggtgatgtgatggaaggcatttccgtcggtacgctgttccatgcccaggcgactccgcttgaaaaccgtaaacg

SEQ ID NO: 46244 - DNA, 75 bp, synthetic construct
  source 1..75: mol_type = other DNA
atgagtgtgctcattaatgaaaaactgcattcgcatcggctgaaatggcgctggccgctctcgcgtcaggtgacc

SEQ ID NO: 46245 - DNA, 75 bp, synthetic construct
  source 1..75: mol_type = other DNA
cgctgttggtgtccttcttatcctgctgctattcgttatatggttattcttgccggaagtggtttacgccagctg

SEQ ID NO: 46246 - DNA, 75 bp, synthetic construct
  source 1..75: mol_type = other DNA
tggtttgtcgtaaatggtcggcaagcgtgggggcgttgtgggtaaccataacggcagattttgaacaggtcgtgg

SEQ ID NO: 46247 - DNA, 75 bp, synthetic construct
  source 1..75: mol_type = other DNA
caagtatcaaaaatgcgttgcagttttgtagccgaattattttagtcaccggctatcgtggtaatgaactgcacg

SEQ ID NO: 46248 - DNA, 75 bp, synthetic construct
  source 1..75: mol_type = other DNA
gaataggccgagaactagaaagggtaaggatcgctacaatcctcacccctgtttgtgcacttgtaatctcagtac

SEQ ID NO: 46249 - DNA, 75 bp, synthetic construct
  source 1..75: mol_type = other DNA
cttcttttgcggcacgctcgtttccgtaaataccgtgactggtttttgttcgatgaggtcgaaccaaaggccggg

SEQ ID NO: 46250 - DNA, 75 bp, synthetic construct
  source 1..75: mol_type = other DNA
aacatgccgtgctcttgttgcgtgtctaaacaagttaggcgcaaaagtaagtcttgatgacgtgttcccgccgga

SEQ ID NO: 46251 - DNA, 75 bp, synthetic construct
  source 1..75: mol_type = other DNA
atcgctgacatgcagaagcgtcaacgtgatgtagcagaactcgacgccagatacacaaaggagcttgctgatgct

SEQ ID NO: 46252 - DNA, 75 bp, synthetic construct
  source 1..75: mol_type = other DNA
gcgttcgacagcgctactgtcggtgcggcgcagctggtctacaaggcgcatctgcgtacctacagcgtggagaag

SEQ ID NO: 46253 - DNA, 75 bp, synthetic construct
  source 1..75: mol_type = other DNA
ctccgcggttgcacagaatacggcagccgcgaaaaaatcagccagcgatgccagtgcatcagccagcgaggcggc

SEQ ID NO: 46254 - DNA, 75 bp, synthetic construct
  source 1..75: mol_type = other DNA
aatattgggacgaaatattttcaggtaaagatgagaaaatagttaaaagtaaagataacaatatcaagtcatttt

SEQ ID NO: 46255 - DNA, 75 bp, synthetic construct
  source 1..75: mol_type = other DNA
agctggcggtcccctttgcgagtaccggagataaaaaccgtatcccggacaaggcgacacagcagaccagagaga

SEQ ID NO: 46256 - DNA, 75 bp, synthetic construct
  source 1..75: mol_type = other DNA
ctgcttacccgaaacttgcagccgcttatccgtcaggcgtgatccctgatatgcgtggctggacgattaagggca

SEQ ID NO: 46257 - DNA, 75 bp, synthetic construct
  source 1..75: mol_type = other DNA
ttgtcctgaccagcctctgtgccggtcaggtgcatgctgaatccggtggtcagataccatatccggaaaaaagcc

SEQ ID NO: 46258 - DNA, 75 bp, synthetic construct
  source 1..75: mol_type = other DNA
taccggctgtgcagtcaccaaagcgcaggaacggcggcgacagcgatgtgaaaacggaggactcccatgtcagct

SEQ ID NO: 46259 - DNA, 75 bp, synthetic construct
  source 1..75: mol_type = other DNA
gattgagtttgagtatcacaacctcgacaggtttgaggaaatattcatctcgatggacgttgatgatgttggtcg

SEQ ID NO: 46260 - DNA, 75 bp, synthetic construct
  source 1..75: mol_type = other DNA
gtcgatggtgttaatctcactgaactgattaataacatcgctgaaaacggttattcactccgtgtggtggaggaa

SEQ ID NO: 46261 - DNA, 75 bp, synthetic construct
  source 1..75: mol_type = other DNA
atgccctgatgcgtgcaccagagcctgttaccctggtggccatcggcccgttaaccaatattgcgctgttacttt

SEQ ID NO: 46262 - DNA, 75 bp, synthetic construct
  source 1..75: mol_type = other DNA
atacagatatactaaagctggtgtgtatactccccataatgatattggttacttggtatatgatgtcgtatatgg

SEQ ID NO: 46263 - DNA, 75 bp, synthetic construct
  source 1..75: mol_type = other DNA
ggcggggattcgttcgctctggtgaatctgaaaagccatgctatagggtattttcaggcataaaaaaagcggtcc

SEQ ID NO: 46264 - DNA, 75 bp, synthetic construct
  source 1..75: mol_type = other DNA
acctgtaaaaacacccgcgatagaagcatggattattagcgaaatcatttggtgggcgcataaccgggataatgc

SEQ ID NO: 46265 - DNA, 75 bp, synthetic construct
  source 1..75: mol_type = other DNA
gattgagctgggtggtgagaactacgacatcatcgcagagtttaacggccaaccggcttccggtctggggatcaa

SEQ ID NO: 46266 - DNA, 75 bp, synthetic construct
  source 1..75: mol_type = other DNA
atgccaacaagcattgaagtcctctacacaagatcttgattttatccgtatagataatgactcatttagttgttg

SEQ ID NO: 46267 - DNA, 75 bp, synthetic construct
  source 1..75: mol_type = other DNA
acagaatatttacagcatcgggaaatatttcggccttggggcagtcatgatactatagctgaagggccgcgcttt

SEQ ID NO: 46268 - DNA, 75 bp, synthetic construct
  source 1..75: mol_type = other DNA
gtggatctggtaccagattatggcctctttcacgtacactttatccgaaacaatttctgtctttaaatagccgct

SEQ ID NO: 46269 - DNA, 75 bp, synthetic construct
  source 1..75: mol_type = other DNA
ttgagaatccaggaaagatccctttggagattattgaggtacgttcaggtgtctacttggatgaagatgatgttg

SEQ ID NO: 46270 - DNA, 75 bp, synthetic construct
  source 1..75: mol_type = other DNA
aatcccttagttctttgtaacgagcggcaccgatttattgttgctgaacaactgagagggataggaaaattagct

SEQ ID NO: 46271 - DNA, 75 bp, synthetic construct
  source 1..75: mol_type = other DNA
agccggaaactggtaaaggaacggtccagactgaaacgggccacggtcagaaatccgaatgccagaattatcgtt

SEQ ID NO: 46272 - DNA, 75 bp, synthetic construct
  source 1..75: mol_type = other DNA
atgtcccagccggttggtgatcttgttattgaccttagtctggatgctgtccgtttcgatgagcagatgagccgg

SEQ ID NO: 46273 - DNA, 75 bp, synthetic construct
  source 1..75: mol_type = other DNA
gggatgccattctggatatcggtcgtccggaatcctcagcggatatgctcgccagtgcgcagaaggcatttgatg

SEQ ID NO: 46274 - DNA, 75 bp, synthetic construct
  source 1..75: mol_type = other DNA
tgtcggcataccggacccggcgcgacacgggtaacggcaacctgccggatattgaaagccgtattcagaaggcag

SEQ ID NO: 46275 - DNA, 75 bp, synthetic construct
  source 1..75: mol_type = other DNA
agaatcgaaacagagaatggtgaacaggcgaaggcgcggcaccgtagcctggcggaggtgttgcaggaggacacg

SEQ ID NO: 46276 - DNA, 75 bp, synthetic construct
  source 1..75: mol_type = other DNA
cagaagttcagcgtagaactggatatagcaaggcatggatttatcgccttatggggcaaggtaaatttcctgcat

SEQ ID NO: 46277 - DNA, 75 bp, synthetic construct
  source 1..75: mol_type = other DNA
atggctaaacgcgttacaaaattaaaggccgcagccgaggcggcaccgcagacccgggaagaagtcagccgtgat

SEQ ID NO: 46278 - DNA, 75 bp, synthetic construct
  source 1..75: mol_type = other DNA
ttggcgaaacggcgattgtgcaaattcgcaaccgtgaaatgccggttaaagtgacgaaacctgtttttgtgcgta

SEQ ID NO: 46279 - DNA, 75 bp, synthetic construct
  source 1..75: mol_type = other DNA
ggcgaagccggggatacggaattcctgaaggaagtcaagggggcttaccaggcacagctacagaactcagcgtat

SEQ ID NO: 46280 - DNA, 75 bp, synthetic construct
  source 1..75: mol_type = other DNA
gggattcggtgctggatattggtcgcccggacactgcccagggaatgctggagaaagcagaaaaggcttttgatg

SEQ ID NO: 46281 - DNA, 75 bp, synthetic construct
  source 1..75: mol_type = other DNA
aacttgcagccgcttatccgtcaggcgtgatccctgatatgcgtggctggacgattaagggcaagcccgccagtg

SEQ ID NO: 46282 - DNA, 75 bp, synthetic construct
  source 1..75: mol_type = other DNA
agccaacgctactgtttaatggttacgccgaccaggtggcatcgctgtatcgtggcctggatttgcgggagaatt

SEQ ID NO: 46283 - DNA, 75 bp, synthetic construct
  source 1..75: mol_type = other DNA
gccgctaatgctggtagcctgaaaaccgatccatggacactgaaaatcagcggcgaagtggcaaaaccattgacc

SEQ ID NO: 46284 - DNA, 75 bp, synthetic construct
  source 1..75: mol_type = other DNA
cttagctatccggcggatgacattaaaacgttgatgacgacggcgcgcgccagtctgacgcaatccaccacgctg

SEQ ID NO: 46285 - DNA, 75 bp, synthetic construct
  source 1..75: mol_type = other DNA
cacactgatgaccgtaggtgtttatggcaaggcgttaccaccgcaaaatggcgcgccggtgcgactgattgtgcc

SEQ ID NO: 46286 - DNA, 75 bp, synthetic construct
  source 1..75: mol_type = other DNA
catcgatatgcataacggtattcttaaagttgtgcgttcaaaagatgccaaaatggcggcagtaccggtagccag

SEQ ID NO: 46287 - DNA, 75 bp, synthetic construct
  source 1..75: mol_type = other DNA
tatggcgatagtcgtggggatttttctctgctggcggctgcgcgatcgcccgcaggcgttaggtttaccggcggt

SEQ ID NO: 46288 - DNA, 75 bp, synthetic construct
  source 1..75: mol_type = other DNA
ctagatctggttgctgctcagctaaacaacagaccgagaaagacactgaagttcaaaacaccgaaagagataatt

SEQ ID NO: 46289 - DNA, 75 bp, synthetic construct
  source 1..75: mol_type = other DNA
atatggcgctggagcgcggcatcgttgaatttgatgatgtggcaggtgaactcgttttttttacatgcgtctcgt

SEQ ID NO: 46290 - DNA, 75 bp, synthetic construct
  source 1..75: mol_type = other DNA
aaatggccgcgctacgcaaacaggcgcgccagctcggcgacaataccgccgcctcggcggatgatgcggccggtg

SEQ ID NO: 46291 - DNA, 75 bp, synthetic construct
  source 1..75: mol_type = other DNA
caggccgctgccgttgaacaggggctgagccgtcaggccctggctgcacaaaaagccgggatgtccgtcgggcag

SEQ ID NO: 46292 - DNA, 75 bp, synthetic construct
  source 1..75: mol_type = other DNA
aacatcaactcagccacaaaaaagatatttaataaccttgataacttatcatatattcagaggacttcttttcgg

SEQ ID NO: 46293 - DNA, 75 bp, synthetic construct
  source 1..75: mol_type = other DNA
cggggtttgtcgaaacctggttttccgttgccagcgctgcggcggcaaaagaagtcattaagatcagtacctgga

SEQ ID NO: 46294 - DNA, 75 bp, synthetic construct
  source 1..75: mol_type = other DNA
catcagcggtgccaaacaacgcattattcgaaatctatttttattatcctggtggtttatttaatgaccactcga

SEQ ID NO: 46295 - DNA, 75 bp, synthetic construct
  source 1..75: mol_type = other DNA
gagcagattgcgtatgttgcgcagctgcagcgttccggtgatgaggccggggccttacaggcggcgaacgatatc

SEQ ID NO: 46296 - DNA, 75 bp, synthetic construct
  source 1..75: mol_type = other DNA
cagggcggaattcagggggcagtacattgtttatttatgcatctggaggtaatggaggatctgccggaggtgcat

SEQ ID NO: 46297 - DNA, 75 bp, synthetic construct
  source 1..75: mol_type = other DNA
tctctgcccgtggagcaacccttgcaggaatcaatggaatagcggagcaactggggatggccacccgggctcttt

SEQ ID NO: 46298 - DNA, 75 bp, synthetic construct
  source 1..75: mol_type = other DNA
attaaaaatccgttcgccctcaattcaactgataaaatttggcgctattggtttgaatgcaattatcttttcccc

SEQ ID NO: 46299 - DNA, 75 bp, synthetic construct
  source 1..75: mol_type = other DNA
cgatgtaaatggcgctcgtaacattttagctgcggggcacgccgttcttgcctgtggagagatggtgcagtcagg

SEQ ID NO: 46300 - DNA, 75 bp, synthetic construct
  source 1..75: mol_type = other DNA
aacaaactctgccgaaatgacgaatggcggccaagccgtaacgaacgaacagggtaaggctaccgtcacttatac

SEQ ID NO: 46301 - DNA, 75 bp, synthetic construct
  source 1..75: mol_type = other DNA
ctgaacagaggtgatatgctcacctcagaacaacacaggtgctccaatgaaaaaaagaaatttcagcgcagagtt

SEQ ID NO: 46302 - DNA, 75 bp, synthetic construct
  source 1..75: mol_type = other DNA
aaacgcatacacaggattgccccgttgtttgcggatgaactgatcgcgcgggaactggctgaacgaccggattat

SEQ ID NO: 46303 - DNA, 75 bp, synthetic construct
  source 1..75: mol_type = other DNA
ggctctaaattttttggttttgatatggataacgaattcatcagtggttttgatgtaggggcatggggagtatta

SEQ ID NO: 46304 - DNA, 75 bp, synthetic construct
  source 1..75: mol_type = other DNA
cgtcccggaatgcgtcacccgccgtcaggcggtggttaatcaggcccgcgccctgctgaaaaacaacacacacga

SEQ ID NO: 46305 - DNA, 75 bp, synthetic construct
  source 1..75: mol_type = other DNA
agttctggagcagtaaaggttttcaatcttgggaaaatacagttacccagtgactcctgcgcggtatctatgcac

SEQ ID NO: 46306 - DNA, 75 bp, synthetic construct
  source 1..75: mol_type = other DNA
cggccactatccgtgtgaacggtcaggaatactccacccttgagggggccacgttctccccgtccggctttgagc

SEQ ID NO: 46307 - DNA, 75 bp, synthetic construct
  source 1..75: mol_type = other DNA
tggtacagccgcaggacacactcgaggagcgtttcacccgtctgtcaaaaaatgcggtcggggagaacacagagt

SEQ ID NO: 46308 - DNA, 75 bp, synthetic construct
  source 1..75: mol_type = other DNA
ggcagccacggaagggcgcacggcagagcgtcttgagcaaatccgtgacacggtggaggatgccctgcaggacag

SEQ ID NO: 46309 - DNA, 75 bp, synthetic construct
  source 1..75: mol_type = other DNA
aaaaaactccgagctgcaggccgtgcttggggtcgataagcagtctccagaaatgcaggctctacgcaaacaggc

SEQ ID NO: 46310 - DNA, 75 bp, synthetic construct
  source 1..75: mol_type = other DNA
ctcggtacaggtcaaaaagccgagtatatgaaaacgatattcggcgaggaagccagttccgctgcaagtgtgtta

SEQ ID NO: 46311 - DNA, 75 bp, synthetic construct
  source 1..75: mol_type = other DNA
cccgggaacgccacgaaataccccgtgcgcgagctgctgggcctgaacgaaaaagacaaacagcaaatcacagaa

SEQ ID NO: 46312 - DNA, 75 bp, synthetic construct
  source 1..75: mol_type = other DNA
ataatccgcaggcgctggcacaggtcaccggggcactgaaacagacatgggcggatgaagacatgctgcgcggtg

SEQ ID NO: 46313 - DNA, 75 bp, synthetic construct
  source 1..75: mol_type = other DNA
cgcagattatcattgccaaaagcggcggcgatgcggcggccattcaggcggcgacgccggtcacactgaatatgg

SEQ ID NO: 46314 - DNA, 75 bp, synthetic construct
  source 1..75: mol_type = other DNA
aacatgatggtcgtaagcaagtttggtgctatgtcatcaagcctcgtgatgcgcaaagcaccctgttgaaagggg

SEQ ID NO: 46315 - DNA, 75 bp, synthetic construct
  source 1..75: mol_type = other DNA
tccctttattgccccactgaatatggcgctcaaagagatttcaaacgtgcccgaagaaatggaagaaaccgagac

SEQ ID NO: 46316 - DNA, 75 bp, synthetic construct
  source 1..75: mol_type = other DNA
gtcctggcgcgcatggaggacatcccggaagaccagcggactgaatccggtatttcttccgccgcggtgatggag

SEQ ID NO: 46317 - DNA, 75 bp, synthetic construct
  source 1..75: mol_type = other DNA
tgcacttgaaaaggcacggcaggaagccgaagcccttgccacacagtttaaaaacaccgaacgtccgacccgtgc

SEQ ID NO: 46318 - DNA, 75 bp, synthetic construct
  source 1..75: mol_type = other DNA
gtggcttcagatgactctaacaacagctggaatccggcatacaattgctttgatcgtccgggtaaaaaatgtatc

SEQ ID NO: 46319 - DNA, 75 bp, synthetic construct
  source 1..75: mol_type = other DNA
accttcctgaaaaacaaaggcgattataacaatatcaagatggattggcgtatggctaccgatcagcctggaaga

SEQ ID NO: 46320 - DNA, 75 bp, synthetic construct
  source 1..75: mol_type = other DNA
gggggataccgacttcatgcatctgataacgggtggacgaaaatcaacggcgaacaggtaacatctcagaaaatt

SEQ ID NO: 46321 - DNA, 75 bp, synthetic construct
  source 1..75: mol_type = other DNA
atggacggtagcgagatgatgaaactggttggctgggcgcagtcggtggtgaccttccacggtggcgcttctcaa

SEQ ID NO: 46322 - DNA, 75 bp, synthetic construct
  source 1..75: mol_type = other DNA
tcagcccgaataaaccccggcattatgagcggtatatggagcgaatgcagcaaaggaggaaagaatggggcattc

SEQ ID NO: 46323 - DNA, 75 bp, synthetic construct
  source 1..75: mol_type = other DNA
atcagacattttttgatgaagcggacgaactgttggctgacatggagcagcatttgctggttttgcagccggaag

SEQ ID NO: 46324 - DNA, 75 bp, synthetic construct
  source 1..75: mol_type = other DNA
tacaatcgtcagcgtcgtcactctcgtctggggaatatctccccggcagccttcagggaaaaatatcatcagatg

SEQ ID NO: 46325 - DNA, 75 bp, synthetic construct
  source 1..75: mol_type = other DNA
agggacagaagtctccttctggctggcgacggacaacgggccgttgcaggttacgcttgcaccgcaagagtccgt

SEQ ID NO: 46326 - DNA, 75 bp, synthetic construct
  source 1..75: mol_type = other DNA
gcaggcaatacagaaacgagaattcaaaccatacattcagcctattgtttgtgccagcaaccataaaattattgg

SEQ ID NO: 46327 - DNA, 75 bp, synthetic construct
  source 1..75: mol_type = other DNA
tcacgttctgcgtgacggcaatcctcatcatctggatgctgcacggttcgctgtgtgaaatacggatgagcttct

SEQ ID NO: 46328 - DNA, 75 bp, synthetic construct
  source 1..75: mol_type = other DNA
ggaatttttatcagtatccgttgaatccggtatctggtttcgatccattagggttaaaagtgtcttttcagggag

SEQ ID NO: 46329 - DNA, 75 bp, synthetic construct
  source 1..75: mol_type = other DNA
gccgggaatgtgacggtctatctcaaaggattgtctgtaccggtcatcctgaatatcaccagtggtgaaacggac

SEQ ID NO: 46330 - DNA, 75 bp, synthetic construct
  source 1..75: mol_type = other DNA
ccacgcgtatccagacggtatatcagccggggagcttcgcgccgctcatccgcatcgaaacagacaacggcgagc

SEQ ID NO: 46331 - DNA, 75 bp, synthetic construct
  source 1..75: mol_type = other DNA
cgcatgcagccttaacggtgtccagacccgtgagtgtggtcacacgtcacgcagtccgcttgactcgctggaaac

SEQ ID NO: 46332 - DNA, 75 bp, synthetic construct
  source 1..75: mol_type = other DNA
atgaagtggttatttttttctgccgtgatttgtccgttatttttcgctcttcccgctaaggctgccgccacaaac

SEQ ID NO: 46333 - DNA, 75 bp, synthetic construct
  source 1..75: mol_type = other DNA
tcaggcgaaagtgctggaatccgcaaagcgtgcggcggaggacttacaggcgaaatataaccgcctgacagattc

SEQ ID NO: 46334 - DNA, 75 bp, synthetic construct
  source 1..75: mol_type = other DNA
tatggctgccgctcatctgcatgcgatggcactggcacagttgcgcggtcatacactaccgttacgcactgactg

SEQ ID NO: 46335 - DNA, 75 bp, synthetic construct
  source 1..75: mol_type = other DNA
gccggcggaaacgctgttcgacgtgctgaacacccgtgccttcttccgctcgccgtcgcgcaatatcgccgagtt

SEQ ID NO: 46336 - DNA, 75 bp, synthetic construct
  source 1..75: mol_type = other DNA
acttcgacaacgtttccaacacgcttattcctatgggcacgaaggaagaccccttctggcaggggtcgggacgta

SEQ ID NO: 46337 - DNA, 75 bp, synthetic construct
  source 1..75: mol_type = other DNA
taacgtcgatgacggtcagaagggcggcggcatcaatagcctgacaagcgtcggcgtgaagtacagcagcaaaga

SEQ ID NO: 46338 - DNA, 75 bp, synthetic construct
  source 1..75: mol_type = other DNA
tctcctccaatgctgacacccacgcttccctcaagccggttatctccatgtggttgtccatcgccattcgcgggc

SEQ ID NO: 46339 - DNA, 75 bp, synthetic construct
  source 1..75: mol_type = other DNA
acctggccatcgtgctggggagttgcggtatgaatggtatctcactggcggatgagttattgatgcgggataatt

SEQ ID NO: 46340 - DNA, 75 bp, synthetic construct
  source 1..75: mol_type = other DNA
aacacctggtgtgatcacgcgcacattaatgaaggcataaaaaaagccggcatcatgccggcccaaaaaatataa

SEQ ID NO: 46341 - DNA, 75 bp, synthetic construct
  source 1..75: mol_type = other DNA
agcacttcgcgcaaccccgggtattctggactattcccgcgccgctatttttgcacttatccggagcgctcaccc

SEQ ID NO: 46342 - DNA, 75 bp, synthetic construct
  source 1..75: mol_type = other DNA
tcgcctgactattctgcaggaagaccagggacaattactgactcttgccggtgaacctgacggaaaacttcgcgc

SEQ ID NO: 46343 - DNA, 75 bp, synthetic construct
  source 1..75: mol_type = other DNA
atgattgttgcgctaaacggctggcgtgatctcgcgcacattaatgaaggcataaaaaaagccggcatcatgccg

SEQ ID NO: 46344 - DNA, 75 bp, synthetic construct
  source 1..75: mol_type = other DNA
cgcgcgtaataaagtgctcgaacggatggccgtgcaaggtgtgtggtcccgtgagcaggtaaaagagtcaaggga

SEQ ID NO: 46345 - DNA, 75 bp, synthetic construct
  source 1..75: mol_type = other DNA
tgcgattttgtggcgaatcagcaggcggttttcctgggcggtcactacatcttacagggcagcagaaacaggtga

SEQ ID NO: 46346 - DNA, 75 bp, synthetic construct
  source 1..75: mol_type = other DNA
tcactacgcagccggatggcacggtggagatctctgtcaccagccagacggccggaaccagtgcggtcactgcca

SEQ ID NO: 46347 - DNA, 75 bp, synthetic construct
  source 1..75: mol_type = other DNA
gttaaacgttatcatgctaaatccagacaaccgtttgatttattgtcagaaatagggcgagatagcgttggtgcc

SEQ ID NO: 46348 - DNA, 75 bp, synthetic construct
  source 1..75: mol_type = other DNA
acccgcgattctgtgtaccagaatcagccagaaacggaacagaacgaccagaaagcggaacagaacagcccaaat

SEQ ID NO: 46349 - DNA, 75 bp, synthetic construct
  source 1..75: mol_type = other DNA
gtggcaacagatgcctcggtgaatgacatcgcgaaagcactggatgcgggttacaccaacaacgaactgtttacc

SEQ ID NO: 46350 - DNA, 75 bp, synthetic construct
  source 1..75: mol_type = other DNA
atccgcgtgccgagttaggtaataataccgaatacgacatgctggcattgcgtaaaactatcgacctgagcgaaa

SEQ ID NO: 46351 - DNA, 75 bp, synthetic construct
  source 1..75: mol_type = other DNA
ccttccccctctgttcaggacaaaccagccagcactgacaataccaacatcaacggcgaagacatgactgagatt

SEQ ID NO: 46352 - DNA, 75 bp, synthetic construct
  source 1..75: mol_type = other DNA
accactgtgagttttgataacgtagtggaaggtagcaacctgaccgacgctgacgccatcacctcaacgtccgtg

SEQ ID NO: 46353 - DNA, 75 bp, synthetic construct
  source 1..75: mol_type = other DNA
tttcagaggaagttgaatatcaattaagcaacttcgattgtggagaagagtatctgaatacttttctcaccgatc

SEQ ID NO: 46354 - DNA, 75 bp, synthetic construct
  source 1..75: mol_type = other DNA
atgaaacatcctcacgataatatccgcgtaggcacgatcactttcgtctactccgttacgaagcgaggctgggta

SEQ ID NO: 46355 - DNA, 75 bp, synthetic construct
  source 1..75: mol_type = other DNA
caggtgatgaaggtactgcatgagcgggaaaaagccctgacgcaccgtgtcaccgattcagttggccgctttgcc

SEQ ID NO: 46356 - DNA, 75 bp, synthetic construct
  source 1..75: mol_type = other DNA
tatgaaattgacggggaaaagtacagctttgaccagctgagcccggatgccgtgcgcaccacggaaacccgctat

SEQ ID NO: 46357 - DNA, 75 bp, synthetic construct
  source 1..75: mol_type = other DNA
aagcagttaagcatgcgatggatgtgaatgtgagtacacgaaccagttcttattttgcagatcgtctaatccagg

SEQ ID NO: 46358 - DNA, 75 bp, synthetic construct
  source 1..75: mol_type = other DNA
ccggcaggggggatcgagcaggagctgaaaatgaaaccggaagaagagatggaacagcaactgccacccgggatc

SEQ ID NO: 46359 - DNA, 75 bp, synthetic construct
  source 1..75: mol_type = other DNA
ccatcggcggcggcagcggcggtatcgcctccatcaaccgcgcggctatgtacggccagaaatgcgcactgattg

SEQ ID NO: 46360 - DNA, 75 bp, synthetic construct
  source 1..75: mol_type = other DNA
tgcacatcaatatgctgcatgagcgcagccacgcactatcaaacatttattccgcctctgttttcagctatctgg

SEQ ID NO: 46361 - DNA, 75 bp, synthetic construct
  source 1..75: mol_type = other DNA
acagttatgtgatgaacacccgcaaggttcacactgatgacacaccagtaaaagtactggcaccgggcaggaaga

SEQ ID NO: 46362 - DNA, 75 bp, synthetic construct
  source 1..75: mol_type = other DNA
aacaacgcgtgatccgcgcgctggcggttttttcgggttacgggcgggtgatggttgtcggtggcggggcggaga

SEQ ID NO: 46363 - DNA, 75 bp, synthetic construct
  source 1..75: mol_type = other DNA
agacggtcagcgtgttggcagacaacggtgccacgactgctccgacggtcaccacgcagccggacggcacggtgg

SEQ ID NO: 46364 - DNA, 75 bp, synthetic construct
  source 1..75: mol_type = other DNA
gcagatgaaattccatgaagcatcgcgcatgggtcgcgactacgacatgacgcagatcttcactgggacgctggt

SEQ ID NO: 46365 - DNA, 75 bp, synthetic construct
  source 1..75: mol_type = other DNA
gggtattcggtcggctacgactcctatgatttatttgatttaggtgagtttgatcagaaaggcagcatccctact

SEQ ID NO: 46366 - DNA, 75 bp, synthetic construct
  source 1..75: mol_type = other DNA
cgcagggtggtcaggttgcttttatgcgcctgaaaatgttcctgcaaataaataacctgatttcttattatgtca

SEQ ID NO: 46367 - DNA, 75 bp, synthetic construct
  source 1..75: mol_type = other DNA
tgtcggctaacgcggaacagttttatcagtatcaaccttcggaaatcattctctcagaaggtcgcctggtggata

SEQ ID NO: 46368 - DNA, 75 bp, synthetic construct
  source 1..75: mol_type = other DNA
tctggtcttatgggtaaaaataagctggcagacgtttatcaacggctgtatttactggtggtgtacgtcactgga

SEQ ID NO: 46369 - DNA, 75 bp, synthetic construct
  source 1..75: mol_type = other DNA
gactctgttcatagttgtcgtcggcgccggatacagcatctaccctgctcaggacatacgctatggcttgtattt

SEQ ID NO: 46370 - DNA, 75 bp, synthetic construct
  source 1..75: mol_type = other DNA
ttctgctgctgtatgtcatcaatatgggtgtcgcagaagtcttgcaggcgaccggaaatatgctgctgccggggc

SEQ ID NO: 46371 - DNA, 75 bp, synthetic construct
  source 1..75: mol_type = other DNA
ccttctgttatccgaaatccgctgaaagcccagcgactggctgaggagataaataataaacgggagagtgtatga

SEQ ID NO: 46372 - DNA, 75 bp, synthetic construct
  source 1..75: mol_type = other DNA
tgttgcatgacatgcaccatcgcctgacccccatcgaagcggcgcgctttgggaagagcattgaggattaccgcc

SEQ ID NO: 46373 - DNA, 75 bp, synthetic construct
  source 1..75: mol_type = other DNA
agagctgtgaatatgacagtcacgccaatccggtggactgtcagctaatcattgttgatgaaggagtaaaacccg

SEQ ID NO: 46374 - DNA, 75 bp, synthetic construct
  source 1..75: mol_type = other DNA
tcatcacgctggtatgccctcactgcagccagcattactacaccgaagttccggccatggagttcatcccctgcg

SEQ ID NO: 46375 - DNA, 75 bp, synthetic construct
  source 1..75: mol_type = other DNA
tgacggtccattattaccggctgcgggattacgccctgcagcatccggaatgcagcgccattatgcgcatcattg

SEQ ID NO: 46376 - DNA, 75 bp, synthetic construct
  source 1..75: mol_type = other DNA
aagaagtgaaactccattgccgcatcgatggcgacgaggaagaccagttaatcagcggatacatcgccgcatcgc

SEQ ID NO: 46377 - DNA, 75 bp, synthetic construct
  source 1..75: mol_type = other DNA
acgttgttttgataaaaagctcgcagctaaggctccggtatggaaacgaaaaaatgagggaagagactcaatccg

SEQ ID NO: 46378 - DNA, 75 bp, synthetic construct
  source 1..75: mol_type = other DNA
atgatatcggataaactcataacgctggcgaagggcctttgtgtaatcgtcggtatttcattttcactaatgctg

SEQ ID NO: 46379 - DNA, 75 bp, synthetic construct
  source 1..75: mol_type = other DNA
aggaaaagctggtatagtgccgttgcagcggcggctaccgtggatcccggatgatgcggagtggttgcgctttct

SEQ ID NO: 46380 - DNA, 75 bp, synthetic construct
  source 1..75: mol_type = other DNA
taaacggcggagggatcgttgagagattattctgggattttgacgggaaaactattgcgttgccgcaggtgcgta

SEQ ID NO: 46381 - DNA, 75 bp, synthetic construct
  source 1..75: mol_type = other DNA
cccggtgtgctggccgtgtttgctgaacgccgtaaggacagttttggtccgtatgtccggctgatgagcgtcacc

SEQ ID NO: 46382 - DNA, 75 bp, synthetic construct
  source 1..75: mol_type = other DNA
tatagattacctgaagcagcaccccgagctgtcaatcgacttcattaatcgctacggatatcttccatctttggg

SEQ ID NO: 46383 - DNA, 75 bp, synthetic construct
  source 1..75: mol_type = other DNA
ctattagcgccagcgtatcagttccgacaaaacaatctcaatccatcccaataactttagcagggagaacaatcg

SEQ ID NO: 46384 - DNA, 75 bp, synthetic construct
  source 1..75: mol_type = other DNA
ttcgatgaaaagctggcggcgaaatatccctatgaacctgcttatctgccagtcgcacgtctggaagatggcacg

SEQ ID NO: 46385 - DNA, 75 bp, synthetic construct
  source 1..75: mol_type = other DNA
agacagcaaaatggcgtaggcctaatgccagtggcaactggggtattgtttcggcagtgcggtggggcaaactga

SEQ ID NO: 46386 - DNA, 75 bp, synthetic construct
  source 1..75: mol_type = other DNA
ggtgattccaaaatgtggcttgaagcaaataaagcgatgaaatcagcgatcaacattccgtggtatcgcaggaaa

SEQ ID NO: 46387 - DNA, 75 bp, synthetic construct
  source 1..75: mol_type = other DNA
ggtaaccgcgctgaaatgagcccggaagccgccggtattgctgcctgtctgatgacgtacagccatcatgcctgt

SEQ ID NO: 46388 - DNA, 75 bp, synthetic construct
  source 1..75: mol_type = other DNA
tgctgcgcagacctgaatattcccttctttgtggatgccggaaacaaaaagctggtcttctggtttgttcgtgtt

SEQ ID NO: 46389 - DNA, 75 bp, synthetic construct
  source 1..75: mol_type = other DNA
tacagacatatgcctctgatacgtcttgttgtcagagagttatcactgaagaaatcacctgagccagaaatatct

SEQ ID NO: 46390 - DNA, 75 bp, synthetic construct
  source 1..75: mol_type = other DNA
aaacaagcaagacattactatgagcggtcatgtaataatgggcttaagaaaggttgtgaacggttaaaagagtta

SEQ ID NO: 46391 - DNA, 75 bp, synthetic construct
  source 1..75: mol_type = other DNA
ttcgcctggatggaccgtctgtgcgcggattacagcggaggtatctggaatttttacaccctcagcaatgatggc

SEQ ID NO: 46392 - DNA, 75 bp, synthetic construct
  source 1..75: mol_type = other DNA
agcgacccggagtattactttgttgtggttctggcagggcagtcaaacggcatgtcgtatggtgaaggtcttccg

SEQ ID NO: 46393 - DNA, 75 bp, synthetic construct
  source 1..75: mol_type = other DNA
caatcgcggtggtcgcctgactattctgcaggaagaccagggacaattactgactcttgccggtgaacctgacgg

SEQ ID NO: 46394 - DNA, 75 bp, synthetic construct
  source 1..75: mol_type = other DNA
atgacgactgaaaataaagttaagcaatacacgaaaactcaagcgcctgaaggttactgggtggatgcccgtggc

SEQ ID NO: 46395 - DNA, 75 bp, synthetic construct
  source 1..75: mol_type = other DNA
agggcaagaattttggtcagctagagaattggcaccgttactggattatcgggactggcgcaattttcaaaaggt

SEQ ID NO: 46396 - DNA, 75 bp, synthetic construct
  source 1..75: mol_type = other DNA
ggttgtattaggttcaggggctcaacgagaacttgaagatgttcatctctcccgctatgcctgttacctggtagt

SEQ ID NO: 46397 - DNA, 75 bp, synthetic construct
  source 1..75: mol_type = other DNA
aagaacacggcgaagatacaggactacataaagcaccagcttgaagaggataaaatgggggagcagttatcgatt

SEQ ID NO: 46398 - DNA, 75 bp, synthetic construct
  source 1..75: mol_type = other DNA
cgtacagagaattatgccatgacggttcattattaccagctgcgggattatgccctgcagcatccggaatgcagc

SEQ ID NO: 46399 - DNA, 75 bp, synthetic construct
  source 1..75: mol_type = other DNA
acggactggcagaaaatgcgctggctgtcagcttctctgatgaaggctctggggttgtggttaacgaagtggatc

SEQ ID NO: 46400 - DNA, 75 bp, synthetic construct
  source 1..75: mol_type = other DNA
cattccacagtgggtgaccctggagccccgtatcttcggctggatggaccgtctttgcgaagactactgcggtgg

SEQ ID NO: 46401 - DNA, 75 bp, synthetic construct
  source 1..75: mol_type = other DNA
ttgcctgaacggcaacgatgcccaaatgagtgcagaagccgcaggtattgctgtctgcctgattgcgtacagcca

SEQ ID NO: 46402 - DNA, 75 bp, synthetic construct
  source 1..75: mol_type = other DNA
ctggcggaggcggacaataacacagcggaaagagcgcttcgtgcagtctgtctcggaaagaaaaattacgtgttc

SEQ ID NO: 46403 - DNA, 75 bp, synthetic construct
  source 1..75: mol_type = other DNA
taaaaaattacgctcgctatctcagtgaagaacctgagtgggcggcacgagctgaaaaagtggctgaacgcctgc

SEQ ID NO: 46404 - DNA, 75 bp, synthetic construct
  source 1..75: mol_type = other DNA
aagcgctactgacgtccctgcataagctgatgcaggagaaagaacacacattatcgaaaaaatgtcgtctgagag

SEQ ID NO: 46405 - DNA, 75 bp, synthetic construct
  source 1..75: mol_type = other DNA
cagaacataatttgtcgtgagtgccgccagagcgaagttatgcagcgtgtgctggcgttctatcggggtaatttt

SEQ ID NO: 46406 - DNA, 75 bp, synthetic construct
  source 1..75: mol_type = other DNA
atgccagatggttcaattgaacaatggggaggaattcgttttcctggtgaacacgagcctgtatccgccaatgtt

SEQ ID NO: 46407 - DNA, 75 bp, synthetic construct
  source 1..75: mol_type = other DNA
tggtggtttcgggggcgggaatatgtggggggcgaccaactggagcactaccggcttcatagctcactgcaatta

SEQ ID NO: 46408 - DNA, 75 bp, synthetic construct
  source 1..75: mol_type = other DNA
gaaatctttgcccgccagggtgtcgaactgagccgtgccttactctccaactgggttgatgcgtgctgccagtta

SEQ ID NO: 46409 - DNA, 75 bp, synthetic construct
  source 1..75: mol_type = other DNA
aattagcgattagaagaccagcgatactggttgcactggcacttttactgtgtagttgtaaaagcacgcctccag

SEQ ID NO: 46410 - DNA, 75 bp, synthetic construct
  source 1..75: mol_type = other DNA
cattttgcctgcggaaagttttcctactgacattcgctcgctgggcgtcggttttgccaccgccatgagtcgact

SEQ ID NO: 46411 - DNA, 75 bp, synthetic construct
  source 1..75: mol_type = other DNA
tagaccgcgcatttcttgcactttctcacagtgaaaacatgctggaaatattgcgcatatggcttgaaacacttg

SEQ ID NO: 46412 - DNA, 75 bp, synthetic construct
  source 1..75: mol_type = other DNA
atgctgaatcaggaaaccgcaaaggcagcacgaaccgattcaggttatatccttcgcgcaccgagacgaatgcgg

SEQ ID NO: 46413 - DNA, 75 bp, synthetic construct
  source 1..75: mol_type = other DNA
catgctgagagcgagtgggtatttttatcacgtaaggggaatccgctttctcggcaacagttttaccatattatc

SEQ ID NO: 46414 - DNA, 75 bp, synthetic construct
  source 1..75: mol_type = other DNA
caatctgaccaccggaacggtgtcatggcggctgggaaatccatcatgcagcgtcagtcgtgatgtggaaggtgt

SEQ ID NO: 46415 - DNA, 75 bp, synthetic construct
  source 1..75: mol_type = other DNA
ctggccgccacaccgaaagcggtcaaggctgcatacgatctggcaaacggaaaacaaccggcagatgccacgctc

SEQ ID NO: 46416 - DNA, 75 bp, synthetic construct
  source 1..75: mol_type = other DNA
tggtggcaaggtggcagagcatagtttcggcacctccaccacatccccgccacgcttcaacctgctgcgtattga

SEQ ID NO: 46417 - DNA, 75 bp, synthetic construct
  source 1..75: mol_type = other DNA
aacggtctaaatattcagtcggttgatatcagctacaacctcaagatcactggcaaatccagtcgcaagaaggaa

SEQ ID NO: 46418 - DNA, 75 bp, synthetic construct
  source 1..75: mol_type = other DNA
gcagcaacctgtatggcatgtctggtactgacactggtgatgttctgtgcggtactgatgtggtgaaggtcgtaa

SEQ ID NO: 46419 - DNA, 75 bp, synthetic construct
  source 1..75: mol_type = other DNA
acgcttcttgagtctgtaataaatgagttgcaggaaatagagacattgcacgacagatataacgaacagcacacc

SEQ ID NO: 46420 - DNA, 75 bp, synthetic construct
  source 1..75: mol_type = other DNA
ttgcggatgtgccttgaatcctttggcgataatgaacgtaatgcaaaaaaaacgcggattattacatcattaata

SEQ ID NO: 46421 - DNA, 75 bp, synthetic construct
  source 1..75: mol_type = other DNA
acatcaaaacacacctcagaagttcattcttcagaagacataccgtggcaggctctgccagcttcacacaggggg

SEQ ID NO: 46422 - DNA, 75 bp, synthetic construct
  source 1..75: mol_type = other DNA
tagaccgcgcatttagtgcccttgcttacgctgaaggtatgtacgaaatattgcgcatatggcttgaaacacttg

SEQ ID NO: 46423 - DNA, 75 bp, synthetic construct
  source 1..75: mol_type = other DNA
cacagtgggctgcgattggtgtactggggagtctggttctgggcttcctgacttatctgacaaatctgtacttca

SEQ ID NO: 46424 - DNA, 75 bp, synthetic construct
  source 1..75: mol_type = other DNA
tatgtcgacctaagctgctgattgcggatgaacccactactgcgctggacgtcaccgtacaggcgcagatcatga

SEQ ID NO: 46425 - DNA, 75 bp, synthetic construct
  source 1..75: mol_type = other DNA
ttgtgatgcaggaatggaagagaaacatgtaaatgccttggatatattcacacatagctatccagaaatttatgc

SEQ ID NO: 46426 - DNA, 75 bp, synthetic construct
  source 1..75: mol_type = other DNA
attcaaggacatccactaaggaagtatagatacgatttcttagcagcattacaacttgcaggaaataacataacg

SEQ ID NO: 46427 - DNA, 75 bp, synthetic construct
  source 1..75: mol_type = other DNA
aactacccgatttaagacaggaaaagggaagaatactcctgcaatcaccagtctcaagcggggattctgctaaat

SEQ ID NO: 46428 - DNA, 75 bp, synthetic construct
  source 1..75: mol_type = other DNA
gtgagcaatggaaaaaactcccttttccgacaaataaacttctgtacacagtttgctgtgccggtgacggatttg

SEQ ID NO: 46429 - DNA, 75 bp, synthetic construct
  source 1..75: mol_type = other DNA
acgtctgcaggttgaaatttttctttcatcacttgaactggaatgccaggctcttggacatggctctgcattttg

SEQ ID NO: 46430 - DNA, 75 bp, synthetic construct
  source 1..75: mol_type = other DNA
gtgaaatcatctcagtccactgctcaggttgaaggtgcgtatcgcctgatacgtaacccgtctgtgtccccgcaa

SEQ ID NO: 46431 - DNA, 75 bp, synthetic construct
  source 1..75: mol_type = other DNA
acggaggcggtcacggctttcccgtgggcgttttcgtcagcagacaagcccgtcagggcgcgtcagggggtttta

SEQ ID NO: 46432 - DNA, 75 bp, synthetic construct
  source 1..75: mol_type = other DNA
gatccggggccaagaacctgttcggctgctggttgtgaaatcacttaccagacgttaattaatgaaggtctgttg

SEQ ID NO: 46433 - DNA, 75 bp, synthetic construct
  source 1..75: mol_type = other DNA
aagttccgcgtattgcgttcgttaacaaaatggaccgcatgggtgcgaacttcctgaaagttgttaaccagatca

SEQ ID NO: 46434 - DNA, 75 bp, synthetic construct
  source 1..75: mol_type = other DNA
gttttaccaaaaaacaaatcgccgaggcaaaaatcctcgataacaacggaacctactttatcaacggctccatcc

SEQ ID NO: 46435 - DNA, 75 bp, synthetic construct
  source 1..75: mol_type = other DNA
tcactttggatgaagttaaccgactcaagattattcaggacgtcatcgaccggcgcctgacaacacagatggcag

SEQ ID NO: 46436 - DNA, 75 bp, synthetic construct
  source 1..75: mol_type = other DNA
cgggcgtagtattccgctgaagaaaaacgttgatgacgcgctgaaaaacccgaacgtcaccagcgtagagcatgt

SEQ ID NO: 46437 - DNA, 75 bp, synthetic construct
  source 1..75: mol_type = other DNA
tttctttttataatgacgaatctgttgttttatggcaaattaatccgtttcctgattatccattttttgcgttaa

SEQ ID NO: 46438 - DNA, 75 bp, synthetic construct
  source 1..75: mol_type = other DNA
ttctgtatggttgtttttctgcactggctgacctgcagaaacctgatgaaagaaaaagtgatgaaaggaatgaag

SEQ ID NO: 46439 - DNA, 75 bp, synthetic construct
  source 1..75: mol_type = other DNA
gcgtgctggggagtctgctgtttgggctgctgacatatctgacgaacctgtatttcaagattaaagaagaccggc

SEQ ID NO: 46440 - DNA, 75 bp, synthetic construct
  source 1..75: mol_type = other DNA
ttttatggccgctgcaaaaagcatggaccgtaatggctctcagttaatccgggattttatgcgccagaccgttga

SEQ ID NO: 46441 - DNA, 75 bp, synthetic construct
  source 1..75: mol_type = other DNA
gggaagtctgctgtttggcctgctgacgtatctgacaaatctttatttcaagattaaagaagataagcgtaaggc

SEQ ID NO: 46442 - DNA, 75 bp, synthetic construct
  source 1..75: mol_type = other DNA
ggcacttggctttctgacttatctgacaaatctgtacttcaaaatcagagaagacaaaagaaaggcagcacgggg

SEQ ID NO: 46443 - DNA, 75 bp, synthetic construct
  source 1..75: mol_type = other DNA
attacaacggcgttgtatgggagccggttcaggataaagagttacagcgtgctatggcgcagattttcattgatg

SEQ ID NO: 46444 - DNA, 75 bp, synthetic construct
  source 1..75: mol_type = other DNA
gatgcttgccgctgctttcgttatcctttactccggtgtgctcctgtttattctgtatttttgtttttctgccct

SEQ ID NO: 46445 - DNA, 75 bp, synthetic construct
  source 1..75: mol_type = other DNA
tgctattgcaggcgtaaaggaagcacgttgttaccgtagctttgttgatcgagagcctgaagactggactccgcg

SEQ ID NO: 46446 - DNA, 75 bp, synthetic construct
  source 1..75: mol_type = other DNA
cgttctgaaaaactgcgtcgtgaagttgaacaggctgaggccctgctgaatcaacgccgacaggacagcgatcgt

SEQ ID NO: 46447 - DNA, 75 bp, synthetic construct
  source 1..75: mol_type = other DNA
ttcctgcgatacctggcaatttaaaattactttttatggaatgtaatcctattaaagaggcatttttaatgccat

SEQ ID NO: 46448 - DNA, 75 bp, synthetic construct
  source 1..75: mol_type = other DNA
atatatgcggaagcaattccacagttacgcattgcaatggagatttcctatctctgtgcggcaaggctcggtgat

SEQ ID NO: 46449 - DNA, 75 bp, synthetic construct
  source 1..75: mol_type = other DNA
atgttcacgggaagtattgtcgcgattgttactccgatggatgaaaaaggtaatgtctgtcgggctagcttgaaa

SEQ ID NO: 46450 - DNA, 75 bp, synthetic construct
  source 1..75: mol_type = other DNA
gtgctctgacgctgacctttgcatccgctcttgagtatgtcggatggcctaaatcgctttctgttgccattggtg

SEQ ID NO: 46451 - DNA, 75 bp, synthetic construct
  source 1..75: mol_type = other DNA
gtgccaacctgcaacactggcatccgcaacacggcaagttgtatatcgaatccccccgctttaacagccgcatta

SEQ ID NO: 46452 - DNA, 75 bp, synthetic construct
  source 1..75: mol_type = other DNA
atgggtgctgtttaacgtcatgaacggtaaccgcgctgaaatgagcccggaagcagccggcattgccgcctgtct

SEQ ID NO: 46453 - DNA, 75 bp, synthetic construct
  source 1..75: mol_type = other DNA
ggtttcgctccggtgattcatggtattgcccgtggaaccgcacaagtgagtgtaaaacagaacggatacgatgtt

SEQ ID NO: 46454 - DNA, 75 bp, synthetic construct
  source 1..75: mol_type = other DNA
gagtggcatcaacattggtagttggcgactgcgcgataactcaacgtggagttattacagtgggagtagcaattc

SEQ ID NO: 46455 - DNA, 75 bp, synthetic construct
  source 1..75: mol_type = other DNA
ccagggccagtagcgcaaccggagctggaaaaaaactgccgcgtctgtggtcagactggcgggggtaactgccct

SEQ ID NO: 46456 - DNA, 75 bp, synthetic construct
  source 1..75: mol_type = other DNA
caggcgctggttaatgttggcgcacaaatagccgcaatgacaccgggtgaactggctacctggcttgcggagaat

SEQ ID NO: 46457 - DNA, 75 bp, synthetic construct
  source 1..75: mol_type = other DNA
atcagaaggcgttgctgatggtattcggaaaagtgcttgctgataatgtcaaaactgagcaggtaagaattttca

SEQ ID NO: 46458 - DNA, 75 bp, synthetic construct
  source 1..75: mol_type = other DNA
aggcacaagcgtttgaagagaaactggcttccctgtcggcggtattacagaagcatgtgacggtggatgaggtgc

SEQ ID NO: 46459 - DNA, 75 bp, synthetic construct
  source 1..75: mol_type = other DNA
ttcaacctgttcaacagtagccgtatcgatgccatcaacatcaccgaagtgcgcgacaaagcggagggcgaataa

SEQ ID NO: 46460 - DNA, 75 bp, synthetic construct
  source 1..75: mol_type = other DNA
gccttctggcccccgtgatgcggggtgttcgtctgctgttcgggcgtggtgtactgaccggcacaacggacacgc

SEQ ID NO: 46461 - DNA, 75 bp, synthetic construct
  source 1..75: mol_type = other DNA
tcatccgctgttttcagctatctggcggatgatctgcgcgagcttcagcagctcatccagcagcaaaacaaactc

SEQ ID NO: 46462 - DNA, 75 bp, synthetic construct
  source 1..75: mol_type = other DNA
tggagcaattagaaaatcagggaattcgtatcccttattcttgccgcgcgggcatttgtggaagttgccgtgttc

SEQ ID NO: 46463 - DNA, 75 bp, synthetic construct
  source 1..75: mol_type = other DNA
cagcttgaagaggataaaatgggggagcagttatcgattccatatccgggcagcccgtttacgggccgtaagtaa

SEQ ID NO: 46464 - DNA, 75 bp, synthetic construct
  source 1..75: mol_type = other DNA
tcattgcagcaggagtattactcgcctgcatgagcagcattgcctggggtgccatcatcccggaccgtacccgta

SEQ ID NO: 46465 - DNA, 75 bp, synthetic construct
  source 1..75: mol_type = other DNA
atgtccgataacgctcaacttaccggtctgtgcgaccgttttcgtggtttttatcctgttgtgatcgatgttgaa

SEQ ID NO: 46466 - DNA, 75 bp, synthetic construct
  source 1..75: mol_type = other DNA
atgcgatacagacgtgaagacgccgatggcgattacacctttggcagcggtgatgacacctggctgattaactca

SEQ ID NO: 46467 - DNA, 75 bp, synthetic construct
  source 1..75: mol_type = other DNA
aaaaatcacataaattctgggcggtggagcagcaaggcaacgagttacatatcagttggggcaaagtcggcacta

SEQ ID NO: 46468 - DNA, 75 bp, synthetic construct
  source 1..75: mol_type = other DNA
gatgctcggtaaaatgcacatcatccgcgccatccgctggcgtgacagcgggcatttctgccttaacccggatga

SEQ ID NO: 46469 - DNA, 75 bp, synthetic construct
  source 1..75: mol_type = other DNA
atgaaaatcatcacccgtggtgaagccatgcgtattcaccgtcagcatccggcatcccgtctttttccgttctgt

SEQ ID NO: 46470 - DNA, 75 bp, synthetic construct
  source 1..75: mol_type = other DNA
gctggctggcgtacaggaggcgaaattatacaaaggtatcaccgaccaggaaccggagaactggcgcgactacct

SEQ ID NO: 46471 - DNA, 75 bp, synthetic construct
  source 1..75: mol_type = other DNA
caccctgaaaatggatgaacaaggctggctgatgccggacaccacattacatttccacgtcgaaccatttgtcgg

SEQ ID NO: 46472 - DNA, 75 bp, synthetic construct
  source 1..75: mol_type = other DNA
gcgtgaacgtgctggctaaaaacggttctctgaatattcaggttggcgcgaatgatgggcagaccatctctatcg

SEQ ID NO: 46473 - DNA, 75 bp, synthetic construct
  source 1..75: mol_type = other DNA
aatgccatgaacggtaaccgcgctgaaatgagtccggaagctgccggcattgctgcctgtctgatgacgtacagt

SEQ ID NO: 46474 - DNA, 75 bp, synthetic construct
  source 1..75: mol_type = other DNA
gcatcagcttctggccgcagcattttggcctcattccacagtgggttaccctggacccccgtgtcttcggctgga

SEQ ID NO: 46475 - DNA, 75 bp, synthetic construct
  source 1..75: mol_type = other DNA
agctggatgatcaccacacgaccccggcgccgtgagccgttatgggccgtgactgacgaaaccatgcgtagctgg

SEQ ID NO: 46476 - DNA, 75 bp, synthetic construct
  source 1..75: mol_type = other DNA
tggatggcctgcgtccgtttgtacggattctgtccgaaaaagtgcgtgcgcaacgcggacgtccgccaaaagatg

SEQ ID NO: 46477 - DNA, 75 bp, synthetic construct
  source 1..75: mol_type = other DNA
tggcacgattagaaaggaattgcaaactgcaattggttttgtagagggtattacgagcgttattgcatgtaaata

SEQ ID NO: 46478 - DNA, 75 bp, synthetic construct
  source 1..75: mol_type = other DNA
ttacaaaccagcagcatcaattcttatcggcatagccagcctgatccctaccatcacgcaggactcttttgaaaa

SEQ ID NO: 46479 - DNA, 75 bp, synthetic construct
  source 1..75: mol_type = other DNA
catcatgcctgtcgaacggagtgttatgccatgacggtccactattaccggctgcgggattacgccctacagcat

SEQ ID NO: 46480 - DNA, 75 bp, synthetic construct
  source 1..75: mol_type = other DNA
acgttcgatggaggtttataccagagtttttgcgctggatatggctgccacgctggcagtgcctttcacaggtga

SEQ ID NO: 46481 - DNA, 75 bp, synthetic construct
  source 1..75: mol_type = other DNA
gccatcgccgctttcccggagatcctgttacacctgtagataaattaacccagttacgtcgcttagcctgtggcg

SEQ ID NO: 46482 - DNA, 75 bp, synthetic construct
  source 1..75: mol_type = other DNA
tgaatttcgtaacgaagccctgaaactcgctgaacacatcggtgtggccgccgcagcccgtgaactcagcctgta

SEQ ID NO: 46483 - DNA, 75 bp, synthetic construct
  source 1..75: mol_type = other DNA
ccagtgcggcccgtgcggcatggggtaactcctcctacaaaattatcctcaaacagagtgcgaaggagttcgcga

SEQ ID NO: 46484 - DNA, 75 bp, synthetic construct
  source 1..75: mol_type = other DNA
ctgacgataacgccagaaatcgccgcagagcacgcagacaggctcaacgtgagcaggcaatgcaagaacagcgac

SEQ ID NO: 46485 - DNA, 75 bp, synthetic construct
  source 1..75: mol_type = other DNA
atgctcacacaaaatgaatcctgtctggataacatcgcctgtgttgctcccccatttggtcagttcagtaccctt

SEQ ID NO: 46486 - DNA, 75 bp, synthetic construct
  source 1..75: mol_type = other DNA
atgatcacctcaccaccaaaacgcggaatggcactggtcgtggtgctggtattgctggcggttatgatgctggtg

SEQ ID NO: 46487 - DNA, 75 bp, synthetic construct
  source 1..75: mol_type = other DNA
ctggtttaggtgagcaacgctcgaataaatatgctggtggtgaaacagctgaagcatggacagtcggtgctaaat

SEQ ID NO: 46488 - DNA, 75 bp, synthetic construct
  source 1..75: mol_type = other DNA
caaattcaacatgctggataaagatgacgccgccattactggcgcagcagctgatgaccagtttgcagttggtat

SEQ ID NO: 46489 - DNA, 75 bp, synthetic construct
  source 1..75: mol_type = other DNA
tcggcggatgcgcaccagaaaatggtggaaagtcatcagaggatgatgggaagtcagaccgtttcccctaccggg

SEQ ID NO: 46490 - DNA, 75 bp, synthetic construct
  source 1..75: mol_type = other DNA
aaagttgaaaccgagttcaatcagcaggtgattaaccgccagctcgcgagcctgctgcaaaccctttgctattga

SEQ ID NO: 46491 - DNA, 75 bp, synthetic construct
  source 1..75: mol_type = other DNA
gcgccatatccgtgctgcccgtaccaaaacgccgggcgtgtcccgcgtactttgcattgaatgtgaagcgccaat

SEQ ID NO: 46492 - DNA, 75 bp, synthetic construct
  source 1..75: mol_type = other DNA
gaatgctccggcggaagacccggatattgtggctgtcgggtattacggtgcggcatcccgtacccagggcagttt

SEQ ID NO: 46493 - DNA, 75 bp, synthetic construct
  source 1..75: mol_type = other DNA
atgaacagcagtgacctgtatctgagcaagaagcacgggcgtactttgtcgcccggaaaaatgtcagagagccag

SEQ ID NO: 46494 - DNA, 75 bp, synthetic construct
  source 1..75: mol_type = other DNA
cgctgactaatttgagtggaaaggatgttgctggtcttctcgcataccttggtttggtggatgattccggtgtag

SEQ ID NO: 46495 - DNA, 75 bp, synthetic construct
  source 1..75: mol_type = other DNA
tccggaaccgaacatgaccattctgtggtccgaaaaactgccgctgaacttcaagaaattcgctgctaaagtgtc

SEQ ID NO: 46496 - DNA, 75 bp, synthetic construct
  source 1..75: mol_type = other DNA
ctgctgcgcccgttcctccgtcaggcgctggattaactggttcacgctgtcgagtgttgaaggtctgaaatcatt

SEQ ID NO: 46497 - DNA, 75 bp, synthetic construct
  source 1..75: mol_type = other DNA
ggcgatatcacggtgattgcccgccgctatgaatgggatatcgacacgctctggcagtctctgctggcacatctg

SEQ ID NO: 46498 - DNA, 75 bp, synthetic construct
  source 1..75: mol_type = other DNA
tgggcttacggagcgatagccggttgtacgttcttcattgcgcgtgaacatacccaggcagaatatcgctggatt

SEQ ID NO: 46499 - DNA, 75 bp, synthetic construct
  source 1..75: mol_type = other DNA
ctgcactgcccgttggtgtgcccgttccgtggcccttagcaacaccaccaacgggctggctgaaatgtaacggtg

SEQ ID NO: 46500 - DNA, 75 bp, synthetic construct
  source 1..75: mol_type = other DNA
ctgaaacgctggctgcgacgccaaaagctgttaaggcggtaatggatgaaacgaacaagaaagcgcccttaaata

SEQ ID NO: 46501 - DNA, 75 bp, synthetic construct
  source 1..75: mol_type = other DNA
gtgacggcagcgcagatgcagaagcagtatgaggaaatccgtcgtgaactggatgtcctgaacaaacagcgcggt

SEQ ID NO: 46502 - DNA, 75 bp, synthetic construct
  source 1..75: mol_type = other DNA
ttgcttaattggcagccacacacaattttggaccatgcacactatatggaattatggacaggggacggactcgcc

SEQ ID NO: 46503 - DNA, 75 bp, synthetic construct
  source 1..75: mol_type = other DNA
ggcccagactctggctgatgagagcaaaacaggcttttatgtgaccggtaaagccggtgcttctgttatgtcact

SEQ ID NO: 46504 - DNA, 75 bp, synthetic construct
  source 1..75: mol_type = other DNA
aatacccgtgagcgtttatcgtcgcgcaaaagaaatcgtcctgaaaaaagaaagtccgttcagggaatggtccgc

SEQ ID NO: 46505 - DNA, 75 bp, synthetic construct
  source 1..75: mol_type = other DNA
tccaagatgcggacaccacatcttgtgccactcagtaaacaggctgtagccatactgacagaacttcagacatgg

SEQ ID NO: 46506 - DNA, 75 bp, synthetic construct
  source 1..75: mol_type = other DNA
cgcttgcaatggcaggcatgttttcggcccagactctggctgatgagaacaaaactggcttttatgtgaccggta

SEQ ID NO: 46507 - DNA, 75 bp, synthetic construct
  source 1..75: mol_type = other DNA
tttttgctggggctactacaaaccagcttcgcgccaaaagatcatcgtcgttgggatgatatctgggaagacgga

SEQ ID NO: 46508 - DNA, 75 bp, synthetic construct
  source 1..75: mol_type = other DNA
tgcaatgaagcacatttttctacagcttgatagccaagctttattgcttgtaacgagaacacgttcaaaacaaaa

SEQ ID NO: 46509 - DNA, 75 bp, synthetic construct
  source 1..75: mol_type = other DNA
cctttgctgcctatgggctggctggtaaatacgatgctgacggttttttcgtaccgctggcagatggtgataccg

SEQ ID NO: 46510 - DNA, 75 bp, synthetic construct
  source 1..75: mol_type = other DNA
aatttccgttgtcgtcggaaaccttcgtcctcaatcaaattaccgcgtttattgatatgggatttgaggtggaga

SEQ ID NO: 46511 - DNA, 75 bp, synthetic construct
  source 1..75: mol_type = other DNA
cgtgcgcccttatccgaccacttcgcagccggacatggttcgccaggtggggagtggcaagaacttcccgggcga

SEQ ID NO: 46512 - DNA, 75 bp, synthetic construct
  source 1..75: mol_type = other DNA
gatgaccagcgtcgtattgaaaagctgggacaggacaatgccgccctggcagagcaggtaaaagccctgggtgct

SEQ ID NO: 46513 - DNA, 75 bp, synthetic construct
  source 1..75: mol_type = other DNA
gtacgttcttcattgcgcgtgaacatacccaggcagaatatcgctggattgaaatgttcgggcatggcaagcgaa

SEQ ID NO: 46514 - DNA, 75 bp, synthetic construct
  source 1..75: mol_type = other DNA
tgcaatgaaacacatttttcatcggctggatggtgaagctttattgttggtggagggaacacgttcaaaacaaaa

SEQ ID NO: 46515 - DNA, 75 bp, synthetic construct
  source 1..75: mol_type = other DNA
attgccctgatctcgcgcctggatgtgcctgcttatcgggccgaactgatagccgaaagcctgtgggagtttatt

SEQ ID NO: 46516 - DNA, 75 bp, synthetic construct
  source 1..75: mol_type = other DNA
atggctgatgcaatggatctcgtacagcagcgcgttgaagaagaacgccaacgccatatccgtgctgcccgtgcc

SEQ ID NO: 46517 - DNA, 75 bp, synthetic construct
  source 1..75: mol_type = other DNA
ctcgtcgcctgacgcactgaatacgctgaacgagctggcggcggcgctgggcaatgacccgaattttgctaccac

SEQ ID NO: 46518 - DNA, 75 bp, synthetic construct
  source 1..75: mol_type = other DNA
gtgccatggcggcagtgctgcagttgtaccgtggatttgtggcgacacgacgtattactggaaaaacacatacgg

SEQ ID NO: 46519 - DNA, 75 bp, synthetic construct
  source 1..75: mol_type = other DNA
gtccaagatcatgatccgcgccgcccatatcgcccatctgcgccgggaaagcccgttcgatggcggcatcgccgc

SEQ ID NO: 46520 - DNA, 75 bp, synthetic construct
  source 1..75: mol_type = other DNA
tatgtcagaagagttacttgaagagaaactgaaggagcttggtaatggcaggcgctccaatcagcttgaatcgaa

SEQ ID NO: 46521 - DNA, 75 bp, synthetic construct
  source 1..75: mol_type = other DNA
taaaaatatcgacagtcaatgcactgaggatatttaattcatcttttggtgctatttttcgccgttctgaagaat

SEQ ID NO: 46522 - DNA, 75 bp, synthetic construct
  source 1..75: mol_type = other DNA
tcttctggaaaaacgaaccgttaccgacttaatcgtggtggagatcgtgctgcaaatagtgcacttcacatcatc

SEQ ID NO: 46523 - DNA, 75 bp, synthetic construct
  source 1..75: mol_type = other DNA
ccaggatttaacccagcgcaggcaacaaaacaaccgcgaaatcgagtaaaccgccaaagattatcactgcccgaa

SEQ ID NO: 46524 - DNA, 75 bp, synthetic construct
  source 1..75: mol_type = other DNA
catgactaacgcgcttgcgggtaagcaaccgaaagatgccaccctgacggcgctggccgggcttgctactgcggc

SEQ ID NO: 46525 - DNA, 75 bp, synthetic construct
  source 1..75: mol_type = other DNA
attgatatgggctttgaggtggagattgtcgcgctgcaaaaaggcgacacacaaaacacccacgcggcatggacg

SEQ ID NO: 46526 - DNA, 75 bp, synthetic construct
  source 1..75: mol_type = other DNA
gactgaaaaatggtatttatggcaatgttggcgatgctttagcggatctaaacaataacacgatacaatgggact

SEQ ID NO: 46527 - DNA, 75 bp, synthetic construct
  source 1..75: mol_type = other DNA
aaagacagccttggaattacaactgaacaatactcctggattgttggtggatttcagcttgcatatacccttttt

SEQ ID NO: 46528 - DNA, 75 bp, synthetic construct
  source 1..75: mol_type = other DNA
actaatttgacagatactgttggcgaccttaaagatgatgccctgctctggaatggcactgcattcaacgccgct

SEQ ID NO: 46529 - DNA, 75 bp, synthetic construct
  source 1..75: mol_type = other DNA
agcgacataatctgaatctgagacaacatctggcaaggctgggacggaagtcactgtcgttctcaaaatcggtgg

SEQ ID NO: 46530 - DNA, 75 bp, synthetic construct
  source 1..75: mol_type = other DNA
agtaaaagattgccttgatactcgacggggatctaattccgttcttgaaacggccctgaaaaatcttggggattc

SEQ ID NO: 46531 - DNA, 75 bp, synthetic construct
  source 1..75: mol_type = other DNA
ccgtctggacgaaatgattgtgctgcttgaccagtacactgccaacggcacttacggccggtattttaactctga

SEQ ID NO: 46532 - DNA, 75 bp, synthetic construct
  source 1..75: mol_type = other DNA
ttaaagatggcgacctgacgactggcagcaccgatgccgttaacggctctcagctgaaaaccaccaacgatgccg

SEQ ID NO: 46533 - DNA, 75 bp, synthetic construct
  source 1..75: mol_type = other DNA
cactgcaaccagttccgatgccattaacggtagccagctttatgacttaagcagcaatatcgccacctacttcgg

SEQ ID NO: 46534 - DNA, 75 bp, synthetic construct
  source 1..75: mol_type = other DNA
gctgattacatgcgccatatcgtgagccatttcgccgctgagcgcatgaaacacgttaagcattatcagaaggag

SEQ ID NO: 46535 - DNA, 75 bp, synthetic construct
  source 1..75: mol_type = other DNA
gcctgaagggaaagctgcacgttatcagcaagcgttacactcagcgcattgagcgacataacctgaatctgagac

SEQ ID NO: 46536 - DNA, 75 bp, synthetic construct
  source 1..75: mol_type = other DNA
tagtgtttttttctggttatgcaagtgctgttgattttgtatatcgagtagactccagaccacctgatgaaattt

SEQ ID NO: 46537 - DNA, 75 bp, synthetic construct
  source 1..75: mol_type = other DNA
taattgctttggagcatatacctactgaaaatatagtagaggccgttgagctaacttatgacagagatagcagtc

SEQ ID NO: 46538 - DNA, 75 bp, synthetic construct
  source 1..75: mol_type = other DNA
tcattggtgaagtagatggcgatgatgaagccatcttcagaccaatacaaaaatacatcaatggcacatggtata

SEQ ID NO: 46539 - DNA, 75 bp, synthetic construct
  source 1..75: mol_type = other DNA
atgaaggttggcttctttttactgaaattcccgctgtcttcagaaaccttcgtccttaaccaaattaccgcgttt

SEQ ID NO: 46540 - DNA, 75 bp, synthetic construct
  source 1..75: mol_type = other DNA
accgatatatcaaaatcggcgacgtatacgctgctgattgacagcattgcggtggaagtgaacagcacagacact

SEQ ID NO: 46541 - DNA, 75 bp, synthetic construct
  source 1..75: mol_type = other DNA
tgaggcggtgtggcagctggcgtggaagaagtcagggccggagatggcttcgctggaagcctggctggaagaaca

SEQ ID NO: 46542 - DNA, 75 bp, synthetic construct
  source 1..75: mol_type = other DNA
gtgaaaccctgcgttttaacccgtttgcgaacatcaccgatatcgaccagtcagcggagcgtgtccgcgaccagt

SEQ ID NO: 46543 - DNA, 75 bp, synthetic construct
  source 1..75: mol_type = other DNA
ttaagaggggactcatgtgcggcagggagtagggatagtgcatttattgctaccacaaccagtttaattgaaaca

SEQ ID NO: 46544 - DNA, 75 bp, synthetic construct
  source 1..75: mol_type = other DNA
ccgtgggtatttctcgacaaaatcttcaagggcaaattttttagcttttgtatgtgatgcctttgactcgtcatc

SEQ ID NO: 46545 - DNA, 75 bp, synthetic construct
  source 1..75: mol_type = other DNA
tttgtccagaaatgcctcaagcgcaaatcgttttggtctggtgagaggagagggattaagcaaagactcacgttc

SEQ ID NO: 46546 - DNA, 75 bp, synthetic construct
  source 1..75: mol_type = other DNA
atgagtaataaaaactacgaaagtcaccgcaaagcaattgttagtaaaggtataccacccactctattaaatagg

SEQ ID NO: 46547 - DNA, 75 bp, synthetic construct
  source 1..75: mol_type = other DNA
caaacatttcgcaccattctgaccgtatccagcacggccaccgtggcgcttaccgtggataacaccatggtgatg

SEQ ID NO: 46548 - DNA, 75 bp, synthetic construct
  source 1..75: mol_type = other DNA
ccggacatgtgtcgcttcgcagggcgttgtatatgcccgcaatggtagccaccagtaagactgagtggggacggg

SEQ ID NO: 46549 - DNA, 75 bp, synthetic construct
  source 1..75: mol_type = other DNA
tacgcgacggcctgctggtgcgccgcacttgctgccagcgttatcgcttaccggatgtgcagcaatgtggcgatt

SEQ ID NO: 46550 - DNA, 75 bp, synthetic construct
  source 1..75: mol_type = other DNA
ctactgcggtggtatctggaatctgtacaccctgaacaacggcggggcatttatggcccccgaaccggatgatga

SEQ ID NO: 46551 - DNA, 75 bp, synthetic construct
  source 1..75: mol_type = other DNA
ggtaaatctcagcggcagcaatctcaacctgcacaggtatcacagccagcagccagcagtaacttttcttcacta

SEQ ID NO: 46552 - DNA, 75 bp, synthetic construct
  source 1..75: mol_type = other DNA
tgaaatcaagacaatcacacatccccacttcggtgataaaccggtaaaggtgttcgcgataaaggtaaatattga

SEQ ID NO: 46553 - DNA, 75 bp, synthetic construct
  source 1..75: mol_type = other DNA
gtggcgacattaacccggctttttattcatcctgttaaatcgatgcgcggcattggtcttacacatgctctggca

SEQ ID NO: 46554 - DNA, 75 bp, synthetic construct
  source 1..75: mol_type = other DNA
ttgttccctccggtattcaccatcacctgtttgagaaccttcgccgcaaggggcatcactgccacggcctgacgc

SEQ ID NO: 46555 - DNA, 75 bp, synthetic construct
  source 1..75: mol_type = other DNA
tcctcactcgcctgcgtgagaacaatcctcatcccaccaccgagcttaatttcagttcgccttttgaattgctga

SEQ ID NO: 46556 - DNA, 75 bp, synthetic construct
  source 1..75: mol_type = other DNA
gataaagtctttatcccccgtctggcgcatatgatgcaccactacggcagtattctgttaccgcatggcggcagt

SEQ ID NO: 46557 - DNA, 75 bp, synthetic construct
  source 1..75: mol_type = other DNA
atgaaagtaactgcaaacggtaagacatttaccttccctgatggtacgagcacggaagatattggcaccgccatt

SEQ ID NO: 46558 - DNA, 75 bp, synthetic construct
  source 1..75: mol_type = other DNA
cacctgaagtgatgcagggaccggttgtgacacagccggatgaaaaaccatcacctgacacgccatcaacaccat

SEQ ID NO: 46559 - DNA, 75 bp, synthetic construct
  source 1..75: mol_type = other DNA
tggtcacagcaattctggcatcttcaactgtatgggctgctgataatgcaccggtagcggcacaacagcaaactc

SEQ ID NO: 46560 - DNA, 75 bp, synthetic construct
  source 1..75: mol_type = other DNA
gctgaaatgagcccggaagccgccggcattgctgcctgtctgatgacgtacagtcatcatgcctgtcgtacggag

SEQ ID NO: 46561 - DNA, 75 bp, synthetic construct
  source 1..75: mol_type = other DNA
tcgtgaagtgcaggatattcccggtgtgctggccgtgtttgctgaacgccgtaaggacagttttggcccgtatgt

SEQ ID NO: 46562 - DNA, 75 bp, synthetic construct
  source 1..75: mol_type = other DNA
atcaggacggagacccttatgaattctcgcttttctgcactgatgagcagattgctgaggtggctgattcggttg

SEQ ID NO: 46563 - DNA, 75 bp, synthetic construct
  source 1..75: mol_type = other DNA
cggatgagcggcggtggtgtcacttactacgtcgagcaagcccgcgaacgttcaaacgcacgcatgatcgtcatc

SEQ ID NO: 46564 - DNA, 75 bp, synthetic construct
  source 1..75: mol_type = other DNA
gccgtctgaacaatgtggaaccagaaaaatggctgcgttacgtcattgagcatatccaggactggccggcaaacc

SEQ ID NO: 46565 - DNA, 75 bp, synthetic construct
  source 1..75: mol_type = other DNA
cagagaagttagaaaaaatccttgaagagaaagcaaaggaagagtgtcgctcatttagcgcagaagtaattaaac

SEQ ID NO: 46566 - DNA, 75 bp, synthetic construct
  source 1..75: mol_type = other DNA
ccaacgcaccacgtaacgcgcattataaagcctatattctgggcgaagggcctgacggcatagctaaaacgccgg

SEQ ID NO: 46567 - DNA, 75 bp, synthetic construct
  source 1..75: mol_type = other DNA
gaatatcacgatcagtgaagatggaaaagtaacaccagcatcgcaccagcacagtgaggcgctcattgaatttgc

SEQ ID NO: 46568 - DNA, 75 bp, synthetic construct
  source 1..75: mol_type = other DNA
cgttgcctgcggcaacgctctctcgctggcgctcgagtcgaaccttggtcgaagcttctcatccttccccgcatg

SEQ ID NO: 46569 - DNA, 75 bp, synthetic construct
  source 1..75: mol_type = other DNA
ctagctgttatgctgaatttactggtttttattcgttccagtgaactcagataagcccgttggtctgaaattgat

SEQ ID NO: 46570 - DNA, 75 bp, synthetic construct
  source 1..75: mol_type = other DNA
tttaatttcctggagcatttcccgttttcttccgtgctgtcatttattgcaatggcgatggtcattgtcttcttt

SEQ ID NO: 46571 - DNA, 75 bp, synthetic construct
  source 1..75: mol_type = other DNA
tgaaatcaagacaatcacacatccgcacttcggcgataaaccggtaacggtattcgcgataaaggtgaatatcaa

SEQ ID NO: 46572 - DNA, 75 bp, synthetic construct
  source 1..75: mol_type = other DNA
ctcggtgaactggttggtgtataccgtcttgccgcgcagcctgccaccaccacgctccagttctccgtagatgag

SEQ ID NO: 46573 - DNA, 75 bp, synthetic construct
  source 1..75: mol_type = other DNA
caaaagttgatgatccttttcctgaaaagctaatcgccacaatccgggggatgggctattcattcgtagcggtaa

SEQ ID NO: 46574 - DNA, 75 bp, synthetic construct
  source 1..75: mol_type = other DNA
ctgcatcagcacaaaactatgccatgaagaaggatatcgacgcgatcgcaaatgcagacgcttctgctctcgatt

SEQ ID NO: 46575 - DNA, 75 bp, synthetic construct
  source 1..75: mol_type = other DNA
cttcatatgctccggtgtagacagaaatcttctgcaatcaaatgacaatgatgttgctgtcgacgttgctgcaag

SEQ ID NO: 46576 - DNA, 75 bp, synthetic construct
  source 1..75: mol_type = other DNA
agtgcaggatattcccggtgtactggctgtgtttgcagaacgccgtaaggacagttttggtccgtatgtccggct

SEQ ID NO: 46577 - DNA, 75 bp, synthetic construct
  source 1..75: mol_type = other DNA
gcattgaccacggtaaaacgccagcatcgccctgctcttgatctttcgcgcctgcctgaacttgtgtcgcgtatt

SEQ ID NO: 46578 - DNA, 75 bp, synthetic construct
  source 1..75: mol_type = other DNA
attccgggcgatggcgtgcagtgcattgattgaatccggcttatggtcaagagatgcggttgaacgtcagatgag

SEQ ID NO: 46579 - DNA, 75 bp, synthetic construct
  source 1..75: mol_type = other DNA
gcaggactgctgcgacagggagatcattgactgggcagcgagcaccggaggctatgacaaagaaacggtgcagga

SEQ ID NO: 46580 - DNA, 75 bp, synthetic construct
  source 1..75: mol_type = other DNA
cggcagccacaccaccttccgttacgatgtactcgaccggctgatacaggaaaccggctttgacggccgcacaca

SEQ ID NO: 46581 - DNA, 75 bp, synthetic construct
  source 1..75: mol_type = other DNA
tgatgacgaaacatggggactgttcaatgccatgaacggcaaccgcgctgaaatgagcccggaagccgctggcat

SEQ ID NO: 46582 - DNA, 75 bp, synthetic construct
  source 1..75: mol_type = other DNA
tacagaccgggcagaataatttgcaaagtgcgaaatctgtcgctcagttaactagcgctctgagcgaactggcaa

SEQ ID NO: 46583 - DNA, 75 bp, synthetic construct
  source 1..75: mol_type = other DNA
tccccagatagccagtttaaagttgtctgatgttgctgcgacttttaccgggggttattactacaataagtggag

SEQ ID NO: 46584 - DNA, 75 bp, synthetic construct
  source 1..75: mol_type = other DNA
caacattccgccatcttaatgccagcaagatgcagacgtttgaacagggactgattgatgtctaccggaaattgt

SEQ ID NO: 46585 - DNA, 75 bp, synthetic construct
  source 1..75: mol_type = other DNA
atgcctgcggatatccgcttacagctgcgcgataacacactgatactcagtgataacggcggcagaagcctgtat

SEQ ID NO: 46586 - DNA, 75 bp, synthetic construct
  source 1..75: mol_type = other DNA
atgacaaccgtctcgcataatttcaccacatcttctgtttccgtaaccactgcatcagggaataaccagtctcag

SEQ ID NO: 46587 - DNA, 75 bp, synthetic construct
  source 1..75: mol_type = other DNA
caataacatcattatcgcttatgtttttggctttctggcgggaatggcaaacagttttctcgatgcaggcactta

SEQ ID NO: 46588 - DNA, 75 bp, synthetic construct
  source 1..75: mol_type = other DNA
aatatcaatacgatttgaggaaccatttgctggttaatctctttccgatagcattggatgcagaaataactacat

SEQ ID NO: 46589 - DNA, 75 bp, synthetic construct
  source 1..75: mol_type = other DNA
acgcgtcagcattattaatgcagctggaatcaccactcgaaagtgtgatggcagcggcgaaaatcgcccatcaaa

SEQ ID NO: 46590 - DNA, 75 bp, synthetic construct
  source 1..75: mol_type = other DNA
tcttgaattagggcttcgtgtatatgaagctcagatggagcgtaaagagtccgcctttaatcaggcagagtttaa

SEQ ID NO: 46591 - DNA, 75 bp, synthetic construct
  source 1..75: mol_type = other DNA
cgcagggcaagagcgtctcgctcaaacaatttgtcagtcgccatattaatgagatcggtttgctggtggtgattg

SEQ ID NO: 46592 - DNA, 75 bp, synthetic construct
  source 1..75: mol_type = other DNA
ccggggatttgaagcggaccagcttgatctggaactggacgacgccgatggaaaaatcgtgctgccgcgccgtgg

SEQ ID NO: 46593 - DNA, 75 bp, synthetic construct
  source 1..75: mol_type = other DNA
agattgttgatgaaatctgcgattttgtggcgaatcagcaggctgttttcctcggcggtcagtacatccttcagg

SEQ ID NO: 46594 - DNA, 75 bp, synthetic construct
  source 1..75: mol_type = other DNA
ggcaatgcgtaatagctttaagcgactcgatagcggtacgcttatctcagtaacgcgatcacgttcacaacaaaa

SEQ ID NO: 46595 - DNA, 75 bp, synthetic construct
  source 1..75: mol_type = other DNA
acagtaaacaacactggaaaaaccatcgtcgacggcaaaggcgccaccggaactgaaatcgcgggtaataacgcg

SEQ ID NO: 46596 - DNA, 75 bp, synthetic construct
  source 1..75: mol_type = other DNA
tccgaaatgggtgaaggggattgaaacccgcgattcagtgaaccagaaccaacaagaatcggaacagaacgacca

SEQ ID NO: 46597 - DNA, 75 bp, synthetic construct
  source 1..75: mol_type = other DNA
cttcatggaaaaggtcgatgacctgaacagtgagcagcagtacgacaatattgctggcaccacaaatctggggta

SEQ ID NO: 46598 - DNA, 75 bp, synthetic construct
  source 1..75: mol_type = other DNA
tgggccgattttctggatgcaaacagagaaaaatttatcagtccatttgaatatgcaaagattaataatccatta

SEQ ID NO: 46599 - DNA, 75 bp, synthetic construct
  source 1..75: mol_type = other DNA
gtcgcgtattggcagttacaaggggcaacctgtcacccagcttgccgttatgctgaatttactggtttttattcg

SEQ ID NO: 46600 - DNA, 75 bp, synthetic construct
  source 1..75: mol_type = other DNA
ttttgggtattgagtctctaagtcctcatgtctccgggaatccaaagtttgaatatgccaatatggttgaagata

SEQ ID NO: 46601 - DNA, 75 bp, synthetic construct
  source 1..75: mol_type = other DNA
actataagaacggtggtgaaattcagaaatgggtatctaccggcgcagcccctaaccctgaacaaatggccatgc

SEQ ID NO: 46602 - DNA, 75 bp, synthetic construct
  source 1..75: mol_type = other DNA
ttcttctccggggcatattgtggttgccggacaatccggtggcggaaaatctgttccggtgaaagaactaatcga

SEQ ID NO: 46603 - DNA, 75 bp, synthetic construct
  source 1..75: mol_type = other DNA
ttcgtgagcaactcatgattgccaccgccgatttgagtggatcaacaaaagggcagcttgaggcctggcaggaga

SEQ ID NO: 46604 - DNA, 75 bp, synthetic construct
  source 1..75: mol_type = other DNA
ggtgcagtaatcagcgccaccagcgacccggagtattactttgttgtggttctggcagggcagtcaaacggcatg

SEQ ID NO: 46605 - DNA, 75 bp, synthetic construct
  source 1..75: mol_type = other DNA
aacctgctttccgcgtcgtgctgggtgcctggcatacggaaggttcaatggtgaaagtcacggcggatgacgttg

SEQ ID NO: 46606 - DNA, 75 bp, synthetic construct
  source 1..75: mol_type = other DNA
cagcattggagctgtcaaaagaccgacgcattgaggtgaggtgtactggcaatagcggacactaccatttgttct

SEQ ID NO: 46607 - DNA, 75 bp, synthetic construct
  source 1..75: mol_type = other DNA
tgaaaatgcgttgcggatggtcagtctgggccgcaaaaactacctgttcttcggttcggatcatggaggagagcg

SEQ ID NO: 46608 - DNA, 75 bp, synthetic construct
  source 1..75: mol_type = other DNA
gtaccaggaaaattgcaggtaaaacactggaacgtttgaagaagttgatctggctggcggcacaggatgtgaaga

SEQ ID NO: 46609 - DNA, 75 bp, synthetic construct
  source 1..75: mol_type = other DNA
agggtgatggggtatgacacaacccaggaagtctgtggccatggattccgggcgatggcgtgcagtgcattgatt

SEQ ID NO: 46610 - DNA, 75 bp, synthetic construct
  source 1..75: mol_type = other DNA
ggaacgtaacggtgtacgtgctgcttacattcataaagcagaacatctggaagaacgccgcttgatgctacaatg

SEQ ID NO: 46611 - DNA, 75 bp, synthetic construct
  source 1..75: mol_type = other DNA
aattacgccactggtgcggcttatagtggcatgaacatcatgttgctgtggtgcagcgcatctaagcagggtttc

SEQ ID NO: 46612 - DNA, 75 bp, synthetic construct
  source 1..75: mol_type = other DNA
gacagggttcgaccggaactgaaatcgcgggtaacaacgcggtggtgaaccaggacggcgagctggatgtgagcg

SEQ ID NO: 46613 - DNA, 75 bp, synthetic construct
  source 1..75: mol_type = other DNA
aaggcgttagtgctgatccagagttgcgtattaaggtcgtgaaagctgtgatcgagcagcacatgtcccttaatc

SEQ ID NO: 46614 - DNA, 75 bp, synthetic construct
  source 1..75: mol_type = other DNA
gtatgagtccaaagcagcaaggaatgcgctcttacgtctggcaaacactaaagctggaacgccagcctatgaaag

SEQ ID NO: 46615 - DNA, 75 bp, synthetic construct
  source 1..75: mol_type = other DNA
taacgccaaagctgctgctgccgctaaaggcatgccgctgtatgagcatatcgctgaactgaacggcactccggg

SEQ ID NO: 46616 - DNA, 75 bp, synthetic construct
  source 1..75: mol_type = other DNA
caccattgatgacctgtggcgggatatgcgctggtcggtctcgcgtctgcaggacaagccgcgctgcatcgtggg

SEQ ID NO: 46617 - DNA, 75 bp, synthetic construct
  source 1..75: mol_type = other DNA
gcctgacgccgaggaaatcgacggcgagaatgtgcgcgttttccactacctcagcgccgtgacggcgatggcgac

SEQ ID NO: 46618 - DNA, 75 bp, synthetic construct
  source 1..75: mol_type = other DNA
tcctgggtaaaggcgtaaccaaagctgttgctgcggtaaacggcccgatcgctcaggcactgattggtaaagatg

SEQ ID NO: 46619 - DNA, 75 bp, synthetic construct
  source 1..75: mol_type = other DNA
tcaaaatcgaaaatacctttttaagtgaggatcaggttgatcagctggcgttatatgcaccgcaagccacggtta

SEQ ID NO: 46620 - DNA, 75 bp, synthetic construct
  source 1..75: mol_type = other DNA
aaagaccagcaactgagtctggttgaagagacggaggccttcctgcgctctgcactggcacgtgccgaagaaaag

SEQ ID NO: 46621 - DNA, 75 bp, synthetic construct
  source 1..75: mol_type = other DNA
atattcttggactggaccataaaatttctaaccagcgcaaaatagttaccgaaggtgacaaatccagcgtggtaa

SEQ ID NO: 46622 - DNA, 75 bp, synthetic construct
  source 1..75: mol_type = other DNA
aaatggaaagtgccgtatacccgaacaaggagtgtaccgaaggcgatcaacatgccaatggcaataatgaaacag

SEQ ID NO: 46623 - DNA, 75 bp, synthetic construct
  source 1..75: mol_type = other DNA
gtcaataacgacggtgacagtgccatcagtaacggtggcaccggcacgcaggttaacggtgatgaagccaccgta

SEQ ID NO: 46624 - DNA, 75 bp, synthetic construct
  source 1..75: mol_type = other DNA
atgtcaaagctgatgattgtgctggttgtgttgttatcactggcggtgccggggctgtttctggtgaagcatgaa

SEQ ID NO: 46625 - DNA, 75 bp, synthetic construct
  source 1..75: mol_type = other DNA
aagcgtagagctacgtcgccgcgtgcatgccggactgaacaagggcgaggcgcgcaactccctggccagggcggt

SEQ ID NO: 46626 - DNA, 75 bp, synthetic construct
  source 1..75: mol_type = other DNA
ccgccacttcacccacctgaaggacggtgccgaggccaaagaccggacattgctgctgtcagcgatcctgggcga

SEQ ID NO: 46627 - DNA, 75 bp, synthetic construct
  source 1..75: mol_type = other DNA
ttgtgttgttatcgctggcggtggcggggctgtttctggcgaagcatgaaaacgccagcctgcgcgcctcgctgg

SEQ ID NO: 46628 - DNA, 75 bp, synthetic construct
  source 1..75: mol_type = other DNA
ctcgcgcttagaaacgggtaagcagaaacaatttaccgaacaaacactgagtaatattgccaagagcttaggtgt

SEQ ID NO: 46629 - DNA, 75 bp, synthetic construct
  source 1..75: mol_type = other DNA
ctggtgatttctgataaccagatttaccgtgaatggggaattaccagcgaaaacgaacaccggtttatggtcttt

SEQ ID NO: 46630 - DNA, 75 bp, synthetic construct
  source 1..75: mol_type = other DNA
gctaccgggccagcggtctcaacctggtgacggccgccatcgtgctgtggaacacggtgtacttggaacgcgcca

SEQ ID NO: 46631 - DNA, 75 bp, synthetic construct
  source 1..75: mol_type = other DNA
gaaatgctggatatcagtgccagtgcgggaaatggccttatccagggcggtgatgtcattgatgtgattcatgcc

SEQ ID NO: 46632 - DNA, 75 bp, synthetic construct
  source 1..75: mol_type = other DNA
atgaaagcatttccagaaacatttctttggggtggcgcaacagctgccaatcaggtggaaggtgcctggcaggaa

SEQ ID NO: 46633 - DNA, 75 bp, synthetic construct
  source 1..75: mol_type = other DNA
tctttccgccagcaaggcacaggctcacgtctttaagcagtacatcatagacttcgccaaagaagtcgaggtgga

SEQ ID NO: 46634 - DNA, 75 bp, synthetic construct
  source 1..75: mol_type = other DNA
ctcaacagaacgccgcgctggtggaagaatctgccgccgccgccgccgcgctggaagagcaggccagtcgcctga

SEQ ID NO: 46635 - DNA, 75 bp, synthetic construct
  source 1..75: mol_type = other DNA
aggcccacgccggcagccggaaaagaacgttttcaccgatgaacagattgagaagctggaagaaattttccattc

SEQ ID NO: 46636 - DNA, 75 bp, synthetic construct
  source 1..75: mol_type = other DNA
ccgacctgtcgctgatccgccagcggcgcggcgacgccaaccgcctgggctttgcggtgcagctctgcctgctgc

SEQ ID NO: 46637 - DNA, 75 bp, synthetic construct
  source 1..75: mol_type = other DNA
agaccgataagggtttgctgctggccggccaggcgctggagagtctgcggcagaagcggcgcatcctgccggcgc

SEQ ID NO: 46638 - DNA, 75 bp, synthetic construct
  source 1..75: mol_type = other DNA
cacatcgagcggctgaagacatttcagctggtggatttgcccgaagctctgggccggcacatccaccagaaccgc

SEQ ID NO: 46639 - DNA, 75 bp, synthetic construct
  source 1..75: mol_type = other DNA
atccagtgggtggccaagcaagttcaggccgacccggcgagctgggcgaagtacggcgaacgcgacgtgactcgc

SEQ ID NO: 46640 - DNA, 75 bp, synthetic construct
  source 1..75: mol_type = other DNA
aaataataacctgaacagcatgtgggctgtgaagctgcagcagatgcaggacggacgcctttatatcgcgggtat

SEQ ID NO: 46641 - DNA, 75 bp, synthetic construct
  source 1..75: mol_type = other DNA
gcagaacgacggcaaaatcctctccggcagtaacctcacgctgacggcgcaggtgctggcgaacaccggcagcgg

SEQ ID NO: 46642 - DNA, 75 bp, synthetic construct
  source 1..75: mol_type = other DNA
atgaacaaagaaaatgtgattaccctggacaatccggtcaagcgtggtgagcaggtcatcgaacaggtcacgctg

SEQ ID NO: 46643 - DNA, 75 bp, synthetic construct
  source 1..75: mol_type = other DNA
gcgtagccgttgcccgtccggttgtgttgctgtattcgccgcccgtattcgtcagggggaaacctatgcacaata

SEQ ID NO: 46644 - DNA, 75 bp, synthetic construct
  source 1..75: mol_type = other DNA
aggataaggaaaaactgaaaatctggcgtatttacgcgaaatcgctgcaggcgatggatttcagcgccattactg

SEQ ID NO: 46645 - DNA, 75 bp, synthetic construct
  source 1..75: mol_type = other DNA
cattaccagcggcggtaatcctccggcattttccctgacaccggacgggcggctgacggcgaaaaatgccgatat

SEQ ID NO: 46646 - DNA, 75 bp, synthetic construct
  source 1..75: mol_type = other DNA
atggttgccgtaaatcatataccacaccttgtacacacacaaacggcctttgtgtggcgttttctggcactgagt

SEQ ID NO: 46647 - DNA, 75 bp, synthetic construct
  source 1..75: mol_type = other DNA
tgtgctcgacagcggcatcactgacgaaatgtatcaggaacttgagcgcctgattgaagacgccaaaccggcaag

SEQ ID NO: 46648 - DNA, 75 bp, synthetic construct
  source 1..75: mol_type = other DNA
cgggacttgaagaaataagccgtgatttgcagcttctgagtggtgcagaaaacaaccgggtactgcgtgaggcaa

SEQ ID NO: 46649 - DNA, 75 bp, synthetic construct
  source 1..75: mol_type = other DNA
gcatttcctggggatgtgcaatgtggtttatctactgggggcgcaggaaagttaaccggctgccaccatgggatg

SEQ ID NO: 46650 - DNA, 75 bp, synthetic construct
  source 1..75: mol_type = other DNA
atttacggacccgctttctcaggtataaagggggggattatatccctttccttgcaaacttcccggttgcaatgt

SEQ ID NO: 46651 - DNA, 75 bp, synthetic construct
  source 1..75: mol_type = other DNA
gatcgagcgcacgctgttcatcctggactggctgcaaagtgttgaactgcgccgccgcgtgcatgccggcctgaa

SEQ ID NO: 46652 - DNA, 75 bp, synthetic construct
  source 1..75: mol_type = other DNA
tatgaccggaccctgcgctatgagcgaaacaaaatttcagctggctatgatcatactttcaccttcggaacatgg

SEQ ID NO: 46653 - DNA, 75 bp, synthetic construct
  source 1..75: mol_type = other DNA
cacctgccggagccaaaaccccgtctgccatcttccgaaggcgactggtcgcatgtattccaggatgtgacgtgg

SEQ ID NO: 46654 - DNA, 75 bp, synthetic construct
  source 1..75: mol_type = other DNA
gatggaaacgctggagcgtcttggcctgcaacgctttattcgcacgaagcaggaaatcaacaaggaagcgatttt

SEQ ID NO: 46655 - DNA, 75 bp, synthetic construct
  source 1..75: mol_type = other DNA
tggacgaccgctctcatcaggcaccgaaacgtcagcggcgtgacctgctgctggaagaggtgctcagacaggcgg

SEQ ID NO: 46656 - DNA, 75 bp, synthetic construct
  source 1..75: mol_type = other DNA
aactcacgttaagcaacgttttctgcctctgacgcctcttttaatggtctcagatgtcctttggtcaccagttct

SEQ ID NO: 46657 - DNA, 75 bp, synthetic construct
  source 1..75: mol_type = other DNA
ggtgaaactttccgacagaaaagctggtcggtatttgctgaggatgagtggcatcttacggatgctcttgcgctg

SEQ ID NO: 46658 - DNA, 75 bp, synthetic construct
  source 1..75: mol_type = other DNA
gtggcttctaaaaaaaggattaaaaagattaatgcggatatcaataaaagattgggttccttcgatttgttcagg

SEQ ID NO: 46659 - DNA, 75 bp, synthetic construct
  source 1..75: mol_type = other DNA
caactggcagagagtttgcgtcatatgcaaagtgagctggtacgtaccgtaggcgatgtgcgtaacggcgcgaat

SEQ ID NO: 46660 - DNA, 75 bp, synthetic construct
  source 1..75: mol_type = other DNA
aacgcagcactgacggatctgatggatcagtacgtgctcctggcataccgcacaacggttgacgataaccgtaac

SEQ ID NO: 46661 - DNA, 75 bp, synthetic construct
  source 1..75: mol_type = other DNA
ccgcaacgagcacatgcctgaagctcatcgacagcatgccacctggacgccagagcgtcttctggaatgggcggg

SEQ ID NO: 46662 - DNA, 75 bp, synthetic construct
  source 1..75: mol_type = other DNA
tccggtggtgttctgatgagccggaatgcactgaatgtcagtactgcgaccctgagtaaccagggcacgatacag

SEQ ID NO: 46663 - DNA, 75 bp, synthetic construct
  source 1..75: mol_type = other DNA
cagttgttcggttcacagtacgcgatgcgtatctggatgaacccgaatgagctgaacaaattccagctaacgccg

SEQ ID NO: 46664 - DNA, 75 bp, synthetic construct
  source 1..75: mol_type = other DNA
atgatttcgtcagtgacgtaaaggttcacgctgatgccgcaagtcgcagcataccaaagcaaattgagcactggg

SEQ ID NO: 46665 - DNA, 75 bp, synthetic construct
  source 1..75: mol_type = other DNA
ggttgcttaacttcacaaagaaaacatttctgtcaatgtggtctcacagcaatattttctataagaaaggaaagg

SEQ ID NO: 46666 - DNA, 75 bp, synthetic construct
  source 1..75: mol_type = other DNA
tgggcgcagaggcagaaaacatcgatctcttcgaccgtatgcaactggaacacgttatcgctatctgccgccagg

SEQ ID NO: 46667 - DNA, 75 bp, synthetic construct
  source 1..75: mol_type = other DNA
ccggcggcaaagggctgacggtcagtgcgcagacgctgagctccggtaaaaaatcggtcacccacagcgatgctg

SEQ ID NO: 46668 - DNA, 75 bp, synthetic construct
  source 1..75: mol_type = other DNA
aatcgtggcccagataaaactgctgacgccgcaaaaacttgctgatttcttccatcaggcggtggtcgagccgca

SEQ ID NO: 46669 - DNA, 75 bp, synthetic construct
  source 1..75: mol_type = other DNA
ggaaacaaaggtatggcgtctgtcaggtattaaatcgatcctggaaaaaggtctggataaacaacctgttcagga

SEQ ID NO: 46670 - DNA, 75 bp, synthetic construct
  source 1..75: mol_type = other DNA
ttggttttggcccaagttggggttggagtgcaactgaaattaaaggcgttgacgttaatggcacttcaacaagtg

SEQ ID NO: 46671 - DNA, 75 bp, synthetic construct
  source 1..75: mol_type = other DNA
gagtggcgccgcaaacacacaaaaaacaacgggcaggaacagcagcagtggcggtggcgtgggtgtcagtatcgg

SEQ ID NO: 46672 - DNA, 75 bp, synthetic construct
  source 1..75: mol_type = other DNA
atggatcatcgaccgtcagaagcagagcgcagcactgacggatctgatggatcagtacgtgctcctggcataccg

SEQ ID NO: 46673 - DNA, 75 bp, synthetic construct
  source 1..75: mol_type = other DNA
cgaacgcttgaaaatgctggcggatgagcggctgtataagagtaagaaaaacggcagggcgcagattagctggca

SEQ ID NO: 46674 - DNA, 75 bp, synthetic construct
  source 1..75: mol_type = other DNA
agcctggaaaggcagacacgcattcatcagttttgctaatccagctcagattgatctggcttccgaagtcaccca

SEQ ID NO: 46675 - DNA, 75 bp, synthetic construct
  source 1..75: mol_type = other DNA
cttcacggtgcgcttacggttccgctgacagatataagctatgtcaggcagatggaaagctggatgatcaccacc

SEQ ID NO: 46676 - DNA, 75 bp, synthetic construct
  source 1..75: mol_type = other DNA
atgaaaatcaaacatgaacacatccgcatggcgatgaatgcctgggcatatccggacggtgagaaagttcccgca

SEQ ID NO: 46677 - DNA, 75 bp, synthetic construct
  source 1..75: mol_type = other DNA
atgagcattaaattaattgcggtagacatggatggtactttcttaagcgatcaaaaaacctataaccgtgagcgg

SEQ ID NO: 46678 - DNA, 75 bp, synthetic construct
  source 1..75: mol_type = other DNA
gataaacagctatggccagcagggtgaacctgccaccaccaccttccggattaccgcaccggcagcaccgtcgcg

SEQ ID NO: 46679 - DNA, 75 bp, synthetic construct
  source 1..75: mol_type = other DNA
ggcaacgcacgacgtgctggctggcctgaccgcgcgtgaagcgaaagttctgcgtatgcgcttcggtatcgatat

SEQ ID NO: 46680 - DNA, 75 bp, synthetic construct
  source 1..75: mol_type = other DNA
gacaggattgcgatgattaatcctgcgaatggcaacacaaagccgatgtttgttggtcagggcgatcagatattt

SEQ ID NO: 46681 - DNA, 75 bp, synthetic construct
  source 1..75: mol_type = other DNA
ggggtgtacaaggctcagtaggtatgtctacggggtggttagctaataccagtacagatggtaatcatagccact

SEQ ID NO: 46682 - DNA, 75 bp, synthetic construct
  source 1..75: mol_type = other DNA
cagcttgccacactggagcgtgaagagtttaccgtgctcttcctcgataaccagcatcgcctcattgcttacgaa

SEQ ID NO: 46683 - DNA, 75 bp, synthetic construct
  source 1..75: mol_type = other DNA
tctgttgcagggggaggcctcactcaccgttaacacacagaggcttgataatcagcagaacggcacgctgtacag

SEQ ID NO: 46684 - DNA, 75 bp, synthetic construct
  source 1..75: mol_type = other DNA
tactaaaaataattcgctgcgttaccggagtctgccaggcaacaggcaaaccggaggccaagcagccggataccg

SEQ ID NO: 46685 - DNA, 75 bp, synthetic construct
  source 1..75: mol_type = other DNA
tttttaataaagatggtctctatgctgtgcgcgttgaaaatggggaaattattagttgttactgcattcattgct

SEQ ID NO: 46686 - DNA, 75 bp, synthetic construct
  source 1..75: mol_type = other DNA
atgtgatggttgccaacccgtatggtatcacctgtgacggctgtggctttatcaacacgccgcacgcgacgctca

SEQ ID NO: 46687 - DNA, 75 bp, synthetic construct
  source 1..75: mol_type = other DNA
gcctccacgcatgtggtgtgcgatcctacccgtacccgcaagttacttctcaaccagcgcgaactggactcattg

SEQ ID NO: 46688 - DNA, 75 bp, synthetic construct
  source 1..75: mol_type = other DNA
ctgattacgttcgccatatatccaccatttttgtttcgaaacttctggaggatcaggggccaggagataacatca

SEQ ID NO: 46689 - DNA, 75 bp, synthetic construct
  source 1..75: mol_type = other DNA
ataccgtcgccgttctcaacaacggagggagagcgcgaaaaatacttaccagtggaggaagccggagcacttacg

SEQ ID NO: 46690 - DNA, 75 bp, synthetic construct
  source 1..75: mol_type = other DNA
agaatctgccgccgccgccgccgcgctggaagagcaggccagtcgcctgaccgaagcagtggcagtgttccggat

SEQ ID NO: 46691 - DNA, 75 bp, synthetic construct
  source 1..75: mol_type = other DNA
ttttggccttttacaactgacatcaggcggtctgttctttaatgccttaaagaatgacaaagaaaatttcactgt

SEQ ID NO: 46692 - DNA, 75 bp, synthetic construct
  source 1..75: mol_type = other DNA
ctgaacgtatgctgatgccggaagacaagatccgcaaagtgctgaagatcgccaaagagccaatctccatggaaa

SEQ ID NO: 46693 - DNA, 75 bp, synthetic construct
  source 1..75: mol_type = other DNA
cagctttgagccgcagtcaggcaccctgaacagcgtcatccctccggcagtgcagcacctgacggtggaggtgag

SEQ ID NO: 46694 - DNA, 75 bp, synthetic construct
  source 1..75: mol_type = other DNA
ccgggaaaaaataggaaaactgcatctggctcaggggttgtgggaactgatagataacagccagcttgcagatga

SEQ ID NO: 46695 - DNA, 75 bp, synthetic construct
  source 1..75: mol_type = other DNA
aaacggtggagggtgtaaactatttagtttattcaaatgataataccccaggtattagaattctagttgacacag

SEQ ID NO: 46696 - DNA, 75 bp, synthetic construct
  source 1..75: mol_type = other DNA
gcggcaaaagtaaccgtggtggctgatgcgttatcttcaaaccagtcgaaagtctctgtcgcagaagatcacgta

SEQ ID NO: 46697 - DNA, 75 bp, synthetic construct
  source 1..75: mol_type = other DNA
aaaagccaatggcgctggaagaaacctggatgccgcttgcgttgttcccggatctcacctggcaggtcatggaaa

SEQ ID NO: 46698 - DNA, 75 bp, synthetic construct
  source 1..75: mol_type = other DNA
aaagggatcctcgatccggaagatgcgcgcgatgcagtacgttttggtgctgatggaattgtggtttctaaccac

SEQ ID NO: 46699 - DNA, 75 bp, synthetic construct
  source 1..75: mol_type = other DNA
tgtgggttaccgcttcaacgagcagaccgcagcgaaagcaggcgtggcattcagtgatggcgatgcctcctggaa

SEQ ID NO: 46700 - DNA, 75 bp, synthetic construct
  source 1..75: mol_type = other DNA
ccccggtgctgtttcgcgggacgaaacaccagaatttcaacagcccgaatcagcagtcgtactggtattccacct

SEQ ID NO: 46701 - DNA, 75 bp, synthetic construct
  source 1..75: mol_type = other DNA
acgacaacgtatttttttagatctcttagacgaactgccagaaagtgaagcggataacttattaaaaactcttga

SEQ ID NO: 46702 - DNA, 75 bp, synthetic construct
  source 1..75: mol_type = other DNA
gacagatgttgttatgaatgatggtgatattattttgataggtggtcttgctgagcagaaggactctaaatcttc

SEQ ID NO: 46703 - DNA, 75 bp, synthetic construct
  source 1..75: mol_type = other DNA
agtgatccttggtgaaccggctgcaggctatgtgtcccatgaaggctatgccgcgcttgcccgggctccctatcg

SEQ ID NO: 46704 - DNA, 75 bp, synthetic construct
  source 1..75: mol_type = other DNA
ggacagggctcgtttttatgggttacagaacgagcaaagcgctgatggaatcagattacttaccgtgacccagca

SEQ ID NO: 46705 - DNA, 75 bp, synthetic construct
  source 1..75: mol_type = other DNA
tttgaactggaagcaatgctggaaaaacgtgtaaaacgtcaactgcttgatgaagtgcagtctatttgtccgcca

SEQ ID NO: 46706 - DNA, 75 bp, synthetic construct
  source 1..75: mol_type = other DNA
aaaatgttattccccacagacacaccctgtttactgacgccaaaagaatttcacctaggattcgctgcaaaagaa

SEQ ID NO: 46707 - DNA, 75 bp, synthetic construct
  source 1..75: mol_type = other DNA
agttcgacttaaatcttcttgtcatatttgagtgtatttaccagcatttaagcattagcaaagctgctgaatcac

SEQ ID NO: 46708 - DNA, 75 bp, synthetic construct
  source 1..75: mol_type = other DNA
atcgcgccgcagcgcaacgcattctgccgccgttcctgttccactatatggatggtggtgcatattctgaataca

SEQ ID NO: 46709 - DNA, 75 bp, synthetic construct
  source 1..75: mol_type = other DNA
gcggaaaaacgcgatccactcgtgaccacttcacgcggcacaggcgagttaatcctgcaggcgctggagagcggt

SEQ ID NO: 46710 - DNA, 75 bp, synthetic construct
  source 1..75: mol_type = other DNA
aaaaaggtctccctaaaattccgcaacatttaggggcgcaggggaagtactggttcaggcgaatggcggaagagc

SEQ ID NO: 46711 - DNA, 75 bp, synthetic construct
  source 1..75: mol_type = other DNA
gggcgaccacgctggatggcgatggcctgttgcagggcgccgctgcactggcgcttgcaggcgacaccctctcac

SEQ ID NO: 46712 - DNA, 75 bp, synthetic construct
  source 1..75: mol_type = other DNA
acgatgttataaggacagttgaaaccgccagcgcaaaagagctggaagagcttgcaggtatccgggaagctgttg

SEQ ID NO: 46713 - DNA, 75 bp, synthetic construct
  source 1..75: mol_type = other DNA
aaagggaagtatcagaaaaatacctggaaggtgagctgagtttgaagtctgttggaaaaatgtacaatattgacc

SEQ ID NO: 46714 - DNA, 75 bp, synthetic construct
  source 1..75: mol_type = other DNA
cgcatttaaaaacgttttgggtattggtaactacagtttttctgcctgtttcggcggcacacatcccgaagagac

SEQ ID NO: 46715 - DNA, 75 bp, synthetic construct
  source 1..75: mol_type = other DNA
tatctgccggacagcacctttaaccgttacggcaaggtgacggcgctgtttgccgaagaaatcacggaaggtccg

SEQ ID NO: 46716 - DNA, 75 bp, synthetic construct
  source 1..75: mol_type = other DNA
gttcaggttgatacaaataataacctgaacagcatgtgggctgtgaagctgcagcagatgcaggacggacgcctt

SEQ ID NO: 46717 - DNA, 75 bp, synthetic construct
  source 1..75: mol_type = other DNA
atggaagaaaaacgacagaacatagcacatgaaaaagtaagagtattgctaatcattgaaaatgggaaagtgatt

SEQ ID NO: 46718 - DNA, 75 bp, synthetic construct
  source 1..75: mol_type = other DNA
ggaggtcgcgcagcacttattgccggcaatgatctcagtctgaatgccattgacagggtaagcagcagtcgccat

SEQ ID NO: 46719 - DNA, 75 bp, synthetic construct
  source 1..75: mol_type = other DNA
catggacgaagtaaacaaaaagccatggcttggtgagaaggaagatcggcggcgattatcagaagtgattgagca

SEQ ID NO: 46720 - DNA, 75 bp, synthetic construct
  source 1..75: mol_type = other DNA
atgacaaaacgccagagcaaaaaccgtaagcgcattattcgtcttgtggaactctggcctgagttattcaaccgg

SEQ ID NO: 46721 - DNA, 75 bp, synthetic construct
  source 1..75: mol_type = other DNA
gtggccatcagggaccattaccgtcagggtttatgacgatcagccgtttgaccggcaaattgttattccggcggt

SEQ ID NO: 46722 - DNA, 75 bp, synthetic construct
  source 1..75: mol_type = other DNA
agcgtggagtaatggcccccgcctgctcatcattgatgaatgtactgcccccattttgttggacgatgaaatgga

SEQ ID NO: 46723 - DNA, 75 bp, synthetic construct
  source 1..75: mol_type = other DNA
ctgctaatgaaagagttccaaaataccaaaatctttataatgaactgattccttgtgggtttccgtccccgtcag

SEQ ID NO: 46724 - DNA, 75 bp, synthetic construct
  source 1..75: mol_type = other DNA
ggcggaagctacaaacacgcatgattactggcagctctcacgccttgcccgctggcatgttgaaagcgaagccat

SEQ ID NO: 46725 - DNA, 75 bp, synthetic construct
  source 1..75: mol_type = other DNA
ggataccggtccgctggctgctgtcagggcaacggactcactgtttatgggcgcagccggggatatcagtatcac

SEQ ID NO: 46726 - DNA, 75 bp, synthetic construct
  source 1..75: mol_type = other DNA
ccaatatctccggcgtcacggtggtgttccgggccggtgagcaggagcagacaccgccggagggatttgaatcct

SEQ ID NO: 46727 - DNA, 75 bp, synthetic construct
  source 1..75: mol_type = other DNA
ggaaaagtacaacacggcagtaaaagccgctgaacgggcgcttgagcaggcccgtctgtctgccagacgtctttc

SEQ ID NO: 46728 - DNA, 75 bp, synthetic construct
  source 1..75: mol_type = other DNA
ctcttttgaatcatcgttttatagcctcgctgaagtatctagaagagagtttgatgccctcagaataactggtag

SEQ ID NO: 46729 - DNA, 75 bp, synthetic construct
  source 1..75: mol_type = other DNA
cgctggcgaatgccgcatggatttgggtgccattactggcgattgccacgatcgccgcctggtcagggatgaatg

SEQ ID NO: 46730 - DNA, 75 bp, synthetic construct
  source 1..75: mol_type = other DNA
aagtcctggcaaccgcgggaagccacacgctgaatgtgatgcaaaaaggagggcgggcagcccgccaggcccgga

SEQ ID NO: 46731 - DNA, 75 bp, synthetic construct
  source 1..75: mol_type = other DNA
cgtgaacgcgatttactggaaagattaattacgctcggtaaagcgcaccatctggacgcccattacattactcgc

SEQ ID NO: 46732 - DNA, 75 bp, synthetic construct
  source 1..75: mol_type = other DNA
ccgggctgtcgtcggtcggcattcgcctgtttctggtgacctacgatgcgcaagggctacgcgccgagcaatcca

SEQ ID NO: 46733 - DNA, 75 bp, synthetic construct
  source 1..75: mol_type = other DNA
aattgctggatggggttgaggttgagtggttgccattgggggaagtctcagccttaagaagaggcagagttatgt

SEQ ID NO: 46734 - DNA, 75 bp, synthetic construct
  source 1..75: mol_type = other DNA
caggggaacggctatcttgggcttcgcgccagccatgaagaagattacacgcgccagacgcgcggcatgtatctg

SEQ ID NO: 46735 - DNA, 75 bp, synthetic construct
  source 1..75: mol_type = other DNA
aacgtccctatgaagaaaaagaaagttaccgctggcagcaggcttcggagcgcatggccgaacggctgggggaga

SEQ ID NO: 46736 - DNA, 75 bp, synthetic construct
  source 1..75: mol_type = other DNA
tctttgacgaaatcctggggcgtattaatcaccatgatgtgcgggatgatattgagcgccgggtttatgaaattg

SEQ ID NO: 46737 - DNA, 75 bp, synthetic construct
  source 1..75: mol_type = other DNA
cgaggccccgtgtctaacaatctcctgtgttaataagcaggggctggaaactttgaatcaaaatgttcattctta

SEQ ID NO: 46738 - DNA, 75 bp, synthetic construct
  source 1..75: mol_type = other DNA
cccggcaagctcttcgaactgccggaagtcctggcaaccgcgggaagccacacgctgaatgtgatgcaaaaaggc

SEQ ID NO: 46739 - DNA, 75 bp, synthetic construct
  source 1..75: mol_type = other DNA
gttatcgctgttataccggcgaaaagatcgatgtctatttcaatactgcgatatgtcagcattctggcaattgcg

SEQ ID NO: 46740 - DNA, 75 bp, synthetic construct
  source 1..75: mol_type = other DNA
ggcgtggagacatacggtgtgtgggggctctccctgccgtcactgcgtcgtcgcctgttccgctgtgtctccatc

SEQ ID NO: 46741 - DNA, 75 bp, synthetic construct
  source 1..75: mol_type = other DNA
tgtttgcggtgagtatcacctcgtccggcaatcccccgacgttttccctgacgccggagggcaggctgaccgcaa

SEQ ID NO: 46742 - DNA, 75 bp, synthetic construct
  source 1..75: mol_type = other DNA
atgaaaatgaacgtaaccgccaccgtcagccatgcgctcggccactggccgcgtattctcccggcgctggggatt

SEQ ID NO: 46743 - DNA, 75 bp, synthetic construct
  source 1..75: mol_type = other DNA
atgccgggtcatctcacctggtacttcggcgaagagctgaagaaaatgggcatgaacattattaatgacgacatc

SEQ ID NO: 46744 - DNA, 75 bp, synthetic construct
  source 1..75: mol_type = other DNA
tcatagtgcttggatagataaagatcgtattcattgcaaacgaactaacgatgccgcagcgaggaatggtgacac

SEQ ID NO: 46745 - DNA, 75 bp, synthetic construct
  source 1..75: mol_type = other DNA
cggaaaccacgacgaccacaccggcacctgacagtattgtctacgccccggaacgccctgatgcaccgatatcgc

SEQ ID NO: 46746 - DNA, 75 bp, synthetic construct
  source 1..75: mol_type = other DNA
ttcagtctgcgactgaccagcggaagcggagaagacagccgtctggtgaccaccgctatcactgcggatacagag

SEQ ID NO: 46747 - DNA, 75 bp, synthetic construct
  source 1..75: mol_type = other DNA
aacttgaacagctaaaaaaagctgcgcaggcacagcgcgccaaatcagtagaaaagagaaactcttctaatcaac

SEQ ID NO: 46748 - DNA, 75 bp, synthetic construct
  source 1..75: mol_type = other DNA
caaaaactggaacaggatcccgctcgcccccgccatttcattactgaaaccggtattgggtatcggtttatgcca

SEQ ID NO: 46749 - DNA, 75 bp, synthetic construct
  source 1..75: mol_type = other DNA
ttagcagataatgtatttattgcctcaggttctggaaaaccggatacgatattctggtcggcagtgatgaaaaat

SEQ ID NO: 46750 - DNA, 75 bp, synthetic construct
  source 1..75: mol_type = other DNA
gtgatgccgcgaaaaaagcggctaaccgttttgcggtaccaccaccacgactggtggtgaataacgataatgagg

SEQ ID NO: 46751 - DNA, 75 bp, synthetic construct
  source 1..75: mol_type = other DNA
cggtaacctggcacacggtttcgctgcctgccagccagaagacaaagcctctttgaaaagcatgttgcgtaacaa

SEQ ID NO: 46752 - DNA, 75 bp, synthetic construct
  source 1..75: mol_type = other DNA
cggctgtaataacgaaagaaaaattactcatggctgcggaggatggaaaactggggacgaagcctaaagtgtggc

SEQ ID NO: 46753 - DNA, 75 bp, synthetic construct
  source 1..75: mol_type = other DNA
acgcgcaccattacgtccgcgaacattgaccgcctgcgggttaccttcggggtgcagtcactggtgcagaccacc

SEQ ID NO: 46754 - DNA, 75 bp, synthetic construct
  source 1..75: mol_type = other DNA
cttgggcataaaacacaacagcaaactgatcgttatgatgatgatcgtgggaaaaactggatgaagataacatgt

SEQ ID NO: 46755 - DNA, 75 bp, synthetic construct
  source 1..75: mol_type = other DNA
cttggccacaagtctctaaaccagacagctaaatatcgagatgatcgaggtaaaaattggataacggtaaccttc

SEQ ID NO: 46756 - DNA, 75 bp, synthetic construct
  source 1..75: mol_type = other DNA
ttcccagggaatgctcctgaaatggagcggagtgaatctttctgatgcaaaaaataacggggctgaagggcaggt

SEQ ID NO: 46757 - DNA, 75 bp, synthetic construct
  source 1..75: mol_type = other DNA
gatgatcctgccaattgccttgttaaccgctggcttgttaggcacgctgtttgtggtgattaaaaaaaaatactg

SEQ ID NO: 46758 - DNA, 75 bp, synthetic construct
  source 1..75: mol_type = other DNA
cctggcgcgtaagctggatatgaacagcatggcgcgactttatacccgcgagattgacggtaaaacgcattacta

SEQ ID NO: 46759 - DNA, 75 bp, synthetic construct
  source 1..75: mol_type = other DNA
tattaagcgtcgttatgcgcaactggtaaaaaattgccgcccggaagatgatcccgcagcctggcaacaattgca

SEQ ID NO: 46760 - DNA, 75 bp, synthetic construct
  source 1..75: mol_type = other DNA
gtcaccaatccactgtcaaccagcgaccccaccctgatcggaagcatgttctgggtgttcaacaatatcattgcc

SEQ ID NO: 46761 - DNA, 75 bp, synthetic construct
  source 1..75: mol_type = other DNA
gcagtaccgacaaaagctacacgctcacggtcagtaacggcagtggcacatgtggctctgttgaactgccttatt

SEQ ID NO: 46762 - DNA, 75 bp, synthetic construct
  source 1..75: mol_type = other DNA
ttgttggtcagggcgatcagatattcatgaacgacgtgttcctgaaacgcctgacggctccgaccattaccagcg

SEQ ID NO: 46763 - DNA, 75 bp, synthetic construct
  source 1..75: mol_type = other DNA
ctcagttgggtggtctgggggggggcatattaggtttttgttgggttttgttatatctttttagggcaaagggct

SEQ ID NO: 46764 - DNA, 75 bp, synthetic construct
  source 1..75: mol_type = other DNA
taattttctgggcggacgtgacggcgttaatatgctggggaatatggtttcttcagtcaaagatattattgccgg

SEQ ID NO: 46765 - DNA, 75 bp, synthetic construct
  source 1..75: mol_type = other DNA
cgctctcatcttgagcagacaaacgctgatgaggcgctggtccttgacagcgaagggtgggttacggaatgctgt

SEQ ID NO: 46766 - DNA, 75 bp, synthetic construct
  source 1..75: mol_type = other DNA
atggcgatcggtcgggcaatgctcaaagaacccgacgatttcctctcatctcttgatccggacgatgctctctta

SEQ ID NO: 46767 - DNA, 75 bp, synthetic construct
  source 1..75: mol_type = other DNA
gggaaatatgttcaaccagttgctgacctctaaaaagctgacaaaaacggcaattaacgaggcgctccggaggat

SEQ ID NO: 46768 - DNA, 75 bp, synthetic construct
  source 1..75: mol_type = other DNA
gctgcttgagcagtatcaccatgccgggcagcaacgccttgccgccgtgcaacgggccatgcagcagggggccgc

SEQ ID NO: 46769 - DNA, 75 bp, synthetic construct
  source 1..75: mol_type = other DNA
gaaatcttacccgtgctgaccagtgagcttggtatgggtccgcacccatccgatgaaggctattgcgcgtgtctg

SEQ ID NO: 46770 - DNA, 75 bp, synthetic construct
  source 1..75: mol_type = other DNA
cggcgcgactgatgtgtaaacgcacacccatgctgacggaagcgttcgggattgaggttaacgcctcaaacatga

SEQ ID NO: 46771 - DNA, 75 bp, synthetic construct
  source 1..75: mol_type = other DNA
tcgagatgctcaacggttcggtacccaacgatgaactgttcgggatcatctataccgttgacgaaggcgatgact

SEQ ID NO: 46772 - DNA, 75 bp, synthetic construct
  source 1..75: mol_type = other DNA
cctgccgttcgacagccgctggcagaggataaaacattactgccatttttcagcaacgaacgggtgattcgtgct

SEQ ID NO: 46773 - DNA, 75 bp, synthetic construct
  source 1..75: mol_type = other DNA
cgagcaccggggcgcgcctgacaggctgactatccggggacgcagtgcggattttcgcgggacgctgaactcgcg

SEQ ID NO: 46774 - DNA, 75 bp, synthetic construct
  source 1..75: mol_type = other DNA
tgcggatccgctggcgttcgaagaaaagcatggttctcaggttgatttaatttttcgttttcttgatcacgcctt

SEQ ID NO: 46775 - DNA, 75 bp, synthetic construct
  source 1..75: mol_type = other DNA
tcaccgtgccggacagcaacgactggccgccgtgcaacgggccatgcagcagggggccgcgaatgataactggtt

SEQ ID NO: 46776 - DNA, 75 bp, synthetic construct
  source 1..75: mol_type = other DNA
ccggacgccggtatatcggtatcgagctgcttgagcagtatcaccgtgccgggcagcaacgccttgccgccgtgc

SEQ ID NO: 46777 - DNA, 75 bp, synthetic construct
  source 1..75: mol_type = other DNA
cctcagaagccattgcccgacgtgctgggctggaaatattcaggcaatcgtcatcacccgacggaaaagcccgtt

SEQ ID NO: 46778 - DNA, 75 bp, synthetic construct
  source 1..75: mol_type = other DNA
gagaagtatggctcccagctggagctgatatttcgttttatcgatcgtgcgctggcaattggcgtgctggcctga

SEQ ID NO: 46779 - DNA, 75 bp, synthetic construct
  source 1..75: mol_type = other DNA
gagtaatcgaacatcttggctggtatgtataccgcctaattgacccgagggatggcagtacgttctatgtaggta

SEQ ID NO: 46780 - DNA, 75 bp, synthetic construct
  source 1..75: mol_type = other DNA
gtgctggcactgcgacaaccaactgcgtgaccagacatcggaatcactggagctgcttgctcaacaaaatctgac

SEQ ID NO: 46781 - DNA, 75 bp, synthetic construct
  source 1..75: mol_type = other DNA
gtggcaaagcaaaagttcaaaataaccaactggcccacctacaataaagccctcatcaaccgtggctccataact

SEQ ID NO: 46782 - DNA, 75 bp, synthetic construct
  source 1..75: mol_type = other DNA
catgtcatccatcgacacggaatgactgatgaaaagacggcgtacgaagtcgaagcagcacttattgatgcctac

SEQ ID NO: 46783 - DNA, 75 bp, synthetic construct
  source 1..75: mol_type = other DNA
gcatccaaaaaactgacgaaaacagccattaatgaagccctgcgtagaatgaaaaaagcgggaatagagaaagct

SEQ ID NO: 46784 - DNA, 75 bp, synthetic construct
  source 1..75: mol_type = other DNA
tttcgctgtttaaagggctggatgagatgcagcagatggtggcaaatcaggctttcagcaccagcgattactttt

SEQ ID NO: 46785 - DNA, 75 bp, synthetic construct
  source 1..75: mol_type = other DNA
cgcccaataggcggttggctatttggccgcatagccgataaacatggtcgcaaaaaatcgatgctgttatcggtg

SEQ ID NO: 46786 - DNA, 75 bp, synthetic construct
  source 1..75: mol_type = other DNA
aacggataacggtaaacagaacacgtatttttcgtcactggataacatgattgcccaggggaacccgatgccggt

SEQ ID NO: 46787 - DNA, 75 bp, synthetic construct
  source 1..75: mol_type = other DNA
aacgtcgtgcctgcaggcttacaggtttgtccctgtcgacctgccgctacgaggctcagcgtccggcggctgatg

SEQ ID NO: 46788 - DNA, 75 bp, synthetic construct
  source 1..75: mol_type = other DNA
aagacggtcttcctgatccggtaaaagcgatggggaggatcctggtggaaaacctgagcattgacccgaaactgg

SEQ ID NO: 46789 - DNA, 75 bp, synthetic construct
  source 1..75: mol_type = other DNA
gtgatgccgcgaaaaaagcggctaaccgttttgcggtaccaccaccaccacgactggtggtgaataacgataatg

SEQ ID NO: 46790 - DNA, 75 bp, synthetic construct
  source 1..75: mol_type = other DNA
gaaaaaagcgggaatagagaaacctgaactggaatcatttttgcgagaaattatcaatggcaagcaaaagagctg

SEQ ID NO: 46791 - DNA, 75 bp, synthetic construct
  source 1..75: mol_type = other DNA
agcggcttgtcatggctggcctgggcaaccggtattccggtggtgctgataagcggcttcagcctgcctaacagc

SEQ ID NO: 46792 - DNA, 75 bp, synthetic construct
  source 1..75: mol_type = other DNA
ttatcaatggcaagcaaaagagctggctggtgcattgtactgatgccgaggcgctatgcattgatcgggtgatta

SEQ ID NO: 46793 - DNA, 75 bp, synthetic construct
  source 1..75: mol_type = other DNA
atggcctatcgttccgcaccgctctatgaagatgtcatctggcgaacgcatctccagccgcaggatgctgggctt

SEQ ID NO: 46794 - DNA, 75 bp, synthetic construct
  source 1..75: mol_type = other DNA
ctgcaacctgccagtaatgagatgtaccgcgtactaaaaaaagatgcgctgatggtgagtttctatggctggaac

SEQ ID NO: 46795 - DNA, 75 bp, synthetic construct
  source 1..75: mol_type = other DNA
ggctggaatgatgaggcatttaatccaaaggatgcgcagcgttatctctgccgtatctggagcctgatgcgcacg

SEQ ID NO: 46796 - DNA, 75 bp, synthetic construct
  source 1..75: mol_type = other DNA
cccctgtttatgcaggggcgtgtactgctggagcctgagccggaacgttattcatctttcgccagtggtgccgtt

SEQ ID NO: 46797 - DNA, 75 bp, synthetic construct
  source 1..75: mol_type = other DNA
accgcacaggatgcaacgacagcacagaaagggatagttcagcttagcaacgcgaccaacagcacatctgaaatg

SEQ ID NO: 46798 - DNA, 75 bp, synthetic construct
  source 1..75: mol_type = other DNA
gctgcttgagcagtatcaccgtgccgggcagcaacgccttgccgccgtacaacgggccatgcagcagggggccgc

SEQ ID NO: 46799 - DNA, 75 bp, synthetic construct
  source 1..75: mol_type = other DNA
gaaaaaggtgctggcgctgaaagtggatccagagtcgccggagtcttttatgttacgcccaaaacgtcgccgctg

SEQ ID NO: 46800 - DNA, 75 bp, synthetic construct
  source 1..75: mol_type = other DNA
tgttacgccccaaacgtcgccgttgggttaacgaaaagtacacgagctgggttaagacgcagccgtgtgtatgtt

SEQ ID NO: 46801 - DNA, 75 bp, synthetic construct
  source 1..75: mol_type = other DNA
gttaagacacagccgtgtgcatgttgtggaaagcccgctgatgatccccaccacctgataggccacggtcagggg

SEQ ID NO: 46802 - DNA, 75 bp, synthetic construct
  source 1..75: mol_type = other DNA
gtgagtaaacgttattttgtcaccggaacggataccgaagtggggaaaaccgtcgccagttgtgcacttttacaa

SEQ ID NO: 46803 - DNA, 75 bp, synthetic construct
  source 1..75: mol_type = other DNA
cggataactccattacgctgtttgacaaactcttttacagcgtagacctgctgctgacgctgagccagcagggtg

SEQ ID NO: 46804 - DNA, 75 bp, synthetic construct
  source 1..75: mol_type = other DNA
aacgatgtcacgcctccgggaaaacgtcacgctgaatatatgaccacgctcacccgcatgattcccgcgccgctg

SEQ ID NO: 46805 - DNA, 75 bp, synthetic construct
  source 1..75: mol_type = other DNA
caggagaacgaggatattgcgctaacggtagggaagctgcgcgttgagctggaaggcaaagacagcaaaatagcc

SEQ ID NO: 46806 - DNA, 75 bp, synthetic construct
  source 1..75: mol_type = other DNA
agctgtttgcccgtgagtacctgaaagatctgaacggcacacaggcagctatcagggcgggctacagcgagaaga

SEQ ID NO: 46807 - DNA, 75 bp, synthetic construct
  source 1..75: mol_type = other DNA
aatttctggtcagtataatttattctgtgcagtctcatttttctggtgcgcaaacaatacaactgaatggtaatg

SEQ ID NO: 46808 - DNA, 75 bp, synthetic construct
  source 1..75: mol_type = other DNA
tggcaagggcataatcagagcgacaagcttctccagagttggtattgccgccagttacgttccgcgcttttattt

SEQ ID NO: 46809 - DNA, 75 bp, synthetic construct
  source 1..75: mol_type = other DNA
tccggctgcgggaacgccccacactcaccggaggtgcagcttaccgtcagtggttgtccgcgagtgacgccgtgt

SEQ ID NO: 46810 - DNA, 75 bp, synthetic construct
  source 1..75: mol_type = other DNA
tacgtctatgattgctgagattgaagaatatggaattgacgggaatttcatagagacaaaaaatgatcccgtagc

SEQ ID NO: 46811 - DNA, 75 bp, synthetic construct
  source 1..75: mol_type = other DNA
gtgagtaaatgttattttgtcaccggaacggataccgaagtggggaaaactgtcgccagctgcgcgcttttacaa

SEQ ID NO: 46812 - DNA, 75 bp, synthetic construct
  source 1..75: mol_type = other DNA
gctctacgccgaagcagaacagaccagcgcgctgctgagacaacgacaacaccggattgaggaactgaaacgtga

SEQ ID NO: 46813 - DNA, 75 bp, synthetic construct
  source 1..75: mol_type = other DNA
cctcggtattcgatatgcagatgttgaggtcatgaaaattgctggagatgcccagctttctaccccatgcactga

SEQ ID NO: 46814 - DNA, 75 bp, synthetic construct
  source 1..75: mol_type = other DNA
aaggtctgactcaggcttcccgtaacgcgaatgatggtatttctgttgcgcagaccactgaaggtgcgctgaatg

SEQ ID NO: 46815 - DNA, 75 bp, synthetic construct
  source 1..75: mol_type = other DNA
ggccgtgaatccatgccggtattccacaatacccgggtactggtggagccggaaccgaaaagcatgcgtaatctg

SEQ ID NO: 46816 - DNA, 75 bp, synthetic construct
  source 1..75: mol_type = other DNA
tcgcagtttatctgggatttcaaatgttttagcggtatcgaccatatcgaaaaccctgatgaagatggcattttt

SEQ ID NO: 46817 - DNA, 75 bp, synthetic construct
  source 1..75: mol_type = other DNA
tgaacaggcccgcgcagaactggatcaggctaataaagatgttgccagaaaccaggaacgacaggctaaagctgt

SEQ ID NO: 46818 - DNA, 75 bp, synthetic construct
  source 1..75: mol_type = other DNA
gatactcctttgcctgctgacgttatccggctgcggaaacgtccggcattcaccggaggtgcagcttaccgtcag

SEQ ID NO: 46819 - DNA, 75 bp, synthetic construct
  source 1..75: mol_type = other DNA
ttaccacactgaaatggtttacaggcagcatcaggttcttgaggcactgcacaacgctggaataaacgtcaccga

SEQ ID NO: 46820 - DNA, 75 bp, synthetic construct
  source 1..75: mol_type = other DNA
atgatgatgccagagcgttttatgagcgttttggttttgtccagtcagttgtggcaccaaataccttgttttata

SEQ ID NO: 46821 - DNA, 75 bp, synthetic construct
  source 1..75: mol_type = other DNA
gcgagttttagttttggggttctgtctcctgctccgggtggacgcatgtcaaaagtgcaggattttctgctgaat

SEQ ID NO: 46822 - DNA, 75 bp, synthetic construct
  source 1..75: mol_type = other DNA
attttacacaccgtgaacagttattcatgcgtaaccgggccagttgtgactttgttgtttactataaggtcggga

SEQ ID NO: 46823 - DNA, 75 bp, synthetic construct
  source 1..75: mol_type = other DNA
tgtcgctttttttaatattggtttatagggttatagcaaacttttctggtgtgcttgctttagattttatttctt

SEQ ID NO: 46824 - DNA, 75 bp, synthetic construct
  source 1..75: mol_type = other DNA
tctgcttacacggtttgctgatcaggacgaagccagacgcctgttatatgagcagcagaaatctgaagaagcact

SEQ ID NO: 46825 - DNA, 75 bp, synthetic construct
  source 1..75: mol_type = other DNA
agcgacatcgtaccgggagagcagaccgccaccagcatactgaagcagcgcacaaaaaatcttgcgccgttgcct

SEQ ID NO: 46826 - DNA, 75 bp, synthetic construct
  source 1..75: mol_type = other DNA
tctttacatcggtaagacgcctcgtgctgttgctgaaatggcgaaagcaggcaagttaccagccttttatatgac

SEQ ID NO: 46827 - DNA, 75 bp, synthetic construct
  source 1..75: mol_type = other DNA
ttactggtggtacggggtctttcggtaatgctgttctaagacgttttcttgatacagatatcaaagaaatacgta

SEQ ID NO: 46828 - DNA, 75 bp, synthetic construct
  source 1..75: mol_type = other DNA
ctttctgacaggcggattggattcagaaacagaattgatttgttgttaaacttcatgatactgaaagtcaaacca

SEQ ID NO: 46829 - DNA, 75 bp, synthetic construct
  source 1..75: mol_type = other DNA
gcatgttgtggaaagcctgctgatgatccccaccacttgataggccacggtcagggtggaatgggtactaaagcg

SEQ ID NO: 46830 - DNA, 75 bp, synthetic construct
  source 1..75: mol_type = other DNA
ggcagccatgtacatgtctttagcccgaacggtgaaagggtgagctttacctacaacgaccatgtaatgcatgaa

SEQ ID NO: 46831 - DNA, 75 bp, synthetic construct
  source 1..75: mol_type = other DNA
atggcgggactgtaagttgccgattcaaaatcgagggtgagctgaaaaaagaccagtacgcaatggcgatgtact

SEQ ID NO: 46832 - DNA, 75 bp, synthetic construct
  source 1..75: mol_type = other DNA
gatggtttaaaattctggctgaaacagctatcaaatttcggtgttatagagattaaagaattatctttctctaca

SEQ ID NO: 46833 - DNA, 75 bp, synthetic construct
  source 1..75: mol_type = other DNA
gacgttattcctgctgttcccgttctcgcgtctggtacacatctggagcgtaccggtggagtatctgacacgtaa

SEQ ID NO: 46834 - DNA, 75 bp, synthetic construct
  source 1..75: mol_type = other DNA
aagataaatcattactgccatttttcagcaatgagcgtgtgattcgtgctgctggtggcgctggtgcactgtctg

SEQ ID NO: 46835 - DNA, 75 bp, synthetic construct
  source 1..75: mol_type = other DNA
gcctggtatatatgacgcgcgccgtcttaccgggtatggttgaacgtaatcatggtcatattattaacattggct

SEQ ID NO: 46836 - DNA, 75 bp, synthetic construct
  source 1..75: mol_type = other DNA
tgcctggatgatttacgtcattcggcatgcaatgaatggtgcgcaggagcgggagttgtcgctggctgaactatg

SEQ ID NO: 46837 - DNA, 75 bp, synthetic construct
  source 1..75: mol_type = other DNA
tggtggagccggaaccgaaaagcatgcgcggtctgccgtccggagtcgtccctgccgttcgccagccgctggcgg

SEQ ID NO: 46838 - DNA, 75 bp, synthetic construct
  source 1..75: mol_type = other DNA
gtgaaggggactggcaggtgaaccgcttcgccatcacgctccctgtggctgaaagggcagaggaagtcatggcct

SEQ ID NO: 46839 - DNA, 75 bp, synthetic construct
  source 1..75: mol_type = other DNA
accttctgcggagaaacacagctattactcacctgtcgtttcaatcattgaggggattaatcttgggagtcagag

SEQ ID NO: 46840 - DNA, 75 bp, synthetic construct
  source 1..75: mol_type = other DNA
aactggatattgaactggtaagcgcgccaaaagacaccaataaaaatgtctttaaagccagtaaacaaaccattg

SEQ ID NO: 46841 - DNA, 75 bp, synthetic construct
  source 1..75: mol_type = other DNA
gtggactggcttcttgatgtttttgctacctggctctacggcttaaaagtaatcgcgataacgttagcggtcatt

SEQ ID NO: 46842 - DNA, 75 bp, synthetic construct
  source 1..75: mol_type = other DNA
gattcatcgacaaaatgggtactgacagggtatcagacagtttctgatgtcagaacctcaaaaatagcaacggat

SEQ ID NO: 46843 - DNA, 75 bp, synthetic construct
  source 1..75: mol_type = other DNA
tgcggctttatcgggcatgtatgcggcaggagccagtatgatcctgggcggtgtggcccagatgctggcaccgaa

SEQ ID NO: 46844 - DNA, 75 bp, synthetic construct
  source 1..75: mol_type = other DNA
catcagaacataatttgcagtgagtgccgaaatagcgaagttatgcagcgtgtactggcgttctgtcaggggaat

SEQ ID NO: 46845 - DNA, 75 bp, synthetic construct
  source 1..75: mol_type = other DNA
aatggtgcagtgatccacatcgtaccgcgtcttgcgggagcaaaaagtggcggtgtgtttcaggcggtgctgggt

SEQ ID NO: 46846 - DNA, 75 bp, synthetic construct
  source 1..75: mol_type = other DNA
aatggtgccgtgatccacatcgtaccgcgcctggcgggggctaaaagtggcggcgtatttcaggctgtgctgggg

SEQ ID NO: 46847 - DNA, 75 bp, synthetic construct
  source 1..75: mol_type = other DNA
aagccgaaagcggcgaagaaagacgcgagaaaagcgaaaaagccatcggcgaaaacgcagaaaatagccgcagcg

SEQ ID NO: 46848 - DNA, 75 bp, synthetic construct
  source 1..75: mol_type = other DNA
cgtttgacacttttatcggtggaacggatatccatgtgaaaagcatctcactggacatcagcgatgaaagcgccg

SEQ ID NO: 46849 - DNA, 75 bp, synthetic construct
  source 1..75: mol_type = other DNA
aaggtaaccggagtgaattccggccggttaggcattgcactgctggacaccgatggcagcagtctgctgaaaccc

SEQ ID NO: 46850 - DNA, 75 bp, synthetic construct
  source 1..75: mol_type = other DNA
cctcattggataacatggttgcccaaggcaatgtcctgcctgttctgtacggtgaaatgcgcgtggggtcacgtg

SEQ ID NO: 46851 - DNA, 75 bp, synthetic construct
  source 1..75: mol_type = other DNA
cgttcgatgtgaactacgacagcatcatgattcacgtcgaaaacgccaccgtcaccattacggataacagcgccg

SEQ ID NO: 46852 - DNA, 75 bp, synthetic construct
  source 1..75: mol_type = other DNA
gtttctgccgatgtggaggtggaagtcgacgcgcagaactttaaaaagtttggtgccgtggcccgctctgcgggg

SEQ ID NO: 46853 - DNA, 75 bp, synthetic construct
  source 1..75: mol_type = other DNA
tggaagctgaacacgcgttaatggcggctaatgccaatattggtgctgcgcgtgcggcatttttcccgtctatca

SEQ ID NO: 46854 - DNA, 75 bp, synthetic construct
  source 1..75: mol_type = other DNA
atggtgacaagcccggactttgtcgcgattgacggcgtgccgtacctgtcagcccgcgacactcgcgatttgaaa

SEQ ID NO: 46855 - DNA, 75 bp, synthetic construct
  source 1..75: mol_type = other DNA
gacccgctgggacggcgaatggcgaaacgggtatggcggcgggagcgtgacctgacggggtggatgtcgctgtcg

SEQ ID NO: 46856 - DNA, 75 bp, synthetic construct
  source 1..75: mol_type = other DNA
ttccttgacctgattcaggaaggtaacatcggcctgatgaaagcggttgataaattcgaataccgccgtggttac

SEQ ID NO: 46857 - DNA, 75 bp, synthetic construct
  source 1..75: mol_type = other DNA
cctttcaccgcgctcatcaggcgttactgaccgatcgtgtgctgaatgcccagggcggcgactgggggatctgtg

SEQ ID NO: 46858 - DNA, 75 bp, synthetic construct
  source 1..75: mol_type = other DNA
cctgcgacaatattcccgacaatggccatgtggtgaaaaacgcggtgctgggaatggcagaaaaacgttcgccag

SEQ ID NO: 46859 - DNA, 75 bp, synthetic construct
  source 1..75: mol_type = other DNA
gggcgctggccacgcagctaccgtcgtttcgccagaaactgaatgagggctggtatcaggtgcgcattgccgggc

SEQ ID NO: 46860 - DNA, 75 bp, synthetic construct
  source 1..75: mol_type = other DNA
ggttccgccctgaatacacagtcacagaccctgaccaacagcggtctgttgcagggggaggcctcactcaccgtt

SEQ ID NO: 46861 - DNA, 75 bp, synthetic construct
  source 1..75: mol_type = other DNA
atggatcattgcacgtcagggtcagagtgaaccactgacaaatctgatggatcagtacgtgcttatggcataccg

SEQ ID NO: 46862 - DNA, 75 bp, synthetic construct
  source 1..75: mol_type = other DNA
ttgatggcgctgaaattttacgtcaggaacgcggttgcctcgtcgtagccaatcatcccacgctgatcgattacg

SEQ ID NO: 46863 - DNA, 75 bp, synthetic construct
  source 1..75: mol_type = other DNA
tgttcctgctactgctactgctactgctactgctactgctactgctactgctactgttcttcttttttctactgc

SEQ ID NO: 46864 - DNA, 75 bp, synthetic construct
  source 1..75: mol_type = other DNA
atgcctgggcgctttgaactaaaaccaactctggtgaaaatctggcacgcaccagataactttcgcctcatggac

SEQ ID NO: 46865 - DNA, 75 bp, synthetic construct
  source 1..75: mol_type = other DNA
gcttctgtttcttcatgcctgtcatttgtctgttactgatgttgttgttcctgctactgctactgctactgctac

SEQ ID NO: 46866 - DNA, 75 bp, synthetic construct
  source 1..75: mol_type = other DNA
atgaaacacactgacattcgtgccgcagtgctggatgcactcgagcagcatgaacacggggcgacgctgtttgat

SEQ ID NO: 46867 - DNA, 75 bp, synthetic construct
  source 1..75: mol_type = other DNA
gtccagaaagatggtcgcagaattgaatatacggcagcttctctggatgagcttaaccgggcgatcaatgatgcg

SEQ ID NO: 46868 - DNA, 75 bp, synthetic construct
  source 1..75: mol_type = other DNA
agagaatggtccggaagataccacgcaagatgacgatatgaagcagagcatcgtcaaatggctgttcgagctgaa

SEQ ID NO: 46869 - DNA, 75 bp, synthetic construct
  source 1..75: mol_type = other DNA
gcaataataaaatcattactgatactggctgcggtaatattcatctcgccggagctgtcattgaagtaatgggga

SEQ ID NO: 46870 - DNA, 75 bp, synthetic construct
  source 1..75: mol_type = other DNA
ggcgatgtcattgaaatctgcgatgatgactatgcgggtatcagcatcggcgggcgcgtgctggcggtgaacagc

SEQ ID NO: 46871 - DNA, 75 bp, synthetic construct
  source 1..75: mol_type = other DNA
tgcgaagtaatgaggttgttgtaagcctttctcttctttctgaggtaagagagttggcaggattacctgttgatg

SEQ ID NO: 46872 - DNA, 75 bp, synthetic construct
  source 1..75: mol_type = other DNA
aacagcacttccgagtcactggcggcaacaccaaaagccgttaaggccgcgtatgacctggctaacgggaaatac

SEQ ID NO: 46873 - DNA, 75 bp, synthetic construct
  source 1..75: mol_type = other DNA
tcgctttgctatgcggttttgcaggtgcaaactttgcttcgagcatgggcaatatcagtttcttctttccaaaag

SEQ ID NO: 46874 - DNA, 75 bp, synthetic construct
  source 1..75: mol_type = other DNA
catcacagtgaaaccgtcatacatcgttacggcaccggcgcgatggtgttgtgctggcactgcgataaccagctg

SEQ ID NO: 46875 - DNA, 75 bp, synthetic construct
  source 1..75: mol_type = other DNA
cctaccgttcgccagccgctggcggaggataaatcattactgccgtttttcagtaacaaacgagtgattcgtgct

SEQ ID NO: 46876 - DNA, 75 bp, synthetic construct
  source 1..75: mol_type = other DNA
catcacaggaaaagacggtggtaagcatcaccgttgatccagagtctccggaatctttcatgaagctgcctaaac

SEQ ID NO: 46877 - DNA, 75 bp, synthetic construct
  source 1..75: mol_type = other DNA
cagcgatgacgcttggtggtgttgcacagatgctggctcctaaaccccaaaccccccgaacgcagacaacggata

SEQ ID NO: 46878 - DNA, 75 bp, synthetic construct
  source 1..75: mol_type = other DNA
tttcagtccatggtcgaggatattttgcaggtcgccgaacgccatctacaaaaactgaatcaacgtcagcgagaa

SEQ ID NO: 46879 - DNA, 75 bp, synthetic construct
  source 1..75: mol_type = other DNA
gaatgatagtaggtaatgcagaaatagtgccatttagtccgaggcgatatctgtatcatgcttatttggcttata

SEQ ID NO: 46880 - DNA, 75 bp, synthetic construct
  source 1..75: mol_type = other DNA
gaggctgcaagacaccatatcagaattacacaaaatgaccttgatagtctgaagtcttcaaatacttttgagcta

SEQ ID NO: 46881 - DNA, 75 bp, synthetic construct
  source 1..75: mol_type = other DNA
gggcgctgtcgttacaggtgccgggattccgccgtcagatgaacgaaggctggtaccagatacgtattcgcggtg

SEQ ID NO: 46882 - DNA, 75 bp, synthetic construct
  source 1..75: mol_type = other DNA
tgccgcaattacaggaatgtatggtgcgggggccagtatggtgctcggtggtgtggcgcagatgctggcaccgaa

SEQ ID NO: 46883 - DNA, 75 bp, synthetic construct
  source 1..75: mol_type = other DNA
tgagcacgccgcagcagtgcttaatctggtagatgacggtgttatcgaatggaatgaccaggaggtcgtgagggc

SEQ ID NO: 46884 - DNA, 75 bp, synthetic construct
  source 1..75: mol_type = other DNA
cagccagcaatttcatgcgttgtgccgaagccgtcggaacacgcattacagacattccggtagacctcaacacgt

SEQ ID NO: 46885 - DNA, 75 bp, synthetic construct
  source 1..75: mol_type = other DNA
aaattgacgacactgttgccgccgaatttatgaaggaagcaccagaaggaaaatacagaggtgtcatcgacggaa

SEQ ID NO: 46886 - DNA, 75 bp, synthetic construct
  source 1..75: mol_type = other DNA
aggaaatatgttcaatcagttgctggcatccaaaaaactgacaaaaaccgcgatcaatgaagccatgcgcaaaat

SEQ ID NO: 46887 - DNA, 75 bp, synthetic construct
  source 1..75: mol_type = other DNA
gcgggtggcgctggtgcactgtctgactggttattacgtcacgtgaaatcctgccagtggccacacggtgattat

SEQ ID NO: 46888 - DNA, 75 bp, synthetic construct
  source 1..75: mol_type = other DNA
catcgccgttgatcctgagtccccggaatctttcatgaagcgacctaaacgtcgccgttgggtaaatgagaaata

SEQ ID NO: 46889 - DNA, 75 bp, synthetic construct
  source 1..75: mol_type = other DNA
gaaaagcatggttcccagattgatttaatttttcgttttcttgatcacgcctttgcaaccggcgtgctcgggtaa

SEQ ID NO: 46890 - DNA, 75 bp, synthetic construct
  source 1..75: mol_type = other DNA
tttatatgaagctaactctcaatttttttacgagagaaatgtcatagaagaggcagtcaacgctttattctgtga

SEQ ID NO: 46891 - DNA, 75 bp, synthetic construct
  source 1..75: mol_type = other DNA
aagacgcgacagttcagcctgataaaaaagaagagaaaaagacgatacaaataccgctggcaccattgatattta

SEQ ID NO: 46892 - DNA, 75 bp, synthetic construct
  source 1..75: mol_type = other DNA
cccggcaggtatttcagccgggattgcgctggatgaagcactggccgaaggcgatgttatccgcatcctgcgcgg

SEQ ID NO: 46893 - DNA, 75 bp, synthetic construct
  source 1..75: mol_type = other DNA
aaagccagcaataccaatgcctgtaagcaatactgtaccagcagattaccagcaaattaccacagataaagaata

SEQ ID NO: 46894 - DNA, 75 bp, synthetic construct
  source 1..75: mol_type = other DNA
tcaaacgggcgatattacgaaccttcgcccggacgaaattatggtgtcggcatgaatattgcgtggagatttgag

SEQ ID NO: 46895 - DNA, 75 bp, synthetic construct
  source 1..75: mol_type = other DNA
ttcataccgaagcaatgaacgatcatgagtacagcgcggcattcgaggcagaagaagcctcggagctacttcggg

SEQ ID NO: 46896 - DNA, 75 bp, synthetic construct
  source 1..75: mol_type = other DNA
ttatcgaagagtcctttgggttaccccggggatggatggatggtatcgtttcatcatcaacgaacacagcctcca

SEQ ID NO: 46897 - DNA, 75 bp, synthetic construct
  source 1..75: mol_type = other DNA
gaggacctgctgtgtgctccaaacaccattgatgcctatgcccgtggcgtcaatgactggctcgctttctgtcac

SEQ ID NO: 46898 - DNA, 75 bp, synthetic construct
  source 1..75: mol_type = other DNA
aatgcgactttcatcgcggacggggtgccacagtttgctctggttaatgggctgtacgcaatggacaaggagtaa

SEQ ID NO: 46899 - DNA, 75 bp, synthetic construct
  source 1..75: mol_type = other DNA
ggtggtgctctgctgtttctacggccctgcaggccaggcttacgccaaaacgtttcgtaacggtctgttcgtgtc

SEQ ID NO: 46900 - DNA, 75 bp, synthetic construct
  source 1..75: mol_type = other DNA
tttgacaaaaaagcagaagattatttcttcaataagtttctgttgtcttttgatccctctacacagcaatggagt

SEQ ID NO: 46901 - DNA, 75 bp, synthetic construct
  source 1..75: mol_type = other DNA
accagccgcgtgacaaaatgacggaagtcatcatttttgcgggtagtgatgcgtgggcacatgcgaaacagtggc

SEQ ID NO: 46902 - DNA, 75 bp, synthetic construct
  source 1..75: mol_type = other DNA
acctgacgcctaccagccagccgccgcagtacgaccaggcgcttgagcgcgagctcagccggtggattcgcggtg

SEQ ID NO: 46903 - DNA, 75 bp, synthetic construct
  source 1..75: mol_type = other DNA
atgggcatggcgggtcatgtgacttttgtacacaacggcaaggcttatgttactggcggtgttaaccagaatatc

SEQ ID NO: 46904 - DNA, 75 bp, synthetic construct
  source 1..75: mol_type = other DNA
taacggtggtgaaggggcagacggttcaggtcgggaccagaaaagaagggggccacgaccagagtatcacggtgg

SEQ ID NO: 46905 - DNA, 75 bp, synthetic construct
  source 1..75: mol_type = other DNA
gatgccttaccggaaagtgcagcccgtaaggccctgagattaccgaagcctgttttgccgtctgtcacccgggag

SEQ ID NO: 46906 - DNA, 75 bp, synthetic construct
  source 1..75: mol_type = other DNA
tcgttgatttccttcagaaaccaacgcctgaaaaacaactgaatattgaactggtaagcgcgccaaaagacacca

SEQ ID NO: 46907 - DNA, 75 bp, synthetic construct
  source 1..75: mol_type = other DNA
cacagaagaccgctttgcttaccgaagcggagtctgtcatccggccgccggggcgtgctgtcaggctgaacaggg

SEQ ID NO: 46908 - DNA, 75 bp, synthetic construct
  source 1..75: mol_type = other DNA
cccaagggaacactcgcgttcgggttgataacattggcggcgtcggtgcacaaacggtcaacggtattgaactca

SEQ ID NO: 46909 - DNA, 75 bp, synthetic construct
  source 1..75: mol_type = other DNA
atgagacaggatatcgaagcgagcgttatcggtggcctgctgattggtggattaacaccaaccgccagcgacgtt

SEQ ID NO: 46910 - DNA, 75 bp, synthetic construct
  source 1..75: mol_type = other DNA
cgggctttaaaccaagccacgaagtgaaggcgatgctcgacgacgcggatgtcttcctgttgccttcggtaacgg

SEQ ID NO: 46911 - DNA, 75 bp, synthetic construct
  source 1..75: mol_type = other DNA
ggtggaggccgataaatccggctggctggtgcctgagaacgatgctcgcgcactggcacaacgtctggcggcgtt

SEQ ID NO: 46912 - DNA, 75 bp, synthetic construct
  source 1..75: mol_type = other DNA
aaccctttgaattaccctttgatccgtgcacaacggcactgatcatgatagacatgcaacgtgattttgtcgaag

SEQ ID NO: 46913 - DNA, 75 bp, synthetic construct
  source 1..75: mol_type = other DNA
atcgcaggggtcaatgtatccctttaacggctgggtgagcaatgagtccagccccctgcagtcttccgttctggt

SEQ ID NO: 46914 - DNA, 75 bp, synthetic construct
  source 1..75: mol_type = other DNA
atactggctgagtattatcacctcagcaggatgtctgatgggcggcgatatggatatcgggtacatctcagaaat

SEQ ID NO: 46915 - DNA, 75 bp, synthetic construct
  source 1..75: mol_type = other DNA
cttccacgcgctgatctcttccggtacgacgccgaaactgctggctaacgaaaccgacgcgcgtttcatcggcta

SEQ ID NO: 46916 - DNA, 75 bp, synthetic construct
  source 1..75: mol_type = other DNA
ccagagccagagccagagccagagccagagccagagccagaagaaaaacagcgtaaaaagcctggtcgaaaacct

SEQ ID NO: 46917 - DNA, 75 bp, synthetic construct
  source 1..75: mol_type = other DNA
gtgagcggcggcggtcacggcattgatatcactggtgatagcgccactgtaatcaacaaaggcaatataactgtc

SEQ ID NO: 46918 - DNA, 75 bp, synthetic construct
  source 1..75: mol_type = other DNA
cacaatatgcgcagcctgcagtgcaatataatgagccgctgcaacaacctgtacagccacagcagccgtattatg

SEQ ID NO: 46919 - DNA, 75 bp, synthetic construct
  source 1..75: mol_type = other DNA
cagcgatatcttaccgtcctgggcgcagcgtttaccgctggccgaacaaggtctggcgtggttaatgccaacagt

SEQ ID NO: 46920 - DNA, 75 bp, synthetic construct
  source 1..75: mol_type = other DNA
ttcgcagggcagtatgtatccgtttaatggctgggtgagcaatgaatccagtccgttgcagtcatccctgctggt

SEQ ID NO: 46921 - DNA, 75 bp, synthetic construct
  source 1..75: mol_type = other DNA
cccaaagaacgctggcgttaccagatggtgaacatgtacccggacagcgggcagtgccatccgttcgggcgcagt

SEQ ID NO: 46922 - DNA, 75 bp, synthetic construct
  source 1..75: mol_type = other DNA
ccttcgcgctgattggctatgcgtttgtttccgcactgctgccggtgtggctgatcctcgcaccgcgcgactatc

SEQ ID NO: 46923 - DNA, 75 bp, synthetic construct
  source 1..75: mol_type = other DNA
gacagcagccaaaaaatcagaaaccaacgcgaaaaacagcgagacagccgcaaagacgagcgaaaccaacgcaaa

SEQ ID NO: 46924 - DNA, 75 bp, synthetic construct
  source 1..75: mol_type = other DNA
gagatgatcaaagaagagatgggaccagtaccggggactatcgcgctgtttggctgtttcttaatcatgatcatc

SEQ ID NO: 46925 - DNA, 75 bp, synthetic construct
  source 1..75: mol_type = other DNA
acggattggtcgcgatatcagccttgacgcgctggaacgggaagtgatgaaagatgacattttctttcgcacgtc

SEQ ID NO: 46926 - DNA, 75 bp, synthetic construct
  source 1..75: mol_type = other DNA
gcggtcaaggctgcatacgaccttgcagccggcaaggcgcctgccagccacactcacccgtggagtcagataacg

SEQ ID NO: 46927 - DNA, 75 bp, synthetic construct
  source 1..75: mol_type = other DNA
tcgcagacaaggcgatttgggtagaaacccgcaaacagcagcaaccgctggccagttttcagaatgaggttcagc

SEQ ID NO: 46928 - DNA, 75 bp, synthetic construct
  source 1..75: mol_type = other DNA
tcctgtcgataatgagccaatcagaactagggcgtcgtcttggtaaaacaccacaaactataagtggatggttta

SEQ ID NO: 46929 - DNA, 75 bp, synthetic construct
  source 1..75: mol_type = other DNA
gcagaccgcgtgagcagtgaaagccgggcgtggcttgcgcagtgcgggctgacggtggagcaactggccagacag

SEQ ID NO: 46930 - DNA, 75 bp, synthetic construct
  source 1..75: mol_type = other DNA
accgaaagcggtcaaggctgcatacgacctggcagccggcaaggcgcctgccagccacactcacccgtggagtca

SEQ ID NO: 46931 - DNA, 75 bp, synthetic construct
  source 1..75: mol_type = other DNA
gcattcagatcgacggcgacaaggcggtcgtgaacaacgacggtgacaatgccatcagcaacggcggcaccggca

SEQ ID NO: 46932 - DNA, 75 bp, synthetic construct
  source 1..75: mol_type = other DNA
gtcaaccgggatacctggtgtcgtgccggcgattaccgcgctccggggtcactggccgggatgattaaacaggcc

SEQ ID NO: 46933 - DNA, 75 bp, synthetic construct
  source 1..75: mol_type = other DNA
ttcagcaggtgctggcgcgtgctgactatctggcgaaggagagtaccaaagcttacggcaccggtgagcgtaatt

SEQ ID NO: 46934 - DNA, 75 bp, synthetic construct
  source 1..75: mol_type = other DNA
aagcgaagcagggcgattacctggtgggtacggatgaaaacgtgctggtacttaatcgcacttatgccaaccgga

SEQ ID NO: 46935 - DNA, 75 bp, synthetic construct
  source 1..75: mol_type = other DNA
atgatatctctccctgccggttcgcgtatctggctggttgccggtatcaccgacatgcgaaatggttttaacggc

SEQ ID NO: 46936 - DNA, 75 bp, synthetic construct
  source 1..75: mol_type = other DNA
aatggtgcggcttcgttctgggggggaggtggtcgttctggtgctgctaatggtattgcagccaaagcatatggt

SEQ ID NO: 46937 - DNA, 75 bp, synthetic construct
  source 1..75: mol_type = other DNA
tttgcaggaaaggaatatgagttaaagagcattgatgaaaaaacacctattctttttcagtggtttgaacttaat

SEQ ID NO: 46938 - DNA, 75 bp, synthetic construct
  source 1..75: mol_type = other DNA
ctgattaaccagaaacgcatcgcgccgctgaatcttctgagtgttgaccctaacaatcagagccagattattgcg

SEQ ID NO: 46939 - DNA, 75 bp, synthetic construct
  source 1..75: mol_type = other DNA
aatcttggctcaatgttcaactgctacagaacagtatggatgcgcctaaattgattggttcatatccatgcaaaa

SEQ ID NO: 46940 - DNA, 75 bp, synthetic construct
  source 1..75: mol_type = other DNA
taacggtcagatgcaacccagcaactggggaaattttgattcccgctatgtgaaagatgttcgcctgggtacgcg

SEQ ID NO: 46941 - DNA, 75 bp, synthetic construct
  source 1..75: mol_type = other DNA
tcaggcggcgctaattcggatatcacgatccgcacattcgaagcggtgcgtaaatcgaaggaagcgttagacctg

SEQ ID NO: 46942 - DNA, 75 bp, synthetic construct
  source 1..75: mol_type = other DNA
ggaaagaaaggtgacgaatcaaatgccaaatgggatatgggtataatgccttcccgtgatggaaataattacgga

SEQ ID NO: 46943 - DNA, 75 bp, synthetic construct
  source 1..75: mol_type = other DNA
tgcgtctcccggatgtaccggcagcaacggacgcggctgtgatatcccgcttcatcaatgccctgaaagcccgaa

SEQ ID NO: 46944 - DNA, 75 bp, synthetic construct
  source 1..75: mol_type = other DNA
taaccgactctttgtcacctccaattttcatcttgatccctcatcaatgcagctcggcagcaacgtgccgtttcc

SEQ ID NO: 46945 - DNA, 75 bp, synthetic construct
  source 1..75: mol_type = other DNA
atgtgtaacggccgaagtgcctataaacatgggtattcttatccggaaagtacaaaaaactttatcaaagataaa

SEQ ID NO: 46946 - DNA, 75 bp, synthetic construct
  source 1..75: mol_type = other DNA
cggaatatgacccgcttatcgggtgctacattccgaccgatatcacgttcacaccggcgctgtttgccgctctcg

SEQ ID NO: 46947 - DNA, 75 bp, synthetic construct
  source 1..75: mol_type = other DNA
cacggtattgatatctccagtcgggaagtgctcaaccactacactcccgaatatcaacaactgtttcgccgtggc

SEQ ID NO: 46948 - DNA, 75 bp, synthetic construct
  source 1..75: mol_type = other DNA
gccattgatgctacaaaaattaaaaatgaactgaactgggtaccggatgagacatttgaaacgggtctacgtaaa

SEQ ID NO: 46949 - DNA, 75 bp, synthetic construct
  source 1..75: mol_type = other DNA
cgctttgatggcgtgttttctccggaaggacgaattgttctgcgtcatctcaaacagcaggagcgggcgtactga

SEQ ID NO: 46950 - DNA, 75 bp, synthetic construct
  source 1..75: mol_type = other DNA
tgaatctggagtccggagctaaacaggttttacaagaaacctttggctaccaacagtttcgccccggccaggaag

SEQ ID NO: 46951 - DNA, 75 bp, synthetic construct
  source 1..75: mol_type = other DNA
gtttacgacagcttatacaccgccattgaaaacaatgtgccggtgaatttaagccaactggtaaagggacaaagc

SEQ ID NO: 46952 - DNA, 75 bp, synthetic construct
  source 1..75: mol_type = other DNA
taaaaccagcactcagggagttcttgattaccttggtttgggggaaggctctgcactgcccgttggtgtgcccgt

SEQ ID NO: 46953 - DNA, 75 bp, synthetic construct
  source 1..75: mol_type = other DNA
catcgatttcgccgcaggcattgcggtgctgaataccgggcatcgccaccctgatctggtcgcggcggtggagca

SEQ ID NO: 46954 - DNA, 75 bp, synthetic construct
  source 1..75: mol_type = other DNA
atgcaggacatacagcaggaaacactgaatgaatgcatccgtgcggagcagtcggcctgcctggtgctctgggaa

SEQ ID NO: 46955 - DNA, 75 bp, synthetic construct
  source 1..75: mol_type = other DNA
tttcgcgtcactgatgatgacacacgtcggtggttgtctgattttctgtcgtggcacggaggataccgggcgttt

SEQ ID NO: 46956 - DNA, 75 bp, synthetic construct
  source 1..75: mol_type = other DNA
ggaccctgcgggtcgtgtgccgtgaatggagtattacggatcatgctgtatacagcgattttaactgctctctgg

SEQ ID NO: 46957 - DNA, 75 bp, synthetic construct
  source 1..75: mol_type = other DNA
gactcaactcagcaacacgctagccgatgagcctcttgcatatgtcgggcagggataccatcgctttcgtcgtta

SEQ ID NO: 46958 - DNA, 75 bp, synthetic construct
  source 1..75: mol_type = other DNA
ttaccgctggcagcaggcttcggagcgcatggccgaacggctgggggagatacagaaacgggtaatcactgtctg

SEQ ID NO: 46959 - DNA, 75 bp, synthetic construct
  source 1..75: mol_type = other DNA
gcctcattacagggagaagaacatatccgcagcgtgcatctgctgggtgccctgacggaaaatccgcacctggtt

SEQ ID NO: 46960 - DNA, 75 bp, synthetic construct
  source 1..75: mol_type = other DNA
gcggccaggcgctcccgctcacgtatgtctgttgccgggagcagtcagaggacggtgcctgctggcatctgctga

SEQ ID NO: 46961 - DNA, 75 bp, synthetic construct
  source 1..75: mol_type = other DNA
cgtccggtgctgcgcggcgaatcctctttgcaacttgccgtgccgcgtatcgtggcgctcaaaccgaaagcgatg

SEQ ID NO: 46962 - DNA, 75 bp, synthetic construct
  source 1..75: mol_type = other DNA
ataccggacgacggtccggatgatactcctgcacctcccaaaccgattgcgtttaataatgacgttaccctggat

SEQ ID NO: 46963 - DNA, 75 bp, synthetic construct
  source 1..75: mol_type = other DNA
ggtggagttactcccccagccccgtccggggcatcttaattacctgatccacgcgcagcttcccgataccggctg

SEQ ID NO: 46964 - DNA, 75 bp, synthetic construct
  source 1..75: mol_type = other DNA
tcagcgcctataccgatgctaactacctcggtggtggtgacgtagatcaagactggtccgcgaacgtgggtgtta

SEQ ID NO: 46965 - DNA, 75 bp, synthetic construct
  source 1..75: mol_type = other DNA
gaatatgcgaatatggtcgaagatatcagggagaaggtgtcatctgagatggaaagatttttcccaaaaaatgat

SEQ ID NO: 46966 - DNA, 75 bp, synthetic construct
  source 1..75: mol_type = other DNA
cggaagccagtggctggtcgttgaagtttttggtgagaaggggcgtcagcaccgcagcgcggacagtaacccgga

SEQ ID NO: 46967 - DNA, 75 bp, synthetic construct
  source 1..75: mol_type = other DNA
atatcatcgctctgggctttatgacatttgcgttgttcgtcggcgcaggtaacattattttccctccaatggtcg

SEQ ID NO: 46968 - DNA, 75 bp, synthetic construct
  source 1..75: mol_type = other DNA
ttttgggtattgagtctctaagtccccatgtctccgggaatccaaagtttgaatatgccaatatggttgaagata

SEQ ID NO: 46969 - DNA, 75 bp, synthetic construct
  source 1..75: mol_type = other DNA
agtaaatccttattaaaagaaaatgcagctacttgtacaactattgatgagtatgaagttgctaatttggaatta

SEQ ID NO: 46970 - DNA, 75 bp, synthetic construct
  source 1..75: mol_type = other DNA
gccgtggccaatgctcacatggacgtcgcaacccacacaatgatagtcgcaaaagtcacggcagaggctgccaaa

SEQ ID NO: 46971 - DNA, 75 bp, synthetic construct
  source 1..75: mol_type = other DNA
gaccggcgggaccgtcggtagcttgtcatcctaccagaatggtgaaatgattagcaccagttcaggtctggtttt

SEQ ID NO: 46972 - DNA, 75 bp, synthetic construct
  source 1..75: mol_type = other DNA
atgaacatgcgtaatattaatgttattactgcccgcgctgtgccggataaaaacgtatcagatgattttatgcat

SEQ ID NO: 46973 - DNA, 75 bp, synthetic construct
  source 1..75: mol_type = other DNA
ttgtcattttttttaattaccctttgtttatttgttgtttaccttgggtttgataacaattcaaattctgacatc

SEQ ID NO: 46974 - DNA, 75 bp, synthetic construct
  source 1..75: mol_type = other DNA
caatgatattctttatagcgtgcgattaaaaaacattagtaaactggagaatatggagttctgcgctaaaaaaca

SEQ ID NO: 46975 - DNA, 75 bp, synthetic construct
  source 1..75: mol_type = other DNA
ttactgcccgctctgtgccggataaacgcatatcagatgattttatgcatgctgttctcagtaactgcaccacaa

SEQ ID NO: 46976 - DNA, 75 bp, synthetic construct
  source 1..75: mol_type = other DNA
taataaaaaggaaaatgccgcactcaatgatgttcaggttgaagttaattacgcaattaaacttgatgatcaatg

SEQ ID NO: 46977 - DNA, 75 bp, synthetic construct
  source 1..75: mol_type = other DNA
actctcaaatggtgttaccgtgcatacgcacgttcataacggtgttcagtccggcggaagcatgacaggggggcc

SEQ ID NO: 46978 - DNA, 75 bp, synthetic construct
  source 1..75: mol_type = other DNA
atggctaaggtgaacctgtatatcagcaatgatgcttatgaaaaaataaatgcgattattgagaagcgtcgacag

SEQ ID NO: 46979 - DNA, 75 bp, synthetic construct
  source 1..75: mol_type = other DNA
tgcaatcacaacaggcattctctccggtatctggggatgggtggctgtttccctgggcttactaagctgggcggg

SEQ ID NO: 46980 - DNA, 75 bp, synthetic construct
  source 1..75: mol_type = other DNA
aatcatggttaacgaaacttgagcgcataggtgagaaatcagcctgtgacaggtcgatcgtgttcagcaatcttg

SEQ ID NO: 46981 - DNA, 75 bp, synthetic construct
  source 1..75: mol_type = other DNA
attccttacaacaacccttcttctggactggtgaattctcatggggttggctgaacaatgtatccctgtatggtg

SEQ ID NO: 46982 - DNA, 75 bp, synthetic construct
  source 1..75: mol_type = other DNA
ataaggtggcaattttaattggcctgacgctgtatattggtggttgtacactttttttccctgcctcgcatatgg

SEQ ID NO: 46983 - DNA, 75 bp, synthetic construct
  source 1..75: mol_type = other DNA
taaataacaaccttagcctgtgggggaatgtcggtgtgcaactaggtgataaaggctatagcgatactcagggca

SEQ ID NO: 46984 - DNA, 75 bp, synthetic construct
  source 1..75: mol_type = other DNA
ccggtttataccttaggcggaaccattattttgcagctcgcgctgtttaatatcctgctgccgtttgtgattgtc

SEQ ID NO: 46985 - DNA, 75 bp, synthetic construct
  source 1..75: mol_type = other DNA
ctgccagtggcctaatggcgattaccatcactctgaaacagtcattcaccgttatggtaccggcgcaatggtgtt

SEQ ID NO: 46986 - DNA, 75 bp, synthetic construct
  source 1..75: mol_type = other DNA
ggcttctctgtcgccgttgtgcgaaataatatttgggggtgtccggatattcctgctgaaacgccgtatgcgccg

SEQ ID NO: 46987 - DNA, 75 bp, synthetic construct
  source 1..75: mol_type = other DNA
acaccacgacccgcaaaccctctgcgggagatgttggtgcatacacgcaggcagaatgtaactcaaggtttatta

SEQ ID NO: 46988 - DNA, 75 bp, synthetic construct
  source 1..75: mol_type = other DNA
gtcaggccaatcagatcatgtctggcaccatgaaatactgctgtgcctacattgtgatccttggcctgaaagtcg

SEQ ID NO: 46989 - DNA, 75 bp, synthetic construct
  source 1..75: mol_type = other DNA
atgcctttttctgtagagataaaagaatttcaacttttcaggcatacacacatagatgaaacttcatttatgatt

SEQ ID NO: 46990 - DNA, 75 bp, synthetic construct
  source 1..75: mol_type = other DNA
atcgaatatctcggtttacaggaaacggtaaaccgagccgggaacgccgtgcaaaaaaatggcgataccttgtcc

SEQ ID NO: 46991 - DNA, 75 bp, synthetic construct
  source 1..75: mol_type = other DNA
tggcagtgctaccagcaccactattaatggtggcttccagctcatttccagcggtggcagtgctgttgacaccac

SEQ ID NO: 46992 - DNA, 75 bp, synthetic construct
  source 1..75: mol_type = other DNA
ggcaacattacctgttgccattgattacccggctgcgctggcactccgccagatgtcgatggttcatgatgaact

SEQ ID NO: 46993 - DNA, 75 bp, synthetic construct
  source 1..75: mol_type = other DNA
ataggggcgctgtttctggcatatgttgcactggctccaagtttcagcgcggtctatgtcgccgtcctggtaagt

SEQ ID NO: 46994 - DNA, 75 bp, synthetic construct
  source 1..75: mol_type = other DNA
acgcgacaaaaagcatggatgttctgagaaatgttctggctagcgtgagcgatgataaacgtatccaggtgcttc

SEQ ID NO: 46995 - DNA, 75 bp, synthetic construct
  source 1..75: mol_type = other DNA
atgatctttacttccgtatttggatttgccaatagcccatcggcttattacttaatgggttatagtgcgattccc

SEQ ID NO: 46996 - DNA, 75 bp, synthetic construct
  source 1..75: mol_type = other DNA
ggggatgcggacgatttcctggactgctttattatgccagcccacattgttggcggtacatttcagggctgactg

SEQ ID NO: 46997 - DNA, 75 bp, synthetic construct
  source 1..75: mol_type = other DNA
aatttctgctggcggcagaacaaggtaattccgatggattaaaatcatgccttgataaaaaggttgatattaatg

SEQ ID NO: 46998 - DNA, 75 bp, synthetic construct
  source 1..75: mol_type = other DNA
gcggcctgttcttaacagaccacaaatataatctggatgtgtacagttatatttacgctgaacacggtccgctct

SEQ ID NO: 46999 - DNA, 75 bp, synthetic construct
  source 1..75: mol_type = other DNA
ggcgcagaataatctcaccatcgacagcgctgacagtctgggtaaccttgagtccgggcttataaatgccggtgg

SEQ ID NO: 47000 - DNA, 75 bp, synthetic construct
  source 1..75: mol_type = other DNA
aacagtaacatatttgcccgttgatgcagggagacgtgatggaacaaaactgccgactggtgctgttcaaggccg

SEQ ID NO: 47001 - DNA, 75 bp, synthetic construct
  source 1..75: mol_type = other DNA
ggtcgtgtgcagggcgacagcgggctgactcttacattgctgaatgccctgaccaaccagaccagcggtgtgctt

SEQ ID NO: 47002 - DNA, 75 bp, synthetic construct
  source 1..75: mol_type = other DNA
acggtgatggtgccggaagtgtatctgtcaccgaaagatgtgacactgcagaacggcagtattatcagcggtcag

SEQ ID NO: 47003 - DNA, 75 bp, synthetic construct
  source 1..75: mol_type = other DNA
cctccactgaaagtggtgtcggggttaatcttggtaacctttatgcccgcgagggcgatatcatactgaacagtg

SEQ ID NO: 47004 - DNA, 75 bp, synthetic construct
  source 1..75: mol_type = other DNA
accgtcctgacgccgcacaaccgccacgccggcacgggctgctgtataacctgctgtgggggtggccgtgggcac

SEQ ID NO: 47005 - DNA, 75 bp, synthetic construct
  source 1..75: mol_type = other DNA
acagcggcggcagcatcaacgcacagaatgacctcctgctcgacagcacaggtagtatcgacaacctgaatgccg

SEQ ID NO: 47006 - DNA, 75 bp, synthetic construct
  source 1..75: mol_type = other DNA
agttcatgctgaactcagcagggatattattgcaggcacatcggcagcggtgacgtatacagatgtaacagcgct

SEQ ID NO: 47007 - DNA, 75 bp, synthetic construct
  source 1..75: mol_type = other DNA
agtatgtccggaaatggctatagggctgccagttccgcgtcctgctctacgtcttgtgcgctcgacgcaaggaaa

SEQ ID NO: 47008 - DNA, 75 bp, synthetic construct
  source 1..75: mol_type = other DNA
gccacgatacgtacgatgctgacagatatatttaacagtaattaccagtgttatggctatcgtcgcctgcatgcg

SEQ ID NO: 47009 - DNA, 75 bp, synthetic construct
  source 1..75: mol_type = other DNA
atgccagcttctctggcatcttatgctgcgcaagataaacaggctcgtgaggagtggatatctgtactggaagca

SEQ ID NO: 47010 - DNA, 75 bp, synthetic construct
  source 1..75: mol_type = other DNA
cgtcaggggattgaacctgctcaggcgggaatgcttgcccgtaaggttgcagccgcacaggccgggtacatgggc

SEQ ID NO: 47011 - DNA, 75 bp, synthetic construct
  source 1..75: mol_type = other DNA
cgtaaagatggagtgggactatttacgagcactttgatggaaaagttttcctggctaccggttgaagaggatggg

SEQ ID NO: 47012 - DNA, 75 bp, synthetic construct
  source 1..75: mol_type = other DNA
tgacggcctgttgcagggcgccggtgcactggcgcttgctggcgacaccctctcacagggtagtaacgggcgctg

SEQ ID NO: 47013 - DNA, 75 bp, synthetic construct
  source 1..75: mol_type = other DNA
atcctctttaacctgctctggtggtggtatctcggcggtgcggtggaaaaacgcctcggtagcggtaagctaatt

SEQ ID NO: 47014 - DNA, 75 bp, synthetic construct
  source 1..75: mol_type = other DNA
tgacgtatgagatgccgatgcttggaagaaacggtgaagtcgcctggaaaacggcatcagaatacgattcaaacg

SEQ ID NO: 47015 - DNA, 75 bp, synthetic construct
  source 1..75: mol_type = other DNA
accgttaacacacagaggcttgataatcagcagaacggcacgctgtacagtgctgcagacctgacgctggatata

SEQ ID NO: 47016 - DNA, 75 bp, synthetic construct
  source 1..75: mol_type = other DNA
gatcgtcaactggaaggtattaccgggcgcgatgtgatcgttctaccggagatgtttaccagcggctttgccatg

SEQ ID NO: 47017 - DNA, 75 bp, synthetic construct
  source 1..75: mol_type = other DNA
caaagccagatggacccggtatacacgccggcgcgaaaaatccacctgtaccactgcgaccatcgcggcctgccg

SEQ ID NO: 47018 - DNA, 75 bp, synthetic construct
  source 1..75: mol_type = other DNA
caaactcccgtacttcactggtcctaaaaacgcggccctgacagacctgacggctttcgccagaacgttgcttgg

SEQ ID NO: 47019 - DNA, 75 bp, synthetic construct
  source 1..75: mol_type = other DNA
gggtaaactcccggtaccaagcgcagagatcatgaggctggcgcaggagctgcgggactttgatgaagccagacg

SEQ ID NO: 47020 - DNA, 75 bp, synthetic construct
  source 1..75: mol_type = other DNA
agttaccggacaaaaacgcccgcgccggtggggagcctcggccccggctggaaaatgcctgcggatatccgctta

SEQ ID NO: 47021 - DNA, 75 bp, synthetic construct
  source 1..75: mol_type = other DNA
aacaaccttagcctgtgggggaatgtcggtgtgcaactaggtgataaaggctatagcgatactcagggcatgctg

SEQ ID NO: 47022 - DNA, 75 bp, synthetic construct
  source 1..75: mol_type = other DNA
gcaatagaataaaaaatagtgacggatttagttactgttatgaaaaactattgatatctatttcaaagaatctat

SEQ ID NO: 47023 - DNA, 75 bp, synthetic construct
  source 1..75: mol_type = other DNA
ggtcgttatgaaaaagccggacacacgattaccggattaagaatcattggtgaagtagatggcgatgatgaagcc

SEQ ID NO: 47024 - DNA, 75 bp, synthetic construct
  source 1..75: mol_type = other DNA
ccgttctacttcctcttcaccgacaaggatggcgaaaaatacggtcgcgcaaacaaactttctggtctggataag

SEQ ID NO: 47025 - DNA, 75 bp, synthetic construct
  source 1..75: mol_type = other DNA
tcagattactaaacttctggccagcattcagaacaaggcggtcagtgacacgcctctggatgacaaggaaaaagg

SEQ ID NO: 47026 - DNA, 75 bp, synthetic construct
  source 1..75: mol_type = other DNA
tgatgatcattacgttatggttaggtgcccatcttgtcattgaggggcagctgaccattggtcagctaattgcct

SEQ ID NO: 47027 - DNA, 75 bp, synthetic construct
  source 1..75: mol_type = other DNA
actgccggaaccgccgcagtttgtggaaacgcagacagtccaggagctgcgcgcactgtttcaggcggttcgtct

SEQ ID NO: 47028 - DNA, 75 bp, synthetic construct
  source 1..75: mol_type = other DNA
gcgctgacagaaaaacatattaatgcggcctttaaagaggtttataccaaccctgaattactctcacaggtgtga

SEQ ID NO: 47029 - DNA, 75 bp, synthetic construct
  source 1..75: mol_type = other DNA
gaaataaaacgacttaccacaataggtggcaaagttgtttcccctgatacaattcatgtaacagcgaaggatgat

SEQ ID NO: 47030 - DNA, 75 bp, synthetic construct
  source 1..75: mol_type = other DNA
acgaccctgcattacgcctgggcccgggaattcggtgtgctcaggggtaaaaaacactatcacctgctgctgctg

SEQ ID NO: 47031 - DNA, 75 bp, synthetic construct
  source 1..75: mol_type = other DNA
ccaggcgatcgtgccagcgtggcgtggttctacgaaggatgcggtcattgcgaatactgtaacagtggtaacgaa

SEQ ID NO: 47032 - DNA, 75 bp, synthetic construct
  source 1..75: mol_type = other DNA
gatgatgcccgttaccaggcaaaatacgtttcagctatctggcaaaaactgatcccgaatcaggctgatttttaa

SEQ ID NO: 47033 - DNA, 75 bp, synthetic construct
  source 1..75: mol_type = other DNA
accaccctgcattacgtctgggcccgggagtttggggagtgcaaaggtaaaaaacactatcacctgatgctgctg

SEQ ID NO: 47034 - DNA, 75 bp, synthetic construct
  source 1..75: mol_type = other DNA
ggttgcagggaggggagcagacttaccggtatgtgccgaatcctttaagatggatagatcccttaggattaaata

SEQ ID NO: 47035 - DNA, 75 bp, synthetic construct
  source 1..75: mol_type = other DNA
gtatctggaggaggcaagcacaatattttatcctatgtctgaacgatgccagtttgaacaggatgcccgtgaact

SEQ ID NO: 47036 - DNA, 75 bp, synthetic construct
  source 1..75: mol_type = other DNA
cgcgtcggtgttgaccctaacagcgttgctcagatgtatcagcagaatccttcaggatttggtgagtttgttgat

SEQ ID NO: 47037 - DNA, 75 bp, synthetic construct
  source 1..75: mol_type = other DNA
tcgtactttatttctgtctttaaagacttctacggtatgacgccgctgcattatgttagtcagcacagagaacgc

SEQ ID NO: 47038 - DNA, 75 bp, synthetic construct
  source 1..75: mol_type = other DNA
gaaggccatggcggataacggaaaactgaccgccgataaggttgttcctgcactgattagtcagcttggggcatt

SEQ ID NO: 47039 - DNA, 75 bp, synthetic construct
  source 1..75: mol_type = other DNA
tgccaatgaaatttcgtcaggagcgagtaatgtaggagtggttatattttctatccaggatccagcgaatacatt

SEQ ID NO: 47040 - DNA, 75 bp, synthetic construct
  source 1..75: mol_type = other DNA
gcctcaaatttgctgtaaaagtaaaaaatgaagtttggcagtattcaataccaggtattgttgaaaataacatta

SEQ ID NO: 47041 - DNA, 75 bp, synthetic construct
  source 1..75: mol_type = other DNA
ctttctttactttcaatcaatcagctaatgaccagttcacgcaggatatgctcttaagttcaagctatccagagg

SEQ ID NO: 47042 - DNA, 75 bp, synthetic construct
  source 1..75: mol_type = other DNA
aatattatcaaatgtatttccctcagcctggcgactccacaaaaaccattgataccaagcgccggaagatggaaa

SEQ ID NO: 47043 - DNA, 75 bp, synthetic construct
  source 1..75: mol_type = other DNA
aacgccaactgcgccaaaagggactaataatacccagatcgcaagcacggcttatgtgatggccgcgattgccgc

SEQ ID NO: 47044 - DNA, 75 bp, synthetic construct
  source 1..75: mol_type = other DNA
gggcgcaccgccggatacggtatccattcgcggcgtggcgacgtcggtcaacagcgctctgcgtaccgcctccag

SEQ ID NO: 47045 - DNA, 75 bp, synthetic construct
  source 1..75: mol_type = other DNA
acaaaaactgaagttgataataagctgaaaaacaaagtggaagcgaacgatctggaaagcggtcgttatggcggt

SEQ ID NO: 47046 - DNA, 75 bp, synthetic construct
  source 1..75: mol_type = other DNA
tcatcagagttgaaaccgccaccggtgagctggcgaaaacgcagcgccgcagcctggcggatgcgcttcagcagt

SEQ ID NO: 47047 - DNA, 75 bp, synthetic construct
  source 1..75: mol_type = other DNA
aatggggctgaacgccttctttgcgttcgtggtcgtgggggcgatgggtatctcctggcagaccgggatgggcgc

SEQ ID NO: 47048 - DNA, 75 bp, synthetic construct
  source 1..75: mol_type = other DNA
taattcatcctttggtgctatttttcgccgttctgaagaatgcctgcatattatccccacacgagagaatgaggg

SEQ ID NO: 47049 - DNA, 75 bp, synthetic construct
  source 1..75: mol_type = other DNA
gtccgctggccccgtttgctgtctcccaaacccagggatacgattctgattctggccttaaccgggccacgctgg

SEQ ID NO: 47050 - DNA, 75 bp, synthetic construct
  source 1..75: mol_type = other DNA
gcgttcagtgagtggctggcggcgggtaatgacgttcgcggcctgtatgagcatgaccacagcatgttactgggg

SEQ ID NO: 47051 - DNA, 75 bp, synthetic construct
  source 1..75: mol_type = other DNA
cccctgaatattgtcattaagttggtagagtgtaacggtaaaccggtggcgaaactttctgacagccctggcaaa

SEQ ID NO: 47052 - DNA, 75 bp, synthetic construct
  source 1..75: mol_type = other DNA
cgaattagcggaaacagagcaatcacagcagcgcatagcgtgaatatgagcaagcttcgtgactttaatcctcta

SEQ ID NO: 47053 - DNA, 75 bp, synthetic construct
  source 1..75: mol_type = other DNA
ccacttccaccaactccacctgatgatgattcagacgacactccagttcctccaactcctggcggagatgagata

SEQ ID NO: 47054 - DNA, 75 bp, synthetic construct
  source 1..75: mol_type = other DNA
tgaatatgcgcgcctgctggacgttccttttgtttttgccaccaacggggatggctttatcttccgcgatgccac

SEQ ID NO: 47055 - DNA, 75 bp, synthetic construct
  source 1..75: mol_type = other DNA
gtttcgtcagatgagtttgtgcatattaatatttctggcattggtgaataaagttagtgaaaacacaaaacagcg

SEQ ID NO: 47056 - DNA, 75 bp, synthetic construct
  source 1..75: mol_type = other DNA
ggtaaaaatatcagcctgaacttcaatatgagcaacggcgataacctcaacctgacgctgaacgatagcgtgctt

SEQ ID NO: 47057 - DNA, 75 bp, synthetic construct
  source 1..75: mol_type = other DNA
agccggtggtgctgagcggcgacagccggctggtggagctgggcatcaccgaacgcttgcagcaggaatgcaacg

SEQ ID NO: 47058 - DNA, 75 bp, synthetic construct
  source 1..75: mol_type = other DNA
cgtggcggaagcaatttttgcgaactgcgcggaactggataacgaccagcttaacgagatcatcgagtgggttcg

SEQ ID NO: 47059 - DNA, 75 bp, synthetic construct
  source 1..75: mol_type = other DNA
cgatgtcactgcgaatgacagcacaactggcctgtgatgcactgcaaatggcgttgtggcggagaagacgcccgg

SEQ ID NO: 47060 - DNA, 75 bp, synthetic construct
  source 1..75: mol_type = other DNA
caggcgaaagtcggcgtggtgtatgccgaatatggcctgacggagtccggcggcgtggtgctgttttccgcaccg

SEQ ID NO: 47061 - DNA, 75 bp, synthetic construct
  source 1..75: mol_type = other DNA
tggtctgttaggtgctctgctcagtccgataggtcttgtggttactgcactggcgggcgtggcgctggttgtctg

SEQ ID NO: 47062 - DNA, 75 bp, synthetic construct
  source 1..75: mol_type = other DNA
atgatcactcactatgatataaaaatggagacacagaaactaaaggatgtactctctgtagagggggttaatatc

SEQ ID NO: 47063 - DNA, 75 bp, synthetic construct
  source 1..75: mol_type = other DNA
tatctatgcccatatcgacaaggacgggcgctaccgggtcaacctcgactttgaccgcgatacgtggaaaccggg

SEQ ID NO: 47064 - DNA, 75 bp, synthetic construct
  source 1..75: mol_type = other DNA
cgtccgacactgacggtctctaacctgcacggcatggtcaccgggatggcggaagacctgcagagtctggtcggc

SEQ ID NO: 47065 - DNA, 75 bp, synthetic construct
  source 1..75: mol_type = other DNA
atgacactatcagctattgagttaatggacctcagcgacaagttggattctctgatgtccaaagctgctaccgcg

SEQ ID NO: 47066 - DNA, 75 bp, synthetic construct
  source 1..75: mol_type = other DNA
gtcaggcgctgagcgtgtttgtgcgtaaagcgggcatcaaactgtttgccaacaagggggcgatctcggtacagg

SEQ ID NO: 47067 - DNA, 75 bp, synthetic construct
  source 1..75: mol_type = other DNA
acgggcaatatagccgataatgcgttgaatcattggctacatcgtatacgtaaaacagacatcattgttctgtct

SEQ ID NO: 47068 - DNA, 75 bp, synthetic construct
  source 1..75: mol_type = other DNA
tccccgtccgacgcggccgcaaaggtggctgccgtgaccggcagcctgcccccggctgacccggcagtgacggcc

SEQ ID NO: 47069 - DNA, 75 bp, synthetic construct
  source 1..75: mol_type = other DNA
acggcctgcacctgccgctgctggcgggaacggaggtcagcatcgcctttgaggaaggcaacccggacaggccgt

SEQ ID NO: 47070 - DNA, 75 bp, synthetic construct
  source 1..75: mol_type = other DNA
gacgacaaacaggcccaacaaggtggccagcagatgcccgccgttggcgtagtaacagtcaaaactgaacctctg

SEQ ID NO: 47071 - DNA, 75 bp, synthetic construct
  source 1..75: mol_type = other DNA
taaagcgggggcgagagtgacattgtattttaagccaaatcaggaaggaggccgtagtggcgataattcatctgc

SEQ ID NO: 47072 - DNA, 75 bp, synthetic construct
  source 1..75: mol_type = other DNA
gtgatgccgttcccgggaatggattgccagtgcggggactgtggagcttaattccggtgttggtggcctttccgt

SEQ ID NO: 47073 - DNA, 75 bp, synthetic construct
  source 1..75: mol_type = other DNA
agcccccactgcggcacagtcggttaacaatacacagattgccaccacggcatttgtgaaatcggcgattgcggc

SEQ ID NO: 47074 - DNA, 75 bp, synthetic construct
  source 1..75: mol_type = other DNA
ctgatttcagtctgcttgtcccccggcatgaggaagagcaggtggagaggccggatgaggacaaaatgctgatgc

SEQ ID NO: 47075 - DNA, 75 bp, synthetic construct
  source 1..75: mol_type = other DNA
acccgcaatattgaacagctcggtgatgcgctgaactatctggatgataacgccatgtcgaaaggggcagacatc

SEQ ID NO: 47076 - DNA, 75 bp, synthetic construct
  source 1..75: mol_type = other DNA
gttttactgggaaaaaccaccctgaccacaccggcaggacgtgaggggctttcaccccgggtcagttacggaaaa

SEQ ID NO: 47077 - DNA, 75 bp, synthetic construct
  source 1..75: mol_type = other DNA
tcatcagcgcggctacggttcgaagtgggacgttatccgcgcgcgtgtgctgaaacgtgacaaaggtttatgtca

SEQ ID NO: 47078 - DNA, 75 bp, synthetic construct
  source 1..75: mol_type = other DNA
gttgtgcctgcgtgtcggtgtggtgcgtgaggcgaaaaccgttgaccacatcatccctaaagcgcatggcggcac

SEQ ID NO: 47079 - DNA, 75 bp, synthetic construct
  source 1..75: mol_type = other DNA
atgaaaaaggtgacgttgtttttgtttgctgcaaacatcctgccttcctgtgtactggcctggaatacgccggga

SEQ ID NO: 47080 - DNA, 75 bp, synthetic construct
  source 1..75: mol_type = other DNA
gatgttatttcttacagcctttcggaaagaccagtgatgaacatggttgagaatatgctcgatcaggcattcaaa

SEQ ID NO: 47081 - DNA, 75 bp, synthetic construct
  source 1..75: mol_type = other DNA
tgactagtcgggatattacttttattgcagatgataataacgcagatctcatcccatgcctgagtacagatcttc

SEQ ID NO: 47082 - DNA, 75 bp, synthetic construct
  source 1..75: mol_type = other DNA
agacgcagacagcaacctgcggagtctgtgctggccctgccacaaagagaaaacagcgcgcgaacgaatcaagtg

SEQ ID NO: 47083 - DNA, 75 bp, synthetic construct
  source 1..75: mol_type = other DNA
tcaacgcttacccagcgcggtctggcaaagatgattggctgtcatgaatcgaagataagcagaacggactggaga

SEQ ID NO: 47084 - DNA, 75 bp, synthetic construct
  source 1..75: mol_type = other DNA
tgcaggacggcgcattcagcctgacggcaccaccggtacagggaatgccggtgcagactgccctgcgcaccctgc

SEQ ID NO: 47085 - DNA, 75 bp, synthetic construct
  source 1..75: mol_type = other DNA
gacgggatctggaccagatcgccgctgacaacggtttcgactttcatatcatcgacaatgaaatctattgggatg

SEQ ID NO: 47086 - DNA, 75 bp, synthetic construct
  source 1..75: mol_type = other DNA
gccggtacagggaatgccggtgcaggcacccctgcgcaccctgtatggcgtcattaccggctttaaacatctctc

SEQ ID NO: 47087 - DNA, 75 bp, synthetic construct
  source 1..75: mol_type = other DNA
ccgcgtttgttcaggcggcactgacgaccctgattaatggtgcgccagccacgctggatacgctgaaagaaattg

SEQ ID NO: 47088 - DNA, 75 bp, synthetic construct
  source 1..75: mol_type = other DNA
acgactggctgagctcagacgccgctgtggatgaggccctgctcataaacgaatacacctttaccgaaagcggtc

SEQ ID NO: 47089 - DNA, 75 bp, synthetic construct
  source 1..75: mol_type = other DNA
ttccagtggtgctccgggaagtggatcacctgattattctaaatacagtgttaacacttcttctgcaggcgctca

SEQ ID NO: 47090 - DNA, 75 bp, synthetic construct
  source 1..75: mol_type = other DNA
tgagcacatttaaacaactgcaccagaacaaagatgaagtgtttgagcgaggggtgatcaacgtcttcaggggac

SEQ ID NO: 47091 - DNA, 75 bp, synthetic construct
  source 1..75: mol_type = other DNA
tggcggcaataaagggattgatatctcagctccacggggtacacctatttacgccgcgggtgcaggaaaggtggt

SEQ ID NO: 47092 - DNA, 75 bp, synthetic construct
  source 1..75: mol_type = other DNA
cgacggcgaacgctgccgtatccgtctggctgcaccaacgggtaaagctgccgcgcgcttaaccgaatctctcgg

SEQ ID NO: 47093 - DNA, 75 bp, synthetic construct
  source 1..75: mol_type = other DNA
cgcccttgccgatggtgaaaaaactattgcgttaggaaatacggctcaagcttacgaaattatgagcatcgccct

SEQ ID NO: 47094 - DNA, 75 bp, synthetic construct
  source 1..75: mol_type = other DNA
ccgtgaaaagtcgtggcacaagaccaccgtcggggaagtagtgaaggaaatagccgtacgtcacaagctgaagat

SEQ ID NO: 47095 - DNA, 75 bp, synthetic construct
  source 1..75: mol_type = other DNA
tgtcctccgtgaacctcctttctctggcgagccttgcccgtcagaagtccccggcctgtcagattgtcctcgccg

SEQ ID NO: 47096 - DNA, 75 bp, synthetic construct
  source 1..75: mol_type = other DNA
attatcgatctcgctcaacgttgcggagcgcttgcagtaacggcgaaaggggcaatgacagcgctgccatgtcga

SEQ ID NO: 47097 - DNA, 75 bp, synthetic construct
  source 1..75: mol_type = other DNA
gtattacctgtgcgctgatcccgaccaccacgccgggcgtggaaattggtcgtcgccacttcccgctgaacgtac

SEQ ID NO: 47098 - DNA, 75 bp, synthetic construct
  source 1..75: mol_type = other DNA
ggatgggttttcaacgacggatcgctggtacatatattaaagctcccgaagcggtagttgaggcatggctaaatg

SEQ ID NO: 47099 - DNA, 75 bp, synthetic construct
  source 1..75: mol_type = other DNA
cccttgccggggcagtatgacatcgatatttatgtcaataagcaatggcgtgggaaatatgagatcattgttaaa

SEQ ID NO: 47100 - DNA, 75 bp, synthetic construct
  source 1..75: mol_type = other DNA
gtcgctgcaaacccggggcagagcatctttcgcttaatttcctgcccctgattatcattaacaaatcaacaacat

SEQ ID NO: 47101 - DNA, 75 bp, synthetic construct
  source 1..75: mol_type = other DNA
agctacgcgttgaaaagcggcacctataataacgtgggtgatgctctgtcaggaatcgacaataatactctgcaa

SEQ ID NO: 47102 - DNA, 75 bp, synthetic construct
  source 1..75: mol_type = other DNA
cattaataccgataactttgccagcggtaagcaatgtttaacatttaagcaacttattcagggcgggagctatac

SEQ ID NO: 47103 - DNA, 75 bp, synthetic construct
  source 1..75: mol_type = other DNA
cctccatggtttattttctgcgtgatgcggttgatgccggggtgctgacggaatgtaacggtttttatgatattc

SEQ ID NO: 47104 - DNA, 75 bp, synthetic construct
  source 1..75: mol_type = other DNA
atagacgatgctatcgcctggggtaaaaaaaatggcaagacccaggaacaacaggtggtcgcagcgtgtgacaaa

SEQ ID NO: 47105 - DNA, 75 bp, synthetic construct
  source 1..75: mol_type = other DNA
actgctgacggaaggtggtcaacagccctcggtgctaagacccattcgcttggcgaagcatcagtggcgttaggg

SEQ ID NO: 47106 - DNA, 75 bp, synthetic construct
  source 1..75: mol_type = other DNA
ggtaaatacagccttgcattaggaaacgcaagtcaggcatctggcgaatccagtattgcattaggtaacacaagt

SEQ ID NO: 47107 - DNA, 75 bp, synthetic construct
  source 1..75: mol_type = other DNA
gctattatgagcatcgccctgggtgattcagctaatgcgtcgaaagaatattctatggcgctgggagcaagtagc

SEQ ID NO: 47108 - DNA, 75 bp, synthetic construct
  source 1..75: mol_type = other DNA
ggaatccggcaacaggcagttacaccgttgccagtgaaacggcaaaaagccgtggcaagaaatccgggcgcagta

SEQ ID NO: 47109 - DNA, 75 bp, synthetic construct
  source 1..75: mol_type = other DNA
aattaattttgtggatggtcgagtgacagacggatttatcttgcgcgaaggtgagtttgtcacttcattacaggc

SEQ ID NO: 47110 - DNA, 75 bp, synthetic construct
  source 1..75: mol_type = other DNA
cccgcaaggccattaccgaagtgaagaagatggagaaccgcgacgcagtggaggcgaccgtctggggtgcgtatt

SEQ ID NO: 47111 - DNA, 75 bp, synthetic construct
  source 1..75: mol_type = other DNA
atgagttaacagattatgaatatgattgcatcatatggtggttgcaatacatgggctttaagttgcaattaatgg

SEQ ID NO: 47112 - DNA, 75 bp, synthetic construct
  source 1..75: mol_type = other DNA
cattgatgaaccagaagagcaggcgctgaaaaagatcgcccaggcgcttcagttgtcactggatgcttatctcta

SEQ ID NO: 47113 - DNA, 75 bp, synthetic construct
  source 1..75: mol_type = other DNA
gagaaaacaattgcagctctgcctgcattttctccttttgctggtgagattgcccagatgagcgccaatatccgc

SEQ ID NO: 47114 - DNA, 75 bp, synthetic construct
  source 1..75: mol_type = other DNA
gataacgggagtgcctgcggcttcactgacggcaaaaggcaccgtacaactgagcagcgccacggacagtcaatc

SEQ ID NO: 47115 - DNA, 75 bp, synthetic construct
  source 1..75: mol_type = other DNA
tgtcctcgggagagaatgccatcgcattgggagagggtagtgccgctggtggcagcaacagccttgctttcggta

SEQ ID NO: 47116 - DNA, 75 bp, synthetic construct
  source 1..75: mol_type = other DNA
cccgttcgacaccatgagcgaagcagagttttccgccatgagtaccagcgaaaaggccatgcgtatctatgagca

SEQ ID NO: 47117 - DNA, 75 bp, synthetic construct
  source 1..75: mol_type = other DNA
taccagctggcacgcgaacagcatcctgaacgttggggaaagcatctacgtaactgggactacatatcagaagtc

SEQ ID NO: 47118 - DNA, 75 bp, synthetic construct
  source 1..75: mol_type = other DNA
tattgccccaaaagtggaacagggactgaatatcgatcggcaacgccgcggcttatgggggcactcctacggcgg

SEQ ID NO: 47119 - DNA, 75 bp, synthetic construct
  source 1..75: mol_type = other DNA
cgaccgggatttattacaaggtagaaaatggtaatgtgttttatcttaatcgcgcggctaatgagtggcgagagt

SEQ ID NO: 47120 - DNA, 75 bp, synthetic construct
  source 1..75: mol_type = other DNA
gatagcccagggcagcagcaacgtctttatcaacaatcagcccgccgcgcgcaagggcgacaaactggagtgcag

SEQ ID NO: 47121 - DNA, 75 bp, synthetic construct
  source 1..75: mol_type = other DNA
gcaaagtgttccttacgcaggcgcagctggcgatgctgctggaaggtatcgactggcgacagcccaagcggttgc

SEQ ID NO: 47122 - DNA, 75 bp, synthetic construct
  source 1..75: mol_type = other DNA
gaagccggtgaggacacggcgctctgcgacaaggagaacaaaccaccgaggatagcccagggcagcagcaacgtc

SEQ ID NO: 47123 - DNA, 75 bp, synthetic construct
  source 1..75: mol_type = other DNA
gtgcgtgttctggatggtgataccattgacgtcatgttatctcagcatccggtgcgtgtccgtcttgttaatatt

SEQ ID NO: 47124 - DNA, 75 bp, synthetic construct
  source 1..75: mol_type = other DNA
aacgacagtgatattttgatctccgaccatgtcatcgagcgcatcaactgtactaacggcaaaatcaactggggc

SEQ ID NO: 47125 - DNA, 75 bp, synthetic construct
  source 1..75: mol_type = other DNA
cgcagaacatgatggcctcattgtcgacggaaaagggcattattcagccggtacatattgatgatgtgcttccgg

SEQ ID NO: 47126 - DNA, 75 bp, synthetic construct
  source 1..75: mol_type = other DNA
gtgtcagtggttctggacaagactgaaacaaaaacaggatgaaaaacatccagtacataacccagtgacccggtg

SEQ ID NO: 47127 - DNA, 75 bp, synthetic construct
  source 1..75: mol_type = other DNA
caagcaccaaccccacggaaaccatcattaacaacagcatcagcatgctggcagcaggtaatagcgtctacttca

SEQ ID NO: 47128 - DNA, 75 bp, synthetic construct
  source 1..75: mol_type = other DNA
gcaatggtttctcgacaccaccgaggggactccgtggatccagtccgtactcggtaagcagaagccggaaaccta

SEQ ID NO: 47129 - DNA, 75 bp, synthetic construct
  source 1..75: mol_type = other DNA
aagggaaattattcatcaatagcgacatgcctggaactattgaatctaaagggattctttttggtgttgggaagg

SEQ ID NO: 47130 - DNA, 75 bp, synthetic construct
  source 1..75: mol_type = other DNA
agacaatggagcctggcatgacggtgtcccatgtggcgcgtttgcatggtattcagcccagcctgttgcttaagt

SEQ ID NO: 47131 - DNA, 75 bp, synthetic construct
  source 1..75: mol_type = other DNA
acacgactggatcgcctcatttaaacaagccttcagcgaagggcaaacggtcgtcgtgcctgccggattcgtttg

SEQ ID NO: 47132 - DNA, 75 bp, synthetic construct
  source 1..75: mol_type = other DNA
tacgaaccaagacattaacaagacaaataaggttggagtccaaaaatatagtgctctaaccgaatgggttaaata

SEQ ID NO: 47133 - DNA, 75 bp, synthetic construct
  source 1..75: mol_type = other DNA
tctgttcgtcggtctgcatccccgacgtttgaactgttttatcaggagtatcagtccctggtactaaaatctgtg

SEQ ID NO: 47134 - DNA, 75 bp, synthetic construct
  source 1..75: mol_type = other DNA
aggaaggtaacaaaatgaaaatgcctcacagccgtgtaattggcggagggctttttgaactgagagtcggggata

SEQ ID NO: 47135 - DNA, 75 bp, synthetic construct
  source 1..75: mol_type = other DNA
gcgctggaggagatggaaaagcaaatgatccgcgaggcgctttcacgtcataacagcaagaagcaagttgctgat

SEQ ID NO: 47136 - DNA, 75 bp, synthetic construct
  source 1..75: mol_type = other DNA
atggacgttgagtacgggcagtacagcgttattctgttggtggaaggattcccgccgtcacatgccgggaccatc

SEQ ID NO: 47137 - DNA, 75 bp, synthetic construct
  source 1..75: mol_type = other DNA
cttcacgcagctggcgctgggaaattacaggctgacagtccgggcggtaaatgcatggggacagccggtgcacat

SEQ ID NO: 47138 - DNA, 75 bp, synthetic construct
  source 1..75: mol_type = other DNA
tcagcggagaaaacagcgccgccgcgttgctggaaaaaatcaaagctgaacgcgcagctagcgggggtaaaaaag

SEQ ID NO: 47139 - DNA, 75 bp, synthetic construct
  source 1..75: mol_type = other DNA
aatggcaagtttgatactacggacttggtttttgttcctaaaaatcttgttaaagaaagtcaaaaaatatctcct

SEQ ID NO: 47140 - DNA, 75 bp, synthetic construct
  source 1..75: mol_type = other DNA
ccgcactttgatataatcatcaaggcatgcatatcgggcgtcagagactttgttcttcagaatcctcggacgctg

SEQ ID NO: 47141 - DNA, 75 bp, synthetic construct
  source 1..75: mol_type = other DNA
ttcctgtccctgaaccgattcctggcgatcctgttccagtgcccgatccgatccctcgcccgcaacccatgcctg

SEQ ID NO: 47142 - DNA, 75 bp, synthetic construct
  source 1..75: mol_type = other DNA
aattacaaagcttccaagtgggatcagcgataccgtgaatttacgaccttgctacaacaaaccttaacttttgct

SEQ ID NO: 47143 - DNA, 75 bp, synthetic construct
  source 1..75: mol_type = other DNA
gcagtttcgaggcgatgggcgtttcactggtagtgcatccgcataacccgtatgttcccaccagccacgcgaatg

SEQ ID NO: 47144 - DNA, 75 bp, synthetic construct
  source 1..75: mol_type = other DNA
tgggcggcaatcagtaacgtatctaaagatgactacggcgaaggcggctttagtaaaggtttttatatctcgatt

SEQ ID NO: 47145 - DNA, 75 bp, synthetic construct
  source 1..75: mol_type = other DNA
atgttaacggcatgtatatcatttggggttgcgatgacgacgaacacgcattttagaggtgaagaattgaagaag

SEQ ID NO: 47146 - DNA, 75 bp, synthetic construct
  source 1..75: mol_type = other DNA
tcagaaacagtttggtgaagcgcgaagggagctggcgggtaatcttgctcagtccggcgttgacccatccagtgg

SEQ ID NO: 47147 - DNA, 75 bp, synthetic construct
  source 1..75: mol_type = other DNA
cacagattctttccaccccaatgcagcagccccagccgcgcagatacagcaataagcgaaccgacagcagtaaga

SEQ ID NO: 47148 - DNA, 75 bp, synthetic construct
  source 1..75: mol_type = other DNA
gttaacccgttgtataccccgcgtgagcttgagcatcagcttaacgatagcggcgcatcggcgattgttatcgtg

SEQ ID NO: 47149 - DNA, 75 bp, synthetic construct
  source 1..75: mol_type = other DNA
cgcagcactggagcgtaaagccagtgatgacgaggcctgtggcgaaatcgaaacggctcatccgggatatctggg

SEQ ID NO: 47150 - DNA, 75 bp, synthetic construct
  source 1..75: mol_type = other DNA
tcagacgccgccagttgcctctgttgatgttccacctacgcaacctacagtagcctggcagcctgtaccggggcc

SEQ ID NO: 47151 - DNA, 75 bp, synthetic construct
  source 1..75: mol_type = other DNA
tgaccattgctgaaaaactcggcggctggattttaaacattctcaccttcgccagtaatcgtacccgtcgcgatg

SEQ ID NO: 47152 - DNA, 75 bp, synthetic construct
  source 1..75: mol_type = other DNA
ccgctggcatctggcgtgaaaaaagcgacactggcgacgggggctgccgcaaccgttgccgcgccagtcttcagt

SEQ ID NO: 47153 - DNA, 75 bp, synthetic construct
  source 1..75: mol_type = other DNA
cctgttgtggagcctgaacccgttgtagaagagacaaaacccgcgcgtccgccgctttactattttgaagaagtg

SEQ ID NO: 47154 - DNA, 75 bp, synthetic construct
  source 1..75: mol_type = other DNA
cgccaattgttgaacctgtacagcagccgcaacaaccggttgcaccgcagcagcagtatcagcagccgcaacaac

SEQ ID NO: 47155 - DNA, 75 bp, synthetic construct
  source 1..75: mol_type = other DNA
tgatcatcatcatcgcaacaattctccactcccaccgacgccccctgatgatgattcagacgacactccagtgcc

SEQ ID NO: 47156 - DNA, 75 bp, synthetic construct
  source 1..75: mol_type = other DNA
tgatgaagttcgcggggcgaatatcgatcagcttattcatcgctattcgacgaccgggcaaaataatacccgtgt

SEQ ID NO: 47157 - DNA, 75 bp, synthetic construct
  source 1..75: mol_type = other DNA
tcggcatgggagcgttacagcgtcctgctcagccgggtggattcagcgaacccggaatggccacaaaagccagag

SEQ ID NO: 47158 - DNA, 75 bp, synthetic construct
  source 1..75: mol_type = other DNA
aattttaatatggctgctgtcggtgtgatgaagaaggggatgtcgatgagtttgttttcttctcctggatataca

SEQ ID NO: 47159 - DNA, 75 bp, synthetic construct
  source 1..75: mol_type = other DNA
atgccgccacgaatcccgaaagcctgccgtgctcgaggttgccgtaataccaccactgacccgtcaggctattgc

SEQ ID NO: 47160 - DNA, 75 bp, synthetic construct
  source 1..75: mol_type = other DNA
ggcagcggatttaatgagctgaagtttgatgatgcgacagggagagaacaggtctacatccacgcgcagaagaac

SEQ ID NO: 47161 - DNA, 75 bp, synthetic construct
  source 1..75: mol_type = other DNA
ttacgcttaatctcagaactggtcggataagcatggggcatggtcttgatgttacaggggatatatttgcaaaac

SEQ ID NO: 47162 - DNA, 75 bp, synthetic construct
  source 1..75: mol_type = other DNA
tctcggtggtatccgtggtgttcctgccaccgacgctggtcgcttccagctacgggatgaactttgagtttatgc

SEQ ID NO: 47163 - DNA, 75 bp, synthetic construct
  source 1..75: mol_type = other DNA
atgaatttactgatatggccggaacgactgctgttccggcaggaaagacgaagtaaggaaaaaggtatggatgat

SEQ ID NO: 47164 - DNA, 75 bp, synthetic construct
  source 1..75: mol_type = other DNA
gtgtgcagatattcatggatgggttgttcgtgtactggacggtgataccatcgaggtcatggactcacggaaggc

SEQ ID NO: 47165 - DNA, 75 bp, synthetic construct
  source 1..75: mol_type = other DNA
cgcttaccaatttgagtggaaaggatgtagctggtcttctcacataccttggtttgggagaattatctctggctg

SEQ ID NO: 47166 - DNA, 75 bp, synthetic construct
  source 1..75: mol_type = other DNA
atctgttcatcaacaaaaacgaccacctaaaaaagatcagagtttcagacgtgatgaaaatcgctgattctgact

SEQ ID NO: 47167 - DNA, 75 bp, synthetic construct
  source 1..75: mol_type = other DNA
gccgtgttcgtggctgccgccataccaccacagacccgtcaggctattgtgaaagccacaaaagcgaaggctgga

SEQ ID NO: 47168 - DNA, 75 bp, synthetic construct
  source 1..75: mol_type = other DNA
agattcagacagcaatctgcagagcctgtgctggccgtgtcataagacgaagacggctcgtgaacggctgaagta

SEQ ID NO: 47169 - DNA, 75 bp, synthetic construct
  source 1..75: mol_type = other DNA
atgatatcggataaactcataacgctggcgaagatcctctgtgtaatcgtcggcattccatttttagtcatgctg

SEQ ID NO: 47170 - DNA, 75 bp, synthetic construct
  source 1..75: mol_type = other DNA
ttactctatctgtatcgacagttgtgcagggtagcgttgttattatgggaacccgtgttgtttatcccgcagctc

SEQ ID NO: 47171 - DNA, 75 bp, synthetic construct
  source 1..75: mol_type = other DNA
tgaatatttcaaatggagaagccgccagagcaccacaacaaaagacctgatgacgctgaaatgggatgcactaaa

SEQ ID NO: 47172 - DNA, 75 bp, synthetic construct
  source 1..75: mol_type = other DNA
catttcattttcactaatgctggttgctatttgcttttccactgcctggcgcgtcttaactctgtcagggctggt

SEQ ID NO: 47173 - DNA, 75 bp, synthetic construct
  source 1..75: mol_type = other DNA
gccgggtaattatggaagggcatcagggcgatgagtatgacgaggcgctctccacactggcggaactggaagata

SEQ ID NO: 47174 - DNA, 75 bp, synthetic construct
  source 1..75: mol_type = other DNA
aacgcgaagcgcgtagccgttgcccgtcaggttgtgttgctgtatttgccgcccgtattcgtcaggaggtgcgcc

SEQ ID NO: 47175 - DNA, 75 bp, synthetic construct
  source 1..75: mol_type = other DNA
cataccatttgacgtattacagggtggcgcaagtctgattaatgcaatcagtcaggggcttggtgggccaaaagt

SEQ ID NO: 47176 - DNA, 75 bp, synthetic construct
  source 1..75: mol_type = other DNA
tcttgaaaccacagataaaacgaacattgttacctctggggaaaatgcagtaggtgttcttgcatgttcaagtcc

SEQ ID NO: 47177 - DNA, 75 bp, synthetic construct
  source 1..75: mol_type = other DNA
ccgaagcgcgacgattccagccgcagaattgacgtcccgtatgacggatatgaaatcaagacaatcacacatccc

SEQ ID NO: 47178 - DNA, 75 bp, synthetic construct
  source 1..75: mol_type = other DNA
tcattaaagcacttgtgcttctagaagatgagcagattgttcgttttaacatcgctgcgaacgataacgcctcgc

SEQ ID NO: 47179 - DNA, 75 bp, synthetic construct
  source 1..75: mol_type = other DNA
atcgctgtctccggctttaccggtttgattggcgggttgataagcgtggagagtgggttgagttttcacatgatc

SEQ ID NO: 47180 - DNA, 75 bp, synthetic construct
  source 1..75: mol_type = other DNA
tttatcacttaatgtcccgccttttatgctgatcccgcgtaatatccggagaaaagtggacggattcagacaatc

SEQ ID NO: 47181 - DNA, 75 bp, synthetic construct
  source 1..75: mol_type = other DNA
agaaataatattgttcaatggaaggtagtaactgattatggcgggataagtaaacagtttgaggcaaaaatcaac

SEQ ID NO: 47182 - DNA, 75 bp, synthetic construct
  source 1..75: mol_type = other DNA
ccgacgacacctttacccgcgaacaggctgaggtcgttgcggcgcagtacaccaacgtggcaattgaggacgatc

SEQ ID NO: 47183 - DNA, 75 bp, synthetic construct
  source 1..75: mol_type = other DNA
gatggcctggagatctgcacgtattcttaatcgcgtactggggcgtgatttattcgatctcagtatgccgcccgc

SEQ ID NO: 47184 - DNA, 75 bp, synthetic construct
  source 1..75: mol_type = other DNA
cagagagagcctggaaagtgatgtggtgattttcgccacaggttaccgttctgcattgccacaaatacttccctc

SEQ ID NO: 47185 - DNA, 75 bp, synthetic construct
  source 1..75: mol_type = other DNA
ggataccgccgtcagtcctttctactttgtttccaatgctcctcgtgaattgctggatggcgtatcgcagacgct

SEQ ID NO: 47186 - DNA, 75 bp, synthetic construct
  source 1..75: mol_type = other DNA
gagcagaaccgcatcatcaaaatcttctcggtggtatccgtggtattcctgccgccgacgctcgttgcttccagc

SEQ ID NO: 47187 - DNA, 75 bp, synthetic construct
  source 1..75: mol_type = other DNA
tatcaggaactgaatttcaaagctcgtatggaatccccaagcaaagatgccaccccgggcaacgtttacgctcag

SEQ ID NO: 47188 - DNA, 75 bp, synthetic construct
  source 1..75: mol_type = other DNA
tgaagagaataattctgtttctgtcattactgttttgcatcgcctgtccagccattgctggacaggatattgacc

SEQ ID NO: 47189 - DNA, 75 bp, synthetic construct
  source 1..75: mol_type = other DNA
atgactaagaaaataaaatgtgcttaccacctttgcaataaaggaattgaagaaagcaaaagtattaaaagacca

SEQ ID NO: 47190 - DNA, 75 bp, synthetic construct
  source 1..75: mol_type = other DNA
tggctattccacgaaaaccgtcccactaccgacgggccgatggaattacgtactccacgtgatcgtgatggttcc

SEQ ID NO: 47191 - DNA, 75 bp, synthetic construct
  source 1..75: mol_type = other DNA
ggttaacgcgttccagtatgcaagccctaccgatgacgcaaacatcgtttatagtgtgcgctccctgctgccagg

SEQ ID NO: 47192 - DNA, 75 bp, synthetic construct
  source 1..75: mol_type = other DNA
cgctttgtgccgtagcggtgcaggtactggctggtctttttaccggaaactgggcttacggtgcgatagccggtt

SEQ ID NO: 47193 - DNA, 75 bp, synthetic construct
  source 1..75: mol_type = other DNA
atgtattaaaggcgaggctgaaacgtgatcctttgctggcgttagagcttgttaaccctgaactggatttagtcc

SEQ ID NO: 47194 - DNA, 75 bp, synthetic construct
  source 1..75: mol_type = other DNA
cccagaaagctggttgttgaagatccgcttccgcccgtcgcccgcattaacagcatccagtgcagtaccgcacat

SEQ ID NO: 47195 - DNA, 75 bp, synthetic construct
  source 1..75: mol_type = other DNA
tggtgacgcttatgcgtcgctacgccgctggcattgttcatctggatgcctctggcgaagtgttgccgggctttg

SEQ ID NO: 47196 - DNA, 75 bp, synthetic construct
  source 1..75: mol_type = other DNA
ctgaccgggcggcgtaataacggtgtgcctgtttccctttccgtatcaacaggagcagagaatggcagtgattga

SEQ ID NO: 47197 - DNA, 75 bp, synthetic construct
  source 1..75: mol_type = other DNA
ctgattgtcgcaaaactatatccagactggtggaaaggggcattagcaactgtcgccatctatttgcttttatcc

SEQ ID NO: 47198 - DNA, 75 bp, synthetic construct
  source 1..75: mol_type = other DNA
agagagcttcgtgaaaacgataaagcgtgactacatcgttttcatgcccaagccagaccctgtacacgattctgt

SEQ ID NO: 47199 - DNA, 75 bp, synthetic construct
  source 1..75: mol_type = other DNA
tggagaattcttaacgcacccgtgccgacttatcagacactgattgtgcgccccggtgatttacagcaaagcgtg

SEQ ID NO: 47200 - DNA, 75 bp, synthetic construct
  source 1..75: mol_type = other DNA
ctgtgtacacgctggcgaaaaaaatgatgccggaatatgaaggcggattctggcacttcatccgcctgccggacg

SEQ ID NO: 47201 - DNA, 75 bp, synthetic construct
  source 1..75: mol_type = other DNA
cattcaactgtcgattttgccagccacgggtcaactgccggcacatttaccacattaaacgtagagaacctgagc

SEQ ID NO: 47202 - DNA, 75 bp, synthetic construct
  source 1..75: mol_type = other DNA
cacattaaacgtagagaacctgagcggtaacagtacctttattatgcgtgctgatgttgttggcgagggtaatgg

SEQ ID NO: 47203 - DNA, 75 bp, synthetic construct
  source 1..75: mol_type = other DNA
ttagcgtatgacaaagataacatcatccgctatgtggaaaaggatgtaacagctatcagaccggatggattaagt

SEQ ID NO: 47204 - DNA, 75 bp, synthetic construct
  source 1..75: mol_type = other DNA
tcataccaacctttatccaatgagatgccaaacaaaataaaatacaataatagagagttagaattaacaaaagaa

SEQ ID NO: 47205 - DNA, 75 bp, synthetic construct
  source 1..75: mol_type = other DNA
gtaatgatgtatatgacaaaataaatgcaattgttgaaaaacgtcgtcaggagggagcgagagataaagacatca

SEQ ID NO: 47206 - DNA, 75 bp, synthetic construct
  source 1..75: mol_type = other DNA
ctgtatacgcgctggcgaaaaaaatgatgccggaatatgaaggcggattctggcacttcatccgcctgccggacg

SEQ ID NO: 47207 - DNA, 75 bp, synthetic construct
  source 1..75: mol_type = other DNA
gcgccgtcagaagcaaagtgcgccaccaccaactgtgcggcaccggtgacctcggaaagctgcgcgctggattta

SEQ ID NO: 47208 - DNA, 75 bp, synthetic construct
  source 1..75: mol_type = other DNA
gcaatgatgcttatgaaaaaataaatgcgattattgaaaaacgtcgacaggagggggcgagagaaaaagatgtca

SEQ ID NO: 47209 - DNA, 75 bp, synthetic construct
  source 1..75: mol_type = other DNA
ggctcaactggcgccggatggcacagagacgctgaccgtcacagccccggactggactgacaccattacccgtct

SEQ ID NO: 47210 - DNA, 75 bp, synthetic construct
  source 1..75: mol_type = other DNA
ttagaaccgttaggatattacaataagtcgaatcgtccggctaataccgttatgattatcaatgttggcgcttca

SEQ ID NO: 47211 - DNA, 75 bp, synthetic construct
  source 1..75: mol_type = other DNA
caactggaaagcgcgttcgtcgaaatcaatgagccgcaatccgcatacggacataagtcactgggtgagccacca

SEQ ID NO: 47212 - DNA, 75 bp, synthetic construct
  source 1..75: mol_type = other DNA
gttatgcctggggggacactgcgtgtcgctaaaaccacaatcggcggcaacctggagaatggcggcacggttcaa

SEQ ID NO: 47213 - DNA, 75 bp, synthetic construct
  source 1..75: mol_type = other DNA
attttaccggagcagaccgcgcagcactgacaacccttacagctattggtcgcgctattatcgctatgggcagta

SEQ ID NO: 47214 - DNA, 75 bp, synthetic construct
  source 1..75: mol_type = other DNA
gttgttgaggttcctgatattacctccaaccgacgtgctgacgactcaggtaaatggatgtttaaggatggtgcc

SEQ ID NO: 47215 - DNA, 75 bp, synthetic construct
  source 1..75: mol_type = other DNA
cctgccgtcagcgcttcccgggttcagagcacaacagggacatccggtacatctgcgccccgcacaaccacgcca

SEQ ID NO: 47216 - DNA, 75 bp, synthetic construct
  source 1..75: mol_type = other DNA
ccgatggttaccggagctgcgcgatgtaccagggaaagcggtgcatgagccgtggaagtgggcgcagaaagcagg

SEQ ID NO: 47217 - DNA, 75 bp, synthetic construct
  source 1..75: mol_type = other DNA
ttacctttaccctcgggcggcagattgtcagcggcaaatatgtgcctggtgcggcgctgccctcagaggccgatt

SEQ ID NO: 47218 - DNA, 75 bp, synthetic construct
  source 1..75: mol_type = other DNA
catcagtatgtctctgccgtgcatactgatacagataatctgcacgtccatgtggctgttaaccgggtacaccct

SEQ ID NO: 47219 - DNA, 75 bp, synthetic construct
  source 1..75: mol_type = other DNA
aagctctcgatattcattgaaaagaccactggcatatcaaaagaaaaattacgtccagatatttttcaaaagatt

SEQ ID NO: 47220 - DNA, 75 bp, synthetic construct
  source 1..75: mol_type = other DNA
cccatgcggtaaatctgttaatacctgaacagcagcgactgctgacgttactgagtgaggattgtgataacgcac

SEQ ID NO: 47221 - DNA, 75 bp, synthetic construct
  source 1..75: mol_type = other DNA
caatcatagtgctgtgttttacagtactgggattcacgctgatggtaggcgactcgttgtgtgagttgagtatca

SEQ ID NO: 47222 - DNA, 75 bp, synthetic construct
  source 1..75: mol_type = other DNA
tgcccgaaggccctttctcacgcgaacaggcggttgccgtcacaacagcttaccgcaatgtgcttattgaggatg

SEQ ID NO: 47223 - DNA, 75 bp, synthetic construct
  source 1..75: mol_type = other DNA
cattatgactgcgtttctttattgatttccgcaggtgctgatattaataaacaagatcaaacttgttttaatccc

SEQ ID NO: 47224 - DNA, 75 bp, synthetic construct
  source 1..75: mol_type = other DNA
acctgaacagcctgctgtctgaccgcgattacacctggaacgacaacggcgaactcatccgcatcagcagcccgc

SEQ ID NO: 47225 - DNA, 75 bp, synthetic construct
  source 1..75: mol_type = other DNA
agctggttctgccgaccggaactctcaggctgaaaggtgaactgacaccggcgttattacagacacttatccgcg

SEQ ID NO: 47226 - DNA, 75 bp, synthetic construct
  source 1..75: mol_type = other DNA
ttggtgaaattagtggaaatgtaggtacagaaactcgccctcgcaacgttgcatttaattacatcgtaagagccg

SEQ ID NO: 47227 - DNA, 75 bp, synthetic construct
  source 1..75: mol_type = other DNA
aatcgtgcaaataatcacggatgttcttcataattctgacattttcagccttgataatgaaaacgcccgtataac

SEQ ID NO: 47228 - DNA, 75 bp, synthetic construct
  source 1..75: mol_type = other DNA
tgcctggttcttttttaacgcctccggcaacattacctgttgccattgattacccggctgcgctggcactccgcc

SEQ ID NO: 47229 - DNA, 75 bp, synthetic construct
  source 1..75: mol_type = other DNA
atttaaagggtattatatcagaggcgctttataaaaagattttaaatgtgctgattggtattcgtgatcgccttc

SEQ ID NO: 47230 - DNA, 75 bp, synthetic construct
  source 1..75: mol_type = other DNA
attgctgacgaaaaagggctgcccgcagcctggtcaggtcgcgattattgctgatgtcgacgagcgtacccgtaa

SEQ ID NO: 47231 - DNA, 75 bp, synthetic construct
  source 1..75: mol_type = other DNA
tctgttggagcaggatttttacgccagtggcccgaaccagaagtgggcaggagacatcacgtacttacgtacaga

SEQ ID NO: 47232 - DNA, 75 bp, synthetic construct
  source 1..75: mol_type = other DNA
acggtaaactcaccggttcaaaagccttcctgaaagcattgtcttcccagggggatgtcagtgtggtgacccaga

SEQ ID NO: 47233 - DNA, 75 bp, synthetic construct
  source 1..75: mol_type = other DNA
atgcgcatgaatgttttcgaaatggaagggtttcttcacgggagatgtgtaccacgagacctgaaaatgaatgaa

SEQ ID NO: 47234 - DNA, 75 bp, synthetic construct
  source 1..75: mol_type = other DNA
catgtgttgattaccgatctctccatgcctggcgataagtacggcgatggcattaccttaatcaagtacatcaag

SEQ ID NO: 47235 - DNA, 75 bp, synthetic construct
  source 1..75: mol_type = other DNA
caactggccagacaggtggagccggaatacacaccggcgcgaaaagttcatttttaccactgcgaccaccggggc

SEQ ID NO: 47236 - DNA, 75 bp, synthetic construct
  source 1..75: mol_type = other DNA
gcagattatcaggcgcaactgaagcggcataatctgcgtggaagtatgagcgcaaaaggttgctgctacgataat

SEQ ID NO: 47237 - DNA, 75 bp, synthetic construct
  source 1..75: mol_type = other DNA
gagaagattaaaatagaaacggagaaatttaattctgctaatacgcttatgatggtttcttttcagatgataaat

SEQ ID NO: 47238 - DNA, 75 bp, synthetic construct
  source 1..75: mol_type = other DNA
gatggtcgcgtcagtgccctgaagggcgaaggtgatgtgccgaaagttgccgttgataccggcgcgctcggtgga

SEQ ID NO: 47239 - DNA, 75 bp, synthetic construct
  source 1..75: mol_type = other DNA
acggtgacgacgttattgcattgatgcacgatacaggcgaaaccaccttcaagcgattgatagaagatggaacac

SEQ ID NO: 47240 - DNA, 75 bp, synthetic construct
  source 1..75: mol_type = other DNA
cgacggataccactgccaatgtcggctcatccacctccctgaatgcggccaccatcaccaccggttttaacatga

SEQ ID NO: 47241 - DNA, 75 bp, synthetic construct
  source 1..75: mol_type = other DNA
gatatcacggccagtgggaaactgaccagtacaggttcgctggtgagcgatgatgtactggtgctgaaggcgcag

SEQ ID NO: 47242 - DNA, 75 bp, synthetic construct
  source 1..75: mol_type = other DNA
tgtagtttctactattcatggtaacactgtacaaggtgcgatttatgctttacaacaaatagcagcaagtgaagg

SEQ ID NO: 47243 - DNA, 75 bp, synthetic construct
  source 1..75: mol_type = other DNA
ggcgcaagctggcgggaggggtatcgctggcagacgcagaagctttttatgaccgtaccgacgggccgaatgttc

SEQ ID NO: 47244 - DNA, 75 bp, synthetic construct
  source 1..75: mol_type = other DNA
gggtgtggcggcgtgaacgggacctgacgggctggatgtcgctgtcacggaaaccgcaagtgacctggtacggct

SEQ ID NO: 47245 - DNA, 75 bp, synthetic construct
  source 1..75: mol_type = other DNA
agaagcagaatctggcgaacctgagccgtgaccctgcgcacgctaatgacagtatcagcccgatatttgacaagg

SEQ ID NO: 47246 - DNA, 75 bp, synthetic construct
  source 1..75: mol_type = other DNA
cgcctatcttgccagcctgaaagagattcaggacaacgattacaaccttaatattccacgttatgttgatacttt

SEQ ID NO: 47247 - DNA, 75 bp, synthetic construct
  source 1..75: mol_type = other DNA
aaatcggtcaacaactctcctggacattaaccgcggacggcgaactgcagcgcctcacctgggaagtgtctcgtc

SEQ ID NO: 47248 - DNA, 75 bp, synthetic construct
  source 1..75: mol_type = other DNA
gagttttatgaggcagcagccagaaggagaatcagacaggtatttctggatgttgctgccaggttatgtgaatgg

SEQ ID NO: 47249 - DNA, 75 bp, synthetic construct
  source 1..75: mol_type = other DNA
atgcaggactgacccatctttaccggatgcgcgatgcgcagttgtggcgtcacatcgaatttcaccccgaatgca

SEQ ID NO: 47250 - DNA, 75 bp, synthetic construct
  source 1..75: mol_type = other DNA
gcggttatgcaacttagtgctgatatggctctgaatgaggccaaagctatcctgattgctgattgtgaaaatggg

SEQ ID NO: 47251 - DNA, 75 bp, synthetic construct
  source 1..75: mol_type = other DNA
aacatcattcatgacgaaaaactggtagatcaaacggcttgtattcttcatgagcttagaagaatcgctatagaa

SEQ ID NO: 47252 - DNA, 75 bp, synthetic construct
  source 1..75: mol_type = other DNA
agagccaggcgctgtcgtccgacgcttgatgccctgctcatgaaccgtgagttgtttgagcagtatgccagtcat

SEQ ID NO: 47253 - DNA, 75 bp, synthetic construct
  source 1..75: mol_type = other DNA
ggtctctataaccaccggcttaaaagtgtctgcctgacggcctgcgaagacagtagggtgggagaatctgaagga

SEQ ID NO: 47254 - DNA, 75 bp, synthetic construct
  source 1..75: mol_type = other DNA
ctccgggcaataaagttttactggtattggacgatgctactaatcacaagctcttaggtgcccgggagcgtagtg

SEQ ID NO: 47255 - DNA, 75 bp, synthetic construct
  source 1..75: mol_type = other DNA
tggcgaggtgaaatcctgccatgtaattccgcgtccgcacagtgacgtcgaggctattttaccgcattcagcata

SEQ ID NO: 47256 - DNA, 75 bp, synthetic construct
  source 1..75: mol_type = other DNA
tagaaaccaaaggcttaactgccgccatagaggccgcagacgccatggtgaagtcggcaaatgttttgctggtcg

SEQ ID NO: 47257 - DNA, 75 bp, synthetic construct
  source 1..75: mol_type = other DNA
gtcttaccgccgataaaggctacaccgttgccgatccgaatctcgacgaactgtatcaagtgtacagccagcgtg

SEQ ID NO: 47258 - DNA, 75 bp, synthetic construct
  source 1..75: mol_type = other DNA
atgaataacattgcgccgcaatcacctgtaatgcgtcgcctgacgttgcaggataatcctgctatcgcccgcgtc

SEQ ID NO: 47259 - DNA, 75 bp, synthetic construct
  source 1..75: mol_type = other DNA
cggcctgctggcagaagcgttcctcgaaaaaaatcccggcgcgaagatcatccacgatccgcgtctctcctggaa

SEQ ID NO: 47260 - DNA, 75 bp, synthetic construct
  source 1..75: mol_type = other DNA
tcttaaaatcttggttgaaaaatgttgggaaaattgccacatcaacacgagataagctcaatccatccatggatg

SEQ ID NO: 47261 - DNA, 75 bp, synthetic construct
  source 1..75: mol_type = other DNA
ctgaatatccgggaaagtgatttctggcagccgggaacccgtgccgtgatgttcagccagcctgccagccagtta

SEQ ID NO: 47262 - DNA, 75 bp, synthetic construct
  source 1..75: mol_type = other DNA
aacctgtgttctgtgcttatcaacgccatgcaggagcgtggcggcgcagacgtgctgcacggcgtgccgaaaata

SEQ ID NO: 47263 - DNA, 75 bp, synthetic construct
  source 1..75: mol_type = other DNA
catatcagccccccatgaactggcaaatattcttacccgcgaaaaaaatacttacaacacgggaaaaaaaaggaa

SEQ ID NO: 47264 - DNA, 75 bp, synthetic construct
  source 1..75: mol_type = other DNA
catcagcaataccagcccgaatctgtttaccgttcccggtgaccggattatcgccgtgaacagtctggatggtgc

SEQ ID NO: 47265 - DNA, 75 bp, synthetic construct
  source 1..75: mol_type = other DNA
gccctgccggaaaccccggcacagatggcggcaaaagaaactgaagcgctggttaccggtacagacaacgccgca

SEQ ID NO: 47266 - DNA, 75 bp, synthetic construct
  source 1..75: mol_type = other DNA
ccaataaccaggatcggtatgcattcaacgaagcggacatccgttatcacgaagcggtgctgaacgccgtgcata

SEQ ID NO: 47267 - DNA, 75 bp, synthetic construct
  source 1..75: mol_type = other DNA
catgactcacagtgagcaagaaaaagttgcgcaatttttgtcacgcgaaggaattcgtaattttcttgctcgtct

SEQ ID NO: 47268 - DNA, 75 bp, synthetic construct
  source 1..75: mol_type = other DNA
tggaacacagtctacctagaacgggcggtcaaagcgctgcgtgacacgggcaagaacattgacgagcgattatta

SEQ ID NO: 47269 - DNA, 75 bp, synthetic construct
  source 1..75: mol_type = other DNA
ggtgctgatggaacgcaagtaataaaaactagcaaaatacttgaaccaaaacttggatactatcttctttcaaat

SEQ ID NO: 47270 - DNA, 75 bp, synthetic construct
  source 1..75: mol_type = other DNA
actggcacaaagcatcgccggccttaagcagagtaaggctctgctggataaggaaatagcaatgacccggccaat

SEQ ID NO: 47271 - DNA, 75 bp, synthetic construct
  source 1..75: mol_type = other DNA
gccacagcaatccgaaaccactggcacgtggagaataagctgcactggcgtctggacgtggtaatgaatgaagac

SEQ ID NO: 47272 - DNA, 75 bp, synthetic construct
  source 1..75: mol_type = other DNA
tgatcccaccaaaacaatcatgcgcatgcctggagaacagatcggcaatggtcagtcttccccggcactacgccg

SEQ ID NO: 47273 - DNA, 75 bp, synthetic construct
  source 1..75: mol_type = other DNA
atcaataccggaaaggtggcctgctgccttccggaaaaaatatgcctgcactgcttcccgtgacgttaacgccgg

SEQ ID NO: 47274 - DNA, 75 bp, synthetic construct
  source 1..75: mol_type = other DNA
aaaaatataatttaagcatcttatccgaaatccctcagaacaataatactgttgtacattcaatcctcagggtta

SEQ ID NO: 47275 - DNA, 75 bp, synthetic construct
  source 1..75: mol_type = other DNA
gctattatggcgatactaaaagctatggtctgggtgggtatacgtccatcttctttgataacggtttttatactg

SEQ ID NO: 47276 - DNA, 75 bp, synthetic construct
  source 1..75: mol_type = other DNA
tgagcggctgacgctgctggaagcacaacttgccaccgtcaaccgcatggcggcagccaacgacctgccggatgc

SEQ ID NO: 47277 - DNA, 75 bp, synthetic construct
  source 1..75: mol_type = other DNA
gctttcccggcgtcatcctgggcgtcgatgaactaccgttcccgcccttgttgaagctggtcgccgaccagctca

SEQ ID NO: 47278 - DNA, 75 bp, synthetic construct
  source 1..75: mol_type = other DNA
ccattttgaaatatattgaggaaaatattgaagttatctcaattgatataaatgctcttgttgaatattcaggat

SEQ ID NO: 47279 - DNA, 75 bp, synthetic construct
  source 1..75: mol_type = other DNA
cgagagcaacttgctgcaggtgatgacccactggagattaaaaaggctgaagctgaaaaagttgttatcccaaca

SEQ ID NO: 47280 - DNA, 75 bp, synthetic construct
  source 1..75: mol_type = other DNA
tatcaggcgggtgtcattaaacgtgctctgcaaaactggcagcagcatatcgatgaaattacacaacgaagcgca

SEQ ID NO: 47281 - DNA, 75 bp, synthetic construct
  source 1..75: mol_type = other DNA
ctattgtcaaagtctggagcagattgaagatcgcatacttcaactcgaccaggaaatatctcgcctgttacctga

SEQ ID NO: 47282 - DNA, 75 bp, synthetic construct
  source 1..75: mol_type = other DNA
atggttatcaatacggataactattcctacgtgagtaaaaaatttctattctatactctgaatggcagtgatctg

SEQ ID NO: 47283 - DNA, 75 bp, synthetic construct
  source 1..75: mol_type = other DNA
acaagtagccattacggcggtggctcgtgagttgactggatttatgtgggatattgcacttgctgcccaatcatc

SEQ ID NO: 47284 - DNA, 75 bp, synthetic construct
  source 1..75: mol_type = other DNA
cgtgcatgccgggctgaacaagggcgaggcgcgcaatgcgctggcccgtgccgtgttcttcaaccgccttggtga

SEQ ID NO: 47285 - DNA, 75 bp, synthetic construct
  source 1..75: mol_type = other DNA
ggtgcattgaacagcggcaagatccggagatggcaaacgtgattttagtcaccgatgacgaaagttgcgggtatt

SEQ ID NO: 47286 - DNA, 75 bp, synthetic construct
  source 1..75: mol_type = other DNA
atgaacaaaaagacctggtttcgcgcatacatgtgggcgctggtatgcgtcctcgtctctctcattctgtatgca

SEQ ID NO: 47287 - DNA, 75 bp, synthetic construct
  source 1..75: mol_type = other DNA
tgaagggttttatgttgatgacagagcaatcagacccgatgaatttattaaattaagtataaatgagattaaatc

SEQ ID NO: 47288 - DNA, 75 bp, synthetic construct
  source 1..75: mol_type = other DNA
gaatgtagcacggtggtgagtgaacgtgtgggtgtggcgtttcacggtgtcgcggatggtaaaaatccggatgtg

SEQ ID NO: 47289 - DNA, 75 bp, synthetic construct
  source 1..75: mol_type = other DNA
ctcgcgctgttccggcaaaatggcgtggaactacagacgctggtctgttacgtactggcgataaccagacggcag

SEQ ID NO: 47290 - DNA, 75 bp, synthetic construct
  source 1..75: mol_type = other DNA
ggaatccggcgacgggcagttatagtgttgccagcgaaacggcaaagagccgtggtaagaaatctgggcgcagta

SEQ ID NO: 47291 - DNA, 75 bp, synthetic construct
  source 1..75: mol_type = other DNA
ctttcacaacgcgaaccctgtacgcggtatacgaaaactgaaagttcagaacacagagatggcctttctttctga

SEQ ID NO: 47292 - DNA, 75 bp, synthetic construct
  source 1..75: mol_type = other DNA
agcaagcgttacactcagcgcattgagcgacataacctgaatctgagacaacatctggcaaggctgggacggaag

SEQ ID NO: 47293 - DNA, 75 bp, synthetic construct
  source 1..75: mol_type = other DNA
agcagtgccaacggtattaactctgtcgcgctgggcgcagattccattgcggatttagacaataccgtctctgtc

SEQ ID NO: 47294 - DNA, 75 bp, synthetic construct
  source 1..75: mol_type = other DNA
gcaagagcaatgggtgacagaagtgtcgcgctgggtgcatcgtcagtagcaaatggcgatcgttcgatggctttt

SEQ ID NO: 47295 - DNA, 75 bp, synthetic construct
  source 1..75: mol_type = other DNA
atgcgcatcttcatcctcggcgcacttaatatttcgctattctggagcttgttgtttatttcggtctaccgcctg

SEQ ID NO: 47296 - DNA, 75 bp, synthetic construct
  source 1..75: mol_type = other DNA
gcgacctaattttccttatgagtttaaaatcgccttagtggagcagtcactgcagcccggagcctgtgtggcgca

SEQ ID NO: 47297 - DNA, 75 bp, synthetic construct
  source 1..75: mol_type = other DNA
ctcagtcgcagcccgactcggggctggtgctggcgtaaatggagatggaagtgtaaatgcgccaagctacaagct

SEQ ID NO: 47298 - DNA, 75 bp, synthetic construct
  source 1..75: mol_type = other DNA
gcctttacggacaattttccacggtaccagtcgtacgtcctgaaagcaccgttatatccgaagcccccgtggtaa

SEQ ID NO: 47299 - DNA, 75 bp, synthetic construct
  source 1..75: mol_type = other DNA
gagatggccgaacgcctgcgggaccagctgtccgtgatggccagccccaacggcaacctggacgaggtgcacgaa

SEQ ID NO: 47300 - DNA, 75 bp, synthetic construct
  source 1..75: mol_type = other DNA
accgttgtgtacagcatctttccgccatcgaaaccacgctgcaacagtgtgaactgtggcatatgacgaaactgg

SEQ ID NO: 47301 - DNA, 75 bp, synthetic construct
  source 1..75: mol_type = other DNA
gtgatggagatggaaaaccaggtcaaaatcatccgcgcctcgctgcagggggcgcagatagccacccgcagcgtg

SEQ ID NO: 47302 - DNA, 75 bp, synthetic construct
  source 1..75: mol_type = other DNA
gaaatttcgccgaagaccgtgagaaggcatccgacgcaggccgtaaaggcggtcagcatagcggcggtaatttta

SEQ ID NO: 47303 - DNA, 75 bp, synthetic construct
  source 1..75: mol_type = other DNA
aacatttggatgagagacgattgatgctgcagtggtgggcggattttctggatgcaaatcgcgagaaagggatta

SEQ ID NO: 47304 - DNA, 75 bp, synthetic construct
  source 1..75: mol_type = other DNA
taccgcaatgtgcttattgaagatgaccatggaacgcatttcctgctggttatccgcaatgccgaagggcagcta

SEQ ID NO: 47305 - DNA, 75 bp, synthetic construct
  source 1..75: mol_type = other DNA
ctggacaggaaaacatcgaacctggttagctaatcaatcatttagtcagccatctcaacagattgcttttcaaca

SEQ ID NO: 47306 - DNA, 75 bp, synthetic construct
  source 1..75: mol_type = other DNA
gtgaaccctggcgcttattgagcagtatctttctgcacagtagtgtttctcatctgctgatgaatatgtttgcat

SEQ ID NO: 47307 - DNA, 75 bp, synthetic construct
  source 1..75: mol_type = other DNA
aatcagtgaaaacaccgtaaataaagccctcagagttatggggtatgacacaacccaggatatctgtgggcatgg

SEQ ID NO: 47308 - DNA, 75 bp, synthetic construct
  source 1..75: mol_type = other DNA
ccaggctgtacgtcgattatttcagaaattgcagggactttacggaaacattctttcctgctatgaggctggccc

SEQ ID NO: 47309 - DNA, 75 bp, synthetic construct
  source 1..75: mol_type = other DNA
gtcccagcagaaagtctgtcaggacattgccggtgagagcaatatttttgctgactgggcggcttcccggcaggg

SEQ ID NO: 47310 - DNA, 75 bp, synthetic construct
  source 1..75: mol_type = other DNA
ggttgccccgccaacgtcatgattatgggcgttgatgtatggcgcatgttacgcagctttaaaaaattccgtgaa

SEQ ID NO: 47311 - DNA, 75 bp, synthetic construct
  source 1..75: mol_type = other DNA
cagggaacccaaaaacacctgaacaataccagttaaccaaaaaagctggagtggtctggctttatactgaagatg

SEQ ID NO: 47312 - DNA, 75 bp, synthetic construct
  source 1..75: mol_type = other DNA
atcgactgtgtgtcgttcaccaccgggcagtacagcaaacgctacggctttatctatgtgaataaacatgacgac

SEQ ID NO: 47313 - DNA, 75 bp, synthetic construct
  source 1..75: mol_type = other DNA
ttgcccgttgggcagcagagcgcgcgacctccagcgatctggcgcagattgaatcggcgctgaacgagatgattg

SEQ ID NO: 47314 - DNA, 75 bp, synthetic construct
  source 1..75: mol_type = other DNA
tcgttgctgtcagtaaagacgtttcaactattaatcctgaagggctaagcatagttgaagttcctgatattacgg

SEQ ID NO: 47315 - DNA, 75 bp, synthetic construct
  source 1..75: mol_type = other DNA
atccaaaccatgaagccgttgatttttatggtcactacaaggaagacatcaagctatttgccgaaatgggcttca

SEQ ID NO: 47316 - DNA, 75 bp, synthetic construct
  source 1..75: mol_type = other DNA
gtggatgggaaaaaatacacctatgatttgggcagcactgctgtcataggtacaacacatgtcagttatcaatac

SEQ ID NO: 47317 - DNA, 75 bp, synthetic construct
  source 1..75: mol_type = other DNA
cgattaccagaagcgcattaatgcgctgacctctttgacggaagacgcccaggcagcaaacgataagtcagcgat

SEQ ID NO: 47318 - DNA, 75 bp, synthetic construct
  source 1..75: mol_type = other DNA
tatttactacttctattgcccacatcagaaagcaggaaacttattaaaacattgcaaacaaaaattaaaaaaagg

SEQ ID NO: 47319 - DNA, 75 bp, synthetic construct
  source 1..75: mol_type = other DNA
gcagtggggcgagcgttttccgtcactggccggaatggaacgctggcagtggcaggatatgccattctggcaggt

SEQ ID NO: 47320 - DNA, 75 bp, synthetic construct
  source 1..75: mol_type = other DNA
aacgttggcggttgctattgctgtacctgaacggcttggcgaagttcgttattatggtacgattaacagacagaa

SEQ ID NO: 47321 - DNA, 75 bp, synthetic construct
  source 1..75: mol_type = other DNA
agcgcgctgtcaggctgaatatggcaacagatgaggagcgcagtcgactggaggcatgggaacgctacagcgttc

SEQ ID NO: 47322 - DNA, 75 bp, synthetic construct
  source 1..75: mol_type = other DNA
atgactggcaatatccatgataagtatgaaggcttatgcctggcaccggattcctttgcaaacaatatccataat

SEQ ID NO: 47323 - DNA, 75 bp, synthetic construct
  source 1..75: mol_type = other DNA
aaaatcgtatttcagaccctgaatgccccgttaactccggctcacagggatgccctggatcatttacttgagtca

SEQ ID NO: 47324 - DNA, 75 bp, synthetic construct
  source 1..75: mol_type = other DNA
tgaaagctttttctctgacagtaaagattcaggaatggaatacatttcaggcaaacagagataccgcgattcact

SEQ ID NO: 47325 - DNA, 75 bp, synthetic construct
  source 1..75: mol_type = other DNA
gagaatatgacatcaggtggactaatttatgccgtatctggtgtacctggattgattgctgcaaacagcattact

SEQ ID NO: 47326 - DNA, 75 bp, synthetic construct
  source 1..75: mol_type = other DNA
cttctacagccttgcatcgcttaatcagcgtattcgggagttgctggaaagactgaataacaaaataatgcagaa

SEQ ID NO: 47327 - DNA, 75 bp, synthetic construct
  source 1..75: mol_type = other DNA
cagacaaacgttatgcagggaagcactggaccggcaaacatcgaacctggttagccaatcaatcatttagtcagc

SEQ ID NO: 47328 - DNA, 75 bp, synthetic construct
  source 1..75: mol_type = other DNA
gagaacccgcatcacctgcaccagccgtaccggctgccggggcagcagtatgataaggagtcggggctgtactaa

SEQ ID NO: 47329 - DNA, 75 bp, synthetic construct
  source 1..75: mol_type = other DNA
atgaaccaaaaaatttcatctctgctccggcagacaacactgtcatgccttgtggctgcagttctggttattcct

SEQ ID NO: 47330 - DNA, 75 bp, synthetic construct
  source 1..75: mol_type = other DNA
tcgaaggtatttgtctggcatcggattcatttgcaataaacattcatagtctgttgtgcgctgcgcaagttttac

SEQ ID NO: 47331 - DNA, 75 bp, synthetic construct
  source 1..75: mol_type = other DNA
tgagcagcagggaacgcggccggtgctgattgtcacaccggcggcctttaatcgcgtgacccgcctgcctgttgt

SEQ ID NO: 47332 - DNA, 75 bp, synthetic construct
  source 1..75: mol_type = other DNA
gtttacctgaagtattaaatagaacgggcctttgtaaagcttggatctatcgcctgattagtcgtaatgaattcc

SEQ ID NO: 47333 - DNA, 75 bp, synthetic construct
  source 1..75: mol_type = other DNA
gacgtccactgctcagtcttatcttgagaacgtcttgtcgccttatggttctgtcagaaccagcttgtctatagg

SEQ ID NO: 47334 - DNA, 75 bp, synthetic construct
  source 1..75: mol_type = other DNA
ggactgacccttcatccttcttcagtaaaggggcgggggaaatgggtttttcgttatgtaagtccggtgacacaa

SEQ ID NO: 47335 - DNA, 75 bp, synthetic construct
  source 1..75: mol_type = other DNA
ccaaccgccgcgctgatgattcaggaaagtggatgtttaaggatggagctgtagttaaacggatttatacggcag

SEQ ID NO: 47336 - DNA, 75 bp, synthetic construct
  source 1..75: mol_type = other DNA
cgtgattggcgcgttcacgatgattacaaccgtttccgcgattctgtttatgttcgtctggacgattatcctttg

SEQ ID NO: 47337 - DNA, 75 bp, synthetic construct
  source 1..75: mol_type = other DNA
atcctctggagattaaaaaggctgaatctgagaaagtcgctatcccaacatttgccgatgcagccaggcgtgtac

SEQ ID NO: 47338 - DNA, 75 bp, synthetic construct
  source 1..75: mol_type = other DNA
caaaagggctgaccgggtttaattacccggttatgtctgatggttcgctactcctgccgctggtggatgaatccg

SEQ ID NO: 47339 - DNA, 75 bp, synthetic construct
  source 1..75: mol_type = other DNA
cggccccgagtcagccgtctcggtgaaggcacgctgattacattgcgctgtataaacggcagcaccgatgaacgc

SEQ ID NO: 47340 - DNA, 75 bp, synthetic construct
  source 1..75: mol_type = other DNA
agtacgattttgttggcgcgtggtgtcacgatgaagatggcggtttgctacacgttgccaaccaccatatcgcgc

SEQ ID NO: 47341 - DNA, 75 bp, synthetic construct
  source 1..75: mol_type = other DNA
gctgaccaccaccggtcagacgttgctgacccgccagacgcgccgctttcgcctggtggtgaaggaaagcgatca

SEQ ID NO: 47342 - DNA, 75 bp, synthetic construct
  source 1..75: mol_type = other DNA
tcatgattttctgcgtagctcactgaccggggaaattttcgcaaccaaccgtgagcaggtggaagcgatgatcga

SEQ ID NO: 47343 - DNA, 75 bp, synthetic construct
  source 1..75: mol_type = other DNA
atgtatattgtctagcaaatgatttttccactgaagatcttaaagtactttcgtcatggggcgttaagggggtta

SEQ ID NO: 47344 - DNA, 75 bp, synthetic construct
  source 1..75: mol_type = other DNA
aatcaacgtagaagccgcgctggccgatgagtcctcggtgttttacacctaccaaaagttaatcgcactgcgtaa

SEQ ID NO: 47345 - DNA, 75 bp, synthetic construct
  source 1..75: mol_type = other DNA
tgacattacagcgtaaatatccggatatttcaccgtcacaccttgatgtggtgaaaactgaaatcgcgaaagcct

SEQ ID NO: 47346 - DNA, 75 bp, synthetic construct
  source 1..75: mol_type = other DNA
aagtctgtgagttctgggccgatcgtggggtcgacgggttgcgcctggatgtggtgaatctgatctccaaagacc

SEQ ID NO: 47347 - DNA, 75 bp, synthetic construct
  source 1..75: mol_type = other DNA
cgaggagttccgttggatccagtatcgggcgcagtacctgaaaggcgaagcaaaagttcaaataactttcgcaga

SEQ ID NO: 47348 - DNA, 75 bp, synthetic construct
  source 1..75: mol_type = other DNA
atgaaactggccctgacgttggaagccgacagcattaatgtgcaggcactgaacatggggcgaattgtcgttgat

SEQ ID NO: 47349 - DNA, 75 bp, synthetic construct
  source 1..75: mol_type = other DNA
agtcggtgcggtgagcggtgaacttatcgcaggtgcaatcgcgaaggttttatatccggatgagaaagacctgtc

SEQ ID NO: 47350 - DNA, 75 bp, synthetic construct
  source 1..75: mol_type = other DNA
ttgcgacggaggccatccactggcctgagagagtggatacacacaaaaaggcgaatgcctttgccggcagcgccc

SEQ ID NO: 47351 - DNA, 75 bp, synthetic construct
  source 1..75: mol_type = other DNA
atgcgtgatgatcgttttaattccctgaaacaagaattttccggcgttcctgatgatgcggctgatgcgctttcg

SEQ ID NO: 47352 - DNA, 75 bp, synthetic construct
  source 1..75: mol_type = other DNA
aagctgatgctagactcaggtggtaaagggaactggagcaaagagctaaataacccacagccgaataaagtttat

SEQ ID NO: 47353 - DNA, 75 bp, synthetic construct
  source 1..75: mol_type = other DNA
cgtgcaggcggacagatgggcgaacagtggttccgtgctggcaaccggtaaccttactgcttcggcaaccggtca

SEQ ID NO: 47354 - DNA, 75 bp, synthetic construct
  source 1..75: mol_type = other DNA
tgctctctaaatgggtgcgtatcgccgtagaaggcgcaacctgcgacaagcgcactattgaacgccagtggatcg

SEQ ID NO: 47355 - DNA, 75 bp, synthetic construct
  source 1..75: mol_type = other DNA
ccaggttgaagcaactcttagtcctaatgtaaaggatagaaatggctatcaacaatgtaaagcaggtaagtgtgg

SEQ ID NO: 47356 - DNA, 75 bp, synthetic construct
  source 1..75: mol_type = other DNA
ctgctaaatttaaagtagtatattcgatagatggaggtcgcccgattgaaaaagtatttaacaatgcacccggag

SEQ ID NO: 47357 - DNA, 75 bp, synthetic construct
  source 1..75: mol_type = other DNA
gcaaaagacaatgaccattaccgctgcggaatattttgattcattccctgacatggggcggaaaaatgccgaggt

SEQ ID NO: 47358 - DNA, 75 bp, synthetic construct
  source 1..75: mol_type = other DNA
gctgaccacaaccggtcagacgttactgacccgccagacgcgccgctttcgcctggtcgtgaaggaaagcgatca

SEQ ID NO: 47359 - DNA, 75 bp, synthetic construct
  source 1..75: mol_type = other DNA
tatctggggcgacaccgtcgtcgaatgtgtgcttaacaaactctgcccttcgcatacctacgtaatttttaaata

SEQ ID NO: 47360 - DNA, 75 bp, synthetic construct
  source 1..75: mol_type = other DNA
aacccctgctggataaggtggcagcatcagtctgtgatgatgaaacccgtcccctgacggattttgtcagtgtcc

SEQ ID NO: 47361 - DNA, 75 bp, synthetic construct
  source 1..75: mol_type = other DNA
cggtatggatgtcaccctggcccatccggaaggctacgacctgatcccggatgtcgttgaagttgctaaaaacaa

SEQ ID NO: 47362 - DNA, 75 bp, synthetic construct
  source 1..75: mol_type = other DNA
gagaatccgatggtattacaacaacaggacgtatgctctatcgaaacttgaaaatcacctcagctttagacgaaa

SEQ ID NO: 47363 - DNA, 75 bp, synthetic construct
  source 1..75: mol_type = other DNA
tcatgaacctgtttatcgatggggtgagttatctcggcgtcgtgcagtccgtcacgctgccgaaattaacccgca

SEQ ID NO: 47364 - DNA, 75 bp, synthetic construct
  source 1..75: mol_type = other DNA
ctcggaactggtggaaatcgacaccgtgaacctcatcgaaaaagtgaacggcaccgacatgctcgaggcgcaccg

SEQ ID NO: 47365 - DNA, 75 bp, synthetic construct
  source 1..75: mol_type = other DNA
ccagcgtgacgataccggcgaaacggtggccgtcgaagtggtcatgcgtggacgtcagaaagaaatcgacaccgg

SEQ ID NO: 47366 - DNA, 75 bp, synthetic construct
  source 1..75: mol_type = other DNA
cgtctggttcacctggatttagagtacagaaatggcaggtacagcctcagacgacagagcagcccgggtgcgatc

SEQ ID NO: 47367 - DNA, 75 bp, synthetic construct
  source 1..75: mol_type = other DNA
aaactcatcaaggacaaaagcgcatggagcgaatctttctgattcatgctcgagcgccatattttcgtgctctct

SEQ ID NO: 47368 - DNA, 75 bp, synthetic construct
  source 1..75: mol_type = other DNA
gtatgtgatcccaaacataagcacgggaatgatagccgctatcaggctggtgggcaattaccttgcttgttgggg

SEQ ID NO: 47369 - DNA, 75 bp, synthetic construct
  source 1..75: mol_type = other DNA
cggctttctgatccgcattattgagtggtggcagaccggagaagcacccggcacgtttcgcctggatatcggcgt

SEQ ID NO: 47370 - DNA, 75 bp, synthetic construct
  source 1..75: mol_type = other DNA
tgggagctgccagctatcttggcgaagaaatcacgatttatccgtatatcaacgaaacaattatttctggcggca

SEQ ID NO: 47371 - DNA, 75 bp, synthetic construct
  source 1..75: mol_type = other DNA
ccgcactggcgcgaagggcaaagtggatatcacggccagtgggaaactgaccagtacaggttcgctggtgagcga

SEQ ID NO: 47372 - DNA, 75 bp, synthetic construct
  source 1..75: mol_type = other DNA
agggaacttccggacaatgccggtgcagaccgtcaccgcgaccactccgtccggcagcagacctgcggtgacagc

SEQ ID NO: 47373 - DNA, 75 bp, synthetic construct
  source 1..75: mol_type = other DNA
ttctctgtggatcgctgggacgagagctggacggaaagcgtcaaacgacaggtggtgaaggatgctttttatatt

SEQ ID NO: 47374 - DNA, 75 bp, synthetic construct
  source 1..75: mol_type = other DNA
gtacctcacaccacggcgctgatggtttttatcctttgggttctatgccgcgccgctttagttcagtgcgcccca

SEQ ID NO: 47375 - DNA, 75 bp, synthetic construct
  source 1..75: mol_type = other DNA
ggaaccggtactacgatccgttgcaggggcggtatatcactcaggacccgatagggctggagggggggatggagt

SEQ ID NO: 47376 - DNA, 75 bp, synthetic construct
  source 1..75: mol_type = other DNA
tcgaagaccttgatctcacctggacattggtggcaaacggctaccgtattcggcaggcgaatcgctgcatcgtat

SEQ ID NO: 47377 - DNA, 75 bp, synthetic construct
  source 1..75: mol_type = other DNA
tggagtgaatccagattaaacatctcattgctgatgcttgaggttaaacatctggcgcgcggtaaggggctgcgt

SEQ ID NO: 47378 - DNA, 75 bp, synthetic construct
  source 1..75: mol_type = other DNA
agcggaaaaaacagtgattttggtgaagcagtatcacagctggctgcgcttgccgccgcaggtaaggatgttgcc

SEQ ID NO: 47379 - DNA, 75 bp, synthetic construct
  source 1..75: mol_type = other DNA
caagccctgaagcactgcaacaatcaatgcgcgacattcagcaatataccgacaattacaaccagcaatataacg

SEQ ID NO: 47380 - DNA, 75 bp, synthetic construct
  source 1..75: mol_type = other DNA
atctcaaacccaaagataaactttacaaagtcaatgaccgtgatggcctctatgttgccgtcacaaccgcagggt

SEQ ID NO: 47381 - DNA, 75 bp, synthetic construct
  source 1..75: mol_type = other DNA
accattggcagcagtaagacaacgcacgaccgccgcgaggccgggacaacgcagagtcagagtgccagcaccatc

SEQ ID NO: 47382 - DNA, 75 bp, synthetic construct
  source 1..75: mol_type = other DNA
caagaaaatcccggataacgacaccctgacgaagcgcgtccgcgaggaaatcgccgcgcaactgaagaacaaaca

SEQ ID NO: 47383 - DNA, 75 bp, synthetic construct
  source 1..75: mol_type = other DNA
atcaggagccggtgcagaatatgccagggcaacaatctactactggcagtaacttttcttcactatggggtgatt

SEQ ID NO: 47384 - DNA, 75 bp, synthetic construct
  source 1..75: mol_type = other DNA
ggcaaaaatttatcaccaccatgccggaaaccggcaatcagaatccgcatcatacgttgtttgccgggagtttat

SEQ ID NO: 47385 - DNA, 75 bp, synthetic construct
  source 1..75: mol_type = other DNA
ctctcagctccttccttccccgacacactgcccggtacggaatacggcgctgacagcggtatccgtctttcggcg

SEQ ID NO: 47386 - DNA, 75 bp, synthetic construct
  source 1..75: mol_type = other DNA
tgcaggcgctaaccggataactgcagatggtcgcgtcagtgccctgaagggcgaaggtaatgtgccgaaagttgc

SEQ ID NO: 47387 - DNA, 75 bp, synthetic construct
  source 1..75: mol_type = other DNA
cagcggcagcaatctcaacctgcacaggtatcacagccagcagccagcagtaacttttcttcactatggggtgat

SEQ ID NO: 47388 - DNA, 75 bp, synthetic construct
  source 1..75: mol_type = other DNA
gtgggtattacgtttttctggcccgggcagggggccgggcacagtgaagcggtcatgaacaccgagctgggctgg

SEQ ID NO: 47389 - DNA, 75 bp, synthetic construct
  source 1..75: mol_type = other DNA
tatcgccgatgtgggccacgacctgctgataagcagccagcaggacaccagtaagtacgacagtaaacagaccag

SEQ ID NO: 47390 - DNA, 75 bp, synthetic construct
  source 1..75: mol_type = other DNA
cagcttcggggataaatttcagggtaacatgccgggtggcatgatatccgccggaggtcacagcggacatgcgga

SEQ ID NO: 47391 - DNA, 75 bp, synthetic construct
  source 1..75: mol_type = other DNA
gcgaaggtgatgtgccgaaagttgccgttgacaccggcgcgctcggtggaatgtacgccaggcgtattcatctga

SEQ ID NO: 47392 - DNA, 75 bp, synthetic construct
  source 1..75: mol_type = other DNA
ggtgaactgactgccgggcagaacgccatgctcagtgcacagcacctgaaccagacttccgggaccgtgaatgca

SEQ ID NO: 47393 - DNA, 75 bp, synthetic construct
  source 1..75: mol_type = other DNA
cagcaaggaaactctcactgctgcacgacatacaccggaaaaagatatcctggaagaagttaaccgcgaactgtc

SEQ ID NO: 47394 - DNA, 75 bp, synthetic construct
  source 1..75: mol_type = other DNA
ctggatatccgcatcccgtataccacagacccggcaggtaaccgcctgcccgacccggagctgcacccggacagc

SEQ ID NO: 47395 - DNA, 75 bp, synthetic construct
  source 1..75: mol_type = other DNA
ttttataatacttttaaggagaatttgttttttgttgagattgtctcgtgctgttttcttgttgagctttttcat

SEQ ID NO: 47396 - DNA, 75 bp, synthetic construct
  source 1..75: mol_type = other DNA
gagaacgtgaaagaagaaggcgaaagcacgggacagtttataaacgcagccatgcgcggcgaaatcaaacgccgc

SEQ ID NO: 47397 - DNA, 75 bp, synthetic construct
  source 1..75: mol_type = other DNA
ttaaatgaagcattgccaagaaagataaaaggacccaaaagtaagaaaaaattagtaaaagaaagagaaatcatt

SEQ ID NO: 47398 - DNA, 75 bp, synthetic construct
  source 1..75: mol_type = other DNA
gctgtcaccggtggtggactgcttcgatggaaaagttgtgagctggtctctcagtacacgccccgatgctgaact

SEQ ID NO: 47399 - DNA, 75 bp, synthetic construct
  source 1..75: mol_type = other DNA
tgaagcatcagtggcgtcctggaataggtggttttgtcgaccttaattgtggatggtattgccaggatgctttgc

SEQ ID NO: 47400 - DNA, 75 bp, synthetic construct
  source 1..75: mol_type = other DNA
ctgcagaggcagtgaaggacgtcattcgctctgaagaagtcagaagcgcactgaaacagaaacttcgccagaatc

SEQ ID NO: 47401 - DNA, 75 bp, synthetic construct
  source 1..75: mol_type = other DNA
acgccgtcgcggatggtatgaggaagacgtaatcgcatggatgaaagaacgtgagcaggaagcacgcggaacggc

SEQ ID NO: 47402 - DNA, 75 bp, synthetic construct
  source 1..75: mol_type = other DNA
tgatgttaaacttttaataaagctagatcgtgaattatatgcaataagcagcaaaatagagaatccgttagcctt

SEQ ID NO: 47403 - DNA, 75 bp, synthetic construct
  source 1..75: mol_type = other DNA
ccccgctggcgcggggaacactgaaggtgctgaagaatatcggattcagaacgcggtttatccccgctggcgcgg

SEQ ID NO: 47404 - DNA, 75 bp, synthetic construct
  source 1..75: mol_type = other DNA
aaactgatcctcgcgggtatcgcgctgtcggccttttgtatgggccttacccgcatcaccctgctgctggccgaa

SEQ ID NO: 47405 - DNA, 75 bp, synthetic construct
  source 1..75: mol_type = other DNA
ttcttacaagccgttgccttcactgtgaaaataaatttcttatggaaaaaaatccgatgtacgaacgaccaagat

SEQ ID NO: 47406 - DNA, 75 bp, synthetic construct
  source 1..75: mol_type = other DNA
cacagagtcattcatgaacaagccgaaagacattctttcaccggatgcgccgtttatccagaccggcagggatgt

SEQ ID NO: 47407 - DNA, 75 bp, synthetic construct
  source 1..75: mol_type = other DNA
atccgccgcgctctcgagcagggacataacgactaccccatgatatccgggtatacccggtttatgatcaacccg

SEQ ID NO: 47408 - DNA, 75 bp, synthetic construct
  source 1..75: mol_type = other DNA
cacgtcttcggtgaacgcactctggccacactggagcgtcttctgagcctgctgtcggcctttgaggtcgtggta

SEQ ID NO: 47409 - DNA, 75 bp, synthetic construct
  source 1..75: mol_type = other DNA
agacgccgggtgcagtgtttgaaggcacgtatatcgttctgcccgcgaagccatttggcccgtatgaagagggcg

SEQ ID NO: 47410 - DNA, 75 bp, synthetic construct
  source 1..75: mol_type = other DNA
agcgggcacattatcaggcaatgccccagcttcccgaagtgtcctcgatgctgggccataccagtctcagggatg

SEQ ID NO: 47411 - DNA, 75 bp, synthetic construct
  source 1..75: mol_type = other DNA
ttctgtctcgatggcgaatgcgataaggctcagagcgggcagagtaatgattttgccgaagccgtttctcagctg

SEQ ID NO: 47412 - DNA, 75 bp, synthetic construct
  source 1..75: mol_type = other DNA
ctttatgatgttcgcctcctgtacgtctgctgccgtactgttctggggatcgattgagatctactactacatctc

SEQ ID NO: 47413 - DNA, 75 bp, synthetic construct
  source 1..75: mol_type = other DNA
tgacagatcccaatgcggctgtttatacctttgccgggcatgtctttaactgggttggtgttacgcacattatct

SEQ ID NO: 47414 - DNA, 75 bp, synthetic construct
  source 1..75: mol_type = other DNA
atgaacgtttatgaccgggtcatacctaatcgatcctgggaaacgttatggatgctgagtatcggagtgattgca

SEQ ID NO: 47415 - DNA, 75 bp, synthetic construct
  source 1..75: mol_type = other DNA
gagcaggacgctgtaaataatcgctcaatgcgtaattatgtcgatgctgcaatcgccggagttattggtggtttt

SEQ ID NO: 47416 - DNA, 75 bp, synthetic construct
  source 1..75: mol_type = other DNA
gtccgcataactcacgcctcgataccagcaagttccagcgcaccttcgggatgacgctgccggactggactatcg

SEQ ID NO: 47417 - DNA, 75 bp, synthetic construct
  source 1..75: mol_type = other DNA
gtagctataccacgttacagcgtgttgcggggatcagtcgtacggggatgcagataaatcgccattcgttgacta

SEQ ID NO: 47418 - DNA, 75 bp, synthetic construct
  source 1..75: mol_type = other DNA
gtgaagagcatttttgaaggattatcacaggtaacggcattactgggtacacctgtatctgctgagacgctggct

SEQ ID NO: 47419 - DNA, 75 bp, synthetic construct
  source 1..75: mol_type = other DNA
agcaactgccgtgggctactactccaaagcgttaggtatgtggagtactgcgttaggtgcatatagcgaatcgaa

SEQ ID NO: 47420 - DNA, 75 bp, synthetic construct
  source 1..75: mol_type = other DNA
gcggtctggggctgtcaggaggacagaggcagatggttgccctgacgagaatggtactgggttctccccgggtgg

SEQ ID NO: 47421 - DNA, 75 bp, synthetic construct
  source 1..75: mol_type = other DNA
agggcgtcggcagcccggcattcttcgggctgggtggcggcactgacagcggtgacgatgacaccattctggttg

SEQ ID NO: 47422 - DNA, 75 bp, synthetic construct
  source 1..75: mol_type = other DNA
aaacactgcctccctcagcaatccgggaaaaatcatcgctgacacgctgaacgtcagggcgaccacgctggatgg

SEQ ID NO: 47423 - DNA, 75 bp, synthetic construct
  source 1..75: mol_type = other DNA
gcggttaacggctctcagttgtatgacctgcagcaggatgctctgttgtggaacggcacagcattcagtgccgcg

SEQ ID NO: 47424 - DNA, 75 bp, synthetic construct
  source 1..75: mol_type = other DNA
gttctggcgggtactgtggcggttcaggccatattacggacaggtcattcttgcgagttttatcattaactttct

SEQ ID NO: 47425 - DNA, 75 bp, synthetic construct
  source 1..75: mol_type = other DNA
tctcaattgtacgacctgcagcaggatgccctgttgtggaacggcacagcattcagtgccgcacacggcaccgaa

SEQ ID NO: 47426 - DNA, 75 bp, synthetic construct
  source 1..75: mol_type = other DNA
gacaggaagcgctattaagtaaaacctattactctgtcggcggcgggtttattgtcgaagaagaacacttcggcc

SEQ ID NO: 47427 - DNA, 75 bp, synthetic construct
  source 1..75: mol_type = other DNA
ttactttcagagaatttcgaactgctggaggactggagcgagcaactaccgcggcttaaagaaacctgggaacgc

SEQ ID NO: 47428 - DNA, 75 bp, synthetic construct
  source 1..75: mol_type = other DNA
gtgtggcggcgggagcgtgacctgacggggtggatgtcgctgtcgcgtaaaccggaggagacctggtacgggtgg

SEQ ID NO: 47429 - DNA, 75 bp, synthetic construct
  source 1..75: mol_type = other DNA
cgagcggcttaaactcgattgccctgggcaagaccagtgttgtcactggcgataatagtcttgcgcttggtagta

SEQ ID NO: 47430 - DNA, 75 bp, synthetic construct
  source 1..75: mol_type = other DNA
gtggtggtcgccgacgggcgtatcgcctggcagggtaagaccgatgagttgttgagcggtaaggcgagtgcttcg

SEQ ID NO: 47431 - DNA, 75 bp, synthetic construct
  source 1..75: mol_type = other DNA
atgcaccctggttcagacctggtagggaaggttgaaatgactgagtggttagttgactttgctgcccagcttcgc

SEQ ID NO: 47432 - DNA, 75 bp, synthetic construct
  source 1..75: mol_type = other DNA
gcagtggacatttcaggtcggggaccttgaaaacttcaatatcactcactgggcagtaatgccaaaagcgccgga

SEQ ID NO: 47433 - DNA, 75 bp, synthetic construct
  source 1..75: mol_type = other DNA
ttaacgcttacctgcagcaactggcgcgtctgaacggtgtggcagttgaggaactgtccagcaagttcaccgtag

SEQ ID NO: 47434 - DNA, 75 bp, synthetic construct
  source 1..75: mol_type = other DNA
ttctgtaaaagtatccgatctgtccaatagcctcaatgtaacgaaagaaactattcgatcagatcttaatgaact

SEQ ID NO: 47435 - DNA, 75 bp, synthetic construct
  source 1..75: mol_type = other DNA
tggcagcaaacagctatccaggccgcattacgtgcgaactggatcagacaggccgcgcagcgaactatttatcgg

SEQ ID NO: 47436 - DNA, 75 bp, synthetic construct
  source 1..75: mol_type = other DNA
ttagctgacttgcctgaagaaagacaggagtctagtcaatcttggttagcgagtggcatcaaaaaactgattaaa

SEQ ID NO: 47437 - DNA, 75 bp, synthetic construct
  source 1..75: mol_type = other DNA
ctggtgaaaaattgaaccttgttccaatggatggaaatctgaacaaaggagcctggaagcagatggaaaatactt

SEQ ID NO: 47438 - DNA, 75 bp, synthetic construct
  source 1..75: mol_type = other DNA
cctgaaaacatcctgaaaatcgtcaaagaatggcggcgttcacaggggctacccttgtttaaagactctaaataa

SEQ ID NO: 47439 - DNA, 75 bp, synthetic construct
  source 1..75: mol_type = other DNA
ctgaagccatccgaaataccaacactgctcggatataccgccagcttggttgataaaaaatggttgcgactggca

SEQ ID NO: 47440 - DNA, 75 bp, synthetic construct
  source 1..75: mol_type = other DNA
gcgtctgaacggtgtggcagttgaagaactgtccagcaaattcaccgtagagccgtctgtacagcagacgctgga

SEQ ID NO: 47441 - DNA, 75 bp, synthetic construct
  source 1..75: mol_type = other DNA
cgaaatacaaagcggcggcggggaagcaaaccattctgctggattattcacgcgcagaagtgaacgagatgcaga

SEQ ID NO: 47442 - DNA, 75 bp, synthetic construct
  source 1..75: mol_type = other DNA
aacatttcctgaaggaatgtcgatccttgtcaacccagataaagaagttttttcagggtgttacgtcatcgccag

SEQ ID NO: 47443 - DNA, 75 bp, synthetic construct
  source 1..75: mol_type = other DNA
tgaagcagacaattaaaaaactatggttcagggcaacgttattcgcaattgtcgcgataataacggcccttttat

SEQ ID NO: 47444 - DNA, 75 bp, synthetic construct
  source 1..75: mol_type = other DNA
accgcgcacgaatgcccggcattatcaggatcccgccggacggctgtatcaccggaggctcgcacatttactgac

SEQ ID NO: 47445 - DNA, 75 bp, synthetic construct
  source 1..75: mol_type = other DNA
cataggcagttctgacacgacacttccccgcctgcagggaaatacggcgtcacttcctgaactgaaggcttcagg

SEQ ID NO: 47446 - DNA, 75 bp, synthetic construct
  source 1..75: mol_type = other DNA
acttataattctgaacttgatatagctaagtgtttgcaatcggtaactaatcaatcttataagaatattgaaatc

SEQ ID NO: 47447 - DNA, 75 bp, synthetic construct
  source 1..75: mol_type = other DNA
tcaacagacgaaggcacctgggttatcacctcgtttggcgtagcaaatgccattgcgatccctgttaccggcagg

SEQ ID NO: 47448 - DNA, 75 bp, synthetic construct
  source 1..75: mol_type = other DNA
tatcaaacagaccaccccggacggagcagggcgtgtagcagctcatgcagtagtgaatgcagccctgtctctggc

SEQ ID NO: 47449 - DNA, 75 bp, synthetic construct
  source 1..75: mol_type = other DNA
tagaatcattgcaacgtgaggttgatgatttccatccagtgctaagagcgcttctaccacgtttgccgactgtta

SEQ ID NO: 47450 - DNA, 75 bp, synthetic construct
  source 1..75: mol_type = other DNA
ggcaaagccactgtggatggcatccaactgcgctttaccggctctatccagcgtgacgataccggggaagtgcag

SEQ ID NO: 47451 - DNA, 75 bp, synthetic construct
  source 1..75: mol_type = other DNA
caacacaccggatgatggtggcaatacccctgacgatggtgggaatactcctgacgatggcggcaacacaccgga

SEQ ID NO: 47452 - DNA, 75 bp, synthetic construct
  source 1..75: mol_type = other DNA
atgatgaagcgcaatattctggcagtgatcgtccctgctctgttagtagcaggtactgcaaacgctgcagaaatc

SEQ ID NO: 47453 - DNA, 75 bp, synthetic construct
  source 1..75: mol_type = other DNA
cgcaaaattgttaatatggctgctggtgccataagcaacaccagtaccgatgccatcaacggctcacagctttat

SEQ ID NO: 47454 - DNA, 75 bp, synthetic construct
  source 1..75: mol_type = other DNA
acatgcgaaaaacggattgctaattggttagctgttgctgagtatgtcctatatattcccatgcgtgaatcattt

SEQ ID NO: 47455 - DNA, 75 bp, synthetic construct
  source 1..75: mol_type = other DNA
gagcgcacaacgtgttagtaaccagtgcggttaataacaatggagttacagaactttttgccttgctgcatacag

SEQ ID NO: 47456 - DNA, 75 bp, synthetic construct
  source 1..75: mol_type = other DNA
gcgttgattattgatcgcgttatcagtgaggtgcttggggaatatcccgggctaatcaatgttctccggcaaagg

SEQ ID NO: 47457 - DNA, 75 bp, synthetic construct
  source 1..75: mol_type = other DNA
ggttatgaagggaaatacctgatgatccacggcgattgtgtttccatcggctgctacgcgatgaccaatcagggt

SEQ ID NO: 47458 - DNA, 75 bp, synthetic construct
  source 1..75: mol_type = other DNA
cctgaacgcacggatgaagagctgatgcatctgggggaaggtatatcgggaggaatgagatttggaccagattgc

SEQ ID NO: 47459 - DNA, 75 bp, synthetic construct
  source 1..75: mol_type = other DNA
tgcagtacgaagcatctgttaccaggtggcagacgatgcgcggcgtatccgggcggcgctgaccaccaccggtca

SEQ ID NO: 47460 - DNA, 75 bp, synthetic construct
  source 1..75: mol_type = other DNA
gccgctcgggtatctgattaacgtgacggagtggtgggagacgaacgacccgccgggcacgtttcgccttgatat

SEQ ID NO: 47461 - DNA, 75 bp, synthetic construct
  source 1..75: mol_type = other DNA
acactttgacgtgggtcgcaaggtgaggcaaaccattcaggaacttggcggaaccatgcctgaggagttgccgac

SEQ ID NO: 47462 - DNA, 75 bp, synthetic construct
  source 1..75: mol_type = other DNA
atggctttaccacgcaaattaaaacatctgaacctgtttaacgacgggaacaactggcaggggatcgtagagtcg

SEQ ID NO: 47463 - DNA, 75 bp, synthetic construct
  source 1..75: mol_type = other DNA
tgggctcgtcgccgcttgaggtggcggcggcgcgcgcctgcgcggatatcgaaaatacccctgtcccgctgcgtc

SEQ ID NO: 47464 - DNA, 75 bp, synthetic construct
  source 1..75: mol_type = other DNA
gtcacgctaccaaaactgacccgtaagctcgaaaactatcgcggtgcggggatgaacggcagcgcaccggtagac

SEQ ID NO: 47465 - DNA, 75 bp, synthetic construct
  source 1..75: mol_type = other DNA
cgagggcaaacagggagaagacaccgagtcgaaaatctccgtggtctgcacctatttccggctgacgatggacgg

SEQ ID NO: 47466 - DNA, 75 bp, synthetic construct
  source 1..75: mol_type = other DNA
attcactcaggcacatgaactgggacattacatacttcatcgtctaaatcgtgatgagttcagatgtagcagtga

SEQ ID NO: 47467 - DNA, 75 bp, synthetic construct
  source 1..75: mol_type = other DNA
attaccacctgccagatgaagcaattgtcgcaacaagggaatcattacaggaactcgcagaacgtgccggaatga

SEQ ID NO: 47468 - DNA, 75 bp, synthetic construct
  source 1..75: mol_type = other DNA
atggcaggagttcgtcaacacggttggagggccattccggcagtatgctcagaatatggcgcagatacgcttccg

SEQ ID NO: 47469 - DNA, 75 bp, synthetic construct
  source 1..75: mol_type = other DNA
caggtactgccaactagcggagctatatttgggcgaaaacttcgctcaactcacaggacggcaggtgttgaggat

SEQ ID NO: 47470 - DNA, 75 bp, synthetic construct
  source 1..75: mol_type = other DNA
ctgacagctggtgagtttacgaaataccgcgaagcacggttaaaaggtgaagtacgaaatgaagatggcacgctt

SEQ ID NO: 47471 - DNA, 75 bp, synthetic construct
  source 1..75: mol_type = other DNA
gtggtattccctgtatggtcaaacactcgcagaccccaagcgcctcatagcgaaacttagaattatctgtaatgg

SEQ ID NO: 47472 - DNA, 75 bp, synthetic construct
  source 1..75: mol_type = other DNA
ggacggtaaacgcagcaccatcgcatatgataaacgcgggcgtccggtgagtgtgacggaaggcggtctgacgcg

SEQ ID NO: 47473 - DNA, 75 bp, synthetic construct
  source 1..75: mol_type = other DNA
ccagtgggctggcctgcgatgtgctgcgtatacctgatgaaccgtcccgtcgctggtttgaccgggatattctgc

SEQ ID NO: 47474 - DNA, 75 bp, synthetic construct
  source 1..75: mol_type = other DNA
taacccgatgccgacgcgtgcagaagtcatggacgtagcaaacgccgttctggatggtactgacgctgtgatgct

SEQ ID NO: 47475 - DNA, 75 bp, synthetic construct
  source 1..75: mol_type = other DNA
accaggcacaacagccaggatagcgacaaaaggcgacctgatgatagtgatgttcagacaggagaaaaccaaatg

SEQ ID NO: 47476 - DNA, 75 bp, synthetic construct
  source 1..75: mol_type = other DNA
ctctgagtcgagaacctataacagaatcaatgatcatgagaaaagacgaatgtcactttgattcaaaaaaagaag

SEQ ID NO: 47477 - DNA, 75 bp, synthetic construct
  source 1..75: mol_type = other DNA
agttgcgaccgttaatgggaaaccgtatttacggttgcgatgactgccagcttatctgcccgtggaatcgctatt

SEQ ID NO: 47478 - DNA, 75 bp, synthetic construct
  source 1..75: mol_type = other DNA
ttacaaagacagcctttgacgaacttaaccgaatcaagaagattacagggctatcacatgcagcagtgatgaaac

SEQ ID NO: 47479 - DNA, 75 bp, synthetic construct
  source 1..75: mol_type = other DNA
cgtctgtgcggcgttatttttgactgggataaatataatctcgagctgtgcgaagaaattagcaaaatgaacgag

SEQ ID NO: 47480 - DNA, 75 bp, synthetic construct
  source 1..75: mol_type = other DNA
tgccggttcgatgtggtagccttcaccgggaatgaggttgagtggattaaggatgcctttaatgaccactcataa

SEQ ID NO: 47481 - DNA, 75 bp, synthetic construct
  source 1..75: mol_type = other DNA
gctgtcaccgtcagggcgtcggcgactggcggtagatattgcgaagaagctgcgccagcgccagcagcagcgaat

SEQ ID NO: 47482 - DNA, 75 bp, synthetic construct
  source 1..75: mol_type = other DNA
cagatgcaaaaccagatggacccggtgtacacgccggcgcgaaaaatccacctgtaccactgcgaccatcgcggc

SEQ ID NO: 47483 - DNA, 75 bp, synthetic construct
  source 1..75: mol_type = other DNA
ggaatacatcgtcatgactgacgaactgcgcaatacgctctccggacaatcccatgcaacatggggacattacat

SEQ ID NO: 47484 - DNA, 75 bp, synthetic construct
  source 1..75: mol_type = other DNA
cgggttcgctcatccgtaaatccccttccgtcttccatcatgatggcactgagtgatgagctgtttgggcgggag

SEQ ID NO: 47485 - DNA, 75 bp, synthetic construct
  source 1..75: mol_type = other DNA
ttaagaaatatcgtttcccggaaacactgaccaaccagagccgctggtttggcctgccactggatgaactgatcc

SEQ ID NO: 47486 - DNA, 75 bp, synthetic construct
  source 1..75: mol_type = other DNA
tgactggtctgcttcatggtatcagcaggtattgccaactagcggagctatatttgggagaaaactccgctcaac

SEQ ID NO: 47487 - DNA, 75 bp, synthetic construct
  source 1..75: mol_type = other DNA
gaagacagccgccaggactaccgccagcgtgcaacaggcggtaacgcccccgctgacactctgaccaattgctga

SEQ ID NO: 47488 - DNA, 75 bp, synthetic construct
  source 1..75: mol_type = other DNA
atgcaatcactattactcaaagcaggtttaaacacagaacaggttgcgcaactggagtccgaaaatgaaggagaa

SEQ ID NO: 47489 - DNA, 75 bp, synthetic construct
  source 1..75: mol_type = other DNA
aacctcgttaccccattgaagtggtcagcatcccgctggcagctccattaactacggcatttaaagaagaactgc

SEQ ID NO: 47490 - DNA, 75 bp, synthetic construct
  source 1..75: mol_type = other DNA
gcgagctggttctgccggccggaactctcaggctgaaaggtgaactgacaccggcgttattacagtcacttatcc

SEQ ID NO: 47491 - DNA, 75 bp, synthetic construct
  source 1..75: mol_type = other DNA
gcccggagaggcaattgtagtgcgctgccagacggtcgatcaccaggtgcaagttaccgtcgaaaaccccggtac

SEQ ID NO: 47492 - DNA, 75 bp, synthetic construct
  source 1..75: mol_type = other DNA
accgtcacgattatcgtgcgccggattaccagattactgatattgacttgacctttgacctggacgcgcaaaaga

SEQ ID NO: 47493 - DNA, 75 bp, synthetic construct
  source 1..75: mol_type = other DNA
tgcggcaaagcaggatggcgcaatgaataccgcgatattcccaacaacggcggcgttgaatgcggcatatcaatc

SEQ ID NO: 47494 - DNA, 75 bp, synthetic construct
  source 1..75: mol_type = other DNA
actggcgaatggccgctggcatgttctgaggcgtcttcctgaagcgcgttttgcaacagggcatgaccatcaggg

SEQ ID NO: 47495 - DNA, 75 bp, synthetic construct
  source 1..75: mol_type = other DNA
cattcagccctgaagatatcgaatggcgaatacagcaaagcggtaaaacacgcgatggcaaggtgtgggctatgg

SEQ ID NO: 47496 - DNA, 75 bp, synthetic construct
  source 1..75: mol_type = other DNA
agaattaatcggtaacgaaggagatattcatgtcacttgcaaccacagtgaaggagagcaagttacagagacgca

SEQ ID NO: 47497 - DNA, 75 bp, synthetic construct
  source 1..75: mol_type = other DNA
ggcactcgatctgatttttgctaatgcctcactgcaatggctgcccgaccactacgaattgtttcctcatctggt

SEQ ID NO: 47498 - DNA, 75 bp, synthetic construct
  source 1..75: mol_type = other DNA
gatcctgatgaagcaataagaatgttcaggatgtatgtcgtttatgttattgcgtttattatcctctttttattg

SEQ ID NO: 47499 - DNA, 75 bp, synthetic construct
  source 1..75: mol_type = other DNA
attacccgctggcaggggaaatcagatgtttttgatgcaaaccataacgtgtttaattacaaagcattacgaaat

SEQ ID NO: 47500 - DNA, 75 bp, synthetic construct
  source 1..75: mol_type = other DNA
tgcgggagaacacaatatttccgcttcggtgaatggtgctcagaagacggtcacggtgaaatttaacgcggatgc

SEQ ID NO: 47501 - DNA, 75 bp, synthetic construct
  source 1..75: mol_type = other DNA
aagaacaatatcctgttctggccagagtctacccgaccctccgtcttcccgatttgcgcggtgagtttatccgtg

SEQ ID NO: 47502 - DNA, 75 bp, synthetic construct
  source 1..75: mol_type = other DNA
tcccaggggggaagtgctctttagctcagctcagggggcggcactacgcccggcagtgaattcagcagattttag

SEQ ID NO: 47503 - DNA, 75 bp, synthetic construct
  source 1..75: mol_type = other DNA
tcgatctgatctttgccgacccaccgtataacatcggtaaaaattttgatggtctgatcgaagcctggaaagaag

SEQ ID NO: 47504 - DNA, 75 bp, synthetic construct
  source 1..75: mol_type = other DNA
gaagccttactgaaacgcattattctcgcctcttccaacccaggcgatatcgttctcgacccgtttgccggtagc

SEQ ID NO: 47505 - DNA, 75 bp, synthetic construct
  source 1..75: mol_type = other DNA
aaaatcccgctgtccggaccgctgacacaggcatttgaagatgcccgcgaccgcatcattgctgcggaaatgccg

SEQ ID NO: 47506 - DNA, 75 bp, synthetic construct
  source 1..75: mol_type = other DNA
aaagagttttcttttgatgttcttgatgattgggatgcgcctttaccttgggaaatggaagaaacgccatctgat

SEQ ID NO: 47507 - DNA, 75 bp, synthetic construct
  source 1..75: mol_type = other DNA
ctggttccttactatacggtgaaagagttcgttgaatctctggaaacgcctcgtcgcatcctgttaatggtgaaa

SEQ ID NO: 47508 - DNA, 75 bp, synthetic construct
  source 1..75: mol_type = other DNA
tgcgtgctaaggcagaaaaagcaacgtgtggtgtgtggtcgctcgaatatggagaggagagatttgatgctggtg

SEQ ID NO: 47509 - DNA, 75 bp, synthetic construct
  source 1..75: mol_type = other DNA
tgtcttcagctccgatgacggtaaggcgaaagtaccgttcccggcgacgctttcctttattacccgcaacggagc

SEQ ID NO: 47510 - DNA, 75 bp, synthetic construct
  source 1..75: mol_type = other DNA
cggaaattattgcgattgctatcggttccggtgcgattggctgcacgatcgttacggactcgcttttctggctgg

SEQ ID NO: 47511 - DNA, 75 bp, synthetic construct
  source 1..75: mol_type = other DNA
acgaccaaaaccgcatcggttacaccgtcatcagcggtaccgaaatcttcctggccgccagtagggcaacgttgt

SEQ ID NO: 47512 - DNA, 75 bp, synthetic construct
  source 1..75: mol_type = other DNA
aggaattcaaaatcagaaaaattaaacggaatattgagcgcagttgtgataacgccataaaatacttcgagcttt

SEQ ID NO: 47513 - DNA, 75 bp, synthetic construct
  source 1..75: mol_type = other DNA
gagtggagcaactggttcggcttttcagatgctgtcgatgccgtggttgacagaattgctgatttagaagctaaa

SEQ ID NO: 47514 - DNA, 75 bp, synthetic construct
  source 1..75: mol_type = other DNA
agcaaccaacagcgaaattatttctattgagctggcccgcgataccgaaggaggtggcggacacggttgcttaat

SEQ ID NO: 47515 - DNA, 75 bp, synthetic construct
  source 1..75: mol_type = other DNA
tcttgtgtgaataaacaaaccttgctttcaatgggagggtaccttaatgagtggaatgtttttgactcattaagc

SEQ ID NO: 47516 - DNA, 75 bp, synthetic construct
  source 1..75: mol_type = other DNA
atgcgtgatatgtataacacccggatacctgaactactggttgcggccatcaaaaacgcagacgcacaggaagcc

SEQ ID NO: 47517 - DNA, 75 bp, synthetic construct
  source 1..75: mol_type = other DNA
ctgcctggagaagcagccggaaagttcagtgcgtccagaggtgattggcgttttcgtaacgagtggcgcgattca

SEQ ID NO: 47518 - DNA, 75 bp, synthetic construct
  source 1..75: mol_type = other DNA
atgctgaagcaacgccgtaatttttgtaccggaacagaacgccacgctaaccgtttcactaccagtgcatcacgc

SEQ ID NO: 47519 - DNA, 75 bp, synthetic construct
  source 1..75: mol_type = other DNA
aaccaggtgaaggggatccccctgaaactggtgcgtgagcgtgtcagggtacttaaagccagcccggacggaaaa

SEQ ID NO: 47520 - DNA, 75 bp, synthetic construct
  source 1..75: mol_type = other DNA
gctgacagcgattgagatgtacaaaccaactgtgcgcatcgtggaagttaatgtgccacgcaccgctggcattcg

SEQ ID NO: 47521 - DNA, 75 bp, synthetic construct
  source 1..75: mol_type = other DNA
tatccttgttctgggaaaaagggaggtgtctctcactgtacctccgatggaaaatttgtttgcaatgatggaact

SEQ ID NO: 47522 - DNA, 75 bp, synthetic construct
  source 1..75: mol_type = other DNA
gtaccggaacagaacgccacgctaaccgtttcactaccagtgcatcacgcagcaacatccgctacagcctgagtg

SEQ ID NO: 47523 - DNA, 75 bp, synthetic construct
  source 1..75: mol_type = other DNA
gcaccgtaaatgctcatttgcgaattaccaggtgcagaacgacggccagcgatacgcgttaagccaggcgaaatc

SEQ ID NO: 47524 - DNA, 75 bp, synthetic construct
  source 1..75: mol_type = other DNA
aggaggaaaagtttatacatgttgttgataaatttataacccatcatcacaacagcgttaataacaatgtctttt

SEQ ID NO: 47525 - DNA, 75 bp, synthetic construct
  source 1..75: mol_type = other DNA
cgtgaaatttgttaatgccgagaatattaacacgccagaaatcgacaaactcctgcacccattcggtaagaaata

SEQ ID NO: 47526 - DNA, 75 bp, synthetic construct
  source 1..75: mol_type = other DNA
ctgtattgttgcttgcactgctaacctccacgagctttgctgcgggtaagaatgtcaatgttgagttcagaaaag

SEQ ID NO: 47527 - DNA, 75 bp, synthetic construct
  source 1..75: mol_type = other DNA
aagcctttgccgaaatgcgcgctgacggtacttacgagaaattagcgaaaaagtacttcgattttgatgtttatg

SEQ ID NO: 47528 - DNA, 75 bp, synthetic construct
  source 1..75: mol_type = other DNA
ccgaccaggaatgacgcaggagcaggcgacgatattaattactgaagccttctgggctctacaggaacgcccgaa

SEQ ID NO: 47529 - DNA, 75 bp, synthetic construct
  source 1..75: mol_type = other DNA
acctcgcggggctggcagagtgcgtgaagataccggatttttccgtcacaactgacaacgcggaaaccggaaaaa

SEQ ID NO: 47530 - DNA, 75 bp, synthetic construct
  source 1..75: mol_type = other DNA
catcgatgttcagcgtgtcacagatgaaggtggcgcggttgatcagcgagcgcttggcgttaatcgagtgaagat

SEQ ID NO: 47531 - DNA, 75 bp, synthetic construct
  source 1..75: mol_type = other DNA
ctgttgaacgcgtggtttccgctattgcccaccgttacggactgaaagcccagataagcgatatgcttatggata

SEQ ID NO: 47532 - DNA, 75 bp, synthetic construct
  source 1..75: mol_type = other DNA
ctggcgaaaggtcgcagcgtgattgtggtgacggtggcggatgtgatgctggcgttacacggcaactacgacaac

SEQ ID NO: 47533 - DNA, 75 bp, synthetic construct
  source 1..75: mol_type = other DNA
tatggttcaatggtgggcggattatttagatataagtaagcattctcaagtcactccatatgagtttgcaaatat

SEQ ID NO: 47534 - DNA, 75 bp, synthetic construct
  source 1..75: mol_type = other DNA
cgtggcatgaaaatgaaagaggagcacattgttcctctcagccgtcaggcgatggttttgttagaacagctcaag

SEQ ID NO: 47535 - DNA, 75 bp, synthetic construct
  source 1..75: mol_type = other DNA
cattcgatgaagagtatcaggttgaagttcaggaagatgatccggaggaaatggaaggcgctgaacatccacaca

SEQ ID NO: 47536 - DNA, 75 bp, synthetic construct
  source 1..75: mol_type = other DNA
aatattgatccagatgccgcattagggaaagtcattcgcttctgggtatgggcggatcaacaaatgatagacggt

SEQ ID NO: 47537 - DNA, 75 bp, synthetic construct
  source 1..75: mol_type = other DNA
ccatcgatcgcgcgttctgcgctatcttgagctttatattttccctcatatcggttcgtacgacattcgccagct

SEQ ID NO: 47538 - DNA, 75 bp, synthetic construct
  source 1..75: mol_type = other DNA
tcactgtcgtacccgcgcatttctgcgcagactggtgtcagcaaaaccgccattttttctctggtgaggcgattt

SEQ ID NO: 47539 - DNA, 75 bp, synthetic construct
  source 1..75: mol_type = other DNA
cggcgggttttgttaccgacgctactctggataatgcgaaggagcgtccccgttttggcatggtctatccaacgg

SEQ ID NO: 47540 - DNA, 75 bp, synthetic construct
  source 1..75: mol_type = other DNA
atggcaaggtccgattacgattttatcaatctgtctctgggacatgaactgaatgagtggctggcagagagaggt

SEQ ID NO: 47541 - DNA, 75 bp, synthetic construct
  source 1..75: mol_type = other DNA
tcaatctgtctctggaacatgaattgaatgagtggctggcagaggtggttacccgcaaattgcgggacagttttt

SEQ ID NO: 47542 - DNA, 75 bp, synthetic construct
  source 1..75: mol_type = other DNA
atgaccgacaccaccatgcaattgctcagtcagggcacagaccccgtaaaaatgccggattttgatattctcgcg

SEQ ID NO: 47543 - DNA, 75 bp, synthetic construct
  source 1..75: mol_type = other DNA
tgcaggagcctatcagtggaaacctaaaaatgcagctaatattgtacaggatgcacatgatccttccgtattgca

SEQ ID NO: 47544 - DNA, 75 bp, synthetic construct
  source 1..75: mol_type = other DNA
ctcgaaatccaacacctacggctggctggggcagttcccgcagttccgtgagtggatcggctcccgcgtcatcga

SEQ ID NO: 47545 - DNA, 75 bp, synthetic construct
  source 1..75: mol_type = other DNA
aaatattaaagaacttattgcaagagataatttcttaacacatatatctgcattaccacattatctaataacttt

SEQ ID NO: 47546 - DNA, 75 bp, synthetic construct
  source 1..75: mol_type = other DNA
atgatggccgtgataaatttattcacgactttgttaatgcatggaataaagtcatgaataatgatcgatttgatt

SEQ ID NO: 47547 - DNA, 75 bp, synthetic construct
  source 1..75: mol_type = other DNA
tccggtttaccccaaagtggatggctccggggatgcgcagatggtcagcaatatgtttgtggcaaaaaccggctc

SEQ ID NO: 47548 - DNA, 75 bp, synthetic construct
  source 1..75: mol_type = other DNA
ttcgtttcacctccaaaggacgtgaatacgaagttgacgaacgcctgattaccacaatcgacaaacaccgttcag

SEQ ID NO: 47549 - DNA, 75 bp, synthetic construct
  source 1..75: mol_type = other DNA
cctctggcgttatctgccgatagtgtactgcatcatgatatccgtaattaccctgataacattatcaacatggcg

SEQ ID NO: 47550 - DNA, 75 bp, synthetic construct
  source 1..75: mol_type = other DNA
gccgtgaaggaaatgcgtttctatggcgtgtcgggagtgacagcaaatgacctccgcactgccgaagccatggtc

SEQ ID NO: 47551 - DNA, 75 bp, synthetic construct
  source 1..75: mol_type = other DNA
atagatcatgcgatttccagttattgcaatctctctcctgaaggagtttatatacaaaaggaatataaagataat

SEQ ID NO: 47552 - DNA, 75 bp, synthetic construct
  source 1..75: mol_type = other DNA
tttcccgccgcgcgctggctgttgtcggcgtggtgatgcttgcactgctggtctggtttatcgggccgctggtgg

SEQ ID NO: 47553 - DNA, 75 bp, synthetic construct
  source 1..75: mol_type = other DNA
cttttctaccgctgtagccgctgataaaaaagagactcaaaatttctactatccagaaacactggatttaactcc

SEQ ID NO: 47554 - DNA, 75 bp, synthetic construct
  source 1..75: mol_type = other DNA
actcgaacccggctagcgatatggctggtgcgttatcgacaactaaagcacgacactatccagctctaccttcca

SEQ ID NO: 47555 - DNA, 75 bp, synthetic construct
  source 1..75: mol_type = other DNA
ggtgctttgggggagtcggggctttggagtgatgatgcgatagaacgtcagttaagccactcggagcgcaataat

SEQ ID NO: 47556 - DNA, 75 bp, synthetic construct
  source 1..75: mol_type = other DNA
atagcgctgtatcagggaaaaggaatgtcaacacctcttacattaggtaatggttcaggaaatggttacagagtg

SEQ ID NO: 47557 - DNA, 75 bp, synthetic construct
  source 1..75: mol_type = other DNA
cgtctctggcaggagaaagtggatgcaatgcaggagtctgccacccgtcagcgtgaacaggataccatccggaag

SEQ ID NO: 47558 - DNA, 75 bp, synthetic construct
  source 1..75: mol_type = other DNA
acctctaaggggcataaactggacctgcgagccttggcgctttcctcgttacctgtactccctgcttgcattaaa

SEQ ID NO: 47559 - DNA, 75 bp, synthetic construct
  source 1..75: mol_type = other DNA
tccctgtgcctgtccgttgcctgctgttgtggggtattcagtcgtatttttaattattacagcgtaccggagtaa

SEQ ID NO: 47560 - DNA, 75 bp, synthetic construct
  source 1..75: mol_type = other DNA
tcagtcgtcaggaattactccggcttatgcgtctgactgaagacgtaccagatgtgagacaggaactgcttaacc

SEQ ID NO: 47561 - DNA, 75 bp, synthetic construct
  source 1..75: mol_type = other DNA
catacgctgcagtaccgcgcatatcacggcaaaagacaacgcctggctgtactcgctgtcgcatcagacgaatga

SEQ ID NO: 47562 - DNA, 75 bp, synthetic construct
  source 1..75: mol_type = other DNA
agaaaacactgaggtgtataaaaaaatgagtgcagcacaaaatccttatggtgatggtaaatcttgccagcgtat

SEQ ID NO: 47563 - DNA, 75 bp, synthetic construct
  source 1..75: mol_type = other DNA
tttcacaaatggacagcgtgaaaaagctggctgatgcgtccggtactgtggccgatgccataagctgggcgggtg

SEQ ID NO: 47564 - DNA, 75 bp, synthetic construct
  source 1..75: mol_type = other DNA
catgctccggtgataatcggcgttgacccggcatactcaggcgttgatgacgcggtgatatacctgcggcagggg

SEQ ID NO: 47565 - DNA, 75 bp, synthetic construct
  source 1..75: mol_type = other DNA
ggagtgatgatgctattgaacgccaattgagccattcggaacgtaataatgtgcgagctgcgtatattcatacgt

SEQ ID NO: 47566 - DNA, 75 bp, synthetic construct
  source 1..75: mol_type = other DNA
ccacggtcgagcaagatggttatatcgtgaccattgtgaattcaaaaataagctcttaagccgcgccaatgggta

SEQ ID NO: 47567 - DNA, 75 bp, synthetic construct
  source 1..75: mol_type = other DNA
gggcgggctgaaaacctcctactccatgattccagacgactcgctgcgccagcgcttccgccagcagctcgagaa

SEQ ID NO: 47568 - DNA, 75 bp, synthetic construct
  source 1..75: mol_type = other DNA
tgtccctgatgaacttattgatttcacgtttgaatggaaagggctgaagaaattatgcgtggcagtctcctttcg

SEQ ID NO: 47569 - DNA, 75 bp, synthetic construct
  source 1..75: mol_type = other DNA
gtggggcataaattcagcattggtctgagaaatgatgccggagaattgataggtgtggcgacagccggtcgacct

SEQ ID NO: 47570 - DNA, 75 bp, synthetic construct
  source 1..75: mol_type = other DNA
tgcccatcatgattgttgtattcccagtggcgtcctgggggaactcaacaacttttgaggcaaaggtggttaaga

SEQ ID NO: 47571 - DNA, 75 bp, synthetic construct
  source 1..75: mol_type = other DNA
tgtcgcctgtgcctggctgaccgtgtgcgaacgtcagcaccgctacccgcatctcacccttgaatcactggaggc

SEQ ID NO: 47572 - DNA, 75 bp, synthetic construct
  source 1..75: mol_type = other DNA
agcaaagcgcgatgaagctaaaaagctcttagtgcagggtatagatccgaaaactgaacagaaacaagctcaggc

SEQ ID NO: 47573 - DNA, 75 bp, synthetic construct
  source 1..75: mol_type = other DNA
aacgactaaaaatggatggaaggatgtttattcagatggagaggatgaagaagaaaaagaaaatgagtctgaaca

SEQ ID NO: 47574 - DNA, 75 bp, synthetic construct
  source 1..75: mol_type = other DNA
atggcgagagacgttttaattaatcacacacgagatgttgatatcaatgagccagacggaccaacgaatctttcc

SEQ ID NO: 47575 - DNA, 75 bp, synthetic construct
  source 1..75: mol_type = other DNA
atattccaagcaaacaggttaaaaataaaactgcacccgaacaattgataacgacagaaaacgccttttccgagc

SEQ ID NO: 47576 - DNA, 75 bp, synthetic construct
  source 1..75: mol_type = other DNA
ggtcgcagcagccgctggtacagaagcgaagtggagcagtggatgcagcagcgtatcgaagcatcacggggaacc

SEQ ID NO: 47577 - DNA, 75 bp, synthetic construct
  source 1..75: mol_type = other DNA
aagagcagttgatcgaggatattgcagggttcactcacgatccgcttggctatgccctctatgcgttcccgtggg

SEQ ID NO: 47578 - DNA, 75 bp, synthetic construct
  source 1..75: mol_type = other DNA
aaagcatctgttcaggccagaagaagcagaaaggaagcatatgttcaaacaaaacaagagagagatttaacaggt

SEQ ID NO: 47579 - DNA, 75 bp, synthetic construct
  source 1..75: mol_type = other DNA
atcgacaccctgatcccactcggttttaactatcaacgtgataatgagatggccacctgggcgatggcggaaatc

SEQ ID NO: 47580 - DNA, 75 bp, synthetic construct
  source 1..75: mol_type = other DNA
tatatcagttacgtcgctgttccagcttaaagacacttgagaaaattattgctaaaaaccagggcactttagcct

SEQ ID NO: 47581 - DNA, 75 bp, synthetic construct
  source 1..75: mol_type = other DNA
gcactgtttacttaggaaaaaactcccgtcgttggagtttgaaattttattcaaaatatgatgaacacatatctg

SEQ ID NO: 47582 - DNA, 75 bp, synthetic construct
  source 1..75: mol_type = other DNA
ctttactccctctcatttattcacattacaaggatttcatacatgaaaacattgtctcagaacaccacctcttcg

SEQ ID NO: 47583 - DNA, 75 bp, synthetic construct
  source 1..75: mol_type = other DNA
tccgtctggatcaccgttcaattctttagtgcaactggaaatggagcagggtattccgcgtaatccgtttattaa

SEQ ID NO: 47584 - DNA, 75 bp, synthetic construct
  source 1..75: mol_type = other DNA
gcagcccggatagccatgtctgcactggcagaggaaaccggtaaacgtacgtcggatattgataataacctcaat

SEQ ID NO: 47585 - DNA, 75 bp, synthetic construct
  source 1..75: mol_type = other DNA
agagcggaattatcaggagcaacagaaacgccgtaatgctgaaaatgctgcactgaaccggatgaatgaaacgga

SEQ ID NO: 47586 - DNA, 75 bp, synthetic construct
  source 1..75: mol_type = other DNA
atgataattgtcttaatttttgattttatcgctgaatattttttatttatgaaagatatgaaaatggataaacaa

SEQ ID NO: 47587 - DNA, 75 bp, synthetic construct
  source 1..75: mol_type = other DNA
tttaatcaacctctataaaaaggttgccgctgattgtgaatcgtttatatctcgcgccagagttttatttgagat

SEQ ID NO: 47588 - DNA, 75 bp, synthetic construct
  source 1..75: mol_type = other DNA
cgaggcgtttatatcgcggaccagaactttgtttgaggaagcaaacagtgacctagcttattacaacataaggca

SEQ ID NO: 47589 - DNA, 75 bp, synthetic construct
  source 1..75: mol_type = other DNA
tgaccttgggaaaaaagcggcagcggactttatgcaacagcaggcccgtgatggtggtcggttaagtggagcata

SEQ ID NO: 47590 - DNA, 75 bp, synthetic construct
  source 1..75: mol_type = other DNA
agactggcagatgatgtaaggctattgcgtcaggaggaacgggaaaggcggaaaaatatagaaaagctaattcag

SEQ ID NO: 47591 - DNA, 75 bp, synthetic construct
  source 1..75: mol_type = other DNA
ggtcgtttgagcattccggttaaacctgctgttcctgatgtggtcggctcttccagccttcttgtcatgacctcc

SEQ ID NO: 47592 - DNA, 75 bp, synthetic construct
  source 1..75: mol_type = other DNA
ggtgagaggattatggaccgcatgaccatgaacggtggtcgatgggtgacgtttaactgggatagctggcgtcca

SEQ ID NO: 47593 - DNA, 75 bp, synthetic construct
  source 1..75: mol_type = other DNA
tcggcctggtgatgctggtactggtggggattgcccctgctggcttcgtcgtcaatatgaatgcgtccggctatg

SEQ ID NO: 47594 - DNA, 75 bp, synthetic construct
  source 1..75: mol_type = other DNA
tgttactggcgtatgaaagtttgtggcccgatgcctggcatttcctttctattttcagcggcagcgcatggttaa

SEQ ID NO: 47595 - DNA, 75 bp, synthetic construct
  source 1..75: mol_type = other DNA
ataatcgtattgctgggcgagattaccaagaaaagaatattcagatagggcgatatgatggctctcataccgtca

SEQ ID NO: 47596 - DNA, 75 bp, synthetic construct
  source 1..75: mol_type = other DNA
gcagaaactcaacactgcgctggaaaaagtgaagaaagatggcacttacgaaaccatctacaacaaatggttcca

SEQ ID NO: 47597 - DNA, 75 bp, synthetic construct
  source 1..75: mol_type = other DNA
aaatcaatataaaacagcggagagttttctgcatgcaatgcttgagcgatgtaaagatcatgatgcctgtaaggc

SEQ ID NO: 47598 - DNA, 75 bp, synthetic construct
  source 1..75: mol_type = other DNA
atggaaaaacgctccggcattcttatgataagagtcgccgcaggggagcgattcatgtcattagtgcgttctcaa

SEQ ID NO: 47599 - DNA, 75 bp, synthetic construct
  source 1..75: mol_type = other DNA
cagaggtgacctgctttatcaaacttaattgtgacaaaatgggtaagcgtaaactgaccgccgtatgtagccatc

SEQ ID NO: 47600 - DNA, 75 bp, synthetic construct
  source 1..75: mol_type = other DNA
aacccaccattatattcgtgcggtcttagtgcgctgtaatatccaacgatatagtccgttattgcgtgagctgca

SEQ ID NO: 47601 - DNA, 75 bp, synthetic construct
  source 1..75: mol_type = other DNA
gggcagtcaggcgaaaaatttttgcgggaactgtgcgaagttgatctgctggttcttgatgaaattggtattcag

SEQ ID NO: 47602 - DNA, 75 bp, synthetic construct
  source 1..75: mol_type = other DNA
gctgaacacgcttaccactcagtgggaaatgagtgtgaaagcagcagataaacgcgaaaaagtgcttgaggcgga

SEQ ID NO: 47603 - DNA, 75 bp, synthetic construct
  source 1..75: mol_type = other DNA
ttacgtaatagtgacgcgctggcgttacagcacaacagcagcctgcagctggattacgcaacggtaaatccttac

SEQ ID NO: 47604 - DNA, 75 bp, synthetic construct
  source 1..75: mol_type = other DNA
atgacgttcacagtaaaaaccattcctgacatgctcgttgaggcatatggaaatcagacagaggtagcccgaata

SEQ ID NO: 47605 - DNA, 75 bp, synthetic construct
  source 1..75: mol_type = other DNA
aacgcgtgttgggcggtaaagctggcgcacgatggcgcgttatccctcaatcaatgtgatgagaggatgccatga

SEQ ID NO: 47606 - DNA, 75 bp, synthetic construct
  source 1..75: mol_type = other DNA
atgaacgccacaattcaaacgataccagagcttcttatccagacacgaggaaatcagaccgaagtggcgaggatg

SEQ ID NO: 47607 - DNA, 75 bp, synthetic construct
  source 1..75: mol_type = other DNA
taccatcaccatgatggggatctgtaccaccttaattggtgtgttaccgacttatgcacaaattggtgtttttgc

SEQ ID NO: 47608 - DNA, 75 bp, synthetic construct
  source 1..75: mol_type = other DNA
tatccggcgtgaacgcctgcccaaagaactggcatacgcgctgaaacaacaactgaggattgcgataaaacgatg

SEQ ID NO: 47609 - DNA, 75 bp, synthetic construct
  source 1..75: mol_type = other DNA
ttgttgctgacgacactattctgccgacagcggagcaccctgaattcaaaaaaatcatgatcaacgatgtactgc

SEQ ID NO: 47610 - DNA, 75 bp, synthetic construct
  source 1..75: mol_type = other DNA
acgccgcgggtgcaggaaaggtggtgtatgtgggcaaccagctgcgtggctacggtaatctcatcatgattaaac

SEQ ID NO: 47611 - DNA, 75 bp, synthetic construct
  source 1..75: mol_type = other DNA
cagaagttgaatcgctaggcattggcgaggtaatcaaggttttttctatttttattttatttgttatagtttcat

SEQ ID NO: 47612 - DNA, 75 bp, synthetic construct
  source 1..75: mol_type = other DNA
ccagagcgcgctggatctcggcgaaccgctgtcgctgattaccgagtctgtgtttgcacgatacatatcttctct

SEQ ID NO: 47613 - DNA, 75 bp, synthetic construct
  source 1..75: mol_type = other DNA
tatacaaacttcgtgttcagcgggaatccgggaaccggaaaaaatcatctggcggcggctgtgggtaatcgtctg

SEQ ID NO: 47614 - DNA, 75 bp, synthetic construct
  source 1..75: mol_type = other DNA
gagaatgttgaccgtatccggcgtgaacgcctgcctaaagaactggcatacgcgctgaaacaacaactgaggatt

SEQ ID NO: 47615 - DNA, 75 bp, synthetic construct
  source 1..75: mol_type = other DNA
aaatccgaatgccaaaattatcgttaaccgcggtgatctccctgctattaagctggggatcaggatgcttggtca

SEQ ID NO: 47616 - DNA, 75 bp, synthetic construct
  source 1..75: mol_type = other DNA
atggaactgtggctgacggtgaacggcaaacgcaccagtgccagcgcaccgctggatccgctgacccgcgccgtg

SEQ ID NO: 47617 - DNA, 75 bp, synthetic construct
  source 1..75: mol_type = other DNA
ccattttcctaaacccatcaaactgggtcgcagcagccgctggtacagaagcgaagtggagcagtggatgcagca

SEQ ID NO: 47618 - DNA, 75 bp, synthetic construct
  source 1..75: mol_type = other DNA
gcgtattgctgcgtgccgacgatcccctgatcgacatgaactacatcaccagcttcaccggtatgactgacaaat

SEQ ID NO: 47619 - DNA, 75 bp, synthetic construct
  source 1..75: mol_type = other DNA
ggtcgcagcagccgctggtacaaaagcgaagtggagcagtggatgcagcagcgaatcgaagaatcacgagggtca

SEQ ID NO: 47620 - DNA, 75 bp, synthetic construct
  source 1..75: mol_type = other DNA
gatgctgcagattatgtcagggagactgaccggtcactgatgcaactggtcaccgcattctgggcaacgctggca

SEQ ID NO: 47621 - DNA, 75 bp, synthetic construct
  source 1..75: mol_type = other DNA
ctggttcaggaaattgacttcgtaagacaaacagcccctgccgggcagttcccggtcagtgaatgtcggttttct

SEQ ID NO: 47622 - DNA, 75 bp, synthetic construct
  source 1..75: mol_type = other DNA
tgcttaatcactaccttgaacaaaaagggtacgtaatacaaaaagagtttctttatggtagtgccttttttatcg

SEQ ID NO: 47623 - DNA, 75 bp, synthetic construct
  source 1..75: mol_type = other DNA
gttgaggaaagaacaccgctacgcgatgcagtaaacatgctggtaggaaagaaaggacttcgcaatgacgatgca

SEQ ID NO: 47624 - DNA, 75 bp, synthetic construct
  source 1..75: mol_type = other DNA
aatccgaaaccactggcacgtggagaataagctgcactggcgtctggacggtgtgccgcaggaacacaagatagc

SEQ ID NO: 47625 - DNA, 75 bp, synthetic construct
  source 1..75: mol_type = other DNA
tcactgatcggtcttggcgtcggacaactgttatttggccctctgagcgacaaaatagggcgtaaacgtccgtta

SEQ ID NO: 47626 - DNA, 75 bp, synthetic construct
  source 1..75: mol_type = other DNA
tatccgacgcgaacgtctgccaaaagaactgagctatgcgctgaaacaacaactgaggattgtgataaagcgatg

SEQ ID NO: 47627 - DNA, 75 bp, synthetic construct
  source 1..75: mol_type = other DNA
atgttgacctcaatgacaggccacgacagcgtgttgctgcgtgctgacgatcccctgatcgacatgaactacatc

SEQ ID NO: 47628 - DNA, 75 bp, synthetic construct
  source 1..75: mol_type = other DNA
gttgaccgtatccggtgtgaacgcctgcccggagaactggcatccgcgctgaaacaacaactgaggattgcgata

SEQ ID NO: 47629 - DNA, 75 bp, synthetic construct
  source 1..75: mol_type = other DNA
tctgaccgggtctcaacagactgcacgccaccatttgctgccctgaccggcatacgctgcagtaccgcgcatatc

SEQ ID NO: 47630 - DNA, 75 bp, synthetic construct
  source 1..75: mol_type = other DNA
ccttgtatggctatgggattatgctaaccgctcacaggcattgttccgtgagttgtatcccgcattaaaactgat

SEQ ID NO: 47631 - DNA, 75 bp, synthetic construct
  source 1..75: mol_type = other DNA
aaatctatgacggctatcagtcagtatccccgctacctgccgatttccttgaacgtcaaccggtttaccaactct

SEQ ID NO: 47632 - DNA, 75 bp, synthetic construct
  source 1..75: mol_type = other DNA
ctgcttcccggttttaccgccgaagccgaccaactggagttactgtcgcgtagtaaaaccgtcaccgtgcctaag

SEQ ID NO: 47633 - DNA, 75 bp, synthetic construct
  source 1..75: mol_type = other DNA
gtagataaaagctatgccccgagcaccattatggttgcactgattgtgattcataactgtgcggtgctgggatta

SEQ ID NO: 47634 - DNA, 75 bp, synthetic construct
  source 1..75: mol_type = other DNA
tggtgggcagaaagaagcctatgaactggttgcgccgatcctgaccaaaatcgccgcagtggctgaagacggtga

SEQ ID NO: 47635 - DNA, 75 bp, synthetic construct
  source 1..75: mol_type = other DNA
ggcgcaaatccagcaaaaagcctttgatgtgttaagtgacgatgacgccctgccgctgaacagcctgctggccgc

SEQ ID NO: 47636 - DNA, 75 bp, synthetic construct
  source 1..75: mol_type = other DNA
ctgactgcattaacgtgcaggcgctgaacatggggcgcattgtcgttgacatcgatggtattaagcttgccgaac

SEQ ID NO: 47637 - DNA, 75 bp, synthetic construct
  source 1..75: mol_type = other DNA
gcgccagttccgtaacgtgacggcagagcagattgcgtatgttgcacaactgcagcgttccggagacgaggccgg

SEQ ID NO: 47638 - DNA, 75 bp, synthetic construct
  source 1..75: mol_type = other DNA
cagtttgatgccattaaccagagtgtcgcgcgttttgcgtctgcatccggtgtggaggtggataaagtcgctgaa

SEQ ID NO: 47639 - DNA, 75 bp, synthetic construct
  source 1..75: mol_type = other DNA
cgtcagcttaaccacacggaagcggctgagctgctgcgtcaggaagctgtgaagattcagaacgaagcgcaggag

SEQ ID NO: 47640 - DNA, 75 bp, synthetic construct
  source 1..75: mol_type = other DNA
tctggaaggcaaaaaagaagtcctgggcctgtatttgtcggaaagcgaaggcgctaacttctggctgtcagtatt

SEQ ID NO: 47641 - DNA, 75 bp, synthetic construct
  source 1..75: mol_type = other DNA
ggaatatatccggagtacagcaaccattcgcattggtggacaaactacagcaggattacgccatttatttgggca

SEQ ID NO: 47642 - DNA, 75 bp, synthetic construct
  source 1..75: mol_type = other DNA
gctactaaaaaaatggcagctgctaccgacgctgttattgatgaagcccgccaaaacctgatccctctcagccgg

SEQ ID NO: 47643 - DNA, 75 bp, synthetic construct
  source 1..75: mol_type = other DNA
cgtctggaagaacgtcgggcaagggctgaagcaatggcagctcgccttgatagcctggcgtgtcatatcacatcc

SEQ ID NO: 47644 - DNA, 75 bp, synthetic construct
  source 1..75: mol_type = other DNA
tcatagcgagagtatcggatattttaataactatttggttgagctggtggctggttctttttccctgctatcggc

SEQ ID NO: 47645 - DNA, 75 bp, synthetic construct
  source 1..75: mol_type = other DNA
ggaaaccagcatggataggttgtgaaataatcgttgatataccagaagaaaaaattagcataaactttcaatatg

SEQ ID NO: 47646 - DNA, 75 bp, synthetic construct
  source 1..75: mol_type = other DNA
tctgtcaaacccttcaggctcgtatgttaatagcgcagcgacagatgtatttgcagagaaaaccacatttggatg

SEQ ID NO: 47647 - DNA, 75 bp, synthetic construct
  source 1..75: mol_type = other DNA
tgagaaatgggtgaccgatactgaggcacagcatagcgtcgcagtagacacggcagaagcacagcgccagtcact

SEQ ID NO: 47648 - DNA, 75 bp, synthetic construct
  source 1..75: mol_type = other DNA
aaaattagcataaactttcaatatgatgatttaactgtgatcccggccccagcaccgggctcaccacaatgcccg

SEQ ID NO: 47649 - DNA, 75 bp, synthetic construct
  source 1..75: mol_type = other DNA
aatgtctcagtattcacatgcagctgataatctgacctttaaaggaaaactgattattcctgcctgtactgtaca

SEQ ID NO: 47650 - DNA, 75 bp, synthetic construct
  source 1..75: mol_type = other DNA
aagaggagaacgcccgcctcaagaagctgctcgccgaagccatgctggataaggaggcgcttcaggtggctcttg

SEQ ID NO: 47651 - DNA, 75 bp, synthetic construct
  source 1..75: mol_type = other DNA
cagccgtgctgacactggattctgcccgtttttctgaagaggcagcgcgggtaaaaaaagaactgggtgaaacca

SEQ ID NO: 47652 - DNA, 75 bp, synthetic construct
  source 1..75: mol_type = other DNA
aactgattgccacggtagcgggtgatgtgaccgtgtttaactacgacagcaagacgcgggaatatctttccacat

SEQ ID NO: 47653 - DNA, 75 bp, synthetic construct
  source 1..75: mol_type = other DNA
ttcatcataaagcattaatgatatccgttaacagaagtgcaaaggattcagagctttatgatgcggttcgattta

SEQ ID NO: 47654 - DNA, 75 bp, synthetic construct
  source 1..75: mol_type = other DNA
cagaggacacgttcattgagccgcaggctgaactggtttacggcgccgtgtccgggaaaacattccgctggaaag

SEQ ID NO: 47655 - DNA, 75 bp, synthetic construct
  source 1..75: mol_type = other DNA
gagtaacgtactgggcttcgcgtcaccgggtgaagcaaagcagtatcagaagcagatcacccgggatgtggtgct

SEQ ID NO: 47656 - DNA, 75 bp, synthetic construct
  source 1..75: mol_type = other DNA
aggctttaagcgcgtcatagacgagcaggcatggttaatcagcaaggtgacccacaacctcaataataacggttt

SEQ ID NO: 47657 - DNA, 75 bp, synthetic construct
  source 1..75: mol_type = other DNA
gctggcggagtcattgatcgggacaccattaaatggtggcttaagcaatcacgcgaagcgcaatctgccattatg

SEQ ID NO: 47658 - DNA, 75 bp, synthetic construct
  source 1..75: mol_type = other DNA
agcgccagtattgagcggttgttcaaagtgtttactgtgttgggcgttgaaatagaactttcttcttcattggct

SEQ ID NO: 47659 - DNA, 75 bp, synthetic construct
  source 1..75: mol_type = other DNA
gttggcagttttgtcaacagtagcctgtccctcgaaaaatgggcaagccttacggcgcagagcggtatttttagc

SEQ ID NO: 47660 - DNA, 75 bp, synthetic construct
  source 1..75: mol_type = other DNA
tatggagaaagtgatgcctcggtaatggcgcaaattatgagcgtcgtgccgcaattagagaaagggctgacacgg

SEQ ID NO: 47661 - DNA, 75 bp, synthetic construct
  source 1..75: mol_type = other DNA
gagtattactttgttgtggttctggcggggcagtcaaacagcatggcatatggtgaaggccttccgctgccggag

SEQ ID NO: 47662 - DNA, 75 bp, synthetic construct
  source 1..75: mol_type = other DNA
tgtgtagtcagtaacggtaagttaagcagcgaaactaaaaccaaatgggaatatatccggagtacagcaaccatt

SEQ ID NO: 47663 - DNA, 75 bp, synthetic construct
  source 1..75: mol_type = other DNA
gttgctgtaagaatccaaagcaatcagtttactgatttaaaaaacaagacaattcagggtcataaagacactgtc

SEQ ID NO: 47664 - DNA, 75 bp, synthetic construct
  source 1..75: mol_type = other DNA
gattacgccatttatttgggcatgtgaggaattttcgtctctggcataaagagctaacagatgcgcagcttgggg

SEQ ID NO: 47665 - DNA, 75 bp, synthetic construct
  source 1..75: mol_type = other DNA
tcggggttgctgcccataaaggtggcgtttacaaaacctcagtttctgttcatcttgctcaggatctggctctga

SEQ ID NO: 47666 - DNA, 75 bp, synthetic construct
  source 1..75: mol_type = other DNA
cgcgcccgcgcagggcgatttaatctcggtgagcgccagtggttataacgaaacgatcgcggcggcaaaaaccac

SEQ ID NO: 47667 - DNA, 75 bp, synthetic construct
  source 1..75: mol_type = other DNA
catatcctggttctacaggcgagtttaacggtacagttcctattgccgatagcgccagcgtacccgtttatcagg

SEQ ID NO: 47668 - DNA, 75 bp, synthetic construct
  source 1..75: mol_type = other DNA
caggttataaaagacagtctgacactgggactgaatgcgctgacgctgacggatgttacaaaaatgcagcgtatg

SEQ ID NO: 47669 - DNA, 75 bp, synthetic construct
  source 1..75: mol_type = other DNA
aacgtatcgcgcaagcatcgcaacaggaaggacgtcaccgttttccatggccattacgttggctgaactggttta

SEQ ID NO: 47670 - DNA, 75 bp, synthetic construct
  source 1..75: mol_type = other DNA
tggtgctgaggttgggtatcgttaccatctgtcggaagaggcttgggtggagccacagatagagcttgtttacgg

SEQ ID NO: 47671 - DNA, 75 bp, synthetic construct
  source 1..75: mol_type = other DNA
caatgccgcagcgtgtaacaaaagaaggaaaacaggatgatgaagaaaaaccgcagccatctggcgcaatggcag

SEQ ID NO: 47672 - DNA, 75 bp, synthetic construct
  source 1..75: mol_type = other DNA
gtgaaatatgccgatctcatcatgctggcaaccgaacgccgcgatctcgggcttgatgatggctctttctggcct

SEQ ID NO: 47673 - DNA, 75 bp, synthetic construct
  source 1..75: mol_type = other DNA
agaatgaggcaatggttaatctgggggacagtggtgcggaaaccggaaaaaccgattccccactatttatctcct

SEQ ID NO: 47674 - DNA, 75 bp, synthetic construct
  source 1..75: mol_type = other DNA
ggcgatgttgaaggcgggggatgtggtgtattgcgatccgccgtatgacggtacgttttccggttatcacactga

SEQ ID NO: 47675 - DNA, 75 bp, synthetic construct
  source 1..75: mol_type = other DNA
atgcttcttttggcaaaaaaatggatgctctttgcgatggtatgagccgagctgtaaaaaacagtacaacagatt

SEQ ID NO: 47676 - DNA, 75 bp, synthetic construct
  source 1..75: mol_type = other DNA
cggtattccggcatgttcctgtttagatgctcctggctcatataaagctggttatgcaatttgccgttctgcaga

SEQ ID NO: 47677 - DNA, 75 bp, synthetic construct
  source 1..75: mol_type = other DNA
tcagtgaatattgccgtgctgatgacggtagcgttcctatgtggggccagcacggtgattttatcatcgaaagtt

SEQ ID NO: 47678 - DNA, 75 bp, synthetic construct
  source 1..75: mol_type = other DNA
tggtcagagccagtgggcatatctacactatcgtcagacccggctggtttgattacaacaatgatgatgagcaca

SEQ ID NO: 47679 - DNA, 75 bp, synthetic construct
  source 1..75: mol_type = other DNA
cccttgggctggtcgataatctctcgctgtttattgacgagatggcccatccgttacagccggtgcgtctgtccg

SEQ ID NO: 47680 - DNA, 75 bp, synthetic construct
  source 1..75: mol_type = other DNA
ttcataaacgcatctggcgatgccctgaatgtggtattgaacatgaccgcgacatcaatgcggcgctcaacatcc

SEQ ID NO: 47681 - DNA, 75 bp, synthetic construct
  source 1..75: mol_type = other DNA
atggataacgcagtattaaatagcgagtttattgccacgaaggcggggaatattaccgtctataactacgatggt

SEQ ID NO: 47682 - DNA, 75 bp, synthetic construct
  source 1..75: mol_type = other DNA
ccataatgcacttgatgacgcccgttaccaggcaaaatacgtttcagttatctggcaaaaactgatcccgagtca

SEQ ID NO: 47683 - DNA, 75 bp, synthetic construct
  source 1..75: mol_type = other DNA
aacgacttcttcctgactataaacggatggaagaaaaaatagacgccgtaatccgtgagaaatacgggttacctc

SEQ ID NO: 47684 - DNA, 75 bp, synthetic construct
  source 1..75: mol_type = other DNA
tttaacctggcatcctctgccagaacgcttctggggacgtactttaatgacctgcaggaccagtgtgcgatagtg

SEQ ID NO: 47685 - DNA, 75 bp, synthetic construct
  source 1..75: mol_type = other DNA
atcagcagaacggcacgctgtacagtgctgcagacctgacgctggatataccggacatccgcaacagcgggctta

SEQ ID NO: 47686 - DNA, 75 bp, synthetic construct
  source 1..75: mol_type = other DNA
gtaaagattgtcgtgggcgcggtgttgccattcatcgtgaagagtcggaaaaacagggtgtgccggttttcagaa

SEQ ID NO: 47687 - DNA, 75 bp, synthetic construct
  source 1..75: mol_type = other DNA
gcgaaatcgctgcaggcgatggatttcagcaccatcactaataaaacctcatataacgctattgaatggcccgcc

SEQ ID NO: 47688 - DNA, 75 bp, synthetic construct
  source 1..75: mol_type = other DNA
caagcttcgggatggcgatttgcggtcgtatgctggaagcgcagggctttcgcgtcgggatcatcgcccagccgg

SEQ ID NO: 47689 - DNA, 75 bp, synthetic construct
  source 1..75: mol_type = other DNA
tacgaacctgccggtattgtccaccgcggggagtttgtcttcacgaaggaggcaaccagccggattggcgtcggc

SEQ ID NO: 47690 - DNA, 75 bp, synthetic construct
  source 1..75: mol_type = other DNA
tactctacggcatggatatctccgctctcaccacgacaaatgacatcgaaaaactgcgcgcgatggcacttgcca

SEQ ID NO: 47691 - DNA, 75 bp, synthetic construct
  source 1..75: mol_type = other DNA
tgctgaaagatggtgcgggaaaaccaatacagaactgcactattcaactgaaggcaaagcgcaacagcaccacgg

SEQ ID NO: 47692 - DNA, 75 bp, synthetic construct
  source 1..75: mol_type = other DNA
tcaagtcgcccgacactgtcactgagtgcactgctgaaacagtatggtatacgcctgacggctaatcaggcatat

SEQ ID NO: 47693 - DNA, 75 bp, synthetic construct
  source 1..75: mol_type = other DNA
ccggcgcgatgaactgagttgcttcctgggggacggagctgtgcccctggacaacaatatctgcgagcgtgccat

SEQ ID NO: 47694 - DNA, 75 bp, synthetic construct
  source 1..75: mol_type = other DNA
acgaatggcaacgcctcaaaaattactggcgtttcgcgcaatgctctcgccgtctgctgtgctggcactgctgga

SEQ ID NO: 47695 - DNA, 75 bp, synthetic construct
  source 1..75: mol_type = other DNA
acaccgcgcagccggtactgccagcgcaaaatcaggctctaccgccagaagttcgcgcgttccttaatgccggga

SEQ ID NO: 47696 - DNA, 75 bp, synthetic construct
  source 1..75: mol_type = other DNA
gggctgaactgcaacgccagtcactgattgatgatgccatgtcttccattgttctgattcaactaaaattgcagg

SEQ ID NO: 47697 - DNA, 75 bp, synthetic construct
  source 1..75: mol_type = other DNA
gtcgagcgcgttcacgccgacaaaccgagcgtgccaaaagggctgacaaaatacctgactatgctgcatgaagag

SEQ ID NO: 47698 - DNA, 75 bp, synthetic construct
  source 1..75: mol_type = other DNA
gattacatcgatgcggtgacggcaacagataccggcaccgtaccgggtattatctggcctgagtttccggaggcg

SEQ ID NO: 47699 - DNA, 75 bp, synthetic construct
  source 1..75: mol_type = other DNA
aatttattgccactcaagcaggaaatatcaccgtttataactatgacggtgagacgcgggaatatatttctgcat

SEQ ID NO: 47700 - DNA, 75 bp, synthetic construct
  source 1..75: mol_type = other DNA
acggttcttattctgacagtggtaagcgttgttgtcttgtctctttcgtcagataagtttatgtctgttaagcgc

SEQ ID NO: 47701 - DNA, 75 bp, synthetic construct
  source 1..75: mol_type = other DNA
ggatttatcaggtcttggtgattatacgaaggtaatgagtggtagcgaagataatctggaaatatttgattcaat

SEQ ID NO: 47702 - DNA, 75 bp, synthetic construct
  source 1..75: mol_type = other DNA
gatgcaccaggtatacataaggcgggttatgctatctgtcgttctgtgaatttaaattcatgggaatatgtgcca

SEQ ID NO: 47703 - DNA, 75 bp, synthetic construct
  source 1..75: mol_type = other DNA
atgattacgggcttttcgccgtcatataaaaaaattgttattggtgatgatgaaataacgatgcctggcgacaag

SEQ ID NO: 47704 - DNA, 75 bp, synthetic construct
  source 1..75: mol_type = other DNA
gattacactgacgcggtgatggcaacagataccagcaccgcgccagatgtcatctggccagttcctcctgagacg

SEQ ID NO: 47705 - DNA, 75 bp, synthetic construct
  source 1..75: mol_type = other DNA
gacccaaggtaatacaatctgggatatgcacggtaaaaaaggaaatgacctgaatgcaggaaaaaatctcctgct

SEQ ID NO: 47706 - DNA, 75 bp, synthetic construct
  source 1..75: mol_type = other DNA
gtgagctattcagaagccactggattgcggtatggtttatcatatggtcttcagtaatcaacctcattattttgt

SEQ ID NO: 47707 - DNA, 75 bp, synthetic construct
  source 1..75: mol_type = other DNA
gcatgttcaccattctggtcggtcgttttgttggcccgacgcgtccgctggtgccaatggtggcgggaatgctgg

SEQ ID NO: 47708 - DNA, 75 bp, synthetic construct
  source 1..75: mol_type = other DNA
agtcagggtgggaaccttttctctgattcccggataagggtgactttcgatggcgtccggggtgaaacgccggat

SEQ ID NO: 47709 - DNA, 75 bp, synthetic construct
  source 1..75: mol_type = other DNA
agctcggcagcaacgtgccgtttcctcgccagctcactgtcactcgtgacggcgatattatgatcctccgcacgc

SEQ ID NO: 47710 - DNA, 75 bp, synthetic construct
  source 1..75: mol_type = other DNA
gtctggggcgggcaaaacgtttattttcctatggggatgagatggaagataagccagcgtgaccgtgaaatctat

SEQ ID NO: 47711 - DNA, 75 bp, synthetic construct
  source 1..75: mol_type = other DNA
tatttatcgtgggcataatccttttgcgaaatatccgcgcgtcattggtcatgaattctttggcgtcattgatgc

SEQ ID NO: 47712 - DNA, 75 bp, synthetic construct
  source 1..75: mol_type = other DNA
gcagagtgttaaccatatggctgatgacgatgttgatcgcgagctgcgggagtcgtggaagcgtcccggtggtgg

SEQ ID NO: 47713 - DNA, 75 bp, synthetic construct
  source 1..75: mol_type = other DNA
tcagggctggcctgtattctcacaatggcttgatgccgtgatccagcgtgtcgaaatgtacaacgcatctcttcc

SEQ ID NO: 47714 - DNA, 75 bp, synthetic construct
  source 1..75: mol_type = other DNA
tgaaaccgacttggacctggggcactacgagcgtttcattcgtaccaaaatgagccgccgcaacaacttcaccac

SEQ ID NO: 47715 - DNA, 75 bp, synthetic construct
  source 1..75: mol_type = other DNA
atgaaaaaaaataaatcgacttttaccatcaattttattacgtattcattgatgctttctctggcaggagtgcct

SEQ ID NO: 47716 - DNA, 75 bp, synthetic construct
  source 1..75: mol_type = other DNA
gaacgatatggtgcaaacagtagttattttagtattgcgctgggccgtctttttcggacgaaccagatagtatca

SEQ ID NO: 47717 - DNA, 75 bp, synthetic construct
  source 1..75: mol_type = other DNA
tcaaaggaactgggcattgaggtaatggaatttatccatgaatatgctctatctgcggcttctcctgcacaacaa

SEQ ID NO: 47718 - DNA, 75 bp, synthetic construct
  source 1..75: mol_type = other DNA
ctgcccggaagcgaatctgtctgaatgggaacaggttatcttcgaagaagcgaatccggtaagtgaagtcaccat

SEQ ID NO: 47719 - DNA, 75 bp, synthetic construct
  source 1..75: mol_type = other DNA
tgcggttattacgctggcgctgggctggaaggggcagccgcttttcccgaaaggggcattcacggtggacgagat

SEQ ID NO: 47720 - DNA, 75 bp, synthetic construct
  source 1..75: mol_type = other DNA
tgaatgccggcgtgaacagtggcggtggtcagccgtcacaacggcaaatgagtgcctattacaaccataacggtt

SEQ ID NO: 47721 - DNA, 75 bp, synthetic construct
  source 1..75: mol_type = other DNA
cccgcctgaccagctaacgatcagtgccagaagcgcagatttccgcgatacctttaacgtgaagagggaatatag

SEQ ID NO: 47722 - DNA, 75 bp, synthetic construct
  source 1..75: mol_type = other DNA
gtgacctttgagcagaaaaaagcccgggcaattgccctgatggacagcaaaaagatgtggcggagtaattatgct

SEQ ID NO: 47723 - DNA, 75 bp, synthetic construct
  source 1..75: mol_type = other DNA
atggaaggcggtgcaacaggcacagcgttacatacggggtggcaaacggtgggtggtggatatggagatatggat

SEQ ID NO: 47724 - DNA, 75 bp, synthetic construct
  source 1..75: mol_type = other DNA
gccaccctgaatggcaggaagtggaatggcgcgaggaaccctacactctcgacgaactggctgattatctcgatt

SEQ ID NO: 47725 - DNA, 75 bp, synthetic construct
  source 1..75: mol_type = other DNA
acggcctgagtatccgtctttcacagtgggcgcgcggtggtgaatttggttgggtgtttgataacgaacacgaca

SEQ ID NO: 47726 - DNA, 75 bp, synthetic construct
  source 1..75: mol_type = other DNA
atggagattaaacaattccagcgagctgctagtatcagcgaggcgctggccgcacgctggttctcgcatatcact

SEQ ID NO: 47727 - DNA, 75 bp, synthetic construct
  source 1..75: mol_type = other DNA
aggagatcgcatgtggtttcaacgcaaaacagtttgctgaagtgttgaaaaaagccgggatgctaaccccaccaa

SEQ ID NO: 47728 - DNA, 75 bp, synthetic construct
  source 1..75: mol_type = other DNA
atgagaaaggatttcaacatcgacggaaaatatgtagtgctgtctgtaagcactaatattctgtcgccatctgtc

SEQ ID NO: 47729 - DNA, 75 bp, synthetic construct
  source 1..75: mol_type = other DNA
tcaatctgtctctgaaacatgaactgaatgagtggctgacagagagaggttatgccggactggcggataaccgga

SEQ ID NO: 47730 - DNA, 75 bp, synthetic construct
  source 1..75: mol_type = other DNA
tttggcgaatttttggggcacgttgacaaagccctctcaatcagttcagcaaggtccaaagcgttaacagcttcc

SEQ ID NO: 47731 - DNA, 75 bp, synthetic construct
  source 1..75: mol_type = other DNA
agaccgcaaagccaaaagaaaaaacctacaaaatggccgacggcggcggtttgtatctcgagatttcggctaagg

SEQ ID NO: 47732 - DNA, 75 bp, synthetic construct
  source 1..75: mol_type = other DNA
acgggtgtaaccatcatcgttgctatctggacttccgtcgctctcctgttcttacttcctgtgcaatttctggtg

SEQ ID NO: 47733 - DNA, 75 bp, synthetic construct
  source 1..75: mol_type = other DNA
tcgaagtcttgcaaaggtgttttacgcggactgcattatcagttagaaccttatgctcaaggaaaactggtacgc

SEQ ID NO: 47734 - DNA, 75 bp, synthetic construct
  source 1..75: mol_type = other DNA
gctgctgcgcagggctggaccatcaccggcggcagtgttgcgctggaagatggtgtgtttaaggttaccaagcag

SEQ ID NO: 47735 - DNA, 75 bp, synthetic construct
  source 1..75: mol_type = other DNA
taactttggccgtactgctgccacggtactgaccgaagaaatctgcaacccggtactgacgcaggccgggacgga

SEQ ID NO: 47736 - DNA, 75 bp, synthetic construct
  source 1..75: mol_type = other DNA
tttcctccacagcaagaagatggaggtgtgccacctcctgaaatcactttgcaccgtatagcctccgtctcaatg

SEQ ID NO: 47737 - DNA, 75 bp, synthetic construct
  source 1..75: mol_type = other DNA
atcgaaaaatgattgaaaatgcggaaatctataatgattatttttccgattattcagatgcctgcaaatacagtt

SEQ ID NO: 47738 - DNA, 75 bp, synthetic construct
  source 1..75: mol_type = other DNA
tcctgtatctcaatcgtcacggttaccgtggtttatgtcgctataacaagagcgggcatttcaacattccctacg

SEQ ID NO: 47739 - DNA, 75 bp, synthetic construct
  source 1..75: mol_type = other DNA
cgatggacggtttttagtactgcaatcctgattattccttgcgtctggctcggaattgccgtgcagaatccgaat

SEQ ID NO: 47740 - DNA, 75 bp, synthetic construct
  source 1..75: mol_type = other DNA
aacgaatggaaaccaggtatcatcaaaccgcccgacacatttcagttcatgggcgcgcaggagcattattccgga

SEQ ID NO: 47741 - DNA, 75 bp, synthetic construct
  source 1..75: mol_type = other DNA
gcacctctacttctttggtcaggagttcgacgagaaatacaaacatcacgccacaccagaacaacgcaaggacgt

SEQ ID NO: 47742 - DNA, 75 bp, synthetic construct
  source 1..75: mol_type = other DNA
accaattgggatcgaggtcatccccgcacacgtcactgaatatctgaacaaagtactgactgaaaccgatcatgc

SEQ ID NO: 47743 - DNA, 75 bp, synthetic construct
  source 1..75: mol_type = other DNA
accgctatgaaaaaggcggagaagatggcatcacaatgatatttatagcgccttccccctcagttcaggacaaac

SEQ ID NO: 47744 - DNA, 75 bp, synthetic construct
  source 1..75: mol_type = other DNA
ctgcagtacgttcgcatcctgagctggataagctgacaaaccatcatcttggaagactggcgcattcggtggaaa

SEQ ID NO: 47745 - DNA, 75 bp, synthetic construct
  source 1..75: mol_type = other DNA
cgctgatgaatatgccattccggtaccagttcctgaatatgtggttactacttctagcgaactgatcgccatcat

SEQ ID NO: 47746 - DNA, 75 bp, synthetic construct
  source 1..75: mol_type = other DNA
tggatagtaaagaatcctggttaataatctgtgatagtcagttgggccatttaatgcgcagtatgtatcagggac

SEQ ID NO: 47747 - DNA, 75 bp, synthetic construct
  source 1..75: mol_type = other DNA
gggtaaatatgaacctgcggggattgttcatcgcggggagtttgtcttcacgaaggaggcgaccagccggattgg

SEQ ID NO: 47748 - DNA, 75 bp, synthetic construct
  source 1..75: mol_type = other DNA
gggggtgacggccagcggtaaaaaaatcccgcaggtcaccataacccgcagcgacggcgaccgccatcattttgc

SEQ ID NO: 47749 - DNA, 75 bp, synthetic construct
  source 1..75: mol_type = other DNA
aagccgacagcgttaacgtacaggcactgaacatagggcgcattgtcgttgacgtcgatggtattgagctcgctg

SEQ ID NO: 47750 - DNA, 75 bp, synthetic construct
  source 1..75: mol_type = other DNA
aagcggcaacactggaagatgtaggtcgtgaaattggcctcacccgtgaacgtgttcgccagattcaggttgaag

SEQ ID NO: 47751 - DNA, 75 bp, synthetic construct
  source 1..75: mol_type = other DNA
tgaacaccggggcgcgccggatgtggtcaccatccgtgcccggagtgcagattttcgcgggacgctcaattcccg

SEQ ID NO: 47752 - DNA, 75 bp, synthetic construct
  source 1..75: mol_type = other DNA
ggagctggataaatcagcgtttgggaagtataacgtggacaatgcaataaacgccaatattcgttattatttctg

SEQ ID NO: 47753 - DNA, 75 bp, synthetic construct
  source 1..75: mol_type = other DNA
ctgtcttcgacagcacagactctggcggcaacggttagtgccgaaattccttatcagaccttccgtgactttgcc

SEQ ID NO: 47754 - DNA, 75 bp, synthetic construct
  source 1..75: mol_type = other DNA
cccctcactttgaagggatcggagctataaaaatggtgttatccggcttcctgcattgcaggttttcgaaagaat

SEQ ID NO: 47755 - DNA, 75 bp, synthetic construct
  source 1..75: mol_type = other DNA
gatccgattgggctgaaggggggatggaatttttatcagtatccgttgaatccgatctcaaatatagatccatta

SEQ ID NO: 47756 - DNA, 75 bp, synthetic construct
  source 1..75: mol_type = other DNA
gtgatgttaattacctaccagaacgttactcctcttcttcaggttgcggagcatcgtgaagctggtcgcttcact

SEQ ID NO: 47757 - DNA, 75 bp, synthetic construct
  source 1..75: mol_type = other DNA
gcttcgtctaccgtgtgaatatgacaataccttcaacagcagaacgacctggtttggtatggattttatcgaaac

SEQ ID NO: 47758 - DNA, 75 bp, synthetic construct
  source 1..75: mol_type = other DNA
agcggcttcacgacgtccttggagcttgaggtcaggctttctgatgtggagtacgaaacagaagatgatgagtga

SEQ ID NO: 47759 - DNA, 75 bp, synthetic construct
  source 1..75: mol_type = other DNA
accccttataccctgatgcaggcgattgcagcagaaggtgatgtggtggtcagtggtgcaactgagccggagtga

SEQ ID NO: 47760 - DNA, 75 bp, synthetic construct
  source 1..75: mol_type = other DNA
tcacacggatgatctcgctttcggacttcgtatctccggtaaagggcgtgcgcttcttgcacggtatatccagca

SEQ ID NO: 47761 - DNA, 75 bp, synthetic construct
  source 1..75: mol_type = other DNA
gccgccagctggtgcacgttgagaacggtaaacactttattatccgcaatattaaagccaaaaatattacgcctg

SEQ ID NO: 47762 - DNA, 75 bp, synthetic construct
  source 1..75: mol_type = other DNA
ggagagccacaggtcggcccttcatctgagccggactggttctacgtggttgtgcttaccggacagtccaacagc

SEQ ID NO: 47763 - DNA, 75 bp, synthetic construct
  source 1..75: mol_type = other DNA
tagccgcacggcacaagctgaagatggcactgggtgaagacctgtcggataagccagtggatcatatagaccaga

SEQ ID NO: 47764 - DNA, 75 bp, synthetic construct
  source 1..75: mol_type = other DNA
tcggggctttgaggcagaccagcttgatctggagctggacgacgctgacggaaaaatcgtgctgccgcgccgtgg

SEQ ID NO: 47765 - DNA, 75 bp, synthetic construct
  source 1..75: mol_type = other DNA
agcaaaactatcgatctggaaaccgcaggcggagtcatcgatcgggacaccattaagtggtggctgaaacagtca

SEQ ID NO: 47766 - DNA, 75 bp, synthetic construct
  source 1..75: mol_type = other DNA
acgtgttcgtaatggacgcattcggtactgctcaccgcgcgcaggcttctactcacggtatcggtaaattcgctg

SEQ ID NO: 47767 - DNA, 75 bp, synthetic construct
  source 1..75: mol_type = other DNA
taaagattacctcgacggcgttgacgttgctgaaggtgaactggttgttctggaaaacgttcgcttcaacaaagg

SEQ ID NO: 47768 - DNA, 75 bp, synthetic construct
  source 1..75: mol_type = other DNA
gcgatgacgccaattctgagccagtaactctcgactggaaaagacagctcgtgattgccgccgtctatggtttgt

SEQ ID NO: 47769 - DNA, 75 bp, synthetic construct
  source 1..75: mol_type = other DNA
caaatacgcaacaaaacgagccagaaacgaaacagcctgagccagtagaaacggagaaagtttgcaccgcctgcg

SEQ ID NO: 47770 - DNA, 75 bp, synthetic construct
  source 1..75: mol_type = other DNA
tgtggaggtggacaaggttgcagaggctttcggaaaactgaccactgacccgacgtcggggctgattgcgatggc

SEQ ID NO: 47771 - DNA, 75 bp, synthetic construct
  source 1..75: mol_type = other DNA
atgctggctatcactgggtggcagtcgtggaagcctcgcaggaactccttgaacttggtcgacaggaatatcgcc

SEQ ID NO: 47772 - DNA, 75 bp, synthetic construct
  source 1..75: mol_type = other DNA
aaacaactaattttatcaactgcggctgtgttacgcttaagggcttagaacttgattcctttgcattaaatattg

SEQ ID NO: 47773 - DNA, 75 bp, synthetic construct
  source 1..75: mol_type = other DNA
gatatcgacaggataaatcaccatattgttaatgtggaaaagattaactttagattgccggaacggagggagtag

SEQ ID NO: 47774 - DNA, 75 bp, synthetic construct
  source 1..75: mol_type = other DNA
gcggcagtatgcataacatcaccctggatgtgcgtggttctgactgcaccatcaaagggctgacgatgagcggct

SEQ ID NO: 47775 - DNA, 75 bp, synthetic construct
  source 1..75: mol_type = other DNA
ggtgatgattaccggcgataaccgtctgactgccgccgcgattgctgcggaagcgggtgtcgatgattttctcgc

SEQ ID NO: 47776 - DNA, 75 bp, synthetic construct
  source 1..75: mol_type = other DNA
ggtgacaggctgaccactgtacagacccaacagacaagaatccagacggtataccagccgggaagcttcacgccg

SEQ ID NO: 47777 - DNA, 75 bp, synthetic construct
  source 1..75: mol_type = other DNA
tgcattcgcatcggctgaaatggcgctggccgctctcgcgtcaggtgaccttaagcattggcacgttagcggttt

SEQ ID NO: 47778 - DNA, 75 bp, synthetic construct
  source 1..75: mol_type = other DNA
atgactaagaaatacacactaatctatgcagatccaccctgggtataccgggacaaagccgcagatggtaatcgc

SEQ ID NO: 47779 - DNA, 75 bp, synthetic construct
  source 1..75: mol_type = other DNA
ggtgaaatcacggtagatgaaggggcaaccgccgccattcttgaacgcggcagctccctgttgccgaaaggcatt

SEQ ID NO: 47780 - DNA, 75 bp, synthetic construct
  source 1..75: mol_type = other DNA
cctcgggtaccgttacggctattgcgccccactctacggctcatccttcagctttagctgaattaagcgtgatta

SEQ ID NO: 47781 - DNA, 75 bp, synthetic construct
  source 1..75: mol_type = other DNA
aaaacttccgtcttttagctgatgcagagcttgtattggaggaacagacgaccgtcattgttggacgaaacaaca

SEQ ID NO: 47782 - DNA, 75 bp, synthetic construct
  source 1..75: mol_type = other DNA
gggtgacgattatgacatttaccacacagcgcctgccgtcaggtgcgatccagcagatatggacggaaggggaaa

SEQ ID NO: 47783 - DNA, 75 bp, synthetic construct
  source 1..75: mol_type = other DNA
actactcaagaataaaaactgttgatggttttaatatttttgtgattcctccggagtatcgggttcagctcgatc

SEQ ID NO: 47784 - DNA, 75 bp, synthetic construct
  source 1..75: mol_type = other DNA
aagtgatggatgctaatggcatgacaataaaggcattatctgacttatcaaaaattccatatcgctcacttcaaa

SEQ ID NO: 47785 - DNA, 75 bp, synthetic construct
  source 1..75: mol_type = other DNA
gaaatttctggtccttccgtacgggaaatcagcagaggtgattccccatcaggggaaggactgggtacaactgat

SEQ ID NO: 47786 - DNA, 75 bp, synthetic construct
  source 1..75: mol_type = other DNA
gaaaaggcggtggcagtggtccggttgattacctgctgggaagggagcgtaaccgggaaggggcaacggtgcttc

SEQ ID NO: 47787 - DNA, 75 bp, synthetic construct
  source 1..75: mol_type = other DNA
cttaaagacattcaggaagaaatgacgcccatcggtattcaggtaatgagcctctcatatgtgggtaagccggag

SEQ ID NO: 47788 - DNA, 75 bp, synthetic construct
  source 1..75: mol_type = other DNA
gagcgtgaggcagcagaacgcgcagagcgcgaaagaaagcgccaggaactgctccagttgattgccggagaaggt

SEQ ID NO: 47789 - DNA, 75 bp, synthetic construct
  source 1..75: mol_type = other DNA
tgcctgcccgttatcaactcgatacccaggcgctgagcctgcgttttcaggatctacaacgtcagtatcatcctg

SEQ ID NO: 47790 - DNA, 75 bp, synthetic construct
  source 1..75: mol_type = other DNA
atagcacctcctgagcaggtttattctggagaagaactataccggcaggaagtgtctggccgcctcaatacagtt

SEQ ID NO: 47791 - DNA, 75 bp, synthetic construct
  source 1..75: mol_type = other DNA
cgtccgcttgctttacagaagctgcttgatgagggccatttcatggaagatttcctcattgacaaactgcaacct

SEQ ID NO: 47792 - DNA, 75 bp, synthetic construct
  source 1..75: mol_type = other DNA
ggctgagcgaataaacggtatcctgaaagatgagtttttactctcgcgtcctgcagacctggcgcaggcccggga

SEQ ID NO: 47793 - DNA, 75 bp, synthetic construct
  source 1..75: mol_type = other DNA
tctctgggtggaacaccaggataaggggcggctcgaactgaattttgtcatcccgaacatggagctacagagcgg

SEQ ID NO: 47794 - DNA, 75 bp, synthetic construct
  source 1..75: mol_type = other DNA
ggtatttattttgaccacgacccgaactacatcatgcagatggccggacgtgcggcagcgcttggcgttgaacgt

SEQ ID NO: 47795 - DNA, 75 bp, synthetic construct
  source 1..75: mol_type = other DNA
gtttgcctttgcagtggcggcacaggtgctgacgtggtgtgagacgcgcagcttgtggcgtactgctgcggccat

SEQ ID NO: 47796 - DNA, 75 bp, synthetic construct
  source 1..75: mol_type = other DNA
gaaatctgctgtcaatgctaatatgggacttttttgttatagacaagtgactccttttgcaacttttatagcacg

SEQ ID NO: 47797 - DNA, 75 bp, synthetic construct
  source 1..75: mol_type = other DNA
tgttgatattattaatgccaatacaaatttaagcgtaacatatgaaggtattaaatctggcaagaggatagaatc

SEQ ID NO: 47798 - DNA, 75 bp, synthetic construct
  source 1..75: mol_type = other DNA
gctcatttagccgtttgaagatgaaactaggttggatgccgccacacccatcattttatatgaaacgcgattgtt

SEQ ID NO: 47799 - DNA, 75 bp, synthetic construct
  source 1..75: mol_type = other DNA
tggcgaacgaattgaagaggcactacgccgcgaaattcgcgaagaactgggagaacagctgcttttgacagaaat

SEQ ID NO: 47800 - DNA, 75 bp, synthetic construct
  source 1..75: mol_type = other DNA
ccatgccacaggcgagttccatcgtttacatcgcattgattggtggcgctggttacaacgtcggttccccacatc

SEQ ID NO: 47801 - DNA, 75 bp, synthetic construct
  source 1..75: mol_type = other DNA
ttcctggtccccctggaaaaaatatcctggatcgcgggcagtgaacgcgcatgcttattttcctggtatctgttg

SEQ ID NO: 47802 - DNA, 75 bp, synthetic construct
  source 1..75: mol_type = other DNA
tcatgagcttgaaggtcaaagtaacgagatatcaaaagttcttgacgttatacgagggatcgccgagcaaacgaa

SEQ ID NO: 47803 - DNA, 75 bp, synthetic construct
  source 1..75: mol_type = other DNA
caagcagtgatgtagccaaagttgtggtgtggtgtgaaataattggagagccgtttgatgaagatttctggaaaa

SEQ ID NO: 47804 - DNA, 75 bp, synthetic construct
  source 1..75: mol_type = other DNA
gccgtttccctgagtttctggcacgccttgcggcatatcgtggccgcaaaatgacgcgtattgcagtcgagttat

SEQ ID NO: 47805 - DNA, 75 bp, synthetic construct
  source 1..75: mol_type = other DNA
tggtgggcgtgctgggggcgcttttgctggcgtatggtgcctggctgatttatcccccggcgggttttgttgttg

SEQ ID NO: 47806 - DNA, 75 bp, synthetic construct
  source 1..75: mol_type = other DNA
tggcacagggagggattcagctccccgtactggatccggagagtgcgattttgatagcacttgaaagagctgtgt

SEQ ID NO: 47807 - DNA, 75 bp, synthetic construct
  source 1..75: mol_type = other DNA
ctatcactattctggcaggccgttaacccgactggcggttgaactcacattgttagttttcatccgttcaagcga

SEQ ID NO: 47808 - DNA, 75 bp, synthetic construct
  source 1..75: mol_type = other DNA
ttcttatggttactgggagaacatccggttgattatgtgaaatgggacatgaatcgtgagcttgtacaggcaggg

SEQ ID NO: 47809 - DNA, 75 bp, synthetic construct
  source 1..75: mol_type = other DNA
atgcacaaactctcaaaacgtccgacgatgggagatgagcgtgttgaaggtcgtggtgaggatctcagccatgct

SEQ ID NO: 47810 - DNA, 75 bp, synthetic construct
  source 1..75: mol_type = other DNA
ttgtccggtaccagttacggcattgccgggctgctgatgctggcggtcagccaccggttgtatcaggcggaagac

SEQ ID NO: 47811 - DNA, 75 bp, synthetic construct
  source 1..75: mol_type = other DNA
gtgtttcactgcctcagaatgaggcccaccccgcctcagcacaacaaatgcatgtgcaaaaaacaaacagaacta

SEQ ID NO: 47812 - DNA, 75 bp, synthetic construct
  source 1..75: mol_type = other DNA
tgactctctaatattgaataatccgggactagcattagatataacaatgatagcttctcgtggaaatgttgcaga

SEQ ID NO: 47813 - DNA, 75 bp, synthetic construct
  source 1..75: mol_type = other DNA
aagctaaataatgatgtgtataaagaacttaataagtttatgcacgattacgacaaaacatcatcagaaatgaga

SEQ ID NO: 47814 - DNA, 75 bp, synthetic construct
  source 1..75: mol_type = other DNA
aagcgtgccgaaacctctgaccgcagcagcaatccgatgctgcaggatgtggcggtcggctggctgcagaaatac

SEQ ID NO: 47815 - DNA, 75 bp, synthetic construct
  source 1..75: mol_type = other DNA
atgtacggaacatgcgaaacgctctgccgggcgctggcagcaaagtatccgggagatacgccgctgatgctggtt

SEQ ID NO: 47816 - DNA, 75 bp, synthetic construct
  source 1..75: mol_type = other DNA
atacacaggagtattcaaaaccctggcaagtattgatgacaaaccgtcccgtttcgaaattttgataccattggt

SEQ ID NO: 47817 - DNA, 75 bp, synthetic construct
  source 1..75: mol_type = other DNA
agcagtggagcttcgttggcagcaaggcgcaacaacactggctctggtacgcgtacaacacaaaaacgggtggcg

SEQ ID NO: 47818 - DNA, 75 bp, synthetic construct
  source 1..75: mol_type = other DNA
atgaaagagctgataactgaaatggcctttaatggtgccggggttcgcgataccgccaggacactgaaaattggt

SEQ ID NO: 47819 - DNA, 75 bp, synthetic construct
  source 1..75: mol_type = other DNA
ccgttctggtcattaaacgcgtgttcaggttgaccctgcgggctgcacagggttttattgattccatttttacac

SEQ ID NO: 47820 - DNA, 75 bp, synthetic construct
  source 1..75: mol_type = other DNA
tgctggtcattaaacgcgtattcaggctgaccctgcgcgctgcgcagggctttattgattccatttttacactga

SEQ ID NO: 47821 - DNA, 75 bp, synthetic construct
  source 1..75: mol_type = other DNA
ttaatattccctgtacacttttcgaaactattagtttattcgatgatttttctgctgatgatatgcaatatggtg

SEQ ID NO: 47822 - DNA, 75 bp, synthetic construct
  source 1..75: mol_type = other DNA
agtaccattttataattatagtactaattatccaacggatagaagtaaaccatcaaattggtcttcaggaacaga

SEQ ID NO: 47823 - DNA, 75 bp, synthetic construct
  source 1..75: mol_type = other DNA
atgtacggaacatgcgaaatactctgccgggagctggcagcaaagtatccgggagacacgccgctgatgctggtt

SEQ ID NO: 47824 - DNA, 75 bp, synthetic construct
  source 1..75: mol_type = other DNA
taccaacaacctgattgacgaggtttatcaggatgacccgaaactcgttgccatcgttggccgtaagctgctggc

SEQ ID NO: 47825 - DNA, 75 bp, synthetic construct
  source 1..75: mol_type = other DNA
actaccgcgctattgaccttacagagcactggctgagagtggcgataaaaatcatcgaccgaaacacgggggaag

SEQ ID NO: 47826 - DNA, 75 bp, synthetic construct
  source 1..75: mol_type = other DNA
tgaataatgtacttttagtttcattgtatgccagtcagcggcaaacggaacatgggccagtaccattatttaatg

SEQ ID NO: 47827 - DNA, 75 bp, synthetic construct
  source 1..75: mol_type = other DNA
gaatagccgcgatccgcaggcactgaaaactctggcggggcagtttgatctcattatcaatactgtgaacgtcag

SEQ ID NO: 47828 - DNA, 75 bp, synthetic construct
  source 1..75: mol_type = other DNA
ctctggcaggagaaagtggatgcaatgcaggagtctgccacccgtcagcgtgaacaggataccatccggaagttt

SEQ ID NO: 47829 - DNA, 75 bp, synthetic construct
  source 1..75: mol_type = other DNA
gtcctggcacgcctggaggacatcccggaagaacagcggattgagtccggtatttcttccgctgcggtgatggag

SEQ ID NO: 47830 - DNA, 75 bp, synthetic construct
  source 1..75: mol_type = other DNA
gggtgatcccactgccggaaaatatcgatatcgagtccgccgggccgctgctgtgtggtggtatcacggtcttta

SEQ ID NO: 47831 - DNA, 75 bp, synthetic construct
  source 1..75: mol_type = other DNA
ctgttgactccgttctgtatcggcatggtgaccagcgatgactggggcagctacgccagagaagtgccgaaggag

SEQ ID NO: 47832 - DNA, 75 bp, synthetic construct
  source 1..75: mol_type = other DNA
cagagatcggggcgttaccgtcaggtggaacagcagtatcatcagttaatctggcttcaaaaggtcgggtaaccg

SEQ ID NO: 47833 - DNA, 75 bp, synthetic construct
  source 1..75: mol_type = other DNA
cttcagcacgggatgcgtcggcttcaaaagaggcggcaaaatcatcagaaacgagcgcagcctcgagcgccagta

SEQ ID NO: 47834 - DNA, 75 bp, synthetic construct
  source 1..75: mol_type = other DNA
gtatcaaacctaaagaagttaccgtatatccccaatatgccatgcgtggcactgttttagatgaaaaggaaacaa

SEQ ID NO: 47835 - DNA, 75 bp, synthetic construct
  source 1..75: mol_type = other DNA
ttcgaaccgtgcaggatctgctcggccattccgacgtctctacgacgatgatttacacgcatgtgctgaaagttg

SEQ ID NO: 47836 - DNA, 75 bp, synthetic construct
  source 1..75: mol_type = other DNA
aatctgggtgccgttgccgtcgataccgggatcttcaccggtcgttcaccaaaagataagtatatcgtccgtgac

SEQ ID NO: 47837 - DNA, 75 bp, synthetic construct
  source 1..75: mol_type = other DNA
gcggctgaacgaatgggagagcgccttcgtggaattgcagaagatgttttcgcttacgcaacgggacaacgcgat

SEQ ID NO: 47838 - DNA, 75 bp, synthetic construct
  source 1..75: mol_type = other DNA
gaaccctggcgtcatggagctggaagccatcaacaagtggaacggtacactgccgcaatacatgaccagtggtgc

SEQ ID NO: 47839 - DNA, 75 bp, synthetic construct
  source 1..75: mol_type = other DNA
atgaaagtaaaaggtgttccgttcagtcaggtaaagcaaaaactgcttaatactccagaagctgtcaaagggtat

SEQ ID NO: 47840 - DNA, 75 bp, synthetic construct
  source 1..75: mol_type = other DNA
gaactgtcccggcagcagaaaaaactgctctggcgggtgatcaaagggcggatactgtttccggcgctgaccgcg

SEQ ID NO: 47841 - DNA, 75 bp, synthetic construct
  source 1..75: mol_type = other DNA
ttcgcaagggttttattgatgctgagcaggttaaaaaactagcagcaccgttatcaaagaatgcctatggacaat

SEQ ID NO: 47842 - DNA, 75 bp, synthetic construct
  source 1..75: mol_type = other DNA
ctgaaaaattaattgaaatgctaaatgaagaaattaatgaagaaataatcatgaaaatcatgagtttagggaaaa

SEQ ID NO: 47843 - DNA, 75 bp, synthetic construct
  source 1..75: mol_type = other DNA
gtggcggtgccggaagagacggagaaaaaagcgcgcgacgtcaacgagaaaacggcgctgctgaagaagaaatcc

SEQ ID NO: 47844 - DNA, 75 bp, synthetic construct
  source 1..75: mol_type = other DNA
tggccggtggttccggtacacgtctgtatccagtgactatggctgttagtaaacaattgttgcctatttatgata

SEQ ID NO: 47845 - DNA, 75 bp, synthetic construct
  source 1..75: mol_type = other DNA
atgaccggctgggaactgcgaatctggcgaaaaagcatgctctggtcacgcgaaaaagcggccagagaatttggc

SEQ ID NO: 47846 - DNA, 75 bp, synthetic construct
  source 1..75: mol_type = other DNA
acgtccgagacgaacgctaagtcttctgaaacggcagcgggacagagtgcctcagctgcggcaggctcaaaaaca

SEQ ID NO: 47847 - DNA, 75 bp, synthetic construct
  source 1..75: mol_type = other DNA
agggttgcacagaagcatcagttgtctttagaaaatcatcgtggtaagcaattcaccgcttcactaggacgtaaa

SEQ ID NO: 47848 - DNA, 75 bp, synthetic construct
  source 1..75: mol_type = other DNA
ctgtggattgtcaacagcgtcagtaaatccgagcgtgaaagcattatcgccgcgctgcacgggcagtcgattttc

SEQ ID NO: 47849 - DNA, 75 bp, synthetic construct
  source 1..75: mol_type = other DNA
taatgaaattccgtaagtgtagttcgttcgaaacgctcgaaaaagtatttgaaaggttatgtgaaaaaaactcgg

SEQ ID NO: 47850 - DNA, 75 bp, synthetic construct
  source 1..75: mol_type = other DNA
tacagtcgcgttgccgtggttcgggccagtgcactaatgggggcgttgggtattgggctgattatttttgtcgat

SEQ ID NO: 47851 - DNA, 75 bp, synthetic construct
  source 1..75: mol_type = other DNA
tctgttacgcgcaccgccgataaagattctgcaaaaacttttgttcaggagacgctgaaagatacctgggagtct

SEQ ID NO: 47852 - DNA, 75 bp, synthetic construct
  source 1..75: mol_type = other DNA
atgcgtattgaaatctgtatagccaaagaaaaaatgactaaaatgccaaccggtgctgtggatgcgttaaaggaa

SEQ ID NO: 47853 - DNA, 75 bp, synthetic construct
  source 1..75: mol_type = other DNA
accattttaagagtcgtcgataaagagtctgctcaagagttcgttcaggaaacgctgcaggaagtctgggaaaca

SEQ ID NO: 47854 - DNA, 75 bp, synthetic construct
  source 1..75: mol_type = other DNA
attgaattaagcatcaaatggccaattggcgacgaaactgagttgatcgtttcagaaaaagatatgttaggcaat

SEQ ID NO: 47855 - DNA, 75 bp, synthetic construct
  source 1..75: mol_type = other DNA
atcgttgagactgttttgcaggtagatcgattcgaaaagtatatgttgtggttattaaaggataaaacgctacct

SEQ ID NO: 47856 - DNA, 75 bp, synthetic construct
  source 1..75: mol_type = other DNA
cagaacccgggcatcattaacgtggtgaaagatatggcagaagtaattgttgagccacgtcttgataaggccaat

SEQ ID NO: 47857 - DNA, 75 bp, synthetic construct
  source 1..75: mol_type = other DNA
tcgccatgaaaacggtgacggctggggtctttccacaacatatgatttaggcatgggctttagcgctggtgcggc

SEQ ID NO: 47858 - DNA, 75 bp, synthetic construct
  source 1..75: mol_type = other DNA
aaaagcatggaaaatgctaaccgatggtcagcgctatccggttgcttacctgagcgcacaggaagcttttttacg

SEQ ID NO: 47859 - DNA, 75 bp, synthetic construct
  source 1..75: mol_type = other DNA
tgttacggactcgtgaaaaactggcgttactggagcagcgcatcagtgaactggaagcgcgcaataattcggtag

SEQ ID NO: 47860 - DNA, 75 bp, synthetic construct
  source 1..75: mol_type = other DNA
gcctacctttggaaaatgggttggggtgaacttatctgctgagaataagcatcaattatggattccagaagggtt

SEQ ID NO: 47861 - DNA, 75 bp, synthetic construct
  source 1..75: mol_type = other DNA
tgcgttgttggtgaggtttttgatgttgcggttgatattcgtaaatcatcacctacttttggcaagtgggttggg

SEQ ID NO: 47862 - DNA, 75 bp, synthetic construct
  source 1..75: mol_type = other DNA
gccgcttttacccagcttgatgagtctgcgctggccatggctcttgaatactatgaggatgaagaagctctcaaa

SEQ ID NO: 47863 - DNA, 75 bp, synthetic construct
  source 1..75: mol_type = other DNA
actatcaatataagttggccaattatacaaaactgcaagccaattatttctgaaaaagatgctaatggacatctt

SEQ ID NO: 47864 - DNA, 75 bp, synthetic construct
  source 1..75: mol_type = other DNA
cagtgtgtactttcttcgtgcaatcttgcgcccgtaaaagcaatcatgcagcatcatttcagaattaccacgcca

SEQ ID NO: 47865 - DNA, 75 bp, synthetic construct
  source 1..75: mol_type = other DNA
tctgttacacgcaccgcagataaggattctgcaaaaacatttgttcaggagactctgaaagatacctgggagtct

SEQ ID NO: 47866 - DNA, 75 bp, synthetic construct
  source 1..75: mol_type = other DNA
gttatgacgatgtagaagtgatcgttaaatctgccagcaatgatggactcactattttaagagccgtggataaag

SEQ ID NO: 47867 - DNA, 75 bp, synthetic construct
  source 1..75: mol_type = other DNA
gtaatgatggcgctaaaacttacctgctgcttaccaatcaaggtgatgtttatggtggctggaatacattaagac

SEQ ID NO: 47868 - DNA, 75 bp, synthetic construct
  source 1..75: mol_type = other DNA
aaaatggcagctgcatcgtccgccagttcggcggcgtcatcggcatcatctgcgtctgcttcaaaagatgaggcg

SEQ ID NO: 47869 - DNA, 75 bp, synthetic construct
  source 1..75: mol_type = other DNA
gtttgatgaaatcaatattgtgcgcggtcagctcgttcctggtgagcggctggggataaaaatcacagaactgga

SEQ ID NO: 47870 - DNA, 75 bp, synthetic construct
  source 1..75: mol_type = other DNA
tatgactgcgtgatgcctgtttatcagttccggcgtgatttttctctggtacaggcagcgccccgcagtaaacca

SEQ ID NO: 47871 - DNA, 75 bp, synthetic construct
  source 1..75: mol_type = other DNA
gatgtgctactgagagaggcggcacggcttgaccagtcgagtttcgtagttcagcgggccagaccaatgctgaaa

SEQ ID NO: 47872 - DNA, 75 bp, synthetic construct
  source 1..75: mol_type = other DNA
atcgcctgaaaatggagcatctgagttatcacgttgaaagcctgctggaacaggcagctaaaaaagagctgaact

SEQ ID NO: 47873 - DNA, 75 bp, synthetic construct
  source 1..75: mol_type = other DNA
catcgttcagtgatatgctgtccggcttcaaagataaggtcacatcatccctcaacagcgcggccagctccgtta

SEQ ID NO: 47874 - DNA, 75 bp, synthetic construct
  source 1..75: mol_type = other DNA
ggtctggctgagtgaagccgatgccaaagagctgggtatcgccgataacgactggattgaagtcttcaacagcaa

SEQ ID NO: 47875 - DNA, 75 bp, synthetic construct
  source 1..75: mol_type = other DNA
atgattcagtctcgtggtcgtcctgttactggcagtgaaatagcagagaaatttggtgtttcactttgcgagttc

SEQ ID NO: 47876 - DNA, 75 bp, synthetic construct
  source 1..75: mol_type = other DNA
tggtaaaggcgtagaaccgctgatgaagatgagctggaactacaagcagccgcacgaaccgcaatctgacgaagt

SEQ ID NO: 47877 - DNA, 75 bp, synthetic construct
  source 1..75: mol_type = other DNA
tccggaaggctggcgataaagattattgcagagccaccggataagcgccgtcgtgacctggacaatattctgaaa

SEQ ID NO: 47878 - DNA, 75 bp, synthetic construct
  source 1..75: mol_type = other DNA
attacaagtttcgatgcaatcactattactcaaagcaggtttaaacacagaacaggttgcgcaactggagtccga

SEQ ID NO: 47879 - DNA, 75 bp, synthetic construct
  source 1..75: mol_type = other DNA
ccaaattctgctggaaaatcaggtcatcactgaagaacaactcgatacagcactgcgtaatcgcgtcgaaggtct

SEQ ID NO: 47880 - DNA, 75 bp, synthetic construct
  source 1..75: mol_type = other DNA
tcacaaaatgggtcagtacataaggtagtgtctgcggccagtgtgaatacaagtgctgcaggagcgcacactcat

SEQ ID NO: 47881 - DNA, 75 bp, synthetic construct
  source 1..75: mol_type = other DNA
aacgacattcgtgctggatgctctggagcaggcgttatgggcccgtcgaccgtccggcacagtccatcacagtga

SEQ ID NO: 47882 - DNA, 75 bp, synthetic construct
  source 1..75: mol_type = other DNA
acggtttatatcgatggtgttgcggcttcaatggcttcggtggtcgcaatggctggcgatcgtgttgtgatgccg

SEQ ID NO: 47883 - DNA, 75 bp, synthetic construct
  source 1..75: mol_type = other DNA
tcaccgccagtgattacgattaccatcagacggtagctggtgcggttgaggattaccagtacagtggcgagagtc

SEQ ID NO: 47884 - DNA, 75 bp, synthetic construct
  source 1..75: mol_type = other DNA
cgatctgtggctggcaccgaaacagggcaccgatgcggcaatggcgctggcaatgggtcacgtaatgctgcgtga

SEQ ID NO: 47885 - DNA, 75 bp, synthetic construct
  source 1..75: mol_type = other DNA
ttgaaggaatgactttcttacggccggttgcggtcggcgatgtggtgtgctgctatgcacgctgtgtccagaaag

SEQ ID NO: 47886 - DNA, 75 bp, synthetic construct
  source 1..75: mol_type = other DNA
cagcggccagtattactgacctaaaaaaaaatcctatgggaaccgtagctgaaggtgaaggggacgctgttgcga

SEQ ID NO: 47887 - DNA, 75 bp, synthetic construct
  source 1..75: mol_type = other DNA
ataaagatcgctatcagatccgccgcgtgctgaacgaacgtctggggtatgacggcccggaaaccccggaagcca

SEQ ID NO: 47888 - DNA, 75 bp, synthetic construct
  source 1..75: mol_type = other DNA
gcaaaatatcaagaagttgcgccaaacaacatggtgtatgatcgaactcagaaggcttacattacgactcctgat

SEQ ID NO: 47889 - DNA, 75 bp, synthetic construct
  source 1..75: mol_type = other DNA
aataattgagccagttattgaattgtataacgacgtggtatgggcgtcgttcaacacactgcacaataaaattaa

SEQ ID NO: 47890 - DNA, 75 bp, synthetic construct
  source 1..75: mol_type = other DNA
aaagaaatccgccaggcattcgcagaagaagcggcaaacgccgtcagtgaagaactgcgcgggcaggatggcatc

SEQ ID NO: 47891 - DNA, 75 bp, synthetic construct
  source 1..75: mol_type = other DNA
gagttgcgcggcgtggatggcatgagcgagcagatagaattccgtatcaggcagatgctgcttggtaaggcgtag

SEQ ID NO: 47892 - DNA, 75 bp, synthetic construct
  source 1..75: mol_type = other DNA
aatgcctaaaggaatcagggagttcggggaagatgtggagaaaaaaatccgccaaaccctacaagcgcagctgac

SEQ ID NO: 47893 - DNA, 75 bp, synthetic construct
  source 1..75: mol_type = other DNA
aatatttgagccgattgttgaactgtatatcgatatggtatgggaaccattcagggcgctacacaacaaaattaa

SEQ ID NO: 47894 - DNA, 75 bp, synthetic construct
  source 1..75: mol_type = other DNA
tatgagcccgatgcaagactggttgcagaagagattaaattccggattcaatctctgtatgatgatgaacaaaag

SEQ ID NO: 47895 - DNA, 75 bp, synthetic construct
  source 1..75: mol_type = other DNA
atgactacattattcagaaaagaatatccgcgaaaaagtagagcgacagaatttttgtttctcattctgtttatc

SEQ ID NO: 47896 - DNA, 75 bp, synthetic construct
  source 1..75: mol_type = other DNA
gaatgccgcagcctgacgctgcgcgaaatccatcgttttaacaatgggctgcatagccagaacggttatgtcacc

SEQ ID NO: 47897 - DNA, 75 bp, synthetic construct
  source 1..75: mol_type = other DNA
tttatcgcgatatccagttgctgctgattggtgttgtggtgctggcgatggcctttgccgaaggttctgccaacg

SEQ ID NO: 47898 - DNA, 75 bp, synthetic construct
  source 1..75: mol_type = other DNA
cccggatctgcttatccctgttcgtgctgcagaagctaaacaaatttatgaaatcgccagtcgtctgcagcaaag

SEQ ID NO: 47899 - DNA, 75 bp, synthetic construct
  source 1..75: mol_type = other DNA
ctgaatttactggtttttattcgttccagtgaactcagatatgcccgctggtctgaaattgatattgacaatgcc

SEQ ID NO: 47900 - DNA, 75 bp, synthetic construct
  source 1..75: mol_type = other DNA
agctcaatgtttgacgaccatccggcatccgccgaacgcgcccagcatattcgcgatcgtatgagcgcggatggg

SEQ ID NO: 47901 - DNA, 75 bp, synthetic construct
  source 1..75: mol_type = other DNA
tacggaactaaatccacaaataacaccggagcacatacacacaactttgcttacaacaatacttcagcatacgca

SEQ ID NO: 47902 - DNA, 75 bp, synthetic construct
  source 1..75: mol_type = other DNA
ccggagcacatacacacaactttgcttacaacaatacttcagcatacgcagaaactcccggtaccggtggtggaa

SEQ ID NO: 47903 - DNA, 75 bp, synthetic construct
  source 1..75: mol_type = other DNA
gcagagcaggctgtcaaggatgctgacgcgatagtccagaaagcggtcgataaacttgctgatgccgcaacgctg

SEQ ID NO: 47904 - DNA, 75 bp, synthetic construct
  source 1..75: mol_type = other DNA
gtagtactgtattggtgagcttattgtttgggcttgcattcgttttggtaaatagttggtttaatcagccaaccg

SEQ ID NO: 47905 - DNA, 75 bp, synthetic construct
  source 1..75: mol_type = other DNA
taaccgcgtcgctcaccgggccgaccggcgttatcgatcttggtcagggttctgcgaactctgaggaaggtatca

SEQ ID NO: 47906 - DNA, 75 bp, synthetic construct
  source 1..75: mol_type = other DNA
atgacagtaaaaatttctggcgtgcttaaagatggcaccggcaaagcggtacctggatgcacgattgaactcaaa

SEQ ID NO: 47907 - DNA, 75 bp, synthetic construct
  source 1..75: mol_type = other DNA
ctgcgcgttcgtgtgcattccagaaacagcctgatttcaataacgctaaagagggcggaaccgtcgcctgggtat

SEQ ID NO: 47908 - DNA, 75 bp, synthetic construct
  source 1..75: mol_type = other DNA
tgacagtaatgaccatcagttacgtctgctggatgagcgtaaaagcacactgatggcggggatatcctggtctca

SEQ ID NO: 47909 - DNA, 75 bp, synthetic construct
  source 1..75: mol_type = other DNA
caacagtgggccacaggcatttaatgatatgcgtctggcgctgacgcagctgatgcaaagtttccactacgggca

SEQ ID NO: 47910 - DNA, 75 bp, synthetic construct
  source 1..75: mol_type = other DNA
gtgctggcctctgaatttcgggatgtgctgcgctgtattcgctgcggggcttgtatgaatacttgtccggcatat

SEQ ID NO: 47911 - DNA, 75 bp, synthetic construct
  source 1..75: mol_type = other DNA
caacgccaaaggcagtaaaagcagcctatgacaatgcagagaaacgtctgcagaaagaccagaacggcgctgata

SEQ ID NO: 47912 - DNA, 75 bp, synthetic construct
  source 1..75: mol_type = other DNA
cttgccgggagatatggcaggtgcgcccgcgctgcaattcttcccgtggccggatgtcgatgcctggggcgagtc

SEQ ID NO: 47913 - DNA, 75 bp, synthetic construct
  source 1..75: mol_type = other DNA
ggaaagcacggttagggagaataactaaagccggcgacagctatctcagaacacttcttgttttgggggcgagat

SEQ ID NO: 47914 - DNA, 75 bp, synthetic construct
  source 1..75: mol_type = other DNA
tgcttgagaattttaagttccccataccttgccccaacaacctagagaagtcgctcgccatccagtctgaaatcg

SEQ ID NO: 47915 - DNA, 75 bp, synthetic construct
  source 1..75: mol_type = other DNA
tgtcatcactcaaagataataaattatatcgatactttgatgaacactttaacgttattacatgcattagtgtca

SEQ ID NO: 47916 - DNA, 75 bp, synthetic construct
  source 1..75: mol_type = other DNA
gcagaaacaccggaatcggtgattgcccgtacccgcaaagaaaacgaccttggcgtgggttattatcagccgtaa

SEQ ID NO: 47917 - DNA, 75 bp, synthetic construct
  source 1..75: mol_type = other DNA
tcgacgttaatgaagattattgccggtattacccctgctgatagcggtacgctggagattgggggcaacaactac

SEQ ID NO: 47918 - DNA, 75 bp, synthetic construct
  source 1..75: mol_type = other DNA
aaaatcaataacttaggttttaaagttcaatatgagcattacctgtttgaaggagaacaaggtaagcgcgacagc

SEQ ID NO: 47919 - DNA, 75 bp, synthetic construct
  source 1..75: mol_type = other DNA
cgtggtgaaaccggtgccagaggagaaaagggcgaccctggcggcccgccggggccgaagggtgacacaggcgct

SEQ ID NO: 47920 - DNA, 75 bp, synthetic construct
  source 1..75: mol_type = other DNA
caaattcctacagacacacatgagttcatgacgccggacggattgttgtcacgtcgcgcaattgttgctgtggaa

SEQ ID NO: 47921 - DNA, 75 bp, synthetic construct
  source 1..75: mol_type = other DNA
aagcatccatgaccagcgttgagatcgcagagttggtgggaagccgaccagatagtgttaagagaactattgaaa

SEQ ID NO: 47922 - DNA, 75 bp, synthetic construct
  source 1..75: mol_type = other DNA
gtcattgataaactggtaacaaagtgctggcaggaagaagcattcgcagagttacagttgcaaaaagtgacacga

SEQ ID NO: 47923 - DNA, 75 bp, synthetic construct
  source 1..75: mol_type = other DNA
atcaccacagtgctggataaccgcctgatggggctgacgctgacggataaccggggatttgaagcggaccagctt

SEQ ID NO: 47924 - DNA, 75 bp, synthetic construct
  source 1..75: mol_type = other DNA
atgtgggtcagcatcgttaaagattatgtcgtgccgatcctgtcggcaacggccacagccggggggatcttcatg

SEQ ID NO: 47925 - DNA, 75 bp, synthetic construct
  source 1..75: mol_type = other DNA
ggcaaccgctggcgggatattcatggcgctgatgcgcaaaacgtttgtcccccgcgaggcctttgaaaaactctc

SEQ ID NO: 47926 - DNA, 75 bp, synthetic construct
  source 1..75: mol_type = other DNA
agcaacaacaaaattctttcaagtggctggcggtattactggaggaaaaatatgctggtgaaattaccatttcgg

SEQ ID NO: 47927 - DNA, 75 bp, synthetic construct
  source 1..75: mol_type = other DNA
atgtcagcccgccacttgctatacgacagaagagtgatgctcatattgcgcgacagataaacgaagtggttgaaa

SEQ ID NO: 47928 - DNA, 75 bp, synthetic construct
  source 1..75: mol_type = other DNA
tgacggcctgcccgccgccagaaccggtgatgctattgactgcggcggcgtggttattggtggcggtacggtaaa

SEQ ID NO: 47929 - DNA, 75 bp, synthetic construct
  source 1..75: mol_type = other DNA
caatcaccattaagagcagtaagcaaaatctgggattcataacgtgcggcacgcgttctaatgaagctgtaggct

SEQ ID NO: 47930 - DNA, 75 bp, synthetic construct
  source 1..75: mol_type = other DNA
ggtaaccagttggcgaagtggaacggttggaattacttccaccgaaaggaaccttgcgataacgggagcgaataa

SEQ ID NO: 47931 - DNA, 75 bp, synthetic construct
  source 1..75: mol_type = other DNA
gggtaacgaggatgtatcggtgtggtggaaccgtctgtgtgacaacgtactgtcggaaaaaaccatgccgtttga

SEQ ID NO: 47932 - DNA, 75 bp, synthetic construct
  source 1..75: mol_type = other DNA
atatttgtttcaccgggaacgtcgtttcgtgtttctgctgaggtggctgccagcatggcggcaggtggtctggca

SEQ ID NO: 47933 - DNA, 75 bp, synthetic construct
  source 1..75: mol_type = other DNA
acgcctgcaggccggacggtggtttgcaccagcgtatgccctccatctgctgtgtattggttttatggtcagtgt

SEQ ID NO: 47934 - DNA, 75 bp, synthetic construct
  source 1..75: mol_type = other DNA
gagcgatgacgcaccggcgacaggctctggtggtttaacaattacggatgtgatggctgcgcaggggatggtgca

SEQ ID NO: 47935 - DNA, 75 bp, synthetic construct
  source 1..75: mol_type = other DNA
aaaaaatgagcctggtgcatatcggaaagaatctgcccgcagaaaaaaaaagccggatttctggcaactctgatt

SEQ ID NO: 47936 - DNA, 75 bp, synthetic construct
  source 1..75: mol_type = other DNA
agatcaaagtgaacgtgggtgacaaagtgtctaccggctcgctgattatggtcttcgaagtcgcgggtgaagcag

SEQ ID NO: 47937 - DNA, 75 bp, synthetic construct
  source 1..75: mol_type = other DNA
acgcgttctaatgaagctgtaggttcacttggatgtacggtatatgggggtagtgagaatagagaaattccatgg

SEQ ID NO: 47938 - DNA, 75 bp, synthetic construct
  source 1..75: mol_type = other DNA
gtcattgataaactggttacaaagtgctggcaggaagaagcgtatgctgaagagcaattgagaaaagtgacaaga

SEQ ID NO: 47939 - DNA, 75 bp, synthetic construct
  source 1..75: mol_type = other DNA
gatagatactcgccccagcgcgttttataacggctggccacaaaccttaaatggcccttctggtcatgaacctgc

SEQ ID NO: 47940 - DNA, 75 bp, synthetic construct
  source 1..75: mol_type = other DNA
ttacgagaccgtcatcaccgccgggtcatccaccgtttttattgatggcctccccgcagctcgtcaggaggatcc

SEQ ID NO: 47941 - DNA, 75 bp, synthetic construct
  source 1..75: mol_type = other DNA
aaaccactggcacgtggagaataagctgcactggcgtctggacgtggtaatgaatgaagacgactgcaaaataag

SEQ ID NO: 47942 - DNA, 75 bp, synthetic construct
  source 1..75: mol_type = other DNA
gcagggttaagacgtaagatgcgaaaagcagccatggacagaaactacctggcgtcagtccttacggggagcggg

SEQ ID NO: 47943 - DNA, 75 bp, synthetic construct
  source 1..75: mol_type = other DNA
tattgccagttatctgcgataattttgtgcaagctctgcaattaaatgcttatccggtattaatcacagagatgg

SEQ ID NO: 47944 - DNA, 75 bp, synthetic construct
  source 1..75: mol_type = other DNA
ctgatcaaggtgaccggacccgcgcaggtgattggcgggcgctcctattgtgtcttcagctccgatgacggtaag

SEQ ID NO: 47945 - DNA, 75 bp, synthetic construct
  source 1..75: mol_type = other DNA
gcaacaggtactgaaaacctgggaaaccggcaaggatgttgaaaactttgaagatggcgttaaataccaacaaac

SEQ ID NO: 47946 - DNA, 75 bp, synthetic construct
  source 1..75: mol_type = other DNA
tctgcggcttaaacgcctgggcctgtccagaacgttccgtcgtctggttgtcacactaatccggcgttatggcgt

SEQ ID NO: 47947 - DNA, 75 bp, synthetic construct
  source 1..75: mol_type = other DNA
ggagcgcatcctgaaagcggtttcgatgaagatttccaaatggaacagcaggccaatgctgaattcatcgccgca

SEQ ID NO: 47948 - DNA, 75 bp, synthetic construct
  source 1..75: mol_type = other DNA
aacggattggttatttcggacgaacgtaccggcttacgccgggcttcggcggttttacacctgtactacatgtaa

SEQ ID NO: 47949 - DNA, 75 bp, synthetic construct
  source 1..75: mol_type = other DNA
cagaccgggaggtatcgaaggctggctaccgattgccggtctgatgaatctgaaatatagccttacaacaggtca

SEQ ID NO: 47950 - DNA, 75 bp, synthetic construct
  source 1..75: mol_type = other DNA
aggtgtgaaagcgggaagcacctcgattgtcgggatgacagcgggtggcgcacaggtcgcagtggccagtattac

SEQ ID NO: 47951 - DNA, 75 bp, synthetic construct
  source 1..75: mol_type = other DNA
tagaagatattgaatctgatgttcgctatgtaggagatggccttatcgaactcactcaacgcttaggcgctgcta

SEQ ID NO: 47952 - DNA, 75 bp, synthetic construct
  source 1..75: mol_type = other DNA
atgaacaaaaacacgtatgacacaatttattcactaattaattattatgaggatgattacctcctgcctttaaac

SEQ ID NO: 47953 - DNA, 75 bp, synthetic construct
  source 1..75: mol_type = other DNA
ccgtttataccggcgaatgcgggtattctgctggttccgtgctgtcgtggtggttcagcgttcaccaccggagct

SEQ ID NO: 47954 - DNA, 75 bp, synthetic construct
  source 1..75: mol_type = other DNA
tcccgtgtggacgtggcgattcgggatttactgcgggagcagagggcgcgtttaatgaggcgtcgggtgcgacag

SEQ ID NO: 47955 - DNA, 75 bp, synthetic construct
  source 1..75: mol_type = other DNA
gggcaaaagcgccagcggtaaaccactgccggtgattactatcacacgtaaggacggcgacagtcaccgctttac

SEQ ID NO: 47956 - DNA, 75 bp, synthetic construct
  source 1..75: mol_type = other DNA
attttcgtgaaacgctgaatacccgccgtgaaaaatcgtggcataacaccaccatcggggaagtggtgaaggaaa

SEQ ID NO: 47957 - DNA, 75 bp, synthetic construct
  source 1..75: mol_type = other DNA
aaacgatccggtggccaccgccagtgccggcggcggctacccggtcgcgattattgaccgcaaccgccctgtttt

SEQ ID NO: 47958 - DNA, 75 bp, synthetic construct
  source 1..75: mol_type = other DNA
ttaaaccaatggattatgatagtttatataaattcagccctgataaaatgatgtcaacaattgtttatgatttta

SEQ ID NO: 47959 - DNA, 75 bp, synthetic construct
  source 1..75: mol_type = other DNA
ttgactatttgtgccgttatttctggtgcagaaggttgggaagatatagaggattttggggaaacacatctcgat

SEQ ID NO: 47960 - DNA, 75 bp, synthetic construct
  source 1..75: mol_type = other DNA
aaacgatccggtggccaccgccagtgcccgcggcggctacccggtcgagataattgaccgtaaccgccctgtttt

SEQ ID NO: 47961 - DNA, 75 bp, synthetic construct
  source 1..75: mol_type = other DNA
atggagatatttagctggaaagtccgtccggatatgaaggtggattcagagcccaaagtggtgacagttaaactg

SEQ ID NO: 47962 - DNA, 75 bp, synthetic construct
  source 1..75: mol_type = other DNA
atgcactggtactcaacgacaacggcggacggagcattcactttgagccgctgctgccgggggaggcggtgtaca

SEQ ID NO: 47963 - DNA, 75 bp, synthetic construct
  source 1..75: mol_type = other DNA
atgaccaaatcggacgggtcatcaatgccttaacgccagagcaacgtgaaaatacgtgggttatttatacctccg

SEQ ID NO: 47964 - DNA, 75 bp, synthetic construct
  source 1..75: mol_type = other DNA
atggcaacaagatagaaccatgtgcagcactggcaaagtcccttgagcatgatgctgaatacacgatgcgaaaag

SEQ ID NO: 47965 - DNA, 75 bp, synthetic construct
  source 1..75: mol_type = other DNA
aacaaaagaaagagccagaaatgacggtcagatattatatcagttctgctgatttaaccgctgagaaattcgcca

SEQ ID NO: 47966 - DNA, 75 bp, synthetic construct
  source 1..75: mol_type = other DNA
aagacggcctttatccggcggctgaaggagcaggtatccgctcagaatctttcatccacggagctgctcagggca

SEQ ID NO: 47967 - DNA, 75 bp, synthetic construct
  source 1..75: mol_type = other DNA
tgaaaaagaacttcgcacatttgcagaaaaagcccagcgagcaacgtttatctgcgcaagctttgatgaaacgct

SEQ ID NO: 47968 - DNA, 75 bp, synthetic construct
  source 1..75: mol_type = other DNA
ggggaaacacatctcgattttttgaagcaatatggtgattttgataatggtattcctgttcacgatactattgcc

SEQ ID NO: 47969 - DNA, 75 bp, synthetic construct
  source 1..75: mol_type = other DNA
cccgcgaacccgcgaagaaagaaagcactacggtgaagcgtaagcacaggactaagaagcagaagaaagagccgg

SEQ ID NO: 47970 - DNA, 75 bp, synthetic construct
  source 1..75: mol_type = other DNA
ggaagatgcggtcgagagtgaactgtttggtcatgctccggaagggaagaaaggattctttgagcaggcgaacgg

SEQ ID NO: 47971 - DNA, 75 bp, synthetic construct
  source 1..75: mol_type = other DNA
ttctgattatttcggtggcctgcgctattgggattatgcgaattattaattcagtaaaaaagattgaacgctttt

SEQ ID NO: 47972 - DNA, 75 bp, synthetic construct
  source 1..75: mol_type = other DNA
ctgtctatgctttatttgctggcaaccttccttcccgtccttgcgcttgctatccgtcgcttacacgataccgac

SEQ ID NO: 47973 - DNA, 75 bp, synthetic construct
  source 1..75: mol_type = other DNA
atgaaactttccctcacgccggaagccgacagcattaacgtgcaggcgatgaacatggggcgcattgtcgttgac

SEQ ID NO: 47974 - DNA, 75 bp, synthetic construct
  source 1..75: mol_type = other DNA
tgcggcgggtccctgcccgttgttctgtccggtgccattcacctgtttaagcccctgtcgccgggggctgataca

SEQ ID NO: 47975 - DNA, 75 bp, synthetic construct
  source 1..75: mol_type = other DNA
cagccggacaccaatgcgcctttcttacatcgagaaaaagaaaggccgccagacgacgcatatcgtattttcctt

SEQ ID NO: 47976 - DNA, 75 bp, synthetic construct
  source 1..75: mol_type = other DNA
acaaaggcaacaaaacgcccgcattcagcatcagtattgagggcagggatatcaccactgtgctggataaccgcc

SEQ ID NO: 47977 - DNA, 75 bp, synthetic construct
  source 1..75: mol_type = other DNA
cagcatcagtattgagggcagggatatcaccactgtcctggataatcgcctgatgagtctgacgctgacggacaa

SEQ ID NO: 47978 - DNA, 75 bp, synthetic construct
  source 1..75: mol_type = other DNA
ggaagtggttttctatcgccctgaagaggatgccggcgatgaaaaagggtatgaatcctttccctggtttattaa

SEQ ID NO: 47979 - DNA, 75 bp, synthetic construct
  source 1..75: mol_type = other DNA
aagcgaagcagggcgattacctggtggggacggatgaaaacgtgctggtacttaatcgcacttatgccaaccgga

SEQ ID NO: 47980 - DNA, 75 bp, synthetic construct
  source 1..75: mol_type = other DNA
caaaaacagggaggtgattatttattcgcggtaaaaggaaaccaggggcggctaaataaagccttcgaggaaaaa

SEQ ID NO: 47981 - DNA, 75 bp, synthetic construct
  source 1..75: mol_type = other DNA
tgattgtaagtgttttttgcaccttgttcctactgaggtatatccctcagatggggcatgctgacatacttacag

SEQ ID NO: 47982 - DNA, 75 bp, synthetic construct
  source 1..75: mol_type = other DNA
ttacagtgtacatataaacccatatctcattccctttttcatcgggctacaaaaccggtttacgcagttccggct

SEQ ID NO: 47983 - DNA, 75 bp, synthetic construct
  source 1..75: mol_type = other DNA
aaaattgttggtccgatgattacctatttattgcccgtgatgattggttctaccggtggtcatctggtcggcggt

SEQ ID NO: 47984 - DNA, 75 bp, synthetic construct
  source 1..75: mol_type = other DNA
cccgacagaaagtggcgtttatccgtcagcttaaagagcaggcaacccgccagaatctttcttcttctgagttgc

SEQ ID NO: 47985 - DNA, 75 bp, synthetic construct
  source 1..75: mol_type = other DNA
cagagcctgtaacgcatgcacaaaacttgatgaaaacatcccgcgaatgctgtccgattatctgatggaaactac

SEQ ID NO: 47986 - DNA, 75 bp, synthetic construct
  source 1..75: mol_type = other DNA
tcagtcagcactggccgctgaatacagcgagaaaacgcagtatctgggtgtggtgaatggtcaggtgtcaggtaa

SEQ ID NO: 47987 - DNA, 75 bp, synthetic construct
  source 1..75: mol_type = other DNA
tacagcgcaacagcagcctgcagctggattacgcaacggtaaatccttacaccttcgcagaacccacctcgccgc

SEQ ID NO: 47988 - DNA, 75 bp, synthetic construct
  source 1..75: mol_type = other DNA
acaaaggcaacaaaactccggcattcagcatcagtattgaaggcagggatataaccactgtgctggacaaccgcc

SEQ ID NO: 47989 - DNA, 75 bp, synthetic construct
  source 1..75: mol_type = other DNA
ggagcatgcttaatatcatcgggatccccttacctgatgcgaaaagaacccggctggaaattctggcaaaggtgg

SEQ ID NO: 47990 - DNA, 75 bp, synthetic construct
  source 1..75: mol_type = other DNA
acccgcattatggcggggcgtaacgggggagcctttgcgctcgctggttcctatctggccagtctgctaaccccg

SEQ ID NO: 47991 - DNA, 75 bp, synthetic construct
  source 1..75: mol_type = other DNA
atgaagtgtgacaacctgaaaatctgtcacacttcaaatgggcctgtcatggcggaaatagcggttataaaccat

SEQ ID NO: 47992 - DNA, 75 bp, synthetic construct
  source 1..75: mol_type = other DNA
gtcagcgatcgccagtaccctgaaatcagcgtcactttccgacatcgaaatgcgtggtttcacctttgatcaaaa

SEQ ID NO: 47993 - DNA, 75 bp, synthetic construct
  source 1..75: mol_type = other DNA
caaacatgccagccgaaaacatgaatcaggggcgacaaatgaccaaaattcgcagagacagaacagagccaaaat

SEQ ID NO: 47994 - DNA, 75 bp, synthetic construct
  source 1..75: mol_type = other DNA
atgctcaccagcggtgaactcagtccccgcaatcagcataccgtcacgctgtatgcgaaggggctggcctgtgaa

SEQ ID NO: 47995 - DNA, 75 bp, synthetic construct
  source 1..75: mol_type = other DNA
tcccgaactgataagcgcattcatgaccacgacggcggcaaattttgccacgctgacagagcgggagattgcgga

SEQ ID NO: 47996 - DNA, 75 bp, synthetic construct
  source 1..75: mol_type = other DNA
atgcacacttcagggaaatttaataaatcactcaaaaaacgcagagacagaacagaaccgaaatatcgcgcgtta

SEQ ID NO: 47997 - DNA, 75 bp, synthetic construct
  source 1..75: mol_type = other DNA
atgaaggcaaaccgcaaacaaccacactaccgcgctattgaccttacagagcactggctgagagtggcgataaaa

SEQ ID NO: 47998 - DNA, 75 bp, synthetic construct
  source 1..75: mol_type = other DNA
gtcatcatgtaccacaacggtttcacctgtgaagccgacacccttggcagttgcggttacgtgtacatcgccatt

SEQ ID NO: 47999 - DNA, 75 bp, synthetic construct
  source 1..75: mol_type = other DNA
cggttaagacagcgtatgaccttgctaacgggaaatacactgcacaggatgccaccacggcgcgaaaaggtcttg

SEQ ID NO: 48000 - DNA, 75 bp, synthetic construct
  source 1..75: mol_type = other DNA
gctggcttcgtcgcggtgatgaagtactcgacattgtgttaggtgaaatgggcgtctcgccaaataaagtctctc

SEQ ID NO: 48001 - DNA, 75 bp, synthetic construct
  source 1..75: mol_type = other DNA
agagtcagttttatgggctagctagtaaagctggtcagatggataacaccaagtttaatgaagcccttgctaaac

SEQ ID NO: 48002 - DNA, 75 bp, synthetic construct
  source 1..75: mol_type = other DNA
tgcgaagccgacaccctcggctcctgtggttacgtttatatggctgtttatccgacgcccgaaacgaaaaagtaa

SEQ ID NO: 48003 - DNA, 75 bp, synthetic construct
  source 1..75: mol_type = other DNA
gatgagttcagtaatataagcgaactgaaggatgctgttacggaatatattgaatactacaacagcagaagaatt

SEQ ID NO: 48004 - DNA, 75 bp, synthetic construct
  source 1..75: mol_type = other DNA
gcggcctgatccgctgtcacggtttgcatatcgacccactggcgcgcgaagttcgcttgtgtggcgagttgatcg

SEQ ID NO: 48005 - DNA, 75 bp, synthetic construct
  source 1..75: mol_type = other DNA
ggttatcttagaggaaatcgaacaatttacgacgctggtcacgacgaagacgtttatcgcttcatgtcagcttat

SEQ ID NO: 48006 - DNA, 75 bp, synthetic construct
  source 1..75: mol_type = other DNA
tttccggtgctgatgaaacaactggagctgaaactggctgacggtgaactctccccctggcaacaacgtaccgtc

SEQ ID NO: 48007 - DNA, 75 bp, synthetic construct
  source 1..75: mol_type = other DNA
aacgccgaaagcggtaaaggccgcctatgaccttgctaacgggaaatataccgcacaggacgctaccacagcgcg

SEQ ID NO: 48008 - DNA, 75 bp, synthetic construct
  source 1..75: mol_type = other DNA
ttgccacgctgacagaacgggagatcgcagaagcagaacaggtaacaaccatcaacgttaaaaccggagaggtgg

SEQ ID NO: 48009 - DNA, 75 bp, synthetic construct
  source 1..75: mol_type = other DNA
gaagccctatgctgacctgtaaagagctttacagctattcggcaagcgagctatcagatgaagcgttaaaagccc

SEQ ID NO: 48010 - DNA, 75 bp, synthetic construct
  source 1..75: mol_type = other DNA
tcttctggaaagagggcgagccgctgaaaaagggcgacaagctggtgcaggcgaacctggcaaagagcctggaga

SEQ ID NO: 48011 - DNA, 75 bp, synthetic construct
  source 1..75: mol_type = other DNA
gatggctggaaaaagaagaagccaggagactcattgatgcatgttctgatcccctgaaatctgtagttaaatttg

SEQ ID NO: 48012 - DNA, 75 bp, synthetic construct
  source 1..75: mol_type = other DNA
agccgcgcttccgcaacggtgcggaacgccacgctaaccgtttcgctaccagtgcatcacgtagcaactctcgct

SEQ ID NO: 48013 - DNA, 75 bp, synthetic construct
  source 1..75: mol_type = other DNA
acagaactgtccatggacgaatggttctgtgcagtgtcctgcatcacctcccgccgcgtatatctgcagcggacc

SEQ ID NO: 48014 - DNA, 75 bp, synthetic construct
  source 1..75: mol_type = other DNA
tagtgatgccgcgagtgctgggccgtctgccctatgggccggacacggtgccggtacgcagctttaactatgtgg

SEQ ID NO: 48015 - DNA, 75 bp, synthetic construct
  source 1..75: mol_type = other DNA
ataaagaagccccattcactgtggttgatatcgatggtccatcaggcaacgtaaaaacacttgatgaaggtgtca

SEQ ID NO: 48016 - DNA, 75 bp, synthetic construct
  source 1..75: mol_type = other DNA
ttgcagtcgcttttttctgactcaaccgtcggttatgcctgtgcggcacttatgttctccattggcggctttatt

SEQ ID NO: 48017 - DNA, 75 bp, synthetic construct
  source 1..75: mol_type = other DNA
attacccgccgtcagacggtggttattcaggcccgcgccctgcggaaaaacaacacacacgaaaacgactgatgt

SEQ ID NO: 48018 - DNA, 75 bp, synthetic construct
  source 1..75: mol_type = other DNA
gggccgcccgtgataacggcctcgccgtcccggaatgcgttacccgccgtcaggcggtggttaatcaggcccgca

SEQ ID NO: 48019 - DNA, 75 bp, synthetic construct
  source 1..75: mol_type = other DNA
atggaagaggtggctgccatcaaggatattggcaaccattttgagcgcgccgagtacatcaagtggaacgctttc

SEQ ID NO: 48020 - DNA, 75 bp, synthetic construct
  source 1..75: mol_type = other DNA
gcaaaagaagacgaagctctggcatttgaaagattcaaacggattatgcgaaataagatactaccattgctggaa

SEQ ID NO: 48021 - DNA, 75 bp, synthetic construct
  source 1..75: mol_type = other DNA
gacctgcaaagccgataccctcagcagttgtagttacgtttatctggctgtttatccgacgaccgaaacggaaag

SEQ ID NO: 48022 - DNA, 75 bp, synthetic construct
  source 1..75: mol_type = other DNA
cgcttcccgacgacaataacgaccgtacctggtggggactgccctgcaccgtgacgccctgttttggtgcccgtc

SEQ ID NO: 48023 - DNA, 75 bp, synthetic construct
  source 1..75: mol_type = other DNA
cagtttccgcatgggagtgactggtctgaagtattgcgcctgactgacattgttacagagaaggtctcttccggc

SEQ ID NO: 48024 - DNA, 75 bp, synthetic construct
  source 1..75: mol_type = other DNA
aggcgctcaaggctgacagctaatgagtatgtcgcgattcaccatgcagccgaacctctcccaatctggctgagg

SEQ ID NO: 48025 - DNA, 75 bp, synthetic construct
  source 1..75: mol_type = other DNA
tattctcgactatatgatccagacggaagaaaataacaccgtgtaccgcagtatctcgcggcgggttgccgtgac

SEQ ID NO: 48026 - DNA, 75 bp, synthetic construct
  source 1..75: mol_type = other DNA
tgatgacggcgtggtgtcccgtattgatctggatatccgccgcaccgggattaatgagctgggtaacagtatcac

SEQ ID NO: 48027 - DNA, 75 bp, synthetic construct
  source 1..75: mol_type = other DNA
gctggatccgctgacccgcgccgtggtgatttccctgtttacctggcggcgggcggagcctgatgacaacgccga

SEQ ID NO: 48028 - DNA, 75 bp, synthetic construct
  source 1..75: mol_type = other DNA
aggcgggtattgaccgttatctcacgccgtcccgtgcccagccccgaaacggcagtgccgtgaccggtgaatacc

SEQ ID NO: 48029 - DNA, 75 bp, synthetic construct
  source 1..75: mol_type = other DNA
gatcgatttactgcgtcatcaggctctaagacgtactccaatccgccaccgggtaaatcgctacatgccgtgtgg

SEQ ID NO: 48030 - DNA, 75 bp, synthetic construct
  source 1..75: mol_type = other DNA
gtgtcagacacgttccatgaaacaaattatcccgacgacaacaacgaccgcccctggtgggggctaccctgcacc

SEQ ID NO: 48031 - DNA, 75 bp, synthetic construct
  source 1..75: mol_type = other DNA
tagcacagtagaaacatggagagaccagaaacagattattactattgtctgtaaggatggaatcaagattgatga

SEQ ID NO: 48032 - DNA, 75 bp, synthetic construct
  source 1..75: mol_type = other DNA
gccttccgtcgcctgtgtcgtaccgattatctcaactatctgcgcgtgcgcgaatggcaggatatctacacccag

SEQ ID NO: 48033 - DNA, 75 bp, synthetic construct
  source 1..75: mol_type = other DNA
tcacactaatccggcgttatggcgtcagtctcattcatctggatgccagcgctgaatgcctgccgggattgccca

SEQ ID NO: 48034 - DNA, 75 bp, synthetic construct
  source 1..75: mol_type = other DNA
gcccattaaagactggcctaaggtatggcgcacaacgctatcaggaatggatgtcgtggagatggtatccgcaga

SEQ ID NO: 48035 - DNA, 75 bp, synthetic construct
  source 1..75: mol_type = other DNA
aggcctttccgctgctgatgaaacaactggagctcatgctcaccagtggtgaactgaatccccgccatcagcata

SEQ ID NO: 48036 - DNA, 75 bp, synthetic construct
  source 1..75: mol_type = other DNA
cggaaccgaaatcctgctctggccggggaagacggtttccctgccggaggagcatgactacgtgaaggtactggt

SEQ ID NO: 48037 - DNA, 75 bp, synthetic construct
  source 1..75: mol_type = other DNA
aggtgtagaatttcgttcaatcgtaggtcaaactgatatttctgctgctactggaaagacagctactacaaatga

SEQ ID NO: 48038 - DNA, 75 bp, synthetic construct
  source 1..75: mol_type = other DNA
gaagcgcttagctacacgccgggtgtctctgttggtacgcgtggcgcatccaacacctatgaccacctgatcatt

SEQ ID NO: 48039 - DNA, 75 bp, synthetic construct
  source 1..75: mol_type = other DNA
gaaagcgccggtaccggtttacgcgcacgtttctatgatcaacggcgatgacggtaaaaaactgtccaaacgtca

SEQ ID NO: 48040 - DNA, 75 bp, synthetic construct
  source 1..75: mol_type = other DNA
cgcagaaattgcggaggcgctggcggtaacggattatcaggcacgctattacctgttattactggaaaaagaagg

SEQ ID NO: 48041 - DNA, 75 bp, synthetic construct
  source 1..75: mol_type = other DNA
gccttcgctgtcctattcaatgtattggggatcgaagcccccgaccgcgaacgccttgccttctatctgcgattg

SEQ ID NO: 48042 - DNA, 75 bp, synthetic construct
  source 1..75: mol_type = other DNA
cgtgcgggtatcgacaccattattgccgcgggcagcaagccgggcgttattggtgatgtgatggaaggcatttcc

SEQ ID NO: 48043 - DNA, 75 bp, synthetic construct
  source 1..75: mol_type = other DNA
ccgactatttgcaacagtgccgccgatatgatccaactgataaaggaatttgacgctcagggcgtggcagtccgg

SEQ ID NO: 48044 - DNA, 75 bp, synthetic construct
  source 1..75: mol_type = other DNA
acgggtacgcctttttattcagatccagtttccgcatgggagtgactggtctgaagtattgcgcctgactgacat

SEQ ID NO: 48045 - DNA, 75 bp, synthetic construct
  source 1..75: mol_type = other DNA
ttgggtaacgattatcgcccaacaagtgcttatgaacgtggtcagcgttatgcaagccgattgcagaatgaattt

SEQ ID NO: 48046 - DNA, 75 bp, synthetic construct
  source 1..75: mol_type = other DNA
acgaaggaatgaccatgatggtggtgacccacgaaatgggctttgcccgcaaagtggcgaatcgggtgatcttta

SEQ ID NO: 48047 - DNA, 75 bp, synthetic construct
  source 1..75: mol_type = other DNA
tggaactgctgccgaagtacgccgcctgggcagagggtgtcctgactgccggaggcgcacagcaggatgacgtgc

SEQ ID NO: 48048 - DNA, 75 bp, synthetic construct
  source 1..75: mol_type = other DNA
caccggctgtgcagtcaccaaagcgcaggaacggcggtgacagcgaggtgaaaacggaggacgcccatgtcagct

SEQ ID NO: 48049 - DNA, 75 bp, synthetic construct
  source 1..75: mol_type = other DNA
atgacagcaaacaaaaagaatcaggaattcaaaatcagaaaaattaagcggggtattgagcgcagctgtgataat

SEQ ID NO: 48050 - DNA, 75 bp, synthetic construct
  source 1..75: mol_type = other DNA
atgatttacactaatcagcttcgttacagtggcaaagatggtgtttacttccatctacaaggccaaccagataat

SEQ ID NO: 48051 - DNA, 75 bp, synthetic construct
  source 1..75: mol_type = other DNA
taaagcgcgcgaaatgaatgcgttgttaattaaattaattgaagcaacggaagctggagaagaatcttcgtcatt

SEQ ID NO: 48052 - DNA, 75 bp, synthetic construct
  source 1..75: mol_type = other DNA
ggaaaaaccgtagttgttgaaggttgtgaagagaaactggcacctctggacctgattcgtctcggcatgaactaa

SEQ ID NO: 48053 - DNA, 75 bp, synthetic construct
  source 1..75: mol_type = other DNA
ttaataaacgggggtgtccggatattcctgctgaaacgccgtatgcgccgggagaacgaattaagggagggcaag

SEQ ID NO: 48054 - DNA, 75 bp, synthetic construct
  source 1..75: mol_type = other DNA
ttgttcattctgaaaacgcattaatccgcgcaaaggaaatggacgcattactacttaagttaattgatgtgccgg

SEQ ID NO: 48055 - DNA, 75 bp, synthetic construct
  source 1..75: mol_type = other DNA
gccgtctttttaaatggattgcttatttttaaaacaatctatggtatgtcggtcaatttgcttgatattttccat

SEQ ID NO: 48056 - DNA, 75 bp, synthetic construct
  source 1..75: mol_type = other DNA
attcatttctccagtgggggctgaatcgtgatgtgacgccttgctttggcgctcatctggtacaggagggaaacc

SEQ ID NO: 48057 - DNA, 75 bp, synthetic construct
  source 1..75: mol_type = other DNA
aagttttcggctatgataatagtgaggataatgatgaggcggcatctgattatgcactaaaaataaatgaaaact

SEQ ID NO: 48058 - DNA, 75 bp, synthetic construct
  source 1..75: mol_type = other DNA
aagaagaacaaaaagacgggctgtgcgtctacggctgtagtgaagttcctgagcgtcctgctgctgggcgtcctc

SEQ ID NO: 48059 - DNA, 75 bp, synthetic construct
  source 1..75: mol_type = other DNA
actacattaacgcgttgccgccggagtatgttgctactcacttacagtggcacattgagcaggaaaatatcgata

SEQ ID NO: 48060 - DNA, 75 bp, synthetic construct
  source 1..75: mol_type = other DNA
cgtcacgctgtatgcaaaagggctgacctgcaaagccgataccctcagcagttgtggttacgtttatctggctgt

SEQ ID NO: 48061 - DNA, 75 bp, synthetic construct
  source 1..75: mol_type = other DNA
gtgattgaatggacggctgatcatggttttcatgcgcatgtggttttctggatcgatcgtcagagggttaaaaaa

SEQ ID NO: 48062 - DNA, 75 bp, synthetic construct
  source 1..75: mol_type = other DNA
acatcaacattcctgtgcgccacaacgatcctgaaagcatcgataatattcgcggtgccctgcattatctggcaa

SEQ ID NO: 48063 - DNA, 75 bp, synthetic construct
  source 1..75: mol_type = other DNA
tatcacaacggcaaagggcagaaaggagatcgcttctctggcgtataaagttgcgcagacgaaaacatatctcga

SEQ ID NO: 48064 - DNA, 75 bp, synthetic construct
  source 1..75: mol_type = other DNA
gaccattcttaactgatttctgtgaggactttatcgtgtcagacacactgcccgggacaacgcatcccgacaaca

SEQ ID NO: 48065 - DNA, 75 bp, synthetic construct
  source 1..75: mol_type = other DNA
cctgttctgcactctgaccagggatggcagtatcgtatgagaagatatcaaaatatccttaaagaacatggtatt

SEQ ID NO: 48066 - DNA, 75 bp, synthetic construct
  source 1..75: mol_type = other DNA
atgagcaaaatcacatggggtctgcagcgtgatatcacgccacgtctgggagcccgtctggtgcaggaaggcaac

SEQ ID NO: 48067 - DNA, 75 bp, synthetic construct
  source 1..75: mol_type = other DNA
ccacctcgcagtacctgacgtcggtgattctgaataatctccctgagcgcccctttaacatccggatggtcaggg

SEQ ID NO: 48068 - DNA, 75 bp, synthetic construct
  source 1..75: mol_type = other DNA
tgtttgcgggtgccctgttagtcagccaatgggtgatgaaaaagccgctaattcagcggatgctgggtaaagaac

SEQ ID NO: 48069 - DNA, 75 bp, synthetic construct
  source 1..75: mol_type = other DNA
atgaaaaaattattacttgctatttttataatattaccacttggtggctgtaccgttcatggtaataaatcccta

SEQ ID NO: 48070 - DNA, 75 bp, synthetic construct
  source 1..75: mol_type = other DNA
ggtgaaaccgggacagaaggtgaaacgtggcgaccgtatcgcgctttccggtaataccggacgttcaaccgggcc

SEQ ID NO: 48071 - DNA, 75 bp, synthetic construct
  source 1..75: mol_type = other DNA
cagataaacttggcaataccatgccaatttatacagcgtcgccatcattaatgaaaattgagtttcctctaagca

SEQ ID NO: 48072 - DNA, 75 bp, synthetic construct
  source 1..75: mol_type = other DNA
ggggtcgttgttgactattttagggggttggctgactcttaagctaacacagaggcacgaattaaaaaaagaagc

SEQ ID NO: 48073 - DNA, 75 bp, synthetic construct
  source 1..75: mol_type = other DNA
tttttgctcacgctgtttcgtatccggtactggatgatctccaacattcccttaagtttacgtattggtatcacc

SEQ ID NO: 48074 - DNA, 75 bp, synthetic construct
  source 1..75: mol_type = other DNA
tcaaccaataaagtccagtcagacgctcaggctgagatccgacgcctccagaaagagctgaagcgggttaccgac

SEQ ID NO: 48075 - DNA, 75 bp, synthetic construct
  source 1..75: mol_type = other DNA
cgctggtacgccagcgagtgcagcagagcatcagtccacactaagcgccgggtatcttcagtcccatactgatat

SEQ ID NO: 48076 - DNA, 75 bp, synthetic construct
  source 1..75: mol_type = other DNA
cgagattgccctgaccatcctgctgattgccctgactatcgtctttttactggcaaccgccacgctgtggccgtt

SEQ ID NO: 48077 - DNA, 75 bp, synthetic construct
  source 1..75: mol_type = other DNA
ataataacctgaacagcatgtgggccgtgaaactgcagcagatgcaggacggacgcctttatattgcgggtatcg

SEQ ID NO: 48078 - DNA, 75 bp, synthetic construct
  source 1..75: mol_type = other DNA
ggacgtaaggccgcgcagcccgagcctcagcagccgtctgaacccgcgtatgacttcgatgacgacattccgttc

SEQ ID NO: 48079 - DNA, 75 bp, synthetic construct
  source 1..75: mol_type = other DNA
gccatcggtattaatccggtaacgggatatggcagcggacttatgcaggtagattcccagcattttaacgaactg

SEQ ID NO: 48080 - DNA, 75 bp, synthetic construct
  source 1..75: mol_type = other DNA
atgaaaaaattaacagtggcaatttctgctgtagctgcatcagtactgatggcgatgtctgctcaggcagctgaa

SEQ ID NO: 48081 - DNA, 75 bp, synthetic construct
  source 1..75: mol_type = other DNA
gaaacccgcaatgaaatcacacagacggtcagtaaaacgctggaagaccagagcgccaccattcagcagatacag

SEQ ID NO: 48082 - DNA, 75 bp, synthetic construct
  source 1..75: mol_type = other DNA
cttaagagaaagagtttcggttctgttaatgacaacaaatatctgaatgcgatgtggcggagtgggaagaaatga

SEQ ID NO: 48083 - DNA, 75 bp, synthetic construct
  source 1..75: mol_type = other DNA
tagcatcccggaagggatgataatactagtcgatcctgaagtagaacctcgtaatgggaagctggtagtggcaaa

SEQ ID NO: 48084 - DNA, 75 bp, synthetic construct
  source 1..75: mol_type = other DNA
ggtggtggcgctgagcgggcggcgtaataacggtgtgcctgtttccctttccgtatcaactggagcagagaatgg

SEQ ID NO: 48085 - DNA, 75 bp, synthetic construct
  source 1..75: mol_type = other DNA
atgtatctatgacatacgctaatgaccgaaaaatccgacaagatgttcacttctcggcggcaaatgttgttccaa

SEQ ID NO: 48086 - DNA, 75 bp, synthetic construct
  source 1..75: mol_type = other DNA
atggcccgcactaaaaaggcaaaggctgacgataaaaagccagccgctaaaaaggtgggccgtccgcatggttat

SEQ ID NO: 48087 - DNA, 75 bp, synthetic construct
  source 1..75: mol_type = other DNA
gcaatcgacggcaaagataagggcgaagcagagaacgaagccaagcctatcgacgtcaagagcctgttaccgtaa

SEQ ID NO: 48088 - DNA, 75 bp, synthetic construct
  source 1..75: mol_type = other DNA
gatttgttcagcgatgacggggacggttatgtcgaccgcgtggcgctcgatgctgccctgctggaaaaactccag

SEQ ID NO: 48089 - DNA, 75 bp, synthetic construct
  source 1..75: mol_type = other DNA
gcatgtgcatcatctgcgacgcaaactcggcagtgattttattcgtaccgtgcatggtattggctacacattagg

SEQ ID NO: 48090 - DNA, 75 bp, synthetic construct
  source 1..75: mol_type = other DNA
gtttccgctacagcttcagtgccctgaaggaccggcacacggcagtggaggtgaattacaccgacccgcagaacg

SEQ ID NO: 48091 - DNA, 75 bp, synthetic construct
  source 1..75: mol_type = other DNA
aaaagcgcaacaagtttgtcggtaactcctgcggcaagtccggctattccggctggaactaaatttagcatcctg

SEQ ID NO: 48092 - DNA, 75 bp, synthetic construct
  source 1..75: mol_type = other DNA
atttcagtcgcgcatcaacggcaacatatatcaacaaatctggcgaactgaaaacggcggaaattaatgagccgc

SEQ ID NO: 48093 - DNA, 75 bp, synthetic construct
  source 1..75: mol_type = other DNA
ggattcgacgaacagaaaaacgcagagaacaacgctcgttatatcgcagctttcaaccctgaagtagtgcaggcg

SEQ ID NO: 48094 - DNA, 75 bp, synthetic construct
  source 1..75: mol_type = other DNA
gattgcgatacgctgatttactactggccgaagaacaaaccggaagcccagttccagttgatgaatttactttct

SEQ ID NO: 48095 - DNA, 75 bp, synthetic construct
  source 1..75: mol_type = other DNA
attacagaactggaagcgagggaagttcaattaccgactcgctacgaccttcgatatgggcacccaataaatgct

SEQ ID NO: 48096 - DNA, 75 bp, synthetic construct
  source 1..75: mol_type = other DNA
cagttcggcagccagcaggtgagtcgtaattatcatcttcgcgggcgcattctgcaggtgccgtcgaactataac

SEQ ID NO: 48097 - DNA, 75 bp, synthetic construct
  source 1..75: mol_type = other DNA
agtattgtgatcctcgccaagcagcgttttaacctgcgcgagcgcgatgtgcagtcgctccatgccacctttgta

SEQ ID NO: 48098 - DNA, 75 bp, synthetic construct
  source 1..75: mol_type = other DNA
ttcatggcgctgatggcagaaaaagcccgtcttgctgccctgttaccggagggatggtcacgggacatgacgaca

SEQ ID NO: 48099 - DNA, 75 bp, synthetic construct
  source 1..75: mol_type = other DNA
gcgtaaaggctggaacccaccggttactactgccgtcagacttccttcagtgtcccgggtaagccgctggttgat

SEQ ID NO: 48100 - DNA, 75 bp, synthetic construct
  source 1..75: mol_type = other DNA
cctgatttacgcggtgaatttattcgtggttgggatgatgggcgaggggttgatacgaggcgttcattgctaagt

SEQ ID NO: 48101 - DNA, 75 bp, synthetic construct
  source 1..75: mol_type = other DNA
gaaaaccagtgtgaggaatctgacctgctggaagcagaaatgaagctgattgactgcatggcgaaggtcagggcg

SEQ ID NO: 48102 - DNA, 75 bp, synthetic construct
  source 1..75: mol_type = other DNA
gctcactgcttgccggtgaggaaaacgcaaggctgcgtgcaacccactggttacatgagagaggcctgaaagcat

SEQ ID NO: 48103 - DNA, 75 bp, synthetic construct
  source 1..75: mol_type = other DNA
gcgcactgcttgccggtgaggaaaacgcaaggctgcgtgcaacccactggttacatgagaggggcctgaaagtat

SEQ ID NO: 48104 - DNA, 75 bp, synthetic construct
  source 1..75: mol_type = other DNA
gcgcactgcttgccggtgaggaaaacgccaggctgcgtgcagcccactggttacatgagagggggctgaaagtat

SEQ ID NO: 48105 - DNA, 75 bp, synthetic construct
  source 1..75: mol_type = other DNA
acctactacttcaacaaaaatatgtccacctatgtggattataaaatcaacctgctgaaagacaaccagtttaca

SEQ ID NO: 48106 - DNA, 75 bp, synthetic construct
  source 1..75: mol_type = other DNA
accattgagctggaacagaacgaaattcgttcgctcttacctgaagccagtgagccgattgatcaagctgcacaa

SEQ ID NO: 48107 - DNA, 75 bp, synthetic construct
  source 1..75: mol_type = other DNA
gatgatgggcgaggaattgatgcagcacgcgctttattgagcattcaaaccgggatgttggaaaaacaccgccat

SEQ ID NO: 48108 - DNA, 75 bp, synthetic construct
  source 1..75: mol_type = other DNA
atgacgacgttaactcaatgccagcagcaggtgctggatatgctgatttcttatcagaaagagcgtggcttcccg

SEQ ID NO: 48109 - DNA, 75 bp, synthetic construct
  source 1..75: mol_type = other DNA
cggttggggtgcctgttccgtggccttcagccactccgccaacaggctggctgaaatgcaatggtgcggcttttt

SEQ ID NO: 48110 - DNA, 75 bp, synthetic construct
  source 1..75: mol_type = other DNA
ccgccacatgacagggctgaatatcattcaggaaattccgggggatattttcgcggcggcagcaacttacgacgg

SEQ ID NO: 48111 - DNA, 75 bp, synthetic construct
  source 1..75: mol_type = other DNA
atggcaacaaaatagaaccgtgtgctgcattggcaaaagcactcgaatatggaaatccagcatttaagagtaaag

SEQ ID NO: 48112 - DNA, 75 bp, synthetic construct
  source 1..75: mol_type = other DNA
aatacacaaacagcgatatgccgtcgccgaaaaaaatgaaactaatggcagacaccatttctgcggtttatctcg

SEQ ID NO: 48113 - DNA, 75 bp, synthetic construct
  source 1..75: mol_type = other DNA
tgaagtcgtgaccagtggggtatcgattattgacggtaagctcaccggttcaaaagcctttctgaaagcgctttc

SEQ ID NO: 48114 - DNA, 75 bp, synthetic construct
  source 1..75: mol_type = other DNA
atcaggagcgaataactggacaccaacaaccagtatcagcgatctgctggttgtggtgatgaaaaaatccacagc

SEQ ID NO: 48115 - DNA, 75 bp, synthetic construct
  source 1..75: mol_type = other DNA
aggggcattcagcagtgccgccgatgacatcatcaccagtggcgtctccattgtggacggtaagctcaccggctc

SEQ ID NO: 48116 - DNA, 75 bp, synthetic construct
  source 1..75: mol_type = other DNA
gcactgatttgtcgtcacgcccgcaacctgctgctggcgcagggctggccggaagagacggatgttgaccagcgt

SEQ ID NO: 48117 - DNA, 75 bp, synthetic construct
  source 1..75: mol_type = other DNA
cattttgcgaacttcatgatgcggtaaacaagactgtcgacgatatgggaatcagacgggatcggcgacattacg

SEQ ID NO: 48118 - DNA, 75 bp, synthetic construct
  source 1..75: mol_type = other DNA
cgcgccgcagcttccggaggacggaacacagatagctttcccctgggccggggaatggctgacggagccggagat

SEQ ID NO: 48119 - DNA, 75 bp, synthetic construct
  source 1..75: mol_type = other DNA
gacagcgaggcggtcgggattatccgcgcactgcttgccggtgaggaaaacgccaggctgcgtgcagcccactgg

SEQ ID NO: 48120 - DNA, 75 bp, synthetic construct
  source 1..75: mol_type = other DNA
aagcgggagtgccgcaaccttcgacgccttatcgattaacaacggctgaaggtgatattctacaggggatcaccg

SEQ ID NO: 48121 - DNA, 75 bp, synthetic construct
  source 1..75: mol_type = other DNA
cagacaggattgcgatgattaatcctgcgaatggcaacacaaagccgatgtttgttggtcagggcgatcagatat

SEQ ID NO: 48122 - DNA, 75 bp, synthetic construct
  source 1..75: mol_type = other DNA
tagaagctggcgatattatcccctgcgatggtgaagtcattgaaggcggcgcatcggtcgatgaaagcgccatca

SEQ ID NO: 48123 - DNA, 75 bp, synthetic construct
  source 1..75: mol_type = other DNA
atccggtgcgtctgcatgggcatctgaacatcagtccacgctgagcgcggggtatcttcatgcctcgacgaacgt

SEQ ID NO: 48124 - DNA, 75 bp, synthetic construct
  source 1..75: mol_type = other DNA
agtctgccactactgacgaaaatgtcctcagagcgcacgctggcagtccaggcagcgctgatgcaacagccggac

SEQ ID NO: 48125 - DNA, 75 bp, synthetic construct
  source 1..75: mol_type = other DNA
ctcagtcaggaggtgctgttatcactgctcagtttctgcaccgcgtgcagtatccacggtgtccagacccgtgag

SEQ ID NO: 48126 - DNA, 75 bp, synthetic construct
  source 1..75: mol_type = other DNA
ctcagtcaggaggtgctgttatccctgctcagtttctgcaccgcgtgcagcatccacggcgttcagacccgcgag

SEQ ID NO: 48127 - DNA, 75 bp, synthetic construct
  source 1..75: mol_type = other DNA
attctgctcgatgcgtcaggtgatatttttctttacgggtttgaagactgcgtgactgattccgttcgtcgcata

SEQ ID NO: 48128 - DNA, 75 bp, synthetic construct
  source 1..75: mol_type = other DNA
agcgcgttgagtgcctggaactggataacctgatggaaacggcgtatgcaacggctgtttctgccaacttccgta

SEQ ID NO: 48129 - DNA, 75 bp, synthetic construct
  source 1..75: mol_type = other DNA
caggatcggcgcaggaaaacttatgcagaaaaaatacagaacatttatcgaaatataaaaaacaagcaagggcaa

SEQ ID NO: 48130 - DNA, 75 bp, synthetic construct
  source 1..75: mol_type = other DNA
gcagtaaacgcgtgaaaaagtatctccggtcctccggtgtctttgatgcgtttaatgagctggtctgtacgctgg

SEQ ID NO: 48131 - DNA, 75 bp, synthetic construct
  source 1..75: mol_type = other DNA
tcaaacaaaatcattaacaggggccagcatctggcaggcaggtcccgggggatttaatgtggacattatagcggt

SEQ ID NO: 48132 - DNA, 75 bp, synthetic construct
  source 1..75: mol_type = other DNA
gttagtagatactggacgcgagccagtgaatggaagccttgttgtagccaaactgactgacgcgaacgaagcaac

SEQ ID NO: 48133 - DNA, 75 bp, synthetic construct
  source 1..75: mol_type = other DNA
gcacagaatgatgcaattcagaatattgttggttcttttgggcgtacccagctttttagagacgtacttagttca

SEQ ID NO: 48134 - DNA, 75 bp, synthetic construct
  source 1..75: mol_type = other DNA
atccttcatggcctatgactcctatcaacgggaactgcaagattatcggtgttgtcgtggaagcgagggtaaaat

SEQ ID NO: 48135 - DNA, 75 bp, synthetic construct
  source 1..75: mol_type = other DNA
acaagctggcgattggctcactggtggtcaaagtgcagggcaaattgcagagcaggctggtcgtggtctggtaaa

SEQ ID NO: 48136 - DNA, 75 bp, synthetic construct
  source 1..75: mol_type = other DNA
tgctgcaatccaccacggcattggttaacgcacagtttcagatctcgccagtgagtagttatgctgccggggatt

SEQ ID NO: 48137 - DNA, 75 bp, synthetic construct
  source 1..75: mol_type = other DNA
tggcggatgtcagcgaggatgatgtcgcattaatgatggcttcagcggggatttccggaggtgtgagatatgtcc

SEQ ID NO: 48138 - DNA, 75 bp, synthetic construct
  source 1..75: mol_type = other DNA
ggaagcgaagtattgatagttttagtacgcgcgatctccttgtgcctatcaaagtagttgaggctacagggcgtc

SEQ ID NO: 48139 - DNA, 75 bp, synthetic construct
  source 1..75: mol_type = other DNA
acaaaacacccacgcggcatggacgaaatacaaccttgccgccagaacccgctggttacaggacgaacctacggg

SEQ ID NO: 48140 - DNA, 75 bp, synthetic construct
  source 1..75: mol_type = other DNA
ggtttccttgatcaccggttacgccaaccccgttcagttcaccaccagcgaaattggcgtttccggtggtggaag

SEQ ID NO: 48141 - DNA, 75 bp, synthetic construct
  source 1..75: mol_type = other DNA
acttttgcgtattttcatgaaaggagatcactcaataacttccatcgagatcgggtaataacatttgaacagatc

SEQ ID NO: 48142 - DNA, 75 bp, synthetic construct
  source 1..75: mol_type = other DNA
agccccgaccgctgaaacgcctgttcacagccaaccagtgctggacatccttcctggatgcgggcggtctgcgcg

SEQ ID NO: 48143 - DNA, 75 bp, synthetic construct
  source 1..75: mol_type = other DNA
cgccgccgggttctcctgtcgatgctcagctttctctgcggccttctcttctacaaaccaactgcatccatcctt

SEQ ID NO: 48144 - DNA, 75 bp, synthetic construct
  source 1..75: mol_type = other DNA
atcatggctactgtcccagccctcactcgtctgaatgatgaagacttacataaactcagttatgtaacaacagca

SEQ ID NO: 48145 - DNA, 75 bp, synthetic construct
  source 1..75: mol_type = other DNA
caacaaatgaccagaacaccgatttgcaacgtaatgcactgaactgtgcgggatgtgagcggatttttgaggaca

SEQ ID NO: 48146 - DNA, 75 bp, synthetic construct
  source 1..75: mol_type = other DNA
agcttgtcattcatatctcgattgtgggggggcaggcacatgattacaccgtcgaggggttcaaggccatggtgg

SEQ ID NO: 48147 - DNA, 75 bp, synthetic construct
  source 1..75: mol_type = other DNA
aggaaagacctctgcgaggtacgaatccgaaccggccagacggaggttgctgtcttcgtagactacgaatctgag

SEQ ID NO: 48148 - DNA, 75 bp, synthetic construct
  source 1..75: mol_type = other DNA
atgttaatcgccctgattgtcatctgtttaaccgtcatagtgacggcactggtaacgaggaaagacctctgcgag

SEQ ID NO: 48149 - DNA, 75 bp, synthetic construct
  source 1..75: mol_type = other DNA
tgattggcgtcttatgtggtgagttttttaagcttgctaccgaggctgccattatggctacgatcccaacctttg

SEQ ID NO: 48150 - DNA, 75 bp, synthetic construct
  source 1..75: mol_type = other DNA
gacctctgcgaggtacgaatccgaaccggccagacggaggtcgctgtcttcacagtttacgaacctgaggagtaa

SEQ ID NO: 48151 - DNA, 75 bp, synthetic construct
  source 1..75: mol_type = other DNA
ggctgttacctcttctttggccgttgccgaatatttctgcaagcagcacaaaaacgttattcaaaaaatccagac

SEQ ID NO: 48152 - DNA, 75 bp, synthetic construct
  source 1..75: mol_type = other DNA
ttgtttttttggatgtgatgctgattttttgtgcactgcgggcttcaggcgtgcggatgcctccggcgcgtgccg

SEQ ID NO: 48153 - DNA, 75 bp, synthetic construct
  source 1..75: mol_type = other DNA
tgcttgccgggatgacatccaccgaatatgccgactggcgacgtttttaccgcacgcattattttcacgataccc

SEQ ID NO: 48154 - DNA, 75 bp, synthetic construct
  source 1..75: mol_type = other DNA
ggtccctggtgttccacaaccggtggttactggcagagatgagccgcattgctgcggatgtgatacaggaaatct

SEQ ID NO: 48155 - DNA, 75 bp, synthetic construct
  source 1..75: mol_type = other DNA
tggctagcaaactgtacgaccgtgtaggtgatgctgtttttggtgctgcacttgttgattccagactgaacggtt

SEQ ID NO: 48156 - DNA, 75 bp, synthetic construct
  source 1..75: mol_type = other DNA
ctggcagagcgtggcatcattccggctgactggcctgtccgtgtgaaggtcattccgcaggagctggcgacggcg

SEQ ID NO: 48157 - DNA, 75 bp, synthetic construct
  source 1..75: mol_type = other DNA
acggcacgctacctgggtcgttatctgaagaagccaccaatagcggcttcccggctggcgcattacaacggagga

SEQ ID NO: 48158 - DNA, 75 bp, synthetic construct
  source 1..75: mol_type = other DNA
aaatcagtggcactaagtccgacagaccggggctgaaaaaactactcaggacactatcggcaggagacacgctgg

SEQ ID NO: 48159 - DNA, 75 bp, synthetic construct
  source 1..75: mol_type = other DNA
ttttcgcatgttcgcttgcaagccctctggcacaagcgggaggtatattagtatttgatgccacggccaaactgg

SEQ ID NO: 48160 - DNA, 75 bp, synthetic construct
  source 1..75: mol_type = other DNA
ctctgcatagcggaataccggaactggtggaggctgacaaatccggctggctggtgcctgagaacgatgctcgcg

SEQ ID NO: 48161 - DNA, 75 bp, synthetic construct
  source 1..75: mol_type = other DNA
cttaatcgcacctatgccaaccggggcaacgctgaacgggcagcgaaaatgcagtgggaacgtctgcaacgcggc

SEQ ID NO: 48162 - DNA, 75 bp, synthetic construct
  source 1..75: mol_type = other DNA
tcgcggaagccagtatggcggcaagggaggccggtcatgttgtccgtgagatggagcggtggatggtgccgaaca

SEQ ID NO: 48163 - DNA, 75 bp, synthetic construct
  source 1..75: mol_type = other DNA
acaaaggcaacaaaactccggcattcagtatcagtattgagggcagggatatcaccactgtgctggataaccgcc

SEQ ID NO: 48164 - DNA, 75 bp, synthetic construct
  source 1..75: mol_type = other DNA
cgctggaaagcgccatcggctttcacatgcgcgactggtggcagccgacaaaagcaaacttcttcggacacctga

SEQ ID NO: 48165 - DNA, 75 bp, synthetic construct
  source 1..75: mol_type = other DNA
tatgcacaaatggtgaaacagttcctgagtcgtgacccgttcgaatgcgtgctgtgtggcggccggatggtatac

SEQ ID NO: 48166 - DNA, 75 bp, synthetic construct
  source 1..75: mol_type = other DNA
aatgcacaaggtgtagttgttccgtgggttccttctgtaggcgacttactggcatgtgactggtttgtagtggag

SEQ ID NO: 48167 - DNA, 75 bp, synthetic construct
  source 1..75: mol_type = other DNA
caacactacaaagaccagatacgagcttataaagaccaactggcaacagccacaggtgttcgagatatcgccagc

SEQ ID NO: 48168 - DNA, 75 bp, synthetic construct
  source 1..75: mol_type = other DNA
gcgccctggctgaaatggaacgtgaattaattgtagagcgtacactggccggactggcagcagcccgcgcacagg

SEQ ID NO: 48169 - DNA, 75 bp, synthetic construct
  source 1..75: mol_type = other DNA
gaagcggtgctgacggaggcggaagacgaacgcctgaacgaactgatggctcgttacgacgcgctggaaaaccag

SEQ ID NO: 48170 - DNA, 75 bp, synthetic construct
  source 1..75: mol_type = other DNA
ccagtcgggatggggcggtaaaccggaagtacagaccattcgtcgtctggtgaccgaaagtgaagtggcggtggc

SEQ ID NO: 48171 - DNA, 75 bp, synthetic construct
  source 1..75: mol_type = other DNA
cgccttcaaaaaggtgacacacttgttgtctggaaactggatcgcctcgggcgaagcatgaaacatttgatttct

SEQ ID NO: 48172 - DNA, 75 bp, synthetic construct
  source 1..75: mol_type = other DNA
ggactggcggcagcgcgcgcacgggggcgcacaggcggacgtcgaccgaagctgacaaaagaacagcatgagcaa

SEQ ID NO: 48173 - DNA, 75 bp, synthetic construct
  source 1..75: mol_type = other DNA
gtcaagtatgtcgatgtcggtgctacttactactttaataaaaacatgtccacttttgttgattacaaaatcaac

SEQ ID NO: 48174 - DNA, 75 bp, synthetic construct
  source 1..75: mol_type = other DNA
ctccacagtcaagtctatcccactcatgaccgggacacctgtcaaaccggtatctcagggtaaagagtggcgtgc

SEQ ID NO: 48175 - DNA, 75 bp, synthetic construct
  source 1..75: mol_type = other DNA
gccaggatttacgtctgcacgataatctcgcactggctgccgcctgccgcaattcgtctgcacgcgtgctggcgt

SEQ ID NO: 48176 - DNA, 75 bp, synthetic construct
  source 1..75: mol_type = other DNA
aaaaattatccgggcaggctgctgacaagatgcaggctggtgtgattctgctggactttatgcgccgggagttaa

SEQ ID NO: 48177 - DNA, 75 bp, synthetic construct
  source 1..75: mol_type = other DNA
aggtaaagaccttggtgttcatggtgaccgagacttagtcaagtatgtcgatgtcggtgctacttactactttaa

SEQ ID NO: 48178 - DNA, 75 bp, synthetic construct
  source 1..75: mol_type = other DNA
aaagtttctttccagccaacagattactgagctggttcaggaattgatcgatacccaaaatttgggtgtcggttc

SEQ ID NO: 48179 - DNA, 75 bp, synthetic construct
  source 1..75: mol_type = other DNA
gtcaaatcattattccgcccattatctttaacggaatagcgtatagctatccgggaagtggtaataacccgggag

SEQ ID NO: 48180 - DNA, 75 bp, synthetic construct
  source 1..75: mol_type = other DNA
acttatgagtatgaaggattcggtgtaggtgcaacctatgctaaatctgaccgcactaatgatcaggttatctac

SEQ ID NO: 48181 - DNA, 75 bp, synthetic construct
  source 1..75: mol_type = other DNA
tattgtattcgtggaaggatgggagtggaacaacaaatgacagtaaacgaatggatagaacaaatcatgtcagtt

SEQ ID NO: 48182 - DNA, 75 bp, synthetic construct
  source 1..75: mol_type = other DNA
caacatcaaaaaattctggtcgctgacggcgaaaggctgcatgttcggcaagaacatcaccagtcccgcaaatcc

SEQ ID NO: 48183 - DNA, 75 bp, synthetic construct
  source 1..75: mol_type = other DNA
gcgacatctttttggacatattagaaatttcagggtatggcacaaagcattaaccgatgcgcaattgagcgagat

SEQ ID NO: 48184 - DNA, 75 bp, synthetic construct
  source 1..75: mol_type = other DNA
cgtggggggctggcgtgcagtttaacccgaccgaatccgtggccattgatgtcgcttatgaaggctccggcagtg

SEQ ID NO: 48185 - DNA, 75 bp, synthetic construct
  source 1..75: mol_type = other DNA
ggccggttacgatggaggcacggtcccacttgatgaagtcagcggcagcggaagcatgttcggcgcaacggcaga

SEQ ID NO: 48186 - DNA, 75 bp, synthetic construct
  source 1..75: mol_type = other DNA
gtgggattatcaacgcttttcagctccctggcggtaacgaaacccgcccacgaaatgttgcatttaactatatcg

SEQ ID NO: 48187 - DNA, 75 bp, synthetic construct
  source 1..75: mol_type = other DNA
cgcaggttatcagccagattagcggtcagatgagtaacatcgtcatgacgtatggcgaaactgaagcgatgaaag

SEQ ID NO: 48188 - DNA, 75 bp, synthetic construct
  source 1..75: mol_type = other DNA
gctggccgcgatgggaatgcccgaacgcacgctgatggggtatgacgccgtttgcaggcagtatgaaaaatcact

SEQ ID NO: 48189 - DNA, 75 bp, synthetic construct
  source 1..75: mol_type = other DNA
aatcccgcacctttgagcagcaaatgattgaccgggataaacgcgccacgaaagccggttttgttgttggcggtg

SEQ ID NO: 48190 - DNA, 75 bp, synthetic construct
  source 1..75: mol_type = other DNA
gaccacgctgatgggctacacacaatggtgctgttcgtcaccggactgttgccacaccaaaaaggtctgcttccg

SEQ ID NO: 48191 - DNA, 75 bp, synthetic construct
  source 1..75: mol_type = other DNA
ctgatctggcgcgagttctaccgtcatctgatgacgtattacccctcgttgtgtaaacattgtccgtttattgcc

SEQ ID NO: 48192 - DNA, 75 bp, synthetic construct
  source 1..75: mol_type = other DNA
tcccaatatggcatatccctatataaaaacatatgccgagcaaattatcctcatgtcaaaccttggtaggttcac

SEQ ID NO: 48193 - DNA, 75 bp, synthetic construct
  source 1..75: mol_type = other DNA
ggtatcttcagacccatactgatatgccaggcagtgatgacctgaagggcattaacgtgaaataccgttatgaat

SEQ ID NO: 48194 - DNA, 75 bp, synthetic construct
  source 1..75: mol_type = other DNA
accgggagtggtgatggtggactcaccaccgctgaacgtcagcgtctgaaagagctggaacgtgaaaaatcgtga

SEQ ID NO: 48195 - DNA, 75 bp, synthetic construct
  source 1..75: mol_type = other DNA
atgctgacgaaatatgcccttgcggcagtcatagtgctgtgtttaacggtgctgggatttacgcttctggtcgga

SEQ ID NO: 48196 - DNA, 75 bp, synthetic construct
  source 1..75: mol_type = other DNA
tttcgtaccgacggcatgatcgttattccgtgcagtatgaaaacgctcgccggtatccgcgctggttacgccgat

SEQ ID NO: 48197 - DNA, 75 bp, synthetic construct
  source 1..75: mol_type = other DNA
tccccgtgcgcaactcgcctcggcgcttaatttgccagaaacgtgggtagcagagcgtctgccccggttaaaaca

SEQ ID NO: 48198 - DNA, 75 bp, synthetic construct
  source 1..75: mol_type = other DNA
aaacctcgaatgttccgctgaatttactgaacacaattttgtgttaagtgaatacaccgacgcatcaggccgcaa

SEQ ID NO: 48199 - DNA, 75 bp, synthetic construct
  source 1..75: mol_type = other DNA
tgccaatgagccgtctggagcattatgccggtcaggatgaaattggtctgcgttataacagccaccggacaaaac

SEQ ID NO: 48200 - DNA, 75 bp, synthetic construct
  source 1..75: mol_type = other DNA
ctcagccaggaggtgctgttatccctgctcagtttctgcactgcgtgcagcatccacggcgttcagacccgcgag

SEQ ID NO: 48201 - DNA, 75 bp, synthetic construct
  source 1..75: mol_type = other DNA
cggtaatcctccggcattttccctgacaccggacggaaaactgaccgctaaaaatgcagatatcagtggcagtgt

SEQ ID NO: 48202 - DNA, 75 bp, synthetic construct
  source 1..75: mol_type = other DNA
gtcgttctgctatccctggtttagccacaaatgcagcattgcttgggttatcttttgcaattccgtttttgatta

SEQ ID NO: 48203 - DNA, 75 bp, synthetic construct
  source 1..75: mol_type = other DNA
atggagttgagagggcaccttaatgaaatatatgacggtgtaattgttaataagaaagaaggaaacgcggcatga

SEQ ID NO: 48204 - DNA, 75 bp, synthetic construct
  source 1..75: mol_type = other DNA
aattggtagcctgatgtggcatgcgtcagaaaatgaggaatatgacgaaaaggccatgcgcattgatatgggtaa

SEQ ID NO: 48205 - DNA, 75 bp, synthetic construct
  source 1..75: mol_type = other DNA
ggtgcccggcaaacaggaatagataacgcttgccacattggcggcctgattgcgggtggcgcgttgggttggctg

SEQ ID NO: 48206 - DNA, 75 bp, synthetic construct
  source 1..75: mol_type = other DNA
gtggcaaacctgcaggtggccacatcagaaagctggcgtgacaaacagacgggggagatgcgggagcagacggaa

SEQ ID NO: 48207 - DNA, 75 bp, synthetic construct
  source 1..75: mol_type = other DNA
ggatacagtatctgctgagcctggtccccgactgcccgtggcagcatattgtgttcacacttccctgccagtact

SEQ ID NO: 48208 - DNA, 75 bp, synthetic construct
  source 1..75: mol_type = other DNA
gccgccaggcagatgtggtgccggggatattcacggtgatccacacatggggacgtgaccaggagtggcatccgc

SEQ ID NO: 48209 - DNA, 75 bp, synthetic construct
  source 1..75: mol_type = other DNA
cagattagtggtgataaagagctgctttttccgggggatcatgacgcaactaaggttatgagtgaaaacacggta

SEQ ID NO: 48210 - DNA, 75 bp, synthetic construct
  source 1..75: mol_type = other DNA
ccggagggccaatgcacccacgtgcttcgccatacattcgccagtcactttatgatgaacggcggaaacatactg

SEQ ID NO: 48211 - DNA, 75 bp, synthetic construct
  source 1..75: mol_type = other DNA
tttttggcttgtctggccagttgactgaaaaagacatcaaaaacgcctttaagaaagctgcattaaaatatcacc

SEQ ID NO: 48212 - DNA, 75 bp, synthetic construct
  source 1..75: mol_type = other DNA
agaaaaacagaacagtaccaatatctcaagatctgtatcacgaactccccaaaaacagagggaagttattcacgc

SEQ ID NO: 48213 - DNA, 75 bp, synthetic construct
  source 1..75: mol_type = other DNA
agggcgtgaaggtggtgaaggacagtgccagcctgtggccgcagatcgttacggctatttcctctgccggcgcag

SEQ ID NO: 48214 - DNA, 75 bp, synthetic construct
  source 1..75: mol_type = other DNA
ccagcaacaaacgttggagtgaggatcatcgggcgcgtgttcttcgctatctagagctgtatatctttccttata

SEQ ID NO: 48215 - DNA, 75 bp, synthetic construct
  source 1..75: mol_type = other DNA
cagcatggctggtaaataactggtatcccacagcaagtatcagcgatttgctggttgtggtgatgaagaaagcca

SEQ ID NO: 48216 - DNA, 75 bp, synthetic construct
  source 1..75: mol_type = other DNA
gcatgggtttaggacgatggctcgaggggcattaggggagtcgggtgaagtggtcaacaaaaactggccaccgcg

SEQ ID NO: 48217 - DNA, 75 bp, synthetic construct
  source 1..75: mol_type = other DNA
gtgaatggctttgtgatttccgcgtcgacggggctgaaagtcgccgcgtgcgtaagaagttttcaaccaaaggtg

SEQ ID NO: 48218 - DNA, 75 bp, synthetic construct
  source 1..75: mol_type = other DNA
tgaacgtgacaggtaaaaacgacgcggaaggtgctgaagcctgcattaacgccatccgtgaactggcgaagaaag

SEQ ID NO: 48219 - DNA, 75 bp, synthetic construct
  source 1..75: mol_type = other DNA
aacgtatcctcgaagaggcgcgtgcgtacaaggcccagaccatcctggaagctcagggtgaagtggcgcgctttg

SEQ ID NO: 48220 - DNA, 75 bp, synthetic construct
  source 1..75: mol_type = other DNA
ctgcttgataagagtgattatgttctcgctcatggactgaacaccgacgaccaactggcagttggtatcgtctac

SEQ ID NO: 48221 - DNA, 75 bp, synthetic construct
  source 1..75: mol_type = other DNA
cgcttctgttatctacgtaccagcaccgttctgcaaagactccattctggaagctatcgatgcaggcatcaaact

SEQ ID NO: 48222 - DNA, 75 bp, synthetic construct
  source 1..75: mol_type = other DNA
cagcggtggctttctgcggtgccagacatgagcgggagaatagcgatacttattcgtcatgccgcctgatagtga

SEQ ID NO: 48223 - DNA, 75 bp, synthetic construct
  source 1..75: mol_type = other DNA
gcactacaggcaaaaccgtcagatggactggttagagcagtacgtttctatgaactggtaaagcgtgagaatccg

SEQ ID NO: 48224 - DNA, 75 bp, synthetic construct
  source 1..75: mol_type = other DNA
gtaaatggttggtatcccacagcaagtatcagcgatttgctggttgttgtgatgaagaaagccactgcaggcatc

SEQ ID NO: 48225 - DNA, 75 bp, synthetic construct
  source 1..75: mol_type = other DNA
tggcttcagcaagagcccggggaagaaaagggggacggccttacaaaatgacacctgtgaaattacgttttgcaa

SEQ ID NO: 48226 - DNA, 75 bp, synthetic construct
  source 1..75: mol_type = other DNA
tttgattttctcatggctaacattgataaaatcaatcagtttcaaagcactgatgaaaacgcacgttacaactac

SEQ ID NO: 48227 - DNA, 75 bp, synthetic construct
  source 1..75: mol_type = other DNA
tcaagttaactaacggtgataacactctgcatttccagtcatgggttaaagaagcgacaggcaaaaaagctgctg

SEQ ID NO: 48228 - DNA, 75 bp, synthetic construct
  source 1..75: mol_type = other DNA
ccatatggaacgtaactcagtacgcgcagcttacattcataaggccgaacatcttgatgaacggcgactgatgct

SEQ ID NO: 48229 - DNA, 75 bp, synthetic construct
  source 1..75: mol_type = other DNA
atggtctggcgcacctggaattttgaggacggtgccgggtactggatgaaccatgtcattcgtgatttcggcatt

SEQ ID NO: 48230 - DNA, 75 bp, synthetic construct
  source 1..75: mol_type = other DNA
tgtttttagcgaactatcccgcctgggcgaatggtcgtatccgaatccactggagaacatgcgaaaattcaccat

SEQ ID NO: 48231 - DNA, 75 bp, synthetic construct
  source 1..75: mol_type = other DNA
gatggtccagtggtgggctgactatcttgatgagataaaaatcatttacataacaccatatgatttcgctaaaat

SEQ ID NO: 48232 - DNA, 75 bp, synthetic construct
  source 1..75: mol_type = other DNA
atggtctggcgtacctggaattttgaggacggtgccgggtactggatgaaccatgtcatccgtgatttcggcatt

SEQ ID NO: 48233 - DNA, 75 bp, synthetic construct
  source 1..75: mol_type = other DNA
tatatgcccgcgtgcaggagattgaggaaaaaatgtcctcaaaccgggccattattccgggggctaccatttttt

SEQ ID NO: 48234 - DNA, 75 bp, synthetic construct
  source 1..75: mol_type = other DNA
ttctgcgggaggtggtccgggaaggccgggctgaaatccgcagcatggcggatgccctcgcaaaaatccggggct

SEQ ID NO: 48235 - DNA, 75 bp, synthetic construct
  source 1..75: mol_type = other DNA
caggtcaatggtcacgacctggctaaatggctcccggaaacaccttccgcatatacgcaaaatacagcgataact

SEQ ID NO: 48236 - DNA, 75 bp, synthetic construct
  source 1..75: mol_type = other DNA
actgagctggaaactgcagggccaaccaatactgcaattgtaattaatggatatggtagtgatattacttttggt

SEQ ID NO: 48237 - DNA, 75 bp, synthetic construct
  source 1..75: mol_type = other DNA
atgaaagtattaattaaattgagtaatgactggcctgaacatgtgagtggcaatccagtccttgataagtgggtt

SEQ ID NO: 48238 - DNA, 75 bp, synthetic construct
  source 1..75: mol_type = other DNA
acatctggcaccggatcatctggaaacggcgctccgtttcaatcctctggcaacgctgccaagtggcgacaaagt

SEQ ID NO: 48239 - DNA, 75 bp, synthetic construct
  source 1..75: mol_type = other DNA
caccacgctgataagcctggttgacgggcaggggagtccggtcagcgtggaggtccagtccgtcaccgacggcgt

SEQ ID NO: 48240 - DNA, 75 bp, synthetic construct
  source 1..75: mol_type = other DNA
tcatcatggctggtaaatgactggtatcccacagcaagtatcagcgatttgctggttgtggtgatgaagaaagcc

SEQ ID NO: 48241 - DNA, 75 bp, synthetic construct
  source 1..75: mol_type = other DNA
ggagtgatgatgctattgagcgccagctgagccactctgagagaaataatgttcgtgctgcgtatatccatactt

SEQ ID NO: 48242 - DNA, 75 bp, synthetic construct
  source 1..75: mol_type = other DNA
acagtgggcaaagctttcccccgggactcccgtgcaccggaacggtggccatcagggaccatcaccgtcagggtt

SEQ ID NO: 48243 - DNA, 75 bp, synthetic construct
  source 1..75: mol_type = other DNA
ggggcttatctggctgatgctgcgtgaacgccacctcggcggaacgattattctggcggatgcgcatatccgcta

SEQ ID NO: 48244 - DNA, 75 bp, synthetic construct
  source 1..75: mol_type = other DNA
tctgggatattttgtcatcgggttgcacgctgcggctgcactggcacaccactatttctggaaggacaacacact

SEQ ID NO: 48245 - DNA, 75 bp, synthetic construct
  source 1..75: mol_type = other DNA
gtaatctggacatccttgatacccgtatggtgccacaggccagcgcctgggcaataaatcgtgtggcacagaaag

SEQ ID NO: 48246 - DNA, 75 bp, synthetic construct
  source 1..75: mol_type = other DNA
atgcgttacgacaacgaacggggtaaaggcgatcacaaacacattggtagtcaggaagtcagcaccagctttgtc

SEQ ID NO: 48247 - DNA, 75 bp, synthetic construct
  source 1..75: mol_type = other DNA
tcggcaagcctgacgggtgctgcgtctgaaggggcgactgtttctggttggaccgaaaaaggtgatggttcctat

SEQ ID NO: 48248 - DNA, 75 bp, synthetic construct
  source 1..75: mol_type = other DNA
agtcgtggcatgaaacgctggcgaatctgggatattttgtcatcggcttgcacgctgcggctgcactggcacacc

SEQ ID NO: 48249 - DNA, 75 bp, synthetic construct
  source 1..75: mol_type = other DNA
cggcaaggatttttgtttgccaaaccgatgcccgccgtcgccttcgaacgctggtataaacgctatctgaagcgc

SEQ ID NO: 48250 - DNA, 75 bp, synthetic construct
  source 1..75: mol_type = other DNA
aatttctgagccagagcggtaagatggtcaccgccgccgcgctgtttggtacctcagtgccgctcgcccatgcgg

SEQ ID NO: 48251 - DNA, 75 bp, synthetic construct
  source 1..75: mol_type = other DNA
gtgaagggtatctggaatttttccgggaaaaaataggaaaactgcatctggctcaggggctgtgggagctgatag

SEQ ID NO: 48252 - DNA, 75 bp, synthetic construct
  source 1..75: mol_type = other DNA
tggtcacctgaccattaacggtaacggcgataacgacaacactgcttctatcgaagctggtcagaacgaagttga

SEQ ID NO: 48253 - DNA, 75 bp, synthetic construct
  source 1..75: mol_type = other DNA
ggcgattatcagaagtgattgagcagtggtattccctatatggtcaaacactcgcagaccccaaacgcctgatgg

SEQ ID NO: 48254 - DNA, 75 bp, synthetic construct
  source 1..75: mol_type = other DNA
ttcccgcagaaaacgggacaagaaaggggccaacagcgttctgcgcatagggccatttcgttttccgggcggctt

SEQ ID NO: 48255 - DNA, 75 bp, synthetic construct
  source 1..75: mol_type = other DNA
cagggaatgcagactaatctcactttaaaagaagagagtaatgcagactggctaccaaagtgtgatgagccaaca

SEQ ID NO: 48256 - DNA, 75 bp, synthetic construct
  source 1..75: mol_type = other DNA
caagttatttcttgccgctcgttccgatggtataggaaaagcctgtctgtggtgcatgtcgtatttaagaaataa

SEQ ID NO: 48257 - DNA, 75 bp, synthetic construct
  source 1..75: mol_type = other DNA
acagggattatcccagagaaaaggtttatattttcagtcccgataatgtctccgtccataataatgatattaaag

SEQ ID NO: 48258 - DNA, 75 bp, synthetic construct
  source 1..75: mol_type = other DNA
ccatagaaaaccttaacagcatcagcaaaacggctgttccgcgggcatcggcgcaggccgttaaccgcgtggcaa

SEQ ID NO: 48259 - DNA, 75 bp, synthetic construct
  source 1..75: mol_type = other DNA
tcgcaaccgcgagcacgtagaactgactgccgttgaacaagcttatctcaatgcaggtagcgtcaatgcccgccg

SEQ ID NO: 48260 - DNA, 75 bp, synthetic construct
  source 1..75: mol_type = other DNA
cagggaatgcagactaacctcactttaaaagaggaaagtaatgcagactggcttcccaagtgtgatgagccaaca

SEQ ID NO: 48261 - DNA, 75 bp, synthetic construct
  source 1..75: mol_type = other DNA
ggaatgcaaactaacctcactttgaaagaggagagtaatgcagactggctgcccaagtgtgatgagccaatatta

SEQ ID NO: 48262 - DNA, 75 bp, synthetic construct
  source 1..75: mol_type = other DNA
tggcctcggtagcctctaccgttaaaagtgaaagcgacaagctggccgcgtttaacgacccacaaaaccgttatg

SEQ ID NO: 48263 - DNA, 75 bp, synthetic construct
  source 1..75: mol_type = other DNA
acctccctgttgaaagccgacaccaggcaaaaggaacccgcttcctgtggcagtacagcgataagtggatgaccg

SEQ ID NO: 48264 - DNA, 75 bp, synthetic construct
  source 1..75: mol_type = other DNA
ctccaactctatccggatgcggagctgcgggaaagtcataccatagatgtactgatgggacgtctgcgcaaaaaa

SEQ ID NO: 48265 - DNA, 75 bp, synthetic construct
  source 1..75: mol_type = other DNA
tgtatttcagtaccgccgtatcccttctgtatctgatctcagggggatataaagccgtccgcaatttctggaaca

SEQ ID NO: 48266 - DNA, 75 bp, synthetic construct
  source 1..75: mol_type = other DNA
atgaccatctgaagcgactggccatcagggagttgcgtcagcttgaactgacgctggctgccccgccaccgcact

SEQ ID NO: 48267 - DNA, 75 bp, synthetic construct
  source 1..75: mol_type = other DNA
attaaaaaggttgatgccagtggtaagcatgacgttgcgcagcgcttgcaacagcgcgtcacgggcattatgcgt

SEQ ID NO: 48268 - DNA, 75 bp, synthetic construct
  source 1..75: mol_type = other DNA
cgtaggacaacagcgaatggcggcgctacataacggcaagcgcgacaatctggagatcagccccaatttatgggc

SEQ ID NO: 48269 - DNA, 75 bp, synthetic construct
  source 1..75: mol_type = other DNA
atgagggacaaacccgcgaaccataaacgcggtaaaaacccggtgtgcatcgtttttgattattcccgcacactc

SEQ ID NO: 48270 - DNA, 75 bp, synthetic construct
  source 1..75: mol_type = other DNA
tcggatcgtccgatatccgccagcttaaaacaagccacctgttagccccgattaaaaaagttgatgccagtggta

SEQ ID NO: 48271 - DNA, 75 bp, synthetic construct
  source 1..75: mol_type = other DNA
ttgagtgggaatcgagagctgatctttgtgggtgatcacgatccgcataagcctatgagtgagaacacggtgaat

SEQ ID NO: 48272 - DNA, 75 bp, synthetic construct
  source 1..75: mol_type = other DNA
cgcccggtttatccccgctggcgcggggaactcttactgcttggtatgcggaatcacaccctgaacggtttatcc

SEQ ID NO: 48273 - DNA, 75 bp, synthetic construct
  source 1..75: mol_type = other DNA
tcagtgtaccggatgacaactggtaccgtatcgccaacgaattacttagccgtgccggtatagccattaacggtt

SEQ ID NO: 48274 - DNA, 75 bp, synthetic construct
  source 1..75: mol_type = other DNA
cgcctgctgaataactgcgtggtcgacggcgattaccgctgcaccgacgggcgatacgtccgcgcccgccccatt

SEQ ID NO: 48275 - DNA, 75 bp, synthetic construct
  source 1..75: mol_type = other DNA
gcggtttatccccgctggcgcggggaacactgaacatcgatcgggcggtcgataaagtcattcggtttatccccg

SEQ ID NO: 48276 - DNA, 75 bp, synthetic construct
  source 1..75: mol_type = other DNA
ccagcgcccttcttgcctcgtcgttgttattaaccatcggacgcggcgctacgctgccgtttatgaccatttact

SEQ ID NO: 48277 - DNA, 75 bp, synthetic construct
  source 1..75: mol_type = other DNA
tcttttcgccatggtgattacaaagttatatttgagtaccatacaaataaattcattaatgcaacagttccttta

SEQ ID NO: 48278 - DNA, 75 bp, synthetic construct
  source 1..75: mol_type = other DNA
tatccgctataaacattcagtagagacgatagattcagagcacgccgatctcattttcaggatgcgccctgtgtg

SEQ ID NO: 48279 - DNA, 75 bp, synthetic construct
  source 1..75: mol_type = other DNA
ttcatatggtgctaataactggacgccaacgaccagtatcagcgaccttcttgttgttgtgatgaagaaatctac

SEQ ID NO: 48280 - DNA, 75 bp, synthetic construct
  source 1..75: mol_type = other DNA
taattaaaaacatatctaatttatcaaagagttatagcatcagaatatacgaaatcctccaacagttccgtaaca

SEQ ID NO: 48281 - DNA, 75 bp, synthetic construct
  source 1..75: mol_type = other DNA
atggacaaggaattaccgtggctggctgataacgcccaactggaactgaaatataaaaagggtaaaacaccactc

SEQ ID NO: 48282 - DNA, 75 bp, synthetic construct
  source 1..75: mol_type = other DNA
ctctcgccccagagagatcaattatctgcacaaagatggtcaaatatggaagcgcatcgcgaataacaccagggc

SEQ ID NO: 48283 - DNA, 75 bp, synthetic construct
  source 1..75: mol_type = other DNA
gaactactcacacctgttcttggccagagtgttaatcctctgggcatgggctactcatccgataatggaaaaatc

SEQ ID NO: 48284 - DNA, 75 bp, synthetic construct
  source 1..75: mol_type = other DNA
gcgttgggatgcgcaagctggaacgctttggtaaaccgtttatggcgcttatccgcgcgcatgttgacggcgacg

SEQ ID NO: 48285 - DNA, 75 bp, synthetic construct
  source 1..75: mol_type = other DNA
cccttgccgtttcaccttcccatgcggtttctctgtttggtatcacgctgatttgcgccggtttctcggtaggtt

SEQ ID NO: 48286 - DNA, 75 bp, synthetic construct
  source 1..75: mol_type = other DNA
ttacattgcctatgacatcctgctgcagtacctgaacgaactgctgagtcaggcccgggtgcaggccggcagtaa

SEQ ID NO: 48287 - DNA, 75 bp, synthetic construct
  source 1..75: mol_type = other DNA
gcatggctggtgaataactggtatcccacagcaagtatcagcgatttgctggttgtggtgatgaagaaagccacc

SEQ ID NO: 48288 - DNA, 75 bp, synthetic construct
  source 1..75: mol_type = other DNA
tgccagaggcatttgaacgactggcagcaatcaaagccaaataccctgatatgaagcatacggcgcttgttggag

SEQ ID NO: 48289 - DNA, 75 bp, synthetic construct
  source 1..75: mol_type = other DNA
ggaatggctggacgccaacaatggcgaggtcatcgacgtcaccaatccggcgaacggcgacaagctgggtagcgt

SEQ ID NO: 48290 - DNA, 75 bp, synthetic construct
  source 1..75: mol_type = other DNA
tggataatcaaaatactcctgtttttgatgtatgtggttggtactgtgtgccagttaaagatcataattcagtta

SEQ ID NO: 48291 - DNA, 75 bp, synthetic construct
  source 1..75: mol_type = other DNA
ttgaaaccagcgcccgctatcttggcacggcgctgtactggatagctgccagtagcaatattaagccgggttatg

SEQ ID NO: 48292 - DNA, 75 bp, synthetic construct
  source 1..75: mol_type = other DNA
aaaaatcacataaattctgggcggtggagcaacagggaaacgagttgcatatcagttggggaaaagttggtaccc

SEQ ID NO: 48293 - DNA, 75 bp, synthetic construct
  source 1..75: mol_type = other DNA
aatcaactggcaatagcagcgccgaaggctgaatttgttgataactatgttgaagcatctggtctgatgggattc

SEQ ID NO: 48294 - DNA, 75 bp, synthetic construct
  source 1..75: mol_type = other DNA
cattccttcagctcatacgtcactttcatcctctgtgccatttgtacatcacccccttcctgaacgtgctgacag

SEQ ID NO: 48295 - DNA, 75 bp, synthetic construct
  source 1..75: mol_type = other DNA
aaaatgcaggaatatgaagggggaatatgtctggccctggatacttccgttttcagtcgggataaagcatacaaa

SEQ ID NO: 48296 - DNA, 75 bp, synthetic construct
  source 1..75: mol_type = other DNA
gagcctgttgctgattatgttcgtcgcgcctggacgccccgttgccgctcatgaagaaatccatcaccacgcttg

SEQ ID NO: 48297 - DNA, 75 bp, synthetic construct
  source 1..75: mol_type = other DNA
aaaaaatggggcgtctcctgggaggccgttggtgcatacaatgccggattcaggaagaccgaacgccagaaccag

SEQ ID NO: 48298 - DNA, 75 bp, synthetic construct
  source 1..75: mol_type = other DNA
ggcatggcataaccggcgacggcaatgcgcaagatggagtactgtgggcagagagccgttctttgctacttatcg

SEQ ID NO: 48299 - DNA, 75 bp, synthetic construct
  source 1..75: mol_type = other DNA
ggtcatgttccgccagcgacatcagcccggtctgcgaggtctgtcggactttactgaactgaaaggtgtagttgt

SEQ ID NO: 48300 - DNA, 75 bp, synthetic construct
  source 1..75: mol_type = other DNA
gagtggtgggagttcgacggcgaacccggaacattcaaggttgatgttggcacgctggacagtggtgtgaccgag

SEQ ID NO: 48301 - DNA, 75 bp, synthetic construct
  source 1..75: mol_type = other DNA
accggaaccggggcggaacttgtactgtccggcagtcagtggcagtcgctgccggtacttccggcagacggaacg

SEQ ID NO: 48302 - DNA, 75 bp, synthetic construct
  source 1..75: mol_type = other DNA
acgccggatggcaggctgacagcccgcaatgcggatatcagtggagccatcacggcgaataccggcacgctcaat

SEQ ID NO: 48303 - DNA, 75 bp, synthetic construct
  source 1..75: mol_type = other DNA
atgaccaaacttcttcttattggattactcactctttcatctcatgttattgctcaggactgttttgaactggct

SEQ ID NO: 48304 - DNA, 75 bp, synthetic construct
  source 1..75: mol_type = other DNA
gtgaaatcacgctgccatcctccggcaccacgctgataagcctggttgacgggcagggtaatccggtcagcgtgg

SEQ ID NO: 48305 - DNA, 75 bp, synthetic construct
  source 1..75: mol_type = other DNA
ccaaaagtgattggccttgatgcttcaagaattgttccaactgcaaacgaaaatcgaccccgtaacattgccttt

SEQ ID NO: 48306 - DNA, 75 bp, synthetic construct
  source 1..75: mol_type = other DNA
atctgatggtgtattaagatatgttaataaccaaaatattgatgaagttaactataatgaaatcagtgatgcaga

SEQ ID NO: 48307 - DNA, 75 bp, synthetic construct
  source 1..75: mol_type = other DNA
aatacgcccgtattcaaaaggaagaaacatcaaaaatattgtatcaatatcaaggtgccatgaaaaaaaaacaga

SEQ ID NO: 48308 - DNA, 75 bp, synthetic construct
  source 1..75: mol_type = other DNA
ccacactctggcgtggtaaagatgcctttgcagaagttaaaaaactgaatggcgaggtcttccgtgaactggaga

SEQ ID NO: 48309 - DNA, 75 bp, synthetic construct
  source 1..75: mol_type = other DNA
aggttctgcattacctgttggtgtgcctgttccgtggccttcagtcacaccgccaacaggctggctgaaatgcaa

SEQ ID NO: 48310 - DNA, 75 bp, synthetic construct
  source 1..75: mol_type = other DNA
ggctctcgaaaaccttggtttgggagaaggtgctccagctattggcgttccgttcttctggccgtccgctgcaat

SEQ ID NO: 48311 - DNA, 75 bp, synthetic construct
  source 1..75: mol_type = other DNA
cagggcgtggatgaaaaaacgctggctgacgccgcacaactggcttcgctggctgatgaaacgccggaaggccgc

SEQ ID NO: 48312 - DNA, 75 bp, synthetic construct
  source 1..75: mol_type = other DNA
gattaccctgtcgactttcctcgcctgattcaggaaaagcgtaaggagtgggagcagattgcaggtatgcctgta

SEQ ID NO: 48313 - DNA, 75 bp, synthetic construct
  source 1..75: mol_type = other DNA
gcagtcagtggcagtcgctgccggtacttccggcagacggaacgcaggtgtctttcccgtatgccggtgagtggc

SEQ ID NO: 48314 - DNA, 75 bp, synthetic construct
  source 1..75: mol_type = other DNA
atggaacaaacaagttacagcaaactatcacagcgcgacgttgatcgcgcagaaacagatttactcatcaacctg

SEQ ID NO: 48315 - DNA, 75 bp, synthetic construct
  source 1..75: mol_type = other DNA
cgtgtggaaatccgcccaccttaccgggcgccggtgccgtgtgggaatccacccaccttgccgggcgccggtgct

SEQ ID NO: 48316 - DNA, 75 bp, synthetic construct
  source 1..75: mol_type = other DNA
ttgatggcggcaccggaacccgcattacgggtgatgatgcgacggccaacaacagtggcaataccaccgtagacg

SEQ ID NO: 48317 - DNA, 75 bp, synthetic construct
  source 1..75: mol_type = other DNA
ccgctgacggacacggacggtaatcctgtgatacacggtgtgaccgcggtctggcgcgccggggagcaggagcag

SEQ ID NO: 48318 - DNA, 75 bp, synthetic construct
  source 1..75: mol_type = other DNA
actgcagcagatgcaggacggacgcctttatattgcgggtatcggtgccggtattgagaatacgccagcaggaat

SEQ ID NO: 48319 - DNA, 75 bp, synthetic construct
  source 1..75: mol_type = other DNA
tagggagtattgatcagtatcagaatcaggctgagctaaacgttggctcgacccaacaaacttttgtgcacgcat

SEQ ID NO: 48320 - DNA, 75 bp, synthetic construct
  source 1..75: mol_type = other DNA
aaagttattccacagtcgccaggccatgcctacgggatgtttatggaacgctttaacgagttatcggagttacgc

SEQ ID NO: 48321 - DNA, 75 bp, synthetic construct
  source 1..75: mol_type = other DNA
tggctggtatcccacagcaagtatcagcgatttgctggttgtggtgatgaagaaagccaccgcaggcatcagtat

SEQ ID NO: 48322 - DNA, 75 bp, synthetic construct
  source 1..75: mol_type = other DNA
actcacgtaagcgaccagttcgcgccattcgcttgtcagtcgatcccggcgaccgtgagcgaggcaccgtatatt

SEQ ID NO: 48323 - DNA, 75 bp, synthetic construct
  source 1..75: mol_type = other DNA
gttatgaagtacaagaccctgaaagatttggtgttgtagaatttgatgcagactataacgctgtatctatagaag

SEQ ID NO: 48324 - DNA, 75 bp, synthetic construct
  source 1..75: mol_type = other DNA
aatcagggggcaggcaatatcaccgactgtacggtgattgtgaccaaaaaagccgcttccggcatcagtattcgt

SEQ ID NO: 48325 - DNA, 75 bp, synthetic construct
  source 1..75: mol_type = other DNA
ggaaaatgcaaaactggccgtgccttccaacccacaggattggctggcagacagaaaggcgcgactcacgatcgc

SEQ ID NO: 48326 - DNA, 75 bp, synthetic construct
  source 1..75: mol_type = other DNA
tcgatatcaccttcctcggcatgggagagatggatcagtacggtaacgtcaacgtctcccatctcaatggcaatc

SEQ ID NO: 48327 - DNA, 75 bp, synthetic construct
  source 1..75: mol_type = other DNA
ccttgagacatacgtgtttcaggataacctggctaccgcaatgcgacgtgatggcgagatttatgcctcaatggt

SEQ ID NO: 48328 - DNA, 75 bp, synthetic construct
  source 1..75: mol_type = other DNA
gtgagtgtaacggttgaaaagattgatgtgttgtcattcgttataaccggtgcagagagactagatccggttcga

SEQ ID NO: 48329 - DNA, 75 bp, synthetic construct
  source 1..75: mol_type = other DNA
gtactcgccagcaaaaatccgtctgacatccctggtttcaaactgaaacaactgttcatcccatacgtggatgag

SEQ ID NO: 48330 - DNA, 75 bp, synthetic construct
  source 1..75: mol_type = other DNA
aacgcttacatgcttgaggctgccaccaacgcagtgaaagaggtggctagtcttggcgtggatgcgcaggcggca

SEQ ID NO: 48331 - DNA, 75 bp, synthetic construct
  source 1..75: mol_type = other DNA
gacggcgttgccggatacagcgtgtgggggctgaagctgccgacgctgcgccagcgcctgttccgctgcgtgagt

SEQ ID NO: 48332 - DNA, 75 bp, synthetic construct
  source 1..75: mol_type = other DNA
aggataaggagcgggtgaccaaaaacatcaacatcatgtggaatgcgctttccaaaaacagaatgtttgacggca

SEQ ID NO: 48333 - DNA, 75 bp, synthetic construct
  source 1..75: mol_type = other DNA
gacgcctgcagcgtcagcggatgtgaacagcgacatgaatcagttctttaacaagctgggcttcgcctccaatac

SEQ ID NO: 48334 - DNA, 75 bp, synthetic construct
  source 1..75: mol_type = other DNA
atgtcatttattaaaactttttccgggaagcatttttattatgacaagataaataaagacgacatcgtgattaac

SEQ ID NO: 48335 - DNA, 75 bp, synthetic construct
  source 1..75: mol_type = other DNA
ctggcgctggatgtccgtattgacgagcaaggcaacaagcaggtggcagtcagcggctggcaagagaactcgggc

SEQ ID NO: 48336 - DNA, 75 bp, synthetic construct
  source 1..75: mol_type = other DNA
cgtaaacaattcgccaccaaaggcgaagcactggccttcgagcgatacaccatgggggaaatagaagcaaagccc

SEQ ID NO: 48337 - DNA, 75 bp, synthetic construct
  source 1..75: mol_type = other DNA
gcaacttcggcagattcagatagccagtctattttgaaaagtgcgctgtccgggttgcaaaaaccagggatatta

SEQ ID NO: 48338 - DNA, 75 bp, synthetic construct
  source 1..75: mol_type = other DNA
gaaaaatacgacttcccaccgttatatcgtgattttcgcgcttatctggcaatgttgctggcaaataatggggtg

SEQ ID NO: 48339 - DNA, 75 bp, synthetic construct
  source 1..75: mol_type = other DNA
cgaaagtccaatatattcttttcccataaaagaaataccaaatctcataaatacattacaaaacatttatgaaga

SEQ ID NO: 48340 - DNA, 75 bp, synthetic construct
  source 1..75: mol_type = other DNA
gctgaaatcaggacgtccattacgaatgtcagcaatgaaatcacgcagaccgtcaataaaaaactggaagaccag

SEQ ID NO: 48341 - DNA, 75 bp, synthetic construct
  source 1..75: mol_type = other DNA
tctggccaacgggacatccggcacatggttttacactgacgacattgcagtcactgacgcgtggcttcgcgcgca

SEQ ID NO: 48342 - DNA, 75 bp, synthetic construct
  source 1..75: mol_type = other DNA
acggtgccggaaatcaaaaccgcaaaagacttcctgcagaaaatggcaagcgacattaacagtatgaacctcagt

SEQ ID NO: 48343 - DNA, 75 bp, synthetic construct
  source 1..75: mol_type = other DNA
gatacgctttgatggcgtattttctccggaaggacgaattgttctgcgtcatctcaaacagcaggagcgggcgta

SEQ ID NO: 48344 - DNA, 75 bp, synthetic construct
  source 1..75: mol_type = other DNA
ttcgcgccgaagtggcggaggtggccaataccatgtgtgaccttcgggccaggctgaacgatatggagcatcgct

SEQ ID NO: 48345 - DNA, 75 bp, synthetic construct
  source 1..75: mol_type = other DNA
gggattaaagtcacccgtattgaaattcgcgacgtgcgcccaccggcagagcttatctcttcaatgaacgcgcag

SEQ ID NO: 48346 - DNA, 75 bp, synthetic construct
  source 1..75: mol_type = other DNA
tgaaatttataaccgtaccgcgctggataatacgctgatttacagtggcgttattgatatgcctgccggtcacgg

SEQ ID NO: 48347 - DNA, 75 bp, synthetic construct
  source 1..75: mol_type = other DNA
ctggttgtcgatcgtcagatgagctacatgcgtcagcagctttccgcccgcatgctcagtcgttaccagaacaac

SEQ ID NO: 48348 - DNA, 75 bp, synthetic construct
  source 1..75: mol_type = other DNA
caggcaccgggccatgcctacgggatgtttatggaacgttttaacgagttatcggagttacgcaaatgcgcatga

SEQ ID NO: 48349 - DNA, 75 bp, synthetic construct
  source 1..75: mol_type = other DNA
tatccatgatgcagaatgtattcgtgaaatccacgaagcccccctgcaggctatcggcatcctggaaaaatacaa

SEQ ID NO: 48350 - DNA, 75 bp, synthetic construct
  source 1..75: mol_type = other DNA
tgcatgtgttcattcgctccagtgaactgcgtttcgcccgctggtcagagattgatttcacaaaccgagtctgga

SEQ ID NO: 48351 - DNA, 75 bp, synthetic construct
  source 1..75: mol_type = other DNA
gttgtgggatatcaaagctaaagcggcaaatatgccattgtatcaactgcttggtggtgcttctcgtgaaggcgt

SEQ ID NO: 48352 - DNA, 75 bp, synthetic construct
  source 1..75: mol_type = other DNA
acaggaaatggtcgcagaacaccgccgaccgtctgcttgccagcctgaacaatcacatctttccggtcatcggga

SEQ ID NO: 48353 - DNA, 75 bp, synthetic construct
  source 1..75: mol_type = other DNA
tacgtctggttatttctatcgctaagaaatacaccaaccgtggcttgcagttccttgacctgattcaggaaggca

SEQ ID NO: 48354 - DNA, 75 bp, synthetic construct
  source 1..75: mol_type = other DNA
gggccgtctgtacgcgtgaatgaatggttcagcgcgtatgcgatggcgggtgtggcttacagccgtgtgtcgact

SEQ ID NO: 48355 - DNA, 75 bp, synthetic construct
  source 1..75: mol_type = other DNA
tttatttctgcacggtggtcagtgcgttatatctggtggggggtggttataaagccatccgaaattatgttcgtc

SEQ ID NO: 48356 - DNA, 75 bp, synthetic construct
  source 1..75: mol_type = other DNA
gaatgcattgacgtaattcgtgaagaagtaaagcgatggaatgattcccgcgccgctggcattcgcatcaaagga

SEQ ID NO: 48357 - DNA, 75 bp, synthetic construct
  source 1..75: mol_type = other DNA
tatcgccgctcgtcctggtatggggaaaaccgaactggcgctgaagattgccgaaggcgttgcaagccgcgttat

SEQ ID NO: 48358 - DNA, 75 bp, synthetic construct
  source 1..75: mol_type = other DNA
cgcgtcgtgatggcggtttctcgctgatgtatgcggcgggtaacgtggggtctattatcgcacctatcgcctgtg

SEQ ID NO: 48359 - DNA, 75 bp, synthetic construct
  source 1..75: mol_type = other DNA
ggcgacatgccccgctacaaccatcgcaatggaagcctgtggtggctctcactttatggcacgcaagttggaaga

SEQ ID NO: 48360 - DNA, 75 bp, synthetic construct
  source 1..75: mol_type = other DNA
cgcgccggatctcaccattaataccgtcgcgggcgatgacattatcaacgccatcgaacatggtcaggcgctggt

SEQ ID NO: 48361 - DNA, 75 bp, synthetic construct
  source 1..75: mol_type = other DNA
tccatgagtctctccgacaaaccggttattgagaattacgagagtggtggaagcaaagcccagctgccgaatgtg

SEQ ID NO: 48362 - DNA, 75 bp, synthetic construct
  source 1..75: mol_type = other DNA
tagatcatgcatacagcgcacttgcttacagtgaaaacatgcttgaaatattgcgcttatggcttgaaacgcttg

SEQ ID NO: 48363 - DNA, 75 bp, synthetic construct
  source 1..75: mol_type = other DNA
tgccaataagctgggcgcagatatcggttcggtgatcgtctacggtttgctggttgggctgatggcatcactgat

SEQ ID NO: 48364 - DNA, 75 bp, synthetic construct
  source 1..75: mol_type = other DNA
tgaaacatttaaatactatacgacagcgacatttatcgcttcagtcgtcgctctggcgggcacattcctgctgtc

SEQ ID NO: 48365 - DNA, 75 bp, synthetic construct
  source 1..75: mol_type = other DNA
atgataaagctgttggctggaactggaatagcggggtctataacgcaaatattggtggcgcatcgacattaatcc

SEQ ID NO: 48366 - DNA, 75 bp, synthetic construct
  source 1..75: mol_type = other DNA
gcgaactatctggcgggcgtgattgccgatcagacatcgcaggcttcgtttgatgcttccggggcgatcaactac

SEQ ID NO: 48367 - DNA, 75 bp, synthetic construct
  source 1..75: mol_type = other DNA
gctcctgccattcgtctgacgctccatcatgaaatcaaggatttctgcgcgacgctggagtcaccaggtgaatca

SEQ ID NO: 48368 - DNA, 75 bp, synthetic construct
  source 1..75: mol_type = other DNA
gttatatggcagacaaaaaccgcgtactcatgcggaaacccgcagtgaagatactggcggtctgtcaggtaaaga

SEQ ID NO: 48369 - DNA, 75 bp, synthetic construct
  source 1..75: mol_type = other DNA
tgataactacaccggacggcctttaacccgtctggctgttgagttaacgttattaatctttattcgttccagtga

SEQ ID NO: 48370 - DNA, 75 bp, synthetic construct
  source 1..75: mol_type = other DNA
tctcaggtctacatcgaagggaaacttaaaacccgtaagtggacagatgacgccggtgtagaacgttacacgacg

SEQ ID NO: 48371 - DNA, 75 bp, synthetic construct
  source 1..75: mol_type = other DNA
gtatatggacctgctttgcctggctaaaggtggcaaagaactattggcaaaaggcactttggacaaagtcggaga

SEQ ID NO: 48372 - DNA, 75 bp, synthetic construct
  source 1..75: mol_type = other DNA
ccgttagttgttcttgcggcacgtctgctgatcctcacgggagttcgcactggcgaactccgaggtgctttctgg

SEQ ID NO: 48373 - DNA, 75 bp, synthetic construct
  source 1..75: mol_type = other DNA
tgaacaacatcgatattatcgcgctgaggtttatctcaaagaaggcggtcaaaattatgatgtgatgggctggaa

SEQ ID NO: 48374 - DNA, 75 bp, synthetic construct
  source 1..75: mol_type = other DNA
aactaattgcctggagaagttatgtaatgaagttagtattctttttaagaatcaacctgattatcttactttttt

SEQ ID NO: 48375 - DNA, 75 bp, synthetic construct
  source 1..75: mol_type = other DNA
ctggctgataatgccagcgatcagggcgagtgctggcccagctatcagcatatcgctgatcagtgcgagattagc

SEQ ID NO: 48376 - DNA, 75 bp, synthetic construct
  source 1..75: mol_type = other DNA
atccgatacgtcaagcctgtcgctgcacaacattcttgataaagatggtaaggcaacagctgattatgttgttca

SEQ ID NO: 48377 - DNA, 75 bp, synthetic construct
  source 1..75: mol_type = other DNA
ggacagtttgatatttcgttacggtgcaccattgaaaatgccacagatgcattaaatgctataaagaaagcgaat

SEQ ID NO: 48378 - DNA, 75 bp, synthetic construct
  source 1..75: mol_type = other DNA
atccagaagctgcaccgattgaagaacaaggtttaggctgggcgagcacttacggcagcggcgttggcgcagatg

SEQ ID NO: 48379 - DNA, 75 bp, synthetic construct
  source 1..75: mol_type = other DNA
actgccagtcgtgaggcggtaaaacgtgaagtggagcgtcgtgtgaaggagcgcatgattctgtcacgtaaccgc

SEQ ID NO: 48380 - DNA, 75 bp, synthetic construct
  source 1..75: mol_type = other DNA
tatgccgccggtgctgcgccgccgggcgattgatgcgctgctgcaggggctgtgtttccactatgacccgctggc

SEQ ID NO: 48381 - DNA, 75 bp, synthetic construct
  source 1..75: mol_type = other DNA
cagatgctgttttaccgtggctggcgaaagatattgctgtcgtttttccgcccgaagttgtacacaccacgttaa

SEQ ID NO: 48382 - DNA, 75 bp, synthetic construct
  source 1..75: mol_type = other DNA
atggcgggtgtggcttacagccgtgtgtcgactttctccggggattatcttcgcgtaactgacaacaaggggaaa

SEQ ID NO: 48383 - DNA, 75 bp, synthetic construct
  source 1..75: mol_type = other DNA
gtggcacaacgcggtgtaaacaaagtcatcctgattggtaccctggggcaagacccggagatcaggtatatacca

SEQ ID NO: 48384 - DNA, 75 bp, synthetic construct
  source 1..75: mol_type = other DNA
aaaccaacaaccgggagcaggcgcggctctacgccgaagcagaacagaccagcgcgctgctgagacaacgacaac

SEQ ID NO: 48385 - DNA, 75 bp, synthetic construct
  source 1..75: mol_type = other DNA
aagtgtgccgcagcttattgataatttgctgtcggtgcgtaccaatatttcaactatttttattcgcaccgcgtt

SEQ ID NO: 48386 - DNA, 75 bp, synthetic construct
  source 1..75: mol_type = other DNA
atgaacgcttatgtacttggtagttattatgctgcaaataaaaaattcccggataaaatgaaagcagagttttaa

SEQ ID NO: 48387 - DNA, 75 bp, synthetic construct
  source 1..75: mol_type = other DNA
gatgtggtcaatttacttgttaaacgcgctgtatttcataagcaaatttcatccgtggatgaactgacaaaatta

SEQ ID NO: 48388 - DNA, 75 bp, synthetic construct
  source 1..75: mol_type = other DNA
tccttgtacttgatgaatgtggtacttggtttaattcccgctcatggggtgataaagacagacaacctgttattg

SEQ ID NO: 48389 - DNA, 75 bp, synthetic construct
  source 1..75: mol_type = other DNA
agcatgcgaggaaaatagacgacatttttggtgataatgtcccaaatatgtcccactctggaattatggaggata

SEQ ID NO: 48390 - DNA, 75 bp, synthetic construct
  source 1..75: mol_type = other DNA
caaaaatcctgatgcgccaatagcctcaataggcgctgtatttttcgatccacaaaccggagagcaggggcctga

SEQ ID NO: 48391 - DNA, 75 bp, synthetic construct
  source 1..75: mol_type = other DNA
cggcaggtaaccgcctgcccgacccggagctgcacccggacagcaccctcagcatgtggccggataaccgtatcg

SEQ ID NO: 48392 - DNA, 75 bp, synthetic construct
  source 1..75: mol_type = other DNA
gggtgtgtcttacagccgtgtgtcgactttctccggagattatctgcaggtgaccgacaacaaggggaaaacgca

SEQ ID NO: 48393 - DNA, 75 bp, synthetic construct
  source 1..75: mol_type = other DNA
accgctggttcagcgtaatggcggggccgtctgtgcgcgtgaatgaatggttcagcgcgtatgcgatggcgggtg

SEQ ID NO: 48394 - DNA, 75 bp, synthetic construct
  source 1..75: mol_type = other DNA
caccatcgcccagtcccaggttggctacgccgaccgtattctgctgactaaaaccgacgtcgcaggcgaagcaga

SEQ ID NO: 48395 - DNA, 75 bp, synthetic construct
  source 1..75: mol_type = other DNA
agattgttgatgaaatctgcgattttgtggcaaatcagcaggctgttttcctcggcggtcactacatccttcagg

SEQ ID NO: 48396 - DNA, 75 bp, synthetic construct
  source 1..75: mol_type = other DNA
aaatgctggttggttcacgacggatatcccaggacatcagcacccgtgatgagggcggagacgggaaagtggtgg

SEQ ID NO: 48397 - DNA, 75 bp, synthetic construct
  source 1..75: mol_type = other DNA
tgctgatgacggtaaagcgccacaagcggtgccgtattcagccttactgacaggagtattactgaaacgcgtgat

SEQ ID NO: 48398 - DNA, 75 bp, synthetic construct
  source 1..75: mol_type = other DNA
aatggttcagcgcgtatgcgatggcgggtgtggcttacagccgtgtgtcgactttctccgggattatcttcgcgt

SEQ ID NO: 48399 - DNA, 75 bp, synthetic construct
  source 1..75: mol_type = other DNA
cgatactttaatcctattggtgcgcacccaagtggcatgataggtgaagatccaaggggaatgcctaataatata

SEQ ID NO: 48400 - DNA, 75 bp, synthetic construct
  source 1..75: mol_type = other DNA
ctttgactttaaaaagcggcatcgccgcgcctcggagtcctgtcaataactgtggaaagctcaccggtggtgata

SEQ ID NO: 48401 - DNA, 75 bp, synthetic construct
  source 1..75: mol_type = other DNA
tgcaggtgcttttggtctgggtaaatcgcgcggtactaacatcgctgagacaaaagcggaccagcaacgcactga

SEQ ID NO: 48402 - DNA, 75 bp, synthetic construct
  source 1..75: mol_type = other DNA
cgtcagctatgcgatatgcctggggacaggttgtctgacgaccgttggtcggcatggagtgttttgtatcggaag

SEQ ID NO: 48403 - DNA, 75 bp, synthetic construct
  source 1..75: mol_type = other DNA
cgcgagatgcgacgtcaggtggtgctgaacgtggaagtcctcagcgtcagaaaaacccgccgtgaccaggccggc

SEQ ID NO: 48404 - DNA, 75 bp, synthetic construct
  source 1..75: mol_type = other DNA
tgccactgactgccgtcgccctgctgctgtcaggctgcggtacggccgaacgtatcagcaacacggaaaaagacg

SEQ ID NO: 48405 - DNA, 75 bp, synthetic construct
  source 1..75: mol_type = other DNA
aaagcgtgcccgtgcgcgtcgtgatgcgggcagggaacgtcaggatatcgtcaccttggtgaagcgacagctgac

SEQ ID NO: 48406 - DNA, 75 bp, synthetic construct
  source 1..75: mol_type = other DNA
cggcaccatgtcctcaaacggctcatcaggaggcagtgcatcagatgccatttccggtgatgccagcaataccca

SEQ ID NO: 48407 - DNA, 75 bp, synthetic construct
  source 1..75: mol_type = other DNA
tattcattgccaagatcgtcgcggcaaggctgtttaccgtaaaaaatttacacggccaaagttaatcgaattttt

SEQ ID NO: 48408 - DNA, 75 bp, synthetic construct
  source 1..75: mol_type = other DNA
ggtcggttctcttaccaggtaaacccgatgccgttcgggtgtggcaacccacttactcacatgtttaaccagcta

SEQ ID NO: 48409 - DNA, 75 bp, synthetic construct
  source 1..75: mol_type = other DNA
gtctgatctgcgaacccggacgccggttgttaaggaatcctcacgacaatggatcaatccccgtccggtcatgga

SEQ ID NO: 48410 - DNA, 75 bp, synthetic construct
  source 1..75: mol_type = other DNA
ccgatgcaatactgcggtttcagtccgattacgatgaaacctcggcggttccattgctatccatccagaacacga

SEQ ID NO: 48411 - DNA, 75 bp, synthetic construct
  source 1..75: mol_type = other DNA
aataaagcgtgcccgtgcgcgtcgtgatgcgaacagggaacgtcaggatatcgtcaccctggtgaaacggcagct

SEQ ID NO: 48412 - DNA, 75 bp, synthetic construct
  source 1..75: mol_type = other DNA
gatatctttgtcccgacttacaacgaagatctcaacgtggtgaaaaataccatttacgcctcgctgggtatcgac

SEQ ID NO: 48413 - DNA, 75 bp, synthetic construct
  source 1..75: mol_type = other DNA
agcaaagaaacggaagcccgttaaaaccgcatgaaattgcaccatctgccagactgaccaggtctgaacgattgc

SEQ ID NO: 48414 - DNA, 75 bp, synthetic construct
  source 1..75: mol_type = other DNA
gggcttctgtttcttcatgcctgtcatttgtctgttactgatgttgttgttcctgctactgctactgctactgct

SEQ ID NO: 48415 - DNA, 75 bp, synthetic construct
  source 1..75: mol_type = other DNA
gggccgcgctcacgcgccgcccctttcattacgcggacgttctgatgggggcttctgtttcttcatgcctgtcat

SEQ ID NO: 48416 - DNA, 75 bp, synthetic construct
  source 1..75: mol_type = other DNA
gagcgtcattgcccatatgaacgaattattaatcgccctgagcgatgacgcggagttaagtcgggaagatcgcta

SEQ ID NO: 48417 - DNA, 75 bp, synthetic construct
  source 1..75: mol_type = other DNA
ccgcgcgccggtggcgtgaaaggggccgcgctgacgcgccgccccttacattacgtggacattctgctgtgggct

SEQ ID NO: 48418 - DNA, 75 bp, synthetic construct
  source 1..75: mol_type = other DNA
aaagcctgagcatggcgacaattgctcctacggctgcacgtaacccaattccctggcagagaaggttacgcaata

SEQ ID NO: 48419 - DNA, 75 bp, synthetic construct
  source 1..75: mol_type = other DNA
gtggtggcgaagacaacgtatgttgacgaaaacggggatgaacagcgttatctgccggaaggtacactgattctg

SEQ ID NO: 48420 - DNA, 75 bp, synthetic construct
  source 1..75: mol_type = other DNA
ttcaccatgacgcagtccgcgccgctgatggtgctgccggatccggatgagtttgtggtggtacaggtgaaataa

SEQ ID NO: 48421 - DNA, 75 bp, synthetic construct
  source 1..75: mol_type = other DNA
aatgggtgaaacagaatatttgggccgagtactggaggaaggtcacggacatgactaacgttttgctgatcatgc

SEQ ID NO: 48422 - DNA, 75 bp, synthetic construct
  source 1..75: mol_type = other DNA
tggtagtaaaccaaaagctgtcaggtaaggataatattctgctggttgattttctgaacaaacccaccggagaaa

SEQ ID NO: 48423 - DNA, 75 bp, synthetic construct
  source 1..75: mol_type = other DNA
gtgcaacttgacattctgggattgtggatcggacgtagccgtgttgtcagccagcctatctcaggtgtttatttc

SEQ ID NO: 48424 - DNA, 75 bp, synthetic construct
  source 1..75: mol_type = other DNA
gtatgaatgacagagagcgggcaacagaattgctgacagaatatgcactcagtcggtgtgatcgcgtggcggcgt

SEQ ID NO: 48425 - DNA, 75 bp, synthetic construct
  source 1..75: mol_type = other DNA
gtgagcttcatcgtatcgcggatgccctgcaggcggtacagaagcgtaacttctggcagttacaggctgaaatca

SEQ ID NO: 48426 - DNA, 75 bp, synthetic construct
  source 1..75: mol_type = other DNA
gttgattgcaataagtcagtatcaaagatgactgaccaggaaaaaacgcaatgtggtaaatcaggcgaatttaca

SEQ ID NO: 48427 - DNA, 75 bp, synthetic construct
  source 1..75: mol_type = other DNA
atgcttcttttggcaagaaaatagatactctttgtgatagtatgagccgggatgtaaaaaatcgtacggcagatt

SEQ ID NO: 48428 - DNA, 75 bp, synthetic construct
  source 1..75: mol_type = other DNA
atgtcagacaagctcataacgctggcgaagatcctctgtgtaatcgtcggcatttcattttcactaatgctggtt

SEQ ID NO: 48429 - DNA, 75 bp, synthetic construct
  source 1..75: mol_type = other DNA
tgagcaacatcatccgtaccgggatcatctctgaagttgatgaggaatcctggtgcgtgcgcgttcgcagcggcg

SEQ ID NO: 48430 - DNA, 75 bp, synthetic construct
  source 1..75: mol_type = other DNA
atgcaagcattcaccgccggtttactggcggtttttttgtgcacagaaaacccccagctaggctgggggttccgg

SEQ ID NO: 48431 - DNA, 75 bp, synthetic construct
  source 1..75: mol_type = other DNA
ctccaacgccagcggcatctttgtcattcgtccgttgaaaggcgagggcgggcgtaacggcaagattgccaatat

SEQ ID NO: 48432 - DNA, 75 bp, synthetic construct
  source 1..75: mol_type = other DNA
gtagcgcggcgagcaaaaaacagtgcccctgctgtcacggaaaaaaatttattgaaagcgaggtttttacaaaca

SEQ ID NO: 48433 - DNA, 75 bp, synthetic construct
  source 1..75: mol_type = other DNA
ccattcatcgtgaagagtcggtaaaacgtggtatgcctgttatcagagactgccagcgttgtggtggtcgtggct

SEQ ID NO: 48434 - DNA, 75 bp, synthetic construct
  source 1..75: mol_type = other DNA
tcagcccggaaattattgcgattgctatcggttcaggtgcgattggctgcacgatcgttacggactcgcttttct

SEQ ID NO: 48435 - DNA, 75 bp, synthetic construct
  source 1..75: mol_type = other DNA
tgaattgctggatgaggtgtataaagtttatggtcagttttctgcctggaaactgcgcaatatgactcacgaaga

SEQ ID NO: 48436 - DNA, 75 bp, synthetic construct
  source 1..75: mol_type = other DNA
ttcatcgtatcgcggatgccctgcaggcggtgcagaagcgtaacttctggcaactgcaggctgaaatccaccacc

SEQ ID NO: 48437 - DNA, 75 bp, synthetic construct
  source 1..75: mol_type = other DNA
tgtcccgtacaaccagtgatgcgctgtttctggcgctgcgccgggtgaaagcagatctgaatgcggatatcaaca

SEQ ID NO: 48438 - DNA, 75 bp, synthetic construct
  source 1..75: mol_type = other DNA
ctcgatcaattcgaattctacagtggcggcggcatcgatatcaccttcctcggcatgggagagatggatcagtac

SEQ ID NO: 48439 - DNA, 75 bp, synthetic construct
  source 1..75: mol_type = other DNA
gctggccgagaaagcagcccgggaagcggagctggcggcaaaaaaagcgcaggccagacaggcgctgtccattta

SEQ ID NO: 48440 - DNA, 75 bp, synthetic construct
  source 1..75: mol_type = other DNA
ttcagggggcatgggatgaccgggaaaatgcccgtctgggtctggcagcggccacgctgcagtcggatatggaaa

SEQ ID NO: 48441 - DNA, 75 bp, synthetic construct
  source 1..75: mol_type = other DNA
atgacgatttatgcttactcctggaacaaaccaaatgaagcaataggacgcgaaagatctcttacacgtgacgag

SEQ ID NO: 48442 - DNA, 75 bp, synthetic construct
  source 1..75: mol_type = other DNA
tggcatttgatggtctggagttgacgtttacaggaacgcctgccgttaacgacagcttcacgctgaaaccagtaa

SEQ ID NO: 48443 - DNA, 75 bp, synthetic construct
  source 1..75: mol_type = other DNA
cgatatggcagcaaccacagaggagaagcaggccaagaccaacatcgaccgtgccatgctgctgggggctcaggc

SEQ ID NO: 48444 - DNA, 75 bp, synthetic construct
  source 1..75: mol_type = other DNA
actgggtctggccaatgaccgtttcgccgctgaaaagccgtaattaccggggcgatctggcgcttgaagccaaat

SEQ ID NO: 48445 - DNA, 75 bp, synthetic construct
  source 1..75: mol_type = other DNA
ctgagaacaccaaatcgtcagcaaagaaacggaagcccgttaaaaccacatgaaattgcaccatcggccagactg

SEQ ID NO: 48446 - DNA, 75 bp, synthetic construct
  source 1..75: mol_type = other DNA
acgtcgccagctgtccgcacaggagaaatccctgctggtacataaagaggagacgctggagtacaaacgacaact

SEQ ID NO: 48447 - DNA, 75 bp, synthetic construct
  source 1..75: mol_type = other DNA
ccgaagcgtgcgaggcagctgcggtaaagctcgtcagcgtggtcgtgaagcgcttcgcagatgtcagcctggtcg

SEQ ID NO: 48448 - DNA, 75 bp, synthetic construct
  source 1..75: mol_type = other DNA
tctgcggaaacggctgcatcggcgtttgccggcagtcttcttgagggctataacgcagcattcaatggtgccata

SEQ ID NO: 48449 - DNA, 75 bp, synthetic construct
  source 1..75: mol_type = other DNA
atgaaactggaagatttaccgaaatactattccccaaaatcgccaggcctgactgatgcatccgtctcgacgtca

SEQ ID NO: 48450 - DNA, 75 bp, synthetic construct
  source 1..75: mol_type = other DNA
atggcgccatgaagaagaccaccgcaatgagactgtttactcaatcgaaaatggcgcagctgttacagtggatta

SEQ ID NO: 48451 - DNA, 75 bp, synthetic construct
  source 1..75: mol_type = other DNA
aagcgtatgcggcagggcgtctggagaaaattcgccgccagaaccggacaaaggcagaacttcaggccgtgcttg

SEQ ID NO: 48452 - DNA, 75 bp, synthetic construct
  source 1..75: mol_type = other DNA
tggccgtgaaacccgtcgatatgcgtgccggtatcgacaccctgacacagtacgttcagaacgaacttaacgcag

SEQ ID NO: 48453 - DNA, 75 bp, synthetic construct
  source 1..75: mol_type = other DNA
actgcaccggggaagcttccgctggccccggaaaggtgatgccacatggcatctcacacaggatgagtttcactg

SEQ ID NO: 48454 - DNA, 75 bp, synthetic construct
  source 1..75: mol_type = other DNA
aggccagacaggcgctgtccatttatctgacgctgccctcgctggatgaggcggtgaacactctgaaaccttggt

SEQ ID NO: 48455 - DNA, 75 bp, synthetic construct
  source 1..75: mol_type = other DNA
tttcacggctgccaaccgaaaccgctcgatggtgaatattctcactgaacagcaggatgcaccaaaagcagtttc

SEQ ID NO: 48456 - DNA, 75 bp, synthetic construct
  source 1..75: mol_type = other DNA
aacagcgccatacagaactgggtggcatcccgtaccgccacgctggggcgcgatattgttcccagccagattatc

SEQ ID NO: 48457 - DNA, 75 bp, synthetic construct
  source 1..75: mol_type = other DNA
tgttctggtgtatttctctctgcggaatggttttgtatccggttgcaaaatggtatattgaagatacagctctga

SEQ ID NO: 48458 - DNA, 75 bp, synthetic construct
  source 1..75: mol_type = other DNA
gttatcagtcatatgcccaaaagtaaggaggacgctcttacagttatcagagaaattgaaaacagaaaaagacgt

SEQ ID NO: 48459 - DNA, 75 bp, synthetic construct
  source 1..75: mol_type = other DNA
atgacatttatacagcttattttattgtatttctgcacggtggtatgtgtcttatatctggtgagcggtggttat

SEQ ID NO: 48460 - DNA, 75 bp, synthetic construct
  source 1..75: mol_type = other DNA
accttatcagtaaggtgatgggcagtatttctaatcctgaaattcgccggatggagctgatgaacaccattgccg

SEQ ID NO: 48461 - DNA, 75 bp, synthetic construct
  source 1..75: mol_type = other DNA
ctgaagatgaatcttcaggggtatgactatcgccgggatgacgaatatatgatgtggggatcggctgatctccag

SEQ ID NO: 48462 - DNA, 75 bp, synthetic construct
  source 1..75: mol_type = other DNA
tgatggcgctggccgctgtttcattgcaggcccgtttacagactaatcctgcgatggcgagtgcagttgataccg

SEQ ID NO: 48463 - DNA, 75 bp, synthetic construct
  source 1..75: mol_type = other DNA
cacgtgctttcaatatttcccctctctactggaaaaaataccgtaaaggacagatgaccacgaggcaggcatatt

SEQ ID NO: 48464 - DNA, 75 bp, synthetic construct
  source 1..75: mol_type = other DNA
acaaaatagatgagatttcatctttgtcagagtcaaaggaacaccccatagatattcaagaaaaaaaagatgcgt

SEQ ID NO: 48465 - DNA, 75 bp, synthetic construct
  source 1..75: mol_type = other DNA
ccctcccactggacccgtgagtatactcacgagtgcgtggaaaaaataaagatcctgtttcctcatcttcgtgct

SEQ ID NO: 48466 - DNA, 75 bp, synthetic construct
  source 1..75: mol_type = other DNA
gacgatcgtattcgtcttgaagtcgatttgggcaacgagctgaattttatatatgaagtgaggcttcgcgggtat

SEQ ID NO: 48467 - DNA, 75 bp, synthetic construct
  source 1..75: mol_type = other DNA
catcgaattacgtgcggcattatggtcagaatttgatttagataacgctatttgggaaattcctgctgaaaggat

SEQ ID NO: 48468 - DNA, 75 bp, synthetic construct
  source 1..75: mol_type = other DNA
atggatgccgggctggtatcggtgcgtgaacaggcgcgtccggcggcgcagcagtctgaagatgaattgttacgc

SEQ ID NO: 48469 - DNA, 75 bp, synthetic construct
  source 1..75: mol_type = other DNA
ccttaaatcagttacgtcctcttctgattggctttcgtaaagtaaatggactgacccaaaaggatattgcagaga

SEQ ID NO: 48470 - DNA, 75 bp, synthetic construct
  source 1..75: mol_type = other DNA
aggaaaagacagtccggttgatacctacgtcctgattcaggcagcagatactgatctggcttttgccaccagtat

SEQ ID NO: 48471 - DNA, 75 bp, synthetic construct
  source 1..75: mol_type = other DNA
tcggcggcgcgtctcgtgaaggggtgatggtttattgccataccaccggtcacagtattgatgaagctctggatg

SEQ ID NO: 48472 - DNA, 75 bp, synthetic construct
  source 1..75: mol_type = other DNA
cagagtgctgttcaaagactggcgataatagaacaacggtggctcaggatgaaggaacggcagactgagcaataa

SEQ ID NO: 48473 - DNA, 75 bp, synthetic construct
  source 1..75: mol_type = other DNA
ggcacttctcggttggctttacatcatgtcccgtacatggcgatggctgggttccattttcctaaaacagtggaa

SEQ ID NO: 48474 - DNA, 75 bp, synthetic construct
  source 1..75: mol_type = other DNA
tgctgcggctcctgtcgggatccaggggactgcacctcgtatggccggtatggaccagcatgaacaggccattat

SEQ ID NO: 48475 - DNA, 75 bp, synthetic construct
  source 1..75: mol_type = other DNA
tatgtggctttaatatgcgccacgacgacaccaccgtcgcgctggaagcggcgcatataaaatggaaacagcacg

SEQ ID NO: 48476 - DNA, 75 bp, synthetic construct
  source 1..75: mol_type = other DNA
ctgcaagtgtcaaacatgaaatcaaaagggggtcccaatggggaacgaaaagagtttagcgcacacccgatggaa

SEQ ID NO: 48477 - DNA, 75 bp, synthetic construct
  source 1..75: mol_type = other DNA
gttaaaacaccttgcggtctggcaactgcaagtgtcaaacatgaaatcaaaagggggtcccaatggggaacgaaa

SEQ ID NO: 48478 - DNA, 75 bp, synthetic construct
  source 1..75: mol_type = other DNA
gagtgagtggtcaaatcagaaccgcgatacgtttgacccgacacatgatattgacatgtactgcgatcaggccag

SEQ ID NO: 48479 - DNA, 75 bp, synthetic construct
  source 1..75: mol_type = other DNA
ctgatgtgctaatttttgaaccaaaagtatttggtgatgagcgtggtttcttttttgagagttttaaccagaaag

SEQ ID NO: 48480 - DNA, 75 bp, synthetic construct
  source 1..75: mol_type = other DNA
gcaacgccgggcggcactattgtgaaagcaacgcctacgtttgatcgcacccgcgcagatgatttgctgctggat

SEQ ID NO: 48481 - DNA, 75 bp, synthetic construct
  source 1..75: mol_type = other DNA
caggccggacagacgctgaccgtcacgctcaataacaacacgtaccagaccactgttctcgcggatggcacctgg

SEQ ID NO: 48482 - DNA, 75 bp, synthetic construct
  source 1..75: mol_type = other DNA
acgcgccgttatccgcgatgcctatttcatccactgtcataaaggcactataggtgcaatccggcgtgtggtgga

SEQ ID NO: 48483 - DNA, 75 bp, synthetic construct
  source 1..75: mol_type = other DNA
tgatcaagtccgtcaacggtcagccttaccgcatcaacaccaccgggctgaacaacgttcgctcacagcccgata

SEQ ID NO: 48484 - DNA, 75 bp, synthetic construct
  source 1..75: mol_type = other DNA
atgagtcattctttccaggagcaatacacctgcgtacctccgtctgcgtttgccgcaggcaccggtaaggcgttt

SEQ ID NO: 48485 - DNA, 75 bp, synthetic construct
  source 1..75: mol_type = other DNA
ggccattgaaaccgttcaactgttcataccctttcaaggggccagcgcagtacaaaaactgtatgttttagtcag

SEQ ID NO: 48486 - DNA, 75 bp, synthetic construct
  source 1..75: mol_type = other DNA
tcttcccggtgaagatccggctcaactgaacgacccggcctaccgtcgtctgcgtatcatcaccgataacctcaa

SEQ ID NO: 48487 - DNA, 75 bp, synthetic construct
  source 1..75: mol_type = other DNA
aacagggaaaccggcgagcgcatcgaccttatcagtaaggtgatgggcagtatttctaatcctgaaattcgccgg

SEQ ID NO: 48488 - DNA, 75 bp, synthetic construct
  source 1..75: mol_type = other DNA
cattgctgatgagtttgacgaacgcgtcgaggctgcacgcgccgccgcagacagtggtgattttgcgttgtatat

SEQ ID NO: 48489 - DNA, 75 bp, synthetic construct
  source 1..75: mol_type = other DNA
tgctggcactgattcgccagaaacacccgaccattcccattggcctgttgatgtatgccaatctggtgtttaaca

SEQ ID NO: 48490 - DNA, 75 bp, synthetic construct
  source 1..75: mol_type = other DNA
gtctacaaccccaacgttaaaaatgccctggtactcaaggcctacgacattatcagtcaccgccgtctggagttt

SEQ ID NO: 48491 - DNA, 75 bp, synthetic construct
  source 1..75: mol_type = other DNA
ttctacgaaaaccgctcaacggttacagacgttgagaaaatggagttgccaatgagttttaactggttggttgtt

SEQ ID NO: 48492 - DNA, 75 bp, synthetic construct
  source 1..75: mol_type = other DNA
ctgaccaacggcggctacaacatcggtcgtgttatcgctcgtccgtttatcggtgacaaagccggtaacttccag

SEQ ID NO: 48493 - DNA, 75 bp, synthetic construct
  source 1..75: mol_type = other DNA
atgcgcagacaaaaagcgcgatgtttttgctgtggtgaacgcgcagtgattgagaagaccttctggaaagatgat

SEQ ID NO: 48494 - DNA, 75 bp, synthetic construct
  source 1..75: mol_type = other DNA
tagccctggctgcgggattaattatcactaactgggatgttgtcggaccttattttaagaaactctgggaaacca

SEQ ID NO: 48495 - DNA, 75 bp, synthetic construct
  source 1..75: mol_type = other DNA
cggtatggctattcacaagaaatggcggcagacctatttttccacaccatccagcctgacccacagtgcttatcc

SEQ ID NO: 48496 - DNA, 75 bp, synthetic construct
  source 1..75: mol_type = other DNA
ccggattaagcgttaagaaaatcagggacgtcaataaagtcatggcccgccagaaactcggggtacagctcgatt

SEQ ID NO: 48497 - DNA, 75 bp, synthetic construct
  source 1..75: mol_type = other DNA
attaaaatcccgcacatcgaccagtcgcaggagtctgatgcgaaattcctgacccgtcttgcagaacgcaacggc

SEQ ID NO: 48498 - DNA, 75 bp, synthetic construct
  source 1..75: mol_type = other DNA
ggcgaagtacactttcgaatatcctgatgggagtgttgtgaaatcaaaaaatataaatcctgactttaaaaaaat

SEQ ID NO: 48499 - DNA, 75 bp, synthetic construct
  source 1..75: mol_type = other DNA
atgcgttggcaagggcgacgtgaaagtgacaatgttgaagacaggcgcaacagctctggtggtccgtctatgggc

SEQ ID NO: 48500 - DNA, 75 bp, synthetic construct
  source 1..75: mol_type = other DNA
aggcccgcgtcgtcagccggaaaagaacgttttcactgatgaacagattgagaagctggaagaaatcttccattc

SEQ ID NO: 48501 - DNA, 75 bp, synthetic construct
  source 1..75: mol_type = other DNA
gtaaaggcgggctgattttactgatagtcgtgctggttgcaggctactatggtgttgatttaaccgggttgatga

SEQ ID NO: 48502 - DNA, 75 bp, synthetic construct
  source 1..75: mol_type = other DNA
atggcagttcgtggcattaacaaggttgtactcattggtcgcctgggtaaagacccggaagtccgttacatccca

SEQ ID NO: 48503 - DNA, 75 bp, synthetic construct
  source 1..75: mol_type = other DNA
ggacgcgtggcggtaaccagctccgttatccgggaaagtaccgtgttgtggaaaacctgcccgacgtttccccgt

SEQ ID NO: 48504 - DNA, 75 bp, synthetic construct
  source 1..75: mol_type = other DNA
gacttccgcgcccaggctgatgcaatcaaaaaactgaccgagcagtacaacgtgacctacatcggcatcgactcg

SEQ ID NO: 48505 - DNA, 75 bp, synthetic construct
  source 1..75: mol_type = other DNA
gaaggcgattggtcaactggatttaagggcagcaacaaccatgacacggcgtttagtggtggtatcgcagcgggt

SEQ ID NO: 48506 - DNA, 75 bp, synthetic construct
  source 1..75: mol_type = other DNA
tgcacctgccggatgatattcgtctggggatgctgatgcttatcagccatttttacgaaaaccgctcgtcggtta

SEQ ID NO: 48507 - DNA, 75 bp, synthetic construct
  source 1..75: mol_type = other DNA
ggaagaatgggaagactatgcgccgtttgccgccaatccgttcggctcccgcccggtatggattggttacgaccc

SEQ ID NO: 48508 - DNA, 75 bp, synthetic construct
  source 1..75: mol_type = other DNA
cagaaacagccttaacgaaaggcaaagattaaatatggagtttttaaggctcctgataaacaaatctcatgataa

SEQ ID NO: 48509 - DNA, 75 bp, synthetic construct
  source 1..75: mol_type = other DNA
atgtctggaatatgacgccggtgcgaccgacatcacacagtcatttatggctatccgtaaaaccatgaccagcag

SEQ ID NO: 48510 - DNA, 75 bp, synthetic construct
  source 1..75: mol_type = other DNA
tcttcgtaagaaatgaactattaccacttcaaaaaagattcatggaaataaacagatggcttggtcatgaaatta

SEQ ID NO: 48511 - DNA, 75 bp, synthetic construct
  source 1..75: mol_type = other DNA
attgccgtaaagtgcaacatactgaccagcacctacatccctcatccgctgctcagccagcaggcgttttcacgt

SEQ ID NO: 48512 - DNA, 75 bp, synthetic construct
  source 1..75: mol_type = other DNA
gctgattggtccggatggcgtcgggaagtcgagtttattgtcattgatttccggtgcccgcgtcattgagcaggg

SEQ ID NO: 48513 - DNA, 75 bp, synthetic construct
  source 1..75: mol_type = other DNA
ctggatcagctgaaacaggaaaacagcgccgacgattttcgcaacctcttcatgtgcgagtttgttgacgataaa

SEQ ID NO: 48514 - DNA, 75 bp, synthetic construct
  source 1..75: mol_type = other DNA
gcgagcgcgtcgacatcgatatcagccacaaagcgctcgccggtggcgtgctgtgcccggacggccagtggcggc

SEQ ID NO: 48515 - DNA, 75 bp, synthetic construct
  source 1..75: mol_type = other DNA
aattcaaaaacatattctgcaacttaatgaatgggctaaaaaaaacatcatctcattcagtgaatactctgtgga

SEQ ID NO: 48516 - DNA, 75 bp, synthetic construct
  source 1..75: mol_type = other DNA
aggtacagatgatcgccattggcggcgcgattggcaccggcttgtttttaggtgcaggagcccgactgcaaatgg

SEQ ID NO: 48517 - DNA, 75 bp, synthetic construct
  source 1..75: mol_type = other DNA
ctgactattcgggcgcgaagtgctgattttcgtgaaacgctgaatacccgccgtgaaaagtcgtggcacaagacc

SEQ ID NO: 48518 - DNA, 75 bp, synthetic construct
  source 1..75: mol_type = other DNA
ggcttccgcttattttgcgaaggcggagttcgaccgcctctggaaaaaaatgatgccactgctggataagctgcg

SEQ ID NO: 48519 - DNA, 75 bp, synthetic construct
  source 1..75: mol_type = other DNA
gacctgatgctaccgataagcgatctgtgggccggaaggctgcaaaaaatgggctgcccgagggaaaaaattgcc

SEQ ID NO: 48520 - DNA, 75 bp, synthetic construct
  source 1..75: mol_type = other DNA
gcagggcttcgtttatgtggcgttcatcattgatgtgttcgccggatacatcgtgggatggcaggtctcatcatc

SEQ ID NO: 48521 - DNA, 75 bp, synthetic construct
  source 1..75: mol_type = other DNA
gtaaggcgcacggatttactttgcagcatgttgctgctggcgttcaggtcaatccagcgacgctgagtcgtattg

SEQ ID NO: 48522 - DNA, 75 bp, synthetic construct
  source 1..75: mol_type = other DNA
atgtaccccaaactggcaaaggcttaccccaccaataaattaccggatttacggggtgagtttattcgtggctgg

SEQ ID NO: 48523 - DNA, 75 bp, synthetic construct
  source 1..75: mol_type = other DNA
aaattctgcgtaattacagggccgtgattaatgcgcggcgtcgtgagatggggcagaaaccgctcaccaccgcgc

SEQ ID NO: 48524 - DNA, 75 bp, synthetic construct
  source 1..75: mol_type = other DNA
attaccgccgtcgctctgtatatgcattactggggtgcgtttggcggcgtgccgcagtgggtctttgcgctcgct

SEQ ID NO: 48525 - DNA, 75 bp, synthetic construct
  source 1..75: mol_type = other DNA
tttttatttcaacgattattgctcttgctgctgtttttttcttgtctgaagataaaggtccggcatgctatcagg

SEQ ID NO: 48526 - DNA, 75 bp, synthetic construct
  source 1..75: mol_type = other DNA
cagtatgtgtcactggcctataaggcgcgactaaaagaagcaaaactgctggcatcaacagggagaactggtgac

SEQ ID NO: 48527 - DNA, 75 bp, synthetic construct
  source 1..75: mol_type = other DNA
caagcaatgatgaacgtcagtcagtttctttgcagcgtgatgcgttgattgctgctggagtggatccccggcatt

SEQ ID NO: 48528 - DNA, 75 bp, synthetic construct
  source 1..75: mol_type = other DNA
catcagcgtcgatatggacgaatataaaaacatttacgttatatcccaaaaacacacaggtcttagggaggttta

SEQ ID NO: 48529 - DNA, 75 bp, synthetic construct
  source 1..75: mol_type = other DNA
cttaattactctttcgctgattcaaagctaaatcctctggttcaagtgagtgatgttgtggctggctttatgcag

SEQ ID NO: 48530 - DNA, 75 bp, synthetic construct
  source 1..75: mol_type = other DNA
aagcacgccgtttagagatgaagctgacgttgcgagaagttgctgaggctgtcgatatctctatagcaggcgtcc

SEQ ID NO: 48531 - DNA, 75 bp, synthetic construct
  source 1..75: mol_type = other DNA
cgataatgacaatgacaataagtaccgcgaaaaaatcagtcaacattagtcaatccaatgaactgacagaagcag

SEQ ID NO: 48532 - DNA, 75 bp, synthetic construct
  source 1..75: mol_type = other DNA
gcttcccgttcttctgttaccgggaaactggcaaaatttgactttacctggtttattcctgccattataaaatac

SEQ ID NO: 48533 - DNA, 75 bp, synthetic construct
  source 1..75: mol_type = other DNA
ccggtgaagctgacaacgtttttgccctgactacggtatatgccacaaaagcgcaggccatgcgcgccgctcagg

SEQ ID NO: 48534 - DNA, 75 bp, synthetic construct
  source 1..75: mol_type = other DNA
cgcgtcatagacgagcaggactggacaatcactaaggtgacacattttctgaataatagcggcttcacgacgtcc

SEQ ID NO: 48535 - DNA, 75 bp, synthetic construct
  source 1..75: mol_type = other DNA
atgtcagtagcaaagtctgaaccaaaatctacccgtaaagcaagccgtaaacctgtaaaaacgcaggaaactgtc

SEQ ID NO: 48536 - DNA, 75 bp, synthetic construct
  source 1..75: mol_type = other DNA
agaagaacaggttgatccgcgcaaagcggcagttgccgcggctattgcccgcgctcaggccaaaaaagccgccca

SEQ ID NO: 48537 - DNA, 75 bp, synthetic construct
  source 1..75: mol_type = other DNA
cagctgcggcaggttatacattacctctggaaatactcaaaagtgggcgcggatattatattggcactcagtgtt

SEQ ID NO: 48538 - DNA, 75 bp, synthetic construct
  source 1..75: mol_type = other DNA
tatccatgatgcagaatgtattcgtgaaattcacgaagctcccctgcaggctatcggcatcctggaaaaatacaa

SEQ ID NO: 48539 - DNA, 75 bp, synthetic construct
  source 1..75: mol_type = other DNA
actgattgttgaacgaacaaaagcaggactggaagctgctcgcgcacagggacgaattggcggtcgccgtcccaa

SEQ ID NO: 48540 - DNA, 75 bp, synthetic construct
  source 1..75: mol_type = other DNA
ggtggtcatgcgatgtgaagagcagatagaaaataacgcgcaccaattttttgaactgcccttcccggcttcttt

SEQ ID NO: 48541 - DNA, 75 bp, synthetic construct
  source 1..75: mol_type = other DNA
caaaattttagctaatacaattactgcattaaccactctgcagtttgccttctcaataagttacagatgccaaac

SEQ ID NO: 48542 - DNA, 75 bp, synthetic construct
  source 1..75: mol_type = other DNA
ggtaggggttatcgttaagattgatgacctggggtattggctggcggaaaaatccagcgcgctgatgcaggcatt

SEQ ID NO: 48543 - DNA, 75 bp, synthetic construct
  source 1..75: mol_type = other DNA
gtggctggattacctggacgcactggaactggtcgatacttccggtgcgccagatattgaatggcctacgcctcc

SEQ ID NO: 48544 - DNA, 75 bp, synthetic construct
  source 1..75: mol_type = other DNA
tgctcagcttctgtaccgcgtgcagtcttaacggtgtccagacccgcgagtgtggtcacacgtcacgcagtccgc

SEQ ID NO: 48545 - DNA, 75 bp, synthetic construct
  source 1..75: mol_type = other DNA
tgactgaaattgaacgcaaagcaatccgaaagttcattaacagcattgaacacatcctgcgtgacaagttgtcac

SEQ ID NO: 48546 - DNA, 75 bp, synthetic construct
  source 1..75: mol_type = other DNA
actcattgtcgagcggacacgcgccggactggaagcggccagagctaaaggtcgtattggtggcagacgtccgaa

SEQ ID NO: 48547 - DNA, 75 bp, synthetic construct
  source 1..75: mol_type = other DNA
cgtcgttatatttatcaacatgtgacactcaaggggcaaccatttagttataagggaacaggtggtgccattttt

SEQ ID NO: 48548 - DNA, 75 bp, synthetic construct
  source 1..75: mol_type = other DNA
cgacaaacagacgggggagatgcgggagcagacggaatggcaccgcgtggtgctgttcggcaagctcgcggaagt

SEQ ID NO: 48549 - DNA, 75 bp, synthetic construct
  source 1..75: mol_type = other DNA
ttacgctcgtggaaaagctgattcgaagtataacgtagataaagacagttggtcaggtggttactggcgtgatga

SEQ ID NO: 48550 - DNA, 75 bp, synthetic construct
  source 1..75: mol_type = other DNA
tgtccgctatgacgtaaccccggatatcgctctggacctcagctatcgctatcttgatgcaggtgacagcagtgt

SEQ ID NO: 48551 - DNA, 75 bp, synthetic construct
  source 1..75: mol_type = other DNA
tgcgcccggggcgcaaactggcctcactgctggtatcgcgtattaaggtgatggcgcggctggatatcgccgaaa

SEQ ID NO: 48552 - DNA, 75 bp, synthetic construct
  source 1..75: mol_type = other DNA
aggcggggacttccgttttatctctttccaaccagcgtcttatcgatggtgaaggagagtgggcggacaaatata

SEQ ID NO: 48553 - DNA, 75 bp, synthetic construct
  source 1..75: mol_type = other DNA
gggcgctttttctttcatgtgatgggtgccctggctgaaatggagcgtgaactgattgttgaacgaacaaaagct

SEQ ID NO: 48554 - DNA, 75 bp, synthetic construct
  source 1..75: mol_type = other DNA
aaccagtcgccggaaggctgtgagtcaggcaattattactacattgcggatatgcagcagaaaacggtgcagcct

SEQ ID NO: 48555 - DNA, 75 bp, synthetic construct
  source 1..75: mol_type = other DNA
actctgtctgaaggcgatacgctggtggtctggaaactggatcgactcggtcgcagcatgcggcatcttgtcgtt

SEQ ID NO: 48556 - DNA, 75 bp, synthetic construct
  source 1..75: mol_type = other DNA
ttgtatctgtttttttacaattatttgcattaataaccccccttttttttcaggtggttatggacaaagtattag

SEQ ID NO: 48557 - DNA, 75 bp, synthetic construct
  source 1..75: mol_type = other DNA
attgaagagcagagagaacaccagcgcaaacaggaggccacgctgccagaaagcgtgagcgctgaaaatcaggct

SEQ ID NO: 48558 - DNA, 75 bp, synthetic construct
  source 1..75: mol_type = other DNA
caggaaggcaaaacacctgcacaaatcggtgatttgctgggttattcgccccgccacgttcagcgaatgctgaaa

SEQ ID NO: 48559 - DNA, 75 bp, synthetic construct
  source 1..75: mol_type = other DNA
actgattgttgaacgaacaaaagctggactggaagctgctcgcgcacagggacgaattggtggacgtcgtcccaa

SEQ ID NO: 48560 - DNA, 75 bp, synthetic construct
  source 1..75: mol_type = other DNA
agagtcccgaatgtccgctgatacgccagtattgcgtctgacctgcaaggaaggttatgaactgctgtctgatga

SEQ ID NO: 48561 - DNA, 75 bp, synthetic construct
  source 1..75: mol_type = other DNA
aagcaggtgcttctgttatgtcacttgcagaccagcgtttcctgtcgggtgatggagaggaaacatcaaaatata

SEQ ID NO: 48562 - DNA, 75 bp, synthetic construct
  source 1..75: mol_type = other DNA
ttaccaactggcgcacggttggcggtaaggatcaggagatccagacctggcaacgcccggaagactctggcagcc

SEQ ID NO: 48563 - DNA, 75 bp, synthetic construct
  source 1..75: mol_type = other DNA
cgatgagtgaactgttgcaaaagctgacccgtagctgttttgccgaccgggatgcactggatgtggcgcgaacac

SEQ ID NO: 48564 - DNA, 75 bp, synthetic construct
  source 1..75: mol_type = other DNA
ctgagcaaattaaaatgtggatcgttgtttatctagtttgctttttagcactttactgtgtgttaagcgctctac

SEQ ID NO: 48565 - DNA, 75 bp, synthetic construct
  source 1..75: mol_type = other DNA
attcaaagaatatctatctttgtgaaaatgattttgactctttgataattgatctcaaaagtgagagcacaatat

SEQ ID NO: 48566 - DNA, 75 bp, synthetic construct
  source 1..75: mol_type = other DNA
gatggcattaccggataaaaagttatcagtccgccctggcggacagagggttagtgcagagcatgtcgcgcaagg

SEQ ID NO: 48567 - DNA, 75 bp, synthetic construct
  source 1..75: mol_type = other DNA
gatgtgctgaccggaagtgatgacggtcgccacagcaacacgtctctggcgtggggggctggcgtgcagtttaac

SEQ ID NO: 48568 - DNA, 75 bp, synthetic construct
  source 1..75: mol_type = other DNA
atgcgttgttacgtcaccatcttaaagttcagattcaggatgctggtcatcaggtcgatgacgcagaagatgcca

SEQ ID NO: 48569 - DNA, 75 bp, synthetic construct
  source 1..75: mol_type = other DNA
gctctatgccgaagcagaacagaccagcacgctgctgagacaacgacaacaccggatcgaggaactgaaacgtga

SEQ ID NO: 48570 - DNA, 75 bp, synthetic construct
  source 1..75: mol_type = other DNA
attaacgtgaaataccgttatgagtttacggacacactggggatggtgacgtctttcagctatgcaggagacaag

SEQ ID NO: 48571 - DNA, 75 bp, synthetic construct
  source 1..75: mol_type = other DNA
actacgccggatgctggtcagccaggataaaaccaccactgacccgatggcggttgttgactggatcaacatgtt

SEQ ID NO: 48572 - DNA, 75 bp, synthetic construct
  source 1..75: mol_type = other DNA
accaatatgcgtcaggcactccttatgggagatcattattccgtcgaaatagaaaatgcagaaataattttagat

SEQ ID NO: 48573 - DNA, 75 bp, synthetic construct
  source 1..75: mol_type = other DNA
caagaatttgatctggataacgctatttgggaaattcctgctgaaaggatgaaaatgcgtaggccacatcttgtg

SEQ ID NO: 48574 - DNA, 75 bp, synthetic construct
  source 1..75: mol_type = other DNA
cagcggcgtgatagtcgccagacaccactgaccgcgtcattaatcacgcaattccggcgagaatgcggctatctg

SEQ ID NO: 48575 - DNA, 75 bp, synthetic construct
  source 1..75: mol_type = other DNA
aaaggaacttcctgacccatagtgaaatcgaatcactccttaaagctgcaaataccgggcctcatgctgcacgta

SEQ ID NO: 48576 - DNA, 75 bp, synthetic construct
  source 1..75: mol_type = other DNA
aatataacggcgtgaccgtcacgctttctgaactgtcagccctgcagcgtattgagcatctcgcctggttgaaag

SEQ ID NO: 48577 - DNA, 75 bp, synthetic construct
  source 1..75: mol_type = other DNA
ggagcgacgaaaacgctctccggcgtgctgaacggtgttgccggtaatattgataatgtggcaacagccgcgggg

SEQ ID NO: 48578 - DNA, 75 bp, synthetic construct
  source 1..75: mol_type = other DNA
tcaatgaatgaggctgtgatgcagatcgaacaggaggtgctcaccacctggcctgctgatgccattgcccgggcg

SEQ ID NO: 48579 - DNA, 75 bp, synthetic construct
  source 1..75: mol_type = other DNA
gctaatggcattgacccggtagaagaacgtaaagctcagaaacttgctcagaaattatccactaaaaactctttt

SEQ ID NO: 48580 - DNA, 75 bp, synthetic construct
  source 1..75: mol_type = other DNA
ctgaaggtgacggaggccatttcgacaggactgaaactgtcaggggctggagttgcggaatccggttcggtgatc

SEQ ID NO: 48581 - DNA, 75 bp, synthetic construct
  source 1..75: mol_type = other DNA
atggccgttaaagcctccgggcgttttgtccctccgtcagcatttgctgcaggcaccggtaaggcgtttaccggt

SEQ ID NO: 48582 - DNA, 75 bp, synthetic construct
  source 1..75: mol_type = other DNA
atgaatgatttctttgccgcaattgagtttatgcaacgctatccgcaagcgacaggcaaagtgggtattaccgga

SEQ ID NO: 48583 - DNA, 75 bp, synthetic construct
  source 1..75: mol_type = other DNA
cagccggaaacgcacagcagacggcgcaggatgtggcggcagccgcaacggcccgtgatgatgcacaacgttttg

SEQ ID NO: 48584 - DNA, 75 bp, synthetic construct
  source 1..75: mol_type = other DNA
ctgctatccgcgatattctctctgtctcgatcgctgaaatgggcggtgttctctttggtctgtcgatcggttcga

SEQ ID NO: 48585 - DNA, 75 bp, synthetic construct
  source 1..75: mol_type = other DNA
gcattcaaggataatgatttacaggtctacggtttgcgtgtcgtcgagccacaccacgacggaacgccgcactgg

SEQ ID NO: 48586 - DNA, 75 bp, synthetic construct
  source 1..75: mol_type = other DNA
gatgttttctgccgtgcgtacgctattaacgcctgttattaatgaattaaatacagtgatggcaattcacgagaa

SEQ ID NO: 48587 - DNA, 75 bp, synthetic construct
  source 1..75: mol_type = other DNA
atgactggcctgaacatgtgagtggcaatccagtccttgataagtgggttcacaagattccttggtccggcatcg

SEQ ID NO: 48588 - DNA, 75 bp, synthetic construct
  source 1..75: mol_type = other DNA
taaccggggcggtgctgcggggtatatcgcgaaatacatctcaaaaaatatcgacggctatgcactggatggtca

SEQ ID NO: 48589 - DNA, 75 bp, synthetic construct
  source 1..75: mol_type = other DNA
gcgaactgtctatccactgcaccgagctgcgtctgctgaccaaagcactgcgtccgctgccggacaaattccacg

SEQ ID NO: 48590 - DNA, 75 bp, synthetic construct
  source 1..75: mol_type = other DNA
acgcagattacaaagatctgatcgagctgaccgaatcgctgttccgtactctggcacaggatattctcggtaaga

SEQ ID NO: 48591 - DNA, 75 bp, synthetic construct
  source 1..75: mol_type = other DNA
tggcttaccgccgacagcaggtctgggaattggtatcgaccgtatggtaatgctgttcaccaacagccataccat

SEQ ID NO: 48592 - DNA, 75 bp, synthetic construct
  source 1..75: mol_type = other DNA
gattaatgcgcggcgtcgtgaaatggggcagaaaccgctcaccaccgcgcagattgttgatgaaatctgtgattt

SEQ ID NO: 48593 - DNA, 75 bp, synthetic construct
  source 1..75: mol_type = other DNA
tggcgtgtggcagcgcattttctggtgtcgttcattgttggcgtgctgggggcggatgtgatggcgtcttacctg

SEQ ID NO: 48594 - DNA, 75 bp, synthetic construct
  source 1..75: mol_type = other DNA
gcacggctgctgcgctgggtggcgcgacggtattcgggctgtttaccggaatggatttcgggattgtgtttggcg

SEQ ID NO: 48595 - DNA, 75 bp, synthetic construct
  source 1..75: mol_type = other DNA
cgatagtcgttgtggagaacgtcgagcgcgtaatgatggaggataaactcccccccagagaagcgacggaaaaat

SEQ ID NO: 48596 - DNA, 75 bp, synthetic construct
  source 1..75: mol_type = other DNA
cgaactgggagataatctgtatatcgcccaactggacgttcgcaaccgcgccgctattgaagagatgctggcatc

SEQ ID NO: 48597 - DNA, 75 bp, synthetic construct
  source 1..75: mol_type = other DNA
aaggtggtgtttacacatcggcaaatctgagtgcttacagtaacactattgtggatacaccgacgtattttgctt

SEQ ID NO: 48598 - DNA, 75 bp, synthetic construct
  source 1..75: mol_type = other DNA
gattgctgaccgtggagcctataccggcgtaacggcaaagtggttacacaccaaagacccgaagccacaaaagca

SEQ ID NO: 48599 - DNA, 75 bp, synthetic construct
  source 1..75: mol_type = other DNA
acgactgcggcggccatccatccagtcatcggttcgtctgagaatgacgtgcaactgcgcacgcgacacccggag

SEQ ID NO: 48600 - DNA, 75 bp, synthetic construct
  source 1..75: mol_type = other DNA
ccgtgcgcagcacgatgactggctgaagaaagagatacagcgcgcatacgatgaaaatcaccaggtatacggtgt

SEQ ID NO: 48601 - DNA, 75 bp, synthetic construct
  source 1..75: mol_type = other DNA
tgtcagaagtcgcggcgaaggatgagtttctgaatatcaaaaatgtcagccgcgatgacatgatggcagcgcacc

SEQ ID NO: 48602 - DNA, 75 bp, synthetic construct
  source 1..75: mol_type = other DNA
cctgactgataaaccggtgaaagggatgttgaccggcccggtgactattctctgctggtcgttcccgcgtgaaga

SEQ ID NO: 48603 - DNA, 75 bp, synthetic construct
  source 1..75: mol_type = other DNA
tgaagtaaggcgtgcctacaatagagcattatatttggaacaaaggaaagagttaatgcagtggtggggtaactt

SEQ ID NO: 48604 - DNA, 75 bp, synthetic construct
  source 1..75: mol_type = other DNA
tatcgacggtggcgttgtcatgcttggcgtgcgtaccagcaaaatgcgaaaggccagcatgactgagcttatcga

SEQ ID NO: 48605 - DNA, 75 bp, synthetic construct
  source 1..75: mol_type = other DNA
tggcccaccgccacaccgccagcaggctggttacagtgcaacggagctacgttcaccaaagaacaatatcctgtt

SEQ ID NO: 48606 - DNA, 75 bp, synthetic construct
  source 1..75: mol_type = other DNA
gaaaagggggaaacgccgttgtccgtttcggtacgggcccgccgggatctggaagccgatgttgagttgttcatt

SEQ ID NO: 48607 - DNA, 75 bp, synthetic construct
  source 1..75: mol_type = other DNA
aactggcacaaggccggtatcgcgcaccgtattcgccacatcctcaaatcacgccagattggcgcgacgttctac

SEQ ID NO: 48608 - DNA, 75 bp, synthetic construct
  source 1..75: mol_type = other DNA
gttctcagtatgtatcgctggcctacacacagcggcttaaggaagccggattactggcatcaacaggaagtacag

SEQ ID NO: 48609 - DNA, 75 bp, synthetic construct
  source 1..75: mol_type = other DNA
cgcgatgacatgatggcagcgcaccgcgtgccgcctcagatgatgggaattatgcctagcaatgttggcgggttt

SEQ ID NO: 48610 - DNA, 75 bp, synthetic construct
  source 1..75: mol_type = other DNA
gtatgttatatcacactgaatcgtccggaagaggaacactctggtcctgaagatataccttcagtgaaggcgatt

SEQ ID NO: 48611 - DNA, 75 bp, synthetic construct
  source 1..75: mol_type = other DNA
tccaggagctgcgcaaagtggcttccggtatggctattcacaaaaaatggcgacaaacctatttttccacgccat

SEQ ID NO: 48612 - DNA, 75 bp, synthetic construct
  source 1..75: mol_type = other DNA
caaggctctggcagagcatcttgaatgggccacgtcctgctactacggttcgccgttccgggagtggctgaaagc

SEQ ID NO: 48613 - DNA, 75 bp, synthetic construct
  source 1..75: mol_type = other DNA
tttcccgggccttctgttatccgaaatccgctgaaagcccagcgactggctgaggagataaataataaacgggag

SEQ ID NO: 48614 - DNA, 75 bp, synthetic construct
  source 1..75: mol_type = other DNA
gcgtgcctccgcaaatgatgggtatcatgccgaataatgttggcgggtttggggatgtggagaaggcatccacgg

SEQ ID NO: 48615 - DNA, 75 bp, synthetic construct
  source 1..75: mol_type = other DNA
cgccagcttgccggtatgggtaataacctgaaccagatcgcccggaaagtgaataccggtggtgccggtcatgac

SEQ ID NO: 48616 - DNA, 75 bp, synthetic construct
  source 1..75: mol_type = other DNA
agcgcagaatgaccgtatgtggccgatgctgaacgatgtttcgcgtcaggtgctatggcatggtcaacggctggc

SEQ ID NO: 48617 - DNA, 75 bp, synthetic construct
  source 1..75: mol_type = other DNA
agggccatgcgtgacttctggcgcagacagattgacaaaagggccgctgagaaaatcagcgccagtcagtcagcc

SEQ ID NO: 48618 - DNA, 75 bp, synthetic construct
  source 1..75: mol_type = other DNA
gcgcaccaaccggctcggcggcgtgctctcgctggagccagcactggcgaagtacacacggcgaggcgtggacct

SEQ ID NO: 48619 - DNA, 75 bp, synthetic construct
  source 1..75: mol_type = other DNA
ccgaagaaacccctatggggcgcgtgaaaatgaaaactatcggcaaaatgctggacgagaaaatcactgtcgaag

SEQ ID NO: 48620 - DNA, 75 bp, synthetic construct
  source 1..75: mol_type = other DNA
gtatgtctgagtttgttgtgaataatgctcctgagcagacagaagacgcggggcctgcagagcctgtgtctgcgg

SEQ ID NO: 48621 - DNA, 75 bp, synthetic construct
  source 1..75: mol_type = other DNA
acgatccgattcccttaactgatgacatcgtggctgaacgcgccgcccgtctggcgaaagtggcggaagaaacct

SEQ ID NO: 48622 - DNA, 75 bp, synthetic construct
  source 1..75: mol_type = other DNA
atgcgtgatatttaccaccaaacaatagaccgcgcatttcttgcactttctcacagtgaaaacatgctggaaata

SEQ ID NO: 48623 - DNA, 75 bp, synthetic construct
  source 1..75: mol_type = other DNA
ataccatgtcgacaatattgcacgaacaagggtttgatagctcatggattgaaatgcaattggcacatgttgata

SEQ ID NO: 48624 - DNA, 75 bp, synthetic construct
  source 1..75: mol_type = other DNA
ggggatgtggagaaagcgagtatggtatttgtgaggaatgaattaattcctctacaaaggcgtttagaagagctt

SEQ ID NO: 48625 - DNA, 75 bp, synthetic construct
  source 1..75: mol_type = other DNA
ttatgggcccgtcgaccgtccggcacagtccatcacagtgataaaggttctcagtatgtatcgctggcctacaca

SEQ ID NO: 48626 - DNA, 75 bp, synthetic construct
  source 1..75: mol_type = other DNA
tttatttctgcacggcggtatgtgcgttatatctggtgagtggtggttataaggccatcagaaattatgttcgcc

SEQ ID NO: 48627 - DNA, 75 bp, synthetic construct
  source 1..75: mol_type = other DNA
tttactgaagatgccattaacaagagaaaacacgaacgggagttattaaataaaatatgcattgtttcaatgctg

SEQ ID NO: 48628 - DNA, 75 bp, synthetic construct
  source 1..75: mol_type = other DNA
agggtgtattgcgtggtgaggagtttaattcggtcaatgaaagtggtgaccggatcgtacgtgcactggctgcgg

SEQ ID NO: 48629 - DNA, 75 bp, synthetic construct
  source 1..75: mol_type = other DNA
ttgccgcaggtacgtaaaaattacccttatgaggggtttgtggagtggcatcggaaagaggtttttagggggtga

SEQ ID NO: 48630 - DNA, 75 bp, synthetic construct
  source 1..75: mol_type = other DNA
gccgtaacgtgctcagcccgtcgaagctgcgggaaaaatgggatgagctttccctgcgcttatcgccgtccgtaa

SEQ ID NO: 48631 - DNA, 75 bp, synthetic construct
  source 1..75: mol_type = other DNA
cctttcagttgatgggcggcaagccggagaacgtcgggtcgctgggcgatattgagaaagtggcaaaggtctttg

SEQ ID NO: 48632 - DNA, 75 bp, synthetic construct
  source 1..75: mol_type = other DNA
tcgcctcatcagatacaatgggtacaggcacaacgggtagcgggagtgttgctgtcggtgcaagagctaatgccg

SEQ ID NO: 48633 - DNA, 75 bp, synthetic construct
  source 1..75: mol_type = other DNA
tgttcaaccgtctgcaaaaaacgctccgggccatgccaccggatgaccgtgacaacctgcccctgctgtatcaga

SEQ ID NO: 48634 - DNA, 75 bp, synthetic construct
  source 1..75: mol_type = other DNA
tttgattctgttagtgtaaatattaaagattatttttccatagcaacttgtggtggaaactcaagtcaatgcact

SEQ ID NO: 48635 - DNA, 75 bp, synthetic construct
  source 1..75: mol_type = other DNA
aaagatattgctaatgcctacctaagtaaaaaaaaagggattgttgataatgctaataagtttaaaaaaccatcc

SEQ ID NO: 48636 - DNA, 75 bp, synthetic construct
  source 1..75: mol_type = other DNA
agtaataaactcgaacatacgctgcacaatttaccggcaggtgactgggcggcgggcgagcgcggtattgcctgt

SEQ ID NO: 48637 - DNA, 75 bp, synthetic construct
  source 1..75: mol_type = other DNA
cgctggcactcgagctcaaccctgaccatttgcgtaaatggatacgattgtgtagtaagcgtaaactgaccgccg

SEQ ID NO: 48638 - DNA, 75 bp, synthetic construct
  source 1..75: mol_type = other DNA
tgccgcctccgctggtggcccgaatgcgcagccacagttcggaatatcaccgggagcttgtcgagcgacgggagc

SEQ ID NO: 48639 - DNA, 75 bp, synthetic construct
  source 1..75: mol_type = other DNA
aactgggaatgacgttcccggaactgtacgacgacagccatccggaagccctggctcgtaatacccagaaaattt

SEQ ID NO: 48640 - DNA, 75 bp, synthetic construct
  source 1..75: mol_type = other DNA
tcaggaacagcaacagaaagctattagtgcgttcaataaggttcacgctgatgcatgggcttctggtgatccatc

SEQ ID NO: 48641 - DNA, 75 bp, synthetic construct
  source 1..75: mol_type = other DNA
gcgcagccacagttcagcctattttcgggagctggtggagacgcgggaacgactggtgagagacgctgatgattt

SEQ ID NO: 48642 - DNA, 75 bp, synthetic construct
  source 1..75: mol_type = other DNA
atgaacaggctattcgtcgctttctgcgcacggcgctggagggcgacggtatgcgcgtctttgaggccgaaacgc

SEQ ID NO: 48643 - DNA, 75 bp, synthetic construct
  source 1..75: mol_type = other DNA
ccgaatcattacctggagcagtatccccgaaagattgcctgttacctcgccagcatcagtaaactggataacttt

SEQ ID NO: 48644 - DNA, 75 bp, synthetic construct
  source 1..75: mol_type = other DNA
ctaaaacaggtgcgacaagatatctgatgagcgttcttgccagagagctggttgccagtggcgatgtatacaact

SEQ ID NO: 48645 - DNA, 75 bp, synthetic construct
  source 1..75: mol_type = other DNA
tccagaccttatttggtcattaccagacggagaaatacgtcgttacgacaggcgtcataatataatttgtagtga

SEQ ID NO: 48646 - DNA, 75 bp, synthetic construct
  source 1..75: mol_type = other DNA
gggcgcttatattgcctcgtcgattgccgataaaccggctttcgctccggcgtttctggtttgctatctggcgaa

SEQ ID NO: 48647 - DNA, 75 bp, synthetic construct
  source 1..75: mol_type = other DNA
ttgttaccggcgatcgaaaaggcgatgccgcctttgctggtggcccgtatgcgcagtcacagttctgagtattac

SEQ ID NO: 48648 - DNA, 75 bp, synthetic construct
  source 1..75: mol_type = other DNA
ccggggcgattattgatatttacagccccggcatgtacgggcatgaataccgccgcgatggcgttcctttgtcgc

SEQ ID NO: 48649 - DNA, 75 bp, synthetic construct
  source 1..75: mol_type = other DNA
ccttatcaccaggcctatgaacgtggtgtgaagattattggcgcaaccgctcactatgtgaatgacaatctggac

SEQ ID NO: 48650 - DNA, 75 bp, synthetic construct
  source 1..75: mol_type = other DNA
tggcgtcaccgccactggtccgcatctgccttcacggggatttacaacgatttggtcgccgcatcagcctgtatg

SEQ ID NO: 48651 - DNA, 75 bp, synthetic construct
  source 1..75: mol_type = other DNA
attgatactcaacgtatcgacatgatcattgttgatgaaggcattcctgcggatagtctggaaggactgagaaag

SEQ ID NO: 48652 - DNA, 75 bp, synthetic construct
  source 1..75: mol_type = other DNA
catctataaatactatagatccaaaaagctatattcaattcccataccatatttctgattggatctactttggta

SEQ ID NO: 48653 - DNA, 75 bp, synthetic construct
  source 1..75: mol_type = other DNA
attctgaacatggcgggactggagcgtgaagagttccgggtgctgtatctgaataaccagaatcagctgattgcc

SEQ ID NO: 48654 - DNA, 75 bp, synthetic construct
  source 1..75: mol_type = other DNA
cagcatgtactatcaacggtgtctcgtttgatggttctaaaaatattgagctaacggttgaaaatttaaatcttg

SEQ ID NO: 48655 - DNA, 75 bp, synthetic construct
  source 1..75: mol_type = other DNA
cctctcgccagaagcacatgaaagaaccagtgaaagcaaagtgttaatttgtgatgaagacaaatcttccagaga

SEQ ID NO: 48656 - DNA, 75 bp, synthetic construct
  source 1..75: mol_type = other DNA
cgctgattcgcggcgcggtgcgtcatcttaatagcggcggcgagctgcgaattgtagcgaacgccttcctgcctt

SEQ ID NO: 48657 - DNA, 75 bp, synthetic construct
  source 1..75: mol_type = other DNA
agatgaaggcgcattacagaaatggtggtctgttctaccgttcttcaagagacggttatggttttgaggaagact

SEQ ID NO: 48658 - DNA, 75 bp, synthetic construct
  source 1..75: mol_type = other DNA
ggtgtctgaagccgtacgttgtggtgtatttgattatctcattaagcccattgcctatgaacggctggggcaaac

SEQ ID NO: 48659 - DNA, 75 bp, synthetic construct
  source 1..75: mol_type = other DNA
attctggcaatcgatccggcggatatcctgcaactcactatcattggcattctctcgatcatcgtgctttttttc

SEQ ID NO: 48660 - DNA, 75 bp, synthetic construct
  source 1..75: mol_type = other DNA
tcggcgcgtgggtcagttactttctggacggcgcgacaggtggaatcatcgtggtggcgcagacactgctgtttc

SEQ ID NO: 48661 - DNA, 75 bp, synthetic construct
  source 1..75: mol_type = other DNA
ggtggagcaactggccagacaggtggagccggaatacacaccggcgcgaaaagctcatctttatcactgcgacca

SEQ ID NO: 48662 - DNA, 75 bp, synthetic construct
  source 1..75: mol_type = other DNA
tatctgtcaaattcagaagtgtcggtgctgcggctggatattaaccacaacaatcttgtgcgcatgttgcagcag

SEQ ID NO: 48663 - DNA, 75 bp, synthetic construct
  source 1..75: mol_type = other DNA
ctgatatgaaaaatgcagccctgggggcagcagatgtcctacggggactggccaacagcgaccggctattgttga

SEQ ID NO: 48664 - DNA, 75 bp, synthetic construct
  source 1..75: mol_type = other DNA
gtcggtatcactcagccgaccctgtctcagcagttgggtgtcatgcgtcgcctgaagctggtcgagacccgacgg

SEQ ID NO: 48665 - DNA, 75 bp, synthetic construct
  source 1..75: mol_type = other DNA
ccagtggattcaggtttcgctggtcttccagactttacagcagatgcgtgataaaacgccgctgtcattaaatac

SEQ ID NO: 48666 - DNA, 75 bp, synthetic construct
  source 1..75: mol_type = other DNA
ctgccgaaagcggttactgcacgcgttgcggtggaagcgggtattgctgactactggtacaagtatgttggcctg

SEQ ID NO: 48667 - DNA, 75 bp, synthetic construct
  source 1..75: mol_type = other DNA
gaatggcactgcattcaacgccgctcatggtacggaaaccaccagcaccatcaccaacgtgaaagctggtaccct

SEQ ID NO: 48668 - DNA, 75 bp, synthetic construct
  source 1..75: mol_type = other DNA
ctggcacctgactgtgcaataaccgtacatacccaggcagatacgtccagtcccgatccgttatttaatcctcta

SEQ ID NO: 48669 - DNA, 75 bp, synthetic construct
  source 1..75: mol_type = other DNA
acaatttaaaaaatggtagcaaaaataacgtaggggctgcgctcgctgtacttgatgaaaacaccctgcaatggg

SEQ ID NO: 48670 - DNA, 75 bp, synthetic construct
  source 1..75: mol_type = other DNA
aacgtgattccaatgccaccgggccatgcctacgggatgtttatggaacgctttcacgagttatcggagttacgc

SEQ ID NO: 48671 - DNA, 75 bp, synthetic construct
  source 1..75: mol_type = other DNA
agcgtcttttttgttgctacaactcagctatacccaaattatggtgggctgggtgggggcaccgaaaggtgcgcc

SEQ ID NO: 48672 - DNA, 75 bp, synthetic construct
  source 1..75: mol_type = other DNA
acccaaattatggtggggcgtgcagggccaacttcggttgggccgggttctatgttgaccggtatttccacccct

SEQ ID NO: 48673 - DNA, 75 bp, synthetic construct
  source 1..75: mol_type = other DNA
ttgattctgccattccgggacgttacactgttcaggcaccttataaagcgggtgccgggcgtggaaacccggaat

SEQ ID NO: 48674 - DNA, 75 bp, synthetic construct
  source 1..75: mol_type = other DNA
gaagttattcctctggctcctggccatgcctacgagatatttatggaacgttttaaagagctgcataagatacat

SEQ ID NO: 48675 - DNA, 75 bp, synthetic construct
  source 1..75: mol_type = other DNA
tgagacgtatcaggtgatgagcgcgtgcaaaccgcatgactgtggctcgcaacgtatcgctgtgatgtggtccga

SEQ ID NO: 48676 - DNA, 75 bp, synthetic construct
  source 1..75: mol_type = other DNA
cgtccgagacagttcagagcaggcgctggcgctgtgggttaaacgggaaacaggcatcagcgcgttacgctggct

SEQ ID NO: 48677 - DNA, 75 bp, synthetic construct
  source 1..75: mol_type = other DNA
cattgactgccgtgactacccgctggcactgcgtatcggggagtacgtgatccgccatggtctggcgctgccgga

SEQ ID NO: 48678 - DNA, 75 bp, synthetic construct
  source 1..75: mol_type = other DNA
atgtcaggctccgttatacacagccagtctgctgccatggtaccggcagtgtattctgccgggcagtcagcacaa

SEQ ID NO: 48679 - DNA, 75 bp, synthetic construct
  source 1..75: mol_type = other DNA
ctcaatatacatctgaatcactacgaatcgctgctggggcgtgccagcatgatactggggtatgacatcaccgca

SEQ ID NO: 48680 - DNA, 75 bp, synthetic construct
  source 1..75: mol_type = other DNA
cgggcgggagacgaaattttactataacgacgggaaccagctgacggcggtggtgtccccggacgggctggagag

SEQ ID NO: 48681 - DNA, 75 bp, synthetic construct
  source 1..75: mol_type = other DNA
agccctgggtaatgcaagtcaggcatctggcgaatccagtattgcattaggtagcaccagtgaggccagcgaaca

SEQ ID NO: 48682 - DNA, 75 bp, synthetic construct
  source 1..75: mol_type = other DNA
tatggctgctggtgccataagcagcaccagtaccgatgccatcaacggctcacagctttatacgatcagtgattc

SEQ ID NO: 48683 - DNA, 75 bp, synthetic construct
  source 1..75: mol_type = other DNA
cccgtaaacagcacaccgcttctttatcttcccctgacaccccccgccctctttcagactcagcgttccccgaca

SEQ ID NO: 48684 - DNA, 75 bp, synthetic construct
  source 1..75: mol_type = other DNA
ccggagggtaaattatggttagaacgcaagacaatcgaagaagctgaaatgaagctggtttcagaggcgaggaaa

SEQ ID NO: 48685 - DNA, 75 bp, synthetic construct
  source 1..75: mol_type = other DNA
gatatcgcggtttccctttcaaatatctgtcgctttgccggtcatctttcacacttctacagcgtcgcccaacat

SEQ ID NO: 48686 - DNA, 75 bp, synthetic construct
  source 1..75: mol_type = other DNA
gagctgtattgaagcattccataaggcagaaaccagcctcagtcacaccgcttttcgccgtaatcaatgggaggc

SEQ ID NO: 48687 - DNA, 75 bp, synthetic construct
  source 1..75: mol_type = other DNA
aaagcctggctagagcgtaaacagagagagaacgaagaaagaaaactccttagtgagttgaaatggcttaaggat

SEQ ID NO: 48688 - DNA, 75 bp, synthetic construct
  source 1..75: mol_type = other DNA
atttctgaaggggaaatcacgctgttgtggcgagcgtattcccgtttactacccgctagtcgaaataacgaactc

SEQ ID NO: 48689 - DNA, 75 bp, synthetic construct
  source 1..75: mol_type = other DNA
atgttttccagattatttgtaaaaaaacatactccagctatggtggcaggtagtctgatatttctgttcattatt

SEQ ID NO: 48690 - DNA, 75 bp, synthetic construct
  source 1..75: mol_type = other DNA
gaggtgtacacgaaggtgtttgcgctggatgtggctgcacggcaccgggtgcagttttcgatgcctgagtccgat

SEQ ID NO: 48691 - DNA, 75 bp, synthetic construct
  source 1..75: mol_type = other DNA
gttgcgaatggtgatgtatacaactctggctatgggttatttccgtctgagcaggcacgtcaagactggcaaaac

SEQ ID NO: 48692 - DNA, 75 bp, synthetic construct
  source 1..75: mol_type = other DNA
cgatgccctgaccaaaatcagggagtatcacgaaaccgaagacgaacaacgttcgagtattgatggttcgtttcg

SEQ ID NO: 48693 - DNA, 75 bp, synthetic construct
  source 1..75: mol_type = other DNA
ccgccgcctgcgtgccgctaacaagttcccggcaatcatctacggtggcaaagaagcgccgctggctatcgagct

SEQ ID NO: 48694 - DNA, 75 bp, synthetic construct
  source 1..75: mol_type = other DNA
cagcagcaaagactctaaatctgtcaaactcctcgaaacttggtgcataccagaaattatcaaaggtagcaggtc

SEQ ID NO: 48695 - DNA, 75 bp, synthetic construct
  source 1..75: mol_type = other DNA
gtggatataaactctgcatcaagtacggcaactttaagctatgtggactgcaatggatttacatggtctcatggt

SEQ ID NO: 48696 - DNA, 75 bp, synthetic construct
  source 1..75: mol_type = other DNA
ggggcataagtccatcagctcaacggaggtctacacgaaggtgtttgcactggatgtggctgcacggcaccgggt

SEQ ID NO: 48697 - DNA, 75 bp, synthetic construct
  source 1..75: mol_type = other DNA
gtattgaagttcgtcgtgatgcttatggacgttatagcctgaacgatctgcatcgcgcagcagtagcatctggtg

SEQ ID NO: 48698 - DNA, 75 bp, synthetic construct
  source 1..75: mol_type = other DNA
ttgattatcccttgttgtggctcatctgcaccggagggctggggggcgttaccggcagttttcttaacgtcgtga

SEQ ID NO: 48699 - DNA, 75 bp, synthetic construct
  source 1..75: mol_type = other DNA
atgattacgctttttcgtttactggcgattctttgcctgttttttaacgtttcggtttatgctgtaaattgctat

SEQ ID NO: 48700 - DNA, 75 bp, synthetic construct
  source 1..75: mol_type = other DNA
gctgccagtggtgatttgtatatctctggctccgggatatttctgtctgcacaagcacgcaaggactggcaaaac

SEQ ID NO: 48701 - DNA, 75 bp, synthetic construct
  source 1..75: mol_type = other DNA
atggcaaaagtttttacacaggaagagcgtgaaaaaattaaggagcaggttgttgagctggtacgccagagtggg

SEQ ID NO: 48702 - DNA, 75 bp, synthetic construct
  source 1..75: mol_type = other DNA
taacgcgacaggatggagagctgatgatcccgcagaaaatatttatgcctggattaaaatgccggctataaatag

SEQ ID NO: 48703 - DNA, 75 bp, synthetic construct
  source 1..75: mol_type = other DNA
atatcattgccgaaggcattgaaaccgaactacaggaatcagtcatgatagagaaaggaatcagctacctgcagg

SEQ ID NO: 48704 - DNA, 75 bp, synthetic construct
  source 1..75: mol_type = other DNA
tgatccggaccttatctggtcattacctgacggagaaatacgtcgctacgacagtcgtctaaacataatctgtcg

SEQ ID NO: 48705 - DNA, 75 bp, synthetic construct
  source 1..75: mol_type = other DNA
tatggcaataggattgaaagccaaagcactcggggcgggaagtacagcatttggctatgatgctgaagcaagcgg

SEQ ID NO: 48706 - DNA, 75 bp, synthetic construct
  source 1..75: mol_type = other DNA
gataccgctatgccccaccgttacccgctgaacagtttattactgagtggatatacggcaacaaaaacagtaaaa

SEQ ID NO: 48707 - DNA, 75 bp, synthetic construct
  source 1..75: mol_type = other DNA
acccgtccggtgaagtcacccccagtaaggcagaccgccttattacggaacgtctggttcaggcgctggccctgg

SEQ ID NO: 48708 - DNA, 75 bp, synthetic construct
  source 1..75: mol_type = other DNA
cggcgctggggaatgaccctaacttttcaacaacagtgcttaatgcactggcaggcaaacaaccgctggacaata

SEQ ID NO: 48709 - DNA, 75 bp, synthetic construct
  source 1..75: mol_type = other DNA
cggtatgcccgctcctatattaaccagttaccacaggcaacagagcatgaatacctgacccgaaaagggatcctt

SEQ ID NO: 48710 - DNA, 75 bp, synthetic construct
  source 1..75: mol_type = other DNA
tcagcaaatggccgcaggccacggcacatgaatacctgacccggaaaggcattcaggctgcgccgggggtgcgaa

SEQ ID NO: 48711 - DNA, 75 bp, synthetic construct
  source 1..75: mol_type = other DNA
tggttctgaaagaactgccggtcatggacgggaaaatccaccgtgtcccgaccgccggtgacaaaaaaggacaaa

SEQ ID NO: 48712 - DNA, 75 bp, synthetic construct
  source 1..75: mol_type = other DNA
tctttggatacacctgaaagacttattaaagcttttaattatcgtgactggtattgtagttacgatgttgagctt

SEQ ID NO: 48713 - DNA, 75 bp, synthetic construct
  source 1..75: mol_type = other DNA
gaaacgccggaagcaatgcaacgagagctactgcaacgcatcgacaaggtttttgatttcttccttaaccagtaa

SEQ ID NO: 48714 - DNA, 75 bp, synthetic construct
  source 1..75: mol_type = other DNA
taatctgtcgggcgccaggaccagcaatggcagtatcaccattagcaataacgccaatataacgaccaatggtgg

SEQ ID NO: 48715 - DNA, 75 bp, synthetic construct
  source 1..75: mol_type = other DNA
aatatccaattggtgttcttaatgatattgaagtacattccgcatcgaatgcaggaaatattcgcgttagtagtg

SEQ ID NO: 48716 - DNA, 75 bp, synthetic construct
  source 1..75: mol_type = other DNA
tcctgccgggagcaccattatatgacacgattgttattgttactggtgagagtgtccgcagggattatatgtcgg

SEQ ID NO: 48717 - DNA, 75 bp, synthetic construct
  source 1..75: mol_type = other DNA
caaaatggcagtgctggcagcgggcggttcgcaggaagaagcaacgcttgccgcaatgaccgccatttccgggaa

SEQ ID NO: 48718 - DNA, 75 bp, synthetic construct
  source 1..75: mol_type = other DNA
ctgaagtattgcgcctgactgacattgttacagagaaggtctcttccggcagggctgcaggcgggtatcaccacc

SEQ ID NO: 48719 - DNA, 75 bp, synthetic construct
  source 1..75: mol_type = other DNA
gtcagtacaccaccgtagtggccgacactggggacatcgcggcaatgaagctgtatcaaccgcaggatgccacaa

SEQ ID NO: 48720 - DNA, 75 bp, synthetic construct
  source 1..75: mol_type = other DNA
tctgcgtcagtagctttgaccagaatccggaacggcaactggaacaaacccaggtgagcagggtgttcaccgata

SEQ ID NO: 48721 - DNA, 75 bp, synthetic construct
  source 1..75: mol_type = other DNA
tgaacgcctgacgcggcagacactctttcgcattaactcgctgtttatggcggcgtacaacgaaattcttgagct

SEQ ID NO: 48722 - DNA, 75 bp, synthetic construct
  source 1..75: mol_type = other DNA
cgggcaaaagaggctcgtcctttccgcctcgccgttattcagctaggcacttacgacggtacgatttataacgcc

SEQ ID NO: 48723 - DNA, 75 bp, synthetic construct
  source 1..75: mol_type = other DNA
gggcggcttcaacagtgaaacagtacaggacgtcatgctgggagcggtggaacgccgcttcggcaacgagcttcc

SEQ ID NO: 48724 - DNA, 75 bp, synthetic construct
  source 1..75: mol_type = other DNA
agaaatgggtttcaaacgctgctatctggaaacgaccgcttttttaaaggaagccattgcgctttatgagcattt

SEQ ID NO: 48725 - DNA, 75 bp, synthetic construct
  source 1..75: mol_type = other DNA
tcaaatttggtactagtggcttacgcggtctatcatctgacttttctcccgatgtttgccatatgtttgtaactt

SEQ ID NO: 48726 - DNA, 75 bp, synthetic construct
  source 1..75: mol_type = other DNA
accgggaccgggaccgatagcgggattctgtttaatggctgcaacacgctgacggccagtaacattactcttacc

SEQ ID NO: 48727 - DNA, 75 bp, synthetic construct
  source 1..75: mol_type = other DNA
aaaatacttaatgttataagtactaatggagagactttatcaatcagtgagccaataacaacattaccagacttg

SEQ ID NO: 48728 - DNA, 75 bp, synthetic construct
  source 1..75: mol_type = other DNA
agcgcttgtcaccagggcactgaatgtggatatcagtgaagcagctgacaggatacatggactgacacatggtct

SEQ ID NO: 48729 - DNA, 75 bp, synthetic construct
  source 1..75: mol_type = other DNA
gctcagccagcaggctttttcgcgttttgtacaggactatctggtttttggtaacgcctacctggagaaacgcac

SEQ ID NO: 48730 - DNA, 75 bp, synthetic construct
  source 1..75: mol_type = other DNA
gaatctgccggaaatacttatcttacacataaaggtttcccggagcatatttgccatgagctgacttcaggtcat

SEQ ID NO: 48731 - DNA, 75 bp, synthetic construct
  source 1..75: mol_type = other DNA
atggatgagcttgtcccgctgaaacgcgctaagagcgcatcaggagtacgttacatctctaccaacaaaaactac

SEQ ID NO: 48732 - DNA, 75 bp, synthetic construct
  source 1..75: mol_type = other DNA
tgagttcctctctcaaaaacgccaaaccagacagcaagttgccggatgacgccatgatctggctaaataatgaag

SEQ ID NO: 48733 - DNA, 75 bp, synthetic construct
  source 1..75: mol_type = other DNA
tgaatttgcggtactgcttaccgcgatcctgatggcagggcgaacagccagtgcttttaccgctgaaattggctt

SEQ ID NO: 48734 - DNA, 75 bp, synthetic construct
  source 1..75: mol_type = other DNA
acttgctttcgccaaagttgaaacctgatggtaagttgatgacagcagatgataaaagcaaagtgtacgcttatg

SEQ ID NO: 48735 - DNA, 75 bp, synthetic construct
  source 1..75: mol_type = other DNA
cgtggcgcggcattctgctggccattcttatcaatgcctttctggtcggcctgtatgccatgggatacagaagtg

SEQ ID NO: 48736 - DNA, 75 bp, synthetic construct
  source 1..75: mol_type = other DNA
gtatgaaggagcaaaaaatcagttcatggaattatatgataaatatctgcaataccctaatgtaaataaaattgc

SEQ ID NO: 48737 - DNA, 75 bp, synthetic construct
  source 1..75: mol_type = other DNA
accagacaatctgcgtggtcgcatggccagactgattgaacggctggaacaggaaggtaacaaaatgaaaatgcc

SEQ ID NO: 48738 - DNA, 75 bp, synthetic construct
  source 1..75: mol_type = other DNA
ctttttgaactacgagtaggggataaaaacatcgcaagaacgctgtacgcctacgcgactggtaacgaaatttat

SEQ ID NO: 48739 - DNA, 75 bp, synthetic construct
  source 1..75: mol_type = other DNA
gccgtctgatcaactatctggttgaagaattcaagaaagatcagggcattgacctgcgcaacgatccgctggcaa

SEQ ID NO: 48740 - DNA, 75 bp, synthetic construct
  source 1..75: mol_type = other DNA
atttacggcctgccggaatatctgtccgccattccgtccgccttgctgaacgagtccgctacgctgttccggcgt

SEQ ID NO: 48741 - DNA, 75 bp, synthetic construct
  source 1..75: mol_type = other DNA
accggacattaaccaggagatctacggcctgcccagctatctttctgccattccgtccgccctgctcaatgagtc

SEQ ID NO: 48742 - DNA, 75 bp, synthetic construct
  source 1..75: mol_type = other DNA
gacgctggcctgtccgtatctgatatcgacgacgttatcctcgttggtggtcagactcgtatgccaatggttcag

SEQ ID NO: 48743 - DNA, 75 bp, synthetic construct
  source 1..75: mol_type = other DNA
aggcgtctttattacgcgccttcatcccgctgccgccgccgttcagcccggtacaacttattgaactgcatgttc

SEQ ID NO: 48744 - DNA, 75 bp, synthetic construct
  source 1..75: mol_type = other DNA
cgacaccggatttaaacaaaatggcgatggtaatctggatgtttatgctaataacgtccatgttatgcgctttgt

SEQ ID NO: 48745 - DNA, 75 bp, synthetic construct
  source 1..75: mol_type = other DNA
tcaccgccgccacagtactgtcagggtgcgcaggcagcagcacgcaaccggcgtcagggatgcagacgttactcc

SEQ ID NO: 48746 - DNA, 75 bp, synthetic construct
  source 1..75: mol_type = other DNA
aaatacggaagccttcttaatgagcgccatccggacctgtttgccggtgctcaggggagtatttcacgcagtgca

SEQ ID NO: 48747 - DNA, 75 bp, synthetic construct
  source 1..75: mol_type = other DNA
tgataaggtattcaaggcagggttaagacgtaagatgcgaaaagcagccatggacagaaactatctggcgtcagt

SEQ ID NO: 48748 - DNA, 75 bp, synthetic construct
  source 1..75: mol_type = other DNA
aaaacgcctccagcaactggaaccaaatgcaggcactgaagcccgcatctggctggcattgtacgctattgagtc

SEQ ID NO: 48749 - DNA, 75 bp, synthetic construct
  source 1..75: mol_type = other DNA
gaaacaaacgctgaatatctggtgcgtaagttcggtgaacttgaatcaaaactagaaacggcgttgcgggagtgt

SEQ ID NO: 48750 - DNA, 75 bp, synthetic construct
  source 1..75: mol_type = other DNA
gatgcccgcattgcgttgctggaaaaagagtccggcccggcctttcatcagacgggccacaacagcggcgtgatc

SEQ ID NO: 48751 - DNA, 75 bp, synthetic construct
  source 1..75: mol_type = other DNA
gaagagtttggcggtgaactgatcgacggcggcccgtggctgaaagttaaaaacccgaataccggcaaagagatc

SEQ ID NO: 48752 - DNA, 75 bp, synthetic construct
  source 1..75: mol_type = other DNA
taacggcgtgctcgacacgcagaacggtacgttccacccgcacagtccgtcacactggatgcgcaccctgtgcga

SEQ ID NO: 48753 - DNA, 75 bp, synthetic construct
  source 1..75: mol_type = other DNA
tgatgcagttgaaaaaattcaggcgttgttaccagcgatcgaaaaggcaatgccacctttgctggtggccagaat

SEQ ID NO: 48754 - DNA, 75 bp, synthetic construct
  source 1..75: mol_type = other DNA
aatttgggttattggatgtgcaaatgctaaagttcttaaacgatgtatattacccgctcctgatggtggcgtaga

SEQ ID NO: 48755 - DNA, 75 bp, synthetic construct
  source 1..75: mol_type = other DNA
gcgtggccttcacctccacccgtgcggcacgggaatggctgattctgaacatggcgggactggagcgtgaagagt

SEQ ID NO: 48756 - DNA, 75 bp, synthetic construct
  source 1..75: mol_type = other DNA
cgctggacaaccagactatggatagcgcctacgaaaccactcgcctgattgccgaagaagtcgacattatcgaag

SEQ ID NO: 48757 - DNA, 75 bp, synthetic construct
  source 1..75: mol_type = other DNA
caaaagtaattaccgcgcatgtgccattacttatggctgataaagtcgaccagatggccgccagactggaacgct

SEQ ID NO: 48758 - DNA, 75 bp, synthetic construct
  source 1..75: mol_type = other DNA
gacgctgatgattttgtcgcagtggcaatcgccggtttcaatcagatgaaccgtggtggcccggcaggaaatgct

SEQ ID NO: 48759 - DNA, 75 bp, synthetic construct
  source 1..75: mol_type = other DNA
ataccagatgaataatgggtatttcagtacaacactggggagacttatacggctgaatgctcttgcagcaaggct

SEQ ID NO: 48760 - DNA, 75 bp, synthetic construct
  source 1..75: mol_type = other DNA
atggcgggactggagcgggaagaattccgggtgctgtatctgaacaaccagaataagctgattgccggtgaaacc

SEQ ID NO: 48761 - DNA, 75 bp, synthetic construct
  source 1..75: mol_type = other DNA
tcgttcatgacattaactgcgctcggcggccagggtgggcaatggggcggcgctacaaataccgctggcgggcgc

SEQ ID NO: 48762 - DNA, 75 bp, synthetic construct
  source 1..75: mol_type = other DNA
accttaaaaatgtaataaaactgtcagacgatgacattggtaattatcagaaaacaattaacgacaataaagata

SEQ ID NO: 48763 - DNA, 75 bp, synthetic construct
  source 1..75: mol_type = other DNA
gaccgggagcatgtgacgatcgcgagatacgaatgattattcgtctggcgatggggaaaacaataactgctctca

SEQ ID NO: 48764 - DNA, 75 bp, synthetic construct
  source 1..75: mol_type = other DNA
aaaagggaagtttaaagaggtaaggccgcgttattctgtattgcctgatatattcacacctataaatttagggct

SEQ ID NO: 48765 - DNA, 75 bp, synthetic construct
  source 1..75: mol_type = other DNA
gggtgacggacaccacccttaaggtggtggctgccgatccgaatacggtatccggtatcaagtccgtggggacgc

SEQ ID NO: 48766 - DNA, 75 bp, synthetic construct
  source 1..75: mol_type = other DNA
gacagccgtggacagttaattgccgtgaaagacacgcagggccatgaaacgcggtatgaatacaacgccgccggt

SEQ ID NO: 48767 - DNA, 75 bp, synthetic construct
  source 1..75: mol_type = other DNA
ttactcctgaaaatctcgcattagcgttaacaggaaagtcagacctgccagtagagctaaagctgcgaaatattg

SEQ ID NO: 48768 - DNA, 75 bp, synthetic construct
  source 1..75: mol_type = other DNA
tggcgatgatccggctgtgttcagaccaatacaaaaatacatcaatggcacatggtataacgttgcacaggtata

SEQ ID NO: 48769 - DNA, 75 bp, synthetic construct
  source 1..75: mol_type = other DNA
atgaggccgggatatggaaaatcattccaccgtcagactttgcccgcgacgtggccgggttatttcagcgtctgc

SEQ ID NO: 48770 - DNA, 75 bp, synthetic construct
  source 1..75: mol_type = other DNA
aaagtcagcgattatgagctagtttcatttattgggatgcaggatgttagtgaagatgcacaattaaaaaataat

SEQ ID NO: 48771 - DNA, 75 bp, synthetic construct
  source 1..75: mol_type = other DNA
ctttcagatatcctgtttattagcctcaacgatcggcttaatgatatttcagcggttctggcaggctgcgagcgc

SEQ ID NO: 48772 - DNA, 75 bp, synthetic construct
  source 1..75: mol_type = other DNA
tcggtttatccccgctggcgcggggaacacgtgaccgtcggtgttacgctgaactgctggaacggtttatccccg

SEQ ID NO: 48773 - DNA, 75 bp, synthetic construct
  source 1..75: mol_type = other DNA
acaggccggtaacgggaatgtggccacggtggcttcagcgccggtgatccgtgttgagcagaaactggagaaggg

SEQ ID NO: 48774 - DNA, 75 bp, synthetic construct
  source 1..75: mol_type = other DNA
cgatgcggtgtccgttgacccgaaataccgggatgcgtactccacgcatatcccggcggtaattctggccgtgaa

SEQ ID NO: 48775 - DNA, 75 bp, synthetic construct
  source 1..75: mol_type = other DNA
tggaggatgcgagcacgacgaaaaaggggatagtacagctcagcagtgcgaccaacagcacttccgagtcactgg

SEQ ID NO: 48776 - DNA, 75 bp, synthetic construct
  source 1..75: mol_type = other DNA
cgcgcacggcgctcttgcaacaccgctggctcaaccgcctgcagaccgggctgttggtcctgaccctggtcggga

SEQ ID NO: 48777 - DNA, 75 bp, synthetic construct
  source 1..75: mol_type = other DNA
catcaataaaacgtcccgtgtttctcctgacagtggccgtttttatgaaccggacacagttctggatcaccgtga

SEQ ID NO: 48778 - DNA, 75 bp, synthetic construct
  source 1..75: mol_type = other DNA
gaccaggagcatgtgacgatcgcgaaatacgaatgattattcgtctggcgatggggaaaacaataactgctctca

SEQ ID NO: 48779 - DNA, 75 bp, synthetic construct
  source 1..75: mol_type = other DNA
aaggcgacagaggcagctggcagtgcgacggcggcagcacagagcaaaagtacggcggaatccgcggcaacgcgc

SEQ ID NO: 48780 - DNA, 75 bp, synthetic construct
  source 1..75: mol_type = other DNA
cgcaacctgcggcaaaaacaatgaccgccagcgccccgaaaatggaggcattcacctttggtgagccggtgccgg

SEQ ID NO: 48781 - DNA, 75 bp, synthetic construct
  source 1..75: mol_type = other DNA
tcgtctgattcgcgtaaaccagaacggtaaaattcgttactgcataccaggtgataatttaccagcagagccgaa

SEQ ID NO: 48782 - DNA, 75 bp, synthetic construct
  source 1..75: mol_type = other DNA
gataacgcgccggaagaaaaggctcgtggtatcaccatcaacacttctcacgttgaatacgacaccccgacccgt

SEQ ID NO: 48783 - DNA, 75 bp, synthetic construct
  source 1..75: mol_type = other DNA
tcagcctggttctgtcattgtagtcaccactcaaagcggcatgacgatacaaattcacaagccaaaggaggaagg

SEQ ID NO: 48784 - DNA, 75 bp, synthetic construct
  source 1..75: mol_type = other DNA
tcagagtgcgatttaaccgcgacgattgaacaacgcggaccacaaacggcggatgaactggctacgctgttcggt

SEQ ID NO: 48785 - DNA, 75 bp, synthetic construct
  source 1..75: mol_type = other DNA
cgctgtcctgacggtgtatatcggctggaaaggttttgccctggtatgcaaagggaaattcaccgttgatgaggt

SEQ ID NO: 48786 - DNA, 75 bp, synthetic construct
  source 1..75: mol_type = other DNA
gcaccattgagctttatttcaaatatggtaagaagctggctctcgtcgtacgcgagccgggctacccttcgaaaa

SEQ ID NO: 48787 - DNA, 75 bp, synthetic construct
  source 1..75: mol_type = other DNA
ggaaacgcgccggattcagcgtggttggccaccaggtcttcaccaaaaactacacatccaaatctgcgtatgtcg

SEQ ID NO: 48788 - DNA, 75 bp, synthetic construct
  source 1..75: mol_type = other DNA
ttatgaggttcggttgcgttactgtgcccttgatgagttcgatagtacaccttcaaaattcctggcgcgcatgaa

SEQ ID NO: 48789 - DNA, 75 bp, synthetic construct
  source 1..75: mol_type = other DNA
agtgaagccctgaagcttgctgaacgcatcggtgttactgccgcagcccgtgaactcagcctgtatgaatcacag

SEQ ID NO: 48790 - DNA, 75 bp, synthetic construct
  source 1..75: mol_type = other DNA
aaggtgaacggtcatcaagaaatcacatccaccagcaggacgtgtgaccatctaatgatcgaccttgaaaccatg

SEQ ID NO: 48791 - DNA, 75 bp, synthetic construct
  source 1..75: mol_type = other DNA
ttagtaagactatcgatctggaaactgctggcggagtcattgatcgggacaccattaaatggtggcttaagcaat

SEQ ID NO: 48792 - DNA, 75 bp, synthetic construct
  source 1..75: mol_type = other DNA
tatcggccacgttgaccaaggtaaaacgactctgaccgctgcaatcacaaccgtactggctaaaacctacggcgg

SEQ ID NO: 48793 - DNA, 75 bp, synthetic construct
  source 1..75: mol_type = other DNA
cgcgcggctggcgctttcggtgcgcataaccctgcctgatggttcagtgaggcccatgattttttatgctgatct

SEQ ID NO: 48794 - DNA, 75 bp, synthetic construct
  source 1..75: mol_type = other DNA
tatcggccacgttgaccaaggtaaaacaactctgaccgctgcaatcacgaccgtactggctaaaacctacggcgg

SEQ ID NO: 48795 - DNA, 75 bp, synthetic construct
  source 1..75: mol_type = other DNA
ttttaaagatgagaagccaacttatgctcgaatgacagcacatctcccgaacaaagatgagtcttacgaatgttt

SEQ ID NO: 48796 - DNA, 75 bp, synthetic construct
  source 1..75: mol_type = other DNA
gatgctgaatatatgcaggaaaaccgctgggatgaggagtctgcttcctttgtcccggttgagactgaatccgat

SEQ ID NO: 48797 - DNA, 75 bp, synthetic construct
  source 1..75: mol_type = other DNA
ggtcaggttcagaagtgggagcgcttatgcgccgcgctgcgggaaattaataagcatcgtgatgtcatacagaaa

SEQ ID NO: 48798 - DNA, 75 bp, synthetic construct
  source 1..75: mol_type = other DNA
acattgtgcagtcgttgccaccgttcgccgaaacgcaagcggatgacctggttttaccatcgctgcatatggcaa

SEQ ID NO: 48799 - DNA, 75 bp, synthetic construct
  source 1..75: mol_type = other DNA
agaactcgctgcgcgacttgatatcagccgtgaagaagtgctgaacgagctgtgggaactgaaaaagtctggctt

SEQ ID NO: 48800 - DNA, 75 bp, synthetic construct
  source 1..75: mol_type = other DNA
actgatactctctcgtcgccagtaccagaaactgatgcagtggaaacggcaattccggacaacgaaaaaaccgaa

SEQ ID NO: 48801 - DNA, 75 bp, synthetic construct
  source 1..75: mol_type = other DNA
ccacaaaacccgctgccggacgtgctgggctggaaatattcgggcaatcgccatcacccgacggaaaagcccgtt

SEQ ID NO: 48802 - DNA, 75 bp, synthetic construct
  source 1..75: mol_type = other DNA
agatcttcatgtacagaagatggtcaacattattatatatacgatacaaagtttcttacgctctaccttgagcag

SEQ ID NO: 48803 - DNA, 75 bp, synthetic construct
  source 1..75: mol_type = other DNA
aatttcgttactgcataccgggcgctgatttaccggcagagccggaagctgcatccgtagcggaaaccgatggta

SEQ ID NO: 48804 - DNA, 75 bp, synthetic construct
  source 1..75: mol_type = other DNA
cacgcatgagtatcaggtgctggtgacacgttgtaagcagacgttgcatcaagtcgagccattgcgggaagttga

SEQ ID NO: 48805 - DNA, 75 bp, synthetic construct
  source 1..75: mol_type = other DNA
ttatctgggtcagtttaatacagcagaagaagctgcaaaagcctatgatgctgcatcactggaattgcatggtaa

SEQ ID NO: 48806 - DNA, 75 bp, synthetic construct
  source 1..75: mol_type = other DNA
ggcctgaagaagttataagatacatcaatgaaaatattacagcagattttgaatctggaacattatttagaaatg

SEQ ID NO: 48807 - DNA, 75 bp, synthetic construct
  source 1..75: mol_type = other DNA
acctggcaggcagcgtctggtatttgatgagaatctgcgaccgaaacagtcacgtccagatgctgaacgttctaa

SEQ ID NO: 48808 - DNA, 75 bp, synthetic construct
  source 1..75: mol_type = other DNA
agaaggtcagcggctgcgccagagaatttctggtcgtagatgacctgttctgctcgcgtagtgactccacaaaaa

SEQ ID NO: 48809 - DNA, 75 bp, synthetic construct
  source 1..75: mol_type = other DNA
actatgacccgctggccaaccgcgtccagtgctccatcaccacactggccattgagtgcggactggcgacggagt

SEQ ID NO: 48810 - DNA, 75 bp, synthetic construct
  source 1..75: mol_type = other DNA
cgggtaatccaaaaacagttgagcaataccagctgacgaaacattttgatgtcatctggttttttacagaagacg

SEQ ID NO: 48811 - DNA, 75 bp, synthetic construct
  source 1..75: mol_type = other DNA
tttcagccaggagcgcagatgagctaaagcggaaactgaacgaaaaaattggtgaaggatggcagccttatggag

SEQ ID NO: 48812 - DNA, 75 bp, synthetic construct
  source 1..75: mol_type = other DNA
taaagttattttcttctatggagggaatatcggtcatgcgcaggatatggggaatctgatgcgtcttgctcgaaa

SEQ ID NO: 48813 - DNA, 75 bp, synthetic construct
  source 1..75: mol_type = other DNA
ctcaatctgtacgcggatttgcgcagcgtcaccggtgaagcgcggaagcagacttttgctcgcctgctggagttt

SEQ ID NO: 48814 - DNA, 75 bp, synthetic construct
  source 1..75: mol_type = other DNA
tgtcaactcaggcgcttgagttgcttgaacagatgagaggattacatgaaacgctggtattcccttcccccagaa

SEQ ID NO: 48815 - DNA, 75 bp, synthetic construct
  source 1..75: mol_type = other DNA
ttccagctatggggaccgttcctcttgatgcgattacgcctgccaatgttgcggatgttttgcgtccttcgtgga

SEQ ID NO: 48816 - DNA, 75 bp, synthetic construct
  source 1..75: mol_type = other DNA
aacctggtaccgggaagaaccacttagcggcagctatcgggaatcacctgctgaaagacggtcagacagtgattg

SEQ ID NO: 48817 - DNA, 75 bp, synthetic construct
  source 1..75: mol_type = other DNA
gcagaaattgttgcggtaatgggtaatgccagcgttgccagccgtgatttaaaaattgagcaatctccggaactg

SEQ ID NO: 48818 - DNA, 75 bp, synthetic construct
  source 1..75: mol_type = other DNA
cttgttgggggaaccgtcagcgcgctgaactcctataataatggacatatgattacagctcagaccggtgacatt

SEQ ID NO: 48819 - DNA, 75 bp, synthetic construct
  source 1..75: mol_type = other DNA
gaccagccgggattcagcgcctgtacccgctctcagttaataaacagcatcgatatcctccgggctcgccgggca

SEQ ID NO: 48820 - DNA, 75 bp, synthetic construct
  source 1..75: mol_type = other DNA
cggctcccccctgtttgcttatgattcctggcaaaaaaaatgggtactgattggcgtactttcctcaggatctga

SEQ ID NO: 48821 - DNA, 75 bp, synthetic construct
  source 1..75: mol_type = other DNA
ccgtgaaaaatcgtggcataagaccaccgtcggggaagtggtgcaggaaattgccgcgcggcacaagctgaagat

SEQ ID NO: 48822 - DNA, 75 bp, synthetic construct
  source 1..75: mol_type = other DNA
gatctggagctggacgacgccgatggaaaaatagcgctgccgcgccgtggtgcggtcattacgctggcgctgggc

SEQ ID NO: 48823 - DNA, 75 bp, synthetic construct
  source 1..75: mol_type = other DNA
gagaaaatacagagtattagtgagtagaattgacaccagtacagctccggatatcgtatggccagagctgatgaa

SEQ ID NO: 48824 - DNA, 75 bp, synthetic construct
  source 1..75: mol_type = other DNA
tgaaaaatacgcactggtacgtaccgaccagccgggattcagcgcctgtacccgctctcagttaataaacagtat

SEQ ID NO: 48825 - DNA, 75 bp, synthetic construct
  source 1..75: mol_type = other DNA
atcattttgcgattgctgaccgtggagcctataccggcgtaacggcaaagtggttacacaccaaagacccgaagc

SEQ ID NO: 48826 - DNA, 75 bp, synthetic construct
  source 1..75: mol_type = other DNA
ccactatggcaggctaaaccggtcgagccgcagcaaggggtaaaactggaaggcgcatccagcaatttcatctcg

SEQ ID NO: 48827 - DNA, 75 bp, synthetic construct
  source 1..75: mol_type = other DNA
tggatgcctaccgggcagagaacgagcgccgccaggaaatggctgatgcggcgttctccgccgcaccgctgggca

SEQ ID NO: 48828 - DNA, 75 bp, synthetic construct
  source 1..75: mol_type = other DNA
ctatcgcgattggtaccagtgcagaggctggaggtgacattagcacgaaggaaggtttgtacacaggcgagtcta

SEQ ID NO: 48829 - DNA, 75 bp, synthetic construct
  source 1..75: mol_type = other DNA
tctacttccgtactactgacgtgactggtaccatcgaactgccggaaggtgtagagatggtaatgccgggcgaca

SEQ ID NO: 48830 - DNA, 75 bp, synthetic construct
  source 1..75: mol_type = other DNA
acaggtctgatgacccgcagccactacagaacggtaaataacattacccggggtaagcatccggaggcgaaacga

SEQ ID NO: 48831 - DNA, 75 bp, synthetic construct
  source 1..75: mol_type = other DNA
gggaaagtaatgcctgcaataccattgacgggtaatgaagaagcgctggattacaccctcagaattgtgagaaac

SEQ ID NO: 48832 - DNA, 75 bp, synthetic construct
  source 1..75: mol_type = other DNA
gaagcctgggaacgctacagtgttatggtcagccgtgtggatacggcaaagcccgaatggccacaaaagcctgaa

SEQ ID NO: 48833 - DNA, 75 bp, synthetic construct
  source 1..75: mol_type = other DNA
tgcagattctttatccggcacgttttcaatctagccaaaaccagaatgggtttaaaccacaggaacaggaggtaa

SEQ ID NO: 48834 - DNA, 75 bp, synthetic construct
  source 1..75: mol_type = other DNA
cgctatatcaagtgggtttaccagcatcaatacatttgccaggcataatgtgcttaatgttgatgttcaaccatc

SEQ ID NO: 48835 - DNA, 75 bp, synthetic construct
  source 1..75: mol_type = other DNA
aacacaacgggttatctacctccgtgaaggctatgaacatgaatgcttcagcccacttgagcatttcaggcaaaa

SEQ ID NO: 48836 - DNA, 75 bp, synthetic construct
  source 1..75: mol_type = other DNA
gccttaacaggaacaacagcgatctgcatgacttgctggttgattattacgtgttgggggagacgttcatggcgc

SEQ ID NO: 48837 - DNA, 75 bp, synthetic construct
  source 1..75: mol_type = other DNA
gttaacggcatcatggtcggtgttgataccaaaattgacggtaacaacgctaagtggatcgtcggtgcggctgca

SEQ ID NO: 48838 - DNA, 75 bp, synthetic construct
  source 1..75: mol_type = other DNA
ggagacgttcatggcgctggcacggaaacatgggtgctctgacacctgtataggtaaacgccttcacaaagcgga

SEQ ID NO: 48839 - DNA, 75 bp, synthetic construct
  source 1..75: mol_type = other DNA
attcattaggtgagctgggtgagtgccggattgatagagaggccagaaacttcaaaggattggcggaagattcat

SEQ ID NO: 48840 - DNA, 75 bp, synthetic construct
  source 1..75: mol_type = other DNA
cagaaagcggaaggggttattgatggcatgttgatgatgcttgatatccgactggagatggacagatacgtagaa

SEQ ID NO: 48841 - DNA, 75 bp, synthetic construct
  source 1..75: mol_type = other DNA
ctcctacggtcgtggatacacctatttattgtcacgtgcgggcgtgaccggcgcagaaaaccgcgccgcgttacc

SEQ ID NO: 48842 - DNA, 75 bp, synthetic construct
  source 1..75: mol_type = other DNA
gtcgttgaggttcctgatattacagctaatcgtcgtgctgatgattccggtaagtggatgtttaaggacggagct

SEQ ID NO: 48843 - DNA, 75 bp, synthetic construct
  source 1..75: mol_type = other DNA
atgattatttgcgggtgcatggcccgtctgaaaaagaacaacagcgatttgcacgatttattagtagattattat

SEQ ID NO: 48844 - DNA, 75 bp, synthetic construct
  source 1..75: mol_type = other DNA
ttgctgcagaagatgctatggagtcattgcttgttcaggcgattgatgaagaaaagctggtttttatcacgttaa

SEQ ID NO: 48845 - DNA, 75 bp, synthetic construct
  source 1..75: mol_type = other DNA
ttcagcattactgtcgctttattgctggtattaattgtatttagttttattacgtcagttttgcattttttcttt

SEQ ID NO: 48846 - DNA, 75 bp, synthetic construct
  source 1..75: mol_type = other DNA
atgaaagttcttgatgtaccaacaaagccagtatctattcctgttaagaatgaggctgcaaaaccagttttcact

SEQ ID NO: 48847 - DNA, 75 bp, synthetic construct
  source 1..75: mol_type = other DNA
atctgttattcatccggcagggacagggtaaaagcgccagcggtaaaccactaccgatgatcactatcacacgta

SEQ ID NO: 48848 - DNA, 75 bp, synthetic construct
  source 1..75: mol_type = other DNA
atgatgcacctgaaaaatattaaggccgggaatccgaaaacaccggaacaataccagctaactaaaaaagcgggc

SEQ ID NO: 48849 - DNA, 75 bp, synthetic construct
  source 1..75: mol_type = other DNA
ggcgaatctgcgctggagaccattcgccgctatctttccacccagttctggaaagatcatctgaagatgtataaa

SEQ ID NO: 48850 - DNA, 75 bp, synthetic construct
  source 1..75: mol_type = other DNA
atgattttttccttaaagagctgcacagcagcgaaaaatggcccgcattcctgcaaaccgccgttgagaagaaac

SEQ ID NO: 48851 - DNA, 75 bp, synthetic construct
  source 1..75: mol_type = other DNA
gggcaaaagcgccagcggtaaaccactaccggtgatcactatcacacgtaaggacggcgacagtcaccgctttac

SEQ ID NO: 48852 - DNA, 75 bp, synthetic construct
  source 1..75: mol_type = other DNA
tatcactcaggatccgattgggctgaaagggggatggaatttttatcagtatccgttgaatccgatctcaaatat

SEQ ID NO: 48853 - DNA, 75 bp, synthetic construct
  source 1..75: mol_type = other DNA
cggaagcgctgaaccagagctggtctgtcgattttatgcatgatgccctagtctgtggccgtcgttttcgcacgt

SEQ ID NO: 48854 - DNA, 75 bp, synthetic construct
  source 1..75: mol_type = other DNA
tttgaatataatatatgaatcatataacgataatgaaaaattatttattttacacggtgatactttaataagcca

SEQ ID NO: 48855 - DNA, 75 bp, synthetic construct
  source 1..75: mol_type = other DNA
gggttacatgcaggcgttcgtccagtacgggctgcgcaacctgaaagaaggggcgaagttccgcaaagggattga

SEQ ID NO: 48856 - DNA, 75 bp, synthetic construct
  source 1..75: mol_type = other DNA
cagcgaggaaattaaccgcctgaatcatcaggtgcgggttgaaaaaatcctgaaccgtgcgggcatccagccgct

SEQ ID NO: 48857 - DNA, 75 bp, synthetic construct
  source 1..75: mol_type = other DNA
taatttcagattcttgcggaaactatctggtaaggatcgctatacctaagtatatgcgtcatctatttggtgggc

SEQ ID NO: 48858 - DNA, 75 bp, synthetic construct
  source 1..75: mol_type = other DNA
atgctgacaaacctgaactatgaggccatgaaaacattgctcggcgagaggattatggatcgcatgaccatgaac

SEQ ID NO: 48859 - DNA, 75 bp, synthetic construct
  source 1..75: mol_type = other DNA
acgtattactgatgtggcgagaaagctgaatacacgatactgggctctggcacgggtggcagggacggggctgaa

SEQ ID NO: 48860 - DNA, 75 bp, synthetic construct
  source 1..75: mol_type = other DNA
taagcctcgcagaagcacgtgagaagcgtgatatcgcccgtaagcaggttgctaatggcattgacccggtagagg

SEQ ID NO: 48861 - DNA, 75 bp, synthetic construct
  source 1..75: mol_type = other DNA
ccggatggatactgatgatatttcacgttcgaatcgaattgagcagcaattcagattcatggaggaaaataaagg

SEQ ID NO: 48862 - DNA, 75 bp, synthetic construct
  source 1..75: mol_type = other DNA
tgagcgtctacttttctgagaaaccagattatttgaaacaaagcctttctagtttgtttactcaaactatgaatg

SEQ ID NO: 48863 - DNA, 75 bp, synthetic construct
  source 1..75: mol_type = other DNA
ccgtttttcagcatatccagagcctgccccgcggacagcagaaagaggctctgcttgcgtcagccgcgctgcccc

SEQ ID NO: 48864 - DNA, 75 bp, synthetic construct
  source 1..75: mol_type = other DNA
tacaccaagaaagctgacaccacacggatgatgattccgttctttcagcagttccgggagatgggggtgaaagac

SEQ ID NO: 48865 - DNA, 75 bp, synthetic construct
  source 1..75: mol_type = other DNA
atgttttttccgggtatgtaaaaagagttaggtttattgatgatgtgctttttaaagttttgtttattattggat

SEQ ID NO: 48866 - DNA, 75 bp, synthetic construct
  source 1..75: mol_type = other DNA
actctgcttaccaggcgcatttcgcccaggggatcaccataataaaatgctgaggcctggcctttgcgtagtgca

SEQ ID NO: 48867 - DNA, 75 bp, synthetic construct
  source 1..75: mol_type = other DNA
gtacaggcactgggcctggtggatatccgggtgccggaccatctgatagtcggtggcagccaggttttctccttt

SEQ ID NO: 48868 - DNA, 75 bp, synthetic construct
  source 1..75: mol_type = other DNA
gcgtccgatcgttggcgataacccgtttgtggttgttctgcctgatatcattctcgatggcgcatccgctgaccc

SEQ ID NO: 48869 - DNA, 75 bp, synthetic construct
  source 1..75: mol_type = other DNA
ggcacaaccgtaacaatcaggatctggtcaaggaagaacgtcttcatctgaaaccgctgccgcttcgtcgcagtg

SEQ ID NO: 48870 - DNA, 75 bp, synthetic construct
  source 1..75: mol_type = other DNA
accagaaccagcatgaatcggaacggaactaccaaaaagcggaacaaaacagcccaaatgcgttacaaaacgagc

SEQ ID NO: 48871 - DNA, 75 bp, synthetic construct
  source 1..75: mol_type = other DNA
gacgccggatttaacgccgcagtttatgcaactgctactgccggaactggcgcgcgagtcggcgaaaactcccgc

SEQ ID NO: 48872 - DNA, 75 bp, synthetic construct
  source 1..75: mol_type = other DNA
gtgaaatgattgttgatattgctaaacgcttttacagcgacactgagcgaggcggggaaaacttctttaagaagg

SEQ ID NO: 48873 - DNA, 75 bp, synthetic construct
  source 1..75: mol_type = other DNA
gttgatgccatgctgatgacaggtgacagctacgactgcggtaaaaaaatgggttatatgcaggcgtttgtgaag

SEQ ID NO: 48874 - DNA, 75 bp, synthetic construct
  source 1..75: mol_type = other DNA
tgcggttttttcgtgtcatgagcatcgttacgcccaaattatggtggggcgtgcagggccaacttcggttgggcc

SEQ ID NO: 48875 - DNA, 75 bp, synthetic construct
  source 1..75: mol_type = other DNA
tcccgtttacttcagcggcgggagacgtaattaacactctgcaattacgtcgcctgaaagtaaaagatatgcgca

SEQ ID NO: 48876 - DNA, 75 bp, synthetic construct
  source 1..75: mol_type = other DNA
ctgaatgcatctggtcaaaatgctgaagtatgggcagctggtctgaaatatgatgcgaacaacatctatctggct

SEQ ID NO: 48877 - DNA, 75 bp, synthetic construct
  source 1..75: mol_type = other DNA
atccgtgtgagctggaaattgaatcattgctgagccgtgaagagccatatccagacacattcactcttgcagatc

SEQ ID NO: 48878 - DNA, 75 bp, synthetic construct
  source 1..75: mol_type = other DNA
tgctacgcccaaattatggtggggcgtacagggccgacttcggtcgggccgggttcggtagtctccggtaacgcc

SEQ ID NO: 48879 - DNA, 75 bp, synthetic construct
  source 1..75: mol_type = other DNA
gagtattcactggatgctctgatggccggtgttactaacgaaaatattcatgaggaaatttctttcggcgctcct

SEQ ID NO: 48880 - DNA, 75 bp, synthetic construct
  source 1..75: mol_type = other DNA
tacagaacacgattaccggaattgagtcatcacgggatgaaataccgttcggactcgatgaagatcaaaacaaca

SEQ ID NO: 48881 - DNA, 75 bp, synthetic construct
  source 1..75: mol_type = other DNA
cgccagctgaaaggttttaaaaaggagtttgccagcctgtcactgggcgcagcgggtgccggaaccgcagtactg

SEQ ID NO: 48882 - DNA, 75 bp, synthetic construct
  source 1..75: mol_type = other DNA
acaccgttgacctgctgtgcttccggcactacggcacaacgcagggcgtgaccgaaaaggtgctggccgccaatc

SEQ ID NO: 48883 - DNA, 75 bp, synthetic construct
  source 1..75: mol_type = other DNA
cggaagtccatccccgtgaagtgattaaacgcgccctgtatcacaatgccgctgctgtggtgctggcacacaatc

SEQ ID NO: 48884 - DNA, 75 bp, synthetic construct
  source 1..75: mol_type = other DNA
atgcttaaggctgttgaatctccgctggctagcaaactgtacgaccgtgtaggtgatgctgtttttggtgctgca

SEQ ID NO: 48885 - DNA, 75 bp, synthetic construct
  source 1..75: mol_type = other DNA
ctgattacgtatacaggttcggtcagaagaaagccgctaaggactttggtgtggcgcagagcgcgatcagtaaag

SEQ ID NO: 48886 - DNA, 75 bp, synthetic construct
  source 1..75: mol_type = other DNA
ttgttctgtgtgaacaagtaagggaagaacttggtacagatgaacccgatatctggattcctgaatttattaaac

SEQ ID NO: 48887 - DNA, 75 bp, synthetic construct
  source 1..75: mol_type = other DNA
ttataaacacaagtggcgcgagtacagctttaggttatgacgcgatagccgaaggtatgtacagctctgccatcg

SEQ ID NO: 48888 - DNA, 75 bp, synthetic construct
  source 1..75: mol_type = other DNA
agccgaaaggcatttacggcacgccgcagaaaacgacgcaggcggcgcaagagcaggataaaaccacatcggcgc

SEQ ID NO: 48889 - DNA, 75 bp, synthetic construct
  source 1..75: mol_type = other DNA
ttatgaacactagtggcgcgagtacagctttaggatatgacgcgatagccgaaggtgagtacagttctgccatcg

SEQ ID NO: 48890 - DNA, 75 bp, synthetic construct
  source 1..75: mol_type = other DNA
gaaaatgcgcaggtcacatcttgttccattgtcgactcaagcgttagatttacttaatgaactcaagataatgac

SEQ ID NO: 48891 - DNA, 75 bp, synthetic construct
  source 1..75: mol_type = other DNA
gcattcaatcacccatactggatgtgcaaatgttcatggtcatacggcaataataaaattattaccgatactggc

SEQ ID NO: 48892 - DNA, 75 bp, synthetic construct
  source 1..75: mol_type = other DNA
gcgaatggcgaaacgggtatggcggcgggagcgtgacctgacggggtggatgtcgctgtcgcgtaaaccggagga

SEQ ID NO: 48893 - DNA, 75 bp, synthetic construct
  source 1..75: mol_type = other DNA
aatggaccgcacgggatcgcaatctcccggtgccggaaagcgtaatgcgccgcctggcggatacagcaaaagtgc

SEQ ID NO: 48894 - DNA, 75 bp, synthetic construct
  source 1..75: mol_type = other DNA
ccgtaattttagaggcgcagaatgtgtggataacctacaaaggaaagctaccgggaagaattactggttctctga

SEQ ID NO: 48895 - DNA, 75 bp, synthetic construct
  source 1..75: mol_type = other DNA
ggaacctgtataattacccactgaatccgataataaggatggatcctttgggtttgtataatttatatcaattat

SEQ ID NO: 48896 - DNA, 75 bp, synthetic construct
  source 1..75: mol_type = other DNA
ctcagccggtatagtgaaggtaaccctgctataccgggtatgtacgacgtcagtgtttatgtcaacgatcaacct

SEQ ID NO: 48897 - DNA, 75 bp, synthetic construct
  source 1..75: mol_type = other DNA
tacgcagaaaaatttattgcaatttcatatcagttcaccagacaagaatagcgaaaaagccattttgcttaagcg

SEQ ID NO: 48898 - DNA, 75 bp, synthetic construct
  source 1..75: mol_type = other DNA
tgagatgaagctttccggtaatcaggatgaagctctgtaccgtgaactgctgctggggcagtgccacgccctgca

SEQ ID NO: 48899 - DNA, 75 bp, synthetic construct
  source 1..75: mol_type = other DNA
atggttaagctgaaaccgtttatggattacatcgacatgcgcctggcagagaatgtccggaatagcgaggttatc

SEQ ID NO: 48900 - DNA, 75 bp, synthetic construct
  source 1..75: mol_type = other DNA
gtgtgccactacagtgcccctggcacaggacggatgaccggtgcacgttatctgcaccaatttggacgtaatgca

SEQ ID NO: 48901 - DNA, 75 bp, synthetic construct
  source 1..75: mol_type = other DNA
caaatttcctgactccggctttcgtattgttgcgctctccagccgcccgtctaacctgcgtggccgtcagggtat

SEQ ID NO: 48902 - DNA, 75 bp, synthetic construct
  source 1..75: mol_type = other DNA
atgctaagtagtgaatattcgattctgctgattgatgatgatgctgacgtgctggacgcctacacacagttactt

SEQ ID NO: 48903 - DNA, 75 bp, synthetic construct
  source 1..75: mol_type = other DNA
gagcgagtctgcgccgcgctgcgggagctgaacaagcaccgggatattgttcgacagattgtcgattcatccggt

SEQ ID NO: 48904 - DNA, 75 bp, synthetic construct
  source 1..75: mol_type = other DNA
gacggcatcactgcgcagtgtcgggatgctgacaaacctgaatcatgccgcaatgagcacgcttcttggtgagag

SEQ ID NO: 48905 - DNA, 75 bp, synthetic construct
  source 1..75: mol_type = other DNA
cccgcaggtgtttatcgtcggtatggaagagggcatgttcccaagccagatgtcgctggatgaaggcgggcgtct

SEQ ID NO: 48906 - DNA, 75 bp, synthetic construct
  source 1..75: mol_type = other DNA
gcaggatgctgaatgagcaatatcccgcagaaaccccgctgaacctgattatctggaccccggcggatattgaag

SEQ ID NO: 48907 - DNA, 75 bp, synthetic construct
  source 1..75: mol_type = other DNA
agcatcatgccagcgatagtgaaactggcgaggcgtcagatcccttaattaaggcgaacggtcatcataatctca

SEQ ID NO: 48908 - DNA, 75 bp, synthetic construct
  source 1..75: mol_type = other DNA
tgacggaaccccgctggagatggctgtcgccagttcggttgcatgggaccggctcgctcaactggtagcgacagg

SEQ ID NO: 48909 - DNA, 75 bp, synthetic construct
  source 1..75: mol_type = other DNA
gaatgccgcgacgacacccgcaatgcggtcatcaaacacggcgcggatatgggcattgcctttgatggcgatttt

SEQ ID NO: 48910 - DNA, 75 bp, synthetic construct
  source 1..75: mol_type = other DNA
tactggcagtggagatctaatatcattaggtggtcatgcaggacttggcgttgcgtttgctaaaaagaaaggtga

SEQ ID NO: 48911 - DNA, 75 bp, synthetic construct
  source 1..75: mol_type = other DNA
agccataccgtctgccggggcagcagcatgatgaggaatcagggctgtactataaccggaaccggtactatgacc

SEQ ID NO: 48912 - DNA, 75 bp, synthetic construct
  source 1..75: mol_type = other DNA
cttctttcgggctgtatgatgccgaagtcgcccacatggcgaccgggtttagcagcctgaatcagatagcggaca

SEQ ID NO: 48913 - DNA, 75 bp, synthetic construct
  source 1..75: mol_type = other DNA
aacgatggctgggtggaaatcgacaacaacatcgctgaaaatgccctgcgggcggtcagtctgggtcgtaaaaac

SEQ ID NO: 48914 - DNA, 75 bp, synthetic construct
  source 1..75: mol_type = other DNA
gccatggctgagagtcagaatcttgcaaatgtggtgcaggaaaaagaccggaatattgcagaacttcagaaccgt

SEQ ID NO: 48915 - DNA, 75 bp, synthetic construct
  source 1..75: mol_type = other DNA
ccagcttttcagcgcgttgtgtttctgccagcaagctgctaagagaaaatcattttaaccttattatcaagaata

SEQ ID NO: 48916 - DNA, 75 bp, synthetic construct
  source 1..75: mol_type = other DNA
gagctttgccgtcaatgaaagcatccgtaaatcgcagtcaattaactttgcccctatgcaaggtgggtgtccact

SEQ ID NO: 48917 - DNA, 75 bp, synthetic construct
  source 1..75: mol_type = other DNA
acacactgatactcagtgataacggcggcagaagcctgtattttgagcacctgtttcccggtgaggacggttatc

SEQ ID NO: 48918 - DNA, 75 bp, synthetic construct
  source 1..75: mol_type = other DNA
tggttaccgtggctgatgtcatgagtgctctacacgccagctatgacgacgggcaatcaggcgaaaaatttttgc

SEQ ID NO: 48919 - DNA, 75 bp, synthetic construct
  source 1..75: mol_type = other DNA
ctttacgaaagcggtcaggtaaccgaagcggcttgtatggcacatgcccgacgcaagatccacgatgtacatgtc

SEQ ID NO: 48920 - DNA, 75 bp, synthetic construct
  source 1..75: mol_type = other DNA
atgaaaaagataagaggtttgtgtcttccggtaatactgggggcagtgttaatgtctcagcatgcacatgcagct

SEQ ID NO: 48921 - DNA, 75 bp, synthetic construct
  source 1..75: mol_type = other DNA
ccaaatggcccgacgttcaggcatattttctcgaccgtaaaaaacgccaggaaaaggagcgcaaagaaggtggtg

SEQ ID NO: 48922 - DNA, 75 bp, synthetic construct
  source 1..75: mol_type = other DNA
aacaccgagccggtggtgcgtctgaacgttgagtccagagctgatgtggcgcttatgaatgaaaaaacgaccgag

SEQ ID NO: 48923 - DNA, 75 bp, synthetic construct
  source 1..75: mol_type = other DNA
gcaaatagcggcaattattacaccattttcaataccgataccggtgcggcatttaacaatgttagcctggcgatc

SEQ ID NO: 48924 - DNA, 75 bp, synthetic construct
  source 1..75: mol_type = other DNA
aaactggaagtggatatgggtaatatcggtgcagataaactgaaaaacaacggcactaccacgccgaaagatttc

SEQ ID NO: 48925 - DNA, 75 bp, synthetic construct
  source 1..75: mol_type = other DNA
ttatggaaggttattttgacaaaaaatgatatagaattatatgagtaccatagaacaaatccatactcacttaac

SEQ ID NO: 48926 - DNA, 75 bp, synthetic construct
  source 1..75: mol_type = other DNA
aaacatttctctctatgcaaaacttggatataaaggagatatacagaatttgcgggcgggaacattttctgcaac

SEQ ID NO: 48927 - DNA, 75 bp, synthetic construct
  source 1..75: mol_type = other DNA
cgcgccactcggatacagcgaaagcgttcacctatctgctgaagcaatgggacgctctgaacgaatactgccgca

SEQ ID NO: 48928 - DNA, 75 bp, synthetic construct
  source 1..75: mol_type = other DNA
ccgcactggtgcgcaatggcgatgaagtgatttgttttgatcccagctatgacagttacgccccgccatcgcgct

SEQ ID NO: 48929 - DNA, 75 bp, synthetic construct
  source 1..75: mol_type = other DNA
gtacaactcgctaggctggcggtcaaagatgttcgtatcgatacacgaaatcaggaatctggtctgattcgatac

SEQ ID NO: 48930 - DNA, 75 bp, synthetic construct
  source 1..75: mol_type = other DNA
catgttctggatcccctcgaaaaaaacatgatcagtaaaggcttgtttgaaatggctgtggcgattcggtatggc

SEQ ID NO: 48931 - DNA, 75 bp, synthetic construct
  source 1..75: mol_type = other DNA
atcaggacggtttcgagaagcagtatgtggcttacatggagcaaaacgatcggctctatgatatcgccgtcagcg

SEQ ID NO: 48932 - DNA, 75 bp, synthetic construct
  source 1..75: mol_type = other DNA
ggtggtactgactgtccttagccgcgaaggcgacggaacagcagaaaaagacctgctggatgtggtggagaacgc

SEQ ID NO: 48933 - DNA, 75 bp, synthetic construct
  source 1..75: mol_type = other DNA
gcatattcacaactatgtaaaaaattatctttatttaaaagcatacccagtcgattaataaaaaaatcagcttac

SEQ ID NO: 48934 - DNA, 75 bp, synthetic construct
  source 1..75: mol_type = other DNA
gcacgattacgacaaaacatcatcagaaatgagaaaataccttaaaagcatcaacgagtgtatgttccttatgaa

SEQ ID NO: 48935 - DNA, 75 bp, synthetic construct
  source 1..75: mol_type = other DNA
aggagaagatgtgggttggtgactggaaatatgtaccgacaaaagaggggtgcaacgacaggccgggctatgaga

SEQ ID NO: 48936 - DNA, 75 bp, synthetic construct
  source 1..75: mol_type = other DNA
aggtaaagcgtgagaatccaccagtcgaaacaggagcatggaaagatgctgttgattgggtactcaaagaggcct

SEQ ID NO: 48937 - DNA, 75 bp, synthetic construct
  source 1..75: mol_type = other DNA
ttgaagagcttataaagtacgttatctctatgaacaatggttccgatatgctttttactaaggaaggaagcaggg

SEQ ID NO: 48938 - DNA, 75 bp, synthetic construct
  source 1..75: mol_type = other DNA
gacaagagcgattatttagaagaacagcgtaaagcttaccaggcatggtgggagagagttgaatcgatcgttact

SEQ ID NO: 48939 - DNA, 75 bp, synthetic construct
  source 1..75: mol_type = other DNA
tggttgaacagctgcgcgaagccaatgctgcgctgattgcgcaatcgtataccgactcgttaaccgggctaccga

SEQ ID NO: 48940 - DNA, 75 bp, synthetic construct
  source 1..75: mol_type = other DNA
ggaattgccagggcgaacgaagagaatgcatcgcgcgaagcggctgcggaatcggatcgccagaagtatgctgcg

SEQ ID NO: 48941 - DNA, 75 bp, synthetic construct
  source 1..75: mol_type = other DNA
agcttcagcgatgcagctcacgcaataacggactatatcgttggatattacagcgcactaagaccgcacgaatat

SEQ ID NO: 48942 - DNA, 75 bp, synthetic construct
  source 1..75: mol_type = other DNA
gaatatggctcaggcttgtatgctggcttttggtatgtgtctggtgctgctggtcattatgagtggcgcatgggc

SEQ ID NO: 48943 - DNA, 75 bp, synthetic construct
  source 1..75: mol_type = other DNA
aaatgaaattacgctggcgaaagaaaaagtagcatcgggacagttgtcagaacttcgtgattcggtaagccggat

SEQ ID NO: 48944 - DNA, 75 bp, synthetic construct
  source 1..75: mol_type = other DNA
tggagcaactgaccgcaacggtgaaacagaacgccgaaaatgcgcgccaggccagccatctggcgttaagtgctt

SEQ ID NO: 48945 - DNA, 75 bp, synthetic construct
  source 1..75: mol_type = other DNA
aaaggagatccagtttgcccgggagagtattgcagcgggccgattatccgatgtcaacggtgctgtcagaaggat

SEQ ID NO: 48946 - DNA, 75 bp, synthetic construct
  source 1..75: mol_type = other DNA
gtacttgccgttgtctggtttatgttcattggtatccgtcatgttgtgcgttcggggcatcagggacaggtattc

SEQ ID NO: 48947 - DNA, 75 bp, synthetic construct
  source 1..75: mol_type = other DNA
agtgcggtttcgatgggttacatcttctctgcttttggctgggcctacttgctgatgcaaattcccggcggctgg

SEQ ID NO: 48948 - DNA, 75 bp, synthetic construct
  source 1..75: mol_type = other DNA
agtgcggtttcgatgggttacatcttttctgcttttggctgggcctacttgctgatgcaaatccccggcggctgg

SEQ ID NO: 48949 - DNA, 75 bp, synthetic construct
  source 1..75: mol_type = other DNA
gtacatcgccagtcagacgcggctcggtcgggatattcgccgtagtgctatttttgccgcgctgcatgttgaggg

SEQ ID NO: 48950 - DNA, 75 bp, synthetic construct
  source 1..75: mol_type = other DNA
tggtgcgcaaaatgagaatgcgccaaaggcaagcgacattaacgcaacgcttggtctgatccgcgaaaacaatga

SEQ ID NO: 48951 - DNA, 75 bp, synthetic construct
  source 1..75: mol_type = other DNA
ccggaggagtatggcccagccttcccagcaatcgtcgattgttataccagtccacccacgttagtgtggccagtt

SEQ ID NO: 48952 - DNA, 75 bp, synthetic construct
  source 1..75: mol_type = other DNA
tgaaagcctatgcagcaaacggcgataacacggctcagatctccatcggtggtagcgctcaggaagttaaaattg

SEQ ID NO: 48953 - DNA, 75 bp, synthetic construct
  source 1..75: mol_type = other DNA
ctgacatatgaagcgtcagccggtctttttgagttgctgatgcgcacggctgacctcagttatcccgataacatc

SEQ ID NO: 48954 - DNA, 75 bp, synthetic construct
  source 1..75: mol_type = other DNA
ttccaattttcagtattccttatcataaagctttttcccagaatttcgtttctggtattctggatatactcattt

SEQ ID NO: 48955 - DNA, 75 bp, synthetic construct
  source 1..75: mol_type = other DNA
cctcactgctgtggctgccggtgaagacgttgttcctgcttctgaactggccgctgcaataaagcagattaatca

SEQ ID NO: 48956 - DNA, 75 bp, synthetic construct
  source 1..75: mol_type = other DNA
tgaaaaatattggtgattatacattaggaacaacagagattctctggagtggatatacaacagttagagttctcg

SEQ ID NO: 48957 - DNA, 75 bp, synthetic construct
  source 1..75: mol_type = other DNA
acctgccattcattccgtttattttctggatgacaggcatcgggaactggatagtcagcgtattaataggatgta

SEQ ID NO: 48958 - DNA, 75 bp, synthetic construct
  source 1..75: mol_type = other DNA
tatatctatgtggtgattgaacatcagagccgcgaggacattcatatggcctttcgcctgatgcgctattccatg

SEQ ID NO: 48959 - DNA, 75 bp, synthetic construct
  source 1..75: mol_type = other DNA
gattcaggaatggaatacatttcaggcaaacagagataccgcgattcactgacttctgcctccggcagtatgaaa

SEQ ID NO: 48960 - DNA, 75 bp, synthetic construct
  source 1..75: mol_type = other DNA
cagcaatagaaacataagacacgcacctaatataagagaggagcaaattaagaggatgaataacgacaacaataa

SEQ ID NO: 48961 - DNA, 75 bp, synthetic construct
  source 1..75: mol_type = other DNA
gaccagaacaataaggcaacgtcggtaatgcaggccgccagacagcgttcggtgggtatcactgaaggtgtctgg

SEQ ID NO: 48962 - DNA, 75 bp, synthetic construct
  source 1..75: mol_type = other DNA
ccaacgcggggattgaggcctggtaccgcagacaactggataatgccgtcagtgggatgcacaacagtgtacttt

SEQ ID NO: 48963 - DNA, 75 bp, synthetic construct
  source 1..75: mol_type = other DNA
actgaccatgaatttgctgcgtatccaggctttctggagccactatcgttttcgccagcaaaacgcgcgccttaa

SEQ ID NO: 48964 - DNA, 75 bp, synthetic construct
  source 1..75: mol_type = other DNA
ctgattatcaccccggcagatgattcgaccatcccgccgacaccggcagtgatggaatctgacaccgattatcgt

SEQ ID NO: 48965 - DNA, 75 bp, synthetic construct
  source 1..75: mol_type = other DNA
caaacggcaaagatgcctttacgctgacggcaacggttaaggatcaatacggcaaccttcttcctggcgctgtgg

SEQ ID NO: 48966 - DNA, 75 bp, synthetic construct
  source 1..75: mol_type = other DNA
tacgtgcagcaaactccccagaacaacacgttcaggctgtttacaaagcagaacaagatataaactctacaaaaa

SEQ ID NO: 48967 - DNA, 75 bp, synthetic construct
  source 1..75: mol_type = other DNA
caaacggcaaagatgcctttacgctgacggcgaccgttgaggataaaaacggtaaccctgttccaggcactctgg

SEQ ID NO: 48968 - DNA, 75 bp, synthetic construct
  source 1..75: mol_type = other DNA
atgcgtacacgaattgattatctggcgaataaatactcttttacagagctgaatgaatctccacgtcttcgccgg

SEQ ID NO: 48969 - DNA, 75 bp, synthetic construct
  source 1..75: mol_type = other DNA
ctgtccgtaccgggcatgacctgctccacctgcccgatcaccgtcaagaaggcgatttccaaggtcgaaggcgtc

SEQ ID NO: 48970 - DNA, 75 bp, synthetic construct
  source 1..75: mol_type = other DNA
aaattctgcgcaattacaaagccgtgattaatgcgcgacgtcgtgaaatggggcagaaaccgctcaccaccgcgc

SEQ ID NO: 48971 - DNA, 75 bp, synthetic construct
  source 1..75: mol_type = other DNA
acagagccagttatctcgtgaaatatgaaacgaagctgcataacggttccgggcaacgtaattatggttgcagtc

SEQ ID NO: 48972 - DNA, 75 bp, synthetic construct
  source 1..75: mol_type = other DNA
ctggacgggaaaacgccgggcttatctggctgttgtactcgatttgttttcccgtaaaccggttggctgggcgat

SEQ ID NO: 48973 - DNA, 75 bp, synthetic construct
  source 1..75: mol_type = other DNA
cgttgccttcgttctctatatcctcacttatgcctatatctctgctaatggtgcgatcattagtgaaacgatatc

SEQ ID NO: 48974 - DNA, 75 bp, synthetic construct
  source 1..75: mol_type = other DNA
gtagtgctctgcatcttgagccctggcagggtaatggactggttcatttttccaggcggacgcctttccgtaaac

SEQ ID NO: 48975 - DNA, 75 bp, synthetic construct
  source 1..75: mol_type = other DNA
ggatgttctgatacccggaaggattctgacaaaaaatctggtggatccgctgtgctctgggtcaagcgtggtgat

SEQ ID NO: 48976 - DNA, 75 bp, synthetic construct
  source 1..75: mol_type = other DNA
ggattggttattcagccagcagcctggccgggcagccgtataaaggccgcaacggtcgtgtggaaggtacccggg

SEQ ID NO: 48977 - DNA, 75 bp, synthetic construct
  source 1..75: mol_type = other DNA
gtttgagaagctctcccgtgccgacatggacgagcgcgtgcagtgggcattgaccaaagccgcattgtggaacga

SEQ ID NO: 48978 - DNA, 75 bp, synthetic construct
  source 1..75: mol_type = other DNA
gtacgaaatgaagccagtgacggtgaccattaccgcggtggatgccgatacggcaaagggcgaggaggcgatgaa

SEQ ID NO: 48979 - DNA, 75 bp, synthetic construct
  source 1..75: mol_type = other DNA
tccccgtcccggttagtcccgaaggtacgccagtaaaattcatcaaaaaagaggttttggcttacttctggcggg

SEQ ID NO: 48980 - DNA, 75 bp, synthetic construct
  source 1..75: mol_type = other DNA
aacagcgtctgtgtattgcgcgtggtatcgccattcgcccggaagtgctgctgctcgacgaaccgtgttcggcgc

SEQ ID NO: 48981 - DNA, 75 bp, synthetic construct
  source 1..75: mol_type = other DNA
acagctaaagctaaccaggaaatacaggagtggctcgggaaatatggtactgcgcgcgtcaaactgaatgtcgat

SEQ ID NO: 48982 - DNA, 75 bp, synthetic construct
  source 1..75: mol_type = other DNA
gctacagtaccgcacagatcagtgccgcaatgagttatatgttcggtgccaatgatggcaacagcccggatgata

SEQ ID NO: 48983 - DNA, 75 bp, synthetic construct
  source 1..75: mol_type = other DNA
aaagttataagccagcccttgccgaaggctcagggcgttcgcagacctgccgcatggtcatcatcgtcagcagtg

SEQ ID NO: 48984 - DNA, 75 bp, synthetic construct
  source 1..75: mol_type = other DNA
agttttgaaaacaagcgtgcagcgctggcagcctcccttgaggaggtcatgaccaaagccgcagaggaagggcgc

SEQ ID NO: 48985 - DNA, 75 bp, synthetic construct
  source 1..75: mol_type = other DNA
gaaccggtaatgcagtatcttctgttgaagggagttccactgcaacaacagctgctgaccaaagttattacagtg

SEQ ID NO: 48986 - DNA, 75 bp, synthetic construct
  source 1..75: mol_type = other DNA
gcggtgatgtgacctatatctggacgggtaagcgctgggcgtacctcgccgttgttctcgacctgtttgcaagaa

SEQ ID NO: 48987 - DNA, 75 bp, synthetic construct
  source 1..75: mol_type = other DNA
gaagcggtggtggcgcgtctggatacagactttgtggacccgaaaaaagccgcagtggcagatgtctccccggcg

SEQ ID NO: 48988 - DNA, 75 bp, synthetic construct
  source 1..75: mol_type = other DNA
cctggacggctgacacgtgttgtggccgcttcagcccccggaaagtccacagcgggaaacaggccgcaggggtgg

SEQ ID NO: 48989 - DNA, 75 bp, synthetic construct
  source 1..75: mol_type = other DNA
actctcgacgggttcggcgtgctctccggggagtggctgatcaccagcgcccgtcactcgtttgaccgttcatcg

SEQ ID NO: 48990 - DNA, 75 bp, synthetic construct
  source 1..75: mol_type = other DNA
gggaagggatgccggtcaggctgagtcaaaatatggtgttgccataggtaagagcgctgaggtacttaattcaca

SEQ ID NO: 48991 - DNA, 75 bp, synthetic construct
  source 1..75: mol_type = other DNA
accggatgccgccaggcagccgggagccgaagggtgtccccgcccccgggagtcagaacaacagaaacgacaaaa

SEQ ID NO: 48992 - DNA, 75 bp, synthetic construct
  source 1..75: mol_type = other DNA
ggtacctacggagtagaagtatttttctttctaagcggctttgtgatatataaagcatcaaaagctgaacccgag

SEQ ID NO: 48993 - DNA, 75 bp, synthetic construct
  source 1..75: mol_type = other DNA
ttgaacaacagaacaaccactgtttcaccggaacaacttcgtcggcaggcgcaggagatgcttcgttgtgctgaa

SEQ ID NO: 48994 - DNA, 75 bp, synthetic construct
  source 1..75: mol_type = other DNA
aggatattgcgctaacggtgaggaaactgcgtgttgagctggagacagcaaaaatcaaaactcaacgagcagcgt

SEQ ID NO: 48995 - DNA, 75 bp, synthetic construct
  source 1..75: mol_type = other DNA
aacaaggtggaacagttgttatggtaacccatgacacaaatttaattacaagtgatatgaaggttatatcctttt

SEQ ID NO: 48996 - DNA, 75 bp, synthetic construct
  source 1..75: mol_type = other DNA
taatgttgtaggtataaagtctggtcttaagaacattctgtgtaatagatttaaacagatcaaaaaatataagtc

SEQ ID NO: 48997 - DNA, 75 bp, synthetic construct
  source 1..75: mol_type = other DNA
aaggcacccgccgatcttgcttcaacattcctgcgcggatatatccgctcttatgcgcgtctggtacatattcca

SEQ ID NO: 48998 - DNA, 75 bp, synthetic construct
  source 1..75: mol_type = other DNA
tcaccactgctggtgcagcaaagctggcagcggcaaccgcgccgggagggcggaaggtcaacattaccacgatgg

SEQ ID NO: 48999 - DNA, 75 bp, synthetic construct
  source 1..75: mol_type = other DNA
cagactttgtggacccgaaaaaagcggcggtggcagatgtctccccggcgtccatcacccatgatgtgaagggca

SEQ ID NO: 49000 - DNA, 75 bp, synthetic construct
  source 1..75: mol_type = other DNA
ggatattcttgcgaaatcgaccgttgccgctgttatcgaatacctcggtttacaggaaacggtaaatcaggcttc

SEQ ID NO: 49001 - DNA, 75 bp, synthetic construct
  source 1..75: mol_type = other DNA
gtggccgaccgtgtgaccgtgcagtctgccgccatcgttgaataccagataaacgccacgctttacctttaccct

SEQ ID NO: 49002 - DNA, 75 bp, synthetic construct
  source 1..75: mol_type = other DNA
cctttgacggtgtctccgtttttctgaacggaacacattcgaggtatgtctggtcggataaggcggattactcag

SEQ ID NO: 49003 - DNA, 75 bp, synthetic construct
  source 1..75: mol_type = other DNA
gtccatccagtggctgacagataacggttcagcgtacagagcgcatgaaacacggcagttcgccagagagctgaa

SEQ ID NO: 49004 - DNA, 75 bp, synthetic construct
  source 1..75: mol_type = other DNA
ccggcctgcaccgacgccagtgattgtcgccaacgcctgcccgaaagtgagcctttgcccgatgccgggcagtga

SEQ ID NO: 49005 - DNA, 75 bp, synthetic construct
  source 1..75: mol_type = other DNA
atcagtgccgggtagtgattcaaggtagccatactaatgtcactgaagtttatattaataatataaagcaaatat

SEQ ID NO: 49006 - DNA, 75 bp, synthetic construct
  source 1..75: mol_type = other DNA
tagactgggccgcaagcacgggaggttatgacaaagcaacggtgcaggatgtcatgttaggagcaatagaaaaac

SEQ ID NO: 49007 - DNA, 75 bp, synthetic construct
  source 1..75: mol_type = other DNA
cagcgattacaccaaagaagaattgcgcctgatgcacgcggagggcgttttccgcacacaggaaatctggaggga

SEQ ID NO: 49008 - DNA, 75 bp, synthetic construct
  source 1..75: mol_type = other DNA
aataaaaaaagtggtggtgaaataacactggcgctttaccccagttcccaattgggatcaaaacaggatgtgact

SEQ ID NO: 49009 - DNA, 75 bp, synthetic construct
  source 1..75: mol_type = other DNA
gtgaatacaggggacggaaaacagtgccgcttctccatggcaggactgaaagcaaataccaacaaagttcaggag

SEQ ID NO: 49010 - DNA, 75 bp, synthetic construct
  source 1..75: mol_type = other DNA
tggtgccgaccgaaaaagcgatggtttaccgcaaattcggcttcgagaatgtgctgcgttatatcctgcgcgtga

SEQ ID NO: 49011 - DNA, 75 bp, synthetic construct
  source 1..75: mol_type = other DNA
aatggtactgacctaccgacaactacattcccttcgcaggggttcaccggggcgtattatcagttgaataatgac

SEQ ID NO: 49012 - DNA, 75 bp, synthetic construct
  source 1..75: mol_type = other DNA
gataaggcgatttcggtgacggaaaagcttctcaccaacagtcagcagcagaaaaaagccctgatgcagcaattg

SEQ ID NO: 49013 - DNA, 75 bp, synthetic construct
  source 1..75: mol_type = other DNA
tatccggattatcctcagaagtgtaaatcagcattctcctttgctgatgcagttgcatgcggcaggtatacggac

SEQ ID NO: 49014 - DNA, 75 bp, synthetic construct
  source 1..75: mol_type = other DNA
ccgggcctacggggatctacaccttattctcgcttctacagcaacaaactccactttctatttctatcttcgagc

SEQ ID NO: 49015 - DNA, 75 bp, synthetic construct
  source 1..75: mol_type = other DNA
ggtcgggcaatgctcaaagaacccgacgatttcctctcatctcttgatccggacgatgctctcttaattctatga

SEQ ID NO: 49016 - DNA, 75 bp, synthetic construct
  source 1..75: mol_type = other DNA
atgtcaaagctgatgattgtgctggtcgtgttgttatcgctggcggtggcggggctgtttctggtgaagcatgaa

SEQ ID NO: 49017 - DNA, 75 bp, synthetic construct
  source 1..75: mol_type = other DNA
tgtcaaattatggctctggtaatcaggggattaccgtgacaatgccggtagtgacacttgcccgacatcttaata

SEQ ID NO: 49018 - DNA, 75 bp, synthetic construct
  source 1..75: mol_type = other DNA
aaccagcgccggttgggaattcatcgaaggttatcgcttcattgcttcctacgggacatcttataaggcaccaaa

SEQ ID NO: 49019 - DNA, 75 bp, synthetic construct
  source 1..75: mol_type = other DNA
ccaaagttgggacgccgggctgcgctataacggcgaactgattaaatcacaactcattaccagctatagccatag

SEQ ID NO: 49020 - DNA, 75 bp, synthetic construct
  source 1..75: mol_type = other DNA
gcaatcccatcatgacctggtgtatcggcaacgtggtcggcaaaaccattccgggtaacgatgatgtggtgaagc

SEQ ID NO: 49021 - DNA, 75 bp, synthetic construct
  source 1..75: mol_type = other DNA
gaaggggggatggaatttttatcagtatccgctgaatccggttcagtatatagattcaatgggactggcatcaaa

SEQ ID NO: 49022 - DNA, 75 bp, synthetic construct
  source 1..75: mol_type = other DNA
cggggatacggtggcactgattgcggcaccgggcgtgagtggtgcgtctgtgggtggctggccgggtgtgagaac

SEQ ID NO: 49023 - DNA, 75 bp, synthetic construct
  source 1..75: mol_type = other DNA
gaagaagtatcgggtgttgctgaaccgtgttaatacaacaactgcaccggatattgaatggccaacagtacccat

SEQ ID NO: 49024 - DNA, 75 bp, synthetic construct
  source 1..75: mol_type = other DNA
gtggggatgtatagttacaatagtcatactcgccagatgaatgcagggatgtcaggaagcatagctatgcatagt

SEQ ID NO: 49025 - DNA, 75 bp, synthetic construct
  source 1..75: mol_type = other DNA
aacagcagggatagatgatttgggtgaaattttagctaagatgaaacagagaacatcgagaggaataagaaaatg

SEQ ID NO: 49026 - DNA, 75 bp, synthetic construct
  source 1..75: mol_type = other DNA
gcaggccaaagaagaaccgtccgatgaagccgtggctgatgttgaagcagaggtagcggaggatgctgacgccta

SEQ ID NO: 49027 - DNA, 75 bp, synthetic construct
  source 1..75: mol_type = other DNA
tatggtggtcttgacggagtggtgacactggtaagtccggatactttacgtgaccagaaacggccgggagattta

SEQ ID NO: 49028 - DNA, 75 bp, synthetic construct
  source 1..75: mol_type = other DNA
agtcagcaattcagtaggtgtaacggttggcggcggagttggggggcattttgcgtatacttatgtagtggatgt

SEQ ID NO: 49029 - DNA, 75 bp, synthetic construct
  source 1..75: mol_type = other DNA
agttttattgatgaagacctgcggcaatattattccgacctcttgtggtctgtgaaaacgcaggagggagtgggt

SEQ ID NO: 49030 - DNA, 75 bp, synthetic construct
  source 1..75: mol_type = other DNA
atggtgaatttgcgtaaagcggcgcggggccagatgtgccaggtcagaattcctggctactgcaatcacaatccc

SEQ ID NO: 49031 - DNA, 75 bp, synthetic construct
  source 1..75: mol_type = other DNA
atgctgactaaagaaccctcttttgcgtcacttctcataaagcaaagcccggcaatgcactacggtcacggctgg

SEQ ID NO: 49032 - DNA, 75 bp, synthetic construct
  source 1..75: mol_type = other DNA
aaaatacttgatgttataagtactaatggagagactttatcaatcagtgagccaataacaacattaccagacttg

SEQ ID NO: 49033 - DNA, 75 bp, synthetic construct
  source 1..75: mol_type = other DNA
ctcttgcaccaggcagtaatgaaaagaaaaaaatgtatctcctgacggatttgattatttcgttgctggaaaaac

SEQ ID NO: 49034 - DNA, 75 bp, synthetic construct
  source 1..75: mol_type = other DNA
gttggtctgaccgcgttacgtggtctggctggagttgctgatatttataagcaggaacagcaacagaaagcgatt

SEQ ID NO: 49035 - DNA, 75 bp, synthetic construct
  source 1..75: mol_type = other DNA
ggtattggtgctcatacgcactccgttgcgattggttcacatggacacaccatcaccgttaacgctgctggtaac

SEQ ID NO: 49036 - DNA, 75 bp, synthetic construct
  source 1..75: mol_type = other DNA
atggcctttggtgtctatccggcagtgtcccttgcacaagcgagggcactgcgtgacgacgccaagaaaaagctt

SEQ ID NO: 49037 - DNA, 75 bp, synthetic construct
  source 1..75: mol_type = other DNA
tggtgttgaactcgtttggtgtccgaattggtaaagaagatattttgtttaaaaaaggaaatgctgttctcattg

SEQ ID NO: 49038 - DNA, 75 bp, synthetic construct
  source 1..75: mol_type = other DNA
ttaatctaggagggtgttacatagatctatctgacatacaggaaaatatattatctgtgttggataactatacaa

SEQ ID NO: 49039 - DNA, 75 bp, synthetic construct
  source 1..75: mol_type = other DNA
ctatcgcggagcgtcgtcacatccagactgaaatcgatcgcagactcacccgcgccgcacacatcgcctttatca

SEQ ID NO: 49040 - DNA, 75 bp, synthetic construct
  source 1..75: mol_type = other DNA
acgacaccgcacattactgcctgctcgacacgctcggctgcggtctggaagctctcgaatacccggcctgtaaaa

SEQ ID NO: 49041 - DNA, 75 bp, synthetic construct
  source 1..75: mol_type = other DNA
atccagcaggccggtaactccgtgctggcaaaagctaaccaggtaccgcagcaggttctgtctctgctgcagggt

SEQ ID NO: 49042 - DNA, 75 bp, synthetic construct
  source 1..75: mol_type = other DNA
ggtttgcagatggcgcgtttcgcaccattattcgcaatagcgcctggttaggctccagtaatgtcgtgagcgcct

SEQ ID NO: 49043 - DNA, 75 bp, synthetic construct
  source 1..75: mol_type = other DNA
gattggttcgctgttgatggcgaaagcgcgcgtcgatatcagttttaaatttaacgtctttaaaacctgcttgtt

SEQ ID NO: 49044 - DNA, 75 bp, synthetic construct
  source 1..75: mol_type = other DNA
atgttgggtggagcggacaatccaaatggtgaattaccgtcttatatcactggcgctaacacagcagtccagcgc

SEQ ID NO: 49045 - DNA, 75 bp, synthetic construct
  source 1..75: mol_type = other DNA
atacattcaagatgatgtgtggctcggaatccgaccgcctgaaaaagtggcgagagcaggttaataaagcatgtg

SEQ ID NO: 49046 - DNA, 75 bp, synthetic construct
  source 1..75: mol_type = other DNA
gcggcgcgaagtggtcggccatggcgaccgtcattatcattggcctggggctggtgcagatgacggtgctggcgc

SEQ ID NO: 49047 - DNA, 75 bp, synthetic construct
  source 1..75: mol_type = other DNA
acgagttgaaaaaaagagctgatgatcctaatagctcaataaccggtgaaactacgataccagtagaaacttaca

SEQ ID NO: 49048 - DNA, 75 bp, synthetic construct
  source 1..75: mol_type = other DNA
aagtatatgttagtgctaatggtactttaacaacagatgcaactagcgaaggcacagtaacaaaagatccactga

SEQ ID NO: 49049 - DNA, 75 bp, synthetic construct
  source 1..75: mol_type = other DNA
ggaaaaattactgcggcagatgataatgcgacgctgtatttagataaacagggaaacttgacaaaaacgaatgca

SEQ ID NO: 49050 - DNA, 75 bp, synthetic construct
  source 1..75: mol_type = other DNA
gcggcagttgctgcggctattgcccgcgttcaggccaaaaaagccgcccagcaaaaggttgtaaacgaggactaa

SEQ ID NO: 49051 - DNA, 75 bp, synthetic construct
  source 1..75: mol_type = other DNA
cgaccatcccgccgacaccggcagtgatggagtctgacaccgattatcgtctgcgtattcagcaggcgtttgaag

SEQ ID NO: 49052 - DNA, 75 bp, synthetic construct
  source 1..75: mol_type = other DNA
atatcagccgatttggtcacggaacacaacgttccattcaaatggcattaattcaatacctggccgaaataaaaa

SEQ ID NO: 49053 - DNA, 75 bp, synthetic construct
  source 1..75: mol_type = other DNA
aaggttgaaaacaaagccgctacagcatcggatctggacttaaataacgctaaaaaagtgggtagttctttagtt

SEQ ID NO: 49054 - DNA, 75 bp, synthetic construct
  source 1..75: mol_type = other DNA
cagacaaagaatttgtttaaatacaaaggtaacagatatgttttcgttattgaactaggtggtgcctggtgctac

SEQ ID NO: 49055 - DNA, 75 bp, synthetic construct
  source 1..75: mol_type = other DNA
ctcagactgacggtacgttagctgccaagaatgaaactgagattttcctgcagaaagacggctccattactaaca

SEQ ID NO: 49056 - DNA, 75 bp, synthetic construct
  source 1..75: mol_type = other DNA
gatgctcttactcaaaacacaactactcctgcggcggcagttccagtcaccattacgaccgaagataagactgaa

SEQ ID NO: 49057 - DNA, 75 bp, synthetic construct
  source 1..75: mol_type = other DNA
gttcagcaatttatggttcagatgccattggcggagtgataaatattattacatcccgtgagaatactggcactg

SEQ ID NO: 49058 - DNA, 75 bp, synthetic construct
  source 1..75: mol_type = other DNA
ggtatcggaagaaaaagatcattatctggtggtggatggttatcatcgtcagttgctgggaagaggggccggtac

SEQ ID NO: 49059 - DNA, 75 bp, synthetic construct
  source 1..75: mol_type = other DNA
gatccttttgataacgcagtaaaagatctacaggtcaccttcagtaccaaccccgcagatactcaacttagtcag

SEQ ID NO: 49060 - DNA, 75 bp, synthetic construct
  source 1..75: mol_type = other DNA
ttgcgctggcgctcatgtcgggcaaaaacagaacggctgctgctattgaggctggttactcggaaaagtccgcca

SEQ ID NO: 49061 - DNA, 75 bp, synthetic construct
  source 1..75: mol_type = other DNA
aagccacgataccagaaaactgctgcagatgaccgtagaatggctgaatacaacaggggctgagcagcagtcaca

SEQ ID NO: 49062 - DNA, 75 bp, synthetic construct
  source 1..75: mol_type = other DNA
aaactgctgaagcagtcactggaaaaagatgggttcacacaaccagtggtggtgtcagaggagaagaatcattat

SEQ ID NO: 49063 - DNA, 75 bp, synthetic construct
  source 1..75: mol_type = other DNA
tggaccaggatgaagtactgagactgaaacagattagcgggctgacggaattgtttcaggaagaggacttcagcc

SEQ ID NO: 49064 - DNA, 75 bp, synthetic construct
  source 1..75: mol_type = other DNA
ctgaaggttatgcaggatctggctgaagaagggatgacgatggtgatcgtgacccacgaaatcggttttgccgag

SEQ ID NO: 49065 - DNA, 75 bp, synthetic construct
  source 1..75: mol_type = other DNA
gactatgctcacgtctaagaagctcacagcgttctttgagtggcttctctatggtgatctatacctacactactt

SEQ ID NO: 49066 - DNA, 75 bp, synthetic construct
  source 1..75: mol_type = other DNA
agccaccagcccggtggtagcgcaactgcagcaaccctttcgcacaatggtagtccgggaacaggcccgtgatga

SEQ ID NO: 49067 - DNA, 75 bp, synthetic construct
  source 1..75: mol_type = other DNA
agcggaacgaaaaaaacaggcactcataaatcgagttaatgaatatattaacagtaagcagtggccaggaaaggc

SEQ ID NO: 49068 - DNA, 75 bp, synthetic construct
  source 1..75: mol_type = other DNA
ttctcgctggcgtcggtggcaccgaacttacgctttggtgcctggctgacggcggacagcatcatcaactatctc

SEQ ID NO: 49069 - DNA, 75 bp, synthetic construct
  source 1..75: mol_type = other DNA
gttgatgaggatatatttattaagtacctgtccccacctccagggaaggtgagagttgcgggtgatgatggctat

SEQ ID NO: 49070 - DNA, 75 bp, synthetic construct
  source 1..75: mol_type = other DNA
atctgtataccggacatgaccacaggggatatttccgtcagggcgttttcgaactgcacggctgtcgcgtcgtgt

SEQ ID NO: 49071 - DNA, 75 bp, synthetic construct
  source 1..75: mol_type = other DNA
aacgattatgcccgttcagcgctttttacagtcaaaaacaaacgccagccgcgagaagcactgcagaagaaagaa

SEQ ID NO: 49072 - DNA, 75 bp, synthetic construct
  source 1..75: mol_type = other DNA
cagcgtgaacgctgggctgacctccagaatgcctatcttgaacgctatcagcatgctgaccgtgtcgatgcccgc

SEQ ID NO: 49073 - DNA, 75 bp, synthetic construct
  source 1..75: mol_type = other DNA
tatggagcgaaaaggtgctgttgccagagacagtggttttcttgcccgttgccttatcagtaaacctgcaagcac

SEQ ID NO: 49074 - DNA, 75 bp, synthetic construct
  source 1..75: mol_type = other DNA
atgaacttaatgaaagcggattggtttataacgccttcgtcaatggttcattagttggttgccaacggtccaatc

SEQ ID NO: 49075 - DNA, 75 bp, synthetic construct
  source 1..75: mol_type = other DNA
agcgtacgccggaggtgcatcttggtcccgttcgtgttgctgttatgaacgctgatcaggtttgtgcaattctgg

SEQ ID NO: 49076 - DNA, 75 bp, synthetic construct
  source 1..75: mol_type = other DNA
attgcagcagaagcgaacagccgtcttgccaggcaacaaatggaacaaatgctcactctgcaggagaaaattatt

SEQ ID NO: 49077 - DNA, 75 bp, synthetic construct
  source 1..75: mol_type = other DNA
aggtttctttgtcaacagcgataaaagtgagggtggttgggaacatacctacgaaatagagggttcccaaaagaa

SEQ ID NO: 49078 - DNA, 75 bp, synthetic construct
  source 1..75: mol_type = other DNA
atgaggagcgtaattacataccttcggtacagttcagccatacaaggcgctgaaggtgcagattcaaccagacga

SEQ ID NO: 49079 - DNA, 75 bp, synthetic construct
  source 1..75: mol_type = other DNA
atgaggaagctaaatggctctctgcatctaatgagggtgatgcttcggctaaaatcatggcagagaagtccctaa

SEQ ID NO: 49080 - DNA, 75 bp, synthetic construct
  source 1..75: mol_type = other DNA
gcggttggtggatacgtgaagtgggcttgtttgatgagtccggggcgttgattgccgtgggcaactgcccggaaa

SEQ ID NO: 49081 - DNA, 75 bp, synthetic construct
  source 1..75: mol_type = other DNA
tacgaaccatctaatgtcattatgctgaccggacgtgcatcggttgtgaaacgtttgactgcggtgattcaaaga

SEQ ID NO: 49082 - DNA, 75 bp, synthetic construct
  source 1..75: mol_type = other DNA
ttttcgtcgttcggaagagtgcctgcaccttatccctaccagtgaaggtcagggcgagaatggcgatattggtcc

SEQ ID NO: 49083 - DNA, 75 bp, synthetic construct
  source 1..75: mol_type = other DNA
catcgccagagttgtatcctgtatcagtcctgcaaaatttcacgagtgctttattaactggatgcgagattgcca

SEQ ID NO: 49084 - DNA, 75 bp, synthetic construct
  source 1..75: mol_type = other DNA
taattccttcaaaagtaaaatctcgcccgcaatgttgtgacgatgacgcgatgatcatttgcgggtgcatggccc

SEQ ID NO: 49085 - DNA, 75 bp, synthetic construct
  source 1..75: mol_type = other DNA
tggaatcactgaaaaagggccctgtgaccatcagtggtccggcgtttaatgaagcaattgaacgctggaaaactc

SEQ ID NO: 49086 - DNA, 75 bp, synthetic construct
  source 1..75: mol_type = other DNA
gtgcggcaggttgtggctgtatcagcccccggcgacagggactcatacgggtgtgtggcaccggcaggcatgagc

SEQ ID NO: 49087 - DNA, 75 bp, synthetic construct
  source 1..75: mol_type = other DNA
gtaaagatctgtcatgcaaaacctccgggctatcaactactgatgcggctcttgcaactggtgctacaattggcg

SEQ ID NO: 49088 - DNA, 75 bp, synthetic construct
  source 1..75: mol_type = other DNA
ttcagtgacggtgtccgtacccagctggcgaacggccaggcactgaaagaggctcagtgcacctgcggggccagc

SEQ ID NO: 49089 - DNA, 75 bp, synthetic construct
  source 1..75: mol_type = other DNA
agcaaacgcaaggctgaatttgataagctggtttcgggggcatcgctttataacggagtcaggagcgaagtggga

SEQ ID NO: 49090 - DNA, 75 bp, synthetic construct
  source 1..75: mol_type = other DNA
ctttcgtatgttcctttgttgcagcccaaccaactattgtcccacaattacagcaacaagttacggatcttacga

SEQ ID NO: 49091 - DNA, 75 bp, synthetic construct
  source 1..75: mol_type = other DNA
taatttttgtctgggcaatcgggaaaataattgagccagttactgaattgtataccgacgttgtatgggcgtcgt

SEQ ID NO: 49092 - DNA, 75 bp, synthetic construct
  source 1..75: mol_type = other DNA
ggagtgacccagaggtcgtcagagtgtttagaaacacattaaagcattatttgccaatgtttactcggcaagaga

SEQ ID NO: 49093 - DNA, 75 bp, synthetic construct
  source 1..75: mol_type = other DNA
ctggttgatgacggtgttattgaatggaatgaaccggaggtcgtgagggcgctcaggggcgcattaaaatacgac

SEQ ID NO: 49094 - DNA, 75 bp, synthetic construct
  source 1..75: mol_type = other DNA
aatccaagcttcatagcaaaccaaatgggccatgcaaatgcacaaatggtattcaacgtttacggagcatggatg

SEQ ID NO: 49095 - DNA, 75 bp, synthetic construct
  source 1..75: mol_type = other DNA
gacaattgcaggaatgtttcaatttgctgctgataacggctatatcgggtcaaacccatttaacgggctgacacc

SEQ ID NO: 49096 - DNA, 75 bp, synthetic construct
  source 1..75: mol_type = other DNA
cgatcgccagggagccaacgcagagtttcagctggttgacgaacgcattacggggataaagccggcagcactaag

SEQ ID NO: 49097 - DNA, 75 bp, synthetic construct
  source 1..75: mol_type = other DNA
ctcagttacaagaaggcgataacacgctgaaatattctacttgggttaaaaaatccagcgctgcaactgcagaag

SEQ ID NO: 49098 - DNA, 75 bp, synthetic construct
  source 1..75: mol_type = other DNA
gctataagccgcaactggctgaaggcagcgggcgcacccagaccgtgcgcatggtgctgattaccagcagtacgg

SEQ ID NO: 49099 - DNA, 75 bp, synthetic construct
  source 1..75: mol_type = other DNA
tggcggtgtcgaacgaggatatcgcccgtcgcttcgtagccgagtgccgacgcacccgcactgtccttcccgcga

SEQ ID NO: 49100 - DNA, 75 bp, synthetic construct
  source 1..75: mol_type = other DNA
catatgatgcttttttgtaatccacgccagcgtaaccagattatcgaaatcatgcgtcgctatgcgctcaaagag

SEQ ID NO: 49101 - DNA, 75 bp, synthetic construct
  source 1..75: mol_type = other DNA
ttttaatggcgctactgttaatggtcataaggatgaattgggcactgcgggtgatactggtacagctgttgttat

SEQ ID NO: 49102 - DNA, 75 bp, synthetic construct
  source 1..75: mol_type = other DNA
ttttactgaataatggtggatcctcaacgcccaagaattttgatataaaacttaccgattgtgatgttactaact

SEQ ID NO: 49103 - DNA, 75 bp, synthetic construct
  source 1..75: mol_type = other DNA
tcgccagcaatgagcatcatgcacgtctttcactggtccatgagtatgtgctttgccttgctgctcgcctgcctg

SEQ ID NO: 49104 - DNA, 75 bp, synthetic construct
  source 1..75: mol_type = other DNA
cgatcgtaaattacaacgggaaaaaatttacgtatccggtcgctgatgagtggagttggttttattgttattcag

SEQ ID NO: 49105 - DNA, 75 bp, synthetic construct
  source 1..75: mol_type = other DNA
gatcctaagacatttttagagtttttggtaaaaatatttacctgggttatgtggattttagcaaccgctccaacg

SEQ ID NO: 49106 - DNA, 75 bp, synthetic construct
  source 1..75: mol_type = other DNA
gatctggcgggagtatttgctgcctcggaagcgacaatccgtgccgatttgcgctttctcgaacaaaaaggcgtg

SEQ ID NO: 49107 - DNA, 75 bp, synthetic construct
  source 1..75: mol_type = other DNA
atcgggtgttgctgaaccgtgttaatacaacaactgcaccggatattgaatggccaacagtacccattatcgaat

SEQ ID NO: 49108 - DNA, 75 bp, synthetic construct
  source 1..75: mol_type = other DNA
ttgcgtgaacttaaccagtcgctgcaaaaggaactggcgcgcaatcagcatctggctgaacgtttgttagaaact

SEQ ID NO: 49109 - DNA, 75 bp, synthetic construct
  source 1..75: mol_type = other DNA
atgactaaaaatactcgtttttcccccgaagtccgtcagagggcgattcgtatggttctggaaagtcagagcgaa

SEQ ID NO: 49110 - DNA, 75 bp, synthetic construct
  source 1..75: mol_type = other DNA
gaatgaataagtccgaacgtcgtgatctaatgaaagcgcaagaagatttcaaacaatatcttgccagaatggagc

SEQ ID NO: 49111 - DNA, 75 bp, synthetic construct
  source 1..75: mol_type = other DNA
tcttgagtcggcaaggggcgggtcggtacaaactaaacaaagcatcccttgaaaaaatgcctttgttgctccctc

SEQ ID NO: 49112 - DNA, 75 bp, synthetic construct
  source 1..75: mol_type = other DNA
agcagtttgcccgaaaaagggctgaatactgccaccggcgctgccggggaagggggtaacgaaaaagcggtgatg

SEQ ID NO: 49113 - DNA, 75 bp, synthetic construct
  source 1..75: mol_type = other DNA
ggtttacgcagtgaacctgtaaatgactggttatccctgcatcgtcgtcttgcggaagatggtctgtacctgtct

SEQ ID NO: 49114 - DNA, 75 bp, synthetic construct
  source 1..75: mol_type = other DNA
tcaacaagatagacctgctggacgacgaaggcatggcgttcgtcaacgagcagatggatatctaccgcaatatcg

SEQ ID NO: 49115 - DNA, 75 bp, synthetic construct
  source 1..75: mol_type = other DNA
catatcaccgaagccacgacaccatggtgtgcgcttagcggtaagtctccacttgaagcgatagattttccggtt

SEQ ID NO: 49116 - DNA, 75 bp, synthetic construct
  source 1..75: mol_type = other DNA
ggcagaagccgggcatctggaagcgcagtatcagcaggaaaagcggcttgcgcagcagattatggcgttgcgtca

SEQ ID NO: 49117 - DNA, 75 bp, synthetic construct
  source 1..75: mol_type = other DNA
aagaccgcgcgccggtggcgctgaaaggggccgcgctcacgcgccgcccctttcattacgcggacgttctgctgt

SEQ ID NO: 49118 - DNA, 75 bp, synthetic construct
  source 1..75: mol_type = other DNA
agcattaccaaagccggaaacagctatgccagaaagctattggtcgaggcagcgtggagttaccgtcatccggca

SEQ ID NO: 49119 - DNA, 75 bp, synthetic construct
  source 1..75: mol_type = other DNA
tgtgctgtgtaccgatatctcgcgcgacggcacgctggcaggctctaacgtctctttatatgaagaagtgtgcgc

SEQ ID NO: 49120 - DNA, 75 bp, synthetic construct
  source 1..75: mol_type = other DNA
gacctgccggacgagccgacaggcaacgccgccccttcatggctgactgacccgacgccagagattaacgggcag

SEQ ID NO: 49121 - DNA, 75 bp, synthetic construct
  source 1..75: mol_type = other DNA
tcactaccatcgttcactgaaacgcgagccaatgacctgattataccatcgctgcaaatggcaaaccgcgaactg

SEQ ID NO: 49122 - DNA, 75 bp, synthetic construct
  source 1..75: mol_type = other DNA
taaaagctgagtttgcgaaatatcacaacaatgccaacaaaagctggaatctatctgcgctttgttacttaccgg

SEQ ID NO: 49123 - DNA, 75 bp, synthetic construct
  source 1..75: mol_type = other DNA
cgcaactcaatggcgaaaacagcacgctgcggatcaatagcctggcgatgccggtgaaaaacgaggtgtgtgata

SEQ ID NO: 49124 - DNA, 75 bp, synthetic construct
  source 1..75: mol_type = other DNA
aaagcgcctggtagcccgattgaaagcgctacgtgccgatctacaccatcagttggcgagcgtaggttgcgacct

SEQ ID NO: 49125 - DNA, 75 bp, synthetic construct
  source 1..75: mol_type = other DNA
atggcagataataacgaagcaacaagcagcattcttgcagacccttacggtaagatctcacataaaacgctggat

SEQ ID NO: 49126 - DNA, 75 bp, synthetic construct
  source 1..75: mol_type = other DNA
agctgacgtgataggtaaaaatcatgaggcggcagggaatagacaaggtcagccagctaaagaaagaatcatgga

SEQ ID NO: 49127 - DNA, 75 bp, synthetic construct
  source 1..75: mol_type = other DNA
cccctgcaccgccatacccgcttcagacgtcaggaactggcacaggatgagattaacccggacgtcctggcgatg

SEQ ID NO: 49128 - DNA, 75 bp, synthetic construct
  source 1..75: mol_type = other DNA
tgctgtatctcagttacgtggatggaattatcgcgacagaaggaatgatgaggtgcttttaaccacgcctcaacg

SEQ ID NO: 49129 - DNA, 75 bp, synthetic construct
  source 1..75: mol_type = other DNA
cgcgtaacggccctagaggcgaatgcacagggaacatccgggattcagctgtatgaggcatacaacaatggctac

SEQ ID NO: 49130 - DNA, 75 bp, synthetic construct
  source 1..75: mol_type = other DNA
cagaagtttatacctcgaaaaatcttccaccagaaagctacccagtcggcgcaccaatcccgtggccatcagata

SEQ ID NO: 49131 - DNA, 75 bp, synthetic construct
  source 1..75: mol_type = other DNA
agcatcattccggtatcgaaacgtcgtaccggtattgcggcggcgagacgtgcagcaaagaaacgcaggagagca

SEQ ID NO: 49132 - DNA, 75 bp, synthetic construct
  source 1..75: mol_type = other DNA
atgatatacccggaaattacaggcaaaagcggtgagcatttacgcctgaaaacgctggaaagtgtctggctccag

SEQ ID NO: 49133 - DNA, 75 bp, synthetic construct
  source 1..75: mol_type = other DNA
gcaaaagggattagttcagctcagtagcgaaactaacagcgacagcgaaacaatggcggcgacccctaaagccgt

SEQ ID NO: 49134 - DNA, 75 bp, synthetic construct
  source 1..75: mol_type = other DNA
cgccatgccgttgccagagccatctgtcacggtcaaaaaggtgagataagaaaacgatataccgacggtcaggaa

SEQ ID NO: 49135 - DNA, 75 bp, synthetic construct
  source 1..75: mol_type = other DNA
atgcccccggcgacagggactcatacgggtgtgtggcacccggcaggcaatgagcagggacccgccgcaacgacg

SEQ ID NO: 49136 - DNA, 75 bp, synthetic construct
  source 1..75: mol_type = other DNA
tggcttatgcaacatcgtattattctccccggagccaccacgctgacccggttgatttcagaggtaagggaaaag

SEQ ID NO: 49137 - DNA, 75 bp, synthetic construct
  source 1..75: mol_type = other DNA
gcgcggtgctgcgacggactggcgcggctatacggtcaagacacagctaaacccttatgatgaaaatcgggtagc

SEQ ID NO: 49138 - DNA, 75 bp, synthetic construct
  source 1..75: mol_type = other DNA
gtctgttgggtggtattgctatcggtttgcctattgcctgggcactgttgttgtgcggggcggcgttaatgttct

SEQ ID NO: 49139 - DNA, 75 bp, synthetic construct
  source 1..75: mol_type = other DNA
ttgtctgttactgatgttgttgttcctgctactgctactgctactgctactgctactgctactgctactgttctt

SEQ ID NO: 49140 - DNA, 75 bp, synthetic construct
  source 1..75: mol_type = other DNA
taatcaccgattgatggaacggaccggatatatcccgccagtggaggcagaaaaagcctattacgcttcgctgaa

SEQ ID NO: 49141 - DNA, 75 bp, synthetic construct
  source 1..75: mol_type = other DNA
ctgattaaccagaaacgcatcgcgccgctgaatcttctgagtgttgacccgaataaccagagccagattattgcg

SEQ ID NO: 49142 - DNA, 75 bp, synthetic construct
  source 1..75: mol_type = other DNA
aagagcagaagattagccagtctaccctagacgcccttgaatccgagctttaccgcaatctgcgccccctatatc

SEQ ID NO: 49143 - DNA, 75 bp, synthetic construct
  source 1..75: mol_type = other DNA
caagatccgcaaagtgctgaagatcgccaaagagccaatctccatggaaacgccgatcggtgatgatgaagattc

SEQ ID NO: 49144 - DNA, 75 bp, synthetic construct
  source 1..75: mol_type = other DNA
accccccgcacacagacaacggataacggcaaacagaacacctatttttcttcactggataatatggttgcccag

SEQ ID NO: 49145 - DNA, 75 bp, synthetic construct
  source 1..75: mol_type = other DNA
acatgccgacgccgtgttgatcagtggttgagtattgctgagttcattttgtattcacctatgagagaagcgttc

SEQ ID NO: 49146 - DNA, 75 bp, synthetic construct
  source 1..75: mol_type = other DNA
cctggacgcccttgaatacgagctttaccgcaatctgcgccccctatatccaaaaacggtaattcgcatccgcaa

SEQ ID NO: 49147 - DNA, 75 bp, synthetic construct
  source 1..75: mol_type = other DNA
ccctttctgtgccgggtaaaaccgtgtcagatgattttatgcatgctgttctcagtaactgcaccacaagaatcg

SEQ ID NO: 49148 - DNA, 75 bp, synthetic construct
  source 1..75: mol_type = other DNA
acaacccggcggtgtataccgcgctgattaaccttgagcacattaagtcttatctgccggacagcacgtttaacc

SEQ ID NO: 49149 - DNA, 75 bp, synthetic construct
  source 1..75: mol_type = other DNA
tcaccatcaaccgcatcctcaacgttcatgattcgggccatattcttaatccgctgctggcagaaggtcaggtac

SEQ ID NO: 49150 - DNA, 75 bp, synthetic construct
  source 1..75: mol_type = other DNA
ggcgatttttacctgggaagatgtgcctgatatcccattcgctacagctgggcatgcctggacacttgacgaaaa

SEQ ID NO: 49151 - DNA, 75 bp, synthetic construct
  source 1..75: mol_type = other DNA
cggtaccacgcgccgtgtaacgttcacagcaacggtggaaaccatctacgggacaaccacagtaacttcggaggc

SEQ ID NO: 49152 - DNA, 75 bp, synthetic construct
  source 1..75: mol_type = other DNA
attttgatgctggtctgtgggttatccctgagcataaaatgaaatgccatcgtgaacatgttgtgcccctgtcat

SEQ ID NO: 49153 - DNA, 75 bp, synthetic construct
  source 1..75: mol_type = other DNA
atgattgatgtcttagggccggagaaacgcagacggcgtactacacaggaaaagatcgctatcgttcagcagagc

SEQ ID NO: 49154 - DNA, 75 bp, synthetic construct
  source 1..75: mol_type = other DNA
atacacaacaatatatatttggcgactttgtattaaaaaacaatggaatattattattcaaaaacaaagaatatc

SEQ ID NO: 49155 - DNA, 75 bp, synthetic construct
  source 1..75: mol_type = other DNA
cagctctctgctgaaagctccatcaaaaccaccactaacccaccggcgtttggctgtacctttgttgatctgacg

SEQ ID NO: 49156 - DNA, 75 bp, synthetic construct
  source 1..75: mol_type = other DNA
atatcgcaaaacatgtcattcagattcacttcatcaatgagcacacgggtgaagtggttgataaacagttgtgta

SEQ ID NO: 49157 - DNA, 75 bp, synthetic construct
  source 1..75: mol_type = other DNA
atgattctcgccaacgactttcttgaatacctgctcaacacagaacgtgatcttgccgctcgcgtgcgtgatcgt

SEQ ID NO: 49158 - DNA, 75 bp, synthetic construct
  source 1..75: mol_type = other DNA
tggtctggctgtgctggtacgatttgatgctggggaattgccttgatgactggaccgacaacctcaggttcaaaa

SEQ ID NO: 49159 - DNA, 75 bp, synthetic construct
  source 1..75: mol_type = other DNA
taaatactttgttaggttttgtattccggtcattgattattaaattcgtcgtattctttgcgctgtattttgtag

SEQ ID NO: 49160 - DNA, 75 bp, synthetic construct
  source 1..75: mol_type = other DNA
atgaacatcgaaaaaagcagattaatttctgaggccgcccctcatctgaacgcctatcagggcacaattaacggt

SEQ ID NO: 49161 - DNA, 75 bp, synthetic construct
  source 1..75: mol_type = other DNA
aagaactttatagatattatcaggtctggttgactgattttacgaagctgacggtcagatcggggatgtgtcacc

SEQ ID NO: 49162 - DNA, 75 bp, synthetic construct
  source 1..75: mol_type = other DNA
tatgtggggcgggggatgactaagcgcaaaatggctgaactgctgaatgatgcacacccggaatggagtttaaga

SEQ ID NO: 49163 - DNA, 75 bp, synthetic construct
  source 1..75: mol_type = other DNA
aaagcgctggaaatggcatgggaaacccgtggtaagcccggcggggtgatgttccacagcgatcagggcagtcat

SEQ ID NO: 49164 - DNA, 75 bp, synthetic construct
  source 1..75: mol_type = other DNA
cgacggacgcgaaatccagcgtgaatggctggaacagatggcagccagctacaacccggcggtgtataccgcgct

SEQ ID NO: 49165 - DNA, 75 bp, synthetic construct
  source 1..75: mol_type = other DNA
attaattctcgtaactattaccgcgccttcagactggtaccagaaaccagaccggcggcgactttgactcctcgt

SEQ ID NO: 49166 - DNA, 75 bp, synthetic construct
  source 1..75: mol_type = other DNA
gctacggcaaggtgacggcgctgtttgctgaagaaatcacggagggtccgctggcgggcaagatggcactgtatg

SEQ ID NO: 49167 - DNA, 75 bp, synthetic construct
  source 1..75: mol_type = other DNA
aatggtgaaaaaccgaagattgccatcgtcccccggagtctgcaccggctgatttatggctctgacaaacgggcc

SEQ ID NO: 49168 - DNA, 75 bp, synthetic construct
  source 1..75: mol_type = other DNA
cacggtaaatatcgtacgcatatactggtgtgggatgatcggcaggggggcgctgcctcaaaaatttcccgctgt

SEQ ID NO: 49169 - DNA, 75 bp, synthetic construct
  source 1..75: mol_type = other DNA
acccaactgagcagtgccaccaacagcacctctgaaacgctggccgccacaccaaaagccgtcaaggctgcatac

SEQ ID NO: 49170 - DNA, 75 bp, synthetic construct
  source 1..75: mol_type = other DNA
ttgttgctggcgtagcaatgattctttccaataacgtgtttgctgatgaaggtcacggtattgttaaatttaaag

SEQ ID NO: 49171 - DNA, 75 bp, synthetic construct
  source 1..75: mol_type = other DNA
cgatatttttcatcaggatgccgcaaattttgtccgtaagttaaaagtgcaaaaagataacgtgatgatcaccgg

SEQ ID NO: 49172 - DNA, 75 bp, synthetic construct
  source 1..75: mol_type = other DNA
gaaggcggtgaatgatgcggtcgcaaatattccacagccggcggacggtaaaagtctcaccccggatgatgtgcg

SEQ ID NO: 49173 - DNA, 75 bp, synthetic construct
  source 1..75: mol_type = other DNA
gcagtgctctgcatctcgagccctggcagggtaatggactggttcatttttccaggcggacgcctttccgtaaac

SEQ ID NO: 49174 - DNA, 75 bp, synthetic construct
  source 1..75: mol_type = other DNA
ctctggaacggttcaaattttatctggaacaacgcggctggatcgttgcccgtaaagaacaactggtggaatggt

SEQ ID NO: 49175 - DNA, 75 bp, synthetic construct
  source 1..75: mol_type = other DNA
cccgctgctggtgctgtatcgcattatcaccgaatgctttttcggttatgaaatccaggccgccgcgaccattgg

SEQ ID NO: 49176 - DNA, 75 bp, synthetic construct
  source 1..75: mol_type = other DNA
caataccggggccggatttgaacacgacctgattgaaaaactggttggagaacgcctggctgccgtgcgaaacaa

SEQ ID NO: 49177 - DNA, 75 bp, synthetic construct
  source 1..75: mol_type = other DNA
gtttggctgtacctttgttgatctgacggtcgatattgcgctgtgcaaagtcaccatcaaccgcatcctcaacgt

SEQ ID NO: 49178 - DNA, 75 bp, synthetic construct
  source 1..75: mol_type = other DNA
tacaaattttgccgactggatcactgagtttggtaaggctgcccggacaggtaactggcgtcctttttttgttaa

SEQ ID NO: 49179 - DNA, 75 bp, synthetic construct
  source 1..75: mol_type = other DNA
gctggagtttacgcccgtgctgcatggttcttgcctatcgcgttgctcatttttgttcggtgtggcgcaaaaaga

SEQ ID NO: 49180 - DNA, 75 bp, synthetic construct
  source 1..75: mol_type = other DNA
tgaccatcaaagcgctgaaaatggcctgggaaatccgcagtaaaccagccggggtaatgttccacagcgatcagg

SEQ ID NO: 49181 - DNA, 75 bp, synthetic construct
  source 1..75: mol_type = other DNA
tcctgcaggaaatcataaatgcgcgttacgaaagcgttttaccgacaattttgatcagcaacctgacgtttgaac

SEQ ID NO: 49182 - DNA, 75 bp, synthetic construct
  source 1..75: mol_type = other DNA
gtgaattttattattttatttataaacaaaacgcgtgtagtggcgttaacgcctgcgctgcaacctattgatggc

SEQ ID NO: 49183 - DNA, 75 bp, synthetic construct
  source 1..75: mol_type = other DNA
ctgacaaaaaatctggtggatccgctgtgctctgggtcaagcgtggtgatgtggaagcgatgcagaaagccatgg

SEQ ID NO: 49184 - DNA, 75 bp, synthetic construct
  source 1..75: mol_type = other DNA
tcgtgtcaatgacataataaatgacagattctggagtgatgggaaaaaacccgacagatgtgacgtacttcagga

SEQ ID NO: 49185 - DNA, 75 bp, synthetic construct
  source 1..75: mol_type = other DNA
aaatcacgattaaaacgagtcttcaatgacatttacaaacaattagatagcatctatgacgatgaacacggtgaa

SEQ ID NO: 49186 - DNA, 75 bp, synthetic construct
  source 1..75: mol_type = other DNA
tgttcctggtggcagaattgttcttgatgttcaagtttgcacgcctcggcccaagcagcctgaaaaccggtcgct

SEQ ID NO: 49187 - DNA, 75 bp, synthetic construct
  source 1..75: mol_type = other DNA
attcccactatgtaggggatatcttcggtgcgccgctggcaatcgaaggtctaatggccttcttcctcgaatcca

SEQ ID NO: 49188 - DNA, 75 bp, synthetic construct
  source 1..75: mol_type = other DNA
tagttacgccgtaacggctgctgacctgttcaacccgtgcacaaatctttctgtttttgaaaagatcatcactga

SEQ ID NO: 49189 - DNA, 75 bp, synthetic construct
  source 1..75: mol_type = other DNA
aaatcgttgagaaaggcaaaacggcaccgcgaatcaccccgcagcacatcgaagacgtgattaaaagcgagcatt

SEQ ID NO: 49190 - DNA, 75 bp, synthetic construct
  source 1..75: mol_type = other DNA
tggatgagaaccccttctccggtcacctgttcatcttccgtggccgacggggtgacatgattaaaatcctctggg

SEQ ID NO: 49191 - DNA, 75 bp, synthetic construct
  source 1..75: mol_type = other DNA
agcagagccgaaagctgcatcggtagcggaaactgatggtaaagcctttcctcagccagccggtgttgcgttacc

SEQ ID NO: 49192 - DNA, 75 bp, synthetic construct
  source 1..75: mol_type = other DNA
gcagagcgcggaaccagtgcaaaaagcagtaaagcggcaaaagagaaaaaagccacgaccagtaaagagggctga

SEQ ID NO: 49193 - DNA, 75 bp, synthetic construct
  source 1..75: mol_type = other DNA
atgttattttccggggcgcccccaaaaccgtatagtatgccgacacattgctgcacaatatattaatgatattta

SEQ ID NO: 49194 - DNA, 75 bp, synthetic construct
  source 1..75: mol_type = other DNA
atgaaaagaggcgtgtcccgtaaatataacgaatcatcgcaggatatgcattatcaggtgataccagagggcatt

SEQ ID NO: 49195 - DNA, 75 bp, synthetic construct
  source 1..75: mol_type = other DNA
cccgtatccgcgttgaccttgctcagaacggtatcaggcctcagcgatgggagcttgaggcgctggcgcgtgggg

SEQ ID NO: 49196 - DNA, 75 bp, synthetic construct
  source 1..75: mol_type = other DNA
aatcgcgataacgttagcggtcatcatgttcatcagcgggctggacgatttttttattgatgtcgtctactgggt

SEQ ID NO: 49197 - DNA, 75 bp, synthetic construct
  source 1..75: mol_type = other DNA
ctcggggaatcgccgaaaaagctattcaaggaagcctgcatacggtggctgcgtgagaaatcggataagaagtcc

SEQ ID NO: 49198 - DNA, 75 bp, synthetic construct
  source 1..75: mol_type = other DNA
tgttaacccatcgctatccgttcgccacgctggcggaaatctatgagcgcgatgtaattaacaatcctgagttga

SEQ ID NO: 49199 - DNA, 75 bp, synthetic construct
  source 1..75: mol_type = other DNA
aggccttgccacttccagtctccgtacagcgcagatggcgcaggataaccagatggcgagatacggggtaaaccg

SEQ ID NO: 49200 - DNA, 75 bp, synthetic construct
  source 1..75: mol_type = other DNA
aaaacccgatcgatcagctgaaggttgtcggtcgtccccatgaccgcatcgacggaccgctgaaaactaccggca

SEQ ID NO: 49201 - DNA, 75 bp, synthetic construct
  source 1..75: mol_type = other DNA
tcgcaaaatacagccaacaaccgctggtgaaatatatcggccagccggtcgtcaacattgttgaactcaatctgg

SEQ ID NO: 49202 - DNA, 75 bp, synthetic construct
  source 1..75: mol_type = other DNA
gtttaatacctacccttctgattctggcgtttttacaaccagcgtcatcggagatgcttcatctgattcaattaa

SEQ ID NO: 49203 - DNA, 75 bp, synthetic construct
  source 1..75: mol_type = other DNA
gaccgagcgcatgaagcagcttgtcgctgacggcaagaaaatctattccagtatcgaactgcacccgcagttctc

SEQ ID NO: 49204 - DNA, 75 bp, synthetic construct
  source 1..75: mol_type = other DNA
ggggctgagacgctggctgaaaaactggcggcgtttcccggaatgactgtggaggctgcccgagacatgctggcc

SEQ ID NO: 49205 - DNA, 75 bp, synthetic construct
  source 1..75: mol_type = other DNA
gttggtagaaacactaatggcgatatagtctcatacgaaccaatggaacaagttaatcgctttttactagcacac

SEQ ID NO: 49206 - DNA, 75 bp, synthetic construct
  source 1..75: mol_type = other DNA
atgtggcatcatcctgaaatgcagcgggcttcctgaaaaaagtaaccggggtcgaccgcgactgggcagcaccct

SEQ ID NO: 49207 - DNA, 75 bp, synthetic construct
  source 1..75: mol_type = other DNA
gccagccagaccatcagcacgcaggcagacgagctgcagagcaaaagccaggcgctggcaaagagcaacaaccag

SEQ ID NO: 49208 - DNA, 75 bp, synthetic construct
  source 1..75: mol_type = other DNA
gttgatgcaaatcatgggcacaccgcagctggcgcgaattctgcacccgtttgtcggcgtggttatgtttgcctc

SEQ ID NO: 49209 - DNA, 75 bp, synthetic construct
  source 1..75: mol_type = other DNA
cgattccggcgttccctgttatttcattcatggcaaccgtgattttctgctcggcaaacgctttgcccgtgaaag

SEQ ID NO: 49210 - DNA, 75 bp, synthetic construct
  source 1..75: mol_type = other DNA
cgacaataatcaaaccaggcaatatgccggttcagtggctgcgttaccaggatgaaaaaatgactcaggatgaat

SEQ ID NO: 49211 - DNA, 75 bp, synthetic construct
  source 1..75: mol_type = other DNA
aaagttcatttttaccactgcgaccaccggggcctgccgctggcgctcatcagcgaagacggcaatacggcgtgg

SEQ ID NO: 49212 - DNA, 75 bp, synthetic construct
  source 1..75: mol_type = other DNA
acttcacactattcagcctgaacgattaaacaccgacttctctttattcaaaagacaaccatctattgaaagtac

SEQ ID NO: 49213 - DNA, 75 bp, synthetic construct
  source 1..75: mol_type = other DNA
agtcaattattgacgatttgcgtaatcagattatcagccggatggtaaaaaatgacgtagtgaatgaggtcgcaa

SEQ ID NO: 49214 - DNA, 75 bp, synthetic construct
  source 1..75: mol_type = other DNA
cgcttaccaatttgagtggaaaggatgtagctggtcttctcacataccttggtttgggagaagcggcaaaacgga

SEQ ID NO: 49215 - DNA, 75 bp, synthetic construct
  source 1..75: mol_type = other DNA
atggcgaattaccgtcttatatcactggcgctgacagtgcggacaggagcgacttttacaccggaagcagaccgt

SEQ ID NO: 49216 - DNA, 75 bp, synthetic construct
  source 1..75: mol_type = other DNA
ctggcaatgctcctcgataagctggactggcgtcagccaaaaacatcccgccgtaactcactgacaatgttgtaa

SEQ ID NO: 49217 - DNA, 75 bp, synthetic construct
  source 1..75: mol_type = other DNA
cgggaacaaagacgcagatgaccatccgctccaaaacgtacatgggcagcggatttaatgagctgaagtttgatg

SEQ ID NO: 49218 - DNA, 75 bp, synthetic construct
  source 1..75: mol_type = other DNA
tataccattaataatgacgtttatttaagtgatgttatttttgataacaaccaggcatatacatcaacaagttac

SEQ ID NO: 49219 - DNA, 75 bp, synthetic construct
  source 1..75: mol_type = other DNA
aaggaaaaactgcgcacgcaggacggcgatccgcagaaccggttcaccgcaacaggtgcagcctccgaccagctg

SEQ ID NO: 49220 - DNA, 75 bp, synthetic construct
  source 1..75: mol_type = other DNA
atataaaaatgactatgcgctatgcccatttagcacccgatcatcttgagacggctctgagattcaaccccctcg

SEQ ID NO: 49221 - DNA, 75 bp, synthetic construct
  source 1..75: mol_type = other DNA
aattcagtgagcatattgtgccacttcaggatgctgtagatctggagatcgcaacggaggaagaaaactcgttgc

SEQ ID NO: 49222 - DNA, 75 bp, synthetic construct
  source 1..75: mol_type = other DNA
catcgctttttctccattatttttctcattattctattagtttgcattcattcactgataacaactataaaataa

SEQ ID NO: 49223 - DNA, 75 bp, synthetic construct
  source 1..75: mol_type = other DNA
ttaccctgaccagtggtctttccgcaagcagtacggagctgtccagcctgtttacgtcaggaagtggaatgtgga

SEQ ID NO: 49224 - DNA, 75 bp, synthetic construct
  source 1..75: mol_type = other DNA
cggtcgctcctctgccccgatgccgcagcgagtaacagaagaaggaaaacaggatgatgaagaaaaaccgcaacc

SEQ ID NO: 49225 - DNA, 75 bp, synthetic construct
  source 1..75: mol_type = other DNA
caccggttgtgcagtcaccaaagcgcaggaacgccggcgacaacgatgtgaaaacggaggactcccatggcagct

SEQ ID NO: 49226 - DNA, 75 bp, synthetic construct
  source 1..75: mol_type = other DNA
acctgcgccgttgttgcatcaactggtatcgcgttttcctcgaacgttgttaaccactacggtgcagggctacga

SEQ ID NO: 49227 - DNA, 75 bp, synthetic construct
  source 1..75: mol_type = other DNA
gcaggatgctgggaaatcgcaacggaggaagaaagatcgttgctggaggcatggaataaatatcgggtattgttg

SEQ ID NO: 49228 - DNA, 75 bp, synthetic construct
  source 1..75: mol_type = other DNA
ttgccttacaacatcagtggcacgaaagagcaattaaccgaaatcgctcggaaaatccgcccggaactggttacc

SEQ ID NO: 49229 - DNA, 75 bp, synthetic construct
  source 1..75: mol_type = other DNA
ggacttaccacccggcatttcgcctattctcccgtctttaaagagtccgttatcctgcatatgcgtgagcaccgg

SEQ ID NO: 49230 - DNA, 75 bp, synthetic construct
  source 1..75: mol_type = other DNA
attaaggcgagttagtggttgtgtaagcgtaagagaatggatgcaatctcaggtaaatgaacaaactaatgaaga

SEQ ID NO: 49231 - DNA, 75 bp, synthetic construct
  source 1..75: mol_type = other DNA
taaccgtctggatgtgatgtgtacaccggatctggttaaccagttccgcttcatggccgcgcagatccgtttcat

SEQ ID NO: 49232 - DNA, 75 bp, synthetic construct
  source 1..75: mol_type = other DNA
cttgtgggttttcagttatgtggcctcagcgtcgtgtgcgggctgtgccgtgcctccatcgtagccgggcttctg

SEQ ID NO: 49233 - DNA, 75 bp, synthetic construct
  source 1..75: mol_type = other DNA
agcttgaggttgtgcagcactatctttccggcatggaagggcagaaagcgactgcaaagcgttttggtatcgatc

SEQ ID NO: 49234 - DNA, 75 bp, synthetic construct
  source 1..75: mol_type = other DNA
gagatacgctcattttgcaccagatcatttagaagaagctgtaactcttaaccctatttctaatttaacaggatt

SEQ ID NO: 49235 - DNA, 75 bp, synthetic construct
  source 1..75: mol_type = other DNA
gtccctgcttgagcaggggcgtttgcaggggctggacgcggtcagtaacgaagagctgtccgcgatggcgggcaa

SEQ ID NO: 49236 - DNA, 75 bp, synthetic construct
  source 1..75: mol_type = other DNA
gaagcccggaaaaacattccgcccaaaaatcctgtcgatgcagataaattactggctgcctctcgcggagaattt

SEQ ID NO: 49237 - DNA, 75 bp, synthetic construct
  source 1..75: mol_type = other DNA
atgatgtgggtaatcgtggtgttatcgaggttaaatcaaagaaatcctccaagaagatatttatcttgctggcaa

SEQ ID NO: 49238 - DNA, 75 bp, synthetic construct
  source 1..75: mol_type = other DNA
gtaaatggatttgtgaatgctaccccgccgggcgcaatgggcggcgtgtgcgtaagcagtttgcaactaagggtg

SEQ ID NO: 49239 - DNA, 75 bp, synthetic construct
  source 1..75: mol_type = other DNA
aagcccgcagaagatgcggcgaggttttccgttacgctattgtcaccggaagggctaaatataacccggcacctg

SEQ ID NO: 49240 - DNA, 75 bp, synthetic construct
  source 1..75: mol_type = other DNA
cggatgaaaaagaagctattcgcgtgcagcgtgtaaatgctgatgaccgtacgcaaattgacgaagaaatcattg

SEQ ID NO: 49241 - DNA, 75 bp, synthetic construct
  source 1..75: mol_type = other DNA
ttaaccatcccgatcaaacgccgatgacctacgaagagtttttccgtgagcggcaggacgcgcgctacggtggaa

SEQ ID NO: 49242 - DNA, 75 bp, synthetic construct
  source 1..75: mol_type = other DNA
tgagggtctggaaagcggtcacggattcaggcatgaattcagcacgattatgaacgagcacgaatggcctgctga

SEQ ID NO: 49243 - DNA, 75 bp, synthetic construct
  source 1..75: mol_type = other DNA
aaaataaaccgcccttttctgttttccgcgacaaattcatcaccatgcctggcgggctggattattcccgcgcca

SEQ ID NO: 49244 - DNA, 75 bp, synthetic construct
  source 1..75: mol_type = other DNA
ccaccgacgcggtgatggagagcgacacctcgctgagactgcgggcgcagcgggcgtatgacggcctgagtgttg

SEQ ID NO: 49245 - DNA, 75 bp, synthetic construct
  source 1..75: mol_type = other DNA
cggtggcgtgctacctcagtacttcgcccttcatctattttgtccggttggtacgttttgctaaagtgtggtcag

SEQ ID NO: 49246 - DNA, 75 bp, synthetic construct
  source 1..75: mol_type = other DNA
gtgtatgatggtgattttaaggtgcttgcgtggcttccatttccatcagatgtccttcctgctccgctactgaag

SEQ ID NO: 49247 - DNA, 75 bp, synthetic construct
  source 1..75: mol_type = other DNA
ggaaaaccagcggcgcgtcagggagatatgactcagtatggcggtcccattgtccagggttcggcaggtgtaaga

SEQ ID NO: 49248 - DNA, 75 bp, synthetic construct
  source 1..75: mol_type = other DNA
gctttctgctgctggagtgtacggagctgggcgaatgtaggcagagtcacggaggcagcaatggcgactcccttt

SEQ ID NO: 49249 - DNA, 75 bp, synthetic construct
  source 1..75: mol_type = other DNA
tggttctaatgtgacgctcaggtttaccaacttaaaaactaaagctactgtggaccttaccgttacggggaaatg

SEQ ID NO: 49250 - DNA, 75 bp, synthetic construct
  source 1..75: mol_type = other DNA
atcgacgaaaactccggtgaattttttgttcaggtctggggaaatggagccaacttcgacaacacgattttgcgc

SEQ ID NO: 49251 - DNA, 75 bp, synthetic construct
  source 1..75: mol_type = other DNA
cgggcaaacagtcgctggatgatttgatgaacagttcgctgtatctgatgcgcagcgaattgcgtgagatccccc

SEQ ID NO: 49252 - DNA, 75 bp, synthetic construct
  source 1..75: mol_type = other DNA
cgtctccgccgcgctggagctggaatcggaaccccttaacgttatcgctcaaaccatgtcgtttcgtgaaatgct

SEQ ID NO: 49253 - DNA, 75 bp, synthetic construct
  source 1..75: mol_type = other DNA
ggtagtgccgcagattgacgattactacgaacctttcaccttcgactacgaacatttgcatagcgcgccggaagg

SEQ ID NO: 49254 - DNA, 75 bp, synthetic construct
  source 1..75: mol_type = other DNA
agtcgtgaatttaaaatcaggctggtaaaacaggcattacagcctggtgcagtcgttgcacggatcgccagagag

SEQ ID NO: 49255 - DNA, 75 bp, synthetic construct
  source 1..75: mol_type = other DNA
gatatctgaaagggaaaagcagtctgatgctttacgagcagtttggtgatttgaaattcaaatacaggaacaggg

SEQ ID NO: 49256 - DNA, 75 bp, synthetic construct
  source 1..75: mol_type = other DNA
ggtccccgcagggccattcagtattcaggacctggacagttcagttcgcggacgtcttgatgttgaggttattga

SEQ ID NO: 49257 - DNA, 75 bp, synthetic construct
  source 1..75: mol_type = other DNA
acgggctgccaatggaatgcgctgaatgccaccggtatatgctcgtcaagctctgctcatcgccgatttcaggag

SEQ ID NO: 49258 - DNA, 75 bp, synthetic construct
  source 1..75: mol_type = other DNA
tgcccggattcggttgtcggcagtggacggcgcatttacggcagacgtggaagatgctcagaacgacgagtccgt

SEQ ID NO: 49259 - DNA, 75 bp, synthetic construct
  source 1..75: mol_type = other DNA
cggctggaaagtgaaatcctggctgaccgggtgagtgaggaaagccgccgctggctggcatcgtgcggcctgacc

SEQ ID NO: 49260 - DNA, 75 bp, synthetic construct
  source 1..75: mol_type = other DNA
tacagcaactgggcattacccagtggtcgctgcgtcgccctggcgcgttgcagggggagattgccattgcgatcc

SEQ ID NO: 49261 - DNA, 75 bp, synthetic construct
  source 1..75: mol_type = other DNA
accagacatgcgtacaacgcgcagggactggcgaaccgctgtataccggacagcctgcccgccgtggaatggctg

SEQ ID NO: 49262 - DNA, 75 bp, synthetic construct
  source 1..75: mol_type = other DNA
cagagcaggataataccggtgccgaaccggctgatgaagctggcagcgaacagccggaagagaccgctgaaacag

SEQ ID NO: 49263 - DNA, 75 bp, synthetic construct
  source 1..75: mol_type = other DNA
cggcagttatcctgtcagcgtctcggtaaccgacaaagccggaaacacgggcagccagtcattgaccgtcacggt

SEQ ID NO: 49264 - DNA, 75 bp, synthetic construct
  source 1..75: mol_type = other DNA
ctgaccccagaagaaattaaacgcctgctggatgcctgcgcggattctcaaagccccagcctgctgatgattgca

SEQ ID NO: 49265 - DNA, 75 bp, synthetic construct
  source 1..75: mol_type = other DNA
tgcacattttgcacctgatcatttagaggatgcagtatcaaaaaaccctttatatagattaaaatggaccacacc

SEQ ID NO: 49266 - DNA, 75 bp, synthetic construct
  source 1..75: mol_type = other DNA
cggatgatgagcggactcaccggtaccattacgacagtcagcaccggctggtgcactacacgcggacacaatatg

SEQ ID NO: 49267 - DNA, 75 bp, synthetic construct
  source 1..75: mol_type = other DNA
atgatcactattaccaaagagcgactgctgacaatcaagcagtggcgcgaaacatacggacctgatagcaacgtt

SEQ ID NO: 49268 - DNA, 75 bp, synthetic construct
  source 1..75: mol_type = other DNA
tcggagacatcatcgggcggctgttcttcaggctaattgagggaacatccagccttatcacctggtggcaatcgc

SEQ ID NO: 49269 - DNA, 75 bp, synthetic construct
  source 1..75: mol_type = other DNA
tacaacttgccagaattaatcgaaggcatggaagtttccattgatgtaagcacttgtgatgctgatttaggtaat

SEQ ID NO: 49270 - DNA, 75 bp, synthetic construct
  source 1..75: mol_type = other DNA
agcccgccgcattctggcgcgggatcacgtttgcttttttgccggacgtattcgcacagggggcgcacatgctta

SEQ ID NO: 49271 - DNA, 75 bp, synthetic construct
  source 1..75: mol_type = other DNA
cgacagcggcggcaggagcattcactttgagccgctgtttcccggcgagataagctacagccgcagcgagtcgtt

SEQ ID NO: 49272 - DNA, 75 bp, synthetic construct
  source 1..75: mol_type = other DNA
gaatgctggctgcctgggaagctggttttattgatgatactgcgaagaacgccgcggatattgcccggatgattc

SEQ ID NO: 49273 - DNA, 75 bp, synthetic construct
  source 1..75: mol_type = other DNA
tggctgggagaaaaggaagatcggcgacaactgtcagaagtgattgagcaatggtattccctgtacggtcagaca

SEQ ID NO: 49274 - DNA, 75 bp, synthetic construct
  source 1..75: mol_type = other DNA
aacagggcaacattctggcggatgatctttccaccatgataaacgctgacaatgacagtccggtgacggccagca

SEQ ID NO: 49275 - DNA, 75 bp, synthetic construct
  source 1..75: mol_type = other DNA
tatggttcagattgagcgtcaggtgacgatgtatcgccagaacgtgtacggcgaaagtgatcccagctatctgga

SEQ ID NO: 49276 - DNA, 75 bp, synthetic construct
  source 1..75: mol_type = other DNA
tccagggagatttgaacgtgccgacggcggtacgctatttcttgatgaactcgctacggcaccgatgatggtgca

SEQ ID NO: 49277 - DNA, 75 bp, synthetic construct
  source 1..75: mol_type = other DNA
ccgttgccagccaggcgctttccatcgacccggcgcgtccactccagacgctgacgttgcccggaagaatgccgc

SEQ ID NO: 49278 - DNA, 75 bp, synthetic construct
  source 1..75: mol_type = other DNA
gttccggctcacaggccagtgcggcgtttggtcagggttccatgctggcactgatggcagatgcattcctgaacg

SEQ ID NO: 49279 - DNA, 75 bp, synthetic construct
  source 1..75: mol_type = other DNA
gaataatgtcgtctttgcttcgtacctgatcagatttaaaccttttgataatatttcagagctttacttgaagcg

SEQ ID NO: 49280 - DNA, 75 bp, synthetic construct
  source 1..75: mol_type = other DNA
catgccgaaaggcttttgagcgtgcggtaaaacgagctggaattgaactacctgaaggtcaatgtacccacgttc

SEQ ID NO: 49281 - DNA, 75 bp, synthetic construct
  source 1..75: mol_type = other DNA
aattgctggatggagttaaggttgagtggaaaacactagagaaagtgcttaaacgaactaaaggcacaaaaataa

SEQ ID NO: 49282 - DNA, 75 bp, synthetic construct
  source 1..75: mol_type = other DNA
agcattacccccttccgaactccctcgcttcttggttgctctaaacaatgcttctatccgtttggaaacaaggct

SEQ ID NO: 49283 - DNA, 75 bp, synthetic construct
  source 1..75: mol_type = other DNA
aaaggggcaaagaacagaatgctaattccaggatttgtatctgaagttgcttttgatttattaattgaactctct

SEQ ID NO: 49284 - DNA, 75 bp, synthetic construct
  source 1..75: mol_type = other DNA
ccgcgttcctggttcgcttggtcatgtgaacgtcctggcgaatatgatgtttggttccatttctggttcagccgt

SEQ ID NO: 49285 - DNA, 75 bp, synthetic construct
  source 1..75: mol_type = other DNA
ccagcaggttgtggcaccatctgatgattgaccttgaaacaatgggcaaaaatcctgatgccccaataaacgctc

SEQ ID NO: 49286 - DNA, 75 bp, synthetic construct
  source 1..75: mol_type = other DNA
atgaccacaaataattatctggaatattttctgaccctgctgggctgggtggtgaataatggcctgtgggatgtg

SEQ ID NO: 49287 - DNA, 75 bp, synthetic construct
  source 1..75: mol_type = other DNA
catctgaagaagccatcgccgtttcagaaaacacttcgcttccgacgctgccactggatttacgcgagtttcaga

SEQ ID NO: 49288 - DNA, 75 bp, synthetic construct
  source 1..75: mol_type = other DNA
cactgttacaattgcgggaatttatcgacgaaaactccggtgaattttttgttcaggtctggggaaatggagcca

SEQ ID NO: 49289 - DNA, 75 bp, synthetic construct
  source 1..75: mol_type = other DNA
atgaacaacaagacatggtttcgtgcatatgcatgggcgctggtatgcgtcctcgtctctctcattctgtatgta

SEQ ID NO: 49290 - DNA, 75 bp, synthetic construct
  source 1..75: mol_type = other DNA
aggcggatgtgacgctgattgacctggggcatctggcccgtgaagggtatgaagcccagatggcgctgaccatgg

SEQ ID NO: 49291 - DNA, 75 bp, synthetic construct
  source 1..75: mol_type = other DNA
gccgatcgccaacatgcgctgtttagcggggatgatttcctcaatactttcgtcacagaacattcctccattcgc

SEQ ID NO: 49292 - DNA, 75 bp, synthetic construct
  source 1..75: mol_type = other DNA
cgccttaaacggatataccggaagtcggcttgtcctgattgccacgaaattgctcatgattacaggtgttagaac

SEQ ID NO: 49293 - DNA, 75 bp, synthetic construct
  source 1..75: mol_type = other DNA
agggtgacatgacccgcaagggactggatattgtgcagggttcagcaggtgtgctgataggtgcgccgacgggag

SEQ ID NO: 49294 - DNA, 75 bp, synthetic construct
  source 1..75: mol_type = other DNA
gcctggcagcgatgatctgaacgggattaacgtgaaataccgttatgagtttacggacacgctggggctggtgac

SEQ ID NO: 49295 - DNA, 75 bp, synthetic construct
  source 1..75: mol_type = other DNA
atgaccacaacgcaaaaaacgactgatgttacagcccgtcgacgcagccactggtggtggacggtgccgggatgc

SEQ ID NO: 49296 - DNA, 75 bp, synthetic construct
  source 1..75: mol_type = other DNA
ggcatatgattgttctcgtatgtttcattactatcattaactatcttgaccgtaccgctcttggcgttgcggcac

SEQ ID NO: 49297 - DNA, 75 bp, synthetic construct
  source 1..75: mol_type = other DNA
acccgcatcagctgcagcagcttatccggctgccggggcagcagtatgatgaggagtccggcctgtattacaacc

SEQ ID NO: 49298 - DNA, 75 bp, synthetic construct
  source 1..75: mol_type = other DNA
tggaagccagcctgcaggcgtggcagcagaaacaccacgcggtcattctggtgtcgcctgctgtggtacaggggg

SEQ ID NO: 49299 - DNA, 75 bp, synthetic construct
  source 1..75: mol_type = other DNA
atgtgggaacaaggccagtgggagagattaaaccgctagaactgcttaatgtgctgcgtaaaatcgaaaagcgcg

SEQ ID NO: 49300 - DNA, 75 bp, synthetic construct
  source 1..75: mol_type = other DNA
atcagggggatgagcaattaacaccagaagagcgaaaatcccgaaaagacgctcttgcgaatgccttcccggcta

SEQ ID NO: 49301 - DNA, 75 bp, synthetic construct
  source 1..75: mol_type = other DNA
aagttgttttaacgttacttctaccagtaaccgtatctgcccagcagatacagtggcaatcctgtatggccagtc

SEQ ID NO: 49302 - DNA, 75 bp, synthetic construct
  source 1..75: mol_type = other DNA
acaaaaggccgcgttactttccgaagcggaaagcgttattcagccactggagcgcgctgtcaggctgaacatggc

SEQ ID NO: 49303 - DNA, 75 bp, synthetic construct
  source 1..75: mol_type = other DNA
tccgaagtagaacagtggattgcggatcgtaaatcagcaatgtttaaagcggccagacccggtgttgttttaggt

SEQ ID NO: 49304 - DNA, 75 bp, synthetic construct
  source 1..75: mol_type = other DNA
tcgtttcaacggaaaagaatccagagtcagtcttggcgcatacccgctggtctcactggcagaagccaggcaaca

SEQ ID NO: 49305 - DNA, 75 bp, synthetic construct
  source 1..75: mol_type = other DNA
agtaaaatcacccaccttgatcaagatgtactgaatgtattattgaatggtaaagtgaagtttatttcggagaaa

SEQ ID NO: 49306 - DNA, 75 bp, synthetic construct
  source 1..75: mol_type = other DNA
ttatttgtattgaaaaggatgtttcagcaattaatccagaaggcgcaagcgtcgttgaattacctgatattacag

SEQ ID NO: 49307 - DNA, 75 bp, synthetic construct
  source 1..75: mol_type = other DNA
cagccacaacagccacaacagccacaacagccagtgtcttctgtcatcaatgataagaagtcagatgcaggtgtg

SEQ ID NO: 49308 - DNA, 75 bp, synthetic construct
  source 1..75: mol_type = other DNA
caatcagtatcggtattgtgcaaaacataaatttaaacaaaagcattatatggcaggcatttttaattatttaaa

SEQ ID NO: 49309 - DNA, 75 bp, synthetic construct
  source 1..75: mol_type = other DNA
acaaactggcagcaggtattaagtaatggttccgttaacctcggcaatattacctatgtgctgatgaagagcctc

SEQ ID NO: 49310 - DNA, 75 bp, synthetic construct
  source 1..75: mol_type = other DNA
aaacccgatgggccagcaacagcagggatagatgatttgggtgaaattttagctaagatgaaacagagaacatcg

SEQ ID NO: 49311 - DNA, 75 bp, synthetic construct
  source 1..75: mol_type = other DNA
atcatgatagacggctgtgttgcccgcctgtgtaagtataaaccagacgaatatgagctgatcattgctcacttc

SEQ ID NO: 49312 - DNA, 75 bp, synthetic construct
  source 1..75: mol_type = other DNA
gccgcaacaaccggtagcaccgcagcagcaatatcagcagccgcaacaaccggttgcaccgcagccgcagtatca

SEQ ID NO: 49313 - DNA, 75 bp, synthetic construct
  source 1..75: mol_type = other DNA
aagaactgaataaaaaatatctggaagagcgtctcagcgatcagcaggattattatgcaaaggccgatgctttac

SEQ ID NO: 49314 - DNA, 75 bp, synthetic construct
  source 1..75: mol_type = other DNA
gcgctcatcagcacggaaggggcaacagcgtggtgcgcagaatatgatgaatggggcaacctgctgaatgaagag

SEQ ID NO: 49315 - DNA, 75 bp, synthetic construct
  source 1..75: mol_type = other DNA
ttctccggggattatctccgcgtaactgacaacaaggggaaaacgcacgatgtgctgaccggaagtgatgacggt

SEQ ID NO: 49316 - DNA, 75 bp, synthetic construct
  source 1..75: mol_type = other DNA
cattatattgtgaagcaaaaaatgacaaagtcagaaaacgccttggaattaaaggtggtttttactggactacag

SEQ ID NO: 49317 - DNA, 75 bp, synthetic construct
  source 1..75: mol_type = other DNA
gggtaaatcaacgttactgagaatgattggcggcattgaccgccccgacagtggaaagatcatcaccaataaaac

SEQ ID NO: 49318 - DNA, 75 bp, synthetic construct
  source 1..75: mol_type = other DNA
attcattgaaagagttttgtgatgtggcgattgtgtttaaagacgataatgcggttggtttttatgaggatgttc

SEQ ID NO: 49319 - DNA, 75 bp, synthetic construct
  source 1..75: mol_type = other DNA
aactcattgccataaaagcgggagatattaccgtttataattatgatggtgaaacgcgggaatatatttctacat

SEQ ID NO: 49320 - DNA, 75 bp, synthetic construct
  source 1..75: mol_type = other DNA
cagtcccgttccatgaacctatcgtcatggttacgatcgctggcattattttgggaggtctggcgctcgttggcc

SEQ ID NO: 49321 - DNA, 75 bp, synthetic construct
  source 1..75: mol_type = other DNA
aatctacccgtaaagcaagccgtaaacctgcaaaaacgcaggaaactgtcctgtctgccctgctggcgcagacgg

SEQ ID NO: 49322 - DNA, 75 bp, synthetic construct
  source 1..75: mol_type = other DNA
catgacggaagatgatgtcatgccggaggcattgcgtcgttttgaggaaatggtggaagaagcggcacgcaacgc

SEQ ID NO: 49323 - DNA, 75 bp, synthetic construct
  source 1..75: mol_type = other DNA
ttatggtcgtaaaccggtgttattaatcggcctgacaatttttgcgttaggtagtctggggatgctgtgggtaga

SEQ ID NO: 49324 - DNA, 75 bp, synthetic construct
  source 1..75: mol_type = other DNA
agtctgattcaactgaaattgcaggccggacggaagttgatgcaggcagaaacaactcgccttaacgttgtgctg

SEQ ID NO: 49325 - DNA, 75 bp, synthetic construct
  source 1..75: mol_type = other DNA
gtcttgagaatgcccgagggaaagatctgtatcaattctggggagatatcatcaccaacaagctgaacgaggcgc

SEQ ID NO: 49326 - DNA, 75 bp, synthetic construct
  source 1..75: mol_type = other DNA
ctgaacgggattaacgtgaaataccgttatgagtttacggacgcgctggggctgattacgtccttcagttatgcc

SEQ ID NO: 49327 - DNA, 75 bp, synthetic construct
  source 1..75: mol_type = other DNA
ggacgattaaccagaaaaaaacgtcagcgtcttccgggcagaaggcatctgatccgtcgggtaatttgtctgata

SEQ ID NO: 49328 - DNA, 75 bp, synthetic construct
  source 1..75: mol_type = other DNA
ttaaatggcttgcggagaaccagcaggaagctaaggacgcggttagagagagccgtgcacgctggcgaaatatca

SEQ ID NO: 49329 - DNA, 75 bp, synthetic construct
  source 1..75: mol_type = other DNA
aacagccgaaagacaaaatgaccgaagtcattatctttgcgggtagtgatgcctgggcacatgcgaaagagtgga

SEQ ID NO: 49330 - DNA, 75 bp, synthetic construct
  source 1..75: mol_type = other DNA
actacggtaatcagtctgtggtactgacagaattatccggacttcagcgggtggagtatctggcgtttgtccaga

SEQ ID NO: 49331 - DNA, 75 bp, synthetic construct
  source 1..75: mol_type = other DNA
gatctccacgccaaaggtttagccgtccgcgtggttgacattgccgcagggcatgggcgctatgtactggatgcg

SEQ ID NO: 49332 - DNA, 75 bp, synthetic construct
  source 1..75: mol_type = other DNA
taacttgtcatcaagtttcacagcggctagcaacctgaatgacgaaatgacttctgacggaaattacttattatt

SEQ ID NO: 49333 - DNA, 75 bp, synthetic construct
  source 1..75: mol_type = other DNA
cgacattacgtgccgccgtttctcgtttggaagaaaacccagcggccttgttgcgcggccgtgaaagaacacagg

SEQ ID NO: 49334 - DNA, 75 bp, synthetic construct
  source 1..75: mol_type = other DNA
tcttctgagtaaaggaatgtctcgggaagacgttgcagagatggcaactttatctcttacagaggttgataagct

SEQ ID NO: 49335 - DNA, 75 bp, synthetic construct
  source 1..75: mol_type = other DNA
cccttacagctattggtcgcgctattatcgctaagggcagtataaaagatgtcctcaattaccttggtttaggag

SEQ ID NO: 49336 - DNA, 75 bp, synthetic construct
  source 1..75: mol_type = other DNA
cgaattaatgaagaatcatgttactggcgtgatgctttattccgtgcattacgtgaattattcagcctgtttgag

SEQ ID NO: 49337 - DNA, 75 bp, synthetic construct
  source 1..75: mol_type = other DNA
tgattacagccttgagccaactccgcaagttctcagtaacgcccaacgctcatatgatgccttgatgaccgacac

SEQ ID NO: 49338 - DNA, 75 bp, synthetic construct
  source 1..75: mol_type = other DNA
gttatccagagcgagcagcttgcttcaatgaagcactcaagattattgatgaactgcgtaagaaagaagcagaga

SEQ ID NO: 49339 - DNA, 75 bp, synthetic construct
  source 1..75: mol_type = other DNA
tctgatccggaaaacggcgtgtggtggctggacgggcttccgcatgccgctgttgtggtggagaaactgcgcaca

SEQ ID NO: 49340 - DNA, 75 bp, synthetic construct
  source 1..75: mol_type = other DNA
acagtaataataagaaaataaagataaataaagaacttttgatgcgccttgcacctctttttagcttaattatat

SEQ ID NO: 49341 - DNA, 75 bp, synthetic construct
  source 1..75: mol_type = other DNA
agatcgtcctttttgcgcttcgtaagtttgctattgcttctaatgcatcgctgactgatgttgagccgcaatcaa

SEQ ID NO: 49342 - DNA, 75 bp, synthetic construct
  source 1..75: mol_type = other DNA
attgctctatcaggttaacaatttaacggattcaaatgagagcaatgaactgaaagatattgcagtcgaactcga

SEQ ID NO: 49343 - DNA, 75 bp, synthetic construct
  source 1..75: mol_type = other DNA
ttcatcatgaccctttccttatttaaggccccttcctcgggaggggctttcccgtttcagcgtcccgctgaaatc

SEQ ID NO: 49344 - DNA, 75 bp, synthetic construct
  source 1..75: mol_type = other DNA
tattcagtcacggttatcagaagtaatatccccattggttgcattagttgtggcagctttgctgtttggtctttt

SEQ ID NO: 49345 - DNA, 75 bp, synthetic construct
  source 1..75: mol_type = other DNA
gataccgtagggtaacgctgtctcttcatcgagaagggaaacagattaaccataaagctgttcagcgcctgatgg

SEQ ID NO: 49346 - DNA, 75 bp, synthetic construct
  source 1..75: mol_type = other DNA
atctggcattcagcagatgaaagggatgggggctttaagtaatgccgaggggcaaaaggtaatggatgctattgg

SEQ ID NO: 49347 - DNA, 75 bp, synthetic construct
  source 1..75: mol_type = other DNA
atgagtgattacctgaaatggtatctctgccaccgctggttaattaagtttgctgtaaaagactggatgacagcg

SEQ ID NO: 49348 - DNA, 75 bp, synthetic construct
  source 1..75: mol_type = other DNA
gatatgaaaatactggcggccagaaaagcagtataccagctggcacgcgaacagcatcctgaacgttggggaaag

SEQ ID NO: 49349 - DNA, 75 bp, synthetic construct
  source 1..75: mol_type = other DNA
ccgttctttaagcaatgcttacaggcggcatggagtcagcggtccactatgtgatttagcatggattgatgttgc

SEQ ID NO: 49350 - DNA, 75 bp, synthetic construct
  source 1..75: mol_type = other DNA
ataaaccgttataccagggatttatcaacggtcatgaaccgtgcgggcagattgtggcgatggggcaaggctgcc

SEQ ID NO: 49351 - DNA, 75 bp, synthetic construct
  source 1..75: mol_type = other DNA
acagcatcctgaacgttggggaaagcatctacgtaactgggactacatatcagaagtctacctgaatccagaaaa

SEQ ID NO: 49352 - DNA, 75 bp, synthetic construct
  source 1..75: mol_type = other DNA
tgactgggtgtttcaggatggcaaggtcatgaaacgcccccggactgatgaagaactacgtcaactggctgaaat

SEQ ID NO: 49353 - DNA, 75 bp, synthetic construct
  source 1..75: mol_type = other DNA
gcgcaacctacattctgcctgacccaggcgagctgaataaacgcgtcctgatccgccagcgggtggatatgcccg

SEQ ID NO: 49354 - DNA, 75 bp, synthetic construct
  source 1..75: mol_type = other DNA
gctggtgtatcacatttctggctgtggtttttgcccgaactgccgccgcggctttcctatctcttgtactggcaa

SEQ ID NO: 49355 - DNA, 75 bp, synthetic construct
  source 1..75: mol_type = other DNA
atcgcttacgatgacagaggtatcattcgctatattgaaaaagatgtgtcgtctattaacccggaaggaatgagc

SEQ ID NO: 49356 - DNA, 75 bp, synthetic construct
  source 1..75: mol_type = other DNA
actgcagccatacttttgttactcatgaaacttttgttcgttcgattgcaacgccaaaagagtcaaatccggttc

SEQ ID NO: 49357 - DNA, 75 bp, synthetic construct
  source 1..75: mol_type = other DNA
cgttacgtccgaaacgcagcctgtggcgcaaaatggtgatgggcgggctggctctgtttggcgcaagcgttgtcg

SEQ ID NO: 49358 - DNA, 75 bp, synthetic construct
  source 1..75: mol_type = other DNA
tcctaatagctcaataaccggtgaaactacgataccagtagaaacttacacacctgatgattcttttttttggga

SEQ ID NO: 49359 - DNA, 75 bp, synthetic construct
  source 1..75: mol_type = other DNA
caatcataaaaaccactgagatggctcagaaacgtatgcaacagaaatacgggaaggacatacaaccgtctcaac

SEQ ID NO: 49360 - DNA, 75 bp, synthetic construct
  source 1..75: mol_type = other DNA
agttggcggtgccggagtgcgctcaccgcttgatgcgctgccgcccctcactagtgggcactgttgcaaagttag

SEQ ID NO: 49361 - DNA, 75 bp, synthetic construct
  source 1..75: mol_type = other DNA
ggcaggctggagagcgtgcgcaccctcgcaccggacctggacatccgcatcccgtatgccaccgacccggcggga

SEQ ID NO: 49362 - DNA, 75 bp, synthetic construct
  source 1..75: mol_type = other DNA
cgctggaaaaaattagcaaatcatgaagtcatcacaatggcgatcccgtgcggtggcattggcgaccgtgacggc

SEQ ID NO: 49363 - DNA, 75 bp, synthetic construct
  source 1..75: mol_type = other DNA
cgcaccgggaatatgccagcccgtctgcttgtaatgaacgggaaaagtctggcgaccactgctgatgccgccctg

SEQ ID NO: 49364 - DNA, 75 bp, synthetic construct
  source 1..75: mol_type = other DNA
cttcaggagatcggaagacctcggccgtcgcggcgcttgccggtggtgctgaccccggatgaagtggttcgcatc

SEQ ID NO: 49365 - DNA, 75 bp, synthetic construct
  source 1..75: mol_type = other DNA
aatggccttactcagatgcgaaacttataaatcacagttaattgaatcagcaagtcaaactacaaatattgctaa

SEQ ID NO: 49366 - DNA, 75 bp, synthetic construct
  source 1..75: mol_type = other DNA
taaatcacctaattttcttaagtctggtgaatcacaaatgactggttctgctggtcagaaacgtgttccaaggct

SEQ ID NO: 49367 - DNA, 75 bp, synthetic construct
  source 1..75: mol_type = other DNA
atcttcactcgtgaagagatgatcaaatacttcactctgaatgccgtcagcaaatctgccagtgcgttcaacacc

SEQ ID NO: 49368 - DNA, 75 bp, synthetic construct
  source 1..75: mol_type = other DNA
cgcagcacctggtagtctttcaggaagtcattagaagtggctctatcggctcggctgcaaaagaattagggttaa

SEQ ID NO: 49369 - DNA, 75 bp, synthetic construct
  source 1..75: mol_type = other DNA
agggcaaatcacagagttattaataagtgctggaacaaaccaagcatgcgcagccattcgattaatcgaaacgga

SEQ ID NO: 49370 - DNA, 75 bp, synthetic construct
  source 1..75: mol_type = other DNA
catgttgcacatcattttgatgcggagctggggatcaactgggacacgctggcgtgtgcgttatcgtgtgtcaga

SEQ ID NO: 49371 - DNA, 75 bp, synthetic construct
  source 1..75: mol_type = other DNA
ccgctctgattatctgcatcatcgtcagcctgtcatgggcggtcaatcattaccgtgataacgcaatcgcctaca

SEQ ID NO: 49372 - DNA, 75 bp, synthetic construct
  source 1..75: mol_type = other DNA
atttacgtagtttagccgctggaggtgcacagccaaatctaaatgtagcaaaaatatcacaaactgttataccat

SEQ ID NO: 49373 - DNA, 75 bp, synthetic construct
  source 1..75: mol_type = other DNA
tagcgaggaagagaagccgtttgaattgccggatggatgggagtggacaacgctaactagaattgcggaaataaa

SEQ ID NO: 49374 - DNA, 75 bp, synthetic construct
  source 1..75: mol_type = other DNA
gtttgtttcgctatccgcatggggacctttgactatgcggcccaattccccaactcgccaaatctgaaaactttc

SEQ ID NO: 49375 - DNA, 75 bp, synthetic construct
  source 1..75: mol_type = other DNA
agcttatcatactcatggtgcagatagtcatggagaatattgggacgaaatattttcaggtaaagatgagaaaat

SEQ ID NO: 49376 - DNA, 75 bp, synthetic construct
  source 1..75: mol_type = other DNA
ctgagcctggtgtactggaacagacggcccgagcttacattgaatcacatggtgccattgaacgtcatcttgggt

SEQ ID NO: 49377 - DNA, 75 bp, synthetic construct
  source 1..75: mol_type = other DNA
ttagcggtctggtcgttgataacacttgtgaagctcgtgttgatggcggtaacaaagacggtctgatcctgctgc

SEQ ID NO: 49378 - DNA, 75 bp, synthetic construct
  source 1..75: mol_type = other DNA
gtcgttgtggcatttagtctcggtaagcgggatcgacgacgagcgagggtggcgacgcggcagtcattggtgatc

SEQ ID NO: 49379 - DNA, 75 bp, synthetic construct
  source 1..75: mol_type = other DNA
acagcttcagagcggtaaaaatctcagcatcaacgccagagatgcacgtcttgcaggtacgcaggcagcacaaca

SEQ ID NO: 49380 - DNA, 75 bp, synthetic construct
  source 1..75: mol_type = other DNA
tgacaaactggccgcgattactgactggaccgctgaaaacgttcatcacgctattcaggcgacggcggatgagct

SEQ ID NO: 49381 - DNA, 75 bp, synthetic construct
  source 1..75: mol_type = other DNA
aatgaaaacacatcattgccatatcagcaggttgcccgggaagtgaaagcgccccgtgaacggctgaagtatgcg

SEQ ID NO: 49382 - DNA, 75 bp, synthetic construct
  source 1..75: mol_type = other DNA
gcaggcgttatgtactaatcgggtgcacaatctggcctgggaagaagatgttcgctccggcgcatttgtggcgcg

SEQ ID NO: 49383 - DNA, 75 bp, synthetic construct
  source 1..75: mol_type = other DNA
atgattaccctgaaaaatgtttcaaaatggtatggtcactttcaggtgctgaccgactgctcaaccgaagtgaaa

SEQ ID NO: 49384 - DNA, 75 bp, synthetic construct
  source 1..75: mol_type = other DNA
aacatccccggaaatgagaaaataccttcagagcatcaacgagtctatgttccttatgaaaaacatagctcatca

SEQ ID NO: 49385 - DNA, 75 bp, synthetic construct
  source 1..75: mol_type = other DNA
aaccgggtatggatgtggcttcgactccttccgtcagggaggtgcgctttggtgatggttactcccagcgcgcgc

SEQ ID NO: 49386 - DNA, 75 bp, synthetic construct
  source 1..75: mol_type = other DNA
gcacgattacgacaaaacatcatcagaaatgagaaaataccttaaaagcatcaacgagtgcatgctccttataaa

SEQ ID NO: 49387 - DNA, 75 bp, synthetic construct
  source 1..75: mol_type = other DNA
tgcgtgagattgctaataaggccagagttaccaccattcttcagtgtaaggcctggaaagatacccagcgaatac

SEQ ID NO: 49388 - DNA, 75 bp, synthetic construct
  source 1..75: mol_type = other DNA
cattgcctgccgatcacaaagcagctatccgtcagatgaagcacgcgctgcgggcgcagcttggcgacgtccagc

SEQ ID NO: 49389 - DNA, 75 bp, synthetic construct
  source 1..75: mol_type = other DNA
gaaaaaagcaggtctgaacaagtctgaacttgaggcttttttgcgggatatgattaacggtaagcaaaagagctg

SEQ ID NO: 49390 - DNA, 75 bp, synthetic construct
  source 1..75: mol_type = other DNA
ggtaacaccttcttccaggacaccattcgtcgtaaccgtgagctttctgccgaaggctttaactttatcggtacc

SEQ ID NO: 49391 - DNA, 75 bp, synthetic construct
  source 1..75: mol_type = other DNA
gctgaatccggaaaaatcccatccttacattgatgatatggcgatgtttttatcgccattacctgtcgtgctgga

SEQ ID NO: 49392 - DNA, 75 bp, synthetic construct
  source 1..75: mol_type = other DNA
tatcgccattaccggtcgtgctggagtggcattgtgtgatgtgtgagcagttttttcatgggaagaagttctgtg

SEQ ID NO: 49393 - DNA, 75 bp, synthetic construct
  source 1..75: mol_type = other DNA
ggtggcggtgggggagatcggtctggatctcttcggcgacgatccgcaatttgagaggcagcagtggttactcga

SEQ ID NO: 49394 - DNA, 75 bp, synthetic construct
  source 1..75: mol_type = other DNA
cgctgggttacagggttttattcactccttttcacgctatccacaagaagctctgcctgtagcacaatattttgc

SEQ ID NO: 49395 - DNA, 75 bp, synthetic construct
  source 1..75: mol_type = other DNA
ttttccgtgctggctgcatcatccgtgcgcagttcctgcagaaaatcaccgatgcatatgccgaaaatccgcaga

SEQ ID NO: 49396 - DNA, 75 bp, synthetic construct
  source 1..75: mol_type = other DNA
tctggtgatttctggaagcgttagggaaagattgaatcaggttctgcttgaacaaaaacagaaagataaactttc

SEQ ID NO: 49397 - DNA, 75 bp, synthetic construct
  source 1..75: mol_type = other DNA
tgaaaatggcagaacagttaaaaaagaatcaccctgactggagcctgaaaacttgtagaaatcgcattgatgttt

SEQ ID NO: 49398 - DNA, 75 bp, synthetic construct
  source 1..75: mol_type = other DNA
aaaaatcacataaattctgggcggtggagcaacagggaaacgagttgcatatctgttggggaaaagttggcacca

SEQ ID NO: 49399 - DNA, 75 bp, synthetic construct
  source 1..75: mol_type = other DNA
gcaagctgtggctatgggaaggcaaagcggaaagctatggctgggggagtaattcaacacaggaagcgcagttct

SEQ ID NO: 49400 - DNA, 75 bp, synthetic construct
  source 1..75: mol_type = other DNA
tgaatatacagcatctgcgacggtcgcatagccttcgccatggcaggcgtcatacccgcaaaggcgaaagaggta

SEQ ID NO: 49401 - DNA, 75 bp, synthetic construct
  source 1..75: mol_type = other DNA
gaccagtctggatgcacatcagcaactggttgaaaccctgttgggaacgcttacagacagccaaaacgccgagga

SEQ ID NO: 49402 - DNA, 75 bp, synthetic construct
  source 1..75: mol_type = other DNA
aaaaatgcctcacccgaaaaacggcaattcgttacctggcattctttatgaccacccgcgcttttgaacgttcag

SEQ ID NO: 49403 - DNA, 75 bp, synthetic construct
  source 1..75: mol_type = other DNA
ccggaatagccgtcaggtcacgggtgttgtgaaaaatgtcacggtcagccagtcctgcggtaagtggtacatcag

SEQ ID NO: 49404 - DNA, 75 bp, synthetic construct
  source 1..75: mol_type = other DNA
agccacaggacagtgcgcacgcgtttatggagatgtcagcagctggggcaacgctatatacgctggcagactggg

SEQ ID NO: 49405 - DNA, 75 bp, synthetic construct
  source 1..75: mol_type = other DNA
ttgaattgttcattaaagatccgcttgaaaacgggcttactcgtggcgaacaaatggaactggcacgaattgcac

SEQ ID NO: 49406 - DNA, 75 bp, synthetic construct
  source 1..75: mol_type = other DNA
cgccttgatgtgttgtgcacaccggacctggttaaccagttccgctttatggccgcgcagatccgtttcattttg

SEQ ID NO: 49407 - DNA, 75 bp, synthetic construct
  source 1..75: mol_type = other DNA
gggtgatatcatcagaagtttatgtgttatgtgtccatccatattaatctggtttcagttttcggtatatgtcat

SEQ ID NO: 49408 - DNA, 75 bp, synthetic construct
  source 1..75: mol_type = other DNA
atgaaaatatactggacaagaaaacgcattcctgaactttcagcacttccaccttcattaagaaagaaaaatttt

SEQ ID NO: 49409 - DNA, 75 bp, synthetic construct
  source 1..75: mol_type = other DNA
atgagtgactatcatcacggcgtgcaggtgctggagattaacgacggcacccgcgtcatttccactgtatccact

SEQ ID NO: 49410 - DNA, 75 bp, synthetic construct
  source 1..75: mol_type = other DNA
aatttgatgaaaacggccgcccactgcgccgtatccgtagttttgtgcgccgccaggggcgactgaccaaaggcc

SEQ ID NO: 49411 - DNA, 75 bp, synthetic construct
  source 1..75: mol_type = other DNA
atttcgatggtaaagatggcctgaaacaagatgcccggttgctcaaagtcatcagctatcttgatgtcggtgatg

SEQ ID NO: 49412 - DNA, 75 bp, synthetic construct
  source 1..75: mol_type = other DNA
gacctgtttgaccagcaggaaggcgcactgcgtaatctcacgcagacggccacaaagtatgtgttaaaactcgac

SEQ ID NO: 49413 - DNA, 75 bp, synthetic construct
  source 1..75: mol_type = other DNA
atatcgggatatttctgacggtgtggcaaaacaggtcagggatgaagtcagaaacgaggtgcagaagctggatgt

SEQ ID NO: 49414 - DNA, 75 bp, synthetic construct
  source 1..75: mol_type = other DNA
ctcccaagagagaatgaaatgttattcttatttaagaatatcggcggatgccgtccttctgcacagtctctggaa

SEQ ID NO: 49415 - DNA, 75 bp, synthetic construct
  source 1..75: mol_type = other DNA
accactgtcagcaacagcgacatcatcctgataaacgcagtgcccgtgctcagcgcgatgactggctgaagagag

SEQ ID NO: 49416 - DNA, 75 bp, synthetic construct
  source 1..75: mol_type = other DNA
atgaatttatcccgtcaggaacaacataccttacacgttctcgctaaaggtagacgtattgcgcacgtccgcgat

SEQ ID NO: 49417 - DNA, 75 bp, synthetic construct
  source 1..75: mol_type = other DNA
cgacaaagaccgccttgatgtgctgtgcggcccgaatctgattaaccagttccgcattttcgcggcacaagttca

SEQ ID NO: 49418 - DNA, 75 bp, synthetic construct
  source 1..75: mol_type = other DNA
gtgaagagcaagctcgcctgctggttataccagatgatgaaattattctgaccagaatgtgttttcttagtgata

SEQ ID NO: 49419 - DNA, 75 bp, synthetic construct
  source 1..75: mol_type = other DNA
atgatggtatggtctggatggcgcataccggtacgtttggtaatgtgtccagcttcggggagtccagaaatgatt

SEQ ID NO: 49420 - DNA, 75 bp, synthetic construct
  source 1..75: mol_type = other DNA
ctgaaccgttgccgtgacacgggcgtcatgttcgggcaggcactggctgacgcgctgatgctgccgcttaatgcg

SEQ ID NO: 49421 - DNA, 75 bp, synthetic construct
  source 1..75: mol_type = other DNA
tcatggcactggtgttttttatgttccagagcatggcaaaccaacaacgcatctacgctccacaacagtgcctgc

SEQ ID NO: 49422 - DNA, 75 bp, synthetic construct
  source 1..75: mol_type = other DNA
ggtcggtaacgccgttgagcgtctggcagatgctttaagccagcaaaatgttaccgtgattaaatccacctcctt

SEQ ID NO: 49423 - DNA, 75 bp, synthetic construct
  source 1..75: mol_type = other DNA
ataccgaggctgccgtttatgacggtcaggcaggcattgatacaggcctggctgatcaactgattaatgctgcag

SEQ ID NO: 49424 - DNA, 75 bp, synthetic construct
  source 1..75: mol_type = other DNA
aacaatggcaggagcaggatggccccgcatccggcgataatgtgccgcctgtgtggcttgggccaaagcagcttg

SEQ ID NO: 49425 - DNA, 75 bp, synthetic construct
  source 1..75: mol_type = other DNA
cggtggtgcgctggcgctgattggtatcatcggcggcattggtctcgttgcgtggccggttgtcatggggattaa

SEQ ID NO: 49426 - DNA, 75 bp, synthetic construct
  source 1..75: mol_type = other DNA
aaaatcgacggttttcgcaaaaccagcgcacaactggcggtaaccggacaggcactggaaaaggcaaaacaggaa

SEQ ID NO: 49427 - DNA, 75 bp, synthetic construct
  source 1..75: mol_type = other DNA
gccgcgaaagtttacggacatgaatatattacgcggaaagttaagggagtaacgcagactaacgcaataacaaca

SEQ ID NO: 49428 - DNA, 75 bp, synthetic construct
  source 1..75: mol_type = other DNA
gttttccgatacaaaccgggctttccggtaaagagagtggaacatttacttttactgctattccttttaaagaag

SEQ ID NO: 49429 - DNA, 75 bp, synthetic construct
  source 1..75: mol_type = other DNA
ctggcgcttgccggtgcgacaaccctgtttatgctgccctgggcgctgaagtttatttgggcgccgtggatcgag

SEQ ID NO: 49430 - DNA, 75 bp, synthetic construct
  source 1..75: mol_type = other DNA
atgcatcgaattctcgctgaaaaatcggtcaatatcactgagttacgtaaaaacccagctaaatactttattgat

SEQ ID NO: 49431 - DNA, 75 bp, synthetic construct
  source 1..75: mol_type = other DNA
ttaactaccagcgcgatgatgagatggcgacgtgggcgatggcggaaatcacgtatcagatcgcctacacgaact

SEQ ID NO: 49432 - DNA, 75 bp, synthetic construct
  source 1..75: mol_type = other DNA
cgtcgtagcgactggaaaaaagcttacgtcaccctgaaagaaggccagaatctggacttcgttggcggcgctgag

SEQ ID NO: 49433 - DNA, 75 bp, synthetic construct
  source 1..75: mol_type = other DNA
ccatgctgagtacgctttgttacaacctgatggtgacatgcggtatccattccatggacagccagatgctcaatg

SEQ ID NO: 49434 - DNA, 75 bp, synthetic construct
  source 1..75: mol_type = other DNA
aatcacggatttatcaataagtctttgcgtgaagttttcgacgttacgcgcatgattctgtcagcgaaagaagag

SEQ ID NO: 49435 - DNA, 75 bp, synthetic construct
  source 1..75: mol_type = other DNA
taattcaacgctcgctattaacaataagttcttgggagagtttacggcagggaataagagtaaagtttctgttaa

SEQ ID NO: 49436 - DNA, 75 bp, synthetic construct
  source 1..75: mol_type = other DNA
gggacccgccgcaacgacgtgaagcgcggtttgcgaaacggcgttgcgccttacatcccggcggccttttgccgg

SEQ ID NO: 49437 - DNA, 75 bp, synthetic construct
  source 1..75: mol_type = other DNA
tgctgctgaacgcagttgaccgggcaagccgcccgcttaaagcgattcagaacgccagcaaatccctgtctggtg

SEQ ID NO: 49438 - DNA, 75 bp, synthetic construct
  source 1..75: mol_type = other DNA
tgactggatagcaccatttggtcatacacatgaattatatcagtatatgagaaaacacttttcctattctctttt

SEQ ID NO: 49439 - DNA, 75 bp, synthetic construct
  source 1..75: mol_type = other DNA
ccggtggggagcctcggccccggctggaaaatgcctgcggatatccgcttacagctgcgcgataacacactgata

SEQ ID NO: 49440 - DNA, 75 bp, synthetic construct
  source 1..75: mol_type = other DNA
aaacgcccgcgccggtggggagcctcggcccggctggaaaatgcctgcggatatccgcttacagctgcgcgataa

SEQ ID NO: 49441 - DNA, 75 bp, synthetic construct
  source 1..75: mol_type = other DNA
aacgattatccggtggcatggtgtagctgggctaatttgagtattgaatgtgaagttaaatatatcatggatacc

SEQ ID NO: 49442 - DNA, 75 bp, synthetic construct
  source 1..75: mol_type = other DNA
atcgaccgcctcttcgacgacacgtttcgaggcttcggctttccggcgctggccatgccacgctggccgtcggac

SEQ ID NO: 49443 - DNA, 75 bp, synthetic construct
  source 1..75: mol_type = other DNA
tgctggaggcaagcctgccttcccgtgtggttttcattgaactgaaacaaaagggtgtgatgtgggagggggcat

SEQ ID NO: 49444 - DNA, 75 bp, synthetic construct
  source 1..75: mol_type = other DNA
gcaggcgattgcgaataaccagaatgtgatcagcgaggaggatgttccccgcaccatgcagaaccagccggatgc

SEQ ID NO: 49445 - DNA, 75 bp, synthetic construct
  source 1..75: mol_type = other DNA
atcacaagccccgcgcgtccgtggtttcgcctggctacgccagatcctgaaatgatggattatggccctgttaag

SEQ ID NO: 49446 - DNA, 75 bp, synthetic construct
  source 1..75: mol_type = other DNA
aatgaaactcttcgcgctgacgttgccgctggtcgtaagcgcctgcggatcaacgccacctgtccaggctccgtg

SEQ ID NO: 49447 - DNA, 75 bp, synthetic construct
  source 1..75: mol_type = other DNA
gaaaaccggcaacatttttgtgctcgatcgtcgtaatggcgaactggtggttccggcaccggaaaaaccggttcc

SEQ ID NO: 49448 - DNA, 75 bp, synthetic construct
  source 1..75: mol_type = other DNA
ggaaaactacgtatgtgggggcgctggtcgtatattggcggcggtagatcagggaatatgttcaatcagttgctg

SEQ ID NO: 49449 - DNA, 75 bp, synthetic construct
  source 1..75: mol_type = other DNA
tatttcttccgccgcggtgatggagattatcagcaacgtgagcgaaaaccgccaggtgaccgtccctgctgaact

SEQ ID NO: 49450 - DNA, 75 bp, synthetic construct
  source 1..75: mol_type = other DNA
ccggtcatcgtactcagcaataacgatggctgtgtgatcgcgcgcagcccggaggcaaaagcccttggcatcaga

SEQ ID NO: 49451 - DNA, 75 bp, synthetic construct
  source 1..75: mol_type = other DNA
acgggattatttcacccttagaaagcggattgaaaccagtgataaaatgatccgaggcttgcagcaatacattcg

SEQ ID NO: 49452 - DNA, 75 bp, synthetic construct
  source 1..75: mol_type = other DNA
ttcttgaccgcatgagcgatggcggcgggtgcactctgtcattcacgtgggattcttaccgttctaagggggcag

SEQ ID NO: 49453 - DNA, 75 bp, synthetic construct
  source 1..75: mol_type = other DNA
agcaccagcttgaagaggataaaatgggagagcagttatcgattccctatccgggcagcccgtttacgggccgta

SEQ ID NO: 49454 - DNA, 75 bp, synthetic construct
  source 1..75: mol_type = other DNA
cgtcagggcgacatgacgcagtatggcggtagcattgttcagggttcagccggggtgcgcattggtgcccccacc

SEQ ID NO: 49455 - DNA, 75 bp, synthetic construct
  source 1..75: mol_type = other DNA
taccgtctccgaagtggaatcgacaagttaaccgctcaggtcaactacctgcaggagtacatcaggacgcagtgc

SEQ ID NO: 49456 - DNA, 75 bp, synthetic construct
  source 1..75: mol_type = other DNA
ggaattagccgatgcgagagctgaaaatgaaactcttcgcgctgacgttgccgctggtcgtaagcgcctgcggat

SEQ ID NO: 49457 - DNA, 75 bp, synthetic construct
  source 1..75: mol_type = other DNA
cgcttgctgggctgccaacatttaaaattgctgagagtgaattggcgttcctgaccccggaagaaattaaacgtc

SEQ ID NO: 49458 - DNA, 75 bp, synthetic construct
  source 1..75: mol_type = other DNA
cagctctccggacctgatctctcgcgcagatgggacaccattctgtttgatgaagcgcaggatgcgaatccggtg

SEQ ID NO: 49459 - DNA, 75 bp, synthetic construct
  source 1..75: mol_type = other DNA
cgcttgccatgcaatgcgctgccagcgttcatcccgacacaacgcacgaagtcgccagggttgaatcaggtttta

SEQ ID NO: 49460 - DNA, 75 bp, synthetic construct
  source 1..75: mol_type = other DNA
cttacgcgcagcatggggtatgacgctgccgggcgcatcaccgtgctgaccaacgagaacggcagccagtccacg

SEQ ID NO: 49461 - DNA, 75 bp, synthetic construct
  source 1..75: mol_type = other DNA
gaggaaaagagcaggacgacggagaagacgccgtccccgcatgagagtggcacagagaaggtggtggagggaaag

SEQ ID NO: 49462 - DNA, 75 bp, synthetic construct
  source 1..75: mol_type = other DNA
aattatctctacctgggcacctgcgtctgataataacaacacaacagcgtatatcagggctgtatcgcaacgact

SEQ ID NO: 49463 - DNA, 75 bp, synthetic construct
  source 1..75: mol_type = other DNA
atgcatgaccaggtaaataatgcccaggcacccgcccatcagatgcagtcaacctctgaaaaaagcgctgttcag

SEQ ID NO: 49464 - DNA, 75 bp, synthetic construct
  source 1..75: mol_type = other DNA
aaaaccgtatcaccatcaccgacagcctgaaccggcgggaggtgctgcacacggaaggtgaagccgggctgaaac

SEQ ID NO: 49465 - DNA, 75 bp, synthetic construct
  source 1..75: mol_type = other DNA
acttgcttaccttttattcaaaacaccaccgaacatattacccaaaaggctgttgatgaaacaaatgtttcaatc

SEQ ID NO: 49466 - DNA, 75 bp, synthetic construct
  source 1..75: mol_type = other DNA
aagctggaacgccagcctatgaaagagcattaagtaacgctgcaaatgccatcagaccgctgcttgccactgagg

SEQ ID NO: 49467 - DNA, 75 bp, synthetic construct
  source 1..75: mol_type = other DNA
acgtattgcagggtggcgcaagtctgattaatgcaatcagtcaggggcttggtgggccaaaagtattggatgatg

SEQ ID NO: 49468 - DNA, 75 bp, synthetic construct
  source 1..75: mol_type = other DNA
attaaagcaagacgggaatattgctatcgaacccggcgaatttaaagccaccagtactttccaggtaacctatcc

SEQ ID NO: 49469 - DNA, 75 bp, synthetic construct
  source 1..75: mol_type = other DNA
tccgttgcataaaccgacgacgccgctgccttctctggatttgctgacaccgccgccgagcgaagtggagccggt

SEQ ID NO: 49470 - DNA, 75 bp, synthetic construct
  source 1..75: mol_type = other DNA
aggctaacacggcattcatccggaaaaacttcagcgtcattcttgagcgtacggtacgcgaactcaacggcgagt

SEQ ID NO: 49471 - DNA, 75 bp, synthetic construct
  source 1..75: mol_type = other DNA
gtgaactgcgccgcagtaacgatatccttcgccagacttccgcttatatgcagtgaactgcatattgccccgtca

SEQ ID NO: 49472 - DNA, 75 bp, synthetic construct
  source 1..75: mol_type = other DNA
atcggtgttcggtacattgaaaaaactagggcactggtccgcaccaaacccgctggcagggcttccaaccttcaa

SEQ ID NO: 49473 - DNA, 75 bp, synthetic construct
  source 1..75: mol_type = other DNA
cgttattcatttgagcatgcagatatctgcgatgccgaagcgatggctcgtattttcgcacagcaccagccagac

SEQ ID NO: 49474 - DNA, 75 bp, synthetic construct
  source 1..75: mol_type = other DNA
gaaaagggcactgggagagtgatatcaaagagaacagtgaaagaatcaggagtcaaagggccaaatagtcgcttt

SEQ ID NO: 49475 - DNA, 75 bp, synthetic construct
  source 1..75: mol_type = other DNA
ggatcacgccgggtgaacacataatcagtgctgattctgcactcagcagaaatatccggcagtgtttctgccttt

SEQ ID NO: 49476 - DNA, 75 bp, synthetic construct
  source 1..75: mol_type = other DNA
tgataggattttctagtacatcatatttcattagactttttgtaaaacactttggcgtaacaccaaaacaatttt

SEQ ID NO: 49477 - DNA, 75 bp, synthetic construct
  source 1..75: mol_type = other DNA
atgaacggtataaaaacggggctggggatcacgccgggtgagcacattatcagtgccgattctgcgctcagcaga

SEQ ID NO: 49478 - DNA, 75 bp, synthetic construct
  source 1..75: mol_type = other DNA
aagaaataataaaaataaataacattaggattcataagtacactttattatatacatctaattgcattatggata

SEQ ID NO: 49479 - DNA, 75 bp, synthetic construct
  source 1..75: mol_type = other DNA
gccagaaggccgccagagaggccgagcgcggccgtgaggcttggacgctagggcagggcatgaaaaagcccgtag

SEQ ID NO: 49480 - DNA, 75 bp, synthetic construct
  source 1..75: mol_type = other DNA
tgattggaatttctagtgtgtcttattttattaggcttttcaataaccattttggtgttacacctaagcagtttt

SEQ ID NO: 49481 - DNA, 75 bp, synthetic construct
  source 1..75: mol_type = other DNA
agcattattgttgcttgaaaattcataccaagtgtctcaggtttctaatatgattggaatttctagtgtgtctta

SEQ ID NO: 49482 - DNA, 75 bp, synthetic construct
  source 1..75: mol_type = other DNA
gcctgaaatcagacaaacagttattggatggaatggatatgcagttagacaatgcgtatatacaagaaatgaata

SEQ ID NO: 49483 - DNA, 75 bp, synthetic construct
  source 1..75: mol_type = other DNA
gtgaatgttaactttttcgtcacctgcattggtgatgcgtttaaatcccggatggcacaaaagagtgtgctgtta

SEQ ID NO: 49484 - DNA, 75 bp, synthetic construct
  source 1..75: mol_type = other DNA
gtcgtctgatgaaagacgaaccggaatacaaccgcatcgccacctaccagtccatcaatgacgcttatgtcgttg

SEQ ID NO: 49485 - DNA, 75 bp, synthetic construct
  source 1..75: mol_type = other DNA
gggaaatatgtttaaccagttgctgacctctaaaaagctaacaaaaacggcaattaatgaggcgctccggaggat

SEQ ID NO: 49486 - DNA, 75 bp, synthetic construct
  source 1..75: mol_type = other DNA
cacatcagtagacctgaacaagctgccggaagatatggaagccacccgctcggtggtggagtcggttctgacgga

SEQ ID NO: 49487 - DNA, 75 bp, synthetic construct
  source 1..75: mol_type = other DNA
tgtgcttagtctggggctgaatcattaccgcgataacgccatcacctacaaagcgcagcgcgataaaaaagccag

SEQ ID NO: 49488 - DNA, 75 bp, synthetic construct
  source 1..75: mol_type = other DNA
tgcacttagtctggggctgaatcattaccgcgataacgccataacctacaaagagcagcgcgataaaaaagtcag

SEQ ID NO: 49489 - DNA, 75 bp, synthetic construct
  source 1..75: mol_type = other DNA
taccgtctccgaagtggaatcgacaagataaccgcgcaggtcaactacctgcaggagtacatcaggacgcagtgc

SEQ ID NO: 49490 - DNA, 75 bp, synthetic construct
  source 1..75: mol_type = other DNA
aattcatgcgctctccgcctacctgacgccatcctgtcgggagattctggagagtgatgcccgccgtcgcagtga

SEQ ID NO: 49491 - DNA, 75 bp, synthetic construct
  source 1..75: mol_type = other DNA
atgaaggctcgtcagtaccagtgtgaacaggtgaactacgacacctttatttcgtatccgaagcttgatgcctgg

SEQ ID NO: 49492 - DNA, 75 bp, synthetic construct
  source 1..75: mol_type = other DNA
tgcaaaaaccgaacggcagatacaggaagcacaggagcgaatcagcgcacttcaggaagaaatggcggaaacgct

SEQ ID NO: 49493 - DNA, 75 bp, synthetic construct
  source 1..75: mol_type = other DNA
cgcacagggctgcgccagaacttccgtatcttccagaatgaggacatcgaaagcatactcgcgacgatcctgaaa

SEQ ID NO: 49494 - DNA, 75 bp, synthetic construct
  source 1..75: mol_type = other DNA
tgatccaaaagcttttgagcaggcatttgcaagagcatggtttaaactgacccaccgggatatgggaccggcagc

SEQ ID NO: 49495 - DNA, 75 bp, synthetic construct
  source 1..75: mol_type = other DNA
tcaccacatgatttacgccgcagcattgctacaggctgcgctgaatatctggacgcaccagaacggcttatagaa

SEQ ID NO: 49496 - DNA, 75 bp, synthetic construct
  source 1..75: mol_type = other DNA
ccaccagatttcaacagctggatatggaggctctgaaaaaagatatcaaagatttgctgacaacttcccaggatt

SEQ ID NO: 49497 - DNA, 75 bp, synthetic construct
  source 1..75: mol_type = other DNA
aaccaggctgccgaatccaatcgcggtaatgagtggaccggcaatcctgatattgataacgccatcatcatgctc

SEQ ID NO: 49498 - DNA, 75 bp, synthetic construct
  source 1..75: mol_type = other DNA
caaagccgtttttccataggctccgcccccctgacaagcatcacgaaatctgacgctcaaatcagtggtggcgaa

SEQ ID NO: 49499 - DNA, 75 bp, synthetic construct
  source 1..75: mol_type = other DNA
ggcctgccgcaacaaaccgattcgccggaggcctttaacgccgggctggaatgcggcctgcaatcccccgcgatc

SEQ ID NO: 49500 - DNA, 75 bp, synthetic construct
  source 1..75: mol_type = other DNA
agaggccattgaaaacgcaattgaatacattcgtagtatcgcttttcacatcgatgaagacgattaccacggcaa

SEQ ID NO: 49501 - DNA, 75 bp, synthetic construct
  source 1..75: mol_type = other DNA
ctcttcctgcggcggattatacaatgattgatggtaaagacattaagtcgctgaaagagcaggttatgaatttgg

SEQ ID NO: 49502 - DNA, 75 bp, synthetic construct
  source 1..75: mol_type = other DNA
atgtacggaacatgcgaaacgctctgccgggagctggcagcgcagtatccgggagacacgccgctgatgctggtt

SEQ ID NO: 49503 - DNA, 75 bp, synthetic construct
  source 1..75: mol_type = other DNA
atatccgtcaggggcgatgctcatctcgaacgatggggaaagaatattcattaacacaacagaaggaaatctatc

SEQ ID NO: 49504 - DNA, 75 bp, synthetic construct
  source 1..75: mol_type = other DNA
tcgaaaatgacggtgggctttctctacctaactttgaacgtcataacggaaaaagctctaaaaaacgggcggtta

SEQ ID NO: 49505 - DNA, 75 bp, synthetic construct
  source 1..75: mol_type = other DNA
tcgacatcgtcaacggccccggcactcgctgcaccctgtttgtctccgggtgtgttcatgaatgccccggttgct

SEQ ID NO: 49506 - DNA, 75 bp, synthetic construct
  source 1..75: mol_type = other DNA
gggccgcccgggatcatggcctcgccgtcccggaatgcgtcacccgccgtcaggaggtggttaatcaggcccgca

SEQ ID NO: 49507 - DNA, 75 bp, synthetic construct
  source 1..75: mol_type = other DNA
tcgacgaactcaacgctgcgcaaatgcaggttgttgatttgattaacgtgctggtcgacggcaaatttgtgcagg

SEQ ID NO: 49508 - DNA, 75 bp, synthetic construct
  source 1..75: mol_type = other DNA
aagttatcactcctgataaacctgaaatttttcagatagcagaaattctgggtattgatccagatgctgttcttg

SEQ ID NO: 49509 - DNA, 75 bp, synthetic construct
  source 1..75: mol_type = other DNA
gggtatttccctctccggcggcgacccgctgcacccacaaaacgtgccggatattttaaaactggtacaacgcat

SEQ ID NO: 49510 - DNA, 75 bp, synthetic construct
  source 1..75: mol_type = other DNA
tggatcctgttccgtaaattctcctctccggaggaagtcgaaaatgtggctgcgcagctgctggagtttgcgtaa

SEQ ID NO: 49511 - DNA, 75 bp, synthetic construct
  source 1..75: mol_type = other DNA
attttctcgctgttcgccctgttcagcacctggtccggcgttcccgtagaaggctcgctggtgaacgtacgtatt

SEQ ID NO: 49512 - DNA, 75 bp, synthetic construct
  source 1..75: mol_type = other DNA
tgtggactgtttcgttaggcgcgatagatgagtgggtggcgtcgccattgcagcaacaggcgctgcaaatcaaat

SEQ ID NO: 49513 - DNA, 75 bp, synthetic construct
  source 1..75: mol_type = other DNA
gatatcacgatccgcacattcgaagcggtgcgtaaatctaaggaagcgttagacctgttcactaccggagcatga

SEQ ID NO: 49514 - DNA, 75 bp, synthetic construct
  source 1..75: mol_type = other DNA
ttcattgggttggtcaacgtgactgggaagtgcgtgattttcacggcacggaatataaaacgctgcgcggcagca

SEQ ID NO: 49515 - DNA, 75 bp, synthetic construct
  source 1..75: mol_type = other DNA
tcctgactttggcggatatctatttgccgcccctccagcgccgatagtgccggaagaaatgtattggcaggatgc

SEQ ID NO: 49516 - DNA, 75 bp, synthetic construct
  source 1..75: mol_type = other DNA
ggatttactacaacagacctggcgggtgataagtactggtggacaatgccggggggaaaggtgttttatggttgt

SEQ ID NO: 49517 - DNA, 75 bp, synthetic construct
  source 1..75: mol_type = other DNA
gactggtgctgggagataacctgcttgatgccgattacaacacggactggcgaggacgatacagcgaataccgtg

SEQ ID NO: 49518 - DNA, 75 bp, synthetic construct
  source 1..75: mol_type = other DNA
cggttaatggccggaagctacggttgtcttggcgtgctcactgaaatctcgatgaaagtgttaccgcgaccgcgc

SEQ ID NO: 49519 - DNA, 75 bp, synthetic construct
  source 1..75: mol_type = other DNA
attgaaagcgtagtttttacaaacaaggtccagcatccggatggcaagccgccagtatgggcaaagtgtacaaaa

SEQ ID NO: 49520 - DNA, 75 bp, synthetic construct
  source 1..75: mol_type = other DNA
tgaatgcagcaggtcttattcgctcaatgtcccgtaaaggatgttcacctgataatgccgcatgcgaaggctttt

SEQ ID NO: 49521 - DNA, 75 bp, synthetic construct
  source 1..75: mol_type = other DNA
cagcctctgttgaagaaaaccttctatcgaggcggactgaatccagaaaagatcaacataatccgttatgcggac

SEQ ID NO: 49522 - DNA, 75 bp, synthetic construct
  source 1..75: mol_type = other DNA
aatctgctgcgtaacccttatttttgccgggtaatttgcgttaacgacggctccatggacaataccgaagcggtc

SEQ ID NO: 49523 - DNA, 75 bp, synthetic construct
  source 1..75: mol_type = other DNA
aacaggctggcaacttcgacacattgtgccgaaatcagaagggggactggataacataggtaatctggccatgtt

SEQ ID NO: 49524 - DNA, 75 bp, synthetic construct
  source 1..75: mol_type = other DNA
ttgcttgctgcctctcgcggagaatttgttgcagggattagcgacccgaatgatccgaaatgggttaaggggatc

SEQ ID NO: 49525 - DNA, 75 bp, synthetic construct
  source 1..75: mol_type = other DNA
tgatgcatgcggtggctgtggcatccgggcgggtgcaggtgagagtcgggcgggtaagtcgtattcgtgaagcct

SEQ ID NO: 49526 - DNA, 75 bp, synthetic construct
  source 1..75: mol_type = other DNA
ttatcaaacgcatcctgattgcgaaactttagtgtgttttgtatatgaccctgaaggtagaattgccaatccaat

SEQ ID NO: 49527 - DNA, 75 bp, synthetic construct
  source 1..75: mol_type = other DNA
tggaacccgtatccgagaccactgctgaccacaacagctatggtttcagaccaatgcgcagcacgcatgacgcca

SEQ ID NO: 49528 - DNA, 75 bp, synthetic construct
  source 1..75: mol_type = other DNA
acctggctgaaaaatcatggcgagcccggctcgaggcacatgatgaacgttcttcctctcttttcagcgaagttt

SEQ ID NO: 49529 - DNA, 75 bp, synthetic construct
  source 1..75: mol_type = other DNA
gttgccttaaaaacagccgcgatatctttgatattaccggttatatccacaacaatcaggggttgtgttatcggt

SEQ ID NO: 49530 - DNA, 75 bp, synthetic construct
  source 1..75: mol_type = other DNA
tggggaaacccgccgatgacgctacgcttaccgctgccatagaagcggtggggctggaaaacgccgcgcgcgtgc

SEQ ID NO: 49531 - DNA, 75 bp, synthetic construct
  source 1..75: mol_type = other DNA
atgacgcgaaaatttatgcttgaatatcggtcagagaaattacaggccggattaatgccgtccagtattaatcgt

SEQ ID NO: 49532 - DNA, 75 bp, synthetic construct
  source 1..75: mol_type = other DNA
cgaaattcagcgccggcgcgaaatggggctgagcgaaccatcctggtcagtatctcacccctcaaataccaacga

SEQ ID NO: 49533 - DNA, 75 bp, synthetic construct
  source 1..75: mol_type = other DNA
atggtgatacgcaaaaagaagtgcagggattgtggtaagaccatcactcataatacggtgtgttgtccgtattgt

SEQ ID NO: 49534 - DNA, 75 bp, synthetic construct
  source 1..75: mol_type = other DNA
attatggagcataaatcaggggttgcccgttcagtatggacggcccgtcttaatggttgtcagattatctggcgt

SEQ ID NO: 49535 - DNA, 75 bp, synthetic construct
  source 1..75: mol_type = other DNA
aaaggtttagcatattttgttctgccgatgaaaaatgcagagggcactaaagttggttcagtgaaagtgaatgca

SEQ ID NO: 49536 - DNA, 75 bp, synthetic construct
  source 1..75: mol_type = other DNA
gaaacattcgatgaaaaaaatcgggctgaagttcaggaagatgatccggaggaaatggaaggccctgaacatccg

SEQ ID NO: 49537 - DNA, 75 bp, synthetic construct
  source 1..75: mol_type = other DNA
ggaaaaaacagttaagcaattctatgacacgctggtggtccggtttgatattgcagaggcatgggcagagtggca

SEQ ID NO: 49538 - DNA, 75 bp, synthetic construct
  source 1..75: mol_type = other DNA
attgaaagcgtagtttttacaaacaaggtccagtatccggatggtaagccgccggtatgggcaaagtgtacgaaa

SEQ ID NO: 49539 - DNA, 75 bp, synthetic construct
  source 1..75: mol_type = other DNA
cgtgtattgcatggattccctgtattattgctgcgttcggcgttgatggtatatatctgaaaatcctgtttgcgg

SEQ ID NO: 49540 - DNA, 75 bp, synthetic construct
  source 1..75: mol_type = other DNA
ccgaccagaccgaagaaagcgacatgtccttccttacgcgcatggcggaaatgctgggcgcaatcaccacggtaa

SEQ ID NO: 49541 - DNA, 75 bp, synthetic construct
  source 1..75: mol_type = other DNA
ccagtgcatcagccagcgaggcggcaactcatgcaaccgatgctgcagcctcagcacgtgccgccagcacgtcag

SEQ ID NO: 49542 - DNA, 75 bp, synthetic construct
  source 1..75: mol_type = other DNA
tacagacgattgagcgtcggactcaactcgtcagttcttttgttgactcaaacacagcaaacgagttcttcgtga

SEQ ID NO: 49543 - DNA, 75 bp, synthetic construct
  source 1..75: mol_type = other DNA
tggcttgtttatttgttcataagaggattgatacagtggtcacttatgctgatatcagggcaaaacgggccgaaa

SEQ ID NO: 49544 - DNA, 75 bp, synthetic construct
  source 1..75: mol_type = other DNA
tacctcatcgtgaaaaccatctggtacttgatatagcaaacagtgaaagtgaaacagaattgcagggcaatcgtc

SEQ ID NO: 49545 - DNA, 75 bp, synthetic construct
  source 1..75: mol_type = other DNA
aatcctggctacgcagctgacactcaatttcgccgcgccggtgttgatatcgataaaaacggggccgcggttggg

SEQ ID NO: 49546 - DNA, 75 bp, synthetic construct
  source 1..75: mol_type = other DNA
aaatgcaccgaagaacatcaggcgattgtgcgtaagtggctggaagaacgcaaactggatgaggtacgcaccagc

SEQ ID NO: 49547 - DNA, 75 bp, synthetic construct
  source 1..75: mol_type = other DNA
tactgagatagcaatcagctggatcaacggtctgaaaaaaatccgtttccccgagaagagcggcaagatgcagga

SEQ ID NO: 49548 - DNA, 75 bp, synthetic construct
  source 1..75: mol_type = other DNA
cccgaccgaatccgtggccattgatattgcttatgaaggctccggcagtggtgactggcgtaccaacagtttcat

SEQ ID NO: 49549 - DNA, 75 bp, synthetic construct
  source 1..75: mol_type = other DNA
gatttcccgatagaaacaacccccggacaatgggatttccttctcaaacaaccctatgaatttattcttactcaa

SEQ ID NO: 49550 - DNA, 75 bp, synthetic construct
  source 1..75: mol_type = other DNA
cactgatttgtcgtcacgcccgcgacctgctgctggcgcagggctggccggaagagactgatgttgaccagcgga

SEQ ID NO: 49551 - DNA, 75 bp, synthetic construct
  source 1..75: mol_type = other DNA
aatccgtggccattgatattgcttatgaaggctccggcagtggtgactggcgcactgacggtttcatcgtgggtg

SEQ ID NO: 49552 - DNA, 75 bp, synthetic construct
  source 1..75: mol_type = other DNA
gtgaaataccgttatgagtttacggacacactggggatggtgacgtcattcagctatgcaggagacaagaatcgc

SEQ ID NO: 49553 - DNA, 75 bp, synthetic construct
  source 1..75: mol_type = other DNA
gcgcaatctgatgcagcattgctctggagtttttggaactcttactctgcagatgaactggtcgatgacttagtc

SEQ ID NO: 49554 - DNA, 75 bp, synthetic construct
  source 1..75: mol_type = other DNA
gtgcctgaacgcggattcactcttctggaaatcatgctggtgattttccttatcggccttgccagtgcgggcgtg

SEQ ID NO: 49555 - DNA, 75 bp, synthetic construct
  source 1..75: mol_type = other DNA
cctatatgtctaacattaactatgatgcctcaaagccaggagcgccagcacttagttttgatacatatctgcagg

SEQ ID NO: 49556 - DNA, 75 bp, synthetic construct
  source 1..75: mol_type = other DNA
cgattctgaaacgctggccgcaacaccaaaagcagtgaagtctgcctatgacaatgctgaaaaacgtcttcagaa

SEQ ID NO: 49557 - DNA, 75 bp, synthetic construct
  source 1..75: mol_type = other DNA
cgcaaaaacagccgcattccctgcgggaaatagctggcatgacgtaagactggataatcaacagcatattgataa

SEQ ID NO: 49558 - DNA, 75 bp, synthetic construct
  source 1..75: mol_type = other DNA
aaatgccgattgatatggcatttgctgctgcgggctatggctttatttatggtttatggcctattgcgtggatta

SEQ ID NO: 49559 - DNA, 75 bp, synthetic construct
  source 1..75: mol_type = other DNA
gagtcgttacatttgagacgcgggatattgcgcttgatattattgacgatccagacatcccgatggctgcatttt

SEQ ID NO: 49560 - DNA, 75 bp, synthetic construct
  source 1..75: mol_type = other DNA
tgcgcgccgcagtcgtgttgaatgggaaaacaaacagcgcaaaaagcaggggctggataccctgggtatggatga

SEQ ID NO: 49561 - DNA, 75 bp, synthetic construct
  source 1..75: mol_type = other DNA
tcgtggtgaggatctcagccatgctgacttctccctgaaaatcaatcagggacgtcacctggtggatgcaggcgg

SEQ ID NO: 49562 - DNA, 75 bp, synthetic construct
  source 1..75: mol_type = other DNA
gcatcagattcttttcttgaaaactctttcaatggtatcaaggactatcttgtcggggttggcaaagaaggtgat

SEQ ID NO: 49563 - DNA, 75 bp, synthetic construct
  source 1..75: mol_type = other DNA
tgattaaagaaatcaaagagcgcataggcagcctggacgttcgagacaatattgagcgccgtgcttatgaaattg

SEQ ID NO: 49564 - DNA, 75 bp, synthetic construct
  source 1..75: mol_type = other DNA
tatggaaggtgctgtgcagaaaccagagactgagcaccgtcccgcactggagctggaagagatccccctgctact

SEQ ID NO: 49565 - DNA, 75 bp, synthetic construct
  source 1..75: mol_type = other DNA
atttggcggagattatgatactaaagatggaactggcgtaagagactatattcatgtcatggatctcgccaaagg

SEQ ID NO: 49566 - DNA, 75 bp, synthetic construct
  source 1..75: mol_type = other DNA
cagtctggctgtatctgcaggggtgatccatgccctgcgtcgtgacccggacaatatgtccctgacgtcacggct

SEQ ID NO: 49567 - DNA, 75 bp, synthetic construct
  source 1..75: mol_type = other DNA
gcgactatggtaatggtgcatcaggtgctgatgatgttgcattagccttcatagatgatgacacttctgattatc

SEQ ID NO: 49568 - DNA, 75 bp, synthetic construct
  source 1..75: mol_type = other DNA
ggcattacaattggctgtgcagattacttgtggtgtagatcttttaaactttggtgaatatccgactgggttggt

SEQ ID NO: 49569 - DNA, 75 bp, synthetic construct
  source 1..75: mol_type = other DNA
atgactacttttaccgacaaagaactgattaaagaaatcagagagcgaatcggcagcctggacgtgcgagacaat

SEQ ID NO: 49570 - DNA, 75 bp, synthetic construct
  source 1..75: mol_type = other DNA
ccactggattgccctgccgatcggctttgctttgttctggcatgacacctggttgcctggcccggaaagcataat

SEQ ID NO: 49571 - DNA, 75 bp, synthetic construct
  source 1..75: mol_type = other DNA
ttaagaacacagtaacatttagtgtagataaagacagcttgaaaaaagcgaaagactctattacaggcttaaagg

SEQ ID NO: 49572 - DNA, 75 bp, synthetic construct
  source 1..75: mol_type = other DNA
tgctgacaatcaagcagtggcgcgaaacatacggaccgggtagcaacgttgtactgccagcagaagaagcagaag

SEQ ID NO: 49573 - DNA, 75 bp, synthetic construct
  source 1..75: mol_type = other DNA
atgaccactattaccaaagaacgtattgaattgttcattaaaaatccgcttgaaaacgggcttactcgtgacgaa

SEQ ID NO: 49574 - DNA, 75 bp, synthetic construct
  source 1..75: mol_type = other DNA
gttgaataatgacaactttgcaccaggaaaaacggcggctgattattcgttttcaagctcggcctcctgggtagg

SEQ ID NO: 49575 - DNA, 75 bp, synthetic construct
  source 1..75: mol_type = other DNA
gtgtctctcactgtacctctgatggaaaatttgtttgcaatgatggaaccatcagtaaatccaaaaaaacatgca

SEQ ID NO: 49576 - DNA, 75 bp, synthetic construct
  source 1..75: mol_type = other DNA
cttatggcaaaactggtcactttggcaattctgatgaaccgagtgattatgctggcccgggtgatgttgcaatgt

SEQ ID NO: 49577 - DNA, 75 bp, synthetic construct
  source 1..75: mol_type = other DNA
atctgcgccagaaagtgaataaacgcactgaaaaagagtgggataaagccgacgccgcttttgataaccgcgata

SEQ ID NO: 49578 - DNA, 75 bp, synthetic construct
  source 1..75: mol_type = other DNA
gcgggcggcatatgtgcataaagcagagcatctggaggccagaaaggccatgatgcagtggtggtcggattatct

SEQ ID NO: 49579 - DNA, 75 bp, synthetic construct
  source 1..75: mol_type = other DNA
aggcgttaaccgctttgctttttatggtcttccggaatcaagcggcaaacgttgggccactgagcgcgaatatgc

SEQ ID NO: 49580 - DNA, 75 bp, synthetic construct
  source 1..75: mol_type = other DNA
attccgtgcgtaaccgctggttcagcgtgatggcggggccgtctgtacgcgtgaatgaatggttcagcgcgtatg

SEQ ID NO: 49581 - DNA, 75 bp, synthetic construct
  source 1..75: mol_type = other DNA
gtgtctgatgccgtgctctcgctgattaaaacccgccgaaccgggccgctgtacgatgtcgattatctccggttt

SEQ ID NO: 49582 - DNA, 75 bp, synthetic construct
  source 1..75: mol_type = other DNA
atgaccatcagaaaacagccgaacggaaaatggttgtgtgagtgctatcccaatggacgcaatggtaagcgcgtg

SEQ ID NO: 49583 - DNA, 75 bp, synthetic construct
  source 1..75: mol_type = other DNA
ctgggccactggtcagcccccaacccgcttgctgggctgccaacatttaaaattgctgagagtgaattggcgttc

SEQ ID NO: 49584 - DNA, 75 bp, synthetic construct
  source 1..75: mol_type = other DNA
ctggctggggatgcgggagactgcggcaaaaagttttgtcgatgaggtggaggcggcctggtcggaatacgccga

SEQ ID NO: 49585 - DNA, 75 bp, synthetic construct
  source 1..75: mol_type = other DNA
atccgttacctgaagcggcagaaaagttaggatgtacaataagggatctctatcatttcgctagtacaggtgcca

SEQ ID NO: 49586 - DNA, 75 bp, synthetic construct
  source 1..75: mol_type = other DNA
aggttcactcgcgccggctggctaatctcgaatacctgaaatcctgtgagctggaaaacaaagttaccggcgaac

SEQ ID NO: 49587 - DNA, 75 bp, synthetic construct
  source 1..75: mol_type = other DNA
gtggtgtatgtcataccgatcttcatgttaagaatggcgattttggtgacaaaaccggcgtgattctgggacacg

SEQ ID NO: 49588 - DNA, 75 bp, synthetic construct
  source 1..75: mol_type = other DNA
gtttacggatgaggcgcaggctcacctctatggtcatgttgctggcgctgcacgtgctttcaatatttccccgct

SEQ ID NO: 49589 - DNA, 75 bp, synthetic construct
  source 1..75: mol_type = other DNA
agagaatgtctggaatagtgaggttatctttgcggagattaaggcaatgggttatacgggcggacgttccatgct

SEQ ID NO: 49590 - DNA, 75 bp, synthetic construct
  source 1..75: mol_type = other DNA
cgccggatacggatattgccgacccgcaggcagacaacttgccacccgccaaaccgttcgaccagattgaggagt

SEQ ID NO: 49591 - DNA, 75 bp, synthetic construct
  source 1..75: mol_type = other DNA
cagttaataaacagcatcgatatcctccgggctcgccgggcaacaggcctgatgacccgcgacaattacagaacg

SEQ ID NO: 49592 - DNA, 75 bp, synthetic construct
  source 1..75: mol_type = other DNA
gtacgcctttttcagcgcagtacgcgagaaattacgctgacgaaagaaggtgaaatactgcttgagcacatacag

SEQ ID NO: 49593 - DNA, 75 bp, synthetic construct
  source 1..75: mol_type = other DNA
tatcggccacgttgaccaaggtaaaactacgctgaccgctgcaatcacgaccgtactggctaaaacctacggcgg

SEQ ID NO: 49594 - DNA, 75 bp, synthetic construct
  source 1..75: mol_type = other DNA
cgaattctgagcatgctattgcgaacagacaaacattatgcaggaaagtactggacaggaaaacatcgaacctgg

SEQ ID NO: 49595 - DNA, 75 bp, synthetic construct
  source 1..75: mol_type = other DNA
ggacaggcagccagcgcagcttgtgccggtgaaagactgaaggttattgcagctaaaggaggttatgaaaccgga

SEQ ID NO: 49596 - DNA, 75 bp, synthetic construct
  source 1..75: mol_type = other DNA
agttctttgaccgggtggatcacagactcctgatgacgcgtctggccagaacgataaaggacaggcgggtgctga

SEQ ID NO: 49597 - DNA, 75 bp, synthetic construct
  source 1..75: mol_type = other DNA
aggctgaacacggcccggactcacaggtgattttactgacgcccgatgctgatatggcgcgtcgcgttgccgagg

SEQ ID NO: 49598 - DNA, 75 bp, synthetic construct
  source 1..75: mol_type = other DNA
tattcccgggggatgaggtgtttgtcagaactgttgaaggacacaacatgatcaaagttcttggctatgacagag

SEQ ID NO: 49599 - DNA, 75 bp, synthetic construct
  source 1..75: mol_type = other DNA
cagcatattgaggcagggatttcactgtgtgacgcggtgaaatttctcgttgaaaaatacgcgctggtacgtacc

SEQ ID NO: 49600 - DNA, 75 bp, synthetic construct
  source 1..75: mol_type = other DNA
atgcagaatattattcttttatttatatatttattacttatagccgttaaccatttccgctacaaatttctttta

SEQ ID NO: 49601 - DNA, 75 bp, synthetic construct
  source 1..75: mol_type = other DNA
gccgagagcgtggaacgcgccatcggctgggcgcgccttcaccgggtccgccagttccagttctttggcatcccc

SEQ ID NO: 49602 - DNA, 75 bp, synthetic construct
  source 1..75: mol_type = other DNA
tatcggccacgttgaccaaggtaaaactaccctgaccgctgcaatcaccaccgtactggctaaaacctacggcgg

SEQ ID NO: 49603 - DNA, 75 bp, synthetic construct
  source 1..75: mol_type = other DNA
tcaatatcattattactcatgaacctacattttattcttatgctgatctggagggagaagatcttgagttttcat

SEQ ID NO: 49604 - DNA, 75 bp, synthetic construct
  source 1..75: mol_type = other DNA
atatacctgcattccaaataatttcagacagatattatcgttgtgaatcccccgccacctttccggtgcgcgggg

SEQ ID NO: 49605 - DNA, 75 bp, synthetic construct
  source 1..75: mol_type = other DNA
tgctggcggagtcattgatcgggacaccattaaatggtggcttaagcaatcacgcgaagcgcaatctgccattat

SEQ ID NO: 49606 - DNA, 75 bp, synthetic construct
  source 1..75: mol_type = other DNA
cctggcagatcgcggagcttacacgggcgtcattgccagctggttgcatacccgcgaacccgcgaagaaagaaag

SEQ ID NO: 49607 - DNA, 75 bp, synthetic construct
  source 1..75: mol_type = other DNA
cacaaactatccgcgttttcaatttacttgatggaaccaatgagtttattggcgaaagtgatgcatatattccgc

SEQ ID NO: 49608 - DNA, 75 bp, synthetic construct
  source 1..75: mol_type = other DNA
ctggaacatctgcgcaaactcaccagtcacgaacccgtgattggcattatgggtaaaagcggggccggtaaatct

SEQ ID NO: 49609 - DNA, 75 bp, synthetic construct
  source 1..75: mol_type = other DNA
ttctcaacgtatttgtacgccatattgcgaataatcaacttcgttctctggccgaggtagccacggtggcgcatc

SEQ ID NO: 49610 - DNA, 75 bp, synthetic construct
  source 1..75: mol_type = other DNA
gtgtgcacgcatccggataactggaagctggtaagacgtaaaccggaagcggaagacagcgcccgcgaaaatggt

SEQ ID NO: 49611 - DNA, 75 bp, synthetic construct
  source 1..75: mol_type = other DNA
ctcagtatgtaagcagtaatctgctgaagaaaattgaagcggcaattgctctatacatgcagaagaactacaggg

SEQ ID NO: 49612 - DNA, 75 bp, synthetic construct
  source 1..75: mol_type = other DNA
aggtgagcgccacaatgcgctggatgatgcccgttaccaggcaaaatacgtttcaactatctggcaaaaactgat

SEQ ID NO: 49613 - DNA, 75 bp, synthetic construct
  source 1..75: mol_type = other DNA
cgtatcaggaaacctttaatgaagaaaatctggatgaatctcaggaaaaagatccggaggaaatggaaggcgctg

SEQ ID NO: 49614 - DNA, 75 bp, synthetic construct
  source 1..75: mol_type = other DNA
tatcggccacgttgaccaaggtaaaactacactgaccgctgcaatcacaaccgtactggctaaaacctacggcgg

SEQ ID NO: 49615 - DNA, 75 bp, synthetic construct
  source 1..75: mol_type = other DNA
actggcggcccccaaacgtcctgcgggaccaacgccaattgagttgctgaaacaggaatatgaacgccggaaagc

SEQ ID NO: 49616 - DNA, 75 bp, synthetic construct
  source 1..75: mol_type = other DNA
cgatcgcgatgtacgcacaatcgttgagctggggaaagccatagacttcgatgccagaactgctatcccattcga

SEQ ID NO: 49617 - DNA, 75 bp, synthetic construct
  source 1..75: mol_type = other DNA
tcctgaacgtccagctgctgcagaacagcatggacgcgccgagaattatcggatctttcccgtgtaagaaagtcg

SEQ ID NO: 49618 - DNA, 75 bp, synthetic construct
  source 1..75: mol_type = other DNA
ttatattacccataagcattattattagtcttgttgcgaaacagctaaatgctagcaaccttgttcagtctatag

SEQ ID NO: 49619 - DNA, 75 bp, synthetic construct
  source 1..75: mol_type = other DNA
cagcatattgaggcaggcatttcactgtgcgatgcggtgaactttctcgttgaaaaatacgcactggtgcgtacc

SEQ ID NO: 49620 - DNA, 75 bp, synthetic construct
  source 1..75: mol_type = other DNA
ggaagtatgaacttgggcaattccatgagtacgctaaaggactagttgaggggctgttagatggtaatgttgaga

SEQ ID NO: 49621 - DNA, 75 bp, synthetic construct
  source 1..75: mol_type = other DNA
ctccgttgcgattggttcacatggacacaccatcaccgttaacgctgctggtaacgcggaaaacaccgtcaaaaa

SEQ ID NO: 49622 - DNA, 75 bp, synthetic construct
  source 1..75: mol_type = other DNA
ttaagacgtaagatgcgaaaagcagctatggacagaaactatctggcgtcagtccttgcggagagcgggctttcg

SEQ ID NO: 49623 - DNA, 75 bp, synthetic construct
  source 1..75: mol_type = other DNA
ctcacagcgatgaatataaaatgccaggttattgccccttcccggataccaaaatcaccgacagacagaatcaaa

SEQ ID NO: 49624 - DNA, 75 bp, synthetic construct
  source 1..75: mol_type = other DNA
cgttacagaccttgagtggtcacaggtcgatctggataagaaaatggcatggatgcaccctgatgaaacaaaagc

SEQ ID NO: 49625 - DNA, 75 bp, synthetic construct
  source 1..75: mol_type = other DNA
aaaatttccgttttcatgacctccgccatacctgggccagttggttaattcagtcaggtgtaccactgtcagtac

SEQ ID NO: 49626 - DNA, 75 bp, synthetic construct
  source 1..75: mol_type = other DNA
atgcaggttgagccggggcgttatcgtgtgaccttgtgcgtggaaggtcgtcagccggcatgcgccggcgagatt

SEQ ID NO: 49627 - DNA, 75 bp, synthetic construct
  source 1..75: mol_type = other DNA
cggagtataaaccaaagctggcaagcaaaggaacgaagacgcggcatctggcaatacttcgcgctattctcaata

SEQ ID NO: 49628 - DNA, 75 bp, synthetic construct
  source 1..75: mol_type = other DNA
cagagccgggggaaatccggcgttttgttcagcaggcggtggatcactggccacatctgctggcaatccacttca

SEQ ID NO: 49629 - DNA, 75 bp, synthetic construct
  source 1..75: mol_type = other DNA
gcaaaaattaacgaggtatgcgagttcatcaaagacagtattttaatgtcgatgaatgatgtgaatttggcaaag

SEQ ID NO: 49630 - DNA, 75 bp, synthetic construct
  source 1..75: mol_type = other DNA
gttttaaagccgtgagtccgaaacgggtggacacgccaggacacggtatggggaaccgttttctgcgggccgggg

SEQ ID NO: 49631 - DNA, 75 bp, synthetic construct
  source 1..75: mol_type = other DNA
caacggaagtaaagagctggttacaggagcgcggcagccacgtcaacgaatcctggctgggcgtggcccgcccgg

SEQ ID NO: 49632 - DNA, 75 bp, synthetic construct
  source 1..75: mol_type = other DNA
aagctatgtttcatggtcaaccacttggctttaccactattaacaattatcaatatggagatgacatattacaac

SEQ ID NO: 49633 - DNA, 75 bp, synthetic construct
  source 1..75: mol_type = other DNA
ggcctgggcggagaatgctcggtattacgccgatactcaggatttatacagcctgccggagaaagcggcagatat

SEQ ID NO: 49634 - DNA, 75 bp, synthetic construct
  source 1..75: mol_type = other DNA
ctgaaaagagcagcagccgggaaggcagctacatggagggggcagaaggtaacgtgttcgttctgagaaaaacct

SEQ ID NO: 49635 - DNA, 75 bp, synthetic construct
  source 1..75: mol_type = other DNA
aaaagtggaacacaatatcgacggaagcggcttcaccacaaggcttgaactggaggcaagaatacccgagtggat

SEQ ID NO: 49636 - DNA, 75 bp, synthetic construct
  source 1..75: mol_type = other DNA
atggcacaagcaagttacagcaagctaacacagcgagaaattgatcgcgcagaaacagatttactcatcaacctg

SEQ ID NO: 49637 - DNA, 75 bp, synthetic construct
  source 1..75: mol_type = other DNA
ttcaatgttacggtgataacgccaaaggaggttgcatatgggaaatatgattcttttgcgtataaaggcgatacg

SEQ ID NO: 49638 - DNA, 75 bp, synthetic construct
  source 1..75: mol_type = other DNA
tactggctaagccgggcaccatcaagccgcacaccaagttcgaatctgaagtgtacattctgtccaaagatgaag

SEQ ID NO: 49639 - DNA, 75 bp, synthetic construct
  source 1..75: mol_type = other DNA
ctggggaatccgcgcaaccgccgcaacgagatgatggcctgcgtcagagggatggaacaggtcgccgaatcgcgt

SEQ ID NO: 49640 - DNA, 75 bp, synthetic construct
  source 1..75: mol_type = other DNA
agctgaaaaaagaagtcgaatctcagaaagaattattgctgcgcgcctgcctcgaagcgttcaaccagctgccta

SEQ ID NO: 49641 - DNA, 75 bp, synthetic construct
  source 1..75: mol_type = other DNA
cattgacggcagcatccatcgctgggcaaaaaaagaagttatcgacaacgaccgcgaagactggaagcgtatctc

SEQ ID NO: 49642 - DNA, 75 bp, synthetic construct
  source 1..75: mol_type = other DNA
gcagaacttcgcgccctgccctcgtttcttggcaacgcgctcattcgtgatctggcgcgtttaaaccgcaaacag

SEQ ID NO: 49643 - DNA, 75 bp, synthetic construct
  source 1..75: mol_type = other DNA
tttatttaagcgaaggttttaatccgcgaatagaaagtttgatgaccgcgttctatttttcgatagaaaccatgt

SEQ ID NO: 49644 - DNA, 75 bp, synthetic construct
  source 1..75: mol_type = other DNA
ttattcattctgaaaacgcattaatccgcgcaaaggaaatggaggcattattacttaagttaatggaagtgccgg

SEQ ID NO: 49645 - DNA, 75 bp, synthetic construct
  source 1..75: mol_type = other DNA
ttaacgcctgttattaatgaattaaatacagtgatggcaattcacgagaataataactcgccccataccggagaa

SEQ ID NO: 49646 - DNA, 75 bp, synthetic construct
  source 1..75: mol_type = other DNA
cggtgttcggcgcggtgattgtcgcgaatgccatcgtggcgcgtttcgttaaagatccgaccgaaccgcgcttta

SEQ ID NO: 49647 - DNA, 75 bp, synthetic construct
  source 1..75: mol_type = other DNA
gtatgtcgtcaatggtaaatacctgatctacaccaagagtattaaatctattgactcaatggcagaccttatccg

SEQ ID NO: 49648 - DNA, 75 bp, synthetic construct
  source 1..75: mol_type = other DNA
atgaatagtctacccgctggatgggcgcggccactaatggccaggaagcatcatttttttaaaacaggcgaaaat

SEQ ID NO: 49649 - DNA, 75 bp, synthetic construct
  source 1..75: mol_type = other DNA
caaactcggccgcagttcccgctggctgaaaagcgaagtggaagcctggctgcaggcgcgtattgcacagtcccg

SEQ ID NO: 49650 - DNA, 75 bp, synthetic construct
  source 1..75: mol_type = other DNA
atgaggcctgtcagtttcttaagatatccagaccaaccgccaccaactggatacgaacaggccgcctacaggcaa

SEQ ID NO: 49651 - DNA, 75 bp, synthetic construct
  source 1..75: mol_type = other DNA
gcattaagaaaagggaaagaaccaccagcctatatacctaaatcggtgagcacgcaaacaaaagcaacacacctg

SEQ ID NO: 49652 - DNA, 75 bp, synthetic construct
  source 1..75: mol_type = other DNA
ctgaacgatgcacgttaccaggcgaaatacgtttcagccatctggcaaaaactgctcccgagtcaggctgatttt

SEQ ID NO: 49653 - DNA, 75 bp, synthetic construct
  source 1..75: mol_type = other DNA
ccatgacgcggatgatgagatgctgatggacaaggttcgtcaggctaccgccgtgctgctggcctacattcaggg

SEQ ID NO: 49654 - DNA, 75 bp, synthetic construct
  source 1..75: mol_type = other DNA
cggatattttggctatcagcgttcacgctggagtacagaactgctggcaataaaaatcaacgagataaccgagtg

SEQ ID NO: 49655 - DNA, 75 bp, synthetic construct
  source 1..75: mol_type = other DNA
ggccgcagctcccgatggctgaaaagtgaagtggaagcctggttgcaggcgcgtattgcacaatcccgtccgtaa

SEQ ID NO: 49656 - DNA, 75 bp, synthetic construct
  source 1..75: mol_type = other DNA
agcagcatgaacgctacgaagccgtagcggtgcaggttttgcgtggtcgtgccggttacaagcctgccgtgaaaa

SEQ ID NO: 49657 - DNA, 75 bp, synthetic construct
  source 1..75: mol_type = other DNA
agcacctctcatatctcgaaagcaccaatatcacgttaattgatatgggcatggaatatgagcagcgcaaaggag

SEQ ID NO: 49658 - DNA, 75 bp, synthetic construct
  source 1..75: mol_type = other DNA
aagacttgcaggtactggtagaaatcgttcacagcgggagttttagcgccgcagcggcgacgcttgggcagacgc

SEQ ID NO: 49659 - DNA, 75 bp, synthetic construct
  source 1..75: mol_type = other DNA
gcagttaatattgcatatcttccaggagagaaaagatttgaatctgctcgtatcaatacccaagttcataccaat

SEQ ID NO: 49660 - DNA, 75 bp, synthetic construct
  source 1..75: mol_type = other DNA
cctgaaatcgccgcccgctatcgtcgccagctaaaagcccgtatcagtgccgcaaacaactttaagccaatgtgc

SEQ ID NO: 49661 - DNA, 75 bp, synthetic construct
  source 1..75: mol_type = other DNA
attcctgttaccccggatgataaagcatggcaggaaagtattaagaccgctctcgcgttaagcgctgctggcgtt

SEQ ID NO: 49662 - DNA, 75 bp, synthetic construct
  source 1..75: mol_type = other DNA
gtttgtgttgctctggaaataagtaactcacgcgatgctctaaaagcactagatgcggatgaaaagaaaaccgtc

SEQ ID NO: 49663 - DNA, 75 bp, synthetic construct
  source 1..75: mol_type = other DNA
ggttttggccacctggcgataccgcgtgtgggtcaggaggtgattgtagacttcctcaacggcgatccggaccag

SEQ ID NO: 49664 - DNA, 75 bp, synthetic construct
  source 1..75: mol_type = other DNA
gccccgcgtcgaacaatactcaattgacgaatgtttcctggatgcccggggaattagccactgtatggatctgga

SEQ ID NO: 49665 - DNA, 75 bp, synthetic construct
  source 1..75: mol_type = other DNA
ttcatgtgacattcagacttacagaagaagagtatgctccatttgacagagcaatcagagagcttgaaattagta

SEQ ID NO: 49666 - DNA, 75 bp, synthetic construct
  source 1..75: mol_type = other DNA
gattttataacaattacaggagatgctgggtgtaggaagacactctccgctattttcgagaaacacgccatagat

SEQ ID NO: 49667 - DNA, 75 bp, synthetic construct
  source 1..75: mol_type = other DNA
aaacacttccacagccccgactgtacctggtggaggagtgcgctgaagaacagacgaaagccgcacctttaccgg

SEQ ID NO: 49668 - DNA, 75 bp, synthetic construct
  source 1..75: mol_type = other DNA
gcactgtttctgttggtgatgtgtttgtatcttcctggggatatgagcaaacgaacgttaatttctaccaggtta

SEQ ID NO: 49669 - DNA, 75 bp, synthetic construct
  source 1..75: mol_type = other DNA
tctaaccaccacggtgcgttgctacaggctggcgcgacaccggtttatctggaaaccgcacgtaacccgtatggt

SEQ ID NO: 49670 - DNA, 75 bp, synthetic construct
  source 1..75: mol_type = other DNA
aagcagtgaatgcggataactcccgttcacgctgtaaggtagtagcttacgctgctgatccagtgctgcaagatc

SEQ ID NO: 49671 - DNA, 75 bp, synthetic construct
  source 1..75: mol_type = other DNA
ggcagcaacgtattcgtgagacggtgcggcacgcactggatgttcatccccgcctgacggcattgcgggttgacc

SEQ ID NO: 49672 - DNA, 75 bp, synthetic construct
  source 1..75: mol_type = other DNA
atgagcgaagtaacggacttaactgtcatcgaaatcaagccggaacaggccccagtgctttacgtagcgggcggc

SEQ ID NO: 49673 - DNA, 75 bp, synthetic construct
  source 1..75: mol_type = other DNA
gcggcgctcaaagcgattagcgctatccagcgtttgggtaaacaagtcgggatcccgaaagatctcaagagcctg

SEQ ID NO: 49674 - DNA, 75 bp, synthetic construct
  source 1..75: mol_type = other DNA
tgaagtgctgacgctcaagacaccttttaacattgtaatgaatatgattgatcaggctttagaggagacagcaga

SEQ ID NO: 49675 - DNA, 75 bp, synthetic construct
  source 1..75: mol_type = other DNA
tttcgctgggcagggcattcagcagcagtggcagatgaaacgcgagatattttcgcaccggtatacaactagatt

SEQ ID NO: 49676 - DNA, 75 bp, synthetic construct
  source 1..75: mol_type = other DNA
gcaggaagtttctaaaaccacttaacccacaatatccgatgatcgagatcaacggaaactgcaaaatcatcggcg

SEQ ID NO: 49677 - DNA, 75 bp, synthetic construct
  source 1..75: mol_type = other DNA
ctgataaagacagtttgctggcgttaataaaacaaagaccaatgccagaaaactattcccatcgaataatggaaa

SEQ ID NO: 49678 - DNA, 75 bp, synthetic construct
  source 1..75: mol_type = other DNA
taaaaaacactatcacctgatgctgctggtcaaccgggatacctggtgtcgtgccggtgattaccgcgctccggg

SEQ ID NO: 49679 - DNA, 75 bp, synthetic construct
  source 1..75: mol_type = other DNA
gttgatgacgcagaggtaatagctaaagctttgggcgtcgctccggcagaactgctttttggcgacaactatcag

SEQ ID NO: 49680 - DNA, 75 bp, synthetic construct
  source 1..75: mol_type = other DNA
caagcaatgatgaacgtcagtcagtttctttgcagcgtgatgcgttgattgctgccggagtggatccccggcatt

SEQ ID NO: 49681 - DNA, 75 bp, synthetic construct
  source 1..75: mol_type = other DNA
cccgttatttcgcaaaaatgtattacgcgcttataactaccagtgcgcgatatgtggctttaatatgcgccacga

SEQ ID NO: 49682 - DNA, 75 bp, synthetic construct
  source 1..75: mol_type = other DNA
ccacaagccgtctgaagctgacagacttaaagcgattattagcgaaccgacgtttaaccttgagcgcaagggaat

SEQ ID NO: 49683 - DNA, 75 bp, synthetic construct
  source 1..75: mol_type = other DNA
atccatccagtcatcggttcgtctgagaatgacgtgcaactgcgcacgcgacacccggagacaacggctgactaa

SEQ ID NO: 49684 - DNA, 75 bp, synthetic construct
  source 1..75: mol_type = other DNA
agcttgccaacaaggaattgagccgtcgggagaaaactgtcgactcgctggttcatcaaaccgcggaagggatcg

SEQ ID NO: 49685 - DNA, 75 bp, synthetic construct
  source 1..75: mol_type = other DNA
tggcatcatccgggtttggtgttgattcatgcggagggagtagaaacgcctcagcctgaattgaccgaggcggta

SEQ ID NO: 49686 - DNA, 75 bp, synthetic construct
  source 1..75: mol_type = other DNA
tcaccaacaacacgggctggcggcagccacagcagcatttaaagattcgatgtaccagccacgggggaaaggggc

SEQ ID NO: 49687 - DNA, 75 bp, synthetic construct
  source 1..75: mol_type = other DNA
ttcaggtgcaaatcgtaacacactcattgcgggaggaattatggcaaacactgctgagatattcaattttccagt

SEQ ID NO: 49688 - DNA, 75 bp, synthetic construct
  source 1..75: mol_type = other DNA
agaaattatgcgtggcagtctcctttcggtccataatagcagaacaaaagaaagagccagaaatgacggtcagat

SEQ ID NO: 49689 - DNA, 75 bp, synthetic construct
  source 1..75: mol_type = other DNA
ttgtgttgttatcgctggcggtggcgggtctgtttctggcgaagcataaaaacgccagcctgcgcacctcactgg

SEQ ID NO: 49690 - DNA, 75 bp, synthetic construct
  source 1..75: mol_type = other DNA
atgaatccactgaaagccggtgatatcgcaccgaaatttagcttgccggatcaagacggagaacaagttaatttg

SEQ ID NO: 49691 - DNA, 75 bp, synthetic construct
  source 1..75: mol_type = other DNA
gccagaaacggaaaaaaccagcccggatatgaatcaacctgagccagtagtgcaacaggaaccggaaatagcctg

SEQ ID NO: 49692 - DNA, 75 bp, synthetic construct
  source 1..75: mol_type = other DNA
ttttctggttgccagcacaactgttgaatgcggacgttatccggttgagattttcatgatgggcgaagaagcaaa

SEQ ID NO: 49693 - DNA, 75 bp, synthetic construct
  source 1..75: mol_type = other DNA
atggcggaaatagcggttataaaccataaaaaacgtaaaaatagcccgcggattgtccagtcaaatgagctgact

SEQ ID NO: 49694 - DNA, 75 bp, synthetic construct
  source 1..75: mol_type = other DNA
acaacgtaatgcgttgagctgtgcaggatgcgagctgatttttgaagacaagataagcggtacaaagtccgaaac

SEQ ID NO: 49695 - DNA, 75 bp, synthetic construct
  source 1..75: mol_type = other DNA
caacaaatgaggcgttgcagccgttttttaacagcgatgaactgtttcgccgtattggtggaattgacgcgctgg

SEQ ID NO: 49696 - DNA, 75 bp, synthetic construct
  source 1..75: mol_type = other DNA
gtgaaagccgtaattactccctttgtacagaaagagcttggcctcgccacgttcaaagtggatcaggaggtcaga

SEQ ID NO: 49697 - DNA, 75 bp, synthetic construct
  source 1..75: mol_type = other DNA
gcccggtggaaattacccagtgggatcaggtgctggatatgctggaggcgcatagcgacagttccattgttccgt

SEQ ID NO: 49698 - DNA, 75 bp, synthetic construct
  source 1..75: mol_type = other DNA
gatgagcaaaaaacgcattacagcgatacccgctggcatgaagattccgtgcgtaaccgctggttcagcatgatg

SEQ ID NO: 49699 - DNA, 75 bp, synthetic construct
  source 1..75: mol_type = other DNA
cgtggggggctggcgtgcagtttaacccgaccgaatccgtgaccattgaccttgcttatgaaggttccggtagtg

SEQ ID NO: 49700 - DNA, 75 bp, synthetic construct
  source 1..75: mol_type = other DNA
gatggctcaggtgtcgtgtccctgaaaatcgactggatcatggaacgctaccagctacctcaaagttaccagcgt

SEQ ID NO: 49701 - DNA, 75 bp, synthetic construct
  source 1..75: mol_type = other DNA
ggccgcacctgatggcggtgattcgctgctggtttcggcggtaaaacgcctgagcgatcgcctcggtatcactgt

SEQ ID NO: 49702 - DNA, 75 bp, synthetic construct
  source 1..75: mol_type = other DNA
accgtgacggaagggctttctcaggcaacagagcagcttgccgttgagcagtcccgtctggcacagatgcaggaa

SEQ ID NO: 49703 - DNA, 75 bp, synthetic construct
  source 1..75: mol_type = other DNA
ttttcccgcgaggcgctgctgcgcgccctgaaaaccggtcataaccagatttttctgtcggccagtaaaacgcag

SEQ ID NO: 49704 - DNA, 75 bp, synthetic construct
  source 1..75: mol_type = other DNA
ctttttctgttatctgaacgatcataacgagaacaccatcgttgacccttcggtgatctattttgatttcgctaa

SEQ ID NO: 49705 - DNA, 75 bp, synthetic construct
  source 1..75: mol_type = other DNA
tcagcttccgccgcatttatgaatatgctggcggcgactggcaggaagataacggtgtctggcaccagaacgtgt

SEQ ID NO: 49706 - DNA, 75 bp, synthetic construct
  source 1..75: mol_type = other DNA
agctgctgctcatccagcatcagaaatggatgacaagcgtgacgaggcttatcgtcgctcatggaatggggtctc

SEQ ID NO: 49707 - DNA, 75 bp, synthetic construct
  source 1..75: mol_type = other DNA
aaccgcccgcgccggtggggagcctcggccccggctggaaaatgcctgcggatatccgcttacagctgcgcgata

SEQ ID NO: 49708 - DNA, 75 bp, synthetic construct
  source 1..75: mol_type = other DNA
attgaatataaaaacgtatggcgcgactacggctttggcgatgcgtcaggttatgttttaacagccgcaattaac

SEQ ID NO: 49709 - DNA, 75 bp, synthetic construct
  source 1..75: mol_type = other DNA
agccgcgttcgggttattttgtcgcacaacgtaaagcccagccgccagtgccgccgatgacgcgtccggtgcagc

SEQ ID NO: 49710 - DNA, 75 bp, synthetic construct
  source 1..75: mol_type = other DNA
gcgtaaccgctggttcagcgtgatggcggggccatctgtgcgcgtgaatgaatggttcagcgtgtatgtgatcgc

SEQ ID NO: 49711 - DNA, 75 bp, synthetic construct
  source 1..75: mol_type = other DNA
aaccgcaatatcgggataacgctacaggagaaggcgattattctattttccggaaacaaggtgaatattcaaaaa

SEQ ID NO: 49712 - DNA, 75 bp, synthetic construct
  source 1..75: mol_type = other DNA
cagtaccggggactatcgcgctgtttggctgtttcttaatcatgatcatcatcctcgccgttctggcgctgattg

SEQ ID NO: 49713 - DNA, 75 bp, synthetic construct
  source 1..75: mol_type = other DNA
agacagaaaacggtgaggttccgtacaccgactggatgaaaaaattaagacgtaaagaccagaccgcagcgttaa

SEQ ID NO: 49714 - DNA, 75 bp, synthetic construct
  source 1..75: mol_type = other DNA
cagagcttgaaagactcaatataacagacggagagatccactctgttgctgtttttacaaagataccgaaaaact

SEQ ID NO: 49715 - DNA, 75 bp, synthetic construct
  source 1..75: mol_type = other DNA
tgccggtgcgctggtggtctgcgatatgttgcaagggcgattaagcgcaccacggcaacgtatgctggaagtcgt

SEQ ID NO: 49716 - DNA, 75 bp, synthetic construct
  source 1..75: mol_type = other DNA
agctatagtatttatattcgagtttattatttcaccagcaaagcaatttaaaaagatattattttttactttgat

SEQ ID NO: 49717 - DNA, 75 bp, synthetic construct
  source 1..75: mol_type = other DNA
tcagacacttgctgataacatgatgcgtaaagctgtcaaagaacactttaagttagaaaaagagtatctgacaca

SEQ ID NO: 49718 - DNA, 75 bp, synthetic construct
  source 1..75: mol_type = other DNA
attttacggaaaaagattttgttgattctcttgtaaaagaggttaatgatagttctttcaaagaaactgttccag

SEQ ID NO: 49719 - DNA, 75 bp, synthetic construct
  source 1..75: mol_type = other DNA
ttctgcgaccctcatcgcccaggaaatccgccagacgatcttcaacgagctgcaactgacggcgtctgcgggcgt

SEQ ID NO: 49720 - DNA, 75 bp, synthetic construct
  source 1..75: mol_type = other DNA
ttccggacgagcggcttcgcaaagttgctaaaccggtagaagaagtgaatgcagaaattcagcgtatcgtcgatg

SEQ ID NO: 49721 - DNA, 75 bp, synthetic construct
  source 1..75: mol_type = other DNA
aagacggtatgtgcgcatctttacaatgcgatggagaaaaatggtatgcgcggcgtcagtattaaatatctctgc

SEQ ID NO: 49722 - DNA, 75 bp, synthetic construct
  source 1..75: mol_type = other DNA
ggtaaaacagcgtattcataaagtaatgcagtgggcctgggctcatgggttctgctcagccaatcctgttgatgt

SEQ ID NO: 49723 - DNA, 75 bp, synthetic construct
  source 1..75: mol_type = other DNA
gcgggatcacggaggcggtgacggtgcctgccagggaagtgatccacgaccggtttaactgtttttttcatccgc

SEQ ID NO: 49724 - DNA, 75 bp, synthetic construct
  source 1..75: mol_type = other DNA
cttatcggcgaacgcagcccgacgctgcgcagcgacatcattacccggcttatcctcctggttgaggatgatgaa

SEQ ID NO: 49725 - DNA, 75 bp, synthetic construct
  source 1..75: mol_type = other DNA
ttgcaaaattgctttctgccgattttgaaaataaatcgaacgggcaacgcgtctatgcaaaaattacgcttaccg

SEQ ID NO: 49726 - DNA, 75 bp, synthetic construct
  source 1..75: mol_type = other DNA
taaatggccgggagtggaatggctggacatcggtgcgtattggtgccggcattgaacggctggcgcgggatttca

SEQ ID NO: 49727 - DNA, 75 bp, synthetic construct
  source 1..75: mol_type = other DNA
catcgtacagatttgttaaatgaacgaaggcctatgatgcaggcatggggagattacgttatgtctgcgatctcc

SEQ ID NO: 49728 - DNA, 75 bp, synthetic construct
  source 1..75: mol_type = other DNA
acgaagccagtaacgatggagtaagtcttgccaactggcttaaagagttggggcgcgccgaactaaagcgacgcg

SEQ ID NO: 49729 - DNA, 75 bp, synthetic construct
  source 1..75: mol_type = other DNA
cactgcctgtcatcaacgacgaacaatccacatcaacaccgttaaccaccgctcagacgatgacgttggctgcgg

SEQ ID NO: 49730 - DNA, 75 bp, synthetic construct
  source 1..75: mol_type = other DNA
ggcgtagtaagtctgctcaggagcaaagagccgcagaacaggctgttcgtgatgcagctaagcaggaagcggttg

SEQ ID NO: 49731 - DNA, 75 bp, synthetic construct
  source 1..75: mol_type = other DNA
gaacgctggccgtcgttaaccgaaaagcggcaattgtccgctatgtgcattcggccgccagcaggcaatcacgca

SEQ ID NO: 49732 - DNA, 75 bp, synthetic construct
  source 1..75: mol_type = other DNA
taatcaccgcgttgattgacggcaagccacaatacttacgcattgaaatgagcggtcaacatgctcgattgattc

SEQ ID NO: 49733 - DNA, 75 bp, synthetic construct
  source 1..75: mol_type = other DNA
atggcggagaaacttgccctgcttgaaaaactgggcatcacgctggatgacctggaaaaactcttcaaatcccgc

SEQ ID NO: 49734 - DNA, 75 bp, synthetic construct
  source 1..75: mol_type = other DNA
cccctcactttgaagggatcggagctataaaaatggtgttatccggcttcctcaaattgaggattgtggaagaat

SEQ ID NO: 49735 - DNA, 75 bp, synthetic construct
  source 1..75: mol_type = other DNA
caggcgctggttaatgtcggcgcacaaatagccgccatgacgccgggcgagctggcatcatggcttgcagagaac

SEQ ID NO: 49736 - DNA, 75 bp, synthetic construct
  source 1..75: mol_type = other DNA
tatattacgcggaaagttaagggagtaacgcagactaacgcaataacaacagacgagtgcgacgcgtttttataa

SEQ ID NO: 49737 - DNA, 75 bp, synthetic construct
  source 1..75: mol_type = other DNA
aacaatggcaggaacatgatgcgcgtatggccggagataatgagcctcctgtgtggcttggggagcagcagttat

SEQ ID NO: 49738 - DNA, 75 bp, synthetic construct
  source 1..75: mol_type = other DNA
ggttttgctgtggctgcgggataaccagtctgatgccatcaataacccgacgttacgggaaaagctattcacctt

SEQ ID NO: 49739 - DNA, 75 bp, synthetic construct
  source 1..75: mol_type = other DNA
cggattcggtaagcccgtaacactgacacgcttcggtaaggatatgccaggggcaatggcggaatacggcaggga

SEQ ID NO: 49740 - DNA, 75 bp, synthetic construct
  source 1..75: mol_type = other DNA
agccttagtacaaaaatcacgctcaatcgccaaatcaaccaaaccctagaacaaatgtcccaaaccttgttcaaa

SEQ ID NO: 49741 - DNA, 75 bp, synthetic construct
  source 1..75: mol_type = other DNA
gatggtggcgctgtttatgatatcgataatctcagggtagtgacacccaagcatcatattgaaattcacagagga

SEQ ID NO: 49742 - DNA, 75 bp, synthetic construct
  source 1..75: mol_type = other DNA
atgctcacgttatgttgacattaaaaaccataggccctgaaggttttggtaaaaaagaaagaagctggaacgaca

SEQ ID NO: 49743 - DNA, 75 bp, synthetic construct
  source 1..75: mol_type = other DNA
aagcgctgattaacgccgtgccgcagctccgaaataatcccgatatgctgcgcctttttgccgacaacggccata

SEQ ID NO: 49744 - DNA, 75 bp, synthetic construct
  source 1..75: mol_type = other DNA
ccatgctggcgggtaaggccaacacagtatcggcaagcatgaaggctctggaagacgcaagggaacgcgcgttag

SEQ ID NO: 49745 - DNA, 75 bp, synthetic construct
  source 1..75: mol_type = other DNA
gcaatgatgcctatgaaaaaataaattcgattattgagaagcgtcgacaggaaggggcaagggaaaaagatgtca

SEQ ID NO: 49746 - DNA, 75 bp, synthetic construct
  source 1..75: mol_type = other DNA
tgtcagagggggtgggggaggttttcaggacgaaaccgtccctgccggacaccgaccgcctcctcaaatttttgt

SEQ ID NO: 49747 - DNA, 75 bp, synthetic construct
  source 1..75: mol_type = other DNA
ggaaagagaaggtcgcctgccggatgccgttatcgcctgtgttggcggtggttcgaatgccatcggtatgtttgc

SEQ ID NO: 49748 - DNA, 75 bp, synthetic construct
  source 1..75: mol_type = other DNA
aacacgtctctggcgtggggggctggcgtgcagtttaacccgaccgaatccgtggccattgatattgcttatgaa

SEQ ID NO: 49749 - DNA, 75 bp, synthetic construct
  source 1..75: mol_type = other DNA
tgtccgcagtagtctggctggttgccgctggtacgccagcgagcgcagcagaacatcagtccacgctgagcgcgg

SEQ ID NO: 49750 - DNA, 75 bp, synthetic construct
  source 1..75: mol_type = other DNA
ctccatcaccacgctggccattgagtgcggactggcgacagagtccggtgcaggaaaactctccatcactcgtgc

SEQ ID NO: 49751 - DNA, 75 bp, synthetic construct
  source 1..75: mol_type = other DNA
gcaatgacccgaattttgctaccaccatgactaatgcgcttgcgggtaagcaaccgaaagatgccactttgacgg

SEQ ID NO: 49752 - DNA, 75 bp, synthetic construct
  source 1..75: mol_type = other DNA
gaaaaaacaccggctccgctctgtttttcgctggggacactgcaggaagcctgctcccggaaatttggtatgggg

SEQ ID NO: 49753 - DNA, 75 bp, synthetic construct
  source 1..75: mol_type = other DNA
gcggagctgttttggattttgggcataagcgttttaaatttgataacgatatcgacttttttgacagacagcgtg

SEQ ID NO: 49754 - DNA, 75 bp, synthetic construct
  source 1..75: mol_type = other DNA
tgaaattgcaccatcggccagactgacccggtcggaaagaatgcaaatcacccgtatccgcgttgaccttgctca

SEQ ID NO: 49755 - DNA, 75 bp, synthetic construct
  source 1..75: mol_type = other DNA
cacgtgctttcaatatttccccgctctactggaaaaaataccgtaaagggcagatgaccacgaggcaggcatatt

SEQ ID NO: 49756 - DNA, 75 bp, synthetic construct
  source 1..75: mol_type = other DNA
gccgccacatacaaacctgcgaacaatggcatgacatggacacatcaggcaccgtccgggtgtgtatataccggc

SEQ ID NO: 49757 - DNA, 75 bp, synthetic construct
  source 1..75: mol_type = other DNA
aagtttaacgctgaacttgcaaaattaaatcaatctcttcgtgaaacgttgaataaactcaggtcacagacaaag

SEQ ID NO: 49758 - DNA, 75 bp, synthetic construct
  source 1..75: mol_type = other DNA
atggcgatttttcatctggattttaaaattgtgaaacgaagcgaaggcatgacttccgttgcgaaagctgcctat

SEQ ID NO: 49759 - DNA, 75 bp, synthetic construct
  source 1..75: mol_type = other DNA
ttacggacacgctggggctggtgacgtcattcagctatgcaggagacaggaatcgccagcttacccgttacagcg

SEQ ID NO: 49760 - DNA, 75 bp, synthetic construct
  source 1..75: mol_type = other DNA
ctggcaacccttacagctattggtcgcgctattatcgctaagggcagtataaaagatgtcctcaattaccttggt

SEQ ID NO: 49761 - DNA, 75 bp, synthetic construct
  source 1..75: mol_type = other DNA
aactttgatttcaaaagtactctgcgcgccaacctgcaacactggcacccgcaacacggcaagttgtatatcgaa

SEQ ID NO: 49762 - DNA, 75 bp, synthetic construct
  source 1..75: mol_type = other DNA
tgtgcagccattttgtccgcagccatctgtctgtccgtatccggtgcgcctgcatgggcgtctgaacatcagtcc

SEQ ID NO: 49763 - DNA, 75 bp, synthetic construct
  source 1..75: mol_type = other DNA
gaatatgcgaatatggtcgaagatatcagggaaaaagtgtcatcggaaatggagagattctttccaaaaaatgat

SEQ ID NO: 49764 - DNA, 75 bp, synthetic construct
  source 1..75: mol_type = other DNA
cgggagatgttggtgcatatacgcaggcagaatgtaactcaaggtttattacaggtattcgccttggcggtctgt

SEQ ID NO: 49765 - DNA, 75 bp, synthetic construct
  source 1..75: mol_type = other DNA
ccttctggcatgatttagcggctccggtcattgctggcattcttgccagcatgatcgtgaactggctgaacaagc

SEQ ID NO: 49766 - DNA, 75 bp, synthetic construct
  source 1..75: mol_type = other DNA
agttcctgcaaggtggaattccgtcacggtaacatgacgctggaaaatccatcgccagagctgctcacggtgttg

SEQ ID NO: 49767 - DNA, 75 bp, synthetic construct
  source 1..75: mol_type = other DNA
attaagccggaacatctgacaacagatccctgcatgaacatttataccggtgcttattatctggcaatagccttt

SEQ ID NO: 49768 - DNA, 75 bp, synthetic construct
  source 1..75: mol_type = other DNA
gcgcgcgctgaatggtttgcttattcatcgggaaaagttaaccccggagcatctgacggcgttaaccgactgctg

SEQ ID NO: 49769 - DNA, 75 bp, synthetic construct
  source 1..75: mol_type = other DNA
cgcgatgatgacaccggctttcagcaggtgctggagcgtgctgactatctggcgaaggagagtaccaaagcttac

SEQ ID NO: 49770 - DNA, 75 bp, synthetic construct
  source 1..75: mol_type = other DNA
cccgaccgaatcagtggccgttgatgtcgcttatgaaggctccggcagtggcgactggcgcactgacggtttcat

SEQ ID NO: 49771 - DNA, 75 bp, synthetic construct
  source 1..75: mol_type = other DNA
atcaagatgtaggaagtcataacaattttgtggggcaggctaataatacaaccattaacggaggaagacagacaa

SEQ ID NO: 49772 - DNA, 75 bp, synthetic construct
  source 1..75: mol_type = other DNA
atgagaaaatggcttctgacgatctgcctgttgtttataaatgtgacctgcgaggctggtgattgctttgatctg

SEQ ID NO: 49773 - DNA, 75 bp, synthetic construct
  source 1..75: mol_type = other DNA
tgaaggcgatgatgatttttcctcgcgctggcgggaaattaaaaagcaatttacccatgcttgtggattgaaaaa

SEQ ID NO: 49774 - DNA, 75 bp, synthetic construct
  source 1..75: mol_type = other DNA
gcaatagcatttaaaaaatggggcgtatcctgggaagccgttggtgcatacaatgccggattcaaaaagagtgaa

SEQ ID NO: 49775 - DNA, 75 bp, synthetic construct
  source 1..75: mol_type = other DNA
gccagttgaacattttcagccgttcgtcttgtttaccaactacacacgttatgtggatgaattcgttcgttgggg

SEQ ID NO: 49776 - DNA, 75 bp, synthetic construct
  source 1..75: mol_type = other DNA
ttcagcaggtgctggaacgtgctgactatctggcgaaggaacataccaaagctcactgcaccggtgagcgcaatt

SEQ ID NO: 49777 - DNA, 75 bp, synthetic construct
  source 1..75: mol_type = other DNA
acgaagaaaaacatcattgtccagttcgaaggtggcgtcccggccaaagccgaaacgacagagctgatttttagt

SEQ ID NO: 49778 - DNA, 75 bp, synthetic construct
  source 1..75: mol_type = other DNA
gttcaccatgataatgagtacactgcaacctttgccggactcggaacccgtgattacagcacgcattcatggtat

SEQ ID NO: 49779 - DNA, 75 bp, synthetic construct
  source 1..75: mol_type = other DNA
gcatatttcagccaatgcgcggtccgatttgcgctcgctgccatcaaatgttcgcctggttgactggatacccat

SEQ ID NO: 49780 - DNA, 75 bp, synthetic construct
  source 1..75: mol_type = other DNA
ggtgaagtgaaaagcgttgaggagatcatggcgaccgttttgcgcgataaaccgttttacgatcgcagcggcggc

SEQ ID NO: 49781 - DNA, 75 bp, synthetic construct
  source 1..75: mol_type = other DNA
ccgatcaaatttgtcatatcagttaccagcttaccgaacaacaaattaactctgcgattacgcgaatggatgcca

SEQ ID NO: 49782 - DNA, 75 bp, synthetic construct
  source 1..75: mol_type = other DNA
agaaacaccagaagcgatgcagcgcgaactcacgatgcgcatcgacaacgttttcgattttttccttaaccagta

SEQ ID NO: 49783 - DNA, 75 bp, synthetic construct
  source 1..75: mol_type = other DNA
tgtgccgttgttggtatggccgacggtgattgctttagctatatttatatccacgttgacttttatgggggaatt

SEQ ID NO: 49784 - DNA, 75 bp, synthetic construct
  source 1..75: mol_type = other DNA
atgcatcagatgtttaccggatttacagcgggataaaaaacagcaaggggatccagcttcgtgcatctgaaaaac

SEQ ID NO: 49785 - DNA, 75 bp, synthetic construct
  source 1..75: mol_type = other DNA
gtattgtctcaggaacaggacggcattaaatcgcacacccacagcgccagcgcatccagtacggatttggggacg

SEQ ID NO: 49786 - DNA, 75 bp, synthetic construct
  source 1..75: mol_type = other DNA
gacctgaatgatattgaaagaataacgtatataaaagcaggcaggaagtttctcgcgcaaatggatagaagacaa

SEQ ID NO: 49787 - DNA, 75 bp, synthetic construct
  source 1..75: mol_type = other DNA
gcgtcgacgggctattgatgcgctgctgcaggggctgtgtttccactatgacccgctggccaaccgtgtccagtg

SEQ ID NO: 49788 - DNA, 75 bp, synthetic construct
  source 1..75: mol_type = other DNA
gtggagtttaacgagcctcgaatgatgctaccaattaaagacagcaacatgaaaagattggttatcgagcaaacg

SEQ ID NO: 49789 - DNA, 75 bp, synthetic construct
  source 1..75: mol_type = other DNA
actggactgaacatacagacagtgaacatcaactacagtctggcaggcaaatcaactccacgccgtgagctggtg

SEQ ID NO: 49790 - DNA, 75 bp, synthetic construct
  source 1..75: mol_type = other DNA
gcgacgttacttatcaaccgtcacggcggcgtactgccgccgctcctggcctccgccattcacaaactgaccgga

SEQ ID NO: 49791 - DNA, 75 bp, synthetic construct
  source 1..75: mol_type = other DNA
cgataggagtagatgcggcgaacatctcgcgcttagaaacgggtaagcaaaaacaatttaccgaacaaacactga

SEQ ID NO: 49792 - DNA, 75 bp, synthetic construct
  source 1..75: mol_type = other DNA
actggactgaacatacagacagtgaacatcaactacagtctggcggggaaatctacgccgcgccgtgaactggta

SEQ ID NO: 49793 - DNA, 75 bp, synthetic construct
  source 1..75: mol_type = other DNA
tattgctcacgttaacgccttgtataactcgagctctccacggtatttaacctctcttctgtttaactataattc

SEQ ID NO: 49794 - DNA, 75 bp, synthetic construct
  source 1..75: mol_type = other DNA
gtcacaaaagtgaacgttgccacagaattaaaaatagccttcgctggcgcggttaaagcctggtttgcggaaaat

SEQ ID NO: 49795 - DNA, 75 bp, synthetic construct
  source 1..75: mol_type = other DNA
agtgaaagccgggcgtggcttgcgcagtgcgggctgacggtggagcaactggccagacaggtggagccggaatac

SEQ ID NO: 49796 - DNA, 75 bp, synthetic construct
  source 1..75: mol_type = other DNA
ggcattctgcccgacagtgtgctcaaacgttatggcgacgtgaccgaagtgaaagcggaaatcatcagcgatgac

SEQ ID NO: 49797 - DNA, 75 bp, synthetic construct
  source 1..75: mol_type = other DNA
atgcgtgatgatcgttttaattccctgaaacgggaatttgatggcgcaccggaagatgcagcgggcgcattgttg

SEQ ID NO: 49798 - DNA, 75 bp, synthetic construct
  source 1..75: mol_type = other DNA
aacaaatacagtattagccctgaaaaatatctcaaggcagccatagcaattttgtacgctgacaatgttttggtt

SEQ ID NO: 49799 - DNA, 75 bp, synthetic construct
  source 1..75: mol_type = other DNA
tgcgcgccgcagtcgtgttgaatgggaaaacagacagcgcaaaaagcagggactggataccctgggtatggatga

SEQ ID NO: 49800 - DNA, 75 bp, synthetic construct
  source 1..75: mol_type = other DNA
gtcgccacagcaacacgtctctggcgtggggagctggcgtgcagtttaacccgaccgaatccgtggccattgata

SEQ ID NO: 49801 - DNA, 75 bp, synthetic construct
  source 1..75: mol_type = other DNA
tagagttgatggctgataatgcagaaaacatctctgactttattcagtcggtggagtttaacgagcctcgaatga

SEQ ID NO: 49802 - DNA, 75 bp, synthetic construct
  source 1..75: mol_type = other DNA
cactcttcagggttatatcgaaaagctataaacaactccttaaaacagttcaaaccagaaatgcatgtaccttct

SEQ ID NO: 49803 - DNA, 75 bp, synthetic construct
  source 1..75: mol_type = other DNA
cgcaccgaggaatgaaagataaatttgtgcgctgggataacccgccaacgcttgacggcatgaccggacacgccg

SEQ ID NO: 49804 - DNA, 75 bp, synthetic construct
  source 1..75: mol_type = other DNA
cgtgcatttttcgattccggtcacaccacataccttccggcacagctatatcatgcacatgctctatcaccgcca

SEQ ID NO: 49805 - DNA, 75 bp, synthetic construct
  source 1..75: mol_type = other DNA
tattctcggtgatattcagactggcttaattaccggtggcctgacagagttggctttcgccggattaacccctgc

SEQ ID NO: 49806 - DNA, 75 bp, synthetic construct
  source 1..75: mol_type = other DNA
atcatggctactgtcccagccctcactcgtctgaatgatgaagacttacataaactcagttatgtaacaactgca

SEQ ID NO: 49807 - DNA, 75 bp, synthetic construct
  source 1..75: mol_type = other DNA
attgaagcgggtcagccgaccgtgtgctcagaaacctgtgtcggtcgtatccgttatctcggcgtgctgttgtac

SEQ ID NO: 49808 - DNA, 75 bp, synthetic construct
  source 1..75: mol_type = other DNA
aaatcgtctgcgtgatgcccttcgtgctcccggtgccggggagctgcttcacccggattacggcacgttaaatgt

SEQ ID NO: 49809 - DNA, 75 bp, synthetic construct
  source 1..75: mol_type = other DNA
ggtcgtatattggtggcggtaagacagggaatatgtttaaccagatgttgacctctaaaaagctgacaaaaacgg

SEQ ID NO: 49810 - DNA, 75 bp, synthetic construct
  source 1..75: mol_type = other DNA
agcgccttgaactggtgcaggattttgtacgtcaggaagctggcgaacggcacgcctggagttttgccattcaca

SEQ ID NO: 49811 - DNA, 75 bp, synthetic construct
  source 1..75: mol_type = other DNA
cagccgtaccgcgattaacaacatcaaaaaattctggtcgctgacggcgaaaggctgcatgttcggcaagaacat

SEQ ID NO: 49812 - DNA, 75 bp, synthetic construct
  source 1..75: mol_type = other DNA
tagaaacctcgaatgttccgctgaatttactgaacacaattttgtgttaagtgaatacaccgacgcatcaggccg

SEQ ID NO: 49813 - DNA, 75 bp, synthetic construct
  source 1..75: mol_type = other DNA
tacccgtgattaccaggctgaactttcacaaaaaccgggggagactctcgtttatgggcctttcaaaaaagatct

SEQ ID NO: 49814 - DNA, 75 bp, synthetic construct
  source 1..75: mol_type = other DNA
ttgagtgtgaaggaccaccagcatattgattctgcaattccgggacgttacactgttcaggcaccttataaagcg

SEQ ID NO: 49815 - DNA, 75 bp, synthetic construct
  source 1..75: mol_type = other DNA
ccggcccagcccgctgcggggggtatatgacagtaataataattttgtcagctgcaaggatgcgtcggtcacgct

SEQ ID NO: 49816 - DNA, 75 bp, synthetic construct
  source 1..75: mol_type = other DNA
gacggttttgcgtttcttgccatgggcttcactggtaaacgtgctgcccagttcaaagaggcatacatcaacgcc

SEQ ID NO: 49817 - DNA, 75 bp, synthetic construct
  source 1..75: mol_type = other DNA
atcgccgccgttttagcgacccggaagcgattgccttgctggttattttggttgctggttttggcattatctttt

SEQ ID NO: 49818 - DNA, 75 bp, synthetic construct
  source 1..75: mol_type = other DNA
tatgaagggagggggatgactaagcgtaaaatggctgaattgctgaatgatgcacatcctgagtggtgttttagc

SEQ ID NO: 49819 - DNA, 75 bp, synthetic construct
  source 1..75: mol_type = other DNA
acatttaatgcccattttcgcgtctatgtaaaattcaaaagccgcccagcaggagatcagacggtgaactttggc

SEQ ID NO: 49820 - DNA, 75 bp, synthetic construct
  source 1..75: mol_type = other DNA
gctgttgctagttatttcggcaaacaacacaaaaatgtcattcaaaaaattgcgtctcttgaatgctctgccgaa

SEQ ID NO: 49821 - DNA, 75 bp, synthetic construct
  source 1..75: mol_type = other DNA
ccgcctgacagcgcgcctcgatgccgatggttacagccaggccagcattatcagcactctggcgatggagggcgt

SEQ ID NO: 49822 - DNA, 75 bp, synthetic construct
  source 1..75: mol_type = other DNA
atgaagttaaaacaacaaactgtgcgactttcacgtcgcaccctcaccgacccgccgtacctcgtcggtttccgt

SEQ ID NO: 49823 - DNA, 75 bp, synthetic construct
  source 1..75: mol_type = other DNA
tcgtcgctttaattttcatggcgaaatctatcagataagaatggaaaatatttcttttgacagtaatgagtcagt

SEQ ID NO: 49824 - DNA, 75 bp, synthetic construct
  source 1..75: mol_type = other DNA
ccactgccgggtatctttccatgatgatcccgccattatcctggatgatggtcaggggactcggggccggatttt

SEQ ID NO: 49825 - DNA, 75 bp, synthetic construct
  source 1..75: mol_type = other DNA
cgccggcgataaaaccgatgaatggctgcaaccagcctgtaatgaaatgtaccgcgtactcaaaaaagacgcgtt

SEQ ID NO: 49826 - DNA, 75 bp, synthetic construct
  source 1..75: mol_type = other DNA
tattttcagatgaatatccggaaataaaatttactcccgcgcaagagaaaactgaaagtaaaccatatgctacat

SEQ ID NO: 49827 - DNA, 75 bp, synthetic construct
  source 1..75: mol_type = other DNA
ggtcggcagtcgcataaccgttcaggggttcatttcatgccacaaggcaaagaacggactgagcaaaatggtttt

SEQ ID NO: 49828 - DNA, 75 bp, synthetic construct
  source 1..75: mol_type = other DNA
acgttgtctggaaggcaggaggccgcgccggggtgacgctgtcgggcactgtcatgcagaccatgcagaatgttg

SEQ ID NO: 49829 - DNA, 75 bp, synthetic construct
  source 1..75: mol_type = other DNA
tgcttttattcagtcacacatcaatcgcatctgtgatgaataataatcatctcgattcctgttttattcaggccg

SEQ ID NO: 49830 - DNA, 75 bp, synthetic construct
  source 1..75: mol_type = other DNA
ctattttggtcgtctggaaaagcagccggagtttgatgctgataaattctggggcgaatacaacgttgatggcct

SEQ ID NO: 49831 - DNA, 75 bp, synthetic construct
  source 1..75: mol_type = other DNA
gtcgggagttaaacctgtctaactcatctgtgcttggggcctgtcagaaactccaggaggctgttggcttaccga

SEQ ID NO: 49832 - DNA, 75 bp, synthetic construct
  source 1..75: mol_type = other DNA
gggcgtacacgaatacgatgataaacggggaaacaaagcccgtggagagattgaattactgttaaaagaaacgga

SEQ ID NO: 49833 - DNA, 75 bp, synthetic construct
  source 1..75: mol_type = other DNA
ggcattgggtaaagacctgtcagataaacccgtggaacatatagatcagaccaatgagagtgacggcagttttct

SEQ ID NO: 49834 - DNA, 75 bp, synthetic construct
  source 1..75: mol_type = other DNA
gttggcttaccgaatctggcaccgcgctatgccattgatgctcctgctgatgcacacgatggctcaagtcgcccc

SEQ ID NO: 49835 - DNA, 75 bp, synthetic construct
  source 1..75: mol_type = other DNA
attgatttgtatcctccggcaaagatatgaagggcgggggatgagtaagcgcaaaatggctgaattgctaaatga

SEQ ID NO: 49836 - DNA, 75 bp, synthetic construct
  source 1..75: mol_type = other DNA
atgactggtgatggtttcgaactcgcattcttatcgcactatattaaatcgttaggcttcacacctgcggaagcc

SEQ ID NO: 49837 - DNA, 75 bp, synthetic construct
  source 1..75: mol_type = other DNA
atatcgcctgtcagggaaacttaaagccgctgataacaatggatcttgccaataacgttgctgctgttgttactg

SEQ ID NO: 49838 - DNA, 75 bp, synthetic construct
  source 1..75: mol_type = other DNA
aataaaacgttgaccgtcacaacatcagctgctgcaccggcacaggacacggcaaccactatctcgccagcagcc

SEQ ID NO: 49839 - DNA, 75 bp, synthetic construct
  source 1..75: mol_type = other DNA
atgatttacccaacgaacacaggaaaaagcggagagcaccttcgtctcaccacgctggaaagtgtctggattcag

SEQ ID NO: 49840 - DNA, 75 bp, synthetic construct
  source 1..75: mol_type = other DNA
tcaaagcagcggcgcaggctgcgcttgatggtaatgcggcgggtgcggaaagagcgctcaaccgtgccggaacgc

SEQ ID NO: 49841 - DNA, 75 bp, synthetic construct
  source 1..75: mol_type = other DNA
tcgcgggaccctgagcaagatatcggtactgaaggagtatgttgaccatctgatgagctacgtggacttctcgaa

SEQ ID NO: 49842 - DNA, 75 bp, synthetic construct
  source 1..75: mol_type = other DNA
aaaaaagaagtgctggtgggcatcccggaagaagacagcgagcgtgaggatgttccgtttggtaatgccgggatc

SEQ ID NO: 49843 - DNA, 75 bp, synthetic construct
  source 1..75: mol_type = other DNA
tcaaagccgcggcgcaggctgcacttgatggtaatgctgcgggagcagaacgcgcactcaaccgtgccggaacgc

SEQ ID NO: 49844 - DNA, 75 bp, synthetic construct
  source 1..75: mol_type = other DNA
gcgtgatattgccgtgggtgtgattgtttacaaaaaactaaccacacttgagcgtctttctgaactcgacacaga

SEQ ID NO: 49845 - DNA, 75 bp, synthetic construct
  source 1..75: mol_type = other DNA
cgggtggtcgccgattcgctgggaaattttttgcccgtgagccctaccagcccgacgccgggccagcttcagggt

SEQ ID NO: 49846 - DNA, 75 bp, synthetic construct
  source 1..75: mol_type = other DNA
tagcgatcgttgaagcattttcagaaacagataaaaagacaggcgaagttgttacgttggttcctaacactaata

SEQ ID NO: 49847 - DNA, 75 bp, synthetic construct
  source 1..75: mol_type = other DNA
aatatcgcaccgcaaagctcagcgttttcgaacagctgaaggtgtcccgcaagctgttgccggttctggccggga

SEQ ID NO: 49848 - DNA, 75 bp, synthetic construct
  source 1..75: mol_type = other DNA
tggacgccggtattcaacagcggtcagctgatgttcgatgatatcgacctgctaaccatgctgcagctggtggcg

SEQ ID NO: 49849 - DNA, 75 bp, synthetic construct
  source 1..75: mol_type = other DNA
gattcatcgggggcctcactgacggtaatgaatgacctggattatccgatgctggttcagtcagaggtgctggca

SEQ ID NO: 49850 - DNA, 75 bp, synthetic construct
  source 1..75: mol_type = other DNA
ggctccacgttatcagtatataacaatcaagactacccaatgcttgtccagtcggaggtcttagctgaagatcgg

SEQ ID NO: 49851 - DNA, 75 bp, synthetic construct
  source 1..75: mol_type = other DNA
atagacaaattagaaaaaagaatattgccaaaagaattaataataaaaacgatcgtcgaagcaaaagtatttgct

SEQ ID NO: 49852 - DNA, 75 bp, synthetic construct
  source 1..75: mol_type = other DNA
ccacagtcagcagaaatgaggttttctgggactggctcagccgggaatccgacctgagtgactgccggtggctga

SEQ ID NO: 49853 - DNA, 75 bp, synthetic construct
  source 1..75: mol_type = other DNA
tcgcttccgcgagacgcaggactggcttgatgagtatctgaaaccattgctggaggcactccccactgatgcccg

SEQ ID NO: 49854 - DNA, 75 bp, synthetic construct
  source 1..75: mol_type = other DNA
ccggtattgcgtctgacctgcaaggaaggttatgagctgctgtctgatgaggttcgcttccgcgagacgcaggac

SEQ ID NO: 49855 - DNA, 75 bp, synthetic construct
  source 1..75: mol_type = other DNA
tcaccgcagacagtctggcaaacagcggggcgatccaggcggctgacagcctgactgcacgtctgacgggtgagc

SEQ ID NO: 49856 - DNA, 75 bp, synthetic construct
  source 1..75: mol_type = other DNA
tccgataacgtactgaccgcagcctcttctgcgcctgcaggcgggatgaatgtgtattacatcgcctataaccag

SEQ ID NO: 49857 - DNA, 75 bp, synthetic construct
  source 1..75: mol_type = other DNA
ccgtatctgaggggctgttccggcgcgtctgtctgcgcaccgggaaggaatggtcggaggcatccgagcaggcct

SEQ ID NO: 49858 - DNA, 75 bp, synthetic construct
  source 1..75: mol_type = other DNA
cgctcagtgacgccatcactgtggctgaaaaacttctgagtggcggaattcgcggtcgtgcagtcattcaatata

SEQ ID NO: 49859 - DNA, 75 bp, synthetic construct
  source 1..75: mol_type = other DNA
cgctttcgtctgcagacagcacgaacgtcgcaagaaatataggcatcgacaaatcctgggtaggttcgccatatg

SEQ ID NO: 49860 - DNA, 75 bp, synthetic construct
  source 1..75: mol_type = other DNA
gcggcggtgtagtgagcggcggcaaactgcttaccggccctggcggtctggcggggcacatcgggcatacgcttg

SEQ ID NO: 49861 - DNA, 75 bp, synthetic construct
  source 1..75: mol_type = other DNA
tgggatgatgagcaagaacgactttatgttgcgaatcggcgagggatacgcgtcgataagggggaaggaacgctt

SEQ ID NO: 49862 - DNA, 75 bp, synthetic construct
  source 1..75: mol_type = other DNA
tctggtggagtttgccggacactggcggcctgacctcatcatctaccctccgctcggagtcatcgggccgctgat

SEQ ID NO: 49863 - DNA, 75 bp, synthetic construct
  source 1..75: mol_type = other DNA
tatccctctggcatctgttctgatgacaaaaggaatgggtctgggagcattaatggcattaatcatcggcagtgc

SEQ ID NO: 49864 - DNA, 75 bp, synthetic construct
  source 1..75: mol_type = other DNA
tgccagccagattatgcgccagaacgtcaccatgaatgccctgaaagagggtatcaccagtaatgccgcccgtaa

SEQ ID NO: 49865 - DNA, 75 bp, synthetic construct
  source 1..75: mol_type = other DNA
tgacggaagagggctttatgtccatgttattcgttgggagccagaaacacagcgcgttatctatcttcgcaaaga

SEQ ID NO: 49866 - DNA, 75 bp, synthetic construct
  source 1..75: mol_type = other DNA
ggggttatttccgttacggctaacgtcgcagcgcgtgatatggcccagatgtgcaaactggcagcagaagggcat

SEQ ID NO: 49867 - DNA, 75 bp, synthetic construct
  source 1..75: mol_type = other DNA
actatttgtcgaacccaatccaatcccggtgaaatgggcatgtaaggaactgggtcttgtggcgaccgatacgct

SEQ ID NO: 49868 - DNA, 75 bp, synthetic construct
  source 1..75: mol_type = other DNA
tgaatatttctttagcgccccagaactttttgctcctcgtttcccttcattgtggcaacgtttctgtcaatttta

SEQ ID NO: 49869 - DNA, 75 bp, synthetic construct
  source 1..75: mol_type = other DNA
aaattggtaaagtgattgcagatttaccagaaggccaaagacttattcgcacagaaagagctgtcagagcgccac

SEQ ID NO: 49870 - DNA, 75 bp, synthetic construct
  source 1..75: mol_type = other DNA
agttgcgccagaaacaatacgaatactaccgtgatttactgttcagtttcccgaaacctgaaactgtcagtaatt

SEQ ID NO: 49871 - DNA, 75 bp, synthetic construct
  source 1..75: mol_type = other DNA
cttattcaaaggccttacatttcaaaaactctgcttaccaggcgcatttcgcccaggggatcaccataataaaat

SEQ ID NO: 49872 - DNA, 75 bp, synthetic construct
  source 1..75: mol_type = other DNA
ttgcgaagagacgcagatgctcagatggaacaatccggaagcaattgcagactgcgttaggtttcattaatgggg

SEQ ID NO: 49873 - DNA, 75 bp, synthetic construct
  source 1..75: mol_type = other DNA
gtcctgacgcgtctgccggaatggccggaggagcgactggcagagttgctgcctcttgagggatttaccttcacc

SEQ ID NO: 49874 - DNA, 75 bp, synthetic construct
  source 1..75: mol_type = other DNA
ctggctgtaagtctgtatgaccgaattaacgatgcggcatttcttgcccgtcttattcattcgtcgctgaactct

SEQ ID NO: 49875 - DNA, 75 bp, synthetic construct
  source 1..75: mol_type = other DNA
ccagatttaatagtctatccccctcttgatccggcaggcccattggttgctgctaaatatagaattccttcagtg

SEQ ID NO: 49876 - DNA, 75 bp, synthetic construct
  source 1..75: mol_type = other DNA
gggactatcgtatccggttttgatgataatgataccggagatatcagttcgctcggctctacacaatacggattt

SEQ ID NO: 49877 - DNA, 75 bp, synthetic construct
  source 1..75: mol_type = other DNA
actggcaaatcttaaagataatcgtgatttcaaagggctttaccttaaggcgctggcgcgttcagttgccgatgc

SEQ ID NO: 49878 - DNA, 75 bp, synthetic construct
  source 1..75: mol_type = other DNA
cgtcgcacattgctaaaccttgaggctcgcggagagttccccgaacgcgtacaggttacggaagggcgtaaggcc

SEQ ID NO: 49879 - DNA, 75 bp, synthetic construct
  source 1..75: mol_type = other DNA
gtccaggaaggcggtctggaatatgctactgatgtaataatacaccttcaacagattgatattgaatgggattat

SEQ ID NO: 49880 - DNA, 75 bp, synthetic construct
  source 1..75: mol_type = other DNA
cgaacagcttgatgagttaattctcgcccgtcagcgtttcgcccacggtgtacagacgttatttttcgaccatcc

SEQ ID NO: 49881 - DNA, 75 bp, synthetic construct
  source 1..75: mol_type = other DNA
tatcgcccgggcgtttccttggctgaacagcttagcagcgataatgttgcagttatgcgagaagtccagaaccgg

SEQ ID NO: 49882 - DNA, 75 bp, synthetic construct
  source 1..75: mol_type = other DNA
aaaaatcacataaattctgggcagtggagcaacagggaaacgagctgcatattagttggggcaaagtcagtacca

SEQ ID NO: 49883 - DNA, 75 bp, synthetic construct
  source 1..75: mol_type = other DNA
tcaacgaaacggaacgtggtgctggtggctttggtagcacatcggaaggccactttgaaattaagcgttcaccgc

SEQ ID NO: 49884 - DNA, 75 bp, synthetic construct
  source 1..75: mol_type = other DNA
cccttgttttaagtgcgttcagtattcagtctgcactgtccgctgaatacagcgagaaaacacagtatctgggag

SEQ ID NO: 49885 - DNA, 75 bp, synthetic construct
  source 1..75: mol_type = other DNA
ccgacagacccggtgctgtaccggagtggagacacgacgcctcttcccggcagcctgaccatccgcagcgcagag

SEQ ID NO: 49886 - DNA, 75 bp, synthetic construct
  source 1..75: mol_type = other DNA
ttcaaatttctgaccggaccagaaaccgtgctggcgctgctggatgaactagaagctaaaaacaaacgcattaca

SEQ ID NO: 49887 - DNA, 75 bp, synthetic construct
  source 1..75: mol_type = other DNA
cgggctggttgcgtaatcatggctataacaagcgtatggttgccgtggcgggggatttagctgccgggcaaatgc

SEQ ID NO: 49888 - DNA, 75 bp, synthetic construct
  source 1..75: mol_type = other DNA
cacgatacaaaccaagggaagaatagctgccctcctggaattaggctccggtttcaacccagagtttaccggtag

SEQ ID NO: 49889 - DNA, 75 bp, synthetic construct
  source 1..75: mol_type = other DNA
ggatacagggtccaactctgccgataatatagcgggcgtttattacagacccgttcaaaagtatataaatggcac

SEQ ID NO: 49890 - DNA, 75 bp, synthetic construct
  source 1..75: mol_type = other DNA
aaaatgacgagattatgacggagacagcggcgattgcattgatggttctcgatcgtcgcccggaccttgcgccac

SEQ ID NO: 49891 - DNA, 75 bp, synthetic construct
  source 1..75: mol_type = other DNA
ttgatgcggtcaaacatattccggcgtggttttataaagagtggatcgaacacgtacaggaagttgcgccaaagc

SEQ ID NO: 49892 - DNA, 75 bp, synthetic construct
  source 1..75: mol_type = other DNA
caagatatcgctaaagtaacaaaagaggaactgctgaggctttatggtgatgcgtctgtaaaagtattggcagga

SEQ ID NO: 49893 - DNA, 75 bp, synthetic construct
  source 1..75: mol_type = other DNA
taacagcaatgcggatgatattgtcgacactgttgccagaaggccaattcagaaattgattgggggaatatggta

SEQ ID NO: 49894 - DNA, 75 bp, synthetic construct
  source 1..75: mol_type = other DNA
cgtatgtccgtcgtcatatcagcggtccactgaacattatgatgacggatgctctgtcaatggctgccgtggcat

SEQ ID NO: 49895 - DNA, 75 bp, synthetic construct
  source 1..75: mol_type = other DNA
gaaagcgaatcctctgtttaatgtggggcagtgcgacggtttacctgagcatctgatggtgaaggcggaaggcag

SEQ ID NO: 49896 - DNA, 75 bp, synthetic construct
  source 1..75: mol_type = other DNA
tattatctgttcccattacattcaatgcccttgctactactgaatttctcacttttacccctgagaaaatcagta

SEQ ID NO: 49897 - DNA, 75 bp, synthetic construct
  source 1..75: mol_type = other DNA
aacgcccctactctgcacgctacattgccgatcacgttaacttgtccagtcgtggaggcgaaagtaaaaaaagag

SEQ ID NO: 49898 - DNA, 75 bp, synthetic construct
  source 1..75: mol_type = other DNA
taagcggttattttgatgtgctggggcgcaaaatggtgcgccgctttgctacggagcgtcggctggcgatgttta

SEQ ID NO: 49899 - DNA, 75 bp, synthetic construct
  source 1..75: mol_type = other DNA
cggcgcaattgccgggaaggcaaatcaggctggtcagggcgcttacgatgcccaggtaaaaaacgatgaacagga

SEQ ID NO: 49900 - DNA, 75 bp, synthetic construct
  source 1..75: mol_type = other DNA
ctgcctgaagaaaaagggcgcaaagccagccagctggactggaaatacagtaatgcgccaattgtcaagggggca

SEQ ID NO: 49901 - DNA, 75 bp, synthetic construct
  source 1..75: mol_type = other DNA
gcaggtgaaggatgtgttccgtattgaaatgctggatatcagtgccagtgcgggaaatggccttatccagggcgg

SEQ ID NO: 49902 - DNA, 75 bp, synthetic construct
  source 1..75: mol_type = other DNA
taacagcaaaagtggcaaaattattgaaccgcgttcagcacataatagagcattaactcgcgcggagttaccaca

SEQ ID NO: 49903 - DNA, 75 bp, synthetic construct
  source 1..75: mol_type = other DNA
atctgatcacaccaaaaatggtgcaggcattgaaagctataactttatgaccacagctggtctgaagtattattt

SEQ ID NO: 49904 - DNA, 75 bp, synthetic construct
  source 1..75: mol_type = other DNA
ttgtgttttcctgatgcatgttcacctggtctttgtcaccaaataccgacgccagatttttgaccatgacgcgac

SEQ ID NO: 49905 - DNA, 75 bp, synthetic construct
  source 1..75: mol_type = other DNA
cttaatcggcttggcgctcattgtggacttgacgatgtattccccccagacggtaagcatagcgaaaacagcata

SEQ ID NO: 49906 - DNA, 75 bp, synthetic construct
  source 1..75: mol_type = other DNA
aaaaaaccgctgttccaacattgtgctccgccctggcaatcctgtcagatagatgactattttaaaggctattac

SEQ ID NO: 49907 - DNA, 75 bp, synthetic construct
  source 1..75: mol_type = other DNA
cgacttcgacgtgctgcgcgacaccttcaccacgcgttctggtcgcgaagtggcgctggagctgtacgtcgatcg

SEQ ID NO: 49908 - DNA, 75 bp, synthetic construct
  source 1..75: mol_type = other DNA
aaccttttaaaaaccaggcattcaaaaacggcgaattcatcgaaatcaccgaaaaagataccgaaggccgctgga

SEQ ID NO: 49909 - DNA, 75 bp, synthetic construct
  source 1..75: mol_type = other DNA
gaagtttgcccggctaaatggaaagaaggtgaagcaactctggctccgtctctggacctggttggtaaaatctaa

SEQ ID NO: 49910 - DNA, 75 bp, synthetic construct
  source 1..75: mol_type = other DNA
tgccaccacggaggaaggggcttttgtccaggggaatatgctgcaggccggggcctttaactacaccctcaaccg

SEQ ID NO: 49911 - DNA, 75 bp, synthetic construct
  source 1..75: mol_type = other DNA
aaatacagatgtgtcggagaggatggactgcctgcatgggcagatattcctccaccaacacgtgaagaacaaatt

SEQ ID NO: 49912 - DNA, 75 bp, synthetic construct
  source 1..75: mol_type = other DNA
tgcttgcagcacctgtggtattcagttctcaggaagcttctgcttctgatttcttcggcccggagaaaataagta

SEQ ID NO: 49913 - DNA, 75 bp, synthetic construct
  source 1..75: mol_type = other DNA
ttagtcgtgatgttttttattattatggcgcgaaaagaaatccggcaacaatttgcggcaattccttctctgatt

SEQ ID NO: 49914 - DNA, 75 bp, synthetic construct
  source 1..75: mol_type = other DNA
ggggaatcactatctggtctataacgacaaattcattaagattagcgattcctgtccggctaagcccccttcggc

SEQ ID NO: 49915 - DNA, 75 bp, synthetic construct
  source 1..75: mol_type = other DNA
tccataaacagcctcatggtcaacggtatgggcatatccatgcaactccaggggattgatattgccgaaaggcca

SEQ ID NO: 49916 - DNA, 75 bp, synthetic construct
  source 1..75: mol_type = other DNA
ggacagcaacgtctggctgccgtacagcgggccatgcagcagggggctgcaaatgatgactggtttatgccggag

SEQ ID NO: 49917 - DNA, 75 bp, synthetic construct
  source 1..75: mol_type = other DNA
gaaatatgtaccgacaaaagaggattgtaacgacaggccgaactatgaaattcaggccttattcatcggcccgcc

SEQ ID NO: 49918 - DNA, 75 bp, synthetic construct
  source 1..75: mol_type = other DNA
tttaagatagggcgtacttttgcagacgaacattatgaagaatcacgcgtaacagtagttgatgatagtgatccc

SEQ ID NO: 49919 - DNA, 75 bp, synthetic construct
  source 1..75: mol_type = other DNA
aaccccatcgaggtgagtactatttcagatgcctccgtggatgaaattatccgtgttattcaggatttctgtatc

SEQ ID NO: 49920 - DNA, 75 bp, synthetic construct
  source 1..75: mol_type = other DNA
tacacatcgaaggccgcatatgtgggctatcgccacgaatgtgcctacatcctggcaaaaggccgtccacgtctg

SEQ ID NO: 49921 - DNA, 75 bp, synthetic construct
  source 1..75: mol_type = other DNA
ggctatctcggagtaagaaccatggacggctttgcccggtacagcaaatcgagccgtcacaaaatctctgcgggg

SEQ ID NO: 49922 - DNA, 75 bp, synthetic construct
  source 1..75: mol_type = other DNA
agcaccgcgcgtgaaatcagcctggcacctgtcaataaactgatcgacgatatcgtaaaagctaacgctggctaa

SEQ ID NO: 49923 - DNA, 75 bp, synthetic construct
  source 1..75: mol_type = other DNA
atgaaaaagaaattaatcagcgggctgtttctgatgttatggatggcgttgttaatcgcagcaatggtgtatccg

SEQ ID NO: 49924 - DNA, 75 bp, synthetic construct
  source 1..75: mol_type = other DNA
gaaaaatggcagaatgtttaaatcgtactcacccggaatggtgtttcagcacatgtgagaaacgtattgcaggtt

SEQ ID NO: 49925 - DNA, 75 bp, synthetic construct
  source 1..75: mol_type = other DNA
gaccgttccgggcgcaccattgccggtgacgttaacgatgactggctgcaacctgccagtaatgagatgtaccgc

SEQ ID NO: 49926 - DNA, 75 bp, synthetic construct
  source 1..75: mol_type = other DNA
gaagctcggaaaacagaccgcacgacagagacagatcattgacctgctcgacaacgaggacagactcacagaaca

SEQ ID NO: 49927 - DNA, 75 bp, synthetic construct
  source 1..75: mol_type = other DNA
tggtatcggaacgcgcggtaaaacgtgccgatagccgctttgaacttattcagaaaaacgttggctatttcttta

SEQ ID NO: 49928 - DNA, 75 bp, synthetic construct
  source 1..75: mol_type = other DNA
tattatttctttatctccgttaggtaacgatttatctacaatctatcagaaatcaaatgatatcgcaatatatta

SEQ ID NO: 49929 - DNA, 75 bp, synthetic construct
  source 1..75: mol_type = other DNA
ttcaggcgttattcactgccccgcctgtgccactgacaccagaaggattgattaaagcagtgcgcttctatgaac

SEQ ID NO: 49930 - DNA, 75 bp, synthetic construct
  source 1..75: mol_type = other DNA
atggctgccgtacgagactgtgagtggtcagacgataacgcactcaccataaatgtgcagtttaatgatttccct

SEQ ID NO: 49931 - DNA, 75 bp, synthetic construct
  source 1..75: mol_type = other DNA
cagtatgccggaggccaccggctgaaacaggccggaaacacgcagtatgactatgacgccgcaggccggatggtc

SEQ ID NO: 49932 - DNA, 75 bp, synthetic construct
  source 1..75: mol_type = other DNA
cctgtaaggatgcgtcggtcacgctgaaagacaggctgaatctcgatacaaagacgggaggcaagacctggcatt

SEQ ID NO: 49933 - DNA, 75 bp, synthetic construct
  source 1..75: mol_type = other DNA
cctcagaagccattgcccgacgtgctgggcttggaaatattcaggcaatcgtcatcacccgacggaaaagcctgt

SEQ ID NO: 49934 - DNA, 75 bp, synthetic construct
  source 1..75: mol_type = other DNA
attgcagaatgtcatgttaactgcctggttgaaacagatgttcaggcttatgcaaacgctgaatttattgctgct

SEQ ID NO: 49935 - DNA, 75 bp, synthetic construct
  source 1..75: mol_type = other DNA
ctgcaaccggcctgtaatgaaatgtatcgcgtactcaaaaaagatgcgctgatggtcagcttctacggctggaac

SEQ ID NO: 49936 - DNA, 75 bp, synthetic construct
  source 1..75: mol_type = other DNA
ccctgttggccccggaaatacagtctgtcgttaccgtaccacccgggccataccactgaatccactggcagtgga

SEQ ID NO: 49937 - DNA, 75 bp, synthetic construct
  source 1..75: mol_type = other DNA
atgcaaattaattttgagaatctgaccattggcgtttttgccaaggcggccggggtcaatgtggagaccatccgg

SEQ ID NO: 49938 - DNA, 75 bp, synthetic construct
  source 1..75: mol_type = other DNA
ggtgccacgagggattatgacatgctggtgatgaatgacggcttctacctgcttagatatcgggggggacagggc

SEQ ID NO: 49939 - DNA, 75 bp, synthetic construct
  source 1..75: mol_type = other DNA
ttggtctggcatggtcacttttcaaccctatattgatgttaacagtctacacatttgtattctcggttatattca

SEQ ID NO: 49940 - DNA, 75 bp, synthetic construct
  source 1..75: mol_type = other DNA
atgtttgcactggctgatatcaacagtttctacgcctcatgtgaaaaagttttccgcccggaccttcgcaacgaa

SEQ ID NO: 49941 - DNA, 75 bp, synthetic construct
  source 1..75: mol_type = other DNA
ttctggcgagtttcacagagctaccgccaccgctggactacgttttgcccaacatggtcgccggtacggtcgggg

SEQ ID NO: 49942 - DNA, 75 bp, synthetic construct
  source 1..75: mol_type = other DNA
tgcggactatcccgtcgctggccatcgttgagttctcgcctgactggcgtagtctgcgtcaggccgaaatactgg

SEQ ID NO: 49943 - DNA, 75 bp, synthetic construct
  source 1..75: mol_type = other DNA
agccgcgatcaggagaacgaggatattgcgctaacggtagggaagctgcgcgttgagcttgaagcagaaaaacag

SEQ ID NO: 49944 - DNA, 75 bp, synthetic construct
  source 1..75: mol_type = other DNA
gtaattaatgacgctgtcatatcggatgaaaaatcggattattatctttcactttgtcgtattgagcctgaaaat

SEQ ID NO: 49945 - DNA, 75 bp, synthetic construct
  source 1..75: mol_type = other DNA
taacgccacggtgcagtcggtggtggatgacctcagccatgccggacagattcatttcacctccacccgcacagg

SEQ ID NO: 49946 - DNA, 75 bp, synthetic construct
  source 1..75: mol_type = other DNA
acggttgggggacttactttgaagatcctaacggtgaagaaggcgacgatgaagattttgtcgacgaagatgatg

SEQ ID NO: 49947 - DNA, 75 bp, synthetic construct
  source 1..75: mol_type = other DNA
cgctcaaatcaagacgttgatgcacgaactggccgataccacctgctcggtgcttctcatccctgatgttttcac

SEQ ID NO: 49948 - DNA, 75 bp, synthetic construct
  source 1..75: mol_type = other DNA
gatagcacttctattttgcctgcccgttctggagttaggactggaatggctggatggttttcatgaagtcttaat

SEQ ID NO: 49949 - DNA, 75 bp, synthetic construct
  source 1..75: mol_type = other DNA
aaaaccgcaaagctggttcttaacgacggacaaattcttgccatacaggtaaacgatactggcgatatatcgtct

SEQ ID NO: 49950 - DNA, 75 bp, synthetic construct
  source 1..75: mol_type = other DNA
aaactgacgtcgccagggccggttatttttcgccagacccgctacggtatggacggtaatcctatcaaagtgtgg

SEQ ID NO: 49951 - DNA, 75 bp, synthetic construct
  source 1..75: mol_type = other DNA
cgaaatgttcgaaaaagatccgcagaccgaagcgatcgtaatgatcggtgagatcggcggtagcgctgaagaaga

SEQ ID NO: 49952 - DNA, 75 bp, synthetic construct
  source 1..75: mol_type = other DNA
actaattctcatgtggtacctgcgctaatcagacgtttccatgaagcaaaggaaaatgatcaggctgaggttata

SEQ ID NO: 49953 - DNA, 75 bp, synthetic construct
  source 1..75: mol_type = other DNA
cgccgaaaccgccttccacccatgcggtacgtgcaaaatggggtacgacgagatgtccgttgtggatggcgaagg

SEQ ID NO: 49954 - DNA, 75 bp, synthetic construct
  source 1..75: mol_type = other DNA
ttaataaactacttatccccatcccctgcccagaaaacccggaaaaatcccttgccatccagtctgaaatcgttc

SEQ ID NO: 49955 - DNA, 75 bp, synthetic construct
  source 1..75: mol_type = other DNA
accaggcggagttcagcatcaaagcaatgtgccgtgtgctccgggtggcccgcagcggctggtatacatggtgtc

SEQ ID NO: 49956 - DNA, 75 bp, synthetic construct
  source 1..75: mol_type = other DNA
gccgtttcagaagccttggcgttcgtctcggacgtttttgccgccttcgcagaatttgctgtcgccgttgccgag

SEQ ID NO: 49957 - DNA, 75 bp, synthetic construct
  source 1..75: mol_type = other DNA
caccattgatgagctgtggcgggatatgcgctgggcagtggcgcgcatccagggcaagccgcgctgcatcgtgag

SEQ ID NO: 49958 - DNA, 75 bp, synthetic construct
  source 1..75: mol_type = other DNA
gttttaaataaatatttattctatttctataaaatagcaaaatggggaatatctgaaggtggaactattaaaaga

SEQ ID NO: 49959 - DNA, 75 bp, synthetic construct
  source 1..75: mol_type = other DNA
tacgacctgtctgtgacgctacgccgcaaaacggtacgcgagtacggcatcaaatccatcctctctgctccagta

SEQ ID NO: 49960 - DNA, 75 bp, synthetic construct
  source 1..75: mol_type = other DNA
caccaccaccgtgcaggccaatttaagctggagcgtgagcgttccggcggcagatattcaggcgttgggtaatgg

SEQ ID NO: 49961 - DNA, 75 bp, synthetic construct
  source 1..75: mol_type = other DNA
cggctggcagcattgggaagagtttatccgccaacaactaagaagcaacgacacattatttctgtaccagggtga

SEQ ID NO: 49962 - DNA, 75 bp, synthetic construct
  source 1..75: mol_type = other DNA
gtggtatggatgacggatgactggccgctttatgaatcacgcctgaagggaaagctgcacgttatcagcaagcgt

SEQ ID NO: 49963 - DNA, 75 bp, synthetic construct
  source 1..75: mol_type = other DNA
gatgcttttgcaggttactcacggcagcgcgttctgcagtcagcaagcaagttacgtcagagtgggcgtgtggct

SEQ ID NO: 49964 - DNA, 75 bp, synthetic construct
  source 1..75: mol_type = other DNA
tttctagagatgtttggaactcctgcaaacaacatacatcgtttcccgaaaggaacgattcgcgacttggttgat

SEQ ID NO: 49965 - DNA, 75 bp, synthetic construct
  source 1..75: mol_type = other DNA
ccggggagctggcgacagaaaaagtgggcattaaagggtatctggctttttttctcaccataatctttttttccg

SEQ ID NO: 49966 - DNA, 75 bp, synthetic construct
  source 1..75: mol_type = other DNA
ccgcagcggcactggtagctgccgcgctttttgaggactctgcagcagcagcacttttcgatgcttcactggcct

SEQ ID NO: 49967 - DNA, 75 bp, synthetic construct
  source 1..75: mol_type = other DNA
ccccgtcatcagatttttacaataagcgctgcacaataacgctgacgcctcgtttttttgagtttttagggatat

SEQ ID NO: 49968 - DNA, 75 bp, synthetic construct
  source 1..75: mol_type = other DNA
accggctaaccccgaccttaattgcctaacccgttttggcggtgttggtattacacctgcctgcgaaaaaggcca

SEQ ID NO: 49969 - DNA, 75 bp, synthetic construct
  source 1..75: mol_type = other DNA
taactacggtgtagcatacgatatcggtgcatggaccgacgttctgccagaattcggtggcgatacctggaccca

SEQ ID NO: 49970 - DNA, 75 bp, synthetic construct
  source 1..75: mol_type = other DNA
gcaggcaacggtgccacgactgctccgacggtcaccacgcagccggacggcacggtggagatctctgtcaccagc

SEQ ID NO: 49971 - DNA, 75 bp, synthetic construct
  source 1..75: mol_type = other DNA
gcgattatcacactcacggtttttactctgacgataaaggaaataaagtaacaaaagaaaatgatgtttatgata

SEQ ID NO: 49972 - DNA, 75 bp, synthetic construct
  source 1..75: mol_type = other DNA
atgcgttcgtttctgatgatttcgctgcctcttttgaggccgccgcatcccgggctgaggtggcagcttctgacg

SEQ ID NO: 49973 - DNA, 75 bp, synthetic construct
  source 1..75: mol_type = other DNA
ctgggtaaaggttccaccattggtagcgtgatcccgaccaaaggggcgattattccggcggcggtgggcgtggat

SEQ ID NO: 49974 - DNA, 75 bp, synthetic construct
  source 1..75: mol_type = other DNA
tgaaatcctggctgaccgggtgagtgaggaaagccgccgctggctggcatcgtgcggcctgaccgtggagcagat

SEQ ID NO: 49975 - DNA, 75 bp, synthetic construct
  source 1..75: mol_type = other DNA
aggccgcagaattattggtgacgtggcatacggttgacagtcatgcggagcactatggcgtccgccttggagacg

SEQ ID NO: 49976 - DNA, 75 bp, synthetic construct
  source 1..75: mol_type = other DNA
ggagatcagtgtcaccagccagaccgccggaaccagtgtgatcaccgccagcgtcaacaacagcagccagagccg

SEQ ID NO: 49977 - DNA, 75 bp, synthetic construct
  source 1..75: mol_type = other DNA
cggcgcaacggtcactccgactgtcatcacagggccggacggcacggtggagatctctgccaccagccagacggc

SEQ ID NO: 49978 - DNA, 75 bp, synthetic construct
  source 1..75: mol_type = other DNA
tacggtaaaaccccgctggagctggcgcgagaaaaaggctaccacaaaattgccgagttgctgatttcggctgga

SEQ ID NO: 49979 - DNA, 75 bp, synthetic construct
  source 1..75: mol_type = other DNA
aggcatcacaaccaccggggaaatcaaaggcggaaaagtcagtggtggtacagtccggtctgacggtcgtctttc

SEQ ID NO: 49980 - DNA, 75 bp, synthetic construct
  source 1..75: mol_type = other DNA
atactaattttgttggctggacgccgctcctagaggccatcgtgctgaatgacggcggtgaaaagcagcaggaga

SEQ ID NO: 49981 - DNA, 75 bp, synthetic construct
  source 1..75: mol_type = other DNA
taggttggcaagctaagttcgaactaaaagatatgttacgcgactcttggaattggcagcaaaagaatccatttg

SEQ ID NO: 49982 - DNA, 75 bp, synthetic construct
  source 1..75: mol_type = other DNA
gtcgtaagcgaggctgcgcaggcacaacaacagacagctctggctactgtgataaacatcgtggtgaaggctggg

SEQ ID NO: 49983 - DNA, 75 bp, synthetic construct
  source 1..75: mol_type = other DNA
tggatctatacgggaaagttaatgccaagcactacttctcctctaatgatgcagatgatggtgatactacttatg

SEQ ID NO: 49984 - DNA, 75 bp, synthetic construct
  source 1..75: mol_type = other DNA
accgatggttgacggccttgatctaatcgcctgggttatggattctgccagtgaggtcgatgccgagatcatcct

SEQ ID NO: 49985 - DNA, 75 bp, synthetic construct
  source 1..75: mol_type = other DNA
gtcgcaaacgtggttgtcctggcacgactacggaccgttcaggctactgtgagcagcatcgcaatgagggctggc

SEQ ID NO: 49986 - DNA, 75 bp, synthetic construct
  source 1..75: mol_type = other DNA
aatacttaatcagggttgcaaacccgcgcatgactcgccaaaaatgtataccgggataaaagaattcgatctctc

SEQ ID NO: 49987 - DNA, 75 bp, synthetic construct
  source 1..75: mol_type = other DNA
ctatccagagatgaaatacactgctttgtcatcgaacactatggtaggagaataccagtctggaggaggaataac

SEQ ID NO: 49988 - DNA, 75 bp, synthetic construct
  source 1..75: mol_type = other DNA
tgtggttcagcgctctccattaaggcgaggcatggcaacatactggtttttgaaaggagagatgcaggcgggaca

SEQ ID NO: 49989 - DNA, 75 bp, synthetic construct
  source 1..75: mol_type = other DNA
ccaggagcacatcccggtgttggtcgtgcagatgccgtccgagccgtccgtgatccgcttctacgtcgcgctgct

SEQ ID NO: 49990 - DNA, 75 bp, synthetic construct
  source 1..75: mol_type = other DNA
cacaaaaaaggtcatctgcaggagttttatcgcgtcaatgtgattaaacgtcaccctatggccgagcgctatatg

SEQ ID NO: 49991 - DNA, 75 bp, synthetic construct
  source 1..75: mol_type = other DNA
ggtttatcactttttactccctgcgctggatagccggaatagttctgcgtaaagaagcattaggcatgggcgatg

SEQ ID NO: 49992 - DNA, 75 bp, synthetic construct
  source 1..75: mol_type = other DNA
tcccagatttttttccgcacgtagcggtggatatatcaatatacacaaatgtagaagatgattatttttttttct

SEQ ID NO: 49993 - DNA, 75 bp, synthetic construct
  source 1..75: mol_type = other DNA
tattatgctcgtccctggtattgctgtttccggcaagctggtactactcgaacctaaagaagacgccccacaagg

SEQ ID NO: 49994 - DNA, 75 bp, synthetic construct
  source 1..75: mol_type = other DNA
tatggctatggttatcgctcagaaacctataacgaattcgatctccgactgcgtaagcatctctctctggcagag

SEQ ID NO: 49995 - DNA, 75 bp, synthetic construct
  source 1..75: mol_type = other DNA
aagaaaaaattgcgcgaagaaggtacgtcatattcacagttgcttactgagtgtaggatgcagcgtgctttacaa

SEQ ID NO: 49996 - DNA, 75 bp, synthetic construct
  source 1..75: mol_type = other DNA
tgggcggcgctgccgccaaaaactaccgtgaaaaatccgtggatgtggtctgctatgacgaactttcctcgttcg

SEQ ID NO: 49997 - DNA, 75 bp, synthetic construct
  source 1..75: mol_type = other DNA
ggatgcggatatcagatatgtggatattgaggtccgcgggcgcatcactgaaatcgatatgggggaggcgaagca

SEQ ID NO: 49998 - DNA, 75 bp, synthetic construct
  source 1..75: mol_type = other DNA
tgtgggcccatcgtccgtccggcaccatccatcacagcgataaaggctctcagtatgtgtcactggcctatacgg

SEQ ID NO: 49999 - DNA, 75 bp, synthetic construct
  source 1..75: mol_type = other DNA
gtgctggatgcgctggagcaggcgttgtgggcccatcgtccgtccggcaccatccatcacagcgataaaggctct

SEQ ID NO: 50000 - DNA, 75 bp, synthetic construct
  source 1..75: mol_type = other DNA
ttctggggcgtcatgcgtaagcctgcctctcggggggacgggccggttcagctgatgctgaccacggatgcgggg

SEQ ID NO: 50001 - DNA, 75 bp, synthetic construct
  source 1..75: mol_type = other DNA
aatgcctgtacctgattgctgttgatggcgactaccgtaaacgtggtcaccgcctggaaggcgaaaacaaacaaa

SEQ ID NO: 50002 - DNA, 75 bp, synthetic construct
  source 1..75: mol_type = other DNA
catcccggagcggaggctgcatctttaccactgtgaccaccggggactgccgcaggcgctcatcagcccggaagg

SEQ ID NO: 50003 - DNA, 75 bp, synthetic construct
  source 1..75: mol_type = other DNA
aaaattgatgatgcgtcctacagtgaagcactggaagctgaaagggagtgcagggctgaaatataccgcgagcaa

SEQ ID NO: 50004 - DNA, 75 bp, synthetic construct
  source 1..75: mol_type = other DNA
gtggatctgtgaaaacacgggcatgtggacccgtgacggtctgacgtttttcagcgcccggggtgatgaaattcc

SEQ ID NO: 50005 - DNA, 75 bp, synthetic construct
  source 1..75: mol_type = other DNA
tggacccgtgacggcctgatgtttttcagcgcccggggggatgaaattccgccgccgcgctccatcactttccat

SEQ ID NO: 50006 - DNA, 75 bp, synthetic construct
  source 1..75: mol_type = other DNA
gatggacagacaggctcaagccttctgacgggcaacggcggggcgtcgtattttggcggcggtggccgggcgggt

SEQ ID NO: 50007 - DNA, 75 bp, synthetic construct
  source 1..75: mol_type = other DNA
cgtgaccgactccgttcggtgcatggataaaccggaagaagcgaaaaagaatatcacccgtcttgccgaccgtaa

SEQ ID NO: 50008 - DNA, 75 bp, synthetic construct
  source 1..75: mol_type = other DNA
atggcatttaaacactatgacgtggtcagggcggcgtcgccgtcagaccttgcggagcgactgacacaaaaactg

SEQ ID NO: 50009 - DNA, 75 bp, synthetic construct
  source 1..75: mol_type = other DNA
ggcgttatccgtgacacaaaccaggacagaacgccccgtgtcacagccagtaccaaccgcacagataaccagtca

SEQ ID NO: 50010 - DNA, 75 bp, synthetic construct
  source 1..75: mol_type = other DNA
tcagtatgcttatcccactggcaaatattcttggctgcgatccgatgtggctgttaactggcgaaacggcagcaa

SEQ ID NO: 50011 - DNA, 75 bp, synthetic construct
  source 1..75: mol_type = other DNA
tcgtcagtatccggatgacagtcgtctgcatcatgtcctgaaatcggcagtgggcgcggggaccaccacggatcc

SEQ ID NO: 50012 - DNA, 75 bp, synthetic construct
  source 1..75: mol_type = other DNA
catgggattacagaaccaataatccctgccgtctgggaaagaaaatcattattgaaaacctgctgtaccgctgga

SEQ ID NO: 50013 - DNA, 75 bp, synthetic construct
  source 1..75: mol_type = other DNA
tgagcagtgacatcaacagcacgtctgaaatactggccgccacaccgaaagcggtcaaggctgcatacgatctgg

SEQ ID NO: 50014 - DNA, 75 bp, synthetic construct
  source 1..75: mol_type = other DNA
atctgttcatcaacaagaacagccatttgaaaaagatcagagtttcagacgtgatgaaaatcgctgattctgact

SEQ ID NO: 50015 - DNA, 75 bp, synthetic construct
  source 1..75: mol_type = other DNA
gggataaacacgaagacggtgaacacctttctgtatatgggacttggtaaaaacggtcttaagtacaggagtgcg

SEQ ID NO: 50016 - DNA, 75 bp, synthetic construct
  source 1..75: mol_type = other DNA
ttctccacgttttgcagttggcaacagaaatcttaatgcgtctgattttttaactaaatatattaatttatcatg

SEQ ID NO: 50017 - DNA, 75 bp, synthetic construct
  source 1..75: mol_type = other DNA
tcgccgggcacgcaatttcctccagatgctgcccgtggcgctgcacggagaggtctttccctatacttcttccgg

SEQ ID NO: 50018 - DNA, 75 bp, synthetic construct
  source 1..75: mol_type = other DNA
atggctacatcgacagtaattccgggagacatcaccacgctgaagggagatgtcagtaaagcgaaggaagatatt

SEQ ID NO: 50019 - DNA, 75 bp, synthetic construct
  source 1..75: mol_type = other DNA
gactggctgcatgggctgacgatgaggcgttatccgtgacacaaaccaggacagaacgccccgtgtcacagccag

SEQ ID NO: 50020 - DNA, 75 bp, synthetic construct
  source 1..75: mol_type = other DNA
aggccgtgatgttagtgagcaggatggtttgatactggatgccattgatcgttatcaatctaaatttgaagccga

SEQ ID NO: 50021 - DNA, 75 bp, synthetic construct
  source 1..75: mol_type = other DNA
gcctgccgctggcgcttgtcagcacggaaggggcaacagaatggtgcgcagaatacgatgaatggggcaacctgc

SEQ ID NO: 50022 - DNA, 75 bp, synthetic construct
  source 1..75: mol_type = other DNA
aaagcgtgcccgtgcgcgtcgtgatgcaggcagggaacgtcaggatatcgtcaccctggtgaaacgacagctgac

SEQ ID NO: 50023 - DNA, 75 bp, synthetic construct
  source 1..75: mol_type = other DNA
gttacccgggataactcagtggctgacggcgcaatggcgaacacgctgcgggtgaaggtcaccgatgcgttcggg

SEQ ID NO: 50024 - DNA, 75 bp, synthetic construct
  source 1..75: mol_type = other DNA
cgctggagtaatggtgttgtcgaaggtcatgtaaatcgcctgaagatgttgaaacgccagatgtatggtcgagcc

SEQ ID NO: 50025 - DNA, 75 bp, synthetic construct
  source 1..75: mol_type = other DNA
tcccgggtcatcctgacgctaatgatgggtggataattcctggtgcgtcgtggaaaccgtcacactggatgccgc

SEQ ID NO: 50026 - DNA, 75 bp, synthetic construct
  source 1..75: mol_type = other DNA
gaaatcagatttcgtataaaaacgggttttcgtataattcttgttttgtcggataatgaggatgagcgtaatgtt

SEQ ID NO: 50027 - DNA, 75 bp, synthetic construct
  source 1..75: mol_type = other DNA
gtctgaagaccacggccactgcgcagacgcagggcaacagtgtcagcgtggatgtgcagaacgcacagcttgacg

SEQ ID NO: 50028 - DNA, 75 bp, synthetic construct
  source 1..75: mol_type = other DNA
acgttgccttatcatcaagtagcaaaggtggagtatgtggctggtattctgaagcaatctcgccatctggatgac

SEQ ID NO: 50029 - DNA, 75 bp, synthetic construct
  source 1..75: mol_type = other DNA
gtgcttccagcagaagaagcggaagagctggcacggattgcgctggcatcactggcagcagtatcggatgaacga

SEQ ID NO: 50030 - DNA, 75 bp, synthetic construct
  source 1..75: mol_type = other DNA
atatcacccggcgtcagcaatggaatgcgggcagtgacagccgatatggtggtgtgcatctcagcggtacggaca

SEQ ID NO: 50031 - DNA, 75 bp, synthetic construct
  source 1..75: mol_type = other DNA
atgaaaacctatatttatcaggacgaaaaatcacataaattctgggcggtggagcagcagggaaacgagctgcat

SEQ ID NO: 50032 - DNA, 75 bp, synthetic construct
  source 1..75: mol_type = other DNA
ttatcccgccggtcaacgcgcggcttatcgggcgttatcgcgattatcgtcgccacggtgcgtcggctttcagcg

SEQ ID NO: 50033 - DNA, 75 bp, synthetic construct
  source 1..75: mol_type = other DNA
gcaagataccgttttattcagtttttcggacagaccggtacaagaagccctggggctgttccgcgaagcgcgtta

SEQ ID NO: 50034 - DNA, 75 bp, synthetic construct
  source 1..75: mol_type = other DNA
ggcgacgaaccggttatctggctcgatgggctggatctgccattagtgaacactctgggctgcggttttgccgaa

SEQ ID NO: 50035 - DNA, 75 bp, synthetic construct
  source 1..75: mol_type = other DNA
tgatgcgacgcccgacgagttgcgcaccattgcacgcgactactggaataacggtattcgtcatatcgtggcgct

SEQ ID NO: 50036 - DNA, 75 bp, synthetic construct
  source 1..75: mol_type = other DNA
ctacgtcaacccggtcaccggtggctatccgatgccgtcgatgggcgctttcctgcaactgctgccgaaagggtt

SEQ ID NO: 50037 - DNA, 75 bp, synthetic construct
  source 1..75: mol_type = other DNA
atgagagcagaagtaataacactgacaacgttgaccagaaaatatgaaggctcaacttgtcttccaaatgtagct

SEQ ID NO: 50038 - DNA, 75 bp, synthetic construct
  source 1..75: mol_type = other DNA
ctggacacagcgcagaaggttgttgtgggtgcagcattgctggcaaaggtcagaaagccggaggaggtgcagttg

SEQ ID NO: 50039 - DNA, 75 bp, synthetic construct
  source 1..75: mol_type = other DNA
tggcggagaagacgcccggaacgcgtcattgttcatacggaccgtggtggtcaatactgttcaggggattatcag

SEQ ID NO: 50040 - DNA, 75 bp, synthetic construct
  source 1..75: mol_type = other DNA
tgatcaaaatggcttctttgctgggttttgacccggtaagccgccgcagaaatccaccggaaacagaggaagagg

SEQ ID NO: 50041 - DNA, 75 bp, synthetic construct
  source 1..75: mol_type = other DNA
ttctgtttaccaaggaaattgattcttccagcccgtacctttacaaggccgtgaccaccgggcagaccctgaagt

SEQ ID NO: 50042 - DNA, 75 bp, synthetic construct
  source 1..75: mol_type = other DNA
ttacgcgccgaacgcaaagtcatcagcaagttaagcccccgaagttacctaaaaagaagcctgatcccgataaaa

SEQ ID NO: 50043 - DNA, 75 bp, synthetic construct
  source 1..75: mol_type = other DNA
aacggagtggagccagaaagctacctccgctatgtccttgacgtcatagccgactggccgataaaccgggtctgt

SEQ ID NO: 50044 - DNA, 75 bp, synthetic construct
  source 1..75: mol_type = other DNA
acgaattcatatcatctaatcagacaaaagcattgactattcccggtgcattaatagcagctggtggcttagtga

SEQ ID NO: 50045 - DNA, 75 bp, synthetic construct
  source 1..75: mol_type = other DNA
ggaccaggtaaaagcagcgattgatgcaggagctgcaggcgcgatttctggttcggccatcgttaaaatcatcga

SEQ ID NO: 50046 - DNA, 75 bp, synthetic construct
  source 1..75: mol_type = other DNA
gtaaccgcgcctgcgattactgaagtgcatattgcgaccacaaacattacctgggaaacgttcattcctcatatc

SEQ ID NO: 50047 - DNA, 75 bp, synthetic construct
  source 1..75: mol_type = other DNA
ctggcggatatgaatagtcagggtcaggtgcagatggcgatgaacggcggcatctatgatgaaagctatgcgccg

SEQ ID NO: 50048 - DNA, 75 bp, synthetic construct
  source 1..75: mol_type = other DNA
cagcaggtatggcgggtggtgttgcaggtgggaatactgcgggtgtggctaccggagctgctgctgggaagaatg

SEQ ID NO: 50049 - DNA, 75 bp, synthetic construct
  source 1..75: mol_type = other DNA
atgacgcttgagcaggagcagcaggttaaaacccgtactgccgaacagaatgcacgtattgcggcttttgaagct

SEQ ID NO: 50050 - DNA, 75 bp, synthetic construct
  source 1..75: mol_type = other DNA
ccggacatccgcaacagcgggcttatcaccggtgataatggtttaacgttaaacactgcctccctcagcaatccg

SEQ ID NO: 50051 - DNA, 75 bp, synthetic construct
  source 1..75: mol_type = other DNA
tcgatgaagatttccaaatggaacagcaggccaatgctgaattcatcgccgcagccaatccggctaccgtgctgg

SEQ ID NO: 50052 - DNA, 75 bp, synthetic construct
  source 1..75: mol_type = other DNA
taaattgggcagagcttcccgttggttaaaaagcgatctggaagaatggttatattaccgtatctacgaatccag

SEQ ID NO: 50053 - DNA, 75 bp, synthetic construct
  source 1..75: mol_type = other DNA
cattccctgaaatgtcaacccgacctccaaagcgagggcttctggacccatggagggagtggttaaaagagcaac

SEQ ID NO: 50054 - DNA, 75 bp, synthetic construct
  source 1..75: mol_type = other DNA
tattacctgaaagtacaggaaacaatacgttatcgctgcgtgattccgtatgccgggatctctttcaacttttta

SEQ ID NO: 50055 - DNA, 75 bp, synthetic construct
  source 1..75: mol_type = other DNA
ggtgttcgaacccaaggcgatcaccaagcatgaacgctacacccagcgcgagcagatcgccaaactattcggcta

SEQ ID NO: 50056 - DNA, 75 bp, synthetic construct
  source 1..75: mol_type = other DNA
cctgacagcgaactgacccgtacagaactcttcgccctgcgcagacaaatcaaaactctcagggatcaccttatt

SEQ ID NO: 50057 - DNA, 75 bp, synthetic construct
  source 1..75: mol_type = other DNA
ccataaaggcattgctagttatgtgtttttttatgtgcatagctttaattattctcgggatcttttcttaccttc

SEQ ID NO: 50058 - DNA, 75 bp, synthetic construct
  source 1..75: mol_type = other DNA
aagagtccgcgcccttccgccaggccgcgttgcgtcataatgtcgcacctatctttatttgcccaccgaatgccg

SEQ ID NO: 50059 - DNA, 75 bp, synthetic construct
  source 1..75: mol_type = other DNA
caaaaaacggcatcagcgttggacagaggttatggccctgcataacaagggatgtagtttcagggaaatatcccg

SEQ ID NO: 50060 - DNA, 75 bp, synthetic construct
  source 1..75: mol_type = other DNA
ctatgcgacagcagcacgtgaaggtgcacctcaggccagacaggtggccgatcgatggcatctgctaaaaaatat

SEQ ID NO: 50061 - DNA, 75 bp, synthetic construct
  source 1..75: mol_type = other DNA
ttgttttaactggaataatatttgcgttatcggcagtgtattcattgagctatgcacgagatgaatttaaccttc

SEQ ID NO: 50062 - DNA, 75 bp, synthetic construct
  source 1..75: mol_type = other DNA
cggagctgagtctgcccgcagccagtgaggaattcctgccggcgctgtcaggtgagaatgccccggtcagcccgg

SEQ ID NO: 50063 - DNA, 75 bp, synthetic construct
  source 1..75: mol_type = other DNA
ctgaaatttttaatgtcgatatacgcacgattgatcgctggcaaactcaggggctccctcagatatctggcggag

SEQ ID NO: 50064 - DNA, 75 bp, synthetic construct
  source 1..75: mol_type = other DNA
agcaatccgatgcgtatgccatccgcgaaagcggagctgtgttggcttattcctccatcgttaccgacaaaacgg

SEQ ID NO: 50065 - DNA, 75 bp, synthetic construct
  source 1..75: mol_type = other DNA
taataaacccgatgggccagcaacagcagggatagatgatttgggtgaaattttagctaagatgaaacagagaac

SEQ ID NO: 50066 - DNA, 75 bp, synthetic construct
  source 1..75: mol_type = other DNA
gcggtgtggtcgaggtgagcggtacagataaaaatgaaacgggtaactggagcgaagagtctgacggcgtttata

SEQ ID NO: 50067 - DNA, 75 bp, synthetic construct
  source 1..75: mol_type = other DNA
cctatataaccgatgaagaatcaccgattgaaatcagaaataatacttctacaagtaatggagagtatctaatca

SEQ ID NO: 50068 - DNA, 75 bp, synthetic construct
  source 1..75: mol_type = other DNA
gcagatgctggggtatgtctcgctggcagaggttccggcggaacagctggacgggaaaagtgagcgcattcagca

SEQ ID NO: 50069 - DNA, 75 bp, synthetic construct
  source 1..75: mol_type = other DNA
aaaatgacacccgttttgccgtcgattttacctggcaacctggcagcgcaatgcagaaacagcttgacccgaacg

SEQ ID NO: 50070 - DNA, 75 bp, synthetic construct
  source 1..75: mol_type = other DNA
tgcgcgctggtttccgcacattgatgcggcgatgaaggaattcggcattacagcaccagcggatcaggcaatgtt

SEQ ID NO: 50071 - DNA, 75 bp, synthetic construct
  source 1..75: mol_type = other DNA
tgacctcacctgatggcaaatatcgcatcgttgttggtcaggaatgggaataccgtgaagacatggcgctggcga

SEQ ID NO: 50072 - DNA, 75 bp, synthetic construct
  source 1..75: mol_type = other DNA
tacttccggagacattgcggatgcttttgcaggttactcacggcagcgcgttctgcagtcagcaagcaagttacg

SEQ ID NO: 50073 - DNA, 75 bp, synthetic construct
  source 1..75: mol_type = other DNA
gctttaactattcggtagaggggctgaagaaaacctttggtaaacgcctgactccgtatcagtgtgaaatgttgg

SEQ ID NO: 50074 - DNA, 75 bp, synthetic construct
  source 1..75: mol_type = other DNA
ctctgctcgccgaagatatgaacagcgagcaagcggcaaatatggcgcgtggatgggcctcttctcaggcttcag

SEQ ID NO: 50075 - DNA, 75 bp, synthetic construct
  source 1..75: mol_type = other DNA
atgagccgaaagaaccggtggctgctcttactccgtctttatccacccagactactgtcagtgccagctcctgca

SEQ ID NO: 50076 - DNA, 75 bp, synthetic construct
  source 1..75: mol_type = other DNA
ccgaaattttcaacgtggatccgcgaacgattgaacgctggcagtctcagggactcccttgtgtctccggaggtg

SEQ ID NO: 50077 - DNA, 75 bp, synthetic construct
  source 1..75: mol_type = other DNA
gagttccctgagcggcccgaaatttttacttggcttctttcccttgataagaagaaaccaccgcacgaagaaaca

SEQ ID NO: 50078 - DNA, 75 bp, synthetic construct
  source 1..75: mol_type = other DNA
gccgcttaactgcgggtatctgcctggtaactcaacttgtgttccctatgactgtggcagcacaaggtgtggtaa

SEQ ID NO: 50079 - DNA, 75 bp, synthetic construct
  source 1..75: mol_type = other DNA
cctgacgcactgaatacgctgaacgagctggctgcggcgttgggcaacgacccgaattttgcgaccaccatgact

SEQ ID NO: 50080 - DNA, 75 bp, synthetic construct
  source 1..75: mol_type = other DNA
accggaacggatgtctcactttcaggggataacaaagccggaggaaatctcagcgttaccgggacaacgggactg

SEQ ID NO: 50081 - DNA, 75 bp, synthetic construct
  source 1..75: mol_type = other DNA
aagcgtatgcggcagcgcgtctggcgaaaatccgccgccagaatcgtatcaaggaagaacttaagtccatactgg

SEQ ID NO: 50082 - DNA, 75 bp, synthetic construct
  source 1..75: mol_type = other DNA
gaaagagctggttgaagagcatcttcccggacaaaatcagtacgaaatccttcgacgcaatatcattgatcgtgt

SEQ ID NO: 50083 - DNA, 75 bp, synthetic construct
  source 1..75: mol_type = other DNA
gcgcaggcgatgctgaacgacctggacgcggagacgctacgcaaagaggtgattcgtccgaccatcgttcctggc

SEQ ID NO: 50084 - DNA, 75 bp, synthetic construct
  source 1..75: mol_type = other DNA
aggtggtggttccaagacggtttctaccgcttcattatcccatgcttttcgggctcatcctcagcttctgttcga

SEQ ID NO: 50085 - DNA, 75 bp, synthetic construct
  source 1..75: mol_type = other DNA
agtcacagctgaaaactctgacgagaaaacggctcagaccgttgatagtcacataactactgagtcaacgctgcc

SEQ ID NO: 50086 - DNA, 75 bp, synthetic construct
  source 1..75: mol_type = other DNA
ctgtcgctcaaaatagcgattctgtaaaccagactgaaccagttttggcacacgtcgagccagaggcgcaatctg

SEQ ID NO: 50087 - DNA, 75 bp, synthetic construct
  source 1..75: mol_type = other DNA
ggtgttacagagattaatgatgagttacgaataaactaccttaaaaatgtaataaaactgtcagacgatgacatt

SEQ ID NO: 50088 - DNA, 75 bp, synthetic construct
  source 1..75: mol_type = other DNA
atacgtctgaaggttgttttgaaattggtgtcactatcagtaatcctgtatttactgaagatgccattaacaaga

SEQ ID NO: 50089 - DNA, 75 bp, synthetic construct
  source 1..75: mol_type = other DNA
actggtggggatcaccgcagcagaagctgataacccggagcaaagtattccaaaagcgactaaccaggttatcta

SEQ ID NO: 50090 - DNA, 75 bp, synthetic construct
  source 1..75: mol_type = other DNA
ttaccggtaagactgtccggctggagagtctcgccggcaatgtcaataatctcacccggtactcacactggcagc

SEQ ID NO: 50091 - DNA, 75 bp, synthetic construct
  source 1..75: mol_type = other DNA
agtctggcaaccctgacaaaagttgggcgggatattcttgcgaaatcgaccgttgccgccgttatcgaatacctc

SEQ ID NO: 50092 - DNA, 75 bp, synthetic construct
  source 1..75: mol_type = other DNA
cggcgaaacgcctggcccttgagttaccctttgtcgagctttgctggccttttggcccggagttcgatgttttta

SEQ ID NO: 50093 - DNA, 75 bp, synthetic construct
  source 1..75: mol_type = other DNA
cagcttgtcgccgatccggaggccaccgtccggcaactgtaccgatatatcattctcggccagaccttcggcacc

SEQ ID NO: 50094 - DNA, 75 bp, synthetic construct
  source 1..75: mol_type = other DNA
atgtgtgaaaaagaacctgagctgaaaatagcgcagcaactggcactcgagttctaccgtattctgaaaacccaa

SEQ ID NO: 50095 - DNA, 75 bp, synthetic construct
  source 1..75: mol_type = other DNA
tttactgaagatgccattaacaagagaaaacacgaacgggagctattaaatcaaatatgcattgtttcaatgctg

SEQ ID NO: 50096 - DNA, 75 bp, synthetic construct
  source 1..75: mol_type = other DNA
tttggcctggcggaggtgccggacgcggtgctggcagaaatcttcaccctgccgcggctgaaagctgttttcccg

SEQ ID NO: 50097 - DNA, 75 bp, synthetic construct
  source 1..75: mol_type = other DNA
ttcacaaaaaacttatcgaggcgctgaaaacgcgtgccggtcgggaaaatacttcggtcaacgccctagccgaac

SEQ ID NO: 50098 - DNA, 75 bp, synthetic construct
  source 1..75: mol_type = other DNA
cagctatgcgatgttcctgctggatgtgatgccggaaagaacggcagaacattaccgtaacaagatagctatcta

SEQ ID NO: 50099 - DNA, 75 bp, synthetic construct
  source 1..75: mol_type = other DNA
atctctctatgcagttaacagttaacttaatttgggggattgttgttagtgttccacctcagcaacctattgcta

SEQ ID NO: 50100 - DNA, 75 bp, synthetic construct
  source 1..75: mol_type = other DNA
gatctgcacttgatgttagcgcaggcgctgcatatgggcgatgagtgccataaccgcaacaacgccgggacggcg

SEQ ID NO: 50101 - DNA, 75 bp, synthetic construct
  source 1..75: mol_type = other DNA
gcgttgacgttaaccgtgtgtactcgctcgatgaactggtgagggggaacgatatcctctttagcgctacgggcg

SEQ ID NO: 50102 - DNA, 75 bp, synthetic construct
  source 1..75: mol_type = other DNA
cgtcaacaagtgccgggcaggcctcagccagtgccaccgccgccggaaaatcggcagaaagcgccgcatcgtctg

SEQ ID NO: 50103 - DNA, 75 bp, synthetic construct
  source 1..75: mol_type = other DNA
tcgggttatctgacgcaccgtttaacgggcgaatttaaagataatatcgccaactattttggtcagtggccggtg

SEQ ID NO: 50104 - DNA, 75 bp, synthetic construct
  source 1..75: mol_type = other DNA
ggtgggctgatgggcggtttctccccccacgctccgttcttcgccgcggcagccttgaacggcctcaatttcctg

SEQ ID NO: 50105 - DNA, 75 bp, synthetic construct
  source 1..75: mol_type = other DNA
atgaatcaacaactctcctggcgcaccatcgtcggctacagcctcggtgacgtcgccaataacttcgccttcgca

SEQ ID NO: 50106 - DNA, 75 bp, synthetic construct
  source 1..75: mol_type = other DNA
accattgaacatattcagaagatgcgggaaatgtaccatgatgtgacggaaaccttttactgggtggcacttccc

SEQ ID NO: 50107 - DNA, 75 bp, synthetic construct
  source 1..75: mol_type = other DNA
ggtctccggacatccctgtgcagggaaaacaaatctgacagcagagttaatttctgctgttgtggggagtaataa

SEQ ID NO: 50108 - DNA, 75 bp, synthetic construct
  source 1..75: mol_type = other DNA
cggaagcgacaatccgtgccgatttgcgctttctcgaacaaaaaggcgtggttacgcgctttcatggcggtgcgg

SEQ ID NO: 50109 - DNA, 75 bp, synthetic construct
  source 1..75: mol_type = other DNA
tgttcctctctgcaaccactgacggcatcaattacgggcgtgagcagatgattgagcagaatgaaccgttcgttt

SEQ ID NO: 50110 - DNA, 75 bp, synthetic construct
  source 1..75: mol_type = other DNA
ccatgatttcagctctgcctggattgaactccagcttgcccatgttgataaaaacatcatgcgcggcacctacaa

SEQ ID NO: 50111 - DNA, 75 bp, synthetic construct
  source 1..75: mol_type = other DNA
attaccgatgatgctgtgtcagaggtggataaactggcattgcagaagacacgggtaaaattaattacggtgtag

SEQ ID NO: 50112 - DNA, 75 bp, synthetic construct
  source 1..75: mol_type = other DNA
ttcaaggcagggttaagacgtaagatgcgaaaagcagccatggacagaaactatctggcgtcagtccttgcgggg

SEQ ID NO: 50113 - DNA, 75 bp, synthetic construct
  source 1..75: mol_type = other DNA
tgcgtctgattcaaaagatgaggcgaccagacaggcgtcagcggcggcagagagtgcgtcaacggcatccacgaa

SEQ ID NO: 50114 - DNA, 75 bp, synthetic construct
  source 1..75: mol_type = other DNA
tggtgggcttaccagaaacaacggtaaaagaagctcgcgatcgcgtgcgcagcgccattatcaatagcggatttt

SEQ ID NO: 50115 - DNA, 75 bp, synthetic construct
  source 1..75: mol_type = other DNA
aacgtcgtttctctgtattattcattgactgggaagctcagtaccagtgcacaattgcacacattctgaagatga

SEQ ID NO: 50116 - DNA, 75 bp, synthetic construct
  source 1..75: mol_type = other DNA
acaatattccaaagatattgcatggaaagctcaacaacgattgtgttctcgttaccgaagtctgacagcaaaagg

SEQ ID NO: 50117 - DNA, 75 bp, synthetic construct
  source 1..75: mol_type = other DNA
actggggctttgagggtgtcgcgcgtaaaggttatatcgctaacactctgacgccgaatgtcggtgatgcaaact

SEQ ID NO: 50118 - DNA, 75 bp, synthetic construct
  source 1..75: mol_type = other DNA
aacggcctgagcgttccgccagtccggcgacaactggcggcacccaaacgcccgtcggggccaacgccaattgag

SEQ ID NO: 50119 - DNA, 75 bp, synthetic construct
  source 1..75: mol_type = other DNA
tttgaaaagcagtgtgtggagtttttaggtcttctggctatggggcatgaatacagggagagcccgataccgggg

SEQ ID NO: 50120 - DNA, 75 bp, synthetic construct
  source 1..75: mol_type = other DNA
cgccattgccgccgagctggagggtttctatctgcgtcagcacggtgaggaaaaaggccgtcagattgcctgcgc

SEQ ID NO: 50121 - DNA, 75 bp, synthetic construct
  source 1..75: mol_type = other DNA
agatatcttctggcgaaacaacattgtcgggtttgcgccgatgctcggcggcgaagccagcgtggagggagaacc

SEQ ID NO: 50122 - DNA, 75 bp, synthetic construct
  source 1..75: mol_type = other DNA
attgaatgcgatcatggcaaactgaaacggataatcggcgccacgctgggatttaaatccatgaagacggcttac

SEQ ID NO: 50123 - DNA, 75 bp, synthetic construct
  source 1..75: mol_type = other DNA
tgaacaccggggcgcaccggatgtggtcaccatccgcgcccggagtgcagattttcgcgggacgctcaattcccg

SEQ ID NO: 50124 - DNA, 75 bp, synthetic construct
  source 1..75: mol_type = other DNA
actggccagaggcagtattgaaaaatccagtgaggatgaacggtattgtctgcatttttcgcctgaagcgcaaaa

SEQ ID NO: 50125 - DNA, 75 bp, synthetic construct
  source 1..75: mol_type = other DNA
taaaacgacttgcggaacggcaactgacgaaatgggcaaagcatgttggtaacgggatgagtgttccgccagtgc

SEQ ID NO: 50126 - DNA, 75 bp, synthetic construct
  source 1..75: mol_type = other DNA
gtccggtaccggtgcccgtacaggtgatttaaaagggattaacgtgaaataccgttatgaattcacggaccatgc

SEQ ID NO: 50127 - DNA, 75 bp, synthetic construct
  source 1..75: mol_type = other DNA
ctttctattggcgtataccccgatgtaacgttagccgatgctcgcgagaaacgcagtgaagccaggaaactcctc

SEQ ID NO: 50128 - DNA, 75 bp, synthetic construct
  source 1..75: mol_type = other DNA
tccgctatgtccttgacgtcatagccgactggccgataaaccgggtcggcgaactactcccctggcgcgtagcac

SEQ ID NO: 50129 - DNA, 75 bp, synthetic construct
  source 1..75: mol_type = other DNA
tattcctcgttatgaaagtggatacaaaagtgataagacgttgctgactgctatccgagattatatatatgggga

SEQ ID NO: 50130 - DNA, 75 bp, synthetic construct
  source 1..75: mol_type = other DNA
cataaattacgggcgtgagcagatgattgagcagaatgaaccgttcgtttacgacaaacgcgttttgtggaagcg

SEQ ID NO: 50131 - DNA, 75 bp, synthetic construct
  source 1..75: mol_type = other DNA
gctgggctcatgcccgccgaaagatccacgatgtgcacgtccgcatcccgtcagcactgacggaagaagccctag

SEQ ID NO: 50132 - DNA, 75 bp, synthetic construct
  source 1..75: mol_type = other DNA
atgcagcagcaccaggtggcaccgcatcacgggcagttcaggaaattcgggcagcacgtgagcagtgggaacgtg

SEQ ID NO: 50133 - DNA, 75 bp, synthetic construct
  source 1..75: mol_type = other DNA
tcttccgacgaagtgctggcttcgcaggaagtgcacgatatttcggtagcgatcggtatcgatcctgacagcgac

SEQ ID NO: 50134 - DNA, 75 bp, synthetic construct
  source 1..75: mol_type = other DNA
agaggagttaaaaaaatacagacctgatatatacgatatatgtgaaaaaacaatttcttcgtcctaccatgatct

SEQ ID NO: 50135 - DNA, 75 bp, synthetic construct
  source 1..75: mol_type = other DNA
cagaactggcgaaagcgttcgcatacgccctgaaccagtggccggcgctgacgtactatgcagatgatggctggg

SEQ ID NO: 50136 - DNA, 75 bp, synthetic construct
  source 1..75: mol_type = other DNA
cctggaaacctgccaggctgcggtgaatgccgccgataatggcagcgatttcatcaatatcccacatgatatttt

SEQ ID NO: 50137 - DNA, 75 bp, synthetic construct
  source 1..75: mol_type = other DNA
ggagatatttggtcatacatgagtgaaagtatgactggagctccgggcaaaattctggcagccgcgatgttgatc

SEQ ID NO: 50138 - DNA, 75 bp, synthetic construct
  source 1..75: mol_type = other DNA
gtgctgccgtcacgctgtcgcgccgttatctgacagaacgtcagttaccggacaaggccgttgacctgcttgata

SEQ ID NO: 50139 - DNA, 75 bp, synthetic construct
  source 1..75: mol_type = other DNA
tcactcttgagatcggacacgttgaaaaattagctgatgaatgtgtagctgacattctcaccgaattaccaaatg

SEQ ID NO: 50140 - DNA, 75 bp, synthetic construct
  source 1..75: mol_type = other DNA
acttttaaagatgagatcaacaacaccgaacagcgctggtgctatcaggacggtctgaatgattacctggcggaa

SEQ ID NO: 50141 - DNA, 75 bp, synthetic construct
  source 1..75: mol_type = other DNA
gctggcggagatggcgatttccagcgcccagcgccgtatgcgtgcggccaaaaaagtggtgcgtaaaaagctgac

SEQ ID NO: 50142 - DNA, 75 bp, synthetic construct
  source 1..75: mol_type = other DNA
acttgattgggatcatatggataaggcaggcactgtagatggcaactatgtaaactatagtggttttgtctatta

SEQ ID NO: 50143 - DNA, 75 bp, synthetic construct
  source 1..75: mol_type = other DNA
tcaaggcctggataaaggccggaacaaggttcgagggtaaatcggacggtaacggtttatatttgcgctatcgca

SEQ ID NO: 50144 - DNA, 75 bp, synthetic construct
  source 1..75: mol_type = other DNA
cccagaaagccgtcaacctgaatgaaggcacgctgacgctgaacgacagtaccgtcaccacggatgtcattgctc

SEQ ID NO: 50145 - DNA, 75 bp, synthetic construct
  source 1..75: mol_type = other DNA
cagagcattgacagtaaatggcggagccactcagggaaccattcaggcagtgattagcatcacctatacctacag

SEQ ID NO: 50146 - DNA, 75 bp, synthetic construct
  source 1..75: mol_type = other DNA
gtgaccggtatcaggtaaaacgtatcacggtgaagccgggtagcggttttgccttacgtatgcaccaccatcgcg

SEQ ID NO: 50147 - DNA, 75 bp, synthetic construct
  source 1..75: mol_type = other DNA
agggcaacgacatcagcctcatgatgagcaagaaaatgaaggtaaattcgaaaacgatcagaaggacgaaagtta

SEQ ID NO: 50148 - DNA, 75 bp, synthetic construct
  source 1..75: mol_type = other DNA
gtatgaaagtgaaggtaaatataccgttagaaatttggttaaaaataaagctatagcattggaattagctgagat

SEQ ID NO: 50149 - DNA, 75 bp, synthetic construct
  source 1..75: mol_type = other DNA
cctggaatgccgaatcaggcgcttacaatgtcacccgctctggcgacagctatattctggttaacttctataccg

SEQ ID NO: 50150 - DNA, 75 bp, synthetic construct
  source 1..75: mol_type = other DNA
atggcttgaagaattgcgccttctttcctgtaacagcaaatgggtactacctgcgcggaaacaacagcaccgcat

SEQ ID NO: 50151 - DNA, 75 bp, synthetic construct
  source 1..75: mol_type = other DNA
cgcaacagcctttatattcctacttaataacaaacgcttcacgcttatcaataccggctctggctctttagccgt

SEQ ID NO: 50152 - DNA, 75 bp, synthetic construct
  source 1..75: mol_type = other DNA
gcagtatcatcagttaatctggcttcaaaaggtcgggtaaccgcgctgacagacaatacgcagggggcaacaggt

SEQ ID NO: 50153 - DNA, 75 bp, synthetic construct
  source 1..75: mol_type = other DNA
gcgtctggcgggtgccaaaagtggcggtgtttttcaggcagtgctgggggctgcgctgattgcggtggcatggtg

SEQ ID NO: 50154 - DNA, 75 bp, synthetic construct
  source 1..75: mol_type = other DNA
atggatgtcgagtatggccagtacagcgttatcctgctggttgaaggttttccgccttcacatgccggggccatc

SEQ ID NO: 50155 - DNA, 75 bp, synthetic construct
  source 1..75: mol_type = other DNA
atgttgtccaaacaaatcccgcttggcatctacgaaaaagcactccccgctggggagtgctggctggaacgactg

SEQ ID NO: 50156 - DNA, 75 bp, synthetic construct
  source 1..75: mol_type = other DNA
cgcgcggtgtcgagtacaacatggcgcagaatgctgtttatcgcgtttgcggtggcaagttgtataagggcgaaa

SEQ ID NO: 50157 - DNA, 75 bp, synthetic construct
  source 1..75: mol_type = other DNA
atgaacatgcgtaatattaatgttattacagcccgcgctgtgccgggtaaaaccgtatcagatgattttatacat

SEQ ID NO: 50158 - DNA, 75 bp, synthetic construct
  source 1..75: mol_type = other DNA
gggctatgacgtttactatcaggaagccaataacgaaacgcgtcgtcgttttcgtgacggcctgaaagagagcgt

SEQ ID NO: 50159 - DNA, 75 bp, synthetic construct
  source 1..75: mol_type = other DNA
tatggctgctgatgttgctggcgtggtatcttgttggcttgccgataggtccgggtattcacccacgtttgtctt

SEQ ID NO: 50160 - DNA, 75 bp, synthetic construct
  source 1..75: mol_type = other DNA
tgggacactctgatgctcagatggtttatcgcgtttacggatcgtggatggcagaaaacaatcaggatcaggtat

SEQ ID NO: 50161 - DNA, 75 bp, synthetic construct
  source 1..75: mol_type = other DNA
tgaaaaatcgcagcagggatggtgaactggtactggtgaaagccctgaactgtacgcagggcgagcgttatctgg

SEQ ID NO: 50162 - DNA, 75 bp, synthetic construct
  source 1..75: mol_type = other DNA
acggtgccgcaaatcgtcgaaaaaatcctgcgcgagcggcaccagatgcgcggtcaggacttcgtgtttaacctc

SEQ ID NO: 50163 - DNA, 75 bp, synthetic construct
  source 1..75: mol_type = other DNA
tataaagatgaagagaagaaaaagtatacgccagcgacggtgaatcgtagcgtaagtacgaatgatcaagggtat

SEQ ID NO: 50164 - DNA, 75 bp, synthetic construct
  source 1..75: mol_type = other DNA
tcaactattggctataatatacttaataccttttggatacttgattgtagaaaacccattatggctagaaaatat

SEQ ID NO: 50165 - DNA, 75 bp, synthetic construct
  source 1..75: mol_type = other DNA
tatgctaccacgctgcttgctccgggctggcgttttcgtagtatccagaatgttaaatttctggcgccacttata

SEQ ID NO: 50166 - DNA, 75 bp, synthetic construct
  source 1..75: mol_type = other DNA
gcatggggcgcgggatttgttgacggtatcggtcagggaatggagcgcgcctcccagccggctgtcgggctgggt

SEQ ID NO: 50167 - DNA, 75 bp, synthetic construct
  source 1..75: mol_type = other DNA
gctggcgtgggctcgtcatttttgttattaacgcaacgtacaggttttgattacctcaccgctggaatgtctgtt

SEQ ID NO: 50168 - DNA, 75 bp, synthetic construct
  source 1..75: mol_type = other DNA
caggaaaaatggagcggtgacggcgcagggcttaaggccatcaccggcggcgatgcggtctcggttgacccgaaa

SEQ ID NO: 50169 - DNA, 75 bp, synthetic construct
  source 1..75: mol_type = other DNA
ttgtccgaactgcttggccgcatcggtgactatcagcagggccgggagttaacccggctggcggaggtgctgaca

SEQ ID NO: 50170 - DNA, 75 bp, synthetic construct
  source 1..75: mol_type = other DNA
catcagccagttcgcccataaaccgtttattgtgttcatcaccgcgtggaaagaacatgcggtagaagcgtttga

SEQ ID NO: 50171 - DNA, 75 bp, synthetic construct
  source 1..75: mol_type = other DNA
tggataacctacaaaggaaagctaccaggaagaattactggttctctgaagactcctccggaatcacaaccttaa

SEQ ID NO: 50172 - DNA, 75 bp, synthetic construct
  source 1..75: mol_type = other DNA
ttacttttgaaaacgactcaatccttgcctggattcgaaatactgactgggcgaagattggatttaaaaatgatg

SEQ ID NO: 50173 - DNA, 75 bp, synthetic construct
  source 1..75: mol_type = other DNA
ggcaacatcgcttataccaacatgagcgagcagatggcgaagattttgcgtatgggcgctaacgaccagagcgtg

SEQ ID NO: 50174 - DNA, 75 bp, synthetic construct
  source 1..75: mol_type = other DNA
aaggtctggtgcaactctgtagtgatacggacaacgacagcgaggaactggctgccacgccaaaggctgtcaaag

SEQ ID NO: 50175 - DNA, 75 bp, synthetic construct
  source 1..75: mol_type = other DNA
gcgtctttgccacactcacgcccatttttaccctctggtatgggcataaagatatcacttatgacatcacaccct

SEQ ID NO: 50176 - DNA, 75 bp, synthetic construct
  source 1..75: mol_type = other DNA
accagcgaaacacacaatgcttgcatattcgtaagcatcgtttggctggtttttttgtccgactctttgttgcct

SEQ ID NO: 50177 - DNA, 75 bp, synthetic construct
  source 1..75: mol_type = other DNA
tttatgaataaattgcatgtgattctcggattattgcatctgaagagttataagcagttggaagattacattctc

SEQ ID NO: 50178 - DNA, 75 bp, synthetic construct
  source 1..75: mol_type = other DNA
gtcaaaaagttaattgctggggacgccgttttcatctgcgacgagtgtggatgtgtgcaacagaattatccgggg

SEQ ID NO: 50179 - DNA, 75 bp, synthetic construct
  source 1..75: mol_type = other DNA
gcgcagcctgtgagcgtttttctgagatctaccgccgttcacgcggcgtgtttatctcttaccagaaccggcaca

SEQ ID NO: 50180 - DNA, 75 bp, synthetic construct
  source 1..75: mol_type = other DNA
ttaacgaggtagcagctttattcggcgttacccgtcggacaatattccggtggatgaacaagattaaaggctggc

SEQ ID NO: 50181 - DNA, 75 bp, synthetic construct
  source 1..75: mol_type = other DNA
gtcccgtctgccgctgaaatggctgcagcgcgaacagcgccacgttctttatcatgcccgatggctgcagcggta

SEQ ID NO: 50182 - DNA, 75 bp, synthetic construct
  source 1..75: mol_type = other DNA
tcttgcctgcctgaaaatcggtgcggtttccgtgccgctgttgccttcctggcgggaagcagaactggtgtgggt

SEQ ID NO: 50183 - DNA, 75 bp, synthetic construct
  source 1..75: mol_type = other DNA
aaactggaaaaatggcaaacacatctgattaatccacatatcattctgtccaaagagccacaagggtttgttgct

SEQ ID NO: 50184 - DNA, 75 bp, synthetic construct
  source 1..75: mol_type = other DNA
tttaacagttatttttccggggcaactggtgtggtgaataaagagtatcaggtgaattttccgacaccatttgcc

SEQ ID NO: 50185 - DNA, 75 bp, synthetic construct
  source 1..75: mol_type = other DNA
gatgctattaaagacattggttattcatcgttaaaaacaattaacgatgtcgttcttttcccacgtacaattgct

SEQ ID NO: 50186 - DNA, 75 bp, synthetic construct
  source 1..75: mol_type = other DNA
gctgctgtccgtaaagcattcactgaggcaaaacaacgttatggtgcgcctcgtcttgctgacgaattgccggaa

SEQ ID NO: 50187 - DNA, 75 bp, synthetic construct
  source 1..75: mol_type = other DNA
aggcaaagcagcgatacggtgctccccgccttgctgacgaaatgccggagttcaatattaaaaccattgccgcca

SEQ ID NO: 50188 - DNA, 75 bp, synthetic construct
  source 1..75: mol_type = other DNA
ggaactgtgcagcctcgaaatccccaccgaagacccctgatgaaaagcaggatacgccggatatgagagagtact

SEQ ID NO: 50189 - DNA, 75 bp, synthetic construct
  source 1..75: mol_type = other DNA
cgtccgacactgacggtttctaacctgcacggcatggtcaccgggatggcggaagatctgcagagtctggtcggc

SEQ ID NO: 50190 - DNA, 75 bp, synthetic construct
  source 1..75: mol_type = other DNA
aactcaactcaaggcttaccttgagaaattgaccaagcctgttgagttaattgccacgctggatgacagcgctaa

SEQ ID NO: 50191 - DNA, 75 bp, synthetic construct
  source 1..75: mol_type = other DNA
ccttccgccgcccattgccctggctggaaggcaatgccattccggcactggcaaaagaatttgcaacaggcgtgc

SEQ ID NO: 50192 - DNA, 75 bp, synthetic construct
  source 1..75: mol_type = other DNA
cgtgaagtcagaaagcttctcaatcaggttgtacgtggtcgtgacgctgacggcatcgcatttccggtcagcaac

SEQ ID NO: 50193 - DNA, 75 bp, synthetic construct
  source 1..75: mol_type = other DNA
atccctcggattacggtaactttgattcccgctatgtgagagatatcagacttggcacacgtgttgtccagacca

SEQ ID NO: 50194 - DNA, 75 bp, synthetic construct
  source 1..75: mol_type = other DNA
ggttttaaaaatgatgccgacagcgatactgattcatacatgtggtttgaaacaggcgacaacggcaatgaatat

SEQ ID NO: 50195 - DNA, 75 bp, synthetic construct
  source 1..75: mol_type = other DNA
tgctgacggtgaaatccttcagtgaggatgagcgggtgatcaccgggattgcgtcaacgccttctccggatcggg

SEQ ID NO: 50196 - DNA, 75 bp, synthetic construct
  source 1..75: mol_type = other DNA
gatggatgttcatgccgtttgcaggcaaatattggcttcatgtcgaaactggcgaataagtcagatcataaatac

SEQ ID NO: 50197 - DNA, 75 bp, synthetic construct
  source 1..75: mol_type = other DNA
agcaggtcatttcttcccaagctgactcgctgattaaaatttcgcggatctgggccgatttttttcccgcaaaca

SEQ ID NO: 50198 - DNA, 75 bp, synthetic construct
  source 1..75: mol_type = other DNA
aacatggccgcgtgcgggtgaaatttaactgggaccgctataacccgtcaaaccaggacagttcatgctggatcc

SEQ ID NO: 50199 - DNA, 75 bp, synthetic construct
  source 1..75: mol_type = other DNA
tcgaatgtgattacaatcggtggcggcggcacagttggtgtggcggcctcagtccggaacaatttgaaaacaaga

SEQ ID NO: 50200 - DNA, 75 bp, synthetic construct
  source 1..75: mol_type = other DNA
gctgaatcagttatccagccgctggaacgcgccgtcaggctgaatatggcgacggatgaggagcgcgcacgactg

SEQ ID NO: 50201 - DNA, 75 bp, synthetic construct
  source 1..75: mol_type = other DNA
gcagcagcaacagcaggagcgtaaagcggcattccagaaaggttatgcagatgcttatgcgtccggtgacaggga

SEQ ID NO: 50202 - DNA, 75 bp, synthetic construct
  source 1..75: mol_type = other DNA
aggaactgcaacaacaggccgaatcacaaaaggccgcgttactttccgaagcagaaagcgttattcagccactgg

SEQ ID NO: 50203 - DNA, 75 bp, synthetic construct
  source 1..75: mol_type = other DNA
attgtttacgatgcaaataatattattgtcgccatcactaaagatgcctccacgcttaaccctgaaggttttagc

SEQ ID NO: 50204 - DNA, 75 bp, synthetic construct
  source 1..75: mol_type = other DNA
agcttcagagaatgaccagcctcaactggttgccactctcgttcctcatgaacagcgcatcagcttctggccgca

SEQ ID NO: 50205 - DNA, 75 bp, synthetic construct
  source 1..75: mol_type = other DNA
gaagcatgggaacgctacagtgttctggtcagccgtgtggatcctgcaaatcccgaatggccgaaaatgccacaa

SEQ ID NO: 50206 - DNA, 75 bp, synthetic construct
  source 1..75: mol_type = other DNA
agaacgccgtcgtatatggcgaaagttgcatctggcagttgacagcaacacacatgaaatcatctgtgcagacct

SEQ ID NO: 50207 - DNA, 75 bp, synthetic construct
  source 1..75: mol_type = other DNA
tggtctggctgtgctggtacgatttgatgctggggaacagtctggatgactggaatgacaatctcagattcaaaa

SEQ ID NO: 50208 - DNA, 75 bp, synthetic construct
  source 1..75: mol_type = other DNA
ctgacggccctgttcggtcatatgggactggagctggatccggtaacggccggagaagaggaatccgccggttac

SEQ ID NO: 50209 - DNA, 75 bp, synthetic construct
  source 1..75: mol_type = other DNA
ccagtccccactcagacctgattattaaaacccacccgtatgcagagattgtctggtggggatccaccctgaaac

SEQ ID NO: 50210 - DNA, 75 bp, synthetic construct
  source 1..75: mol_type = other DNA
tcttatggtgcgaacattttgattgaacccgccggacaggctgcgctgcccgcgctgtttagtgagagcagtaat

SEQ ID NO: 50211 - DNA, 75 bp, synthetic construct
  source 1..75: mol_type = other DNA
cgtatgacagccgggaattatgtaaaacaggcgcaactattgttttgtatgaaactatcaagcttaaaatagaac

SEQ ID NO: 50212 - DNA, 75 bp, synthetic construct
  source 1..75: mol_type = other DNA
ggagaaggcgatgttattactattgtccctcagtgcctgcaccggattatttatggcagagccgcagccccactg

SEQ ID NO: 50213 - DNA, 75 bp, synthetic construct
  source 1..75: mol_type = other DNA
cgtctgtgggtggcatcaactgactacaccggtgaaatggccgtttctgacgagatcctgaaacgtgctgccgac

SEQ ID NO: 50214 - DNA, 75 bp, synthetic construct
  source 1..75: mol_type = other DNA
agtgaagcgatgaacgatgcgttctgggacgagctgttgaaagtgcgtggcgaagtgaacaaagtcattgagcaa

SEQ ID NO: 50215 - DNA, 75 bp, synthetic construct
  source 1..75: mol_type = other DNA
gatcattgttgatgaaggcattcctgcggatagcctggaagggctgcgaaaggctggggttgaagtgattctggt

SEQ ID NO: 50216 - DNA, 75 bp, synthetic construct
  source 1..75: mol_type = other DNA
ggagcgcggcgtcagcacgcataatgaagatgaagcccgtttaaaccgccggatgtgcgaagttgcggaacggat

SEQ ID NO: 50217 - DNA, 75 bp, synthetic construct
  source 1..75: mol_type = other DNA
gaagtgggtgtttaaggacggaactgtggttaagcggatttatacagcagacgaacagcaacaacaggccgaatc

SEQ ID NO: 50218 - DNA, 75 bp, synthetic construct
  source 1..75: mol_type = other DNA
atgaaacaacaatatcagacccgctacgaatcgctccacgaaagctaccagaaatggctgaccggcttcacccgg

SEQ ID NO: 50219 - DNA, 75 bp, synthetic construct
  source 1..75: mol_type = other DNA
ctactgtcaccgctggaagaagcgcttcaggactatgtgctgactgacggtaagctccatgctgatgacacgcct

SEQ ID NO: 50220 - DNA, 75 bp, synthetic construct
  source 1..75: mol_type = other DNA
ctgggcctaatggtgcaggaaaatctaccctagttaagcgacatatccttgggaaaatagaggttgttaaccctg

SEQ ID NO: 50221 - DNA, 75 bp, synthetic construct
  source 1..75: mol_type = other DNA
caccggactggatttatctgacaccggacgccttatttacactattggctcggagccacagcgatacaccattat

SEQ ID NO: 50222 - DNA, 75 bp, synthetic construct
  source 1..75: mol_type = other DNA
cagtgtgagttacaaggacgagtggggcgataaatataaatcagaggctgacgttaaaagtcacgacatcatgtt

SEQ ID NO: 50223 - DNA, 75 bp, synthetic construct
  source 1..75: mol_type = other DNA
gatggaccggggatcgcacccgacaaaatcgatcacatttttgacaaaggtgtctcgacaaaaggaagcgagcga

SEQ ID NO: 50224 - DNA, 75 bp, synthetic construct
  source 1..75: mol_type = other DNA
tttcagtaccaccattaacaatgtgctggcactaaaagcaccgttgtcgagtccggcactcaccggaacgccaac

SEQ ID NO: 50225 - DNA, 75 bp, synthetic construct
  source 1..75: mol_type = other DNA
caatgtctggtgcaggccggtttaattattcctgtcgcgcggctgcgtccggtgctaacgctcaaaaacagtgga

SEQ ID NO: 50226 - DNA, 75 bp, synthetic construct
  source 1..75: mol_type = other DNA
gcgcccacgatactttctgggattatgtttctctgcaacctgaaactctgcacaacgtgatgtgggcgatgtcgg

SEQ ID NO: 50227 - DNA, 75 bp, synthetic construct
  source 1..75: mol_type = other DNA
actttttgctgctcatttgcctcagcacaggagtgcaggccgcgaaaaagatcgcgacgttatacattcctgcgg

SEQ ID NO: 50228 - DNA, 75 bp, synthetic construct
  source 1..75: mol_type = other DNA
ctcctgaaacgggcggattctggatccgggaaattggtgtgtttgatgagcacggcgatttaatcgcggtgggca

SEQ ID NO: 50229 - DNA, 75 bp, synthetic construct
  source 1..75: mol_type = other DNA
tccacccacgttagtgtggccagttccacttctgcacggtttttccagctcttacggtgtattacctccgctttg

SEQ ID NO: 50230 - DNA, 75 bp, synthetic construct
  source 1..75: mol_type = other DNA
aaggcgtacgaagcatacgatttccacgaagtggtacagcgtctgatgcgcttctgctccgttgagatgggttcc

SEQ ID NO: 50231 - DNA, 75 bp, synthetic construct
  source 1..75: mol_type = other DNA
atatcagctaacaaagaattttgatgttatctggttatggtccgaagacggaaaaaactggtatgaggaagtaag

SEQ ID NO: 50232 - DNA, 75 bp, synthetic construct
  source 1..75: mol_type = other DNA
gcggcagcaatttccggtgcgtaaagcaaagagaggcaggcaaaggggtgagacagtaggtgtttatgatcagtg

SEQ ID NO: 50233 - DNA, 75 bp, synthetic construct
  source 1..75: mol_type = other DNA
ctatgaagccaggatatctcacagctttgacagtgcgtatctgaacgcatcctactggcgccagaactactggaa

SEQ ID NO: 50234 - DNA, 75 bp, synthetic construct
  source 1..75: mol_type = other DNA
catgctgatgctcgacagcagggatattaccggcaatatcagcgaccgtctgatgagcatgaccctgacggataa

SEQ ID NO: 50235 - DNA, 75 bp, synthetic construct
  source 1..75: mol_type = other DNA
gaggaagcgctgaaacggatcggcgaactgtacgccatcgaggcagagataaggggaatgacggcggagcagcgc

SEQ ID NO: 50236 - DNA, 75 bp, synthetic construct
  source 1..75: mol_type = other DNA
atgtcatggcaacgtctgcgaaaaaacgtaagccgggtttgttgtcacgttgtttggctgttgttaataaatcaa

SEQ ID NO: 50237 - DNA, 75 bp, synthetic construct
  source 1..75: mol_type = other DNA
tcttctcgtcagaggctaactatgaacgcttccgtgaaacgccggagcagtttgttcctgccgacatgagggagg

SEQ ID NO: 50238 - DNA, 75 bp, synthetic construct
  source 1..75: mol_type = other DNA
cgctgttaacgacaaaaggtaaagctaccgttgcttttgcccgtgaagcgcgtaccgaagtccgtaaggtcattt

SEQ ID NO: 50239 - DNA, 75 bp, synthetic construct
  source 1..75: mol_type = other DNA
ttgattgtgatgttactgtgtgcgggcatttcattttcactggcagtgattgacccggcagcggtacaccttttg

SEQ ID NO: 50240 - DNA, 75 bp, synthetic construct
  source 1..75: mol_type = other DNA
cggtgtgtttcaggtggtgctgggggcggcgctgattgcggtggcatggtggaaccctgtgggctggctgggtgc

SEQ ID NO: 50241 - DNA, 75 bp, synthetic construct
  source 1..75: mol_type = other DNA
taatctcaccgccgaaaaaattgaaaacaccggaaatatcattgagtgtacagacttgcaagagacaaccaacgc

SEQ ID NO: 50242 - DNA, 75 bp, synthetic construct
  source 1..75: mol_type = other DNA
tttggacttacaccctgattaccgccatgacgccaggaccgaacaatattctcgcccttagctctgctacgtcgc

SEQ ID NO: 50243 - DNA, 75 bp, synthetic construct
  source 1..75: mol_type = other DNA
tgcagcgctgacatcggcgatgctggaccggatcttacatcactcacacgtcgtgcaaataaaaggggaaagcta

SEQ ID NO: 50244 - DNA, 75 bp, synthetic construct
  source 1..75: mol_type = other DNA
cggagtggagccagaaagctacctccgctatgtccttgacgtcatagccgactggccgataaaccgggtcggcga

SEQ ID NO: 50245 - DNA, 75 bp, synthetic construct
  source 1..75: mol_type = other DNA
attgcgtggggccaacccttccagactcacgaggtaacattcgtttcatcctgattgtacaaaatctaccagatg

SEQ ID NO: 50246 - DNA, 75 bp, synthetic construct
  source 1..75: mol_type = other DNA
actggaagcccgtgtccgggaaaatatcaccctgggcgttcaggccggttatgcccacagcgtcagcggcagcag

SEQ ID NO: 50247 - DNA, 75 bp, synthetic construct
  source 1..75: mol_type = other DNA
tcatttacgccggcggtgaccagacggtacacggcgaggcacataacacccggctggagggaggaaaccagtatg

SEQ ID NO: 50248 - DNA, 75 bp, synthetic construct
  source 1..75: mol_type = other DNA
tgcttccgtacaaacgcgatggtgagttgttgcaggtcaagcgaatcagcactgagcgcccggacgggaagaaag

SEQ ID NO: 50249 - DNA, 75 bp, synthetic construct
  source 1..75: mol_type = other DNA
gccggttatgcccacagtgtcagcggcaacagcgctgaaggctataacggtcaggccacgctgaatgtgaccttc

SEQ ID NO: 50250 - DNA, 75 bp, synthetic construct
  source 1..75: mol_type = other DNA
aaaaaacgctgatggcggtagcgtgtctgagcgcagtacctgcagcccaggctgctgtctccctggaccgcacac

SEQ ID NO: 50251 - DNA, 75 bp, synthetic construct
  source 1..75: mol_type = other DNA
aattaaaaattgcacctaagtatttcaacgctgtggttgcaggtcaaaagacggctgaacttcgtaaagacgatc

SEQ ID NO: 50252 - DNA, 75 bp, synthetic construct
  source 1..75: mol_type = other DNA
cgaagcgaaatcggtcaacatccaccactgcaacgtgtttattcctctgcgacctttgagcaacttctgacgcag

SEQ ID NO: 50253 - DNA, 75 bp, synthetic construct
  source 1..75: mol_type = other DNA
gatgtgggtattgctctggctacggaactggaaacggccgggcagaaatggtctctgggcttcccccccaaattc

SEQ ID NO: 50254 - DNA, 75 bp, synthetic construct
  source 1..75: mol_type = other DNA
cctgttatcgggctggtgctttcgacgcgtcacgaaggagttcaggacatcaccctgtctgactggaaagataat

SEQ ID NO: 50255 - DNA, 75 bp, synthetic construct
  source 1..75: mol_type = other DNA
gtgctcagcaaatctctcgagagaaacagacaactggcagagtatgctgaccgggcagccgaagccggaagagtc

SEQ ID NO: 50256 - DNA, 75 bp, synthetic construct
  source 1..75: mol_type = other DNA
acgcagtcaggtgaggcaacgattactgttagcgttgatggcatgagcaaaaccgtcactgcagaactgcgggcc

SEQ ID NO: 50257 - DNA, 75 bp, synthetic construct
  source 1..75: mol_type = other DNA
ttaccctgccggcgtaccggttcaccagtacgccagaaaccgataacacctggccgattgaagtcaccgctgaag

SEQ ID NO: 50258 - DNA, 75 bp, synthetic construct
  source 1..75: mol_type = other DNA
gaacagccaggccgtaagtgtcccgcaaacattgccggaggcattacgtctcgccgcggatctggccgagcagaa

SEQ ID NO: 50259 - DNA, 75 bp, synthetic construct
  source 1..75: mol_type = other DNA
cgacgaaatgtatcggttgccgtacctgtgaagtggcttgcgcagtgtcgcatcaggagaatcaggattgcgctg

SEQ ID NO: 50260 - DNA, 75 bp, synthetic construct
  source 1..75: mol_type = other DNA
gtacagccttctgttatccgcaccttcagctcccggggggacatgagcatgggtacagccgcagccggcagtaac

SEQ ID NO: 50261 - DNA, 75 bp, synthetic construct
  source 1..75: mol_type = other DNA
ccggactctgtcagcaggtatttctggacgccgggcaggacgtggagatgccggagccggagaagaagaaacgag

SEQ ID NO: 50262 - DNA, 75 bp, synthetic construct
  source 1..75: mol_type = other DNA
aaccattggctttgtgccatcggcggaagtgaatttactgccaaaagtattaccgatgtttcgtctcagacagcc

SEQ ID NO: 50263 - DNA, 75 bp, synthetic construct
  source 1..75: mol_type = other DNA
gataatccggtcaaaacgtcaatctcctgcttcagctggacggatgctatcgatcatggcccgcaaatgacggca

SEQ ID NO: 50264 - DNA, 75 bp, synthetic construct
  source 1..75: mol_type = other DNA
atcgagtctgagatctgcggcagtccggcagaagagcgactggcggtcagaaaagccagaacggtaccgctaatg

SEQ ID NO: 50265 - DNA, 75 bp, synthetic construct
  source 1..75: mol_type = other DNA
agaaaaatgaagatcgacggacagccgaacgctttcagaaatgggtggaaatgggcgttctgaccgttaccgatg

SEQ ID NO: 50266 - DNA, 75 bp, synthetic construct
  source 1..75: mol_type = other DNA
gaaaaggcatccatccgcagacccatcttgcggggttcagtggtgtactgcaggcggatgctgtcacgaacggtg

SEQ ID NO: 50267 - DNA, 75 bp, synthetic construct
  source 1..75: mol_type = other DNA
ctatcgttcataatttccagacccgttttcgtggtttagctaactattatcaactagcctgtgacagaagtaaaa

SEQ ID NO: 50268 - DNA, 75 bp, synthetic construct
  source 1..75: mol_type = other DNA
cgataaacgtgctgttgaacgcgtctgtatagtgggatcgggcgactcctggacggtggcactatgtgccgccgc

SEQ ID NO: 50269 - DNA, 75 bp, synthetic construct
  source 1..75: mol_type = other DNA
acccaatatcgccactacgggtaaaatgagtggattttcatttcaataccagggtattgcctttaaagcatctca

SEQ ID NO: 50270 - DNA, 75 bp, synthetic construct
  source 1..75: mol_type = other DNA
ttcacgccagccataaagattggctgcatgatgtttatcgctcacctgtacgagaatcgccagctggtagcggat

SEQ ID NO: 50271 - DNA, 75 bp, synthetic construct
  source 1..75: mol_type = other DNA
gctatgtgtttgccctgatgtggttccagacctggccgttgctgtatgccattctgaacagtgccatgacattct

SEQ ID NO: 50272 - DNA, 75 bp, synthetic construct
  source 1..75: mol_type = other DNA
tgacagcagccgctcgattgcatttggcaacacgaacaaaacggctgataccgacgtgaaacagcagtacctgga

SEQ ID NO: 50273 - DNA, 75 bp, synthetic construct
  source 1..75: mol_type = other DNA
gttctggaacaaggctttatccaattacaatgggagtttcaaagcagctattacccatttatgataaaccgatga

SEQ ID NO: 50274 - DNA, 75 bp, synthetic construct
  source 1..75: mol_type = other DNA
attattacaacacctgaagatcaaagcagcttcgaacgtttattaggtgacggttctcagtttggtatttcatta

SEQ ID NO: 50275 - DNA, 75 bp, synthetic construct
  source 1..75: mol_type = other DNA
atgacccctatatggtgattttttcccggcccagcccgctgcggggggtatatgacagtaataataattttgtca

SEQ ID NO: 50276 - DNA, 75 bp, synthetic construct
  source 1..75: mol_type = other DNA
tgatcggcacctgccgtctgaacggtatcgatccggaagcgtatctgcgccatatactgagcgtactgccggaat

SEQ ID NO: 50277 - DNA, 75 bp, synthetic construct
  source 1..75: mol_type = other DNA
atattgtaagagggcagtattctgaactgcagaatcaccataaaacagaggcattatctcagaataataaatata

SEQ ID NO: 50278 - DNA, 75 bp, synthetic construct
  source 1..75: mol_type = other DNA
ccgcaagtttcagcttgaagaaatctgtcgtctgttccgggtgccattgcacatggtgcagaacaccgatcgcgc

SEQ ID NO: 50279 - DNA, 75 bp, synthetic construct
  source 1..75: mol_type = other DNA
acagaataaaacaggtggtgacttcaaggaaatagacctgctgacccggcagcttaaaaagctgcatgatggcca

SEQ ID NO: 50280 - DNA, 75 bp, synthetic construct
  source 1..75: mol_type = other DNA
atgaacgacatctcttctgacgacattttcctgctgaaacagcgcctggccgaacaggaagcgctgatccacgcc

SEQ ID NO: 50281 - DNA, 75 bp, synthetic construct
  source 1..75: mol_type = other DNA
ttgcgacagtcgcgccatcgtcgtccgttaccggcacaccttccccgtgaaatacaccgcctggagccagaagaa

SEQ ID NO: 50282 - DNA, 75 bp, synthetic construct
  source 1..75: mol_type = other DNA
gctggattatctggatgcactggagctggttgatacctccagtgcaccagatattgaatggcctacgcctccggc

SEQ ID NO: 50283 - DNA, 75 bp, synthetic construct
  source 1..75: mol_type = other DNA
tgagtgccgctacttcctgcctgctgtatgtgcgtgaaatcgaaaggtcaggccccggtgaaatgccggtgtcat

SEQ ID NO: 50284 - DNA, 75 bp, synthetic construct
  source 1..75: mol_type = other DNA
gtgttcttttcgggattatttcaaagaaaaagtaacgcaccggtgaccacgccagcagagctggcagatgctatc

SEQ ID NO: 50285 - DNA, 75 bp, synthetic construct
  source 1..75: mol_type = other DNA
gcctgcgtggtggtgtttatcgccatgcaaattctcggcgatcaggaagtgatgttatggctggcctggccattc

SEQ ID NO: 50286 - DNA, 75 bp, synthetic construct
  source 1..75: mol_type = other DNA
atgtttttccaggggctttttcaacgtaaaaataacacccccgtcacaacgcccgggatgcttgcggaagagctg

SEQ ID NO: 50287 - DNA, 75 bp, synthetic construct
  source 1..75: mol_type = other DNA
tcgccatgtgcctggcgtcatagcagactggccggtcaaccgggtcagcgaactgcttccgtggcgcatagcact

SEQ ID NO: 50288 - DNA, 75 bp, synthetic construct
  source 1..75: mol_type = other DNA
ggtgaatttgagtacctgttattgcttgcaggggaacaccctgattatgtgctttgtaaaaggaattctgattct

SEQ ID NO: 50289 - DNA, 75 bp, synthetic construct
  source 1..75: mol_type = other DNA
caaagagtgtttgttcgataccgaactgaaagcggcacaggattacgacatcttcctgcggatggtggtggagta

SEQ ID NO: 50290 - DNA, 75 bp, synthetic construct
  source 1..75: mol_type = other DNA
tctgcattattcttcatgggtgaaaaaagcttctgatggtactgtaaaagaaggcgctttcactgcagttgctga

SEQ ID NO: 50291 - DNA, 75 bp, synthetic construct
  source 1..75: mol_type = other DNA
tggaaggtagcaacctgaccgacgctgacgccatcacctcaacgtccgtggtatggactgccaaaggcagcaccg

SEQ ID NO: 50292 - DNA, 75 bp, synthetic construct
  source 1..75: mol_type = other DNA
gtactggagggccattcagcctggaaaacactggtggatgacggcggaaccctggcagtgtctgccggtggtaag

SEQ ID NO: 50293 - DNA, 75 bp, synthetic construct
  source 1..75: mol_type = other DNA
ggaatgactggaaaccgttcgcagcacgtccggtgggtaatcgtccggtgtggattggctacgacgctaacggca

SEQ ID NO: 50294 - DNA, 75 bp, synthetic construct
  source 1..75: mol_type = other DNA
tttcagaattcgaaactaccgaacaagaaaacagttacaacgaatggttgcgcactaaagtaacgtcaagccttg

SEQ ID NO: 50295 - DNA, 75 bp, synthetic construct
  source 1..75: mol_type = other DNA
tttctgagtttgaaaccgttgagcaagaaaataattacaacgaatggctacgtgcaaaagtagctgcaaatcttg

SEQ ID NO: 50296 - DNA, 75 bp, synthetic construct
  source 1..75: mol_type = other DNA
cggggcgctgggagtatgaccggggcgaacgtgagctggtcagggcattcaacgccgtgcgcaaggcaaaaacgg

SEQ ID NO: 50297 - DNA, 75 bp, synthetic construct
  source 1..75: mol_type = other DNA
cgaggaataaaaaatatcggtatatcaacgccattacatgaagcattatttcagaagttaaataatgatgcagaa

SEQ ID NO: 50298 - DNA, 75 bp, synthetic construct
  source 1..75: mol_type = other DNA
aaccgtctggggaatttcacggtggaaaacggtaaggctgacggtgttgttctggagtccggcggtcgcctggat

SEQ ID NO: 50299 - DNA, 75 bp, synthetic construct
  source 1..75: mol_type = other DNA
ccagacgatttatcagccggggagcttcacgccactcatcagagttgaaaccgccaccggtgtgctggcgaaaac

SEQ ID NO: 50300 - DNA, 75 bp, synthetic construct
  source 1..75: mol_type = other DNA
gtgattatgatccggatgtactgcagcaggcggtgaatgatgcggtcgcaaatattccgcagccggcggacggta

SEQ ID NO: 50301 - DNA, 75 bp, synthetic construct
  source 1..75: mol_type = other DNA
atggctggattatctggacgcactggaactggttgatccctccagtgctccagatattgaatggcctacgcctcc

SEQ ID NO: 50302 - DNA, 75 bp, synthetic construct
  source 1..75: mol_type = other DNA
ccggtgtgttgcgtacggaacaaaagctcacgccggatgcttacgagcgtctgaagaaagattttgaggagcgtc

SEQ ID NO: 50303 - DNA, 75 bp, synthetic construct
  source 1..75: mol_type = other DNA
acagcaggccgccctgattgaggagtacacccaaaaatacaatgtgaagcatatcgggattgatgtcaccggcgg

SEQ ID NO: 50304 - DNA, 75 bp, synthetic construct
  source 1..75: mol_type = other DNA
gtgatggtgaggcagccttcagcctgagtgcgctcaccggctgcggtgttgacggctatgacgaatggcctgact

SEQ ID NO: 50305 - DNA, 75 bp, synthetic construct
  source 1..75: mol_type = other DNA
acaccgggcttggcaatgctcaccgcccgatgatccttgagatggggctggactggaagtcgatggcgctgaacg

SEQ ID NO: 50306 - DNA, 75 bp, synthetic construct
  source 1..75: mol_type = other DNA
gctgtcagatcaggcttatgagcgcctgaagaaagattttgaggagcgtcacaccgggcttggcaatgctcaccg

SEQ ID NO: 50307 - DNA, 75 bp, synthetic construct
  source 1..75: mol_type = other DNA
cgaaaaaatccagactgggcgaagcgttcagctatgtactgaatcagtgggatgccctctgttattacagtgatg

SEQ ID NO: 50308 - DNA, 75 bp, synthetic construct
  source 1..75: mol_type = other DNA
agacgagcatttgccatccacgggtcagtgccacggttgatgaagaatgttcgcaacgggtggatttattgcaac

SEQ ID NO: 50309 - DNA, 75 bp, synthetic construct
  source 1..75: mol_type = other DNA
attttactgggtggcgcttcctctaaccacggtaaacggagtgtcccagtttcagcctgagtggatatgctggga

SEQ ID NO: 50310 - DNA, 75 bp, synthetic construct
  source 1..75: mol_type = other DNA
gctggaaaatggcggacgtctggatgtactgagcggccataccgccacaaacacacatgtggatgaggggggtac

SEQ ID NO: 50311 - DNA, 75 bp, synthetic construct
  source 1..75: mol_type = other DNA
tgggatgtgggaagtttgttggatttttctttcccaattatcggatgcttattggtatggattcttgcatcgtag

SEQ ID NO: 50312 - DNA, 75 bp, synthetic construct
  source 1..75: mol_type = other DNA
gtacttgctatcgtctggtgtatcttcattagtatccgccatgttgtgcgttcggggcatcagggacaggtattc

SEQ ID NO: 50313 - DNA, 75 bp, synthetic construct
  source 1..75: mol_type = other DNA
ttaacatgccgtggtggggcggttttgatccacgtgcatgggatgtggcaagcctgatggattttgctgtgccgg

SEQ ID NO: 50314 - DNA, 75 bp, synthetic construct
  source 1..75: mol_type = other DNA
tagctgatgatgttttgctggcgctcatgttgctggtcgggcactggtacgaaaaccgggaaaattcctcagatg

SEQ ID NO: 50315 - DNA, 75 bp, synthetic construct
  source 1..75: mol_type = other DNA
gtcaccactggcgagctggtgttttcccatctggctacactgcgaagtaacgcgccggtgacgacgctgacgccg

SEQ ID NO: 50316 - DNA, 75 bp, synthetic construct
  source 1..75: mol_type = other DNA
cacccaggcagaatatcgctggattgaaatgttcgggcatggcaagcgtatgaatatgccgtggtggggcggttt

SEQ ID NO: 50317 - DNA, 75 bp, synthetic construct
  source 1..75: mol_type = other DNA
caatttcgttattattttcttgttcagcagcttttgctgatttgcaatgcggcggatatctacttcatgcagctg

SEQ ID NO: 50318 - DNA, 75 bp, synthetic construct
  source 1..75: mol_type = other DNA
gcgtcagttggctactcaatatccagaccagattgaatccgttcgtaaaggcatgggattcattgatgaagagca

SEQ ID NO: 50319 - DNA, 75 bp, synthetic construct
  source 1..75: mol_type = other DNA
ctgactatcccgaactgtatttcttacgacccggcttacgcttacgaagttgctgtcatcatgcatgatggtctg

SEQ ID NO: 50320 - DNA, 75 bp, synthetic construct
  source 1..75: mol_type = other DNA
tggacgaaccggaatccaaaggtgcgatcaccatcgctacccgtgaaaaactggataacctggtcttcgttatca

SEQ ID NO: 50321 - DNA, 75 bp, synthetic construct
  source 1..75: mol_type = other DNA
tcatgtttccgggaatccaaagtttgaatatgcgaatatggtcgaagatatcagggataaggtgtcatctgagat

SEQ ID NO: 50322 - DNA, 75 bp, synthetic construct
  source 1..75: mol_type = other DNA
agccaccgtgaacaataacggcaacaccaccgttgacggcaaggattccacgggcaccgagataaacggtgacaa

SEQ ID NO: 50323 - DNA, 75 bp, synthetic construct
  source 1..75: mol_type = other DNA
gtaatgatgtctatgataaagtaaatgcgatagttgaacagcgtcgtcatgagggggcaagagataaagatataa

SEQ ID NO: 50324 - DNA, 75 bp, synthetic construct
  source 1..75: mol_type = other DNA
tggcaggttgttaaggcaggtggcgctgccggtaacaccaccataaatcagaacggtgaactgagggtacatgcc

SEQ ID NO: 50325 - DNA, 75 bp, synthetic construct
  source 1..75: mol_type = other DNA
ttatcggtttccttaaaaggattgttttttcctcagattcactcccggggaagtgggaacacagaaaattccggt

SEQ ID NO: 50326 - DNA, 75 bp, synthetic construct
  source 1..75: mol_type = other DNA
gatgatggcggaacgctggatgtccgcaacggtggtaccgccaccaccgtatccatgggaaatggcggtgtactg

SEQ ID NO: 50327 - DNA, 75 bp, synthetic construct
  source 1..75: mol_type = other DNA
ggcatccggcagagggcgaagatgccagtttttcacaatcgatcaattacccggcgtcgtccgtcaacatggcag

SEQ ID NO: 50328 - DNA, 75 bp, synthetic construct
  source 1..75: mol_type = other DNA
tcgttattattatagctgttttgtctgtccggataatattccggaggagtaaaaactgtcctcccgcactgatac

SEQ ID NO: 50329 - DNA, 75 bp, synthetic construct
  source 1..75: mol_type = other DNA
tggatccgatcgaaactcgcgactggctccaggcgatcgaatcggtcatccgtgaagaaggtgttgagcgtgctc

SEQ ID NO: 50330 - DNA, 75 bp, synthetic construct
  source 1..75: mol_type = other DNA
aatggctgaattgactaagcggcttgccaattacctgacaaaagaaaaagccccgaagaacggcgaattcttcga

SEQ ID NO: 50331 - DNA, 75 bp, synthetic construct
  source 1..75: mol_type = other DNA
tctggagtccggtggtcgcctggatgtactggagggccattcagcctggaaaacactggtggatgacggcggtac

SEQ ID NO: 50332 - DNA, 75 bp, synthetic construct
  source 1..75: mol_type = other DNA
cacgaagacaattaacaaattagaatcaatcgcaatcatcgataccgtttgccaattaatagatggtggcgtagc

SEQ ID NO: 50333 - DNA, 75 bp, synthetic construct
  source 1..75: mol_type = other DNA
tgatgttatcgatcatgctcagataaaaagtgacttactggaatggattggcggtgaaaacctcagggaactggg

SEQ ID NO: 50334 - DNA, 75 bp, synthetic construct
  source 1..75: mol_type = other DNA
tggatgagctcgttgattgtgtggcagagctggaaaccaaagttggaaagtttgaaaaaatggtgcaggaggtgc

SEQ ID NO: 50335 - DNA, 75 bp, synthetic construct
  source 1..75: mol_type = other DNA
aagccacgatgccagaaaactgctgcagatgaccggagaatggctgaatacaacaggaactgatcagcagtcacc

SEQ ID NO: 50336 - DNA, 75 bp, synthetic construct
  source 1..75: mol_type = other DNA
agatgtagtaaaacctttagcctggcttggcgataacgttgctatttccggagatatgatgttatttcgccacga

SEQ ID NO: 50337 - DNA, 75 bp, synthetic construct
  source 1..75: mol_type = other DNA
ggttgtacgttcttcattgcgcgtgaacatacccaggcagaatatcgctggattgaaatgttcgggcatggcaag

SEQ ID NO: 50338 - DNA, 75 bp, synthetic construct
  source 1..75: mol_type = other DNA
atggatacaacaccaataacacatgcagtatgcgcggttattgcgcagatactggttggcctttctaccggaaac

SEQ ID NO: 50339 - DNA, 75 bp, synthetic construct
  source 1..75: mol_type = other DNA
ggatgtcgtaaaacctttagcttggctcggtgataaagttgctatttccggagatatgatgttatttcgccatga

SEQ ID NO: 50340 - DNA, 75 bp, synthetic construct
  source 1..75: mol_type = other DNA
gctatcaggtgaagcggatcaccgtgaaaccgggcgaggggctttcactgcaaatgcatcaccaccgggcagaac

SEQ ID NO: 50341 - DNA, 75 bp, synthetic construct
  source 1..75: mol_type = other DNA
tttgctttttgcaggtgagcactattcaaagtttgtgtgggagaaataccgtaaactttcacctacagctcgccg

SEQ ID NO: 50342 - DNA, 75 bp, synthetic construct
  source 1..75: mol_type = other DNA
ctgagcttaaagatagtgggttaattcatagtgcttggatagataaagatcgtattcattgcaaacgaactaacg

SEQ ID NO: 50343 - DNA, 75 bp, synthetic construct
  source 1..75: mol_type = other DNA
cccggcgattgcccttgcggcgctggcggcggtacgtcgtgataccggctgcgacccgctgatgctggtgctggc

SEQ ID NO: 50344 - DNA, 75 bp, synthetic construct
  source 1..75: mol_type = other DNA
cgtgaagaaggtgttgagcgtgctcagtatctgatcgaccaactgcttgctgaagcccgcaaaggcggtgtcaac

SEQ ID NO: 50345 - DNA, 75 bp, synthetic construct
  source 1..75: mol_type = other DNA
atgaaccaaccaatacacaatgcttactggttatcccgttttgaaagcattctcaacagtgccctggcgcagcac

SEQ ID NO: 50346 - DNA, 75 bp, synthetic construct
  source 1..75: mol_type = other DNA
tgaaacgaaactgcatgacggttcaggtcaacgtaattatggttgcagtcgtgggtcggggcgtcttctggatgg

SEQ ID NO: 50347 - DNA, 75 bp, synthetic construct
  source 1..75: mol_type = other DNA
cccgccgaaagatccacgatgtgcacgtccgcatcccgtcagcgaaaaacgaaaccgctgttgaaatccctggaa

SEQ ID NO: 50348 - DNA, 75 bp, synthetic construct
  source 1..75: mol_type = other DNA
cgtgccgtctcgttaatccgggtggatttacggtttcctgagtatatgcctgccaccatcatggataccgattta

SEQ ID NO: 50349 - DNA, 75 bp, synthetic construct
  source 1..75: mol_type = other DNA
cagcttggcgcaagcctgatgtatgaacagtattatggcgatgaagtcgggctgtttggtaaagataagcgccag

SEQ ID NO: 50350 - DNA, 75 bp, synthetic construct
  source 1..75: mol_type = other DNA
tgccgatgaggtgcgcgcgcagctggcaaccgatcctgaattgctggctgtgaatgccatggcggcaaaactggg

SEQ ID NO: 50351 - DNA, 75 bp, synthetic construct
  source 1..75: mol_type = other DNA
atcatcaatgcaacagccgcctactcagcaatcagcaggaggtagctacacgtcaaaatcaggcattcaatttac

SEQ ID NO: 50352 - DNA, 75 bp, synthetic construct
  source 1..75: mol_type = other DNA
gtggctgagcttcaacaaacgtattaccgccaggtaaagaacccgaatccggtgttcacaccccgtgaaggagca

SEQ ID NO: 50353 - DNA, 75 bp, synthetic construct
  source 1..75: mol_type = other DNA
cgcggaaaacttgcagagacaatccgcagcaatcaggctggagaagcactaacagcgcgtggtcagaacatcacg

SEQ ID NO: 50354 - DNA, 75 bp, synthetic construct
  source 1..75: mol_type = other DNA
gttcaggtcggaaaagaacaaccttctatctataccgttaattctgttaataagctgcggcaaataccactccgt

SEQ ID NO: 50355 - DNA, 75 bp, synthetic construct
  source 1..75: mol_type = other DNA
actgatgaccctgccagtctgggtacggaaatgctgacattcagcgccagtgcagctcataacccgctggcaaac

SEQ ID NO: 50356 - DNA, 75 bp, synthetic construct
  source 1..75: mol_type = other DNA
gtcagacgatgcccggttctctgatgtgcataaagccgtggagctggtcgccactgagcagcagaacctgagcgc

SEQ ID NO: 50357 - DNA, 75 bp, synthetic construct
  source 1..75: mol_type = other DNA
atgaaggcgggattgcaacgggtaccgtcattaatgagaagggctggcaggccatcaaatccggcgcagtggcaa

SEQ ID NO: 50358 - DNA, 75 bp, synthetic construct
  source 1..75: mol_type = other DNA
cttaccgggatgggggcgcgacgtcagccactgatgtgggccatcactaccgccgggtacaacattgaggggccg

SEQ ID NO: 50359 - DNA, 75 bp, synthetic construct
  source 1..75: mol_type = other DNA
cgctgtggccgatgaagatgtaacgttcgacaaggcgacgggcaaggcacagctggctaatccggtggtcgcgca

SEQ ID NO: 50360 - DNA, 75 bp, synthetic construct
  source 1..75: mol_type = other DNA
gcaggcaccgttctggtcattaacgtgcttgatccggctgtgcataaaaccgctgtggccgatgaagatgtaacg

SEQ ID NO: 50361 - DNA, 75 bp, synthetic construct
  source 1..75: mol_type = other DNA
agtcctccctgcaggaacaacaggccgcctttgccgagttacagcagcagctgagccgtgaagacagccgcaagg

SEQ ID NO: 50362 - DNA, 75 bp, synthetic construct
  source 1..75: mol_type = other DNA
gtaccggcatgaagctgcttaacgacagcttcaacctgtttggctacttcgcaaaaatactgattgccccggtct

SEQ ID NO: 50363 - DNA, 75 bp, synthetic construct
  source 1..75: mol_type = other DNA
gtttcgtcagaaactgagcgacggctggtatcaggtacggattgccgggcgtgatacaggtgaaacggaattatc

SEQ ID NO: 50364 - DNA, 75 bp, synthetic construct
  source 1..75: mol_type = other DNA
tccaaatctcatggtaaatatgcgcttttccccatttttactgcgagttggcgagctcatcgtataatgaataag

SEQ ID NO: 50365 - DNA, 75 bp, synthetic construct
  source 1..75: mol_type = other DNA
gcaggggccagtatgatcctgggtggtgtggcccagatgctggcaccgaaagcccggacgcccacagcgaccagc

SEQ ID NO: 50366 - DNA, 75 bp, synthetic construct
  source 1..75: mol_type = other DNA
gcctgcgttatttctggtgccgggagttcggcaagatgtatggcaggaaacattatcacgtgatattactgctca

SEQ ID NO: 50367 - DNA, 75 bp, synthetic construct
  source 1..75: mol_type = other DNA
tatattctccagtgtggcccgggccggttcagaaacaggaaaaaactgaacgcattgctgaacattcttgaatct

SEQ ID NO: 50368 - DNA, 75 bp, synthetic construct
  source 1..75: mol_type = other DNA
gagggggcgagagaaaaagatgtcagtttttcagcaacggcttcaatgcttcttgaactgggtcttcgtgtatat

SEQ ID NO: 50369 - DNA, 75 bp, synthetic construct
  source 1..75: mol_type = other DNA
caatttcgttactgttttcctgctcatcggctttcgctgatttgcaatgcgggggataccgacttcatgcatctg

SEQ ID NO: 50370 - DNA, 75 bp, synthetic construct
  source 1..75: mol_type = other DNA
gtggtgttcttttatcagttgtcggcacgtcagaggccttagctgatactcagtgcgggccgtatcgcctcactg

SEQ ID NO: 50371 - DNA, 75 bp, synthetic construct
  source 1..75: mol_type = other DNA
agatgggtttcgtccaatagctttgccaacagcccaaaagatcatggaaaagtcgccagaaggggctaaaaaagc

SEQ ID NO: 50372 - DNA, 75 bp, synthetic construct
  source 1..75: mol_type = other DNA
gcaccggcacgcaggttaacggtgatgaagccaccgtgaacaataacggtaaaaccaccgttgatggtcagggct

SEQ ID NO: 50373 - DNA, 75 bp, synthetic construct
  source 1..75: mol_type = other DNA
tgacctttgatccgctgaataagctggaccggacccagaatgcacatctgctgcttttcgggcctaccggagccg

SEQ ID NO: 50374 - DNA, 75 bp, synthetic construct
  source 1..75: mol_type = other DNA
agctcagtattaccagcctgacccgaaaacagttcctctcttttctgccgtccggcgaaaacttcctgccactga

SEQ ID NO: 50375 - DNA, 75 bp, synthetic construct
  source 1..75: mol_type = other DNA
ggcggcacggcttgaccagtcaagtttcgttgtccagcgggccagaccaatgctgaaaagcctgcgggcaagaca

SEQ ID NO: 50376 - DNA, 75 bp, synthetic construct
  source 1..75: mol_type = other DNA
agctcctgatggtcttcgttgtcgtttgcgttttgaaaaatacgatgggtcggtttatacatttttaggagatgc

SEQ ID NO: 50377 - DNA, 75 bp, synthetic construct
  source 1..75: mol_type = other DNA
agcccagcgagctgggagagctggtctatcgctatgccgataaaatgttcaccttaagccaggaaatgctggata

SEQ ID NO: 50378 - DNA, 75 bp, synthetic construct
  source 1..75: mol_type = other DNA
ttttcgcttaagtgcatcaggcgctcatgctgaacgtgcagcccgtgactcattgaccagggcaatccggagtct

SEQ ID NO: 50379 - DNA, 75 bp, synthetic construct
  source 1..75: mol_type = other DNA
aacattaataccgaccccaggctggcgctggatgcggcttataagctggcgcagttcacgcaccacaaaaaaggg

SEQ ID NO: 50380 - DNA, 75 bp, synthetic construct
  source 1..75: mol_type = other DNA
ctggctgctgacacggttgtacaggctggagaaaccgtgagcggcggaacactggtaaatcatgacaaccagatt

SEQ ID NO: 50381 - DNA, 75 bp, synthetic construct
  source 1..75: mol_type = other DNA
gtgtaggtgatgctgtttttggtgctgcacttgttgattccaggctgaatggttctgacaaggaggtgcgtctat

SEQ ID NO: 50382 - DNA, 75 bp, synthetic construct
  source 1..75: mol_type = other DNA
aacggcatgagcgggttttagatagaattagaaacctcgaatgttccgctgaatttactgaacacaattttgtgt

SEQ ID NO: 50383 - DNA, 75 bp, synthetic construct
  source 1..75: mol_type = other DNA
cagtaccgcagacgccagcctcaccgcccggcccggaaggcgaaccacagccaggaaacacacccgtatctttcc

SEQ ID NO: 50384 - DNA, 75 bp, synthetic construct
  source 1..75: mol_type = other DNA
ggttcggcattcacccagggcgcggaggggacattcagtgcggacacgggggccagccaggattcggcacgctgg

SEQ ID NO: 50385 - DNA, 75 bp, synthetic construct
  source 1..75: mol_type = other DNA
gatccgcacgcttgaatgctcagcatcattcactgcccgcaatttttcggtgagtgattacactgattgcacagg

SEQ ID NO: 50386 - DNA, 75 bp, synthetic construct
  source 1..75: mol_type = other DNA
gaaagggaaaaccggttctctgaccgcgctgccgattatcgaaactcaggcgggtgacgtttctgcgttcgttcc

SEQ ID NO: 50387 - DNA, 75 bp, synthetic construct
  source 1..75: mol_type = other DNA
gaccgcggtgaagatgcgctgatcatttacgatgacctgtctaaacaggctgttgcttaccgtcagatctccctg

SEQ ID NO: 50388 - DNA, 75 bp, synthetic construct
  source 1..75: mol_type = other DNA
cacagaacgccgccacagagcagcgcgatgcgctgtcaggggaactggcaaaactggcgcaatgctggcagtcac

SEQ ID NO: 50389 - DNA, 75 bp, synthetic construct
  source 1..75: mol_type = other DNA
ttcaggtaccagaatcacccgacgccccggaagcgctgccggggtctcgttccatttctgatgatgacctgtgcg

SEQ ID NO: 50390 - DNA, 75 bp, synthetic construct
  source 1..75: mol_type = other DNA
actggatgactgcatcagtgacagcttcagcggtttcagtatcgatggcgtggcggattttgtgcagaacgacgt

SEQ ID NO: 50391 - DNA, 75 bp, synthetic construct
  source 1..75: mol_type = other DNA
ggtgatctggatgcagggggaaaaagatgtcagttcggggagacatgcagagcacaatgcactttttcttgccat

SEQ ID NO: 50392 - DNA, 75 bp, synthetic construct
  source 1..75: mol_type = other DNA
atgacgtggaaagacaggcttcaggacgcgtcatttcgcggtgtgccgtttaaggttgaagaagaaagtgcggga

SEQ ID NO: 50393 - DNA, 75 bp, synthetic construct
  source 1..75: mol_type = other DNA
caacatttgctggatattgccttctggtgcaacgaaaaaggggtcagcgcccgtcagcagcttagcgttcagcaa

SEQ ID NO: 50394 - DNA, 75 bp, synthetic construct
  source 1..75: mol_type = other DNA
tcgcgaacaggtcagtgaatttctctccggtctgctgattggcagcgaagttgccagcatgggcgagtatatccc

SEQ ID NO: 50395 - DNA, 75 bp, synthetic construct
  source 1..75: mol_type = other DNA
gcgttcagcgcgtgtggaacgggtgcttagcgagccgcatcatccctccggggagttaacggattttcgtatccg

SEQ ID NO: 50396 - DNA, 75 bp, synthetic construct
  source 1..75: mol_type = other DNA
aagcactgagtgctgattttaatatagtagaggggctggctcagcaggaggctctgggcattttaaataagtatc

SEQ ID NO: 50397 - DNA, 75 bp, synthetic construct
  source 1..75: mol_type = other DNA
ctgcaactgacaggcatatcaaaggcggcgacatatacgctgctgattgacagtgtgaaggtggaagtgaacaac

SEQ ID NO: 50398 - DNA, 75 bp, synthetic construct
  source 1..75: mol_type = other DNA
tggtgaaggtcttccgctgccggagacatatgaccgtccggacccgcgtattaagcagctggcgcgccgcagtac

SEQ ID NO: 50399 - DNA, 75 bp, synthetic construct
  source 1..75: mol_type = other DNA
atggatcagaaaattttgtcggataaggttttgaatgaaagaatgaatgcgtattattctcattatcttggaggg

SEQ ID NO: 50400 - DNA, 75 bp, synthetic construct
  source 1..75: mol_type = other DNA
gtattgcgtcaattactcgatataccggaaagccgtcgcagaccttgcggcgcgcgggttcagcattgttaacag

SEQ ID NO: 50401 - DNA, 75 bp, synthetic construct
  source 1..75: mol_type = other DNA
gataacaatatctcagttatcgattccacagtgacttcaggttctgtaactactctggaagacagtggtttctat

SEQ ID NO: 50402 - DNA, 75 bp, synthetic construct
  source 1..75: mol_type = other DNA
atgaccacatcgcattctgctattacccaggaaaaagccttcaacatactcgaacgactagagacgctcgctacg

SEQ ID NO: 50403 - DNA, 75 bp, synthetic construct
  source 1..75: mol_type = other DNA
tctgatggtatcaataacacagatgcagcgacggtagggcaactgaatgaacgatttgatgatgcacaggtcttt

SEQ ID NO: 50404 - DNA, 75 bp, synthetic construct
  source 1..75: mol_type = other DNA
gaacgcctgatgctggataactttcttgagcatctggcgcactggaatccggtgttattagccgttgatgaagcg

SEQ ID NO: 50405 - DNA, 75 bp, synthetic construct
  source 1..75: mol_type = other DNA
tggagacacaccgctgggcgcagtgattatgtcgatcgttatggctggcttgcgcattgcctattttggcggtgg

SEQ ID NO: 50406 - DNA, 75 bp, synthetic construct
  source 1..75: mol_type = other DNA
agaatacaaggagcaagaaggaaatccagaaattaagtctaaacgcagagagcgcatcaggaaattctttctgag

SEQ ID NO: 50407 - DNA, 75 bp, synthetic construct
  source 1..75: mol_type = other DNA
aggtgcgggtacaagtaacgcagccgggtctcacgcaattggagccgtcgctgcccgtgctgatcatcgacgacg

SEQ ID NO: 50408 - DNA, 75 bp, synthetic construct
  source 1..75: mol_type = other DNA
gcgcccggaggggatgatccgcattggttgcagttttggttttgggcgcagccatattgctccagccattaccga

SEQ ID NO: 50409 - DNA, 75 bp, synthetic construct
  source 1..75: mol_type = other DNA
cggacattgaggggcctgtccgtaacggcggtattggtactgctttcactgctcttgccactactttggcaaaaa

SEQ ID NO: 50410 - DNA, 75 bp, synthetic construct
  source 1..75: mol_type = other DNA
agagcaaccggtcatggttttcgtcacaccatgagtaccattctgcacgaacaggggtttaattctgcctggatt

SEQ ID NO: 50411 - DNA, 75 bp, synthetic construct
  source 1..75: mol_type = other DNA
cgggacgtgttactggaagacgtggtgcagcggaatatcccgctctcgcataaaaaactgcgcagggcgctgaag

SEQ ID NO: 50412 - DNA, 75 bp, synthetic construct
  source 1..75: mol_type = other DNA
tatttcgttgcgtgaggttgctggctgggaacacgatcttcatgctgcaatgaacaacattcaggaagaaatcga

SEQ ID NO: 50413 - DNA, 75 bp, synthetic construct
  source 1..75: mol_type = other DNA
cagccctgctggtcagcccggtgctgatggtctgtctggtgttctgcctgctggccgtgttgctgatgcttatcc

SEQ ID NO: 50414 - DNA, 75 bp, synthetic construct
  source 1..75: mol_type = other DNA
catagtaggactacgtgcaatgatttcatcaatctttggggtagatgcacaagaagcgatgatgttattgcaggc

SEQ ID NO: 50415 - DNA, 75 bp, synthetic construct
  source 1..75: mol_type = other DNA
attggagataagaaacaagcattatattatagaagtcgcaacagtgccgtagccacattcaaattaaagggtctg

SEQ ID NO: 50416 - DNA, 75 bp, synthetic construct
  source 1..75: mol_type = other DNA
gtgagtaaacgttattttgtcaccggaacggataccgaagtggggaaaactgtcgccagttgtgcacttttacaa

SEQ ID NO: 50417 - DNA, 75 bp, synthetic construct
  source 1..75: mol_type = other DNA
acaaatagcaaatcatctacattttcaacatcctatggtgaggggagtaagaggagtacctgtcgaagttctgaa

SEQ ID NO: 50418 - DNA, 75 bp, synthetic construct
  source 1..75: mol_type = other DNA
ctgacccgccagacgcgccgctttcgtctggttgtgaaggaaagcgattacccctgctggcttgatgaagatgac

SEQ ID NO: 50419 - DNA, 75 bp, synthetic construct
  source 1..75: mol_type = other DNA
cagcctggaagtggcaatgatttctttaaaaaatgccaatcattctgaactgcgcccgattgggtatcaggatga

SEQ ID NO: 50420 - DNA, 75 bp, synthetic construct
  source 1..75: mol_type = other DNA
gggcaagaccagtgttgtcactggcgataatagtcttgcgcttggtagtaataccaatgccaatggtattaactc

SEQ ID NO: 50421 - DNA, 75 bp, synthetic construct
  source 1..75: mol_type = other DNA
cgtgcggctggatgcaccccggctggcgacgttactcgttaaccgccacgatggcgtgctgccgccgcacctggc

SEQ ID NO: 50422 - DNA, 75 bp, synthetic construct
  source 1..75: mol_type = other DNA
taaaataccggactctgttccgggtctgttcagcgttaatgcaaataaagatttcatttatattgatgaacagaa

SEQ ID NO: 50423 - DNA, 75 bp, synthetic construct
  source 1..75: mol_type = other DNA
agtgccgggcaggcctcagccagtgccaccgccgccggaaaatcggcagaaagtgccgcatcgtctgcttcaaca

SEQ ID NO: 50424 - DNA, 75 bp, synthetic construct
  source 1..75: mol_type = other DNA
ctcaacgggcgtgttgatcgtgccttgtatgctgacgttggctattcctggagtgctgccgcgctttaaagcaga

SEQ ID NO: 50425 - DNA, 75 bp, synthetic construct
  source 1..75: mol_type = other DNA
tgcagccacttctgcatccaccgcgaccacgaaagcgtcagaagctgccacctcagcccgggatgcggcggcctc

SEQ ID NO: 50426 - DNA, 75 bp, synthetic construct
  source 1..75: mol_type = other DNA
cgctggtttgaccgtggtgttctgcgggaggtggtccgggaagcccggagtgaaatccgcagcatggcggatgca

SEQ ID NO: 50427 - DNA, 75 bp, synthetic construct
  source 1..75: mol_type = other DNA
taccgattcagcgctgttgtgcgaactggctcagaagtgcctttgcgaatgcgccagagatattcgtgtcgtgac

SEQ ID NO: 50428 - DNA, 75 bp, synthetic construct
  source 1..75: mol_type = other DNA
cgttgaacatggcagctctggtggctacgcagtttaatcctgccataaagctgttctaccagcgtttgcttgccg

SEQ ID NO: 50429 - DNA, 75 bp, synthetic construct
  source 1..75: mol_type = other DNA
cgatcacccctgctggctcgatgaagatgacgaaaatctgcctgtggtgctcgatgccatcctggtaagcgtcaa

SEQ ID NO: 50430 - DNA, 75 bp, synthetic construct
  source 1..75: mol_type = other DNA
gctgatacaggcacagaccgcctggcgcgccacactcactcagtatcccggcgtactctggctggacttcatgcc

SEQ ID NO: 50431 - DNA, 75 bp, synthetic construct
  source 1..75: mol_type = other DNA
ccagcacatcagcccgtgaggcggcaacccatgcgactgatgctgcagattcagcacgtgcagccagcacgtcag

SEQ ID NO: 50432 - DNA, 75 bp, synthetic construct
  source 1..75: mol_type = other DNA
gcttacccgtggtcagacggtggcgctggcttcgtggatcttctgggccggtgaaacgaactttcgcaactccac

SEQ ID NO: 50433 - DNA, 75 bp, synthetic construct
  source 1..75: mol_type = other DNA
atccggactacagactggagcaatacatgcaaaccatcaccatcgccccgcctaagcgtagctggttctcgcttc

SEQ ID NO: 50434 - DNA, 75 bp, synthetic construct
  source 1..75: mol_type = other DNA
ccgtttccagccgtgtaatagttaaaggttctcgtaacaccagcgtatcggaagaaggtgttgtgattggttatg

SEQ ID NO: 50435 - DNA, 75 bp, synthetic construct
  source 1..75: mol_type = other DNA
gaagatgcgcggcgtatccgggcggcgctgaccaccaccggtcagacgttgctgacccgccagacgcgccgcttt

SEQ ID NO: 50436 - DNA, 75 bp, synthetic construct
  source 1..75: mol_type = other DNA
tggtgtggagcaacatgataatttcctgaatcagacatttgaaaataccagtaaacacatcacgatagtttctcc

SEQ ID NO: 50437 - DNA, 75 bp, synthetic construct
  source 1..75: mol_type = other DNA
ccaaaactttgaagttgttgctcagtatcagttcgactttggcctgcgcccgtccatcgcttacctgcaatctaa

SEQ ID NO: 50438 - DNA, 75 bp, synthetic construct
  source 1..75: mol_type = other DNA
tgaaaacggaacaccgtctgcccgcgctggggaaactgctccggcatgagtcgtcgctgaatcctgtgcgtcctc

SEQ ID NO: 50439 - DNA, 75 bp, synthetic construct
  source 1..75: mol_type = other DNA
gtttcaaagcgggatttttgaagttttgtggagcgatattgtttatgctgctcagttgggtggtctggggggggg

SEQ ID NO: 50440 - DNA, 75 bp, synthetic construct
  source 1..75: mol_type = other DNA
gtcgcgatgaagatggctattactggatcaccgggcgtgtggacgacgtgctgaacgtctccggtcaccgtctgg

SEQ ID NO: 50441 - DNA, 75 bp, synthetic construct
  source 1..75: mol_type = other DNA
atgtaccatggggcaaaaaaactatgtggtgccattaaataccgtatatcaatcacagttcacatctttgtataa

SEQ ID NO: 50442 - DNA, 75 bp, synthetic construct
  source 1..75: mol_type = other DNA
gtatgcttccgctatatttgactctggtgcctatatcgacctgattggtaagtatgttcaccatgataatgagta

SEQ ID NO: 50443 - DNA, 75 bp, synthetic construct
  source 1..75: mol_type = other DNA
ccggaaaacagcagcgcggggaaggttttgaactgcgtaccgatctgtggggtgcagtacgggcaaagaaaggca

SEQ ID NO: 50444 - DNA, 75 bp, synthetic construct
  source 1..75: mol_type = other DNA
aaccctgtgtatgttcgttttgatacgacagtcgtcggggagaatacgatctcactggtcagacggtgtatcaaa

SEQ ID NO: 50445 - DNA, 75 bp, synthetic construct
  source 1..75: mol_type = other DNA
atttagccagttataccttatatggctatatctcaatggcaacgttttatctggttagccagtggctggcacaat

SEQ ID NO: 50446 - DNA, 75 bp, synthetic construct
  source 1..75: mol_type = other DNA
aagcgcctcttgaaggttggcattatggctctaaggaaattgttaaagaattccatatatatcatagtgttgcga

SEQ ID NO: 50447 - DNA, 75 bp, synthetic construct
  source 1..75: mol_type = other DNA
cgctggtttgacagggatattctgcgggaggttgttctggaggcacgggatgaaatccgcagcatggcggatgca

SEQ ID NO: 50448 - DNA, 75 bp, synthetic construct
  source 1..75: mol_type = other DNA
tgctgtggggaattcgatgtttgcggacctggtgagcgtggcggggcatatctacaagcacggcatgcatgccgg

SEQ ID NO: 50449 - DNA, 75 bp, synthetic construct
  source 1..75: mol_type = other DNA
gcagagcagtggcagtatgacggccacggctggctgagagaaatcagccacctgagcgaaggccaccgtgtcgct

SEQ ID NO: 50450 - DNA, 75 bp, synthetic construct
  source 1..75: mol_type = other DNA
ttaagggcgtggaggaacggcgcgtaacctaccgtcgtgaaggctacgaatatgattgcgtgatgcctgtttatc

SEQ ID NO: 50451 - DNA, 75 bp, synthetic construct
  source 1..75: mol_type = other DNA
ttgctgcatttgaaggacgagatattgcgacatttgatcttgccataatgcgaactctcccaaggcttaaaggaa

SEQ ID NO: 50452 - DNA, 75 bp, synthetic construct
  source 1..75: mol_type = other DNA
gagtacgcagaccgcaaccgtgccgttgctaatcagcggctgagcggaagcaatgcacggtggaaatggacaacg

SEQ ID NO: 50453 - DNA, 75 bp, synthetic construct
  source 1..75: mol_type = other DNA
acgttttctggtgttgccgaaggggatgaaagccgaaacgaactggacgaaggacaacggcaaactgaacgcagt

SEQ ID NO: 50454 - DNA, 75 bp, synthetic construct
  source 1..75: mol_type = other DNA
gggatacaaccaggtgcagcggcaaaaactcaatcaacgattgtcgcggacaaaacgatatatatcgctggggat

SEQ ID NO: 50455 - DNA, 75 bp, synthetic construct
  source 1..75: mol_type = other DNA
gattgtagacttcctcaacggcgatccggaccagccgatcattatggggcgcacctaccaccaggaaaaccgcac

SEQ ID NO: 50456 - DNA, 75 bp, synthetic construct
  source 1..75: mol_type = other DNA
gactggctgcatgggctggtgatgaagcgttatcagtgacacaaaccaggacagaacgccccgcatcacagccag

SEQ ID NO: 50457 - DNA, 75 bp, synthetic construct
  source 1..75: mol_type = other DNA
aactaaaagcagtgccagtcaaacagaatggcgtgacgctgacaggcgcacagtttaacgccagcatgacaatgg

SEQ ID NO: 50458 - DNA, 75 bp, synthetic construct
  source 1..75: mol_type = other DNA
ccgtggcttcagcacccggacacgaggaagtgcatgtgtttgttgatgcatctgaccgcgcagaagcgaaaaagc

SEQ ID NO: 50459 - DNA, 75 bp, synthetic construct
  source 1..75: mol_type = other DNA
tgattatgccggagttttctttactgaaaatggagggacccttgatctaaatggttatgaccaggtatttaagta

SEQ ID NO: 50460 - DNA, 75 bp, synthetic construct
  source 1..75: mol_type = other DNA
agaagcaatcagaatgacactattactataggaggccgtaatatgaggcttcattatatccagtttatggatggt

SEQ ID NO: 50461 - DNA, 75 bp, synthetic construct
  source 1..75: mol_type = other DNA
gcgggctaccgctatcatgtcactgaggatgcctggattgagccacaggctgagctggtttacggttctgtatcc

SEQ ID NO: 50462 - DNA, 75 bp, synthetic construct
  source 1..75: mol_type = other DNA
gattacgttgatgacaaaattgcagagcacgaacagtcacgacgtcacccggacgcctcgctgaccgcaaaaggt

SEQ ID NO: 50463 - DNA, 75 bp, synthetic construct
  source 1..75: mol_type = other DNA
gcgtatttatatgggacatctgcgacaaaaactggaacaggatcccgctcgcccccgccatttcattactgaaac

SEQ ID NO: 50464 - DNA, 75 bp, synthetic construct
  source 1..75: mol_type = other DNA
ctctggcagacagagggacttatattgcttctgaatcaaccttttatcgtgtactgaaatcagccaaccagttga

SEQ ID NO: 50465 - DNA, 75 bp, synthetic construct
  source 1..75: mol_type = other DNA
ctgagcacggtcatgagtgcccttatgtcagaccggaacgcagagaaatacgtttgattaaacgtctgcagcaat

SEQ ID NO: 50466 - DNA, 75 bp, synthetic construct
  source 1..75: mol_type = other DNA
caatgtcaccacgattattatggggagcagtactgcacaaactgccagaccggaggattcagtattccccggaca

SEQ ID NO: 50467 - DNA, 75 bp, synthetic construct
  source 1..75: mol_type = other DNA
agcgcgcaattcacttacattaatcatggggacggctactcccccggctggcgtcgtgactggaatcgtcagggc

SEQ ID NO: 50468 - DNA, 75 bp, synthetic construct
  source 1..75: mol_type = other DNA
ttaaacagtcctgcgttgaccggaacgccaacaacgccaactgcgcgacagggaacgaataatacccaaatcgca

SEQ ID NO: 50469 - DNA, 75 bp, synthetic construct
  source 1..75: mol_type = other DNA
ggcagcggcaaccgcgccgggagggcggaaggtcaacattaccacgatggccgtcggggatggcggtggtaaatt

SEQ ID NO: 50470 - DNA, 75 bp, synthetic construct
  source 1..75: mol_type = other DNA
tttaccagtgtgccattatttaaagatgaaatggtgctggtagccagcaaaaatcatccaacaattaaaggcccg

SEQ ID NO: 50471 - DNA, 75 bp, synthetic construct
  source 1..75: mol_type = other DNA
aagcgaatgcaattacaagcaacatcctgaatcgaattgctgtacgtggtcagcgaaaggttgccgacgcgttag

SEQ ID NO: 50472 - DNA, 75 bp, synthetic construct
  source 1..75: mol_type = other DNA
atgccagtcatattaaatttttctaatggaagtgtattgccggaaaatgagctggaggctttacgacatattgca

SEQ ID NO: 50473 - DNA, 75 bp, synthetic construct
  source 1..75: mol_type = other DNA
gttacccgatacagactggcctttcaggaaaggagaacggaacatttacgtttacagccattccttttaaggagg

SEQ ID NO: 50474 - DNA, 75 bp, synthetic construct
  source 1..75: mol_type = other DNA
aatcctaaaatcacaaacatcttctgagggagagattccattttataaaattgggacatttggtaaggaacccga

SEQ ID NO: 50475 - DNA, 75 bp, synthetic construct
  source 1..75: mol_type = other DNA
agcaacggctggatgcgaaggttaacctggcgggcggcatcaatgaggatttttaccttgcacagcttgctgccc

SEQ ID NO: 50476 - DNA, 75 bp, synthetic construct
  source 1..75: mol_type = other DNA
tttactgctattccttttaaagaaggaagtaaagaactggaagcgaaggcattcacggcttcagcgaacatgagt

SEQ ID NO: 50477 - DNA, 75 bp, synthetic construct
  source 1..75: mol_type = other DNA
gcgcattctcccggcgctgggtgtgaaggtcattaaaaaccggcatcaggcctgcccggtatgcggcggctctga

SEQ ID NO: 50478 - DNA, 75 bp, synthetic construct
  source 1..75: mol_type = other DNA
gtgagcaagattgactatcaggcactgcgtgaggaggcagagcgtgcaattccggcaatggatcgcctgttaatg

SEQ ID NO: 50479 - DNA, 75 bp, synthetic construct
  source 1..75: mol_type = other DNA
gcaatacgacaccgaacggccctggtttgaacacactgacgacgggctgacggagcacgcgcagcaatgtcctta

SEQ ID NO: 50480 - DNA, 75 bp, synthetic construct
  source 1..75: mol_type = other DNA
caaggactacaatccgctgattggccgaactggtgtggatgtgggtaaatccttctctggtaaggactggaaagt

SEQ ID NO: 50481 - DNA, 75 bp, synthetic construct
  source 1..75: mol_type = other DNA
ccagcgatcccggtgctgggcaccaactggtgcgggtttggtatcacagacttccaggacacagccaacccggca

SEQ ID NO: 50482 - DNA, 75 bp, synthetic construct
  source 1..75: mol_type = other DNA
aacgacaggctatctatgaaccagcaacctcgccgtgcgctttcgcgttatgctctgacttttcagagaaatatc

SEQ ID NO: 50483 - DNA, 75 bp, synthetic construct
  source 1..75: mol_type = other DNA
cctgtccggtctgtggcgggagtgaccgcttccgttttgatgacagggaggggcgcggcacctggtactgcaatc

SEQ ID NO: 50484 - DNA, 75 bp, synthetic construct
  source 1..75: mol_type = other DNA
acaaaccctgatggcaaaaacccgtcccggaaccggtaacgcctacctgacccgcaagggctttcccggccggga

SEQ ID NO: 50485 - DNA, 75 bp, synthetic construct
  source 1..75: mol_type = other DNA
caacagacaccggcgttcggtcgaagagtatctggtgtcatagaaattgccgatgggagtcgccgtcgtaaagct

SEQ ID NO: 50486 - DNA, 75 bp, synthetic construct
  source 1..75: mol_type = other DNA
ggcttgaccagtcgagtttcgtagttcagcgggccagaccaatgctgaaaagcctgcgggcaagacaatttgaat

SEQ ID NO: 50487 - DNA, 75 bp, synthetic construct
  source 1..75: mol_type = other DNA
ttctcctgaaagatcgctagttgaacaacaaaaaatagtgaaattactggataaatttgatgctttgaccaactc

SEQ ID NO: 50488 - DNA, 75 bp, synthetic construct
  source 1..75: mol_type = other DNA
agatctcgtattccaactgagtgtatagagagaattgaagccattcttaaggaacttgaaaaaacggcactttga

SEQ ID NO: 50489 - DNA, 75 bp, synthetic construct
  source 1..75: mol_type = other DNA
cggggtggatgtcgctgtcgcgtaaaccggaggagacctggtacgggtgggacggtgacaggctgaccactgtac

SEQ ID NO: 50490 - DNA, 75 bp, synthetic construct
  source 1..75: mol_type = other DNA
ttaaacatcctgattaccagatggtttttgaatggcggatggaacgcttacagcgcattcgccagaatcctgaaa

SEQ ID NO: 50491 - DNA, 75 bp, synthetic construct
  source 1..75: mol_type = other DNA
gttctgcccgacaggaatattcaccggaatttgaacaggcctggcaggaatatcccaaacgtgctggtggtaatt

SEQ ID NO: 50492 - DNA, 75 bp, synthetic construct
  source 1..75: mol_type = other DNA
ttcaggcaggaagagcaccaatcagatttttaacgagtgtcggcaaagcccggcgatgaagcgggtactggctgt

SEQ ID NO: 50493 - DNA, 75 bp, synthetic construct
  source 1..75: mol_type = other DNA
cgctaactggctatggcgaacttgttgaagtggatgataaattgggcgtagaaattcattcttggttatcaggga

SEQ ID NO: 50494 - DNA, 75 bp, synthetic construct
  source 1..75: mol_type = other DNA
ttttagaggtgaagaattgaagaaggtttggcttaaccgttatcccgcggacgttccgacggagatcaaccctga

SEQ ID NO: 50495 - DNA, 75 bp, synthetic construct
  source 1..75: mol_type = other DNA
aaccgaccactggatgctgtttaccccattgtttatcttgactgtatcgtcctgaaagttcggcaggacagtcgc

SEQ ID NO: 50496 - DNA, 75 bp, synthetic construct
  source 1..75: mol_type = other DNA
gacgaaggcagggacaaaaatgccttttccacccgtcatggcttcctcctggaaaatgtgcgggaatggtccggt

SEQ ID NO: 50497 - DNA, 75 bp, synthetic construct
  source 1..75: mol_type = other DNA
ttcgtggaaacactgcccatcgagtttcgtggttcgtgggacgagaagaagcatgcgccgtatatgcgcgttgag

SEQ ID NO: 50498 - DNA, 75 bp, synthetic construct
  source 1..75: mol_type = other DNA
ctcgaaacgcataaatataccaggacagcagaaccagcaaggcaaggccatcacagattacgatccctatgctta

SEQ ID NO: 50499 - DNA, 75 bp, synthetic construct
  source 1..75: mol_type = other DNA
agaaactgatttactcatcaacctgtcaacgcttacccagcgcggtctggcaaagatgattggctgtcatgaatc

SEQ ID NO: 50500 - DNA, 75 bp, synthetic construct
  source 1..75: mol_type = other DNA
cagcaggaaagcagcctggtcgccaccgcgataaatcacaataaaaacaaatccggaaaaatcatcagtacggat

SEQ ID NO: 50501 - DNA, 75 bp, synthetic construct
  source 1..75: mol_type = other DNA
atctacttttcagccttgatggagccagcagtttggggagctgaacttgctatgtcactgtctggcctcgagggt

SEQ ID NO: 50502 - DNA, 75 bp, synthetic construct
  source 1..75: mol_type = other DNA
atggaacaaacaaattacagcaaactatcacagcgcgacgttgatcgcgcagaaacagatttacttatcaacctg

SEQ ID NO: 50503 - DNA, 75 bp, synthetic construct
  source 1..75: mol_type = other DNA
ccgcgataaatcacaataaaaacaaatccggaaaaatcatcagtacggattacgggattatgcagattaattcag

SEQ ID NO: 50504 - DNA, 75 bp, synthetic construct
  source 1..75: mol_type = other DNA
tttcctttgtgctgacggatctggaacgcctcgatccggttcgagtgatgattgaaaactacgaacctggtaagg

SEQ ID NO: 50505 - DNA, 75 bp, synthetic construct
  source 1..75: mol_type = other DNA
ggcagggatgtcgctggtcggcggacagagcgtgacggatgtacagtcaggaacgttgccacagtggcttaaaac

SEQ ID NO: 50506 - DNA, 75 bp, synthetic construct
  source 1..75: mol_type = other DNA
acgccggattcagcaaaaataacacagcccggcgcatgatatatgcccgaaaaatccacaaccggtatttcagaa

SEQ ID NO: 50507 - DNA, 75 bp, synthetic construct
  source 1..75: mol_type = other DNA
ggtggcaattcaaaatctgcagccttcaaagcctggaaagcccgtttgaatgagggggtaaaccccgaaaccatg

SEQ ID NO: 50508 - DNA, 75 bp, synthetic construct
  source 1..75: mol_type = other DNA
tttccacccgtcatggcttcctcctggaaaatgtgcgggaatggtccggtgtgggcagcgacatttatcagtccg

SEQ ID NO: 50509 - DNA, 75 bp, synthetic construct
  source 1..75: mol_type = other DNA
gctaatcgattatcgcaaagcgaaaaagctggcgcgactggctgaatggttgggggtagtaaatgatgatgtttg

SEQ ID NO: 50510 - DNA, 75 bp, synthetic construct
  source 1..75: mol_type = other DNA
atgtaccggattttctgttccctgtttttcctgccgctggcagcgtctgccggcacaacaatttataccgattct

SEQ ID NO: 50511 - DNA, 75 bp, synthetic construct
  source 1..75: mol_type = other DNA
tcaccagcgtgacgatggtaaacagcgtgagttccagccttacattgaagcgaactggatcaacaatagcaaagt

SEQ ID NO: 50512 - DNA, 75 bp, synthetic construct
  source 1..75: mol_type = other DNA
actttgcgcctatgcgtaagtcgatgatttccgcgccggtatttcgcggtttccgtaaggtgatgccgccgatgt

SEQ ID NO: 50513 - DNA, 75 bp, synthetic construct
  source 1..75: mol_type = other DNA
cagcaatctttacggaatgctggccggtggtgctgctgtatatggctttaaccggggatttattcgcccggcagc

SEQ ID NO: 50514 - DNA, 75 bp, synthetic construct
  source 1..75: mol_type = other DNA
gcgtaaagccagctggcactgcagacaatgtcaccacgattattatggggagcggtactgcactcactgccatac

SEQ ID NO: 50515 - DNA, 75 bp, synthetic construct
  source 1..75: mol_type = other DNA
agagacgctccagcaggaagggagtgagaacggccacggcgtggtgttcccggctgaactggtgcggctgctgga

SEQ ID NO: 50516 - DNA, 75 bp, synthetic construct
  source 1..75: mol_type = other DNA
taagagcgatagaaaagctcaaaagggacatgggacgaagcctaatggaagcgttagaagatcctgaaacactag

SEQ ID NO: 50517 - DNA, 75 bp, synthetic construct
  source 1..75: mol_type = other DNA
gcgtcgccgggccattgatgcgctgctgcaggggctgtgttttcactatgacccgctggccaaccgcgtccagtg

SEQ ID NO: 50518 - DNA, 75 bp, synthetic construct
  source 1..75: mol_type = other DNA
actttgatgaatggatgatacctgtttacgctccggcaccctttataccggtacgtggcgaaggttcgcgcttgt

SEQ ID NO: 50519 - DNA, 75 bp, synthetic construct
  source 1..75: mol_type = other DNA
gaatacatggcatgggatatggcgcttggctggattatctggtgtcaccgcgccgccatgcttcaggctggaaac

SEQ ID NO: 50520 - DNA, 75 bp, synthetic construct
  source 1..75: mol_type = other DNA
atcgactggggtatgacgacggacccgcgtaacctcgattatggcctgcctgccaccatcccgtttttgctgttc

SEQ ID NO: 50521 - DNA, 75 bp, synthetic construct
  source 1..75: mol_type = other DNA
aaacggatttatcagcaacggaaacggcctggaagctgtgggagcttatgggggaggtgtattcgaaccgctgga

SEQ ID NO: 50522 - DNA, 75 bp, synthetic construct
  source 1..75: mol_type = other DNA
ttcaattactggcaaacaggaaagccaatacctaaaaacagactggcaaaaattgcccgtctgactaacgagcga

SEQ ID NO: 50523 - DNA, 75 bp, synthetic construct
  source 1..75: mol_type = other DNA
caggaaactgatcttgttggcacccgtatgcaacgtatgcttgccggagtccgtggcagtatccgttcagtcacc

SEQ ID NO: 50524 - DNA, 75 bp, synthetic construct
  source 1..75: mol_type = other DNA
atgtcgggaaatgtcaccactgcaggtgatatgaacgttatgcctgggggggcactgcgtgtcgctaaaaccact

SEQ ID NO: 50525 - DNA, 75 bp, synthetic construct
  source 1..75: mol_type = other DNA
taaaaattactctgtgcatattcggatggaaaaagaccgattttctgttgtggggagtgtggatagtcgttcctg

SEQ ID NO: 50526 - DNA, 75 bp, synthetic construct
  source 1..75: mol_type = other DNA
aaatcatattgattttagccgcgatcaatctaaagattttagctgcgatcaatctaaaattaaaatagctgagac

SEQ ID NO: 50527 - DNA, 75 bp, synthetic construct
  source 1..75: mol_type = other DNA
atgttacaaaaaacaaccattaatgccatactgagatatattgatgaacacatagaaaaaaaaaacataaacatt

SEQ ID NO: 50528 - DNA, 75 bp, synthetic construct
  source 1..75: mol_type = other DNA
agggtgatatgacccgcaagggactggatattgtgcagggttcagcaggggtgctgataggcgcgccgacggggg

SEQ ID NO: 50529 - DNA, 75 bp, synthetic construct
  source 1..75: mol_type = other DNA
gctttccctgaagcagtaaaagtcacactccggcatgtcagtgaagtctcccggaacaatgttgattttcatctg

SEQ ID NO: 50530 - DNA, 75 bp, synthetic construct
  source 1..75: mol_type = other DNA
atgtgggcggtggacaaaccgctgaacccgtcgctggcccgcgacattatcgaaggtatccgcgccaaaatgcgc

SEQ ID NO: 50531 - DNA, 75 bp, synthetic construct
  source 1..75: mol_type = other DNA
tcggtatgccaggaactgaatgcattcgggtatatcagcgcatggggctgtaaaaccatttccgaggcaaaagcc

SEQ ID NO: 50532 - DNA, 75 bp, synthetic construct
  source 1..75: mol_type = other DNA
gtatcaggttgattatctgaagttccgggagattcttcaggaggtgaaaccggatttgccgaaggggcaggctac

SEQ ID NO: 50533 - DNA, 75 bp, synthetic construct
  source 1..75: mol_type = other DNA
tggctggtgcgcggcggcgtggcgaaactggatgaaggtcaccggctggccgcactctggcaggcgctgccggaa

SEQ ID NO: 50534 - DNA, 75 bp, synthetic construct
  source 1..75: mol_type = other DNA
aacagccgcaggcgctggacggtggggccggtagtgtctggcttaatgagctgatctggcgcgagttttaccgtc

SEQ ID NO: 50535 - DNA, 75 bp, synthetic construct
  source 1..75: mol_type = other DNA
gcattgaacttataaaacacctttcctggtatatctctgcaaccgtcgtgctcgcagactggacgggttcgtcaa

SEQ ID NO: 50536 - DNA, 75 bp, synthetic construct
  source 1..75: mol_type = other DNA
gaaaaagtatcgggtattgctgaaccgtgttgatacgtcaacttcacaggatattgaatggccaacagtacccat

SEQ ID NO: 50537 - DNA, 75 bp, synthetic construct
  source 1..75: mol_type = other DNA
tgtttaagggcctggagcagcagcaagacaatctggaagccgacgcccgacagcttaaccgcctgcaatctgccg

SEQ ID NO: 50538 - DNA, 75 bp, synthetic construct
  source 1..75: mol_type = other DNA
cggggtaaaaaggtccgtacgaccatcagccggaaagccgttgccgcaggcgaccgcgtaaaccgtcagttcgtg

SEQ ID NO: 50539 - DNA, 75 bp, synthetic construct
  source 1..75: mol_type = other DNA
cgtttaatgcagcttcttttcgtgaaatctgagtctactttcacctattttgaagcgacccggggctatattgaa

SEQ ID NO: 50540 - DNA, 75 bp, synthetic construct
  source 1..75: mol_type = other DNA
atcactgatgtgcttactgccagcggtaaagcgggtgagtccggtacgctggcccgttcgctggatgccatcgct

SEQ ID NO: 50541 - DNA, 75 bp, synthetic construct
  source 1..75: mol_type = other DNA
atgcgtaatattgaaacccgcgccactaaaaccggaccggatgatgcagggcttaatcttttactgacagaggct

SEQ ID NO: 50542 - DNA, 75 bp, synthetic construct
  source 1..75: mol_type = other DNA
gcagcatgaagagcgtcagtttgcaacgtattcaaccgctgactgagcaacttaatctcgggctgacggcaggta

SEQ ID NO: 50543 - DNA, 75 bp, synthetic construct
  source 1..75: mol_type = other DNA
tgtttatgctgcgcaccgtgccgtatcaggagctgcagtatcaacgcagctggcgacatgcggcaaacagccggg

SEQ ID NO: 50544 - DNA, 75 bp, synthetic construct
  source 1..75: mol_type = other DNA
ggaagcccgccagcaatccccaactggctgcgtgatgatattcgccgcccgtattcgtcaggaggtgtgccatga

SEQ ID NO: 50545 - DNA, 75 bp, synthetic construct
  source 1..75: mol_type = other DNA
atgatactataagtgtaaaattctacagaaatgaaaaaatagaatgcgcttgtaattttctgatggataaagatg

SEQ ID NO: 50546 - DNA, 75 bp, synthetic construct
  source 1..75: mol_type = other DNA
ggttcaggatatcagcggtgtgctcgcggtcttcgctgaacgccgtcagaaccgcaacggcccctatgtcgtatt

SEQ ID NO: 50547 - DNA, 75 bp, synthetic construct
  source 1..75: mol_type = other DNA
tatctggtgatgaaaggcaaaccggataaggcatttccggcggagccgcctgtccggggaacgggagggaaagcc

SEQ ID NO: 50548 - DNA, 75 bp, synthetic construct
  source 1..75: mol_type = other DNA
ttgatatttactgagagctcagatcaactttccagggcaacagatcgcgtacccggtttgccggccagtcctgga

SEQ ID NO: 50549 - DNA, 75 bp, synthetic construct
  source 1..75: mol_type = other DNA
cggacagggcgtttatcgcagagcctgcccggcgtaacgccaccgcaggacgtaaggccggggaggtgagccatg

SEQ ID NO: 50550 - DNA, 75 bp, synthetic construct
  source 1..75: mol_type = other DNA
tgtggcgctgagtcgctgggagccacggctgacgctggattccatcaccattaacagcaattttgacggttcaat

SEQ ID NO: 50551 - DNA, 75 bp, synthetic construct
  source 1..75: mol_type = other DNA
gccggaagcggatgaggtgctgcccgcgccgctgccgccgtaccgggtactgaccgggctggtggaccgcttcgg

SEQ ID NO: 50552 - DNA, 75 bp, synthetic construct
  source 1..75: mol_type = other DNA
gaagacgaaatctttaccggactggcatcgttaaatgacctggttcgtcttgctgcggcaatggggactgaattt

SEQ ID NO: 50553 - DNA, 75 bp, synthetic construct
  source 1..75: mol_type = other DNA
ttgttactgaaatgcaggtcatcccggtggcgggtcatgacagtatgctgatgaatctgagtggtgcacacgcac

SEQ ID NO: 50554 - DNA, 75 bp, synthetic construct
  source 1..75: mol_type = other DNA
tcaacgcggttgccgaagctggcagcataacccaggctgcagcaaaagtgcatcgcgtgccgtcgaatctcacta

SEQ ID NO: 50555 - DNA, 75 bp, synthetic construct
  source 1..75: mol_type = other DNA
ggcgattatcagagctgcttgatgcgtggtggatgcttgatgggcgtaatcaggcttacggggatagctacaggg

SEQ ID NO: 50556 - DNA, 75 bp, synthetic construct
  source 1..75: mol_type = other DNA
gtaacgttttggctaaatgtggaatacagcttgaaaaaatatcaaagtttctatatgaacataatcttgtgaagt

SEQ ID NO: 50557 - DNA, 75 bp, synthetic construct
  source 1..75: mol_type = other DNA
aaagaaaccgctgaagatccgcaaaattgagtttgttgaaatttacgagccgttttccgaaggccaggccaaagc

SEQ ID NO: 50558 - DNA, 75 bp, synthetic construct
  source 1..75: mol_type = other DNA
tatcaataccctgacggattccgttggcgaccttaaagacgatgccctgctgtggaatggcaccgcgttcagcgc

SEQ ID NO: 50559 - DNA, 75 bp, synthetic construct
  source 1..75: mol_type = other DNA
ctagccgaactggaggctgatttagcagggctggccgaagaccaccagaaagcgactgagtcaattaagcaggct

SEQ ID NO: 50560 - DNA, 75 bp, synthetic construct
  source 1..75: mol_type = other DNA
cacgttctctctgcttataaagataacgccgccgtaatggaaggttctgaagtgggccgctactttgctgaccac

SEQ ID NO: 50561 - DNA, 75 bp, synthetic construct
  source 1..75: mol_type = other DNA
tcctggcttcgaacaaccgtgggaagaagatttcggtaagcctgagcgcattgtcaccgcgctggacatcatgac

SEQ ID NO: 50562 - DNA, 75 bp, synthetic construct
  source 1..75: mol_type = other DNA
gttatgaaaagcaggatgttatcaacattgcgcatttgcttgcccatgtcattgaggggctggagcagggattct

SEQ ID NO: 50563 - DNA, 75 bp, synthetic construct
  source 1..75: mol_type = other DNA
gaggtcaccccggagcagcttgcccgactggaggcggagccatgcctcactgtgcgaatactacagacgtctgct

SEQ ID NO: 50564 - DNA, 75 bp, synthetic construct
  source 1..75: mol_type = other DNA
ggcgcggtacacaataccgcgaaggtacaggaaggggattctgtggcggtattcggcctcggcggtatcgggctg

SEQ ID NO: 50565 - DNA, 75 bp, synthetic construct
  source 1..75: mol_type = other DNA
gggcggacgcaacgttatcattatgacctgaccggaaaactcacacagagtgaggatgagggacttgtcatcctc

SEQ ID NO: 50566 - DNA, 75 bp, synthetic construct
  source 1..75: mol_type = other DNA
atgcctgaggagttgccgaccccgcaggtcagcatcaagcagttggaaaacagtgtaaaaattacagagaagaaa

SEQ ID NO: 50567 - DNA, 75 bp, synthetic construct
  source 1..75: mol_type = other DNA
tctcactgctgttgctgccggagaggatgtcgttcctgcctcagaactggctgccgctataaaacaaataaaaga

SEQ ID NO: 50568 - DNA, 75 bp, synthetic construct
  source 1..75: mol_type = other DNA
cctgtacgagaaccgggaagcggtttcaccagtggagcactcggaactgcctatggctatttctgcgctctggtc

SEQ ID NO: 50569 - DNA, 75 bp, synthetic construct
  source 1..75: mol_type = other DNA
tcaccagttgagcactcggaactgcctatggctatttctgcgctctggtcggtttatcgtgatgtgggggtgtac

SEQ ID NO: 50570 - DNA, 75 bp, synthetic construct
  source 1..75: mol_type = other DNA
cgcggatagcatggtgaattatcttaataccaatctttcgacgctggtgctggcgcgtattcttggcgcaggtat

SEQ ID NO: 50571 - DNA, 75 bp, synthetic construct
  source 1..75: mol_type = other DNA
cgtggactgggatgtgatcctggtgcgggtgacagacagccagatagccgacaacagcgatcttcttctggagat

SEQ ID NO: 50572 - DNA, 75 bp, synthetic construct
  source 1..75: mol_type = other DNA
tcaccactgaacagcaggaagccattaaacaactcgtcatgagtcgcggtcagtctctgccaaaagaaaaacagg

SEQ ID NO: 50573 - DNA, 75 bp, synthetic construct
  source 1..75: mol_type = other DNA
ttaatgttggtaaatctcagcggcagcaatctcaacctgcacaggtatcacagccagcagccagcagtaactttt

SEQ ID NO: 50574 - DNA, 75 bp, synthetic construct
  source 1..75: mol_type = other DNA
aatctgttggtatcggtgcaggtgttgacgcttcagttatgactctggcttgtagaacgtggcaagaatgctggg

SEQ ID NO: 50575 - DNA, 75 bp, synthetic construct
  source 1..75: mol_type = other DNA
ttaaactttcaggagataatcagattatacctgataatgtttcctggggattccggggggggatatttagatata

SEQ ID NO: 50576 - DNA, 75 bp, synthetic construct
  source 1..75: mol_type = other DNA
agatgacctggagccgctacgggcagttgctggcgttcaccgactgctcgggctaccagacccgttatgaatacg

SEQ ID NO: 50577 - DNA, 75 bp, synthetic construct
  source 1..75: mol_type = other DNA
tgtttggcttcttcgaaacagggcgtggcattgtcgataccgtggtggcattttctgcgttggcagtatttacct

SEQ ID NO: 50578 - DNA, 75 bp, synthetic construct
  source 1..75: mol_type = other DNA
attgtgttatcggacacggatactggcatggcagctatcactatttttatgcaccggagatgaaaaatgacccag

SEQ ID NO: 50579 - DNA, 75 bp, synthetic construct
  source 1..75: mol_type = other DNA
gggcatgatcacccgtccggatgtttctgatcaaatgcaaaccgttacaggtgacgggaaaaaactggtcactgg

SEQ ID NO: 50580 - DNA, 75 bp, synthetic construct
  source 1..75: mol_type = other DNA
gatgaatggggtaaccagctgaatgaagagaacccgcaccagctgcagcagctcatccgcctgccggggcagcag

SEQ ID NO: 50581 - DNA, 75 bp, synthetic construct
  source 1..75: mol_type = other DNA
atggctgtaagacagcataccccacacctagcgcacacacaaacggcctttgtgtggcgttttctggcactgagt

SEQ ID NO: 50582 - DNA, 75 bp, synthetic construct
  source 1..75: mol_type = other DNA
atggttgctgtaaatcatataccacaccttgtacacacacaaacggcctttgtgtggcgttttctggcactgagt

SEQ ID NO: 50583 - DNA, 75 bp, synthetic construct
  source 1..75: mol_type = other DNA
tctaacgtcggcgtgcagggtgttaccggcatcagtgcgtcagtgttttgggatttgcaggcatccggcaccgat

SEQ ID NO: 50584 - DNA, 75 bp, synthetic construct
  source 1..75: mol_type = other DNA
ggaagcgcgccagcaatctccggctggctgcgtgatggtattcgccgctcgtattcgtcagggggtgcgtcatgc

SEQ ID NO: 50585 - DNA, 75 bp, synthetic construct
  source 1..75: mol_type = other DNA
accttaaaactcaaatcatcaataacgcacttgagaaagcgggtatccccaaacgtaaatcagcactacgagctg

SEQ ID NO: 50586 - DNA, 75 bp, synthetic construct
  source 1..75: mol_type = other DNA
accactggaaagcctaaccctgcgccagcgtatcaccgataaatatctggtggatctggccgaatcggtcaacag

SEQ ID NO: 50587 - DNA, 75 bp, synthetic construct
  source 1..75: mol_type = other DNA
agagcgcgtttatctgggcaaaaccggcttgttacggaaggtgggattattgttgcgggtagtcttcttctgacc

SEQ ID NO: 50588 - DNA, 75 bp, synthetic construct
  source 1..75: mol_type = other DNA
gacatcggtgcgcatcggtgccggtattgaacggctggcgcgggatttcagtgtggagatcacccgccagtggcc

SEQ ID NO: 50589 - DNA, 75 bp, synthetic construct
  source 1..75: mol_type = other DNA
ttctgtgtcagatgtaaaaatgtcagtcagcgaagcaccgataaccaatctcaaacagggggctttaaataatct

SEQ ID NO: 50590 - DNA, 75 bp, synthetic construct
  source 1..75: mol_type = other DNA
ttgcttgcgattttgactgaaggaaaaattcaaccagataaaatgaagctgaatcagcttacactggcaatcaag

SEQ ID NO: 50591 - DNA, 75 bp, synthetic construct
  source 1..75: mol_type = other DNA
cgtcttgcccgtggttatcttggtcttggggcgcttgccacaaaaaacagtcttggtcccggtgacgttaatgct

SEQ ID NO: 50592 - DNA, 75 bp, synthetic construct
  source 1..75: mol_type = other DNA
gcgacgcccgttcgttacgatgcccgttcggtcagcaccggtattgccggacgcagtctgaccgctgacctgatt

SEQ ID NO: 50593 - DNA, 75 bp, synthetic construct
  source 1..75: mol_type = other DNA
accagacaagcgtcagcagcgaagggcagcgccacgacggcatccacgaaggcgacagaggcagctggcagtgcg

SEQ ID NO: 50594 - DNA, 75 bp, synthetic construct
  source 1..75: mol_type = other DNA
agctcggccggagcacactcgcacgttgatggtcgcaggtttaatacaagcacttttaaagacacctatcagtat

SEQ ID NO: 50595 - DNA, 75 bp, synthetic construct
  source 1..75: mol_type = other DNA
ttaccggtcgctgaaaataataaatcgcagacaataaataatgatcatccccagaaatcatgtggagcacaacca

SEQ ID NO: 50596 - DNA, 75 bp, synthetic construct
  source 1..75: mol_type = other DNA
ccggatacaccattcaggtcgcagtagaggagcaaagccgtgaactgtgctttgtcagccccgatattctgtttg

SEQ ID NO: 50597 - DNA, 75 bp, synthetic construct
  source 1..75: mol_type = other DNA
cagaaaaaaaattgccattactcagcagacaacggagcctggcatgacggtgtcccatgtggtgcatttgcatgg

SEQ ID NO: 50598 - DNA, 75 bp, synthetic construct
  source 1..75: mol_type = other DNA
cgaaaacggtattggcgatatcgtcaccaccggtagcaccaagtacttcaagaccaataccgatggtgtagatgc

SEQ ID NO: 50599 - DNA, 75 bp, synthetic construct
  source 1..75: mol_type = other DNA
aatgaaaccctgtacaccccgtggctatatgcctgccactctgcggatggcctgaatggaatgagtcagcaatac

SEQ ID NO: 50600 - DNA, 75 bp, synthetic construct
  source 1..75: mol_type = other DNA
gggataacagctatattcgttactctcagttgctggctgtgggagcggctgatgtcgtcctcacggaaaaaacgc

SEQ ID NO: 50601 - DNA, 75 bp, synthetic construct
  source 1..75: mol_type = other DNA
acggtcgttcgatgattatcgtcggcgctgggctgaaccactggtatcacctggacatgaactatcgtggtctga

SEQ ID NO: 50602 - DNA, 75 bp, synthetic construct
  source 1..75: mol_type = other DNA
atggctactatccttaccctttctcaccctgacgtaaccatcgaaaatggtcgcgctgtcactacgtctgttgcg

SEQ ID NO: 50603 - DNA, 75 bp, synthetic construct
  source 1..75: mol_type = other DNA
ggaaagcattattgttgctttgttttcattgttaatatcattacttgtttcttttagcattttaatagcagtgtc

SEQ ID NO: 50604 - DNA, 75 bp, synthetic construct
  source 1..75: mol_type = other DNA
gcgtctgtgttgcctctgttgcccgtacggttctgcgtgccgtccgtgacacggtggtctctgttgcccgcgctg

SEQ ID NO: 50605 - DNA, 75 bp, synthetic construct
  source 1..75: mol_type = other DNA
agtctggaagtgggtaaaggcagcggctcagcggaagaggccgtcaccaatatgtcaaactggctggcggcaatg

SEQ ID NO: 50606 - DNA, 75 bp, synthetic construct
  source 1..75: mol_type = other DNA
tcattacccaattgcatggcaacaaagtccgtattgcggaacagaacgtgattcattccccgttgccgcaagggc

SEQ ID NO: 50607 - DNA, 75 bp, synthetic construct
  source 1..75: mol_type = other DNA
ttggtactggcgaattacggcctcgatcgcgggctggaagatgaaaacagcgcgaaagattacgctgaaatcaaa

SEQ ID NO: 50608 - DNA, 75 bp, synthetic construct
  source 1..75: mol_type = other DNA
gattttagccgcgatcaatctaaagattttagctgcgatcaatctaaaattaaaatagctgagaccttatttttc

SEQ ID NO: 50609 - DNA, 75 bp, synthetic construct
  source 1..75: mol_type = other DNA
aaacgccctaccgggccatgaatcacccggtcattggagtagtaaccaaagcagatttagccagcatggaacaaa

SEQ ID NO: 50610 - DNA, 75 bp, synthetic construct
  source 1..75: mol_type = other DNA
gtactggtaagacaatgtccgcatcagtcattgctacagagttaaagctaccactttatacagtcgtcttagata

SEQ ID NO: 50611 - DNA, 75 bp, synthetic construct
  source 1..75: mol_type = other DNA
aaggagcaggacaacagcgaaatgctggccgctgacgtcatcatcagccagaaacgcatcggtaacctgccggcg

SEQ ID NO: 50612 - DNA, 75 bp, synthetic construct
  source 1..75: mol_type = other DNA
gcaggataccgatcttggcattggcgggcttatattcgataagaaccagacatataaagtgtccggaaaagataa

SEQ ID NO: 50613 - DNA, 75 bp, synthetic construct
  source 1..75: mol_type = other DNA
gttctattggtacgaatactattgatgtctatcccgggaaagattttggcgatgacgatccgcaatatcagcagg

SEQ ID NO: 50614 - DNA, 75 bp, synthetic construct
  source 1..75: mol_type = other DNA
cccgatagtgacgccagccttgctaagccgtgagggttttttatatccgacgccagcgacatccattcccagaga

SEQ ID NO: 50615 - DNA, 75 bp, synthetic construct
  source 1..75: mol_type = other DNA
cgcaccggctgggaactggatacgctggtcagtgcgctcatgacagcacttcccgaccatgccgccagtcccctg

SEQ ID NO: 50616 - DNA, 75 bp, synthetic construct
  source 1..75: mol_type = other DNA
cccgccacctttccggtgcgcggggttttgtcttttttcaccgggaatacatgtatgaatccgtctgatgccatt

SEQ ID NO: 50617 - DNA, 75 bp, synthetic construct
  source 1..75: mol_type = other DNA
agcttacgtcagcaaaatagcggaaaaggccggtgactctccagccaagttcatcactgaagttaataagctgaa

SEQ ID NO: 50618 - DNA, 75 bp, synthetic construct
  source 1..75: mol_type = other DNA
cagtggatctgggggcgggttgtaaacctgtacgaacaggctgccagcgacgatggcgagatcacgcgaccgaaa

SEQ ID NO: 50619 - DNA, 75 bp, synthetic construct
  source 1..75: mol_type = other DNA
gatgcagagtatgaggccctgtaccgtgacattctgcctgaactggacctggtactgtggctgattaaagccgat

SEQ ID NO: 50620 - DNA, 75 bp, synthetic construct
  source 1..75: mol_type = other DNA
aattatcgtggagcttatggtaatactaatgtcggttacagtcggagtggtgacagcagccagatttattacgga

SEQ ID NO: 50621 - DNA, 75 bp, synthetic construct
  source 1..75: mol_type = other DNA
ggactgaaaacagtttcagcctctctggcagataaacctactgaagtcatatcgcgattactgaatgcaaaagca

SEQ ID NO: 50622 - DNA, 75 bp, synthetic construct
  source 1..75: mol_type = other DNA
tcccgaccatgccgccagtcccctgatgacccgcctgcaggacgagctgcgcacggaatctgtccgcgctcaggc

SEQ ID NO: 50623 - DNA, 75 bp, synthetic construct
  source 1..75: mol_type = other DNA
gggtaaaagcggggccggtaaatcctcactctgtaatgcgctgtttcagggggaggtcaccccggtcagtgatgt

SEQ ID NO: 50624 - DNA, 75 bp, synthetic construct
  source 1..75: mol_type = other DNA
ccgataatagttgtgtggagaactgtttaaaagggaagtttaaagaggtaaggccgcgttattctgtattgcctg

SEQ ID NO: 50625 - DNA, 75 bp, synthetic construct
  source 1..75: mol_type = other DNA
agctccgcgaaaaatgggacgaactggtcatccgcctggggcgttcacctgtacagcgttgtgtgaatcatattt

SEQ ID NO: 50626 - DNA, 75 bp, synthetic construct
  source 1..75: mol_type = other DNA
attggtatggctgccgatgcaatggtggaggatattaactacaccatgatcacggatgtgcagattgcagagcgg

SEQ ID NO: 50627 - DNA, 75 bp, synthetic construct
  source 1..75: mol_type = other DNA
gatcagattattacagacgacggtttgccggagagtgccagtcgcgcgctggcgaagcaggatctctctttgctg

SEQ ID NO: 50628 - DNA, 75 bp, synthetic construct
  source 1..75: mol_type = other DNA
cctcctgccgtgaccgcgccgctggagcaggtgcagatagaccatacggtcatcgacctgatcgtggtcgatgac

SEQ ID NO: 50629 - DNA, 75 bp, synthetic construct
  source 1..75: mol_type = other DNA
aacgttaaaacgcgcatttgcaagtctgaaaacgctggggcttttgcgttgcgaaaagctcaataaatcaaagcg

SEQ ID NO: 50630 - DNA, 75 bp, synthetic construct
  source 1..75: mol_type = other DNA
acctgcaaatggctgggatttttctgctgaaggatggctacctgcttatccgcaattaggggcatctattcagtt

SEQ ID NO: 50631 - DNA, 75 bp, synthetic construct
  source 1..75: mol_type = other DNA
accaccatcattaccgaccggcatctttccgatgccgccgccagtcatatcgcccggcacgcctgcgaggtgctg

SEQ ID NO: 50632 - DNA, 75 bp, synthetic construct
  source 1..75: mol_type = other DNA
cctgccacgaatgggatatggccggcattcagccttctcccgcacaggcacagaatattcgcgaaaaaacagatg

SEQ ID NO: 50633 - DNA, 75 bp, synthetic construct
  source 1..75: mol_type = other DNA
gcggtgactggtcgaatgttaacggcaaaacagataaatcaccgaatctgacggtaactgtgtcagcagttctta

SEQ ID NO: 50634 - DNA, 75 bp, synthetic construct
  source 1..75: mol_type = other DNA
gagtttgagaaatccgcctttggtaaatacaacgtggataacgcgataaacgcgaatttccggtatatgttctga

SEQ ID NO: 50635 - DNA, 75 bp, synthetic construct
  source 1..75: mol_type = other DNA
gctggatgaggcttccgaaaggaaggccggtgtctatacaggccggttacgccaaccttgttcagctcaccacca

SEQ ID NO: 50636 - DNA, 75 bp, synthetic construct
  source 1..75: mol_type = other DNA
ggtgggccatgtggcgctggcgtggctggggcggtatctgaaagacgtgcggccacagatgacacgccagcgcga

SEQ ID NO: 50637 - DNA, 75 bp, synthetic construct
  source 1..75: mol_type = other DNA
gtgcgcccgcaccgacaccctcacaccttcgagctactgttgccattaaggggtcgtttcgtggtgctgaatttt

SEQ ID NO: 50638 - DNA, 75 bp, synthetic construct
  source 1..75: mol_type = other DNA
attgaaaccgggatgcgatttaccgatggtaactggaacctgacgccgtatgcatcgttaacgggggttcaccgc

SEQ ID NO: 50639 - DNA, 75 bp, synthetic construct
  source 1..75: mol_type = other DNA
aatcctcagtttttcctcaatggcagggaaaccacagcgcctgcaggactgactggtgccctgaatatgagtctg

SEQ ID NO: 50640 - DNA, 75 bp, synthetic construct
  source 1..75: mol_type = other DNA
ggggttaaccaggagacgggcagtgctttagttgccaacacgggcgcagggactgatattgaaggatacaacaag

SEQ ID NO: 50641 - DNA, 75 bp, synthetic construct
  source 1..75: mol_type = other DNA
ccggttctcctgactgcaacgccagtcgttaacaccccgatcgatgcatacaacatgctttctcatgtgctgccg

SEQ ID NO: 50642 - DNA, 75 bp, synthetic construct
  source 1..75: mol_type = other DNA
aacctctgaccgactggaaatgtaaagtcactatcttctggtggacgaacgccctgctggcagtgattagcctcg

SEQ ID NO: 50643 - DNA, 75 bp, synthetic construct
  source 1..75: mol_type = other DNA
gcaaggccgccactaccgacgaatgggcgcagctcgcaaagttggctaacacgacgccaggttacctggaccaga

SEQ ID NO: 50644 - DNA, 75 bp, synthetic construct
  source 1..75: mol_type = other DNA
gaaatcgacgaagctaaagttattgagttcagtaaaaatgccccggactggcgtaatccgctctggcgtcatgaa

SEQ ID NO: 50645 - DNA, 75 bp, synthetic construct
  source 1..75: mol_type = other DNA
gcgctcgcgggtcactgtaaagaaattatcgtcaccattcacgccgataactctgtctctgtacaggatgacggg

SEQ ID NO: 50646 - DNA, 75 bp, synthetic construct
  source 1..75: mol_type = other DNA
gccgcgacggcaatgtcgaatttgcctggacaccgaatcaaaatcacgattttactgccggatacggtttcgacc

SEQ ID NO: 50647 - DNA, 75 bp, synthetic construct
  source 1..75: mol_type = other DNA
ttatggttatagcgcacctgcaaaatcaggtgccgggattggcgtcccgataacctgtatagtgccgacacgcac

SEQ ID NO: 50648 - DNA, 75 bp, synthetic construct
  source 1..75: mol_type = other DNA
ggagtacgtcgtcaatgacttgttctccggtcgcaaagaatctgtcgaagtattgacgaaacgattaagtgaaaa

SEQ ID NO: 50649 - DNA, 75 bp, synthetic construct
  source 1..75: mol_type = other DNA
tggtgatgggcattgtggcatctgcatctgtacaggctgcagaaatatataataaagacggtaataaactggatg

SEQ ID NO: 50650 - DNA, 75 bp, synthetic construct
  source 1..75: mol_type = other DNA
tttctgaatcagtgctcatcggctgatccaactgccattgccaaaatcatgagtaagtttggtcgtgtcagaggt

SEQ ID NO: 50651 - DNA, 75 bp, synthetic construct
  source 1..75: mol_type = other DNA
catctcaatcacagctcatttcaacagctgagttagctaaaatcattagctacaaatctcaaaccattcgtaaat

SEQ ID NO: 50652 - DNA, 75 bp, synthetic construct
  source 1..75: mol_type = other DNA
ctggtgtacaagcgaaggcattggaatcaatgccgaaggtagaatgcagttcgcatcctttaaggcttaccaaca

SEQ ID NO: 50653 - DNA, 75 bp, synthetic construct
  source 1..75: mol_type = other DNA
aaccttggtggactgctatctctgcgttatgcgcatatggggaccgggacataaatggtttcaggataatgcgcg

SEQ ID NO: 50654 - DNA, 75 bp, synthetic construct
  source 1..75: mol_type = other DNA
aaggtggtggaaaatcaggagtcacaaacacgaacggtggtaacggcggtgtgccaagtactggcggtatcaaca

SEQ ID NO: 50655 - DNA, 75 bp, synthetic construct
  source 1..75: mol_type = other DNA
ggtcgaaagtcgctatctttacgacccgctgggccgcagggtggcaaaacgggtgtggcggcgtgaacgggacct

SEQ ID NO: 50656 - DNA, 75 bp, synthetic construct
  source 1..75: mol_type = other DNA
cggttctggaggtaaacggactgacgcgcaaaggcgtcctgaacgatattaattttacgctttatcgtggcgaga

SEQ ID NO: 50657 - DNA, 75 bp, synthetic construct
  source 1..75: mol_type = other DNA
gtgcccgttattgccattatcgccattgttatcatcgtcatcattctgaacaaaaccggagtgtccgacagcctc

SEQ ID NO: 50658 - DNA, 75 bp, synthetic construct
  source 1..75: mol_type = other DNA
tttattgaccaacagcgtttaaatacactaaatcctccggaaaatttacgtatagcaatagaaaaatttggctgg

SEQ ID NO: 50659 - DNA, 75 bp, synthetic construct
  source 1..75: mol_type = other DNA
acccgacgcgccctagattccctgggcgatacatcgcgccgcctgcaggaacgccagaatgccttaactcgtgca

SEQ ID NO: 50660 - DNA, 75 bp, synthetic construct
  source 1..75: mol_type = other DNA
aagcaggaaatgaacactccctctgcaatgtctacgctggacaaggatgcagcgaaacaaaatgatacgctcgaa

SEQ ID NO: 50661 - DNA, 75 bp, synthetic construct
  source 1..75: mol_type = other DNA
ttacgccatatgcgggtgtaaaactgcgtcacacactggaaggtggctatcaggagcgcaatgccggagacttta

SEQ ID NO: 50662 - DNA, 75 bp, synthetic construct
  source 1..75: mol_type = other DNA
gtaatggtgatgaatttttcgaaacacagagccgcaatgtaaccgactggatgccgctaccagaaccgccgcagg

SEQ ID NO: 50663 - DNA, 75 bp, synthetic construct
  source 1..75: mol_type = other DNA
aaaaggccttgttcagctcagtagtgcgactaacagcacgtctgaaacgctcgccgcaacaccaaaagcggtaaa

SEQ ID NO: 50664 - DNA, 75 bp, synthetic construct
  source 1..75: mol_type = other DNA
atgtacagtggcacgtctcatggcggttatggacttgccggtgttctccggggtaaaaaggtccgtacgaccatc

SEQ ID NO: 50665 - DNA, 75 bp, synthetic construct
  source 1..75: mol_type = other DNA
gcgatgattaccgtgatcccccgcatctccagcccggcactgaccgcacaggaaattgtagagatggacccggca

SEQ ID NO: 50666 - DNA, 75 bp, synthetic construct
  source 1..75: mol_type = other DNA
gagaaattattgaaccgtactcagaaggccgcgacggatatcaaacgcctgcgcccgctggtggaggatgcaata

SEQ ID NO: 50667 - DNA, 75 bp, synthetic construct
  source 1..75: mol_type = other DNA
acactgacaatggctccagcttttaaggatgaaggggaactaaccgacatgacagatattacaggcaatctgacg

SEQ ID NO: 50668 - DNA, 75 bp, synthetic construct
  source 1..75: mol_type = other DNA
gtgaagtgcttgcccgttgggagcaaatcaaaaccgaagagcgcgcgcagaaagcgcagcattcggcgctggacg

SEQ ID NO: 50669 - DNA, 75 bp, synthetic construct
  source 1..75: mol_type = other DNA
ttgactggccagtcacaaatcttcgtgagtcatgggatattattggatttgatcctcgaggcgtcggacagtcca

SEQ ID NO: 50670 - DNA, 75 bp, synthetic construct
  source 1..75: mol_type = other DNA
ccaatacatagcgacctgaacaaaactcgcctgaaaaatactgttctgccctctggtttactgtttgtagcacac

SEQ ID NO: 50671 - DNA, 75 bp, synthetic construct
  source 1..75: mol_type = other DNA
cgttctgctggaatcacgattgataaccttgaggccaagtgcgcggcgcttacggcagagaatgcggggatgaag

SEQ ID NO: 50672 - DNA, 75 bp, synthetic construct
  source 1..75: mol_type = other DNA
gaccgtctggatgatacatcgttcaccatgtgaattcagacttaacatcatgtggtcagaatttgcggcgttctt

SEQ ID NO: 50673 - DNA, 75 bp, synthetic construct
  source 1..75: mol_type = other DNA
aaacagatacttaatcagggcagcgaaaatccgtcagcgatgccgatggttacagacagcgctaacagtactgcc

SEQ ID NO: 50674 - DNA, 75 bp, synthetic construct
  source 1..75: mol_type = other DNA
taaaatcggctccagtctcgctgatggacttgctggctctctggacaggctgcgtcgccagatcctggaaaactt

SEQ ID NO: 50675 - DNA, 75 bp, synthetic construct
  source 1..75: mol_type = other DNA
gtaatgctcaggaaattgggcaggaagtcagtcgccgccagcttgatgctaatgccagggtgctgagaaataacc

SEQ ID NO: 50676 - DNA, 75 bp, synthetic construct
  source 1..75: mol_type = other DNA
ttaatgcccgtaagatggcagagaaattttccagcccgttactaacaataaatggtgatgggcatacattagctc

SEQ ID NO: 50677 - DNA, 75 bp, synthetic construct
  source 1..75: mol_type = other DNA
aagctgctcaagtctcccgtcttccgtaaataccgtgactggtttttgttcgatgaggtcgaaccaaaggccggg

SEQ ID NO: 50678 - DNA, 75 bp, synthetic construct
  source 1..75: mol_type = other DNA
aaactgcgggcagaactccatgaagcccggaaaaacattccgccccaaaatcctgtcgatgcagacaaattactg

SEQ ID NO: 50679 - DNA, 75 bp, synthetic construct
  source 1..75: mol_type = other DNA
atgaaactggcaccgaacgtaaaacagcagtcacgcggcataaaacacaaagaaacagaagtcattatttttgcg

SEQ ID NO: 50680 - DNA, 75 bp, synthetic construct
  source 1..75: mol_type = other DNA
aactgccctgattgtggtgcggtgatgggcgacgcaacataccaggaaacattcgatgacaagaaccaggttgaa

SEQ ID NO: 50681 - DNA, 75 bp, synthetic construct
  source 1..75: mol_type = other DNA
tttgctgacgttaaaaaagttgacgtaactggcacctctaaaggtaaaggtttcgcaggtaccgttaagcgctgg

SEQ ID NO: 50682 - DNA, 75 bp, synthetic construct
  source 1..75: mol_type = other DNA
ttgcaccgcctgcggtcagtctggcggggataactgccctgactgtggtgcggtgatgggcgacgcaacatatca

SEQ ID NO: 50683 - DNA, 75 bp, synthetic construct
  source 1..75: mol_type = other DNA
gcgggggagatcgaaccaatccagatcaatgctatcgctgaaaagctggcgctggctggcgtacaggaggcgaaa

SEQ ID NO: 50684 - DNA, 75 bp, synthetic construct
  source 1..75: mol_type = other DNA
ccgctgacggacacggacggcaatcctgtgatacacggcgtgaccgcggtctggcgcgccggggagcaggagcag

SEQ ID NO: 50685 - DNA, 75 bp, synthetic construct
  source 1..75: mol_type = other DNA
gtgggtaaagggggcggcaaggggcacacaccgcgtgaggcgaaggacaatctcaaatcaacgcagatgatgagc

SEQ ID NO: 50686 - DNA, 75 bp, synthetic construct
  source 1..75: mol_type = other DNA
gaattctcacgaactttattttgaaaaaataaaaaaagaacaaaacacatggcaggatctgtccacaaaagaaca

SEQ ID NO: 50687 - DNA, 75 bp, synthetic construct
  source 1..75: mol_type = other DNA
atggcatatgacgaaaatgtgaagtcgcagaaaaatcattatccggcagccgttgagcacaacgccgccatgatt

SEQ ID NO: 50688 - DNA, 75 bp, synthetic construct
  source 1..75: mol_type = other DNA
gaaagttcagcccggtcagctaccgtgcacatggcctgcccgtattggagaatctgctggagcaggacttcagcg

SEQ ID NO: 50689 - DNA, 75 bp, synthetic construct
  source 1..75: mol_type = other DNA
cgcgtgcaaacgtggttaatgggcgctttacctattcgggcagcaccaccaaaacccgctataccacggcactgg

SEQ ID NO: 50690 - DNA, 75 bp, synthetic construct
  source 1..75: mol_type = other DNA
ctgacggcggccaatattgataaatggacgctttatcaggtcgcgcaatattgcgatcagccggttcctgatggt

SEQ ID NO: 50691 - DNA, 75 bp, synthetic construct
  source 1..75: mol_type = other DNA
accgagggtggcaaaacaggtgcaataattgaacgttcgcgatttttgaaagaaaacggtcaatggtactatatt

SEQ ID NO: 50692 - DNA, 75 bp, synthetic construct
  source 1..75: mol_type = other DNA
agattgcattaataaccccaaaaagaaacatcgtctgcgtcgaaataaagtagagtatgagcagctctcattgtt

SEQ ID NO: 50693 - DNA, 75 bp, synthetic construct
  source 1..75: mol_type = other DNA
accaccgaggaaaatcaaggttcaaatctatcggggccttttttacccggccagtcacggacgttcagttaccgg

SEQ ID NO: 50694 - DNA, 75 bp, synthetic construct
  source 1..75: mol_type = other DNA
ctgagaaagaagacgaatctaatgaaatattgaatgtttccgaaatcatcgttgaagaagaaacacaagagccag

SEQ ID NO: 50695 - DNA, 75 bp, synthetic construct
  source 1..75: mol_type = other DNA
aattcccgttgtcgtctgaaacctttgtgctcaaccagattgtggcctttatcgaaatgggccatgaggtagaaa

SEQ ID NO: 50696 - DNA, 75 bp, synthetic construct
  source 1..75: mol_type = other DNA
tactggcgtaaagcgggagataaatcaaagaaacaactttgtttatggcaggcacaaagagagcgcatgaatgag

SEQ ID NO: 50697 - DNA, 75 bp, synthetic construct
  source 1..75: mol_type = other DNA
cactgcaaggagaacaacaaaacagacaataatcagggcagcagtaatcagagtcagaacaagaggaaaaagaga

SEQ ID NO: 50698 - DNA, 75 bp, synthetic construct
  source 1..75: mol_type = other DNA
atccgtcagcaggagcccgttgatgatgagcagaatgcgctgactgccagcgaacgccagcgtctgaaagaactg

SEQ ID NO: 50699 - DNA, 75 bp, synthetic construct
  source 1..75: mol_type = other DNA
ttaactccatcattcaccccggcacgcatccgtctgtggggttctacggcaaccgggaacgtgcggcactggctg

SEQ ID NO: 50700 - DNA, 75 bp, synthetic construct
  source 1..75: mol_type = other DNA
tgaagctacacgtggctatatcgagaaatacggtaaaccgatgatcctctacagcgataaagccagcgtattcag

SEQ ID NO: 50701 - DNA, 75 bp, synthetic construct
  source 1..75: mol_type = other DNA
cggcaaacagcctggttagcattgtccccctcctggggggcaatgcctctcgcaaggactatgaagacgcgctga

SEQ ID NO: 50702 - DNA, 75 bp, synthetic construct
  source 1..75: mol_type = other DNA
gactcagagtgattttgaggaagagattggtaagaaatcgctggtgagccgcatccttaacgggactcgctcact

SEQ ID NO: 50703 - DNA, 75 bp, synthetic construct
  source 1..75: mol_type = other DNA
ccgcagacaaggtgaaggggatctatgtgcgcccttatccgaccacttcgcagccggacatggttcgccaggtgg

SEQ ID NO: 50704 - DNA, 75 bp, synthetic construct
  source 1..75: mol_type = other DNA
atgcaaacgcttatcttgctaatgccctggaagaaataaacgagcctggtggtttaggcggttttcttgttgcgc

SEQ ID NO: 50705 - DNA, 75 bp, synthetic construct
  source 1..75: mol_type = other DNA
ccccctgcaaaagcaggagatcgtaaccgaccctctggagcaagaagttaacaaaaacgtgtttatgggcaagct

SEQ ID NO: 50706 - DNA, 75 bp, synthetic construct
  source 1..75: mol_type = other DNA
aaaagagtggacgttcaccctgaaagataatgctaaatttgccgatggcacacctgtcactgccgaagcagtaaa

SEQ ID NO: 50707 - DNA, 75 bp, synthetic construct
  source 1..75: mol_type = other DNA
tgcgttagaacgcattgaggtttatgttcggtcagttattgctcatgagcttggtaagatatctcctttagcata

SEQ ID NO: 50708 - DNA, 75 bp, synthetic construct
  source 1..75: mol_type = other DNA
cccgcgttacggaaagtaccgacctggtaacagcaattaacgacgttgattccagcgttatcggtatcgtggcaa

SEQ ID NO: 50709 - DNA, 75 bp, synthetic construct
  source 1..75: mol_type = other DNA
agatcgggcgcgggaaaaaccacgcgcgcgatttagaccgggatactgcgcgcggtctgtatgcccatatgctca

SEQ ID NO: 50710 - DNA, 75 bp, synthetic construct
  source 1..75: mol_type = other DNA
acgcggtttatgctgacggggcatccgcagaagatgctgaaccgtgaatggcaggtggtacagagcatactgtca

SEQ ID NO: 50711 - DNA, 75 bp, synthetic construct
  source 1..75: mol_type = other DNA
gagaacggcgtcacggagtggacaccgctgttttatgaggaccatccggcgcgggagttctgtgtccagtacggg

SEQ ID NO: 50712 - DNA, 75 bp, synthetic construct
  source 1..75: mol_type = other DNA
gaggtgaaagctgagcgttacgtgaattttttatcctgttcaagaatgatgttacagaaatatatgatgtcctca

SEQ ID NO: 50713 - DNA, 75 bp, synthetic construct
  source 1..75: mol_type = other DNA
tgagatgttgaaaacgccttcagcggggcagttttcattttttactgctcaccctggtattacgcgtggcggaca

SEQ ID NO: 50714 - DNA, 75 bp, synthetic construct
  source 1..75: mol_type = other DNA
atgtttaaagaaaagctccaggattataccgaggatgaatttcttaattttttaggcggattgagatcatctatg

SEQ ID NO: 50715 - DNA, 75 bp, synthetic construct
  source 1..75: mol_type = other DNA
gaagcaatactggagcgcctgtctctgtattttgcttcttatggcctatgtgggtctctgtgctgcggtggtctg

SEQ ID NO: 50716 - DNA, 75 bp, synthetic construct
  source 1..75: mol_type = other DNA
gtacgatcctggctgctggcgagggaaggttcaggactgggatggagcaggtttagtggtggaagatgagtcgga

SEQ ID NO: 50717 - DNA, 75 bp, synthetic construct
  source 1..75: mol_type = other DNA
tttaatcctgctaatgggcctcttgcaaactatctaaataaaggtgatagtggctctcctttatttgcgtatgac

SEQ ID NO: 50718 - DNA, 75 bp, synthetic construct
  source 1..75: mol_type = other DNA
cggttaatccagaaccagtcttatccgtttgtgatgagtgtggatgtcgccagcgattcttttatgcagacggcg

SEQ ID NO: 50719 - DNA, 75 bp, synthetic construct
  source 1..75: mol_type = other DNA
tacgtgaacgttattcacctgcaccagtaccaaaatgccctatttgcggcgaagaaatgtcaattcagcgaatat

SEQ ID NO: 50720 - DNA, 75 bp, synthetic construct
  source 1..75: mol_type = other DNA
accggtatatacaaatggtggtttcctaactggaggaactatcagtgctttaagctcatataacaatgggcaaat

SEQ ID NO: 50721 - DNA, 75 bp, synthetic construct
  source 1..75: mol_type = other DNA
cgtttgtgatgagtgtggatgtcgccagcgattcttttatgcagacggcggagatgctgctggagaagaaggcaa

SEQ ID NO: 50722 - DNA, 75 bp, synthetic construct
  source 1..75: mol_type = other DNA
ttcctccattcaggctgaatgtgataacgcgtatggaaaaagcaaggcatcggcggaaaaaatcattcaacatta

SEQ ID NO: 50723 - DNA, 75 bp, synthetic construct
  source 1..75: mol_type = other DNA
aatttattaatagattgattaatattccctgggctttggcaagagcattatttccaaaattaagtgctgcaaaga

SEQ ID NO: 50724 - DNA, 75 bp, synthetic construct
  source 1..75: mol_type = other DNA
tgtacaaacacattccattcaccatcacccgccgcgatgacattagcttcggcctgttttatgacaacctcagca

SEQ ID NO: 50725 - DNA, 75 bp, synthetic construct
  source 1..75: mol_type = other DNA
atggataacgttgaactttcaccggcaacacgctgggggatgattgctaccggattacttcaggggctggtttgc

SEQ ID NO: 50726 - DNA, 75 bp, synthetic construct
  source 1..75: mol_type = other DNA
gcgggaatcacggctgcctcgaaaccatcgccagtgtggacagtattcttgagctggcacagctgcgtcttaatc

SEQ ID NO: 50727 - DNA, 75 bp, synthetic construct
  source 1..75: mol_type = other DNA
atgattaactatcaactattagaaacaacattttttaaagaagcaaaacaacttgcagaagtgtttatttcactg

SEQ ID NO: 50728 - DNA, 75 bp, synthetic construct
  source 1..75: mol_type = other DNA
gatgcgtatatgtgccgcgctgtacatgattatggcgaaccggtacgactggcagatgtttattgaggccaccgg

SEQ ID NO: 50729 - DNA, 75 bp, synthetic construct
  source 1..75: mol_type = other DNA
ttccagttcagcacattcagtttcggcatggggaacgctgccgggttgttattcgccggaattatgctgggcttt

SEQ ID NO: 50730 - DNA, 75 bp, synthetic construct
  source 1..75: mol_type = other DNA
atggctgattttggttcaactaaatacaacgtcggttttgaagaatggcatgaactgttaatggactatgcagag

SEQ ID NO: 50731 - DNA, 75 bp, synthetic construct
  source 1..75: mol_type = other DNA
gtagaagagttgggttatattcccaacagaactgctggcgcccttgcatctggtcacagtcatacagtcgccgta

SEQ ID NO: 50732 - DNA, 75 bp, synthetic construct
  source 1..75: mol_type = other DNA
actgagggaggaactcaataaagccagggaaaacatccccccaaaaaatccagtcgatgccgacaaattactggc

SEQ ID NO: 50733 - DNA, 75 bp, synthetic construct
  source 1..75: mol_type = other DNA
agcaacagcgccagcaatccctgatatcgcaatcatgattgccaaccgccttggaaatttcggaggtgataaatc

SEQ ID NO: 50734 - DNA, 75 bp, synthetic construct
  source 1..75: mol_type = other DNA
atgtgtgaaaaagaaccggagctgaaaatagcacagcaactggtactcgagttctaccgtattctgaaaacccaa

SEQ ID NO: 50735 - DNA, 75 bp, synthetic construct
  source 1..75: mol_type = other DNA
accccgatttctggatatttggtctgttcttttttctctactttttcatcatggcaacctgtttcccgtttctgc

SEQ ID NO: 50736 - DNA, 75 bp, synthetic construct
  source 1..75: mol_type = other DNA
tctaaaaactctcttaatgtcagcaatgctatcacatctatcccgcaagccgctggcaatgaacctgttgatgtt

SEQ ID NO: 50737 - DNA, 75 bp, synthetic construct
  source 1..75: mol_type = other DNA
aagcctgtattaaagaatacaacgcaaacctccctcctctgttgaaaaccagtggatcacgggagcaacttctgg

SEQ ID NO: 50738 - DNA, 75 bp, synthetic construct
  source 1..75: mol_type = other DNA
gaacacggcgaagatacaggattacataaagcaccagcttgaagaggataaaatgggagagcagttatcgattcc

SEQ ID NO: 50739 - DNA, 75 bp, synthetic construct
  source 1..75: mol_type = other DNA
ctccatgaagcccggaaaaacattccgcccaaaaatcctgtcgatgcagacaaattactggctgcctctcgcgga

SEQ ID NO: 50740 - DNA, 75 bp, synthetic construct
  source 1..75: mol_type = other DNA
tgaaatacgccgccagcttgcgtacaagcagctctggcgtggtggtcaggtgcttgctgttccgccagcgtacac

SEQ ID NO: 50741 - DNA, 75 bp, synthetic construct
  source 1..75: mol_type = other DNA
ctggatgccgacatcgcccatgcgctgatgagcatcaacgcggtgaaaggcgtggaaattggcgacggttttgac

SEQ ID NO: 50742 - DNA, 75 bp, synthetic construct
  source 1..75: mol_type = other DNA
gcgaagggcaaattcgccagtcggaacagtatctcggcgcggattatttcccggtgaaaaccactctcatcaagg

SEQ ID NO: 50743 - DNA, 75 bp, synthetic construct
  source 1..75: mol_type = other DNA
gcagtcaatgggcgcaagctgtatttgtctccagtaatagatctcttcaacaacgaagttatttcttacagcctt

SEQ ID NO: 50744 - DNA, 75 bp, synthetic construct
  source 1..75: mol_type = other DNA
tccggacgcagaaatcattaaagcgggaagggtgcgcgcgttagcggtcgaacgttttgacaggcgttggaatac

SEQ ID NO: 50745 - DNA, 75 bp, synthetic construct
  source 1..75: mol_type = other DNA
gaagaacatttcaccggtgttgttgacctggtgaaaatgaaagctatcaactggaacgacgctgaccagggcgta

SEQ ID NO: 50746 - DNA, 75 bp, synthetic construct
  source 1..75: mol_type = other DNA
ggccgcagctcccgctggctgaaaagtgaagtggaagcctggctgcaggcgcgtattacacagtcccgtccgtaa

SEQ ID NO: 50747 - DNA, 75 bp, synthetic construct
  source 1..75: mol_type = other DNA
aagatgggggctttcctgcgcccatcaaaatggggcgcagctcccgctggctgaaaagtgaagtggaagcctggc

SEQ ID NO: 50748 - DNA, 75 bp, synthetic construct
  source 1..75: mol_type = other DNA
actcacctgccttcctgaaaaatttgtggttgattttgcaaacggtattgatgttgcacaggagcatatcagcac

SEQ ID NO: 50749 - DNA, 75 bp, synthetic construct
  source 1..75: mol_type = other DNA
ttgtcctggcgaagaaggcggctcgggtaaaacgttcatggtccgcgagggggtatttgatgatgtggatgcggc

SEQ ID NO: 50750 - DNA, 75 bp, synthetic construct
  source 1..75: mol_type = other DNA
caatgtggaatggcaatcgctgggatgatggcaccgaatatccggatccgcactcagttacgcactggcgtgaaa

SEQ ID NO: 50751 - DNA, 75 bp, synthetic construct
  source 1..75: mol_type = other DNA
ttcttggcagcattaatgctgaccacattcttaatcttcaatcttttcctactccaggcgaaaccgtaaccggta

SEQ ID NO: 50752 - DNA, 75 bp, synthetic construct
  source 1..75: mol_type = other DNA
cagagctggttcagagagaacgggattttaatgaaactgtcaatgccgctatagcccggggaatacgacaggaaa

SEQ ID NO: 50753 - DNA, 75 bp, synthetic construct
  source 1..75: mol_type = other DNA
caacgatgccggcggcctgatacagagcggtgcatcgctgaatatccgtgctgacacactgagcaaccgtgacag

SEQ ID NO: 50754 - DNA, 75 bp, synthetic construct
  source 1..75: mol_type = other DNA
aacggcccggtacctacgtatatcgaccttctgaaggttactaccagtacgctggtacagggaattaaagccgga

SEQ ID NO: 50755 - DNA, 75 bp, synthetic construct
  source 1..75: mol_type = other DNA
accaacgtaatgccgatacttataaagccaagattacccaaacccttgcccccctgcgtaagcagattgcggaac

SEQ ID NO: 50756 - DNA, 75 bp, synthetic construct
  source 1..75: mol_type = other DNA
ggaggcttttgcggttgagttcgtcagtgataccggcctgctggctgacgtgccggagacggtggcgctctattt

SEQ ID NO: 50757 - DNA, 75 bp, synthetic construct
  source 1..75: mol_type = other DNA
gcgggttatgcctgaatccattccggctggctttaaggcactggctgacatgagtccgtttgaatccctgctgat

SEQ ID NO: 50758 - DNA, 75 bp, synthetic construct
  source 1..75: mol_type = other DNA
tgaagtcctgtcaggcgaaaggcggtgactgcggcggtattatcaaaaagtacgaagagttgagtacggcacagc

SEQ ID NO: 50759 - DNA, 75 bp, synthetic construct
  source 1..75: mol_type = other DNA
atggtaaagttcgcgtttctaattctatggtaaatggtttagaaatcgttgactgtctgatctatgagttaaaat

SEQ ID NO: 50760 - DNA, 75 bp, synthetic construct
  source 1..75: mol_type = other DNA
ccatcatgaacagcatggggaatgatcagatccgcactgttaatctgattaaatctgcccgtgttggctatacaa

SEQ ID NO: 50761 - DNA, 75 bp, synthetic construct
  source 1..75: mol_type = other DNA
cttacagcacagctgcgactgggaccggcagacattctggagtcagatgagaatggcattatcccggagcaggac

SEQ ID NO: 50762 - DNA, 75 bp, synthetic construct
  source 1..75: mol_type = other DNA
tttgattgggattccgggaaagtgctgattttcccagcacagccactgaccactctaacaccagaacagattact

SEQ ID NO: 50763 - DNA, 75 bp, synthetic construct
  source 1..75: mol_type = other DNA
ccggagacgggggaactgctgtggcagcatgagacaacacacgcctacaacgaacaggggctggcaaaccgcgtc

SEQ ID NO: 50764 - DNA, 75 bp, synthetic construct
  source 1..75: mol_type = other DNA
tgtttacggaaaagcagcaagcgcgctgtatcgggtgatgagtggtatctgtcagggaattacgtgggggcttaa

SEQ ID NO: 50765 - DNA, 75 bp, synthetic construct
  source 1..75: mol_type = other DNA
ggttgcggtggttctggtaccgatcattctgctctacaccgcctggtgttactggaaaatgttcggtcgtatcac

SEQ ID NO: 50766 - DNA, 75 bp, synthetic construct
  source 1..75: mol_type = other DNA
agctgtcagtcaccgacatcaacctttatgaaaacactgtgagtctggacggtcagtcctatccgttgtcgctcg

SEQ ID NO: 50767 - DNA, 75 bp, synthetic construct
  source 1..75: mol_type = other DNA
aaagataagaagaagtcagtggaggtcttcgggccttatatccacacttataaatttgatgaagcagtcaatgat

SEQ ID NO: 50768 - DNA, 75 bp, synthetic construct
  source 1..75: mol_type = other DNA
gacaaccgtttgatttattgtcagaaatagggcgagacagcgttggtgccgtaacgttattacccgaaaatgaaa

SEQ ID NO: 50769 - DNA, 75 bp, synthetic construct
  source 1..75: mol_type = other DNA
cgctgctcggtcagttgttgttttttgaaattacgggcggctgctcctgggcgttgatcagttattaccagagcg

SEQ ID NO: 50770 - DNA, 75 bp, synthetic construct
  source 1..75: mol_type = other DNA
tttcagctatctggcggatgatctgcgcgagcttcaacagctcatccagcagcaaaacaaactccattaattcct

SEQ ID NO: 50771 - DNA, 75 bp, synthetic construct
  source 1..75: mol_type = other DNA
ggaagttcacgtgtgtgagcgttgtatatatgaatgcttaaatatggtggaacataatgagaaatataagcaaca

SEQ ID NO: 50772 - DNA, 75 bp, synthetic construct
  source 1..75: mol_type = other DNA
agtctgctttttcagcccacggattctgccgctgaagattttatgaagtctcacgtggaggcgacgattcgcgat

SEQ ID NO: 50773 - DNA, 75 bp, synthetic construct
  source 1..75: mol_type = other DNA
tgccatgccgcaatcagtcaggttacatttccgctgcacctcacaaaacgggtgccgggtttcgcagcctgctga

SEQ ID NO: 50774 - DNA, 75 bp, synthetic construct
  source 1..75: mol_type = other DNA
gtttcgctgatggatgaccagatggtcgacatggcgtttatcactcaactgaccggcctaaccgataagtggttt

SEQ ID NO: 50775 - DNA, 75 bp, synthetic construct
  source 1..75: mol_type = other DNA
ggcaaatcatcagcgcaatagacaacatgactcacagtgagcaggaaaaagttgcgcaatttttgtcacgcgaag

SEQ ID NO: 50776 - DNA, 75 bp, synthetic construct
  source 1..75: mol_type = other DNA
tactgtttgccgcactgtctgccggacaggcaatagcctcagatgtggcattcaggggtaatctgcttgacagac

SEQ ID NO: 50777 - DNA, 75 bp, synthetic construct
  source 1..75: mol_type = other DNA
tgggtcactcaggatcaggccactctcgtcacacaacatggtcgtctggtgaagactttgcttggcggcgacaac

SEQ ID NO: 50778 - DNA, 75 bp, synthetic construct
  source 1..75: mol_type = other DNA
gcgccattgtctgctgaacggtaacgcctatgcggtgatccagtggggccgcgacggccagccgcaatccctgca

SEQ ID NO: 50779 - DNA, 75 bp, synthetic construct
  source 1..75: mol_type = other DNA
gagaaaggtaacggtactgagtggactgaaaccacaacagacagcggtaaaaccgtcaccatcaacagtggtcgg

SEQ ID NO: 50780 - DNA, 75 bp, synthetic construct
  source 1..75: mol_type = other DNA
tagatattctgctgaatgagcagcctaattcgtgcctgacaccttaccagtttaaacgcacaatgatgcgtcact

SEQ ID NO: 50781 - DNA, 75 bp, synthetic construct
  source 1..75: mol_type = other DNA
ggggcttggccttgctcaacagcgtcacggagccagcattatgaaagatggcatgatggcggcagggattatcac

SEQ ID NO: 50782 - DNA, 75 bp, synthetic construct
  source 1..75: mol_type = other DNA
ccgccactgcctgttaaacggtaatgcttatgcggtgattcagtgggggcgtgatggttttccggtggctttgca

SEQ ID NO: 50783 - DNA, 75 bp, synthetic construct
  source 1..75: mol_type = other DNA
cgtggcaaaaaaccaagcaaagctaaccttgaaagaatgagtaacttccggcgctggctttttgatgcccgtcag

SEQ ID NO: 50784 - DNA, 75 bp, synthetic construct
  source 1..75: mol_type = other DNA
taaaaagggcgttgattatatttacagtcatacacctgccgcaccagaggagccgctgaaatcccttgtttacac

SEQ ID NO: 50785 - DNA, 75 bp, synthetic construct
  source 1..75: mol_type = other DNA
aagtgcacgatcccgctgttacgtgacgatatgaaaaagctggggtacgaaatgaaaaacttcagccgctggcta

SEQ ID NO: 50786 - DNA, 75 bp, synthetic construct
  source 1..75: mol_type = other DNA
aatgaagtgtactatgttaattattaaaatgatatcacaaatattgccaatatttatattgaaagttttgtacaa

SEQ ID NO: 50787 - DNA, 75 bp, synthetic construct
  source 1..75: mol_type = other DNA
atgatttcctgtatgccacccagaatagccctgcgcagctacttaaaatagccagaagtggcgacatcatcggcc

SEQ ID NO: 50788 - DNA, 75 bp, synthetic construct
  source 1..75: mol_type = other DNA
atgaagaatgaaatactggaatttctgaacaggcataatggagggaaaaccgcagaaattgcggaggcgctggcg

SEQ ID NO: 50789 - DNA, 75 bp, synthetic construct
  source 1..75: mol_type = other DNA
taactggaaatcatcattgttacacaacgcgctccttggtctggcaaatgtttataatggcttacgggaaacaga

SEQ ID NO: 50790 - DNA, 75 bp, synthetic construct
  source 1..75: mol_type = other DNA
gtgaacagtggcggaacgcgcacgcagggactggttaaccgccggaatgattttaagaactggtgcctgaaagac

SEQ ID NO: 50791 - DNA, 75 bp, synthetic construct
  source 1..75: mol_type = other DNA
ttcataaccaacataatatatggtccagtgttttccttgaaagaatattagatcctgtctgtatgtcattccttg

SEQ ID NO: 50792 - DNA, 75 bp, synthetic construct
  source 1..75: mol_type = other DNA
gaaaccgccaccggtgagctggcgaaaacgcagcgccgcagcctggcggatacccttcagcagtccggcggcgaa

SEQ ID NO: 50793 - DNA, 75 bp, synthetic construct
  source 1..75: mol_type = other DNA
gcggctggcgctggcctgttcgctgatgcatgaaccggacattctgtttctcgacgaaccgacgtccggcgttga

SEQ ID NO: 50794 - DNA, 75 bp, synthetic construct
  source 1..75: mol_type = other DNA
cagagcaataggaaccattaagcataacttcaccagtattaatattaataactataaatccaaacctatgcacct

SEQ ID NO: 50795 - DNA, 75 bp, synthetic construct
  source 1..75: mol_type = other DNA
tgatgaaatggttatcgctgcccgtcaggtggagcgggaaacgggtaaacctgtacgcatgattattctggatac

SEQ ID NO: 50796 - DNA, 75 bp, synthetic construct
  source 1..75: mol_type = other DNA
atcccactgcagacccgtcacaggaaaagctgaaggtcttttatatcgatgccagaagcaccgagacggatgaag

SEQ ID NO: 50797 - DNA, 75 bp, synthetic construct
  source 1..75: mol_type = other DNA
gttcgctttatatcccttacgctggccctgtactgctggaatttccgttgttgaataaaggcagtgccttcagca

SEQ ID NO: 50798 - DNA, 75 bp, synthetic construct
  source 1..75: mol_type = other DNA
catctatgatgaaagctatgcgccgctcggtttgtacatcgaaaacggtcagcagaaggtggcgttaaatctcgc

SEQ ID NO: 50799 - DNA, 75 bp, synthetic construct
  source 1..75: mol_type = other DNA
caaggttcaggcccgcgttcgtctgccggaatgcgataacctgcgcactaactggcttaacgtgctgcagcgcaa

SEQ ID NO: 50800 - DNA, 75 bp, synthetic construct
  source 1..75: mol_type = other DNA
ggatcttttggtagtgaatttcttggtggatatataaaagaagcaagtagtaataatcagttctcttctagcgcg

SEQ ID NO: 50801 - DNA, 75 bp, synthetic construct
  source 1..75: mol_type = other DNA
tcactggccatggcaatcagcaaagggcgtctgattcgcgtgaatcagggcggtaaatttcggtactgcataccg

SEQ ID NO: 50802 - DNA, 75 bp, synthetic construct
  source 1..75: mol_type = other DNA
tatggcgaatatggtctggcggcgcaaaaaacgctggtggatggtatccgcaaagaggttgcggctgaaggcggt

SEQ ID NO: 50803 - DNA, 75 bp, synthetic construct
  source 1..75: mol_type = other DNA
ccagaatacccacgcggcatggacgaaatacaaccttgccgccagaacccgctggttacaggacgaaccacaagg

SEQ ID NO: 50804 - DNA, 75 bp, synthetic construct
  source 1..75: mol_type = other DNA
gtgcggacggcgatatggaaggcattccggtggcgctgatggaagcgatggcggtcggcattccggttgtttcta

SEQ ID NO: 50805 - DNA, 75 bp, synthetic construct
  source 1..75: mol_type = other DNA
cctgattctttcactaattccatgtcgtttactatttcgtgtggtacacgagcctttagagcttgtgattttgcg

SEQ ID NO: 50806 - DNA, 75 bp, synthetic construct
  source 1..75: mol_type = other DNA
gggattggcccgcagttgccacgaccgaaacgtatccgcgtgccaactcgtcgtgaactggcgtcttacggtatt

SEQ ID NO: 50807 - DNA, 75 bp, synthetic construct
  source 1..75: mol_type = other DNA
atctgaaagggaaaagcagtctgatgctttacgagcagtttggtgatttgaaattcaaatacaggaacagagagt

SEQ ID NO: 50808 - DNA, 75 bp, synthetic construct
  source 1..75: mol_type = other DNA
aaatgccgcacttgttggttgcggggactaccggttccggtaaatctgtcggtgtgaacgcgatgatcctgagca

SEQ ID NO: 50809 - DNA, 75 bp, synthetic construct
  source 1..75: mol_type = other DNA
aatactcgggacgtggtacatcagttcttcgcgtgtcagtgggcgctcccgacggatctgatttacatgaccaaa

SEQ ID NO: 50810 - DNA, 75 bp, synthetic construct
  source 1..75: mol_type = other DNA
ttttgactttgccgatttaaccctgcgaatggatagcctctcggcatttatggtgctggttatctccttgctggt

SEQ ID NO: 50811 - DNA, 75 bp, synthetic construct
  source 1..75: mol_type = other DNA
cgttggggcttactttctttcttgccgggtgcgaagaggttaaatctgtagattggtggcaatctcatcctgacg

SEQ ID NO: 50812 - DNA, 75 bp, synthetic construct
  source 1..75: mol_type = other DNA
gaaaccatcgaagaacaagcggaacgagcatggatccagtatcagggattcaaaaccgaaatcgacaaacacatc

SEQ ID NO: 50813 - DNA, 75 bp, synthetic construct
  source 1..75: mol_type = other DNA
gaaagcgatgctcgacgacgcggatgttttcctgctgccttcggtaacgggggcggacggcgatatggaaggtat

SEQ ID NO: 50814 - DNA, 75 bp, synthetic construct
  source 1..75: mol_type = other DNA
aactggtaaccagaaacaacatgaaatcattaatcactgaaacagcgctggatatcctcattgcgtggctgcagg

SEQ ID NO: 50815 - DNA, 75 bp, synthetic construct
  source 1..75: mol_type = other DNA
ttcaccaacgccggaagccgtatggcataccgctttcatgccatgcaggcccatcccaacatcgtcgacgtcgct

SEQ ID NO: 50816 - DNA, 75 bp, synthetic construct
  source 1..75: mol_type = other DNA
tgaaatacaggtgccatttatctgatatggagaataacatgaggaaatatattccactggtattatttatctttt

SEQ ID NO: 50817 - DNA, 75 bp, synthetic construct
  source 1..75: mol_type = other DNA
tattcctgtttactgcttttcagtctgcaaatgcaggtggaatacctggtgctttagcaggaatactttctacat

SEQ ID NO: 50818 - DNA, 75 bp, synthetic construct
  source 1..75: mol_type = other DNA
atgagaaaaaataatacggcaataatattcggcggcctgtttttttcctgcagcgtgatggccggagccggtacg

SEQ ID NO: 50819 - DNA, 75 bp, synthetic construct
  source 1..75: mol_type = other DNA
gcaggatacgaaccaggcgctggatgcctcgctgtttagcggcgacggtacgctggtgaatgccaccgatggcgt

SEQ ID NO: 50820 - DNA, 75 bp, synthetic construct
  source 1..75: mol_type = other DNA
attctgctctacaccgcctggtgttactggaaaatgttcggtcgtatcaccaaagaagatattgaacgtaacacc

SEQ ID NO: 50821 - DNA, 75 bp, synthetic construct
  source 1..75: mol_type = other DNA
cacagatgcacatattactccccctggagagtcatcactacctgatccttctgagaaagaagacgaatctaatga

SEQ ID NO: 50822 - DNA, 75 bp, synthetic construct
  source 1..75: mol_type = other DNA
cggagcacaaccgaatctaagctcaaatgcattgatgtcaaaactactcatcccaattccctgcccggataatcc

SEQ ID NO: 50823 - DNA, 75 bp, synthetic construct
  source 1..75: mol_type = other DNA
catttcattttcactaatgctggttgctatttttcttttcctgccctggatgatgttgtcttcgtcggggatgct

SEQ ID NO: 50824 - DNA, 75 bp, synthetic construct
  source 1..75: mol_type = other DNA
aaggattcaggaattactgtgatgctgttattaattttaatgaaactaatttgattataggtgcaaatgatgttg

SEQ ID NO: 50825 - DNA, 75 bp, synthetic construct
  source 1..75: mol_type = other DNA
ctgatctggttgatgcgctgggccaggaaaacaatccggaatggaaaactgtcgcctttaataccaatggcgaaa

SEQ ID NO: 50826 - DNA, 75 bp, synthetic construct
  source 1..75: mol_type = other DNA
ttccgattcgagtccgattgataaatattgatgcccctgaaaagaaacaaccttttggacgctggtcaacaaatc

SEQ ID NO: 50827 - DNA, 75 bp, synthetic construct
  source 1..75: mol_type = other DNA
gtggggcgctggcggaggttctggcgtctgagcgaaagacgcttagcgagcaaatgcgcgtagcactgccgggga

SEQ ID NO: 50828 - DNA, 75 bp, synthetic construct
  source 1..75: mol_type = other DNA
ctgcctatccagcacgactctgccgctgaactggcgcagccgctggatgtgaaagactggaaaaaaggcgagtgc

SEQ ID NO: 50829 - DNA, 75 bp, synthetic construct
  source 1..75: mol_type = other DNA
cggatgccagccgctttatggttcagtctggcgctgcatgggtatatgaacgttacaacacagataaatcattac

SEQ ID NO: 50830 - DNA, 75 bp, synthetic construct
  source 1..75: mol_type = other DNA
attcagcttatcagtggcaatggtagcaagtgttttcttaaaggaggtcaggttaaggaggcctatcatctgata

SEQ ID NO: 50831 - DNA, 75 bp, synthetic construct
  source 1..75: mol_type = other DNA
gcggatcaggctggtaaatattgatgcaccggaaaagaaacaggattatggccggtggtcaacagacatgatgaa

SEQ ID NO: 50832 - DNA, 75 bp, synthetic construct
  source 1..75: mol_type = other DNA
aatattgatgcaccggaaaaaaaacaggcttacggacgctggtcaactgaccaacttaaaagcctgattgccgaa

SEQ ID NO: 50833 - DNA, 75 bp, synthetic construct
  source 1..75: mol_type = other DNA
tgacttatctgatgcgttcgccatcgttggcccgcagtcgcaagcacagaaaatcagcggtatcagtaccagcgc

SEQ ID NO: 50834 - DNA, 75 bp, synthetic construct
  source 1..75: mol_type = other DNA
ctgtaggcatcacgatttatcagttaccgcgctcaaaatacgaggagctaaagaatgttaattttccagattgcc

SEQ ID NO: 50835 - DNA, 75 bp, synthetic construct
  source 1..75: mol_type = other DNA
tgattaacgtggtctgcgataacggtcactcccttcgtgttgttgatgaatctgaccgggcctcaacagactgca

SEQ ID NO: 50836 - DNA, 75 bp, synthetic construct
  source 1..75: mol_type = other DNA
atggcaactccctgcaccacttgccaatcatcaatacaggttgcagaaggcaattgaacaacatgcacacaacac

SEQ ID NO: 50837 - DNA, 75 bp, synthetic construct
  source 1..75: mol_type = other DNA
aatatgagaagtatcgcggtggcggaatgccgggggcagtggatgtggatctggggcttgatgacagtgcgctgg

SEQ ID NO: 50838 - DNA, 75 bp, synthetic construct
  source 1..75: mol_type = other DNA
tctgcggcttaaacgcctggggctgtcaaaaacgttccgtcgtctggttgtcacacttacccggcgttatggcgt

SEQ ID NO: 50839 - DNA, 75 bp, synthetic construct
  source 1..75: mol_type = other DNA
gatgcgtacatgagtaacggaaaaccggtaggaatcaccctctatcaattacctcgttcgaaatatgaggagcta

SEQ ID NO: 50840 - DNA, 75 bp, synthetic construct
  source 1..75: mol_type = other DNA
tgattaaagaaatcaaagagcgaatcggtagcctggacgttagagacaatattgagcgccgtgcttatgaaattg

SEQ ID NO: 50841 - DNA, 75 bp, synthetic construct
  source 1..75: mol_type = other DNA
tgctggcccggttgaagctgctgaagaaaaaactgaattcgacgtaattctgaaagctgctggcgctaacaaagt

SEQ ID NO: 50842 - DNA, 75 bp, synthetic construct
  source 1..75: mol_type = other DNA
agcaacgcattacgccacatatcatcagccagatcatggagttcgccgaaaagcgcaaaggggtaatgattttcg

SEQ ID NO: 50843 - DNA, 75 bp, synthetic construct
  source 1..75: mol_type = other DNA
atccgttcggttgaaaaggataatgacggcaaccgcattacccaaaattacccattgctggtggatgtaccagtg

SEQ ID NO: 50844 - DNA, 75 bp, synthetic construct
  source 1..75: mol_type = other DNA
aactggggacggccagcgtgcggctttcccgcagaaagcgacgaaagaaaggcgagcgttcggtcacgaaaggcg

SEQ ID NO: 50845 - DNA, 75 bp, synthetic construct
  source 1..75: mol_type = other DNA
tcttaatgtcaccgtctgggatcacccggaactcaccacgccagccggtcagtaccgcagctccagcgacaccgg

SEQ ID NO: 50846 - DNA, 75 bp, synthetic construct
  source 1..75: mol_type = other DNA
tgttcgggttgacgaaaaagagcgtcaggtccgctgtaaaatctgcggtgcagttgtggagccgtttgactggat

SEQ ID NO: 50847 - DNA, 75 bp, synthetic construct
  source 1..75: mol_type = other DNA
gaacagaaaaaaatcgttaagattgaagaaggtccggtagttccggtgccaatgaccgcacgcccatttgatggc

SEQ ID NO: 50848 - DNA, 75 bp, synthetic construct
  source 1..75: mol_type = other DNA
ttgccaaatctattcaaaacagaatattccaatgctatttttattcataaccttagcaaagacgaaagatatagc

SEQ ID NO: 50849 - DNA, 75 bp, synthetic construct
  source 1..75: mol_type = other DNA
gtatgcaacgagttttaggtatcttctccagacgggagaatgatgtagttgagttaataaagcaggacccttcga

SEQ ID NO: 50850 - DNA, 75 bp, synthetic construct
  source 1..75: mol_type = other DNA
taagcaatatcgttttatttccggtaaaagaggatgaccctcgtaatcaggttaattttctttatgagccatcgg

SEQ ID NO: 50851 - DNA, 75 bp, synthetic construct
  source 1..75: mol_type = other DNA
gtggaaataaaaccagaagatgagttaagtaatattgttttatttccggtaaaagaggatgacccacgtaatcag

SEQ ID NO: 50852 - DNA, 75 bp, synthetic construct
  source 1..75: mol_type = other DNA
agcagtatgataaggagtcggggctgtactataaccgtcaccggtactacgatccgttgcaggggcggtatatca

SEQ ID NO: 50853 - DNA, 75 bp, synthetic construct
  source 1..75: mol_type = other DNA
ggcggtatattactcaggacccgatggggttgaaagggggatggaatttatatcagtatcctttaaatccactac

SEQ ID NO: 50854 - DNA, 75 bp, synthetic construct
  source 1..75: mol_type = other DNA
ctgccggtttcgcttatcggctatctcgtcgcttgttactggctgaatacgcaaacgccggacttctccctacct

SEQ ID NO: 50855 - DNA, 75 bp, synthetic construct
  source 1..75: mol_type = other DNA
ttcctgaaaagcgagctgctcgactcgaccatatcactaacggagcactgaaatatgacccgactttttacgatg

SEQ ID NO: 50856 - DNA, 75 bp, synthetic construct
  source 1..75: mol_type = other DNA
ctgcgcgcaaacgatctgtatgtaaagagatcaaggttttcgtcagaccagaactgaaaaactgccttaccagtc

SEQ ID NO: 50857 - DNA, 75 bp, synthetic construct
  source 1..75: mol_type = other DNA
aagctgctttttttatatacagctgtaatattgcggttgacggttggaaaaagtgaagaaacattgttaatcatg

SEQ ID NO: 50858 - DNA, 75 bp, synthetic construct
  source 1..75: mol_type = other DNA
agggattgttctggatgaaaaaagaacccggtttcatggcgtaccggtatataagatttgtgggcgttgtaatgg

SEQ ID NO: 50859 - DNA, 75 bp, synthetic construct
  source 1..75: mol_type = other DNA
agtacaccgccaaaaagctcaacgataacgagtggcagctgacgtcggtatctaacccgcgtgaaaagctgacga

SEQ ID NO: 50860 - DNA, 75 bp, synthetic construct
  source 1..75: mol_type = other DNA
acaggaggcatctggcggggagcttcagtatgatcccaaagtttatgacgaatatcgtaagacgaagcgggcggg

SEQ ID NO: 50861 - DNA, 75 bp, synthetic construct
  source 1..75: mol_type = other DNA
tggtaaggatgccgcagtcgttaaaggatgctatcggtagcagggcaaaggaagagtgcaggtcgtttaactcag

SEQ ID NO: 50862 - DNA, 75 bp, synthetic construct
  source 1..75: mol_type = other DNA
ccgggatgaggctcgtaagcttttagctaatggtgtcgatcccagtgaaaacaagaaagctgttaaggtagaata

SEQ ID NO: 50863 - DNA, 75 bp, synthetic construct
  source 1..75: mol_type = other DNA
actgatgcagtcactgtatgactggatacagcaacagatgaaaacactgtcgcgtcactcggatacggcaaaagc

SEQ ID NO: 50864 - DNA, 75 bp, synthetic construct
  source 1..75: mol_type = other DNA
tgtgtgcgcctgtaaagcaatgcgccgtagtacctcacaccacggcgctgatagtgattattctgattctttggc

SEQ ID NO: 50865 - DNA, 75 bp, synthetic construct
  source 1..75: mol_type = other DNA
atgcgcatgaatgttttcgaaatggaagggtttcttcgcgggagatgtgtaccacgagacctgaaagtgaatgaa

SEQ ID NO: 50866 - DNA, 75 bp, synthetic construct
  source 1..75: mol_type = other DNA
acagcaacaggaaaatagcgcggcgctgaaatcgcagcggcgaatgttccatcaccagattgaacgtggcaaccc

SEQ ID NO: 50867 - DNA, 75 bp, synthetic construct
  source 1..75: mol_type = other DNA
cctgccagctgatatgatcgccggaagtaacaaggccaaaaatgcatggggaggcgatgtcaccattgcagcaac

SEQ ID NO: 50868 - DNA, 75 bp, synthetic construct
  source 1..75: mol_type = other DNA
atgtccaattacactggagcagcctgaaaaaggtgtttttgtgaagaattcagatggttcagatgtatgtacttt

SEQ ID NO: 50869 - DNA, 75 bp, synthetic construct
  source 1..75: mol_type = other DNA
cggagcagaccgcgcagagctggcaacccttacagctattggtcgcgctattatcgctaagggcagtataaaaga

SEQ ID NO: 50870 - DNA, 75 bp, synthetic construct
  source 1..75: mol_type = other DNA
cttgcagaacgtcagcaggcatccctggcaagaaaacgagccacacataaagaactcagagtgtttattcctgct

SEQ ID NO: 50871 - DNA, 75 bp, synthetic construct
  source 1..75: mol_type = other DNA
tgatctctccggctttaaaaacaacgtggactgccgccttgatcagtatgcgttcatttgccaggagatgaacga

SEQ ID NO: 50872 - DNA, 75 bp, synthetic construct
  source 1..75: mol_type = other DNA
gtatgcacaaaaccaattcagcaaggaaagtctcctaagtatgcggagaagggcttaaagtgcattaaacctaaa

SEQ ID NO: 50873 - DNA, 75 bp, synthetic construct
  source 1..75: mol_type = other DNA
gaacatcttacgctccgggtgagctggaaaggctcagacggacagacccggactcaggagctgctatggcgctga

SEQ ID NO: 50874 - DNA, 75 bp, synthetic construct
  source 1..75: mol_type = other DNA
cagaaacgtcagccgcctggacgaattacgcaatattatcgaagtcagaaaatggcaggtgaatcaggccgccgg

SEQ ID NO: 50875 - DNA, 75 bp, synthetic construct
  source 1..75: mol_type = other DNA
cttcagaacgaagccagacaacaaaaacgtgggctctggtcagatgctgatccggttccaccctggatatggaga

SEQ ID NO: 50876 - DNA, 75 bp, synthetic construct
  source 1..75: mol_type = other DNA
tcagcaaagaaattgttatagataaaactttgcgccgaataaatacctgtgacggaagatcacttcgcagaataa

SEQ ID NO: 50877 - DNA, 75 bp, synthetic construct
  source 1..75: mol_type = other DNA
cagggaatgcagacgaacctcactttaaaagaggaaagcaatgcagactggctacctaagtgcgatggccccgca

SEQ ID NO: 50878 - DNA, 75 bp, synthetic construct
  source 1..75: mol_type = other DNA
ctgaaagagctgttcaaagacgaagtgcgtaagattggtctggagctgggcctgccgtacgacatgctgtaccgt

SEQ ID NO: 50879 - DNA, 75 bp, synthetic construct
  source 1..75: mol_type = other DNA
aacagatcgctacgggcgagtcctgggacgagtggtgacagcgaacggcactgaggctaaccgccagcaagtgct

SEQ ID NO: 50880 - DNA, 75 bp, synthetic construct
  source 1..75: mol_type = other DNA
gcaaaattgaggacgcagcagctgaaaaactcagtaaaacagcgcaggcaactccgctcccaaaagacccgaccc

SEQ ID NO: 50881 - DNA, 75 bp, synthetic construct
  source 1..75: mol_type = other DNA
acagaaaggctgtgtcattggtagtggaagtcggatacagtcgcacacgtttatttgtgagaacgtaacactggg

SEQ ID NO: 50882 - DNA, 75 bp, synthetic construct
  source 1..75: mol_type = other DNA
ccttcgcgcaccgagacgaatgcgggttgctgatgccgttgctcagtatatgcgggtgcccatgggggcagggaa

SEQ ID NO: 50883 - DNA, 75 bp, synthetic construct
  source 1..75: mol_type = other DNA
ttcttgccgttttaagattcatgaactggcagtcgataaagatagcgaagaaaatgaccctcagcttatggaaat

SEQ ID NO: 50884 - DNA, 75 bp, synthetic construct
  source 1..75: mol_type = other DNA
caggcgatacaggccgcaacggcagcagtacagggactggctggcggtaatctgagtgcagccctggcaggtggt

SEQ ID NO: 50885 - DNA, 75 bp, synthetic construct
  source 1..75: mol_type = other DNA
gagaatggcagtggacatttcaggtcggggaccttgaaaacgtcaatatcactcactgggcagtaatgccgaaag

SEQ ID NO: 50886 - DNA, 75 bp, synthetic construct
  source 1..75: mol_type = other DNA
gagcacctgcaggaaaacctcgaatttatcgccgaaagtctctgtttatacgcgatcaagccgaaaaaaggcgaa

SEQ ID NO: 50887 - DNA, 75 bp, synthetic construct
  source 1..75: mol_type = other DNA
caattgccgagggttaggccatcggcggttgctgcctcgtttacttgctggcgtagttctttgctaattcgtatc

SEQ ID NO: 50888 - DNA, 75 bp, synthetic construct
  source 1..75: mol_type = other DNA
tagacgtattgcgcacgtccgcgattcttcaggccgcgtcacttccgttgaatgctacagccgcgaagggctgtt

SEQ ID NO: 50889 - DNA, 75 bp, synthetic construct
  source 1..75: mol_type = other DNA
ccatggcagagacgcttgcgcaatatcgcttatctgccaaagcgctctcttgtgaaacgctttatgggcgacgtt

SEQ ID NO: 50890 - DNA, 75 bp, synthetic construct
  source 1..75: mol_type = other DNA
ataatactctttcatttactaccaatggagattataagaatgcagagccaaatatacctttgatagaaaaactga

SEQ ID NO: 50891 - DNA, 75 bp, synthetic construct
  source 1..75: mol_type = other DNA
gcggtatgaatacaacgccgccggtgacctgaccaccgtcattgccccggacggcagcagaaacgggacacagta

SEQ ID NO: 50892 - DNA, 75 bp, synthetic construct
  source 1..75: mol_type = other DNA
ctgttttttaccggttcgatatttagcccggaatatgcatttttaatcgtctgtccgtttattttgcgaaaagcg

SEQ ID NO: 50893 - DNA, 75 bp, synthetic construct
  source 1..75: mol_type = other DNA
ctgagtggctggatgtaacagagaacgctttattcaaccgccttcgtgccgatggcgatcagttttttccgttgg

SEQ ID NO: 50894 - DNA, 75 bp, synthetic construct
  source 1..75: mol_type = other DNA
aactttaatgcctgggtgaaggagttcggcacgggtaacagggaatttaaacagatggttgaacaggctgaggcg

SEQ ID NO: 50895 - DNA, 75 bp, synthetic construct
  source 1..75: mol_type = other DNA
tgagtctatattcttttattgtgcaaagtgctccctgtgcattgaccaatgtcggtgaacaacgtggaacatata

SEQ ID NO: 50896 - DNA, 75 bp, synthetic construct
  source 1..75: mol_type = other DNA
gaacagccaaaccaacggataagcaatataagctgactgatggtggaggtatgcatctgcttgtccatccaaatg

SEQ ID NO: 50897 - DNA, 75 bp, synthetic construct
  source 1..75: mol_type = other DNA
agagaatgactggcctattgtatctcctgctggttcatgcacctacacgataaaaaattacgctcgctatctcag

SEQ ID NO: 50898 - DNA, 75 bp, synthetic construct
  source 1..75: mol_type = other DNA
agttatcacgtaagccagggtgatacctcgaataatgggtatacgggcagcgccacggcaaactggcaggccgct

SEQ ID NO: 50899 - DNA, 75 bp, synthetic construct
  source 1..75: mol_type = other DNA
gatatcaccggacggtaaacgcagcaccatcgcatatgataaacgcgggcgtccggtgagtgtgacggaaggcgg

SEQ ID NO: 50900 - DNA, 75 bp, synthetic construct
  source 1..75: mol_type = other DNA
gcgagtgagctgccgacagggatacaggacgcgacgggcagtacaaaacagatggcatggagccgttacggtcaa

SEQ ID NO: 50901 - DNA, 75 bp, synthetic construct
  source 1..75: mol_type = other DNA
acagcctattccacgaatgagtttttccaactgctgctgatccgaaactggcaacagtggcaggagcaaaaggcg

SEQ ID NO: 50902 - DNA, 75 bp, synthetic construct
  source 1..75: mol_type = other DNA
caacgaagagggcatggagccatatccgcacggctgggatgtgtggagcaacggcatcaaaaagtttatggctga

SEQ ID NO: 50903 - DNA, 75 bp, synthetic construct
  source 1..75: mol_type = other DNA
ctgccatcaagcaacagggctgcacgctacagcaggtagctgatgccagcggtatgaccaaagggtatttaagcc

SEQ ID NO: 50904 - DNA, 75 bp, synthetic construct
  source 1..75: mol_type = other DNA
ccgaagcgcgacgattccagccgcagaattgatgttccgtatggcggatatgaaatcaagacaatcacacatccg

SEQ ID NO: 50905 - DNA, 75 bp, synthetic construct
  source 1..75: mol_type = other DNA
aaggtgaatacttcgatgccatgattcgcggagagaaaacggaagagtatcgcctgtgtaatgactactggaaaa

SEQ ID NO: 50906 - DNA, 75 bp, synthetic construct
  source 1..75: mol_type = other DNA
cttccggcgctgttcatattttaatttgcgtccacaggcatctaagacccatgcggaaaaattagcactaggatt

SEQ ID NO: 50907 - DNA, 75 bp, synthetic construct
  source 1..75: mol_type = other DNA
gtttcactgggacaggtataacccggcaacggaggcgagttcgtgctgggtgtgagtgtcgcaggcgtgggcggg

SEQ ID NO: 50908 - DNA, 75 bp, synthetic construct
  source 1..75: mol_type = other DNA
gtttcactgggacaggtataacccggcaacggaggcgagttcgtgctgggtgcgtgtgtcccaggcgtgggcggg

SEQ ID NO: 50909 - DNA, 75 bp, synthetic construct
  source 1..75: mol_type = other DNA
cacgacctggcggcaccgatcctggcgggaattattaccgcagcgattgtcggctggtggcgtaaccggaagtaa

SEQ ID NO: 50910 - DNA, 75 bp, synthetic construct
  source 1..75: mol_type = other DNA
ttcggaagtggggttcccgcagagcctgggggaggttcacgatatgttgtacgataaatcccttgagagggataa

SEQ ID NO: 50911 - DNA, 75 bp, synthetic construct
  source 1..75: mol_type = other DNA
actccaatgtctgaaaaatagtcaggtagatgtcacctatatgccggcacatacggtacaaattgccttccctga

SEQ ID NO: 50912 - DNA, 75 bp, synthetic construct
  source 1..75: mol_type = other DNA
gcgcggtaatcctgggttctactctgctggcaggttgctccagcaacgctaaaatcgatcagctgtcttctgacg

SEQ ID NO: 50913 - DNA, 75 bp, synthetic construct
  source 1..75: mol_type = other DNA
agcgaaagaagggaaaccgctttccgataaaaccattgctggcgaataccctgactatcagcgcaaaatcagcgc

SEQ ID NO: 50914 - DNA, 75 bp, synthetic construct
  source 1..75: mol_type = other DNA
gtttcactgggacaggtataacccggcaacggaggcgagttcgtgctgggtgggagtgtctcaggcgtgggcggg

SEQ ID NO: 50915 - DNA, 75 bp, synthetic construct
  source 1..75: mol_type = other DNA
gtgtttacgggaaaaaaatcggcccagatccgcgaaattttaatcagcgagtcagcttgggaagaaatgacctgc

SEQ ID NO: 50916 - DNA, 75 bp, synthetic construct
  source 1..75: mol_type = other DNA
ggtacagttcagccatacaaggcgctgaaggtgcagattcaaccagacgacaaaacgacctgttcaagcagtggc

SEQ ID NO: 50917 - DNA, 75 bp, synthetic construct
  source 1..75: mol_type = other DNA
gcatggtgctgatgtgaaaataaaagaaaacgaaagtgtgatgggatctacagcaatgacctatgatttaagtta

SEQ ID NO: 50918 - DNA, 75 bp, synthetic construct
  source 1..75: mol_type = other DNA
atgacgatcggtcgggcaatgctcaaagaacctgacgatttcctctcatctcttgatccggacgatgatctctta

SEQ ID NO: 50919 - DNA, 75 bp, synthetic construct
  source 1..75: mol_type = other DNA
aggcgcatttcgcccaggggatcaccataataaaatgctgaggcctggcctttgcgtagtgcacgcatcacctca

SEQ ID NO: 50920 - DNA, 75 bp, synthetic construct
  source 1..75: mol_type = other DNA
atggacggcgagctgaaaaatatgaagttaaatattaatcaactggcagccctttcaggtctgcaccggcagact

SEQ ID NO: 50921 - DNA, 75 bp, synthetic construct
  source 1..75: mol_type = other DNA
ctctttctgtgcccgtgcgcagcggttcggaagtggggttcccgcagagcctgggggaggttcacgatatgttgt

SEQ ID NO: 50922 - DNA, 75 bp, synthetic construct
  source 1..75: mol_type = other DNA
ttgtaatggtgcccgttatattattttattttgcacctgacagttttctcgctgaaattattcatgaatggaaga

SEQ ID NO: 50923 - DNA, 75 bp, synthetic construct
  source 1..75: mol_type = other DNA
cccgcaggagaggaaatcttctgcgacgaacatggtcgggtacgggtgaagtttcactgggaccgttatcacggg

SEQ ID NO: 50924 - DNA, 75 bp, synthetic construct
  source 1..75: mol_type = other DNA
aatacacacataatttaaaaagaacaggttgtgtgcttatccggctgataaatgaaacattaaaatggtttcctt

SEQ ID NO: 50925 - DNA, 75 bp, synthetic construct
  source 1..75: mol_type = other DNA
acggaaacggacaatgcctggttgtactcgctgtcacatcagacgaatgacaccggcgaatcagaatggattcat

SEQ ID NO: 50926 - DNA, 75 bp, synthetic construct
  source 1..75: mol_type = other DNA
tctgcggcttaagcgcctggggctgtcaaaaacgttccgtcgtctggttgtcacactcatccaacgttatggcgt

SEQ ID NO: 50927 - DNA, 75 bp, synthetic construct
  source 1..75: mol_type = other DNA
tacggtgagaaagatttcctcaatctgatggatggcgttgaacaacatctggcgatggtatttcaccgattcctt

SEQ ID NO: 50928 - DNA, 75 bp, synthetic construct
  source 1..75: mol_type = other DNA
tctgcggcttaaacgactgggcctgtccagaacgttccgccgtctggttgtcactctcatccgccgttatggcgt

SEQ ID NO: 50929 - DNA, 75 bp, synthetic construct
  source 1..75: mol_type = other DNA
ggcgacgagccggtgattaaaaacacgttcttttttcccgatatcgacccgaagcgcgtccgggaacgtatgcgc

SEQ ID NO: 50930 - DNA, 75 bp, synthetic construct
  source 1..75: mol_type = other DNA
atctgccagtgtgaagccctgtggacgccagcgaaaattatcgacgatgctgtagctcgcatccgcgagcaggta

SEQ ID NO: 50931 - DNA, 75 bp, synthetic construct
  source 1..75: mol_type = other DNA
acattgttcacgttccggcagaagatcgcttcctgtcagcgctggctggcgaaaacgatccggaagcaaaacgta

SEQ ID NO: 50932 - DNA, 75 bp, synthetic construct
  source 1..75: mol_type = other DNA
acctctctaatgaagagctggccagtacctttactgagtggaacaacggtgagttgagcagctacctgattgaca

SEQ ID NO: 50933 - DNA, 75 bp, synthetic construct
  source 1..75: mol_type = other DNA
ccgtccgacttcgtcaccgtagccagcaccgaaagctgcccgtttgccattatggctaacgaagaaaaacgcttc

SEQ ID NO: 50934 - DNA, 75 bp, synthetic construct
  source 1..75: mol_type = other DNA
ggtcctgaaagcatgaatagtagcaattactgctgtgaattgtgttgtaatcctgcttgtaccgggtgctattaa

SEQ ID NO: 50935 - DNA, 75 bp, synthetic construct
  source 1..75: mol_type = other DNA
ctgatgtggtgatgctcaattacatgctgccggagcagttctcagcggcatcgtgtcttgccaatctgcaatttt

SEQ ID NO: 50936 - DNA, 75 bp, synthetic construct
  source 1..75: mol_type = other DNA
ggggagaaaacgcctcaacaaaatgcatcttcaattattcactttcgacaccagaaagtgagagcggattaattg

SEQ ID NO: 50937 - DNA, 75 bp, synthetic construct
  source 1..75: mol_type = other DNA
gcacagtaccggaatgtctttatcgaggatgatcagggaacgcattttcgcctggttgtccgtcaggatggcacg

SEQ ID NO: 50938 - DNA, 75 bp, synthetic construct
  source 1..75: mol_type = other DNA
aaatccaaccaacagtcaaccagtacaccaccaccgtttacggcccttgctggcatacgctgcagtaccgcgcat

SEQ ID NO: 50939 - DNA, 75 bp, synthetic construct
  source 1..75: mol_type = other DNA
ggtaacaccttcttccaggataccatccgtcgtaaccgcgagctttctgcagaaggttttaactttataggtacc

SEQ ID NO: 50940 - DNA, 75 bp, synthetic construct
  source 1..75: mol_type = other DNA
tggaccgctgaaaacgttcatcacgctattcaggcgacggcggatgagctggaagtgggtatgggtaaagttggt

SEQ ID NO: 50941 - DNA, 75 bp, synthetic construct
  source 1..75: mol_type = other DNA
cgcgataacgctgaatatgctataaagccaacatgttggcctgggctagacattatccctagctgcctagcttta

SEQ ID NO: 50942 - DNA, 75 bp, synthetic construct
  source 1..75: mol_type = other DNA
gaaagcgccggtgccggtttacgcgcacgtttctatgatcaacggcgatgacggtaaaaaactgtccaaacgtca

SEQ ID NO: 50943 - DNA, 75 bp, synthetic construct
  source 1..75: mol_type = other DNA
gatgaacggcggctccgtaaatccggcgtggataccaccgcctttggctggctggcctggctggtaccgttttat

SEQ ID NO: 50944 - DNA, 75 bp, synthetic construct
  source 1..75: mol_type = other DNA
tgccaccatttgctgccctgaacggcatacgctgcagtaccgcacatattacggcaaaggacaacgcctggctgt

SEQ ID NO: 50945 - DNA, 75 bp, synthetic construct
  source 1..75: mol_type = other DNA
atatcaggatttccaaagagttaaaggcaaaggttaaagccagggcgcaacataacaagcgttccatgaatgctg

SEQ ID NO: 50946 - DNA, 75 bp, synthetic construct
  source 1..75: mol_type = other DNA
acgcgcttctgaagtggttattgccacagatgccgatcgtgaaggagaagtgatagccagagagttgctggagta

SEQ ID NO: 50947 - DNA, 75 bp, synthetic construct
  source 1..75: mol_type = other DNA
cttctcaggcgaaagatatcgcccgtgaactggcgctcagtaagcggggcgacggatacatcggagatgacaata

SEQ ID NO: 50948 - DNA, 75 bp, synthetic construct
  source 1..75: mol_type = other DNA
actaacgctcaattcacttatattaatcatggtgatgcttatgctcctggctggcgacgagactacaacacgaaa

SEQ ID NO: 50949 - DNA, 75 bp, synthetic construct
  source 1..75: mol_type = other DNA
aggtctgtggtacggggatttattgcagagcggtatgtacaaagtatgtttacaggtaccagccagatttgctcc

SEQ ID NO: 50950 - DNA, 75 bp, synthetic construct
  source 1..75: mol_type = other DNA
catccttacattgatgatatggcgatgtttttatcgccattacctgtcgtgctggagtggcattgtgtgatgtgc

SEQ ID NO: 50951 - DNA, 75 bp, synthetic construct
  source 1..75: mol_type = other DNA
tcatggtgatgcttatgctcctggctggcgaagagactacaacacgaaaaaccagcagcctgcatttgctttagg

SEQ ID NO: 50952 - DNA, 75 bp, synthetic construct
  source 1..75: mol_type = other DNA
gatgaacgacggctccgtaaatccggcgttgataccgccgcctttggctggctggcctggctggttccgttttat

SEQ ID NO: 50953 - DNA, 75 bp, synthetic construct
  source 1..75: mol_type = other DNA
cgtcagaatggatatcttattcagagtcagacagtagcacctggagcatttgcgctaacagatttgcctttgacc

SEQ ID NO: 50954 - DNA, 75 bp, synthetic construct
  source 1..75: mol_type = other DNA
cattggaccctggcgtgttaggaacctgaccacctggaacaggtcatccggtcagtcgggaaaatgggagagttc

SEQ ID NO: 50955 - DNA, 75 bp, synthetic construct
  source 1..75: mol_type = other DNA
aagagccagtgttattcatcttatcaacttccagaccagaaggaaataactggaattttcctgacgaactctgta

SEQ ID NO: 50956 - DNA, 75 bp, synthetic construct
  source 1..75: mol_type = other DNA
atgatgagccgtgtgtcgtacgttttgctaacccgcaggaaggttctgttgtttttgacgatcagatccgtggtc

SEQ ID NO: 50957 - DNA, 75 bp, synthetic construct
  source 1..75: mol_type = other DNA
ctggttgcaccgatcctgaccaaaatcgccgcagtggctgaagacggggagccatgcgttacctatattggtgcc

SEQ ID NO: 50958 - DNA, 75 bp, synthetic construct
  source 1..75: mol_type = other DNA
cgctgaaaggaccttctatcatgcctggtgggcagaaagaagcctatgaactggttgcacctatcctgaccaaaa

SEQ ID NO: 50959 - DNA, 75 bp, synthetic construct
  source 1..75: mol_type = other DNA
ctattgatggcgtggcggtgagttatattgatgctgccgtagcgttgggtaataccattaacgaaatggataaat

SEQ ID NO: 50960 - DNA, 75 bp, synthetic construct
  source 1..75: mol_type = other DNA
gtcgatggcattgagctcgctgaactgattaacaaagtcgctgaaaacggttattcactccatgtggtggacgac

SEQ ID NO: 50961 - DNA, 75 bp, synthetic construct
  source 1..75: mol_type = other DNA
gttttgactttcagcaagcaggtaaagaagtcctggcgattgaacgtgaatgcctggcggagcttgatcaataca

SEQ ID NO: 50962 - DNA, 75 bp, synthetic construct
  source 1..75: mol_type = other DNA
atgtttactttattattcgctattactcttatttctgcattcattacaaacaaacaggaacttatatccaggggg

SEQ ID NO: 50963 - DNA, 75 bp, synthetic construct
  source 1..75: mol_type = other DNA
ggccaaccggttcaggcaaaagcaccaccctgtatgccgcactaagccggttgaatgctagggtgcgtaacatca

SEQ ID NO: 50964 - DNA, 75 bp, synthetic construct
  source 1..75: mol_type = other DNA
tggagctggaacgttatgtccggcaacactctgcgggcatccgcagcaacggcattgagaaagtgctcgccggag

SEQ ID NO: 50965 - DNA, 75 bp, synthetic construct
  source 1..75: mol_type = other DNA
ttgcagcaaaatatcttcgaagtgatggataagctacgtgagatctaccctcaacgtaagtttgtgatgagccgc

SEQ ID NO: 50966 - DNA, 75 bp, synthetic construct
  source 1..75: mol_type = other DNA
tcaacgttaacgactatgacaacacgctgaccgtttacactacccgcccggacacctttatgggttgtacctacc

SEQ ID NO: 50967 - DNA, 75 bp, synthetic construct
  source 1..75: mol_type = other DNA
tggcaaaagcattcgatacttctgtagatttttggattaatcttcagaccgcagtagatctgtgggaagtcgaaa

SEQ ID NO: 50968 - DNA, 75 bp, synthetic construct
  source 1..75: mol_type = other DNA
acacgtctgataaagacatgagtgggctgcagggcaaaattgctgatgctgtgaaagcaaaaggatatcaggtgg

SEQ ID NO: 50969 - DNA, 75 bp, synthetic construct
  source 1..75: mol_type = other DNA
ccgtcgtcagaccttcaacaccgcaattgcggcgattatggagctgatgaacaaactggcgaaagcaccgaccga

SEQ ID NO: 50970 - DNA, 75 bp, synthetic construct
  source 1..75: mol_type = other DNA
ttgaatcacggccacccttaccttttacctattcacgttcacaaaggattttactgttgcgtgaggctggtggta

SEQ ID NO: 50971 - DNA, 75 bp, synthetic construct
  source 1..75: mol_type = other DNA
ctgaaactggcgaaactggggcgatggtatgacagcaaacgcacaggccgccccggttgggtagttatgtgggat

SEQ ID NO: 50972 - DNA, 75 bp, synthetic construct
  source 1..75: mol_type = other DNA
catccgtatacctttaaagcgcaaaaagcggttatttctattcctgttgtcccacaggtgactggtgtggtgatt

SEQ ID NO: 50973 - DNA, 75 bp, synthetic construct
  source 1..75: mol_type = other DNA
ggtgctctatgaagtggaccttatcaacatggtggaaattgtggacggtgtagacctgatggaagcgcaccgcaa

SEQ ID NO: 50974 - DNA, 75 bp, synthetic construct
  source 1..75: mol_type = other DNA
gaatcaccgccggaaggacgtattcccggcgcaatccagaccgccgtcatggacagtgctcagggctgggtggat

SEQ ID NO: 50975 - DNA, 75 bp, synthetic construct
  source 1..75: mol_type = other DNA
tataaaaaggcaacaacctgcatcgaaaataatgaaatttggctagatcgccaagcttcatcttgggatgacgct

SEQ ID NO: 50976 - DNA, 75 bp, synthetic construct
  source 1..75: mol_type = other DNA
tgctgctgtgctgttttggttcatcggtgccgaatcatgccgccatttactgtggtgatggcgagctgctgcacc

SEQ ID NO: 50977 - DNA, 75 bp, synthetic construct
  source 1..75: mol_type = other DNA
tgcgtccggggcgcaaactggcctcgctgctggtgtcgcgtatcaaggtgatggcgcggctggacattgccgaaa

SEQ ID NO: 50978 - DNA, 75 bp, synthetic construct
  source 1..75: mol_type = other DNA
gaactgccggaaacggaagatctgctggaaagcgacgacgatgcgccgatcatcaaactgatcaacgccatgctg

SEQ ID NO: 50979 - DNA, 75 bp, synthetic construct
  source 1..75: mol_type = other DNA
tggcgattaatctcgccgtactttcctgtattgtatttataaacattattttaagatatggttttcagacaagca

SEQ ID NO: 50980 - DNA, 75 bp, synthetic construct
  source 1..75: mol_type = other DNA
ggctgacagacgttctgacgcgtctaccggagtggccggaagaccgactggaagagttgctgccccttgagggat

SEQ ID NO: 50981 - DNA, 75 bp, synthetic construct
  source 1..75: mol_type = other DNA
agggtaatcacgcaggtggtgatactggatgcagataaaaagcagatacagtgcgtggtaagaccgctgcaaatt

SEQ ID NO: 50982 - DNA, 75 bp, synthetic construct
  source 1..75: mol_type = other DNA
ccggaaatcagtgaagcgaacatttggagcacatttgagcaactgcaccagaataaggatgaagtgtttgagcga

SEQ ID NO: 50983 - DNA, 75 bp, synthetic construct
  source 1..75: mol_type = other DNA
acttgacgcatccggctcgatgagtggccagttcagtaagggtaacgttcagtctgtgctggaccgcatcgccgt

SEQ ID NO: 50984 - DNA, 75 bp, synthetic construct
  source 1..75: mol_type = other DNA
gtcgcgaaggcgatgtactgctggggatctccacctccggtaactctgcaaacgtgatcaaagcgatcgcagcgg

SEQ ID NO: 50985 - DNA, 75 bp, synthetic construct
  source 1..75: mol_type = other DNA
cgccagctaaaccacgtcgaagcagcagaactgctgcgtgtgaccgctgaagcaatccagaacgaagcgcaggag

SEQ ID NO: 50986 - DNA, 75 bp, synthetic construct
  source 1..75: mol_type = other DNA
cgccagctaaaccacgtcgaagcggcagaactgctgcgcgtgactgctgaagcaatccagaacgaagcgcaggag

SEQ ID NO: 50987 - DNA, 75 bp, synthetic construct
  source 1..75: mol_type = other DNA
aagaacgcctggtgggtaggcgcggcaaattgcccaggcgatgcgaaagaaaacgatgccagtaacccatggcgt

SEQ ID NO: 50988 - DNA, 75 bp, synthetic construct
  source 1..75: mol_type = other DNA
tcttcgtttatttgccgttcagcatccccgacgtttgaacttttttaccaggaatataagcgactgggattaagt

SEQ ID NO: 50989 - DNA, 75 bp, synthetic construct
  source 1..75: mol_type = other DNA
ctgattgtccctgagggggatgttattatccggtgggctaacagaatgcagcaggcatccggaagtgatgtgcgg

SEQ ID NO: 50990 - DNA, 75 bp, synthetic construct
  source 1..75: mol_type = other DNA
cactgacttttcctgttaaagctggtgatgaatgccttgttatctttgcggaccgctgtattgatttctggtggc

SEQ ID NO: 50991 - DNA, 75 bp, synthetic construct
  source 1..75: mol_type = other DNA
agtgacgtgaatctggggaaaaaagtgagtggaataatcagtgtagatgccgtaaatgactggggaggggttcag

SEQ ID NO: 50992 - DNA, 75 bp, synthetic construct
  source 1..75: mol_type = other DNA
agaccgggcgtggtcatgaacatcctgaaaactggcttcagggctggagcgggacgctggttgtcgatggttacc

SEQ ID NO: 50993 - DNA, 75 bp, synthetic construct
  source 1..75: mol_type = other DNA
agcgaaactaacagcgacagcgaaacaatggcggctacccctaaagccgttaagtctgtaaaagatcttgctgat

SEQ ID NO: 50994 - DNA, 75 bp, synthetic construct
  source 1..75: mol_type = other DNA
ttcttacctaagcctggcggtgggatgaacctgttaatcacctctgtggatggtgataaaactgctggcgcagcg

SEQ ID NO: 50995 - DNA, 75 bp, synthetic construct
  source 1..75: mol_type = other DNA
ctcagggatggctgaaccgtggttatgaaggcgcagctgttggtgcagcgttaggtgccggtattaccggatata

SEQ ID NO: 50996 - DNA, 75 bp, synthetic construct
  source 1..75: mol_type = other DNA
ctcttgctggtgcggtaatttttgttacctctgcggtagagtacccaattcatcgtcgcgtactcttatcgatgc

SEQ ID NO: 50997 - DNA, 75 bp, synthetic construct
  source 1..75: mol_type = other DNA
aaaagctggagtatattcccgctcacttcgtggtgaaccgttatatccgtccgcaatacagttgtccctgttgcc

SEQ ID NO: 50998 - DNA, 75 bp, synthetic construct
  source 1..75: mol_type = other DNA
ctgaatgagcttgcagcagcactgggcaatgacccgaactttgcgacaacaatgacaaatgcgctggcagggaaa

SEQ ID NO: 50999 - DNA, 75 bp, synthetic construct
  source 1..75: mol_type = other DNA
ctgtgggaaatcaatgcggtaagtgcattcgcgccgcgcgagaagtgatgcaggacgagttgatgcagatgccag

SEQ ID NO: 51000 - DNA, 75 bp, synthetic construct
  source 1..75: mol_type = other DNA
ggtatggctccggctctgatgctgtccggcggtttactgctggtgggcgcactggctatggccagaagggggacg

SEQ ID NO: 51001 - DNA, 75 bp, synthetic construct
  source 1..75: mol_type = other DNA
ataatcttgaagcattttatctcgcaacacctgatggacgatttgaggcgcttaataataaaggagaatatattt

SEQ ID NO: 51002 - DNA, 75 bp, synthetic construct
  source 1..75: mol_type = other DNA
ttttggaccttgtattcctagaagtgggtgtaatagcgatttatctgcttagcaagctaacaggacaaaaagaac

SEQ ID NO: 51003 - DNA, 75 bp, synthetic construct
  source 1..75: mol_type = other DNA
cacattctggctgtgcgaaagactacactgctgcaaatcgacacacttatccggcaactggctgaaatctcggta

SEQ ID NO: 51004 - DNA, 75 bp, synthetic construct
  source 1..75: mol_type = other DNA
cgcttaatcgtgttcagagcttggaaaaaattaaacaattgcgtgctaaacatggattatgtagagggaaaaggt

SEQ ID NO: 51005 - DNA, 75 bp, synthetic construct
  source 1..75: mol_type = other DNA
tggaacggtttaaattttatctggagcaacacggctggctcgttgcccgtaaagaacaactggtggaaaggctga

SEQ ID NO: 51006 - DNA, 75 bp, synthetic construct
  source 1..75: mol_type = other DNA
caacttataaaggattccaatactgtacaggccgcgcttacagatcttgggatgattataacgctctccacgctt

SEQ ID NO: 51007 - DNA, 75 bp, synthetic construct
  source 1..75: mol_type = other DNA
ccgtagtaacggctgcattttcattaccttctttggtctatgctgcacaacaaaacattcttagcgtgcacattt

SEQ ID NO: 51008 - DNA, 75 bp, synthetic construct
  source 1..75: mol_type = other DNA
ctcatgaatatcaaaagctactgctcaaacatcaattgctgccgtccatgagcgggaaaggcaattgttttgata

SEQ ID NO: 51009 - DNA, 75 bp, synthetic construct
  source 1..75: mol_type = other DNA
ggatgtcagccgggtgttctcatcggtgatagatatgccggcagggcggggtcatgtcaccctgacgtttaatgt

SEQ ID NO: 51010 - DNA, 75 bp, synthetic construct
  source 1..75: mol_type = other DNA
aaatgaatgctatacagtgatcccccgtgaaactaaagctaaagatgtgacttccggacagattaaacatatcct

SEQ ID NO: 51011 - DNA, 75 bp, synthetic construct
  source 1..75: mol_type = other DNA
atggccgtcaatcttactgaaacagccatccgagcattgaaagcaaaaaagacatcgttctatgtctggagcaac

SEQ ID NO: 51012 - DNA, 75 bp, synthetic construct
  source 1..75: mol_type = other DNA
tcactgactatcctcgtatatggtggcacgcaagagaaggtgccatcttccctaataaagaagatattgcccgtg

SEQ ID NO: 51013 - DNA, 75 bp, synthetic construct
  source 1..75: mol_type = other DNA
gggacagagccgccatttacgggtcgtttactgcataacaagcgtgacggcgtatatcactgtttgatctgcgat

SEQ ID NO: 51014 - DNA, 75 bp, synthetic construct
  source 1..75: mol_type = other DNA
agaaatctggcgtgacctgatgcaacattcagggatgctttccttaatggatgcacaggaccgtgatacatggta

SEQ ID NO: 51015 - DNA, 75 bp, synthetic construct
  source 1..75: mol_type = other DNA
atcaagatcgggcacggtgcggtgataggcagccgctcgttggtgacaaaagatgtggggcactgttgcaaagtt

SEQ ID NO: 51016 - DNA, 75 bp, synthetic construct
  source 1..75: mol_type = other DNA
acaggctttggggcatgctgtacaatgctacactccaggattaaagccagacactattttatggtgggcaggtac

SEQ ID NO: 51017 - DNA, 75 bp, synthetic construct
  source 1..75: mol_type = other DNA
taaactacgcgagtttcaaaaaagccataattcgcagttagaccaattcaacaagttgcagatagagttattaac

SEQ ID NO: 51018 - DNA, 75 bp, synthetic construct
  source 1..75: mol_type = other DNA
gaaatggatgattcccgcctgatgacgctgctcagtgatgccatgtttgctgcggaaatgaaggggatgctggat

SEQ ID NO: 51019 - DNA, 75 bp, synthetic construct
  source 1..75: mol_type = other DNA
gccgaccgctgattgacgcagcgctggcgcgcaatggtattcaggcgaatattgtgcaggagattggacatccgg

SEQ ID NO: 51020 - DNA, 75 bp, synthetic construct
  source 1..75: mol_type = other DNA
tgcacagcggatgatcttaaagggaggaatggttttaagcgatgtttgcaatttaccctttaccggcccagggat

SEQ ID NO: 51021 - DNA, 75 bp, synthetic construct
  source 1..75: mol_type = other DNA
ctggtgagtgcgttacgccaggccgtgaactgggcaaaggcggcgaaggtgcggtttatgatatcgaggagtttg

SEQ ID NO: 51022 - DNA, 75 bp, synthetic construct
  source 1..75: mol_type = other DNA
gtacgcagtttgaccctgcaataccacaggatgcacgtatcgcagagaattttctgaagcctgtaaatctttttg

SEQ ID NO: 51023 - DNA, 75 bp, synthetic construct
  source 1..75: mol_type = other DNA
atcgtctttggtttacgaagcgctgttgctcatctgcaataccctcgctttatacaggctatcgttcgcgcccag

SEQ ID NO: 51024 - DNA, 75 bp, synthetic construct
  source 1..75: mol_type = other DNA
gcatggtggttatcaaggcgtttatcgcggtgcgggtgctgggcctgcggcagggcggtatcagtgaagaaacac

SEQ ID NO: 51025 - DNA, 75 bp, synthetic construct
  source 1..75: mol_type = other DNA
tgcttcgtgcgcgcggccttcgaggcgggtatcggcctggatgccctggcgcggctgtgccgtgcgctcgacgca

SEQ ID NO: 51026 - DNA, 75 bp, synthetic construct
  source 1..75: mol_type = other DNA
tcttgatgttaaggcagcacaaagttctattaatcatgtgataatggggaatgcttcttttggcaagaaaataga

SEQ ID NO: 51027 - DNA, 75 bp, synthetic construct
  source 1..75: mol_type = other DNA
tatagacaattacaatcatatttaacaggtccgtatggaaagctcggttttataattaatagagatgagagtgag

SEQ ID NO: 51028 - DNA, 75 bp, synthetic construct
  source 1..75: mol_type = other DNA
cagaattatttgaaataaaccagtccttaaaagaaatttctgatatatatcaggagattaatttttctaaattag

SEQ ID NO: 51029 - DNA, 75 bp, synthetic construct
  source 1..75: mol_type = other DNA
cgccatgcttcaggctggaaactttcgggaaaagaagggttcgtcaaccaataattttcgggaaatctcggaaac

SEQ ID NO: 51030 - DNA, 75 bp, synthetic construct
  source 1..75: mol_type = other DNA
atggcagagcaaaaacgaccggtactgacactgaagcggaaaacggaaggagaagcgcctgtccgcagcaggaaa

SEQ ID NO: 51031 - DNA, 75 bp, synthetic construct
  source 1..75: mol_type = other DNA
aactagagtctctttataataaagaaccttatcgggcactctggagctcgattatgggaggtggtgacttttcac

SEQ ID NO: 51032 - DNA, 75 bp, synthetic construct
  source 1..75: mol_type = other DNA
ccattggccaaaaagcagcttgtagaatggcaggagttagtgggttacaaaatgattggcgtacgttcctccagc

SEQ ID NO: 51033 - DNA, 75 bp, synthetic construct
  source 1..75: mol_type = other DNA
gcagaagagcagacggtgccgcagcttaaaaccgcggcgcaggctgcacttgatggtaatgctgcgggagcagaa

SEQ ID NO: 51034 - DNA, 75 bp, synthetic construct
  source 1..75: mol_type = other DNA
ccggtcactggaatacgataactttccggaaatcagcaaggcgaatatcctgagtacattcgaacaactgcaccg

SEQ ID NO: 51035 - DNA, 75 bp, synthetic construct
  source 1..75: mol_type = other DNA
gtagcattgaacctgaattaacagtttatacgtgcttaaaaaaaatagaagcatctttcgaattaatcgaagaaa

SEQ ID NO: 51036 - DNA, 75 bp, synthetic construct
  source 1..75: mol_type = other DNA
atgccctggacattccgtttggcgagaaggcctctgaccgcgactacaaagaaaatctggtcagtaatttactga

SEQ ID NO: 51037 - DNA, 75 bp, synthetic construct
  source 1..75: mol_type = other DNA
atgctaaaacagctagatatgacagaaacggcgaaagttgtttttaatgaattaaacggcaaaccggcaacagtc

SEQ ID NO: 51038 - DNA, 75 bp, synthetic construct
  source 1..75: mol_type = other DNA
ggttttgaggatgaattaattttatatattcagaaaacaaacgagagggtaaaaactctttttgtgaaaatagat

SEQ ID NO: 51039 - DNA, 75 bp, synthetic construct
  source 1..75: mol_type = other DNA
gagccaaggtttgaaaccttaactggtatatggcatggagtaacccactggatgccgctaccagaaccgccgcag

SEQ ID NO: 51040 - DNA, 75 bp, synthetic construct
  source 1..75: mol_type = other DNA
aaaccgccagagtggtgtttaatgaattaagcgtcactgaaccggcgacagtcggggagattgcgcagaatactt

SEQ ID NO: 51041 - DNA, 75 bp, synthetic construct
  source 1..75: mol_type = other DNA
gagtggcagtatttacaggtaagggatggagccttgaagaagaccatcgcaatgagactgtttactcaatcgaaa

SEQ ID NO: 51042 - DNA, 75 bp, synthetic construct
  source 1..75: mol_type = other DNA
atgctgaaacagcaggatatgacagaaaccgccagagtggtgtttaatgaattaagtgccaccgcaccggcgact

SEQ ID NO: 51043 - DNA, 75 bp, synthetic construct
  source 1..75: mol_type = other DNA
cgctgccggtgagattggtgagaaagagcacctgaaagccagtctgcagtattcctacggtgctgaccccgtgcg

SEQ ID NO: 51044 - DNA, 75 bp, synthetic construct
  source 1..75: mol_type = other DNA
ataagggacggctgaacctggcctgggcgtatggtgtggtgtttacccgcattacccgtcagcaactgaagacac

SEQ ID NO: 51045 - DNA, 75 bp, synthetic construct
  source 1..75: mol_type = other DNA
ctggtcagttattccgacattcagtctctgccggatctgacctgttatgtcaccctgcccggaccgtatccggca

SEQ ID NO: 51046 - DNA, 75 bp, synthetic construct
  source 1..75: mol_type = other DNA
gcgcagcgcgaagctgatattgaaaatgaaaaactccgtaaagaggtcgaagacttgagggctgccagtgaatct

SEQ ID NO: 51047 - DNA, 75 bp, synthetic construct
  source 1..75: mol_type = other DNA
gatcagaaaaacggctggctgtttatttggggtcgtttgcgggagggggcggaatcctacgctaaggctttggcc

SEQ ID NO: 51048 - DNA, 75 bp, synthetic construct
  source 1..75: mol_type = other DNA
tggaacgccgcttcggcaacgatcttccgtcgtctccagtggagtggctgacggataatggttcatgctaccggg

SEQ ID NO: 51049 - DNA, 75 bp, synthetic construct
  source 1..75: mol_type = other DNA
tgacaaaagaggtggggaatgtacagcagagtgttaaccatatggctgatgacgatgttgatcgcgagctgcggg

SEQ ID NO: 51050 - DNA, 75 bp, synthetic construct
  source 1..75: mol_type = other DNA
cgggattatttcatcctcagagaacggttgatgacaatgcagaagcagctggaaggggcgaaggaatatatccgc

SEQ ID NO: 51051 - DNA, 75 bp, synthetic construct
  source 1..75: mol_type = other DNA
atggatgaatatgtgggattcacccgtgcccacccgcagtgaagcctgggcaggatgtctgacgctgcccagaga

SEQ ID NO: 51052 - DNA, 75 bp, synthetic construct
  source 1..75: mol_type = other DNA
ggtcagttattccgacattcagtctctgccggatctgacctgttatgtcaccctgcccggaccgtatccggcagt

SEQ ID NO: 51053 - DNA, 75 bp, synthetic construct
  source 1..75: mol_type = other DNA
cggctggattgagggaacgctggaggctgacggcgggcagcaggacgaagtgattgccacgctgatggtgtgggc

SEQ ID NO: 51054 - DNA, 75 bp, synthetic construct
  source 1..75: mol_type = other DNA
attcagcgcatacccgcaccagccggtatgtgagtgacaatgtcaaagaaagttatctgcagtgccagaatattt

SEQ ID NO: 51055 - DNA, 75 bp, synthetic construct
  source 1..75: mol_type = other DNA
tattggaaagaaaagagtggttaatcacgcgttgtgaaaaaatgtatttcgataatctggaaaaatggtttggac

SEQ ID NO: 51056 - DNA, 75 bp, synthetic construct
  source 1..75: mol_type = other DNA
accgtccgtctccctatctgtattggcagagcctgaagtccccgagcctaaagcactgaccctcgcgtctctcat

SEQ ID NO: 51057 - DNA, 75 bp, synthetic construct
  source 1..75: mol_type = other DNA
tacgggaacgttattcacctaagccagtacctgaatgctctgtttgtggcgaggaaatgtcaatacagcgcatat

SEQ ID NO: 51058 - DNA, 75 bp, synthetic construct
  source 1..75: mol_type = other DNA
cgatgaaaattcgagtgggaaatccattgcgaaaactggttctgatcaagctggctgataatgccagcgatcagg

SEQ ID NO: 51059 - DNA, 75 bp, synthetic construct
  source 1..75: mol_type = other DNA
tggtagatggtgcttatggttttttattggctgactttatgtcactcgtggaagaccgtagaaaggctaagggtg

SEQ ID NO: 51060 - DNA, 75 bp, synthetic construct
  source 1..75: mol_type = other DNA
ggcgtcggtgttcttccggctgatacgcacggcctgtcgtcagcgttttgaggggcgggaaccatgtcaaagctg

SEQ ID NO: 51061 - DNA, 75 bp, synthetic construct
  source 1..75: mol_type = other DNA
gtcacggcgctgtttttgcagccggtgccgtggcgcaggcggtcagtggctctggtagtgatggtggcgacgttt

SEQ ID NO: 51062 - DNA, 75 bp, synthetic construct
  source 1..75: mol_type = other DNA
cgacgcggtcacgatccgcgggcaatgttgtacaatgcggttcagcatcagtggctcacggaacagcaggccggt

SEQ ID NO: 51063 - DNA, 75 bp, synthetic construct
  source 1..75: mol_type = other DNA
ggcgtcgctatttttccggttgatgcatacggcctgccgccagcgtcttgaggggcggaaaccatgtcaaggctg

SEQ ID NO: 51064 - DNA, 75 bp, synthetic construct
  source 1..75: mol_type = other DNA
cgatatgaatcatattccttccggctctgttgcaaaaatcgtgaagcttgagcatgcttggcggagattggacgg

SEQ ID NO: 51065 - DNA, 75 bp, synthetic construct
  source 1..75: mol_type = other DNA
atcctgatcccatgcctgctgtgggttgctgtttatgggttaggtaaacgttacctccaaagaacatcaaactag

SEQ ID NO: 51066 - DNA, 75 bp, synthetic construct
  source 1..75: mol_type = other DNA
ttaacccgcagacggaaagtgcagacagctctgatacccgaattaatcaactggagcagggaacaggtgaagatg

SEQ ID NO: 51067 - DNA, 75 bp, synthetic construct
  source 1..75: mol_type = other DNA
gctacatgcgggtatcgaaggcggacggatcccagtccaccaatttgcaacgcgatgcgctcatcgccgctggtg

SEQ ID NO: 51068 - DNA, 75 bp, synthetic construct
  source 1..75: mol_type = other DNA
gagctggcgcacgaagtctggctggaaaacacccagccgatgctgtcgcacattaacgtcggcacgggcgttgac

SEQ ID NO: 51069 - DNA, 75 bp, synthetic construct
  source 1..75: mol_type = other DNA
atgaagaaaaaaacgatatatcagtgcgttattttgttctttagccttcttaacatccatgtcgggatggctggg

SEQ ID NO: 51070 - DNA, 75 bp, synthetic construct
  source 1..75: mol_type = other DNA
tgggccatcagggtaagcagcagagtgaggacgagataacgggagggcgccagctgactgacgacccgaaagcgg

SEQ ID NO: 51071 - DNA, 75 bp, synthetic construct
  source 1..75: mol_type = other DNA
cgcgcagtcaaaccgctgattttccaggagcgccgcaaaccggaactggtcgcacgtacccgtatcgatgacgac

SEQ ID NO: 51072 - DNA, 75 bp, synthetic construct
  source 1..75: mol_type = other DNA
ggaagcagaaggtcgccagatggccagcctcttcgaaccggaggttgcctccggagaagacgtgactcaggctga

SEQ ID NO: 51073 - DNA, 75 bp, synthetic construct
  source 1..75: mol_type = other DNA
ctcccagccataagattgcagagttcgctgccggtgagattggtgagaaagagcacctgaaagccagcgagcagt

SEQ ID NO: 51074 - DNA, 75 bp, synthetic construct
  source 1..75: mol_type = other DNA
cctgaagatgctaaagaatatattagtgagttaggactgaggaaatcatcggctaaacttattccagagaatact

SEQ ID NO: 51075 - DNA, 75 bp, synthetic construct
  source 1..75: mol_type = other DNA
ccaacgctgatgttgtcgagtacatggagaggataggtatagaacacccgttgctattaagcgcaatggcgaaag

SEQ ID NO: 51076 - DNA, 75 bp, synthetic construct
  source 1..75: mol_type = other DNA
gattcaacaaagtgcgttgatgaaaacgatgcgatcaatcatcgaaaagatttgggtgttcgtacacttttaatg

SEQ ID NO: 51077 - DNA, 75 bp, synthetic construct
  source 1..75: mol_type = other DNA
ttgcgctcaggggctggccggacgctcgctggtggcctggccgcagattgatgcgcagcaaaccctcccactgct

SEQ ID NO: 51078 - DNA, 75 bp, synthetic construct
  source 1..75: mol_type = other DNA
gtaacgccagtcccgaatgtcatggtttataccagcggcaaaaaaatgccgatggtggtggagggcagcggcgaa

SEQ ID NO: 51079 - DNA, 75 bp, synthetic construct
  source 1..75: mol_type = other DNA
atgctgtggccgaaatggaagccagtggctacatttttaaaaagaaaccttccggcaatacgatgaagtacgcga

SEQ ID NO: 51080 - DNA, 75 bp, synthetic construct
  source 1..75: mol_type = other DNA
gcccacggtggtatcggaagccatggcagaacttcgcgccctgccctcgtttcttggcaacgcgctcattcgtga

SEQ ID NO: 51081 - DNA, 75 bp, synthetic construct
  source 1..75: mol_type = other DNA
cagacgtaagccggaaaacgaagaccgcacggacgagggttttgacgttgagtgcggctttgccgcaccttggac

SEQ ID NO: 51082 - DNA, 75 bp, synthetic construct
  source 1..75: mol_type = other DNA
aagtcgccacacgtgcaggtaaacttctgacatccttgagcgaaagcatccgccagcaaaaagaggaattgaagc

SEQ ID NO: 51083 - DNA, 75 bp, synthetic construct
  source 1..75: mol_type = other DNA
ttggcagtgattctgtgcgagctttggcggtggactgcgccaccggtgaagagatcgccaccagcgtagagtggt

SEQ ID NO: 51084 - DNA, 75 bp, synthetic construct
  source 1..75: mol_type = other DNA
ctcgatccggcgctggatttgcgaaacgtcggtgttgctgcaccgtttggcccggtcaacgtacaaaagcagcat

SEQ ID NO: 51085 - DNA, 75 bp, synthetic construct
  source 1..75: mol_type = other DNA
atgacagacattacagccaatgtgattgtatcgatgccttcgcaactcttcactatggcgcgttcttttaaagcc

SEQ ID NO: 51086 - DNA, 75 bp, synthetic construct
  source 1..75: mol_type = other DNA
ataaagcccgtctgatgcctgagatggatacgctgctggcggggctgatcgccattgacccggcccgtgccatgg

SEQ ID NO: 51087 - DNA, 75 bp, synthetic construct
  source 1..75: mol_type = other DNA
tatcagatagtccgtatcttcggtcaggagccgcagatcatttttgacggacagatccagcacggggtgacgctg

SEQ ID NO: 51088 - DNA, 75 bp, synthetic construct
  source 1..75: mol_type = other DNA
tgcttaccgcgcttcgtgcgctgctgttaagccgcaagaatccgtttggcgatatcaaatcggatggcacggtga

SEQ ID NO: 51089 - DNA, 75 bp, synthetic construct
  source 1..75: mol_type = other DNA
gccgaaggtgaaatcgaaatgagtacccgcagctttaaccagctcggggaagtagctgctcaggcgggatcgtgg

SEQ ID NO: 51090 - DNA, 75 bp, synthetic construct
  source 1..75: mol_type = other DNA
cattccgttatccatgcagcgacagttcccggatttaacgccacgtcatattgaccatctgaaaacccttattgc

SEQ ID NO: 51091 - DNA, 75 bp, synthetic construct
  source 1..75: mol_type = other DNA
ttttgatgtgatggctgatggaaatcagtgggcaaagcctggagagtatatattctcggtaagcgggaagtgctt

SEQ ID NO: 51092 - DNA, 75 bp, synthetic construct
  source 1..75: mol_type = other DNA
atgcctttttggttgttcaacataaaaaaatacaggttaaaaacattacatttttagacaatgggcagggcatgt

SEQ ID NO: 51093 - DNA, 75 bp, synthetic construct
  source 1..75: mol_type = other DNA
atgaactcattccggggtcgctggcgcgtatgctgtgcgccgactggtggtatcggaaattgtggaagatgcgtt

SEQ ID NO: 51094 - DNA, 75 bp, synthetic construct
  source 1..75: mol_type = other DNA
acatgggaaaaggtggcagcggaaaccctgcgtctggatgtcatcccgcctgcgtttgagcaactccgtcggaaa

SEQ ID NO: 51095 - DNA, 75 bp, synthetic construct
  source 1..75: mol_type = other DNA
ttctacttgctttgtggagccttcccgggcttgcccagcaaattgctgtgccggagctgcgccaacaagtgactg

SEQ ID NO: 51096 - DNA, 75 bp, synthetic construct
  source 1..75: mol_type = other DNA
tcgatgttgaaaccgcaaaccgttacggcctgcgctggctgtacgatgtggccaatcaacgtaagcatgaaacta

SEQ ID NO: 51097 - DNA, 75 bp, synthetic construct
  source 1..75: mol_type = other DNA
gttttctacaccattacctgtccgtcacgtttccattccacgctcaataacggcagaccaaacccaacctggaca

SEQ ID NO: 51098 - DNA, 75 bp, synthetic construct
  source 1..75: mol_type = other DNA
caacgtattgaatacttcagcagcctgggcaggccaaaggcttattcccgctatttgcgtgagacgattaagcca

SEQ ID NO: 51099 - DNA, 75 bp, synthetic construct
  source 1..75: mol_type = other DNA
ttaacgatgcccgcaatgaagtgaaaaacagcgtactggtcgataacggcgatttgattcaggggagtccgctgg

SEQ ID NO: 51100 - DNA, 75 bp, synthetic construct
  source 1..75: mol_type = other DNA
ttctcggcgcgatgatgcgcaagctggcacaggtggcgtatggagtgctgaagtcaggcgtgccgttcgatgcgt

SEQ ID NO: 51101 - DNA, 75 bp, synthetic construct
  source 1..75: mol_type = other DNA
ttcttccgttcactctcttacaccatgggcgtgacgctacacctgaaaaccaaaggtaaaaacgatcatcaccgt

SEQ ID NO: 51102 - DNA, 75 bp, synthetic construct
  source 1..75: mol_type = other DNA
accggtggggatttcatcttatcaccgggcaccaggtagatcgacttgccgacctggaaagaatgctgcacctgt

SEQ ID NO: 51103 - DNA, 75 bp, synthetic construct
  source 1..75: mol_type = other DNA
gtgagtgcgaagcggtaactgcgggtgaagtgcagtacgcggtagaaaatttaaacgttaatagcctgctggatt

SEQ ID NO: 51104 - DNA, 75 bp, synthetic construct
  source 1..75: mol_type = other DNA
tgagtttaactacggtctggattacctgaaaaatgcgctggcgggagcgaaattcccttatgtaaatgccaacgt

SEQ ID NO: 51105 - DNA, 75 bp, synthetic construct
  source 1..75: mol_type = other DNA
gctatgtgaatgctcttcaggcctccaacattctggacaccattaaaaaggagaaatttaacctcacagccacca

SEQ ID NO: 51106 - DNA, 75 bp, synthetic construct
  source 1..75: mol_type = other DNA
atgaacgtactaaaaaaacttatgcagcgtctgtgcggttgcggaaagcatgatgaccgtgaacacggggagtta

SEQ ID NO: 51107 - DNA, 75 bp, synthetic construct
  source 1..75: mol_type = other DNA
tggtcattttgtcgcctacaaagcatttcgtgacgaccccgaggcaaatccacttaaaacgccttccggtaagat

SEQ ID NO: 51108 - DNA, 75 bp, synthetic construct
  source 1..75: mol_type = other DNA
tgaccggaaactgccttgacgactggacggagaatctgaaacggaaatcagaaaaagagctggaggaatggatca

SEQ ID NO: 51109 - DNA, 75 bp, synthetic construct
  source 1..75: mol_type = other DNA
aggggagccagtcgcctctccccggttattacctcgatcacctggcctggaaagcggtacatgaacaaagtccgg

SEQ ID NO: 51110 - DNA, 75 bp, synthetic construct
  source 1..75: mol_type = other DNA
ggtgaaaatgatccaatggtaacaacagattacaatgatacggtttatgttggttattaccagagtggtaaagaa

SEQ ID NO: 51111 - DNA, 75 bp, synthetic construct
  source 1..75: mol_type = other DNA
tcgtttactcctgacaacataaatgcggacattagtcttggaactctgagcggaaaaacaaaagagcgtgtttat

SEQ ID NO: 51112 - DNA, 75 bp, synthetic construct
  source 1..75: mol_type = other DNA
ttagcggtgtcatggcgctatatctgtcaactacgagtatatctgctgcggctgaccttgatgaaaatatgcaag

SEQ ID NO: 51113 - DNA, 75 bp, synthetic construct
  source 1..75: mol_type = other DNA
agtatattcggttatccagtccgttaacgtttgaaaactctgcactgaccgtacctatgcgactcattccagagg

SEQ ID NO: 51114 - DNA, 75 bp, synthetic construct
  source 1..75: mol_type = other DNA
aacgctgcatctttacgctggctggtttgttgattggccagcagtagatggtggcgatgaggacgacgacgatga

SEQ ID NO: 51115 - DNA, 75 bp, synthetic construct
  source 1..75: mol_type = other DNA
gcgattgcttgtagctcgtgccatgatttaatcgacgggcgggtaaaaaacagcgattacaccaaagaagaatta

SEQ ID NO: 51116 - DNA, 75 bp, synthetic construct
  source 1..75: mol_type = other DNA
tcgggatgttgccctgcaacctgtatcacctgaacggcagcctgaagcagagagccactggcgaacgtctgcata

SEQ ID NO: 51117 - DNA, 75 bp, synthetic construct
  source 1..75: mol_type = other DNA
tttgttgattggccagcagtagagggtggcgatgaggacgacgacgatgacgacgatgattttggggatcatgta

SEQ ID NO: 51118 - DNA, 75 bp, synthetic construct
  source 1..75: mol_type = other DNA
gacaaaaccacacgatatgcaggcggcgattgcctgtaactcatgccacgatttaatcgacgggagagtaaaaac

SEQ ID NO: 51119 - DNA, 75 bp, synthetic construct
  source 1..75: mol_type = other DNA
tgactctgactcttgtcactggttacgatgttaagcgtcgaatggttgttattcaggaatggaaacgactgaaag

SEQ ID NO: 51120 - DNA, 75 bp, synthetic construct
  source 1..75: mol_type = other DNA
accgggaaagaatgagtaactttcgtcgctggctccatgatgcccgtcagggcatggaaggcgacactccagagg

SEQ ID NO: 51121 - DNA, 75 bp, synthetic construct
  source 1..75: mol_type = other DNA
aggtgttgatgataaagatctggttaaatacgccgatgttggcgcgacttactatttcaataaaaacatgtccac

SEQ ID NO: 51122 - DNA, 75 bp, synthetic construct
  source 1..75: mol_type = other DNA
atgccatttaaaaaactctcccgacgcaccttcctgacggcaagctcggcccttgccttcctccatacccctttc

SEQ ID NO: 51123 - DNA, 75 bp, synthetic construct
  source 1..75: mol_type = other DNA
tactggatttactgtatgaacaaaacagagttgtaccggttattgagggaaaaacgttgtgtgtcgcacctaact

SEQ ID NO: 51124 - DNA, 75 bp, synthetic construct
  source 1..75: mol_type = other DNA
tggcgtgtggcggcgcattttctggtgtcgtttatcgttggcgtgctgggggcggatgtcatggcgtcttatctg

SEQ ID NO: 51125 - DNA, 75 bp, synthetic construct
  source 1..75: mol_type = other DNA
aagcgacgctccctgtttatgatcgtaataacctggccccaagaattgttcatttaggctttggtgcatttcacc

SEQ ID NO: 51126 - DNA, 75 bp, synthetic construct
  source 1..75: mol_type = other DNA
gcaagctgacggttgaagatctgaccggtggtaacttcaccatcaccaacggtggtgtgttcggttccctgatgt

SEQ ID NO: 51127 - DNA, 75 bp, synthetic construct
  source 1..75: mol_type = other DNA
ccggcagttcggcgcgtatgagcaacaacaaagatcactcggtgattgacgctgccgtggtgggtatcgtcgact

SEQ ID NO: 51128 - DNA, 75 bp, synthetic construct
  source 1..75: mol_type = other DNA
gtacagctgcggcactcggcggggcgacgatatttggactgtttaccggaacgaatttcgggattgtgtttggcg

SEQ ID NO: 51129 - DNA, 75 bp, synthetic construct
  source 1..75: mol_type = other DNA
agcgtctgtgcgggtacggaaagcatgatgaccgtgaacacggggagttacttacagcacaactgcgtctgggac

SEQ ID NO: 51130 - DNA, 75 bp, synthetic construct
  source 1..75: mol_type = other DNA
aaatattttctgatcgcgttgttatttctaactttaatcttaaagtacaaagaaatgagtttattgttataactg

SEQ ID NO: 51131 - DNA, 75 bp, synthetic construct
  source 1..75: mol_type = other DNA
gctggtggcggtggtgtcggtgaagattctgtcgttcatccaccagcaggatatcgcatcactggtgtccggcct

SEQ ID NO: 51132 - DNA, 75 bp, synthetic construct
  source 1..75: mol_type = other DNA
tcagagcactgaaagaaatttcaaagacagaaaacgaagtagcgaaaaaagccatagcaaataatcatatggacg

SEQ ID NO: 51133 - DNA, 75 bp, synthetic construct
  source 1..75: mol_type = other DNA
cctgctggctaagctggaaggacatgcgacgggcgataacgataataaacctgacgataatccgaccggtgacgg

SEQ ID NO: 51134 - DNA, 75 bp, synthetic construct
  source 1..75: mol_type = other DNA
tgccaaagggcgaaacacccgtaccaccatgggcgatgcacaacgccaaaatatgggcatgaccagcatcgcttc

SEQ ID NO: 51135 - DNA, 75 bp, synthetic construct
  source 1..75: mol_type = other DNA
agagcaagacaagctgtccagggcagcccagaaagataatcaacatatggcagcgctttacgcactgaccatcgc

SEQ ID NO: 51136 - DNA, 75 bp, synthetic construct
  source 1..75: mol_type = other DNA
tgctggtatttatcgtagcctgtatcgcaggtatgggatcaatcctcgatgaatttcagtttcaccgtccgctaa

SEQ ID NO: 51137 - DNA, 75 bp, synthetic construct
  source 1..75: mol_type = other DNA
gacaattggcttcattgaccgttactaaagaagaaaaagaaatcttatttgctgtaaaatctaaagctgggggag

SEQ ID NO: 51138 - DNA, 75 bp, synthetic construct
  source 1..75: mol_type = other DNA
aagtgggcagtgatacaggcagaacaggagaatgacatgaatatactaaaaaaacttatgcagcgtctgtgcggg

SEQ ID NO: 51139 - DNA, 75 bp, synthetic construct
  source 1..75: mol_type = other DNA
ttctgatcatgcgtcagctgggtgaaatggtggtcgaagaacctgtcgcaggctcctttagccactttgcttata

SEQ ID NO: 51140 - DNA, 75 bp, synthetic construct
  source 1..75: mol_type = other DNA
aaattaccactgaacagcaggaagccattaaacaactcgtcatgagtcgcggtcagtctctgccaaaagaaaaac

SEQ ID NO: 51141 - DNA, 75 bp, synthetic construct
  source 1..75: mol_type = other DNA
gcaatattttgctgaccgatgaagccatcggtgtgcggattgtcgaagcgttagagcaacgatacattctgccgg

SEQ ID NO: 51142 - DNA, 75 bp, synthetic construct
  source 1..75: mol_type = other DNA
acacccgtggagtttaaatatcttctgcttttagctggggaacatcctgaatacgtccttagtaaaagagatcga

SEQ ID NO: 51143 - DNA, 75 bp, synthetic construct
  source 1..75: mol_type = other DNA
atgaaaaattcctcaataacctcttgtgtgcagcttgtcggagaaatcccggtcaatacctttgcagttgttcta

SEQ ID NO: 51144 - DNA, 75 bp, synthetic construct
  source 1..75: mol_type = other DNA
ggggtaaacagtttgcaggtgtggttctctatagccttaagtcaggatctcaccacaaaatcacgccttatatta

SEQ ID NO: 51145 - DNA, 75 bp, synthetic construct
  source 1..75: mol_type = other DNA
cgaccgcgtgggtcgccgaccggtgatcctcgtcggaatgtccatttttatgctggcaacgctggtcgcggtcac

SEQ ID NO: 51146 - DNA, 75 bp, synthetic construct
  source 1..75: mol_type = other DNA
tttctctgctgttctggtgtttatatatcacatcgtttttcggcgcatttgttatcacccggtggttatgccgga

SEQ ID NO: 51147 - DNA, 75 bp, synthetic construct
  source 1..75: mol_type = other DNA
catttcagcgaaacggtaattactatctacaaatccggctttcggatggtcggatatacaaaaaatcacttttta

SEQ ID NO: 51148 - DNA, 75 bp, synthetic construct
  source 1..75: mol_type = other DNA
ggttctttggccttgcgccgctggcgatattcaacttctcgttttaatgctgcagtaacaaattgccccgtactt

SEQ ID NO: 51149 - DNA, 75 bp, synthetic construct
  source 1..75: mol_type = other DNA
cttgttggttccgccctgaatacacagtcacagaccctgaccaacagtggtctgttgcagggggaggcctcactc

SEQ ID NO: 51150 - DNA, 75 bp, synthetic construct
  source 1..75: mol_type = other DNA
tgttcctgcaaatgaaacaacacaacagcgcggcgggcgttgtcgggcgcgttaaaaaagtcctccgtcgccgct

SEQ ID NO: 51151 - DNA, 75 bp, synthetic construct
  source 1..75: mol_type = other DNA
atgagcgagccggatttactgtcagaggtacaccccgtagcagacctgtgctcccatttccgcgatccggaacca

SEQ ID NO: 51152 - DNA, 75 bp, synthetic construct
  source 1..75: mol_type = other DNA
tacatattctgacaccctgtcatcccatgacaacaaataccaataaagaacaatcatttaaaaacaacaaccatc

SEQ ID NO: 51153 - DNA, 75 bp, synthetic construct
  source 1..75: mol_type = other DNA
acgggacatgacgacgttcctgtcactcagccaggaggtgctgttatccctgctcagcttctgtaccgcgtgcag

SEQ ID NO: 51154 - DNA, 75 bp, synthetic construct
  source 1..75: mol_type = other DNA
ccattcaactggatacccctatcaagcgcggtaaaacagaaattaccgaaattgtgttgcgtaaacctcagtctg

SEQ ID NO: 51155 - DNA, 75 bp, synthetic construct
  source 1..75: mol_type = other DNA
cgaaccgcacaacatggcaatattgttctagcattaccaaaaggaacaactacaccagtaattcgtaaattggaa

SEQ ID NO: 51156 - DNA, 75 bp, synthetic construct
  source 1..75: mol_type = other DNA
gaacagtaggcaatggtctggtaaagcagctattggtcgcctgaagggggacgagctggcgcaatataatttgtg

SEQ ID NO: 51157 - DNA, 75 bp, synthetic construct
  source 1..75: mol_type = other DNA
acaggtgcaggagaaagcgtcagtggaggaaatcagtctgccactgctgacgaaaatgtcctcagagcgcacgct

SEQ ID NO: 51158 - DNA, 75 bp, synthetic construct
  source 1..75: mol_type = other DNA
atgtcagttacagagtctaaggcaaaaacggagcgtaaatccagtcgtaaacctgcaaaaacgcaggaaactgca

SEQ ID NO: 51159 - DNA, 75 bp, synthetic construct
  source 1..75: mol_type = other DNA
gtgatccacgaccgttttaactgtttttttcatccgcttgtggggctgccgccggtgtatgccgcaggactggcc

SEQ ID NO: 51160 - DNA, 75 bp, synthetic construct
  source 1..75: mol_type = other DNA
aaaacagtggcactgatggtctggcgattgtgctgttgtgtttttgactactgcaatacaactctccacccgttc

SEQ ID NO: 51161 - DNA, 75 bp, synthetic construct
  source 1..75: mol_type = other DNA
atttaatattactgtgtcgcccggttcaggatacggttcatctgctgatgcgtattacattgcaatgggatatta

SEQ ID NO: 51162 - DNA, 75 bp, synthetic construct
  source 1..75: mol_type = other DNA
aatcatttttgtgactttattgagtttaaacaccctaatatgatcatgaacacaagtcagtatacatgcagttca

SEQ ID NO: 51163 - DNA, 75 bp, synthetic construct
  source 1..75: mol_type = other DNA
gcagatggtgaaggaggctgtaagccatattcctgttccgcgcgacggtcgtgactatgatcccgatgttctgca

SEQ ID NO: 51164 - DNA, 75 bp, synthetic construct
  source 1..75: mol_type = other DNA
ctgctatccttctggcagtcataacttttatccctgtttccggtaatacatcatgggttgtcagggtatgggatt

SEQ ID NO: 51165 - DNA, 75 bp, synthetic construct
  source 1..75: mol_type = other DNA
cggcaatacttacacggcgacggtgggcagtaatctcacctggagcgtgagcgttccgtcggcagatttacaggc

SEQ ID NO: 51166 - DNA, 75 bp, synthetic construct
  source 1..75: mol_type = other DNA
gcggcaaacggatcgaatcccatcagcatcgtcgtaccttgccatcgggttattggccgaaacggcaccatgacc

SEQ ID NO: 51167 - DNA, 75 bp, synthetic construct
  source 1..75: mol_type = other DNA
gccgcatagccgataaacatggtcgcaaaaaatcgatgctgttatcggtgtgtatgatgtgtttcggctcactgg

SEQ ID NO: 51168 - DNA, 75 bp, synthetic construct
  source 1..75: mol_type = other DNA
aactgcgcactgacttgttcagcgacgacgagggtggctatgtggactgtgttgcgctcgatgccgccctgctgg

SEQ ID NO: 51169 - DNA, 75 bp, synthetic construct
  source 1..75: mol_type = other DNA
gacatcgggaagctgacggggcgtacggaggcggcagtaagaacaaaagcgcgggaactgggtatcagtctgatg

SEQ ID NO: 51170 - DNA, 75 bp, synthetic construct
  source 1..75: mol_type = other DNA
aggcagcagaacgcgcccaccaaatcgaagttatttgcgcactggcagaggattacccaagcatgatgaccgaca

SEQ ID NO: 51171 - DNA, 75 bp, synthetic construct
  source 1..75: mol_type = other DNA
tttgttgttggcgtacacaggagccagaagaggtgagattgctaaactggagaagtcgcagatcaaatttgatga

SEQ ID NO: 51172 - DNA, 75 bp, synthetic construct
  source 1..75: mol_type = other DNA
gaagcgagaaagacgttcaactctatgcgcaagttgtcgattaccagtccggcaatgtggtcacactcaacgaca

SEQ ID NO: 51173 - DNA, 75 bp, synthetic construct
  source 1..75: mol_type = other DNA
aaactggagcaaaaggcgtagccttaaaacatgctgattatatttctagatccggcgaatataagaactacaaat

SEQ ID NO: 51174 - DNA, 75 bp, synthetic construct
  source 1..75: mol_type = other DNA
aagagagatcatacatggtttgacttcttcagaaatttagccttattgaaggcaggagaaatctttagatgcaca

SEQ ID NO: 51175 - DNA, 75 bp, synthetic construct
  source 1..75: mol_type = other DNA
ttccaatagttaatactaagcagcatccctatttagataatgtcatgaatacggcaaggatagagagtgagcgta

SEQ ID NO: 51176 - DNA, 75 bp, synthetic construct
  source 1..75: mol_type = other DNA
ccgtaccgtggaagaaacccgggtaaaagaatccgacccgggaaaaattctgtccggtgccggcatgacgattgt

SEQ ID NO: 51177 - DNA, 75 bp, synthetic construct
  source 1..75: mol_type = other DNA
tctggtgcgaccatgctcggcgcattctttattttgactgacccggttaccgcttctacgaccaatcgtggtcgt

SEQ ID NO: 51178 - DNA, 75 bp, synthetic construct
  source 1..75: mol_type = other DNA
atgaagcaacctgattttgctaagtggtatttctatcaattacttaaagattatgagggcgaacagctgtatctt

SEQ ID NO: 51179 - DNA, 75 bp, synthetic construct
  source 1..75: mol_type = other DNA
gagcagaaccgcatcatcaaaattttctcggtggtatccgtcgtgttcctgccgccaacgctggttgcttccagc

SEQ ID NO: 51180 - DNA, 75 bp, synthetic construct
  source 1..75: mol_type = other DNA
atgcgacttgcgctccgtctggggcgcaccttatccgaactgcgccacagcctgagtgcgagcgaggcgatgatg

SEQ ID NO: 51181 - DNA, 75 bp, synthetic construct
  source 1..75: mol_type = other DNA
gctttttgaggactctgcagcggcagcactttttgatgcctcagaggcttttgctgatgccgttcctgcgctgga

SEQ ID NO: 51182 - DNA, 75 bp, synthetic construct
  source 1..75: mol_type = other DNA
ggatgatatctgggaagacggactggaagctgaaaagctacgggaagcattgcagtcattagaacatgctttcca

SEQ ID NO: 51183 - DNA, 75 bp, synthetic construct
  source 1..75: mol_type = other DNA
agttgaatttgttcaggataaccattcgaagtctagtaaaggtgttttacgcgggctgcattatcagttggaacc

SEQ ID NO: 51184 - DNA, 75 bp, synthetic construct
  source 1..75: mol_type = other DNA
gtgagtctgaacagccggagtgatatcaccatcagtggttttaccggcacggcaggcagtctgacaatgaatgtg

SEQ ID NO: 51185 - DNA, 75 bp, synthetic construct
  source 1..75: mol_type = other DNA
agggtggatctgcacacatcactttcaaaaggctggagctgattgacagaattaacgatataatagccaggcact

SEQ ID NO: 51186 - DNA, 75 bp, synthetic construct
  source 1..75: mol_type = other DNA
ccgatccgcttgagggggagcttagaacggtgtgggaatttgacatgcaggtaaaaggccccttggccggccggt

SEQ ID NO: 51187 - DNA, 75 bp, synthetic construct
  source 1..75: mol_type = other DNA
tcttggcgtcgtggaggtgattattgctctgctggttttggctaatcctgtcaatcgctggttaggtttattggg

SEQ ID NO: 51188 - DNA, 75 bp, synthetic construct
  source 1..75: mol_type = other DNA
cgccagcatcggacgccgagatccagttgattcgttcgcgtctggtgcttggtaaaacggtggacgatctcgacc

SEQ ID NO: 51189 - DNA, 75 bp, synthetic construct
  source 1..75: mol_type = other DNA
tcatgcaccgaaagatgacatcatcgtcatgctgctgtgcatgtcgctgaccgtgctgttcgatatggttattgc

SEQ ID NO: 51190 - DNA, 75 bp, synthetic construct
  source 1..75: mol_type = other DNA
gacggccagtacatgacgtttccctttcatctcgaccagatgatcatcaatggtcggcgctttttcgagatggcc

SEQ ID NO: 51191 - DNA, 75 bp, synthetic construct
  source 1..75: mol_type = other DNA
ttaaaagtaacaaaaacgactttgtcgacgccgaagctatttgtgaagctgcatcgcgtccgtctatgcgttttg

SEQ ID NO: 51192 - DNA, 75 bp, synthetic construct
  source 1..75: mol_type = other DNA
ataaaaacatctcagaatggtgcatccctcaaaacgagggaggttcccctaaaatgagggacatccctcaaaacg

SEQ ID NO: 51193 - DNA, 75 bp, synthetic construct
  source 1..75: mol_type = other DNA
ccttcgtggtcgcggcggatgcagaagtggctgctgattgttgtgacgctgccgcattcgtttctgacgttttcg

SEQ ID NO: 51194 - DNA, 75 bp, synthetic construct
  source 1..75: mol_type = other DNA
cttgtctggtcgcctcatcttttgaagcagacgcagatgatgccgatgacgccgccgaactggcggacgatgcgg

SEQ ID NO: 51195 - DNA, 75 bp, synthetic construct
  source 1..75: mol_type = other DNA
cgggctgaggtggcagcttctgacgctttcgtggtcgcggtggatgcagaagtggcggctgattgttctgacgct

SEQ ID NO: 51196 - DNA, 75 bp, synthetic construct
  source 1..75: mol_type = other DNA
accctgcagagtttagttttgcagatagaagagaaatctttttttgggcattaacccgtcttctgaaagaagggc

SEQ ID NO: 51197 - DNA, 75 bp, synthetic construct
  source 1..75: mol_type = other DNA
aaggggcttcattgactgccggacgctgaaagaacagggcattgaacgacgtcccgaagtgcatctgggttttga

SEQ ID NO: 51198 - DNA, 75 bp, synthetic construct
  source 1..75: mol_type = other DNA
gcaatctcgatcgcgaaatctggcgtgacctgatgcaacgttccgggatgctgagtctgatggatgcgcatgccc

SEQ ID NO: 51199 - DNA, 75 bp, synthetic construct
  source 1..75: mol_type = other DNA
gaacatttaaccaaacgtgaaaaaccggccagccgtgatgagctggcggtagaactgcacattgaaggcgaagag

SEQ ID NO: 51200 - DNA, 75 bp, synthetic construct
  source 1..75: mol_type = other DNA
tgagctggaattacaaaactaattgcccctgtaaatttggcagtaaaattatcattaacaacctggtaaggtggg

SEQ ID NO: 51201 - DNA, 75 bp, synthetic construct
  source 1..75: mol_type = other DNA
cgctttcactgatttcctcgctgcttcacgaggacagcgacaacgatcgtgatgaaggaatgctaaaggcaacgg

SEQ ID NO: 51202 - DNA, 75 bp, synthetic construct
  source 1..75: mol_type = other DNA
gtactggaaagagaagatgacatatgcgtatcacaaagaacataaaacaaccataagctatcaaaaattcaagta

SEQ ID NO: 51203 - DNA, 75 bp, synthetic construct
  source 1..75: mol_type = other DNA
tcctctttgaatctttccttagcttcctggggttgggtacgcaagagccgttaagcagctggggtgcattgctga

SEQ ID NO: 51204 - DNA, 75 bp, synthetic construct
  source 1..75: mol_type = other DNA
gaacaaagatgaagtgtttgagcgaggggtgatcaacgtcttcaggggactgagctggaattacaaaactaattg

SEQ ID NO: 51205 - DNA, 75 bp, synthetic construct
  source 1..75: mol_type = other DNA
gactctgctgatacaggaactgaagcgatgctcccgttaccttccgggaccaaaatttggctggttgccggtatc

SEQ ID NO: 51206 - DNA, 75 bp, synthetic construct
  source 1..75: mol_type = other DNA
cgtttctgccggtgacagcgtgttactgtccgccggtaatgacctgaacatgaacgcgatacaggccggcgaacg

SEQ ID NO: 51207 - DNA, 75 bp, synthetic construct
  source 1..75: mol_type = other DNA
ggagagcaggttaaagaaacgatacgaaaaaatgtatctcctcttgaacgttaccgtaagaacaaagaacgatag

SEQ ID NO: 51208 - DNA, 75 bp, synthetic construct
  source 1..75: mol_type = other DNA
cgactaattattatatgccaagtgccgaaggttgtatcagatgggatgatccggcattgaacattgactggccga

SEQ ID NO: 51209 - DNA, 75 bp, synthetic construct
  source 1..75: mol_type = other DNA
aaacatcagggttaatcctttcgccaaaagatgaaaggctctttacgttagatgagcttatcagattaaaattaa

SEQ ID NO: 51210 - DNA, 75 bp, synthetic construct
  source 1..75: mol_type = other DNA
ccggcctgtgcgccgtgcaacctgctgaaaacaacatattcgctggagatgttcagaatgcaggtgtccctgcag

SEQ ID NO: 51211 - DNA, 75 bp, synthetic construct
  source 1..75: mol_type = other DNA
aaccgctgaccgactggaaatgtaaagtcactatcttctggtggacgaacgccctgctggcagtgattagcctcg

SEQ ID NO: 51212 - DNA, 75 bp, synthetic construct
  source 1..75: mol_type = other DNA
tatttctctaccgagaagcgtaaatttattatcgccgacaccccagggcacgagcagtacacccgcaatatggcg

SEQ ID NO: 51213 - DNA, 75 bp, synthetic construct
  source 1..75: mol_type = other DNA
ttttcgataacgtaatgttatatatgatgttcttttataccgatatttttggcattcctgccggatttgtcggaa

SEQ ID NO: 51214 - DNA, 75 bp, synthetic construct
  source 1..75: mol_type = other DNA
tgcccggggggatccggatgtgctgccagccttctcagttaaccgatgttttccgggctcttcgccatgctgaca

SEQ ID NO: 51215 - DNA, 75 bp, synthetic construct
  source 1..75: mol_type = other DNA
tacaaaaaaagtaaccttccggataatccatcatcccataacgaacgaataaaagtaatcatttcatattttgac

SEQ ID NO: 51216 - DNA, 75 bp, synthetic construct
  source 1..75: mol_type = other DNA
gcgttataagctataatccagttattacatggactgtaccagttgtatttttctttttagtattgctggctggta

SEQ ID NO: 51217 - DNA, 75 bp, synthetic construct
  source 1..75: mol_type = other DNA
gaaaaaatgcaatcatatgaattatatagcggatgtcaatgctcaattagctatgagtaaaaaaataacaggatt

SEQ ID NO: 51218 - DNA, 75 bp, synthetic construct
  source 1..75: mol_type = other DNA
caaactgggtattttccggcggagaacaacacgatcctctggccagactgcatctgcgggcattcgctcagcaac

SEQ ID NO: 51219 - DNA, 75 bp, synthetic construct
  source 1..75: mol_type = other DNA
atcctggcaatgttgctcccagtaacaacggttttcatttttatgttactgggcggtaagatcgatatgtgctga

SEQ ID NO: 51220 - DNA, 75 bp, synthetic construct
  source 1..75: mol_type = other DNA
gcaccagcagctggcgtgaaagaagttaacgttccggatatcggcggtgacgaagttgaagtgaccgaagtgatg

SEQ ID NO: 51221 - DNA, 75 bp, synthetic construct
  source 1..75: mol_type = other DNA
gcgaggaattttgccgccggtgtcagtctgccgtatggctataccctggtggattacacgtattcatggagtgac

SEQ ID NO: 51222 - DNA, 75 bp, synthetic construct
  source 1..75: mol_type = other DNA
cctgcagactcaccggctgggactgtcgcatgtcctgttccgtaacggggacatgaagacagcactgaccggagg

SEQ ID NO: 51223 - DNA, 75 bp, synthetic construct
  source 1..75: mol_type = other DNA
atggagcaatgcatctttgatttaggcattatgaactataatcctgtcattacatggactgtacctgttgcattt

SEQ ID NO: 51224 - DNA, 75 bp, synthetic construct
  source 1..75: mol_type = other DNA
aaaaaccagttcgcaataatgattttattgccagagttaaggatgaactggatggtgagtactacgaaattttcg

SEQ ID NO: 51225 - DNA, 75 bp, synthetic construct
  source 1..75: mol_type = other DNA
tgagcctcgggtatgccttaacctatttaatcggtctggtgagtttgattgttggtgcgcgttacttgccgaaat

SEQ ID NO: 51226 - DNA, 75 bp, synthetic construct
  source 1..75: mol_type = other DNA
tcaggtacaagcggcccatcatttgccacactgaaaaaattcgcccgtgctacagggaaaaaactccagatccgc

SEQ ID NO: 51227 - DNA, 75 bp, synthetic construct
  source 1..75: mol_type = other DNA
accacctggagttataacagtagcgacagttcatcaggtagcaaaaataaatggcagcatatcaatacctggctt

SEQ ID NO: 51228 - DNA, 75 bp, synthetic construct
  source 1..75: mol_type = other DNA
attagtcatgtaatgcacgctcaatcattgagaagctacttaggtcatgtttgctctaagattgtcatcattgac

SEQ ID NO: 51229 - DNA, 75 bp, synthetic construct
  source 1..75: mol_type = other DNA
tacccgaacagataaggctgtgatcaacaggctactgatagccgagatcagggattatttgattgaacaaggacg

SEQ ID NO: 51230 - DNA, 75 bp, synthetic construct
  source 1..75: mol_type = other DNA
tggtaaaaaggccattaatatacatataagaagcaatgcgaaagaaatgcttgatgaactcagaactgtttacgg

SEQ ID NO: 51231 - DNA, 75 bp, synthetic construct
  source 1..75: mol_type = other DNA
ctgttacgtggctgaaatcaccggcagcggcgaggatgtggcaaacggcctgtccagcgttccgggcgttaaaaa

SEQ ID NO: 51232 - DNA, 75 bp, synthetic construct
  source 1..75: mol_type = other DNA
ccagagtgtggcagaagtgccggataccccggagagccggaaaattgacctgagcgggcgctggggctttgacgg

SEQ ID NO: 51233 - DNA, 75 bp, synthetic construct
  source 1..75: mol_type = other DNA
gcgcagacctgaacagcaatgcctgcgctacgttgaaagaggcaggtgcttgcggggtttctgataacgccgcga

SEQ ID NO: 51234 - DNA, 75 bp, synthetic construct
  source 1..75: mol_type = other DNA
attgcccgtaagggtggactgtcaaccgatgcggtacaggcgctgcgtcgtgaaattctggggattgcctcatga

SEQ ID NO: 51235 - DNA, 75 bp, synthetic construct
  source 1..75: mol_type = other DNA
gctttttgaggactctgcagcggcagcacttttcgatgcttcactggcctttgttgatgccgctcctgcgctgga

SEQ ID NO: 51236 - DNA, 75 bp, synthetic construct
  source 1..75: mol_type = other DNA
agcctggtcagtcaggggtatctcattggtggtgattgctggctggacgagtcggtgaatgacaaagacactctg

SEQ ID NO: 51237 - DNA, 75 bp, synthetic construct
  source 1..75: mol_type = other DNA
ccgttgccagtttgaaccacccagccccgccagagaaagagatcgttactgaatttaaagtgccaatatctttcg

SEQ ID NO: 51238 - DNA, 75 bp, synthetic construct
  source 1..75: mol_type = other DNA
aaaaatacagaggagattcaacgcgccgtgattctgaaaatggaaatgatgccatttttagactcggtgggactg

SEQ ID NO: 51239 - DNA, 75 bp, synthetic construct
  source 1..75: mol_type = other DNA
ccgtcaggcgctaatcgacgctaacctgcgtcttggcctggcactggcggaagatgaaattgactatctgcagga

SEQ ID NO: 51240 - DNA, 75 bp, synthetic construct
  source 1..75: mol_type = other DNA
aatgctgcaatggtgggctgattacattgatgctaacaagaatggatctatcacaccatatgattttgcgcgtgt

SEQ ID NO: 51241 - DNA, 75 bp, synthetic construct
  source 1..75: mol_type = other DNA
attatcaacaatctggtgagatgggaccggtggagatttcatcttatcaccggacaacagactgaccgactcgcc

SEQ ID NO: 51242 - DNA, 75 bp, synthetic construct
  source 1..75: mol_type = other DNA
gtggtcaacgggcatacggaagttatctgctcaaccagtatccaccacattctggctgtacgaaaaagtacactg

SEQ ID NO: 51243 - DNA, 75 bp, synthetic construct
  source 1..75: mol_type = other DNA
aggcgaacaaggtaagcgagacagcattattgtcgtcgctcagttgtcgccggaattcaccgctcgtcttgttga

SEQ ID NO: 51244 - DNA, 75 bp, synthetic construct
  source 1..75: mol_type = other DNA
ggtcaagagcttattatttattttgtggaaaactcaaagaaaaacaaaaaaataccatacatgataaaaaacaaa

SEQ ID NO: 51245 - DNA, 75 bp, synthetic construct
  source 1..75: mol_type = other DNA
ctgacaaaattaacgacagaaatcgccagctattgcgctgatgaatttaagaaactgaacgacaaaaggagctgg

SEQ ID NO: 51246 - DNA, 75 bp, synthetic construct
  source 1..75: mol_type = other DNA
caagcaaatttcctcagtggatgaactgacaaaattaacgacagaactcgccagctattgcgctgatgaatttaa

SEQ ID NO: 51247 - DNA, 75 bp, synthetic construct
  source 1..75: mol_type = other DNA
tatctaatggaagattataacttatggcttaggatacttgcagccgattatcgcactcataatttgagtgaggtt

SEQ ID NO: 51248 - DNA, 75 bp, synthetic construct
  source 1..75: mol_type = other DNA
atgactacacgccagtgccgccacttgaaaatctgatgctgcgtcagcgcatcaccgatcagtacctggtgaatt

SEQ ID NO: 51249 - DNA, 75 bp, synthetic construct
  source 1..75: mol_type = other DNA
tttctgccgattttccggcggcggtggcactggctgaggcctgcccggcacttgttgacgctgcactggcagacg

SEQ ID NO: 51250 - DNA, 75 bp, synthetic construct
  source 1..75: mol_type = other DNA
tatcggtctgatcaatctcggccatatgctggaagcgcgcgcgcgtcagcgttcttctaaggcgctggagaaatt

SEQ ID NO: 51251 - DNA, 75 bp, synthetic construct
  source 1..75: mol_type = other DNA
gctggattacctggacgcactggaactggtggatacctccagtgctccagatattgaatggcctacacctccggc

SEQ ID NO: 51252 - DNA, 75 bp, synthetic construct
  source 1..75: mol_type = other DNA
tggtttatgttgcccgcgcggcacgtgacgcggggcatggtaagcgtggtgcgatatatgatgccgcctgcgccg

SEQ ID NO: 51253 - DNA, 75 bp, synthetic construct
  source 1..75: mol_type = other DNA
gttcacagtcaggagttccgtactgaaaaagcctgtcgggatgccttcaccgcgctgaaaaaagaaaacgtggga

SEQ ID NO: 51254 - DNA, 75 bp, synthetic construct
  source 1..75: mol_type = other DNA
agcgtggtcaggcctctgacgtacgcggaccgcgcactgaacagcgtcccatgactcatgtggaggccgcgaaag

SEQ ID NO: 51255 - DNA, 75 bp, synthetic construct
  source 1..75: mol_type = other DNA
tgaagtaagaaaagcttataaccgctctacatatttagaacaacgtaaagagcttatgtcatggtggggaagtcg

SEQ ID NO: 51256 - DNA, 75 bp, synthetic construct
  source 1..75: mol_type = other DNA
ggtttatgcaccagacggaatgaatattaatcagtttatggttcgggccggggctgcctgggtatatgagcagta

SEQ ID NO: 51257 - DNA, 75 bp, synthetic construct
  source 1..75: mol_type = other DNA
ggcgataccatcgaagttttacaggacaaaaagcctgtacgggttcgcctggcaaacatcgatgcgccggaaaag

SEQ ID NO: 51258 - DNA, 75 bp, synthetic construct
  source 1..75: mol_type = other DNA
ggctctgcaacgggaagcgcagaaacaaaaacgcggtttgtgggctgatacaaatccggttccaccgtgggaatg

SEQ ID NO: 51259 - DNA, 75 bp, synthetic construct
  source 1..75: mol_type = other DNA
cgccacatcggcggacacggctatggctctatctatcctggacctatcggcgcggtgatttctccgctgctcggc

SEQ ID NO: 51260 - DNA, 75 bp, synthetic construct
  source 1..75: mol_type = other DNA
taaacagccatccggcgttgtggaaggtaggtatggttgctggggccaaaacagcccgtctgttcatcaggaaag

SEQ ID NO: 51261 - DNA, 75 bp, synthetic construct
  source 1..75: mol_type = other DNA
cgtgacaaaaacattctggctgggcggcaaatccttgacgacgagctggaacatctggggatcagcctgaaagaa

SEQ ID NO: 51262 - DNA, 75 bp, synthetic construct
  source 1..75: mol_type = other DNA
ggcttggtgctttccccgccctttcacttgctgatgctcgacggttaagagcggattaccttgctttgttagcca

SEQ ID NO: 51263 - DNA, 75 bp, synthetic construct
  source 1..75: mol_type = other DNA
aatcatcctctccaacggcgcagagctgcattttctcggcacttctgctgcgtcggcacagtcctatacgggcaa

SEQ ID NO: 51264 - DNA, 75 bp, synthetic construct
  source 1..75: mol_type = other DNA
agatcgatctcaatgccaaactctggacaattccagccgaacgaatgaaagctaaacgtgaacatatagtacctc

SEQ ID NO: 51265 - DNA, 75 bp, synthetic construct
  source 1..75: mol_type = other DNA
gcagaatgctgctcaccgggatgtctgagccgtacgcggccgcagaagatgccgcgattcaggaaggcgaccggc

SEQ ID NO: 51266 - DNA, 75 bp, synthetic construct
  source 1..75: mol_type = other DNA
ccgcaaagcgatgatgcagtggtggtcggattatctggaagcatgccgagaatcttatgcaccgccttatacaat

SEQ ID NO: 51267 - DNA, 75 bp, synthetic construct
  source 1..75: mol_type = other DNA
gattacgccattgcgacggggcgcgccactattaacccagcatcgactctcagcagtgttgttcttcatccagaa

SEQ ID NO: 51268 - DNA, 75 bp, synthetic construct
  source 1..75: mol_type = other DNA
agaaatgttcaatcatcatcatggctattatgttaacaagcatagggctgtggctgcggtatcagtggatgttta

SEQ ID NO: 51269 - DNA, 75 bp, synthetic construct
  source 1..75: mol_type = other DNA
aagagaaagtattgcatgcacattttgtactcttgcagaagagttgttcacacatatggcttgtcgttggactgc

SEQ ID NO: 51270 - DNA, 75 bp, synthetic construct
  source 1..75: mol_type = other DNA
caggaacaaaaacgaggtttatgggctgacagtaatccggttccaccgtgggaatggcgacataaacagaactga

SEQ ID NO: 51271 - DNA, 75 bp, synthetic construct
  source 1..75: mol_type = other DNA
cgctgtatgagaaaaaatgacattttacagcgtggtccgaaccgtttccgtaaaaaagataaactcaactggtta

SEQ ID NO: 51272 - DNA, 75 bp, synthetic construct
  source 1..75: mol_type = other DNA
taccttttactgggtggcacttcccctgaccacggttaacggtgtctcgcagtttcagccggagtggatatgctg

SEQ ID NO: 51273 - DNA, 75 bp, synthetic construct
  source 1..75: mol_type = other DNA
accgtttcgtcgtcactagtgaccagtttcaatttattttgcaggaaaagaaaaccgcaaaatcaggaaagagcg

SEQ ID NO: 51274 - DNA, 75 bp, synthetic construct
  source 1..75: mol_type = other DNA
attaaccggtaaacgggtggtgtctgtccagaaagatggtcgcagaattgaatatacggcggcttctctggatga

SEQ ID NO: 51275 - DNA, 75 bp, synthetic construct
  source 1..75: mol_type = other DNA
ccgcaccccaagcccggacgcaaaagcgttcatcgaagtgggtcagaaagtcaacgtgggcgataccctgtgcat

SEQ ID NO: 51276 - DNA, 75 bp, synthetic construct
  source 1..75: mol_type = other DNA
atgaaaatgaacaattcagcatgagcatcagactaaaaaatcgtatccggaatagactccctgaaacaggattct

SEQ ID NO: 51277 - DNA, 75 bp, synthetic construct
  source 1..75: mol_type = other DNA
cggaaaagttgcgtcaaatacgtaaggcagaggggctaacacaaaagcagtttgctgatatcacaggactatctt

SEQ ID NO: 51278 - DNA, 75 bp, synthetic construct
  source 1..75: mol_type = other DNA
tgatgccaatcagttactggcgttactggctcccggtcatcataagggaacaccgtgggagcaggtctggtggtt

SEQ ID NO: 51279 - DNA, 75 bp, synthetic construct
  source 1..75: mol_type = other DNA
ttacagccagctcagacctcatcaatataatggtggtttgacgccgaatgaatcagaacgattgttctggaaaaa

SEQ ID NO: 51280 - DNA, 75 bp, synthetic construct
  source 1..75: mol_type = other DNA
tttttattttgatgaatttttctgggtcagtcgctttgctgaactgcgcaaggtggctggcgctatggcaaccct

SEQ ID NO: 51281 - DNA, 75 bp, synthetic construct
  source 1..75: mol_type = other DNA
actcctcactttttatcgcttatatgggctgtcttgggtgggggagtgcttacttttatggctggggaacttctt

SEQ ID NO: 51282 - DNA, 75 bp, synthetic construct
  source 1..75: mol_type = other DNA
tttgcaacgggaagcgcaggaacaaaagcgtggtttatgggctgatacaaatccggttccaccgtgggaatggcg

SEQ ID NO: 51283 - DNA, 75 bp, synthetic construct
  source 1..75: mol_type = other DNA
tctacaacgggaagcgcaggaacaaaaacgcggtttgtgggtcgatgcaaatccggttccaccgtgggagtggcg

SEQ ID NO: 51284 - DNA, 75 bp, synthetic construct
  source 1..75: mol_type = other DNA
gccataacggactatatcgttggatattacagcgcactaagaccgcacgaatataacggtgggttacccccaaac

SEQ ID NO: 51285 - DNA, 75 bp, synthetic construct
  source 1..75: mol_type = other DNA
agcgaacaggaaatcattcctctgatgccaaccgaagagatgagccgtctgcttaatatcagccagacaaagccg

SEQ ID NO: 51286 - DNA, 75 bp, synthetic construct
  source 1..75: mol_type = other DNA
ggatgagcttaaccgggcgatcaatgatgcggagtcggtactggggacaacccggcgtcgccgtcgtccgctggg

SEQ ID NO: 51287 - DNA, 75 bp, synthetic construct
  source 1..75: mol_type = other DNA
gccagaagcctgttttatgctgtcacagttatcgttatattcttggctggatgggggatcggtattgtcttcttt

SEQ ID NO: 51288 - DNA, 75 bp, synthetic construct
  source 1..75: mol_type = other DNA
gcctgggcaaccatgcttgctgttatcaatgagccaatcggcgcagagcgtgaggataatcgtggctttgcaatg

SEQ ID NO: 51289 - DNA, 75 bp, synthetic construct
  source 1..75: mol_type = other DNA
aagccgccgctggctggcatcgtgcggcctgaccgtggagcagatgcaaaaccagatggacccggtgtacacgcc

SEQ ID NO: 51290 - DNA, 75 bp, synthetic construct
  source 1..75: mol_type = other DNA
cgttcctgcctctgaacttgctgctgccatgaagcagattaaagaactccagcgcctgctcggcaaaaaaaacga

SEQ ID NO: 51291 - DNA, 75 bp, synthetic construct
  source 1..75: mol_type = other DNA
ttcttccctgtggtcatgtttgcaatcacgacaggccttcgccgttccaacgttacagaccttgagtggtcacag

SEQ ID NO: 51292 - DNA, 75 bp, synthetic construct
  source 1..75: mol_type = other DNA
ctggactgttgcgatcgtgaagccatagactgggccgcaagcacgggaggttacgataaagcgacagtgcaggat

SEQ ID NO: 51293 - DNA, 75 bp, synthetic construct
  source 1..75: mol_type = other DNA
gatatccatattaataatcatggtaatctttcaggattatataatagccaaaaagatgcttataatacatcaata

SEQ ID NO: 51294 - DNA, 75 bp, synthetic construct
  source 1..75: mol_type = other DNA
caaaaagcccggcaggaaatactggcccggaagaaaaagacctttgccgaatgttgtgaagaagtgctggaagtc

SEQ ID NO: 51295 - DNA, 75 bp, synthetic construct
  source 1..75: mol_type = other DNA
atgttttttacactcctctctttaataattattctgttatttgtcccttatctgctgggagtaaggaaaacggaa

SEQ ID NO: 51296 - DNA, 75 bp, synthetic construct
  source 1..75: mol_type = other DNA
atgctcgacagttatgccgagcaggcggataacatgccgttattgcatcgggcgctggtgctggcgtgggcacag

SEQ ID NO: 51297 - DNA, 75 bp, synthetic construct
  source 1..75: mol_type = other DNA
tcgtactttatctctgtttttaaggcgttttacggcctgacaccgttgaattatctcgccaaacagcgacaaaaa

SEQ ID NO: 51298 - DNA, 75 bp, synthetic construct
  source 1..75: mol_type = other DNA
cgggagatgctccagtggtatgccgactatatggattcgctcgagcatggcggaaatgtggtgcatggtgagttc

SEQ ID NO: 51299 - DNA, 75 bp, synthetic construct
  source 1..75: mol_type = other DNA
cctgcgtgaaggccgtgcgctgtacgacaacctgcacccgtcgcgtattgtcatcggtgagcgctctgcgcgtgc

SEQ ID NO: 51300 - DNA, 75 bp, synthetic construct
  source 1..75: mol_type = other DNA
ttgatctggcctacgagactcgtcatataaccaaccggactcgcgacacattgctccgcgaagcagcaaaacttg

SEQ ID NO: 51301 - DNA, 75 bp, synthetic construct
  source 1..75: mol_type = other DNA
tgagttctttaactcccgcgtcgtgcgcgatctggatgccttcaaacaagaagcggatgtgatcatctctaaccg

SEQ ID NO: 51302 - DNA, 75 bp, synthetic construct
  source 1..75: mol_type = other DNA
gaaaaaggtgaagtggtagagcggcaaacccagccgccgcgccattttaccgatgcaacactgctttcggcgatg

SEQ ID NO: 51303 - DNA, 75 bp, synthetic construct
  source 1..75: mol_type = other DNA
acaaaaccgaaagtttcagccagccgcgacgcacaaaagccagcggcggtggcggtgatgagctgctgaccgact

SEQ ID NO: 51304 - DNA, 75 bp, synthetic construct
  source 1..75: mol_type = other DNA
cggagtataaaccaaagctggcaagcaaaggaacgaagacgaggcatctggcaatacttcgcgccattctcaata

SEQ ID NO: 51305 - DNA, 75 bp, synthetic construct
  source 1..75: mol_type = other DNA
aagctgcgaaaggaaaagagaagagctacaagctgtttgatggaggtggcctataccttcaggtcgaacctaatg

SEQ ID NO: 51306 - DNA, 75 bp, synthetic construct
  source 1..75: mol_type = other DNA
caaaggaacgaagacgcggcatctggcaatacttcgcgctattctcaatatggctgttgaatggggatggcttga

SEQ ID NO: 51307 - DNA, 75 bp, synthetic construct
  source 1..75: mol_type = other DNA
tctgaactttttgaacaggcgctggcgggccatattggtgttcgtagcgggcgtattgcgcgtgaggcggcaact

SEQ ID NO: 51308 - DNA, 75 bp, synthetic construct
  source 1..75: mol_type = other DNA
gtaagcggaacattgctgatctgaagactcgggatctgcttgtccccatcaaagcggtggagtcgtctgggcgtc

SEQ ID NO: 51309 - DNA, 75 bp, synthetic construct
  source 1..75: mol_type = other DNA
ctcggcaagaaaacgatggaaaatgaactcctcaaagaagccgttgaatatggacgggcaaaaaagtggatagcg

SEQ ID NO: 51310 - DNA, 75 bp, synthetic construct
  source 1..75: mol_type = other DNA
atgaatgggaaccgtgacctgatcttcgtaggagatcacgatccgcgtaaacccatgagtgagaacacggtgaac

SEQ ID NO: 51311 - DNA, 75 bp, synthetic construct
  source 1..75: mol_type = other DNA
gctgcagtggtgggctgattatctggatgcgaatcgggagaagggggttagtccgtttgattttgggaaaaccaa

SEQ ID NO: 51312 - DNA, 75 bp, synthetic construct
  source 1..75: mol_type = other DNA
tgctggtgctctgtggtgcgctgtgtctggcaacaaaccattaccgcgataacgccatcacttacaaagcgcagc

SEQ ID NO: 51313 - DNA, 75 bp, synthetic construct
  source 1..75: mol_type = other DNA
tggtcgttaaccttgacgttaactcgacgaaatttaacgagcagcttaactacgtcaaaaaagaattaaagcaga

SEQ ID NO: 51314 - DNA, 75 bp, synthetic construct
  source 1..75: mol_type = other DNA
cagcgtatcaacgaaataatgatttatgcggttaacactggcttgattgatgccaaccccgcatcaggtattggt

SEQ ID NO: 51315 - DNA, 75 bp, synthetic construct
  source 1..75: mol_type = other DNA
gtaacctatttgcatggagggcaatatggatttggacataataataacatagcagtgtcatatataattaataac

SEQ ID NO: 51316 - DNA, 75 bp, synthetic construct
  source 1..75: mol_type = other DNA
cgatacgttggaagataaagcggaaaataagcgccagttacaaatcgcaatggggcttaaggttgacgataaagt

SEQ ID NO: 51317 - DNA, 75 bp, synthetic construct
  source 1..75: mol_type = other DNA
gacagttttcaggtaattcgccatctccgggcaataccacaccgtccggcagtttcagcgacgatgacgacagta

SEQ ID NO: 51318 - DNA, 75 bp, synthetic construct
  source 1..75: mol_type = other DNA
ggtgcgcaattttattctgatgggcctcgaaccagagcatcaaacccggttgtatgaagatcactggcgtccaat

SEQ ID NO: 51319 - DNA, 75 bp, synthetic construct
  source 1..75: mol_type = other DNA
tcggcggcagtattttttccgggtggctgacggtcagcgtccgccgctccctggaacatctggccgggtcgtttg

SEQ ID NO: 51320 - DNA, 75 bp, synthetic construct
  source 1..75: mol_type = other DNA
atgagcagaccggactggggggcgttgcagcaggagtatattgctgaatacacccgctccggtatatctccggtg

SEQ ID NO: 51321 - DNA, 75 bp, synthetic construct
  source 1..75: mol_type = other DNA
tcaggaaacagcccgcagcagcaaagtagtaaccagcagaacactcctgtatacgacgattccatcccattctga

SEQ ID NO: 51322 - DNA, 75 bp, synthetic construct
  source 1..75: mol_type = other DNA
cctgcctgccgatatgatcgccggtggtaataaggcgaaaaatgcctggggtggtgcggtaaccatcaaagtcag

SEQ ID NO: 51323 - DNA, 75 bp, synthetic construct
  source 1..75: mol_type = other DNA
ctgcaggtggaaaaccattcctcctggcaccgcctgtttgtggacccgttaagccgcgccatgtacagctctgac

SEQ ID NO: 51324 - DNA, 75 bp, synthetic construct
  source 1..75: mol_type = other DNA
ctgaggaaaaacagcgaatgattgatatggaaaaacagcttaaggagctgtccgcagcgttcgaaagattaaaaa

SEQ ID NO: 51325 - DNA, 75 bp, synthetic construct
  source 1..75: mol_type = other DNA
atgagcagaccggactggggggcgttgcagcaggaatatattgctgaatacacccgctccggtgtatctccggtg

SEQ ID NO: 51326 - DNA, 75 bp, synthetic construct
  source 1..75: mol_type = other DNA
atggacagtcaccgtaatgatattttactggttgagcagatagaccgcctgacttgtcttagcaacagcgactgg

SEQ ID NO: 51327 - DNA, 75 bp, synthetic construct
  source 1..75: mol_type = other DNA
cattacccattaggagttgacgtaggcaaacaaaagttcgtacaggccattggagagcttcctgactttggcgga

SEQ ID NO: 51328 - DNA, 75 bp, synthetic construct
  source 1..75: mol_type = other DNA
aaagtttctttccagccaacagactgttgagcttgttcatgaattgaccaacacccagaatttgggtgttgaccc

SEQ ID NO: 51329 - DNA, 75 bp, synthetic construct
  source 1..75: mol_type = other DNA
cttacccgacatatgcactaccaccgctggtgagaaatgcaataattgaaactcaaaaaaatacacaggcacccc

SEQ ID NO: 51330 - DNA, 75 bp, synthetic construct
  source 1..75: mol_type = other DNA
ttccatccgccctgctcaacgagtccgccacgctgttccgtcgaaagtattacattaacggcagtcatgctggct

SEQ ID NO: 51331 - DNA, 75 bp, synthetic construct
  source 1..75: mol_type = other DNA
gaaccggttcggtgaagttatcgcccttgagcctgctctggcaaaatacacccgacgtgggttagacctggatac

SEQ ID NO: 51332 - DNA, 75 bp, synthetic construct
  source 1..75: mol_type = other DNA
aaaaacgccgagctggcgtgcgaagtgactttgcaaccgctgcgtcgctacccgctggatgcggcgatcctcttt

SEQ ID NO: 51333 - DNA, 75 bp, synthetic construct
  source 1..75: mol_type = other DNA
ctatgcgaaatcttgatgcgctggatcgccgtgccgttccccgtgcggcagccaccacgcttaaccgtgtggcgg

SEQ ID NO: 51334 - DNA, 75 bp, synthetic construct
  source 1..75: mol_type = other DNA
acaatctgacgttacgcgataaagacggcttaattctcgccgggttaagccatgcagtcagcggtaagggcagca

SEQ ID NO: 51335 - DNA, 75 bp, synthetic construct
  source 1..75: mol_type = other DNA
cgcagacggttgatgtattttgcggtaaggttgttcgggaaagggaaatacagcgacacgcaacaggggacctgt

SEQ ID NO: 51336 - DNA, 75 bp, synthetic construct
  source 1..75: mol_type = other DNA
agccgacggcattaaaattatcccgctcagtgaagtggcgacgaaggacgatttttttaatatcaaaaaagccag

SEQ ID NO: 51337 - DNA, 75 bp, synthetic construct
  source 1..75: mol_type = other DNA
cgggaaataaaaccagccaaaggtgaagttctggtcgttgtatctggttttactggttgcggaaaaagcgccatt

SEQ ID NO: 51338 - DNA, 75 bp, synthetic construct
  source 1..75: mol_type = other DNA
cgtattgaggttcgtgccgacgggcagattgataaccaggctcttaaagcgaagctgattcatcgtttcgaaagt

SEQ ID NO: 51339 - DNA, 75 bp, synthetic construct
  source 1..75: mol_type = other DNA
tcatcatgtacatgaccgacgccgcgcagaaccaggaagatgtaaacaatctccgtaacgcgatgaaaagcgcca

SEQ ID NO: 51340 - DNA, 75 bp, synthetic construct
  source 1..75: mol_type = other DNA
atggttactttttacagcgcggtatgctgctggcactgatgacaggccagcgcctttcagatatttgcaaaatgc

SEQ ID NO: 51341 - DNA, 75 bp, synthetic construct
  source 1..75: mol_type = other DNA
gatggtgataaaacttatgcccgtctcggctttaaaggagaaacgcaaatcaatgatcaaatgattggttttggt

SEQ ID NO: 51342 - DNA, 75 bp, synthetic construct
  source 1..75: mol_type = other DNA
gctgagctgggattacaaaaccaactcaccctgtaaatttggcagtaaaattatcgtcaacaatctggtgagatg

SEQ ID NO: 51343 - DNA, 75 bp, synthetic construct
  source 1..75: mol_type = other DNA
ccaggagggccggactccgatcatcatctgcaacaaaaaggcagaggtgggtatcaacctgcatcgaggaacgac

SEQ ID NO: 51344 - DNA, 75 bp, synthetic construct
  source 1..75: mol_type = other DNA
atgggacaaattttcaggaaggtactgatcgatgttttccgggaagctcagcaaacgggcgatgtcccgccaggc

SEQ ID NO: 51345 - DNA, 75 bp, synthetic construct
  source 1..75: mol_type = other DNA
tgctgctgcaactggcggaagaccgccgtcgtctcaagggcgttcagtccacggtcaaaaaagcggaaatcaaag

SEQ ID NO: 51346 - DNA, 75 bp, synthetic construct
  source 1..75: mol_type = other DNA
atgctcaacgttcaggaaaaagtgagcattgtgaatgaactaaggcaggaatggccattgtcccgattgttaatt

SEQ ID NO: 51347 - DNA, 75 bp, synthetic construct
  source 1..75: mol_type = other DNA
ttgtgttgttatcactggcggtggccggtctgtttctggcgaagcatgaaaacgccagcctgcgcacctcgctgg

SEQ ID NO: 51348 - DNA, 75 bp, synthetic construct
  source 1..75: mol_type = other DNA
acatatctggagttttggtcagctgccggaaagctacgaacagaagcgtggcaactacaaagtgaaggcgtggcc

SEQ ID NO: 51349 - DNA, 75 bp, synthetic construct
  source 1..75: mol_type = other DNA
atctgaatatttcccaactggctgcattatccggtgctcatcgacagactgtcgcggctcgggtaaaaaacataa

SEQ ID NO: 51350 - DNA, 75 bp, synthetic construct
  source 1..75: mol_type = other DNA
atgagtaagaagaaaatttctgttgaaaatgaagagttcattacttaccgggcattacttctgagtattgacttt

SEQ ID NO: 51351 - DNA, 75 bp, synthetic construct
  source 1..75: mol_type = other DNA
tatctttacgacccgctgggccgcagggtggcaaaacgggtatggcggcgtgaacgggacctgacgggctggatg

SEQ ID NO: 51352 - DNA, 75 bp, synthetic construct
  source 1..75: mol_type = other DNA
ggggagattgcacaaaacacatacctttcacgcgaacgctgtcagttaatactgacccagctggttatggcgggg

SEQ ID NO: 51353 - DNA, 75 bp, synthetic construct
  source 1..75: mol_type = other DNA
ggaaaactttgacatagctattcagcaacgtgatgagcgaaaggaaaatatgaaagctatcaaatcactcatgga

SEQ ID NO: 51354 - DNA, 75 bp, synthetic construct
  source 1..75: mol_type = other DNA
aaaccgccagagcagtgtttaatgaattaagcgtcaccgaaccggcgacagtcggggagattgcgcagaatactt

SEQ ID NO: 51355 - DNA, 75 bp, synthetic construct
  source 1..75: mol_type = other DNA
aaacatcgctgaactgcgtaaagttctcgacagcaaaccgtctgtgctggcactgaacattcagcgcggcgacag

SEQ ID NO: 51356 - DNA, 75 bp, synthetic construct
  source 1..75: mol_type = other DNA
tatctgtcagaacgagcggtcgtagccgccggtgacgggcatgtaagtgagttagagcaggcagagatggcggag

SEQ ID NO: 51357 - DNA, 75 bp, synthetic construct
  source 1..75: mol_type = other DNA
gggatgccggaatacctgagcgcactcaattcagcctggctgaatgagtcagcgacactgtttcgtcgcaagtat

SEQ ID NO: 51358 - DNA, 75 bp, synthetic construct
  source 1..75: mol_type = other DNA
atgaactggttatccgcctggggcgttcgtctgtacagcgttgtgtgaatcatatttctgagccggataccgaaa

SEQ ID NO: 51359 - DNA, 75 bp, synthetic construct
  source 1..75: mol_type = other DNA
gcatgcccttgctcgctgggtcccgggtatcaccggctggaaaactgactcgcccatcaaactctttgtaccgac

SEQ ID NO: 51360 - DNA, 75 bp, synthetic construct
  source 1..75: mol_type = other DNA
agctcaataaactgcagcacaaaggcgaagcacgtcgtgccgcaacatcggtgaaagacgccaacttcgtcgaag

SEQ ID NO: 51361 - DNA, 75 bp, synthetic construct
  source 1..75: mol_type = other DNA
gcgcattgtgctggcgaccaacgtcgcggaaacctcgctgaccgtaccggggattaaatacgttatcgaccccgg

SEQ ID NO: 51362 - DNA, 75 bp, synthetic construct
  source 1..75: mol_type = other DNA
aagatgactttttcaatattaaaaaggtgagcgccgctgacctgctcgatgcgcaccgcgtgccgttccagttga

SEQ ID NO: 51363 - DNA, 75 bp, synthetic construct
  source 1..75: mol_type = other DNA
ctttctggcacgacctggcagcaccgatcctggcgggaattattaccgcagcgattgtcggctggtggcgtaacc

SEQ ID NO: 51364 - DNA, 75 bp, synthetic construct
  source 1..75: mol_type = other DNA
gctgggatatcatccgtatgctgcgcactgccggaaagggtacgccggtcttactgctgacggccctgggcacga

SEQ ID NO: 51365 - DNA, 75 bp, synthetic construct
  source 1..75: mol_type = other DNA
cgctgaatatgctttatatcgacctgcagaacagcagccagattattgctgaacaggtgatccctgaaaacgagg

SEQ ID NO: 51366 - DNA, 75 bp, synthetic construct
  source 1..75: mol_type = other DNA
tcttaaccgggcgatcaatgatgcggagtcagtgctggggacaacaagccgccgccgtcgtccgctgggagtgag

SEQ ID NO: 51367 - DNA, 75 bp, synthetic construct
  source 1..75: mol_type = other DNA
aatgtggattacgtcaccagttttgaactgccttttcgcttgctgcttacccgtacaccgcaattgattgccgcg

SEQ ID NO: 51368 - DNA, 75 bp, synthetic construct
  source 1..75: mol_type = other DNA
cgctgactaatttgagtggaaaggatgtagctggtcttctcgcataccttggtttgggagatacaagcggatacg

SEQ ID NO: 51369 - DNA, 75 bp, synthetic construct
  source 1..75: mol_type = other DNA
ccgtggtaaagaatttgcccaacatcgtttggtaacagaagcactgggtgtagaattttacttccccgagccgca

SEQ ID NO: 51370 - DNA, 75 bp, synthetic construct
  source 1..75: mol_type = other DNA
ccgtcttggccgcgacactgccgatatgatccaactgataaaggaatttgacgctcagggcgtggcagtccggtt

SEQ ID NO: 51371 - DNA, 75 bp, synthetic construct
  source 1..75: mol_type = other DNA
acccaccgacagtgaacacctactggcggcgtcgtggcagcacatattttgtatcaaaagccggtgagcgttatc

SEQ ID NO: 51372 - DNA, 75 bp, synthetic construct
  source 1..75: mol_type = other DNA
tggccagaactggaagcagtgctgaaatctcacggtgcgcataactacgccatctatctcgacaaagcgcgtaat

SEQ ID NO: 51373 - DNA, 75 bp, synthetic construct
  source 1..75: mol_type = other DNA
attatatgatgctgttgcttctggtactaaggaattatacgaggaagctgacgcatgccattatgatatttatga

SEQ ID NO: 51374 - DNA, 75 bp, synthetic construct
  source 1..75: mol_type = other DNA
gcggcgtattcacaaaactgattgatgctgaggaatacaactgccctaatccattcagggatatcaagcggttga

SEQ ID NO: 51375 - DNA, 75 bp, synthetic construct
  source 1..75: mol_type = other DNA
aactgcaataaataatatgcttatagacctgatgtccgcgatgtcgcataaggactggctgagtcgtcgccaacg

SEQ ID NO: 51376 - DNA, 75 bp, synthetic construct
  source 1..75: mol_type = other DNA
acggggataccaggtaacccacaggggcgcggggtgattgaaaggcttaacaaggaaattccccgggatgtggcc

SEQ ID NO: 51377 - DNA, 75 bp, synthetic construct
  source 1..75: mol_type = other DNA
cgcaggtcgatattgctgaagataatgcattcttcccttcagaatattcgcttagccaatatacgagtcccgtct

SEQ ID NO: 51378 - DNA, 75 bp, synthetic construct
  source 1..75: mol_type = other DNA
ccagaacgcctccggcgtgcgagctgaatgccatgactgtcatatcccgccggatattccaggcatggtgaagcg

SEQ ID NO: 51379 - DNA, 75 bp, synthetic construct
  source 1..75: mol_type = other DNA
cgctgaacgggattatttcatcctcagagaacggctgatggcaatgcagaagcaactggaaggagcacaggaata

SEQ ID NO: 51380 - DNA, 75 bp, synthetic construct
  source 1..75: mol_type = other DNA
atgaaaattacggatcacaaactccctgaaggtattgccctgacatttcgtgtcccggaaggaaatataaaacat

SEQ ID NO: 51381 - DNA, 75 bp, synthetic construct
  source 1..75: mol_type = other DNA
acgctggacacgctgaaagaaatagccgtagccattaacaatgatccgaaattcagtaccaccattaataatgcg

SEQ ID NO: 51382 - DNA, 75 bp, synthetic construct
  source 1..75: mol_type = other DNA
tatgcctaataatgtcggggggtttggggatgtggagaaggcgagcctggtgtttgtacgtaacgagttaatacc

SEQ ID NO: 51383 - DNA, 75 bp, synthetic construct
  source 1..75: mol_type = other DNA
ggtgacttcatttactccctctcgtccggcaccgccgccaccgacaagtggacaggcatccggggcatcccgacc

SEQ ID NO: 51384 - DNA, 75 bp, synthetic construct
  source 1..75: mol_type = other DNA
ctactgcggcacagtcggtcaacaatacacagattgccaccacggcatttgtgaaatcggcgattgcggcaatgg

SEQ ID NO: 51385 - DNA, 75 bp, synthetic construct
  source 1..75: mol_type = other DNA
atgtcgatgataaaaagctatgccgcaaaagaagcgggcggcgaactggaagtttatgagtacgatcccggtgag

SEQ ID NO: 51386 - DNA, 75 bp, synthetic construct
  source 1..75: mol_type = other DNA
cccggaatgctggcgcgttggactgatgatgatctgtacggcatcatccgtgcggctaaaaaaggcaaaaaaacc

SEQ ID NO: 51387 - DNA, 75 bp, synthetic construct
  source 1..75: mol_type = other DNA
ttcaaaattggtcgaacacttgccgacgaacattatgaaaaatcacgcgtaacagtagttgatgacagtgaccct

SEQ ID NO: 51388 - DNA, 75 bp, synthetic construct
  source 1..75: mol_type = other DNA
ctgacggggtggatgtcgctgtcgcgtaaaccggaggagacatggtacggctgggacggcgacaggctgacgacg

SEQ ID NO: 51389 - DNA, 75 bp, synthetic construct
  source 1..75: mol_type = other DNA
gtgttacaagcccgcggttggcctcgtgcagcagaaaatgaattaaaaaaagcagaagtgatcgagccacgtaat

SEQ ID NO: 51390 - DNA, 75 bp, synthetic construct
  source 1..75: mol_type = other DNA
caggagctaatgaccgtcttgctagacaatctggaacgccgtttcagtggtaaaaagcaagaagaacaacaaccc

SEQ ID NO: 51391 - DNA, 75 bp, synthetic construct
  source 1..75: mol_type = other DNA
atcatgaaatcgctgatttctgcgcaacgctgggggcacctggcgaaccggaaacgccggaagcaatgcagcaag

SEQ ID NO: 51392 - DNA, 75 bp, synthetic construct
  source 1..75: mol_type = other DNA
ccgtattcgccggatggttgggaatgaaaatacatcatcaccctatcagcagattgcccgggaagtgaaagtgcc

SEQ ID NO: 51393 - DNA, 75 bp, synthetic construct
  source 1..75: mol_type = other DNA
aattcgattctgaaaaataccgaaataacgtgcgtgaactgaccccggcaattctggcggtactaccgctggaat

SEQ ID NO: 51394 - DNA, 75 bp, synthetic construct
  source 1..75: mol_type = other DNA
ccgtaacgcgaccttatcaggaacagacttcaaccgcatgtgggaacaatggaaatctatccgcgccgctggcat

SEQ ID NO: 51395 - DNA, 75 bp, synthetic construct
  source 1..75: mol_type = other DNA
ggtttgactccggatctacccactcttccgttgttgatgtgcgtccggaatttgccggtcacgcagcggacatgt

SEQ ID NO: 51396 - DNA, 75 bp, synthetic construct
  source 1..75: mol_type = other DNA
tccggaaggctggcaataaaaattactgcagagccgccggataagcgccgtcgggacctggacaatatcctgaaa

SEQ ID NO: 51397 - DNA, 75 bp, synthetic construct
  source 1..75: mol_type = other DNA
cctcgattggtgtgctgaacacacttatacactgggtggtttttggtgtatgtatctatgccgcgcataccaatc

SEQ ID NO: 51398 - DNA, 75 bp, synthetic construct
  source 1..75: mol_type = other DNA
agcagtttgatgaaatcaatattgtgcgcggtcagctcgttcctggtgggcggctggggataaaaatcacagaac

SEQ ID NO: 51399 - DNA, 75 bp, synthetic construct
  source 1..75: mol_type = other DNA
ctggaaaccgctaacccggttggcccggacggcacttatctgccgggtacttacccgacgctggatggcgtgaac

SEQ ID NO: 51400 - DNA, 75 bp, synthetic construct
  source 1..75: mol_type = other DNA
atatgacgtattttcccttttaccggtatgccatgacgtttgaagaatttgttccggcattttcttcctggtttg

SEQ ID NO: 51401 - DNA, 75 bp, synthetic construct
  source 1..75: mol_type = other DNA
gaaggcttagctaagcttgttcttggtgaaatagatgaaggatgttcactctgtgagcgggggttgagaatagcg

SEQ ID NO: 51402 - DNA, 75 bp, synthetic construct
  source 1..75: mol_type = other DNA
gaagtatctgtctgatttatggagtcgtttctgggatgcggccatgaatattggtcgtgaagactcgctggatga

SEQ ID NO: 51403 - DNA, 75 bp, synthetic construct
  source 1..75: mol_type = other DNA
gctgaccggtgtccgggcggatgaatccctcaaccgctttatgggactggtgtcccagcgcaaactgagatatgc

SEQ ID NO: 51404 - DNA, 75 bp, synthetic construct
  source 1..75: mol_type = other DNA
tgcgtgaagcagcagagaaagcaactaaaggatgctacatcgtagggcatacatcgggcaatcagcatgggaata

SEQ ID NO: 51405 - DNA, 75 bp, synthetic construct
  source 1..75: mol_type = other DNA
gccgccgcgctccatcacattccatatctggacggcgtacagtccgttcaccacctgggtacagattgtctatga

SEQ ID NO: 51406 - DNA, 75 bp, synthetic construct
  source 1..75: mol_type = other DNA
cggcgctgcttatgttgatgactggtaatgtctgggcagatggcgaaccgccaactgaaaatatcttaaaagatc

SEQ ID NO: 51407 - DNA, 75 bp, synthetic construct
  source 1..75: mol_type = other DNA
ctactgaaacggagactggcgcaaattaagcagcagaacagccagcagcaaacaaccggagacgatggtgatgat

SEQ ID NO: 51408 - DNA, 75 bp, synthetic construct
  source 1..75: mol_type = other DNA
ccgagaactcaaatgcagtagttattcaataccaggataaaccgtacgttcgcctgaacggcggcgactgggtgc

SEQ ID NO: 51409 - DNA, 75 bp, synthetic construct
  source 1..75: mol_type = other DNA
tgtctgtattatgttgtcatcagtatggtccggagtgatgtggtcttttataaatatgcttacacagcatgtggg

SEQ ID NO: 51410 - DNA, 75 bp, synthetic construct
  source 1..75: mol_type = other DNA
ctatcctgccggatatcagaatatagaaacaagtataatgcatgaccttgccccattgagagcacaattcacatt

SEQ ID NO: 51411 - DNA, 75 bp, synthetic construct
  source 1..75: mol_type = other DNA
ttcctgctggacgtaatgccggaaagaacggctgaacactaccgcaacaagatagcagtttacctgcgctggtat

SEQ ID NO: 51412 - DNA, 75 bp, synthetic construct
  source 1..75: mol_type = other DNA
ctgaaaggatgacagaagcgcataaacagcttctggcccttcagcagcgtatcagcgatttagccggtaaaaaac

SEQ ID NO: 51413 - DNA, 75 bp, synthetic construct
  source 1..75: mol_type = other DNA
tagctgtctatctgcgctggtatcagacgcggggcttcccggatgacatcccggatgaacaggagaatgacctgg

SEQ ID NO: 51414 - DNA, 75 bp, synthetic construct
  source 1..75: mol_type = other DNA
gatagaaaatgcaggtgaccaaaaagacacccagtttgtcattaccccaccgcttttttccatgcaaggtaaaaa

SEQ ID NO: 51415 - DNA, 75 bp, synthetic construct
  source 1..75: mol_type = other DNA
cgaagtcgtggtgtccccccaaaaaaaatgctgaatgaaatgattgagcaggcgcaccgggattttgtggcaaat

SEQ ID NO: 51416 - DNA, 75 bp, synthetic construct
  source 1..75: mol_type = other DNA
caaatgtcatcaaaatggggttggccgttgaaggagctgcactgtccgtggtggcctttacggctaagattgcct

SEQ ID NO: 51417 - DNA, 75 bp, synthetic construct
  source 1..75: mol_type = other DNA
agccaagattacccaaacccttgcccccctgcgtaagcagattacggaactccctgagaatcagcgatggatggt

SEQ ID NO: 51418 - DNA, 75 bp, synthetic construct
  source 1..75: mol_type = other DNA
ggtgtatacagagataatcaacctcgtggtcgcggttgcatcaacgagtttcttcaacaagttggctggcataca

SEQ ID NO: 51419 - DNA, 75 bp, synthetic construct
  source 1..75: mol_type = other DNA
tctggaaaaatgccgttttactgcgggccaactggcttcgactgtcgcttgcactcggtgaaggcggtaagctcc

SEQ ID NO: 51420 - DNA, 75 bp, synthetic construct
  source 1..75: mol_type = other DNA
agggttacctggtgatgaagtctcttgatcaggagatctgctcaagagacaggtcaaagatgggggacaacgtct

SEQ ID NO: 51421 - DNA, 75 bp, synthetic construct
  source 1..75: mol_type = other DNA
ccaaatgaaagtttcaggcaattttatgtctctggtaacgcaaatactggttctaactgctgttagaacgggaga

SEQ ID NO: 51422 - DNA, 75 bp, synthetic construct
  source 1..75: mol_type = other DNA
cctaacccccatgcctggatgtcgccagataatgctctgatttacgtcgataatattcgtgatgcgttgataaaa

SEQ ID NO: 51423 - DNA, 75 bp, synthetic construct
  source 1..75: mol_type = other DNA
gcgatacctcacgccgcctgcaggaacgtcagaacgctttaacccgtgcaacagaacgttatggtcaactgggtt

SEQ ID NO: 51424 - DNA, 75 bp, synthetic construct
  source 1..75: mol_type = other DNA
ataacccacgctgttcaaagagccgggaaacgctgaacctgctgaaagaaaacggcgtggagccagaagtggtgc

SEQ ID NO: 51425 - DNA, 75 bp, synthetic construct
  source 1..75: mol_type = other DNA
aatgcattattgagagaacagttctccgttgagtctgcggcacagactatagaaatgaggttagaggcatgtaat

SEQ ID NO: 51426 - DNA, 75 bp, synthetic construct
  source 1..75: mol_type = other DNA
gtccctgcattgctggagctggctccatggttcggaagaaagcaccgcgataatacactcaccctgaagcgtttt

SEQ ID NO: 51427 - DNA, 75 bp, synthetic construct
  source 1..75: mol_type = other DNA
tggtataccgccgggccattacggggctgaatgtatcagggctgaagaaaaacgcgcgggatatcagtctgctga

SEQ ID NO: 51428 - DNA, 75 bp, synthetic construct
  source 1..75: mol_type = other DNA
ataatatgatgagcgctgtcacaacagcattacagcccctgataagggcattgccggtgacgccagttgaatggg

SEQ ID NO: 51429 - DNA, 75 bp, synthetic construct
  source 1..75: mol_type = other DNA
gctacagacttgtatatcaagtcattgatgagaaagtcgttttactcgttattgctgttggaagaagggaaagca

SEQ ID NO: 51430 - DNA, 75 bp, synthetic construct
  source 1..75: mol_type = other DNA
atgtattcaccgaaggtcacgggacgctgtatgccagcgatggtcgtacccgcaaagatccgtcgaaaaaatacg

SEQ ID NO: 51431 - DNA, 75 bp, synthetic construct
  source 1..75: mol_type = other DNA
gaagatggtctctttactgctattggtaaaagaaaaatatccgagcttaataccagagatcttcttgcccctatc

SEQ ID NO: 51432 - DNA, 75 bp, synthetic construct
  source 1..75: mol_type = other DNA
ccgaacgggcagcaacgtttgcagagatgcttggaaagaccgctacagcaaccaaagccgatatgaccgaccttg

SEQ ID NO: 51433 - DNA, 75 bp, synthetic construct
  source 1..75: mol_type = other DNA
aagccactgtagtcattaccggtacggcggcggcggtaactgttggtgcagcggaagtggcgggagccgctacag

SEQ ID NO: 51434 - DNA, 75 bp, synthetic construct
  source 1..75: mol_type = other DNA
caaaggctcctgccagatcgaaaaagccgctaacgagtcggcacatttcatgcgtttttatgtgccctgtccgca

SEQ ID NO: 51435 - DNA, 75 bp, synthetic construct
  source 1..75: mol_type = other DNA
gagcgtcttgatatcggaacttacccggcaactggattaaaagaggccagagaagaagttatccgtcttcgtggt

SEQ ID NO: 51436 - DNA, 75 bp, synthetic construct
  source 1..75: mol_type = other DNA
atgggaattattgcctggattatttttggcctgatagccggcattatcgccaagctaatcatgccggggcgtgat

SEQ ID NO: 51437 - DNA, 75 bp, synthetic construct
  source 1..75: mol_type = other DNA
cctgcgggagaggaaatcttctgtgatgaacatggccgggtacgggtgaagtttcactgggacaggtataacccg

SEQ ID NO: 51438 - DNA, 75 bp, synthetic construct
  source 1..75: mol_type = other DNA
gttcagtcgttggaaaggaacgtgataaggttttggttaaatccgatcgtgatggtctgtctgtcagagtatcac

SEQ ID NO: 51439 - DNA, 75 bp, synthetic construct
  source 1..75: mol_type = other DNA
tcgggaatatccctcacgatgcagctacattgcatgattggttagaagtcctggagcctcttagcactaagactc

SEQ ID NO: 51440 - DNA, 75 bp, synthetic construct
  source 1..75: mol_type = other DNA
attccggacagcgatccggacgggctgcacctgccggatgatattcgtctggggatgctgatgcttatcagccat

SEQ ID NO: 51441 - DNA, 75 bp, synthetic construct
  source 1..75: mol_type = other DNA
ttgggcttattgccggtattctggcgaagtggatcatgccaggtaaagatggtggtggattctttatgactatcc

SEQ ID NO: 51442 - DNA, 75 bp, synthetic construct
  source 1..75: mol_type = other DNA
gccgctaacgagtcggcacatttcatgcgtttttatgtgccctgtccgcactgtggggaggagcagtatctgaaa

SEQ ID NO: 51443 - DNA, 75 bp, synthetic construct
  source 1..75: mol_type = other DNA
gaacgaggacattgcgctaacggtagggaagctgcgtgttgagcttgaggagacaaaatcaaaactcaacgagca

SEQ ID NO: 51444 - DNA, 75 bp, synthetic construct
  source 1..75: mol_type = other DNA
ctggatgaaaacgaaaggggatacgaccgacgcaaactggtcgccgtgggcgcagctttacacctcggctcatcc

SEQ ID NO: 51445 - DNA, 75 bp, synthetic construct
  source 1..75: mol_type = other DNA
aattccgaacgcaccgggcaaatatttctacgtctggctggatgcgccgattggctacatgggttccttcaagaa

SEQ ID NO: 51446 - DNA, 75 bp, synthetic construct
  source 1..75: mol_type = other DNA
gtcacggcgctgtttttgcagccggtgccgtggcgcagacgggcggcggctctggtggtgatggtggcgacgttt

SEQ ID NO: 51447 - DNA, 75 bp, synthetic construct
  source 1..75: mol_type = other DNA
agcgcaggcgcacatgcacatactgtcggtattggtgctcatacgcactccgttgcgattggttcacatggacac

SEQ ID NO: 51448 - DNA, 75 bp, synthetic construct
  source 1..75: mol_type = other DNA
tcagcattcgcggtattcgcttatacagtgacagtcgaatgctgcctccggtattagccagttttgcgccaatca

SEQ ID NO: 51449 - DNA, 75 bp, synthetic construct
  source 1..75: mol_type = other DNA
tgcctggctgactggacggaaggtgcacgccctgaaatcaaagccatcatcagcgaggcattcagcacggacaag

SEQ ID NO: 51450 - DNA, 75 bp, synthetic construct
  source 1..75: mol_type = other DNA
tgcgtgaggtggcggaacgtgcaattccagcaatggaacgcctgttaatgttgccagttgatgatgatttgttaa

SEQ ID NO: 51451 - DNA, 75 bp, synthetic construct
  source 1..75: mol_type = other DNA
gcattgacgtaattcgtgaagaagtaaagcgatggaatgattcccgcgccgctggcattcgcatcaaaggagagt

SEQ ID NO: 51452 - DNA, 75 bp, synthetic construct
  source 1..75: mol_type = other DNA
ttattaattactattgtatctttttctcagttaatatgtggaggatgttccgcatggattgcaaaaatcattgca

SEQ ID NO: 51453 - DNA, 75 bp, synthetic construct
  source 1..75: mol_type = other DNA
acctgaaggaaacgcaccaaattattgctggtgggaagttgatccggttgatgctgcaaatgaagccatgagtta

SEQ ID NO: 51454 - DNA, 75 bp, synthetic construct
  source 1..75: mol_type = other DNA
ataatatggcccgggctgtcagaactgcgttgcagccgctggtaagggcattgccagtaacggcagttgaatggg

SEQ ID NO: 51455 - DNA, 75 bp, synthetic construct
  source 1..75: mol_type = other DNA
agtggttcgatttctatgtctactcgttctgttcactctactttgcccacatcttcttcccttccgggaacacga

SEQ ID NO: 51456 - DNA, 75 bp, synthetic construct
  source 1..75: mol_type = other DNA
tggaagacgttgccatttcaggtggcaataatgaactgcatgggtaatgaccggatccgcacgattaatcttata

SEQ ID NO: 51457 - DNA, 75 bp, synthetic construct
  source 1..75: mol_type = other DNA
ccagaagtaaacgtggactggcagtgctgaccggagttcgtgcggatgagtccctgaacaggtttatggggctgg

SEQ ID NO: 51458 - DNA, 75 bp, synthetic construct
  source 1..75: mol_type = other DNA
ttttatagagcataaatcccgtaacagcctgcttttccagcctactgattctgccgctgaagattttatgaaagc

SEQ ID NO: 51459 - DNA, 75 bp, synthetic construct
  source 1..75: mol_type = other DNA
atgacaatcgagtactttgcaacacgcattgcaaaacatatttccgtgcaggcaatctggccggatggcaggaca

SEQ ID NO: 51460 - DNA, 75 bp, synthetic construct
  source 1..75: mol_type = other DNA
agctgactggctgacagcgattgagatgtacaaaccaacagtgcgcatcgtggaagttaatgtgccacgcgccgc

SEQ ID NO: 51461 - DNA, 75 bp, synthetic construct
  source 1..75: mol_type = other DNA
ccagtggagcgctgtatgcaaatgaaagtggtgcttattttgcgcttcgaaaacgtatatcaaagcctgaccatc

SEQ ID NO: 51462 - DNA, 75 bp, synthetic construct
  source 1..75: mol_type = other DNA
tagataaagttaaagcctgggattttaggcttattgatgaaaatactgctgaaagtttaaatgttgcctatggtg

SEQ ID NO: 51463 - DNA, 75 bp, synthetic construct
  source 1..75: mol_type = other DNA
cctgatcgacatgaactatatcaccagtttcaccggtatgaccgacaaatggttttacaagttgatcagtgaagg

SEQ ID NO: 51464 - DNA, 75 bp, synthetic construct
  source 1..75: mol_type = other DNA
aaccttttactgggtggcgcttcccctgaccacggtaaacggtgtctcgcagtttcaaccggagtggatatgctg

SEQ ID NO: 51465 - DNA, 75 bp, synthetic construct
  source 1..75: mol_type = other DNA
gcaaggcgcaatttatagttactgccgttaaaggtgagatcaaacgccgccagcgccgcaaggccaaagagcagg

SEQ ID NO: 51466 - DNA, 75 bp, synthetic construct
  source 1..75: mol_type = other DNA
ttattgtcctggcggttggctatggtgcgctgtggctggcaacaaaccattaccgtgacaacgcgctcacctaca

SEQ ID NO: 51467 - DNA, 75 bp, synthetic construct
  source 1..75: mol_type = other DNA
cgtaacgaagcgctggactgcctggtgtatgcctacgcggcattacgtgtgtccgtgcaacgctggcagcttgat

SEQ ID NO: 51468 - DNA, 75 bp, synthetic construct
  source 1..75: mol_type = other DNA
atgttgaccacaacaagccacgacagcgtgttactgcgtgccgacgatcccctgatcgacatgaactacatcacc

SEQ ID NO: 51469 - DNA, 75 bp, synthetic construct
  source 1..75: mol_type = other DNA
aggccatttcccgaaacccatcaagctgggccgcagcagccgctggtacaaaagcgaagtggagcagtggatgca

SEQ ID NO: 51470 - DNA, 75 bp, synthetic construct
  source 1..75: mol_type = other DNA
ttgccagcgacggattaagagagaatgataaagaaattgtttctatgatgattcaggaaatgagtgagggaaaaa

SEQ ID NO: 51471 - DNA, 75 bp, synthetic construct
  source 1..75: mol_type = other DNA
aatggttttacaagctgatcagtgaaggccatttccctaaacccatcaaactggggcgcagcagccgctggtaca

SEQ ID NO: 51472 - DNA, 75 bp, synthetic construct
  source 1..75: mol_type = other DNA
tgcgggtagcgcaacaaacgttggcgtgcagattctggacagaacaggtaatgagctgacgctggacggtgcgac

SEQ ID NO: 51473 - DNA, 75 bp, synthetic construct
  source 1..75: mol_type = other DNA
cgtcaacaaaactgattccagcaaactcgattgcaatcgttgttcgctcaagcatattggataaagtattaccaa

SEQ ID NO: 51474 - DNA, 75 bp, synthetic construct
  source 1..75: mol_type = other DNA
aagcgcattgaagagctgaccggtgtgccgatcgatatcatctctaccggtccggatcgtactgaaaccatgatt

SEQ ID NO: 51475 - DNA, 75 bp, synthetic construct
  source 1..75: mol_type = other DNA
gttctgcaaaaccgcaggaaaaggagtacacccttgtcgatggggatggcatgtttttgctgattcaccctaacg

SEQ ID NO: 51476 - DNA, 75 bp, synthetic construct
  source 1..75: mol_type = other DNA
tccgtccctacggattcaacggctgctgcgtctgataacacaaccagaatggctggctgaagcggcgcggatcac

SEQ ID NO: 51477 - DNA, 75 bp, synthetic construct
  source 1..75: mol_type = other DNA
acagaaataacgttaatgttacgggcgtgctgactccggtatttttcctggacagatttacagcggagtctggct

SEQ ID NO: 51478 - DNA, 75 bp, synthetic construct
  source 1..75: mol_type = other DNA
gggaaaacgcccccggggctgcctctgacgcctgagcagactgaactcagggaaatgagaaaacgaatacaacgc

SEQ ID NO: 51479 - DNA, 75 bp, synthetic construct
  source 1..75: mol_type = other DNA
gaagtcagtgatgaaacactggcaaaaatagtcagtgaattagatgtgctggaaacgttaatcatggatagccga

SEQ ID NO: 51480 - DNA, 75 bp, synthetic construct
  source 1..75: mol_type = other DNA
accgctgagcttaacatgcgtaaaaaacagtacaactactatcgcgaccagttgttgagttttaaagagggtgag

SEQ ID NO: 51481 - DNA, 75 bp, synthetic construct
  source 1..75: mol_type = other DNA
tgcctgctgttcaccctggtcacctccgtgatattcatgctgcaacgctggcgatgccccctgcgtatgcccatg

SEQ ID NO: 51482 - DNA, 75 bp, synthetic construct
  source 1..75: mol_type = other DNA
atgctaaacacctacgtcgcagaaggtaaagcggtttccgcaagagtaatcaggtcaacccttgttgacgttttt

SEQ ID NO: 51483 - DNA, 75 bp, synthetic construct
  source 1..75: mol_type = other DNA
gacccgcgaagaagtcagccgcgatatccgcaccctgggcgatattcagcgagaggcgctgcgcctggaaacggc

SEQ ID NO: 51484 - DNA, 75 bp, synthetic construct
  source 1..75: mol_type = other DNA
aacgattgacgcgctcaatatctcattggctgatacactacagaaatgcagggaggccagcggcagtgaaacaat

SEQ ID NO: 51485 - DNA, 75 bp, synthetic construct
  source 1..75: mol_type = other DNA
cacacctgcaggaggccggtattccgtttctggcactcggtcaggtgccgtccggtcttccctgtgcctggtttg

SEQ ID NO: 51486 - DNA, 75 bp, synthetic construct
  source 1..75: mol_type = other DNA
agccattctctctgacataacaacagaaaaaataatggaggcggtagacgggatggaaaaccgccgccatcgcct

SEQ ID NO: 51487 - DNA, 75 bp, synthetic construct
  source 1..75: mol_type = other DNA
tcgcaggcagagttttaccgcggcatggagtggctgtacggctggaaagaagataactgtttgcaaccacgctga

SEQ ID NO: 51488 - DNA, 75 bp, synthetic construct
  source 1..75: mol_type = other DNA
ctacacagcgttaattcctgatgatcatgtagtgttatctgttgaggcattcattgaatacttggaaagactcgg

SEQ ID NO: 51489 - DNA, 75 bp, synthetic construct
  source 1..75: mol_type = other DNA
tttgcgcggcggcaagcagtataacctggtggtgacattccacagccgccagcaggaagagtggggcgtgaagga

SEQ ID NO: 51490 - DNA, 75 bp, synthetic construct
  source 1..75: mol_type = other DNA
cgggtttcctggagagtgttttatctgtgaactcaggctgccagatcatcgtttccgatggaagcataataagct

SEQ ID NO: 51491 - DNA, 75 bp, synthetic construct
  source 1..75: mol_type = other DNA
ataacttcggcgttaccgccggtttatcgcgccgccagtctgatatcacccgcgcggattatgtttcgaatgacg

SEQ ID NO: 51492 - DNA, 75 bp, synthetic construct
  source 1..75: mol_type = other DNA
aagccgatgtcattatctccaatcgaatggcagaagaactaaaggatgtggcagacaaggtctacacccgagatc

SEQ ID NO: 51493 - DNA, 75 bp, synthetic construct
  source 1..75: mol_type = other DNA
gctttcatcaaagggggcccatacccccggcgttgatggcgtgaacaaaacaatgctacaggccagactggctgt

SEQ ID NO: 51494 - DNA, 75 bp, synthetic construct
  source 1..75: mol_type = other DNA
cgcgatccgcacggtgaaattacagctcacagactgcggtgaaacccggggacgctgggtgattgaaggcgacct

SEQ ID NO: 51495 - DNA, 75 bp, synthetic construct
  source 1..75: mol_type = other DNA
atgaataaacaatacgaactggttgttaaagggataaataattacccggataagattactgttactgtggcactg

SEQ ID NO: 51496 - DNA, 75 bp, synthetic construct
  source 1..75: mol_type = other DNA
tccatttgcacaggagcctgtggactgtgtgctgtgggtgaaagcagatgaggtggtggccaacgattataaccc

SEQ ID NO: 51497 - DNA, 75 bp, synthetic construct
  source 1..75: mol_type = other DNA
cgtcagttatgttgccagaacgctctgctgtgcccgttcatcgattggtcgctggattaactggttcacgctgtc

SEQ ID NO: 51498 - DNA, 75 bp, synthetic construct
  source 1..75: mol_type = other DNA
ttcgtgaccagtccgaaattcgtcaacatcaacggtgtgccgtatctggaagcggaagccacagaaaacctgatc

SEQ ID NO: 51499 - DNA, 75 bp, synthetic construct
  source 1..75: mol_type = other DNA
atctggactgacagtatcagtaccggaaagctgacggccggagcggatgcctgttttgcccggcacgacatgatg

SEQ ID NO: 51500 - DNA, 75 bp, synthetic construct
  source 1..75: mol_type = other DNA
caaaattttttactcagtcagtcaaaatctttgacacgtataataacagtaataacaagaaagaacttattaata

SEQ ID NO: 51501 - DNA, 75 bp, synthetic construct
  source 1..75: mol_type = other DNA
gcaatttgccctggttcaaggccacgctggcgcaatggcgttatgcgttacgcaataccattgccatgtgtctgg

SEQ ID NO: 51502 - DNA, 75 bp, synthetic construct
  source 1..75: mol_type = other DNA
atgacaatcatcacccgggatgttgaggtctcagactcgctgaccggaaccacacgggttgtttccgggtacagc

SEQ ID NO: 51503 - DNA, 75 bp, synthetic construct
  source 1..75: mol_type = other DNA
gtgagtcctgggtggacggtaaccagatcaccatccagatggaaagcaaaatcgacgtgcaggatttgatcagac

SEQ ID NO: 51504 - DNA, 75 bp, synthetic construct
  source 1..75: mol_type = other DNA
tgatgatacggcaacagatatccggtgacggtatgcaggaacatattgattatcagattgagaaatatcagttca

SEQ ID NO: 51505 - DNA, 75 bp, synthetic construct
  source 1..75: mol_type = other DNA
ttgaggaagtggtgaaggccagcgggatgccggtgacggaatctgaagtgcgggatcgctttaatgcgattgcgg

SEQ ID NO: 51506 - DNA, 75 bp, synthetic construct
  source 1..75: mol_type = other DNA
gattttcatacgctctcatatggcttccggcctgagcgcagtgtccaccacgcgatccgcacggtgaaattacag

SEQ ID NO: 51507 - DNA, 75 bp, synthetic construct
  source 1..75: mol_type = other DNA
tacgttattattgccacgcctaccgattatgatccgaaaacaaattattttaatacctcaagcgtggaagcggtc

SEQ ID NO: 51508 - DNA, 75 bp, synthetic construct
  source 1..75: mol_type = other DNA
ttctgacccagcttaatcggggagaaagccgtcatgcagttgccagagccatctgtcacggtcaaaaaggtgaga

SEQ ID NO: 51509 - DNA, 75 bp, synthetic construct
  source 1..75: mol_type = other DNA
tgaccgtactgaaggtgccacgctggagttctacgaagctgaggcgaaaaaacaggcgaagcagtttttcatgga

SEQ ID NO: 51510 - DNA, 75 bp, synthetic construct
  source 1..75: mol_type = other DNA
ctcaaaggctatatccaggatggcattgtgctgtttggtctggtagttgcagcggcggcctttgtgaaggtggcg

SEQ ID NO: 51511 - DNA, 75 bp, synthetic construct
  source 1..75: mol_type = other DNA
acgattaaagggtatatgaatgacggcattgtgataggcggcctggttgtggcggcggtggcctttattgtggtg

SEQ ID NO: 51512 - DNA, 75 bp, synthetic construct
  source 1..75: mol_type = other DNA
tgcgcagggtgctgcataaggtcagtccttttgcacaggagcctgtggactgcgtgctgtgggtgaaagcggatg

SEQ ID NO: 51513 - DNA, 75 bp, synthetic construct
  source 1..75: mol_type = other DNA
atgcggggtgcagcgcctgcggcgctgccggcccggctttccggtcagaaggtagtgtatggctgtatgcaggga

SEQ ID NO: 51514 - DNA, 75 bp, synthetic construct
  source 1..75: mol_type = other DNA
atgcttgagcagggaaaggcctgttatctgtataccggacatgaccacaggggatatttccgtcagggcgttttc

SEQ ID NO: 51515 - DNA, 75 bp, synthetic construct
  source 1..75: mol_type = other DNA
gccgcgctgatctactggatcttctgtttcagcatgtcgcgctatagccagcatctggaaaaacgttttaacacc

SEQ ID NO: 51516 - DNA, 75 bp, synthetic construct
  source 1..75: mol_type = other DNA
ggtatcgactttcagaggttcaggcatggatccgtggtgagtggcatcctgggtggaaacctggaaaaacaaaac

SEQ ID NO: 51517 - DNA, 75 bp, synthetic construct
  source 1..75: mol_type = other DNA
aaaacctggacggagtttggggccattgtggtggtgggggtgatcctgctggttgcggtgatctggctgctgacc

SEQ ID NO: 51518 - DNA, 75 bp, synthetic construct
  source 1..75: mol_type = other DNA
tcctccggcggtggcagcggtctgtttggacagattaaagggtattcccaggacggtgtggtgctgggtggtctg

SEQ ID NO: 51519 - DNA, 75 bp, synthetic construct
  source 1..75: mol_type = other DNA
agcacagcggaaagagataatttaaaggaactgggggcatttttaccggggcagtcacggacatttagctaccgc

SEQ ID NO: 51520 - DNA, 75 bp, synthetic construct
  source 1..75: mol_type = other DNA
atgataaatagcattaattcttttttttccagcattcctcgcagtatatcaagtgttacgcgtaacagtagcttc

SEQ ID NO: 51521 - DNA, 75 bp, synthetic construct
  source 1..75: mol_type = other DNA
gtgggcagcgacatttatcagtccgtcgagaaggttttcggcttttgcgaacaggacaacctcgaagagtttcgc

SEQ ID NO: 51522 - DNA, 75 bp, synthetic construct
  source 1..75: mol_type = other DNA
tttactcactattaatagtttcagcgccaaagaagccgaagaaaaagtcggagcatggctggatatgacagagaa

SEQ ID NO: 51523 - DNA, 75 bp, synthetic construct
  source 1..75: mol_type = other DNA
ctgaaggtagaattgccaatccaattggtgtggagaatgaccttgagcgttgtacaaattcaatttcggtaaaag

SEQ ID NO: 51524 - DNA, 75 bp, synthetic construct
  source 1..75: mol_type = other DNA
ttattaacgccgccgaatcgggcgtggcgcagaccatcagcggccaggtgacgggcgcggcggcgggcgatacgg

SEQ ID NO: 51525 - DNA, 75 bp, synthetic construct
  source 1..75: mol_type = other DNA
tgcgattgctggatatcgccctgatcgcttttattgctatttccctcgcctttccggtgtttatctggatgcgtc

SEQ ID NO: 51526 - DNA, 75 bp, synthetic construct
  source 1..75: mol_type = other DNA
agctggagcgtgagcgttccagcggcagatattcaggcgctgggtaatggcgatttgacggtgagtgcctcggtc

SEQ ID NO: 51527 - DNA, 75 bp, synthetic construct
  source 1..75: mol_type = other DNA
gaacatggggcgcattgtcgttgacattgatggtgtaaatctcgctgaactgattaacaaggtcgctgaatacgg

SEQ ID NO: 51528 - DNA, 75 bp, synthetic construct
  source 1..75: mol_type = other DNA
tggttactctctttggcttgtttataagcatgagtgtctgggcgtcgacgaattatgcgcctttgattgaagata

SEQ ID NO: 51529 - DNA, 75 bp, synthetic construct
  source 1..75: mol_type = other DNA
atcattacggatagccattccggtctcttttagccaagaattaattgctaacctctgtagcggattcatgcgttt

SEQ ID NO: 51530 - DNA, 75 bp, synthetic construct
  source 1..75: mol_type = other DNA
ttcagcagactattagcttatgcacgagaaggtgacaccgtggtggtggtggctgtagaccgtctcggacgcgac

SEQ ID NO: 51531 - DNA, 75 bp, synthetic construct
  source 1..75: mol_type = other DNA
acgcgctgcaaccagaaatcgcgccgaatatcggcaaatttttctatccgctggggcgtaacaatgtgcgtacca

SEQ ID NO: 51532 - DNA, 75 bp, synthetic construct
  source 1..75: mol_type = other DNA
ccgcctgccagaaaatgccgttgccggaggttatgagttacgtcttgcttaccgcaatcaggtctatagcagcag

SEQ ID NO: 51533 - DNA, 75 bp, synthetic construct
  source 1..75: mol_type = other DNA
gcatagccatatcacttgttcttaatccgttccctgcatcactggcagcacaaaacactaatgtagttgaagttg

SEQ ID NO: 51534 - DNA, 75 bp, synthetic construct
  source 1..75: mol_type = other DNA
tcacgaatgtttcacctgaaatgctacaagtactctggcagccggaatttcatcctggcaagacaacgcttgctc

SEQ ID NO: 51535 - DNA, 75 bp, synthetic construct
  source 1..75: mol_type = other DNA
atgctgccgcattatcacaagaggtaaatgctcaatttgctgctcgaataattgaacaggggcgaactatagccc

SEQ ID NO: 51536 - DNA, 75 bp, synthetic construct
  source 1..75: mol_type = other DNA
ctgttagtcgtgagcagtttaatgaagctaaacagatgctattaaggaaccccgacagctttgggcgtatcagta

SEQ ID NO: 51537 - DNA, 75 bp, synthetic construct
  source 1..75: mol_type = other DNA
ttgtgacaatgtccagccgtgaaattgccaggctggtgcagagcaaacatggtgatgtgaagcgctcagctgagc

SEQ ID NO: 51538 - DNA, 75 bp, synthetic construct
  source 1..75: mol_type = other DNA
ctcgatcatccagcactacacctcgccgcgacatgagcactcacgtaaaccagactgcgtgcgtgaaatgctggt

SEQ ID NO: 51539 - DNA, 75 bp, synthetic construct
  source 1..75: mol_type = other DNA
tttacgcctggcttcagcagccgcattcacaacgccatcaggcagacctgaggctgacagggcagattaaacagt

SEQ ID NO: 51540 - DNA, 75 bp, synthetic construct
  source 1..75: mol_type = other DNA
gcaacctgaccatctcaacgatgtctcctatcaggtcactacgctgctacaggatatcgaggatatcttacccgg

SEQ ID NO: 51541 - DNA, 75 bp, synthetic construct
  source 1..75: mol_type = other DNA
tcagcgtgtgtttgtcatcaactggccccgtggatttggtggctacgggagtggcggcggtcgtcgcggacggag

SEQ ID NO: 51542 - DNA, 75 bp, synthetic construct
  source 1..75: mol_type = other DNA
atgagatacatcaaatcgattacacagcagaagctgagctttttgcttgcaatctatattggcctttttatgaat

SEQ ID NO: 51543 - DNA, 75 bp, synthetic construct
  source 1..75: mol_type = other DNA
aattggcgggccaaaagccagcattttgagctgtgcagaaccattaagtagcgcgctgctctctttgctgttgct

SEQ ID NO: 51544 - DNA, 75 bp, synthetic construct
  source 1..75: mol_type = other DNA
ggaaaaagcgcgtaatgaaatgggcgaactggcctatatggtgccggtgaaagaactgacgggaacggtcacttt

SEQ ID NO: 51545 - DNA, 75 bp, synthetic construct
  source 1..75: mol_type = other DNA
ccgttccgcgccgccacggacggcgagagcgtcagcggcaagtttaccggaaccgtgcatctatcgagcggcaag

SEQ ID NO: 51546 - DNA, 75 bp, synthetic construct
  source 1..75: mol_type = other DNA
attcctttgtacgtcaaaagaaaggtacgaacagcataaacgcaaaaacagcagcaaaaagaaaaacggttctgg

SEQ ID NO: 51547 - DNA, 75 bp, synthetic construct
  source 1..75: mol_type = other DNA
agaaagaatgtggaaattaatgaacgaacatgcccggaataatcgctacttcagcagtacgcgagagttcaggga

SEQ ID NO: 51548 - DNA, 75 bp, synthetic construct
  source 1..75: mol_type = other DNA
cttcgaacgtctgatggaaggtgctaaactgctgaaatgttcagagtttggtgacgcgatcatcaagaatatgta

SEQ ID NO: 51549 - DNA, 75 bp, synthetic construct
  source 1..75: mol_type = other DNA
atgtcatctgaaaaactgtattccccactgaaagtgggcgcaataactgcggcaaaccgtatttttatggcaccg

SEQ ID NO: 51550 - DNA, 75 bp, synthetic construct
  source 1..75: mol_type = other DNA
atgcatggtcttaacaaagacatcatctttccgttgcagatcttcgccctttcaaataacgtactttacaacttt

SEQ ID NO: 51551 - DNA, 75 bp, synthetic construct
  source 1..75: mol_type = other DNA
gacgcaatgaaacggcttaatttaggggacgtttctcgtgtagttcaggagggcattgctcaacaggaacagcag

SEQ ID NO: 51552 - DNA, 75 bp, synthetic construct
  source 1..75: mol_type = other DNA
gcagcagcaccacgggcggtgaaaccacaccgcgtgcggtgaaagtcggtaaaggtggcgaatatgccaacctgg

SEQ ID NO: 51553 - DNA, 75 bp, synthetic construct
  source 1..75: mol_type = other DNA
tatcactctgggcgttcaggccggttatgcccacagtgtcagcggcaacagcgctgaaggctataacggtcaggc

SEQ ID NO: 51554 - DNA, 75 bp, synthetic construct
  source 1..75: mol_type = other DNA
gcagaaacactgcgtccagtctggttaaccttgtcagaaacggcaagccgggttaaacagcgcattcatgttgtt

SEQ ID NO: 51555 - DNA, 75 bp, synthetic construct
  source 1..75: mol_type = other DNA
cgatctggcgggttataccggaagtataatcactaagacagctactcagatcattatgttaaccggcgtacgaac

SEQ ID NO: 51556 - DNA, 75 bp, synthetic construct
  source 1..75: mol_type = other DNA
gcacgtaatattaaagctgccgggctggcagtgttagcccacggagagcctgtaaaccctgaatcgcagcacgcg

SEQ ID NO: 51557 - DNA, 75 bp, synthetic construct
  source 1..75: mol_type = other DNA
ataacccagtatctccaggcgctgatctccaccattcctggcaccgtccatcaggtgccgtactgccacgaagat

SEQ ID NO: 51558 - DNA, 75 bp, synthetic construct
  source 1..75: mol_type = other DNA
atgaaagatttaactttgaaatttcctggtaacagagagtttaaatccttcctgtcatctcttgactgggaggag

SEQ ID NO: 51559 - DNA, 75 bp, synthetic construct
  source 1..75: mol_type = other DNA
tatgcgctgggaagatgtcagcgatgacctgaaggtgaccgccgggagtgttattcagcgcgatgacctggttca

SEQ ID NO: 51560 - DNA, 75 bp, synthetic construct
  source 1..75: mol_type = other DNA
gggcaaactgcaggtgaatgccggtggtgtcgctgttgatgttactcagaatcagggaggggcactggttaccag

SEQ ID NO: 51561 - DNA, 75 bp, synthetic construct
  source 1..75: mol_type = other DNA
aaattgaagcccattacgatggtggtgagtgggatttttatgaactttcaaatggtggttattttatggcaccaa

SEQ ID NO: 51562 - DNA, 75 bp, synthetic construct
  source 1..75: mol_type = other DNA
gcggcattgttaccggaacggctggaaaaagtttgccagtggttaaacagccatgaagggtatattcacccgtta

SEQ ID NO: 51563 - DNA, 75 bp, synthetic construct
  source 1..75: mol_type = other DNA
gtgaaaacaacttctggtcaaaaaggtatttcaggaaaagatatcaaatcccaagttgttttattacctccagta

SEQ ID NO: 51564 - DNA, 75 bp, synthetic construct
  source 1..75: mol_type = other DNA
cttcatttcatgcgtggagttatcccaacgacggaaatgaaaaaatattgtagtgaaagttgcgccgaaaaacac

SEQ ID NO: 51565 - DNA, 75 bp, synthetic construct
  source 1..75: mol_type = other DNA
tctgaatgttgaaggcgctgttaaagaagccgctattgccgctctcgctgcaaaaggtttccagatggctggttt

SEQ ID NO: 51566 - DNA, 75 bp, synthetic construct
  source 1..75: mol_type = other DNA
caacctgcacgcagctaatcacgccgcagctatcaccacgctcgaatccaaagggttcgtatgccgtccattctt

SEQ ID NO: 51567 - DNA, 75 bp, synthetic construct
  source 1..75: mol_type = other DNA
tgagtgaactgccggtgaactggtgggtacagccttctgttatccgcaccttcagctcccggggagacatgagca

SEQ ID NO: 51568 - DNA, 75 bp, synthetic construct
  source 1..75: mol_type = other DNA
atggcgggcattaatctcaataaaaaattatggcgtattccacagcagggcatggtccgcggcgtctgcgccggg

SEQ ID NO: 51569 - DNA, 75 bp, synthetic construct
  source 1..75: mol_type = other DNA
attcctttccggtggaaaagcggctggtggaaaattatccaccccgcgcctggcaggtgcagtatggtgaaaccg

SEQ ID NO: 51570 - DNA, 75 bp, synthetic construct
  source 1..75: mol_type = other DNA
ggtgaacgccggcaacagtggtacggggctggcgaccaccggtaagggtattcaggtggttgaggccattaacgg

SEQ ID NO: 51571 - DNA, 75 bp, synthetic construct
  source 1..75: mol_type = other DNA
accattaaacatggcggactggcaaccggaaccatcgtcaacaccggtgcagaaggtggtccggattctgaaaat

SEQ ID NO: 51572 - DNA, 75 bp, synthetic construct
  source 1..75: mol_type = other DNA
cggcaatgcggctacagcaacaaagctgaaaacggcaaggacaattaacggcgtaaaatttgacggctcggcaaa

SEQ ID NO: 51573 - DNA, 75 bp, synthetic construct
  source 1..75: mol_type = other DNA
atggtggtttatccccgctggcgcggggaactcttttgtgccctggcgttttgctggctctcgcgcggtttatcc

SEQ ID NO: 51574 - DNA, 75 bp, synthetic construct
  source 1..75: mol_type = other DNA
gggctggactgaagccgcagacctgattgttaaaggtatggaaggcgcaatcaacgccaagaccgtaacctatga

SEQ ID NO: 51575 - DNA, 75 bp, synthetic construct
  source 1..75: mol_type = other DNA
atgagcaccatcattttaatggagccacgccgcgcggctgattgcgggcaacaactgaaattcattgctgacgcc

SEQ ID NO: 51576 - DNA, 75 bp, synthetic construct
  source 1..75: mol_type = other DNA
aagaagttcattctcggcagagacatacagggatgaatttgaccgttttataaagcgttttccgattattggtag

SEQ ID NO: 51577 - DNA, 75 bp, synthetic construct
  source 1..75: mol_type = other DNA
atgacggtaacctgtgcgatttcctgatgaatgacaaatgcgcggcgggcaccgggcgtttcctggaggtgatct

SEQ ID NO: 51578 - DNA, 75 bp, synthetic construct
  source 1..75: mol_type = other DNA
atgttacttcctgtaattatggctggtggtaccggcagtcgtctctggccgatgtctcgcgagctttacccgaaa

SEQ ID NO: 51579 - DNA, 75 bp, synthetic construct
  source 1..75: mol_type = other DNA
ctgacacaggcaatggactatgaccggattctggcaggctcccgcagccatcagaccggtgtaagcggtgaaaat

SEQ ID NO: 51580 - DNA, 75 bp, synthetic construct
  source 1..75: mol_type = other DNA
ctgacagcgttgtacagcagctttcagggcaatcacggtaccgggttcatgtgcatgaatgcagccattttctgg

SEQ ID NO: 51581 - DNA, 75 bp, synthetic construct
  source 1..75: mol_type = other DNA
aatgctggataggggtttaaaattaagctcccgcttactggatgaatatttctcatcagctaacaaatcttttaa

SEQ ID NO: 51582 - DNA, 75 bp, synthetic construct
  source 1..75: mol_type = other DNA
ttaaacagcgtgataaataccatgctgacaacatggagacgatgaatatcactgattaccgcgcatttctggaaa

SEQ ID NO: 51583 - DNA, 75 bp, synthetic construct
  source 1..75: mol_type = other DNA
aatatgttgacctcggcggcgtagccggtactgtgctgagtgtgcagattttctccaccaccatgcgtactgcag

SEQ ID NO: 51584 - DNA, 75 bp, synthetic construct
  source 1..75: mol_type = other DNA
ataataaacaaaagttgggcttgcttgcgctaacatccattgtcgtgagctcgatgatcggcagcggcgttgacg

SEQ ID NO: 51585 - DNA, 75 bp, synthetic construct
  source 1..75: mol_type = other DNA
tgcaatcttatggatttactgaatccgccggcgactggtcgctgggcttatcagatgccattctgttcgcaaaaa

SEQ ID NO: 51586 - DNA, 75 bp, synthetic construct
  source 1..75: mol_type = other DNA
ttcaccaaacgcctggagcggggccgcttcgtctggccagtcacccgtgacggcaaggtgcaccttactccggct

SEQ ID NO: 51587 - DNA, 75 bp, synthetic construct
  source 1..75: mol_type = other DNA
attcttttagccactttattttaatgcgtatcggtctgggtattggcgaagcgccatttatgcctgcgggagtaa

SEQ ID NO: 51588 - DNA, 75 bp, synthetic construct
  source 1..75: mol_type = other DNA
aaaagaatatgatacttgatacaatatggggatggagtgattcatcaattacatgggaacaactttgtgaggaat

SEQ ID NO: 51589 - DNA, 75 bp, synthetic construct
  source 1..75: mol_type = other DNA
gtaaaatggcgggattttttgctgttcagctttgattatcaacaggcgcaggcaagcggtttgcatacgagatgg

SEQ ID NO: 51590 - DNA, 75 bp, synthetic construct
  source 1..75: mol_type = other DNA
gacaatcctcgtgttcaggaaatggtggataactggcagaagagtgcaaggagtcgtgcgctcccggaagaggcg

SEQ ID NO: 51591 - DNA, 75 bp, synthetic construct
  source 1..75: mol_type = other DNA
aattcaatgcatataaatacgatataaaggaacatcaattggaagaggagttgccaaaaatagatcgtagaaatg

SEQ ID NO: 51592 - DNA, 75 bp, synthetic construct
  source 1..75: mol_type = other DNA
cgttattgtctcctggctgggtgggcgcggcgtgacgttaatgggcagccagccgcaactggtcgccgggctgct

SEQ ID NO: 51593 - DNA, 75 bp, synthetic construct
  source 1..75: mol_type = other DNA
tttcgaagaatggagttatcggaaatggcccagatattccatggagtgccaaaggggaacaattactcttcaaag

SEQ ID NO: 51594 - DNA, 75 bp, synthetic construct
  source 1..75: mol_type = other DNA
caattgaaaaaccactttcttccctgccttactcgctttcccgtcacatcctggaacatctgcgcaaactcacca

SEQ ID NO: 51595 - DNA, 75 bp, synthetic construct
  source 1..75: mol_type = other DNA
acgaaggcgaaacattcaatgaatgtccacttagctggggaatgagcgtcgaacagtacgtttccgagtttcgca

SEQ ID NO: 51596 - DNA, 75 bp, synthetic construct
  source 1..75: mol_type = other DNA
tcagctcggccggacaagcccgttccgccggatacggatattgccgacccgcaggcagacaacttgccacccgcc

SEQ ID NO: 51597 - DNA, 75 bp, synthetic construct
  source 1..75: mol_type = other DNA
ataaacataaataacgtgatgttattatgtgctttcaaagaaaacgcaggtatttttcgcacaaacttctctcgc

SEQ ID NO: 51598 - DNA, 75 bp, synthetic construct
  source 1..75: mol_type = other DNA
tgatgcaggaatggcaggcaaaacaaaggcgaccacgaaagggtcgccagtggagataaaggaaatcaagcgcat

SEQ ID NO: 51599 - DNA, 75 bp, synthetic construct
  source 1..75: mol_type = other DNA
aacctgcgccagggcgatgtggttattggtgacaggattggcatcggtaatgagaacaatctgggtgaaaaatca

SEQ ID NO: 51600 - DNA, 75 bp, synthetic construct
  source 1..75: mol_type = other DNA
ctccggcgcacgctgacccgcaccggctttgtcatcgaccacatccactactacgccgatgggcactgttgcaaa

SEQ ID NO: 51601 - DNA, 75 bp, synthetic construct
  source 1..75: mol_type = other DNA
tgtatattgcagtcaaaccagacgtacatcttgatcatattcttttcggcgacatgctcgggataaccatcggcg

SEQ ID NO: 51602 - DNA, 75 bp, synthetic construct
  source 1..75: mol_type = other DNA
tccggctctgtctggtcagggaacggggtcaacctgctcgctgacgcttcgccacggcaccctcacactcgacaa

SEQ ID NO: 51603 - DNA, 75 bp, synthetic construct
  source 1..75: mol_type = other DNA
aaacggctggcccgcaaaacgctctgtttttcacgttctgttgagctccatgaaaaagtcatcggggcattcatc

SEQ ID NO: 51604 - DNA, 75 bp, synthetic construct
  source 1..75: mol_type = other DNA
cagggggctgtggcagtacgccctcgacttcgcgactgaaagcgtctttatcgaagacagcgatttaccgtccgg

SEQ ID NO: 51605 - DNA, 75 bp, synthetic construct
  source 1..75: mol_type = other DNA
ctgggacccgccggatattttctaatgaatttaagcttcatatggttgaactggcttcgaaaccaaatgccaatg

SEQ ID NO: 51606 - DNA, 75 bp, synthetic construct
  source 1..75: mol_type = other DNA
ctggagggtactttacgtgttgtggggtactactcattagctaccggttccgtcactcatgccgaacttgggcgc

SEQ ID NO: 51607 - DNA, 75 bp, synthetic construct
  source 1..75: mol_type = other DNA
ttcatcaccagaagctcttgataccctgaatgagcttgccgcagcacttggcaatgacccgaactttgcgacaac

SEQ ID NO: 51608 - DNA, 75 bp, synthetic construct
  source 1..75: mol_type = other DNA
ttctgcttacgggaatgtgcttcatcttaagggcgcaacggcagttggtgaaggtgagttgttcataggttggag

SEQ ID NO: 51609 - DNA, 75 bp, synthetic construct
  source 1..75: mol_type = other DNA
ctgtccctcggcgtctatcccgatgtttcccttgctgaagccagaatcaaacgcgacgatgcccgaaaaattatc

SEQ ID NO: 51610 - DNA, 75 bp, synthetic construct
  source 1..75: mol_type = other DNA
atcagtctggttcagttcgttgccatacctgcaatgagcgcgtttccctgtactctttaaggaattgctcaaggg

SEQ ID NO: 51611 - DNA, 75 bp, synthetic construct
  source 1..75: mol_type = other DNA
tgcaatcattggaatgctggaggaatatctggaggcgcttatcaatgtaagaaatgtcgcccggcagcgtagagc

SEQ ID NO: 51612 - DNA, 75 bp, synthetic construct
  source 1..75: mol_type = other DNA
ccgtcaggaaatgaaactgcttccagctccccttcctggtattacgtggtggttcttgctggtcagtcaaacggt

SEQ ID NO: 51613 - DNA, 75 bp, synthetic construct
  source 1..75: mol_type = other DNA
tttgcgtttaactggctctatgagcataaagaggcgattgaaaatacctttggtcaggcgctgaaatgggagccg

SEQ ID NO: 51614 - DNA, 75 bp, synthetic construct
  source 1..75: mol_type = other DNA
ctgccagtggtctccctcggcctgaaatccgccccggcgatattttccgggataactacggtggcacggtaacga

SEQ ID NO: 51615 - DNA, 75 bp, synthetic construct
  source 1..75: mol_type = other DNA
ctggggacctcacccttaccaagggtgcgctctaccaactgagccatatcagcacgctaaatttgatgcctggca

SEQ ID NO: 51616 - DNA, 75 bp, synthetic construct
  source 1..75: mol_type = other DNA
aatcatttgcctgactactgcaatgatccgagcgcttcatggccgattattgagaaatacaggatttctatctta

SEQ ID NO: 51617 - DNA, 75 bp, synthetic construct
  source 1..75: mol_type = other DNA
agaacgggttcgtcaaatttatattgcaactggggtgactcctcatgaattgcgaccagatttatacccgaatcc

SEQ ID NO: 51618 - DNA, 75 bp, synthetic construct
  source 1..75: mol_type = other DNA
ctatacggagccacaattcttggcgatggagttgtgcacaatagcttcggtcaaaaactgatgcgcatttacaat

SEQ ID NO: 51619 - DNA, 75 bp, synthetic construct
  source 1..75: mol_type = other DNA
cagatgatggggctaaaatttacacaccacttaccctaaagctttatgactggtgggttttgggagtatcaaatc

SEQ ID NO: 51620 - DNA, 75 bp, synthetic construct
  source 1..75: mol_type = other DNA
tttgtccagcacagtaaatatccaactaaaccaatggagttcgctgtatttaccgccagtattcaatgcacatga

SEQ ID NO: 51621 - DNA, 75 bp, synthetic construct
  source 1..75: mol_type = other DNA
gttgccgttgtttttgcgcttttcgccgcttttcccatgttttccgacgtcagcattcagttgcgtcactttatt

SEQ ID NO: 51622 - DNA, 75 bp, synthetic construct
  source 1..75: mol_type = other DNA
atatctggctcactttaattaccctcacctttctggaaattattcttggggtggataatattatttttctttcac

SEQ ID NO: 51623 - DNA, 75 bp, synthetic construct
  source 1..75: mol_type = other DNA
cgacatggtgaaactccatgaacagcagctgaagcggttgcgtgaaagtgaaatccgccagcagcttatccggga

SEQ ID NO: 51624 - DNA, 75 bp, synthetic construct
  source 1..75: mol_type = other DNA
ccctcatttacgccggtggtgaccagacggtacacggagaggcacataacacccgactggaggggggtaaccagt

SEQ ID NO: 51625 - DNA, 75 bp, synthetic construct
  source 1..75: mol_type = other DNA
atgaccgccgttggggcgtgcgggctgatcgtcaccgcgttattgttgatgtactccatcgatagcgcgttgaat

SEQ ID NO: 51626 - DNA, 75 bp, synthetic construct
  source 1..75: mol_type = other DNA
aagtttttcagatgctgcggcagcggcaaaagcggagcttaagctgattgcggagaaggtgaagaaggggtatgt

SEQ ID NO: 51627 - DNA, 75 bp, synthetic construct
  source 1..75: mol_type = other DNA
cgccgcgtggagatgtatcgggagaaggagaaaatcacgtaccactggaagaagccggaacggttgcggcggtaa

SEQ ID NO: 51628 - DNA, 75 bp, synthetic construct
  source 1..75: mol_type = other DNA
atgcacgatcccatagtaatggaagcccgggcggagttaacttcggcacaatcccgcatagagcaggcaagctct

SEQ ID NO: 51629 - DNA, 75 bp, synthetic construct
  source 1..75: mol_type = other DNA
aaaacccgctgctgcaggatgtgaacaaaggctggctgcaaaaaattcgtgaggatgcaccggatcacgtaatgg

SEQ ID NO: 51630 - DNA, 75 bp, synthetic construct
  source 1..75: mol_type = other DNA
ttccgcgctgccgctgtttatctacagcctggtctatttcgctatcgttattctggtttcgctctatccgggcaa

SEQ ID NO: 51631 - DNA, 75 bp, synthetic construct
  source 1..75: mol_type = other DNA
tgtcatggaggccatgaagcatgtcaatgaatggctgggaagcgaggtaatgcgctttaacccctatgcgttgct

SEQ ID NO: 51632 - DNA, 75 bp, synthetic construct
  source 1..75: mol_type = other DNA
cccgagccgagttaaattctgcacaatcccgcacagagcaggctcgttctgcacattggccggttatcactgcta

SEQ ID NO: 51633 - DNA, 75 bp, synthetic construct
  source 1..75: mol_type = other DNA
acgtaccgctctcttatcgtacgctggtgtttatcctcggcggcttctcgatggtggtttctaacctcggcttaa

SEQ ID NO: 51634 - DNA, 75 bp, synthetic construct
  source 1..75: mol_type = other DNA
tgctgctgtcacgtcagtcccggcactggctgctgacacggttgtacaggcgggagaaaccgtgagcggcggaac

SEQ ID NO: 51635 - DNA, 75 bp, synthetic construct
  source 1..75: mol_type = other DNA
aacagaagcttcgaagttgctgtgttcccggcaggaaaaatgggcaatacccgatccgctagtcttacttcagca

SEQ ID NO: 51636 - DNA, 75 bp, synthetic construct
  source 1..75: mol_type = other DNA
cgatatgtatgttgaattactggtcgttagtttcctggtggtacttgccctgccctttattctctatgctgttca

SEQ ID NO: 51637 - DNA, 75 bp, synthetic construct
  source 1..75: mol_type = other DNA
aatcaatggcgctcctatcgtgtcgaacccggtaaaacgatggcgcagctgttccgcgaccacggactgcccgct

SEQ ID NO: 51638 - DNA, 75 bp, synthetic construct
  source 1..75: mol_type = other DNA
gatgtactggagagccattcagcacagaataccctggtggatgacggcggtaccctggcagtgtctgccggcggt

SEQ ID NO: 51639 - DNA, 75 bp, synthetic construct
  source 1..75: mol_type = other DNA
gaaccagagtccttgagttgctggcataccgtcgccgttctcaacaacggagggagagcgcgaaaaatacttacc

SEQ ID NO: 51640 - DNA, 75 bp, synthetic construct
  source 1..75: mol_type = other DNA
ctggatgcgtgactgccattcttcagatgataaaggcgtcattgcaattgatggaaaaacgctccggcactctta

SEQ ID NO: 51641 - DNA, 75 bp, synthetic construct
  source 1..75: mol_type = other DNA
ataccgtcgccgcgtggagatgtatcgggagaaggagaaaatcacgtatcactggaagaagccggagcggttacg

SEQ ID NO: 51642 - DNA, 75 bp, synthetic construct
  source 1..75: mol_type = other DNA
cgcgagggtatgccgccgcgtgaaggtggtgatgagttcagccaggcatggaaacagactgtggaaattaaaggg

SEQ ID NO: 51643 - DNA, 75 bp, synthetic construct
  source 1..75: mol_type = other DNA
atgagtccgctacgctgtttcgccgcaagtattaccagaacggcgcgcacgcggggtacatcatgtacgtcaccg

SEQ ID NO: 51644 - DNA, 75 bp, synthetic construct
  source 1..75: mol_type = other DNA
tgcatccgggatctcgtttgatggagacccaccgacatttcatgaactacgtagtctgtccgcgaggctatatcg

SEQ ID NO: 51645 - DNA, 75 bp, synthetic construct
  source 1..75: mol_type = other DNA
aaaggcagttcattcacgctgaacgccggtgatacggccacggataccacggtaaatggcggactgttcaccgcc

SEQ ID NO: 51646 - DNA, 75 bp, synthetic construct
  source 1..75: mol_type = other DNA
ggtgtatgtcaacggcacaaaaaataaagggctggagaaccgccgtgcgcgggagcgggcttactgcgtaaaggg

SEQ ID NO: 51647 - DNA, 75 bp, synthetic construct
  source 1..75: mol_type = other DNA
ggattcagacaatggattttctgcacttgaacaggcgctgctgcggtatatcgccgccggtcttggcgtttccta

SEQ ID NO: 51648 - DNA, 75 bp, synthetic construct
  source 1..75: mol_type = other DNA
atggatcatagtcttaattctttaaataatttcgatttcctggcgcgtagttttgccagaatgcacgcagaaggt

SEQ ID NO: 51649 - DNA, 75 bp, synthetic construct
  source 1..75: mol_type = other DNA
ctggctgctgacacggttgtccaggcgggagaaaccgtgaacggtggaacactggaaaatcatgacaaccagatt

SEQ ID NO: 51650 - DNA, 75 bp, synthetic construct
  source 1..75: mol_type = other DNA
ggccggttatgcccacagcgtcagcggcagcagcgctgaaggttataacggtcaggccacgctgaatgtgacttt

SEQ ID NO: 51651 - DNA, 75 bp, synthetic construct
  source 1..75: mol_type = other DNA
ccaattataaactgggcggtgcacagcaacacgatagcgtacgcctcgatccgtgggtgtttatgttctcagcag

SEQ ID NO: 51652 - DNA, 75 bp, synthetic construct
  source 1..75: mol_type = other DNA
ctggctgctgacacggttgtacaggctggagaaaccgtgaacggcggaacactgacaaatcatgacaaccagatt

SEQ ID NO: 51653 - DNA, 75 bp, synthetic construct
  source 1..75: mol_type = other DNA
cgtgcgaaaacctctaaccgtagcgaaaacccgctactgcaggatgtgaataaaggctggctgcagaaaatccgt

SEQ ID NO: 51654 - DNA, 75 bp, synthetic construct
  source 1..75: mol_type = other DNA
aatgatgcggatatgcgcgacatacggatccgcgttctggaaatgctggcctacaatcgccgcgttgaactgtat

SEQ ID NO: 51655 - DNA, 75 bp, synthetic construct
  source 1..75: mol_type = other DNA
ctacaatcgccgtgtagagatgtacagggagaaagagaaaattacgtacaactggaagaagccggagcggttacg

SEQ ID NO: 51656 - DNA, 75 bp, synthetic construct
  source 1..75: mol_type = other DNA
atgccaacaccaaatcccctggcgccggtaaaaggtgccggtaccactctgtgggtttacaccggcaagggtgat

SEQ ID NO: 51657 - DNA, 75 bp, synthetic construct
  source 1..75: mol_type = other DNA
atagatgggtttaatgttgacttagatgaggtgaaatacttttcactaaatgattacaaggaagatttatcctcc

SEQ ID NO: 51658 - DNA, 75 bp, synthetic construct
  source 1..75: mol_type = other DNA
tctcctgatctgtgggaagaaggaataaatgcagggctactaaactatagttttaatggtaattctattaataac

SEQ ID NO: 51659 - DNA, 75 bp, synthetic construct
  source 1..75: mol_type = other DNA
caagccgctgtagaaaacgatatacaggcagtggacaaacttttgaataagctcactgggggcgcgcccccggga

SEQ ID NO: 51660 - DNA, 75 bp, synthetic construct
  source 1..75: mol_type = other DNA
gatgttaatcctgaagaacggtggattgatttatgctctgaaggcagcaagacacatcatgagtggcggatcccg

SEQ ID NO: 51661 - DNA, 75 bp, synthetic construct
  source 1..75: mol_type = other DNA
gtgcgtgaactgccggtgaactggtgggtacagccttccgttatccgcaccttcagctcccggggtgatatgcgt

SEQ ID NO: 51662 - DNA, 75 bp, synthetic construct
  source 1..75: mol_type = other DNA
tgcgtgggatgatgccgcgcgttgtgacatccatgctgcccgagcattccgctgtactggcggaggactgccatt

SEQ ID NO: 51663 - DNA, 75 bp, synthetic construct
  source 1..75: mol_type = other DNA
tcagttccgcattgctgaccgcgaagcgtatacgggggtacgcgcttactggcttgatcttaattacgggaaaaa

SEQ ID NO: 51664 - DNA, 75 bp, synthetic construct
  source 1..75: mol_type = other DNA
aacatggggtgtgacgtatcacgagggcaggaacgggaaatttctggtgttgccgtccggggtgaagggggaaaa

SEQ ID NO: 51665 - DNA, 75 bp, synthetic construct
  source 1..75: mol_type = other DNA
tgcagatgataataatgcagaactcatcccatgcctgagtacagatcttcttgtcagtcttggtataaaaaaatc

SEQ ID NO: 51666 - DNA, 75 bp, synthetic construct
  source 1..75: mol_type = other DNA
aatttatggtaaaagacattaataaatatctggatgatatcactctgaacgccatcacagtggatggcaaaacta

SEQ ID NO: 51667 - DNA, 75 bp, synthetic construct
  source 1..75: mol_type = other DNA
caacggcggtattgcccgtggggccacgccggaaagcagcggcagctatggcttcgtccgtctggagggtgacct

SEQ ID NO: 51668 - DNA, 75 bp, synthetic construct
  source 1..75: mol_type = other DNA
ctgaataacagaggcgagcagtgggtgcatgagggcggggttgccaccggtacaattatcaaccgcgacggttac

SEQ ID NO: 51669 - DNA, 75 bp, synthetic construct
  source 1..75: mol_type = other DNA
ctgtcgttgaagaagatgggcatattggtcatagcgctatccttcacggctgcaatatccgccgcaatgcattag

SEQ ID NO: 51670 - DNA, 75 bp, synthetic construct
  source 1..75: mol_type = other DNA
ggaaatccctttgactgatgacgaacaagccgctgtagaaaacgatatacaggcagtggacaaacttttgaataa

SEQ ID NO: 51671 - DNA, 75 bp, synthetic construct
  source 1..75: mol_type = other DNA
tgactctcttgattgtattgttaccattgatagttaatgctaataatattgactctcatttattagaacaaaatg

SEQ ID NO: 51672 - DNA, 75 bp, synthetic construct
  source 1..75: mol_type = other DNA
atccgcatttgtgaaagccaaagcagaaatgcctgctaattacctgattgtcggcagcccggcgaaagcgattcg

SEQ ID NO: 51673 - DNA, 75 bp, synthetic construct
  source 1..75: mol_type = other DNA
gcagaatgtctggagaaaaaaggactgtaccggagagcagctgaacgatgggcaaaagtgatggtacagctaagt

SEQ ID NO: 51674 - DNA, 75 bp, synthetic construct
  source 1..75: mol_type = other DNA
atgtctaagatttttgatttcgtaaaacctggcgtaatcactggtgatgacgtacagaaagttttccaggtagca

SEQ ID NO: 51675 - DNA, 75 bp, synthetic construct
  source 1..75: mol_type = other DNA
cgcgagttgggccgcatcgagcgcacgctgttcatcctcgactggctgcaaagcgtcgagctacgccgccgcgtg

SEQ ID NO: 51676 - DNA, 75 bp, synthetic construct
  source 1..75: mol_type = other DNA
tctgaccgatgccgaccgctacccacagctcaatggcgagggcagcggcagctggagcggcaatcttaaaggcga

SEQ ID NO: 51677 - DNA, 75 bp, synthetic construct
  source 1..75: mol_type = other DNA
gccaggatgccctgaagaagcgccgagaaaaagccgcagccagcaagcgtgccaaccgcctgaagaaattacctg

SEQ ID NO: 51678 - DNA, 75 bp, synthetic construct
  source 1..75: mol_type = other DNA
gggcatacgagcagcgacagcatgaaaaagagctggcagaaccccgtttccgtcagcggagctataacggtccga

SEQ ID NO: 51679 - DNA, 75 bp, synthetic construct
  source 1..75: mol_type = other DNA
ctgaatggtggcgaacagtggatgcatgagggggcgatagccacaggaaccgtcattaatgataagggctggcag

SEQ ID NO: 51680 - DNA, 75 bp, synthetic construct
  source 1..75: mol_type = other DNA
tccgaagacagcgcctggcgagagatccttgattatttcagttccgccacccaaattggcttaaccgccacgcca

SEQ ID NO: 51681 - DNA, 75 bp, synthetic construct
  source 1..75: mol_type = other DNA
tgatcccggtctgcgccgacgcgtgcaggcggggctgaataagggtgaggcccgtaatgcccttgcgcgagcggt

SEQ ID NO: 51682 - DNA, 75 bp, synthetic construct
  source 1..75: mol_type = other DNA
agcaaggggaaggttattccggaactggaagtgacggtctcccgcctttcccgtttgctggccgaacaggtacgt

SEQ ID NO: 51683 - DNA, 75 bp, synthetic construct
  source 1..75: mol_type = other DNA
caaaattgcttgagcaaaatgttaaaatgatagtgcctagtttatacttgaaaaagtattaccaatcttatttag

SEQ ID NO: 51684 - DNA, 75 bp, synthetic construct
  source 1..75: mol_type = other DNA
atctcggtcacgataacaacggcggtattgcccgtggggccacgccggaaagcagcggcagctatggcttcgtcc

SEQ ID NO: 51685 - DNA, 75 bp, synthetic construct
  source 1..75: mol_type = other DNA
gcagacgttgcatcaagttgagccattgcgggaagttgaaccgaacaggaaacgtctggtatttgatgagaatct

SEQ ID NO: 51686 - DNA, 75 bp, synthetic construct
  source 1..75: mol_type = other DNA
agaggcgatgatgcagcacaggaaggacgtgttaaagctggcagggaatacgggcatgatgttactggggatagt

SEQ ID NO: 51687 - DNA, 75 bp, synthetic construct
  source 1..75: mol_type = other DNA
aagaaatactacgatccgcgcgtatggctgcgtgccggtcagacttctatgatcgctcgtctggaaaaagcattc

SEQ ID NO: 51688 - DNA, 75 bp, synthetic construct
  source 1..75: mol_type = other DNA
aacgggcggtggtatgaaaccccggtggactggtacggtctggcaagagccgcccggcaaacgtcctggcatcag

SEQ ID NO: 51689 - DNA, 75 bp, synthetic construct
  source 1..75: mol_type = other DNA
atccagtttgccagcgaagtgatgctggcccgctgcgaactgaccagcgaggaccaggccgcagacgcggcactg

SEQ ID NO: 51690 - DNA, 75 bp, synthetic construct
  source 1..75: mol_type = other DNA
aaatcagcggaggtgattccctttcaggggaaagagtgggtacatctgaaggagtgacacagagtgacagagctg

SEQ ID NO: 51691 - DNA, 75 bp, synthetic construct
  source 1..75: mol_type = other DNA
gcaaaaaagccaaaaccaacgcgatgcgcgtggtcgttttattggaaagtcagggagtaaggccgcagcggaaga

SEQ ID NO: 51692 - DNA, 75 bp, synthetic construct
  source 1..75: mol_type = other DNA
aaacgataaaggctatgatggaataattcatactctgcaaaaacggggttttcgttgcgaacgtattgcgccaga

SEQ ID NO: 51693 - DNA, 75 bp, synthetic construct
  source 1..75: mol_type = other DNA
aggacaggtacaaggggaatacgtggagttgagcgacggcactttatcgtggttagggaacgccttgttctggat

SEQ ID NO: 51694 - DNA, 75 bp, synthetic construct
  source 1..75: mol_type = other DNA
gtcaaatcactatacagcgcgatgaacttctgaaactgatttataccaataccctgcaggatgcagcaatgaatc

SEQ ID NO: 51695 - DNA, 75 bp, synthetic construct
  source 1..75: mol_type = other DNA
aaggggattattaacgcttcaggacggtgcgattgtcagtcataaccactattggggaatctggacttcacgaac

SEQ ID NO: 51696 - DNA, 75 bp, synthetic construct
  source 1..75: mol_type = other DNA
tatataacgagtacttttttgatctgcggaagtcatttttcgtgagcgttaaagatctgatggcctctggcacaa

SEQ ID NO: 51697 - DNA, 75 bp, synthetic construct
  source 1..75: mol_type = other DNA
cagaaaagaagaaaaataccgggaaagagatgtttgtgggggttacccgggtactgagtgataatgaatcaaagg

SEQ ID NO: 51698 - DNA, 75 bp, synthetic construct
  source 1..75: mol_type = other DNA
gtgttaattcgtcgtttacgtcataaactcagcgcggatttactggtgacgcaacatggtgaaggttatttctta

SEQ ID NO: 51699 - DNA, 75 bp, synthetic construct
  source 1..75: mol_type = other DNA
ggccttcagtggaaggtgacgcactccctttttttgccgagcccgttgcggccggctttcccagcccggccgcag

SEQ ID NO: 51700 - DNA, 75 bp, synthetic construct
  source 1..75: mol_type = other DNA
gcgagtgggcacaagcccaacaaaccgtgcggcggccaagctgttattgctgacgatggtgcgcaagagcgagct

SEQ ID NO: 51701 - DNA, 75 bp, synthetic construct
  source 1..75: mol_type = other DNA
cgagctgtcgggcaactatccggtaactccggatggttggataagctgtagtgagcgaatgcccgctcaagatga

SEQ ID NO: 51702 - DNA, 75 bp, synthetic construct
  source 1..75: mol_type = other DNA
ctggatagtgaggctttattgtttgtaatgagaacgcgttcaaaacaaaaggcggcattttcaaagcaaagtgtt

SEQ ID NO: 51703 - DNA, 75 bp, synthetic construct
  source 1..75: mol_type = other DNA
acgagatttatcgtcgccagcgggagatgaaggaagagctgaataatatggcggatttgaagtcggtgaggaatt

SEQ ID NO: 51704 - DNA, 75 bp, synthetic construct
  source 1..75: mol_type = other DNA
cggcggcgatgattacccgtaaagccggtccggcgctggcggcaggctgcacgatggtgctgaagcccgccagtc

SEQ ID NO: 51705 - DNA, 75 bp, synthetic construct
  source 1..75: mol_type = other DNA
gtaccagaaaaatagcggggaaaacgcaggaacgcctgaagaggttgatctggctggctgtacaggatgtgaaga

SEQ ID NO: 51706 - DNA, 75 bp, synthetic construct
  source 1..75: mol_type = other DNA
tatcaaagatgcggagacttttggtgcgtgggctgagaaatggttacgcggttatcaaatggctgaatcgacgcg

SEQ ID NO: 51707 - DNA, 75 bp, synthetic construct
  source 1..75: mol_type = other DNA
ccaacggataaaccaaacctggtgtgcggtccggtacaaatctgctggcataaattcgcccgctactgggatgtg

SEQ ID NO: 51708 - DNA, 75 bp, synthetic construct
  source 1..75: mol_type = other DNA
ggcagtctacaacaaagctgaatatcgagagcaaagagcatcaatgctacaggattgggctgatatgatagatga

SEQ ID NO: 51709 - DNA, 75 bp, synthetic construct
  source 1..75: mol_type = other DNA
aaagcctctcaagcgtctcaaagtgcatccgctgcagagtcctcaaaaagcgcggcggccaccagtgccggtgcc

SEQ ID NO: 51710 - DNA, 75 bp, synthetic construct
  source 1..75: mol_type = other DNA
cagctatttagtgggcacaaaactgaatcacaagtcatggtttatgatagaaaaatacgcatcacaccaacatta

SEQ ID NO: 51711 - DNA, 75 bp, synthetic construct
  source 1..75: mol_type = other DNA
aagcgcggcgtttcagaagtcctaatcgcccgagcattacggcaactggatcgagccgcaagcctcggtgaaggc

SEQ ID NO: 51712 - DNA, 75 bp, synthetic construct
  source 1..75: mol_type = other DNA
atgcgccccggtcagttgtttatggacccgaaacgcatgattgaagcctgtgacgaaaacaccatcggcgtggtg

SEQ ID NO: 51713 - DNA, 75 bp, synthetic construct
  source 1..75: mol_type = other DNA
gtgattgcacagtactatgaattcctgcgcctcggtcgtgaaggctataccaaagtacagaacgcttcctaccag

SEQ ID NO: 51714 - DNA, 75 bp, synthetic construct
  source 1..75: mol_type = other DNA
gtgttcaacgttgactacctgggtggtcaaattggtacttttgccatcaacttctcccgcccggcgggtcaggta

SEQ ID NO: 51715 - DNA, 75 bp, synthetic construct
  source 1..75: mol_type = other DNA
cgcgtgtgaaatcgatcagtgcttcaggccataaattcggtctggctccgctgggctgcggctgggttatctggc

SEQ ID NO: 51716 - DNA, 75 bp, synthetic construct
  source 1..75: mol_type = other DNA
gcacgcgccgattatgtcgacgttgatgatatgtgaaatgaccggggagtatcagctactccccggtttattgat

SEQ ID NO: 51717 - DNA, 75 bp, synthetic construct
  source 1..75: mol_type = other DNA
gtcaaccgggatacctggtgtcgtgccggtgattaccgcgctccggagtctctggccgggatgattaaacaggcg

SEQ ID NO: 51718 - DNA, 75 bp, synthetic construct
  source 1..75: mol_type = other DNA
caacagttcgattacgtaaaagcgaagtgagatttgtcaggcaaaatccatcggcaggtttgtcgttagtggctc

SEQ ID NO: 51719 - DNA, 75 bp, synthetic construct
  source 1..75: mol_type = other DNA
acttgctctggcatttgtgttgttctacgaagcaatcaatggttttcatgacacggcgaatgcggtggcaaccgt

SEQ ID NO: 51720 - DNA, 75 bp, synthetic construct
  source 1..75: mol_type = other DNA
ctatcgtcgcaacctggtgacgggaaacagttttcatgcagcagagattttgcggcttccacagggctcgttccc

SEQ ID NO: 51721 - DNA, 75 bp, synthetic construct
  source 1..75: mol_type = other DNA
gcaaagtgttcctcaccccggcccaactggcgatgctgatggagggcatcgactggcggcagcctaagcggttac

SEQ ID NO: 51722 - DNA, 75 bp, synthetic construct
  source 1..75: mol_type = other DNA
accaatgatccccgtcatgtatacctcgtggcgcagccaggcagtttcatacatccgtccatgccagttttgtac

SEQ ID NO: 51723 - DNA, 75 bp, synthetic construct
  source 1..75: mol_type = other DNA
cgcttatctggcggatgaaatcgccaaactggggccgtatgagttcatctgtacgggtcgcccggacgaaggcat

SEQ ID NO: 51724 - DNA, 75 bp, synthetic construct
  source 1..75: mol_type = other DNA
atgaatgatggcagacagacgcctccgtcccctgaagcatggaaaatccggtttctggcggacggtacccccggc

SEQ ID NO: 51725 - DNA, 75 bp, synthetic construct
  source 1..75: mol_type = other DNA
ccaaactggggccgtatgagttcatctgtacgggtcgcccggacgaaggcatcccggcggtttgcttcaaactga

SEQ ID NO: 51726 - DNA, 75 bp, synthetic construct
  source 1..75: mol_type = other DNA
ttgctgaactgttgctggaagactacaaagcctccctgaaatatctcagcgatcacccgaaactgcagggtattg

SEQ ID NO: 51727 - DNA, 75 bp, synthetic construct
  source 1..75: mol_type = other DNA
cctgtatgacctctctgaacgtctgcgtctgcgcggctggcaggttccggccttcactctcggcggtgaagccac

SEQ ID NO: 51728 - DNA, 75 bp, synthetic construct
  source 1..75: mol_type = other DNA
ctgtgtcgtgctttgtgaaccgggcggaacgccggtatacggtaataccggtgatctcgaggcccgtctgcagaa

SEQ ID NO: 51729 - DNA, 75 bp, synthetic construct
  source 1..75: mol_type = other DNA
agcatcgttaaaaaagtgggtaatgaacgttatgagtttcgtgacaatagcgggacaattgtcacggatattgat

SEQ ID NO: 51730 - DNA, 75 bp, synthetic construct
  source 1..75: mol_type = other DNA
ttttctggagcatattgtttacggccaataatgttatggctgcagattggggaccctgtacatctacatctgggg

SEQ ID NO: 51731 - DNA, 75 bp, synthetic construct
  source 1..75: mol_type = other DNA
gcttgacgccacgctgacggcattggctgggctcgcaactggtgcaaataaactcccgtatttcactggaactga

SEQ ID NO: 51732 - DNA, 75 bp, synthetic construct
  source 1..75: mol_type = other DNA
ctttgatgaatcctggctgataatctgtgatgttttactgggcaggctgatgcgctgtatgtttcagggacgaca

SEQ ID NO: 51733 - DNA, 75 bp, synthetic construct
  source 1..75: mol_type = other DNA
tcatccctaaagcgcatggcggcactgatgctgacagtaatctgcagagtctgtgctggccgtgtcataaggcga

SEQ ID NO: 51734 - DNA, 75 bp, synthetic construct
  source 1..75: mol_type = other DNA
tgaagcgtgacaaaggcctgtgtcagttgtgcctgcgtgtcggtgtggtgcgtgaggcgaaaaccgttgaccaca

SEQ ID NO: 51735 - DNA, 75 bp, synthetic construct
  source 1..75: mol_type = other DNA
atagcgagaacgtgcgctggtgctatcaggtggaaatcactcaatgggcgtgggcagagttccgggagcagctcg

SEQ ID NO: 51736 - DNA, 75 bp, synthetic construct
  source 1..75: mol_type = other DNA
tcagcgggagatgaaggatgaactgaataatctggaggatttgcgctcaatcagagagatggcgattagcggcaa

SEQ ID NO: 51737 - DNA, 75 bp, synthetic construct
  source 1..75: mol_type = other DNA
gatgccgacagtaatctgcagagcctgtgctggccgtgtcataaggcgaagacggcccgtgaacggctgaagtaa

SEQ ID NO: 51738 - DNA, 75 bp, synthetic construct
  source 1..75: mol_type = other DNA
acaaattcagactggaaccaacgcatgaacagtcgcagcgtttgcggcagttatgtggttgcgcccgttttgtct

SEQ ID NO: 51739 - DNA, 75 bp, synthetic construct
  source 1..75: mol_type = other DNA
gaatacccggaactggcaaaggcttacccgacaaataaattgccagatttacgtggtgagtttattcgtggctgg

SEQ ID NO: 51740 - DNA, 75 bp, synthetic construct
  source 1..75: mol_type = other DNA
cgtaggcggcattccctctactgcgttgaaaggcgcgggtctgttaccacacatccgcgcgaccgtaaagttgcc

SEQ ID NO: 51741 - DNA, 75 bp, synthetic construct
  source 1..75: mol_type = other DNA
ctgaatctgccagctctgcgagtggttcgtgtactcaacaggatcgcgtcaaaccgtggctatccggtcatgcta

SEQ ID NO: 51742 - DNA, 75 bp, synthetic construct
  source 1..75: mol_type = other DNA
ccgggatacaccctgtatgacctctctgaacgtctgcgtctgcgcggctggcaggttccggccttcactctcggc

SEQ ID NO: 51743 - DNA, 75 bp, synthetic construct
  source 1..75: mol_type = other DNA
ttttattcagcgatgaatcaatggggctgctccctgtttgctgctcgacaatggcatccatgagtagttggtgtt

SEQ ID NO: 51744 - DNA, 75 bp, synthetic construct
  source 1..75: mol_type = other DNA
ttaagctacacgtatcagtatgagaaagaccacatcaccatcaccgacagcctggaccgccgtgaagtgctgcac

SEQ ID NO: 51745 - DNA, 75 bp, synthetic construct
  source 1..75: mol_type = other DNA
ttgctgaagcggcgaaaagtccagcgttaaacatggttcgtcctaacggcatgaacgatgagcctcagttccaga

SEQ ID NO: 51746 - DNA, 75 bp, synthetic construct
  source 1..75: mol_type = other DNA
tcagacttaagcagaaggtttctccgtcaggaaaagtggaatggacggtggtgaatgataatggtggttaccaga

SEQ ID NO: 51747 - DNA, 75 bp, synthetic construct
  source 1..75: mol_type = other DNA
tgatggaacatcatctggatcagggcagagagagcctggaaagtgatgtggtgattttcgccacaggttaccgtt

SEQ ID NO: 51748 - DNA, 75 bp, synthetic construct
  source 1..75: mol_type = other DNA
tgcaatgaaacacatttttcaccgactggatagtgaggctttattgtttgtaatgagaacacgttcaaaacaaaa

SEQ ID NO: 51749 - DNA, 75 bp, synthetic construct
  source 1..75: mol_type = other DNA
gaatgttgatgagtgtagctgtgggatgtttatcgtggtatgtcaccaggccgaagaaccaacagacaaaggccg

SEQ ID NO: 51750 - DNA, 75 bp, synthetic construct
  source 1..75: mol_type = other DNA
gtgtaaaccttttttttgttggtgaaattaatgttacgcattattttataacaaatattggagctggattgcctg

SEQ ID NO: 51751 - DNA, 75 bp, synthetic construct
  source 1..75: mol_type = other DNA
aatacagatatcatctgctcagaaaaacctgcccttcattgcctatatcgataagggatacagtgctcagggact

SEQ ID NO: 51752 - DNA, 75 bp, synthetic construct
  source 1..75: mol_type = other DNA
cgacaaataaattgcctgatttacgtggtgagtttattcgtggctgggatgattctagagggattgatacggggc

SEQ ID NO: 51753 - DNA, 75 bp, synthetic construct
  source 1..75: mol_type = other DNA
atggaaataagactattggtttattttttttaagaagtgaagcggtgattcctgacaggtttaaaaaccttattt

SEQ ID NO: 51754 - DNA, 75 bp, synthetic construct
  source 1..75: mol_type = other DNA
tcgggtctgggtcgtgaaggttcgaagtatggcatcgaagattacttagaaatcaaatatatgtgcatcggtctt

SEQ ID NO: 51755 - DNA, 75 bp, synthetic construct
  source 1..75: mol_type = other DNA
atgagccgggattgctggagccggaaggcgtcagcaaagtgttcttcacctgcgattcccatgaaaaacttctgc

SEQ ID NO: 51756 - DNA, 75 bp, synthetic construct
  source 1..75: mol_type = other DNA
atcgtggtgatgcgcattatgtgtcgtcgcggcttcgaaatggactttgctgaactgttgctggaagactacaaa

SEQ ID NO: 51757 - DNA, 75 bp, synthetic construct
  source 1..75: mol_type = other DNA
acgcaatttgttaacagtcacccgacgatcgttattctctgcttaagcttcctgttgatgattggctttagcctg

SEQ ID NO: 51758 - DNA, 75 bp, synthetic construct
  source 1..75: mol_type = other DNA
cttgctgtctgaaatgcgcgcaagagtagaaaacttcaacaaactcttcgaagaaatgcttaaagcgcgtaaaaa

SEQ ID NO: 51759 - DNA, 75 bp, synthetic construct
  source 1..75: mol_type = other DNA
gcgaaactctctggtgcgcgtaccgtgctgcatattcaggattacgaagtggatgccatgctggggctgggcctt

SEQ ID NO: 51760 - DNA, 75 bp, synthetic construct
  source 1..75: mol_type = other DNA
ccgcaatccgcagccatcgacctgcgttgcgtaaatatggttgccgatctgtggcatgcgcctgcgccgaaaaat

SEQ ID NO: 51761 - DNA, 75 bp, synthetic construct
  source 1..75: mol_type = other DNA
gacttaccgtgggttcggcctgctgaatcaatttctggttcaagcccccggcgcgcggcgcagcgcgcaccccga

SEQ ID NO: 51762 - DNA, 75 bp, synthetic construct
  source 1..75: mol_type = other DNA
aacagcgacaggactgagtaccagtattgtcggcacagcagaaacacgcccccgcaacgttgcattcaattacat

SEQ ID NO: 51763 - DNA, 75 bp, synthetic construct
  source 1..75: mol_type = other DNA
gccgtgttcgcggctgccgctctacaaccacagacccttcaggctactgcgaaagccacaaaagcgaaggctgga

SEQ ID NO: 51764 - DNA, 75 bp, synthetic construct
  source 1..75: mol_type = other DNA
aaaacgcacaacaaaatattccggaaaatattcccggtggcaactctccggtaactccggatggttggataagct

SEQ ID NO: 51765 - DNA, 75 bp, synthetic construct
  source 1..75: mol_type = other DNA
tgaagcgtgacaaaggcctgtgtcagttgtgtttgcgtgccggtgtggtgcgcgaggcgaaaaccgttgaccaca

SEQ ID NO: 51766 - DNA, 75 bp, synthetic construct
  source 1..75: mol_type = other DNA
atggcatttaaacactatgacgtggtcagggcggcgtcgccgtcagaccttgcggatgcgcttgctcaaaaaatt

SEQ ID NO: 51767 - DNA, 75 bp, synthetic construct
  source 1..75: mol_type = other DNA
agagtaaccgatcctaattttgggcattgtgacttccattccttagcacaggctttaacgtttataaaaaatata

SEQ ID NO: 51768 - DNA, 75 bp, synthetic construct
  source 1..75: mol_type = other DNA
atcttcacagggggatgcaataagaaatattgagggattcgcagatggcgggatcggtatgtcttttgatgcaat

SEQ ID NO: 51769 - DNA, 75 bp, synthetic construct
  source 1..75: mol_type = other DNA
ctgacagcatatgattttcttagtgagcaatgtctgaaatgttatgggctaaaagaagacacactgtcacttttt

SEQ ID NO: 51770 - DNA, 75 bp, synthetic construct
  source 1..75: mol_type = other DNA
agctttattgcggcagcactggcacagtacacggccaacaaaagtgggctggacgttcttgatgatggtgacctg

SEQ ID NO: 51771 - DNA, 75 bp, synthetic construct
  source 1..75: mol_type = other DNA
gcgacgcgcgtctgattcgctcggttaatcgtgaaatcagcgtctacagtgaatacgatgaattcctgaaactgg

SEQ ID NO: 51772 - DNA, 75 bp, synthetic construct
  source 1..75: mol_type = other DNA
tgatgaaactgatcccgcagctggtcaaatagccccagctctcgcacacattgggcaagactcaacaaccttgca

SEQ ID NO: 51773 - DNA, 75 bp, synthetic construct
  source 1..75: mol_type = other DNA
tcctggttgaaccggaaaggaagcgcacgaagcgccgtcgcggtgagcactccaccaaacccaaatgcgaaaatc

SEQ ID NO: 51774 - DNA, 75 bp, synthetic construct
  source 1..75: mol_type = other DNA
cgtcacatcctggaacatctgcgcaaactcaccagtcacgaacccgtgattggcattatgggtaaaagcggggcc

SEQ ID NO: 51775 - DNA, 75 bp, synthetic construct
  source 1..75: mol_type = other DNA
gagcgcgacagccagtaccgcatcacgggtgtcagtcacaccgacgggatccggcttaaactgatgtaccacgcc

SEQ ID NO: 51776 - DNA, 75 bp, synthetic construct
  source 1..75: mol_type = other DNA
atcagctaccatgcgggcgataaattcgatgacgcgccagcggtaagttatccggcaaaactgacccgtctgctg

SEQ ID NO: 51777 - DNA, 75 bp, synthetic construct
  source 1..75: mol_type = other DNA
attatcgaacagatggaagcgcaggggattgtcagcgaacaggggcacaacggtaatcgtgaagtgctggcccca

SEQ ID NO: 51778 - DNA, 75 bp, synthetic construct
  source 1..75: mol_type = other DNA
gcaccagaaaaattgcagggaaaacgcaggagcgcgtgaagaagttgatctggctggcggcacaggatgtcagag

SEQ ID NO: 51779 - DNA, 75 bp, synthetic construct
  source 1..75: mol_type = other DNA
gcatacattgtatgcgttatcgctacagtggtaacagctggaatgcaacatcaagccttattgtgtatgacggca

SEQ ID NO: 51780 - DNA, 75 bp, synthetic construct
  source 1..75: mol_type = other DNA
tctgcaccacctgggcgctgggcctgaaactgttcagtaccaacccgcagatggaaggcttcttctacatggcaa

SEQ ID NO: 51781 - DNA, 75 bp, synthetic construct
  source 1..75: mol_type = other DNA
tcctgaaccgtgcaggtggtgcgccgacgctggcggtaggtatcgctcacgtgttccacaaagtgctgccgatgg

SEQ ID NO: 51782 - DNA, 75 bp, synthetic construct
  source 1..75: mol_type = other DNA
cgggcgattgttccggcggctaacgtgccgaaaaaagcgccggaagggatgcagatttttggcgttaaaaaactc

SEQ ID NO: 51783 - DNA, 75 bp, synthetic construct
  source 1..75: mol_type = other DNA
aagagatgattaacggcggtgagatcatggttaaagaggggctttttgatcgtttcccctgcgatgtcattttcg

SEQ ID NO: 51784 - DNA, 75 bp, synthetic construct
  source 1..75: mol_type = other DNA
tgcgtgagcagctcattatcgctaccgctgatttgagtggggcaacaaaaggtcagcttgaagcctggcaggaga

SEQ ID NO: 51785 - DNA, 75 bp, synthetic construct
  source 1..75: mol_type = other DNA
tgaataccaggagctggcatcactggtgggagtgacatcaaaaaactggtctgagacattcactgaacgctgggt

SEQ ID NO: 51786 - DNA, 75 bp, synthetic construct
  source 1..75: mol_type = other DNA
atctgtgcgcgttattgtggcgaaagcatatcccgcgccattgcgtctggcgatgcgtttaacgtggatttatgg

SEQ ID NO: 51787 - DNA, 75 bp, synthetic construct
  source 1..75: mol_type = other DNA
caatgaaaaccatccgcacagtgcgttgggttatcgctctccgcgagaatatcgacgtcagcgggtaacgttaac

SEQ ID NO: 51788 - DNA, 75 bp, synthetic construct
  source 1..75: mol_type = other DNA
agggaccgtctccgcatcgctgaatatggtgatcctgatggtgatgtctgtctcggtcgaaatcggccgctggct

SEQ ID NO: 51789 - DNA, 75 bp, synthetic construct
  source 1..75: mol_type = other DNA
gcaacagttgatgtctcaggtcgaacatagccttaattctgttgcgcattttttaccgaatcaatttcatattgg

SEQ ID NO: 51790 - DNA, 75 bp, synthetic construct
  source 1..75: mol_type = other DNA
ttaaatctcaacgccgacgatcgtcactttatcaatacgcttctcggggaaggggaagtgtcagtgcgcattcag

SEQ ID NO: 51791 - DNA, 75 bp, synthetic construct
  source 1..75: mol_type = other DNA
aaccgagtatggcggccctggagcaatgtgctcacagcccgcaggtgattgcgctgttaaacgagttacaacatc

SEQ ID NO: 51792 - DNA, 75 bp, synthetic construct
  source 1..75: mol_type = other DNA
gggaattgctcaggtcaatctgggctggaacgggcaccgtttctcctccacatgggcggcatttgatccgtacat

SEQ ID NO: 51793 - DNA, 75 bp, synthetic construct
  source 1..75: mol_type = other DNA
gtgacgcaggccgacaaaacggagccctgccatgaatgggatatggcaggtattcagccttctcccgcacaggaa

SEQ ID NO: 51794 - DNA, 75 bp, synthetic construct
  source 1..75: mol_type = other DNA
gtcagggaaagatgcaggctggcagtggtataacgagaaaataaatccgaaggaaaaagaaaataaacctgtacc

SEQ ID NO: 51795 - DNA, 75 bp, synthetic construct
  source 1..75: mol_type = other DNA
atcatcaagcgcaaataacaggcctgatctctgcgtcttataatattgcagtatatgccaatacaggaaaggttc

SEQ ID NO: 51796 - DNA, 75 bp, synthetic construct
  source 1..75: mol_type = other DNA
cggctgggaactggatacgctggtcagtgcgctcatgacagcacttcccgaccatgccgccagtcccctgatgac

SEQ ID NO: 51797 - DNA, 75 bp, synthetic construct
  source 1..75: mol_type = other DNA
gtacaagaaaaattgccagtaagacactggaacgcttaaagaagttgatctggctggcggcacaggatgtgaaga

SEQ ID NO: 51798 - DNA, 75 bp, synthetic construct
  source 1..75: mol_type = other DNA
tagaagcaataaaaaataaagataaaactttatttattgtctatgctactgatatttatagcccgagcgaatttt

SEQ ID NO: 51799 - DNA, 75 bp, synthetic construct
  source 1..75: mol_type = other DNA
tgccagggcgtggggtatcagtggtgaggccgagctggctgtcatgcaggctatcgctgaaaaaccgggagcatt

SEQ ID NO: 51800 - DNA, 75 bp, synthetic construct
  source 1..75: mol_type = other DNA
atgacccgactgcaggacgagctgcgcacggaatctgtccggtctcaggcccgtgaacagtttaccggtgcggtg

SEQ ID NO: 51801 - DNA, 75 bp, synthetic construct
  source 1..75: mol_type = other DNA
attttggtgtaataggggctgcatatgcgtggacaattagagtcagtttagatttcgttattttacttgtagcat

SEQ ID NO: 51802 - DNA, 75 bp, synthetic construct
  source 1..75: mol_type = other DNA
atttcggcataattggcacggcaatcgcttggtcacttagaacattttgtgattttgttatactactttcgatat

SEQ ID NO: 51803 - DNA, 75 bp, synthetic construct
  source 1..75: mol_type = other DNA
cttagtaagctgtgtgaagtcctcattgtcgattgccccggccacgacagccaggagttccgtagcgccctgaca

SEQ ID NO: 51804 - DNA, 75 bp, synthetic construct
  source 1..75: mol_type = other DNA
cgggcatatagtagaaaatgttattgagctggctcgccggttaggtattgatatcattgccgaaggcattgaaac

SEQ ID NO: 51805 - DNA, 75 bp, synthetic construct
  source 1..75: mol_type = other DNA
gaaaatgcgcaggcctcatattgtacctctatctactcaggtgattgccctttttaaacagctcaagcctattag

SEQ ID NO: 51806 - DNA, 75 bp, synthetic construct
  source 1..75: mol_type = other DNA
actggccggaatgattaaacaggcctggtgcagtgccctgggggtggatgccggatgttatgccacgctggtgca

SEQ ID NO: 51807 - DNA, 75 bp, synthetic construct
  source 1..75: mol_type = other DNA
ggagcgccgccatgcttcagggtgccaaacctgtaagccaaacttacaagttgaacgagctatcgggcaactctc

SEQ ID NO: 51808 - DNA, 75 bp, synthetic construct
  source 1..75: mol_type = other DNA
tcaactggcagaagaacagcagaaaactgaaggtctgcgggggaccgggtacgacacttcaggtcgggttcagga

SEQ ID NO: 51809 - DNA, 75 bp, synthetic construct
  source 1..75: mol_type = other DNA
atcatcactaaaaatgcgacaaagatagtcatgttaactggcgtaagaactcaggaaatgcgctttgccacgtgg

SEQ ID NO: 51810 - DNA, 75 bp, synthetic construct
  source 1..75: mol_type = other DNA
atggataagaagcaagtaacggatttaaggtcggaactactcgattcacgttttggcgctaagtcgatttcgact

SEQ ID NO: 51811 - DNA, 75 bp, synthetic construct
  source 1..75: mol_type = other DNA
atagctataaaaatggtcgcgaagcgtcacagctggcctatctgcccaccagcgcggtggcgcaatcggcgcgag

SEQ ID NO: 51812 - DNA, 75 bp, synthetic construct
  source 1..75: mol_type = other DNA
agtatctcaatggtgcgcgtatcggtggcaaagatagcgcgacggcgaacggctaccgcgagcagatggcactgc

SEQ ID NO: 51813 - DNA, 75 bp, synthetic construct
  source 1..75: mol_type = other DNA
atggataagaagcaagtaacggatttaaggtcggaactactcgattcacgttttggcgctaagtccatttccact

SEQ ID NO: 51814 - DNA, 75 bp, synthetic construct
  source 1..75: mol_type = other DNA
ccgtgaaggtaaacgcgtacatcccacgaccctgcattacgcctgggcccgggaattcggggagcttaaaggcaa

SEQ ID NO: 51815 - DNA, 75 bp, synthetic construct
  source 1..75: mol_type = other DNA
atatggtgcttctgtatggacattcgacgcctctcgctcagttcgcacagcatctgaaacacgcccccataacat

SEQ ID NO: 51816 - DNA, 75 bp, synthetic construct
  source 1..75: mol_type = other DNA
cctttaatggtgccggggttcgcgataccgccaggacactgaaaattggtattaacaccatcatccggactttaa

SEQ ID NO: 51817 - DNA, 75 bp, synthetic construct
  source 1..75: mol_type = other DNA
accactctgcattacgtctgggcccgggagtttggggagtgcaaaggtaaaaaacactatcatctgatgctgctg

SEQ ID NO: 51818 - DNA, 75 bp, synthetic construct
  source 1..75: mol_type = other DNA
cgttgttggtgaaggggaaatgcgcctgattaatggcgtatggcaaaaatatgctggtggtcgctggattgaagc

SEQ ID NO: 51819 - DNA, 75 bp, synthetic construct
  source 1..75: mol_type = other DNA
atgtgtatgcattgcccggagtcggctgcgcaacccgactattccagttactcaattccttgtggtgtaggttga

SEQ ID NO: 51820 - DNA, 75 bp, synthetic construct
  source 1..75: mol_type = other DNA
atggataagaagcaagtaacggatttaaggtcggaactactcgattcacgttttggcgctaagtcaatttcaact

SEQ ID NO: 51821 - DNA, 75 bp, synthetic construct
  source 1..75: mol_type = other DNA
gcctaaccctcttaaaatgtacgcggtcgatgctgttgccgctattgcagaggtgagaggctggaactcctgccg

SEQ ID NO: 51822 - DNA, 75 bp, synthetic construct
  source 1..75: mol_type = other DNA
tatgccgatgcggcgctggctgaaggctttatatcgaccgcgacgcggcgttcctctatcctggcagcggcagaa

SEQ ID NO: 51823 - DNA, 75 bp, synthetic construct
  source 1..75: mol_type = other DNA
gtgcgttggagaaaatgcgtaaagtgcggcagcgttgctccgaagtgtttcgctacgcaattgcaacgggtaggg

SEQ ID NO: 51824 - DNA, 75 bp, synthetic construct
  source 1..75: mol_type = other DNA
tcactctgtaatgcgctgtttcagggggaagtcaccccggtcagtgatgttcacgccggcacccgggaagtgcag

SEQ ID NO: 51825 - DNA, 75 bp, synthetic construct
  source 1..75: mol_type = other DNA
tcaaagttgaaggagaatcattgcgcgagttgaagcacagagtagctttaaactactctgtaaaaattgctcgca

SEQ ID NO: 51826 - DNA, 75 bp, synthetic construct
  source 1..75: mol_type = other DNA
tggatttgcccctatatttccagacacctgttatcacttaacccattactggcctgctgccgcagatattcccgt

SEQ ID NO: 51827 - DNA, 75 bp, synthetic construct
  source 1..75: mol_type = other DNA
ctcacgaatctggatttgttgcgaaccaactttaatcgtgtggcggatgcgcagcagtatggcggctcaatgcag

SEQ ID NO: 51828 - DNA, 75 bp, synthetic construct
  source 1..75: mol_type = other DNA
caacaaacgcagcgacctctgctcttgacagtaaaaataaggcagaagagctgaaaaatcaggcacagcagagcg

SEQ ID NO: 51829 - DNA, 75 bp, synthetic construct
  source 1..75: mol_type = other DNA
aaggcgatgttttcaccattgaacacgttgatgtgatgcctgaatcattgccagctgtgttttctcgtctggtca

SEQ ID NO: 51830 - DNA, 75 bp, synthetic construct
  source 1..75: mol_type = other DNA
cttccggcaaaaagaacagcaaccggtcgcaatcccccaaacattaccagaagccctacgcctggctgccgagtt

SEQ ID NO: 51831 - DNA, 75 bp, synthetic construct
  source 1..75: mol_type = other DNA
tatttcacggtgaaagaagtggtgctggatgatgaaaatggctaccagatacggctgacgccccaattaacgggt

SEQ ID NO: 51832 - DNA, 75 bp, synthetic construct
  source 1..75: mol_type = other DNA
tacgatgcaggaacacgatcagcgagaatgccgaataacacaactactatagacaaaaccgatgaccttggattc

SEQ ID NO: 51833 - DNA, 75 bp, synthetic construct
  source 1..75: mol_type = other DNA
atttggatttatcagatgagaggaaacaaaattttaactttcatcatccctctggtttttattcaggaaaagtca

SEQ ID NO: 51834 - DNA, 75 bp, synthetic construct
  source 1..75: mol_type = other DNA
gtatcaaacaaaatataatgacaatataaaattatctaatagcgatgatttctttttaagaaaaacacaacgtat

SEQ ID NO: 51835 - DNA, 75 bp, synthetic construct
  source 1..75: mol_type = other DNA
gaacaccagcaggatgcaccacttactgaagaacaactggcggcgtatgaagaattgcgtcagcaggcggaagcg

SEQ ID NO: 51836 - DNA, 75 bp, synthetic construct
  source 1..75: mol_type = other DNA
tcgcggagctgggaagtgcctttctgatggctgatcttggcattgagggagaggtacaacatgaaagctatattg

SEQ ID NO: 51837 - DNA, 75 bp, synthetic construct
  source 1..75: mol_type = other DNA
gcgaccggctgaccacaatacagaacgacagaacccgcatccagacgatttatcagccggggagcttcacgccac

SEQ ID NO: 51838 - DNA, 75 bp, synthetic construct
  source 1..75: mol_type = other DNA
atgaatggcctaccgttggcgcatgagttactggcacatgtacgtaaccccgacgcgcagccgcacagcattaat

SEQ ID NO: 51839 - DNA, 75 bp, synthetic construct
  source 1..75: mol_type = other DNA
tgcgcgagcagctttatcaggctaaacaggtagttaagggagtgcggaacgggatgcttagtatcctgaacgaga

SEQ ID NO: 51840 - DNA, 75 bp, synthetic construct
  source 1..75: mol_type = other DNA
cgacagaacccgcatccagacgatttatcagccggggagcttcacgccactcatcagagttgaaaccgccaccgg

SEQ ID NO: 51841 - DNA, 75 bp, synthetic construct
  source 1..75: mol_type = other DNA
tgtggtagggacgtgaaatttacccttgaggtgctccggggagatagtgttgagaagacctctcgggtatggtca

SEQ ID NO: 51842 - DNA, 75 bp, synthetic construct
  source 1..75: mol_type = other DNA
gtaaggccgggaaaaccggcacgctgtacaaaagtctgaaagctattgccgatcaggtcagcaccagagttgttg

SEQ ID NO: 51843 - DNA, 75 bp, synthetic construct
  source 1..75: mol_type = other DNA
gtttcactgggacaggtataacccggcaacggaggcgagttcgtgctgggtgagtgtgtctcaggcgtgggcggg

SEQ ID NO: 51844 - DNA, 75 bp, synthetic construct
  source 1..75: mol_type = other DNA
gttctcatcaatggcgtctggaaatgacgctggcggacttcaatctccggcgtgcggcgttgtttgcgacccgta

SEQ ID NO: 51845 - DNA, 75 bp, synthetic construct
  source 1..75: mol_type = other DNA
atcacccgcgtggcgaatgtgctgggtaaggcaggcacaacaggcacgctgtacaaaacgctcaaggcgatttcc

SEQ ID NO: 51846 - DNA, 75 bp, synthetic construct
  source 1..75: mol_type = other DNA
gtttcactgggacaggtataacccggcaacggaggcgagttcgtgctgggtgtgtgtgtcacaggcgtgggcggg

SEQ ID NO: 51847 - DNA, 75 bp, synthetic construct
  source 1..75: mol_type = other DNA
tgatgttgagagtaaaaaagcggcactgaaagcacaggagcttgcccggtaccctcgggtggatttaacggggtc

SEQ ID NO: 51848 - DNA, 75 bp, synthetic construct
  source 1..75: mol_type = other DNA
gccttccttgaccccgcatgcatcaactgccgtcttctggagcccgcgcttaagcaactggcccgggaattcagc

SEQ ID NO: 51849 - DNA, 75 bp, synthetic construct
  source 1..75: mol_type = other DNA
gtttcactgggacaggtataacccggcaacggaggcgagttcgtgctgggtgcgagtgtcgcaggcgtgggcggg

SEQ ID NO: 51850 - DNA, 75 bp, synthetic construct
  source 1..75: mol_type = other DNA
gtttcactgggacaggtataacccggcaacggaggcgagttcgtgctgggtgggagtgtcccaggcgtgggcggg

SEQ ID NO: 51851 - DNA, 75 bp, synthetic construct
  source 1..75: mol_type = other DNA
ccaaagtcagtaccaccaacccggaaagtggcttcatgcaccgggacaacagcagttttggtgtccgaaatcgta

SEQ ID NO: 51852 - DNA, 75 bp, synthetic construct
  source 1..75: mol_type = other DNA
agatcagataccgataggaaatgaaggtgccactgaatttgaacaatggtgtttagacgcactaagaatagtatt

SEQ ID NO: 51853 - DNA, 75 bp, synthetic construct
  source 1..75: mol_type = other DNA
ggtgaaggcggaacatcgcactggggtggcggtggacgcgcaggcgctggcggtggtgttagtggtaaggcatat

SEQ ID NO: 51854 - DNA, 75 bp, synthetic construct
  source 1..75: mol_type = other DNA
attaacggtgataaaaagattacagccgtaacaattgaaacgtcagattcagataaagaccttaatgttactttt

SEQ ID NO: 51855 - DNA, 75 bp, synthetic construct
  source 1..75: mol_type = other DNA
ccataattcattaataataaagttacctgcgaaatatatatctaaactgctgcagaaattaagaaatcctgaaaa

SEQ ID NO: 51856 - DNA, 75 bp, synthetic construct
  source 1..75: mol_type = other DNA
ttttgaagaattaggtccatctgagtatagacaattacaatcatatttaacaggtccgtatggaaagctcggttt

SEQ ID NO: 51857 - DNA, 75 bp, synthetic construct
  source 1..75: mol_type = other DNA
atgaacatggccgggtacgggtgaagtttcactgggaccgttatcacgggatgacggaggagagttcgtgctggg

SEQ ID NO: 51858 - DNA, 75 bp, synthetic construct
  source 1..75: mol_type = other DNA
ggaatggttttaagcgatgtttgcaatttaccctttaccggcccagggatttactatcattgttgaatgaagctt

SEQ ID NO: 51859 - DNA, 75 bp, synthetic construct
  source 1..75: mol_type = other DNA
gaagacatggagctttaccagacgtttactgatgaattctttggtcccgcatttgcggtgctgggaggtgcctga

SEQ ID NO: 51860 - DNA, 75 bp, synthetic construct
  source 1..75: mol_type = other DNA
ccgaaacactgcttgttgataccgttgatactgaacgtcccggacatcacatcggcagaatgctctccgcgattg

SEQ ID NO: 51861 - DNA, 75 bp, synthetic construct
  source 1..75: mol_type = other DNA
aaggcgcagaaagcaccgagctgaaaattatcggttcgatgaaagaagcgctgcatccggaaatcgacggctgcg

SEQ ID NO: 51862 - DNA, 75 bp, synthetic construct
  source 1..75: mol_type = other DNA
atgaaacaggcaaccagaaaaccgacgactgtaggtgatatcctgctgtacgaatacctggagccgttagagctt

SEQ ID NO: 51863 - DNA, 75 bp, synthetic construct
  source 1..75: mol_type = other DNA
gggcaatttatcgtttcggcacttgaaggcgagatcaaacgccgccagcgccgcaaggccaaagaaccagagtaa

SEQ ID NO: 51864 - DNA, 75 bp, synthetic construct
  source 1..75: mol_type = other DNA
gggtgcctggctggatgtgtgcaccacgtccacagatggatgccactgaacacaccactaacctggctgatgccg

SEQ ID NO: 51865 - DNA, 75 bp, synthetic construct
  source 1..75: mol_type = other DNA
cgaatacctggagccgttagagctgaagatcaacgagttagcagaaatacttcatgttcatcgtaacaccgtaag

SEQ ID NO: 51866 - DNA, 75 bp, synthetic construct
  source 1..75: mol_type = other DNA
gcacgaatctgaattatcacgccgagttaaacaattaattagagcagcaaagaaacaactggaggcgttatgcgc

SEQ ID NO: 51867 - DNA, 75 bp, synthetic construct
  source 1..75: mol_type = other DNA
ctgcttttgccaccaccgcgacagaagtggtgattctgaaaatgcttcacgctcttgaagttccatttttgctgg

SEQ ID NO: 51868 - DNA, 75 bp, synthetic construct
  source 1..75: mol_type = other DNA
gcatcgatgaccgagaacggtcatcgtcgggatatgcaccctgccgaacagattgccggattccgtgcaatggcg

SEQ ID NO: 51869 - DNA, 75 bp, synthetic construct
  source 1..75: mol_type = other DNA
tgcgcgatccgattaatcacaccgtgatgccatcaccctttattaaaggtatcgtgccactgatcattctttttt

SEQ ID NO: 51870 - DNA, 75 bp, synthetic construct
  source 1..75: mol_type = other DNA
gtgcttttctctagccgagcaccaattggatatgtcgctatagcagatgcagaactgtcaacaaaccagggtttt

SEQ ID NO: 51871 - DNA, 75 bp, synthetic construct
  source 1..75: mol_type = other DNA
tttcagcaattgttggctttggttttactgccggagtgcagatttatattacgtgggaaaaaatcatcaactacg

SEQ ID NO: 51872 - DNA, 75 bp, synthetic construct
  source 1..75: mol_type = other DNA
gcagaattaaactgctctaccgtccacagggactggttattccgccagaacaggcaccaggtaaattagagttca

SEQ ID NO: 51873 - DNA, 75 bp, synthetic construct
  source 1..75: mol_type = other DNA
tgactgagaatacgctacagctcgcaattatcagccgcattaaactgtactatcgtccggctaaattagcgttgc

SEQ ID NO: 51874 - DNA, 75 bp, synthetic construct
  source 1..75: mol_type = other DNA
tgaaaaactctctgcgctggggcgttcactggtcgagatggttttgcacaaaggacgtaagccgcggatctcact

SEQ ID NO: 51875 - DNA, 75 bp, synthetic construct
  source 1..75: mol_type = other DNA
ctatctaatccttaatactctcgatatgtcgaagtatcaatcaggaacctcaatacccgcgataaatcaaagtgt

SEQ ID NO: 51876 - DNA, 75 bp, synthetic construct
  source 1..75: mol_type = other DNA
acacccagggcgtggatgagcagggtaatgccattgacgtggtcgacccgatgctggcggagttccagaagatca

SEQ ID NO: 51877 - DNA, 75 bp, synthetic construct
  source 1..75: mol_type = other DNA
ttggttaccgttgtgtctggcttctcgtcggatatgatcagcttgcattaaaaacgtttcaggcggctcatctgg

SEQ ID NO: 51878 - DNA, 75 bp, synthetic construct
  source 1..75: mol_type = other DNA
ccgcgtgtgggtcaggaagtgatagtggacttcctgaacggggacccggaccagccggtggtcatgggcaggacg

SEQ ID NO: 51879 - DNA, 75 bp, synthetic construct
  source 1..75: mol_type = other DNA
atttgctacaagcacgagttaaatatcgtgcagaacaatgaatttgttgatcaccgtaccgggcgcttttttatg

SEQ ID NO: 51880 - DNA, 75 bp, synthetic construct
  source 1..75: mol_type = other DNA
ccggataacccgatggggctgtatgcactctacatcggtcgcctgtacgctatccatggcaccaacgccaacttc

SEQ ID NO: 51881 - DNA, 75 bp, synthetic construct
  source 1..75: mol_type = other DNA
ttgattttctgaacggggacccggaccagccgctggtcatgggccggacgtaccatgaggacaaccgttcgccgg

SEQ ID NO: 51882 - DNA, 75 bp, synthetic construct
  source 1..75: mol_type = other DNA
accggacgacggacgtgaagcatgaccatacggagaccatcggtaacgaccagaagataagggtggtgaaggggc

SEQ ID NO: 51883 - DNA, 75 bp, synthetic construct
  source 1..75: mol_type = other DNA
gaaggtccaatcatcatgcaggacgttattcatgtcgatcatacctacacagctgaagatatgatgcgcgcaggt

SEQ ID NO: 51884 - DNA, 75 bp, synthetic construct
  source 1..75: mol_type = other DNA
gcgcggcaactggcagcttgtgatgcataactacgaagaagcctcaccacaaccctgtgccatgactttacggcc

SEQ ID NO: 51885 - DNA, 75 bp, synthetic construct
  source 1..75: mol_type = other DNA
aaccatagctggaatgtttcaatttgcaacagataatggttatacctcaggaaacccatttaacggtctggcacc

SEQ ID NO: 51886 - DNA, 75 bp, synthetic construct
  source 1..75: mol_type = other DNA
cgccattattgatgagctgcatgcacataaaacccgcgacgtgtgggacgttctggaaacggcaaccggtgcccg

SEQ ID NO: 51887 - DNA, 75 bp, synthetic construct
  source 1..75: mol_type = other DNA
ttatcacgttgaaagcctgctggaacaggcagctaaaaaagagctgaactaccgggagttcctgtgcatggcgct

SEQ ID NO: 51888 - DNA, 75 bp, synthetic construct
  source 1..75: mol_type = other DNA
ctttgctaaagaaaactcaacgataaatcttgcgaatgttattttcgacagtaatgttgcaggaggctatggcgg

SEQ ID NO: 51889 - DNA, 75 bp, synthetic construct
  source 1..75: mol_type = other DNA
gggttatatgcaggcgtttgtgaagtatgggcttaggaatttaaaggaaggtgataagttcaggatgagtgtaaa

SEQ ID NO: 51890 - DNA, 75 bp, synthetic construct
  source 1..75: mol_type = other DNA
ggaagtcatggggtattttatttctgaatctctatatctggaaactaaggagctatctccaaaagctgcaggaat

SEQ ID NO: 51891 - DNA, 75 bp, synthetic construct
  source 1..75: mol_type = other DNA
aaactgcatggcaatggtaaacgccctgcgttcttccagcgcaatctccaaaattaacaacacttccacatcaac

SEQ ID NO: 51892 - DNA, 75 bp, synthetic construct
  source 1..75: mol_type = other DNA
atggtcggtcaggagcaactggagtcgtcaccattatgtcagcatagtgacaatgaaccagaagcaaaacgggaa

SEQ ID NO: 51893 - DNA, 75 bp, synthetic construct
  source 1..75: mol_type = other DNA
gtggcttttgccaccagcgccctgctgctctttgctgacggagggctgctttatgactatttcccgtatttcact

SEQ ID NO: 51894 - DNA, 75 bp, synthetic construct
  source 1..75: mol_type = other DNA
tttatcgcgacgggtatcaatcgccatgcgtacaaccgctggcgcgcttcatgaaggagttcgcggaggttaaca

SEQ ID NO: 51895 - DNA, 75 bp, synthetic construct
  source 1..75: mol_type = other DNA
ggtaaaagaaatggtttccagcgatttagcaatagcgaaaaagaacgtcttgctgaaagctaataacattgccac

SEQ ID NO: 51896 - DNA, 75 bp, synthetic construct
  source 1..75: mol_type = other DNA
aagcgtgaaagatggctgcaggctattgatactttggagtctgatgaaaattttgcaagcatggagctgaaaaat

SEQ ID NO: 51897 - DNA, 75 bp, synthetic construct
  source 1..75: mol_type = other DNA
gagatgctgctggagaagaaggcgacgctgaccatctggcagggcgtcatcccgctgcgttatgtcaccggcgtg

SEQ ID NO: 51898 - DNA, 75 bp, synthetic construct
  source 1..75: mol_type = other DNA
cagcagccgccgcactcactacgctgatgcacgcgcttattgatattgaatgcacggcagagcttgcgcagggag

SEQ ID NO: 51899 - DNA, 75 bp, synthetic construct
  source 1..75: mol_type = other DNA
cggaacgtggccacctttaataccggcaccacgaaggtgaccaccgacgtcggctggtcttatgcaccgggggca

SEQ ID NO: 51900 - DNA, 75 bp, synthetic construct
  source 1..75: mol_type = other DNA
gaagagacggatgttgaccagcggaacccgaagtatccgggctggatcagcatttatgttctgctggatgcgccc

SEQ ID NO: 51901 - DNA, 75 bp, synthetic construct
  source 1..75: mol_type = other DNA
atgatgtgtaatcgtaaacgctggtcacgcgaagaccgggaatttatcgaagccagtgtcggaaaaatgaccgtt

SEQ ID NO: 51902 - DNA, 75 bp, synthetic construct
  source 1..75: mol_type = other DNA
gaggctgtgaaatcagcacatcaagatgctgtaaacaccatcatgtataccgccaatcgaacgggtgttttatac

SEQ ID NO: 51903 - DNA, 75 bp, synthetic construct
  source 1..75: mol_type = other DNA
acaggcagtgatgcctttaagcaaaaagcgatgcggttgattatcgagcacaacatcaatgtgcgcatgaaacac

SEQ ID NO: 51904 - DNA, 75 bp, synthetic construct
  source 1..75: mol_type = other DNA
ttttctggtacacatatgcaggattatgcagtgcccggcttcattatgcactgggcttcggtaaccactatgaca

SEQ ID NO: 51905 - DNA, 75 bp, synthetic construct
  source 1..75: mol_type = other DNA
tcgctactacgatccccgccctcgcctttttggtatgcgcaccaatgtgtttcgccggatgcatcgcaaaattgt

SEQ ID NO: 51906 - DNA, 75 bp, synthetic construct
  source 1..75: mol_type = other DNA
gcatcgcaacgaatgaatcatggcgcgacaagcaaacgggccaacagaaagagcaaacagaatggcataaagtcg

SEQ ID NO: 51907 - DNA, 75 bp, synthetic construct
  source 1..75: mol_type = other DNA
gtaagttcggtgaacttgaatcaaaactggaaacggcgttgcgggagtgtagttctgctggaatcacgattgata

SEQ ID NO: 51908 - DNA, 75 bp, synthetic construct
  source 1..75: mol_type = other DNA
acgtattaccactgtcagcaacagcgacatcgtcctgataaacgcagtgcccgtgcgcagcgcgatgactggctg

SEQ ID NO: 51909 - DNA, 75 bp, synthetic construct
  source 1..75: mol_type = other DNA
actataaccatccgtaggaattatacaaaacttggcgaattcactccaccaaaaaccgatgctggcaccggaagg

SEQ ID NO: 51910 - DNA, 75 bp, synthetic construct
  source 1..75: mol_type = other DNA
gataaattttttcatgttcaacaatttgttgaaaaacctaaccattcgaaggcagaagaatatgtttccacagga

SEQ ID NO: 51911 - DNA, 75 bp, synthetic construct
  source 1..75: mol_type = other DNA
tcttaataataagaaagctactgacaatgaaattaatgacatcaaagttaacctgtctcatattcttattgattc

SEQ ID NO: 51912 - DNA, 75 bp, synthetic construct
  source 1..75: mol_type = other DNA
tctccgactgatggaatagtagcggcaccatccaaagctaggtttggtgcatacagtgcagcagaaatgaaaaaa

SEQ ID NO: 51913 - DNA, 75 bp, synthetic construct
  source 1..75: mol_type = other DNA
ggggcgtgtatctgtgtgaagtggggacggacaccgcaaaagaaattctctatgcccgtatgaaagccgatccca

SEQ ID NO: 51914 - DNA, 75 bp, synthetic construct
  source 1..75: mol_type = other DNA
atgagagttcattacacctgattactaacaagattctggcgtgttaccaacgcgaagctaacaaggaaatagctc

SEQ ID NO: 51915 - DNA, 75 bp, synthetic construct
  source 1..75: mol_type = other DNA
atgaattctgcaagtacgcataaaaatactgatttctggattttcggtctgttcttttttctctactttttcatc

SEQ ID NO: 51916 - DNA, 75 bp, synthetic construct
  source 1..75: mol_type = other DNA
ggctctggcaggtcgtggcccggaaggcaccattaacttcaataccagctccgaccgcgtccgtctgtgctatcc

SEQ ID NO: 51917 - DNA, 75 bp, synthetic construct
  source 1..75: mol_type = other DNA
aaacaaaaattcgccacagaaatgaaattaacagcacattctcatcgttgcctttgtctgccagaagaattttgt

SEQ ID NO: 51918 - DNA, 75 bp, synthetic construct
  source 1..75: mol_type = other DNA
agagcatcaaagctaaggttttcttataaaatagataaagaaagtgagggcttagatatcagaataccatacggt

SEQ ID NO: 51919 - DNA, 75 bp, synthetic construct
  source 1..75: mol_type = other DNA
cgtgaggggatgccgccgcgcgaaggtggcgacgaattcagccaggcatggaagcagacggtggaaattaaaggt

SEQ ID NO: 51920 - DNA, 75 bp, synthetic construct
  source 1..75: mol_type = other DNA
gtacatcgccagtcagacgcggcttggtcgggatattcgccgtagtgccatctttgccgccctgcatgttgaggg

SEQ ID NO: 51921 - DNA, 75 bp, synthetic construct
  source 1..75: mol_type = other DNA
cagcggcaaaagccagcctgcagaggtacatcgccagtcagacgcggcttggtcgggatattcgccgtagcgcca

SEQ ID NO: 51922 - DNA, 75 bp, synthetic construct
  source 1..75: mol_type = other DNA
aagccacaaattcttgcttgcttccatagtgttgattatgaaatgaacgtaaaaataatagccgaagctatacct

SEQ ID NO: 51923 - DNA, 75 bp, synthetic construct
  source 1..75: mol_type = other DNA
gcgcaggctgtgatggcggcttacgcgatgggcagcgatcttgaccaactcgctgccaactacaacgtaaaacgc

SEQ ID NO: 51924 - DNA, 75 bp, synthetic construct
  source 1..75: mol_type = other DNA
taccatcgaatcaacgctacccatcaatcatgctagatgatctatcctgcattttaggtgtctgctttaaaattc

SEQ ID NO: 51925 - DNA, 75 bp, synthetic construct
  source 1..75: mol_type = other DNA
gtgacagtgaacttgatcaccgaattgcacttcagttcggtggtggtaatgaggagacgaatctctggacgctct

SEQ ID NO: 51926 - DNA, 75 bp, synthetic construct
  source 1..75: mol_type = other DNA
ggcgaaggtcagagcgtggacgccggagatgcgtgccggaagcggtgtggtggtgtcctggcgttatggcaacgt

SEQ ID NO: 51927 - DNA, 75 bp, synthetic construct
  source 1..75: mol_type = other DNA
cgaaccgtacaaccaggaaatattgtccttgccttacccaaagggaccacaacacctgtcattcgtaaactggag

SEQ ID NO: 51928 - DNA, 75 bp, synthetic construct
  source 1..75: mol_type = other DNA
ttccctcaaatccacgctacccatcaatcatgctggatgatatatcccgcattttaggtgtatgctttaaaattc

SEQ ID NO: 51929 - DNA, 75 bp, synthetic construct
  source 1..75: mol_type = other DNA
gaccaagccgaagaactacgatcaggttccggcgaacaaacccattgttgacgcgatcaaagcgaaaaaacagga

SEQ ID NO: 51930 - DNA, 75 bp, synthetic construct
  source 1..75: mol_type = other DNA
ctgacggtgacgcctgctgataatgatgctgtgccgcccgttgcagctgtgatggaaagcgatgaagcgttacgc

SEQ ID NO: 51931 - DNA, 75 bp, synthetic construct
  source 1..75: mol_type = other DNA
agcagtatctggatatgccgattaaccaggcgctgattgacgcgctaaccgaatcggtgaatgcctatggccgca

SEQ ID NO: 51932 - DNA, 75 bp, synthetic construct
  source 1..75: mol_type = other DNA
agatttcaataaagcatttttaaataaaaacattgaaaaaataaatcaattcacagaaattaaaaaactttctgt

SEQ ID NO: 51933 - DNA, 75 bp, synthetic construct
  source 1..75: mol_type = other DNA
gtttttagaataacagcaaaagaatatgcttttattgctgatatagatacttctgttgcatataaacaattaaaa

SEQ ID NO: 51934 - DNA, 75 bp, synthetic construct
  source 1..75: mol_type = other DNA
tgccggaaaaacgccaatccttgaagggggcatggattacaagcaactggggatgagtaaccaggatgcggaatg

SEQ ID NO: 51935 - DNA, 75 bp, synthetic construct
  source 1..75: mol_type = other DNA
cgtctgcgtttctccggtcctaagacatcaatcatctgctctccaatgactagtctaaaaactagtattaagact

SEQ ID NO: 51936 - DNA, 75 bp, synthetic construct
  source 1..75: mol_type = other DNA
gcaccaccggaaccggaaatgactgaatatgatgttggtaatatcgacgcggtgatggaatcagataccagcacc

SEQ ID NO: 51937 - DNA, 75 bp, synthetic construct
  source 1..75: mol_type = other DNA
tttacctcacgggctgcaggtggagttgccggacattccgaccaccaccaccgtgcagaccgtccagctatggga

SEQ ID NO: 51938 - DNA, 75 bp, synthetic construct
  source 1..75: mol_type = other DNA
taatggcgttggcctgttgcagaatctggttgttcatgccctgcctggtgaccgccacggtgtcgccgcaggtgg

SEQ ID NO: 51939 - DNA, 75 bp, synthetic construct
  source 1..75: mol_type = other DNA
ggcttttttcatttctgacaggatattacaaaccgcagtttaagaaagaatatgaaatgattaattataatgatg

SEQ ID NO: 51940 - DNA, 75 bp, synthetic construct
  source 1..75: mol_type = other DNA
aattcgtctggaaagacaacaggagacagtgggtatcatccagctcaggagcaatctgcacaatacagctcgtca

SEQ ID NO: 51941 - DNA, 75 bp, synthetic construct
  source 1..75: mol_type = other DNA
cctcagagcgcacgctggcagtccaggcagcactgatgcagcaaccggacaaatccctggcactgctggcatgga

SEQ ID NO: 51942 - DNA, 75 bp, synthetic construct
  source 1..75: mol_type = other DNA
aatatgatgttggtaatatcgacgcggtgatggaatcagataccagcaccgcgccggacgtcatctggcctgaac

SEQ ID NO: 51943 - DNA, 75 bp, synthetic construct
  source 1..75: mol_type = other DNA
caccgcatccggcagttccagttcttcggtatcccgccccgccaggtatggcgtgaactccgccgccttgccgga

SEQ ID NO: 51944 - DNA, 75 bp, synthetic construct
  source 1..75: mol_type = other DNA
tccttacccgccgcagtcggtgaacgtggagcagacaggtgagcataactggcgctactgcatcactgacgccta

SEQ ID NO: 51945 - DNA, 75 bp, synthetic construct
  source 1..75: mol_type = other DNA
tgctgttcggcaagctcgcggaagtggcaggtgaatatctgcgtaagggcgcgcaggtctacatcgaggggcaac

SEQ ID NO: 51946 - DNA, 75 bp, synthetic construct
  source 1..75: mol_type = other DNA
agtctgccactgctgacgaaaatgtcttccgaacgcacgctggcagtccaggcagcactgatgcagcaaccggac

SEQ ID NO: 51947 - DNA, 75 bp, synthetic construct
  source 1..75: mol_type = other DNA
ctgtcaccagtccgtctcctgcctgtgtcaccatctctgtgctgtcacgtgaaaataacggcgtcgcatccgaag

SEQ ID NO: 51948 - DNA, 75 bp, synthetic construct
  source 1..75: mol_type = other DNA
ggccattatggatatggatgtaaacgcgatgatgaccgtgatcccccgcatctccagtccggcactgactgcaca

SEQ ID NO: 51949 - DNA, 75 bp, synthetic construct
  source 1..75: mol_type = other DNA
aattgcattaatattatttgtatttgattatggttacaaaaaatcaccacaggaatactcactttcatttataaa

SEQ ID NO: 51950 - DNA, 75 bp, synthetic construct
  source 1..75: mol_type = other DNA
tcattacgggcgcacgcagggtgtcacggagcaggtactgaaggcaaatccggggcttgccgaatatggcccctt

SEQ ID NO: 51951 - DNA, 75 bp, synthetic construct
  source 1..75: mol_type = other DNA
atagtatttaatctcttgtttagtctcttatgcattctctcgaaaatgatattaatgtcacaacacataaggaag

SEQ ID NO: 51952 - DNA, 75 bp, synthetic construct
  source 1..75: mol_type = other DNA
gcccatctgcgcggacgctatatcctgccgctggcggagataccgaccgttctgcgggacattgccatcacgctg

SEQ ID NO: 51953 - DNA, 75 bp, synthetic construct
  source 1..75: mol_type = other DNA
ggagaaagcgtcagtggaggaaatcagcctgccgttgctgacgaaaatgtcctcagagcgcacgctggcagtcca

SEQ ID NO: 51954 - DNA, 75 bp, synthetic construct
  source 1..75: mol_type = other DNA
caaacggattttattcgactgaatttcacggcaccaatattcctgatgatgcagtggaaatctcggaatcagagt

SEQ ID NO: 51955 - DNA, 75 bp, synthetic construct
  source 1..75: mol_type = other DNA
gcgcagataccgacttggatgatataaccagctatattgcacgctttgacatagatgcggcagaacgtttatgga

SEQ ID NO: 51956 - DNA, 75 bp, synthetic construct
  source 1..75: mol_type = other DNA
cgctctgcctgaatgtgtttggcagcggggcgtacagtagtcccgccagaatttacctggaatgtgggcattact

SEQ ID NO: 51957 - DNA, 75 bp, synthetic construct
  source 1..75: mol_type = other DNA
cgatgctgaccgagcaggaggtcgccgcgctggaactgcctgaccttgtggcgctggccggtaaggtggtcggtt

SEQ ID NO: 51958 - DNA, 75 bp, synthetic construct
  source 1..75: mol_type = other DNA
tgaagaaaggtgatgcggctgaacatgcagagcaccatatgaaagacaaccgctgggttccaggctggatgtgtg

SEQ ID NO: 51959 - DNA, 75 bp, synthetic construct
  source 1..75: mol_type = other DNA
gccaaactgctcgccggtggcactgacgtactgattcagctccaccatcacaatgaccgttatcgccatattgtt

SEQ ID NO: 51960 - DNA, 75 bp, synthetic construct
  source 1..75: mol_type = other DNA
gtggacctttccgatgggggcccgtttaccgcctcacgggacagctgtccgggggcggacgcaaaattttttgcc

SEQ ID NO: 51961 - DNA, 75 bp, synthetic construct
  source 1..75: mol_type = other DNA
caacctacactatgttccttgcagctatttttgcgattgcgattggcctgagtttccttgaaactgcagcgaaca

SEQ ID NO: 51962 - DNA, 75 bp, synthetic construct
  source 1..75: mol_type = other DNA
cggaaccacaggcggaggccggtacgaaaaaaggtggcgcaaaaacgaaaggccgtggacgtaaggccgcgcagc

SEQ ID NO: 51963 - DNA, 75 bp, synthetic construct
  source 1..75: mol_type = other DNA
cccatcagcaagttggacagaaagtaccgctttaccaacgccaccggcaggccactcattagtgacgccctctgt

SEQ ID NO: 51964 - DNA, 75 bp, synthetic construct
  source 1..75: mol_type = other DNA
gtacggggcaatttgttactgcggcattaaaacgagaagttgaatatcgccagcgccgcaaggccaaagaaccag

SEQ ID NO: 51965 - DNA, 75 bp, synthetic construct
  source 1..75: mol_type = other DNA
cgtgtttgatacccggctgtcggccaccatttatctgattggctttcagttctccaaacaactggcggcgatatt

SEQ ID NO: 51966 - DNA, 75 bp, synthetic construct
  source 1..75: mol_type = other DNA
tgggcaatgatgccgccgtcgaactctctccagttgctggacgaaacgttctcggtatcagagacggaatcatca

SEQ ID NO: 51967 - DNA, 75 bp, synthetic construct
  source 1..75: mol_type = other DNA
atgaagggggcatttacagagcggatacaggcgaatgctccggcctgggcacatgaacaactggttgcatgggat

SEQ ID NO: 51968 - DNA, 75 bp, synthetic construct
  source 1..75: mol_type = other DNA
cgacagtaatccttgctcataccattaaaggttacggcatgggcgacgcggctgaaggtaaaaacatcgcgcacc

SEQ ID NO: 51969 - DNA, 75 bp, synthetic construct
  source 1..75: mol_type = other DNA
gtgcaaaaccaggcgaattatatacagagtgcttctaagctaatttctgattctgcgcgagtgaatagccgtatt

SEQ ID NO: 51970 - DNA, 75 bp, synthetic construct
  source 1..75: mol_type = other DNA
gggtccggctgcgcattgctgctggtccttctggtggcgctggcgcgtcccggaaccagtcagacagcgatggtc

SEQ ID NO: 51971 - DNA, 75 bp, synthetic construct
  source 1..75: mol_type = other DNA
gacgctggaaaatccttcaccagagctgctcactgtgaagtggcacactgaatttggccacctgaacagaggtga

SEQ ID NO: 51972 - DNA, 75 bp, synthetic construct
  source 1..75: mol_type = other DNA
atgaatcgcatccgattgatggcctgtctggtgaatatgcggagaaatcccttgaagaatgggcggaacggcttc

SEQ ID NO: 51973 - DNA, 75 bp, synthetic construct
  source 1..75: mol_type = other DNA
tacgtgaaaaaaggcgttacggactctcagggggagccgtgggttggtgactggaaatatgtaccgacaaaagag

SEQ ID NO: 51974 - DNA, 75 bp, synthetic construct
  source 1..75: mol_type = other DNA
tggatggatttctgaaaggtaaatgcatcccatgtgatttaaaggttaacgaaacaaatgctgaatatctggtac

SEQ ID NO: 51975 - DNA, 75 bp, synthetic construct
  source 1..75: mol_type = other DNA
gcacccgccgctctgataaacgttacgggcctcagagcaaggatatgcaggtttctgaattcatttctctgattt

SEQ ID NO: 51976 - DNA, 75 bp, synthetic construct
  source 1..75: mol_type = other DNA
tgtcgaaagagtgtggttttcaggtatctgcacatcgtttcagacacactctggcaagtactctgatggcggcac

SEQ ID NO: 51977 - DNA, 75 bp, synthetic construct
  source 1..75: mol_type = other DNA
gttgaaaacgcaacgctgctttttaatctttcccaggggcgtcgtgattatgaaactgaacatttcaatgccact

SEQ ID NO: 51978 - DNA, 75 bp, synthetic construct
  source 1..75: mol_type = other DNA
cgatttgttcagcgacgacgagggtggctatgtggactgtgttgcgctcgatgccgccctgctggaaaaactcca

SEQ ID NO: 51979 - DNA, 75 bp, synthetic construct
  source 1..75: mol_type = other DNA
tgttttttttatttattcagttttcaccggatgcctattctcaaaagttctgtaatattttatgggcaaatgaaa

SEQ ID NO: 51980 - DNA, 75 bp, synthetic construct
  source 1..75: mol_type = other DNA
tggactggcgttggccgtcgtcctaaatggttagttgagctgctggaaaaaggtgtggatttggacgatctgaag

SEQ ID NO: 51981 - DNA, 75 bp, synthetic construct
  source 1..75: mol_type = other DNA
aatcctcggcgagtttgatgatgccgcgttgatgaaagcttttggtgcgatgcacaatgcaatcttcgttgcccc

SEQ ID NO: 51982 - DNA, 75 bp, synthetic construct
  source 1..75: mol_type = other DNA
gtcgcgtcgaaaatgtgatggaagagtaccatgctatttttgctgagcggatgattcagcacccggcggtacagc

SEQ ID NO: 51983 - DNA, 75 bp, synthetic construct
  source 1..75: mol_type = other DNA
ttattaccgtctccgaagtgggatcgacaggataactgcgcaggttaactacttgcaggaatacatcaagacgca

SEQ ID NO: 51984 - DNA, 75 bp, synthetic construct
  source 1..75: mol_type = other DNA
tcttactccgtccttatccactcagactactgtcagtgccagctcctgcaaggtggagttccgtcacggtaacat

SEQ ID NO: 51985 - DNA, 75 bp, synthetic construct
  source 1..75: mol_type = other DNA
aaccgctgggtgcctggctggatgtgtgcaccacgtccacaggcagagacggaaaccacggaataccgtgacaac

SEQ ID NO: 51986 - DNA, 75 bp, synthetic construct
  source 1..75: mol_type = other DNA
agcgtatggcagaacaacaatctgatatggttaagaaaattgtctttgatacgctcaagaagctatataaaaaag

SEQ ID NO: 51987 - DNA, 75 bp, synthetic construct
  source 1..75: mol_type = other DNA
cgcagaaaaatgattatccggcatccgttgatcacaatgccgccatgattgaagaattgcgcgcagatcctgatt

SEQ ID NO: 51988 - DNA, 75 bp, synthetic construct
  source 1..75: mol_type = other DNA
gacctcttctgacactggcgttgaattattacctgtagaaataacgccggatgagcagaaaaaacctgtggcggc

SEQ ID NO: 51989 - DNA, 75 bp, synthetic construct
  source 1..75: mol_type = other DNA
atgacatggaatccgttggcgctggcgacggcgctgcaaactgtacctgaacaaaatattgatgtaacaaatagc

SEQ ID NO: 51990 - DNA, 75 bp, synthetic construct
  source 1..75: mol_type = other DNA
cgtttcttggtgcggaactgaaaagtggtattgaaatcgtcactacggcgctgaatctggaggaacatattcacg

SEQ ID NO: 51991 - DNA, 75 bp, synthetic construct
  source 1..75: mol_type = other DNA
tttggcccggacatcatcgactgcgtgatgttatcgccgaagtggtacggcgagtggatgccaaaactgaaggcc

SEQ ID NO: 51992 - DNA, 75 bp, synthetic construct
  source 1..75: mol_type = other DNA
tcacatcagatacaactgattttgtttgtaagcttgaagacattacaaccatcgcaaaatgttgttgcgtttttt

SEQ ID NO: 51993 - DNA, 75 bp, synthetic construct
  source 1..75: mol_type = other DNA
tttacgaagcattaagaaagacaccgcagtattacggagcaaaaggtgatggagtaaacgatgatacatccgcat

SEQ ID NO: 51994 - DNA, 75 bp, synthetic construct
  source 1..75: mol_type = other DNA
atccgcgacatcccgattctgacgtttgaagccccggacgacttcatcagccgtgccgcatggctgcgtgaatcg

SEQ ID NO: 51995 - DNA, 75 bp, synthetic construct
  source 1..75: mol_type = other DNA
agaagaaacaccggacgaatcgattcgtgctgaggtgttcagctacatccctaggcaaaagctggctgaaatcat

SEQ ID NO: 51996 - DNA, 75 bp, synthetic construct
  source 1..75: mol_type = other DNA
cgcctgaaaaatctcgcacgttatgctggtatgacttcggtgttcaatattgccaggatgtcaccgcagaaaagg

SEQ ID NO: 51997 - DNA, 75 bp, synthetic construct
  source 1..75: mol_type = other DNA
cagtgccggatgctcacccgtgtccggcgcacgcactccacctcacccgtggagaactccttaattactaacctt

SEQ ID NO: 51998 - DNA, 75 bp, synthetic construct
  source 1..75: mol_type = other DNA
ggcatcactgcgaaatactcgatgttgagggttatacctaccgcacggaaacgcagaatggcgatgtgctgatca

SEQ ID NO: 51999 - DNA, 75 bp, synthetic construct
  source 1..75: mol_type = other DNA
ttgccccgccacaaggaataacaattgaagcggtaaacggaatgctcgcggagcggttagcacagaaacacggta

SEQ ID NO: 52000 - DNA, 75 bp, synthetic construct
  source 1..75: mol_type = other DNA
ccttatgggtgcttgccacgattcttgcgggtatgctctcccctatgcaatcagcggtgaatggtcaattaggtc

SEQ ID NO: 52001 - DNA, 75 bp, synthetic construct
  source 1..75: mol_type = other DNA
tggtgctactaaaaatatcggtgacagcatggcacggcacatcgaaaaatgtttcgacctgcctgtcggatggct

SEQ ID NO: 52002 - DNA, 75 bp, synthetic construct
  source 1..75: mol_type = other DNA
caaaccagcgtggaccgcttgctgcaactctctcagggccaggcggtgaagggcaatcagctgttgcccgtctca

SEQ ID NO: 52003 - DNA, 75 bp, synthetic construct
  source 1..75: mol_type = other DNA
tgagctgggattacgtgcgcagcttagcgcctcacgcagccaggggttgaatgcgttaagcgaggcgattatcgc

SEQ ID NO: 52004 - DNA, 75 bp, synthetic construct
  source 1..75: mol_type = other DNA
cggtcctggctggaaagcaccctttgatatccgcttacagatacgcgataacgaactgatactcaatgataacgg

SEQ ID NO: 52005 - DNA, 75 bp, synthetic construct
  source 1..75: mol_type = other DNA
tcacaaagcacgatggctaacaggtatgctcgtgacacatttcctgctgactgggtgataatttgcagtatagag

SEQ ID NO: 52006 - DNA, 75 bp, synthetic construct
  source 1..75: mol_type = other DNA
gtacgccgctgaaaatggtttcagtgtgatcagcagttcactgggcatttcacgctggaaaaatatgcagcaggt

SEQ ID NO: 52007 - DNA, 75 bp, synthetic construct
  source 1..75: mol_type = other DNA
actcgtttacccggtggaagaatcttcgtcgagggtggaaacagagcctttgaatgtaagatagaagacattgaa

SEQ ID NO: 52008 - DNA, 75 bp, synthetic construct
  source 1..75: mol_type = other DNA
tgccatcacgcctgacttacgcaaacgcgaatgtttccgcgtggagctgcgtaatgtgacctatgaccagcagcg

SEQ ID NO: 52009 - DNA, 75 bp, synthetic construct
  source 1..75: mol_type = other DNA
caggtctgattattcagtggggtattgtcagtggagcatcaaactatacggtgacttacccggtaacattcccaa

SEQ ID NO: 52010 - DNA, 75 bp, synthetic construct
  source 1..75: mol_type = other DNA
caccagaacaaatcgaaatacgtgagctgaggaaaaagctacaacgcattgaaatggagaatgaaatattaaaaa

SEQ ID NO: 52011 - DNA, 75 bp, synthetic construct
  source 1..75: mol_type = other DNA
ttgccggctcgggcaagaccacgctgctgatacgacggttgagtgaggacaggaggacgctgctcctgaccttca

SEQ ID NO: 52012 - DNA, 75 bp, synthetic construct
  source 1..75: mol_type = other DNA
ttgccggctcgggtaaaaccacgctgctgatacgtcggttaagagaggaccggcggacgctgttcctgaccttca

SEQ ID NO: 52013 - DNA, 75 bp, synthetic construct
  source 1..75: mol_type = other DNA
aaataaactggcatcgtcgttaccgttcaccgcagggcgttaaaaccgaacatgagatcctgcggatcttcgaga

SEQ ID NO: 52014 - DNA, 75 bp, synthetic construct
  source 1..75: mol_type = other DNA
ggcgggcatagccaggaaatgacctggcggcgattactgcgcccgacgctggagccagttgctattccgcgttac

SEQ ID NO: 52015 - DNA, 75 bp, synthetic construct
  source 1..75: mol_type = other DNA
ctgtagcgggtcttgggatgcatatgttgccagctactaaggcgattcccaaagagatgctaccgatcgtcgaca

SEQ ID NO: 52016 - DNA, 75 bp, synthetic construct
  source 1..75: mol_type = other DNA
tggcgcgttattgatgaaatgccagtaaacagtatgaacaagcgtgtctatgcgcaattacaggagttatttcat

SEQ ID NO: 52017 - DNA, 75 bp, synthetic construct
  source 1..75: mol_type = other DNA
ggcattgtgctaagtgatgtgtgtatgcctggctgctctggtatcgatttgatgatgttattccaccaggatgat

SEQ ID NO: 52018 - DNA, 75 bp, synthetic construct
  source 1..75: mol_type = other DNA
caaacatgcggtacgcacttataaagccaaccattattgcgacccggcgacgcatcattttaatgaagatatccg

SEQ ID NO: 52019 - DNA, 75 bp, synthetic construct
  source 1..75: mol_type = other DNA
atgccgcccttgcgggggtggacagcacgattgttgaagtgatggggatccgtgcgcagttcacctccggagcac

SEQ ID NO: 52020 - DNA, 75 bp, synthetic construct
  source 1..75: mol_type = other DNA
atatcaccggctttcgctcttattttccagatgtattgcgactaatattcgaagagcaattatctgttcgggcta

SEQ ID NO: 52021 - DNA, 75 bp, synthetic construct
  source 1..75: mol_type = other DNA
ttgtcctcctggcgtgaccatcatgaacgtccgtcaggcgcaaccgctgggcctgggtcactccatcctgtgtgc

SEQ ID NO: 52022 - DNA, 75 bp, synthetic construct
  source 1..75: mol_type = other DNA
tttcacctatcatggcagtataaaagattatgtttttcacataaataacatatacatgaatgtattgccttatta

SEQ ID NO: 52023 - DNA, 75 bp, synthetic construct
  source 1..75: mol_type = other DNA
caccgtcgtcccgtaacaggctgtacgtggcatgctcacgggcgcgcggcaacatttattttgttcccgaaactc

SEQ ID NO: 52024 - DNA, 75 bp, synthetic construct
  source 1..75: mol_type = other DNA
atattacgtatccattacaaaaaggaaaaaagacagtatcatcagaaatgatgaacgttgaacaatcctatgaga

SEQ ID NO: 52025 - DNA, 75 bp, synthetic construct
  source 1..75: mol_type = other DNA
tggaaaacaaggatttctttggtactcctgtttgctttaaagaaaaaatcccgtataccgctgaaaattctcagc

SEQ ID NO: 52026 - DNA, 75 bp, synthetic construct
  source 1..75: mol_type = other DNA
gcgtgcgcgttatcttgcatggaaggaacactggcgtaaacccgatttacgttacggcgaacggttgcgggaaat

SEQ ID NO: 52027 - DNA, 75 bp, synthetic construct
  source 1..75: mol_type = other DNA
ccaaaccagccagttactgccgcgcatcaagatcaccgaactgctgatggacgtggacgactggacgggcttcag

SEQ ID NO: 52028 - DNA, 75 bp, synthetic construct
  source 1..75: mol_type = other DNA
ctgcgcaaggtgccggccgatgcgcccaccgccttcatcaagccgcgctggaagccgctagtgataaccccggaa

SEQ ID NO: 52029 - DNA, 75 bp, synthetic construct
  source 1..75: mol_type = other DNA
gcgcctggccagctcgatcaagcagggcaccgtcaccgcctcgctgatgctgcgcaagctcggcagctacccgcg

SEQ ID NO: 52030 - DNA, 75 bp, synthetic construct
  source 1..75: mol_type = other DNA
cacatcgagcggctgaagacatttcagttggtggacttgcccgaaggcctgggccggcacatccaccagaaccgc

SEQ ID NO: 52031 - DNA, 75 bp, synthetic construct
  source 1..75: mol_type = other DNA
tgccgcatcgatgaatgccggggatggagcgccgggcgggcgctggctccggtcatgttccgcgcccagctcaat

SEQ ID NO: 52032 - DNA, 75 bp, synthetic construct
  source 1..75: mol_type = other DNA
accaacaccacctggatgacatgtggcgatccctgtgattccgcactgcgtatctggggcgacaccgttgtcgag

SEQ ID NO: 52033 - DNA, 75 bp, synthetic construct
  source 1..75: mol_type = other DNA
gcagactgtgacagaaaaggcagatgcagcgcttgataaacgcataacaaacaacaccagtgcgataactaaaaa

SEQ ID NO: 52034 - DNA, 75 bp, synthetic construct
  source 1..75: mol_type = other DNA
gctgcatggcgaagcaaaccataatgccgaagaaggtacggcagatcttgaattccacggcgaagagggaggata

SEQ ID NO: 52035 - DNA, 75 bp, synthetic construct
  source 1..75: mol_type = other DNA
gggagcttcacgccactcatcagggttgaaaccgccaccggtgagcaggcgaaaacgcagcgccgcagcctggcg

SEQ ID NO: 52036 - DNA, 75 bp, synthetic construct
  source 1..75: mol_type = other DNA
atcacccggcttacttccttttaaaaaatgccgggtaacaacggcggaactggcagaaacaacattacctgcgtc

SEQ ID NO: 52037 - DNA, 75 bp, synthetic construct
  source 1..75: mol_type = other DNA
ctgtgtgccggtggacatgccacccgccgtctatgacgcgctggtcagcttcgcttttaacgtcggcaccggcgc

SEQ ID NO: 52038 - DNA, 75 bp, synthetic construct
  source 1..75: mol_type = other DNA
gggctcagagacatcaacactctctgaatttaatcctaatccggaactgaccgacctgatgtttgataaatataa

SEQ ID NO: 52039 - DNA, 75 bp, synthetic construct
  source 1..75: mol_type = other DNA
cctggttgcggcaggccccactaaaaccgaactcccggcacatgctcgaacacatcgagcggctgaagacatttc

SEQ ID NO: 52040 - DNA, 75 bp, synthetic construct
  source 1..75: mol_type = other DNA
gcgaccctggccgccgtggtgctggagagtacggcgaccgtgattgatgagctggtcgatctgcacgaccgcatc

SEQ ID NO: 52041 - DNA, 75 bp, synthetic construct
  source 1..75: mol_type = other DNA
ccaacatacacctttgcttctcgcatggatgcatctaatttttacatccgcgattacctggattttgcgcaaaac

SEQ ID NO: 52042 - DNA, 75 bp, synthetic construct
  source 1..75: mol_type = other DNA
aatgcagcaatgcgccgctacctgcaggcggtgacgcatccgcaatgggcgtgggatgtgggtctgaacggccgt

SEQ ID NO: 52043 - DNA, 75 bp, synthetic construct
  source 1..75: mol_type = other DNA
agcgtatggcagaacaacaatctgatatggttaagaaaattgtctttgatacgctcaaagagctatataaaaaag

SEQ ID NO: 52044 - DNA, 75 bp, synthetic construct
  source 1..75: mol_type = other DNA
caatatcgcggacaattcgatgttgtccgcccggtggtcaggaaactggtcgcagagatgcgccggaaccctatc

SEQ ID NO: 52045 - DNA, 75 bp, synthetic construct
  source 1..75: mol_type = other DNA
ctgggaaaacggctggcgcgatgtcaccaactcgcgcgcaccggttaaaacccccgccgacctgaaagggctgaa

SEQ ID NO: 52046 - DNA, 75 bp, synthetic construct
  source 1..75: mol_type = other DNA
ataagtggctgacaccgccggaggatattctggagcaggttacccgtgaatacgaacgaagaatacagaactgtc

SEQ ID NO: 52047 - DNA, 75 bp, synthetic construct
  source 1..75: mol_type = other DNA
attaacggtaattgctctataattggtacagtgattttctcgggaaaaccaagaagatacaaaataaaggcctaa

SEQ ID NO: 52048 - DNA, 75 bp, synthetic construct
  source 1..75: mol_type = other DNA
tgcggtgttgaaatcgggggttcacgcaaccctggcgggggtaattgtcggcttctttattcctttgaaagagaa

SEQ ID NO: 52049 - DNA, 75 bp, synthetic construct
  source 1..75: mol_type = other DNA
tgcgggtgcacagcgactactcgatgatcgatggcctggccaaaaccgcaccgctggtaaaaaaggcggcggcgt

SEQ ID NO: 52050 - DNA, 75 bp, synthetic construct
  source 1..75: mol_type = other DNA
gggcgtgatactgaatcacacacttaccatcatgcaacggatgaaaataagtgggagccgccatcaccggggatg

SEQ ID NO: 52051 - DNA, 75 bp, synthetic construct
  source 1..75: mol_type = other DNA
cattatatatcaaataaaagcggtcagtgctctggtaaaaggtaaaacagatgagtcttaccaggcgataaatac

SEQ ID NO: 52052 - DNA, 75 bp, synthetic construct
  source 1..75: mol_type = other DNA
tgacagagcgtctgatcactgcaaccgatcgcctggcagattaccccaggctgtatgaaacggatgaacgctatg

SEQ ID NO: 52053 - DNA, 75 bp, synthetic construct
  source 1..75: mol_type = other DNA
acgtgagctgaggaaaaagctacaacgcattgaaatggagaatgaaatattaaaaaaggctactgtagattcaat

SEQ ID NO: 52054 - DNA, 75 bp, synthetic construct
  source 1..75: mol_type = other DNA
gcactggggcggcgtaactaccggacgtggtttctgccagataaaggcaacggaacaaaagaatcatggtttttc

SEQ ID NO: 52055 - DNA, 75 bp, synthetic construct
  source 1..75: mol_type = other DNA
atgcaggactgacccagctttaccggatgcgcgatgcgcagttgtggcgtcacatcgaatttcaccctgaatgca

SEQ ID NO: 52056 - DNA, 75 bp, synthetic construct
  source 1..75: mol_type = other DNA
cggacctggtggagatcctgccggaagcccgtaagttcggtggctgttatgtgtttggtatccagtcctatgccc

SEQ ID NO: 52057 - DNA, 75 bp, synthetic construct
  source 1..75: mol_type = other DNA
ctgattaaagtgctgccgcgcatgaccatgccgtcgctgaccgagcaggaagccgccgcactggagctgcccgac

SEQ ID NO: 52058 - DNA, 75 bp, synthetic construct
  source 1..75: mol_type = other DNA
gatgtgcagcaatgctataccgccaaagagcgccgtttactgcaacatacctgcgcgcagcttcacgcaggtgag

SEQ ID NO: 52059 - DNA, 75 bp, synthetic construct
  source 1..75: mol_type = other DNA
tcaccctgggcgttcaggccggttatgcccacagcgtcagcggcagcagcgctgaaggttataacggtcaggcca

SEQ ID NO: 52060 - DNA, 75 bp, synthetic construct
  source 1..75: mol_type = other DNA
aaagaattatcgagggtcagaagactcagtaccggcgaaatgctgcatgacctgattgttgaagagtataaaagg

SEQ ID NO: 52061 - DNA, 75 bp, synthetic construct
  source 1..75: mol_type = other DNA
gtaaaggggactatacttgtggtggccaagaccaacggggagaatcaaaaggagatggtctatgggggccaggta

SEQ ID NO: 52062 - DNA, 75 bp, synthetic construct
  source 1..75: mol_type = other DNA
actgggaatccatcggcggcacatggggcgggcgcttcagccgggcagacggcaatcatttcagccttgagcaca

SEQ ID NO: 52063 - DNA, 75 bp, synthetic construct
  source 1..75: mol_type = other DNA
ccgcgttaataaaagctgatgaatgcatcatttcaaaaattgcttcatattctggttttgctgtaacagcctttt

SEQ ID NO: 52064 - DNA, 75 bp, synthetic construct
  source 1..75: mol_type = other DNA
aacgaagccgtcagtcgcgaacgtcagacaggaatgcagatggtgcagtctgtgcttgagcgcatcggggaggtg

SEQ ID NO: 52065 - DNA, 75 bp, synthetic construct
  source 1..75: mol_type = other DNA
agaaagaacaatacaacctgaacaaattacaaaaacgtctgcgtcgtaacgtgggcgaagccattgctgacttca

SEQ ID NO: 52066 - DNA, 75 bp, synthetic construct
  source 1..75: mol_type = other DNA
catcatttcaaaaatttcttcgtattctggttttgccgtaacagcctttttgagaattaaagaccaggatattgc

SEQ ID NO: 52067 - DNA, 75 bp, synthetic construct
  source 1..75: mol_type = other DNA
tacgctatttttccctcctcccctgcctttgcattctttcattttcgtctccggcagccatgctgtctccgggtg

SEQ ID NO: 52068 - DNA, 75 bp, synthetic construct
  source 1..75: mol_type = other DNA
atgcgctttacttttgttaatgcagacgatgctattaatgccctgaaaacaggcaaccatgtcgatttctcgttt

SEQ ID NO: 52069 - DNA, 75 bp, synthetic construct
  source 1..75: mol_type = other DNA
tctgaccggacatcagcagagcgcacgccatcatctgcggcggcccttaccggcatacgctgcagtaccgcgcat

SEQ ID NO: 52070 - DNA, 75 bp, synthetic construct
  source 1..75: mol_type = other DNA
atgcgtaattcacttaaagccgttttatttggtgccttctctgtcatgttttctgccggtcttcatgctgaaaca

SEQ ID NO: 52071 - DNA, 75 bp, synthetic construct
  source 1..75: mol_type = other DNA
aattgctggatggggttgaagttaagaggttgccattgggggaactaggtgaattagttcgtggaaatggattgc

SEQ ID NO: 52072 - DNA, 75 bp, synthetic construct
  source 1..75: mol_type = other DNA
ttatcattaccaccttccttctaaccgcatgtaacaatgaaccatcgcaagacgatatatacaatgttttcaaaa

SEQ ID NO: 52073 - DNA, 75 bp, synthetic construct
  source 1..75: mol_type = other DNA
gtcgatggtgttaatctcactgaactgattaacaaggtcgctgaaaacggttattcactccgtgtggtggatgac

SEQ ID NO: 52074 - DNA, 75 bp, synthetic construct
  source 1..75: mol_type = other DNA
agagtcttacggtcagtctgggctgctacgaagggctgaaatgtgctgcgctaccgcctgctgaagacggacatt

SEQ ID NO: 52075 - DNA, 75 bp, synthetic construct
  source 1..75: mol_type = other DNA
tatggctctttctgcaccagcattcgctgctgataaagcggtatcaactgattcggttacgctgaataaagataa

SEQ ID NO: 52076 - DNA, 75 bp, synthetic construct
  source 1..75: mol_type = other DNA
gattctgcaaaaacatttgttcaggagactctgaaagatacctgggagtctgctgacgagtggtttgttcactaa

SEQ ID NO: 52077 - DNA, 75 bp, synthetic construct
  source 1..75: mol_type = other DNA
ctgaactacattgaaatcggtatgttgtggtcaactaaaactggccaccgcgttagagtttttccagtatcggtt

SEQ ID NO: 52078 - DNA, 75 bp, synthetic construct
  source 1..75: mol_type = other DNA
atgcgtgttgagatctgtattgctaaagaaaaaatcagcaaaatgccaaacggtgctgtggatgcgttaaaggaa

SEQ ID NO: 52079 - DNA, 75 bp, synthetic construct
  source 1..75: mol_type = other DNA
cctggcgcagtgacgattatcgatctcgatttaagccgttataacgccatcgccagccgctttgccgaggaacgc

SEQ ID NO: 52080 - DNA, 75 bp, synthetic construct
  source 1..75: mol_type = other DNA
gaacgcgagaggatgggcaaatatccaaaacgctcaactagacagggctcagcgggcacaaatgcataatgataa

SEQ ID NO: 52081 - DNA, 75 bp, synthetic construct
  source 1..75: mol_type = other DNA
atggaatgctcaatcaaaggccacgattaccgcgtggcaaaactcagcgtttttgaccagctgaaagtgacccgc

SEQ ID NO: 52082 - DNA, 75 bp, synthetic construct
  source 1..75: mol_type = other DNA
ggttatggctcccgtgagttgcgggttgagacaataagttgctggctggccagactggtcatcgtcaataaacat

SEQ ID NO: 52083 - DNA, 75 bp, synthetic construct
  source 1..75: mol_type = other DNA
tgccgataccgcagaacatcctgacgacgatttatgggcatcactatgttttgccagtcacgatttgatgagcca

SEQ ID NO: 52084 - DNA, 75 bp, synthetic construct
  source 1..75: mol_type = other DNA
atggtacatgaccgcatagcggaagaactggaggcgaaaggcttttaccggagagcgtcggcgcgatggggtgaa

SEQ ID NO: 52085 - DNA, 75 bp, synthetic construct
  source 1..75: mol_type = other DNA
gcgcgccaaccagtcataccggataatttcggaatactgaaagaggccataaaccgcacacataccgggatgggc

SEQ ID NO: 52086 - DNA, 75 bp, synthetic construct
  source 1..75: mol_type = other DNA
gatgcgctggagcgcagtgcgccgctgaccatcacgccgtctccggaaacgtctgccggtactgaaggtccctgc

SEQ ID NO: 52087 - DNA, 75 bp, synthetic construct
  source 1..75: mol_type = other DNA
accggaactgaaatcgcgggtaacaacgcggtggtgaatcaggacggcgagctggatgtgagcggcggcggtcac

SEQ ID NO: 52088 - DNA, 75 bp, synthetic construct
  source 1..75: mol_type = other DNA
gccgaaagatccggtagcgtactggccgattatgtcttctattccgcaaacattgctgtatgaaggttacggtat

SEQ ID NO: 52089 - DNA, 75 bp, synthetic construct
  source 1..75: mol_type = other DNA
catggcctccggacctggctgagtttgtggcactgatttcgaaaagcggagccaatccattcggtctgacggtgg

SEQ ID NO: 52090 - DNA, 75 bp, synthetic construct
  source 1..75: mol_type = other DNA
tctgttacgcgcaccgccgataaagattcagctaaaacttttgttcaggagactctgaaagatacctggaagtct

SEQ ID NO: 52091 - DNA, 75 bp, synthetic construct
  source 1..75: mol_type = other DNA
ctcaggctctggcagaacgaagggcgtatatcgcggcgtcttccggtaacaacctcttctggcgctggcgttgaa

SEQ ID NO: 52092 - DNA, 75 bp, synthetic construct
  source 1..75: mol_type = other DNA
cggctttccagaacggtgatagaacacatggactggcaccagtgcattaagcgttatgaccgtccgcacacgctg

SEQ ID NO: 52093 - DNA, 75 bp, synthetic construct
  source 1..75: mol_type = other DNA
acaaaggtgattgccggaccgtctgtttacatctgcaatgagtgcgtggatttgtgcaatgaaattatcaggaga

SEQ ID NO: 52094 - DNA, 75 bp, synthetic construct
  source 1..75: mol_type = other DNA
ttcagtcctttgctgacgaacgctgcggacgcgcaggcgttgtgtatcaggcgtcgaattttgattttattggca

SEQ ID NO: 52095 - DNA, 75 bp, synthetic construct
  source 1..75: mol_type = other DNA
tgaagacgggtgaaaatacgttccattatgaaagcctgcgcggtcgttatgtgagtctgatggccggccctgtct

SEQ ID NO: 52096 - DNA, 75 bp, synthetic construct
  source 1..75: mol_type = other DNA
tggagcaggcattccgacgcgaacatgccgaaacgggaataacattactggagtggtgccgtaagaaaaagatta

SEQ ID NO: 52097 - DNA, 75 bp, synthetic construct
  source 1..75: mol_type = other DNA
atgaaaatgcagacattacccatcgttccatggattggtggcaaacgccgccttgcaaaacacattctgccgctg

SEQ ID NO: 52098 - DNA, 75 bp, synthetic construct
  source 1..75: mol_type = other DNA
gtggtgaaattgttcatggtcatgatcttcgggaaatggatgatctttatatacgaacaaccacttttgaatgcc

SEQ ID NO: 52099 - DNA, 75 bp, synthetic construct
  source 1..75: mol_type = other DNA
gtgttgccattgccctgacgctggtagcctgtaaatcccctaccccaccgaagggcgtgcagcccatttccggtt

SEQ ID NO: 52100 - DNA, 75 bp, synthetic construct
  source 1..75: mol_type = other DNA
gtaaaacgtatatcatcccttccgcttcgcctgcttgttgccgcaccatttgtgttactgactgcggcagacatg

SEQ ID NO: 52101 - DNA, 75 bp, synthetic construct
  source 1..75: mol_type = other DNA
tcgtcactctcacccggcgttatggcgtcagtctaattcatctggacgccggcgcagaatgtctgccgggtttac

SEQ ID NO: 52102 - DNA, 75 bp, synthetic construct
  source 1..75: mol_type = other DNA
tgacaccggcgaatcagaatggattcatttcacaggtagcggatatctgttacgtactgatgcgtggtcataccc

SEQ ID NO: 52103 - DNA, 75 bp, synthetic construct
  source 1..75: mol_type = other DNA
tattcgtaacctgaccacaaaaacatgcattactgaccgcatgattaaagtcttcctcggttgtgatggtttacc

SEQ ID NO: 52104 - DNA, 75 bp, synthetic construct
  source 1..75: mol_type = other DNA
catatcatcgtactgatctactggagcagcgtgtaccgatgatgcaggcatgggcggattatgtgatgtctcaaa

SEQ ID NO: 52105 - DNA, 75 bp, synthetic construct
  source 1..75: mol_type = other DNA
atgaaagatttaacactcaaatttgcagacagggccgacttttcggcctttatggatagcattggctattatgat

SEQ ID NO: 52106 - DNA, 75 bp, synthetic construct
  source 1..75: mol_type = other DNA
gaggcgttacgcaagatacctggcggctaccgggaaaacgggaacggaatttgttcagcgagcgacgacgttttt

SEQ ID NO: 52107 - DNA, 75 bp, synthetic construct
  source 1..75: mol_type = other DNA
acccgggacattcccggctatctgttcgccggtggtgtggcttacgacggcgatgtaattacggtttaccccgga

SEQ ID NO: 52108 - DNA, 75 bp, synthetic construct
  source 1..75: mol_type = other DNA
gggtttctggtcataatgaggagttagataccagcggggggacaggtactgcgattgtagttcaggctgcaggta

SEQ ID NO: 52109 - DNA, 75 bp, synthetic construct
  source 1..75: mol_type = other DNA
gaaatcgtcctcgtcactcacgcctctaaaaatgccgtggaaaaccattttgacacttcttacgaactagaagcc

SEQ ID NO: 52110 - DNA, 75 bp, synthetic construct
  source 1..75: mol_type = other DNA
gaacttgaacgaacccagccgggcgcctggggccgtatccagctaaccgacgccattgccgaactggcgaagaag

SEQ ID NO: 52111 - DNA, 75 bp, synthetic construct
  source 1..75: mol_type = other DNA
ctcctgcagagcgcaagagggcgcagcgagagagggaaagaaagcgggaacaaaatggcgattgtcacggcgcgt

SEQ ID NO: 52112 - DNA, 75 bp, synthetic construct
  source 1..75: mol_type = other DNA
gattttggacagatttcgaaaacacacttggaaaacagcggtatttcagtgaaaaaagatgtggatataaaactg

SEQ ID NO: 52113 - DNA, 75 bp, synthetic construct
  source 1..75: mol_type = other DNA
tccggcgttatggcgtcagtctcattcatctggatgccagtgccggatgcctgccgggtttacccactttcgact

SEQ ID NO: 52114 - DNA, 75 bp, synthetic construct
  source 1..75: mol_type = other DNA
ccgattttgttcagcgaacactggcgcttatcgatcaatataacgaaatgattgaggtgctgggcaaaccattca

SEQ ID NO: 52115 - DNA, 75 bp, synthetic construct
  source 1..75: mol_type = other DNA
atcttcgcctccccctataccagaggcggttcctgccacagattctccctcccacagtcttaacattcaaaacac

SEQ ID NO: 52116 - DNA, 75 bp, synthetic construct
  source 1..75: mol_type = other DNA
ttctgaagctcacaatggatccgccggtacccataacatccccggtgttcatggaagatggaggctatgagctgt

SEQ ID NO: 52117 - DNA, 75 bp, synthetic construct
  source 1..75: mol_type = other DNA
gacagattgataaaagggccgctgagaaaatcagcgccagtcagtcagccggaaccagacccgaagagccgctca

SEQ ID NO: 52118 - DNA, 75 bp, synthetic construct
  source 1..75: mol_type = other DNA
ggcataaaggcggcattggcaaaagcaccgtgctttgctccttatgtgtgtgtgtcatcaaaaaagggaaaacag

SEQ ID NO: 52119 - DNA, 75 bp, synthetic construct
  source 1..75: mol_type = other DNA
atctcaatggcggccaggaggcgctcgaagagcgtgcgcgtaatgaactcagcatgaccaggccgggcgaaactt

SEQ ID NO: 52120 - DNA, 75 bp, synthetic construct
  source 1..75: mol_type = other DNA
ctgtggattatttttcggtgatgttcattttagcggcgtctattccattccgcctgatattagcggcgtcattgg

SEQ ID NO: 52121 - DNA, 75 bp, synthetic construct
  source 1..75: mol_type = other DNA
acggaaaaggacaacgccaggctgtactcgctgtcacatcagacgaatgacttcggcgaatcagaatggattcat

SEQ ID NO: 52122 - DNA, 75 bp, synthetic construct
  source 1..75: mol_type = other DNA
cagacagtattaacgtgcaggcactgaacatggggcgaatcgtcgttgacgtcgatggtgttactctcgctgaac

SEQ ID NO: 52123 - DNA, 75 bp, synthetic construct
  source 1..75: mol_type = other DNA
gtcgatggagttaatctcagtgaactgattaacaaggtctctgaaaacggttatttactccgcgtggtcgataaa

SEQ ID NO: 52124 - DNA, 75 bp, synthetic construct
  source 1..75: mol_type = other DNA
atggagtatggcaaatacgaaactctcgcaagggctggttattcaggcgcagcccgcccacagggtgactggcag

SEQ ID NO: 52125 - DNA, 75 bp, synthetic construct
  source 1..75: mol_type = other DNA
attgcgcgcttcaacgaaacgggccgcagccaggtgctggcaaaacgtatgccgggtgacctctctgaatactcc

SEQ ID NO: 52126 - DNA, 75 bp, synthetic construct
  source 1..75: mol_type = other DNA
cacagagccagtcttctgccacatgggggaataacgttatcgtgatccgcaacaaggtcagcggcgacatcatca

SEQ ID NO: 52127 - DNA, 75 bp, synthetic construct
  source 1..75: mol_type = other DNA
tagcaatactcatggggctattattatcgccatctgtatttgcaacggatgttaatgtcgattttaccgctaccg

SEQ ID NO: 52128 - DNA, 75 bp, synthetic construct
  source 1..75: mol_type = other DNA
tcctggtgattatgttcttcatgaaggccggacatatatcgcctcggcaaacaatattaaaaaacgaaaacttta

SEQ ID NO: 52129 - DNA, 75 bp, synthetic construct
  source 1..75: mol_type = other DNA
aggagaaatatcaggtaacttgagtgattcaataagtaacataatatatatatatgtaacaaagaaaaaagtcag

SEQ ID NO: 52130 - DNA, 75 bp, synthetic construct
  source 1..75: mol_type = other DNA
aaattgccgtacacattggccgcaaactggctgagggggtatcaaaatctcagattgctaaacggcttggcaagt

SEQ ID NO: 52131 - DNA, 75 bp, synthetic construct
  source 1..75: mol_type = other DNA
gggtgtgcatgaatacgacgataaacggggaaacaaagcccgtggcgaaattgagttactgttaaaagaaacggg

SEQ ID NO: 52132 - DNA, 75 bp, synthetic construct
  source 1..75: mol_type = other DNA
cacggttcgctgtgtgagttccggctgaatttgtggggagcggagtttgcggcgttcttacagtgtaagcagtag

SEQ ID NO: 52133 - DNA, 75 bp, synthetic construct
  source 1..75: mol_type = other DNA
tcgatacgctcctaaataccggtctggcacttctcggttggctttacatcatgtcccgtacatggcgatggctgg

SEQ ID NO: 52134 - DNA, 75 bp, synthetic construct
  source 1..75: mol_type = other DNA
ggcaattgggattgcgtccagtcttattctgattgtggtgatgaaaatcgcctcggtattacagaatttgctctg

SEQ ID NO: 52135 - DNA, 75 bp, synthetic construct
  source 1..75: mol_type = other DNA
gctgttcagtacctgggtaaaaacgagcgtgacactgcacgccgttctaacggcgacggtgttggcggttctatc

SEQ ID NO: 52136 - DNA, 75 bp, synthetic construct
  source 1..75: mol_type = other DNA
gatggagaaatacgtcgttacgacaggcgtcataatatgatttgtactgagtgtcgtaaaagcgaagttatgcag

SEQ ID NO: 52137 - DNA, 75 bp, synthetic construct
  source 1..75: mol_type = other DNA
tggaaaaaagattgagaacactttttacatctacatatcaaacatcgagttccctgtgcataaaatatactatca

SEQ ID NO: 52138 - DNA, 75 bp, synthetic construct
  source 1..75: mol_type = other DNA
tcccatgcaaaagaggataaagatacttttgtcagaccactggtagacgagttaaatagacttggtgtaattatt

SEQ ID NO: 52139 - DNA, 75 bp, synthetic construct
  source 1..75: mol_type = other DNA
atgattacccctgcacagcaacactggcagaacgtgatggcgcagcgcgcaggccgggcgaatgaaggcgtggat

SEQ ID NO: 52140 - DNA, 75 bp, synthetic construct
  source 1..75: mol_type = other DNA
atgattactcctgcacagcaacactggcagaacgtgatggcacagcgcgcaggccgggcgaatgaaggcgtggac

SEQ ID NO: 52141 - DNA, 75 bp, synthetic construct
  source 1..75: mol_type = other DNA
gaaaagggcgacacaggagggtgagtattctgatgccaggggcaatccggccatgctgcgtctgagcataaaata

SEQ ID NO: 52142 - DNA, 75 bp, synthetic construct
  source 1..75: mol_type = other DNA
catccgtctgtgaccggaacggttacgcgtacggctgtccggaatttcagccgaatatcatcatccctgatatta

SEQ ID NO: 52143 - DNA, 75 bp, synthetic construct
  source 1..75: mol_type = other DNA
agagcgcttgtgctgaaaatttatcaccagcacaaaggccgctatgtgttcatcagagcttatttaagggcgtca

SEQ ID NO: 52144 - DNA, 75 bp, synthetic construct
  source 1..75: mol_type = other DNA
ctggctatgggttatttccctctgaacaggctcgtaaggattggcaaaacgcccgcaaaaaactatccagggcaa

SEQ ID NO: 52145 - DNA, 75 bp, synthetic construct
  source 1..75: mol_type = other DNA
cgttatgccatcgccaccggacgagccactgtcaatccggcatctgaactgaccagtacgctggcgacgccaaaa

SEQ ID NO: 52146 - DNA, 75 bp, synthetic construct
  source 1..75: mol_type = other DNA
gctcaaacgtatcggttacgatggcagggcaaccggtcatggttttcgtcacaccatgagtaccattctgcacga

SEQ ID NO: 52147 - DNA, 75 bp, synthetic construct
  source 1..75: mol_type = other DNA
caataactgcattgctaaatgatgagacacattcctctatccataaattactggttcaggttgcaagtatctatg

SEQ ID NO: 52148 - DNA, 75 bp, synthetic construct
  source 1..75: mol_type = other DNA
cagatcccgcgattcatcaacacggataaagcgcccgcctatggtcgcgcgcttgctctgctcaaacgcgaaggc

SEQ ID NO: 52149 - DNA, 75 bp, synthetic construct
  source 1..75: mol_type = other DNA
cggcctccctgatgctccgaaagctcggcagctacccacgccagaacggcctggccgtggcgctccgcgagctgg

SEQ ID NO: 52150 - DNA, 75 bp, synthetic construct
  source 1..75: mol_type = other DNA
aattgcaggctgctcagcaggtcggacgcccgatcgatacgcagaagtatgacgggatgcaactgaaatggcaga

SEQ ID NO: 52151 - DNA, 75 bp, synthetic construct
  source 1..75: mol_type = other DNA
tgtacagaatcagcaagcttcttcaggaaactggatggagccaggctgagcttgcccgtagaattggtgtgacac

SEQ ID NO: 52152 - DNA, 75 bp, synthetic construct
  source 1..75: mol_type = other DNA
gatcaagaacaaatgttaaaagatatgaaagacaaaaaagagtcaatggatcgcactgtcgcacggtggctcgca

SEQ ID NO: 52153 - DNA, 75 bp, synthetic construct
  source 1..75: mol_type = other DNA
tacttccgctatccggcgaatatccgcaaggtgatctacacaaccaacgcgatagaatcagtccaccgccagttc

SEQ ID NO: 52154 - DNA, 75 bp, synthetic construct
  source 1..75: mol_type = other DNA
ctgggtgaaaagttacaggccgcgtggcagtggtttaaaaacctgattgccccggtcaaagccacccaggacacc

SEQ ID NO: 52155 - DNA, 75 bp, synthetic construct
  source 1..75: mol_type = other DNA
catcaccgttaatgctacggggaacgcagaaaacaccgtaaaaaacatcgcatttaactatattgtgaggcttgc

SEQ ID NO: 52156 - DNA, 75 bp, synthetic construct
  source 1..75: mol_type = other DNA
aattcagggtcataaagacactgtcgcaaaagtcatagactggtataacccacaaaaaaacgcatttggtatcat

SEQ ID NO: 52157 - DNA, 75 bp, synthetic construct
  source 1..75: mol_type = other DNA
gatgggcacaccaaggcaatcagccgatatagcaaaagaagagtcaagaaacgcacttaatgttatgataatgga

SEQ ID NO: 52158 - DNA, 75 bp, synthetic construct
  source 1..75: mol_type = other DNA
cgcgtcagaatcccaaatcatccacgtaaccgcctggacggaacgcgaagcgcgtaaccgttgcccgtcaggttg

SEQ ID NO: 52159 - DNA, 75 bp, synthetic construct
  source 1..75: mol_type = other DNA
catccccgcgtctttgattccctgttttgttcgatggtcgctgccggagaaaaatccgggcatctcgacgtggtg

SEQ ID NO: 52160 - DNA, 75 bp, synthetic construct
  source 1..75: mol_type = other DNA
cattccgcaggagctggcgactgccgcatcaatgactgaaaacggtcatcgtcgggatatgcaccctgccgaaca

SEQ ID NO: 52161 - DNA, 75 bp, synthetic construct
  source 1..75: mol_type = other DNA
ttgattacggtactaaatcaacgaataacacaggtgcacatacccacaatgtatctggtactgcaaatagtgctg

SEQ ID NO: 52162 - DNA, 75 bp, synthetic construct
  source 1..75: mol_type = other DNA
tgcacagcggatttctgaaacctgtcatattccggttcaaatcatgtctgatgtctggacactgctgggtaccgg

SEQ ID NO: 52163 - DNA, 75 bp, synthetic construct
  source 1..75: mol_type = other DNA
acgtcaggggctgcgttcgtgctcctgttgcacggcaattcttccagctggtgatccagtgtgcccacgctgtgg

SEQ ID NO: 52164 - DNA, 75 bp, synthetic construct
  source 1..75: mol_type = other DNA
ccgggctgatgaggccttacttattctgatgagcctgccgtttgcgctggtaggcgggatatggttcctgtactg

SEQ ID NO: 52165 - DNA, 75 bp, synthetic construct
  source 1..75: mol_type = other DNA
acttgagggcgggcgctacatcgatatcgatatcaaccgggagaaagcctcccgctacgggatgacggtaggtga

SEQ ID NO: 52166 - DNA, 75 bp, synthetic construct
  source 1..75: mol_type = other DNA
agcagcttgaacaggagcgtgctaagctgactggtcaagataacgatgccatgaatgaaatcaccgccggttaca

SEQ ID NO: 52167 - DNA, 75 bp, synthetic construct
  source 1..75: mol_type = other DNA
tgtttaccactgctcttgacgttgatctgactcctgccagtggcttcacttctgacagcaaacgtcagtttgcaa

SEQ ID NO: 52168 - DNA, 75 bp, synthetic construct
  source 1..75: mol_type = other DNA
cgttgttcaccattctgaaagagattcaggccagctttgataaacacaagctgggaacgtctcagaagggggaat

SEQ ID NO: 52169 - DNA, 75 bp, synthetic construct
  source 1..75: mol_type = other DNA
atgccaattataaagaactgcttatcattaattggtaatgcattaagaaacgaaacaacatcatattccctaaca

SEQ ID NO: 52170 - DNA, 75 bp, synthetic construct
  source 1..75: mol_type = other DNA
gaagcagcagatcacgctgggcgatgttgcggatattaaggtcgtttccgggccgactatgctgaaaacggaaaa

SEQ ID NO: 52171 - DNA, 75 bp, synthetic construct
  source 1..75: mol_type = other DNA
ctggctgtgataaacgatcagtttggcgcaccaacaggtgccgaattgctggctgattgcaccgctcatgccatt

SEQ ID NO: 52172 - DNA, 75 bp, synthetic construct
  source 1..75: mol_type = other DNA
gaatcttacgaacaaaagatttcccggtaatccaacacagtcctatagaacctgcgaacccttgagaattgttgg

SEQ ID NO: 52173 - DNA, 75 bp, synthetic construct
  source 1..75: mol_type = other DNA
tggcgatgccaacgtgcaaaaaatgcgcttcgacttactgcctgcatatgtgtgctttaaccctcacatgggcgg

SEQ ID NO: 52174 - DNA, 75 bp, synthetic construct
  source 1..75: mol_type = other DNA
acactctctcatgatccacatcggtggtgacaaccatcatgacaatccagaaccactgggcggtggtggggctag

SEQ ID NO: 52175 - DNA, 75 bp, synthetic construct
  source 1..75: mol_type = other DNA
ccaccgccgcgagttgtgggaagccatcgaagcaggcgattttccggaatacgaactgggcttccagttgattcc

SEQ ID NO: 52176 - DNA, 75 bp, synthetic construct
  source 1..75: mol_type = other DNA
atccatgaaaatgccagttgtgatcccggtctgattaatggaaaaaaagtgccagctcttgctgccggtgggcat

SEQ ID NO: 52177 - DNA, 75 bp, synthetic construct
  source 1..75: mol_type = other DNA
cagcaccaccggtaaggtcatcagactggaaacctcaccggcaaaatatacccgccgtggtgtggaagaggatgt

SEQ ID NO: 52178 - DNA, 75 bp, synthetic construct
  source 1..75: mol_type = other DNA
gggcaatgctgtcgatttcatcctcaccgacccgccgtatctcgtcggtttccgtgaccgttccgggcgcaccat

SEQ ID NO: 52179 - DNA, 75 bp, synthetic construct
  source 1..75: mol_type = other DNA
acaggctcgtaaggactggcaaaatgcccgcaaaaaactctcaagggcaaagtcgaagaaaccggttgtcgttga

SEQ ID NO: 52180 - DNA, 75 bp, synthetic construct
  source 1..75: mol_type = other DNA
agcgggaagaactgaaggcacgtattgtggagctcgtgcgcctgaatggtcggggaacgttcaggcaactggcta

SEQ ID NO: 52181 - DNA, 75 bp, synthetic construct
  source 1..75: mol_type = other DNA
gcactggcgcaggcggcactggatgatgtttgtaccggtggcaacccgcgtgaagcaacgcttgaggatattgta

SEQ ID NO: 52182 - DNA, 75 bp, synthetic construct
  source 1..75: mol_type = other DNA
ttcaaagatcactacggagtgcccgtcagagtcattcgttgggagccggaaacacaacgggttatctacctccgc

SEQ ID NO: 52183 - DNA, 75 bp, synthetic construct
  source 1..75: mol_type = other DNA
aacggttacctggcagataatccgtttaaggggatctcgccattaaaggaatcaagaaccattccggatcctctt

SEQ ID NO: 52184 - DNA, 75 bp, synthetic construct
  source 1..75: mol_type = other DNA
ttggtgagttcactctaccgaaaactgaagcaagcacaaacagggttgtgcaccttatccagcccgctatcagtg

SEQ ID NO: 52185 - DNA, 75 bp, synthetic construct
  source 1..75: mol_type = other DNA
gctcatcacgtcaggcgtaccttgctaaccgtgcgcttcatgagttacgaaaaaacggtgcgcttccggttgatg

SEQ ID NO: 52186 - DNA, 75 bp, synthetic construct
  source 1..75: mol_type = other DNA
ggatgaggtgagcaggccgtcgttgccggtggtgatgcggcaggatgcaaagacaccgaatcctgtggaagccgt

SEQ ID NO: 52187 - DNA, 75 bp, synthetic construct
  source 1..75: mol_type = other DNA
gaagcaggcaggctataaaacattctggattaccaaccagcagacaatcacagcccgtaacaccatgctcactgt

SEQ ID NO: 52188 - DNA, 75 bp, synthetic construct
  source 1..75: mol_type = other DNA
gggctgatggcagaagtgcttgaaagccatatccgggaaacgtttgaccgaaatgactgctacagccgcgaagtc

SEQ ID NO: 52189 - DNA, 75 bp, synthetic construct
  source 1..75: mol_type = other DNA
gttgccagtggcgatgtatacaactctggttacgggttattcccgtctgaacaggcgcgtaaggactggcaaaac

SEQ ID NO: 52190 - DNA, 75 bp, synthetic construct
  source 1..75: mol_type = other DNA
gatccacgcactgccaccacaggcaaccagcgcggtttattcacatatccggggagaaaaccgctctgaacaggc

SEQ ID NO: 52191 - DNA, 75 bp, synthetic construct
  source 1..75: mol_type = other DNA
aagattattcacctaaattcaccccacacccaggtggagtgagtgagatttatcatgaaacaatggttaaagcac

SEQ ID NO: 52192 - DNA, 75 bp, synthetic construct
  source 1..75: mol_type = other DNA
ccgggcgggtgaaacgtggcccccggacctggctgagtttgttgcgctgatttcggagagtggggcaaatccatt

SEQ ID NO: 52193 - DNA, 75 bp, synthetic construct
  source 1..75: mol_type = other DNA
gtgtgtgatcccaaacataagcacggggatgatagccgctatcaggctggtgggcaatgcaatcagtctggttca

SEQ ID NO: 52194 - DNA, 75 bp, synthetic construct
  source 1..75: mol_type = other DNA
cgcacgcattattttcaggatacccagctggatatgcatttttccgggctgacgtacgctgtactcagcctgttt

SEQ ID NO: 52195 - DNA, 75 bp, synthetic construct
  source 1..75: mol_type = other DNA
gatggcgaatgggttaaagcgcgcggcaccacgctgggtgcggataacggcattggtatggcctctgcactggcg

SEQ ID NO: 52196 - DNA, 75 bp, synthetic construct
  source 1..75: mol_type = other DNA
ctcaagggcaaaagaacacggcgcgaatcgttctgattcatgctctttctttctgcgtcgtctttttcgtgcagg

SEQ ID NO: 52197 - DNA, 75 bp, synthetic construct
  source 1..75: mol_type = other DNA
gccggtcaaggccacgcaggagacgcttgatagctgcaaaaatgtcggtgtcatatttggtcaggcactggccga

SEQ ID NO: 52198 - DNA, 75 bp, synthetic construct
  source 1..75: mol_type = other DNA
ctcaacagttgtcgtgatgttggggttatgttcggtcagacgctggccgatgcgctgctgatgccgcttaacgcc

SEQ ID NO: 52199 - DNA, 75 bp, synthetic construct
  source 1..75: mol_type = other DNA
tttaacgactctctcgacatgattaccgggttttccccttcctataaaaagattgttattggtgaagaagaaaca

SEQ ID NO: 52200 - DNA, 75 bp, synthetic construct
  source 1..75: mol_type = other DNA
ttattcattacgaacccgtgattggcattatgggtaaatccggcaccggcaaaagcagcctgtgtaatgccattt

SEQ ID NO: 52201 - DNA, 75 bp, synthetic construct
  source 1..75: mol_type = other DNA
cgccccgcaagaatacagactgggctgcacaattaaagctgatttctgaatcgcttgaggtgagtcaggcagacc

SEQ ID NO: 52202 - DNA, 75 bp, synthetic construct
  source 1..75: mol_type = other DNA
cctgatttattcattaccagatggagagatacgccactacgacaggcgtcagaacataatctgtctcgagtgccg

SEQ ID NO: 52203 - DNA, 75 bp, synthetic construct
  source 1..75: mol_type = other DNA
cctgctgagttgggcggcgatgctgtttgctgccgggatcggtatcgacctgatgttcttctccgtagccgaacc

SEQ ID NO: 52204 - DNA, 75 bp, synthetic construct
  source 1..75: mol_type = other DNA
atgccggatggtcactatacgttatgtggtgaagaagtgcagatgcgcggtggcgttgtccgtaccgcgtccggt

SEQ ID NO: 52205 - DNA, 75 bp, synthetic construct
  source 1..75: mol_type = other DNA
cgtaccgtcacgaatgcgcttacatcctggcaaagggcagtccggcccggccccgtaaccctctgccggatgtgc

SEQ ID NO: 52206 - DNA, 75 bp, synthetic construct
  source 1..75: mol_type = other DNA
tcatcatgtacatgaccgatgccgcgcaaaaccaggaggatgtgaacaacctccgcaacgcaatgaaaagcgcca

SEQ ID NO: 52207 - DNA, 75 bp, synthetic construct
  source 1..75: mol_type = other DNA
aaggacggccttcagatcatccctttgtcagaagttgcggcgaaggatgagtttctaaatatcaagaacgtgagc

SEQ ID NO: 52208 - DNA, 75 bp, synthetic construct
  source 1..75: mol_type = other DNA
ccggatgaggaaaaaatgctgatgcagaaagcggcaggacttgccggaggcgtccggttcggtggggacggaggg

SEQ ID NO: 52209 - DNA, 75 bp, synthetic construct
  source 1..75: mol_type = other DNA
atggaagaaataccgtgtgctgctgatgcgtgttgatacttcaacagcccccgatattgaatggcctacgcctcc

SEQ ID NO: 52210 - DNA, 75 bp, synthetic construct
  source 1..75: mol_type = other DNA
cggagcatggctgccagactctgcctgtaccgtgggcaggttccggcagtcggtacactctgctgttcgaatcgt

SEQ ID NO: 52211 - DNA, 75 bp, synthetic construct
  source 1..75: mol_type = other DNA
caccgttgatgcggtcagaaaacaacttaaacttagctggaatgccgttgacggcatcatgacccgcgcggttaa

SEQ ID NO: 52212 - DNA, 75 bp, synthetic construct
  source 1..75: mol_type = other DNA
gcggcacagatagagccggtttatttgcctgagcgaaaaatacatctttatcactgtgaccaccggggcctgccg

SEQ ID NO: 52213 - DNA, 75 bp, synthetic construct
  source 1..75: mol_type = other DNA
gcatccgtctgtggggttctacggtaaccgggaacgagcggcactggctgcgtacacctgggaagtgctggtccg

SEQ ID NO: 52214 - DNA, 75 bp, synthetic construct
  source 1..75: mol_type = other DNA
aacagccacgcggaataaaacacaaagacacagaggtgattattttcgcgggtagtgatgcgtgggcacatgcaa

SEQ ID NO: 52215 - DNA, 75 bp, synthetic construct
  source 1..75: mol_type = other DNA
cgggaaggtatcagagtggccagatgcactgtggcacgtctcatggcggttatggggcttgccggtgttctccgg

SEQ ID NO: 52216 - DNA, 75 bp, synthetic construct
  source 1..75: mol_type = other DNA
cggcgaagacggtggcagtgtggtgttcccgccggtgctggtgcagatgctcgaccggctggaaagtgaaatcct

SEQ ID NO: 52217 - DNA, 75 bp, synthetic construct
  source 1..75: mol_type = other DNA
cagaacattcgcgagaaaacggaggcggtattccggctgttccggcccgtacatccggttgttgccgtatcggcc

SEQ ID NO: 52218 - DNA, 75 bp, synthetic construct
  source 1..75: mol_type = other DNA
gctaaaaaacttgagcaatgcacgtcaggtgcaattacgaaatctgacttaagaccggatatctatccgaaagat

SEQ ID NO: 52219 - DNA, 75 bp, synthetic construct
  source 1..75: mol_type = other DNA
ggaaggaatacgctgtttttatatcagcaagagtaagactaaggcagggatcagacacgttccgatacattcgaa

SEQ ID NO: 52220 - DNA, 75 bp, synthetic construct
  source 1..75: mol_type = other DNA
gggcgaagcgatggcgatggttaaagcgctaaaccggatgacgttgttgggtatgccgcatagtgtccggatcgc

SEQ ID NO: 52221 - DNA, 75 bp, synthetic construct
  source 1..75: mol_type = other DNA
ttacctacggcattatgctcggcgaaaaacctgccgtgctgtcggctatcgttaagtatcactgtacccaccgcg

SEQ ID NO: 52222 - DNA, 75 bp, synthetic construct
  source 1..75: mol_type = other DNA
tgagcttatcgacgtggtttaccaggacgatgacgatctggtggttatttgcgggcgtgaactgctgtctgacaa

SEQ ID NO: 52223 - DNA, 75 bp, synthetic construct
  source 1..75: mol_type = other DNA
gcgtggtggaaaaaagcgtcaccacgcgggactacaactaccgcaccgccacggcggagatgatgacagagcagc

SEQ ID NO: 52224 - DNA, 75 bp, synthetic construct
  source 1..75: mol_type = other DNA
gagtgagaaaccgtcggtggtgagggtccggtttggtgacggttatgaacagcgccgaccgacgggactgaatgc

SEQ ID NO: 52225 - DNA, 75 bp, synthetic construct
  source 1..75: mol_type = other DNA
gagtgagaagccgtcggtggtgagggtgcggtttggtgacggttatgaacagcgccgccccacagggctgaatcc

SEQ ID NO: 52226 - DNA, 75 bp, synthetic construct
  source 1..75: mol_type = other DNA
gttggataagctgtagtgagcgaatgcccgctcaagatgattggattttaatttattcaaagcacggtgagtata

SEQ ID NO: 52227 - DNA, 75 bp, synthetic construct
  source 1..75: mol_type = other DNA
gggtaaaagcggggccggtaaatcttcactctgtaatgcactgtttcagggggaggtcacaccggtcagtgatgt

SEQ ID NO: 52228 - DNA, 75 bp, synthetic construct
  source 1..75: mol_type = other DNA
agtaccgaaatgccctatttgcggcgaggaaatgtcaattcagcgaatatctggagcacaggttgtttatgcctg

SEQ ID NO: 52229 - DNA, 75 bp, synthetic construct
  source 1..75: mol_type = other DNA
gccaccggtccgaaggcctcgccacgccacgtgcaactggttgacgcgttctgtgagaggctcgatgccgtcctg

SEQ ID NO: 52230 - DNA, 75 bp, synthetic construct
  source 1..75: mol_type = other DNA
gacagtgccgttctggagaactcaacgctgaccagtaccgccctgaatctgaacaagggagcaaatgttctggcc

SEQ ID NO: 52231 - DNA, 75 bp, synthetic construct
  source 1..75: mol_type = other DNA
cacagaatggagggatgcgcctgacatcgcgtaaagatatggagataaacagtacggaaaaccgggtggagataa

SEQ ID NO: 52232 - DNA, 75 bp, synthetic construct
  source 1..75: mol_type = other DNA
gacggccagcgcggcccgtgaccgcagctatgaactgacgttcacggcgataccctactcagaacgctacggcta

SEQ ID NO: 52233 - DNA, 75 bp, synthetic construct
  source 1..75: mol_type = other DNA
tgacgaacagaccgtaactcaccccgttacgcccaaatacgcgaagctgatcgccacgctgaaggagtttttccc

SEQ ID NO: 52234 - DNA, 75 bp, synthetic construct
  source 1..75: mol_type = other DNA
ttaagctggatggcactatttctgacgagctgacaggaaagctggttacgcatgattccagcgccagttatgact

SEQ ID NO: 52235 - DNA, 75 bp, synthetic construct
  source 1..75: mol_type = other DNA
actttaaagcctggctggtaggtgcgactgacgcgccggacctgggtggttttgaagctaataccaccttccaga

SEQ ID NO: 52236 - DNA, 75 bp, synthetic construct
  source 1..75: mol_type = other DNA
atgtaacccagaacggttcccgaacataaccatagctattgatggcgatggcttggggaaatcgacggctgatct

SEQ ID NO: 52237 - DNA, 75 bp, synthetic construct
  source 1..75: mol_type = other DNA
gcagagagttgacaaaagatatggaattctcaggtcaatttttgttaaaaaaactcaagttacagaatttaacta

SEQ ID NO: 52238 - DNA, 75 bp, synthetic construct
  source 1..75: mol_type = other DNA
ggcctttttaatcagccagttatccgataatttatttcaccatacccgcgatgttattgcgtttgtcacccggac

SEQ ID NO: 52239 - DNA, 75 bp, synthetic construct
  source 1..75: mol_type = other DNA
gatattgtgctgagtaagtcgcaggcgtcgaactgcaccgagtatcagataactatcgggggctcggatgagtga

SEQ ID NO: 52240 - DNA, 75 bp, synthetic construct
  source 1..75: mol_type = other DNA
atggagttttacgagacggggtgcgccttcctgaaagctttactgagaacccggctgagacttaaaaaaaccgac

SEQ ID NO: 52241 - DNA, 75 bp, synthetic construct
  source 1..75: mol_type = other DNA
gcggaaaaaatgtcactctgctcccggacgacagcggcatacaaaaagaaagtcattcaaaaaaatatccgttct

SEQ ID NO: 52242 - DNA, 75 bp, synthetic construct
  source 1..75: mol_type = other DNA
ggagcttcacgccactcatcagggttgaaaccgccaccggtgagctggcgaaaacgcagcgccgcagcctggcgg

SEQ ID NO: 52243 - DNA, 75 bp, synthetic construct
  source 1..75: mol_type = other DNA
agtgagccgcacactggaactggaatctgaacccgtcaccaaattgttgcaggagaacgcttatcgtgagttgct

SEQ ID NO: 52244 - DNA, 75 bp, synthetic construct
  source 1..75: mol_type = other DNA
cagcgcggttttgacggccggacgcaacgttaccactatgacctgaccggaaaactcacgcagagtgaagacgag

SEQ ID NO: 52245 - DNA, 75 bp, synthetic construct
  source 1..75: mol_type = other DNA
gaactgacagagcgaaatcagctatccgtcactacagaatcaaaagcgctatttgcaaaattacatcaacaggga

SEQ ID NO: 52246 - DNA, 75 bp, synthetic construct
  source 1..75: mol_type = other DNA
cgaatgttcgccgggtgctggaagagagtctgcctgcaaatttgaccttaatgatgaccgctacgggtgaatatc

SEQ ID NO: 52247 - DNA, 75 bp, synthetic construct
  source 1..75: mol_type = other DNA
tcatggagattgccatgcgcaaggctggcaactctccggtaactccggatggttggataagctgtagtgagcgaa

SEQ ID NO: 52248 - DNA, 75 bp, synthetic construct
  source 1..75: mol_type = other DNA
cgggcgtacgatggcctgagtgttgctggcccgtcaggtgcatacgagtattttgcccgcagcgccagcggtctg

SEQ ID NO: 52249 - DNA, 75 bp, synthetic construct
  source 1..75: mol_type = other DNA
ctcttgcaccaggcagcaatgagaagaaaaaactttatttcctgacggatttgattacctcgctgctggaaaagc

SEQ ID NO: 52250 - DNA, 75 bp, synthetic construct
  source 1..75: mol_type = other DNA
cgcttccgtctgaatggccatggtcacagcatggttatcactgacctgcccggggtgggcgagagccgggacagg

SEQ ID NO: 52251 - DNA, 75 bp, synthetic construct
  source 1..75: mol_type = other DNA
tcaatcaactgaacatgcgggcagaccttgagacatacgtgtttcaggataacctggctaccgcaatgcgacgtg

SEQ ID NO: 52252 - DNA, 75 bp, synthetic construct
  source 1..75: mol_type = other DNA
gacggcttgtaacagtgtttttagatgaccagaagcaacgaggagccgccgatcaatctcgtcaaaactggctta

SEQ ID NO: 52253 - DNA, 75 bp, synthetic construct
  source 1..75: mol_type = other DNA
agagtctgtgcggttgcggaaagcatgatgaccgtgaaaacggggagttacttacagcacaactgcgactgggac

SEQ ID NO: 52254 - DNA, 75 bp, synthetic construct
  source 1..75: mol_type = other DNA
atgagcgccgcgcttcaatacttcgaagaaaatttaccccaccgcccctatcacacggatgatctcgctttcggc

SEQ ID NO: 52255 - DNA, 75 bp, synthetic construct
  source 1..75: mol_type = other DNA
ggggtaatcacgcaggtggtgatactggatgcagataaaaagcagatacagtgtgtggtaagaccgctgcaaatt

SEQ ID NO: 52256 - DNA, 75 bp, synthetic construct
  source 1..75: mol_type = other DNA
gacattgctggatctctctgaagtccaacttgatggtgcagccacgctggtgctgacgttctccatccctctcga

SEQ ID NO: 52257 - DNA, 75 bp, synthetic construct
  source 1..75: mol_type = other DNA
ttatcactgacctgcccggggtgggcgagagccgggacagggatgcagagtatgaagccctgtaccgtgacattc

SEQ ID NO: 52258 - DNA, 75 bp, synthetic construct
  source 1..75: mol_type = other DNA
gcctgcttgattccgcgatggccggaaagctggtcgctgaacgggggcgaccagatgcagtgccgggatcagatt

SEQ ID NO: 52259 - DNA, 75 bp, synthetic construct
  source 1..75: mol_type = other DNA
atccagtactgcggagtatgacgttctgcctctggtcccggaagccgcaaaggtcagcgatccctttctgctcga

SEQ ID NO: 52260 - DNA, 75 bp, synthetic construct
  source 1..75: mol_type = other DNA
ctcaagtgaatctgaggcttcctgtagagataaaggaacgtcttattgaactggctgaggctaattctcgttcat

SEQ ID NO: 52261 - DNA, 75 bp, synthetic construct
  source 1..75: mol_type = other DNA
taaacgtgaacagggtaaagaatttttagtagagatcccctacttcctgcgtgaagatatgattaagccgcaaga

SEQ ID NO: 52262 - DNA, 75 bp, synthetic construct
  source 1..75: mol_type = other DNA
cgactccggccaggggataccctgctggtctggaaactggatcgtcttggacgtagtatgcagcaccttgtcctt

SEQ ID NO: 52263 - DNA, 75 bp, synthetic construct
  source 1..75: mol_type = other DNA
cattcagccttctcccgcacaggcacagaatattcgcgaaaaaacggaggcggtattccgtctgttccggcccgt

SEQ ID NO: 52264 - DNA, 75 bp, synthetic construct
  source 1..75: mol_type = other DNA
ataaccgatactggctgtggaactattcatcttgcaggttgcgttattgaggttatgggtaataaaggtgccatg

SEQ ID NO: 52265 - DNA, 75 bp, synthetic construct
  source 1..75: mol_type = other DNA
gggacatcagcaggtgctgtttgtggtgacgcaggccgataaaacggagccctgccatgaatgggatatggccgg

SEQ ID NO: 52266 - DNA, 75 bp, synthetic construct
  source 1..75: mol_type = other DNA
cacggtctggcgattgccgcagggatcaaagcggcgaaagatctcggcaatatgccgccaaatatctgtaacgcc

SEQ ID NO: 52267 - DNA, 75 bp, synthetic construct
  source 1..75: mol_type = other DNA
atactggatgcggataaaaagcagatacagtgcgtggtaagaccgctgcaaatcctgcgtgctgacgggaggtgg

SEQ ID NO: 52268 - DNA, 75 bp, synthetic construct
  source 1..75: mol_type = other DNA
tggtacggaacggcgttaggtatcgccaacgaggccgaagcacacaatgacgggctgttacccctggatgaaata

SEQ ID NO: 52269 - DNA, 75 bp, synthetic construct
  source 1..75: mol_type = other DNA
gtgacattctgcccgaactggacctggtactgtggctgattaaagccgatgaccgtgccctgtctgtggatgagt

SEQ ID NO: 52270 - DNA, 75 bp, synthetic construct
  source 1..75: mol_type = other DNA
tctcattctgcgggccctgaaaaccctggaccgccatcttcatgaacccggcgtggccttcacctccacccgtgc

SEQ ID NO: 52271 - DNA, 75 bp, synthetic construct
  source 1..75: mol_type = other DNA
gaacgcccccgcgccgaacatcaccgtaaaaaatcccgagaatgggcacgctcacctgctctacgcgctcaatct

SEQ ID NO: 52272 - DNA, 75 bp, synthetic construct
  source 1..75: mol_type = other DNA
gacgctgatggtcgatgtggaatacaaatgcgaacagaccaactttgacacggtactgacctacgcgaagctgga

SEQ ID NO: 52273 - DNA, 75 bp, synthetic construct
  source 1..75: mol_type = other DNA
cttacagcacaactgcgactgggaccggcagacattctggagtcagatgagaatggcattattccggagcaggac

SEQ ID NO: 52274 - DNA, 75 bp, synthetic construct
  source 1..75: mol_type = other DNA
aaggtggcctgcatcagattgaaacagcttctggcgcggtactgaaagcacgcagcattatcgtggcgaccggtg

SEQ ID NO: 52275 - DNA, 75 bp, synthetic construct
  source 1..75: mol_type = other DNA
aagccgctacggcggcctgccgggaatgtcagatccgggtagggcagaggccattatcgggagagttcaggccag

SEQ ID NO: 52276 - DNA, 75 bp, synthetic construct
  source 1..75: mol_type = other DNA
tactggtctgatggcgaaccacaatccgctggcccatgaactgattgccgcgtctgaacaatccggtgaccgcgc

SEQ ID NO: 52277 - DNA, 75 bp, synthetic construct
  source 1..75: mol_type = other DNA
agggtaatcacgcaggtggtgatactggatgcggataaaaagcagatacagtgtgtggtaagaccgctgcaaatt

SEQ ID NO: 52278 - DNA, 75 bp, synthetic construct
  source 1..75: mol_type = other DNA
gatgcgcgatgcgcagttgtggcgtcacatcgaatttcaccccgaatgcaacgcgatttacgcagcactggactg

SEQ ID NO: 52279 - DNA, 75 bp, synthetic construct
  source 1..75: mol_type = other DNA
acatgagcaatcgggtgatgtcgacgctggaagaactatcgccccgcgtcgagatttacagtattgatgaggcat

SEQ ID NO: 52280 - DNA, 75 bp, synthetic construct
  source 1..75: mol_type = other DNA
ctgttgactatttgtgccgttatttctggtgcagaaggctgggaagatatagaggattttggggaaacacatccc

SEQ ID NO: 52281 - DNA, 75 bp, synthetic construct
  source 1..75: mol_type = other DNA
gatgcgcgatgcgcagttgtggagccacatcgaatttcaccccgaatgcaatgcgatttacgcggcactggactg

SEQ ID NO: 52282 - DNA, 75 bp, synthetic construct
  source 1..75: mol_type = other DNA
ctactgttgactatttgtgccgttatttctggtgcagaaggttgggaagatatagaggattttggggaaacacat

SEQ ID NO: 52283 - DNA, 75 bp, synthetic construct
  source 1..75: mol_type = other DNA
tccggccagtgatgtcagacgggagtttgccatctgggcaaaagcggtcgtgcaggtgctggagacattaccgga

SEQ ID NO: 52284 - DNA, 75 bp, synthetic construct
  source 1..75: mol_type = other DNA
atgtcagtgctggcagatggtgtgctggtggcgatggcgctgatcgtgctccggcctttactgcgtaaatctgaa

SEQ ID NO: 52285 - DNA, 75 bp, synthetic construct
  source 1..75: mol_type = other DNA
tgctcgtgaagcggtgagtggtatgccggacccgatgctgccggaggtgtccggaggtcatggcagagcagacga

SEQ ID NO: 52286 - DNA, 75 bp, synthetic construct
  source 1..75: mol_type = other DNA
ctgaagcctggcgtgatgactacgaagcaggaaaaacacctgtcgaagcatattgtgatgagtggggtgatgaat

SEQ ID NO: 52287 - DNA, 75 bp, synthetic construct
  source 1..75: mol_type = other DNA
atgcaacagctttcctttctgcccggagagatgacgcccggcgagcgcagcctcattcagcgggccctgaaaact

SEQ ID NO: 52288 - DNA, 75 bp, synthetic construct
  source 1..75: mol_type = other DNA
gcactacagacaaaaccgttaaataacatacatgaaaagtatgattattttacggataccgcttgcttgctgaca

SEQ ID NO: 52289 - DNA, 75 bp, synthetic construct
  source 1..75: mol_type = other DNA
gatgaagtgactggaaaaatgataacgcgggataatccaccaatcccgggaaagcaatcgctggcgaaggggacg

SEQ ID NO: 52290 - DNA, 75 bp, synthetic construct
  source 1..75: mol_type = other DNA
ttttttcctaagcctggcggtgggatgaacctgttaatcacctcagtggatggtgataaaaccgctggcgcggcg

SEQ ID NO: 52291 - DNA, 75 bp, synthetic construct
  source 1..75: mol_type = other DNA
tataaaaacgaattgagcgatctgtttatctgtaacgaagcgctggtggtgagcgatgggcagaatgcgcgcatt

SEQ ID NO: 52292 - DNA, 75 bp, synthetic construct
  source 1..75: mol_type = other DNA
acgcacaataaaaatttcattgtggggcataaccagtgacggactggccgttgtgttaacccccgacgatgcgct

SEQ ID NO: 52293 - DNA, 75 bp, synthetic construct
  source 1..75: mol_type = other DNA
agcgtcatatagcagaagcgcaagcgaaaggtgagtttgataacctggcaggtagcggcgaaccattgatactgg

SEQ ID NO: 52294 - DNA, 75 bp, synthetic construct
  source 1..75: mol_type = other DNA
ggggctgatgccttctcgccagacgaactgcgcaccgatttgttcagcgacgacgagggtggctatgtggactgt

SEQ ID NO: 52295 - DNA, 75 bp, synthetic construct
  source 1..75: mol_type = other DNA
gacccgcagagtgaggtgaacctgcttaacgaacaggggatcaccacggtattcagcagttacggcagcggcctt

SEQ ID NO: 52296 - DNA, 75 bp, synthetic construct
  source 1..75: mol_type = other DNA
gattgccggtgaaaccctcttcaccggcaccatcaaccgcacggaagtccatccccgggaagtgattaaacgcgc

SEQ ID NO: 52297 - DNA, 75 bp, synthetic construct
  source 1..75: mol_type = other DNA
gtggctgagccgtaccggtataccgggtggttgttgcgaaaagatgcttccgcacgcacgcgcgataaagagggg

SEQ ID NO: 52298 - DNA, 75 bp, synthetic construct
  source 1..75: mol_type = other DNA
ccgcgctttttagcggatgatccccaggctgtggctgatttatcgcgttttgaaaatgggcaagaattaccgcca

SEQ ID NO: 52299 - DNA, 75 bp, synthetic construct
  source 1..75: mol_type = other DNA
gtgacggtaaaactgcgcctggctgtggctgcactcctgctgtttctggtggtgatggtggatttcaccagcaga

SEQ ID NO: 52300 - DNA, 75 bp, synthetic construct
  source 1..75: mol_type = other DNA
gtgacggcagcacgtaatgaagtggcactggcggaagcacagctcagggggacgcagattgccacggcgcgggca

SEQ ID NO: 52301 - DNA, 75 bp, synthetic construct
  source 1..75: mol_type = other DNA
tgaataatggttatatggcaacgcgtgatgtcacatttaatacgggcgacagcgaacaagggattgttccctgcc

SEQ ID NO: 52302 - DNA, 75 bp, synthetic construct
  source 1..75: mol_type = other DNA
tatcaacgttggcttgatgaaagttcgcagagtggttcgggtgctgaaatcatccttaaagggcttgccgaagca

SEQ ID NO: 52303 - DNA, 75 bp, synthetic construct
  source 1..75: mol_type = other DNA
agtttgaacagcatattgaggatgactcgccgctggctgaggtgttgccgagcgtttataacaaatatccggtgc

SEQ ID NO: 52304 - DNA, 75 bp, synthetic construct
  source 1..75: mol_type = other DNA
accagaatcaggaacaggccagggagtctgcgcgccagtatgcactgacgatagatgaaatcgcgcataaaacgc

SEQ ID NO: 52305 - DNA, 75 bp, synthetic construct
  source 1..75: mol_type = other DNA
atctgaaaactggtgataatactatgcgttacagtgcatgggttcagaaagcatcgactgcttccagtgttactg

SEQ ID NO: 52306 - DNA, 75 bp, synthetic construct
  source 1..75: mol_type = other DNA
atgagctagatacaaatggtggtacgggcacagctatcgtagttcagggggcaggtaaaaacgttgtcttcgatg

SEQ ID NO: 52307 - DNA, 75 bp, synthetic construct
  source 1..75: mol_type = other DNA
ggcgaatggcgaaacgggtatggcggcgggagcgtgacctgacggggtggatgtcgctgtcgcgtaaaccggaga

SEQ ID NO: 52308 - DNA, 75 bp, synthetic construct
  source 1..75: mol_type = other DNA
cgcagggcgagctgaaaaccctgacggagatacagaagcaggagctgctgcgcaatgctgccctgattgaccaga

SEQ ID NO: 52309 - DNA, 75 bp, synthetic construct
  source 1..75: mol_type = other DNA
cgacaggtgtgtcaagtcttgtcgatggggataatacaatccattttactgccctagttaagaaagacacaagtg

SEQ ID NO: 52310 - DNA, 75 bp, synthetic construct
  source 1..75: mol_type = other DNA
ttatcgaaacgctgggttatttccgcgacttttatctggaatttgtcgagtggaatgagtccaacggcttttacg

SEQ ID NO: 52311 - DNA, 75 bp, synthetic construct
  source 1..75: mol_type = other DNA
ccgggcgaggaataaacagtgtggaaaaaattatctctacctgggcacctgcctctgataataacaacacaactg

SEQ ID NO: 52312 - DNA, 75 bp, synthetic construct
  source 1..75: mol_type = other DNA
aataccagatgcaactgtccggggagaaggcaaaatatgcctgttttatttatattgaaagaacaatatacaatc

SEQ ID NO: 52313 - DNA, 75 bp, synthetic construct
  source 1..75: mol_type = other DNA
ccagcatgaaaatggaagaaatatctattctcgagagctgattaataaggctgccgtgacgggaattagtggcaa

SEQ ID NO: 52314 - DNA, 75 bp, synthetic construct
  source 1..75: mol_type = other DNA
cgcggttctgtctctcgaagaacatcagaaagcgtggttgctgtggagttacagcgaaagtgttcgctgggaaca

SEQ ID NO: 52315 - DNA, 75 bp, synthetic construct
  source 1..75: mol_type = other DNA
ctaaaaccagaacagatatttatcagaccattaccgacaacatcatcacagcactggaagccggtgtaaaaccgt

SEQ ID NO: 52316 - DNA, 75 bp, synthetic construct
  source 1..75: mol_type = other DNA
cgctgaccgatggcaactacaactaccaggtgcgggtgatcgacaccgccggaaatatcggcgcgaccgccagcc

SEQ ID NO: 52317 - DNA, 75 bp, synthetic construct
  source 1..75: mol_type = other DNA
caagctggtaccgatatgttgcaaacagttggtacgactaatacagcaattcttgttacagatcctcatggcaaa

SEQ ID NO: 52318 - DNA, 75 bp, synthetic construct
  source 1..75: mol_type = other DNA
ggttcgcaagggtgagcatggcacaacagctattttctacaccacgctggagaaggaaaacgacgagggagaagt

SEQ ID NO: 52319 - DNA, 75 bp, synthetic construct
  source 1..75: mol_type = other DNA
tcgacggtttgcccctgacaactgaaacagtcagcccggaagctacatttaacccgttgccgcaggctgagaacc

SEQ ID NO: 52320 - DNA, 75 bp, synthetic construct
  source 1..75: mol_type = other DNA
acagagcagtgaattttcctaccgcattccctaatgtctgtaacagcattaccgttacagaggttacggggcata

SEQ ID NO: 52321 - DNA, 75 bp, synthetic construct
  source 1..75: mol_type = other DNA
cattatcagccgactgatggccggagaatctctgtcactaaagacactgtcagatgaatttggcgttacagaacg

SEQ ID NO: 52322 - DNA, 75 bp, synthetic construct
  source 1..75: mol_type = other DNA
ttacctttccggccgggatacgacccggcgtgagcatttaaccgaactgtaccgctatcttggcgtaaaggcgtt

SEQ ID NO: 52323 - DNA, 75 bp, synthetic construct
  source 1..75: mol_type = other DNA
cgtctggtacaggcactggccctggtggatatccgggtgccggaccatctgataatcggtggcagccaggttttc

SEQ ID NO: 52324 - DNA, 75 bp, synthetic construct
  source 1..75: mol_type = other DNA
ctggtcgctgaagagcgttttatctcggctctgccacatttccattttatcagtaatgtcatacacaatttccgg

SEQ ID NO: 52325 - DNA, 75 bp, synthetic construct
  source 1..75: mol_type = other DNA
aacgccgaaagcggtcaaggtggcgtatgaccttgcgaaaggtaaatatacggctcaggacgcgaccacggcaca

SEQ ID NO: 52326 - DNA, 75 bp, synthetic construct
  source 1..75: mol_type = other DNA
tttgccgtccttctttgctatctgaaaaatgtcggctttgccccggataaaaaaatctctccctctgatgcgctg

SEQ ID NO: 52327 - DNA, 75 bp, synthetic construct
  source 1..75: mol_type = other DNA
cacgttagccagccgacgcttagcgggcaaattcgtaagctggaagatgagctgggcgtgatgttgctggagcgg

SEQ ID NO: 52328 - DNA, 75 bp, synthetic construct
  source 1..75: mol_type = other DNA
ttgctgcgacaccgaaagcggtcaaagtggcgaatgataatgctaatggccgcgttccctccacgcgtaaaatta

SEQ ID NO: 52329 - DNA, 75 bp, synthetic construct
  source 1..75: mol_type = other DNA
gtcgatggtgttaatctcagtgaactgattaacaaggtctctgaaaacggttattcactccgcgtggtcgataaa

SEQ ID NO: 52330 - DNA, 75 bp, synthetic construct
  source 1..75: mol_type = other DNA
aagtgtgccgcaacttattgataatttgctgtcggtgcgtaccaatatttcaactatttttattcgcaccgcgtt

SEQ ID NO: 52331 - DNA, 75 bp, synthetic construct
  source 1..75: mol_type = other DNA
atgaattctgcaagtacgcataaaaatcccgatttctggattttcggtctgttcttctttctctactttttcatc

SEQ ID NO: 52332 - DNA, 75 bp, synthetic construct
  source 1..75: mol_type = other DNA
ttcaccgcgatgacgtataccaaaagcaaaacgtttaaaaccgcagctggcgcgcgtcgctggttagccagaaac

SEQ ID NO: 52333 - DNA, 75 bp, synthetic construct
  source 1..75: mol_type = other DNA
cagcctgtttcgtatgcgtcagatgtggatgtttgttctatatacgataggtgtggcctgtgtctatgatgtatt

SEQ ID NO: 52334 - DNA, 75 bp, synthetic construct
  source 1..75: mol_type = other DNA
acaacgaatctctggtatacggcgtgtttcccaaccatgacggaacgttcaccgcgatgacgtataccaaaagca

SEQ ID NO: 52335 - DNA, 75 bp, synthetic construct
  source 1..75: mol_type = other DNA
ttacacctgcataatcagtcgggtcagggattcaacccatgttctcgatggcttgctgtaccacgaaagcgacct

SEQ ID NO: 52336 - DNA, 75 bp, synthetic construct
  source 1..75: mol_type = other DNA
tgcgcttccattatgtgttcatcgacggctactggaaggtgatgtaccgcacgccggaaggctggaagatgaaag

SEQ ID NO: 52337 - DNA, 75 bp, synthetic construct
  source 1..75: mol_type = other DNA
tccaaaccaggacggcaccttcaccgcaatgacgtatacaaaaagcaaaacgtttaaaaccgaaaatggtgcccg

SEQ ID NO: 52338 - DNA, 75 bp, synthetic construct
  source 1..75: mol_type = other DNA
aatatggcgcgtgagagtggtttgtataccttgcttgagtttattggcaaccctatcactgccatgtttatcgcc

SEQ ID NO: 52339 - DNA, 75 bp, synthetic construct
  source 1..75: mol_type = other DNA
tgatttcatggtgttttggtggatttcttgaagccgctgcgggctatggcacggcggtcgctattccgatcggta

SEQ ID NO: 52340 - DNA, 75 bp, synthetic construct
  source 1..75: mol_type = other DNA
gcaatgacgtataccaaaagcaaaacgtttaaaaccgaaaatggtgcccgtcgctggctggaaagaaactcaggt

SEQ ID NO: 52341 - DNA, 75 bp, synthetic construct
  source 1..75: mol_type = other DNA
tcattacgggcgcacgcagggggtcactgagcaggttctgaaggcaaatccggggctggcagagtacggcccatt

SEQ ID NO: 52342 - DNA, 75 bp, synthetic construct
  source 1..75: mol_type = other DNA
tcaattgctctggtaagtcaggttgagttttcgacatcatcatggcgacgggcagttctgtctcttgaagaacat

SEQ ID NO: 52343 - DNA, 75 bp, synthetic construct
  source 1..75: mol_type = other DNA
acgtataccaaaagcaaaacgtttaaaaccgaaaatggtgcccgtcgctggctggaaagaaactcaggtgagtga

SEQ ID NO: 52344 - DNA, 75 bp, synthetic construct
  source 1..75: mol_type = other DNA
ttaatacttgccgaaaacttgaattaatatctgacgttgtttacaccaagctcaatcatatattgactatgagga

SEQ ID NO: 52345 - DNA, 75 bp, synthetic construct
  source 1..75: mol_type = other DNA
cagcatgttgctgatgccattagtttatttgaacaggatcaaaaacattgctgcaaagtcttactcactttttct

SEQ ID NO: 52346 - DNA, 75 bp, synthetic construct
  source 1..75: mol_type = other DNA
cttcttggctggctccaaacatgcgttcaagatattttgaacgacaaaccgtccgcgtctgccatacaaataaaa

SEQ ID NO: 52347 - DNA, 75 bp, synthetic construct
  source 1..75: mol_type = other DNA
tggatgagaaccccttctccggtcacctgttcatcttccgtggccgacggagtgacatgattaaaatcctctggg

SEQ ID NO: 52348 - DNA, 75 bp, synthetic construct
  source 1..75: mol_type = other DNA
atggtcattaattacaagcagttacgagaaaaacgagatcaggtaaaggagagttttcgccgcaatgaagacctg

SEQ ID NO: 52349 - DNA, 75 bp, synthetic construct
  source 1..75: mol_type = other DNA
atgacggaaaacattcataagcatcgcatcctcattctggacttcggttctcagtacactcaactggttgcgcgc

SEQ ID NO: 52350 - DNA, 75 bp, synthetic construct
  source 1..75: mol_type = other DNA
agtatcagtcacctgaacaacagagaaaaaacaaagatcgctgatgccctgaggcaaacatatcccctgacagaa

SEQ ID NO: 52351 - DNA, 75 bp, synthetic construct
  source 1..75: mol_type = other DNA
ctggacaaagatgcgcttatatcggcaatgcacttacgttcacaacaaaaggtatctaataccaggttaaatatt

SEQ ID NO: 52352 - DNA, 75 bp, synthetic construct
  source 1..75: mol_type = other DNA
ttcgtgagcaactcatgattgccactgcggatcttagtgggtcgacaaaaggccagctggaagtctggcaggaaa

SEQ ID NO: 52353 - DNA, 75 bp, synthetic construct
  source 1..75: mol_type = other DNA
ggaataccgtgtttacttttatactcagccgcttatacatcagatttattagatgataatctaagacattcaata

SEQ ID NO: 52354 - DNA, 75 bp, synthetic construct
  source 1..75: mol_type = other DNA
tacctgtcgccgctcggttgggagcacatcaacctcaccggcgattacctctggcgcagcagcgccaagatcggc

SEQ ID NO: 52355 - DNA, 75 bp, synthetic construct
  source 1..75: mol_type = other DNA
aacccaacgcgcgatgtggttcagcgtgcgctggcagaactggaaggcggtgctggtgcagtacttactaatacc

SEQ ID NO: 52356 - DNA, 75 bp, synthetic construct
  source 1..75: mol_type = other DNA
ctttgcgccgaccagcgattatgagcaactgtcattctcgaagagttgttatttcgggatcgacattaaaaacgg

SEQ ID NO: 52357 - DNA, 75 bp, synthetic construct
  source 1..75: mol_type = other DNA
taaaccgctgggagcgtctgtgcggcctgccggatgaatgtattcccgcagggacacagacccttcgccagcgtc

SEQ ID NO: 52358 - DNA, 75 bp, synthetic construct
  source 1..75: mol_type = other DNA
ccggatttgactttgtccagagcagagccgcaggccgggccatttgaaattgcagcggcggatattttcgatcgg

SEQ ID NO: 52359 - DNA, 75 bp, synthetic construct
  source 1..75: mol_type = other DNA
ccgcctagaatttgacgccggacacaccgacattgcgcagtccttcatggcaatccgtcgcgccaccaccgccag

SEQ ID NO: 52360 - DNA, 75 bp, synthetic construct
  source 1..75: mol_type = other DNA
tcatactgaccggcatcaccctggcatcaccggtggcaggtgccgccacctgccgggcgggggccgctgccgaag

SEQ ID NO: 52361 - DNA, 75 bp, synthetic construct
  source 1..75: mol_type = other DNA
gttagaaagcgtagcgataacccaaactgacgccgatcatgccgatgccgttgtgcgctttcgtatctttaaaga

SEQ ID NO: 52362 - DNA, 75 bp, synthetic construct
  source 1..75: mol_type = other DNA
ctacccgttctggtcgggtgaactgttcaaccggggacgcgccagcgccgccgaacgcgtggaaatcgacgtcag

SEQ ID NO: 52363 - DNA, 75 bp, synthetic construct
  source 1..75: mol_type = other DNA
ttattgtcatgctggtagcctgtggtgtgcttagtctggggctgaatcattaccgcgataacgccatcacctaca

SEQ ID NO: 52364 - DNA, 75 bp, synthetic construct
  source 1..75: mol_type = other DNA
cacctgcgctcgacctatttctccaccccgtccacgctggcgcacgacgcctacccgttctggtcgggtgaactg

SEQ ID NO: 52365 - DNA, 75 bp, synthetic construct
  source 1..75: mol_type = other DNA
aagaattttttcagtgacgaggccatcgaaaagctggagcagattttctttgagcagtctttcgactatcagttg

SEQ ID NO: 52366 - DNA, 75 bp, synthetic construct
  source 1..75: mol_type = other DNA
atttcgccaaagaagtcgaggtggagctgaaaggtgatccgatggtgcttcctaacggggccacgctttacttcc

SEQ ID NO: 52367 - DNA, 75 bp, synthetic construct
  source 1..75: mol_type = other DNA
ccgctgagagcgcccgagctgcgctggaatcggcaaaagctcaggtttcggcttctaaagccgctatagaagcgg

SEQ ID NO: 52368 - DNA, 75 bp, synthetic construct
  source 1..75: mol_type = other DNA
gtttttaaacgtataggtctggctatcggatactgggagccgatggcactgacggacgtcacccggtcgccggga

SEQ ID NO: 52369 - DNA, 75 bp, synthetic construct
  source 1..75: mol_type = other DNA
ccatttattgatgctgattacgacacagacaactggtttgagcgagccaaaggaatggaatgggagcctgaacga

SEQ ID NO: 52370 - DNA, 75 bp, synthetic construct
  source 1..75: mol_type = other DNA
cctttctgccagtaaggcacaggcgcacgtctttaagcagtacatcatcgactttgccaaagaagttgaggtgga

SEQ ID NO: 52371 - DNA, 75 bp, synthetic construct
  source 1..75: mol_type = other DNA
aaaaaagcacgtaagttgagaatgaaaagagcacaaagattacttgagaaaatgacatgtgatcgtgtttcacca

SEQ ID NO: 52372 - DNA, 75 bp, synthetic construct
  source 1..75: mol_type = other DNA
aataccctaaacttttcctctcgcattatggaaaaaaagatgaaagacaatgtgcagatttatctgtaattcctc

SEQ ID NO: 52373 - DNA, 75 bp, synthetic construct
  source 1..75: mol_type = other DNA
tttaagctggagtgtggacgttccggcggcggatattcaggcgctgggcaacggcgacctgacggttaatgcctc

SEQ ID NO: 52374 - DNA, 75 bp, synthetic construct
  source 1..75: mol_type = other DNA
tcgcaaattaacgaagcgttgaaacacgttcgcgaaggcaaagcccgctaccgcgcggtgctgaaagccgactta

SEQ ID NO: 52375 - DNA, 75 bp, synthetic construct
  source 1..75: mol_type = other DNA
gaaagtagcgccggaaactcggtgagcattacgcatccggtgacggtggatctcactccggcggcgatcaccatc

SEQ ID NO: 52376 - DNA, 75 bp, synthetic construct
  source 1..75: mol_type = other DNA
ctgcggtgctggcggtgatggattacacccagatgaactcaaaagcggatgaagacgtccgtaaagagcttaatg

SEQ ID NO: 52377 - DNA, 75 bp, synthetic construct
  source 1..75: mol_type = other DNA
acttcgccaaagaagtggaggtggagctgaaaggtgatccgatggtgcttcctaacggtgccacgctttacttcc

SEQ ID NO: 52378 - DNA, 75 bp, synthetic construct
  source 1..75: mol_type = other DNA
gctgaacgggattatttcatcctcagagaacggttgatgacaatgcagaagcagctggaaggggcacaggactat

SEQ ID NO: 52379 - DNA, 75 bp, synthetic construct
  source 1..75: mol_type = other DNA
gaccgactttcatgcactggccctgcgcccgtttggctggcgcgaagtgtggatcggttatgacccggcaaaagg

SEQ ID NO: 52380 - DNA, 75 bp, synthetic construct
  source 1..75: mol_type = other DNA
cgtttatcgttattctgctggtggcctgtggtgcgctgtggatggcaacagaccattaccgtgataacgcgatta

SEQ ID NO: 52381 - DNA, 75 bp, synthetic construct
  source 1..75: mol_type = other DNA
acaagcagctctggcgtggcggtcaggtgcttgctgttccgccagcgtacacaagccagcgttgcgcgtgctgtg

SEQ ID NO: 52382 - DNA, 75 bp, synthetic construct
  source 1..75: mol_type = other DNA
gagcactggcgtaaacccgacttacgttacggagaacggttacgggaaattcatgctgcctgccgtcggcgcaag

SEQ ID NO: 52383 - DNA, 75 bp, synthetic construct
  source 1..75: mol_type = other DNA
cagcagccgatctcgcaaccttgccagacggcgcagcaaacgtacaagccagcgtcagcaatgtcgctggcaaca

SEQ ID NO: 52384 - DNA, 75 bp, synthetic construct
  source 1..75: mol_type = other DNA
ctaaaacccgggaattactgacgggggtctgcacctcactggaagaggagctgaatgactatttcagaagcggta

SEQ ID NO: 52385 - DNA, 75 bp, synthetic construct
  source 1..75: mol_type = other DNA
gcaactggtatgaaaacgtgtatgaagacttcagggaggtctgtgacattttcgggattgacctccgccagcgcg

SEQ ID NO: 52386 - DNA, 75 bp, synthetic construct
  source 1..75: mol_type = other DNA
tggaacgctacaagggggcgaaaaatgccggaaaaacgccaatccttgaagggggcatggattacaggcagctgg

SEQ ID NO: 52387 - DNA, 75 bp, synthetic construct
  source 1..75: mol_type = other DNA
gcgaacaaatcaaaaccgcccgcagggagatggtgctggctgtggtcggcacgatgaaggcgggcaaatcaacca

SEQ ID NO: 52388 - DNA, 75 bp, synthetic construct
  source 1..75: mol_type = other DNA
gttcgtctatgataaccaaaagaaaaagtgggttgtcgctggaactgtctgggggatttataattacgccaatgg

SEQ ID NO: 52389 - DNA, 75 bp, synthetic construct
  source 1..75: mol_type = other DNA
agaaaggtatcaccaccctgaagttcagcgacgccagcgtcattacctccggtaagtaccgtgtgccagccgtcc

SEQ ID NO: 52390 - DNA, 75 bp, synthetic construct
  source 1..75: mol_type = other DNA
gtgtacgtggctgatgcgttgctgaaaaaaggcgacatgaataccggcgacaagctggatattccgggcgtgggc

SEQ ID NO: 52391 - DNA, 75 bp, synthetic construct
  source 1..75: mol_type = other DNA
ttcccgctcagcgaactgcaggcgtgtatggtggacagctgggaagtctggaccgattttcatgcactggccctg

SEQ ID NO: 52392 - DNA, 75 bp, synthetic construct
  source 1..75: mol_type = other DNA
gcgctgttcaaccgtggacgcaacaaagccgacaaggtggacattgatctgtcccacagcaatctggcccccggc

SEQ ID NO: 52393 - DNA, 75 bp, synthetic construct
  source 1..75: mol_type = other DNA
gcgtgaaggtgctgacctgggattccgacaccaagccggaatgccggtcgtactacatcaaccagggcactcctg

SEQ ID NO: 52394 - DNA, 75 bp, synthetic construct
  source 1..75: mol_type = other DNA
tcgaggcactaaatgaaaccttgaagctatggaactcgcagcccgactgggctggcgatgagcgaaatgtagtgc

SEQ ID NO: 52395 - DNA, 75 bp, synthetic construct
  source 1..75: mol_type = other DNA
aaaccggacagcgaggcagcggtgatgaatctggcggtggcgttcagtcattacaacgaacatcatccgcatagt

SEQ ID NO: 52396 - DNA, 75 bp, synthetic construct
  source 1..75: mol_type = other DNA
atgagcgtacattcacgggcactggttcccctctgcacagagcaacaggccgcatggcgggcggtggcggagacg

SEQ ID NO: 52397 - DNA, 75 bp, synthetic construct
  source 1..75: mol_type = other DNA
tgatcctggcgagtctcagcccggcaaaggcgacattaaccaaaattcccgctggttttgaggttattgctcagg

SEQ ID NO: 52398 - DNA, 75 bp, synthetic construct
  source 1..75: mol_type = other DNA
caacgacgaactctcattgacattctggcgatgcccgatgctgatgcagttgaatttgaaccgcctcgtattacg

SEQ ID NO: 52399 - DNA, 75 bp, synthetic construct
  source 1..75: mol_type = other DNA
attcgtaacacgacaggtttctgcttacctcagaatcccgagttaatatattgttgggagcaactaaaaacatct

SEQ ID NO: 52400 - DNA, 75 bp, synthetic construct
  source 1..75: mol_type = other DNA
tacagccgtcgtttatggtgacccatatcggtggcctggatgcggtgccagaaaccgtgctcaatctgccggata

SEQ ID NO: 52401 - DNA, 75 bp, synthetic construct
  source 1..75: mol_type = other DNA
atgaaactgacaacacatcatctacgggcgggggccgcattattactggcaggagttctgctggcaggttgcgac

SEQ ID NO: 52402 - DNA, 75 bp, synthetic construct
  source 1..75: mol_type = other DNA
tgttctggtctgggcaatccgttggtggtgatatgaatcgtgtgctgtatggcgtgcttattgtcctgctgcttg

SEQ ID NO: 52403 - DNA, 75 bp, synthetic construct
  source 1..75: mol_type = other DNA
tttccgatgaccgatagctggtatccgtcacgggattttcgacgacgggctgcgttgtgggggatggctttgccg

SEQ ID NO: 52404 - DNA, 75 bp, synthetic construct
  source 1..75: mol_type = other DNA
tgcggatgccctgatgcgggagctggatccgcgcaccaccaccgaactgataaaccgctgggagcgtctgtgcgg

SEQ ID NO: 52405 - DNA, 75 bp, synthetic construct
  source 1..75: mol_type = other DNA
acgcgattacctacaaagcgcagcgcgataacaaagccagtgaactgaagctggcgaacgcaaccattactgata

SEQ ID NO: 52406 - DNA, 75 bp, synthetic construct
  source 1..75: mol_type = other DNA
atacacaaaggagcttgctgatgctaacgcgactatcgaaagtctccgtgctgatgtttctgctgggcgtaagcg

SEQ ID NO: 52407 - DNA, 75 bp, synthetic construct
  source 1..75: mol_type = other DNA
tacttggagctgtgggtgggtatgatgataaatattgctctgtatctcatgcaggcgaagcctcaacggatttta

SEQ ID NO: 52408 - DNA, 75 bp, synthetic construct
  source 1..75: mol_type = other DNA
ggattacaggtgctttgtggaagcgtacagctgtcggattaacgaatttcgcctggatcaacacatccggcgata

SEQ ID NO: 52409 - DNA, 75 bp, synthetic construct
  source 1..75: mol_type = other DNA
gaacaacgtcgtcgtcagggacgcacactttcagcatggccttatgccaccgctttctttcgctgcctgaatggc

SEQ ID NO: 52410 - DNA, 75 bp, synthetic construct
  source 1..75: mol_type = other DNA
aatggtgagcttctatggctggaaccgcgtcgatcgctttatggccgcctggaaaaatgcgggattcagcgtggt

SEQ ID NO: 52411 - DNA, 75 bp, synthetic construct
  source 1..75: mol_type = other DNA
tcggggatgagcttcggcgtgtcggtaccgcaaaccagacgaaaatctcaggcgcgcctgtgcaggggccactgt

SEQ ID NO: 52412 - DNA, 75 bp, synthetic construct
  source 1..75: mol_type = other DNA
aatgtacgcggttgatgctgttgccgctattgcagaggtgagaggctggaacgcctgtcgtgccgctatgcttca

SEQ ID NO: 52413 - DNA, 75 bp, synthetic construct
  source 1..75: mol_type = other DNA
cggtatggctattcacaagaaatggcgacagacctatttttccacaccatccagcctgacccacagtgcttatcc

SEQ ID NO: 52414 - DNA, 75 bp, synthetic construct
  source 1..75: mol_type = other DNA
cacagaacattgcatcaagtttatggggagagccggacgcgcaacggctgacctggtacggaacggcgttaggta

SEQ ID NO: 52415 - DNA, 75 bp, synthetic construct
  source 1..75: mol_type = other DNA
gaagccaagattgcggggatcacctattccggacatgtgcaccatgacaacggcaaaggaagtaaaacaggagga

SEQ ID NO: 52416 - DNA, 75 bp, synthetic construct
  source 1..75: mol_type = other DNA
atcggcaacaacggcgcagagctgatttttctcgggacaaactcaaacactgcgcagagccataacggcgacctg

SEQ ID NO: 52417 - DNA, 75 bp, synthetic construct
  source 1..75: mol_type = other DNA
atggctgcgaccaccactgaatacggtaaaccgatgatcctctacagcgataaagccagcgtattcagagtcaat

SEQ ID NO: 52418 - DNA, 75 bp, synthetic construct
  source 1..75: mol_type = other DNA
cgtcgaatacatcggcattgacgcaaccggcctcggtctcggcgtgttccagctggtgcgctcattttacccggc

SEQ ID NO: 52419 - DNA, 75 bp, synthetic construct
  source 1..75: mol_type = other DNA
ccgtctggagtttgacgccgggcacaccgacattgcgcagtcatttatggcaatccgtcgcgctaccactgccag

SEQ ID NO: 52420 - DNA, 75 bp, synthetic construct
  source 1..75: mol_type = other DNA
acaagtacgactggctgacctcagacaccgctgtggatgaggcccttctcatcaacgaatataccttcaccgaag

SEQ ID NO: 52421 - DNA, 75 bp, synthetic construct
  source 1..75: mol_type = other DNA
actggcctgagagcgtcgacaccgatgcgaaaaaatgcgccgcctttgcgggttctggcgtatccgttcagccgc

SEQ ID NO: 52422 - DNA, 75 bp, synthetic construct
  source 1..75: mol_type = other DNA
ggcggtatggatctcggcgagacggcggatattggctcaaatatcctgacgcagttcggcctttctgctgaccag

SEQ ID NO: 52423 - DNA, 75 bp, synthetic construct
  source 1..75: mol_type = other DNA
tattaacggcagcggtactgctaacctttggttttgcgcttaccgcaaatgctgcgctcatcaataaaggagtca

SEQ ID NO: 52424 - DNA, 75 bp, synthetic construct
  source 1..75: mol_type = other DNA
agcgcaggcaaagctgtttatgtttccgctgtacaaatcgatacagcgacaaaaacgcaggctcaggtttataaa

SEQ ID NO: 52425 - DNA, 75 bp, synthetic construct
  source 1..75: mol_type = other DNA
tacgcaaaacggcgacagcgctggatgcgtggtggtggcaccgccagccgtgccgggtggtaagttccgcattct

SEQ ID NO: 52426 - DNA, 75 bp, synthetic construct
  source 1..75: mol_type = other DNA
agctcgtgcgctccttcttcccggcggcgcgtgccattcgctacacgccggaaatgaaaactgcgatggtgctga

SEQ ID NO: 52427 - DNA, 75 bp, synthetic construct
  source 1..75: mol_type = other DNA
aactggcacaaggccggtatcgcgcaccgtattcgccacatcctcaaatcgcgccagattggcgcaacattctac

SEQ ID NO: 52428 - DNA, 75 bp, synthetic construct
  source 1..75: mol_type = other DNA
tcccatcagggcattttttgccggggtgttcagcgggattatggaaaggctgaccccgttgcgcgaaacctttga

SEQ ID NO: 52429 - DNA, 75 bp, synthetic construct
  source 1..75: mol_type = other DNA
ggcggtatggacctcggtgagacggcggatattggctcaaatattctgacgcagttcggtctttctgctgaccag

SEQ ID NO: 52430 - DNA, 75 bp, synthetic construct
  source 1..75: mol_type = other DNA
gctcatttgctctgctttttgccagccatactagcctggcggtaacttatccattacctccagagggtagccgtt

SEQ ID NO: 52431 - DNA, 75 bp, synthetic construct
  source 1..75: mol_type = other DNA
tcgatggcgctgaagaactggatccgttgttcgatcaggcggtgcagtttgtcactgaaaaacgcaaagcgtcaa

SEQ ID NO: 52432 - DNA, 75 bp, synthetic construct
  source 1..75: mol_type = other DNA
gaacagcagatcgagatcatcagccagttaccgcgaacgaagcagaagctggtttctgagattttagataatgtg

SEQ ID NO: 52433 - DNA, 75 bp, synthetic construct
  source 1..75: mol_type = other DNA
aatgccgggtgcggtggatgtggatctggggcttgatgacagtgcgctggatacagaattttccattggtggtac

SEQ ID NO: 52434 - DNA, 75 bp, synthetic construct
  source 1..75: mol_type = other DNA
caatgtccgggcaaaatcaggtttaaaccgtccgatactggatcagggctggtatgaaatacgccgccagcttga

SEQ ID NO: 52435 - DNA, 75 bp, synthetic construct
  source 1..75: mol_type = other DNA
tggtcgcaaacggcctggcatgaacctatccataatttaggtgggatgcccggtgcgtggctggcagatacgctg

SEQ ID NO: 52436 - DNA, 75 bp, synthetic construct
  source 1..75: mol_type = other DNA
agtatttttggctatgtgctggcaccgctggcgtggatcatgggtgtggactggagtgatgccaatcttgcgggt

SEQ ID NO: 52437 - DNA, 75 bp, synthetic construct
  source 1..75: mol_type = other DNA
gcaaaacaggtcagggatgaagtcagaaatgaggtgcagaagctggacgtagcagggctgataggtgagcgcatc

SEQ ID NO: 52438 - DNA, 75 bp, synthetic construct
  source 1..75: mol_type = other DNA
gaaaaagtgcgtgcgcgacgcggacgcccgccaaaagatgaagtgcgcctggttccgctgacagatataagctat

SEQ ID NO: 52439 - DNA, 75 bp, synthetic construct
  source 1..75: mol_type = other DNA
tggtgccgctttgtatgtcgcacagccatcgctgatggtgcagaaaggcattgccggaacttactgcaaaacgcc

SEQ ID NO: 52440 - DNA, 75 bp, synthetic construct
  source 1..75: mol_type = other DNA
acctgaacctgtttaacgacgggaacaactggcaggggagcgttgagtcgctgacgctgccgaaattcacccgca

SEQ ID NO: 52441 - DNA, 75 bp, synthetic construct
  source 1..75: mol_type = other DNA
ataagctgcaaattgtgccggaaggccgaaaatcagtacgcatattcagggccggacatcttgagccagtaatga

SEQ ID NO: 52442 - DNA, 75 bp, synthetic construct
  source 1..75: mol_type = other DNA
cgcaggcgctcatcaccccggaaggcgaaacggcgtggtgcggggagtatgacgagtgggggaaccagcttaatg

SEQ ID NO: 52443 - DNA, 75 bp, synthetic construct
  source 1..75: mol_type = other DNA
ttccgctgtcagatgaacgaaggctggtaccagatacgtattgccggtgaggataccgcgccggaccagatatcg

SEQ ID NO: 52444 - DNA, 75 bp, synthetic construct
  source 1..75: mol_type = other DNA
gccggtagatacctttgcgcttgaacaaatggcgcgcctggtagaagcgcgtctggctgatttccgtattaaagc

SEQ ID NO: 52445 - DNA, 75 bp, synthetic construct
  source 1..75: mol_type = other DNA
atgaaaacatcccttcttctttccgtgctgtccgcctgcgtacttctgaccggctgtcaggggcagcaaaaactg

SEQ ID NO: 52446 - DNA, 75 bp, synthetic construct
  source 1..75: mol_type = other DNA
atgacgctcgcagagctgggcatggccttctggcatgatttagcggctccggtcattgctggcattcttgccagc

SEQ ID NO: 52447 - DNA, 75 bp, synthetic construct
  source 1..75: mol_type = other DNA
ttggattaccgggaatgccgggaacggagcaaggcgtccgctattcaatcaggaagtatgcaaccagcgaaacca

SEQ ID NO: 52448 - DNA, 75 bp, synthetic construct
  source 1..75: mol_type = other DNA
ttcgccagagcagatcctgcaaaccgcgaaagacattggtgagccttctgtcctgaaccgtgcaggtggtgcacc

SEQ ID NO: 52449 - DNA, 75 bp, synthetic construct
  source 1..75: mol_type = other DNA
aatgccgttgcattgtccaccgcaagccattgcacatcatcaacaactcgaacagcaggcactggcatcgctgca

SEQ ID NO: 52450 - DNA, 75 bp, synthetic construct
  source 1..75: mol_type = other DNA
ccgacggcaacggtagccagccgttcttcgatgacgaaggaaatttaacccatatcggtgttgcaggttttgaaa

SEQ ID NO: 52451 - DNA, 75 bp, synthetic construct
  source 1..75: mol_type = other DNA
tattcctgttcacgataccatcgccagagttgtatcctgtatcagtccttcaaaatttcacgagtgctttattaa

SEQ ID NO: 52452 - DNA, 75 bp, synthetic construct
  source 1..75: mol_type = other DNA
cccgccgaaagatccacgatgtgcacgtccgcatcccgtcagcactgacggaagaagccctagagcagatcggtc

SEQ ID NO: 52453 - DNA, 75 bp, synthetic construct
  source 1..75: mol_type = other DNA
tcgaacatctattccgcctctgttttcagctatctggcggatgatctgcgcgagctgcaacaactcttccagtag

SEQ ID NO: 52454 - DNA, 75 bp, synthetic construct
  source 1..75: mol_type = other DNA
tactgttgactatttgtgccgttatttctggtgcagagggttgggaagatatagaggattttggggaaacacatc

SEQ ID NO: 52455 - DNA, 75 bp, synthetic construct
  source 1..75: mol_type = other DNA
tggcaacgttgtgtgaggcagaagagctgaatattcacaaagacccgaaagaaacggctgatgcatttcgtgtcc

SEQ ID NO: 52456 - DNA, 75 bp, synthetic construct
  source 1..75: mol_type = other DNA
atgagccagtcactgtttagccaaccgttgaacgttattaacgtcggtatcgccatgtttagcgatgatctgaaa

SEQ ID NO: 52457 - DNA, 75 bp, synthetic construct
  source 1..75: mol_type = other DNA
ccgccgaactagctgcttcaggtgaaatcatcttctctccgtgccacgaacatgactgtgtcggctcaatggcgg

SEQ ID NO: 52458 - DNA, 75 bp, synthetic construct
  source 1..75: mol_type = other DNA
gaaactacaaaaagtggtatgcaaacaactgatctgtcacgtttttcaaaaaaatacgcacaactaccaggaact

SEQ ID NO: 52459 - DNA, 75 bp, synthetic construct
  source 1..75: mol_type = other DNA
ggagcggttattacaaccgggtacagcatgaaccctcagacagaaaacaaagtgatgagcggctaaaactggaga

SEQ ID NO: 52460 - DNA, 75 bp, synthetic construct
  source 1..75: mol_type = other DNA
aagattgtgtcatccgcgtcgcttgtgatgtcaccaacccgttagtcggcgacagtggtgcttcgcgcatctttg

SEQ ID NO: 52461 - DNA, 75 bp, synthetic construct
  source 1..75: mol_type = other DNA
ctggcgattacgtaactattctacgtggacacgcaacgatcaggcgtcaagctggaacactatcagtagttattt

SEQ ID NO: 52462 - DNA, 75 bp, synthetic construct
  source 1..75: mol_type = other DNA
ccgtctggatgccgggttaaccatcttctttatggtggtcgtggtggttctggcgctgttctcgattaagacggc

SEQ ID NO: 52463 - DNA, 75 bp, synthetic construct
  source 1..75: mol_type = other DNA
atgcgcttaatctggtcattattttcggtagctgcgcagcattgattctgatgagcttttggtttcgccgtggag

SEQ ID NO: 52464 - DNA, 75 bp, synthetic construct
  source 1..75: mol_type = other DNA
gttaaccgggatacctggtgtcgtgccggtgattaccgtgctccgggatcactggccgggatgattaaacaggcg

SEQ ID NO: 52465 - DNA, 75 bp, synthetic construct
  source 1..75: mol_type = other DNA
aattgccgcactgcgtctgctgccgtcctatctgcgtgatccgcttatccgccatctctctttcctgcgcaaaaa

SEQ ID NO: 52466 - DNA, 75 bp, synthetic construct
  source 1..75: mol_type = other DNA
acccggcggcagaagtggcgaaagcgcgtgattgggtgaaagcgcgtatggctaaagcaggcatggtggaggcgg

SEQ ID NO: 52467 - DNA, 75 bp, synthetic construct
  source 1..75: mol_type = other DNA
gcattttaagtgcggcaattgccacgcgcaccgagcggcgcagcggtctggcggcgttgtttagttcacggggat

SEQ ID NO: 52468 - DNA, 75 bp, synthetic construct
  source 1..75: mol_type = other DNA
tggagtatgtggctggtattctgaagcaatctcgtcatctggatgacatcgaggcaagggagtggctgaaaagtt

SEQ ID NO: 52469 - DNA, 75 bp, synthetic construct
  source 1..75: mol_type = other DNA
ccatcgatactatatccggtaacgtgcgtcgtgcctttatcggtctgtacgaagagaagcagctctctgataacc

SEQ ID NO: 52470 - DNA, 75 bp, synthetic construct
  source 1..75: mol_type = other DNA
gcaccctcacggcgtggccggataaccgcatcgcggaagatgcgcactatgtctaccgctacgatgaatacggca

SEQ ID NO: 52471 - DNA, 75 bp, synthetic construct
  source 1..75: mol_type = other DNA
caaacagcacaatatcccggtttattacaccgcccagccgaaagagcagagcgatgaagatcgggcgctgttgaa

SEQ ID NO: 52472 - DNA, 75 bp, synthetic construct
  source 1..75: mol_type = other DNA
gagccaagaagagcaagaattagttatttacaccttgagaaggaaaggggtagaaaaattgctggaattctgcaa

SEQ ID NO: 52473 - DNA, 75 bp, synthetic construct
  source 1..75: mol_type = other DNA
cggcagatgtgggcaactggcctgcgggtacggtgaatatcacggtttcaggtgccactagcgcaggaaacccgg

SEQ ID NO: 52474 - DNA, 75 bp, synthetic construct
  source 1..75: mol_type = other DNA
aaggcgttggatattgcaggcgacatttgcatctataccaaccatttccacaccatcgaagaattaagctacaaa

SEQ ID NO: 52475 - DNA, 75 bp, synthetic construct
  source 1..75: mol_type = other DNA
aacattggggggcatgggtggcaaataatcacgaggatgtcacctggtcgtctattgctgcaggatttaaaggac

SEQ ID NO: 52476 - DNA, 75 bp, synthetic construct
  source 1..75: mol_type = other DNA
atgcgtgatattcagcaggttctggaacgatggggggcgtgggcggcaaataactatgaggatgttacatggtcg

SEQ ID NO: 52477 - DNA, 75 bp, synthetic construct
  source 1..75: mol_type = other DNA
cagaaggcggaaggggttatcgatggcatgttgatgatgcttgatatccggctggagatggacagatatgtagaa

SEQ ID NO: 52478 - DNA, 75 bp, synthetic construct
  source 1..75: mol_type = other DNA
gtaatgttaagaaaagtagttttgttgagcttgcaaagtatctgcaagacccgcaaagcaaacaagagcgcgtgg

SEQ ID NO: 52479 - DNA, 75 bp, synthetic construct
  source 1..75: mol_type = other DNA
ggtacggtcagccagccggggcgcaatgtccgggcaaaatcaggtttaaaccgttcgatactggatcagggctgg

SEQ ID NO: 52480 - DNA, 75 bp, synthetic construct
  source 1..75: mol_type = other DNA
cgcagggactaccttcataaagtcacaacgaccgtcagcaaaaaccacgcaatgatagtcattgaggatttgaag

SEQ ID NO: 52481 - DNA, 75 bp, synthetic construct
  source 1..75: mol_type = other DNA
agaagcagaaacgcaaaatacagcgactgcattcccgtatcgcaaatatccgcagggactaccttcacaaagtca

SEQ ID NO: 52482 - DNA, 75 bp, synthetic construct
  source 1..75: mol_type = other DNA
gttgtgaaaaatgtcacggtcagccagtcctgcggtaagtggtacatcagtattcagacagaaagtgaagtatca

SEQ ID NO: 52483 - DNA, 75 bp, synthetic construct
  source 1..75: mol_type = other DNA
atcctgcgtcatcaggaattcctgacgctgaaagatttaaaaaacgcgatgcagcgagagaacgccagaactcac

SEQ ID NO: 52484 - DNA, 75 bp, synthetic construct
  source 1..75: mol_type = other DNA
agcgtgcaaacagtgaccggtcagccagatgttgaccaggttgttcttgatgaagcgattaaaaaccgctccggg

SEQ ID NO: 52485 - DNA, 75 bp, synthetic construct
  source 1..75: mol_type = other DNA
ctgcaatggcactgggtggtgtggcccagatgctggccccgaaggcaaagacgccggagtacaaaagtacggata

SEQ ID NO: 52486 - DNA, 75 bp, synthetic construct
  source 1..75: mol_type = other DNA
agcgtaaagcctatcaggcatggtgggatagggttgattcgattcttacttacactaatttaggttccaacagac

SEQ ID NO: 52487 - DNA, 75 bp, synthetic construct
  source 1..75: mol_type = other DNA
agagttacggcgaacaggttcaccgtgtgggggaacgattcgccatgctggagtcggcgctggtgctttccgtcc

SEQ ID NO: 52488 - DNA, 75 bp, synthetic construct
  source 1..75: mol_type = other DNA
cctattaccgcctcacgattgatggtagcgacgtcatcgaaatcgataccgtcaacatggttgagaaggtgaacg

SEQ ID NO: 52489 - DNA, 75 bp, synthetic construct
  source 1..75: mol_type = other DNA
gctcatcagcgaagacggcaatacggcgtggcgcggggagtatgatgaatggggcaaccagcttaatgaggagaa

SEQ ID NO: 52490 - DNA, 75 bp, synthetic construct
  source 1..75: mol_type = other DNA
cgatatggccacactcagtaatgctctgctaagaagggctcaccaggccggtatgccggtgacactgctggcctt

SEQ ID NO: 52491 - DNA, 75 bp, synthetic construct
  source 1..75: mol_type = other DNA
agacggaccgcatcccggcgggtgtgatacggacggacgacgagcggacccaccactaccactacgacagccagc

SEQ ID NO: 52492 - DNA, 75 bp, synthetic construct
  source 1..75: mol_type = other DNA
accggcctgatgacccgcgacaattacagaacggtagataacattaccctggggaagcatccggaggcgaaacga

SEQ ID NO: 52493 - DNA, 75 bp, synthetic construct
  source 1..75: mol_type = other DNA
ggcttcctggctggttgagtggaaaaatgccactgaaacgcaatggcttaaagattctccctcacagccattgca

SEQ ID NO: 52494 - DNA, 75 bp, synthetic construct
  source 1..75: mol_type = other DNA
aatagccgtcaggtcacgggtgttgtgaaaaatgtcactgtcagccagtcctgcggtaagtggtacatcagtatt

SEQ ID NO: 52495 - DNA, 75 bp, synthetic construct
  source 1..75: mol_type = other DNA
ccacggtgcagatcaaagcagccagaccagcggaaaaggaatacaccctacaggacggcggagggctttttctcc

SEQ ID NO: 52496 - DNA, 75 bp, synthetic construct
  source 1..75: mol_type = other DNA
tctgcaaattaccggcaccagtaatcagcccgcaggcaccacaataacggtgacgctgaacgggcaaaattacac

SEQ ID NO: 52497 - DNA, 75 bp, synthetic construct
  source 1..75: mol_type = other DNA
gaaggctttgcttttttaatgggccgcctgcgcgagaagctggacgacgatctgccggagctgactgaagggctg

SEQ ID NO: 52498 - DNA, 75 bp, synthetic construct
  source 1..75: mol_type = other DNA
cgccagccgtcgctttgtttcggcagaccaactgccgctcattgtgctggaaatcactattacgccactggacgc

SEQ ID NO: 52499 - DNA, 75 bp, synthetic construct
  source 1..75: mol_type = other DNA
aagatgaactactcagaatagccaaagcatgcgccccgacaccagaagatatgttggtatatacgggaagagcca

SEQ ID NO: 52500 - DNA, 75 bp, synthetic construct
  source 1..75: mol_type = other DNA
tcacgggagttgtgaaaaatgtcactgtcagccagtcctgcggtaagtggtacatcagtattcagacagaaagtg

SEQ ID NO: 52501 - DNA, 75 bp, synthetic construct
  source 1..75: mol_type = other DNA
tattcactcaactgaccttaattctgcaacctacaggaaagtgcctgcaatggacagagcatcacagccagcgcg

SEQ ID NO: 52502 - DNA, 75 bp, synthetic construct
  source 1..75: mol_type = other DNA
tacgcggcagtcttcagctatctggccgaagacctggcagaactgcaggaccttatcaaccagcaacaccaccac

SEQ ID NO: 52503 - DNA, 75 bp, synthetic construct
  source 1..75: mol_type = other DNA
tacaaaataaaattacgtgcgtcaggttttcgcctagtctatcaggtgattgacgaacaattaattatcgctgtt

SEQ ID NO: 52504 - DNA, 75 bp, synthetic construct
  source 1..75: mol_type = other DNA
tcgttacatttgaaaaaatgcttaaaagtaattttataggtaacttgactggtgcatatgcctcctctttttttg

SEQ ID NO: 52505 - DNA, 75 bp, synthetic construct
  source 1..75: mol_type = other DNA
aacggagtggagccagaaagctacctccgttatgtccttgacgtcattgctgactggccgataaaccgggtcagc

SEQ ID NO: 52506 - DNA, 75 bp, synthetic construct
  source 1..75: mol_type = other DNA
atgcaaaatcttgatgagccgattaagagtgtcggcatcactgaagttgcgaaggcttgtggagttagcgaaagg

SEQ ID NO: 52507 - DNA, 75 bp, synthetic construct
  source 1..75: mol_type = other DNA
cctcacacaaaccaaaaacacgcaagattccaaagtggtgtattgaccgtattccttctgatgctcaaatcatag

SEQ ID NO: 52508 - DNA, 75 bp, synthetic construct
  source 1..75: mol_type = other DNA
gataaaacgccacggtattcaggtgacggctgacagaaaggattacccggagaaatgcttcagcacactggaaga

SEQ ID NO: 52509 - DNA, 75 bp, synthetic construct
  source 1..75: mol_type = other DNA
tcgctggctggccctgattgcccgtctgtttgataacgcatcccgttcactgctcctgatgtacgatgatgccca

SEQ ID NO: 52510 - DNA, 75 bp, synthetic construct
  source 1..75: mol_type = other DNA
gcaaaaaattgccgggatgtttaccacgggattcagaacccgggtgacaccccggatgagagatattctgcgcgc

SEQ ID NO: 52511 - DNA, 75 bp, synthetic construct
  source 1..75: mol_type = other DNA
acagtggtgcacgcgtcgtaacgggcacgcggaaccgtgaatatatggagcttaaccggttatggctgcatgact

SEQ ID NO: 52512 - DNA, 75 bp, synthetic construct
  source 1..75: mol_type = other DNA
tgcaaagggcaacaaaatcagctcgccgcttgcggtgcttccgccagtgcagcgcatcgatgcgatgatgaacgg

SEQ ID NO: 52513 - DNA, 75 bp, synthetic construct
  source 1..75: mol_type = other DNA
gaattttttgaaaataaacctgagcctacagcagagaaaatggctcaggtacgtgagctgcgtgaattagaatag

SEQ ID NO: 52514 - DNA, 75 bp, synthetic construct
  source 1..75: mol_type = other DNA
ggatgaggtgctgcctgcgccgctgccgccgtaccgggtactgaccgggctggtggaccgcttcgggcgcacaca

SEQ ID NO: 52515 - DNA, 75 bp, synthetic construct
  source 1..75: mol_type = other DNA
tcatttgaacatatctgtacactgttacgtgagctggtaaaacattctcctggcgactttggctaccagcgttca

SEQ ID NO: 52516 - DNA, 75 bp, synthetic construct
  source 1..75: mol_type = other DNA
ttgatttaattccggatgaacatgagtggatattcagaaaacagaaatctttgtatatgcgccgggaaatggcgc

SEQ ID NO: 52517 - DNA, 75 bp, synthetic construct
  source 1..75: mol_type = other DNA
atggcactctgtacacgacaagtatcagccagtgaaatcgccaggcgtattggtgtcagtcgtgcggtattgtat

SEQ ID NO: 52518 - DNA, 75 bp, synthetic construct
  source 1..75: mol_type = other DNA
aaacggaaattgaggatactttaaagccacttagacagccaagacagccaagagtaaatactggtgaccgagctg

SEQ ID NO: 52519 - DNA, 75 bp, synthetic construct
  source 1..75: mol_type = other DNA
tggatatcgacgttgatgaattgctcgactatctggcgcgcgacagtaaaaccagcgccatcctgctctatctcg

SEQ ID NO: 52520 - DNA, 75 bp, synthetic construct
  source 1..75: mol_type = other DNA
aaaaaccgatcctgtttaccggaaaaagtgccgctgttaatggctattcggttgcgggtacggcggagggctggc

SEQ ID NO: 52521 - DNA, 75 bp, synthetic construct
  source 1..75: mol_type = other DNA
tggtagtggttctgtagccaagtggctgaaagtctatgaggagcacggagaagctggtttacgcgcactcaagat

SEQ ID NO: 52522 - DNA, 75 bp, synthetic construct
  source 1..75: mol_type = other DNA
tgccgcgttacgctccgcggttgggccgactggcactgtgatgggatacgcgtcgtgggaccgatcaccctacga

SEQ ID NO: 52523 - DNA, 75 bp, synthetic construct
  source 1..75: mol_type = other DNA
atacaaaaacagggaggtgattatttattcgcggtaaaaggaaaccaggggcggctaaataaagcctttgaggaa

SEQ ID NO: 52524 - DNA, 75 bp, synthetic construct
  source 1..75: mol_type = other DNA
cttcatttttctgcacgttataaaggcaccggtacaagtgcatcagcagggcaagcaaatgctgacgcgactttt

SEQ ID NO: 52525 - DNA, 75 bp, synthetic construct
  source 1..75: mol_type = other DNA
atgaaaacattacccgacacgcatgtacgggaggcatcgtgctgcccgtctcccgtcaccatctggcagacactg

SEQ ID NO: 52526 - DNA, 75 bp, synthetic construct
  source 1..75: mol_type = other DNA
gcgatcgatgttatccacgcccaggtaagcggcggcgggcgtctgatttatctcggtgcgggaacatccggtcgt

SEQ ID NO: 52527 - DNA, 75 bp, synthetic construct
  source 1..75: mol_type = other DNA
catcttgcggggttcagtggtgtactgcaggcggatgcatacgccgggttcaacgagctgtaccgggatggccgg

SEQ ID NO: 52528 - DNA, 75 bp, synthetic construct
  source 1..75: mol_type = other DNA
cttcatttcatgcgtggagttatcccaacgacggaaatgaaaaaatattgtagtgaaaattgtgccgaaaaagac

SEQ ID NO: 52529 - DNA, 75 bp, synthetic construct
  source 1..75: mol_type = other DNA
ggcctgatgacccgcgacaattacagaacggtaaatgacattacccaggggaagcatccggaggcgaaacaatga

SEQ ID NO: 52530 - DNA, 75 bp, synthetic construct
  source 1..75: mol_type = other DNA
agagcacaccccgctgtatcgccagtcagaaatatacggccggcaaggtgtggagctgaggcgttcactgctgtc

SEQ ID NO: 52531 - DNA, 75 bp, synthetic construct
  source 1..75: mol_type = other DNA
acaatatgcgttttggcctggagctggagaaatcggcgttcgggaaatataacgtggataatgcgataaacgcca

SEQ ID NO: 52532 - DNA, 75 bp, synthetic construct
  source 1..75: mol_type = other DNA
tactcgcgacgtaaggatgtggtgcatttactgacataccagagcagtaaggggctggagttcccgtatgtggcg

SEQ ID NO: 52533 - DNA, 75 bp, synthetic construct
  source 1..75: mol_type = other DNA
gtcctacgcgatattctgggccatgccgatataaaaatgacgatgatttacgcccacttttcgccggatcatctt

SEQ ID NO: 52534 - DNA, 75 bp, synthetic construct
  source 1..75: mol_type = other DNA
tgtgcgctggttctctccatttttggcatcgaaacgcggaaggtgtcgctggaagagatttctgaggtgaattaa

SEQ ID NO: 52535 - DNA, 75 bp, synthetic construct
  source 1..75: mol_type = other DNA
aagcggatgcgtacgccgggttcaacgagctttatcgcaatggtgggataacggaagctgcctgctgggctcatg

SEQ ID NO: 52536 - DNA, 75 bp, synthetic construct
  source 1..75: mol_type = other DNA
atgatgacagaaaacaaaaagaatcaggaattcaaaatcagaaaaattaaacggaatattgagcgcagttgtgat

SEQ ID NO: 52537 - DNA, 75 bp, synthetic construct
  source 1..75: mol_type = other DNA
tcattacgcggacgttctgatgggggcttctgtttcttcatgcctgtcatttgtctgttactgatgttgttgttc

SEQ ID NO: 52538 - DNA, 75 bp, synthetic construct
  source 1..75: mol_type = other DNA
tggagtcccgtaattgtggcaaaccgctgcatagtgcgttcaatgatgaaatcccggcgattgtcgatgtttttc

SEQ ID NO: 52539 - DNA, 75 bp, synthetic construct
  source 1..75: mol_type = other DNA
gaattaatattcggaaatatcatgatattcctgctgaaacgccgtatgcgccgggagaacacattaagggagggc

SEQ ID NO: 52540 - DNA, 75 bp, synthetic construct
  source 1..75: mol_type = other DNA
tcggcaaacttgctgacgtcagcgcgcagctgttagagcgtctctggttgcgctggaacccggcttatcatttga

SEQ ID NO: 52541 - DNA, 75 bp, synthetic construct
  source 1..75: mol_type = other DNA
ttattcgcggtaaaaggaacccaggggcggctaaataaagcctttgaggaaaaatttccgctgaaagaattaaat

SEQ ID NO: 52542 - DNA, 75 bp, synthetic construct
  source 1..75: mol_type = other DNA
aatcgaagatttaatcaggtgcaaatgttcaggtctgtcagacattgagtttggactcaatgtccatgatggttg

SEQ ID NO: 52543 - DNA, 75 bp, synthetic construct
  source 1..75: mol_type = other DNA
tgatcgtgaagctcaatgactggccgtcgaaccgtgtgcatgaactgctgccctggaactgctcaactgtaaaat

SEQ ID NO: 52544 - DNA, 75 bp, synthetic construct
  source 1..75: mol_type = other DNA
ctggaacgcgatgatgacactggctttcagcaggtgctggaacgtgctggctatctggcgaaggagcataccaaa

SEQ ID NO: 52545 - DNA, 75 bp, synthetic construct
  source 1..75: mol_type = other DNA
gatacaaattgcgtagtccttcctccttcatacttaggaaaaatgaccgaagcacaagctaatacggaactttga

SEQ ID NO: 52546 - DNA, 75 bp, synthetic construct
  source 1..75: mol_type = other DNA
cgcgaccgcctgcaccgggaaacgctgcgcagcttcggccgttatgaactcaccaccgcttatacccctgccggg

SEQ ID NO: 52547 - DNA, 75 bp, synthetic construct
  source 1..75: mol_type = other DNA
agcctgacggcatcatcggcatcggaacatggcgagacttcatcgtctgctttggttcatcgacgattgaatatt

SEQ ID NO: 52548 - DNA, 75 bp, synthetic construct
  source 1..75: mol_type = other DNA
tgcacagctgattgttgataagggctactcatatcgacaggccagtgaagcgatgaatgtcggttcaaccacgct

SEQ ID NO: 52549 - DNA, 75 bp, synthetic construct
  source 1..75: mol_type = other DNA
cgtaaggttctggatagcctggacgtgattgtgagcattgatttagacggaaatgttcgccgtatgaatgacatc

SEQ ID NO: 52550 - DNA, 75 bp, synthetic construct
  source 1..75: mol_type = other DNA
gaacgtctggctctgtttgatcagttcccctacacgcaccatatggagtgcggcgtattactgaccgcgaagtaa

SEQ ID NO: 52551 - DNA, 75 bp, synthetic construct
  source 1..75: mol_type = other DNA
tccagagcatgacagttacgcaatcagtgaaaagagtcacggcagagaagaaatccgtcttcatattgtttgcga

SEQ ID NO: 52552 - DNA, 75 bp, synthetic construct
  source 1..75: mol_type = other DNA
cctgcgtgccattaacctcaatgatccatgacgctactgcgcatctggatgttggtcagcagcgactcaacctga

SEQ ID NO: 52553 - DNA, 75 bp, synthetic construct
  source 1..75: mol_type = other DNA
tcaaaatatcacgcaacaacggagagcggtcatccgaatcccaaatggaacagcaccaccatgcgcgattccagc

SEQ ID NO: 52554 - DNA, 75 bp, synthetic construct
  source 1..75: mol_type = other DNA
agctgcctgctgggctcatgcccgccgaaagatccacgatgtgcacgtccgcatcccgtcagcactgacggaaga

SEQ ID NO: 52555 - DNA, 75 bp, synthetic construct
  source 1..75: mol_type = other DNA
tcttatgcttccgcgcttaacctgctcggccttgcacaacaagatctcgacgaaggcaaatcacaaatcgctcac

SEQ ID NO: 52556 - DNA, 75 bp, synthetic construct
  source 1..75: mol_type = other DNA
acgccaatccatctggacctgcaatgggtattaattgataaccaaactgcagtttgtctgactccagagcaatta

SEQ ID NO: 52557 - DNA, 75 bp, synthetic construct
  source 1..75: mol_type = other DNA
ggggagcgctactgtacagcctgatcgggacgtgcaaactgaatgacgtggatccagaaagctaccttcgccatg

SEQ ID NO: 52558 - DNA, 75 bp, synthetic construct
  source 1..75: mol_type = other DNA
atacgacctttgatgacaaggtgcgtcagcatgccaccaccgagatgcaggtgacggcagcgcagatgcagaagc

SEQ ID NO: 52559 - DNA, 75 bp, synthetic construct
  source 1..75: mol_type = other DNA
actcggcggcttaaccgtcgccgggatgctggggccgtcattgttaacgccgcgccgtgcgactgcggcgcaagc

SEQ ID NO: 52560 - DNA, 75 bp, synthetic construct
  source 1..75: mol_type = other DNA
ctggaagttgcggaacaaaaaatagccgagttgacccgggctgaaagcagccagacgttactggagaagagtctg

SEQ ID NO: 52561 - DNA, 75 bp, synthetic construct
  source 1..75: mol_type = other DNA
gatgacgaagggtatccggaaatagcccgctgcacggagcgggagtttgcgaccattcttgccggtatcagcgcc

SEQ ID NO: 52562 - DNA, 75 bp, synthetic construct
  source 1..75: mol_type = other DNA
catgctgggtcaaggtcgattttcaccttcatacccgtgcagacaaagaatttcgctatgccggcgaatccgaca

SEQ ID NO: 52563 - DNA, 75 bp, synthetic construct
  source 1..75: mol_type = other DNA
aagatgcgctgaaagagtggcaaaaactggacaaggctattcagcaacagtttgcgaaaaagctaaaaaagtgct

SEQ ID NO: 52564 - DNA, 75 bp, synthetic construct
  source 1..75: mol_type = other DNA
taccgttacgacagcgacgggcgggtgacagaacagctaaacccggcaggcttaagctacacgtatcagtatgag

SEQ ID NO: 52565 - DNA, 75 bp, synthetic construct
  source 1..75: mol_type = other DNA
attgttgaaacagttcctggttggacacatgacattacaaatattggaactgatgaattaatagtcatgctctgg

SEQ ID NO: 52566 - DNA, 75 bp, synthetic construct
  source 1..75: mol_type = other DNA
aagaacagaaattccagttagagatttacaagctggtcatgaaccagaacgcagccgcagaagaagcatttcaat

SEQ ID NO: 52567 - DNA, 75 bp, synthetic construct
  source 1..75: mol_type = other DNA
taaaaatcatgcgtgaaagcgagagacttactagcctcccggatacagcaaaaatgcttggtttaaaccgtgatg

SEQ ID NO: 52568 - DNA, 75 bp, synthetic construct
  source 1..75: mol_type = other DNA
cggagactcatctcttggtgtatctctggtcacatctgcagtaaaagatgccctttctcttgcgagaacaaaagg

SEQ ID NO: 52569 - DNA, 75 bp, synthetic construct
  source 1..75: mol_type = other DNA
gattgtggttgtcggtgcagcctccgcgattggtggtgcactgtatctgtctgatgtggacatgtccggtaacgg

SEQ ID NO: 52570 - DNA, 75 bp, synthetic construct
  source 1..75: mol_type = other DNA
tttgcctggatggaccgcttctgttcgacctacagcggtggtatctggtccttttacaccctcagcaatggcggg

SEQ ID NO: 52571 - DNA, 75 bp, synthetic construct
  source 1..75: mol_type = other DNA
aaaagagattattgttcctgatatggaaacgaaaatcgccgcccatctggcgggcgttggcattggttttttgcc

SEQ ID NO: 52572 - DNA, 75 bp, synthetic construct
  source 1..75: mol_type = other DNA
gatggcagggcatcggcgttttactataaccaccacagccagttaacgtcagccaccgggcctgacgggctggaa

SEQ ID NO: 52573 - DNA, 75 bp, synthetic construct
  source 1..75: mol_type = other DNA
tcgccgggcacgcaatttcctccagatgctgcccgtagcgctgcacggagaggtctttccctatacttcttccgg

SEQ ID NO: 52574 - DNA, 75 bp, synthetic construct
  source 1..75: mol_type = other DNA
ttggtcctcgccaacgcgaattactccaggcttttagtgcgttccctgaggaggaccaagaaaaaatgcttcaag

SEQ ID NO: 52575 - DNA, 75 bp, synthetic construct
  source 1..75: mol_type = other DNA
agcctttttattttggcatatggatgttattttcttctttttattcccccactctggctatatctgaaaaccaga

SEQ ID NO: 52576 - DNA, 75 bp, synthetic construct
  source 1..75: mol_type = other DNA
atcttgcgggcatgattctggagaaaaccgggcgcacctcgcataccctgattctggcccgcgcctcggcgatcc

SEQ ID NO: 52577 - DNA, 75 bp, synthetic construct
  source 1..75: mol_type = other DNA
taccttcgccgggcatgtctttaactgggttggtgtaacgcacataatcttttcgatagtttttgccgttggtta

SEQ ID NO: 52578 - DNA, 75 bp, synthetic construct
  source 1..75: mol_type = other DNA
gatattaaaacagaaacggtggcggacattgtgcagtcgctgccatcgtttactgaaacgcgagcggatgacctg

SEQ ID NO: 52579 - DNA, 75 bp, synthetic construct
  source 1..75: mol_type = other DNA
agacgtggttacgagtttcagaaagacctcagcttcgacttccgacactggataatctcagtcagactgccttac

SEQ ID NO: 52580 - DNA, 75 bp, synthetic construct
  source 1..75: mol_type = other DNA
ctggataatctccgtcaggctcccttactccgaacggccaccgcgtccgtcccgcacattccagcaacggatctg

SEQ ID NO: 52581 - DNA, 75 bp, synthetic construct
  source 1..75: mol_type = other DNA
gtttgcgatgcggggatgggctccagcgcgatgggcgcaaccaccttccgtaaacgcctggaaaaagcggggctg

SEQ ID NO: 52582 - DNA, 75 bp, synthetic construct
  source 1..75: mol_type = other DNA
atcaatatgaagtcgaaagataatggcagtgtccatgagtgtaacagcgaagaaaaggaatttgtgaaacgcctg

SEQ ID NO: 52583 - DNA, 75 bp, synthetic construct
  source 1..75: mol_type = other DNA
tggatgaatcgctaccgtcgtgtcctgactcgttgggagaagaaagtcgagaattatgaggcgatgctgcatttt

SEQ ID NO: 52584 - DNA, 75 bp, synthetic construct
  source 1..75: mol_type = other DNA
ctgccatccccctgtttgttatatccggggctgacgctgctgtttcgctggacagaacccgcgcggtgtttgacg

SEQ ID NO: 52585 - DNA, 75 bp, synthetic construct
  source 1..75: mol_type = other DNA
acgcagtttcacgaatacagcaccggaaaggcacacgcagacgcgttaaaggatgcctggacagaaaatcacggg

SEQ ID NO: 52586 - DNA, 75 bp, synthetic construct
  source 1..75: mol_type = other DNA
ctgaaaaccttcgcgggcggctcggagtacgtgctgccatcgcgctatgactcggacttgccgatgagcagcgcc

SEQ ID NO: 52587 - DNA, 75 bp, synthetic construct
  source 1..75: mol_type = other DNA
ttgcagatgataataacgcagatctcatcccatgcctgagtacagaccttcttgtcagtcttggcataaaaaaat

SEQ ID NO: 52588 - DNA, 75 bp, synthetic construct
  source 1..75: mol_type = other DNA
cactactggatggtcaggataatggcatgaaaatagtcagcaatcaggagggatatccggttttgacagagcaac

SEQ ID NO: 52589 - DNA, 75 bp, synthetic construct
  source 1..75: mol_type = other DNA
acgcatgccattatgatatttataaaggcgcgttttttgaacgtgtggcggcagtacagacgcaatggtttaaaa

SEQ ID NO: 52590 - DNA, 75 bp, synthetic construct
  source 1..75: mol_type = other DNA
tttcgccgaactggtggtggcacagatgaattagcctcacgagtggttatcaccacttattcctcagctggcgga

SEQ ID NO: 52591 - DNA, 75 bp, synthetic construct
  source 1..75: mol_type = other DNA
aagcaatgggaaaagccacgtcggtggaactggccgcgcgacttgatatcagtcgtgaagaagtgctgaacgagc

SEQ ID NO: 52592 - DNA, 75 bp, synthetic construct
  source 1..75: mol_type = other DNA
tgaaaagcctgatactacaacatattcctgaagcctgtatactgggactctttgttgcccgaacaacccggggag

SEQ ID NO: 52593 - DNA, 75 bp, synthetic construct
  source 1..75: mol_type = other DNA
ttggcctgttcttccgcacgctggatgccattggtgctatgggcactatgaaaatggctttaaagctggtgctta

SEQ ID NO: 52594 - DNA, 75 bp, synthetic construct
  source 1..75: mol_type = other DNA
ccgtcacgttaaacagtaaaacctacaccaccacgctggacgcttccggcaactggagcgtcggcgttccgctgt

SEQ ID NO: 52595 - DNA, 75 bp, synthetic construct
  source 1..75: mol_type = other DNA
atgaaacagaatctttctaatctcgttcctgatcaatataaaggcgctggcactgcaacaactacacctgataat

SEQ ID NO: 52596 - DNA, 75 bp, synthetic construct
  source 1..75: mol_type = other DNA
tggcgtcgtgacagtatgggggaagcgaaatcctggtgtctgcgggaaattcccaaactttttagcggaaaataa

SEQ ID NO: 52597 - DNA, 75 bp, synthetic construct
  source 1..75: mol_type = other DNA
agggaggtcgaacgaaaagttaccgctgacatgatgattgagtttatcggtcaggagggtgctaaaacgagtgag

SEQ ID NO: 52598 - DNA, 75 bp, synthetic construct
  source 1..75: mol_type = other DNA
aactgctcgccgacgagacccgttcaactatcgtgatgcttctcagggagtccggtgaaatgtgcgtctgtgaca

SEQ ID NO: 52599 - DNA, 75 bp, synthetic construct
  source 1..75: mol_type = other DNA
gccgcgcctgatcacccgattcatcaggagccggaaccgttatctgaagtgacgcgcgtgaaatatcgtggaatt

SEQ ID NO: 52600 - DNA, 75 bp, synthetic construct
  source 1..75: mol_type = other DNA
tcccggcgaatctcccaggacatcagcacccgtgatgaaggcgggggcggaaaggtcgtggttatcgggcggcag

SEQ ID NO: 52601 - DNA, 75 bp, synthetic construct
  source 1..75: mol_type = other DNA
gagcgcttatgcgccgcgctgcgggaaattaataagcatcgtgatgtcatacagaaaataacgacaggagataac

SEQ ID NO: 52602 - DNA, 75 bp, synthetic construct
  source 1..75: mol_type = other DNA
ctgacatcattttttactttaggactctaaaagaaattagattaaaatatccattcaaagaattagaatcattat

SEQ ID NO: 52603 - DNA, 75 bp, synthetic construct
  source 1..75: mol_type = other DNA
atggaaaccgtattgcatgcactgaaagcgatgggtaaagccaattctgttgaactggcggcacgaattgatatc

SEQ ID NO: 52604 - DNA, 75 bp, synthetic construct
  source 1..75: mol_type = other DNA
gagcatcagaaaactgggtatatctgccagcatttaacgcaggtatgcgcaaagcgttttttgatcagccgaaag

SEQ ID NO: 52605 - DNA, 75 bp, synthetic construct
  source 1..75: mol_type = other DNA
gaatggaaaacactgccctcacagtaccggcatgcccgcgactttgcccgggcacagaaagccgaccttttcctg

SEQ ID NO: 52606 - DNA, 75 bp, synthetic construct
  source 1..75: mol_type = other DNA
gtagcccgcattgctgaaatgctgggcgaaaaagttgcaaccgttcacagctggaagaagcgcgacaagtggggc

SEQ ID NO: 52607 - DNA, 75 bp, synthetic construct
  source 1..75: mol_type = other DNA
taagcgaactcattcggctcttggtatggatgaggaagcgagagggtacttcaggcgttatcgcgataaagattg

SEQ ID NO: 52608 - DNA, 75 bp, synthetic construct
  source 1..75: mol_type = other DNA
cgcgtttatagcattcgtattaacgaactggaatatgctattcgcgatggtaattttaattctctacctattacg

SEQ ID NO: 52609 - DNA, 75 bp, synthetic construct
  source 1..75: mol_type = other DNA
gacttccgcgcccaggctgatgccatcaaaaagctgacgcagcagtacaacgtgacttatatcggcatcgactcg

SEQ ID NO: 52610 - DNA, 75 bp, synthetic construct
  source 1..75: mol_type = other DNA
ccgcctcaacgggatgggcctgatgattgattttcataagcagaaaaagctggaacgccttgccgaacgcctggg

SEQ ID NO: 52611 - DNA, 75 bp, synthetic construct
  source 1..75: mol_type = other DNA
agtgacctcgcggcagagctggcagacgtggaaatcatgacagagcaactgcgccttcaggggatggaccggctg

SEQ ID NO: 52612 - DNA, 75 bp, synthetic construct
  source 1..75: mol_type = other DNA
cagtaaaaccattgccgagctggagcgtattggcgacgtggcggacaaaatctgccgtactgcgctggagaaatt

SEQ ID NO: 52613 - DNA, 75 bp, synthetic construct
  source 1..75: mol_type = other DNA
cacagagaaaatttactgggatttctttaaaatacaaaggaaaaatcccatatacaccagctagttcaaaaatga

SEQ ID NO: 52614 - DNA, 75 bp, synthetic construct
  source 1..75: mol_type = other DNA
tacatataaaggtaagcaagatggttattcttcttatataaataacatttatcttaatgtattgcctttttatgg

SEQ ID NO: 52615 - DNA, 75 bp, synthetic construct
  source 1..75: mol_type = other DNA
gtgtgcagggaaatcattaccccgtttctggcccggagattttttcccgacgttctatgcctgtcatctggctgt

SEQ ID NO: 52616 - DNA, 75 bp, synthetic construct
  source 1..75: mol_type = other DNA
agaagttcaggcgctgctgggtgatgcgcaaaccatcgctgaccaggaacgttttcgcgcattatctcgtgaata

SEQ ID NO: 52617 - DNA, 75 bp, synthetic construct
  source 1..75: mol_type = other DNA
ctgaatatggtttaaccgaatcgggaggcgtggttcttttttccgccgccgggcgcgggcgttcattgagcctgc

SEQ ID NO: 52618 - DNA, 75 bp, synthetic construct
  source 1..75: mol_type = other DNA
acgattcactggctgcacggaccgatacctggttgcagtcgttgctggtctggtcacccggacagcgggatatca

SEQ ID NO: 52619 - DNA, 75 bp, synthetic construct
  source 1..75: mol_type = other DNA
ccgacgcgtctcctggcgtcgcaaacaaaactggtgtacgccgcgttaataaaagaccaatgtacattgctattg

SEQ ID NO: 52620 - DNA, 75 bp, synthetic construct
  source 1..75: mol_type = other DNA
atggataatcggagcgaatttttgaataacgttgctcaggcactgggtcgcccgctgcgacttgaaccgcaagca

SEQ ID NO: 52621 - DNA, 75 bp, synthetic construct
  source 1..75: mol_type = other DNA
gatggtaccctgccattcgcattgtcattcgctgctttaactgccttcggtgtcgcggcaagcgtttcagatgtg

SEQ ID NO: 52622 - DNA, 75 bp, synthetic construct
  source 1..75: mol_type = other DNA
ttgtccggcaccagttacggtattgtcggggtgttgatgttagcggccagctaccgggtgtaccgggcggaatac

SEQ ID NO: 52623 - DNA, 75 bp, synthetic construct
  source 1..75: mol_type = other DNA
atggcctgcatctgccgctgctggcgggaacggaagtcagcatcgcctttgaggaaggcaacccggaccgacctt

SEQ ID NO: 52624 - DNA, 75 bp, synthetic construct
  source 1..75: mol_type = other DNA
gatccaatccagctcgatgatttccgccttgcgtttaccggcgaactgccagccagtgatgacgagttgcttaat

SEQ ID NO: 52625 - DNA, 75 bp, synthetic construct
  source 1..75: mol_type = other DNA
accttgccatccttgggctggtggaccttaacgaggttacgccggaattgctcagcatgcgcaagaatcatgtgg

SEQ ID NO: 52626 - DNA, 75 bp, synthetic construct
  source 1..75: mol_type = other DNA
atgacaacggataacacgaacacgacacgtaacgattcactgacagcccggatcgatacccggttgcagtcgttg

SEQ ID NO: 52627 - DNA, 75 bp, synthetic construct
  source 1..75: mol_type = other DNA
ctgccgcaggcgcaagccacggcaataatggcggggatccagccattgcctgaaggtgcggcagaaaaagcccgc

SEQ ID NO: 52628 - DNA, 75 bp, synthetic construct
  source 1..75: mol_type = other DNA
cgcgggcaatatgaacacaaagcgcctggttatcactccggcaacggataccaccgacgcagtgatggaaagtga

SEQ ID NO: 52629 - DNA, 75 bp, synthetic construct
  source 1..75: mol_type = other DNA
gtggcgctgccctttgctgctgacgcctgtctggtcgcctcatcttttgaagcagacgcagatgatgccgatgac

SEQ ID NO: 52630 - DNA, 75 bp, synthetic construct
  source 1..75: mol_type = other DNA
ctgccgccttagaggaagcagcattgtctgctgaagtctttgcatttgtttcagaggtttttgctgcagaagcag

SEQ ID NO: 52631 - DNA, 75 bp, synthetic construct
  source 1..75: mol_type = other DNA
cagtattaccggtatagatgagtctctctatgaaaagtatataatctttatcactcttaaggcaattgcccccca

SEQ ID NO: 52632 - DNA, 75 bp, synthetic construct
  source 1..75: mol_type = other DNA
tttgcggtatccggaatgttctgctcccttgctttgcgaatgccttcacagaagcaggattcgcaacgattactt

SEQ ID NO: 52633 - DNA, 75 bp, synthetic construct
  source 1..75: mol_type = other DNA
ttaatccaccggaacagggaagagcattatatgatgctgttgcttctggtactaaggaattatacgaggaagctg

SEQ ID NO: 52634 - DNA, 75 bp, synthetic construct
  source 1..75: mol_type = other DNA
atcagtcacataaagtagacatagagccatttatacatgcagtatgggttgcaggtgccccccctgaaaatacat

SEQ ID NO: 52635 - DNA, 75 bp, synthetic construct
  source 1..75: mol_type = other DNA
cgcctcttttgaagccgacgcatcccgggctgaggtggcagcttctgacgctttcgtggtcgcggtggatgcaga

SEQ ID NO: 52636 - DNA, 75 bp, synthetic construct
  source 1..75: mol_type = other DNA
ccatcagcagaatgcaaatccccgccagaccggtaacatcacttccggaaccgataatgctgtcgacacagacca

SEQ ID NO: 52637 - DNA, 75 bp, synthetic construct
  source 1..75: mol_type = other DNA
acctttggccgctacggagtaggaggcataacgttagctgaagcacgtgagcgtctcaatgaagcgaagcgaatg

SEQ ID NO: 52638 - DNA, 75 bp, synthetic construct
  source 1..75: mol_type = other DNA
cctgagcatgtggacaactcacgtggtgaagtcacaaaaaccataagcatatcctgtccgtataagagtggctct

SEQ ID NO: 52639 - DNA, 75 bp, synthetic construct
  source 1..75: mol_type = other DNA
atcgagcgtgggcagaaggtcgaaaacccggcagaactggtgcgcccaacaagcatcgctcgattcgagccacgt

SEQ ID NO: 52640 - DNA, 75 bp, synthetic construct
  source 1..75: mol_type = other DNA
gccaccgctattatgacccgctgcaggggcgatatatcactcaggatccgattggactgaaggggggatggaatt

SEQ ID NO: 52641 - DNA, 75 bp, synthetic construct
  source 1..75: mol_type = other DNA
catgcatagtgggcgaaccccatatctgtatgtaagcgaggtgcagagcgccatccgcgctgctggagtcaaagt

SEQ ID NO: 52642 - DNA, 75 bp, synthetic construct
  source 1..75: mol_type = other DNA
caggttaccgataccgatgatgtcggcccacttccggaagaagacgagaagaaaatccgcaagtttcacgtcaac

SEQ ID NO: 52643 - DNA, 75 bp, synthetic construct
  source 1..75: mol_type = other DNA
agcggcaaagaggaatgtggggacaggagaaaatcaggtaccggatatgaacagctttggtaactcattgaccgc

SEQ ID NO: 52644 - DNA, 75 bp, synthetic construct
  source 1..75: mol_type = other DNA
tttactgttgattattccaatggcttcggcgatggaatggatgcttatgaggaaaacatccgcgccgttggagtc

SEQ ID NO: 52645 - DNA, 75 bp, synthetic construct
  source 1..75: mol_type = other DNA
ttttacaggcgttacctcattttcatctttttcattcactgctcgctgacgacagttacgggcagattatccata

SEQ ID NO: 52646 - DNA, 75 bp, synthetic construct
  source 1..75: mol_type = other DNA
cgactgatgtatctggacctggaataccgtgacggtacctgtcgtctgctttcgggtagtcatcagcgcgaactg

SEQ ID NO: 52647 - DNA, 75 bp, synthetic construct
  source 1..75: mol_type = other DNA
ctacagcaaatccttctaccagacgggaaccaatatccaggtcgcaggatatcgctattctacgcaaggttttta

SEQ ID NO: 52648 - DNA, 75 bp, synthetic construct
  source 1..75: mol_type = other DNA
gcggggttgcgcaagcgcagagagaagccgagaaggccggaaaacttgctgccgcccagcaggaagcgcaggctc

SEQ ID NO: 52649 - DNA, 75 bp, synthetic construct
  source 1..75: mol_type = other DNA
atggggcgctgtttcccggtcgcatcatgctggcgaacacctgtatgtgggattaccggggagatgaatgcgggt

SEQ ID NO: 52650 - DNA, 75 bp, synthetic construct
  source 1..75: mol_type = other DNA
atcggaacagagctgggcatggaccaggatgaagtcctgagactgaaacaaatcagtggtcttactgagttattt

SEQ ID NO: 52651 - DNA, 75 bp, synthetic construct
  source 1..75: mol_type = other DNA
atattactggttgggatgttcaggcgtgccgcgatgccattcagcataattttaatgcctgggtgaaggagttcg

SEQ ID NO: 52652 - DNA, 75 bp, synthetic construct
  source 1..75: mol_type = other DNA
aggatgggttcacgcagcctgtggttgtctcggaagagaaggagcattatctggtcgtggatggttttcatcgtc

SEQ ID NO: 52653 - DNA, 75 bp, synthetic construct
  source 1..75: mol_type = other DNA
accctgtctgggataaccgttttatgtccctgcttgagcaggggcgtttgcaggggctggacgcggtcagtaacg

SEQ ID NO: 52654 - DNA, 75 bp, synthetic construct
  source 1..75: mol_type = other DNA
tgtccgccactcaggattgccagcaggcgacgcgcgcctttgccgaaaaaagtagcgtgagcttccataatcaat

SEQ ID NO: 52655 - DNA, 75 bp, synthetic construct
  source 1..75: mol_type = other DNA
tcacggatactatatagatggtgtactcaaattcaaccgtttcaaaaatgagttgcgtacccatatgagtgatgg

SEQ ID NO: 52656 - DNA, 75 bp, synthetic construct
  source 1..75: mol_type = other DNA
tgttttacgcgtatgacagtatacggaggacggttgtggcgcacgtcttcggtgaacgcactctggccacactgg

SEQ ID NO: 52657 - DNA, 75 bp, synthetic construct
  source 1..75: mol_type = other DNA
ggagcggttattacaactgggtacagcatgaaccctcagacagaaaacaaagtgatgagcggctaaaaccggaga

SEQ ID NO: 52658 - DNA, 75 bp, synthetic construct
  source 1..75: mol_type = other DNA
gtggcggacctgacgtatgttgccacacaggagggatggttgtacctcgctggcatcaaagatgtttatacgtgc

SEQ ID NO: 52659 - DNA, 75 bp, synthetic construct
  source 1..75: mol_type = other DNA
atgtcgcgtaaaggtaactgttacgacaacgctccgatggaaagcttctggggaacgctgaaaaatgagagcctg

SEQ ID NO: 52660 - DNA, 75 bp, synthetic construct
  source 1..75: mol_type = other DNA
gggcaatcctttaatgtaccccctgaatcactttgttatgtcgaaaaaaacacagtgattgatgttgcattaaaa

SEQ ID NO: 52661 - DNA, 75 bp, synthetic construct
  source 1..75: mol_type = other DNA
gatcgtagcggtcaccgcgctaaattcacccgtaccggaaaaatgttattagagaaagggcgggaagttctgcat

SEQ ID NO: 52662 - DNA, 75 bp, synthetic construct
  source 1..75: mol_type = other DNA
tgatcctcgatgccttagaaaaagaaggcagttttgcggcggcgtcggccaaactctataagacgccgtccgctc

SEQ ID NO: 52663 - DNA, 75 bp, synthetic construct
  source 1..75: mol_type = other DNA
gtgctggctacaccgaccgagacggatggggcgctgtttcccggtcgcatcatgctggcgaacacctgtatgtgg

SEQ ID NO: 52664 - DNA, 75 bp, synthetic construct
  source 1..75: mol_type = other DNA
aagacggtttcacacaaccagtggttgtgtcggaggagaagaaccattacctcgtggtggatggttttcatcgtc

SEQ ID NO: 52665 - DNA, 75 bp, synthetic construct
  source 1..75: mol_type = other DNA
cttaacggcgtggatatacgcaatatacgcaccagagttctggagttgttgtcatatcgtcgccgcgtggagatg

SEQ ID NO: 52666 - DNA, 75 bp, synthetic construct
  source 1..75: mol_type = other DNA
aagttactcaaacagtctctggagaaagacggtttcacacaaccagtggttgtgtcggaggagaagaaccattac

SEQ ID NO: 52667 - DNA, 75 bp, synthetic construct
  source 1..75: mol_type = other DNA
gcataattcccgtcatcaaattgttagatgatgcgtacggtattgagtccggcactgtgaccacaattcactccg

SEQ ID NO: 52668 - DNA, 75 bp, synthetic construct
  source 1..75: mol_type = other DNA
cgagctgctggcccggccggaaggcttcgaccacctgcacctggtcggcgagaacttcgccaccctgcgccgtta

SEQ ID NO: 52669 - DNA, 75 bp, synthetic construct
  source 1..75: mol_type = other DNA
gtctctccgggaatacaccggtgatccgaaaaatcctctgcaaccaccggcaatacgcacgaagctcccgggtgt

SEQ ID NO: 52670 - DNA, 75 bp, synthetic construct
  source 1..75: mol_type = other DNA
gcggattctggatccgtgagattgggctttatgatgatgaaggcgtactcattgcggtggcgaactgcccggaaa

SEQ ID NO: 52671 - DNA, 75 bp, synthetic construct
  source 1..75: mol_type = other DNA
ctggccctctgaagaggaataccggcatccgcgctggtatatccaggtggtggatgcggccgatctgttctacct

SEQ ID NO: 52672 - DNA, 75 bp, synthetic construct
  source 1..75: mol_type = other DNA
atgttgccgtttctgaaagcgcctgccgatgcgccattaatgactgataaacatgaaattgatgcccgctatcgc

SEQ ID NO: 52673 - DNA, 75 bp, synthetic construct
  source 1..75: mol_type = other DNA
tgacagcggtatccgtctttcggcggtgtggctgatgcacgacccggaatacccggaaaatttacctgccgcgcc

SEQ ID NO: 52674 - DNA, 75 bp, synthetic construct
  source 1..75: mol_type = other DNA
atggatttcagtcttgatttttcaggtctggcggatattgcacgggatctggagacgctcagcagggcagaaaac

SEQ ID NO: 52675 - DNA, 75 bp, synthetic construct
  source 1..75: mol_type = other DNA
atggtgatatgcgggtgcatagcccgcctttaccggaacaatcgcgatctgcatgacttgctggttgattattac

SEQ ID NO: 52676 - DNA, 75 bp, synthetic construct
  source 1..75: mol_type = other DNA
tacctgacgcacgcggtgatttcattcgtatctgggatgacgggcgcgggattgatgtcggacgtaccctacttt

SEQ ID NO: 52677 - DNA, 75 bp, synthetic construct
  source 1..75: mol_type = other DNA
atgacagaacaacaaaaattgacctttgctgacttgcagcagcggctggattcgctgatgctgcgcgacagacag

SEQ ID NO: 52678 - DNA, 75 bp, synthetic construct
  source 1..75: mol_type = other DNA
cagacagttacctgaaggtgccgtttcccttctttccacacagatttacgacctgaatatttacaagcagggaca

SEQ ID NO: 52679 - DNA, 75 bp, synthetic construct
  source 1..75: mol_type = other DNA
aatgactggatggcgggggtgaacacctttatcgaccatgatttatcccgtagtcatacccgcattggtgttggt

SEQ ID NO: 52680 - DNA, 75 bp, synthetic construct
  source 1..75: mol_type = other DNA
aacagcgtattttgcacaggagtcgctgaaaaatacgcgttaatcgaacaatggcgacaacaatttcccattgaa

SEQ ID NO: 52681 - DNA, 75 bp, synthetic construct
  source 1..75: mol_type = other DNA
aagcgttaggcgatatgttcggcggcggagatgtcgatctgcgtagcattttatctgccgtttctgatgaaattg

SEQ ID NO: 52682 - DNA, 75 bp, synthetic construct
  source 1..75: mol_type = other DNA
acgccctcagtgttctgatgatgatgcaatgataatttgtggctgtatggcccggttgaacaagaaaaatcagga

SEQ ID NO: 52683 - DNA, 75 bp, synthetic construct
  source 1..75: mol_type = other DNA
cgtgcacaacttttgtgatgagttttgtagcagcccctgcctgtgcagcacaaggtgacagtacagtttctttcg

SEQ ID NO: 52684 - DNA, 75 bp, synthetic construct
  source 1..75: mol_type = other DNA
ctgagctcgcggggtaaggctctgtttgtcaaaaagcgaaccaccaaaccccgcaggccaaagcactatcgtccg

SEQ ID NO: 52685 - DNA, 75 bp, synthetic construct
  source 1..75: mol_type = other DNA
agggatatctggttatagcctgcggcggcggcggtatacctgtggtgcgagacgggcaacaactgaaaggtgtgg

SEQ ID NO: 52686 - DNA, 75 bp, synthetic construct
  source 1..75: mol_type = other DNA
gcatatagcgccgcttcaggatgctgtggatctggagatcgcaacggaggaagaaaccttgttgctggaagcctg

SEQ ID NO: 52687 - DNA, 75 bp, synthetic construct
  source 1..75: mol_type = other DNA
caatcatgagccatacgttgcgttatccgagtcaatggtaaggttagttaagttcctgaagtacacagaagcgaa

SEQ ID NO: 52688 - DNA, 75 bp, synthetic construct
  source 1..75: mol_type = other DNA
acccgccgacggtgaacacctactggcgacgccgtggcagcacgtattttatatcggaagccggtaagcgttatc

SEQ ID NO: 52689 - DNA, 75 bp, synthetic construct
  source 1..75: mol_type = other DNA
ttcggatggatgaactggcgaaactggtcggtcagtcatcggtgcaaaaatcggtgttaagtgcctatggcgatc

SEQ ID NO: 52690 - DNA, 75 bp, synthetic construct
  source 1..75: mol_type = other DNA
tggcaaagtggccgtgaaagaaagcaatcaacgatggtgctctgacgggttcgagttccgctgtgataacggaga

SEQ ID NO: 52691 - DNA, 75 bp, synthetic construct
  source 1..75: mol_type = other DNA
atccccgggaaaacagcattccaggtattagaagaatatcctgattcaggtgaaaatattgttgatgcgctggca

SEQ ID NO: 52692 - DNA, 75 bp, synthetic construct
  source 1..75: mol_type = other DNA
tttatcacttaatgtcccgccttttatgctgatcccgcgtcatatccggagaaaagtggatggattcagacaatc

SEQ ID NO: 52693 - DNA, 75 bp, synthetic construct
  source 1..75: mol_type = other DNA
ggagctacagtaaaagaaatatcaaaatttgataatatttattgtgatcagcttgaatgtttgtttaatgaacaa

SEQ ID NO: 52694 - DNA, 75 bp, synthetic construct
  source 1..75: mol_type = other DNA
atgactgcacaacagattgatgcattacgcgacattgttaataaggccagagttaccgccatttgtaaaagtccg

SEQ ID NO: 52695 - DNA, 75 bp, synthetic construct
  source 1..75: mol_type = other DNA
aggacgcattttcaaaagcgaacgcggatacatggaaggactcggacaacagattggcgttgcagcactttctgc

SEQ ID NO: 52696 - DNA, 75 bp, synthetic construct
  source 1..75: mol_type = other DNA
tgttagttcgtagaaacgctcctggcgtctggcagtgggtgagactcagcaaccgacggatggggttaatgaaac

SEQ ID NO: 52697 - DNA, 75 bp, synthetic construct
  source 1..75: mol_type = other DNA
cgcgtaattacccggggagatgtcgtgattttggtataccggagtgaaaaaaatgagcaggaggcggcgcagtga

SEQ ID NO: 52698 - DNA, 75 bp, synthetic construct
  source 1..75: mol_type = other DNA
ggcgtaatggccgcttctgcaccgggtattcttgttgctgggttggcggtgtttattttgatgagccggagatca

SEQ ID NO: 52699 - DNA, 75 bp, synthetic construct
  source 1..75: mol_type = other DNA
caaacctggtgctgacggaaggtgctaaaggcatgaaaggcgcaatccaaaaagcagaagaaattgtcgccagca

SEQ ID NO: 52700 - DNA, 75 bp, synthetic construct
  source 1..75: mol_type = other DNA
atgagtaagatttttgaagataactcgctgactatcggtcacacgccgctggttcgcctgaatcgcatcggtaac

SEQ ID NO: 52701 - DNA, 75 bp, synthetic construct
  source 1..75: mol_type = other DNA
gcttcgggccactgaccctttccctgcgcctgaaagacaaacagggtaatacactggctgtgggggagatgggcg

SEQ ID NO: 52702 - DNA, 75 bp, synthetic construct
  source 1..75: mol_type = other DNA
gatgttattgcgtttgtcacccggacatggaacatcattttcagcattccggggatgaataagtggctgcatcgt

SEQ ID NO: 52703 - DNA, 75 bp, synthetic construct
  source 1..75: mol_type = other DNA
ctggtcgtggatggttttcatcgtcagttactgggcagggaagcaggtacgggaaaacgcctccggggatggctt

SEQ ID NO: 52704 - DNA, 75 bp, synthetic construct
  source 1..75: mol_type = other DNA
agcagagccgaaagcggcatcggtagcggaaactgatggtaaagcctttcctcagcctgcatgtgttgcgttacc

SEQ ID NO: 52705 - DNA, 75 bp, synthetic construct
  source 1..75: mol_type = other DNA
ttgcaatccgcgagggcgtggccaagtcgctggaaatcacggccgagcactttcaggagacctaccacaagaagg

SEQ ID NO: 52706 - DNA, 75 bp, synthetic construct
  source 1..75: mol_type = other DNA
ataaaacgaggtgataaaagtaaaggcgaatggctccgtatggctttccttcatacatccccttccatcattcca

SEQ ID NO: 52707 - DNA, 75 bp, synthetic construct
  source 1..75: mol_type = other DNA
cggaaagaaagggacaggccacacgtatggcggccaccatacggcataaccgggccaggggtaaacaccagataa

SEQ ID NO: 52708 - DNA, 75 bp, synthetic construct
  source 1..75: mol_type = other DNA
aggatgaagtgctgagattgaaacagataagtgggctgacggagctgtttctggaagaggatttcagtccggcat

SEQ ID NO: 52709 - DNA, 75 bp, synthetic construct
  source 1..75: mol_type = other DNA
cggaagccgaagtaccgccgcacggacgcaccccgttccgtggtgcgaaaggttcgacctgggaaggcggcgttc

SEQ ID NO: 52710 - DNA, 75 bp, synthetic construct
  source 1..75: mol_type = other DNA
atgggggattctgtgacaccggagatgctgggcgacatgattcgtcagtacttcagtcaggcacgaactgaagaa

SEQ ID NO: 52711 - DNA, 75 bp, synthetic construct
  source 1..75: mol_type = other DNA
ggagtgaagagaagtttttaaaagtcacggaaggttcggcgattcgccgtataggtcacctgcgttggctgcgta

SEQ ID NO: 52712 - DNA, 75 bp, synthetic construct
  source 1..75: mol_type = other DNA
aacggaaaagcgagtggataatctggttctgccatcgctgcgacaggcaaaccgcgagctgcgtagggtgaaaag

SEQ ID NO: 52713 - DNA, 75 bp, synthetic construct
  source 1..75: mol_type = other DNA
ggaaggggagggttattttcacctgtgcagtactaaagacaaatacccggtgcgtatcgatcacgtgattcacta

SEQ ID NO: 52714 - DNA, 75 bp, synthetic construct
  source 1..75: mol_type = other DNA
ctgaagaaattatgcgtggcagtctcctttcggtccataatagcagaacaaaagaaagagccagaaatgacggtc

SEQ ID NO: 52715 - DNA, 75 bp, synthetic construct
  source 1..75: mol_type = other DNA
ctcagccagcaggtgttgcgttaccagtacaggaagctgcaacacaggaagatattaaaacagaaactgtggctg

SEQ ID NO: 52716 - DNA, 75 bp, synthetic construct
  source 1..75: mol_type = other DNA
agaagaaatgatgtcactgggagtttccagggcggaaatttataaagcagtttctgaacgcttcggcctggaagg

SEQ ID NO: 52717 - DNA, 75 bp, synthetic construct
  source 1..75: mol_type = other DNA
attatcacttccgcgactatcgacccggaacgcttttcgcgccactttaataatgcgccgattatcgaagtctcc

SEQ ID NO: 52718 - DNA, 75 bp, synthetic construct
  source 1..75: mol_type = other DNA
acattgtgcagtcgttgccatcgtttaccgaaacgcgggcggatgatttgattttgccatcgctgcatctggcaa

SEQ ID NO: 52719 - DNA, 75 bp, synthetic construct
  source 1..75: mol_type = other DNA
agcaagattaagcactctggcagacccggcaaagactatctgttaagtgtcggaatggcgaaagaactggcaatg

SEQ ID NO: 52720 - DNA, 75 bp, synthetic construct
  source 1..75: mol_type = other DNA
gcgcgtcagcttcagaaaacgggaatgtcatttgcacaaatctgtcagatcaccggactttctgaagccgaactg

SEQ ID NO: 52721 - DNA, 75 bp, synthetic construct
  source 1..75: mol_type = other DNA
aaaatatacacaaagccgtttccgctggttgatatcactgtcgttgatgacaatgaaatcatgaaccatcgccgg

SEQ ID NO: 52722 - DNA, 75 bp, synthetic construct
  source 1..75: mol_type = other DNA
atgcaggtgcgccagcgcgatgttgctgcgctcgatgcaaaatattcgagggaattagccgatgcgagagctgaa

SEQ ID NO: 52723 - DNA, 75 bp, synthetic construct
  source 1..75: mol_type = other DNA
gtggaattgaggtctttgatccaaacgaaggattgtttaaatcagaagatgtaaatactctaaagttatatctac

SEQ ID NO: 52724 - DNA, 75 bp, synthetic construct
  source 1..75: mol_type = other DNA
aaaggcagcggggatgcgcagttcgtggccctgcagggcagccgtaacggagagagcctgctggctgataatatg

SEQ ID NO: 52725 - DNA, 75 bp, synthetic construct
  source 1..75: mol_type = other DNA
cgatgaaattggtgcatgggttgtgcattattcgacagattacgttttccctggaacaggagaaacggcatggct

SEQ ID NO: 52726 - DNA, 75 bp, synthetic construct
  source 1..75: mol_type = other DNA
tctgaaaatcagaaactggagagtgaaataaaaaaagtggatcatttatctcatatgatacaaatgaaaacacga

SEQ ID NO: 52727 - DNA, 75 bp, synthetic construct
  source 1..75: mol_type = other DNA
ggtcacggcagaggtactggcacagcggcaggctgaagaggccatccgccgtgaaacggaacgccgtgcggatga

SEQ ID NO: 52728 - DNA, 75 bp, synthetic construct
  source 1..75: mol_type = other DNA
caggaacgactgcagcagatggagcgggatatggttcgtgacctgcagaaagagaaaaccctgggcggagactga

SEQ ID NO: 52729 - DNA, 75 bp, synthetic construct
  source 1..75: mol_type = other DNA
agtccgactggtcaggctatgacaaccgatgcggaagccgcagtcagcgaagccctgcgcgacctggccttctgg

SEQ ID NO: 52730 - DNA, 75 bp, synthetic construct
  source 1..75: mol_type = other DNA
ggacggcagaacagagcaggctgtcagggagattgccgggcaggagcgtgaacgggctgtcacttctgaacggga

SEQ ID NO: 52731 - DNA, 75 bp, synthetic construct
  source 1..75: mol_type = other DNA
ctggtcagggggctgaacagcttgggctgcagggcagcgtcgataaggatgtttttacccgtcttctggagggca

SEQ ID NO: 52732 - DNA, 75 bp, synthetic construct
  source 1..75: mol_type = other DNA
agatggaaattttacttatgaacaaaaaaaggaatttctcagtcttgaaaatgaatatcaaaatataaaaataat

SEQ ID NO: 52733 - DNA, 75 bp, synthetic construct
  source 1..75: mol_type = other DNA
gccgtctcagaagacctggcgttcgtctcggacgtttttgccgccttcgcggaatttcctgccgccgttgccgag

SEQ ID NO: 52734 - DNA, 75 bp, synthetic construct
  source 1..75: mol_type = other DNA
ggtttccgacgctttcgcgttcgtttcggatgtcttcgctgcggaagctgacctcgctgctgccgtggcctgttc

SEQ ID NO: 52735 - DNA, 75 bp, synthetic construct
  source 1..75: mol_type = other DNA
gtgcttaaaaccttccgtgtatttgcccgagctgttaacccactgggccacacaattggtatcactcagaacgtg

SEQ ID NO: 52736 - DNA, 75 bp, synthetic construct
  source 1..75: mol_type = other DNA
gcaactggtatgaaaacgtgtatgaggacttcagggcggtctgtggcattttcggaattgacctccgccagcgcg

SEQ ID NO: 52737 - DNA, 75 bp, synthetic construct
  source 1..75: mol_type = other DNA
atgcacttccgagttacaggtgaatggaatggagaaccattcaacagagttatcgaagccgagaacatcagcgac

SEQ ID NO: 52738 - DNA, 75 bp, synthetic construct
  source 1..75: mol_type = other DNA
tggggacgggcgttccgcgaccgtctggcggctaatggcaagaaaggaaaggggattctcggcgcgatgatgcgc

SEQ ID NO: 52739 - DNA, 75 bp, synthetic construct
  source 1..75: mol_type = other DNA
ctgaaatcccgggatgtggcggcactggatacgcgtaaatccaaacagcacgtcgatcctgaagtcagaatggct

SEQ ID NO: 52740 - DNA, 75 bp, synthetic construct
  source 1..75: mol_type = other DNA
gcagcgccggcgtggatgcacagacgctggcgtcctttctgcatgacacgcagctgcagcagcgcagcggagaaa

SEQ ID NO: 52741 - DNA, 75 bp, synthetic construct
  source 1..75: mol_type = other DNA
gattcggttacgtgaccacctggaaaaattccctgatttctataactctgaaatggcggaggtgatcccaaacaa

SEQ ID NO: 52742 - DNA, 75 bp, synthetic construct
  source 1..75: mol_type = other DNA
ttacgtacacggacgtgctggccaggacggtcggcatactgccgccggaagccggtgtgattgagcgggcacgcg

SEQ ID NO: 52743 - DNA, 75 bp, synthetic construct
  source 1..75: mol_type = other DNA
agcttggcggcgtgctcgggaaatcattcggtaaaattcaccaccgcctgatttcccgtgtaagcgaggcgggag

SEQ ID NO: 52744 - DNA, 75 bp, synthetic construct
  source 1..75: mol_type = other DNA
gtgtattaatgtctttatactacaaagaagatccagtctaccttgactcatgttttgcaagtcttgccaatcaat

SEQ ID NO: 52745 - DNA, 75 bp, synthetic construct
  source 1..75: mol_type = other DNA
tgaaggaacttgaagaaaagtggctggatctgaaacgaatggaaatctctgcaaatgcattcaatcgctatgaat

SEQ ID NO: 52746 - DNA, 75 bp, synthetic construct
  source 1..75: mol_type = other DNA
atgctaaatctgaccgcactaataatcaggttatctacggtaacaacagcctgaatgcatctggtcaaaatgctg

SEQ ID NO: 52747 - DNA, 75 bp, synthetic construct
  source 1..75: mol_type = other DNA
taagcactacttctcctctaatgatgcagatgatggtgatactacttatgcccgtcttggcttcaaaggtgaaac

SEQ ID NO: 52748 - DNA, 75 bp, synthetic construct
  source 1..75: mol_type = other DNA
ttttgccagaatgcacgcagaaggtcgcccggtcgatattctggccgttactggtaacatggatgaagaacatag

SEQ ID NO: 52749 - DNA, 75 bp, synthetic construct
  source 1..75: mol_type = other DNA
gatgtgttgataacctacagaggaaaactaccgggaataattacgggttctctgaagactccaccgctggcctga

SEQ ID NO: 52750 - DNA, 75 bp, synthetic construct
  source 1..75: mol_type = other DNA
gaagaacaaaaactaatgaggtgttcattagactaaaagatcatctcaatcgttttcccgacttttataatgcat

SEQ ID NO: 52751 - DNA, 75 bp, synthetic construct
  source 1..75: mol_type = other DNA
ttcgccctgcaattgtgtgtcctgcgctatcccggccgggtgctggctccaggcgaactgatccctgcagaggtc

SEQ ID NO: 52752 - DNA, 75 bp, synthetic construct
  source 1..75: mol_type = other DNA
ttatgagggcgaacagctgtatcttaatgagttaggatatgtttatggtgatgaagaaaaaacaaaagaaattgt

SEQ ID NO: 52753 - DNA, 75 bp, synthetic construct
  source 1..75: mol_type = other DNA
atgagcagaaatctcgcagagtgtttcagtattcataatgataatttcagtgacctggaatgggagtgtaaccgg

SEQ ID NO: 52754 - DNA, 75 bp, synthetic construct
  source 1..75: mol_type = other DNA
tgatggccagccgctgggcgatgtcatcgcgagtgggtcagggtgggacggcttaaaaacccttgttgcaatggc

SEQ ID NO: 52755 - DNA, 75 bp, synthetic construct
  source 1..75: mol_type = other DNA
atgactaaaaatactcgtttttcccccgaagtccgtcagcgggcgattcgtatggttctggaaagtcagggcgaa

SEQ ID NO: 52756 - DNA, 75 bp, synthetic construct
  source 1..75: mol_type = other DNA
ttggcctgatagccggcattatcgccaagctaatcatgccggggcgtgatggtggtggatttttcctgacctgta

SEQ ID NO: 52757 - DNA, 75 bp, synthetic construct
  source 1..75: mol_type = other DNA
attatgcccgtcagatttgtggagcggggagccagctggcgcgtatggtcgaagtataccgtcagacagatcctt

SEQ ID NO: 52758 - DNA, 75 bp, synthetic construct
  source 1..75: mol_type = other DNA
ggccatcaatatgggtggtgtctgcgaagtggtcgatcttagccaggtaagtcagcaaatgctggcaaaaattag

SEQ ID NO: 52759 - DNA, 75 bp, synthetic construct
  source 1..75: mol_type = other DNA
ccgcaaggcgttgcaggcagcgggcatgacttttcgcgtcagcgatattccccgtgatttacgcggcggctgcgg

SEQ ID NO: 52760 - DNA, 75 bp, synthetic construct
  source 1..75: mol_type = other DNA
aatggtggtcgaagaacctgtcgcaggctcctttagccactttgcttataaatactggggcagttttgccggttt

SEQ ID NO: 52761 - DNA, 75 bp, synthetic construct
  source 1..75: mol_type = other DNA
atggaactgaagtggaccagtaaggcgctttctgatttggcgcggttatatgattttctggtgctggccagtaaa

SEQ ID NO: 52762 - DNA, 75 bp, synthetic construct
  source 1..75: mol_type = other DNA
tccctgggcatacggaatcagtttattgtcagcaggatggtggctggcgctgcattgcacattacgggatttctc

SEQ ID NO: 52763 - DNA, 75 bp, synthetic construct
  source 1..75: mol_type = other DNA
ctggtgcagggtgtgatccgcggcaacagcggtaatacgctggatctcggcacttacggcaccaccaccctcgac

SEQ ID NO: 52764 - DNA, 75 bp, synthetic construct
  source 1..75: mol_type = other DNA
cgggagttggtagagacgaaggaacggctggtgaaagatattgatgatttcgttgcatcagcgatcgttctgttc

SEQ ID NO: 52765 - DNA, 75 bp, synthetic construct
  source 1..75: mol_type = other DNA
tactgagtctgctgctgttctgtacaacagctggcgcagaactgaaagtgattgcagacctgggcggcagggatg

SEQ ID NO: 52766 - DNA, 75 bp, synthetic construct
  source 1..75: mol_type = other DNA
gaagatgaagagaatttcgaccgtttacgcgcctgccgtaccgagcaggaagtactggatctcattgaccgcacc

SEQ ID NO: 52767 - DNA, 75 bp, synthetic construct
  source 1..75: mol_type = other DNA
gattggtgagagacgctgatgattttgtcgcagtggcaatcgccggtttcaatcagatgaaccgtggtggcccgg

SEQ ID NO: 52768 - DNA, 75 bp, synthetic construct
  source 1..75: mol_type = other DNA
cgccgcagtaacgatatccttcgccaggcttccgcttattttgcgaaggcggagttcgaccgcctctggaaaaaa

SEQ ID NO: 52769 - DNA, 75 bp, synthetic construct
  source 1..75: mol_type = other DNA
gtaagcgattcatcatgacagagcagcagacccttttatctcacggcgtggcgacggcttatgtggaaggcggca

SEQ ID NO: 52770 - DNA, 75 bp, synthetic construct
  source 1..75: mol_type = other DNA
acgatctctatctgtttatgcaggtcgtgcgagaagggagttttaccgccgccgcgcagaggcttggcctggcgc

SEQ ID NO: 52771 - DNA, 75 bp, synthetic construct
  source 1..75: mol_type = other DNA
atcgaggcggactgaatccagaaaagatcaacataatccgttatgcggacgattttgtgatcacggggataagcc

SEQ ID NO: 52772 - DNA, 75 bp, synthetic construct
  source 1..75: mol_type = other DNA
cgaccgctgtagaaattgaacaggcactacgggaacggcatcagaaagaaattgagcaaaacgataaaacggata

SEQ ID NO: 52773 - DNA, 75 bp, synthetic construct
  source 1..75: mol_type = other DNA
agctgaccggcaacctggtgatggcgctgtttaaccacgataccagccgcgaccaggagccgcagctgcacaccc

SEQ ID NO: 52774 - DNA, 75 bp, synthetic construct
  source 1..75: mol_type = other DNA
cctgctgcaggccatgctctacccgctggtactgctggtggtggcaacgggcgtggtcactattttgctgacggc

SEQ ID NO: 52775 - DNA, 75 bp, synthetic construct
  source 1..75: mol_type = other DNA
cgcagctgaggcgctctgtcccgctgccgtctcagaagacttagcgttcgtctcggacgtttttgccgccttcgc

SEQ ID NO: 52776 - DNA, 75 bp, synthetic construct
  source 1..75: mol_type = other DNA
agcagcgacaaagtgggtaaaaccgggtttattgagaatatctacgccaaccagattgcctttggccgcctgtat

SEQ ID NO: 52777 - DNA, 75 bp, synthetic construct
  source 1..75: mol_type = other DNA
gtcttgtggaaggatgcagtgatgattttgatccttttgatattattagggtgccggatcttacttacaacaaag

SEQ ID NO: 52778 - DNA, 75 bp, synthetic construct
  source 1..75: mol_type = other DNA
atgatacaaatggattctcattatctgaacaatacgcagcacgtctatgacaaagggcgagttatgcaaactgag

SEQ ID NO: 52779 - DNA, 75 bp, synthetic construct
  source 1..75: mol_type = other DNA
gaatccgcagagcggcgtggtggtgcggctcgaaggcgaggcgcgaccgtggaaccccggcgccattaccggcgg

SEQ ID NO: 52780 - DNA, 75 bp, synthetic construct
  source 1..75: mol_type = other DNA
ttgttaacgcggcgcgttctcgtggcgttaccgaagcgcgtctgctgacccgttataccgtctgggctggcctga

SEQ ID NO: 52781 - DNA, 75 bp, synthetic construct
  source 1..75: mol_type = other DNA
tgaaaaagttgtgaacgggcgggtgaaactccagtgggatgccagaaaacggcgtaatgaagctctggactgtct

SEQ ID NO: 52782 - DNA, 75 bp, synthetic construct
  source 1..75: mol_type = other DNA
atgaaaatcaaacatgagcacatccgcatggcgatgaatgcctgggcatatcctgatggtgagaaagttccggca

SEQ ID NO: 52783 - DNA, 75 bp, synthetic construct
  source 1..75: mol_type = other DNA
cgcccgggtgcacagaaccagatgaaagttattctggctgaagaagcgaaactcattaaaaaagataacgtgaat

SEQ ID NO: 52784 - DNA, 75 bp, synthetic construct
  source 1..75: mol_type = other DNA
tcattgttgatgaaggcattcctgcggatagtctggaaggactgagaaaggctggggttgaagtgattctggtcg

SEQ ID NO: 52785 - DNA, 75 bp, synthetic construct
  source 1..75: mol_type = other DNA
tcagtggtgcactgctgtcctcaccctgcacgctggtgagtaatgaggtgccgttaagcctccggccggaaaatc

SEQ ID NO: 52786 - DNA, 75 bp, synthetic construct
  source 1..75: mol_type = other DNA
ttgctggtttgtaccatctggttgctggcggtacaacaacctggcacgattatgccgctctggtatttgaagaag

SEQ ID NO: 52787 - DNA, 75 bp, synthetic construct
  source 1..75: mol_type = other DNA
aggaagagacgctgttacgtgtggatgcggcgatcaacaaaaaatactgccatgcagacggaaccgaaatgacca

SEQ ID NO: 52788 - DNA, 75 bp, synthetic construct
  source 1..75: mol_type = other DNA
tggattggtaactccgaaccttttactgatatcaaacattacattcttattctgaagcgggaaaacggggtgacc

SEQ ID NO: 52789 - DNA, 75 bp, synthetic construct
  source 1..75: mol_type = other DNA
cggcaggctgaagaggccatccgtcgtgaaacggaacgccgtgcggatgagattgtcagaaaaatggcagaggaa

SEQ ID NO: 52790 - DNA, 75 bp, synthetic construct
  source 1..75: mol_type = other DNA
caagaacaacgtcaggctaagcttgaagccttccgccagaaactgttagaagatggtatcgatcctgctgaacta

SEQ ID NO: 52791 - DNA, 75 bp, synthetic construct
  source 1..75: mol_type = other DNA
gcgacaggcagcgggtcttccccgccccatctggataaaggacacgtttcagcagcagatccgacagacaacggg

SEQ ID NO: 52792 - DNA, 75 bp, synthetic construct
  source 1..75: mol_type = other DNA
gcaggcagatgcgcaggaactgaaaaatgcccgtgaagacggagtagtgctggaaactgaactgtttaccttcat

SEQ ID NO: 52793 - DNA, 75 bp, synthetic construct
  source 1..75: mol_type = other DNA
ttcgtcccttatccgatgcggtatttaccatcgcatctgatgacctgtggatcgagagtttagcgatccaacaat

SEQ ID NO: 52794 - DNA, 75 bp, synthetic construct
  source 1..75: mol_type = other DNA
gcatcaaagataccggtagggataaattccgcaggtcaatggaaggtgatgtcaaaggaagatatgaagaaaaaa

SEQ ID NO: 52795 - DNA, 75 bp, synthetic construct
  source 1..75: mol_type = other DNA
agaagctgggcgtaaaggtcaacgccttctttgccccggactacgcgggcattatccaggggatgcgcttcaata

SEQ ID NO: 52796 - DNA, 75 bp, synthetic construct
  source 1..75: mol_type = other DNA
cagaacggctattccattcgaaggtgagcgccataatgcacttgatgacgcccgttaccaggcaaaatacgtttc

SEQ ID NO: 52797 - DNA, 75 bp, synthetic construct
  source 1..75: mol_type = other DNA
cacgttggcgcgagctggtggcgctatatcgttatgactggattgcggccgctgatgttttgttcggcaaaacac

SEQ ID NO: 52798 - DNA, 75 bp, synthetic construct
  source 1..75: mol_type = other DNA
gctggttgccgtctgcggggattgtgtggcgaagggctgcgccaactctgcgtatccgtgacccgcataaagatg

SEQ ID NO: 52799 - DNA, 75 bp, synthetic construct
  source 1..75: mol_type = other DNA
atggctgatttgagaaaagcagcgcgtggtcgggaatgccaggtaagaatccctggcgtatgtaatggcaatcct

SEQ ID NO: 52800 - DNA, 75 bp, synthetic construct
  source 1..75: mol_type = other DNA
ataaagtgtctgttggcggcggttctcaggtcaatggtgcgctgggtatcggcgttcagaacgcgctgggcggaa

SEQ ID NO: 52801 - DNA, 75 bp, synthetic construct
  source 1..75: mol_type = other DNA
ctattgactcagtaggaagtcagcaaaagttagctgatgcctgcggtgttaagcagccgtctgtatgggcttggt

SEQ ID NO: 52802 - DNA, 75 bp, synthetic construct
  source 1..75: mol_type = other DNA
cgaaaactccggtgaattttttgttcaggtctggggaaatggagccaacttcgacaacacgattttgcgccgttc

SEQ ID NO: 52803 - DNA, 75 bp, synthetic construct
  source 1..75: mol_type = other DNA
cagatattcacggtagaaaacgcagtggcattctggaggcggattcggcccgacatgcccgtcagttgctgcgtg

SEQ ID NO: 52804 - DNA, 75 bp, synthetic construct
  source 1..75: mol_type = other DNA
atgatcaaagtacgtggtgaatttcccaaatctcaagatggctttcttcttggtcgtgatgaggttgagcgggcg

SEQ ID NO: 52805 - DNA, 75 bp, synthetic construct
  source 1..75: mol_type = other DNA
tgttgacgctggatatgcaaaagaatgcgcgctggaaggtatggcgagaacgcaggttatctggctgaaagaggg

SEQ ID NO: 52806 - DNA, 75 bp, synthetic construct
  source 1..75: mol_type = other DNA
gggcaatcagctgttgcccgtctcactggtgaaaagaaaaaccaccctggcgcccaatacgcaaaccgcctctcc

SEQ ID NO: 52807 - DNA, 75 bp, synthetic construct
  source 1..75: mol_type = other DNA
gttgcaggaggacacgggtgtgacgctaccggcggagctggcggtgatgctggggaggctggagcgggaactgcg

SEQ ID NO: 52808 - DNA, 75 bp, synthetic construct
  source 1..75: mol_type = other DNA
gaacgaccagaaagcggaacaaaacagcccaaatgcgttacaaaacgagccagaaacgaaacaatccgaaccagt

SEQ ID NO: 52809 - DNA, 75 bp, synthetic construct
  source 1..75: mol_type = other DNA
ggcattgcacaggatgtagtaacccatttcccgattgcatttccaaacagatgtctgcgtgttttggtctcacaa

SEQ ID NO: 52810 - DNA, 75 bp, synthetic construct
  source 1..75: mol_type = other DNA
gaaaaatcggtggtgtattcgcacgatggcaaggaaatgggaaaactctatctgccggagaatcaggagaaaaat

SEQ ID NO: 52811 - DNA, 75 bp, synthetic construct
  source 1..75: mol_type = other DNA
tagtcccgacccggttaaatttatatccagagccagtactcctggcctcggcgcttcatttttagcgttaggctg

SEQ ID NO: 52812 - DNA, 75 bp, synthetic construct
  source 1..75: mol_type = other DNA
ctggtctggataaggcgctggctgccggggctactgaaatcacaaaagaagaatattttgcccgaaaaaatggca

SEQ ID NO: 52813 - DNA, 75 bp, synthetic construct
  source 1..75: mol_type = other DNA
agaaatggaagactctgaacatcatcacaaggaggacgctggcaatgatcactatcacgatagcgatggtgaaac

SEQ ID NO: 52814 - DNA, 75 bp, synthetic construct
  source 1..75: mol_type = other DNA
ataatccgacatttaccggagaaccaaaagccccgacgcctgccgcaggaaataacaccacgcggattgcgacca

SEQ ID NO: 52815 - DNA, 75 bp, synthetic construct
  source 1..75: mol_type = other DNA
tgggaacaaaatcccacgatattttcacgctaccgctgtgtcgggagcatcacaacgagcttcatgcggatccgc

SEQ ID NO: 52816 - DNA, 75 bp, synthetic construct
  source 1..75: mol_type = other DNA
ggaatgtagggacaggggcgaatcagatacctgatatgggtagcttcacgctttctgtttcaggtactggatatc

SEQ ID NO: 52817 - DNA, 75 bp, synthetic construct
  source 1..75: mol_type = other DNA
tgggatgttctctccagaactcagaacctttaccaaaggcgatgcggagagattggtaagcacaaccaaaaaagc

SEQ ID NO: 52818 - DNA, 75 bp, synthetic construct
  source 1..75: mol_type = other DNA
tgcgtgtgcatcaggatttactgcgtcacgatctgcgcattctggtaattgaccttgaccctcaggcatccagca

SEQ ID NO: 52819 - DNA, 75 bp, synthetic construct
  source 1..75: mol_type = other DNA
gagaagcatacagatatgcttgaaataacagagcatccggtagaggttggggccgctgtcgctgatcatgcctat

SEQ ID NO: 52820 - DNA, 75 bp, synthetic construct
  source 1..75: mol_type = other DNA
aagaaacggaacagaacgaccagaaagcggaacaaaacagcccaaatgcgttacaaaacgagccagaaacgaaac

SEQ ID NO: 52821 - DNA, 75 bp, synthetic construct
  source 1..75: mol_type = other DNA
tcaatgaaaatgtagtagagaatactcatgatatcaataacaagaaaatgatcttcagcgcaataaaagaaatat

SEQ ID NO: 52822 - DNA, 75 bp, synthetic construct
  source 1..75: mol_type = other DNA
taaggatctcgaaggtaaaattgaagaaaggcttcaaaatcgccaggctgaatatcaaaatgaaattaatcaacc

SEQ ID NO: 52823 - DNA, 75 bp, synthetic construct
  source 1..75: mol_type = other DNA
atgaagatccaagttttatcttcgataaaatatcacacaaactcagacatacggtaacggagttcgatgagagcg

SEQ ID NO: 52824 - DNA, 75 bp, synthetic construct
  source 1..75: mol_type = other DNA
tttaaataccttggtattgataacatatcattcaaccacgacgggacattttcacctgttggcgaatactcatcg

SEQ ID NO: 52825 - DNA, 75 bp, synthetic construct
  source 1..75: mol_type = other DNA
cgcccagggttggctgcttgcctgaaggcgcttcgtgaaggggacacgctgatcgtgtggaagctcgatcggctt

SEQ ID NO: 52826 - DNA, 75 bp, synthetic construct
  source 1..75: mol_type = other DNA
ttttcgaaaagccgctccccatgtcctcaatcttactgatgaacagctggcacaattgattcaacaaggccagtt

SEQ ID NO: 52827 - DNA, 75 bp, synthetic construct
  source 1..75: mol_type = other DNA
gctttaacggtggtgttctgaacggtgttccttctgcatatcactggtatacggaacagtatggcgtgaagtggc

SEQ ID NO: 52828 - DNA, 75 bp, synthetic construct
  source 1..75: mol_type = other DNA
ccaggcaatgaacctctgccagatccccggacgtgcaggagcactgcttacgacgcttcttcgccatatatcgac

SEQ ID NO: 52829 - DNA, 75 bp, synthetic construct
  source 1..75: mol_type = other DNA
cttaaagatgccccgtcacagccattgcaacagtcactgaaagaccttgagcgggcttacaaaaacttcttccag

SEQ ID NO: 52830 - DNA, 75 bp, synthetic construct
  source 1..75: mol_type = other DNA
ggtgagcgccataatgcacttgatgacgcccgttaccaggcaaaatacgtttcagctatctggcaaaaactgatc

SEQ ID NO: 52831 - DNA, 75 bp, synthetic construct
  source 1..75: mol_type = other DNA
ggcagtcattttcatgttcccggtatcctcagcttgcccgtgcttatcccgggtgtaagctgccggatttgcgcg

SEQ ID NO: 52832 - DNA, 75 bp, synthetic construct
  source 1..75: mol_type = other DNA
cattctcgctacaactggcggaagggcgggcagatctctacacggaaatgccagtgaaagtcagtggctttaaac

SEQ ID NO: 52833 - DNA, 75 bp, synthetic construct
  source 1..75: mol_type = other DNA
attgaagcgctggccagtggtgctgataaggatgcaattgtgcgggaggctcttcttcgtgattttaatactcca

SEQ ID NO: 52834 - DNA, 75 bp, synthetic construct
  source 1..75: mol_type = other DNA
atgccgggcgtaccggtggaggccttttccagtcgttcacaggctatcagggaggccgtcggggaaggggcctca

SEQ ID NO: 52835 - DNA, 75 bp, synthetic construct
  source 1..75: mol_type = other DNA
taaataattacatgacaaatcttaacgccgtgttccagtttggtgttgataacggttacctggcagataatccgt

SEQ ID NO: 52836 - DNA, 75 bp, synthetic construct
  source 1..75: mol_type = other DNA
tgagcttaccgccattcgcagcacggggttttctatcttccgtattgcactggtggcgctggttgccgggatatt

SEQ ID NO: 52837 - DNA, 75 bp, synthetic construct
  source 1..75: mol_type = other DNA
tgatgaccgtgaaaacggggagttacttacagcacagctgcgactgggaccggcagacattctggagtccgatga

SEQ ID NO: 52838 - DNA, 75 bp, synthetic construct
  source 1..75: mol_type = other DNA
tatctggtgcagaaaatatagtaaaaaatgatgcagctcatttctgtgttactcagggcaaaaaaatgcagatag

SEQ ID NO: 52839 - DNA, 75 bp, synthetic construct
  source 1..75: mol_type = other DNA
tgtatcaatccagtgaaggctatctgctctactcgaaaggcaatggctgtccaaaagatattacatcaggcgggt

SEQ ID NO: 52840 - DNA, 75 bp, synthetic construct
  source 1..75: mol_type = other DNA
tagtacgtgatgaatatggctgctggacgcatcctgaatatgaaaaattctgtgacggtcgggaatatatttcaa

SEQ ID NO: 52841 - DNA, 75 bp, synthetic construct
  source 1..75: mol_type = other DNA
gaaccggcggagcagtggcagtatgacgaccacggctggctgacagaaatcagccacctgagtgaaggccaccgt

SEQ ID NO: 52842 - DNA, 75 bp, synthetic construct
  source 1..75: mol_type = other DNA
tgacgaagacaaggcaccagtgcctgcacaagaacttcatgtggaaacagagctaactcccaaccacaaagaatt

SEQ ID NO: 52843 - DNA, 75 bp, synthetic construct
  source 1..75: mol_type = other DNA
atcaggtgcgaaaattcagaccagtactgaaacaggtaaccagcataaataccagacccgtgtggtctcaaatgc

SEQ ID NO: 52844 - DNA, 75 bp, synthetic construct
  source 1..75: mol_type = other DNA
atgacaggcgataagaaaactgtggtttgtaataaaggtaatttgatgaaaacaaaaaaattgatgatggttgca

SEQ ID NO: 52845 - DNA, 75 bp, synthetic construct
  source 1..75: mol_type = other DNA
aaaaatctggataagacacttaccgtgaataccggtgcgctgctgacaatgtcagtcagtgccaacgggggaacg

SEQ ID NO: 52846 - DNA, 75 bp, synthetic construct
  source 1..75: mol_type = other DNA
tcttggcagcctggttttggggtggatctccgaccatatcggacggcaaaaaatcttcaccttcagttttatgct

SEQ ID NO: 52847 - DNA, 75 bp, synthetic construct
  source 1..75: mol_type = other DNA
atgaaatcgaccgacgcacccataatctcgacaacaaagacgccagactttaccacctcgaaggcgtgatcagga

SEQ ID NO: 52848 - DNA, 75 bp, synthetic construct
  source 1..75: mol_type = other DNA
tcgtgatggctgtttttcagggagtgccgtggatgatgatggcgtgctatcacttatttatactggtcatatttg

SEQ ID NO: 52849 - DNA, 75 bp, synthetic construct
  source 1..75: mol_type = other DNA
gggctaccgttgtatgtgtcgctgtaccccacggaagggggaatgcaggatattatcgactgcattcgtgctgaa

SEQ ID NO: 52850 - DNA, 75 bp, synthetic construct
  source 1..75: mol_type = other DNA
tgaccaccgccaaactggagcacgaaggccaccagctaaccccggcagatcaacgggagatagaacgctcagtta

SEQ ID NO: 52851 - DNA, 75 bp, synthetic construct
  source 1..75: mol_type = other DNA
cttaaagattctccctcacagccattgcaacagtcactgaaagaccttgagcgggcttacaaaaacttcttccag

SEQ ID NO: 52852 - DNA, 75 bp, synthetic construct
  source 1..75: mol_type = other DNA
agaagctcaacagcatgggcacggtggcggctgcgttgcagcactgctaccgcgaccgcgagacgccgaacgccg

SEQ ID NO: 52853 - DNA, 75 bp, synthetic construct
  source 1..75: mol_type = other DNA
tgtacgcgcagaaggctggctacccgcctggccgcaccttggcggtaaactggtctatgaacagtattatggcga

SEQ ID NO: 52854 - DNA, 75 bp, synthetic construct
  source 1..75: mol_type = other DNA
agccggagaagagagcgtggcgcaggtcagtggagtacgggaacaggccatgctgactcagaccattcgcagtga

SEQ ID NO: 52855 - DNA, 75 bp, synthetic construct
  source 1..75: mol_type = other DNA
acacaccagcgagttaaaacccactatggggcgatccagcaggcaggccgagacgtgccacacctgacgcctgac

SEQ ID NO: 52856 - DNA, 75 bp, synthetic construct
  source 1..75: mol_type = other DNA
gacccggaagccagcgaaaatgataaatatgtggcgctgcaattcctgcgcaactccgacatcgccgcaaaaggc

SEQ ID NO: 52857 - DNA, 75 bp, synthetic construct
  source 1..75: mol_type = other DNA
gctggcgcttcctgctcccctaacgggcttgtaggccgcgacagtacaggggcgatactttcgtgccaatccggt

SEQ ID NO: 52858 - DNA, 75 bp, synthetic construct
  source 1..75: mol_type = other DNA
ggtattcctgctttactcctgaattataatttcaccggtaacagaggtaatggtaacgatagctatttttttagt

SEQ ID NO: 52859 - DNA, 75 bp, synthetic construct
  source 1..75: mol_type = other DNA
atttattgatgatatggcggcggcgtatgcgtgggcggatgtcgtcgtttgccgctccggtgcgttaacggtgag

SEQ ID NO: 52860 - DNA, 75 bp, synthetic construct
  source 1..75: mol_type = other DNA
tgaaaaggcacgccaggttaatggcgatgaaccctatatcgaaattatttgtatggattcagaagctgaaataca

SEQ ID NO: 52861 - DNA, 75 bp, synthetic construct
  source 1..75: mol_type = other DNA
aagaaattatgcgtggcagtctcctttcggtcaataatagcagaacaaaagaaagagcccgaaatgacggtcaga

SEQ ID NO: 52862 - DNA, 75 bp, synthetic construct
  source 1..75: mol_type = other DNA
gaactggcgtggatattaccagcctcgaccagggcgatgatggatggcacaagctgagactcggtgttatcactg

SEQ ID NO: 52863 - DNA, 75 bp, synthetic construct
  source 1..75: mol_type = other DNA
tctgaacggcacgcgattgtttgtggaacttccgtaccagaccgtgcgcgaaattattagcgaagctgaaaaagc

SEQ ID NO: 52864 - DNA, 75 bp, synthetic construct
  source 1..75: mol_type = other DNA
gctgttatgcaatttagtgctgatatggcactgaatgaggccagggctatcctgattgctgattgtgaaaatggg

SEQ ID NO: 52865 - DNA, 75 bp, synthetic construct
  source 1..75: mol_type = other DNA
tcccatcaaaagagcgcatacaccacatattgaacccctgcctccggatcaccataccgctgcagattacttacg

SEQ ID NO: 52866 - DNA, 75 bp, synthetic construct
  source 1..75: mol_type = other DNA
accagctgcaggacggtgatattgacgagacaccaccgtcagaacgccagaagaacatgctgccgctgtcatttg

SEQ ID NO: 52867 - DNA, 75 bp, synthetic construct
  source 1..75: mol_type = other DNA
gcaattgtgactgcgcccaatgtggtactggcaacaggagggcctggcgagctttatcgcgacagtgtgtaccca

SEQ ID NO: 52868 - DNA, 75 bp, synthetic construct
  source 1..75: mol_type = other DNA
aaccaatctgaccgaaagccagtttggtataggcacgccgcgcagcacgtttccgtggaatttatccggcaccta

SEQ ID NO: 52869 - DNA, 75 bp, synthetic construct
  source 1..75: mol_type = other DNA
cggggtgggcgagagccgggacagggatgcagagtatgaagccctgtaccgtgacattctgccagaactggacct

SEQ ID NO: 52870 - DNA, 75 bp, synthetic construct
  source 1..75: mol_type = other DNA
caaagattcagacaacgatgatttatgcccatcttgcgccggattacctgcaggatgcggtgaggtttaatccac

SEQ ID NO: 52871 - DNA, 75 bp, synthetic construct
  source 1..75: mol_type = other DNA
gaaagccgagaagattgacgacgattctgcgcttaacggcaaatgggcgttgttcgctaaaatcaccccgaccga

SEQ ID NO: 52872 - DNA, 75 bp, synthetic construct
  source 1..75: mol_type = other DNA
aagccggtgaaacaattggtgggtatctcctgccaattggcacagcggcaaaagctgctggagcgccagcaaagc

SEQ ID NO: 52873 - DNA, 75 bp, synthetic construct
  source 1..75: mol_type = other DNA
aggctcactcttgcacaaagcatgtatctgaaagaaatctgggattatctgactcatgatgaacaggaactgttt

SEQ ID NO: 52874 - DNA, 75 bp, synthetic construct
  source 1..75: mol_type = other DNA
acaaagcattggctaaagttgacaatctgcgttctgacctcggtgcagtacaaaaccgtttcgactctgccatca

SEQ ID NO: 52875 - DNA, 75 bp, synthetic construct
  source 1..75: mol_type = other DNA
atttttaccatcaggtgattggtgaagcttaccggcataaggtgctgtttgttataagccagtcggacaaggccg

SEQ ID NO: 52876 - DNA, 75 bp, synthetic construct
  source 1..75: mol_type = other DNA
tatatctgaatttctgggggcgtatggaataaatcactcagcatatatggttctcaccacattattcgcagcgga

SEQ ID NO: 52877 - DNA, 75 bp, synthetic construct
  source 1..75: mol_type = other DNA
atgacgcaatctcgattgcatgcggcgcaaaacgccctagcaaaacttcatgagcaccggggtaacactttctat

SEQ ID NO: 52878 - DNA, 75 bp, synthetic construct
  source 1..75: mol_type = other DNA
tattcctgttcacgataccattgccagagttgtatcctgtatctgtcctgcgaaatttcatgagagctttattaa

SEQ ID NO: 52879 - DNA, 75 bp, synthetic construct
  source 1..75: mol_type = other DNA
agttgccagccgttgggggctgacatcttcggttgtagttgctggtggcggtggcgataacgccgtgagcgcaat

SEQ ID NO: 52880 - DNA, 75 bp, synthetic construct
  source 1..75: mol_type = other DNA
cgggaaattcgcgataccgccgatgcgctgaacaagctgaacttacgccataccgaaatcttgccgctttatgcg

SEQ ID NO: 52881 - DNA, 75 bp, synthetic construct
  source 1..75: mol_type = other DNA
tcgcggcatcgagcgcacttatacccgtgatttgctcgtagaagtttttctcgacggacgcggtaacggcctgaa

SEQ ID NO: 52882 - DNA, 75 bp, synthetic construct
  source 1..75: mol_type = other DNA
tttattaactggatgcgtgactgccattcttcagatgataaagacgtcattgcaattgatggaaaaacgctccgg

SEQ ID NO: 52883 - DNA, 75 bp, synthetic construct
  source 1..75: mol_type = other DNA
ttcgatggcgacagtgtcagcgcagatttcatgaatgacagagaacaacccgccgtacaggaaagggacgcattc

SEQ ID NO: 52884 - DNA, 75 bp, synthetic construct
  source 1..75: mol_type = other DNA
cacagcgcgtagcctgcgctccacatttgacctgccggacgagccaacaggcgatgtcgcgccttcatggctgac

SEQ ID NO: 52885 - DNA, 75 bp, synthetic construct
  source 1..75: mol_type = other DNA
gaccgcgaagtcgctgattgatgattgcctggctgactggacggaaggtgcacgccctgaaatcaaagccatcat

SEQ ID NO: 52886 - DNA, 75 bp, synthetic construct
  source 1..75: mol_type = other DNA
ggcgtcagcacagccggaacatcagtgcagagctgcgcaacatggttgaccgcgccccggtaggccaggtgatga

SEQ ID NO: 52887 - DNA, 75 bp, synthetic construct
  source 1..75: mol_type = other DNA
ttcgaccttgatgccgcaccatcgggtaacgatgtccccgcatggctgaccgaaccggagcctgaaatcaaccga

SEQ ID NO: 52888 - DNA, 75 bp, synthetic construct
  source 1..75: mol_type = other DNA
gccggaagccgggccgttattctggaggtcagtggacgctggatggaagcggcagaagcatggcgacgggctgcc

SEQ ID NO: 52889 - DNA, 75 bp, synthetic construct
  source 1..75: mol_type = other DNA
tgctggacaggctggaggaagaaatccgggcagaccgcgtgagcagtgaaagccgggcgtggcttgcgcagtgcg

SEQ ID NO: 52890 - DNA, 75 bp, synthetic construct
  source 1..75: mol_type = other DNA
cagatcaagacggatgagaaatctaatgagattacagctatcccagaacttcttaacatgctggatattaaagga

SEQ ID NO: 52891 - DNA, 75 bp, synthetic construct
  source 1..75: mol_type = other DNA
accgcctggacggaacgcgaagcgcgtaaccgttgcccgtccggttgtgtcgctgtattcgccgcccgtattcgt

SEQ ID NO: 52892 - DNA, 75 bp, synthetic construct
  source 1..75: mol_type = other DNA
tgcccgggtcttccgtttcatccgcgacatgctcgacgatctggatctgtcccgcatcatcggtgaaatgagcga

SEQ ID NO: 52893 - DNA, 75 bp, synthetic construct
  source 1..75: mol_type = other DNA
ataaacaaatatcgccttgagataaaatatgaccccgttacaacaaatctaaagaatagctctatcagatatcgt

SEQ ID NO: 52894 - DNA, 75 bp, synthetic construct
  source 1..75: mol_type = other DNA
atatccggccagaatggatatagaaaaagaaggctggtttcagatggcccgaaaaatatctccggatatccctgt

SEQ ID NO: 52895 - DNA, 75 bp, synthetic construct
  source 1..75: mol_type = other DNA
gctcagggacgggatatccgtatctaccgcgaactgcgcaccgacccgctggtcgggggctgtatccgcagacgt

SEQ ID NO: 52896 - DNA, 75 bp, synthetic construct
  source 1..75: mol_type = other DNA
gcagtgccatccgttcgggcgcagtgtgatgcgctgggagacgggaaaaaatccgcccaacacaaagaaaaactt

SEQ ID NO: 52897 - DNA, 75 bp, synthetic construct
  source 1..75: mol_type = other DNA
gaaggaactgaacaactttaaaattgatattgcccgactattgagcatcaagattcacaagctatcgatgggggt

SEQ ID NO: 52898 - DNA, 75 bp, synthetic construct
  source 1..75: mol_type = other DNA
tgtgatacccaggcaggatgggtgagtagtacgaagaaatattatgtaaaatttcgtatacaagtattcaaaaaa

SEQ ID NO: 52899 - DNA, 75 bp, synthetic construct
  source 1..75: mol_type = other DNA
gagttacaaagacagcctttgaagaacttaaccgaatcaaaaacattacaggtctgccacactcagcagtgatga

SEQ ID NO: 52900 - DNA, 75 bp, synthetic construct
  source 1..75: mol_type = other DNA
cagccggtctatgagatccagtattacggcaaaaccttccggatgaacgctgcccaggtactgcatgataaatat

SEQ ID NO: 52901 - DNA, 75 bp, synthetic construct
  source 1..75: mol_type = other DNA
ttatggtcctttctttattcgtatggcttggcacggtgccggaacatacaggacatatgatggccggggaggcgc

SEQ ID NO: 52902 - DNA, 75 bp, synthetic construct
  source 1..75: mol_type = other DNA
atcaaaggtcagacacctgccagtgtggatccggtaacggtatgctctgccgccacaaacgatatcacgctcgaa

SEQ ID NO: 52903 - DNA, 75 bp, synthetic construct
  source 1..75: mol_type = other DNA
ccttattgatgatcggtagtttactgacgttactgcccgtggcgctgatctcgcgctatcgccatcaacgtgact

SEQ ID NO: 52904 - DNA, 75 bp, synthetic construct
  source 1..75: mol_type = other DNA
tcgctggcgttgtggttattcaggacagaaaaagtgatgcctttgcctctgacatcaaagagctaacagaaaaat

SEQ ID NO: 52905 - DNA, 75 bp, synthetic construct
  source 1..75: mol_type = other DNA
atgaacaatatcaaaatgatcacgctcttccatccccatgaaaaaacaccatttatgatctgtattataaacaaa

SEQ ID NO: 52906 - DNA, 75 bp, synthetic construct
  source 1..75: mol_type = other DNA
cagcagaactggagcaaaagctatatcgcgaatttgcacaggttactacagttccagcttataaagagatgagta

SEQ ID NO: 52907 - DNA, 75 bp, synthetic construct
  source 1..75: mol_type = other DNA
gttacgcgctttcatggcggtgcggcgaaaataatgtctggtaatagtgaaaccgagacccaggaagtcgggttt

SEQ ID NO: 52908 - DNA, 75 bp, synthetic construct
  source 1..75: mol_type = other DNA
tgagccgtccctgcgggatgatgcgaaaatggtggtgctggagctgggcggactggaagaccgtccgtcactgct

SEQ ID NO: 52909 - DNA, 75 bp, synthetic construct
  source 1..75: mol_type = other DNA
aagatgtaccgcacgccgcgcagcctgaagaagtgctgcaccatcgacgaaggctggaagctgctcaacttcaaa

SEQ ID NO: 52910 - DNA, 75 bp, synthetic construct
  source 1..75: mol_type = other DNA
tcaacagcgatgagccgtcactgaccgacgatgcccgctttattgtcctggagctgggcggtctgcaggacaagc

SEQ ID NO: 52911 - DNA, 75 bp, synthetic construct
  source 1..75: mol_type = other DNA
gccaatatcatgctttactgcctgtttatttttttctggatcctcattggtctggtcttatgggtaaaaataagc

SEQ ID NO: 52912 - DNA, 75 bp, synthetic construct
  source 1..75: mol_type = other DNA
cgtggacagcatgattgcagatattgatgaacgcatcagccgccagatggatgtcatcatccatgcgcctgcctt

SEQ ID NO: 52913 - DNA, 75 bp, synthetic construct
  source 1..75: mol_type = other DNA
ccgctaacggtgaaatgactgtcatggcctccggtagcgatattgcctttgaacgactggcacccgtgctggaag

SEQ ID NO: 52914 - DNA, 75 bp, synthetic construct
  source 1..75: mol_type = other DNA
tggatgggcggcgataacctatccaatctgctcagcccggacctggccattgccagcccgtttgtcatcaccatg

SEQ ID NO: 52915 - DNA, 75 bp, synthetic construct
  source 1..75: mol_type = other DNA
gcagttgttctcccgtgaactggacgatgaacaactgacgcaaatcgccagtgcgcagatggctgaatggttttc

SEQ ID NO: 52916 - DNA, 75 bp, synthetic construct
  source 1..75: mol_type = other DNA
ccagtatgtcaggacgcttgctgaaccgctggggcaggatcaaaaaaccgcaactcatagcaagaatcgaaaggc

SEQ ID NO: 52917 - DNA, 75 bp, synthetic construct
  source 1..75: mol_type = other DNA
attgagtcgcgcacgttcgttgacccggcagttaacggccgcgatcagtctctgctcacccctgagtcggtaagc

SEQ ID NO: 52918 - DNA, 75 bp, synthetic construct
  source 1..75: mol_type = other DNA
gttttctgctgcgggcggaaccccttatcggtgctaacgaacagatagtgtatgtgctggaagacctcatcaaaa

SEQ ID NO: 52919 - DNA, 75 bp, synthetic construct
  source 1..75: mol_type = other DNA
ggtcggcattcgttctggcgtctgtcgtggccctggttatctgcctgatcaccttctttgttgtctcctggattc

SEQ ID NO: 52920 - DNA, 75 bp, synthetic construct
  source 1..75: mol_type = other DNA
cccaaagggttttgcacaggcagaacccgcatgggttgtcacggtagacggtgttgattacccactctggaaaac

SEQ ID NO: 52921 - DNA, 75 bp, synthetic construct
  source 1..75: mol_type = other DNA
agattcaatctgtcaatgcaacacccctttcaattatctctttcggtgttttgaacttctgaaccgccccgggaa

SEQ ID NO: 52922 - DNA, 75 bp, synthetic construct
  source 1..75: mol_type = other DNA
ttcacgcatcagccgcacgccatccggcgctaacgctggcggcggcattcttaccgatcgcggcgaaggttttgt

SEQ ID NO: 52923 - DNA, 75 bp, synthetic construct
  source 1..75: mol_type = other DNA
tatcgacctgttcagccgcggcatgggtaacaccaacttcaatatggcggtgtgtggcacctccggcgcggggaa

SEQ ID NO: 52924 - DNA, 75 bp, synthetic construct
  source 1..75: mol_type = other DNA
cccttatgtcgtgggttagcaaagttattaattgtcgatgtggcgcttaatcgtggtcaggataatccgcaactg

SEQ ID NO: 52925 - DNA, 75 bp, synthetic construct
  source 1..75: mol_type = other DNA
atgacccgcctgcaggacgggctgcgcacggagtctgtccgctctcaggcccgtgaacagtttaccggtgcggtg

SEQ ID NO: 52926 - DNA, 75 bp, synthetic construct
  source 1..75: mol_type = other DNA
gccagaacggctattccattcgaaggtgagcgccataatgcacttgatgacgcccgttaccaggcaaaatacgtt

SEQ ID NO: 52927 - DNA, 75 bp, synthetic construct
  source 1..75: mol_type = other DNA
tgttgcgttcacccgggctacacgggaattactggtgacctgttatcgtgaaaacagtatcagtcgtcatcttga

SEQ ID NO: 52928 - DNA, 75 bp, synthetic construct
  source 1..75: mol_type = other DNA
ctgtgttgactggtcttctttcaggatgcgttgatggcaattcaccctctggcagtcaggaaggtgtcgtgaaag

SEQ ID NO: 52929 - DNA, 75 bp, synthetic construct
  source 1..75: mol_type = other DNA
actatctcagggccgcagaagaagggttcccgctgcccgatcacctcaacctgccgctgaccctgcgtaactacc

SEQ ID NO: 52930 - DNA, 75 bp, synthetic construct
  source 1..75: mol_type = other DNA
ggtcacctggattattcccgcgcgatagtggttgcatccgtgaaagaagcaccaattggtatcgaggctactccc

SEQ ID NO: 52931 - DNA, 75 bp, synthetic construct
  source 1..75: mol_type = other DNA
ctgaatagtcttttcagcaaagccaaacgaacacaggctgagcgccttcagcagaccggaaagctgatccagtca

SEQ ID NO: 52932 - DNA, 75 bp, synthetic construct
  source 1..75: mol_type = other DNA
cggcgtgctggcaggctgcgaaaacatgcctggcgggcgagcctatcgtccgggcgatgtgttaaccaccatgtc

SEQ ID NO: 52933 - DNA, 75 bp, synthetic construct
  source 1..75: mol_type = other DNA
agcctgtttactctgcatgttatctggccgtttctgtggatctgggcgacgctctatcaaccggagcgcggctgg

SEQ ID NO: 52934 - DNA, 75 bp, synthetic construct
  source 1..75: mol_type = other DNA
ttatgtttattttttgtggggtgctcatcattacatttatatgggttgggtatataagtaagagactaaaaaatg

SEQ ID NO: 52935 - DNA, 75 bp, synthetic construct
  source 1..75: mol_type = other DNA
aagagacgctatacagttttgatcaactaaaaacgaataagaccgagccgcgtcgtccgctgcgtaaaatggtgt

SEQ ID NO: 52936 - DNA, 75 bp, synthetic construct
  source 1..75: mol_type = other DNA
cagaaggcatggatgagatgaagtacgatatgtgcggtgcggcagcggtttacggcgtgatgcgtatggtcgcgg

SEQ ID NO: 52937 - DNA, 75 bp, synthetic construct
  source 1..75: mol_type = other DNA
caatgaaaccttcagctttagtgcaaaagatatcttcgtggtgccgacctggcacggcgtgtcgttccagaccac

SEQ ID NO: 52938 - DNA, 75 bp, synthetic construct
  source 1..75: mol_type = other DNA
tggtgaagagctgctggagctggactatctggccaacatcttccgagtcggcggcgttgaccagttgactgacta

SEQ ID NO: 52939 - DNA, 75 bp, synthetic construct
  source 1..75: mol_type = other DNA
atgttccatatgaaggagtaaaagcccgtatgttcagattaaacgagagtattgatcaggctctacaccatttct

SEQ ID NO: 52940 - DNA, 75 bp, synthetic construct
  source 1..75: mol_type = other DNA
gattatctcgatttgagcgcctcagcgcgccgtagcatcgataaacattacgggatggggcgaaactgccacctg

SEQ ID NO: 52941 - DNA, 75 bp, synthetic construct
  source 1..75: mol_type = other DNA
agtgacgtccggccatccggtcaatccgctgctcggtgcaaaggtccttcccggtgaaaccgacatcgccctgcc

SEQ ID NO: 52942 - DNA, 75 bp, synthetic construct
  source 1..75: mol_type = other DNA
ttcccctcagcacagagcaacaggccgcatggcaggcggtggcggagacggaaaaacgccgccatcagggtaaca

SEQ ID NO: 52943 - DNA, 75 bp, synthetic construct
  source 1..75: mol_type = other DNA
ggccgtggtggctgctcggctggtgtgagcgggtgccggaagcggatgaggtgctgcctgcgccgctgccgccgt

SEQ ID NO: 52944 - DNA, 75 bp, synthetic construct
  source 1..75: mol_type = other DNA
ggggtatctgccgtatgggggcgtcagtgatggcgttatgggctttattcagtctgatgccggcgtatgccgcgc

SEQ ID NO: 52945 - DNA, 75 bp, synthetic construct
  source 1..75: mol_type = other DNA
aggtttgcatgctcgccagtatgtgatgattcagaaagcatctgattcacttaatccaacgatattggctgaggt

SEQ ID NO: 52946 - DNA, 75 bp, synthetic construct
  source 1..75: mol_type = other DNA
gtggcgagaggaagcctataccctcgatgaactggctgattatctcgatttgagcgcctcagcgcgtcgtagcat

SEQ ID NO: 52947 - DNA, 75 bp, synthetic construct
  source 1..75: mol_type = other DNA
gagttaagggcgaaagtttttggtcttaatattgagtcagagcttgaacggtttattaaagatatgcgtgatcca

SEQ ID NO: 52948 - DNA, 75 bp, synthetic construct
  source 1..75: mol_type = other DNA
ctggtttttgacgttgaccgcgagggggcagcgattgactggagtgaccggaacgctcccgcgccgaacatcacc

SEQ ID NO: 52949 - DNA, 75 bp, synthetic construct
  source 1..75: mol_type = other DNA
ttgctttatggaaagaggcacctgataccattgaactgttcagaacacgaataaatcatgcctggcatcagaaaa

SEQ ID NO: 52950 - DNA, 75 bp, synthetic construct
  source 1..75: mol_type = other DNA
tccggtgcggttagcctgcaaaatggcgtcgctggcgatacgctgacggtaaacggtgattataccggcggcggt

SEQ ID NO: 52951 - DNA, 75 bp, synthetic construct
  source 1..75: mol_type = other DNA
gctggctgttgcattgcataatattcctgaaggtctggcagttgcggggccggtttacgcggcaacggggtcaaa

SEQ ID NO: 52952 - DNA, 75 bp, synthetic construct
  source 1..75: mol_type = other DNA
gagattgaccccaataataaccccagctatggcgtgctatgtggaatgtcagtgatgggattcagtttagtgctg

SEQ ID NO: 52953 - DNA, 75 bp, synthetic construct
  source 1..75: mol_type = other DNA
tgctgaccgggcatgaaaatgaggttgtatcagcgcagccggataccgtgattcaggatgcggctgatctggtca

SEQ ID NO: 52954 - DNA, 75 bp, synthetic construct
  source 1..75: mol_type = other DNA
ttattaccgtctccgaggtggaatcgacaggataaccgcgcaggttaactacctgcaggaatacatcaggacgca

SEQ ID NO: 52955 - DNA, 75 bp, synthetic construct
  source 1..75: mol_type = other DNA
tgtgacgccgaaatggttgccgatgtgcgcgtactgggggcaatcggcgtggtcgaaaccactcgtccggtgaat

SEQ ID NO: 52956 - DNA, 75 bp, synthetic construct
  source 1..75: mol_type = other DNA
cgctgaccgggcatgaaaatgaggtggtatcagagccgccggataccgtaattcaggatacggctgatctggtca

SEQ ID NO: 52957 - DNA, 75 bp, synthetic construct
  source 1..75: mol_type = other DNA
cagtaagtccacgctggccgcggggatcatgatgacggcgctgttactgaactggcggcaggcggcgggctacac

SEQ ID NO: 52958 - DNA, 75 bp, synthetic construct
  source 1..75: mol_type = other DNA
tcgctgcgacctgctggtcattaaacctgaccagtatcagacacccgttgaactggatgacgaagaagacgatta

SEQ ID NO: 52959 - DNA, 75 bp, synthetic construct
  source 1..75: mol_type = other DNA
cgccattaactttcgtgaagggacattttccgggcagatagacgcacagcagcagaccgaccgcctcgcctggca

SEQ ID NO: 52960 - DNA, 75 bp, synthetic construct
  source 1..75: mol_type = other DNA
atgactcacaatgggcggtaatttgttccattactccaaagattggctgtacaccggagactctgcgtgtctggg

SEQ ID NO: 52961 - DNA, 75 bp, synthetic construct
  source 1..75: mol_type = other DNA
ctggtcaaagagacgatcgaactggcagaacaagtcaaccataccgaagttcatctggttggcgcttatccggta

SEQ ID NO: 52962 - DNA, 75 bp, synthetic construct
  source 1..75: mol_type = other DNA
ttaggcattatcgggtatggtttactgatggctgtcaccggtgcgctgattgatgaatcgcttgtggaaaaagcg

SEQ ID NO: 52963 - DNA, 75 bp, synthetic construct
  source 1..75: mol_type = other DNA
agtgggaatccggtcaggcgctggggctgtcgaaatcggctatctttttccgtctggtgatgccgcagatgtggc

SEQ ID NO: 52964 - DNA, 75 bp, synthetic construct
  source 1..75: mol_type = other DNA
gattctggccccgactgtggaggtggcggccaacgccttcaaccctgcccgggatatggtacgacgtgacgatga

SEQ ID NO: 52965 - DNA, 75 bp, synthetic construct
  source 1..75: mol_type = other DNA
gcctgcatgattttccccgctggtttgctgctgtagctgctgtgcgcgaccagggcgaacaggaaagggatgata

SEQ ID NO: 52966 - DNA, 75 bp, synthetic construct
  source 1..75: mol_type = other DNA
ttttcggataatgcggccctgtttgcccgttcggctgcctcgatgcgtgaatatggttacagtgccggtgatgta

SEQ ID NO: 52967 - DNA, 75 bp, synthetic construct
  source 1..75: mol_type = other DNA
agaaatacgtcgttacaacagacggcagaacataatttgtcgtgagagcaggaggagcgaagttatgcagcgtgt

SEQ ID NO: 52968 - DNA, 75 bp, synthetic construct
  source 1..75: mol_type = other DNA
accggattctacctgccccggattagaagagtatgatgctctctctccagtaacggcctggtcatgtaatgaatt

SEQ ID NO: 52969 - DNA, 75 bp, synthetic construct
  source 1..75: mol_type = other DNA
ggttgcatctgggacgaactgcaaaaaatttacgttaatgatgaactgttgctaaccagtcagagcggacagtta

SEQ ID NO: 52970 - DNA, 75 bp, synthetic construct
  source 1..75: mol_type = other DNA
tgagctgcatcttaaatcaggtgtggtaaaactgtttgccccccttactccggagcttcttagggtgctcattcg

SEQ ID NO: 52971 - DNA, 75 bp, synthetic construct
  source 1..75: mol_type = other DNA
gtatcttagccggacttcttgcaaacagacttgatttctcaaaaccgaagggcacctcagctcaaatgaatgaag

SEQ ID NO: 52972 - DNA, 75 bp, synthetic construct
  source 1..75: mol_type = other DNA
tggacgctgctgatgtcgtggatgcgattaaagcgtgctcatctttggttaacgatgcccgtgccgagctggtaa

SEQ ID NO: 52973 - DNA, 75 bp, synthetic construct
  source 1..75: mol_type = other DNA
tcgtcttcctgactgcgactgggtacacctggtcttcaccctgccggacacgcagtggccggtgttcgaaagcaa

SEQ ID NO: 52974 - DNA, 75 bp, synthetic construct
  source 1..75: mol_type = other DNA
atgctgagacacaacgttcctgtgcggcgggatctggaccggattgccgccgataacggatttgactttcatatc

SEQ ID NO: 52975 - DNA, 75 bp, synthetic construct
  source 1..75: mol_type = other DNA
tcctccggcgtgcgaacgtgacacgatctcaatcacgatccgtaaaccgtcaaaaattcaaattccgcatcaggc

SEQ ID NO: 52976 - DNA, 75 bp, synthetic construct
  source 1..75: mol_type = other DNA
tcacgtgcaaaaacaaggagagaaaagataagaaaagttgtacaaacaataaaagagtcaggcttctactctcca

SEQ ID NO: 52977 - DNA, 75 bp, synthetic construct
  source 1..75: mol_type = other DNA
cagtgaggcattcagcacggacaaggaaggcaacatcaacaccgggcgcgttctggccctgcgtcgcctcgaaat

SEQ ID NO: 52978 - DNA, 75 bp, synthetic construct
  source 1..75: mol_type = other DNA
gaaggcaacattaacaccgggcgcgttctggctctgcgtcgtctcgatattacggaggaacgctgggataacgcc

SEQ ID NO: 52979 - DNA, 75 bp, synthetic construct
  source 1..75: mol_type = other DNA
tccgggttgccaaaagccaggtggtgattgaaaaaggcgaacttggccgccacaaacaaattaaaatcattaatc

SEQ ID NO: 52980 - DNA, 75 bp, synthetic construct
  source 1..75: mol_type = other DNA
gaagattatatttatacttgcgtctgtctgtttttactaattgcccctgcaatattgatgtattcccgagcaagc

SEQ ID NO: 52981 - DNA, 75 bp, synthetic construct
  source 1..75: mol_type = other DNA
gatagatgtagtgattatattaatccagagcataaaaaaacgataaaggctttacaagatgctggctatctcaag

SEQ ID NO: 52982 - DNA, 75 bp, synthetic construct
  source 1..75: mol_type = other DNA
gattccggctctatcataacagcagcgaaattaatcaaatcctgtttgaggatgaaacctgacagaattttactg

SEQ ID NO: 52983 - DNA, 75 bp, synthetic construct
  source 1..75: mol_type = other DNA
atacgatgatgagcttcttgatttattcagagcgagaaatatcgctgcttttatggagcttgccgtagcagcagg

SEQ ID NO: 52984 - DNA, 75 bp, synthetic construct
  source 1..75: mol_type = other DNA
tgagagcgagcgtccgcgtcgctggaaatcagaaagggtgaatgtgcaggagctggccgggcatgagcaaagcga

SEQ ID NO: 52985 - DNA, 75 bp, synthetic construct
  source 1..75: mol_type = other DNA
tcccgttaactgcatcgatgttcattttaatcgggtgtaacgaaaaggtttatgatgttgattattatgttaata

SEQ ID NO: 52986 - DNA, 75 bp, synthetic construct
  source 1..75: mol_type = other DNA
cacgatgttcccgtgctgtctgaagccgaaatgaccatcgtccttgaaaaattcaaaacgtatggtttgaaagcg

SEQ ID NO: 52987 - DNA, 75 bp, synthetic construct
  source 1..75: mol_type = other DNA
tgaaatggcaatcgactggcgatgtcggcatcagtagcgcaactcttgcctcaatcgcatgtggcctgaaaaaga

SEQ ID NO: 52988 - DNA, 75 bp, synthetic construct
  source 1..75: mol_type = other DNA
tttgacgaggacgggctgggcgctggcgttcgcggcgatgcacgcgctatcaacgaactgcgtaacgctgcgcgt

SEQ ID NO: 52989 - DNA, 75 bp, synthetic construct
  source 1..75: mol_type = other DNA
gcaaggatgaagagtggtatcgcagggaatgcgagaaaatcgataatccggtggtggtggcacaggaacttgatc

SEQ ID NO: 52990 - DNA, 75 bp, synthetic construct
  source 1..75: mol_type = other DNA
ttaatcaacctataccattaaataacagcaacttatacctgtctgatggcgcgctctgcgaagcggtaacgcgtg

SEQ ID NO: 52991 - DNA, 75 bp, synthetic construct
  source 1..75: mol_type = other DNA
aagaagagcaaaaggacgggctgtgtgcctacggttgtagtgaagttcctgagcgtcctgccgcaggacgcccac

SEQ ID NO: 52992 - DNA, 75 bp, synthetic construct
  source 1..75: mol_type = other DNA
tattgctgccttttatcggcgcactggtcgtttcgttttcgccacaacgtcgggccgccgaatggggggttttgt

SEQ ID NO: 52993 - DNA, 75 bp, synthetic construct
  source 1..75: mol_type = other DNA
cggcggtgatgctggaaaaagtgatggcgctggcaggcagtgaaatgaagcgcctgtatgccgtcgggagtgaga

SEQ ID NO: 52994 - DNA, 75 bp, synthetic construct
  source 1..75: mol_type = other DNA
ctgagtcgccttggtgtggatattgtggaatacaccgtggaatgcggcccgggtattgcccgcccggaaaaatac

SEQ ID NO: 52995 - DNA, 75 bp, synthetic construct
  source 1..75: mol_type = other DNA
attacaggtatagatgagtctctctatgaaaagcatataatctttatcactcttaaggttattgtcccctcaaaa

SEQ ID NO: 52996 - DNA, 75 bp, synthetic construct
  source 1..75: mol_type = other DNA
tcctgagctgcggcgtgctgtagttcccggctgccagacctgttccagttgccaggaagagatcgaactgaagaa

SEQ ID NO: 52997 - DNA, 75 bp, synthetic construct
  source 1..75: mol_type = other DNA
tataccgccagcgagacgctgctgctggaagtgtcccgcgccatctacccggacaccacgcaactggagctgcgc

SEQ ID NO: 52998 - DNA, 75 bp, synthetic construct
  source 1..75: mol_type = other DNA
agttgaggaaattatttgtaaatccaattgggtttttccgtgactcatggttttttaattctaaaaacaaggctg

SEQ ID NO: 52999 - DNA, 75 bp, synthetic construct
  source 1..75: mol_type = other DNA
attccctcgttgctctgttgaagtctgaaatgaagatacacggaaacaaagcaccagagacttacaggagaatca

SEQ ID NO: 53000 - DNA, 75 bp, synthetic construct
  source 1..75: mol_type = other DNA
ccctggcgcgattatctttatgatcctcgcgggcctggcaccgtatctgtactttaagcggaagaactggttgta

SEQ ID NO: 53001 - DNA, 75 bp, synthetic construct
  source 1..75: mol_type = other DNA
atgctaacgattcaatttctctgtcctctgcctaacggtctgcatgctcgtccggcgtgggaacttaaagaacag

SEQ ID NO: 53002 - DNA, 75 bp, synthetic construct
  source 1..75: mol_type = other DNA
tgttagcccactggcagtcatcgctggttctgctggcgcgtgacgcaaaaggctttgcttcggtctgttatgacg

SEQ ID NO: 53003 - DNA, 75 bp, synthetic construct
  source 1..75: mol_type = other DNA
tcagggggagcatgaactctccatcctcaccggagttgagctggttgtcaaacgtggcgagaccatcgcactggt

SEQ ID NO: 53004 - DNA, 75 bp, synthetic construct
  source 1..75: mol_type = other DNA
ctatatccgccgtttgccgcaggatccgtgggggggagattaccagctattgaatcccgggcagcatggtgaaat

SEQ ID NO: 53005 - DNA, 75 bp, synthetic construct
  source 1..75: mol_type = other DNA
ttactttactggaagtcatggtggtcattgtaattcttggcgtgctggccagtttggtggtgccaaatctgatgg

SEQ ID NO: 53006 - DNA, 75 bp, synthetic construct
  source 1..75: mol_type = other DNA
ccacaacgaccgccagcgcgccgcaaaaaatggaggcgttcacctttggcgagccctccgccgttctggatcgcc

SEQ ID NO: 53007 - DNA, 75 bp, synthetic construct
  source 1..75: mol_type = other DNA
atgagtgatttcattactgaagatcagcgtcttgtcattctgcggtcgctggcggattacaacggcgaactgggc

SEQ ID NO: 53008 - DNA, 75 bp, synthetic construct
  source 1..75: mol_type = other DNA
caaattgttgataacaccagcacctcggatgttattgaagtttattccggtggcgtgcttgatgttagtggtggt

SEQ ID NO: 53009 - DNA, 75 bp, synthetic construct
  source 1..75: mol_type = other DNA
cactggatgcgattaccgaagctcaacgcattgcctttgcccctatgctttttcaaacagcactctgcctacgta

SEQ ID NO: 53010 - DNA, 75 bp, synthetic construct
  source 1..75: mol_type = other DNA
gttacacgtacccccgcttacaacgtaatgggaaatgttgcgctgtacttctccgccgaatcagggcaaataaat

SEQ ID NO: 53011 - DNA, 75 bp, synthetic construct
  source 1..75: mol_type = other DNA
gtggctgaccgtctgacggttcgcagcgcggaaatcatcccgtaccgcgtggaagccaccatttttctctatccg

SEQ ID NO: 53012 - DNA, 75 bp, synthetic construct
  source 1..75: mol_type = other DNA
atcccggggcggaaggcttcctgaatcgccttggtgtacagacccgtgacgccagcggcaacatgcgtgacatgg

SEQ ID NO: 53013 - DNA, 75 bp, synthetic construct
  source 1..75: mol_type = other DNA
caccccgtaggcctgataagtcacgtcagcggcgcatcaggcatcggttgtcggatgcgacgccatccgtcttat

SEQ ID NO: 53014 - DNA, 75 bp, synthetic construct
  source 1..75: mol_type = other DNA
cgaaacgaggagaacggaataacaatccgggaaaccttaattttgctggtcaggcgggggcttctcttgaacgcc

SEQ ID NO: 53015 - DNA, 75 bp, synthetic construct
  source 1..75: mol_type = other DNA
catccagatggatatgtttattacggtgatacaccagattttatcaaagggaaaatttatccctacggcaactgg

SEQ ID NO: 53016 - DNA, 75 bp, synthetic construct
  source 1..75: mol_type = other DNA
tttgcagcttcaggaaacagccaacagcagcaaagtagcaatcatcaaaatcatcctgaatacgacgattcaatt

SEQ ID NO: 53017 - DNA, 75 bp, synthetic construct
  source 1..75: mol_type = other DNA
tgataagtggatgcgtcacggtgccagtgagctgacatcagaagaacgaaaggcgttgcgtgaacttcgtgccca

SEQ ID NO: 53018 - DNA, 75 bp, synthetic construct
  source 1..75: mol_type = other DNA
gcgcaggcggtaatggtggcttacgcgatgggtggcgatcttgaccagatcgctgccaactacaacgtgaaacgc

SEQ ID NO: 53019 - DNA, 75 bp, synthetic construct
  source 1..75: mol_type = other DNA
gcgcaggcggtgatggtggcttacgcgattggcggagaccttgaccaaattgctgccaactacaacgtgaaacgc

SEQ ID NO: 53020 - DNA, 75 bp, synthetic construct
  source 1..75: mol_type = other DNA
cgatcttcaggatgttcctcctgatagccccgttctggatatggcgcagtggtcagaaaattacaacaaactgcg

SEQ ID NO: 53021 - DNA, 75 bp, synthetic construct
  source 1..75: mol_type = other DNA
tggtcatgcagacgcaataaaagcatattgtggcgtacttggcaatagtaatttgacaagaggtgagataatcag

SEQ ID NO: 53022 - DNA, 75 bp, synthetic construct
  source 1..75: mol_type = other DNA
gagcagcacagttcgcagccgctaagcgcgctctggcaggtgctgccggagagtctccgcttaagcccgcatgtg

SEQ ID NO: 53023 - DNA, 75 bp, synthetic construct
  source 1..75: mol_type = other DNA
cagcattgatgagcagcattatccagcatgagaatggaagaaatatctattctcgagagctgattaataaggctg

SEQ ID NO: 53024 - DNA, 75 bp, synthetic construct
  source 1..75: mol_type = other DNA
caaaatcggctctaatcttgctggtggtctggcgggttcgctggacacactgcgccgccacatcctcgataactt

SEQ ID NO: 53025 - DNA, 75 bp, synthetic construct
  source 1..75: mol_type = other DNA
ggttcggtatggcctttatcgaaaccgtcagtgcgctgatgaatgcaacacccggacgtgacctctgctggctcc

SEQ ID NO: 53026 - DNA, 75 bp, synthetic construct
  source 1..75: mol_type = other DNA
cgcaccatgaaagcccagcagccaccgattcgtatcatcgcgcctggccgcgtttatcgtaacgactacgaccag

SEQ ID NO: 53027 - DNA, 75 bp, synthetic construct
  source 1..75: mol_type = other DNA
ggaaaccagaattccggcaatgaaatttagtgaatgggatcaattccggtggtggttaaactacctgcaagggta

SEQ ID NO: 53028 - DNA, 75 bp, synthetic construct
  source 1..75: mol_type = other DNA
tgcgatgacaacacacaggattatcccacgaaaactgacctgggcggtcgcagtcatttactggtatcaacggag

SEQ ID NO: 53029 - DNA, 75 bp, synthetic construct
  source 1..75: mol_type = other DNA
tgctggcgcagtacgcctgtatgggacttggttttaagctggtggtggtctgcgatgacaacacacaggattatc

SEQ ID NO: 53030 - DNA, 75 bp, synthetic construct
  source 1..75: mol_type = other DNA
gcggaaaccggcctcttcatgaacgaaaagacgatgggctttatgctcgaggcgcagcccatcaacggcgccaac

SEQ ID NO: 53031 - DNA, 75 bp, synthetic construct
  source 1..75: mol_type = other DNA
acccgagcttcgcgcaggcgctggaaacctcgatggtatgtgaaatcccgttcgaaacgctggacgatttgtccg

SEQ ID NO: 53032 - DNA, 75 bp, synthetic construct
  source 1..75: mol_type = other DNA
agaacctcacgaatgctttccgtatgccggatggtgcatctgagatgacgcgtaatctggccagtctggattttc

SEQ ID NO: 53033 - DNA, 75 bp, synthetic construct
  source 1..75: mol_type = other DNA
agcaggacgtactgaacagcttccgtaaaaatggcttcgagctgatttccccgcgctttaaccatatgcgcaatt

SEQ ID NO: 53034 - DNA, 75 bp, synthetic construct
  source 1..75: mol_type = other DNA
tgacagaatccaggcggctgtcctccgtaaacagaatgaaatgcggcaacgctacggcatacaacaggaaagtta

SEQ ID NO: 53035 - DNA, 75 bp, synthetic construct
  source 1..75: mol_type = other DNA
gaggaaaaacctttaatggccttatttcttatttattaaaacctgcttcgcaccataagtcagatccgtatgtag

SEQ ID NO: 53036 - DNA, 75 bp, synthetic construct
  source 1..75: mol_type = other DNA
ttgataatgacaatcaaccaaatgaagaaagaatagaaaggaaaaaggcaaatgttctccgtgagatatctctga

SEQ ID NO: 53037 - DNA, 75 bp, synthetic construct
  source 1..75: mol_type = other DNA
atgaacggacaaatctcaattgttcgaccgggagcatgtgacgatcgcgagatacgaatgattattcgtctggcg

SEQ ID NO: 53038 - DNA, 75 bp, synthetic construct
  source 1..75: mol_type = other DNA
ttgctacagagacctgtattcgtggggaaagggaatgcgtcacacagaaaaactcagggcagaagacgagtccga

SEQ ID NO: 53039 - DNA, 75 bp, synthetic construct
  source 1..75: mol_type = other DNA
gcttaacgaagaggccgatttttatcgctacttaacccgtttaccgtgtggtcgtctggagcaggagtttttgcc

SEQ ID NO: 53040 - DNA, 75 bp, synthetic construct
  source 1..75: mol_type = other DNA
aataatatttcgttattaacccgactgttagacgtgcggttttcaggagaagccagcgagcagggattaacaact

SEQ ID NO: 53041 - DNA, 75 bp, synthetic construct
  source 1..75: mol_type = other DNA
gagatgctgctggagaagaacgcaacgctgactatctggcagggcgtcatcccgcagcgttatgtcacaggcgtg

SEQ ID NO: 53042 - DNA, 75 bp, synthetic construct
  source 1..75: mol_type = other DNA
ccagactgaaacgggccacggtcagaaatccgaatgcaaaaattatcgttaaccgcggtgatctccctgtgatta

SEQ ID NO: 53043 - DNA, 75 bp, synthetic construct
  source 1..75: mol_type = other DNA
gtcaccgcgttcgcccgacagctgggagacgaaacgttccgtctcgaccgtaccgagccgacgttaaacaccgcc

SEQ ID NO: 53044 - DNA, 75 bp, synthetic construct
  source 1..75: mol_type = other DNA
tcgacagaatctgttggtatcggtgcaggtgttgacgcttcagttatgactctggcttgtagaacgtggcaagaa

SEQ ID NO: 53045 - DNA, 75 bp, synthetic construct
  source 1..75: mol_type = other DNA
aatgtcccaggagtcttgtcatcggcagataacgccttcggatgtttccttgccggattggctggagaagatgcg

SEQ ID NO: 53046 - DNA, 75 bp, synthetic construct
  source 1..75: mol_type = other DNA
agctgttagtcatcaaaacactctcaatggacatgaatgtaggctatataagggcaacgcgcatccacttaccca

SEQ ID NO: 53047 - DNA, 75 bp, synthetic construct
  source 1..75: mol_type = other DNA
acaggttgcccgggagaccagggtgagccggaaactggtaaaggaacggtccagactgaaacgggccacggtcag

SEQ ID NO: 53048 - DNA, 75 bp, synthetic construct
  source 1..75: mol_type = other DNA
atagcagattttcgtgcattaccatttgcagacgcatcgtttccggttgttgtattcgaccctccgcatcttgag

SEQ ID NO: 53049 - DNA, 75 bp, synthetic construct
  source 1..75: mol_type = other DNA
gtttcactgggacaggtataacccggcaacggaggcgagttcgtgctgggtgagagtgtcccaggcgtgggcggg

SEQ ID NO: 53050 - DNA, 75 bp, synthetic construct
  source 1..75: mol_type = other DNA
gtttcactgggacaggtataacccggcaacggaggcgagttcgtgctgggtgcgcgtgtcccaggcgtgggcggg

SEQ ID NO: 53051 - DNA, 75 bp, synthetic construct
  source 1..75: mol_type = other DNA
gtttcactgggacaggtataacccggcaacggaggcgagttcgtgctgggtgcgagtgtcacaggcgtgggcggg

SEQ ID NO: 53052 - DNA, 75 bp, synthetic construct
  source 1..75: mol_type = other DNA
acgctgggcctgcgtgagaacggcaggaacagcacggcccgcatcctgaatttccatctggcccgtaacccggaa

SEQ ID NO: 53053 - DNA, 75 bp, synthetic construct
  source 1..75: mol_type = other DNA
tggtagaggattaattcaaatcactggcctccataattatcgcatctgtggcgcggcgctgaagttagatctggt

SEQ ID NO: 53054 - DNA, 75 bp, synthetic construct
  source 1..75: mol_type = other DNA
agtatgccgggtcaccgaccatccgcagccgtctggacgaaatgattgtgctgcttgaccagtacactgccaacg

SEQ ID NO: 53055 - DNA, 75 bp, synthetic construct
  source 1..75: mol_type = other DNA
attgagccggaagagcgcaaggtgctggaagagattgccggtgttctgggtcttcgtctggagaatcacctgtga

SEQ ID NO: 53056 - DNA, 75 bp, synthetic construct
  source 1..75: mol_type = other DNA
taaaaacgccattccggcggcttcagcaatggccattaaccgcgtggccacaacggcgattaatcagtcttcgtc

SEQ ID NO: 53057 - DNA, 75 bp, synthetic construct
  source 1..75: mol_type = other DNA
agtgcatcacgtagcaactctcgctacagcctgagcgaaacacacgcaacgccggatggctacccagtaaaacaa

SEQ ID NO: 53058 - DNA, 75 bp, synthetic construct
  source 1..75: mol_type = other DNA
tgtatccgccgatgagcaccttacttgagaagcaaggcattgaactgattcagggttacgatgccagccagctcg

SEQ ID NO: 53059 - DNA, 75 bp, synthetic construct
  source 1..75: mol_type = other DNA
ttcatccgaaagatgaacaggaagctgtgatgcgtacgctggaactggaatctgaacccgtcactaaattgttgc

SEQ ID NO: 53060 - DNA, 75 bp, synthetic construct
  source 1..75: mol_type = other DNA
ctggcccgtcaggcgcatacgagtattttgcacgcagcgccagcggtctggtacgcgacgcgcgagccatcagcc

SEQ ID NO: 53061 - DNA, 75 bp, synthetic construct
  source 1..75: mol_type = other DNA
gatgacgcatttgaaaataatattgctaaaactaatctttgcgccattctggaacaacacggcctgactaacctg

SEQ ID NO: 53062 - DNA, 75 bp, synthetic construct
  source 1..75: mol_type = other DNA
cgctgctaactacaacgtgaaacgcctgacggtgacacctgctgatgatgacgctgtaccgcccgttgcggctgt

SEQ ID NO: 53063 - DNA, 75 bp, synthetic construct
  source 1..75: mol_type = other DNA
gcgcagagagctttaatgtggccaacctgatgccgttagtggcggataaccccctgacaccggcaggtctgctgg

SEQ ID NO: 53064 - DNA, 75 bp, synthetic construct
  source 1..75: mol_type = other DNA
ctgcgtgtgcctgcagcctttgaggggctttcagttgcgggaccaactgccgcttatgaatttcatgcccgaagc

SEQ ID NO: 53065 - DNA, 75 bp, synthetic construct
  source 1..75: mol_type = other DNA
atgtcagaattaaaaattgccgttagtcgttcttgcccggattgtttttccactcatcgtgcatgcgtgaatatt

SEQ ID NO: 53066 - DNA, 75 bp, synthetic construct
  source 1..75: mol_type = other DNA
atgggggcttgtgtccgtaaggtgacgcttatgaatgcatggtatcttttatattgtaataacaacgatttagac

SEQ ID NO: 53067 - DNA, 75 bp, synthetic construct
  source 1..75: mol_type = other DNA
tgatagtcgcacgctaacgctggacaacgtgccgcgcgcgctcgccaacttcgacacgcgcggcttcatcaaact

SEQ ID NO: 53068 - DNA, 75 bp, synthetic construct
  source 1..75: mol_type = other DNA
gtgcaaccagcccggcacctgcagaggtggtgctaacggtcctaagccgtgaaggcgacggaacagcagaaaaag

SEQ ID NO: 53069 - DNA, 75 bp, synthetic construct
  source 1..75: mol_type = other DNA
cacatgaaaaagtcagagtgttgttgaccattgaaaatgggaaggtaattcactcaaaacatctgttggataatg

SEQ ID NO: 53070 - DNA, 75 bp, synthetic construct
  source 1..75: mol_type = other DNA
atcggcgaacacacctggctgattgagaaagctggaatagtggttcacagatgctcacgcaatccgtttaccgga

SEQ ID NO: 53071 - DNA, 75 bp, synthetic construct
  source 1..75: mol_type = other DNA
gtttgctcaatggctgtaatgcccgttcgctcaatttcgccaccagcgacaatcgcccgctgtatgtgattgcca

SEQ ID NO: 53072 - DNA, 75 bp, synthetic construct
  source 1..75: mol_type = other DNA
ggtttgaagacgccaccagtaatgagcaggtgtatatccatgcccagaagaacatggatacggaggtgctcaacg

SEQ ID NO: 53073 - DNA, 75 bp, synthetic construct
  source 1..75: mol_type = other DNA
gacgatatcggccacgttactgaacgagaacggcgtcacggagtggacgccgctgttttatgaggaccatccggc

SEQ ID NO: 53074 - DNA, 75 bp, synthetic construct
  source 1..75: mol_type = other DNA
ggtcgggtgtaaatacttcattcagctcgatgatgattatcacgagttccagtttcgggtggatcgcaactatga

SEQ ID NO: 53075 - DNA, 75 bp, synthetic construct
  source 1..75: mol_type = other DNA
tgcctgcaccgcagattgtggatgtgccggactttgagacgctgcttgccgaacgcaaggcccaatttgttgcgc

SEQ ID NO: 53076 - DNA, 75 bp, synthetic construct
  source 1..75: mol_type = other DNA
aaggtcgcaaagtcacgtcactactgaagcctgtggcgtggatgttcgtcatcgccgctctgctgatcgcactcg

SEQ ID NO: 53077 - DNA, 75 bp, synthetic construct
  source 1..75: mol_type = other DNA
cgtttattgccaccgtggcaggagaaatcactgtgtacaactaccggggcgacacccgcgaatacatatcctcat

SEQ ID NO: 53078 - DNA, 75 bp, synthetic construct
  source 1..75: mol_type = other DNA
attctggtggttttctggctggcattggtacgcaaaatgagaatgcaccaaaggcaagcgacattaacgcaacgc

SEQ ID NO: 53079 - DNA, 75 bp, synthetic construct
  source 1..75: mol_type = other DNA
gggccacgctgcatattgaggtgtttttaccggcacaggtaccggattcagagcttgatcagtggatggaaagcc

SEQ ID NO: 53080 - DNA, 75 bp, synthetic construct
  source 1..75: mol_type = other DNA
cggccattacccttacatctttattggcaggaacaaccgcagcaagccaatctcaaaagaaagtgtttcacaagt

SEQ ID NO: 53081 - DNA, 75 bp, synthetic construct
  source 1..75: mol_type = other DNA
cgtgacgctaccgaaacaccggcgacttctgccagccctcatcagttgccggaagacaatacagtgatacagagc

SEQ ID NO: 53082 - DNA, 75 bp, synthetic construct
  source 1..75: mol_type = other DNA
ccgctgtttaccctgattcgtgaggggaaactggctgcgaactggccactggagcaggatgagttactgacgcgt

SEQ ID NO: 53083 - DNA, 75 bp, synthetic construct
  source 1..75: mol_type = other DNA
tgagtgtgggcgagttctgctcccggaaagtgctgggtgtctgtctgcagaaaaagcgcagctactgccagtttg

SEQ ID NO: 53084 - DNA, 75 bp, synthetic construct
  source 1..75: mol_type = other DNA
acgatacggcatccacatcctgcatctggatgcggatggcgatctgctgcccggttttgccacctttgagtggtg

SEQ ID NO: 53085 - DNA, 75 bp, synthetic construct
  source 1..75: mol_type = other DNA
acatcggcacattgctgctcgcggcttcctggctggaagatcagtcaacggaagatgagagcgaagcactggaaa

SEQ ID NO: 53086 - DNA, 75 bp, synthetic construct
  source 1..75: mol_type = other DNA
ctgtttggtaacggtgctgtgacatccggtgtgttgcgtacggaacaaaagctcacgccggatgcttatgagcgc

SEQ ID NO: 53087 - DNA, 75 bp, synthetic construct
  source 1..75: mol_type = other DNA
tctgcaacttaaacgtctgggcctgtcaaaaacattccgtcgtctggttgtcacactcatccggcgttatggcgt

SEQ ID NO: 53088 - DNA, 75 bp, synthetic construct
  source 1..75: mol_type = other DNA
gtttcactgggacaggtataacccggcaacggaggcgagttcgtgctgggtgggcgtgtcgcaggcgtgggcggg

SEQ ID NO: 53089 - DNA, 75 bp, synthetic construct
  source 1..75: mol_type = other DNA
gcgatgtgccggaagtgatggctgactgtacgatttactctctcgatatcggttctctgttagcgggcacaaaat

SEQ ID NO: 53090 - DNA, 75 bp, synthetic construct
  source 1..75: mol_type = other DNA
gccagttatataactcagcacaacgtattcagggcagaatgcagaatcagggtgtggcggcagcaagggacatgg

SEQ ID NO: 53091 - DNA, 75 bp, synthetic construct
  source 1..75: mol_type = other DNA
atgcatgggcttctggtgatccatcgggactatttaagtttgccaaggaaaatccagcgtttgttgcgcaggcac

SEQ ID NO: 53092 - DNA, 75 bp, synthetic construct
  source 1..75: mol_type = other DNA
cggctgacgttcgggacttaccgtaagtccacgggggcatctgtaccgccgcgtgacttcacggtgcgtctgtat

SEQ ID NO: 53093 - DNA, 75 bp, synthetic construct
  source 1..75: mol_type = other DNA
ccatcaacacatcccgctggaaacccgccaccggaatgtcttccgcgtctacacgctcgacgagttgcaacggct

SEQ ID NO: 53094 - DNA, 75 bp, synthetic construct
  source 1..75: mol_type = other DNA
actcgctgtcacaccagaccagtgacgttggtgaatcagaatggattcatttcacaggtagcggctatctgttac

SEQ ID NO: 53095 - DNA, 75 bp, synthetic construct
  source 1..75: mol_type = other DNA
atggcgcgatttgtggtgttagtgattgatagctttggcgtaggggcaatgaaagatgtcacgctggtgcgtccg

SEQ ID NO: 53096 - DNA, 75 bp, synthetic construct
  source 1..75: mol_type = other DNA
attcattgtctgccatgtgttccgattaatgaggtggcaaaagagaaactaccgcattacgtcatgagtgcaacc

SEQ ID NO: 53097 - DNA, 75 bp, synthetic construct
  source 1..75: mol_type = other DNA
gtacagtgaatgtggagatatggggcaccagcaactcctgcgctttcatcttccatcgaatttttcatgttgccg

SEQ ID NO: 53098 - DNA, 75 bp, synthetic construct
  source 1..75: mol_type = other DNA
gcgatctgcgcagccagttcagaatggacgtgaagggtgagcgaccagtgttaccaaaccgttccgatgctgcca

SEQ ID NO: 53099 - DNA, 75 bp, synthetic construct
  source 1..75: mol_type = other DNA
actattacagcctgtatgaacgttattttgcgccgcgcggcattgcgatgctgactattgatatgccgtcggtgg

SEQ ID NO: 53100 - DNA, 75 bp, synthetic construct
  source 1..75: mol_type = other DNA
attaatcagctgctttatacgcccaaacacaccgcgcgcttattacaggtgctgaaaaagcagtttcctacctgc

SEQ ID NO: 53101 - DNA, 75 bp, synthetic construct
  source 1..75: mol_type = other DNA
actgaacatggggcgcattgtcgttgacgtcgatggtattgagcttgctgaactgattaacgtggtctgcaataa

SEQ ID NO: 53102 - DNA, 75 bp, synthetic construct
  source 1..75: mol_type = other DNA
gtcgatggtgttactctcgctgaactgattaacgtggtctgtgataatggccactcccttcgtgttgttgatgaa

SEQ ID NO: 53103 - DNA, 75 bp, synthetic construct
  source 1..75: mol_type = other DNA
atgattgatttgcaacagcgttatgaaactattaagtcggcttgtgaaaacttaaagttacaagccaatccagcc

SEQ ID NO: 53104 - DNA, 75 bp, synthetic construct
  source 1..75: mol_type = other DNA
acaccgtggatatgcgaagtatcttgaggcagataacctcatggatgatgcgtccgatatggtgctgttcgatga

SEQ ID NO: 53105 - DNA, 75 bp, synthetic construct
  source 1..75: mol_type = other DNA
gcaacagcgaatctctggtatgtggcgtgttccccaaccaggacggtacgttcaccgcaatgacgtataccaaaa

SEQ ID NO: 53106 - DNA, 75 bp, synthetic construct
  source 1..75: mol_type = other DNA
taccatgaggacaaccgttcgccggggagcctgccggggacgaagacgcagatgacgatacggtcgaagacctat

SEQ ID NO: 53107 - DNA, 75 bp, synthetic construct
  source 1..75: mol_type = other DNA
ggcggagctgttgcaccgcctggcacagggtgaaaaggggacgccggaattatccctgcgcgacgatccggcaca

SEQ ID NO: 53108 - DNA, 75 bp, synthetic construct
  source 1..75: mol_type = other DNA
aatcacagcaccaggcgactatcccgaaaatacaaccactctcgcaccgttaacgccatacgataaatgggatgg

SEQ ID NO: 53109 - DNA, 75 bp, synthetic construct
  source 1..75: mol_type = other DNA
gcgacgatgtggcggggctgtcacaggcgggagagcttccgtttaacccggacacatcggcaggagcggagacag

SEQ ID NO: 53110 - DNA, 75 bp, synthetic construct
  source 1..75: mol_type = other DNA
atgtcgcagacagaaaatgcagtgacttcctcatcaggcaccaagcgtgcataccggaaaggtaaccctgttccg

SEQ ID NO: 53111 - DNA, 75 bp, synthetic construct
  source 1..75: mol_type = other DNA
tccgaaccgctagcaaggcaaagagcacggggcacatcaacccaaaatatggcagcagcccaggacggactttct

SEQ ID NO: 53112 - DNA, 75 bp, synthetic construct
  source 1..75: mol_type = other DNA
caaaaccgagcagttctgtccgaatgccaaaattattcatgtcgatatcgaccgcgcagagctgggcaaaatcaa

SEQ ID NO: 53113 - DNA, 75 bp, synthetic construct
  source 1..75: mol_type = other DNA
atgacgacttttaccagagagcagttaatagctcacgcagaggagactattgaagcacagagactgtgcataccg

SEQ ID NO: 53114 - DNA, 75 bp, synthetic construct
  source 1..75: mol_type = other DNA
atggccggatatcaggaaagccgttatagctttacagccagaggtggttcctatatctacagttctgaggaggga

SEQ ID NO: 53115 - DNA, 75 bp, synthetic construct
  source 1..75: mol_type = other DNA
tgccaccctccgctgccctgagcggtatacgctgcagcacctcacatatcacggaaacagacaacgcttggctgt

SEQ ID NO: 53116 - DNA, 75 bp, synthetic construct
  source 1..75: mol_type = other DNA
gcacctgaagagggtggacgaaaagccagtcagctggactggaaatacagcaacgccgctattattaaaggtgct

SEQ ID NO: 53117 - DNA, 75 bp, synthetic construct
  source 1..75: mol_type = other DNA
gacacatcggcaggagcggagacggagtgtgtcagtatgttccgttatgaggcgcatgtccgcccgtcatcggtg

SEQ ID NO: 53118 - DNA, 75 bp, synthetic construct
  source 1..75: mol_type = other DNA
agggcaaacacaaccagccccaagagaaagcattcttatacgaatttctaaaagtgaaggtgttagtcttgagtg

SEQ ID NO: 53119 - DNA, 75 bp, synthetic construct
  source 1..75: mol_type = other DNA
aaccgggaacgagcggcactggctgcgtacacctgggaagtgctggtccgccaactgaaaaaggcgcgtcagcag

SEQ ID NO: 53120 - DNA, 75 bp, synthetic construct
  source 1..75: mol_type = other DNA
gaacatggggcgcattgtcgttgacgtcgatggtattgagctcgctgaactgattaacgtggtctgcgataacgg

SEQ ID NO: 53121 - DNA, 75 bp, synthetic construct
  source 1..75: mol_type = other DNA
ttctacgaaatctgcgccctgtccgagctgaagaacgccctgcgctccggcgacatctgggtcaagggctcgcgg

SEQ ID NO: 53122 - DNA, 75 bp, synthetic construct
  source 1..75: mol_type = other DNA
tgcagcgctggacttatgctggcggcaagcagtggaaggggctgatcacccggcgcgagattgagcgtgaagtct

SEQ ID NO: 53123 - DNA, 75 bp, synthetic construct
  source 1..75: mol_type = other DNA
cttgtccggggcgacaggtttgcaggtgacacaggggcaggtactgaccggcagtggctgtactgctaacggtaa

SEQ ID NO: 53124 - DNA, 75 bp, synthetic construct
  source 1..75: mol_type = other DNA
attacggttgatgagctgcagaaaattcagttcgacagactggatttcactaacttctacgaagacctgatgaat

SEQ ID NO: 53125 - DNA, 75 bp, synthetic construct
  source 1..75: mol_type = other DNA
caatatagtgcatcaaccgcccgctgcggcattgttaccggaacggctggaaaaagtttgccagtggttaaacag

SEQ ID NO: 53126 - DNA, 75 bp, synthetic construct
  source 1..75: mol_type = other DNA
gattatattgacgcgttgacggcaacagataccagcaccgcgccggatgtcatctggcctgaactgccggaggcg

SEQ ID NO: 53127 - DNA, 75 bp, synthetic construct
  source 1..75: mol_type = other DNA
cggctggtgtggagttgtctggggctgtatatcgtctttctgacggcgctggagttcaaacaagagctgtgggga

SEQ ID NO: 53128 - DNA, 75 bp, synthetic construct
  source 1..75: mol_type = other DNA
gacatgtacgaaccgctgccggtctacaaacctgctgccagccgtatgcagatcgaaaaagctgtagaaatgtta

SEQ ID NO: 53129 - DNA, 75 bp, synthetic construct
  source 1..75: mol_type = other DNA
aatataatgaattatgtgaagctgcagaaggtcgtaatttgggggccgttttttcctatagtgaaccagaagaac

SEQ ID NO: 53130 - DNA, 75 bp, synthetic construct
  source 1..75: mol_type = other DNA
ccgcaggcgcttcacggcagccaggggagaggaaccacgctgggcaatcagttagaggtgataccggcggaccgg

SEQ ID NO: 53131 - DNA, 75 bp, synthetic construct
  source 1..75: mol_type = other DNA
gttatcgacgaagcgggcgctcgcgcacgcctgatgccggtaagcaaacgcaagaaaaccgttaatgtggcggat

SEQ ID NO: 53132 - DNA, 75 bp, synthetic construct
  source 1..75: mol_type = other DNA
gtttcactgggacaggtataacccggcaacggaggcgagttcgtgctgggtgtgtgtgtcccaggcgtgggcggg

SEQ ID NO: 53133 - DNA, 75 bp, synthetic construct
  source 1..75: mol_type = other DNA
gctattcaatgaccgtacagccagttcatgtctccacccgcacggcagcacggggaatactggagatggcgctgt

SEQ ID NO: 53134 - DNA, 75 bp, synthetic construct
  source 1..75: mol_type = other DNA
gaaagcgcacccggacgtgttcaacatcctcttgcaggtgatggacaacggtacactgaccgataacaacggacg

SEQ ID NO: 53135 - DNA, 75 bp, synthetic construct
  source 1..75: mol_type = other DNA
aaccatcgaaaaatcgaacgcagccacggcaacggtgctgcaattcctctcaccgactattatcgtcgcctggtt

SEQ ID NO: 53136 - DNA, 75 bp, synthetic construct
  source 1..75: mol_type = other DNA
ctgttctcccgttagagttattaagtgcatatggccttaattattcaggagagagtggtgtcacagggcttctgt

SEQ ID NO: 53137 - DNA, 75 bp, synthetic construct
  source 1..75: mol_type = other DNA
gtttcactgggacaggtataacccggcaacggaggcgagttcgtgctgggtgcgtgtgtctcaggcgtgggcggg

SEQ ID NO: 53138 - DNA, 75 bp, synthetic construct
  source 1..75: mol_type = other DNA
ctgcaaccagcctgtaatgaaatgtatcgcgtactcaaaaaagatgcgctgatggtcagcttctacggctggaac

SEQ ID NO: 53139 - DNA, 75 bp, synthetic construct
  source 1..75: mol_type = other DNA
attttactggttccatgctgtcgtggtggttcggcattcacccagggcgcggaggggacattcagcgagtccaca

SEQ ID NO: 53140 - DNA, 75 bp, synthetic construct
  source 1..75: mol_type = other DNA
cactgtgagtggagtttcatcgcagggcgaagccggagatactgaattcctgaaggaagtaaaaggagcttacca

SEQ ID NO: 53141 - DNA, 75 bp, synthetic construct
  source 1..75: mol_type = other DNA
ggtgaacgtgcacgggcagttcggcggcattgtttactatcaggagattcagccgctgacattcgattgccacgc

SEQ ID NO: 53142 - DNA, 75 bp, synthetic construct
  source 1..75: mol_type = other DNA
gcaatacacaactgtccatgcagggacatgccactgaacatgccatttatcgggatggtgctttctcttgttcac

SEQ ID NO: 53143 - DNA, 75 bp, synthetic construct
  source 1..75: mol_type = other DNA
cttccgtcaaagatattattgccggcggaaacaccaatatacgcagaacacctggcgttcgtgaagaaaaactga

SEQ ID NO: 53144 - DNA, 75 bp, synthetic construct
  source 1..75: mol_type = other DNA
gcgggttataccaccgtcagggtactttccacggccggcagcaactccgtttttggtcgactggtcaatgccgtc

SEQ ID NO: 53145 - DNA, 75 bp, synthetic construct
  source 1..75: mol_type = other DNA
cacagcgccagtcgctgattgatgctgcaatggcttccatcagtctgattcaactgaaattacaggctgggcgga

SEQ ID NO: 53146 - DNA, 75 bp, synthetic construct
  source 1..75: mol_type = other DNA
cgctggcgcagtttcagcgcgcgatgcagctcgaccgcaatgccggtgtgcgcaaggagattgagcgactggaac

SEQ ID NO: 53147 - DNA, 75 bp, synthetic construct
  source 1..75: mol_type = other DNA
agcttattgccacgaaggcgggaaatattcctgtctataactatgatggtgaaacacgggaatatatttccactt

SEQ ID NO: 53148 - DNA, 75 bp, synthetic construct
  source 1..75: mol_type = other DNA
ctgaaacgctggcagcgacaccaaaagcggttaaggcggtaatggatgaaacgaacaagaaagccccattaaaca

SEQ ID NO: 53149 - DNA, 75 bp, synthetic construct
  source 1..75: mol_type = other DNA
aactgcaccgccagatatggcaaattgccaatgatgtcagaggttctgttgacggatgggattttaaacagtacg

SEQ ID NO: 53150 - DNA, 75 bp, synthetic construct
  source 1..75: mol_type = other DNA
aaaccgcgcattctgggtgtaccaggtcacgacaccaaggcggtagctactgagttgctgagtgtggcgcaaagc

SEQ ID NO: 53151 - DNA, 75 bp, synthetic construct
  source 1..75: mol_type = other DNA
tctgcggcttaagcgcctggggctgtcaaaaacgttccgtcgtctggtcgtcacactcatccggtgttatggtgt

SEQ ID NO: 53152 - DNA, 75 bp, synthetic construct
  source 1..75: mol_type = other DNA
aacgccaactgcgccaaaagggactaataatactcagatcgcaagcacggcttatgtgatggccgcgattgccgc

SEQ ID NO: 53153 - DNA, 75 bp, synthetic construct
  source 1..75: mol_type = other DNA
cccggtgcctcctctcgaaaacctgaccctgcgccagcgtattacttccagatacctggcaagtctggtcacttc

SEQ ID NO: 53154 - DNA, 75 bp, synthetic construct
  source 1..75: mol_type = other DNA
accgcagtaacaatatccttcgccaggcttccgcttattttgcgaaggcggagttcgaccgcctctggaaaaaat

SEQ ID NO: 53155 - DNA, 75 bp, synthetic construct
  source 1..75: mol_type = other DNA
cgctcggatacgctgaagcgttgacacgttcatctgatcccaacgacaaccgcctcggtggtgaactgctacgcc

SEQ ID NO: 53156 - DNA, 75 bp, synthetic construct
  source 1..75: mol_type = other DNA
cccggtgcctcctctcgaaaacctgaccctgcgccagcgtattaccgataaatacctggcaaatctggtcacctc

SEQ ID NO: 53157 - DNA, 75 bp, synthetic construct
  source 1..75: mol_type = other DNA
tgtcccctgaagtacagaacgcagtcctggttaaattcgacacatgcgaaaacatcaccgttgatatggtgatta

SEQ ID NO: 53158 - DNA, 75 bp, synthetic construct
  source 1..75: mol_type = other DNA
ggcatatggatgatatcgatgattacccctatggtctggtttttcttctttcaggatgatgtcatcattcggcgg

SEQ ID NO: 53159 - DNA, 75 bp, synthetic construct
  source 1..75: mol_type = other DNA
caatggcaacggataactgtgcccgctgggtgttgtctgtagtccgtcgggatctcggttttgatgataaccatg

SEQ ID NO: 53160 - DNA, 75 bp, synthetic construct
  source 1..75: mol_type = other DNA
atgctggttcagcgaagaatccaacgatgcggaaaccctcaaggccggaaaactgtatatcgactacgactatac

SEQ ID NO: 53161 - DNA, 75 bp, synthetic construct
  source 1..75: mol_type = other DNA
ctggttcatgagctgcgccgcaagccgcttaatagtctgagcattgacccgaataacgccaaccagattattgcc

SEQ ID NO: 53162 - DNA, 75 bp, synthetic construct
  source 1..75: mol_type = other DNA
tttacggggaatgatgtcgccagcctggcaaccctgacaaaagtcgggcgggatattcttgcgaaatcgaccgtt

SEQ ID NO: 53163 - DNA, 75 bp, synthetic construct
  source 1..75: mol_type = other DNA
cgcatgtaacagtgaaccatcgcaagacgatatatacaatgctttcaaaagtgttgtagataaatcaaatgccag

SEQ ID NO: 53164 - DNA, 75 bp, synthetic construct
  source 1..75: mol_type = other DNA
cgtatggctgcaagacggtacaggaggcgatcacttaccgtgaaaacttcagccagcgcgaaggaatgctgatct

SEQ ID NO: 53165 - DNA, 75 bp, synthetic construct
  source 1..75: mol_type = other DNA
gccaggtaaagcaaaaactactcagtactccagaagctgtcaaagggtatgaggatgctgacaaagaactggaga

SEQ ID NO: 53166 - DNA, 75 bp, synthetic construct
  source 1..75: mol_type = other DNA
tacgccggagactctgcgtgtctgggttcgccagcatgagcgggataccggggcggtgatggtgggctcaccagc

SEQ ID NO: 53167 - DNA, 75 bp, synthetic construct
  source 1..75: mol_type = other DNA
tccttgaaggtggcatggattataagcagctgggcatgagcaatcaggatgccgaatggctggcctctcgtcgct

SEQ ID NO: 53168 - DNA, 75 bp, synthetic construct
  source 1..75: mol_type = other DNA
tcacgacactggtgcgtaaggatggcttccgcttttggggtaaccgcacctgctctgatgacccgcttttcctgt

SEQ ID NO: 53169 - DNA, 75 bp, synthetic construct
  source 1..75: mol_type = other DNA
gcagctgggcatgagcaatcaggatgccgaatggctggcctctcgtcgcttcaccattgaagacattgcccgcat

SEQ ID NO: 53170 - DNA, 75 bp, synthetic construct
  source 1..75: mol_type = other DNA
gcaggacccggcaaccgatgcaggtctgctgaaccagaacgacgtcaccacgcttgtgcgcaaggatggtttccg

SEQ ID NO: 53171 - DNA, 75 bp, synthetic construct
  source 1..75: mol_type = other DNA
gaaagagctgaaacgggttaccgacgaacgggacatattaaaaaaagccgcgtacttcgcaaagctgtccgactg

SEQ ID NO: 53172 - DNA, 75 bp, synthetic construct
  source 1..75: mol_type = other DNA
tgcgcgccaaaattgacgagcagaccggatggcacaaaagcctgtccaacgtgggcgtgaacggtgtcaccggaa

SEQ ID NO: 53173 - DNA, 75 bp, synthetic construct
  source 1..75: mol_type = other DNA
caaagttgaggttatggatgtagaaggcgaacccggctggtaccaggttgcgctaagcgtgaggcctcattttaa

SEQ ID NO: 53174 - DNA, 75 bp, synthetic construct
  source 1..75: mol_type = other DNA
acaggagccgcatccagacgatttatcagccggggagcttcacgccactcatcagggtcgaaactgccaccggtg

SEQ ID NO: 53175 - DNA, 75 bp, synthetic construct
  source 1..75: mol_type = other DNA
gcgtgatggtggcgatgagttcagccaggcctggaaacaggagatcgaagtaaaggatgataaagagggcaaatc

SEQ ID NO: 53176 - DNA, 75 bp, synthetic construct
  source 1..75: mol_type = other DNA
atgagcaaagcagttattgtcattccggctcgctatggctcctcgcgcctgccgggtaagccactgctcgatatt

SEQ ID NO: 53177 - DNA, 75 bp, synthetic construct
  source 1..75: mol_type = other DNA
ttgtcgctaatgactataacctgtcggtgagctgctatgtagaagcgaaagataaccgcgaaattatcaatattg

SEQ ID NO: 53178 - DNA, 75 bp, synthetic construct
  source 1..75: mol_type = other DNA
aataccctgctgatgtgtgatgaagcgccctgcatcataccaccggctaacccggtgtcttcgccctcagagccg

SEQ ID NO: 53179 - DNA, 75 bp, synthetic construct
  source 1..75: mol_type = other DNA
ctggagcgtgaaaatcgtgaactgcgccgcagtaacgatatccttcgccaggcttccgcttattttgcgaaggcg

SEQ ID NO: 53180 - DNA, 75 bp, synthetic construct
  source 1..75: mol_type = other DNA
tatcgccgcgtgatggtggcgatgagttcagccaggcctggaaacaggagatcgaagtaaaggacgataaagagg

SEQ ID NO: 53181 - DNA, 75 bp, synthetic construct
  source 1..75: mol_type = other DNA
agcgtctgtgcggttgcggaaagcatgatgactgtgaacacgggcagtcgcttacagtacaactgcgactggggc

SEQ ID NO: 53182 - DNA, 75 bp, synthetic construct
  source 1..75: mol_type = other DNA
gtatctgagaaatcatgaaggctgcccacactgctggcgtggcgtgacggggcgaacggttatcgcagaagtcat

SEQ ID NO: 53183 - DNA, 75 bp, synthetic construct
  source 1..75: mol_type = other DNA
cggatgatattctggattatgtggccatcgacaccgacaacaccggacaactgcggatcagagttgtggagggga

SEQ ID NO: 53184 - DNA, 75 bp, synthetic construct
  source 1..75: mol_type = other DNA
aatccgcgatcacgattccgccattacggcaataaaagccgccatgaccgggcatctgatgctgaccaccatcca

SEQ ID NO: 53185 - DNA, 75 bp, synthetic construct
  source 1..75: mol_type = other DNA
agatgcaatcgcgcaggcaattgaagcaaatcactatatatacaaaaactactctactgctgccttaattgaaaa

SEQ ID NO: 53186 - DNA, 75 bp, synthetic construct
  source 1..75: mol_type = other DNA
caatggcgatataccgccagcatcctcagtcccggttgtttcgcttctgcacgggtaaatacaaatggtccggca

SEQ ID NO: 53187 - DNA, 75 bp, synthetic construct
  source 1..75: mol_type = other DNA
taatatcccccgtcatatgctgtttgatgtgcaaatgcctggcaccgtcctcggacatatcacaccacaagccgc

SEQ ID NO: 53188 - DNA, 75 bp, synthetic construct
  source 1..75: mol_type = other DNA
gtgtttgaagccgtagccaaactgcttgaaccttatatcctgaaagcggttaatgccgattcgtgcaaggttgaa

SEQ ID NO: 53189 - DNA, 75 bp, synthetic construct
  source 1..75: mol_type = other DNA
atgagtaagtcgaaaatgattgtgcgcaccaaatttattgatcgcgcctgtcactggaccgtggtgatttgcttc

SEQ ID NO: 53190 - DNA, 75 bp, synthetic construct
  source 1..75: mol_type = other DNA
tcgatatttataatgaaatcctgcgcatgctgtccaaccgcattgccggattggggctgtcgattatggcggtgg

SEQ ID NO: 53191 - DNA, 75 bp, synthetic construct
  source 1..75: mol_type = other DNA
cgtgaagcgttatcgctggtgacatggggttgtgctttctttgttgccagtcattactacacttacctgtcagtc

SEQ ID NO: 53192 - DNA, 75 bp, synthetic construct
  source 1..75: mol_type = other DNA
gggcagcgccaacggcgttgagctgagcgggttaaaactggatgaagataaaaagcgagtgatggaaataatgca

SEQ ID NO: 53193 - DNA, 75 bp, synthetic construct
  source 1..75: mol_type = other DNA
cctggacgctctggagtccgagctttaccgcaacctgcaccccctatatccaaaaacggtaattcgtatccgcaa

SEQ ID NO: 53194 - DNA, 75 bp, synthetic construct
  source 1..75: mol_type = other DNA
ttgcccgtggcctgcgcgcgattttgcgtcaggacccggatgtggtgatggtcggtgaaatccgcgataccgaaa

SEQ ID NO: 53195 - DNA, 75 bp, synthetic construct
  source 1..75: mol_type = other DNA
ttcccaatgaccttcgcattgcacagcacgtttaaccaatcctcaagttctttggcttcccttctgggctttagt

SEQ ID NO: 53196 - DNA, 75 bp, synthetic construct
  source 1..75: mol_type = other DNA
tgggccattatacattcacactgccagaggatattttaaaaggagagctgagagctctaaatttaaatataaaca

SEQ ID NO: 53197 - DNA, 75 bp, synthetic construct
  source 1..75: mol_type = other DNA
gtgcgtattgccagcagaacgcatatcagtattcagaactggtcgccatccggagagggcaccgaagattgttgt

SEQ ID NO: 53198 - DNA, 75 bp, synthetic construct
  source 1..75: mol_type = other DNA
caggctatattggctcgcatactagtttatgtcttctgaataaaggttacaatgttgtaataattgacaacttaa

SEQ ID NO: 53199 - DNA, 75 bp, synthetic construct
  source 1..75: mol_type = other DNA
atcttatcgccctgctgacagcggcaacggtcctgacagcctgcacgccaaagggcagtatggaacaacataccc

SEQ ID NO: 53200 - DNA, 75 bp, synthetic construct
  source 1..75: mol_type = other DNA
tggcgtagacctgaaaacagcaagtggtcgctataatttccgtaatattctttctgctgcgcagtatgaatctga

SEQ ID NO: 53201 - DNA, 75 bp, synthetic construct
  source 1..75: mol_type = other DNA
accagaaccagcaagaaacggaacagaacgaccagaaagcggaacaaaacagcccaaatgcgttacaaaacgagc

SEQ ID NO: 53202 - DNA, 75 bp, synthetic construct
  source 1..75: mol_type = other DNA
gctaaaaatgaggttatcgacaaggatcgcgaagactggaagcgtatctctgcatcaatgcgcaaacagcctgat

SEQ ID NO: 53203 - DNA, 75 bp, synthetic construct
  source 1..75: mol_type = other DNA
gcggcaactgccctgattgtggcgcggtaatgggcgacgcaacataccaggaaacattcgatgaagagtatcagg

SEQ ID NO: 53204 - DNA, 75 bp, synthetic construct
  source 1..75: mol_type = other DNA
ctgggcaaactgggaaacctgctggggaaaagcgggaagctgctgggtgcaaaactcggcgcattgctgagcaga

SEQ ID NO: 53205 - DNA, 75 bp, synthetic construct
  source 1..75: mol_type = other DNA
gcgcacaggaattgttgcaggaagacatggcaaccttcgacggacatatcgttgaagcgttgatgaaaatgccag

SEQ ID NO: 53206 - DNA, 75 bp, synthetic construct
  source 1..75: mol_type = other DNA
aaattggaaaacatcttttttatgtaatcttgccagattactatatagcatgtttaatggtagtgtctattttcc

SEQ ID NO: 53207 - DNA, 75 bp, synthetic construct
  source 1..75: mol_type = other DNA
aattaagaagcatcagacacgcatcacccagatggacagccagattttgtccctgtatgccaaaggcatgactac

SEQ ID NO: 53208 - DNA, 75 bp, synthetic construct
  source 1..75: mol_type = other DNA
ctgccgcaaaatatggcggcagttgccagcccggcagcactgctcatcggctggggtattactggcgctggcatt

SEQ ID NO: 53209 - DNA, 75 bp, synthetic construct
  source 1..75: mol_type = other DNA
ttggtggtgattgctggctggacgagtcggtgaacgataaagacactctgaaagccgggaagctcaccatcgact

SEQ ID NO: 53210 - DNA, 75 bp, synthetic construct
  source 1..75: mol_type = other DNA
ggaagggatgataatactagtcgatcctgaagtagaacctcgtaatgggaagctggtagtggcaaagctcgaagg

SEQ ID NO: 53211 - DNA, 75 bp, synthetic construct
  source 1..75: mol_type = other DNA
gcattcgcgctcggagaaaagaactcaagatcaggcaggccgcacttggaaagatggtcggcgtgtctaatgttg

SEQ ID NO: 53212 - DNA, 75 bp, synthetic construct
  source 1..75: mol_type = other DNA
aaaaaacaggtatgaaagccctgttatctgcccagtcccagctcggcgttaaaccgcgtattctcggcgtgccag

SEQ ID NO: 53213 - DNA, 75 bp, synthetic construct
  source 1..75: mol_type = other DNA
gtggctctcccctttttgcctgggatacgcaacgtaataaatgggtgttggttgcagtactcaattcctatgcgg

SEQ ID NO: 53214 - DNA, 75 bp, synthetic construct
  source 1..75: mol_type = other DNA
tatcggcctgaccgttgagaaatcagcatttggtaagtacaacgtcgataatgcgatcaatgctaatatccgcta

SEQ ID NO: 53215 - DNA, 75 bp, synthetic construct
  source 1..75: mol_type = other DNA
gccagttatctgcaatatgggcatatcgccggtattgatgaaattcttgaagggaaaaaccgattaccgatctcg

SEQ ID NO: 53216 - DNA, 75 bp, synthetic construct
  source 1..75: mol_type = other DNA
tggaaagtgacgacgatgcgccgatcatcaaactgatcaacgccatgctggcagaggcgattaaagaaggcgctt

SEQ ID NO: 53217 - DNA, 75 bp, synthetic construct
  source 1..75: mol_type = other DNA
gcgtcaggacccggatgtggtgatggtcggtgaaatccgcgataccgaaaccgcagaaatcgccgttcaggcgtc

SEQ ID NO: 53218 - DNA, 75 bp, synthetic construct
  source 1..75: mol_type = other DNA
ccggggcgttgtgcctgttctggtcgtggctggtggcgcgatatctcgaccgtacgcggcagtctgtcggcggag

SEQ ID NO: 53219 - DNA, 75 bp, synthetic construct
  source 1..75: mol_type = other DNA
atccagctggttggtaacaacgagcgttctttgttctatcctacaaaatctatcgaaaaattgttcgaagaataa

SEQ ID NO: 53220 - DNA, 75 bp, synthetic construct
  source 1..75: mol_type = other DNA
gccctgatgttaacgacgcaatacaggaaaaatatcgcgatctgatgacaccgggatatgtagtcgaattttcac

SEQ ID NO: 53221 - DNA, 75 bp, synthetic construct
  source 1..75: mol_type = other DNA
gtgacggagctggaaagacatttgctgaacgccttagagcaactgcaacaggactatatgcagcggctgaacgaa

SEQ ID NO: 53222 - DNA, 75 bp, synthetic construct
  source 1..75: mol_type = other DNA
aacgccatcacctacaaagcgcagcgcgataaaaaagccagagagctggagctggcaaacgcaaccattactgat

SEQ ID NO: 53223 - DNA, 75 bp, synthetic construct
  source 1..75: mol_type = other DNA
gtaaaagaagttttaaaggattttattgatgcactcagtaccataatatgtgatgaagagtggcgcacgtcttta

SEQ ID NO: 53224 - DNA, 75 bp, synthetic construct
  source 1..75: mol_type = other DNA
acgcgaagctgactataaatggtgaggtgctctatgaagtggaccttataaacatggtggaaattgtggacggtg

SEQ ID NO: 53225 - DNA, 75 bp, synthetic construct
  source 1..75: mol_type = other DNA
tcaaaaacgttccgtcgtctggttgtcacacttacccgacgttatggcgtcagtctcattcatctggatgccagc

SEQ ID NO: 53226 - DNA, 75 bp, synthetic construct
  source 1..75: mol_type = other DNA
cgagggtaaacagggagaagacaccgagtcgaaaatctccgtggtctgcacctatttccggctgacgatggacgg

SEQ ID NO: 53227 - DNA, 75 bp, synthetic construct
  source 1..75: mol_type = other DNA
taaaattatcaaacatatggcgcgcaggaccctcaaactgtttgtaaaaatgaaacgccgccaaaagttactcac

SEQ ID NO: 53228 - DNA, 75 bp, synthetic construct
  source 1..75: mol_type = other DNA
caaacacctgatttcaacaatactattctggcactggaacaaagcggagaattacttacccgcgttaccagcgtc

SEQ ID NO: 53229 - DNA, 75 bp, synthetic construct
  source 1..75: mol_type = other DNA
atgcaatgccggttcgccagcaactaaaaacccgcacactgttcaatgtgctggggccattgattaacccggcgc

SEQ ID NO: 53230 - DNA, 75 bp, synthetic construct
  source 1..75: mol_type = other DNA
ttctcgacataacggacagcgaattaaaagaggatttattgcaaagcctgatggattcattaggttctaacaaac

SEQ ID NO: 53231 - DNA, 75 bp, synthetic construct
  source 1..75: mol_type = other DNA
ttaaatcttacatgctggttccattataaagacgggcagtggcgggttatttcttatattttttggccaccaggg

SEQ ID NO: 53232 - DNA, 75 bp, synthetic construct
  source 1..75: mol_type = other DNA
acggccagagcagcgcggggggaacagggcaggcggctgccccgccagaactcaacaaagccagcttccttattc

SEQ ID NO: 53233 - DNA, 75 bp, synthetic construct
  source 1..75: mol_type = other DNA
aaaccgattaccggcagcgtaacgatctcggtatgtccaccgatacagccgaagaagagccagagcaacaggata

SEQ ID NO: 53234 - DNA, 75 bp, synthetic construct
  source 1..75: mol_type = other DNA
caccaccgttaacaacccttaccggcatacgctgcagtaccgcgcatatcacagacaaggacaacgcctggctgt

SEQ ID NO: 53235 - DNA, 75 bp, synthetic construct
  source 1..75: mol_type = other DNA
tcaatattcccccaacgctccataagaatcagggcgagatcatcaatctgatcacaggcgaggatattgattttt

SEQ ID NO: 53236 - DNA, 75 bp, synthetic construct
  source 1..75: mol_type = other DNA
tgtaagtgttttcagaagatattttggtgttcctccccatcaatattcatcaagattttttttagaaaaagacat

SEQ ID NO: 53237 - DNA, 75 bp, synthetic construct
  source 1..75: mol_type = other DNA
aaaccgtccttatgacgtgcaattcaactcaatgaacactgctatccaggaagaggaaaaccgggaactggatgc

SEQ ID NO: 53238 - DNA, 75 bp, synthetic construct
  source 1..75: mol_type = other DNA
ggatttattgatatcagtgccacctcgaagaaaattattttctgcggcacgttaactgcgggcagtttaaaaaca

SEQ ID NO: 53239 - DNA, 75 bp, synthetic construct
  source 1..75: mol_type = other DNA
ctttccgatgagctgattgccgagctgaaagcccacgacgttatcgttattgcggcaccgatgtataacttcaac

SEQ ID NO: 53240 - DNA, 75 bp, synthetic construct
  source 1..75: mol_type = other DNA
tgattttggagtcctttgatgtttatttcggaaaagagagtgtgtttctggagagaggttcatctgtacttgtcg

SEQ ID NO: 53241 - DNA, 75 bp, synthetic construct
  source 1..75: mol_type = other DNA
atgcaatgccggttcgccagcaactgaaaacccgcacactgttcaatgtgctggggccattaattaacccggcgc

SEQ ID NO: 53242 - DNA, 75 bp, synthetic construct
  source 1..75: mol_type = other DNA
tgttgttattcttatttcaaacagtggtgagacggcggaaatcctggcgacactgcctagtttgaaaaaaatggg

SEQ ID NO: 53243 - DNA, 75 bp, synthetic construct
  source 1..75: mol_type = other DNA
acatgattggtaagtttggtgcggccaaagaccagtggttcagttccttcctgctgcaggtggaaaaccattcct

SEQ ID NO: 53244 - DNA, 75 bp, synthetic construct
  source 1..75: mol_type = other DNA
aagcagcggaaattgcagccgacggtgttgtaccggctgataaatttatatggcacgccgtaacgcgtgccgtcg

SEQ ID NO: 53245 - DNA, 75 bp, synthetic construct
  source 1..75: mol_type = other DNA
ctgggcgacaaagacagcccgttaaaaaatatggtggccgcagcggccaataacgccggtcagaactggtttgct

SEQ ID NO: 53246 - DNA, 75 bp, synthetic construct
  source 1..75: mol_type = other DNA
gaaagagtactgtgacctgctgcgccgtgctgacgccatcttcattgaagaactgcgtaaagcggacctgtacga

SEQ ID NO: 53247 - DNA, 75 bp, synthetic construct
  source 1..75: mol_type = other DNA
gtttcactgggacaggtataacccggcaacggaggcgagttcgtgctgggtgcgggtgtcgcaggcgtgggcggg

SEQ ID NO: 53248 - DNA, 75 bp, synthetic construct
  source 1..75: mol_type = other DNA
agatatgcgttgtggcttcaacggcctggcttcgaaggtgcagaacacgctgaaagatgacccgttctccgggca

SEQ ID NO: 53249 - DNA, 75 bp, synthetic construct
  source 1..75: mol_type = other DNA
tcctcaaaattgagatcgtcaacggtaaggccgttattttttccctgcatgttgcctgccacttcaagcgcatgc

SEQ ID NO: 53250 - DNA, 75 bp, synthetic construct
  source 1..75: mol_type = other DNA
gtttcactgggacaggtataacccggcaacggaggcgagttcgtgctgggtgggggtgtcccaggcgtgggcggg

SEQ ID NO: 53251 - DNA, 75 bp, synthetic construct
  source 1..75: mol_type = other DNA
caactgaaggtggaactggcgaagctggaagttgagatggcgggttatctgaaggagttgggttatggtgcctaa

SEQ ID NO: 53252 - DNA, 75 bp, synthetic construct
  source 1..75: mol_type = other DNA
aactttgccgccagcggtgggcagaaagccggggagttctataccccgccggaagtttcggacctgattgcagaa

SEQ ID NO: 53253 - DNA, 75 bp, synthetic construct
  source 1..75: mol_type = other DNA
gatattatttgatcaaccagcatacgcttggcctggtttatccagtgcgccgtaaaaccccgtccttcagggcgg

SEQ ID NO: 53254 - DNA, 75 bp, synthetic construct
  source 1..75: mol_type = other DNA
cggtgctttcgttcctcactcactggctgtcatgcaatttagtgctgatacggcgctgaatgaggccaaagctat

SEQ ID NO: 53255 - DNA, 75 bp, synthetic construct
  source 1..75: mol_type = other DNA
cccaacgccgaggtgaaattcgcactgggtgatgtggtcaacaccatgatcggctgcactaatggtgaaacgatc

SEQ ID NO: 53256 - DNA, 75 bp, synthetic construct
  source 1..75: mol_type = other DNA
agtacacacgtgcagatttacattgtggtacgcccctacgagagcgcaaaagccattggcgtaagtattgaactc

SEQ ID NO: 53257 - DNA, 75 bp, synthetic construct
  source 1..75: mol_type = other DNA
cagctgctgcacatctttctgatgcttaacgaggacctattgcgtcaccggatctcgaaccagaccatgcatcct

SEQ ID NO: 53258 - DNA, 75 bp, synthetic construct
  source 1..75: mol_type = other DNA
gcgatatttagcgatatcagaaaggaagagcacacattgtgtgatggacgacgcctgattatcagtcctgacctg

SEQ ID NO: 53259 - DNA, 75 bp, synthetic construct
  source 1..75: mol_type = other DNA
gcgatgaaattaacgcctggcgtaatgcgatggaagcggcgaactacacgtttgagcacaatgggcgtaaatggg

SEQ ID NO: 53260 - DNA, 75 bp, synthetic construct
  source 1..75: mol_type = other DNA
cggcgttggggaatgatccgaactttgccacgacaatgcttaatgcgctggcaggtaaacaaccgctggacaata

SEQ ID NO: 53261 - DNA, 75 bp, synthetic construct
  source 1..75: mol_type = other DNA
tgtttatgctgcgcaccgtgccgtatcaggaactgcagtatcaacgcagctggcgacatgcggctaacagccggg

SEQ ID NO: 53262 - DNA, 75 bp, synthetic construct
  source 1..75: mol_type = other DNA
agcaaaatcgaccagttgcgtaaagatattgatgcgattgtggctgaaattgaaggctgcgaggtgcagaaatga

SEQ ID NO: 53263 - DNA, 75 bp, synthetic construct
  source 1..75: mol_type = other DNA
ctgagtatcggggtgataagctcaaactagcgagaatggctgttgggctttcttgtgaagagttagccgaaaaaa

SEQ ID NO: 53264 - DNA, 75 bp, synthetic construct
  source 1..75: mol_type = other DNA
actatcacaaacttctgcgcaaccgactcaaaaagctgggcgagatgattcagcaacattgtgtttcgctgaatt

SEQ ID NO: 53265 - DNA, 75 bp, synthetic construct
  source 1..75: mol_type = other DNA
ttgatgccactttacatccttctttacagataagattattagataaaatttatcaatacgcaaaagattataaga

SEQ ID NO: 53266 - DNA, 75 bp, synthetic construct
  source 1..75: mol_type = other DNA
taggggatggctctgcattacctgttggtgtccctgttccgtggccttctgccactccaccgacaggctggctga

SEQ ID NO: 53267 - DNA, 75 bp, synthetic construct
  source 1..75: mol_type = other DNA
tcatgtttccggaaaaccgaagtttgaatatgccaatatggttgaagatatcagagagaaggtgtcggttgagat

SEQ ID NO: 53268 - DNA, 75 bp, synthetic construct
  source 1..75: mol_type = other DNA
gccaggaacaacagtcagggtagcaacaaaagatggcctgatgatcatgatgttcagacaggagaaagaaaccag

SEQ ID NO: 53269 - DNA, 75 bp, synthetic construct
  source 1..75: mol_type = other DNA
acagcctgatgcccttcgctacgaccgccaaactatttttggccttgtccgtgagcgtccgatcgacattcacaa

SEQ ID NO: 53270 - DNA, 75 bp, synthetic construct
  source 1..75: mol_type = other DNA
ttccgaggcgatggcctatcgcgagaatttcagccagcgcgagctgatggtcatctggcctgatttccttgcatg

SEQ ID NO: 53271 - DNA, 75 bp, synthetic construct
  source 1..75: mol_type = other DNA
aactggctatgcacgggcagaccaacgttaacaaaatctacgacccggcagcgggttccggctcactgttgttgc

SEQ ID NO: 53272 - DNA, 75 bp, synthetic construct
  source 1..75: mol_type = other DNA
tggatgcggataaaaagcagatacagtgcgtggtaagaccgttgcaaatcctgcgtgctgacggggtgtgggaaa

SEQ ID NO: 53273 - DNA, 75 bp, synthetic construct
  source 1..75: mol_type = other DNA
atagcggaaaggatggggtttatttccatctgcaaggtaacccagataactttctgtcactgtcggcgactgaga

SEQ ID NO: 53274 - DNA, 75 bp, synthetic construct
  source 1..75: mol_type = other DNA
gtcttcgtattcagatgaccttccaaggtgtggattttaaagctgtgctagggactacagatgtgagtgcagcaa

SEQ ID NO: 53275 - DNA, 75 bp, synthetic construct
  source 1..75: mol_type = other DNA
gttctgccgggtgtgtacagcgttcgcctgacacaaagcacacagcgcctttcagaaatcggtgtcatccgcgtt

SEQ ID NO: 53276 - DNA, 75 bp, synthetic construct
  source 1..75: mol_type = other DNA
tttacaggtagcggatatctgttacgtaccggtgcgtggtcgtacccggttctgcggtttaaacgcctggggctg

SEQ ID NO: 53277 - DNA, 75 bp, synthetic construct
  source 1..75: mol_type = other DNA
tacataccgtacgggatccgtgtgatgacttggtttgagtttctgcacggtttctgttttcgccctttcctgcag

SEQ ID NO: 53278 - DNA, 75 bp, synthetic construct
  source 1..75: mol_type = other DNA
ttaccctgtcgactttcctcgcctgattcaggaaaagcgtaaggagtgggagcagattgcaggcatgcctgtagc

SEQ ID NO: 53279 - DNA, 75 bp, synthetic construct
  source 1..75: mol_type = other DNA
cgagtataaatattatgatatgcatcaagtgatatctgccgctctttatcaagtgaaaaatataatgagtacgga

SEQ ID NO: 53280 - DNA, 75 bp, synthetic construct
  source 1..75: mol_type = other DNA
gcgatcttaactccatcctcttcctgctgactccggcagaagatatggccaagcttcagcaacttgttgccctgc

SEQ ID NO: 53281 - DNA, 75 bp, synthetic construct
  source 1..75: mol_type = other DNA
caaacttccaagggaatgcagtaataaatttcactgatgctaatgtaccatataccagaataattgagcataaac

SEQ ID NO: 53282 - DNA, 75 bp, synthetic construct
  source 1..75: mol_type = other DNA
atggagacgtttcactggaaagtgcgcccggatatgaatgtggtatcagagccgaaagtggtgacagtgaagctg

SEQ ID NO: 53283 - DNA, 75 bp, synthetic construct
  source 1..75: mol_type = other DNA
ccctacagcctatcctgcataatcagattccagtaatcacaactgagctactcgcccgcctttatggaacagaag

SEQ ID NO: 53284 - DNA, 75 bp, synthetic construct
  source 1..75: mol_type = other DNA
tgattaacaaggtcgctgaaaacggttattcactccgtgtggtggaggaatccgaccaacagtcaacctgcacac

SEQ ID NO: 53285 - DNA, 75 bp, synthetic construct
  source 1..75: mol_type = other DNA
gcatcgctaagaccctcgcagaacatgtcttagacctgaaacattcgccactgagcaaacaggccatgaagcgcc

SEQ ID NO: 53286 - DNA, 75 bp, synthetic construct
  source 1..75: mol_type = other DNA
agaattccgccgttgggtgcttgaccttatcgagaaagaaaccgctgttccgcaatcctccacgatactggcgcc

SEQ ID NO: 53287 - DNA, 75 bp, synthetic construct
  source 1..75: mol_type = other DNA
atgaattatccaactatcgttaacggcatcgattttcgagatcttgtttttgtgacaggcaacgagccggtgacg

SEQ ID NO: 53288 - DNA, 75 bp, synthetic construct
  source 1..75: mol_type = other DNA
cagtcatatgtcgaaacggatttctgcgatgaaaagcggaaaatattcgaaaagctgctttgttaatcatgcctt

SEQ ID NO: 53289 - DNA, 75 bp, synthetic construct
  source 1..75: mol_type = other DNA
cagctatatgtcgaaacgggtttctgcgatgaaaaacggaaaatattcaaaaagctgctttgttaatcacgcgtc

SEQ ID NO: 53290 - DNA, 75 bp, synthetic construct
  source 1..75: mol_type = other DNA
tgatggccgtgaacacgtgcagtcgcttacagcacaactgcgactggggccggcagacatcctggagtccgatga

SEQ ID NO: 53291 - DNA, 75 bp, synthetic construct
  source 1..75: mol_type = other DNA
cgggcaaaagaggcgcgtccgttccgcctcgctgtgattcagttaggcacctacgacggtacgatttataacgcc

SEQ ID NO: 53292 - DNA, 75 bp, synthetic construct
  source 1..75: mol_type = other DNA
ctactcccttcgtgttgttgatgaatctgaccggacctcaacagacagcatccccccctctgctgccctgagcgg

SEQ ID NO: 53293 - DNA, 75 bp, synthetic construct
  source 1..75: mol_type = other DNA
aaactccggtgaattttttgttcaggtctggggaaatggagccaacttcgacaacgtgattttacgccgttcata

SEQ ID NO: 53294 - DNA, 75 bp, synthetic construct
  source 1..75: mol_type = other DNA
tgaaaaagaaatccgcgcatttgcagagaaagcccagcgggcaacgtttatctgcgcaagctttgatgaaacgct

SEQ ID NO: 53295 - DNA, 75 bp, synthetic construct
  source 1..75: mol_type = other DNA
atgacgatcacaaaacaacgtgtagaagaaatcatatcccgtattgaaatgtatgggcatggtgccgggtatacc

SEQ ID NO: 53296 - DNA, 75 bp, synthetic construct
  source 1..75: mol_type = other DNA
caatacgctgtaatggaaaatctcattatctgggtcagtttaatacagcagaagaagctgcaaaagcctatgatg

SEQ ID NO: 53297 - DNA, 75 bp, synthetic construct
  source 1..75: mol_type = other DNA
tggtactccctcagcacagcaacagaaaaatcttcaggaaaagcaggttgccattaccacgatgtttaagccaca

SEQ ID NO: 53298 - DNA, 75 bp, synthetic construct
  source 1..75: mol_type = other DNA
ggagtttaactgctcaactgaaattactgacttcatgaaagcagtatatttcctgtatctcaatcgtcacggtta

SEQ ID NO: 53299 - DNA, 75 bp, synthetic construct
  source 1..75: mol_type = other DNA
aattgctgaaatcgctgaaagcgagctgccacagggggatgtggaggtcaatgtcgactgttcatctatcaacta

SEQ ID NO: 53300 - DNA, 75 bp, synthetic construct
  source 1..75: mol_type = other DNA
gtaattataaaaatccgtatttcccagaaaaagaaattcgcgcatttgcagaaaaagcccagcgggcaacgttta

SEQ ID NO: 53301 - DNA, 75 bp, synthetic construct
  source 1..75: mol_type = other DNA
catggattaccggtactcgaagaaagcctgaaagattacgcgaagcgtaccaatcaaactgttaatgcagtgaaa

SEQ ID NO: 53302 - DNA, 75 bp, synthetic construct
  source 1..75: mol_type = other DNA
cgggctgggggagctggtggcgcagatgcagcaacattgtcagcaacagccggagaatcacttttatcaggccgc

SEQ ID NO: 53303 - DNA, 75 bp, synthetic construct
  source 1..75: mol_type = other DNA
tacagtatcaacgcgcaaacccgacatgaaaatgggggtgatgacactaacgacatcagcggtaatggtacggtc

SEQ ID NO: 53304 - DNA, 75 bp, synthetic construct
  source 1..75: mol_type = other DNA
ggaaagggactgaatcagtttttgatacaactgctgccattcagtggtatgcgcagagggaagctgatattgaaa

SEQ ID NO: 53305 - DNA, 75 bp, synthetic construct
  source 1..75: mol_type = other DNA
cacgaaccgctttccccgaaaacagtatctaagtattttacaaaggcgagaaatgcatctggactctcatttgat

SEQ ID NO: 53306 - DNA, 75 bp, synthetic construct
  source 1..75: mol_type = other DNA
aacatcgctcttgaccagaaaggttcagaaaatttttcagcgtgggttattgaagcctgcagaagaagattaatt

SEQ ID NO: 53307 - DNA, 75 bp, synthetic construct
  source 1..75: mol_type = other DNA
gacggagaaatacgtcgctacgacagtcacctaaacataatctgtcgcgagtaccggaggagtgaagttattcag

SEQ ID NO: 53308 - DNA, 75 bp, synthetic construct
  source 1..75: mol_type = other DNA
gcgtcattctgttggtggaaggattcccgccgtcacatgccgggaccatcaccgtgtatgaagattctcaaccgg

SEQ ID NO: 53309 - DNA, 75 bp, synthetic construct
  source 1..75: mol_type = other DNA
ataagtccaatgcgctggttgaggccagttacaagctaactttacaagaacagcgtttcttattgctctgcataa

SEQ ID NO: 53310 - DNA, 75 bp, synthetic construct
  source 1..75: mol_type = other DNA
gggacggcggcacaagtactgaacaggcgtataaaaatatcccgttctacatgactaaccgtggttatggggtac

SEQ ID NO: 53311 - DNA, 75 bp, synthetic construct
  source 1..75: mol_type = other DNA
gtagctataccacgttacagcgtgttgcagggatcagtcgtacggggatgcagataaatcgccattcgttgacta

SEQ ID NO: 53312 - DNA, 75 bp, synthetic construct
  source 1..75: mol_type = other DNA
agttactattaatggaaatacggttagttggtcaaatttatatacggggcttggttcttacatatacacatactg

SEQ ID NO: 53313 - DNA, 75 bp, synthetic construct
  source 1..75: mol_type = other DNA
tgcaaagcgagtaacattcgatgcttccagagttgttccaactgcaaacgaaaaccgacctcgtaacattgcctt

SEQ ID NO: 53314 - DNA, 75 bp, synthetic construct
  source 1..75: mol_type = other DNA
ataataagggagttaacgttactggcttccttactcctattttttttcttgatcgatttacaaccacgtcaggct

SEQ ID NO: 53315 - DNA, 75 bp, synthetic construct
  source 1..75: mol_type = other DNA
cggcgaacggtaaaagtatcactcccgatgatgtgcgtccgatgcttgagcagatggtgaaggaggcggtaagcc

SEQ ID NO: 53316 - DNA, 75 bp, synthetic construct
  source 1..75: mol_type = other DNA
gcagaccgccttatcacggaacgtctggtacaggcactgggcctggtggatatccgggtgccggaccatctgata

SEQ ID NO: 53317 - DNA, 75 bp, synthetic construct
  source 1..75: mol_type = other DNA
gaaaaaacgcacgggatgcggggatgggaatgcctggttgacggggtggcggatatcgacgtcagcatgacggat

SEQ ID NO: 53318 - DNA, 75 bp, synthetic construct
  source 1..75: mol_type = other DNA
gctgccgtggtactggcacacaatcacccgtccggtgaagtcacacccagcaaggcagaccgccttatcacggaa

SEQ ID NO: 53319 - DNA, 75 bp, synthetic construct
  source 1..75: mol_type = other DNA
tgcactcgttgctggatacagatgcttataagttgcatatgcagcaagccgtgtttcatcactattacgatgtgc

SEQ ID NO: 53320 - DNA, 75 bp, synthetic construct
  source 1..75: mol_type = other DNA
agatgaagactggatgaacgcggtcaagatggcccagagcgtggcatccgtggaaggggttttcctggtatttga

SEQ ID NO: 53321 - DNA, 75 bp, synthetic construct
  source 1..75: mol_type = other DNA
gcagaccgcgcagcgctggcaacccttacagctattggtcgcgctattatcgctaagggcagtataaaagatgtc

SEQ ID NO: 53322 - DNA, 75 bp, synthetic construct
  source 1..75: mol_type = other DNA
ggctctcgaaaaccttggtttgggagaaggctctgcattacctgttggtgtgcctgttccatggccttcagccac

SEQ ID NO: 53323 - DNA, 75 bp, synthetic construct
  source 1..75: mol_type = other DNA
ttttgatgcaatcagaggggctttttacgatgcaggaacacgatcagcgagaatgccgaataacacaactactat

SEQ ID NO: 53324 - DNA, 75 bp, synthetic construct
  source 1..75: mol_type = other DNA
gtaattataaaaatccgtattttcctgaaaaagaaattcgtgcatttgcagtaaaagcccagcgggcaacgttta

SEQ ID NO: 53325 - DNA, 75 bp, synthetic construct
  source 1..75: mol_type = other DNA
tcgggaagaacaatatggcaccaagtttttacacgatttcactgaatttcggcgtgaacccgttgtacgaattca

SEQ ID NO: 53326 - DNA, 75 bp, synthetic construct
  source 1..75: mol_type = other DNA
aggagtggaatcacacacccaccaagggcagctcttcagagttagtgattatcgtacaaaagaaataccagcatc

SEQ ID NO: 53327 - DNA, 75 bp, synthetic construct
  source 1..75: mol_type = other DNA
tgtaccactgcgaccatcgcggcctgccgctggcgctcatcagcacggaaggggcaacagcgtggtgcgcagaat

SEQ ID NO: 53328 - DNA, 75 bp, synthetic construct
  source 1..75: mol_type = other DNA
cttgataagggtgtctggctggaattcgacatgattggcctagacattaccttcccgaaagagggaatagcgcca

SEQ ID NO: 53329 - DNA, 75 bp, synthetic construct
  source 1..75: mol_type = other DNA
cactgcaacagcatgaccggtgataagcccggtgaagcccattcatcaggctggaccctggctgcaaaacgtggg

SEQ ID NO: 53330 - DNA, 75 bp, synthetic construct
  source 1..75: mol_type = other DNA
aaatcaaactctgttgtcaaaaatgcttatgtaaaatttaatcttttaaaagatggagtagttatcggtcaaaca

SEQ ID NO: 53331 - DNA, 75 bp, synthetic construct
  source 1..75: mol_type = other DNA
gcggatacccttcagcagtccggcggcgaagacggtggcagtgtggtgttcccgccggtgctggtgcagatgctc

SEQ ID NO: 53332 - DNA, 75 bp, synthetic construct
  source 1..75: mol_type = other DNA
gccatgcaggggcatcatattcaggcaaattcgacgtattttttcagaaatggcgggcgaccatcaggcgtgatt

SEQ ID NO: 53333 - DNA, 75 bp, synthetic construct
  source 1..75: mol_type = other DNA
aggtgaagaaacctgcagtggttgatccggaccttatctggtcgttaccagacggcgaaatacgccgctacgaca

SEQ ID NO: 53334 - DNA, 75 bp, synthetic construct
  source 1..75: mol_type = other DNA
aaaaaaacaccagagcacctgacgaaagtatgttaacgccaggctgtttagatgaagaacatttcttattattga

SEQ ID NO: 53335 - DNA, 75 bp, synthetic construct
  source 1..75: mol_type = other DNA
tatgccgtaagtattaatgatgaacaagccagaagtttgccgggcgtactggcgatttttacctgggaagatgtg

SEQ ID NO: 53336 - DNA, 75 bp, synthetic construct
  source 1..75: mol_type = other DNA
gtggcaaaagtttttacacaagaagagcgagaaaaaattaaagggcaggttgttgaactcgtacgccagagtggg

SEQ ID NO: 53337 - DNA, 75 bp, synthetic construct
  source 1..75: mol_type = other DNA
aagtgcaacagatgctgagttgtcaaaaaagacggcagaaagtgcagccggtaatgcagccagggatgcaacgac

SEQ ID NO: 53338 - DNA, 75 bp, synthetic construct
  source 1..75: mol_type = other DNA
gttgttgaccgtcagatgagctacatgcgccagcagctgtccgcccgcatgctcagccgttaccagaacaactat

SEQ ID NO: 53339 - DNA, 75 bp, synthetic construct
  source 1..75: mol_type = other DNA
acttcctgcagaaaatggcaagcgacattaacagcatgaacctcagttcctgccaggcggcgcaggggattatcg

SEQ ID NO: 53340 - DNA, 75 bp, synthetic construct
  source 1..75: mol_type = other DNA
atggcaaaagtatttacacaagaagagcgggaaaaaatcaagggacaggttgttgagctagtacgccggagtggg

SEQ ID NO: 53341 - DNA, 75 bp, synthetic construct
  source 1..75: mol_type = other DNA
gtaaacaaggctggtaacgccgttcagcgttccggcgataaaatgaccggagaactgaaaattggcacggtgaat

SEQ ID NO: 53342 - DNA, 75 bp, synthetic construct
  source 1..75: mol_type = other DNA
gcccgcaaaaagatgtcgaaagcagcagtgaaaaaaaagagcgacccggacctggtttattcattaccagacgga

SEQ ID NO: 53343 - DNA, 75 bp, synthetic construct
  source 1..75: mol_type = other DNA
cgatctgaatactaatgtcaaagtaggtatcgcttttgctactgctgattctgttataaccgttggaaacccagc

SEQ ID NO: 53344 - DNA, 75 bp, synthetic construct
  source 1..75: mol_type = other DNA
tgtatggcggtgcgccggttaaccgctttatttctggtgacttcacccttgatgacagcaccaaacttagcctgc

SEQ ID NO: 53345 - DNA, 75 bp, synthetic construct
  source 1..75: mol_type = other DNA
agtggcaagaattacccgttatcaccacgccagaagcggcgctggcagaagacgctgcaccaatccataacggtg

SEQ ID NO: 53346 - DNA, 75 bp, synthetic construct
  source 1..75: mol_type = other DNA
aaaggtattggaacttgcgtatccgttgtctaaaaattcatacggagaatatcttattaatatggtgaaagagaa

SEQ ID NO: 53347 - DNA, 75 bp, synthetic construct
  source 1..75: mol_type = other DNA
atgccagttagccattatctctgcattttcataaacgttggtttgggagaaggttcggcattacccgttggtgtg

SEQ ID NO: 53348 - DNA, 75 bp, synthetic construct
  source 1..75: mol_type = other DNA
gtcaggtttggtgacgggccgtggcaggatgttaaggggctggatgaagtgggcagtgatacaggcagaacagga

SEQ ID NO: 53349 - DNA, 75 bp, synthetic construct
  source 1..75: mol_type = other DNA
gtttatcataggcgaagagtttattgatggtgacagttgtgcactgattcttggcgataatattttttatggcca

SEQ ID NO: 53350 - DNA, 75 bp, synthetic construct
  source 1..75: mol_type = other DNA
tccggatgaagccgggcgttacagcatggacgttgagtacggtcagtacagcgttattctgttggtggaaggctt

SEQ ID NO: 53351 - DNA, 75 bp, synthetic construct
  source 1..75: mol_type = other DNA
ttctttgtgctgctttactgacggtcacacccgcagcgtcagcggatgtgaacagcgacatgaatcagttcttta

SEQ ID NO: 53352 - DNA, 75 bp, synthetic construct
  source 1..75: mol_type = other DNA
tatacagcatggccgtcacggaggaaacgcttatcagcagcggtaaaagcggcgcatccgttcccgtggaagcca

SEQ ID NO: 53353 - DNA, 75 bp, synthetic construct
  source 1..75: mol_type = other DNA
gaaaaacacatagccagatttggtcatgaccctgtaaatgaagtgatgatcaatagactgaaagacattgagaaa

SEQ ID NO: 53354 - DNA, 75 bp, synthetic construct
  source 1..75: mol_type = other DNA
aggctctgcattaccggttggtgtgcctgttccgtggccttcagccactccgccaatggggtggctaaaatgtaa

SEQ ID NO: 53355 - DNA, 75 bp, synthetic construct
  source 1..75: mol_type = other DNA
gacggagaaatacgccgctacgacaggcgtcagaacataatctgtagcgagtgccggaagagcgaagttatgcag

SEQ ID NO: 53356 - DNA, 75 bp, synthetic construct
  source 1..75: mol_type = other DNA
gcgctttgcttaattggcagccacacacaattttggaccatgcacactatatggaattatggacaggggacggac

SEQ ID NO: 53357 - DNA, 75 bp, synthetic construct
  source 1..75: mol_type = other DNA
ccgaatccccaccgtggtgggacctcccgggccaaagggggaacaggggcccgcgggtcctcaggggccgaaggg

SEQ ID NO: 53358 - DNA, 75 bp, synthetic construct
  source 1..75: mol_type = other DNA
tcgagagaggaattacttaagagaaattcttttccgtcagtgaatcaaaacaaatatctgaatgcgatgtggcgc

SEQ ID NO: 53359 - DNA, 75 bp, synthetic construct
  source 1..75: mol_type = other DNA
cgcaggcgcagacggtcggaaaactgctggatcaggtcatccggcagaatacgacgcacgttcaggatactgacc

SEQ ID NO: 53360 - DNA, 75 bp, synthetic construct
  source 1..75: mol_type = other DNA
taagatgcgccatgaactgaaccccaaaacctggacagtttcagttaaccggctttttgatactcagtccggtat

SEQ ID NO: 53361 - DNA, 75 bp, synthetic construct
  source 1..75: mol_type = other DNA
gtatgacgggggagtttgccagcgatatgtctgacgcagctggcaccatgtggctggatgtcgcaaagcgtgact

SEQ ID NO: 53362 - DNA, 75 bp, synthetic construct
  source 1..75: mol_type = other DNA
gtaatcaggtccgtgaagaaattgaatctctggtaacagaaaggaggcaagagggggcgacggaaaacgatgcta

SEQ ID NO: 53363 - DNA, 75 bp, synthetic construct
  source 1..75: mol_type = other DNA
gaaggttcggcattacccgttggtgtgcctgttccgtggccttccgccactccgccaacaggctggctgaaatgc

SEQ ID NO: 53364 - DNA, 75 bp, synthetic construct
  source 1..75: mol_type = other DNA
ttttttatttctcttttatttgtcaattgcatggtgctgatgtgaaaataaaacaaaacgaaagtatgatggggt

SEQ ID NO: 53365 - DNA, 75 bp, synthetic construct
  source 1..75: mol_type = other DNA
ttctttgtgccgctttactgacggtcacacccgcagcgtcagcggatgtgaacagcgatatgaatcagttcttta

SEQ ID NO: 53366 - DNA, 75 bp, synthetic construct
  source 1..75: mol_type = other DNA
gtagattatgttgcagttgcggaaggggttcttaaggggtatcgagataacgggttaagctatttattgatatgg

SEQ ID NO: 53367 - DNA, 75 bp, synthetic construct
  source 1..75: mol_type = other DNA
ttttcataaacgttggtttgggagaaggctctgcattacctgttggtgtgcctgttccatggccttcagtcacac

SEQ ID NO: 53368 - DNA, 75 bp, synthetic construct
  source 1..75: mol_type = other DNA
agattactaaacttctggccagcattcagaacaaggcggtcagtgacacgcctctggatgacaaggaaaaaggct

SEQ ID NO: 53369 - DNA, 75 bp, synthetic construct
  source 1..75: mol_type = other DNA
gcaacggggttgagtaccagtattgtcggtgcagcagagactcgcccacgtaatatttcatttaattacattgtg

SEQ ID NO: 53370 - DNA, 75 bp, synthetic construct
  source 1..75: mol_type = other DNA
actggcaaaggcttatccgacaaataaattgcctgatttacgtggtgagtttattcgcggctgggatgacgggcg

SEQ ID NO: 53371 - DNA, 75 bp, synthetic construct
  source 1..75: mol_type = other DNA
gggattatttgattgaacaaggacgtctacgttacgcaacagtggcagcagaaatgagaaaggaggcacatagaa

SEQ ID NO: 53372 - DNA, 75 bp, synthetic construct
  source 1..75: mol_type = other DNA
ggttacgccggatgatggcggaagctgtcatctctggcttgggcgggggggaccgcctgccgttaaccgtcgccg

SEQ ID NO: 53373 - DNA, 75 bp, synthetic construct
  source 1..75: mol_type = other DNA
aggaaaggcaaaatggacaaaatggacaagatgaaaaaggatgatatgggtaaaaaagacagcatgaaccagtaa

SEQ ID NO: 53374 - DNA, 75 bp, synthetic construct
  source 1..75: mol_type = other DNA
tggtcaacgcaacagttatgtgaaaacatggggttgcggagtttttttgaatgagacgaacatttacagcagagg

SEQ ID NO: 53375 - DNA, 75 bp, synthetic construct
  source 1..75: mol_type = other DNA
ccaatgcaattatgcgttatgcagtgcaaagcggtttgatcgattacaatcctgctcaggagatggctggggcag

SEQ ID NO: 53376 - DNA, 75 bp, synthetic construct
  source 1..75: mol_type = other DNA
agcaaccattactggtgatgtttcttgctgatggtgcaggcagcgtctcgcagggtggcgaaggcgcgatgctcg

SEQ ID NO: 53377 - DNA, 75 bp, synthetic construct
  source 1..75: mol_type = other DNA
tggtgaaaaaggccccggtgaccggcgagcagagcctgcgtatgcgtatgtcgcggcatcctttttacgtgcaga

SEQ ID NO: 53378 - DNA, 75 bp, synthetic construct
  source 1..75: mol_type = other DNA
ccgcgtgtgggtcaggaagtgatagtggactttctgaacggcgacccggaccagcccattgtgacggggcggacc

SEQ ID NO: 53379 - DNA, 75 bp, synthetic construct
  source 1..75: mol_type = other DNA
tgggatgacggtgatggcgaagacctgcatctcaaagaagtaacccactggatgccgctaccagaaccgccgaag

SEQ ID NO: 53380 - DNA, 75 bp, synthetic construct
  source 1..75: mol_type = other DNA
gatgaggtttattcaggtgaaccatcgaaaattctacatacccgtgattccgggtatgtaaaaacaagcaaggca

SEQ ID NO: 53381 - DNA, 75 bp, synthetic construct
  source 1..75: mol_type = other DNA
acagcgaaaggctgcatgttcggcaagaacatcaccagtcccgcaaatccgcgcgagacgcagccgcatttcttc

SEQ ID NO: 53382 - DNA, 75 bp, synthetic construct
  source 1..75: mol_type = other DNA
aacgatacagccgtaccgcgattaacaacatcaaaaaattctggtcgctgacggcgaaaggctgcatgttcggca

SEQ ID NO: 53383 - DNA, 75 bp, synthetic construct
  source 1..75: mol_type = other DNA
gttttcaatgtaatctcaaatgtgattactgtttttaccttgaaaaagagtcgcagtttactcatgaaaaatgga

SEQ ID NO: 53384 - DNA, 75 bp, synthetic construct
  source 1..75: mol_type = other DNA
ggaatggcagggagtacgtgtcgtgacaaccgaaactcttgctagagggtatggggtcgatgaagccaatattcg

SEQ ID NO: 53385 - DNA, 75 bp, synthetic construct
  source 1..75: mol_type = other DNA
tattcttaaggaggtcataccaagttattttcaggatgagactttagaggtaatagttatcaatgatggatcaac

SEQ ID NO: 53386 - DNA, 75 bp, synthetic construct
  source 1..75: mol_type = other DNA
gaaaatctctgccaccaatacgttccatgcccttgctacggaatggcatcagcataaatctttgtcatggtctga

SEQ ID NO: 53387 - DNA, 75 bp, synthetic construct
  source 1..75: mol_type = other DNA
gccatcgttatataacggtgatctccgatcgcgatggtcgtgcgctggccttaacggacgattgtggcacagaga

SEQ ID NO: 53388 - DNA, 75 bp, synthetic construct
  source 1..75: mol_type = other DNA
gctgtctggctgttgctggttgccctgcttaatgcccgacacggtgatgtgatgatgttttccggcgtgattctg

SEQ ID NO: 53389 - DNA, 75 bp, synthetic construct
  source 1..75: mol_type = other DNA
gctcacctgcctgaaacaaaaaacggtcattcccgtgacgtgccattatctcgccgggcacgcaatttcctccag

SEQ ID NO: 53390 - DNA, 75 bp, synthetic construct
  source 1..75: mol_type = other DNA
ctgtggcggacattgtgcagccgttgccatcgtttaccgaaacgcaagcagatgagctgatttttccgtcccttc

SEQ ID NO: 53391 - DNA, 75 bp, synthetic construct
  source 1..75: mol_type = other DNA
gaatttaccagtaaagccgaaagtcgcatcggtaacggaaaatgatggtaaagcctttcctcagccagccggcgt

SEQ ID NO: 53392 - DNA, 75 bp, synthetic construct
  source 1..75: mol_type = other DNA
cgtggcctgtgcatggctgacggtatgcgagcgtcagcaccgctatccctacctcaccctcgatgcactggaaag

SEQ ID NO: 53393 - DNA, 75 bp, synthetic construct
  source 1..75: mol_type = other DNA
tggatacagccttatcccgttatggtgctcacgcgctcggtactttcaccgaaaacgaggctgtattctcgtccc

SEQ ID NO: 53394 - DNA, 75 bp, synthetic construct
  source 1..75: mol_type = other DNA
taatcccaagttataacagggctcatattcttaaggaggtcataccaagttattttcaggatgagactttagagg

SEQ ID NO: 53395 - DNA, 75 bp, synthetic construct
  source 1..75: mol_type = other DNA
atctgttttatcggctgagtattttgcgtctgcaattgccaccactgcgcgagcgggtggcggatattcttccgc

SEQ ID NO: 53396 - DNA, 75 bp, synthetic construct
  source 1..75: mol_type = other DNA
gcgacgcacctaacctggaaatattcgaatcactctatcaggagggaatgaagcccagcgactggctggattcct

SEQ ID NO: 53397 - DNA, 75 bp, synthetic construct
  source 1..75: mol_type = other DNA
cagcaaatccgctttatccgccagcagctctcctcaaagatgagcgatcgcgtgctgggtaactaccagttcagc

SEQ ID NO: 53398 - DNA, 75 bp, synthetic construct
  source 1..75: mol_type = other DNA
ccggatgaagcctatttttgttccgatgaccatctgaagcgactggccatcagggagttgcgtcagcttgaactg

SEQ ID NO: 53399 - DNA, 75 bp, synthetic construct
  source 1..75: mol_type = other DNA
agctctacggcgctgccgatctgccaaacctcaaacccgacaagctcggtgagatagtcgtaacgcgttctcctg

SEQ ID NO: 53400 - DNA, 75 bp, synthetic construct
  source 1..75: mol_type = other DNA
gtacagggcagtttataagtgcagccatgcgcggcgagatcaaacgccgccagcgccgcaaggccaaagagcagg

SEQ ID NO: 53401 - DNA, 75 bp, synthetic construct
  source 1..75: mol_type = other DNA
agcacgtaaagatggatggcgaataagcgccgacaaaacacgtgcttttgcgcccggacataaagttttgaggat

SEQ ID NO: 53402 - DNA, 75 bp, synthetic construct
  source 1..75: mol_type = other DNA
gtactggaacgcatggacactataccggaagaacaacggcttgagtcgggcgtgtcagccggcctggtgatggca

SEQ ID NO: 53403 - DNA, 75 bp, synthetic construct
  source 1..75: mol_type = other DNA
ccggaaactttcgggaaaataaggattcgtcaaccaataattttcgggaaacctcggaaacgtcaaccaactctc

SEQ ID NO: 53404 - DNA, 75 bp, synthetic construct
  source 1..75: mol_type = other DNA
ctggccgaacaagtccggtttggtgtgctgggtgtgtcagaggaaagcatgtgggatcgtgaaactcgccagcgc

SEQ ID NO: 53405 - DNA, 75 bp, synthetic construct
  source 1..75: mol_type = other DNA
ggcgcgtaaggatggctggcgaataagcaaagacaaaacacgtgcttttgcgcccgggcataaagttttgaggat

SEQ ID NO: 53406 - DNA, 75 bp, synthetic construct
  source 1..75: mol_type = other DNA
atgcgttgttacgtcaccaccttaaagttcagattcaggatgctggtcatcaggtcgatgatgcagaagatgcca

SEQ ID NO: 53407 - DNA, 75 bp, synthetic construct
  source 1..75: mol_type = other DNA
atgataacgctgccaaccggtaccagaatctggatcatcgctggcatcacagatatgcgttgtggcttcaacggc

SEQ ID NO: 53408 - DNA, 75 bp, synthetic construct
  source 1..75: mol_type = other DNA
atttaatttcaccagtaactctgtgggtgatggtgtgaattttgttgctgtcagaccgcgaaatattgcatttaa

SEQ ID NO: 53409 - DNA, 75 bp, synthetic construct
  source 1..75: mol_type = other DNA
tgtgtttgctgctgcgttaatccgccgtgcactgattgttgcagcgatctgtctggctgtggcaacaggactgtg

SEQ ID NO: 53410 - DNA, 75 bp, synthetic construct
  source 1..75: mol_type = other DNA
gcatcgtttggtgcatcgattcaggcttgcccttccttgctaaaaatgcgtgatttgtacctgcttcaatacagc

SEQ ID NO: 53411 - DNA, 75 bp, synthetic construct
  source 1..75: mol_type = other DNA
acaccggccctgtcggggcaaccggcgaacggggaccggcaggtgatgctggtccggcaggcccgcaggggccga

SEQ ID NO: 53412 - DNA, 75 bp, synthetic construct
  source 1..75: mol_type = other DNA
tgccggagcgcccttgcgaacaattaacctactgcgcaaaaaatgaatcagtgcagtgggattatatcaaccgtg

SEQ ID NO: 53413 - DNA, 75 bp, synthetic construct
  source 1..75: mol_type = other DNA
gtgaatgatgcggttgcgaatattccggtaccggcggacggcaaaagtatcacccccgatgatgtgcgtccgatg

SEQ ID NO: 53414 - DNA, 75 bp, synthetic construct
  source 1..75: mol_type = other DNA
cagatggtgaaagaggccgtaagccatatccctgctccgcgtgatggtcgtgattacgatccggaagtactgaag

SEQ ID NO: 53415 - DNA, 75 bp, synthetic construct
  source 1..75: mol_type = other DNA
gcgttatcgtcgttttcaccctggccggattgcttaatcgcgtgcgccaacatcaggctgccgagctggcggagg

SEQ ID NO: 53416 - DNA, 75 bp, synthetic construct
  source 1..75: mol_type = other DNA
aggttcagcattacctgttggtgcacctgttccgtggccttcagagacacctccaacaggctggctgaaatgcaa

SEQ ID NO: 53417 - DNA, 75 bp, synthetic construct
  source 1..75: mol_type = other DNA
tgaccttggattcgacgcctctcgtgtcgtgccaacagctaatgaaaaccgtccacgtaacatcgcctttaatta

SEQ ID NO: 53418 - DNA, 75 bp, synthetic construct
  source 1..75: mol_type = other DNA
ttggggaatcaatggtcgttacctggggccgactatccgcgtctggaagggcgacgatgttaagcttatttacag

SEQ ID NO: 53419 - DNA, 75 bp, synthetic construct
  source 1..75: mol_type = other DNA
gacggaagaggaatagatactaaccgtagcttgctttcatcacagggcgatgccattcgaaatataattggtgca

SEQ ID NO: 53420 - DNA, 75 bp, synthetic construct
  source 1..75: mol_type = other DNA
cccctgttaaaaagccacgtctcagcggctggctgctgaccgctgtgctgctgctcggcaccatcggtctggtat

SEQ ID NO: 53421 - DNA, 75 bp, synthetic construct
  source 1..75: mol_type = other DNA
gaaggctctgcattacctgttggtgtgcctgttccatggccttcagccacaccgccaacaggctggctgaaatgc

SEQ ID NO: 53422 - DNA, 75 bp, synthetic construct
  source 1..75: mol_type = other DNA
ccgtatctgggtcctggaaccggagggacagcattacctggaaattccctaccgtaccttgtcgcatccggctgt

SEQ ID NO: 53423 - DNA, 75 bp, synthetic construct
  source 1..75: mol_type = other DNA
ctctgccgataatatagcgggcgtttattacagacccgttcaaaagtatataaatggcacctggtataatgtagc

SEQ ID NO: 53424 - DNA, 75 bp, synthetic construct
  source 1..75: mol_type = other DNA
ccccagaagcctggaaaatgcgttttctggccaacgggacatccggcacatggttttacactgaagacattgcag

SEQ ID NO: 53425 - DNA, 75 bp, synthetic construct
  source 1..75: mol_type = other DNA
agctggggatcaggatgcttggtcatcgtccgaacagcatacttaaagccggtcagcatcgttatcagcgggcat

SEQ ID NO: 53426 - DNA, 75 bp, synthetic construct
  source 1..75: mol_type = other DNA
caatgagcaaactgagcgtttaataagcgagttgcagatttgcaactcggtcaatatagagccagttaacgttat

SEQ ID NO: 53427 - DNA, 75 bp, synthetic construct
  source 1..75: mol_type = other DNA
cgggcctcagcgcgtgtgcgcatcagtaagttaccaacagatgcacggtttcagcgcagaacaactgcgtaatgc

SEQ ID NO: 53428 - DNA, 75 bp, synthetic construct
  source 1..75: mol_type = other DNA
agcagccacttctgcatccaccgcgaccacgaaagcgtcagaagcagccacttcagcacgggatgcggcggcctc

SEQ ID NO: 53429 - DNA, 75 bp, synthetic construct
  source 1..75: mol_type = other DNA
aaaaattatccgggcaggctgctgacaagatgcaggctggcgtgattctgctggactttatgcgccgggagttaa

SEQ ID NO: 53430 - DNA, 75 bp, synthetic construct
  source 1..75: mol_type = other DNA
gaacagtaagcaatggcccggtaaagccgctattggtcgtctgaatggtgaggaactggcgcaatataatttgtg

SEQ ID NO: 53431 - DNA, 75 bp, synthetic construct
  source 1..75: mol_type = other DNA
ctggtggtcggtgaaaccacctgcgacggcaaaaagaaaatgtatgaatacatggcggagtttaagcccgttcat

SEQ ID NO: 53432 - DNA, 75 bp, synthetic construct
  source 1..75: mol_type = other DNA
tggtcccagctctgctggtagcaggcgcagcaaacgctgctgaagtttacaacaaagacggcaacaaattagatc

SEQ ID NO: 53433 - DNA, 75 bp, synthetic construct
  source 1..75: mol_type = other DNA
atgaggcaacaacgaaatacacgcattaataacaacgcagaacgccacgttgcacgccagcacttccgtaaaaat

SEQ ID NO: 53434 - DNA, 75 bp, synthetic construct
  source 1..75: mol_type = other DNA
tggcgggcgtatgaaaaaacgcacgggatgcggggatgggaatgcctggttgacggggtggcggatattgacgtc

SEQ ID NO: 53435 - DNA, 75 bp, synthetic construct
  source 1..75: mol_type = other DNA
agggatttttcaagatcgttgtctaatttatcaagtgaagagcttgatataaaaatttacgaactaaacaaagaa

SEQ ID NO: 53436 - DNA, 75 bp, synthetic construct
  source 1..75: mol_type = other DNA
aaaaaagtaagcgtaaactgaccgccgtatgtagccatcagacgagaattggtaacttagacgcccatctgatat

SEQ ID NO: 53437 - DNA, 75 bp, synthetic construct
  source 1..75: mol_type = other DNA
catgagctggaagttccgcaccttacaggaaggcattaagtgggctttcgtcagcaaagaagctcgcgatgtagc

SEQ ID NO: 53438 - DNA, 75 bp, synthetic construct
  source 1..75: mol_type = other DNA
gtctctctgaagttcaaaggcgaactggttatagcaaagcatggatttatcgtcttattagtcaggggaggttcc

SEQ ID NO: 53439 - DNA, 75 bp, synthetic construct
  source 1..75: mol_type = other DNA
tcagcgcagaacaactgcgtaatgccactcatctggtgtgggcgacgggaggtggaatggtgccggaagaagaga

SEQ ID NO: 53440 - DNA, 75 bp, synthetic construct
  source 1..75: mol_type = other DNA
atggcacgcaaatgcaacaaattgtcccataaagcgttaaagatgcttcttgatggtgtgagtcgccgcgaggta

SEQ ID NO: 53441 - DNA, 75 bp, synthetic construct
  source 1..75: mol_type = other DNA
caaaaacctttatacgcacaggcttctcgcatgcagtgcatcattacagtttctgatacaagggatggtcgctaa

SEQ ID NO: 53442 - DNA, 75 bp, synthetic construct
  source 1..75: mol_type = other DNA
atttgcataccgggctgttattattgcttgcactggcttttgtgctgttctacgaagccatcaatggtttccatg

SEQ ID NO: 53443 - DNA, 75 bp, synthetic construct
  source 1..75: mol_type = other DNA
cttcacgtccaggagttggaaagatatccggctttttctggcgaaaaccaggactggggctgtttttgttgctgc

SEQ ID NO: 53444 - DNA, 75 bp, synthetic construct
  source 1..75: mol_type = other DNA
ggtttacggcccgaaagtaaaaccgggctcactgggtcaccgtgaaaccttcgcggatattggtcagactctggc

SEQ ID NO: 53445 - DNA, 75 bp, synthetic construct
  source 1..75: mol_type = other DNA
ctcaatctgccaaatctgacccgtctggggctggcgaaagcacacgaaggttctaccggtttcattccggcggga

SEQ ID NO: 53446 - DNA, 75 bp, synthetic construct
  source 1..75: mol_type = other DNA
gaacagggaactaaggcttttggtcgttaccagaccggaacgctgaatcatggacagggcagaatgttcgttatg

SEQ ID NO: 53447 - DNA, 75 bp, synthetic construct
  source 1..75: mol_type = other DNA
taagccagtggatgcgtaacgtttccggcctgtctgccgggatggttcgcccgcgctggcagaaagagcagccgc

SEQ ID NO: 53448 - DNA, 75 bp, synthetic construct
  source 1..75: mol_type = other DNA
ataaaaattattttgcagatgaccagcagaaagcatcagaatcaacaggcgataccagcatttctcaggtaagta

SEQ ID NO: 53449 - DNA, 75 bp, synthetic construct
  source 1..75: mol_type = other DNA
accatgggtatctgcagggattggctacgccagaattcaccagaaaacaaccggtatcagtacctgggattatgg

SEQ ID NO: 53450 - DNA, 75 bp, synthetic construct
  source 1..75: mol_type = other DNA
ttgattgtgagtttttgcagagtaacaactttgcctttggcggcattaatacatccatcatcattaagcgctggc

SEQ ID NO: 53451 - DNA, 75 bp, synthetic construct
  source 1..75: mol_type = other DNA
gccggatatgcagaaactgcccgttaagcctgccaggcaaaaagcccctaaacgcgacatgagccttaccgtggc

SEQ ID NO: 53452 - DNA, 75 bp, synthetic construct
  source 1..75: mol_type = other DNA
cctcagggaccgaagggcgacccgggggagacacaaatccgttttcgtctggggccggcgagcattattgagaca

SEQ ID NO: 53453 - DNA, 75 bp, synthetic construct
  source 1..75: mol_type = other DNA
tcttaactacaacggcataattgcattgttagtcgagggctttaaaacacttcgtcatgagattaaagaactccg

SEQ ID NO: 53454 - DNA, 75 bp, synthetic construct
  source 1..75: mol_type = other DNA
agctgtggaacccggacacctgtccggcaaatctgctgccgtggctggcgtgggcgttttcggtcgacaggtggg

SEQ ID NO: 53455 - DNA, 75 bp, synthetic construct
  source 1..75: mol_type = other DNA
cgctgttgacaatcaactttattgtcgtcaccaaaggggccgagcgtatatccgaggtttctgcccgctttaccc

SEQ ID NO: 53456 - DNA, 75 bp, synthetic construct
  source 1..75: mol_type = other DNA
atgattaccccacaggaagcacgccagcgtacccgcgcccttgttgaacactatgtcaacgagtgtgaatgccgc

SEQ ID NO: 53457 - DNA, 75 bp, synthetic construct
  source 1..75: mol_type = other DNA
cagtggatgccatacgtgcccgcctgagcaatccgggaagtcaccgtaaaaacagggtcagcctgctgtatccgc

SEQ ID NO: 53458 - DNA, 75 bp, synthetic construct
  source 1..75: mol_type = other DNA
aaggaggccgccctgcagatactagtgaacacactcacccacgcggcagagcacgaggtgccgtaccggatggaa

SEQ ID NO: 53459 - DNA, 75 bp, synthetic construct
  source 1..75: mol_type = other DNA
tgaacacactcacccacgcggcagagcacgaggtgccgtaccggatggaaatcactgcagaaggcgacctgcaca

SEQ ID NO: 53460 - DNA, 75 bp, synthetic construct
  source 1..75: mol_type = other DNA
gaccgggagcatgtgacgatcgcgagatacgaatgattattcgtctggcgatggggaaaacaataacagctctca

SEQ ID NO: 53461 - DNA, 75 bp, synthetic construct
  source 1..75: mol_type = other DNA
atgttcattctctggtatagtgccagcagtacttttggcaaggattcagacatcgtgatgggcgtaagagcgcaa

SEQ ID NO: 53462 - DNA, 75 bp, synthetic construct
  source 1..75: mol_type = other DNA
tttggcgacgggccgtggcaggatgtcaaggggctggatgaagtgggcagtgatacaggcagaacaggagaatga

SEQ ID NO: 53463 - DNA, 75 bp, synthetic construct
  source 1..75: mol_type = other DNA
tcgtccctggtctggaacatgaattttgacagtgatacgaatgtgattgatgtcgccgtgagacgtctgagaagt

SEQ ID NO: 53464 - DNA, 75 bp, synthetic construct
  source 1..75: mol_type = other DNA
ctatgaaagccactgtgaccgcttccagcactgacaccacgaagatttttaaagaatttgatcagattgctacga

SEQ ID NO: 53465 - DNA, 75 bp, synthetic construct
  source 1..75: mol_type = other DNA
gcctgtaaccgcacgcggagatacttggtttaaaggcgataagaacatggggcgctcgccagtaagcgtgactcg

SEQ ID NO: 53466 - DNA, 75 bp, synthetic construct
  source 1..75: mol_type = other DNA
tacagccaccgtttcgtaaataactcctaccttcatctgggcatattttcagaacgggaacttgttggcgtaatg

SEQ ID NO: 53467 - DNA, 75 bp, synthetic construct
  source 1..75: mol_type = other DNA
cgtacccgccaggtcgaagccgaacgggaagtggccatacgggaaattgagcaacagcaggcaaccgaaatcgcc

SEQ ID NO: 53468 - DNA, 75 bp, synthetic construct
  source 1..75: mol_type = other DNA
ttctgacgaaaccgtgcgttattgagtatgaaggccagattgttggctatggttcaaaggaactgcgcgttgaaa

SEQ ID NO: 53469 - DNA, 75 bp, synthetic construct
  source 1..75: mol_type = other DNA
attatctcaacaaactgttgggaaatgagcttgtcgcaatcaatcagtactttcttcatgcccggatgtttaaaa

SEQ ID NO: 53470 - DNA, 75 bp, synthetic construct
  source 1..75: mol_type = other DNA
ggtaaaccgcgaaagcatggactccctgaaagaaacgttacagggtgcacgtggtggtggtgcgtttaaaaacgt

SEQ ID NO: 53471 - DNA, 75 bp, synthetic construct
  source 1..75: mol_type = other DNA
tcgcattgccaatacctacatgctcaaaacagaacaatacgggaaatgggtagcaccactcgcgctaacagcgaa

SEQ ID NO: 53472 - DNA, 75 bp, synthetic construct
  source 1..75: mol_type = other DNA
ctgaaattgccggggattatcgtgagatcctggatgaatccggtttgatgcctgaccccgggatgattcgtgatt

SEQ ID NO: 53473 - DNA, 75 bp, synthetic construct
  source 1..75: mol_type = other DNA
ctggcacagaacgccacgcagcccgtttctcaaccagtgcatcacgcagcaacacgcactacagcctgcaggaaa

SEQ ID NO: 53474 - DNA, 75 bp, synthetic construct
  source 1..75: mol_type = other DNA
attcttcactttttgttgcttacatggggtgtcttgggtggggaagtgcttatttctatggctggggtacttcct

SEQ ID NO: 53475 - DNA, 75 bp, synthetic construct
  source 1..75: mol_type = other DNA
agatgaaaataaaacgccagtgacgcctgaacaaacaattattccccgtcgtcgggaggataaactgaacgatct

SEQ ID NO: 53476 - DNA, 75 bp, synthetic construct
  source 1..75: mol_type = other DNA
tctaaatcgagaaaaggagtattgcggggattgcattatcaattagagccgtatgcgcaagcaaaacttgtgcgt

SEQ ID NO: 53477 - DNA, 75 bp, synthetic construct
  source 1..75: mol_type = other DNA
atgaaaaaggtttttgctgtttcagtggtggccacagcctgtgtatttgcagcaaatgcaggtgctgaggaaggt

SEQ ID NO: 53478 - DNA, 75 bp, synthetic construct
  source 1..75: mol_type = other DNA
aaagagagcgtgttggcggcttctttgttctctggcaaaacttacacgcctaaaactgatgatgtgttaattgag

SEQ ID NO: 53479 - DNA, 75 bp, synthetic construct
  source 1..75: mol_type = other DNA
accagcgcgacgctgaatcctgatgcaggtttctggaataacacccgatatggcgctgaattttatcagttgatc

SEQ ID NO: 53480 - DNA, 75 bp, synthetic construct
  source 1..75: mol_type = other DNA
gattcatggcgagaaaatttttattaataccggtgcacaaaccgtggttccgccaattcctggaattaccaccac

SEQ ID NO: 53481 - DNA, 75 bp, synthetic construct
  source 1..75: mol_type = other DNA
ggagatgatgatacaccgttatcagttgcggagcgtgcccgccgaaatctggaagcggatgttgaactgttcatc

SEQ ID NO: 53482 - DNA, 75 bp, synthetic construct
  source 1..75: mol_type = other DNA
atgtgggtattttccctgggtgtctggtttcatatcgtcgcccgtcttgtttacagcaaaccctggatggctttt

SEQ ID NO: 53483 - DNA, 75 bp, synthetic construct
  source 1..75: mol_type = other DNA
tctatgaagtgcgtgctgaagcccagcgtgcgcgttttaaactgcccgcgtggccgaccaccacgattggttcct

SEQ ID NO: 53484 - DNA, 75 bp, synthetic construct
  source 1..75: mol_type = other DNA
ggcggaagaactgccggctgttactgccctggccatttcccacaacacaaagctgctcgacccgctggagattcg

SEQ ID NO: 53485 - DNA, 75 bp, synthetic construct
  source 1..75: mol_type = other DNA
gtacagccgctttgcagactggtatgacgagcgcaaccgccccggcaatatggtgggctggcgcagggtggagaa

SEQ ID NO: 53486 - DNA, 75 bp, synthetic construct
  source 1..75: mol_type = other DNA
ctggcatcaacagggagtacaggtgactcgtatgacaacgcgatggcggagagcatcaatggtctttacaaagcg

SEQ ID NO: 53487 - DNA, 75 bp, synthetic construct
  source 1..75: mol_type = other DNA
tctggaatgaaattgcagcagaacgtacaagccatttacatagaatgcaaagcgaaactggaggttgccagtgag

SEQ ID NO: 53488 - DNA, 75 bp, synthetic construct
  source 1..75: mol_type = other DNA
cctgttcccgaccattttgctgatcaccaccttaatgcgcctgacgcttaacgttgcttctacgcgcgtggtgct

SEQ ID NO: 53489 - DNA, 75 bp, synthetic construct
  source 1..75: mol_type = other DNA
tttcgctgatatcccaggatatcgccaaaatgcgactgcgcctgatgcagaccgatacacaggggatccgccgtg

SEQ ID NO: 53490 - DNA, 75 bp, synthetic construct
  source 1..75: mol_type = other DNA
gtttgatgaaatcaatattgtgcgcggtcagctcgttcctggtgggaggctggatgtgaagatttacgaaatcag

SEQ ID NO: 53491 - DNA, 75 bp, synthetic construct
  source 1..75: mol_type = other DNA
tcagccagtatctgccgctgcaatacgtgaaagttcgctccggcgagctgcaaccgacgccacgggaactcatta

SEQ ID NO: 53492 - DNA, 75 bp, synthetic construct
  source 1..75: mol_type = other DNA
aatctggcggggatccgtcagtaaaatcaaaacatgatccgtcagataaaaaaacttctcgtccggacgcttcgc

SEQ ID NO: 53493 - DNA, 75 bp, synthetic construct
  source 1..75: mol_type = other DNA
agcaggcaacgcttgagaatgctgcgctgcgggcctgggccagacggtatcaggagcaggtggccgccgggcagc

SEQ ID NO: 53494 - DNA, 75 bp, synthetic construct
  source 1..75: mol_type = other DNA
tccaaatgcgcaacaaaacgagccagaaacgaaacagcctgaaccagtagcgcaacaggaaccggaaaaagtctg

SEQ ID NO: 53495 - DNA, 75 bp, synthetic construct
  source 1..75: mol_type = other DNA
cgctggccagactgtcggggttccgtcataaaacggtgaaggtgccggaatggggtaatgtcagcgtggtgctgc

SEQ ID NO: 53496 - DNA, 75 bp, synthetic construct
  source 1..75: mol_type = other DNA
aggcgctgaacatccacacaaggagaatgctggcagcgctcaggaccacgccagcgatagtgaaactggcgagac

SEQ ID NO: 53497 - DNA, 75 bp, synthetic construct
  source 1..75: mol_type = other DNA
aaatccgttttcgtctggggccggcgagcattattgagacaaacagcaatggctggttcccgggtacagatggtg

SEQ ID NO: 53498 - DNA, 75 bp, synthetic construct
  source 1..75: mol_type = other DNA
gagcattattgagacaaacagcaatggctggttcccgggtacagatggtgcgctcatcaccggactgacctttct

SEQ ID NO: 53499 - DNA, 75 bp, synthetic construct
  source 1..75: mol_type = other DNA
gatgaattgcgtgctgtggcggaagagtcggcggaaggtttgcgcgagcatttttactggcaaaaatcgcgcaaa

SEQ ID NO: 53500 - DNA, 75 bp, synthetic construct
  source 1..75: mol_type = other DNA
tcttttttgatgattgattggccaaataaaccgatagcaatctcagaaaaagataaaaaaggctcatcaattttg

SEQ ID NO: 53501 - DNA, 75 bp, synthetic construct
  source 1..75: mol_type = other DNA
attgtgcgcagctatattcctgatttatttaactatgacgatattacgcagttgcataaccgtttggcgtcgatg

SEQ ID NO: 53502 - DNA, 75 bp, synthetic construct
  source 1..75: mol_type = other DNA
agaaggtataaagaaagccctttctgatggcctgtcagtgcgtaaaaccgccgagagctttaatgttgctccttc

SEQ ID NO: 53503 - DNA, 75 bp, synthetic construct
  source 1..75: mol_type = other DNA
tatgtcaggcaaacgaaaaggcctttcagatccacgggggcagttaacactgtcttttgttgaactggcgaatca

SEQ ID NO: 53504 - DNA, 75 bp, synthetic construct
  source 1..75: mol_type = other DNA
gttgcaaatatcaagggggagcatgttattagcggcaaagtcatttttatggaaaccaaaaatgggaagcgtcgc

SEQ ID NO: 53505 - DNA, 75 bp, synthetic construct
  source 1..75: mol_type = other DNA
catccttacggtgcgatggagcgagtgcgtatttctgcggtcattagtgatcttgaaagtattaatgttacacgc

SEQ ID NO: 53506 - DNA, 75 bp, synthetic construct
  source 1..75: mol_type = other DNA
tacgaacagtcaaagagtttaaatcggtaggcctagatactgtatacaacatagaagtcgaaggtgatcattcct

SEQ ID NO: 53507 - DNA, 75 bp, synthetic construct
  source 1..75: mol_type = other DNA
gcaaccggacctcagggaccgaagggcgacccgggggagacacaaatccgttttcgtctggggccggcgagcatt

SEQ ID NO: 53508 - DNA, 75 bp, synthetic construct
  source 1..75: mol_type = other DNA
cggggaggcgaagaagaatgccggagaggcagagacgtccgcgaggaatgccggcatatcagccagtcaggcaga

SEQ ID NO: 53509 - DNA, 75 bp, synthetic construct
  source 1..75: mol_type = other DNA
tgaaagacggcacaggaaaaccggtagagaactgcaccattcaactgaaagccagacgtaacagcgccacggtgg

SEQ ID NO: 53510 - DNA, 75 bp, synthetic construct
  source 1..75: mol_type = other DNA
ctgctaagggaagatagtgatataggagcacttctgatactccgtgagtttgaaaatacacggtatgttgatgcg

SEQ ID NO: 53511 - DNA, 75 bp, synthetic construct
  source 1..75: mol_type = other DNA
atgatggcaaacctacgcaaagaagcgcgtggcagagaatgtcaggtacggatttacggcgtatgcaatggcaat

SEQ ID NO: 53512 - DNA, 75 bp, synthetic construct
  source 1..75: mol_type = other DNA
accaatagaaaatgtttgccctggtgattacgtagtcagtcatctcgggcggttacaacaagtaaaaagagttgg

SEQ ID NO: 53513 - DNA, 75 bp, synthetic construct
  source 1..75: mol_type = other DNA
gaccgtcagccatcagccgcctggaaagcaatcctttaggggcaagtatgaaaactttggctaaatatgctcatg

SEQ ID NO: 53514 - DNA, 75 bp, synthetic construct
  source 1..75: mol_type = other DNA
ggaaagtaatcctttaggagccagtatgaaaactttaacaagatatgctcaggcctgtggtgcaaccatcaatat

SEQ ID NO: 53515 - DNA, 75 bp, synthetic construct
  source 1..75: mol_type = other DNA
tggcggagaatccagaagatgccgcactggcgacgcaactggcgctgcaactgcatcaggttgggcgcaatgaag

SEQ ID NO: 53516 - DNA, 75 bp, synthetic construct
  source 1..75: mol_type = other DNA
tccctggtggcattggttgctggagagagaaaacccccgcacgttgcaggtatgcacctgacaacatcacggggg

SEQ ID NO: 53517 - DNA, 75 bp, synthetic construct
  source 1..75: mol_type = other DNA
ccattaggattagaaacactaaaatgcattaagccactgcattcaatgggcggaactggtgaaagaagcggtcca

SEQ ID NO: 53518 - DNA, 75 bp, synthetic construct
  source 1..75: mol_type = other DNA
catgcggtccatcaggagttaatcgatacgaaccctgcagcaaaccttggcggcgtgaccacacctcctgtcaga

SEQ ID NO: 53519 - DNA, 75 bp, synthetic construct
  source 1..75: mol_type = other DNA
tggtttttattcgctccagtgaactcagatatgcccgctggtcagaaattgatattgaaaatgccatgtggacta

SEQ ID NO: 53520 - DNA, 75 bp, synthetic construct
  source 1..75: mol_type = other DNA
taaaagaatcgttgcaaaacattcaagaaaacaaaaatatgatgtatctgtatttatttgtcctgattctttcct

SEQ ID NO: 53521 - DNA, 75 bp, synthetic construct
  source 1..75: mol_type = other DNA
gggcctcccgggccaaagggggaaccgggtcccgcgggtcctcaggggccgaagggagataaaggagagcgtggc

SEQ ID NO: 53522 - DNA, 75 bp, synthetic construct
  source 1..75: mol_type = other DNA
cctgatttacgcggtgagtttattcgtggctgggatgatggaagagggattgatactaaccgtagcttgctttcg

SEQ ID NO: 53523 - DNA, 75 bp, synthetic construct
  source 1..75: mol_type = other DNA
ggctgaagcggggttaccgactggcagagctggccctgatgcatgagcgactggcacgacagcaggtgtgcggct

SEQ ID NO: 53524 - DNA, 75 bp, synthetic construct
  source 1..75: mol_type = other DNA
ctgtttaactacaacgtaacggttcgtgattacgacaaagacgattttgacggtgacaagtaccacaacacgaaa

SEQ ID NO: 53525 - DNA, 75 bp, synthetic construct
  source 1..75: mol_type = other DNA
atggctctgagtgatgtgaaggttcgttcggctaagcctgaagcaaaagcctataagctgaccgacggtgaaggc

SEQ ID NO: 53526 - DNA, 75 bp, synthetic construct
  source 1..75: mol_type = other DNA
atgcaacaactttcctttctgcccggagcgatgacgcccggcgagcgcagtctcattctgcgggccctgaaaacc

SEQ ID NO: 53527 - DNA, 75 bp, synthetic construct
  source 1..75: mol_type = other DNA
atgccgctgccgtggtactggcacacaatcacccgtccggtgaagtcacacccagtaaggcagaccggcttatca

SEQ ID NO: 53528 - DNA, 75 bp, synthetic construct
  source 1..75: mol_type = other DNA
atgaaacacttatccacccgtgccgccaatgcggataataatcgcatcgtaactggccgggacatttacgaaatc

SEQ ID NO: 53529 - DNA, 75 bp, synthetic construct
  source 1..75: mol_type = other DNA
ctatcgttaccggcagcgatccgcgcgccctgccggagttcagcgccatccgcgaagaaattaacaaagctaacc

SEQ ID NO: 53530 - DNA, 75 bp, synthetic construct
  source 1..75: mol_type = other DNA
tgcagtgcgctgatggaatcgggtttatgggcaaaggacgcagtagaacgccagatgagtcatcaggagcgcaat

SEQ ID NO: 53531 - DNA, 75 bp, synthetic construct
  source 1..75: mol_type = other DNA
tcaacgtatcccgggtgatggataacgccacgcatgtggcggtgtacttcggctcttacctgaaaaagccgccgg

SEQ ID NO: 53532 - DNA, 75 bp, synthetic construct
  source 1..75: mol_type = other DNA
gtaagcggaacattgcggagcttaagactcgggatcttcttgtacccattaaagctgtcgagtcatccgggcgac

SEQ ID NO: 53533 - DNA, 75 bp, synthetic construct
  source 1..75: mol_type = other DNA
catatgaagtgtacttcggatatgaccgtacgctcaggaagtacggcagattccgtcaaaaattacctgtaaaga

SEQ ID NO: 53534 - DNA, 75 bp, synthetic construct
  source 1..75: mol_type = other DNA
gattcgctgtgtgagttcaccgtaaaggaacgtaatattgagtttaaggttgttctcgcttacgaaccgaagaag

SEQ ID NO: 53535 - DNA, 75 bp, synthetic construct
  source 1..75: mol_type = other DNA
acatgcgtcagcagctttccgcccgcatgctcagtcgttaccagaacaactatcacttcggagggagcacgctgt

SEQ ID NO: 53536 - DNA, 75 bp, synthetic construct
  source 1..75: mol_type = other DNA
ttttgccgatatcaacgacaacgacagcgtcgatatcagtatcagtctgatgctgaccgagcgcactatcgttaa

SEQ ID NO: 53537 - DNA, 75 bp, synthetic construct
  source 1..75: mol_type = other DNA
aggatactcctcgttttcaacaactgctgggtgacgggagccagtggggcctgaatcttcagtacaaagtgcaac

SEQ ID NO: 53538 - DNA, 75 bp, synthetic construct
  source 1..75: mol_type = other DNA
atgaaaacgcgtaaaggtattattttagcggggggggctggtactcgtctttatcctgtgactatggctgtaagc

SEQ ID NO: 53539 - DNA, 75 bp, synthetic construct
  source 1..75: mol_type = other DNA
attcgtaaatagaataaggggagggatggatctaggttactggcgaacacatgatttcagaagaacgcttgttac

SEQ ID NO: 53540 - DNA, 75 bp, synthetic construct
  source 1..75: mol_type = other DNA
ttgaagcaagcaacttcattgccaccattgaagagcgccagggactaaaggtttcctgcccagaagaaattgctt

SEQ ID NO: 53541 - DNA, 75 bp, synthetic construct
  source 1..75: mol_type = other DNA
cgagccagacgatagcaatacgtttgattatgttgatggctggaacgcctgccgcgctgccatgcttcagggtaa

SEQ ID NO: 53542 - DNA, 75 bp, synthetic construct
  source 1..75: mol_type = other DNA
tccggaccttatctggctattaccagacggcgaaatacgccgctacgacaggcgcctaaacataatctgtcgcga

SEQ ID NO: 53543 - DNA, 75 bp, synthetic construct
  source 1..75: mol_type = other DNA
ttgctggtggatccggcactcgtctctaccctgtgaccatggcggtgagtaaacaactgctgcccatttacgaca

SEQ ID NO: 53544 - DNA, 75 bp, synthetic construct
  source 1..75: mol_type = other DNA
aggcgtgaagcagggcagtgtcagcattgtgggcatgaccgctgacgggaattttgtggctgtgactgcggtgac

SEQ ID NO: 53545 - DNA, 75 bp, synthetic construct
  source 1..75: mol_type = other DNA
gggaacttaatcaagatgtaactcgagccaaacgcgccacgaattatggtccagtatttattactgatcggggta

SEQ ID NO: 53546 - DNA, 75 bp, synthetic construct
  source 1..75: mol_type = other DNA
ttttcataaacgttggtttgggagaaggctctgcattacctgttggtgtccctgttccgtggccttcagctacgc

SEQ ID NO: 53547 - DNA, 75 bp, synthetic construct
  source 1..75: mol_type = other DNA
tcggggataaccgcatcatgacgttgttgaataccttatatgatctctactgcccgcaggcggaccccgacaagg

SEQ ID NO: 53548 - DNA, 75 bp, synthetic construct
  source 1..75: mol_type = other DNA
acagcgccgacgaaaacgagccgtcattcggttacaccctgcgccgtaaagggatgccggtggcggataaatacg

SEQ ID NO: 53549 - DNA, 75 bp, synthetic construct
  source 1..75: mol_type = other DNA
gtaaaacccatcagcgagattgccagggaaaatggttacaagtgtccttctcgttttactgaaaggttccataat

SEQ ID NO: 53550 - DNA, 75 bp, synthetic construct
  source 1..75: mol_type = other DNA
tacattcagccagaatatcccggacgaaatattaagattgcgtgaatcagtgccttcgcatgttaatcccaccgc

SEQ ID NO: 53551 - DNA, 75 bp, synthetic construct
  source 1..75: mol_type = other DNA
cctgttccatggccgtcagccacaccgccaacagggtggctgaaatgtaacggtgcagcattttcttctgaaatg

SEQ ID NO: 53552 - DNA, 75 bp, synthetic construct
  source 1..75: mol_type = other DNA
cggctcgggcttaggctccagcgcctgttcggtggtcgcggcgctgatggcgatgaatgaacactgcggcaagcc

SEQ ID NO: 53553 - DNA, 75 bp, synthetic construct
  source 1..75: mol_type = other DNA
tgtcgggtcagtggcgggcgggatattgttcagtccactgggaccatttggtgcactgacagggcgtgtggttgg

SEQ ID NO: 53554 - DNA, 75 bp, synthetic construct
  source 1..75: mol_type = other DNA
ggagcaactgattctgcgcatgctttccatgctggggcgtgtggaactgaatcatttgcgcagtggcaacatgga

SEQ ID NO: 53555 - DNA, 75 bp, synthetic construct
  source 1..75: mol_type = other DNA
atgcaatataaaccgacgcatgcagcggtggtctttgacgccaagggaaaaacctttcgtgatgaactgtttgaa

SEQ ID NO: 53556 - DNA, 75 bp, synthetic construct
  source 1..75: mol_type = other DNA
taacagtatgccggaacgggcgcttaagggcattgaagaccgggaccggaaagcgagggaacagcaacaggccgc

SEQ ID NO: 53557 - DNA, 75 bp, synthetic construct
  source 1..75: mol_type = other DNA
gtaacgggctatggcagtcgtggcgaacgctggattattgatcgttacaacatcacgcagtcattgcgcagtgac

SEQ ID NO: 53558 - DNA, 75 bp, synthetic construct
  source 1..75: mol_type = other DNA
gaatttatcaccggaagcgaatgacgattttctcgatcgttgcctggacggcggtgactggtatcccttttcaga

SEQ ID NO: 53559 - DNA, 75 bp, synthetic construct
  source 1..75: mol_type = other DNA
atgacgattgcagaacgtcttatacagaaaggtttcgacgaaggtttcgacgaaggttttaaagaaggttttaag

SEQ ID NO: 53560 - DNA, 75 bp, synthetic construct
  source 1..75: mol_type = other DNA
gcgttatacatatatcccaaccatcaatatcatcaataagttacgtgatgaaggtttccagccgttctttgcctg

SEQ ID NO: 53561 - DNA, 75 bp, synthetic construct
  source 1..75: mol_type = other DNA
gccgttcagagcggcttaatcgactacaaccccgcgcaagagattgcaggtgcggttgctacggcgaaaagacag

SEQ ID NO: 53562 - DNA, 75 bp, synthetic construct
  source 1..75: mol_type = other DNA
accagctatcccggtcaggcaccgcaaatcgttgaaaatcaggtgacttatccgctaaccaccaccatgttgtcg

SEQ ID NO: 53563 - DNA, 75 bp, synthetic construct
  source 1..75: mol_type = other DNA
atgacgactccaaccagacggataagtttctatctgaagcccaccgccgtcaagaacgaaggagaagcatgcgcc

SEQ ID NO: 53564 - DNA, 75 bp, synthetic construct
  source 1..75: mol_type = other DNA
caaagacaaagacaatcgcagcaaaaacgcaaacccgaatcacacggacgacccgggttactggcagtacggtgg

SEQ ID NO: 53565 - DNA, 75 bp, synthetic construct
  source 1..75: mol_type = other DNA
tgccaggacatccccgcgccactgaaacgacttcttcctgactataaacggatggaagaaaaaatagacgccgta

SEQ ID NO: 53566 - DNA, 75 bp, synthetic construct
  source 1..75: mol_type = other DNA
cagaacattccttgctggcaactacctgaaaatcggctggccgtcagtcaatatcatgtcctcatcagattataa

SEQ ID NO: 53567 - DNA, 75 bp, synthetic construct
  source 1..75: mol_type = other DNA
cttatgcctgctcactgtgcactgcctgcaatagtgtatgccctgtaaaaatacctctggcgaagctaatacaaa

SEQ ID NO: 53568 - DNA, 75 bp, synthetic construct
  source 1..75: mol_type = other DNA
tgaccttgttcattcgtcagaagatccgcgaggatttcctcagtgccgaaatcggtattactggctgtaactttg

SEQ ID NO: 53569 - DNA, 75 bp, synthetic construct
  source 1..75: mol_type = other DNA
acggagctgaggacggcaatgttactgagtggtgctcgtacacttaaggatttggctcagggctttatcagaaac

SEQ ID NO: 53570 - DNA, 75 bp, synthetic construct
  source 1..75: mol_type = other DNA
cgggccaataaggtggcgacacaagggaaagatgcgctgcaagagctggaaagatggcaaggcgctgcctgtagc

SEQ ID NO: 53571 - DNA, 75 bp, synthetic construct
  source 1..75: mol_type = other DNA
aaggttgatcgcgcttttagcgacaaggcatccggcaaggatgtcaagcgtccgcaactggaagcgctgataagc

SEQ ID NO: 53572 - DNA, 75 bp, synthetic construct
  source 1..75: mol_type = other DNA
cgaaacagctcagacatttgaaggcatcgcaagacagtggcataagagcaacaaaaaatggtcagcctcacacaa

SEQ ID NO: 53573 - DNA, 75 bp, synthetic construct
  source 1..75: mol_type = other DNA
aacgcgttatggcgtgactcgccaggtcccggctatgtgcatttccctgactggctggggagctggttttacgac

SEQ ID NO: 53574 - DNA, 75 bp, synthetic construct
  source 1..75: mol_type = other DNA
gcaccgtatgttattgagcctatgaactgcctggcctcgcgtgaatacgacgcagtgatatttgttggcccggca

SEQ ID NO: 53575 - DNA, 75 bp, synthetic construct
  source 1..75: mol_type = other DNA
acaaaaaatggtcagcctcacatagtgagaagatactgaaaagcctagaaactcatgtgtttccctttatcggtt

SEQ ID NO: 53576 - DNA, 75 bp, synthetic construct
  source 1..75: mol_type = other DNA
ggcaagcaaaataactggctttccgggcaacacggtgaagagggcggttctatgcgcggtgcggcaaacgatctg

SEQ ID NO: 53577 - DNA, 75 bp, synthetic construct
  source 1..75: mol_type = other DNA
cggaagtcagatgcgttttacggggctgaagcggggttaccgactggcagagctggtcctgatgcatgagcgact

SEQ ID NO: 53578 - DNA, 75 bp, synthetic construct
  source 1..75: mol_type = other DNA
gcgttttacggggctgaagcggggctaccgtctggcagagcaggtcctgatgcatgagccgctggcccggatgcg

SEQ ID NO: 53579 - DNA, 75 bp, synthetic construct
  source 1..75: mol_type = other DNA
gccaactcatgaggaacaaattgccgcagccgaactggaaaagcagcaattgattaatcaggtcaacgaatacat

SEQ ID NO: 53580 - DNA, 75 bp, synthetic construct
  source 1..75: mol_type = other DNA
gttacagagccagcacctgaacagcctgcagtatgaccgcgattacacctggaacgacaacggcgaactcatccg

SEQ ID NO: 53581 - DNA, 75 bp, synthetic construct
  source 1..75: mol_type = other DNA
attactgacatgcagcagcgccagcgtgatgctgatgcactcgatgctaaatacacgaaggagttagctgatgcg

SEQ ID NO: 53582 - DNA, 75 bp, synthetic construct
  source 1..75: mol_type = other DNA
acgcgaccaccggcaagtatcacgtcaaccagtataccggcgacgaatgccgtacccgcgtaacccattgggaga

SEQ ID NO: 53583 - DNA, 75 bp, synthetic construct
  source 1..75: mol_type = other DNA
ccggctgattcgtcggggacatctgacttatactcaggcccgtaatatcacccggttcgggaccatcgaatcggt

SEQ ID NO: 53584 - DNA, 75 bp, synthetic construct
  source 1..75: mol_type = other DNA
gctcgtcaaaggaaaatgccctgtgccatcctcagccgaaacctccagcgcctccggcatgggcaatgatgccac

SEQ ID NO: 53585 - DNA, 75 bp, synthetic construct
  source 1..75: mol_type = other DNA
atgatttactctaaccaaatcaaatatagtggcaaagatggcatctatttccacttaagagataatgtagaatct

SEQ ID NO: 53586 - DNA, 75 bp, synthetic construct
  source 1..75: mol_type = other DNA
tgggcgcgttcgccgagttcgaacgcgccttgatccgcgagcggcagcgcgagggcatcgcgctcgccaagcagc

SEQ ID NO: 53587 - DNA, 75 bp, synthetic construct
  source 1..75: mol_type = other DNA
ggaaattaactttaaagctattgtgggtcaaactgatatttcggctgctactggaaagacagctactacaaatga

SEQ ID NO: 53588 - DNA, 75 bp, synthetic construct
  source 1..75: mol_type = other DNA
cactatggcgcgttcttttaaagccgtagccaatggcaaaatttatatcggtaaaattgacactgaccctgtaaa

SEQ ID NO: 53589 - DNA, 75 bp, synthetic construct
  source 1..75: mol_type = other DNA
ggtgccagaaaagtcgccagctatctgaagctgggggattacagttttgaagccgtccgctttgcgctgcaggat

SEQ ID NO: 53590 - DNA, 75 bp, synthetic construct
  source 1..75: mol_type = other DNA
ggcgtgatcaccaatcacaataaattcgatcccggtgagtttaaggcactgcgcaaagctgcgcgccatgaaggc

SEQ ID NO: 53591 - DNA, 75 bp, synthetic construct
  source 1..75: mol_type = other DNA
aacaaagaacagaaaaaaacattaagcaaaaaatagcatcagcgcagatgcgtttgaatcgtctcaagaccaaag

SEQ ID NO: 53592 - DNA, 75 bp, synthetic construct
  source 1..75: mol_type = other DNA
gcgctggagaaactggtacaggataaagccggaaatgcggcattggctgatcaggccagagaagcgatgcacacc

SEQ ID NO: 53593 - DNA, 75 bp, synthetic construct
  source 1..75: mol_type = other DNA
gtgaacctctcacaagacggcatcaaattacatcgcggcaacttcaccgctatcggccagcagatccagccttat

SEQ ID NO: 53594 - DNA, 75 bp, synthetic construct
  source 1..75: mol_type = other DNA
gtttcactgggacaggtataacccggcaacggaggcgagttcgtgctgggtgcgagtgtctcaggcgtgggcggg

SEQ ID NO: 53595 - DNA, 75 bp, synthetic construct
  source 1..75: mol_type = other DNA
tgcaggttaagccgtggcgcgagaagcgcagcctgtcgcagaacgcgctcagccacatgtggtacacggagatca

SEQ ID NO: 53596 - DNA, 75 bp, synthetic construct
  source 1..75: mol_type = other DNA
aagagatgcctgatgtatgcaaaactgaagcattacttgagcttgagcgtgaatattacccactgctgaaagcac

SEQ ID NO: 53597 - DNA, 75 bp, synthetic construct
  source 1..75: mol_type = other DNA
tcgctgccgggtctagaacaggcgcctgaggctatcttccgatttgtgctcaatgacgaaggttttgatgttggt

SEQ ID NO: 53598 - DNA, 75 bp, synthetic construct
  source 1..75: mol_type = other DNA
tttgtgccgttatttcgggtgcagaaggttgggaagatatagaggattttggggaaacacatctcgattttttga

SEQ ID NO: 53599 - DNA, 75 bp, synthetic construct
  source 1..75: mol_type = other DNA
taaccggggctatatggagttgaaccgcatgtggctacacgacgacatgccccgcaactctgaatcacgggccat

SEQ ID NO: 53600 - DNA, 75 bp, synthetic construct
  source 1..75: mol_type = other DNA
ctccctgccttatctggctaccggcgccggatatcactgcaacactcccagagtgtttctcgcaactcatcctgg

SEQ ID NO: 53601 - DNA, 75 bp, synthetic construct
  source 1..75: mol_type = other DNA
gaactaccggcactgaacgtatgtttaaggaagagctggcgttatccttaatttgttgggttttcaccagtcctt

SEQ ID NO: 53602 - DNA, 75 bp, synthetic construct
  source 1..75: mol_type = other DNA
gaagtggcactgggacatctgtccctgaacggaacaataatggtgcaggcagttaatgactggggaggaatgcaa

SEQ ID NO: 53603 - DNA, 75 bp, synthetic construct
  source 1..75: mol_type = other DNA
acggggtgagtttattcgcggctgggatgacgggcggggaattgattcagggcgttccttgcttaatgcacaatc

SEQ ID NO: 53604 - DNA, 75 bp, synthetic construct
  source 1..75: mol_type = other DNA
aggtacagatgatcgccattggcggcgcgattggtacgggtttgtttttaggcgcgggggcgcgactgcaaatgg

SEQ ID NO: 53605 - DNA, 75 bp, synthetic construct
  source 1..75: mol_type = other DNA
ccgttggtgtgcctgttccgtggccttccgccactccgccaacaggctggctgaaatgcaacggtgcggcttttt

SEQ ID NO: 53606 - DNA, 75 bp, synthetic construct
  source 1..75: mol_type = other DNA
atgtgaacggcgttccgcttcgggagagcctcagctacaacgggggcggtgcaggatttggcgggcaaatggcag

SEQ ID NO: 53607 - DNA, 75 bp, synthetic construct
  source 1..75: mol_type = other DNA
aaaccttttttttacgaaggttctgtccttgataggaatttattgaaaaaaatctttgtcgaaaataacatcacc

SEQ ID NO: 53608 - DNA, 75 bp, synthetic construct
  source 1..75: mol_type = other DNA
tattgctgcgttcggcgttgatggtatatatctgaaaatcctgtttgcggtccttgcctgctgtggtgcggtatg

SEQ ID NO: 53609 - DNA, 75 bp, synthetic construct
  source 1..75: mol_type = other DNA
ctggattcagccgtggcgttaagtccgttatggattgtgcatactcttgcggaaatagctaaaagaagtgacaag

SEQ ID NO: 53610 - DNA, 75 bp, synthetic construct
  source 1..75: mol_type = other DNA
aattcggtggtgatacctggacccaaacagatgtgttcatgactggtcgcactactggtgttgcaacttatcgta

SEQ ID NO: 53611 - DNA, 75 bp, synthetic construct
  source 1..75: mol_type = other DNA
aggtattttaatcctgtcggagcccattcatcaggtttcatcggcgaggacccgaatggaattccaaataatcta

SEQ ID NO: 53612 - DNA, 75 bp, synthetic construct
  source 1..75: mol_type = other DNA
tccgtaaaactggacggcgaaagcaacgccggattcatagtaaccgccatgcgcggtgagatcgcccgccgccag

SEQ ID NO: 53613 - DNA, 75 bp, synthetic construct
  source 1..75: mol_type = other DNA
cgggatggatgtcgctgtcgcggaaaccggaggtgacgtggtacgggtgggacggcgaccggctgacgacggtac

SEQ ID NO: 53614 - DNA, 75 bp, synthetic construct
  source 1..75: mol_type = other DNA
gcagcgacgattgaaagtgaacttgataccgaaaaggcctttgaatatatcgccggtgcgccgcaggggcagaag

SEQ ID NO: 53615 - DNA, 75 bp, synthetic construct
  source 1..75: mol_type = other DNA
ttccggtgcacgaaaattgcagtacaggagggacaacaaatccatatgggacgacaaaatatattgttgaaagaa

SEQ ID NO: 53616 - DNA, 75 bp, synthetic construct
  source 1..75: mol_type = other DNA
gagaacggcgtcacagagtggacgccgctgttttatgaggaccatccggcgcgggagttctgtgtccagtacggg

SEQ ID NO: 53617 - DNA, 75 bp, synthetic construct
  source 1..75: mol_type = other DNA
aggtccgttcaccattcaggacctggacagctccgtgcgtggccgcctggatgttgaagttatcgagcaggacgg

SEQ ID NO: 53618 - DNA, 75 bp, synthetic construct
  source 1..75: mol_type = other DNA
gccaaaatgtataaagctggttatgcatttaaaaaactcaatggcctggtgtctgaattttctatgggtggggta

SEQ ID NO: 53619 - DNA, 75 bp, synthetic construct
  source 1..75: mol_type = other DNA
agctttatcgccgctatcagcaatgggcgatgagcgccgaacaacactatcttccaacttccgccccggcacagg

SEQ ID NO: 53620 - DNA, 75 bp, synthetic construct
  source 1..75: mol_type = other DNA
tatgtggcgccgcaggaaacctttgtttatcggcctcgcttccgttccgtggcgtatttgtcggatattctggcc

SEQ ID NO: 53621 - DNA, 75 bp, synthetic construct
  source 1..75: mol_type = other DNA
ccttcgcctggctttatacgctatgccagatccccggcggttggtttttagatcgcgtaggttctcgcgtgactt

SEQ ID NO: 53622 - DNA, 75 bp, synthetic construct
  source 1..75: mol_type = other DNA
catggcatgagggagccgccttcgtctttgttaacaaagcccgttcgcgtatcaaagttctccggtgggataaac

SEQ ID NO: 53623 - DNA, 75 bp, synthetic construct
  source 1..75: mol_type = other DNA
accaatgatgcaaatgtagaaattaaactgttaactaatgattattatatatttgaggtgaattgtaatgagcac

SEQ ID NO: 53624 - DNA, 75 bp, synthetic construct
  source 1..75: mol_type = other DNA
gccataattatgcgaactactggcgtgagatgtgcgacatttttaagaaactcgatacagaatccttgatttgca

SEQ ID NO: 53625 - DNA, 75 bp, synthetic construct
  source 1..75: mol_type = other DNA
tgtggctggattacctggacgcactggaactggtggatacctccagtgccccagatattgaatggcctacgcctc

SEQ ID NO: 53626 - DNA, 75 bp, synthetic construct
  source 1..75: mol_type = other DNA
tatggtttccggtcagtgcgcatttaagctccgcactttctctccggtggcacgctatttttccctcctcccctg

SEQ ID NO: 53627 - DNA, 75 bp, synthetic construct
  source 1..75: mol_type = other DNA
ctgtttccgggccgcgctgctggatgggatttgattattcgcgtggcgtggatagttctgccgtgtacggagtac

SEQ ID NO: 53628 - DNA, 75 bp, synthetic construct
  source 1..75: mol_type = other DNA
ggaagaagaaaaagaaaagacaccgttttccacgtccctcccactggacccgtgagtatactcacgagtgcgtgg

SEQ ID NO: 53629 - DNA, 75 bp, synthetic construct
  source 1..75: mol_type = other DNA
cgctccattcggcagaaggaaacatcaacgggcaacagattcatgcattctgtacttccttttatgaacgtatta

SEQ ID NO: 53630 - DNA, 75 bp, synthetic construct
  source 1..75: mol_type = other DNA
cgagctggattacaacatattccgcggtctggcgtttgcttccggcaacccgatttacggtctgatccttaacgg

SEQ ID NO: 53631 - DNA, 75 bp, synthetic construct
  source 1..75: mol_type = other DNA
gtattcacgacaagccgagcaccgaagcgattacctctttccgttcagtgctggcggagctggggctggaactgc

SEQ ID NO: 53632 - DNA, 75 bp, synthetic construct
  source 1..75: mol_type = other DNA
gcgattgccaatcagggctgtgccgaaatggacagcggcaatcaagtcgcaagtaaatccagcaagtacggtaaa

SEQ ID NO: 53633 - DNA, 75 bp, synthetic construct
  source 1..75: mol_type = other DNA
ttaacccgctgtggatcatcgttggcttcttcgtcatcggtatcgctggttacgcttgcggcctgctgggactgt

SEQ ID NO: 53634 - DNA, 75 bp, synthetic construct
  source 1..75: mol_type = other DNA
tccgccgacggtgcagcagacgctgcacctgctcaggcagaagagaagaaagaagccgctccggcagcagcacca

SEQ ID NO: 53635 - DNA, 75 bp, synthetic construct
  source 1..75: mol_type = other DNA
gtctaaagcaaaaaagacctgaagaacactcgcttcttgttgcccattacctatacggtatctctaaaagaaagc

SEQ ID NO: 53636 - DNA, 75 bp, synthetic construct
  source 1..75: mol_type = other DNA
ggtacggggtgcgcaccgttgagccacaccatgacggcacaccgcactggcacatgctggtattcaccgccccgg

SEQ ID NO: 53637 - DNA, 75 bp, synthetic construct
  source 1..75: mol_type = other DNA
gaacagttaactgctgaagatcgtaaccattgtatgaaactgtctaaaaaatccatagagaaaaaactatacacc

SEQ ID NO: 53638 - DNA, 75 bp, synthetic construct
  source 1..75: mol_type = other DNA
tatccctcttatgatggtgacttattttttaccaggagtaacatcatcatatgttgcaccgtatgagtatacatc

SEQ ID NO: 53639 - DNA, 75 bp, synthetic construct
  source 1..75: mol_type = other DNA
tttctggctgtcgaaggtgaagccggggtaaccgaagggcaggcactacaacctgaagcgccggatgtggtaacc

SEQ ID NO: 53640 - DNA, 75 bp, synthetic construct
  source 1..75: mol_type = other DNA
agtctggctgcgtgatgtgctggagaagctgccgtcatggccggcgtcccggctggatgaactgctgccttaccg

SEQ ID NO: 53641 - DNA, 75 bp, synthetic construct
  source 1..75: mol_type = other DNA
gccaaacaatttgcctcacaataaagaaagtttattttatctaaatgttctggatatccctccaaacaacccaca

SEQ ID NO: 53642 - DNA, 75 bp, synthetic construct
  source 1..75: mol_type = other DNA
atttggccgcattttgtgggagcgtagtcaggggattgacgagcgcgacgttaacagcgaacggttgcgaaaatc

SEQ ID NO: 53643 - DNA, 75 bp, synthetic construct
  source 1..75: mol_type = other DNA
gtgttacaacgtctggcacgagatggctggttgaccattcaacacggcaagccgacgaaggtgaataatttctgg

SEQ ID NO: 53644 - DNA, 75 bp, synthetic construct
  source 1..75: mol_type = other DNA
ccctggtggggaaaaattatgttatcgcccgcaaacccgaacagaacgatggatttgattgcatcacggcctcgc

SEQ ID NO: 53645 - DNA, 75 bp, synthetic construct
  source 1..75: mol_type = other DNA
gaacgggatgtcgaaaacagctatctggcctcggatgcggtggatgacgacccgatgacacccctgctggggcac

SEQ ID NO: 53646 - DNA, 75 bp, synthetic construct
  source 1..75: mol_type = other DNA
atgaagctaatactgccttttccgcccagcgtgaacacgtactggcgacaccccaacaaaggggcgtttgcaggt

SEQ ID NO: 53647 - DNA, 75 bp, synthetic construct
  source 1..75: mol_type = other DNA
tgacgatagccgtctgagcttcgatatcttaatcccgcccgatcagatcatgggcgcgcggatgggctttgtggt

SEQ ID NO: 53648 - DNA, 75 bp, synthetic construct
  source 1..75: mol_type = other DNA
cttaatctcgggttgacggcaggtaaagtgtggtacgacaccccaaccgatgattataacggtctgcaacttgca

SEQ ID NO: 53649 - DNA, 75 bp, synthetic construct
  source 1..75: mol_type = other DNA
gttgcattgggactgggcacaactcctaatgctgtcagctaaaagaatgaaagtagcatttaagctagatattga

SEQ ID NO: 53650 - DNA, 75 bp, synthetic construct
  source 1..75: mol_type = other DNA
attctccaaagtttgtatagtgtaggatttgttggtattcgtgataaaaacacctcatcctattcattttgccat

SEQ ID NO: 53651 - DNA, 75 bp, synthetic construct
  source 1..75: mol_type = other DNA
atgaagctgattctgccttttccacccagcgtgaacacctactggcgacaccccaacaaaggggcatttgctggt

SEQ ID NO: 53652 - DNA, 75 bp, synthetic construct
  source 1..75: mol_type = other DNA
catctacaacgaactggtgtggaacgtgctcaaggacaccgttggtgaggaagaagctgtcttgtttgcccgctc

SEQ ID NO: 53653 - DNA, 75 bp, synthetic construct
  source 1..75: mol_type = other DNA
ccggggtgatacatccggtcagtatgttgcgttaaaaacagtcgcattgtctctggggttaccggttgtgacaac

SEQ ID NO: 53654 - DNA, 75 bp, synthetic construct
  source 1..75: mol_type = other DNA
gcacagatctccgaggctgatataacccgtatttctgtggggcaaaaagcccgcttctctatcttctccgaaccg

SEQ ID NO: 53655 - DNA, 75 bp, synthetic construct
  source 1..75: mol_type = other DNA
atgagagggaaactgatatctgccattcatgtggcaaaacgcgagcttgccctggatgatgaaacctacacatcc

SEQ ID NO: 53656 - DNA, 75 bp, synthetic construct
  source 1..75: mol_type = other DNA
cgtaatgccgaagctgcactcaacgaagtgaaagcagaacttcaatccaagcaggcgctcctgaaacaggctgaa

SEQ ID NO: 53657 - DNA, 75 bp, synthetic construct
  source 1..75: mol_type = other DNA
gttgccttaaaaacagtcgcattgtctctggggttaccggttgtgaccggtattatccatcgcccggtacagcgc

SEQ ID NO: 53658 - DNA, 75 bp, synthetic construct
  source 1..75: mol_type = other DNA
atgagcaccatcctgaaatgggcgggaaataaaactgccataatgtccgaactaaaaaaacatcttcctgctggc

SEQ ID NO: 53659 - DNA, 75 bp, synthetic construct
  source 1..75: mol_type = other DNA
cagcaaaagtaaaaagacaacgcagaagcctgcaacacgaaaaaccaccgcgacgcagaaggcaaagcgcggtta

SEQ ID NO: 53660 - DNA, 75 bp, synthetic construct
  source 1..75: mol_type = other DNA
agtaaatctgcaacagaaatcattgctgtttccgggccgcgctgctggatgggatttgatccttcgcgtggcgtg

SEQ ID NO: 53661 - DNA, 75 bp, synthetic construct
  source 1..75: mol_type = other DNA
atgattactgagttaagtgaaagagaatacaaggagttgacagacgctgcagagggacagactcttgatgctatt

SEQ ID NO: 53662 - DNA, 75 bp, synthetic construct
  source 1..75: mol_type = other DNA
ccgtgatggcgcttgttcaggacggctcagccagcggcgtcgccatcgacccgacccgctttcgtgagtacggga

SEQ ID NO: 53663 - DNA, 75 bp, synthetic construct
  source 1..75: mol_type = other DNA
taaaaatctcggcaaattcgcagtcattccagtcagaaattgcgcgagcttcacgtatgggacaggagtactacc

SEQ ID NO: 53664 - DNA, 75 bp, synthetic construct
  source 1..75: mol_type = other DNA
atggacgcacttgtacctttcacactgatgcgcaaaaggctgtgcaatggcttcaggcgtgcgacggaaacaggg

SEQ ID NO: 53665 - DNA, 75 bp, synthetic construct
  source 1..75: mol_type = other DNA
ttgcgaaaggtgccgggctgatgggcgaggccgggcctgaagctatcatgccactgacacgggcagcggacggct

SEQ ID NO: 53666 - DNA, 75 bp, synthetic construct
  source 1..75: mol_type = other DNA
ctctaaccacactctggtattgattgatggagtgcgcctgaatttagcgggtgtcagtggagctgcagacctgag

SEQ ID NO: 53667 - DNA, 75 bp, synthetic construct
  source 1..75: mol_type = other DNA
atgattcgtcagtacttcagccaggaacgaccagaagaagaggccatacaggctctgaatcatctgcgcagggtg

SEQ ID NO: 53668 - DNA, 75 bp, synthetic construct
  source 1..75: mol_type = other DNA
ccacgttcatccggtcgtcatctttctgtagagaatattgagctggctgatatcggaagtgggcgtttcaacctt

SEQ ID NO: 53669 - DNA, 75 bp, synthetic construct
  source 1..75: mol_type = other DNA
tattgccgcaaccatacggcataaccgtgccaggggaaaacaccagataacgtcaatgtctgacattgtcaggga

SEQ ID NO: 53670 - DNA, 75 bp, synthetic construct
  source 1..75: mol_type = other DNA
ttcaattggtcaacgcaacagttatgtgaaaacatggggttgcggaggttttttgaatgagacgaacatttacag

SEQ ID NO: 53671 - DNA, 75 bp, synthetic construct
  source 1..75: mol_type = other DNA
tggaaactttcgggaaaataaggattcgtcaaccaataattttcgggaaacctcggaaacgtcaaccaactctcc

SEQ ID NO: 53672 - DNA, 75 bp, synthetic construct
  source 1..75: mol_type = other DNA
ctgacatatgaagctccagccggtctttttgagcttcttatgcgtacggctgacctcagccatcccgataatatc

SEQ ID NO: 53673 - DNA, 75 bp, synthetic construct
  source 1..75: mol_type = other DNA
tatctcagggatggtgaataacatcacggagatgctgaacggaaataaagtggaatggcgcagctgggcctcatc

SEQ ID NO: 53674 - DNA, 75 bp, synthetic construct
  source 1..75: mol_type = other DNA
atggcgacgttacgtgaactgattatcaaaatttcggcaaattcacagtcattccagtcggagatccagcgggct

SEQ ID NO: 53675 - DNA, 75 bp, synthetic construct
  source 1..75: mol_type = other DNA
attctgcgctggtcaccatgcacagcctggcctgtgagctgttgccggagtggagtgagttttttgatgaactgc

SEQ ID NO: 53676 - DNA, 75 bp, synthetic construct
  source 1..75: mol_type = other DNA
gctgacgctcgaagaactggaactaccttatgagcaaattctcgcgggccgtgagtttgggataaatcacgatgc

SEQ ID NO: 53677 - DNA, 75 bp, synthetic construct
  source 1..75: mol_type = other DNA
agcgactgaatgtatcgcggcggacgttatccttgattttaagagtgggcgtggtttttatgagtctcattcgtt

SEQ ID NO: 53678 - DNA, 75 bp, synthetic construct
  source 1..75: mol_type = other DNA
cgcttctttgataaaatggtttcgaaagaaaactctctggaagatgttgtttctttaggtgaaatgattcagaag

SEQ ID NO: 53679 - DNA, 75 bp, synthetic construct
  source 1..75: mol_type = other DNA
cgtcatcacagaaagtgctgatggatatcagccagcggacaggcacggcattttcggataatgcggccctgtttg

SEQ ID NO: 53680 - DNA, 75 bp, synthetic construct
  source 1..75: mol_type = other DNA
gagttattaaataaaatatgcattctttcaatgctggcccgtttacgtccgatacaaaaaggatgctggcaatga

SEQ ID NO: 53681 - DNA, 75 bp, synthetic construct
  source 1..75: mol_type = other DNA
aagatggtttcacacaaccggtggtggtgtcagaggagaagaatcattatctggtggtggatggttttcatcgtc

SEQ ID NO: 53682 - DNA, 75 bp, synthetic construct
  source 1..75: mol_type = other DNA
agggggaagcaccagataacttcaatgtctgatattgtcagggacctgtcgcggctgggctggacggatgaacgt

SEQ ID NO: 53683 - DNA, 75 bp, synthetic construct
  source 1..75: mol_type = other DNA
agtccacccacgttagtgtggccagttccacttctgcacggtttttccagctcttacggtgtattacctccgctt

SEQ ID NO: 53684 - DNA, 75 bp, synthetic construct
  source 1..75: mol_type = other DNA
tgcctggaggttttcgcggcggtggtgctattaaagtgcaattatggtgggcggtgcaagcaacattatttcgct

SEQ ID NO: 53685 - DNA, 75 bp, synthetic construct
  source 1..75: mol_type = other DNA
cggagggaacaggcagcctgtatatctacagcgacccggggagttatgaaccgctggcgcgggtggataaggcag

SEQ ID NO: 53686 - DNA, 75 bp, synthetic construct
  source 1..75: mol_type = other DNA
tggtattgatatccgcccttcctcaattccatacgatgattatctagaatgtataaaaggattagctcacgcagt

SEQ ID NO: 53687 - DNA, 75 bp, synthetic construct
  source 1..75: mol_type = other DNA
aattgttgtttcggaagaaacaagccattacctggtggtggatggttttcataggcagttactaggtagaagaac

SEQ ID NO: 53688 - DNA, 75 bp, synthetic construct
  source 1..75: mol_type = other DNA
tcatttatgggatgcgggagaaactcatcagttccagcctgcacggttgtatgagattgaatatcatggccgacg

SEQ ID NO: 53689 - DNA, 75 bp, synthetic construct
  source 1..75: mol_type = other DNA
tatccttggactgattttcgaacataacagacaaaataaaggcaagggcgaaatgatcgaagaggtcaaacgctt

SEQ ID NO: 53690 - DNA, 75 bp, synthetic construct
  source 1..75: mol_type = other DNA
cgttcttcatcccgggtactctgggtgttgccctggccgtttgcttcggcttcgtgctgggtagcttcatgctgt

SEQ ID NO: 53691 - DNA, 75 bp, synthetic construct
  source 1..75: mol_type = other DNA
aggtggtggccaacgattataaccccaatgtcatggcgccgggtgagaagaaactgctgaaacattcactggagc

SEQ ID NO: 53692 - DNA, 75 bp, synthetic construct
  source 1..75: mol_type = other DNA
aggctgaaacagattagcggactgacggaattgtttcaggaagaggatttcagcccggcatggacggttcgctga

SEQ ID NO: 53693 - DNA, 75 bp, synthetic construct
  source 1..75: mol_type = other DNA
tcagtacttcagccaggaacgatcagaaaaagagactatacaggctctgaatcatctgcgcagggtacttcatga

SEQ ID NO: 53694 - DNA, 75 bp, synthetic construct
  source 1..75: mol_type = other DNA
gccgtgcggggaggtgacgccacaggagcagaaagaggctgaaacccggctgatggcgctgaatgaccggcgtaa

SEQ ID NO: 53695 - DNA, 75 bp, synthetic construct
  source 1..75: mol_type = other DNA
ttatgagtggaatatcatttatgtcacgctgaaaacctgtggctggagccgaaatggccaaagcaaaacgccgaa

SEQ ID NO: 53696 - DNA, 75 bp, synthetic construct
  source 1..75: mol_type = other DNA
gcagatggtagggtttcacaaaggtaaagggttatttcaattcttttacatgaatggtgttgagggggtatgtga

SEQ ID NO: 53697 - DNA, 75 bp, synthetic construct
  source 1..75: mol_type = other DNA
taacaaggttctggcgtgttaccaacgcgaagctaacaaggaaatagcgcgtctattaaataatcatcagaagtt

SEQ ID NO: 53698 - DNA, 75 bp, synthetic construct
  source 1..75: mol_type = other DNA
tattcgagcgatatggaatagccccaaacgatagcattaccacaattcaggcactgcgaatcgcgctggatggca

SEQ ID NO: 53699 - DNA, 75 bp, synthetic construct
  source 1..75: mol_type = other DNA
tggggccggtgcctggtacacggtgtaccagcgtcaggaacaggccagggagtccgcgcgccagtatgcatcgac

SEQ ID NO: 53700 - DNA, 75 bp, synthetic construct
  source 1..75: mol_type = other DNA
gacctggccggtgataagcgctggcggacaatgccgggtggaaaggtgttttcgggttgtccggcctgatacatc

SEQ ID NO: 53701 - DNA, 75 bp, synthetic construct
  source 1..75: mol_type = other DNA
ttgatgaacaatgttcgcaagtggtggatttactgcaacatagctggcaggtgataagtgctggcggacaatgcc

SEQ ID NO: 53702 - DNA, 75 bp, synthetic construct
  source 1..75: mol_type = other DNA
cgattctgaaagtgggtctggtcgcctcgattccggcactgtgtggttttgcgggcggcgtgctgggaggtgtct

SEQ ID NO: 53703 - DNA, 75 bp, synthetic construct
  source 1..75: mol_type = other DNA
gttgctgctcagccaggcgagcatttgccatctgcgggtcagtgccacagttgatgaagaatgttcgcaagtggt

SEQ ID NO: 53704 - DNA, 75 bp, synthetic construct
  source 1..75: mol_type = other DNA
gtagcgttaaaaaccgtcgcattgtctctggggttaccggttgtgaccgccattacccatcgtccggtacagcgc

SEQ ID NO: 53705 - DNA, 75 bp, synthetic construct
  source 1..75: mol_type = other DNA
tgtatgatgtgtttcggctcactggttatcgcctgtttgccaggctacgaaacaatcggtacctgggctccggca

SEQ ID NO: 53706 - DNA, 75 bp, synthetic construct
  source 1..75: mol_type = other DNA
tcgcttctgccgggtattatggtgcggaatcacggggagatggcaactggacaacagcatccagggcaacccatt

SEQ ID NO: 53707 - DNA, 75 bp, synthetic construct
  source 1..75: mol_type = other DNA
atgagccggaaaatatttgtactttttgccctgaccacaggactgtttatttctgcccatgcttcggaaaacgtg

SEQ ID NO: 53708 - DNA, 75 bp, synthetic construct
  source 1..75: mol_type = other DNA
ggataatgctgaaacacatacccgtccgtcaggaaatgaaactgcttccagctccccttcctggtattacgtgat

SEQ ID NO: 53709 - DNA, 75 bp, synthetic construct
  source 1..75: mol_type = other DNA
atgcgtttatttttttctctgctgatactgttgtcattctttgcccgcgcgacagaacctgttcaggtctttact

SEQ ID NO: 53710 - DNA, 75 bp, synthetic construct
  source 1..75: mol_type = other DNA
catagcgaaacaattaagactgccatatcctattgaccaggccagtagtgcgcctaatgttttcaaaacattctt

SEQ ID NO: 53711 - DNA, 75 bp, synthetic construct
  source 1..75: mol_type = other DNA
ggcgcatgtccgcccgtcatcggtgcagagccaggattacacgtttaaggtgccggactggccggggatgtatga

SEQ ID NO: 53712 - DNA, 75 bp, synthetic construct
  source 1..75: mol_type = other DNA
tatggtggcaggttcgctgtataccgaattgcagactgtgttccgatgcgtgagaaacgccctctgacgagtaaa

SEQ ID NO: 53713 - DNA, 75 bp, synthetic construct
  source 1..75: mol_type = other DNA
cgccagcttatgaaagagcgctgaataacgccgcaaatgccatcagaccaatacttgccaatgatgcaactgatc

SEQ ID NO: 53714 - DNA, 75 bp, synthetic construct
  source 1..75: mol_type = other DNA
cccgaagaggggctgaaaaggatgctgagcgaaacccggcactacggtattcccgccacgctgcggggcatggtg

SEQ ID NO: 53715 - DNA, 75 bp, synthetic construct
  source 1..75: mol_type = other DNA
tgccggagacatatgaccgccccgaaccgcgtattatgcagttagcccgtcgcagtacagtcacgccgggaggta

SEQ ID NO: 53716 - DNA, 75 bp, synthetic construct
  source 1..75: mol_type = other DNA
cttctgccagccagagaaattgagcgtttacgcacgttatacccgtcgtggcggtctggacattaacccgtggcg

SEQ ID NO: 53717 - DNA, 75 bp, synthetic construct
  source 1..75: mol_type = other DNA
aagccctatggctaggaatgcgctcttacgtctggcaaacactaaagctggaacgccagcttatgaaagagcgtt

SEQ ID NO: 53718 - DNA, 75 bp, synthetic construct
  source 1..75: mol_type = other DNA
aaacgttaaacgtgatattaaatccatgctcgatgctctggaattagatgtgctcagttttgagcgcacctatct

SEQ ID NO: 53719 - DNA, 75 bp, synthetic construct
  source 1..75: mol_type = other DNA
gaaaacacgaacaggaactgctaaataaaatatgcattgtttcgatgctggcccgtttacgtctgatgcaaacag

SEQ ID NO: 53720 - DNA, 75 bp, synthetic construct
  source 1..75: mol_type = other DNA
ccttcttcggtaagggcatcggggcgctgggttgggcagtaatggcagataccgcgccaaaagagatcagcggtc

SEQ ID NO: 53721 - DNA, 75 bp, synthetic construct
  source 1..75: mol_type = other DNA
agacagacgattatttatgttgcctcattcgctccatgaataaaacctgtgaaatggcttacgagtatatcgaca

SEQ ID NO: 53722 - DNA, 75 bp, synthetic construct
  source 1..75: mol_type = other DNA
aggcggggccgcagctgatgaaggcggtgtatgacatggcccgcaagggggcgcaggatgagattcaggcgcaga

SEQ ID NO: 53723 - DNA, 75 bp, synthetic construct
  source 1..75: mol_type = other DNA
ggaattcaaccgtctgctggggctggggaatgaactgcttcagcagcgtcagggactggtgaatgtaccgttacg

SEQ ID NO: 53724 - DNA, 75 bp, synthetic construct
  source 1..75: mol_type = other DNA
cgggactaacggacagatagggccggaggcggcaggcagtcttgtgcagctgattgaccagcgggtgcaggcggt

SEQ ID NO: 53725 - DNA, 75 bp, synthetic construct
  source 1..75: mol_type = other DNA
caaaaggtggcgaaggtaaatcaacacaatccgctaacctggctggttttctcgccgatgcaggtatccgtaccc

SEQ ID NO: 53726 - DNA, 75 bp, synthetic construct
  source 1..75: mol_type = other DNA
gcaggttatcgcagacagcgtaatcagtgcgcgaacggcgcgaccgggcggcaaaaaaaggccagcaggggcagg

SEQ ID NO: 53727 - DNA, 75 bp, synthetic construct
  source 1..75: mol_type = other DNA
tggtgtcactatcagtaaccctgtatttactgaagatgccattaacaagagaaaacaagaacgggagctattaaa

SEQ ID NO: 53728 - DNA, 75 bp, synthetic construct
  source 1..75: mol_type = other DNA
ggtgaagccgtcagtcggctggatggtacgcagccatttacgcgctgcgcttggtatgaatcagcctcatggggg

SEQ ID NO: 53729 - DNA, 75 bp, synthetic construct
  source 1..75: mol_type = other DNA
agcggtggcttttgccattaagtgggtggcggttggtatcgccgtgtctccgatgctgtatgggctggcaaaact

SEQ ID NO: 53730 - DNA, 75 bp, synthetic construct
  source 1..75: mol_type = other DNA
ttttcagataatgcggccctgtttgcccgctcggcagcctcaatgcgtgaatatggttacagtgctgatgatgtg

SEQ ID NO: 53731 - DNA, 75 bp, synthetic construct
  source 1..75: mol_type = other DNA
aagatttacagctgtcgattcgcggatttggctcccgctccacttacggtattcgcggtattcgcctgtatgtgg

SEQ ID NO: 53732 - DNA, 75 bp, synthetic construct
  source 1..75: mol_type = other DNA
ttactgatggctgtcaccggtgcactgattgatgaaacgcttgtggaaaaagcgaataagttctggggcatttaa

SEQ ID NO: 53733 - DNA, 75 bp, synthetic construct
  source 1..75: mol_type = other DNA
tggtgcttatgcgctggtggggggaatttgtagaggccgcagctaccggagtgaccatagccagtggtaaaaggg

SEQ ID NO: 53734 - DNA, 75 bp, synthetic construct
  source 1..75: mol_type = other DNA
ggcggctggtggacgacccgcaggaaaaacagaccagcaagggcacaccgatgacgctggcgcgtatggcggtat

SEQ ID NO: 53735 - DNA, 75 bp, synthetic construct
  source 1..75: mol_type = other DNA
ttgcgcaggcacgcagaacgcgccagggccagcgccgtcagtccggcttataccgcagacgctgaccatgccggt

SEQ ID NO: 53736 - DNA, 75 bp, synthetic construct
  source 1..75: mol_type = other DNA
ggagaggtaagacgtgaacagctacgcaacgatattgcaaaagatgaatgcgcccacgctttgcctgacgctcgt

SEQ ID NO: 53737 - DNA, 75 bp, synthetic construct
  source 1..75: mol_type = other DNA
atgcgtgatattcaaatggttcttgaacgttggggggcatgggcggctaataatcatgaggatgtgacctggtcg

SEQ ID NO: 53738 - DNA, 75 bp, synthetic construct
  source 1..75: mol_type = other DNA
atgttaactggggcttttctctatctgcctttggtgttcatgcctgagacagatagcctcaagcacccgcagcaa

SEQ ID NO: 53739 - DNA, 75 bp, synthetic construct
  source 1..75: mol_type = other DNA
tgatacgtgtattggtaaacgtctacaaaaagcagaaggggtaattgatggtatgttgatgatgctgaatgtctc

SEQ ID NO: 53740 - DNA, 75 bp, synthetic construct
  source 1..75: mol_type = other DNA
tggagcggtggggagcatgggcagcaaataatcatgaagatgtaacatggccctcgatagctgctggttttaaag

SEQ ID NO: 53741 - DNA, 75 bp, synthetic construct
  source 1..75: mol_type = other DNA
taatcccttcaaaagtaaaatcccgcccgcaatgttgtgacgatgatgcgatgatcatttgtgggtgcatggctc

SEQ ID NO: 53742 - DNA, 75 bp, synthetic construct
  source 1..75: mol_type = other DNA
gggcgctacttgtcgccggacctgaaatgatgagtcgcagccagaaacagttggggatttccacaatttccattg

SEQ ID NO: 53743 - DNA, 75 bp, synthetic construct
  source 1..75: mol_type = other DNA
cgtccgacgttttttgcttttgcaaaaggcgcgggtgtgatgggggaagctggacctgaagccattctgccactg

SEQ ID NO: 53744 - DNA, 75 bp, synthetic construct
  source 1..75: mol_type = other DNA
ctgaataacggtcctcattatccgctcaatattttgcaggacgtgaaggtcacaatcgaaaacacagaacgttac

SEQ ID NO: 53745 - DNA, 75 bp, synthetic construct
  source 1..75: mol_type = other DNA
atgcgtgatattcagatggttcttgagcgttggggggcatgggcggctaataaccacgaggatgtaacctggtca

SEQ ID NO: 53746 - DNA, 75 bp, synthetic construct
  source 1..75: mol_type = other DNA
cgggttggcatggattgtaggcgccgccctataccttgtctgcctccccgcgttgcgtcgggccacctcgacctg

SEQ ID NO: 53747 - DNA, 75 bp, synthetic construct
  source 1..75: mol_type = other DNA
aaggtggactacaacgatgtgcggccacagtttaagtctttagagacagaaactgacgagaaaaaactgagtgcg

SEQ ID NO: 53748 - DNA, 75 bp, synthetic construct
  source 1..75: mol_type = other DNA
ggcgcagttctcagtgaagtcgcttccggtgtgatgaacacgaaaaccaaaggtaaggtctcgctcaacctggaa

SEQ ID NO: 53749 - DNA, 75 bp, synthetic construct
  source 1..75: mol_type = other DNA
cgtgccagtctgcggcgtagtacgacggttaatgatgtttgtctgacggatggatttcgcctgtttctgaagaac

SEQ ID NO: 53750 - DNA, 75 bp, synthetic construct
  source 1..75: mol_type = other DNA
cgttgcacataacgccagcgttctctattcctacatttcatcaattcatcaggtctggctgcagcagctttatcc

SEQ ID NO: 53751 - DNA, 75 bp, synthetic construct
  source 1..75: mol_type = other DNA
ctgcgctcgatgcaaaatactcgagggaattagccgatgcgagagctgaaaatgaaactcttcgcgctgacgttg

SEQ ID NO: 53752 - DNA, 75 bp, synthetic construct
  source 1..75: mol_type = other DNA
taaccgaggagaaagaaaaggatcatatccattcaatagcccttgccctaatggtactgagaaagtatcagctta

SEQ ID NO: 53753 - DNA, 75 bp, synthetic construct
  source 1..75: mol_type = other DNA
acagctacgactgcggtaaaaaaatgggctatatgcaagcgttcgtgaagtatgggctgcgcaacctcaaagaag

SEQ ID NO: 53754 - DNA, 75 bp, synthetic construct
  source 1..75: mol_type = other DNA
ggagacattcatggcgctggcacgtaagcatggatgctctgatggaactatcggtaaaaaattacagaaagcgga

SEQ ID NO: 53755 - DNA, 75 bp, synthetic construct
  source 1..75: mol_type = other DNA
tattacggtttataactatgatggtgaaacacgggaatatattttcacatcaactgaatatcttgctgtgggtgt

SEQ ID NO: 53756 - DNA, 75 bp, synthetic construct
  source 1..75: mol_type = other DNA
atgaataaagctgtattaaatagcgaactcatcaccacaaaggcgggagacattaccgtttacaattatgatggt

SEQ ID NO: 53757 - DNA, 75 bp, synthetic construct
  source 1..75: mol_type = other DNA
ctccgtggttgtcatactgagtaacgggcgtgatgagcgcggtcagtttgcctcgtatgatgtggtggacgatgt

SEQ ID NO: 53758 - DNA, 75 bp, synthetic construct
  source 1..75: mol_type = other DNA
caactgaatatcttgctgtgggtgttggtattccggcatgttcctgtttagaggctcctggtacacataaggatg

SEQ ID NO: 53759 - DNA, 75 bp, synthetic construct
  source 1..75: mol_type = other DNA
atggacggtaatatcaaagggttagtttccgccgggcatgagatggcttcggaactgaaagctgaatgtggtgcc

SEQ ID NO: 53760 - DNA, 75 bp, synthetic construct
  source 1..75: mol_type = other DNA
gtgggcgtacgacttacaaaaatgccggaaagacccgtcgtcaaggcgctgaactggcatgggatcaacgtttcg

SEQ ID NO: 53761 - DNA, 75 bp, synthetic construct
  source 1..75: mol_type = other DNA
tctgaagatattttgcctggtattcgtggtgaagtgaatattttcgcttcaggagcaattgaggcggatgtacgt

SEQ ID NO: 53762 - DNA, 75 bp, synthetic construct
  source 1..75: mol_type = other DNA
cactgcgtgcccgctgtccgtattttgaaaaccgggttgcaggcgcggcccagttcaaaaatctgccggaggtcg

SEQ ID NO: 53763 - DNA, 75 bp, synthetic construct
  source 1..75: mol_type = other DNA
tgtgcgatgcggtgaactttctcgttgaaaaatacgcactggtacgtaccgaccagccaggattcagcgcttgta

SEQ ID NO: 53764 - DNA, 75 bp, synthetic construct
  source 1..75: mol_type = other DNA
cggctggtgcactacacgcggacacaatatgcagagccgctggtcgaaagccgctatctttacgacccgctgggc

SEQ ID NO: 53765 - DNA, 75 bp, synthetic construct
  source 1..75: mol_type = other DNA
tgagaaaaacagcaaggcgattgcagccaatacccgtacgctgcagcaacattcagcacgtctggacagccagca

SEQ ID NO: 53766 - DNA, 75 bp, synthetic construct
  source 1..75: mol_type = other DNA
ttaaagcaatagataaccacgggaaggaaataacaaacagaaaaggattacctaatgtctgcagagttcatggta

SEQ ID NO: 53767 - DNA, 75 bp, synthetic construct
  source 1..75: mol_type = other DNA
atgttgataagaaatatagagtcgggacgatcttttgatgattatagtgtgttggactgggatgtggacataaat

SEQ ID NO: 53768 - DNA, 75 bp, synthetic construct
  source 1..75: mol_type = other DNA
taccgttttctgacgtccgcgaggagctgccacgcggtacgtttgcttatacccgtgttccgacgatgattattc

SEQ ID NO: 53769 - DNA, 75 bp, synthetic construct
  source 1..75: mol_type = other DNA
atgagaaccgcaaagcccggcaaaatcccgggcttttttgccagcaggagcagagcaaacagcatgacgattgca

SEQ ID NO: 53770 - DNA, 75 bp, synthetic construct
  source 1..75: mol_type = other DNA
gtcacgctttcaccgttaacgccatatgataaatgggatggtgagaaatgggtgactgatactgaggcacaacac

SEQ ID NO: 53771 - DNA, 75 bp, synthetic construct
  source 1..75: mol_type = other DNA
tgaagtgcgggcgcagggcgtggatatggctcgtaacgcgatgattgattttgttgatggtgaagttgggccaaa

SEQ ID NO: 53772 - DNA, 75 bp, synthetic construct
  source 1..75: mol_type = other DNA
aaaaaggcgctcttgaagtggcgcgggaaatagcctgccggcttcgggatatgggctggacgccggaacggattc

SEQ ID NO: 53773 - DNA, 75 bp, synthetic construct
  source 1..75: mol_type = other DNA
gttttggtcctatcctggcgggtattttctgcaccatgacggaatcctggtatccgatcgccattatgatcatgg

SEQ ID NO: 53774 - DNA, 75 bp, synthetic construct
  source 1..75: mol_type = other DNA
gacaacatgaatgatgccacccggcagattgcggcgtttcagtcacaggtgcaggtacagcaggatgcgctgctg

SEQ ID NO: 53775 - DNA, 75 bp, synthetic construct
  source 1..75: mol_type = other DNA
atgacagaagcgcataaacagcttctggctctgcagcagcgcatcagcgacctggacgggaaaaaactgacggca

SEQ ID NO: 53776 - DNA, 75 bp, synthetic construct
  source 1..75: mol_type = other DNA
ttctaaaaaactgactaccggggctgtcactatgactactctcccaaccctctctcaacctgaaattgccatcgt

SEQ ID NO: 53777 - DNA, 75 bp, synthetic construct
  source 1..75: mol_type = other DNA
atgtgggtcagcatcgttaaagattatgttgtgccgatcctttcggcgacggcaaccgctggcgggatattcatg

SEQ ID NO: 53778 - DNA, 75 bp, synthetic construct
  source 1..75: mol_type = other DNA
gctgcgctacaaccttgctgccatgattgcgcgcttcaacgaaacgggccgcagccaggtgctggcaaaacgtat

SEQ ID NO: 53779 - DNA, 75 bp, synthetic construct
  source 1..75: mol_type = other DNA
aaggccaccaatgccaccctgaaatccgtctcccatcagaacgaactgctgctggagcaggctgtaaggaaaaaa

SEQ ID NO: 53780 - DNA, 75 bp, synthetic construct
  source 1..75: mol_type = other DNA
ctcaaacgagacgaaaatcagagacgctatagccctgttcacagcctcgacagagaaatcgctggaaaaacaccg

SEQ ID NO: 53781 - DNA, 75 bp, synthetic construct
  source 1..75: mol_type = other DNA
gggtaacgattcagaccctgaaacagaccagagccatgacgggcgaaatactcgaaacgtgggtggacggtcaca

SEQ ID NO: 53782 - DNA, 75 bp, synthetic construct
  source 1..75: mol_type = other DNA
gtcgcaaaaatttcggagtgcgatttaactgcgacgattgaacaacgtggcccacaaacggcggatgaactggct

SEQ ID NO: 53783 - DNA, 75 bp, synthetic construct
  source 1..75: mol_type = other DNA
ctcagccagcaggcgttgcgttaccagtacaggaagctgtaacactggaagaaattaaaacagaaactgtggcgg

SEQ ID NO: 53784 - DNA, 75 bp, synthetic construct
  source 1..75: mol_type = other DNA
gccggaagaaaccaccacggcaacagtagcgaaaatctcagagtgcgatttaaccgcgacgattgaacaacgcgg

SEQ ID NO: 53785 - DNA, 75 bp, synthetic construct
  source 1..75: mol_type = other DNA
ctggtgtggctccggcacatgtaaaaccatggacacagcaggaggatgaacttttagccacgttataccactccc

SEQ ID NO: 53786 - DNA, 75 bp, synthetic construct
  source 1..75: mol_type = other DNA
tataacaaagatggcaacaaagtagatctgtacggtaaagctgtcggtctgcattatttttctaaagacaatggt

SEQ ID NO: 53787 - DNA, 75 bp, synthetic construct
  source 1..75: mol_type = other DNA
ctggccacgccattgaaaatccgtattgagtgtcacatgccggatcgccggcgccgtgacctggacaatctgcaa

SEQ ID NO: 53788 - DNA, 75 bp, synthetic construct
  source 1..75: mol_type = other DNA
cacatcggtgagcccccgataagccgggcactggaagcatggcgcgtagtgtttgaagacatgacgtggcgaacc

SEQ ID NO: 53789 - DNA, 75 bp, synthetic construct
  source 1..75: mol_type = other DNA
tagggcgtaaaaaagtgctctttattaccatcaccatgatggggatctgtaccaccttaattggtgtgttaccga

SEQ ID NO: 53790 - DNA, 75 bp, synthetic construct
  source 1..75: mol_type = other DNA
agggaaagcacagcctggtggtgaagggggacctggcgaggaaggtgagtggcgcgctggggataaaggtggacg

SEQ ID NO: 53791 - DNA, 75 bp, synthetic construct
  source 1..75: mol_type = other DNA
aacgctcaaccattgatgccataacgctgtttggtgataaaaataccaaaaatgtggtgttagaaaagagttatg

SEQ ID NO: 53792 - DNA, 75 bp, synthetic construct
  source 1..75: mol_type = other DNA
attatcaggagcaacagaaacgccggaatgctgaaaatgccgcgctgaaccggatgaacgaaacggaagcggcac

SEQ ID NO: 53793 - DNA, 75 bp, synthetic construct
  source 1..75: mol_type = other DNA
gtagagcaataggcagtattttgagaaagctgtgtgagtggaaaagcgtacggattctggaagctgaatgctgtg

SEQ ID NO: 53794 - DNA, 75 bp, synthetic construct
  source 1..75: mol_type = other DNA
tgacccgtcatccggaaaagccggaataccacgtggtgttatgcgtcagacaagagtatttcgacggccctgaac

SEQ ID NO: 53795 - DNA, 75 bp, synthetic construct
  source 1..75: mol_type = other DNA
aataccttcaacagcagaacgacctggtttggtatggattttatcgaaaccgtcagtgcgctgatgaatgcgaaa

SEQ ID NO: 53796 - DNA, 75 bp, synthetic construct
  source 1..75: mol_type = other DNA
ggatgccgccatgaatatcgggcgtaatgattcccttgatgcgcagattgcggcgctgcaggaaaaaattcagcg

SEQ ID NO: 53797 - DNA, 75 bp, synthetic construct
  source 1..75: mol_type = other DNA
aagagcagcgcgataaaaaagccagtgagctggagctggcgaacgcgacaattactgatatgcagatacgccagc

SEQ ID NO: 53798 - DNA, 75 bp, synthetic construct
  source 1..75: mol_type = other DNA
agttcaggactatcgctcagcatacaatgatatccgggactggcagcgacgcgaaaaagcagcaaacgacaggga

SEQ ID NO: 53799 - DNA, 75 bp, synthetic construct
  source 1..75: mol_type = other DNA
tggtcgatgacgacatgcgcctgcgtgcgctgctggaacgttatctcaccgaacaaggcttccaggttcgaagcg

SEQ ID NO: 53800 - DNA, 75 bp, synthetic construct
  source 1..75: mol_type = other DNA
tctgttccagccgtacagtgtgggtaaattcaacgccacggcagccctgggtggttacagtgacaaacaggccgt

SEQ ID NO: 53801 - DNA, 75 bp, synthetic construct
  source 1..75: mol_type = other DNA
tgggcgttggcggtgccatcagtattgtcagcaggatcatgtcgatgacgccgattggcatgattgcgacggcga

SEQ ID NO: 53802 - DNA, 75 bp, synthetic construct
  source 1..75: mol_type = other DNA
ctttaccgctacctttttccagaaacatactctgctgaatgttctggtgaactacagcgtttttgacagtagtca

SEQ ID NO: 53803 - DNA, 75 bp, synthetic construct
  source 1..75: mol_type = other DNA
cgttcagtgatttcgcccgcgatcgtcgtggtgtgtgcgatccggaagcccgttgcctcgccggtaatcccggct

SEQ ID NO: 53804 - DNA, 75 bp, synthetic construct
  source 1..75: mol_type = other DNA
tgattcgtctccctgctgaacgcaagattcaggattatcgttctgcctataacgatattcgtgactggcagcgcc

SEQ ID NO: 53805 - DNA, 75 bp, synthetic construct
  source 1..75: mol_type = other DNA
ctacaggccaacgctcgccttacggcgctcaaaaaagagcctgaatacatatggctgaatgatgtttcctgcgtt

SEQ ID NO: 53806 - DNA, 75 bp, synthetic construct
  source 1..75: mol_type = other DNA
tcgctgccatcgtttaccgaaacgaaagcagatgacctgattctaccatcgctgaatgtggctaaccgcgagctg

SEQ ID NO: 53807 - DNA, 75 bp, synthetic construct
  source 1..75: mol_type = other DNA
tggtaaagcctttcctcagccagcaggtgttgcgttaccagtacaggaaatgatggcacaggaagaaatgaaaac

SEQ ID NO: 53808 - DNA, 75 bp, synthetic construct
  source 1..75: mol_type = other DNA
accgcgagtggcgggacgctctggtatctcggcgggaggatacagacgaacctggaagaaatcagggtacaggaa

SEQ ID NO: 53809 - DNA, 75 bp, synthetic construct
  source 1..75: mol_type = other DNA
accacaaacggcggatgaactggctacgctgttcggtacaacatcccgcaaagtggcttcaacgctggcaatggc

SEQ ID NO: 53810 - DNA, 75 bp, synthetic construct
  source 1..75: mol_type = other DNA
cgttggttctgtcattgtcaatgagtcaaacgggcgatattacgaacctgcgcccggacgaaattatggtgtcgg

SEQ ID NO: 53811 - DNA, 75 bp, synthetic construct
  source 1..75: mol_type = other DNA
atgccattaacctcagatattggatcacgttcatttaatcttgggctggaggttgttcgtgcccgaattgtagcc

SEQ ID NO: 53812 - DNA, 75 bp, synthetic construct
  source 1..75: mol_type = other DNA
atgtcctgttctcgttcagttgtattactgaataacgccttaaaaatcgccgttatgaaaaatggcgatttgtct

SEQ ID NO: 53813 - DNA, 75 bp, synthetic construct
  source 1..75: mol_type = other DNA
cgtatacaataaacacgactggatagaggctcagcgcaaagcgtatgagcttcacgctgataaattgttctggca

SEQ ID NO: 53814 - DNA, 75 bp, synthetic construct
  source 1..75: mol_type = other DNA
gcaattttccctgatgtcatctgtgactgagcaaggaataaatccttttgcttactggattgcttttggagattg

SEQ ID NO: 53815 - DNA, 75 bp, synthetic construct
  source 1..75: mol_type = other DNA
agtggaaacaaaaaacagacagaaacgggattcacaaatcccgtaaatgagcaaaaaacgcgccgcgatatatga

SEQ ID NO: 53816 - DNA, 75 bp, synthetic construct
  source 1..75: mol_type = other DNA
ggtcgtgccatgttgccacaggtatggcatggggaggccgcagggtaagtaagggcgcggttatctatatcgctg

SEQ ID NO: 53817 - DNA, 75 bp, synthetic construct
  source 1..75: mol_type = other DNA
gtgagtttgacaacccgccctttaaaaaagtgccggcttactggtttcatccaggactgacttatcttaaaggac

SEQ ID NO: 53818 - DNA, 75 bp, synthetic construct
  source 1..75: mol_type = other DNA
gtttcactgggacaggtataacccggcaacggaggcgagttcgtgctgggtgagtgtgtcacaggcgtgggcggg

SEQ ID NO: 53819 - DNA, 75 bp, synthetic construct
  source 1..75: mol_type = other DNA
atgaaaaaagtattattaatagctgtttcactttcatttctttcagcaagtgttctggcagcgccagattgtgta

SEQ ID NO: 53820 - DNA, 75 bp, synthetic construct
  source 1..75: mol_type = other DNA
gcatttctccggctgttcctggctggtgggcaagattccggaatgacgattgcggcgagtggtggagtccggttg

SEQ ID NO: 53821 - DNA, 75 bp, synthetic construct
  source 1..75: mol_type = other DNA
atgaccagtccgtgtcgggtacagtggccgttaaccccgtcgatacccgtccacgcaacattgcatttaactata

SEQ ID NO: 53822 - DNA, 75 bp, synthetic construct
  source 1..75: mol_type = other DNA
gcaccgaaacaggagaatcgaaagaaatcacagctccgggtgattaccctgaaaatacaaccactatcgccccgt

SEQ ID NO: 53823 - DNA, 75 bp, synthetic construct
  source 1..75: mol_type = other DNA
tctttttcggtgccgggatgctgtttccgctggcgaccagcggcgcgatggagccgttccccttcctggcgggca

SEQ ID NO: 53824 - DNA, 75 bp, synthetic construct
  source 1..75: mol_type = other DNA
attacccggtacgtgagctgttgggcatcagtcaggcagatgagcgcctgatttataacacggtgctgggccgga

SEQ ID NO: 53825 - DNA, 75 bp, synthetic construct
  source 1..75: mol_type = other DNA
ctctcccgactactgggccagcattacggccttaccctgaatgacacaccgttcgccgatgaacgtgtgattgag

SEQ ID NO: 53826 - DNA, 75 bp, synthetic construct
  source 1..75: mol_type = other DNA
ttcagcagggaaaccgctggcttaactgcctggagaagcagccggaaagttcagtgcgtccagaggtgattggcg

SEQ ID NO: 53827 - DNA, 75 bp, synthetic construct
  source 1..75: mol_type = other DNA
agaattaaagacaagatcgaaggcgagcgaattatccccctcactccctatgtttctgacttgttacgctcactg

SEQ ID NO: 53828 - DNA, 75 bp, synthetic construct
  source 1..75: mol_type = other DNA
cggaagtactgaagcaggcggtgaatgatgcggtcgcgaaaataccggtgccggcagacggcaaaagtatcaccc

SEQ ID NO: 53829 - DNA, 75 bp, synthetic construct
  source 1..75: mol_type = other DNA
actcaccaggcagctgaaagatgcgccatctgacacaaaaaccgtgaaaaccggcggccccaccacgcccgatga

SEQ ID NO: 53830 - DNA, 75 bp, synthetic construct
  source 1..75: mol_type = other DNA
gtttcactgggacaggtataacccggcaacggaggcgagttcgtgctgggtgtgagtgtcccaggcgtgggcggg

SEQ ID NO: 53831 - DNA, 75 bp, synthetic construct
  source 1..75: mol_type = other DNA
gaacagttaactgctgaagatcgtaaccattgtatgaaactgtctaaaaaaatccatagagaaaaaaactataca

SEQ ID NO: 53832 - DNA, 75 bp, synthetic construct
  source 1..75: mol_type = other DNA
ttaccgatctgactgaagattcgacgctggtagatggctttctggctcagattcactgtctgccatgtgtaccga

SEQ ID NO: 53833 - DNA, 75 bp, synthetic construct
  source 1..75: mol_type = other DNA
taccgccatcatctgggaaggcgacgacgccagccagagcaaacatatcagctataaagagctgcaccgcgacgt

SEQ ID NO: 53834 - DNA, 75 bp, synthetic construct
  source 1..75: mol_type = other DNA
catgcgcaacgccgccatcagggaggaccgcgcagagctgggtgatgatatctccccgcgttttaaatgcgaaaa

SEQ ID NO: 53835 - DNA, 75 bp, synthetic construct
  source 1..75: mol_type = other DNA
catcaaacccacccatattgttgtccccacctcgctggaaaaacaggcggtgcagctgctggagcgtgaactgtt

SEQ ID NO: 53836 - DNA, 75 bp, synthetic construct
  source 1..75: mol_type = other DNA
gacgtctgcagaaaccgacagactggtggcaccgtgggtgaatcagtgtctgaatatcacggggctgaccgcggt

SEQ ID NO: 53837 - DNA, 75 bp, synthetic construct
  source 1..75: mol_type = other DNA
cggctggatgaactgcttatgctgccgcagctgagccgtgacgaaatccagcgccttgccaccctgaccgccacc

SEQ ID NO: 53838 - DNA, 75 bp, synthetic construct
  source 1..75: mol_type = other DNA
tgccctgaaggtggtttatgaccttgggaaaaaagcggcagcggactttatgcaacagcaggcccgtgatggtgg

SEQ ID NO: 53839 - DNA, 75 bp, synthetic construct
  source 1..75: mol_type = other DNA
gatgaagaaaccgtctccttcctgacaaacacagacgaaggcaagcgaattaattcgcatcttcaccacgacgaa

SEQ ID NO: 53840 - DNA, 75 bp, synthetic construct
  source 1..75: mol_type = other DNA
cgtgcagcgtgtcgaactggctgcaccgctggccgacatcgtgctcaacaatacgcaggcgtctttctgtaccga

SEQ ID NO: 53841 - DNA, 75 bp, synthetic construct
  source 1..75: mol_type = other DNA
gtacttttaccccggcccggaatccgaacctattctggccgcggcggaatcgtcgttcaggaagtggctgtctga

SEQ ID NO: 53842 - DNA, 75 bp, synthetic construct
  source 1..75: mol_type = other DNA
taaaagcgtggaggtgtttaccgataccgatggcgaagagattgtgtccatggtggtgattgacgttccccgcgc

SEQ ID NO: 53843 - DNA, 75 bp, synthetic construct
  source 1..75: mol_type = other DNA
atgaaaagattgtctataaccgtccgtttaaccttgctttttatattgctactgtctgttgctggtgctggaatt

SEQ ID NO: 53844 - DNA, 75 bp, synthetic construct
  source 1..75: mol_type = other DNA
gcgaagctggccgagcgtgcaggtatgaacgttcaaacgttacgtaacaagctcaacccggaacagcctcaccag

SEQ ID NO: 53845 - DNA, 75 bp, synthetic construct
  source 1..75: mol_type = other DNA
acgaaagcgttaagcagaacgctatcaactacattcgtcagttgccagtcgacagtaagcgcccgctgatactcg

SEQ ID NO: 53846 - DNA, 75 bp, synthetic construct
  source 1..75: mol_type = other DNA
actcaacccagatcaaccgcatcagctcacagcgccagaaatctggttgcttaccgatctgactgaagattcaac

SEQ ID NO: 53847 - DNA, 75 bp, synthetic construct
  source 1..75: mol_type = other DNA
atgattactaaaaatttccgactgaatgcgctggcaaataagtatgcgtcggcactgtataaccacattacctcc

SEQ ID NO: 53848 - DNA, 75 bp, synthetic construct
  source 1..75: mol_type = other DNA
aataataaaggttatctatatttgccacttagtgttgatggagttaaagtaaaatggcttgtgcataggcttgtc

SEQ ID NO: 53849 - DNA, 75 bp, synthetic construct
  source 1..75: mol_type = other DNA
ctgccctgcattgaacaggccagggaagatatccgtaccctgcgccaactgcagtttctgcaacagaaccggtga

SEQ ID NO: 53850 - DNA, 75 bp, synthetic construct
  source 1..75: mol_type = other DNA
actgcgtgttgctgcgtgccgacgatcccctgatcgacatgaactacatcaccagtttcaccggtatgacagata

SEQ ID NO: 53851 - DNA, 75 bp, synthetic construct
  source 1..75: mol_type = other DNA
ttttaactcatgggaatatgtgccagaccatcgcggtgaaatcgtctttagcaccgaaacaggagaatcaaaaga

SEQ ID NO: 53852 - DNA, 75 bp, synthetic construct
  source 1..75: mol_type = other DNA
gcgtggctgcaggacaatattgactgcgaatcggaaattatctttgacaacgatgaggacaaaacggattcggca

SEQ ID NO: 53853 - DNA, 75 bp, synthetic construct
  source 1..75: mol_type = other DNA
tttttaaagtggatggtcagcagttatcgctgacaggtggcattgaagtgccgatgaacaccaatgtccgggatg

SEQ ID NO: 53854 - DNA, 75 bp, synthetic construct
  source 1..75: mol_type = other DNA
gcgcagagaacaaacgacagcagctaattaatgatgccatgcaatccattagctttatccagcttaaattacagg

SEQ ID NO: 53855 - DNA, 75 bp, synthetic construct
  source 1..75: mol_type = other DNA
cagtaaacaatggcccggtaaagccgctattggtcgtctgaaaagcgaggaactggcgcaatataattcgtggct

SEQ ID NO: 53856 - DNA, 75 bp, synthetic construct
  source 1..75: mol_type = other DNA
gaaattactgaatcagaaaaacagctactaattaaccaggctaacgaatacatgaacagtaagcaatggcctggc

SEQ ID NO: 53857 - DNA, 75 bp, synthetic construct
  source 1..75: mol_type = other DNA
gttatgctatctgccgttcgatggatttaaactcatgggaatatgtgccagaccatcgcggtgaaatcgtctata

SEQ ID NO: 53858 - DNA, 75 bp, synthetic construct
  source 1..75: mol_type = other DNA
atttatccaaacatgtaatcgataaaattaaagatatcggtgatatcaccttatcgctaaaaacctgcaatcttg

SEQ ID NO: 53859 - DNA, 75 bp, synthetic construct
  source 1..75: mol_type = other DNA
caccgcaggtggtttcagaactggataccccagcagcagtaagcgtggtggatggcgaggagatgcgcctggcaa

SEQ ID NO: 53860 - DNA, 75 bp, synthetic construct
  source 1..75: mol_type = other DNA
aaccctgtcagtcacgcatcagcccttgcatccaagagccttgagaaggttcaggaatccatactctacagaaaa

SEQ ID NO: 53861 - DNA, 75 bp, synthetic construct
  source 1..75: mol_type = other DNA
gattacattgacgcggtgacggcaacagataccagcaccgcgccggaggtcatctggcctgtactgctggaggcg

SEQ ID NO: 53862 - DNA, 75 bp, synthetic construct
  source 1..75: mol_type = other DNA
ggaagatgatattactgaaaccccagccaccgatgcttttctggctgaagtgaagactgaagcacgcaaggaggg

SEQ ID NO: 53863 - DNA, 75 bp, synthetic construct
  source 1..75: mol_type = other DNA
ccagaaaatgcgtgtggagggtttacctgccgtgatgctgattgttgcggaaaacgatatcaatattgtagtcag

SEQ ID NO: 53864 - DNA, 75 bp, synthetic construct
  source 1..75: mol_type = other DNA
ctacgcttaggtattgatggcattagtcaggcgacaccgctggatacatttaaaacctctgtccgtgccggtcat

SEQ ID NO: 53865 - DNA, 75 bp, synthetic construct
  source 1..75: mol_type = other DNA
agctgaccatggatgtaacgctgaaggcgtatcagatgctggcccgcatggcgttacacctgcacgccatgcctc

SEQ ID NO: 53866 - DNA, 75 bp, synthetic construct
  source 1..75: mol_type = other DNA
cagcctgggctgatattccaccgccaactcatgaggaacaaattgccgcagccgaactggaaaagcagcaattga

SEQ ID NO: 53867 - DNA, 75 bp, synthetic construct
  source 1..75: mol_type = other DNA
tgtgtgacgcggtgaactttcttgttgaaaaatacgcgctggtacgaactgaccagccgggattcagcgcaggag

SEQ ID NO: 53868 - DNA, 75 bp, synthetic construct
  source 1..75: mol_type = other DNA
tcatacgatacgccagagatgaaggcctatctgcagcaggatccgcgggcggcgattgcgcttgagcaactgaag

SEQ ID NO: 53869 - DNA, 75 bp, synthetic construct
  source 1..75: mol_type = other DNA
tgttggtgtatcgcattagtcgcgatttcaccatcaaccaggaagagctggaacagcagcttgaactatttcgct

SEQ ID NO: 53870 - DNA, 75 bp, synthetic construct
  source 1..75: mol_type = other DNA
ctgcccgcgtggcgcaagttactcctggtatctttacagcgctaaccgcctgaaatacccgctcattcgtaaacg

SEQ ID NO: 53871 - DNA, 75 bp, synthetic construct
  source 1..75: mol_type = other DNA
atggattacgccgtattaaataacgaatttatcgccacccaggcaggaaatattactgtttataactatgatggt

SEQ ID NO: 53872 - DNA, 75 bp, synthetic construct
  source 1..75: mol_type = other DNA
gatgctcctggctcatataaagctggttatgcaatttgccgttctgcagattttaactcatgggaatatgtgcca

SEQ ID NO: 53873 - DNA, 75 bp, synthetic construct
  source 1..75: mol_type = other DNA
ccagcactctgatagtgctgtttctgttccgttcattaaaacaaccttctctcacatcgctctgttacataatgt

SEQ ID NO: 53874 - DNA, 75 bp, synthetic construct
  source 1..75: mol_type = other DNA
aaagtgattccactggcaccgggtcatgcctacggaatgtttatggaacgatttaaagagctgcataagatacat

SEQ ID NO: 53875 - DNA, 75 bp, synthetic construct
  source 1..75: mol_type = other DNA
cctatctgcagcaggatccgcgggcggcgattgcgcttgagcaactgaagtacgcccatccatggtactccacct

SEQ ID NO: 53876 - DNA, 75 bp, synthetic construct
  source 1..75: mol_type = other DNA
cggcattccggcatgctcctgtttagatgctcctgactcatataaagctggttatgcaatctgccgttctgcaga

SEQ ID NO: 53877 - DNA, 75 bp, synthetic construct
  source 1..75: mol_type = other DNA
gaagtgaaagaccgtgatttaagtgcgctggaagacgccgcagaagatcaaccacatgttgtaagagctgcgcaa

SEQ ID NO: 53878 - DNA, 75 bp, synthetic construct
  source 1..75: mol_type = other DNA
aaactccgaagtcgatgcactgattaaggtgctgccgcgcatgacggcaccgatgctgaccgagcaggaagtcgc

SEQ ID NO: 53879 - DNA, 75 bp, synthetic construct
  source 1..75: mol_type = other DNA
gatggctttggcgcgaccgatggcgaactgaccatggatgtaacgctgaaggcgtatcagatgctggcccgcatg

SEQ ID NO: 53880 - DNA, 75 bp, synthetic construct
  source 1..75: mol_type = other DNA
tggtggtactgactttggtgttcttaacgacgacgttttcaactctgaaaatcgcctctctgcacggggattttt

SEQ ID NO: 53881 - DNA, 75 bp, synthetic construct
  source 1..75: mol_type = other DNA
gacccgcgtcattaagcaattcaacgactcgcagcaggatgtcgaagtgcgcggaatcttcaccggcaactacga

SEQ ID NO: 53882 - DNA, 75 bp, synthetic construct
  source 1..75: mol_type = other DNA
cgctggtgatcatgtccgccaacttcaccaccgatctggcgctgaaggatgagatcctgccgatggatgagctgt

SEQ ID NO: 53883 - DNA, 75 bp, synthetic construct
  source 1..75: mol_type = other DNA
tttaaggcggagtacgtcgacggctcaaaaggcacgccaaccagctacatcgccacctacatcggaaagaacctg

SEQ ID NO: 53884 - DNA, 75 bp, synthetic construct
  source 1..75: mol_type = other DNA
ggcaacaaccgcgccacgcagtcggtcgcgaaggaacagggatccccgcacctgagtctgcactttcctcctggc

SEQ ID NO: 53885 - DNA, 75 bp, synthetic construct
  source 1..75: mol_type = other DNA
ataaaaaagaaaaacgtaacctgatggtgtttatccgcccgaccattctgcgtgacggtatggcggcagacggcg

SEQ ID NO: 53886 - DNA, 75 bp, synthetic construct
  source 1..75: mol_type = other DNA
cttacctccatgcgcattatcgccgggaaatctcgccaggttcggctctatattccggatgttgatatttctcag

SEQ ID NO: 53887 - DNA, 75 bp, synthetic construct
  source 1..75: mol_type = other DNA
gaaaacccctggcaggctggcgcctgccggaagggaagcgggccacgctggcgcgtcgcccgttacccttcccgt

SEQ ID NO: 53888 - DNA, 75 bp, synthetic construct
  source 1..75: mol_type = other DNA
atgaaacagccattaccgcccgtattacgcgccgcgctctatcgccgtgcagtggcctgtgcctggctgaccctg

SEQ ID NO: 53889 - DNA, 75 bp, synthetic construct
  source 1..75: mol_type = other DNA
ataattttgataaatatctattgggtggaaatatattttatgattatgactttacccgtggacatcgccgtttag

SEQ ID NO: 53890 - DNA, 75 bp, synthetic construct
  source 1..75: mol_type = other DNA
aggaactggcgcaatataatctgtggctggattatctggacgcactggagctggtcgatacttccagtgcgccag

SEQ ID NO: 53891 - DNA, 75 bp, synthetic construct
  source 1..75: mol_type = other DNA
cgatcactgatacgttgcggaaaatgtttcttcgcaggctaaaaaacaaagctgctgatgatgtgctggtgtttc

SEQ ID NO: 53892 - DNA, 75 bp, synthetic construct
  source 1..75: mol_type = other DNA
agcgacgaaatcccggaagcggcaaaagagatcatgcgtgagatggggattaacccggagacgtgggaatactaa

SEQ ID NO: 53893 - DNA, 75 bp, synthetic construct
  source 1..75: mol_type = other DNA
tgcttattatcaacgtacgttgggcgcggaactgctctataaaatcagcttcggcgaaatgccaaaatcagcgca

SEQ ID NO: 53894 - DNA, 75 bp, synthetic construct
  source 1..75: mol_type = other DNA
atgccgttaagtccctacctctcttttgccggtaactgtgccgacgcaattgcttattatcaacgtacgttgggc

SEQ ID NO: 53895 - DNA, 75 bp, synthetic construct
  source 1..75: mol_type = other DNA
cgttgctctggcagcaccgcatggatgagcccatcggtgtgtacaccgaaatgaaagaagatgatgtcgggcttt

SEQ ID NO: 53896 - DNA, 75 bp, synthetic construct
  source 1..75: mol_type = other DNA
atcgtcttcgtcaactggctggcctgctggggcgcgaggcggatatgtcggggagtgctgcggatattgctcaac

SEQ ID NO: 53897 - DNA, 75 bp, synthetic construct
  source 1..75: mol_type = other DNA
ctggatgaccaatgtccatagcgattacgattttcagaatcgctatttacaacgcgatcttgcgtcactacgttc

SEQ ID NO: 53898 - DNA, 75 bp, synthetic construct
  source 1..75: mol_type = other DNA
agagttccgttcacaatttaaaagcgagatttttcagagggaaagtgaaactcagagaaagcgaactatcaggga

SEQ ID NO: 53899 - DNA, 75 bp, synthetic construct
  source 1..75: mol_type = other DNA
ggtttgaaccatgccccggactgacggctgccggacgtggtgttttatcgccggagaatatcacgttcacccgct

SEQ ID NO: 53900 - DNA, 75 bp, synthetic construct
  source 1..75: mol_type = other DNA
agaaattgatgccactggctgttacgttttccctggcggcgtggatgtccatacgcatttcaatattgatgtcgg

SEQ ID NO: 53901 - DNA, 75 bp, synthetic construct
  source 1..75: mol_type = other DNA
taacatccgacagtcattgcgctgtgatgaaaatggcgaagcattacctgtgcatcccggggcttaccctgaaga

SEQ ID NO: 53902 - DNA, 75 bp, synthetic construct
  source 1..75: mol_type = other DNA
aaccgtcagtttgctggattactgctcgatcaggcgtttctggcaggacttggcaattatttgcgggtggagatc

SEQ ID NO: 53903 - DNA, 75 bp, synthetic construct
  source 1..75: mol_type = other DNA
acaacggaataatgcgaccgtggtcgcacaaccggaagaagaacgggcaagaatagaacgtcaggccgaagcacg

SEQ ID NO: 53904 - DNA, 75 bp, synthetic construct
  source 1..75: mol_type = other DNA
cgggaccttgattcgcctgcatattggtctggaagatgtcgacgatctgattgccgatctggacgccggttttgc

SEQ ID NO: 53905 - DNA, 75 bp, synthetic construct
  source 1..75: mol_type = other DNA
gaagtgaaagaccgtgatttaagtgcgctggaagacgctgcggaagatcaaccgcgtgttgtcagagctgcgcaa

SEQ ID NO: 53906 - DNA, 75 bp, synthetic construct
  source 1..75: mol_type = other DNA
taatgaattatggcttgtcatcggtgttgataaagatggaatggttcactttgacaagtcctttcacagtaagga

SEQ ID NO: 53907 - DNA, 75 bp, synthetic construct
  source 1..75: mol_type = other DNA
accattttcgtggagagcggcaacattgaaacgaccggagaaactccctcgtttgtttaccgctatcagatggtg

SEQ ID NO: 53908 - DNA, 75 bp, synthetic construct
  source 1..75: mol_type = other DNA
gctgttcccgaacgcggtgagctggcagaaggggatgaccaccgaggattacatcgagaaatgtggtggcctgac

SEQ ID NO: 53909 - DNA, 75 bp, synthetic construct
  source 1..75: mol_type = other DNA
aggatatttttctgcggcagctcgtccagcaggtgtcacatattgatctcctgctgaaaaaggactggtaccttc

SEQ ID NO: 53910 - DNA, 75 bp, synthetic construct
  source 1..75: mol_type = other DNA
tcgagcaggaagtgctcaccacctggcctgccgatgccattgcccgggcggaagatgtggtgttgcatctgtccg

SEQ ID NO: 53911 - DNA, 75 bp, synthetic construct
  source 1..75: mol_type = other DNA
atacgcatttcaatattgatgtcggcatcgcgcgcagttgtgatgatttttttaccggtacccgcgcagctgcgt

SEQ ID NO: 53912 - DNA, 75 bp, synthetic construct
  source 1..75: mol_type = other DNA
atggctgccggagttgcatatgttgcgatgaagccaatcgttgaaaacctcggaatgagctggtcaacgcagcaa

SEQ ID NO: 53913 - DNA, 75 bp, synthetic construct
  source 1..75: mol_type = other DNA
ccggatgagatgtttcagctcagaaccggcgataaaatccactgggggccttttggccatttagtccgggaatta

SEQ ID NO: 53914 - DNA, 75 bp, synthetic construct
  source 1..75: mol_type = other DNA
aaagaaatcagcgaggagcagtttaccgaagctctgtcacttgctgctcgcgttccgcttgaaggagagttaatc

SEQ ID NO: 53915 - DNA, 75 bp, synthetic construct
  source 1..75: mol_type = other DNA
ttctaatagaaatattagacacagccctggagttagagaggacagactaaaaaatgtcacaaaggatgataataa

SEQ ID NO: 53916 - DNA, 75 bp, synthetic construct
  source 1..75: mol_type = other DNA
tttacccgtattgatgacattatgagtgtgcagtatcctgaatataaaaaagatgaatattatgatgccattgaa

SEQ ID NO: 53917 - DNA, 75 bp, synthetic construct
  source 1..75: mol_type = other DNA
gatacccgccatcagttgatggttgaacagttagacaacgagacgtgggacgcggcggcggataccgtgcgtaag

SEQ ID NO: 53918 - DNA, 75 bp, synthetic construct
  source 1..75: mol_type = other DNA
tctgcaaccattaaccaggcctggcaaacgctgcgtcatccgttaatgcgcgcggaatatttgctttctttgcac

SEQ ID NO: 53919 - DNA, 75 bp, synthetic construct
  source 1..75: mol_type = other DNA
cagcttatggtatgaagtccaaaaaaggagcaatggttagcgttctttctgactatcaattaatttatcctaagc

SEQ ID NO: 53920 - DNA, 75 bp, synthetic construct
  source 1..75: mol_type = other DNA
gaccatcaccgcctggcagagtcaggggttaccactagtttctggtggagggaaagggactgaatcagtttttga

SEQ ID NO: 53921 - DNA, 75 bp, synthetic construct
  source 1..75: mol_type = other DNA
gttgccagtcgccttgcccgtgaagcggtatttatccggaatgatcctgcccgtccgacacagacgggggagctg

SEQ ID NO: 53922 - DNA, 75 bp, synthetic construct
  source 1..75: mol_type = other DNA
gcgccatctggctggcaaaacagtacggcatcgatgccatcgggtttaacgcaccagacctgaatatgaaacatg

SEQ ID NO: 53923 - DNA, 75 bp, synthetic construct
  source 1..75: mol_type = other DNA
ggtgctaacaacattcaagactatgtggatggatatacccacgatggtgaatatgtcttaattgcagaagatggc

SEQ ID NO: 53924 - DNA, 75 bp, synthetic construct
  source 1..75: mol_type = other DNA
actgatttcatgaaagcagtatatttcctgtatctcaatcgtcacggttaccgtggtttatgtcgctataacaag

SEQ ID NO: 53925 - DNA, 75 bp, synthetic construct
  source 1..75: mol_type = other DNA
tctataaaaaggtttctgctgattgtgaggcgtttatatctcgcgccagagttttatttgagaacgcaaacaggg

SEQ ID NO: 53926 - DNA, 75 bp, synthetic construct
  source 1..75: mol_type = other DNA
cgctattgatgccggacacggcggtcaggaccctggcgctatcggccccggtggtacgcgggagaaaaatgtcac

SEQ ID NO: 53927 - DNA, 75 bp, synthetic construct
  source 1..75: mol_type = other DNA
cctgcaatggacgatctgttgttgctgatggctgtaagtgtcagtgcggttgtcaggttatttccagtgctatca

SEQ ID NO: 53928 - DNA, 75 bp, synthetic construct
  source 1..75: mol_type = other DNA
atgaataagtattggttgtcaggagctgtttttcttgcttatggactagcatcacccgcgttctcttctgatact

SEQ ID NO: 53929 - DNA, 75 bp, synthetic construct
  source 1..75: mol_type = other DNA
tgctcgacggctcactgtacgggattggtagcggtcaacaggacagtgaattatataaagcgatgtatgaacgcg

SEQ ID NO: 53930 - DNA, 75 bp, synthetic construct
  source 1..75: mol_type = other DNA
ccgtgaagcactgcagaagaaagagattttccacattaataaagatgtgcggatcacctataccgggcttgagtt

SEQ ID NO: 53931 - DNA, 75 bp, synthetic construct
  source 1..75: mol_type = other DNA
aacgcaagaattagatataataatatattgcattgggacaattgggctaaaaagataattgagattatgtatgag

SEQ ID NO: 53932 - DNA, 75 bp, synthetic construct
  source 1..75: mol_type = other DNA
ccagcggcgtgacgttagccgatggcgcagaagtgctgctctggccagagcatgaggtggaactgccggaagatc

SEQ ID NO: 53933 - DNA, 75 bp, synthetic construct
  source 1..75: mol_type = other DNA
cagcacgcagcaaaaaaggccgcatcaaacgtcagatgtttgcaaagttgcgcaccacaaaatacctgaaaactg

SEQ ID NO: 53934 - DNA, 75 bp, synthetic construct
  source 1..75: mol_type = other DNA
aaaccaatggcgataatgcacacggcctctggagctttggccaggttagcgcgaatgcactcactgttgatgtaa

SEQ ID NO: 53935 - DNA, 75 bp, synthetic construct
  source 1..75: mol_type = other DNA
atgatccactatctacatccagttggtctggcacaccttattatatgctaaaggcattatcgaagagaaatattt

SEQ ID NO: 53936 - DNA, 75 bp, synthetic construct
  source 1..75: mol_type = other DNA
cctgatacaaaaatgtcatacttccacaccctgctggctgaagtttgtactggcgtggcaccggaagttaacgct

SEQ ID NO: 53937 - DNA, 75 bp, synthetic construct
  source 1..75: mol_type = other DNA
gaacggttgttctctgtggtggtccggcagagcagtggccagcgtacggaaaaaacattttccctgccggtgatg

SEQ ID NO: 53938 - DNA, 75 bp, synthetic construct
  source 1..75: mol_type = other DNA
gtcctcgatccggaacgccatattgtgcagtgcaatcgcgcatttaccgaaatgtttggttactgcattagcgaa

SEQ ID NO: 53939 - DNA, 75 bp, synthetic construct
  source 1..75: mol_type = other DNA
gggaagttgctggcacacacggcgtcactcgccctggtggtgcggcattgaatgccgggcaggtttttgctgttc

SEQ ID NO: 53940 - DNA, 75 bp, synthetic construct
  source 1..75: mol_type = other DNA
ccgacagaattaacgtgcaggcactgaacatggggcgaattgtcgctgacgtcgatggtgttaatctcactgaac

SEQ ID NO: 53941 - DNA, 75 bp, synthetic construct
  source 1..75: mol_type = other DNA
tgatgatcccctggcaaaacgtgcacatgcccatatgaaggccggttctttaaccggcctttctattggctacat

SEQ ID NO: 53942 - DNA, 75 bp, synthetic construct
  source 1..75: mol_type = other DNA
ttctctatcaccatcgtttcggcaatggcgctttctgttctggtggcattgattcttacccctgcgttatgtgca

SEQ ID NO: 53943 - DNA, 75 bp, synthetic construct
  source 1..75: mol_type = other DNA
gcgcggatcagcgacgtcaagaacgcactggcccgcggggaaatccccgaacagaaaaaaatcgaaagagtcctg

SEQ ID NO: 53944 - DNA, 75 bp, synthetic construct
  source 1..75: mol_type = other DNA
ttgtgttcgttgctgccggaacttttttatgggtgattatgcacagtatttttgatcgctgtattgattcgtgga

SEQ ID NO: 53945 - DNA, 75 bp, synthetic construct
  source 1..75: mol_type = other DNA
tatgaccgaagataaacccggagaagctcattcatcagcctggaccctggctgcaaaacgtgggcgggatgcagg

SEQ ID NO: 53946 - DNA, 75 bp, synthetic construct
  source 1..75: mol_type = other DNA
ggtgagagtaaatctgcaacagaaatcatcgctgtttccgggccacgctgctgggtggaatttggtggaatttga

SEQ ID NO: 53947 - DNA, 75 bp, synthetic construct
  source 1..75: mol_type = other DNA
acgaaccggcgttgttgattggcaactggtttagtcagccagaaaacgcccgccgcgttggtcagcatctgttgc

SEQ ID NO: 53948 - DNA, 75 bp, synthetic construct
  source 1..75: mol_type = other DNA
attggtggcaaacggctaccgtattcggcaggcgaatcgctgcatcgtatacccacaggaatgtaacagtccgcg

SEQ ID NO: 53949 - DNA, 75 bp, synthetic construct
  source 1..75: mol_type = other DNA
gggttatctgctgcctttatgtgcattatcaggcagaaatatcatgatattcctgctgaaacgccgtatgcgccg

SEQ ID NO: 53950 - DNA, 75 bp, synthetic construct
  source 1..75: mol_type = other DNA
agggcatcgacctcagacggtgttactcatccgtccgtgtacgcatctgaaacccgtccgcgcaacattgcattt

SEQ ID NO: 53951 - DNA, 75 bp, synthetic construct
  source 1..75: mol_type = other DNA
agttgccgtcatggctgaatcgcggcgatgtgctccgcctgaaaaacacctttatccgtttctggggaaaggtgc

SEQ ID NO: 53952 - DNA, 75 bp, synthetic construct
  source 1..75: mol_type = other DNA
aagtaaataacaaaatacttgctgaccttatcaaggttggtgcatcagaagatgttgctaaaaatatcataacag

SEQ ID NO: 53953 - DNA, 75 bp, synthetic construct
  source 1..75: mol_type = other DNA
gtacgttttccggttatcacactgacggtttcactgaagatgaccagtatcaccttgcatccgttcttgaacatc

SEQ ID NO: 53954 - DNA, 75 bp, synthetic construct
  source 1..75: mol_type = other DNA
acgcgactggttgaacctttcgcgggttcttgtgctgtgatgatggagacggattaccccagctatctggttgcg

SEQ ID NO: 53955 - DNA, 75 bp, synthetic construct
  source 1..75: mol_type = other DNA
cggcatgggcatcgtgatggtgttgatgggactggcacaaaatatctggcagtttttgatcctgcgggcgcttct

SEQ ID NO: 53956 - DNA, 75 bp, synthetic construct
  source 1..75: mol_type = other DNA
tgtttacagctatgcgtgatactgatagtccggagcgctttgatgcacctgcagttgtaagcttgagtaatcagt

SEQ ID NO: 53957 - DNA, 75 bp, synthetic construct
  source 1..75: mol_type = other DNA
cagagacagaacacagcaaaaatataaagcgttagacatgacagagcacgctttaaaggtggcaatcaaagttat

SEQ ID NO: 53958 - DNA, 75 bp, synthetic construct
  source 1..75: mol_type = other DNA
tcgcaggggttcaccggggcgtattatcagttgaataatgacaactttgatcctacccacgtaatatggacacag

SEQ ID NO: 53959 - DNA, 75 bp, synthetic construct
  source 1..75: mol_type = other DNA
ggcatcgggtcactgtacagtgaatggggagatatggggcattacacgactgaagctggttttcaatcaaatatg

SEQ ID NO: 53960 - DNA, 75 bp, synthetic construct
  source 1..75: mol_type = other DNA
atggatctattgattgttttaacttacgtggcgctggcgacggcggcgctgggaggcgtgtttctggtgagtggt

SEQ ID NO: 53961 - DNA, 75 bp, synthetic construct
  source 1..75: mol_type = other DNA
ccgttcgccgtattgcggctttgtcactggtttcgctatggctggctggctgttctgacacatcgaatccaccgg

SEQ ID NO: 53962 - DNA, 75 bp, synthetic construct
  source 1..75: mol_type = other DNA
agtgtttagtgccgtggcgttattcctcgtgtttggctttggtttgctgctggaagaggtcggcttgtcgatggc

SEQ ID NO: 53963 - DNA, 75 bp, synthetic construct
  source 1..75: mol_type = other DNA
acgtacccgataaagttgcggcccgtaccaaccttggggtttacagtaaagaagaaggtgatcggcgttatctga

SEQ ID NO: 53964 - DNA, 75 bp, synthetic construct
  source 1..75: mol_type = other DNA
cgctgacagagcgggagattgcggaagctgaacaggtgacaaccatcaacgttaaaaccggagaggtggaatcat

SEQ ID NO: 53965 - DNA, 75 bp, synthetic construct
  source 1..75: mol_type = other DNA
ggcagtgagcagcgtggatgccgcgaaagcctattatgcgacgtttaaacggttacaagaagaagccgctaataa

SEQ ID NO: 53966 - DNA, 75 bp, synthetic construct
  source 1..75: mol_type = other DNA
aaataaagggcaataaagttgagtttgaggtgttcaatcctggctaccgtacatacgacaaagtgaccgtcactg

SEQ ID NO: 53967 - DNA, 75 bp, synthetic construct
  source 1..75: mol_type = other DNA
atgcttttaattcaacctggatttggccttagcatcaaaaaagggcacatgtttggcgagaaagagtctcaacga

SEQ ID NO: 53968 - DNA, 75 bp, synthetic construct
  source 1..75: mol_type = other DNA
attgaacacgctattcgtcgataaaaacttgcgttttcacggcctgatgcaggcattttcccgcaccaaccgcat

SEQ ID NO: 53969 - DNA, 75 bp, synthetic construct
  source 1..75: mol_type = other DNA
acgaaaaagcagactgtattccagaaaattggggcgtttatcgaaaaatttaaaggggttggtggacacctctag

SEQ ID NO: 53970 - DNA, 75 bp, synthetic construct
  source 1..75: mol_type = other DNA
gctggcgtccctgattcagaccgccgaacaggcactgtggaaacgtgagtgggccgcccgtgataacggcctcgc

SEQ ID NO: 53971 - DNA, 75 bp, synthetic construct
  source 1..75: mol_type = other DNA
gccagcgtatttggtcgtgaattgcattcgtatgtaattaccgatgcgattcgtgatgaaaaagtgctcaaattc

SEQ ID NO: 53972 - DNA, 75 bp, synthetic construct
  source 1..75: mol_type = other DNA
taaaaataaaattgactggagaaaaaacaataacgaaatattctattcaacaataaaaatgcctgatactataaa

SEQ ID NO: 53973 - DNA, 75 bp, synthetic construct
  source 1..75: mol_type = other DNA
gtgtttcggtgcgcctatcgtgtgtgaagccacacactggatgccgctaccagaaccgccgaaggaggtgcgcca

SEQ ID NO: 53974 - DNA, 75 bp, synthetic construct
  source 1..75: mol_type = other DNA
actgacgagtaaacaacttctggctggccagcgactttccgttttatccagacttaacagcaccagtggccggat

SEQ ID NO: 53975 - DNA, 75 bp, synthetic construct
  source 1..75: mol_type = other DNA
ccgccgagaacttcaacccggatgtttacgctgcccgcgtgaacgttgagcactatctctcgccatgcccgtcaa

SEQ ID NO: 53976 - DNA, 75 bp, synthetic construct
  source 1..75: mol_type = other DNA
agccggaatttgccgccgcgaaagatggctataccttcgtatctcaccagcaggaagtgggtacaggttacttcg

SEQ ID NO: 53977 - DNA, 75 bp, synthetic construct
  source 1..75: mol_type = other DNA
cccgcgagcagcgggcggtcaggcatcagggcgagagcgatatggcaggaagccgctggtactggcgaaccacac

SEQ ID NO: 53978 - DNA, 75 bp, synthetic construct
  source 1..75: mol_type = other DNA
ccatgcggtggatattgaagtcagtcttcatgaagacttttcgtcagtgattcagtcacgacgcgcctggtttag

SEQ ID NO: 53979 - DNA, 75 bp, synthetic construct
  source 1..75: mol_type = other DNA
gtgcagcaggcgcagcaacgggagagctggcagccagagcgattgccggaatgatgtatccgggcgtgaaacagt

SEQ ID NO: 53980 - DNA, 75 bp, synthetic construct
  source 1..75: mol_type = other DNA
tttcagatataaataataatataccaggtactattctgcccgaaaaaaactggaaaattggtctgtataaggctt

SEQ ID NO: 53981 - DNA, 75 bp, synthetic construct
  source 1..75: mol_type = other DNA
cggggttgttgcatggaggtatcgttacgtgaaaaaagacgttacggactctcagggtaaaacgtgggttggtga

SEQ ID NO: 53982 - DNA, 75 bp, synthetic construct
  source 1..75: mol_type = other DNA
aactgtcactgcagaactgcgggccacgatgatggatgtggcaaactccaccctgagcgctaacgagccgtcagg

SEQ ID NO: 53983 - DNA, 75 bp, synthetic construct
  source 1..75: mol_type = other DNA
atgcagggcacagagctggcaactattcatagttctgtgcagcaggccgcagcgctggtgccggactatggtgcg

SEQ ID NO: 53984 - DNA, 75 bp, synthetic construct
  source 1..75: mol_type = other DNA
ttattcactccgcgtggtcgataaatccgaccagcagtcaaccagtacaccaccaccgttaacaacccttaccgg

SEQ ID NO: 53985 - DNA, 75 bp, synthetic construct
  source 1..75: mol_type = other DNA
ggacgatttcagggtgaacagtttgccgtaggagataaaaatattggccacaaaagaggccaggtgaccttactg

SEQ ID NO: 53986 - DNA, 75 bp, synthetic construct
  source 1..75: mol_type = other DNA
ataaaacagattcggcagcactgttgccctgtatcgaacaggccagggagggtatccgtaccctgcgccaacagt

SEQ ID NO: 53987 - DNA, 75 bp, synthetic construct
  source 1..75: mol_type = other DNA
accaaccgctatggcacgatttcactggccagtgctgccagccaggccggactgacctgggaagggcaggcacac

SEQ ID NO: 53988 - DNA, 75 bp, synthetic construct
  source 1..75: mol_type = other DNA
cagtggcgggttccccctgtgaaggtcgcttcacagaccgctttgggcaggttcattacctgttgctggagccgg

SEQ ID NO: 53989 - DNA, 75 bp, synthetic construct
  source 1..75: mol_type = other DNA
cggtatttgcttatcacgttaatgatcctgaacgttatggtgtcgtggagtttgataataacggtactgcaatta

SEQ ID NO: 53990 - DNA, 75 bp, synthetic construct
  source 1..75: mol_type = other DNA
ttgcgacggaggcaatccgctggcctgaacgtgtggatgaacacaaaaaggccaacgcctttgtcggcacagccc

SEQ ID NO: 53991 - DNA, 75 bp, synthetic construct
  source 1..75: mol_type = other DNA
ctgagtgactcgacccgaagtgaagcggtagagaagctggctctgcactccgttgatgaactgataaaagaatac

SEQ ID NO: 53992 - DNA, 75 bp, synthetic construct
  source 1..75: mol_type = other DNA
gtgcgatatctggcaacattgttgttatctctggcggtgttaatcaccgccgggtgtggctggcatctgcgtgat

SEQ ID NO: 53993 - DNA, 75 bp, synthetic construct
  source 1..75: mol_type = other DNA
gtctgggttcgccagcatgagcgggataccgggggcggtgatggagggctcaccaccgctgaacgtcagcgtctg

SEQ ID NO: 53994 - DNA, 75 bp, synthetic construct
  source 1..75: mol_type = other DNA
gcaggttattgcagacagcgtaatcagtgcgcgaacggcgcgaccgggcggcaaaaaggtcaacagggccaggcc

SEQ ID NO: 53995 - DNA, 75 bp, synthetic construct
  source 1..75: mol_type = other DNA
cccttccgtgcagccaggcagatgacggaacggcgacgatgtggttatccgtcctggcgtttggcagacaggccg

SEQ ID NO: 53996 - DNA, 75 bp, synthetic construct
  source 1..75: mol_type = other DNA
agtggtgatataaagctcaacacctataaacagaaagctaaaccagtgtccttgctcagggagcgagcaggaatg

SEQ ID NO: 53997 - DNA, 75 bp, synthetic construct
  source 1..75: mol_type = other DNA
cggttgtgccggatgaaatagacgtaaacgatgtaccaagggcggtgacatatttcaagacacacagagattgtt

SEQ ID NO: 53998 - DNA, 75 bp, synthetic construct
  source 1..75: mol_type = other DNA
gtcacgcgccgatccgcagcgtcagccgtcaaatccagaacattacctcgaaagatctcgacgttcgccttgacc

SEQ ID NO: 53999 - DNA, 75 bp, synthetic construct
  source 1..75: mol_type = other DNA
tcaggttgcgggcgatccgctgatgctgcgtcgggcgttaagcaacctgctttcgaacgccctgcgttatacgcc

SEQ ID NO: 54000 - DNA, 75 bp, synthetic construct
  source 1..75: mol_type = other DNA
cccttccgtgcagccaggcagatgacggacaggcgacgatgtggttatccgtgatagcgtttggcagacaggccg

SEQ ID NO: 54001 - DNA, 75 bp, synthetic construct
  source 1..75: mol_type = other DNA
gttaaaaaaatgtgtctggtgcacacaggaaagaatctgcccgcagaaaaaaagccgaatttctggcaactctga

SEQ ID NO: 54002 - DNA, 75 bp, synthetic construct
  source 1..75: mol_type = other DNA
taccgaaccattccgtaagaaagcccgcgaagtttactcacagttcccggagtggacacctggcctctatgaaac

SEQ ID NO: 54003 - DNA, 75 bp, synthetic construct
  source 1..75: mol_type = other DNA
aaaatatatgctttccctgacctggaacgcaccaatggaagccttcaccgaaaaagatcagttcttccacggcgt

SEQ ID NO: 54004 - DNA, 75 bp, synthetic construct
  source 1..75: mol_type = other DNA
gcagcagctaaacttgcgaagatcccgaaaccaccaagccaggcagtatatgaagtgttcaaaaacgcgccattg

SEQ ID NO: 54005 - DNA, 75 bp, synthetic construct
  source 1..75: mol_type = other DNA
atgccaacgccaatgcagcgacaacgtgcccgacagatggatgagcgccgtgcggcgctcatgaccagaacggac

SEQ ID NO: 54006 - DNA, 75 bp, synthetic construct
  source 1..75: mol_type = other DNA
tatttcaagacacacagagattgttacgcagatggctggaacgcctgccgcgccgccatgcttcagtccggaaac

SEQ ID NO: 54007 - DNA, 75 bp, synthetic construct
  source 1..75: mol_type = other DNA
atgcaggtgagccagtggacaggccagaacggcgaaacgcggcagggctggcaggttatcgcagacagtgtaatc

SEQ ID NO: 54008 - DNA, 75 bp, synthetic construct
  source 1..75: mol_type = other DNA
gtaaaaacacttgatgaaggtgtcacaaaaatgagtctggtttacatcggaaagaatctgcccgcagaaaaaaaa

SEQ ID NO: 54009 - DNA, 75 bp, synthetic construct
  source 1..75: mol_type = other DNA
cgctattcgaagtaggtgcaccgccattaacacactgcgttacttctggaaacactccgttcagacttaacctac

SEQ ID NO: 54010 - DNA, 75 bp, synthetic construct
  source 1..75: mol_type = other DNA
gcctgatagcccggcacccgtcgttcagcaaacatccgcacgcactaccaccagtaacggtcataaccctttccg

SEQ ID NO: 54011 - DNA, 75 bp, synthetic construct
  source 1..75: mol_type = other DNA
agcgaaaaactggtccactcccgaaagtggtggctttatctggcacaccaccggttccggtaaaacactgaccag

SEQ ID NO: 54012 - DNA, 75 bp, synthetic construct
  source 1..75: mol_type = other DNA
ggacgggaacaggaaatttctggtccttccttacgggaagtcagcagaggtgatttcctttcaggggaaggaatg

SEQ ID NO: 54013 - DNA, 75 bp, synthetic construct
  source 1..75: mol_type = other DNA
tgcccgggagcaacaaaaaaggcgtgatgaacgtgctgatggttccgtcccgctgaaactgtccggaaaaatcca

SEQ ID NO: 54014 - DNA, 75 bp, synthetic construct
  source 1..75: mol_type = other DNA
cttgatgatcaatcgctggaagagaaactggtgatagcccgtcgtggcggttactgttttgagcagaatggcgtg

SEQ ID NO: 54015 - DNA, 75 bp, synthetic construct
  source 1..75: mol_type = other DNA
atcttggcgggcggatacaggcgaacctggaagaaatcaggatacaggaagaaacattgcagaaactgaacgcga

SEQ ID NO: 54016 - DNA, 75 bp, synthetic construct
  source 1..75: mol_type = other DNA
agtcgtggtgtcctcccaaaaaaactgctgaatgaaatgattgagcaggcgtaccatgatttggtggcaaccagg

SEQ ID NO: 54017 - DNA, 75 bp, synthetic construct
  source 1..75: mol_type = other DNA
tgtcaccctcaaaggcaaaaaagcgggcacgcatacggttaccgcaacgctgggtaacaataatgccagcgatgc

SEQ ID NO: 54018 - DNA, 75 bp, synthetic construct
  source 1..75: mol_type = other DNA
accgtaattgatgactggaaagccaaatacggtgcatcgctggtggctgaaatgggcgatccaaacggtaatgca

SEQ ID NO: 54019 - DNA, 75 bp, synthetic construct
  source 1..75: mol_type = other DNA
gaagaggcggcgaaacgctatattcgcacgtctttaaaacgcgaatacgccaccgaaaatggcacggaattaaac

SEQ ID NO: 54020 - DNA, 75 bp, synthetic construct
  source 1..75: mol_type = other DNA
cactgacgcactgaacagggcaaaacaacagacaggccagcacgatgacccgtacggggatgaaataccgtttta

SEQ ID NO: 54021 - DNA, 75 bp, synthetic construct
  source 1..75: mol_type = other DNA
ccgttctgactgccgcccactgggggcccatgctggttgaaaccgacggcgaaaccgtgtttagctcgcgtggcg

SEQ ID NO: 54022 - DNA, 75 bp, synthetic construct
  source 1..75: mol_type = other DNA
acggatgtacaaagcatcaccatcaggggtaacaaacctgtcatccgcgtttcccggagtgcgcattgcatgcgc

SEQ ID NO: 54023 - DNA, 75 bp, synthetic construct
  source 1..75: mol_type = other DNA
atgtttcagtccctaacttatatccgctttatagtaggaaggtaaataaagtctattggcggtataagcatccag

SEQ ID NO: 54024 - DNA, 75 bp, synthetic construct
  source 1..75: mol_type = other DNA
ccggataatgtcaaaggcgacacagacgccgaaagcgtctttttttgtgtcatgccatcgcacagccatacgtag

SEQ ID NO: 54025 - DNA, 75 bp, synthetic construct
  source 1..75: mol_type = other DNA
ggggcaacgacgacgctgacattcagcacagtaccggaagatgcatctgataaaacggtgagtgtggcgtcatca

SEQ ID NO: 54026 - DNA, 75 bp, synthetic construct
  source 1..75: mol_type = other DNA
cactggctgacggtatggaaatttctctgaccggtcatgaaatcaggaccgtcctggcacgcctggaggacatcc

SEQ ID NO: 54027 - DNA, 75 bp, synthetic construct
  source 1..75: mol_type = other DNA
attcagataacgtatttaatgaatgctttaataaccgttgcattctgcaaatatgcccctacggactaaaacgac

SEQ ID NO: 54028 - DNA, 75 bp, synthetic construct
  source 1..75: mol_type = other DNA
atatacaatcatggatcagtctctggaaagtatgaaggaggatttaaacgatttcgcaaaagagacacatgaaga

SEQ ID NO: 54029 - DNA, 75 bp, synthetic construct
  source 1..75: mol_type = other DNA
gccgtgctgaagttatcagagcagcactggcagcgttacgtctggtatcagcagaagaacgccggaggctgtttg

SEQ ID NO: 54030 - DNA, 75 bp, synthetic construct
  source 1..75: mol_type = other DNA
gagacagtcctgcacggtttattgctccgggacgtaaatatccacagccgtatgtggcactgccggcgtttgacc

SEQ ID NO: 54031 - DNA, 75 bp, synthetic construct
  source 1..75: mol_type = other DNA
ccggactgacctttcttgaccccaaagatgccacacaggttcaggggctgtttcagcatttgcaggtcaggtttg

SEQ ID NO: 54032 - DNA, 75 bp, synthetic construct
  source 1..75: mol_type = other DNA
tatgggagtatggagtcgtgtctgcctgcaggagccgagcagaaaatttctggtgactgtttcccggtcgataaa

SEQ ID NO: 54033 - DNA, 75 bp, synthetic construct
  source 1..75: mol_type = other DNA
taaggccagtcgttctttatctgttggtgaatatcagtatttattactacttgcaaatatgcatccggtttataa

SEQ ID NO: 54034 - DNA, 75 bp, synthetic construct
  source 1..75: mol_type = other DNA
gaatcacgcaaccccaaatggtcccaggaacaacaaaattctttcaagtggctggcggcattactggaagaaaaa

SEQ ID NO: 54035 - DNA, 75 bp, synthetic construct
  source 1..75: mol_type = other DNA
ctgggcagcatgggagaacgctgggccggccagggggctgaacaactggggctgcagggcagtgtcgataaggat

SEQ ID NO: 54036 - DNA, 75 bp, synthetic construct
  source 1..75: mol_type = other DNA
cgaaaaagcggccagagaatttggcgtgacacagagaacatggcacgcctgggaaaatgcggaacaggtggatgt

SEQ ID NO: 54037 - DNA, 75 bp, synthetic construct
  source 1..75: mol_type = other DNA
ggtgatttgcgatgagcaatttcgcctgcgggcggttgaatgggaagagtacagcgaacgcatggtgcagctgct

SEQ ID NO: 54038 - DNA, 75 bp, synthetic construct
  source 1..75: mol_type = other DNA
cccggagacaggtcgtcccgttgagctggcgttacggggtatgcgtgttctggtgccatcatcactggcaacggc

SEQ ID NO: 54039 - DNA, 75 bp, synthetic construct
  source 1..75: mol_type = other DNA
tacaattccggtaggtttcaccaaatcaattaaagaacgtctgggtatcgataaccttattttctctccggaatt

SEQ ID NO: 54040 - DNA, 75 bp, synthetic construct
  source 1..75: mol_type = other DNA
ggtgaatataactacttattgttgttggctggaaaacaccctgaatatgttctttgtaaaagggatacgatcacc

SEQ ID NO: 54041 - DNA, 75 bp, synthetic construct
  source 1..75: mol_type = other DNA
aaataatggatacttaacagtgagcttgaatcgattaaacaaaatacatcaaaacatatgtcgcttaagggagtt

SEQ ID NO: 54042 - DNA, 75 bp, synthetic construct
  source 1..75: mol_type = other DNA
gattgaggatgtgaaacacgatacgcgtgaagcggaagatgtgctggatgtggcggtggccattgcggaggcaga

SEQ ID NO: 54043 - DNA, 75 bp, synthetic construct
  source 1..75: mol_type = other DNA
caggtactgcgtaatcagccagcgctgtccgcgtttacgtcagaaattaatgcgatgagcgcaaccattatcggt

SEQ ID NO: 54044 - DNA, 75 bp, synthetic construct
  source 1..75: mol_type = other DNA
atggcgtcaggatcatggttttgttccgggcagtatccttaccctgcatggcgatctggcacgcagcattaccac

SEQ ID NO: 54045 - DNA, 75 bp, synthetic construct
  source 1..75: mol_type = other DNA
tgacggtttttcttgtttcgggtgagtcagttgatgttgttgtcggtgtttatgggagtatggagtcgtgtctgc

SEQ ID NO: 54046 - DNA, 75 bp, synthetic construct
  source 1..75: mol_type = other DNA
atgtttggtatttttggtaaaaaagcccgccgagcggcagtggaaattaaaaagtttgagaaacgtgatctggca

SEQ ID NO: 54047 - DNA, 75 bp, synthetic construct
  source 1..75: mol_type = other DNA
tttcagcatttgcaggtcaggtttggtgacgggccgtggcaggatgttaaggggctggatgaagtgggcagtgat

SEQ ID NO: 54048 - DNA, 75 bp, synthetic construct
  source 1..75: mol_type = other DNA
atcagaagaagcaacatagccgccccattgaccttacagagcactggctgagggtggcgataaaaatcatcgacc

SEQ ID NO: 54049 - DNA, 75 bp, synthetic construct
  source 1..75: mol_type = other DNA
aatgataccggcggttcatcaaccgtttccatttttctgaataattacagaaaaattcaacaggaaagatatgaa

SEQ ID NO: 54050 - DNA, 75 bp, synthetic construct
  source 1..75: mol_type = other DNA
ggctggcccggtgggggcaaccggacctcaggggccgaagggcgacccgggggagacgcaaatacggttccgtct

SEQ ID NO: 54051 - DNA, 75 bp, synthetic construct
  source 1..75: mol_type = other DNA
atcaaccaactggatagcgataacaaattgaatattaataatgatgatattgtcgcggttggcatgacctatcag

SEQ ID NO: 54052 - DNA, 75 bp, synthetic construct
  source 1..75: mol_type = other DNA
tgatcgatgttttccgggaagctcagcaaacaggcgatgtcccgccaggctttaaccctgcagaatcggcaaaaa

SEQ ID NO: 54053 - DNA, 75 bp, synthetic construct
  source 1..75: mol_type = other DNA
tctgaccgatcatgaaatcaggactgtcctggcgcacctggaggacatcccggaagaccagcggatggagtccgg

SEQ ID NO: 54054 - DNA, 75 bp, synthetic construct
  source 1..75: mol_type = other DNA
ggtgcttggggtgatcaggacctggttgaatatattgatgtaggtgcaacctattacttcaacaaaaatatgtcc

SEQ ID NO: 54055 - DNA, 75 bp, synthetic construct
  source 1..75: mol_type = other DNA
ttcccgttcatattgcgccaccactgcatgctgatgtaccacagcccgtcacgaatgagccagtcacgctcttcc

SEQ ID NO: 54056 - DNA, 75 bp, synthetic construct
  source 1..75: mol_type = other DNA
accagaaagttctggatgatacgatggctgttgccgacatcctgacttctatggtggttgacgtttctgacctgc

SEQ ID NO: 54057 - DNA, 75 bp, synthetic construct
  source 1..75: mol_type = other DNA
atatcacggcaacgactgacctttgatgagtggatgatgatttataatgcagcggaaaaggatggttacttttta

SEQ ID NO: 54058 - DNA, 75 bp, synthetic construct
  source 1..75: mol_type = other DNA
gcgaacggggaccggcaggtgatgctggtccggcaggcccgcaggggccgaaaggcgacaggggagagcggggag

SEQ ID NO: 54059 - DNA, 75 bp, synthetic construct
  source 1..75: mol_type = other DNA
tcgcttttctctggagcgaacccctgctgcgccctctctttggtatagtgatgatcttcgtgggcatcgttggcg

SEQ ID NO: 54060 - DNA, 75 bp, synthetic construct
  source 1..75: mol_type = other DNA
aagacgaccagaaccgcaatatgtttgaacgcggcagcgcgaagattatgccgttctttaaaacgctgctggtgg

SEQ ID NO: 54061 - DNA, 75 bp, synthetic construct
  source 1..75: mol_type = other DNA
tattgaccagaaactggcggaaaccattgcagcagaagcgaacagccgtcttgccagacaacaaatggagcaaat

SEQ ID NO: 54062 - DNA, 75 bp, synthetic construct
  source 1..75: mol_type = other DNA
aggatgcctggcaaaatgcggcgttcgaagggatcagcatggactgcctggggctggcgtcagttcaggcgacca

SEQ ID NO: 54063 - DNA, 75 bp, synthetic construct
  source 1..75: mol_type = other DNA
cagagccgaaatataaagcgttagatataacagagctggccttaaaggtggcaatcagaacgatagaccgacacg

SEQ ID NO: 54064 - DNA, 75 bp, synthetic construct
  source 1..75: mol_type = other DNA
ctgacagaacgggagattgccgaagcggaacaggtgacaaccatcaacgttaaaaccggagagcagacagcatga

SEQ ID NO: 54065 - DNA, 75 bp, synthetic construct
  source 1..75: mol_type = other DNA
gcgtcattctgttggtggagggatttcctccgtcacatgccgggaccatcaccgtgtatgaagattctcaaccgg

SEQ ID NO: 54066 - DNA, 75 bp, synthetic construct
  source 1..75: mol_type = other DNA
ccgaccgtttcacggtggtgcagggttatgccggtgtgggtaagaccacacagttccgggcggtgatgtcagccg

SEQ ID NO: 54067 - DNA, 75 bp, synthetic construct
  source 1..75: mol_type = other DNA
gctgcaaaccctgcgcctgaaacgcctcacgagctacaaaatcatcgctgcatcaacatgcgtttgccaactgcc

SEQ ID NO: 54068 - DNA, 75 bp, synthetic construct
  source 1..75: mol_type = other DNA
ggcgctgattgatgaaaaaaacctggaggcgggcatgaagttgcccgctgaacgtcaactggcgatgcaactcgg

SEQ ID NO: 54069 - DNA, 75 bp, synthetic construct
  source 1..75: mol_type = other DNA
cgggaggtcatgaatgcagagcggttgttcagtacggcacgggagctgcgggatgtggcagctggccgtgctgtt

SEQ ID NO: 54070 - DNA, 75 bp, synthetic construct
  source 1..75: mol_type = other DNA
cggcgtggtgacacgctgaccattaacggcgagatgttctgggtggaccgtgtttctccggatgacggagggagt

SEQ ID NO: 54071 - DNA, 75 bp, synthetic construct
  source 1..75: mol_type = other DNA
gggcgtggacagtgcgcagggaaccttcacgaataccggagagtacggacagacaggtattgcaaatggcggggt

SEQ ID NO: 54072 - DNA, 75 bp, synthetic construct
  source 1..75: mol_type = other DNA
gtcaaacaacgtgaagcagaggccaacatgctgcgcgcggaagctgccggacaggctgatgctattcgcacaaaa

SEQ ID NO: 54073 - DNA, 75 bp, synthetic construct
  source 1..75: mol_type = other DNA
ggagttcttcaagcgatcgaccgagtggctggccgacaagtacggcgctgagaacgtggtcacggccacgatcca

SEQ ID NO: 54074 - DNA, 75 bp, synthetic construct
  source 1..75: mol_type = other DNA
atggcaacaaaagaagaaaatctgaatcgtcttcgtcaactggctggcctgctggggcgcgaggcggatatatcg

SEQ ID NO: 54075 - DNA, 75 bp, synthetic construct
  source 1..75: mol_type = other DNA
tgcactcggtctatgtagaccagtgggactgggaacgcgtaatgggcgacggcgagcgtcaattctcgactctga

SEQ ID NO: 54076 - DNA, 75 bp, synthetic construct
  source 1..75: mol_type = other DNA
cccgatgaagaccgtctttctccgttgcactcggtctatgttgaccagtgggactgggaacgcgtaatgggcgac

SEQ ID NO: 54077 - DNA, 75 bp, synthetic construct
  source 1..75: mol_type = other DNA
tgctggcaacggacaatgtgcatgccaacagccgcgcctacttcctcgatgagaagcgggccgaggtgccagggt

SEQ ID NO: 54078 - DNA, 75 bp, synthetic construct
  source 1..75: mol_type = other DNA
ccgctggcgtgaactggaagaacagatccgtaagccaatgagcgaaatcgaaatggttgccgcgatggctcttga

SEQ ID NO: 54079 - DNA, 75 bp, synthetic construct
  source 1..75: mol_type = other DNA
cgctgctcgccagtgacaatgttcacgctaacagccgcgcctattttctcgctgagaagcgtgccggagtacccg

SEQ ID NO: 54080 - DNA, 75 bp, synthetic construct
  source 1..75: mol_type = other DNA
agttccggcgtgatttcacgctggtgggccatcgtaaagccgtaaatcagaaacgtgcagcaagctatatccgca

SEQ ID NO: 54081 - DNA, 75 bp, synthetic construct
  source 1..75: mol_type = other DNA
accgaacaacgtcaggaagaaggcacccagtggtttaaccgcgttatggggattattggccgtggccgcaaagcg

SEQ ID NO: 54082 - DNA, 75 bp, synthetic construct
  source 1..75: mol_type = other DNA
cccgacaagaatgaagccagtacgactgatatgacagagcagcaaatcatgcaactggtaatgactccaacttat

SEQ ID NO: 54083 - DNA, 75 bp, synthetic construct
  source 1..75: mol_type = other DNA
gcacgacgcctatcgtaatgccgactacgtgatcattgcgacgccgaccgattacgatcccaaaaccaactactt

SEQ ID NO: 54084 - DNA, 75 bp, synthetic construct
  source 1..75: mol_type = other DNA
tgcaggacaagagattgcagaatcagcaagctatggagcaggcaaagcgagataaggccgatgcgtacaactctg

SEQ ID NO: 54085 - DNA, 75 bp, synthetic construct
  source 1..75: mol_type = other DNA
atttattatcgctgaagattttcttgatggaaataattgtactttgattttaggcgacaatattttttatggtaa

SEQ ID NO: 54086 - DNA, 75 bp, synthetic construct
  source 1..75: mol_type = other DNA
tacgtcatcattgccactcctaccgactacgatccgaaaacgaattacttcaacacatccactgtagaagcggtc

SEQ ID NO: 54087 - DNA, 75 bp, synthetic construct
  source 1..75: mol_type = other DNA
tacactgatgttagcgggtattcgcgatattctgattatcagtacgccacaggatactcctcgttttcaacaact

SEQ ID NO: 54088 - DNA, 75 bp, synthetic construct
  source 1..75: mol_type = other DNA
ctcaatggtgaacaattagtaacaaatttggtacagcaattattagatctgttgagacagaacgatattatcaga

SEQ ID NO: 54089 - DNA, 75 bp, synthetic construct
  source 1..75: mol_type = other DNA
ctcattaacgagcgtcgccgcgagctgctaaattcactggcagtagatgctaacgacaccggtcagattattgcc

SEQ ID NO: 54090 - DNA, 75 bp, synthetic construct
  source 1..75: mol_type = other DNA
gggaataagtgatacatcaggcttgtccctacataacgtacaaagcgcggatggtaaagcgacaggaacctatgt

SEQ ID NO: 54091 - DNA, 75 bp, synthetic construct
  source 1..75: mol_type = other DNA
cggtctttgcctaccatgttaaagaccctgaacgctatggtgtggtagatttcgatgagaatggcaaagcgcttt

SEQ ID NO: 54092 - DNA, 75 bp, synthetic construct
  source 1..75: mol_type = other DNA
gatattctcatcattagcacacctcaggatacccctcgctttgagcaattacttggtaacggtgaaaaatggggg

SEQ ID NO: 54093 - DNA, 75 bp, synthetic construct
  source 1..75: mol_type = other DNA
aaacagattatcgaaggggtatgcttggatccgcgtatcggtaaccattataacaacccgtcctttggctacggc

SEQ ID NO: 54094 - DNA, 75 bp, synthetic construct
  source 1..75: mol_type = other DNA
acaacatataaagtacacccggtagttcaggctggcggtgatgttagctttatccggggttatactttaagcgga

SEQ ID NO: 54095 - DNA, 75 bp, synthetic construct
  source 1..75: mol_type = other DNA
ctgaaagcaccgctggatgcgctgacgcatgcgggagtgcttattgatgacgagcagtttgatgaaatcaatatt

SEQ ID NO: 54096 - DNA, 75 bp, synthetic construct
  source 1..75: mol_type = other DNA
tgatgtgctggagccgggggctgaccgggaggtcatgaatgcagagcggttgttcagtacggcacgggagctgcg

SEQ ID NO: 54097 - DNA, 75 bp, synthetic construct
  source 1..75: mol_type = other DNA
cacctcagtatgtggagcaagcgaaagataattctttgcaaccttcccaaacggtaacggactctctcaaggtag

SEQ ID NO: 54098 - DNA, 75 bp, synthetic construct
  source 1..75: mol_type = other DNA
ctgacgtaccggggcatgcgtgttatggtgccatcaccactggcgacagccatgatacagcacggaacggctgag

SEQ ID NO: 54099 - DNA, 75 bp, synthetic construct
  source 1..75: mol_type = other DNA
ctttatttctatgacaacagtgtgattgaaatggctaaaaatctcaagccttccgtgcgtggagagctggaaatc

SEQ ID NO: 54100 - DNA, 75 bp, synthetic construct
  source 1..75: mol_type = other DNA
ttgccgcgcgtggactggaaatgacaggtgttgacctcgaaacaatggaagaagtctggcagcaggtaaaacggc

SEQ ID NO: 54101 - DNA, 75 bp, synthetic construct
  source 1..75: mol_type = other DNA
caggattatcttactcacaaagaactgaatttccgcgctactacggataaagaagatgcctaccgcgatgcggat

SEQ ID NO: 54102 - DNA, 75 bp, synthetic construct
  source 1..75: mol_type = other DNA
tccgtcaacgatggtagatcgcattgtgcctgcagtaacggcagaaacgctggataaacttgaacaacttactgg

SEQ ID NO: 54103 - DNA, 75 bp, synthetic construct
  source 1..75: mol_type = other DNA
gcgcttcccgacgcccttgagcggaagtatccgcgcgccgggcattcctggccgtggttctgggtttttgcgcag

SEQ ID NO: 54104 - DNA, 75 bp, synthetic construct
  source 1..75: mol_type = other DNA
ggatggcgaaccagatcacgtccatttgttaattaactatcctcccaaactggcgatatccagtctggtaaacag

SEQ ID NO: 54105 - DNA, 75 bp, synthetic construct
  source 1..75: mol_type = other DNA
cacacaccgtctggtacgccgacgatatccgccgcggagaacgcgaggcggcagatgtgctggggctcacactct

SEQ ID NO: 54106 - DNA, 75 bp, synthetic construct
  source 1..75: mol_type = other DNA
taaccgcctggacggaactcgaagcgcgtaaccgttgcccgtcaggttgcgttgctgtattcgccgcccgtatcc

SEQ ID NO: 54107 - DNA, 75 bp, synthetic construct
  source 1..75: mol_type = other DNA
atgaacactgcacacaacgtgaaggccagggaacggataccacagttgaacgataaacagagccctgctctgctg

SEQ ID NO: 54108 - DNA, 75 bp, synthetic construct
  source 1..75: mol_type = other DNA
cccggcagagaaagaggcccgtcgtttgcatctgcagggtatgacggttccggattatacggtgaaggtgagaaa

SEQ ID NO: 54109 - DNA, 75 bp, synthetic construct
  source 1..75: mol_type = other DNA
taactactgttggccgcgatgtaaaattggatgcttctgcacttaaagccaaccaatcgcttgtcgtgtataaag

SEQ ID NO: 54110 - DNA, 75 bp, synthetic construct
  source 1..75: mol_type = other DNA
gtgtctggcctcagtatggtcgtgtggaaatccgtggaattcggaaaacatggattggtaactccgaacctttta

SEQ ID NO: 54111 - DNA, 75 bp, synthetic construct
  source 1..75: mol_type = other DNA
actgcggcggtgaatgggctggaaaacagtattgccactctgacagtacgtgacgatgcccgtctggaactggcc

SEQ ID NO: 54112 - DNA, 75 bp, synthetic construct
  source 1..75: mol_type = other DNA
cggagcaaatgattctttttggtttatatttgcagcatttctttcatgttttttctcctcccttgatgtatattc

SEQ ID NO: 54113 - DNA, 75 bp, synthetic construct
  source 1..75: mol_type = other DNA
ggcgctaaggcagaactggcactggcggagaagctggggcatgcagttattttccaggaggcaaacagtgagtaa

SEQ ID NO: 54114 - DNA, 75 bp, synthetic construct
  source 1..75: mol_type = other DNA
ctgtgagcgattcaccgttcacggcactgaagctggagaacggctgggtggaaacgcccgggcattccgtcagtg

SEQ ID NO: 54115 - DNA, 75 bp, synthetic construct
  source 1..75: mol_type = other DNA
ggcgctaaggcagaactggcactggcggagaaactggggcatgcagttattttccaggaggcaaccagtgagtgg

SEQ ID NO: 54116 - DNA, 75 bp, synthetic construct
  source 1..75: mol_type = other DNA
aacaaactggcgctcagcggccgggcggtgcggctctattccgcgcagacggcgcagaaaacgacggagaagctg

SEQ ID NO: 54117 - DNA, 75 bp, synthetic construct
  source 1..75: mol_type = other DNA
cttttcgaaaagcgacaacgagcggggcttcgtggccaacagcgtctggtcggtcagtgagataaaaggtgacag

SEQ ID NO: 54118 - DNA, 75 bp, synthetic construct
  source 1..75: mol_type = other DNA
taaagcggtacgcttttatgaacaggtaaagtgtgagaatccgccagctgaaaccggagcatggaaagacgctgt

SEQ ID NO: 54119 - DNA, 75 bp, synthetic construct
  source 1..75: mol_type = other DNA
cagccacaacagccacaacagccacaacagccacaacagccacaacagccacaacagccacaacagccacaacag

SEQ ID NO: 54120 - DNA, 75 bp, synthetic construct
  source 1..75: mol_type = other DNA
caggcgttcgcgcagcgcccttatgcaggatgagcgcctcagcggcgagcatatcaccgacaggcgggggctgac

SEQ ID NO: 54121 - DNA, 75 bp, synthetic construct
  source 1..75: mol_type = other DNA
gggaaaagtgctgcccgcgttgtggtactggggtatacagcagggagggggggctgcaggaaggcaactggaagg

SEQ ID NO: 54122 - DNA, 75 bp, synthetic construct
  source 1..75: mol_type = other DNA
tgctggtggttacggtgacaagcgtctctcgccaaaagagagtgaagttctgcgcctgtttgcggaaggcttcct

SEQ ID NO: 54123 - DNA, 75 bp, synthetic construct
  source 1..75: mol_type = other DNA
gttaaaaatggcctgctgagcatccagagctggagtcctcgcgacttcacgtatgaccggcaccgtaccgtggac

SEQ ID NO: 54124 - DNA, 75 bp, synthetic construct
  source 1..75: mol_type = other DNA
caaaccgtttgtcggtggcggttttggtaataaacaggatgtactggaagagccaatggcggcattcctgaccag

SEQ ID NO: 54125 - DNA, 75 bp, synthetic construct
  source 1..75: mol_type = other DNA
aatatcgatattattctctggcatggttttcctttttccggtgaacacgctcaggaatattgtggcgttcttctg

SEQ ID NO: 54126 - DNA, 75 bp, synthetic construct
  source 1..75: mol_type = other DNA
atgtggattggcataattagcctgtttcctgaaatgttccgcgcaattaccgattacggggtaactggccgggca

SEQ ID NO: 54127 - DNA, 75 bp, synthetic construct
  source 1..75: mol_type = other DNA
agttggcgctgggttaaaaggcgctgtatctaaaattgccaccacacgtagtggtcgatatgcgatagagaaagc

SEQ ID NO: 54128 - DNA, 75 bp, synthetic construct
  source 1..75: mol_type = other DNA
gtttggtcttggcgcgattggtctggcagtggttcagggcgcgcgtcaggcgaaagcgggacggattatcgctat

SEQ ID NO: 54129 - DNA, 75 bp, synthetic construct
  source 1..75: mol_type = other DNA
tgaccatagcaatgttgctatggtttttaagtacgctaagacgtaaaccctgtcaaaagaaaggctgtattgacg

SEQ ID NO: 54130 - DNA, 75 bp, synthetic construct
  source 1..75: mol_type = other DNA
cgtcgaatacgctggttccgttgttttatgcggaaatggataaccaggcggcgaatactgcacaggacagcggag

SEQ ID NO: 54131 - DNA, 75 bp, synthetic construct
  source 1..75: mol_type = other DNA
tcgtaaagcggcttaacccctttgcaaaacaggcgctggaaatggctgcctcggagtgtatgagccagcaggcca

SEQ ID NO: 54132 - DNA, 75 bp, synthetic construct
  source 1..75: mol_type = other DNA
aagaccgtgaacgcttcctgaacgcccgcgacaccctgcgtgcgttgctcgataacaatatcgttccggtaatca

SEQ ID NO: 54133 - DNA, 75 bp, synthetic construct
  source 1..75: mol_type = other DNA
acaaatagctcgtgagaacggaatcaacgtaagcgccccatctgcgacgtcttgtgaaaattgtcctgtctggca

SEQ ID NO: 54134 - DNA, 75 bp, synthetic construct
  source 1..75: mol_type = other DNA
tggctaagatatttaccctgggttatgtggattttagcaaacgctccaacgaagcgggtagaaatatgatggctc

SEQ ID NO: 54135 - DNA, 75 bp, synthetic construct
  source 1..75: mol_type = other DNA
gcagtacagcgataaatggatgaccaaatccaggcaggaaaagctgatatggctgcgtgcacagatgaagctgac

SEQ ID NO: 54136 - DNA, 75 bp, synthetic construct
  source 1..75: mol_type = other DNA
tatctgttatcagagtctgtaagtcgttgtgataaagacaggttgaaaaatatttatattcgtctggtttcagaa

SEQ ID NO: 54137 - DNA, 75 bp, synthetic construct
  source 1..75: mol_type = other DNA
gtaacgtgatttatggcatcagcagcccgtcgcagggaatgttgtccagttttgtcccgacggatagccagatta

SEQ ID NO: 54138 - DNA, 75 bp, synthetic construct
  source 1..75: mol_type = other DNA
ccgccggaaccgattttcaccggagtttaaatggagacttgttcagcagactcttttacccggtgcctgtgtcgc

SEQ ID NO: 54139 - DNA, 75 bp, synthetic construct
  source 1..75: mol_type = other DNA
acacgaaatggtttttgtgatgcctggcgctttcgttcagagcgtactgaggataaaaaagataaactacttatt

SEQ ID NO: 54140 - DNA, 75 bp, synthetic construct
  source 1..75: mol_type = other DNA
ccgtgacagcatggttcccggaaaacaaacaatctgatgtatcacagatatggcatgcttttgaacatgaagagc

SEQ ID NO: 54141 - DNA, 75 bp, synthetic construct
  source 1..75: mol_type = other DNA
gattgtgtttagtgcaaaaaaacgtcagtggggaaatcaggaggatttggcatgcgcacagtggatctgggggcg

SEQ ID NO: 54142 - DNA, 75 bp, synthetic construct
  source 1..75: mol_type = other DNA
gacttcgaacgtctgatggaaggcgctaaactgctgaaatgttcagagtttggtgatgcgatcatcaagaacatg

SEQ ID NO: 54143 - DNA, 75 bp, synthetic construct
  source 1..75: mol_type = other DNA
agcagaagcgattaaacttttcgctaatacctatctggcgatgcgcgtagcgtactttaatgaactggatagcta

SEQ ID NO: 54144 - DNA, 75 bp, synthetic construct
  source 1..75: mol_type = other DNA
gaagatttagcgtgtgcgcagtggatctggggacgaatcgtgagtctttacgagcaggctgccagcgatgatggc

SEQ ID NO: 54145 - DNA, 75 bp, synthetic construct
  source 1..75: mol_type = other DNA
atggcggaaacagcggttatcaatcacaagaaacgtaaaaatagcccgcgaatcgtccagtcaaacgacctcact

SEQ ID NO: 54146 - DNA, 75 bp, synthetic construct
  source 1..75: mol_type = other DNA
attggctacgtgattaaaacagaaaataaagaaacccctttcactgtggttgatatcgacggtccatcaggcaac

SEQ ID NO: 54147 - DNA, 75 bp, synthetic construct
  source 1..75: mol_type = other DNA
acatcaacattcctgtgcgccacaacgatcctgaaagcatcgataatattcgcggtgccctgcattatctggcga

SEQ ID NO: 54148 - DNA, 75 bp, synthetic construct
  source 1..75: mol_type = other DNA
atgcttaaatcttacacaccaaactggttttttaccgctttacttgacaatcacatcaatcagttggtcgcacgc

SEQ ID NO: 54149 - DNA, 75 bp, synthetic construct
  source 1..75: mol_type = other DNA
cttctggggttcccgctgtctgagcgatgatccgctttttgccttcgaaaactacacccgcacagcgcaggtact

SEQ ID NO: 54150 - DNA, 75 bp, synthetic construct
  source 1..75: mol_type = other DNA
cgggctggagcgtgaccggtctgccatatctgaacgggaagccgcgctgccggagagtgtactgcgtgaaccaca

SEQ ID NO: 54151 - DNA, 75 bp, synthetic construct
  source 1..75: mol_type = other DNA
aacggttcccgttggttttaccgcagcgatgcataagaaatatcgtactgaaaatattattttctctccggaatt

SEQ ID NO: 54152 - DNA, 75 bp, synthetic construct
  source 1..75: mol_type = other DNA
ggctgaaggggggatggaatttttatcagtatccgttgaatccagttacgaatacagatcctctggggttagaag

SEQ ID NO: 54153 - DNA, 75 bp, synthetic construct
  source 1..75: mol_type = other DNA
tatgccaccgcccgtgcgctcggtctgcgcgccaaaattgatgagcagaccgggtggcacaagagcctgtccaac

SEQ ID NO: 54154 - DNA, 75 bp, synthetic construct
  source 1..75: mol_type = other DNA
caccttatttttagttggcctatttattattgcagccggattaggttgtctggaaactgccgcaaacccttttgt

SEQ ID NO: 54155 - DNA, 75 bp, synthetic construct
  source 1..75: mol_type = other DNA
tatggcacaggcctgctggtttcccgtgcgtcgtatgaggcagaaaagagcattcttcgccatattctcgaaggt

SEQ ID NO: 54156 - DNA, 75 bp, synthetic construct
  source 1..75: mol_type = other DNA
tccggatgaagccggacgttacagcatggatgtcgagtatggccagtacagcgttatcctgctggttgaaggttt

SEQ ID NO: 54157 - DNA, 75 bp, synthetic construct
  source 1..75: mol_type = other DNA
cctgcttgaaaccctgctgaccactgccgaacaggcgttatggcacagggaatggaccgcccgtgacagcaatca

SEQ ID NO: 54158 - DNA, 75 bp, synthetic construct
  source 1..75: mol_type = other DNA
gatcaggaaccacagttacacacgcatgcggtggtggctaatgtcacgcagcataacggcgaatggaagacactg

SEQ ID NO: 54159 - DNA, 75 bp, synthetic construct
  source 1..75: mol_type = other DNA
ccggcaggggggctgaacagctgggactgcagggcagtgtcgataaggatgtttttacccgtcttctggagggca

SEQ ID NO: 54160 - DNA, 75 bp, synthetic construct
  source 1..75: mol_type = other DNA
ggacgtgggcggtgggaagtgtgtcggggcgtgatgaagataagtttaattgctatggtattccggttgtgaaag

SEQ ID NO: 54161 - DNA, 75 bp, synthetic construct
  source 1..75: mol_type = other DNA
aaaaagcagatacagtgtgtggtaagaccgctgcaaatcctgcgtgctgacgggacgtgggaaaatattggcggg

SEQ ID NO: 54162 - DNA, 75 bp, synthetic construct
  source 1..75: mol_type = other DNA
cactgtatgaagccattgtccgcgactataccggcaggacaccggaagcacgggagcagacgctgattgtcacgc

SEQ ID NO: 54163 - DNA, 75 bp, synthetic construct
  source 1..75: mol_type = other DNA
gccgctggcagtttgatgatgacaaactcaatacgttgcatcatttaggtgctggcacgtttgttaccagcggca

SEQ ID NO: 54164 - DNA, 75 bp, synthetic construct
  source 1..75: mol_type = other DNA
cggtatggacagctgcctgtcgaagccggtaacgctggatgtgataaaacagacgctgacggtatatgccgagag

SEQ ID NO: 54165 - DNA, 75 bp, synthetic construct
  source 1..75: mol_type = other DNA
tggaacgcattcgcatgttgatccttaacgcaattttgctgaatgtgcttgccggagctgcattgtttactctcg

SEQ ID NO: 54166 - DNA, 75 bp, synthetic construct
  source 1..75: mol_type = other DNA
tcatggtgcctgtcctgaacacagcgaatatacgcgacggggagttgcgtcgtctctccacctgggagacacatc

SEQ ID NO: 54167 - DNA, 75 bp, synthetic construct
  source 1..75: mol_type = other DNA
tcaggctggcgcactggcaggtgggcaaattgtttcacaagcagcgcgtcgcagtgccgaaggcgaactgctgtt

SEQ ID NO: 54168 - DNA, 75 bp, synthetic construct
  source 1..75: mol_type = other DNA
catcgaaaaaatactcgatgaacttgaaggtgaattttacacaaaaagtgcaaaatcccatggcacaagggctgg

SEQ ID NO: 54169 - DNA, 75 bp, synthetic construct
  source 1..75: mol_type = other DNA
atgctacaacaatgcctgcctcttcttatttctccggagatccgaaaaccccaatatgctgaaatattcggattg

SEQ ID NO: 54170 - DNA, 75 bp, synthetic construct
  source 1..75: mol_type = other DNA
cagccagacggcagcgaaaaccagtgagacgaatgccaaagacagtgaagccaacgcaaaggtgagcgaaacagc

SEQ ID NO: 54171 - DNA, 75 bp, synthetic construct
  source 1..75: mol_type = other DNA
gtaaaaacacttgatgaaggtgtcacaaaaatgagtctggttcacatcggaaagaatctgcccgcagaaaaaaaa

SEQ ID NO: 54172 - DNA, 75 bp, synthetic construct
  source 1..75: mol_type = other DNA
atgaatcctttccctggtttattaaacgtgcgcacagcccatccagagggctttacagcgtacatatcaacccat

SEQ ID NO: 54173 - DNA, 75 bp, synthetic construct
  source 1..75: mol_type = other DNA
gtgtgcctgaatcgtggggcgtccgtctggccggtattcaatgaaaatcgaacgctgtgtgtaaatacacttagc

SEQ ID NO: 54174 - DNA, 75 bp, synthetic construct
  source 1..75: mol_type = other DNA
gcgtccggtaagaggcgatcagggccagcgtgaaccagcgttactggcgggcgctggcgtgctggcgtctgagag

SEQ ID NO: 54175 - DNA, 75 bp, synthetic construct
  source 1..75: mol_type = other DNA
actatttgcaacagtgccgccgatatgatccaactgataaaggaatttgacgctcagggcgtggcagtccggttc

SEQ ID NO: 54176 - DNA, 75 bp, synthetic construct
  source 1..75: mol_type = other DNA
ggggtatctactacgacggtgagcaggtgcgggtggattatgccaaagcgtatgcactatttaatcaggccgcgc

SEQ ID NO: 54177 - DNA, 75 bp, synthetic construct
  source 1..75: mol_type = other DNA
gcgtatcaaactggccccggagtcattcaccaacgccggaagccgtatggcataccgctttcatgccatgcaggc

SEQ ID NO: 54178 - DNA, 75 bp, synthetic construct
  source 1..75: mol_type = other DNA
tcccaaatagtatgataaatctttctaaaaaagataagatggcaccaaatttaaacatggaaaataaaataagtt

SEQ ID NO: 54179 - DNA, 75 bp, synthetic construct
  source 1..75: mol_type = other DNA
ggcgttctcggtaacgatgacaccgcccgcaaactgacgccattaatccgcgcctggcctggcgaatctcagcat

SEQ ID NO: 54180 - DNA, 75 bp, synthetic construct
  source 1..75: mol_type = other DNA
agatatacacagacagagccggatacccagtagaaattactcgcagtactgagcactcagtgttctttcggagga

SEQ ID NO: 54181 - DNA, 75 bp, synthetic construct
  source 1..75: mol_type = other DNA
gtgaaatgtttgggcgtgttcagcgggattcgttctgggtaaaaaacatcatgagtccggcaaaactccgggaaa

SEQ ID NO: 54182 - DNA, 75 bp, synthetic construct
  source 1..75: mol_type = other DNA
ctgatgtattaattttcgaaccgaaagtttttggtgatgagcgtggtttctttatggaaagctttaatcagaaag

SEQ ID NO: 54183 - DNA, 75 bp, synthetic construct
  source 1..75: mol_type = other DNA
gtgcaactggtcccgcgtctgtggggtaacgaacccggcgtcctggtcggtcgcctgtgtaaccgttcggtgacg

SEQ ID NO: 54184 - DNA, 75 bp, synthetic construct
  source 1..75: mol_type = other DNA
caacagagaatacaacagagaatacaacagagaataaaaaactctcttgtccggacgcttcgcaaccggacgagt

SEQ ID NO: 54185 - DNA, 75 bp, synthetic construct
  source 1..75: mol_type = other DNA
atgaatgcgactgcagcccagacaaaatctcttgagtggcttaatcgcctgcgtgcgaatccgaaaattccattg

SEQ ID NO: 54186 - DNA, 72 bp, synthetic construct
  source 1..72: mol_type = other DNA
atgatatctctccctgcaggttcgcgtatctggctggttgcaggtatcaccgatatgcgaaatggctttaac

SEQ ID NO: 54187 - DNA, 75 bp, synthetic construct
  source 1..75: mol_type = other DNA
acagggcaagatctgcactcatgcaatgaaatggaaaatggttcgtaaggtcgttgacgttcaggaggcggcagc

SEQ ID NO: 54188 - DNA, 75 bp, synthetic construct
  source 1..75: mol_type = other DNA
cctgaacggcgaactgatcggtatcaacaccgcgatcctcgcaccggacggcggaaacatcggtatcggttttgc

SEQ ID NO: 54189 - DNA, 75 bp, synthetic construct
  source 1..75: mol_type = other DNA
gaacatattgaccgccaggagtaccgcaaaattctggcgggcactgagcaggaaatgcacctgaaaaaattacgc

SEQ ID NO: 54190 - DNA, 75 bp, synthetic construct
  source 1..75: mol_type = other DNA
tgagcgtagtattatatggagtgattctaatataaatataagttggccgctcccaaatagtatgataaatctttc

SEQ ID NO: 54191 - DNA, 75 bp, synthetic construct
  source 1..75: mol_type = other DNA
gttctttctcccgttcccggtactgtcgagctgtatccactgctcagcactggtctgccagacagcagtatcctc

SEQ ID NO: 54192 - DNA, 75 bp, synthetic construct
  source 1..75: mol_type = other DNA
agatatacacggacagagctggataccccgtggtgattactcgcatcactgagcgctcagtgttctttcgacgga

SEQ ID NO: 54193 - DNA, 75 bp, synthetic construct
  source 1..75: mol_type = other DNA
gctggtcagcaattggtgctcgtacaacggaatcgcaaactcaccgtgaaatggcctccgggctttccatgccgg

SEQ ID NO: 54194 - DNA, 75 bp, synthetic construct
  source 1..75: mol_type = other DNA
attccgcttctttggtattccagggcgtcaggcttaccgtgaactgcggttgttggctggtcaggcggcaaggca

SEQ ID NO: 54195 - DNA, 75 bp, synthetic construct
  source 1..75: mol_type = other DNA
caaattttgatggatcaactgttgataaaaaactgccgattagggggccgatgattgaccccgatccgtcagtat

SEQ ID NO: 54196 - DNA, 75 bp, synthetic construct
  source 1..75: mol_type = other DNA
tgctgctggagcaggtggaacaatttgaaaatatcgttggcttcttctgggtgattgaatggacggctgatcatg

SEQ ID NO: 54197 - DNA, 75 bp, synthetic construct
  source 1..75: mol_type = other DNA
aataattgcggttgttgggtttatagctggtaaggcgatattctctgataatgttgtgtttaggcgaagaatgta

SEQ ID NO: 54198 - DNA, 75 bp, synthetic construct
  source 1..75: mol_type = other DNA
cgaagatcctctgtgtaatcgtcggcatttcattttcactaatgctggttgctcttaggctggatgatgttgtct

SEQ ID NO: 54199 - DNA, 75 bp, synthetic construct
  source 1..75: mol_type = other DNA
attacagctcggtaatgccattattaaaccttcccgttatgtacagaacaaccagttttcaccgctgaaaaaata

SEQ ID NO: 54200 - DNA, 75 bp, synthetic construct
  source 1..75: mol_type = other DNA
tttctcattggcatctctacaggtatggctggagctactatcagtttgccagtaatcgctgctgttgggtttgtc

SEQ ID NO: 54201 - DNA, 75 bp, synthetic construct
  source 1..75: mol_type = other DNA
ctgctgtctggtttcgttgattacctgtgcgaatcagttggtcgggaacacacgccagccctgagtgatgccgca

SEQ ID NO: 54202 - DNA, 75 bp, synthetic construct
  source 1..75: mol_type = other DNA
ctgccaaacatgtcagcggctctgacacgatgagcttcgggtacgctagaaatacctatactgctgttggtacaa

SEQ ID NO: 54203 - DNA, 75 bp, synthetic construct
  source 1..75: mol_type = other DNA
caccttcgccggggcgacgcacggcctacgctcagcggtgcttaaccatattctggataccttactggcgatccc

SEQ ID NO: 54204 - DNA, 75 bp, synthetic construct
  source 1..75: mol_type = other DNA
atagtagacttactggtggtcttatagctgtgtcagagttaagtaaaaaagttaaaggaaaaacaggtagaaagt

SEQ ID NO: 54205 - DNA, 75 bp, synthetic construct
  source 1..75: mol_type = other DNA
tttcattggcggtattgatgcgcactgttttaatgaagagtatctgcgccagcaaattcgcgacgttgcgccaga

SEQ ID NO: 54206 - DNA, 75 bp, synthetic construct
  source 1..75: mol_type = other DNA
cgcttttatgaatggctggctgcgcagtacggttttaccgtcaggctgacggattccacagaaggccagtgggtt

SEQ ID NO: 54207 - DNA, 75 bp, synthetic construct
  source 1..75: mol_type = other DNA
gagtggaaaaatgccactgaaacgcaatggcttaaagattcgccctcacagccattgcaacagtcactgaaagac

SEQ ID NO: 54208 - DNA, 75 bp, synthetic construct
  source 1..75: mol_type = other DNA
atcctgcgctgggtaaagctttcgctcagagtgaaggactgcgtaacaagactgataccgtggatgcgcgcatgc

SEQ ID NO: 54209 - DNA, 75 bp, synthetic construct
  source 1..75: mol_type = other DNA
agccgggggccggaaatggtgaaccggttacagctgaagtgctggcacagcggcaggctgaagaggccatccgcc

SEQ ID NO: 54210 - DNA, 75 bp, synthetic construct
  source 1..75: mol_type = other DNA
atggatattcagtgtactcttgctaacacctttcctaatgaacatccggaagcctttattttggttacgtcagcg

SEQ ID NO: 54211 - DNA, 75 bp, synthetic construct
  source 1..75: mol_type = other DNA
cggagccgtggagacggtcgaaggggtggcgcaaaggttgaacgccaaaataatggggtctgtgcagccgatggc

SEQ ID NO: 54212 - DNA, 75 bp, synthetic construct
  source 1..75: mol_type = other DNA
ggtatcacgaaatctcactggaagcggggcttgccagcacttaccagtggttccttgagaatcaagaccgctttc

SEQ ID NO: 54213 - DNA, 75 bp, synthetic construct
  source 1..75: mol_type = other DNA
cttcaagagagatttgaaaattatggacggtgggtaaatgcaactcacggcatctggttaagtattcaggatatg

SEQ ID NO: 54214 - DNA, 75 bp, synthetic construct
  source 1..75: mol_type = other DNA
accgctatcagtctgcagaaagccgggcttcacacgccggcacagcaggccattcatctggcccttcctgtgctg

SEQ ID NO: 54215 - DNA, 75 bp, synthetic construct
  source 1..75: mol_type = other DNA
ccgcatgcaggatggcagtaacaggcatcgtcccggctacgacctgaccttctccgctcccaaaagtgtctccat

SEQ ID NO: 54216 - DNA, 75 bp, synthetic construct
  source 1..75: mol_type = other DNA
tttcagcatctggggcaagtcattgcctctgccgtacggatcactgatttaacggatcaaaaaccggaagtcacc

SEQ ID NO: 54217 - DNA, 75 bp, synthetic construct
  source 1..75: mol_type = other DNA
cgaatataccatgacgcaatctgcgccgttgatggtgttgccggatccggacgcgtttgtggtagttaaggtgaa

SEQ ID NO: 54218 - DNA, 75 bp, synthetic construct
  source 1..75: mol_type = other DNA
tactcggttataccgaacaaaaagttaaatttcgtgcgctgtttctggagctgtttttccgccgtacggtgaatt

SEQ ID NO: 54219 - DNA, 75 bp, synthetic construct
  source 1..75: mol_type = other DNA
ccctgtattgatattaagtggcctctagtatcgtctcccctgttatcagaaaaagataagtgttattcatggcta

SEQ ID NO: 54220 - DNA, 75 bp, synthetic construct
  source 1..75: mol_type = other DNA
ggaactggtatcttgcgcaatataatacagccggcaaaaacagagaatctttattctcatggctgaatgagcaaa

SEQ ID NO: 54221 - DNA, 75 bp, synthetic construct
  source 1..75: mol_type = other DNA
agactactgcggtggtatctggaatctgtacaccctgaacaacggcggggcatttatggcacccgaaccggatga

SEQ ID NO: 54222 - DNA, 75 bp, synthetic construct
  source 1..75: mol_type = other DNA
cacaggcaggcagaaaaagtgtgtcaggagggcataaatacgagtatgacgataacggtaaaagaatgtactgga

SEQ ID NO: 54223 - DNA, 75 bp, synthetic construct
  source 1..75: mol_type = other DNA
gcagcggttccgtaggcgctgccgccgggtattatgcaacccgcgccggtttaaacgtgctaatgaccgacgccc

SEQ ID NO: 54224 - DNA, 75 bp, synthetic construct
  source 1..75: mol_type = other DNA
agcgccaatcacacgctgatcgacgcgcaggcagtgggctttaatcgcgacatcacctacttaatgccgtttaaa

SEQ ID NO: 54225 - DNA, 75 bp, synthetic construct
  source 1..75: mol_type = other DNA
gtcaggcgtgatccctgatatgcgtggctggacgattaagggcaaacctgccagtggtcgggccgtattgtctca

SEQ ID NO: 54226 - DNA, 75 bp, synthetic construct
  source 1..75: mol_type = other DNA
tccggcactgctgcaagcgcaggtgcacacgcacatactgtcggtattggtgctcatacgcactccgttgcgatt

SEQ ID NO: 54227 - DNA, 75 bp, synthetic construct
  source 1..75: mol_type = other DNA
gcataacggcgagtggaagacactgagcagtgacaaagtggggaaaacggggttcattgagaatgtgtacgctaa

SEQ ID NO: 54228 - DNA, 75 bp, synthetic construct
  source 1..75: mol_type = other DNA
atgacaccaggcggacaagctcagataggtaatgttgatctcgtaaaacagcttaacagcgcggcggtttatcgc

SEQ ID NO: 54229 - DNA, 75 bp, synthetic construct
  source 1..75: mol_type = other DNA
ccggcaggggggctgaacagctggggctgcagggcagcgtcgataaggatgtttttacccgtcttctggagggga

SEQ ID NO: 54230 - DNA, 75 bp, synthetic construct
  source 1..75: mol_type = other DNA
ggcatgttaaatatctcttggccaattggaaatgcccctatactttccgaaaaagacagaaatggtaatggcttt

SEQ ID NO: 54231 - DNA, 75 bp, synthetic construct
  source 1..75: mol_type = other DNA
gaaataacattacgcaggcaggagggacggagtggagcgctcaggaccgcgatacctttgatccgacgcatgatc

SEQ ID NO: 54232 - DNA, 75 bp, synthetic construct
  source 1..75: mol_type = other DNA
tgggtagattggtacagcgaatgccaatgttacgacgacccacgtaaatatatcgaaagcctgaaagaagaaacc

SEQ ID NO: 54233 - DNA, 75 bp, synthetic construct
  source 1..75: mol_type = other DNA
gtggtgcgcacctgggaagtgccgctgcaaatcaccatcagtctgttactggatgcgagtctggaggccacagca

SEQ ID NO: 54234 - DNA, 75 bp, synthetic construct
  source 1..75: mol_type = other DNA
gacggtaccgtctggcgtctgctgaatggctttaaactgttccgcgaaaaactggatacccgtcgcggctcaaat

SEQ ID NO: 54235 - DNA, 75 bp, synthetic construct
  source 1..75: mol_type = other DNA
ttaattaccagcaggcggttgagcgccttcctggtgaagatccggctcagctgaacgacccggcctaccgtcgtc

SEQ ID NO: 54236 - DNA, 75 bp, synthetic construct
  source 1..75: mol_type = other DNA
taattacggatatccggcgagagcaggaaaaagcatgccacctttaattctcagggggaatgaagacgggcttga

SEQ ID NO: 54237 - DNA, 75 bp, synthetic construct
  source 1..75: mol_type = other DNA
tccataccgaagaggtgatgctggacaaaattaccggaaaaacgccggtggcggcctatgtctccccggttgttg

SEQ ID NO: 54238 - DNA, 75 bp, synthetic construct
  source 1..75: mol_type = other DNA
aagcgacagtggggtacccgtgaggatgtcgcctgtgcgcagtggatttggggacgggttgtggcgttgtatgaa

SEQ ID NO: 54239 - DNA, 75 bp, synthetic construct
  source 1..75: mol_type = other DNA
cacgtttccattccacgctcaataacggcagaccaaacccgacctggacaaacgcgacggtaagacaaagcagcg

SEQ ID NO: 54240 - DNA, 75 bp, synthetic construct
  source 1..75: mol_type = other DNA
tgtcagcgacgttgccagaacgctctgctgcgcccgctcctctgttggacgctggattaactggttcacgcagtc

SEQ ID NO: 54241 - DNA, 75 bp, synthetic construct
  source 1..75: mol_type = other DNA
acacggcgataaacaatatccgtgtagctgacgttggcgagcattatgcggtgggggagcgttacctttcatgtg

SEQ ID NO: 54242 - DNA, 75 bp, synthetic construct
  source 1..75: mol_type = other DNA
ttaaaaatcaactggccaatttcaaatccttttatatctgaaaaagattctacactgccgtcattcaaagactat

SEQ ID NO: 54243 - DNA, 75 bp, synthetic construct
  source 1..75: mol_type = other DNA
tgtttattgaggccaccggagacggcgggagcggcaaaagtacattcacccacatcgccagccttttagcgggga

SEQ ID NO: 54244 - DNA, 75 bp, synthetic construct
  source 1..75: mol_type = other DNA
ccggacctgcagcgtcttcaggtgattcaggggcagatgatgaataaagacaaatgccgtatgtacgggagaaaa

SEQ ID NO: 54245 - DNA, 75 bp, synthetic construct
  source 1..75: mol_type = other DNA
ggcaataacacggggccacgctttaagtctgagctgattaacccgcgcaaaggaacgccgacaagctacatcgcg

SEQ ID NO: 54246 - DNA, 75 bp, synthetic construct
  source 1..75: mol_type = other DNA
ggttattcgtctggggcgttcgcctgtacagcgttgtgtgaatcacatttctgaaccggacaccgaaattccgcc

SEQ ID NO: 54247 - DNA, 75 bp, synthetic construct
  source 1..75: mol_type = other DNA
caagttcgatttatctgactgtatctggaagaagggttggctggcattcatacggaaaagacggcaacggtgaag

SEQ ID NO: 54248 - DNA, 75 bp, synthetic construct
  source 1..75: mol_type = other DNA
acagaaaggcattgcagccccgcaggtcatgctggttccggagatttttggatttgaaccgggcgttcttgccgg

SEQ ID NO: 54249 - DNA, 75 bp, synthetic construct
  source 1..75: mol_type = other DNA
ggcctctggcaaattatctgaatatgggagatagcggttctcccctgtttgcttatgactcttgggatgaaaaat

SEQ ID NO: 54250 - DNA, 75 bp, synthetic construct
  source 1..75: mol_type = other DNA
tcacgtgaaaaagccacaccggatacgctggaacgcgccagagggtatgccgaagaggcgctggaatggctgaaa

SEQ ID NO: 54251 - DNA, 75 bp, synthetic construct
  source 1..75: mol_type = other DNA
ctttctgatctctatctgcaaatcttgcagtacattgaaatgcataagactacactaacggatatcattattaat

SEQ ID NO: 54252 - DNA, 75 bp, synthetic construct
  source 1..75: mol_type = other DNA
ggaatgccgcgcgtaatatgtacgtcgttgcttccgaactctcgcgcggcgacagtcggatgaaaacccaggtgc

SEQ ID NO: 54253 - DNA, 75 bp, synthetic construct
  source 1..75: mol_type = other DNA
cctgcaacaagcgggtacctctgttctggcacaggctaaccagaccacgcagaacgtactgtctctgctgcgtta

SEQ ID NO: 54254 - DNA, 75 bp, synthetic construct
  source 1..75: mol_type = other DNA
aacgtcaaattagcttcgtgaaatctcacttttctcgtcaactggaagaacgtctggggctgatcgaagtccagg

SEQ ID NO: 54255 - DNA, 75 bp, synthetic construct
  source 1..75: mol_type = other DNA
ttaaagatcaaaaaataaacgatcttcttgaagattatattgctttagaaaaacagatcgaaaaaacagcaaact

SEQ ID NO: 54256 - DNA, 75 bp, synthetic construct
  source 1..75: mol_type = other DNA
tgaaggcggggggaagtatggcgatagaggccagcgggaatctatccataaaagccgctcaagtctctgttgaca

SEQ ID NO: 54257 - DNA, 75 bp, synthetic construct
  source 1..75: mol_type = other DNA
ttgccacggtagtgcgctccactccgcttgtctctctcgactttattgttgagaacagtcgcggcgagtttctgc

SEQ ID NO: 54258 - DNA, 75 bp, synthetic construct
  source 1..75: mol_type = other DNA
agacaaagctattgcacaggttgatactttccgctcctccctcggtgccgttcaaaaccgtctggattccgcagt

SEQ ID NO: 54259 - DNA, 75 bp, synthetic construct
  source 1..75: mol_type = other DNA
gcgtctgggtaaaccgaatctgtttttcggcgttactgctggcaacatggactcgatgatcaaccgctataccgc

SEQ ID NO: 54260 - DNA, 75 bp, synthetic construct
  source 1..75: mol_type = other DNA
ctcctgccgaacatcgcgacagctggcgcacaccaccagagatttttgctgcgcttaatgcagagttcgtttttc

SEQ ID NO: 54261 - DNA, 75 bp, synthetic construct
  source 1..75: mol_type = other DNA
gatgccataaaactcacctctgatttctacagaacgatatatgatgagttcggtaaacaagcatccgaacttgct

SEQ ID NO: 54262 - DNA, 75 bp, synthetic construct
  source 1..75: mol_type = other DNA
ttttaactgctgggggtatttctaaggcccaggatttggatataaaattggttaactgcgacacgtctaaggtaa

SEQ ID NO: 54263 - DNA, 75 bp, synthetic construct
  source 1..75: mol_type = other DNA
agctgcaggatattgcatcggatttaccgcgatttacccacgcattagatgaactttcccgccgtctggggttgg

SEQ ID NO: 54264 - DNA, 75 bp, synthetic construct
  source 1..75: mol_type = other DNA
tctaaaaactctcttaatgtcagcaatgctatcacatctatcccgcaagacgctggcgataaacctgttgatgtt

SEQ ID NO: 54265 - DNA, 75 bp, synthetic construct
  source 1..75: mol_type = other DNA
atggtcggtgcgttctttatcgatatcgtcaatgcactggtgattaagctgtatttgatgttgccgatttttgcc

SEQ ID NO: 54266 - DNA, 75 bp, synthetic construct
  source 1..75: mol_type = other DNA
tgaacgccggaggatcctagaacgcacgaatgagggccgacaggaagcaaagctgaaaggaatcaaatttggccg

SEQ ID NO: 54267 - DNA, 75 bp, synthetic construct
  source 1..75: mol_type = other DNA
ggagaagtatggttatagaactaaacgtgcattatttaaaaacatgaaaaaagttggtatccatctggtaaatga

SEQ ID NO: 54268 - DNA, 75 bp, synthetic construct
  source 1..75: mol_type = other DNA
gctgggatacctcattcgtgtgtctgagtggtgggagttcggcggagaaccgggaacatttaccgttgaagtggg

SEQ ID NO: 54269 - DNA, 75 bp, synthetic construct
  source 1..75: mol_type = other DNA
tgaaatcgagttgcgccagaaacaatacgaatactaccgtgatttactgttcagtttcccaaaacctgaaactgt

SEQ ID NO: 54270 - DNA, 75 bp, synthetic construct
  source 1..75: mol_type = other DNA
aacatcagcgccgtgctgaagcagtgaacaatgttctggaagatattatccggttacatcgcggagaactgagtg

SEQ ID NO: 54271 - DNA, 75 bp, synthetic construct
  source 1..75: mol_type = other DNA
gtgcgcggtctgcctgttccaggcggacggcttggtgtgaaaatttacgaaataacgcatggctggcaggcaaaa

SEQ ID NO: 54272 - DNA, 75 bp, synthetic construct
  source 1..75: mol_type = other DNA
tccgcgtctatagcgggctgatggatatgatgacagataacgaagtcgaagcggtgatcggtcacgaaatggggc

SEQ ID NO: 54273 - DNA, 75 bp, synthetic construct
  source 1..75: mol_type = other DNA
caggaagtattggtattcatgttgtgaatactgctattgcaatgggccatcagcccgtggctctggtcaggaatc

SEQ ID NO: 54274 - DNA, 75 bp, synthetic construct
  source 1..75: mol_type = other DNA
tcgggaagaaaaatactgattaaagggacctgtgtttttcctctgggagaacccgttaagggaatacataatatt

SEQ ID NO: 54275 - DNA, 75 bp, synthetic construct
  source 1..75: mol_type = other DNA
gaacttctcactacgctaagctcaatcaccaaaccagtatcagagtttgtttttgccgggcgcaacgataagaag

SEQ ID NO: 54276 - DNA, 75 bp, synthetic construct
  source 1..75: mol_type = other DNA
aaaaatatcgtttcccggaaacactgaccaaccagagccgctggtttggcctgccgctggatgaacttgtccccg

SEQ ID NO: 54277 - DNA, 75 bp, synthetic construct
  source 1..75: mol_type = other DNA
gtttgatgaaattaatattgtgcgcggtcagtccgttcctggtggtcggctgggcgtgaagatttacgaacttac

SEQ ID NO: 54278 - DNA, 75 bp, synthetic construct
  source 1..75: mol_type = other DNA
gctttccggtggacaaaagaaacgcgtctttctggcgagagcgattgcacagcagggtgatgtgatcctgctgga

SEQ ID NO: 54279 - DNA, 75 bp, synthetic construct
  source 1..75: mol_type = other DNA
gcaagcgtgcagcgggatttctgatttgcaggtgccgctgcgtgacctgtgggatccggcgacctgtccggtcag

SEQ ID NO: 54280 - DNA, 75 bp, synthetic construct
  source 1..75: mol_type = other DNA
acgccacgacggcacaaaaagggattgtccagctcagtagtgccaccaacagcacgtctgaaacactggccgcga

SEQ ID NO: 54281 - DNA, 75 bp, synthetic construct
  source 1..75: mol_type = other DNA
tacagcgcgaaaaggtcttgtccagctcagtagtgccaccaacagcacgtctgaaacgctcgccgcaacaccaaa

SEQ ID NO: 54282 - DNA, 75 bp, synthetic construct
  source 1..75: mol_type = other DNA
tcatgatcgagaatgcgcataaacggctggaagagtggcagcaccagcatcctgacgccacgctggataataaaa

SEQ ID NO: 54283 - DNA, 75 bp, synthetic construct
  source 1..75: mol_type = other DNA
gcagctgatgtgatactggaaatctgccatcaggcagatgttgagccggggatattcacggtgatccacacatgg

SEQ ID NO: 54284 - DNA, 75 bp, synthetic construct
  source 1..75: mol_type = other DNA
ccagcagcgactgaaattaagcctgtccggacggctggcaataaaaattattgcagagccaccggataagcgccg

SEQ ID NO: 54285 - DNA, 75 bp, synthetic construct
  source 1..75: mol_type = other DNA
ccagcagcggctgaaattaagcctgtccggacggctggcaataaaaattattgcagaaccaccggataagcgccg

SEQ ID NO: 54286 - DNA, 75 bp, synthetic construct
  source 1..75: mol_type = other DNA
acggtttggtcctgtttttgacgcaatcggaagcgggatcagccaggtgtttaactggtttaaatcgctgctgtc

SEQ ID NO: 54287 - DNA, 75 bp, synthetic construct
  source 1..75: mol_type = other DNA
gcgtgcagtttgatgaagtgctgatttgtccgcacctgcccgccgatgagtgcgactgccgtaagccgaaagtaa

SEQ ID NO: 54288 - DNA, 75 bp, synthetic construct
  source 1..75: mol_type = other DNA
tcagcagttacagcaaaacaaaagctggcggcatgtgaaaaatgaacgcgttaaccgttcagcaggctggcagta

SEQ ID NO: 54289 - DNA, 75 bp, synthetic construct
  source 1..75: mol_type = other DNA
ggtgccccgatatcgaataagcgagggcaactggatctggatgcctggcgcgatttttacatatcgtatctgagg

SEQ ID NO: 54290 - DNA, 75 bp, synthetic construct
  source 1..75: mol_type = other DNA
agatgggatcagaaagccattgataatctaaaaaagaacttttcttacaatgtggatatgtcaggagtacagcaa

SEQ ID NO: 54291 - DNA, 75 bp, synthetic construct
  source 1..75: mol_type = other DNA
aacggcgagatcaaactcaacacgctgaaacagaaagcggcccctctcagggtatttgatgaacgttttggcacc

SEQ ID NO: 54292 - DNA, 75 bp, synthetic construct
  source 1..75: mol_type = other DNA
cgtccgctgccggataaattccacggcttgcaggatcaggaagcgcgctatcgtcagcgttatctggatctcatc

SEQ ID NO: 54293 - DNA, 75 bp, synthetic construct
  source 1..75: mol_type = other DNA
aaccgcaacatctctttttacgcaacattaatgtgatgcagaaatcaactatcgggcctgcattgacgatgcatt

SEQ ID NO: 54294 - DNA, 75 bp, synthetic construct
  source 1..75: mol_type = other DNA
gcaaacgggcgatgtcccgccaggctttaaccctgcagaatcggcaaaaaaaccgcaggtgcggatatcaagaca

SEQ ID NO: 54295 - DNA, 75 bp, synthetic construct
  source 1..75: mol_type = other DNA
atgctgtccggcttcaaagataaggtcacatcatcccttaacagcgcggccagctccgttaaagggctgttttga

SEQ ID NO: 54296 - DNA, 75 bp, synthetic construct
  source 1..75: mol_type = other DNA
tgtgcgaatcagtaggtcgggaacatactccagccctgagtgatgccgcagagcaatatctgaataccgttgcga

SEQ ID NO: 54297 - DNA, 75 bp, synthetic construct
  source 1..75: mol_type = other DNA
tgtgtgaatcagtaggcagggaacatacgccagctctgagtgatgccgcggaacaatatctgaataccgttgcga

SEQ ID NO: 54298 - DNA, 75 bp, synthetic construct
  source 1..75: mol_type = other DNA
gataacctgcataaattgggtgaaggaacactgatggttaacgggacaggtgtgaatgctggtgggctcaaagtt

SEQ ID NO: 54299 - DNA, 75 bp, synthetic construct
  source 1..75: mol_type = other DNA
ggcgatcacgcctcgagaacgagaactggtgtccggtttcgttgagtatctgtgcgaatcagttggtcgggaaca

SEQ ID NO: 54300 - DNA, 75 bp, synthetic construct
  source 1..75: mol_type = other DNA
gagtgggtaaccattcaggccggattttacaccgagcatatttatccagacggtagccgcgggcgcagggcaaaa

SEQ ID NO: 54301 - DNA, 75 bp, synthetic construct
  source 1..75: mol_type = other DNA
tggcgtgggcgcaggagatgaatctgccgtgcaaaacgttgttgaaagggttggatgaagctatcgcccggcgcg

SEQ ID NO: 54302 - DNA, 75 bp, synthetic construct
  source 1..75: mol_type = other DNA
tcaacatggaatgtctctatctggtgcattatctacttataccatactaactattggtgacggattggtctctca

SEQ ID NO: 54303 - DNA, 75 bp, synthetic construct
  source 1..75: mol_type = other DNA
actacagaggtaacttgacgctggaaaacaaatcatccctgcaaatcagggagaaatttactggcggtattgaag

SEQ ID NO: 54304 - DNA, 75 bp, synthetic construct
  source 1..75: mol_type = other DNA
gtagggcgataggcagtattttgagaaagctgtgtgagtggaaaagcgtacggattctggaagcagagtgctgcg

SEQ ID NO: 54305 - DNA, 75 bp, synthetic construct
  source 1..75: mol_type = other DNA
acatcgaaacacgcctccggcgttcactcttcagaaggtatcccgtggcatgagctgccagcttcacacagggga

SEQ ID NO: 54306 - DNA, 75 bp, synthetic construct
  source 1..75: mol_type = other DNA
gaatctgcagatcagtccatcgattttggtcagatctctaaatctcatctgaatgctgatggtatttctgtgaag

SEQ ID NO: 54307 - DNA, 75 bp, synthetic construct
  source 1..75: mol_type = other DNA
tcgtcaaatggctgttcgagctgaacgccaaacagcgtgaagtgctggcacgtcgattcggtttgctggggtacg

SEQ ID NO: 54308 - DNA, 75 bp, synthetic construct
  source 1..75: mol_type = other DNA
tttaaaggaagtgaacaggcaataggtttcagcaatgtcacacctgttattacagctatagacgccggagataaa

SEQ ID NO: 54309 - DNA, 75 bp, synthetic construct
  source 1..75: mol_type = other DNA
tacgtccgttttgatgtcacggttgccggtaaagaggcgaccgccctgattgcccgctgccagaaggcggtggat

SEQ ID NO: 54310 - DNA, 75 bp, synthetic construct
  source 1..75: mol_type = other DNA
ctatggttttgaaggtcgagaagccccacctgaaatagcaaatctttatcttgggaaaaaaataccagatgaatt

SEQ ID NO: 54311 - DNA, 75 bp, synthetic construct
  source 1..75: mol_type = other DNA
agtgggtcgatgattccccaacccgaagtgatatcgaaaaaagggacaaggaaatcacagcgtacaaaaacacgc

SEQ ID NO: 54312 - DNA, 75 bp, synthetic construct
  source 1..75: mol_type = other DNA
atgaaagacaatccgctgatctcaatctatatgccgacctggaaccgccaacaactggcgattcgggcgataaaa

SEQ ID NO: 54313 - DNA, 75 bp, synthetic construct
  source 1..75: mol_type = other DNA
ggaatttgacgctcagggcgtggcagtccggttcattgatgacgggatcagtaccgacggtgatatggggcaaat

SEQ ID NO: 54314 - DNA, 75 bp, synthetic construct
  source 1..75: mol_type = other DNA
ggttcctttatcatggctatcaatccaataagcaaattatccatcgaaatggtaacagagccgataccagaccaa

SEQ ID NO: 54315 - DNA, 75 bp, synthetic construct
  source 1..75: mol_type = other DNA
acatttcgtcaggcgtttgacgacgccgacattatcgacgtccccaaaggcgtgatttgtgacaacatcaacacc

SEQ ID NO: 54316 - DNA, 75 bp, synthetic construct
  source 1..75: mol_type = other DNA
gtgaataaagtttattctcttaaatattgccctgtcaccgggggacttattgttgtctctgaacttgccagcagg

SEQ ID NO: 54317 - DNA, 75 bp, synthetic construct
  source 1..75: mol_type = other DNA
catctgcccgcatccgtaccagtcgtccggaaaatgattcaaataccgtgcggcaaaagtattaccagtgtaaca

SEQ ID NO: 54318 - DNA, 75 bp, synthetic construct
  source 1..75: mol_type = other DNA
actcttcagaagatatcccgtggcatgatctgccagcttcacacaggggaaacaatcagatgagcttgcctttac

SEQ ID NO: 54319 - DNA, 75 bp, synthetic construct
  source 1..75: mol_type = other DNA
cgctgcacatgaaatgctggagcagggagtgtgtatgttctatgtgcctgagttacttggtgccctggaacttga

SEQ ID NO: 54320 - DNA, 75 bp, synthetic construct
  source 1..75: mol_type = other DNA
ctgaaaataaatactttaatctgcatgtgaacgggattgggtatttatcgaatatccgtcaggttaacggcccta

SEQ ID NO: 54321 - DNA, 75 bp, synthetic construct
  source 1..75: mol_type = other DNA
taaaaccttcctgcaattgattaagcgcatttcgtttatcccgttcgccatttatcgctttattgtggcggctgc

SEQ ID NO: 54322 - DNA, 75 bp, synthetic construct
  source 1..75: mol_type = other DNA
tgatcgttccctggtggatattgtgctggcgctaccgttactgaatgctaacggtggcaaccttgatgatggccg

SEQ ID NO: 54323 - DNA, 75 bp, synthetic construct
  source 1..75: mol_type = other DNA
tcttccatgcccgggcatgaactgcagacgaagtttccgcagctatgcaaagccgggagccccgatgatgtgtct

SEQ ID NO: 54324 - DNA, 75 bp, synthetic construct
  source 1..75: mol_type = other DNA
acctcgaaaccttcagaatatgatattgcttacgagattaagtcaaacccgtttatctattatgaaggaaacttt

SEQ ID NO: 54325 - DNA, 75 bp, synthetic construct
  source 1..75: mol_type = other DNA
tcgcagggatttaccggggcgtattatcagttgaataatgacaactttgcaccaggaaaaacggcggctgattat

SEQ ID NO: 54326 - DNA, 75 bp, synthetic construct
  source 1..75: mol_type = other DNA
tgaaggcgaacttcacgctgagcgatggcggtaaagcgattactgatgctgaaggcaaagcgaaagtcacgctga

SEQ ID NO: 54327 - DNA, 75 bp, synthetic construct
  source 1..75: mol_type = other DNA
ttcagagtcaaattattacagatgctcacttccttcatcacccaatagtcgacagtgagtttacacgtaaattaa

SEQ ID NO: 54328 - DNA, 75 bp, synthetic construct
  source 1..75: mol_type = other DNA
gaccgacgatgcgcgattctctgatgtgcataaagccgtggaactggtcgccaccgagcagcagaacctgagcga

SEQ ID NO: 54329 - DNA, 75 bp, synthetic construct
  source 1..75: mol_type = other DNA
atggcaacaagatagaaccgtgcgcggcgttggcacaatccctggagcatgacgctgaatacacgacgcgaaaag

SEQ ID NO: 54330 - DNA, 75 bp, synthetic construct
  source 1..75: mol_type = other DNA
ggatatgggagctaaagataaagcgacaggaaaatcacggagtgatgtgcagcaacgcattcagcagtttcacag

SEQ ID NO: 54331 - DNA, 75 bp, synthetic construct
  source 1..75: mol_type = other DNA
aatatgttggtcgtggcgttgcaatgtgtttttgtccgttctgtggtgaaagtctgaaaacatggggaggaggaa

SEQ ID NO: 54332 - DNA, 75 bp, synthetic construct
  source 1..75: mol_type = other DNA
ggcatcgctgtttttccggctgatacgtacggcctgccgtcagcgtcttgaggggcgggaactatgtcaaaactg

SEQ ID NO: 54333 - DNA, 75 bp, synthetic construct
  source 1..75: mol_type = other DNA
ggactcaccctgaccccgggagtaagtaataccaatgagtctggcatcgcgcaggccactctcgcaggcgttgcc

SEQ ID NO: 54334 - DNA, 75 bp, synthetic construct
  source 1..75: mol_type = other DNA
ctctgttgtccgtacggccctgcgcgcagttcgtgacacggtggtctctgttgcccgcgcggtatggaactggat

SEQ ID NO: 54335 - DNA, 75 bp, synthetic construct
  source 1..75: mol_type = other DNA
gaaatgggcgcaattgcgtgccggttatcgtcagaacatggcatcaaactccggaagcgccttcaccgctggcgt

SEQ ID NO: 54336 - DNA, 75 bp, synthetic construct
  source 1..75: mol_type = other DNA
aaagcccgtacccgatcgccaccgccccgctgaccggttttgatgtgccgtggggttcagaagtgatcctcgaag

SEQ ID NO: 54337 - DNA, 75 bp, synthetic construct
  source 1..75: mol_type = other DNA
tttaccattcagattttttaaagttatatatgttcctatgggaccagctatttctttgggatttttcttatgtct

SEQ ID NO: 54338 - DNA, 75 bp, synthetic construct
  source 1..75: mol_type = other DNA
gaaaggttgatagcttcggtgactggtcgccacagattgaacatccagctatcgctattcagcgtaaagagcatg

SEQ ID NO: 54339 - DNA, 75 bp, synthetic construct
  source 1..75: mol_type = other DNA
atcatctttgtggctcctgaaccccaagagatgcctgatatctgcaaaactgaagcactatttaatcttgagcgt

SEQ ID NO: 54340 - DNA, 75 bp, synthetic construct
  source 1..75: mol_type = other DNA
aagtcgctgcacggcgtagccttgcaggcagccgttatgatctggtggatcgcaacaacaacatcgttctggaat

SEQ ID NO: 54341 - DNA, 75 bp, synthetic construct
  source 1..75: mol_type = other DNA
agattaagacagagcggaatgcctatagtgacaacgaatgtagaggtgcacgataacctgacgggaacaacccgc

SEQ ID NO: 54342 - DNA, 75 bp, synthetic construct
  source 1..75: mol_type = other DNA
aaaccgtccctgtttgcccgcgtcacggcgctgtttaccaaaaaagagcagtccgatgatgcccggttctctgat

SEQ ID NO: 54343 - DNA, 75 bp, synthetic construct
  source 1..75: mol_type = other DNA
accgtattgccacgctgacagtacgtgacgatgcccgtctggaactggccgctgacttttgcggcctgtttctga

SEQ ID NO: 54344 - DNA, 75 bp, synthetic construct
  source 1..75: mol_type = other DNA
gagcaagagattaaacgcttgttagttgaggcagggatggaaaccagcggcaatttcaacgaaccggcagatcat

SEQ ID NO: 54345 - DNA, 75 bp, synthetic construct
  source 1..75: mol_type = other DNA
tgccgacaataacgatctcacgacactaacagcaacagtcgctgatacagagggcaatgcgatagccaacactga

SEQ ID NO: 54346 - DNA, 75 bp, synthetic construct
  source 1..75: mol_type = other DNA
taatttgtggctggattatctggacgcactggaactggttgatacctccagtgctccagatattgaatggcctac

SEQ ID NO: 54347 - DNA, 75 bp, synthetic construct
  source 1..75: mol_type = other DNA
acgtcacccggacgcctcgctgaccgcaaaaggctttgttcaactcagtagcgccactaacagcgtgtctgaaac

SEQ ID NO: 54348 - DNA, 75 bp, synthetic construct
  source 1..75: mol_type = other DNA
actctgacggcaacgctaacctctgcaaatggcactccagtggagggtcaggtcatcaactttagcgtaacgcca

SEQ ID NO: 54349 - DNA, 75 bp, synthetic construct
  source 1..75: mol_type = other DNA
caggtacccgtattttgcgtgttcttaaggcgttacgtggccacgctctgaacggtatctccaacggtgaactgg

SEQ ID NO: 54350 - DNA, 75 bp, synthetic construct
  source 1..75: mol_type = other DNA
gctgacttttgcggcctgtttctgatgaccgacaaacaagcggcgctgccgtatgcatcggcctacaaacaggac

SEQ ID NO: 54351 - DNA, 75 bp, synthetic construct
  source 1..75: mol_type = other DNA
gaagccgctgaacgcgagttaagaaagcgtcctgatttccttgtctggctctgtgaaaagctgggggtaatgaga

SEQ ID NO: 54352 - DNA, 75 bp, synthetic construct
  source 1..75: mol_type = other DNA
tggaccggcatgggcgaactcgctgtttgaagataacgccgaatttggccttggtttccgcctgacggtcgatca

SEQ ID NO: 54353 - DNA, 75 bp, synthetic construct
  source 1..75: mol_type = other DNA
tgaactggaaacgctggtggcgcaggccaaagaagcggataaaggcggtatgaatttctcgttcattaattcggc

SEQ ID NO: 54354 - DNA, 75 bp, synthetic construct
  source 1..75: mol_type = other DNA
ctcgatacagaatccttgatttccaccgtgaaaaagagatcgcaacaaaaagcgatcttttcacgacgagatatt

SEQ ID NO: 54355 - DNA, 75 bp, synthetic construct
  source 1..75: mol_type = other DNA
cgttcttcaagagacggttatggttttgaggaagactgggcagaagtttatacctcgaaaaatcttccaccagaa

SEQ ID NO: 54356 - DNA, 75 bp, synthetic construct
  source 1..75: mol_type = other DNA
ccgtgtcacagaacagtgccgatgcctcttatttacagcagatggcactgtcatttattgctctccgtctgaatg

SEQ ID NO: 54357 - DNA, 75 bp, synthetic construct
  source 1..75: mol_type = other DNA
ttgccctggctgcagggatgcatatcactgttcatgcctcagacaatgtgaacactcctgaaaaccgccagttcc

SEQ ID NO: 54358 - DNA, 75 bp, synthetic construct
  source 1..75: mol_type = other DNA
aaaattccatcatgggtttatgagaaaggtttaattttcgattataaccgcattccacatgccagtagctggcat

SEQ ID NO: 54359 - DNA, 75 bp, synthetic construct
  source 1..75: mol_type = other DNA
atctgaccacctttacccctaatcctgacagtgaaattgcccactatgtggcgcagattcactctacacgacaga

SEQ ID NO: 54360 - DNA, 75 bp, synthetic construct
  source 1..75: mol_type = other DNA
catttgcaacgccacggtgccaataaacaggcaatcagccacgcatttgatgatgatgttgagtttcaggagcgc

SEQ ID NO: 54361 - DNA, 75 bp, synthetic construct
  source 1..75: mol_type = other DNA
ggaccggcattgacgtaaccactatccaacagggcgatgaggcgtggcaccggctgcgtctcggcgtcattactg

SEQ ID NO: 54362 - DNA, 75 bp, synthetic construct
  source 1..75: mol_type = other DNA
gctcatcagcacggaaggggcaacagcgtggtgcgcagaatatgatgaatggggcaacctgctgaatgaagagaa

SEQ ID NO: 54363 - DNA, 75 bp, synthetic construct
  source 1..75: mol_type = other DNA
cgacatcatctgatgctcgcccttcttccgatgatacgcctttgtcgggtggatgttctgaaaccaggaaggctt

SEQ ID NO: 54364 - DNA, 75 bp, synthetic construct
  source 1..75: mol_type = other DNA
acgggcatgaagatgtcctacttccacaccctgctcgccgaggtatgcactggcgtagcgccagaggttaacgcc

SEQ ID NO: 54365 - DNA, 75 bp, synthetic construct
  source 1..75: mol_type = other DNA
aggagtccggcctgtattacaaccgccaccgctattatgacccgctgcaggggcggtatatcactcaggatccga

SEQ ID NO: 54366 - DNA, 75 bp, synthetic construct
  source 1..75: mol_type = other DNA
ccgcccggcagccaaaccgcgcggacgtgaagcgcagcctgccggtaacagcgcgatgatggacgcgctggcggc

SEQ ID NO: 54367 - DNA, 75 bp, synthetic construct
  source 1..75: mol_type = other DNA
ctgtattgcctgatatattcacacctataaatttagggctatttaaaaactgccaagactggtctaatgattctt

SEQ ID NO: 54368 - DNA, 75 bp, synthetic construct
  source 1..75: mol_type = other DNA
ataaagtgacgaccattattcaaggtggcacgtcttcagttaccgcgctgaccggctccaccgaagaatcgcagt

SEQ ID NO: 54369 - DNA, 75 bp, synthetic construct
  source 1..75: mol_type = other DNA
ataaagtgacgaccattattcagggcggcacgtcgtcggttaccgcactgactggctccactgaagaatcgcagt

SEQ ID NO: 54370 - DNA, 75 bp, synthetic construct
  source 1..75: mol_type = other DNA
agtatgagtgacagtgagaaacgcgcattactatttagtatcgttaattcaaatggtggtttgaatgtcagaaaa

SEQ ID NO: 54371 - DNA, 75 bp, synthetic construct
  source 1..75: mol_type = other DNA
ctctgaaatacaaaacgcccgatgacgttcatcaggcgttttacagacagaaaagtgtcaacttatatcaggact

SEQ ID NO: 54372 - DNA, 75 bp, synthetic construct
  source 1..75: mol_type = other DNA
aactgacggagcgtgtgcttgtcagcactgacggcagtgtgtcgagtgttgaagcggtaacggaacccgatgaac

SEQ ID NO: 54373 - DNA, 75 bp, synthetic construct
  source 1..75: mol_type = other DNA
taaatacagtgttaacacttcttctgcaggcgctcatacgcactctgtatcgggtactgctgcaagcgcaggtgc

SEQ ID NO: 54374 - DNA, 75 bp, synthetic construct
  source 1..75: mol_type = other DNA
ggacgataccccggtgaaagtgctggagccggggagcggtaaaactcggacgggccggctgtgggtgtatgtgcg

SEQ ID NO: 54375 - DNA, 75 bp, synthetic construct
  source 1..75: mol_type = other DNA
tagtccaggccccactcctcccgaaacctctgacccgcagtgtggccggtgcgggcccgctggcccgcatcctgg

SEQ ID NO: 54376 - DNA, 75 bp, synthetic construct
  source 1..75: mol_type = other DNA
ctggctgaacatcaggagtttcgtgaccagtacgcgaaggcaacagagactcgggccgactctattttcgaagag

SEQ ID NO: 54377 - DNA, 75 bp, synthetic construct
  source 1..75: mol_type = other DNA
gagaacggtcagttccagaaccgtcagcaactgctgaaagtgagccgtctggggccgaaagccttcgagcagtgc

SEQ ID NO: 54378 - DNA, 75 bp, synthetic construct
  source 1..75: mol_type = other DNA
gccctgccgtttacggcctcatcttcggcaggcgtggtcacactgaccgcgcgtcataaggggctttgcgggaat

SEQ ID NO: 54379 - DNA, 75 bp, synthetic construct
  source 1..75: mol_type = other DNA
cactgcgccaggtgtgcaagctgtcggcgcgtaaacaaaagcaggtgcaggagtttattggggtgattagtagca

SEQ ID NO: 54380 - DNA, 75 bp, synthetic construct
  source 1..75: mol_type = other DNA
agaccagcgcaattctatcggcaccttagcggctggcgcacgccttgcggcctcgtctccagaagcaatgcaatc

SEQ ID NO: 54381 - DNA, 75 bp, synthetic construct
  source 1..75: mol_type = other DNA
gtgaaactctgcataccagtgcatatgttcttcgcaaactgaaatcggtcatcacaagcaagtacggacgtcaca

SEQ ID NO: 54382 - DNA, 75 bp, synthetic construct
  source 1..75: mol_type = other DNA
tgccatctcgttcgtatttggtacgtggattaaaaattcgcgtgccgtcaaactacaacgaggccagcaacactt

SEQ ID NO: 54383 - DNA, 75 bp, synthetic construct
  source 1..75: mol_type = other DNA
gttaacctggtatttcacctacagggcaggagctggacgccaggtatcaccggaacgcctgaagctgggaaatta

SEQ ID NO: 54384 - DNA, 75 bp, synthetic construct
  source 1..75: mol_type = other DNA
catgcgtcagtgggtgttgagcttcccgtttcagctgcgtttcctgtttgccagccggcccgagatcatggggtg

SEQ ID NO: 54385 - DNA, 75 bp, synthetic construct
  source 1..75: mol_type = other DNA
aggcacacgggcttattgctcggagaactgaaagggcaatcatccgtatcagagtacggaagaacggcacacaga

SEQ ID NO: 54386 - DNA, 75 bp, synthetic construct
  source 1..75: mol_type = other DNA
ctggacagtaccgaaggagcacagcaaaacgaaggtcgccatattcaggccaataccggaaagcattttaccgtt

SEQ ID NO: 54387 - DNA, 75 bp, synthetic construct
  source 1..75: mol_type = other DNA
ccggaaatggcggcgcgagccgatgccgtaaaaagctatctgaaagaagatgaagcttttaaccgctatctcagt

SEQ ID NO: 54388 - DNA, 75 bp, synthetic construct
  source 1..75: mol_type = other DNA
gagagctattgcgagcaaatcatcatggatcaccttggcctgcgcctgaacaatgccccggcggatagctggcgc

SEQ ID NO: 54389 - DNA, 75 bp, synthetic construct
  source 1..75: mol_type = other DNA
aaatggatttcatgattctgaaagacgtgaatgaacacatggaaggtctgtttcaacgtttttctaaactgttac

SEQ ID NO: 54390 - DNA, 75 bp, synthetic construct
  source 1..75: mol_type = other DNA
tcgatgaagatttccaaatggaacagcaggccaatgctgaattcatcgccgcagccaatccggctactgtgctgg

SEQ ID NO: 54391 - DNA, 75 bp, synthetic construct
  source 1..75: mol_type = other DNA
cactgcgggagaagatggacggggtggcgctcattctgatgccagattcgtttcctgacaaaaagtacgtcatgt

SEQ ID NO: 54392 - DNA, 75 bp, synthetic construct
  source 1..75: mol_type = other DNA
ctgcgtgaagaatggggcatcagccagaaaaatgtggtgttcaacgataaacggtttggctgcgtgtacagcctg

SEQ ID NO: 54393 - DNA, 75 bp, synthetic construct
  source 1..75: mol_type = other DNA
ccggagcacatacacataactttgcttacaacaatacttcagcatacgcagatactcctggtactggcggaggaa

SEQ ID NO: 54394 - DNA, 75 bp, synthetic construct
  source 1..75: mol_type = other DNA
atgcgctgtggttgaccacaccgtggactgatatctctggcgaagtggggcagatggataagaccacagtcaaat

SEQ ID NO: 54395 - DNA, 75 bp, synthetic construct
  source 1..75: mol_type = other DNA
aacggtgtttctaacggggaactagcggttgcactgcacgaatcaccggcaaacatcaaccgggcacttaacacg

SEQ ID NO: 54396 - DNA, 75 bp, synthetic construct
  source 1..75: mol_type = other DNA
acgggagcgggaagcggtccgggaggttgcccgggaaaatctgctgcaggagcgtctgcagcagatggagcggga

SEQ ID NO: 54397 - DNA, 75 bp, synthetic construct
  source 1..75: mol_type = other DNA
atctcaataaaatcggttttaatttcactaccgatcaactctttttattaaccgcattaccctccgtttctggcg

SEQ ID NO: 54398 - DNA, 75 bp, synthetic construct
  source 1..75: mol_type = other DNA
ttttacggtagctatgcaacaggctctctggataaactgcccctgctgtcaccggaatttgaaaacaataccatc

SEQ ID NO: 54399 - DNA, 75 bp, synthetic construct
  source 1..75: mol_type = other DNA
cgacatgatatctggtgaaaaacgtctgcgtcttaactacaacggcataactgcactgttagtagaaggctttaa

SEQ ID NO: 54400 - DNA, 75 bp, synthetic construct
  source 1..75: mol_type = other DNA
gaaaatgtatagccagcttcaaaaagaagggatccataatcccttaaataataaatcgatcactatcatgtcata

SEQ ID NO: 54401 - DNA, 75 bp, synthetic construct
  source 1..75: mol_type = other DNA
cgcttcagtcaggtctggcaggaaaacggactggatcataactggctgccgctgccggtacatccgtggcagtgg

SEQ ID NO: 54402 - DNA, 75 bp, synthetic construct
  source 1..75: mol_type = other DNA
tcgccagacggtgaacagcgttttttccactgcgtataatgattatctgattaatgcatggatgggcgtaaccag

SEQ ID NO: 54403 - DNA, 75 bp, synthetic construct
  source 1..75: mol_type = other DNA
ggccactggagaaagtaattaatcctaactggaaaaactgggaatggctcaatgttggtatggggatcagcaagc

SEQ ID NO: 54404 - DNA, 75 bp, synthetic construct
  source 1..75: mol_type = other DNA
cggctatgttcgggaacatggtttccgccaccagtgctggaaaaacggatcccgaagtcgaatggcaaggagcgc

SEQ ID NO: 54405 - DNA, 75 bp, synthetic construct
  source 1..75: mol_type = other DNA
ccgcatcattgctgcggaaatgccgaaacagctggggtatgcactgaaacaacaactgaggttatggctgacccg

SEQ ID NO: 54406 - DNA, 75 bp, synthetic construct
  source 1..75: mol_type = other DNA
aaacgtttcaaagggctgatggcggaggtcatttcctccccggtgccggtcattctgtttatcgacgaagcacat

SEQ ID NO: 54407 - DNA, 75 bp, synthetic construct
  source 1..75: mol_type = other DNA
gtggtggcggttaaagccgaagagtatgacgatgagtttctgtcattagatttgaacgtcaaaatcgtcagcgat

SEQ ID NO: 54408 - DNA, 75 bp, synthetic construct
  source 1..75: mol_type = other DNA
gagcaaatacttacttgctcatgactgataaaggcgaccagtacggtggctggaacggtcttcgaccatttgcag

SEQ ID NO: 54409 - DNA, 75 bp, synthetic construct
  source 1..75: mol_type = other DNA
ctggaaatgggcacagttacgtaccggttaccgccagaatctggccagcaacaacggcagtgcattcactgccgg

SEQ ID NO: 54410 - DNA, 75 bp, synthetic construct
  source 1..75: mol_type = other DNA
tttcctgtaacgccctctggcaaaagtgtgtccttgcaactctgtatcgggctgctgctacacatcctaaaatta

SEQ ID NO: 54411 - DNA, 75 bp, synthetic construct
  source 1..75: mol_type = other DNA
accatcggctccactgccggtaatgtcagtattaccgcgggcaaacaggctcatatcagcggttcggatgtgatt

SEQ ID NO: 54412 - DNA, 75 bp, synthetic construct
  source 1..75: mol_type = other DNA
agaactgggtgcatcttacccgcggagatatgaaactgcatatgcaggcgaggtataaggccacacattatcccg

SEQ ID NO: 54413 - DNA, 75 bp, synthetic construct
  source 1..75: mol_type = other DNA
gaatgaaggccgttctcttgatcaggccagatatatttgaatccataggattacaaaatcaaaacgcaaaaatca

SEQ ID NO: 54414 - DNA, 75 bp, synthetic construct
  source 1..75: mol_type = other DNA
gtgaaggacgggtgaaaggcagcggggatgcgcagttcgtggccctgcagggcagccgtaacggagagagcctgc

SEQ ID NO: 54415 - DNA, 75 bp, synthetic construct
  source 1..75: mol_type = other DNA
gccagttgtggatccctgaaggatttgcacatggttttttggtgctgagtgagacggctgagtttgtttataaaa

SEQ ID NO: 54416 - DNA, 75 bp, synthetic construct
  source 1..75: mol_type = other DNA
gtgtggcggctattggtcaggctggggaaaaccttgttcctctctctggcatgttgaatagccgtaaccacagcg

SEQ ID NO: 54417 - DNA, 75 bp, synthetic construct
  source 1..75: mol_type = other DNA
gcgggttgtaaacctgtacgaacaggctgccagtgacgatggtgagatcacgcgaccgaaagagcccaactggac

SEQ ID NO: 54418 - DNA, 75 bp, synthetic construct
  source 1..75: mol_type = other DNA
ggcaattgtggatccctgagggatttgcacatggttttttagtgctgagtgagactgcggaatttttatataaaa

SEQ ID NO: 54419 - DNA, 75 bp, synthetic construct
  source 1..75: mol_type = other DNA
gaaatcaccggtatggctgaagattaaagatgacaaagttagcctggaaaaagccgatttcttatggggaaaagg

SEQ ID NO: 54420 - DNA, 75 bp, synthetic construct
  source 1..75: mol_type = other DNA
cgaaaagtgctgctgctgcagagtcctcaaaaagcgcggcagctaccagtgccgctgcggcgaaaacgtcagaaa

SEQ ID NO: 54421 - DNA, 75 bp, synthetic construct
  source 1..75: mol_type = other DNA
gtttacttctactccacgtgatggtcacccgctgtttgcaggctttgtgaaagccgccagcgagttccagaagcg

SEQ ID NO: 54422 - DNA, 75 bp, synthetic construct
  source 1..75: mol_type = other DNA
atgaaagtaattaaaactgaaattcctgatgtattaattttcgaaccgaaagtttttggcgatgagcgtggtttc

SEQ ID NO: 54423 - DNA, 75 bp, synthetic construct
  source 1..75: mol_type = other DNA
tctaaatcgtgtaaaggtgtacttagaggtttacactttcagcttcctccctttgagcaggcaaaattagtaagg

SEQ ID NO: 54424 - DNA, 75 bp, synthetic construct
  source 1..75: mol_type = other DNA
atggcaaagattgagatcaaccgcatcacgaatgccaacatctacctggatggcgctaacctgctgggccgggcc

SEQ ID NO: 54425 - DNA, 75 bp, synthetic construct
  source 1..75: mol_type = other DNA
acttctatgatcctaccgatgaaggggggataatctggaatgacaaagaactgaatatacaatggccgatagaca

SEQ ID NO: 54426 - DNA, 75 bp, synthetic construct
  source 1..75: mol_type = other DNA
cgtgtttggtgatgcgcggggcttcttcttcgagagcttcagcagcaaggtgtttaatgaagcggtgggccgcca

SEQ ID NO: 54427 - DNA, 75 bp, synthetic construct
  source 1..75: mol_type = other DNA
gcgcagtgctgccgatgtggccatcatgaaggagattgtgcgtcagacgccggaactgcgggaggcggtatacag

SEQ ID NO: 54428 - DNA, 75 bp, synthetic construct
  source 1..75: mol_type = other DNA
tggttgttatcgacgaagcccataaactgcgtaatgctcatcgagaaagcaacaaaatggggcaagcgttaaagc

SEQ ID NO: 54429 - DNA, 75 bp, synthetic construct
  source 1..75: mol_type = other DNA
tgcaggctaattatgggcgatttatctggtttggccttgcgataggcgggccgaaacagggcgaagcatgggccg

SEQ ID NO: 54430 - DNA, 75 bp, synthetic construct
  source 1..75: mol_type = other DNA
tttattgaccgctcatcggtggaagtttttgttaacgatggtgacgcttgcttaagcagtcgtatttatccgcag

SEQ ID NO: 54431 - DNA, 75 bp, synthetic construct
  source 1..75: mol_type = other DNA
atcctgtagtttctgctaaagattgttttttaccttcactagcaagtatcaaagaacagattcttaaaggctgga

SEQ ID NO: 54432 - DNA, 75 bp, synthetic construct
  source 1..75: mol_type = other DNA
gaaatagagaaaaggaaattaagttgtcgtgtatatactgagtacaggagcacagctttagctggttctttatgg

SEQ ID NO: 54433 - DNA, 75 bp, synthetic construct
  source 1..75: mol_type = other DNA
gataatggccaggagataccactcgttataagcatgatcccggatgcaatcaccttcaccggcatctgttactca

SEQ ID NO: 54434 - DNA, 75 bp, synthetic construct
  source 1..75: mol_type = other DNA
tcgatacccgccagtcgaagcagaaggttgaccccgaacagcgcatggccgagtggatgcagaccctgaaagaga

SEQ ID NO: 54435 - DNA, 75 bp, synthetic construct
  source 1..75: mol_type = other DNA
tgcagcccataacccgttggcaaaccgcaagcagaatcctgccaatctctttaccgctgcagaggaaacggtgat

SEQ ID NO: 54436 - DNA, 75 bp, synthetic construct
  source 1..75: mol_type = other DNA
gcaggacaagccgcgcgctgatgcgattatggcgcttcatgagcataacgactatcagccgctgttacgtgcaat

SEQ ID NO: 54437 - DNA, 75 bp, synthetic construct
  source 1..75: mol_type = other DNA
gaccgacgggcagcggaacgccacgcgcatgatacttgaatcccccgaccgctttaccctggtgcagggctacgc

SEQ ID NO: 54438 - DNA, 75 bp, synthetic construct
  source 1..75: mol_type = other DNA
cacgcagcaatcttaccgaagtgctcaacaatgttgaagccggagaagaggttgaaatcacccgtagaggccgtg

SEQ ID NO: 54439 - DNA, 75 bp, synthetic construct
  source 1..75: mol_type = other DNA
cgttgaacgcatctctgacgatctctacgtgttcaaagatgccagcggtactatcaatgttgatatcgaccacaa

SEQ ID NO: 54440 - DNA, 75 bp, synthetic construct
  source 1..75: mol_type = other DNA
ttcagcagcagcgaaactgagccaaaccgaagtgaatagccacgacgggatcgccacagctacgctgaccagttt

SEQ ID NO: 54441 - DNA, 75 bp, synthetic construct
  source 1..75: mol_type = other DNA
ccacacgttaatgcaatcaaaaatggctttattcgcttaatgccgttaacccttgcggggccatgtttgtattaa

SEQ ID NO: 54442 - DNA, 75 bp, synthetic construct
  source 1..75: mol_type = other DNA
agatctccaatcacatgtagccaagggattcaggataatccttgtcttacccgaaaatgaagacgagaagaccgt

SEQ ID NO: 54443 - DNA, 75 bp, synthetic construct
  source 1..75: mol_type = other DNA
tcaagcgaacaatacgtagtttccctggcaacaggtgatcaaagcgtatttgaaaagcttgggtttgcttatgcg

SEQ ID NO: 54444 - DNA, 75 bp, synthetic construct
  source 1..75: mol_type = other DNA
gggcagatacaggaagagccccagctcgggctggaaacggttttgtgtctgcggcttagcgtcgacagtgaactg

SEQ ID NO: 54445 - DNA, 75 bp, synthetic construct
  source 1..75: mol_type = other DNA
cggcgtaatgtcagtttcagcgacaccgatttttttggtctcgatgtgactcagcccatcagtattaccctgacc

SEQ ID NO: 54446 - DNA, 75 bp, synthetic construct
  source 1..75: mol_type = other DNA
ccagcaccctgaaaagtaccgtcgacacactgaatatcatcagcgccggggtacaggatatgcagcaggtgctgg

SEQ ID NO: 54447 - DNA, 75 bp, synthetic construct
  source 1..75: mol_type = other DNA
tcgctgggccgggagaacgccagaaacgaagcgcaggccagcaccctgaaaagtaccgtcgacacactgaatatc

SEQ ID NO: 54448 - DNA, 75 bp, synthetic construct
  source 1..75: mol_type = other DNA
ggtgcattgggtgagtcagggttatggagcgatgacgcgatagaaaggcagctgagtcattcagaacgaaatagt

SEQ ID NO: 54449 - DNA, 75 bp, synthetic construct
  source 1..75: mol_type = other DNA
cagctctcgtggattgccagcggcaactatgcggggtatctggctggcagtctgctattttcgtttggcgcattt

SEQ ID NO: 54450 - DNA, 75 bp, synthetic construct
  source 1..75: mol_type = other DNA
aatcaaaggtgtgcgttactcgtatcgtggtatgaaaatgaaagaagaacatatagttcctcttagtcggcaggc

SEQ ID NO: 54451 - DNA, 75 bp, synthetic construct
  source 1..75: mol_type = other DNA
agcctacctggttggcctggctgccactgatgatccagccagtctgggtacggaaatgctgacattcagcgccag

SEQ ID NO: 54452 - DNA, 75 bp, synthetic construct
  source 1..75: mol_type = other DNA
ggcgacagaggcagctggcagtgcgacggcggcagcacagagcaaaagtacggcggaatccgcggcaacgcgcgc

SEQ ID NO: 54453 - DNA, 75 bp, synthetic construct
  source 1..75: mol_type = other DNA
atgcgctgtacgaaggtaatccgcagccggtttttgccaatacggaaaaattgaacgatgctgtggaagagctgc

SEQ ID NO: 54454 - DNA, 75 bp, synthetic construct
  source 1..75: mol_type = other DNA
cgggaaaaactgaaagagcaggttgaggcgctgggctatgaaacggaagtggttggtaagcacggtatgtgggag

SEQ ID NO: 54455 - DNA, 75 bp, synthetic construct
  source 1..75: mol_type = other DNA
agtggtgtggtggtaagaattgccggtgaaggtcgcccgtggaatccgggtgccattaccggcggtcgcgtgtgg

SEQ ID NO: 54456 - DNA, 75 bp, synthetic construct
  source 1..75: mol_type = other DNA
gcctggctaatgaaaactttcgatgttgaatggcaaacagcactggaaactgcgcctggcctgatagtctggctg

SEQ ID NO: 54457 - DNA, 75 bp, synthetic construct
  source 1..75: mol_type = other DNA
aagcgtgaacgcgaagagctaatgtgtatgacaaccgtttttagttgcgcaaatataaataaaaacgcgttcatg

SEQ ID NO: 54458 - DNA, 75 bp, synthetic construct
  source 1..75: mol_type = other DNA
atggttttgaggaagactgggcagaagtttatacctcgaaaaatcttccaccagaaagctacccagtcggcgcac

SEQ ID NO: 54459 - DNA, 75 bp, synthetic construct
  source 1..75: mol_type = other DNA
taagaatttcccgcgccgaatctgccattatcatgacagcacctgccagcatcagagtatctttcaataccaggc

SEQ ID NO: 54460 - DNA, 75 bp, synthetic construct
  source 1..75: mol_type = other DNA
gcgagtttaacggatttgttatgcctggtggctggactgacagggggcgttatgcttatggaatgttctggcaat

SEQ ID NO: 54461 - DNA, 75 bp, synthetic construct
  source 1..75: mol_type = other DNA
gccccggtcaggagcaggcagaacaacatattgatctggcctatgccatcactgcccacggtgcacagggggcga

SEQ ID NO: 54462 - DNA, 75 bp, synthetic construct
  source 1..75: mol_type = other DNA
ttaccgctgcagaggaaacggtgatcgaactggaggaagtccaggacgacaaaccgtccctgttttcccgcgtca

SEQ ID NO: 54463 - DNA, 75 bp, synthetic construct
  source 1..75: mol_type = other DNA
ccggattgcccgtgataatcctgacagcggtgtggtggtaagaattgccggtgaaggtcgtccgtggaatcccgg

SEQ ID NO: 54464 - DNA, 75 bp, synthetic construct
  source 1..75: mol_type = other DNA
ggcagccgtaacggcgagagcctgctggcggataacatgcaggatggcgtccggattgcccgtgataaccccgac

SEQ ID NO: 54465 - DNA, 75 bp, synthetic construct
  source 1..75: mol_type = other DNA
ggtcatccgcctggggcgttcacctgtacagtgttgtgtgaatcatatttctgaaccggataccgaaattccgcc

SEQ ID NO: 54466 - DNA, 75 bp, synthetic construct
  source 1..75: mol_type = other DNA
tcgaagtcaagcaaaggtgttttacgcggactacattatcagctagaaccttacgcacaaggaaaattggtgcgt

SEQ ID NO: 54467 - DNA, 75 bp, synthetic construct
  source 1..75: mol_type = other DNA
ctgggcagcatgggggaacgctgggccggcaggggggcagagcaactggggctgcagggcagtgtcgataaggat

SEQ ID NO: 54468 - DNA, 75 bp, synthetic construct
  source 1..75: mol_type = other DNA
ctggatgccacccacggctatcaactgaccgatgtggcggaagaagcggatgtgctgctgctgaacacctgctca

SEQ ID NO: 54469 - DNA, 75 bp, synthetic construct
  source 1..75: mol_type = other DNA
cgtgctgacgctcagtgccacgcagataaacaacagcggtaccctctccggggcaaaggaacttgtggcttctgc

SEQ ID NO: 54470 - DNA, 75 bp, synthetic construct
  source 1..75: mol_type = other DNA
ctatcgacaaagagtttcatgaaccttggcagagagctttgggaaatgtgatcgagcacgccctcaagccattgc

SEQ ID NO: 54471 - DNA, 75 bp, synthetic construct
  source 1..75: mol_type = other DNA
gataagtttgatcagaccgctaaccggttgatggaagaatataaccggcttccggatgccacgggagatctggca

SEQ ID NO: 54472 - DNA, 75 bp, synthetic construct
  source 1..75: mol_type = other DNA
catggaaaaaatatcgggtgctgcttatgcgtgttaatgtagtaaaacccgagtggcctatgcatccaaataaat

SEQ ID NO: 54473 - DNA, 75 bp, synthetic construct
  source 1..75: mol_type = other DNA
cggtcagggcaacgctatctatctggcggaacgtgactgctccatgcagcgccgccaccagaaagtggtcgaaga

SEQ ID NO: 54474 - DNA, 75 bp, synthetic construct
  source 1..75: mol_type = other DNA
atccggcatgtattttctggcaaaagaatgcatcgattccatcaaagccagcggcatgttatccggtgccctgtt

SEQ ID NO: 54475 - DNA, 75 bp, synthetic construct
  source 1..75: mol_type = other DNA
ggcggtgtaccgcaggaagtcctgtacgacaatatgaaaacggtggtgctgcagcgtgatgcttaccagaccggg

SEQ ID NO: 54476 - DNA, 75 bp, synthetic construct
  source 1..75: mol_type = other DNA
atgcgcggcaacattgaacacaccggcggtgaactctcatcaaacggtaaggtactgcatacccacaaacacccc

SEQ ID NO: 54477 - DNA, 75 bp, synthetic construct
  source 1..75: mol_type = other DNA
ctccgctggaagaggcgcttcatggctatgtcatgactgacggcaaactccatgccgatgataccccggtccagg

SEQ ID NO: 54478 - DNA, 75 bp, synthetic construct
  source 1..75: mol_type = other DNA
atgccgatcggtaagatgatcgatgagaaagtggtggtgaacggtatcgttgcactgctggcgaccggtggttcc

SEQ ID NO: 54479 - DNA, 75 bp, synthetic construct
  source 1..75: mol_type = other DNA
ggaataacaccgtagcggatgatgtgacggcaggtgaggatatggctgtcgaacgtggtgtaaaactttcccggc

SEQ ID NO: 54480 - DNA, 75 bp, synthetic construct
  source 1..75: mol_type = other DNA
cggtgaattcattcgcggctgggatgatgggcgcggggtggatgctggtcgagatttgttatcatctcaagggga

SEQ ID NO: 54481 - DNA, 75 bp, synthetic construct
  source 1..75: mol_type = other DNA
attaagcgttaccgaaccggcgacagtcggggagattgcgcagaatacttacctttcacgcgaacgctgccagtt

SEQ ID NO: 54482 - DNA, 75 bp, synthetic construct
  source 1..75: mol_type = other DNA
atcgcgaaggtaaagtcagccgcattgttgaatttatcgaaaaaccggatcagccgcagacgctggactcagaca

SEQ ID NO: 54483 - DNA, 75 bp, synthetic construct
  source 1..75: mol_type = other DNA
ttctgccgatatttggccggaacttgaacgcactcagcctggtgcatggggacgtattcagctgactgatgccat

SEQ ID NO: 54484 - DNA, 75 bp, synthetic construct
  source 1..75: mol_type = other DNA
aaaggtttactcgactctcttatccacgccggatttgcggaagacgacgagcaattcgatgacattcgcgtaatt

SEQ ID NO: 54485 - DNA, 75 bp, synthetic construct
  source 1..75: mol_type = other DNA
ggcagcgactggcgcgaacacagcgcgacgcgtattgacgatgtgatgctgaaaagcaaatattcgcccaatcag

SEQ ID NO: 54486 - DNA, 75 bp, synthetic construct
  source 1..75: mol_type = other DNA
gcccggcggtctctcccgcgccgactacaatgccgatcactggcagtccacacggccttacgatcgcttctgggg

SEQ ID NO: 54487 - DNA, 75 bp, synthetic construct
  source 1..75: mol_type = other DNA
gctgaaatacgtgcggaggcacgcaacgaggggattaactacaccgcaagccgtcttgctgctgcgttcaatcac

SEQ ID NO: 54488 - DNA, 75 bp, synthetic construct
  source 1..75: mol_type = other DNA
ctgttactgccacggtaccggtggtcacggtgaaagcgtcaacccgtgtcaccctggacacaccggaagtggtct

SEQ ID NO: 54489 - DNA, 75 bp, synthetic construct
  source 1..75: mol_type = other DNA
tcttaacggctttaatactgaccagatgctgaagcagctgggcaacctgaatccgcagcagtttatgtccggcag

SEQ ID NO: 54490 - DNA, 75 bp, synthetic construct
  source 1..75: mol_type = other DNA
ctgaacaaacagcgcggtgatgaccagcgtcgtattgaaaagctgggacaggacaatgccgccctggcagagcag

SEQ ID NO: 54491 - DNA, 75 bp, synthetic construct
  source 1..75: mol_type = other DNA
gcgctggccgaagaccaccagagagcgattgagtcaattaagcaggctgattcggctgttaagttggcacacgag

SEQ ID NO: 54492 - DNA, 75 bp, synthetic construct
  source 1..75: mol_type = other DNA
aaaacgccgggcgtatcccgcgtgctttgcattgagtgtgaagcaccaattccgccagcacgacgtcgcgccatt

SEQ ID NO: 54493 - DNA, 75 bp, synthetic construct
  source 1..75: mol_type = other DNA
gcgatggccgaagaccagcagaaagcgattgagtcaattaagcaggctgattcggctgttaagttggcacacgag

SEQ ID NO: 54494 - DNA, 75 bp, synthetic construct
  source 1..75: mol_type = other DNA
acctgctgacatcgatcattttaagcctgtcgccaggctctggcgcaatcaacaccatgaccacctcgctcaacc

SEQ ID NO: 54495 - DNA, 75 bp, synthetic construct
  source 1..75: mol_type = other DNA
tgagagctgggtacgtcagctcaggcgagagcgccaggggattgccccctctgccacaccgattactccagacca

SEQ ID NO: 54496 - DNA, 75 bp, synthetic construct
  source 1..75: mol_type = other DNA
gtgaaatgaaagtttcccacgtagttaaagctctcggtgaaaccgcacgcgccacggcgtcggtgatgctggtga

SEQ ID NO: 54497 - DNA, 75 bp, synthetic construct
  source 1..75: mol_type = other DNA
acatagaagcagagatacgcggcagtccggcagaggaacggcttgcagtcagaaaagccagaagcgtccagttga

SEQ ID NO: 54498 - DNA, 75 bp, synthetic construct
  source 1..75: mol_type = other DNA
cgccggaaaaaattcgcggcagtatgatctcgatgtatcagttgatgatcactatcgggatcctcggtgcttatc

SEQ ID NO: 54499 - DNA, 75 bp, synthetic construct
  source 1..75: mol_type = other DNA
cccatacgcccatgatgcagcagtatctcaggctgaaagcccagcatcccgagatcctgctgttttaccggatgg

SEQ ID NO: 54500 - DNA, 75 bp, synthetic construct
  source 1..75: mol_type = other DNA
acggtacgtttaaatccaacggcgttcaggtcgacagccacggtcacggcggtgtgcaaagaggtggagcctgga

SEQ ID NO: 54501 - DNA, 75 bp, synthetic construct
  source 1..75: mol_type = other DNA
gatatccacaatctggcagagctgcggggaataacacaggcggaagatggcgcgctgcgaatcggctccgcgaca

SEQ ID NO: 54502 - DNA, 75 bp, synthetic construct
  source 1..75: mol_type = other DNA
gcgcaaccacccttgccgatgccatcaccctgctggctgacaatccgcaggccaaattgcttgccggtggcactg

SEQ ID NO: 54503 - DNA, 75 bp, synthetic construct
  source 1..75: mol_type = other DNA
gtacagtacagccagattggcaaggctgtgcaaagcggcaatgtggaaccggaaaaagcgcgaacctgggaactc

SEQ ID NO: 54504 - DNA, 75 bp, synthetic construct
  source 1..75: mol_type = other DNA
cccttacgaccgcgatacgcgttccggcaccgaggcgcacgcctggtatctggatgacaaaatcgacatcggcaa

SEQ ID NO: 54505 - DNA, 75 bp, synthetic construct
  source 1..75: mol_type = other DNA
gcggctgatgatgttcagtggtgcagcttcagaaaatccctgccgtggattgaggggcatgatattccgtcaatg

SEQ ID NO: 54506 - DNA, 75 bp, synthetic construct
  source 1..75: mol_type = other DNA
cgcgcttgcgggtaagcaaccgaaagatgccaccctgacggcgctggccgggcttgctactgcggcagacaggtt

SEQ ID NO: 54507 - DNA, 75 bp, synthetic construct
  source 1..75: mol_type = other DNA
gggaacaggcgacagtaatcaatagctggctacaaaaagttacctccctgatagatatcagtttaatcgatgtgg

SEQ ID NO: 54508 - DNA, 75 bp, synthetic construct
  source 1..75: mol_type = other DNA
aaagaacttgaaggcgcgcgcggtgaggctgaacgcacggcaaaggttatggccaacaaccttgacggcgatctg

SEQ ID NO: 54509 - DNA, 75 bp, synthetic construct
  source 1..75: mol_type = other DNA
ccaaataccgacgccagatttttgaccatgacgcgacagaaaaactacgcacttacttttcaaatgtatgtgctg

SEQ ID NO: 54510 - DNA, 75 bp, synthetic construct
  source 1..75: mol_type = other DNA
atgatcacattaagtggtattcaatattttcatgaaatgggaattgacgttccttccaaacattcacgtaaaatc

SEQ ID NO: 54511 - DNA, 75 bp, synthetic construct
  source 1..75: mol_type = other DNA
ggtccggttcgtcactctcctggaaaggaatattctcatcgcgattgcgaacatcaaatagcaaccgggaatgct

SEQ ID NO: 54512 - DNA, 75 bp, synthetic construct
  source 1..75: mol_type = other DNA
atgattgatgcaaaagtgcttgaaggggttaaaaactggctgtgtatttatggccgcctgacctgcggtgtactg

SEQ ID NO: 54513 - DNA, 75 bp, synthetic construct
  source 1..75: mol_type = other DNA
tattgcaaaagccgagcacaccattgataacagcggctttaccacgcagcttgagcttgaggcaaaaatcccgga

SEQ ID NO: 54514 - DNA, 75 bp, synthetic construct
  source 1..75: mol_type = other DNA
ccgaaaatacggtcgttgctgacactgtgaaagaaaccagcgagcgtggcgtaaaactgacccgaccaattgagc

SEQ ID NO: 54515 - DNA, 75 bp, synthetic construct
  source 1..75: mol_type = other DNA
gggctacatgcaggcatttgtgcagtacggactacgcaacctgaaagaaggggcaaagttccgtaaagggattga

SEQ ID NO: 54516 - DNA, 75 bp, synthetic construct
  source 1..75: mol_type = other DNA
gcaggtgagtctgaaaaggcagcggcagctgacgctaaagaggccagacgacatgctgaaaccgccagagtggct

SEQ ID NO: 54517 - DNA, 75 bp, synthetic construct
  source 1..75: mol_type = other DNA
aacgcgcaggggctggcgaaccgctgtataccggacagcctgcccgccgtggaatggctgacctacggcagcggc

SEQ ID NO: 54518 - DNA, 75 bp, synthetic construct
  source 1..75: mol_type = other DNA
gacattatcgtgaagtccaaagggctttccggttatgactcgccgtatgtgcctggctgggactgccacggtctg

SEQ ID NO: 54519 - DNA, 75 bp, synthetic construct
  source 1..75: mol_type = other DNA
ggcaggcgctgccggaagagcttcgcctgagtccgcatcgttatctggcgacaaacagtccgcaggggccgtggt

SEQ ID NO: 54520 - DNA, 75 bp, synthetic construct
  source 1..75: mol_type = other DNA
gggctatatgcaggcgtttgtgaagtatggactacgcaatctgaaagaaggggcgaagttccgtaatgggattga

SEQ ID NO: 54521 - DNA, 75 bp, synthetic construct
  source 1..75: mol_type = other DNA
agttcttcctgtgcctgttgactaccgacaacaggtggagtcggagagagctcgtcttatatctcttgctgaacg

SEQ ID NO: 54522 - DNA, 75 bp, synthetic construct
  source 1..75: mol_type = other DNA
tggcaggctctgatttgtatgtattcaggccggtggcacatacggtggattttcatatccgcgtgacgccggaca

SEQ ID NO: 54523 - DNA, 75 bp, synthetic construct
  source 1..75: mol_type = other DNA
taagtctataaaagatctggctgataccaaagcgccaatagaaagcccgagtctgacaggaacgccaaccgcgcc

SEQ ID NO: 54524 - DNA, 75 bp, synthetic construct
  source 1..75: mol_type = other DNA
attgacccctcaacggttgacccgtcaaattttgatggatcaactgttgataaaaaactgccgattaggggggcg

SEQ ID NO: 54525 - DNA, 75 bp, synthetic construct
  source 1..75: mol_type = other DNA
ttacgttcaatgcaacatcactactagtgattatctttgcggtacaaaaagggtactcactcggatatttctttg

SEQ ID NO: 54526 - DNA, 75 bp, synthetic construct
  source 1..75: mol_type = other DNA
atgactctcaataaaaccgatcgcatcgttattacgctgggtaaacagatcgttcacggcaaatacgtaccaggc

SEQ ID NO: 54527 - DNA, 75 bp, synthetic construct
  source 1..75: mol_type = other DNA
ctgtgctaccagccgcgatatgatcaagttctccctgagcgttcggctgaccaactccgtccgtactctgtctgt

SEQ ID NO: 54528 - DNA, 75 bp, synthetic construct
  source 1..75: mol_type = other DNA
ggaaaatattttcacccgtgagcagttgctgcgctatttcccttattacctgctggttaactccacttttgccgt

SEQ ID NO: 54529 - DNA, 75 bp, synthetic construct
  source 1..75: mol_type = other DNA
taaagaaatcaaagttaaagctcaggacgtacagcgtcacccgtacaaaccgaagctgctgcacatcgacttcgt

SEQ ID NO: 54530 - DNA, 75 bp, synthetic construct
  source 1..75: mol_type = other DNA
gtggtgccgttgattctggtgccgctattaatgcgctggctgccggagtcggcggttttcgctggcgaaaaacag

SEQ ID NO: 54531 - DNA, 75 bp, synthetic construct
  source 1..75: mol_type = other DNA
atgaaaaaactagttcttgccgctttgttacttccagtgttcggccacgccacaaccttttcctgtaaagcaata

SEQ ID NO: 54532 - DNA, 75 bp, synthetic construct
  source 1..75: mol_type = other DNA
ctacccgcaaatacggggaagttgaccgggtatccttctttaaggacatcgccggggaagaggctttcacatcgt

SEQ ID NO: 54533 - DNA, 75 bp, synthetic construct
  source 1..75: mol_type = other DNA
cgcgaggacccgtacttcaaagccagttacgacaacgtggactacagccagatcccggcaggattcagggggtga

SEQ ID NO: 54534 - DNA, 75 bp, synthetic construct
  source 1..75: mol_type = other DNA
tgaatcgctctggcatccagccattgcaccgcaaatgctcgttttcgaattaccaggtgcagaacgaagcgcagc

SEQ ID NO: 54535 - DNA, 75 bp, synthetic construct
  source 1..75: mol_type = other DNA
aaactgaccgcgctgggcgatgaattacgatttgtcctgttgacctccggcgctaccgttgcagactataacgac

SEQ ID NO: 54536 - DNA, 75 bp, synthetic construct
  source 1..75: mol_type = other DNA
gtgaatcactacttcactactgatgatggttacaggatcatctcggcacgttttggtgccccccgaatccaggtc

SEQ ID NO: 54537 - DNA, 75 bp, synthetic construct
  source 1..75: mol_type = other DNA
taccagaccgaaggggtgaatatccgcattggtcagcaaaatgaactggcctatcggcggatgaatccggtcggg

SEQ ID NO: 54538 - DNA, 75 bp, synthetic construct
  source 1..75: mol_type = other DNA
taccgcgattaacaacatcaaaaaattctggtcgctgacagcgaaaggctgcatgttcggcaagaacatcaccag

SEQ ID NO: 54539 - DNA, 75 bp, synthetic construct
  source 1..75: mol_type = other DNA
ctgacgcggtagtcgatcttaacaatgaactgaaaacgcgtcgtgagaagctggcgaacctgcgtgagcagggga

SEQ ID NO: 54540 - DNA, 75 bp, synthetic construct
  source 1..75: mol_type = other DNA
atgaagctgtacagtttttttaatagttcagcgtcttaccgggtgcgcattgcgctggcgctgaagggtatcgat

SEQ ID NO: 54541 - DNA, 75 bp, synthetic construct
  source 1..75: mol_type = other DNA
aaccatgtcgatttctcgtttattcagcagggcaatatctccttactcaaaagcattaacgtgacgcagtcctga

SEQ ID NO: 54542 - DNA, 75 bp, synthetic construct
  source 1..75: mol_type = other DNA
gataacctacgatgttgaaactggagatgccgaaacagcgaaagagttaccccttgttattggggttttaggaga

SEQ ID NO: 54543 - DNA, 75 bp, synthetic construct
  source 1..75: mol_type = other DNA
tgcattctgcccgcgtccgctcattataccgcagagtcaatggtagctcaggcggggcagcctccgggctggccg

SEQ ID NO: 54544 - DNA, 75 bp, synthetic construct
  source 1..75: mol_type = other DNA
tctttgtgtttgccgcaatccgccgtactgacactcaaccccgcatttgtatgcttcgcactgtagcctgcgatg

SEQ ID NO: 54545 - DNA, 75 bp, synthetic construct
  source 1..75: mol_type = other DNA
cgcgagcaaggaggccatgcgtgaaacttgctttgcagtctcatctccttttttctggcttgcgtcctgatatct

SEQ ID NO: 54546 - DNA, 75 bp, synthetic construct
  source 1..75: mol_type = other DNA
ttgatttaccgaaagatattcttaatccggcgaacaaattaccctatgtctggccggagtcggtcagtatgcgtt

SEQ ID NO: 54547 - DNA, 75 bp, synthetic construct
  source 1..75: mol_type = other DNA
tatttatagaagagtattgtctttttcattattcaagtcattagttcttttttttatttattcagtaagagctct

SEQ ID NO: 54548 - DNA, 75 bp, synthetic construct
  source 1..75: mol_type = other DNA
gtgatgccgtcaggactaaagcgcgagagcttgggatcagcatgattctgaaaggtgactttcaccagtcagcca

SEQ ID NO: 54549 - DNA, 75 bp, synthetic construct
  source 1..75: mol_type = other DNA
atgaaaaaattaaaactattaaataaatacagctacttacatagcataaacggctcgctgattgaagcagagctt

SEQ ID NO: 54550 - DNA, 75 bp, synthetic construct
  source 1..75: mol_type = other DNA
gggtaattgctgttggggtaatcctgacgataagccatttactgggaataagcaggttgaatgcgattacatgtt

SEQ ID NO: 54551 - DNA, 75 bp, synthetic construct
  source 1..75: mol_type = other DNA
agccggacggcatcatcggcatcggaacatggcgagacttcatcgtctgctttggttcatcgacgattgaatatt

SEQ ID NO: 54552 - DNA, 75 bp, synthetic construct
  source 1..75: mol_type = other DNA
gcgaagtcggtgatgttgccggaagtggtcgcgtatcaatggcgcatggtcggacatcacaggcggtaggcgtta

SEQ ID NO: 54553 - DNA, 75 bp, synthetic construct
  source 1..75: mol_type = other DNA
tttggttcatcgacgattgaatatttctccctgactggtgcaaccaccgttggtgctgctttgtatgtcgcacag

SEQ ID NO: 54554 - DNA, 75 bp, synthetic construct
  source 1..75: mol_type = other DNA
aatgatgcggatatgcgcgacatacggatccgcgttcttgaaatgctggcctaccgtcgccggatacagacgtac

SEQ ID NO: 54555 - DNA, 75 bp, synthetic construct
  source 1..75: mol_type = other DNA
ggcctaccgtcgccgtgtgcagatgtaccgggagagcgagaaaaatacttaccagtggaagaagccggaacggtt

SEQ ID NO: 54556 - DNA, 75 bp, synthetic construct
  source 1..75: mol_type = other DNA
acgcagccggacagcgtgatagccgaaaattacgcgcgtgtggtggctgaggtgatgcgccgtgacggtattgag

SEQ ID NO: 54557 - DNA, 75 bp, synthetic construct
  source 1..75: mol_type = other DNA
gtcataccgtcgccgcgtgcagatgtaccaggagaaagaaaaaattacgtaccagtggaagaagccggagcggtt

SEQ ID NO: 54558 - DNA, 75 bp, synthetic construct
  source 1..75: mol_type = other DNA
catcgccagcaatgagcatcatgcacgtctttcactggtccatgagtatgtgctttgtcttgctgctcgcctgcc

SEQ ID NO: 54559 - DNA, 75 bp, synthetic construct
  source 1..75: mol_type = other DNA
gatgcgccgtgatggtatccagcttaatgatgttgatatgcgcgacatacggatccgcgttctggaaatgctggc

SEQ ID NO: 54560 - DNA, 75 bp, synthetic construct
  source 1..75: mol_type = other DNA
attaagtctattatcgatgaacgtattgtttatttactaaatcgaaatggtaagggagtatcttcggctagaaat

SEQ ID NO: 54561 - DNA, 75 bp, synthetic construct
  source 1..75: mol_type = other DNA
cataattcatcaggaataaaaaacggaattgaagtcagaaaaatacgaacagttaccgatgaaacgttaaatact

SEQ ID NO: 54562 - DNA, 75 bp, synthetic construct
  source 1..75: mol_type = other DNA
attcaggagatccctggagatattttcgcggcggcagcaacttacgacggtgaagtcattaccatttatccggac

SEQ ID NO: 54563 - DNA, 75 bp, synthetic construct
  source 1..75: mol_type = other DNA
tattatcttgcctctctcgtcgcctttgctttatggaaagaggcacctgataccattgaactgttcagaacacgc

SEQ ID NO: 54564 - DNA, 75 bp, synthetic construct
  source 1..75: mol_type = other DNA
atgaaaaaatggatgttagccatctgcctgatgtttataaatgagatctgtctggccactgattgctttgatctt

SEQ ID NO: 54565 - DNA, 75 bp, synthetic construct
  source 1..75: mol_type = other DNA
taactgcatgggttgggattgttttttctaaactgatagccagatataaatcaaggaaaacaccgcctgactctg

SEQ ID NO: 54566 - DNA, 75 bp, synthetic construct
  source 1..75: mol_type = other DNA
ggccggaagccggacaccgcgcaggttggtacaaccactatggacgtgtctgggtgctgaaaaccgccccgggcg

SEQ ID NO: 54567 - DNA, 75 bp, synthetic construct
  source 1..75: mol_type = other DNA
ccgggcggaagctgatgcagacagaaaacccccgacttaacgctgtgctggattacattgacgcggtgacggcaa

SEQ ID NO: 54568 - DNA, 75 bp, synthetic construct
  source 1..75: mol_type = other DNA
agtgagtcgagtggtacgccgttgcaggcagcagaacctgcatccctggatggactgagcgaacccatcgggaaa

SEQ ID NO: 54569 - DNA, 75 bp, synthetic construct
  source 1..75: mol_type = other DNA
tttaatcaccggatgggaaaaacgccaggtactgaaagaggacaatggcaacgtttcacaaaccgcgaaatcccc

SEQ ID NO: 54570 - DNA, 75 bp, synthetic construct
  source 1..75: mol_type = other DNA
gaaagcctcattgataaagccagtcagctggatctcaccgttcctgaaatgacggcattactgggtggtctgcgg

SEQ ID NO: 54571 - DNA, 75 bp, synthetic construct
  source 1..75: mol_type = other DNA
ctgggatttgccggtggtagggaagatgactgggagtcggacttggtctactgggggccaggaaataagccttta

SEQ ID NO: 54572 - DNA, 75 bp, synthetic construct
  source 1..75: mol_type = other DNA
tgcatccgcgtggggaagacgtaccggtggcaggggaaattaaagccgacctgcgtaccgtcagccatattgtca

SEQ ID NO: 54573 - DNA, 75 bp, synthetic construct
  source 1..75: mol_type = other DNA
gctttctgctgctggagtgtacggagctgggcgaatgtaggcagagtcacggaggcagcaatggcgacttccttt

SEQ ID NO: 54574 - DNA, 75 bp, synthetic construct
  source 1..75: mol_type = other DNA
gaaaccacgcttgatccgaacactcgccgtctggtgcagttgactatcgatgatgaagacgatcagcgtactgac

SEQ ID NO: 54575 - DNA, 75 bp, synthetic construct
  source 1..75: mol_type = other DNA
agtgatccgtgccgccctggacctgttgaacgaggtcggcgtagacggtctgacgacacgcaaactggcggaacg

SEQ ID NO: 54576 - DNA, 75 bp, synthetic construct
  source 1..75: mol_type = other DNA
tagctaaagtcaaaaataagaaagtatttcaggacaaaaacctgtgtgatgaaactgtcgatgtggcaaccttaa

SEQ ID NO: 54577 - DNA, 75 bp, synthetic construct
  source 1..75: mol_type = other DNA
cgttatggaaaatggcgatttgtctcttattcaactttgtcttgataaagaaaaacgcgacataactgaatctgt

SEQ ID NO: 54578 - DNA, 75 bp, synthetic construct
  source 1..75: mol_type = other DNA
caccgtgctggcaagcggtcctgtcgccacgacatttacgccggaaaatataaaaaagacgtttagtgcaaacat

SEQ ID NO: 54579 - DNA, 75 bp, synthetic construct
  source 1..75: mol_type = other DNA
gtgtatgactgtacccgccttaccattggcgtgggcgccgggccaacgaagaccctcgcaaaatcagcccagtgg

SEQ ID NO: 54580 - DNA, 75 bp, synthetic construct
  source 1..75: mol_type = other DNA
taaaggcagataacgctttaataaatgaccttgaattagaaacatcgggcggcgtgtgtgatagaatagataaaa

SEQ ID NO: 54581 - DNA, 75 bp, synthetic construct
  source 1..75: mol_type = other DNA
agaccaaaatcaagctgttttaccgcccgaaagccattgaggcgaaacccaatgcagtctggcaggaccagctgg

SEQ ID NO: 54582 - DNA, 75 bp, synthetic construct
  source 1..75: mol_type = other DNA
gctggaagcagctcaggcctgggccgatgctgacccgtacgtagcggcaggagtctatgaacacgtttcagtgaa

SEQ ID NO: 54583 - DNA, 75 bp, synthetic construct
  source 1..75: mol_type = other DNA
gaacacctgctgtttactccgttgttcaaagcggataacgccagatgcttcgatctggaggtggaatcatccact

SEQ ID NO: 54584 - DNA, 75 bp, synthetic construct
  source 1..75: mol_type = other DNA
atggcaaaagatctgaaaacactggcgctggccagactgtcggggttccgtcataaaacggtgaaggtgccagaa

SEQ ID NO: 54585 - DNA, 75 bp, synthetic construct
  source 1..75: mol_type = other DNA
cattttatgccagctgcgagaaagtatttcgacctgatttgcgaaacaagccggttgtggtactcagtaacaatg

SEQ ID NO: 54586 - DNA, 75 bp, synthetic construct
  source 1..75: mol_type = other DNA
atcgaggcggtgattccctgggacgagttcaccgagagcgtcagcgaggccgagctgctggcccggccggaaggc

SEQ ID NO: 54587 - DNA, 75 bp, synthetic construct
  source 1..75: mol_type = other DNA
cgaaaagccaaaacctggggtattacctctccggcacaaccgcagatgcgggcaactcgattttcaccaataccg

SEQ ID NO: 54588 - DNA, 75 bp, synthetic construct
  source 1..75: mol_type = other DNA
aatgaatgaagacgacagcaaaataagaagaggaaactcagcagaattatttttagggatacggcatatcgctat

SEQ ID NO: 54589 - DNA, 75 bp, synthetic construct
  source 1..75: mol_type = other DNA
atgaccaggccagtaacgttatcagaaccccatttcagccagcatacactgaacaaatatgcttcactgatggcg

SEQ ID NO: 54590 - DNA, 75 bp, synthetic construct
  source 1..75: mol_type = other DNA
agttatgcttgtgccagaggatatgtcagtcggatggttcagcaaggctctggagagtgttgacgaagttcgcat

SEQ ID NO: 54591 - DNA, 75 bp, synthetic construct
  source 1..75: mol_type = other DNA
cggcggcagctggcgtcacctggcgctgggcgtggctggctggatgcgttacacccagggcgtggatgagcaggg

SEQ ID NO: 54592 - DNA, 75 bp, synthetic construct
  source 1..75: mol_type = other DNA
ggtggcaagctgtacaaaggagaaagtgaagtcggtgatgttgccggaagtggtcgcgtatcaatggcgcatggt

SEQ ID NO: 54593 - DNA, 75 bp, synthetic construct
  source 1..75: mol_type = other DNA
catgaaagccagcgatccgcgaaatgcgttttactggcgctttgtggaactgggcacggtaaatatgcctgctca

SEQ ID NO: 54594 - DNA, 75 bp, synthetic construct
  source 1..75: mol_type = other DNA
ggaaggctcggcgacacagggtgataaccgggaaacgcatgctgtcggggtgctgtcgaaaatttatccccccct

SEQ ID NO: 54595 - DNA, 75 bp, synthetic construct
  source 1..75: mol_type = other DNA
gcgcgacccctgtatttatcaggaaaaacttcaatgtggttctggagagaacggtccgggaactcaccggagaaa

SEQ ID NO: 54596 - DNA, 75 bp, synthetic construct
  source 1..75: mol_type = other DNA
aaggactggagtgtgacagcccgtgccggaaccagctggcagtttgacctgctgaataatggcgagacagttctt

SEQ ID NO: 54597 - DNA, 75 bp, synthetic construct
  source 1..75: mol_type = other DNA
aataccgaaaagaaaatcatcacgctgcttggcgaactgaaagaagaaggcagcaccctggtggtttcaacgcat

SEQ ID NO: 54598 - DNA, 75 bp, synthetic construct
  source 1..75: mol_type = other DNA
tgagtattgatgtggattacatcgatcctggtactggcccggatggtgacattgagcaccatctggaaatgcgtt

SEQ ID NO: 54599 - DNA, 75 bp, synthetic construct
  source 1..75: mol_type = other DNA
ataaaacgaaggaatatgtcgccagacgagtagcggaagggcatacaaaaatggaagcaatacgctgcctgaagc

SEQ ID NO: 54600 - DNA, 75 bp, synthetic construct
  source 1..75: mol_type = other DNA
cgcgagctgaccgagttggcccagcagaccgataagggtttgctgctggccggccaggcgctggagagtctgcgg

SEQ ID NO: 54601 - DNA, 75 bp, synthetic construct
  source 1..75: mol_type = other DNA
ttgccgcaggtgcgtaaaaattacccttatgaggggtttgtagagtggcatcggaaagaggtttttagggggtga

SEQ ID NO: 54602 - DNA, 75 bp, synthetic construct
  source 1..75: mol_type = other DNA
aaattaatgccctgcacgggacgttactggagtttggtgaaaccatccacaaaggccgggcagcgatggagcggg

SEQ ID NO: 54603 - DNA, 75 bp, synthetic construct
  source 1..75: mol_type = other DNA
tgcgctgactgacgcggaattacgacgcaaggctgccgatgaactgacctgtatgacagcgcgaattaaccgtgg

SEQ ID NO: 54604 - DNA, 75 bp, synthetic construct
  source 1..75: mol_type = other DNA
gtgagcaacattaattaccaggcactgcgaatggcggcagaaaatgcaacccctggcgaatggtgttctgatgat

SEQ ID NO: 54605 - DNA, 75 bp, synthetic construct
  source 1..75: mol_type = other DNA
aatgggagatcctcgcgccagtcagatgacgcgaaaatttatgcttgaatatcggtcagagaaattacaggccgg

SEQ ID NO: 54606 - DNA, 75 bp, synthetic construct
  source 1..75: mol_type = other DNA
agcaaagtatcaaagaatcaaaaaactatattgctgactcccttgaaatacccgaaaatcttgcttacggcacta

SEQ ID NO: 54607 - DNA, 75 bp, synthetic construct
  source 1..75: mol_type = other DNA
tggatggttttctgaaaggtaaatgcatcccaagtgatttaaaggttgacgaaacaaacgatgaatatcttgtcc

SEQ ID NO: 54608 - DNA, 75 bp, synthetic construct
  source 1..75: mol_type = other DNA
cgacagcatccgtgttgaaaccccagccaccgactctttcctgtctgaagtgcgggcgcagggggttgagatgat

SEQ ID NO: 54609 - DNA, 75 bp, synthetic construct
  source 1..75: mol_type = other DNA
ctattagcgccagcgtatcagttccagcaaaacaatctcaccccatcccaacaactctagcagggagaacaatcg

SEQ ID NO: 54610 - DNA, 75 bp, synthetic construct
  source 1..75: mol_type = other DNA
cgttctgctggaatcacgattgataaccttgaggctaaatgcgcgaagatggctgctgaaaattcctcgcttaag

SEQ ID NO: 54611 - DNA, 75 bp, synthetic construct
  source 1..75: mol_type = other DNA
gcgcaggctctgcccctggcgatcaacccgaacagcaaccagtacctggaagagcgcttgcagctgctggacgag

SEQ ID NO: 54612 - DNA, 75 bp, synthetic construct
  source 1..75: mol_type = other DNA
ccaccgccttcatcaagccgcgctggaagccgctagtgataaccccggaaggcctcgaccggcgcttttacgaaa

SEQ ID NO: 54613 - DNA, 75 bp, synthetic construct
  source 1..75: mol_type = other DNA
tttcagccgccgcacgggggaaatggcccgttattctgcagatgctgcgtattgatgtacctgaaaacggcaggc

SEQ ID NO: 54614 - DNA, 75 bp, synthetic construct
  source 1..75: mol_type = other DNA
acctcttcttccgatggccagcgcttccgggcgggcggtcggggtgaaagcaccgggcacgtcaacccgaagtac

SEQ ID NO: 54615 - DNA, 75 bp, synthetic construct
  source 1..75: mol_type = other DNA
aagagcaattaaccgaaatcgctcggaaaatccgcccggaactggttaccctggaggactggcaaaaacgccagc

SEQ ID NO: 54616 - DNA, 75 bp, synthetic construct
  source 1..75: mol_type = other DNA
gatggtccgttgccggaaaatcgccccgtaattttagaggcgcaggatgtgttgataacctacaaaggaaagcta

SEQ ID NO: 54617 - DNA, 75 bp, synthetic construct
  source 1..75: mol_type = other DNA
gggttgcggcagagcagtactgtgatgcggaaaagcggtgcgtgaatgtgcaggctgccacaagcgtccagtcgc

SEQ ID NO: 54618 - DNA, 75 bp, synthetic construct
  source 1..75: mol_type = other DNA
tccaccagcaggttgtggcaccatctgatgattgaccttgaaacaatgggcaaaaatcctgatgcgccaataaac

SEQ ID NO: 54619 - DNA, 75 bp, synthetic construct
  source 1..75: mol_type = other DNA
ctgacagaaagtattggaggtaaaaccgccctggactgggcgatgaaacaggattttcgctgcggctgctggctc

SEQ ID NO: 54620 - DNA, 75 bp, synthetic construct
  source 1..75: mol_type = other DNA
cccttctgttacagcaccgaggcattcacagcggagacaatgcagtcaatgctgccccagaacgtccaggggggc

SEQ ID NO: 54621 - DNA, 75 bp, synthetic construct
  source 1..75: mol_type = other DNA
tctctcgccacccggaatccctgctcgccaagacccgtgcgctcaatgaagaaggcatcagcgcctggatgctga

SEQ ID NO: 54622 - DNA, 75 bp, synthetic construct
  source 1..75: mol_type = other DNA
tacgccagtttctgccgtcgctgtttgtcgataacgatgaagagatcgtcgaatatgcagtgaagccgttactcg

SEQ ID NO: 54623 - DNA, 75 bp, synthetic construct
  source 1..75: mol_type = other DNA
tactacaagaagaactgttacaggtgctgccagagggaacccggctggtggattctggcgcagcgattgctcgcc

SEQ ID NO: 54624 - DNA, 75 bp, synthetic construct
  source 1..75: mol_type = other DNA
gccatgttgctgaactggaagaagctctacgcgataagcaggcgttacttgaagcctcagaaaagcgcaacgcaa

SEQ ID NO: 54625 - DNA, 75 bp, synthetic construct
  source 1..75: mol_type = other DNA
ctctggatatacagacatcggatttgtggcgtgatgtgagctgggccatctctgacattctgtgccgcccgcgaa

SEQ ID NO: 54626 - DNA, 75 bp, synthetic construct
  source 1..75: mol_type = other DNA
aataagcagcacaatgctgaaggatgcccgcatcagcctgatgtattaccacggacggcacattgccggaactat

SEQ ID NO: 54627 - DNA, 75 bp, synthetic construct
  source 1..75: mol_type = other DNA
cccgcagacggcacgcgcctagcatcaacaaatctcagcgctcactgaacgaagatgacctacttgaaaccatga

SEQ ID NO: 54628 - DNA, 75 bp, synthetic construct
  source 1..75: mol_type = other DNA
tatggcatcatcgcttccgtcatgaccaccgatatcgacctgtcaaaagaagttgttggtctgaactttattctc

SEQ ID NO: 54629 - DNA, 75 bp, synthetic construct
  source 1..75: mol_type = other DNA
tgatgatcatcatcatcgcaataattctccacttccaccaactccacctgatgataattcagacgacactccagt

SEQ ID NO: 54630 - DNA, 75 bp, synthetic construct
  source 1..75: mol_type = other DNA
cagcgtgtaacagaggagggaaaacagaatgatgaagaaaaaccgcaaccatctggcgcaatggcagatgaacag

SEQ ID NO: 54631 - DNA, 75 bp, synthetic construct
  source 1..75: mol_type = other DNA
tatgcaccgattgacgaaaagcttatggagcttcacaagtggttttgggaacaaagtgaatccgagcgcgccgct

SEQ ID NO: 54632 - DNA, 75 bp, synthetic construct
  source 1..75: mol_type = other DNA
ttattctgatagggtatctgggtcaggacccggatattcgctatatgccaaacggcggcgctgtggccagcattg

SEQ ID NO: 54633 - DNA, 75 bp, synthetic construct
  source 1..75: mol_type = other DNA
tgaaatcggtaacggctttagcgagctgaatgacgcggaagatcaggcgcagcgcttcctggatcaggttgccgc

SEQ ID NO: 54634 - DNA, 75 bp, synthetic construct
  source 1..75: mol_type = other DNA
agtcctggaatctggttatggatgctataagcaatcctccggcaccgaacgacaagctgaaacgagctgccaatc

SEQ ID NO: 54635 - DNA, 75 bp, synthetic construct
  source 1..75: mol_type = other DNA
gggtaaaggacgctatgaagatgagatgttcatcattaaatactttaagaagggatctgcacacatcactttcaa

SEQ ID NO: 54636 - DNA, 75 bp, synthetic construct
  source 1..75: mol_type = other DNA
tatcgacagcgcgccagctccgacaattgttgtcttattcgcggtcatgttcatcatgacgtttaccgttaccag

SEQ ID NO: 54637 - DNA, 75 bp, synthetic construct
  source 1..75: mol_type = other DNA
taaagagtgctatgaagatgagatgttcagaattaaatactttaagaaaggctccgcgcacatcacgttcaggaa

SEQ ID NO: 54638 - DNA, 75 bp, synthetic construct
  source 1..75: mol_type = other DNA
ggcggctgctgtagagcgtatcgttgtattctgtaaacctgaagcattcaacgccatccgttatagtgctggcat

SEQ ID NO: 54639 - DNA, 75 bp, synthetic construct
  source 1..75: mol_type = other DNA
gtattggtgacgccctgaaatcaagaatggcacgagactccgtgctgctactggaaaaactcggctgtcgcgtaa

SEQ ID NO: 54640 - DNA, 75 bp, synthetic construct
  source 1..75: mol_type = other DNA
accatcgcgcagtcgcagaaatatctgacgatgtggcgggctgaatcgctggatctgaatatggcaaaactcatc

SEQ ID NO: 54641 - DNA, 75 bp, synthetic construct
  source 1..75: mol_type = other DNA
tgaagtcagtcagcctcggttatgtgcggcaggaacgacttaaagatcgcctgcaccgtgaaattattgagcgtg

SEQ ID NO: 54642 - DNA, 75 bp, synthetic construct
  source 1..75: mol_type = other DNA
cacgcagaacccgggatacggcattgctaaagtcgtttgaggctttccgcgagtgggtaaccattcaggccggat

SEQ ID NO: 54643 - DNA, 75 bp, synthetic construct
  source 1..75: mol_type = other DNA
gctggctacgatgaagatgactttaaaaaacctgttcgcgtcaatttgcccgttgttgatgacctcccaccagaa

SEQ ID NO: 54644 - DNA, 75 bp, synthetic construct
  source 1..75: mol_type = other DNA
tgaaatctggcgtgacctgatgcaacgttcagggatgctttccttaatggatgcgcaggcccgtgatacctggta

SEQ ID NO: 54645 - DNA, 75 bp, synthetic construct
  source 1..75: mol_type = other DNA
atggcaaaccgcatgcaacagcgcgcccgcgctgagcgtattcacatccgcagcgaaatcaaccgcagacttttt

SEQ ID NO: 54646 - DNA, 75 bp, synthetic construct
  source 1..75: mol_type = other DNA
ggggtgatcaacgtcttcagggggctgagctggaattacaaaactaattgcccctgcaaattggcagtaaaatta

SEQ ID NO: 54647 - DNA, 75 bp, synthetic construct
  source 1..75: mol_type = other DNA
ggggcaaggcaagaagctgttccgctggcggctacccgaaggtaatccctatctgaggacggagaccaaaaacac

SEQ ID NO: 54648 - DNA, 75 bp, synthetic construct
  source 1..75: mol_type = other DNA
ggagcacatttgagcaactgcaccagaataaggatgacgtgtttgagcgaggagtgatcaacgtcttcagagtgc

SEQ ID NO: 54649 - DNA, 75 bp, synthetic construct
  source 1..75: mol_type = other DNA
ggctctgcgcacatcacgttcaggaagccagaactggttgacagactgaatgatattatcgcaagaacactatcc

SEQ ID NO: 54650 - DNA, 75 bp, synthetic construct
  source 1..75: mol_type = other DNA
tgtatattgcagtcaaaccagacgtacatcttgaccatattcttttcggcgacatgctcgggataaccatcggcg

SEQ ID NO: 54651 - DNA, 75 bp, synthetic construct
  source 1..75: mol_type = other DNA
acgtgaagtcagtcagcctcggttatgtgcgacaggaacgactgaaagatcgcctgcaccgtgaaattattgagc

SEQ ID NO: 54652 - DNA, 75 bp, synthetic construct
  source 1..75: mol_type = other DNA
aaacaaaacggtatgtttatgcgctgtgatgattcccccggttttttttcatggttcagcggcgtttacaaagtc

SEQ ID NO: 54653 - DNA, 75 bp, synthetic construct
  source 1..75: mol_type = other DNA
ccagcaggactacaagaaagttaaggatgaggcaaaacgtcttgaggccgtgctgaatgttgattgtcggtcggt

SEQ ID NO: 54654 - DNA, 75 bp, synthetic construct
  source 1..75: mol_type = other DNA
atgagcaggaaattccgctatggtttatcagcggtagttctggcgctgattgccgcaggtgcttctgcgcctgaa

SEQ ID NO: 54655 - DNA, 75 bp, synthetic construct
  source 1..75: mol_type = other DNA
attctcgatcagtttctggatgaaaaagaggggaatcacatcactgcataccgcgatggctccggcatatggacc

SEQ ID NO: 54656 - DNA, 75 bp, synthetic construct
  source 1..75: mol_type = other DNA
ggcggtgacaactatcatgaccatccagatccactcggcggcggcggtgcaagaatgggctgtggtatcatccca

SEQ ID NO: 54657 - DNA, 75 bp, synthetic construct
  source 1..75: mol_type = other DNA
tgcgtgaggcggcagaagcaataaaaatagcagccacaccacaaaaattgctggcatttcgtatgaaggtcacac

SEQ ID NO: 54658 - DNA, 75 bp, synthetic construct
  source 1..75: mol_type = other DNA
atgagtcgacgaagtagctttttggggtttgtaatattcctgtcctgcactggttacatcgtaatctggtcaatt

SEQ ID NO: 54659 - DNA, 75 bp, synthetic construct
  source 1..75: mol_type = other DNA
gtaaagagtgctatgaagatgagatgttcagaattaaatactttaagaaaggctccgcgcacatcacgttcagga

SEQ ID NO: 54660 - DNA, 75 bp, synthetic construct
  source 1..75: mol_type = other DNA
gttcaaagagctggacctgttaatcgggaaaaacattctggtcatgcaggctgcgattatcgaatggcaggcaac

SEQ ID NO: 54661 - DNA, 75 bp, synthetic construct
  source 1..75: mol_type = other DNA
ttcgatgtgtttacgggaaaaaaatcggcccagatccgcgaaattttaatcagcgagtcagcttgggaagaaatg

SEQ ID NO: 54662 - DNA, 75 bp, synthetic construct
  source 1..75: mol_type = other DNA
ttcgcagggcagcatgtacccattcaacggctgggtgagcaatgaatccagcccgctacagtcctccctgctggt

SEQ ID NO: 54663 - DNA, 75 bp, synthetic construct
  source 1..75: mol_type = other DNA
ccgggccattcacccgggagcaggcagaagctgtcgccacagcttaccgcaacatcgctattgaagatgaccagg

SEQ ID NO: 54664 - DNA, 75 bp, synthetic construct
  source 1..75: mol_type = other DNA
tggtggacctgctggcggagtatgaaaaggtcggcctgcagctggattgtcgggaactgcccgattatctaccgc

SEQ ID NO: 54665 - DNA, 75 bp, synthetic construct
  source 1..75: mol_type = other DNA
ggcgaaagcgcgctggatgagtggatggcggattgtgaagaggacggtattgccccttttcgtgaagaagaagag

SEQ ID NO: 54666 - DNA, 75 bp, synthetic construct
  source 1..75: mol_type = other DNA
atgccgatgaaatttgatgagatattaaaacagcgtgataaataccatgctgacaacatggagacgatgagcatc

SEQ ID NO: 54667 - DNA, 75 bp, synthetic construct
  source 1..75: mol_type = other DNA
atcaaaaattaaacataaaattagccatgatgtttttgatccttatcccgcggcgttacatggtcaatttgattc

SEQ ID NO: 54668 - DNA, 75 bp, synthetic construct
  source 1..75: mol_type = other DNA
agctgtcaccggcattgcgtacgctgtggctgatagtgacgatggttcttggcgtcatctttgtctggatgatgg

SEQ ID NO: 54669 - DNA, 75 bp, synthetic construct
  source 1..75: mol_type = other DNA
ttatttcaaagtcaaagcaggggttgcccgaacctttaaagccccaaacctgtatcaatccagtgaaggctatct

SEQ ID NO: 54670 - DNA, 75 bp, synthetic construct
  source 1..75: mol_type = other DNA
cccgttcaatggatgtggatatttataacctgcacccagcacacgcaaaacgcgttgaagaaatcgtgtcagaga

SEQ ID NO: 54671 - DNA, 75 bp, synthetic construct
  source 1..75: mol_type = other DNA
acataggtttgctgtccgatgagtttttggaagaagtgcgggaaatgccgcagcgtaatctggcagtggaactgc

SEQ ID NO: 54672 - DNA, 75 bp, synthetic construct
  source 1..75: mol_type = other DNA
gttcagtattaaatactttaagaaaggctcagtacacatcacgttcaggaaaccagaactggttgacaggctaaa

SEQ ID NO: 54673 - DNA, 75 bp, synthetic construct
  source 1..75: mol_type = other DNA
ccgctggaacgagaaaaaggcctcgcataaacgccagcgtttttctgtggactggaaaacgctgcataacgggct

SEQ ID NO: 54674 - DNA, 75 bp, synthetic construct
  source 1..75: mol_type = other DNA
ggcaatacacaacaaacgtttgtgcactcattaaccggttttgctaatggcattttgaatatcgacgcaggcggc

SEQ ID NO: 54675 - DNA, 75 bp, synthetic construct
  source 1..75: mol_type = other DNA
gaacgaaaatgacaaaccacagtttgactggcagcttaaaaccgtcgtgcagggcttctttaaccgtgaattatt

SEQ ID NO: 54676 - DNA, 75 bp, synthetic construct
  source 1..75: mol_type = other DNA
aattttaatgattcgtcatgcgtgagtacaaatactatcacccctatgagcccgtcggatattattgttggactt

SEQ ID NO: 54677 - DNA, 75 bp, synthetic construct
  source 1..75: mol_type = other DNA
tgcaggtatttatcgtagaactggacggcggcgtatttgaaaccaaactcggcgcagttctcagtgaagtcgctt

SEQ ID NO: 54678 - DNA, 75 bp, synthetic construct
  source 1..75: mol_type = other DNA
atgattgttgcgctaaacggctggtgtgatcacgcgcacattaatgaaggcataaaaaaagccggcatcatgccg

SEQ ID NO: 54679 - DNA, 75 bp, synthetic construct
  source 1..75: mol_type = other DNA
atcatcgacacgcgggagtgccgcagtacaatttctactgtgtttattaggtggcaagtcatgggatgcatgtgt

SEQ ID NO: 54680 - DNA, 75 bp, synthetic construct
  source 1..75: mol_type = other DNA
atgtggagctgaaagggggcgataaaatcatcctctccaacggcgcagagctgcattttctcggcacttctgctg

SEQ ID NO: 54681 - DNA, 75 bp, synthetic construct
  source 1..75: mol_type = other DNA
ccagagcgaatgcgtcagaccgggcagggtgttaccgaccttcttttaccccccgtagctaccagtaaagaacag

SEQ ID NO: 54682 - DNA, 75 bp, synthetic construct
  source 1..75: mol_type = other DNA
tacagaacgttacgcgaaattaacaccggaacgtatgcgtcagacagggcagggagtgactgacctgcttctgaa

SEQ ID NO: 54683 - DNA, 75 bp, synthetic construct
  source 1..75: mol_type = other DNA
ccattgatgttacggataatagtacggataacacacatctttcaggaaaaacgataattaataatacctccttta

SEQ ID NO: 54684 - DNA, 75 bp, synthetic construct
  source 1..75: mol_type = other DNA
acaaagctgatagcctcgaaaaacgcctttccgttcgtccggcacatttagcacgtttacagttactgcatgatg

SEQ ID NO: 54685 - DNA, 75 bp, synthetic construct
  source 1..75: mol_type = other DNA
ctaccggaccacgcggcgggaagaaagatggtgtggtgcaaacaatggcgaaaagcgccgctcgccaggtgacga

SEQ ID NO: 54686 - DNA, 75 bp, synthetic construct
  source 1..75: mol_type = other DNA
gagcgggtcacgcagtcgattgatgcgcgactggttcagctgacctcaaaagctgaaaagagcggcggtgatttt

SEQ ID NO: 54687 - DNA, 75 bp, synthetic construct
  source 1..75: mol_type = other DNA
ccgcaggtactgctggataagattgagcaggtgataaggcttattcgctcaaaaggcgtgggcgtctggttcgtt

SEQ ID NO: 54688 - DNA, 75 bp, synthetic construct
  source 1..75: mol_type = other DNA
acagtgtcgcggaggttttggattcatgccagggatatgatatcaaagcgagttgtcaggccagcaggcaaagcc

SEQ ID NO: 54689 - DNA, 75 bp, synthetic construct
  source 1..75: mol_type = other DNA
gcttgtgtttaagtgtaaagacgatttttctcctgacaatgtgattcaacaggtagattgtcttaaaaatttatc

SEQ ID NO: 54690 - DNA, 75 bp, synthetic construct
  source 1..75: mol_type = other DNA
aagcgtgcggcggaggacttacaggcgaaatataaccgcctgacggattccgttaaacgccagcagcgggaactg

SEQ ID NO: 54691 - DNA, 75 bp, synthetic construct
  source 1..75: mol_type = other DNA
cccgctgcacggagcgggagtttgcgaccattcttgccggtatcagcgccggcggcatgtactgcccggagtgtg

SEQ ID NO: 54692 - DNA, 75 bp, synthetic construct
  source 1..75: mol_type = other DNA
aaagaaaacctgcgtttcaaaaaagcaaattcccccgctatgccgtgaaacttcatagatatgatttttttgacg

SEQ ID NO: 54693 - DNA, 75 bp, synthetic construct
  source 1..75: mol_type = other DNA
ctgtcgggctgggtggatgcatgctgccggcagctgtctccgctggaagaggcgcttcatggctatgtgctgact

SEQ ID NO: 54694 - DNA, 75 bp, synthetic construct
  source 1..75: mol_type = other DNA
cgcttcgccatccttcagggctgtttgatggtgaaacggaagccgtatgggggctgaacaccgcgtacagcgtgg

SEQ ID NO: 54695 - DNA, 75 bp, synthetic construct
  source 1..75: mol_type = other DNA
atgaatgataattttttaacggagaaagtccttactggagagaatgttctgcgtgcagcaattgctcgtattgag

SEQ ID NO: 54696 - DNA, 75 bp, synthetic construct
  source 1..75: mol_type = other DNA
gttggcagcatcacccgctttgaagtgaacaataaccagggtcgtttcgtatttccggatacctggtttggccca

SEQ ID NO: 54697 - DNA, 75 bp, synthetic construct
  source 1..75: mol_type = other DNA
gcagggtggaattggtcactggttgcgcggatctcgtcatccatctcttgacgagattggtgtggtgtttaaata

SEQ ID NO: 54698 - DNA, 75 bp, synthetic construct
  source 1..75: mol_type = other DNA
aaagttggcgtagaaaatctggttaatgcggtgccgcaactgaaggacattgcgaacgttaaaggcgagcaggta

SEQ ID NO: 54699 - DNA, 75 bp, synthetic construct
  source 1..75: mol_type = other DNA
ttaaaaacggaaaaattgccgttcctgatgcgcccggtctgggcgtggaactggactgggagcaggtacaaaagg

SEQ ID NO: 54700 - DNA, 75 bp, synthetic construct
  source 1..75: mol_type = other DNA
atgaacgtacagttcttcgaccacgcacaccacaagctcaaaattcgcggcctgcaaagcccggtggatgtgctg

SEQ ID NO: 54701 - DNA, 75 bp, synthetic construct
  source 1..75: mol_type = other DNA
tcgcacgcctctccccgctttgccacggacatatcaatatgctcggccattattccttcacgctggcagaactgg

SEQ ID NO: 54702 - DNA, 75 bp, synthetic construct
  source 1..75: mol_type = other DNA
tgtccacgtcagcctatacgctgtttaacggttcggggaaattacagggggcgaaggacggcggcaacagggaga

SEQ ID NO: 54703 - DNA, 75 bp, synthetic construct
  source 1..75: mol_type = other DNA
ccgcggaacaactggagctgatgcgcagcgccttccgggttatccgtacggtgcgcgaaaagcatgcctgccgtc

SEQ ID NO: 54704 - DNA, 75 bp, synthetic construct
  source 1..75: mol_type = other DNA
ggagatcagcaactggcagaactggaaaatctgaacatcattgacgacgggcgctattgtgtccggctgtacaag

SEQ ID NO: 54705 - DNA, 75 bp, synthetic construct
  source 1..75: mol_type = other DNA
gtgtggcttggggagcagcagttatccgaactggataagctgcaaattgtgccggaaggcagaaaatcagtacgc

SEQ ID NO: 54706 - DNA, 75 bp, synthetic construct
  source 1..75: mol_type = other DNA
gggttgggtggatgcgtgttgccggctgctgtcaccgctggaagaggcgctccggagctatgtgctgactgacgg

SEQ ID NO: 54707 - DNA, 75 bp, synthetic construct
  source 1..75: mol_type = other DNA
cctgaaacgtggttatgttccccgcttgaactactgggaacggggacgatcggcagggagcatcaccgcgtgatg

SEQ ID NO: 54708 - DNA, 75 bp, synthetic construct
  source 1..75: mol_type = other DNA
tgcccgtatccgccacgaacgctacctgaatgaacaggccattctcaaaggccagagcaccagttcactgctgat

SEQ ID NO: 54709 - DNA, 75 bp, synthetic construct
  source 1..75: mol_type = other DNA
ctggatattacgcgcgcgcaggaagagctaggttatcagccagtccttaccctggatgaaggtatcgagaaaact

SEQ ID NO: 54710 - DNA, 75 bp, synthetic construct
  source 1..75: mol_type = other DNA
atgcgcacgttattttctcaacaacagtggattgatatgaaggtactggttaccggcgccaccagcggcttaggt

SEQ ID NO: 54711 - DNA, 75 bp, synthetic construct
  source 1..75: mol_type = other DNA
ctggataacgaattatcgaattttaagtttaatgagaacagcaaagacgagtttatggccggcatccaggcggaa

SEQ ID NO: 54712 - DNA, 75 bp, synthetic construct
  source 1..75: mol_type = other DNA
ttgcagctttatgcggcttgttggctctgtctggttgtgcctctaaaatcacccagccagataaatattctggtt

SEQ ID NO: 54713 - DNA, 75 bp, synthetic construct
  source 1..75: mol_type = other DNA
ctcggcgacacaccgctggtggatttcacccgcgaccgcctgcaccgggaaacgctgcgcagcttcggccgttat

SEQ ID NO: 54714 - DNA, 75 bp, synthetic construct
  source 1..75: mol_type = other DNA
ttctgctgacatctgggctgaactggaaaaaactgcaccaggtgcgtgggatcgtattcaattaacggatgctat

SEQ ID NO: 54715 - DNA, 75 bp, synthetic construct
  source 1..75: mol_type = other DNA
atctgatgacgctggcaggctttaaaccggctggtgtgctgtgtgagctgactaatgacgatggcacgatggcgc

SEQ ID NO: 54716 - DNA, 75 bp, synthetic construct
  source 1..75: mol_type = other DNA
tatgcgtggcagtctcctttcggtctataatagcagaacaaaagaaagagccagaaattgacggtcagatattat

SEQ ID NO: 54717 - DNA, 75 bp, synthetic construct
  source 1..75: mol_type = other DNA
agttgaacccaaggccgggcaggttgtaccggctctcgcacacattgggcaaggcgaagcggaatcatcccgctc

SEQ ID NO: 54718 - DNA, 75 bp, synthetic construct
  source 1..75: mol_type = other DNA
cgtattttcccttttaccgatatgccatgacctttgaggaatttatcccggcgttttcctcctggtttgccaggg

SEQ ID NO: 54719 - DNA, 75 bp, synthetic construct
  source 1..75: mol_type = other DNA
tgtttcttcttcttataagcttgctatatatagcaacacaggaaaggttcttggattgggaagttttctggcatc

SEQ ID NO: 54720 - DNA, 75 bp, synthetic construct
  source 1..75: mol_type = other DNA
cgctttatgggactggtgtctcagcgcaaactgagatatgcagatgataaaccctggaccacagcgtcacctgaa

SEQ ID NO: 54721 - DNA, 75 bp, synthetic construct
  source 1..75: mol_type = other DNA
acggccgatgtggctcgcaggaagaaacgtcgtttctctgtattattcattgactgggaagctcagtaccagtgc

SEQ ID NO: 54722 - DNA, 75 bp, synthetic construct
  source 1..75: mol_type = other DNA
ccgtgattttattcagttatgtgtggttgccgtaaattttttgagcggtgcggactctggcgggaagaacgaaca

SEQ ID NO: 54723 - DNA, 75 bp, synthetic construct
  source 1..75: mol_type = other DNA
attattggtgctattgcgttgtggacgcttatcaaagttaaagatgaagaaccacaagtacagttagctacccac

SEQ ID NO: 54724 - DNA, 75 bp, synthetic construct
  source 1..75: mol_type = other DNA
ttcgtcacctacgggatgcgtaacctgaaagaaggcgccaaattccgcgaaagcattaaaaaactgctggcctga

SEQ ID NO: 54725 - DNA, 75 bp, synthetic construct
  source 1..75: mol_type = other DNA
gtctggaaatgactgtcgcactgcgcgaaacaaccccaggacagggcatacccgggaaatttcgcgcacaggcaa

SEQ ID NO: 54726 - DNA, 75 bp, synthetic construct
  source 1..75: mol_type = other DNA
ccggacagaaaaggcatccatccgcagactcatcttgcttgcttcagcggtgtgctgcaagcggatgcgtacgcc

SEQ ID NO: 54727 - DNA, 75 bp, synthetic construct
  source 1..75: mol_type = other DNA
gcagaaaacggcgtcctcatcgtcgaacgatggcttcttgcccgcatccgtaatgaaaccttccacacgctcagg

SEQ ID NO: 54728 - DNA, 75 bp, synthetic construct
  source 1..75: mol_type = other DNA
gtgtacgttatgataacgtaacagaggaagatattatcgaacgtatccggcgtggtgaactgaatgcatcaacac

SEQ ID NO: 54729 - DNA, 75 bp, synthetic construct
  source 1..75: mol_type = other DNA
gctgaacatccgcacaaggagaacgctgacagcgatccgcatcgcgattgcagtgatgaaactggcgaagcagca

SEQ ID NO: 54730 - DNA, 75 bp, synthetic construct
  source 1..75: mol_type = other DNA
tttttctcacttctcaacctgggctttgattactggcatccgtccggaggggctatttctcctgcggagcgcgaa

SEQ ID NO: 54731 - DNA, 75 bp, synthetic construct
  source 1..75: mol_type = other DNA
ctgtggcgtcgggcaaaggccctcagtcagaaaccggcttacttctgggtctggctggtcgcgctgatactggta

SEQ ID NO: 54732 - DNA, 75 bp, synthetic construct
  source 1..75: mol_type = other DNA
atgactgctttcacccaaaaattgacagccgcgatacccaccatgctgttatgcgtatcattaagtggagtcaca

SEQ ID NO: 54733 - DNA, 75 bp, synthetic construct
  source 1..75: mol_type = other DNA
gtggtctgcgccattgggattatccaaattattcattcagtaaaaaagattgaacgctttttcactggcgaataa

SEQ ID NO: 54734 - DNA, 75 bp, synthetic construct
  source 1..75: mol_type = other DNA
tcgttatggtcggccctggatgatgacatcatcaccacggagcaggcccgcgaaattgcgatccgctgtcatgaa

SEQ ID NO: 54735 - DNA, 75 bp, synthetic construct
  source 1..75: mol_type = other DNA
ggaagaaggtgccgtcgctgtagccactgccattgaagccggtgatgaacgtcgcgcccgcgcaaaatttcactg

SEQ ID NO: 54736 - DNA, 75 bp, synthetic construct
  source 1..75: mol_type = other DNA
ggttttcgctgggcaccaaaacaggcgctgtttgtcgcgccagcctggacaccgggccgggaagacgtgctcctc

SEQ ID NO: 54737 - DNA, 75 bp, synthetic construct
  source 1..75: mol_type = other DNA
ccgcctgatctatgagcgtgccatgctggacgaaagcggcggcgtggttacccggacacaggattttgagccggg

SEQ ID NO: 54738 - DNA, 75 bp, synthetic construct
  source 1..75: mol_type = other DNA
atgaaaaacactatcagcgaacgtattcggaatcgtcgaaaagacgttggattaacccaacagcaggttgcgaaa

SEQ ID NO: 54739 - DNA, 75 bp, synthetic construct
  source 1..75: mol_type = other DNA
tgtttcaggcattacccgtacgccttccggtgctaacgctggcggcggaaatattaccgatcgtggtgaaggatt

SEQ ID NO: 54740 - DNA, 75 bp, synthetic construct
  source 1..75: mol_type = other DNA
atggtgaagactaagaaaataaaatgtgcttaccacctttgtaataaagaaattgaagaaagcaaaagcattaaa

SEQ ID NO: 54741 - DNA, 75 bp, synthetic construct
  source 1..75: mol_type = other DNA
aatcggcattatgcgaattatccacacactgaaggatatcgaattattctttaccggcgataaacgccgtaaata

SEQ ID NO: 54742 - DNA, 75 bp, synthetic construct
  source 1..75: mol_type = other DNA
ataaagcacgacctccaagagtgcagataacgtacgatattgaaactggggatgccgaaacagctaaagaattac

SEQ ID NO: 54743 - DNA, 75 bp, synthetic construct
  source 1..75: mol_type = other DNA
catagtatttgcgccaaaataccgaagacaggtgttctacagagagaagcgtagagcaacaggctgtattttgag

SEQ ID NO: 54744 - DNA, 75 bp, synthetic construct
  source 1..75: mol_type = other DNA
caggcaccggtgtcttcaaaacccattgcacgcagctatgccggagcggggcttctggcccatgtcgtcaccggg

SEQ ID NO: 54745 - DNA, 75 bp, synthetic construct
  source 1..75: mol_type = other DNA
taagactatcgatctggaaactgctggcggggtcattgatcgggacaccattaaatggtggcttaagcaatcacg

SEQ ID NO: 54746 - DNA, 75 bp, synthetic construct
  source 1..75: mol_type = other DNA
ggtagtgatgcctggtcacacgcaaaacaatggcaggaacatgacgcgcgtatggccggagataatgagcctcct

SEQ ID NO: 54747 - DNA, 75 bp, synthetic construct
  source 1..75: mol_type = other DNA
gcaatcaggcggtgcagattatggtgttccgcgaagtgataaaggtgctacgactacaagttcatcaggcaatca

SEQ ID NO: 54748 - DNA, 75 bp, synthetic construct
  source 1..75: mol_type = other DNA
cggatgacgatgatgacgaaacatgggtactgttcaatgccatgaacggtaaccgcgctgaaatgagcccggaag

SEQ ID NO: 54749 - DNA, 75 bp, synthetic construct
  source 1..75: mol_type = other DNA
ggcgcaacagagcggatggactgtattatggcatgcaaattataactatactttaaatgcatctgcagtgtttaa

SEQ ID NO: 54750 - DNA, 75 bp, synthetic construct
  source 1..75: mol_type = other DNA
cgataagcgccaacgtatcaattccggcaggacaatctcaatccaccgccacaacgactggagagagaaaaatag

SEQ ID NO: 54751 - DNA, 75 bp, synthetic construct
  source 1..75: mol_type = other DNA
tctggtctaaagcaacatccaccaacgcaacactggagaaaaatttcccggaagataatgctgtcggtgtgcttg

SEQ ID NO: 54752 - DNA, 75 bp, synthetic construct
  source 1..75: mol_type = other DNA
atgccatgacggtccactattaccggctgcgggattacgccctgcaacatccggaatgcaacgccattatgcgca

SEQ ID NO: 54753 - DNA, 75 bp, synthetic construct
  source 1..75: mol_type = other DNA
ttacttatttaatcactttgattttaactactcttttgtttgtttattttttaagaacacccaccacaatcaata

SEQ ID NO: 54754 - DNA, 75 bp, synthetic construct
  source 1..75: mol_type = other DNA
ttccacttgttagtaatacttttttcgctggcaatcagcagattgcaaacgaaaagcttaccaatgatggttgtt

SEQ ID NO: 54755 - DNA, 75 bp, synthetic construct
  source 1..75: mol_type = other DNA
ggtatcgactttcagaggttcaggcatggatccgtggtgagtggcatcctggatggaaacctggaaaaacaaaac

SEQ ID NO: 54756 - DNA, 75 bp, synthetic construct
  source 1..75: mol_type = other DNA
cgtccgttcgaatggctgtgttcttccgttgaattactcggttcaggtgtcattggtaacgagcattaccgcgtg

SEQ ID NO: 54757 - DNA, 75 bp, synthetic construct
  source 1..75: mol_type = other DNA
ttcaatgctgaaattaagtaccgtgttgaagcattgagtgaagctattggtctggagccgggatttatttcgggt

SEQ ID NO: 54758 - DNA, 75 bp, synthetic construct
  source 1..75: mol_type = other DNA
tcctgatgccccgatcatctcaataggtgcaatatttttcgatccgcaaaccggagatatgggaccggaatttag

SEQ ID NO: 54759 - DNA, 75 bp, synthetic construct
  source 1..75: mol_type = other DNA
gtgagtaatacacaacacaaacttgataaatcccgcccccctagagtacagataacctacgatgttgaaactgga

SEQ ID NO: 54760 - DNA, 75 bp, synthetic construct
  source 1..75: mol_type = other DNA
gtttttctctcctgacaggatcaatgaatgtcgtcagggtgctgccagcactatggggaatggtaacaggttcca

SEQ ID NO: 54761 - DNA, 75 bp, synthetic construct
  source 1..75: mol_type = other DNA
tgcggtggcgggtgtaaaggaggcacgttgctacagcggctttgttgaccagcagccggaggactggacaccgcg

SEQ ID NO: 54762 - DNA, 75 bp, synthetic construct
  source 1..75: mol_type = other DNA
atttttgatgaatccactgctgaaggtgtgggtggcgatttttacgagatgagtaaccgggcacaggaaatcact

SEQ ID NO: 54763 - DNA, 75 bp, synthetic construct
  source 1..75: mol_type = other DNA
gggtcattatccgtccggttacgcatgtaccggcggccattccgctccggctggaaaaccagtatttcgcgctgg

SEQ ID NO: 54764 - DNA, 75 bp, synthetic construct
  source 1..75: mol_type = other DNA
agtatgaacataaaatcggtgacctgattgcccgatttaaagaagctggtggggtagtaaatgaagctgagatat

SEQ ID NO: 54765 - DNA, 75 bp, synthetic construct
  source 1..75: mol_type = other DNA
acagctggggtgaaaagaaacatgacccgatgaagttcggtccggttgatagcaagattccagaggggttcagag

SEQ ID NO: 54766 - DNA, 75 bp, synthetic construct
  source 1..75: mol_type = other DNA
ggctcttacctgaaaaaaccgccggtgccgatgagccgtctggagcactatgctggtcaggatgaaattggtctg

SEQ ID NO: 54767 - DNA, 75 bp, synthetic construct
  source 1..75: mol_type = other DNA
atgggctacacgcaatggtgctgttcgtcaccggactgttgccacaccaaaaaggtctgcttccggtgtaaaagc

SEQ ID NO: 54768 - DNA, 75 bp, synthetic construct
  source 1..75: mol_type = other DNA
aaccagtcatcacggaataataagagatgaagaaaaaaatgttattgtctcggtgctttgcaggttccatttaat

SEQ ID NO: 54769 - DNA, 75 bp, synthetic construct
  source 1..75: mol_type = other DNA
tcggacaaaaaaagaatattgctgagttttggatcgcttgaagatgtttccctggctgatgccagaaaacgccgt

SEQ ID NO: 54770 - DNA, 75 bp, synthetic construct
  source 1..75: mol_type = other DNA
cgatactggaacggcgcatttaatggcgatatcgggattgcacatcgcttttgcggcgttgctggctgccggact

SEQ ID NO: 54771 - DNA, 75 bp, synthetic construct
  source 1..75: mol_type = other DNA
atgacacataaaacaaaggcgacctggggcggtcgccaatgggaaaacactaaacataagcccgaacatcatagc

SEQ ID NO: 54772 - DNA, 75 bp, synthetic construct
  source 1..75: mol_type = other DNA
cttttttatccgaagagggcgatggtgaattagagtccacactgcctcgttgggaggtagctcttgttggattta

SEQ ID NO: 54773 - DNA, 75 bp, synthetic construct
  source 1..75: mol_type = other DNA
tgccgcaaagcagcaagtgactcaaaccatgaatgcgggcgtagtttccagtggtgaagttacgtcgacggagcc

SEQ ID NO: 54774 - DNA, 75 bp, synthetic construct
  source 1..75: mol_type = other DNA
tccctgcattttctccgcacgcttttctactgactcgcgcaattctctcagttactggtgcctccctgttaacgc

SEQ ID NO: 54775 - DNA, 75 bp, synthetic construct
  source 1..75: mol_type = other DNA
ggtaagcgcagtcacgaccgctggtggaatgcaaacagtagatataacgctggtggcaggcccggcagacgcctc

SEQ ID NO: 54776 - DNA, 75 bp, synthetic construct
  source 1..75: mol_type = other DNA
cgcatggcggatatccgtctacaaagcgaaaaatcgctaaccgacttctttgcgccattacgctctgtcccgtcg

SEQ ID NO: 54777 - DNA, 75 bp, synthetic construct
  source 1..75: mol_type = other DNA
tttatcccggaagggatcagggtgatgacctggtttgagtttctgcacggtttttgcttccggcctttcctgcag

SEQ ID NO: 54778 - DNA, 75 bp, synthetic construct
  source 1..75: mol_type = other DNA
gccacacaaaaaaggtctgcttccggtgtaaaagtcgctcctgcccgcactgcggggtgaaggctggcgcacagt

SEQ ID NO: 54779 - DNA, 75 bp, synthetic construct
  source 1..75: mol_type = other DNA
gaagtcagatgatacttaccgaatatacgttcgaccacaaaaccaataaatcacgttcagtatatttgcttcggc

SEQ ID NO: 54780 - DNA, 75 bp, synthetic construct
  source 1..75: mol_type = other DNA
acaaattgccgatcttcgcttacatctcatcaccgccgacttgtggggagactccgatgaagggaatgcaaaaga

SEQ ID NO: 54781 - DNA, 75 bp, synthetic construct
  source 1..75: mol_type = other DNA
tccatgaaaaataaaggctttcgcattaagcctgccgggaaagccaagtccggcttaccgctggatagtcatccg

SEQ ID NO: 54782 - DNA, 75 bp, synthetic construct
  source 1..75: mol_type = other DNA
gactacgcggtgatggagaaaaccgccgacgcggtggtggtcggtctcgatgccgactggagcgacgtcggctcc

SEQ ID NO: 54783 - DNA, 75 bp, synthetic construct
  source 1..75: mol_type = other DNA
cgtttacggtcttctctccggccctgccggtcaacggacgtacggtttatcaggggtatttgttcgtaatgaatc

SEQ ID NO: 54784 - DNA, 75 bp, synthetic construct
  source 1..75: mol_type = other DNA
tattccgctggaagtgctggagatccagtcggggtcgtacctcggcgaggacgacattattcgtattaaagacca

SEQ ID NO: 54785 - DNA, 75 bp, synthetic construct
  source 1..75: mol_type = other DNA
gatgcagatgcaccaccatcgcgccgagcattgggttattctcgccggcaccggtcaggtgacggtcaacggtaa

SEQ ID NO: 54786 - DNA, 75 bp, synthetic construct
  source 1..75: mol_type = other DNA
gccggtgaaagatgtctggacggtatatcagtgccagcattgcctttatacctggcgcgataccgaaccgctgcg

SEQ ID NO: 54787 - DNA, 75 bp, synthetic construct
  source 1..75: mol_type = other DNA
agcgttacctcaaagcattaaacccaaactggcctgaaccttacattaagatcaacggtaattgctctataattg

SEQ ID NO: 54788 - DNA, 75 bp, synthetic construct
  source 1..75: mol_type = other DNA
ggaaagtgcatctgacacctgcccagttgtccatgctactggaggggatcgcctggcagcatccaaaacggacgg

SEQ ID NO: 54789 - DNA, 75 bp, synthetic construct
  source 1..75: mol_type = other DNA
aaagttagcgatgaggcagccttttgtcttattcaaaggccttacatttcaaaaactctgcttaccaggcgcatt

SEQ ID NO: 54790 - DNA, 75 bp, synthetic construct
  source 1..75: mol_type = other DNA
gtttcgacctgcctgtcggatggcttgatcaagaacaccagacaacgaacatcacaaaaaaacctgatgtttcaa

SEQ ID NO: 54791 - DNA, 75 bp, synthetic construct
  source 1..75: mol_type = other DNA
aagcctcaaccaaaggaatggataccacacaactaaactgcgtgctggaatccatgaaaaggaaaggctttcgcg

SEQ ID NO: 54792 - DNA, 75 bp, synthetic construct
  source 1..75: mol_type = other DNA
atcataactggcagcaggcactgacaaaaacctccagcgaacgtcgggtggcggtagacattgaactgggcggct

SEQ ID NO: 54793 - DNA, 75 bp, synthetic construct
  source 1..75: mol_type = other DNA
tgccatctcactggcagatatccaaaaacacctggcgaaaatcatcattctggcaccgatggcggtgctgctgat

SEQ ID NO: 54794 - DNA, 75 bp, synthetic construct
  source 1..75: mol_type = other DNA
tttgtcaaaaattcagatagttcggcagtatgctgcttatttgattttgatgcattttctcgtttagctagtgaa

SEQ ID NO: 54795 - DNA, 75 bp, synthetic construct
  source 1..75: mol_type = other DNA
aaagatataaacatctgttagtgcaacatcattatatctcaggactcattgcaggagtgtgttatctttgccgaa

SEQ ID NO: 54796 - DNA, 75 bp, synthetic construct
  source 1..75: mol_type = other DNA
ttcgtctggccggtaacccgggaagggaaagtgcacctgacgccagctcagttatccatgctactggaggggatc

SEQ ID NO: 54797 - DNA, 75 bp, synthetic construct
  source 1..75: mol_type = other DNA
cgaccgttgcagcaatatatgggcttcattacccggtgcaggttacggtcagtatgaacataaaatcggtgacct

SEQ ID NO: 54798 - DNA, 75 bp, synthetic construct
  source 1..75: mol_type = other DNA
gttgttgccaatgatggttacgacacaaaagatgaatgggaactggctacgattttcaaaaagacatacacacaa

SEQ ID NO: 54799 - DNA, 75 bp, synthetic construct
  source 1..75: mol_type = other DNA
ctggctacgcagtacgtttcaactcgctgactaaagaacagcagcaggacgttattactcgtaccttcactcaat

SEQ ID NO: 54800 - DNA, 75 bp, synthetic construct
  source 1..75: mol_type = other DNA
cgtgttgcaggaaaaaatggattacccacatgggcactaatacctccaccatcacatgaagaacttattcagcag

SEQ ID NO: 54801 - DNA, 75 bp, synthetic construct
  source 1..75: mol_type = other DNA
ctgaaaccgaacaatagcaatcaattaagatatagcgcaaaacatatgcttaaaaaacatagatatctaaaagga

SEQ ID NO: 54802 - DNA, 75 bp, synthetic construct
  source 1..75: mol_type = other DNA
gtttatggaaaggttctcctggcatgtggcggataaggggttccgtatggtgaggtactacggtttcctgagtcc

SEQ ID NO: 54803 - DNA, 75 bp, synthetic construct
  source 1..75: mol_type = other DNA
aatgtaaacgcccatacattgtgccagtgacaaatgatgctcattgtccacgttgcagattatcttcaactgctt

SEQ ID NO: 54804 - DNA, 75 bp, synthetic construct
  source 1..75: mol_type = other DNA
tcagaaaaagaccttctaagaatcgactatgtgaagaaagtaagttgttcagaagaagcaaataatgtatataac

SEQ ID NO: 54805 - DNA, 75 bp, synthetic construct
  source 1..75: mol_type = other DNA
ctggctggagaagcagccggaaggggcagtacgtccggtggtgattgagtcggtgaccaaaatcatggcgtgcgg

SEQ ID NO: 54806 - DNA, 75 bp, synthetic construct
  source 1..75: mol_type = other DNA
ggtggaaagcgtccgggaaagcctgccggtggctgaacagcagcgcgttctggaacagaagatggcgatgttacc

SEQ ID NO: 54807 - DNA, 75 bp, synthetic construct
  source 1..75: mol_type = other DNA
cgcatgtaacaatgaaccatcgcaagacgatatatacaatgttttcaaaagtgttgtagatagaacaaatacaag

SEQ ID NO: 54808 - DNA, 75 bp, synthetic construct
  source 1..75: mol_type = other DNA
attgttcgtcgtgatgttcaggaatggcgtcgttttgtgctgaaagatcaggggttaacttctcatacctggaat

SEQ ID NO: 54809 - DNA, 75 bp, synthetic construct
  source 1..75: mol_type = other DNA
gaagaagttgtgtacgtcataacggagacggtgagaaagatggcgatgcaaatcacccggagagggatgtatcag

SEQ ID NO: 54810 - DNA, 75 bp, synthetic construct
  source 1..75: mol_type = other DNA
agccggagaagagagcgtggcacaggtcagcggggtacgggaacaggccatactgacagaggccattcgcagtga

SEQ ID NO: 54811 - DNA, 75 bp, synthetic construct
  source 1..75: mol_type = other DNA
cgacaacccggattgacaatgcaggcatcacaatcacaacacctgctgcgggcggtggtcaggggaatacggttt

SEQ ID NO: 54812 - DNA, 75 bp, synthetic construct
  source 1..75: mol_type = other DNA
tcgataagatcctgaatccgctggatgcccgctgtgccgcctgggatttatggaaggagtgtctgacacagccgg

SEQ ID NO: 54813 - DNA, 75 bp, synthetic construct
  source 1..75: mol_type = other DNA
tgagcagcagcgtgaggtgttcgagtttgtcctcagtagtgattacttctcaggaccaacatggatggcaatgtg

SEQ ID NO: 54814 - DNA, 75 bp, synthetic construct
  source 1..75: mol_type = other DNA
atgaaccgacacacacaaatccgtcagagcgtgctggcacgccttcgggaacagtgtggagacagcgccacgttt

SEQ ID NO: 54815 - DNA, 75 bp, synthetic construct
  source 1..75: mol_type = other DNA
tggatagaagaaaaccgtgctggcattgaggcattaaaccgttttgtagaagataccgggattttttcagatgat

SEQ ID NO: 54816 - DNA, 75 bp, synthetic construct
  source 1..75: mol_type = other DNA
aatcatcttctctccgtgccacgaacatgactgtgtcggctcaatggcgggtgtcacgtctgcatcgatgtttat

SEQ ID NO: 54817 - DNA, 75 bp, synthetic construct
  source 1..75: mol_type = other DNA
aaaatgcgacatctgaagttaaagggcagcgtttacgtaccagtattaacgtagaacacagtgcagagctggacg

SEQ ID NO: 54818 - DNA, 75 bp, synthetic construct
  source 1..75: mol_type = other DNA
caaacatcgcgcgcggtggttatgtgctgaaagactgtgccggtcagccggaactgatcttcatcgctaccggtt

SEQ ID NO: 54819 - DNA, 75 bp, synthetic construct
  source 1..75: mol_type = other DNA
aatcaggtggagagggatgtatcagcggttactgaaggttgacccgctgaagtgcatcctgtgcggaggtcagat

SEQ ID NO: 54820 - DNA, 75 bp, synthetic construct
  source 1..75: mol_type = other DNA
cgccacacatgtggcggtgtacttcggctcttacctgaaaaaaccgccggtgccgatgagccgtctggagcacta

SEQ ID NO: 54821 - DNA, 75 bp, synthetic construct
  source 1..75: mol_type = other DNA
aaactgcactgtttgccaatacccgtgaaatctcgctggagcgggcgctgctttataccgccagccatcggcaaa

SEQ ID NO: 54822 - DNA, 75 bp, synthetic construct
  source 1..75: mol_type = other DNA
atagaaaagctaattcagattgagcgcaacgtgaaagcgcggatacgcagggcgacaaaagcccgaactgaataa

SEQ ID NO: 54823 - DNA, 75 bp, synthetic construct
  source 1..75: mol_type = other DNA
atgcagcaacattgtcagcaacagccggagaatcacttttatcaggcagcgctgttactgctggaagcctcgcag

SEQ ID NO: 54824 - DNA, 75 bp, synthetic construct
  source 1..75: mol_type = other DNA
gtaactttttcagctgctcctgcgagccttactggagctcgcccagccccggggcaatttactgcaacagcgacg

SEQ ID NO: 54825 - DNA, 75 bp, synthetic construct
  source 1..75: mol_type = other DNA
tggctaagtggcataacattcctcagggggaagcgttaagtgaggagcaacaacgttatattgtgacggtaatct

SEQ ID NO: 54826 - DNA, 75 bp, synthetic construct
  source 1..75: mol_type = other DNA
ataactcactggtttccaacgcctttggttttttacgcctgccgatgaacttccagccgtatgacagcgatgctg

SEQ ID NO: 54827 - DNA, 75 bp, synthetic construct
  source 1..75: mol_type = other DNA
ttttttaccgatcaatttattgctgaatttagtccgcaggaatttgtggataattgtgagcaatatttaattaat

SEQ ID NO: 54828 - DNA, 75 bp, synthetic construct
  source 1..75: mol_type = other DNA
cgtggcgttactacaacgatcgcgatgtacgcacaatcgttgagctggggaaagccatagacttcgatgccagaa

SEQ ID NO: 54829 - DNA, 75 bp, synthetic construct
  source 1..75: mol_type = other DNA
gtaaactggtctatgaacagtattatggcgatgaagtggccctgttcgataaagacgatcggcaaagtaatcctc

SEQ ID NO: 54830 - DNA, 75 bp, synthetic construct
  source 1..75: mol_type = other DNA
caaaagagaataatctcagtccatctgaaatgttagtcaatgccgataaagcgttatatcaagccaaaagaaccg

SEQ ID NO: 54831 - DNA, 75 bp, synthetic construct
  source 1..75: mol_type = other DNA
gtgcaaaaccatcatcggtttcggttccccgaacaaagccggtacgcacgactcccacggtgcgccgctgggcga

SEQ ID NO: 54832 - DNA, 75 bp, synthetic construct
  source 1..75: mol_type = other DNA
catggttttctcctttaacttctcgccaatcgtctcttccttcgtggtttctaaacgtgaagagtatgagaaaga

SEQ ID NO: 54833 - DNA, 75 bp, synthetic construct
  source 1..75: mol_type = other DNA
tggaaggcatctcccacgaagtttgctctctggcgggtacgctgaagctgggtaaactgattgcgttctacgatg

SEQ ID NO: 54834 - DNA, 75 bp, synthetic construct
  source 1..75: mol_type = other DNA
accgcaatgcgtttcgaagcttacggctggcacgttattcgcgacatcgacggtcatgacgcggcatccatcaaa

SEQ ID NO: 54835 - DNA, 75 bp, synthetic construct
  source 1..75: mol_type = other DNA
gttctgtcatgctcgaaatgattgtgctgtcggccactgattcggttgtcgggatggtcaatccggtactccctg

SEQ ID NO: 54836 - DNA, 75 bp, synthetic construct
  source 1..75: mol_type = other DNA
tgacaggtttcaccctgcgccctgaccgggcggcgctggaaatcgccagccgcgtctataacggtaacgccacgc

SEQ ID NO: 54837 - DNA, 75 bp, synthetic construct
  source 1..75: mol_type = other DNA
tgttatccgcaccaccgagaacatgctgaaactggtgccggacagcctgcgtgaagcggcttatgcgctgggtac

SEQ ID NO: 54838 - DNA, 75 bp, synthetic construct
  source 1..75: mol_type = other DNA
atcatgctctccgaacagctatggttgttttacccgggctgtgcagtgctgtcatttggagcagctctggcaaca

SEQ ID NO: 54839 - DNA, 75 bp, synthetic construct
  source 1..75: mol_type = other DNA
ggcattatggcggggatttatctggctgaatatggtcgtaaatcctggctggcagaagtgattcgcttcattaac

SEQ ID NO: 54840 - DNA, 75 bp, synthetic construct
  source 1..75: mol_type = other DNA
atgaataagctggtttctgatggcagcgtcaaaaaaataaattatccggtgctgtatgagtccggaataacacct

SEQ ID NO: 54841 - DNA, 75 bp, synthetic construct
  source 1..75: mol_type = other DNA
atcacctgcgcagggtgcttcatgaggtcagtccttttgcacaggagcctgtggactgtgtgctgtgggtgaaag

SEQ ID NO: 54842 - DNA, 75 bp, synthetic construct
  source 1..75: mol_type = other DNA
cgacacccaccggagagggaaccacgtcagcccgtacttttgtccgctctcgtcgttgtgtactgacgaacggtt

SEQ ID NO: 54843 - DNA, 75 bp, synthetic construct
  source 1..75: mol_type = other DNA
gtacccgcgcgtatgcggagatctggctcgatcaggaaaaagtcgccaccaccgatgaagaaccgatcctcggtc

SEQ ID NO: 54844 - DNA, 75 bp, synthetic construct
  source 1..75: mol_type = other DNA
cgaaggtaaatcacaaatcgctcacggcgaaaccgtgcgtgaaaccgccaatatgatctccttctgcgctgacgc

SEQ ID NO: 54845 - DNA, 75 bp, synthetic construct
  source 1..75: mol_type = other DNA
cggcttcctgatccgcattattgagtggtggcagaccggagaaacaccgggcacatttcgcctggacatcggcgt

SEQ ID NO: 54846 - DNA, 75 bp, synthetic construct
  source 1..75: mol_type = other DNA
atgggcaaagagcgatgatattcaggcagcatttccacttcttaagtttaatttgaaagagaaacagaaaaaccg

SEQ ID NO: 54847 - DNA, 75 bp, synthetic construct
  source 1..75: mol_type = other DNA
aggttataagacgacttatcagtatcttgataataccgagccgagtcaggtcagtgtagggcgctggaatgacca

SEQ ID NO: 54848 - DNA, 75 bp, synthetic construct
  source 1..75: mol_type = other DNA
atccgtggatgggacgacgggcgcaagattgacgaggggcgtaagttgctttcatggcagaaaggtacactggtc

SEQ ID NO: 54849 - DNA, 75 bp, synthetic construct
  source 1..75: mol_type = other DNA
cgataagtaatttccagtccgtcgcttcgcaaatgcccgtgctgggcattctggcgttggctatggcggtgacca

SEQ ID NO: 54850 - DNA, 75 bp, synthetic construct
  source 1..75: mol_type = other DNA
aatacctcaaggagaacttcttcgtccggtaccgcaggttcgacagcttcactcatgtcaatcaacaactggagc

SEQ ID NO: 54851 - DNA, 75 bp, synthetic construct
  source 1..75: mol_type = other DNA
ttcgcttcgaaactcagcctggataccagctccagcatgactggggcgaagttgaggtggaggttgccgggcaac

SEQ ID NO: 54852 - DNA, 75 bp, synthetic construct
  source 1..75: mol_type = other DNA
ggtggtggtctggcgaacgccctggcgggtagcggcctgttaattttgtgggccacggtattcggtacgccgctg

SEQ ID NO: 54853 - DNA, 75 bp, synthetic construct
  source 1..75: mol_type = other DNA
atcgaagagattgtctttcgctgcagcggtattcgtaaccttattgtcactgtgaccgagcccacatttgaagct

SEQ ID NO: 54854 - DNA, 75 bp, synthetic construct
  source 1..75: mol_type = other DNA
gtagaggcatccggtgccagtctcgagaaggcgcggcacgaccagctgcttaccgcgcttcgtgcgctgctgtta

SEQ ID NO: 54855 - DNA, 75 bp, synthetic construct
  source 1..75: mol_type = other DNA
ctgaccgcttttgtctctatagcaatgctcgaaaaggtcgccagaacgggcgacagtatgtattaagcgcggtaa

SEQ ID NO: 54856 - DNA, 75 bp, synthetic construct
  source 1..75: mol_type = other DNA
ccgttggtgtgcctgttccgtggccttctgcaacaccgcctactggctggctgaaatgtaacggtgcggcttttt

SEQ ID NO: 54857 - DNA, 75 bp, synthetic construct
  source 1..75: mol_type = other DNA
taattggcaacatgattcgtcagtacttcagccaggaacgaccagaagaagagaccatacaggcccttaatcacc

SEQ ID NO: 54858 - DNA, 75 bp, synthetic construct
  source 1..75: mol_type = other DNA
ccggcgtgccgtgggtaaacgcactggataagcctgtctcactcgcccttaaatctggcaacttcggtgatgaag

SEQ ID NO: 54859 - DNA, 75 bp, synthetic construct
  source 1..75: mol_type = other DNA
gagccgacgttgagcgcacaacatggggcatttcagtcaataaacccaacgccgcgaaacagcaggggcaattgc

SEQ ID NO: 54860 - DNA, 75 bp, synthetic construct
  source 1..75: mol_type = other DNA
ggtttgggagaaggctctgcattaccggttggtgtgcctgttccgtggccttcagccactccgccaacggggtgg

SEQ ID NO: 54861 - DNA, 75 bp, synthetic construct
  source 1..75: mol_type = other DNA
aaaggcgtggatgacgtgacgttttacagcgccacacgcgaagaactaatcgacttcctgaatcacgggagatag

SEQ ID NO: 54862 - DNA, 75 bp, synthetic construct
  source 1..75: mol_type = other DNA
acattcgacgcatctcgctcagttcgcacagcatctgaaacccgctcccgtaacatcgcctttaattatattgtg

SEQ ID NO: 54863 - DNA, 75 bp, synthetic construct
  source 1..75: mol_type = other DNA
tttcgttgcgggcaatccggaggcggacccggagcaggagctgagtgaccgctgggtggtggagcagatgtcgca

SEQ ID NO: 54864 - DNA, 75 bp, synthetic construct
  source 1..75: mol_type = other DNA
gtatgtcgctggcgctgttcaccgaaatgacgccaccacccaatacggaaggcggtggtctggcgaacgccctgg

SEQ ID NO: 54865 - DNA, 75 bp, synthetic construct
  source 1..75: mol_type = other DNA
atatgtataaaaaaatccaagccgaagctgcggcaacagatatgaaaacactggaacggtttttgaagaagttcc

SEQ ID NO: 54866 - DNA, 75 bp, synthetic construct
  source 1..75: mol_type = other DNA
gagtaccagtattgtcggtgcagcagagacacgcccacgtaatatttcatttaattacattgtgagggctgcatg

SEQ ID NO: 54867 - DNA, 75 bp, synthetic construct
  source 1..75: mol_type = other DNA
atgggcggttgatattccaatcaacatcacgggaacgattataattccgccatgccagataaataacagtaatcc

SEQ ID NO: 54868 - DNA, 75 bp, synthetic construct
  source 1..75: mol_type = other DNA
cgctgtcattgttggcggttctggttttagcggggtgtagtagtcaggctccgcaaccgttgaaaaagggcgaaa

SEQ ID NO: 54869 - DNA, 75 bp, synthetic construct
  source 1..75: mol_type = other DNA
ggcctgggccggggtattgatcattaccctgtgcgtcctgctgctgaacattctggcgcgcgttgtttttgcgaa

SEQ ID NO: 54870 - DNA, 75 bp, synthetic construct
  source 1..75: mol_type = other DNA
ggtttttaggaatattgaaacttcagataagagtattaatttcaaagtgatagctgaactggctttcatgtcata

SEQ ID NO: 54871 - DNA, 75 bp, synthetic construct
  source 1..75: mol_type = other DNA
gcaggttaacccagctttccggcggccagcgccagcgtgcgtttctggcgatggtgctggcacaggataccccac

SEQ ID NO: 54872 - DNA, 75 bp, synthetic construct
  source 1..75: mol_type = other DNA
acccgattgacggcagtggctttgagatgaacggaaagggcagcagtgcccgcccgtcgctgacggtgtccaatc

SEQ ID NO: 54873 - DNA, 75 bp, synthetic construct
  source 1..75: mol_type = other DNA
gtggttctcctttgtttgcttttgatactgttcagaataaatgggtgctggttggtgttctcaccgcggggaatg

SEQ ID NO: 54874 - DNA, 75 bp, synthetic construct
  source 1..75: mol_type = other DNA
tggcgaatttcaggataccgtaatgatatcagtgatatgattaattgtacccaaaactgcgaaagatattataac

SEQ ID NO: 54875 - DNA, 75 bp, synthetic construct
  source 1..75: mol_type = other DNA
gccacggtggtccgccgccgggtgtatgcgcgttttctggatgcggtgaattttgtggcaggcaatcctgaggca

SEQ ID NO: 54876 - DNA, 75 bp, synthetic construct
  source 1..75: mol_type = other DNA
gttcgataaacccaccaccgatatccgtaaggacagatgcagcaagtgcatgcgcgggtgtgagatgcgcggcat

SEQ ID NO: 54877 - DNA, 75 bp, synthetic construct
  source 1..75: mol_type = other DNA
gtttaacagcaagtgtggttatctccagctctatattcgaaagccgcaaacatcagcatatcgttgatgcagtga

SEQ ID NO: 54878 - DNA, 75 bp, synthetic construct
  source 1..75: mol_type = other DNA
accgacagaaaacctgttatcggtcaacgaacaggaaaaaacgataaaacccactggattatttttatgaaatag

SEQ ID NO: 54879 - DNA, 75 bp, synthetic construct
  source 1..75: mol_type = other DNA
ccgacgcgaaaccaatcatcagccagcgcaccggtaagaacgataaaacacattggattatttttgtgaaggagg

SEQ ID NO: 54880 - DNA, 75 bp, synthetic construct
  source 1..75: mol_type = other DNA
gcctaccgcaagcaacttggtctgaaagatttttctccagaaagccaggatgctgtagcgctgcggcagattaaa

SEQ ID NO: 54881 - DNA, 75 bp, synthetic construct
  source 1..75: mol_type = other DNA
aggtgtacatgatgtaagccgcgcaacaagcctgacggcagcaaaagcgcaactagaattactggcacaggaact

SEQ ID NO: 54882 - DNA, 75 bp, synthetic construct
  source 1..75: mol_type = other DNA
ctggcggtgcgagcagagcgtgagcaactgaaggtggaactggcgaagctggaagttgagatggcagggtatttg

SEQ ID NO: 54883 - DNA, 75 bp, synthetic construct
  source 1..75: mol_type = other DNA
ttactaagcaattatttggtgtttgcaccggctttaaaatcactagacttatattttagctttggcccctggaaa

SEQ ID NO: 54884 - DNA, 75 bp, synthetic construct
  source 1..75: mol_type = other DNA
gaattatctctggctggcactgcatcgggtgtcattggtctgaatgggtatgtaacgattccgttaattatttca

SEQ ID NO: 54885 - DNA, 75 bp, synthetic construct
  source 1..75: mol_type = other DNA
ttgaccctattataaacgcggaattttccccgcagggcgtagcgctccgccagttcaccagccgctgggaaggtg

SEQ ID NO: 54886 - DNA, 75 bp, synthetic construct
  source 1..75: mol_type = other DNA
ggtaatttcgacattgggtctggtcattcaatcaataactatgaccaaattgtttctaaccaaccaggattttcc

SEQ ID NO: 54887 - DNA, 75 bp, synthetic construct
  source 1..75: mol_type = other DNA
tgaggacatgctcggcgaagcatggctggcaggtatgcttattgcagcagaaattatcagcattgaaccagcagg

SEQ ID NO: 54888 - DNA, 75 bp, synthetic construct
  source 1..75: mol_type = other DNA
aaacatttgctgaaatgttaggaataacagaaggtgagttaatctttgccattaagaaaactggcacattcaaaa

SEQ ID NO: 54889 - DNA, 75 bp, synthetic construct
  source 1..75: mol_type = other DNA
aacttaccaactattcttaccaccagttttgaaaccggtcctaacggcccattagttccagaactgaaagcacaa

SEQ ID NO: 54890 - DNA, 75 bp, synthetic construct
  source 1..75: mol_type = other DNA
ggatagtgggcgaactctgctttcagcgcaaggagatgctattcgaaacattactggcggttttggtcagttgcg

SEQ ID NO: 54891 - DNA, 75 bp, synthetic construct
  source 1..75: mol_type = other DNA
gcagatctggaaattgcaacggaggaagaaacctcattgctggaagcctggaaaaagtatcgggtgttgctgaac

SEQ ID NO: 54892 - DNA, 75 bp, synthetic construct
  source 1..75: mol_type = other DNA
atcacgtttaaacgccttgatctggtggagaggatgaatgatatcgtggcaaaacattttcctggagcgctacct

SEQ ID NO: 54893 - DNA, 75 bp, synthetic construct
  source 1..75: mol_type = other DNA
gcacgtttcgcctggatatcggcgtgcaggaccagggcatcactgaagatacctatctggaacttgagcggctga

SEQ ID NO: 54894 - DNA, 75 bp, synthetic construct
  source 1..75: mol_type = other DNA
tggttttgtctcgatggttgccggtgttgttctggtgcagtttcctgacctgtcactgcctgcggtgtgcggcat

SEQ ID NO: 54895 - DNA, 75 bp, synthetic construct
  source 1..75: mol_type = other DNA
gaagacataccgggtattgttgaatcgtgttaatacagcggtagcagcggatgttgagtggccagtcgccccaca

SEQ ID NO: 54896 - DNA, 75 bp, synthetic construct
  source 1..75: mol_type = other DNA
gttttccgtacccgctgcgcttcctgttcgccagcaagccggaggccatcggcccggtgctgggcatcgtgcatc

SEQ ID NO: 54897 - DNA, 75 bp, synthetic construct
  source 1..75: mol_type = other DNA
ccctgtttcactcgatagtgccttagacttatcggaagatgagttagagatgctgcgtttgtatcgcgcacttcc

SEQ ID NO: 54898 - DNA, 75 bp, synthetic construct
  source 1..75: mol_type = other DNA
gactaatgtctttgcttcaaaagatataaatggtgtaccgcgtacaatgtttaaaccagagaaaggtatcgaata

SEQ ID NO: 54899 - DNA, 75 bp, synthetic construct
  source 1..75: mol_type = other DNA
caccgaaaattattcaatatgggaatcagtaggctcgtttaagggggcagtggtgcctttgaatccctcaacgaa

SEQ ID NO: 54900 - DNA, 75 bp, synthetic construct
  source 1..75: mol_type = other DNA
cgctacttaacccgtttaccgtgtggtcgtctggagcaggagtttttgccagtggggattgcggaagaggtgctt

SEQ ID NO: 54901 - DNA, 75 bp, synthetic construct
  source 1..75: mol_type = other DNA
atctcactggttgatacactacagaaatgcagggaggccagcagcagtgaaacaataatcgcatcaacctatcac

SEQ ID NO: 54902 - DNA, 75 bp, synthetic construct
  source 1..75: mol_type = other DNA
taccgtgaaggcggaccgcttggtatggccagcagacgatgtggcatgcgtggtaaccgccagttgccacccggg

SEQ ID NO: 54903 - DNA, 75 bp, synthetic construct
  source 1..75: mol_type = other DNA
gcagtcagtgggcaaagaacctggaggagggcgatctcccggcgattagcgaagccaacatcctgagtacctttg

SEQ ID NO: 54904 - DNA, 75 bp, synthetic construct
  source 1..75: mol_type = other DNA
gcatttgctgccttatctcgcctgggcattttccgttgaccgctgggatcgcaactggccggaagagacaaagcg

SEQ ID NO: 54905 - DNA, 75 bp, synthetic construct
  source 1..75: mol_type = other DNA
aatgacagtatcagcccgatatttgacaaggagaaggagcagaggcgtctgcagacagtggggcttatcagtgat

SEQ ID NO: 54906 - DNA, 75 bp, synthetic construct
  source 1..75: mol_type = other DNA
ctggtgaagcatgacagatggggctacagcctgaactggggctggcggcgagatcagcttgccgatctggaacgg

SEQ ID NO: 54907 - DNA, 75 bp, synthetic construct
  source 1..75: mol_type = other DNA
atgggtaaaacggaaatcatcgccgaaaccggagccggtcagcatggcgtggcgtcggcccttgccagcgccctg

SEQ ID NO: 54908 - DNA, 75 bp, synthetic construct
  source 1..75: mol_type = other DNA
gacaccttaatggtcatataaaaaacctccgtttctggaacagagcattgtcagatacgcagcttaaggaatacg

SEQ ID NO: 54909 - DNA, 75 bp, synthetic construct
  source 1..75: mol_type = other DNA
gttttactggcgaatggttactggacgttggctgtggaaataccctcgatccgagccgcaaaagtgtgaaaaaaa

SEQ ID NO: 54910 - DNA, 75 bp, synthetic construct
  source 1..75: mol_type = other DNA
caccggctggcagaactgacaatgaacaaactttacgatcgcgtgccggcttccgtctggaaatatgtcacctga

SEQ ID NO: 54911 - DNA, 75 bp, synthetic construct
  source 1..75: mol_type = other DNA
gctcccgtgataagaccgaagaagtcatcgctgagaatccgggtaagaaactggttcctttctatacggttaaag

SEQ ID NO: 54912 - DNA, 75 bp, synthetic construct
  source 1..75: mol_type = other DNA
aatatcggtggtggtcagccgcagggcggttggggtcagcctcagcagccgcagggtggcaatcagttcagcggc

SEQ ID NO: 54913 - DNA, 75 bp, synthetic construct
  source 1..75: mol_type = other DNA
caaatatgcaagccaccagcgaaaatggttaatggaaaacgggcttccgttctataccaatcgtagtggcaaacc

SEQ ID NO: 54914 - DNA, 75 bp, synthetic construct
  source 1..75: mol_type = other DNA
tatctgggcaaaatcgtttcttacgctcagggcttctctcagctgcgtgctgcgtctgaagagtacaactgggat

SEQ ID NO: 54915 - DNA, 75 bp, synthetic construct
  source 1..75: mol_type = other DNA
cctgaaaaacgagaagaaagccttgatgcagcaactgctgaccgggaaacgtcgggtgaaagtggatgaggcggt

SEQ ID NO: 54916 - DNA, 75 bp, synthetic construct
  source 1..75: mol_type = other DNA
cctgaagaatgaggtgtcagtcaacacactaatgctgaatgcgtactatgacttccggaatgacagcgcattcac

SEQ ID NO: 54917 - DNA, 75 bp, synthetic construct
  source 1..75: mol_type = other DNA
gtcagccgctggagtttcggcgggaagggttgcaacatggggtgctggataagctgcgcagtggtaaatatccgc

SEQ ID NO: 54918 - DNA, 75 bp, synthetic construct
  source 1..75: mol_type = other DNA
aaaacaggcttttatgtgaccggtaaagctggtgcttcggttgtgactcagactgaccagcgcttccgtcaggac

SEQ ID NO: 54919 - DNA, 75 bp, synthetic construct
  source 1..75: mol_type = other DNA
aattgaacaaatcccgctggccgtagagtacatccacagggtagtgcttgaaggcgagtttatcggcaaacaaga

SEQ ID NO: 54920 - DNA, 75 bp, synthetic construct
  source 1..75: mol_type = other DNA
ttcggcgtgacctacactggtaactatgagttcccacaaccgctgcacgatgcgctggataaattccaggccgat

SEQ ID NO: 54921 - DNA, 75 bp, synthetic construct
  source 1..75: mol_type = other DNA
atgcgtgattttcagaatgcctttgatgctgccctcgccggggtggacagcacgattgttgaagtgatggggctc

SEQ ID NO: 54922 - DNA, 75 bp, synthetic construct
  source 1..75: mol_type = other DNA
agggcggtgataaaaacgatactgtatttggtgcaggccttgcggtgggctatgatttttatcaacattacaatg

SEQ ID NO: 54923 - DNA, 75 bp, synthetic construct
  source 1..75: mol_type = other DNA
caactgtaggggatattattctttatgaatatctcgaaccaagtggtttaaaaatcaatgacttggctgaaatgt

SEQ ID NO: 54924 - DNA, 75 bp, synthetic construct
  source 1..75: mol_type = other DNA
actggttgttaattgccagtgaattacctttcagcccaccagcagagggggaaacgctggcaacacatgcgccga

SEQ ID NO: 54925 - DNA, 75 bp, synthetic construct
  source 1..75: mol_type = other DNA
atgaagggaattaatttagttaaaatcaaattaaccttctctgatacatacctggtgacattttcccgtgtccgt

SEQ ID NO: 54926 - DNA, 75 bp, synthetic construct
  source 1..75: mol_type = other DNA
aaagcctccctgaaatatctcagcgatcacccgaaactgcagggtattgcccagcagaacagctttaaacacacc

SEQ ID NO: 54927 - DNA, 75 bp, synthetic construct
  source 1..75: mol_type = other DNA
agctgccggaagatgtgcgccgctggcttgaacgggcgctgactgaatccggcttcagcgggtataacgagctgg

SEQ ID NO: 54928 - DNA, 75 bp, synthetic construct
  source 1..75: mol_type = other DNA
cgcttgctgtagcaggtatgttttcagcccaggcactggctgatgggaacaaaacaggcttttatgtgaccggaa

SEQ ID NO: 54929 - DNA, 75 bp, synthetic construct
  source 1..75: mol_type = other DNA
agatttcccgcaccgaactcaggaacggagggctgacagagcctgcccgccgtgtggctgaccttctgaatatcg

SEQ ID NO: 54930 - DNA, 75 bp, synthetic construct
  source 1..75: mol_type = other DNA
tcatggatatgtttattgatggcgcgcgccgtggctttactatcgctaccaccaacctgctgccaaacgtggtga

SEQ ID NO: 54931 - DNA, 75 bp, synthetic construct
  source 1..75: mol_type = other DNA
tgcagctatttattgtaaacggtcgggctgacagggcgcaggtgcgtctggaatgcgacgatgaagccgtttttg

SEQ ID NO: 54932 - DNA, 75 bp, synthetic construct
  source 1..75: mol_type = other DNA
aggggaactgaaagaactgagcctgtcagagctggaagagcgggcgctgatgtatgcggcagacagtttccgtta

SEQ ID NO: 54933 - DNA, 75 bp, synthetic construct
  source 1..75: mol_type = other DNA
ctctgccgaaggaggtccgtcgctggcttgagcgggcactgacggagaataatttcaccggctatgcagagcttg

SEQ ID NO: 54934 - DNA, 75 bp, synthetic construct
  source 1..75: mol_type = other DNA
cgaagaactggtcagaacgggcggtctgtcaggcggtgcggctgacaccatcaaacgagacattctggggattag

SEQ ID NO: 54935 - DNA, 75 bp, synthetic construct
  source 1..75: mol_type = other DNA
agcgcacccgaacccttgttgaacactatgtcaacgagtgtgaatgccgcgacctcaccgatgtgaagcacgtcc

SEQ ID NO: 54936 - DNA, 75 bp, synthetic construct
  source 1..75: mol_type = other DNA
ggcgcatttgcctcacgccagagctatgttgccgcgcctgcgctgcgcagtgcggcactgttattaaaagagaaa

SEQ ID NO: 54937 - DNA, 75 bp, synthetic construct
  source 1..75: mol_type = other DNA
atgagctctttaacaatcttggtcgccgtataaacttttttgataaagaaattgacgctgtgttcaggcaatcag

SEQ ID NO: 54938 - DNA, 75 bp, synthetic construct
  source 1..75: mol_type = other DNA
actttcttttatgcatagtaaagtagatgctcatccatattatgatggtttggggaaaggagttaagaaatattt

SEQ ID NO: 54939 - DNA, 75 bp, synthetic construct
  source 1..75: mol_type = other DNA
ataacgaatcatcgcaggatatgcattatcaggtgataccagagggcattaaactgtcgtcacggataagaatat

SEQ ID NO: 54940 - DNA, 75 bp, synthetic construct
  source 1..75: mol_type = other DNA
ccggtgttaacggctgtgccagtaaaaaagagtggtgttgatctgcctgaggcggactttgaagcctgggccacg

SEQ ID NO: 54941 - DNA, 75 bp, synthetic construct
  source 1..75: mol_type = other DNA
atattcttaacttcgaaacagcaaccgagttactgcacgatagcggcgtaaaagtgaccactgtggtcattgatg

SEQ ID NO: 54942 - DNA, 75 bp, synthetic construct
  source 1..75: mol_type = other DNA
agtcgtacatattttctgcaatcaactacattggcaaagataacttcaccagtaacgatgtagcaaaaattctta

SEQ ID NO: 54943 - DNA, 75 bp, synthetic construct
  source 1..75: mol_type = other DNA
cggtaaaaatcagccagttaggttacagcgaaccgttgatgattaccctgttaaccaactttcttacagcttcat

SEQ ID NO: 54944 - DNA, 75 bp, synthetic construct
  source 1..75: mol_type = other DNA
atcgctggggggcatgggctgcagcagataacagtggtgtggactggcagccgatagcagcaggcttcaaggggc

SEQ ID NO: 54945 - DNA, 75 bp, synthetic construct
  source 1..75: mol_type = other DNA
gctgcacgatgcgctggataaattccaggccgacaccggtatcgacatcgacatgcacatcgacgccgccagcgg

SEQ ID NO: 54946 - DNA, 75 bp, synthetic construct
  source 1..75: mol_type = other DNA
ttgcagaatgaacggtataaaaacggggctgggatcacgccgggtgagcacattatcagtgccgattctgcgctc

SEQ ID NO: 54947 - DNA, 75 bp, synthetic construct
  source 1..75: mol_type = other DNA
gaaaagctgctcgtcaatagtcagcggcagaaaaaagcgctgatgcagcaattgcttaccgggaataaacggttg

SEQ ID NO: 54948 - DNA, 75 bp, synthetic construct
  source 1..75: mol_type = other DNA
gaagtggcagatgcgctggcattacgtcaaagcctgaacgatcaaatcagcgcccagcagcgttatctggcgtcg

SEQ ID NO: 54949 - DNA, 75 bp, synthetic construct
  source 1..75: mol_type = other DNA
gatattgttgtcggagatgtaaaggccttgcactgtcaagaacatcgcggcgtctgtctcaggaagtcaccgagc

SEQ ID NO: 54950 - DNA, 75 bp, synthetic construct
  source 1..75: mol_type = other DNA
tcgtggagattgccatgcgcaaggctggcaactctccggtaactccggatggttggataagctgtagtgagcgaa

SEQ ID NO: 54951 - DNA, 75 bp, synthetic construct
  source 1..75: mol_type = other DNA
cctgtacgacctctctgaacgtctgcgtctgcgcggctggcaggttccggccttcactctcggcggtgaagccac

SEQ ID NO: 54952 - DNA, 75 bp, synthetic construct
  source 1..75: mol_type = other DNA
gcgtggagatgtaacgattaagccgggcaatggtgttgagcaggtaacacactggatgcagctaccagaaccgcc

SEQ ID NO: 54953 - DNA, 75 bp, synthetic construct
  source 1..75: mol_type = other DNA
ctctttgcactctataccccggctgaaaaaccgctgtatgcccggaccagcactgcacaatgcctgctccgtgtg

SEQ ID NO: 54954 - DNA, 75 bp, synthetic construct
  source 1..75: mol_type = other DNA
atggagttattggattttatcaagagtttaaccacgaaactgaacaaatagccgtaacttgccggggtagcacat

SEQ ID NO: 54955 - DNA, 75 bp, synthetic construct
  source 1..75: mol_type = other DNA
tctcatggcaggtgagagctgaactccgacggagcctgaagtcgaaccgggattacaaaaaacttcgctggaacc

SEQ ID NO: 54956 - DNA, 75 bp, synthetic construct
  source 1..75: mol_type = other DNA
taaaggtgggagttcagcggacgctgcaaccaaattacttaaagcctatcgtgaacataatgctgatcaatacaa

SEQ ID NO: 54957 - DNA, 75 bp, synthetic construct
  source 1..75: mol_type = other DNA
ccagcgagagccgccggacgttgctggctgaagcagccatggcggtgcgggcgctgctgggccgaccgcgcgcct

SEQ ID NO: 54958 - DNA, 75 bp, synthetic construct
  source 1..75: mol_type = other DNA
agcacatgaaaaccggcaagccgattttctatacctccgctgactctgtgttccagattgcctgccacgaagaaa

SEQ ID NO: 54959 - DNA, 75 bp, synthetic construct
  source 1..75: mol_type = other DNA
caagagctgctggataaactggtcgaacgcgctaatctgccgggttacctcggtaactgccactcttccggtacg

SEQ ID NO: 54960 - DNA, 75 bp, synthetic construct
  source 1..75: mol_type = other DNA
cgacaaagaagaatatccgcaatctgcagcaatcgatctgcgttgcgtaaacatggttgccgatctgtggcatgc

SEQ ID NO: 54961 - DNA, 75 bp, synthetic construct
  source 1..75: mol_type = other DNA
ctggttgaaccgctaatatgctccgcacgctataccggaagcacctttcggcgcggagatgcaacgattaagccg

SEQ ID NO: 54962 - DNA, 75 bp, synthetic construct
  source 1..75: mol_type = other DNA
atggagagagtgtcaaaggagcaccggaaacccactctattgtaaacaagacatttttatcttttatattcaatg

SEQ ID NO: 54963 - DNA, 75 bp, synthetic construct
  source 1..75: mol_type = other DNA
tgatattaatgagccagacggaccaacgaatctttccgcatggatgagacttaagaataaagaattacctccttc

SEQ ID NO: 54964 - DNA, 75 bp, synthetic construct
  source 1..75: mol_type = other DNA
gcctgtcgtttctatcaacgtaccgatggcggcgaaacccggtacggtagggcgtattctaccaggaatggatgc

SEQ ID NO: 54965 - DNA, 75 bp, synthetic construct
  source 1..75: mol_type = other DNA
gaatgatggtgggcaatgcggaaatagtgccatttagcccgaggcgatacctgtatcatgcttatttagcctata

SEQ ID NO: 54966 - DNA, 75 bp, synthetic construct
  source 1..75: mol_type = other DNA
aatcggtagagcgggatatgaaggttgccgtggatcggtttaaccgcgagtacaacaaaaaagtgggagtggatt

SEQ ID NO: 54967 - DNA, 75 bp, synthetic construct
  source 1..75: mol_type = other DNA
tccgggacccgaatgaagtccgcattgaaattaacgggaatggtgcgtccagaccagcggaacgcattgaaaagg

SEQ ID NO: 54968 - DNA, 75 bp, synthetic construct
  source 1..75: mol_type = other DNA
ttacggcgaggcgctcgcggtcgatgccaacggccagcttctgtcccgctatgaaaatggtgtctggaaggtgct

SEQ ID NO: 54969 - DNA, 75 bp, synthetic construct
  source 1..75: mol_type = other DNA
agtatcggcgagcatgaaggcgctggaagacgcgagggaacgagcgttagtggtgggatattctctgattatcat

SEQ ID NO: 54970 - DNA, 75 bp, synthetic construct
  source 1..75: mol_type = other DNA
taaattcggtctggctccgctgggctgcggctgggttatctggcgtgacgaagaagcgctgccgcaggaactggt

SEQ ID NO: 54971 - DNA, 75 bp, synthetic construct
  source 1..75: mol_type = other DNA
acgatttcaccatcttcaaattcggcgacagtgaaatccgcgtcatcaacaaatgcggtgagccgtggtttgtag

SEQ ID NO: 54972 - DNA, 75 bp, synthetic construct
  source 1..75: mol_type = other DNA
ccttaaaaaggcacttgagtatcaacagagtaataataaggcaagttatgtgtatgggaatgatgcattagccta

SEQ ID NO: 54973 - DNA, 75 bp, synthetic construct
  source 1..75: mol_type = other DNA
tctacaagatgccgctcggcaagctgatgtgctgggtatgtatggcgttctttgtgttcgtggtcgtgttgctga

SEQ ID NO: 54974 - DNA, 75 bp, synthetic construct
  source 1..75: mol_type = other DNA
tatccccgctggcgcggggaacacatcaaactgctgcaacggccagcgcagccacgcggtttatccccgctggcg

SEQ ID NO: 54975 - DNA, 75 bp, synthetic construct
  source 1..75: mol_type = other DNA
gtgaaactttacgtgagttcaagcacagagtagcttttaactactctgtgaaaattgcccgtaacgttcgctccc

SEQ ID NO: 54976 - DNA, 75 bp, synthetic construct
  source 1..75: mol_type = other DNA
ctgcaaaagaaagcgggaaaatcacgtgtagtggcttataaatttacgtccggctcatttaattacacggcgtat

SEQ ID NO: 54977 - DNA, 75 bp, synthetic construct
  source 1..75: mol_type = other DNA
tattctctcgcctgtcaaagagaccggcacgctgctgggtagggtgacggcacaggctgctgccctgtgtgggct

SEQ ID NO: 54978 - DNA, 75 bp, synthetic construct
  source 1..75: mol_type = other DNA
ctcccgcccggcgggtcaggtaattgcacagtactatgaattcctgcgcctcggtcgtgaaggctataccaaagt

SEQ ID NO: 54979 - DNA, 75 bp, synthetic construct
  source 1..75: mol_type = other DNA
gagaattacttgagttctatcatactgcgtatatcgaactgggacgcaaaatccgtaaatactcaaaatcagagg

SEQ ID NO: 54980 - DNA, 75 bp, synthetic construct
  source 1..75: mol_type = other DNA
ttatcccgccggtcaacgcgcggcttatcgggcgttatcgcgattatcgtcgtcacggtgcgtcggctttcagcg

SEQ ID NO: 54981 - DNA, 75 bp, synthetic construct
  source 1..75: mol_type = other DNA
ctaacgcgatgattacgctggaaaacgtcaataaatggtatggacaattccatgttttgaaaaatataaatttaa

SEQ ID NO: 54982 - DNA, 75 bp, synthetic construct
  source 1..75: mol_type = other DNA
gcgacgtttgctgcatcgccggaaggaaaaacgctgcgaaccgatctgctgcaacgggcaatctacctgaaacaa

SEQ ID NO: 54983 - DNA, 75 bp, synthetic construct
  source 1..75: mol_type = other DNA
gtcaaccaacgtgttgcgtaagtccaacggtgagattgcaaaagacgtccagagtgcgacgctaacggtacgtaa

SEQ ID NO: 54984 - DNA, 75 bp, synthetic construct
  source 1..75: mol_type = other DNA
aagaaattcattctcggcagagacatacagggatgaatttaaccgttttataaagcgttttccggttattggtag

SEQ ID NO: 54985 - DNA, 75 bp, synthetic construct
  source 1..75: mol_type = other DNA
cgggtattggctatggccttggtaaaggactttcatggggtgttaatgcaggggcaaactggtggaaaggtggtt

SEQ ID NO: 54986 - DNA, 75 bp, synthetic construct
  source 1..75: mol_type = other DNA
tcaggtggcgctaattcagatatcacgacccgcactatcgaagcggtgcgtaaatcgaaggaagcgttagacctg

SEQ ID NO: 54987 - DNA, 75 bp, synthetic construct
  source 1..75: mol_type = other DNA
gctcacggataaaaaattcaaagaaatcgtggttgaaattgataatcgtaaaaaagtgcagcagcaattaatcag

SEQ ID NO: 54988 - DNA, 75 bp, synthetic construct
  source 1..75: mol_type = other DNA
taatctcgggttaatggcggcagagcgtgctggcgtgttgaaacgtcaggcgctgaaatatgcgttagggttgta

SEQ ID NO: 54989 - DNA, 75 bp, synthetic construct
  source 1..75: mol_type = other DNA
gcaggcgctgaaaaacagcctgccacagcgtgaggtgagcgtcctgcttactcaggtggaagtggacgctactga

SEQ ID NO: 54990 - DNA, 75 bp, synthetic construct
  source 1..75: mol_type = other DNA
tgtcgaaacgttaaatgctggcgaacgaccggtgatacacagtgacagaggtgggcattatcgctggccaggctg

SEQ ID NO: 54991 - DNA, 75 bp, synthetic construct
  source 1..75: mol_type = other DNA
gagatgccggatttgatatatgttttagtggcgtaatgggttttatcctttttgttgccattactaatggaatga

SEQ ID NO: 54992 - DNA, 75 bp, synthetic construct
  source 1..75: mol_type = other DNA
tgctgctttgtgcgttcgctgccggaactgctcatgctgaggaaaaggccgacccgaacgatccatgtgcaatgg

SEQ ID NO: 54993 - DNA, 75 bp, synthetic construct
  source 1..75: mol_type = other DNA
gctggggagctggttttacgacgaactgacgtatgaagagcggagcagtgacgggaaatggagtaagccgggtcg

SEQ ID NO: 54994 - DNA, 75 bp, synthetic construct
  source 1..75: mol_type = other DNA
aacgttatgtcgttaccagtgacagctttcagtttattctccacgagaaaaagagagctgaaagcggtaaaaacg

SEQ ID NO: 54995 - DNA, 75 bp, synthetic construct
  source 1..75: mol_type = other DNA
aagcgattcatggaagacaaggcgctgacaaagccactttcccgccttgtttataccaatctgaaaacagccagg

SEQ ID NO: 54996 - DNA, 75 bp, synthetic construct
  source 1..75: mol_type = other DNA
gtcataccggtccaaatctgtttgaccgcacccagcgtgttctatcttacggcgttctgtcctcacccgatgacc

SEQ ID NO: 54997 - DNA, 75 bp, synthetic construct
  source 1..75: mol_type = other DNA
aagaagttcattctcggcagagacatacagggatgaatttgaccgttttataaagcgttttccggttattggtag

SEQ ID NO: 54998 - DNA, 75 bp, synthetic construct
  source 1..75: mol_type = other DNA
gtcagacgacaggataacagcactggaagaagaaaacgcagaattaagacaaagattatctgcaattgaggcggc

SEQ ID NO: 54999 - DNA, 75 bp, synthetic construct
  source 1..75: mol_type = other DNA
tttatttggcagagctgcactgatggtcaggtatgaagatgaaaataaaacgccagtgacgcctgaacaaataat

SEQ ID NO: 55000 - DNA, 75 bp, synthetic construct
  source 1..75: mol_type = other DNA
gagaatatgataaaaggtggattgtcggggcgaagtgcctccggtaaaaataccaggacaagagccattacaggt

SEQ ID NO: 55001 - DNA, 75 bp, synthetic construct
  source 1..75: mol_type = other DNA
ttttgaaccggggattaatataggcgcttggcgcctcagaaatctaactacttggaataaatcatctggacaatc

SEQ ID NO: 55002 - DNA, 75 bp, synthetic construct
  source 1..75: mol_type = other DNA
actggcgacacatttcccggcaggactgccggttgtttgtaccaccagtgataaaccggtagaagctctgggggc

SEQ ID NO: 55003 - DNA, 75 bp, synthetic construct
  source 1..75: mol_type = other DNA
gcgaagggtatatccagttaaccgatccggatggcagcgtgtacatgatcaaggctaaatccatacagggtgtgg

SEQ ID NO: 55004 - DNA, 75 bp, synthetic construct
  source 1..75: mol_type = other DNA
atcgtcgcgctggtgggcggtacggtggaagaggctatcgatttctcccgtcagatgcgcgaaatcactctcggc

SEQ ID NO: 55005 - DNA, 75 bp, synthetic construct
  source 1..75: mol_type = other DNA
ttttccgccagactcgctacggcatggatggcaagccgatcaaagtgtggaagttccgttccatgaaagtgatgg

SEQ ID NO: 55006 - DNA, 75 bp, synthetic construct
  source 1..75: mol_type = other DNA
aattaaagacgaaaaaggttttaagacaggagaatccatagctattggtgccaaggcgaaagcaactaaagaaca

SEQ ID NO: 55007 - DNA, 75 bp, synthetic construct
  source 1..75: mol_type = other DNA
gtactgtccacaccgacggaaacggatggtgccgtttttccggggcgcatcatgctggctaatacctgcacctgg

SEQ ID NO: 55008 - DNA, 75 bp, synthetic construct
  source 1..75: mol_type = other DNA
ctgaaacaaaaacttcgccataacctggaagcgcgtcttgatgcagaggttgatgccattctggatgagctgctt

SEQ ID NO: 55009 - DNA, 75 bp, synthetic construct
  source 1..75: mol_type = other DNA
cggatgcgcttgccgttctgcatggttacgaaaagatccgctggccctccgcaccggactgggcacagcgggaaa

SEQ ID NO: 55010 - DNA, 75 bp, synthetic construct
  source 1..75: mol_type = other DNA
tacgtcttcgcagggaagggcatattaacgggaaggaagttcctgaaattatcctgcttaattcacatgatggtt

SEQ ID NO: 55011 - DNA, 75 bp, synthetic construct
  source 1..75: mol_type = other DNA
gaaacttttggtggtcaggtatggataaacaataccactcaaaataatggtatggtctatatggtacctgcacct

SEQ ID NO: 55012 - DNA, 75 bp, synthetic construct
  source 1..75: mol_type = other DNA
aaaacagcagtcaagccagaatggtttgagcgtcacaagattgaattaggttattggggtgaggaggttttatga

SEQ ID NO: 55013 - DNA, 75 bp, synthetic construct
  source 1..75: mol_type = other DNA
attcgtcaggtatccgccgaatacggtcttaccgctgataaaggctacaccgtcgccgatccgaaccttgacgag

SEQ ID NO: 55014 - DNA, 75 bp, synthetic construct
  source 1..75: mol_type = other DNA
atcgacctgcgttgcgtaaacatggttgccgatctgtggcatgcgcctgcgccgaaaaatggtcaggccgttggc

SEQ ID NO: 55015 - DNA, 75 bp, synthetic construct
  source 1..75: mol_type = other DNA
tggatgccatgaccggctaccgtaatgaaccggatccctttaaagccagtgaggcggcgtatctactttgcccac

SEQ ID NO: 55016 - DNA, 75 bp, synthetic construct
  source 1..75: mol_type = other DNA
tcctgcagaaaaagcaggcgctgacggaggaatttgccgaaatagaacgtggccttgcagaagagctgcggctag

SEQ ID NO: 55017 - DNA, 75 bp, synthetic construct
  source 1..75: mol_type = other DNA
cggtcgttctgtagggtggctgctgtccgaggttatggaatgggttaaaagccgggatcgcattaattcaggtaa

SEQ ID NO: 55018 - DNA, 75 bp, synthetic construct
  source 1..75: mol_type = other DNA
aaagtaagtggcaggcagaggaagtgctgcgtgaatggtataacaaagcaccaacagaacgttcattaactatca

SEQ ID NO: 55019 - DNA, 75 bp, synthetic construct
  source 1..75: mol_type = other DNA
gatgcaccggaaaagaaacagccctttggacgctggtcagccactcagctgaaggacctggtggccggaaagccc

SEQ ID NO: 55020 - DNA, 75 bp, synthetic construct
  source 1..75: mol_type = other DNA
ttcgtcgtaaccgtgagctttctgccgaaggctttaacttcattggtaccggtgtctccggtggtgaagaaggcg

SEQ ID NO: 55021 - DNA, 75 bp, synthetic construct
  source 1..75: mol_type = other DNA
agcgtctgacgagtaccactgggatctgaattacggtgagatcgcgaagattttccgtgccggctgcattattcg

SEQ ID NO: 55022 - DNA, 75 bp, synthetic construct
  source 1..75: mol_type = other DNA
cactggtgccggtttaataaaaattatccggtaaacattaaccacgtcattcactattcagatcacaaagcggtg

SEQ ID NO: 55023 - DNA, 75 bp, synthetic construct
  source 1..75: mol_type = other DNA
taaaggcgatatcatcattgatggtggtaataccttcttccaggacaccattcgtcgtaaccgcgagctttctgc

SEQ ID NO: 55024 - DNA, 75 bp, synthetic construct
  source 1..75: mol_type = other DNA
gtaaaaaaagagctgggtgaaaccagtgcgcttgctgatttgatgtccgggaaagtcagtcagtctttcagaaaa

SEQ ID NO: 55025 - DNA, 75 bp, synthetic construct
  source 1..75: mol_type = other DNA
agtgatgctgagccggtaatgctggagcaaatcagccgcatttcacagcaaattggctactacctgcatcgtgcc

SEQ ID NO: 55026 - DNA, 75 bp, synthetic construct
  source 1..75: mol_type = other DNA
taagctgttgtgcagcagggaaagataaaacataccacatcatttcatcggataagggatatgacggtgttatca

SEQ ID NO: 55027 - DNA, 75 bp, synthetic construct
  source 1..75: mol_type = other DNA
ggcggcgcgcggacagcttgacctgcattaccagccgctggtcgatctgcgcgatcaccggatcgctggcgcgga

SEQ ID NO: 55028 - DNA, 75 bp, synthetic construct
  source 1..75: mol_type = other DNA
ccggtgaacctgaccgaaataaaacaagcggtcaacagactacattctgagttgggaatgggatttgaagagcgg

SEQ ID NO: 55029 - DNA, 75 bp, synthetic construct
  source 1..75: mol_type = other DNA
tcgttggctcaattacttagaatcaaaaaatgcattagttagaatccccgttgctggtaaggtttgtgcgtatgc

SEQ ID NO: 55030 - DNA, 75 bp, synthetic construct
  source 1..75: mol_type = other DNA
tgacagcaatgtatggtatgccatggaatctgacaacatttgtaggattccaaggctctgaacattacaattctg

SEQ ID NO: 55031 - DNA, 75 bp, synthetic construct
  source 1..75: mol_type = other DNA
atgcattctgtcgaaaaggatattaatatcacgccatataagaaagatgcaaaaaaactaaaacatacgtctgtg

SEQ ID NO: 55032 - DNA, 75 bp, synthetic construct
  source 1..75: mol_type = other DNA
gcttgctctggcatttgtgttgttctacgaagcaatcaatggttttcatgacacggcgaatgcggtggcagccgt

SEQ ID NO: 55033 - DNA, 75 bp, synthetic construct
  source 1..75: mol_type = other DNA
tccgtttatcgagaaagtacagccaatgtacgcaaacttcgctaaggacaacccagcccttgccccaatgctggc

SEQ ID NO: 55034 - DNA, 75 bp, synthetic construct
  source 1..75: mol_type = other DNA
atgaaaataaaagtatccgctggcattatcggtgctgttcttatgttatccgaaagccagtcctgggcagtgaca

SEQ ID NO: 55035 - DNA, 75 bp, synthetic construct
  source 1..75: mol_type = other DNA
cgcaactcaaatcgaagaataaaaaacaaatagcaaaagaatgtatgtcttcatggagtggtgcagaaaatgata

SEQ ID NO: 55036 - DNA, 75 bp, synthetic construct
  source 1..75: mol_type = other DNA
acaaacctggaaagtggaacataaattatcggatattctactgttgactatttgtgccgttatttctggtgcaga

SEQ ID NO: 55037 - DNA, 75 bp, synthetic construct
  source 1..75: mol_type = other DNA
atcggttttcggcacattgaaaaaactaggccactggtcagcaccaaatcctctcgccgggctgccaacatttaa

SEQ ID NO: 55038 - DNA, 75 bp, synthetic construct
  source 1..75: mol_type = other DNA
atgtccaagcaacagatcggcgtcgtcggcatggcagtgatggggcgcaacctggcgctcaacatcgagagccgt

SEQ ID NO: 55039 - DNA, 75 bp, synthetic construct
  source 1..75: mol_type = other DNA
atcaggtggttatagtgatgacctacaagcaagccctgcgcgtcgccgcacgtgagtcgaaagccgtccgtcgtt

SEQ ID NO: 55040 - DNA, 75 bp, synthetic construct
  source 1..75: mol_type = other DNA
gataaggtgcgccagcttttcgatacggcctcgcaggtctgcgaaattgtcgaaagtgccaggcagtgtatgcag

SEQ ID NO: 55041 - DNA, 75 bp, synthetic construct
  source 1..75: mol_type = other DNA
aaataagactggtgaaacggaaaacgcttatagtgacatatataccagaaaaaatattgatggtactaaagatac

SEQ ID NO: 55042 - DNA, 75 bp, synthetic construct
  source 1..75: mol_type = other DNA
tttggtgggcttggcgcgtcacatattaatgactcagggttctggattgtgaccaaatatctggggttgtcggta

SEQ ID NO: 55043 - DNA, 75 bp, synthetic construct
  source 1..75: mol_type = other DNA
gtcaccgcgggtggtactctgggaaatcgacctgacggtgcagggtggtgagcggtattttttctgtaatgagct

SEQ ID NO: 55044 - DNA, 75 bp, synthetic construct
  source 1..75: mol_type = other DNA
ttaccgccataatcgcgggcgcacgcacgtcagcgcagaggggcaggcataccgcgataacgtcgcccgaatcat

SEQ ID NO: 55045 - DNA, 75 bp, synthetic construct
  source 1..75: mol_type = other DNA
aaggtcctgactggtccgaaagcgcaccctgcgggtgacaaagttgagtttattgagaaagtacgccgtgcgctg

SEQ ID NO: 55046 - DNA, 75 bp, synthetic construct
  source 1..75: mol_type = other DNA
cgccccggtcagttgtttatggacccgaaacgcatgattgaagcctgtgacgaaaacaccatcggcgtggtgccg

SEQ ID NO: 55047 - DNA, 75 bp, synthetic construct
  source 1..75: mol_type = other DNA
ggtaccagtcttgttatgaccggcagttgcggtaccgggaaaaatcatctggcggtatcaatggcaaaacacatc

SEQ ID NO: 55048 - DNA, 75 bp, synthetic construct
  source 1..75: mol_type = other DNA
ttgcggcctgtcgccgctatgcggagaactggccagatatgctggagaacggtaccagtcttgttatgaccggca

SEQ ID NO: 55049 - DNA, 75 bp, synthetic construct
  source 1..75: mol_type = other DNA
tgattggcaaaatctggccgggatttttaactctcggtggtgatttcactctgttaggcctttctctaccgggct

SEQ ID NO: 55050 - DNA, 75 bp, synthetic construct
  source 1..75: mol_type = other DNA
tgctagatgcctgcgctgattctcaaaaccccagtctgcttttgattgcaaaaatatgcctggccaccggcgcac

SEQ ID NO: 55051 - DNA, 75 bp, synthetic construct
  source 1..75: mol_type = other DNA
gactgagcggcttccgcttcttcgcccggatgcgccgaacctgacatggtcgatggattttgtcatggatgcact

SEQ ID NO: 55052 - DNA, 75 bp, synthetic construct
  source 1..75: mol_type = other DNA
agttaaacgagctggtatcgacttgccagagggacaatgtacccacgtcttgcgccatacattcgccagttactt

SEQ ID NO: 55053 - DNA, 75 bp, synthetic construct
  source 1..75: mol_type = other DNA
aattattttcagggatacggcacattgctattaatattttgacgaatgataaggtattcaaggcagggttaagac

SEQ ID NO: 55054 - DNA, 75 bp, synthetic construct
  source 1..75: mol_type = other DNA
ataatctgcaaaccgttctcggttatgacttgttagccggtcagcgggtattgcgtgagcaggttgcccgcctga

SEQ ID NO: 55055 - DNA, 75 bp, synthetic construct
  source 1..75: mol_type = other DNA
ataacctttcggtttacgccagctatgcgtacgtcaatgcggtgatccgtgagaaaggcgacacctatggcaatc

SEQ ID NO: 55056 - DNA, 75 bp, synthetic construct
  source 1..75: mol_type = other DNA
gtacgatcgcgatacccgttccggcaccgaagcccacgcttggtatatcgatgatcgtattgatatcagcaactg

SEQ ID NO: 55057 - DNA, 75 bp, synthetic construct
  source 1..75: mol_type = other DNA
ggaagcacgccagcaatccccggctggctgcgtgatggtattcgccgcccgtattcgtcagggggggtgccatgc

SEQ ID NO: 55058 - DNA, 75 bp, synthetic construct
  source 1..75: mol_type = other DNA
ttcaccatcgcaattttccctgatgtcatctgtgactgagcaaggaataaatccttttgcttactggattgcttt

SEQ ID NO: 55059 - DNA, 75 bp, synthetic construct
  source 1..75: mol_type = other DNA
ggaagcgcgtcagcaatctcctgatggctgcgtgatggtattcgctgcccgtattcgccagggggaacaccatga

SEQ ID NO: 55060 - DNA, 75 bp, synthetic construct
  source 1..75: mol_type = other DNA
gaaatgcggcggcgacctgaaggtgatgagtgaaaccgtctcagagcaactggagataatccgcagcgcctttaa

SEQ ID NO: 55061 - DNA, 75 bp, synthetic construct
  source 1..75: mol_type = other DNA
cctatttccctcacgcgtgcattgggggctgatattgtgatagcggtcgacctgcagcacgatgctcatttgatg

SEQ ID NO: 55062 - DNA, 75 bp, synthetic construct
  source 1..75: mol_type = other DNA
gactggctgcgggcagagatgcagggggagattgtggcactggtccacagtcatcccggtggtctgccctggctg

SEQ ID NO: 55063 - DNA, 75 bp, synthetic construct
  source 1..75: mol_type = other DNA
tgtggctggtggcataaatgagcagttcttcctggagcagcttgaggcgctgggatataccggcgtgacgatcga

SEQ ID NO: 55064 - DNA, 75 bp, synthetic construct
  source 1..75: mol_type = other DNA
ttaccgctggcagcaggcttcggagcgtatggccgaacggctgggggagatacagaaacgggtaatcactgtctg

SEQ ID NO: 55065 - DNA, 75 bp, synthetic construct
  source 1..75: mol_type = other DNA
acggggataccaggtaacccgcaggggcgcggggtgattgaacgggcaaacaaaggaatacccaaagacgtggct

SEQ ID NO: 55066 - DNA, 75 bp, synthetic construct
  source 1..75: mol_type = other DNA
cggtagtgataatattacggtaactaaaaatctgaccggtaatatttctgttggtgataatgccgataccttaac

SEQ ID NO: 55067 - DNA, 75 bp, synthetic construct
  source 1..75: mol_type = other DNA
acatacgctaatgaccgaaaaatccgacaagatgttcacttctcggcggcaaatgttgttccaacagcaaatgaa

SEQ ID NO: 55068 - DNA, 75 bp, synthetic construct
  source 1..75: mol_type = other DNA
ccttcaggcaacaatgcatggactgccagttgcgacacgaccgaagatcaaaatggttcaattacagtttacgcc

SEQ ID NO: 55069 - DNA, 75 bp, synthetic construct
  source 1..75: mol_type = other DNA
aaggtgaaatcaacgaactggtgaacctgcctgatgtcgtggggatggagattgccataaatggtgaggttttct

SEQ ID NO: 55070 - DNA, 75 bp, synthetic construct
  source 1..75: mol_type = other DNA
ggaagcacgccagcaatccccagttggctgcgtgatggtattcgccgcccgtattcgtcagggggtggaacatgt

SEQ ID NO: 55071 - DNA, 75 bp, synthetic construct
  source 1..75: mol_type = other DNA
agaccgcaaaaccaaaagataaaacctacaaaatggccgatggcggcggtttgtaccttgaggtttcggccaaag

SEQ ID NO: 55072 - DNA, 75 bp, synthetic construct
  source 1..75: mol_type = other DNA
cttgagctttatatcttccctcatattggttcgtccgatattcgtctactcaaaaccagccacctgttagcccca

SEQ ID NO: 55073 - DNA, 75 bp, synthetic construct
  source 1..75: mol_type = other DNA
gacttctggccccatggagggagtggttaaaagagcaacgagaaagtggtaacttcggcgcgtggctgcaaggat

SEQ ID NO: 55074 - DNA, 75 bp, synthetic construct
  source 1..75: mol_type = other DNA
acgtaagctgaggaaaaagctacaacgcattgaaatggagaatgaaatattaaaaaaggcggcgtacttcgcaaa

SEQ ID NO: 55075 - DNA, 75 bp, synthetic construct
  source 1..75: mol_type = other DNA
aggattaccggacgatgtcagggataccatcaccgtacttttcaccgcaaaaagaggtgactggtgtggcttctg

SEQ ID NO: 55076 - DNA, 75 bp, synthetic construct
  source 1..75: mol_type = other DNA
aaagcgacgttattgcagaattaagccgccgtttcagctgcacgctggagcactggtatgccgaacagggctgtg

SEQ ID NO: 55077 - DNA, 75 bp, synthetic construct
  source 1..75: mol_type = other DNA
atgccaaactggtgctcgaatcgtatgtatttttctggtgaaccagcacagatcgctgagattaaacgactggcc

SEQ ID NO: 55078 - DNA, 75 bp, synthetic construct
  source 1..75: mol_type = other DNA
atttctgtggctggcagttgtatgagcgcggagagctcgttgatgtgctgtggggggaactggaatggtcttccc

SEQ ID NO: 55079 - DNA, 75 bp, synthetic construct
  source 1..75: mol_type = other DNA
tggaggcaacgggtttttaccgtgtcccactgacagaggcgcagcctggcgacgtgctgctgtgctgttttggtt

SEQ ID NO: 55080 - DNA, 75 bp, synthetic construct
  source 1..75: mol_type = other DNA
cgcttaccaatttgagtggaaaggatgtagctggtcttctcacataccttggtttgggagaagccagatatgtca

SEQ ID NO: 55081 - DNA, 75 bp, synthetic construct
  source 1..75: mol_type = other DNA
atgaacgacagattacgctttgaagtgaacgataaccaggggcgtttcgtatttccggatatctggtttggccca

SEQ ID NO: 55082 - DNA, 75 bp, synthetic construct
  source 1..75: mol_type = other DNA
tctgaacggggaacatgttaaggccgccacagcttttcgccatggctttgccacaaacacttacatcgcagaaat

SEQ ID NO: 55083 - DNA, 75 bp, synthetic construct
  source 1..75: mol_type = other DNA
gagggggcggtcatccatattgtgccgcgactggccggggccggaaagggtggactgcagattgtgctgggggcg

SEQ ID NO: 55084 - DNA, 75 bp, synthetic construct
  source 1..75: mol_type = other DNA
ggaagcacgccagcaatctcctgatggctgcgtgatggtattcgccgcccgtattcgccaggaggtggaacatgt

SEQ ID NO: 55085 - DNA, 75 bp, synthetic construct
  source 1..75: mol_type = other DNA
ccacagtcatcccggtggactgccctggctgagcgaggcggaccggcggctgcagataaagagtgccctgccctg

SEQ ID NO: 55086 - DNA, 75 bp, synthetic construct
  source 1..75: mol_type = other DNA
cgcccctgcccggataatccggaaaaatcccttgccatccagtctgaaatcgttcggattctggataagtttact

SEQ ID NO: 55087 - DNA, 75 bp, synthetic construct
  source 1..75: mol_type = other DNA
atgcgaaagtattttaagacagcaggagaagttgcgtgaaagaattgatgagacgctttctgagaaaattgtaca

SEQ ID NO: 55088 - DNA, 75 bp, synthetic construct
  source 1..75: mol_type = other DNA
tgccgtagtgctggcaacccgcaagtatgtggatgacaaaatatcagagcacgaacagtcacgacgtcacccgga

SEQ ID NO: 55089 - DNA, 75 bp, synthetic construct
  source 1..75: mol_type = other DNA
gaaaacagacagcgcaaaaagcaggggctggataccctgcgtattttcatgaaaggagatcactcaataacttcc

SEQ ID NO: 55090 - DNA, 75 bp, synthetic construct
  source 1..75: mol_type = other DNA
gccatcgcaccagcatagtgaggagctcattgaatttgccattgattacctgaagaacaataaaaagcaggggct

SEQ ID NO: 55091 - DNA, 75 bp, synthetic construct
  source 1..75: mol_type = other DNA
ccgtttgttcatatttaaacatcttgtcaaagccggggaacaagggttgccggtcggtgagttgcaaaagcagct

SEQ ID NO: 55092 - DNA, 75 bp, synthetic construct
  source 1..75: mol_type = other DNA
gtgatagatatgccggcagggcggggtcatgtcaccctgacgtttaatgtgtcgtcggccggtgcgaacaactgg

SEQ ID NO: 55093 - DNA, 75 bp, synthetic construct
  source 1..75: mol_type = other DNA
ttaaagggataaataattacccggataagattactgttactgtggtactggaaattggtgggtatccgtcactgt

SEQ ID NO: 55094 - DNA, 75 bp, synthetic construct
  source 1..75: mol_type = other DNA
gatacagagggcaatgcgatagccaacactgaagtaacatttactctgccggaagatgtgaaggcgaacttcacg

SEQ ID NO: 55095 - DNA, 75 bp, synthetic construct
  source 1..75: mol_type = other DNA
gtacttttcctcactggataacatgattgcccaggggaacccgatgccggtgccttacggggaaatgctggttgg

SEQ ID NO: 55096 - DNA, 75 bp, synthetic construct
  source 1..75: mol_type = other DNA
cttttattgtgacaagcgatgactggaatatcacgatcagtgaagatggaaaagtaacaccagcatcgcaccagc

SEQ ID NO: 55097 - DNA, 75 bp, synthetic construct
  source 1..75: mol_type = other DNA
gccagcgcacaggccggggtatctgctgtggcggcccttcccggtgataccctcgctgctgcactgatgctgaaa

SEQ ID NO: 55098 - DNA, 75 bp, synthetic construct
  source 1..75: mol_type = other DNA
atgaaaacaatgactcatggaaagtctgcccggtagcaagattgatcagagatggtcagaatgcgtggcgacagg

SEQ ID NO: 55099 - DNA, 75 bp, synthetic construct
  source 1..75: mol_type = other DNA
ggctgatttctggctttcagtgcgctcttccatgcccgggcatgaactgcagacgaagtttccgcagctatgcaa

SEQ ID NO: 55100 - DNA, 75 bp, synthetic construct
  source 1..75: mol_type = other DNA
ttcgaagctccaggagcatgcagcactggtctacaaaatcttttgcgctccagaaaagagtgacgcccgcgagtg

SEQ ID NO: 55101 - DNA, 75 bp, synthetic construct
  source 1..75: mol_type = other DNA
gtcaatcactgcccttgaaggtgaaattaggcaagccactcaggttattcatgagcttgaaggtcaaagtaacga

SEQ ID NO: 55102 - DNA, 75 bp, synthetic construct
  source 1..75: mol_type = other DNA
tttatggggggaaccctcgctgaagtctttggcattgttttagtgatggcacgctacctgttctccaagcacgtc

SEQ ID NO: 55103 - DNA, 75 bp, synthetic construct
  source 1..75: mol_type = other DNA
ttaaaagcaacaaaaatgatttcgtcgatgccgaggctatctgtgaagcagcgtcgcgtccatcgatgcgttttg

SEQ ID NO: 55104 - DNA, 75 bp, synthetic construct
  source 1..75: mol_type = other DNA
aggtggagtatgtggctggtattctgaagcaatctcgccatctggatgacatcgaggcaagggagtggctgaaaa

SEQ ID NO: 55105 - DNA, 75 bp, synthetic construct
  source 1..75: mol_type = other DNA
ctacattccgaccgacatcacgttcacaccggcactgtttgccgctctcgatgtgtctgaggtggcggtggcttc

SEQ ID NO: 55106 - DNA, 75 bp, synthetic construct
  source 1..75: mol_type = other DNA
cggaatatgacccgcttatcgggtgctacattccgaccgacatcacgttcacaccggctctgtttgctgcccttg

SEQ ID NO: 55107 - DNA, 75 bp, synthetic construct
  source 1..75: mol_type = other DNA
ctggcaaacccggccctgctgacaaaagccggtccggaagatgacttcagtcttctgattccgtccgttggtggg

SEQ ID NO: 55108 - DNA, 75 bp, synthetic construct
  source 1..75: mol_type = other DNA
tacttgaacaatggcgcggaagatgggtactgggatatcgaaatgtatgttgcggtgcagccaaaacatcactaa

SEQ ID NO: 55109 - DNA, 75 bp, synthetic construct
  source 1..75: mol_type = other DNA
ttctggctggcgaaggcaacaaagcgttcacctctgaagaattcactcacttcctggaagaactgaccaaacagt

SEQ ID NO: 55110 - DNA, 75 bp, synthetic construct
  source 1..75: mol_type = other DNA
tgcagataaaaagcgcactgccctggtggctggtcagccggggtgacattcacaaattccgctgcgttccgcacc

SEQ ID NO: 55111 - DNA, 75 bp, synthetic construct
  source 1..75: mol_type = other DNA
aatttttcaaagccgtactacgcctgattttttgcccaaacgtggctgaactgcgcccgttcacgattcaggacg

SEQ ID NO: 55112 - DNA, 75 bp, synthetic construct
  source 1..75: mol_type = other DNA
ttacctgaaccagaaaagtattgaatggaccacactactcgaaaaagatgatattttcagagaggttaaggccag

SEQ ID NO: 55113 - DNA, 75 bp, synthetic construct
  source 1..75: mol_type = other DNA
ccccgggaggccaggtcgttaatcgaacaggctgaaaaacggcagaaggatgcgcagaacgcagacaagaaggcc

SEQ ID NO: 55114 - DNA, 75 bp, synthetic construct
  source 1..75: mol_type = other DNA
cgctggcatcgatcatgccgcgtaatgaacaggaaacagatgctgtagtggaccctgtaatcgctgaaatgaatg

SEQ ID NO: 55115 - DNA, 75 bp, synthetic construct
  source 1..75: mol_type = other DNA
tgccgggcagtggcgaatggggaactcagcgtgaagcgctggcattcgaacaagcagctgtcgccgcagaaactg

SEQ ID NO: 55116 - DNA, 75 bp, synthetic construct
  source 1..75: mol_type = other DNA
tggtcgctggttataaccacggctggttaagtatttcgtttgtcgatttctggtttaaaaatctcaatctgaggg

SEQ ID NO: 55117 - DNA, 75 bp, synthetic construct
  source 1..75: mol_type = other DNA
ccgtaattttagaggcgcaggatgtgttgataacctacaaaggaaagctaccgggaagaattactgatgctctga

SEQ ID NO: 55118 - DNA, 75 bp, synthetic construct
  source 1..75: mol_type = other DNA
aaacgccgcgatgagcagtttgcggcgttttacgattattgcattgaagttactcgcaggaattttgtgaagatt

SEQ ID NO: 55119 - DNA, 75 bp, synthetic construct
  source 1..75: mol_type = other DNA
atgaaccatgaagaaatgaatcagcgcttcagtcgcctggaaaatgaaattgctgaactgaataaaaaactgtcg

SEQ ID NO: 55120 - DNA, 75 bp, synthetic construct
  source 1..75: mol_type = other DNA
attatcactatcttgttgagcagattaaagatttggaatcccagttgaaacgaaagttggacgaagatgaggttg

SEQ ID NO: 55121 - DNA, 75 bp, synthetic construct
  source 1..75: mol_type = other DNA
gactgcggcattcggcttcctcattactgccgttggcctgccggtattaacggtagtggcgctggcaaaagttgg

SEQ ID NO: 55122 - DNA, 75 bp, synthetic construct
  source 1..75: mol_type = other DNA
gacgcaattaatttcacaacagagttcctgaaatcagtttcagaaaaatatggtgcaaaagctgagcagttagcc

SEQ ID NO: 55123 - DNA, 75 bp, synthetic construct
  source 1..75: mol_type = other DNA
accgtggtggtgcatagcatggatcgcctggcgcgcaatctcgatgatttgcgccgggcactgttgcaaagttag

SEQ ID NO: 55124 - DNA, 75 bp, synthetic construct
  source 1..75: mol_type = other DNA
gaaatgcagaaatatgaatggtgaatatatctggccctggatattgccgttttcagcggcaggcatgaaacatac

SEQ ID NO: 55125 - DNA, 75 bp, synthetic construct
  source 1..75: mol_type = other DNA
tggtcccgcgtgaagggatgcaggtgagtgagaaaccgtcggtggtgagggtccggtttggtgacggttatgaac

SEQ ID NO: 55126 - DNA, 75 bp, synthetic construct
  source 1..75: mol_type = other DNA
acgatgaacgcgattaagcgaggtggacaacgaggcgtgtatttacgggctaataaagagcgtgccgtggtgcac

SEQ ID NO: 55127 - DNA, 75 bp, synthetic construct
  source 1..75: mol_type = other DNA
gaaatatggctcaccgtgggttatcggcaagcatccgcgcggtaccgctcagggtgagattgacctgctgctgga

SEQ ID NO: 55128 - DNA, 75 bp, synthetic construct
  source 1..75: mol_type = other DNA
catactggcagaacttcagacatgggcaggtgaaaatggtctgatctttacgggagcacatgacccacgtaaacc

SEQ ID NO: 55129 - DNA, 75 bp, synthetic construct
  source 1..75: mol_type = other DNA
acatccggtttctgaacaagagggccagaaaacgcctcaacacaaagctattcaaagtccagccttacccaaaac

SEQ ID NO: 55130 - DNA, 75 bp, synthetic construct
  source 1..75: mol_type = other DNA
cttaaccggttactggggcaggttcagacgctggcttatgacgatgaatgcgggcgactggttctgggaaaaccc

SEQ ID NO: 55131 - DNA, 75 bp, synthetic construct
  source 1..75: mol_type = other DNA
gcttaaaacacatctgaataagtgtcctgttccaccacagatacatcgaacaatttttaatgatacaacgataga

SEQ ID NO: 55132 - DNA, 75 bp, synthetic construct
  source 1..75: mol_type = other DNA
cgtgcaacggaagtgaatgccgcgcttcatgcgaaggatttaactgtcactgcaggcgctaaccggataactgca

SEQ ID NO: 55133 - DNA, 75 bp, synthetic construct
  source 1..75: mol_type = other DNA
atgacaaatgatttatatattaacggtaaaaaggttgatagcttcggtgactggtcaccacagactgaacatcca

SEQ ID NO: 55134 - DNA, 75 bp, synthetic construct
  source 1..75: mol_type = other DNA
ctgttccgggatgcataccatctggcggggactgaaatgccggattttcatcgcgaggatgactggtggcgcaac

SEQ ID NO: 55135 - DNA, 75 bp, synthetic construct
  source 1..75: mol_type = other DNA
ttccgcaactggatagcgatgatccccttcattcatgcggaagggctctgggaggacattaaaatgggcggagcc

SEQ ID NO: 55136 - DNA, 75 bp, synthetic construct
  source 1..75: mol_type = other DNA
catttgtgcttttatcatttttttctccggcttatgccgtttcagaaagtgaggcacgacgtgtggagatgtcaa

SEQ ID NO: 55137 - DNA, 75 bp, synthetic construct
  source 1..75: mol_type = other DNA
ccgacagcattaatgtgcaggcactgaacatggggcgaattgtcgctgacgtcgatggtgttaatctcactggac

SEQ ID NO: 55138 - DNA, 75 bp, synthetic construct
  source 1..75: mol_type = other DNA
cggactgaaagcgatgggcgatatcaacaatatcagtgccacgattaccggtaagactgtccggctggagagtct

SEQ ID NO: 55139 - DNA, 75 bp, synthetic construct
  source 1..75: mol_type = other DNA
tataggttcttcaattggttcagaaggatcaggagctataatccaagaacagttaaaaaatcagcaggagaagaa

SEQ ID NO: 55140 - DNA, 75 bp, synthetic construct
  source 1..75: mol_type = other DNA
gctggataccaataccctggctgataacgtcgatttagataacgcggtcgctaacgttgttcccacccgtggggc

SEQ ID NO: 55141 - DNA, 75 bp, synthetic construct
  source 1..75: mol_type = other DNA
ttgcgttgtttggctattcgattaataccctgacgttgtttgcaatggtgctggcgatcggcttgctggtggacg

SEQ ID NO: 55142 - DNA, 75 bp, synthetic construct
  source 1..75: mol_type = other DNA
cattcgggcgtttagtcgacaaaatctacctgaacagtgttggctggcgcggtattcgccagcgcaaaacccatt

SEQ ID NO: 55143 - DNA, 75 bp, synthetic construct
  source 1..75: mol_type = other DNA
gagtgagaagccgtcggtggtgagggtgcggtttggtgacggttatgaacagcgtcgccccacaggactgaatcc

SEQ ID NO: 55144 - DNA, 75 bp, synthetic construct
  source 1..75: mol_type = other DNA
tatgaccgcagcaatacacaggtgcgcagctttacttacgatgataaataccggggccggatggtggcgcaccgt

SEQ ID NO: 55145 - DNA, 75 bp, synthetic construct
  source 1..75: mol_type = other DNA
ctgtatggatgatgagacgagtcagttattgtacagtttggtccatgagaatggtagtggctgggtacgaggatt

SEQ ID NO: 55146 - DNA, 75 bp, synthetic construct
  source 1..75: mol_type = other DNA
tcacgtaaagttccggcggcagcgccgcttgagtttgtccctgaaagctggcgcaaggtggtgattacacctgtg

SEQ ID NO: 55147 - DNA, 75 bp, synthetic construct
  source 1..75: mol_type = other DNA
ggtgacgaacgaccggacggtgagcgtgagtcacgatgacagtctgtatgtcagaaatgaccgctgggtgacggt

SEQ ID NO: 55148 - DNA, 75 bp, synthetic construct
  source 1..75: mol_type = other DNA
tccgaaagctcggcagctacccacgccagaacggcctggccgtggcgctccgcgagctgggccgcatcgagcgca

SEQ ID NO: 55149 - DNA, 75 bp, synthetic construct
  source 1..75: mol_type = other DNA
gcgtctggtttgataaccgtaacgatcccgacatgatgaaagccgggatcgccgactggcagaaacgttatccga

SEQ ID NO: 55150 - DNA, 75 bp, synthetic construct
  source 1..75: mol_type = other DNA
gcagccaggggagaggaaccacgctgggaaatcagttagaggtgataccggcggaccggacgtggcgtccacggc

SEQ ID NO: 55151 - DNA, 75 bp, synthetic construct
  source 1..75: mol_type = other DNA
atgaaacaccgtgaaatacgggcggcagttctgtcagccctgaaagcaaatatttctgagcgggtgaactggttt

SEQ ID NO: 55152 - DNA, 75 bp, synthetic construct
  source 1..75: mol_type = other DNA
acacggcgaaactgttgccgattgtcttaaccggttgctggggcaggttcagacgctggcttatgacgatgaatg

SEQ ID NO: 55153 - DNA, 75 bp, synthetic construct
  source 1..75: mol_type = other DNA
caggcttttgtcacttttggtgcttttgctgcgctggtctatggcctcatttccattggcggctatgtcggcgac

SEQ ID NO: 55154 - DNA, 75 bp, synthetic construct
  source 1..75: mol_type = other DNA
aaaaaagcggaggttttctcagtaagaaaaccacccacaccatcagtgaggacagtgccacccgtgaagcaggct

SEQ ID NO: 55155 - DNA, 75 bp, synthetic construct
  source 1..75: mol_type = other DNA
gaaaatacaaccactatcgccccgttaacgccatacgataaatgggatggtgagaaatgggtgacagatactgag

SEQ ID NO: 55156 - DNA, 75 bp, synthetic construct
  source 1..75: mol_type = other DNA
tgcagataaagagtgccctgccctggtggctggtctgccggggtgacattcaccggttccgctgtgtgccgcacc

SEQ ID NO: 55157 - DNA, 75 bp, synthetic construct
  source 1..75: mol_type = other DNA
ggaggcggtgtacgcccgtcttcacgaacagctgggtgagggaacggtcatccacattgtgccgcgactggccgg

SEQ ID NO: 55158 - DNA, 75 bp, synthetic construct
  source 1..75: mol_type = other DNA
cgttgttgcagacgcgtaacaccctcaaccgcgcgggtatccgctacatgatggatcagaacaatattggtagcg

SEQ ID NO: 55159 - DNA, 75 bp, synthetic construct
  source 1..75: mol_type = other DNA
agcctggcatacccgcgacgaaacgtactcgacagcgttggctgaactggtcaacgctcagtttcggcatccctt

SEQ ID NO: 55160 - DNA, 75 bp, synthetic construct
  source 1..75: mol_type = other DNA
acgggtggatcaggcgatgaagtccatcgacctcatcaacctcaaactgcgggcaggtcgcagtctgaaaccaga

SEQ ID NO: 55161 - DNA, 75 bp, synthetic construct
  source 1..75: mol_type = other DNA
tggtgatggggacggactgcacgtcgccgttattggcagcggcggagccgcgatggcggcggcgctgaaggccgt

SEQ ID NO: 55162 - DNA, 75 bp, synthetic construct
  source 1..75: mol_type = other DNA
ggccgttccgactgaaaagggagccacccggaaatttctgactggcacaacacgcgtcgatgttggtgcaacagg

SEQ ID NO: 55163 - DNA, 75 bp, synthetic construct
  source 1..75: mol_type = other DNA
actcgctgtcacaccagactaatgacgactgcgaaacagaatggattcattttacaggcagcggatatctgttac

SEQ ID NO: 55164 - DNA, 75 bp, synthetic construct
  source 1..75: mol_type = other DNA
catacgctgcagcaccgcacatatcacggaaacggacaacgcctggctgtactcgctgtcacaccagactaatga

SEQ ID NO: 55165 - DNA, 75 bp, synthetic construct
  source 1..75: mol_type = other DNA
aaaaggtatggcagcttcgctacaagattgacggtaaggagaaaatcctgaccgtcggaaaatatccgcttatga

SEQ ID NO: 55166 - DNA, 75 bp, synthetic construct
  source 1..75: mol_type = other DNA
gcacgccgcgtaacctcaaaaaactgaacgtcattgatgaaggctggcgtctgctggacttcaaaaatcacaagg

SEQ ID NO: 55167 - DNA, 75 bp, synthetic construct
  source 1..75: mol_type = other DNA
tcggttatatgccaagagagatgaattgaagaaaaaaatagaatttgtagaagagttttctgaacttggacaata

SEQ ID NO: 55168 - DNA, 75 bp, synthetic construct
  source 1..75: mol_type = other DNA
tggagcaggacatcctgaacagcttccgtaaaaacggttttgagctgatttcaccgcgctttaaccacatgcgca

SEQ ID NO: 55169 - DNA, 75 bp, synthetic construct
  source 1..75: mol_type = other DNA
ccgcaagaagaacttcccgtttttacctgccgaccagatcccggcattcaacaaagcactggcaacattttcagg

SEQ ID NO: 55170 - DNA, 75 bp, synthetic construct
  source 1..75: mol_type = other DNA
attctctcgttcatccaccagcaggatattgcatcgctggtgtccggcctgttctcccgcctgcggggtggagga

SEQ ID NO: 55171 - DNA, 75 bp, synthetic construct
  source 1..75: mol_type = other DNA
attctgtcgttcatccaccagcaggatatcgcatcgctgatgtccagcctgttctcccgtcttcggggcggagga

SEQ ID NO: 55172 - DNA, 75 bp, synthetic construct
  source 1..75: mol_type = other DNA
gtggcgctggcgtggcataaaagtaaccgaaaatggtcgcagaacaccgctgaccgtctgcttgccagcatgaac

SEQ ID NO: 55173 - DNA, 75 bp, synthetic construct
  source 1..75: mol_type = other DNA
tttacgtcgtgacctcccagtacggctttgaagccttgctggcaggaaaaccggtgacatgcttcggccagccct

SEQ ID NO: 55174 - DNA, 75 bp, synthetic construct
  source 1..75: mol_type = other DNA
atgaaactggccctgacgctggaagcagacagtattaacgtgcaggcactgaacatggggcgaatcgtcgttgac

SEQ ID NO: 55175 - DNA, 75 bp, synthetic construct
  source 1..75: mol_type = other DNA
cgccaccatttgctgcccttaccggcatacgctgcagtaccgcacatatcacggaaacggacaacgcctggctgt

SEQ ID NO: 55176 - DNA, 75 bp, synthetic construct
  source 1..75: mol_type = other DNA
aaactactggcccagcagcaggcgcgcgtcgatgagctgcgccacgccaagtacgaaggcatcctggacagcaac

SEQ ID NO: 55177 - DNA, 75 bp, synthetic construct
  source 1..75: mol_type = other DNA
atttctgtggctggcagcgatatgagcgtggagagcttgttgatgtgctgtggggggaactggaatggtcttccc

SEQ ID NO: 55178 - DNA, 75 bp, synthetic construct
  source 1..75: mol_type = other DNA
gatttggccttagcatggcctttaaatttgattattatctagttgatgaaattactgcagttggtgatgcaaaat

SEQ ID NO: 55179 - DNA, 75 bp, synthetic construct
  source 1..75: mol_type = other DNA
catcgatgatgtggtggatttcctgaaaaacgcccgtgataacgaccagtatgtcgagtcaccgaccatccgcag

SEQ ID NO: 55180 - DNA, 75 bp, synthetic construct
  source 1..75: mol_type = other DNA
gcatcagcagacggcattctggatgcggttctggaagatgaaggtacaacggtaacgtctcgtcagatccttggt

SEQ ID NO: 55181 - DNA, 75 bp, synthetic construct
  source 1..75: mol_type = other DNA
gtttctgccgatgtggaggtggaagtcgacgcgcagaactttaaaaagtttggtgctgtggcccgctctgcgggg

SEQ ID NO: 55182 - DNA, 75 bp, synthetic construct
  source 1..75: mol_type = other DNA
gcgcatttgcaggagctgttttctacatagcgacaactgcagatctgacggcaacgcgccgactggcatatttca

SEQ ID NO: 55183 - DNA, 75 bp, synthetic construct
  source 1..75: mol_type = other DNA
gcaggaacagcacggcccgcatcctgaatttccatctggcccgtaacccggaaatcgccttcctgtggaacatgg

SEQ ID NO: 55184 - DNA, 75 bp, synthetic construct
  source 1..75: mol_type = other DNA
actgaagatgtcagaatcaacggtaaatcattcatcgaacacattcataaggacggcgacaatgagaatacatca

SEQ ID NO: 55185 - DNA, 75 bp, synthetic construct
  source 1..75: mol_type = other DNA
tttacagtctgatcaaagaggattcacgctttaatgtcgtgagtaatccgcgtcttacggtgctttccggcagta

SEQ ID NO: 55186 - DNA, 75 bp, synthetic construct
  source 1..75: mol_type = other DNA
tttaatcgcccttatcagttgtcgccggatattgcaggagacacaagacttgtcagtttctatctgagtaaaaat

SEQ ID NO: 55187 - DNA, 75 bp, synthetic construct
  source 1..75: mol_type = other DNA
gcaacgacgaacgcattctgtctggcgtcaccgccactggcacgcatctgccttcacggggatttacaacgattt

SEQ ID NO: 55188 - DNA, 75 bp, synthetic construct
  source 1..75: mol_type = other DNA
tagattatattcaaggaaaaatgagctacaagataaagtagcatttgttgaaagtttttcagagttgggaaaata

SEQ ID NO: 55189 - DNA, 75 bp, synthetic construct
  source 1..75: mol_type = other DNA
aacgccaggcggcacgattcgcctctcttgaacaggccctgcaacagtccgcatccaactggggcgagctggaaa

SEQ ID NO: 55190 - DNA, 75 bp, synthetic construct
  source 1..75: mol_type = other DNA
agtcatatataacatcaactgggcggcactatgtttttaaaaatttaaatatttatattccttcaaaaaaaaaca

SEQ ID NO: 55191 - DNA, 75 bp, synthetic construct
  source 1..75: mol_type = other DNA
gaatctgaccggacctcagcagactgcacgccaccatttgctgcccttaccggcatacgctgcagtaccgcacat

SEQ ID NO: 55192 - DNA, 75 bp, synthetic construct
  source 1..75: mol_type = other DNA
caacaatgtcacattccctgtccagctctccaaaccgcgatttgatgaaacagggactggaacaggttctgtaat

SEQ ID NO: 55193 - DNA, 75 bp, synthetic construct
  source 1..75: mol_type = other DNA
atgacaccacgatgggctttatgctggaagccattcccatcaatggggcgaatgagtccattgtggaggctctcg

SEQ ID NO: 55194 - DNA, 75 bp, synthetic construct
  source 1..75: mol_type = other DNA
attgatggtgttaatctcgctgaactgattaacatggtctgcgataacggctactcccttcgtgttgttgatgaa

SEQ ID NO: 55195 - DNA, 75 bp, synthetic construct
  source 1..75: mol_type = other DNA
ctgatggtttttgaacagggctatgactcgaacgtattagggataacagaggaaggcaaaaaagccaaagtctgg

SEQ ID NO: 55196 - DNA, 75 bp, synthetic construct
  source 1..75: mol_type = other DNA
ccgacagcattaacgtgcaggcactgaacatggggcgcattgtcgttgacgtcgatggtgttactctcgctgaac

SEQ ID NO: 55197 - DNA, 75 bp, synthetic construct
  source 1..75: mol_type = other DNA
atgaaatcattaaccacggaaacagcactggatattctgattgtgtggctgcaggacaatatcgactgcgaatcg

SEQ ID NO: 55198 - DNA, 75 bp, synthetic construct
  source 1..75: mol_type = other DNA
ctgtaacctgttcgaccttgaccagttgcgcatggagtacagccctgacgaataccagaacctgctgatgtgcga

SEQ ID NO: 55199 - DNA, 75 bp, synthetic construct
  source 1..75: mol_type = other DNA
aagccagccatgccgatctggcgtgggcaacaatgcacgcactgtttaacgagccgctgcagggcgagtccgcca

SEQ ID NO: 55200 - DNA, 75 bp, synthetic construct
  source 1..75: mol_type = other DNA
cgagagctggtcgattccgttctccgttatgctggtcgttccgctgggggttatcggtgcgttgctggctgccac

SEQ ID NO: 55201 - DNA, 75 bp, synthetic construct
  source 1..75: mol_type = other DNA
gacgggcagtaccgccagatagtcaccgtggaagatgcagtgcgcggcggctgtaacctgttcgaccttgaccag

SEQ ID NO: 55202 - DNA, 75 bp, synthetic construct
  source 1..75: mol_type = other DNA
acgggaggccgtgaggttgccgcagagcggttaaagctgggggcttaccctgaattgtcgctgaaagctgcaagg

SEQ ID NO: 55203 - DNA, 75 bp, synthetic construct
  source 1..75: mol_type = other DNA
gaaacatcaatatgacaaaagagcctgagcaacaatcaccgcttgaactctggttcgaacgtatcatagatgtgc

SEQ ID NO: 55204 - DNA, 75 bp, synthetic construct
  source 1..75: mol_type = other DNA
gggattatcttcgacaacgatgaggataaaacggattcagcagcactgctgccctgcattgaacaggccagggaa

SEQ ID NO: 55205 - DNA, 75 bp, synthetic construct
  source 1..75: mol_type = other DNA
tgtgaagaaagtttatgtcatgtcagaagcgaaataccgtatgctgccggatgatatcggcgactggtatgttcg

SEQ ID NO: 55206 - DNA, 75 bp, synthetic construct
  source 1..75: mol_type = other DNA
ctctgtgcggacggccagtggcggcagattgtcaccattgaggacgccctgaaaggtggctgcacgctgttcgac

SEQ ID NO: 55207 - DNA, 75 bp, synthetic construct
  source 1..75: mol_type = other DNA
tgcaggcatggcaccagaagcgcgtgctgccgccgggatctccgagacgctgctgcgtatctccaccggtattga

SEQ ID NO: 55208 - DNA, 75 bp, synthetic construct
  source 1..75: mol_type = other DNA
aggcctacgacattatcagtcaccgccgcctagaatttgacgccggacacaccgacattgcgcagtccttcatgg

SEQ ID NO: 55209 - DNA, 75 bp, synthetic construct
  source 1..75: mol_type = other DNA
aggcccacgccgtcagcctgaaaagaatgttttcaccgatgaacaaattgagaagctggaagaaattttccattc

SEQ ID NO: 55210 - DNA, 75 bp, synthetic construct
  source 1..75: mol_type = other DNA
accggcgtcggtcacggggtttacgagaacgtgaaagcgttttttcctgccgtcagggagtttgtctacaacccc

SEQ ID NO: 55211 - DNA, 75 bp, synthetic construct
  source 1..75: mol_type = other DNA
ttaccttggttcactggcaatctgtaacgttccgggttcttctctggtgcgcgaatccgatctggcgctgatgac

SEQ ID NO: 55212 - DNA, 75 bp, synthetic construct
  source 1..75: mol_type = other DNA
ttcacgctgagttcttcccgcgggagcgtacacccttctgtagaaaaagcccctgcagcgcattcggagattaac

SEQ ID NO: 55213 - DNA, 75 bp, synthetic construct
  source 1..75: mol_type = other DNA
ttgtcctgcagctcagtttcggattaattataaaaatggcggtattttttatcgttcagcccgtgatggttatgg

SEQ ID NO: 55214 - DNA, 75 bp, synthetic construct
  source 1..75: mol_type = other DNA
ctgccctgcattgaacaggccagggaagatatccgtacactgcgccaactgcagtttctgcaacagaaccggtga

SEQ ID NO: 55215 - DNA, 75 bp, synthetic construct
  source 1..75: mol_type = other DNA
tctgacgattgccggaatgatcatcagcttcatgtggggacttgatggtaaacatatcgcgctggaggctcacac

SEQ ID NO: 55216 - DNA, 75 bp, synthetic construct
  source 1..75: mol_type = other DNA
gtgtggcttggagagcagcagctatccgaactggataatctacagattgtaccggaaggccgaacatacgctcgt

SEQ ID NO: 55217 - DNA, 75 bp, synthetic construct
  source 1..75: mol_type = other DNA
tcacggtgctgattgaagctgaggtctttcacaacgcgaaccctgtacgcggtatacgaaaactgaaagttcaga

SEQ ID NO: 55218 - DNA, 75 bp, synthetic construct
  source 1..75: mol_type = other DNA
tctgataaacgtaacataccagaatacaaacgttgtctttctcagttgagttgggcaggaaacaacataaatcaa

SEQ ID NO: 55219 - DNA, 75 bp, synthetic construct
  source 1..75: mol_type = other DNA
gtaacgatgatttccgtaccctgccgttttatctctaccagcaaattggctcctatcgcagccaggacggcgcgg

SEQ ID NO: 55220 - DNA, 75 bp, synthetic construct
  source 1..75: mol_type = other DNA
agaaaatagcggatgcgatcgccagaatgccggagaaaacaagccagggggctactcgtaacggggattctgaac

SEQ ID NO: 55221 - DNA, 75 bp, synthetic construct
  source 1..75: mol_type = other DNA
caacagccgcaacagccgcaacagccgcaacagccgcaacagccgcaacagccgcaacagccgcaacagccgcaa

SEQ ID NO: 55222 - DNA, 75 bp, synthetic construct
  source 1..75: mol_type = other DNA
gtgattttgacctgctcattgtgccggtgctggcgtggctgcgggaaaatcagcccgacatcatgaccaccgacg

SEQ ID NO: 55223 - DNA, 75 bp, synthetic construct
  source 1..75: mol_type = other DNA
gtaacggtcgcggtgcccgagttggctccaaccgtgcaagcgttcgcgttcactactactgcggcaagggttctt

SEQ ID NO: 55224 - DNA, 75 bp, synthetic construct
  source 1..75: mol_type = other DNA
aaagatattttctttaactactgcaattactcatatcacgaaataaaagacgaagaggaagagcaaaatggctga

SEQ ID NO: 55225 - DNA, 75 bp, synthetic construct
  source 1..75: mol_type = other DNA
atgcgaaagttcagaataattattgaaacgggaatagctggtggagattttgaggatgtattcgaagtggatgat

SEQ ID NO: 55226 - DNA, 75 bp, synthetic construct
  source 1..75: mol_type = other DNA
acgccgtggaagcgttaaaagttattgccgaccccatgggggagccgtccggtgatttgctaccgttcactaatg

SEQ ID NO: 55227 - DNA, 75 bp, synthetic construct
  source 1..75: mol_type = other DNA
ataaagaaacagctgaaatattttttgaaagaatagaaggagagaaaagattagcaagtgaacgagatgctacgg

SEQ ID NO: 55228 - DNA, 75 bp, synthetic construct
  source 1..75: mol_type = other DNA
ccacattctgcggcatacattcgcaagccatttcatgatgaatgggggcaacataattgcactgcaacagattct

SEQ ID NO: 55229 - DNA, 75 bp, synthetic construct
  source 1..75: mol_type = other DNA
tcgcggtcgcgacggaaaacgcatccgcaggaaatttgaaagaaaagctgaggctgtagcatttgagcgatacac

SEQ ID NO: 55230 - DNA, 75 bp, synthetic construct
  source 1..75: mol_type = other DNA
acgaagcaaaagatattttctttaactactgcaattactcatatcacgaaataaaagacgaagaggaagaacaaa

SEQ ID NO: 55231 - DNA, 75 bp, synthetic construct
  source 1..75: mol_type = other DNA
tatatgtgccgcgctgtacatgattatggcgaaccggtacgactggcagatgtttattgaggccaccggagacgg

SEQ ID NO: 55232 - DNA, 75 bp, synthetic construct
  source 1..75: mol_type = other DNA
tgcggtatggtttatcatatggtcttcagtaatcaacctcattattttgtatggtttttatgaccgttttatatg

SEQ ID NO: 55233 - DNA, 75 bp, synthetic construct
  source 1..75: mol_type = other DNA
cgatatcgccgcgcttaccgcacatctggataaactgctcccgcaatcccctgaagaagacgaaaaagcgtcccg

SEQ ID NO: 55234 - DNA, 75 bp, synthetic construct
  source 1..75: mol_type = other DNA
accggcgttggtcacggggtttacgagaacgtgaaagcgttctttcctgccgtccgggagtttgtctacaacccc

SEQ ID NO: 55235 - DNA, 75 bp, synthetic construct
  source 1..75: mol_type = other DNA
acaacggatctgcgtcagggggttgtgcgcattcgctacaagtatacgccggtgccaccgcttgaagatcttgag

SEQ ID NO: 55236 - DNA, 75 bp, synthetic construct
  source 1..75: mol_type = other DNA
gcgaatttatcgacttcaaatcaaaggcatcctccgctgagtttagcaagctattaacgctgggtgttatgtcag

SEQ ID NO: 55237 - DNA, 75 bp, synthetic construct
  source 1..75: mol_type = other DNA
ttccagtattgaattttgtcgccatgccgggtctggtggggccaattttaggccccgttcttggcggcgtgctgg

SEQ ID NO: 55238 - DNA, 75 bp, synthetic construct
  source 1..75: mol_type = other DNA
cagtaatgaaccggccatgcctgacagggaaacgctaccggaaaaacaggaaaagacagaacagacggcgctttc

SEQ ID NO: 55239 - DNA, 75 bp, synthetic construct
  source 1..75: mol_type = other DNA
attttacagcgagagcaagtcgggatagcttcttgaaatcattaacattaaccagcttatcaggacaatctaacg

SEQ ID NO: 55240 - DNA, 75 bp, synthetic construct
  source 1..75: mol_type = other DNA
gcaggaaccgcaatgttctccgggaagggcattacacaaagccattgcctatgcgctgtctcatcgcgtggaact

SEQ ID NO: 55241 - DNA, 75 bp, synthetic construct
  source 1..75: mol_type = other DNA
aaatatggcttctggcggacactgatgtgtggctttatcgccggaattgctctgccggcgacagttgcaggttac

SEQ ID NO: 55242 - DNA, 75 bp, synthetic construct
  source 1..75: mol_type = other DNA
ttattgcctgctatttaacctatcgtaagttttacaattcgcgccaccagttggtggtgacgcaattgaagaaga

SEQ ID NO: 55243 - DNA, 75 bp, synthetic construct
  source 1..75: mol_type = other DNA
agaggccggagtaagcaaaaacgggaacgattggctccaaggcgttgattggttggcattgtctgtgacccgaag

SEQ ID NO: 55244 - DNA, 75 bp, synthetic construct
  source 1..75: mol_type = other DNA
gactgcgccactgctgtgtgaaccggacgcacaaaaacgggcgaccggatggcatcagctgtattccgcagacgg

SEQ ID NO: 55245 - DNA, 75 bp, synthetic construct
  source 1..75: mol_type = other DNA
gcagtaaatatattgctaaagcttttatctcatcgtttattgccattacggtcggggcgggaattaccctggcgg

SEQ ID NO: 55246 - DNA, 75 bp, synthetic construct
  source 1..75: mol_type = other DNA
gaaagcggcccagtcgccgctggttgagactgtttttgttgctccgggtaatgcaggcactgcgctggaacccgc

SEQ ID NO: 55247 - DNA, 75 bp, synthetic construct
  source 1..75: mol_type = other DNA
atcttcgcccgcgcggatgttgacctgccagagagcacgctgtcagatatggttggtgccgcaggcgcggctctg

SEQ ID NO: 55248 - DNA, 75 bp, synthetic construct
  source 1..75: mol_type = other DNA
gcttcagagcctcaatggtgtggtgtttaatgacagcgagtggcggcgtttcacggagcagtatctggacaaccc

SEQ ID NO: 55249 - DNA, 75 bp, synthetic construct
  source 1..75: mol_type = other DNA
acggacagagatatcgacccctcttgaacatatatctcaggggaccacatcggtgtctgttattaaccacacccc

SEQ ID NO: 55250 - DNA, 75 bp, synthetic construct
  source 1..75: mol_type = other DNA
taaatcgcagacaataaataacgggcatccccagaaatcatatggagcacaaccaacaactgacgaaaaatactg

SEQ ID NO: 55251 - DNA, 75 bp, synthetic construct
  source 1..75: mol_type = other DNA
atgtcagttcagctaaccagcgaatctttaaatcaatggcttagtatgagttctcttgctgcggttatagcagga

SEQ ID NO: 55252 - DNA, 75 bp, synthetic construct
  source 1..75: mol_type = other DNA
gccctcactctgacccgccacgaagaagcatggtggattatcaatcagtctaccgaatattgctgtacggtaaac

SEQ ID NO: 55253 - DNA, 75 bp, synthetic construct
  source 1..75: mol_type = other DNA
ctggttgacgttgacctgaccggtgacccgattgtcctgggcaataacggcgcaaaactgatttttctcggcacc

SEQ ID NO: 55254 - DNA, 75 bp, synthetic construct
  source 1..75: mol_type = other DNA
ttaatccaccagaacagggaaaagccttatatgatgctgttgcttctggtactaaggaattatacgaggaagctg

SEQ ID NO: 55255 - DNA, 75 bp, synthetic construct
  source 1..75: mol_type = other DNA
gagatgaaaaccgcgatggtgctcaaggcaaaagacaccattcgccgtggctgtctggagtatgacgccggtgcg

SEQ ID NO: 55256 - DNA, 75 bp, synthetic construct
  source 1..75: mol_type = other DNA
tgggagatcattattccgtcgaaatagaaaatgcagaaataattttagatattgatactccggacgactttatta

SEQ ID NO: 55257 - DNA, 75 bp, synthetic construct
  source 1..75: mol_type = other DNA
aaaaaaacgcctgactaatgaggtatttgcaagagttacccgaagcctgaatgttggtaagcaaacgcttgatat

SEQ ID NO: 55258 - DNA, 75 bp, synthetic construct
  source 1..75: mol_type = other DNA
aaaaaaaacctgatctggagtatcagcctgttactggtatttttcgcccccttttttttatatgtatttgcgccc

SEQ ID NO: 55259 - DNA, 75 bp, synthetic construct
  source 1..75: mol_type = other DNA
cttatatgatgctgttgcttctggtactaaggaattatacgaggaagctgacgcatgccattatgatatttatga

SEQ ID NO: 55260 - DNA, 75 bp, synthetic construct
  source 1..75: mol_type = other DNA
gctgaaaatcagcaggcgtttcttcatcccatgcgtatacaggaaattacgcaatatattctgaataatttccgc

SEQ ID NO: 55261 - DNA, 75 bp, synthetic construct
  source 1..75: mol_type = other DNA
ccgatcggctgggacgcgtttggtctgcctgcggaaggcgcggcggtgaaaaacaacaccgcgccagcaccgtgg

SEQ ID NO: 55262 - DNA, 75 bp, synthetic construct
  source 1..75: mol_type = other DNA
taaatcgcagacaataaataatgatcatccccagaaatcatgtggagcacaaccaacaactgacgaaaaatactg

SEQ ID NO: 55263 - DNA, 75 bp, synthetic construct
  source 1..75: mol_type = other DNA
tggcctgtacgatgatgcgggaacgttaattgccgtggcgaacatggccgaaagttataagcctgcccttgccga

SEQ ID NO: 55264 - DNA, 75 bp, synthetic construct
  source 1..75: mol_type = other DNA
tgagcggactgaacgcggcccaggcggcgttaaatacggcaagtaataatatctccagctataacgttgccggat

SEQ ID NO: 55265 - DNA, 75 bp, synthetic construct
  source 1..75: mol_type = other DNA
tcgaaaagctggaagagattttcttcgatcagtcctttgagtatcagctcaactggcacaaggccggtatcgcgc

SEQ ID NO: 55266 - DNA, 75 bp, synthetic construct
  source 1..75: mol_type = other DNA
ctgaatccaataactttatcgtccttgataagtacatcaaagctgagcaaacaggcgacagctaccagagcgaat

SEQ ID NO: 55267 - DNA, 75 bp, synthetic construct
  source 1..75: mol_type = other DNA
actggcgtaaaggcagctttgatgatcacctgacgattgaggtggaaaagaacggtaagggaagccgggtctata

SEQ ID NO: 55268 - DNA, 75 bp, synthetic construct
  source 1..75: mol_type = other DNA
atcaaatgatgaagttgatgctattcgtaaaaaagacagaaatggtagttgggtcgctggcgcaattacagatgc

SEQ ID NO: 55269 - DNA, 75 bp, synthetic construct
  source 1..75: mol_type = other DNA
gggcatggttgaatgaattacaggacgttcttgatcgctgcccatcaccgaaaaaaattggtttttacaccattg

SEQ ID NO: 55270 - DNA, 75 bp, synthetic construct
  source 1..75: mol_type = other DNA
tcactctgtaatgcactgtttcagggggaggtcaccccggtcagtgatgttcacgccggcacccgggaagtacgg

SEQ ID NO: 55271 - DNA, 75 bp, synthetic construct
  source 1..75: mol_type = other DNA
gccgctcggctatctgattgaggtgagggagtggtggcagctcaacgaggagccggggacgttccgcatcgttgt

SEQ ID NO: 55272 - DNA, 75 bp, synthetic construct
  source 1..75: mol_type = other DNA
gcttcgacaggttcagaagaatatttatctgtattatgttgtcatcagtatggtccggagtgatgtggtttttta

SEQ ID NO: 55273 - DNA, 75 bp, synthetic construct
  source 1..75: mol_type = other DNA
gatgcggcaattgttggtcgtcatgtcggaaccacgttaatggtggcgcgttatgcggtcaacaccttgaaagaa

SEQ ID NO: 55274 - DNA, 75 bp, synthetic construct
  source 1..75: mol_type = other DNA
acgccgtatcaggcgcgaaaacgccagccgctcagagcgaagaaagggcgtattaagcggacgatgtttcagaag

SEQ ID NO: 55275 - DNA, 75 bp, synthetic construct
  source 1..75: mol_type = other DNA
ttggaaaagtactggataaaatcaaagcgatgggtgaagaagataacaccatcgttatttttaccagtgataacg

SEQ ID NO: 55276 - DNA, 75 bp, synthetic construct
  source 1..75: mol_type = other DNA
tttaagcgtgtgcgtaactacgcattccacaagcgttttttcaaactcctgcaactgggattcgattactggact

SEQ ID NO: 55277 - DNA, 75 bp, synthetic construct
  source 1..75: mol_type = other DNA
tatatcatatccaacacatcaccgacaaccagggcaagtgatatagccacggctccgataaagaacaacatttat

SEQ ID NO: 55278 - DNA, 75 bp, synthetic construct
  source 1..75: mol_type = other DNA
agtgacagctttaatattcttatccgcaatcaagcccatgcggaaagagagcgtgaaatagaagaaatgacgcaa

SEQ ID NO: 55279 - DNA, 75 bp, synthetic construct
  source 1..75: mol_type = other DNA
accaggactatgacgccacggcgtccggtgtgaagcggggcgaggaactggcggaagcaagcggtgatttgtggc

SEQ ID NO: 55280 - DNA, 75 bp, synthetic construct
  source 1..75: mol_type = other DNA
gctgccctccgggctgttgttactgatcccggttatcgaggctgaagaagccaccacagaagaggatattgcccc

SEQ ID NO: 55281 - DNA, 75 bp, synthetic construct
  source 1..75: mol_type = other DNA
ataaaacggattcggcagcactgttgccctgtatcgaacaggcgcgacaggatgtccgtaccctgcgccaactgc

SEQ ID NO: 55282 - DNA, 75 bp, synthetic construct
  source 1..75: mol_type = other DNA
cgcgtcagcgacccggacagtgcccggattaaagcggattcagcactggccagacataacgaataccagcagaac

SEQ ID NO: 55283 - DNA, 75 bp, synthetic construct
  source 1..75: mol_type = other DNA
atgtttcttgaacatgttacccgtgacggagagcgctgggactctctggcatggcagtactacggcgacccactg

SEQ ID NO: 55284 - DNA, 75 bp, synthetic construct
  source 1..75: mol_type = other DNA
cggggtgggcgagagccgggacagggatgcagagtatgaagccctgtaccgtgacattctgcccgaactggacct

SEQ ID NO: 55285 - DNA, 75 bp, synthetic construct
  source 1..75: mol_type = other DNA
gagcatctaccacacggtaagcggttaatagaaccattcgttggtggcggttccgtatttacgaatgcaggattt

SEQ ID NO: 55286 - DNA, 75 bp, synthetic construct
  source 1..75: mol_type = other DNA
cgcccgtcgtggaatgcacaaaccttctgaaaacagccgagattgacgtcacaaaagggggaaagatgagcggca

SEQ ID NO: 55287 - DNA, 75 bp, synthetic construct
  source 1..75: mol_type = other DNA
aggcggtaaaacgcgaagtggagcgtcgtgtgaaggagcgcatgattctgtcacgtaaccgtaattacagccggc

SEQ ID NO: 55288 - DNA, 75 bp, synthetic construct
  source 1..75: mol_type = other DNA
atcagcatggctggtgaataactggtatcccacagcaagtatcagcgatttgctggttgtggtgatgaagaaagc

SEQ ID NO: 55289 - DNA, 75 bp, synthetic construct
  source 1..75: mol_type = other DNA
ggcgtcaaaatgctagagcagcacttgttcagcgtgcaatggataaggcgacaagcgattcaggaaagcttagcg

SEQ ID NO: 55290 - DNA, 75 bp, synthetic construct
  source 1..75: mol_type = other DNA
ctgaaaccgaagtttgtatcggtgacctatggcgcgaactccggcgagcgcgaccgtacgcacagcattattaaa

SEQ ID NO: 55291 - DNA, 75 bp, synthetic construct
  source 1..75: mol_type = other DNA
ctggtatcaggcttcgttgattacctgtgcgaatcagtaggtcgggaacacactccagccctgagtgatgccgca

SEQ ID NO: 55292 - DNA, 75 bp, synthetic construct
  source 1..75: mol_type = other DNA
agggaagatttagttagaacatttagcgataatgttggtggaatatctgacgcacaactttaccaatcagctact

SEQ ID NO: 55293 - DNA, 75 bp, synthetic construct
  source 1..75: mol_type = other DNA
caagtctgggcactgaacgcctggagtttgccgcacagcaacgcgccagcatcatgcagttcagtaagtgcacaa

SEQ ID NO: 55294 - DNA, 75 bp, synthetic construct
  source 1..75: mol_type = other DNA
catcattcgatatcattctatcaaagaaggatgaaaacgcgccgcgcttcaacagaataatcggtaatggaatta

SEQ ID NO: 55295 - DNA, 75 bp, synthetic construct
  source 1..75: mol_type = other DNA
ggtgtttgtgccgctggtggacattgatgacattgacaatggtgacattaatcagcggctgatggagtcaataga

SEQ ID NO: 55296 - DNA, 75 bp, synthetic construct
  source 1..75: mol_type = other DNA
tgtgtgaatcagtaggccgggaacatacgccagctctgagcgaagccgcagagcaatatctgaatacagttgcga

SEQ ID NO: 55297 - DNA, 75 bp, synthetic construct
  source 1..75: mol_type = other DNA
cgaatcaatattatgctccatcacatgaacgaaatattatctggaatgaccccttgcttaatattaaatggccaa

SEQ ID NO: 55298 - DNA, 75 bp, synthetic construct
  source 1..75: mol_type = other DNA
ccaaccgggtgtgtggagagaagctgccgcaggtgtaccgtgctctggggatggataaaccggaagcagtggcga

SEQ ID NO: 55299 - DNA, 75 bp, synthetic construct
  source 1..75: mol_type = other DNA
cagggggccacgccgctggtggtggtggaaggttcccgtgtgctgggcgttattgcgctgaaagatatcgtcaaa

SEQ ID NO: 55300 - DNA, 75 bp, synthetic construct
  source 1..75: mol_type = other DNA
ccgctgttgctgaacatgtgcaggaaaaactgagcgccactgagcagcgcctcgctgagatggaaaccgcctttt

SEQ ID NO: 55301 - DNA, 75 bp, synthetic construct
  source 1..75: mol_type = other DNA
accacaccgaaagtctgacccagcagcgccgcagcaaggccaccggcggtggcggtgacgccctgatgacgaact

SEQ ID NO: 55302 - DNA, 75 bp, synthetic construct
  source 1..75: mol_type = other DNA
gggcgatgtgactaacgacctgagccacgtacgtaaaatcatcgttgcctgtgacgccggtatgggttccagtgc

SEQ ID NO: 55303 - DNA, 75 bp, synthetic construct
  source 1..75: mol_type = other DNA
gatgcgccggggcagttcagtaccgcgcgcgatatggcattgctgggtaaagcattgatccacgatgtgccggaa

SEQ ID NO: 55304 - DNA, 75 bp, synthetic construct
  source 1..75: mol_type = other DNA
tccatcaatcatatgaactgcagagcacaaaaatgaaagaaaatcctgaaatatatttcgatttctttatatctc

SEQ ID NO: 55305 - DNA, 75 bp, synthetic construct
  source 1..75: mol_type = other DNA
caaaagttgatgatccttttcctgaaaagctaatcgctacaatccggggaatggggtattcatttgtagcggtaa

SEQ ID NO: 55306 - DNA, 75 bp, synthetic construct
  source 1..75: mol_type = other DNA
tgcgaagcaggtaatgcagtcctgggcggatgccgaatggttcctgaatcgcccggcgctggctgaaaaactgac

SEQ ID NO: 55307 - DNA, 75 bp, synthetic construct
  source 1..75: mol_type = other DNA
ggcaggggggatcgagcaggagctgaaaatgaaaccggaagaagagatggaacagcaactgccacccgggatcag

SEQ ID NO: 55308 - DNA, 75 bp, synthetic construct
  source 1..75: mol_type = other DNA
gtatctcctacggtgcctgcggtaacagcggtgggatcttccacgatctctactgcgtgtggggcggtacggata

SEQ ID NO: 55309 - DNA, 75 bp, synthetic construct
  source 1..75: mol_type = other DNA
aatgaagatggaaacataccggattatcgcctcctctggccaggcgatatttcagggcaaacagcagaattatgt

SEQ ID NO: 55310 - DNA, 75 bp, synthetic construct
  source 1..75: mol_type = other DNA
aactggagtatggaaagacgctattgactgggtgaccaaagaggcttgccaagctgtagacattggcatcaaagg

SEQ ID NO: 55311 - DNA, 75 bp, synthetic construct
  source 1..75: mol_type = other DNA
gcgttagaagatcctgaaacactagaaataatgctgaatccagatggtaagttatggcgtgaaaaattcggtcaa

SEQ ID NO: 55312 - DNA, 75 bp, synthetic construct
  source 1..75: mol_type = other DNA
gggctggcgatgaccgacaccccggcaagcctgggcactgagcgcctgaaattcacggcacagcaacgtcaggcg

SEQ ID NO: 55313 - DNA, 75 bp, synthetic construct
  source 1..75: mol_type = other DNA
acagggcgattcgtcagggctggcccgaattctcacagtggcttgatgccgtgattcagcgtgtcgaaatgtaca

SEQ ID NO: 55314 - DNA, 75 bp, synthetic construct
  source 1..75: mol_type = other DNA
catccggacatccagcagcagatgcagcgtcgtgaagaggtgaacattaatgtgcaccgggagcgtggggaggat

SEQ ID NO: 55315 - DNA, 75 bp, synthetic construct
  source 1..75: mol_type = other DNA
tgatttaaaagttagagccgtaagtaaaggtaatgccggtgcgggaagtattaattcacaaattactgtcaccta

SEQ ID NO: 55316 - DNA, 75 bp, synthetic construct
  source 1..75: mol_type = other DNA
aaggtgtagttggacagtttttaatatggactggctcgcttattttaatggctgttagtgtggttgtttttttaa

SEQ ID NO: 55317 - DNA, 75 bp, synthetic construct
  source 1..75: mol_type = other DNA
aggcatgaaagatggtttttctggaggggtgagtgtctggcaaactttagataacttatggaaaagtacgcaaaa

SEQ ID NO: 55318 - DNA, 75 bp, synthetic construct
  source 1..75: mol_type = other DNA
cactgacggcactgtgtccagcgttgaagctgtagcggaacccgatgaacctgaagaaatgtggacggtgaaacg

SEQ ID NO: 55319 - DNA, 75 bp, synthetic construct
  source 1..75: mol_type = other DNA
agcaggcgaagcagtttttcatggatgttgctgccgggttatgtgaagggaacgaaccgttgccggaaaagcgcc

SEQ ID NO: 55320 - DNA, 75 bp, synthetic construct
  source 1..75: mol_type = other DNA
ttggtggcgcatcgacattaatcctccacttcaatatgaatacggggagctgccctgctgtacagttccgcgtga

SEQ ID NO: 55321 - DNA, 75 bp, synthetic construct
  source 1..75: mol_type = other DNA
ggtgtgcgtctggtggggctgcatgtgacgttgcttgacccgcaaatggaaagacaactggtgctgggattatga

SEQ ID NO: 55322 - DNA, 75 bp, synthetic construct
  source 1..75: mol_type = other DNA
ttcacgctgagttcttcccctgggatcgtacacccttctgttgaaaaagcccctgtagcacattcggagattaac

SEQ ID NO: 55323 - DNA, 75 bp, synthetic construct
  source 1..75: mol_type = other DNA
tggttgccacgggggccagctccatgtcatgggagtaccgctacaccctgaacgtggtgattgaggatttcagcg

SEQ ID NO: 55324 - DNA, 75 bp, synthetic construct
  source 1..75: mol_type = other DNA
atagcgaagttgttagtaaaatcgaagagatgaccaaaccacttcaaagtcaattaggtcaggatatgttatctc

SEQ ID NO: 55325 - DNA, 75 bp, synthetic construct
  source 1..75: mol_type = other DNA
cagacactgaaatcaaaaacaccaaaccagcagacaaagagatcaatctcttcgatggtgatgggctactgctac

SEQ ID NO: 55326 - DNA, 75 bp, synthetic construct
  source 1..75: mol_type = other DNA
agatatctcaaggcagctatagcaattttgtacgctgacaatattttggtgacggattcgaaggtggtgcattaa

SEQ ID NO: 55327 - DNA, 75 bp, synthetic construct
  source 1..75: mol_type = other DNA
aaccgatacagcgttagccctgaaaaatatctcaaggcggctatagtaattttgtacgctgacaatgttttggtt

SEQ ID NO: 55328 - DNA, 75 bp, synthetic construct
  source 1..75: mol_type = other DNA
taccgatatcgacgacaaaatcatcaaacgcgccaatgaaaatggcgaaagctttgtggcgctggtggatcgcat

SEQ ID NO: 55329 - DNA, 75 bp, synthetic construct
  source 1..75: mol_type = other DNA
tccctattaccgaacaggcgagtgttggtaaggtaactaacccttatggtcagaccaaactaattatagaaaaaa

SEQ ID NO: 55330 - DNA, 75 bp, synthetic construct
  source 1..75: mol_type = other DNA
accggctgggaactggatacgctggtcagtgcgctcatgacagcacttcccgaccatgccgccagtcccctgatg

SEQ ID NO: 55331 - DNA, 75 bp, synthetic construct
  source 1..75: mol_type = other DNA
caacctgacaaaacaggacgagcgcctttccgctatggaaaccgcgtttgccactttcaaacaggaactgaccgg

SEQ ID NO: 55332 - DNA, 75 bp, synthetic construct
  source 1..75: mol_type = other DNA
tgccttgcgtatgcttaccgaaaacggtcatcagccattactgcaagaaatcgcccggcgttataaccagccgga

SEQ ID NO: 55333 - DNA, 75 bp, synthetic construct
  source 1..75: mol_type = other DNA
ctatataattcattttttactgataaagtggttatctgggatgaatcagtaaaaaaagttaagtggatttatgag

SEQ ID NO: 55334 - DNA, 75 bp, synthetic construct
  source 1..75: mol_type = other DNA
gcagagctggcggcaaaaaaagcgcaggccagacaggcgctgtccatttatctgaatctgcccacgctggatgag

SEQ ID NO: 55335 - DNA, 75 bp, synthetic construct
  source 1..75: mol_type = other DNA
acctagttgaaagagaagaactaatgaaatggtggggggattatgtcagcagcaaaaaatataagatgatggcag

SEQ ID NO: 55336 - DNA, 75 bp, synthetic construct
  source 1..75: mol_type = other DNA
ttcgacccgacaacgcaaagtgctggcgctggacgatgtggtgagcgatctggaagagggcactggtccgaccga

SEQ ID NO: 55337 - DNA, 75 bp, synthetic construct
  source 1..75: mol_type = other DNA
taaaaaactgcgcagggcgctgaaggccatcacccgttcagaaagctatctgtgtgccatgaaagccggtgcctg

SEQ ID NO: 55338 - DNA, 75 bp, synthetic construct
  source 1..75: mol_type = other DNA
caaaatggaaggtgaaaaagcagaagctggccgagaaagcagcccgggaagcagagctggcggcaaaaaaagcgc

SEQ ID NO: 55339 - DNA, 75 bp, synthetic construct
  source 1..75: mol_type = other DNA
agcggaatatcccgctctcgcataaaaaactgcgcagggcgctgaaggccatcacccgttcagaaagctatctgt

SEQ ID NO: 55340 - DNA, 75 bp, synthetic construct
  source 1..75: mol_type = other DNA
ccaacgtattgaaagcgaatcagaacgtgaacgcctgaaaaaagtggtcgcagagtattgcgacgagcagggcgg

SEQ ID NO: 55341 - DNA, 75 bp, synthetic construct
  source 1..75: mol_type = other DNA
accaactgaatattatcataataatttgagtggttgcctcaatgtcttgaaaataatgaaagaacataacgtgaa

SEQ ID NO: 55342 - DNA, 75 bp, synthetic construct
  source 1..75: mol_type = other DNA
aagtcatgtctgccagcattcatctactggccgcggataattatacgaccatggatttctgccataacgccgaat

SEQ ID NO: 55343 - DNA, 75 bp, synthetic construct
  source 1..75: mol_type = other DNA
acccgcgctaccgtcgcgccggactggatgtccattccttgtgggtttatggctggcgatgcgcaacgggttatc

SEQ ID NO: 55344 - DNA, 75 bp, synthetic construct
  source 1..75: mol_type = other DNA
catctctgctcgttaagcaaagccccggcatgcactacggccacggctggatcgcaggtaaggacggcaagcgct

SEQ ID NO: 55345 - DNA, 75 bp, synthetic construct
  source 1..75: mol_type = other DNA
gagttaactaaaacagagatctttgcagtcaagaaacagatcaaagagcttcgtttgtgtctgacagcttctgaa

SEQ ID NO: 55346 - DNA, 75 bp, synthetic construct
  source 1..75: mol_type = other DNA
tatagtattgaccttcggcctgtctattctgatcggaatgtctacaggtatggcgggagctactatcagcctacc

SEQ ID NO: 55347 - DNA, 75 bp, synthetic construct
  source 1..75: mol_type = other DNA
catggtggttatcgcggtgcgggtgctgggcctgcggcagggaggtatcagtgaagaaacacaaaatgacagctg

SEQ ID NO: 55348 - DNA, 75 bp, synthetic construct
  source 1..75: mol_type = other DNA
gcggttgaagggacgaaaggggtcaacattgccgatcgtcaggagatgaagcgtctcaacgattacatgatgact

SEQ ID NO: 55349 - DNA, 75 bp, synthetic construct
  source 1..75: mol_type = other DNA
gtcacagtggaatcagtctgagcggtggtggcagcttcggggataaatttcagggtaacatgccgggtggcatga

SEQ ID NO: 55350 - DNA, 75 bp, synthetic construct
  source 1..75: mol_type = other DNA
tattaaaaagacaacgggagcaaatcccagcaatacaaaatgaacgaaggagtacaggaaataacccaagtttta

SEQ ID NO: 55351 - DNA, 75 bp, synthetic construct
  source 1..75: mol_type = other DNA
gagtcagatcacaaaaaagaatttggctcaattcgatactctttaatggcatttgttggtgatacaccagattat

SEQ ID NO: 55352 - DNA, 75 bp, synthetic construct
  source 1..75: mol_type = other DNA
aatgcgttgaaggccgcgaaggaagcaaccggcgaaacacttcctgctaatgcaacagagaaacaacgtcaggaa

SEQ ID NO: 55353 - DNA, 75 bp, synthetic construct
  source 1..75: mol_type = other DNA
tgggctcttggcgcaggtgcaaatgcaggaattggttccatggtagatagttcagttgatcctgaaaatgcaatc

SEQ ID NO: 55354 - DNA, 75 bp, synthetic construct
  source 1..75: mol_type = other DNA
ttgttcaggggggatatggccccgacggtggttgctctgtttatggagaagatatccatattaataatcatggta

SEQ ID NO: 55355 - DNA, 75 bp, synthetic construct
  source 1..75: mol_type = other DNA
attcatggcggaagtctgatactgaataatggaggagaatctgcaggtactattgcaggggatggttctctgaac

SEQ ID NO: 55356 - DNA, 75 bp, synthetic construct
  source 1..75: mol_type = other DNA
aagaaaaaggattcgccacgcaagagagcgccgaaaaaaagcccgccatcagaagaggcgggcaatggagtgata

SEQ ID NO: 55357 - DNA, 75 bp, synthetic construct
  source 1..75: mol_type = other DNA
aatcctctatccggtaatcttctcttcggattattctgccgcagaaaaacttcaggtctatcatttctcgattaa

SEQ ID NO: 55358 - DNA, 75 bp, synthetic construct
  source 1..75: mol_type = other DNA
gcattccatcacgcattgtcagattcatcgctaggcgctgatgaagtagaggaaattaaggccggtttgcgtgct

SEQ ID NO: 55359 - DNA, 75 bp, synthetic construct
  source 1..75: mol_type = other DNA
atgtattcacccttacttgttcattattcagcgttgcagacgcagtctgctctgctggcgcatatcagccagctg

SEQ ID NO: 55360 - DNA, 75 bp, synthetic construct
  source 1..75: mol_type = other DNA
tcggtgagtgccgtgaagattcccgggcataccgcaacctgccggagccggaagcggtgctgacggaggcagaag

SEQ ID NO: 55361 - DNA, 75 bp, synthetic construct
  source 1..75: mol_type = other DNA
gaagagaagcaactctctgataaccaggatttacataaaaaatacttcttggaattaatggacatcattgataag

SEQ ID NO: 55362 - DNA, 75 bp, synthetic construct
  source 1..75: mol_type = other DNA
atcaccgaagtggcgattcaccgcctggagcagcagcttggcaagccttacgtctggggcggcacgcggcccgat

SEQ ID NO: 55363 - DNA, 75 bp, synthetic construct
  source 1..75: mol_type = other DNA
acattcacaattaagccaaaaacaatttttcattaccgtgatgatttctggtttgcgtggccggatgtggtggat

SEQ ID NO: 55364 - DNA, 75 bp, synthetic construct
  source 1..75: mol_type = other DNA
atccgtggcaggtcgaagtctgcaaatggctgtgacctggcgcgctgctttctggtgtctggatattatggatag

SEQ ID NO: 55365 - DNA, 75 bp, synthetic construct
  source 1..75: mol_type = other DNA
tgatcggcacctgccgtctgaacggtatcgatccggaagcgtatctgcgccatatgctgagcatactgccggaat

SEQ ID NO: 55366 - DNA, 75 bp, synthetic construct
  source 1..75: mol_type = other DNA
cctgaactactccaccgaattgataactacaccggacggcctttaacccgtctggctgttgagttaacgttatta

SEQ ID NO: 55367 - DNA, 75 bp, synthetic construct
  source 1..75: mol_type = other DNA
tcatgcccgccgaaagatccacgatgtgcacgtccgcatcccgtcagcactgacggaagaagccctggagcagat

SEQ ID NO: 55368 - DNA, 75 bp, synthetic construct
  source 1..75: mol_type = other DNA
atgaaatgttgcctatgctccataaggcgacttttattactacatttatattttacctatcattagtcatttatg

SEQ ID NO: 55369 - DNA, 75 bp, synthetic construct
  source 1..75: mol_type = other DNA
agaaaggcgatgcggctgaacatgcagagttccatatgaaagacaaccgctgggtgcctggctggatgtgtgcac

SEQ ID NO: 55370 - DNA, 75 bp, synthetic construct
  source 1..75: mol_type = other DNA
tgtgaggaatccgacctgctggaagcagaaatgaagctgatgcgctgcatggcgaaggtcagagcgtggacgccg

SEQ ID NO: 55371 - DNA, 75 bp, synthetic construct
  source 1..75: mol_type = other DNA
tttcacatgcgcgactggtggcagccgacgaaagcaaacttcttcggacacctgaaaaagccgcagattatcgca

SEQ ID NO: 55372 - DNA, 75 bp, synthetic construct
  source 1..75: mol_type = other DNA
atggtgacctgagcgcagatatccgccgtcttgagggcgcgctgaccgcctgcgcgctgcaggttaaaaccgtca

SEQ ID NO: 55373 - DNA, 75 bp, synthetic construct
  source 1..75: mol_type = other DNA
tcagaaaagtacctttacccaaataaggcaacttataaaccagctagaaccgtcagatattaacgatgatttaag

SEQ ID NO: 55374 - DNA, 75 bp, synthetic construct
  source 1..75: mol_type = other DNA
cgcggcggggtatggtgtccggtcagcacaatggaacttagccgcgaaatggtggcgatctattcagagcacagg

SEQ ID NO: 55375 - DNA, 75 bp, synthetic construct
  source 1..75: mol_type = other DNA
aagaatgcattgacgtaattcgtgaagaagtaaagcgatgggatgattcccgcgccgctggcattggcatcaaag

SEQ ID NO: 55376 - DNA, 75 bp, synthetic construct
  source 1..75: mol_type = other DNA
caatctggtagcaaatatgcagcgcctggaaatgactgcgcgattttttattcagaggttagagcagagtggaat

SEQ ID NO: 55377 - DNA, 75 bp, synthetic construct
  source 1..75: mol_type = other DNA
tcgccataaatccgcgctggtcatgcagaagtacagccgccagcaagcgagggaggcagagcagaaagcccgtgc

SEQ ID NO: 55378 - DNA, 75 bp, synthetic construct
  source 1..75: mol_type = other DNA
atgagcgcacgttcacaggcactggttcctctcagcacagagcaacaggccgcatggcgggcggtggcggagaca

SEQ ID NO: 55379 - DNA, 75 bp, synthetic construct
  source 1..75: mol_type = other DNA
acactgaatcagtcccgtctggtgacggataaaaatctggtgctgtcttcatccgggcagattgtacagaacggt

SEQ ID NO: 55380 - DNA, 75 bp, synthetic construct
  source 1..75: mol_type = other DNA
atgagcacttttaccgacaaagaactgattaaagaaatcaaagagcgaatcggcagcctggacgtgcgagacgat

SEQ ID NO: 55381 - DNA, 75 bp, synthetic construct
  source 1..75: mol_type = other DNA
tgtctgaacggaagccgcaggatatcgctgtctgacctgcgatttttcatgccgtccctgaccgcagaagaactg

SEQ ID NO: 55382 - DNA, 75 bp, synthetic construct
  source 1..75: mol_type = other DNA
aaaggcgcggttcgggagatcaagggaggcatggccgtacttaccagcatacccgccagtaatgggcttgaacta

SEQ ID NO: 55383 - DNA, 75 bp, synthetic construct
  source 1..75: mol_type = other DNA
cgcggagaagatgaagaaaggcgatgcggctgaacatgcagagttccacatgaaagacaaccgctgggtgcctgg

SEQ ID NO: 55384 - DNA, 75 bp, synthetic construct
  source 1..75: mol_type = other DNA
gctccaacctgaaggcattgtaactctgtctgatgaaagcatttatgtcgctagtgaacctgatatcctcgctaa

SEQ ID NO: 55385 - DNA, 75 bp, synthetic construct
  source 1..75: mol_type = other DNA
aataatgaaagtctgatgattctgtccgatgaatcgcgtaagttactcaagtttaacctgacagaaatgtctttc

SEQ ID NO: 55386 - DNA, 75 bp, synthetic construct
  source 1..75: mol_type = other DNA
gtggcaaacctgcaggtggccacgtcagaaacctggcgcgacaaacagacgggggaaatgaaggagcagacggaa

SEQ ID NO: 55387 - DNA, 75 bp, synthetic construct
  source 1..75: mol_type = other DNA
gcaggataacacaagaaatatcctcgatcctaagacatttttggagtttttggtaaaaatatttaccctgggtta

SEQ ID NO: 55388 - DNA, 75 bp, synthetic construct
  source 1..75: mol_type = other DNA
accaggttgaactggtgacaccggcactgcgggtggttgcagaaaacgaatgggcaaactgtacggcaatcactc

SEQ ID NO: 55389 - DNA, 75 bp, synthetic construct
  source 1..75: mol_type = other DNA
tgattaaagaaatcaaagagcgcataggcagcctggacgttcgagacaatattgagcaccgggcttatgaaatag

SEQ ID NO: 55390 - DNA, 75 bp, synthetic construct
  source 1..75: mol_type = other DNA
ggcggcaagggaggccagtcatgctgtccgtgagatggagcggtggatggtgccgaacaaactccgggaggcggc

SEQ ID NO: 55391 - DNA, 75 bp, synthetic construct
  source 1..75: mol_type = other DNA
aggcaatcagttcgtggaatattttggcgaaatgctcttccgctccgacttgtgtaatgccgacgtagcaatggg

SEQ ID NO: 55392 - DNA, 75 bp, synthetic construct
  source 1..75: mol_type = other DNA
accagcctgcaaccactgattgagagcttcacacatccgaacgcgattgtgctggacccgtttgcaggcagcgga

SEQ ID NO: 55393 - DNA, 75 bp, synthetic construct
  source 1..75: mol_type = other DNA
tttagcggaaaatccttgcagccgaagttttccaaactcaacccgctaccgggcattaaacggatgttctcggca

SEQ ID NO: 55394 - DNA, 75 bp, synthetic construct
  source 1..75: mol_type = other DNA
acgcagccgctgtttttgagcctgccgcagccgaggcgctctgtcccgctgccgtttcagaagacctggcgtttg

SEQ ID NO: 55395 - DNA, 75 bp, synthetic construct
  source 1..75: mol_type = other DNA
cggggtttgctgttgaatacctgagccgcaagaatccgtttggtgatatcaaatcggatggcacggtgaaaacgg

SEQ ID NO: 55396 - DNA, 75 bp, synthetic construct
  source 1..75: mol_type = other DNA
aatccagatgaccttcagtgcccgcctgaggctgctcaatgtccaattacacttgagcaaccagaagaaggcgta

SEQ ID NO: 55397 - DNA, 75 bp, synthetic construct
  source 1..75: mol_type = other DNA
cagtgcctttgcgcatgaagcaggcgaattttttatgcgtgcaggttctgcaaccgtacgtccaacagaaggtgc

SEQ ID NO: 55398 - DNA, 75 bp, synthetic construct
  source 1..75: mol_type = other DNA
gcgtacggtgagcagtatggcagtccctggagcattgaggttctgccggttattcctgaagagtggcagatggtg

SEQ ID NO: 55399 - DNA, 75 bp, synthetic construct
  source 1..75: mol_type = other DNA
aaaatctgcgtcttaatgtcggcgtcagtaatatcctcaataaacagatcttccgatcttctgaaggggcgaata

SEQ ID NO: 55400 - DNA, 75 bp, synthetic construct
  source 1..75: mol_type = other DNA
aataaagaacagttagaaaaattaaatcctccggaagatttacgtatagcaataaaaaaattggggtggaataat

SEQ ID NO: 55401 - DNA, 75 bp, synthetic construct
  source 1..75: mol_type = other DNA
atgacgggtctgcgaacacgacgttatgctggcgcatttttgttgtggacagcgactgtttctgtggctgacgct

SEQ ID NO: 55402 - DNA, 75 bp, synthetic construct
  source 1..75: mol_type = other DNA
cattagcgccgcaaaccatctatgtttcggcgacgccgggtaattacgagctggaaaaatccggcggcgatgtgg

SEQ ID NO: 55403 - DNA, 75 bp, synthetic construct
  source 1..75: mol_type = other DNA
tgtttctctctgcttcttaccatataccaaggaagaaaaggctgaaagaaaaacaaagggtgctgcgtttctcga

SEQ ID NO: 55404 - DNA, 75 bp, synthetic construct
  source 1..75: mol_type = other DNA
tggggtggacgtttcggagtttattgaatctatgaaacttaatcaaaggatgccacttgaaaagcgcattcccta

SEQ ID NO: 55405 - DNA, 75 bp, synthetic construct
  source 1..75: mol_type = other DNA
aacataccgcagtctgccggagccggaagcggtgctgacggaggcggaagaagaacgcctgaacgaactgatggc

SEQ ID NO: 55406 - DNA, 75 bp, synthetic construct
  source 1..75: mol_type = other DNA
tcggtgccggagaggcattcaccaacaatggaacgctgactgccggtaaaggcaacagtgttttcagcgcacagc

SEQ ID NO: 55407 - DNA, 75 bp, synthetic construct
  source 1..75: mol_type = other DNA
ccatgcaggagcgtggcggcgcagacgtgctgcacggcgtgccaaaaatactctatctcgaccccggttcggcaa

SEQ ID NO: 55408 - DNA, 75 bp, synthetic construct
  source 1..75: mol_type = other DNA
ggtgctctatgaagtggaccttatcaacatggtggaaattgtggacggcgtggacctgatggaagcgcaccgcaa

SEQ ID NO: 55409 - DNA, 75 bp, synthetic construct
  source 1..75: mol_type = other DNA
actggctaaaggcagttatagcgacaatgtacgccttgacccgtgggtgtttatgttctcggcaggatatcgttt

SEQ ID NO: 55410 - DNA, 75 bp, synthetic construct
  source 1..75: mol_type = other DNA
tgcgtgcgcaaaactgcgtcgggccgaatacccgcctggaagtggttaccgaaggcgtgctgacgcgcatgatcc

SEQ ID NO: 55411 - DNA, 75 bp, synthetic construct
  source 1..75: mol_type = other DNA
caactggcaggggatcgttgagtcgctgacgctgccgaaattcacccgcaaatatgagaagtatcgcggtggcgg

SEQ ID NO: 55412 - DNA, 75 bp, synthetic construct
  source 1..75: mol_type = other DNA
atggctaataaaccttcggcagaagaactgaaaaaaaatttgtccgagatgcagttttacgtgacgcagaatcat

SEQ ID NO: 55413 - DNA, 75 bp, synthetic construct
  source 1..75: mol_type = other DNA
gtgcagggctggctgctattgcactggctgccggaggcggtggtggaagcagtcgtcataagcgtacagctgagg

SEQ ID NO: 55414 - DNA, 75 bp, synthetic construct
  source 1..75: mol_type = other DNA
cccgtggagcttgtggtacgtggacgtcacaaagaagtggattccggtgagtggaagacgggcgaaagcaacacc

SEQ ID NO: 55415 - DNA, 75 bp, synthetic construct
  source 1..75: mol_type = other DNA
atggctttaccacgtaaattaaaacacctgaacctgtttaacgacgggaataactggcaggggatcgttgagtcg

SEQ ID NO: 55416 - DNA, 75 bp, synthetic construct
  source 1..75: mol_type = other DNA
gcagtggaaagcgaaggcgaagcaactggcggagcgcggggatttgactcccgccgactggaacaaccttgagct

SEQ ID NO: 55417 - DNA, 75 bp, synthetic construct
  source 1..75: mol_type = other DNA
ttctgacgaggcggtcacttttttcagaagctatctgaaaaattatccgggcctgttgaataaagcatggagtgg

SEQ ID NO: 55418 - DNA, 75 bp, synthetic construct
  source 1..75: mol_type = other DNA
aaggtatcagtctgcaaagccgtcctgatggtcgtaccatgctggtaaacaccacgccgtacatctatgccattg

SEQ ID NO: 55419 - DNA, 75 bp, synthetic construct
  source 1..75: mol_type = other DNA
aggagaatccggagcgggtattcagggatactcacccggaaggtaaccctgcgagtgatattctgtacttactgg

SEQ ID NO: 55420 - DNA, 75 bp, synthetic construct
  source 1..75: mol_type = other DNA
gcaacagcggaaaaaaacgacttacaggcacaggagagcgaacgaaaacaggcggtccaaaaacgaatcgaggga

SEQ ID NO: 55421 - DNA, 75 bp, synthetic construct
  source 1..75: mol_type = other DNA
atacctaaagaaaatggcaactggattcatcggactgacttagagcactcactacgtgttgcagggattcgtatt

SEQ ID NO: 55422 - DNA, 75 bp, synthetic construct
  source 1..75: mol_type = other DNA
gcattattattaggtttactcagttaatgtccctatgcgaccaactggaacagcaatccctaaccagtctggacg

SEQ ID NO: 55423 - DNA, 75 bp, synthetic construct
  source 1..75: mol_type = other DNA
aggtatgtggatatacagcgaacgccgatgtaaatggcgctcgtaacattttagctgcggggcacgccgttcttg

SEQ ID NO: 55424 - DNA, 75 bp, synthetic construct
  source 1..75: mol_type = other DNA
gcgatgtacgcacaatcgttgagctggggaaagccatagacttcgatgccagaactgctatcccattcgaaggtg

SEQ ID NO: 55425 - DNA, 75 bp, synthetic construct
  source 1..75: mol_type = other DNA
tgcacttgatgacgcccgttaccaggcaaaatacgtttcagttatctggcaaaaactgatcccgagtcaggctga

SEQ ID NO: 55426 - DNA, 75 bp, synthetic construct
  source 1..75: mol_type = other DNA
gcctgtggagggatggtgcagtcaggccgcccgttgaagcaggaacccaccgaaatgattcaggcgacagcctga

SEQ ID NO: 55427 - DNA, 75 bp, synthetic construct
  source 1..75: mol_type = other DNA
ttcccgggagccgatgattgattacctcggagaactggttggtgtataccgccttcccgcgcagcctgccaccac

SEQ ID NO: 55428 - DNA, 75 bp, synthetic construct
  source 1..75: mol_type = other DNA
ggttcactgagctatctgggcgaggataccgccgaacagctggagttgatgcgtagcgccttccgggttatccgg

SEQ ID NO: 55429 - DNA, 75 bp, synthetic construct
  source 1..75: mol_type = other DNA
acagtctacagcacaggcaaaacactggaataatggtctgggatgggatgaggttgttaaatatttaaaggaact

SEQ ID NO: 55430 - DNA, 75 bp, synthetic construct
  source 1..75: mol_type = other DNA
atgttcaggcttgttgtcctgcgcgcgcgtattgctcgtgaaattgctgtacccaatagtgatgtccgaaaaaac

SEQ ID NO: 55431 - DNA, 75 bp, synthetic construct
  source 1..75: mol_type = other DNA
tggggcggcgtaactacatgttcttcggctctgatggaggaggcgagagtgcggcagtgatgtacagcctgatcg

SEQ ID NO: 55432 - DNA, 75 bp, synthetic construct
  source 1..75: mol_type = other DNA
actgcgggtggttgcagaaaacgaatgggcaaactgtacggcaatcactcttaacgtgacaggggtgtccgatgg

SEQ ID NO: 55433 - DNA, 75 bp, synthetic construct
  source 1..75: mol_type = other DNA
cggcgaagcagaatctggtcgctttttcccgtgagccgatgattgattacctcggtgaactggtcggtgtatacc

SEQ ID NO: 55434 - DNA, 75 bp, synthetic construct
  source 1..75: mol_type = other DNA
cgatcttcacagactggttcgtgatactgacaaagttttccctaatcctggcaattcaagtctggggctgatgac

SEQ ID NO: 55435 - DNA, 75 bp, synthetic construct
  source 1..75: mol_type = other DNA
accgccgaacagctggagttgatgcgtagcgccttccgggttatccggacggtacgggaaaaacatgcctgtact

SEQ ID NO: 55436 - DNA, 75 bp, synthetic construct
  source 1..75: mol_type = other DNA
tcctggttgagcatccgctggttcgtcacttaacccgccgtctgatttggggcgtttatagcgccgaaaaccagc

SEQ ID NO: 55437 - DNA, 75 bp, synthetic construct
  source 1..75: mol_type = other DNA
gcagccaatccggctaccgtgctggcactgctggatgaacgggaaagaaaccagcaatacatcaaacgccgcgac

SEQ ID NO: 55438 - DNA, 75 bp, synthetic construct
  source 1..75: mol_type = other DNA
atgcagagtaaaccgctactgacttccctgtataagctgatgcaggagaaagaacacacattatcgaaaaaatgc

SEQ ID NO: 55439 - DNA, 75 bp, synthetic construct
  source 1..75: mol_type = other DNA
cgattgagatgtacaaaccaactgtgcgcatcgtggaagttaatgtgccacgcgccgctggcattcgcatcaaag

SEQ ID NO: 55440 - DNA, 75 bp, synthetic construct
  source 1..75: mol_type = other DNA
gcggaactgaagctgattgcggagaaggtgaagaaggggtatgtggaagaattatcttcgccatcccaacccgca

SEQ ID NO: 55441 - DNA, 75 bp, synthetic construct
  source 1..75: mol_type = other DNA
cacacaaagcgcgcttacctgctgcggagatcgatccgacttatcgtcgattgcgctggcaaattttcctgggga

SEQ ID NO: 55442 - DNA, 75 bp, synthetic construct
  source 1..75: mol_type = other DNA
gcacttcacatcatcgctatcggacgtttacgaactgacgataaaacaatgacacctgaaccagtattgtccttt

SEQ ID NO: 55443 - DNA, 75 bp, synthetic construct
  source 1..75: mol_type = other DNA
ggtcatgaaaattgctggagatgcccagctttctaccccatgcactgacagcatcataaacagcattgcaacagg

SEQ ID NO: 55444 - DNA, 75 bp, synthetic construct
  source 1..75: mol_type = other DNA
tgcactggtacaaatatccgctgacgtactggctcaatatcatcacctccctcgggtgtctgcagggcggcgatc

SEQ ID NO: 55445 - DNA, 75 bp, synthetic construct
  source 1..75: mol_type = other DNA
gcgtgggtgtcatcgcctttctgattggtatcacaacatttttcaatcgtgacgaacgtcgcttcaaaaagcagc

SEQ ID NO: 55446 - DNA, 75 bp, synthetic construct
  source 1..75: mol_type = other DNA
ccctggactggggaacgtcatcgcttcgggcatggcgttttggcgaatcaccaaatccacaagaaaaacgtgaat

SEQ ID NO: 55447 - DNA, 75 bp, synthetic construct
  source 1..75: mol_type = other DNA
caaaaagcgcattgcagaactggaagcacgggaaataaaaccagccaaaggtgaagttcttgtcgttgtttctgg

SEQ ID NO: 55448 - DNA, 75 bp, synthetic construct
  source 1..75: mol_type = other DNA
tcagagcgtgtaaaaacggatattaataaaaacaattttaatgatgttctggcagatatctccccgtctgtacat

SEQ ID NO: 55449 - DNA, 75 bp, synthetic construct
  source 1..75: mol_type = other DNA
caattgattttgcagtaatggaaaaaacaaagcgttgtatagtctatcccgttgatattggttggaacgatgttg

SEQ ID NO: 55450 - DNA, 75 bp, synthetic construct
  source 1..75: mol_type = other DNA
aaccgtggcaagaaccactggcggctggagcggtgattttgcaccgttttgcttttaacgctgcggagcaactga

SEQ ID NO: 55451 - DNA, 75 bp, synthetic construct
  source 1..75: mol_type = other DNA
ttttgatgtagaagccgggctgcagatcgcgcgtaaattgctgcttgagctggtgaatatgggactgccactggc

SEQ ID NO: 55452 - DNA, 75 bp, synthetic construct
  source 1..75: mol_type = other DNA
ggcagaagaatatgtttccacaggagaatatctctggaatagcggaatgtttatgtttaaagcatcagtttattt

SEQ ID NO: 55453 - DNA, 75 bp, synthetic construct
  source 1..75: mol_type = other DNA
ggcactgacgtactatgcgaacgatggctgggtggaaatcgacaacaacatcgctgaaaatgccctgcgggcggt

SEQ ID NO: 55454 - DNA, 75 bp, synthetic construct
  source 1..75: mol_type = other DNA
gtgacctggtacggctgggacggcgaccggctgaccacgatacagaacgacaggagccgcatccagacgatttat

SEQ ID NO: 55455 - DNA, 75 bp, synthetic construct
  source 1..75: mol_type = other DNA
gcggtacgcaggatttacgggattattcaaaattataaatcagtcagtgttacacgtgctgatattttgtccggc

SEQ ID NO: 55456 - DNA, 75 bp, synthetic construct
  source 1..75: mol_type = other DNA
ttcacctgatttttgtgaattatggccaatacatagcgacctgaacaaaactcgcctgaaaaatactgttctgcc

SEQ ID NO: 55457 - DNA, 75 bp, synthetic construct
  source 1..75: mol_type = other DNA
ggagaaagcctcagtggaggaaatcagtctgccgctgctgacgaaaatgtcctcagagcgcacgctggcagtcca

SEQ ID NO: 55458 - DNA, 75 bp, synthetic construct
  source 1..75: mol_type = other DNA
gtttaacaacaatgactgtgaggttcgtgattatatctttgaattgatgaacggtgacggtgtgtgttttctgtt

SEQ ID NO: 55459 - DNA, 75 bp, synthetic construct
  source 1..75: mol_type = other DNA
tggctctggttgccggcatggcacaggctgacagcaacagtgattaccgggccggttctgattttgcccgtcaga

SEQ ID NO: 55460 - DNA, 75 bp, synthetic construct
  source 1..75: mol_type = other DNA
acactcagaactggcgaaagcgttcgcatacgccctgaaccagtggccggcgctgacgtactatgcagatgatgg

SEQ ID NO: 55461 - DNA, 75 bp, synthetic construct
  source 1..75: mol_type = other DNA
gcatcctgacgctaatgatgggtggataattcctggtgcgtcgtggaaaccgtcacactggatgccgctaccaga

SEQ ID NO: 55462 - DNA, 75 bp, synthetic construct
  source 1..75: mol_type = other DNA
ccggcgcgaaaaatccacctgtaccactgcgaccatcgcggcctgccgctggcgctcatcagcacggaaggggca

SEQ ID NO: 55463 - DNA, 75 bp, synthetic construct
  source 1..75: mol_type = other DNA
gttgctggccttttctgacgtctgggttcgtcatgaagagcttgatggcgtactgaaaaagcaacaacaggatga

SEQ ID NO: 55464 - DNA, 75 bp, synthetic construct
  source 1..75: mol_type = other DNA
tgatcaaaatggcttctttgctgggttttgacccggtaagccgtcgcagaaatccaccggaaacagaggaagagg

SEQ ID NO: 55465 - DNA, 75 bp, synthetic construct
  source 1..75: mol_type = other DNA
gctggtgcgatccgtcacggtatcacccgtgctctgatggaatacgacgagtccctgcgttctgaactgcgtaaa

SEQ ID NO: 55466 - DNA, 75 bp, synthetic construct
  source 1..75: mol_type = other DNA
cgcaaagccgtggaagaccttgccagccgtgggttcagcattgttaacagccagggcggtgagagccgaaatccg

SEQ ID NO: 55467 - DNA, 75 bp, synthetic construct
  source 1..75: mol_type = other DNA
gtcagaacgcaccaaaaggtcacttcttcctgcacccgcgtgcacgttcaccacactatattgtgatgaatgaca

SEQ ID NO: 55468 - DNA, 75 bp, synthetic construct
  source 1..75: mol_type = other DNA
ccggctctggagggcagcggtattgcagtggcgctgcgcacgaagctgaaactgttctaccgcccgaaggcactg

SEQ ID NO: 55469 - DNA, 75 bp, synthetic construct
  source 1..75: mol_type = other DNA
tatcccggaaatgcggcaggcattcaacggtctaaatattcagtcggttgatatcagctacaacctcaagatcac

SEQ ID NO: 55470 - DNA, 75 bp, synthetic construct
  source 1..75: mol_type = other DNA
gttgctacggcgcaattcaggatgcgcaggcattgtctgaaggtgtggtgtcctcttcccgttatccgaaacact

SEQ ID NO: 55471 - DNA, 75 bp, synthetic construct
  source 1..75: mol_type = other DNA
attgtcatgaactatatccgtaacctggatagtgaaacgggggcaatggtgcgcctgctggaagatggcgattag

SEQ ID NO: 55472 - DNA, 75 bp, synthetic construct
  source 1..75: mol_type = other DNA
cggtcttgtgaatattgccattatggacggtacggtctggcgtctgctgaatggctttaagctgttccgcgaaaa

SEQ ID NO: 55473 - DNA, 75 bp, synthetic construct
  source 1..75: mol_type = other DNA
tggtcatacagcgaaagaaaatcgcctgtcacaaagtaaattcagatgccagatatgtggatatacagcgaacgc

SEQ ID NO: 55474 - DNA, 75 bp, synthetic construct
  source 1..75: mol_type = other DNA
ggttatctgccggtatcaatgcataaagaagtgccggaggttctggcggctgtggcaaacaccgatccggacatt

SEQ ID NO: 55475 - DNA, 75 bp, synthetic construct
  source 1..75: mol_type = other DNA
tggatgaagggcatgattttgacagtcgctggctggccctgattgcccgtctgtttgataacgcatcccgttcac

SEQ ID NO: 55476 - DNA, 75 bp, synthetic construct
  source 1..75: mol_type = other DNA
gcgaaaaccgatggttgtaacgaggctcgctggttctcgctgacgacgcgcaatgttaatgacggccagattcag

SEQ ID NO: 55477 - DNA, 75 bp, synthetic construct
  source 1..75: mol_type = other DNA
agagaacgaaaattcattagtatagataaagacaattttgatgaagttatggcatcaatgagtccgactgctcat

SEQ ID NO: 55478 - DNA, 75 bp, synthetic construct
  source 1..75: mol_type = other DNA
gccagcgcactttcatactctcgtggggcgttgttacgtgcgtgctcaatctacatcctgatttttctgttcatt

SEQ ID NO: 55479 - DNA, 75 bp, synthetic construct
  source 1..75: mol_type = other DNA
agtcgttccgaaaaagtctcccgccgtatcgcacaaatggaagccgatctgaaccggcttcagaaagagagcgat

SEQ ID NO: 55480 - DNA, 75 bp, synthetic construct
  source 1..75: mol_type = other DNA
ccagcgagcgcgtaatgaatgacgtgacgctgacctcccgcaacatggacaacactgtggcgcacgcgggtaagt

SEQ ID NO: 55481 - DNA, 75 bp, synthetic construct
  source 1..75: mol_type = other DNA
aacccgcaatgaaatcacacagacggtcagtaaaacgctggaggaccagagcgccaccatacagcagatacagcg

SEQ ID NO: 55482 - DNA, 75 bp, synthetic construct
  source 1..75: mol_type = other DNA
ccgcgatggttccggcatctggaccatctgtcggggtgccacggtggtggatggaaaacccgtttttcccggtat

SEQ ID NO: 55483 - DNA, 75 bp, synthetic construct
  source 1..75: mol_type = other DNA
atgaataagaaatttaaatataagaaatcgcttttagcggctattttgagcgcaaccctgttagccggttgtgat

SEQ ID NO: 55484 - DNA, 75 bp, synthetic construct
  source 1..75: mol_type = other DNA
gagaaaaaaggcgtcatcacgataaagcgtggcgtggcccggggtatcactcttcataccgcggtgaaggacgac

SEQ ID NO: 55485 - DNA, 75 bp, synthetic construct
  source 1..75: mol_type = other DNA
acctgttcaggatccaaaaccagatctgttatccacgatggaacacgaaaacgtacgcggcagtgagtattacca

SEQ ID NO: 55486 - DNA, 75 bp, synthetic construct
  source 1..75: mol_type = other DNA
cacggtgcgtatttgttgctgatgttcaattactggcaaacagggaaaccaatacctaaaaacaggctggcaaaa

SEQ ID NO: 55487 - DNA, 75 bp, synthetic construct
  source 1..75: mol_type = other DNA
ggggtattacggcgatctggccattgtggtggcgaaaacgtcttatgtggcagaggacggtaccgaaaaacgtta

SEQ ID NO: 55488 - DNA, 75 bp, synthetic construct
  source 1..75: mol_type = other DNA
gtgaagtatttcacttctcaagatgtagttgaagcctggaaacgtggtgagatcaaccgctttagggtaagaatg

SEQ ID NO: 55489 - DNA, 75 bp, synthetic construct
  source 1..75: mol_type = other DNA
accggaagtgctttacttcctgaccgtaagctatccggctgtgaccatcttgttatacacgatggtgataccttt

SEQ ID NO: 55490 - DNA, 75 bp, synthetic construct
  source 1..75: mol_type = other DNA
gggacgtcagcacgtccggattgacggcgcagttacatgaggttctgcctgacggcgctgtgattcatattgttc

SEQ ID NO: 55491 - DNA, 75 bp, synthetic construct
  source 1..75: mol_type = other DNA
ccatctacaggaactcagtaatgctttcaaatcaaccagttccgggatttcacgttcttcaaccggcatgagagg

SEQ ID NO: 55492 - DNA, 75 bp, synthetic construct
  source 1..75: mol_type = other DNA
atgccgcagaagctcagaagtatgccgcagacctgcaaaatcagcagttcaacaccatcatgaacaacctgaagc

SEQ ID NO: 55493 - DNA, 75 bp, synthetic construct
  source 1..75: mol_type = other DNA
gagcagacagaatggcatcgcgtggtgctgttcggcaagctcgcggaagtggctggtgaatatctgcgcaagggc

SEQ ID NO: 55494 - DNA, 75 bp, synthetic construct
  source 1..75: mol_type = other DNA
gaccgtcagcattgcagcagggggttagtggtgctgcatccggtgcgcttttgggtggtggcatagccagtgctc

SEQ ID NO: 55495 - DNA, 75 bp, synthetic construct
  source 1..75: mol_type = other DNA
gtaagctatccggctgtgaccatcttgttatacacgatggtgatacctttttactgtgccggcctgaccggcggc

SEQ ID NO: 55496 - DNA, 75 bp, synthetic construct
  source 1..75: mol_type = other DNA
cccgcgaacgtgaagggctgtccccgcgtgatggtggtgatgagttcagccaggcatggaaacaggaagtaaaaa

SEQ ID NO: 55497 - DNA, 75 bp, synthetic construct
  source 1..75: mol_type = other DNA
ccgtcagcgaactggcggagtccattaagggcgttggcctgttgcagaatctggttgttcatgccctgcctggtg

SEQ ID NO: 55498 - DNA, 75 bp, synthetic construct
  source 1..75: mol_type = other DNA
cagggagagcaggggctacgcggacctgcaggagagagaggcccggcggggccgcagggaccgaaaggagatgcc

SEQ ID NO: 55499 - DNA, 75 bp, synthetic construct
  source 1..75: mol_type = other DNA
ttcctcaacggcgatccggaccagccgatcattatggggcgcacctaccaccaggaaaaccgcacccccggcagc

SEQ ID NO: 55500 - DNA, 75 bp, synthetic construct
  source 1..75: mol_type = other DNA
atgttgacgctgtaaacaatggtggcgaaggcgacggtatacaggcttatacggcgattaaggaaattttgctgg

SEQ ID NO: 55501 - DNA, 75 bp, synthetic construct
  source 1..75: mol_type = other DNA
gcatgcgagtctgaaaaggccgcggcagcagacgcgaatgatgccagacaacatgctgaaaccgccagagtggct

SEQ ID NO: 55502 - DNA, 75 bp, synthetic construct
  source 1..75: mol_type = other DNA
tgaaacacactccgaagatggttcttatcatgatgttcactataaacaacaaaagttcgacaatgaaaactccgt

SEQ ID NO: 55503 - DNA, 75 bp, synthetic construct
  source 1..75: mol_type = other DNA
agaaagtaagaataataagatcgaatgtaaaattgatgaaattaacatcatcgccaaagtaataatgacttgtaa

SEQ ID NO: 55504 - DNA, 75 bp, synthetic construct
  source 1..75: mol_type = other DNA
gcagccagagcgattaccggaatgctgtatcctggcgtgaagcagtcagacctcagtgaagagcagaagcagacg

SEQ ID NO: 55505 - DNA, 75 bp, synthetic construct
  source 1..75: mol_type = other DNA
atgtcaactcaaaaattcacatttcgccatattgatgacgatatgaaagccgttgtcatacaaaatcgcggtggt

SEQ ID NO: 55506 - DNA, 75 bp, synthetic construct
  source 1..75: mol_type = other DNA
atgaccattgatgaatttctggcgatggcagggattccaaataccggatcaggcgagtatgtgtctgcgggtact

SEQ ID NO: 55507 - DNA, 75 bp, synthetic construct
  source 1..75: mol_type = other DNA
cgggaaccggtgaaataccgtggcaggagacggatgctacagcacctttgaatgtttatggtgaaactaaactag

SEQ ID NO: 55508 - DNA, 75 bp, synthetic construct
  source 1..75: mol_type = other DNA
ggtgacgagcaatatttatttggcagggctgcattgatggtcaggtatgaagatgaaaataagacaccagtgacg

SEQ ID NO: 55509 - DNA, 75 bp, synthetic construct
  source 1..75: mol_type = other DNA
ttatattgataatcaggatgtttatcatcagccatccagcgtgttttttgttattaaaccgtctgcgtggggaaa

SEQ ID NO: 55510 - DNA, 75 bp, synthetic construct
  source 1..75: mol_type = other DNA
tcggtttatgtctggggttaaccacctattctgctttatccgcagatagcgttattaaaattagcgggcgcgtcc

SEQ ID NO: 55511 - DNA, 75 bp, synthetic construct
  source 1..75: mol_type = other DNA
cggctgtgccggaaccagtacggaatttgagtgtaacgccaccacatccgatacctgtatgacgatggagcaggc

SEQ ID NO: 55512 - DNA, 75 bp, synthetic construct
  source 1..75: mol_type = other DNA
agtggcttgtgaatattgaagggaaaataagtatcaaagatttgactcgcatacccgttggtatggttaaagttg

SEQ ID NO: 55513 - DNA, 75 bp, synthetic construct
  source 1..75: mol_type = other DNA
agttctggctgaatgtactgacggaactgaaaaatcgcggcctgaacgatatccttatcgcctgcgtggacggcc

SEQ ID NO: 55514 - DNA, 75 bp, synthetic construct
  source 1..75: mol_type = other DNA
ctggacgacatggcagcgtgtccaggagaatatgatcaagggtggattatcgggaaaaagtgcctccggtaaaaa

SEQ ID NO: 55515 - DNA, 75 bp, synthetic construct
  source 1..75: mol_type = other DNA
gccatgtggacgaaaaaaagaaatccttaatcatgcagaatcgcggagggcaatcggttatagatcggatactga

SEQ ID NO: 55516 - DNA, 75 bp, synthetic construct
  source 1..75: mol_type = other DNA
cgtgagggtatgccgccgcgtgaaggtggtgatgagttcagccaggcatggaaacagactgtggaaattaaaggg

SEQ ID NO: 55517 - DNA, 75 bp, synthetic construct
  source 1..75: mol_type = other DNA
actggcgctgctcttggctctattgttccaggacttggcactggattaggtgcggcaattggcggcggacttggc

SEQ ID NO: 55518 - DNA, 75 bp, synthetic construct
  source 1..75: mol_type = other DNA
cagaacgcgccacggccagcgccgtcagtccggcttataccgcagacgctgaccataccggtaatgcctcccccc

SEQ ID NO: 55519 - DNA, 75 bp, synthetic construct
  source 1..75: mol_type = other DNA
acgaagcgcaggccagcgccctgaaaagtaccgtcgacaccctgaatatcatcagcaccggggtacaggatatgc

SEQ ID NO: 55520 - DNA, 75 bp, synthetic construct
  source 1..75: mol_type = other DNA
ttgagatgccggattttcaccgtgaggatgagtggtggcgcaacggtcagaacctgtacctggacaatatggagg

SEQ ID NO: 55521 - DNA, 75 bp, synthetic construct
  source 1..75: mol_type = other DNA
gcggcgctaattgctacggcaatctggatgccggggcttagtattgttgcaagtaatctcatgttctctcttggg

SEQ ID NO: 55522 - DNA, 75 bp, synthetic construct
  source 1..75: mol_type = other DNA
tttttgagcggattgaagaaaagcgtgacgccatgcagtcgctgattctgccgccaccatcacgccaggcgctgg

SEQ ID NO: 55523 - DNA, 75 bp, synthetic construct
  source 1..75: mol_type = other DNA
ccgcgtgaaggtggcgacgagttcagccaggcatggaagcagactgtggaaattaaaggtgaaaaagatgagtga

SEQ ID NO: 55524 - DNA, 75 bp, synthetic construct
  source 1..75: mol_type = other DNA
tccccctcagcgcagagcaacaggccgccatgcaggctgtggctgtcacagaacaacgtcgtcgtcagggacgca

SEQ ID NO: 55525 - DNA, 75 bp, synthetic construct
  source 1..75: mol_type = other DNA
cggcgctgctgctgtcagcatactgttgcactgcgctggcgtcaggggctgatgaggcgaaccgcgagtttattc

SEQ ID NO: 55526 - DNA, 75 bp, synthetic construct
  source 1..75: mol_type = other DNA
gtttcactgggacaggtataacccggcaacggaggcgagttcgtgctgggtgcgggtgtcacaggcgtgggcggg

SEQ ID NO: 55527 - DNA, 75 bp, synthetic construct
  source 1..75: mol_type = other DNA
gtttcactgggacaggtataacccggcaacggaggcgagttcgtgctgggtgggagtgtcgcaggcgtgggcggg

SEQ ID NO: 55528 - DNA, 75 bp, synthetic construct
  source 1..75: mol_type = other DNA
gcccgtcgtcggtgcagagccaggattacacgtttaaggtgccggactggccggggatgtatgagcagcagggtg

SEQ ID NO: 55529 - DNA, 75 bp, synthetic construct
  source 1..75: mol_type = other DNA
caataaccggcaggctgaaaaccctgcgctgaccattatgatggacgagtatgtctgctttgcatggcggacgac

SEQ ID NO: 55530 - DNA, 75 bp, synthetic construct
  source 1..75: mol_type = other DNA
gcctcggcggatgatgcagccggtgcgcagattattattgcgaaagccggtggggatgttgatgccattcaggcg

SEQ ID NO: 55531 - DNA, 75 bp, synthetic construct
  source 1..75: mol_type = other DNA
ccgcgcgtgggccaggaggtgattgttgacttcctgaacggggacccggaccagccgataatcatggggcggacg

SEQ ID NO: 55532 - DNA, 75 bp, synthetic construct
  source 1..75: mol_type = other DNA
gtatttgagcgtacctggatgggcgacgaggccaacatgccgaaaacgcttcaggaacataaggcgctgtttgat

SEQ ID NO: 55533 - DNA, 75 bp, synthetic construct
  source 1..75: mol_type = other DNA
gacgagttcgttgatgagggaacctgggaggcgacactgcatattgaagtttttctcagggcaaaagaaccggac

SEQ ID NO: 55534 - DNA, 75 bp, synthetic construct
  source 1..75: mol_type = other DNA
cctgaaggtctggcggttgcaggcccggtttacgcggcaacggggtctaaacgcaccgcaattctgtgggcgggg

SEQ ID NO: 55535 - DNA, 75 bp, synthetic construct
  source 1..75: mol_type = other DNA
aacgcaccgctgacgaatctgatggatcagtacgtgctcctggcataccgcacaacggttgacgataatcgcagc

SEQ ID NO: 55536 - DNA, 75 bp, synthetic construct
  source 1..75: mol_type = other DNA
ccaatagacgggctgatatttcgggtaactggatgttcaaagatggcgcggtgataaagcgaacttataccgagg

SEQ ID NO: 55537 - DNA, 75 bp, synthetic construct
  source 1..75: mol_type = other DNA
cagagccaggattacacgtttaaggtgccggactggccggggatgtatgagcagcagggtgagagcctgaacgga

SEQ ID NO: 55538 - DNA, 75 bp, synthetic construct
  source 1..75: mol_type = other DNA
acattcagtggtgttaccacgacgaccgtaccagatgaaggggtcgctgcccggctgaacgagccggcagctatt

SEQ ID NO: 55539 - DNA, 75 bp, synthetic construct
  source 1..75: mol_type = other DNA
gtttcactgggacaggtataacccggcaacggaggcgagttcgtgctgggtgagggtgtcccaggcgtgggcggg

SEQ ID NO: 55540 - DNA, 75 bp, synthetic construct
  source 1..75: mol_type = other DNA
gttttggtactttctggcttgtttttggtggctgtggtagtgctgtactggccgcaggcttcccggaattaggca

SEQ ID NO: 55541 - DNA, 75 bp, synthetic construct
  source 1..75: mol_type = other DNA
acgctggggttcagtgaccttcacaacgaagcggattataaagtcagtcacagtggaatcagtctgagcggtggt

SEQ ID NO: 55542 - DNA, 75 bp, synthetic construct
  source 1..75: mol_type = other DNA
caggtaaagacactaaccgtccaggattgcaggcgtgtttatcctatctgagagaaggcgacaccttacacgtgc

SEQ ID NO: 55543 - DNA, 75 bp, synthetic construct
  source 1..75: mol_type = other DNA
atgaaaccacagtatcagacccgttacgaactgctccacgaaagctaccagaaatggctgaccggcttcacccga

SEQ ID NO: 55544 - DNA, 75 bp, synthetic construct
  source 1..75: mol_type = other DNA
atggcaacaaaagaagaaaatcagaaacgtcttcgtgaactggctggcctgctggggcgcgaggcggatatgtcg

SEQ ID NO: 55545 - DNA, 75 bp, synthetic construct
  source 1..75: mol_type = other DNA
gctgtggccggatattgaactgatcagcggacagcgtctgctgaaactgttgaacgggcgattactgaccggtga

SEQ ID NO: 55546 - DNA, 75 bp, synthetic construct
  source 1..75: mol_type = other DNA
gccaccggtccaaaggcctcgccacgccacgtgcatctggttgacgcgttctgcgcccgtctcgatgccatcctg

SEQ ID NO: 55547 - DNA, 75 bp, synthetic construct
  source 1..75: mol_type = other DNA
gccatatcaaaaacgatctgaaagcaatagttatgcagaatcgtggagggcaaaaagttattgagcgtatactcc

SEQ ID NO: 55548 - DNA, 75 bp, synthetic construct
  source 1..75: mol_type = other DNA
ttgcatgtggtgattgaacatcaaagcaagccggataagaaaatggcctttcgcatgatgcgttattctattgct

SEQ ID NO: 55549 - DNA, 75 bp, synthetic construct
  source 1..75: mol_type = other DNA
aaaagtggcggtgtgtttcaggtggtgctgggggcggcgctgattgcggtggcatggtggaaccctgtgggctgg

SEQ ID NO: 55550 - DNA, 75 bp, synthetic construct
  source 1..75: mol_type = other DNA
actcgtttacccggtggaagaatcttcgttgaaggtggaaacagatccttcgagtgcaagatagaagatgttgaa

SEQ ID NO: 55551 - DNA, 75 bp, synthetic construct
  source 1..75: mol_type = other DNA
caggaataaaagcattcggatttgctaccactgcgggggagatttgtaatgccattatcatgttctgtacaccat

SEQ ID NO: 55552 - DNA, 75 bp, synthetic construct
  source 1..75: mol_type = other DNA
gcatccgcagcgtgccggctctggtggtgttctgcagccaggggcacgacatcatccggggaaatctgcgcgtca

SEQ ID NO: 55553 - DNA, 75 bp, synthetic construct
  source 1..75: mol_type = other DNA
gacgatatcggccacgttactgaacgagaacggcgtcacggagtggacaccgctgttttatgaggaccatccggc

SEQ ID NO: 55554 - DNA, 75 bp, synthetic construct
  source 1..75: mol_type = other DNA
ctgacgcccgggtgggtgtcattcaatggtgaaaaaccggagattgccatcgtaccccagagcctgcaccggctg

SEQ ID NO: 55555 - DNA, 75 bp, synthetic construct
  source 1..75: mol_type = other DNA
atggatcatcgaccgtcagaagcagaacgcagcactgacggatctgatggatcagtacgtgctcctggcataccg

SEQ ID NO: 55556 - DNA, 75 bp, synthetic construct
  source 1..75: mol_type = other DNA
agctttgccaagttaggtctgggaatgattgccgatgggacgccggtattcggccttaccggctgggcaggcacc

SEQ ID NO: 55557 - DNA, 75 bp, synthetic construct
  source 1..75: mol_type = other DNA
gaggcaggcaaagagctgggcgtcgatgtcacctacgatggcccgacggagcccagcgtgtccggccaggttcag

SEQ ID NO: 55558 - DNA, 75 bp, synthetic construct
  source 1..75: mol_type = other DNA
cggtggcgcataacgaacagtatcgccagctcattgaaggctacatgctgcgccataaggtgaaaccgggcatta

SEQ ID NO: 55559 - DNA, 75 bp, synthetic construct
  source 1..75: mol_type = other DNA
aatcagcagctcaggaaggaatgagcttggccaattggattaaagaattagttcgtgctgagcttcgccgtaaag

SEQ ID NO: 55560 - DNA, 75 bp, synthetic construct
  source 1..75: mol_type = other DNA
atcaatatatatggatatattaatgaagaacagttaggaaaattaaatcctccggaagatttacgtatagcaata

SEQ ID NO: 55561 - DNA, 75 bp, synthetic construct
  source 1..75: mol_type = other DNA
atccagtatcatcatgaacatgaaaatactgccctctgcatattcccgtaatcctatgcactttctattaggtgg

SEQ ID NO: 55562 - DNA, 75 bp, synthetic construct
  source 1..75: mol_type = other DNA
ttcgttattgcaccaacagaagatgaggcccgctctcagcttcctgacgccccatgtattttctctgcccgtttt

SEQ ID NO: 55563 - DNA, 75 bp, synthetic construct
  source 1..75: mol_type = other DNA
cccctgcatttttactgcccgtttttcaactaactcgcgcaattcacttagttactggagcctccccttctctgc

SEQ ID NO: 55564 - DNA, 75 bp, synthetic construct
  source 1..75: mol_type = other DNA
gatacgtttgatccgacgcatgatattgacctctactgcgatcaggccagcggtcttgtgaatattgccattatg

SEQ ID NO: 55565 - DNA, 75 bp, synthetic construct
  source 1..75: mol_type = other DNA
tctgccggagggcacgctggtcctgggaaatacggctgcagatgggatccgttgttacggtgccattcaggatgc

SEQ ID NO: 55566 - DNA, 75 bp, synthetic construct
  source 1..75: mol_type = other DNA
atgataaccgcatcccgcttgtacagattgaatttgataattccatggccgtcaccggcaccccggcgcaacgtc

SEQ ID NO: 55567 - DNA, 75 bp, synthetic construct
  source 1..75: mol_type = other DNA
tgactcgttgggagaagaaggtcgagaattatgaggcgatgctgcattttgcctgtggtgtcattgtctggaaca

SEQ ID NO: 55568 - DNA, 75 bp, synthetic construct
  source 1..75: mol_type = other DNA
gcattacgtagcagattgaagtatgatgaaaaagatcgtccctttattgatgtttttatgctcagtcatcccgat

SEQ ID NO: 55569 - DNA, 75 bp, synthetic construct
  source 1..75: mol_type = other DNA
agcgtctgtgtggttgcggaaagcatgatggccgtgaacacgtgcagtcgcttacagcacaactgcgtctggggc

SEQ ID NO: 55570 - DNA, 75 bp, synthetic construct
  source 1..75: mol_type = other DNA
agcgtctgtgcggttgcggaaagcatgatgaccgtgaaaacggggagttacttacagcacagctgcgactggggc

SEQ ID NO: 55571 - DNA, 75 bp, synthetic construct
  source 1..75: mol_type = other DNA
atgaacgtactaaaaaaacttatgcagcgtctgtgcgggtacggaaagcatgatggccgtgaacacgggcagtcg

SEQ ID NO: 55572 - DNA, 75 bp, synthetic construct
  source 1..75: mol_type = other DNA
agaaatgaagggccttctggtctggtttcccaccgacgtggaaagcgtcctaataattccttttctactgaattc

SEQ ID NO: 55573 - DNA, 75 bp, synthetic construct
  source 1..75: mol_type = other DNA
tggctggagttgctgatatttataagcaggaacagcaacagaaagcgattaatgcgttcaataaggttcatgctg

SEQ ID NO: 55574 - DNA, 75 bp, synthetic construct
  source 1..75: mol_type = other DNA
tgaaatgcgcgtggggtcgcgggtggcttctcaggagatcagcacggcagacgagggggacggtggtcaggttgt

SEQ ID NO: 55575 - DNA, 75 bp, synthetic construct
  source 1..75: mol_type = other DNA
gataatccgctcattaatattctggagaagttcacccgctggtatgacacgaataacgtgacgctgggcggtgtc

SEQ ID NO: 55576 - DNA, 75 bp, synthetic construct
  source 1..75: mol_type = other DNA
tggatgcggataaaaagcagatacagtgtgtggtaagaccactgcaaatcctgcgtgctgacgggaggtgggaaa

SEQ ID NO: 55577 - DNA, 75 bp, synthetic construct
  source 1..75: mol_type = other DNA
aggaagtgagcgtgccgctggcctcgctgattaagtcaccgctgaatgtgcgcacggtgccgtattttgcggagt

SEQ ID NO: 55578 - DNA, 75 bp, synthetic construct
  source 1..75: mol_type = other DNA
tggcggatacgagcaagtttttaagttttgtcctccgacacaaaccggaggcgattggtatcgtactggaccgtg

SEQ ID NO: 55579 - DNA, 75 bp, synthetic construct
  source 1..75: mol_type = other DNA
gatgctgatgacccgtggctcgctgaccaccttcagcattgccaacgatgtggcgaaatacttcgccattattcc

SEQ ID NO: 55580 - DNA, 75 bp, synthetic construct
  source 1..75: mol_type = other DNA
ccggcagcagttcatactcgaaaaagaaaacggtcattgatgaaaccgttcgccagcagggaacggaaatcgcca

SEQ ID NO: 55581 - DNA, 75 bp, synthetic construct
  source 1..75: mol_type = other DNA
atgcggaaggaacgactcaggccgcagtggcagaaggcactatcaccatccgggacagggacaatcagaagcaga

SEQ ID NO: 55582 - DNA, 75 bp, synthetic construct
  source 1..75: mol_type = other DNA
ccaaatacttcaagattgacgttcttgatatagaagtcagtgctgggccgggagtcatcaaccgtgagtttgtag

SEQ ID NO: 55583 - DNA, 75 bp, synthetic construct
  source 1..75: mol_type = other DNA
ttacgacggtacgatttataacgcccgtcaggtggtggataaaattggtcatctgtgtgactacattctgtttga

SEQ ID NO: 55584 - DNA, 75 bp, synthetic construct
  source 1..75: mol_type = other DNA
atgtcagttacagagtttaaggtaaaaacggtgcgtaaatccagccgtaaatcgtcaaaagaacaggaaaccgcc

SEQ ID NO: 55585 - DNA, 75 bp, synthetic construct
  source 1..75: mol_type = other DNA
cacgaaatttctctttttgcgaaagcaaatattgatggggttattaccacaaactgggatgtttttctagaaagc

SEQ ID NO: 55586 - DNA, 75 bp, synthetic construct
  source 1..75: mol_type = other DNA
agctgtgagtccgaaacgggtggacacgcctggacacggtatggggaaccgttttctgcgggccggtgtggaggt

SEQ ID NO: 55587 - DNA, 75 bp, synthetic construct
  source 1..75: mol_type = other DNA
gcagtgaccttgaccgccagctccgtgacgcggtcgacaaacttgaccgcgagaaacgtgcgcgtcagcgatcca

SEQ ID NO: 55588 - DNA, 75 bp, synthetic construct
  source 1..75: mol_type = other DNA
ggcaggtgaatatctgcgcaagggcgcgcaggtctacatcgaggggcaactccgtacccgtagctgggaagataa

SEQ ID NO: 55589 - DNA, 75 bp, synthetic construct
  source 1..75: mol_type = other DNA
ggataccgcgccggaggcggtgtatgcccgtcttcatgaaccgctgagcgggagggccgtgattcatattgtacc

SEQ ID NO: 55590 - DNA, 75 bp, synthetic construct
  source 1..75: mol_type = other DNA
cgcagcaccagacaagaaatattaagttaatggctatcgttcatcgcctgcagcggataatggtcaatgagaatt

SEQ ID NO: 55591 - DNA, 75 bp, synthetic construct
  source 1..75: mol_type = other DNA
gattgccggattccgtgcaatggcgcaggaaggcaaaacgcctgcacaaatcggtgatttgctgggctattcacc

SEQ ID NO: 55592 - DNA, 75 bp, synthetic construct
  source 1..75: mol_type = other DNA
cgcagcacaaaactaaaagcatcaaactgatggccatcgttcatcgtctgcagcagataatggtcaatgagaatt

SEQ ID NO: 55593 - DNA, 75 bp, synthetic construct
  source 1..75: mol_type = other DNA
agatccggaagtccgttacatcccaaacgggggcgcagtggcaaacctgcaggtggccacgtcagaaagctggcg

SEQ ID NO: 55594 - DNA, 75 bp, synthetic construct
  source 1..75: mol_type = other DNA
ctgttccgggacgcttaccatctggcgggaattgagatgccggattttcatcgcggggatgactggtggcgtaac

SEQ ID NO: 55595 - DNA, 75 bp, synthetic construct
  source 1..75: mol_type = other DNA
actacttcttggcgcattgcgatgaagaaagtggcgacattatctctaacctaaaaattcagaagttgacgtatt

SEQ ID NO: 55596 - DNA, 75 bp, synthetic construct
  source 1..75: mol_type = other DNA
ttcctgaaattatcctgcttaattcacatgatggttcatccagttatcagatgatccccggaatttttcgttttg

SEQ ID NO: 55597 - DNA, 75 bp, synthetic construct
  source 1..75: mol_type = other DNA
gtttcgtcagaaactgaatgacggctggtatcaggtgcgcattgccgggcgtgatgcaggtgaaaccgaattatc

SEQ ID NO: 55598 - DNA, 75 bp, synthetic construct
  source 1..75: mol_type = other DNA
gtgccctgtcgcagcaggtgccgggattccgctgtcagatgaacgaaggctggtaccagatacgtattgccggtg

SEQ ID NO: 55599 - DNA, 75 bp, synthetic construct
  source 1..75: mol_type = other DNA
acacactggcttaacctgaaaatagatgcgatcaattcaggtattaagttaaccaggatggatttgctcttcggg

SEQ ID NO: 55600 - DNA, 75 bp, synthetic construct
  source 1..75: mol_type = other DNA
gtttcgtcagaaactgagcgacggctggtatcaggtacggattgccgggcgtgatgcaggcgaaaccgaattatc

SEQ ID NO: 55601 - DNA, 75 bp, synthetic construct
  source 1..75: mol_type = other DNA
gcccgtatggcgcaccgcaatataacgaaacgaaaggccatatgaccaaatgcgatggttgttatgaccgtgttg

SEQ ID NO: 55602 - DNA, 75 bp, synthetic construct
  source 1..75: mol_type = other DNA
attcagcttacctgttgcatgttcacgttgtttttatgacaaaataccgccgtccagtttttggtgaattgcatc

SEQ ID NO: 55603 - DNA, 75 bp, synthetic construct
  source 1..75: mol_type = other DNA
aacacctgtcattcgtaaactggagatagaagggccggatattcttttagtccccacgaatcctcgctacccttc

SEQ ID NO: 55604 - DNA, 75 bp, synthetic construct
  source 1..75: mol_type = other DNA
gttgggaggataaacagaacgatctctggacgacctggcagcgggttcaggagaatatgataaaaggtggattat

SEQ ID NO: 55605 - DNA, 75 bp, synthetic construct
  source 1..75: mol_type = other DNA
cgccacgcggtgagggatggtctccaaccttccaaatcagaatcagtaaagagctacgccaacaagtaaatgagg

SEQ ID NO: 55606 - DNA, 75 bp, synthetic construct
  source 1..75: mol_type = other DNA
gctgattaaatcaccgctgaatgtgcgcacggtgccgtattccgcagagtccgtcagcgaactggcggagtccat

SEQ ID NO: 55607 - DNA, 75 bp, synthetic construct
  source 1..75: mol_type = other DNA
tctatcctactcctgaacaggctgcatttctcaacgcccagttcggtgcggtacgttttgcgtacaacaaagctc

SEQ ID NO: 55608 - DNA, 75 bp, synthetic construct
  source 1..75: mol_type = other DNA
ggtggggaaattggcgaatatctggcgacctcgaaacgcatcgccaaagtggcgtttaccggctcaacggaagtg

SEQ ID NO: 55609 - DNA, 75 bp, synthetic construct
  source 1..75: mol_type = other DNA
aatttttcgttttgtctgcacaaatggcctggtgtgcgggaataattttggcgaaatccgcgttccacataaagg

SEQ ID NO: 55610 - DNA, 75 bp, synthetic construct
  source 1..75: mol_type = other DNA
cggtgtgtttcaggcggtgctgggtgcggcgctgattgcggtggcatggtggaaccctgtgggctggctgggggc

SEQ ID NO: 55611 - DNA, 75 bp, synthetic construct
  source 1..75: mol_type = other DNA
gcgggcgtggtgctgtttattgtcatcgccatcctcgagccgatgctgcaactgaataatatggttggaatgtaa

SEQ ID NO: 55612 - DNA, 75 bp, synthetic construct
  source 1..75: mol_type = other DNA
atggcactgttttactatcaggcgctggagcgtaatggtcgcaaaaccaaaggtatgattgaggcggattccgcg

SEQ ID NO: 55613 - DNA, 75 bp, synthetic construct
  source 1..75: mol_type = other DNA
tggaacgtatgatacagttcttgtccttgaggataagaaaacagggaagctggggtttccggcaagggctaagaa

SEQ ID NO: 55614 - DNA, 75 bp, synthetic construct
  source 1..75: mol_type = other DNA
tggagttcgcgaaaaagcaaaatttaagccttgcatatggtgattgcgggtatgtttattcatccacggaaatgg

SEQ ID NO: 55615 - DNA, 75 bp, synthetic construct
  source 1..75: mol_type = other DNA
tgcttggttataccgagcaaaaagtgaaatttcgtgctctgtttctggagcttttttttcgtcgcacgatcaatt

SEQ ID NO: 55616 - DNA, 75 bp, synthetic construct
  source 1..75: mol_type = other DNA
cagcagagaagcattagccaaagggtttactgttgattattccaatggcttcggtgatgcaatggatgcttatga

SEQ ID NO: 55617 - DNA, 75 bp, synthetic construct
  source 1..75: mol_type = other DNA
cgttcgccctgaccgctacgcttatcctcaccggctgtagccactcgcaaccagaacaggaaggccgcccgcagg

SEQ ID NO: 55618 - DNA, 75 bp, synthetic construct
  source 1..75: mol_type = other DNA
gaaactctcagaaagtggatgatagaagaggggttatggcgtgaacgccgtcgtaaaattgcccgtatatatcaa

SEQ ID NO: 55619 - DNA, 75 bp, synthetic construct
  source 1..75: mol_type = other DNA
ctgcgatttttctatttttattcatgcacctgctcaaattctgcgggagcgcttgattagtcgtaaaattgcggg

SEQ ID NO: 55620 - DNA, 75 bp, synthetic construct
  source 1..75: mol_type = other DNA
cagatatccctctgggcatgattagagaagaaaatgactttcgcatctcggttgctggcgcgcaggagaagacag

SEQ ID NO: 55621 - DNA, 75 bp, synthetic construct
  source 1..75: mol_type = other DNA
gcagccatcgtgggctctttcttcactgccggggcatcaatggcgttatggggttcagccctggcagccggtggt

SEQ ID NO: 55622 - DNA, 75 bp, synthetic construct
  source 1..75: mol_type = other DNA
ggagaaagcgtcagtggaggaaatcagtctgccgttgctgacgaaaatgtcttccgaacgcacgctggcagtcca

SEQ ID NO: 55623 - DNA, 75 bp, synthetic construct
  source 1..75: mol_type = other DNA
acgctgaccgcacggaacaggtgcaggaaaaagcgtcagtggaggaaatcagtctgccgttgctgacgaaaatgt

SEQ ID NO: 55624 - DNA, 75 bp, synthetic construct
  source 1..75: mol_type = other DNA
ggggcggtcgccaatgggaaaacactaaacataagcccgaacatcatagcgatttgctggctggtgggcaatgca

SEQ ID NO: 55625 - DNA, 75 bp, synthetic construct
  source 1..75: mol_type = other DNA
gagtgataaagcattcagtgtgataacaggtgcgctgaccggtaaggataaccgtattctgcttctttcccagcc

SEQ ID NO: 55626 - DNA, 75 bp, synthetic construct
  source 1..75: mol_type = other DNA
ccaaatctcaagatggctttcttcttggtcgtgatgaggttgagcgggcgacgcggcgaaaggtcaagattgcca

SEQ ID NO: 55627 - DNA, 75 bp, synthetic construct
  source 1..75: mol_type = other DNA
atggagatcgcccaggcaaggcgcaacgaactgattgaaaaaatccttatgcagtcagaaggaagggagctgaac

SEQ ID NO: 55628 - DNA, 75 bp, synthetic construct
  source 1..75: mol_type = other DNA
ttatcactggcgctgattatgcgtctggggctgctgtcgctgatttcatggatggtcacgctgaccaaaccgcta

SEQ ID NO: 55629 - DNA, 75 bp, synthetic construct
  source 1..75: mol_type = other DNA
ctatgtaaacaaaaaggcgttctctgatattgagtttaaacataataacatcataagctcaccaacattatattt

SEQ ID NO: 55630 - DNA, 75 bp, synthetic construct
  source 1..75: mol_type = other DNA
cattactgatccacttcgataaacacggtcaggtcgagttcacggaaaaagtccccgccgatgcgatggtatgca

SEQ ID NO: 55631 - DNA, 75 bp, synthetic construct
  source 1..75: mol_type = other DNA
aacctacacctctggaaagggggcattacagtggaaatatgatgcggccaatggcagtggcaccctgactcagga

SEQ ID NO: 55632 - DNA, 75 bp, synthetic construct
  source 1..75: mol_type = other DNA
agacggcaacaaagcgggcgctgtacgaagccattctgtatcccggcgtggataattttgtgaaatatttccggc

SEQ ID NO: 55633 - DNA, 75 bp, synthetic construct
  source 1..75: mol_type = other DNA
agccgaccgcctatggcgatcacggcattcgtatttatggcatctggtcacctattgcagagggcaagatctgca

SEQ ID NO: 55634 - DNA, 75 bp, synthetic construct
  source 1..75: mol_type = other DNA
aaggtaacctgcaggcatttggtacggtcagtgcatccgcgaagaaaggcaaggcgggtaactggctgctggact

SEQ ID NO: 55635 - DNA, 75 bp, synthetic construct
  source 1..75: mol_type = other DNA
gcaaattatcgactgattcccgtaaaacggctggtaaccagactgggcttaaccccgtggtatcaggatgcgcca

SEQ ID NO: 55636 - DNA, 75 bp, synthetic construct
  source 1..75: mol_type = other DNA
aaaaaagcccggttggctgcctgttttatgattttttcggcgggaataccctcaaggctgatgtctctatttcgg

SEQ ID NO: 55637 - DNA, 75 bp, synthetic construct
  source 1..75: mol_type = other DNA
aaaaaggcctgcatgtggcgatcgaagcctgccgtcagttgaaagagcagggcgtggcatttcgctatcgcatcc

SEQ ID NO: 55638 - DNA, 75 bp, synthetic construct
  source 1..75: mol_type = other DNA
tttactgaatccgcagggatggggagctgaaggagggcgtgcattggtagttgatgatgcaggtgctgcaggagg

SEQ ID NO: 55639 - DNA, 75 bp, synthetic construct
  source 1..75: mol_type = other DNA
aatgccgggggcggtggatgtggatctgggactggatgacagtgcactggatacagaattttccattggtggtac

SEQ ID NO: 55640 - DNA, 75 bp, synthetic construct
  source 1..75: mol_type = other DNA
gtagtggccagactcgtaatgcagggaagacatcatcagatggtgctcatacccactcgctgtccggcactgctg

SEQ ID NO: 55641 - DNA, 75 bp, synthetic construct
  source 1..75: mol_type = other DNA
tttgcagtggaattgaagctgcgagtattgcttgggaacctttgggtatgcgtccggcctggtttgctgaaattg

SEQ ID NO: 55642 - DNA, 75 bp, synthetic construct
  source 1..75: mol_type = other DNA
atgagtgattcgcgcctgctgccgaccggctcatcaccgcttgaagtcgccgccgcaaaagcctgtgcggaaatt

SEQ ID NO: 55643 - DNA, 75 bp, synthetic construct
  source 1..75: mol_type = other DNA
taaaataaaatttattggaaattggaatggcagcgagtttggaaagaaacttaggctgcattattctaactatcc

SEQ ID NO: 55644 - DNA, 75 bp, synthetic construct
  source 1..75: mol_type = other DNA
gatttgtatgcccgtcacaacgtgaaacaactgcaaaaagagatgttccgtaaggaacacttcccacgcgtcagc

SEQ ID NO: 55645 - DNA, 75 bp, synthetic construct
  source 1..75: mol_type = other DNA
gctactcgaagagatggcggtttacagcacgatcgccaccgcgctgaacatccatattacgcacgcgctctcttt

SEQ ID NO: 55646 - DNA, 75 bp, synthetic construct
  source 1..75: mol_type = other DNA
gggttgcgctggtatggcgtgcgggtggctgaaccgcatcatgacggcacagttcactggcacctgttgtgtttc

SEQ ID NO: 55647 - DNA, 75 bp, synthetic construct
  source 1..75: mol_type = other DNA
caggcagaaggaagcggagaaaatcccctcgtgtcttcactggatgccttagctaaggtcgaacaaatcggcatc

SEQ ID NO: 55648 - DNA, 75 bp, synthetic construct
  source 1..75: mol_type = other DNA
ctcgtgataaccatcagaatggtgccgttgtggaaacacaggaacatcaggaggtgggggctttccgtaaggtga

SEQ ID NO: 55649 - DNA, 75 bp, synthetic construct
  source 1..75: mol_type = other DNA
ccggtactggatgacccgcgccttgatgccatcctggctgccgctgatgctggctgttttgccacctacatcatg

SEQ ID NO: 55650 - DNA, 75 bp, synthetic construct
  source 1..75: mol_type = other DNA
cactgactgcattattgcgtgacctcagtatgctgacgccgggaaactgccacagcctgtttccttatgtcagaa

SEQ ID NO: 55651 - DNA, 75 bp, synthetic construct
  source 1..75: mol_type = other DNA
gttgttgattgacccctcacgagatggccaaatcgtcgatgctaacctcgccgcgctcaatttctatggttataa

SEQ ID NO: 55652 - DNA, 75 bp, synthetic construct
  source 1..75: mol_type = other DNA
tagtcagctacgaaccggtccctattccgtctcctcacaaaaagaactgccgaaatacctctccgatctgcaaaa

SEQ ID NO: 55653 - DNA, 75 bp, synthetic construct
  source 1..75: mol_type = other DNA
cggttacagcggaagattcgaaaggaaatttctcccggcgtgaagaaagtatggtggtcgtggaaaaacccacac

SEQ ID NO: 55654 - DNA, 75 bp, synthetic construct
  source 1..75: mol_type = other DNA
atcgcacacccacagcgccagtgcatccagtacggatttggggacgaaaaccacgtcgtcgtttgattatggtac

SEQ ID NO: 55655 - DNA, 75 bp, synthetic construct
  source 1..75: mol_type = other DNA
aaacatttgaattcgatatagcttctgcgtgcgcgcgcgctaatggtaaacgtaaacgcaagccttccgttcttc

SEQ ID NO: 55656 - DNA, 75 bp, synthetic construct
  source 1..75: mol_type = other DNA
tgctggctggtcaggcggcaaggcagcagggtgacaaaaaagcaggtgtgccggtactggataacccgcgccttg

SEQ ID NO: 55657 - DNA, 75 bp, synthetic construct
  source 1..75: mol_type = other DNA
tgagcgtgaaacgctggctgtggctgattatcgtctcagtgctgatgtttgccacgaccgggagtctgctgtggt

SEQ ID NO: 55658 - DNA, 75 bp, synthetic construct
  source 1..75: mol_type = other DNA
catccgtgaagaccgcgaggaactgggcaataacacggggccacgctttaagtctgagctgattaacccgcgcaa

SEQ ID NO: 55659 - DNA, 75 bp, synthetic construct
  source 1..75: mol_type = other DNA
tttaaggcgcagaccggaaaatattgcgtatatctgaaacaggactggcgcgatgagtactgtgttggcgacatt

SEQ ID NO: 55660 - DNA, 75 bp, synthetic construct
  source 1..75: mol_type = other DNA
gctccggttatcaaacgtgcgcgcgaaaaaatcgaacatgattttaaccagcaggtgatcaatcgagaactcgcc

SEQ ID NO: 55661 - DNA, 75 bp, synthetic construct
  source 1..75: mol_type = other DNA
tgtcgtcttatgttgaaagcgccagtactatggatcagcgtttcggggccggaatttttataggaccaacaaaag

SEQ ID NO: 55662 - DNA, 75 bp, synthetic construct
  source 1..75: mol_type = other DNA
tatctacaaggtatttgcaaatgaaaatgttcatggacactggctgtatttagctttattgcatataactcaaaa

SEQ ID NO: 55663 - DNA, 75 bp, synthetic construct
  source 1..75: mol_type = other DNA
agagatgagaaaaaagccctgatgcaacagctactgactggcaaacgtcgtgttaaggtcgatgaggcggttgcc

SEQ ID NO: 55664 - DNA, 75 bp, synthetic construct
  source 1..75: mol_type = other DNA
tttgctggctggattttgagccgcagaaaggaaaagagatcggaaagtatcgcccggcactcatactatcccatg

SEQ ID NO: 55665 - DNA, 75 bp, synthetic construct
  source 1..75: mol_type = other DNA
gatgctttaggttctggcttgattaatagtttaaaagtcttggctggtgttattgctgtaaataaagttgttggt

SEQ ID NO: 55666 - DNA, 75 bp, synthetic construct
  source 1..75: mol_type = other DNA
gacggaatcacagaggagaagcctggtgctgaaagccggaggaaaatactggcatgtgtacatgtcgaaaaaaac

SEQ ID NO: 55667 - DNA, 75 bp, synthetic construct
  source 1..75: mol_type = other DNA
gaggtgtcgattttttaaggagtgttaataactattttcagagtgtcatggcagaacacagagaaaataaaacaa

SEQ ID NO: 55668 - DNA, 75 bp, synthetic construct
  source 1..75: mol_type = other DNA
ccagtgctggacatccttcctggatgcgggcggtctgcgcgatatcgaggttgaggctgtcacaaaaatgctggc

SEQ ID NO: 55669 - DNA, 75 bp, synthetic construct
  source 1..75: mol_type = other DNA
tatctgtgtggttgccggtggtgtcggcgtgtatgccactgagtatgtactggaacgctacgggcgggagctgcc

SEQ ID NO: 55670 - DNA, 75 bp, synthetic construct
  source 1..75: mol_type = other DNA
gacctgatgctaccgataagcgatctgtgggccggaaggctgcaaaaaatgggctgcccgagggaaaaaatcgcc

SEQ ID NO: 55671 - DNA, 75 bp, synthetic construct
  source 1..75: mol_type = other DNA
gtggtggtggatgataacggcgtgggattccgctacagcttcagtgccctgaaggaccggcacacggcggtggag

SEQ ID NO: 55672 - DNA, 75 bp, synthetic construct
  source 1..75: mol_type = other DNA
ctgacatctggcgctccatccttatcagtcaggcgaacactttgttgcagcttctgcaacaaatcccagtacgcc

SEQ ID NO: 55673 - DNA, 75 bp, synthetic construct
  source 1..75: mol_type = other DNA
gtggtgttcccggctgaactggtggggctgctggacaggctggagggggaaatccgggcaaactgcgtgagcagt

SEQ ID NO: 55674 - DNA, 75 bp, synthetic construct
  source 1..75: mol_type = other DNA
accatgaagtcagccttttgttacgggcggtgctgaaggggcgccacccggaacgtgatgcctgcatgattcttc

SEQ ID NO: 55675 - DNA, 75 bp, synthetic construct
  source 1..75: mol_type = other DNA
aaattgaaaaagtaattaataaaaatgaccttaaggcatttatcgcttttccgtcatcactttatcccgatgatc

SEQ ID NO: 55676 - DNA, 75 bp, synthetic construct
  source 1..75: mol_type = other DNA
attcaggtcagtaaagggctgaatgtgtccgggcgcgttaatccttccgattacagtaattttgatatccgctat

SEQ ID NO: 55677 - DNA, 75 bp, synthetic construct
  source 1..75: mol_type = other DNA
caatatgacctggcggcgaaaacccgctggttacaggatgaaccggtgagcacgggggcgaagtttcgtcatcgc

SEQ ID NO: 55678 - DNA, 75 bp, synthetic construct
  source 1..75: mol_type = other DNA
tttttaccgcgctgatttatctcgtggcgtcgctgtttttccggctgatacgcacggcctgccgtcagcgtcttg

SEQ ID NO: 55679 - DNA, 75 bp, synthetic construct
  source 1..75: mol_type = other DNA
agcgtcactctggagtttaagattttccagaaaggcaatcagggcgcaggtaacatcacagactgtacggtgatt

SEQ ID NO: 55680 - DNA, 75 bp, synthetic construct
  source 1..75: mol_type = other DNA
atatgatgcaaaagccggtggtgttacgttcagagtatatattgatcaaaaaacaggaattgtaagtaacttcca

SEQ ID NO: 55681 - DNA, 75 bp, synthetic construct
  source 1..75: mol_type = other DNA
caagttgcattatgctgttaaatgccggaactttcagtatatcgtcggctgcggctcttgacagaaatatgcaga

SEQ ID NO: 55682 - DNA, 75 bp, synthetic construct
  source 1..75: mol_type = other DNA
gtgctggagaacgccgaaggcgatcgcaccacgccttctatcattgcctatacccaggatggtgaaactctggtt

SEQ ID NO: 55683 - DNA, 75 bp, synthetic construct
  source 1..75: mol_type = other DNA
gacacgaagccacgcgcaattttatgcgaaaacgctggcattaaccgaagccacgcctgaactctctgggttaag

SEQ ID NO: 55684 - DNA, 75 bp, synthetic construct
  source 1..75: mol_type = other DNA
ttatgccgatgtctttatcgctcattttggccctgcgggggtaaccgcagcaaaactacgggaactgggtgtcat

SEQ ID NO: 55685 - DNA, 75 bp, synthetic construct
  source 1..75: mol_type = other DNA
atcagggttgtggttccctgcaactgaacggcgcagatcttctgacggataacagcctgctgactgcggtcatta

SEQ ID NO: 55686 - DNA, 75 bp, synthetic construct
  source 1..75: mol_type = other DNA
gttgaaggccgcgaaggaagcaaccggcgaaacacttcctgctaatgcaacagagaaacaacgtcaggaatatct

SEQ ID NO: 55687 - DNA, 75 bp, synthetic construct
  source 1..75: mol_type = other DNA
ggcgtcggaaacctcaatattagcgatggcggtaagttcgtatcgcaaaatattacttttttgggcgataaagca

SEQ ID NO: 55688 - DNA, 75 bp, synthetic construct
  source 1..75: mol_type = other DNA
atgaaatagccgaagcgatcgctttgcatacaacctgtatgccgacacgggagatccccggcgcaattgccaact

SEQ ID NO: 55689 - DNA, 75 bp, synthetic construct
  source 1..75: mol_type = other DNA
tacagacagcaggtgagccacgactgctaccccctcacctgaatcacactgtgccattaaatgaaggcattcaac

SEQ ID NO: 55690 - DNA, 75 bp, synthetic construct
  source 1..75: mol_type = other DNA
taaagctggtcagatggataacaccaagtttaatgaagcccttgctaaactaaattcaagtgtacgagaagcaat

SEQ ID NO: 55691 - DNA, 75 bp, synthetic construct
  source 1..75: mol_type = other DNA
ctcattgaagaagggctggccctgaaactggagaatggacgttttgcaccgggcatccagttactgcagatcgcc

SEQ ID NO: 55692 - DNA, 75 bp, synthetic construct
  source 1..75: mol_type = other DNA
ctgtaacctgttcgacctcgaccagctacgcatggagtacagcccggacgaataccaaaacctgctgatgtgcga

SEQ ID NO: 55693 - DNA, 75 bp, synthetic construct
  source 1..75: mol_type = other DNA
gcggggaatatcaggtgctggcgcgctgggacacgccgaaggtggtgaagggtgtgagctttatgcttcgcctga

SEQ ID NO: 55694 - DNA, 75 bp, synthetic construct
  source 1..75: mol_type = other DNA
aatggcggcaacgaagccgacttaaaccctaacgttgccaaccgcaacaaaggcccacgtcgtcagccggaaaag

SEQ ID NO: 55695 - DNA, 75 bp, synthetic construct
  source 1..75: mol_type = other DNA
gcaggccaccgacagccagcatgaagaataaatcctggttcaggatgcaggcgggtggtcagggtgaggcggata

SEQ ID NO: 55696 - DNA, 75 bp, synthetic construct
  source 1..75: mol_type = other DNA
aatgacgtaaaagcgtgggtcagcgatacgctgaagacgtttgattttgagcgtcgttcactggtgatgctggcg

SEQ ID NO: 55697 - DNA, 75 bp, synthetic construct
  source 1..75: mol_type = other DNA
aataatataacagatgggacggtttcctccggggatttagtcttgggtaaaacaggcaatggcattattgacata

SEQ ID NO: 55698 - DNA, 75 bp, synthetic construct
  source 1..75: mol_type = other DNA
aaagttaactcactgactgatgatcgggtactgaaagaagttatgagactgggggcgttacagaaaaaactcttt

SEQ ID NO: 55699 - DNA, 75 bp, synthetic construct
  source 1..75: mol_type = other DNA
atgaaagaattaaaaaagatcaatagatatataatgtgtttctttttgggatctcgcctagcatatgctgaaaat

SEQ ID NO: 55700 - DNA, 75 bp, synthetic construct
  source 1..75: mol_type = other DNA
aaacgggtatggcgacgtgaacgggacctgacgggctggatgtcgctgtcacggaaaccgcaagtgacctggtac

SEQ ID NO: 55701 - DNA, 75 bp, synthetic construct
  source 1..75: mol_type = other DNA
tttgaccacatacggcaaacaagagctgtatatttttttgacgagttcgatgctataggaactcagcgtggcgct

SEQ ID NO: 55702 - DNA, 75 bp, synthetic construct
  source 1..75: mol_type = other DNA
agatgctcggtgtttccaacagtatgatttaccagctgacggactatatcggttacgacatcctgctgcagtaca

SEQ ID NO: 55703 - DNA, 75 bp, synthetic construct
  source 1..75: mol_type = other DNA
ctgaaacggcagcgggacagagtgcctcagctgcggcaggctcaaaaacagcggctgcatcatctgccagtgccg

SEQ ID NO: 55704 - DNA, 75 bp, synthetic construct
  source 1..75: mol_type = other DNA
aaaaatcagaaaacaacgagttctgtaggtttagttgaaaaacgacttacaccatttgttaagcagcctgatggt

SEQ ID NO: 55705 - DNA, 75 bp, synthetic construct
  source 1..75: mol_type = other DNA
ggaaaacagcctcacgcagctggttgcgaaaaagaatgaggaccagacactggccatcgcgcaggtgagccagaa

SEQ ID NO: 55706 - DNA, 75 bp, synthetic construct
  source 1..75: mol_type = other DNA
tggcgttgcgagcgcccgccagagtggtttttccggatgcgttagaccaacgtgtgctgaaagccgcgcaatatt

SEQ ID NO: 55707 - DNA, 75 bp, synthetic construct
  source 1..75: mol_type = other DNA
gataatacgctgatttacagtggtgttattgatatgcctgccggtcacggtcacatgacactggagttttcggtg

SEQ ID NO: 55708 - DNA, 75 bp, synthetic construct
  source 1..75: mol_type = other DNA
cgcagacggtggatttcacgctcgggtcacaggggctgcgtcacacacccggtgacatcattgaaatctgtgata

SEQ ID NO: 55709 - DNA, 75 bp, synthetic construct
  source 1..75: mol_type = other DNA
cagatgatgcttttctgaaggagttaatgagactgggaaggatgcagaagcatctgtttgttcagggaaaaagaa

SEQ ID NO: 55710 - DNA, 75 bp, synthetic construct
  source 1..75: mol_type = other DNA
ctaacatctctggtgtcacggtggtgttccgggcaggtgagcaggaacagacaccgccggagggatttgaatcat

SEQ ID NO: 55711 - DNA, 75 bp, synthetic construct
  source 1..75: mol_type = other DNA
gttaaatctgcagagcagcagggtgcctttagatgtggtgaccggtaagcggatttacaccaatatgctgatccg

SEQ ID NO: 55712 - DNA, 75 bp, synthetic construct
  source 1..75: mol_type = other DNA
aataacaccacgcggattgcgaccactgcgtttgtacaggccgctattaccgctctgattaacggtgcccctgac

SEQ ID NO: 55713 - DNA, 75 bp, synthetic construct
  source 1..75: mol_type = other DNA
gagaatctgaatcaggcacagcaacagattgccattttccagagtcaggtacaggtccagcaggatgcgctgctg

SEQ ID NO: 55714 - DNA, 75 bp, synthetic construct
  source 1..75: mol_type = other DNA
tagcaagaccatcgatctggatactgctggcggagtcattgatcgtgacgtcattaaatggtggctgaagcaatc

SEQ ID NO: 55715 - DNA, 75 bp, synthetic construct
  source 1..75: mol_type = other DNA
ccgaggtgcatccccgggaggtggtcaaacgtgctctgcacttcaacgcggcggcggtgatactcgcgcataacc

SEQ ID NO: 55716 - DNA, 75 bp, synthetic construct
  source 1..75: mol_type = other DNA
tgcattatctcaaggtaatacttacaacgaaacctacactaccgaatctcatacttgggataacaatatctctgt

SEQ ID NO: 55717 - DNA, 75 bp, synthetic construct
  source 1..75: mol_type = other DNA
agattgctggcgttttgttaggaaaagaggtgcgtaaacgtaaaacacctcagaaaaaaaatcgcaattattcaa

SEQ ID NO: 55718 - DNA, 75 bp, synthetic construct
  source 1..75: mol_type = other DNA
cagtgcaaatgttggctatatagcttgtgccggttataaccaggacccggtgaaatttatttccagagcaggcgt

SEQ ID NO: 55719 - DNA, 75 bp, synthetic construct
  source 1..75: mol_type = other DNA
ggcacgggaatggctgattctgaacatggcgggactggagcgtgaagaattccgggtgctgtatctgaacaacca

SEQ ID NO: 55720 - DNA, 75 bp, synthetic construct
  source 1..75: mol_type = other DNA
ttcctggtggttcagggactgcataaaggagaaggcgttggcaccgtctggtcacttcagccgtttatcagcgag

SEQ ID NO: 55721 - DNA, 75 bp, synthetic construct
  source 1..75: mol_type = other DNA
cctcatacccagtatgcacagaaacataatccgacatttaccggagaaccaaaagcgccgacgcctgctgcagga

SEQ ID NO: 55722 - DNA, 75 bp, synthetic construct
  source 1..75: mol_type = other DNA
catccgctggtggtggaagtgaagcgtcagttttgtcgcagcgaaaaaatgaaaatgcttttacgggcggggtga

SEQ ID NO: 55723 - DNA, 75 bp, synthetic construct
  source 1..75: mol_type = other DNA
tgtagagcaggatgattctgagagcatagttttagctgcaaccaatcatccagagcttttagatcgcgccttata

SEQ ID NO: 55724 - DNA, 75 bp, synthetic construct
  source 1..75: mol_type = other DNA
gagtggctggcaggggaaaagatgctcgacagtcttgcccgctacccggaagtggcaaaagaggattttgcgaac

SEQ ID NO: 55725 - DNA, 75 bp, synthetic construct
  source 1..75: mol_type = other DNA
ctgggtagaaggtggcggttgtaaggcccacgcctgcggctgggactttatcgtaacactctataacccaaaaac

SEQ ID NO: 55726 - DNA, 75 bp, synthetic construct
  source 1..75: mol_type = other DNA
atgcagcagctttcctttctgcccggagagatgacgcccggcgagcgcagcctcattcagcgggccctgaaaacc

SEQ ID NO: 55727 - DNA, 75 bp, synthetic construct
  source 1..75: mol_type = other DNA
tgtttcaccatcgcaattttccctgatgtcatctgtgactgagcaaggaataaatccttttgcttactggattgc

SEQ ID NO: 55728 - DNA, 75 bp, synthetic construct
  source 1..75: mol_type = other DNA
tccgggtgctgtatctgaacaaccagaatcagctgattgcgggtgaaaccctcttcaccggcaccatcaaccgca

SEQ ID NO: 55729 - DNA, 75 bp, synthetic construct
  source 1..75: mol_type = other DNA
cgtttgtggtgatgattgtgctgtcgcgccatccgctggtggtggaagtgaagcgtcagttttgtcgcagcgaaa

SEQ ID NO: 55730 - DNA, 75 bp, synthetic construct
  source 1..75: mol_type = other DNA
gaatggcagctcaacaatctgcgcgaagaggcgtaccgcgacacaccgtcgcaggatgcagcaggtgcacaattc

SEQ ID NO: 55731 - DNA, 75 bp, synthetic construct
  source 1..75: mol_type = other DNA
cgttatcaccagtgtaccaatatcgaatgctcggccactttccgcaccatcgagtcggttgacggtgtgatacgt

SEQ ID NO: 55732 - DNA, 75 bp, synthetic construct
  source 1..75: mol_type = other DNA
gctgccgataacgagcaggaacagttgcgccgcgaggcactgagtgatcaggtgtgggagcgttatttctttaat

SEQ ID NO: 55733 - DNA, 75 bp, synthetic construct
  source 1..75: mol_type = other DNA
tgcgcgcagcgcgcaaggcgggtaatttaattgccaaaaactatgaaaccccggacgctgtagaagcgagccaga

SEQ ID NO: 55734 - DNA, 75 bp, synthetic construct
  source 1..75: mol_type = other DNA
agaatatggtggactaatatgtaagaagcaaggtgaatatttccccatgaatccgataagttcaaatgataatga

SEQ ID NO: 55735 - DNA, 75 bp, synthetic construct
  source 1..75: mol_type = other DNA
gatctggtggtgacagttgaggatgaaagcggtaacaagatcgagcagatctatccggtcaccacactgccgaca

SEQ ID NO: 55736 - DNA, 75 bp, synthetic construct
  source 1..75: mol_type = other DNA
gggcgctacgcgtcgcgccaatttcagccttagtgggcctctggctggtaatgctcttaccacgcgtttgtatgg

SEQ ID NO: 55737 - DNA, 75 bp, synthetic construct
  source 1..75: mol_type = other DNA
gtggagacatacggtgtatggggactctccctgccgtcactgcgtcgtcgcctgttccgctgtgtctccatccgg

SEQ ID NO: 55738 - DNA, 75 bp, synthetic construct
  source 1..75: mol_type = other DNA
aacctggctctgactgaagagcaagcaaggttgctggcggagttcaaaacggaacacgcacaacagcaacataaa

SEQ ID NO: 55739 - DNA, 75 bp, synthetic construct
  source 1..75: mol_type = other DNA
cgaccagggcgcttgcgccccttggactcgtggcaataactgtccccttggactcgtggcaataactgtcccctt

SEQ ID NO: 55740 - DNA, 75 bp, synthetic construct
  source 1..75: mol_type = other DNA
ttgaggctaagatcaatcaaagcagcgatagtaaaacggtgaactttgttgctgatgttagcacggcgcaggtcg

SEQ ID NO: 55741 - DNA, 75 bp, synthetic construct
  source 1..75: mol_type = other DNA
tcgttagccaggataacgcggtggcagacggcgcgacggcgaatacgctgcaagtgagggtcaccgatgcgttcg

SEQ ID NO: 55742 - DNA, 75 bp, synthetic construct
  source 1..75: mol_type = other DNA
atgtttgattaccaagtttccaaacatccacattttgatgaagcctgtcgtgcattcgcattgcgccacaacctg

SEQ ID NO: 55743 - DNA, 75 bp, synthetic construct
  source 1..75: mol_type = other DNA
tgaatgtgcagattctgcggaacaagttgaacccagcgcaacctcatttattaaccgcaccagaaatctggctgc

SEQ ID NO: 55744 - DNA, 75 bp, synthetic construct
  source 1..75: mol_type = other DNA
tggctgttttgccacctacattatgaggcagggcggcgtgctggttcctcgcaaatatcacttgatcagaaccgc

SEQ ID NO: 55745 - DNA, 75 bp, synthetic construct
  source 1..75: mol_type = other DNA
gcctatggcgatcacggtattcgtatttatggcatctggtcacccattgcagagggcaagatctgcactcatgca

SEQ ID NO: 55746 - DNA, 75 bp, synthetic construct
  source 1..75: mol_type = other DNA
gcaaatatcaccttatcagaacagcttatgaaattaacgaagagccgaccgcttatggcgatcacggtattcgta

SEQ ID NO: 55747 - DNA, 75 bp, synthetic construct
  source 1..75: mol_type = other DNA
agttacttgggaacaccaaataacacctatctaaaatataatcccaaagctaaagggaatggagttacaattatc

SEQ ID NO: 55748 - DNA, 75 bp, synthetic construct
  source 1..75: mol_type = other DNA
tggggcacctggaccatcattaacacgccagtggatgcgctgccggatctctccgatgtgcaggtgattattaaa

SEQ ID NO: 55749 - DNA, 75 bp, synthetic construct
  source 1..75: mol_type = other DNA
tgatactgagtattacctgctaaccagcgaacacgttagcgtatctgaatttgaagggcaggagattttgaaagt

SEQ ID NO: 55750 - DNA, 75 bp, synthetic construct
  source 1..75: mol_type = other DNA
attttcacgaccttcgccatgaagccatcagccgtttttttgaactcggcacactcaacgtcatggaggttgcgg

SEQ ID NO: 55751 - DNA, 75 bp, synthetic construct
  source 1..75: mol_type = other DNA
agggaattaagagaaaaatttgcagaaaaagcctataaagttgccaagtatgggctttactggtgggctactgtt

SEQ ID NO: 55752 - DNA, 75 bp, synthetic construct
  source 1..75: mol_type = other DNA
cgctgggcttcctgctggtgcagattatcaacactattctgagctatttcgtgctgatcaaacccattctgggct

SEQ ID NO: 55753 - DNA, 75 bp, synthetic construct
  source 1..75: mol_type = other DNA
ggcggatagtgtcatcaactatgtgaacaccaacctttcgacgctggtgctggcgcgtattctgggggcaagcgt

SEQ ID NO: 55754 - DNA, 75 bp, synthetic construct
  source 1..75: mol_type = other DNA
gcttcaactctgaatctgttcgctgcttttcttggtgttatccgggggcttttccctcacgccaaatctcacaca

SEQ ID NO: 55755 - DNA, 75 bp, synthetic construct
  source 1..75: mol_type = other DNA
aaatgactctcaaccgggcgctggacaaatacctgaaaaccgtttccgtccataaaaaaggtcatctgcaggagt

SEQ ID NO: 55756 - DNA, 75 bp, synthetic construct
  source 1..75: mol_type = other DNA
cgtcttcagaaagatcagaacggcgcggatattcctgataaaagattattcctgcgcaatattggagcaacaaat

SEQ ID NO: 55757 - DNA, 75 bp, synthetic construct
  source 1..75: mol_type = other DNA
atggataagaagcaagtaacggatttaaggtcggaactactcgattcacgttttggcgctaagtcaatttctact

SEQ ID NO: 55758 - DNA, 75 bp, synthetic construct
  source 1..75: mol_type = other DNA
atggcggcgtttgcgattacgcaagtggtgctggatgaagctacattgttcaatattgcggtcgatcctgactat

SEQ ID NO: 55759 - DNA, 75 bp, synthetic construct
  source 1..75: mol_type = other DNA
tcagggggggactgtggatcctcagaatccgctcagactgggagcaggagcacaggggcaatatggatatgaaat

SEQ ID NO: 55760 - DNA, 75 bp, synthetic construct
  source 1..75: mol_type = other DNA
gggaatacaccctgacagtcagggcaattaacagttatggccagcagggcgaaccggccaccaccaccttccgga

SEQ ID NO: 55761 - DNA, 75 bp, synthetic construct
  source 1..75: mol_type = other DNA
atgaactatcgtattattccggtcaccgcattctcccagaactgttcattaatctggtgtgaacaaacccgtctg

SEQ ID NO: 55762 - DNA, 75 bp, synthetic construct
  source 1..75: mol_type = other DNA
gaaaccctgaactggccgatgattggcgagcaactcactaaacgagaccgttacgcccatgtagtgcgcaacacc

SEQ ID NO: 55763 - DNA, 75 bp, synthetic construct
  source 1..75: mol_type = other DNA
gggattcagggcaatttttgaacgactggggatcggttatgtggagattcaggagcgccagccaggcacagactg

SEQ ID NO: 55764 - DNA, 75 bp, synthetic construct
  source 1..75: mol_type = other DNA
gttaatgaattttcatcacgtttacccattgatattgtgcgattaagtaataatgttggtctaggtaaggctctt

SEQ ID NO: 55765 - DNA, 75 bp, synthetic construct
  source 1..75: mol_type = other DNA
tgcgtaaatcctctggactgacaacgaaattcagtagattgacgctgggtgttttgctggcactaagcggttcag

SEQ ID NO: 55766 - DNA, 75 bp, synthetic construct
  source 1..75: mol_type = other DNA
caatgtcgccacgattattatggggaacgctattgtacacactgccatacagggcgtttcagtgaggaggcagtg

SEQ ID NO: 55767 - DNA, 75 bp, synthetic construct
  source 1..75: mol_type = other DNA
gaagtgatgcacagcctccatgcagataaaagcgggacgattaccgttaaccttctgaagacatcaccgacaaat

SEQ ID NO: 55768 - DNA, 75 bp, synthetic construct
  source 1..75: mol_type = other DNA
cacagagccagtcttcggccacatgggggaataacgttattgtgatccgaaacaaggtcagcggcgacatcatca

SEQ ID NO: 55769 - DNA, 75 bp, synthetic construct
  source 1..75: mol_type = other DNA
ttaagaaacatcctgcgttctggtgtagatgtggtcaccttgtccgatggtgaacattacacaagggaatctctt

SEQ ID NO: 55770 - DNA, 75 bp, synthetic construct
  source 1..75: mol_type = other DNA
caaagcagccagcaatgacgttctcaccattttaagagtcgtcgataaagagtctgctcaagagttcgttcagga

SEQ ID NO: 55771 - DNA, 75 bp, synthetic construct
  source 1..75: mol_type = other DNA
ttgatgcggatatcgagaaggagacacaacgccttaaatctattgatgtgggttgtttgtctgattgtgacttga

SEQ ID NO: 55772 - DNA, 75 bp, synthetic construct
  source 1..75: mol_type = other DNA
atgtccagtgaatgtattcatgttcatgccggtatcctctcacgccaacttcgccagactgcactcaaaggaaat

SEQ ID NO: 55773 - DNA, 75 bp, synthetic construct
  source 1..75: mol_type = other DNA
cgtttgagcatatctgcacactgttacgtgagctggtaaaacattctcccggcgactttggctaccagcgttcac

SEQ ID NO: 55774 - DNA, 75 bp, synthetic construct
  source 1..75: mol_type = other DNA
cggcatggctggtaaatggctggtatcccacagcaagtatcagcgatttgctggttgtggtgatgaagaaagcca

SEQ ID NO: 55775 - DNA, 75 bp, synthetic construct
  source 1..75: mol_type = other DNA
actgatgatcggacgtgctgtggtttccgtcagcaaggacgggcgtcaggttcagtattcgcgggcgacgattgg

SEQ ID NO: 55776 - DNA, 75 bp, synthetic construct
  source 1..75: mol_type = other DNA
tgacctgacgcgagatgttgacggcttctactgtcgtgaaattgtgaaacgaatgtttgaagtgtggtgccactg

SEQ ID NO: 55777 - DNA, 75 bp, synthetic construct
  source 1..75: mol_type = other DNA
atgtacgcaaaatcttttctcgcatttgatggcaacggacgtctgaccgctgcccgtaccgcacagactgcacct

SEQ ID NO: 55778 - DNA, 75 bp, synthetic construct
  source 1..75: mol_type = other DNA
ctgcaataaatcccagtacgaagtcacaaaggtgattgccggaccgtctgtttacatctgcaatgagtgcgtgga

SEQ ID NO: 55779 - DNA, 75 bp, synthetic construct
  source 1..75: mol_type = other DNA
tggcgttgaaaggcctttactacaggtttccgaggaggctattgcacgcggcgcatacgataccattgaatacaa

SEQ ID NO: 55780 - DNA, 75 bp, synthetic construct
  source 1..75: mol_type = other DNA
tgattgacagtctgaaacaaattccctgggtggaagatgccgatgagtacccggaaaaagtgacgcaactggtga

SEQ ID NO: 55781 - DNA, 75 bp, synthetic construct
  source 1..75: mol_type = other DNA
tgttgttttcttcaattatttcgactggctgaaaatttggcttgctccaaaactttaccttatcgaatatgcagc

SEQ ID NO: 55782 - DNA, 75 bp, synthetic construct
  source 1..75: mol_type = other DNA
atgtattcgcgttttattactggttactggcatcttcagacgcagtccgctttgctggcacatctctgtcagctt

SEQ ID NO: 55783 - DNA, 75 bp, synthetic construct
  source 1..75: mol_type = other DNA
aaagctagaacattggtcgaagcacttgagccagtcaaagctcgtggggcattagagactgtacgtcgtctggtg

SEQ ID NO: 55784 - DNA, 75 bp, synthetic construct
  source 1..75: mol_type = other DNA
gttgtcgctgatctccgcgttttatcaggccgataaagttgccgtcacgttgacgttggtcaacgtgggggatgt

SEQ ID NO: 55785 - DNA, 75 bp, synthetic construct
  source 1..75: mol_type = other DNA
cctatttcaagctgacgatgaatggctcggaactggtggaaatcgacaccgtgaacctcatcgaaaaagtgaacg

SEQ ID NO: 55786 - DNA, 75 bp, synthetic construct
  source 1..75: mol_type = other DNA
ctaaggccattaacagcatgaatatgctgataccattgcaatacttttgtgtttttaacgccaacactggggaag

SEQ ID NO: 55787 - DNA, 75 bp, synthetic construct
  source 1..75: mol_type = other DNA
tgaaagcgaaacgttctgagttatcagctttatcgcagctatccattgaaaagaaatcaaaaattttgccattac

SEQ ID NO: 55788 - DNA, 75 bp, synthetic construct
  source 1..75: mol_type = other DNA
ccccggaaaatgctgctgctgcacgagcagcacttgaaaagtgtatagcaaataaacccgtacctcccacacaac

SEQ ID NO: 55789 - DNA, 75 bp, synthetic construct
  source 1..75: mol_type = other DNA
atgcgtacagacagtcagtcggcatttcgtaattcaaacgccagttacagtatgtcaaacgatttgaaaggcggc

SEQ ID NO: 55790 - DNA, 75 bp, synthetic construct
  source 1..75: mol_type = other DNA
tgaaataaaaacaatcacacatccacacttcggtgataaaccggtaaaggtgttcgcgataaaggtaaatattga

SEQ ID NO: 55791 - DNA, 75 bp, synthetic construct
  source 1..75: mol_type = other DNA
gtatcaatgaggttgctgaatatttacaaatcccgcggaaaaaactctatctcagaatgaaaaaatacggtctta

SEQ ID NO: 55792 - DNA, 75 bp, synthetic construct
  source 1..75: mol_type = other DNA
attacaaggtggtgaaagcctcattacccatttttggcgtcggacaaaagccaacaattaaaagacttcaggact

SEQ ID NO: 55793 - DNA, 75 bp, synthetic construct
  source 1..75: mol_type = other DNA
catttttgctggcggcaaccagcgttatggcaaaggatattcagcttcttaacgtttcatatgatccaacgcgcg

SEQ ID NO: 55794 - DNA, 75 bp, synthetic construct
  source 1..75: mol_type = other DNA
catcttgttacgtgatggtaaattagaagtttttgataatattgatgatgccatcaaaatttaccagtcactttg

SEQ ID NO: 55795 - DNA, 75 bp, synthetic construct
  source 1..75: mol_type = other DNA
gacggagaaatacgccgctatgacaggcgtctgaatataatctgtagcgagtgccggcagagtgaggttatgcag

SEQ ID NO: 55796 - DNA, 75 bp, synthetic construct
  source 1..75: mol_type = other DNA
atggctaacctgcaacttgccgttaaaggtgaatacttcgatgccatgattcgcggggagaaaacagaagaatat

SEQ ID NO: 55797 - DNA, 75 bp, synthetic construct
  source 1..75: mol_type = other DNA
tctcagtgatgagaataaccacttatttgatattgataaccctgttcttgttttggcgttgcactaccgccagcc

SEQ ID NO: 55798 - DNA, 75 bp, synthetic construct
  source 1..75: mol_type = other DNA
acaatcacacatccgcacttcggcgataaaccggtaaaggtgttcgcgataaaggtgaatatcggcaatgaataa

SEQ ID NO: 55799 - DNA, 75 bp, synthetic construct
  source 1..75: mol_type = other DNA
aatggcgatgctactgtcatattcagatatgcaacaagtacaaataatttagttttctacaaaccgacgcagctt

SEQ ID NO: 55800 - DNA, 75 bp, synthetic construct
  source 1..75: mol_type = other DNA
cacgcgaagaccgggaatttatcgaagccaacgtcgggaaaatgaccgttgaagaaatggcggaaaaactgaaag

SEQ ID NO: 55801 - DNA, 75 bp, synthetic construct
  source 1..75: mol_type = other DNA
atgggccaactctgcgaggaaagctatgctgaaaaggaaaaagtaaaaccgattacccttcgtgatgtcaccatt

SEQ ID NO: 55802 - DNA, 75 bp, synthetic construct
  source 1..75: mol_type = other DNA
cgggctaatgaaacacgccagtttgcccggatgttgggcttgaaccgaagaacacggcggtgcggagtccggaga

SEQ ID NO: 55803 - DNA, 75 bp, synthetic construct
  source 1..75: mol_type = other DNA
gcatgcgcgaagctctcgtagcgccactggatttcacttcactgcgtaatgctgtaaccgagttcgaacagcatc

SEQ ID NO: 55804 - DNA, 75 bp, synthetic construct
  source 1..75: mol_type = other DNA
gcaatacgacactgaacgtccctggtttgaacacactgacgacgggctgacggagcacggtcatgagtgccctta

SEQ ID NO: 55805 - DNA, 75 bp, synthetic construct
  source 1..75: mol_type = other DNA
atggatgcgctgagtaatccaccgtcaccaggtgaaaagctaaaacgtgcggcaaaacgtcttcagggaatgtaa

SEQ ID NO: 55806 - DNA, 75 bp, synthetic construct
  source 1..75: mol_type = other DNA
cgatcagaagatttacgacgaagccgaactggaaatggcactggcctgggctgataaaaacttccgctatggcga

SEQ ID NO: 55807 - DNA, 75 bp, synthetic construct
  source 1..75: mol_type = other DNA
gcgggaaactgtatccggatatggatgcagacggacgtatcgggccgcgtactcttaatgcattacgggtatatc

SEQ ID NO: 55808 - DNA, 75 bp, synthetic construct
  source 1..75: mol_type = other DNA
tcacaaacgaaatattccgcgttcctgcgcgccgccagcgtaagcctgcggttaagccgtccgacatcccgacac

SEQ ID NO: 55809 - DNA, 75 bp, synthetic construct
  source 1..75: mol_type = other DNA
gcaacccatctctgcgtcaccgtacctggcagattgcaatggacggcagccagaagttaccgcagcgtctgctgg

SEQ ID NO: 55810 - DNA, 75 bp, synthetic construct
  source 1..75: mol_type = other DNA
cagtaacggcaatactatcgccagcactcaggtagacagcaacgggcgctggagcgtcgatttacccacacaaag

SEQ ID NO: 55811 - DNA, 75 bp, synthetic construct
  source 1..75: mol_type = other DNA
tatcctgcctggtcatggcgatgccttgcgcaatggcggtcgaattcaatctgaatgttctcgataaatcaatgc

SEQ ID NO: 55812 - DNA, 75 bp, synthetic construct
  source 1..75: mol_type = other DNA
actggtatcccacggcaagcatcagcgatttgctggttgtggtgatgaagaaatccacagccggtatcagtatca

SEQ ID NO: 55813 - DNA, 75 bp, synthetic construct
  source 1..75: mol_type = other DNA
tcaacaaaaagccttttacgttcattctggaaacagaacgtggtctgaatctttccattcaggccgttccccgtg

SEQ ID NO: 55814 - DNA, 75 bp, synthetic construct
  source 1..75: mol_type = other DNA
gtctggaacccggctcaaagagtatggttcgtctgaccagtacacctgacatcagtcgcctgccacaggacaggg

SEQ ID NO: 55815 - DNA, 75 bp, synthetic construct
  source 1..75: mol_type = other DNA
gcggcagtgcgctcagataccacccgcaatacgacactgagcgtccctggtttgaacacactgacgacgggctga

SEQ ID NO: 55816 - DNA, 75 bp, synthetic construct
  source 1..75: mol_type = other DNA
gtggtatggctgggacggagacaggctgacgacggtgcagactgacaccacacgtatccagacggtatacgagcc

SEQ ID NO: 55817 - DNA, 75 bp, synthetic construct
  source 1..75: mol_type = other DNA
gatcgcaggggggctgagtgcgttgcaaaccgtaacgatagcgagtgcattgcccttctcagttatcttattaat

SEQ ID NO: 55818 - DNA, 75 bp, synthetic construct
  source 1..75: mol_type = other DNA
atgcttattttcctggtatctgttgatgcagtttatccagaataacagggcaaaaataagcgcagacttgcttca

SEQ ID NO: 55819 - DNA, 75 bp, synthetic construct
  source 1..75: mol_type = other DNA
gataagccatataagtgatactgatgacgaacgaattcggcttgaagtcgatttgggcaatgagctgaactttat

SEQ ID NO: 55820 - DNA, 75 bp, synthetic construct
  source 1..75: mol_type = other DNA
ggcttatgaacccgcaaccaaaggacagtggccggaagagcagctgtggtcgacggagaaatacctcgatttcat

SEQ ID NO: 55821 - DNA, 75 bp, synthetic construct
  source 1..75: mol_type = other DNA
cgtcggactcatcgacacagttcagacaaatactcagagttctcgatattctttctgataagaatttgcgggatg

SEQ ID NO: 55822 - DNA, 75 bp, synthetic construct
  source 1..75: mol_type = other DNA
gaccgcgaccgggcaggggcagaagtctgcaggagataccagttttacgctggcctggaaaccgggagaagaagg

SEQ ID NO: 55823 - DNA, 75 bp, synthetic construct
  source 1..75: mol_type = other DNA
atgtacggtaagccggtgagtgaactgagcgagacagagaagcagacggtctcgacactggcaacggttgctgcc

SEQ ID NO: 55824 - DNA, 75 bp, synthetic construct
  source 1..75: mol_type = other DNA
ccagatattctcatcgtagatgaagcacttgctgtaggcgacgcactttttcaaaagcgctgtttccaacaaatt

SEQ ID NO: 55825 - DNA, 75 bp, synthetic construct
  source 1..75: mol_type = other DNA
agtcactaacgtgggtaaaccttctgtagcggaagaacgcagcaaaattacgccggtcactgcgattaaggtaac

SEQ ID NO: 55826 - DNA, 75 bp, synthetic construct
  source 1..75: mol_type = other DNA
atgaaaattttaataaaattgaataatgagtggcctgaacatgtgagtgggaaccctgtccttaatgagtgggtt

SEQ ID NO: 55827 - DNA, 75 bp, synthetic construct
  source 1..75: mol_type = other DNA
attcaaagccatccgcgtgcagtgcggaatccctggtatgaaaaccacctacggcatgtcgaaaggtaaaggtct

SEQ ID NO: 55828 - DNA, 75 bp, synthetic construct
  source 1..75: mol_type = other DNA
tgatgcagaaattggtcggaagattgcccggcagaatgctgtaaacaaaatctggatgctcgaaggttacttgct

SEQ ID NO: 55829 - DNA, 75 bp, synthetic construct
  source 1..75: mol_type = other DNA
cacaagattccttggtccggcatcgaatgctttttattatgtgaagatggtaatgtttatcagtcatatataaaa

SEQ ID NO: 55830 - DNA, 75 bp, synthetic construct
  source 1..75: mol_type = other DNA
cgctatgacaactctgtttctttagtcgacaaattgttcgtgatgatgacgttgggcgatgaccgttcgatctac

SEQ ID NO: 55831 - DNA, 75 bp, synthetic construct
  source 1..75: mol_type = other DNA
taggccattcgaatcaaaaaatgaccgatatttacaacgacgcacgcggtaaggaatggaaaaaactggtcattt

SEQ ID NO: 55832 - DNA, 75 bp, synthetic construct
  source 1..75: mol_type = other DNA
gacggagaaatacgccgttacgacaggcgtctgaacataatctgtcgcgagtgcctgaagagtgaagttatgcag

SEQ ID NO: 55833 - DNA, 75 bp, synthetic construct
  source 1..75: mol_type = other DNA
ggaaactgtctgcaaaccagattgaaggcgacctggtgaagacggtggggaaagcctttccccggaataacagtt

SEQ ID NO: 55834 - DNA, 75 bp, synthetic construct
  source 1..75: mol_type = other DNA
cggctgacggcgaaaaatgccgatatcagcggtaacgtgaatgcgaactccgggacgctcaacaacgtcacgatt

SEQ ID NO: 55835 - DNA, 75 bp, synthetic construct
  source 1..75: mol_type = other DNA
agttataacgagactcttatagagttcggaaagaaagtctcaaaatcttgctcagatatgcaaggtgtttatatt

SEQ ID NO: 55836 - DNA, 75 bp, synthetic construct
  source 1..75: mol_type = other DNA
gaaagaaaggtatttcacagcctgcggggaatgtttatcagccagcttgatcacggtggtgtcccagaagacagg

SEQ ID NO: 55837 - DNA, 75 bp, synthetic construct
  source 1..75: mol_type = other DNA
tgtttatgagttttcccgcatttccgctgaggcacagtcggagatagatgaggcaataaaacgtattctggaaag

SEQ ID NO: 55838 - DNA, 75 bp, synthetic construct
  source 1..75: mol_type = other DNA
tcatcgagaaaaagaacgcgatggcggttttcaccaataacgaccaactcgatccgcttatcgaagcgatcgaaa

SEQ ID NO: 55839 - DNA, 75 bp, synthetic construct
  source 1..75: mol_type = other DNA
gggctgtttttcccccgtacccggcgtgatttagtcgattccgcagtcattgtagagtgtatgttcgcaggcagg

SEQ ID NO: 55840 - DNA, 75 bp, synthetic construct
  source 1..75: mol_type = other DNA
atattcgtcgcagctatcctgccggtgatgagcaggttgaggtgctgaagggcatcaccctcgatatttatgccg

SEQ ID NO: 55841 - DNA, 75 bp, synthetic construct
  source 1..75: mol_type = other DNA
gttatctggcgggcatgaagcttggcgacacgccgctgctggagtacacgcgcgaccgcatgcaccgggagacgg

SEQ ID NO: 55842 - DNA, 75 bp, synthetic construct
  source 1..75: mol_type = other DNA
ttctcacggttggcggtgaatggcgtcacgacaaacttagcgatgcggtgaacctgaccgggggaaccagctcca

SEQ ID NO: 55843 - DNA, 75 bp, synthetic construct
  source 1..75: mol_type = other DNA
ataatcaatcgatgttgcttgaaaaagatgatttttatcaggacgctcagaagcttacttttgaaatgagaagct

SEQ ID NO: 55844 - DNA, 75 bp, synthetic construct
  source 1..75: mol_type = other DNA
tttacgggaatagcaaatgctcctgtaagtaacggaatagtaaggtatacatcagaacaaagtaaaaatgggatt

SEQ ID NO: 55845 - DNA, 75 bp, synthetic construct
  source 1..75: mol_type = other DNA
tcggtggatattggtgaattctaccaggtaactattcagcaacgtaaggatatttctcttgcacttagtgcaggc

SEQ ID NO: 55846 - DNA, 75 bp, synthetic construct
  source 1..75: mol_type = other DNA
ggcggtacgactgccgggccgcgtgaccacctcccgcctgctgcataccgccaccggggccgtggcacacgttac

SEQ ID NO: 55847 - DNA, 75 bp, synthetic construct
  source 1..75: mol_type = other DNA
tggcaaaagacatacaaaccgcacgtgagcatagcttgcgtgagctgggaaaacgactcgaagttacgtatggaa

SEQ ID NO: 55848 - DNA, 75 bp, synthetic construct
  source 1..75: mol_type = other DNA
ctcttctgctttccggttctgtctgtgccgttcaaattcagggactcgttattcgtgtgctggacggtgatgctc

SEQ ID NO: 55849 - DNA, 75 bp, synthetic construct
  source 1..75: mol_type = other DNA
aaacattaaattatataaataaacttagcaatccgtatgtaaaagggagatttgtctgtcaggatgtgtttgttt

SEQ ID NO: 55850 - DNA, 75 bp, synthetic construct
  source 1..75: mol_type = other DNA
tgaggcaacacaaaaaacttcctgtcaacttttttcaagcgctaccaaccatgaacacagtaatgtaaacattca

SEQ ID NO: 55851 - DNA, 75 bp, synthetic construct
  source 1..75: mol_type = other DNA
aagcagcagatgaatttgaacgaaaaaacgggacggcataccgtgaaattgagatcgcattaccgcgagaactga

SEQ ID NO: 55852 - DNA, 75 bp, synthetic construct
  source 1..75: mol_type = other DNA
aatccggtggtgatttgtaatgagcagcaccgctttattgttgcggaacagttgtatcaactgaacaaactcacc

SEQ ID NO: 55853 - DNA, 75 bp, synthetic construct
  source 1..75: mol_type = other DNA
gaaagtcctgtcgttatttgtaatgaacagcaccgctttattgttgctgagcaacttcgccagatgaataaactc

SEQ ID NO: 55854 - DNA, 75 bp, synthetic construct
  source 1..75: mol_type = other DNA
agaaaaaaggaagcattcgctggagtaaaacttttgatgcccgtaaagcatttctgaatcagtgttcaacggctg

SEQ ID NO: 55855 - DNA, 75 bp, synthetic construct
  source 1..75: mol_type = other DNA
gaaattatcaactgaaaactcttttgaggccgttagcagagaatggtatgcagcaaaagcagaccgctggacagt

SEQ ID NO: 55856 - DNA, 75 bp, synthetic construct
  source 1..75: mol_type = other DNA
tcaggatgtgaagaaaatagtcgaatcgataaaagctaacgggcgccacgaacatcatactcatcgcgaagttta

SEQ ID NO: 55857 - DNA, 75 bp, synthetic construct
  source 1..75: mol_type = other DNA
gaacctgccaccaccaccttccggattaccgcaccggcagcaccgtcgcggattgagctgacgccgggctatttt

SEQ ID NO: 55858 - DNA, 75 bp, synthetic construct
  source 1..75: mol_type = other DNA
ctctggattgatcccaatgcttttggtgcagccaagtttagtgggattttaaaaaatatagccatgaattatgca

SEQ ID NO: 55859 - DNA, 75 bp, synthetic construct
  source 1..75: mol_type = other DNA
cctgacctggctgaaatcaggacgtccattacggatgtcagcaatgaaatcacgcagaccgtcaataagaaactg

SEQ ID NO: 55860 - DNA, 75 bp, synthetic construct
  source 1..75: mol_type = other DNA
aggcgatacacgacgcgccagcgtctttttttttgtatcggcgcacacgcacacctcaacaatggtgggctgtat

SEQ ID NO: 55861 - DNA, 75 bp, synthetic construct
  source 1..75: mol_type = other DNA
cgggacgcaggttcgcgggtttacttatgatgcggagcacgccgggcggatggtggcacaccattatgcggggag

SEQ ID NO: 55862 - DNA, 75 bp, synthetic construct
  source 1..75: mol_type = other DNA
atgtgcaataacatccgtccggacgcagccgccgaagccatcataacgctaatgcacgcgctgattgatatttct

SEQ ID NO: 55863 - DNA, 75 bp, synthetic construct
  source 1..75: mol_type = other DNA
accaagtgcggaagagatcgcagagcaactggataagccagttgatgacgtcagccgtatgcttcgtcttaacga

SEQ ID NO: 55864 - DNA, 75 bp, synthetic construct
  source 1..75: mol_type = other DNA
acctctcaaagttggataattaatgagctgttaaatggagttgatagaaataccattccatttcagaaaataagt

SEQ ID NO: 55865 - DNA, 75 bp, synthetic construct
  source 1..75: mol_type = other DNA
aacagttgtcagagatacgtttaaaatttttaaaagatatcaaaaatggacagaaaacagctggaatattagagg

SEQ ID NO: 55866 - DNA, 75 bp, synthetic construct
  source 1..75: mol_type = other DNA
attcgtgcaacgcaaaacaagcagaatggcaaaatcgccaatatttatcagctgaatgcgaaggacgcatcggca

SEQ ID NO: 55867 - DNA, 75 bp, synthetic construct
  source 1..75: mol_type = other DNA
gtatgaggcatacaacaatggctacccttccccctatggcaatgtgcttcaccttaaaggtgccaccgctgctgg

SEQ ID NO: 55868 - DNA, 75 bp, synthetic construct
  source 1..75: mol_type = other DNA
gacggagaaatacgtcgctacgacagtcgcctaaacataatctgtcgcgagtgccggaagagtgaagctatgcag

SEQ ID NO: 55869 - DNA, 75 bp, synthetic construct
  source 1..75: mol_type = other DNA
agcgaaacaggaaaaccggctggagcgtcagctgcagcaactgagttatgcccgggtgttgatcctggatgaaat

SEQ ID NO: 55870 - DNA, 75 bp, synthetic construct
  source 1..75: mol_type = other DNA
ctgattaaaacggaactgctggaaacgcagaccgtggacttcagcgtgggtgccgaagggcttcgccatgtaccg

SEQ ID NO: 55871 - DNA, 75 bp, synthetic construct
  source 1..75: mol_type = other DNA
aaaaaagcgcgtaagttgaaaatgaaaagattacaaagaatgcttgagaagatgacgtgtgaccgagtctcgcca

SEQ ID NO: 55872 - DNA, 75 bp, synthetic construct
  source 1..75: mol_type = other DNA
ccggcgctgcagaaattgaagcggcatatcagaacgggcaaacagtgactgtccggcatgttctgcttggtgacg

SEQ ID NO: 55873 - DNA, 75 bp, synthetic construct
  source 1..75: mol_type = other DNA
aactgagtataaaatggttcagtcacactcttcatcgctttatcgaaaggctataaataactcgcttaagcaagt

SEQ ID NO: 55874 - DNA, 75 bp, synthetic construct
  source 1..75: mol_type = other DNA
tgcggcggatgtggacaaatgggcgctgtatgtcatcggccagaattgcgaccagtcggtgccggacggctttgg

SEQ ID NO: 55875 - DNA, 75 bp, synthetic construct
  source 1..75: mol_type = other DNA
ccccggacagactggcagcagtttgcccgaaaaagggctgaacactgccaccggcgctgccggggaagggtgtaa

SEQ ID NO: 55876 - DNA, 75 bp, synthetic construct
  source 1..75: mol_type = other DNA
gcgggcatctcggggtggggtatagccatggtgccggtgtggaatccccgtggaacgcggtggctggtgcgaact

SEQ ID NO: 55877 - DNA, 75 bp, synthetic construct
  source 1..75: mol_type = other DNA
tatatctgaacttgttttgcgtgcaggtaatggtaatccgaaggggattactggtgctttatggcagcgcacatc

SEQ ID NO: 55878 - DNA, 75 bp, synthetic construct
  source 1..75: mol_type = other DNA
gcctcaaatggacgccggatgatccctccagcgtgttttatctctgcgaacataatgcctgcgtcatccgccagc

SEQ ID NO: 55879 - DNA, 75 bp, synthetic construct
  source 1..75: mol_type = other DNA
ttatggtcaatcgctgctaacgcaaaccaatcaatctggcgtttatgtcgataaatgcctgattgtgccgggaga

SEQ ID NO: 55880 - DNA, 75 bp, synthetic construct
  source 1..75: mol_type = other DNA
tgaaattattgacgccaaacttcgctacgttaacacagcgctgctgtatgtagagtttgacgcaaagcagttccc

SEQ ID NO: 55881 - DNA, 75 bp, synthetic construct
  source 1..75: mol_type = other DNA
tttcactgcgggagcaaatcgccctgttgtacaacgacaatcccgaggttgtaacgctggctgcgcatttgatgt

SEQ ID NO: 55882 - DNA, 75 bp, synthetic construct
  source 1..75: mol_type = other DNA
acggcagcatctcagagcaaaactgctgctgaatccgctgcgacccgtgcggaagctgctgctgatcgtgctgaa

SEQ ID NO: 55883 - DNA, 75 bp, synthetic construct
  source 1..75: mol_type = other DNA
gctaccggttaaaggaaaaacgcaaagcgggagtgctggcaaaaaacgccacgccaatcagtgatgatgaaatgg

SEQ ID NO: 55884 - DNA, 75 bp, synthetic construct
  source 1..75: mol_type = other DNA
caggcgcgtggacgcggtggttttgttcgttcttcctggcaggaagtgaacgaactgatcgccgcatctaacgtt

SEQ ID NO: 55885 - DNA, 75 bp, synthetic construct
  source 1..75: mol_type = other DNA
ccacgccagggctcggttatctttgctggttttgaaaccaatcagggacaatctgcgattatgaatatcaaacgc

SEQ ID NO: 55886 - DNA, 75 bp, synthetic construct
  source 1..75: mol_type = other DNA
tgaaaagtaatcccagacgaaacagagcgaagtttacgataagtcccttcccggcactcagggttaaacagcata

SEQ ID NO: 55887 - DNA, 75 bp, synthetic construct
  source 1..75: mol_type = other DNA
ccgttgaccgttggggatatggcgtaaccagtgctctttcaccataccaggaaaacaaaattgctctggacactg

SEQ ID NO: 55888 - DNA, 75 bp, synthetic construct
  source 1..75: mol_type = other DNA
tgcaatcattggcaacgttgggcagggcgggcaggcatttgttcgcggtattcagcagcagggcacgataaaaat

SEQ ID NO: 55889 - DNA, 75 bp, synthetic construct
  source 1..75: mol_type = other DNA
gcagcactgacgccgttaacggctctcagctcaaaaccaccaacgacaacgtgacgaccaacaccaccaacatcg

SEQ ID NO: 55890 - DNA, 75 bp, synthetic construct
  source 1..75: mol_type = other DNA
gccccagttaaaaaacaatatgagtaccctgttttttctcatgttcaggctgggatgttctctccagaactcaga

SEQ ID NO: 55891 - DNA, 75 bp, synthetic construct
  source 1..75: mol_type = other DNA
tttattaaaaagtaaagctggcagtaaggatataaatacgttttttgataataatgattttatcaaaacaacgat

SEQ ID NO: 55892 - DNA, 75 bp, synthetic construct
  source 1..75: mol_type = other DNA
aatatctcttggagaaactgccggggccaatggcctatatagcctggcactaggtaaagaaagtaatgcaatcgg

SEQ ID NO: 55893 - DNA, 75 bp, synthetic construct
  source 1..75: mol_type = other DNA
acgtggtgctggaagttgatccggacagggccattattactcaggaaatcggagacagacgctatctgcaacgaa

SEQ ID NO: 55894 - DNA, 75 bp, synthetic construct
  source 1..75: mol_type = other DNA
gtggcaaaagtttttacacaagaagagcgggaaaaaattaaagggcaggttgttaagctagtacgccagagtggg

SEQ ID NO: 55895 - DNA, 75 bp, synthetic construct
  source 1..75: mol_type = other DNA
ttctgcagataacattggtggtatttattaccggaccattcagtattgtgtgaatggtacctggatgaatgtatc

SEQ ID NO: 55896 - DNA, 75 bp, synthetic construct
  source 1..75: mol_type = other DNA
aacgctggagcagttcgacttcggcttccagccaggtatcgatcgtaaggtcgtccgtgagctggccgggctggc

SEQ ID NO: 55897 - DNA, 75 bp, synthetic construct
  source 1..75: mol_type = other DNA
tatcaggccgatcaatcaggcgtctatcacgaacgtggcggatggctgaaagggcatcatagtggtatgccatac

SEQ ID NO: 55898 - DNA, 75 bp, synthetic construct
  source 1..75: mol_type = other DNA
ggcagcaaagaaccttgcagaggcgttcgagcattataacgaatggcatccgcatagtgcgctgggttatcgctc

SEQ ID NO: 55899 - DNA, 75 bp, synthetic construct
  source 1..75: mol_type = other DNA
gatgccagactggcactgacagaggatctgaatacacggggggttcagttacccggtgcaacagtagtgaccgtg

SEQ ID NO: 55900 - DNA, 75 bp, synthetic construct
  source 1..75: mol_type = other DNA
acattaaataagctggaacgcgataccaataccattatgacctggcagcctacggttcaggttattgaacttgcc

SEQ ID NO: 55901 - DNA, 75 bp, synthetic construct
  source 1..75: mol_type = other DNA
attttgaagttcgcagtccgctgaagtccgtgatggccggagatacagagttgctgaccgtgggggaaatcacat

SEQ ID NO: 55902 - DNA, 75 bp, synthetic construct
  source 1..75: mol_type = other DNA
ggtacagcgccagcgtcaggaattgagtcaggcgggtattaatacccgtaatctggcgcatgatgaacgagggct

SEQ ID NO: 55903 - DNA, 75 bp, synthetic construct
  source 1..75: mol_type = other DNA
tttggcggaatgatgacaacggctggcgtcgagtcaattgcctggtggcgtcatgaaaatacggtagagtcaggt

SEQ ID NO: 55904 - DNA, 75 bp, synthetic construct
  source 1..75: mol_type = other DNA
cgaaatataaccgcctgacggattccgttaaacgccagcagcgggaactggccgctgtgggaattaatacccgca

SEQ ID NO: 55905 - DNA, 75 bp, synthetic construct
  source 1..75: mol_type = other DNA
cactggcgaatcagcggtcgatggaagaaaacgcgcaactgttgctggggactaaggcatcctttcaactgtcaa

SEQ ID NO: 55906 - DNA, 75 bp, synthetic construct
  source 1..75: mol_type = other DNA
aaactgaatcaggtttgcgctaaagacccgcaaatgctgttgatcacggcaattgatgacaccatgcgtgctatc

SEQ ID NO: 55907 - DNA, 75 bp, synthetic construct
  source 1..75: mol_type = other DNA
gggccagccaacacagataactatgcgttattcaacgttgacagcggtgttgccatgaagaatgtgagcctggtg

SEQ ID NO: 55908 - DNA, 75 bp, synthetic construct
  source 1..75: mol_type = other DNA
tgccggtaaaagccagcgacgcggcgctcagtgaagggaacttctctgcctgggcaaccttaacggtggattacc

SEQ ID NO: 55909 - DNA, 75 bp, synthetic construct
  source 1..75: mol_type = other DNA
taaaaggtttagtgcaggtctgacacagatatacagcaaaaatttcccatcacttaatctgaattacaaaacagt

SEQ ID NO: 55910 - DNA, 75 bp, synthetic construct
  source 1..75: mol_type = other DNA
taccttcaccggtactgtgtctacggcgaatagcggcaactattacaccatttttaatactgataccggtgcggc

SEQ ID NO: 55911 - DNA, 75 bp, synthetic construct
  source 1..75: mol_type = other DNA
gggacttaagcaggcagatttcatttttcaccttgcaggagtaaatcgtcctgtgaaggagagtgaatttgaaga

SEQ ID NO: 55912 - DNA, 75 bp, synthetic construct
  source 1..75: mol_type = other DNA
tgagaaatttattgtcatccgaggaagtgcttgtttcaaatttgaaaatattgtcacgggtgaacgatatgaact

SEQ ID NO: 55913 - DNA, 75 bp, synthetic construct
  source 1..75: mol_type = other DNA
aaaacacgattaccggaattgaaacggtagtagacgataaatcgtttgtatgtgatgaaatagtattcaaaatcg

SEQ ID NO: 55914 - DNA, 75 bp, synthetic construct
  source 1..75: mol_type = other DNA
ccctcaacctgcgctgatgaataacggaggttcattgctgaccagcggcgatctgacaatcaccgcaggcagtct

SEQ ID NO: 55915 - DNA, 75 bp, synthetic construct
  source 1..75: mol_type = other DNA
cggtaactatgagttcccgcagccgctgcacgatgcgctggataaattccaggccgacaccggtatcgacatcga

SEQ ID NO: 55916 - DNA, 75 bp, synthetic construct
  source 1..75: mol_type = other DNA
tgcttcgaagccaacgctgactgggtgaccgtaatttgctgtgcggatatcaacaccgccaaaggtgcgctggac

SEQ ID NO: 55917 - DNA, 75 bp, synthetic construct
  source 1..75: mol_type = other DNA
agaaattacggggcagtgatgatgaaagcagtggacaggcggtacaaaaagcctctgcccgtgtggagctggttg

SEQ ID NO: 55918 - DNA, 75 bp, synthetic construct
  source 1..75: mol_type = other DNA
cgttgcttatccgtaaatactgggagcctgtcagcgcattctttggcggtgtggttgaagggctgaaagcggcat

SEQ ID NO: 55919 - DNA, 75 bp, synthetic construct
  source 1..75: mol_type = other DNA
agaaaacgcgcaactgttgctggggactaaggcatcctttcaactgtcaaatgatgatgtcagccatgtgggcga

SEQ ID NO: 55920 - DNA, 75 bp, synthetic construct
  source 1..75: mol_type = other DNA
ggttttatgtgcgcagcgtcaacctggtggggaaatctgcgtttgtggaagccagtggccgggcgagcaatgatg

SEQ ID NO: 55921 - DNA, 75 bp, synthetic construct
  source 1..75: mol_type = other DNA
attggttgtgcgtcagcttatgccgttgaattcaacaaagatttaatcgaagccgaagatcgtgaaaacgttaac

SEQ ID NO: 55922 - DNA, 75 bp, synthetic construct
  source 1..75: mol_type = other DNA
ctggttacgggttattcccgtctgaacaggcgcgtaaggactggcaaaatgctcgcaaaaaactctcaagggcaa

SEQ ID NO: 55923 - DNA, 75 bp, synthetic construct
  source 1..75: mol_type = other DNA
gctggggttaatcttggggcctggcgcctgcgtactgattaccagtacgatcagtcatttaacaatggcaaaagc

SEQ ID NO: 55924 - DNA, 75 bp, synthetic construct
  source 1..75: mol_type = other DNA
gtgcaggagcatggcaaagatattgcgtcctgctcgactaaccctggcggggctgaatgtaaacgcggtgaggct

SEQ ID NO: 55925 - DNA, 75 bp, synthetic construct
  source 1..75: mol_type = other DNA
cctgctggctaagctggaaggaaatgcgacgggcgataacgataataagcctgacgataatccaaccggtgacgg

SEQ ID NO: 55926 - DNA, 75 bp, synthetic construct
  source 1..75: mol_type = other DNA
tcctggccgggcgggcaaaacaacccgttatctttcatggtcagctgaccgggaatatggatgtcgccattccac

SEQ ID NO: 55927 - DNA, 75 bp, synthetic construct
  source 1..75: mol_type = other DNA
cgatgcacatgctgtatgccggtataccgctgaaagttctgcaaagcctgatgggacataagtccatcagttcaa

SEQ ID NO: 55928 - DNA, 75 bp, synthetic construct
  source 1..75: mol_type = other DNA
gctggctgaccttatcgtcaaagacgaaagcgccattcagcttatcgaagatggcctgcgcgaagtgtcgtgcgg

SEQ ID NO: 55929 - DNA, 75 bp, synthetic construct
  source 1..75: mol_type = other DNA
caggttccctgaacagcgtcatcccaccggcagtacagcacctgacggtggaggtgagtgcagctgacggccagt

SEQ ID NO: 55930 - DNA, 75 bp, synthetic construct
  source 1..75: mol_type = other DNA
tcgaacaggtggataaagaactcgttatggggattttgctttcagcatctgacctgaatgatattgaaaaaataa

SEQ ID NO: 55931 - DNA, 75 bp, synthetic construct
  source 1..75: mol_type = other DNA
acgcgttcggctgtaccagccgcggtcaggcccaccgtgccggactgtgggtgataaagaccgaactgctggaaa

SEQ ID NO: 55932 - DNA, 75 bp, synthetic construct
  source 1..75: mol_type = other DNA
gtgataaagaccgaactgctggaaacgcagacggtggatttcacgctcgggtcacaggggctgcgtcacacaccc

SEQ ID NO: 55933 - DNA, 75 bp, synthetic construct
  source 1..75: mol_type = other DNA
agcctcagacggtaagactgaggaactggttaaggttatgcaggataacctcggcggcgactttaaagagtttca

SEQ ID NO: 55934 - DNA, 75 bp, synthetic construct
  source 1..75: mol_type = other DNA
aagcgtgccgcctctgagctgcagacgaaatacaacagcctgagagcgtcggtacagcgtcagcgctccgagctg

SEQ ID NO: 55935 - DNA, 75 bp, synthetic construct
  source 1..75: mol_type = other DNA
tgccaggatatccggcggcgctgatatgcatatccgtgcaggacgactggataatgaggcatcgtttattctcgc

SEQ ID NO: 55936 - DNA, 75 bp, synthetic construct
  source 1..75: mol_type = other DNA
agcgtgataagctactaaaggaaaagaggaaacaagcaaagcaacaaagccagatagaggcttcagttgctgatt

SEQ ID NO: 55937 - DNA, 75 bp, synthetic construct
  source 1..75: mol_type = other DNA
ttcacagatatgatgacaagggtggtcaaagtgaccacccctcgtggaatgcaggagtctcgagtatttagcctt

SEQ ID NO: 55938 - DNA, 75 bp, synthetic construct
  source 1..75: mol_type = other DNA
acggcacatgtaaaattccagccgtggcaggatgataagtggagtcgagtattgccacatttgcgtcagaatgtt

SEQ ID NO: 55939 - DNA, 75 bp, synthetic construct
  source 1..75: mol_type = other DNA
tttttttagcactgtattcttgttgtaatacagtcagtgcatatacaagttttattgtgggaaataatgcaggag

SEQ ID NO: 55940 - DNA, 75 bp, synthetic construct
  source 1..75: mol_type = other DNA
aggggatgttttattagctaaaataaccccttgttttgaaaatggaaaaggatgtcataccgctgatttacctac

SEQ ID NO: 55941 - DNA, 75 bp, synthetic construct
  source 1..75: mol_type = other DNA
caaggaaatccagatcctgcaacagcgtctggacaaaacccgccagcttaagcaagggatgatgcaggaactgtt

SEQ ID NO: 55942 - DNA, 75 bp, synthetic construct
  source 1..75: mol_type = other DNA
atgtgatcaacgccgtcgaaaaaggcgaaacgctggtcgtaagcggcagcaccagcggtgtggaagccgggcaaa

SEQ ID NO: 55943 - DNA, 75 bp, synthetic construct
  source 1..75: mol_type = other DNA
gggattgcgtaccatttggtaatctgtttaaaacaaacacaaagaaaaaaaaagtcagcgattatgagctagttt

SEQ ID NO: 55944 - DNA, 75 bp, synthetic construct
  source 1..75: mol_type = other DNA
tcactggtggtgttttcagcccggtaccgtccggcccgtcatgatgttgttgtgtttgcggggcgcacactgacg

SEQ ID NO: 55945 - DNA, 75 bp, synthetic construct
  source 1..75: mol_type = other DNA
gaagtgtatgactaccccggacgtttcaagggtgcccacgggcagaactttgcccgctggcagatggacggctgg

SEQ ID NO: 55946 - DNA, 75 bp, synthetic construct
  source 1..75: mol_type = other DNA
cgctgaccattaacgggcaaacctatgttgcggcggtactggcggatggctcatggagcgtcggcgttccggcgg

SEQ ID NO: 55947 - DNA, 75 bp, synthetic construct
  source 1..75: mol_type = other DNA
aagttggacgctgggaactggtatttagccaacggtcttcagatccttatccagtattaaagcatgcgttgtata

SEQ ID NO: 55948 - DNA, 75 bp, synthetic construct
  source 1..75: mol_type = other DNA
gcagggggaggcctcactcaccgttaacacacagaggtttgataatcagcagaacggcacgctgtacagtgctgc

SEQ ID NO: 55949 - DNA, 75 bp, synthetic construct
  source 1..75: mol_type = other DNA
gggacaatcagaagcagaatctggcgaacctgagccgtgaccctgtgcacgctaatgacagtatcagcccgatat

SEQ ID NO: 55950 - DNA, 75 bp, synthetic construct
  source 1..75: mol_type = other DNA
atgcatcagcctcccgttcacttcacttaccgcctgctgagttacctggtcagtgcgattatcgccgggcagccg

SEQ ID NO: 55951 - DNA, 75 bp, synthetic construct
  source 1..75: mol_type = other DNA
tcattggtgggcgctatggtctttcatccaaagaatttggcccggactgtgtactggcggtatttgccgagctca

SEQ ID NO: 55952 - DNA, 75 bp, synthetic construct
  source 1..75: mol_type = other DNA
ctaaagtggctttagataagtttcagggatttgccagtgaagaactacgtcatgagaaagctgcaattgaggtaa

SEQ ID NO: 55953 - DNA, 75 bp, synthetic construct
  source 1..75: mol_type = other DNA
tgctgtgcctgcttgcaggctgcgcacagcgaaacacccaacttccgcccgtgtcgggcaacccggagccggtca

SEQ ID NO: 55954 - DNA, 75 bp, synthetic construct
  source 1..75: mol_type = other DNA
aaagcaagtaagaaaaagtcttcataatggagtactccggtcacgggaatggctcaatacacaggagttactgag

SEQ ID NO: 55955 - DNA, 75 bp, synthetic construct
  source 1..75: mol_type = other DNA
cctgggtatattcacctcttcatcgtgatgttccctatttgtactctgtgctttcttccgcagtgacatcagggc

SEQ ID NO: 55956 - DNA, 75 bp, synthetic construct
  source 1..75: mol_type = other DNA
tcctcttgtggatgttcctgcccgtggcgttatggttaccgggggtatttatgaggttcagacagggaaaacaga

SEQ ID NO: 55957 - DNA, 75 bp, synthetic construct
  source 1..75: mol_type = other DNA
gacggtgggcagtaaccagatcattaacgtgggttctgttcaggtggaaacgattggacttgttcgtgcgctgac

SEQ ID NO: 55958 - DNA, 75 bp, synthetic construct
  source 1..75: mol_type = other DNA
gaaatatcgatgagaatatccttaggcagataaagaaaatagttcctcatccggataccgccttgcatgcatact

SEQ ID NO: 55959 - DNA, 75 bp, synthetic construct
  source 1..75: mol_type = other DNA
gacccccgcgcctcaggcgcgggacttccaggaagaagtggcgaaactcatcgacgttaccacctgtatcggctg

SEQ ID NO: 55960 - DNA, 75 bp, synthetic construct
  source 1..75: mol_type = other DNA
aggcgcacaggcctggtatcctcattactcctggcatagcgatggtcgctatatcctctacgcgggtgaagttgt

SEQ ID NO: 55961 - DNA, 75 bp, synthetic construct
  source 1..75: mol_type = other DNA
atgcgcatattgctgagtaatgatgacggggtacatgcacccggtatacaaacgttggcgaaagccttgcgtgag

SEQ ID NO: 55962 - DNA, 75 bp, synthetic construct
  source 1..75: mol_type = other DNA
tctcaacttattgcaaagaaactggcgaaactcctgaagcaataaacaaacgtgtacagcgcggtgtttggcgtg

SEQ ID NO: 55963 - DNA, 75 bp, synthetic construct
  source 1..75: mol_type = other DNA
cagtttggcggtcagcagatgacggtgaactaccatatccgcggtcgcatcatccaggtgccgtcaaactatgac

SEQ ID NO: 55964 - DNA, 75 bp, synthetic construct
  source 1..75: mol_type = other DNA
tggtgatgaccgaaaaaggcgtgctgcgtaatgaactgccggtacgttttaccgatgcgcagggcaaccagcatg

SEQ ID NO: 55965 - DNA, 75 bp, synthetic construct
  source 1..75: mol_type = other DNA
gcactggagctggtcgatacttccggtgcgccagatattgaatggcctacgcctccggcagttcaggccagatga

SEQ ID NO: 55966 - DNA, 75 bp, synthetic construct
  source 1..75: mol_type = other DNA
tcgatctggtactggctccggcaacaccgtctaacaccgcgcgtgcgggcggcattgtgttaccgatcatcaaca

SEQ ID NO: 55967 - DNA, 75 bp, synthetic construct
  source 1..75: mol_type = other DNA
aacctggtgtgcggtccggtacaaatctgctggcataaattcgcccgctactgggatgtggagctgcgtgagatc

SEQ ID NO: 55968 - DNA, 75 bp, synthetic construct
  source 1..75: mol_type = other DNA
gtttctttctcccaaatcctgctggatatacgcatgcataacgcccgacaacttatttccagtaaactgtcagtg

SEQ ID NO: 55969 - DNA, 75 bp, synthetic construct
  source 1..75: mol_type = other DNA
acacgcaatttgcacccaccgctgcgggctctgcggtcagcaataccagtatcaacaataggctgaacaacggga

SEQ ID NO: 55970 - DNA, 75 bp, synthetic construct
  source 1..75: mol_type = other DNA
tacgtcagtgcattagctcaaatctgggatcttgctcgtaaccgttatcacgatgcaccacaggaaaacatctgg

SEQ ID NO: 55971 - DNA, 75 bp, synthetic construct
  source 1..75: mol_type = other DNA
ataataaaatccacacatgaagaactgctgggtgaaattaaacgtaacattcaagtgaatttgaaggtgaatcct

SEQ ID NO: 55972 - DNA, 75 bp, synthetic construct
  source 1..75: mol_type = other DNA
ccgggaaaaaataggaaaactgcatctggctcaggggctgtgggagctgatagacaacagccagcttgcggatga

SEQ ID NO: 55973 - DNA, 75 bp, synthetic construct
  source 1..75: mol_type = other DNA
ccgtccatgaaagcggcaatggataagaacagcgtgccggcggatatctggggagacaatctgatgctgcactat

SEQ ID NO: 55974 - DNA, 75 bp, synthetic construct
  source 1..75: mol_type = other DNA
tcagcggagttttgaaaaaaataaactaggaacagggcagcgcgctgaatacatgaaaacaatattcggcgaaga

SEQ ID NO: 55975 - DNA, 75 bp, synthetic construct
  source 1..75: mol_type = other DNA
gaacggcgaaccggcagagcagtggcagtatgatggccacggctggctgagagaaatcagccacctgagcgaagg

SEQ ID NO: 55976 - DNA, 75 bp, synthetic construct
  source 1..75: mol_type = other DNA
cctgtgccctgtttgcccgcgcctttaaccagctggcaaaggctgacgtctgggagcagaccttctgggacagcg

SEQ ID NO: 55977 - DNA, 75 bp, synthetic construct
  source 1..75: mol_type = other DNA
tggtgtacccggacgggctggagagccgccgggcgtatgatgagcgggacaggctggtatcggagacatcgcgca

SEQ ID NO: 55978 - DNA, 75 bp, synthetic construct
  source 1..75: mol_type = other DNA
cgaagtggaatcgacaggataaccgcgcaggttaactacctgcaggaatacatcaggacgcaatgccttcgatga

SEQ ID NO: 55979 - DNA, 75 bp, synthetic construct
  source 1..75: mol_type = other DNA
ccgttattttcacactctaaaaaacgtatttttcttaatgatgcagggaagtattacctggggatagtaaaagaa

SEQ ID NO: 55980 - DNA, 75 bp, synthetic construct
  source 1..75: mol_type = other DNA
ctcagccagccggtgttcgttaccggtacagaaagatgcaacacaggaagatattaaaacagaaactgtggcgga

SEQ ID NO: 55981 - DNA, 75 bp, synthetic construct
  source 1..75: mol_type = other DNA
tatcggccacgttgaccatggtaaaaccactctgaccgctgcaatcacaaccgtactggctaaaacctacggcgg

SEQ ID NO: 55982 - DNA, 75 bp, synthetic construct
  source 1..75: mol_type = other DNA
cgtgtagaacgcggtatcatcaaagttggtgaagaagttgaaatcgttggtatcaaagagactcagaagtctacc

SEQ ID NO: 55983 - DNA, 75 bp, synthetic construct
  source 1..75: mol_type = other DNA
tatcggccacgttgaccatggtaaaactacgctgaccgctgcaatcaccaccgtactggctaaaacctacggcgg

SEQ ID NO: 55984 - DNA, 75 bp, synthetic construct
  source 1..75: mol_type = other DNA
cgataacgcgccggaagaaaaggctcgtggtatcaccatcaacacttctcacgttgaatacgacaccccgacccg

SEQ ID NO: 55985 - DNA, 75 bp, synthetic construct
  source 1..75: mol_type = other DNA
ctttcctgaaggggttaaccctctctggcgtagccggaagtcttggcgtatggagtttcaatgcgcgttccagtc

SEQ ID NO: 55986 - DNA, 75 bp, synthetic construct
  source 1..75: mol_type = other DNA
aactcgcgcgcgcactgcgcaacatgatccgcaccggcattatcgtcgaaaccgaccttaacgccggtcgctgcc

SEQ ID NO: 55987 - DNA, 75 bp, synthetic construct
  source 1..75: mol_type = other DNA
ttgagtataatcttggacatcgctctattcgcgaccatcgtataactcttcatcatgacgatgttctttctttaa

SEQ ID NO: 55988 - DNA, 75 bp, synthetic construct
  source 1..75: mol_type = other DNA
gatattaaaacagaaactgtggcggacattgtgcagtcgctgccatcgtttactgaaacgcgagcggatgacctg

SEQ ID NO: 55989 - DNA, 75 bp, synthetic construct
  source 1..75: mol_type = other DNA
ttactcgcgatattggatctcgccgttcgtgacgttcatttcctgctggaaggtggcgaaatgccaggaaaaacg

SEQ ID NO: 55990 - DNA, 75 bp, synthetic construct
  source 1..75: mol_type = other DNA
tacaaccgccaccgctattatgacccgctgcaggggcggtatatcactcaggatccgattgggctgaagggggga

SEQ ID NO: 55991 - DNA, 75 bp, synthetic construct
  source 1..75: mol_type = other DNA
ccaatgggcaacctgggaaggcgttctgaactactacaaagcgaacgaagcttacctgcagggtcagctgggtaa

SEQ ID NO: 55992 - DNA, 75 bp, synthetic construct
  source 1..75: mol_type = other DNA
ctgaaagcgctggaaggcgacgcagagtgggaagcgaaaaatcctggaactggctggcttcctggattcctacat

SEQ ID NO: 55993 - DNA, 75 bp, synthetic construct
  source 1..75: mol_type = other DNA
acagtaaccgtactgccaggctgaataacgagcaacggtcagcgatacgggaacggttgtctgagcgtggagcaa

SEQ ID NO: 55994 - DNA, 75 bp, synthetic construct
  source 1..75: mol_type = other DNA
caaaaccgcacgttaacgtcggtactatcggccacgttgaccagggtaaaaccacactgaccgctgcaatcacga

SEQ ID NO: 55995 - DNA, 75 bp, synthetic construct
  source 1..75: mol_type = other DNA
atcacggacagcctgaaccggcgggaggtgctgtacacggaaggcgagggtggcctgaagcgggtggtgaagaag

SEQ ID NO: 55996 - DNA, 75 bp, synthetic construct
  source 1..75: mol_type = other DNA
tatttccggctgaactggtgcggctgctggacaggctggaggaagaaatccgggcagaccgcgtgagcagtgaaa

SEQ ID NO: 55997 - DNA, 75 bp, synthetic construct
  source 1..75: mol_type = other DNA
tgcccctatatttccagacacctgttatcacttaacccattactggcttgctgccgtagatattcccgtggcgag

SEQ ID NO: 55998 - DNA, 75 bp, synthetic construct
  source 1..75: mol_type = other DNA
tgatcgaaggaaagcaaaaaagctggttaactcactgcactgatgcagaggcactaaaaattgatagtgttatag

SEQ ID NO: 55999 - DNA, 75 bp, synthetic construct
  source 1..75: mol_type = other DNA
gtgaagcccccaccacctccggcgtggataatgcaaccggccccagactggcagacgccgctgaacgggattatt

SEQ ID NO: 56000 - DNA, 75 bp, synthetic construct
  source 1..75: mol_type = other DNA
acggtgcggtatggctataacagccagttgcaactgacttcagtgacatatccggatggtttacgcagcagccgg

SEQ ID NO: 56001 - DNA, 75 bp, synthetic construct
  source 1..75: mol_type = other DNA
ggtacgtatgaagtctcccgaatggcagacgatgcaggcggaactggccggtcattaccgcgatgtggcacatgc

SEQ ID NO: 56002 - DNA, 75 bp, synthetic construct
  source 1..75: mol_type = other DNA
tgcaccggagcagcttcagacccgcttttttggcacgttgcctgctgatgcggataaggctgaagcggtggtcag

SEQ ID NO: 56003 - DNA, 75 bp, synthetic construct
  source 1..75: mol_type = other DNA
tcaaaaggttagagagattttcgagggagatgaaaccaaggatcatcatttcaatttaacccataaagaagccaa

SEQ ID NO: 56004 - DNA, 75 bp, synthetic construct
  source 1..75: mol_type = other DNA
cctgccgtggtgtttgatgacagtgaggtggtttacggcatcacggatgtggtggtggccgggaaactccgtact

SEQ ID NO: 56005 - DNA, 75 bp, synthetic construct
  source 1..75: mol_type = other DNA
tgctggtggtctgtggtgcgcttagtctggggctgaatcattaccgcgataacgccatcatctacaaagcgcagc

SEQ ID NO: 56006 - DNA, 75 bp, synthetic construct
  source 1..75: mol_type = other DNA
gagcgtgtctgcgccgcgctgcgggagctgaacaagcaccgggatattgttcggcagattgtcgattcatccggt

SEQ ID NO: 56007 - DNA, 75 bp, synthetic construct
  source 1..75: mol_type = other DNA
cagtatgaacggtgtctcacaggctgatgaattgttgacgtgggatgattttttcgtagcagatgaaagccgcca

SEQ ID NO: 56008 - DNA, 75 bp, synthetic construct
  source 1..75: mol_type = other DNA
aaacgagccagagcaccagaaattattcctgtttcagtatctggctcttccggaatgactgatggcagaccattg

SEQ ID NO: 56009 - DNA, 75 bp, synthetic construct
  source 1..75: mol_type = other DNA
caacgtgatgtagcagaacttgacgccagatacacaaaggagcttgctgatgctaacgcgactatcgaaagtctc

SEQ ID NO: 56010 - DNA, 75 bp, synthetic construct
  source 1..75: mol_type = other DNA
acaagtatttacagtgccatttactacaccagctgttgcattgcgtgaagggtacatgaaatacaatttgacagt

SEQ ID NO: 56011 - DNA, 75 bp, synthetic construct
  source 1..75: mol_type = other DNA
aacggtattatgccgacggcatgcgcgatctcccggaggacaggcggcttgcgatcttggctgtttgcgtctcgg

SEQ ID NO: 56012 - DNA, 75 bp, synthetic construct
  source 1..75: mol_type = other DNA
agaagtggcgtgatgatctctacaaaaacgccccgacccgtgaggatgccgacgaggaatacggctgtatcccga

SEQ ID NO: 56013 - DNA, 75 bp, synthetic construct
  source 1..75: mol_type = other DNA
aacctcttctgacactggagttgaattattacctgtggaggtgacgctggatgagcggccttaccccgtttttta

SEQ ID NO: 56014 - DNA, 75 bp, synthetic construct
  source 1..75: mol_type = other DNA
tcgccctgatcgtcatctgtttaaccgtcattgtgacggcactggtaacgaggaaagacctctgcgaggtacgaa

SEQ ID NO: 56015 - DNA, 75 bp, synthetic construct
  source 1..75: mol_type = other DNA
tttttgacgccgtagacgaactgagccaggaaagccctggcgacattctgatctttatgagtggtgagcgggaaa

SEQ ID NO: 56016 - DNA, 75 bp, synthetic construct
  source 1..75: mol_type = other DNA
cgccagcaggcgctggatattctgacggctgactactggacaggcccgcgattcgaccttatttctgaggtgtca

SEQ ID NO: 56017 - DNA, 75 bp, synthetic construct
  source 1..75: mol_type = other DNA
ggttaccccacatactttccgccattcctacgcgatgcatatgctgtatgctggtattccgctgaaggtgctgca

SEQ ID NO: 56018 - DNA, 75 bp, synthetic construct
  source 1..75: mol_type = other DNA
aggccagtatcaggaaggcgctgaataatattctcccgggcgaacagactgcgcttctcagtgaagccggtaagg

SEQ ID NO: 56019 - DNA, 75 bp, synthetic construct
  source 1..75: mol_type = other DNA
attacacccaggaaaattataaagacgatgcgtttgcgaaagggaaaacgctgcaccagacattcttaaaaatct

SEQ ID NO: 56020 - DNA, 75 bp, synthetic construct
  source 1..75: mol_type = other DNA
ttctcaaaaggtgacaagataacaattgaagataatgttattgctgaagaatattcaacaatgcctgtaaaaaat

SEQ ID NO: 56021 - DNA, 75 bp, synthetic construct
  source 1..75: mol_type = other DNA
tccgcgaaattgtgacttttccgctatttagcgatcttgttcagtgtggctttccttcaccggcagcagattacg

SEQ ID NO: 56022 - DNA, 75 bp, synthetic construct
  source 1..75: mol_type = other DNA
acggtcaggacctggattggggaggcggttgccaccgctgctgctgacggtgtgacgttctctgttccggtcaca

SEQ ID NO: 56023 - DNA, 75 bp, synthetic construct
  source 1..75: mol_type = other DNA
gggaaatgctctggttgatattcccctttcccttcttcctgacggcagctatggctatttcacccgtgaagttga

SEQ ID NO: 56024 - DNA, 75 bp, synthetic construct
  source 1..75: mol_type = other DNA
gctgtcagcgccgacaataaagcacagaaaatgaccggaaaaaaagggagtacctggattggcggacagagtcgt

SEQ ID NO: 56025 - DNA, 75 bp, synthetic construct
  source 1..75: mol_type = other DNA
agcagagccgaaagccgcgctggtaacggaaagtgatggtaaggcctttcctcagccagcaggtgctgcgttacc

SEQ ID NO: 56026 - DNA, 75 bp, synthetic construct
  source 1..75: mol_type = other DNA
cctgcgggtcaatgccagttgctccgcagccgtgcgtgaagccaccggacccaccagcatggataatgcaaccag

SEQ ID NO: 56027 - DNA, 75 bp, synthetic construct
  source 1..75: mol_type = other DNA
ttacctgaagtgacgcagcaggcattacgtgaacgctacgccctgcaactgatgacgcaaaaagccgatgaatca

SEQ ID NO: 56028 - DNA, 75 bp, synthetic construct
  source 1..75: mol_type = other DNA
cttacgtgccgaaaggcaaggggaagcaggctatgaagcagcaaaaggcgatgttaatcgccctgatcgtcatct

SEQ ID NO: 56029 - DNA, 75 bp, synthetic construct
  source 1..75: mol_type = other DNA
atgaacacattaaacaccattcaagagttagcacgtgccattcgcaacctcatccgctcaggcgtggtgactgag

SEQ ID NO: 56030 - DNA, 75 bp, synthetic construct
  source 1..75: mol_type = other DNA
cccaacccaaatccgaagccggatccaaaaccagacccaaaaccggatccgaaaccagacccgactcccgatcca

SEQ ID NO: 56031 - DNA, 75 bp, synthetic construct
  source 1..75: mol_type = other DNA
ctcggtatcagagacggaatcatcaacgaccaggcagcattgagaacgcttcaggaatatatccgtactcagtgc

SEQ ID NO: 56032 - DNA, 75 bp, synthetic construct
  source 1..75: mol_type = other DNA
tttattatgatcctgaaacaggtgattcaatgacttttgatagtagcaatagaattgatcgtcgttctcaacgtg

SEQ ID NO: 56033 - DNA, 75 bp, synthetic construct
  source 1..75: mol_type = other DNA
tggattggtaaacgctcttacgtcacggtttccggcaaatcctaccgcggcgacgtccagccgctaccggtcacc

SEQ ID NO: 56034 - DNA, 75 bp, synthetic construct
  source 1..75: mol_type = other DNA
ggttgatgacaatgcagaagcaggtggaaggggcacaggactatatccgcactcagtgtactaagcaggcttttt

SEQ ID NO: 56035 - DNA, 75 bp, synthetic construct
  source 1..75: mol_type = other DNA
gtttaaccgtcatagtgacggcactggtaacgaggaaggacctctgcgaggtacgaatccgaaccggccagacgg

SEQ ID NO: 56036 - DNA, 75 bp, synthetic construct
  source 1..75: mol_type = other DNA
atgaatataaatcactcattacaagagcttgcgcgtgcactgcgcaacatgatccgcaccggtattatcgtcgaa

SEQ ID NO: 56037 - DNA, 75 bp, synthetic construct
  source 1..75: mol_type = other DNA
gattttgcattaactgcttttgttgccatatctgatttcctcgttattaggtggctgacagtatacacacaagaa

SEQ ID NO: 56038 - DNA, 75 bp, synthetic construct
  source 1..75: mol_type = other DNA
accggcaacggtgccgacgttcgcctgaactactacaccggtgaagccttcccggcaggtgtgaaggtgaccgct

SEQ ID NO: 56039 - DNA, 75 bp, synthetic construct
  source 1..75: mol_type = other DNA
taaggtcgatctgacttttcactggcgtgagtcggattgctatattgtggttcgggataatggttgcggcatgtc

SEQ ID NO: 56040 - DNA, 75 bp, synthetic construct
  source 1..75: mol_type = other DNA
ttagtgccggtgcccgtaaggtcgatctgacctttcactggcgtgagtcggatagctatatcgtggttcgagata

SEQ ID NO: 56041 - DNA, 75 bp, synthetic construct
  source 1..75: mol_type = other DNA
gtcaaaaacccgctgacaaagcgcccgggacacgatctgggccgcttcggtcttggactcaaaaccgcctccttt

SEQ ID NO: 56042 - DNA, 75 bp, synthetic construct
  source 1..75: mol_type = other DNA
ccaccagcgtggataatgcaaccagcccccgactggcagacaccgctgaacgggattatttcaccctcagagaac

SEQ ID NO: 56043 - DNA, 75 bp, synthetic construct
  source 1..75: mol_type = other DNA
atgaacactctcgcaaatattcaggaactcgcgcgcgcactgcgcaacatgatccgcaccggccttgtcgtcgaa

SEQ ID NO: 56044 - DNA, 75 bp, synthetic construct
  source 1..75: mol_type = other DNA
tacacgagtcatgttgatgcctaaaaaacaacgcgctcgttgggtaagtcccgatcgtgggattctgagaggtta

SEQ ID NO: 56045 - DNA, 75 bp, synthetic construct
  source 1..75: mol_type = other DNA
gaaagccattgcgcttaaaaccggagctgccgcggcgaaaagtgaatatctggtgtgcattgatggcgatgcgtt

SEQ ID NO: 56046 - DNA, 75 bp, synthetic construct
  source 1..75: mol_type = other DNA
cctgcaagcgcagattgccgacaaagataagctgattgccgatcttaaagatgcattgctcaaactgcaggagca

SEQ ID NO: 56047 - DNA, 75 bp, synthetic construct
  source 1..75: mol_type = other DNA
tcgtatatacggcagaaattgatgatcgctttggtgccgggaaagtcagttcgcgtataggtttgtcatcgcctg

SEQ ID NO: 56048 - DNA, 75 bp, synthetic construct
  source 1..75: mol_type = other DNA
tactggttgatgaatgccagtttttaaccagacaacaagtatatgaattatcggaggttgtcgatcaactcgata

SEQ ID NO: 56049 - DNA, 75 bp, synthetic construct
  source 1..75: mol_type = other DNA
gtgccggaagagtgaagttatgcagcgtgtgctggcgttttatcagaatggttttcgagagaggcttggagatca

SEQ ID NO: 56050 - DNA, 75 bp, synthetic construct
  source 1..75: mol_type = other DNA
tccggaccttatctggtcattacctgacggagaaatacgccgctacgacaggcgcctgaatataatctgtcgcga

SEQ ID NO: 56051 - DNA, 75 bp, synthetic construct
  source 1..75: mol_type = other DNA
acttttatcatcaggtgattggggaggcataccggcataaagtgctgtttgttataagccagtcggacaaggccg

SEQ ID NO: 56052 - DNA, 75 bp, synthetic construct
  source 1..75: mol_type = other DNA
tttcctgagcgacccggcgcacgataaccaatcttcaagcagtctgcttgccaatgtgtttcgtatcgcactggc

SEQ ID NO: 56053 - DNA, 75 bp, synthetic construct
  source 1..75: mol_type = other DNA
aagaaatattttacaacatcagcggagaagcaaaatgctaacgccgccagggagaaaaagcaggaggctgctgaa

SEQ ID NO: 56054 - DNA, 75 bp, synthetic construct
  source 1..75: mol_type = other DNA
cgatatggaagcttatcttgcccgtcgcattgctgaacgtattggtcgtggtgaagcccgttatctgattcaggg

SEQ ID NO: 56055 - DNA, 75 bp, synthetic construct
  source 1..75: mol_type = other DNA
agggagggttcttaatgcagaaaaagcaattagcatgttctgcaagaaaaattatattcctgtccgtcagggaag

SEQ ID NO: 56056 - DNA, 75 bp, synthetic construct
  source 1..75: mol_type = other DNA
acctctacgacccgctgggacggcgaatggcaaaacgggtctggcggcgggagcgtgacctgacggggtggatgt

SEQ ID NO: 56057 - DNA, 75 bp, synthetic construct
  source 1..75: mol_type = other DNA
tgcgtaacaaaatcattgacaccatgaaggcttatggcgggattgccagtgtggcgcaacttctgaccacatcaa

SEQ ID NO: 56058 - DNA, 75 bp, synthetic construct
  source 1..75: mol_type = other DNA
atgacccttgatttacctcgccgcttcccctggccgacgttactttcggtctgcattcatggtgctgttgtggcg

SEQ ID NO: 56059 - DNA, 75 bp, synthetic construct
  source 1..75: mol_type = other DNA
aacgctacgaagctcctacgctccgatgtgtgtaaacctgtttggcacaattctctgcgtctgcctgctggtgag

SEQ ID NO: 56060 - DNA, 75 bp, synthetic construct
  source 1..75: mol_type = other DNA
catcgataactcctttgccatgcgccgtcagatgttgtcacctgattacacgacagactggcgctcgataccaac

SEQ ID NO: 56061 - DNA, 75 bp, synthetic construct
  source 1..75: mol_type = other DNA
cgcgagacgttacgacaactggaaactaaaactggggcaacaagatatctgatgagcgttctggccagagagctg

SEQ ID NO: 56062 - DNA, 75 bp, synthetic construct
  source 1..75: mol_type = other DNA
gggcgggtgttcgatacggcagaatcatcgttattcctgcctgcgccgctgaagacggtgatacgtaccgtgcgt

SEQ ID NO: 56063 - DNA, 75 bp, synthetic construct
  source 1..75: mol_type = other DNA
ggcaaaaactggtttcagttaccaagtggtcatattgtccaaatgttttcgatgaatgtttatggggcggacact

SEQ ID NO: 56064 - DNA, 75 bp, synthetic construct
  source 1..75: mol_type = other DNA
caagctcgcaaagccttcttgactgggcgagtgaaaacaatgttgtcgaatacgaaatacattggcggaaacgta

SEQ ID NO: 56065 - DNA, 75 bp, synthetic construct
  source 1..75: mol_type = other DNA
atcattgccggtggtaaagggactgcggatgagaaattcgctgctctggaagccgcaggcgtgaaaaccgttcgc

SEQ ID NO: 56066 - DNA, 75 bp, synthetic construct
  source 1..75: mol_type = other DNA
aataccaggtgctggcgcgctgggatacgccgaaggtggtgaagggggtgagctttatgcttcgcctgaccgtgg

SEQ ID NO: 56067 - DNA, 75 bp, synthetic construct
  source 1..75: mol_type = other DNA
gccaggcgtggcggtaaaagcgggcaatctgcatctggctgtcgggcttgagtgcctgtggaacagcagtgtttg

SEQ ID NO: 56068 - DNA, 75 bp, synthetic construct
  source 1..75: mol_type = other DNA
acatctacctgatagacagcatgatcaggccactgctgatggtgttcgggttcttttttgcatcggtcgccatcg

SEQ ID NO: 56069 - DNA, 75 bp, synthetic construct
  source 1..75: mol_type = other DNA
cataaacactctcgccagagaactggtcgcaagtggtgatgtttacaattcaggttacggattattcccgtctga

SEQ ID NO: 56070 - DNA, 75 bp, synthetic construct
  source 1..75: mol_type = other DNA
gcgaaacgctgaaagatctcttttctcgcccggtattgccggaaatgaccgacgtgcatttgccgcttaacctga

SEQ ID NO: 56071 - DNA, 75 bp, synthetic construct
  source 1..75: mol_type = other DNA
cttctggatgaccggcatcggtaactggatagtcagtgtactgattggatgcgccgccggccccctgtgggccgc

SEQ ID NO: 56072 - DNA, 75 bp, synthetic construct
  source 1..75: mol_type = other DNA
ccaagacaggtgcgacaagatatctgatgagcgttcttgccagagagctggttgccagtggcgatgtatacaact

SEQ ID NO: 56073 - DNA, 75 bp, synthetic construct
  source 1..75: mol_type = other DNA
cttcctgcactgaaggaattcggttctgaatcattgccgcacaattttaatatggcagctgtcggtgtgatgaag

SEQ ID NO: 56074 - DNA, 75 bp, synthetic construct
  source 1..75: mol_type = other DNA
acaggcgcctaaacataatctgtcgcgagtgccggaagagtgaagctatgcagcgtgtactggctttctatcagg

SEQ ID NO: 56075 - DNA, 75 bp, synthetic construct
  source 1..75: mol_type = other DNA
gtgggttggtgactggaaatatgtaccgacaaaagaggattgcaacgacagaccgaactatgaaattcaggcgtt

SEQ ID NO: 56076 - DNA, 75 bp, synthetic construct
  source 1..75: mol_type = other DNA
cgtgcgcttgagtttgccatactgaccgcagcacgctcaggtgaaattcgtggtgccgagtggtcagagatcgat

SEQ ID NO: 56077 - DNA, 75 bp, synthetic construct
  source 1..75: mol_type = other DNA
acaggctttcagctccgttgatatctccagtgggcgaccgacagttgttctttctgattcccggcaggttaatcc

SEQ ID NO: 56078 - DNA, 75 bp, synthetic construct
  source 1..75: mol_type = other DNA
cctgtaaaacgttcggttgccgaaatttgggattggcctcatcggaagattacagttggccagactataaactgg

SEQ ID NO: 56079 - DNA, 75 bp, synthetic construct
  source 1..75: mol_type = other DNA
atgttggtgaggctctgggctggttgctgtatgacctggagatggaaaatgttcctgcaccgggaacgattttcc

SEQ ID NO: 56080 - DNA, 75 bp, synthetic construct
  source 1..75: mol_type = other DNA
gtggaggctgttggccagccgagtgatgatgcatccggctatctggattttttcaaaggcgagatagggaaaacc

SEQ ID NO: 56081 - DNA, 75 bp, synthetic construct
  source 1..75: mol_type = other DNA
gatttttacccgctgactggccgtgaagcgttttatttgtggggattgggcacgactacagcggcggcaaacctt

SEQ ID NO: 56082 - DNA, 75 bp, synthetic construct
  source 1..75: mol_type = other DNA
acaggctggaggaagaaatccgggcagaccgcgtgagcagtgaaagccgggcgtggcttgcgcagtgcgggctga

SEQ ID NO: 56083 - DNA, 75 bp, synthetic construct
  source 1..75: mol_type = other DNA
ccttggtttatgttggtgcgcataatgtatattatgttaaattgactgtgaaggtcctttacttcaccattcaca

SEQ ID NO: 56084 - DNA, 75 bp, synthetic construct
  source 1..75: mol_type = other DNA
tccagaagctgactgaaagagttgatgaacttgagtcagaattaaagttgttattaacttcccgaagcgatatcg

SEQ ID NO: 56085 - DNA, 75 bp, synthetic construct
  source 1..75: mol_type = other DNA
gcctgaccgcgccaccagcccattgacgacacaactgcatggaaggctctgcaccgagccggtaaaaaagcaggc

SEQ ID NO: 56086 - DNA, 75 bp, synthetic construct
  source 1..75: mol_type = other DNA
tggtactaaggatataaacatcgcagagggggatagcacccatgtagatatggcaataaataattcatcgctgac

SEQ ID NO: 56087 - DNA, 75 bp, synthetic construct
  source 1..75: mol_type = other DNA
ctgtggataacagcctcatcaatgtaaagtcaacgttatatctcagtgatatcactatcaagacaaacggtcaca

SEQ ID NO: 56088 - DNA, 75 bp, synthetic construct
  source 1..75: mol_type = other DNA
acaaactcagagagctttatgctacttatcaaaaaatatccacccctctgaaacacatgtttaattcattttttt

SEQ ID NO: 56089 - DNA, 75 bp, synthetic construct
  source 1..75: mol_type = other DNA
ttataccgtactggcgctgaatctggaaggcaaaaaagaagtcctgggcctgtatttgtcggaaagcgaaggcgc

SEQ ID NO: 56090 - DNA, 75 bp, synthetic construct
  source 1..75: mol_type = other DNA
atgcagcagctttcctttctgcccggagagatgacacccggcgagcgcagcctcattcagcgggccctgaaagcc

SEQ ID NO: 56091 - DNA, 75 bp, synthetic construct
  source 1..75: mol_type = other DNA
cgtcttgtacaggcgctggccctggttgacatccgggtgccggaccatctgatagtcggtggcagccaggttttc

SEQ ID NO: 56092 - DNA, 75 bp, synthetic construct
  source 1..75: mol_type = other DNA
cgcaactgatcacccagacacagcaggatatcagccagcgtcttcccggttcccagccgggtgtgagtgaaacaa

SEQ ID NO: 56093 - DNA, 75 bp, synthetic construct
  source 1..75: mol_type = other DNA
gctgccgtggtactggcacacaatcatccgtccggtgaagtcacacccagtaaggctgaccgccttattacggaa

SEQ ID NO: 56094 - DNA, 75 bp, synthetic construct
  source 1..75: mol_type = other DNA
gtggtgtccggcgatatcacggacatcaccacaccggacgggcgggagacgaaattttactataacgacgggaac

SEQ ID NO: 56095 - DNA, 75 bp, synthetic construct
  source 1..75: mol_type = other DNA
gaatcagctgattgcgggtgaaaccctcttcaccggcaccatcaaccgcacggaagtccatccccgggaagtgat

SEQ ID NO: 56096 - DNA, 75 bp, synthetic construct
  source 1..75: mol_type = other DNA
ctgtatgtcatcggccagtattgcgaccagtcggtgccggacggttttggcggtacggagccgcgcatcacctgt

SEQ ID NO: 56097 - DNA, 75 bp, synthetic construct
  source 1..75: mol_type = other DNA
atgaataaaactgatggccttcaggccctggaaaaaccgctggcgtcgcttcccgatacgcttcgccagcttatt

SEQ ID NO: 56098 - DNA, 75 bp, synthetic construct
  source 1..75: mol_type = other DNA
gggatctatactgcaaagctgaataacggaacatcgatcacgttgcggaatttatcgtcgtcccaagaacaaaca

SEQ ID NO: 56099 - DNA, 75 bp, synthetic construct
  source 1..75: mol_type = other DNA
tttactagtatgaatattacacatgtttatgaaaaagatgaagggatatatgatgcgatgaataagggtcgaatg

SEQ ID NO: 56100 - DNA, 75 bp, synthetic construct
  source 1..75: mol_type = other DNA
tttatgctgaggttcacaatgttcctgatgattatgagttcactgacgaggaactaaacagaattattgcaggtg

SEQ ID NO: 56101 - DNA, 75 bp, synthetic construct
  source 1..75: mol_type = other DNA
gtgattgatgccattggtgagggaccggtggaaggtccggtgaagggactgcagagtattctggtgaacaaaacc

SEQ ID NO: 56102 - DNA, 75 bp, synthetic construct
  source 1..75: mol_type = other DNA
cggcggaaaaatagctggcagacagccgccgcgaaggcatttttgcacatggcgttggataaatgcgcggttgtt

SEQ ID NO: 56103 - DNA, 75 bp, synthetic construct
  source 1..75: mol_type = other DNA
tactgggcgatcgttccatgcggacctgtgtgaatgcaacggagtgtaccagcggggatgaagatcagcagccgg

SEQ ID NO: 56104 - DNA, 75 bp, synthetic construct
  source 1..75: mol_type = other DNA
tgagatgttacccatcagcccggatagtatcaaccttgcaaaagagtctccttcggaaacctgggttctcaaaaa

SEQ ID NO: 56105 - DNA, 75 bp, synthetic construct
  source 1..75: mol_type = other DNA
tgagaatgcacgcgaacgccttttactcgctatgggtaaagaatcaacgccaacaaacaaaaccacccccgcaaa

SEQ ID NO: 56106 - DNA, 75 bp, synthetic construct
  source 1..75: mol_type = other DNA
gctgaaaaatcagtgcttgcaggctgggagcacagcggcgaaacattccgccagtggacgaaaaaaggttccctt

SEQ ID NO: 56107 - DNA, 75 bp, synthetic construct
  source 1..75: mol_type = other DNA
aaatagcctggtatgcttcaatacagcaggagccgaatagctggaagaccgtcaccacacagttctacatccagg

SEQ ID NO: 56108 - DNA, 75 bp, synthetic construct
  source 1..75: mol_type = other DNA
aaaaacagaagcgggaactgatcgtgttattcatcttgttcaaccagctgttgatgccctgaaaagccaggctga

SEQ ID NO: 56109 - DNA, 75 bp, synthetic construct
  source 1..75: mol_type = other DNA
atgagcggaaaaccggcagcgcggcagggcgacatgacccgcaagggactggatattgtgcagggttcagcaggg

SEQ ID NO: 56110 - DNA, 75 bp, synthetic construct
  source 1..75: mol_type = other DNA
ctggaacagctttgtggtgaatatgtttaccgatgataatcctgacgatattgtcgacctgctgctcgcccatcg

SEQ ID NO: 56111 - DNA, 75 bp, synthetic construct
  source 1..75: mol_type = other DNA
tgttctggtttatgaggtcgacagccagtggggaaaagtgtatgtcctgcgcgtgttgcataccgcacagaagtg

SEQ ID NO: 56112 - DNA, 75 bp, synthetic construct
  source 1..75: mol_type = other DNA
tgcagacttgggatgatgccagatctggagcatgtacggggggagtttgtggtgttctttcacgtataataggac

SEQ ID NO: 56113 - DNA, 75 bp, synthetic construct
  source 1..75: mol_type = other DNA
ctgcgctgtacatgctgaaggtgcagaaaacgaaaaacggcattccgtatgttgccggtattggtgcggggattg

SEQ ID NO: 56114 - DNA, 75 bp, synthetic construct
  source 1..75: mol_type = other DNA
caccgtttcagtggcctgcctctgggggaatacaccctgacggtcagggcgataaacagctacggccagcagggc

SEQ ID NO: 56115 - DNA, 75 bp, synthetic construct
  source 1..75: mol_type = other DNA
aacacctgtatgtgggattaccggggagatgaatgcgggtataacggtcctgcggtggcggatgagttcgacaac

SEQ ID NO: 56116 - DNA, 75 bp, synthetic construct
  source 1..75: mol_type = other DNA
attcagcaccaccattaacaatgcgctgtcaggtaagcagccactggatgagacgctgactcatttgagtggaaa

SEQ ID NO: 56117 - DNA, 75 bp, synthetic construct
  source 1..75: mol_type = other DNA
tggtgctggggctggcgattggctatttcgtcttctggttccgtaaagtgcgccttggcaaagcattacaaccgc

SEQ ID NO: 56118 - DNA, 75 bp, synthetic construct
  source 1..75: mol_type = other DNA
tgtgcaggggtggcttttccggtggatggtagttaccttgcgaacggtacacgaacgctgacggtgtatgacgat

SEQ ID NO: 56119 - DNA, 75 bp, synthetic construct
  source 1..75: mol_type = other DNA
gccggatgattactgatgccagtggcgtcaccagaagggaaggcgggattttgggaatgtggagcaatatatttc

SEQ ID NO: 56120 - DNA, 75 bp, synthetic construct
  source 1..75: mol_type = other DNA
gcctatgaagcgcgcctggcgcggtgtcgccatgcgctggaaaaaatcgaaaacaggttagcgcgtttaacccgc

SEQ ID NO: 56121 - DNA, 75 bp, synthetic construct
  source 1..75: mol_type = other DNA
tggtggctggaagcgaaaaacgctcgagattttgctatgtggcgctctgacgctgacctttgcatccgctcttga

SEQ ID NO: 56122 - DNA, 75 bp, synthetic construct
  source 1..75: mol_type = other DNA
tccggaccttatctgtcattacctgatggagaaatacgtcgttacgacaggcgtaataacatcgtttgtagagag

SEQ ID NO: 56123 - DNA, 75 bp, synthetic construct
  source 1..75: mol_type = other DNA
ataatgtacgcgtgttttataacagcgatacatctaatactgcaaccgcttcaaccggaaacgttgaaatcgatg

SEQ ID NO: 56124 - DNA, 75 bp, synthetic construct
  source 1..75: mol_type = other DNA
cattaccccgtttctggcccggagattttttcccgtccttctacgtctggcatctggctgtattaggcgttctgg

SEQ ID NO: 56125 - DNA, 75 bp, synthetic construct
  source 1..75: mol_type = other DNA
atgacaacagagaacacgacacgtaacgattcactggctgcccggaccgatacctggttgcagtcgttgctggtc

SEQ ID NO: 56126 - DNA, 75 bp, synthetic construct
  source 1..75: mol_type = other DNA
aatcataccggttcctgaattggaagaatatcaagttaaatttcgtgaaaaacgtgatgaacagctaattagcag

SEQ ID NO: 56127 - DNA, 75 bp, synthetic construct
  source 1..75: mol_type = other DNA
gcgaggagaatggcataaagaacgggctgtgagtatacgtagtgagttggttcgtcgtggggtaattaaaatcca

SEQ ID NO: 56128 - DNA, 75 bp, synthetic construct
  source 1..75: mol_type = other DNA
tgatgttggtaaggcgcttgtttatctaggtaaagagcaagctgttactggtggccatgcaactattttcaagcc

SEQ ID NO: 56129 - DNA, 75 bp, synthetic construct
  source 1..75: mol_type = other DNA
gcggagaagacagccgtctggtgaccaccgccatcactgcggatacagagcatcgtttcagtggtctgccgctcg

SEQ ID NO: 56130 - DNA, 75 bp, synthetic construct
  source 1..75: mol_type = other DNA
atggcgggactggagcgtgaagagttccgggtgctgtatctgaacaaccagaatcagctgattgccggtgaaacc

SEQ ID NO: 56131 - DNA, 75 bp, synthetic construct
  source 1..75: mol_type = other DNA
ccacaacgggcaggaaaaccaccaccggcgggaaaaagagcagcgcaaaaaagaaaagcgctgccagccagaaaa

SEQ ID NO: 56132 - DNA, 75 bp, synthetic construct
  source 1..75: mol_type = other DNA
atgtcaaaattaaaaattgcggttagtgattcttgcccggactgttttaccacgcagcgagaatgtatctacatt

SEQ ID NO: 56133 - DNA, 75 bp, synthetic construct
  source 1..75: mol_type = other DNA
cctgcctgaaagaagagaaaaaagccctgatgcagcagttattgaccgggaaacgccgtgtcaaagtagaatcgg

SEQ ID NO: 56134 - DNA, 75 bp, synthetic construct
  source 1..75: mol_type = other DNA
agtaatcagccagcaggcaccacgattacgctgacgcttaacgggcaaaattacaccgcgacgacggacgccgca

SEQ ID NO: 56135 - DNA, 75 bp, synthetic construct
  source 1..75: mol_type = other DNA
ctttacaattcacgacttccggcgaacagcacgaacacatttagcagcattgggagttgacccgatcgttgctga

SEQ ID NO: 56136 - DNA, 75 bp, synthetic construct
  source 1..75: mol_type = other DNA
tcgataaggatatcaacccacatattggcaacatgaagatagaggacgtaaaaccccgtcatattgatgcgatgc

SEQ ID NO: 56137 - DNA, 75 bp, synthetic construct
  source 1..75: mol_type = other DNA
tgcaccgggagcaaaagccagtagatggcctgacgcttttcgatgaactggagcgtaaatcgttaacggcgtctg

SEQ ID NO: 56138 - DNA, 75 bp, synthetic construct
  source 1..75: mol_type = other DNA
tatcttgatggcaacgctcgtcagaacctggccactttctgccagacctgggacgacgaaaatgtccataagttg

SEQ ID NO: 56139 - DNA, 75 bp, synthetic construct
  source 1..75: mol_type = other DNA
cctggttttaaccagttgcttgatcgactgaaaagaggtgatgaattgattgtcacaaaactggatcgcctcggt

SEQ ID NO: 56140 - DNA, 75 bp, synthetic construct
  source 1..75: mol_type = other DNA
gtaacagaaaaattgcaggtaagacactggatcgcctgaagacgttaatctggctggctgcacaggatgtgaaga

SEQ ID NO: 56141 - DNA, 75 bp, synthetic construct
  source 1..75: mol_type = other DNA
cttcggcaacccacgcctacagcgtcgatgccacggccccgacgcttgccattaacaccatcgccaccgacgata

SEQ ID NO: 56142 - DNA, 75 bp, synthetic construct
  source 1..75: mol_type = other DNA
tcaggtgttcctcaggataaatggttggttgaaccagggcagttactattttcctgggcaggtacaaaaggtgta

SEQ ID NO: 56143 - DNA, 75 bp, synthetic construct
  source 1..75: mol_type = other DNA
attgcctctgtcagtgccatggatagtctggacatccgggcagataaaaacatttcggtcacaggggcagaaatc

SEQ ID NO: 56144 - DNA, 75 bp, synthetic construct
  source 1..75: mol_type = other DNA
tatgatgtcgataccgccaaataccaagaaaatgtgctggatacgctggatcgcttgggcgtaagtatcttgtgg

SEQ ID NO: 56145 - DNA, 75 bp, synthetic construct
  source 1..75: mol_type = other DNA
gaggattctttttatcatatcatttcctccatttcatcatctggatatagctggaataatgaaaatgtattaaat

SEQ ID NO: 56146 - DNA, 75 bp, synthetic construct
  source 1..75: mol_type = other DNA
cgctgactaatttgagtggaaaggatgtagctggtcttctcgcataccttggtttgggagaagccagatatgtca

SEQ ID NO: 56147 - DNA, 75 bp, synthetic construct
  source 1..75: mol_type = other DNA
tccgctcagaactactcgattcacgttttggcgcaaaggccatttctactatcgcagaatcaaaacgatttccgc

SEQ ID NO: 56148 - DNA, 75 bp, synthetic construct
  source 1..75: mol_type = other DNA
ccatcaacttctcccgcccggcgggtcaggtgattgcacagtactatgaattcctgcgcctcggtcgtgaaggct

SEQ ID NO: 56149 - DNA, 75 bp, synthetic construct
  source 1..75: mol_type = other DNA
cgccggaggtcacagcggacatgcggaaggaacgactcaggccgcagtggcagaaggcactatcaccatccggga

SEQ ID NO: 56150 - DNA, 75 bp, synthetic construct
  source 1..75: mol_type = other DNA
cgtcagaacctggccactttctgccagacctgggacgacgaaaacgtccataaattgatggatttgtcgatcaat

SEQ ID NO: 56151 - DNA, 75 bp, synthetic construct
  source 1..75: mol_type = other DNA
tgccagcgccgccgcgctcggtgtgcctttaaaaattacccatatggcggtcggcgatggcggcggagtattgcc

SEQ ID NO: 56152 - DNA, 75 bp, synthetic construct
  source 1..75: mol_type = other DNA
cctttaaaaattacccatatggcggtcggcgatggcggcggagtattgccaacgccggatgcaaagcagactgca

SEQ ID NO: 56153 - DNA, 75 bp, synthetic construct
  source 1..75: mol_type = other DNA
acggcagaaggagcttcgctcctccgggaaatgacctggctgacccggcagtcgtgacgatgaggagacaatgtg

SEQ ID NO: 56154 - DNA, 75 bp, synthetic construct
  source 1..75: mol_type = other DNA
agaacataatctgtagcgagtgccggaagagcgaagttatgcagcgcgtactggcgttttatcggggaaacttac

SEQ ID NO: 56155 - DNA, 75 bp, synthetic construct
  source 1..75: mol_type = other DNA
aaggtgaggttgaatccgttgatacagaaagaatatcagaaagtaacaaacgctggcgcgggagaaccgctgact

SEQ ID NO: 56156 - DNA, 75 bp, synthetic construct
  source 1..75: mol_type = other DNA
gatacttattcgtcatgccgcctgatagtacggaaaaacggtgctgaaatttataaccgtaccgcgctggataat

SEQ ID NO: 56157 - DNA, 75 bp, synthetic construct
  source 1..75: mol_type = other DNA
gattgtcgataccggcggtatcgcacatggggtttacctggacacggggagtgctttagttgccaacacgggcgc

SEQ ID NO: 56158 - DNA, 75 bp, synthetic construct
  source 1..75: mol_type = other DNA
cgcgttggtagtttcaagggaagaaagaaggtgcattttagccaggcggaagaagatgctaggaaggcaatggct

SEQ ID NO: 56159 - DNA, 75 bp, synthetic construct
  source 1..75: mol_type = other DNA
cgtacccaccgtcgctgaatacctactggcgaagaaggggaagccaatactacatcagcgataaaggccagaaat

SEQ ID NO: 56160 - DNA, 75 bp, synthetic construct
  source 1..75: mol_type = other DNA
tgcggatgccattcgttataatgctcgaacgcctctgcaaggttctttgctgccgttaacccgtctggtttgggc

SEQ ID NO: 56161 - DNA, 75 bp, synthetic construct
  source 1..75: mol_type = other DNA
tacgtcgctacgacagtcgcctaaacataatctgtcgcgagtgccggaagagcgaagttatgcagcgcatactgg

SEQ ID NO: 56162 - DNA, 75 bp, synthetic construct
  source 1..75: mol_type = other DNA
gacggagaaatacgccgctacgacaggcgtctgaacataatctgtagcgagtgccggaagagcgaagctatgcag

SEQ ID NO: 56163 - DNA, 75 bp, synthetic construct
  source 1..75: mol_type = other DNA
gcatcagtaaaggccactgaggcatcaaaaagtgcagccgctgcagagtcctcgaaaagcgcggcggccaccagt

SEQ ID NO: 56164 - DNA, 75 bp, synthetic construct
  source 1..75: mol_type = other DNA
tatccctcaccagaaaaactcgcttcgctgggtgagaagaagctggcagcccagctctgcaaacttgcgcctcgt

SEQ ID NO: 56165 - DNA, 75 bp, synthetic construct
  source 1..75: mol_type = other DNA
gggaatacaccctgacggtcagggcgattaacagttatggccagcagggcgaaccggccaccaccaccttccgga

SEQ ID NO: 56166 - DNA, 75 bp, synthetic construct
  source 1..75: mol_type = other DNA
ttccgtatgtggccgggattggcgcggggatcgaggatgtcgatggtcagacgctgagtaacattctgctgcagg

SEQ ID NO: 56167 - DNA, 75 bp, synthetic construct
  source 1..75: mol_type = other DNA
tggtggcctggatgcgacccggatattcctggacggtacgccgttgggaaaccccgacggaacgatgaattttga

SEQ ID NO: 56168 - DNA, 75 bp, synthetic construct
  source 1..75: mol_type = other DNA
cagtgacaacctcgagcaacagatagccagtacttcacagcaaatcgggtctctgctcgccgaagatatgaacag

SEQ ID NO: 56169 - DNA, 75 bp, synthetic construct
  source 1..75: mol_type = other DNA
ttctgcttttcccattagatgttgttctggctgatgttcagattaaaattagagggaatatttatatccctccat

SEQ ID NO: 56170 - DNA, 75 bp, synthetic construct
  source 1..75: mol_type = other DNA
cctgcctgttcatgcttaatgctcagggaaaggtcagtggcgattctgactttatcttttataataatttgtctt

SEQ ID NO: 56171 - DNA, 75 bp, synthetic construct
  source 1..75: mol_type = other DNA
gcaggtaaacaaccgctggacaatacgctgactcatttgagtggaaaggatgtagcaggtcttctcgcatacctt

SEQ ID NO: 56172 - DNA, 75 bp, synthetic construct
  source 1..75: mol_type = other DNA
caataaacgtcattcatttcatctgtcaggccgcgtcttctccgggagacgtggctttttcatttattacaccag

SEQ ID NO: 56173 - DNA, 75 bp, synthetic construct
  source 1..75: mol_type = other DNA
cccgtgcaccggagcggtggccatcagggaccattaccgtcagggtttatgacgatcagccgtttgaccggcaga

SEQ ID NO: 56174 - DNA, 75 bp, synthetic construct
  source 1..75: mol_type = other DNA
atgcatacacgaattgattatctggtgaataaatacagttttacagaactgaatgaatccccccgtcttcgtcgg

SEQ ID NO: 56175 - DNA, 75 bp, synthetic construct
  source 1..75: mol_type = other DNA
ggcctgtcagaaactccaggaggctgttggcttaccgaatctggcaccgcgctatgccattgatgctcctgctga

SEQ ID NO: 56176 - DNA, 75 bp, synthetic construct
  source 1..75: mol_type = other DNA
aggctgagaaaggccggaatgccggtggtgaccacgaccgtggaggtgcacgataacctgacgggaacaacccgc

SEQ ID NO: 56177 - DNA, 75 bp, synthetic construct
  source 1..75: mol_type = other DNA
acaatcacagcggcttcctgttctaccatgccagtataactgaacgagcagacggcaagcgctctacatggcaca

SEQ ID NO: 56178 - DNA, 75 bp, synthetic construct
  source 1..75: mol_type = other DNA
gcccgtaaaaagctctcaagggcaaagctgaagaaaccatctgcggttgatccggaccttatctggtcattacct

SEQ ID NO: 56179 - DNA, 75 bp, synthetic construct
  source 1..75: mol_type = other DNA
gacggagaaatacgtcgctacgacaggcgtatgaacataatctgtcgcgagtgccggaagagcgaagttatgcag

SEQ ID NO: 56180 - DNA, 75 bp, synthetic construct
  source 1..75: mol_type = other DNA
gttgatatatttaatgtcaatgaactttatgccgagattggttatcgctggttaatttatggtgttaagtattta

SEQ ID NO: 56181 - DNA, 75 bp, synthetic construct
  source 1..75: mol_type = other DNA
agcgcaactaacagcgacagcgaaacaatggcggctacccctaaagctgttaagtctataaaagatctggctgat

SEQ ID NO: 56182 - DNA, 75 bp, synthetic construct
  source 1..75: mol_type = other DNA
cgagtgccggaatagtgaagttatgcagcgtgtactggctttctatcaggggaattttcaggaggcggcgcagtg

SEQ ID NO: 56183 - DNA, 75 bp, synthetic construct
  source 1..75: mol_type = other DNA
ggtttgggagaagccagattctctggtcgtttgttaaacacgaatatttttaaaagctctggaaaatatatccca

SEQ ID NO: 56184 - DNA, 75 bp, synthetic construct
  source 1..75: mol_type = other DNA
tttgacaaatctgcatacccgaaacttgcagccgcttatccgtcaggcgtgatccctgatatgcgtggctggacg

SEQ ID NO: 56185 - DNA, 75 bp, synthetic construct
  source 1..75: mol_type = other DNA
ggcgtctgaacataatctgtcgcgagtgcctgaagagagaagttatgcagcgtgtacttgcgttctaccatggaa

SEQ ID NO: 56186 - DNA, 75 bp, synthetic construct
  source 1..75: mol_type = other DNA
agtaccagaaaccagcgtgatcatggtggaaggtcgcccggtcgtaatcgacaatgttccagcgtgccgcacagt

SEQ ID NO: 56187 - DNA, 75 bp, synthetic construct
  source 1..75: mol_type = other DNA
ggctggactaccacctgttttatgagtacgacgctgcggaccggatcatccgctggtccgataacgaccagacgt

SEQ ID NO: 56188 - DNA, 75 bp, synthetic construct
  source 1..75: mol_type = other DNA
gttcgatttgccggtggcgcgaacggacggtgaaggccaccgctggcagtaccgctacgataaagacacgctgca

SEQ ID NO: 56189 - DNA, 75 bp, synthetic construct
  source 1..75: mol_type = other DNA
ggctcaatgatgaagaacagcaggtggcgctgcgtttgctggagaaagatcgcgatcatcatcgggtactggtgg

SEQ ID NO: 56190 - DNA, 75 bp, synthetic construct
  source 1..75: mol_type = other DNA
cgacggatatcccaggacatcagcacccgtgatgagggcggtgacgggaaagtggtggttatcgggcggggatga

SEQ ID NO: 56191 - DNA, 75 bp, synthetic construct
  source 1..75: mol_type = other DNA
aaaaccatcctggttggcagcgtgacggggttttttctctggcatcactggccgcagatgatgcgcttaatggcc

SEQ ID NO: 56192 - DNA, 75 bp, synthetic construct
  source 1..75: mol_type = other DNA
atccactaaatcttccgggaatgggaagtggtgtgcttgaagatattatgagtattccagatagttcacttagaa

SEQ ID NO: 56193 - DNA, 75 bp, synthetic construct
  source 1..75: mol_type = other DNA
cccgccgtcacatgccgggaccatcaccgtgtatgaagattctcaacccggtacgctgaatgattttcttggtgc

SEQ ID NO: 56194 - DNA, 75 bp, synthetic construct
  source 1..75: mol_type = other DNA
tggctgagcgaggcggaccggcggctgcagataaagagtgccctgccctggtggctggtctgccggggtgaaatt

SEQ ID NO: 56195 - DNA, 75 bp, synthetic construct
  source 1..75: mol_type = other DNA
aatatgctgaaaggcgggatttccggtcgcagtgccagaggaaaacgtatccatacccgtaccattcacagcatc

SEQ ID NO: 56196 - DNA, 75 bp, synthetic construct
  source 1..75: mol_type = other DNA
ggctgcgtctgcggtcagtctctgggggaagtgcgtgttccacaccggggaaatgtggtggagaaagttatcgaa

SEQ ID NO: 56197 - DNA, 75 bp, synthetic construct
  source 1..75: mol_type = other DNA
tgccatgcagtcgctggtcctgccgccaccggcacgccaggcgctggcacaggcggcgctgacttaccgttatgg

SEQ ID NO: 56198 - DNA, 75 bp, synthetic construct
  source 1..75: mol_type = other DNA
tgatgatttttacaacgttgtttgtagggggaacttctaccgcagttgctaaaaactgcaaaaaaggaatacctt

SEQ ID NO: 56199 - DNA, 75 bp, synthetic construct
  source 1..75: mol_type = other DNA
cgccaaaactgaatgctaacggcaagtttatgatggcagatgataaaagcaaggtttatgcttatgattcttggc

SEQ ID NO: 56200 - DNA, 75 bp, synthetic construct
  source 1..75: mol_type = other DNA
gatagcccagggcagcagcaacgtctttatcaacaatcagcctgccgcacgcaaaggggacaaactggagtgcag

SEQ ID NO: 56201 - DNA, 75 bp, synthetic construct
  source 1..75: mol_type = other DNA
gtgcgcaaagaatttgtcgatgataaccgggtgaaggtgaataatgacggtaatttcgtcaatgatttgtcgggc

SEQ ID NO: 56202 - DNA, 75 bp, synthetic construct
  source 1..75: mol_type = other DNA
atttgtcgatgataaccgggtgaaagtgaataatgacggtaattttgtcaatgatttgtcgggcagacgtggaat

SEQ ID NO: 56203 - DNA, 75 bp, synthetic construct
  source 1..75: mol_type = other DNA
ttaaagttggcgttataaatggcgcagaacaagatgtcgcggaagtcgctaaaaaggtggcaaaagagaaatatg

SEQ ID NO: 56204 - DNA, 75 bp, synthetic construct
  source 1..75: mol_type = other DNA
cgtatccatacccgtgccattcacagcattgacactgacattaagctcaaccgcgcattgtgggtgatggcggaa

SEQ ID NO: 56205 - DNA, 75 bp, synthetic construct
  source 1..75: mol_type = other DNA
ctttactgataatgacggttatgactggcagcgggcaggctgccaccactgccacagcgacgctgacaattaatg

SEQ ID NO: 56206 - DNA, 75 bp, synthetic construct
  source 1..75: mol_type = other DNA
acctgctgggtggcagtgaatggctccagacggaaaaagccagagagcatggcgctgatgttctctcctgtagtg

SEQ ID NO: 56207 - DNA, 75 bp, synthetic construct
  source 1..75: mol_type = other DNA
cgagtgcctggtgtatctgcatcgctataacgacgccacgctgtcgagaatgcgtaccgaatatgtggtgccgct

SEQ ID NO: 56208 - DNA, 75 bp, synthetic construct
  source 1..75: mol_type = other DNA
tggactgcagattgtgctgggggcggcagccatcgtgggctctttcttcactgccggggcatcgatggcgttatg

SEQ ID NO: 56209 - DNA, 75 bp, synthetic construct
  source 1..75: mol_type = other DNA
tcctattctggctacaggtggacaaattggttggggtaatagctacctatgggataagccttctgttcttattgg

SEQ ID NO: 56210 - DNA, 75 bp, synthetic construct
  source 1..75: mol_type = other DNA
catgaaaggtgactatgaagatcgcgttgacgattacatcatcaaaaatgccgagctctccaaagaacgccgcga

SEQ ID NO: 56211 - DNA, 75 bp, synthetic construct
  source 1..75: mol_type = other DNA
actcatatggtataaagatggaaatgcattatacatatatgactctggagaattaataagcaaagttattttgct

SEQ ID NO: 56212 - DNA, 75 bp, synthetic construct
  source 1..75: mol_type = other DNA
gcggtgcagtcaggcagtctgcaggtgaagacaaccggtgccgtggacaaccagcagggaagtctcaccgccagc

SEQ ID NO: 56213 - DNA, 75 bp, synthetic construct
  source 1..75: mol_type = other DNA
aaaatttgcctgcattaccggtcgatgcaacgagtgatgaggttcgcaagaacctgatggacatgttcagggatc

SEQ ID NO: 56214 - DNA, 75 bp, synthetic construct
  source 1..75: mol_type = other DNA
ttatgaaaaaaaatcacaagtcaaactagcgttgacaaaattgccggcaaaaagcaagcataaaggaagtatcct

SEQ ID NO: 56215 - DNA, 75 bp, synthetic construct
  source 1..75: mol_type = other DNA
gaaacgatgaggctcatcactccgcagccgcgttcgggttattttgtcgcacaacgtaaagcccagccgcctgta

SEQ ID NO: 56216 - DNA, 75 bp, synthetic construct
  source 1..75: mol_type = other DNA
gtgaacacggcagcggaagccatccgtgccctgtcgatgcagatgcctggattccgccgtcagatgaacgaaggc

SEQ ID NO: 56217 - DNA, 75 bp, synthetic construct
  source 1..75: mol_type = other DNA
aaacaggagcttcttgagcgtcttttgtccggaaaaagaatgaccgggcgggatgaaatggatatcaagcgcatt

SEQ ID NO: 56218 - DNA, 75 bp, synthetic construct
  source 1..75: mol_type = other DNA
aactcgaattgatgcaagcaagaattaaaaatgtgcctcatgggtggcaattcacttatgtaggcaaggtgtttt

SEQ ID NO: 56219 - DNA, 75 bp, synthetic construct
  source 1..75: mol_type = other DNA
acagtgctggaaagcctgcagcgggaaggttttcagccattctttgcctgccagacccgcgtacgtgacccgggc

SEQ ID NO: 56220 - DNA, 75 bp, synthetic construct
  source 1..75: mol_type = other DNA
aaggctttcatccattcttcgcctgccagacccgcgtacgtgacccggaccgccgggaatacaccaaacacatgc

SEQ ID NO: 56221 - DNA, 75 bp, synthetic construct
  source 1..75: mol_type = other DNA
caaagaaacaactttgcttatggcaggcacaaagagagcgcatgaatgagcgcgaatttctttcctccccatccg

SEQ ID NO: 56222 - DNA, 75 bp, synthetic construct
  source 1..75: mol_type = other DNA
gattattcaggaacaagctgcggcacgcattggcatttctattcggcaggttaaacgtctggtgcaacggtatag

SEQ ID NO: 56223 - DNA, 75 bp, synthetic construct
  source 1..75: mol_type = other DNA
tggtgacgaacatcggcccgtcaccaccgccgacattctgacgccacgacgccgggaggattacggtaaggacct

SEQ ID NO: 56224 - DNA, 75 bp, synthetic construct
  source 1..75: mol_type = other DNA
aagcacagggcaaccagaaagagaataacaatgccgtgggtatcagcctctcttacggcagccagtcttcgaaat

SEQ ID NO: 56225 - DNA, 75 bp, synthetic construct
  source 1..75: mol_type = other DNA
aaacgtggtggacagggtcatagaaggtgcttacgaagtggtcggcgtgtttgaccggatagaggagaagcgtga

SEQ ID NO: 56226 - DNA, 75 bp, synthetic construct
  source 1..75: mol_type = other DNA
atgctgcgtctgcggcgggccggagagataaacggagaacatgtccctgaaatcattctgctcaactcccatgac

SEQ ID NO: 56227 - DNA, 75 bp, synthetic construct
  source 1..75: mol_type = other DNA
gcgactggccggagccggaaagggcggactgcagattgtgctgggggcggcagccatcgtgggctctttcttcac

SEQ ID NO: 56228 - DNA, 75 bp, synthetic construct
  source 1..75: mol_type = other DNA
tgccggggcatcaatggcgttatggggttcagccctggcagccggtggtttttctgccaccacgatgctgttttc

SEQ ID NO: 56229 - DNA, 75 bp, synthetic construct
  source 1..75: mol_type = other DNA
actataaatttggtagcccagaggtatggcgtaggattgggcaaaaccatcacataactaaggttattgagcaac

SEQ ID NO: 56230 - DNA, 75 bp, synthetic construct
  source 1..75: mol_type = other DNA
ttgtcgctaaagcccgttttcttgctgaagcaggctggcgcacgctgttaggcagcaaagagcgcgatgaagaaa

SEQ ID NO: 56231 - DNA, 75 bp, synthetic construct
  source 1..75: mol_type = other DNA
gacaatcaagggcaaacccgccagtgggcgtgccgtattgtcacaggaacaggacgggattaaatcgcatactca

SEQ ID NO: 56232 - DNA, 75 bp, synthetic construct
  source 1..75: mol_type = other DNA
ggctggccgcagccggcgcggccggggatgccctgagtgaggggcagtacacctcgcagaacaatgtcaacggta

SEQ ID NO: 56233 - DNA, 75 bp, synthetic construct
  source 1..75: mol_type = other DNA
tgtttccagttcgcaaatcatttaccgatatcgtgagctatgcaactgatgagttcggttgtgtgcaatctttta

SEQ ID NO: 56234 - DNA, 75 bp, synthetic construct
  source 1..75: mol_type = other DNA
tgaaagagtatcaggtggttatcgatccccagcgcctggcgcagtatggcatcagtctcgccgaagtaaaaagcg

SEQ ID NO: 56235 - DNA, 75 bp, synthetic construct
  source 1..75: mol_type = other DNA
gcaacggctcggatgtggtgaatggctttacggtagggacatgggaaggcaccgccgacaccgatcgcattgata

SEQ ID NO: 56236 - DNA, 75 bp, synthetic construct
  source 1..75: mol_type = other DNA
ctggacaacctggcagcgggttcaggagaatatgataaaaggtggattatcggggcgaagtgcctccgggaaaaa

SEQ ID NO: 56237 - DNA, 75 bp, synthetic construct
  source 1..75: mol_type = other DNA
acactatgcgtacattcccactatcaccgtcctggaaaatctgcagcaggaaggctttcagccattcttcgcctg

SEQ ID NO: 56238 - DNA, 75 bp, synthetic construct
  source 1..75: mol_type = other DNA
tttatcgcgcctgttcagccgtcttgcccgtacaaaacaacttcgcaaggccaaaaaggcggatgtgctggccat

SEQ ID NO: 56239 - DNA, 75 bp, synthetic construct
  source 1..75: mol_type = other DNA
gtcgacccgtatacggcttacggtgctggcttcgtccaggctcattgtgaattactgccgtttgatgggggaact

SEQ ID NO: 56240 - DNA, 75 bp, synthetic construct
  source 1..75: mol_type = other DNA
aagaccggcatacctcccgcagtgaacgctatacgtacatccccaccatcaccgtactggaaagcctgcagcggg

SEQ ID NO: 56241 - DNA, 75 bp, synthetic construct
  source 1..75: mol_type = other DNA
atgaaaccggtgatattgtttttacctgcatcggtgctcgcctgtttgggcaaatctctgcagcctcgaaatgct

SEQ ID NO: 56242 - DNA, 75 bp, synthetic construct
  source 1..75: mol_type = other DNA
cacgcaatgaatggcacacaggagcgtgaattatcgctggctgaattatcctggtgggcggcctgcaatcaggtg

SEQ ID NO: 56243 - DNA, 75 bp, synthetic construct
  source 1..75: mol_type = other DNA
cagcccgtcaccaccgccgacattctgacaccacgacgccgggaggattacggtaaggacctgtggagtgcttat

SEQ ID NO: 56244 - DNA, 75 bp, synthetic construct
  source 1..75: mol_type = other DNA
tccgtttgtcccacgtggggcagcaggtgactctgtgtggttgggtcaaccgtcgtcgtgatcttggtagcctga

SEQ ID NO: 56245 - DNA, 75 bp, synthetic construct
  source 1..75: mol_type = other DNA
atgcgtggctggacgattaagggcaaacctgccagtggtcgggccgtattgtctcaggaacaggacggcattaaa

SEQ ID NO: 56246 - DNA, 75 bp, synthetic construct
  source 1..75: mol_type = other DNA
acgcgagcttaccattcagccaggcattatttacgacgatctgaaacccggcgaagaaatcggaatggtgaagtc

SEQ ID NO: 56247 - DNA, 75 bp, synthetic construct
  source 1..75: mol_type = other DNA
atgcgattagcaaatcgttttggtcatgtaaaccagatacgccgtgaccgcccgctgacacatgaagaactgatg

SEQ ID NO: 56248 - DNA, 75 bp, synthetic construct
  source 1..75: mol_type = other DNA
ctggaaagcgaaaaacgggtggtgaatatcgacgatgaaagccagacgcgcgggcatagtagcggtacatggctg

SEQ ID NO: 56249 - DNA, 75 bp, synthetic construct
  source 1..75: mol_type = other DNA
gatgctttacgtctcctctgctcgttacggaatatcaaatgtttaagccacactcttcagggttatatcgaaaag

SEQ ID NO: 56250 - DNA, 75 bp, synthetic construct
  source 1..75: mol_type = other DNA
tccatctggccatatattgaaacgggtatccttgatgaagtgttgcgccatcgctcgaccattgtctttactaat

SEQ ID NO: 56251 - DNA, 75 bp, synthetic construct
  source 1..75: mol_type = other DNA
aaaaccgacatacctctcgcagtgaacactatgcgtacattcccactatcaccgtcctggaaaatctgcagcagg

SEQ ID NO: 56252 - DNA, 75 bp, synthetic construct
  source 1..75: mol_type = other DNA
agagtgcaagatttaatctatggggaaattcctcaaggcctgttgttgcagagcttggtgatgattctggctggc

SEQ ID NO: 56253 - DNA, 75 bp, synthetic construct
  source 1..75: mol_type = other DNA
ggctgtgctataaccggttccggtattacgagccggaaaccgggatgtacctggtgagtgatccgctggggttgc

SEQ ID NO: 56254 - DNA, 75 bp, synthetic construct
  source 1..75: mol_type = other DNA
aatacggcattatcagccgtactatgatgaatattcgttcattgcgtgtttttgcccgtgagattgattttgagc

SEQ ID NO: 56255 - DNA, 75 bp, synthetic construct
  source 1..75: mol_type = other DNA
aaaccggaagtaattcggcagataacatcggcggcgtgtattaccgtccgcttcagaaactgattaatggcacct

SEQ ID NO: 56256 - DNA, 75 bp, synthetic construct
  source 1..75: mol_type = other DNA
tgttacgccccaaacgtcgtcgctgggttaatgaaaagtacacgcgctgggttaagacgcagccgtgtgcatgtt

SEQ ID NO: 56257 - DNA, 75 bp, synthetic construct
  source 1..75: mol_type = other DNA
gctggaactggtatttgataccgatccggcaagtgataaaggaggtggtaatgctgaaacagaacgcgtggttcc

SEQ ID NO: 56258 - DNA, 75 bp, synthetic construct
  source 1..75: mol_type = other DNA
cgcggacacgggaaacccctcgccgcggagaagggaaaaccaatttcgatcttacagagaatacaacagagatta

SEQ ID NO: 56259 - DNA, 75 bp, synthetic construct
  source 1..75: mol_type = other DNA
tgctgcgtctgcggcgggccggagagataaacggagaacatgtccctgaaatcattctgctcaactcccatgacg

SEQ ID NO: 56260 - DNA, 75 bp, synthetic construct
  source 1..75: mol_type = other DNA
cgcggcattgttaattacgacccgaccgagctggtgataaccgcgcgtgccggaacgccgctggtggcgattgaa

SEQ ID NO: 56261 - DNA, 75 bp, synthetic construct
  source 1..75: mol_type = other DNA
atgcttgcagaacggactggccttccctcccctaaagaagctctacaacagatacttgataaaagtttggcagat

SEQ ID NO: 56262 - DNA, 75 bp, synthetic construct
  source 1..75: mol_type = other DNA
tgagcaggaaaaagtcgcgcaatttttgtcacgtgaaggaattcgcaatttcctcgcccgtctcgatattgacga

SEQ ID NO: 56263 - DNA, 75 bp, synthetic construct
  source 1..75: mol_type = other DNA
ttgattccggtgcctatatcgacctgattggcaagtatgttcaccatgataatgagtacacagcaacctttgccg

SEQ ID NO: 56264 - DNA, 75 bp, synthetic construct
  source 1..75: mol_type = other DNA
aatatcaatacgacaaatgatataagcataaaaaatgctcacttagtgatgcaagggcatgctacaaatcatgct

SEQ ID NO: 56265 - DNA, 75 bp, synthetic construct
  source 1..75: mol_type = other DNA
ttatgcgatcctcgaatcttgcggtcgcctgcgttcgactcagcctaacctcagcgtgcgttaccatgcgggtat

SEQ ID NO: 56266 - DNA, 75 bp, synthetic construct
  source 1..75: mol_type = other DNA
ccgccatgtttgattccggtgcctatatcgacctgattggcaagtatgttcaccatgataatgagtacactgcaa

SEQ ID NO: 56267 - DNA, 75 bp, synthetic construct
  source 1..75: mol_type = other DNA
atatttctgttattcccgattacagacaagcctggaaagtggaacataatttgtcggatattctactgttgacta

SEQ ID NO: 56268 - DNA, 75 bp, synthetic construct
  source 1..75: mol_type = other DNA
ccgttccggttactccggtcggtgcgcgaattaagtttatccgatctgaaattatggcgttctactacagcaaag

SEQ ID NO: 56269 - DNA, 75 bp, synthetic construct
  source 1..75: mol_type = other DNA
taaggaactggtcgaaatcgacaccatcaacatgattgagaaggtgaacggcgtcgaccggctggagcaacaccg

SEQ ID NO: 56270 - DNA, 75 bp, synthetic construct
  source 1..75: mol_type = other DNA
taaccgcaacgtgcagactgtgctggcagaggaaatggcagacgcggcacagagcgcaatgcttgccactaccgg

SEQ ID NO: 56271 - DNA, 75 bp, synthetic construct
  source 1..75: mol_type = other DNA
gtcagcgatgccatgaaggacatacaggaagaaattgaccttcagtcccttgttaacgatgcgatggcggagttt

SEQ ID NO: 56272 - DNA, 75 bp, synthetic construct
  source 1..75: mol_type = other DNA
ctgacccgcctcggcgtcgacctggtggaatacaccgtggaatgcggccccggcatcgcccgcccggaaaagtac

SEQ ID NO: 56273 - DNA, 75 bp, synthetic construct
  source 1..75: mol_type = other DNA
aatgagtttaatctttctaatattttgcttaaacgctatagccatttgttgtcacaacacctcaaaaaacctgaa

SEQ ID NO: 56274 - DNA, 75 bp, synthetic construct
  source 1..75: mol_type = other DNA
gggacaggttcagcgcttcgatactgaccagttacaggccattcttgagcgcagggaagcggaaagacaggttca

SEQ ID NO: 56275 - DNA, 75 bp, synthetic construct
  source 1..75: mol_type = other DNA
attgcccgtgccaaagcacgcaagctggaacagcaacaggctaatgcagagccagaagaacagattgatccgcgc

SEQ ID NO: 56276 - DNA, 75 bp, synthetic construct
  source 1..75: mol_type = other DNA
atatccaggatatcaggctgggagcagagaacaggcaggtaatgtacggtggggcatattactctgcgtacggta

SEQ ID NO: 56277 - DNA, 75 bp, synthetic construct
  source 1..75: mol_type = other DNA
acgactatgccgggaccatgaccggcggacgtgtcctgtccattgatgccgccagccgcaccctgacactggacc

SEQ ID NO: 56278 - DNA, 75 bp, synthetic construct
  source 1..75: mol_type = other DNA
gggtgtcattctgaataatgcccataacaatgtgcagactcagctgggtggcatggtggccgggaacccgtggct

SEQ ID NO: 56279 - DNA, 75 bp, synthetic construct
  source 1..75: mol_type = other DNA
taggaatactggtcctgatgatcgtgctgatcatgtcggacaaaatgccttttggcgcaccgccactgcttgcgt

SEQ ID NO: 56280 - DNA, 75 bp, synthetic construct
  source 1..75: mol_type = other DNA
gcaacaatgcactatggtcaaaaatgctggtggaagaggatcccgggttttttgagaaactggcacaagcgcaaa

SEQ ID NO: 56281 - DNA, 75 bp, synthetic construct
  source 1..75: mol_type = other DNA
aaattgatggaacatatttctattatccccgattacagacaagcctggaaagtggaacataaattatcggatatt

SEQ ID NO: 56282 - DNA, 75 bp, synthetic construct
  source 1..75: mol_type = other DNA
atgaaacgacatctgaacaccagctacagactggtatggaatcacattacgggtaccctggtggtggcttccgaa

SEQ ID NO: 56283 - DNA, 75 bp, synthetic construct
  source 1..75: mol_type = other DNA
cgggagctactgtcagcagtaaaaataccttcactgtcgcaaaaggtaataatgcatcagcgacgctggattaca

SEQ ID NO: 56284 - DNA, 75 bp, synthetic construct
  source 1..75: mol_type = other DNA
ccctggagcgctgcaccatacagcgtggcatgagttactttttcccgccggaggttatgggggcacacatcggtc

SEQ ID NO: 56285 - DNA, 75 bp, synthetic construct
  source 1..75: mol_type = other DNA
gcgaaagcagatggagaagtctgatcccatccgattatggtgagcaggttcaccgtgtagccgcgcgatttgcca

SEQ ID NO: 56286 - DNA, 75 bp, synthetic construct
  source 1..75: mol_type = other DNA
atcctttgcgcttgcccttacagggtgagcgcctgattgaagcctctgccggcacaggcaaaacctttacgattg

SEQ ID NO: 56287 - DNA, 75 bp, synthetic construct
  source 1..75: mol_type = other DNA
tgacggcatggactttgaacaggacaacgaatcctgcacatgccggatttaccgcaaagaccgcaatcatccgat

SEQ ID NO: 56288 - DNA, 75 bp, synthetic construct
  source 1..75: mol_type = other DNA
taacagtaatgaactggataaggccttctcttctgatactggtttattctggctgggaaacctggactatggttt

SEQ ID NO: 56289 - DNA, 75 bp, synthetic construct
  source 1..75: mol_type = other DNA
atactacaaaatggtgatgattatgaaatggttatcagagggcttaatgttgatcaacttatcaaagtggctggt

SEQ ID NO: 56290 - DNA, 75 bp, synthetic construct
  source 1..75: mol_type = other DNA
gcgaaagaggcagataaatttcttagcttgttaatgatgcctttgatgtttatctcttgtgttatgtttcctctt

SEQ ID NO: 56291 - DNA, 75 bp, synthetic construct
  source 1..75: mol_type = other DNA
gtgatgcggttgttgatttattacccgaaagccaggggagactactacagtgtcctggcggggcgcctgctaatg

SEQ ID NO: 56292 - DNA, 75 bp, synthetic construct
  source 1..75: mol_type = other DNA
cgcgccctgcgtctggcgaacgtggtgaaactgtccgaagaagagctgatactcatcagcgggagtaatgatatc

SEQ ID NO: 56293 - DNA, 75 bp, synthetic construct
  source 1..75: mol_type = other DNA
ctgagttccagcagctgtacaaagccgcgctcgatgttctgtggcgatggatactctcccgatcatttcgcagtt

SEQ ID NO: 56294 - DNA, 75 bp, synthetic construct
  source 1..75: mol_type = other DNA
tattcctgttcacgataccattgccagagttgtatcctgtatcagtcctgcaaaatttcatgagtgctttattaa

SEQ ID NO: 56295 - DNA, 75 bp, synthetic construct
  source 1..75: mol_type = other DNA
gggcgcgactgcaccgcgacggtgagcgcggactggctgaggggctggcgctactgaccggactggtggaacgct

SEQ ID NO: 56296 - DNA, 75 bp, synthetic construct
  source 1..75: mol_type = other DNA
agcgcacgggcagcatcagcgcctgcaagtcattcgacgcctaccgcgcctgggtaaccatcgaatccggccact

SEQ ID NO: 56297 - DNA, 75 bp, synthetic construct
  source 1..75: mol_type = other DNA
ccagtgagattcatgataagttaacagaaaaagatacctcatctgatgataaaaagtcggctgatgaacagacta

SEQ ID NO: 56298 - DNA, 75 bp, synthetic construct
  source 1..75: mol_type = other DNA
gtatcccacagcaagtatcagcgatttgctggttgtggtgatgaagaaagccactgcaggcatcacgattagctg

SEQ ID NO: 56299 - DNA, 75 bp, synthetic construct
  source 1..75: mol_type = other DNA
ccggtaacgcacgtttcacgcgacggactccaggcattacacattgctcgggctgaagaactaccggctgttact

SEQ ID NO: 56300 - DNA, 75 bp, synthetic construct
  source 1..75: mol_type = other DNA
ttttcgcatgatgcgctattccattgcggcgatgcaaaaccatcttgatgcaggctataaagagcttccattagt

SEQ ID NO: 56301 - DNA, 75 bp, synthetic construct
  source 1..75: mol_type = other DNA
tgggcgacgcaacataccaggaaacattcgatgaagagaatcaggttgaagttcaggaaaatgatccggaggaaa

SEQ ID NO: 56302 - DNA, 75 bp, synthetic construct
  source 1..75: mol_type = other DNA
cgcccggagtttaccgatccggagattctgcgtaccaacctggcctcggttattttgcagatgaccgcgctgggg

SEQ ID NO: 56303 - DNA, 75 bp, synthetic construct
  source 1..75: mol_type = other DNA
gcaaagcaggaggaaaatcgtcgagtcgatttatatttcatctgttacttttttttcggataaaatcagaagcgc

SEQ ID NO: 56304 - DNA, 75 bp, synthetic construct
  source 1..75: mol_type = other DNA
agaaaatggacgctgggtattattgcagatgcgtttaatgcatcagaaataaccatcagaaaaagactagaatct

SEQ ID NO: 56305 - DNA, 75 bp, synthetic construct
  source 1..75: mol_type = other DNA
gaagttcatttgcccgtacgttattgctcatcgtcaccttgctgttcgccagcctggtgacgacttatctggtgg

SEQ ID NO: 56306 - DNA, 75 bp, synthetic construct
  source 1..75: mol_type = other DNA
agtccatgcaggcagatggctggaaatccgctgatggatacgatgataaccatatgcataacgcactctatcagg

SEQ ID NO: 56307 - DNA, 75 bp, synthetic construct
  source 1..75: mol_type = other DNA
ttatccctgcaggaactaatgctatcgctcgtcgtcgctcatggcagcaggctctatgtattgagatctcgaaac

SEQ ID NO: 56308 - DNA, 75 bp, synthetic construct
  source 1..75: mol_type = other DNA
gagagaagcacaagaagtatccaaacgtcacactggacaacctggacacatatattcagtccattcgcgggtctg

SEQ ID NO: 56309 - DNA, 75 bp, synthetic construct
  source 1..75: mol_type = other DNA
aggaagtcagatattaacccgccaggcagaaagtgagccctataaacaggtagaagtgtatcagcatgaagtcgt

SEQ ID NO: 56310 - DNA, 75 bp, synthetic construct
  source 1..75: mol_type = other DNA
tcggttcgattagcgatgaaaagttatatgataatttactggaagaattcagaccgtggatcgatgaaacaaaaa

SEQ ID NO: 56311 - DNA, 75 bp, synthetic construct
  source 1..75: mol_type = other DNA
tttacgtggctctaagcgaggagtttgatgtcgttatagatatgctaggatcagattttaaatcccaagagcagg

SEQ ID NO: 56312 - DNA, 75 bp, synthetic construct
  source 1..75: mol_type = other DNA
tgggcaatgcaatcagtctggttcagttcgttgccatacctgcaatgagcgcttttccctgtactctttaaggaa

SEQ ID NO: 56313 - DNA, 75 bp, synthetic construct
  source 1..75: mol_type = other DNA
gccggtactgccagcgcaaaaccaggccttaccgccggaagttcgcgcgttcctcaatgccgggagaacgcgtta

SEQ ID NO: 56314 - DNA, 75 bp, synthetic construct
  source 1..75: mol_type = other DNA
caggtgaacaggcaacaactgaaacaatggaaccggatacaactgaacattgccagaacgcgcagtcgctggatg

SEQ ID NO: 56315 - DNA, 75 bp, synthetic construct
  source 1..75: mol_type = other DNA
tcactcagttaaggtgaacggtcatcataaaggcacatccaccagcgggacgtgtgaccatctaatgatcgacct

SEQ ID NO: 56316 - DNA, 75 bp, synthetic construct
  source 1..75: mol_type = other DNA
aacaggcagcgcctgaatcagtggaagaaattccagttaaacataatgaggacacgcaatcactggaaaatgtct

SEQ ID NO: 56317 - DNA, 75 bp, synthetic construct
  source 1..75: mol_type = other DNA
tcctttacggttcgcttccggtggaattccggcgtattccggaggaggagaaacatactgcatcggcaatgaaag

SEQ ID NO: 56318 - DNA, 75 bp, synthetic construct
  source 1..75: mol_type = other DNA
gatgaaatcactaccattgatatcgccggttaccgggatcagcgtttagctcaaattaacccacgaacagggcgt

SEQ ID NO: 56319 - DNA, 75 bp, synthetic construct
  source 1..75: mol_type = other DNA
tcctgccagcggtcgcccgttttctgttatcagcactctgcctgcatattccccggagattatttctcacacact

SEQ ID NO: 56320 - DNA, 75 bp, synthetic construct
  source 1..75: mol_type = other DNA
cggtatcggcgaggtggtgaccttcagcacaggcatggacgtcccccctgttggtgaggtgatcggcgtggctgc

SEQ ID NO: 56321 - DNA, 75 bp, synthetic construct
  source 1..75: mol_type = other DNA
ttttgaaaaatgccattgctgccgcagatatcatgtttacaccggtgccgccagcacaagttgatttccattcca

SEQ ID NO: 56322 - DNA, 75 bp, synthetic construct
  source 1..75: mol_type = other DNA
cacagccaatgacgtttgtggcggataaagacagagcggttgtcgttctacaaacatcgaaagcggaaatcattg

SEQ ID NO: 56323 - DNA, 75 bp, synthetic construct
  source 1..75: mol_type = other DNA
catcacgcaccggacggtgaacggcgacccggcggagcagtggcagtatgatgagcacgggtggttaaccaccat

SEQ ID NO: 56324 - DNA, 75 bp, synthetic construct
  source 1..75: mol_type = other DNA
atgccgtaagtgaaatggaagaaaagggttatgttttcgataaacgccctgctggctcttcaatgaaatatgcga

SEQ ID NO: 56325 - DNA, 75 bp, synthetic construct
  source 1..75: mol_type = other DNA
ggtcagaacatccatgctgtcctgaaagaaaatgtgattgataagctgaagagcgattatgactttatcctcgtt

SEQ ID NO: 56326 - DNA, 75 bp, synthetic construct
  source 1..75: mol_type = other DNA
tccactgacggccatctggcatgccgtcagagggtggcatacaaccggaaatccggatcaggtaaggagcgcgtc

SEQ ID NO: 56327 - DNA, 75 bp, synthetic construct
  source 1..75: mol_type = other DNA
cgacactatgtttacatgccaccgtcaggatgtgttcaatactttggcaaataaagtgctcttgaaggattattg

SEQ ID NO: 56328 - DNA, 75 bp, synthetic construct
  source 1..75: mol_type = other DNA
gtggaattcgggcacaactcgcggaagacaacaaagtaggaaactgtgggcgggagtggcacgttggttttttct

SEQ ID NO: 56329 - DNA, 75 bp, synthetic construct
  source 1..75: mol_type = other DNA
tgctgccacgctgccggggtttcagcagcttcacacctccgaggagggactgaaactgatcgccgattatgaagg

SEQ ID NO: 56330 - DNA, 75 bp, synthetic construct
  source 1..75: mol_type = other DNA
acgttattcgagaatatgacagtgacgatgctgacttcggtatttacaatgctggggaaaaagttactttactgt

SEQ ID NO: 56331 - DNA, 75 bp, synthetic construct
  source 1..75: mol_type = other DNA
gctgaccgccaagaaagaacaggagtccgagatgagcagcacgggggcaatgctcggactcgaccccagcagccg

SEQ ID NO: 56332 - DNA, 75 bp, synthetic construct
  source 1..75: mol_type = other DNA
tgtttatcgtgttcagattgtttggtcgtgaatggtcgtttgacctcaaggacaggaccagaacagataaccaca

SEQ ID NO: 56333 - DNA, 75 bp, synthetic construct
  source 1..75: mol_type = other DNA
gacttgttagtgaaggaattatctaaggggcgtggatggcctgatggaaaagatttttgccatctatccattacg

SEQ ID NO: 56334 - DNA, 75 bp, synthetic construct
  source 1..75: mol_type = other DNA
gaacagcaacgcgggaaaatcgatgtggactgcggttgtgtgtctgcggaaacattcatgcactggttgcgggta

SEQ ID NO: 56335 - DNA, 75 bp, synthetic construct
  source 1..75: mol_type = other DNA
aaagttgttttcattagaggcgacttacgctcacttagtgacattaggaaaacttttgaatcatcccaaattgag

SEQ ID NO: 56336 - DNA, 75 bp, synthetic construct
  source 1..75: mol_type = other DNA
ttggttatattggttgtcatattgctgttgagctattacaacaagggcatgatgttgtaatatttgataatctta

SEQ ID NO: 56337 - DNA, 75 bp, synthetic construct
  source 1..75: mol_type = other DNA
atctcggtacaggtaaaggatactctgttctcgatataataaattcttttaaggagataaataacattgatattc

SEQ ID NO: 56338 - DNA, 75 bp, synthetic construct
  source 1..75: mol_type = other DNA
ctcagcgagctggaaaacctcaaaagcgatcttgaaaaagagctgcttgagctgaaacgtccggcaggtggtgcg

SEQ ID NO: 56339 - DNA, 75 bp, synthetic construct
  source 1..75: mol_type = other DNA
ggtcagtccacacaaattcctgtatctctggggataaaaacaccttctcgatttaaaagagtgttaatagtaggg

SEQ ID NO: 56340 - DNA, 75 bp, synthetic construct
  source 1..75: mol_type = other DNA
taatctgccgaactttaacctaaaaagtggtgctgatacccagagtcgaactggggacctcacccttaccaaggg

SEQ ID NO: 56341 - DNA, 75 bp, synthetic construct
  source 1..75: mol_type = other DNA
tggcgcacgcccggcggtgtgcgcctgcggaatcgtgcggcttcgtggtgagaacgccggaggaagacaggtatc

SEQ ID NO: 56342 - DNA, 75 bp, synthetic construct
  source 1..75: mol_type = other DNA
acaggtatgcgaaagaagtcgaggtagatagattggttaatgtgatggctgatgtttataaggagactggagtaa

SEQ ID NO: 56343 - DNA, 75 bp, synthetic construct
  source 1..75: mol_type = other DNA
gtgtcaccctgacaggggatgcagggaataatctgctggcatcgttctacatccagacagacgcaaaagacctga

SEQ ID NO: 56344 - DNA, 75 bp, synthetic construct
  source 1..75: mol_type = other DNA
ctctgaagacccggcaagaactgattgaaactgccatcgcccagtttgcgcagcatggcgtaagcaagacgacgc

SEQ ID NO: 56345 - DNA, 75 bp, synthetic construct
  source 1..75: mol_type = other DNA
aggtatttcaatccggttggtgcacattcttcaggtttgataggagaatctccgaatggtgttcctgccaattta

SEQ ID NO: 56346 - DNA, 75 bp, synthetic construct
  source 1..75: mol_type = other DNA
ctcagcgagctggaaaatctcaaaagcgaccttgaaaaagagctgcttgagctgaaacgtccggcaggtggtgcg

SEQ ID NO: 56347 - DNA, 75 bp, synthetic construct
  source 1..75: mol_type = other DNA
cgcgactggccggagccggaaagggcggactgcagattgtgctgggggcagcagccatcgtgggctctttcttca

SEQ ID NO: 56348 - DNA, 75 bp, synthetic construct
  source 1..75: mol_type = other DNA
ctggatatattggcagtcacactgttattgaattacagaaaaatggttttgacgtggtaatagtagataattttt

SEQ ID NO: 56349 - DNA, 75 bp, synthetic construct
  source 1..75: mol_type = other DNA
ctgtatctgctcgtcaatccgggcggttcacgcatctggtatctcaaatatcgtttcaacggaaaagaatccaga

SEQ ID NO: 56350 - DNA, 75 bp, synthetic construct
  source 1..75: mol_type = other DNA
tgctggtcagatccttcacttgctttagaagagttacactggaaagccgaaaaagatttaagtgatatgttaaaa

SEQ ID NO: 56351 - DNA, 75 bp, synthetic construct
  source 1..75: mol_type = other DNA
tgatgccgacaaaagtgcaccggttggatttgatattgaattaagcgattgtagtacggctgctttatccaatgc

SEQ ID NO: 56352 - DNA, 75 bp, synthetic construct
  source 1..75: mol_type = other DNA
cagttcagggaggggctggtacagcaacgaatgttggtgtgcaagtaactgattacacagggaagcctgttgttt

SEQ ID NO: 56353 - DNA, 75 bp, synthetic construct
  source 1..75: mol_type = other DNA
agtaaccggtagtgctgaatcagtcggggttcataccaccaccagtgtggtgcattcgatctttgtggtgatttt

SEQ ID NO: 56354 - DNA, 75 bp, synthetic construct
  source 1..75: mol_type = other DNA
atgggtttttgttattggctttcagctttctatctttttacctgcaataccattcatcttctggatgattgccat

SEQ ID NO: 56355 - DNA, 75 bp, synthetic construct
  source 1..75: mol_type = other DNA
actgatacgtttttctctcagtggtcaaccaaaaccaagaaagatctgcaaaaaaaatacaagaccttactgtac

SEQ ID NO: 56356 - DNA, 75 bp, synthetic construct
  source 1..75: mol_type = other DNA
ttattgaacctgttctgcgttatctggcaacaaaaccggaaggtgcagccgcgcgtgatgttcatgaggctgccg

SEQ ID NO: 56357 - DNA, 75 bp, synthetic construct
  source 1..75: mol_type = other DNA
ctgaatggttttataaacttcataatagaataagttctccaaagatagaagagaacgttggggattttcgcttaa

SEQ ID NO: 56358 - DNA, 75 bp, synthetic construct
  source 1..75: mol_type = other DNA
gtgagagcactactgacccctgaaatagccccgcgtatggggatcgtattgttcaggcctggttcagagctgatg

SEQ ID NO: 56359 - DNA, 75 bp, synthetic construct
  source 1..75: mol_type = other DNA
ccgtcaggtggatgcgcacctgaagcgtctgcgtgaactggaaaccagtaaggccgccacggcacagccggtgaa

SEQ ID NO: 56360 - DNA, 75 bp, synthetic construct
  source 1..75: mol_type = other DNA
tgcagaaatagtcagggataactacgataagctgaacgatatcagcaggccgacacaatatgcgccaccaccatg

SEQ ID NO: 56361 - DNA, 75 bp, synthetic construct
  source 1..75: mol_type = other DNA
gtgactgatcttcaccaaacgtattaccgccaggtaaagaacccgaatccggtgtttacaccccgtgaaggtgca

SEQ ID NO: 56362 - DNA, 75 bp, synthetic construct
  source 1..75: mol_type = other DNA
accgtggcatttgaagagatgtatggctcccagttggagctgatatttcgttttatcgatcgtgcgctggcaata

SEQ ID NO: 56363 - DNA, 75 bp, synthetic construct
  source 1..75: mol_type = other DNA
acgagtacgactggctgacctcagacaccgccgttgatgaggctcttctcatcaacgaatacaccttcactgaag

SEQ ID NO: 56364 - DNA, 75 bp, synthetic construct
  source 1..75: mol_type = other DNA
gaccgaacaggaacgtaaggcttaccacaaagaaattaccgatcaggccatcaagcgcacactcaaccttagcga

SEQ ID NO: 56365 - DNA, 75 bp, synthetic construct
  source 1..75: mol_type = other DNA
cttgtcacgtccggcattagcggggcgatgggttcagtggctctgacctatttctgggaacgcttgacggggatg

SEQ ID NO: 56366 - DNA, 75 bp, synthetic construct
  source 1..75: mol_type = other DNA
ggcaacttgctcaccaaaacctgtctgcatggatgattgacgtcatacgccatgcaatgaatggctcgcaggaac

SEQ ID NO: 56367 - DNA, 75 bp, synthetic construct
  source 1..75: mol_type = other DNA
tattaaaggtcttttgcctgatgacgttgttaacagcatcagtgaacagctttcaggagcttgtacgacagagat

SEQ ID NO: 56368 - DNA, 75 bp, synthetic construct
  source 1..75: mol_type = other DNA
atgagcagaattatcaccaccaccgtgtatacactgaatgagctatcctccaccgcacaggaaaaagcccgcgac

SEQ ID NO: 56369 - DNA, 75 bp, synthetic construct
  source 1..75: mol_type = other DNA
ttagagttcatagggccagggttaactcgattttcaaataaagtagcaaccatacattcaggaacaggaacaacg

SEQ ID NO: 56370 - DNA, 75 bp, synthetic construct
  source 1..75: mol_type = other DNA
ctcccgccgtatatcccaggacatcagcacccgtgatgaaggcgggggcggaacggtcgtggttgtcgggcgaca

SEQ ID NO: 56371 - DNA, 75 bp, synthetic construct
  source 1..75: mol_type = other DNA
attaccaggcgtggcgcagattgtcagacatgccgtaaacgcctggcttaatcagaatggttttgcatcgggggg

SEQ ID NO: 56372 - DNA, 75 bp, synthetic construct
  source 1..75: mol_type = other DNA
gcgcttgccaacatgctggtgcagttcggtttgccgtataccgatatgtcgaaaggcgcgccgtcgtttacctgg

SEQ ID NO: 56373 - DNA, 75 bp, synthetic construct
  source 1..75: mol_type = other DNA
aagagccattcatggatatgacgcgggaaataattgaaatcatgctttataacggcgacgtggtgaaggttagcg

SEQ ID NO: 56374 - DNA, 75 bp, synthetic construct
  source 1..75: mol_type = other DNA
ggccgctcaggttgcgtaccgccctgcagatgatggccggtccggcgtggcaacttgaagttgatgatgtgcagc

SEQ ID NO: 56375 - DNA, 75 bp, synthetic construct
  source 1..75: mol_type = other DNA
tatgacttttacccacagttcagtattccggttcgtacggaactggagttttatgctcgcggaaaagctgacaca

SEQ ID NO: 56376 - DNA, 75 bp, synthetic construct
  source 1..75: mol_type = other DNA
tgctcccctgcgagccgccgcattatggtgaagaagccacctggggcgggatggtcgcctgcgggctggcggggc

SEQ ID NO: 56377 - DNA, 75 bp, synthetic construct
  source 1..75: mol_type = other DNA
tgacagtatcatcagcgcagtgaaaacgcgtgactacaagaggctggcgaccatcgctgacaaattacaaagaga

SEQ ID NO: 56378 - DNA, 75 bp, synthetic construct
  source 1..75: mol_type = other DNA
gtgcgggtattacttcgacctgttctggtaccggaactcgggctggtggtccttaagcccggtcgcgaatcactg

SEQ ID NO: 56379 - DNA, 75 bp, synthetic construct
  source 1..75: mol_type = other DNA
ctgccagtggcctcatggtgactaccatcacagtgaaaccgtcatacatcgttacggtaccggcgcgatggtgtt

SEQ ID NO: 56380 - DNA, 75 bp, synthetic construct
  source 1..75: mol_type = other DNA
gttttgaaggctggcagcaacgctggcgacacgactccagtaccttaaactgcccgatgacgttcagtatctttc

SEQ ID NO: 56381 - DNA, 75 bp, synthetic construct
  source 1..75: mol_type = other DNA
cccgcaaggccattactgaagtaaagaaaatggagaaccgcgacgcagtggaggcgaccgtctggggtgcgtatt

SEQ ID NO: 56382 - DNA, 75 bp, synthetic construct
  source 1..75: mol_type = other DNA
aaatgaactgatacaggaggccagcgtaccgcatccggcatttatgccgacgacgatgaaggtgttgagacaatg

SEQ ID NO: 56383 - DNA, 75 bp, synthetic construct
  source 1..75: mol_type = other DNA
cgatggcagtgatacagcactggataaatacgtcgaacgactgacagccagacgtaatggcggacagggtgtttc

SEQ ID NO: 56384 - DNA, 75 bp, synthetic construct
  source 1..75: mol_type = other DNA
taaatcagatatttgtatcatatttggagggcatggaagatttttttaatataaatattcaacgatgtattagta

SEQ ID NO: 56385 - DNA, 75 bp, synthetic construct
  source 1..75: mol_type = other DNA
gcggtggcttccacggtcgtacatatatgaccatggcgctgaccggaaaagttgcgccgtacaaaatcggcttcg

SEQ ID NO: 56386 - DNA, 75 bp, synthetic construct
  source 1..75: mol_type = other DNA
tatttattataggttttagtgcattacctgtatgggcaatggactgctatgctgaacatgaagggggaaataccg

SEQ ID NO: 56387 - DNA, 75 bp, synthetic construct
  source 1..75: mol_type = other DNA
aggctgaaaaactgaaaaacctggtggattctgccagattacaaacttcttctcctgccgtaacatcaacggtcc

SEQ ID NO: 56388 - DNA, 75 bp, synthetic construct
  source 1..75: mol_type = other DNA
cgcgtcgcccgtggagcggttcggtccgcgattttgtcctcggcacgcgcatcattaccggcactggaaaacatc

SEQ ID NO: 56389 - DNA, 75 bp, synthetic construct
  source 1..75: mol_type = other DNA
cgggtattacttcgacctgttccggtaccggaacttgggctggtggtgctaaaaccgggccgtgaatccatgcag

SEQ ID NO: 56390 - DNA, 75 bp, synthetic construct
  source 1..75: mol_type = other DNA
acggctgagccttgaagaatggaaaaaaatcttcgatatcgcagacgctactcatcgttacatgggaaatgccat

SEQ ID NO: 56391 - DNA, 75 bp, synthetic construct
  source 1..75: mol_type = other DNA
cgaatattattccggagctaagacaaccgaatgccgcagcaggtaagatcacgctaggggggctggacagaatgg

SEQ ID NO: 56392 - DNA, 75 bp, synthetic construct
  source 1..75: mol_type = other DNA
ggagccgcaattgcaacacagttacttttcagccccatcacattaatcatcctggcactggctgcgctgggcgtg

SEQ ID NO: 56393 - DNA, 75 bp, synthetic construct
  source 1..75: mol_type = other DNA
tttgtttttcgacgtggtgacgggcatgccttcgcgaaaatcgcacctgcttcccgccgcggtgagctcgctgga

SEQ ID NO: 56394 - DNA, 75 bp, synthetic construct
  source 1..75: mol_type = other DNA
tggggaatatcgcgtaaaaagataccggaagtatccacgtcagcatctggaggatttaagaaccggtaagaagga

SEQ ID NO: 56395 - DNA, 75 bp, synthetic construct
  source 1..75: mol_type = other DNA
acgcgcctctccgatctagatgtatttgaaagcgcctgtaatgaaggggcaggtgtacatgatgtaagccgcgca

SEQ ID NO: 56396 - DNA, 75 bp, synthetic construct
  source 1..75: mol_type = other DNA
atgccttcgcgaaaatcgcacctgcttcccgccgcggtgagctcgctggagagcgtgaccgcctcatttggctca

SEQ ID NO: 56397 - DNA, 75 bp, synthetic construct
  source 1..75: mol_type = other DNA
tattcaattgtttctgaaaacttgtcttccgtctgggtgaaatggcccgtaaaaaacctgcaaccgaggaaagaa

SEQ ID NO: 56398 - DNA, 75 bp, synthetic construct
  source 1..75: mol_type = other DNA
cggttatcgctggactcaggcggtgctggtggtgctaatgaccttaccgcgcacactggtcgaactttcgccgtt

SEQ ID NO: 56399 - DNA, 75 bp, synthetic construct
  source 1..75: mol_type = other DNA
gcagcatgagaccagacatgcgtacaacgcgcagggactggcgaaccgctgtataccggacagcctgcccgccgt

SEQ ID NO: 56400 - DNA, 75 bp, synthetic construct
  source 1..75: mol_type = other DNA
gactgtagatggcagccaaagagtagatgaacgaggtacaacaaataacactcatattatcaaccatggccagca

SEQ ID NO: 56401 - DNA, 75 bp, synthetic construct
  source 1..75: mol_type = other DNA
atgaacataaataccatctaccgccacccggcagagctggaagccgaagcgatgctatctcgcaaagaatcatac

SEQ ID NO: 56402 - DNA, 75 bp, synthetic construct
  source 1..75: mol_type = other DNA
atgcaacagatttcctttctgcccggagagatgacgcccggcgagcgcagcctcattcaacgggccctgaaaacc

SEQ ID NO: 56403 - DNA, 75 bp, synthetic construct
  source 1..75: mol_type = other DNA
tcctgaccatcgtgttggttatctggcagccaaagggattaggcattggctggagcgccacgctgggtgccgtac

SEQ ID NO: 56404 - DNA, 75 bp, synthetic construct
  source 1..75: mol_type = other DNA
accaaactgcgttcactgagccagaaggtcaatctgaaagaagggcaatcacttgtcgttactggtttcgatcag

SEQ ID NO: 56405 - DNA, 75 bp, synthetic construct
  source 1..75: mol_type = other DNA
ggcagccggaaaaccatgacgtggagccgttacggtcagttgctgagcttcaccgactgttccggttatgtaacc

SEQ ID NO: 56406 - DNA, 75 bp, synthetic construct
  source 1..75: mol_type = other DNA
gagttacaaggacgagtggggcgataaatataaatcagaagttgatgttaaaagtcatgacatcatgcttggtgt

SEQ ID NO: 56407 - DNA, 75 bp, synthetic construct
  source 1..75: mol_type = other DNA
ggatgatggccgatgtgccgaaagcggatgtcattgtcaataacccgacccactattcggtagcgttgcagtatg

SEQ ID NO: 56408 - DNA, 75 bp, synthetic construct
  source 1..75: mol_type = other DNA
gggaggcgacactgcatattgaagtttttctcagggcaaaagaaccggactcggcactggatatgtggatggaag

SEQ ID NO: 56409 - DNA, 75 bp, synthetic construct
  source 1..75: mol_type = other DNA
gtgcgggtattacttcgacctgttctggttcctgaactcgggctggtggtcgttaagccgggccgtgagtccatg

SEQ ID NO: 56410 - DNA, 75 bp, synthetic construct
  source 1..75: mol_type = other DNA
tggggcaacctgctgaatgaagagaacccgcaccagctgcagcagctcatccgcctgccgggtcagcagtatgat

SEQ ID NO: 56411 - DNA, 75 bp, synthetic construct
  source 1..75: mol_type = other DNA
accacacttccggcctatatgccgaagcgtggtcaggcctctgacgtacgcgggccgcgcactgaacaacgtccc

SEQ ID NO: 56412 - DNA, 75 bp, synthetic construct
  source 1..75: mol_type = other DNA
ctgtataccggacagcctgcccgccgtggaatggctgacctacggcagcggctggctgtcaggcatgaaactcgg

SEQ ID NO: 56413 - DNA, 75 bp, synthetic construct
  source 1..75: mol_type = other DNA
agttgctgaagaaatcgcgcgccttgagaatctcattaccgctgaagagcaagtgttgtcgaatctggaagtctc

SEQ ID NO: 56414 - DNA, 75 bp, synthetic construct
  source 1..75: mol_type = other DNA
tacggcctcgactcgcacgggatgtggacggtgctggcaaaccagcaggtaatgcaatcgactgacccactcacc

SEQ ID NO: 56415 - DNA, 75 bp, synthetic construct
  source 1..75: mol_type = other DNA
gccgtatcgcagcgcatcgccaggacgaatgaagccgcgcaggtcaggctcagcgacgagctgaacgccgccgga

SEQ ID NO: 56416 - DNA, 75 bp, synthetic construct
  source 1..75: mol_type = other DNA
taactaatcctagtgctaatttttccgcatgggtcttagatgcctgtggacgcaaattaaaatatgaacagcgcc

SEQ ID NO: 56417 - DNA, 75 bp, synthetic construct
  source 1..75: mol_type = other DNA
aggtggtgggggtttttgaccggattgaggaaaagcgtgatgccatgcagtcgctgattctgccgccaccggcac

SEQ ID NO: 56418 - DNA, 75 bp, synthetic construct
  source 1..75: mol_type = other DNA
tagttgggtatcggcttctgttggttctcttctggacaaaggagccaaagtatatccagatatatcatgctctct

SEQ ID NO: 56419 - DNA, 75 bp, synthetic construct
  source 1..75: mol_type = other DNA
tggcaccgtcgctataaatccagaaaaacagcggaactgaaagcggcagagatgtgtgaaaccatctcaatgaaa

SEQ ID NO: 56420 - DNA, 75 bp, synthetic construct
  source 1..75: mol_type = other DNA
attctgctcaactctcatgacggtacctccagctaccagatgctgccgggttacttcagattcgtctgccagaat

SEQ ID NO: 56421 - DNA, 75 bp, synthetic construct
  source 1..75: mol_type = other DNA
gagcgacagctactacctcaacttacgcagcgggctgaaccttggcgcttggcggttacggaattacagtacctg

SEQ ID NO: 56422 - DNA, 75 bp, synthetic construct
  source 1..75: mol_type = other DNA
agcgatgggggaatcccttgtgccttgccttagccggacgcaactggcagagatgggcgtgcgcgttgaaagctt

SEQ ID NO: 56423 - DNA, 75 bp, synthetic construct
  source 1..75: mol_type = other DNA
caggatgatctgtacagtatttcacagacaccgcaggtgtggctcgatcatcagggaatggagcgtaacggggaa

SEQ ID NO: 56424 - DNA, 75 bp, synthetic construct
  source 1..75: mol_type = other DNA
tgcgtctgcggcgggccggagagataaacggagaacatgtccctgaaattattctgctcaactctcatgacggta

SEQ ID NO: 56425 - DNA, 75 bp, synthetic construct
  source 1..75: mol_type = other DNA
tcctgatcaacttgctgattttcggactaaagttgaacctacattagactctctggaaagagaacgtctgcaatg

SEQ ID NO: 56426 - DNA, 75 bp, synthetic construct
  source 1..75: mol_type = other DNA
agactgccaccagcatactgaagcagcgcacaaaaaatattgcgctgccacttcacgtccaccagcaacagcccc

SEQ ID NO: 56427 - DNA, 75 bp, synthetic construct
  source 1..75: mol_type = other DNA
gaaaccgcattacggcagggatggcaggaaggaagacaaaacgccgacctgacgcttgaagccaaccagaaaacc

SEQ ID NO: 56428 - DNA, 75 bp, synthetic construct
  source 1..75: mol_type = other DNA
taaaggccgtaacaactactggaaagtgcgtcaggctgtcgagacggcaaaagagacgctctacagtttcgatca

SEQ ID NO: 56429 - DNA, 75 bp, synthetic construct
  source 1..75: mol_type = other DNA
agccagcaaacaggtaccggaaatcatcctgctcaacagccatgatggcagctccagctaccagatgatcccggg

SEQ ID NO: 56430 - DNA, 75 bp, synthetic construct
  source 1..75: mol_type = other DNA
catgcggaattcaccctgcagaaatcacgctggcgtccggtcgtcagcacggaaggagcccccgatgaaattacc

SEQ ID NO: 56431 - DNA, 75 bp, synthetic construct
  source 1..75: mol_type = other DNA
aacgcttcgtcagcaatccccccggctggcgaacctggctgttcaccggtctgtcggacaaagtcacgccgcctg

SEQ ID NO: 56432 - DNA, 75 bp, synthetic construct
  source 1..75: mol_type = other DNA
accatcctcgaaagcctgcagcgcgagggttttcagccgttctttgcctgccagacaaaggttcgggaccagagc

SEQ ID NO: 56433 - DNA, 75 bp, synthetic construct
  source 1..75: mol_type = other DNA
acttgtacgccacaggatgattcccagtatccagggatggatacaaagacagcaagtgattacctgccacagaca

SEQ ID NO: 56434 - DNA, 75 bp, synthetic construct
  source 1..75: mol_type = other DNA
ttacgcctgtcagtgacatcgtgtcatcgctgcatgaaatgagtaattcggggagactggatgacattccggaag

SEQ ID NO: 56435 - DNA, 75 bp, synthetic construct
  source 1..75: mol_type = other DNA
ggccgcagggtggcaaaacgggtatggcgacgtgaacgggacctgacgggctggatgtcgctgtcacggaaaccg

SEQ ID NO: 56436 - DNA, 75 bp, synthetic construct
  source 1..75: mol_type = other DNA
cagctatcgatctctctgacggtctgatttccgatctcgggcatatcgtgaaagccagcgactgcggcgcacgta

SEQ ID NO: 56437 - DNA, 75 bp, synthetic construct
  source 1..75: mol_type = other DNA
atatgtggacggagcggttagggatactggcgggaacacatgaaaacgtaaccacgctaccagtagccagaagaa

SEQ ID NO: 56438 - DNA, 75 bp, synthetic construct
  source 1..75: mol_type = other DNA
atattaaagaagaacttccggcgatgattggcaccgataagaagttaaaggaagtcttagattttatctacaaag

SEQ ID NO: 56439 - DNA, 75 bp, synthetic construct
  source 1..75: mol_type = other DNA
gaaggactctgttttgttcgtgacggcgaacctgtcacgttagactggaaaggatatgaccattttgccacgcca

SEQ ID NO: 56440 - DNA, 75 bp, synthetic construct
  source 1..75: mol_type = other DNA
cggatgggatcagggggaatatgtggtttatccggcttcgttagcagggacggaaacccacagcgcgacattcag

SEQ ID NO: 56441 - DNA, 75 bp, synthetic construct
  source 1..75: mol_type = other DNA
ttcaggcttatatcacgggtatgcaacctatgttgaaatatgccaaaaatggcatgtttgaagcgattatcaatc

SEQ ID NO: 56442 - DNA, 75 bp, synthetic construct
  source 1..75: mol_type = other DNA
ccaccagctcaacaggcgtttgcgaaagcagcgctgaattaccgctttggtgaagaacaccagcccattaccgaa

SEQ ID NO: 56443 - DNA, 75 bp, synthetic construct
  source 1..75: mol_type = other DNA
gaacggaacattggttcgatagcgcaagtgttccaatcagtagtgaagaatggctccagcttgttaatgatgata

SEQ ID NO: 56444 - DNA, 75 bp, synthetic construct
  source 1..75: mol_type = other DNA
ctggaggaaaactcgcgcggcggttcccgctttttgcatcagcaggtaaaagtgggcgatcggttaacgatttca

SEQ ID NO: 56445 - DNA, 75 bp, synthetic construct
  source 1..75: mol_type = other DNA
atgaaaatactggtctacggcattaactactcgccggagttaaccggcatcggcaaatacaccggcgagatggtg

SEQ ID NO: 56446 - DNA, 75 bp, synthetic construct
  source 1..75: mol_type = other DNA
cggcgaggagaagcaacgattaagccgggcaatggtgttgagcaggtaacacactggatgccgctaccagaaccg

SEQ ID NO: 56447 - DNA, 75 bp, synthetic construct
  source 1..75: mol_type = other DNA
agcggcaaaacgggatgtagggacaggggaaaatcagataccggacatggcctcttttgccagtggtgatggatg

SEQ ID NO: 56448 - DNA, 75 bp, synthetic construct
  source 1..75: mol_type = other DNA
gcaatcgtatgacgctttacccgcactgctgaagatgggcgattgccatctggtggtgcaaaaacgcggcgcggc

SEQ ID NO: 56449 - DNA, 75 bp, synthetic construct
  source 1..75: mol_type = other DNA
cgtgaacatgcctgacatccgcaacgctgccgccctgtacatcgatactgcggataagttcgcacaggtgagcat

SEQ ID NO: 56450 - DNA, 75 bp, synthetic construct
  source 1..75: mol_type = other DNA
gggattttcggggaagataaacacacgtcccgaagccagaactatacgtacatccccaccatcaccgtactggaa

SEQ ID NO: 56451 - DNA, 75 bp, synthetic construct
  source 1..75: mol_type = other DNA
ttcgttaatatcctgcttcagttttggttctggtttacgccaattgtctacgtatccaaaacgctgccggaatgg

SEQ ID NO: 56452 - DNA, 75 bp, synthetic construct
  source 1..75: mol_type = other DNA
catttgtcattgtctgtacccgtaaagcggtgcgctgtagtacctcatatcacagcgcaggtattttttatggtt

SEQ ID NO: 56453 - DNA, 75 bp, synthetic construct
  source 1..75: mol_type = other DNA
cttctcacataccttggtttaggagaagcggcgaaaagggatgtgggcacaggagataatcagataccggatatg

SEQ ID NO: 56454 - DNA, 75 bp, synthetic construct
  source 1..75: mol_type = other DNA
aattgctggatggagttgatgttgaatggttgtcactgggagagcttggcgatttcatacgtggcaatggactac

SEQ ID NO: 56455 - DNA, 75 bp, synthetic construct
  source 1..75: mol_type = other DNA
atgaaattacaacccatgggactaaaaggtcgcgcccccgctcatgtccgtccgtggacacctgaagaagatgcg

SEQ ID NO: 56456 - DNA, 75 bp, synthetic construct
  source 1..75: mol_type = other DNA
gccggcgctgcggcacagtcaacaaccgtttttcataaggaaaagaccataatgaatattggcgaacagattaaa

SEQ ID NO: 56457 - DNA, 75 bp, synthetic construct
  source 1..75: mol_type = other DNA
ttactgttaatactactaaccctataaataacaaagagtttctttgggttagttataatataaataattcaactg

SEQ ID NO: 56458 - DNA, 75 bp, synthetic construct
  source 1..75: mol_type = other DNA
ccgaaggcaaagacgccggagtacaaaagcacggataacggcagacagaacacgtatttttcgtcactggacaac

SEQ ID NO: 56459 - DNA, 75 bp, synthetic construct
  source 1..75: mol_type = other DNA
aaacacttcctcagccccggctgtatctggtggaggagcgcgctgaagaacagacagaagccgcgcctttaccgg

SEQ ID NO: 56460 - DNA, 75 bp, synthetic construct
  source 1..75: mol_type = other DNA
atcaccgtactggaaagcctgcagcgggaaggctttcagccattcttcgcctgccagacacgtgtgcgtgacccg

SEQ ID NO: 56461 - DNA, 75 bp, synthetic construct
  source 1..75: mol_type = other DNA
cacaaaaaatgaaatatattactggagctaaagtccgacgggtttccagtggcgatttatctaaaattaaaattc

SEQ ID NO: 56462 - DNA, 75 bp, synthetic construct
  source 1..75: mol_type = other DNA
gtaaaacattacgaaaatcagataaatgcgtacaaacaggagctgctgtcaaaaacgggtatccgtgatgtgcag

SEQ ID NO: 56463 - DNA, 75 bp, synthetic construct
  source 1..75: mol_type = other DNA
tgtcatgaacgtctttttcagggatgtggggcaactggttgaaccgccccgggtttcctggagagtgttttatct

SEQ ID NO: 56464 - DNA, 75 bp, synthetic construct
  source 1..75: mol_type = other DNA
gtgaagaagcaccagaccacgctgtctgatgagctcgagcgcaagatcattcgcctgttcgcgctggggatgagc

SEQ ID NO: 56465 - DNA, 75 bp, synthetic construct
  source 1..75: mol_type = other DNA
actgacttaccgttatggtgacaaacatcagccagtcaccactgccgacattctgacaccacgacgccgggagga

SEQ ID NO: 56466 - DNA, 75 bp, synthetic construct
  source 1..75: mol_type = other DNA
aaaccgactgcggaactgcatcagatgtgccttgaggtggtggatcgcgcggtaaaagatgaagagatcctgacg

SEQ ID NO: 56467 - DNA, 75 bp, synthetic construct
  source 1..75: mol_type = other DNA
atggtagcgcatggaccggtgttcctgtcagcgcctggattggcggtatctggtatcgcaaagatgtgctggcaa

SEQ ID NO: 56468 - DNA, 75 bp, synthetic construct
  source 1..75: mol_type = other DNA
tttggatgttcggtttattctttttcttttacttttttatcatgggagcctacttcccgtttttcccgatttggc

SEQ ID NO: 56469 - DNA, 75 bp, synthetic construct
  source 1..75: mol_type = other DNA
ctcagtactgtaaaattagcatggtcgaagcacttttcttcgtggcttgttgaatttgatgaaagaaattctcca

SEQ ID NO: 56470 - DNA, 75 bp, synthetic construct
  source 1..75: mol_type = other DNA
tatgggatggttgcgcagcgtcaggcatgaaattatccagcgtggcaattatggcacgcctggctgatttcagta

SEQ ID NO: 56471 - DNA, 75 bp, synthetic construct
  source 1..75: mol_type = other DNA
atgtactatttaaaaaacacaaacttttggatgttcggtttattcttttacttttttatcatgggagcctacttc

SEQ ID NO: 56472 - DNA, 75 bp, synthetic construct
  source 1..75: mol_type = other DNA
atgaaaatcctgattacacttctggtgctagctgtactcgggatgttgtggttgcgccatgagaacggcaattta

SEQ ID NO: 56473 - DNA, 75 bp, synthetic construct
  source 1..75: mol_type = other DNA
atgcgattagccagtcgttttggttatgcgaaccagatacgccgtgatcgtcccttaactcgtgaagaactgatg

SEQ ID NO: 56474 - DNA, 75 bp, synthetic construct
  source 1..75: mol_type = other DNA
cggcgttcgttcagtattgttgcagcagtagagctggatgatgccagccatttacgacctgaacgcagacgccgg

SEQ ID NO: 56475 - DNA, 75 bp, synthetic construct
  source 1..75: mol_type = other DNA
tgcagaaatggttgccagtgatctggcgaaagcaaaacagcatgcacttctgaaaagccatggttacgatgttgc

SEQ ID NO: 56476 - DNA, 75 bp, synthetic construct
  source 1..75: mol_type = other DNA
tgcagacccgctggagtttgagaaaaagtacggctctcagattgagttaatttttcgttttcttgatcacgcctt

SEQ ID NO: 56477 - DNA, 75 bp, synthetic construct
  source 1..75: mol_type = other DNA
gtacctccagctaccagatgctgccgggttacttcaggttcgtctgccagaacgggtgcgtctgtggccagtctc

SEQ ID NO: 56478 - DNA, 75 bp, synthetic construct
  source 1..75: mol_type = other DNA
aggataccgcgccggaggcggtgtatgcccgtcttcatgaaccgctgagcgggagggccgtgattcatattgtac

SEQ ID NO: 56479 - DNA, 75 bp, synthetic construct
  source 1..75: mol_type = other DNA
tgcgccatgttaaatcctgccagtggccacacggcgattatcaccacagtgaaaccgtcattcaccgttatggta

SEQ ID NO: 56480 - DNA, 75 bp, synthetic construct
  source 1..75: mol_type = other DNA
gaagacaaccttttctcttccataggacagagaaaaatagccgagcttaaaactaaggatcttctcgttccagtc

SEQ ID NO: 56481 - DNA, 75 bp, synthetic construct
  source 1..75: mol_type = other DNA
gaatttcaaactcgaaaaatcatatattctgagaacggagctgcatgaagagttaagaaaaactcgaaaaacagc

SEQ ID NO: 56482 - DNA, 75 bp, synthetic construct
  source 1..75: mol_type = other DNA
gataaacgggctcggtgattaccctgataatatgaccaccatcaaaccgctgacgacttatgaccgctggaacgg

SEQ ID NO: 56483 - DNA, 75 bp, synthetic construct
  source 1..75: mol_type = other DNA
cgatttaatcccatcttttctaacgtctggacaacaaaatccagctttcgccagaaaagtatctggaatcgttga

SEQ ID NO: 56484 - DNA, 75 bp, synthetic construct
  source 1..75: mol_type = other DNA
ttgacttttaaagttgattatatcgctacggggaaagcgacttctggtaatgtgaatgcggtaacaaatttccat

SEQ ID NO: 56485 - DNA, 75 bp, synthetic construct
  source 1..75: mol_type = other DNA
catggagtgcactgaaagtgtcattaccagtggaagaaaaacgcacgctgctggtcaatggtgttgaagggagtg

SEQ ID NO: 56486 - DNA, 75 bp, synthetic construct
  source 1..75: mol_type = other DNA
ctcgccgtcagtttctctgcgccgcatggccgatgaacacggcacagataaaactatcgctcagaaactggcgcg

SEQ ID NO: 56487 - DNA, 75 bp, synthetic construct
  source 1..75: mol_type = other DNA
actacctgaaaacgcaccggactttctgcgcgccggatgtagctgcggcaacaggcgcaacagtaaccagcataa

SEQ ID NO: 56488 - DNA, 75 bp, synthetic construct
  source 1..75: mol_type = other DNA
tcatttctcaatcgtatgttcatgttaatcctgagtggttaaaaaatgcgacccctcaagataagaaactaagaa

SEQ ID NO: 56489 - DNA, 75 bp, synthetic construct
  source 1..75: mol_type = other DNA
ctttgggggtgattatcctacaaaggatggaacaggtgtacgtgactatatacacgtaatggatttggcggaggg

SEQ ID NO: 56490 - DNA, 75 bp, synthetic construct
  source 1..75: mol_type = other DNA
aaaattacggtgcgaattatgccatgtggcagcatcccttaacgccttaccgtgtaccacttaaagagggtggcg

SEQ ID NO: 56491 - DNA, 75 bp, synthetic construct
  source 1..75: mol_type = other DNA
aaactggattcgctggttactgccgggaaactgattggtgcggagtgctggtatgacgtggtggataacggcacc

SEQ ID NO: 56492 - DNA, 75 bp, synthetic construct
  source 1..75: mol_type = other DNA
ttttggtaataaatatatgacaaaagatggaacaggtgtaagagattatatccatgtagtcgatttagttgaggg

SEQ ID NO: 56493 - DNA, 75 bp, synthetic construct
  source 1..75: mol_type = other DNA
gcggatgtttccaaagctgaaaaagaactggactggaaggctaggcgagatttgaccgaaatgctttcttctgcg

SEQ ID NO: 56494 - DNA, 75 bp, synthetic construct
  source 1..75: mol_type = other DNA
gatttcgagtttatcaggggttttgattatgcttacgaagacgaccttaaagacgccattaaattaattgagaat

SEQ ID NO: 56495 - DNA, 75 bp, synthetic construct
  source 1..75: mol_type = other DNA
ctggctatattggctcacatgctatattaactttattgcaaaatggatatgatgttatatcgctagataattatt

SEQ ID NO: 56496 - DNA, 75 bp, synthetic construct
  source 1..75: mol_type = other DNA
gcctggccgcaccttggcggtaaactggtctatgaacagtattatggcgatgaagtggccctgttcgataaagac

SEQ ID NO: 56497 - DNA, 75 bp, synthetic construct
  source 1..75: mol_type = other DNA
actggcagtggagatctaatatcattaggtggtcatgcaggacttggcgttgcgtttgctaaaaagaaaggtgaa

SEQ ID NO: 56498 - DNA, 75 bp, synthetic construct
  source 1..75: mol_type = other DNA
atcgacagaatctgttggtatcggtgcaggtgttgacgcttcagttatgactctggcttgtagaacgtggcaaga

SEQ ID NO: 56499 - DNA, 75 bp, synthetic construct
  source 1..75: mol_type = other DNA
ggcgtcggcctgctcccgacggctggttacccagacatcccgtatcggctccattggcgtgatgatgagccatgt

SEQ ID NO: 56500 - DNA, 75 bp, synthetic construct
  source 1..75: mol_type = other DNA
tggtgcgctcagttcggccttgccctgactatcccgaacggctgcgagtaccagcagctgcgcgataagcaggag

SEQ ID NO: 56501 - DNA, 75 bp, synthetic construct
  source 1..75: mol_type = other DNA
ggggatggaacctgtatggatatcaattgaatccgatatcagacatcgaccccctgggtttatctatgtgggagg

SEQ ID NO: 56502 - DNA, 75 bp, synthetic construct
  source 1..75: mol_type = other DNA
gctgtggcgcagtctgcaaatggcgtctttgtgtctcttcctgacgtcgaggatgtggacaacgccgatatcaac

SEQ ID NO: 56503 - DNA, 75 bp, synthetic construct
  source 1..75: mol_type = other DNA
tggacggctggctggtgacgcaggatccccagggcaactactggtatctgctgcacggcgaactggcgggatcgt

SEQ ID NO: 56504 - DNA, 75 bp, synthetic construct
  source 1..75: mol_type = other DNA
ccatcactgcacaccccgcgccggaccggatacaggtcagtaccctgccggatggcgtggagacatacggtgtgt

SEQ ID NO: 56505 - DNA, 75 bp, synthetic construct
  source 1..75: mol_type = other DNA
caccacaacggtgatggcgacgcaggattacgttgatgacaaaattgcagagcatgaacagtcacgacgtcaccc

SEQ ID NO: 56506 - DNA, 75 bp, synthetic construct
  source 1..75: mol_type = other DNA
atgtcacccggatgcctcgctgaccgcaaaaggctttgttcaactcagtagcgccactaacagcgattctgaaac

SEQ ID NO: 56507 - DNA, 75 bp, synthetic construct
  source 1..75: mol_type = other DNA
aacgccgaaagcggtaaaggccgcctatgaccttgctaacgggaaatatactgcgcaggatgccaccacggcgcg

SEQ ID NO: 56508 - DNA, 75 bp, synthetic construct
  source 1..75: mol_type = other DNA
atgcagaccttgccaactattacgatcgggtaagctcgttgcaggagagacgtttacgtcttccggtgcggcgga

SEQ ID NO: 56509 - DNA, 75 bp, synthetic construct
  source 1..75: mol_type = other DNA
ccgcgcgacggtcgtgactatgatcccgatgttctgcagaaggcggtgaatgatgctgtcgggaaaataccggta

SEQ ID NO: 56510 - DNA, 75 bp, synthetic construct
  source 1..75: mol_type = other DNA
ccggtactgccagcgcaaaaccaggccttaccgccggaagtccgcgcattcctcaatgccgggagaacgcgttaa

SEQ ID NO: 56511 - DNA, 75 bp, synthetic construct
  source 1..75: mol_type = other DNA
ccgctgccgttcatcctctcccgcacctacagcagttaccggacaaaaacgcccgcgccggtggggagcctcggc

SEQ ID NO: 56512 - DNA, 75 bp, synthetic construct
  source 1..75: mol_type = other DNA
tcttggtcatctccgctgagagctaataagtatttaaaatggcaagcgaaacgggatttagaaaaaatgttagca

SEQ ID NO: 56513 - DNA, 75 bp, synthetic construct
  source 1..75: mol_type = other DNA
agctgtcagaaaaactatcgcggcattgccaggtggttacgctgaagctgctgactggctggatgtaacagagaa

SEQ ID NO: 56514 - DNA, 75 bp, synthetic construct
  source 1..75: mol_type = other DNA
aacgacgagttcgttttccggacgatgtgaagttagctattgaaagaaatggcgaaaaagaatgccgaaagttca

SEQ ID NO: 56515 - DNA, 75 bp, synthetic construct
  source 1..75: mol_type = other DNA
atgcattttgccggtgcgaagtctgttgctgagtctttaataaaacctatgttttattatgataataatgttgca

SEQ ID NO: 56516 - DNA, 75 bp, synthetic construct
  source 1..75: mol_type = other DNA
gtgggtaatcatcactggaaagtggaaaaacagcctgagtggtacgtgaaagctgtcagaaaaactatcgcggcg

SEQ ID NO: 56517 - DNA, 75 bp, synthetic construct
  source 1..75: mol_type = other DNA
cgatgcgtgggcgaaagataatccggtgtttgtcggttcttcactgatgtttttgaaagagggcgatcgcgtatc

SEQ ID NO: 56518 - DNA, 75 bp, synthetic construct
  source 1..75: mol_type = other DNA
gtcattgataaactggttacaaagtgctggcaggaagaagcatatgcagagatacaattgagaaatgtgacaaga

SEQ ID NO: 56519 - DNA, 75 bp, synthetic construct
  source 1..75: mol_type = other DNA
gtcgaagcgtctgcgaattccaggtcagcagaaccagcaaggcaaggccattacagattacgatccctatgctta

SEQ ID NO: 56520 - DNA, 75 bp, synthetic construct
  source 1..75: mol_type = other DNA
ccagtcaggagatagtggctctcctctttatgcatgggataacatacagaacaaatgggttcttgctggagttac

SEQ ID NO: 56521 - DNA, 75 bp, synthetic construct
  source 1..75: mol_type = other DNA
accagttgcatggcgatatcgctacgtgaaaaaaggcgttacggactttcaggagaagatgtgggttggtgactg

SEQ ID NO: 56522 - DNA, 75 bp, synthetic construct
  source 1..75: mol_type = other DNA
attcccggtgtgctggccgtgtttgcagaacgccgtaaggacagttttggtccgtatgtccggctgatgagcgtc

SEQ ID NO: 56523 - DNA, 75 bp, synthetic construct
  source 1..75: mol_type = other DNA
aaggcacgcgcattttcccgccgcgcctcctcctctcccgatgatctgcgtctgtcgctgagcctgttacgtgaa

SEQ ID NO: 56524 - DNA, 75 bp, synthetic construct
  source 1..75: mol_type = other DNA
tctggtggtttaacaattacggatgtgatggctgcgcaggggatggtgcagtcgaaagcaccgcttgggtttgcc

SEQ ID NO: 56525 - DNA, 75 bp, synthetic construct
  source 1..75: mol_type = other DNA
ggcatgaaacggcggggcaagcaaaaacagtggcatggcgatatcgctacgtgaaaaaaaggcgttacggacttt

SEQ ID NO: 56526 - DNA, 75 bp, synthetic construct
  source 1..75: mol_type = other DNA
cgcgtctgtttcgtcgtcaggtgaaattcaccccgtactggcagcggctggagttgcccgacggcgattttgtcg

SEQ ID NO: 56527 - DNA, 75 bp, synthetic construct
  source 1..75: mol_type = other DNA
gtgaagaaacccggttacagatcatcccttaccttgtgaattttgcctttgctgattattccaggtctgcggcaa

SEQ ID NO: 56528 - DNA, 75 bp, synthetic construct
  source 1..75: mol_type = other DNA
ggtgggataaagacgaggacgtgatttatctttctcgcgtctggaaggccaaacagaagaaggcgacagaggcat

SEQ ID NO: 56529 - DNA, 75 bp, synthetic construct
  source 1..75: mol_type = other DNA
cactggcagcggtgtggatcagtaacaagacggtcggattgctggaaatccattactttaagcggccgctgagca

SEQ ID NO: 56530 - DNA, 75 bp, synthetic construct
  source 1..75: mol_type = other DNA
tttattcagatggtcccggcattcacgtttctgtataccctgaagctggtggcactgttaaatctgggcgtgcag

SEQ ID NO: 56531 - DNA, 75 bp, synthetic construct
  source 1..75: mol_type = other DNA
tgattatacagtaacaacgagcaatgacagttcatggtccggaggaggcattattgtcaattatggtacaactgt

SEQ ID NO: 56532 - DNA, 75 bp, synthetic construct
  source 1..75: mol_type = other DNA
atgaatggtaaatataatgtcaggagtgaattgttagctcgttgtatcggaacaggtagattgaaaggagatgtg

SEQ ID NO: 56533 - DNA, 75 bp, synthetic construct
  source 1..75: mol_type = other DNA
agcggttacaacctatgcactgggggcaacgttcgcggcacccgtactgtctgcgctgacagcaagctggagccg

SEQ ID NO: 56534 - DNA, 75 bp, synthetic construct
  source 1..75: mol_type = other DNA
ggcatgacagatgattacgctactcgactgtatgagaaaatatttgtaccgagaaaaggctctatttttgataga

SEQ ID NO: 56535 - DNA, 75 bp, synthetic construct
  source 1..75: mol_type = other DNA
ttcttttgagatggatatattgaattcttttaatgatgcggatgaatatcacggacgtgttaaactggagttgga

SEQ ID NO: 56536 - DNA, 75 bp, synthetic construct
  source 1..75: mol_type = other DNA
aaactggcaggtcgtcatcaagatgaattacgggcaatgacagaatcattacctgaaaattcctctacgcaatat

SEQ ID NO: 56537 - DNA, 75 bp, synthetic construct
  source 1..75: mol_type = other DNA
tgataaatccggagagcggcaacagcacgccgttatttgtggcgcaggggaatcagctgttcatgaacgacgtgt

SEQ ID NO: 56538 - DNA, 75 bp, synthetic construct
  source 1..75: mol_type = other DNA
aagtaagccattcgtcaatagctgatgaacgccagcccacagaaccactaccaagacgtaccggcctggggaagg

SEQ ID NO: 56539 - DNA, 75 bp, synthetic construct
  source 1..75: mol_type = other DNA
ggccggatggtggcgcaccgttacgcgggaaggccggagatgcgctaccgctacgacgataccgggcgggtggtg

SEQ ID NO: 56540 - DNA, 75 bp, synthetic construct
  source 1..75: mol_type = other DNA
ccgtggcgcctgaactatcagcctttgttcctgacaccggataagcagatttctgatattaacggacgtgaacat

SEQ ID NO: 56541 - DNA, 75 bp, synthetic construct
  source 1..75: mol_type = other DNA
tggccacagaggccgcagtatttatcggcgcggacgcgattaaatctggtctcgctgatcaactcgttaattacg

SEQ ID NO: 56542 - DNA, 75 bp, synthetic construct
  source 1..75: mol_type = other DNA
aaaactcaaactgtattgtcgagtacaagcttcctgaagtttctcctggtaccttactgaaccagcagacagcaa

SEQ ID NO: 56543 - DNA, 75 bp, synthetic construct
  source 1..75: mol_type = other DNA
caagttttcttgtcatgccttatgcgttggcagatgaccagggcggtttaaaacaggatgcagcgccaccgccgc

SEQ ID NO: 56544 - DNA, 75 bp, synthetic construct
  source 1..75: mol_type = other DNA
atggatatacttcttaagtattataaacaaggtggaacagttgttatggtaacccatgacacaaatttaattaca

SEQ ID NO: 56545 - DNA, 75 bp, synthetic construct
  source 1..75: mol_type = other DNA
agattatgctagagagattattgaatttgctaatcatcttggattggaacttgaaagcattgaattatccaagac

SEQ ID NO: 56546 - DNA, 75 bp, synthetic construct
  source 1..75: mol_type = other DNA
aatggcaggtgaatcaggccgccggtcgttatattcgttcgcatgaagccgttcagcacatcagcatccgcgacc

SEQ ID NO: 56547 - DNA, 75 bp, synthetic construct
  source 1..75: mol_type = other DNA
tttaatgaaactcctattgaccgtaagaaaatttttaaaactttcaaatgtaaactaactgaccaacaaaaaaaa

SEQ ID NO: 56548 - DNA, 75 bp, synthetic construct
  source 1..75: mol_type = other DNA
tgacgatgccaatttaacgccggatatccgcgctgatattcatgccgaattggtcagactgtcatttatgcctac

SEQ ID NO: 56549 - DNA, 75 bp, synthetic construct
  source 1..75: mol_type = other DNA
ttgcccgtgaaaataatatttcgaatgttactgattacgccaaatttgccgaagaacaacgcgtcaaagcagcag

SEQ ID NO: 56550 - DNA, 75 bp, synthetic construct
  source 1..75: mol_type = other DNA
gtgaccacaatgtcattacagcaggcttttgaggtctgccagaataacaaagcggcatggcttcagcgcaaaaat

SEQ ID NO: 56551 - DNA, 75 bp, synthetic construct
  source 1..75: mol_type = other DNA
gatgaactgaaggccatcagcaaattcaaggacctcactccgccgcgcttcagcgatgtggtcagccgccaggat

SEQ ID NO: 56552 - DNA, 75 bp, synthetic construct
  source 1..75: mol_type = other DNA
atgaaatgtaaaacactacctctgctggcgatggttgccaccactctgtttctgagcgcctgcgatgacaggagt

SEQ ID NO: 56553 - DNA, 75 bp, synthetic construct
  source 1..75: mol_type = other DNA
aatgtggtcaacctgcactgtgatgagttcaacgaactgatgggcgatgaatttattccgctcatcaacaagggc

SEQ ID NO: 56554 - DNA, 75 bp, synthetic construct
  source 1..75: mol_type = other DNA
tcatccctactggatgtgcaagtgttcctggtcatacggtaataacaaaattattaccgatactgactgtgggac

SEQ ID NO: 56555 - DNA, 75 bp, synthetic construct
  source 1..75: mol_type = other DNA
ttaccgaacgaagctgattacaacaaattgcaggcgttgtttgcgcgtgttgcagcagaaaaacatcagcgcggt

SEQ ID NO: 56556 - DNA, 75 bp, synthetic construct
  source 1..75: mol_type = other DNA
ttgcttgttggcttcatcatgactggtgtcctattcatgttgaatgcgaaggaagtaacaaaacttacgccatac

SEQ ID NO: 56557 - DNA, 75 bp, synthetic construct
  source 1..75: mol_type = other DNA
gaaagatgatggctatgaggcgaagggcagggcactgaaacagcatgtgatggctccgctgattgcttactttcg

SEQ ID NO: 56558 - DNA, 75 bp, synthetic construct
  source 1..75: mol_type = other DNA
aaattaccagagaaacatatgagcaatttcttgggctgcatccagaagggaaagaaattggcgctgacagttcag

SEQ ID NO: 56559 - DNA, 75 bp, synthetic construct
  source 1..75: mol_type = other DNA
gaactggaaaagtcccattaccaactggtcagcacatacagtgagctgaaccggcagtatatggaactgctgagt

SEQ ID NO: 56560 - DNA, 75 bp, synthetic construct
  source 1..75: mol_type = other DNA
ggcagaagagaaacatcagcggggtgaactggaaaagccacatcaccaactggtcagcacatacagtgagctgaa

SEQ ID NO: 56561 - DNA, 75 bp, synthetic construct
  source 1..75: mol_type = other DNA
cgttgatagcattagccgtgctgctggccggttgttccagtaatgcgcagtataatagcagtgcatcgggtaatg

SEQ ID NO: 56562 - DNA, 75 bp, synthetic construct
  source 1..75: mol_type = other DNA
gttcggaaatgtaagtcctgaatttgatacctatgctcgactcggtatcttaatgggttctacgacagcagcatt

SEQ ID NO: 56563 - DNA, 75 bp, synthetic construct
  source 1..75: mol_type = other DNA
aaacagatagcggaagccaccggaaagaaaaacatggcttcgcactggtttggtaccagtcagtggcagttaccg

SEQ ID NO: 56564 - DNA, 75 bp, synthetic construct
  source 1..75: mol_type = other DNA
aaaagcagcaatgggattggggcgtcgcacgattggggttgaacttgagtccgggcgttttgaacaaacagttgg

SEQ ID NO: 56565 - DNA, 75 bp, synthetic construct
  source 1..75: mol_type = other DNA
tggtcagcacatacagtgaactgaaccggcaatatgccagtctgcttgaggaatacaaatctctgcggcgttatt

SEQ ID NO: 56566 - DNA, 75 bp, synthetic construct
  source 1..75: mol_type = other DNA
tcgatccgcgtattggcaaccattacaacaatccgtcgtttggttatggtggttattgtttgccgaaagatacca

SEQ ID NO: 56567 - DNA, 75 bp, synthetic construct
  source 1..75: mol_type = other DNA
atgggcaatgtgattcaactggctcccaatgaatgggtttgtgaaagcgttcttatcgcaattaccgggctcaaa

SEQ ID NO: 56568 - DNA, 75 bp, synthetic construct
  source 1..75: mol_type = other DNA
atgactacaactaatcaaagcttaattcgtttaccagaagtcttgaaacgaactggtttcggcaaggcatggatc

SEQ ID NO: 56569 - DNA, 75 bp, synthetic construct
  source 1..75: mol_type = other DNA
gaccattcttgccggtatcagcgccggcggcatgtactgcccggactgttgcaatacaaagaaggtctgttttcg

SEQ ID NO: 56570 - DNA, 75 bp, synthetic construct
  source 1..75: mol_type = other DNA
tcgtgccgttgcttttgtcgagagtgaagttgacgagtggattcaatcagttattgaaacaagtcgaaataatgt

SEQ ID NO: 56571 - DNA, 75 bp, synthetic construct
  source 1..75: mol_type = other DNA
agcagaagcgattaaactttttgcaaacacctacctggcgatgcgcgtggcgtactttaacgaactggatagcta

SEQ ID NO: 56572 - DNA, 75 bp, synthetic construct
  source 1..75: mol_type = other DNA
cgtgcgaaaaaccggcagaaatgctgcagcagataatcagcgcaagtagccgtcctggtgatctggttgcggatt

SEQ ID NO: 56573 - DNA, 75 bp, synthetic construct
  source 1..75: mol_type = other DNA
aagaaatacacgtcaggcgttctgtcgttcgcggagaaggagctaccaccgggtgaacgcgaaagagtgatgacg

SEQ ID NO: 56574 - DNA, 75 bp, synthetic construct
  source 1..75: mol_type = other DNA
ttaaaacaagactttagcgcaagcgcacccaaccagaaatgggcaggcgatatcacttatgtttggaccagagaa

SEQ ID NO: 56575 - DNA, 75 bp, synthetic construct
  source 1..75: mol_type = other DNA
attccctatgtggccgggattggtgcagggattgaggatactgatggccagccactgagcaacatactgctgctg

SEQ ID NO: 56576 - DNA, 75 bp, synthetic construct
  source 1..75: mol_type = other DNA
tcggacaacaagggttgttcgacatcactcggacactattgcagcagcccgatctggcctcgctgtgtgaggctc

SEQ ID NO: 56577 - DNA, 75 bp, synthetic construct
  source 1..75: mol_type = other DNA
atgtctgtagtgatatcaggtgcgctgattgatggcgcaggcatccccatgtccggatgccatattattctgaaa

SEQ ID NO: 56578 - DNA, 75 bp, synthetic construct
  source 1..75: mol_type = other DNA
tccaacgataatggcaagctggatattcgtttaagcggcccgtggcgtgaagtcatcctctgggaagttcctttg

SEQ ID NO: 56579 - DNA, 75 bp, synthetic construct
  source 1..75: mol_type = other DNA
ctgtccgactgctgattcagttacagcgtaacggtaactgggtgacggaaaaggatgtcaccattaacggcaaga

SEQ ID NO: 56580 - DNA, 75 bp, synthetic construct
  source 1..75: mol_type = other DNA
atccttgccagagaaacggcacatgtaaaattccggccgtggcaggatgataagtggagtcgagttttgccgcat

SEQ ID NO: 56581 - DNA, 75 bp, synthetic construct
  source 1..75: mol_type = other DNA
tgaacggtggtcaggccagtattgccatcagcaataccagcccgaatctgtttaccgttcccggtgaccggatta

SEQ ID NO: 56582 - DNA, 75 bp, synthetic construct
  source 1..75: mol_type = other DNA
cagacccgccatactttaaagtgaagcccgagggctgggataaccagtgggagggcgacgatgattacctgaaat

SEQ ID NO: 56583 - DNA, 75 bp, synthetic construct
  source 1..75: mol_type = other DNA
ttgaagcagttgcagctatgtctgtaatggacgttgtagaactgatctctgcaatggaagaaaaattcggtgttt

SEQ ID NO: 56584 - DNA, 75 bp, synthetic construct
  source 1..75: mol_type = other DNA
tttaacctgaattctggccggatgtgtataagttctgtaacattgatggagcttatctatggggcagaaaaaagt

SEQ ID NO: 56585 - DNA, 75 bp, synthetic construct
  source 1..75: mol_type = other DNA
gaaagatgatggctatgtggcacaggggcgcgagctaaaacagcacgtcatggccccgctgatttcttactttcg

SEQ ID NO: 56586 - DNA, 75 bp, synthetic construct
  source 1..75: mol_type = other DNA
acggcaaaacagattgtggatgccacaggaaagaaaaacatggtgtcgcactggttcagtgccagtcagtggcag

SEQ ID NO: 56587 - DNA, 75 bp, synthetic construct
  source 1..75: mol_type = other DNA
tcgcgtccaaaacgtgaaaaccagagtttgcttaatggacctcaggtcgataccagcaaagccggtgtggtagcc

SEQ ID NO: 56588 - DNA, 75 bp, synthetic construct
  source 1..75: mol_type = other DNA
atcaggggtgcggctcgctgcaactgaacggtgccgacctgctgacggatgacagtctgctgacggccgttctga

SEQ ID NO: 56589 - DNA, 75 bp, synthetic construct
  source 1..75: mol_type = other DNA
gacgacagaacataatctgtcgcgagtgccggaatagtgaggttatgcagcgagtgctggcgttttatcagggga

SEQ ID NO: 56590 - DNA, 75 bp, synthetic construct
  source 1..75: mol_type = other DNA
atggctgatattgcaattgtgtgggatcagggatgcggttcgctgcaactgaacggtgccgacctgctgacggat

SEQ ID NO: 56591 - DNA, 75 bp, synthetic construct
  source 1..75: mol_type = other DNA
gtgtcatttaccacacaaggacgtattgatgccatagattcaaggtccgtgcaacctaaccctatgaacgcacaa

SEQ ID NO: 56592 - DNA, 75 bp, synthetic construct
  source 1..75: mol_type = other DNA
gttatgttggtttatcgaacggtgtcctgattgcgcaaaaccacgaagtggtggccctggatatcgtacaggcca

SEQ ID NO: 56593 - DNA, 75 bp, synthetic construct
  source 1..75: mol_type = other DNA
gacatcaaagaacgtttagggattgataatgttattttctctcctgagttcctgcgtgaaggccgtgcgctgtac

SEQ ID NO: 56594 - DNA, 75 bp, synthetic construct
  source 1..75: mol_type = other DNA
gacaacctgcatccggcacgtattgtcatcggtgagcgctccgcgcgtgccaaacgttttgctgatctgctgaaa

SEQ ID NO: 56595 - DNA, 75 bp, synthetic construct
  source 1..75: mol_type = other DNA
aacggtgccggttggttttacggattcggtgaagaaaaaatatgccactgataatattattttctcgccagagtt

SEQ ID NO: 56596 - DNA, 75 bp, synthetic construct
  source 1..75: mol_type = other DNA
ttctggataaagcaagcacacaggcggttattcaatatcttggtctgagcgatgcaagtggatacgttggacgct

SEQ ID NO: 56597 - DNA, 75 bp, synthetic construct
  source 1..75: mol_type = other DNA
tccaaaaaagctgatgtaagctatttttcttatgcattttctcgctttaagagattagtgttaccagtttggatt

SEQ ID NO: 56598 - DNA, 75 bp, synthetic construct
  source 1..75: mol_type = other DNA
tatgccaataaagtggcgtttatcgacaccgattttgtgacaactcaggcgttctgcaaaaagtacgaagggcgc

SEQ ID NO: 56599 - DNA, 75 bp, synthetic construct
  source 1..75: mol_type = other DNA
ctggaactattttcgcggaaatggatatcattcagaacagtggaataatattggcacctgggtacagcgcgccat

SEQ ID NO: 56600 - DNA, 75 bp, synthetic construct
  source 1..75: mol_type = other DNA
agtattgcagcgggccgattatccgatgtcaacggtgctgtcagaaggatgaatgatataaaagtggaaaatcat

SEQ ID NO: 56601 - DNA, 75 bp, synthetic construct
  source 1..75: mol_type = other DNA
cgacaaacgcttcattgtttcaccgaaattcgatcgtcggacgaaacaaggtaaagctgacgaagaagcatttct

SEQ ID NO: 56602 - DNA, 75 bp, synthetic construct
  source 1..75: mol_type = other DNA
acgccacgacggcacaaaaagggatagtccagctcagtagtgccaccaacagcacgtctgaaacactggccgcga

SEQ ID NO: 56603 - DNA, 75 bp, synthetic construct
  source 1..75: mol_type = other DNA
atccgtggatgggacggtggtcgcaaggttgataccgggcgtgcgctactttcatttcaggaagggactatcgta

SEQ ID NO: 56604 - DNA, 75 bp, synthetic construct
  source 1..75: mol_type = other DNA
tgcgccttatcaccaacctgatccgcactggggtagtcaccgaagtggaccgggaaaactggctttgccgggtga

SEQ ID NO: 56605 - DNA, 75 bp, synthetic construct
  source 1..75: mol_type = other DNA
atgtggtggccgctctgatggccatcgagggtgaattgcgccagttgcggcaggctgtcagggaacaggggggac

SEQ ID NO: 56606 - DNA, 75 bp, synthetic construct
  source 1..75: mol_type = other DNA
cctgctggttaacgtcaaaatcgcccagcttggcgaaagtttccccatcaccatcgtcacttttttacctgtctt

SEQ ID NO: 56607 - DNA, 75 bp, synthetic construct
  source 1..75: mol_type = other DNA
tgagcgacgggaacgtgcaaattgttaagaccggcgaggtcattggcgcgacgcaacttactgaaggcgagttga

SEQ ID NO: 56608 - DNA, 75 bp, synthetic construct
  source 1..75: mol_type = other DNA
aaagggtatcagattacctgggactgggaggagatgtggcaggaagcccatgcccgcgcctttaccgtcgctaaa

SEQ ID NO: 56609 - DNA, 75 bp, synthetic construct
  source 1..75: mol_type = other DNA
ttccccggcagaagaaaacgatcggtgtcgtattcggtaagttttacccgctgcataccggacatatctacctta

SEQ ID NO: 56610 - DNA, 75 bp, synthetic construct
  source 1..75: mol_type = other DNA
gcaaggacggtcttgtggtaacaagttcagtattgaatcaacttccagattcagtagaactaaaacaagagtcgg

SEQ ID NO: 56611 - DNA, 75 bp, synthetic construct
  source 1..75: mol_type = other DNA
atacgcctgttcctgctctgcgggtaaggcagttaaacttgtctatatggtcagccccgtacttaccaccactgg

SEQ ID NO: 56612 - DNA, 75 bp, synthetic construct
  source 1..75: mol_type = other DNA
aagcgcttggctcgtaaaacaatctgcttctcgcgttcagtagagatccacgaaaaagtcatcgggacgtttatt

SEQ ID NO: 56613 - DNA, 75 bp, synthetic construct
  source 1..75: mol_type = other DNA
taacctgacgctgcgcacccgcattaagcgcttggctcgtaaaacaatctgcttctcgcgttcagtagagatcca

SEQ ID NO: 56614 - DNA, 75 bp, synthetic construct
  source 1..75: mol_type = other DNA
actggccttaacgccagctttgatctcgattttttcggtcgcttaaagaacatgagcgaagccgagcgccaaaat

SEQ ID NO: 56615 - DNA, 75 bp, synthetic construct
  source 1..75: mol_type = other DNA
gatgaagcaaaaactcggcctggcctgtaccctggtgggcgaaccgaaagtgttgctgctcgatgaacccggcgt

SEQ ID NO: 56616 - DNA, 75 bp, synthetic construct
  source 1..75: mol_type = other DNA
cgtcagtcgctggataacgtaaaagcgatcgtcgaagccgctggcctgaaagtgggcgacatcgttaaaactacc

SEQ ID NO: 56617 - DNA, 75 bp, synthetic construct
  source 1..75: mol_type = other DNA
cgtgcaactggcgttgagctggagactgaacgttttgagcagacggtcagggaagttcaggatttagccagtcag

SEQ ID NO: 56618 - DNA, 75 bp, synthetic construct
  source 1..75: mol_type = other DNA
tcacggcaccaatattcctgatgatgcagtggaaatctcggaatcagagtggaaaacactgattaatgcacagag

SEQ ID NO: 56619 - DNA, 75 bp, synthetic construct
  source 1..75: mol_type = other DNA
gttctgacagtttttcttgtttccggagagccagttgatattgcagtcagtgttcacaggacaatgcaggagtgt

SEQ ID NO: 56620 - DNA, 75 bp, synthetic construct
  source 1..75: mol_type = other DNA
taacctgacgctgagaacccgaatcaaacggctggcccgcaaaacgctctgtttttcacgttctgttgagctcca

SEQ ID NO: 56621 - DNA, 75 bp, synthetic construct
  source 1..75: mol_type = other DNA
cgaaaaatggtttgccctgccgaaagagcgtctgtgggttaccgtctatgaaagcgacgacgaagcctacgaaat

SEQ ID NO: 56622 - DNA, 75 bp, synthetic construct
  source 1..75: mol_type = other DNA
tctgagcgcctgcgatgacaggagtgatgacctgaaagctatcagtaaatttaaggacctcacgcctccgcgctt

SEQ ID NO: 56623 - DNA, 75 bp, synthetic construct
  source 1..75: mol_type = other DNA
aagattttattgccgatgccattttgtcacgcaagccgcaagtggtgggtatttatcgtctgattatgaagagcg

SEQ ID NO: 56624 - DNA, 75 bp, synthetic construct
  source 1..75: mol_type = other DNA
atgaaactgatcctacctttcccgcccagcgtgaatacgtactggcgacaccctaataaaggggcgtttgctggt

SEQ ID NO: 56625 - DNA, 75 bp, synthetic construct
  source 1..75: mol_type = other DNA
atatgccgacactttctgccgtgcgttttaacccggctatccgggtgttttatatgcgactgatttctcagggta

SEQ ID NO: 56626 - DNA, 75 bp, synthetic construct
  source 1..75: mol_type = other DNA
atccgtgtgagctggaaattgaatcattgctggggcgtgaagagccatatccagacacattcactcccgcagatt

SEQ ID NO: 56627 - DNA, 75 bp, synthetic construct
  source 1..75: mol_type = other DNA
gcacgtaaaaaggccaacgacgctgtgtttaaggctctcgacgaacagcaggaaacattgcaaagcgatgctgat

SEQ ID NO: 56628 - DNA, 75 bp, synthetic construct
  source 1..75: mol_type = other DNA
acctacgaagcacagtacgcaaccgtgtatggcggatacaaaaacagcactgagaagaatattgtttttgtgcct

SEQ ID NO: 56629 - DNA, 75 bp, synthetic construct
  source 1..75: mol_type = other DNA
aggtgttctggcgaccggctgcattacgcaagaaagcaggagaaaaggtcgaactgcagttacaggtcagccagc

SEQ ID NO: 56630 - DNA, 75 bp, synthetic construct
  source 1..75: mol_type = other DNA
aataatttattgctctcattctttcttcagacagacagcgcaaacctgaatctgatgtatcacaaaacgccaaac

SEQ ID NO: 56631 - DNA, 75 bp, synthetic construct
  source 1..75: mol_type = other DNA
ctggttgcgccgatcctgaccaaaatcgccgccgttgctgaagatggcgaaccgtgcgttacctatattggtgcc

SEQ ID NO: 56632 - DNA, 75 bp, synthetic construct
  source 1..75: mol_type = other DNA
actgcgagcaaggtgcggtgccgacgattatgaatcgcggtggctttgccgagaagttgcgtgcggactggcaat

SEQ ID NO: 56633 - DNA, 75 bp, synthetic construct
  source 1..75: mol_type = other DNA
atgacatttatgaaaggactaccccttttgttgttggttgccagtctgtgcagccacgctgcactacaacccgat

SEQ ID NO: 56634 - DNA, 75 bp, synthetic construct
  source 1..75: mol_type = other DNA
ccacggggtgaaaccggacccgtgggaccgcaaggagaggcgggtattcaggggcctgctggtcctgcgggcccg

SEQ ID NO: 56635 - DNA, 75 bp, synthetic construct
  source 1..75: mol_type = other DNA
aagtttctttaaacaatactatgcttctcgtgaaaacttccttgttaatttttatgcgactaatccggagtgtgc

SEQ ID NO: 56636 - DNA, 75 bp, synthetic construct
  source 1..75: mol_type = other DNA
ggcgcagcgtgactacttcggtgcgcatacgtataaacgtacggataaagaaggtgtgttccacaccgaatggct

SEQ ID NO: 56637 - DNA, 75 bp, synthetic construct
  source 1..75: mol_type = other DNA
cagttcaccaaaatcttcatgggcctggcgaccattttcctggagcgcgacctggcgctgatcgaaatcaacccg

SEQ ID NO: 56638 - DNA, 75 bp, synthetic construct
  source 1..75: mol_type = other DNA
gctggtggccgcggtaaagcgggcggtgtgaaagttgtaaacagcaaagaagacatccgtgcttttgcagaaaac

SEQ ID NO: 56639 - DNA, 75 bp, synthetic construct
  source 1..75: mol_type = other DNA
tggcccggtgagcgtcaccacctccaaacccggcgtcaatccgctgtttgaagcgatgattgaagcgggcgtgca

SEQ ID NO: 56640 - DNA, 75 bp, synthetic construct
  source 1..75: mol_type = other DNA
cctgtcgtggtcggttgattttgcagacagatgctcagggggcgtggtttgagcatgatttacatgccctgagcg

SEQ ID NO: 56641 - DNA, 75 bp, synthetic construct
  source 1..75: mol_type = other DNA
ccgcgtacacgggttagaaggcctgcgtgtggtggatgcgtcgattatgccgcagattatcaccgggaatttgaa

SEQ ID NO: 56642 - DNA, 75 bp, synthetic construct
  source 1..75: mol_type = other DNA
acatcctgatcaggatgtattaaatatgttattggcagacaaacttgtttatgctgatattaaatataacactca

SEQ ID NO: 56643 - DNA, 75 bp, synthetic construct
  source 1..75: mol_type = other DNA
agcagcttctggcaaattaccagtctgtgccaaacaatatcatttctgccatcgttgaagctaaccgtacccgca

SEQ ID NO: 56644 - DNA, 75 bp, synthetic construct
  source 1..75: mol_type = other DNA
gcatcagaaataatttagaaaattctgataaaacgaataaaaaattctcgatggtaaaactatcggtgatttttt

SEQ ID NO: 56645 - DNA, 75 bp, synthetic construct
  source 1..75: mol_type = other DNA
atgtctcagaacttagacgcaaccgcaattaatcaaatccatgcccttatttctgctcagggtgttaatgaaatt

SEQ ID NO: 56646 - DNA, 75 bp, synthetic construct
  source 1..75: mol_type = other DNA
cgctgaaagggccttccatcatgcctggtgggcagaaagaagcctatgaactggttgctccgatcttgaccaaaa

SEQ ID NO: 56647 - DNA, 75 bp, synthetic construct
  source 1..75: mol_type = other DNA
ccgggaaaacatcactattcgtctggatgatcacattcagtctgttcagggtaaagagcgctatgaagacgagat

SEQ ID NO: 56648 - DNA, 75 bp, synthetic construct
  source 1..75: mol_type = other DNA
aaaaggtagtatcagaaaagtacctggagggagagctgagtctgaaatctgtagcaaggatgtacggtatcagtc

SEQ ID NO: 56649 - DNA, 75 bp, synthetic construct
  source 1..75: mol_type = other DNA
tcagccagcccatcacgctggacgagcaaacgcaaaagatgaagcggcatttgctacaggatatccgtcgctcag

SEQ ID NO: 56650 - DNA, 75 bp, synthetic construct
  source 1..75: mol_type = other DNA
tggtgaatcgtattttgtccaataaccacagccatcgtcgcgatatggatgtaacgatcgttgttcattcgcctg

SEQ ID NO: 56651 - DNA, 75 bp, synthetic construct
  source 1..75: mol_type = other DNA
cgcgggaaggcgattttgaccgctcattctctgatggcgttctcgaagatatcgctgaacagcttcgcaaaggag

SEQ ID NO: 56652 - DNA, 75 bp, synthetic construct
  source 1..75: mol_type = other DNA
tcagccagcccatcacgctggacgagcaaacgcaaaagatgaagcagcatttgctacaggatatccgtcgctcgg

SEQ ID NO: 56653 - DNA, 75 bp, synthetic construct
  source 1..75: mol_type = other DNA
gggcagattctttcgcccccatcgcatacgtgcagccgggctcctttggtgccgctgccggtgccgtcaatgcca

SEQ ID NO: 56654 - DNA, 75 bp, synthetic construct
  source 1..75: mol_type = other DNA
ggttaatgtggcaattgataagcaacaaggactttcatgcacaatcaccttcggtaaagagattgatgaaagtag

SEQ ID NO: 56655 - DNA, 75 bp, synthetic construct
  source 1..75: mol_type = other DNA
gattaactggtcggtcgttaaagactggagcgagcaatttagatacgacaataacataagtaaagctatggccga

SEQ ID NO: 56656 - DNA, 75 bp, synthetic construct
  source 1..75: mol_type = other DNA
taagttgcatgtgacagatattaccaaaagtgcgacttacccggtactgatagacagcattgcggtggtagtgaa

SEQ ID NO: 56657 - DNA, 75 bp, synthetic construct
  source 1..75: mol_type = other DNA
tattgttgaaaatcactggcaggacgcgcatttcgacgcctttcaggaggggttgctttcttttactgcggcatt

SEQ ID NO: 56658 - DNA, 75 bp, synthetic construct
  source 1..75: mol_type = other DNA
ttgtcgaagtcgtgcgccagcaaagcttcacccgcgcagcggagaagttgtttgtcacccaaccaactatcagca

SEQ ID NO: 56659 - DNA, 75 bp, synthetic construct
  source 1..75: mol_type = other DNA
tgagtacgtttgagcagctacaccagaataaggatgaagtgtttgagcgaggagtgatcaacctcttcagagggt

SEQ ID NO: 56660 - DNA, 75 bp, synthetic construct
  source 1..75: mol_type = other DNA
tcggtatggcagtgatggggcgcaatcttgcgcttaacatcgaaagccgtggttataccgtctctattttcaacc

SEQ ID NO: 56661 - DNA, 75 bp, synthetic construct
  source 1..75: mol_type = other DNA
ctcagggcttctctcagctgcgtgctgcgtctgaagagtacaactgggatctgaactacggcgaaatcgcgaaga

SEQ ID NO: 56662 - DNA, 75 bp, synthetic construct
  source 1..75: mol_type = other DNA
tggttcacaacggtattgaatacggcgatatgcaactgattgctgaagcctattctctgcttaaaggtggcctga

SEQ ID NO: 56663 - DNA, 75 bp, synthetic construct
  source 1..75: mol_type = other DNA
cgtgacgtatgagaaatccggccatgtcattacggggctttgtcttgtcggggatgctgatggcgataactcagc

SEQ ID NO: 56664 - DNA, 75 bp, synthetic construct
  source 1..75: mol_type = other DNA
tcgaccggctggaaagtgaaatcctggctgaccgggtgagtgaggaaagccgccgctggctggcatcgtgcggcc

SEQ ID NO: 56665 - DNA, 75 bp, synthetic construct
  source 1..75: mol_type = other DNA
gcaatccatagtgatgatggcagaactggcaattcgtggtccggaaaagttccagaaacgagtgttctggaaagg

SEQ ID NO: 56666 - DNA, 75 bp, synthetic construct
  source 1..75: mol_type = other DNA
attatgcgactggtgtaaatattcaatgggattataccagtaatgccagcgtgacgattcatacgtcaccagcat

SEQ ID NO: 56667 - DNA, 75 bp, synthetic construct
  source 1..75: mol_type = other DNA
ggtgcagatagccatatttcttccgcgcagggcggtggtctcgtcaccagtggttcagacgcgacaatcaatttt

SEQ ID NO: 56668 - DNA, 75 bp, synthetic construct
  source 1..75: mol_type = other DNA
accggtggggattgcatcttatcaccgggcaacaggcagatcgactcgccgacctggaaagaatgctgtatctgt

SEQ ID NO: 56669 - DNA, 75 bp, synthetic construct
  source 1..75: mol_type = other DNA
ataactttcacctacaaaggagttaaatgtcgtgagcctctttccaatctggaagtaacaccaaagaacattaaa

SEQ ID NO: 56670 - DNA, 75 bp, synthetic construct
  source 1..75: mol_type = other DNA
ggcgtcagcttcaaaagatgaggcggcaaggctggcgtcagaggcgcagggcagtgccacgacggcatccgcgaa

SEQ ID NO: 56671 - DNA, 75 bp, synthetic construct
  source 1..75: mol_type = other DNA
atggagaaacctgaaaccgcaatgaaagccatcacacgcaatctcgatcgcgaaatctggcgtgacctgatgcaa

SEQ ID NO: 56672 - DNA, 75 bp, synthetic construct
  source 1..75: mol_type = other DNA
acgcagaatagatctctatgtaatgatatggaatactctggtattgtctgtaaagatactaatggaaaatatttt

SEQ ID NO: 56673 - DNA, 75 bp, synthetic construct
  source 1..75: mol_type = other DNA
atggcggcgaatcgcacaatgctgatggcaggctggggaattcagcgccagcaatatggtgaacagaaacactgg

SEQ ID NO: 56674 - DNA, 75 bp, synthetic construct
  source 1..75: mol_type = other DNA
cgggcaacaggctgatcgacttgccgatctggaaagaatgctacacctgttcagcggcaaaccgatccccgacaa

SEQ ID NO: 56675 - DNA, 75 bp, synthetic construct
  source 1..75: mol_type = other DNA
tcggacggggcgttggtggcagtagctgtaacattggtatggccgatattaaaaacagcttctaaggatcagtga

SEQ ID NO: 56676 - DNA, 75 bp, synthetic construct
  source 1..75: mol_type = other DNA
atgcctttctctacggatgattccgttgatcaccccgtatctctgtatgcggcaaccaaaaaagccaacgaactg

SEQ ID NO: 56677 - DNA, 75 bp, synthetic construct
  source 1..75: mol_type = other DNA
atggagaaacctgaaacggcaatgaaagccatcacacacaatctcgatcgtgaaatctggcgtgacttgatgcaa

SEQ ID NO: 56678 - DNA, 75 bp, synthetic construct
  source 1..75: mol_type = other DNA
tcacgggcgcagtatcgcaattcatgttatcacgttgataatattatgcagatgtttacaggagtcgtttcaacc

SEQ ID NO: 56679 - DNA, 75 bp, synthetic construct
  source 1..75: mol_type = other DNA
gaaagatgcgctgaaaggcaaagtgcaggaaacgctgtctgcggtggcggatgacggtatcgagcagagcggctt

SEQ ID NO: 56680 - DNA, 75 bp, synthetic construct
  source 1..75: mol_type = other DNA
caaaaagctggtgacgacagaatttgtggcgagggcgattgctgcgcttgcaggtacagccccagaaacactgga

SEQ ID NO: 56681 - DNA, 75 bp, synthetic construct
  source 1..75: mol_type = other DNA
cgaaatctggcgtgacctgatgcaatgttccgggatgctttccttaatggatgcacaggcccgtgatacatggta

SEQ ID NO: 56682 - DNA, 75 bp, synthetic construct
  source 1..75: mol_type = other DNA
tggtttacagcgtgcaagtgctgaacgttcaattgatttcgtatttgataaagatgcaggtcaagtaaaagagtt

SEQ ID NO: 56683 - DNA, 75 bp, synthetic construct
  source 1..75: mol_type = other DNA
ccttactgacgaataccgtctccacccgcaaaattgatctggccggtgaaaaagccctgctgggcgtggatgtgc

SEQ ID NO: 56684 - DNA, 75 bp, synthetic construct
  source 1..75: mol_type = other DNA
ccgtcgtatctggcgaaagttgcatcttgctgttgacagcaacacacatgaagttgtctgtgcagacctgtcgct

SEQ ID NO: 56685 - DNA, 75 bp, synthetic construct
  source 1..75: mol_type = other DNA
acagaaaaatcagggcagccgcggcagacggggcttacgatacccggctctgtcacgatgaactgcgccgcaaaa

SEQ ID NO: 56686 - DNA, 75 bp, synthetic construct
  source 1..75: mol_type = other DNA
agacccaacaaaccgcctacgcccgatccaagtaaattgccggacatagcgaaacaattaagactgccatatcct

SEQ ID NO: 56687 - DNA, 75 bp, synthetic construct
  source 1..75: mol_type = other DNA
ccttgccgaaggcgaagaagctctcagcttcagtgagtttaaacaggcgctttccagttcggcaaaatctatcga

SEQ ID NO: 56688 - DNA, 75 bp, synthetic construct
  source 1..75: mol_type = other DNA
aatccggtggcgcttacctgtcccgtgtcctgattgaagctgccatgacacccgcgcgggatatcccggttctgc

SEQ ID NO: 56689 - DNA, 75 bp, synthetic construct
  source 1..75: mol_type = other DNA
accgaactcgcggcacatgctggaacacatcgaacgcctcaaggcgtggcaggcgctcgacctgccctccggcat

SEQ ID NO: 56690 - DNA, 75 bp, synthetic construct
  source 1..75: mol_type = other DNA
ataccagtccacccacgttagtgtggccagttccacttctgcacggtttttccagctcttacggtgtattacctc

SEQ ID NO: 56691 - DNA, 75 bp, synthetic construct
  source 1..75: mol_type = other DNA
cggtacgtgtgccaaccataaatgtgacggcaatcgatttaagcgtgacggtgaagaaacctgtaaaagccaatg

SEQ ID NO: 56692 - DNA, 75 bp, synthetic construct
  source 1..75: mol_type = other DNA
ccagttgggcgctggcacaacgaattggttatctctattcagagggcgagattatttatctcgccgatacgccat

SEQ ID NO: 56693 - DNA, 75 bp, synthetic construct
  source 1..75: mol_type = other DNA
ataaagctacgtaccaataccgagaggctctaataaaggctgtacttgagcctgacaccccaaaccatgcgatag

SEQ ID NO: 56694 - DNA, 75 bp, synthetic construct
  source 1..75: mol_type = other DNA
gaatgccggaggtgaaccttttgcggtcgttcaggttcttcgtcgtttctcgccggaggctgtctgccacacatt

SEQ ID NO: 56695 - DNA, 75 bp, synthetic construct
  source 1..75: mol_type = other DNA
cggcgacatacctggcaccgtagagatgtagaagcatggttagataaacaacgagaacaggccaatccccactaa

SEQ ID NO: 56696 - DNA, 75 bp, synthetic construct
  source 1..75: mol_type = other DNA
atccagttgtgtatagtacacatggtacgcaacagcctgcggttcgtggcgtggaaagactataaagcggtaacc

SEQ ID NO: 56697 - DNA, 75 bp, synthetic construct
  source 1..75: mol_type = other DNA
cctggctgttaaagcagcaggactggtttcaggaactagcggaaagactcattcaacaggatgacctgacagata

SEQ ID NO: 56698 - DNA, 75 bp, synthetic construct
  source 1..75: mol_type = other DNA
tcgcaaaagccgggaaacgtttgcagcggtgtacacattacttgaacggtctgcccgccagtgggcgcaggcatt

SEQ ID NO: 56699 - DNA, 75 bp, synthetic construct
  source 1..75: mol_type = other DNA
ctctggttatccatgccggagatcaagttgaccggggcaataatgctatttttccaccgattactaccgccagtt

SEQ ID NO: 56700 - DNA, 75 bp, synthetic construct
  source 1..75: mol_type = other DNA
gcgcaaaatgacagccaacagttgctcgacgaaatcgtccaacaagagggactggaatatgcgactgaggtggtg

SEQ ID NO: 56701 - DNA, 75 bp, synthetic construct
  source 1..75: mol_type = other DNA
ttttactcctgcgtgctcctgtttattctgtatttttgtttttctgccctgactgacctgcagaaaaccgatgaa

SEQ ID NO: 56702 - DNA, 75 bp, synthetic construct
  source 1..75: mol_type = other DNA
ttctactggtggacgctggagtgaagtgtctaatttaaaagctgaacacatcattaaccagatggttacgtttat

SEQ ID NO: 56703 - DNA, 75 bp, synthetic construct
  source 1..75: mol_type = other DNA
cagtgcagagaaaatcggccagttttctctgcctgcagtccgcatgccgtatcgggccttgggttctaacctgtt

SEQ ID NO: 56704 - DNA, 75 bp, synthetic construct
  source 1..75: mol_type = other DNA
gctgcatgtggctaaccgcgagctgcgccgggcaaaaggtcaggttcagaagtgggagcgagtctgcgccgcgct

SEQ ID NO: 56705 - DNA, 75 bp, synthetic construct
  source 1..75: mol_type = other DNA
tataaaagcagtgatatggtaagcaaaacagacagtatttatataggaaatagcagttttcagacatatcatgga

SEQ ID NO: 56706 - DNA, 75 bp, synthetic construct
  source 1..75: mol_type = other DNA
ttgagcggcggcaatcagcaaaaagcgatcctcgctcgctgtctgttacttaacccgcgcattctcattcttgat

SEQ ID NO: 56707 - DNA, 75 bp, synthetic construct
  source 1..75: mol_type = other DNA
tactcagacgtcgataaaccgccgttcggtgataaaaacgtccggggcacgaagtacgctgatggcgcggagttc

SEQ ID NO: 56708 - DNA, 75 bp, synthetic construct
  source 1..75: mol_type = other DNA
gccgggatgaatccggtggactatacggtgaaatccctgaaagagggttctatccgtttcgctgcggaacagccg

SEQ ID NO: 56709 - DNA, 75 bp, synthetic construct
  source 1..75: mol_type = other DNA
cagagtaccttcaggacgccatttctcttaatccgctaagaggtggtactgaggccgagagtgtccacacagtgt

SEQ ID NO: 56710 - DNA, 75 bp, synthetic construct
  source 1..75: mol_type = other DNA
gcgacctgctaaggacagaccgcaaatacaacctggatgtgtatagctatatttatgctgaacactatccgctat

SEQ ID NO: 56711 - DNA, 75 bp, synthetic construct
  source 1..75: mol_type = other DNA
tagtgatggccggtggctccggcagccgtttgtggccgctgtcccgagtgctttatcccaaacagttcctgtgcc

SEQ ID NO: 56712 - DNA, 75 bp, synthetic construct
  source 1..75: mol_type = other DNA
gtgtggtttaagcgaaagagaagcaatgctgaaattagcagaatggctacaaagattaagcattgctattgaaga

SEQ ID NO: 56713 - DNA, 75 bp, synthetic construct
  source 1..75: mol_type = other DNA
ccatcaaaatgacaagcattgaaatcgctgagttggtgggaagtcgtccagataacgtaaaaatatcaatagagc

SEQ ID NO: 56714 - DNA, 75 bp, synthetic construct
  source 1..75: mol_type = other DNA
gagggccgtattgacggggatgtgttattcagctggcagtgctatgcgccacggaagcagttcgctgacccggtt

SEQ ID NO: 56715 - DNA, 75 bp, synthetic construct
  source 1..75: mol_type = other DNA
ggtgttgcgttaccagtccaggaaacgacgacacaggaagaaatgaaaacagaaatcgtggaagacattgtgaag

SEQ ID NO: 56716 - DNA, 75 bp, synthetic construct
  source 1..75: mol_type = other DNA
gaaaaaatatcgcccggatattcttgaagcgtgcgaaaaagcgatgagcgtcaccgacccggatctcgatttcat

SEQ ID NO: 56717 - DNA, 75 bp, synthetic construct
  source 1..75: mol_type = other DNA
atgttcaaggagaggatgacaccagatgaacttgccagactgaccggctatagccgccagaccattaataaatgg

SEQ ID NO: 56718 - DNA, 75 bp, synthetic construct
  source 1..75: mol_type = other DNA
gtaacgccggggcactcggcaaaggcgacaaaaacaccgccaggctgttaggcggccccactattgagcactatc

SEQ ID NO: 56719 - DNA, 75 bp, synthetic construct
  source 1..75: mol_type = other DNA
agtcatcgtagatacctgtaaccctgtgcgccacagttcaccgcaccacggcgctggtgatggttactcctgctc

SEQ ID NO: 56720 - DNA, 75 bp, synthetic construct
  source 1..75: mol_type = other DNA
tcaccggtgataatggtttaacgttaaacactgcctccctcagcaatccgggaaaaatcatcgctgacacgctga

SEQ ID NO: 56721 - DNA, 75 bp, synthetic construct
  source 1..75: mol_type = other DNA
aaaatgtcttttctcaagtctaaagatgactaccaaaacatgaaagcagaatggatggttgcaaccgaccaaccc

SEQ ID NO: 56722 - DNA, 75 bp, synthetic construct
  source 1..75: mol_type = other DNA
tgatgatatttgtttgcctgaacggttcgctcttcaacttagctatatgaaatcacaccctgaagttgttctttt

SEQ ID NO: 56723 - DNA, 75 bp, synthetic construct
  source 1..75: mol_type = other DNA
aatccctgctgctgacgcaggcaaaagacgtgcgcatcgccacttactacatctgggcgcgactgcaccgcgacg

SEQ ID NO: 56724 - DNA, 75 bp, synthetic construct
  source 1..75: mol_type = other DNA
ttatcagcgggaacaacgtgcagcttgcgggcggcaatatcaccaacagcggcggcagcatcaacgcacagaacg

SEQ ID NO: 56725 - DNA, 75 bp, synthetic construct
  source 1..75: mol_type = other DNA
atttactaatgatggtcgcaaacttgtcttagctagacattgccaagctgcaatattcaaaaaaccagtaaacaa

SEQ ID NO: 56726 - DNA, 75 bp, synthetic construct
  source 1..75: mol_type = other DNA
tttaattatcgaatctttatctcttcttatcatttcagtaataacttttgcctttacatggagaaaagtaaactg

SEQ ID NO: 56727 - DNA, 75 bp, synthetic construct
  source 1..75: mol_type = other DNA
atgaatatccgtatctggagtggtatactcccctgtatggatatctccgctctcaacaccacgaatgacatcgaa

SEQ ID NO: 56728 - DNA, 75 bp, synthetic construct
  source 1..75: mol_type = other DNA
taccgccagtgttattccgcggtggtaagcatgagaatttcaacagtaataaccaacagtcatactggtattcaa

SEQ ID NO: 56729 - DNA, 75 bp, synthetic construct
  source 1..75: mol_type = other DNA
ctgaacaaaccggaatgtttgccggtgatggtggcttcgacattacagtgggcagacatacccaactggatggtg

SEQ ID NO: 56730 - DNA, 75 bp, synthetic construct
  source 1..75: mol_type = other DNA
gaatcattccccctgtctccaccatttttaccgccgacggccagctcgataagccgggcaccgccgcgctgatcg

SEQ ID NO: 56731 - DNA, 75 bp, synthetic construct
  source 1..75: mol_type = other DNA
ccggaatgcgataacctgcgcactaactggcttaacgtgctgcagcgcaatacccaggataacaaggattactgg

SEQ ID NO: 56732 - DNA, 75 bp, synthetic construct
  source 1..75: mol_type = other DNA
tagctgcatccagagggatagaatttcccaaaacacattggcagacatggcaaaagtatttggggcgtgaatctc

SEQ ID NO: 56733 - DNA, 75 bp, synthetic construct
  source 1..75: mol_type = other DNA
tgacgaggataaaacaccagctccaccagttgcactcaacagcgccttagacttatcggaagatgagtcggagat

SEQ ID NO: 56734 - DNA, 75 bp, synthetic construct
  source 1..75: mol_type = other DNA
cccgtgaccctgaacagcttcgcgctctggcaattgccatggtgcaaaaagccatggctgagagtcagaatcttg

SEQ ID NO: 56735 - DNA, 75 bp, synthetic construct
  source 1..75: mol_type = other DNA
aaacgcgattcctgaatgtccaactgctgcagaacagcatggacgcgccgaaaatcatcggatctttcccgtgta

SEQ ID NO: 56736 - DNA, 75 bp, synthetic construct
  source 1..75: mol_type = other DNA
cctcgacaacattttgaagatgatcgatctcggcgcgtatgtgcagttcgacaccatcggcaagaacagttacta

SEQ ID NO: 56737 - DNA, 75 bp, synthetic construct
  source 1..75: mol_type = other DNA
ggtgctacaaaaacacttcgccctgatgtggctaaacccgtttggcacaactcgcttcgcttacctaaaggtgaa

SEQ ID NO: 56738 - DNA, 75 bp, synthetic construct
  source 1..75: mol_type = other DNA
cgcgtccggcatcacgtccggtgacgaaatttgaacaacgtggtcatcgtcttggtcacggagtatgggacttaa

SEQ ID NO: 56739 - DNA, 75 bp, synthetic construct
  source 1..75: mol_type = other DNA
ttcgaagctgcaggagcatgcagcactggtctacaaaattttttgcatttcagaaagtaatgacgcccgcgagtg

SEQ ID NO: 56740 - DNA, 75 bp, synthetic construct
  source 1..75: mol_type = other DNA
tatcttttgcgcaaaatgataagttggttacttttggaattgttcctaataagatagaaacagcatacggctata

SEQ ID NO: 56741 - DNA, 75 bp, synthetic construct
  source 1..75: mol_type = other DNA
gatgaccaaaaacgtcaagttcctggccggttttgccatcatatctgtatttattgctataggtatgaccgtcgt

SEQ ID NO: 56742 - DNA, 75 bp, synthetic construct
  source 1..75: mol_type = other DNA
ggtgcatttgcttcaggaaaaacaggagacaccgttgcgaatgataaagccgttggatggaactggagtagcgga

SEQ ID NO: 56743 - DNA, 75 bp, synthetic construct
  source 1..75: mol_type = other DNA
cactggacggcctgttctggtctggcagtcagcgtattgcggctgatgtcctgagactaagacagagcggaatgc

SEQ ID NO: 56744 - DNA, 75 bp, synthetic construct
  source 1..75: mol_type = other DNA
gcaaaccttacgcctggaacccaccagttttattgaaaaaagtttacgcgcttactactcggatgttttgtggtc

SEQ ID NO: 56745 - DNA, 75 bp, synthetic construct
  source 1..75: mol_type = other DNA
cagacctcagtgaagagcagaagcagacgataagtacgctggcaaccgtgtcagcagggctggccggcggtctta

SEQ ID NO: 56746 - DNA, 75 bp, synthetic construct
  source 1..75: mol_type = other DNA
caacatcagacagtgaaagcaaaaatacaagcactgacagtacgttatttaatgaaaaattcccatttcaactaa

SEQ ID NO: 56747 - DNA, 75 bp, synthetic construct
  source 1..75: mol_type = other DNA
gagcagaccgtttccccgctgcgcctgaatgatgcgattaaagccggtatggccgaaaccaatgcggagcttgcc

SEQ ID NO: 56748 - DNA, 75 bp, synthetic construct
  source 1..75: mol_type = other DNA
ttttctttctttactgtgtgtttgttcgtggtgtttttgctggtccgtttcctcctcccggcatgacacttcccg

SEQ ID NO: 56749 - DNA, 75 bp, synthetic construct
  source 1..75: mol_type = other DNA
aatggcgagcgtaactcccagaaatcactggcagaatggattgaagactgggccgactaccttgtgggctttgat

SEQ ID NO: 56750 - DNA, 75 bp, synthetic construct
  source 1..75: mol_type = other DNA
atgtcaggcatcacaatctcccgtccggaagtggtcaacgggcatacggacgttatctgctcagccagtatccgc

SEQ ID NO: 56751 - DNA, 75 bp, synthetic construct
  source 1..75: mol_type = other DNA
ccgtaacactgaccgtcaacgggaaaagccatacagcaaccgtcggtagcgacggaacctggcaagtgacgctgc

SEQ ID NO: 56752 - DNA, 75 bp, synthetic construct
  source 1..75: mol_type = other DNA
tcactgacgctggttcgataacgttaaccatcgacgacagccaggccagcgtgcaggtcgccaccaccgcaggcg

SEQ ID NO: 56753 - DNA, 75 bp, synthetic construct
  source 1..75: mol_type = other DNA
cactgctgcaaatcgacacacttatccggcaactggctgaaatctcagttctgacggaaagcattggaggtaaaa

SEQ ID NO: 56754 - DNA, 75 bp, synthetic construct
  source 1..75: mol_type = other DNA
ccggtcactggagtacgataattttccggaaatcagcgaagcgaacattctgagcacatttgaacaactgcacca

SEQ ID NO: 56755 - DNA, 75 bp, synthetic construct
  source 1..75: mol_type = other DNA
ataccaataggtgtacctcattttattgagaatccaggaaagatccctttggagattattgaggtacgttcaggt

SEQ ID NO: 56756 - DNA, 75 bp, synthetic construct
  source 1..75: mol_type = other DNA
gttaattttctttatgagccatcggaaagaccatattgtcatcacgcctctgtccgggttgacgaaaaagagcgt

SEQ ID NO: 56757 - DNA, 75 bp, synthetic construct
  source 1..75: mol_type = other DNA
agattattgatcaagaactctatgacatgttgagtgcacgtccgctgggtgttcagccgcgcggtggggtgatct

SEQ ID NO: 56758 - DNA, 75 bp, synthetic construct
  source 1..75: mol_type = other DNA
aaaagaggatgacccacgtaatcaggttaattttctttatgaaccatcggaaagaccatattgccatcatgcctc

SEQ ID NO: 56759 - DNA, 75 bp, synthetic construct
  source 1..75: mol_type = other DNA
gcatcagccgcagaacactcgttaaatctaccgcgataggttctctggcgctggctgcaggcggtttttctttgc

SEQ ID NO: 56760 - DNA, 75 bp, synthetic construct
  source 1..75: mol_type = other DNA
cacggtaagaatcagtgatgatcagaagtttgaccggcaggtcatgataccgccagtgttattccgcggtggtaa

SEQ ID NO: 56761 - DNA, 75 bp, synthetic construct
  source 1..75: mol_type = other DNA
gataaagggctcgtgaatacacttcagctcggagatctgccggttttccgctggagtcgttctgtagttcctggc

SEQ ID NO: 56762 - DNA, 75 bp, synthetic construct
  source 1..75: mol_type = other DNA
aggctgagaaaggccggaatgccggtggtgactacgaccgtggaggtacacgataacctgacgggaaccacccgc

SEQ ID NO: 56763 - DNA, 75 bp, synthetic construct
  source 1..75: mol_type = other DNA
tgtatcagcgaaagctggatctggaagagaaaatgagcgcaacaagggcaattatcccgggaattgttcttttct

SEQ ID NO: 56764 - DNA, 75 bp, synthetic construct
  source 1..75: mol_type = other DNA
atatatactttttacggattatctactgaaacaacaaagtcatttgtttctcaggaaacggcgaaaaatcttaaa

SEQ ID NO: 56765 - DNA, 75 bp, synthetic construct
  source 1..75: mol_type = other DNA
agatgacaatatggatgacgtatctctcgcggaagacttcgggttcaatcatgcaatagaacggatgaggagaca

SEQ ID NO: 56766 - DNA, 75 bp, synthetic construct
  source 1..75: mol_type = other DNA
gtcagcacgggatgaaataccgttcggactcgatgaagatcaaaacaacatgcttaccgcattaaaaattgcact

SEQ ID NO: 56767 - DNA, 75 bp, synthetic construct
  source 1..75: mol_type = other DNA
tatgggcttctctgaaacgcatctcagatgctacgtcctacatgacgacgaagatggccagcacatccatatcat

SEQ ID NO: 56768 - DNA, 75 bp, synthetic construct
  source 1..75: mol_type = other DNA
cggtggcgcagagcatttaggtctatggagaaacagcagttcagcaatagcttcttttgaacgacattaccctga

SEQ ID NO: 56769 - DNA, 75 bp, synthetic construct
  source 1..75: mol_type = other DNA
gtggtgaccacgaccgtggaggtgcacgataacctgacaggaacaacccgcaaagtaccggcataccatctctga

SEQ ID NO: 56770 - DNA, 75 bp, synthetic construct
  source 1..75: mol_type = other DNA
cgtctgatcccgctcagtctcgcctggcgttcgcttgccgatcatcaaagtgccgccgctaacgacattcgtcag

SEQ ID NO: 56771 - DNA, 75 bp, synthetic construct
  source 1..75: mol_type = other DNA
acgggctggtcgggcaggggcgtgcttatctgcgttcggaaaaaaatctctacatgaagtggagtatgccaacgg

SEQ ID NO: 56772 - DNA, 75 bp, synthetic construct
  source 1..75: mol_type = other DNA
gaaatttagaccagatatttatcatagctgtgaatgtgcaaccgctacagcaaatatagatatggactttgtccg

SEQ ID NO: 56773 - DNA, 75 bp, synthetic construct
  source 1..75: mol_type = other DNA
tcgccaataagtggaatggcactgatggtccgtggggcgtatggcgtcacactcaatcagctacccgccctttga

SEQ ID NO: 56774 - DNA, 75 bp, synthetic construct
  source 1..75: mol_type = other DNA
tatcggccacgttgaccagggtaaaactactctgaccgctgcaatcaccaccgtactggctaaaacctacggcgg

SEQ ID NO: 56775 - DNA, 75 bp, synthetic construct
  source 1..75: mol_type = other DNA
atgcgctggatgcggtacgtgcaacaagttgagaccactgataccactgaattacccgttacgttccctgatcaa

SEQ ID NO: 56776 - DNA, 75 bp, synthetic construct
  source 1..75: mol_type = other DNA
tgtttggctgtttttttgtgctggtctttattggtgtgcccatttcgttctcaatcggtattgccactgtagctt

SEQ ID NO: 56777 - DNA, 75 bp, synthetic construct
  source 1..75: mol_type = other DNA
taaatggatgttcaaagatggcgtagtgataaagcgaacttataccgaggaggaacagaggcagcaggcagagaa

SEQ ID NO: 56778 - DNA, 75 bp, synthetic construct
  source 1..75: mol_type = other DNA
ttatttgtattgaaaaggatgtttcagcaattaatccggaaggcgcaagcgtcgttgaattacctgatattacag

SEQ ID NO: 56779 - DNA, 75 bp, synthetic construct
  source 1..75: mol_type = other DNA
atttcctgtactggtggaagatgtggtgatgatgggccgctatgggcatatgggtatgttgcgtatcgccaaaaa

SEQ ID NO: 56780 - DNA, 75 bp, synthetic construct
  source 1..75: mol_type = other DNA
acacgtatccagacggtatacgagccgggaagcttcacgccgctcatccgggtcgagacagagaacggcgagcgg

SEQ ID NO: 56781 - DNA, 75 bp, synthetic construct
  source 1..75: mol_type = other DNA
agttctggctggagaagataggtaaaaatgttgagcgcgatcgccgcgatatcagtcgcttgcaggaactcggct

SEQ ID NO: 56782 - DNA, 75 bp, synthetic construct
  source 1..75: mol_type = other DNA
accgacttcccggtggccgccttaagtcttatcgtcgtgtaggttcacattttgccagttgtgccagatggtttg

SEQ ID NO: 56783 - DNA, 75 bp, synthetic construct
  source 1..75: mol_type = other DNA
gctaagtcgacaggaaaaccggatcaacgccgacgcgataataaagatactcctggcaatactccgggactaaag

SEQ ID NO: 56784 - DNA, 75 bp, synthetic construct
  source 1..75: mol_type = other DNA
gactatatggggcgactccagtcacagacggatgcagcaggccggacaacagaatacagtccgaatgtggtgacg

SEQ ID NO: 56785 - DNA, 75 bp, synthetic construct
  source 1..75: mol_type = other DNA
attttctgaccctgctgggctggctggttaataacggtctgtgggatttgctgatcggcacgggactgtttgcgc

SEQ ID NO: 56786 - DNA, 75 bp, synthetic construct
  source 1..75: mol_type = other DNA
aagccaaaattcacaacggcgcgaagctgattgtgatcgatcctcgctttacgcgtacggcggcggtagctgact

SEQ ID NO: 56787 - DNA, 75 bp, synthetic construct
  source 1..75: mol_type = other DNA
cggtatcttcctgcgcttgcgcaagatgtatgccgaacagggtggcgcgaacccggaccaggtgctgaacatgac

SEQ ID NO: 56788 - DNA, 75 bp, synthetic construct
  source 1..75: mol_type = other DNA
caagtgattacctgccacagacaaattggccaacaactcaattaccaccaggatatacttgtgcagaaccctatt

SEQ ID NO: 56789 - DNA, 75 bp, synthetic construct
  source 1..75: mol_type = other DNA
tcgcgaaggccttgtctacgcccatgaaggcaacaaaggtttctccgaactcgtcgccgaaggtgcctacaaaac

SEQ ID NO: 56790 - DNA, 75 bp, synthetic construct
  source 1..75: mol_type = other DNA
gacaagggctttatctcacatatgccaaaaactaaggaggatgcattaagcatcgtcaaacagatagaggcaaaa

SEQ ID NO: 56791 - DNA, 75 bp, synthetic construct
  source 1..75: mol_type = other DNA
tgggccagcaacagcagggatagatgatttgggtgaaattttagctaagatgaaacagagaacatcgagaggaat

SEQ ID NO: 56792 - DNA, 75 bp, synthetic construct
  source 1..75: mol_type = other DNA
catcagcagcccgcgccagacccggagttacagctacagcaccaccggcaggctgaccggcgttcacaccaccgc

SEQ ID NO: 56793 - DNA, 75 bp, synthetic construct
  source 1..75: mol_type = other DNA
tgcacataacgccagcgttctctattcctacatttcatcaattcatcaggtctggctgcagcagctttatcccat

SEQ ID NO: 56794 - DNA, 75 bp, synthetic construct
  source 1..75: mol_type = other DNA
gcggaagggatagcgatggatgccagtggcaacatctatatcgttggcgaacccaatcttttttatcgctttacg

SEQ ID NO: 56795 - DNA, 75 bp, synthetic construct
  source 1..75: mol_type = other DNA
aatgagtctggttataaaaccacgctcttccatacctttaaagtcaataccagtatgttgacctcgcgtccggaa

SEQ ID NO: 56796 - DNA, 75 bp, synthetic construct
  source 1..75: mol_type = other DNA
agaagtgcttataccaggattacgcgtggaattttgccgcgtaaatggcctgcgaggaccaacagcggcaaatgt

SEQ ID NO: 56797 - DNA, 75 bp, synthetic construct
  source 1..75: mol_type = other DNA
gcggaagggatagcgatggatgacagcggcaacatttatatcgttggcgaaccgaatcttttttatcgctttacg

SEQ ID NO: 56798 - DNA, 75 bp, synthetic construct
  source 1..75: mol_type = other DNA
ttgcctggcgtaaaaaaaagaaagttgtttgcaattcaagaatacatctgctgatgctggtaatgatattgttca

SEQ ID NO: 56799 - DNA, 75 bp, synthetic construct
  source 1..75: mol_type = other DNA
cggtcgctggttgcagtggcactggaaaggtcaggatgcgccgggcgaagcgcgtaacgacggcgaaattctggc

SEQ ID NO: 56800 - DNA, 75 bp, synthetic construct
  source 1..75: mol_type = other DNA
gttgtcgaggttcctgatattaccgccaaccgacgtgctgatgactcaggtaaatggatgtttaaggatggtgcc

SEQ ID NO: 56801 - DNA, 75 bp, synthetic construct
  source 1..75: mol_type = other DNA
accgagtggatgctctttgcgcagaaagtcgaatctacagacacctccagcctgccagtaacgtttcccgaacaa

SEQ ID NO: 56802 - DNA, 75 bp, synthetic construct
  source 1..75: mol_type = other DNA
ttcgatactggatggagtaactattcagggtgtgctttaccagatcatctgggatccaaagactccgttcgctgc

SEQ ID NO: 56803 - DNA, 75 bp, synthetic construct
  source 1..75: mol_type = other DNA
aacatgtcaataaaaccgactcggcggtacgcgccacgcatctggcatccggtattagcgtgaaggttcagtcag

SEQ ID NO: 56804 - DNA, 75 bp, synthetic construct
  source 1..75: mol_type = other DNA
aataccgacagcgcggaatataagctactgatgcgtactctggctttgttcactagtgcaaaaacgctgggatca

SEQ ID NO: 56805 - DNA, 75 bp, synthetic construct
  source 1..75: mol_type = other DNA
gccatttctcgacaaatattgtgttggttacgatgaaaaaacgctgcccgccaacgcaccacgtaacgcgcatta

SEQ ID NO: 56806 - DNA, 75 bp, synthetic construct
  source 1..75: mol_type = other DNA
tcgtttatctttacccttttctcgcttgagctttcgcagtttggcacccaactcgccccactgtggttcccgacg

SEQ ID NO: 56807 - DNA, 75 bp, synthetic construct
  source 1..75: mol_type = other DNA
gggttcaacaggtttaacggcggccatcaaccagatgaccaaaacgacgattgctgaacaggccagcctgcaaca

SEQ ID NO: 56808 - DNA, 75 bp, synthetic construct
  source 1..75: mol_type = other DNA
gctgcggatgggtaaaaaagagcagttcccgtatgtgggtacgacctatcgtctgaccgagcacttccacacctg

SEQ ID NO: 56809 - DNA, 75 bp, synthetic construct
  source 1..75: mol_type = other DNA
attcacaattatatttttagtgttgaatgtacttacaaactcaaaaccagaattgaataatattcaggttatatt

SEQ ID NO: 56810 - DNA, 75 bp, synthetic construct
  source 1..75: mol_type = other DNA
gatacggacggacgacgagcggacccaccactaccactacgacagccagcaccgcctggtgttctacacgcggat

SEQ ID NO: 56811 - DNA, 75 bp, synthetic construct
  source 1..75: mol_type = other DNA
ttactcctgattttgaatcatcctcgttttcggaagtattcggattgggtgatgtttaatcaaactaatgctgcg

SEQ ID NO: 56812 - DNA, 75 bp, synthetic construct
  source 1..75: mol_type = other DNA
attactatgccggagattttctggtcgataagtaatttccagtccgtcgcttcgcaaatgcccgtgctgggcatt

SEQ ID NO: 56813 - DNA, 75 bp, synthetic construct
  source 1..75: mol_type = other DNA
gaacatggggcgaattatcgttgacgtcgatggtgttaatctcactgaactgattaacaaggtcgctgaaaacgg

SEQ ID NO: 56814 - DNA, 75 bp, synthetic construct
  source 1..75: mol_type = other DNA
gatgtacagtggcgcgcctcatagcggttatgggacttgccggtgttctccggggtaaaaaggtccgcactaccg

SEQ ID NO: 56815 - DNA, 75 bp, synthetic construct
  source 1..75: mol_type = other DNA
ccacgacgaactggatctgcctcctggcgtcgccaaatttaagttgggtggcggtcatggtggtcacaatggact

SEQ ID NO: 56816 - DNA, 75 bp, synthetic construct
  source 1..75: mol_type = other DNA
aaaggcaacattgagcataccggcgggtcactgtcgtcaaatggcaaggtactccatacccataaacaccccggc

SEQ ID NO: 56817 - DNA, 75 bp, synthetic construct
  source 1..75: mol_type = other DNA
tggtgatgtaaacaatgccagttttggctatgataaaaataattatactgtagtaaagaacaacaaacattcggg

SEQ ID NO: 56818 - DNA, 75 bp, synthetic construct
  source 1..75: mol_type = other DNA
tcattgaaggcaaagagggtattaccatcgttgatccccttgtttcagcagaaacagccaaagtgggtatggatc

SEQ ID NO: 56819 - DNA, 75 bp, synthetic construct
  source 1..75: mol_type = other DNA
cggcacacaatttgtgaaacaggctgtcacgttctttggtccggatcgtcatttcgaagaatcctgggaagttcc

SEQ ID NO: 56820 - DNA, 75 bp, synthetic construct
  source 1..75: mol_type = other DNA
atagcagccgactgggagaaggtgtcggtgaattagcccgtcagatgttaatgagtgatagttgtaaaatcgcca

SEQ ID NO: 56821 - DNA, 75 bp, synthetic construct
  source 1..75: mol_type = other DNA
gcgtgatgctctcggacctcattcagagcctatcctaaaagctcttgagctacatcatcaacagggaacaggtta

SEQ ID NO: 56822 - DNA, 75 bp, synthetic construct
  source 1..75: mol_type = other DNA
gatctggtggaaaggcccgacgtggacgctgtatgaagaacagtggctcaaaccactggcgaaccgctggctggc

SEQ ID NO: 56823 - DNA, 75 bp, synthetic construct
  source 1..75: mol_type = other DNA
cgcagaaggataagttcggcgcgggtaagaacggttttacccgtggtaacccccaaaccggcacacctgccaccg

SEQ ID NO: 56824 - DNA, 75 bp, synthetic construct
  source 1..75: mol_type = other DNA
gggtatcgggcgacgacggtggtgtttgtttccgataccgtggcgcttagcaaagtgtcaggtaacgagcttctg

SEQ ID NO: 56825 - DNA, 75 bp, synthetic construct
  source 1..75: mol_type = other DNA
tcaagtacaaccgagacagcaaaggcgagcgtcacgtaatagttaacggcgtcctgatggtcacgccaggcaaaa

SEQ ID NO: 56826 - DNA, 75 bp, synthetic construct
  source 1..75: mol_type = other DNA
ggcgattgtgtttaaagacgataatgcggttgggttttttgaggatgttcaggaggggatagaggagtataaaaa

SEQ ID NO: 56827 - DNA, 75 bp, synthetic construct
  source 1..75: mol_type = other DNA
atttagtaagactatcgatctggaaactgctggcggagtcattgatcgggacaccattaaatggtggcttaagca

SEQ ID NO: 56828 - DNA, 75 bp, synthetic construct
  source 1..75: mol_type = other DNA
cgttattcgcttgaggagttgttggcgcagtgcgatccgcacgcagaaatgagcgaagaggatcgggaatggatt

SEQ ID NO: 56829 - DNA, 75 bp, synthetic construct
  source 1..75: mol_type = other DNA
tgcccgtggcgttactacaacgatcgcgatgtacgcacaatcgttgagctggggaaagccatagacttcgatgcc

SEQ ID NO: 56830 - DNA, 75 bp, synthetic construct
  source 1..75: mol_type = other DNA
tcaggcattacgcaggactggagcatcgccgatggacaatggctggttttttcggatatgaccaataatgccagc

SEQ ID NO: 56831 - DNA, 75 bp, synthetic construct
  source 1..75: mol_type = other DNA
cgctgctgaacagcggactggagccgcagccggtgagcctgaccgtgacgctgcccctgagtgagtattacgacg

SEQ ID NO: 56832 - DNA, 75 bp, synthetic construct
  source 1..75: mol_type = other DNA
atgcgagaagataaactaaagtatttgcttgaaatttatagagaaaatgaaagaaagataaaagagctggaacag

SEQ ID NO: 56833 - DNA, 75 bp, synthetic construct
  source 1..75: mol_type = other DNA
agtcttatcgcacgcccactgggcggcattatgtttttaaaaatttgaatattatttttcctaaaggctataaca

SEQ ID NO: 56834 - DNA, 75 bp, synthetic construct
  source 1..75: mol_type = other DNA
tattgaaaaatataaccagcttatgagaattgaggatgaactgggttcatcggcgcaatttgccggaaagtctgc

SEQ ID NO: 56835 - DNA, 75 bp, synthetic construct
  source 1..75: mol_type = other DNA
tcgttatggaattctttgtcctgatctgcccgctttgcgggcaggctaacgaacgtattgtgtttgttgaaggtt

SEQ ID NO: 56836 - DNA, 75 bp, synthetic construct
  source 1..75: mol_type = other DNA
cggcagcgaagaccagcgaaacgaatgccaaagccagcgaaactgcggcgaaaaacagtcaggatgcagcagccc

SEQ ID NO: 56837 - DNA, 75 bp, synthetic construct
  source 1..75: mol_type = other DNA
cgcgcatcaacggcaacatatatcaataaatctggcgaactgaaaacggcggaaattaatgagccacgatttgaa

SEQ ID NO: 56838 - DNA, 75 bp, synthetic construct
  source 1..75: mol_type = other DNA
gagcgcggcgcaggcgcatccatccctccgttcagcaccctggtgtttgaagtcgaactgctggaaatcctctaa

SEQ ID NO: 56839 - DNA, 75 bp, synthetic construct
  source 1..75: mol_type = other DNA
gataccgtttaacgattcactggatatgattacgggcttttcgccgtcatataaaaagattgttattggtgatga

SEQ ID NO: 56840 - DNA, 75 bp, synthetic construct
  source 1..75: mol_type = other DNA
cgcactatgcggatgccattcgttataatgctcgaacgcctctgcaaggttctttgctgccgttaacccgtctgg

SEQ ID NO: 56841 - DNA, 75 bp, synthetic construct
  source 1..75: mol_type = other DNA
agctcgcgcgcgcgattcgcaacctcatccgctcaggtgtggtgactgaggttgataccgtgcaggggctgtgcc

SEQ ID NO: 56842 - DNA, 75 bp, synthetic construct
  source 1..75: mol_type = other DNA
tggtctgacctttaccgacctgctacgttctaaaacctatcgcggcaacgtgctgatatacgcggcctgttcagc

SEQ ID NO: 56843 - DNA, 75 bp, synthetic construct
  source 1..75: mol_type = other DNA
gatttgccagcagggtgagaaactgtatgcgatacaaccagaagaaacgctaacgctggacgttaaaacgcaacg

SEQ ID NO: 56844 - DNA, 75 bp, synthetic construct
  source 1..75: mol_type = other DNA
gatcggggagcagaataaagtcatgacacagggagtagcccgtgtgttcgttaactggacaacgctcaaagatga

SEQ ID NO: 56845 - DNA, 75 bp, synthetic construct
  source 1..75: mol_type = other DNA
caggctgatgctgctgagcagagtctgagccgacaggcgctggctgcacaaaaagccgggatatcagtcggacag

SEQ ID NO: 56846 - DNA, 75 bp, synthetic construct
  source 1..75: mol_type = other DNA
aagactttatgctaaaaaagatgagctgcaagataaggtttcatttgtagaggaattttccgaactggggaaata

SEQ ID NO: 56847 - DNA, 75 bp, synthetic construct
  source 1..75: mol_type = other DNA
aaatggaaggcgctgaacatccacacaaggagaacactggcggcaatcagcatcacgatagcgataatgaaactg

SEQ ID NO: 56848 - DNA, 75 bp, synthetic construct
  source 1..75: mol_type = other DNA
atcacatccaccagcaggacgtgtgaccatctaatgatcgaccttgaaaccatgggaaaaaatcctgatgccccg

SEQ ID NO: 56849 - DNA, 75 bp, synthetic construct
  source 1..75: mol_type = other DNA
attacaaaaggccgcattgctttccgaagctgaatcagtcatccagccgctggaacgcgctgtcaggctgaatat

SEQ ID NO: 56850 - DNA, 75 bp, synthetic construct
  source 1..75: mol_type = other DNA
ggaagatatagaccttaaagcaaggactataaccatccgtagaaattatacaaaacttggcgaattcactccacc

SEQ ID NO: 56851 - DNA, 75 bp, synthetic construct
  source 1..75: mol_type = other DNA
gacgaatttcagtgattttgatatccgggatattcgtaaaaagcccatgtcaatttatcttggtctgacaccgga

SEQ ID NO: 56852 - DNA, 75 bp, synthetic construct
  source 1..75: mol_type = other DNA
tccccttgctgaaaatttgtaccaacaagggaaagacaaatcagctgatggggataccagaacggatatcacccg

SEQ ID NO: 56853 - DNA, 75 bp, synthetic construct
  source 1..75: mol_type = other DNA
gagcataaaaacggcgtggtgatacgtacccgtcagggcggtgaatatgaagcatcgacgctgattagctgttcc

SEQ ID NO: 56854 - DNA, 75 bp, synthetic construct
  source 1..75: mol_type = other DNA
tgccggcgttcgcccggttgctgggactggagccttgtacgacagcagtgcgaagcccggaaagcaatggcatag

SEQ ID NO: 56855 - DNA, 75 bp, synthetic construct
  source 1..75: mol_type = other DNA
cgcttgcatccgtacatgaaatgatggaatcgcttcatgatatcggcgcagtaacgaaacagactatgcgagaat

SEQ ID NO: 56856 - DNA, 75 bp, synthetic construct
  source 1..75: mol_type = other DNA
cctgtctacccttgtcgctgcgcatatgagcatgtgtcttgatgccgcttgtggtgatttgtacgccaccgatga

SEQ ID NO: 56857 - DNA, 75 bp, synthetic construct
  source 1..75: mol_type = other DNA
gcatctatgttggcctcgcgtcgtgcagaggcggaagctctgggtgtaccgccagatctgattgaggatgttttg

SEQ ID NO: 56858 - DNA, 75 bp, synthetic construct
  source 1..75: mol_type = other DNA
aaacggagctgctggcactgtttgaagaatgggaaaacgccggactggtcgaggatttcgacacgttcaaagagg

SEQ ID NO: 56859 - DNA, 75 bp, synthetic construct
  source 1..75: mol_type = other DNA
ttaccgggtgtacggatcctggatggctgaaaataaccaggaccaggtactcatcctcaaccagaaattgagtga

SEQ ID NO: 56860 - DNA, 75 bp, synthetic construct
  source 1..75: mol_type = other DNA
accggattacgcgtggaattttgccggataaatggtctgcgtggcccttcagctgccaatgtttacctttcatga

SEQ ID NO: 56861 - DNA, 75 bp, synthetic construct
  source 1..75: mol_type = other DNA
gtctcaaatttgctgtaaaagaaaaaaatgaagtttggcagtattcattgccaggcattattgaaaataacatta

SEQ ID NO: 56862 - DNA, 75 bp, synthetic construct
  source 1..75: mol_type = other DNA
aataaagacatttttactcatgtaccgctttcgtctgcagacagcacgaacgtcgcaagaaatataggcatcgac

SEQ ID NO: 56863 - DNA, 75 bp, synthetic construct
  source 1..75: mol_type = other DNA
tggatgtggaaaccatctacaccctgtcatatctgcgttactccctgcgggtattcattacacagcgtttccccc

SEQ ID NO: 56864 - DNA, 75 bp, synthetic construct
  source 1..75: mol_type = other DNA
tcaggagcaggcttgcgtatcttctatcggaaccagcgtctgaaggaagatgataagtggcggaacctgtattaa

SEQ ID NO: 56865 - DNA, 75 bp, synthetic construct
  source 1..75: mol_type = other DNA
aatctgagctgataaacccgcgcaaaggaacaccgacaagctacatcgcgaaatacattagtaagaacattgacg

SEQ ID NO: 56866 - DNA, 75 bp, synthetic construct
  source 1..75: mol_type = other DNA
tgtatggatatcaattgaatccgatatcagacatcgaccccctgggtttatctatgtgggaggatgcaaaatcgg

SEQ ID NO: 56867 - DNA, 75 bp, synthetic construct
  source 1..75: mol_type = other DNA
ggaacaggtcccgtaactgttggagcgtctgctcggagctggggagcagagtaaaaggaaaaaagtcccgggctg

SEQ ID NO: 56868 - DNA, 75 bp, synthetic construct
  source 1..75: mol_type = other DNA
attagcatcatatggcgcgatctttactggattatggacctgcagaatgacagaggggagccggtaatctccggt

SEQ ID NO: 56869 - DNA, 75 bp, synthetic construct
  source 1..75: mol_type = other DNA
tcccaccggagcgggagcctatccctggagtgaagcattcccatagaggctcaaaaatgcgtacaacgcatctag

SEQ ID NO: 56870 - DNA, 75 bp, synthetic construct
  source 1..75: mol_type = other DNA
aagcatcccggaatcagaaatctggagtgaacatcctgagcgaaacaaacacgctgtcgttcttgtggccgaatc

SEQ ID NO: 56871 - DNA, 75 bp, synthetic construct
  source 1..75: mol_type = other DNA
cggaaaatggatgtctgaaaacaataatgcacaggtagctttgttaaatacacagttaagcgagtttgccccaac

SEQ ID NO: 56872 - DNA, 75 bp, synthetic construct
  source 1..75: mol_type = other DNA
gagtaaagcacgaacctttaaagaagtcgcgatcgagtggcatggctccaataaaaagtggtctgaagatcatgc

SEQ ID NO: 56873 - DNA, 75 bp, synthetic construct
  source 1..75: mol_type = other DNA
aatgacatttgctgactgtctcatcagttttaatacacaggattgcctgtgggtaaggccagtatccggtgatcc

SEQ ID NO: 56874 - DNA, 75 bp, synthetic construct
  source 1..75: mol_type = other DNA
tcgctttgctatgcggttttgcaggtgcgaactttgcttcgagcatgggcaatatcagtttcttctttccaaaag

SEQ ID NO: 56875 - DNA, 75 bp, synthetic construct
  source 1..75: mol_type = other DNA
cccctgctcggtgcaaaggtccttcccggtgaaaccgaccttgccctgcccggcccgctgccgttcatcctctcc

SEQ ID NO: 56876 - DNA, 75 bp, synthetic construct
  source 1..75: mol_type = other DNA
gtgaggcggcagttgcagtagaaacagaacctatgcatcaaaattttgtggcgtttcgtatggcgttcacgccat

SEQ ID NO: 56877 - DNA, 75 bp, synthetic construct
  source 1..75: mol_type = other DNA
aaaggcagtatgggggtgaatgcccgttttaccggtgagtgctcagttcatgatttacgtgtgaactattacgac

SEQ ID NO: 56878 - DNA, 75 bp, synthetic construct
  source 1..75: mol_type = other DNA
ggttccggtcaactggacattcctgtacgtattacccgtgcatctcaggcaagagagctttgggggcgtggttcc

SEQ ID NO: 56879 - DNA, 75 bp, synthetic construct
  source 1..75: mol_type = other DNA
tcagttatatgcgatagcgaagacactgaaagatgaccttgatgccattaatccgacgtggacgctaaaggatga

SEQ ID NO: 56880 - DNA, 75 bp, synthetic construct
  source 1..75: mol_type = other DNA
gtgagcgcgggacagaatattgtaaccccggaaatcatgacgcttcagttgattgctctgggtgaggaatgggtc

SEQ ID NO: 56881 - DNA, 75 bp, synthetic construct
  source 1..75: mol_type = other DNA
gaagcttatgcgctgggagcaggcattttctttgtggtatatgcgtttctgggtgttccggcgaatcttttgatg

SEQ ID NO: 56882 - DNA, 75 bp, synthetic construct
  source 1..75: mol_type = other DNA
gccagatggacccggtatacacgccggcgcgaaaaattcacctgtaccactgcgaccatcgcggcctgccgctgg

SEQ ID NO: 56883 - DNA, 75 bp, synthetic construct
  source 1..75: mol_type = other DNA
tggtgaagaaaaaccgtgtgcgtttaattccgtttatgttggcgctgtatgtgctggcgtttctcgaccgttcga

SEQ ID NO: 56884 - DNA, 75 bp, synthetic construct
  source 1..75: mol_type = other DNA
ggaatctatgagcattctagtgctgggcgtgatatatataataaattattttctgcattaggagcagaaactatt

SEQ ID NO: 56885 - DNA, 75 bp, synthetic construct
  source 1..75: mol_type = other DNA
agtcggtacgccagttgctggccattccccaactggccatcccaagctatcagcgaccttaccgctggggctcca

SEQ ID NO: 56886 - DNA, 75 bp, synthetic construct
  source 1..75: mol_type = other DNA
gaactggtgttcaacgttgactacctcggcggtcagattggtactttcgccatcaacttctcccgcccggcgggt

SEQ ID NO: 56887 - DNA, 75 bp, synthetic construct
  source 1..75: mol_type = other DNA
ttcagtacgcaggccgcagaagaaatgctgcgtaaagcggtaggtaaaggtgcctacgaaatggcttatagccag

SEQ ID NO: 56888 - DNA, 75 bp, synthetic construct
  source 1..75: mol_type = other DNA
atggcagtatccgaccagacccgcagcggcgaccttgctgaaacattcaaatccgagcgggaaaccattaaaaac

SEQ ID NO: 56889 - DNA, 75 bp, synthetic construct
  source 1..75: mol_type = other DNA
gcgctgaccacacagtcacagcgggcggaagcgtcccgtaaacagcgcgagtcttccttatcttcccctgccggt

SEQ ID NO: 56890 - DNA, 75 bp, synthetic construct
  source 1..75: mol_type = other DNA
ccggaaatccaaaaactgttgaacaatatgaattgacgcgacaattcggtgttgtctggttgtattctgaggacg

SEQ ID NO: 56891 - DNA, 75 bp, synthetic construct
  source 1..75: mol_type = other DNA
aactggtggagcgttatctcgctgagcaagcgatggatcgcgccaacagttatgtgattggcgatcgcgcgaccg

SEQ ID NO: 56892 - DNA, 75 bp, synthetic construct
  source 1..75: mol_type = other DNA
acggcaggctggcggagaagacggaccgcatcccggaaggggttatccggatgcacgacgagcgcacccaccact

SEQ ID NO: 56893 - DNA, 75 bp, synthetic construct
  source 1..75: mol_type = other DNA
tgcagctggtggacggttctatcgtggataagcatacccatggcggcgttgagagcggcggaagcaatactaagc

SEQ ID NO: 56894 - DNA, 75 bp, synthetic construct
  source 1..75: mol_type = other DNA
cggtacaccggaggacaccacaacactgtatctggtgacagagggcagaccggacagggcgtttatcgcagagcc

SEQ ID NO: 56895 - DNA, 75 bp, synthetic construct
  source 1..75: mol_type = other DNA
tggtttatataagccatgaagatatgattaatattgataaattaaaagctaaaatagcaagtgattcatcagaga

SEQ ID NO: 56896 - DNA, 75 bp, synthetic construct
  source 1..75: mol_type = other DNA
cgatggcgtgacgctgacaggcgagcttaataccaaccttgaaactgacagcctgacttatctttccgacgtgac

SEQ ID NO: 56897 - DNA, 75 bp, synthetic construct
  source 1..75: mol_type = other DNA
caactaaagatgcagataaaagtgtcttcaacggcaccgtcaacctggataatcagtcagtgctgaatatcaatg

SEQ ID NO: 56898 - DNA, 75 bp, synthetic construct
  source 1..75: mol_type = other DNA
agcatactgtggtgggagtcagtcaccatcaacggacaaacagtcatggtcccgaaactgtatctgtcgccggaa

SEQ ID NO: 56899 - DNA, 75 bp, synthetic construct
  source 1..75: mol_type = other DNA
tttgttcacggcgttaattctgaaggcgaatggtacgattatgctgagaggtcgttatgcgccggactcaatcag

SEQ ID NO: 56900 - DNA, 75 bp, synthetic construct
  source 1..75: mol_type = other DNA
cgatgcttgggccggttacggtaacgaatgatgtgacagcttcaggtataagtgtcgccacgcataaacatggcg

SEQ ID NO: 56901 - DNA, 75 bp, synthetic construct
  source 1..75: mol_type = other DNA
actaatggggagtatcatctttttggtcatatccgtaatctgcgtatctggcataaagaattaactgatgcgcaa

SEQ ID NO: 56902 - DNA, 75 bp, synthetic construct
  source 1..75: mol_type = other DNA
ctgcgataaaacaggatgtcgccgaagatgctgaacagagaaaggcagaagaaaaggcccggttacgtaatgtgt

SEQ ID NO: 56903 - DNA, 75 bp, synthetic construct
  source 1..75: mol_type = other DNA
ccgcaaagacgagcgaaaccaacgcaaagtccagccagacggcagcgaaaaccagcgaaacgaatgccaaagcca

SEQ ID NO: 56904 - DNA, 75 bp, synthetic construct
  source 1..75: mol_type = other DNA
aaattttttgccgggttcatggctaaaaattttgtggccggtgcatctcaccctggacagatggaacgggagggg

SEQ ID NO: 56905 - DNA, 75 bp, synthetic construct
  source 1..75: mol_type = other DNA
gcggtgcgctttcgtccccatcccggaatgggctttccggtcagcgagttaaagaacgttgaacgtgacgcgggc

SEQ ID NO: 56906 - DNA, 75 bp, synthetic construct
  source 1..75: mol_type = other DNA
tccacgccttttcgattatggatcggaaatctacgaacctctgcacagtttactggaacgttttgggccacagcg

SEQ ID NO: 56907 - DNA, 75 bp, synthetic construct
  source 1..75: mol_type = other DNA
cgccgtatgccgcaaactgggcaacacgcgcccctgtacgaccgccgatctggcacttcctggttcacaggaacc

SEQ ID NO: 56908 - DNA, 75 bp, synthetic construct
  source 1..75: mol_type = other DNA
acctgttattgtttgtctgcttccttgtgatgtctctgctggttgggctggtgtacaaatttaccgccgaacgcg

SEQ ID NO: 56909 - DNA, 75 bp, synthetic construct
  source 1..75: mol_type = other DNA
caggggttttacaagggattggatgtccatcgttataatatagttaaaaaattcgcagaaaatcactgggaaaat

SEQ ID NO: 56910 - DNA, 75 bp, synthetic construct
  source 1..75: mol_type = other DNA
actggctggcactgctgctgttcgtattatgctcagtaaacagctggccgttgcggatggttaaaggaactgttg

SEQ ID NO: 56911 - DNA, 75 bp, synthetic construct
  source 1..75: mol_type = other DNA
aaatgctcggcctcgaaccgggctttattatctgcccgttccgtggcgagtatttccgccttgcgccggagcata

SEQ ID NO: 56912 - DNA, 75 bp, synthetic construct
  source 1..75: mol_type = other DNA
agcttttccttgaaaatgggcagtttattttagtcggtttgacaggtcgaactggttctggttgcacaacaacag

SEQ ID NO: 56913 - DNA, 75 bp, synthetic construct
  source 1..75: mol_type = other DNA
acgtgtatgcggcgttgcttgaagaaacaacaaaagaaacacatgagcaaatcgatcaacatatggaggcaaaac

SEQ ID NO: 56914 - DNA, 75 bp, synthetic construct
  source 1..75: mol_type = other DNA
tggctgaccggcattcgtaccgaaaatataccgccattcaatccgctgacagacgaagataatgaacccgttatg

SEQ ID NO: 56915 - DNA, 75 bp, synthetic construct
  source 1..75: mol_type = other DNA
aacgacgggaaccagctgacggcggtggtgtccccggacgggctggagagccgccgggcatatgatgaaccgggc

SEQ ID NO: 56916 - DNA, 75 bp, synthetic construct
  source 1..75: mol_type = other DNA
aatatgagaagtatcgcggtggcggaatgccgggtgcggtggatgtggatctggggcttgatgacagtgcgctgg

SEQ ID NO: 56917 - DNA, 75 bp, synthetic construct
  source 1..75: mol_type = other DNA
cggccttcactctcggcggtgaagccaccgacatcgtggtgatgcgcattatgtgtcgtcgcggcttcgaaatgg

SEQ ID NO: 56918 - DNA, 75 bp, synthetic construct
  source 1..75: mol_type = other DNA
ggaaacagaacgtgcgctggcggatacatcctctccgaaggtcattttcctgcacatgatgggttctcatccgaa

SEQ ID NO: 56919 - DNA, 75 bp, synthetic construct
  source 1..75: mol_type = other DNA
catcagctctacattccgcatattttcagctacctgaatgaagatattgattttgtgctgaatgaactgaaagcc

SEQ ID NO: 56920 - DNA, 75 bp, synthetic construct
  source 1..75: mol_type = other DNA
ggcattcgtactgaaaatataccgccattcaatccgctgacagacgaagataatgaacccgttatggtttttaac

SEQ ID NO: 56921 - DNA, 75 bp, synthetic construct
  source 1..75: mol_type = other DNA
ggacgcggctatccgattggcgcagcgttcttctctgttggtcgtttttatccggcactggtcggcaatgatatc

SEQ ID NO: 56922 - DNA, 75 bp, synthetic construct
  source 1..75: mol_type = other DNA
aggatacgctccgcaagcagcttactccggcgcttcgtgatctgctgcaggcaaaacaccgcacacaaaaggcgg

SEQ ID NO: 56923 - DNA, 75 bp, synthetic construct
  source 1..75: mol_type = other DNA
gccgcaggggatgctgcgtattatcagcagctttggttttggacgacaggtggtggctccggcgttatcagcgct

SEQ ID NO: 56924 - DNA, 75 bp, synthetic construct
  source 1..75: mol_type = other DNA
ggacagcttgtcaccgttctaggcaacatgacagacctgcgcattcctatttctattatctatccgcctaccaag

SEQ ID NO: 56925 - DNA, 75 bp, synthetic construct
  source 1..75: mol_type = other DNA
atttgcaacaggttccgatcatcaggttgtaaacgagctcaacggggaaagactgagagaacctaacgaagtttt

SEQ ID NO: 56926 - DNA, 75 bp, synthetic construct
  source 1..75: mol_type = other DNA
aagaaggtaacaaaatgaaaatgcctcatagtcgtgtaattggcggaggactttttgaactgagagttggggata

SEQ ID NO: 56927 - DNA, 75 bp, synthetic construct
  source 1..75: mol_type = other DNA
gtgaacggggaactggtggatcttcacgggcagccactgcggcagagtatggggtattccggagggggtaccgga

SEQ ID NO: 56928 - DNA, 75 bp, synthetic construct
  source 1..75: mol_type = other DNA
accggtcgtgggcaggatgtggcggaaggccgggcctgcgttccgggtgtgaagaaaccacgcgcaagggggtaa

SEQ ID NO: 56929 - DNA, 75 bp, synthetic construct
  source 1..75: mol_type = other DNA
ctgttgctgcgaaaatcctgctgcgatgcacctggcttgacccggcagagaatctatggtcaccccccgtttttg

SEQ ID NO: 56930 - DNA, 75 bp, synthetic construct
  source 1..75: mol_type = other DNA
cgtcgctcgtttaccgaatttattcgtgaaggggtgggcgttcatacgtttaacggtgaaatttttgtccagccc

SEQ ID NO: 56931 - DNA, 75 bp, synthetic construct
  source 1..75: mol_type = other DNA
atcgttaatgtaaaaaatggcacgatcaaggctgatagccacgacgccattaatggctcacagctttatgccatc

SEQ ID NO: 56932 - DNA, 75 bp, synthetic construct
  source 1..75: mol_type = other DNA
gtagattttcagaattaaaaataccatgccccccattagaggagcaaaagcgtatcgccactattctcgataaag

SEQ ID NO: 56933 - DNA, 75 bp, synthetic construct
  source 1..75: mol_type = other DNA
gcctgtcgctgttgacccagaataacctgaacaaatctcagtcttctcttagctctgctattgagcgtctctctt

SEQ ID NO: 56934 - DNA, 75 bp, synthetic construct
  source 1..75: mol_type = other DNA
ggatcgattggtctggatgaaaatatgcgggtactggtctcggatgcggtaaacggcggagggattgttgagagg

SEQ ID NO: 56935 - DNA, 75 bp, synthetic construct
  source 1..75: mol_type = other DNA
tggcgtaggtacagccgggaaaggatattacgctaaccagttgttgggtgccggtagcgcttacatgagcagcca

SEQ ID NO: 56936 - DNA, 75 bp, synthetic construct
  source 1..75: mol_type = other DNA
agaaacatgtaagatgaagtgctccggaaataacattggacgttttattagatttgtattcaccggagtgatgta

SEQ ID NO: 56937 - DNA, 75 bp, synthetic construct
  source 1..75: mol_type = other DNA
caaccaagaaccaatagaattacctgcgaactataaagacaaagaactcgtccgtactatcattaatgacaacat

SEQ ID NO: 56938 - DNA, 75 bp, synthetic construct
  source 1..75: mol_type = other DNA
tcctatattacggatgggtaatataacatatcaaggtaggtgggattttacagatttaaaatatcttgatctcag

SEQ ID NO: 56939 - DNA, 75 bp, synthetic construct
  source 1..75: mol_type = other DNA
tacagggtaaacgcacccgctggcagcaatcgcccttcctgttaaccgccagcaaaccggtgccggaagaggaag

SEQ ID NO: 56940 - DNA, 75 bp, synthetic construct
  source 1..75: mol_type = other DNA
actgttaacgcaggcaatggataaccctaccgcagaaaatctatcacgttattacacggcgcaaaggttaatgct

SEQ ID NO: 56941 - DNA, 75 bp, synthetic construct
  source 1..75: mol_type = other DNA
tgttcaaggcaaacgtaaacctggcactgatttccaggaaacactcactgatatttatgcggaatatatcgctaa

SEQ ID NO: 56942 - DNA, 75 bp, synthetic construct
  source 1..75: mol_type = other DNA
caccgaccgcatgaaaaacatgattgctgacgggaaaaaagtgtattcgagcattgagatgttgcctgagctgga

SEQ ID NO: 56943 - DNA, 75 bp, synthetic construct
  source 1..75: mol_type = other DNA
attcgtcacagatgaactttgcaattagcgaccgcatcgcaagaagtactgaacaatgggatcattgtaaactta

SEQ ID NO: 56944 - DNA, 75 bp, synthetic construct
  source 1..75: mol_type = other DNA
aggggcggggcttcgttcggcctgaaaaccagaatctgcaaaatctcggcgaaattatcccgattatttccggcg

SEQ ID NO: 56945 - DNA, 75 bp, synthetic construct
  source 1..75: mol_type = other DNA
tggatgataatattcaggaattacatgcacttagcggttttcgccgagagcttgctttaaggttaaaggatatgt

SEQ ID NO: 56946 - DNA, 75 bp, synthetic construct
  source 1..75: mol_type = other DNA
agcactggcacagtgggcagatctgctggtggcactggaaagcggaaaagactacaacgtaacgccaatcagagc

SEQ ID NO: 56947 - DNA, 75 bp, synthetic construct
  source 1..75: mol_type = other DNA
gaaaaaaattccgcgtcgccgtctcgggcacaaccatcgacggacgtgaaatttcaggccagatgttgcgtcagg

SEQ ID NO: 56948 - DNA, 75 bp, synthetic construct
  source 1..75: mol_type = other DNA
ggtgcgcagtccgctgatgcggggaaatatacctgcgtggtgaccgattcggcagagaaagcacagagtgtgacg

SEQ ID NO: 56949 - DNA, 75 bp, synthetic construct
  source 1..75: mol_type = other DNA
gcacaggcattaaaagatcatttagctgcctatgaactatcgaaagcgtctgagactgtaagctttaagccaacc

SEQ ID NO: 56950 - DNA, 75 bp, synthetic construct
  source 1..75: mol_type = other DNA
atgcgtaattacgcaacaatttcacctcagttctggttaggcgatacagggcgaaaactaaggaagtctggtccg

SEQ ID NO: 56951 - DNA, 75 bp, synthetic construct
  source 1..75: mol_type = other DNA
cggcaaatgttatctggtgggtctggccgtcaccgatgacccggcaagcctcggcacggaatacctggaattctg

SEQ ID NO: 56952 - DNA, 75 bp, synthetic construct
  source 1..75: mol_type = other DNA
aagatgcaaaaacaccgcgtctcgacgttattggtgaccaacaaggcgaacaaagtcactggtcttgtgcgcatt

SEQ ID NO: 56953 - DNA, 75 bp, synthetic construct
  source 1..75: mol_type = other DNA
ttccgcagtcaccaacctgaacaacaccactaccaacctgtctgaagcgcagtcccgtattcaggacgccgacta

SEQ ID NO: 56954 - DNA, 75 bp, synthetic construct
  source 1..75: mol_type = other DNA
gcagagcgtctggataaaatccgccgccagaaccggataaaggcagaacttcaggccgtgcttgatgagaaataa

SEQ ID NO: 56955 - DNA, 75 bp, synthetic construct
  source 1..75: mol_type = other DNA
tcaaactaaatccagatgtaaatcaaacagataaaattgtttgtgatacactggacagtatcccgcaaggggaac

SEQ ID NO: 56956 - DNA, 75 bp, synthetic construct
  source 1..75: mol_type = other DNA
atgggggtacctattgggagatatatacaacttagaagagtttcgagagctgcggtattattgcgactgacatcg

SEQ ID NO: 56957 - DNA, 75 bp, synthetic construct
  source 1..75: mol_type = other DNA
aattaatgagcttgttgcgcacaattatagagatgttatatctgatttgtcgaaaatgatcgatgtattttataa

SEQ ID NO: 56958 - DNA, 75 bp, synthetic construct
  source 1..75: mol_type = other DNA
tcaaaattctggtgccgtccgcactggcgttggcggtgctgattggtatcaaaagctgccagcccgacacgccgg

SEQ ID NO: 56959 - DNA, 75 bp, synthetic construct
  source 1..75: mol_type = other DNA
tctgagccgtaagatgaaaccgaccgcgttcaaacgcgaggttctggcttctgctgacaaaacgctggttcgcca

SEQ ID NO: 56960 - DNA, 75 bp, synthetic construct
  source 1..75: mol_type = other DNA
tcaacctgtccccgcagcaaccgctaccggacaaagcaccagagatgggcggaggtccaaccggcgacagtgatg

SEQ ID NO: 56961 - DNA, 75 bp, synthetic construct
  source 1..75: mol_type = other DNA
tgaatacaacgacaagcagctgtgctcaggtaataacgaaccgttcttcaaggtcaaaaatggtaatccaacagt

SEQ ID NO: 56962 - DNA, 75 bp, synthetic construct
  source 1..75: mol_type = other DNA
atttcgcatgatgcgttacgctattgccgcaatgcaaaatcaccttgatgctggatacaaaacgttgccgatggt

SEQ ID NO: 56963 - DNA, 75 bp, synthetic construct
  source 1..75: mol_type = other DNA
gatcggtgaagccctgaataataaccgtgatttgagaatggctgccctgaaggttgaagaggcccgggcccagtt

SEQ ID NO: 56964 - DNA, 75 bp, synthetic construct
  source 1..75: mol_type = other DNA
tgacaaaagtcgggcgggatattcttgcgaaatcgaccgttgctgccgttatcgaatacctcggtttacaggaaa

SEQ ID NO: 56965 - DNA, 75 bp, synthetic construct
  source 1..75: mol_type = other DNA
cgaaccatggctggatttctgggaactggttgtgcaaaacgtatcaacaatagcctctcataccgcaacaaaccg

SEQ ID NO: 56966 - DNA, 75 bp, synthetic construct
  source 1..75: mol_type = other DNA
cgcgcagttccgtcagaaaaagggattaaaggtggggagatcgcaccagtaaaattgccaccaaatctgtcgtca

SEQ ID NO: 56967 - DNA, 75 bp, synthetic construct
  source 1..75: mol_type = other DNA
ggaccgaaccccgccgcgtttattccagcgaattcaaactcaggctggtcgaactggctacccgaccggacgcca

SEQ ID NO: 56968 - DNA, 75 bp, synthetic construct
  source 1..75: mol_type = other DNA
ccggctcaggtcaaaaataaaatcaaacgcgttgaccgactgctcggtaatgaatctcttcaccgcgatatccca

SEQ ID NO: 56969 - DNA, 75 bp, synthetic construct
  source 1..75: mol_type = other DNA
aaccgcttcaaattaagccctgaaaacctgatttcagtggcaacgcctgttgagctggaatttgaagacctgcct

SEQ ID NO: 56970 - DNA, 75 bp, synthetic construct
  source 1..75: mol_type = other DNA
tttaacaacagatgcaactagcgaaggcacagtaacaaaagatccactgaaagctctggatgaagctatcagctc

SEQ ID NO: 56971 - DNA, 75 bp, synthetic construct
  source 1..75: mol_type = other DNA
tcggaacccgccggatattttctaatgaatttaaacttcatatggttgaactggcttcgaaaccaaatgccaatg

SEQ ID NO: 56972 - DNA, 75 bp, synthetic construct
  source 1..75: mol_type = other DNA
ggcatcctgcctgacggtatttttaaacgttatggcgatgtggccgaactgaaggccgaaaagattgacgatgat

SEQ ID NO: 56973 - DNA, 75 bp, synthetic construct
  source 1..75: mol_type = other DNA
cattgaggtgatggggacgtataacgcagccatagtccgggtcaccatcggcgaatacggtggcgatggttttct

SEQ ID NO: 56974 - DNA, 75 bp, synthetic construct
  source 1..75: mol_type = other DNA
atgtcgctggcgtatgtatatgcccgactggcaacaaaaaacccgcaacaaggtggcccaattgcttatgccgga

SEQ ID NO: 56975 - DNA, 75 bp, synthetic construct
  source 1..75: mol_type = other DNA
agtgccagatgattggcaactcgtacctaagaaaataacactggaaatggaatgtgctctatcaaaagctgatag

SEQ ID NO: 56976 - DNA, 75 bp, synthetic construct
  source 1..75: mol_type = other DNA
caaaagcagatgttgcaagacgccattaaccgtttctggtggccagccttaatgatgttcgggccaaacgatgat

SEQ ID NO: 56977 - DNA, 75 bp, synthetic construct
  source 1..75: mol_type = other DNA
atctcacccaggtggaaacactggtcatgcagtctgttggccggggacgtgacctgaaaacgctgaccgatgaac

SEQ ID NO: 56978 - DNA, 75 bp, synthetic construct
  source 1..75: mol_type = other DNA
gcctctcgctgatcacccagaacaacatcaacaaaaaccagtcttcaatgtctactgccattgagcgtctgtctt

SEQ ID NO: 56979 - DNA, 75 bp, synthetic construct
  source 1..75: mol_type = other DNA
acagtctgttactgtcggacctaaaagcacaccatatacaatgtattttaattttgataaggcgctagtgccatt

SEQ ID NO: 56980 - DNA, 75 bp, synthetic construct
  source 1..75: mol_type = other DNA
atgccgtggcaaccattaagacgatgtacagaaccaggctgtaacaggcgcgttaagtccggtaagtgtgaggag

SEQ ID NO: 56981 - DNA, 75 bp, synthetic construct
  source 1..75: mol_type = other DNA
tccacgcccagtgaagctaacagataacgtgactgcgtttgatgcggtggaaattaataactggctggcagaacg

SEQ ID NO: 56982 - DNA, 75 bp, synthetic construct
  source 1..75: mol_type = other DNA
tacattcaatgctactattgcagctggtgacgcaacaactccaagtaatagcgccaagttacaatctatcctgac

SEQ ID NO: 56983 - DNA, 75 bp, synthetic construct
  source 1..75: mol_type = other DNA
aaatgacaatcagccgggcgctggacaaatacctgaagacagtatccatccacaaaaaaggtcatctacaggagt

SEQ ID NO: 56984 - DNA, 75 bp, synthetic construct
  source 1..75: mol_type = other DNA
atgacagtgatgacgctcaatctcgttgaaaaacagccagcagctatgcgccggataattggtaagcatctggcc

SEQ ID NO: 56985 - DNA, 75 bp, synthetic construct
  source 1..75: mol_type = other DNA
ctaaagaaatcaaagcttggcttgacatagataactatcgcaagctcgaagacatcagtttaaatgccttgtatc

SEQ ID NO: 56986 - DNA, 75 bp, synthetic construct
  source 1..75: mol_type = other DNA
aatatccatccctgactatcagttgtctggagaaacaggaagagccaccatcattgcttcgtctaaataatcgga

SEQ ID NO: 56987 - DNA, 75 bp, synthetic construct
  source 1..75: mol_type = other DNA
cgcaccaccaaatacctgaaaactgccgccagcgccgattctgccagcgtgcagtttgaaggtaaggtgcagcgc

SEQ ID NO: 56988 - DNA, 75 bp, synthetic construct
  source 1..75: mol_type = other DNA
ccggactgatgatgtgcggcagctgcggcgcggcgacacgctgaccatcggtgaggaaaacttctggatagaccg

SEQ ID NO: 56989 - DNA, 75 bp, synthetic construct
  source 1..75: mol_type = other DNA
gcaaaaaatttcgcgttgccgtttccggttcaaccatcgacggacgtgaaattcctggtgaaatgctgcgtcagg

SEQ ID NO: 56990 - DNA, 75 bp, synthetic construct
  source 1..75: mol_type = other DNA
aaggcgcagctgaaaaccgaagatgcagacaaggaacagcgctttgcttcaaccggtggcaacagccacgccctg

SEQ ID NO: 56991 - DNA, 75 bp, synthetic construct
  source 1..75: mol_type = other DNA
ttattgataccgacactgctatgatggtgcaaagcttcactgatgcaggtattagcattgactttgacaggctgt

SEQ ID NO: 56992 - DNA, 75 bp, synthetic construct
  source 1..75: mol_type = other DNA
cctgctgcgtaatgctaacggcttaatggatgggcaggggaaacaactggtcagtgatgccgccaaaaccatggc

SEQ ID NO: 56993 - DNA, 75 bp, synthetic construct
  source 1..75: mol_type = other DNA
agaaagggagttttgaagcggagctgttcaaccgtgaaggcgaactgtggccggaagcggatgtgacgctgatag

SEQ ID NO: 56994 - DNA, 75 bp, synthetic construct
  source 1..75: mol_type = other DNA
tcgcctcctggcgtcatgcggaacagcttccggcactgtttaacggtatgccgatgggtacgcggattttagctt

SEQ ID NO: 56995 - DNA, 75 bp, synthetic construct
  source 1..75: mol_type = other DNA
ttcagttccccttttcgcgaaataaccgaaacggtgcttgttgataccgttgatgcagaacgtcccggacatcac

SEQ ID NO: 56996 - DNA, 75 bp, synthetic construct
  source 1..75: mol_type = other DNA
cgctggactaaacgcatattcgattatgctatcaagcgtcatgcactggaattaaacccagctggagcatttgat

SEQ ID NO: 56997 - DNA, 75 bp, synthetic construct
  source 1..75: mol_type = other DNA
ttgacggtaaagactccaccggcacggaaatcaacggtaataacggaaaagttatccaggacggcgatctggatg

SEQ ID NO: 56998 - DNA, 75 bp, synthetic construct
  source 1..75: mol_type = other DNA
caatagcgagtcttatgcttaatcaacagatcaatattcattttgctgttgtatggtgtattttttcactggcgc

SEQ ID NO: 56999 - DNA, 75 bp, synthetic construct
  source 1..75: mol_type = other DNA
tcaatgttctaaaactccattacgaacttgtccagggcctttcaaaatatgctttttgtggtttagatattttac

SEQ ID NO: 57000 - DNA, 75 bp, synthetic construct
  source 1..75: mol_type = other DNA
ctacacctcccaaaccgatttcgtttaataatgacgttattctcgataaaacagaaaaaacgttaactattcgcg

SEQ ID NO: 57001 - DNA, 75 bp, synthetic construct
  source 1..75: mol_type = other DNA
cactacggctacgacgataagggccgcctgaccggcgaacggcagacggtggagaacccggagacgggggaactg

SEQ ID NO: 57002 - DNA, 75 bp, synthetic construct
  source 1..75: mol_type = other DNA
taattggccagagggtttggttgggtgagaatgtgacggttttgcctggaacaattattggtaatggagtcgtag

SEQ ID NO: 57003 - DNA, 75 bp, synthetic construct
  source 1..75: mol_type = other DNA
ggatacgcttattgcaagtaaagtatttattaccgatcataatcacggttcctttaagcactctgatccaatgag

SEQ ID NO: 57004 - DNA, 75 bp, synthetic construct
  source 1..75: mol_type = other DNA
gacagctgtacgtccggcacccttttttctttttttacatagtccggtttctggccctgtgggtcggtatacctg

SEQ ID NO: 57005 - DNA, 75 bp, synthetic construct
  source 1..75: mol_type = other DNA
agatggctattcctccaacaatactggaattactggcatagccggtgaacatgatcagttaaattatggtatata

SEQ ID NO: 57006 - DNA, 75 bp, synthetic construct
  source 1..75: mol_type = other DNA
gaaaggcgaaaaaatcctcctggataccaccgggccgattgcgcgcacgaataccagttatgacggcacaaaacg

SEQ ID NO: 57007 - DNA, 75 bp, synthetic construct
  source 1..75: mol_type = other DNA
gtgcggcctgaccgtggagcagatgcaaaaccagatggacccggtgtacacgccggcgcgaaaaatccacctgta

SEQ ID NO: 57008 - DNA, 75 bp, synthetic construct
  source 1..75: mol_type = other DNA
aaaggaacacgcggacggcagcgtcacgcagagtcagtttgatgcggtgggcaggcttaaggcacagacggatgc

SEQ ID NO: 57009 - DNA, 75 bp, synthetic construct
  source 1..75: mol_type = other DNA
ggtgctaaggcagaactggcactggcggagaagctggggcatgcagttatttttcaggaggcaaccagtgagcaa

SEQ ID NO: 57010 - DNA, 75 bp, synthetic construct
  source 1..75: mol_type = other DNA
tggctggagcacatcagaaccgacgccagcgagcgcgtaatgaatgacgtgacgctgacctcccgcaacatggac

SEQ ID NO: 57011 - DNA, 75 bp, synthetic construct
  source 1..75: mol_type = other DNA
aaataaagatacgccggtggagcagggtaaagatgactatctgatttgtatggaaaaaatctatgcctatgcggg

SEQ ID NO: 57012 - DNA, 75 bp, synthetic construct
  source 1..75: mol_type = other DNA
cggaccgtatcactcaccgcacggtgaacggcgaaccggcagagcagtggcagtatgatggccacggctggctga

SEQ ID NO: 57013 - DNA, 75 bp, synthetic construct
  source 1..75: mol_type = other DNA
aactcaattaccaccaggatatacttgtgcagaaccctatttattcccagacattaataaacccgatgggccagc

SEQ ID NO: 57014 - DNA, 75 bp, synthetic construct
  source 1..75: mol_type = other DNA
ttgatctgggggccgccatcatgcaaccggggcgccaggccagtaagaccggtaacgtggttgccctgggggaaa

SEQ ID NO: 57015 - DNA, 75 bp, synthetic construct
  source 1..75: mol_type = other DNA
gtatcgcagcatgatttaaatgtcacctcggttttccctggggtaaagaactttgaattgagtctttctttgcag

SEQ ID NO: 57016 - DNA, 75 bp, synthetic construct
  source 1..75: mol_type = other DNA
gtttatggattatctgtcaccgttgaaacaacaacgtattcgtcagaaagttgaaaaactggatcgtctgaaagc

SEQ ID NO: 57017 - DNA, 75 bp, synthetic construct
  source 1..75: mol_type = other DNA
gcggcggcaaggctgaaaaacatccagccagccggagggcatgacaagctgaaactctatcgggtgactgacatt

SEQ ID NO: 57018 - DNA, 75 bp, synthetic construct
  source 1..75: mol_type = other DNA
cggccccggctggaaagcgccttctgatatccgcttacagatacgcgatgatgcactgatactcaacgacaacgg

SEQ ID NO: 57019 - DNA, 75 bp, synthetic construct
  source 1..75: mol_type = other DNA
agaaagctgtttttatagaaaatgaatatgctgcaacggattctctcgccctgactggagggctgcgcctcgata

SEQ ID NO: 57020 - DNA, 75 bp, synthetic construct
  source 1..75: mol_type = other DNA
gtcgatccctgaacaacgtgctttagtgccacgcgcagagaaagttaaaattcgcgccctggaccgcgacggtaa

SEQ ID NO: 57021 - DNA, 75 bp, synthetic construct
  source 1..75: mol_type = other DNA
tggtattaagcaagatataaaaacgttgactagtttccgactgcccgatgcacattcgggaggtattgccagtac

SEQ ID NO: 57022 - DNA, 75 bp, synthetic construct
  source 1..75: mol_type = other DNA
ttatcaagtgcaggctcgtctactcattttttcaataatgaacatgttctgtattcaaagctacgtccttattta

SEQ ID NO: 57023 - DNA, 75 bp, synthetic construct
  source 1..75: mol_type = other DNA
gcctgtggagagatggtgcagtcaggccgcccgttgaagcaggaacccaccgaaatgattcaggcgacagcctga

SEQ ID NO: 57024 - DNA, 75 bp, synthetic construct
  source 1..75: mol_type = other DNA
tatgggatttgccggtgttctccggggtaaaaaggtccgcactaccgttgccgcaggtggccgcgtaaaccgtca

SEQ ID NO: 57025 - DNA, 75 bp, synthetic construct
  source 1..75: mol_type = other DNA
atgtaaagcgcctgcaaatgatgaaggataagctgctggttatctctgataacaagagctactcaccgtgggacc

SEQ ID NO: 57026 - DNA, 75 bp, synthetic construct
  source 1..75: mol_type = other DNA
aacggttatgaaaatacccttacctgtttatctccggagtcactgccttctcaccacagcgtgagggtggatgcc

SEQ ID NO: 57027 - DNA, 75 bp, synthetic construct
  source 1..75: mol_type = other DNA
aaagggtttactgttgattattccaatggcttcggtgatggaatggatgcttatgaggaaaacatccgcgctgct

SEQ ID NO: 57028 - DNA, 75 bp, synthetic construct
  source 1..75: mol_type = other DNA
tcaacgcccatcactatcgccatatatggaccgttggtgatattcatggtgactatcaattattacaatcccgct

SEQ ID NO: 57029 - DNA, 75 bp, synthetic construct
  source 1..75: mol_type = other DNA
atctcaattcatatgcgttatacccgattgtctgcattgtgtgcggcgtcaacggcagcaatgggggcggcggca

SEQ ID NO: 57030 - DNA, 75 bp, synthetic construct
  source 1..75: mol_type = other DNA
gaatccaagattgtacgctgtttataacctgaccgataatctcacactcaaaggggggatcgcaaaagcatttcg

SEQ ID NO: 57031 - DNA, 75 bp, synthetic construct
  source 1..75: mol_type = other DNA
gtcgaaaaagtgatgacgaaagtctcaatggcaagtcgctgaaaggggaacctctggaaagaactcccagacatg

SEQ ID NO: 57032 - DNA, 75 bp, synthetic construct
  source 1..75: mol_type = other DNA
ctctggctggagtcaccctgcataactatggggtgaacggttacagaaataactggttgttattacctgaggatt

SEQ ID NO: 57033 - DNA, 75 bp, synthetic construct
  source 1..75: mol_type = other DNA
gatcttaactggtatcgtaatgatgcccgcgccagtttatggttgacttgtgaattatatgaaatgattaagata

SEQ ID NO: 57034 - DNA, 75 bp, synthetic construct
  source 1..75: mol_type = other DNA
tggcagtcgttgttgctaccattgtgagcccatctgcttttgcagatgatacggttgaagcggcagcgacagaac

SEQ ID NO: 57035 - DNA, 75 bp, synthetic construct
  source 1..75: mol_type = other DNA
cccgacagcagaaagcagttgtgagggagggggtttctgtgcctcttgttcttgagcaacagatacctgtggtga

SEQ ID NO: 57036 - DNA, 75 bp, synthetic construct
  source 1..75: mol_type = other DNA
tcaggaagcctttaacggcggtatcgcgggaactggtaagctgctgattaactggtcgccggcaggcctgctcta

SEQ ID NO: 57037 - DNA, 75 bp, synthetic construct
  source 1..75: mol_type = other DNA
acacatctacacaacccgtggcgtgggcagtttgtatggtttgcgtctgaactgccgcccggaagtaacgatgct

SEQ ID NO: 57038 - DNA, 75 bp, synthetic construct
  source 1..75: mol_type = other DNA
ggcggcagaagcctgtattttgagcacctgtttcccggtgaggacggttacagccgcagcgagtcactgtggctg

SEQ ID NO: 57039 - DNA, 75 bp, synthetic construct
  source 1..75: mol_type = other DNA
tgagggattttcaggtatggatctcgctatcgattcctttacagtctgcccttcctaccgagctggaacattcgc

SEQ ID NO: 57040 - DNA, 75 bp, synthetic construct
  source 1..75: mol_type = other DNA
gatctgctggtggcactggaaagcgggaaagactacaacgtaacgccattcgataaagcccggaggcaaatgtga

SEQ ID NO: 57041 - DNA, 75 bp, synthetic construct
  source 1..75: mol_type = other DNA
caccaactatgccatgagtgtagctggtggacaaggctatcagcctggcgggcgatttttggttgcttttagccg

SEQ ID NO: 57042 - DNA, 75 bp, synthetic construct
  source 1..75: mol_type = other DNA
taccgttaacggtaccatttctacttattacttgaatcatgattacgctagcggttctgttaaccaggtagatat

SEQ ID NO: 57043 - DNA, 75 bp, synthetic construct
  source 1..75: mol_type = other DNA
tgagtttgacagccggttgtttgcagccattaacgatatgctgctggatatgctggccgcagttgccagaaggga

SEQ ID NO: 57044 - DNA, 75 bp, synthetic construct
  source 1..75: mol_type = other DNA
tattcgctatgccgtgatgtgtgtgccgacacccttgactctggcagtcgataaattcagcgtgatggataaaca

SEQ ID NO: 57045 - DNA, 75 bp, synthetic construct
  source 1..75: mol_type = other DNA
tcacgggtaatgcttattggatcttatagcgaaatatccctttccaaagcacgggaaatagccaaggaattatcc

SEQ ID NO: 57046 - DNA, 75 bp, synthetic construct
  source 1..75: mol_type = other DNA
cgctggacacgtcgcatatttgactacggtattaaacgccttgctttggaagttaacccctgctcagctttcgaa

SEQ ID NO: 57047 - DNA, 75 bp, synthetic construct
  source 1..75: mol_type = other DNA
gtcgttctcaacgtggtgctggtgatccatatacaggtgaagtcgttggttgtgagacaaatgaatcaggaatat

SEQ ID NO: 57048 - DNA, 75 bp, synthetic construct
  source 1..75: mol_type = other DNA
tcatcttctacttatcaacattactcttatccgtcatcttctcttcatagttcaatccccaaatcctctttggat

SEQ ID NO: 57049 - DNA, 75 bp, synthetic construct
  source 1..75: mol_type = other DNA
tcagggctgcggataacgatttgcttgccagtgcttatgatcagcggctgaaatctccccttgaagccactaaaa

SEQ ID NO: 57050 - DNA, 75 bp, synthetic construct
  source 1..75: mol_type = other DNA
tggaaggatgctgaaaatggcgctttcgcgccaggcgggcatgatatttacgttgatgagaagggcaacgtcacc

SEQ ID NO: 57051 - DNA, 75 bp, synthetic construct
  source 1..75: mol_type = other DNA
aaagctaccggctggctgaaacgctatggtgcagtcacgctattattaagctggatgcccgtggttggcgattta

SEQ ID NO: 57052 - DNA, 75 bp, synthetic construct
  source 1..75: mol_type = other DNA
tcatgtgattgtgtctggtggtggtgaaatatacaaaagcctgatcgataaagttgatactttacatatttcaac

SEQ ID NO: 57053 - DNA, 75 bp, synthetic construct
  source 1..75: mol_type = other DNA
gatccgctcacacatgacgaattcattcgttttattgatgcttgccaccatcaacaaacaaaaaacctgtggtct

SEQ ID NO: 57054 - DNA, 75 bp, synthetic construct
  source 1..75: mol_type = other DNA
tgtccgccagggtgatgaactggatgtcccggcacaagttagtgaaaataatttaaccccgccaccgggtaatag

SEQ ID NO: 57055 - DNA, 75 bp, synthetic construct
  source 1..75: mol_type = other DNA
aatgcacaggtagccctgttaaatacacagctaagcgagtttgccccaaccatgccccaaaacgaggtggtgaaa

SEQ ID NO: 57056 - DNA, 75 bp, synthetic construct
  source 1..75: mol_type = other DNA
ccagtcatcccgcaggctgcgtgagcgcatcagcccttccctgaagcgcattgccggtaccgtgatttcgttttc

SEQ ID NO: 57057 - DNA, 75 bp, synthetic construct
  source 1..75: mol_type = other DNA
gcgtggatgcgatttacatgctgaaaggctggcagcggtcggcaggcgctaaggcagaactggcgctggcggaga

SEQ ID NO: 57058 - DNA, 75 bp, synthetic construct
  source 1..75: mol_type = other DNA
aatcgacttacttatttctgtcggcgataatattgatcgtggaccggagagtcttgacgtcctgcgcctgctaaa

SEQ ID NO: 57059 - DNA, 75 bp, synthetic construct
  source 1..75: mol_type = other DNA
atcactgttcaattacgcgagtacggaagaacaattttgcacgagtgcacttttgttttctgtccgcaaatcgtt

SEQ ID NO: 57060 - DNA, 75 bp, synthetic construct
  source 1..75: mol_type = other DNA
agacaaacgtataaaggatattggggagcaactcggagcatggtgcgaaggtggaatttatgggcaccggtttac

SEQ ID NO: 57061 - DNA, 75 bp, synthetic construct
  source 1..75: mol_type = other DNA
ttggtgacaacatcgcgcagggtgccgctatcggcctgcagcgtaccacaccactggcagcgctcgccggacaac

SEQ ID NO: 57062 - DNA, 75 bp, synthetic construct
  source 1..75: mol_type = other DNA
tgcccttctctggattggccgggcgctgatgatgaatcccatcggtctcgctatcaccgccgtcgcggcagcagc

SEQ ID NO: 57063 - DNA, 75 bp, synthetic construct
  source 1..75: mol_type = other DNA
gctggctggtgccctgaatatgagcctgcatgagctggaaaaaatgctggagcgtctgctggctcagaaacaacg

SEQ ID NO: 57064 - DNA, 75 bp, synthetic construct
  source 1..75: mol_type = other DNA
atccaactgggtgagacttttattcctttaatggacagtgtcggcaaatggatagcggcaaacccgcaaatcgtc

SEQ ID NO: 57065 - DNA, 75 bp, synthetic construct
  source 1..75: mol_type = other DNA
cgccatcgaaaatcatatcagtcgagacatacttatgcctgctggtcgctgacagctggtgctaacccggcattt

SEQ ID NO: 57066 - DNA, 75 bp, synthetic construct
  source 1..75: mol_type = other DNA
gctgagggggaaattgaagtcagttcaaaaacacttcaggtgctgacagccaaagcccgtgcagcgggttcatgg

SEQ ID NO: 57067 - DNA, 75 bp, synthetic construct
  source 1..75: mol_type = other DNA
tcattattggcggcattgtcgggagtagcttccgctcagccgtcagcggtacccgacgcgcccttgattccctgg

SEQ ID NO: 57068 - DNA, 75 bp, synthetic construct
  source 1..75: mol_type = other DNA
cggagaatcattacgtccggcgttgatccagctgggggaaacattcatccccttaatgaacagcgttggaaaatg

SEQ ID NO: 57069 - DNA, 75 bp, synthetic construct
  source 1..75: mol_type = other DNA
atgataaaaaaacctgtgattggaatcagcggttgtttggccggttctgctgttcgttttgatggtggtcacaaa

SEQ ID NO: 57070 - DNA, 75 bp, synthetic construct
  source 1..75: mol_type = other DNA
agagaatcgctcatcagagataaggtgaaaacaaccaaccagatccacggtttcttgctggaatttggaatcagc

SEQ ID NO: 57071 - DNA, 75 bp, synthetic construct
  source 1..75: mol_type = other DNA
attaggagttaaggctaatatacattattcagatgaagaactcacattaaaaaatattgaaagtggtggtggata

SEQ ID NO: 57072 - DNA, 75 bp, synthetic construct
  source 1..75: mol_type = other DNA
aacaagaatacagggaaagaagtctctgaaattcgcttcaccgcacgagaaaaaatgaccgggcttgaaagttat

SEQ ID NO: 57073 - DNA, 75 bp, synthetic construct
  source 1..75: mol_type = other DNA
aaaaaattgcgctctatattgatgacggctgtgatgccgccgttcttaacgcggcgttcgcaccagctcttaact

SEQ ID NO: 57074 - DNA, 75 bp, synthetic construct
  source 1..75: mol_type = other DNA
tgttggtccgattactgccagcttactatcgtcgcaacttggtgacgggaaacagttctcatgcagcagggattt

SEQ ID NO: 57075 - DNA, 75 bp, synthetic construct
  source 1..75: mol_type = other DNA
aatggactgctatgcgcagcctctgtagaggctaagcctcgactacaaaaaaataagagtacgcgttgccaattc

SEQ ID NO: 57076 - DNA, 75 bp, synthetic construct
  source 1..75: mol_type = other DNA
cgcgccaacaatcctaccagccggatgatgcgttttgcccagctctctaccgtgaaggctttttcgccaaattga

SEQ ID NO: 57077 - DNA, 75 bp, synthetic construct
  source 1..75: mol_type = other DNA
cgactctgttgggtatcagtaagcgaggtgataaaaatttacgccggttactggttcagtgtgcccgctcattca

SEQ ID NO: 57078 - DNA, 75 bp, synthetic construct
  source 1..75: mol_type = other DNA
agctcattgaagaaacacttaaagaactcgagtcaccaaaaggttctttgttatcggctatacaaaaactacagc

SEQ ID NO: 57079 - DNA, 75 bp, synthetic construct
  source 1..75: mol_type = other DNA
atgaccgacgaaatcgatcgcatcagtgaagtggttctgaacgagcgtcagagcgtcgttaaagcctggcagaca

SEQ ID NO: 57080 - DNA, 75 bp, synthetic construct
  source 1..75: mol_type = other DNA
tgggtgccggtatttacccagggcgaactgatgtttgatgatattgacttgctggtcatgctgcagctggtggcg

SEQ ID NO: 57081 - DNA, 75 bp, synthetic construct
  source 1..75: mol_type = other DNA
acgctctgccgttcagttaaaaatgccggatacagcgttgatggcgggatggcgggatggcggaagagtgcatcg

SEQ ID NO: 57082 - DNA, 75 bp, synthetic construct
  source 1..75: mol_type = other DNA
gtatgtcggatggcctaaatctctttctgttgccattggtggcggcgttgggctgatcggggtcgatgctattcg

SEQ ID NO: 57083 - DNA, 75 bp, synthetic construct
  source 1..75: mol_type = other DNA
aggagcaaccgatgtatcaattcaactcaagaatggtcagtcgtttaatttcccaaaagttccaattcctgattt

SEQ ID NO: 57084 - DNA, 75 bp, synthetic construct
  source 1..75: mol_type = other DNA
cattacaaataacagcggtatggaggggttaaaatcagcgattcttgaactggaaaacaatggaaagctatctcc

SEQ ID NO: 57085 - DNA, 75 bp, synthetic construct
  source 1..75: mol_type = other DNA
aaataccggcgaactgacggtagtggctaaaacctcggcgaaaaatactaccgttgatgctggcggtaagctgat

SEQ ID NO: 57086 - DNA, 75 bp, synthetic construct
  source 1..75: mol_type = other DNA
taacatgacgctggaaaatccttcaccagagctgctcacggtgttgctccgtgaactgaccgggaggggaagatg

SEQ ID NO: 57087 - DNA, 75 bp, synthetic construct
  source 1..75: mol_type = other DNA
ctgaatttattcccccagatggttctaaaaagatttcctggggagagggattaacaaaaccggaacttgagatga

SEQ ID NO: 57088 - DNA, 75 bp, synthetic construct
  source 1..75: mol_type = other DNA
ccttagtacttactcacaacctaataaatcacaaagaaccagtacaacagcttgagaaggttcaccctacctggc

SEQ ID NO: 57089 - DNA, 75 bp, synthetic construct
  source 1..75: mol_type = other DNA
agacaacgtttatccgtttgccagaagtaataaaacgcaccggatttggtaaaacgtggatttacgaactgatta

SEQ ID NO: 57090 - DNA, 75 bp, synthetic construct
  source 1..75: mol_type = other DNA
gataacactgactttactgatgcccataaaggttttgttgcccctatccctcaagacgtgattaagggcgaaaaa

SEQ ID NO: 57091 - DNA, 75 bp, synthetic construct
  source 1..75: mol_type = other DNA
gtagtggatgttgataatccagaatcatcgacagaatctgttggtatcggtgcaggtgttgacgcttcagttatg

SEQ ID NO: 57092 - DNA, 75 bp, synthetic construct
  source 1..75: mol_type = other DNA
atgggaaaaatcattacagttgcagggcataaaggcggcataggaaaaagcaccgtgctttgttccttatgtgtg

SEQ ID NO: 57093 - DNA, 75 bp, synthetic construct
  source 1..75: mol_type = other DNA
aaagatttaacgaattcttatatgaatggaatgggaaaaaaagaatacagtagttacttgggaacaccaaataac

SEQ ID NO: 57094 - DNA, 75 bp, synthetic construct
  source 1..75: mol_type = other DNA
cgccaactgctgcgccagccagcacggccagcaacgcagccaccccgctggaaagcgtggaatctttcagctttg

SEQ ID NO: 57095 - DNA, 75 bp, synthetic construct
  source 1..75: mol_type = other DNA
ggtacgctgctggatatcgaccacggcacttatccgtacgtaacttcttccaacaccactgctggtggcgtggcg

SEQ ID NO: 57096 - DNA, 75 bp, synthetic construct
  source 1..75: mol_type = other DNA
caataatccaaattgaaattgccaaaataaaatttcttaacccgcgaactagaaataaggtagtgcatgaagaaa

SEQ ID NO: 57097 - DNA, 75 bp, synthetic construct
  source 1..75: mol_type = other DNA
gggtattcgtccggagtatctcgaccgcctgcctcatgcgttctccggcgggcagcggcaacgtatcgccattgc

SEQ ID NO: 57098 - DNA, 75 bp, synthetic construct
  source 1..75: mol_type = other DNA
aggccaacgaatacatgaacagcaaacaatggcctggtaaagcggcgattggtcgtctgaaaggtgaggaactgg

SEQ ID NO: 57099 - DNA, 75 bp, synthetic construct
  source 1..75: mol_type = other DNA
gaaaccacaaaaagtggtatgcaaacaaccgatctgtcacgtttttcaaaaaaatacgcacaactaccaggaact

SEQ ID NO: 57100 - DNA, 75 bp, synthetic construct
  source 1..75: mol_type = other DNA
atggataagaagcaagtaacggatttaaggtcggaactactcgattcacgttttggcgctaagtccatttctact

SEQ ID NO: 57101 - DNA, 75 bp, synthetic construct
  source 1..75: mol_type = other DNA
gaagtaaaagtttttatctacaagaattgtttccagaatatgaggatgcgggaacgcttccagatgatgttattg

SEQ ID NO: 57102 - DNA, 75 bp, synthetic construct
  source 1..75: mol_type = other DNA
atttgacaaggagaaagagcagaggcgtctgcagacagtggggcttatcagtgacataggcagtcaggtggcgga

SEQ ID NO: 57103 - DNA, 75 bp, synthetic construct
  source 1..75: mol_type = other DNA
tcaggcgctgcatgcggttgatctgaacattcatcacggtgaaatggtggctctgcttgggccgtcgggttccgg

SEQ ID NO: 57104 - DNA, 75 bp, synthetic construct
  source 1..75: mol_type = other DNA
ccgccgtggaatggctgacctacggcagcggttacctggcaggcatgaaactcggcgacacaccgctggtggagt

SEQ ID NO: 57105 - DNA, 75 bp, synthetic construct
  source 1..75: mol_type = other DNA
caattgcacgggcaaagggaaaattgcgggggaagcagccaaaactatcagataaacaacaaaaagaactttgcc

SEQ ID NO: 57106 - DNA, 75 bp, synthetic construct
  source 1..75: mol_type = other DNA
caagattcgtgccgatttcgatgattttgacggtgacaggcgaggtatcggtgattgtctggatgaggctgagca

SEQ ID NO: 57107 - DNA, 75 bp, synthetic construct
  source 1..75: mol_type = other DNA
gaatacccggagaatctgcccgccgcccccctggtacgctacgactggacggcacgcggtgagctggcggcggtg

SEQ ID NO: 57108 - DNA, 75 bp, synthetic construct
  source 1..75: mol_type = other DNA
tggagcgggacagtctgctatccggccgacacatgatctgacagctgccggtttcaatatgatgaacagtctgcc

SEQ ID NO: 57109 - DNA, 75 bp, synthetic construct
  source 1..75: mol_type = other DNA
atggattcagaaacagttcacggaacggtcaggtctggcgctggcagcgtgccggaagccgggccgttattctgg

SEQ ID NO: 57110 - DNA, 75 bp, synthetic construct
  source 1..75: mol_type = other DNA
tatacgctgggtggcggctcggtgatctcacagccggccacgcgcagcaacatgcagaagctgggtatggacctg

SEQ ID NO: 57111 - DNA, 75 bp, synthetic construct
  source 1..75: mol_type = other DNA
ctctgaaacactggcgtcagtgacgcaggatattaccgctctggcaaaaagcgcggcattaaacgtttcgcgagt

SEQ ID NO: 57112 - DNA, 75 bp, synthetic construct
  source 1..75: mol_type = other DNA
ttagcgccaaatctcgtgggtttcatctggtaacggatgaaattctgaatcagctggctgatatgccgcgcgtta

SEQ ID NO: 57113 - DNA, 75 bp, synthetic construct
  source 1..75: mol_type = other DNA
ttccctatattttcctgttgtcccgcattgcgcattacctgaagatcattcagcgggaaaatattggtaccacca

SEQ ID NO: 57114 - DNA, 75 bp, synthetic construct
  source 1..75: mol_type = other DNA
ccacgaagcgtaacaaccgaaagatacacgctcgtaaattcctggctacgccggagggtaaattatggttagaac

SEQ ID NO: 57115 - DNA, 75 bp, synthetic construct
  source 1..75: mol_type = other DNA
gaaagcgacatcgtaccgggagagcagaccgccaccagcatactgaaacagcgcacaaaaaatcttgcgccgctg

SEQ ID NO: 57116 - DNA, 75 bp, synthetic construct
  source 1..75: mol_type = other DNA
caatgcgctattgtttgcatttaatcgtcattatctgacgcttatcacctgtggtgtgcttctggcatctctggc

SEQ ID NO: 57117 - DNA, 75 bp, synthetic construct
  source 1..75: mol_type = other DNA
ctggcggaagcagaagcgcaacgtgcgctgaacgacgctatcaacgtactttctgatgaacaaaccagccttaaa

SEQ ID NO: 57118 - DNA, 75 bp, synthetic construct
  source 1..75: mol_type = other DNA
tgcgtgaggcggcagagaaggctacgaaaggtaagtgggctgttgaattcgacgatgagatttactccactgacg

SEQ ID NO: 57119 - DNA, 75 bp, synthetic construct
  source 1..75: mol_type = other DNA
aggcagcctttcctgaaaaagagtgttcatcccctgaaaaggtcattgaactcctgcatggtcagttggcagcaa

SEQ ID NO: 57120 - DNA, 75 bp, synthetic construct
  source 1..75: mol_type = other DNA
tctgagctggttgcaacagcaaggttgcaaacagatctatttcaaatactgctctactttcgacagtacggcgaa

SEQ ID NO: 57121 - DNA, 75 bp, synthetic construct
  source 1..75: mol_type = other DNA
tatgaggggattattgcggaatgcctgggtgtgccacccgaggagatttggcccagccgctacattcgtaaggtc

SEQ ID NO: 57122 - DNA, 75 bp, synthetic construct
  source 1..75: mol_type = other DNA
ataccaatattctgaccattgctttcgtctctaccgatggttcgatggataaacaggatattgccgattatgttg

SEQ ID NO: 57123 - DNA, 75 bp, synthetic construct
  source 1..75: mol_type = other DNA
atgagcgaacagtacctgataacgctcgacgagtggaaacctaaacggttcagtctcccaataacaaacactacc

SEQ ID NO: 57124 - DNA, 75 bp, synthetic construct
  source 1..75: mol_type = other DNA
ggataagcctgtctcactcgcccttaaatctggcaacttcggtgatgaagcctttttttcacgagcccaaagaga

SEQ ID NO: 57125 - DNA, 75 bp, synthetic construct
  source 1..75: mol_type = other DNA
agaacgttgcagagagcgtggtatctgaagcgcatgccggcgacagcgtatatgcttccctgtttgaaaaaatta

SEQ ID NO: 57126 - DNA, 75 bp, synthetic construct
  source 1..75: mol_type = other DNA
tggtggctggaaacgaaaaacgctcgagattttgctctgtggtgctctgacgctgacttttgcatccgctcttga

SEQ ID NO: 57127 - DNA, 75 bp, synthetic construct
  source 1..75: mol_type = other DNA
aaaaaacggaatgtgtcggatgagtttaagtttagtaaaggcgtttggtatataacgatgccagtatcttcctta

SEQ ID NO: 57128 - DNA, 75 bp, synthetic construct
  source 1..75: mol_type = other DNA
gcccttacaggggatgatcgcagagttgtcgttctttgcctgaatacaggagcacgatggggtgaagccagtaat

SEQ ID NO: 57129 - DNA, 75 bp, synthetic construct
  source 1..75: mol_type = other DNA
taatccagccagcatgtggcatatcattttcagccatatggtgtaacataaaattaatattatggtatcagtcag

SEQ ID NO: 57130 - DNA, 75 bp, synthetic construct
  source 1..75: mol_type = other DNA
gtactaatccggcaacaggattagctatgcatggaggatttgattcagcaggaaatacttttgggacttgttggc

SEQ ID NO: 57131 - DNA, 75 bp, synthetic construct
  source 1..75: mol_type = other DNA
cctggtggactgttcagccattcatccgggcagccagtggaggaaccgcacgctggagcacattgcttcagattt

SEQ ID NO: 57132 - DNA, 75 bp, synthetic construct
  source 1..75: mol_type = other DNA
aacagcaaaacttatacccagaaattcagctacctcccgaataacctagtgcagttgcataacctgcgaacctta

SEQ ID NO: 57133 - DNA, 75 bp, synthetic construct
  source 1..75: mol_type = other DNA
tcagcatacggaattcaaccgtctgctggggctggggaatgaactgcttcagcagcgtcagggactggtgaatgt

SEQ ID NO: 57134 - DNA, 75 bp, synthetic construct
  source 1..75: mol_type = other DNA
gcgcagcagaacttgagcgagattaccggggagtttacctctgacgacctactggggcggattttctccagcttc

SEQ ID NO: 57135 - DNA, 75 bp, synthetic construct
  source 1..75: mol_type = other DNA
cagtctcaattttaatgcctggctacaggcgaagggcgggcgggatgtgacgtccggtgatttcagcgctacggc

SEQ ID NO: 57136 - DNA, 75 bp, synthetic construct
  source 1..75: mol_type = other DNA
ttatctgtagcctgatgctgttgtacagcgttactgccccggcggtcgacaacctgcactttaccggtaatttgc

SEQ ID NO: 57137 - DNA, 75 bp, synthetic construct
  source 1..75: mol_type = other DNA
tgcaagttctttaacgttgcacaatatcttagacaaagatggtgcggcaactgagaactatgttgttagctatgg

SEQ ID NO: 57138 - DNA, 75 bp, synthetic construct
  source 1..75: mol_type = other DNA
atgaaaatcacccctgaacaggtttgtgaggctctggatgcctgggtgtgccgaccaggaatgacacaggaacag

SEQ ID NO: 57139 - DNA, 75 bp, synthetic construct
  source 1..75: mol_type = other DNA
cctgttgcctcattaatttccagctatgaatttgataacagcccgcaggatattgccctgctgcgcaatatttcc

SEQ ID NO: 57140 - DNA, 75 bp, synthetic construct
  source 1..75: mol_type = other DNA
acttaacgagcagatggtgcaacggctggaagcggcccgcgaaatggggctggtgctgcgctacgtggcgcgttt

SEQ ID NO: 57141 - DNA, 75 bp, synthetic construct
  source 1..75: mol_type = other DNA
gctggcgcggggaacacattacgcctttttgcgattgcccggtttttgccggtttatccccgctggcgcggggaa

SEQ ID NO: 57142 - DNA, 75 bp, synthetic construct
  source 1..75: mol_type = other DNA
ttgctgcgtctggatgaggccagcgaactggcgcgtctggcggctcccgttcttcacgcccgtactttacagcca

SEQ ID NO: 57143 - DNA, 75 bp, synthetic construct
  source 1..75: mol_type = other DNA
gaggtgctctggagtaccgggatcaggcggatggagctggcgaacctgatgctgtgggatgtggatacccggcgt

SEQ ID NO: 57144 - DNA, 75 bp, synthetic construct
  source 1..75: mol_type = other DNA
tgtttctcgccagtaataacgaaataattgccgaagaacatttcaccggcgaaattaaaaaagaagaagccaaaa

SEQ ID NO: 57145 - DNA, 75 bp, synthetic construct
  source 1..75: mol_type = other DNA
gttgaaagtaagaccttcgtaaaccaggaaaacaacggaagagatcaactggcactgaccagggagtccctgaaa

SEQ ID NO: 57146 - DNA, 75 bp, synthetic construct
  source 1..75: mol_type = other DNA
gatttaccgtggaaccctcggtgcagcagcgttttgaaaacgcagtaaaggagagcactgaatttacaaaaaaaa

SEQ ID NO: 57147 - DNA, 75 bp, synthetic construct
  source 1..75: mol_type = other DNA
gcaaaaatcttggtatgactgtcatttgcgatgacaatatgatgattgaaggcatctttaccgacggtgatttac

SEQ ID NO: 57148 - DNA, 75 bp, synthetic construct
  source 1..75: mol_type = other DNA
ccgtaatccgattaacgctgtcgatatgaaggctcgtcagtaccagtgtgaacaggtgaactacgacacgtttat

SEQ ID NO: 57149 - DNA, 75 bp, synthetic construct
  source 1..75: mol_type = other DNA
ctggctgctgacacggttgtacaggcaggagaaaccgtgaacggcggaacactggcaaatcacgacaaccagatt

SEQ ID NO: 57150 - DNA, 75 bp, synthetic construct
  source 1..75: mol_type = other DNA
gcgcgaaagtgatcgccagcgcctattccgatctcggtttcgacgtagatttaagcccgatgttctctacacctg

SEQ ID NO: 57151 - DNA, 75 bp, synthetic construct
  source 1..75: mol_type = other DNA
attcgccagatggcgatttttgccgccgtcgggttgagcgcctcctgtctgaccgtcctgttctggcatccgtgg

SEQ ID NO: 57152 - DNA, 75 bp, synthetic construct
  source 1..75: mol_type = other DNA
ggctggggcgcgcgctcggtgaaaccatggcggtgacctttatcatcggtaacacctaccagctcgacagcgcct

SEQ ID NO: 57153 - DNA, 75 bp, synthetic construct
  source 1..75: mol_type = other DNA
gtgctccgggtggcccgcagcggctggtatacgtggtgtcagcggcggacaaggataagcacgcgtcagcagttc

SEQ ID NO: 57154 - DNA, 75 bp, synthetic construct
  source 1..75: mol_type = other DNA
ctactgacgaaaagcgggaactggtgaaagcaatgaatcattttcgtgcagtggtgagcttatttcccaaacggc

SEQ ID NO: 57155 - DNA, 75 bp, synthetic construct
  source 1..75: mol_type = other DNA
ggatttacggggagaatttattcgcggctgggatgatgggcgcggggtggatgctggccgcgctttgcttaattg

SEQ ID NO: 57156 - DNA, 75 bp, synthetic construct
  source 1..75: mol_type = other DNA
cacggcgctggatgaactgatgaccagcggtaagctggacgatacgctgacgccggtgctggctcccttgtttgc

SEQ ID NO: 57157 - DNA, 75 bp, synthetic construct
  source 1..75: mol_type = other DNA
atgtgctggaaaccagcgcggacactaaagcactgtatgaggtaattggttttacgcctgaaaccacggtcaaag

SEQ ID NO: 57158 - DNA, 75 bp, synthetic construct
  source 1..75: mol_type = other DNA
tctcacagggccgtaacggacgctggctgacggcgggcgacctctccctccggggtaaaacactgcataccgcag

SEQ ID NO: 57159 - DNA, 75 bp, synthetic construct
  source 1..75: mol_type = other DNA
acccaactgagcagtgccaccaacagcacctctgaaacgctggccgccacaccaaaggccgtcaaggctgcatat

SEQ ID NO: 57160 - DNA, 75 bp, synthetic construct
  source 1..75: mol_type = other DNA
atcgtcgccagcaatgagcatcatgcacgtctttcactggtccatgagtatgtgctttgccttgctgctcgcctg

SEQ ID NO: 57161 - DNA, 75 bp, synthetic construct
  source 1..75: mol_type = other DNA
gggatggacttgccacgggaagcacacgggaaggagtaaaccctggaatactggctacatacggggacgggggaa

SEQ ID NO: 57162 - DNA, 75 bp, synthetic construct
  source 1..75: mol_type = other DNA
accaaaggccgtcaaggctgcatatgacctggctgccggcaaggcccccgtcagccatactcacccgtggagtca

SEQ ID NO: 57163 - DNA, 75 bp, synthetic construct
  source 1..75: mol_type = other DNA
tgtgcaggtgtaagtaaattcaaggccaaaaaccgcgaacgatatgtaaccgacaaagaataccaggcagtatta

SEQ ID NO: 57164 - DNA, 75 bp, synthetic construct
  source 1..75: mol_type = other DNA
tttattggcatggcgctggcagaagagcgtaaagtcgatgcgctggcggctgggttgttatccgttgcagcattt

SEQ ID NO: 57165 - DNA, 75 bp, synthetic construct
  source 1..75: mol_type = other DNA
ctggacgaccatcaatattgttgaagccgtggtcggggcagtgctactgcgtaaattgctgccgtggtataaccc

SEQ ID NO: 57166 - DNA, 75 bp, synthetic construct
  source 1..75: mol_type = other DNA
tcagggagaaataatcaacctaattacagggcaggatattgacttctcaaatatctacacgctgaggatgaaata

SEQ ID NO: 57167 - DNA, 75 bp, synthetic construct
  source 1..75: mol_type = other DNA
aattgcgctgagctgttcgctgggaaatatcgccgcatccatcctgcttttttccaccagctcgctgaacatgac

SEQ ID NO: 57168 - DNA, 75 bp, synthetic construct
  source 1..75: mol_type = other DNA
ccggttatgtgaagttcgggcatggcagtgcacaacatgtgcgtgccggtttccgtctgggcagccacaacgata

SEQ ID NO: 57169 - DNA, 75 bp, synthetic construct
  source 1..75: mol_type = other DNA
taaaggggactatacttgtggtggccaagaccaacggggagaatcaaaaggagatggtctatgggggccaggtaa

SEQ ID NO: 57170 - DNA, 75 bp, synthetic construct
  source 1..75: mol_type = other DNA
gaacaccaaataacacctatctaaaatataatcccaaagctaaagggaatggagttacaattatcaggcaaggga

SEQ ID NO: 57171 - DNA, 75 bp, synthetic construct
  source 1..75: mol_type = other DNA
tgcgggttttatcttcgcctttcgcgtacttccggcgattattttcgttactgcgctcatcagtctgctgtacta

SEQ ID NO: 57172 - DNA, 75 bp, synthetic construct
  source 1..75: mol_type = other DNA
caaccaatggctgttcccgttgcacccgtggcagggggaatatcttttgcagcaggggtggtgccaggcacttgt

SEQ ID NO: 57173 - DNA, 75 bp, synthetic construct
  source 1..75: mol_type = other DNA
cacgatactattgccagagttgtatcctgtatcagtcctgcaaaatttcacgagtgctttattaactggatgcgt

SEQ ID NO: 57174 - DNA, 75 bp, synthetic construct
  source 1..75: mol_type = other DNA
aaaaatcttgatgctaagggtaatcaggccacctggtcagcggaaggcgatgtctcttccagtgacgatctctat

SEQ ID NO: 57175 - DNA, 75 bp, synthetic construct
  source 1..75: mol_type = other DNA
aaaaagctgttatccggtggcggtagcggcgatgtcatcgtcatgatggtagcggagaatacccacgacgcattt

SEQ ID NO: 57176 - DNA, 75 bp, synthetic construct
  source 1..75: mol_type = other DNA
atgctgaaaaggaaaaaagtaaaaccgattacccttcgtgatgtcaccattattgatgacggtaaactgcgtaaa

SEQ ID NO: 57177 - DNA, 75 bp, synthetic construct
  source 1..75: mol_type = other DNA
cggattgacgaatgcattgtcagaaaatatatggaaagtgccgacaggatccagcactctgatagtgctgtttct

SEQ ID NO: 57178 - DNA, 75 bp, synthetic construct
  source 1..75: mol_type = other DNA
atgtggacaacttcaagttttacttgcaagacgagagtgattttttttcagttgctgcttttgatttttgtggag

SEQ ID NO: 57179 - DNA, 75 bp, synthetic construct
  source 1..75: mol_type = other DNA
ggtggaagtgtctcagacacggttatcagtgccggaggcggacagagccttcagggacgggcagtgaacaccacg

SEQ ID NO: 57180 - DNA, 75 bp, synthetic construct
  source 1..75: mol_type = other DNA
gggcaagcagcagggcatgccatacagtataatacccctggattaaagccagacactattttatggtgggctggt

SEQ ID NO: 57181 - DNA, 75 bp, synthetic construct
  source 1..75: mol_type = other DNA
cggtttcattcatgttaatggtgaagatgataaactgtttgaatctgcacaattgcttcttagtgattcagtttt

SEQ ID NO: 57182 - DNA, 75 bp, synthetic construct
  source 1..75: mol_type = other DNA
aggctgccggtatggctgcggaaaataacgtggtcatccggggcggacgtgatgtgaacctggtggcagagtctg

SEQ ID NO: 57183 - DNA, 75 bp, synthetic construct
  source 1..75: mol_type = other DNA
atgataaaatatatattcgcactcactcttctgctttccggttctgtctgtgccgttcaaattcagggactcgtt

SEQ ID NO: 57184 - DNA, 75 bp, synthetic construct
  source 1..75: mol_type = other DNA
ggtgagatagcacagggatttaatccgtctcactttgcccgcgcgttgagtgctgccggaatgctggaagcgggt

SEQ ID NO: 57185 - DNA, 75 bp, synthetic construct
  source 1..75: mol_type = other DNA
ggggaatgtcggtgtgcaactaggtgataaaggctatagcgatactcagggcatgctgggagtgaaatatagctg

SEQ ID NO: 57186 - DNA, 75 bp, synthetic construct
  source 1..75: mol_type = other DNA
ccaaggtttgaaatcttaactggtatatggcatggagtaaccaactggatgccgctaccggaaccgccgcaggag

SEQ ID NO: 57187 - DNA, 75 bp, synthetic construct
  source 1..75: mol_type = other DNA
gctgctgcaattcctgtcgccgctgggctgggagcacatcaacctaaccggcgattacgtctggcggcagagccg

SEQ ID NO: 57188 - DNA, 75 bp, synthetic construct
  source 1..75: mol_type = other DNA
gccgagctggtcaaccaccagtatcgccacgcctttgccgcccactggggcgacggcacgacctcatcctccgat

SEQ ID NO: 57189 - DNA, 75 bp, synthetic construct
  source 1..75: mol_type = other DNA
gaccgcatagatacggcagaaagttacgatgatgaccgtattgaggctgttaaggctgttttgcgtagactggca

SEQ ID NO: 57190 - DNA, 75 bp, synthetic construct
  source 1..75: mol_type = other DNA
gtgttcccggctgaactggtgcggctgctggacaggctggaggaagaaatccgggcagaccgcgtgagcagtgaa

SEQ ID NO: 57191 - DNA, 75 bp, synthetic construct
  source 1..75: mol_type = other DNA
ttatccggattggttctatcgcgatggtgcgagtaccacttgatgcaatggagcctgtcgaggaagatgacgagt

SEQ ID NO: 57192 - DNA, 75 bp, synthetic construct
  source 1..75: mol_type = other DNA
tcgctgatggcgaagcggctgattgaaatgaaacgttatcgcggggcgtttgtggcaccgcgtaaccagtggaat

SEQ ID NO: 57193 - DNA, 75 bp, synthetic construct
  source 1..75: mol_type = other DNA
gccgttacgatgaaccattgttgttttacgtattatcggagccgtttaaatcgaaagtagcggaaggcttcaaca

SEQ ID NO: 57194 - DNA, 75 bp, synthetic construct
  source 1..75: mol_type = other DNA
cttggaccgaaacaactggcgagcctggaagacacgaaaatcatcgataaagggcgcaattacgtgcgcgtttat

SEQ ID NO: 57195 - DNA, 75 bp, synthetic construct
  source 1..75: mol_type = other DNA
ggcagcggaacaccgcgatgacgtcagccctacttctctctattatgatgtcaacgttcagggtacccgcaatgt

SEQ ID NO: 57196 - DNA, 75 bp, synthetic construct
  source 1..75: mol_type = other DNA
cttgcggctggataaagacaccgcagatgcggtggtgaaagacaatatgaccgcgggttcagcaattaactggtt

SEQ ID NO: 57197 - DNA, 75 bp, synthetic construct
  source 1..75: mol_type = other DNA
ataagaatccaacagcatctccaggggatcgagcagcagcagaaaacgttcttcaggatttacagaatgctttgg

SEQ ID NO: 57198 - DNA, 75 bp, synthetic construct
  source 1..75: mol_type = other DNA
atcagcatgggtagacagaaagatgagagagccggcgcaagccggttttttatttgaattcaccgacgccgctta

SEQ ID NO: 57199 - DNA, 75 bp, synthetic construct
  source 1..75: mol_type = other DNA
acaactggcaggcagggctcgagaacgctctggtcagcgggcgactgagtgtgctgacccaggggcaagcgggta

SEQ ID NO: 57200 - DNA, 75 bp, synthetic construct
  source 1..75: mol_type = other DNA
gacccgcattactatctcgataacgtgctgctggaaaccggttttgactacgaaaacggtgtggcggtgcagacc

SEQ ID NO: 57201 - DNA, 75 bp, synthetic construct
  source 1..75: mol_type = other DNA
aatcctaaaccttccagtgagtgcatgtataacagaaaggctgtagatgcctgggtcgcttcaatgaaaagcaag

SEQ ID NO: 57202 - DNA, 75 bp, synthetic construct
  source 1..75: mol_type = other DNA
atttgctgaaggcgttgtgtacaggagaaaacatcactgcggcagtcaaccagttaattggtcttggaatagggc

SEQ ID NO: 57203 - DNA, 75 bp, synthetic construct
  source 1..75: mol_type = other DNA
agggatggattggttgcgaatatattccatctacgacaacgactgaaagtctacgctggctaaaaaacgagactc

SEQ ID NO: 57204 - DNA, 75 bp, synthetic construct
  source 1..75: mol_type = other DNA
caggcaaaatttcaggtattttaaccgacttcacctttcatgatctgaaggcgaaaggaatttcagactatgaag

SEQ ID NO: 57205 - DNA, 75 bp, synthetic construct
  source 1..75: mol_type = other DNA
cgagaacaattatcggctggagatgaccctcttgaactcaaaaaagcggagacgaccaaaatcgtaattccgact

SEQ ID NO: 57206 - DNA, 75 bp, synthetic construct
  source 1..75: mol_type = other DNA
gtttattaaagatatgcgtgatccatgggatatcaataatgaacaaaataaaagggcactggctgccatattctt

SEQ ID NO: 57207 - DNA, 75 bp, synthetic construct
  source 1..75: mol_type = other DNA
tcgataacaccgcagaaccttatcgcattaaaactgtgcgtaacaaaggctatctttttgcgcctcatgcatggg

SEQ ID NO: 57208 - DNA, 75 bp, synthetic construct
  source 1..75: mol_type = other DNA
cgttgtgggaacacaggaacatcaggaggtgggggctttccgtaaggtgaaaccgcttctgacatggtttcgtga

SEQ ID NO: 57209 - DNA, 75 bp, synthetic construct
  source 1..75: mol_type = other DNA
ctcacgaatcatggtaccctggccgcagggaaaaccctttccgtcacgtcgcaaaatgccatcaccaacggcggt

SEQ ID NO: 57210 - DNA, 75 bp, synthetic construct
  source 1..75: mol_type = other DNA
atccagacggtatacgagccgggaagcttcacgccgctcatccgggtcgagacagagaacggcgagcgggaaaaa

SEQ ID NO: 57211 - DNA, 75 bp, synthetic construct
  source 1..75: mol_type = other DNA
cgtggcaggccatgtgccggacaagctgaaaaacaccgatatcatgacccttgacttgggcgcattgcaggccgg

SEQ ID NO: 57212 - DNA, 75 bp, synthetic construct
  source 1..75: mol_type = other DNA
cgaccggtgaaaccggaaaaaccatcacagagtccttcatgaacaagccgaaagacattctttcaccggatgcac

SEQ ID NO: 57213 - DNA, 75 bp, synthetic construct
  source 1..75: mol_type = other DNA
acctaaccggcgattacgtctggcggcagagccgcagactggaagacgggaagtttcggcccttacggatgcccg

SEQ ID NO: 57214 - DNA, 75 bp, synthetic construct
  source 1..75: mol_type = other DNA
ggctggctgggttcactggaaaccggtctgcccttcagtatcactgacaatctgatgctggagccgcaactgcag

SEQ ID NO: 57215 - DNA, 75 bp, synthetic construct
  source 1..75: mol_type = other DNA
ggttattgtctgccgaaagatactaagcagttactggcaaactatcagtcagtaccgaataacttgatctcagca

SEQ ID NO: 57216 - DNA, 75 bp, synthetic construct
  source 1..75: mol_type = other DNA
tggccaagtaactgaagctgtcctgacccaggatggccctgtactggagaattttactgcagggcaaagtggcac

SEQ ID NO: 57217 - DNA, 75 bp, synthetic construct
  source 1..75: mol_type = other DNA
aaaaacaaccaaccatttgatattaacacggaaattgaaaccatacaaaaacaaattaattatgatataaatcat

SEQ ID NO: 57218 - DNA, 75 bp, synthetic construct
  source 1..75: mol_type = other DNA
ccctgcaagcctgccgatttcagaactgtacggctacagggaaagcgaggggcgttacggtgagcctgttttgtt

SEQ ID NO: 57219 - DNA, 75 bp, synthetic construct
  source 1..75: mol_type = other DNA
gcagggaatacgaaaataccgctactgattaacggtagcctgaatattcttaatattattattagcggcatggta

SEQ ID NO: 57220 - DNA, 75 bp, synthetic construct
  source 1..75: mol_type = other DNA
ctgtcagccttgaacacggggcgataaattgcgaaatattatttgacgatatggaggaatatgttccctataccg

SEQ ID NO: 57221 - DNA, 75 bp, synthetic construct
  source 1..75: mol_type = other DNA
acaccgttatgccagcacagagagcaccatgcaggaaatccagcggctggctaccgtctgccacaatgcactgag

SEQ ID NO: 57222 - DNA, 75 bp, synthetic construct
  source 1..75: mol_type = other DNA
ggccgcagggtggcaaaacgggtgtggcggcgtgaacgggacctgacgggctggatgtcgctgtcacggaaaccg

SEQ ID NO: 57223 - DNA, 75 bp, synthetic construct
  source 1..75: mol_type = other DNA
atgaggaaaagattttttgtgggaatattcgcgataaacctccttgttggatgtcaggctaactatatacgtgat

SEQ ID NO: 57224 - DNA, 75 bp, synthetic construct
  source 1..75: mol_type = other DNA
gaatgcatgcctgtcccggtggctctgactgatacgccagagccgaccagaccagttacaaatcccttctggcgt

SEQ ID NO: 57225 - DNA, 75 bp, synthetic construct
  source 1..75: mol_type = other DNA
cttgcggagttgcttcatcacctgcaggcgcgtcgccagcgactgatgtccatgcgtcgggagaacaatgcccgt

SEQ ID NO: 57226 - DNA, 75 bp, synthetic construct
  source 1..75: mol_type = other DNA
accactgtacagacccaacagacaagaatccagacggtataccagccgggaagcttcacgccgctcctgagaatc

SEQ ID NO: 57227 - DNA, 75 bp, synthetic construct
  source 1..75: mol_type = other DNA
acgcggtggtgaaccaggacggcgagctggatgtgagcggcggcggtcacggtattgatatcaccggcgacagcg

SEQ ID NO: 57228 - DNA, 75 bp, synthetic construct
  source 1..75: mol_type = other DNA
ggacgacgaaaatgtccataagttgatggatttatccattaacaaaaactggatcgacaaagaagaatatccgca

SEQ ID NO: 57229 - DNA, 75 bp, synthetic construct
  source 1..75: mol_type = other DNA
atagatacgacgacagaagacactggaatattcaggatctaatcagagcggaacttggtaaggatgagcaatccg

SEQ ID NO: 57230 - DNA, 75 bp, synthetic construct
  source 1..75: mol_type = other DNA
cagggcgggttatttttgccgattttaacccatcgaaacgaccgtggtcggtggcttcagatgactctaacaaca

SEQ ID NO: 57231 - DNA, 75 bp, synthetic construct
  source 1..75: mol_type = other DNA
gcaatcgatctgcgttgcgtaaacatggttgccgatctgtggcatgcgcctgcaccgaaaaatggtcaggccgtt

SEQ ID NO: 57232 - DNA, 75 bp, synthetic construct
  source 1..75: mol_type = other DNA
atatgcatccagagagcaaacccgctgggaacatctgaccgaactttatcgctacctggaactatccccgttcag

SEQ ID NO: 57233 - DNA, 75 bp, synthetic construct
  source 1..75: mol_type = other DNA
cagcataacgggaaaattggccttcatggtgatactggaaaagtaacctatgatggtgcaacaaccgtaacaatt

SEQ ID NO: 57234 - DNA, 75 bp, synthetic construct
  source 1..75: mol_type = other DNA
ggcgtcgctgttcttccggctgatacgtacggcctgccgtcagcgttttgaggggcgggaaccatgtcaaagctg

SEQ ID NO: 57235 - DNA, 75 bp, synthetic construct
  source 1..75: mol_type = other DNA
gaactactcgattcacgttttggtgcaaaggccatttctactatcgcggagtcaaaacgatttccgctgcacgaa

SEQ ID NO: 57236 - DNA, 75 bp, synthetic construct
  source 1..75: mol_type = other DNA
gcgaagagcaggaacgcttactggttataccagatgatgaaattattctgacccgaatgtgttttctgaacgaac

SEQ ID NO: 57237 - DNA, 75 bp, synthetic construct
  source 1..75: mol_type = other DNA
ttggtgagcgtgaaattccggatgattgctattatggtgttcagacacttcgtggaaaagataatttccatatca

SEQ ID NO: 57238 - DNA, 75 bp, synthetic construct
  source 1..75: mol_type = other DNA
aggacaatattacctgggacaaaaataatcgtctgtcgcagggcgtcacacagagtacgggcagcacgcttgccg

SEQ ID NO: 57239 - DNA, 75 bp, synthetic construct
  source 1..75: mol_type = other DNA
atgagggagcacagtacccaattcctccaaaggataaatttggtgcatttagtgattcctgcccggatcgttggg

SEQ ID NO: 57240 - DNA, 75 bp, synthetic construct
  source 1..75: mol_type = other DNA
cgtcgtcgtgatcttggtagcctgatcttcatcgatatgcgcgaccgcgaaggtatcgtgcaggtatttttcgat

SEQ ID NO: 57241 - DNA, 75 bp, synthetic construct
  source 1..75: mol_type = other DNA
agtttaacgaactgatgggggatgagtttattccgctcattaacaaggggggcggtgccggtatgcaggtcaccg

SEQ ID NO: 57242 - DNA, 75 bp, synthetic construct
  source 1..75: mol_type = other DNA
gcggggcagttgtccggtgaaggcaacagtgctgctttccgggagtttgcctggcgttttgtcaatatcattgcc

SEQ ID NO: 57243 - DNA, 75 bp, synthetic construct
  source 1..75: mol_type = other DNA
tgcgcggctacgcccctgatatttccggggtggcgcacaccacggcaaaagtgaccgtcagccagatgggccgcg

SEQ ID NO: 57244 - DNA, 75 bp, synthetic construct
  source 1..75: mol_type = other DNA
ttgccgggtcataacggcatttatcctgcgcgcacgtctgagggtaggcattgcggatactttattgactggcct

SEQ ID NO: 57245 - DNA, 75 bp, synthetic construct
  source 1..75: mol_type = other DNA
tgggcgttattctgccgcacggcacgacaatagaactgcccgaaaccgacagcgccccgaaaactgaaacggtga

SEQ ID NO: 57246 - DNA, 75 bp, synthetic construct
  source 1..75: mol_type = other DNA
cccgatcttcgtctccgccgcccaaaaagacgcattccgcctcaaagaacctggtgatgcaaaaatcgttgccac

SEQ ID NO: 57247 - DNA, 75 bp, synthetic construct
  source 1..75: mol_type = other DNA
agtggtgtacggagaatgctaataaaagtggtggagtatctataattggactcaaaaaactgtctcaatatcagt

SEQ ID NO: 57248 - DNA, 75 bp, synthetic construct
  source 1..75: mol_type = other DNA
tcgacctgcagcgcgttgatccgccaaagaaaccgctgaagatccgcaaaattgagtttgttgaaatttacgagc

SEQ ID NO: 57249 - DNA, 75 bp, synthetic construct
  source 1..75: mol_type = other DNA
gcatggtaataactgggttgtcacaactcaagattttcttcatcagcaaccaaaacatgattttgataaaacaat

SEQ ID NO: 57250 - DNA, 75 bp, synthetic construct
  source 1..75: mol_type = other DNA
ctgcggagttaatgcgactttcatcacggacggggtgccacattttgctctggttaatgggctgtacgcaatgaa

SEQ ID NO: 57251 - DNA, 75 bp, synthetic construct
  source 1..75: mol_type = other DNA
cgacacgcaataccagtacagcgatgtgaatgtcattgccattcatcacgcgctggtcaaatcaggcatcacgcc

SEQ ID NO: 57252 - DNA, 75 bp, synthetic construct
  source 1..75: mol_type = other DNA
ggcaggggcggttaccctgacggctgacggacgtattgaaaacagtggcagtatcagtgcgaaaacggatgtgca

SEQ ID NO: 57253 - DNA, 75 bp, synthetic construct
  source 1..75: mol_type = other DNA
tggtgcagatgctcgaccggctggaaagtgaaatcctggctgaccgggtgagtgaggaaagccgccgctggctgg

SEQ ID NO: 57254 - DNA, 75 bp, synthetic construct
  source 1..75: mol_type = other DNA
cggcaaccattaatctgggagacagtgatgctgtcgggaagacagattctccgttattcagctccctgatgaagg

SEQ ID NO: 57255 - DNA, 75 bp, synthetic construct
  source 1..75: mol_type = other DNA
ccacaaaaaaagcgaatgaatatttgaatagttcgaaagaacgtaatcctttcacccgagcaaaaacggaaatgg

SEQ ID NO: 57256 - DNA, 75 bp, synthetic construct
  source 1..75: mol_type = other DNA
cggttttataggttctggtgcttcagagttgggtagttctgttgttcaagaaaaaacaaagggagttaacaaatg

SEQ ID NO: 57257 - DNA, 75 bp, synthetic construct
  source 1..75: mol_type = other DNA
ccgtattttagtgatgcgcagtggtcgaattaccggcgaacttagcgcaaaagaagcgacacaagaaaaaattat

SEQ ID NO: 57258 - DNA, 75 bp, synthetic construct
  source 1..75: mol_type = other DNA
gccgcaggatgtcgcaaaagctgaacgccgggcaaatgaaccgaccgttcttcccgttcatattgcgccaccact

SEQ ID NO: 57259 - DNA, 75 bp, synthetic construct
  source 1..75: mol_type = other DNA
cggttggcctcttgcgtatagtgattatgctgaaggctggaacgactgccgcgaagccatgcttcagggagataa

SEQ ID NO: 57260 - DNA, 75 bp, synthetic construct
  source 1..75: mol_type = other DNA
cgcccaaaaatcctgtcgatgcagacaaattactggctgcctctcgcggagaatttgttgaagggattagcgacc

SEQ ID NO: 57261 - DNA, 75 bp, synthetic construct
  source 1..75: mol_type = other DNA
tgattaaagaaatcaaagagcgcataggcagtctggatgtgcgagacaatattgagcgccgtgcttatgaaattg

SEQ ID NO: 57262 - DNA, 75 bp, synthetic construct
  source 1..75: mol_type = other DNA
cccgcgaagtggaaagctacaccgaaaaaatggtcgagcaagccagtaaagatgagcttacggtcgttatcaaac

SEQ ID NO: 57263 - DNA, 75 bp, synthetic construct
  source 1..75: mol_type = other DNA
agcgaatggcaatttgcaggaacagacctgaatcaggccgttgatatggcaaagaataataaactgacatcaagt

SEQ ID NO: 57264 - DNA, 75 bp, synthetic construct
  source 1..75: mol_type = other DNA
ataattgtgtacaggcatcgatgaatggacaggaggttatcatttctgggcctggcgtcggttacaacaaaaaat

SEQ ID NO: 57265 - DNA, 75 bp, synthetic construct
  source 1..75: mol_type = other DNA
agtccctcagcagaaaaatcagtgcccgtcatttcacaggtatttttcagtggctgaccggtattcgtaccgaaa

SEQ ID NO: 57266 - DNA, 75 bp, synthetic construct
  source 1..75: mol_type = other DNA
cgggaagcaaaccccgggttttattgtttttattcttcctgggtatttctgcaataacctctgccgcatgcggat

SEQ ID NO: 57267 - DNA, 75 bp, synthetic construct
  source 1..75: mol_type = other DNA
gatattacttgaaacggtaagccatgtattgcctgacttaacccctgagttgtctgaaaaacccacacggttttg

SEQ ID NO: 57268 - DNA, 75 bp, synthetic construct
  source 1..75: mol_type = other DNA
gtgccgatcattatgttgctcacctttttggtgggggcagttatcgcctttctcggtgcaaccgtactcactact

SEQ ID NO: 57269 - DNA, 75 bp, synthetic construct
  source 1..75: mol_type = other DNA
atggatagcgtccaccatatttggtgtccactattctctcaggaatttcaggatctgccagacggtgctgagacg

SEQ ID NO: 57270 - DNA, 75 bp, synthetic construct
  source 1..75: mol_type = other DNA
gttatccagagcgtgaaaaatgctttgacgatgcactcaagattattgatgaactgcgtaaggcagaagcagaga

SEQ ID NO: 57271 - DNA, 75 bp, synthetic construct
  source 1..75: mol_type = other DNA
aacatcatcagtaacaggcaaatgacaggtctgaagcccacagcagaacgtccgcgtaatgaaaggggcggcgcg

SEQ ID NO: 57272 - DNA, 75 bp, synthetic construct
  source 1..75: mol_type = other DNA
taaacaataaccagacaagaacggcatactatgatctggattttgaccagatgatgctcgttggcatgagggagt

SEQ ID NO: 57273 - DNA, 75 bp, synthetic construct
  source 1..75: mol_type = other DNA
acccgcagcacagggcgttatctcggtggtataacattttctctggataatcctttttccctgagtgacctgctg

SEQ ID NO: 57274 - DNA, 75 bp, synthetic construct
  source 1..75: mol_type = other DNA
cgtcaaaccacagctggttgctgtcgttcgccgtgcgctggagctgacggaggttgatttcggtattacggaagg

SEQ ID NO: 57275 - DNA, 75 bp, synthetic construct
  source 1..75: mol_type = other DNA
gctgtttattttctgcgtcggggtcgaagccggaccgaactttttttccattttttttcgcgatgggaaaaatta

SEQ ID NO: 57276 - DNA, 75 bp, synthetic construct
  source 1..75: mol_type = other DNA
ctgaggatttaattaccaaaccatgccttaatatccatataggaagctggatactggcaagacattttcagatat

SEQ ID NO: 57277 - DNA, 75 bp, synthetic construct
  source 1..75: mol_type = other DNA
cttcaaactgaaagatggtgaagatccgggatacaccctgtatgacctctctgaacgtctgcgtctgcgcggctg

SEQ ID NO: 57278 - DNA, 75 bp, synthetic construct
  source 1..75: mol_type = other DNA
gtgaatataaacgtcgccgaattgttaaatgggaattacattctgttattatttgtggtcctcgcgcttgggcta

SEQ ID NO: 57279 - DNA, 75 bp, synthetic construct
  source 1..75: mol_type = other DNA
acaaaaactgggtatcatcaaatcgccagacgcatttcagctcatgggcgcgtcgtggcattattcccgatcgta

SEQ ID NO: 57280 - DNA, 75 bp, synthetic construct
  source 1..75: mol_type = other DNA
taaatatcaatattgacaagattgagtctgctctgacgcagaatggcgtcacaaactattcctctaatgtaaaaa

SEQ ID NO: 57281 - DNA, 75 bp, synthetic construct
  source 1..75: mol_type = other DNA
gggagcaggccttgtgatcgataatcagatgacaataggaatgtttgtagcgtttagttcttttcgtgggcagtt

SEQ ID NO: 57282 - DNA, 75 bp, synthetic construct
  source 1..75: mol_type = other DNA
ccggcaatccagaaacgggaactaaacctgaatcagattttaataacaccagttatatacagcgtatagggttta

SEQ ID NO: 57283 - DNA, 75 bp, synthetic construct
  source 1..75: mol_type = other DNA
ttgaatcgctgggaaggtaaatctgctaccgttgggcaacttatgggaatgcgatacaaaggctgggagtcaggc

SEQ ID NO: 57284 - DNA, 75 bp, synthetic construct
  source 1..75: mol_type = other DNA
gccgccagcggtggcttcctggcaccgttcgtcgccccggatatcgtctgggacttccgcctgccgcgtgtgaaa

SEQ ID NO: 57285 - DNA, 75 bp, synthetic construct
  source 1..75: mol_type = other DNA
atctgcagccatcgacctgcgttgcgtaaatatggttgccgatctgtggcatgcgcctgcgccgaaaaatggtca

SEQ ID NO: 57286 - DNA, 75 bp, synthetic construct
  source 1..75: mol_type = other DNA
ttatgcgcataaatcgttttattatctgggcgggttaaccgaaggcagcgagacgattttgctgtttgttctgag

SEQ ID NO: 57287 - DNA, 75 bp, synthetic construct
  source 1..75: mol_type = other DNA
attttcatgatgctatcaagttaggaaggaaggatcttgagtacacgacggctcgtcttaaggacgatagcatta

SEQ ID NO: 57288 - DNA, 75 bp, synthetic construct
  source 1..75: mol_type = other DNA
ccaggtgaaaaccccggctatcagaccggacgacttgcgcgttctataggttattacgtcccccgtaaaagctcc

SEQ ID NO: 57289 - DNA, 75 bp, synthetic construct
  source 1..75: mol_type = other DNA
ctgctggccgtctgctggatgcagggtgagtttgacatgagcgccgccacccacgcacagcaacctgcgctgttt

SEQ ID NO: 57290 - DNA, 75 bp, synthetic construct
  source 1..75: mol_type = other DNA
tgatctgcaaaagaggtatgccgtttgtggccgaagcgatggaggtgctgggcggcattggttattgcgaggaga

SEQ ID NO: 57291 - DNA, 75 bp, synthetic construct
  source 1..75: mol_type = other DNA
attagcatcatatggcgcgatccttactggattatggacctgcagaacgacagaggggagccggtaatctccggt

SEQ ID NO: 57292 - DNA, 75 bp, synthetic construct
  source 1..75: mol_type = other DNA
ccgctgattctggaaaacagccaggttgtggtgctgtgggggatgaacccgctgaataccttaaaaattgcctgg

SEQ ID NO: 57293 - DNA, 75 bp, synthetic construct
  source 1..75: mol_type = other DNA
cacagatgtacggtaagccggtgagtgaactgagcgagacagagaagcagacggtctcgacactggcaacggttg

SEQ ID NO: 57294 - DNA, 75 bp, synthetic construct
  source 1..75: mol_type = other DNA
gacggccgcacacagcgttatcaccacgacctgaccggcaaacttatccgcagcgaggatgaggggctggtcacc

SEQ ID NO: 57295 - DNA, 75 bp, synthetic construct
  source 1..75: mol_type = other DNA
ccagtgccagttcctgtaaagtggagttccgtcacggtaaaatgacgctggaaaatccttcaccagagctgctca

SEQ ID NO: 57296 - DNA, 75 bp, synthetic construct
  source 1..75: mol_type = other DNA
tggagctggctaaagacggagcagtatccaaagatacctatgccagccggattggtcaggcggtatggagactgg

SEQ ID NO: 57297 - DNA, 75 bp, synthetic construct
  source 1..75: mol_type = other DNA
atcagcgagcatttgcgctattcgggcgtcaaagtcaggcgctcagcggtgacgacgcatttcaggtaggaataa

SEQ ID NO: 57298 - DNA, 75 bp, synthetic construct
  source 1..75: mol_type = other DNA
tcattgcagcaggagtattactctcctgcatgaacagcattgcctggggtgccatcatcccggatcgtacccgta

SEQ ID NO: 57299 - DNA, 75 bp, synthetic construct
  source 1..75: mol_type = other DNA
tttgtgtcgcacaatgcggtattccaggagcaaagcatgggcattcactacaacaaaggtgccgaactgctcgac

SEQ ID NO: 57300 - DNA, 75 bp, synthetic construct
  source 1..75: mol_type = other DNA
gtaaaatagcttgtttacgaacagcgaacgtgcaagaacaaatagattgggatgatttaatatatatatctgata

SEQ ID NO: 57301 - DNA, 75 bp, synthetic construct
  source 1..75: mol_type = other DNA
gctgcgcagggctggaccattaaggacggcggaattcagttgtcgggtggtgtatttaagatcgccaagcagagc

SEQ ID NO: 57302 - DNA, 75 bp, synthetic construct
  source 1..75: mol_type = other DNA
ctgcgggtcagcgtgctcacaagccgttcatttttaccgtggcgctgaacaaagcggttccgctgatgtacaacg

SEQ ID NO: 57303 - DNA, 75 bp, synthetic construct
  source 1..75: mol_type = other DNA
taagcgaaggcgtgcgcggcgatttcggcagtatcagcattgcattaaccctgctgtgggcgctctttaccacca

SEQ ID NO: 57304 - DNA, 75 bp, synthetic construct
  source 1..75: mol_type = other DNA
aaagagggctggcagccatatggcggaccggttgccattacgccgtacacactgatgcaggcggtggctattgaa

SEQ ID NO: 57305 - DNA, 75 bp, synthetic construct
  source 1..75: mol_type = other DNA
caaatcagcacgatgctcttgagaatattcagctcttagtcggggctggtgcactactgtatagcagcaataacc

SEQ ID NO: 57306 - DNA, 75 bp, synthetic construct
  source 1..75: mol_type = other DNA
atgaacacgcagagaaatttatcagtcttttagtgttgggtgttttatattctattgaaaaaagcaatatctata

SEQ ID NO: 57307 - DNA, 75 bp, synthetic construct
  source 1..75: mol_type = other DNA
gtgcgcatcggtgcccccaccggcgtggcctgttcggtgtgccccggcggagtgacgtccggccatccggtcaat

SEQ ID NO: 57308 - DNA, 75 bp, synthetic construct
  source 1..75: mol_type = other DNA
gtgcgtgaagcattattacgtctggtttcggtgaatgcgctttctgtcgcacctgcacaagcatttacagttccg

SEQ ID NO: 57309 - DNA, 75 bp, synthetic construct
  source 1..75: mol_type = other DNA
gtatatatggacggatcttttctgtatcatgtttttcagatatcccttttgttagagaacaccgcattaagttaa

SEQ ID NO: 57310 - DNA, 75 bp, synthetic construct
  source 1..75: mol_type = other DNA
cgattattccagaaaatgttaaagcagaaattaaggcttcaatggaaaaattgcatgccttaaatatgctatcgg

SEQ ID NO: 57311 - DNA, 75 bp, synthetic construct
  source 1..75: mol_type = other DNA
cgtactggccgggcaatccaatgccatggcttacggtgaagggcttccgcttccggattcatacgatgcgcccca

SEQ ID NO: 57312 - DNA, 75 bp, synthetic construct
  source 1..75: mol_type = other DNA
atggaattgcaggactggcgaaaagaacctcgtaaaaagtattcgaatgaattcaaacttcgtatggttgaactg

SEQ ID NO: 57313 - DNA, 75 bp, synthetic construct
  source 1..75: mol_type = other DNA
gataccgattacggtaaattgattcttaaggttttttctccgaaagttaagcgtaacgaacgtttctttaagtct

SEQ ID NO: 57314 - DNA, 75 bp, synthetic construct
  source 1..75: mol_type = other DNA
accatggaagttgagatcctcaaagaagcggtggagtatggtcagtcgcgaaaatggatagcgcatgcgcccttg

SEQ ID NO: 57315 - DNA, 75 bp, synthetic construct
  source 1..75: mol_type = other DNA
agagcggccagccgtacatccgacgttgctgatgacattgccgattctgctcagagagcttctcagctggctgaa

SEQ ID NO: 57316 - DNA, 75 bp, synthetic construct
  source 1..75: mol_type = other DNA
ctggatgctcgggaaatatcgctcccggaacgtagcagcatgcttcatcgaacagattttcacgatgattaccaa

SEQ ID NO: 57317 - DNA, 75 bp, synthetic construct
  source 1..75: mol_type = other DNA
gtgacggcaaggccggttgagatgatgagcccggacctgcgtgtgctgagtggagtagatggcttaccgccgcta

SEQ ID NO: 57318 - DNA, 75 bp, synthetic construct
  source 1..75: mol_type = other DNA
actaacgaggatgttaaccctgatagcgataacatgctacggctgtgggatgacctgaatgaccgtcacgcgccc

SEQ ID NO: 57319 - DNA, 75 bp, synthetic construct
  source 1..75: mol_type = other DNA
tttgtcgaatttctggggctcgttaacaaagccctcacaatcagttcagcaaggtccaaagcgttaacagcttcc

SEQ ID NO: 57320 - DNA, 75 bp, synthetic construct
  source 1..75: mol_type = other DNA
tggcgctatcagtggaagcctgatgtctttattgaaccgcaggccgaactggtttacgggacgttgtcaggcaat

SEQ ID NO: 57321 - DNA, 75 bp, synthetic construct
  source 1..75: mol_type = other DNA
tatgaacagtctcacggtgtgctgattgacgatgacgccttgcaggccgcagcaacactgagcgagcgttatctc

SEQ ID NO: 57322 - DNA, 75 bp, synthetic construct
  source 1..75: mol_type = other DNA
tggttctcgctaattaaatgcccagatgaaattagaaatttatcgaaacggataattcgatatcagattgggttg

SEQ ID NO: 57323 - DNA, 75 bp, synthetic construct
  source 1..75: mol_type = other DNA
taatcaccatcacgacgatccatctccggtgccggacgatggcggcaacacaccagtaccgccggacgatggcgg

SEQ ID NO: 57324 - DNA, 75 bp, synthetic construct
  source 1..75: mol_type = other DNA
aacgtgaaaaggatgacccgcaaaactcaacgaccaccgataccggagaaacgccgcgtattgaaggattctcca

SEQ ID NO: 57325 - DNA, 75 bp, synthetic construct
  source 1..75: mol_type = other DNA
tatttgattggtcaggacccgtcacgcatcaacgacttatggcaagtgatgtatcgcgccggattttatcgtggc

SEQ ID NO: 57326 - DNA, 75 bp, synthetic construct
  source 1..75: mol_type = other DNA
gcgggagttccgtctggtgctgaccacgcaggcgcagcgggcggaagaggcccgtaaacagcacaccgcttcttt

SEQ ID NO: 57327 - DNA, 75 bp, synthetic construct
  source 1..75: mol_type = other DNA
ccaatgcgctggttgaagccagttataaattgaccctacaggaacagcgatttttgttactttgcatcggtcgat

SEQ ID NO: 57328 - DNA, 75 bp, synthetic construct
  source 1..75: mol_type = other DNA
gttgtatcatctcaagatgatacgccatttaaaaccaactcagtaaaatggaaccaaaatattatttcacaagga

SEQ ID NO: 57329 - DNA, 75 bp, synthetic construct
  source 1..75: mol_type = other DNA
taattttacgaccgatcagctatttatgttgactgcgctgccttcggtttctggcgcgttattacgtgttccata

SEQ ID NO: 57330 - DNA, 75 bp, synthetic construct
  source 1..75: mol_type = other DNA
caatcaagaaggggcgcactgtcgtagccctgcattttcgcttcaaggaagacaaacagatcaagatgacgatct

SEQ ID NO: 57331 - DNA, 75 bp, synthetic construct
  source 1..75: mol_type = other DNA
caaatagttaccccaaatcaagaacgtactataattaaaggtatagtcgagagatcaaatggggttattgctcca

SEQ ID NO: 57332 - DNA, 75 bp, synthetic construct
  source 1..75: mol_type = other DNA
ccggtgtaacattaacacctgccggtcaattgttactctcccgttccgaatccattacccgtgaaatgaaaaata

SEQ ID NO: 57333 - DNA, 75 bp, synthetic construct
  source 1..75: mol_type = other DNA
aaatttgccggtgaaaacaccatctatggcagcattcgcctgaccaaccgccagacattccagttccacggcatt

SEQ ID NO: 57334 - DNA, 75 bp, synthetic construct
  source 1..75: mol_type = other DNA
ctgactggataatccaatgtgctcttgaaacaggaacctccctcaaatggttaactaccggacaaggccttaagc

SEQ ID NO: 57335 - DNA, 75 bp, synthetic construct
  source 1..75: mol_type = other DNA
caggtgcaacgggagcggcgctggctgacctgctggttgcccgaatcaaaggccagcctgatttaccggtgacgg

SEQ ID NO: 57336 - DNA, 75 bp, synthetic construct
  source 1..75: mol_type = other DNA
aaacctcacgcatcctctatatttcaccgataaaagccctgggcaccgacgttcagcgcaacttgcagatcccgt

SEQ ID NO: 57337 - DNA, 75 bp, synthetic construct
  source 1..75: mol_type = other DNA
ccgtaatccgatcaacgctgtcgatatgaaggctcgtcagtaccagtgtgaacaggtgaactacgacacctttat

SEQ ID NO: 57338 - DNA, 75 bp, synthetic construct
  source 1..75: mol_type = other DNA
tttctgacagcgtctgtttatcgacctggaaagcggcgttactcggtagtgaacataaacgcgtacccgacgatt

SEQ ID NO: 57339 - DNA, 75 bp, synthetic construct
  source 1..75: mol_type = other DNA
tcattggtggaaatggaggcgacggtcagtccggaaatatcggcgtcagcggtgaaggcggaacatcgtactggg

SEQ ID NO: 57340 - DNA, 75 bp, synthetic construct
  source 1..75: mol_type = other DNA
tgagtccgtttgaatccctgctgattgtggatttaggcggaaccacgctggatgtggcaaaggttcagggacaac

SEQ ID NO: 57341 - DNA, 75 bp, synthetic construct
  source 1..75: mol_type = other DNA
tgagaacggcgaacgccgcaacgccatcagcccgaacagcttcaagtcggaatggtctgcgccgttcggtggcac

SEQ ID NO: 57342 - DNA, 75 bp, synthetic construct
  source 1..75: mol_type = other DNA
taccggattcttacgatgctccggatccgcgcattaaacagctggcgcgccgcagcacggtaactggcattttta

SEQ ID NO: 57343 - DNA, 75 bp, synthetic construct
  source 1..75: mol_type = other DNA
aacccgtaagccagatttgattattctcgatctcggcctgcccgatggtgatgggattgagtttatccgcgacct

SEQ ID NO: 57344 - DNA, 75 bp, synthetic construct
  source 1..75: mol_type = other DNA
acgccttaaccgtctttcctctaaaagcaaaagtcgcgcctttcaacggaattaatacgctgtttccttttattg

SEQ ID NO: 57345 - DNA, 75 bp, synthetic construct
  source 1..75: mol_type = other DNA
attgttatcatggaacattactgacggggatctaaattccaaattaaatacattagaatatctaaactgtataac

SEQ ID NO: 57346 - DNA, 75 bp, synthetic construct
  source 1..75: mol_type = other DNA
cgcgtttatcccgttcaaaatttcgctctcgctttcgtctgggcatgaaagagcgtcagtattgcctggagaaag

SEQ ID NO: 57347 - DNA, 75 bp, synthetic construct
  source 1..75: mol_type = other DNA
aaatcctaacatgcaagcaaaaatatcaactagacagcatcattcatgaaattataccaaaagagaatgagagtg

SEQ ID NO: 57348 - DNA, 75 bp, synthetic construct
  source 1..75: mol_type = other DNA
gtggatttcaatagcggcggtaagaaagccatagaacgtttagttgaagcatatgggttcggtacccgtcaggct

SEQ ID NO: 57349 - DNA, 75 bp, synthetic construct
  source 1..75: mol_type = other DNA
tttctcccttctattacatcattgcatgatcccgtcatgacagcacttatgtcaaactacaacaagacagcacca

SEQ ID NO: 57350 - DNA, 75 bp, synthetic construct
  source 1..75: mol_type = other DNA
agtctcggtgatgactctctgctgtggaatgatgcagcgaaagcattcagtgccgctcacggtaccgatgccacc

SEQ ID NO: 57351 - DNA, 75 bp, synthetic construct
  source 1..75: mol_type = other DNA
ccttcagtgtggcgtacaacctgaaaaacagagaatgaccgaaattctgtctgatgagttttatgctgctgaaaa

SEQ ID NO: 57352 - DNA, 75 bp, synthetic construct
  source 1..75: mol_type = other DNA
gggcaggagctgaatgatcgtattaatgcctctgcattgcgcagtgaagttgagcaactggaggatgaggtcaat

SEQ ID NO: 57353 - DNA, 75 bp, synthetic construct
  source 1..75: mol_type = other DNA
cacagcgggtatgacgcggcaggaaggctcacggcgcagacggacgcggcgggacggcggacagagtacggtctg

SEQ ID NO: 57354 - DNA, 75 bp, synthetic construct
  source 1..75: mol_type = other DNA
gtggttaaaaaaagaaccacgggcatcttattttttctgttccagctgtatacccgcattcacaatacatttttc

SEQ ID NO: 57355 - DNA, 75 bp, synthetic construct
  source 1..75: mol_type = other DNA
ccgcgctggctgcgtggcaaaaataccagcaggactgccagaaagttaaggatgaggcaaaacgccttgaggccg

SEQ ID NO: 57356 - DNA, 75 bp, synthetic construct
  source 1..75: mol_type = other DNA
acaccactcaagtggtgttttagaacaataccagagcgtatttcaattgaggaaatcgatgaaataaaatttatc

SEQ ID NO: 57357 - DNA, 75 bp, synthetic construct
  source 1..75: mol_type = other DNA
ttgccagcgacggattaagagataatgataaagaaattgtttttatgatgattcaggaaatgagcgaagaagaaa

SEQ ID NO: 57358 - DNA, 75 bp, synthetic construct
  source 1..75: mol_type = other DNA
tcgctaacggtgcaatctctgccaccagcagcgatgccattaacggttcacaactgtataccaccaacaagtaca

SEQ ID NO: 57359 - DNA, 75 bp, synthetic construct
  source 1..75: mol_type = other DNA
gaaggccacaaacccggatatcacccgcagcgtggcggggatgggggatcgtcagtacaactacatcgtcatgcc

SEQ ID NO: 57360 - DNA, 75 bp, synthetic construct
  source 1..75: mol_type = other DNA
gcagcgttttgaaaacgcagtaaaggagagcactgaatttacaaaaaaaattaacgtgttcggtgtgaccgacca

SEQ ID NO: 57361 - DNA, 75 bp, synthetic construct
  source 1..75: mol_type = other DNA
tacactttttagggctggcaacagcccttatcacgccttttgcctattccggccaggatgtggatctcaccgcaa

SEQ ID NO: 57362 - DNA, 75 bp, synthetic construct
  source 1..75: mol_type = other DNA
ctgctgcgcagggctggagcattaagaatggcggaattcagttgtcagatggtgtatttaagatcaccaagcaga

SEQ ID NO: 57363 - DNA, 75 bp, synthetic construct
  source 1..75: mol_type = other DNA
ccaacgggctgttgatgcaactggtgatggatctcaagagtggttatctgcggcgatgtgaagcactggggcttt

SEQ ID NO: 57364 - DNA, 75 bp, synthetic construct
  source 1..75: mol_type = other DNA
tcaaaacccaacttacatggagtaattaaaaaagttgatttgaacacaaatgaagcggaaattaaaataaaatag

SEQ ID NO: 57365 - DNA, 75 bp, synthetic construct
  source 1..75: mol_type = other DNA
cttgaaagaggggtaaatatatctgtaagaatacagaagaaaattttatcagaaaggccatatgttgcattcaga

SEQ ID NO: 57366 - DNA, 75 bp, synthetic construct
  source 1..75: mol_type = other DNA
ggggtgtgggtaaaccgttatatcaggacctgatcgcacgcaccaaagcggcattacagaagaacccgaaaaatg

SEQ ID NO: 57367 - DNA, 75 bp, synthetic construct
  source 1..75: mol_type = other DNA
attatcgaaatgcgtcacttgggctatctcagcagagactgcaactggaaaaatacaaccagcgacggcttgagt

SEQ ID NO: 57368 - DNA, 75 bp, synthetic construct
  source 1..75: mol_type = other DNA
gggtatcgggcgacgacggtggtgtttgtttccgataccgtggcgcttagcaaagtgtcaggcaacgagcttctg

SEQ ID NO: 57369 - DNA, 75 bp, synthetic construct
  source 1..75: mol_type = other DNA
cgccggtgcgccgcaggggcagaaggataatccgcttattaatattctggataagttctccacctggtatgacac

SEQ ID NO: 57370 - DNA, 75 bp, synthetic construct
  source 1..75: mol_type = other DNA
tttcattattgaaaatcggctgaccaaaccagagcaactgactggttttaatagcgaaggttacttctttgatga

SEQ ID NO: 57371 - DNA, 75 bp, synthetic construct
  source 1..75: mol_type = other DNA
cgcacggtggagcctcaccatgacggcaccgtgcactggcatatgatggtctttgctcatccggaagaaatcgac

SEQ ID NO: 57372 - DNA, 75 bp, synthetic construct
  source 1..75: mol_type = other DNA
tcctggaagttagccgaacgcgtcactttggtcgagcggctgaatcgctctatctgacccagtcagcagtgagct

SEQ ID NO: 57373 - DNA, 75 bp, synthetic construct
  source 1..75: mol_type = other DNA
tgaacctgttaatcacctcagtggatggagataaaaccgctggcgcggcgtcagtggatattggtgaattctacc

SEQ ID NO: 57374 - DNA, 75 bp, synthetic construct
  source 1..75: mol_type = other DNA
aatgtttttcaactcacgtctggaacgtgatctcgcgacttttaagcaacaggctgatgtcatcatctctaatcg

SEQ ID NO: 57375 - DNA, 75 bp, synthetic construct
  source 1..75: mol_type = other DNA
ggttcaccgtaaggcagaaatgatggccaccatgaaggggctggaacttctggccgaagcccgtggcgacagagc

SEQ ID NO: 57376 - DNA, 75 bp, synthetic construct
  source 1..75: mol_type = other DNA
gcgctgtttgccattgcaggtgcgttgctgctggaaccggtagccgcgtcggcgctgagcttgcgcctgtaccgc

SEQ ID NO: 57377 - DNA, 75 bp, synthetic construct
  source 1..75: mol_type = other DNA
gacggagaaatacgccgctacgacaggcgtcagaacataatctgtcgcgagtgccggaagagcgaagctatgcag

SEQ ID NO: 57378 - DNA, 75 bp, synthetic construct
  source 1..75: mol_type = other DNA
catccaccagcagaatgtggcaccacatgatgatcgaccttgaaaccatgggaaaaaatcccgatgccccgctta

SEQ ID NO: 57379 - DNA, 75 bp, synthetic construct
  source 1..75: mol_type = other DNA
tatcgtattcctgacccgatggcatttttgcgccagcagaaaaacctgcatcgcattgtggtgcaaccgcaatat

SEQ ID NO: 57380 - DNA, 75 bp, synthetic construct
  source 1..75: mol_type = other DNA
ccaagacaggtgcgacaagatatctgatgagcattcttgccagagagttggttgccagtggcgatgtatacaact

SEQ ID NO: 57381 - DNA, 75 bp, synthetic construct
  source 1..75: mol_type = other DNA
acccaaggaagcggactacgttctctatgatggcgatggccttgagctacttatcaaatccagcgggagtaaaat

SEQ ID NO: 57382 - DNA, 75 bp, synthetic construct
  source 1..75: mol_type = other DNA
acgcaacataccaggaaacattcgatgaagagtatcaggttgaagttcaggaagatgatccggaggaaatggaag

SEQ ID NO: 57383 - DNA, 75 bp, synthetic construct
  source 1..75: mol_type = other DNA
aagaacgggaggaatacacattgttcgccctggaatgtatccgatacaccgccacgcggtcgctgaatgacgcta

SEQ ID NO: 57384 - DNA, 75 bp, synthetic construct
  source 1..75: mol_type = other DNA
gggccagaagcagagcgttcaacagtagcgcaggcaaaagaactgaaggatgatgcatgggttatccttgaaggg

SEQ ID NO: 57385 - DNA, 75 bp, synthetic construct
  source 1..75: mol_type = other DNA
gggtggctgattttacttacgtcagcacatggcagggcttcgtctatgtggcgttcatcattgatgtgtttgccg

SEQ ID NO: 57386 - DNA, 75 bp, synthetic construct
  source 1..75: mol_type = other DNA
gccgataatattggaggtgtatattacaggccggttcagaaacagattaatggaacatggtataacgtggcacag

SEQ ID NO: 57387 - DNA, 75 bp, synthetic construct
  source 1..75: mol_type = other DNA
ttttcgcctggatggaacaaattgataatgcagtcgatgtcacggcaggtgaagtaaccgctaacgcaacctacg

SEQ ID NO: 57388 - DNA, 75 bp, synthetic construct
  source 1..75: mol_type = other DNA
cttgcgaaatataaaatgccctgaaggttcagagagagtaggcgattatcacactcacggtttttactctgacga

SEQ ID NO: 57389 - DNA, 75 bp, synthetic construct
  source 1..75: mol_type = other DNA
tgcggtcaacttccttaaggccaacgccgtagaagcgccggacacatcattcaacaacgtgttcccggaggatga

SEQ ID NO: 57390 - DNA, 75 bp, synthetic construct
  source 1..75: mol_type = other DNA
gagcgccataatgcacttgatgacgcccgttaccaggcaaaatacgtttcagttatctggcaaaaactgatcccg

SEQ ID NO: 57391 - DNA, 75 bp, synthetic construct
  source 1..75: mol_type = other DNA
tgcatgttcagggcgttcagcgcgtggaactgaccagccccgcacagaatattgttatcagtgatgtgcagtcag

SEQ ID NO: 57392 - DNA, 75 bp, synthetic construct
  source 1..75: mol_type = other DNA
atggataaacttaaaattaagtttgattcattagcctctcacgatattacctttgttggtattgtacagaccgct

SEQ ID NO: 57393 - DNA, 75 bp, synthetic construct
  source 1..75: mol_type = other DNA
ttacttttatccggggccggagtcggaacccatcctgaatgccgccagaaacaatctggaaacctggcttgccga

SEQ ID NO: 57394 - DNA, 75 bp, synthetic construct
  source 1..75: mol_type = other DNA
ttctcattctgggaggcccgttccgggtggtgccgtgccgagtggattggtgccggtcgcatggcgattgatggc

SEQ ID NO: 57395 - DNA, 75 bp, synthetic construct
  source 1..75: mol_type = other DNA
aacgcgatggcggagagcatcaatggtctttacaaagcggaggtaatacaccgtaagagctggaaaaaccgtgca

SEQ ID NO: 57396 - DNA, 75 bp, synthetic construct
  source 1..75: mol_type = other DNA
ggttcgcacacgtgaacgtggcacaacagccattttctacaccaccctggagaaggaaaacgccgccggagaagt

SEQ ID NO: 57397 - DNA, 75 bp, synthetic construct
  source 1..75: mol_type = other DNA
tatgtgtcactggcctatacggagcgattaaaagaagcaaaactgctggcatcaacaggaagtacaggtggcccg

SEQ ID NO: 57398 - DNA, 75 bp, synthetic construct
  source 1..75: mol_type = other DNA
ctggtcagtcagaaggatgcgcaggggcgtgaaacccgttatgagtacagcgccgcaggagacctgacagcaacg

SEQ ID NO: 57399 - DNA, 75 bp, synthetic construct
  source 1..75: mol_type = other DNA
ctggtacaggcactgggcctggtggatatccgggtgccggaccatctgatagtcggtggcaaccaggttttctcc

SEQ ID NO: 57400 - DNA, 75 bp, synthetic construct
  source 1..75: mol_type = other DNA
aaccgtgcagaagtggaactggccacactcacgtgggtggactggtataacaatcgacgattgctggaaaggctg

SEQ ID NO: 57401 - DNA, 75 bp, synthetic construct
  source 1..75: mol_type = other DNA
tgatggtgaggtagttcgccctaaagaaccaaactggaccgcatgggcgaatgaggttcgcctgatggtgatgca

SEQ ID NO: 57402 - DNA, 75 bp, synthetic construct
  source 1..75: mol_type = other DNA
ctaggcggcgatttggcgcagtggagtagcaacgcgcaggatcgctggcatcttggcgtgatggcaggctacgcc

SEQ ID NO: 57403 - DNA, 75 bp, synthetic construct
  source 1..75: mol_type = other DNA
caggctggcgtgacagccggaaaatcaaaactcgacctgacaaacactgactggatttatggggtggatttatga

SEQ ID NO: 57404 - DNA, 75 bp, synthetic construct
  source 1..75: mol_type = other DNA
tcctgatgtcactattaaatcagagggggaagtcacctggcaagccgtgctggatatgctctgtgaggagaatga

SEQ ID NO: 57405 - DNA, 75 bp, synthetic construct
  source 1..75: mol_type = other DNA
tgacctgttaaagttctctataaaagaaagcatcaatcgaagccgaggtaaaacagaagtaactctggaagagta

SEQ ID NO: 57406 - DNA, 75 bp, synthetic construct
  source 1..75: mol_type = other DNA
ttacgctactttgtctcagtactggggcgagatggggagaagcgaaaaatctgcgcgcggaacacatcatcaata

SEQ ID NO: 57407 - DNA, 75 bp, synthetic construct
  source 1..75: mol_type = other DNA
tgataaaatctcctgcaaatggtgttgtgattaaaagaaaaatttctgatggattgaaagaaatagtttctctta

SEQ ID NO: 57408 - DNA, 75 bp, synthetic construct
  source 1..75: mol_type = other DNA
tgaaatcaaatccggtgcaaaaacgtccgtctggctgttcctgctgggcgtagttggcgtggttatctatgcaat

SEQ ID NO: 57409 - DNA, 75 bp, synthetic construct
  source 1..75: mol_type = other DNA
tggctgggcgcgagcgttgaccgccgcaccttaagcgagttgttagatacctggtggctgctgtatggacagact

SEQ ID NO: 57410 - DNA, 75 bp, synthetic construct
  source 1..75: mol_type = other DNA
aactgcgtattctggactggaaccgggttgaacctctggtggcggatgacggcgaggtgttctaccgcatcacgc

SEQ ID NO: 57411 - DNA, 75 bp, synthetic construct
  source 1..75: mol_type = other DNA
atgcttccccgttttgccgacatttttcagcagggaaaccgctggcttaactggctggagaaacagccggaaggc

SEQ ID NO: 57412 - DNA, 75 bp, synthetic construct
  source 1..75: mol_type = other DNA
aggctggagggggaaatccgggcaaactgcgtgagcagtgaaagccgccagtggcttgcgcagtgcgggctgacg

SEQ ID NO: 57413 - DNA, 75 bp, synthetic construct
  source 1..75: mol_type = other DNA
ttgtggcttatccctggcgtggtgaatacattgcctgttacacgaaaccggatggtaagcaggatgtgtttgtat

SEQ ID NO: 57414 - DNA, 75 bp, synthetic construct
  source 1..75: mol_type = other DNA
gcatggaatacgatgcagcgggacgtgtcatcagcctgaccaacgagaacggtagccatacagaatttagctggg

SEQ ID NO: 57415 - DNA, 75 bp, synthetic construct
  source 1..75: mol_type = other DNA
aagaagatcagaatccgaccccgctgccggccgtcgctgaggcgctgattgaagcggtggtgcacgatctactgt

SEQ ID NO: 57416 - DNA, 75 bp, synthetic construct
  source 1..75: mol_type = other DNA
atacggccagggaaagagccaactccgattaaaggagatggactgtatgactatcggttatcaagtgtgcagtag

SEQ ID NO: 57417 - DNA, 75 bp, synthetic construct
  source 1..75: mol_type = other DNA
cgcaccgctgccagggtcaatgcgcctggtgttgattgtactgattgtgatgtcgctgatttccagcgtaatcgc

SEQ ID NO: 57418 - DNA, 75 bp, synthetic construct
  source 1..75: mol_type = other DNA
gatgatgatggtcaccctgttatccctggatgcttcagcgcagaaagttgcgagtatgaaaaactccaacgagat

SEQ ID NO: 57419 - DNA, 75 bp, synthetic construct
  source 1..75: mol_type = other DNA
accgtatcgtcggccaaaaaagaccacttcagatatcccatatctggggaatccgaatcaggcttgaactagaag

SEQ ID NO: 57420 - DNA, 75 bp, synthetic construct
  source 1..75: mol_type = other DNA
gatgagtgttcttgccagagagctggttgccagtggcgatttatacaactccggctacgggttatttccgtctga

SEQ ID NO: 57421 - DNA, 75 bp, synthetic construct
  source 1..75: mol_type = other DNA
tgttggttctctggcttttttttctgaggcctgtattcgtgccggaataaaacttgaatcactgacaggaaaata

SEQ ID NO: 57422 - DNA, 75 bp, synthetic construct
  source 1..75: mol_type = other DNA
acaggcctgatgacccgcgacaattacataacggtaaataacattaccctggggaagcatccggaggcaaaacga

SEQ ID NO: 57423 - DNA, 75 bp, synthetic construct
  source 1..75: mol_type = other DNA
ggcgtcataatataatttgtactgagtgtcgtaaaagcgaagttatgcagcgcatattgtcgttttatcaggggg

SEQ ID NO: 57424 - DNA, 75 bp, synthetic construct
  source 1..75: mol_type = other DNA
attgctggaaaggctgggccatattcctccggcagaagcagaaaaagcttattatgcttccatcggaaatactga

SEQ ID NO: 57425 - DNA, 75 bp, synthetic construct
  source 1..75: mol_type = other DNA
gcgtaaagtctggcgtcagttgttacgggaaggtatcagagtggccagatgcactgtggcacgtctcatggcagt

SEQ ID NO: 57426 - DNA, 75 bp, synthetic construct
  source 1..75: mol_type = other DNA
caaaccgtcaatgtcacgctggatgcgcgtaatggcgggcaggggagtttccgcctgccagaaaatgccgttgcc

SEQ ID NO: 57427 - DNA, 75 bp, synthetic construct
  source 1..75: mol_type = other DNA
gattatggatggcaccactcctcgcgtgctggagaacgccgaaggcgatcgcaccacgccttctatcattgccta

SEQ ID NO: 57428 - DNA, 75 bp, synthetic construct
  source 1..75: mol_type = other DNA
gaacagagcgtacagatttacgggatctggtcaccactcatcggggaatcctcccgtgtgtgcacgcacccggat

SEQ ID NO: 57429 - DNA, 75 bp, synthetic construct
  source 1..75: mol_type = other DNA
gctgcctgcagggcgttattctgacaacgtacgccttgacccgtgggtatttatgttctctgcgggttaccgctt

SEQ ID NO: 57430 - DNA, 75 bp, synthetic construct
  source 1..75: mol_type = other DNA
gtggcaaaagtttttacacaagaagagcgagaaaaaattaaagggcaagttgttgagctagtacgccggagtggg

SEQ ID NO: 57431 - DNA, 75 bp, synthetic construct
  source 1..75: mol_type = other DNA
ataccctgcgtggtacgcacggggtcggaccggtatgccacgagctggctgtcgccccgtcaacgtattaccggc

SEQ ID NO: 57432 - DNA, 75 bp, synthetic construct
  source 1..75: mol_type = other DNA
ctttggcgtgagtgggttgaatttcgccaggcattgcgtaaaccgattcgaacggagcagggcgctaacggggcg

SEQ ID NO: 57433 - DNA, 75 bp, synthetic construct
  source 1..75: mol_type = other DNA
gatgacctgctgaagccggagatacagcgcgtgtacgatgtaaaccacagcgtgtacggtgtgcgcaaggtctgg

SEQ ID NO: 57434 - DNA, 75 bp, synthetic construct
  source 1..75: mol_type = other DNA
ggacgctaaggaacgggaattgccgattggtcacggcgtattgcgcggcgcgttaatatcgtatatccacacaac

SEQ ID NO: 57435 - DNA, 75 bp, synthetic construct
  source 1..75: mol_type = other DNA
aaatccctgtccaatgtggcagtgaataatgtcctgggtatttctgtgccggtgttctggtcgctccaggcagag

SEQ ID NO: 57436 - DNA, 75 bp, synthetic construct
  source 1..75: mol_type = other DNA
aggtgaagaaaacatctgtggttgatccggaccttatctggtcattacctgacggagaaatacgtcgttatgaca

SEQ ID NO: 57437 - DNA, 75 bp, synthetic construct
  source 1..75: mol_type = other DNA
ccttccggctccgcaggacgggcgtgatgccacggcactggaagtgctccccgctattgacgatcaaaaatcctt

SEQ ID NO: 57438 - DNA, 75 bp, synthetic construct
  source 1..75: mol_type = other DNA
aacactaacaccttttatatcacatttgtacaatcaacctaaactactaattgttttacctttactatcttttag

SEQ ID NO: 57439 - DNA, 75 bp, synthetic construct
  source 1..75: mol_type = other DNA
cactggcgcagatatgggatttggcacgcaatcgctatcacgatgcgccacaggataacccttggcgtggtcatg

SEQ ID NO: 57440 - DNA, 75 bp, synthetic construct
  source 1..75: mol_type = other DNA
ggtcgcggataactatcaccgccgtctggtgctggaaatcatggatgaaatgcgtgaaccaatccaaagcggaac

SEQ ID NO: 57441 - DNA, 75 bp, synthetic construct
  source 1..75: mol_type = other DNA
tggcaatttgacagtcaaaggtaatatttccactttctctctttctaatccatgggttattctcggtaacgtgac

SEQ ID NO: 57442 - DNA, 75 bp, synthetic construct
  source 1..75: mol_type = other DNA
aacgacaagcgttatattttcaaagcggtcagcgcagcctctaaagcacatcgttatttgatggacaaaatctga

SEQ ID NO: 57443 - DNA, 75 bp, synthetic construct
  source 1..75: mol_type = other DNA
ggatgcggctaacttctacgctaccggtctgcatgagctggttcactggagcgggggtaaaaaacgcctgaaccg

SEQ ID NO: 57444 - DNA, 75 bp, synthetic construct
  source 1..75: mol_type = other DNA
ctctcacgtccggtgtggatagcgcaggcgtatcagcagcagatagcggagagtcgtaggccggaagaggagaca

SEQ ID NO: 57445 - DNA, 75 bp, synthetic construct
  source 1..75: mol_type = other DNA
cttaaggaggtgcaggaggcggtgatgcgtattgaaggtggcctgagtacatacgagaaggagctggccctgatg

SEQ ID NO: 57446 - DNA, 75 bp, synthetic construct
  source 1..75: mol_type = other DNA
actttacgctgttagcgcatttccgcgtgggtaaaacctgtgaaatcgatcttgaagcacacggcgaatttgaaa

SEQ ID NO: 57447 - DNA, 75 bp, synthetic construct
  source 1..75: mol_type = other DNA
gcagcgacgattgaaagtgaccttgataccgaaaaggcctttgaatatatcgccggtgcgccgcaggggcagaag

SEQ ID NO: 57448 - DNA, 75 bp, synthetic construct
  source 1..75: mol_type = other DNA
taatttaccagcagagccgaaagccgcgctggtaacggaaagtgatggtaaggcctttcctcagccagcaggtgc

SEQ ID NO: 57449 - DNA, 75 bp, synthetic construct
  source 1..75: mol_type = other DNA
cagacagggccgacttttcggcctttatggatagcattggctattatgatgacgagtcgatgcaggatgatattc

SEQ ID NO: 57450 - DNA, 75 bp, synthetic construct
  source 1..75: mol_type = other DNA
ccgacagggccgacttttcggcctttatggagagtattggctattatgatgacgagtcgatgcaggatgatattc

SEQ ID NO: 57451 - DNA, 75 bp, synthetic construct
  source 1..75: mol_type = other DNA
agcccgtattgagtctggggagtttccagaaggtacaattctgctagtcgaagctatcgaccgcataggccgcct

SEQ ID NO: 57452 - DNA, 75 bp, synthetic construct
  source 1..75: mol_type = other DNA
ccattccggacgaacaggcaataaaggaagaaggtgcagtcgctgtagccacagctattgaagctggcgacgaac

SEQ ID NO: 57453 - DNA, 75 bp, synthetic construct
  source 1..75: mol_type = other DNA
tggaaagaaaatccggtaaaagaacttcctgatattgatgaatctgctcaccccttccatgtctgttatggtgga

SEQ ID NO: 57454 - DNA, 75 bp, synthetic construct
  source 1..75: mol_type = other DNA
aagagcggccagtaaaatctgaagcacaggatatgctgaccggggaggtcgaacaaaaagttaccgcagacatga

SEQ ID NO: 57455 - DNA, 75 bp, synthetic construct
  source 1..75: mol_type = other DNA
accccgccctgccctcgattcctgggatgctgaatatatgcaggaaaaccgctgggatgaggaatccgcttcctt

SEQ ID NO: 57456 - DNA, 75 bp, synthetic construct
  source 1..75: mol_type = other DNA
ctccagaagcaatgcaatcatggctgcaaaacaacgccaaggaactgactcgcgtcggtgttgaccctaataacg

SEQ ID NO: 57457 - DNA, 75 bp, synthetic construct
  source 1..75: mol_type = other DNA
cggccagttaaatctgatgcaccataaaacaggggggaatacgaaactgggatcatttggagcctacaataacca

SEQ ID NO: 57458 - DNA, 75 bp, synthetic construct
  source 1..75: mol_type = other DNA
ccgtggatttgtggcgataccacgtatttctggaaacagaaaaatgaaccggcataccaggcaatctatggcggc

SEQ ID NO: 57459 - DNA, 75 bp, synthetic construct
  source 1..75: mol_type = other DNA
attccggagaaccgcgtggccgccgggcgtaatcattttgctgaaccggcagttcgtgaaccggtagccccccgc

SEQ ID NO: 57460 - DNA, 75 bp, synthetic construct
  source 1..75: mol_type = other DNA
cctggtggactgtgctgccgttcaccccggcagccagtggcgaaaccggacgctggcgcagattgccgcagattt

SEQ ID NO: 57461 - DNA, 75 bp, synthetic construct
  source 1..75: mol_type = other DNA
cagtactgttcggaagtggtgtggaaggtttaccagaatgcgctgggaatgcgcgtgggcgaacagcagaagttg

SEQ ID NO: 57462 - DNA, 75 bp, synthetic construct
  source 1..75: mol_type = other DNA
atggagactgtttttgacgcactgaaagcaatgggaaaagccacatccatagaacttgctgcgcgacttgatatc

SEQ ID NO: 57463 - DNA, 75 bp, synthetic construct
  source 1..75: mol_type = other DNA
gcgtctgtccccgctgctggatgcgcagtctgatgagtgtccggagacgttacaggatgcagagcctgtgctgcc

SEQ ID NO: 57464 - DNA, 75 bp, synthetic construct
  source 1..75: mol_type = other DNA
cgtctggggaatgcccgggcagatgatctagtgcgcaataacggaatagcggctaatgcggttgccctgcataag

SEQ ID NO: 57465 - DNA, 75 bp, synthetic construct
  source 1..75: mol_type = other DNA
acagggaagagcaaggcgaaccggaaaaacgttacagacgcgactgaggagcttgtacagctgtccattgccaaa

SEQ ID NO: 57466 - DNA, 75 bp, synthetic construct
  source 1..75: mol_type = other DNA
tactgaaacgcgagctgatgatttgattttgccatcgctgcatatggcaaaccgcgaactgcggcgggcgaagaa

SEQ ID NO: 57467 - DNA, 75 bp, synthetic construct
  source 1..75: mol_type = other DNA
cggggtggatgtcgctgtcgcgtaaaccggaggagacatggtacggctgggacggcgacaggctgacgacggtac

SEQ ID NO: 57468 - DNA, 75 bp, synthetic construct
  source 1..75: mol_type = other DNA
cagtccgaagcgcgtcagcacgcccggttatggcatcggcgatcgttttatgcgtgccggagtggaaatcaaccg

SEQ ID NO: 57469 - DNA, 75 bp, synthetic construct
  source 1..75: mol_type = other DNA
gctcaggactgcgcttataaatttcttgtttgcgaggataaacccggcatgccccgccctgccatcgactcctgg

SEQ ID NO: 57470 - DNA, 75 bp, synthetic construct
  source 1..75: mol_type = other DNA
ttcagcagtctgatggccgaaatacgccgtattgcgggtgttaccgatgtgcgtactgtcccgtggatgccttcc

SEQ ID NO: 57471 - DNA, 75 bp, synthetic construct
  source 1..75: mol_type = other DNA
cagcgccgcagcctggcggatgcgcttcagcagtccggcggcgaagacggtggcagtgtggtgttcccgccggtg

SEQ ID NO: 57472 - DNA, 75 bp, synthetic construct
  source 1..75: mol_type = other DNA
tgattcgcgaaggcgtggccactcacgcgttcaacggtgaaacctgcgtacaaccggtgtgggagagctgcgccg

SEQ ID NO: 57473 - DNA, 75 bp, synthetic construct
  source 1..75: mol_type = other DNA
atgccgggacggcaatgcgtgccagcctggctcgtctggcatcaccgccaaaggcggcagcagaggcgctgaaag

SEQ ID NO: 57474 - DNA, 75 bp, synthetic construct
  source 1..75: mol_type = other DNA
gcgcgtaggtgaacagcagaagttgaaagagttcgatcttagtaacccgctggttcaggcgaaactcaaagaacg

SEQ ID NO: 57475 - DNA, 75 bp, synthetic construct
  source 1..75: mol_type = other DNA
tgttaaccgcttaccctgctgccaatcttaaccgtgatgattccggctctccgaaaactgtgattctgggtggag

SEQ ID NO: 57476 - DNA, 75 bp, synthetic construct
  source 1..75: mol_type = other DNA
tgcgcagccaggttaccagaaacagcaaggtgaagtgtatcgccagcttttgcaaacgcccgcgccgatgcaaaa

SEQ ID NO: 57477 - DNA, 75 bp, synthetic construct
  source 1..75: mol_type = other DNA
tcaacaaatcgccgttcaccgggaagaaggcatcagcacttacagcagttataacccgcgtgggcaactggtcag

SEQ ID NO: 57478 - DNA, 75 bp, synthetic construct
  source 1..75: mol_type = other DNA
tgggcgaaataccaggtggagacagtcaggtacgctcgatttaccacggcgcaggtacagcggacacacctgcgg

SEQ ID NO: 57479 - DNA, 75 bp, synthetic construct
  source 1..75: mol_type = other DNA
gttgtaaaggcaatagatgttgccgatatagtgattagaggaaagagaattgtcaaaaacaggctcgcatgcact

SEQ ID NO: 57480 - DNA, 75 bp, synthetic construct
  source 1..75: mol_type = other DNA
ttggttgtatctgcctgatggcgatagtggcggtgatggaagaacgcaaaatccgccgcgagaaaaaattcagca

SEQ ID NO: 57481 - DNA, 75 bp, synthetic construct
  source 1..75: mol_type = other DNA
atgagtaaagtctttatttgcgccgccattccggacgaacaggcaataaaggaagaaggtgcaattgctgtagcc

SEQ ID NO: 57482 - DNA, 75 bp, synthetic construct
  source 1..75: mol_type = other DNA
tgggacaggtaggcagctctcctgtgagtctggggctgaaggcctcttatgctctgaccggtcaggcaagtccga

SEQ ID NO: 57483 - DNA, 75 bp, synthetic construct
  source 1..75: mol_type = other DNA
tatgggacttgccggtgttctccggggtaaaaggtccgtacgaccatcagccggaaagccgttgccgcaggcgac

SEQ ID NO: 57484 - DNA, 75 bp, synthetic construct
  source 1..75: mol_type = other DNA
ctccgtggcttttattgaaagtgaagtcgacgaatggattaaccagcgtattgatgcttctcgcaacaacgccgc

SEQ ID NO: 57485 - DNA, 75 bp, synthetic construct
  source 1..75: mol_type = other DNA
cctcattcagcgggccctgaaaactctggaccgccatcttcatgaacccggtgtggccttcacctccacccgtgc

SEQ ID NO: 57486 - DNA, 75 bp, synthetic construct
  source 1..75: mol_type = other DNA
gcgaccgcgcttcttgtttgagatagctatggcgcttaactgtgatccggtttggttacagtacggaactaaacg

SEQ ID NO: 57487 - DNA, 75 bp, synthetic construct
  source 1..75: mol_type = other DNA
gaaggtcctatgtttatggatgcaaaatcacaaataacttgtctaaccaaacaaaatattaccaatggtaaacta

SEQ ID NO: 57488 - DNA, 75 bp, synthetic construct
  source 1..75: mol_type = other DNA
ttgttccgtgatgcggtggcgctggaatggataaaactacgtaacaagctaaagcctcaacgtgagaaaacatcg

SEQ ID NO: 57489 - DNA, 75 bp, synthetic construct
  source 1..75: mol_type = other DNA
gttacagaattgtgaactggcggcaacaggcgggagggtttatacagcaggtcgtgtgcggatgacctttgatgg

SEQ ID NO: 57490 - DNA, 75 bp, synthetic construct
  source 1..75: mol_type = other DNA
tgataaagcattaataccagactcaatccaattaccactgattgtcagtaccccaaaaaaaacatacctatgtga

SEQ ID NO: 57491 - DNA, 75 bp, synthetic construct
  source 1..75: mol_type = other DNA
attcattgtctgccatgtgttccgattaatgaggtggcaaaagagaaactaccgcattacgtcatgagtgcaact

SEQ ID NO: 57492 - DNA, 75 bp, synthetic construct
  source 1..75: mol_type = other DNA
aagaaagagatacagcgcgtatacgatgaaaatcatcaggtatacggtgtgcgtaaagtctggcgtcagttgtta

SEQ ID NO: 57493 - DNA, 75 bp, synthetic construct
  source 1..75: mol_type = other DNA
cgggcaacagattcaggcattctgtacttccttttaccgacaggtgcacgaacgtattactgagcgtaatcacac

SEQ ID NO: 57494 - DNA, 75 bp, synthetic construct
  source 1..75: mol_type = other DNA
gcatggcgatggcgagcacgcactggcgttcgcccgccgattacgagctacatttgctgaaaaggggattgttgt

SEQ ID NO: 57495 - DNA, 75 bp, synthetic construct
  source 1..75: mol_type = other DNA
agttcgttctcaactggcgactcttgacctgagtaccgtagaaaaagaaaccatcgacaatatatcccataatgt

SEQ ID NO: 57496 - DNA, 75 bp, synthetic construct
  source 1..75: mol_type = other DNA
atgaagatttccctgcatacccagactagagcccctaacgccgcagcgacgaccagcgtatccccgctggacccg

SEQ ID NO: 57497 - DNA, 75 bp, synthetic construct
  source 1..75: mol_type = other DNA
ttattttgcgaaggcggagttcgaccgcctctggaaaaaatgatgccactgctggataagctgcgtgagcagtac

SEQ ID NO: 57498 - DNA, 75 bp, synthetic construct
  source 1..75: mol_type = other DNA
atgcaacagctttcctttctgccaggagagatgacgcccggtgagcgcagcctcattcagcgggccctgaaaacc

SEQ ID NO: 57499 - DNA, 75 bp, synthetic construct
  source 1..75: mol_type = other DNA
gaatcatgcggaatggtgatgagaatgctgatgacattgcagggcgcttcaccgggacgtataccggagctgatg

SEQ ID NO: 57500 - DNA, 75 bp, synthetic construct
  source 1..75: mol_type = other DNA
aagcggacccggaattaaataattcgagttatatgtggaatatcctgatatatgccattccgtatgcgttatatg

SEQ ID NO: 57501 - DNA, 75 bp, synthetic construct
  source 1..75: mol_type = other DNA
tcagtgaaatgctgcgtatggataaatacatcgacatgctgatcccgcgcggtggggctggtttgcataaactgt

SEQ ID NO: 57502 - DNA, 75 bp, synthetic construct
  source 1..75: mol_type = other DNA
cgtacagaaagttttccaggtagcaaaagaaaacaacttcgcactgccagcagtaaactgcgtcggtactgactc

SEQ ID NO: 57503 - DNA, 75 bp, synthetic construct
  source 1..75: mol_type = other DNA
gtgggtggctgattttacttacggtgtgcccggagttcagggcgggcatggatgcttaaatgaaccgcgagtctg

SEQ ID NO: 57504 - DNA, 75 bp, synthetic construct
  source 1..75: mol_type = other DNA
ggaaatggaaggcgctgaacatccacacaaggagaacactggcggcaatcagcatcacgatagcgataatgaaac

SEQ ID NO: 57505 - DNA, 75 bp, synthetic construct
  source 1..75: mol_type = other DNA
tcaaccggggcagcacaggtgatcatgccgcatgtggtcggttctgtagaggtgtatgaacagcagacctcctgg

SEQ ID NO: 57506 - DNA, 75 bp, synthetic construct
  source 1..75: mol_type = other DNA
tggaaaaggttcagagcaaacagggaaaggagaagactttaacagggagtttacttcaactttatctaaaggaaa

SEQ ID NO: 57507 - DNA, 75 bp, synthetic construct
  source 1..75: mol_type = other DNA
gagggagcaaaagagaaagatgttagttattcaagtattgcctctatgttgcttgagttaggattgcgagtttat

SEQ ID NO: 57508 - DNA, 75 bp, synthetic construct
  source 1..75: mol_type = other DNA
atccggtgacgatgccgctggtggacaatcaactggatctcgccactttctggcagcagtggctgaactggcagg

SEQ ID NO: 57509 - DNA, 75 bp, synthetic construct
  source 1..75: mol_type = other DNA
atagacttcgatgccagaacggctattccattcgaaggtgagcgccataatgcacttgatgacgcccgttaccag

SEQ ID NO: 57510 - DNA, 75 bp, synthetic construct
  source 1..75: mol_type = other DNA
taacggtgcaactttcgacaacgtgattttacgccgttcatatgaacggcaggggatcccctgcccgtggcgtta

SEQ ID NO: 57511 - DNA, 75 bp, synthetic construct
  source 1..75: mol_type = other DNA
gcaatttgccctggttcagggccacgctggcgcaatggcgttatgcgttacgcaataccattgccatgtgtctgg

SEQ ID NO: 57512 - DNA, 75 bp, synthetic construct
  source 1..75: mol_type = other DNA
ccgggaagagcgtgaggcgctggaagccaggcaacaggccatgatggcaaagcagcaggagggcggacatgcctc

SEQ ID NO: 57513 - DNA, 75 bp, synthetic construct
  source 1..75: mol_type = other DNA
ggcgcacaggcggacgtcgaccgaagctgacaaaagaacagcatgagcaaatagcaaggctgatcaaaaacgggc

SEQ ID NO: 57514 - DNA, 75 bp, synthetic construct
  source 1..75: mol_type = other DNA
ggcccagttgcgcgcgcggtttggcaagccggtgtggaaggcgctgcccgtcgccagcgccagcgatgtcgcacg

SEQ ID NO: 57515 - DNA, 75 bp, synthetic construct
  source 1..75: mol_type = other DNA
atgaaccgccaacgactggattctcccttggtttatgttggtgcgcataatgtatattatgttaaattacctgtg

SEQ ID NO: 57516 - DNA, 75 bp, synthetic construct
  source 1..75: mol_type = other DNA
tcatcatgacgtttgccgttaccagcatcaacgcacgcaaaaagggaaactcccatacacaggatctgttatcac

SEQ ID NO: 57517 - DNA, 75 bp, synthetic construct
  source 1..75: mol_type = other DNA
acttacaccagaacaatgggagcaggccggacgattaattgcatcaggcgttcctcgccagaaggtggcgatcat

SEQ ID NO: 57518 - DNA, 75 bp, synthetic construct
  source 1..75: mol_type = other DNA
attttattggtgcggtggagttatttgtaaaatcatcgcatacaaaaacacattcaaacaatttttttaataata

SEQ ID NO: 57519 - DNA, 75 bp, synthetic construct
  source 1..75: mol_type = other DNA
gttgaaaaatatcgaccagattttcagcgaattaccgacaaactcgcagctttttgccgcagatagcggcgtgaa

SEQ ID NO: 57520 - DNA, 75 bp, synthetic construct
  source 1..75: mol_type = other DNA
tttttccgtctggtaacgcgtccgtggcgatagaaccccggctcccgcaggcggattttcctgaacatcatcatg

SEQ ID NO: 57521 - DNA, 75 bp, synthetic construct
  source 1..75: mol_type = other DNA
ctgtggcactcctgctgtttctggtggtgatggtggacttcaccagcaggatcatgtcggtgctggcggatggag

SEQ ID NO: 57522 - DNA, 75 bp, synthetic construct
  source 1..75: mol_type = other DNA
atgaacacaacaaaaaacagatatccttcctggtgggcatattattaccttgttcgcaatgcttattttatattt

SEQ ID NO: 57523 - DNA, 75 bp, synthetic construct
  source 1..75: mol_type = other DNA
cgacagcagaaatataccgttatctagtgactatattgtttcctatggctgtttatctttaatcatcctcccatt

SEQ ID NO: 57524 - DNA, 75 bp, synthetic construct
  source 1..75: mol_type = other DNA
gatccaggcggctgacagcctgactgcacgtctgacgggtgagctcgtcagcacagcgggcagcaaagtcacctc

SEQ ID NO: 57525 - DNA, 75 bp, synthetic construct
  source 1..75: mol_type = other DNA
tctgcatctgcgcaggcaacggactggctcagtcgttggggaactgcccgggtatctcttggtgtggatgaagat

SEQ ID NO: 57526 - DNA, 75 bp, synthetic construct
  source 1..75: mol_type = other DNA
actcgtgcgaaactggaaagcttggttgaagatctggtaaaccgttccattgagccgctgaaagttgcactgcag

SEQ ID NO: 57527 - DNA, 75 bp, synthetic construct
  source 1..75: mol_type = other DNA
taatcccttcaaaagtaaaatcccgcccgcaatgttgtgacgatgacgcgatgatcatttgtgggtgtatggctc

SEQ ID NO: 57528 - DNA, 75 bp, synthetic construct
  source 1..75: mol_type = other DNA
atgatcatttgcgggtgcatggcccgtctgaaaaagaacaacagcgatttacacgatttattagtagattattat

SEQ ID NO: 57529 - DNA, 75 bp, synthetic construct
  source 1..75: mol_type = other DNA
atgatatacccggaaattacaggcaaaagcggtgagcatttacgcctgaaaacgctggaaagtgtctggatccag

SEQ ID NO: 57530 - DNA, 75 bp, synthetic construct
  source 1..75: mol_type = other DNA
tgctggttgattattacgtgttgggggagacgttcatggcgctggcacggaaacatgggtgctctgacacctgta

SEQ ID NO: 57531 - DNA, 75 bp, synthetic construct
  source 1..75: mol_type = other DNA
gtcaataagggattcaacattatcgaccaagaagtaaagtcgctacaaatgaaattaaacaaattagcttcatag

SEQ ID NO: 57532 - DNA, 75 bp, synthetic construct
  source 1..75: mol_type = other DNA
aataaacccgatgggccagcaacagcagggatagatgatttgggtgaaattttagctaagatgaaacagagaaca

SEQ ID NO: 57533 - DNA, 75 bp, synthetic construct
  source 1..75: mol_type = other DNA
gtattaccggcaattatcttcgttacagcactggtgagtattctctactacatcggtgtgatggggattttaatt

SEQ ID NO: 57534 - DNA, 75 bp, synthetic construct
  source 1..75: mol_type = other DNA
acatcctgtcgggagcatttttgctgcgattcaaaaaaatgagagtctcctaaagtttccttcgataatatcaat

SEQ ID NO: 57535 - DNA, 75 bp, synthetic construct
  source 1..75: mol_type = other DNA
tcattgcgcctggtgccattgcggtactcctgacacaacgctttcatattgcgctcctgctggcgactggcatat

SEQ ID NO: 57536 - DNA, 75 bp, synthetic construct
  source 1..75: mol_type = other DNA
aatgagaaacagccgttttatggtgagcatcaggcagggatcctgacgccacaacaggccgcaatgatgctggtg

SEQ ID NO: 57537 - DNA, 75 bp, synthetic construct
  source 1..75: mol_type = other DNA
aaaagcgaaaatcgaactgtcttccgctcagcagaccgacgttaacctgccatacatcactgcagacgcgaccgg

SEQ ID NO: 57538 - DNA, 75 bp, synthetic construct
  source 1..75: mol_type = other DNA
tccgctttgacttcatcaattatgccctgataatcgcgctgctggtctctgttccctgcgccctgctgtctgttt

SEQ ID NO: 57539 - DNA, 75 bp, synthetic construct
  source 1..75: mol_type = other DNA
attttaatactccaccctttaaaaaagtgccggcttactggcttcatccggggctgacttatcttaaagtgcgta

SEQ ID NO: 57540 - DNA, 75 bp, synthetic construct
  source 1..75: mol_type = other DNA
gtgtttgactccggcgtcggtgggttgtcggtctatgacgagatccggcatctcttaccggatctccattacatt

SEQ ID NO: 57541 - DNA, 75 bp, synthetic construct
  source 1..75: mol_type = other DNA
gacaaggatgcagttgtgcgggaggctcttcttcgtgattttgataatccgccctttaaaaaagtgccggcttac

SEQ ID NO: 57542 - DNA, 75 bp, synthetic construct
  source 1..75: mol_type = other DNA
gtggtatttccggctgaactggtgcggctgctggacaggctggaggaagaaatccgggcagaccgcgtgagcagt

SEQ ID NO: 57543 - DNA, 75 bp, synthetic construct
  source 1..75: mol_type = other DNA
gcatccaaaaaactgacaaaaaccgcaatcaatgaagccctgcgtagaatcagggagtcagggattgataaacca

SEQ ID NO: 57544 - DNA, 75 bp, synthetic construct
  source 1..75: mol_type = other DNA
tatcaaccgcgagaatgcgccggtaattgttatcgagccatacatcatcgctatggaagacaacgatgtgaaagg

SEQ ID NO: 57545 - DNA, 75 bp, synthetic construct
  source 1..75: mol_type = other DNA
atgcttattggctatgtacgcgtatcaacaaatgaccagaacaccgatctacaacgtaatgcgttgaactgtgta

SEQ ID NO: 57546 - DNA, 75 bp, synthetic construct
  source 1..75: mol_type = other DNA
ctgcggaaataatgtaaaggaatttatacttttattaccctataataaatctctggagatgcatgaacttaacga

SEQ ID NO: 57547 - DNA, 75 bp, synthetic construct
  source 1..75: mol_type = other DNA
aggttacagatacacaggagtattcaaaaccctggcaagtattgatgacaaaccgtcccgtttcgaaattttgat

SEQ ID NO: 57548 - DNA, 72 bp, synthetic construct
  source 1..72: mol_type = other DNA
ggtctgcgtttcgcaatccgtgaaggcggccgtaccgttggcgcgggcgttgttgctaaagttctgggctaa

SEQ ID NO: 57549 - DNA, 75 bp, synthetic construct
  source 1..75: mol_type = other DNA
ccgggcgacaacatcaaaatggttgttaccctgatccacccgatcgcgatggacgacggtctgcgtttcgcaatc

SEQ ID NO: 57550 - DNA, 75 bp, synthetic construct
  source 1..75: mol_type = other DNA
aattctggatatcaaaaatcaggagttatcgggaacgttaacgctgtattcccggccctctatcgcccaatgctg

SEQ ID NO: 57551 - DNA, 75 bp, synthetic construct
  source 1..75: mol_type = other DNA
atgatatatccggaaattacaggcaaaagcggcgagcatttacgtctaaaaacgctggaagcagtctggatccag

SEQ ID NO: 57552 - DNA, 75 bp, synthetic construct
  source 1..75: mol_type = other DNA
ggtagcgacatgacccagcactggcgtattgccggactggagcctacgcaggtggttggtctgctggcagtggca

SEQ ID NO: 57553 - DNA, 75 bp, synthetic construct
  source 1..75: mol_type = other DNA
gcggaatatgatgaatggggcaaccagcttaatgaggagaacccgcatcacctgcaccagccgtaccggctgccg

SEQ ID NO: 57554 - DNA, 75 bp, synthetic construct
  source 1..75: mol_type = other DNA
cccggaagctcgccgcattgcgattccgggcgtggctttttgcgtaacctgccagcaaatagcagagctaaaaaa

SEQ ID NO: 57555 - DNA, 75 bp, synthetic construct
  source 1..75: mol_type = other DNA
catcatatctccaatacaacttggcgaagatatatcaaatataaaggatttttttcaaaaaagaacatttcgtgt

SEQ ID NO: 57556 - DNA, 75 bp, synthetic construct
  source 1..75: mol_type = other DNA
ggcggtagtaaccgcaacggggcggctggcacgcgtaaaccagaacggtaaatttcgctactgcatgccgggcga

SEQ ID NO: 57557 - DNA, 75 bp, synthetic construct
  source 1..75: mol_type = other DNA
gcaggggcttctcttgaacgcccgggcgggcgatttgccagatttgaaactgcctttgatggattacgggctctt

SEQ ID NO: 57558 - DNA, 75 bp, synthetic construct
  source 1..75: mol_type = other DNA
tcacacccccaatcctgtgcagaaaaaagggggatggtttgagttaaacacagcaattgaacagatcaaagcagg

SEQ ID NO: 57559 - DNA, 75 bp, synthetic construct
  source 1..75: mol_type = other DNA
ccgttgacggacttcgggggaaaaacgagtatttttagtcatcctgtttacctctttctcaggaagtttagtctc

SEQ ID NO: 57560 - DNA, 75 bp, synthetic construct
  source 1..75: mol_type = other DNA
gtcacagcgcaccggcgcgacggtccagggaattcagtctattggctatgcggtttcgcaggttggcggcagtgt

SEQ ID NO: 57561 - DNA, 75 bp, synthetic construct
  source 1..75: mol_type = other DNA
ccggacggggaataaacagtgtggagaaaattatctctacctgggcacctgcgtctgataataacaacacaactg

SEQ ID NO: 57562 - DNA, 75 bp, synthetic construct
  source 1..75: mol_type = other DNA
tgtggtgcttcctgcagacagttccccaaccgaaatcggctcaggtcttcgcctggccttgagtcgctgcaaagg

SEQ ID NO: 57563 - DNA, 75 bp, synthetic construct
  source 1..75: mol_type = other DNA
tgagctggacggactggatttgtttaccggtttcactgtcacacacactgacagcagtgcctccgccgatgtttt

SEQ ID NO: 57564 - DNA, 75 bp, synthetic construct
  source 1..75: mol_type = other DNA
aagactttgagcttggggtagctatgctgccagccaaagagcagcgcgcagtgccgatcggcggcgccagcctcg

SEQ ID NO: 57565 - DNA, 75 bp, synthetic construct
  source 1..75: mol_type = other DNA
cttgaattaaagcgcatccctgagttgcttacaaaaatagatagctatactggtaggccgctaacccgatgggcg

SEQ ID NO: 57566 - DNA, 75 bp, synthetic construct
  source 1..75: mol_type = other DNA
caacactgaccagtaccgccctgaatctgaacaagggagcaaatgctctggccagtcagagttttgtttctgacg

SEQ ID NO: 57567 - DNA, 75 bp, synthetic construct
  source 1..75: mol_type = other DNA
tattttggcatttgatcggcgcggccagtgcagcctgtttttacgctccgttcaaaaaagtaaaaaaatggtcat

SEQ ID NO: 57568 - DNA, 75 bp, synthetic construct
  source 1..75: mol_type = other DNA
ttaataccgtatggcgtatgacgggagattccgggcttaataccctcaaaaccagcaaatccctgacggtattca

SEQ ID NO: 57569 - DNA, 75 bp, synthetic construct
  source 1..75: mol_type = other DNA
atgtaaatcaccagtggcgtgggaaaaaagatatcacgatcccagagtcaccagccaaaccatgtctgcctaagg

SEQ ID NO: 57570 - DNA, 75 bp, synthetic construct
  source 1..75: mol_type = other DNA
ggaaaaatggaatgcacaatacacatggaaggatgccgaacaatgaagatagtgtattgcacaatacacaaaatg

SEQ ID NO: 57571 - DNA, 75 bp, synthetic construct
  source 1..75: mol_type = other DNA
agccagccactttatctataaataatacagatagctatatttaccatggcaatatcacgggcaataccaaaatta

SEQ ID NO: 57572 - DNA, 75 bp, synthetic construct
  source 1..75: mol_type = other DNA
ttgccagcgacggattaagagagaatgataaagaaattgtttctatgatgattcaggaaatgagcgaggaaaaaa

SEQ ID NO: 57573 - DNA, 75 bp, synthetic construct
  source 1..75: mol_type = other DNA
agtcagaatttctgatactcctcaaggacaattataatgtaacgaaatccattatcgctgaaccatatggccgtc

SEQ ID NO: 57574 - DNA, 75 bp, synthetic construct
  source 1..75: mol_type = other DNA
gcttatcaggccttgtattatccctccagtgcagagaaaatcggccagttttctctgcctgcagtccgcatgccg

SEQ ID NO: 57575 - DNA, 75 bp, synthetic construct
  source 1..75: mol_type = other DNA
gcgggagctgaacaagcaccgggatattgttcaacagattgtcgattcctccagtcgtattgtgtcggaaaagtg

SEQ ID NO: 57576 - DNA, 75 bp, synthetic construct
  source 1..75: mol_type = other DNA
tatcggccacgttgaccaaggtaaaactaccctgaccgctgcaatcactaccgtactggctaaaacctacggcgg

SEQ ID NO: 57577 - DNA, 75 bp, synthetic construct
  source 1..75: mol_type = other DNA
ggagttgcgttaccggtacaggaagcggcgacacaggaagaaattaaaacagatactgtggcggacattgtgcag

SEQ ID NO: 57578 - DNA, 75 bp, synthetic construct
  source 1..75: mol_type = other DNA
attttgagcgacatccaggtgcgatggtatcttataatagttcctttatacaaattgtaatgaatggttcacggc

SEQ ID NO: 57579 - DNA, 75 bp, synthetic construct
  source 1..75: mol_type = other DNA
atgtcaaccggattacgtttcacactggaagtggacggcctgccgccggacgcttttgcggtggtttcctttcat

SEQ ID NO: 57580 - DNA, 75 bp, synthetic construct
  source 1..75: mol_type = other DNA
gcatccaaaaaactgacaaaaaccgcggtcaatgaagccctgcgtagaatcagggagtcagggattgataaacca

SEQ ID NO: 57581 - DNA, 75 bp, synthetic construct
  source 1..75: mol_type = other DNA
tccgccagacattcttcgcataatttcccgggtaaattgctagggtatatggttcagtccttacctatactaggc

SEQ ID NO: 57582 - DNA, 75 bp, synthetic construct
  source 1..75: mol_type = other DNA
ttgtcctgaacgcactgctgatggctgtatggcggcgtaatcccgaaaaacaggtgctggttcattcggatcagg

SEQ ID NO: 57583 - DNA, 75 bp, synthetic construct
  source 1..75: mol_type = other DNA
ggcatagcgttgttgaatgccatgcggtgtacgaccccggattccgtggtgaatatgcactgcaagggcatcgat

SEQ ID NO: 57584 - DNA, 75 bp, synthetic construct
  source 1..75: mol_type = other DNA
aggcgatgaggcaggatggcatttctatagccagcgaaatacagataactcggtaatattttctgttaacggtca

SEQ ID NO: 57585 - DNA, 75 bp, synthetic construct
  source 1..75: mol_type = other DNA
ccacaccattacggccagtgagaggctgcgtactggaaagtgggtgctggacgattttgattttatgaagccgcg

SEQ ID NO: 57586 - DNA, 75 bp, synthetic construct
  source 1..75: mol_type = other DNA
agtggttgcccctaatcgcgtgcagcggcagtttactgttgtccgggccaatcaggtctgggtcaccgacattac

SEQ ID NO: 57587 - DNA, 75 bp, synthetic construct
  source 1..75: mol_type = other DNA
atgacagaaagtattggcggtaaaaccgcactggactgggccatgaaacaggattttcgctgtggttgctggctg

SEQ ID NO: 57588 - DNA, 75 bp, synthetic construct
  source 1..75: mol_type = other DNA
gcgcaaatcaccagccagaccacgcgcgatactacgccgattattagcggggtgatcaccgccgcgcttgccagt

SEQ ID NO: 57589 - DNA, 75 bp, synthetic construct
  source 1..75: mol_type = other DNA
tgatcttgaaatcgtcgttgatgtcagaagcttcaccgtggctgctcttgctgaaccagaacaaatcgtattacc

SEQ ID NO: 57590 - DNA, 75 bp, synthetic construct
  source 1..75: mol_type = other DNA
gtatcccgtggggcgcattacaggacttttctcgccgtaaagagcaatatcagttaagtgccagtcagaagggga

SEQ ID NO: 57591 - DNA, 75 bp, synthetic construct
  source 1..75: mol_type = other DNA
cctcatacccagtatgcgcagaaacataatccgacatttaccggagaaccaaaagcgccaacgcctgccgcagga

SEQ ID NO: 57592 - DNA, 75 bp, synthetic construct
  source 1..75: mol_type = other DNA
aaattgtgaaacgaagcgagggcatgacttccgttgcgaaagctgcctaccatgcccgtacacgtattacagatg

SEQ ID NO: 57593 - DNA, 75 bp, synthetic construct
  source 1..75: mol_type = other DNA
cgtgggcggtgaagccctgtctgtcgcccgtggctgtctggcaaatgttactgacacgcctgctggaacaacact

SEQ ID NO: 57594 - DNA, 75 bp, synthetic construct
  source 1..75: mol_type = other DNA
caccggggcctgccgctggcgctcatcagcgaagacggcaatacggcgtggcgcggggagtatgatgaatggggc

SEQ ID NO: 57595 - DNA, 75 bp, synthetic construct
  source 1..75: mol_type = other DNA
cattagttctttcatctacatttgttagcatgggggcttctgctgccgagaaaaatatcactgtaactgctagcg

SEQ ID NO: 57596 - DNA, 75 bp, synthetic construct
  source 1..75: mol_type = other DNA
ttgaaagtggagtcatcagccactatcagcgtgcgttcccatgaaggaaaaagcctttcgctttatcgctccgga

SEQ ID NO: 57597 - DNA, 75 bp, synthetic construct
  source 1..75: mol_type = other DNA
caacaaatgaccagaacaccgatctacaacgtaatgcgttgaactgtgtaggatgtgaactgatttttgaagaca

SEQ ID NO: 57598 - DNA, 75 bp, synthetic construct
  source 1..75: mol_type = other DNA
catttcatattagcgccagttaatgctccagaacatatcgtaaaagattctacagcattgtggaatgaagttgaa

SEQ ID NO: 57599 - DNA, 75 bp, synthetic construct
  source 1..75: mol_type = other DNA
aaaaaagaaagaagctggaatgacagaaaaatgtctgtgttgtggcgtgaatcatgggcatctatggctaacagc

SEQ ID NO: 57600 - DNA, 75 bp, synthetic construct
  source 1..75: mol_type = other DNA
ctcttcaccggcaccatcaaccgcacggaagtccatccccgggaagtgattaaacgcgccctgtaccacaatgcc

SEQ ID NO: 57601 - DNA, 75 bp, synthetic construct
  source 1..75: mol_type = other DNA
cagcgggccgtggtttggcgggctttctggcgtggtgtatgcgctgatgggctacgtctggctacgtggcgaacg

SEQ ID NO: 57602 - DNA, 75 bp, synthetic construct
  source 1..75: mol_type = other DNA
gcagtcgcctctatggtgaatcttcaaagatacaaccaggagtactatctggttcagcaacgctgctcatgatat

SEQ ID NO: 57603 - DNA, 75 bp, synthetic construct
  source 1..75: mol_type = other DNA
gttcaaacagatgttggagtggtgtttgaacaagatgccaacacaaaggcaactaataaagatacagatctaaaa

SEQ ID NO: 57604 - DNA, 75 bp, synthetic construct
  source 1..75: mol_type = other DNA
gtgatgatgagttaaaatttgcagaacataacgctattttaagtggatttaccagtatcaatgcttttgctaagc

SEQ ID NO: 57605 - DNA, 75 bp, synthetic construct
  source 1..75: mol_type = other DNA
gcacgcacagagaatcagtgaaaccactgaacgcgcccgccgcaaagcagacctgctgcggggtggcctgaccag

SEQ ID NO: 57606 - DNA, 75 bp, synthetic construct
  source 1..75: mol_type = other DNA
tgtctggtgaagtaattaccgagggcaaagtccgtacactagcccagctttttgcacttgaataccaacaattga

SEQ ID NO: 57607 - DNA, 75 bp, synthetic construct
  source 1..75: mol_type = other DNA
tgaagtgatgttttcggaagcgtatctgccgtatgcatggccggaagtgaatcgtcacacgacggcagaagatat

SEQ ID NO: 57608 - DNA, 75 bp, synthetic construct
  source 1..75: mol_type = other DNA
atcgaagcgaaggcgctgcgcaaactgcgtcacccgagccgttctgaagtgttgcgtagcttcctggacgattaa

SEQ ID NO: 57609 - DNA, 75 bp, synthetic construct
  source 1..75: mol_type = other DNA
aatccgccatgggtaaaaaactcatggcatcccttgaggaagccggacagcgtgaaaagctggcacaaagcatca

SEQ ID NO: 57610 - DNA, 75 bp, synthetic construct
  source 1..75: mol_type = other DNA
taaacgcgccctgtatcacaatgccgcagccgtggtgctggcgcacaatcacccgtcaggtgaagtcacacccag

SEQ ID NO: 57611 - DNA, 75 bp, synthetic construct
  source 1..75: mol_type = other DNA
cgcatactggcgttttatcagggaaatgttcagcattttgaagtaacgatattaaagtgcattagttcaaatgtg

SEQ ID NO: 57612 - DNA, 75 bp, synthetic construct
  source 1..75: mol_type = other DNA
attctgaacatggcgggactggagcgtgaagaattccgggtgctgtatctgaataaccagaatcagctgattgcc

SEQ ID NO: 57613 - DNA, 75 bp, synthetic construct
  source 1..75: mol_type = other DNA
atgaaccacggccagccattgatccggccagatttacggagcgcaggcaggaaactgaaaccgacctgcaacgcg

SEQ ID NO: 57614 - DNA, 75 bp, synthetic construct
  source 1..75: mol_type = other DNA
tgacgcagtgggagccggacctgctgtttgaggtaaaagcccgacaactgaaactgctgcgcctgcgggcgcacc

SEQ ID NO: 57615 - DNA, 75 bp, synthetic construct
  source 1..75: mol_type = other DNA
ctcttcaccggcaccatcaaccgcacggaagtccatccccgggaagtgattaaacgtgccctgtatcacaatgcc

SEQ ID NO: 57616 - DNA, 75 bp, synthetic construct
  source 1..75: mol_type = other DNA
ttactcctattttttcaattcctcctcgcggagcggctgctgttgaaacgtggatgtatcaggttgctcagcgta

SEQ ID NO: 57617 - DNA, 75 bp, synthetic construct
  source 1..75: mol_type = other DNA
gattttattaggaaccttgctaaatcgttggtgagcagcaacaagctgaccatgcaggccattaatgacgtgatc

SEQ ID NO: 57618 - DNA, 75 bp, synthetic construct
  source 1..75: mol_type = other DNA
ggcgtcataatataatttgtagtgagtgccgtaaaagcgaagttatgaagcgcatattgtcgttttatcagggag

SEQ ID NO: 57619 - DNA, 75 bp, synthetic construct
  source 1..75: mol_type = other DNA
cagagcacaatatgaaatgaaagtaattgagaaagagttaacccatgaagttcgcgtaagaaccgtcaggttata

SEQ ID NO: 57620 - DNA, 75 bp, synthetic construct
  source 1..75: mol_type = other DNA
tgaagcctgcaggagaaggctggcaacagatgcaacgcatctgcgtccggccagcatgacaaataacgagaaatg

SEQ ID NO: 57621 - DNA, 75 bp, synthetic construct
  source 1..75: mol_type = other DNA
cggataagaggtataaataaagattttattggaatggatgtcacttctgtatttcgcccagaaaaaatgaccaat

SEQ ID NO: 57622 - DNA, 75 bp, synthetic construct
  source 1..75: mol_type = other DNA
gattcgggataccgcgccggaggccatgtgtgatgcggtggagattaacagcgggctggtccggtatctgcggga

SEQ ID NO: 57623 - DNA, 75 bp, synthetic construct
  source 1..75: mol_type = other DNA
agcaaagttaccttatgaagttgcgggtggtgtatttattatagaaattaataagaaaaatggatgtgttttgaa

SEQ ID NO: 57624 - DNA, 75 bp, synthetic construct
  source 1..75: mol_type = other DNA
cgatttgcaacgcaatgcactgaactgtgcgggatgtgagcggatttttgaggataaaatcagtggcaccaagtc

SEQ ID NO: 57625 - DNA, 75 bp, synthetic construct
  source 1..75: mol_type = other DNA
cgggctaaccagtatgcgcagatgctgggtattgacgaaaatacccttatggcgatgcgtcggggtgtgggtggt

SEQ ID NO: 57626 - DNA, 75 bp, synthetic construct
  source 1..75: mol_type = other DNA
agcaaacgtccaggccagtgtcagtagcgtcgcgggtaacaacgcccaggcaacgcatgcttacagcgtcgatgc

SEQ ID NO: 57627 - DNA, 75 bp, synthetic construct
  source 1..75: mol_type = other DNA
attatctgcctgatagcacacgtgttagtgcaaaaatgatgcatgaattggcttgtggacttttaagagaaggcc

SEQ ID NO: 57628 - DNA, 75 bp, synthetic construct
  source 1..75: mol_type = other DNA
gcagccagtcgctaaccgtcacggtcgataccgccgctccgatgattggtattaacactattgcgggcgatgatg

SEQ ID NO: 57629 - DNA, 75 bp, synthetic construct
  source 1..75: mol_type = other DNA
aaagcggaggggattgttgaaggcatgctgatgatgctgggagtgaggcttgagatggatcggtatgttgagcgt

SEQ ID NO: 57630 - DNA, 75 bp, synthetic construct
  source 1..75: mol_type = other DNA
agcgctggggggcatgggcggcaaataaccatgaggatgttacatggtcgcccattgctgccggatttaagaggc

SEQ ID NO: 57631 - DNA, 75 bp, synthetic construct
  source 1..75: mol_type = other DNA
atgacaacggataacacgaatacgacacgtaacgattcactggctgcacggaccgatacctggttgcagtcgttt

SEQ ID NO: 57632 - DNA, 75 bp, synthetic construct
  source 1..75: mol_type = other DNA
acatcatcaacgccgccgaaagcgggcaggatcttcccatcaccggcaccactgacgcccagccggggcagacgg

SEQ ID NO: 57633 - DNA, 75 bp, synthetic construct
  source 1..75: mol_type = other DNA
caatatgtgtcactggcgtacacgcaacggctgcaggacgcggagctgctggcttcaacaggcagcacgggcgac

SEQ ID NO: 57634 - DNA, 75 bp, synthetic construct
  source 1..75: mol_type = other DNA
caacaaatgaccagaacaccgatttgcaacgtaatgcactgaactgcgcgggatgtgagcgaatttttgaggata

SEQ ID NO: 57635 - DNA, 75 bp, synthetic construct
  source 1..75: mol_type = other DNA
gatgtgattaacgccgccgaaaaaggcgcggcgctaacgctctccggcagcacgtccggcgtcgaagcggggcaa

SEQ ID NO: 57636 - DNA, 75 bp, synthetic construct
  source 1..75: mol_type = other DNA
ctgggacgcgccggatattttctaatgaatttaagcttcatatggttgaactggcttcgaaaccaaatgccaatg

SEQ ID NO: 57637 - DNA, 75 bp, synthetic construct
  source 1..75: mol_type = other DNA
tctgaatgaggcggcagagaaaaacgaaattacaacgatggcagaaattcgcagaaatattgatcctgtcaggtt

SEQ ID NO: 57638 - DNA, 75 bp, synthetic construct
  source 1..75: mol_type = other DNA
tcagaacagcaaaggacggttccccccggttttctgtggggaatcgtaatatgaacgcatctgattttctgacaa

SEQ ID NO: 57639 - DNA, 75 bp, synthetic construct
  source 1..75: mol_type = other DNA
gagcaattaccgcaaagagaacatcctggtcaggatgtgcgacgggattatgatagacaattcacagagtcagga

SEQ ID NO: 57640 - DNA, 75 bp, synthetic construct
  source 1..75: mol_type = other DNA
ggggatgtggagaaggctagcaaggtattcgtaagaaacgaattgatgcccctgcagaaacgattgcaggaacta

SEQ ID NO: 57641 - DNA, 75 bp, synthetic construct
  source 1..75: mol_type = other DNA
gtcttaactacaacggcataattgcattgttagtcgagggctttaaaacacttcgtcatgagattaaagaactcc

SEQ ID NO: 57642 - DNA, 75 bp, synthetic construct
  source 1..75: mol_type = other DNA
cgggcttttcaccatgagcgccagaaaggccatgctggcacatcctgaactggactataacctgcagtacagcca

SEQ ID NO: 57643 - DNA, 75 bp, synthetic construct
  source 1..75: mol_type = other DNA
tcccgtcaccatctggcagacactgctcacccggttactggaccagcactacggcctcgcgctgaatgacacacc

SEQ ID NO: 57644 - DNA, 75 bp, synthetic construct
  source 1..75: mol_type = other DNA
agaaaaaatagcgattatagtgttattttaaagagagtaaaagcagatcttgatgtagagcgtaattctgcattt

SEQ ID NO: 57645 - DNA, 75 bp, synthetic construct
  source 1..75: mol_type = other DNA
gtgacaccgacccttttaagtgctttttggacttacaccctgattaccgctatgacgccaggaccgaacaatatt

SEQ ID NO: 57646 - DNA, 75 bp, synthetic construct
  source 1..75: mol_type = other DNA
tagctaatgaatcgcatccgattgatggcctgtctggtgaatatgcggagaaatcccttgaagaatgggcggaac

SEQ ID NO: 57647 - DNA, 75 bp, synthetic construct
  source 1..75: mol_type = other DNA
gtccgcgaggagctgccgtgcggcacgtttgcttatacccgtgttccgacgatgattattcgtctgcgtgcctga

SEQ ID NO: 57648 - DNA, 75 bp, synthetic construct
  source 1..75: mol_type = other DNA
atttacgctttagccgtaaagaccgtttgcagttaaatatttcacaatcacttaatgactttggctcgctttata

SEQ ID NO: 57649 - DNA, 75 bp, synthetic construct
  source 1..75: mol_type = other DNA
agaggttatcggcggtctggttgtcgccatgcggatacttaactctactttctggatgtcacctatagggctgat

SEQ ID NO: 57650 - DNA, 75 bp, synthetic construct
  source 1..75: mol_type = other DNA
tggtttacttactggcaatggtgttaatggcgtactgaaaggtgcagctgttggcgctggtgttggtgcagtaac

SEQ ID NO: 57651 - DNA, 75 bp, synthetic construct
  source 1..75: mol_type = other DNA
gagcctgcaacagatggtctggtcaaacagctttggtatgagcgtgacaacggcattgcaagtattcgccagggc

SEQ ID NO: 57652 - DNA, 75 bp, synthetic construct
  source 1..75: mol_type = other DNA
cccgccgataatctcagtgaagcgcaaatgcagcttatcgcccgcgaattaggtcattcggaaactgcttttctg

SEQ ID NO: 57653 - DNA, 75 bp, synthetic construct
  source 1..75: mol_type = other DNA
ctgccaatgaataaaacaagaccactgagtacgcgaagaacggcagccaatcttgcctgtacgttttcactgcat

SEQ ID NO: 57654 - DNA, 75 bp, synthetic construct
  source 1..75: mol_type = other DNA
gacggtgacaattcgagataaccaaccggagaaagttaccatttccggcacggcggtgattctattccatgctga

SEQ ID NO: 57655 - DNA, 75 bp, synthetic construct
  source 1..75: mol_type = other DNA
gtattattttgccgtactggtattaggtttgttttccgcggcgtcttatcaaaagaccgttcgggacaagtatga

SEQ ID NO: 57656 - DNA, 75 bp, synthetic construct
  source 1..75: mol_type = other DNA
tgacgggcgttttcctaaagtgacggatgcgaccattgccacaaaaggggacgggaatcacccgacatcatcgta

SEQ ID NO: 57657 - DNA, 75 bp, synthetic construct
  source 1..75: mol_type = other DNA
tcgacctgttcgcaagaaaaccagtgggctgggccatgtcgttctcgccggacagcaggctcaccatgaaagcgc

SEQ ID NO: 57658 - DNA, 75 bp, synthetic construct
  source 1..75: mol_type = other DNA
gccatgttacagggcgacagtagcgctgaacctatcaatatcctggccgttgacgccatgattgctgatattgat

SEQ ID NO: 57659 - DNA, 75 bp, synthetic construct
  source 1..75: mol_type = other DNA
caaatctcagaaaaaagtcgaccagtggtttgatgctaagacatctaaactttctcgccttggccaacagcaact

SEQ ID NO: 57660 - DNA, 75 bp, synthetic construct
  source 1..75: mol_type = other DNA
tataattacccactgaatccgataataaggatggatcctttgggtttgtataatttatatcaattattatatgat

SEQ ID NO: 57661 - DNA, 75 bp, synthetic construct
  source 1..75: mol_type = other DNA
tgtcaccactgcaggtgatgtgaacgttatgcctggggggacactgcgtgtcgctaaaaccacaatcggcggcaa

SEQ ID NO: 57662 - DNA, 75 bp, synthetic construct
  source 1..75: mol_type = other DNA
taatcacttcctgtacaaagggcaagaatcatcagggccacgtctggccgacattggacatagatccaaaacaaa

SEQ ID NO: 57663 - DNA, 75 bp, synthetic construct
  source 1..75: mol_type = other DNA
atccattaggattatatgaatttaaatcaaaaaatatagatgatattggaatatttgcattggcaatgtgtaatg

SEQ ID NO: 57664 - DNA, 75 bp, synthetic construct
  source 1..75: mol_type = other DNA
aaagaaaatgatgtttatgatagtctaaatttttcaagcaaagatttaacgaattcttatatgaatggaatggga

SEQ ID NO: 57665 - DNA, 75 bp, synthetic construct
  source 1..75: mol_type = other DNA
cgtctgcggaagtcacacattcgtgcgcagtacgatgatccggcattacgtaagctgcattatcacattgcagaa

SEQ ID NO: 57666 - DNA, 75 bp, synthetic construct
  source 1..75: mol_type = other DNA
taacaaccttagcctgtgggggaatgtcggtgtgcaactaggtgataaaggctatagcgatactcagggcatgct

SEQ ID NO: 57667 - DNA, 75 bp, synthetic construct
  source 1..75: mol_type = other DNA
tgatattctggaagtcactgatagaggacaagaggttgagttttgggatcgcaaagatggtgcctgtgttggtca

SEQ ID NO: 57668 - DNA, 75 bp, synthetic construct
  source 1..75: mol_type = other DNA
tgcgtggggcggcagaagcaataaaaatagcagccacaccacaaaaattgctggcatttcgtatgaaagccacac

SEQ ID NO: 57669 - DNA, 75 bp, synthetic construct
  source 1..75: mol_type = other DNA
cccggaaagacggaacgcgcattgaaacggaaggcgacggaaatgtgcaaacgcgacttggggtgaaaacctacc

SEQ ID NO: 57670 - DNA, 75 bp, synthetic construct
  source 1..75: mol_type = other DNA
aagatttacttaaacctgtaaatagcaatcagtatcggtattgtgcaaaacataaatttaaacaaaagcattata

SEQ ID NO: 57671 - DNA, 75 bp, synthetic construct
  source 1..75: mol_type = other DNA
ccactctggactacctgatcgttaagtcaggtaaaaaactgagcaactattttaaagctgttgccacaaattttc

SEQ ID NO: 57672 - DNA, 75 bp, synthetic construct
  source 1..75: mol_type = other DNA
ctcagactctggcaaaacgaagggcgtatatcgcggcgtcttccggtaacaacctcttctgacactggcgttgaa

SEQ ID NO: 57673 - DNA, 75 bp, synthetic construct
  source 1..75: mol_type = other DNA
atgagcacaaaaccactcttccttttacggaaagcgaaaaaatcatccggtgaacctgacgtcgtcctgtgggca

SEQ ID NO: 57674 - DNA, 75 bp, synthetic construct
  source 1..75: mol_type = other DNA
gaaccagttgcttatattttcaaacatccggccgggaaattattctgggctttaacggatgaaagcaataaagag

SEQ ID NO: 57675 - DNA, 75 bp, synthetic construct
  source 1..75: mol_type = other DNA
aaataaattgaagatcaacatggagcgtcagtggcctgaaccaaaagatggtgagcctcgtttgcacattaaaga

SEQ ID NO: 57676 - DNA, 75 bp, synthetic construct
  source 1..75: mol_type = other DNA
ccggtactatgacccgctacaggggaggtatattacacaagaccccattgggctggcggggggatggaacctgta

SEQ ID NO: 57677 - DNA, 75 bp, synthetic construct
  source 1..75: mol_type = other DNA
gccaaccctgatccggaaatcgtggatattgcctgcggtcgctcctctgccccgatgccgcagcgagtaacagaa

SEQ ID NO: 57678 - DNA, 75 bp, synthetic construct
  source 1..75: mol_type = other DNA
accacgcgtatccagacggtatatcagccggggagcttcgcgccgctcatccgcatcgaaacagacaacggcgag

SEQ ID NO: 57679 - DNA, 75 bp, synthetic construct
  source 1..75: mol_type = other DNA
taaagctgatggctgataatgcagaaaacatctctgactttattcagtcggtggagtttaacgagcctcgaatga

SEQ ID NO: 57680 - DNA, 75 bp, synthetic construct
  source 1..75: mol_type = other DNA
gggggggacagacaggattatattggagcatcatatagtatgtcatggaaagatatatctttctcagttaactgg

SEQ ID NO: 57681 - DNA, 75 bp, synthetic construct
  source 1..75: mol_type = other DNA
actcctcgcgaagccacacgtaaatcgatggggcagatccagggggcactggtcgggattgcgatggtgctttcg

SEQ ID NO: 57682 - DNA, 75 bp, synthetic construct
  source 1..75: mol_type = other DNA
gaatacgtggagttgagcgacggcactttatcgtggttagggaacgccttgtactggatgcctctaccggaaccg

SEQ ID NO: 57683 - DNA, 75 bp, synthetic construct
  source 1..75: mol_type = other DNA
gcagtggagctaactttgtatttaatgatactgatagaaaaaggcgcaggattacaataaatataaaccagtctc

SEQ ID NO: 57684 - DNA, 75 bp, synthetic construct
  source 1..75: mol_type = other DNA
gatatcaatgagccagacggaccaacgaatctttccgcatggatgagacttaagaataaagaattacctccttca

SEQ ID NO: 57685 - DNA, 75 bp, synthetic construct
  source 1..75: mol_type = other DNA
cagattgtatctggatccagaatatcgtccctggtttgatgaacaacatcggattctctcggcattacgcgctaa

SEQ ID NO: 57686 - DNA, 75 bp, synthetic construct
  source 1..75: mol_type = other DNA
agccagttgaccctattatcggggaatatatcgaacaatgggaacttgtctgtaacccccaccccctccaggaag

SEQ ID NO: 57687 - DNA, 75 bp, synthetic construct
  source 1..75: mol_type = other DNA
agctgttaatttctgcgctggttgcgggtggaatgttgtcgtcgtttggggcattggcgaatgccgggaatgaca

SEQ ID NO: 57688 - DNA, 75 bp, synthetic construct
  source 1..75: mol_type = other DNA
gattcaggctttcactgatgtaggtgttagcattgactttgataagttgttagagttaatggctgataatgcgga

SEQ ID NO: 57689 - DNA, 75 bp, synthetic construct
  source 1..75: mol_type = other DNA
cagcaatgagcgtgtgattcgtgctgctggtggcgctggtgcactgtctgactggttattacgtcacgttaaatc

SEQ ID NO: 57690 - DNA, 75 bp, synthetic construct
  source 1..75: mol_type = other DNA
atgaacgacgaaaacaaagtgcctgtgccggatgaagcgcaggcatccccggcacacgctgaggatgatattgcc

SEQ ID NO: 57691 - DNA, 75 bp, synthetic construct
  source 1..75: mol_type = other DNA
gatgatgcgtattaccctaccttgtcctggcaaccattggcttactattctgcatgcccggaaacgcttaaggat

SEQ ID NO: 57692 - DNA, 75 bp, synthetic construct
  source 1..75: mol_type = other DNA
tgcccggagagatgacgcccggcgagcgcagcctcattcaacgggccctgaaaaccctggaccgccatcttcatg

SEQ ID NO: 57693 - DNA, 75 bp, synthetic construct
  source 1..75: mol_type = other DNA
gggtaacggacataacctacataaggacccacgaaggctggctgtatcttgccgtggttgttgatctgttctcac

SEQ ID NO: 57694 - DNA, 75 bp, synthetic construct
  source 1..75: mol_type = other DNA
gagcgtcacggtaagcgcagtcacgaccgctggtggaatgcaaacagtagatataacgctggtggcaggcccggc

SEQ ID NO: 57695 - DNA, 75 bp, synthetic construct
  source 1..75: mol_type = other DNA
tgattagctaccgtccgaactggcgctggctggggatgcgggagaccgcggcaaaaagttttgtcgatgaggtgg

SEQ ID NO: 57696 - DNA, 75 bp, synthetic construct
  source 1..75: mol_type = other DNA
ggataacgagcagctgcgcaggcggagcacggatgtgtccggtcaggtgaatgacgctgtggcaggggtacagaa

SEQ ID NO: 57697 - DNA, 75 bp, synthetic construct
  source 1..75: mol_type = other DNA
cgctcagcggtccggtcgttttatgaagcgcggaactcctggacgaacgcgctctggatcggcgctggtcgcatg

SEQ ID NO: 57698 - DNA, 75 bp, synthetic construct
  source 1..75: mol_type = other DNA
ggcagcactgacgccgttaacggctcccagctcaaaaccaccaacgacaacgtgacgaccaacaccaccaacatc

SEQ ID NO: 57699 - DNA, 75 bp, synthetic construct
  source 1..75: mol_type = other DNA
caaggacgatgtggcggcaaacaccaccaacatcactaacctgacgagcgaagtggctggcaacaccaccagtat

SEQ ID NO: 57700 - DNA, 75 bp, synthetic construct
  source 1..75: mol_type = other DNA
atcaactgcacagggaacccggaccagaatggtttctatcagcattcagtctttcttacccttgccgatgacaag

SEQ ID NO: 57701 - DNA, 75 bp, synthetic construct
  source 1..75: mol_type = other DNA
ccgaactgcaatcaatgaatatcactgccgataacatcaccaaacttaaatcattgtttcctgaagcctttaatg

SEQ ID NO: 57702 - DNA, 75 bp, synthetic construct
  source 1..75: mol_type = other DNA
taaaaacgtcatgatcgaaggtgataaccttgaagtgttgaagcttcttcaaaaaagctacgctggaaaagttaa

SEQ ID NO: 57703 - DNA, 75 bp, synthetic construct
  source 1..75: mol_type = other DNA
ggccatcttttccgggtggcttttgcgatattttttcagctcagtcaggctgctgaattccaggacgtcccactc

SEQ ID NO: 57704 - DNA, 75 bp, synthetic construct
  source 1..75: mol_type = other DNA
tgatggctgtatggcggcgtaatcccgaaaaacaggtgctggttcattcggatcagggcagtcagtacacaagcc

SEQ ID NO: 57705 - DNA, 75 bp, synthetic construct
  source 1..75: mol_type = other DNA
gaacgcgaccgtaaagatgttaccgacggcgataaatacaaaaccaacctttctcactccacctggaacgccaac

SEQ ID NO: 57706 - DNA, 75 bp, synthetic construct
  source 1..75: mol_type = other DNA
gatttcattcagggatctttggctacttctactggtatccgggaaaaggggcaggattacgatattgaccgtgcg

SEQ ID NO: 57707 - DNA, 75 bp, synthetic construct
  source 1..75: mol_type = other DNA
gtgaaaaacagcctgaagaacctcgctaagacgccgctggcggcactggctctttcccttgctctggccgggatg

SEQ ID NO: 57708 - DNA, 75 bp, synthetic construct
  source 1..75: mol_type = other DNA
tgtatggcggcgtaatcccgaaaaacaggtgctggttcattcggatcagggcagtcagtacacaagccatgagtg

SEQ ID NO: 57709 - DNA, 75 bp, synthetic construct
  source 1..75: mol_type = other DNA
gcggctgacggggatattattctgctgggtggcctggctgaatctaaggtcacgaacgccgataccggattcagt

SEQ ID NO: 57710 - DNA, 75 bp, synthetic construct
  source 1..75: mol_type = other DNA
tacgtcaatgaccgtaaagcggggactttcactgtggacctgaagaacgcagagaaagttctacccattcccgga

SEQ ID NO: 57711 - DNA, 75 bp, synthetic construct
  source 1..75: mol_type = other DNA
aatgattcaatggtgggctgattatcttgatatgaataaaacaactttcatcacgccattcgattttgcacgatt

SEQ ID NO: 57712 - DNA, 75 bp, synthetic construct
  source 1..75: mol_type = other DNA
caggacggcgatctggatgtcagcggcggtggtcacgggattgatatcaccggcgacagcgcgacggtggataac

SEQ ID NO: 57713 - DNA, 75 bp, synthetic construct
  source 1..75: mol_type = other DNA
tggttgccaccggggccagctccatgtcatgggagtaccgttataccctcaacgtggtgattgaggatttcagcg

SEQ ID NO: 57714 - DNA, 75 bp, synthetic construct
  source 1..75: mol_type = other DNA
tttactcagttaagcagtgcgaccaacagcacgtctgaaacactggccgcaacgccgaaagcggtaaaggccgcg

SEQ ID NO: 57715 - DNA, 75 bp, synthetic construct
  source 1..75: mol_type = other DNA
gcgggtaagcaaccgaaagatgccaccctgacggcgctggccgggcttgctactgcggcagacaggtttccgtat

SEQ ID NO: 57716 - DNA, 75 bp, synthetic construct
  source 1..75: mol_type = other DNA
cgctccattcggctgaaggaaacatcaacggacaacaggttcagacattctgtacttccttttaccgacaggtac

SEQ ID NO: 57717 - DNA, 75 bp, synthetic construct
  source 1..75: mol_type = other DNA
tatgaccttgctaacgggaaatacactgcacaggacgccaccacagcgcgaaaaggccttgtccagctcagtagt

SEQ ID NO: 57718 - DNA, 75 bp, synthetic construct
  source 1..75: mol_type = other DNA
ggaatcttcaaaacaggttcctgttacgtatgaatggttgcgtctcgaagaccgcacgagccatagcggagagct

SEQ ID NO: 57719 - DNA, 75 bp, synthetic construct
  source 1..75: mol_type = other DNA
ctgccgcagcggaacagaaaattcccggcaactgttatccggttgataaagttattcgcatggacaataacgaaa

SEQ ID NO: 57720 - DNA, 75 bp, synthetic construct
  source 1..75: mol_type = other DNA
taagcaatatgccgttccctcaacacttggatggcgtaacggcgataacgcctggtttgacttcatcatggatat

SEQ ID NO: 57721 - DNA, 75 bp, synthetic construct
  source 1..75: mol_type = other DNA
attgatggcaacatggggcatctgcttgatgcagaggaagatggtcttgatatttctgatttcatgacgttcgag

SEQ ID NO: 57722 - DNA, 75 bp, synthetic construct
  source 1..75: mol_type = other DNA
ataccctgcaaaatacccagctccagagcgcgatagtgaaggctatgtatgccgctaccatcgagagtgaactgg

SEQ ID NO: 57723 - DNA, 75 bp, synthetic construct
  source 1..75: mol_type = other DNA
tggcgcgaccacggctggtggaaacaacattatgaatggcgaggcaatcgctggcacccacacggaccgccgcca

SEQ ID NO: 57724 - DNA, 75 bp, synthetic construct
  source 1..75: mol_type = other DNA
tcgaaaaggtagccagcgcaccacgcctgaatgaggcgttaaatattctggttaccgacatctgtcttgcgatgg

SEQ ID NO: 57725 - DNA, 75 bp, synthetic construct
  source 1..75: mol_type = other DNA
actaatgttgctaaaggtacggtttctgcaaccagcaccgatgtagtaaacggctctcaattgtacgacctgcag

SEQ ID NO: 57726 - DNA, 75 bp, synthetic construct
  source 1..75: mol_type = other DNA
ttatatccgccgtttgccccaggatccttgggggggggattatcagctgttaaatcctggtcagtacagcgacat

SEQ ID NO: 57727 - DNA, 75 bp, synthetic construct
  source 1..75: mol_type = other DNA
atgtctttaaaaagtatctggcgcgcgggaaaaccggatacgttccgccacagtggtgtacaatagaacaagcta

SEQ ID NO: 57728 - DNA, 75 bp, synthetic construct
  source 1..75: mol_type = other DNA
tccttttctgtcgtggtgaaagcgatagttcaggtactggaaacctggcctgaccggctggagagggacaggggg

SEQ ID NO: 57729 - DNA, 75 bp, synthetic construct
  source 1..75: mol_type = other DNA
gaaaagattggttatcgagcaaacgaacaaatacagcgttagccctgaaaaatatctcaaggcagctatagcaat

SEQ ID NO: 57730 - DNA, 75 bp, synthetic construct
  source 1..75: mol_type = other DNA
cttggggtcgtacgattgatgatcaagtattccagagcggtgtgtttaacgtcactctgaataatggttctgaat

SEQ ID NO: 57731 - DNA, 75 bp, synthetic construct
  source 1..75: mol_type = other DNA
acattggcaaaaaaccaatagctgatatcaaaccgcttgaactgttgaatgtgctacggcgcattgaggggcgcg

SEQ ID NO: 57732 - DNA, 75 bp, synthetic construct
  source 1..75: mol_type = other DNA
caccgcaccgtgaatggcgaaaccgcagagcagtggcagtatgacgaacgcggctggctgacagacatcagccat

SEQ ID NO: 57733 - DNA, 75 bp, synthetic construct
  source 1..75: mol_type = other DNA
cgcatgatgcattatttaaaacctttctcacgcaccctgacactgcgcgggattttatggagattcacttaccta

SEQ ID NO: 57734 - DNA, 75 bp, synthetic construct
  source 1..75: mol_type = other DNA
attactgcaactggctttactctgagcatcaccggagataacggtggatggaatattgggtttattgcggagggg

SEQ ID NO: 57735 - DNA, 75 bp, synthetic construct
  source 1..75: mol_type = other DNA
aactaactcaatagtcccacatcattataaaaatgtattgaatgatttagtggatatgataaaagaattcaaaaa

SEQ ID NO: 57736 - DNA, 75 bp, synthetic construct
  source 1..75: mol_type = other DNA
actggcgtcgctcattaccctgggtggaaggtaataccatccccgcactggcaaaagagtttgcgacgggcgtgc

SEQ ID NO: 57737 - DNA, 75 bp, synthetic construct
  source 1..75: mol_type = other DNA
gtgcattagaaaaaatgcgcaaagttcggcagcgatgctcagaagttttccgctatgccattgctactggaaggg

SEQ ID NO: 57738 - DNA, 75 bp, synthetic construct
  source 1..75: mol_type = other DNA
attgctcgcaggatctttgcgaatattttgcaggaaaagtttttaccgaccgcattgtcagaaaagtactccatt

SEQ ID NO: 57739 - DNA, 75 bp, synthetic construct
  source 1..75: mol_type = other DNA
tccagatatgtgaaagatgttcgacttggttcacagcaatattatggagtgaacaactggcaaacatggaatttc

SEQ ID NO: 57740 - DNA, 75 bp, synthetic construct
  source 1..75: mol_type = other DNA
cttctgtattcactaccggcgtccccggttaaaagcgccgaatgatgagagtaaggaaaatccgttgccaccttc

SEQ ID NO: 57741 - DNA, 75 bp, synthetic construct
  source 1..75: mol_type = other DNA
tatgaccttgctaacgggaaatataccgcacaggacgctaccacagcgcgaaaaggtcttgtccagctaagtagt

SEQ ID NO: 57742 - DNA, 75 bp, synthetic construct
  source 1..75: mol_type = other DNA
tgacctgcgcaaaatggtcgtcgcaggtcagtatgttgcgtgttgggttcagcgcagagtttaaacaggtggtga

SEQ ID NO: 57743 - DNA, 75 bp, synthetic construct
  source 1..75: mol_type = other DNA
tgctgaatcagtgagttcacctgatgcctcctctttaattaaagaaaccagaccacggaacctggcatttgcgta

SEQ ID NO: 57744 - DNA, 75 bp, synthetic construct
  source 1..75: mol_type = other DNA
aatctggcagtaacggtgggccagctatctccacgccaccgatagccggagaaagtagtgctgtaagcgccagtt

SEQ ID NO: 57745 - DNA, 75 bp, synthetic construct
  source 1..75: mol_type = other DNA
gaactcaccaccgcttatacccctgccgggcagttacagagccagcacctgaacagcctgctgtctgaccgcgat

SEQ ID NO: 57746 - DNA, 75 bp, synthetic construct
  source 1..75: mol_type = other DNA
ctggaaagcacgctcgatatgtaccggttagataataaccggtatccgacaacggagcagggactgcgggcactg

SEQ ID NO: 57747 - DNA, 75 bp, synthetic construct
  source 1..75: mol_type = other DNA
ttaattgccgtggcgaacatggccgaaagttataagcctgcccttgccgaaggctcagggcgttcgcagacctgc

SEQ ID NO: 57748 - DNA, 75 bp, synthetic construct
  source 1..75: mol_type = other DNA
cgaccgaagtgtccaacatgtcgaaagcgcagatcatccagcaggccggtaactccgtgctggcaaaagccaacc

SEQ ID NO: 57749 - DNA, 75 bp, synthetic construct
  source 1..75: mol_type = other DNA
gttatcttgcggggatgaagctgggcggaacaccgctggtcgagtacacgcgggaccggctgcaccgtgagacgg

SEQ ID NO: 57750 - DNA, 75 bp, synthetic construct
  source 1..75: mol_type = other DNA
gcgtgaacgtgctggcgaaagacggttcaatgaaaattcaggttggtgcgaatgacggcgaaaccatcacgatcg

SEQ ID NO: 57751 - DNA, 75 bp, synthetic construct
  source 1..75: mol_type = other DNA
aacggtactgataactatactgttaatgtagatagtggagcagttcaaaatgaggatggtgacgcaatttttgtt

SEQ ID NO: 57752 - DNA, 75 bp, synthetic construct
  source 1..75: mol_type = other DNA
ccattcagagaagtggcgttagagtggcacaaaatgaaatctcccaaatggtctgagggctatgcttcagacatc

SEQ ID NO: 57753 - DNA, 75 bp, synthetic construct
  source 1..75: mol_type = other DNA
cgccaacgacggtatttctgttgcgcagaccaccgaaggcgcgctgtccgaaatcaacaacaacttacagcgtat

SEQ ID NO: 57754 - DNA, 75 bp, synthetic construct
  source 1..75: mol_type = other DNA
tcgagttctatcgagcgtctgtcttctggcttgcgtattaacagcgcgaaggatgacgcagcgggtcaggcgatt

SEQ ID NO: 57755 - DNA, 75 bp, synthetic construct
  source 1..75: mol_type = other DNA
aactattgtaggccctacagtatcacaatcttttccggcctctccgactctggttccagtggaacttatcgacac

SEQ ID NO: 57756 - DNA, 75 bp, synthetic construct
  source 1..75: mol_type = other DNA
cgggaaatgcttcagtggtacgctgattatatggattcgctcgagcatggcggaaatgtggtgcatggtgagttc

SEQ ID NO: 57757 - DNA, 75 bp, synthetic construct
  source 1..75: mol_type = other DNA
gttgcagagttaggcgatgaggcaggatggcatttctatagccagcgaaatacagataactcggtaatattttct

SEQ ID NO: 57758 - DNA, 75 bp, synthetic construct
  source 1..75: mol_type = other DNA
ttacaatgaaccccatccgcatagtgcgttaggttatctctcaccaagggaatatcgacgtctgcgggtaacgtc

SEQ ID NO: 57759 - DNA, 75 bp, synthetic construct
  source 1..75: mol_type = other DNA
aagaccacatcaccatcaccgacagcctggaccgccgtgaagtgctgcacacgcagggcgaagccgggctgaagc

SEQ ID NO: 57760 - DNA, 75 bp, synthetic construct
  source 1..75: mol_type = other DNA
taatgtttggtgaggtcttcttacaaatttatggttcaactgcgacaaaacaagatgctattgatgtgtttaaag

SEQ ID NO: 57761 - DNA, 75 bp, synthetic construct
  source 1..75: mol_type = other DNA
gtgatacatccgttggatggaattgggatagtggtgcatataacgccctgattggtggtgcatctgtattaattc

SEQ ID NO: 57762 - DNA, 75 bp, synthetic construct
  source 1..75: mol_type = other DNA
cctggccgccgagcaataaccgctactacaggcataatcgcgggcgcacgcacatcagcgcagaagggcaggcat

SEQ ID NO: 57763 - DNA, 75 bp, synthetic construct
  source 1..75: mol_type = other DNA
atgtgggaacgaggcctataggagaaattaaaccgctagagctgttaaatgtactgcgtaaaattgagaagcgtg

SEQ ID NO: 57764 - DNA, 75 bp, synthetic construct
  source 1..75: mol_type = other DNA
aagaattcaatctgagaatgcattcgaaaagattgctagagagtggcatcggatgaagtcgttaaaatggtctgc

SEQ ID NO: 57765 - DNA, 75 bp, synthetic construct
  source 1..75: mol_type = other DNA
gaaaacgcagcgccgcagcctggcggatgcgcttcagcagtccggcggcgaagacggtggcagtgtggtgttccc

SEQ ID NO: 57766 - DNA, 75 bp, synthetic construct
  source 1..75: mol_type = other DNA
agcccttgctggctactctggtagtgaattgatggtgttggcagcaagattattgatccttactggcctaagaac

SEQ ID NO: 57767 - DNA, 75 bp, synthetic construct
  source 1..75: mol_type = other DNA
cgaatgatccgaaatgggttaagggaattgaaacccgagattctgtgaaccagaaccagcccaaatcggaacaaa

SEQ ID NO: 57768 - DNA, 75 bp, synthetic construct
  source 1..75: mol_type = other DNA
caaccctgatccagaaatcgtggatattgcctgcggtcgttcctctgccccgatgccgcagcgtgtaacagaaga

SEQ ID NO: 57769 - DNA, 75 bp, synthetic construct
  source 1..75: mol_type = other DNA
tcttttctacgtttagtgtaggcactgccttggctaactcgttgcaaagtcaaattgctgctattgctcaagcgg

SEQ ID NO: 57770 - DNA, 75 bp, synthetic construct
  source 1..75: mol_type = other DNA
agcagggttttacccctgagcaggtgattcgacatagcatcgccaatgaataccagggcttgttcgcgccgaaag

SEQ ID NO: 57771 - DNA, 75 bp, synthetic construct
  source 1..75: mol_type = other DNA
ggcaatgcactacggtcacggctggatcatggggaaggatggcaaacgctggcacccgtgccgctctcaggatga

SEQ ID NO: 57772 - DNA, 75 bp, synthetic construct
  source 1..75: mol_type = other DNA
gtcgaccaacgacgacttcggcggctggatcttctcggcgctggtgcgcgccaacggcggaaaatactttaacga

SEQ ID NO: 57773 - DNA, 75 bp, synthetic construct
  source 1..75: mol_type = other DNA
gtaatgctgtcaatcttgtttatctttggctggcgtggtgtcgttcccattttatgcgggatgttttgcaccaat

SEQ ID NO: 57774 - DNA, 75 bp, synthetic construct
  source 1..75: mol_type = other DNA
cagtccgaacgtgaacgcctcaagttcgaacaggaaacggcgcaactcatacccgccgatgatgtgcgaaaagag

SEQ ID NO: 57775 - DNA, 75 bp, synthetic construct
  source 1..75: mol_type = other DNA
atcagggaatgggggttcacgagttaaaaagtaatgttagcggtgccagccaggcaaaagcacaaatcgaacttt

SEQ ID NO: 57776 - DNA, 75 bp, synthetic construct
  source 1..75: mol_type = other DNA
tgaaagcgccggacacgctgaatcatcaatttactgggaagatcctgaaacaggaattttgtgtcggtgccgtcc

SEQ ID NO: 57777 - DNA, 75 bp, synthetic construct
  source 1..75: mol_type = other DNA
aatgaagagaacccgcatcagctgcagcagcttatccgcctgccggggcagcagtatgatgaggagtccggcctg

SEQ ID NO: 57778 - DNA, 75 bp, synthetic construct
  source 1..75: mol_type = other DNA
ccgcatctttagttttagatgctgcaatgaaagttaattctgggtttaaaaaaagctgggatgagatgtcatgcg

SEQ ID NO: 57779 - DNA, 75 bp, synthetic construct
  source 1..75: mol_type = other DNA
ccgttagttgttcttgccgcacgtttgctgatccttacgggagttcgtaccggtgagcttcgaggtgctttctgg

SEQ ID NO: 57780 - DNA, 75 bp, synthetic construct
  source 1..75: mol_type = other DNA
tattacaaccgccaccgctattatgacccgctgcaggggcgatatatcactcaggatccgattggactgaagggg

SEQ ID NO: 57781 - DNA, 75 bp, synthetic construct
  source 1..75: mol_type = other DNA
ttggggctgacagatcccaatgcggctgtttatacctttgccgggcatgtctttaactgggttggtgttacgcac

SEQ ID NO: 57782 - DNA, 75 bp, synthetic construct
  source 1..75: mol_type = other DNA
attgtagaggggagaaaaagacgaataacttttgcccagctttggaagaaatttctcaatagtgccgattatgca

SEQ ID NO: 57783 - DNA, 75 bp, synthetic construct
  source 1..75: mol_type = other DNA
ctgggcaaaaccatgatccggaacagattgatttgattgatttactggtccaactatggcgtggcaagatgacta

SEQ ID NO: 57784 - DNA, 75 bp, synthetic construct
  source 1..75: mol_type = other DNA
aatataacggtgggttgccaccaaatgaatcggaaaaccgatactggaaaaactctaaagcggtggccagttttt

SEQ ID NO: 57785 - DNA, 75 bp, synthetic construct
  source 1..75: mol_type = other DNA
tacagcaggccatgaacaccaaagacgaacagttttttaagcagcttggcgcacggatcgcacaggcacgtaagg

SEQ ID NO: 57786 - DNA, 75 bp, synthetic construct
  source 1..75: mol_type = other DNA
actctgccgataacattggtggcgtatattacagaccggttcagaaatacattaacgggacatggtacaacgtgg

SEQ ID NO: 57787 - DNA, 75 bp, synthetic construct
  source 1..75: mol_type = other DNA
ttgaattggctaagcattccctggctctaaacggtgagatgtggacgagaaatgctattagccgagcatactatg

SEQ ID NO: 57788 - DNA, 75 bp, synthetic construct
  source 1..75: mol_type = other DNA
agccggatatggaggtgaactcgcagccgtcggtgcgtgaagtgcgttttggtgacgggtattcgcagcgaacgg

SEQ ID NO: 57789 - DNA, 75 bp, synthetic construct
  source 1..75: mol_type = other DNA
tgtcgttctcgccggacagcaggcttaccatgaaagcactggaaatggcatgggaaacccgtggtaagcccggcg

SEQ ID NO: 57790 - DNA, 75 bp, synthetic construct
  source 1..75: mol_type = other DNA
tcactgagcgagtcttcgcgcaaacttccccgcggcgtgcggccatggccctggaccatcaatgtggcaggcaaa

SEQ ID NO: 57791 - DNA, 75 bp, synthetic construct
  source 1..75: mol_type = other DNA
cggtacgcaataattaccggacgcgctgaatataaccccgctcctgatctggcaagcgcatttgcaccacacaag

SEQ ID NO: 57792 - DNA, 75 bp, synthetic construct
  source 1..75: mol_type = other DNA
gttgcggcacgcagaacggtaaaatctgctgacatcgtgctgtatcacaaaccaggcattcccttagccgtgatt

SEQ ID NO: 57793 - DNA, 75 bp, synthetic construct
  source 1..75: mol_type = other DNA
tcaggcagagtatgagccggcgcggaaactgctgggataacagcccaatggaacgcttcttcaggagtctgaaga

SEQ ID NO: 57794 - DNA, 75 bp, synthetic construct
  source 1..75: mol_type = other DNA
aaaagatattactgcgacacaaattaccgaagcctatatatttaatgaatcaggtaacgtgtgtctaaacgcagt

SEQ ID NO: 57795 - DNA, 75 bp, synthetic construct
  source 1..75: mol_type = other DNA
acaggagaggcgctggactggctgaacatcggacggatccccctgctgatcgtcctctgtatgctggcaggtttt

SEQ ID NO: 57796 - DNA, 75 bp, synthetic construct
  source 1..75: mol_type = other DNA
aatgttttcaaaacattcttcagagcattaagcccttacgactacacactgtattgcaggaagtgggtaaaacca

SEQ ID NO: 57797 - DNA, 75 bp, synthetic construct
  source 1..75: mol_type = other DNA
tctaacccgcgtgaaaagctgacgatgaaccgctggcatatgaagctggctggcctcctggaacaggttgaggtg

SEQ ID NO: 57798 - DNA, 75 bp, synthetic construct
  source 1..75: mol_type = other DNA
ctggtgaaggcggattctgagccgggaacgctgaataaatttctgatggaacaggatgaggcgcagtattacccg

SEQ ID NO: 57799 - DNA, 75 bp, synthetic construct
  source 1..75: mol_type = other DNA
caacctcactgcgcaggataagcgtctttccgctatggaagccgcgcttaccacctttaaacaggaactgaccgg

SEQ ID NO: 57800 - DNA, 75 bp, synthetic construct
  source 1..75: mol_type = other DNA
ggaatcacactttttgagcggcacagcaaaggattacgtccgactgaaggcggcaaattgttattgcaacatgcc

SEQ ID NO: 57801 - DNA, 75 bp, synthetic construct
  source 1..75: mol_type = other DNA
atcttgatggaacgctggtggattccctgcctgcggtagaacgggcgtggagcaactgggccagacgtcatgggt

SEQ ID NO: 57802 - DNA, 75 bp, synthetic construct
  source 1..75: mol_type = other DNA
aaatacactgcacaggacgccaccacagcgcgaaaaggtcttgtccagctcagtagcgccaccaacagtgattct

SEQ ID NO: 57803 - DNA, 75 bp, synthetic construct
  source 1..75: mol_type = other DNA
tgtccccgatacttgatttgtttaacggggaaatcgtggcgtgggaaactgcctgcaggcctacagaggagctgg

SEQ ID NO: 57804 - DNA, 75 bp, synthetic construct
  source 1..75: mol_type = other DNA
gtgaatgtagatttagagtcgtgtgttcttcaccagatgtatgtgaagtaggaggttacaaggttccttttgaca

SEQ ID NO: 57805 - DNA, 75 bp, synthetic construct
  source 1..75: mol_type = other DNA
atcggcaaatgtgctttggccaacgtttatttctggcaagtggtttgaaaaggatggccgccggtttgttcatgg

SEQ ID NO: 57806 - DNA, 75 bp, synthetic construct
  source 1..75: mol_type = other DNA
gaagtgcataaaccgctgtgcgcagtgggcgcaccagcccaggttcgcaaagcagtagtgaagatgctgatggcg

SEQ ID NO: 57807 - DNA, 75 bp, synthetic construct
  source 1..75: mol_type = other DNA
accatgaacggtggtcgatgggtgacgtttaactgggatagctggcgtccaaatgtcagcaatatgagggttgtg

SEQ ID NO: 57808 - DNA, 75 bp, synthetic construct
  source 1..75: mol_type = other DNA
atgaccgcagaggagattaacggcgaatatgaatatcagaccggcgaagtgatcattgaaaccttcgaagaacgt

SEQ ID NO: 57809 - DNA, 75 bp, synthetic construct
  source 1..75: mol_type = other DNA
atcagtatgtagttacaagcgatcgctaccagttcattttgcaggaaaagaaagtggcgactgctggaaaaaata

SEQ ID NO: 57810 - DNA, 75 bp, synthetic construct
  source 1..75: mol_type = other DNA
aacaatcgccttatcttcaggctgtcgatattctgcgagcgcggcaggcaactggcttgttgcagcaaagccgta

SEQ ID NO: 57811 - DNA, 75 bp, synthetic construct
  source 1..75: mol_type = other DNA
catgatcggctttaacggcgtgaagcgtgcgaaaacctccaaccgtagcgaaaacccgttactgcaggatgtgaa

SEQ ID NO: 57812 - DNA, 75 bp, synthetic construct
  source 1..75: mol_type = other DNA
ccgacagggccgacttttcggcctttatgggaagtattggctattataatgacgagtcgatgcaggatgatattc

SEQ ID NO: 57813 - DNA, 75 bp, synthetic construct
  source 1..75: mol_type = other DNA
acgaattatagacataaatttaaccttttcaaaatcacccctatattattattgcttttattctatggggtttct

SEQ ID NO: 57814 - DNA, 75 bp, synthetic construct
  source 1..75: mol_type = other DNA
atgtggtttcactttctgcaattaaggtcggctttgaatatctcctctgctttacgccaggttgttcacggcact

SEQ ID NO: 57815 - DNA, 75 bp, synthetic construct
  source 1..75: mol_type = other DNA
tggttactggacgttggctgtggaaatatcctcgacctgagccgcaaaagtgtgaaaaaaagccagttgtgtcgg

SEQ ID NO: 57816 - DNA, 75 bp, synthetic construct
  source 1..75: mol_type = other DNA
gtggtgggcaaaccttaggcgcgttcctgtgccacggtctggctgccgaggggtatcgcgtcgcggttgtcgata

SEQ ID NO: 57817 - DNA, 75 bp, synthetic construct
  source 1..75: mol_type = other DNA
gtggtctctgtgcaatctggtctgccagttgcaggctctaaaaggtgttggtcagctaattgcaataaccctggt

SEQ ID NO: 57818 - DNA, 75 bp, synthetic construct
  source 1..75: mol_type = other DNA
tattctgcgcggtctgtcggcggtctatgaacagtctcacggcgtgctgattgatgatgacgccttgcaggccgc

SEQ ID NO: 57819 - DNA, 75 bp, synthetic construct
  source 1..75: mol_type = other DNA
gaatgataaggtattcaaggcagggttaagacgtaagatgcgaaaagcagctatggacagaaactatctggcgtc

SEQ ID NO: 57820 - DNA, 75 bp, synthetic construct
  source 1..75: mol_type = other DNA
cgaattctgagcatgctattgcgaacagacaaacattatgctggaaagcactggacaggaaaacaccgaacctgg

SEQ ID NO: 57821 - DNA, 75 bp, synthetic construct
  source 1..75: mol_type = other DNA
ttttgcggcgttgggtgagcaggtcgagcagttgggactgcaatgtcagaccgcgttttgtgctgatggccgttg

SEQ ID NO: 57822 - DNA, 75 bp, synthetic construct
  source 1..75: mol_type = other DNA
gtatgacgacagccatccggaagccctggctcgcaatactcagaaaattttccgctgggtggagaaagacacccc

SEQ ID NO: 57823 - DNA, 75 bp, synthetic construct
  source 1..75: mol_type = other DNA
actggcctgatgacccgcgacaactacagaacgataaatgacattaccctgggtaaacatccgggggtgaaacaa

SEQ ID NO: 57824 - DNA, 75 bp, synthetic construct
  source 1..75: mol_type = other DNA
atcgcgctgattgtcggttttatcggcctgcgttacggcagcgactccccggaatcttatggcctcggcaaagct

SEQ ID NO: 57825 - DNA, 75 bp, synthetic construct
  source 1..75: mol_type = other DNA
atgattctttagaaacatgtaagatgaagtgctccggaaataacattggacgttttattagatttgtattcaccg

SEQ ID NO: 57826 - DNA, 75 bp, synthetic construct
  source 1..75: mol_type = other DNA
atgctggctttcttaaaccaggttcgcaagccgaccctggaccttccgctcgaagtgcggcgcaaaatgtggttc

SEQ ID NO: 57827 - DNA, 75 bp, synthetic construct
  source 1..75: mol_type = other DNA
gtcatttgtagcatggaaacaggtgttactgtcgaatggttagcatttggcaccgattgcataaacgaaagcgtt

SEQ ID NO: 57828 - DNA, 75 bp, synthetic construct
  source 1..75: mol_type = other DNA
actacgttgagcagcgcatatcattagaccagcgcatcataaccaggccagctgctacgtacttcatgcgtgccg

SEQ ID NO: 57829 - DNA, 75 bp, synthetic construct
  source 1..75: mol_type = other DNA
gttgtcgaagttcccgatatcaccgccaatcgtcgcgccgacgattcaggaaagtggctgtttaaggacggagct

SEQ ID NO: 57830 - DNA, 75 bp, synthetic construct
  source 1..75: mol_type = other DNA
accagtattgccggcacggggtttgcgccgatgcttgaagaagcgacgcgggttaacacggaactgctggcaggt

SEQ ID NO: 57831 - DNA, 75 bp, synthetic construct
  source 1..75: mol_type = other DNA
cgctgcaacagccgctctggttggtggggctatttcatcagtattggggatcttaggctcttttgcagcaattaa

SEQ ID NO: 57832 - DNA, 75 bp, synthetic construct
  source 1..75: mol_type = other DNA
agcagagccgaaagccgcgctggtaacggaaagtgatggtaaggcctttcctcagccagcaggtgttgcgttacc

SEQ ID NO: 57833 - DNA, 75 bp, synthetic construct
  source 1..75: mol_type = other DNA
aaaggcgaagcaacaccatacacccccggaatggaaatctactttgaacgtcgtctggatctaatctggaaaggc

SEQ ID NO: 57834 - DNA, 75 bp, synthetic construct
  source 1..75: mol_type = other DNA
aggctctattacaaaaacatcctttcgtattgaagcgggctctggttcgtttccagtatattggcaagcggtggg

SEQ ID NO: 57835 - DNA, 75 bp, synthetic construct
  source 1..75: mol_type = other DNA
tacgacgataccgaagacagctcgtgttatatcccgccgttaaccaccatcaaacaggattttcgcctgctgggg

SEQ ID NO: 57836 - DNA, 75 bp, synthetic construct
  source 1..75: mol_type = other DNA
ccgaaaagctcaaagcttcgcggaagcggtataaaaaaatctggcttcaactggatatcgctaacgccaagcgat

SEQ ID NO: 57837 - DNA, 75 bp, synthetic construct
  source 1..75: mol_type = other DNA
tagtgagaatagagaaattccatggaaaacgtggcccggatacgttcttggctcgaagctcccggccagttatga

SEQ ID NO: 57838 - DNA, 75 bp, synthetic construct
  source 1..75: mol_type = other DNA
gccggaagaaactaccacggcaacagtcgcgaaaatttcagagagcgatttaactgcgacgattgaacaacgtgg

SEQ ID NO: 57839 - DNA, 75 bp, synthetic construct
  source 1..75: mol_type = other DNA
ctcacccgactgctggaccagcactacggcctcacgctaaatgacacaccgttcgccgatgaacgtgtgattgag

SEQ ID NO: 57840 - DNA, 75 bp, synthetic construct
  source 1..75: mol_type = other DNA
ttctacgatcattacaggccgaaggttgggggtagggcagatagcgcaagcagagattcagttgcggcatgtgtt

SEQ ID NO: 57841 - DNA, 75 bp, synthetic construct
  source 1..75: mol_type = other DNA
tgttgattaaaccttcgccccaaaaggtaaaggaattcctgaaaagggtccgccagacgataaaagacaatccga

SEQ ID NO: 57842 - DNA, 75 bp, synthetic construct
  source 1..75: mol_type = other DNA
tgcgccgcgctgcgggagctgaacaagcaccgggatattgttcgacagattttcgattcctccagtcgtattgtg

SEQ ID NO: 57843 - DNA, 75 bp, synthetic construct
  source 1..75: mol_type = other DNA
gttttctgcgggccggtgtggaggtcgatcgatatggccgtgccgtcgcgtaccatatctgtgaggatgattttc

SEQ ID NO: 57844 - DNA, 75 bp, synthetic construct
  source 1..75: mol_type = other DNA
cgtgtggccgataacaacgttcagcaggaacatccagtgccggaagaacagccggaagaaatcgccacggcaaca

SEQ ID NO: 57845 - DNA, 75 bp, synthetic construct
  source 1..75: mol_type = other DNA
ctgcgcgtcgttatcgctggatgaaattagcattaccggttaaacgtaatcttgatcgcacctttgaaatattaa

SEQ ID NO: 57846 - DNA, 75 bp, synthetic construct
  source 1..75: mol_type = other DNA
aacgaacaggcacagtaatagctggctataacggaacaactaaccaggacatgactatgtctggtgggctcatag

SEQ ID NO: 57847 - DNA, 75 bp, synthetic construct
  source 1..75: mol_type = other DNA
agtacaggaggctgcaacacaggaagaaattaaaacagatactgtagcggacattgtgcagtcgttgccatcgtt

SEQ ID NO: 57848 - DNA, 75 bp, synthetic construct
  source 1..75: mol_type = other DNA
gaataaggcgctgtatgttgatagcgtcagttcggtggcgggtgcgtttatcggcacctcgtctgttaccgccta

SEQ ID NO: 57849 - DNA, 75 bp, synthetic construct
  source 1..75: mol_type = other DNA
cattgacggcagcatccatcgctgggcaaaaaatgaagttatcgacaaagatcgcgaagactggaagcgtatttc

SEQ ID NO: 57850 - DNA, 75 bp, synthetic construct
  source 1..75: mol_type = other DNA
actgaaaactcagtagcaaaaatcaaccctgtcactactgccattcgtcgcgaatacaagcagacatggaaaaca

SEQ ID NO: 57851 - DNA, 75 bp, synthetic construct
  source 1..75: mol_type = other DNA
tacctacatcgaaagtcttccccagaatcctgcacctatttccatgaaacggatgcgtgaccggctgaatctcac

SEQ ID NO: 57852 - DNA, 75 bp, synthetic construct
  source 1..75: mol_type = other DNA
gctcaggactgtgcttataaatttcttgtctgcgaggataaacccggcatggcccgccctgcccttgattcctgg

SEQ ID NO: 57853 - DNA, 75 bp, synthetic construct
  source 1..75: mol_type = other DNA
cggggattatgagcacaacaagcggtagtggccagactcgtaatgcagggaagacatcatcagatggtgctcata

SEQ ID NO: 57854 - DNA, 75 bp, synthetic construct
  source 1..75: mol_type = other DNA
gcggaaactgatggtaaagcctttcctcagcctgcatgtgttgcgttaccagtacaggaagctgcaacacaggaa

SEQ ID NO: 57855 - DNA, 75 bp, synthetic construct
  source 1..75: mol_type = other DNA
atctgaaacacaggatatgctgaccgaagaggtcgctccaaaagttagcgctaacatgatgattgagtttatcgc

SEQ ID NO: 57856 - DNA, 75 bp, synthetic construct
  source 1..75: mol_type = other DNA
aacgtcgatttcgcgttctgaggaagtcttacctgactcaccgtctgcaaatgcgattgatgatgtacttcaaca

SEQ ID NO: 57857 - DNA, 75 bp, synthetic construct
  source 1..75: mol_type = other DNA
gtgaaggcactaaatgcgtttaatgacgcttttgatattgaccgtatgcaacagggcgacccggcacgcgtaatt

SEQ ID NO: 57858 - DNA, 75 bp, synthetic construct
  source 1..75: mol_type = other DNA
cgatcatcgcccacaaagaaacactgcatgtgctggaaatacgtgagcctacgtatgacgagattgaggcgctgg

SEQ ID NO: 57859 - DNA, 75 bp, synthetic construct
  source 1..75: mol_type = other DNA
atggcgcgtgatattcagcaggttatggaacggtggggggcttgggctgcaaacactcatgaagatgtatcctgg

SEQ ID NO: 57860 - DNA, 75 bp, synthetic construct
  source 1..75: mol_type = other DNA
ttcaaggcaggcatgattgtaatgcgtttttttaccggcttggagacggaagagacctccggaagcgattctaca

SEQ ID NO: 57861 - DNA, 75 bp, synthetic construct
  source 1..75: mol_type = other DNA
gcgtgatatccggcaggttcttgagtgctggggggcatgggcggcaaataaccatgaggatgtgacctggtcacc

SEQ ID NO: 57862 - DNA, 75 bp, synthetic construct
  source 1..75: mol_type = other DNA
aacgctggggggcatgggctgcaagtggtaacaccggggtggactattctccgatcgctgccggattcaaaggac

SEQ ID NO: 57863 - DNA, 75 bp, synthetic construct
  source 1..75: mol_type = other DNA
gatggcgagccggtatgtgttaaggaggacggatattttgtaaatgtgcgcatcattaatgattcgcaaatatcg

SEQ ID NO: 57864 - DNA, 75 bp, synthetic construct
  source 1..75: mol_type = other DNA
tagctatactggtaggccgctaacccgatgggcgacagaactctctttgctgatctttattcggtccagtgagct

SEQ ID NO: 57865 - DNA, 75 bp, synthetic construct
  source 1..75: mol_type = other DNA
gccatgataatttgtggctgtatggcacgattaaacaagaataatcagtatttgcacgatttgttggtggattat

SEQ ID NO: 57866 - DNA, 75 bp, synthetic construct
  source 1..75: mol_type = other DNA
tgccaacaaagcacaaaacttcgaagctgttgcacaatatcagttcgacttcggcctgcgtccatccgttgctta

SEQ ID NO: 57867 - DNA, 75 bp, synthetic construct
  source 1..75: mol_type = other DNA
gaaggattcggcgtgggtgcaacctatgctaaatcagatcgcactgacggtcaggtcgcctatggtaagagcaaa

SEQ ID NO: 57868 - DNA, 75 bp, synthetic construct
  source 1..75: mol_type = other DNA
attgaacaacatggcccacaaacggcggatgagctggcactgatgttcgggattacctcccgccgggcgaattca

SEQ ID NO: 57869 - DNA, 75 bp, synthetic construct
  source 1..75: mol_type = other DNA
agaaacagtggcggacattgtgcagtcgttgccatcgtttaccgaaacgcaagcagatgagctgatttttctgtc

SEQ ID NO: 57870 - DNA, 75 bp, synthetic construct
  source 1..75: mol_type = other DNA
aattcggtggcgatacctggacccaaacagatgtattcatgactggtcgcaccacaggtgttgcaacttatcgta

SEQ ID NO: 57871 - DNA, 75 bp, synthetic construct
  source 1..75: mol_type = other DNA
gcgagttacgcccggaacctgcggatgagattgccgaagtgttgcttaataacacatatgcgttgtttaacgtgc

SEQ ID NO: 57872 - DNA, 75 bp, synthetic construct
  source 1..75: mol_type = other DNA
gcaggtggccgggctgctccggtctggctaacgttgggtaaatatcctgatatgtcactcaaacaggcaagggaa

SEQ ID NO: 57873 - DNA, 75 bp, synthetic construct
  source 1..75: mol_type = other DNA
aacaactgttaggccatgcgctacctggcgtggcaggtgtttacaaccggagtaagtttatggctaaaaaactgg

SEQ ID NO: 57874 - DNA, 75 bp, synthetic construct
  source 1..75: mol_type = other DNA
gatcctcacgtcgtggagcagcttacaggtcatcagatgccagggatgcaacgagtctataaccattcccgttat

SEQ ID NO: 57875 - DNA, 75 bp, synthetic construct
  source 1..75: mol_type = other DNA
taaacttgccactttcacttggcattactcgacggacgatattcaggtggatgagtaagattaaaaattggccca

SEQ ID NO: 57876 - DNA, 75 bp, synthetic construct
  source 1..75: mol_type = other DNA
tgccactccgcgcgccccattttttgccggaatccgctttggcgacgcgcccaccgcgctggcgcccgagcgggc

SEQ ID NO: 57877 - DNA, 75 bp, synthetic construct
  source 1..75: mol_type = other DNA
gccctgcagatggcgctgtggcggcgtaattatcgttcactcgggccgcggaagccagtactgttcagcagatta

SEQ ID NO: 57878 - DNA, 75 bp, synthetic construct
  source 1..75: mol_type = other DNA
aaaaatataacactgggcaactcttcgggttagatggtataaaagcagataatccaataaaagcaaagcaaggga

SEQ ID NO: 57879 - DNA, 75 bp, synthetic construct
  source 1..75: mol_type = other DNA
tatttatcacacagaccgggcgttctggtctgcctgccgggaaatccacaacctgactgacgcgctgtcccggca

SEQ ID NO: 57880 - DNA, 75 bp, synthetic construct
  source 1..75: mol_type = other DNA
ccgcattcacagtatgcgccaaaagacagcccgacgtttaccggaacccccaaagcgccaacgccagcggcgggg

SEQ ID NO: 57881 - DNA, 75 bp, synthetic construct
  source 1..75: mol_type = other DNA
tgaagtagatggcgatgatgaagccatcttcaggccgatacaaaagtacatcaatggcacatggtataacgttgc

SEQ ID NO: 57882 - DNA, 75 bp, synthetic construct
  source 1..75: mol_type = other DNA
acgctggacacgctgaaagaaattgccgcagccattaacaatgacccgaaattcagtaccaccattaacaatgcg

SEQ ID NO: 57883 - DNA, 75 bp, synthetic construct
  source 1..75: mol_type = other DNA
tgttagcctcattagtcggtggtgagtactggtggttagtcattatacctgttggcgcgcatatcagtttttcgc

SEQ ID NO: 57884 - DNA, 75 bp, synthetic construct
  source 1..75: mol_type = other DNA
ccaataaatttcttgatatagatagtaccactcttgctggatatgattttagcgggatggatctacatcgtgcca

SEQ ID NO: 57885 - DNA, 75 bp, synthetic construct
  source 1..75: mol_type = other DNA
aaagcttaagtcagagtgcgaaggcagagctggataaagccgcactcgaggtgcaaaaccaggcgaattatatac

SEQ ID NO: 57886 - DNA, 75 bp, synthetic construct
  source 1..75: mol_type = other DNA
aatgagccggagtggatgctggagtttcgtctcaacgcctatcgcgcatggctggagatggaagaaccgcactgg

SEQ ID NO: 57887 - DNA, 75 bp, synthetic construct
  source 1..75: mol_type = other DNA
ctgtggcgtgaatattcgcccgtcacgtatgccagaaccgatgccctgttgttctggctgggcattgacttctca

SEQ ID NO: 57888 - DNA, 75 bp, synthetic construct
  source 1..75: mol_type = other DNA
gatggctttggcgcgactgatggtgagctgaccatggaggtggcactgaaggcgtatcagatgctggcccgcatg

SEQ ID NO: 57889 - DNA, 75 bp, synthetic construct
  source 1..75: mol_type = other DNA
gttcacttggcccaaccaccgcaggtcgtatggactcctacgtggatctgctgcaatcccacggcggcagcatga

SEQ ID NO: 57890 - DNA, 75 bp, synthetic construct
  source 1..75: mol_type = other DNA
taggcgcagggaagcttgacactaaattattaatggattacccagttgaaattccaccaaaagagattaaagaat

SEQ ID NO: 57891 - DNA, 75 bp, synthetic construct
  source 1..75: mol_type = other DNA
ccgcccccgacccggaacaggtgccgggtgcggtcatgcgcctttcctgtgcgacatggtggaacagtcagttaa

SEQ ID NO: 57892 - DNA, 75 bp, synthetic construct
  source 1..75: mol_type = other DNA
gaagggcatttttatctttataaaagcagaacaaaaggacgcaagtttaaacgttcgaaagacagagcagccagg

SEQ ID NO: 57893 - DNA, 75 bp, synthetic construct
  source 1..75: mol_type = other DNA
acagtgagttttccagtaaacgccgccagacccgcaaagaagttttccttggcagaatggatgacttgcttccct

SEQ ID NO: 57894 - DNA, 75 bp, synthetic construct
  source 1..75: mol_type = other DNA
acattttccgccagcaggtcagggaatccgcagagcgggaaaaagccggactctcacgtccggtgtggatagcgc

SEQ ID NO: 57895 - DNA, 75 bp, synthetic construct
  source 1..75: mol_type = other DNA
cccggcagcaggccatcgccgcaggagcgaaaggaccggatatcccggattcactgccggactatacggagtatg

SEQ ID NO: 57896 - DNA, 75 bp, synthetic construct
  source 1..75: mol_type = other DNA
caaaaacaagtgcaacttgccgtgacaaataatgatgaaaatagtacctatttaattcaatcatgggtggaaaat

SEQ ID NO: 57897 - DNA, 75 bp, synthetic construct
  source 1..75: mol_type = other DNA
gccggactctcacgtccggtgtggatagcgcaggcgtatgagcagcagatagcggagagtcgcaggccggaagag

SEQ ID NO: 57898 - DNA, 75 bp, synthetic construct
  source 1..75: mol_type = other DNA
atgagtactggttgatactggaagacgcacaaacggaaacggggtatcagaagtacccggtcattatcgatctgg

SEQ ID NO: 57899 - DNA, 75 bp, synthetic construct
  source 1..75: mol_type = other DNA
acaagtatgttcttatcctggagaatgcggacagcgcaacagagtatggtcgctacccgatcacgatcgacctgg

SEQ ID NO: 57900 - DNA, 75 bp, synthetic construct
  source 1..75: mol_type = other DNA
ccaccggcggcgaagatattgatgacattgatgatatcaagctctttgtctatgaagagagctacggtatcagta

SEQ ID NO: 57901 - DNA, 75 bp, synthetic construct
  source 1..75: mol_type = other DNA
tatccagcacagccaccgtggcgcttaccgtggataacaccatggtgatggccacagtggattacgtggatgaca

SEQ ID NO: 57902 - DNA, 75 bp, synthetic construct
  source 1..75: mol_type = other DNA
attgccgctgttgattttgatcgggaaacattaaaatcactaggtgtagatcctaatatatcgcattatttttcc

SEQ ID NO: 57903 - DNA, 75 bp, synthetic construct
  source 1..75: mol_type = other DNA
ctcatattatcaaccatggccagcagagtgtttatggcggagtatctaatggaagtattattgaatcgggtggat

SEQ ID NO: 57904 - DNA, 75 bp, synthetic construct
  source 1..75: mol_type = other DNA
cgcggacaaacaaaacgatatttcgtcgattgtggtggaactggattacccggtagatatcagcgaagtttcccg

SEQ ID NO: 57905 - DNA, 75 bp, synthetic construct
  source 1..75: mol_type = other DNA
gtgggcggggattcgttcgccctggtgaaactgaaaaacaacaaaattggggtttttcaggcataacaaaaagcg

SEQ ID NO: 57906 - DNA, 75 bp, synthetic construct
  source 1..75: mol_type = other DNA
tcactcaggatccgattgggctgaaggggggatggaatttttatcagtatccgttgaatccgatctcaaatatag

SEQ ID NO: 57907 - DNA, 75 bp, synthetic construct
  source 1..75: mol_type = other DNA
ccgcatttgctggcattttacttcacactccattcggcagaaggaaatatcaacgggcaacagattcatgcattc

SEQ ID NO: 57908 - DNA, 75 bp, synthetic construct
  source 1..75: mol_type = other DNA
tcgacaagggcaatattcagttcgaccgtctggtcattgaatgcaccggcatggccgatcccggcccgattattc

SEQ ID NO: 57909 - DNA, 75 bp, synthetic construct
  source 1..75: mol_type = other DNA
gatgctgtccgtaccttctgaccagggtcgccaaacttaccggtctgaaaacgtacagacagttaccgggatttt

SEQ ID NO: 57910 - DNA, 75 bp, synthetic construct
  source 1..75: mol_type = other DNA
atgaccactttcaccgacaaagaactgattaaagaaatcaaagagcgtatcagcagcctggacgttcgagacaat

SEQ ID NO: 57911 - DNA, 75 bp, synthetic construct
  source 1..75: mol_type = other DNA
gccgggaaattattctgggctttaacggatgaaagcaataaagagcaagcggacgttattcctgtttatgctgcc

SEQ ID NO: 57912 - DNA, 75 bp, synthetic construct
  source 1..75: mol_type = other DNA
cccgtattgataaccgtctggttcacggtcaggttggcgtgacctggacatccaccatcggtgcgaatctgttgg

SEQ ID NO: 57913 - DNA, 75 bp, synthetic construct
  source 1..75: mol_type = other DNA
ttctccagctcttggcgataccggcattggcaaccagtcaggcaccgcaactggttcttatgtagaattgaaagc

SEQ ID NO: 57914 - DNA, 75 bp, synthetic construct
  source 1..75: mol_type = other DNA
tgtgcggggcgttggtattaacgcctcccgattgccttccgccagatcgcctggctttggtgaaccatatggtta

SEQ ID NO: 57915 - DNA, 75 bp, synthetic construct
  source 1..75: mol_type = other DNA
agcaatgcggatgatattgtcgacactgttgccagaaggccaattcagaaattgattgggggaatatggtacaac

SEQ ID NO: 57916 - DNA, 75 bp, synthetic construct
  source 1..75: mol_type = other DNA
tggctgacctacggcagcggctacctggcaggcatgaaactcggcgacacaccgctggtggagtacacccgcgac

SEQ ID NO: 57917 - DNA, 75 bp, synthetic construct
  source 1..75: mol_type = other DNA
acagaatggtaaataacattaccctgggtagcatccgggggcgaaacgatgaaactttccctgacgctggaagcc

SEQ ID NO: 57918 - DNA, 75 bp, synthetic construct
  source 1..75: mol_type = other DNA
cgactggttcaggtacttcagttggtggatatccgcgtacctgaccatctgattgtcggcggcaggcaaatctat

SEQ ID NO: 57919 - DNA, 75 bp, synthetic construct
  source 1..75: mol_type = other DNA
agacggtatccgtgtggatgttcgtgcggtggacgctcaggctgattatcgggaacgcataacgcaggccaacca

SEQ ID NO: 57920 - DNA, 75 bp, synthetic construct
  source 1..75: mol_type = other DNA
cctcattcagcgggccctgaaaaccctgggccgccatcttcatgaacccggtgtggccttcacctccacgcatgc

SEQ ID NO: 57921 - DNA, 75 bp, synthetic construct
  source 1..75: mol_type = other DNA
ttgtcgctatcaccagagatgcttcaacgcttaatcctgaaggttttagcgttgttgaggttcctgatattacct

SEQ ID NO: 57922 - DNA, 75 bp, synthetic construct
  source 1..75: mol_type = other DNA
atgatgcagcatttaaaaaatattaagtctggaaatcctaaaacgaaagaacaatatcagctaacaaagaatttt

SEQ ID NO: 57923 - DNA, 75 bp, synthetic construct
  source 1..75: mol_type = other DNA
cgggtaacgctaaaacactggaacagtatgagttaacaaagaagcatggagtcatctggctttacactgaagacg

SEQ ID NO: 57924 - DNA, 75 bp, synthetic construct
  source 1..75: mol_type = other DNA
cctcattcagcgagccctgaaaactctggaccgtcatcttcatgaacccggtgtggccttcacctccacgcatgc

SEQ ID NO: 57925 - DNA, 75 bp, synthetic construct
  source 1..75: mol_type = other DNA
accgctttacgcagcgccgccagcgatggtagtgcctgatgaaatggatttgcttacctgccatctcgacggtgt

SEQ ID NO: 57926 - DNA, 75 bp, synthetic construct
  source 1..75: mol_type = other DNA
tgtatgcctcatgtcacggctgtaacacgatggctgaggcgattacctaccgccagaaattcaacgaacgtgagg

SEQ ID NO: 57927 - DNA, 75 bp, synthetic construct
  source 1..75: mol_type = other DNA
ttttgcagaggcaacgattcaggcaattgatggtgagttaaaaataggctctcagatacagtattctcctgagcg

SEQ ID NO: 57928 - DNA, 75 bp, synthetic construct
  source 1..75: mol_type = other DNA
atgccggggcgcacaaggtggatggcaatcagtttgaagccttaccggcagaggtgcgtcaggacatgcagcagc

SEQ ID NO: 57929 - DNA, 75 bp, synthetic construct
  source 1..75: mol_type = other DNA
gatggacgagtggtacaaagattcgcccaatctggtggtgatcaccggtcgtaacctgacggttagccgttcgtt

SEQ ID NO: 57930 - DNA, 75 bp, synthetic construct
  source 1..75: mol_type = other DNA
atcggggggcatggtacccccacatctattgaatccgcaacgcgcagtatcatgacagctaaagatctagcatat

SEQ ID NO: 57931 - DNA, 75 bp, synthetic construct
  source 1..75: mol_type = other DNA
gatatccgggtaccggaccatctgatagtcggtggcagccaggttttctcctttgcggaacacggtctgctttaa

SEQ ID NO: 57932 - DNA, 75 bp, synthetic construct
  source 1..75: mol_type = other DNA
actcagttaagcagtgcgaccaacagtgaatccgaaatactggccgcaacaccgaaggctgtgaaggctgcatat

SEQ ID NO: 57933 - DNA, 75 bp, synthetic construct
  source 1..75: mol_type = other DNA
catcacgggcagttcaggaaatccgggcagcacgcgaacagtgggaacgtgacaacggatttatcagcaacggaa

SEQ ID NO: 57934 - DNA, 75 bp, synthetic construct
  source 1..75: mol_type = other DNA
attctcgcgccagcttgcgccgcagctccctgcgatgcaaaacgaactgctggataagcactacctgcgtaagca

SEQ ID NO: 57935 - DNA, 75 bp, synthetic construct
  source 1..75: mol_type = other DNA
atatcgctagccgtctgcgtgatatgacaacagccgctcgcgatctcactgatcttcagaatcgtatgggtcaat

SEQ ID NO: 57936 - DNA, 75 bp, synthetic construct
  source 1..75: mol_type = other DNA
gattttctcaaaagctgggacattgaaaacgaagacggtgaacgcctgagtctggaggacgtgtactggtcaggg

SEQ ID NO: 57937 - DNA, 75 bp, synthetic construct
  source 1..75: mol_type = other DNA
ctgacgggaaaacatccctccgggaatacgcggggtatcatggcggcggcggagggtttggtggtcagttgcggg

SEQ ID NO: 57938 - DNA, 75 bp, synthetic construct
  source 1..75: mol_type = other DNA
tcgcctccatgcggctgtttgcccgcttatccctggatagcgccctgccggagcgcaccaccatcatgaatttcc

SEQ ID NO: 57939 - DNA, 75 bp, synthetic construct
  source 1..75: mol_type = other DNA
tacgggaggcatcgcgctgcccgcctcccgtcaccatctggcagacactgctgtcccggttgctggaccagcact

SEQ ID NO: 57940 - DNA, 75 bp, synthetic construct
  source 1..75: mol_type = other DNA
atgacgtaccgatggacgctgaaacactgattgctctgagtgctgctgcagagcaggcgatgtttaccaaaggtc

SEQ ID NO: 57941 - DNA, 75 bp, synthetic construct
  source 1..75: mol_type = other DNA
atgagcgaaatccgatttgtaactctggcatccgacattaacaatattaaagaagtttattctgatgatgagtta

SEQ ID NO: 57942 - DNA, 75 bp, synthetic construct
  source 1..75: mol_type = other DNA
aacagacgccttatcttcgtgcagtcgatattttgcgggcgcggcaggctacaggtctgctgcgtcgcagccata

SEQ ID NO: 57943 - DNA, 75 bp, synthetic construct
  source 1..75: mol_type = other DNA
gtataccgcaacggaaacggataatactgaacacggaaaagccttatggtctggtctgacagcaggaacatacgg

SEQ ID NO: 57944 - DNA, 75 bp, synthetic construct
  source 1..75: mol_type = other DNA
ctaagggaaaaacaatgaggctttacataataggaaatggatttgacatgcgtcatggcttaccaacaggataca

SEQ ID NO: 57945 - DNA, 75 bp, synthetic construct
  source 1..75: mol_type = other DNA
tggactgagcgaacccatcgggaaatttccgatggtcgatgactggcatccgtcgccggattttcgacgacgggc

SEQ ID NO: 57946 - DNA, 75 bp, synthetic construct
  source 1..75: mol_type = other DNA
acggagaacaatccaggaaagaagctctcaagtcttatctcacaacctatggatgggtaacgcttggcgcgtggt

SEQ ID NO: 57947 - DNA, 75 bp, synthetic construct
  source 1..75: mol_type = other DNA
gagagctaccataatccgtggcaatacagcccaatgtctgctccggaaggggatgattcattgttgattgaaagg

SEQ ID NO: 57948 - DNA, 75 bp, synthetic construct
  source 1..75: mol_type = other DNA
acccaaccagtcgtaatgaggccgaagaaatcactcaacgcgtggccgggcaactggataccgcgttactactgg

SEQ ID NO: 57949 - DNA, 75 bp, synthetic construct
  source 1..75: mol_type = other DNA
ttacagatgccagactttgcaaaggtttcagtgactgggctagttcagtcaaagaaggcgcatcgaatgacttca

SEQ ID NO: 57950 - DNA, 75 bp, synthetic construct
  source 1..75: mol_type = other DNA
catcaaccaagaccacaggccaataacgttgccttatcatcaagtagcaaaggtggagtatgtagctggtattct

SEQ ID NO: 57951 - DNA, 75 bp, synthetic construct
  source 1..75: mol_type = other DNA
aacagtatccaatacgggtgatgttaacgttagcaatgaagcgacagggttcagcatcacaaccaacagtgggaa

SEQ ID NO: 57952 - DNA, 75 bp, synthetic construct
  source 1..75: mol_type = other DNA
gagtctttaccacgccaggaaaaaatgaatgcgcttgcgaaatttctaaacgttgatgttgtttggcttcagcac

SEQ ID NO: 57953 - DNA, 75 bp, synthetic construct
  source 1..75: mol_type = other DNA
tgcgtctgcttcaaaagatgaggcgaccagacaagcgtcagcagcgaaaggtagtgccacgacagcaacaacgaa

SEQ ID NO: 57954 - DNA, 75 bp, synthetic construct
  source 1..75: mol_type = other DNA
ggcggaaatgcagaccaccatcacagaaacccgcaatgaaatcacgcagacggtcagtaaaacgctggaggacca

SEQ ID NO: 57955 - DNA, 75 bp, synthetic construct
  source 1..75: mol_type = other DNA
gcagagtattctggtgaacaaaaccccgctgacggacacggacggtaatcccgtgatacacggtgtgaccgccgt

SEQ ID NO: 57956 - DNA, 75 bp, synthetic construct
  source 1..75: mol_type = other DNA
ctttaatgaaattacccggcattcggcatgggatcgcatgtcgcaagctggtgcgcaattgatgacatggttcgg

SEQ ID NO: 57957 - DNA, 75 bp, synthetic construct
  source 1..75: mol_type = other DNA
gaacacaggattacggacaggccgtagcctcgtggaatcagtatgctcaggacaataatctgacaccggagcagg

SEQ ID NO: 57958 - DNA, 75 bp, synthetic construct
  source 1..75: mol_type = other DNA
actagcttaaacaaacttttcattcaagttgtttttggagaacaatggattctgtctgcggatatattattttgg

SEQ ID NO: 57959 - DNA, 75 bp, synthetic construct
  source 1..75: mol_type = other DNA
tgcaaagcgggcagacgttcagcgagttccgggaggcgctgcaaccgctgctgataaaacgcggatggtggggcg

SEQ ID NO: 57960 - DNA, 75 bp, synthetic construct
  source 1..75: mol_type = other DNA
ctgaaactggactacgcaggtaaagacggctggagcgctagcgctacgctggaaggcgggccgaacctgagctac

SEQ ID NO: 57961 - DNA, 75 bp, synthetic construct
  source 1..75: mol_type = other DNA
acgaacactggcataagccagagcaggcgtttctcaccgatgaccaccggaccattctgcgcttcgccgtagagg

SEQ ID NO: 57962 - DNA, 75 bp, synthetic construct
  source 1..75: mol_type = other DNA
cagcggtagccaggcgaccacggtattccgcgaagcgcgcgtgttaagcaaccgctttagtatgctggcagatgc

SEQ ID NO: 57963 - DNA, 75 bp, synthetic construct
  source 1..75: mol_type = other DNA
catccccgtggggatgattgccgggattacgcgccataagtggcaggataacttgatcaacgccatcgccttact

SEQ ID NO: 57964 - DNA, 75 bp, synthetic construct
  source 1..75: mol_type = other DNA
acagcaatatcattgatatgccagtgggggacggagatgtaatattaacatttgaagttcagtcgagcggcagtg

SEQ ID NO: 57965 - DNA, 75 bp, synthetic construct
  source 1..75: mol_type = other DNA
tcgatgttctgttctggtgtgccggttcgcagggaagtatgtacccgttcaatggctgggtgagtaatgagtcca

SEQ ID NO: 57966 - DNA, 60 bp, synthetic construct
  source 1..60: mol_type = other DNA
atgaaccggtttattattgcggatgcgacgaaatgtatcggttgccgtacctgtgaagtg

SEQ ID NO: 57967 - DNA, 75 bp, synthetic construct
  source 1..75: mol_type = other DNA
tcgcgtacgcacttaaccagtggccggcactgacgtactatgcgaacgatggctgggtggaaatcgacaacaaca

SEQ ID NO: 57968 - DNA, 75 bp, synthetic construct
  source 1..75: mol_type = other DNA
cggtgtatgacccgacggtacagtttgagttctggttttcggagacaaaaatcgcagacatatctcaggtggaaa

SEQ ID NO: 57969 - DNA, 75 bp, synthetic construct
  source 1..75: mol_type = other DNA
gccgtctgaacaatgtggagccagaaaagtggctgcgttacgtcattgaacatatccaggactggccggcaaacc

SEQ ID NO: 57970 - DNA, 75 bp, synthetic construct
  source 1..75: mol_type = other DNA
acgatttgcccgaccggtgccatcgtcgagccatataccgtcgatgctcgccgctgtatctcttatctcaccatc

SEQ ID NO: 57971 - DNA, 75 bp, synthetic construct
  source 1..75: mol_type = other DNA
ttcaggcaaatttacgctgattacgaactgcttccccctttccaacagctcgagcgaggtagctatcaccttgct

SEQ ID NO: 57972 - DNA, 75 bp, synthetic construct
  source 1..75: mol_type = other DNA
gccttacggggagtggccgtaggccggaaaaactggctctgtgtgtcacgaaggagtacttatggcaacaatgtg
